United States Patent Application Publication US 2007/0054278 A1 - sequence listing, part 115

SEQ ID NO: 139510 - DNA, 201 bp, Homo sapiens
tagaagcagaatgaggcctagggggagttgggcaaggccagagccctagctgcagccaagcacatggccaaggccagctcctggaagggcagggctccgargcaggaggcaggaggctgcccgtggctacccgtcctcacacccctgcagcttgctagtctgtctgtgggctgggtgtgaatcaaggcagtgggatggtgt

SEQ ID NO: 139511 - DNA, 201 bp, Homo sapiens
cccacagggcatccttctcaactggaccaagggcttcaaggcctcaggagcagaagggaacaatgtcgtggggcttctgcgagacgctatcaaacggagargggtgagggggcacctgtacctgccgggggggctgccctgggccacccaccccagcactgcctgcctttctccttggcttccagcactgcagcttctgtg

SEQ ID NO: 139512 - DNA, 201 bp, Homo sapiens
acctgggtggcactaacttcagggtgatgctggtgaaggtgggagaaggtgaggaggggcagtggagcgtgaagaccaaacaccagatgtactccatcccygaggacgccatgaccggcactgctgagatggtgagcagcgcaggggccggggcagggggccaaggccatgcaggatctcagggcccagctagtcctgacg

SEQ ID NO: 139513 - DNA, 201 bp, Homo sapiens
gcttccagcactgcagcttctgtgcttcttggcaggactttgaaatggatgtggtggcaatggtgaatgacacggtggccacgatgatctcctgctactasgaagaccatcagtgcgaggtcggcatgatcgtgggtaagggctccttgcacccctgccccttccagactgctgaggctccctgtgtacaacaggcttcaa

SEQ ID NO: 139514 - DNA, 201 bp, Homo sapiens
gcttctgtgcttcttggcaggactttgaaatggatgtggtggcaatggtgaatgacacggtggccacgatgatctcctgctactacgaagaccatcagtgmgaggtcggcatgatcgtgggtaagggctccttgcacccctgccccttccagactgctgaggctccctgtgtacaacaggcttcaagggccctgtggggtg

SEQ ID NO: 139515 - DNA, 201 bp, Homo sapiens
cttctgtgcttcttggcaggactttgaaatggatgtggtggcaatggtgaatgacacggtggccacgatgatctcctgctactacgaagaccatcagtgcraggtcggcatgatcgtgggtaagggctccttgcacccctgccccttccagactgctgaggctccctgtgtacaacaggcttcaagggccctgtggggtga

SEQ ID NO: 139516 - DNA, 201 bp, Homo sapiens
tgcttcttggcaggactttgaaatggatgtggtggcaatggtgaatgacacggtggccacgatgatctcctgctactacgaagaccatcagtgcgaggtcrgcatgatcgtgggtaagggctccttgcacccctgccccttccagactgctgaggctccctgtgtacaacaggcttcaagggccctgtggggtgaggacca

SEQ ID NO: 139517 - DNA, 201 bp, Homo sapiens
cttcaccttctcctttcctgtgaggcacgaagacatcgataaggtgggccgggtggaggggcagaaggcagatgaggggaggcacaggcaccccagaggawctctgccttcaaatgtagcccccataccatgtgctcagaagggagatctggattcaaattgtggccatgtcacctgccacctctaatgctgtggaaaaga

SEQ ID NO: 139518 - DNA, 201 bp, Homo sapiens
tcttggcaggactttgaaatggatgtggtggcaatggtgaatgacacggtggccacgatgatctcctgctactacgaagaccatcagtgcgaggtcggcaygatcgtgggtaagggctccttgcacccctgccccttccagactgctgaggctccctgtgtacaacaggcttcaagggccctgtggggtgaggaccaaact

SEQ ID NO: 139519 - DNA, 201 bp, Homo sapiens
agccctatgcatcacttgttaattacttagtaactgtaacaataatagtttccaataagtgagccttagtctctgcgcaagggtcagtttattgagcacaygggggccttgcagtgggggcaggtgatctgctcctgggagccgccagcctctcctctcctgctcttcatcttcctccgtggtgggaaattgtctcactgc

SEQ ID NO: 139520 - DNA, 201 bp, Homo sapiens
ggcaggactttgaaatggatgtggtggcaatggtgaatgacacggtggccacgatgatctcctgctactacgaagaccatcagtgcgaggtcggcatgatsgtgggtaagggctccttgcacccctgccccttccagactgctgaggctccctgtgtacaacaggcttcaagggccctgtggggtgaggaccaaactactt

SEQ ID NO: 139521 - DNA, 201 bp, Homo sapiens
cccctccctgtgcaggtagagcagatcctggcagagttccagctgcaggaggaggacctgaagaaggtgatgagacggatgcagaaggagatggaccgcgrcctgaggctggagacccatgaagaggccagtgtgaagatgctgcccacctacgtgcgctccaccccagaaggctcaggtaccacatggtaaccggctcct

SEQ ID NO: 139522 - DNA, 201 bp, Homo sapiens
ttggcaggactttgaaatggatgtggtggcaatggtgaatgacacggtggccacgatgatctcctgctactacgaagaccatcagtgcgaggtcggcatgwtcgtgggtaagggctccttgcacccctgccccttccagactgctgaggctccctgtgtacaacaggcttcaagggccctgtggggtgaggaccaaactac

SEQ ID NO: 139523 - DNA, 201 bp, Homo sapiens
gacagtccccccgacctccaccccaggcacgggctgcaatgcctgctacatggaggagatgcagaatgtggagctggtggagggggacgagggccgcatgygcgtcaataccgagtggggcgccttcggggactccggcgagctggacgagttcctgctggagtatgaccgcctggtggacgagagctctgcaaaccccgg

SEQ ID NO: 139524 - DNA, 201 bp, Homo sapiens
gcaggactttgaaatggatgtggtggcaatggtgaatgacacggtggccacgatgatctcctgctactacgaagaccatcagtgcgaggtcggcatgatcrtgggtaagggctccttgcacccctgccccttccagactgctgaggctccctgtgtacaacaggcttcaagggccctgtggggtgaggaccaaactactta

SEQ ID NO: 139525 - DNA, 201 bp, Homo sapiens
catggaggagatgcagaatgtggagctggtggagggggacgagggccgcatgtgcgtcaataccgagtggggcgccttcggggactccggcgagctggackagttcctgctggagtatgaccgcctggtggacgagagctctgcaaaccccggtcagcagctgtaaggatgcccccctcccccacaacccaggccctgggc

SEQ ID NO: 139526 - DNA, 201 bp, Homo sapiens
ggactttgaaatggatgtggtggcaatggtgaatgacacggtggccacgatgatctcctgctactacgaagaccatcagtgcgaggtcggcatgatcgtgkgtaagggctccttgcacccctgccccttccagactgctgaggctccctgtgtacaacaggcttcaagggccctgtggggtgaggaccaaactacttaaca

SEQ ID NO: 139527 - DNA, 201 bp, Homo sapiens
ccctatgtccaggtatgagaagctcataggtggcaagtacatgggcgagctggtgcggcttgtgctgctcaggctcgtggacgaaaacctgctcttccacrgggaggcctccgagcagctgcgcacacgcggagccttcgagacgcgcttcgtgtcgcaggtggagaggtgtgcggaggaggagggtgggtgcaaagggca

SEQ ID NO: 139528 - DNA, 201 bp, Homo sapiens
cctctccctggacctgggtggcactaacttcagggtgatgctggtgaaggtgggagaaggtgaggaggggcagtggagcgtgaagaccaaacaccagatgyactccatccccgaggacgccatgaccggcactgctgagatggtgagcagcgcaggggccggggcagggggccaaggccatgcaggatctcagggcccagc

SEQ ID NO: 139529 - DNA, 201 bp, Homo sapiens
tgtggaggatgaggtgggaggagggacggcagccctgcttctcttctgcccagcttcaaggagcggttccatgccagcgtgcgcaggctgacgcccagctrcgagatcaccttcatcgagtcggaggagggcagtggccggggcgcggccctggtctcggcggtggcctgtaagaaggcctgtatgctgggccagtgagag

SEQ ID NO: 139530 - DNA, 201 bp, Homo sapiens; identical to SEQ ID NO: 24878

SEQ ID NO: 139531 - DNA, 201 bp, Homo sapiens; identical to SEQ ID NO: 24879

SEQ ID NO: 139532 - DNA, 201 bp, Homo sapiens
ctcctcatgggtgtcatcttcaagatgacagctccactgtgcctccaagaggatgctccaccaccctatctgtgattccttggttagcaggacaggctgckgcactgagggtaggaaaggcaagtccattgatggctggaatacatgtcaatccaagtcaagagaaaatgccgccctttccaggttggaaggggcccgatt

SEQ ID NO: 139533 - DNA, 201 bp, Homo sapiens
gctgacagtccccccgacctccaccccaggcacgggctgcaatgcctgctacatggaggagatgcagaatgtggagctggtggagggggacgagggccgcrtgtgcgtcaataccgagtggggcgccttcggggactccggcgagctggacgagttcctgctggagtatgaccgcctggtggacgagagctctgcaaaccc

SEQ ID NO: 139534 - DNA, 201 bp, Homo sapiens
ctgacgggaggtgccacctgtctaccaggggtggggagagcgggggctggaggaccacccagcctcagaggcagctggaggcctgggtgaacaggactggycaacatgtccccaagtcccacagtcaccatctggccagcattgagaggggaacgggctgaggaagagttagtggcaagaggaaccccagccagtcacacc

SEQ ID NO: 139535 - DNA, 201 bp, Homo sapiens
gtcggcatgatcgtgggtaagggctccttgcacccctgccccttccagactgctgaggctccctgtgtacaacaggcttcaagggccctgtggggtgaggrccaaactacttaacaaccggtgatgtcagagcagagcctggtgctacagcctgggtggtcttggggtatcaagatggaagcaccgtgtacagtaggaagc

SEQ ID NO: 139536 - DNA, 201 bp, Homo sapiens
acccctgaccatggggaggactggggtgcagggaacatagaagcagaatgaggcctagggggagttgggcaaggccagagccctagctgcagccaagcacrtggccaaggccagctcctggaagggcagggctccgaagcaggaggcaggaggctgcccgtggctacccgtcctcacacccctgcagcttgctagtctgtc

SEQ ID NO: 139537 - DNA, 201 bp, Homo sapiens
tgcctgctacatggaggagatgcagaatgtggagctggtggagggggacgagggccgcatgtgcgtcaataccgagtggggcgccttcggggactccggckagctggacgagttcctgctggagtatgaccgcctggtggacgagagctctgcaaaccccggtcagcagctgtaaggatgcccccctcccccacaacccag

SEQ ID NO: 139538 - DNA, 201 bp, Homo sapiens
ggcagggagactgtgcacagacctggggggaagtggatagggagaggtttcgtacactcggggtgggcctgtgcctgtggctggaggggcgtcctttgccycttggcccacatttgcactgactcctcactctgcccagagtcagccaagagaaaaacattaacccagagtctggggtctagggttgaaaagctaaggcaa

SEQ ID NO: 139539 - DNA, 201 bp, Homo sapiens
agaactatatttgtcgtcttaccccaataagcctgcactctactaggacagccatgacagcactttgggaccctagatataagtgtgaattgctggctggkcatggtggctcacgcctgtaatcccagcattttggggggctgaggcaggtagatcacctgaggtcaggagttgaagaccagcctggccaacacggtgaaa

SEQ ID NO: 139540 - DNA, 201 bp, Homo sapiens
ctgtcaatcagaaccctgagcaactaagaaatgggggtaccactgggacatagagcaaggtcccttctgattctgctcttgtctttctctccccatgaaayggggagttcactatctactgagacatcctagcccacagctgcacagttctgtctttttagaaagctctaagcagaaacaatgttcatccatcctcctcgg

SEQ ID NO: 139541 - DNA, 201 bp, Homo sapiens
ctccaccccaggcacgggctgcaatgcctgctacatggaggagatgcagaatgtggagctggtggagggggacgagggccgcatgtgcgtcaataccgagyggggcgccttcggggactccggcgagctggacgagttcctgctggagtatgaccgcctggtggacgagagctctgcaaaccccggtcagcagctgtaagg

SEQ ID NO: 139542 - DNA, 201 bp, Homo sapiens
gggccagccctacatcttcagctcccatagcgctggctcaggaagaaaccccaagcagcattcagcacaccccaagggacaaccccatcatatgacatgcyaccctctccatgcccaacctaagattgtgtgggttttttaattaaaaatgttaaaagttttaaacatggcctgtccactgttctttgacttctgtgcatt

SEQ ID NO: 139543 - DNA, 201 bp, Homo sapiens
gacctccaccccaggcacgggctgcaatgcctgctacatggaggagatgcagaatgtggagctggtggagggggacgagggccgcatgtgcgtcaataccragtggggcgccttcggggactccggcgagctggacgagttcctgctggagtatgaccgcctggtggacgagagctctgcaaaccccggtcagcagctgta

SEQ ID NO: 139544 - DNA, 201 bp, Homo sapiens
  misc_feature (1)...(201): n = A,T,C or G
aagacatcgataaggtgggccgggtggaggggcagaaggcagatgaggggaggcacaggcaccccagaggaactctgccttcaaatgtagcccccataccntgtgctcagaagggagatctggattcaaattgtggccatgtcacctgccacctctaatgctgtggaaaagaagcatcacattagctaattctggctgtgc

SEQ ID NO: 139545 - DNA, 201 bp, Homo sapiens
gccctactgagcctcagccatgtgcccgacaccagcagattctttacagcctgggaagcagagtgtcttccctgcctttccagggaacatagccagcttayaggctttttgatcttatagagtaggtcagttatattttgccccatttcttttatccttttgatcacttcctcttggcccaccatgtaaactcaagcatcc

SEQ ID NO: 139546 - DNA, 201 bp, Homo sapiens
gcagctctcgctgacagtccccccgacctccaccccaggcacgggctgcaatgcctgctacatggaggagatgcagaatgtggagctggtggagggggackagggccgcatgtgcgtcaataccgagtggggcgccttcggggactccggcgagctggacgagttcctgctggagtatgaccgcctggtggacgagagctc

SEQ ID NO: 139547 - DNA, 201 bp, Homo sapiens
tctgagcctgtttcctcagctgtaaagtagggtgcatacttttatggccctgtgcaggaggtagtgacaggccctagcaccctgcctccagtatatgttascagccacgaggcctatctctccccacagggcatccttctcaactggaccaagggcttcaaggcctcaggagcagaagggaacaatgtcgtggggcttctg

SEQ ID NO: 139548 - DNA, 201 bp, Homo sapiens
acagtccccccgacctccaccccaggcacgggctgcaatgcctgctacatggaggagatgcagaatgtggagctggtggagggggacgagggccgcatgtrcgtcaataccgagtggggcgccttcggggactccggcgagctggacgagttcctgctggagtatgaccgcctggtggacgagagctctgcaaaccccggt

SEQ ID NO: 139549 - DNA, 201 bp, Homo sapiens
ctgcatgaggggccctccctcgtgcctgctgatgtaatggacctgccctatgtccaggtatgagaagctcataggtggcaagtacatgggcgagctggtgyggcttgtgctgctcaggctcgtggacgaaaacctgctcttccacggggaggcctccgagcagctgcgcacacgcggagccttcgagacgcgcttcgtgtc

SEQ ID NO: 139550 - DNA, 201 bp, Homo sapiens
ctcccgccccgcagcgacacgggcgaccgcaagcagatctacaacatcctgagcacgctggggctgcgaccctcgaccaccgactgcgacatcgtgcgccscgcctgcgagagcgtgtctacgcgcgctgcgcacatgtgctcggcggggctggcgggcgtcatcaaccgcatgcgcgagagccgcagcgaggacgtaatg

SEQ ID NO: 139551 - DNA, 201 bp, Homo sapiens
tgccttgactctgggatgacgtctcagagctgtgcagtacaacattcttaaattggctgggactcagccctgcagaaatatgatatcttcaaggagaatcrttcccaaaacctctcaaagctatggggctgctctgagcctgtttcctcagctgtaaagtagggtgcatacttttatggccctgtgcaggaggtagtgaca

SEQ ID NO: 139552 - DNA, 201 bp, Homo sapiens
catgggggagcgggagagggactcctgtgggcaggaaccaggccctactccggggcagtgcagctctcgctgacagtccccccgacctccaccccaggcaygggctgcaatgcctgctacatggaggagatgcagaatgtggagctggtggagggggacgagggccgcatgtgcgtcaataccgagtggggcgccttcggg

SEQ ID NO: 139553 - DNA, 201 bp, Homo sapiens
gcacgttcctaatccctgacatttctaaagctctggctcattaacgagggaaagacgtgaaccagctgggggagtggggatcgcagtgccccacgtggccrcctcgtgacctcagtggggagcagtggggccggctcccggcttccacctgcatgaggggccctccctcgtgcctgctgatgtaatggacctgccctatgt

SEQ ID NO: 139554 - DNA, 201 bp, Homo sapiens
cggcttgtgctgctcaggctcgtggacgaaaacctgctcttccacggggaggcctccgagcagctgcgcacacgcggagccttcgagacgcgcttcgtgtygcaggtggagaggtgtgcggaggaggagggtgggtgcaaagggcaggggctggggacgcccgggcactgcagacttggtctcagggcgacgctgagtccc

SEQ ID NO: 139555 - DNA, 201 bp, Homo sapiens
taatgcgcatcactgtgggcgtggatggctccgtgtacaagctgcaccccaggtgagcccgccccgctctctccctggtaaagtggggcccaaaaagcgcrcgctccaaggttccttgcggttcccaagctccaagatttcgtagtcctcttctcgtcccccttggcctagatttgggggaagggtcgactgcgtgcaggg

SEQ ID NO: 139556 - DNA, 201 bp, Homo sapiens
acgggctgcaatgcctgctacatggaggagatgcagaatgtggagctggtggagggggacgagggccgcatgtgcgtcaataccgagtggggcgccttcgrggactccggcgagctggacgagttcctgctggagtatgaccgcctggtggacgagagctctgcaaaccccggtcagcagctgtaaggatgcccccctccc

SEQ ID NO: 139557 - DNA, 201 bp, Homo sapiens
catgtgctcggcggggctggcgggcgtcatcaaccgcatgcgcgagagccgcagcgaggacgtaatgcgcatcactgtgggcgtggatggctccgtgtacragctgcaccccaggtgagcccgccccgctctctccctggtaaagtggggcccaaaaagcgcgcgctccaaggttccttgcggttcccaagctccaagatt

SEQ ID NO: 139558 - DNA, 201 bp, Homo sapiens
ttccaggaaactctcaggagaagggtgtagctgtgagcagtctgcagctgctgctcactgcggctaaaggctgggtgtgcaggccagtcagccagtgaggygccaacagcaggcactacagtccaccccttgactgctcagacctactgctttccactttaagctctctccatccaggcacagcttcagggaaaacttaca

SEQ ID NO: 139559 - DNA, 201 bp, Homo sapiens
gtgctcggcggggctggcgggcgtcatcaaccgcatgcgcgagagccgcagcgaggacgtaatgcgcatcactgtgggcgtggatggctccgtgtacaagstgcaccccaggtgagcccgccccgctctctccctggtaaagtggggcccaaaaagcgcgcgctccaaggttccttgcggttcccaagctccaagatttcg

SEQ ID NO: 139560 - DNA, 201 bp, Homo sapiens
caccctggcaaatcatctgagtgcaagccatattcttcctgctccattatgtagcggtagtcctacctcctaatgacaagggtaaattgccacattttgcwacttgtgccaggatggtaatacctttctctacctgcttggctactggcacaaggaagcacagcatgaccaggaggcaattgtagctgtacatttagtgaa

SEQ ID NO: 139561 - DNA, 201 bp, Homo sapiens
accctggcaaatcatctgagtgcaagccatattcttcctgctccattatgtagcggtagtcctacctcctaatgacaagggtaaattgccacattttgcamcttgtgccaggatggtaatacctttctctacctgcttggctactggcacaaggaagcacagcatgaccaggaggcaattgtagctgtacatttagtgaat

SEQ ID NO: 139562 - DNA, 201 bp, Homo sapiens
ctgagcacgctggggctgcgaccctcgaccaccgactgcgacatcgtgcgccgcgcctgcgagagcgtgtctacgcgcgctgcgcacatgtgctcggcggkgctggcgggcgtcatcaaccgcatgcgcgagagccgcagcgaggacgtaatgcgcatcactgtgggcgtggatggctccgtgtacaagctgcaccccagg

SEQ ID NO: 139563 - DNA, 201 bp, Homo sapiens
ctgcctgcctttctccttggcttccagcactgcagcttctgtgcttcttggcaggactttgaaatggatgtggtggcaatggtgaatgacacggtggccaygatgatctcctgctactacgaagaccatcagtgcgaggtcggcatgatcgtgggtaagggctccttgcacccctgccccttccagactgctgaggctccc

SEQ ID NO: 139564 - DNA, 201 bp, Homo sapiens
ccatcaggattataattaaaacacttatctggtaaattgaccaactggacagattggtccaagtggaagaggataagcaaaagtggtaccatctccacccraatggtctttccacgggcctgcccctgcccctgcccccacccaaagtgaaggcaggtaccaggaaagggagcagcagtccgcccctcccagcagaggggt

SEQ ID NO: 139565 - DNA, 201 bp, Homo sapiens
tctccttggcttccagcactgcagcttctgtgcttcttggcaggactttgaaatggatgtggtggcaatggtgaatgacacggtggccacgatgatctccygctactacgaagaccatcagtgcgaggtcggcatgatcgtgggtaagggctccttgcacccctgccccttccagactgctgaggctccctgtgtacaaca

SEQ ID NO: 139566 - DNA, 201 bp, Homo sapiens
cctgcctttctccttggcttccagcactgcagcttctgtgcttcttggcaggactttgaaatggatgtggtggcaatggtgaatgacacggtggccacgahgatctcctgctactacgaagaccatcagtgcgaggtcggcatgatcgtgggtaagggctccttgcacccctgccccttccagactgctgaggctccctgt

SEQ ID NO: 139567 - DNA, 201 bp, Homo sapiens
ctgtcggagcgacactcagcgaccgccctacctcctcccgccccgcagcgacacgggcgaccgcaagcagatctacaacatcctgagcacgctggggctgygaccctcgaccaccgactgcgacatcgtgcgccgcgcctgcgagagcgtgtctacgcgcgctgcgcacatgtgctcggcggggctggcgggcgtcatcaa

SEQ ID NO: 139568 - DNA, 201 bp, Homo sapiens
tctgtgtgtctgtctgtagtattctctctctgtctctgtcactctgtctctctctctctctgtgtctacctttctgtatttcgctttgtttctttttctckgtgtgtgtgtgtgtgtatctgtttttctcactctctctctgtgtctatctttctgtatttcgctttgtttctttttctgtgtgtgtgtgtgtgtatatct

SEQ ID NO: 139569 - DNA, 201 bp, Homo sapiens
tttctctgtgtgtgtgtgtgtgtatctgtttttctcactctctctctgtgtctatctttctgtatttcgctttgtttctttttctgtgtgtgtgtgtgtgtatatctgtttttctcactctctcaatctctctctctctttctgtctctcttttgctggcctgagcaaagagggagccccatcctgatgctacataaccgt

SEQ ID NO: 139570 - DNA, 201 bp, Homo sapiens
ttctctgtgtgtgtgtgtgtgtatctgtttttctcactctctctctgtgtctatctttctgtatttcgctttgtttctttttctgtgtgtgtgtgtgtgtatatctgtttttctcactctctcaatctctctctctctttctgtctctcttttgctggcctgagcaaagagggagccccatcctgatgctacataaccgtg

SEQ ID NO: 139571 - DNA, 201 bp, Homo sapiens
cagaacatagtgtaccctgagcatgccatgaaaaacacaaacgcacaaagttgtaaagaaaaaagaaatgacaggtggctgtaaaatcagttatagcccaygagaggcccactaatgagtggtgatttcagctgattacaaagaaatgatggtgtttctgtaatgaactaaacatgcactcgtgcgtgcacacacgcgcac

SEQ ID NO: 139572 - DNA, 201 bp, Homo sapiens
cacgggctgcaatgcctgctacatggaggagatgcagaatgtggagctggtggagggggacgagggccgcatgtgcgtcaataccgagtggggcgccttcrgggactccggcgagctggacgagttcctgctggagtatgaccgcctggtggacgagagctctgcaaaccccggtcagcagctgtaaggatgcccccctcc

SEQ ID NO: 139573 - DNA, 201 bp, Homo sapiens
caggcccatttattttcttgtgtaaatcccaagtaggaggactgggtctctctgacagcaatgccagctgcctggcaccctccagacaggtggctcaagcmccacctcgccagctctcccagttagcccctcctttccctggctctgacctgagggacgaagcagggtgctacaggacgctgtgccacagggatatcgtca

SEQ ID NO: 139574 - DNA, 201 bp, Homo sapiens
atttttttcttcttccttgacaggtccaagttgggccatgctgagatttgaccctccttgtggccaggaggggaggtaggggccgatcctgaggaaggcaytcattttctcctggggcacttgtctctttcagacatctgcatacttttcaagagagaaaaggcctccttctcacagcaagactacttctgtagatgcagg

SEQ ID NO: 139575 - DNA, 201 bp, Homo sapiens
caatgccagctgcctggcaccctccagacaggtggctcaagccccacctcgccagctctcccagttagcccctcctttccctggctctgacctgagggacraagcagggtgctacaggacgctgtgccacagggatatcgtcagggacagaagctactctgccctctgctgctcacccctccaacacgctgtgggctgcat

SEQ ID NO: 139576 - DNA, 201 bp, Homo sapiens
actgcagccttgacctcctgggctcaagcaattctcccacctcagcctcctgagtagctgggacctcaggcacacgccaccacagctggctaatattttawttatttatttatttatttatttatttttgtagagatggggtctcactatgttgcccaggctggtttcaaactccttggttcaagtgatcctcctgcctca

SEQ ID NO: 139577 - DNA, 201 bp, Homo sapiens
ctgtgtcctcacatggtggaaaaggcaaggtagctctctgggattcctttttgtttgtttgtttgttttgttgtttttgtttgattttttgagacagagtytcactctgtcaccaggctggagtgcagtggcacaatctcggctcattgcaacctctgactccctggttcaaacgattctcctgcctcagcctcctgagta

SEQ ID NO: 139578 - DNA, 201 bp, Homo sapiens
aaataattactgattaggaaggacttacttctaccactcagctattttttttctgtgtgtcttatacatttttaagtttctcaattcctccattactggattttttttttacttcttgattttgtgtctgtgttgttacattttgattattttctccttttgatagcggcaggaggcagccaaatgcctggcagatagaag

SEQ ID NO: 139579 - DNA, 201 bp, Homo sapiens
ttaattccctttggttttctttatctgaaatgtctaatttcttttttattcttgaagaatagttttgctggctataagattcttagttaatagtttttttyccagcacttcaattattattaaagtgttattattattattattattattttgagatggagtctccctctgtcactcaggctggagtgcagtggcgcaatc

SEQ ID NO: 139580 - DNA, 201 bp, Homo sapiens
ccaccagtcccagttttatgcatggcagctctaatgacaggatggtcagccctgctgaggccactcctggtcaccatgacaaccacaggccctctcaggarcacagtaagccctggcaggagaatcccccactccacacctggctggagcaggaaatgccgagcggcgcctgagccccagggaagcaggctaggatgtgag

SEQ ID NO: 139581 - DNA, 201 bp, Homo sapiens
aagccagattctccccctcctttgagattggttttgttgtttgttgagggctgcagttgtccatttgtatagtgacttttccaaacgatttttgcaaagtrtgtattctctcttgtgtctggtcactgacgtttctgttctggtgcctctgcagtcagcctatgacctggaagagcattccttaaatgcatagattttttt

SEQ ID NO: 139582 - DNA, 201 bp, Homo sapiens
tgtttgaaagagcctggccccctctcattctcctgctcccactcttgcatgagacacctgctcccccttctccttctgccatgattttaagattccagggrcttcacaagaagcaaatgctaacgccatgcttcttgttctgtctgcaaaactgtaagccaattaaacctcttttctttgtaatttatccagtcttgggta

SEQ ID NO: 139583 - DNA, 201 bp, Homo sapiens
ttcaggtgtattggtcagcttagactgccataagagaataccatccactgatggcttagaaacaacagaaatctatttctcactattctagaggctggacrtccaagatcagatgccagcatggtcaggttgcagggagggctctcttcctgacttgcagaccgccaccttcttgctgtgtcctcacatcgtggagagaga

SEQ ID NO: 139584 - DNA, 201 bp, Homo sapiens
agctggacttgacactcttgttagaggaagatttttccacatctgttaacttttcttctattgttatccatctgtgcaggtttttctgtcctcctgagtcrttttgataatttatattatattttgaaaatcatccatttcctatagttgtttattagtgtcttctctgttatatttgatcagattaccaaatcttgctca

SEQ ID NO: 139585 - DNA, 201 bp, Homo sapiens
aggccctagcaccctgcctccagtatatgttagcagccacgaggcctatctctccccacagggcatccttctcaactggaccaagggcttcaaggcctcargagcagaagggaacaatgtcgtggggcttctgcgagacgctatcaaacggagaggggtgagggggcacctgtacctgccgggggggctgccctgggccac

SEQ ID NO: 139586 - DNA, 201 bp, Homo sapiens
ctcccccaccccatgtcccctgcttccctgcagcccacagagaatacagacctacttttacagaaatccagatttttgtgtaaaagtgtctctattttaartagattttaagtggtggcagcaaatttaagcttttgagaatattatacagaacaaatcagattcacaggccagatgcaactttatttacagaaatgggat

SEQ ID NO: 139587 - DNA, 201 bp, Homo sapiens
cccaactcccaggtcagatggaacctcttcttcccaggcccttctgttcctctcctcagcccctcccacctcccttcagaataagtctagactcttatcgmtttcaccaagcctgcgcccagcatccctgcacagggattgttaggacagcctgacgccctgcttccaccctgccccaagatgcccctgctctgcagcccg

SEQ ID NO: 139588 - DNA, 201 bp, Homo sapiens
atatccacctcacccatcaggattataattaaaacacttatctggtaaattgaccaactggacagattggtccaagtggaagaggataagcaaaagtggtrccatctccacccgaatggtctttccacgggcctgcccctgcccctgcccccacccaaagtgaaggcaggtaccaggaaagggagcagcagtccgcccctc

SEQ ID NO: 139589 - DNA, 201 bp, Homo sapiens
aaatgtctaatttcttttttattcttgaagaatagttttgctggctataagattcttagttaatagttttttttccagcacttcaattattattaaagtgwtattattattattattattattttgagatggagtctccctctgtcactcaggctggagtgcagtggcgcaatctctgctcactgcaacctccgcctccca

SEQ ID NO: 139590 - DNA, 201 bp, Homo sapiens
  misc_feature (1)...(201): n = A,T,C or G
gggcgtcatcaaccgcatgcgcgagagccgcagcgaggacgtaatgcgcatcactgtgggcgtggatggctccgtgtacaagctgcaccccaggtgagccngccccgctctctccctggtaaagtggggcccaaaaagcgcgcgctccaaggttccttgcggttcccaagctccaagatttcgtagtcctcttctcgtccc

SEQ ID NO: 139591 - DNA, 201 bp, Homo sapiens
gaatgcaaaaaaaatttatgatggacaacataccaaattctaaacaaaggcaggatgagtatcactggcttctgcacttttctccacccagtctacccctmttctagtgcctggatcgcagggtgccaaggcctggatgagggaagcgtggagctgcaatggccactcctgtctgcctgttctggctgcacagaggactca

SEQ ID NO: 139592 - DNA, 201 bp, Homo sapiens
gtgtcttccctgcctttccagggaacatagccagcttacaggctttttgatcttatagagtaggtcagttatattttgccccatttcttttatccttttgrtcacttcctcttggcccaccatgtaaactcaagcatccctgcttcatttaatcgagctgttgctttttctaagctaccaagagcaaccccagcaatatat

SEQ ID NO: 139593 - DNA, 201 bp, Homo sapiens
actgaccttggccttctgttcatcctttctagcccctaagaatccaacactctattagccttctccttagacccctataagctaatcccttctagttgttwgtctgaccttggtgcccaatatgataattattcccactttgcttctgatgtgcttctaagtgctgcccctggtctctgcccttaagtgatctatcatccc

SEQ ID NO: 139594 - DNA, 201 bp, Homo sapiens
tctattagccttctccttagacccctataagctaatcccttctagttgttagtctgaccttggtgcccaatatgataattattcccactttgcttctgatrtgcttctaagtgctgcccctggtctctgcccttaagtgatctatcatccccactgccattagggggagaagctctgaaaaagagttgtctcccatcaact

SEQ ID NO: 139595 - DNA, 201 bp, Homo sapiens
actggggatccccttgcctccaagagcaagtccagacctgcaccagcgcgggccaggcccccttaggaccccctccctgtccaagggcatttcagtaagtrttctgtggccaaggcagcctggtgactttctgcccgcacaaggctgaggaatggaagatgggtaggctggctctgcacaccccctcctgctgggcagcaa

SEQ ID NO: 139596 - DNA, 201 bp, Homo sapiens
gcgacgctgagtcccaggcccggggcgcagggatgggaaactagggcctggggcgggattccgggcgtgggcggggcccggggcggggcacagggggcggkggagtgggcggggcccgaggccgggcgctggaggcgagggcggggcagggacgggtccaagggcaggaggctgggacaggacggggatgcaaagggaggg

SEQ ID NO: 139597 - DNA, 201 bp, Homo sapiens
cggggcacagggggcgggggagtgggcggggcccgaggccgggcgctggaggcgagggcggggcagggacgggtccaagggcaggaggctgggacaggacsgggatgcaaagggaggggcggggcccgagacggggaggagggggagggcccaaggggaggaggcggggtccggacggggatgccaagagcagggatggga

SEQ ID NO: 139598 - DNA, 201 bp, Homo sapiens
tctctctgtgcctttagaagtcggggacttcctctccctggacctgggtggcactaacttcagggtgatgctggtgaaggtgggagaaggtgaggaggggyagtggagcgtgaagaccaaacaccagatgtactccatccccgaggacgccatgaccggcactgctgagatggtgagcagcgcaggggccggggcaggggg

SEQ ID NO: 139599 - DNA, 201 bp, Homo sapiens
aggaattcagcaaatgacagatgccttcacagttagttcctggcatcctctacattggtgggtgtaggaaagaaagacagaggaggcaaaagttgtagctktggggcattgaggacagcctggattgttccacagagccctgaggacatctccaggggtgtgctctgcaggggcagctggattggagggttaggggtcggg

SEQ ID NO: 139600 - DNA, 201 bp, Homo sapiens
cccaaggggaggaggcggggtccggacggggatgccaagagcagggatgggagcgagcctgcgtccgggcactggtccccatccgtgagtcccctcggtgmtccctgcccgccgtggccatcctctcacatcactcacaaccccaaggcgcggcatggttgacacccccacgttaggacggagaccctgggcttagttaga

SEQ ID NO: 139601 - DNA, 201 bp, Homo sapiens
cctggcagagttccagctgcaggaggaggacctgaagaaggtgatgagacggatgcagaaggagatggaccgcggcctgaggctggagacccatgaagagkccagtgtgaagatgctgcccacctacgtgcgctccaccccagaaggctcaggtaccacatggtaaccggctcctcatccagaagcagctgtgggctcagc

SEQ ID NO: 139602 - DNA, 201 bp, Homo sapiens
cagactttatcagccccatccctttctgaccttgcctcagtttaaattttacatgtggggcctcattaagagacatggttcttaactaaagatctgtatcyattaggaatgctttgggctgcaggaagccaaacacctgactcactgtggcataagtggtttgcgtctgctcccataagctgcacgtggagggtggatctg

SEQ ID NO: 139603 - DNA, 201 bp, Homo sapiens
gagacatggttcttaactaaagatctgtatccattaggaatgctttgggctgcaggaagccaaacacctgactcactgtggcataagtggtttgcgtctgytcccataagctgcacgtggagggtggatctggcattactctctcttccctacatttgcagtatgctaacagctttaacctccagccttgtttcttcatgg

SEQ ID NO: 139604 - DNA, 201 bp, Homo sapiens
agcacagatgcagggggcagacagaaaggccacaggactcaggtgaggtctctgccgggctgggccaggagccaggggactgccactcaccagtgtccccygcaggtggagcagatgttcgccctgacacccatggacctggcggggaacatcgactacaagtcactgtgctacatcatcacccatggagacgagaaagag

SEQ ID NO: 139605 - DNA, 201 bp, Homo sapiens
gccggccagcgcacccccccatgccagatggtcaccatggcgtgcatcttccagctcttcgactacatctctgagtgcatctccgacttcctggacaagcrtcagatgaaacacaagaagctgcccctgggcttcaccttctcctttcctgtgaggcacgaagacatcgataaggtgggccgggtggaggggcagaaggca

SEQ ID NO: 139606 - DNA, 201 bp, Homo sapiens
agttaaatttgaatttcagataaacaacaaattattttttagtatatgtcccaaattgtgcataacataatgtgttttctccgccagccctgggaagggcrtaacttcccaggtatttctaggtgaagtaactttgtagatcaggagtaagtcccaggaaagaagtccagctcttctcttcagccctgggcagctgggggt

SEQ ID NO: 139607 - DNA, 201 bp, Homo sapiens
acaacattgtgggaatggaaaatgcaggaaatgggcagtaaggctatgaacgaagcccgcacaggagtgtgggtagcagagttctctagtccaggctcccrcctgaggtgctgggacctagaagaaaagcctctctgcagacagaactggagttaacgctgtccacgataaatggcccaggccctgttaagtttgccccat

SEQ ID NO: 139608 - DNA, 201 bp, Homo sapiens
taagactgtcactgatactcaccatcatgccccatccccaccatccattctagtgtccccttccccttggctaacactgctggtctaggtgacttgcctasagcaggagccaaacccttatccctgaggcatctgaatcctggattcctttatcaggctattgttgttgtaagttgtccattcccaattacaactggacat

SEQ ID NO: 139609 - DNA, 201 bp, Homo sapiens
tttccaggttggaaggggcccgatttagccaacttgtcacccagtagtggctggttggtctcctccaggagcagtgttataccaggaattcagcaccagtygctattgctggcagttcttacattcaacagcagcaaaactaggtcagccttgatgagagggaatgtatgcttctgggcacaggcatggcttccttctctg

SEQ ID NO: 139610 - DNA, 201 bp, Homo sapiens
tgctccccaaacggcggcgagcgcgggtcgggtcccctagcggcgatgccgcttcctccacgccgccctcgacgcgcttcccgggagtcgccatctacctkgtcgagcctcgcatgggtcgcagccgccgggccttcctcacaggcctggcgcgctccaaaggcttccgcgtccttgacgcctgcaggtgcggggcggcgc

SEQ ID NO: 139611 - DNA, 201 bp, Homo sapiens
tcttgtaggaagggaaccaagagaagaaaaaatggcggctacagagacaacacccagagtaagggagctgggggtgccccctagtttggaggttgagagarcaaacgaacctggggctagtattcccccacagttgtgtttgattttttaacattaccagggatcagtagtgcgccagacccactcaggagaggatgatag

SEQ ID NO: 139612 - DNA, 201 bp, Homo sapiens
agagtgatgtgccgcctgcaggaccaggtgagggcctccctgctccccaagagccaccgctggccaatgccactgcctcctgctctctccacaccaccggrtggtctcagccacgcccgcctctccccacagggcctcatcctgtaccaccagcaccagcacagctgctgtgagtcccctacccgcctggcccaacagagc

SEQ ID NO: 139613 - DNA, 201 bp, Homo sapiens
gcctttcttcctcaccaagtagatgacacagcaactccgagcgggatgacccatgggttagcaggagcctgtcctctggatgctataaggctcccggcctmtgacaggtgtgggcttggggccaggttgcctgccttcaaatcctggcccagcctgtgagccatggttgtggggcaagcccctagcctccaaggcctcagc

SEQ ID NO: 139614 - DNA, 201 bp, Homo sapiens; identical to SEQ ID NO: 25125

SEQ ID NO: 139615 - DNA, 201 bp, Homo sapiens
accaggttaatttttaaatctttctcgtaaagatggggtcttggtaatgttgcctaagctggtctcaaacccctatgctcaaatgattctcctgccttggyccccaaaatgctgggattataggcatgagccacttcgctctgccttgactgtttttgatggaatattctcaagtagattacatgctgtggcatcttaaac

SEQ ID NO: 139616 - DNA, 201 bp, Homo sapiens
gagctcactgtgccaggtgctgctgttcctcacatttaaacctctccttagctgggtgccatgactcacatctttatgtagtcccagcactttgagaggcygaggcgggtggatcacctgaggttaggagttcaagaccagcctggccaacgtggcgaaaccctgtctctactaaaaataaaaaattagctgggtgtggtg

SEQ ID NO: 139617 - DNA, 201 bp, Homo sapiens
ctggagtagctgggactacaggcatgtgccaccacaccaggttaatttttaaatctttctcgtaaagatggggtcttggtaatgttgcctaagctggtctyaaacccctatgctcaaatgattctcctgccttggtccccaaaatgctgggattataggcatgagccacttcgctctgccttgactgtttttgatggaata

SEQ ID NO: 139618 - DNA, 201 bp, Homo sapiens
actgtgccaggtgctgctgttcctcacatttaaacctctccttagctgggtgccatgactcacatctttatgtagtcccagcactttgagaggccgaggcrggtggatcacctgaggttaggagttcaagaccagcctggccaacgtggcgaaaccctgtctctactaaaaataaaaaattagctgggtgtggtggcagac

SEQ ID NO: 139619 - DNA, 201 bp, Homo sapiens
ctggaggaggtgacgtttgcaggatgaatggtcacttaccatgcagaagggacggcaagagtgaaggcttggagccaaccaggacgggctctgggcctcaycctcctccttctctcccaactccctccaccagctccgaagcgacacatgttgtgatggaagagacctcagcagaggaggccgtcagctggcaggagcgca

SEQ ID NO: 139620 - DNA, 201 bp, Homo sapiens
cccccagccctgaccctaactccccgcccttctctttcttcccacgccctcaggcttagagttctgctttgttccctcccccaggagctgctggagcatgsagtgtgtgaggaggtggagagagttcggcgctcagagaggtaccagaccatgaaggtgcgcagggcagggctcggacctaccccaggaatgtcctgccct

SEQ ID NO: 139621 - DNA, 201 bp, Homo sapiens; identical to SEQ ID NO: 25122

SEQ ID NO: 139622 - DNA, 201 bp, Homo sapiens; identical to SEQ ID NO: 25123

SEQ ID NO: 139623 - DNA, 201 bp, Homo sapiens
gcccctcacacaccacaacactggcctctccgtaagccgcttctatgagccttggccagccctgggggttggggacaagggtacagatgggtggtaggtgrgggattggagctgcccaccctgccccttacctagggcccctccctgcaggaggctctggagatactggccgaggcagcaggctttgaaggcagtgagggc

SEQ ID NO: 139624 - DNA, 201 bp, Homo sapiens
cctgtctctacgagaaatacaagagttagccaggcgtgatggtggatgcccgtagtaccagctactcatgaggccgaggtacaaggatcgctcgagcccgrgaggtcaagccttgaggccaaggtggaagttgcaatgagctgagattgagccactgcactccagcctgagtgacagagcaagaccctatctcaaaaaaaa

SEQ ID NO: 139625 - DNA, 201 bp, Homo sapiens
gcataccctcctacagagcattcccaaaaaaggctagagtagacaccagcctgctccgtagggggcctccaccccattctccaaggcctccacccagggamgcctggtgaaccagcatccaggcctggcccacctccctgctcagagtccatgttctgtgacaagggtggcaactgggattcacatcagcggccagcaaat

SEQ ID NO: 139626 - DNA, 201 bp, Homo sapiens
aatacaaaattagccgggtgtggtggcgctcacctgtaatcccagctacttgggaggctgaggcagaatcacttcaacccaggagatggaggttgcagtgrgccaagatcgtgccactgcactccagcctgggcaagaggagtaaaactccatctcaaaaaaaagaaaaagaaaaagaaaagaaaaaaaaaaaccaaaggg

SEQ ID NO: 139627 - DNA, 201 bp, Homo sapiens; identical to SEQ ID NO: 25127

SEQ ID NO: 139628 - DNA, 201 bp, Homo sapiens
ggtgtggtggcgctcacctgtaatcccagctacttgggaggctgaggcagaatcacttcaacccaggagatggaggttgcagtgagccaagatcgtgccaytgcactccagcctgggcaagaggagtaaaactccatctcaaaaaaaagaaaaagaaaaagaaaagaaaaaaaaaaaccaaagggtgagtgtcccttcctg

SEQ ID NO: 139629 - DNA, 201 bp, Homo sapiens; identical to SEQ ID NO: 25128

SEQ ID NO: 139630 - DNA, 201 bp, Homo sapiens; identical to SEQ ID NO: 25130

SEQ ID NO: 139631 - DNA, 201 bp, Homo sapiens
tgctgggaagtgcatattcctggccccctgcctcaggccctgagcaacaaaagggctggcgatgggcaagcagcactcaccactggggcctggggtcccaygtcctggaagcggccactctccttgtgaaagctgtagttggcacctgaagccttggccaccttctccatgatgcactcaggctccacatcctcctcggcc

SEQ ID NO: 139632 - DNA, 201 bp, Homo sapiens; identical to SEQ ID NO: 25126

SEQ ID NO: 139633 - DNA, 201 bp, Homo sapiens
tgggcacggtggctcactcctgtaatcccagcactttgggaggctgaggcaggcagatcacctgaggtcaggagtttgagaccagcctgaccaacatggtraaacccgtttctactaaaaatacaaaattagccgggtgtggtggcgctcacctgtaatcccagctacttgggaggctgaggcagaatcacttcaacccag

SEQ ID NO: 139634 - DNA, 201 bp, Homo sapiens; identical to SEQ ID NO: 25129

SEQ ID NO: 139635 - DNA, 201 bp, Homo sapiens; identical to SEQ ID NO: 25132

SEQ ID NO: 139636 - DNA, 201 bp, Homo sapiens
atggccatccggcccatagccacgccaccagccttcgtcgatcacctcgatgcccgtgatgaggttctcggggtcaaaggagatctctgtgtcgtcggctrcaaagaggatgagcccagatgcatatcaggggctccctcccacatcccacctgctcgggcagcccacggcagccccacactgctgcagcacacctcgctg

SEQ ID NO: 139637 - DNA, 201 bp, Homo sapiens
tattccttccggcatagggatgtcagaccaggcgatcatggagctgaacctgcccacggggatccccattgtgtatgagctgaacaaggagctgaagcccmccaagcccatgcagttcctgggtgatgaggaaacggtgcggaaggccatggaggctgtggctgcccagggcaaggccaagtgaggggtgggcttgggcaa

SEQ ID NO: 139638 - DNA, 201 bp, Homo sapiens
agggcaccttacctgcctggtagtcgtacagggcacgggcacagagcccttgcccactgagcccctggccctgaatgtggtggtcaatgtgctcagagccrgcaccttgctgctgcacctgcccagggatgacaaaggtgttaccccagactcagcccttacacacaatcgctgctctgccccacatggctcaggtcaagc

SEQ ID NO: 139639 - DNA, 201 bp, Homo sapiens
ctgcatccccacttcccatagcccaggcagagggacagagaaatggagtggggagcacagagcaggctccaacaagacaaattccctgctgccaaaccacmatgatccactctgactttggtcacaaactctgctaaaaacaattctctacgttcactgttcccaagggtcattctaaacagtggtggccaccacccctta

SEQ ID NO: 139640 - DNA, 201 bp, Homo sapiens
aagtgggtctctggttgggtgagctgcttctgcaggaaggggctcctcagcttgcctgcaaacccgggtaaatatatacatcacttcagaaacaccaccasacacccacgcaccccacagcaccctccaccctggtgtgctcgaggcagtctcatggggcttgctcttgctagtgcaggaacagaggccccagggccatgt

SEQ ID NO: 139641 - DNA, 201 bp, Homo sapiens
ccaaccgtgccttgctgccctggctgctcgagcagaggcacaagcacaacaaggcctgctgcccgctggagggggtcaggccatcaccccagcaggtcagrctagacttcggtggccacaaacccctatcctgggttttgaaaaactttgcttttgctcacccttcctgttgatctccctgctttgtgttttcttctggta

SEQ ID NO: 139642 - DNA, 201 bp, Homo sapiens
tggcctggcatgggtcgggggcagtaggtggagtccaaccaccgatctgctcctcttacagggaaatcgggagcaccaaccgtgccttgctgccctggctrctcgagcagaggcacaagcacaacaaggcctgctgcccgctggagggggtcaggccatcaccccagcaggtcagactagacttcggtggccacaaacccc

SEQ ID NO: 139643 - DNA, 201 bp, Homo sapiens; identical to SEQ ID NO: 25136

SEQ ID NO: 139644 - DNA, 201 bp, Homo sapiens
aagtgagtgtgggcgcaagacgcccctcttggccagggctctgcccggcctgtgcttcctcagcctgtccatgcaccagttgggaggcccagcacaggatmtggcggcccctttgggagctagccagcaagacacccacgtcacagtgggcacaatgacatcccaaaggaggggtcaggagcctggacatttggggagtgg

SEQ ID NO: 139645 - DNA, 201 bp, Homo sapiens
ccggtgaggacctgtgacggggctcccgggaagtcctatgcggtgtgggagcagagggtggtgatcctgccccgggaattctggagtgcctgccatttcasccagatgaaggaaggtgtggccagaggagagagcagggggactgcttgcccagttgtgggcacttgggccagctcgtgattcccacaggtccactccata

SEQ ID NO: 139646 - DNA, 201 bp, Homo sapiens
gacaccgtgcacatccccgaagccaccaagcaggtggtgaaggccttccaggagttcatccggtgaggacctgtgacggggctcccgggaagtcctatgcrgtgtgggagcagagggtggtgatcctgccccgggaattctggagtgcctgccatttcagccagatgaaggaaggtgtggccagaggagagagcaggggga

SEQ ID NO: 139647 - DNA, 201 bp, Homo sapiens
gcggctgctgtacgtctcatgcaacccccgggcagccatgggcaactttgtggagtgagtgtctgcaggggcctgggtgggggctaggcctgctaccaagyccccagctcccacaggagcccctgattagcctatcggctgaccttagcgccccccttttccccccacagcctctgcagagccccatctaaccgggtgaag

SEQ ID NO: 139648 - DNA, 201 bp, Homo sapiens; identical to SEQ ID NO: 25164

SEQ ID NO: 139649 - DNA, 201 bp, Homo sapiens
ctgggtagagacggggatggggtgggaggaggcggggtgggtcaggaaacctgccagagaataggtggggacgaggcaggtgcgatgggggaggaaaggaracgggaatggggtcgggagggtagactgggggaggggcagggctgagtgcagagtgcaccgacggaggtctgggtgtcccataaggaagcttggggggcc

SEQ ID NO: 139650 - DNA, 201 bp, Homo sapiens
cagactggcctcccagcacctcgtggccatcctggacccaccccgtgctggcttgcgtgagtggcttttgcttaaggaggtggcacgggaacgaggacacrtggggtggctcaccatgttatgcactctctggctgtggggacccagctggtgtttgcctcctcagattccaaggtgatcctggccatccggagagctaag

SEQ ID NO: 139651 - DNA, 201 bp, Homo sapiens; identical to SEQ ID NO: 25138

SEQ ID NO: 139652 - DNA, 201 bp, Homo sapiens
tccgcggcctctcggcggctactcgtagctccttccctccgcgtctggcgccggcgcctcccgcccgcccgctcttccctccgccccacgacccgaacctygacccctgaccccagcggcgggaaacgcgccgcgattcaaaaccagtacagctttattggctcaggaggcggacactctcattgtccggcccgccccgcg

SEQ ID NO: 139653 - DNA, 201 bp, Homo sapiens
gcacagcccagtgccctggatggcatcagcacaggctcccctgccccggccttgaagcatggctgtgtgcacgattcatacccatgcttggcagacgggtkggggggggggggggcgcacagagaccacaagagtatggcagcacctgctgtggtggtgcctgggaacagcaagacacagcgaggctccccaacctttagg

SEQ ID NO: 139654 - DNA, 201 bp, Homo sapiens
gaaagggaaaagacagggaaagtgcaggcaggacggctgccagtccgccttaggctgaacgtgtggtggccagcacacacagctgggctcagggacaatgmcagggcaacagctgagaccaagccacagaggcgcagggccacaccaggggccgcccgcccagcggccaccaggcagcagagaaggagtccttacaccacc

SEQ ID NO: 139655 - DNA, 201 bp, Homo sapiens
ggtcaggggtaccagtgaggtgggcttggcagaggctcgggaagacacaaggtggagggagagcccagcagatcatgccaggaggccctggagccccaacrgcaccagtgcttgtgatgccaggctaggaggagcagggaaggcctggggcaggccagcctgagattgcagaggccccctgcattgccatcagagtacaac

SEQ ID NO: 139656 - DNA, 201 bp, Homo sapiens
cacagcccagtgccctggatggcatcagcacaggctcccctgccccggccttgaagcatggctgtgtgcacgattcatacccatgcttggcagacgggtgggggggggggggggcgcacagagaccacaagagtatggcagcacctgctgtggtggtgcctgggaacagcaagacacagcgaggctccccaacctttaggg

SEQ ID NO: 139657 - DNA, 201 bp, Homo sapiens; identical to SEQ ID NO: 25166

SEQ ID NO: 139658 - DNA, 201 bp, Homo sapiens; identical to SEQ ID NO: 25134

SEQ ID NO: 139659 - DNA, 201 bp, Homo sapiens; identical to SEQ ID NO: 25135

SEQ ID NO: 139660 - DNA, 201 bp, Homo sapiens
agtgcggggagacgctgggtagagacggggatggggtgggaggaggcggggtgggtcaggaaacctgccagagaataggtggggacgaggcaggtgcgatrggggaggaaaggagacgggaatggggtcgggagggtagactgggggaggggcagggctgagtgcagagtgcaccgacggaggtctgggtgtcccataagg

SEQ ID NO: 139661 - DNA, 201 bp, Homo sapiens
gaagcttggggggccaggcccccagggcctagtcctcaccctagcaccccatctgtccccacacagggcccgaagcccatggagagctgtggccaggagarcagcagtgccctgagctgccctaccgtctcggtgccccctgcagccccggcagccctggaggaggtggagaaagagggcgctggggcggctacagggccg

SEQ ID NO: 139662 - DNA, 201 bp, Homo sapiens
cccacagcactgcggctctgcagcggcccgcactcaaccagacaccgcagccaacaaagccgccgcctgggtcggcgcatctaggacctgtgccccacgcwggaacgcgagcttctgccacagaggccagtggcggttccagacgtaagaaccgaatgaatgaagtgctgcgtgggcgacggaaagaataaatgcaccgta

SEQ ID NO: 139663 - DNA, 201 bp, Homo sapiens; identical to SEQ ID NO: 25139

SEQ ID NO: 139664 - DNA, 201 bp, Homo sapiens
tccggagagctaagaacctcaggcggctgctgtacgtctcatgcaacccccgggcagccatgggcaactttgtggagtgagtgtctgcaggggcctgggtrggggctaggcctgctaccaagcccccagctcccacaggagcccctgattagcctatcggctgaccttagcgccccccttttccccccacagcctctgcag

SEQ ID NO: 139665 - DNA, 201 bp, Homo sapiens
ggagggtgcctagcctaggtgggcctcagcacagcctgatgggaacttttcaccacttactccagaagctgagccctgaggagctggcagagctgaagacytccctagcgcagcacttcacagcagggccaggcagggccagtggagtgacctgcctctacttcgtggaggagggacagcggtaaggagcccgagtggggc

SEQ ID NO: 139666 - DNA, 201 bp, Homo sapiens
aggacctgctagggctgaccttccggatctctccacacgccttcttccaggtagccatgagtccctggtgggcatggggacatgttgagggaggcctgacrcaccatcaggacgtgatgggaacagtgggctcaggcggtgagatttgggggagtatccaggcaggtgagccacaggggagggtgaagtaagaaagaggtt

SEQ ID NO: 139667 - DNA, 201 bp, Homo sapiens
cagaccacacaccttcagacactacacacacccccagacaccacatacacaccccaaacaccaaacacccagacaccagacccccaaccacacacccccarccacccccgccagacaccacacccaaccacataccccaccacaccccccagacaccagaccaactacacacccccaaacaccacacccaaccacacaacc

SEQ ID NO: 139668 - DNA, 201 bp, Homo sapiens
gacactctcattgtccggcccgccccgcgcttcccgccaaaacgcccgcggcgcatgcccggcccgcccgtcagccagaggagcgcgcactcccggcgacmcccgcgcgcacttccgtcccggccacgcgcgccgctagagctggctaaagtggttgggggttggatccggcgcgtgacgatgacgttgccagaagccagg

SEQ ID NO: 139669 - DNA, 201 bp, Homo sapiens
acatacacaccccaaacaccaaacacccagacaccagacccccaaccacacacccccaaccacccccgccagacaccacacccaaccacataccccaccasaccccccagacaccagaccaactacacacccccaaacaccacacccaaccacacaacccccgccccagacaccacacaccttcagacaccacacagcccc

SEQ ID NO: 139670 - DNA, 201 bp, Homo sapiens; identical to SEQ ID NO: 25157

SEQ ID NO: 139671 - DNA, 201 bp, Homo sapiens
tctgagtgtggtgatgcacgcctgtaatcccagctactcaggaggctgaggcacgacaatcacttgagcccaggaggcagaggatacagtgagtggagatygccccactgctcctacagtcacaatatttccctcagtggggaccagcctgggcaacatagcaagacactatctctacaaaaagataaaaattagctggac

SEQ ID NO: 139672 - DNA, 201 bp, Homo sapiens
gatgtctcctgggaagtatagcacctcacgctcaggactgcaggctgtagctctacggcctgcccgctgcccagcagctgtgtgcctgggaccctgaaggyaggcgcgcccagggtctggcagacacgaaacagccaggagctgtggcaacataactgcatgctgactggcccgcctcagtgatgccaggcccactgacag

SEQ ID NO: 139673 - DNA, 201 bp, Homo sapiens
tcctgggaagtatagcacctcacgctcaggactgcaggctgtagctctacggcctgcccgctgcccagcagctgtgtgcctgggaccctgaaggcaggcgygcccagggtctggcagacacgaaacagccaggagctgtggcaacataactgcatgctgactggcccgcctcagtgatgccaggcccactgacagcagcag

SEQ ID NO: 139674 - DNA, 201 bp, Homo sapiens
agagcccagccccaggtggccagcagaggcccagcccagcaaggcttccaacagtgtcatcaccctggctctgcagccaacccaagaacacacaggaaggrcaagagaggcagacagggaaacaagaggtgatggggagattccacacagtgaggcatagggaagctgcagcaggctgaggtgcagagacattgcccactg

SEQ ID NO: 139675 - DNA, 201 bp, Homo sapiens
gggcctgcccctggagcatgtggctggggaccggtgcatccacgaggacctgctagggctgaccttccggatctctccacacgccttcttccaggtagccrtgagtccctggtgggcatggggacatgttgagggaggcctgacgcaccatcaggacgtgatgggaacagtgggctcaggcggtgagatttgggggagtat

SEQ ID NO: 139676 - DNA, 201 bp, Homo sapiens; identical to SEQ ID NO: 25163

SEQ ID NO: 139677 - DNA, 201 bp, Homo sapiens
gccagagaataggtggggacgaggcaggtgcgatgggggaggaaaggagacgggaatggggtcgggagggtagactgggggaggggcagggctgagtgcaragtgcaccgacggaggtctgggtgtcccataaggaagcttggggggccaggcccccagggcctagtcctcaccctagcaccccatctgtccccacacagg

SEQ ID NO: 139678 - DNA, 201 bp, Homo sapiens
cctgctttgtgttttcttctggtaacatcacatagttgtcagctgttcctcttgtttgactgccagcccctgtggggaaatcagggtttccaggcccaagygctgggcagccagggtaaggtgcagctctctctccctgcagactgagtatcgtaataagtgtgagtttctggttggcgtcggggtggatggggaggataa

SEQ ID NO: 139679 - DNA, 201 bp, Homo sapiens
cttcatggaggataccttcctgagcaaacacatgaggtcagggtggacacaggcaggaagggaacgtggggtggggggacaccccgggcacttcttacccrggcaaagaaggatgtgtccagctcatcggggaaatcagttgtgtcctcctccagaaagctagctggagtgaagcttcgacgctgtgcccggcgaaaggtg

SEQ ID NO: 139680 - DNA, 201 bp, Homo sapiens
tggtgccatctcgactcactgcaacctccccctcccgggttcactacaggcacgcgccaccacgcccggctaattttttgtatttttagtagagacggggyttcaccatgttgggccaggatggtcttgatctcctgacctcatgatccgcccgcctcggcctcccaaagtgctgggattacaggcgtgagccaccgcgcc

SEQ ID NO: 139681 - DNA, 201 bp, Homo sapiens
tgatgatcagggatatactcagcgtgaactgacaggcctctacccacccctgggggcaggtcctcatgtgagtttattctcttgcctgtttcttagcacckctttcccccagagactctgtccactatggacattaaaatgtgagtggaacatgagattggggctctgatgaattgggaaaccgtaacgtacaggcaacca

SEQ ID NO: 139682 - DNA, 201 bp, Homo sapiens
acaggccatgcccaggggtactggggcaaccacaaacctgccctgtgcacagaggtgttggttcctttcctgccatcggaggctgtggctttgggttctcmccatggatcttctcccatctgtgtccgtggttgcagccgtggttgtagtgcagagtgccacagtcctggacctgaagaaggccatccagagatacgtgca

SEQ ID NO: 139683 - DNA, 201 bp, Homo sapiens; identical to SEQ ID NO: 25185

SEQ ID NO: 139684 - DNA, 201 bp, Homo sapiens
aatttaaaatacggtaaagacaagaccaatgagtaaggtggcgatctaggggaagagtgaactgagcaacagcaagtgcaaaggccctgctagcaccatgwgcacgatgagagatcgtccaggaggcggtgttgatgcggcaaagggcaacaggaagggcattaggacttgaaatcggagacgcacgcaggggagggagtc

SEQ ID NO: 139685 - DNA, 201 bp, Homo sapiens; identical to SEQ ID NO: 25188

SEQ ID NO: 139686 - DNA, 201 bp, Homo sapiens
gcctgtttcttagcacctctttcccccagagactctgtccactatggacattaaaatgtgagtggaacatgagattggggctctgatgaattgggaaaccrtaacgtacaggcaaccacccttccttgcccttcgtaaaatggagcaccactttttggccactatcggcttgttctttgttgttgctcaaggtggtaaaga

SEQ ID NO: 139687 - DNA, 201 bp, Homo sapiens
gaaagatgatgatctggcagcgtttccggtacaggtcgaacttgccaaagctgatgtagggcaagaaggcgaaggagaggaagaggccactgatgaacccygagatgtgggcaaagttgtcaatccacggcagcagcccaaaggtgaagaggaagagcaccacagccagcagcttgaagaaggcacgccagggccgcgcca

SEQ ID NO: 139688 - DNA, 201 bp, Homo sapiens; identical to SEQ ID NO: 25181

SEQ ID NO: 139689 - DNA, 201 bp, Homo sapiens
gctctgccagagggctgcggctccctctccggagataacaccctcctccaaggagcttccttggggccctccccactaggagaatggcaggcagagggcasctggaggggccttgctgcttcccaccagtggcagcttagggctacacagtgccaggagggaggaaatcagagtgggcatggaggcgaaaggctgtgactc

SEQ ID NO: 139690 - DNA, 201 bp, Homo sapiens; identical to SEQ ID NO: 25182

SEQ ID NO: 139691 - DNA, 201 bp, Homo sapiens
ctccaaggagcttccttggggccctccccactaggagaatggcaggcagagggcacctggaggggccttgctgcttcccaccagtggcagcttagggctacacagtgccaggagggaggaaatcagagtgggcatggaggcgaaaggctgtgactctatctgacactcagttccctgccccggggacttgtgagtcggagt

SEQ ID NO: 139692 - DNA, 201 bp, Homo sapiens
cttgcccttcgtaaaatggagcaccactttttggccactatcggcttgttctttgttgttgctcaaggtggtaaagagagccagggttcccacttctgccyttggtcttttgtaggttactctggaagaagtcaactcccaaatagccctagaatacggccaggcaatgacggtccgagtgtgcaagatggatggagaagt

SEQ ID NO: 139693 - DNA, 201 bp, Homo sapiens
tttcttagcacctctttcccccagagactctgtccactatggacattaaaatgtgagtggaacatgagattggggctctgatgaattgggaaaccgtaacrtacaggcaaccacccttccttgcccttcgtaaaatggagcaccactttttggccactatcggcttgttctttgttgttgctcaaggtggtaaagagagcc

SEQ ID NO: 139694 - DNA, 201 bp, Homo sapiens; identical to SEQ ID NO: 25183

SEQ ID NO: 139695 - DNA, 201 bp, Homo sapiens
tttatgcctttccttctttttcagctacggcatccggaatcgagacgaggtttccttcatcaaaaagctgaggcaaaagtgagcctccagacaggacaacsctcttcatcactggtggctgagctttttcccagcaggaatgggtcctcgaatcatcgtgcctctttcacagaaaggacgttgtggtggcctcaccccagg

SEQ ID NO: 139696 - DNA, 201 bp, Homo sapiens; identical to SEQ ID NO: 25186

SEQ ID NO: 139697 - DNA, 201 bp, Homo sapiens
aaacggggtttcaccgtgttagccaggctggtctcgaactcctgacctcaggtgatccgcccgcctcggcctcccaaagtgctgagattgcaggcgtgagycaccacacccagcctatatgttcttttatagggggaaaaccacagtactaaccatcagttatctctctcacctctcaatataacttacatttacgtcttc

SEQ ID NO: 139698 - DNA, 201 bp, Homo sapiens
aggaccttcaaggtgaggtctgaaattccaacctggtgtatctctctcctcctctgcttccactgctggaccccgcttccagtcctcatctaaactttggyacagacattctgattaatctcttgatcccctggctttctcatatcccctataccagtccattttatatccttgaggcaaggttaacttcctacactacaa

SEQ ID NO: 139699 - DNA, 201 bp, Homo sapiens
agcatgacccaatctcagtcagatccactgaagaatgtacctcgagtctattacaaccactgaacttgggagtggggagtgagacacatggatctgttcasgtggttggtcccccttagggatatttcctgacattgacagcatgctcttcatgggcaggtacccaacagctgttggaggcctgtgtccaagctagtgtgc

SEQ ID NO: 139700 - DNA, 201 bp, Homo sapiens
tggtagaaaaggggtgatatccaagtggacaatgaacgcatcaaggtccagaaacaaagcgatttgccaaggccatctgattaatgtgtagcagagctcaraccaaagcttcatccagaggcttcacttggccctggggctgacacttggcaaaatgggtcttcagtctctccttttgcctccctgtgtgtccaattccct

SEQ ID NO: 139701 - DNA, 201 bp, Homo sapiens
gcctgaagagagcctgccaggacatctcggtagtcatccacaccgcctctatcattgacatcttcggtgtcactcacagagagtctatcatgaacttcaaygtgaaaggtacagtagcctgaggaggagatggagcaaggtggagcaaacaaggatcagaaagataaacaatgaaggaagagaagtccctccgctgaacac

SEQ ID NO: 139702 - DNA, 201 bp, Homo sapiens
caggaaaccataggggtgattttatcttctccttttcctctcagccaagatccaacaggtaccaggaccttcaaggtgaggtctgaaattccaacctggtrtatctctctcctcctctgcttccactgctggaccccgcttccagtcctcatctaaactttggcacagacattctgattaatctcttgatcccctggcttt

SEQ ID NO: 139703 - DNA, 201 bp, Homo sapiens
acagagagtctatcatgaacttcaacgtgaaaggtacagtagcctgaggaggagatggagcaaggtggagcaaacaaggatcagaaagataaacaatgaasgaagagaagtccctccgctgaacacctgctatgctctgggccaagtgtctttgctaatcactaccaactgggggagttcaaagctgctaccttcagtttt

SEQ ID NO: 139704 - DNA, 201 bp, Homo sapiens
acccaggctggagtccagaggcatgatctctgctcactgccaccttcacctcctgggacccatccatcctcctacctcaggcttcttattagctgggagtrtaggcattcaccactatgtctggctaatttgtgtatttttggtagagacggggtttcaccaagttgtccaggctggtctcaacctcctggatgcaagcga

SEQ ID NO: 139705 - DNA, 201 bp, Homo sapiens
gaaacctagatggcagtccccactcctaccacctatcattcagcgctaccaactttacctccacaacacctcttgaatgtgtcgtcttcctccctggtaaygtcattcctacttttacaccccataggcctccctgtcttggagagtcacccgtgaaacgtatcctcagcagtgttgccagagttgtctctccaaactagt

SEQ ID NO: 139706 - DNA, 201 bp, Homo sapiens
tttccgggtcagaggattgtcaacctcttggtgaaggagaaggagctaaaggagatcagggccttggacaaggccttcagatcaggattgagggagaaatkttctagtaagtaaacttgagtcatgggtgtgtggctacattttaaaccttgcatgggtgtgggaaggtggagcttttctggcaagttatggcaagttgta

SEQ ID NO: 139707 - DNA, 201 bp, Homo sapiens
cttcttcccctgatctgctcctcttgacatccagcagcttgtgtgtgtctgctagaatcttgggcctttttaacaggcacagaattaaacatgtgtattawacaaggaaagaatttagtgccaaagattacagagacaagaagtaaaatatactaacaacattgtacgagctgtttcaccctggactggttaaactttaga

SEQ ID NO: 139708 - DNA, 201 bp, Homo sapiens
tagtcatccacaccgcctctatcattgacatcttcggtgtcactcacagagagtctatcatgaacttcaacgtgaaaggtacagtagcctgaggaggagayggagcaaggtggagcaaacaaggatcagaaagataaacaatgaaggaagagaagtccctccgctgaacacctgctatgctctgggccaagtgtctttgct

SEQ ID NO: 139709 - DNA, 201 bp, Homo sapiens
aaattgaatcacacctgagcttggagaatgagtgcaagcttttattgagtggaggtagctctcagcagatggaggaagccagaatagaatggttttccccyggagtgtgctgctcagtggcctgacacttccctaactgcttggccaaactctgcatccttctgctggtcagtgcatccctctcaacatccagctgccctg

SEQ ID NO: 139710 - DNA, 201 bp, Homo sapiens
gtgcatccctctcaacatccagctgccctgtgtttcttcactgatgtgcttccctcaacatctagctgcttctgtcttcttcccctgatctgctcctcttracatccagcagcttgtgtgtgtctgctagaatcttgggcctttttaacaggcacagaattaaacatgtgtattatacaaggaaagaatttagtgccaaag

SEQ ID NO: 139711 - DNA, 201 bp, Homo sapiens
cctctcagccaagatccaacaggtaccaggaccttcaaggtgaggtctgaaattccaacctggtgtatctctctcctcctctgcttccactgctggacccygcttccagtcctcatctaaactttggcacagacattctgattaatctcttgatcccctggctttctcatatcccctataccagtccattttatatccttg

SEQ ID NO: 139712 - DNA, 201 bp, Homo sapiens
gagtggaggtagctctcagcagatggaggaagccagaatagaatggttttcccccggagtgtgctgctcagtggcctgacacttccctaactgcttggccwaactctgcatccttctgctggtcagtgcatccctctcaacatccagctgccctgtgtttcttcactgatgtgcttccctcaacatctagctgcttctgtc

SEQ ID NO: 139713 - DNA, 201 bp, Homo sapiens
cttctccaaccaccccagacaaactccacatcattttgcccatgggtatgttcctcccaaagtccagctgcccgtgtattcctttgctgatgtgttcctcygctgatgtgtgcctccactgatgtgcccttcctgacatccagccccttctgtcttcttctgccaatctgctcctctcaatgtccagcagcttgtgcatgt

SEQ ID NO: 139714 - DNA, 201 bp, Homo sapiens
accccagacaaactccacatcattttgcccatgggtatgttcctcccaaagtccagctgcccgtgtattcctttgctgatgtgttcctccgctgatgtgtkcctccactgatgtgcccttcctgacatccagccccttctgtcttcttctgccaatctgctcctctcaatgtccagcagcttgtgcatgtgcctgctaggg

SEQ ID NO: 139715 - DNA, 201 bp, Homo sapiens
ggttcatctcattgggactggttggactgtgggtgcagcccacagagggcgagctgaagcagagtggggcattgcctcatccaggaagcacaaggggttgrgggatttccctttcctgccaagggaagctgtgacaggcttgcctggagaaaaggtacactcctgaccaaatactgtgctttttccacagtcttagcaacc

SEQ ID NO: 139716 - DNA, 201 bp, Homo sapiens
atattctcagagtatatcttcctgatttgttagtttttcaataatctgccattaatggtattgatgtcacattgtaatttttcaacatcattacttgacaraatataaagtgataattctaggtcctttgccaaaattacagtatatacacacacacacacagacacacacatccatatacccaaaagtctagaaattctt

SEQ ID NO: 139717 - DNA, 201 bp, Homo sapiens
gacaaactccacatcattttgcccatgggtatgttcctcccaaagtccagctgcccgtgtattcctttgctgatgtgttcctccgctgatgtgtgcctccrctgatgtgcccttcctgacatccagccccttctgtcttcttctgccaatctgctcctctcaatgtccagcagcttgtgcatgtgcctgctagggtattgg

SEQ ID NO: 139718 - DNA, 201 bp, Homo sapiens
caattgtgtatgggtgtgtgtgtgacataaattcttccagtgcccttttctgcctaaggactgggactgtccatattctcagagtatatcttcctgatttkttagtttttcaataatctgccattaatggtattgatgtcacattgtaatttttcaacatcattacttgacagaatataaagtgataattctaggtccttt

SEQ ID NO: 139719 - DNA, 201 bp, Homo sapiens
aaagggcctgctattacagaaccatttcaaactaggtgcccaaagtgcaccttcattcaatcctcgtcccttaaaagcttggtggtctttccgaattgcascttcccaaactactttaaattcagacacattcccttaaggaatctcgtcatgcagtctcaccctctgattcccagagtccagtctcttcagcaccatagc

SEQ ID NO: 139720 - DNA, 201 bp, Homo sapiens
gtctactctgatgccttttctcatgcaactaattgcttttgagtctccagtaccaaaaaaaaaagagaagaaagaaagaaagaaagaaagaaagaaagaargaaagaaagaaagaaagaaagaagaaagagaaagaaaggaaagaaggaaggaaggaaagaaggaaggaaggaaggaagaaagaaagaaagaaagagagga

SEQ ID NO: 139721 - DNA, 201 bp, Homo sapiens
attgcttatatacaattgtgtatgggtgtgtgtgtgacataaattcttccagtgcccttttctgcctaaggactgggactgtccatattctcagagtataycttcctgatttgttagtttttcaataatctgccattaatggtattgatgtcacattgtaatttttcaacatcattacttgacagaatataaagtgataat

SEQ ID NO: 139722 - DNA, 201 bp, Homo sapiens
catttgaattgttaactctccgcagctcccaacaacaagaaatgtgaaatgacaggggaagtgttagaggcatctgtttcctaaccattatcactccaagrcttagaaaatatttcacaatgttggtcatttcccccttgaaggtaaactacttccgcattttctctgccaccagattaattgttgaaaacatgaggctgt

SEQ ID NO: 139723 - DNA, 201 bp, Homo sapiens
tgtggcttgcttcttcagtgcctcactgctgaaacctctatgggagcatacaggcaggcaggctgtgggactccgacaccatggcagtgtctggggcgaaytgtacagctcctgaagccccagtgggtgtgtgttacatggtgctcttttagtcttgctcttttagttttgacatctataggcggcttgttttaaccagct

SEQ ID NO: 139724 - DNA, 201 bp, Homo sapiens
agcatctccccacaagccactgttcgctcaatgactccaggaatggtcctggtgacaaagttttaccagtccactcaaaatgagaaaaataccagcaattrtatgtatatttaagagtacatttcagagtgtatattgcttatatacaattgtgtatgggtgtgtgtgtgacataaattcttccagtgcccttttctgcct

SEQ ID NO: 139725 - DNA, 201 bp, Homo sapiens
cgctcaatgactccaggaatggtcctggtgacaaagttttaccagtccactcaaaatgagaaaaataccagcaattatatgtatatttaagagtacatttmagagtgtatattgcttatatacaattgtgtatgggtgtgtgtgtgacataaattcttccagtgcccttttctgcctaaggactgggactgtccatattct

SEQ ID NO: 139726 - DNA, 201 bp, Homo sapiens
ggggtgtggcttgcttcttcagtgcctcactgctgaaacctctatgggagcatacaggcaggcaggctgtgggactccgacaccatggcagtgtctggggygaattgtacagctcctgaagccccagtgggtgtgtgttacatggtgctcttttagtcttgctcttttagttttgacatctataggcggcttgttttaacc

SEQ ID NO: 139727 - DNA, 201 bp, Homo sapiens
tgggactgtccatattctcagagtatatcttcctgatttgttagtttttcaataatctgccattaatggtattgatgtcacattgtaatttttcaacatcmttacttgacagaatataaagtgataattctaggtcctttgccaaaattacagtatatacacacacacacacagacacacacatccatatacccaaaagtc

SEQ ID NO: 139728 - DNA, 201 bp, Homo sapiens
tccatattctcagagtatatcttcctgatttgttagtttttcaataatctgccattaatggtattgatgtcacattgtaatttttcaacatcattacttgrcagaatataaagtgataattctaggtcctttgccaaaattacagtatatacacacacacacacagacacacacatccatatacccaaaagtctagaaatt

SEQ ID NO: 139729 - DNA, 201 bp, Homo sapiens
gaccctctaccttgtcggaaggtcagagggctttctgtatcctgggttcttgctttggttaccggaagaattggatcacacctgggcttggagaatgagtrcaaggttattttgagtggaggtagctctcagcagctgggggatgccagaaggggagggttttcccctggagtcggttgctcaatgacccaactcttctcc

SEQ ID NO: 139730 - DNA, 201 bp, Homo sapiens; identical to SEQ ID NO: 25192

SEQ ID NO: 139731 - DNA, 201 bp, Homo sapiens
gtgggtgtgtgttacatggtgctcttttagtcttgctcttttagttttgacatctataggcggcttgttttaaccagctaaattagaccctctaccttgtyggaaggtcagagggctttctgtatcctgggttcttgctttggttaccggaagaattggatcacacctgggcttggagaatgagtgcaaggttattttgag

SEQ ID NO: 139732 - DNA, 201 bp, Homo sapiens; identical to SEQ ID NO: 25191

SEQ ID NO: 139733 - DNA, 201 bp, Homo sapiens
gcctagcagtctcaggctctgggctaaccctggcctcccagctgccccttcaacattgtcccctcttgtcttgcagggcagtagccacagctggggctgtsgggtcagggcatggcaagggtgatctgaccaaactatgctgcctcttagccagactgtatattcggagtcccctaagctcgatttttttttttttttttg

SEQ ID NO: 139734 - DNA, 201 bp, Homo sapiens
gccacagctggggctgtcgggtcagggcatggcaagggtgatctgaccaaactatgctgcctcttagccagactgtatattcggagtcccctaagctcgatttttttttttttttttgagacagggtctcactctgtcacccaggctggagtgcattggtacagccatagctcactgcagccttgacctcccaacctcaag

SEQ ID NO: 139735 - DNA, 201 bp, Homo sapiens; identical to SEQ ID NO: 25193

SEQ ID NO: 139736 - DNA, 201 bp, Homo sapiens
ctcaaatcccagacctgcagaacataaaaccctcccagcctttctgaaaacactgttcttctaaaggcaatgaaaggcgctatttagcatgtgggtttcamctttctgttttttcaaagggaagaaggtaggtcaagcgtgactgccccatggggaaggctgtccccgctggctctggtaggggtctggtgggtttcactg

SEQ ID NO: 139737 - DNA, 201 bp, Homo sapiens
aaattcccaggcacagattcctcccacctcagaatcttcaggggtgaacccttggcactgatattttttaaaagctctcagagtgattctcatgcccagcrgggatgcagcatcactggcctccagtctgtcagatgctgtgctaagcatttaacttggagtaccccatttaaggaagcaggtgcttatgggatgctgaaa

SEQ ID NO: 139738 - DNA, 201 bp, Homo sapiens
gctcatggttctggaggctgggaagtccaaaatcaaggagccagcagatttgatttggggagggctgctctctgcttccaagatggcacctacctgtggcrtccttacctggtggaaggagcagacaagctcccttagggctctaataatttttctttttttttttgacacggagttttgctcttgttgcccaggctggag

SEQ ID NO: 139739 - DNA, 201 bp, Homo sapiens
tgttgctctggggatgaggaggctggaacagcaacttaaaaatagaaatagtccctggaagggagggaaggagaaggttcagaggcttgtcatttaggcaycccaacttctataccttaccaaggtgccaggcccagagggaagggggtagccagggcagctccccgacccgcacctgccttttcacccctctcctatttc

SEQ ID NO: 139740 - DNA, 201 bp, Homo sapiens
cccaaagttttgggattacaggtgtgagccatagcgcctggccattacccggcagctttgttaaggcctgcaatgaggcaagtaatcatatagttacagaygcccagctggggtctgtgggttggtactcccaggaaggctcttcctggggaacagcagtggctcctatgggcttagcaggatcttgcccatgaagatcgt

SEQ ID NO: 139741 - DNA, 201 bp, Homo sapiens
gaggagttgtcggctggggctgttgcgggggtggtgggagacaagtctggtgagtaggatttggaaagtggagcagtactggcagagggaagggcggttayggagagtgaagaaagcctgaacataaggaatctcagaccatttcccactgcgatggcaaaagtcgtctaagtctctaagtatattgaaatcaaaagtgcc

SEQ ID NO: 139742 - DNA, 201 bp, Homo sapiens
aatcatagttaaccttctttaccctttactatgtgcaaggcattgttctagaagcgcacacatcgatcatttagtcctcacagcgctcccatgtggtaggygctgtccttatactctttttgcagataagcccaaggcacaggagcctgcctggtaagcagcccatgtctaaagggcagtgaagaaccggcctctagggaa

SEQ ID NO: 139743 - DNA, 201 bp, Homo sapiens; identical to SEQ ID NO: 25194

SEQ ID NO: 139744 - DNA, 201 bp, Homo sapiens
gagagacaaagccagtgtttgtgtatttggtttttttaaactttatgttaggttcagaggtacgtatacaggtttgttacataggtaaattgtatgccatrggggtttggtgtacagattatttcatcatccaggtagtaagcatagtacccaataggtagttgttgggtttgtttgagacagggtctctattgctcaggc

SEQ ID NO: 139745 - DNA, 201 bp, Homo sapiens; identical to SEQ ID NO: 25195

SEQ ID NO: 139746 - DNA, 201 bp, Homo sapiens
ccggggtaagtggggcgccggcgtcctggaaccgccgcccagcccgggggaggccgcccagccgggagcccccgccttccgcgtccaggcgcgcgcgccaractttggagggagaagggggcgaagcggacggtgggaggtggagttcccagctcggggaaaagcccaggcaggcacccacaacccgctgcaaccggatca

SEQ ID NO: 139747 - DNA, 201 bp, Homo sapiens; identical to SEQ ID NO: 25196

SEQ ID NO: 139748 - DNA, 201 bp, Homo sapiens; identical to SEQ ID NO: 25199

SEQ ID NO: 139749 - DNA, 201 bp, Homo sapiens; identical to SEQ ID NO: 25201

SEQ ID NO: 139750 - DNA, 201 bp, Homo sapiens; identical to SEQ ID NO: 25202

SEQ ID NO: 139751 - DNA, 201 bp, Homo sapiens; identical to SEQ ID NO: 25203

SEQ ID NO: 139752 - DNA, 201 bp, Homo sapiens
cctcacacttctgacattcagaactgtacgataatcagtgtgttgttccagctgggcacggtggcttatgcctataattacagcactttgggaggctgcarcgggaggatctcttgaggccaggagtttgagaccagcctgggcaacctgatgaaacccctgtctctacaaaaataaaaaaattagctgagtgtggttgca

SEQ ID NO: 139753 - DNA, 201 bp, Homo sapiens; identical to SEQ ID NO: 25204

SEQ ID NO: 139754 - DNA, 201 bp, Homo sapiens
tctgcagattctgagaaaactcacaaaagagcccactccaaggtgtttggcaacaaggtgggggcagcctcccagcacccagcacacatggagctttcccrcagtgggtttcagcgctcccactctgcctcggagctactctgtcaccagctcttgccctcccttggctcctctttcccatgcagctcctcctccagctcg

SEQ ID NO: 139755 - DNA, 201 bp, Homo sapiens
gctgcgcagctggcgtggttgccccagtctccttcgccccaaggccatgcttggccgaccccctgacccgctgaggttgcgcagagctttttgggccctgyagcagcactgcttgggcaccaagccttgcatggtctcatgggactcactgcctgcagccgctagtcccagctcccctccttaccagaacccacaccatgt

SEQ ID NO: 139756 - DNA, 201 bp, Homo sapiens
taacccagatgtcccaagcctcccagccagagtgcctgtgctgcgcagctggcgtggttgccccagtctccttcgccccaaggccatgcttggccgacccsctgacccgctgaggttgcgcagagctttttgggccctgtagcagcactgcttgggcaccaagccttgcatggtctcatgggactcactgcctgcagccgc

SEQ ID NO: 139757 - DNA, 201 bp, Homo sapiens
acattcatgccaacagctaccaggcaccagcctcaccattgatttttggacagctggtctgtgccaagtgccattctagatgcgagtcccgactttggggygcttgcattctgggaagggagatggtcagccagaaagccccaccataggagctaggttgggggtccccaaggtacaccaagaagctcaagtgacctggac

SEQ ID NO: 139758 - DNA, 201 bp, Homo sapiens
gcgtggttgccccagtctccttcgccccaaggccatgcttggccgaccccctgacccgctgaggttgcgcagagctttttgggccctgtagcagcactgcytgggcaccaagccttgcatggtctcatgggactcactgcctgcagccgctagtcccagctcccctccttaccagaacccacaccatgttgtccagctgat

SEQ ID NO: 139759 - DNA, 201 bp, Homo sapiens
ggttcggtttgtgttccagttctgagccctttacctcatccctcgagaagctggcctttgcaccccgcagccggtgctgcccagccgaccacgccatgcaygggaggcgactgggaccccacttgcctggcagcccggccggagacccagctgcctgggagggtccgaagataatgccaggcagccctggcgggccgggaa

SEQ ID NO: 139760 - DNA, 201 bp, Homo sapiens
atggtgaaaccctgtctgtactaaaaatacaaaaaaattagctgggcgtggtggtgcctaactgtaatcccaactactcgggaggctgaggcaggagaatsgcttgaacccgggaggcggaggttgcgttgagccaagattgtgccactgcactccaccctgggtaacaagagtgagactgtctcaaaaaaaaaaaaaaaa

SEQ ID NO: 139761 - DNA, 201 bp, Homo sapiens
tccacctgcctcggcctcccaaagtgctggaattacaggcatgagccaccatgcccagcctctaaaaagaacactaatcccattcatgagggctccacacyggtgacctagtcacctcccaaaggccctacctgttaatgccagcacactgggattcgattacaacacaaaaattttagaggggcacaaacattcagccca

SEQ ID NO: 139762 - DNA, 201 bp, Homo sapiens
cccaggcaggcgaggggagtggagttttgctgcctgatgcaatgtctggcagggccgtcccttatcacagccgacttgctgggacccccaccttccccggrggaggccggaacaggccgcagtccattttgggcctcagtggaagggcctggttggaggccatccaagtagaaaactcgttctctgggaggcaccttgcca

SEQ ID NO: 139763 - DNA, 201 bp, Homo sapiens
ggagttcaagaccaggctgggcaacatggcaagaccccatctctacaaaaaattttaaaaattagctgggtgtggtggtgtgcacttgtggtgactaaggrggctgaggtgggaggatcaattgagcctgggaggttgaggctgcagtaaactatgatcgtgccactgcactccagcctgggcaacatagtgagaccctgt

SEQ ID NO: 139764 - DNA, 201 bp, Homo sapiens
aggttcagaggcttgtcatttaggcaccccaacttctataccttaccaaggtgccaggcccagagggaagggggtagccagggcagctccccgacccgcasctgccttttcacccctctcctatttcacaagcatttaccatgcatcaacagatatgttcctcacagcacctttatcagcagggactgcccttttcatgct

SEQ ID NO: 139765 - DNA, 201 bp, Homo sapiens
gagaaggttcagaggcttgtcatttaggcaccccaacttctataccttaccaaggtgccaggcccagagggaagggggtagccagggcagctccccgaccsgcacctgccttttcacccctctcctatttcacaagcatttaccatgcatcaacagatatgttcctcacagcacctttatcagcagggactgcccttttca

SEQ ID NO: 139766 - DNA, 201 bp, Homo sapiens
atttcagtcgagggtcattttttcctttatccatctgttgttcaccaactgtgtatctcttgcctggcccaggattgagagataatgaggggcccagatgmactccctgtcctgcctgaagggatgttcagtattgaacaattgttgctttatggctttatgacaaagtcccaggtgctcatgataatctttgtacagtgg

SEQ ID NO: 139767 - DNA, 201 bp, Homo sapiens
ggaaggagaaggttcagaggcttgtcatttaggcaccccaacttctataccttaccaaggtgccaggcccagagggaagggggtagccagggcagctcccygacccgcacctgccttttcacccctctcctatttcacaagcatttaccatgcatcaacagatatgttcctcacagcacctttatcagcagggactgccct

SEQ ID NO: 139768 - DNA, 201 bp, Homo sapiens
cagtccccacttacctggtggaaaatgtcaacagtgctgaggttgggaagccccgtcctgcataagcacagggtctgcacctttgtgtgtgtgtgtgtgtstgtgtgtgtgtgtgtgtgtgttctcatgtattttctggatcattcacatttatacatccacctcattattctttgtggccacataaaaatccattacctg

SEQ ID NO: 139769 - DNA, 201 bp, Homo sapiens
gcctagcccttgcaccatggaagtgggagagaagtgatacaaaggtgtatctgatgtcacaggtgtcacaggcctgcttcttgtaaagggcctcctgcatrgtgagttctgcgtggggctttgctgagtaacccccatccgggctctatccccttccctcatggccctgtgacttcctggcaccatgaccctctccccgct

SEQ ID NO: 139770 - DNA, 201 bp, Homo sapiens
acatccacctcattattctttgtggccacataaaaatccattacctggatgctccaccattttcatttaggtgtttgcactctttttgctattataaacayttatgctacaaaggttattcttttccgtgcacaggcctttgatgtgtgaggtcaagggagaaactgatggaggtgggatggatgaacccgatggttcatt

SEQ ID NO: 139771 - DNA, 201 bp, Homo sapiens
gcccagggcctggcacgtggtgtgcactcaccagatggtcgccgccctgaaagaactcagcactgtgcctcttttcctgcctctggtgtttgctgtcaatrtgcagagtgctggacaaaactgggccaagggagctgtcccactgcctgctgccctcaagcagagctgacctggcacatgcctctggcatacttcctgttg

SEQ ID NO: 139772 - DNA, 201 bp, Homo sapiens
cagacagatgaagctctcctctcccggagtcaacgttctgggggatgagaggccatcagcaagtgcatttccatctatgaagggagtaaagcagggcgccragagggaaagtgatgggggtggcccacattaggtcaggggtcagggaagtactccagagctgggggggcatttgagctgagtcctgattgcttagaagga

SEQ ID NO: 139773 - DNA, 201 bp, Homo sapiens
cagtcggtggccatggttcgcaccgtggtcccagcacacgccctcagcatgcacctgtggcccacacgctcatgctcacagccactcatgtatggagcaaytgcctttttttcttcctcttcatatcttctgtcaacttagaacgattaagcatcttgcagtaggctcaatgctttgggaaggacattgattcgttcattc

SEQ ID NO: 139774 - DNA, 201 bp, Homo sapiens
ctcccccttgttaccccacagctgtgagaggctggatggaaacaagaattcaagagactaaagttatgtgcggtcccaagtgtgaagttttgcccacagtyggtggccatggttcgcaccgtggtcccagcacacgccctcagcatgcacctgtggcccacacgctcatgctcacagccactcatgtatggagcaactgcc

SEQ ID NO: 139775 - DNA, 201 bp, Homo sapiens
tttgcgttcagatgtacccaatgtttagctcccacttctaagtgagagcatggggcacttgattttctgttcctgtgttagtttgcttaggataatagcckctaactccatccatgttgctgcaaaggacatgatctcattctcttttatggctacatagtatttcatggtatatatgtaccacatttctttatctggtct

SEQ ID NO: 139776 - DNA, 201 bp, Homo sapiens
ccactgcagaggggacacactgaccaggacggaagttgggggactgggtgtggggagaagccaccccactgcaggggccggggctgtccatctttgtaccyctggttccatcccagtgcctgaggcatgggaagttcttggaaatgtagtcagatgctgggtgaagccccaggaggggccgtgaatgcttctgctgggaac

SEQ ID NO: 139777 - DNA, 201 bp, Homo sapiens
cttccacaggaagcccacctgggtgagttcttagagccttcctagtgctgagctgcaaagaaactggagccctctccccctccactgcagaggggacacastgaccaggacggaagttgggggactgggtgtggggagaagccaccccactgcaggggccggggctgtccatctttgtacccctggttccatcccagtgcc

SEQ ID NO: 139778 - DNA, 201 bp, Homo sapiens; identical to SEQ ID NO: 25197

SEQ ID NO: 139779 - DNA, 201 bp, Homo sapiens
gaggtgtaggtcagttcctacctctccaacctgaggtcctgcacttcctgcagctgttggaagggatcgtatccaatgggagcaagaaagtgtgctccccyacagccccactcaggcataaagggccgaggggcagccaggcctgtcctggctagggctggctcagagtctgtggcagccccacccctgccaggctggccc

SEQ ID NO: 139780 - DNA, 201 bp, Homo sapiens; identical to SEQ ID NO: 25198

SEQ ID NO: 139781 - DNA, 201 bp, Homo sapiens
ttgctttcactgtgccaatgcaccacagttacccagcctgccggctctgataagatgctcgccatgcttctcccatgctggacttgggccacgtccttggscatgaatcttggtctatgtccaggtcggttctgaatgagccagcagactcctcccggggctgcccggctacatggttgagggcatcctggacaccagctt

SEQ ID NO: 139782 - DNA, 201 bp, Homo sapiens; identical to SEQ ID NO: 25200

SEQ ID NO: 139783 - DNA, 201 bp, Homo sapiens
aaccaagagccaattaaactgcttttctttataaattacccagtctcaggtatttctttatagcagtgcaaaaacagcctaatacaccctatctatacacrcagcagacatcactactcaactgccatgttctttcccacagaaaacaagcctgatctcaggattcttctcatcaaagtgctccaggctgccaattaccaa

SEQ ID NO: 139784 - DNA, 201 bp, Homo sapiens
aatatgcagagtgctggacaaaactgggccaagggagctgtcccactgcctgctgccctcaagcagagctgacctggcacatgcctctggcatacttcctkttggccctggcaccctgcaaagaggcccccagtgggcccaagcaggggataccacccgttccttgggctgttatgtagttgctggggcattgaggggatg

SEQ ID NO: 139785 - DNA, 201 bp, Homo sapiens
agacagaggaaatagaagtagggttggaagaaaacagggagcagaagaaattctcctctctgtcctgtcccttacttgatcattctccaggatcagaaagyctccttagaaggtcaggaaggaggatagagcaagaattagggatcctagacttatgcatggagagtttttctctacccggttatctcagaaatcctgtaa

SEQ ID NO: 139786 - DNA, 201 bp, Homo sapiens
agaggtctcatgaatctgttacccacttccccctatggtaacattctgtgaaagcctagcctaatgtcacaatcagaatgttgacttcatacagaatcccytgtggtgcccttttataactacactcacttccctcctgcccccaccccttccttgacccttggcaatactagtctgttctccattcttacagttttgtca

SEQ ID NO: 139787 - DNA, 201 bp, Homo sapiens
gatctcttgaaaccctgcctcctgttgtgggagctagttttcttttcttttttttccttttcattacacagtttcattttgacataacagtagattcacaygcaattttaataaattgtacagagaggtctcatgaatctgttacccacttccccctatggtaacattctgtgaaagcctagcctaatgtcacaatcagaa

SEQ ID NO: 139788 - DNA, 201 bp, Homo sapiens
cccggcccttcatcccagcccctggcagacacccttctgtctgcctctatgattttggcgctctgggtacctcatagataagtgagattgtatagtatttstcctttggtgaccagcttatctcaccaagcgtgatgtcctctgggagcatccgtgtggaagaggtgctagcatcattttgacttctcaaacatctcgtgg

SEQ ID NO: 139789 - DNA, 201 bp, Homo sapiens
ctgtggagccaggcttcctgtgttccgatcccagctctgcctttaactcagggtaagttttctcatccccttgcctttgatggggatggtgactattatcyataagcattatccagggttcttccaaagattaagtacatttatgtacatgaagtacttggaacaattccttgttcactgtgttaacttctgttactattc

SEQ ID NO: 139790 - DNA, 201 bp, Homo sapiens
cccaccttagcctcccaaagtgctgggattacaagcataagccaccacgcccagtctccataaatgatttaagaaaaaatgtagccaggcgtagtggcacrtgcctgtgctcccagctccttgggaagctgaggtgggaggattgcctgagtgtgggatgtcgaggctgcagtgagccaagatcatgccactgtaccccag

SEQ ID NO: 139791 - DNA, 201 bp, Homo sapiens
acggccttttgagctcctgtgctcgggccgccccacgctgtggagcgcactttctcagtaaatcccttcatcccttccttgctttgtgcgttttgtctaaytctgtgttcaagacaccaagaacctggacaccctccacctttaacacaaagccacaccacaagttggtgacaggtcctgaaagatcagttcctgactagg

SEQ ID NO: 139792 - DNA, 201 bp, Homo sapiens
agtatattccagggcgttttgttcttcgctaattaaatatatgaaaaatggcgtcatgtagactgtcgttctgccctgcacgtctgtgctttctttgggcrgttgccctccgcctttttctgctgaaatattcataggggattatgttcactccagacacactccagtggccttccccaaattttcccaaaaccccaaaac

SEQ ID NO: 139793 - DNA, 201 bp, Homo sapiens
tgatctgcccgcctcagcctcccaaagtgctgagattacaggcgtgagccaccatgctcggctgacggccttttgagctcctgtgctcgggccgccccacrctgtggagcgcactttctcagtaaatcccttcatcccttccttgctttgtgcgttttgtctaactctgtgttcaagacaccaagaacctggacaccctcc

SEQ ID NO: 139794 - DNA, 201 bp, Homo sapiens
cagacaaattacagaaaaggagccagtctcagtgagcatattccagctctagaacagtggctttccaacttttagactaaaacctcagacacagacacccmcacataactgaaacaaaagccttatgaaacccatattttagctgggcacagtggctcatgtctgtaattccaaacactttgggaggccgaggtaggaaga

SEQ ID NO: 139795 - DNA, 201 bp, Homo sapiens
gggccatgtcacagctgtccttcccacccctgccacgtgttctggagagctggactcctcagcagcacctggtccacaggagagaagaatggggcagagcsggagcagccaggggaggtgataaccacacgctcatctggtccccagctcttgcttttacatccacgccccacagggagacagcaattatctgttggcccc

SEQ ID NO: 139796 - DNA, 201 bp, Homo sapiens
gatgctgggtgaagccccaggaggggccgtgaatgcttctgctgggaactcctagagtggcggcacagagagggtctttgctgcgaaggaacactcagagmgtctctggctttcgtgaggttatgcctcaggagaggagacacttctccttttcattcgttaaacagaaatgatatttgccaccttttcttctctaaggcc

SEQ ID NO: 139797 - DNA, 201 bp, Homo sapiens
ttgtctccagctgccctccgtcctcttgatccccctcaccccccaccacctcctcacaaagatggctgtgtgctgagggactgtggcttccctgggccctrggaaatttatcactgaggtttcagaggactctatgaaaaggatttggagaaaaagtgtggaaaataaacaagccagttcccagttcagcctctcctgaat

SEQ ID NO: 139798 - DNA, 201 bp, Homo sapiens
tctatacaagtgttgagagcagtgcctggcacactgagcatcaggaagggtgagctattattatataggtatatgttttaatgcagctagaaaaggaaatygaggtcagatcatagaggcccttgaatgtcattctttccattcactaagcacctgccatgtgccagattcttcacagtcattctcaccaagccccctaca

SEQ ID NO: 139799 - DNA, 201 bp, Homo sapiens
gtcagatcatagaggcccttgaatgtcattctttccattcactaagcacctgccatgtgccagattcttcacagtcattctcaccaagccccctacaaccyggcaaggttgttagcaatgtctccatttcacagatgaggaaactgaggctcagagaggttgagtaacctgcctaaagtcactcagtcagggagagtcaga

SEQ ID NO: 139800 - DNA, 201 bp, Homo sapiens
atctctgccctgagagcccccagtacagatgtccatagaacgggaaaggctggcgcccttcaaaggacgcaaagagcattggatgagcactgcccagctgrtccctgcccaccttccacaggaagcccacctgggtgagttcttagagccttcctagtgctgagctgcaaagaaactggagccctctccccctccactgca

SEQ ID NO: 139801 - DNA, 201 bp, Homo sapiens
agcttgcatggtaaggactgtccagatgggattaagttaaggattttgagttgagagattatcctggattatccaggagagccctaaatataatcacaagygtccttataagagggaggcagaagatttgactacagaagaggagtgtcagaataatgcatggtgaaaaaaactatcagccattgctggtttgcagatgga

SEQ ID NO: 139802 - DNA, 201 bp, Homo sapiens
agaagccagtcacttgcccggtcacactgtacaaagtggctcagggctggactcactggcttatgcctgtaatcccaacactttgggaggccaaggtgggyggatcacttgaggtcaggagtttgagaccagcctgaccaacaaggtgataccccatctctaattagctggacgtggtggcaggcggctgtaatccagcta

SEQ ID NO: 139803 - DNA, 201 bp, Homo sapiens
tggagtacagtggtgcgatcttggctcactgcaacttccacctcccaggttcaagcaattcccctgcctcagccccctgataggcgtgcaccaccatgcgyggctaatttttttttttttttgtattttagtagagacgaggtttcaccatgttggccagaatggtctcgatctcctgacctcgtgatctgctcacctcag

SEQ ID NO: 139804 - DNA, 201 bp, Homo sapiens
gggaagaaattgccaggtagaccaaacatcctcaaatgggttactgtatttttttcccctttttggtcctctccagggtaatctattacctggggaaatcagccttcacctgacacctcctattgtcatttacctggtgaacataaggggccatgtcacagctgtccttcccacccctgccacgtgttctggagagctgga

SEQ ID NO: 139805 - DNA, 201 bp, Homo sapiens; identical to SEQ ID NO: 25206

SEQ ID NO: 139806 - DNA, 201 bp, Homo sapiens
gcagtgctggagggcacagggaagtcacagatgtatgtgcaacaccgtgtggccgaggcattccgtgtggctgtggctgctggtgaccccaatctgccggygctgccctatgtccagatcttctatgacacgacaaaccactttctgcccctggtgagtcttctgtaacctgcccaccttgtcaacctgccttgtcagata

SEQ ID NO: 139807 - DNA, 201 bp, Homo sapiens; identical to SEQ ID NO: 25214

SEQ ID NO: 139808 - DNA, 201 bp, Homo sapiens; identical to SEQ ID NO: 25210

SEQ ID NO: 139809 - DNA, 201 bp, Homo sapiens; identical to SEQ ID NO: 25209

SEQ ID NO: 139810 - DNA, 201 bp, Homo sapiens
gttgtgggaggacacagtggtgtattgacaaagacggaacatgggagggaatgtaccctcagctcactgtaaagcccgctttggtgtgcacctgccactcsatgcccggggcatcatagccagcttgcggtgtggctgctttaaaaggcccaagagacccctggggaaacatgctttccccagctcctcctgtaaggatgg

SEQ ID NO: 139811 - DNA, 201 bp, Homo sapiens
  misc_feature (1)...(201): n = A,T,C or G
cctctatccctactttggacccaggggcacagctcacaatgggggcatcccccaggctttgccccttgaccgccacctggcactggctgcctaccagatcnaccacagcctgagacctggctttgctggcccagcagtgctggattgggaggagtggtgtccactctgggctgggaactggggccgccgccgagcttatca

SEQ ID NO: 139812 - DNA, 201 bp, Homo sapiens
cacctggcatgcctggccatattttaaaatattttttttaaggaggaaaagatccacgaaagtaaagtgcctagggcccatcaatgtcagatgcagccacrtggacaaagaacactccctgagcacaagacacgaaagaacccggtctccagtgtcacaaacaggcctgcccagcagggtctgcccctgcccacctcctcc

SEQ ID NO: 139813 - DNA, 201 bp, Homo sapiens
tgatgctgctaagcccccaccccacacttgaagcagcacccgttgtggtgggccatgcccgcctgtcacgggtgctgaaccagccccagagcctcttagtrgagacagtggtggtggcccgggccctgaggggccgtggctttggccgccgcctcatggagggcctggaggtctttgctcgggcccggggcttccgcaagc

SEQ ID NO: 139814 - DNA, 201 bp, Homo sapiens
gctgtggggccagagccgtgccctctatcccagcatctacatgcccgcagtgctggagggcacagggaagtcacagatgtatgtgcaacaccgtgtggccraggcattccgtgtggctgtggctgctggtgaccccaatctgccggtgctgccctatgtccagatcttctatgacacgacaaaccactttctgcccctggt

SEQ ID NO: 139815 - DNA, 201 bp, Homo sapiens
tccgccgcaccgctgggggccaacgttgtcggaccgaggagtccgaggtggcgactgagtgagatacccagctgtgcggagctaggacgcggaacatcccrgaggccagcatcaacatgtcagtaccgcacccttcccatttgctgcctgtaggtccaccccgcgcgtgcggtccccaagtggccatgccaccctgcacgc

SEQ ID NO: 139816 - DNA, 201 bp, Homo sapiens
ccagctgggtgagcctgtgcagggcctggtcttcaccagcagacggctgcctgccaccctgcttaatgccttccccacagccccctctccccggccacccwggaaggccccaaacctgactgcccaagctgccccaaggggtcccaagggacctccattgccaccaccccctcccctacctgagtgcctgaccatctcacc

SEQ ID NO: 139817 - DNA, 201 bp, Homo sapiens
ctggtccaactgagcttaccctggatcctgaacaccagccagaggagaccccagctcctagcctggctgagttgaccctggagcctgtgcaccgccgaccygagctcctggatgcttgtgctgacctcatcaatgatcagtggccccgcagccgcacctcccgcctgcactccctgggccagtcctcagatgccttccccc

SEQ ID NO: 139818 - DNA, 201 bp, Homo sapiens
cagccgcacctcccgcctgcactccctgggccagtcctcagatgccttccccctctgcctgatgctgctaagcccccaccccacacttgaagcagcacccrttgtggtgggccatgcccgcctgtcacgggtgctgaaccagccccagagcctcttagtggagacagtggtggtggcccgggccctgaggggccgtggctt

SEQ ID NO: 139819 - DNA, 201 bp, Homo sapiens
gccaccacacctggctaatttttgtatttttagtagagatgggttttctctatgttggccaggctgttcttgaactcctgaccttgtgaactgcccgcctyggcctcccaaagtgccgagattacaggcacgagcaccacgcccggcctgtattttttgtagagatggtgtcttgctatgctgcctaggttggtcttgaac

SEQ ID NO: 139820 - DNA, 201 bp, Homo sapiens
gtactactcggctctggcaaccccgaaggccaccttcccctgttgtcactgtgtaaggaggaaggagcactggtttgcaagtcagaagcctgggttgaagyctctgctcgggttcctgctggctgtgggaatgtggggttacctttcccggctggcctcgtttcctacatgtccaatgcaggggttccagtcacatgcatt

SEQ ID NO: 139821 - DNA, 201 bp, Homo sapiens
cctggaactggcaggaactgtgggttgtgttggtccccgaacccccatcgcctatatgaaatatggttgcttttgtggcttgggaggccatggccagcccygcgatgccattgactggtgagtgcatgcctgggaccaggccacaaaatccctcacactctggggtagtcaaggcttatgaggaagtacccaaaactgaag

SEQ ID NO: 139822 - DNA, 201 bp, Homo sapiens
ccccatcgcctatatgaaatatggttgcttttgtggcttgggaggccatggccagccccgcgatgccattgactggtgagtgcatgcctgggaccaggccrcaaaatccctcacactctggggtagtcaaggcttatgaggaagtacccaaaactgaagctggggtttggtccagggagatcccagtgtgcagtactactt

SEQ ID NO: 139823 - DNA, 201 bp, Homo sapiens
acctcccagagctgtataaaccctaaccctaacccaggaagcaggcaagcctgtgtgtgagtttccactctattgctggtactactcggctctggcaaccycgaaggccaccttcccctgttgtcactgtgtaaggaggaaggagcactggtttgcaagtcagaagcctgggttgaagcctctgctcgggttcctgctggc

SEQ ID NO: 139824 - DNA, 201 bp, Homo sapiens
cccccatcgcctatatgaaatatggttgcttttgtggcttgggaggccatggccagccccgcgatgccattgactggtgagtgcatgcctgggaccaggcyacaaaatccctcacactctggggtagtcaaggcttatgaggaagtacccaaaactgaagctggggtttggtccagggagatcccagtgtgcagtactact

SEQ ID NO: 139825 - DNA, 201 bp, Homo sapiens
ccaatgcaggggttccagtcacatgcattgggcaccattacatgtccaagctgtgccaggatctagaaaaatggctgggctcaggccaaggggccttcctrtctggcagtgaaaataagaggagataccaagggccctgagtctgagtctggaggggaagtcatgagcacagggcagtgccagggcccgggagctgccaca

SEQ ID NO: 139826 - DNA, 201 bp, Homo sapiens
tgtgagccactgagcccagccggattataatagccttttcatgcaccaggggctttatactcattatctcatttcattcatatgagttgaagtcagtttaycccccatttcacagatgaggaaaccaaggcccagagaggttaagaatttgtccaaggtcacacagctaggaagtaggattcaaacccagacagccaggct

SEQ ID NO: 139827 - DNA, 201 bp, Homo sapiens
aaaataagaggagataccaagggccctgagtctgagtctggaggggaagtcatgagcacagggcagtgccagggcccgggagctgccacagaggagcccaycttggtgacagacacctgtaggcgcgtccgtgatgcccagttcccaacacagggaactggacaaacgtttcatgcacgactcttttttcccttcttggct

SEQ ID NO: 139828 - DNA, 201 bp, Homo sapiens
taccccccagcctccaggatattacgtgtgcaccggcgtgggatcctggaactggcaggaactgtgggttgtgttggtccccgaacccccatcgcctataygaaatatggttgcttttgtggcttgggaggccatggccagccccgcgatgccattgactggtgagtgcatgcctgggaccaggccacaaaatccctcaca

SEQ ID NO: 139829 - DNA, 201 bp, Homo sapiens
ctgtgtgtgagtttccactctattgctggtactactcggctctggcaaccccgaaggccaccttcccctgttgtcactgtgtaaggaggaaggagcactgstttgcaagtcagaagcctgggttgaagcctctgctcgggttcctgctggctgtgggaatgtggggttacctttcccggctggcctcgtttcctacatgtc

SEQ ID NO: 139830 - DNA, 201 bp, Homo sapiens
cctcccagagctgtataaaccctaaccctaacccaggaagcaggcaagcctgtgtgtgagtttccactctattgctggtactactcggctctggcaacccrgaaggccaccttcccctgttgtcactgtgtaaggaggaaggagcactggtttgcaagtcagaagcctgggttgaagcctctgctcgggttcctgctggct

SEQ ID NO: 139831 - DNA, 201 bp, Homo sapiens
gattgtgccactgcactccagtgtgggtgacaaagtgagacactgtctctaaaaaaaaaaaaaagagagacaagatgatcaggatgagcgcagtggctcaygcctataatcccagcactttgggaggccaaaccaggtggatcatatgaggtcaggagttcgagaccagcctggccaagatggtgaaacccctttctacta

SEQ ID NO: 139832 - DNA, 201 bp, Homo sapiens
tgaacctgggaggcagaggttgctgtgagcaagattaaaccactgtgctccagcctgggcaacaagaatgagactgtgtctcaaaaaaaaaaaaaaaagawgatcaaacacaatgcgtcaacctcccagagctgtataaaccctaaccctaacccaggaagcaggcaagcctgtgtgtgagtttccactctattgctggta

SEQ ID NO: 139833 - DNA, 201 bp, Homo sapiens
agcctctgctcgggttcctgctggctgtgggaatgtggggttacctttcccggctggcctcgtttcctacatgtccaatgcaggggttccagtcacatgcrttgggcaccattacatgtccaagctgtgccaggatctagaaaaatggctgggctcaggccaaggggccttcctgtctggcagtgaaaataagaggagata

SEQ ID NO: 139834 - DNA, 201 bp, Homo sapiens
ggccatggccagccccgcgatgccattgactggtgagtgcatgcctgggaccaggccacaaaatccctcacactctggggtagtcaaggcttatgaggaastacccaaaactgaagctggggtttggtccagggagatcccagtgtgcagtactactttgcaggcaggcagaggcctcttggataacatggccagtgaagc

SEQ ID NO: 139835 - DNA, 201 bp, Homo sapiens
cctgagtctgagtctggaggggaagtcatgagcacagggcagtgccagggcccgggagctgccacagaggagcccaccttggtgacagacacctgtaggcrcgtccgtgatgcccagttcccaacacagggaactggacaaacgtttcatgcacgactcttttttcccttcttggctaccttgaggaccttgattataata

SEQ ID NO: 139836 - DNA, 201 bp, Homo sapiens
tgagtctgagtctggaggggaagtcatgagcacagggcagtgccagggcccgggagctgccacagaggagcccaccttggtgacagacacctgtaggcgcrtccgtgatgcccagttcccaacacagggaactggacaaacgtttcatgcacgactcttttttcccttcttggctaccttgaggaccttgattataatagt

SEQ ID NO: 139837 - DNA, 201 bp, Homo sapiens
ggggaagtcatgagcacagggcagtgccagggcccgggagctgccacagaggagcccaccttggtgacagacacctgtaggcgcgtccgtgatgcccagtkcccaacacagggaactggacaaacgtttcatgcacgactcttttttcccttcttggctaccttgaggaccttgattataatagttagccttttttttttc

SEQ ID NO: 139838 - DNA, 201 bp, Homo sapiens
tacctttcccggctggcctcgtttcctacatgtccaatgcaggggttccagtcacatgcattgggcaccattacatgtccaagctgtgccaggatctagawaaatggctgggctcaggccaaggggccttcctgtctggcagtgaaaataagaggagataccaagggccctgagtctgagtctggaggggaagtcatgagc

SEQ ID NO: 139839 - DNA, 201 bp, Homo sapiens
ctcgtttcctacatgtccaatgcaggggttccagtcacatgcattgggcaccattacatgtccaagctgtgccaggatctagaaaaatggctgggctcagkccaaggggccttcctgtctggcagtgaaaataagaggagataccaagggccctgagtctgagtctggaggggaagtcatgagcacagggcagtgccaggg

SEQ ID NO: 139840 - DNA, 201 bp, Homo sapiens
aggctagagtgtgctgatgtgatcttggctcactacaacctctgcctcctgggttcaagcgattctcgtgcctcagcctcccaagtggctgggactacagrcatgcaccatcacgcccagctaatttttgtattttttcagtagaggtggggtttcaccaagttggccaggctggtctcaaactccccacctcaagtgctc

SEQ ID NO: 139841 - DNA, 201 bp, Homo sapiens
agtggtgcaaatgtggctcaactgcagccttgacctccaggtctcaagtgatcctcctgagtagctgggaccacaggcacacatcaccacatctggctaawtattattattattattattattattttaagtagggacaaggtctcgctatgttacccaggctggtctcaaactcctcggctcaggtgatcctccacctca

SEQ ID NO: 139842 - DNA, 201 bp, Homo sapiens
tccaggatattacgtgtgcaccggcgtgggatcctggaactggcaggaactgtgggttgtgttggtccccgaacccccatcgcctatatgaaatatggttscttttgtggcttgggaggccatggccagccccgcgatgccattgactggtgagtgcatgcctgggaccaggccacaaaatccctcacactctggggtagt

SEQ ID NO: 139843 - DNA, 201 bp, Homo sapiens
ctcatttcattcatatgagttgaagtcagtttatcccccatttcacagatgaggaaaccaaggcccagagaggttaagaatttgtccaaggtcacacagcyaggaagtaggattcaaacccagacagccaggctgtaacacctgggctcttctcaggctcatgcccttcccaggggtctgggaagccctgacctgcagcct

SEQ ID NO: 139844 - DNA, 201 bp, Homo sapiens
ggattcaaacccagacagccaggctgtaacacctgggctcttctcaggctcatgcccttcccaggggtctgggaagccctgacctgcagcctgtcaccttygtttaccccccagcctccaggatattacgtgtgcaccggcgtgggatcctggaactggcaggaactgtgggttgtgttggtccccgaacccccatcgcct

SEQ ID NO: 139845 - DNA, 201 bp, Homo sapiens
acacagctcaaggatacccgagacagcactcaggacaattcagatgcaccgtgtacacacacacacacacacacacacacacacacacacacacacacacagagcagcacagacacacatatgtgcgcatagaccctggggtcacaggatggacagacagccctggccctcccccgaggaggctgcagcgggcagacaggg

SEQ ID NO: 139846 - DNA, 201 bp, Homo sapiens
ggctttatactcattatctcatttcattcatatgagttgaagtcagtttatcccccatttcacagatgaggaaaccaaggcccagagaggttaagaatttrtccaaggtcacacagctaggaagtaggattcaaacccagacagccaggctgtaacacctgggctcttctcaggctcatgcccttcccaggggtctgggaa

SEQ ID NO: 139847 - DNA, 201 bp, Homo sapiens
catttcacagatgaggaaaccaaggcccagagaggttaagaatttgtccaaggtcacacagctaggaagtaggattcaaacccagacagccaggctgtaayacctgggctcttctcaggctcatgcccttcccaggggtctgggaagccctgacctgcagcctgtcacctttgtttaccccccagcctccaggatattacg

SEQ ID NO: 139848 - DNA, 201 bp, Homo sapiens
cacagctcaaggatacccgagacagcactcaggacaattcagatgcaccgtgtacacacacacacacacacacacacacacacacacacacacacacacagagcagcacagacacacatatgtgcgcatagaccctggggtcacaggatggacagacagccctggccctcccccgaggaggctgcagcgggcagacagggc

SEQ ID NO: 139849 - DNA, 201 bp, Homo sapiens
cacagatgaggaaaccaaggcccagagaggttaagaatttgtccaaggtcacacagctaggaagtaggattcaaacccagacagccaggctgtaacacctrggctcttctcaggctcatgcccttcccaggggtctgggaagccctgacctgcagcctgtcacctttgtttaccccccagcctccaggatattacgtgtgc

SEQ ID NO: 139850 - DNA, 201 bp, Homo sapiens
ctggggtagtcaaggcttatgaggaagtacccaaaactgaagctggggtttggtccagggagatcccagtgtgcagtactactttgcaggcaggcagaggsctcttggataacatggccagtgaagccagatcttggtaccagctgccccttaccctggccttgagctgatgacgttgccttaaaaacttggctaggagct

SEQ ID NO: 139851 - DNA, 201 bp, Homo sapiens
cgcccggccccaaatgcgttttacattttcttcctctttgattcatctttgtcctccaacataaatatgctactttttccactgataaaaagacaaaatgraatttcaatctggcctggacttctcaaaaaagtcagtgtgatgaaaactgttctagataaaacagaaatgagactgggcatggtggctcatgcctggaat

SEQ ID NO: 139852 - DNA, 201 bp, Homo sapiens
aaagaaaaaaataataaaaatataaagtgaccaggtgtggtgattcacacctgtaatcccaccactttgggtcgaagcagtaatatcactggagaccaggwgtttgaaaccagcctaggcaacatagtgagaccctgtctctatattaacacacacacacacacacacacacacacacacacacacacacacacacaaagg

SEQ ID NO: 139853 - DNA, 201 bp, Homo sapiens
ccaggtgtggtgattcacacctgtaatcccaccactttgggtcgaagcagtaatatcactggagaccaggagtttgaaaccagcctaggcaacatagtgaraccctgtctctatattaacacacacacacacacacacacacacacacacacacacacacacacacaaaggaagccagactatgcactaggaactgccctg

SEQ ID NO: 139854 - DNA, 201 bp, Homo sapiens
atccttatgtttaaggattcctgaggaaattatacacactatagatgttatcagaagaagttacattttaatgggtgacttcactagcacaataacaatarcaggtatttcaaaatgtctaacatgcatcatgcagtttaggcttgccatgtaatccggcctcatgtagttcctccacattttggaataggcccatctgag

SEQ ID NO: 139855 - DNA, 201 bp, Homo sapiens
ttcatatccttcatgaaatacaaaatattttctcttgaaaattttctttgtttcaaaagtctagatggtcataactggcttcctgtgtaaaactatgcaamctagtaaaatctttggttagaaagactaaagatgttttccacatgaggccttgaatacacttgagttactatttttgctttagtaatgaccatttgtaat

SEQ ID NO: 139856 - DNA, 201 bp, Homo sapiens
gcagccaagcacatcttcactaggaatgttacgtggtgtgtgtgagctactcaaaaaagagacaagatctcccctgcagaaaggcctggtggcctcttctrttctggtgcaagtgctgcctctgagacacaacaaagtgatgatgagagttcctcacatgcagttataaacagcacatcaatttaacagtgtgatttcagg

SEQ ID NO: 139857 - DNA, 201 bp, Homo sapiens
gtatatacagcaaagtaaaatttttttgtaacattgaatgtggcaaagtttttagatatgacaccaggagcaggagcaaccaaaataaaattgataaattmggtttcatcaaattaaaatttttcacacatcaaagaacaccttcaataaagtcaaaagagaaaccagagtttgaagtatctatttgcaagttacatacct

SEQ ID NO: 139858 - DNA, 201 bp, Homo sapiens
gaaatctgcttttatttttataagttatttaaaaattgaatttgaaacacatacatctaaagaatagccagttagtgaaacaattttctacacaaaaatawttttaaaaggatatagataatacaaaaaatacatttcttaaaaatttgacataattaatccatagaagaaaggaagaataaacctgaaataatataataa

SEQ ID NO: 139859 - DNA, 201 bp, Homo sapiens
ggcaactgcaatcacacgcaatacctagatgccccaagtattacctggaatagcagtacaatgactctcatgttaagattaaaaatcatattttaaaaaaacactctgtaatatgtggtctgcagagttaacatttggacttttttttctttgttttgtgaagaacagttaggaaaagttttaccccaatcattaaatctg

SEQ ID NO: 139860 - DNA, 201 bp, Homo sapiens
cagttacattaaatatggctacaggcaactgcaatcacacgcaatacctagatgccccaagtattacctggaatagcagtacaatgactctcatgttaagmttaaaaatcatattttaaaaaaacactctgtaatatgtggtctgcagagttaacatttggacttttttttctttgttttgtgaagaacagttaggaaaag

SEQ ID NO: 139861 - DNA, 201 bp, Homo sapiens
aaatattcaactacactgtcagccatattacaaataaagtgagttagaaaatgataaatataacaagatgacaagtttttgcaggaggaaaatgtatacayaataagattaaaattatctaaataagtgtcacatgtgtacattgagctatgtaaataggacaaaagccatgatgaaaaaatatattttacataaataata

SEQ ID NO: 139862 - DNA, 201 bp, Homo sapiens
tccaagaactgtgcaactattgtgggagccactggagtctctgaaaagaggcccatcggttggtcaaagaggtgtgttataggaggatgagaagtccaacstgaattctcatcccaaatggttctgttcctttgctgggaagagacctacttcaaaaactgcaggtacagattacatttgggccacaagggaatgtaactt

SEQ ID NO: 139863 - DNA, 201 bp, Homo sapiens
acatcttaaatgaaggaatgattaaaaacttatactatgtgcatacaatagcattacaataattttatcaatgaaatattcaactacactgtcagccatawtacaaataaagtgagttagaaaatgataaatataacaagatgacaagtttttgcaggaggaaaatgtatacataataagattaaaattatctaaataagt

SEQ ID NO: 139864 - DNA, 201 bp, Homo sapiens
gtgaaacccgttcttcgtttattatgtaaaataattgctaacccaggttgctttcatttcaattaaatattaaattctaagataatttcttataagagaawaagacacttgacaaaatgtatcaggtgttttaaaaatgaatattgctatcagttttataatatgttcacgtgaaatcatacagagaaaaaaattaatcaa

SEQ ID NO: 139865 - DNA, 201 bp, Homo sapiens
ttttcgaatccgagaataactcaataccaagggctcctatgtgataatccctgtgtaactttagagactgtgagtaccctaaacccagctaccttgctccycattgaatcagtgccaggaagcccccttcattgctgagtggatgtggtagatgaagtgttctcaagccagagagatctgacagatcggcccctcggagac

SEQ ID NO: 139866 - DNA, 201 bp, Homo sapiens
tattaacttgcagaaagatttgaatgcaagtcaatggttgtgaaacccgttcttcgtttattatgtaaaataattgctaacccaggttgctttcatttcarttaaatattaaattctaagataatttcttataagagaaaaagacacttgacaaaatgtatcaggtgttttaaaaatgaatattgctatcagttttataat

SEQ ID NO: 139867 - DNA, 201 bp, Homo sapiens
catgattagggtgtcatttctatgtgcaatggctcaccgctattacttgagccatttgtaaacagcgtttaacttgtgcccaaaacaacccctgaaaaggrcccactcagcccccgggaattcaggaaaaaggagctatgccctgtgaaaacctgcttatggacttctccgaattgccccaagcaggggtctataggtaca

SEQ ID NO: 139868 - DNA, 201 bp, Homo sapiens
ttgaaaaatttccccacccatactaagggaaaaactgatagtgtcagtaggagggggaagagaataggaggtgtagaaggacaagaaaagggatgactagyactaaaatagtgataattactactactagctgttgttattaacttgcagaaagatttgaatgcaagtcaatggttgtgaaacccgttcttcgtttattat

SEQ ID NO: 139869 - DNA, 201 bp, Homo sapiens
tttaacttgtgcccaaaacaacccctgaaaagggcccactcagcccccgggaattcaggaaaaaggagctatgccctgtgaaaacctgcttatggacttcwccgaattgccccaagcaggggtctataggtacattttggtgcttgtctgtaccttttcaggatgggtcatggccttctccgtcaggacagagaaggcatg

SEQ ID NO: 139870 - DNA, 201 bp, Homo sapiens
catgtataataaagcacaaataatttataccacttgtatctgaatggcgcccttagtttagattccagggaattctgtcagcatataagattatattttttatgaaggaacacaataaactcatatattttaaattaatatcacacttttaagacatatgtacaaagcaagcattctttgttacgttattatttaatctct

SEQ ID NO: 139871 - DNA, 201 bp, Homo sapiens
atggacacccaaaagttctgataggaatgtacaaagagattaatgttgttttcatgcccaccaacattgcatctattctgcagcccactaataaaggtgtwaatttactttcaagttttatcatttaagaaatacattttataatgctattgttgtcttagattgtgatttctgtgattaatatgggcagagtaaattgta

SEQ ID NO: 139872 - DNA, 201 bp, Homo sapiens
tgcatgtggccctggaggagttactacccttggtatgcatgagtagttcctattagcatcagtgggaactcagtactccatatgtattcacaaaaggcaayttgagacccacagttatttttaatttctgatattaacactcatacatactgctgaatttaactcaatatatttcagttaagtgaaaatggtgcttaatgt

SEQ ID NO: 139873 - DNA, 201 bp, Homo sapiens
tcctctttatgactgagtagtattccaaggtgtgtgtctgtgtgtatgggggggtgtatattatatatatgtgtgtgagtgtatatatatatatatatatwcacacacatacatacatatcatattttctttatccacccattggttgatgggcatttaggtttgttccatatttttacagttgggaattgtactgctgta

SEQ ID NO: 139874 - DNA, 201 bp, Homo sapiens
aaaagtgtttggagacttctcacctcctgtccataaaattttgaattgtgtatgtgatctacatagaaagaatattaaagagtagattgaactcttcatakctgaatatagccttaaatatgcttgtatagcatccaccgacagaagtaatagttgtgcctcagacttaggggttgcatgtggccctggaggagttactac

SEQ ID NO: 139875 - DNA, 201 bp, Homo sapiens
tggcacacccatcatccaagcagtgtacacagcacccaatgtatagtcttttatccctcttcccactccaaccttccctgagtcctgagagtccattataytattcttatggctttgaattttcatagcttagctcccacttataagtgagaacatccaatgtttagttacctaatcctgaattacttcacttagaatact

SEQ ID NO: 139876 - DNA, 201 bp, Homo sapiens
ttttaaattatttcaatagattttagggaacaggtggtgtttgatttgatggataatttatttagttgtgatttctgaaattttggcacacccatcatccragcagtgtacacagcacccaatgtatagtcttttatccctcttcccactccaaccttccctgagtcctgagagtccattatactattcttatggctttga

SEQ ID NO: 139877 - DNA, 201 bp, Homo sapiens
ggtcaatttttttgtaaaatgtttgtactgagtaggtcttgttatgttacccaggctggtctcaaactcttggccttaaatgatcctctcatcttgcctcycaaagttctgggattacaggttgagccactatatttggcttgtagacccagttctcagtatctttcctggcttatcatctggtaatggaaggtaaaacta

SEQ ID NO: 139878 - DNA, 201 bp, Homo sapiens
gagtgagtggtggagagaacaccggactaaaagtcaggagagctggggtcaagtcccacccttctgctgagccagtctttcatcctgagtctcagtttacycattttttctggtcatttaaaaatattcatctgtttgattttattctcatattttaaattatttcaatagattttagggaacaggtggtgtttgatttga

SEQ ID NO: 139879 - DNA, 201 bp, Homo sapiens
gccctttgtcagagggatagattgcaaaaattttctccctttctgtaggtttcctgttcagtctgatgatagtttattttactcagcagaagctctttagyttaattagatcccatttgtcaattttgactttgttgcaattgcttttggtgctttagtcatgaagtatttgtctatgcctatgtcctgaatggcattgcc

SEQ ID NO: 139880 - DNA, 201 bp, Homo sapiens
gtcagggtaatagggtaaagtcatcagaacaagaaactacattatttgctgagtcagttccttgtggggtcctctagatcagctggcatcagtgaagtctytcagatcagctgacatcagtgagatccttcagaccagccgagtcagtagttttagcagtatgctggacctgaaggaatacctcaaaaggaaagttgatca

SEQ ID NO: 139881 - DNA, 201 bp, Homo sapiens
caaagcctttggttctatgagccaattcaggctttccatgtgatatcaacaaaatcaatacatctttgtccaaaaaaaaattaaaaatggagaaatgagtragtgagtggtggagagaacaccggactaaaagtcaggagagctggggtcaagtcccacccttctgctgagccagtctttcatcctgagtctcagtttact

SEQ ID NO: 139882 - DNA, 201 bp, Homo sapiens
tctctctcttccttttgatattttgagatgagtagtgctgcttggcctttatggtgcatactgcttcagcgtcagttttttcctaaaatttatggcaaaartgtttattgttttagagctttagtcatttcccagtggaacgtatgtggcattagaaatatagcaactgctacctgcttcctacagtaatattgaactatt

SEQ ID NO: 139883 - DNA, 201 bp, Homo sapiens
tattttactcagcagaagctctttagtttaattagatcccatttgtcaattttgactttgttgcaattgcttttggtgctttagtcatgaagtatttgtcyatgcctatgtcctgaatggcattgcctaggttttctcctagggtttttatggttttaggtttcacatataagtctttaatccatcttgagttagtactga

SEQ ID NO: 139884 - DNA, 201 bp, Homo sapiens
atgtctattggtcataaaatgatgacataatctgtgttttagcaatcaacaaaatactaaacagcaatggaattaaccaacaacagctacacaaaaatttwaaaaaaaataggctctaatgaatatatgttatataattcaattacataaacaaaggaaactaatgtatgatatttgaagtcaggctaatatttaattgga

SEQ ID NO: 139885 - DNA, 201 bp, Homo sapiens
tattttttttattgtttacaatgacatgaaacaaatttttctatttcttttcttttagtctgtgtacaccttcataggtgaagtgagtttcctgtggcaamaatacagttgagttttaattatttatccattcagtcactctatgtcttttacttggatcattcaatcaatttcatttgtaatattactaatagataaaga

SEQ ID NO: 139886 - DNA, 201 bp, Homo sapiens
attgttagatatttaaaactggtgacaactttgagcacaaagaaaaataaacagaactctgtattttgacataattttgtcttccacatattgactttttsatgtctcaatttatatcttttcttatttccatctcttaattgtagttattattttctttaataactttgtctttttatcttcatgataaagatataaatg

SEQ ID NO: 139887 - DNA, 201 bp, Homo sapiens
gtgtctctggaatatagtcagtgactcagaaatattattaattttgcaattatggctattttgttattattactaatactactaattacttaacatgtgcyggtcacttgagatatcattcttcatttaatagaaccagattgttcagtacatcaaaattatattctcttgcagagtcatagttgacagataccctgtgga

SEQ ID NO: 139888 - DNA, 201 bp, Homo sapiens
taacatcttcccaatcacaagtaacttttcctttgtgctcatagtcagggaaataaattctcatggctaaacagaaaagctgcctggaataaatacaagtkatttagcagagctgtaacaatataaaattaaagataagtaaacaaataacactagtcttcctaagaatccatactagggattaaaatattataaatgaag

SEQ ID NO: 139889 - DNA, 201 bp, Homo sapiens
tcctttgtattatttcttgtaagattggtctgatgtttatgaatgccttatcttttgtttcggaaaatgttatcactctttcaggtttgaagaattgcttyggtaggctcagtatttttgcatggcagatttttttcagcactttaaatgtatatcttattgtcttcttgctcacaagttgatttatttattttatttttt

SEQ ID NO: 139890 - DNA, 201 bp, Homo sapiens
attttatttttttttgagaaatttgatgaaacttgaattgggacattgtttaatatggtataaaccttttcttatactgctatcaatattctttctttgtrtttgccttttaacaatttaaataggatgtgcctttgggaaatactcttcggattaaatttgattagggtacatggatactgtcatctttctctagattta

SEQ ID NO: 139891 - DNA, 201 bp, Homo sapiens
ctgacacagaagcacagagataatgaacaatgcatgtataataaagcacaaataatttataccacttgtatctgaatggcgcccttagtttagattccagrgaattctgtcagcatataagattatattttttatgaaggaacacaataaactcatatattttaaattaatatcacacttttaagacatatgtacaaagca

SEQ ID NO: 139892 - DNA, 201 bp, Homo sapiens
aagaagggaaacagatttgttgtatttgaagcttgaagttgggaaacctgatagatgggacttcttcagtttattccaacaagaaagattatgatgcaagwttcctttctttctgtgacagaatatctcttcaaaaattacttaccttggcaactaaaaaatttgtttttcagagatttaataactgtttaatggttagaa

SEQ ID NO: 139893 - DNA, 201 bp, Homo sapiens
tttataaaacaaaaatacaagatgatctattaatctcacaaatattatagaaaagcttaaattacagggtcagttaaaaccctgtggccatcactcacacrgaacaccccaggaaatcataaacctatacattagtgcatctaagactttaagcaattacacatctgttttactatacattgttttacatcttaaaaacag

SEQ ID NO: 139894 - DNA, 201 bp, Homo sapiens
taagtgaatttataaaacaaaaatacaagatgatctattaatctcacaaatattatagaaaagcttaaattacagggtcagttaaaaccctgtggccatcmctcacacagaacaccccaggaaatcataaacctatacattagtgcatctaagactttaagcaattacacatctgttttactatacattgttttacatctt

SEQ ID NO: 139895 - DNA, 201 bp, Homo sapiens
taacaattacttaaatatttgaacttttaatttattatcacaattttctaagtcactatgtatgaaacatcatgattgtatttaacttgacaatataaaarttagtcaagaaaatatagttgttccatttacttcagtcttctaatagttctcattacttaacttgtcctcatttccttattagccatagggaaggcattt

SEQ ID NO: 139896 - DNA, 201 bp, Homo sapiens
catcacaattttggaagtttttcaacagccctatgatttataaactgtcaatcactatttttacatataaatcatttccagtggtagtaaatgtgctaatrttctcgatatatgtgaaaaatatcacttaaaattttttcttggaagaagcacttaataatttgtaaatcagaaacaaattatatgtactttctaagtaga

SEQ ID NO: 139897 - DNA, 201 bp, Homo sapiens
aatctggggctctttacttaccctaattttgaaataggtctattcagtgtatttttcagagggctatttagaaaaaaggaagcccaaactcacccaccctsagtctaggtacccacttagccatgtagatttagagaaatagaaaaaccaaactgccttggtggactggatttggccaatatctgataggaagatgtaata

SEQ ID NO: 139898 - DNA, 201 bp, Homo sapiens
aaatgtggccagaaatcttaggcccagtaatcttctttgtattattcattatattgctcttgtgctattgtttaaccaaccccctaaatgcctttactgtycatgctggctgtaagaatgctactgtttgctttgtttgtgctgatccccatatctatgctagaaggaggacccgtattaggatgccgtcactgcatgcac

SEQ ID NO: 139899 - DNA, 201 bp, Homo sapiens
ggaagcttgagaaaatagcaagccctgctctagtcacaccaagaactgactagtctatgcacggccgaagcttgaagaatcgtcatcagatgaataaatgyggccagaaatcttaggcccagtaatcttctttgtattattcattatattgctcttgtgctattgtttaaccaaccccctaaatgcctttactgttcatgc

SEQ ID NO: 139900 - DNA, 201 bp, Homo sapiens
gctaattcagctggtgagtttagttgaagccaatgttcatttattattttgaaagttctagagtccttgagaattatgagttgagagcccttgagaatctrctttgcctgtgtactataaatagaaaaacaatgcctagatgacagcacatattttaaaagcatgactcactgaatattttaagctgactgttgagatcta

SEQ ID NO: 139901 - DNA, 201 bp, Homo sapiens
aaggtaactgagacttttaaagaaaatccatttatgaataaaaaggaaatatgaggaaataaaaataaggaaaccaaaaacagagtagtgggctacatggwaatagaaaattacataaaaattaagtgtaaaatgattattagacaaggtgagttagacagggtaattttgcaatttggcaggatcacattttattgagca

SEQ ID NO: 139902 - DNA, 201 bp, Homo sapiens
tggcgtttaggcaagttcttcatgttaaatagatgtttccaattcatatccttcatgaaatacaaaatattttctcttgaaaattttctttgtttcaaaastctagatggtcataactggcttcctgtgtaaaactatgcaaactagtaaaatctttggttagaaagactaaagatgttttccacatgaggccttgaatac

SEQ ID NO: 139903 - DNA, 201 bp, Homo sapiens
aaagcttttaaatatctcagcagttaacaaaatttaaacacagaaactctaagtagtcacatggaatcactgaattgaaataacattcttcatcctcatgraaatctttttctataaaattttgaatatgctgcttaaagactggaatatgaagcactacagaagttggagatgaaaatgaaataattgtgaatttaatga

SEQ ID NO: 139904 - DNA, 201 bp, Homo sapiens
aggcaaatgcaggctttagatatggccatgcaaaaagtatatggctaagcgcaggaaagaatgcctataagtctggcagacccagtacaccctttcaaacytgaagactttgtttaggttaagaaatagactccaactattctgagccccatatgggacgggccccatattgtgatcttgtccactcccactgttgttaaa

SEQ ID NO: 139905 - DNA, 201 bp, Homo sapiens
tgagtttgcaaaccattatgattttagaattagctatctaccaaatattaaaagagctgtatatttatcatttaagtgttctgtataattatttgtgtacygtttctagtacataattactatgtattgaagctatgtgtttccaacacaaactttcttgtagagactggcagtacatggcagaatatagggacaatataa

SEQ ID NO: 139906 - DNA, 201 bp, Homo sapiens
accattatgattttagaattagctatctaccaaatattaaaagagctgtatatttatcatttaagtgttctgtataattatttgtgtaccgtttctagtamataattactatgtattgaagctatgtgtttccaacacaaactttcttgtagagactggcagtacatggcagaatatagggacaatataactatacatatc

SEQ ID NO: 139907 - DNA, 201 bp, Homo sapiens
tttaagtgttctgtataattatttgtgtaccgtttctagtacataattactatgtattgaagctatgtgtttccaacacaaactttcttgtagagactggmagtacatggcagaatatagggacaatataactatacatatcacaacttcttcagatttttattaaagcataagtaaactatattattctacatgatattg

SEQ ID NO: 139908 - DNA, 201 bp, Homo sapiens
atctttgtttagctgtcagagtggcttgctaaagaaacaaaacaaaaatgaccttttgactggctttccttaaaactagattaaattattttgcctgtaarttaaaatagaaacctgtatacatcacacaaagctacacaagacctccaatttcaaccaaaatttttcttttataatctctggtatacaatttactcaaaa

SEQ ID NO: 139909 - DNA, 201 bp, Homo sapiens
ttgaaactctatcactttacccaacaatgagtctccaaggaagttataattatttacatagagaaatattattactaaattaatcactgaagaaaaacaarttgcagaaagattgtaattttcccaaatgtaacattcattttttgtatcatattttacctaatggcattatcaatgttttgaccattcaggtagaaacca

SEQ ID NO: 139910 - DNA, 201 bp, Homo sapiens
aaatataaacgtgagctacttgagcataggaactacatcacattctcttttattctctacataccattaatgagtggattaggtaagtgctgtaaattgtkcattaaatgtgtaacataaaaaaaacacagaagcatagatagctgagtagatagataaattattatctaattcatatcttgaaactctatcactttaccc

SEQ ID NO: 139911 - DNA, 201 bp, Homo sapiens
tcaacttatttaaatataaacgtgagctacttgagcataggaactacatcacattctcttttattctctacataccattaatgagtggattaggtaagtgytgtaaattgtgcattaaatgtgtaacataaaaaaaacacagaagcatagatagctgagtagatagataaattattatctaattcatatcttgaaactcta

SEQ ID NO: 139912 - DNA, 201 bp, Homo sapiens
actaggagggggaagagaataggaggtgtagaaggataagaaaaaggatgactagtagtataatagtgataattactaatagtagctgttgttattaactkgcagaaagatttgaatgcaagtcaatggttgtaaaattggttctctaattgtttattatgtagaataattgttaacccaagttgttttcttttaaattaa

SEQ ID NO: 139913 - DNA, 201 bp, Homo sapiens
aaaaaaaaagaaaatctatcaatgactatacttccaaatttgcttgtggttctcttcttagcaaaatgagacgattaaaattgatcagggttttaaatagyattcctttgactcgctaagcacctattgaaaagtctcagctgaagcatagcttcatctgaaaaaaattaaatgcaattgactttctgtactaaacattct

SEQ ID NO: 139914 - DNA, 201 bp, Homo sapiens
tatatatatcacattttctttatccacctgttggttgatgggcatttaggctggttccatatttttaaaattgctaatagtgctgttgtaaacatgtatgygcatgggtctttttcatataaaacttttcttctgggaagatacacagtagtgggattgctggatcaaatggtacttctacttttagttcttataggaatc

SEQ ID NO: 139915 - DNA, 201 bp, Homo sapiens
acctactcttaaacttaagtttatcctgcatctttaactaaaactgagttggaggacatcatcatgcaactagtcaagagatgggcagcccttccaaaagrcacgttttggtcatatttttcacaagtacaagaaatcatgtggacatttaatgacatacttagaaagttctgtaaggatgtagtttaaaataataaactt

SEQ ID NO: 139916 - DNA, 201 bp, Homo sapiens
atatatatgtgccacattttctttatccaatctatcactgatggacatttgggttggttccaagtctttgctattgtgaacagtgccacaataaacatatrtgtgcatgtgtctttataatagaatgatgtattttaatcatttgggtatatgcccagcaatgggaatgctgagtcaaatggtatttctagttctagatcc

SEQ ID NO: 139917 - DNA, 201 bp, Homo sapiens; identical to SEQ ID NO: 25272

SEQ ID NO: 139918 - DNA, 201 bp, Homo sapiens
tcataaacataaaagggaaattaatcacatctgtgtgaacagatcatttaccttcatttgtctctttgccatccacatgctcagactgttgatttaatgayattgtatgtactttgacttataagggttacattttaacttcttggctaatttatctttggacataaccatgagaaatgacagaaaggaacagcaactgga

SEQ ID NO: 139919 - DNA, 201 bp, Homo sapiens
acaatttgacttcctcttttcctatttgaatactttttatttctttatcttgccagatttccctagccagaacctccaatactatgttgaatagaagtggkgagagagggcatccttgccttgtgccaattttcaaagggaatgcttccagcttttgcccattcagtatgatatgggctgtgggtttgtcataagaagctc

SEQ ID NO: 139920 - DNA, 201 bp, Homo sapiens
aaaatgtgcaggattgctacataggtatacatgtaccattgtggtttgctgcacccatcaacctgtcacctatattaggtatttctcctaatgctattccrcccctagcccccctccccataacaggccccactgtgtgatgttcccctccctgtgtccatgtgttctcactgttcagctcccacttatgtgtgagaacat

SEQ ID NO: 139921 - DNA, 201 bp, Homo sapiens
tgcttcggtaggctcagtatttttgcatggcagatttttttcagcactttaaatgtatatcttattgtcttcttgctcacaagttgatttatttattttakttttttttgagaaatttgatgaaacttgaattgggacattgtttaatatggtataaaccttttcttatactgctatcaatattctttctttgtatttgcc

SEQ ID NO: 139922 - DNA, 201 bp, Homo sapiens
tgctacataggtatacatgtaccattgtggtttgctgcacccatcaacctgtcacctatattaggtatttctcctaatgctattccacccctagccccccwccccataacaggccccactgtgtgatgttcccctccctgtgtccatgtgttctcactgttcagctcccacttatgtgtgagaacatgcggtgttagattt

SEQ ID NO: 139923 - DNA, 201 bp, Homo sapiens
taggtatacatgtaccattgtggtttgctgcacccatcaacctgtcacctatattaggtatttctcctaatgctattccacccctagcccccctccccatracaggccccactgtgtgatgttcccctccctgtgtccatgtgttctcactgttcagctcccacttatgtgtgagaacatgcggtgttagattttctgttc

SEQ ID NO: 139924 - DNA, 201 bp, Homo sapiens
gttagattttctgttcttgtgatagtttgctgagaatgatggtttccagcttcatccatgtccctgcaaaggacatgtactcatccttttttatgtgtgcrtagtattctatgatatatatgtgccacattttctttatccaatctatcactgatggacatttgggttggttccaagtctttgctattgtgaacagtgcca

SEQ ID NO: 139925 - DNA, 201 bp, Homo sapiens
gcaaagcctcagcatgaaggctagggtcaccttctaggacaaatccatgacatagtgcacatataagctggactaaacttggccaactctcttagcgtggygtttaggcaagttcttcatgttaaatagatgtttccaattcatatccttcatgaaatacaaaatattttctcttgaaaattttctttgtttcaaaagtct

SEQ ID NO: 139926 - DNA, 201 bp, Homo sapiens
tcttattatatatactaagtcaaacacacatgaaggaagagaaagaccctctcatattattttatattgttttatcctcagtacctgttttaagaaaaaaacaaataagtgaaatcaaagataggcagcccggcgccaggcccaaaaccagccctgggcctgcctggcctaaacctagtagttaaaaatcaactcataact

SEQ ID NO: 139927 - DNA, 201 bp, Homo sapiens
aacaaaactggcacatgtacccatgcaagtgtggcacggacacaatctggaagccatgtttaaaaattagttcccagcaataggaagatttaaaactcttmtaataagagtaataatagtaattaagaacctacttaccgctcctttgtttcctacctgtacttcttcaaatgataaaaagcttcatcgctaccttagttc

SEQ ID NO: 139928 - DNA, 201 bp, Homo sapiens
ccagagctaaacactcagtagtgacccaacctatagggccactatccaagaactgtgcaactattgtgggagccactggagtctctgaaaagaggcccatyggttggtcaaagaggtgtgttataggaggatgagaagtccaacctgaattctcatcccaaatggttctgttcctttgctgggaagagacctacttcaaaa

SEQ ID NO: 139929 - DNA, 201 bp, Homo sapiens
gcaccgtatagccttcagttacataccgagtacaagtacgtgttttttcctctgaagtctgaaacacaattttaatttagttcagtgttttagctggaaarcactgtcactttcagagcctttcattgtgcatctcattttattcctatgagtaattttgctaaaattcatccaatcctaggtcatccaaagaccagagct

SEQ ID NO: 139930 - DNA, 201 bp, Homo sapiens
tttgttatcattataaaagttgtgttccttcagacactgaatcttggcaaaatttggatgagtaggagacatggctttcttttgaaaataacatttttgawagtgggggaatgtagaggttctgagaaagatgagcttagagttggcccactgggttctccacctccctggtggtcacttccctaatgtccaaatatataa

SEQ ID NO: 139931 - DNA, 201 bp, Homo sapiens
ttggatgagtaggagacatggctttcttttgaaaataacatttttgaaagtgggggaatgtagaggttctgagaaagatgagcttagagttggcccactgsgttctccacctccctggtggtcacttccctaatgtccaaatatataataagaattgacatactagcgggttggatttttgatttcagtagtagctagctc

SEQ ID NO: 139932 - DNA, 201 bp, Homo sapiens
ttaatcactttttggatttatgatccagtgagaattttgttcatgtcctgcagtgattttttcaagttacatttttctatagattcttcttggtatagagrctttatttaaggatgaatttgtttttcataaaagatctagaatcctgattcatcatgacagtggctcagagtgattggcaaaaaacaaggttgataaagg

SEQ ID NO: 139933 - DNA, 201 bp, Homo sapiens
gcaacagagcaagactccgtctcaaaaaaaaaaaaaagaaaatctatcaatgactatacttccaaatttgcttgtggttctcttcttagcaaaatgagackattaaaattgatcagggttttaaatagtattcctttgactcgctaagcacctattgaaaagtctcagctgaagcatagcttcatctgaaaaaaattaaat

SEQ ID NO: 139934 - DNA, 201 bp, Homo sapiens
acttagctgaagctttttaaattttacgtattcaataaaccgttttgtcttgttgatttttaaatattttaaaaatctctattttttctctataatctttrttatatcccttttctactattttttagtttagtttctgttttcagatttcttgaggtactataggttgtttatttaagatatttctgcatttttaatgaa

SEQ ID NO: 139935 - DNA, 201 bp, Homo sapiens
acagaactctgtattttgacataattttgtcttccacatattgactttttgatgtctcaatttatatcttttcttatttccatctcttaattgtagttatkattttctttaataactttgtctttttatcttcatgataaagatataaatggcttatataccacaattatagtattagagtattctgagtttgtctttata

SEQ ID NO: 139936 - DNA, 201 bp, Homo sapiens
gacaactttgagcacaaagaaaaataaacagaactctgtattttgacataattttgtcttccacatattgactttttgatgtctcaatttatatcttttcwtatttccatctcttaattgtagttattattttctttaataactttgtctttttatcttcatgataaagatataaatggcttatataccacaattatagta

SEQ ID NO: 139937 - DNA, 201 bp, Homo sapiens
tgaaggatagcactcataaacataaaagggaaattaatcacatctgtgtgaacagatcatttaccttcatttgtctctttgccatccacatgctcagactrttgatttaatgatattgtatgtactttgacttataagggttacattttaacttcttggctaatttatctttggacataaccatgagaaatgacagaaagg

SEQ ID NO: 139938 - DNA, 201 bp, Homo sapiens
atcttacctagagtgcagtttaactctgaggttttttcattgattttctgtctgaattatatttttattattgtaagtaaagtgctgcactcttctactawtatcatatcacagtcaatctctctcttcagctctataaattttgctttatatatttggatgttccagtgttatgaccatatatatttacaattttattct

SEQ ID NO: 139939 - DNA, 201 bp, Homo sapiens
attagcccaactggaaatcttgtattgttttgcagtctgaagtcacacgcaccgtatagccttcagttacataccgagtacaagtacgtgttttttcctcygaagtctgaaacacaattttaatttagttcagtgttttagctggaaaacactgtcactttcagagcctttcattgtgcatctcattttattcctatgagt

SEQ ID NO: 139940 - DNA, 201 bp, Homo sapiens
atggtatatattgccacattttctttgtccagtctatcattgatgggcattggttgggttggttctaaatccttgctattgtgaataatgctgcaataaamatacttgtgcatgtgtctttaaaatagtatgacttgtaatcctttgggtagatgcccagtaatgggattgctggatcaaatggtatttatagttctagat

SEQ ID NO: 139941 - DNA, 201 bp, Homo sapiens
tttgaaatctagaatgcaatttttcattagcccaactggaaatcttgtattgttttgcagtctgaagtcacacgcaccgtatagccttcagttacataccsagtacaagtacgtgttttttcctctgaagtctgaaacacaattttaatttagttcagtgttttagctggaaaacactgtcactttcagagcctttcattg

SEQ ID NO: 139942 - DNA, 201 bp, Homo sapiens
tctttgctgtcttcttttttgcacatttttgaaatctagaatgcaatttttcattagcccaactggaaatcttgtattgttttgcagtctgaagtcacacrcaccgtatagccttcagttacataccgagtacaagtacgtgttttttcctctgaagtctgaaacacaattttaatttagttcagtgttttagctggaaaa

SEQ ID NO: 139943 - DNA, 201 bp, Homo sapiens
tgatggtttccagcttggtctgtgtccctacaaagggcatgaactcattctttcttataaatgcatagtatttcatggtatatattgccacattttctttrtccagtctatcattgatgggcattggttgggttggttctaaatccttgctattgtgaataatgctgcaataaaaatacttgtgcatgtgtctttaaaata

SEQ ID NO: 139944 - DNA, 201 bp, Homo sapiens
ttgataagaaactgaatgattgggtcagttaaaagacataatttcctccaataattcctgataatacttgattttctctctttagtaatttgtaccaattmtttcagtagtgcctgctgtgctgttactcttttgtgatggaacaaattcttttttcacaggaaatggaagaatttatccagagctctggagaaaatggtg

SEQ ID NO: 139945 - DNA, 201 bp, Homo sapiens
gacctgtccttcctcaatcctagcaccaccaccaaaccactgcctgctgccttgcccaccccatatatcacactctgtgactgcacttaaaataagagttmacttcatgcctatctctttgctgtcttcttttttgcacatttttgaaatctagaatgcaatttttcattagcccaactggaaatcttgtattgttttgca

SEQ ID NO: 139946 - DNA, 201 bp, Homo sapiens
tcatattgcaccatttacatcacacatcataatattcttcagagaacaagcataccttattttattgcactttgttttattatggtttacacatatttagktttttttgtttcttttttacacaaattgtatgcttgtggcaattgcacatcatgcaagtctactgacataatttttaaaatggcaagtaacaaatttata

SEQ ID NO: 139947 - DNA, 201 bp, Homo sapiens
gtatacaatttactcaaaaattcatacttgtgggaataatttccaaacatcaggacttctctccttctgtgatttgtttcctttagccactctgtctagaktctaccaaagctttcatctcaccgtattatgtgatctgtcacaccagctttttctgattgctccgtagatggataatggttttctctgggcttctgatca

SEQ ID NO: 139948 - DNA, 201 bp, Homo sapiens
ttctaaggtactattttggaaaatcatgatttccttatatacctaactaattataaaagttgagaaaattaatgtgagtattctatttacattagtctttragtagttcttatttactaacatcccttgatctcattcctactctttatacagttctcacattctataacttttgaattccactcatggaataaaatattt

SEQ ID NO: 139949 - DNA, 201 bp, Homo sapiens
aattgaaataacattcttcatcctcatgaaaatctttttctataaaattttgaatatgctgcttaaagactggaatatgaagcactacagaagttggagaygaaaatgaaataattgtgaatttaatgatgaaaataacatatgaagctgagtctatcgatgtcaaggacaaatgctttatgtataagttttctgaattaa

SEQ ID NO: 139950 - DNA, 201 bp, Homo sapiens
ggttttattaaaattaagtttaatattaatagcatactaatataaaggtaaaatttagcttatctggtataaaaatcatacaagaagcattattaaatatraaatggtgtttagctttctttggtctaaaaactaatacaaattggtgctaaaggaaacattcattttactagaagatcacagaagttaaagacttaaaaa

SEQ ID NO: 139951 - DNA, 201 bp, Homo sapiens
gttttaaaagtttaagcaagttttaaaacattaattgtaaagaaaagtctgtgtgtaaacatattagctaaagttaaaaagatatcatccagtttttctgygaactagacataaaagtaaaaatgcaacaggttttttttcttaaagcatcaacctgctctttaacaaaaattataaaaggttaaaaagagtctataaaat

SEQ ID NO: 139952 - DNA, 201 bp, Homo sapiens
cattgtgcatctcattttattcctatgagtaattttgctaaaattcatccaatcctaggtcatccaaagaccagagcttttataactcatggtggagccartggcatctacgaggcaatctaccatgggatccctatggtggggattccattgtttgccgatcaacctgataacattgctcacatgaaggccaggggagca

SEQ ID NO: 139953 - DNA, 201 bp, Homo sapiens
cccgtattaggatgccgtcactgcatgcacactacatggataagaaacacagtaattgctcacgcctgtaatcccagcactttgggaggccgaggcgggcggatcacgaggtcaggagatcgagaccatcccggctaaaacggtgaaaccccgtctctactaaaaatacaaaaaattagccgggcgtagtggcgggcgcct

SEQ ID NO: 139954 - DNA, 201 bp, Homo sapiens
tggcccagatcccacaaaaggtaagatgaagtgccttactggtgtggaaaactactgaaagaggctgttaaagtttgaagtaatccaattatagaaacttytgataaatgtgaagttgaccaaaagttgaaaaattagaacaaggataatcttggagaaactatgagaagtttgaaaattgtggttgcattttttttttaa

SEQ ID NO: 139955 - DNA, 201 bp, Homo sapiens; identical to SEQ ID NO: 25229

SEQ ID NO: 139956 - DNA, 201 bp, Homo sapiens
tgccgatcaacctgataacattgctcacatgaaggccaggggagcagctgttagagtggacttcaacacaatgtcgagtacagacttgctgaatgcattgmagagagtaattaatgatccttcgtgagtagaacaatatttttcactaggtggtatttacagatagcttctcttgtcaatagtgagtgtgagtttcatcct

SEQ ID NO: 139957 - DNA, 201 bp, Homo sapiens
catccactcttaccaaatgttgattttgttggaggactccactgcaaacctgccaaacccctgcctaaggtaaacatacttttgttggttttattttgttsgctttgaattttcagtagaaatgattctatagtcttctttcagagtgtttgacttacactgaaagaaagatgggaaatgggtggggtaaagcagatacca

SEQ ID NO: 139958 - DNA, 201 bp, Homo sapiens
aattgcacatcatgcaagtctactgacataatttttaaaatggcaagtaacaaatttatatctctgtgacccattttgctaattttcacaaaatttcaagstttttcgctactattatatctgtcctggtgatctgtgattggtgatttttcatattactgttgtaattggtttgcggcatcacaaattatgcccatataa

SEQ ID NO: 139959 - DNA, 201 bp, Homo sapiens
tctgtgatttgtttcctttagccactctgtctagattctaccaaagctttcatctcaccgtattatgtgatctgtcacaccagctttttctgattgctccrtagatggataatggttttctctgggcttctgatcatattgcaccatttacatcacacatcataatattcttcagagaacaagcataccttattttattgc

SEQ ID NO: 139960 - DNA, 201 bp, Homo sapiens
ctaaattaatcactgaagaaaaacaaattgcagaaagattgtaattttcccaaatgtaacattcattttttgtatcatattttacctaatggcattatcartgttttgaccattcaggtagaaaccatatcagtgtctttgttgatacaacactttcagcatcagatgtagtcagtaatcacaaattcaaattatattcct

SEQ ID NO: 139961 - DNA, 201 bp, Homo sapiens
gtataaagcattgtagagaaacataaatgtagatataaaattatcccaactgtgagtagcttatcctcagagctcatagttagggaagtaaaccactaackgtttccaactaagagaattctacagaaaacctgcctgaaataaacacaagggatttagtagaacaacaatatagaattaaagctgagtggtcccactttc

SEQ ID NO: 139962 - DNA, 201 bp, Homo sapiens
attgaaataacattcttcatcctcatgaaaatctttttctataaaattttgaatatgctgcttaaagactggaatatgaagcactacagaagttggagatraaaatgaaataattgtgaatttaatgatgaaaataacatatgaagctgagtctatcgatgtcaaggacaaatgctttatgtataagttttctgaattaat

SEQ ID NO: 139963 - DNA, 201 bp, Homo sapiens
gcaatcacacgcaatacctagatgccccaagtattacctggaatagcagtacaatgactctcatgttaagattaaaaatcatattttaaaaaaacactctrtaatatgtggtctgcagagttaacatttggacttttttttctttgttttgtgaagaacagttaggaaaagttttaccccaatcattaaatctgaaagtat

SEQ ID NO: 139964 - DNA, 201 bp, Homo sapiens
ttgcatgaaccaagaaggcagaagttgcagtgagctgagatcgcagcactacactctggcctgggcaacagagcaagactccgtctcaaaaaaaaaaaaaagaaaatctatcaatgactatacttccaaatttgcttgtggttctcttcttagcaaaatgagacgattaaaattgatcagggttttaaatagtattccttt

SEQ ID NO: 139965 - DNA, 201 bp, Homo sapiens
tagaaatgattctatagtcttctttcagagtgtttgacttacactgaaagaaagatgggaaatgggtggggtaaagcagataccaattagaaactcatgtrcacgttaataccatcacacgtatatgagttttatgagtattacaaatagagaggaatactaaggagactttgaaaatagggttggttaaattaaagtctt

SEQ ID NO: 139966 - DNA, 201 bp, Homo sapiens
ggtagcacatgcctgcaatctcagctactcaggagactaaggcacaagaattgcatgaaccaagaaggcagaagttgcagtgagctgagatcgcagcactrcactctggcctgggcaacagagcaagactccgtctcaaaaaaaaaaaaaagaaaatctatcaatgactatacttccaaatttgcttgtggttctcttctt

SEQ ID NO: 139967 - DNA, 201 bp, Homo sapiens
gttggttttattttgttggctttgaattttcagtagaaatgattctatagtcttctttcagagtgtttgacttacactgaaagaaagatgggaaatgggtrgggtaaagcagataccaattagaaactcatgtgcacgttaataccatcacacgtatatgagttttatgagtattacaaatagagaggaatactaaggaga

SEQ ID NO: 139968 - DNA, 201 bp, Homo sapiens
ttgcctacattattctaacccctttcagaaatttacctaaagtaattatcttgtgtcatccaccttttttttttctattcctgtcaggaagacccactacrttatctgagacaatggggaaagctgacgtatggcttattcgaaactcctggaattttcagtttcctcatccactcttaccaaatgttgattttgttggag

SEQ ID NO: 139969 - DNA, 201 bp, Homo sapiens
ttttttttctattcctgtcaggaagacccactacattatctgagacaatggggaaagctgacgtatggcttattcgaaactcctggaattttcagtttccwcatccactcttaccaaatgttgattttgttggaggactccactgcaaacctgccaaacccctgcctaaggtaaacatacttttgttggttttattttgtt

SEQ ID NO: 139970 - DNA, 201 bp, Homo sapiens
atgggcaaaatatgtaatacataaaattaaattatatctatatatgaatatgtgtatatatttttcaaagcacagatatttgcctacatttttgcctacaytattctaacccctttcagaaatttacctaaagtaattatcttgtgtcatccaccttttttttttctattcctgtcaggaagacccactacattatctgag

SEQ ID NO: 139971 - DNA, 201 bp, Homo sapiens
aggagttcaagactttataactacagatgtgttttattccatttctttcatcaatgttttatcatttttattgtaaagatcttatattttcatggctaaayctattcctacacaatttcatttttgtaactttgtaaatgtgatttattttctttgccttttttaaacatttagatattggaatacggaaacacaactgat

SEQ ID NO: 139972 - DNA, 201 bp, Homo sapiens
cgtctctactaaaaatacaaaaaattagccgggcgtagtggcgggcgcctgtagtcccagctacttgggaggctgaggcaggagaatggcgtgaacccggraggcggagcttgcagtgagccgagatcgtgccactgtactccagcctgggcgacagagcgagactccgtctcaaaaaaaaaaaaaaaaaaaaagaaacac

SEQ ID NO: 139973 - DNA, 201 bp, Homo sapiens
ctgaagtctgaaacacaattttaatttagttcagtgttttagctggaaaacactgtcactttcagagcctttcattgtgcatctcattttattcctatgartaattttgctaaaattcatccaatcctaggtcatccaaagaccagagcttttataactcatggtggagccaatggcatctacgaggcaatctaccatggg

SEQ ID NO: 139974 - DNA, 201 bp, Homo sapiens
ttcatccaatcctaggtcatccaaagaccagagcttttataactcatggtggagccaatggcatctacgaggcaatctaccatgggatccctatggtgggsattccattgtttgccgatcaacctgataacattgctcacatgaaggccaggggagcagctgttagagtggacttcaacacaatgtcgagtacagacttgc

SEQ ID NO: 139975 - DNA, 201 bp, Homo sapiens
aatttgcaccaattcttttggtagtgcccgctgtgctaatactcttttgtgatgaagcaaattctttcttcacaggaaatggaagactttgtacagagctytggagaaaatggtgttgtggtgttttctctggggtcaatggtcagtaacatgacagaagaaagggccaacgtaattgcatcagccctggcccagatccca

SEQ ID NO: 139976 - DNA, 201 bp, Homo sapiens
aagctgacgtatggcttattcgaaactcctggaattttcagtttcctcatccactcttaccaaatgttgattttgttggaggactccactgcaaacctgcmaaacccctgcctaaggtaaacatacttttgttggttttattttgttggctttgaattttcagtagaaatgattctatagtcttctttcagagtgtttgac

SEQ ID NO: 139977 - DNA, 201 bp, Homo sapiens
tgaggtcaggagtttgagaccagactggacaatgcggtaaaactccgtccctgctaaaaatacaaaaattagccaggcatggtagcacatgcctgcaatcycagctactcaggagactaaggcacaagaattgcatgaaccaagaaggcagaagttgcagtgagctgagatcgcagcactacactctggcctgggcaacag

SEQ ID NO: 139978 - DNA, 201 bp, Homo sapiens
tcttgagaattcaaatgatgaattttttgacctagcttattattttcttttattttctatttgagacaaggtcttgctctgtcacccaggctgaagtgcartcatggcttgcttcagcctcgaactctcaggctcaagtgatcctccccaccaaagcctcccaagtagctaggactgtaggcacaccccagcacacctggt

SEQ ID NO: 139979 - DNA, 201 bp, Homo sapiens
cgatcatgaccctctcacgcagacccccttagagttgtgagcccttaaaagggacaggaattgctcactcagggagttcagctcttgagagaggagtcttrccgatgctcccagccgaataaaacccttccttctttaactcggtgtctgaggggttttgtctgtaactcttcctgctacattactgtctttatttttatc

SEQ ID NO: 139980 - DNA, 201 bp, Homo sapiens
tatatatagagatctgtcatgcagaaatccttgcatataagcacatgaatgaactaaatttctccagcacttaaatggctttcagtcaatgaacacgtgtmcctccaacaaatgtttgaatgtagccattgcagagaacaggctgattatcacattacgaaacagaaaaagtagtttccagaaaaacaaataagtattttt

SEQ ID NO: 139981 - DNA, 201 bp, Homo sapiens
ccacttttatctcaacaattctactcccagttatatacccaacagatatgtataaataaatctaataccatatagaatatttatgacagaattatcaataytgtccaaaaattgttagcaacccaaatatctattaatcataaaatgaagacataatctgtgctttatcaatcaacagaatactacacagcaatggaatta

SEQ ID NO: 139982 - DNA, 201 bp, Homo sapiens
agcaaataatgagtaatgccatagaacattagaagaacacagttaacgaatggaaacttgtaacacgatacacacacacgcatgcatatatatatgtatcrtatatatcaactaaaagacattttcttagagcatattgaattgttaataattatttgaagtgacatgtggtgggacataaatcaagactcagtaaatttg

SEQ ID NO: 139983 - DNA, 201 bp, Homo sapiens
tctaaacagactttagaaaagagcaagtaattagtaaagacataaaacatttgaagaacacaattaacaaatggaatcttataatgtaaaatgatacaaaygcacatacatacacacacaataaacatatatgtatcatatatatcaacttgaagacacattttcctagagcatgtcgaatagttatctgaagtgatatgt

SEQ ID NO: 139984 - DNA, 201 bp, Homo sapiens
ttaagttaatatttatagaaggattaagaggaactatagtcttgtaacagggtctgcataattctaggacaacagccaaataactgtgaggaagtgagtcrgagaacaagctaacctaatgattaatgctgaatgtactacaagcttggtttacttttctctttttctttctttatctttgattactttaacaaagtttaa

SEQ ID NO: 139985 - DNA, 201 bp, Homo sapiens
aagtttaagtaatattctaaatctcctgttgtcattcaacaatgttcataacatcttcaccaggagtagattccatctcaggaaacaagtttctttgcccytccaaaagtagtaactcctcacttatttgttttatcatgagatttcatcaattctgttacatcattaagttccacttctaattatagttatctttctagt

SEQ ID NO: 139986 - DNA, 201 bp, Homo sapiens
ctttctttttatgcagggttatttcaaatgtcactaataaaacagctcttctgctatcaccaggaagtctgaattttctgtaggattaaattcctaatctyaatcataaagtgatgactcatttcgtgacgaagtgtgacctgtccttcctcaatcatagcaccaccaccaccccactgcctgctgccttgcacatctcac

SEQ ID NO: 139987 - DNA, 201 bp, Homo sapiens
gtaagtttaagtaatattctaaatctcctgttgtcattcaacaatgttcataacatcttcaccaggagtagattccatctcaggaaacaagtttctttgcycctccaaaagtagtaactcctcacttatttgttttatcatgagatttcatcaattctgttacatcattaagttccacttctaattatagttatctttcta

SEQ ID NO: 139988 - DNA, 201 bp, Homo sapiens
agtctttgagtagttttgttacctaacatccccgatctcattcttaatctctttagagtcctaacattctctaactttggagttctactaacggaataagrtattttttttactgtagcaggttctgtggagatttgatgggaatagaccacatggcttgggactcaatactcgagtgtacaagtggataccccagaatga

SEQ ID NO: 139989 - DNA, 201 bp, Homo sapiens
cctttcacaaaagatatttttagcatgcaatgctgtcagatagcattttacccatagaagatcttctttcaaaattggaattaatcctctcaaactctaaygctgctttataaagtaagtttaagtaatattctaaatctcctgttgtcattcaacaatgttcataacatcttcaccaggagtagattccatctcaggaaa

SEQ ID NO: 139990 - DNA, 201 bp, Homo sapiens
tgacttccttatatgcttaactaattatagaagttaagaaaatgaaatgttggcattctatttacatcagtctttgagtagttttgttacctaacatcccygatctcattcttaatctctttagagtcctaacattctctaactttggagttctactaacggaataaggtattttttttactgtagcaggttctgtggaga

SEQ ID NO: 139991 - DNA, 201 bp, Homo sapiens
gctagtacttagcatggctgtggcaatttcttaaaaataagacaacaatggcatttgccacatacattaacccaccctttcacaaaagatatttttagcawgcaatgctgtcagatagcattttacccatagaagatcttctttcaaaattggaattaatcctctcaaactctaacgctgctttataaagtaagtttaagt

SEQ ID NO: 139992 - DNA, 201 bp, Homo sapiens
ttacttggaaaatcctgacttccttatatgcttaactaattatagaagttaagaaaatgaaatgttggcattctatttacatcagtctttgagtagttttrttacctaacatccccgatctcattcttaatctctttagagtcctaacattctctaactttggagttctactaacggaataaggtattttttttactgtag

SEQ ID NO: 139993 - DNA, 201 bp, Homo sapiens
acagaaaaagactagatcctagtgtaagcatcctaataaaagaagaagttcaagaacactatccagaaccagtatttcagactttctatgatgaactaaawgtgccagtacccgagattccaggaaaaactaaaaatttgtttttgcaattagccgaacacatagcccagtctctacaagtcacttcacgttatgtttgtg

SEQ ID NO: 139994 - DNA, 201 bp, Homo sapiens
taatgatcatctgagtcttcagtcagtgcaacttttgttgatgaagattctcatatcaatgttgatggttgctaactcattttggtggtggccgctagtasttagcatggctgtggcaatttcttaaaaataagacaacaatggcatttgccacatacattaacccaccctttcacaaaagatatttttagcatgcaatgc

SEQ ID NO: 139995 - DNA, 201 bp, Homo sapiens
catatgatggttggccacacataggtcttcttttgtaaagcataccaattttttaaatacttgaacttttcatttataatctcatttttctaagctattayttggaaaatcctgacttccttatatgcttaactaattatagaagttaagaaaatgaaatgttggcattctatttacatcagtctttgagtagttttgtta

SEQ ID NO: 139996 - DNA, 201 bp, Homo sapiens
ttgcctgtggcttgtcctgctacacacacacacacgcacacttgcatgactgtgcattaataatagaggaaatgtatcttgtggcacatacctccttccaraggaactgagtgatgaggtttgtttaaaaaattgacactactgaaaacagtatggaggtttctcaaaatatttaacgtaagattaccatatgatgcagca

SEQ ID NO: 139997 - DNA, 201 bp, Homo sapiens
ggttctgtgttgatgccaggttggcagtcatcctgccttacttttcttcattctctgtggatcaagttgtttccttaaatagtcccaatgcgagtgcccgyatgtttcagttgaaggggctgtatttactcaccccttctgttcatctttgtgagagccatgcatattacctacttccggtcagtcatcctggccactcct

SEQ ID NO: 139998 - DNA, 201 bp, Homo sapiens
gaagttacattttaatgggtgacttcactagcacaataacaatagcaggtatttcaaaatgtctaacatgcatcatgcagtttaggcttgccatgtaatcyggcctcatgtagttcctccacattttggaataggcccatctgagtgatgttcagggtactattcagagaaagaatggcctaggctgacagacttagtcca

SEQ ID NO: 139999 - DNA, 201 bp, Homo sapiens
tgagaatttattccatgggtaaaatacaatatctatgttgaatgcgaattgtatgtgctttatgactttctaaagagacaaaagctgaggtaagactaatraaaattctatggcaccctaccctactattgaaagatttccctattcatattaagggaaagtgatagtgccactaggagggggaagagaataggaggtgta

SEQ ID NO: 140000 - DNA, 201 bp, Homo sapiens
acctggttaagtgggttcatgaggggatcttgtgacctgagggttacaaaaatctgtgaaagaagcatgttatttggggtagcacattcactcaccacttycctgggtgaggaaattttccttggttctgtgttgatgccaggttggcagtcatcctgccttacttttcttcattctctgtggatcaagttgtttccttaa

SEQ ID NO: 140001 - DNA, 201 bp, Homo sapiens
aggatttttatgattttaggtcttatgtgtaagtctttagtccatcttgagttaattttgtataaggtgtaaggaagggttccagttcagttttctgcatrtggctagccagttttcccagcaccatttattaaatagggaatgctttcctcattgcttgtttttgtcagttttgtcaaagatcaggtggttgtatatgtg

SEQ ID NO: 140002 - DNA, 201 bp, Homo sapiens
ttctgcatatggctagccagttttcccagcaccatttattaaatagggaatgctttcctcattgcttgtttttgtcagttttgtcaaagatcaggtggttktatatgtgtggtgttatttctgaggtctctgttctgttccattggtctatatatctgttttggtaccagtaccatgctgttttggttactgtacccttgt

SEQ ID NO: 140003 - DNA, 201 bp, Homo sapiens
gatcacctgaggtcaggagtttgagaccagcctggccaacatagaaaaaccctgtctctctctactaaaaatccaaaaagtagccaggcatggtggtgtgygcctgtaatcccacctactcgggaggctgaggcgggaaaaatctcttgacaccacgggaaggggaggttgcagtgagccgagactgcaccactgcactcc

SEQ ID NO: 140004 - DNA, 201 bp, Homo sapiens
tgtgcaattggcaccattaagccttctttcttcttactgcccataaaaacaggtaaacttctaggcttcccagtctatgcttcccacaaaaaaggaagcayagccataggtgattaaaaagataataaatggccccctgaaaaaatcatacaatactatggacctgccacttgggcacaagatggctcatgaagatactag

SEQ ID NO: 140005 - DNA, 201 bp, Homo sapiens
tcatgatggagtgtggcctgtccttcctctattcaagcaccatcaccaccccactccctgctgccttggatactatgccttatcatactcagtgacttcaycatttctctaagagaacaagttctggcatgcatcctgcttcttttgtgggggagggtggtaatgggaaatgggtgacacacaactatctttatccacagt

SEQ ID NO: 140006 - DNA, 201 bp, Homo sapiens
aagttctggcatgcatcctgcttcttttgtgggggagggtggtaatgggaaatgggtgacacacaactatctttatccacagtgttctctatttgtccacrtgacaatattgtattaattcttcaagtctcaagacacataccacatcttaatgtgtagccttcacttattgccccagaggacttggtgcatcttcctctg

SEQ ID NO: 140007 - DNA, 201 bp, Homo sapiens
cagaggttttaggatagtgcataagttctaaaatagccaaaaagtaaaataagaggaattactaaagatggtaacagaaggattataagaaagattgaggycaaagttgaagcagaaaaccataaatattattacagtactgactaattttcagcacacttatgttgtctttcagaatgagaactcatcaaatgttcattt

SEQ ID NO: 140008 - DNA, 201 bp, Homo sapiens
cagtaatcagcatgacaatcaatctctaattcccattatatttaatgttctccagatttttacactacattttgatcccatcactgataatttgtaaacarctagagctttcaaatttgccttcaaaaattattgaaaagaggagatattagtataaatgtagccatttatttgttcttacagtggtggttgatttgctta

SEQ ID NO: 140009 - DNA, 201 bp, Homo sapiens
tttttttctattcctgtcaggaagacccactacattatctgagacaatggggaaagctgacgtatggcttattcgaaactcctggaattttcagtttcctyatccactcttaccaaatgttgattttgttggaggactccactgcaaacctgccaaacccctgcctaaggtaaacatacttttgttggttttattttgttg

SEQ ID NO: 140010 - DNA, 201 bp, Homo sapiens
tggttgatttgcttattttgaagaattataaaatcaaaaaataattgacttgaaagatataagttggaatatttctgtttaataaccaaaatgtattaaamcagaaatatgtagtttaaaaattattttagtgcatacattaatttcagttatgctattactattatattagtaatagcaataatttttaataagcataat

SEQ ID NO: 140011 - DNA, 201 bp, Homo sapiens
aattatatctatatatgaatatgtgtatatatttttcaaagcacagatatttgcctacatttttgcctacattattctaacccctttcagaaatttacctraagtaattatcttgtgtcatccaccttttttttttctattcctgtcaggaagacccactacattatctgagacaatggggaaagctgacgtatggcttat

SEQ ID NO: 140012 - DNA, 201 bp, Homo sapiens
gcaataatttttaataagcataatgctggtattgaaaaatgaagataacttttaattagttgatacatattgaatgtgtatgacacacattgtcttggttmtttgtgttatgtaacccaattgtatgaaaaaatatatcagaattagtgccctcttctgaaaaacacagttctccaactgtgtttttttaaataacaaggg

SEQ ID NO: 140013 - DNA, 201 bp, Homo sapiens
tcattttaataattgtttatgattatgagcatactgatgcgacattagagatgtagcttaacctcacaattctcctactactttgtctttcttataaatayacatgggcaaaatatgtaatacataaaattaaattatatctatatatgaatatgtgtatatatttttcaaagcacagatatttgcctacatttttgccta

SEQ ID NO: 140014 - DNA, 201 bp, Homo sapiens
atttttaataagcataatgctggtattgaaaaatgaagataacttttaattagttgatacatattgaatgtgtatgacacacattgtcttggttatttgtrttatgtaacccaattgtatgaaaaaatatatcagaattagtgccctcttctgaaaaacacagttctccaactgtgtttttttaaataacaaggggagaag

SEQ ID NO: 140015 - DNA, 201 bp, Homo sapiens
aattgtatgaaaaaatatatcagaattagtgccctcttctgaaaaacacagttctccaactgtgtttttttaaataacaaggggagaagttacctccattrctattgctacagtgccatactttagcactttttggttttgacttggtaagcgagatacttatatgcatccttattctttgtctattagtccataattatt

SEQ ID NO: 140016 - DNA, 201 bp, Homo sapiens
actaccaccagcagtacaacatggttccaattcctccatacttttgccaaacctgttattccctgactttttgttacagccttcttagtgggtgtaaaatratctctcatcctggtcttggattgcattttcattacggctaaaggtgttgagaatcttcatacgtgcctactgatcattcatatatcttctttgaaaaca

SEQ ID NO: 140017 - DNA, 201 bp, Homo sapiens
agatatctaaaacacctcagagtataaccattttcttgctgaaaaattaacttttattattatcattattgtaacagacttgaaaatgagatttaattttkatagcataaaacccccctgtttatgttataaaatccaaatatatttagtatgtttacagagccatgaagccatcactattacataattttagaacatttt

SEQ ID NO: 140018 - DNA, 201 bp, Homo sapiens
gtgcatctcattttattcctatgagtaattttgctaaaattcatccaatcctaggtcatccaaagaccagagcttttataactcatggtggagccaatggmatctacgaggcaatctaccatgggatccctatggtggggattccattgtttgccgatcaacctgataacattgctcacatgaaggccaggggagcagctg

SEQ ID NO: 140019 - DNA, 201 bp, Homo sapiens
tttttaacatctacacaaaaatttcacatatttatcttttctggttcattatataagttgatgtctatttgattttcctttagctgtaaaaaaaaaatgtwatgtagttatcaatcatttattatgatcagtctctgaagccattggaccaaaaactctcctggattgagtttgtcatgcaccacaatggagccacctacc

SEQ ID NO: 140020 - DNA, 201 bp, Homo sapiens
ttcctatgtacctgtgcacatcgtaggactaacagacagagtgacctttctggaaaaagtaaaatataaaatataaaaagtaaaatataaaacataaaatrtgaaaaatataagttttctttaccttttgtatccaggattatgactttcatttttggtaatcattttatagtgaggcattagataagtgtcttttatttt

SEQ ID NO: 140021 - DNA, 201 bp, Homo sapiens
tattttgtggcaatgaagaaaacactacggaaaataaaaaataagataaagccttatgagctcgtattgaaatttgttgaacttatattgaaatttgttgytctaattcacagtatactcacaaaaaaatttactcagcttaactatatttcacacattgtacataaacacaagatcattaagaagtccactgacagtatc

SEQ ID NO: 140022 - DNA, 201 bp, Homo sapiens
gccattcatatttaatatttaatttttaacatctgtgtatatttatttcaattcggagccctgtaaactcttaatctctgtgagcagtgcgtctgggagcyaccatcacagtttctgagaagtgggcttcaagtattctgcacctgcagctctgctgtgctggttgtgcattctgtgggaaagtcctggttggccttgtga

SEQ ID NO: 140023 - DNA, 201 bp, Homo sapiens
tagtccgttggttatatacccagtaatgggattgctgggtttcatggtatttttacctctaggtttttgaggaatcgccagtcttccacaatggttgaacwaacttacattcccaccaacagattataagcaagccttttctatactacctcaccagtatcatgatattttttgagtttttaataatagccattctgactg

SEQ ID NO: 140024 - DNA, 201 bp, Homo sapiens
ctaagcccctcacttcccgggccggcaaggccggccggctgctccgagtgcgaggccggccaagcccacgcccacccggaactccagctggcccacaagcrctgcacgcagccctggttcccgctcgcacctctccctccacacctcactgcaagctgagggagccggctctggccttggccagcccagaaaggggctccc

SEQ ID NO: 140025 - DNA, 201 bp, Homo sapiens; identical to SEQ ID NO: 25239

SEQ ID NO: 140026 - DNA, 201 bp, Homo sapiens
aagaaaagaagaggctagttccctctagttaggaattatagatatggtccagcaagtttagtccagtccctctagattataatgttacatgatttctctcytgaaatatgatctcacctttcttgccctcaccttgtcaagtatgatatttccaaccactttaatatctggaatactgaggatatacaaactagaaatgta

SEQ ID NO: 140027 - DNA, 201 bp, Homo sapiens
acttaaaatctctctgttatatagtcagtgattcagaaatattaattttgcaattatggttattttgttatgattactaacactattaattacttaacatktgcaagtcacttgagataccattcttcatttaatagaaccagattgttcagcacatcaagattatgttctcttgaaaagtcgtggaggacagatatattg

SEQ ID NO: 140028 - DNA, 201 bp, Homo sapiens
gacacaatctggaagccatgtttaaaaattagttcccagcaataggaagatttaaaactcttataataagagtaataatagtaattaagaacctacttacygctcctttgtttcctacctgtacttcttcaaatgataaaaagcttcatcgctaccttagttcaccaaagtgcttcagcacaagtgtactatataaatcac

SEQ ID NO: 140029 - DNA, 201 bp, Homo sapiens
aagttagagcctgatacttattaggagttaaaatatttattaagcacctttggggactactaaaaagagttaggaaatgaagatatatgataaggttattwaaaaaaaaagaaacaaagaaagagcagaccatttgggaaattttgcatggaatctggtagcagatgatggaaaagtggattagaatgttggactagaagt

SEQ ID NO: 140030 - DNA, 201 bp, Homo sapiens
gtgaatttatgaaatgaaaacacaagatgatctatcaattgcacaaatattatagaaaagcttaaattataagttcagttaaaaccctgtggccattgctmatacagaacattctaggaagtcataaacctgtaaattagtgcacctaatatttctttaaacaatcacacatctgttttactatacatatttttatcttaa

SEQ ID NO: 140031 - DNA, 201 bp, Homo sapiens
tcaagatgtctcattgagttcattgcaagttcctaattattagtctgattaatcactttttggatttatgatccagtgagaattttgttcatgtcctgcastgattttttcaagttacatttttctatagattcttcttggtatagagactttatttaaggatgaatttgtttttcataaaagatctagaatcctgattca

SEQ ID NO: 140032 - DNA, 201 bp, Homo sapiens
acaagttagagcctgatacttattaggagttaaaatatttattaagcacctttggggactactaaaaagagttaggaaatgaagatatatgataaggttakttaaaaaaaaagaaacaaagaaagagcagaccatttgggaaattttgcatggaatctggtagcagatgatggaaaagtggattagaatgttggactagaa

SEQ ID NO: 140033 - DNA, 201 bp, Homo sapiens
ttcagttggtaatatggagatctaactttcctgtgcctttgaagctgagcttctataaagcaataaagtcagggtcctttttttttttttttttttttggkggagactttctttgtcttccaggctggagtgcagtggtgcaatctaaactcactgctgggattacaggcatgtgtcagcacacttggttaattttttgta

SEQ ID NO: 140034 - DNA, 201 bp, Homo sapiens
tctgctggctacacacttgaaaagcacaatgtaggatttctgtttctgccttcctacatacctgttgttatgtcagaattaagtgaccaaatgactttcayagagagggtaaaaatatatgatctatctggtttattttcaattttggttccaaccaaatatttaatatgaagaagtgggatcagttttccagtgaagttt

SEQ ID NO: 140035 - DNA, 201 bp, Homo sapiens
ttaatctaatgataatatatttcctttgaagtgtaaaagttacatttgaacttcgtgattgatttatccatggatataaccataataaatgacagaaagamacagcaaatggaaaaaagcattgcattgcaccaggatgtgtatgaaatggacttcaattttgctgctgatacagctgagctgttacattagctctggaag

SEQ ID NO: 140036 - DNA, 201 bp, Homo sapiens
ttagaacccttattccatgtttaaaatacctatggatacatataatacaatgtttaaaaaattgcaagaactgtagatatctaaattcacataattttcayattttgtttttttattatttttaatattttatgaatcttacaataacttaacaacttctactgtcttcttcaaaaggttatattggttgtgatttttgtg

SEQ ID NO: 140037 - DNA, 201 bp, Homo sapiens; identical to SEQ ID NO: 25238

SEQ ID NO: 140038 - DNA, 201 bp, Homo sapiens
tcaatgggcatttaggttgattccatgtcgttgctattgtgaaaagtactgcaattaatacacctgtgcatgggtctttataaaagaaccatttatagtcygttggttatatacccagtaatgggattgctgggtttcatggtatttttacctctaggtttttgaggaatcgccagtcttccacaatggttgaacaaactt

SEQ ID NO: 140039 - DNA, 201 bp, Homo sapiens
atattctgtagtgtatatgtaccatattttctctattcagcccataatcaatgggcatttaggttgattccatgtcgttgctattgtgaaaagtactgcarttaatacacctgtgcatgggtctttataaaagaaccatttatagtccgttggttatatacccagtaatgggattgctgggtttcatggtatttttacctc

SEQ ID NO: 140040 - DNA, 201 bp, Homo sapiens
tgcttactgtccaataatagtccaattacactgagacgtcagatttggcagcaaagaaggagtttaataattgcagggcactgagcaaggagataagaagrgaaccctaaatccagctcctcaaggagttctgggttggaggttttaaggagatcatagatggtgataggctggaaaatttgggtaattgattagtcaggg

SEQ ID NO: 140041 - DNA, 201 bp, Homo sapiens
tacaccacagtgtatgttgttcctgtctatttgtccacatgttctcatctttcaccttccacttataagtgaggacatgccatatttatatttccatccckttgttagtttgctaaggataatggcctccagctccatccatatccctgcaaaatacataattttgttcttttttatgactgcataatattctgtagtgta

SEQ ID NO: 140042 - DNA, 201 bp, Homo sapiens
cagtctgaagtcacacgcaccgtatagccttcagttacataccgagtacaagtacgtgttttttcctctgaagtctgaaacacaattttaatttagttcartgttttagctggaaaacactgtcactttcagagcctttcattgtgcatctcattttattcctatgagtaattttgctaaaattcatccaatcctaggtca

SEQ ID NO: 140043 - DNA, 201 bp, Homo sapiens
attctaccaagtattctaagaatcattacattactactcacaaaaatcaggcaagaaagatacgattcttagtcattcaatttaacaataaaaaaacttgkaacagatactttaaaaaaaaaaaaaaaggaccggtagatatcaggttaggattcaaactaaggccatccactttcatacttttaaccatgaatccattga

SEQ ID NO: 140044 - DNA, 201 bp, Homo sapiens
taggggactaaggagaatgaattccaatcctgtgattaaaagtgtaaactataggccaggcacggtagctcacgcctgtaatcccagtattttcggaggcygaggcaggcgaatcacgaggtcagaagttcaagaccagcttggccaacatggtgaaacccgtctctactgaaaatagaaaaaattacacaggcatgttgg

SEQ ID NO: 140045 - DNA, 201 bp, Homo sapiens
tccctctagattataatgttacatgatttctctcttgaaatatgatctcacctttcttgccctcaccttgtcaagtatgatatttccaaccactttaatayctggaatactgaggatatacaaactagaaatgtatactattattttgattattctctcctcgtaacatattgaaaactaaattgtaggtggaataaagag

SEQ ID NO: 140046 - DNA, 201 bp, Homo sapiens
cacacgcaccgtatagccttcagttacataccgagtacaagtacgtgttttttcctctgaagtctgaaacacaattttaatttagttcagtgttttagctrgaaaacactgtcactttcagagcctttcattgtgcatctcattttattcctatgagtaattttgctaaaattcatccaatcctaggtcatccaaagacca

SEQ ID NO: 140047 - DNA, 201 bp, Homo sapiens
caacaacattaacagtaaaacaaaaaatattgtgaaatatgaaatatctgatcctttctccctctctcaaaaattctgtctgccaggtgtggtggctcacrcctgtaatcccagcactttgggatgacaagatgtttggatcacctgaggtcaggagtttgagaccagactggacaatgcggtaaaactccgtccctgcta

SEQ ID NO: 140048 - DNA, 201 bp, Homo sapiens
tcacctttcttgccctcaccttgtcaagtatgatatttccaaccactttaatatctggaatactgaggatatacaaactagaaatgtatactattattttrattattctctcctcgtaacatattgaaaactaaattgtaggtggaataaagagccaaataccatgtgcaacagtttttaaaatctatgctggagaaaaca

SEQ ID NO: 140049 - DNA, 201 bp, Homo sapiens
agtaattaagaacctacttaccgctcctttgtttcctacctgtacttcttcaaatgataaaaagcttcatcgctaccttagttcaccaaagtgcttcagcmcaagtgtactatataaatcactatcaatctgttgcacaaaaagacataagtaacaaaaataagagtgagaactcccgctaataaaaagtgagagtctcaa

SEQ ID NO: 140050 - DNA, 201 bp, Homo sapiens
cactattaaatctctcagactttaaaaatacagtcatattccaggagttaaagggtccagctcaccaacatggcacatgtatacatacgtaacaaacctgyacgttgtgcacatgtaccctagaacttaaagtataataaaaaatatatatatacatagtcatattcatttttcacaacatagcatattgtgacaggtctt

SEQ ID NO: 140051 - DNA, 201 bp, Homo sapiens
tagttcaccaaagtgcttcagcacaagtgtactatataaatcactatcaatctgttgcacaaaaagacataagtaacaaaaataagagtgagaactcccgytaataaaaagtgagagtctcaaaaggggggaatgaaggaagagaaagaccctctcatattattttatattgttttatcctcagtacctgttttaagaaaa

SEQ ID NO: 140052 - DNA, 201 bp, Homo sapiens
aatacaagttgattcttaattaattaaagcacattgagaagctgatccaaaaagacaaacactattaaatctctcagactttaaaaatacagtcatattcmaggagttaaagggtccagctcaccaacatggcacatgtatacatacgtaacaaacctgtacgttgtgcacatgtaccctagaacttaaagtataataaaa

SEQ ID NO: 140053 - DNA, 201 bp, Homo sapiens
ttctcacctcatcccattcttgttttatattagtgactcttccatctctgaacatttgaatcatacttatttaaaaatctcattttgtctaggcatggtgkttcacatctgtagtcccaacactttgggatgttgaaatgggaggattgactccaggagtttgagataagcctggataacataatgagagctcatcactac

SEQ ID NO: 140054 - DNA, 201 bp, Homo sapiens
gtgttttattccatttctttcatcaatgttttatcatttttattgtaaagatcttatattttcatggctaaacctattcctacacaatttcatttttgtarctttgtaaatgtgatttattttctttgccttttttaaacatttagatattggaatacggaaacacaactgatttttgggtgatgatttagtatcttctgc

SEQ ID NO: 140055 - DNA, 201 bp, Homo sapiens
cattttgtctaggcatggtggttcacatctgtagtcccaacactttgggatgttgaaatgggaggattgactccaggagtttgagataagcctggataacrtaatgagagctcatcactaccaaaaattaaaatactagttgggtgtggtgtcatgcacctgtggtcccagccacttgggggactgaggtgagagaatcac

SEQ ID NO: 140056 - DNA, 201 bp, Homo sapiens
ccttggtaggttgaggctgcagtgagccctgaacacaccactgcatttcgttcagcctggacgatggaataacaccttatcttaaatatatatatatatatataaattaaaaatcaaagtctcattctgattgtttcccctatttatgatccttgggtgaaaatcttccaactgcgtgtcactggttatttcctcatatgg

SEQ ID NO: 140057 - DNA, 201 bp, Homo sapiens
tccatgtggcacatgacaaagataatcttgagaattcaaatgatgaattttttgacctagcttattattttcttttattttctatttgagacaaggtcttkctctgtcacccaggctgaagtgcaatcatggcttgcttcagcctcgaactctcaggctcaagtgatcctccccaccaaagcctcccaagtagctaggact

SEQ ID NO: 140058 - DNA, 201 bp, Homo sapiens
aaccagggcttttataactcatggtggatccaatggcatctacaaggcaatctaccatgggatccatatggtgcacattccattgcttgcagatcaacctsataacattgcacacatgaaggccaagggcacagctattagattggacttccgcacaatgtctagtacagacttgctcaatgcttgaagccaataattaat

SEQ ID NO: 140059 - DNA, 201 bp, Homo sapiens
ttggtaggttgaggctgcagtgagccctgaacacaccactgcatttcgttcagcctggacgatggaataacaccttatcttaaatatatatatatatatataaattaaaaatcaaagtctcattctgattgtttcccctatttatgatccttgggtgaaaatcttccaactgcgtgtcactggttatttcctcatatggtt

SEQ ID NO: 140060 - DNA, 201 bp, Homo sapiens
gaggaaaatcctcaaaacccaccccattggaattcatgttaaagaactttaagaaaggctttgtggtggagggggtggtggttaggggagtcaagttaacscactgaatgctgagagctctctgtgaattatgaatagccctcttttggtgttggctggctggccaaatgtacttatagacagggacacaattggccctgt

SEQ ID NO: 140061 - DNA, 201 bp, Homo sapiens
catacaagatccttgatattagctgaaggatagcactcataaacataaaagggaaattaatcacatctgtgtgaacagatcatttaccttcatttgtctcyttgccatccacatgctcagactgttgatttaatgatattgtatgtactttgacttataagggttacattttaacttcttggctaatttatctttggacat

SEQ ID NO: 140062 - DNA, 201 bp, Homo sapiens
ggagccaatggcatctacgaggcaatctaccatgggatccctatggtggggattccattgtttgccgatcaacctgataacattgctcacatgaaggccargggagcagctgttagagtggacttcaacacaatgtcgagtacagacttgctgaatgcattgaagagagtaattaatgatccttcgtgagtagaacaatat

SEQ ID NO: 140063 - DNA, 201 bp, Homo sapiens
cggctgtacaagtggataccccagaatgaccttctaggtaagactctggtgaacaaatactgaatatattagtaacagcacattagagtgttaatagttcwtcatgaaacaagcttattgaatatttgttaaggaaaaacaaaatgtaacttctttatattgattttccagtcttaagggagaaagaatacttataatttt

SEQ ID NO: 140064 - DNA, 201 bp, Homo sapiens
aattccactcatggaataaaatattttctttattgtaacaggttctgtggagatttgatgggaataaaccagataccttaggtctcaatactcggctgtayaagtggataccccagaatgaccttctaggtaagactctggtgaacaaatactgaatatattagtaacagcacattagagtgttaatagttcttcatgaaa

SEQ ID NO: 140065 - DNA, 201 bp, Homo sapiens
ttgaattccactcatggaataaaatattttctttattgtaacaggttctgtggagatttgatgggaataaaccagataccttaggtctcaatactcggctstacaagtggataccccagaatgaccttctaggtaagactctggtgaacaaatactgaatatattagtaacagcacattagagtgttaatagttcttcatg

SEQ ID NO: 140066 - DNA, 201 bp, Homo sapiens
ctaaggtactattttggaaaatcatgatttccttatatacctaactaattataaaagttgagaaaattaatgtgagtattctatttacattagtctttgartagttcttatttactaacatcccttgatctcattcctactctttatacagttctcacattctataacttttgaattccactcatggaataaaatattttc

SEQ ID NO: 140067 - DNA, 201 bp, Homo sapiens
acagtttattccattgctaaatagaaaaagtagtttccagaaaaaaaggcttacttgtacttgtaatgaaataaaataaaatatatgtaaacttgtacaaygaaaaaaaatctagaagaatacacataaatataaggatgggaattttagattttattctacagaatcctgcagtatttaactttttacaatattttcatg

SEQ ID NO: 140068 - DNA, 201 bp, Homo sapiens
gtgcatttggggagcttggattttaaggcagtagcttgctgatgctcccagctgaataagtcccttctttctacaactcggtgtcttgagttttgtctgcrgctcctcctgttacatttcttggctccctgaccgggaagcaacgtgactgacagacagctgaggcagccccttaggcaacttaagcctgccttgtggagt

SEQ ID NO: 140069 - DNA, 201 bp, Homo sapiens
gagcatctgaaccttaattctgcactgtaacttaaaactagacttgcagtgatttctaggtctgtgagatacttaagcaataactggagcttaatctcaamtgttatacttgtttgcaggtcatagaaaagctccgtatgagtatctgggaattataaaaatacctgccaaagattcaggccttcctttggattttggccc

SEQ ID NO: 140070 - DNA, 201 bp, Homo sapiens
tgcagtgatttctaggtctgtgagatacttaagcaataactggagcttaatctcaaatgttatacttgtttgcaggtcatagaaaagctccgtatgagtawctgggaattataaaaatacctgccaaagattcaggccttcctttggattttggcccctgcagtgttatggaactggtcagactcctcagcgtggcattcc

SEQ ID NO: 140071 - DNA, 201 bp, Homo sapiens
gtgctgtgtggaaaaaaagtagttaccacagataaaacacttaagttgtctctgacacacagccagtgatccaaaaatattgttgatattatgattatttyagtcattatttttaatactttaaattagctaacatgtgccagccatttaagatatcagtcttcatttaatagtgattgattttccaacacatcaagatta

SEQ ID NO: 140072 - DNA, 201 bp, Homo sapiens
taaattggtgtcttcactttgggataatgtttaagataatcttaaaattttgaggtagtcacatagtatatatacatttatcctatgtatttcatacttgragttttactgtagaagatatacaacatattttaaagttccagaaatcaaatagcaaagtaagcatgaagcactagagaaatcctatgggtgcctatagtg

SEQ ID NO: 140073 - DNA, 201 bp, Homo sapiens
atgataatcttacttaattcaagatgtggctattttcattaaaccaatatcaatgtcttatttattaaaaaattacacaagcaaagatcattctgttttgkgcttggtttacagttttgtaacccttatgtcaaattttgacaccttaaagtatttggcaacaataagtatgaaattgcttgattaataaatgcaaacaaa

SEQ ID NO: 140074 - DNA, 201 bp, Homo sapiens; identical to SEQ ID NO: 25307

SEQ ID NO: 140075 - DNA, 201 bp, Homo sapiens
cctattgggattttgaatttcctcgcccattcttaccaaatgttgattttgttggaggacttcactgtaaaccagccaaacccctgcctaaggtaaatgtrttcttgtttcatttgtttgcttgacattttcagaaggaatggctggatatgtttctttcagagtgtttaactcagagtgaggggaatatgggaggtcaaa

SEQ ID NO: 140076 - DNA, 201 bp, Homo sapiens
tttgttggaggacttcactgtaaaccagccaaacccctgcctaaggtaaatgtattcttgtttcatttgtttgcttgacattttcagaaggaatggctggwtatgtttctttcagagtgtttaactcagagtgaggggaatatgggaggtcaaaaacaaggacttgccattagaaaatcatatatttctgtagtatcacaa

SEQ ID NO: 140077 - DNA, 201 bp, Homo sapiens
atagctgaccatatatcaaggctgtcaatgctaggtagtgcatcatctaagtgtgaaagatcagttaagcaaaatgcagcaaaatacaattttctacattytcagcatctgtattgttaatcatgaattgtcaatgggctcctttttcctacattgttagcatttacaaaagtagcaatactgataatagtctgaatttgt

SEQ ID NO: 140078 - DNA, 201 bp, Homo sapiens
ggtactagacatggtaatgactggctatagctgaccatatatcaaggctgtcaatgctaggtagtgcatcatctaagtgtgaaagatcagttaagcaaaawgcagcaaaatacaattttctacattttcagcatctgtattgttaatcatgaattgtcaatgggctcctttttcctacattgttagcatttacaaaagtag

SEQ ID NO: 140079 - DNA, 201 bp, Homo sapiens
tactagacatggtaatgactggctatagctgaccatatatcaaggctgtcaatgctaggtagtgcatcatctaagtgtgaaagatcagttaagcaaaatgyagcaaaatacaattttctacattttcagcatctgtattgttaatcatgaattgtcaatgggctcctttttcctacattgttagcatttacaaaagtagca

SEQ ID NO: 140080 - DNA, 201 bp, Homo sapiens
gcggacacttttctattaccagtgactctactttttatgggaataaataaccaatctttatcatgataaaatgataacacatttcatgatgatgcataacyggtccttcctcagccccacctccaccctactccctgctgccttttaaaaaaaattaaatattttaaatattttaagtatttaaatattttttaaatatgt

SEQ ID NO: 140081 - DNA, 201 bp, Homo sapiens
aagtttttgctgaaaacacagagttactttaacactcccatatcaaatacaaggtcaacacttgtaaattctactccagtttataaagattgcttgggaawtctaaaatcagtaccttagtttggtactagacatggtaatgactggctatagctgaccatatatcaaggctgtcaatgctaggtagtgcatcatctaagt

SEQ ID NO: 140082 - DNA, 201 bp, Homo sapiens
cacttataagagggagttgaacaatgagaatacatggactcagggaggggaacaacacacaccgggggatggaaggggagtgagagtatcaggacaaatasctaatacatgaggggcttaaaatctagatgacaggttgatcggtgctgcaaaccaccatggcacgtatatacgtatgtaacaaacctgcacattctgcac

SEQ ID NO: 140083 - DNA, 201 bp, Homo sapiens
tcctgcctcagcctcccgagtagctgggattacaggcacctgccaacacatctgactaatctttgtgtttttagtagagacagagtttcaccatgttggcyaggctggtcttgaactcctgacctcaggtgatccacatgcctcagcctcccaaagtgctgggattacaagtgtgagcctccgttgttgttaacttgcaga

SEQ ID NO: 140084 - DNA, 201 bp, Homo sapiens
aagggagagcacatatctctatgtcaataaattctgaaaatgttttaattctcatttgtaaatatatttattttaaaaatctaattatattaagatcttamgatgaaccaagacagtagtaggtgtaaagatttcagtgttgagctcaaaaaactcatggtttactttgagaaccaaggatcaagggactagcttaataaa

SEQ ID NO: 140085 - DNA, 201 bp, Homo sapiens
aagcaggtatcgaaaaaactttgaaatgcatcatgcagcttcgtcttaccaagcaatctggctgtttttacttcccatgcattggaataggtctatttagygttctgttcagggtgccattcagagaaagaatgtcctagtctgactagccactgctctggaggtacccacctagccaagtagatttagagaaaaaaaaaa

SEQ ID NO: 140086 - DNA, 201 bp, Homo sapiens
cagccaagatcactccattgcactcaagcctgggtgacagagagactctgtctcaaaaaaaaaaaaaaaaaagattatatgaaatagttacctgaatttaycatatgctgggccataaataaacactaagtaaattgtataagattcaaattcataaaaattatatgttctagtcatactagaaataaattataaatcatc

SEQ ID NO: 140087 - DNA, 201 bp, Homo sapiens; identical to SEQ ID NO: 25316

SEQ ID NO: 140088 - DNA, 201 bp, Homo sapiens; identical to SEQ ID NO: 25300

SEQ ID NO: 140089 - DNA, 201 bp, Homo sapiens
taaattttaataagttactgtactatcacaataacaataagcaggtatcgaaaaaactttgaaatgcatcatgcagcttcgtcttaccaagcaatctggcwgtttttacttcccatgcattggaataggtctatttagcgttctgttcagggtgccattcagagaaagaatgtcctagtctgactagccactgctctggag

SEQ ID NO: 140090 - DNA, 201 bp, Homo sapiens; identical to SEQ ID NO: 25301

SEQ ID NO: 140091 - DNA, 201 bp, Homo sapiens; identical to SEQ ID NO: 25302

SEQ ID NO: 140092 - DNA, 201 bp, Homo sapiens
taggaaaccctaactttaagtgaaatataaagggttagagagctagaagctaaataaatgtagatataatatcattccaattgtaactaacttttcctcawtgctcatagtcatgtaatggctccaatgactcctaactaaaagaactgaacagaaaaaaataaaataaaataaaactaccccaaataaacacaagagatt

SEQ ID NO: 140093 - DNA, 201 bp, Homo sapiens
tacagaatgagggaagatttttgcaatctatccctctgacaaaggtctaatatccggaatctacaagaaagttaaacaaatttacaaaaaaaaaaaaaaaacaacaccatcaaaaagtgggcaaaagatataaacagacacttcttaaaaaaagacatttatgcagccaacacacttatgaaaaaagctcaatatcactga

SEQ ID NO: 140094 - DNA, 201 bp, Homo sapiens
ctgattgttaacaaacctgacaaaaacaagcaactggggaaaggattccttatttaagaaatgttttggaaaaactggctagccatatggagaaaactgcmactggatcccttccttacaccttacagtaaccaaaccagcatagtactggaacaaagacagacatatagaccagtggaacagaacagaggcctcagaaaa

SEQ ID NO: 140095 - DNA, 201 bp, Homo sapiens
acagttttataaagaaatttcccccaatgattaggaccagaaagtatatttgttatgacagaaggggttggtcattattttactgagaaaaagagaatttwgaacaaaagggacaacagcaacaaaaagatgagtatacaattttgatatgatatccaggaaacttatgggtctacatttcttttcctctttctctctctc

SEQ ID NO: 140096 - DNA, 201 bp, Homo sapiens
gctcatagtcatgtaatggctccaatgactcctaactaaaagaactgaacagaaaaaaataaaataaaataaaactaccccaaataaacacaagagatttrgtagaaccacaaaaaaaattagaattgaagccaagtaaagctaccttccaataacctatgttagtaattataatattataaataaagtgtctgggtgtaa

SEQ ID NO: 140097 - DNA, 201 bp, Homo sapiens
ctgtactatcacaataacaataagcaggtatcgaaaaaactttgaaatgcatcatgcagcttcgtcttaccaagcaatctggctgtttttacttcccatgyattggaataggtctatttagcgttctgttcagggtgccattcagagaaagaatgtcctagtctgactagccactgctctggaggtacccacctagccaag

SEQ ID NO: 140098 - DNA, 201 bp, Homo sapiens
attcaccaggagcttcatatagtgtgagggagctactctagggggtgagcagatctccactggagaaagtcctggtgacctctcccactgtggttcaagtkccccctgtgagacacagcaaagtgatgatgagggtcccccacattcagttatacatagcacatcaaattcacagtgtgatttcaggacaaaaggtgtcat

SEQ ID NO: 140099 - DNA, 201 bp, Homo sapiens
tctctactaaaaacagaaaaattagccaggcgtggtggcaggtgcctgtaatcccagctactcaggagactgaggcaggagaattgcttgaacctgggagkcagaggttgcaatgagccaagattgcatcattgcactccagcctgggtgacagagaaagactccatctggaaaaaaaaaaaagatgtcataaagttaaat

SEQ ID NO: 140100 - DNA, 201 bp, Homo sapiens
ttattctaatccaaaagttacacacgaaagttactgagcttcattatgtttcacacattgtatttgaacacaacaacattaagaactccactcatagtatsaacattgttttgcaaatactcaaaatattttggcttcattttgagcagaatttttgttttactttagccaatgaaatcttcaagaattaggaggaggagc

SEQ ID NO: 140101 - DNA, 201 bp, Homo sapiens
aaattccatttccactatcttacttatagcacttagaatggctcataatattttctgctccagaaaacattaactttcccaccgaaaattccatttttcayttttaaaggtatttgtcagtgataaaactccaatttaaaaaccaaactttctgtaatgacatgaattaaaacattgaaatttcatgccaattcagtgaca

SEQ ID NO: 140102 - DNA, 201 bp, Homo sapiens
atcacttgaaccccggaggcagaggttgcagagagccgagatcacgctattgcactccagcctgggcaacagagtgagaatctgtctcaaaaaaaaaaaawaatatatatatatatatatgtaatttgatatacccatagggacaatggagagctactgaaaagagtgaaaagagttaagaaatgaagagatatgatcaga

SEQ ID NO: 140103 - DNA, 201 bp, Homo sapiens
ttaaaactgatgtcaggccaggcacagtggctcatgcctgtaatcccagcacatcgggaggctgaggcgggtggatcacaaggtcaggaggtcaagaccastctggccaagatggtgaaacctgtctctactaaaaacagaaaaattagccaggcgtggtggcaggtgcctgtaatcccagctactcaggagactgaggca

SEQ ID NO: 140104 - DNA, 201 bp, Homo sapiens
gaatcacttgaaccccggaggcagaggttgcagagagccgagatcacgctattgcactccagcctgggcaacagagtgagaatctgtctcaaaaaaaaaawaaaatatatatatatatatatgtaatttgatatacccatagggacaatggagagctactgaaaagagtgaaaagagttaagaaatgaagagatatgatca

SEQ ID NO: 140105 - DNA, 201 bp, Homo sapiens
gagaatcacttgaaccccggaggcagaggttgcagagagccgagatcacgctattgcactccagcctgggcaacagagtgagaatctgtctcaaaaaaaawaaaaaatatatatatatatatatgtaatttgatatacccatagggacaatggagagctactgaaaagagtgaaaagagttaagaaatgaagagatatgat

SEQ ID NO: 140106 - DNA, 201 bp, Homo sapiens
ttaaggcagaaaagtagaaaagcaataagggcagttcccaggaactccaaatttaatttacaggaaaaggttgagtaaaagtcaatgatgggccgggcgtrgtggcttacacctgtaatcccagcactttgggaggccaaggcaggtggatcacctgaggtcaggagttggagaccagagtggccagcatggtgaaacccc

SEQ ID NO: 140107 - DNA, 201 bp, Homo sapiens
gcttgcattaaggcagaaaagtagaaaagcaataagggcagttcccaggaactccaaatttaatttacaggaaaaggttgagtaaaagtcaatgatgggcygggcgtggtggcttacacctgtaatcccagcactttgggaggccaaggcaggtggatcacctgaggtcaggagttggagaccagagtggccagcatggtg

SEQ ID NO: 140108 - DNA, 201 bp, Homo sapiens
ggtgaaacctgtctctactaaaaacagaaaaattagccaggcgtggtggcaggtgcctgtaatcccagctactcaggagactgaggcaggagaattgcttkaacctgggagtcagaggttgcaatgagccaagattgcatcattgcactccagcctgggtgacagagaaagactccatctggaaaaaaaaaaaagatgtca

SEQ ID NO: 140109 - DNA, 201 bp, Homo sapiens
ttgtaactaacttttcctcattgctcatagtcatgtaatggctccaatgactcctaactaaaagaactgaacagaaaaaaataaaataaaataaaactacyccaaataaacacaagagatttagtagaaccacaaaaaaaattagaattgaagccaagtaaagctaccttccaataacctatgttagtaattataatatta

SEQ ID NO: 140110 - DNA, 201 bp, Homo sapiens
attttgtttttcatgtaagaaggattccttcacagttgagtaatatagtggctctactccagaaacagaagcctaaaacttgagatttctaatgtttatayattccttcaataacaggttgacaattatttctttcaaaaactgaaatcttgttgaaagtgaacatctaagttttaatctatattttattaaactgcatct

SEQ ID NO: 140111 - DNA, 201 bp, Homo sapiens
ggaatggctggatatgtttctttcagagtgtttaactcagagtgaggggaatatgggaggtcaaaaacaaggacttgccattagaaaatcatatatttctrtagtatcacaagtatgtgaatgttattatcattaaagaccaaagaggtttactagggagattttgaaaacagggttggttaaagtaaggccttcattgtg

SEQ ID NO: 140112 - DNA, 201 bp, Homo sapiens
ggattttgaatttcctcgcccattcttaccaaatgttgattttgttggaggacttcactgtaaaccagccaaacccctgcctaaggtaaatgtattcttgwttcatttgtttgcttgacattttcagaaggaatggctggatatgtttctttcagagtgtttaactcagagtgaggggaatatgggaggtcaaaaacaagg

SEQ ID NO: 140113 - DNA, 201 bp, Homo sapiens
accttgtaattaataattttgttaaaatgcatccacttttaggtcatcccaaaaccaaagcttttataactcatggtggaaccaatggcatctatgaggcratctaccatgggatccctatggtgggcattcccttgtttgcggatcaacatgataacattgctcacatgaaagccaagggagcagccctcagtgtggaca

SEQ ID NO: 140114 - DNA, 201 bp, Homo sapiens
acacaaatttgcatgaaagatcccacatatattatattacacatctcctttcaaagaaactgaatgattaggtcagtttaaaaaaattactccaatagctyctgactttctcatcttagatgtttgtaacaatcctgtcaatagtgttttctgtgctgttgctcttttctgatagaacaaattctttcttcacaggaaatg

SEQ ID NO: 140115 - DNA, 201 bp, Homo sapiens
atggctggatatgtttctttcagagtgtttaactcagagtgaggggaatatgggaggtcaaaaacaaggacttgccattagaaaatcatatatttctgtastatcacaagtatgtgaatgttattatcattaaagaccaaagaggtttactagggagattttgaaaacagggttggttaaagtaaggccttcattgtgcca

SEQ ID NO: 140116 - DNA, 201 bp, Homo sapiens
catctcctttcaaagaaactgaatgattaggtcagtttaaaaaaattactccaatagctcctgactttctcatcttagatgtttgtaacaatcctgtcaayagtgttttctgtgctgttgctcttttctgatagaacaaattctttcttcacaggaaatggaagagtttgtgcagagctctggagaaaatggtattgtggt

SEQ ID NO: 140117 - DNA, 201 bp, Homo sapiens
tacaggattttagaaggtactgtatacactgtagatattatcaaaaagcagttaaattttaataagttactgtactatcacaataacaataagcaggtatygaaaaaactttgaaatgcatcatgcagcttcgtcttaccaagcaatctggctgtttttacttcccatgcattggaataggtctatttagcgttctgttca

SEQ ID NO: 140118 - DNA, 201 bp, Homo sapiens
tgactagtcttttttttctggcaaagtatttaattcaagcacttttattttcttaagccaattaattagagctcttttatatattttcagtaataaaacaytgtgtacaaaacacataaatacatacacacattaagcatgccaatagaagtacatcttatagatttatgaaaactacattttgccatattagacttccaa

SEQ ID NO: 140119 - DNA, 201 bp, Homo sapiens
aagcaaagatcattctgttttgggcttggtttacagttttgtaacccttatgtcaaattttgacaccttaaagtatttggcaacaataagtatgaaattgyttgattaataaatgcaaacaaaaatatatgctggaaattcttaagacatttctaatattatcatactttagcaataattgtaaagttatcttatttataa

SEQ ID NO: 140120 - DNA, 201 bp, Homo sapiens
tgggctcaggagtttgagaccagcctgggaaacgtggtaaaacctcatctctaacaaaaataaaaaataaaataatagccaggcatgctggtgtgtgcctrtagtctcatagtcgtagctacttaagaggctgaggcaggaggcttgcttgagtctgggagcagaggctgcagtgagctgagaccacaccactgaactcta

SEQ ID NO: 140121 - DNA, 201 bp, Homo sapiens
aactcattgacaattaaagtgagtactcaataatgtgcagagataggtgaaacgatgaggggatgagaaacacccaaaaagaaaaccagaggccaggcaargtggctcacacctataatccctgcactttgggaggcagagaaggcatgattgcttgggctcaggagtttgagaccagcctgggaaacgtggtaaaacctc

SEQ ID NO: 140122 - DNA, 201 bp, Homo sapiens
tgcctcaagaaacttagaatcatggtgaaaggctaaggggaagcaagcttggatcttctcacttagtggcaggagagagaagtgcaagcaggggaaatacyagacacttataaaactatcagatctcatgagagctcactcaatatcatgagaacagcatggaggaatccacaccatgatccaatcacctgccactgggtc

SEQ ID NO: 140123 - DNA, 201 bp, Homo sapiens; identical to SEQ ID NO: 25304

SEQ ID NO: 140124 - DNA, 201 bp, Homo sapiens
tctacatgactgggatgcctcaagaaacttagaatcatggtgaaaggctaaggggaagcaagcttggatcttctcacttagtggcaggagagagaagtgcragcaggggaaataccagacacttataaaactatcagatctcatgagagctcactcaatatcatgagaacagcatggaggaatccacaccatgatccaatc

SEQ ID NO: 140125 - DNA, 201 bp, Homo sapiens; identical to SEQ ID NO: 25305

SEQ ID NO: 140126 - DNA, 201 bp, Homo sapiens; identical to SEQ ID NO: 25306

SEQ ID NO: 140127 - DNA, 201 bp, Homo sapiens; identical to SEQ ID NO: 25308

SEQ ID NO: 140128 - DNA, 201 bp, Homo sapiens
aatttgcatgaaagatcccacatatattatattacacatctcctttcaaagaaactgaatgattaggtcagtttaaaaaaattactccaatagctcctgastttctcatcttagatgtttgtaacaatcctgtcaatagtgttttctgtgctgttgctcttttctgatagaacaaattctttcttcacaggaaatggaaga

SEQ ID NO: 140129 - DNA, 201 bp, Homo sapiens
ggtaggaacttattttctaatctatacaatctttgtgtattttcaatttacgttttagtttcttatctgacatagccctctctgaatgatctatgcaagtrtttgctgaaaacacagagttactttaacactcccatatcaaatacaaggtcaacacttgtaaattctactccagtttataaagattgcttgggaattcta

SEQ ID NO: 140130 - DNA, 201 bp, Homo sapiens
aaatgaatctgttaaactcttcaagagtccattacagaaatgttctgcctgaaaatttaactgctatgatagttctaattatctcagacatctgttcaaarcaaaaacatatatggaagatcttaaaatcataaagagaggagttttggttgataataacgttggcattaatattgtgatcagaaggaaatatatttaaga

SEQ ID NO: 140131 - DNA, 201 bp, Homo sapiens
gctactaaatgaatctgttaaactcttcaagagtccattacagaaatgttctgcctgaaaatttaactgctatgatagttctaattatctcagacatctgytcaaagcaaaaacatatatggaagatcttaaaatcataaagagaggagttttggttgataataacgttggcattaatattgtgatcagaaggaaatatat

SEQ ID NO: 140132 - DNA, 201 bp, Homo sapiens
tatttatatattatagatacaatcccttatcaaatatgtgattttcaaatattttcttccactatggacagatagatttttttttttactttttggaagaygccttttgaaatacaaaggtttcaatgttgataaaataaatatgtaatacttaacttttccataatccaaaggaaatactatgaaaaatgctgtgcctag

SEQ ID NO: 140133 - DNA, 201 bp, Homo sapiens
acattaatgattaatttgtaaataaactaacttatctctcagtatcagttcttaaaatctcacacacccacctcttctgtgatagtccctggaccttgagragctgaatagcttttagaaagcactgttagcattatgccacaacaaacagaacttgaggaaaaaaacttatatgagttgaaaatgagttgaaggatagtg

SEQ ID NO: 140134 - DNA, 201 bp, Homo sapiens
tttaagtatttaaatattttttaaatatgtaaatgtgacctcattatttataatacttaaaagaccacgttcttgtatacccaatcttattctttttttttgcacattttaattttttaattaagaatatgctttttcattttgttcacctggcaattcttctgaaatttgaaaacaatttcaatgcagttttgtgggtat

SEQ ID NO: 140135 - DNA, 201 bp, Homo sapiens
gtgacacttactttcaatcatttgtgtgacacttttcaaagaccatccatagacttgatatgcttaagcaataaatttacttttaatgttgatatctttayatttatccttcagctataaagagaatgtcatgaaattatcaagaattcatcatgaccaaccaatgaagcccctggatcgagcagtcttctggattgagtt

SEQ ID NO: 140136 - DNA, 201 bp, Homo sapiens
tctctccagaggtgtatgacctctgagagggctcaaaatgctgggtgatctgccctcatatgtgtttcctggactagcctttttttaaaagttaatttttmttggggatttccctgcagggccactccatgtcacagggggtcaaccccaagacactcccacaaggcccccagttgcttaggggtgccttttgcctgggag

SEQ ID NO: 140137 - DNA, 201 bp, Homo sapiens
tgttttctcatcattcttagattatttgtttcccactttttttcctaaaaggaggaactgagctgtggcctagggtttatgtgtggtgaatcaatgtgtgytgcttgtgggcagtactccacagtgtgtcaccactgagttgtttccaccctcttacatgtctcagtttctctctccagaggtgtatgacctctgagaggg

SEQ ID NO: 140138 - DNA, 201 bp, Homo sapiens
tcttaagccaattaattagagctcttttatatattttcagtaataaaacattgtgtacaaaacacataaatacatacacacattaagcatgccaatagaartacatcttatagatttatgaaaactacattttgccatattagacttccaaattcttgataacctgtttcaataggtaatctgtatgaatacttgatcacc

SEQ ID NO: 140139 - DNA, 201 bp, Homo sapiens
agaccacaatgataaagaaatatgcagaagagatcccaaactcattgacaattaaagtgagtactcaataatgtgcagagataggtgaaacgatgaggggwtgagaaacacccaaaaagaaaaccagaggccaggcaaggtggctcacacctataatccctgcactttgggaggcagagaaggcatgattgcttgggctca

SEQ ID NO: 140140 - DNA, 201 bp, Homo sapiens
taagttcatagtggctacattagtccattctcacactgctgtaaagaaatacctgagactgggtaatttataaagaaaagaagtttaatagactcagttcyacatgactgggatgcctcaagaaacttagaatcatggtgaaaggctaaggggaagcaagcttggatcttctcacttagtggcaggagagagaagtgcaag

SEQ ID NO: 140141 - DNA, 201 bp, Homo sapiens; identical to SEQ ID NO: 25309

SEQ ID NO: 140142 - DNA, 201 bp, Homo sapiens
cagtgagccgagatagtgccactgaactcctggtgacagagcgagactccatctcaaaaaaaaacaaaaaagcaaaaaaacaaaaaagtgaacctaccagyactcacattaaatttaagcagaccaaaaagaaaagacaaaatagtgatctttgaaatattttatttaaggagataaaacatttgaagtacacaattaaat

SEQ ID NO: 140143 - DNA, 201 bp, Homo sapiens
gtagaaccacaaaaaaaattagaattgaagccaagtaaagctaccttccaataacctatgttagtaattataatattataaataaagtgtctgggtgtaayattttctagcattatctcctcctactgcagtgtcatagctttgtttcatttcctccttacacacacatacatacatgcatatgcacacatatttacacaa

SEQ ID NO: 140144 - DNA, 201 bp, Homo sapiens
catgtatactggaacttaaagtaaaaataaaactttttaaaaaaatttgaactgaccaggtgcagtgactcacgcccgtaatcccagcactttgggaggcygaggagggcagatcacgaggtcaagatatcgagaccatactcctggccaacatagtgaaaccctgtctctactaaaaatacaaaaattatctgggcatgg

SEQ ID NO: 140145 - DNA, 201 bp, Homo sapiens
cacaatgataaagaaatatgcagaagagatcccaaactcattgacaattaaagtgagtactcaataatgtgcagagataggtgaaacgatgaggggatgakaaacacccaaaaagaaaaccagaggccaggcaaggtggctcacacctataatccctgcactttgggaggcagagaaggcatgattgcttgggctcaggag

SEQ ID NO: 140146 - DNA, 201 bp, Homo sapiens
tctggctgtttttacttcccatgcattggaataggtctatttagcgttctgttcagggtgccattcagagaaagaatgtcctagtctgactagccactgckctggaggtacccacctagccaagtagatttagagaaaaaaaaaaaaaacttgtctgctctgctgacttgggtgccactaatgtcttaagcagaaaaatgt

SEQ ID NO: 140147 - DNA, 201 bp, Homo sapiens; identical to SEQ ID NO: 25310

SEQ ID NO: 140148 - DNA, 201 bp, Homo sapiens
tttttaattaagaatatgctttttcattttgttcacctggcaattcttctgaaatttgaaaacaatttcaatgcagttttgtgggtataatgttacctagrgaacagttttgctttaagttccttatattgtgcatttcttattcaattctcataccttgtaattaataattttgttaaaatgcatccacttttaggtcat

SEQ ID NO: 140149 - DNA, 201 bp, Homo sapiens; identical to SEQ ID NO: 25311

SEQ ID NO: 140150 - DNA, 201 bp, Homo sapiens; identical to SEQ ID NO: 25312

SEQ ID NO: 140151 - DNA, 201 bp, Homo sapiens; identical to SEQ ID NO: 25313

SEQ ID NO: 140152 - DNA, 201 bp, Homo sapiens; identical to SEQ ID NO: 25314

SEQ ID NO: 140153 - DNA, 201 bp, Homo sapiens; identical to SEQ ID NO: 25315

SEQ ID NO: 140154 - DNA, 201 bp, Homo sapiens
ttttattcctatgaataattttgctaaaattcatccaatcctaggtcatccaaaaaccagagcttttataactcatggtggagccaatggcatctatgagrcaatctaccatgggatccctatggtgggcattccattgttttttgatcaacctgataatattgctcacatgaaggccaagggagcagctgttagagtgga

SEQ ID NO: 140155 - DNA, 201 bp, Homo sapiens
agcaattatagtattataagtgaagatctgggtatatgttttaacattatctccctgactacaatgtaatagctccttttcttttctccattacacacatrcagacacatacctacatacacacacatatttacacaaatatccttaacagaggccaactatctcatacatcttcttgcaaagaaacagtgattgagtcag

SEQ ID NO: 140156 - DNA, 201 bp, Homo sapiens
tatttactccaataattcctcaaaatacttgattttctctctttaatattttgtaccaattctttcggtagtgcctgctgtggtgatactcttttatgatraaacattttttctttttcccacaggaaatggaggagtttgtacagagctctggagaaaatggtgttgtggtgttttctctggggtcaatggtcagtaaca

SEQ ID NO: 140157 - DNA, 201 bp, Homo sapiens
aatacttgattttctctctttaatattttgtaccaattctttcggtagtgcctgctgtggtgatactcttttatgataaaacattttttctttttcccacmggaaatggaggagtttgtacagagctctggagaaaatggtgttgtggtgttttctctggggtcaatggtcagtaacatgacagaagaaagggccaacgta

SEQ ID NO: 140158 - DNA, 201 bp, Homo sapiens
agcatccactgacagaagtaatagttgtgcctcagacttagtgattacatgtggccctggggtagttactacccttggtatgcatgagtgattcctattarcatcagtgggaactcagtactccatatgtatccacaaaagggaacttgagacccacaattacttttaatttctgatgttaacagtcatacctactgctga

SEQ ID NO: 140159 - DNA, 201 bp, Homo sapiens
ggggtagttactacccttggtatgcatgagtgattcctattagcatcagtgggaactcagtactccatatgtatccacaaaagggaacttgagacccacarttacttttaatttctgatgttaacagtcatacctactgctgaatttaactcaatatatttcagttaagtgaaaatggtgcttaatgtagtctttagaatg

SEQ ID NO: 140160 - DNA, 201 bp, Homo sapiens
tctattcaacataaaatgaagacatagtttgtgctttatcaatcaacaaaatactacacagcaatggaattacccaagaacggttacactaaaaaaaataracactaaggagtacatattatataattcaattacataaacaagcaaagctagtgctgctattcaaagtccggttattctttagttggtggacaaaagtgg

SEQ ID NO: 140161 - DNA, 201 bp, Homo sapiens
tagttactacccttggtatgcatgagtgattcctattagcatcagtgggaactcagtactccatatgtatccacaaaagggaacttgagacccacaattayttttaatttctgatgttaacagtcatacctactgctgaatttaactcaatatatttcagttaagtgaaaatggtgcttaatgtagtctttagaatgactt

SEQ ID NO: 140162 - DNA, 201 bp, Homo sapiens
ggaagcttaaagaaaaatagtaggccaatctagaagacagtgtgcaggtaaaagtgttagaaaaagaccttgccagtgtctaacaatgtagggttctgtaraccaaataacagagttggattttattcttaaaataatgagaagccaggcaaaaatcttaatcaggggagtgccataatctcactttagttgcaaaacatc

SEQ ID NO: 140163 - DNA, 201 bp, Homo sapiens; identical to SEQ ID NO: 25339

SEQ ID NO: 140164 - DNA, 201 bp, Homo sapiens
gtggggagagacagacaaaaagggaaagcagataaagtggtcaggacagttctcaagtcctcaggtttagtttgcagggaatgattaagaatcagatgacsctaaaaggtaaattagagccagatatgtattaggagttgaaatatttattaagaacattgaaaacatcctaaaaagagttcagaaataaggatatatgaa

SEQ ID NO: 140165 - DNA, 201 bp, Homo sapiens
gtatgcatgagtgattcctattagcatcagtgggaactcagtactccatatgtatccacaaaagggaacttgagacccacaattacttttaatttctgatrttaacagtcatacctactgctgaatttaactcaatatatttcagttaagtgaaaatggtgcttaatgtagtctttagaatgactttcaggtgttttcaac

SEQ ID NO: 140166 - DNA, 201 bp, Homo sapiens
gccaagtgactagctatgaggcatgtcactcaccatgataaaattcctttttaggaacttagagatgttaattctcagattgcattttcacatctttcttrcagcacttaaaatggctcatgatgttgagcacgttctaatatgcctgttttagaactaatagtgtaatgtggaatgtgttcataatacaaaggataaatg

SEQ ID NO: 140167 - DNA, 201 bp, Homo sapiens
gcagtctgaagtcacaccaccatatagccttcagttacatctccaacacaagtacctgttttttcctctgaaatctgaaaagtaatagcaaattagttcartgtgttatctagaaaacactgtcactttcagagcctttcattgtgcatctcattttattcctatgaataattttgctaaaattcatccaatcctaggtca

SEQ ID NO: 140168 - DNA, 201 bp, Homo sapiens
accaattagaaactcatgtacatgttaataccatcacacgtatgtgagttttatgcatgttacaaatagagaggaatactaaagaaactttgaaaataggkttggttaaattaaagtcttgattatgcaacacctaagaaggtattggtcattcattcaaagaatatttacaaagagattatcacaaaacacaggtaagtg

SEQ ID NO: 140169 - DNA, 201 bp, Homo sapiens
tgttggaggactccactgcaaacctgccaaacccctacctaaggtaaacatactttcgttggttttattttgttggcttcaaatttcagtagaaatgactstatagtcttcattcagagtgtttgactaacactgaaaaagatgggaagtaggtggggtaaagcagataccaattagaaactcatgtacatgttaatacca

SEQ ID NO: 140170 - DNA, 201 bp, Homo sapiens
tgcttatatgaaatatgtggcaacaaatagagaagactggctctggtggtcattatgcagtatatactctatttaaggatcagtggtagtatagcatgatygaatgtcattaatataggaataataactggcatatgtggagagtaggggagtaaaaagaatgaattccagtcctgtgattaaaagtgtaaactataggat

SEQ ID NO: 140171 - DNA, 201 bp, Homo sapiens; identical to SEQ ID NO: 25335

SEQ ID NO: 140172 - DNA, 201 bp, Homo sapiens
aaaagaatgaattccagtcctgtgattaaaagtgtaaactataggatgggcatggtggttcgcgcctgtaatcccagcactttgggaggccaaggcgggcrgatcacgaggtcaggagatcgagatcaccctgaacgatatggtgaaaccctgtctctactaaagatacaaaaaattaggcaggagtggtggtgtgtgcct

SEQ ID NO: 140173 - DNA, 201 bp, Homo sapiens
gagatcaccctgaacgatatggtgaaaccctgtctctactaaagatacaaaaaattaggcaggagtggtggtgtgtgcctgtaaccccagctattcaggasactgaggcaggagaatcccttgaaccaaggaggcggaggttgcaatgaggcaagatcacaacattgcactccagcctgggctacagggccacactctgtc

SEQ ID NO: 140174 - DNA, 201 bp, Homo sapiens
aatactactaactacttaacatgtgcatgtcacttgagatatcattcctcatttaagagaaccagattattcagcacatcaaggttatattgtcttggaawgtcatagatgacagatacccttggacttgattaaaagtagacatatcagttgtgacagcaagataagctagttgaaattttaaaattcttccataagtaa

SEQ ID NO: 140175 - DNA, 201 bp, Homo sapiens
aaactttaccaacatttttgcctgcattattctaacccctttcagaaaattacataaagtaattatcttatgtcatccacttcttcttttctttattcctrtcaggaagacccactacattatctgagacaatgaggaaagctgacatatggcttatgcgaaactcctggaattttaaatttcctcatccattcttaccaa

SEQ ID NO: 140176 - DNA, 201 bp, Homo sapiens
acatcataggtgtctgacagagaagcacagagataatgaacaatgcatgtataataaagaccaaataatttctgccacttgtttctgaatagtgcccttartttcaatacgaaaaaaaattccgtcagcatataagattatattcttttcgaaggaatacaagaacttcatatattttaattaacatcacattttaaggca

SEQ ID NO: 140177 - DNA, 201 bp, Homo sapiens
ataaagtcagggaagtggagtttttgataaatgaatttatgaaatgaaaatacaagatgatctaccaatctcacaaatattatagaaaagcttaaattatrgggtcagtgaaaacgctgtgaccatcactcatacagaacaccccaggaaatcataaacctatatattagtacacctaagactttaagcaattatatatct

SEQ ID NO: 140178 - DNA, 201 bp, Homo sapiens
tgttaaaactcagtatctatgtttaatgcaagttgtataggctttatagagtcagtttcttaagagacaaaagttgaggtaagactaatgaaaaatatatrccactctaccctactcttgaaagatttccccactcacactaagggaaactgacagtgccagtagaaggaggaagagagtaagacaatgtagaaggacaag

SEQ ID NO: 140179 - DNA, 201 bp, Homo sapiens
agcagataaagtggtcaggacagttctcaagtcctcaggtttagtttgcagggaatgattaagaatcagatgacgctaaaaggtaaattagagccagataygtattaggagttgaaatatttattaagaacattgaaaacatcctaaaaagagttcagaaataaggatatatgaaatgattctttttataagaaaagcctc

SEQ ID NO: 140180 - DNA, 201 bp, Homo sapiens
atatttttcaaagcacacaaactttaccaacatttttgcctgcattattctaacccctttcagaaaattacataaagtaattatcttatgtcatccacttyttcttttctttattcctatcaggaagacccactacattatctgagacaatgaggaaagctgacatatggcttatgcgaaactcctggaattttaaatttc

SEQ ID NO: 140181 - DNA, 201 bp, Homo sapiens
gaatatatgtacatatttttcaaagcacacaaactttaccaacatttttgcctgcattattctaacccctttcagaaaattacataaagtaattatcttaygtcatccacttcttcttttctttattcctatcaggaagacccactacattatctgagacaatgaggaaagctgacatatggcttatgcgaaactcctgga

SEQ ID NO: 140182 - DNA, 201 bp, Homo sapiens
gaggaaagctgacatatggcttatgcgaaactcctggaattttaaatttcctcatccattcttaccaaatgttgattttgttggaggactccactgcaaasctgccaaacccctacctaaggtaaacatactttcgttggttttattttgttggcttcaaatttcagtagaaatgactctatagtcttcattcagagtgtt

SEQ ID NO: 140183 - DNA, 201 bp, Homo sapiens
ttaaaaacagcaagatccgtcaagtaacatctaaccgaatgcatagatttagaatgagtaattacacatttttctacaactatctatataactgcagaaakttttccttctaaatctcagttgtcttatttagaaattaaaagatgttcccatgttaccaggaggttgtcttcacagtagagagagataatgtctatatct

SEQ ID NO: 140184 - DNA, 201 bp, Homo sapiens
ataggctgtttttcattgataataagtttggcattaataatatgaccaggaataaatttatttaagaaatgtagatgaagtatcgatattatcatgttatwgggatcaggtaagagttatcaccaaattctgcccctgtcatttgacccttttgtttaagaattcctgagggcactgtacacactacagatgttatcagaa

SEQ ID NO: 140185 - DNA, 201 bp, Homo sapiens
aatatgctctatgtgctttattttgacttttggttccaaatatttaatatgaagaagtgggatcagttttacagtgaagttttaggtaagatttttttcarttagtaacatgaagctctaacttatttgtgtctttgaagcacaacttgcataaagccataaagtcagggaagtggagtttttgataaatgaatttatgaa

SEQ ID NO: 140186 - DNA, 201 bp, Homo sapiens
agactaatgaaaaatatataccactctaccctactcttgaaagatttccccactcacactaagggaaactgacagtgccagtagaaggaggaagagagtargacaatgtagaaggacaagaaaaaaaggttgactggtagtacaatagtggtaataactaatactagctcttgttattaacttgcagaaagcattgaatga

SEQ ID NO: 140187 - DNA, 201 bp, Homo sapiens
tctaatttcctatctgataaagctttcttgtaatggcctctaaattttgcttaaacctgagttactttaacagtgatgtagcaaataaaattaaacactgwaaattattgttcagtttatgaggattgctttggagtttcaaaattagtaacaacataaaaatgtcttggctatagaagaacatattaatcactgttgtca

SEQ ID NO: 140188 - DNA, 201 bp, Homo sapiens
gttattagttttataatatagtcatgtgaaatcataaaaaaattaatcaaggtgtaccttttaaacattatggaaaatattcacaaaattaacattggaaktaatccaacatgttacatgaaataatgattagaaacatatgcctacaatagcactaaaataattttatcaatgaaatgttcaattatgctgtcagccata

SEQ ID NO: 140189 - DNA, 201 bp, Homo sapiens
gaagaacatattaatcactgttgtcaaagctttgtagcaccttgtctaagtgttaataatctgttgaccaaattcagcaaaatacaattttgaggttattsaaaagctttatttttattcatgataccaacatgttccttatttctatgccaaaaaaatccaaaattagcaatactggttggtaatactctgaatttgtgt

SEQ ID NO: 140190 - DNA, 201 bp, Homo sapiens
taaacattatggaaaatattcacaaaattaacattggaattaatccaacatgttacatgaaataatgattagaaacatatgcctacaatagcactaaaatrattttatcaatgaaatgttcaattatgctgtcagccataatacacatacagtgaataagaaaattataaatataacacgatggcaaatttttgcaggagg

SEQ ID NO: 140191 - DNA, 201 bp, Homo sapiens
tccaatgaagttatacataaaacccttgcagcatttatttatttcttgtagtagcttattttatagacttgctattttgtcaatcaaaggacaacaggctstaatataataacttacagacaagtagatatattgaaactactcatattactcaaaaagaaacgaatacattacaattaaatttggagatgaaaactaaca

SEQ ID NO: 140192 - DNA, 201 bp, Homo sapiens
cacatacagtgaataagaaaattataaatataacacgatggcaaatttttgcaggaggaaatgtatataaaatgagattaaaattttctaaataagtgtcrtgtatgtacattgacctatataagtagggcaaaatccataataaaaaatacataatttctataaataatatctctagatagaaattttagaaaaaattat

SEQ ID NO: 140193 - DNA, 201 bp, Homo sapiens
tatttatttcttgtagtagcttattttatagacttgctattttgtcaatcaaaggacaacaggctgtaatataataacttacagacaagtagatatattgraactactcatattactcaaaaagaaacgaatacattacaattaaatttggagatgaaaactaacataaaatacataaaacaaaataaacatataggtcat

SEQ ID NO: 140194 - DNA, 201 bp, Homo sapiens
cttagacacattttttctatgttttgttaaaaaccactggggaaagttttaccccaatgattaaatctgaaagtatttaaatttatatattggcatacatyggggaactcaagtcagaataattctcaatcaattgcagccaagcacatcttcaccaggagtgtaatgtggtgtgcgtgagctactcaaaagagagacaag

SEQ ID NO: 140195 - DNA, 201 bp, Homo sapiens
gtggtcagaatcagaggtaatctttatttcaggtgctattatatctcacagaatttttcaatatcttcctgggctgtccctctgtctcctgtttctacaaytttacacctgttttctcctctcctgcagggttatttcaaatgccactaaatataatagctcttctatcaccagtgactgtattttctggaggactaaatt

SEQ ID NO: 140196 - DNA, 201 bp, Homo sapiens
ggtgcaagtgctgcctctgagacacaacaaagtgatgatgagagttcctcacatgcagttagaaatagcacatcaatttaacagtgtgatttcagggcaayacgtgctccacctaaacaataacctgaaaggtacaattattcaactactaactataaactgtacaattctgtattataaatgagactctaaggactgatt

SEQ ID NO: 140197 - DNA, 201 bp, Homo sapiens
cacagaatttttcaatatcttcctgggctgtccctctgtctcctgtttctacaactttacacctgttttctcctctcctgcagggttatttcaaatgccastaaatataatagctcttctatcaccagtgactgtattttctggaggactaaattcctaatcttaaagtaatgacacatttcatgatgaagtgtgacctgt

SEQ ID NO: 140198 - DNA, 201 bp, Homo sapiens
agtaatagcaaattagttcagtgtgttatctagaaaacactgtcactttcagagcctttcattgtgcatctcattttattcctatgaataattttgctaamattcatccaatcctaggtcatccaaaaaccagagcttttataactcatggtggagccaatggcatctatgaggcaatctaccatgggatccctatggtgg

SEQ ID NO: 140199 - DNA, 201 bp, Homo sapiens
taatgagtaaggacataaaacgtttgaagaacacaattaacaaatggaatcttataatgtaaaatgatatacacacatgtacatatacaatacacatatakgtatcgtatatatcaactggaagacacattttcctagagcatgttgaatagttaatagtcatttgaagtggcatgtggtgggaaataaatcaagacttag

SEQ ID NO: 140200 - DNA, 201 bp, Homo sapiens
tagaagagtggtcatgacagaattatcaacagtgtccaaaaagcgttagcaacagaaatatctattcaacataaaatgaagacatagtttgtgctttatcmatcaacaaaatactacacagcaatggaattacccaagaacggttacactaaaaaaaatagacactaaggagtacatattatataattcaattacataaac

SEQ ID NO: 140201 - DNA, 201 bp, Homo sapiens
ggtaagatttttttcagttagtaacatgaagctctaacttatttgtgtctttgaagcacaacttgcataaagccataaagtcagggaagtggagtttttgrtaaatgaatttatgaaatgaaaatacaagatgatctaccaatctcacaaatattatagaaaagcttaaattatggggtcagtgaaaacgctgtgaccatc

SEQ ID NO: 140202 - DNA, 201 bp, Homo sapiens; identical to SEQ ID NO: 25336

SEQ ID NO: 140203 - DNA, 201 bp, Homo sapiens; identical to SEQ ID NO: 25337

SEQ ID NO: 140204 - DNA, 201 bp, Homo sapiens
cagtgatgtagcaaataaaattaaacactgtaaattattgttcagtttatgaggattgctttggagtttcaaaattagtaacaacataaaaatgtcttggytatagaagaacatattaatcactgttgtcaaagctttgtagcaccttgtctaagtgttaataatctgttgaccaaattcagcaaaatacaattttgaggt

SEQ ID NO: 140205 - DNA, 201 bp, Homo sapiens
gtgatacacactcacattctttgtggtcagaatcagaggtaatctttatttcaggtgctattatatctcacagaatttttcaatatcttcctgggctgtcyctctgtctcctgtttctacaactttacacctgttttctcctctcctgcagggttatttcaaatgccactaaatataatagctcttctatcaccagtgact

SEQ ID NO: 140206 - DNA, 201 bp, Homo sapiens
tataattacattttaaaatatgtgctatttacaatcacacaaaaaatggaacagtataaatccaaaaaatgtgtataggattcttatgctgaaaatcactrcatgtatgcatgtatatatgtgtgtgtgtaaactcatgtgtgtgttgtgtgtgtgtgtgaattaaatgcaatatctgtggactggattgtgctaggtgat

SEQ ID NO: 140207 - DNA, 201 bp, Homo sapiens
tgaaaaaacagaaagtcttagaaaacaagaaatagaggaggagcgtcccttaactctatcaagtacatctacagctagcattacatttaatggtgaaagastgaatgcttatactctaagatcagtaacaaagcaaggatgtcctcactcgccactgttacccaacatatgtaatcctgaaagttgtagccagcacaataa

SEQ ID NO: 140208 - DNA, 201 bp, Homo sapiens
aaacttgctgaggtaggaggattgcttgaggccaggagtttgagaccagcctgggcaacatagcaagacccccatctcaaaaaagacattagctggagagsggggtggtagtgcatacccgtagtcccagctactcaagaagttgagatgggaggatgacttaagcccaggagttggaggctgcagtgagccatgaccaag

SEQ ID NO: 140209 - DNA, 201 bp, Homo sapiens
tggctgagtggggtttattctggtgatggaagactgatccagtattcagaatcagtcagtgtaatccaccatatcaacaggctaaagaagaaaaatcacayaatcgtatctattgatggagaaaaaacatttgaacaaattcaacactcattcattatttaaaaataaacttgctgaggtaggaggattgcttgaggccag

SEQ ID NO: 140210 - DNA, 201 bp, Homo sapiens
ctcatgcccaagaaaagaaatctccaggctcagatggtttactggaaaaacataacaaatattcacagattattcagtctcttccagaaaagataataggmaggaacacttcccaattcattttatgaaaccagtgttatcctgatacaaaaaccagacaaagattgttcaaaaaaataccacagaccaatattccttatc

SEQ ID NO: 140211 - DNA, 201 bp, Homo sapiens
taagaaactcatgcccaagaaaagaaatctccaggctcagatggtttactggaaaaacataacaaatattcacagattattcagtctcttccagaaaagakaataggaaggaacacttcccaattcattttatgaaaccagtgttatcctgatacaaaaaccagacaaagattgttcaaaaaaataccacagaccaatatt

SEQ ID NO: 140212 - DNA, 201 bp, Homo sapiens
ttctgattggatgagagcaagtcttaagacaaccaatcacagcatgaaaataaagtccaatcagagtaggcctagaggtttttctctcatccaatcagaayatgtagtccagggtctcctaacctcagtatataaagcatgctgaggcagcggcgcgtcatttctggcacttatgtgtgggtgtggggagctactacgtac

SEQ ID NO: 140213 - DNA, 201 bp, Homo sapiens
aatcaggattatagtgattttccatcaaaactcttgcaaaattgccattgtttgatgagaagattaagcaggagcattcatgtggtggagaagaactctayggtgaactttcctgggctttttctgctaaaactgtggctttctcagaacactctcaaaataagcacatgtgggccaaggatgtttctccccaatgttgta

SEQ ID NO: 140214 - DNA, 201 bp, Homo sapiens
agactttgtttatggccagttttggggccagtttatggccaggttttggggggcctgttcccaacagtgccctttaaaggttttttaagattaggaaacawaaagaagtcaaaaggagctaaatcaggattatagtgattttccatcaaaactcttgcaaaattgccattgtttgatgagaagattaagcaggagcattca

SEQ ID NO: 140215 - DNA, 201 bp, Homo sapiens
acattcttcatttaaatagaaaaagaatcttaaaattaacatggaagttcaaaatacctcagatagacaaaagaatctggaataaaaagaaaagctggagscatcacactacctgatttcaaaatatactacaaatctatggtaagcatggtactatcaaaacagtatggtactatcaataaaaggggcaggggagagaca

SEQ ID NO: 140216 - DNA, 201 bp, Homo sapiens
acctgactcataaaaaatagaagttaaaacaaaagagatgtcattttgtccacctgtcaaattgacaaagttgaaaagacaatgctatcttgtgtttaccrggctgaattaaaatgaactctcttattattagtggtaaaagtataaattgatgcactctttctggaagacaatttttcaatatgtatcaaaagattttta

SEQ ID NO: 140217 - DNA, 201 bp, Homo sapiens
aaagagctattaaaataaacaagaagttgaatatcctgatagaaaaataagcaagacatgaaagagacaacttacaaaataaaaatggtcaaaataaacayataaaaggttttacctgactcataaaaaatagaagttaaaacaaaagagatgtcattttgtccacctgtcaaattgacaaagttgaaaagacaatgctat

SEQ ID NO: 140218 - DNA, 201 bp, Homo sapiens; identical to SEQ ID NO: 25345

SEQ ID NO: 140219 - DNA, 201 bp, Homo sapiens
acatataaaggcttccacccaggcctgcagcatcagtttgcttcttgttgaaccaagaaatagatgcctagatctcatatttccaagtcaagaggcaggtytctcataagcacaaggatcacaagatgggtagatacatggctcagtcacctggccagaggggcccccaaggcttctggatgagtgccatctgatgcatct

SEQ ID NO: 140220 - DNA, 201 bp, Homo sapiens
aaaacatatggaatgtcatgaataattttaattttaaaactgcactgcaaaaacaggcaccataaataagaaggcaatgacaatcgaggaaaatatttgtracatatacaagacattaatatcctttatatataaagagctattaaaataaacaagaagttgaatatcctgatagaaaaataagcaagacatgaaagagac

SEQ ID NO: 140221 - DNA, 201 bp, Homo sapiens
aacattcgggtttacaaagcttctacgtacatcacaacaatgctgtactccaattctaggtttctggaggagagactcacattgggccagtttgaatcacwaatctatgaatctatccttgaccccatcaaataagtgtgcgtgtgtgtgtgtcgtgggagacggggtaactcaatacaaatgtagcagctaagagtcccc

SEQ ID NO: 140222 - DNA, 201 bp, Homo sapiens
ggtgtcactagtggccaagtctaaatagagcagagtcccagtgacatcccaaaagaggcagacggtggtcaaatgcactccgactaactcaccaagttccraagtttcaaagttccaaaattccaaagtttgtcacttctctaaaagtcactttcagtgcaccagtgaaatattggaggtagcaggcactgcagcaggaag

SEQ ID NO: 140223 - DNA, 201 bp, Homo sapiens
gactggaagagactactaggcctggcttcactaggcttaaagtccactaggttgctggaaatgttatataaatggatctggatgttatgtaaaatattctrtaaatacacataagtgtatattatatatttgtaaaaatttatcaagatgtaccattaagatttgtatgctctgctatatgctttatacctcaacaaaaag

SEQ ID NO: 140224 - DNA, 201 bp, Homo sapiens
aaatgcctggactcaagcgatccttttgcctcggcctcccaaaatcctgggattacaggccggagccaacactttctctgtgtcggcactactgagaatamagatagtacagtgaccagctaggatggacagcagcctagagaggaagccaggcattaaagaggcctcagtgtgatgagtggtaccagaggggaagtacag

SEQ ID NO: 140225 - DNA, 201 bp, Homo sapiens
gtcaagttttacaggaaggaagaggaaagagaaaggaaggaggggaggcttgtgagcctttcagccactgcaaggcttggggtcagtaccctcaccacccrggtgtatctcctgtcagggagagcctcagtgccccagacctacatggtgtgggatgaacccttcccacctttgcaagtcaccagtcaaggtgaaatgttt

SEQ ID NO: 140226 - DNA, 201 bp, Homo sapiens
agatctgcgtttgctgcgcataaccaccacccatactgaaagttctgttggatcctaatctccgcatttctgctgtcatggtccctgtgccgacgtctctstgtgtgtgtgtgtctgtgtgtgcatgtgcacactcctatcctgtgtgtgtctgcatctgtatagctgtgtagatttaattgcagagaaagtacaggtcat

SEQ ID NO: 140227 - DNA, 201 bp, Homo sapiens
cacactatggccaagcaatttcactcctgggacccacacagaagaaaggaattctgtgtctgcccaaagatggagaaattagtcatagtagccccaaaccrgaaaaatccaaatgcatatcaacatgagaatggagaaataaattgtgatatagtcatacaacagaaaactacatagcaatgaaaaagaacaaactgctat

SEQ ID NO: 140228 - DNA, 201 bp, Homo sapiens
caaaggtctaagagcttttatctgagaactctaatcatgagatagcatcacaaactcactgacctataaaagctggcttcaagttgtttttctgacaaaaytggaagctgtccacgtggctaactttgtttgccctgataggtaatccaaggaaagctggcagccaaaatttggggtaaagcagtctctatggcagtttgg

SEQ ID NO: 140229 - DNA, 201 bp, Homo sapiens
tcttagaaccactctggtcacttactcagttacattggggagaacataaagatcagttattactaattattcaaatgatcgtaaatgagtcagaaaatacycacatgggatcacatactcatgtcccttaagcacatgtcactccatagatagatctgcgtttgctgcgcataaccaccacccatactgaaagttctgttg

SEQ ID NO: 140230 - DNA, 201 bp, Homo sapiens
cttctaagaaggcacataatagatactagcatgcagttagctaaatgtgcagggagtatatatggtgagaaagggagctattttatagctaagagaaaagrcttctgcagtttgcttcaaggttatatcttgaaacccaagagaagggaaaaatgttttaaaatatattatgaagttaagctgcccagttacgttaggaag

SEQ ID NO: 140231 - DNA, 201 bp, Homo sapiens
ctggggatttccttcggccaagaggcaggtccattcagtctgttgagaggcttaggattttattttagtttatattctcccttttttgtcaaggtattccrggggcagtattgatggccaagcttttattttgtcccatgtggatgctggggtggtatggttaccttcccagggtccatgatgttcctcgatgggacccct

SEQ ID NO: 140232 - DNA, 201 bp, Homo sapiens
tccactccatgggctcctgtgcggcccgagcctccccgacgagcgccaccccccgctccacagcgctcagtcccatcgaccacccaagggctgaggaatgygagcgcacggcgcaggactggcaggcagctccacctgcagccccggtgcgggatccactaggtgaagccagctgggctcctgagtctggtggggacgtgg

SEQ ID NO: 140233 - DNA, 201 bp, Homo sapiens
ttccttctcccacttgctatcttcttttgctcctctacccaaaaacttctctccccaccatcttttcacaaaaccttctctccctactgctcgcccatttyccccccctcaccactctttcctcttcccaattgccaccttcttttcccccttcatccacccataaactttctacccaccgtctttctgcaaaaccttcct

SEQ ID NO: 140234 - DNA, 201 bp, Homo sapiens
ctttctcagaacactctcaaaataagcacatgtgggccaaggatgtttctccccaatgttgtaaaaatgaatgggtgtaattagtcaagggcaaattgtaycctacaccttcagaggcccttgctctcctcccccaagttacgagcatctatagttatccctccctcctgccctcgctccctccctcactctcacctatct

SEQ ID NO: 140235 - DNA, 201 bp, Homo sapiens
tccccagagagacaagccggcatggtcaaggtgaccttactgtcccatccaagcttgactctttaccagccttgaggtctcacatataaaggcttccaccmaggcctgcagcatcagtttgcttcttgttgaaccaagaaatagatgcctagatctcatatttccaagtcaagaggcaggtctctcataagcacaaggatc

SEQ ID NO: 140236 - DNA, 201 bp, Homo sapiens
tgcaggaaacagtggccttgcttggacactttcttcgtttttgagacaggctcttgctctgtcacctagactggagggcagtagcatgatcacagctcacygcagccttgaactccggggctcagttgatcctcccacttcagcttcctgaatagctaggatcacaggtgtgcgctaccacacctggttaatttttaaatt

SEQ ID NO: 140237 - DNA, 201 bp, Homo sapiens
taattagccaggcgtggtggcatgtgcctgtggttccagctactcgggaggctgaggcaggagaatggcgtgaacctgggaggcggagcttgcagtgagcygagatcgcgccactgcactccagcctgggtgacagagtgagattccatctcaaaaaaaaaaaaaaaaaaaaaaaaaaaatacaggtcacatgtcacatgg

SEQ ID NO: 140238 - DNA, 201 bp, Homo sapiens
acctcaggctgacatcatctcaacagtggccgagttgttaattagctgcatggaagtaatctctggaattttgcagctaggtctccatgcttggtctgtcygtctcaagattacctcctggaacttctaagaaggcacataatagatactagcatgcagttagctaaatgtgcagggagtatatatggtgagaaagggagc

SEQ ID NO: 140239 - DNA, 201 bp, Homo sapiens
acggggtttcaccatgttagccaggatggtctcgatctcctgacctcgtgatccgcccgccttggcctcccaaagtgctgggattacaggtatgagtcacmgcgcccggcgaagacatggaaattcttagaaccactctggtcacttactcagttacattggggagaacataaagatcagttattactaattattcaaatg

SEQ ID NO: 140240 - DNA, 201 bp, Homo sapiens
gtggcataatctcggctcactgcaagctccgcctactgggttcacaccattctcctgcctcagcctcctgagtagctgggactacaggcgcccggcaccaygcccggctaattttgtgtatttttagtagagacggggtttcaccgtgttagccaggatggtctccatctcctgacctcgttatctgcccgccttggcctc

SEQ ID NO: 140241 - DNA, 201 bp, Homo sapiens
ggaggctgaggcaggagaatggcgtgaacccaggaggcagagcttgtagtgagccaagatcgcgccactgcactctagcctgggtgacagagcgagactcygtctcaaaaaaaaaaaaaaaaaattagccaagagtggtggcatgtgactgtggtcccagctactcggctgagacatgagaattgcttgaacctggaggtg

SEQ ID NO: 140242 - DNA, 201 bp, Homo sapiens
tgggcatagtggcgggcgcctataatccctgctactcaggaggctgagacaggagaattgcttgaacccgggggcagaggttgcagtgagctgagattgcrccattgcactccagcctgggcaacaagagtgaaactgtgtctcaaaaaaaaaaaaaaaaaaaaagggggctgggaagggtggctcatgcctgtaatccca

SEQ ID NO: 140243 - DNA, 201 bp, Homo sapiens
tggatgagtgccatctgatgcatctggcctgctgtaggctctaaagctcgggcccactcttgcaaggtgcatggtgcgctcatgctagccagatggaagcrccgcagtacaaactcctcccccagctttaggggcatggctcgggacatttggccacttgcagagtttactcacctgcctctgttcctccacagctccggc

SEQ ID NO: 140244 - DNA, 201 bp, Homo sapiens
ataaagatatgctgtggttctcaatctctttttgatgtggtgtactctgccacgcacagccctgacacagagcaattgtgctaatgggaagatgtgctgaycagttggtgctttcctctctgatttaggggaaatacgtggtctgctttgacccactggatggatcttccaatattgactgcctggcctccatcggaacca

SEQ ID NO: 140245 - DNA, 201 bp, Homo sapiens
gggccttgaacacttacttcccagcatatgctggaagctcaacatgtatctgctgaatgcatgcatgcatgaatgaatgggctaaattggatttttttttwaaaaattggattattatagagatgttggggaatttccaagtttacaaattatctaacttttctactctggctgagcaaggaaaaaaaacagaaacaaagc

SEQ ID NO: 140246 - DNA, 201 bp, Homo sapiens
tgtgcacctgtagtcccagctacttgggagtctgaggtgggaggattgcttgagcccaggatctctaggctgcagcgagctctgaccacaccactgcactycatcctgggcaacagagtgagactctgtcaaaacaaaacaaaaacaagaaaacaaacaattttgctttctaggtctctgtgtgtttcttcattccttaat

SEQ ID NO: 140247 - DNA, 201 bp, Homo sapiens
aggacgccatcatcaccgccaaggagaagcgggtgcgtcatggggctgcggtgcccgctcgccagtagatgatgatactgagccggaaataagctgccttrcttttctttaattcccgggattctcctctatttcttaacatttgttttctggaaacaaaggattacatacttctctacttggaaatcttgtgctgtctag

SEQ ID NO: 140248 - DNA, 201 bp, Homo sapiens
atccaattccctggtgatcaacatgctccaatcctcctatagtacctgcgtcctggtctcagaagagaataaggacgccatcatcaccgccaaggagaagmgggtgcgtcatggggctgcggtgcccgctcgccagtagatgatgatactgagccggaaataagctgccttacttttctttaattcccgggattctcctct

SEQ ID NO: 140249 - DNA, 201 bp, Homo sapiens
ctttctatatgtttggcttccatccctttattttgagcctataggtggcactgcatgtgggatgggtgacttcctttttctttgtttgtttagcggctctyttaagattgctgcaggatattgtctcatactttaagcagtcctgcatttgttaagtccagtcacaaggtaaggtttgaggagctcataataaatgaaatg

SEQ ID NO: 140250 - DNA, 201 bp, Homo sapiens
tgggggtttgctgtatagattgtttgtctcccaggtactaaacctggtatccaatacttatcttttctgctcctccccctcctccctccctccaccctcamgtaggccccagtgtctgttgtttccctctttgtgtccatgtgttctcatcatttagctcctacttataagtgagaacatgtggcatttggtttcctattt

SEQ ID NO: 140251 - DNA, 201 bp, Homo sapiens
aggtttgttatataagtaaactcctgtcatgggggtttgctgtatagattgtttgtctcccaggtactaaacctggtatccaatacttatcttttctgctsctccccctcctccctccctccaccctcacgtaggccccagtgtctgttgtttccctctttgtgtccatgtgttctcatcatttagctcctacttataagt

SEQ ID NO: 140252 - DNA, 201 bp, Homo sapiens
cttttgtcttctcaggtatggaatcgcaggaagcgttaacgtgacgggagatgaggtgaagaaactggatgtgctatccaattccctggtgatcaacatgstccaatcctcctatagtacctgcgtcctggtctcagaagagaataaggacgccatcatcaccgccaaggagaagcgggtgcgtcatggggctgcggtgcc

SEQ ID NO: 140253 - DNA, 201 bp, Homo sapiens
gtaattttattttctacacttttattttagattcaggggtagttgtgcaggtttgttatataagtaaactcctgtcatgggggtttgctgtatagattgtytgtctcccaggtactaaacctggtatccaatacttatcttttctgctcctccccctcctccctccctccaccctcacgtaggccccagtgtctgttgttt

SEQ ID NO: 140254 - DNA, 201 bp, Homo sapiens
agcaggagcattcatgtggtggagaagaactctacggtgaactttcctgggctttttctgctaaaactgtggctttctcagaacactctcaaaataagcasatgtgggccaaggatgtttctccccaatgttgtaaaaatgaatgggtgtaattagtcaagggcaaattgtatcctacaccttcagaggcccttgctctcc

SEQ ID NO: 140255 - DNA, 201 bp, Homo sapiens
ggcggatgagggggcatttgcaaagcgcaggacagaggctgtttctcagctctgcccaccgcaggcctgggcctgctgttcattctccagtggcaagcgcrttcagattccatatcgaaccaaggcctgtgtttgtggtcccctgaaactcagatgcagtcagcctagttttgttgctgctgttgcttgcttgcttttgtc

SEQ ID NO: 140256 - DNA, 201 bp, Homo sapiens
tgatccacccgcctcggcctcccaaagtgctgggattacatgcgtaagccactgcgcccagcctgtaccacaaattaatggttaaaatgcatccctcatasgacaatgtaacttcttcctctcactgttgatggcctatcttcctgaaaacattaatctgggggtgagaacttgggagatacacacagttgggttcaccat

SEQ ID NO: 140257 - DNA, 201 bp, Homo sapiens
gctgaggggtggggttaggcggatgagggggcatttgcaaagcgcaggacagaggctgtttctcagctctgcccaccgcaggcctgggcctgctgttcatyctccagtggcaagcgcattcagattccatatcgaaccaaggcctgtgtttgtggtcccctgaaactcagatgcagtcagcctagttttgttgctgctgtt

SEQ ID NO: 140258 - DNA, 201 bp, Homo sapiens
ttagcaaagacggggtttcaccatgttagccaggatggtctcaatctcctgacctcgtgatccacccgcctcggcctcccaaagtgctgggattacatgcrtaagccactgcgcccagcctgtaccacaaattaatggttaaaatgcatccctcatacgacaatgtaacttcttcctctcactgttgatggcctatcttcc

SEQ ID NO: 140259 - DNA, 201 bp, Homo sapiens
gccattgcactccagcctgggcaacaagagtgaaactgtgtctcaaaaaaaaaaaaaaaaaaaaagggggctgggaagggtggctcatgcctgtaatcccwgcaatttgggaggccgaggcgggcgaatcacgaggtcaggagatcgagaccatcctggctaacatggtgaaaccctgcctctactaaaaatacaaaaaaa

SEQ ID NO: 140260 - DNA, 201 bp, Homo sapiens
tcatggccgtgggggatcattcctttagagactgttagttagctttagtgtcagtcagaacactgcaagatactgtcctacgggctagagagcccctttcmcccatcatctcaggtgaagctattgccgggaactcacatctcctggtgagtttccattctttctaggaggaggggtgctgcccagtgcctggagagaggg

SEQ ID NO: 140261 - DNA, 201 bp, Homo sapiens
tctgccacaagctgatcccatttttagtgactgctatcaccagaactagacataggggtatttgagagatgccctgcaggtactgaccacagtggctacaygggttgtggagagggactgggcacacttttattaatatgtctgaggattcctttagattttaccaactttttccttacgctgggtgaacacagtgtctga

SEQ ID NO: 140262 - DNA, 201 bp, Homo sapiens
gctttatgaatctgggtgcccctgtgttaggtgcatattatttaggatagttaagtcttcttgttgaattgagccctttaccattatgtaatgtccttttygtcttttttgaactttattggtttaaagtctattttgtctgaaattaggattgcagcccctgcttttttctgctttctatatgtttggcttccatccctt

SEQ ID NO: 140263 - DNA, 201 bp, Homo sapiens
ggatctggtttccaggctctggttttcctcctagtgacttagacagacatgagcatttaaggtggtatctgccacaagctgatcccatttttagtgactgmtatcaccagaactagacataggggtatttgagagatgccctgcaggtactgaccacagtggctacacgggttgtggagagggactgggcacacttttatt

SEQ ID NO: 140264 - DNA, 201 bp, Homo sapiens
atcctacagtggttcagaacactataacatattcctatgatgcaggtgtaattttattttctacacttttattttagattcaggggtagttgtgcaggttkgttatataagtaaactcctgtcatgggggtttgctgtatagattgtttgtctcccaggtactaaacctggtatccaatacttatcttttctgctcctccc

SEQ ID NO: 140265 - DNA, 201 bp, Homo sapiens
ccaactgtgagctgtcattttggagtttttcactctcaaaatcttggacattcatcaaaatggatctggtttccaggctctggttttcctcctagtgactkagacagacatgagcatttaaggtggtatctgccacaagctgatcccatttttagtgactgctatcaccagaactagacataggggtatttgagagatgcc

SEQ ID NO: 140266 - DNA, 201 bp, Homo sapiens
ctatagttatccctccctcctgccctcgctccctccctcactctcacctatctatcatctatctatctatcatctatgtatctattttctatctatctathatctatctacctatatctttaactgagagatttctcgtagcttttcttttagagcaaaggtaagttagagtagaaacacctgtctctgttatgtcaagtc

SEQ ID NO: 140267 - DNA, 201 bp, Homo sapiens
cagatggtttactggaaaaacataacaaatattcacagattattcagtctcttccagaaaagataataggaaggaacacttcccaattcattttatgaaaycagtgttatcctgatacaaaaaccagacaaagattgttcaaaaaaataccacagaccaatattccttatcaataaatgcaaaaactcttaacaaaatatt

SEQ ID NO: 140268 - DNA, 201 bp, Homo sapiens
gaattgtcttcctgcttgctgtgttactgctagagcttcctgtgtgggctccatatggtccctattcttcccaccactcatgaaaacaccaaagagcaggytcagagtgaccacagccaagccccagctctgccagcaggcccccatcttctcctgctctgatgtggggattgtgcggttggcttgtttcctggcttctct

SEQ ID NO: 140269 - DNA, 201 bp, Homo sapiens
tgctctcctcccccaagttacgagcatctatagttatccctccctcctgccctcgctccctccctcactctcacctatctatcatctatctatctatcatctatgtatctattttctatctatctatcatctatctacctatatctttaactgagagatttctcgtagcttttcttttagagcaaaggtaagttagagtag

SEQ ID NO: 140270 - DNA, 201 bp, Homo sapiens
cttgctctcctcccccaagttacgagcatctatagttatccctccctcctgccctcgctccctccctcactctcacctatctatcatctatctatctatcatctatgtatctattttctatctatctatcatctatctacctatatctttaactgagagatttctcgtagcttttcttttagagcaaaggtaagttagagt

SEQ ID NO: 140271 - DNA, 201 bp, Homo sapiens
ggcccttgctctcctcccccaagttacgagcatctatagttatccctccctcctgccctcgctccctccctcactctcacctatctatcatctatctatctatcatctatgtatctattttctatctatctatcatctatctacctatatctttaactgagagatttctcgtagcttttcttttagagcaaaggtaagtta

SEQ ID NO: 140272 - DNA, 201 bp, Homo sapiens
gcctgtaccacaaattaatggttaaaatgcatccctcatacgacaatgtaacttcttcctctcactgttgatggcctatcttcctgaaaacattaatctgsgggtgagaacttgggagatacacacagttgggttcaccataaatgaggagcctcactgacagtggaagatgcacaggaaaagaaagaagactatgggctg

SEQ ID NO: 140273 - DNA, 201 bp, Homo sapiens
tctgcctcccgggttcacaccattctcctgcctcagccccccgagtagctgggactacaggtgcccaccaccacgcctggccaattttttgtatatttagyaaagacggggtttcaccatgttagccaggatggtctcaatctcctgacctcgtgatccacccgcctcggcctcccaaagtgctgggattacatgcgtaag

SEQ ID NO: 140274 - DNA, 201 bp, Homo sapiens
taacccgaagttagaattaggaggcactgcagaggaaccatggggtgttgcataaggagggagttgagatgggcttataggacttggggttttgcttggtrattctaaagaggatttgaggaagagagggtcagtctggattggatattgtctggaagtgggtgcaattaatgactagttaccttaatcatttttatctag

SEQ ID NO: 140275 - DNA, 201 bp, Homo sapiens
agaatgctccatgaatttcacttttaaatgctggatggcttgcccatcaattgtgaaatgctttgccaagtatactgaggtcttgtgaaaactcagataayatccaccaaagaacacgtcaaaacctcttgttcacttagaccaaaaggttaagtatttaagtttttgatttacagctgtttattgagcatctactgtgtc

SEQ ID NO: 140276 - DNA, 201 bp, Homo sapiens
caaaaacccaaagccaaaaggcaagcttccaaaattgacttatctacaaatctatacatcgagctactgtgagcttggctagtagcacttagctgcacaaracacaagccttttgttcagctgttgaagcctctctgtgtccgtcctggatttggaggctctgaattaatttgatcccataagactggcccttactatgtc

SEQ ID NO: 140277 - DNA, 201 bp, Homo sapiens
atgttttgggcattattcaggaagtatgtacagcacttagttttacttatacttcatggtccccactgtcaattatatttggggttcctgtggggcttgayaacaggttggcaaaatatacatatttaacaggctgggcatggtggctcatgcctgtaatcccagcattttgggaggctgaggtgggtggatcacctgagg

SEQ ID NO: 140278 - DNA, 201 bp, Homo sapiens
gatgaggccaggttcacattacactgctgatggtcacagcccagtgtccagtttaagtctgtaataaaaagaatccggtggccaggcacggtggctcctgyctgtaatcctggcactttgggaggccaaggtgggtggatcatgaggtcaagagatcaagaccatcctggccaacatgttgaaaccctgtctctactaaaa

SEQ ID NO: 140279 - DNA, 201 bp, Homo sapiens
tccccccatctgctccatctcctcgtgctgagactgggtttgtgttttagtgagactgagtcctgggtcatctcattggaaggctaagaaaatatgacaacgactccaaggtgtaagggaggcaaggctgagaggtatcctgccaggcataatcgccttcttctgcacgtgtgacttggagactccagagacacagaacga

SEQ ID NO: 140280 - DNA, 201 bp, Homo sapiens
tttaccttctaaaggtagtacttatctttacatttgagtttttccaggataaattctttataaagaaggcagagatcacatttacaaaattcagagctcasgccagatcctctctgaagtcatttgtttaagctccaacctatagactcactcagttgcatttgcttttagaataaataattatatgagaggccttcaaaa

SEQ ID NO: 140281 - DNA, 201 bp, Homo sapiens
gtccccccatctgctccatctcctcgtgctgagactgggtttgtgttttagtgagactgagtcctgggtcatctcattggaaggctaagaaaatatgacaacgactccaaggtgtaagggaggcaaggctgagaggtatcctgccaggcataatcgccttcttctgcacgtgtgacttggagactccagagacacagaacg

SEQ ID NO: 140282 - DNA, 201 bp, Homo sapiens
cagttgtcactcatgttaggcaggaaaggattgtttagttgtttttgttattgagtctccttggcactgacttgtttctgacagggacagtgtcacctctygtagcaacacctctgctatgtggagtcattctgtggccttgcctctttatattccgggaatacctctgatgttccttgggaaccttctggcctagctgcc

SEQ ID NO: 140283 - DNA, 201 bp, Homo sapiens
agtccccccatctgctccatctcctcgtgctgagactgggtttgtgttttagtgagactgagtcctgggtcatctcattggaaggctaagaaaatatgacaacgactccaaggtgtaagggaggcaaggctgagaggtatcctgccaggcataatcgccttcttctgcacgtgtgacttggagactccagagacacagaac

SEQ ID NO: 140284 - DNA, 201 bp, Homo sapiens
agttgctcacagtctagctgggaagtcagacactaagcccgtgaatgaaaatgtgttgggagcttcagagaagcagctctgagtgctcatggcgtcaagcrctggaagaccagaccatgaggtcagaacatggaggcaagaacattcgggtttacaaagcttctacgtacatcacaacaatgctgtactccaattctaggt

SEQ ID NO: 140285 - DNA, 201 bp, Homo sapiens
cgctgggctgctccaaagcaacagacacccacagcaagttaaaggtcatgagtcaaagaccatcactcgtgcacctgtaataacccgaagttagaattagsaggcactgcagaggaaccatggggtgttgcataaggagggagttgagatgggcttataggacttggggttttgcttggtgattctaaagaggatttgagg

SEQ ID NO: 140286 - DNA, 201 bp, Homo sapiens
accacatccagctaatttttgtatttttttgtaaagacagggtctcactgtgttgcccagactggtcttgaactcctgggctcaagcgacctacacgcctyggcctcccacagtgctgggattacaggcacgaggccctggccctgactggcatagaattctcgtagtagcactctcttatactgcttgggatggcagtga

SEQ ID NO: 140287 - DNA, 201 bp, Homo sapiens
acaaaatattggcaaatagaattcaacaatacataaaataaattatacaccatggctgagtggggtttattctggtgatggaagactgatccagtattcakaatcagtcagtgtaatccaccatatcaacaggctaaagaagaaaaatcacacaatcgtatctattgatggagaaaaaacatttgaacaaattcaacactc

SEQ ID NO: 140288 - DNA, 201 bp, Homo sapiens
atcagcgctgggctgctccaaagcaacagacacccacagcaagttaaaggtcatgagtcaaagaccatcactcgtgcacctgtaataacccgaagttagawttaggaggcactgcagaggaaccatggggtgttgcataaggagggagttgagatgggcttataggacttggggttttgcttggtgattctaaagaggatt

SEQ ID NO: 140289 - DNA, 201 bp, Homo sapiens
tcacctccacttggtgtgcaggaagccaggaggtgctagtcctgggaggggagcgcagaggtttcttccacagggttctctttggtgctttatcccagcayagatgaggccaggttcacattacactgctgatggtcacagcccagtgtccagtttaagtctgtaataaaaagaatccggtggccaggcacggtggctcct

SEQ ID NO: 140290 - DNA, 201 bp, Homo sapiens
attaaaatatgtattgtgttatcatgacttgtacttgcacagagagagtctcactggaacaaagaagtagaggggtgacgtgaaatatctctttatgcctyttgcagacatgagtgttttattgtaataagctttgcaaatatgttaggagctggaaattatgtacgacataggaagcttggtagagccccttcctgcatc

SEQ ID NO: 140291 - DNA, 201 bp, Homo sapiens
tgctgggcgagttgtgcagccgctccagctgcagtaggttgttaatcttaggtggttttgctctcagagttctccctctgagccatggaggtgatggtgcyatctgccccaaagggctgttgagtgtgcagagtgagacactgcacgctcagctcagtgatctgagttgtgagtatcgtggcttgggaacatggcttatga

SEQ ID NO: 140292 - DNA, 201 bp, Homo sapiens
cgtcaagcgctggaagaccagaccatgaggtcagaacatggaggcaagaacattcgggtttacaaagcttctacgtacatcacaacaatgctgtactccarttctaggtttctggaggagagactcacattgggccagtttgaatcactaatctatgaatctatccttgaccccatcaaataagtgtgcgtgtgtgtgtgt

SEQ ID NO: 140293 - DNA, 201 bp, Homo sapiens
caaatacaaacaaatacaaatgcataaaatgctcaaatggtgtcactagtggccaagtctaaatagagcagagtcccagtgacatcccaaaagaggcagayggtggtcaaatgcactccgactaactcaccaagttccaaagtttcaaagttccaaaattccaaagtttgtcacttctctaaaagtcactttcagtgcacc

SEQ ID NO: 140294 - DNA, 201 bp, Homo sapiens
aacaaattccaggagctggaggccacagtcctttacttttggagtcctcagttatggcaatgggtctgatttgatgagtccccccatctgctccatctccycgtgctgagactgggtttgtgttttagtgagactgagtcctgggtcatctcattggaaggctaagaaaatatgacaacgactccaaggtgtaagggaggc

SEQ ID NO: 140295 - DNA, 201 bp, Homo sapiens
aaagctgaggaccctggctaggaacgggcaggactagaggaccaggaagcaggaagcacggcagtggtctcgcaacatggccggtctggcctggacaccamccccagtgctgcgcctctcactcaggtttcaaatcctagggaggcgtatctcattttcaagctaaggtacatgcctgaccttggcctacaagaggcccag

SEQ ID NO: 140296 - DNA, 201 bp, Homo sapiens
atattaaaaatcagccgttgttggtgaccacacaatcagaacaaaggaacacattttccaggttaataaaactgtggaaacaatattcccagggcctgagwgtcccggccccagccccaggagtggatcaacgtaaggcgttttcacccgccctgatgcagaatgagcgcctctgttcaggtggtgagtgagtgccactgt

SEQ ID NO: 140297 - DNA, 201 bp, Homo sapiens
ataatcggtaacagggtgtatgagagcccatattaaaaatcagccgttgttggtgaccacacaatcagaacaaaggaacacattttccaggttaataaaaytgtggaaacaatattcccagggcctgagagtcccggccccagccccaggagtggatcaacgtaaggcgttttcacccgccctgatgcagaatgagcgcct

SEQ ID NO: 140298 - DNA, 201 bp, Homo sapiens
aagattcccaggcacagacagagcctctgttttctgccctcagtcatgaaagcagggcccagtctggacataggtgggcaccagagcttgtcaacatgacrgaaggaagagatgaaccatagcatctttccggatctctatgtattagcctgaaacccctttggatcacatctccctactaaaaaggacatttgagcaaag

SEQ ID NO: 140299 - DNA, 201 bp, Homo sapiens
taatacttgttttggggaccaggggtcctgagagcctagtttggggagccaaaaccatcatcagaaaccatgaagggcctctgtcccagtgagggcactcrgggggaggagtgtcctgcagagccagttgcatcaactcaggccctctccttaaggagctcattttccaaaaatgcactcaatctctttggcttatgagaa

SEQ ID NO: 140300 - DNA, 201 bp, Homo sapiens
tgagcagttctaaaggtgatgggagatgctttgactcagggacccaattcaaagattcccaggcacagacagagcctctgttttctgccctcagtcatgamagcagggcccagtctggacataggtgggcaccagagcttgtcaacatgacagaaggaagagatgaaccatagcatctttccggatctctatgtattagcc

SEQ ID NO: 140301 - DNA, 201 bp, Homo sapiens
ttttcagatggggaaagtgaggcgtagagagagtgagtaacttgcgcaaggtcaagctagtgactggtgtcaggagtcatgctccagcagtctgtgctttwattactctaccacactaaatttccaacacaactgctcttgagtacaagcaaaatatctccatgaacattctgagcagttctaaaggtgatgggagatgct

SEQ ID NO: 140302 - DNA, 201 bp, Homo sapiens
aataacagctaagagttagataattcttcgtaagtggtaggaatgtaaagtacctgtcctatgaaatttacatctattaatgcatttaaatgtcacagtgkccctatgagatatgtcctacaattattcccattttcagatggggaaagtgaggcgtagagagagtgagtaacttgcgcaaggtcaagctagtgactggtg

SEQ ID NO: 140303 - DNA, 201 bp, Homo sapiens
gttgtagaataacagctaagagttagataattcttcgtaagtggtaggaatgtaaagtacctgtcctatgaaatttacatctattaatgcatttaaatgtyacagtggccctatgagatatgtcctacaattattcccattttcagatggggaaagtgaggcgtagagagagtgagtaacttgcgcaaggtcaagctagtg

SEQ ID NO: 140304 - DNA, 201 bp, Homo sapiens
cggtggctcacgcctgtaatcccagaactttgggaggctgaggcgggcggatcacttgaggccttgaggctaggtggtcgagaccagtctgggaaacatgrtgaaaccccgtctctactaaaaatacaaaaattagccagggtgatggtgcacgcctgtaattccagctactcaggaggctgaggcaagagaattgcttga

SEQ ID NO: 140305 - DNA, 201 bp, Homo sapiens
ctctccccctcttgcctcatctctcctgtccccagccacagaaagttttctgctaacgctcattggattagattgaactaatctaacctggaaggtccacrgtgatctccctatttgaaatctgaacccctgagtacacctgaaaagtctttgttgccatgtaatgctgggtattcacagatcctggggactggcatatct

SEQ ID NO: 140306 - DNA, 201 bp, Homo sapiens
catggctcagctagaactgttggcaacatggccactcgtttcctctggatggatttgcagcagcttaaaattcaaagaaccgcgcttccttcagtgattcraggagatctgaagcccaggcccctggcaaagtgttctctccagagacaacaataacacatggcatttatccctctcttccacagacctcagaggatgagc

SEQ ID NO: 140307 - DNA, 201 bp, Homo sapiens
ggggttccggtcgccatcactaagggtctctcgtgaccttgcacacagggggctataaaaaggacctggggcttcccttggtggcttgagctgcctgtgayagcagagtgggtgggtgtgggggacgttggtctctcaagacacacccactttatcttctggtcttcgcatcagacaggtgagatggatacaaaacccaga

SEQ ID NO: 140308 - DNA, 201 bp, Homo sapiens
ctcaccgccccgccttctcattccacccccgcccccagccggcactttgcgaggggttacagtttcagcagagatttcttagtgcctgacaagctgttagrctggtccagaaacaaaaccacaagcctcctgtgctcttacctcgtaggatggtgaagtcggtgaaggaaggcacggctggggagggtctgcattcactat

SEQ ID NO: 140309 - DNA, 201 bp, Homo sapiens
gaaggggcgagggtggaagtggggagacctttgcatatgaatgctctaaaacccaaagcctctagatagaattattttgagggtctccctccatcgctcargctgcagtgcagtggcgtgatcacagctcactgcaacctccacctccccaggcttagatgatcctttcatctcagcctccaaagtagctgggactacagg

SEQ ID NO: 140310 - DNA, 201 bp, Homo sapiens
gagactgttagttagctttagtgtcagtcagaacactgcaagatactgtcctacgggctagagagcccctttcacccatcatctcaggtgaagctattgcygggaactcacatctcctggtgagtttccattctttctaggaggaggggtgctgcccagtgcctggagagagggtgcagggggtcggctgaggggtggggt

SEQ ID NO: 140311 - DNA, 201 bp, Homo sapiens
acaagatgtaattatcatttgatcaccacagactgtatttatttaggggtggtgacccagtagcaggacccaggttaacggtgcattatccttgctttttycctgtgggtggatgcttcagctctgtttttacctcatttggcaataacagccacgctctgcatttaatcgccttccagaatgtgagggcaggcggtgccc

SEQ ID NO: 140312 - DNA, 201 bp, Homo sapiens
aagttgaaaagacaatgctatcttgtgtttaccaggctgaattaaaatgaactctcttattattagtggtaaaagtataaattgatgcactctttctggargacaatttttcaatatgtatcaaaagatttttacccaattatttaattattgggaatttatcttgggaaaatgatcagagaattgtgtatttatgcagta

SEQ ID NO: 140313 - DNA, 201 bp, Homo sapiens
atgcgagcgcacggcgcaggactggcaggcagctccacctgcagccccggtgcgggatccactaggtgaagccagctgggctcctgagtctggtggggacrtggagagtctttatatctagctcagggattgtaaatacaccaatcagcaccctgtgtttagctcaaggtttgtgagtgcaccaatcgacactctgtatct

SEQ ID NO: 140314 - DNA, 201 bp, Homo sapiens
gaatcattttgcaccggttggatgtaccaagggccacagaaggaccagaaggagcaccaacatttaaggaatcagaggaagaggtgctgccgggaagagargcaagtgagaaggagcatccacagagtcagagagaaaggcagaatcagggcttcctgctgctgggcgagttgtgcagccgctccagctgcagtaggttgt

SEQ ID NO: 140315 - DNA, 201 bp, Homo sapiens
aggactggcaggcagctccacctgcagccccggtgcgggatccactaggtgaagccagctgggctcctgagtctggtggggacgtggagagtctttatatstagctcagggattgtaaatacaccaatcagcaccctgtgtttagctcaaggtttgtgagtgcaccaatcgacactctgtatctagctgctctggtggggc

SEQ ID NO: 140316 - DNA, 201 bp, Homo sapiens
gggccagtttgaatcactaatctatgaatctatccttgaccccatcaaataagtgtgcgtgtgtgtgtgtcgtgggagacggggtaactcaatacaaatgwagcagctaagagtccccattttggataagggggtgaggaagaatcattttgcaccggttggatgtaccaagggccacagaaggaccagaaggagcaccaa

SEQ ID NO: 140317 - DNA, 201 bp, Homo sapiens
gtgaacccaggaggcagagcttgtagtgagccaagatcgcgccactgcactctagcctgggtgacagagcgagactccgtctcaaaaaaaaaaaaaaaaaattagccaagagtggtggcatgtgactgtggtcccagctactcggctgagacatgagaattgcttgaacctggaggtggaagttatagtgagttgagattg

SEQ ID NO: 140318 - DNA, 201 bp, Homo sapiens
gattagaaacataaaatataaactttatttctcaacataagctccatcaagttcagatgcttttgtaaggcttcataccaaccctttaatccatctgtaaygaactgagatactgggaatttaatcttaaggcagtctttttaatgttatttgctgaagaaaaatgggtgccctgccaagaccagcttggtgggggagacc

SEQ ID NO: 140319 - DNA, 201 bp, Homo sapiens; identical to SEQ ID NO: 25348

SEQ ID NO: 140320 - DNA, 201 bp, Homo sapiens
tccaagaatggcctttgccatggctcagctagaactgttggcaacatggccactcgtttcctctggatggatttgcagcagcttaaaattcaaagaaccgygcttccttcagtgattcgaggagatctgaagcccaggcccctggcaaagtgttctctccagagacaacaataacacatggcatttatccctctcttccac

SEQ ID NO: 140321 - DNA, 201 bp, Homo sapiens
gtgatctgagttgtgagtatcgtggcttgggaacatggcttatgatgaagaggggctacggttttagcatctgggagtgcttttcttgtcaggctacagasacatgcgtttggaaaacaggaaggaagaagtccaagaatggcctttgccatggctcagctagaactgttggcaacatggccactcgtttcctctggatgg

SEQ ID NO: 140322 - DNA, 201 bp, Homo sapiens
ggctgttgagtgtgcagagtgagacactgcacgctcagctcagtgatctgagttgtgagtatcgtggcttgggaacatggcttatgatgaagaggggctayggttttagcatctgggagtgcttttcttgtcaggctacagacacatgcgtttggaaaacaggaaggaagaagtccaagaatggcctttgccatggctcag

SEQ ID NO: 140323 - DNA, 201 bp, Homo sapiens
tgccaccaagttgctcacagtctagctgggaagtcagacactaagcccgtgaatgaaaatgtgttgggagcttcagagaagcagctctgagtgctcatggygtcaagcgctggaagaccagaccatgaggtcagaacatggaggcaagaacattcgggtttacaaagcttctacgtacatcacaacaatgctgtactccaa

SEQ ID NO: 140324 - DNA, 201 bp, Homo sapiens
ttttttcctttttaaggtctcaaacatttgggcattaataagtttagtattctctactgcagagaatgttatttgtgattcaatgaatgaaaatgaaaacytgagacaagaagaatggattttaccttaaatgtctgtagcaaccattgggaaaatggaaagaaacatcttaattatcgtatagatgtgtaggtacccttc

SEQ ID NO: 140325 - DNA, 201 bp, Homo sapiens
tttttttttttttgagacggagtctcgctctgtcgcccaggccggactgcggactgcagtggcgcaatctcggctcactgcaagctccgcttcccgggttsacgccattctcctgcctcagcctcccgagtagctgggactacaggcgcccgccaccgcgcccggctaattttttgtatttttagtagagacggggtttca

SEQ ID NO: 140326 - DNA, 201 bp, Homo sapiens
acaaatactaaatcaacagacattctatgctgactgtgtacttttttctttagaattctccaagtcccggctgcttatgtacctatcgagccagattcacsaccgtcattatcaactcattttatgaaaaaatgtaatctaaagtatatccttgttgaaaaaaaacaaattaatgtaagtctggatgtttcaattgttttt

SEQ ID NO: 140327 - DNA, 201 bp, Homo sapiens
ccagcttccagtttactacacctacaagactgtggttaatgctgcttctgaattatcaaattttctgctgttacactgtgactttcaaggaattcgggaarttggtctctactgccaacctgggatagacttaccctcttggattttagggtaatattttttagaactgtaaatttgatgttactccaagctaatgtaaat

SEQ ID NO: 140328 - DNA, 201 bp, Homo sapiens
gaaaaaatgtaatctaaagtatatccttgttgaaaaaaaacaaattaatgtaagtctggatgtttcaattgttttttgcctgtattacatttatttcaatygaaacattccttccttctcccatctggattcctaagtctgctaaatgtggcaaggtttctcagtctttgcactatgacatttttagggttgagtaattgt

SEQ ID NO: 140329 - DNA, 201 bp, Homo sapiens
ctccccaaatattaccagaataacctattaataagatagtgctagctgggcatggtggcacaagtctgtagtcttagctactccagtggccaaagcaggargattgctgagcctaggagtttgaggctgcagtgaactgtgattgaacttgggcagctgcaagaccctgcactccagcttgggtgacagagcgagactctg

SEQ ID NO: 140330 - DNA, 201 bp, Homo sapiens
ccaaatattaccagaataacctattaataagatagtgctagctgggcatggtggcacaagtctgtagtcttagctactccagtggccaaagcaggaggatwgctgagcctaggagtttgaggctgcagtgaactgtgattgaacttgggcagctgcaagaccctgcactccagcttgggtgacagagcgagactctgtctt

SEQ ID NO: 140331 - DNA, 201 bp, Homo sapiens
gatggtctcgatctcctgacctcgtgatccgcccgcctcggcctcccaaagtgctgggattacaggcgtgagccaccgtgcccggcaaagttaattttaayaatatattttatttaatttagtatactccaaaacattacttcaatatgtaatcaatataaaaattactagtaagatattttgcattttttatgctaatca

SEQ ID NO: 140332 - DNA, 201 bp, Homo sapiens
tgcctcccaggttcaagctattcttctgcctcagcctcccactataggtgcacgccactatgcctggctaatttttgtagttttagtagagacagggtttsaccatcttggccaggctggtctcaaactcctgacctcaagtatctgcccaccttggcctcccaaagtgctgggattacaagcgtgagccaccgcgcccag

SEQ ID NO: 140333 - DNA, 201 bp, Homo sapiens
taaagtgctccggaaaccatttttatgctgctacaaaaaataaataaagtgcatagagaaatagaaatgcttaaacaaatactaaatcaacagacattctrtgctgactgtgtacttttttctttagaattctccaagtcccggctgcttatgtacctatcgagccagattcaccaccgtcattatcaactcattttatga

SEQ ID NO: 140334 - DNA, 201 bp, Homo sapiens
atgttttgtttctggcttcacctctgaccttcgatccttctgttgtggaaatatttcttgctctatcaagtggtgcctctctgcttattgtaccaacttcygtcaagttgctcccatcaaaattagccagcgttctcttttcccatcatagagtgactgttttgcaggtacattttagtagcaatgaacgttttgtttatc

SEQ ID NO: 140335 - DNA, 201 bp, Homo sapiens
ggagtgcaacggcgtgatctcggctcaccgcaacctccgcctcccgggttcaagcaattctcctgcttcaacctcccaagtagctgggattgcagacgccyggctgattttgtatttttagtagagacagggtttctccatgttggtcaggctggtctccaactcccgacctcaggtgattcgctcgcctgaacctcccaa

SEQ ID NO: 140336 - DNA, 201 bp, Homo sapiens
cttaaagtatacctgaaactacttaaaatgcttaactttaaaaaaaatcttgtatttctctatattaagtgataagaatttaacatagtaaatactcaggwttttcattaagaaaagataaaatgacagtgtttatgtatttatttatttttgagatgaagtttcactcttattgcccaggctggagtgcaacggcgtgat

SEQ ID NO: 140337 - DNA, 201 bp, Homo sapiens
gctggtctccaactcccgacctcaggtgattcgctcgcctgaacctcccaaagtgctgggattacaggcgtgagccaccgtgcccggctaaaatgacagcrtttattaccaactatgtgtcagtgaaaacattggaaatttctgatcagcaataaagtgctccggaaaccatttttatgctgctacaaaaaataaataaag

SEQ ID NO: 140338 - DNA, 201 bp, Homo sapiens
ctcaattattgacgaaatttattgagaatttactatgtgcaaagatctagtgtccttaaagtatacctgaaactacttaaaatgcttaactttaaaaaaaatcttgtatttctctatattaagtgataagaatttaacatagtaaatactcaggtttttcattaagaaaagataaaatgacagtgtttatgtatttattta

SEQ ID NO: 140339 - DNA, 201 bp, Homo sapiens
atgtgcaaagatctagtgtccttaaagtatacctgaaactacttaaaatgcttaactttaaaaaaaatcttgtatttctctatattaagtgataagaattkaacatagtaaatactcaggtttttcattaagaaaagataaaatgacagtgtttatgtatttatttatttttgagatgaagtttcactcttattgcccagg

SEQ ID NO: 140340 - DNA, 201 bp, Homo sapiens
aacccccagtgtgatggtattcacaggtgaggccttcgagaggtgaatgggattagtgtgctataagaagaggcaaagaaagatgatctctctttccaccrtgtgaggctacagcaagaaggcagccatctacaagccaagaagtgggcctccccagaaccctaccatgctcgcaccctgatcttggacttcccattcaat

SEQ ID NO: 140341 - DNA, 201 bp, Homo sapiens
gagttccacagagcactccagcatatcatttatacaattactcatatatcctttatccccatattttaacatcttcatttatttggaaacactcaactacmtgccaattcaaaagtcaaccacatccccatatgtaactaatttttatctttttttttttttaaacaggtgaaggtgccgagctataaacctccagaatat

SEQ ID NO: 140342 - DNA, 201 bp, Homo sapiens
aggaggagagattgatgagcggaagccaacagagatatccccttggcagtggaaaggaaagctgcaggtcgtttttgtgacccaacacactttcattggtrgtgctgatccagctaatgtcttttagcattttccttttcattggctgtttggtttgtctcctgacatttcctggatcggtgtgcacggtaggcatagggt

SEQ ID NO: 140343 - DNA, 201 bp, Homo sapiens
atcttagacaggtagagaaattatctcattttaaagtcctaagtattcccatactcagttttagacatttcttgcttttcttactgagataaagtatgttwttttgaaaatccagtcttcagaaatctcattcactttgtcattggttcattcattcttgtagtcattcattcattcaggtacccaccaagccctgtggga

SEQ ID NO: 140344 - DNA, 201 bp, Homo sapiens
cagtagtaacttttattattaacaattattaatgagacaaatagcatgagagtgataggaaaagcgctgttagatgttggacagaagataactgggaagayttcatatagaatttgacttactagatttttttcacttgaggtttaaaaaaaatcttagtggagaaattgggaaattccctttcctttgcatttcattttc

SEQ ID NO: 140345 - DNA, 201 bp, Homo sapiens
accccgtttctactaaaaatacaaaaattagccaggtatggtggcatgtgcttgtaatctcagctactcaggaggctgaggcaggagaatcgcttgaaccygggagatggaggttgcagtgagccgagatcacatcactacatcccagcctgggcgacagacagagtgagactctgtctcaataaataaataaatatgcct

SEQ ID NO: 140346 - DNA, 201 bp, Homo sapiens
ccagcatttgcattggccttggagtgccagggtaattattctgtcaattatttgactttttaaagtctgtctaccttgaagaacctctgcaaaggaggacygtgttaatgtgtaacacagagataagcaaggctctgctcttttttttttcccatggctgttcaactggaaaactgaaatggttctatttgcgtctcagcc

SEQ ID NO: 140347 - DNA, 201 bp, Homo sapiens
aatatgttctgtcaattatttgaccttttaaaatatgcctgcttttggtcagctgtggtggctcacgactgtaaccctagcactttgggatgctgaggcakgcagatcacttgaagtcaggagtttgagaccagcctggccaacatggtcaaaccccgtttctactaaaaatacaaaaattagccaggtatggtggcatgt

SEQ ID NO: 140348 - DNA, 201 bp, Homo sapiens
tgttgaaaggtgggggataaatggcttttactaatgaagtacagtgggatgtgaattttagcaatgcaaaatgccacgtatcacctgcaatttgtttttttaaaacacacacacacacaccaaaaaagggaaatcacaagacaatataaacctcgcttgaagaaacgatcgtgtttaacaagacagcaaagagaaatactc

SEQ ID NO: 140349 - DNA, 201 bp, Homo sapiens
gtgttgaaaggtgggggataaatggcttttactaatgaagtacagtgggatgtgaattttagcaatgcaaaatgccacgtatcacctgcaatttgtttttttaaaacacacacacacacaccaaaaaagggaaatcacaagacaatataaacctcgcttgaagaaacgatcgtgtttaacaagacagcaaagagaaatact

SEQ ID NO: 140350 - DNA, 201 bp, Homo sapiens
ccagcagtgttgaaaggtgggggataaatggcttttactaatgaagtacagtgggatgtgaattttagcaatgcaaaatgccacgtatcacctgcaatttgtttttttaaaacacacacacacacaccaaaaaagggaaatcacaagacaatataaacctcgcttgaagaaacgatcgtgtttaacaagacagcaaagaga

SEQ ID NO: 140351 - DNA, 201 bp, Homo sapiens
ccatactagaaagaaattttatataagagaagagtgagagagagaaagggaataacatccctacctgcaatgaaagcacgtctgcaaacaggtgaaaacthcaactgactatctgaataacatgagctaaaagacattttttaaataatacaaataaagagtaacaagccaaaattagaataactcgaaaatgtggtgaag

SEQ ID NO: 140352 - DNA, 201 bp, Homo sapiens
agaatgactcatttatcacttaaatgtgtgagtgttttctatgtgtcaggtgccatcctggtgctgtggggcacagaacacagactccagtttccaggggkttaccgttaaatggggctgaagcagcaacagtgtgtccgtctcctgtattcaatctcctcataatagctgagccactagatcaggagcagtggctcacgc

SEQ ID NO: 140353 - DNA, 201 bp, Homo sapiens
aatagtggttaggaggtgtctagctttttgatcccagctctatcatttatgagccttgtagcactgggcaagttactcgacctttctgtgtctcagtttcstcctctgtaaaataggagacagtacgaacctcacagggctgtcgtgagggttaaattatttacacatatgaatgcccatagtgagcagtcagtgaacagg

SEQ ID NO: 140354 - DNA, 201 bp, Homo sapiens
agcttgccccagtcttcctcctttctaagatcaccacttacccaactgggaagagatcttggtctgcttgttttccatacctctctggtaggaggcaaagygatctgcttgaaaatatgtctgaaagataatcagcaaataatttcaaatcttggaactgtcattatgaatttactgccattagattgtattgaggtccct

SEQ ID NO: 140355 - DNA, 201 bp, Homo sapiens
agtagtttacttgtgcagtggctaattaatttgttgaggcagaattttaggttacctatgaggtaatatggaatagtggttaggaggtgtctagctttttratcccagctctatcatttatgagccttgtagcactgggcaagttactcgacctttctgtgtctcagtttcgtcctctgtaaaataggagacagtacgaac

SEQ ID NO: 140356 - DNA, 201 bp, Homo sapiens
tggcttttctttatatttggggaaatgttagagaaaacaacatctaaaactggaaaccttgacttaaattagccatttcttctcatcctaaattgagagasatgagttctaaatggcagagaccatttataggagaatgccaaagagagcagaagagaatgggaagcctttcccacagcagaaactttccacagcagagac

SEQ ID NO: 140357 - DNA, 201 bp, Homo sapiens
tgatcttagccaaggtagaaaagggagaggaggcagttctgaggttacagaagctgttgcttctttaacacagttcagactttctccagaatttccaaatwctttctttagagcttttcccagaagtccacaaactaataggttgtatgtcatcaatttcagagttcactattgaaagccttaaattgtgtaactcactag

SEQ ID NO: 140358 - DNA, 201 bp, Homo sapiens
gggggtggatttgataaagggatggaagacccatgccaccagaagggtggatgggaccttaaccagatactctagtgatactcagggacaaagagtgtatrgagtctgagcacaaactcacagctatggtccatgctggggctggagatgggggtagggagcaaaggaacacctggccagacaaccctgagagtcctctgg

SEQ ID NO: 140359 - DNA, 201 bp, Homo sapiens
tgttttatagcgacggagtttcactatgttgcctaggctggtctcgaactcctgagctcaagtaatcccggcctgctgggattacaggcataaaccaccgygcacagccctgatttcttagtattgaagaaaatagtccactttctaaaaattataggttctcaaacagtaatctaactagctaattatttgtgggcaaaa

SEQ ID NO: 140360 - DNA, 201 bp, Homo sapiens
atattgagtattatctttggcttttagagtcttattggcggaaataataaagttattgctgtaattcatgtgtctcttctttggcttatacatgtagcctyagcttagcaggaactcattttttaaaaatcatttaaaaatcaaaacattcaactataaacagatgtatttcgactcagaaagtgcccacttaggttgatt

SEQ ID NO: 140361 - DNA, 201 bp, Homo sapiens
ttataagacagggattataaccattatctatctcatagggttgtcatgaagattaaatgtcatgaatattatccatagaaagcgtggatgaacattaattsttgtcattattcaacatcaaagtaagctccaggtgggaagggagattttgctccctcatatagacagacccaaggacctagataagtgcatggtatgtag

SEQ ID NO: 140362 - DNA, 201 bp, Homo sapiens
gtgtaactcactagtaactatttatagtatcatcaccttaaacttagaaaattgcaacccaaaataatctgcatatgtttacaatagaaacagttatttgwtactttggatcttatttgtcggtcacatcatgaaaagataaatgtgcgttatttaagaatttattccaaatattgagattttcttataaacattacaatg

SEQ ID NO: 140363 - DNA, 201 bp, Homo sapiens
ttttgaaaaatactttaatactattaattttgagtaaatcatgtttcagtactagtgaggttagcgtttaaaataaataatatttattcataaaaaatttycctttggaatcaagccatcatttgattggatatgattgaaattatgagtaagatgaaggatacatccctgacaactttcaactattgctcagatacacat

SEQ ID NO: 140364 - DNA, 201 bp, Homo sapiens
tgggatgctgaggcatgcagatcacttgaagtcaggagtttgagaccagcctggccaacatggtcaaaccccgtttctactaaaaatacaaaaattagccrggtatggtggcatgtgcttgtaatctcagctactcaggaggctgaggcaggagaatcgcttgaacctgggagatggaggttgcagtgagccgagatcaca

SEQ ID NO: 140365 - DNA, 201 bp, Homo sapiens
acaatagaaacaagacaccaagatatttaattatcttgttgactcctgtaaaatagctaaacactcatcattcgcggtgcaatactcatagacataagttyctgaaacaatagtttgcatgcgtaaggcattcgcaccaaagaaatctgaaaagaaaaaacaaatggtaattagcagaattgtattgaagtgaccccactt

SEQ ID NO: 140366 - DNA, 201 bp, Homo sapiens
gtacaagattcaactgaaggctgcattccagcatttgcattggccttggagtgccagagtaatatgttctgtcaattatttgaccttttaaaatatgcctkcttttggtcagctgtggtggctcacgactgtaaccctagcactttgggatgctgaggcatgcagatcacttgaagtcaggagtttgagaccagcctggcc

SEQ ID NO: 140367 - DNA, 201 bp, Homo sapiens
aagagtagaacacctttttggatagattattagaatcctcacttgtaaaacaagagaaactgaggctcaaataaagacagcatgtccttcttgctcaaggwttcttagcaacagcagaattaatggtacaagccttttctccatgacacttgagactacggtggcaattcttacggttggcacagcctggcgagtggtctt

SEQ ID NO: 140368 - DNA, 201 bp, Homo sapiens
gctctagtagtacctttctttctcacataccagcatccccgagtcggttctacaacagggcctttcacccggtaagccaaagtctgttggatgcaaactgyttacacagaatcccaagtagaagctaagttatcaacgtcaaaggaccaggaaggcagggtgattcaattgcaaacccaaagcagcagcactttggagcca

SEQ ID NO: 140369 - DNA, 201 bp, Homo sapiens
agctacagtattcacataccagaggaatacgtctgcctcgggaatcttttcccttttaggactgtacagggcagatcccaatagacaaggcctccctgagkgcttgtcctcagggctagtcagaaacaccaaggcagttgaggctggtgtggtggctcgcacctgtagtccctagccactcgggaggctgaggtgggagga

SEQ ID NO: 140370 - DNA, 201 bp, Homo sapiens
cccctacttgctaatcagtgcgttttctgttgctctagtagtacctttctttctcacataccagcatccccgagtcggttctacaacagggcctttcaccyggtaagccaaagtctgttggatgcaaactgcttacacagaatcccaagtagaagctaagttatcaacgtcaaaggaccaggaaggcagggtgattcaatt

SEQ ID NO: 140371 - DNA, 201 bp, Homo sapiens
gtgatagaaaacacataatatgaaatctgccctcttcacaaagttttaagtgtgcagtacagtgctgttaactataagcacattgctgtacagcaggtctstagaattttatacccattgaacagcaactcctcatttctcccttaccctagcccccggcacccaccattctgtgtctgcttctataagtttaaatacttt

SEQ ID NO: 140372 - DNA, 201 bp, Homo sapiens
aaaacccacttcccctacttgctaatcagtgcgttttctgttgctctagtagtacctttctttctcacataccagcatccccgagtcggttctacaacagkgcctttcacccggtaagccaaagtctgttggatgcaaactgcttacacagaatcccaagtagaagctaagttatcaacgtcaaaggaccaggaaggcagg

SEQ ID NO: 140373 - DNA, 201 bp, Homo sapiens
ctggtttgctcagggtgtggggaggtggagaaataatgttccgaggaatacccatgaaaagctccgttgcagttctctacagttttctagggatacttacmcaatgagaagcgagggtcacccaagcgtcctggggcatgtgaccttattggcaaatcttggcaaagaataatttcttcagtccttgctctacccaatccc

SEQ ID NO: 140374 - DNA, 201 bp, Homo sapiens
gactaagtaaaatgtggggagaaatggtaccaaaacccacttcccctacttgctaatcagtgcgttttctgttgctctagtagtacctttctttctcacayaccagcatccccgagtcggttctacaacagggcctttcacccggtaagccaaagtctgttggatgcaaactgcttacacagaatcccaagtagaagctaa

SEQ ID NO: 140375 - DNA, 201 bp, Homo sapiens
gcttcaacctttccattttacagatgaaaaaactgaggactaagtaaaatgtggggagaaatggtaccaaaacccacttcccctacttgctaatcagtgcrttttctgttgctctagtagtacctttctttctcacataccagcatccccgagtcggttctacaacagggcctttcacccggtaagccaaagtctgttgga

SEQ ID NO: 140376 - DNA, 201 bp, Homo sapiens
tctagcaccttctcaattcctcttagcactcagaaaaattgtcttgtagctgaactcaaacacacagtaatacttatcctaagtacccaagacacacacasgagaagaactagccctacactagcgtaagaggagcattctattccaggttcagccttagggacgacactagagaaaataccaaaaatgggagaagaaaca

SEQ ID NO: 140377 - DNA, 201 bp, Homo sapiens
tcctgaaatgcaattagaacaacaataacctacaatgtttccccgttcagcttagccaaattttttgaaaatttctcactcccactgctgggaaatgtgcrgggaaatggggaccttcctgcactattgccaagaccagaattcctaacaagcttttcaaaagtaatctaggagtatttattaaaattaaacattctcata

SEQ ID NO: 140378 - DNA, 201 bp, Homo sapiens
ggactgaaaaccactgctgttagcctcaactctgttctctaccttataaaagtagcatgtaattatcataaagatgaaataaagtaatgcaagtaaaaatyacttgatacatagttagcactcagtagacattagctactgttcctggaaatttttcccttcaagtggcattatcttgtataattatcttcatatttgaag

SEQ ID NO: 140379 - DNA, 201 bp, Homo sapiens
cactcttcttccttcttaccagctgcctctcctgagcacactggaagaaggacccctgtaccaccttcctcgacacccgggcctcttctgttcaaaggtgkctcctggccaggcatggtggctcacacctgtaatcccagcagttggggaggctgaggcaggagaattacttgaagccaggaattcgggaccagcctgggc

SEQ ID NO: 140380 - DNA, 201 bp, Homo sapiens
gaactgatggttgctctagaagaaatgcctttggaagttctacaataagccccaggttcacgtgaccgttaggatactttgcatgtagtttctcccagtcyttgtaaaggcataatgtcctcacctttaaaacccaatctacggatgggtgcactggctcacacatgtaatcccaacgctttgggaggccaaggcaggggg

SEQ ID NO: 140381 - DNA, 201 bp, Homo sapiens
tcactcttcttccttcttaccagctgcctctcctgagcacactggaagaaggacccctgtaccaccttcctcgacacccgggcctcttctgttcaaaggtscctcctggccaggcatggtggctcacacctgtaatcccagcagttggggaggctgaggcaggagaattacttgaagccaggaattcgggaccagcctggg

SEQ ID NO: 140382 - DNA, 201 bp, Homo sapiens
actataaacagatgtatttcgactcagaaagtgcccacttaggttgattcattgcatctgtctgagaggtgataatgtccaccttccagggtgtgttgacragtaaagaaatgaaggtatgaagaagaggtttaagaagctggataacttttcagatccaccatcgccagcaatcttgagtgaaattggcagaacattggg

SEQ ID NO: 140383 - DNA, 201 bp, Homo sapiens
catggtttgtgttgactctgagtagggaacttctccagagggtgccatgatacagaaggtggggggtgtgttccctaattgggggaatggagaagcatcaytctggcctctctcagtggccccatacctgctgactctatttaggccgtggcttgagggtgccccccacttgccaatgcctcctgccagggacctggacac

SEQ ID NO: 140384 - DNA, 201 bp, Homo sapiens
aaagctagctagtgctaaccttatgaaatatttatggaattattattccttatttttttgtaagttaaaatgctccttgctgattaaaaaaaattacccasgacttttttgtgaatgggattaatcttctctctctctgttccacagaccatgactccctgttctccacagaggccaagctcccatggatatggggtggaa

SEQ ID NO: 140385 - DNA, 201 bp, Homo sapiens
ggccccaaagagaatatgaaccaaaatcacagagtttggcagaaaaagagcacaattaatgcccattatgtacatattgagtattatctttggcttttagrgtcttattggcggaaataataaagttattgctgtaattcatgtgtctcttctttggcttatacatgtagcctcagcttagcaggaactcattttttaaaa

SEQ ID NO: 140386 - DNA, 201 bp, Homo sapiens
atattcaataatttttgttggatggttcatgggggaaaaaattgaagtactggccccaaagagaatatgaaccaaaatcacagagtttggcagaaaaagarcacaattaatgcccattatgtacatattgagtattatctttggcttttagagtcttattggcggaaataataaagttattgctgtaattcatgtgtctct

SEQ ID NO: 140387 - DNA, 201 bp, Homo sapiens
gctgtcttgattctcttttctgctccctccagccccacagatggcccaagaccccaaatgggcagtcaagcttccccactaagttgagtttctttactggrcaactcaagatgtcttggtgagatcctgtcttgaaacaatgccaggaaagtacatgaggtctccttcctcctaaaaacacccctagaaggaggcctggga

SEQ ID NO: 140388 - DNA, 201 bp, Homo sapiens
gtggaaacttccatcttgctctgcagagattctagaacagggagttctgcccatctcttggaagatcccagagtccaaatgcagacagtctaatgggaacyacccaggatgctggccagaggacatgctttgctttgcagcataaaatatttccatcttcaagctcattgtcactcacattatttttaatagcacctttta

SEQ ID NO: 140389 - DNA, 201 bp, Homo sapiens
ttagcttttattgtaaaaaaaaaagtagcaaatggaggaatgactgaagagaaagcatgctccagctatcagtcaactttgagggcatgagcccatgttcyaaatttaaacacaatctgtccctttctccttgtatatccggtttcctttcacttccctcggtgccttcaactaatcccattcttggtttactgcttggca

SEQ ID NO: 140390 - DNA, 201 bp, Homo sapiens
taatatattagtgccttgctgatgtcctactttgaccagtccaaacacaatactgcctcatgtgttcccaggttagatctgaaacctatgttcagacctgygtaaacaaaataacagggtagttttcttaaaaagaaaattcgtggaaacttccatcttgctctgcagagattctagaacagggagttctgcccatctctt

SEQ ID NO: 140391 - DNA, 201 bp, Homo sapiens
tcacttccctcggtgccttcaactaatcccattcttggtttactgcttggcagtgataattatatacatgcactgtgacagttcaacctttcatgtgccarttcccatcttttgatattttcttttattttttctgtggaaaataatatgacaaaatcctgccatttgtatgttcttcatttttgactccaaccatgcact

SEQ ID NO: 140392 - DNA, 201 bp, Homo sapiens
ctatttgtgtgaccctaacctccttcattcatgatttttttttacctgcaagacaggtataataacgatgttattatacttagagttttgtgaagttaagtgaggcaatacatgaaaaacattggtacctggtatgtagtaggatttcactaaatgctgtttcgtttccatgtttattgttattagcattatagaactgag

SEQ ID NO: 140393 - DNA, 201 bp, Homo sapiens
tcggtgccttcaactaatcccattcttggtttactgcttggcagtgataattatatacatgcactgtgacagttcaacctttcatgtgccaattcccatcytttgatattttcttttattttttctgtggaaaataatatgacaaaatcctgccatttgtatgttcttcatttttgactccaaccatgcactactgaatag

SEQ ID NO: 140394 - DNA, 201 bp, Homo sapiens
actatttgtgtgaccctaacctccttcattcatgatttttttttacctgcaagacaggtataataacgatgttattatacttagagttttgtgaagttaagtgaggcaatacatgaaaaacattggtacctggtatgtagtaggatttcactaaatgctgtttcgtttccatgtttattgttattagcattatagaactga

SEQ ID NO: 140395 - DNA, 201 bp, Homo sapiens
aactatttgtgtgaccctaacctccttcattcatgatttttttttacctgcaagacaggtataataacgatgttattatacttagagttttgtgaagttaagtgaggcaatacatgaaaaacattggtacctggtatgtagtaggatttcactaaatgctgtttcgtttccatgtttattgttattagcattatagaactg

SEQ ID NO: 140396 - DNA, 201 bp, Homo sapiens
taactatttgtgtgaccctaacctccttcattcatgatttttttttacctgcaagacaggtataataacgatgttattatacttagagttttgtgaagttaagtgaggcaatacatgaaaaacattggtacctggtatgtagtaggatttcactaaatgctgtttcgtttccatgtttattgttattagcattatagaact

SEQ ID NO: 140397 - DNA, 201 bp, Homo sapiens
ttaactatttgtgtgaccctaacctccttcattcatgatttttttttacctgcaagacaggtataataacgatgttattatacttagagttttgtgaagttaagtgaggcaatacatgaaaaacattggtacctggtatgtagtaggatttcactaaatgctgtttcgtttccatgtttattgttattagcattatagaac

SEQ ID NO: 140398 - DNA, 201 bp, Homo sapiens
ggaacagcagaactggccccattgtagcatcctcccagggagttcaggcctcggccttcagcttcgcaaaatgttttcaggaggaggtttagcaagtccarctctcctgaagtagaagatcacttgggaatctcttacatcctcttccccaggggcacatctatttcttcttctttttttttttttttttttgagagagag

SEQ ID NO: 140399 - DNA, 201 bp, Homo sapiens
agtctcagccactcaggaggctgaggcaggaggatggcttgagcttggactcctgggagtccaagaccaacctgggcaatgtaacaagatctcatcccaaraaaagaaggagaaatttcctagggaaactcactatctaggcttctaggaatcccagaatcaggtgtgaccatccacgtggttagcaataagtttcctatg

SEQ ID NO: 140400 - DNA, 201 bp, Homo sapiens
acccaaggtgttaagtctcctggtcctccttggttgtccgagtgtacagggaacagcagaactggccccattgtagcatcctcccagggagttcaggcctyggccttcagcttcgcaaaatgttttcaggaggaggtttagcaagtccaactctcctgaagtagaagatcacttgggaatctcttacatcctcttccccag

SEQ ID NO: 140401 - DNA, 201 bp, Homo sapiens
cccttgtggcatgctgtatggcaaccaaaaccataaacaaaacaggaagacagtaatagcctggagaagttatttgcaaaatatttgataagcaaactaartatctgtagtaaacaagagctcatgtaagttgatcgataaagcaacaggaaaaagagaaaagtaataaatagtgaattaaaaggaacaactgcaagtggc

SEQ ID NO: 140402 - DNA, 201 bp, Homo sapiens
aggaacaactgcaagtggccattaaacatgtgaagagttgctcaacttcacaacaagtcctgaaatgcaattagaacaacaataacctacaatgtttcccygttcagcttagccaaattttttgaaaatttctcactcccactgctgggaaatgtgcagggaaatggggaccttcctgcactattgccaagaccagaattc

SEQ ID NO: 140403 - DNA, 201 bp, Homo sapiens
ctatgtgtcaggtgccatcctggtgctgtggggcacagaacacagactccagtttccaggggtttaccgttaaatggggctgaagcagcaacagtgtgtcsgtctcctgtattcaatctcctcataatagctgagccactagatcaggagcagtggctcacgcctgtggtcccagcactttgggaggccgagacaggtgga

SEQ ID NO: 140404 - DNA, 201 bp, Homo sapiens
caaaaagaagagaccctctaaggaatgatcaaaaggaagagacactctaaagttactgagcgagagttataaaaaatagggaaggcaagaaaatgaatttrgagggttgagaaggatctaaagagattgaatgagaattaattgagtgtgtaaggtaaaaggaaagtggggtagcctggtttgggtacagtcatctggata

SEQ ID NO: 140405 - DNA, 201 bp, Homo sapiens
gttagtaaggaatctgctacaacaaatttatacagagcaaaatataaagtattttaaaattggcatccttttgagatagtctgttcctctcctgcccttcrttagttgggtactcaagagttggcagtgttttcccatctagaagctcatgctgcatattgacctgcaaaggtattagtccaggtaccaatggcaactttt

SEQ ID NO: 140406 - DNA, 201 bp, Homo sapiens
tgatataaccttgtgtatagctgtgtcagttatttacttttttcctatatacctctggtccactcctccccttcaaatcactatcagcaagtagtgcccasggactcctgtgttataacattagccagaaccaaacagttagtaaggaatctgctacaacaaatttatacagagcaaaatataaagtattttaaaattggc

SEQ ID NO: 140407 - DNA, 201 bp, Homo sapiens
ttaggcctttatgaatccaagattgtattccctctgactttaccaactattgtagtaacaactctcaaatatgcccagtcagttaactgatataaccttgygtatagctgtgtcagttatttacttttttcctatatacctctggtccactcctccccttcaaatcactatcagcaagtagtgcccacggactcctgtgtt

SEQ ID NO: 140408 - DNA, 201 bp, Homo sapiens
ttacctgttcctatgtccagaatggtattgcctaggttgtcttccagggcttttatagtttggggttttacatttacatctttaatccatcttgagttaawtttttcatatggtgtaaggaaggggttcagcctcaatcttctgcatattgctagccagttatcccagcaccatttattgaatagggagtcttttccccat

SEQ ID NO: 140409 - DNA, 201 bp, Homo sapiens
agatggcaccactgcactccacactgggcgacagagcaagactccgtctcaaaaaaaaaaaggggggcggaggggggcaaaggagaagccaggcatggtgrcttacacctataatcccagcactttgagaggccgaggcaggcaggttgcctgagctcaggagttcaagaccagcctggccaacatggcaagaccccatat

SEQ ID NO: 140410 - DNA, 201 bp, Homo sapiens
cttattggccacatgtgtgtcttctttagaaaagtgtccattcatgtcctttgcccactttttaatggggttggttttttcttgtaaatttgtttaagttscttacagatgctggatattagacctttgtcagatgcatagtttgcaaatattttctcctattctgtaggttgtctgtataccctgttgatagtttctttt

SEQ ID NO: 140411 - DNA, 201 bp, Homo sapiens
atccagcaatagaattgctgcatcaaatggtagttctgtttttagctctttgaggagtcgccatactgctttccacaatggttgagctaatttacaccccyaccaacagagtataagtgttcccttttctccgcaaccttgccagcatctgttgttttttgactatttaataatagcaattctgactggtgtaagatggta

SEQ ID NO: 140412 - DNA, 201 bp, Homo sapiens
acactcccactttcagagacacattggagggtgaggccccacctcatctgatttctgctgtgccctgcaccacacacgaatcctcttcccgagctggcccrcatgctcactattcaaggcaggccagcgttttcctgcctctcctcaggcaggtccctgtctttcaccttccttgatgaaagtctaatttctgaaatgaaa

SEQ ID NO: 140413 - DNA, 201 bp, Homo sapiens
ccatgtctttgctatggtgaatagtgctgcaatgaacattcctgttcatgtgtctttatggtagaatgatttatgtccctctgggtatatatccagcaatrgaattgctgcatcaaatggtagttctgtttttagctctttgaggagtcgccatactgctttccacaatggttgagctaatttacacccccaccaacagag

SEQ ID NO: 140414 - DNA, 201 bp, Homo sapiens
gagaagcattctgactttcccccaccccaaaatgatgtatttgttcttctagagctatgcatccagccattgtttcaactaatatttattccacgtgtacygtgtatctgtatataagaggcagtatagcagagaagttaagatgaggagctctcaagccagactcccttggtgtgaatcttgaccacttactaactatag

SEQ ID NO: 140415 - DNA, 201 bp, Homo sapiens
gcctccaactccctccgtgttcctgcaaaagacatgatctcattcttttttatggctgcatagtattccatggtgtatatgtaccacattttctttattcratctgtcattgatgggcatttacgttgatcccatgtctttgctatggtgaatagtgctgcaatgaacattcctgttcatgtgtctttatggtagaatgat

SEQ ID NO: 140416 - DNA, 201 bp, Homo sapiens
caatgaaacaccgtctctactaaaaatacagaaaattagccaggcgtggtggcgggcacctgtagtcccagctactcgggaggctgaggcaggagaatggygtgaacctgggaggcagagcttgcagtgatccaagatagcaccactgcactcctgcctgggcaaaagagcaagactccatctcaaaaaaaaaaaaaaaaa

SEQ ID NO: 140417 - DNA, 201 bp, Homo sapiens
atcctaaattgagagagatgagttctaaatggcagagaccatttataggagaatgccaaagagagcagaagagaatgggaagcctttcccacagcagaaastttccacagcagagacaatagactgatccctatcacatcccctaaatatttcttctgacacctggatgggttttgacaatcatagaagcaaactggacag

SEQ ID NO: 140418 - DNA, 201 bp, Homo sapiens
tgagatcgcaccactgcactccaccctgggtgacagagcgagactctgtctcaaaaaaaaaagaaaacacatacttaacaacacttagaatccccttacaygaataagggagagtttgacatataaaaatttgtcatatgaaaattcttggcacttttttctatgttttctacatgatgtataaccttttataattacgta

SEQ ID NO: 140419 - DNA, 201 bp, Homo sapiens
tatgcaaagccttccagttctcaccaggcaggtcctcctctcctgtgatcagagagacatccccatttccctgatttcagagcagtgctatttggcacttytgagcctcacttgaacagtctggctgttcctggcccagactgtttactgcacccacatctagcaccttctcaattcctcttagcactcagaaaaattgtc

SEQ ID NO: 140420 - DNA, 201 bp, Homo sapiens
agcaaatatgtctttcccaaagttcagtggaaagaagtcctatctgaaagatgtcaaaccacatagagtccattttgaaatgacatttcactctttccttyacagaaataatggctaccagaattgagggttcctgcctgatttaatttaatatgtggaaagggataattttaaaatgaactcaaaaacagaaaaagttat

SEQ ID NO: 140421 - DNA, 201 bp, Homo sapiens
ttaacctctcttttttagttttaattccaattttaactagaaaacacatatttattggccaggcacagtggctcatgcctgtaatcccagcactttgggargccaaggcaagtggatcacttaaggtcaggagttcgagaccaccctggccaatatggcaaaaccccgtctctactaaaactataaaaattagccaggcgt

SEQ ID NO: 140422 - DNA, 201 bp, Homo sapiens
aaaactcaaaaaaagaaagcaccattaattaaagaaaaataatcactgcctaaaattagccaaagtgccaatgcagagatttctgatgtgaaaaatgccartaagagcagaaaagagtatttccatgcccctgcaatctccttctgtgaggtaacatgtcccacgtgcattggcatagctttgcttcaccttgttcccatt

SEQ ID NO: 140423 - DNA, 201 bp, Homo sapiens
cagtgttaacagacattgtcagattactttctaaatagattgtagtaattcacactcccaccagaaatggagaagtgccatttctctgcatctttactagsactgaatattaacctctcttttttagttttaattccaattttaactagaaaacacatatttattggccaggcacagtggctcatgcctgtaatcccagca

SEQ ID NO: 140424 - DNA, 201 bp, Homo sapiens
ggtgaaatgagaatatagtgtgccagtaaattattctgaaactcgcttttctcaacaaatacttcatggacatccgtccaagtctgcttctcaacagctaygtaatattccaagtatgaatactgtaatttattaaatcagttctgtattttttctgttgtttccaaatttttgttaacttaaaaaacctactttaagcat

SEQ ID NO: 140425 - DNA, 201 bp, Homo sapiens
gaggatcgcttgaacccacgaggcagaggttgcagtgagccgagatcacaccattgcaccctgggcaacaagtgcaaaactccatctaaaaaaaaaaaaaaggagtttttccattccctctgcatattctgggggaatttccagaccaggtaagtggtaaagaaccaatcagagcttagtaaataggtatcctactgggta

SEQ ID NO: 140426 - DNA, 201 bp, Homo sapiens
attccagctacttgggaggctgaggcaggaggatcgcttgaacccacgaggcagaggttgcagtgagccgagatcacaccattgcaccctgggcaacaagygcaaaactccatctaaaaaaaaaaaaaaggagtttttccattccctctgcatattctgggggaatttccagaccaggtaagtggtaaagaaccaatcaga

SEQ ID NO: 140427 - DNA, 201 bp, Homo sapiens
ttcttaaaaacagaaataaattctcgatctgccttgcccttcttggaagaaaggtagagtggaaagagttagaagttatttggtacagagtcattgagtasagtgctctcctgaggtagaacagaactgtcagggattgaattgcaggacagacctgcaattcaagatgattgttggcagtgaaattgctgatcaatggaa

SEQ ID NO: 140428 - DNA, 201 bp, Homo sapiens
attaccatgtacacccagctcagtacctctccagactgcaaaccctttgagggttccggcctggcttttctttatatttggggaaatgttagagaaaacarcatctaaaactggaaaccttgacttaaattagccatttcttctcatcctaaattgagagagatgagttctaaatggcagagaccatttataggagaatgc

SEQ ID NO: 140429 - DNA, 201 bp, Homo sapiens
caaaatcatcttgggaaatgccactcgaatcatgacactcccactttcagagacacattggagggtgaggccccacctcatctgatttctgctgtgccctrcaccacacacgaatcctcttcccgagctggcccacatgctcactattcaaggcaggccagcgttttcctgcctctcctcaggcaggtccctgtctttcac

SEQ ID NO: 140430 - DNA, 201 bp, Homo sapiens
gaccccacaggcactttccagtgccgtcagcctggcctgaaggatttgctgggatttctaaagtgtaaatcttttccttgggcagagtggtgcttaacacktgtctggttctcagggagctgaagaactttagtcttctactaaagacccaaggtgttaagtctcctggtcctccttggttgtccgagtgtacagggaaca

SEQ ID NO: 140431 - DNA, 201 bp, Homo sapiens
ctgatgcggagacctccaaaatcatcttgggaaatgccactcgaatcatgacactcccactttcagagacacattggagggtgaggccccacctcatctgmtttctgctgtgccctgcaccacacacgaatcctcttcccgagctggcccacatgctcactattcaaggcaggccagcgttttcctgcctctcctcaggca

SEQ ID NO: 140432 - DNA, 201 bp, Homo sapiens
ctgtcggaccccacaggcactttccagtgccgtcagcctggcctgaaggatttgctgggatttctaaagtgtaaatcttttccttgggcagagtggtgctwaacacttgtctggttctcagggagctgaagaactttagtcttctactaaagacccaaggtgttaagtctcctggtcctccttggttgtccgagtgtacag

SEQ ID NO: 140433 - DNA, 201 bp, Homo sapiens
ctctatcttctcattgctgcgaccttgagttagagccttaatccccgccgtgtcccatcctgatgcggagacctccaaaatcatcttgggaaatgccactygaatcatgacactcccactttcagagacacattggagggtgaggccccacctcatctgatttctgctgtgccctgcaccacacacgaatcctcttcccga

SEQ ID NO: 140434 - DNA, 201 bp, Homo sapiens
tactgggtagtgttagttcttcctgaataatcccccaagtcttccccttttctctatcttctcattgctgcgaccttgagttagagccttaatccccgccrtgtcccatcctgatgcggagacctccaaaatcatcttgggaaatgccactcgaatcatgacactcccactttcagagacacattggagggtgaggcccca

SEQ ID NO: 140435 - DNA, 201 bp, Homo sapiens
ctcacagcctttaagtcatgcctctctttcctacatccagtcagttactgggtagtgttagttcttcctgaataatcccccaagtcttccccttttctctrtcttctcattgctgcgaccttgagttagagccttaatccccgccgtgtcccatcctgatgcggagacctccaaaatcatcttgggaaatgccactcgaat

SEQ ID NO: 140436 - DNA, 201 bp, Homo sapiens
ctttccccttcttcaatccagcaccttcctcagaccgacacccctgcttctgttcatggtgcggcagcctcctggaacctttgaggctcacagcctttaartcatgcctctctttcctacatccagtcagttactgggtagtgttagttcttcctgaataatcccccaagtcttccccttttctctatcttctcattgctg

SEQ ID NO: 140437 - DNA, 201 bp, Homo sapiens
ggttcagtgcctcctcatggcccaggtgatacctgaaattcagcaaatttaaacccaagtccaccctttccccttcttcaatccagcaccttcctcagacygacacccctgcttctgttcatggtgcggcagcctcctggaacctttgaggctcacagcctttaagtcatgcctctctttcctacatccagtcagttactg

SEQ ID NO: 140438 - DNA, 201 bp, Homo sapiens
aagcatattcaaacatatatccctacggtgaaatgagaatatagtgtgccagtaaattattctgaaactcgcttttctcaacaaatacttcatggacatcygtccaagtctgcttctcaacagctacgtaatattccaagtatgaatactgtaatttattaaatcagttctgtattttttctgttgtttccaaatttttgt

SEQ ID NO: 140439 - DNA, 201 bp, Homo sapiens
tacgtgcctggaagctaagcaaggccgtgctattcacttatctgctttacctggggtggggtggggacaggccaggtggtcagcagtgagctgatggaacyccctctggagaaactagtgagagggagtgccaaatctgtcttccttccacccaaaggaccccacatagccttcccagggctaaaatgtcagctagacagt

SEQ ID NO: 140440 - DNA, 201 bp, Homo sapiens
tatttcttcagattagggcttccttgacctctaagaatattttttaatcaaaaatagtgacctctaaggtaatagtaataagcagaaattatccaaagacstataaagaaagagttgagaatctccccccacctcctcctcctgcctgaggtaaccaatgtgaactgccctggtttgtatctttccacactctttttcata

SEQ ID NO: 140441 - DNA, 201 bp, Homo sapiens
tggtctaagagggtcaccctatactgcactgtcggaccccacaggcactttccagtgccgtcagcctggcctgaaggatttgctgggatttctaaagtgtraatcttttccttgggcagagtggtgcttaacacttgtctggttctcagggagctgaagaactttagtcttctactaaagacccaaggtgttaagtctcct

SEQ ID NO: 140442 - DNA, 201 bp, Homo sapiens
agacttcatgctccctacgaagattctcagcatcaaagattggacccaaaacgaggtgtcttattaatccagaggtaactagcaatcagccaggaactcarctcacaagacctgggcacgcggtcaccagggcagcattgtattgaatggtctgctcttagatggactggccctgcaaatacgtgcctggaagctaagcaa

SEQ ID NO: 140443 - DNA, 201 bp, Homo sapiens
tggagactgaataaacctctgcttggtagctcctggtctaagagggtcaccctatactgcactgtcggaccccacaggcactttccagtgccgtcagcctsgcctgaaggatttgctgggatttctaaagtgtaaatcttttccttgggcagagtggtgcttaacacttgtctggttctcagggagctgaagaactttagt

SEQ ID NO: 140444 - DNA, 201 bp, Homo sapiens
cttgactattttgtttgctctctgtgtgaccggagaagcaacttctagaactccaggaggactgtggctcccgcagtcggagctctttctgttgcaagttytaccagcccatttgaaaccagcctaggcaaaacaaaaagcggggcgggatccagcctcaagggcccctgcatccaggtacacacgccatcagaactctaa

SEQ ID NO: 140445 - DNA, 201 bp, Homo sapiens
taaggtggaagaaccccttgagccaggagattgaggctgcagtgagctgtgattgccccactgcactctagcctgtctcaaaaaaaaaaaaaaaaaaagartgtgaattccttagccagggtggctgagttctctgcaagtcagggtttctcagcctcagcactattgacatttggggccagataattatttgttgtgcgg

SEQ ID NO: 140446 - DNA, 201 bp, Homo sapiens
tttagcataatgtcctacaggtacatctgtgttatggcatatgacaagttaatctcacttattatttcttaaagtgtaaatacaagactaacaaaaaaaaatcccttgtgtcttccatgcactgtttaaggttatagaggctcacagttaaggcttacgttttggggtccctgggaggatataagttccagctctttttcg

SEQ ID NO: 140447 - DNA, 201 bp, Homo sapiens
aatgctggccccagccccaagtggaaaaagcatgatattcttttaataaatcagctttgaaatgacttcccaaatggaaaaaaagaaaaaaaaagtgtgargctgggtgcagtagcacatgcctgtaatcccagcactttgggaggctgaggcaggaggatcacttgagtcctggagtttgagaccagcctgaccaacaca

SEQ ID NO: 140448 - DNA, 201 bp, Homo sapiens
ggacactgagaacgctgggaaagggccctctccttggggaccctggtcacacccaatagatcagtcactcttcttccttcttaccagctgcctctcctgascacactggaagaaggacccctgtaccaccttcctcgacacccgggcctcttctgttcaaaggtgcctcctggccaggcatggtggctcacacctgtaatc

SEQ ID NO: 140449 - DNA, 201 bp, Homo sapiens
gtctgccatagctgggcagcagttctttttagcttttcatttcagacacagttgctgaaggtgaattcaaagggtgactagaagcttagtgttttagagascacagaccccatcagacttcactgaagtgtgaaatcagatgataaaataggtcatagctggggggaaaaatggaaagctttgtagcaaatatgtctttcc

SEQ ID NO: 140450 - DNA, 201 bp, Homo sapiens
agctggcttgtgttgtcttagactttcagaagagaaaacaaaggtcttcttattgaaccttttggttgtacattgcatgtttgatttgagaacagttatgrttcaggcctgcagtaagagattgagagccttacatcattataaatgtggcctggggcatccaactcatttaactagaggataatgcagaggagtgatttg

SEQ ID NO: 140451 - DNA, 201 bp, Homo sapiens
gtcatgaaatatccatcttttaattttttttcaaccatttgaaactgcaggccgggcatagtggctcacgcctgtaatcccaacactttgggaggccaagktggggggatcgcttgagctcaggggttcgagaccagcctggccaacgtggcaaaatgctgtttctactgaaaacacaaaaattagctgggcatgcacttg

SEQ ID NO: 140452 - DNA, 201 bp, Homo sapiens
gtttgtgagctggcttgtgttgtcttagactttcagaagagaaaacaaaggtcttcttattgaaccttttggttgtacattgcatgtttgatttgagaacwgttatgattcaggcctgcagtaagagattgagagccttacatcattataaatgtggcctggggcatccaactcatttaactagaggataatgcagaggag

SEQ ID NO: 140453 - DNA, 201 bp, Homo sapiens
cactgatccacaagcttgaacacatttgtgttttagaattaatcgattttaatcaagtagaaaaatgcactgaacatcccttgtatccaatgctcattacycctgcggccagtttgtgagctggcttgtgttgtcttagactttcagaagagaaaacaaaggtcttcttattgaaccttttggttgtacattgcatgtttg

SEQ ID NO: 140454 - DNA, 201 bp, Homo sapiens
agtgcaaacttagttgtcagcacagataaagaaaggaaatagacacatcagatgtaaaagccccaaataggcctcctactgacagatcctgctctcctaamgcatgcagacctctctgacttgctgagatgtatgtatattcaatgacagcatggaattgaatggttgactagaagtggctttccagaggctgcagcagga

SEQ ID NO: 140455 - DNA, 201 bp, Homo sapiens
gggcatggtgaggcatgcctgtggccccagctactcaggagactaaggtggaagaaccccttgagccaggagattgaggctgcagtgagctgtgattgccycactgcactctagcctgtctcaaaaaaaaaaaaaaaaaaagaatgtgaattccttagccagggtggctgagttctctgcaagtcagggtttctcagcctc

SEQ ID NO: 140456 - DNA, 201 bp, Homo sapiens
gacatggtggtgcacgcctatagtcccagctactcgggaggctggggtgggaggatcgctggagaccaggagtttgaggctgcagtgagctatgatcaagycactgcgctccagcctgggtggcagaatgagattctgtatcaaaaaaataataataaaattaaattaaaaataaagatgtcccttccaatcccctgacgc

SEQ ID NO: 140457 - DNA, 201 bp, Homo sapiens
gccagccagagggccgagagccgcggggagaaggccatcacccaggtcagcaagggcacctgcgagcaaggtgggcacgagcgcttccctctccaaccctrcgccgctcggcccagcgaagggcacatccgacggggcgtccgcggcggcctcgccccgcgctgctcactgcgattcccccgcgggcatcccaggagccag

SEQ ID NO: 140458 - DNA, 201 bp, Homo sapiens
aaaaactatatgtataaacagtttatataagttgttggggggttaggattatcaggaggtaaaagtagacaacttgctgcttctttatatatttgtatatytgaattgttacagtgagcatgcacttttgcattttttaaatagcaacaaaatattttaaaagaatactgaaccactacatcattgatattcctcataact

SEQ ID NO: 140459 - DNA, 201 bp, Homo sapiens
gttcttccaggtcctcaaaccaattcaaaacctagcctgctgattcaacttgtgtggacctcagccagtctggtattaggatgatagtgtaggtattccarcttcctaggggagctctgctgaatacgttagctcatccctgggcaatgttgttggcacagccccatgttacctcatctatcacatggttaccagagcgag

SEQ ID NO: 140460 - DNA, 201 bp, Homo sapiens
taaggtgagtcatagtccagacaggacaggcccaatgagatgtggaaaaaatgtgtttccaaggctatgttaacatcactagggagtttcgtctcgggaargcactctctataaagtcagttcttccaggtcctcaaaccaattcaaaacctagcctgctgattcaacttgtgtggacctcagccagtctggtattaggat

SEQ ID NO: 140461 - DNA, 201 bp, Homo sapiens
tcttctaatctgtccccctctcctcctttctaactttccaccttcctgtcttcctaatcatctgagtatctcctactcaaaaacaatgttttaattgagtrcttctacctagggagttttttttaagatacctgtaccagactccacgcccagaccagtgagaaactaggagtgcagcccaggaatgggcatttttttcga

SEQ ID NO: 140462 - DNA, 201 bp, Homo sapiens
aaagaaggagaaatttcctagggaaactcactatctaggcttctaggaatcccagaatcaggtgtgaccatccacgtggttagcaataagtttcctatggraacttcccacccaattcagtgcttgcagaataagaaagggctagcaaaaacatttaatatcttgtatttaaggtgagtcatagtccagacaggacaggcc

SEQ ID NO: 140463 - DNA, 201 bp, Homo sapiens
aatgtaacaagatctcatcccaaaaaaagaaggagaaatttcctagggaaactcactatctaggcttctaggaatcccagaatcaggtgtgaccatccacrtggttagcaataagtttcctatggaaacttcccacccaattcagtgcttgcagaataagaaagggctagcaaaaacatttaatatcttgtatttaaggtg

SEQ ID NO: 140464 - DNA, 201 bp, Homo sapiens
ggtgctggtgttatcaggtgtctgtacccttcacccagaaccagtccgctggattttctcaattccccgtgaatactggcacctcccaagtagtacttggyctctcactccccaaaaagacctacgaacataatttcttctaatctgtccccctctcctcctttctaactttccaccttcctgtcttcctaatcatctgag

SEQ ID NO: 140465 - DNA, 201 bp, Homo sapiens
gaattgaacttctgtccagcctgatttaacatatgatgatcagtatgttccagaaagatctgttctttaatcatcttctgagcacattacaagccattgargaaagctagctagtgctaaccttatgaaatatttatggaattattattccttatttttttgtaagttaaaatgctccttgctgattaaaaaaaattaccc

SEQ ID NO: 140466 - DNA, 201 bp, Homo sapiens
cacagttttcccacatcttgaacatactgatccccttgcctgaaagcccatttcctctttcatgaatttagttctgacctactcagtaagaattttttttktttttcagagacgaaatctcgctgttgccccaggctgcaatccagtggctattcacaggcacaatcacaggcactacagcctcaaactcctgggtttaag

SEQ ID NO: 140467 - DNA, 201 bp, Homo sapiens
agcctcctttatttttctctgccgttactgatgtgtttctaggcccatcttatctgtgcattagctcattacttattgtcatcgcttgtcactggctgccrtttcccccgcctcccttgggtgttgtgtctacacatctttgctataggggaaattagatagtaaactgatgatgtcagtcctttgactggaggttagcat

SEQ ID NO: 140468 - DNA, 201 bp, Homo sapiens
aaagaattcttacttgtcctagagtgttctgcttcttggaatagtaagatgattgggggggaacagatatattagatctgccctctatttagtgcttcaaytttagtacaattaatttctaaattatgccatagttattggtgcaaagatagacacatagaccagtggaaaagaacagagagtccagaaatagacgcacac

SEQ ID NO: 140469 - DNA, 201 bp, Homo sapiens
agataacagacagcttttcagtctctagacatcacaaaacggctcagaaaatgaccagaggggccaagctggagaagaggaaaacactgagaaagagcagraggagctcagttatgcgcggctggctaacgtctggggttgtctgccagggagtcacggtggctgggctgtgacaatgggagtccggggcctggagggtaa

SEQ ID NO: 140470 - DNA, 201 bp, Homo sapiens
taaagaaaaataatcactgcctaaaattagccaaagtgccaatgcagagatttctgatgtgaaaaatgccaataagagcagaaaagagtatttccatgccmctgcaatctccttctgtgaggtaacatgtcccacgtgcattggcatagctttgcttcaccttgttcccatttctcacagctcacacccagccagatggac

SEQ ID NO: 140471 - DNA, 201 bp, Homo sapiens
aacatagcaagactctgtctctacaaaaataaaaataaaaaaagaattcttacttgtcctagagtgttctgcttcttggaatagtaagatgattggggggraacagatatattagatctgccctctatttagtgcttcaactttagtacaattaatttctaaattatgccatagttattggtgcaaagatagacacataga

SEQ ID NO: 140472 - DNA, 201 bp, Homo sapiens
agaattcatggctgggcactgttgctaacacccataatcccagtactttgggaggctgaagtaagaggattacttgagcccacgagtttgagaccagcctrgtcaacatagcaagactctgtctctacaaaaataaaaataaaaaaagaattcttacttgtcctagagtgttctgcttcttggaatagtaagatgattggg

SEQ ID NO: 140473 - DNA, 201 bp, Homo sapiens
agtattcctgggttcaggtatttttaaagaattcatggctgggcactgttgctaacacccataatcccagtactttgggaggctgaagtaagaggattacktgagcccacgagtttgagaccagcctagtcaacatagcaagactctgtctctacaaaaataaaaataaaaaaagaattcttacttgtcctagagtgttct

SEQ ID NO: 140474 - DNA, 201 bp, Homo sapiens
aattctagaaatagcctggtggcaggattgacaaaatcatttacattcttagaataatccaaatgttgactcagcctgtttacctaaggtattccaagcaytgggagagagaaataggaacccatgatatgatttgtcctaatattgaatcccctgacgatggctgtcattcaaagtattcctgggttcaggtatttttaa

SEQ ID NO: 140475 - DNA, 201 bp, Homo sapiens
tctaagtacttttaaggtgatatgattcattaaattgaattttaatttactttatttttaatgtttattttttatttgcataaacttatggagtacaaatrtaattttgttccaaggatgtatttcatagtagtgaatttttgttttcttccaaggttagaactttcttcttccttgctataacttccttcaggatctggc

SEQ ID NO: 140476 - DNA, 201 bp, Homo sapiens
tgagcccaggatgtggagcttgcagtgagccgagatggcaccactgcactccacactgggcgacagagcaagactccgtctcaaaaaaaaaaaggggggcrgaggggggcaaaggagaagccaggcatggtggcttacacctataatcccagcactttgagaggccgaggcaggcaggttgcctgagctcaggagttcaag

SEQ ID NO: 140477 - DNA, 201 bp, Homo sapiens
gcctgtagtcccagctacttgggaggctgaggcaggagaatggcgtgagcccaggatgtggagcttgcagtgagccgagatggcaccactgcactccacamtgggcgacagagcaagactccgtctcaaaaaaaaaaaggggggcggaggggggcaaaggagaagccaggcatggtggcttacacctataatcccagcact

SEQ ID NO: 140478 - DNA, 201 bp, Homo sapiens
cccaggctgcagtgcagtggcgcgatctcagctcactgcaacctccgcctccaggttcaagcaattctcccaccttagcctccagagtagctgggactacrggtgctcgccaacacaatcggctaatttttgtgtttttactagagacagggttttgtcatgttggtcagtctggtctcgaactcctttgataggtgtttt

SEQ ID NO: 140479 - DNA, 201 bp, Homo sapiens
tgaacctgggaggcagagcttgcagtgatccaagatagcaccactgcactcctgcctgggcaaaagagcaagactccatctcaaaaaaaaaaaaaaaaaaatttaaaaaatgggctgttacctagccttcaaggatcagctctgtcagtttctctgagaagcattctgactttcccccaccccaaaatgatgtatttgttc

SEQ ID NO: 140480 - DNA, 201 bp, Homo sapiens
tgccctctcctgcaggtccttccatagtgacgccccccaaggacatctggaatgtcactggtgcccaggtgtacttgagctgtgaggtcatcggaatcccracacctgtcctcatctggaacaaggtctgtggcacagactttaagagacatcctaggctgacaagcttctcttgcactgcacaaggatggtaaaacgtta

SEQ ID NO: 140481 - DNA, 201 bp, Homo sapiens
gatcacaccaatgcactccagcctgggcgacagagcaagactccatctccaaaaaaaaaaacttaaaactaaaggaaaatattatttgtttgctactgcayaataaattagtccaaaacttagcagcctaaaataataataaatatttaccatctcacacagtttctgtggatcaaaaacttgggagtagcttagttttgt

SEQ ID NO: 140482 - DNA, 201 bp, Homo sapiens
aagaaatattaagtaaagaagtatttggtcagattctcttcagccataatgtgtaatgtcaggcaatgaaacagaacagtagctaagagtcaagccatgcrtttgagtctcagctctgctactaattattcctccactttaccttttgaaggagatccggactacaaaggaaaggtctttaacctctctgaatctcattgt

SEQ ID NO: 140483 - DNA, 201 bp, Homo sapiens
gattatgatcactcccgatcaactccacaggactgtcctgaggatcagataaagagaacacgctttagaaggctcaccacaaatgggctgtggccatggakgtggtggtggtgacagtggaattggcatctgggttggcttgtagcctggcctgtaactgtagttgtggaagcttagagggctgtttgaagaggcccctcc

SEQ ID NO: 140484 - DNA, 201 bp, Homo sapiens
atagagattatgatcactcccgatcaactccacaggactgtcctgaggatcagataaagagaacacgctttagaaggctcaccacaaatgggctgtggccrtggaggtggtggtggtgacagtggaattggcatctgggttggcttgtagcctggcctgtaactgtagttgtggaagcttagagggctgtttgaagaggcc

SEQ ID NO: 140485 - DNA, 201 bp, Homo sapiens
atgggcagagtttggaagctcgcttgctggtgccaggacagtggctgggtgagctgctgcccttgggaaagtcgctaggtcctcccatctttcctcttccstttttcctcacctttgtgcgatagagattatgatcactcccgatcaactccacaggactgtcctgaggatcagataaagagaacacgctttagaaggctc

SEQ ID NO: 140486 - DNA, 201 bp, Homo sapiens
tactccctgataatctgcattcattgataattgagacaaaattaatcatatataatcaagcaaaaatgcgaacaaaattagctgtcagaaaagcattatcyagtctttattttttagttaactttagatattttaacaacacataaaatgagtggtagggtatatttgtattttactgtataggacaccttcagataaatt

SEQ ID NO: 140487 - DNA, 201 bp, Homo sapiens
cccctaccccacaaacaatctgacctcatctgtgtttttcattgttagacaaataacatcttgtttttagcagctggggaaccctgaattatcgtcaaaaraatttttaagccagggaatatgagtgtaacctttatttgaaatttaggagtggcacaattagaaagctttgaaatggaaggagacttaggtatatgtgaa

SEQ ID NO: 140488 - DNA, 201 bp, Homo sapiens
ggagctaaatgatgagaactcatgaacccaaaaaaggatataacagacactggggtctacctgacagtggagggtgggaggagggagaggagcaggaaagrtaactatcgagtactgagcttaatacctgggtgatgaaacaatctgtacaacagacccccgtgacacaaatttacctatgtaacaaaccttcacatgtac

SEQ ID NO: 140489 - DNA, 201 bp, Homo sapiens
gatgaaaaaaaaattggctaactgggtaaagggtgatacctttataagctctatttttttaatccctgaggaagtgaaccatgttatgagtcacatacatygtgtttaggtaggtgaggaaatgcattgaactgatttgcagagaatgagagctccagacccagacagtgagacttcagaacttcatagatgtcaaagcat

SEQ ID NO: 140490 - DNA, 201 bp, Homo sapiens
atatgaaaagaaatattaagtaaagaagtatttggtcagattctcttcagccataatgtgtaatgtcaggcaatgaaacagaacagtagctaagagtcaarccatgcgtttgagtctcagctctgctactaattattcctccactttaccttttgaaggagatccggactacaaaggaaaggtctttaacctctctgaatc

SEQ ID NO: 140491 - DNA, 201 bp, Homo sapiens
ataatgacctcactggaaccactgacaaaagagaagaccaccacagaggaatactagatcttttttctttcacaggtatctcctctaagtaaggaagatgytggagaatatgagtgccatgcatccaattcccaaggacaggcttcagcatcagcaaaaattacagtggttgatgccttacatgaaataccagtgaaaaaa

SEQ ID NO: 140492 - DNA, 201 bp, Homo sapiens
gggttttgtcatgttggccagtctgttctgaaactgctgacctcaagtgattcacctgcctcggcctcccaaagtgctgggattgcaggagggagccaccrcacctgaccccattttgttttgttgtgagagaccataaacagcctagaaagatagaaatctcaataatgagaagtttctgtaatgtgtggctcctgccca

SEQ ID NO: 140493 - DNA, 201 bp, Homo sapiens
tcccaaagtgctgggattacgggcatgagccaccccgtgcccagccaagcacatctatttctaagcagattgcaattcttgttagtcagcgcagggcctayggatagagactaagctttaaagatgggtgagcctccccttacaggtagttcaagaaacccttcctgatgtctgaggataccaggcactgggttagtatgt

SEQ ID NO: 140494 - DNA, 201 bp, Homo sapiens
gacctcatgatctgcccaccttggcttcccaaagtgctgggattacgggcatgagccaccccgtgcccagccaagcacatctatttctaagcagattgcaattcttgttagtcagcgcagggcctatggatagagactaagctttaaagatgggtgagcctccccttacaggtagttcaagaaacccttcctgatgtctga

SEQ ID NO: 140495 - DNA, 201 bp, Homo sapiens
ggatatctaggagttaaccaagcaaagctacggaggggtgggaaatggggggaatattctagaaaaaaatggcatgtgcaaaggctaggggctagggaggrcaagacatgcttgaggagccacagcaagttcattatggctggagctcagggttcaggagggatgtggcaagaaatgaggctgggaaaagctacccagagc

SEQ ID NO: 140496 - DNA, 201 bp, Homo sapiens
  misc_feature (1)...(201): n = A,T,C or G
ctatgaatcccctggtcatcttaggaaatttatgaaataatgacctcactggaaccactgacaaaagagaagaccaccacagaggaatactagatcttttntctttcacaggtatctcctctaagtaaggaagatgctggagaatatgagtgccatgcatccaattcccaaggacaggcttcagcatcagcaaaaattaca

SEQ ID NO: 140497 - DNA, 201 bp, Homo sapiens
tacattagtttaaaacatgtacgcttagcaggaaactggcaggaagaaataaaagaggatctatattttaaaagtatttaggaaagggaaatagttcagtraaatgctgggtttactctgttagaaagtctgacatacactatgtgcaattgtagggatgtggccacttccaagtagatgatctggtgtacaaaactcagt

SEQ ID NO: 140498 - DNA, 201 bp, Homo sapiens
gcaggcctgtggccagcggggacacagtccacaagtgggggtttttaacagcttgttcttaagagagcttcccaaaccacagagtaatgagcactcaggtrtctcaggcccacggaggatttaatagatgaaaccctggatcgtctcgaagccgtggttgttaagaagtttaaatatattgaccggaaacggggagaaacc

SEQ ID NO: 140499 - DNA, 201 bp, Homo sapiens
cctgcctctcctcaggcaggtccctgtctttcaccttccttgatgaaagtctaatttctgaaatgaaaagcaacagctcatacttactgaatgtttacccsatgccaggtactgtgctaatggctgtatcttgtttgatccttttgatggtctaatgactgggatactatcattccatttcacagatgaataaagcagggg

SEQ ID NO: 140500 - DNA, 201 bp, Homo sapiens
aacagctcatacttactgaatgtttaccccatgccaggtactgtgctaatggctgtatcttgtttgatccttttgatggtctaatgactgggatactatcmttccatttcacagatgaataaagcaggggaagtgaaataacttgtgcaatgttgcataactcaggagtggtagagcagaattcctgattccaagtccacg

SEQ ID NO: 140501 - DNA, 201 bp, Homo sapiens
tttctcaagaggaagatgtaaatctaaaacatttcaaatcccagagagaaaacattttctctaatagaaggattgctggactctacccaggagtgtttacyaagtgttaacattgacttttaaagttttcctaggattcctgccatacaaggtaattctatgcatatggcatctttttaatgatttgcaagacgaaacaca

SEQ ID NO: 140502 - DNA, 201 bp, Homo sapiens
ccctaaatgacttgccttggcagatggctctgctctttaattagccatacagttactgcttccccttatttaatatcaggaagcttccacttgtttcatcmccttccccatcttggccatagtgccttcctactattcttttcccgttttgtacttttgtgtgctcctgttccctttaatgtgttatcagaatctcatctc

SEQ ID NO: 140503 - DNA, 201 bp, Homo sapiens
atcacaagcactcaactggaggcttaaaagactaataataataataataccacagctcaagatacagagtgctatacaaaaatcacagaaaggacagaccrtctaaggaaaacttaaaaagacgacacaaggacaggctgggcagcctgggtcagggctcctggctggtgacctgctttaagtaggtttcttgcaggtgct

SEQ ID NO: 140504 - DNA, 201 bp, Homo sapiens
aacagagcaagatcctgtctctgaaaaaaaaaaaccaaaaaacccactatgtcagtcaacgagatgggtgctgaagtaaagaagtgaagaggaagtaggaragaaacaattttttctgcagactttccagaacaagcaaaacccaactgtgatgctctgccggttttcctctaccttcataatgtaatttgccacatgcat

SEQ ID NO: 140505 - DNA, 201 bp, Homo sapiens
gtttcttacactgcagaccatgacccatcagtgactcctggaactaatgtagcgatcacaaccaccatgttcttataaaaaataaaaaatagaacagaacytatgttaaggcatcacacttaccacttatgaaggtgtcatttcctaaaacttttgtatattccagatatacgatagtttggtccatgtcaaaactaagga

SEQ ID NO: 140506 - DNA, 201 bp, Homo sapiens
acttcagtaacttgcagggccaggtgtgttcagagcagaagaaatacgaagtagtgtgcaatgaataggtgcagggagaacccgtcttcaaatgaattggmctttttaattagcaattttatgtgaacagattatttaatacattgagatgtgtgtgttacagcattcaacactgatccacaagcttgaacacatttgtgt

SEQ ID NO: 140507 - DNA, 201 bp, Homo sapiens
agcaatcctcccacctcagtcccctgagtagctggaactacaggcacacaccaccatgcccagctaatttttacattttttatggagacagggttttgctrtgttgtccgggctggtcttgaactcctgaactcaagcaatcctcccctctcagcctcccaaagtgctgggatcacagaactgcaccaccatgcccaaccc

SEQ ID NO: 140508 - DNA, 201 bp, Homo sapiens
gcacatggaccctcgggacttcagtaacttgcagggccaggtgtgttcagagcagaagaaatacgaagtagtgtgcaatgaataggtgcagggagaacccrtcttcaaatgaattggactttttaattagcaattttatgtgaacagattatttaatacattgagatgtgtgtgttacagcattcaacactgatccacaag

SEQ ID NO: 140509 - DNA, 201 bp, Homo sapiens
tggaggttgtagtgagctgggattgctccactgcactccagcctgggtgacacagcgagactgtgtctcaaaagaaaaaaaaagagagagagagagagagrtgcattttccaaagaggaaagtacgatgggcagagtttggaagctcgcttgctggtgccaggacagtggctgggtgagctgctgcccttgggaaagtcgc

SEQ ID NO: 140510 - DNA, 201 bp, Homo sapiens
acacacttcttctagacaggctttgccaccaccttatgcacatggaccctcgggacttcagtaacttgcagggccaggtgtgttcagagcagaagaaataygaagtagtgtgcaatgaataggtgcagggagaacccgtcttcaaatgaattggactttttaattagcaattttatgtgaacagattatttaatacattga

SEQ ID NO: 140511 - DNA, 201 bp, Homo sapiens
aaccttcataggaaaatactaaactgtgtattttggtagtgacattggttcactcaactactcagcagtttgctgattacctgctcaacgccaggcgttgsaacacaggaaagaactagagagaatcaattgactggtccttagcagcacagagcccacgatctaatggggtatgcagcaatttcaatgcattgtgaaaat

SEQ ID NO: 140512 - DNA, 201 bp, Homo sapiens
tgatgtataaccttttataattacgtaacattaattaaaatacgccatgccaacacttgtgaaaagaagggaaaaataaagtatatctatattgtgatttmtgttaaatattatatttaacaagatacatttccctttccatagtggatcaggttaattagcataaaatgctgttactaagagctatgggatttgaggctt

SEQ ID NO: 140513 - DNA, 201 bp, Homo sapiens
aattttcaggccggacgaggtggctcacgcctgtaatcccagcactttgggaggcagaggcaagcagatcacttgaggccaggagttcaagacaagactgrccaacatggcaagaccccgtctccactaaaaataccaaaattagccaggcgtggtggcacgcacctgtaatcccagctactcgggaggctgagacaggag

SEQ ID NO: 140514 - DNA, 201 bp, Homo sapiens
tcaactccactcacatttttattacagcttaaagaccccagaggaaagaaagggcttcccttctccctgctgcattgtgaaaatcccacgaagggctcaarcccaggtcgggtcacctgctaagctctggctcccccatgcggccggagggatgcggccactgacattggcaccggcgtgaatccgcctggtttgtgtaaa

SEQ ID NO: 140515 - DNA, 201 bp, Homo sapiens
cagaaggagaaccgcgatgaccctgtccacccccgcgtgattgaagtggtggcggtgctggtgttatcaggtgtctgtacccttcacccagaaccagtccrctggattttctcaattccccgtgaatactggcacctcccaagtagtacttggtctctcactccccaaaaagacctacgaacataatttcttctaatctgt

SEQ ID NO: 140516 - DNA, 201 bp, Homo sapiens
acaacaaatttatacagagcaaaatataaagtattttaaaattggcatccttttgagatagtctgttcctctcctgcccttcgttagttgggtactcaagrgttggcagtgttttcccatctagaagctcatgctgcatattgacctgcaaaggtattagtccaggtaccaatggcaacttttatgttatccatcaatcac

SEQ ID NO: 140517 - DNA, 201 bp, Homo sapiens
agttgtctgaactctctatctccatatgtggtatctgaggtccttcttaaaccctgattttccccttatttggtattaatgcacacactattttcaggacscagcatcaagagtcaaggtgagtgttgtttgcaaatctatcataactcggagaagtccccatactcaaatgtcttagccatgttagcatgtactcagcaa

SEQ ID NO: 140518 - DNA, 201 bp, Homo sapiens
acccagcatcaagagtcaaggtgagtgttgtttgcaaatctatcataactcggagaagtccccatactcaaatgtcttagccatgttagcatgtactcagyaagaggccatgaacagtggctcatgcctgtaaccccagcactttgagaggccgaggagggaggatcacttgaagccaagggttcgagaccagcctgggca

SEQ ID NO: 140519 - DNA, 201 bp, Homo sapiens
tcaaattccttcaaagacacggtgtgcagagaaggctctgagtaataggattgcttatttttaaaggaagatgccctttagcaaagcacgaggctttgacrtgtgatcagtcaagggtccaatcagcacggatttccccacatggcactgtttcttgttgagttccaaccagatttaataactcatacaaaatgcaactcc

SEQ ID NO: 140520 - DNA, 201 bp, Homo sapiens
catcttgttattggactcgagaacaagcagccagacctcatttgtctgggaactctgggattacagcccaggagattattttttatatttgtatttctatygtaggaccagttgcacttcgcctgttttataattgcatgtatagttgtcttcacttcctgattgtaaatccctatgggacaggagtccaaccctaacatc

SEQ ID NO: 140521 - DNA, 201 bp, Homo sapiens
ctgaagcttagtgtgctttttatggttttatggttaccttgcagaaatctcattagaaaagcactttaatatattacttggcaatgagacatctgacaatrttctagttcattagttaggaaacctccccaagcttggaggaatagacattcctctgtgaatggtagagctttgatcactcctgcaggggccaggatttat

SEQ ID NO: 140522 - DNA, 201 bp, Homo sapiens
gaatgtataagttaaacattaaagcagaagtagaaaacaatggataacgaactggggtaactggtgcctgagtaagaaagctcgaatgcaaaaacaaaccyattaaaaccttacctggacttcctcaacctcaaacctgattgagggatcaaagcgtgcaccaagacccacttaagaaactttcctacccacagacccata

SEQ ID NO: 140523 - DNA, 201 bp, Homo sapiens
attcacaggcacaatcacaggcactacagcctcaaactcctgggtttaagcaatcctcctgcctcagcctctcgagtagctgggactacaggaaaaaaaamttttttgccccgtcactcaggctggagagcagtggcgcaatcatagctcactgtagccttgacctcccagggtcaagcaatcctcctgcctcagcctctt

SEQ ID NO: 140524 - DNA, 201 bp, Homo sapiens
agctggttctctgtggaccccgtctgcataaaaagcaaagatcaaaggaacatggtagagctctttaaaaaaaaaaaaatcctaaactcacaagtgaatgrgaaatgcatatttatatcactggcccatcaagggtaagggtgttctgtgagaggggaggaagagaaatcattaagcaggagcgaagctcttcagattaag

SEQ ID NO: 140525 - DNA, 201 bp, Homo sapiens
gtccagaaggagaaccgcgatgaccctgtccacccccgcgtgattgaagtggtggcggtgctggtgttatcaggtgtctgtacccttcacccagaaccagyccgctggattttctcaattccccgtgaatactggcacctcccaagtagtacttggtctctcactccccaaaaagacctacgaacataatttcttctaatc

SEQ ID NO: 140526 - DNA, 201 bp, Homo sapiens
cgggctctgtaggctctggattagctggttctctgtggaccccgtctgcataaaaagcaaagatcaaaggaacatggtagagctctttaaaaaaaaaaaaatcctaaactcacaagtgaatgggaaatgcatatttatatcactggcccatcaagggtaagggtgttctgtgagaggggaggaagagaaatcattaagcag

SEQ ID NO: 140527 - DNA, 201 bp, Homo sapiens
caggcgcagtcagcaagcacccgctctctcggtatctgttggcttccacagttttgtgtttcagagccaaaccagaaatcacccagggggttacttgcatsagctctggaaaatgtgtaaaggattgaagtcctgagactttcccataatgtcttatttaggcatcagtctccctcagttgattagagcaggaatcagcaa

SEQ ID NO: 140528 - DNA, 201 bp, Homo sapiens
acgcaagtacaaacgccagacgcccgccaagcagccatcacgccctgcgctctgctccacggaagtctgaagggggctattcgcacacagagatccctttwttcaacctcctccttgcccgcttaaagccaaaccgaatgtcttaacagagaggcaatcggaccagaaatgagcaaagggcggctcccaagttcgagggat

SEQ ID NO: 140529 - DNA, 201 bp, Homo sapiens
caggctgccagctccatgaccctcctctgcggacggtcccaagtctttctgaaggcccctggtgattgaaccctggcattcagaattagcagaagtgacayactaattaccagtaactaaaaagttggtgttcacatctctattgcagatgccgggaagccaggccgtcaggggacaggcgcagtcagcaagcacccgctc

SEQ ID NO: 140530 - DNA, 201 bp, Homo sapiens
gctgtgacaatgggagtccggggcctggagggtaaaaacatacgcaagtacaaacgccagacgcccgccaagcagccatcacgccctgcgctctgctccayggaagtctgaagggggctattcgcacacagagatcccttttttcaacctcctccttgcccgcttaaagccaaaccgaatgtcttaacagagaggcaatcg

SEQ ID NO: 140531 - DNA, 201 bp, Homo sapiens
acctgcaatttgtttttttaaaacacacacacacacaccaaaaaagggaaatcacaagacaatataaacctcgcttgaagaaacgatcgtgtttaacaagrcagcaaagagaaatactctgagttgagccaagtagatgtgtgctgcttttgtagatggaataaatgatcctcacttgcatagacagcaaggtcatttttc

SEQ ID NO: 140532 - DNA, 201 bp, Homo sapiens
aagggatcattaatttattcattcaagaaaccatgctaagcatggaataagagccaggttaggttctggagtctcacactgccccacatgaggatcccagrctgccagctccatgaccctcctctgcggacggtcccaagtctttctgaaggcccctggtgattgaaccctggcattcagaattagcagaagtgacacact

SEQ ID NO: 140533 - DNA, 201 bp, Homo sapiens
aaagtaatctaggagtatttattaaaattaaacattctcataccctttgacccagcaatcttatttctggaaacctctcctacagaaacaaaagtgctaaygcatagggacataagtattaagaatatttattgtatcatagtttgtatatagaagaatttggaacatctggaatattcttaaagaattatgcccatgttt

SEQ ID NO: 140534 - DNA, 201 bp, Homo sapiens
aggcagcagcaacgctggtggtggctgggtcaaggttttgacaggccatctaggtggcactgacagaaagataggaacttaaagaacacaactgcaactgmctatttaatttttttgagacagggtctccctctgtaacccaggctggagtgcagtggcgtgaacacagctcgttgtatcatcaacctcctgggctcaagc

SEQ ID NO: 140535 - DNA, 201 bp, Homo sapiens
ccccagaaaatttctctgtggaagctttaacccccagtgtgatggtattcacaggtgaggccttcgagaggtgaatgggattagtgtgctataagaagagrcaaagaaagatgatctctctttccaccgtgtgaggctacagcaagaaggcagccatctacaagccaagaagtgggcctccccagaaccctaccatgctcg

SEQ ID NO: 140536 - DNA, 201 bp, Homo sapiens
aaaatggctggcttcttagctttctggcttcattgatgtcagggaggttgcgtggttaaataatgaaggaggagtgacaagcaagagccaagagagggacrtccaaggactgtttccaagtgatccatggtagaggcttcatggcattcctgttgtttgtgctttgagcaagaattccttggtacgttggttctagtaaag

SEQ ID NO: 140537 - DNA, 201 bp, Homo sapiens
cggatctgtacagagcaggctggagccatatgcttacacgaaggtgaccaaaatggctggcttcttagctttctggcttcattgatgtcagggaggttgcrtggttaaataatgaaggaggagtgacaagcaagagccaagagagggacgtccaaggactgtttccaagtgatccatggtagaggcttcatggcattcctg

SEQ ID NO: 140538 - DNA, 201 bp, Homo sapiens
gccagtgctgcaagactgtcggatctgtacagagcaggctggagccatatgcttacacgaaggtgaccaaaatggctggcttcttagctttctggcttcaytgatgtcagggaggttgcgtggttaaataatgaaggaggagtgacaagcaagagccaagagagggacgtccaaggactgtttccaagtgatccatggtag

SEQ ID NO: 140539 - DNA, 201 bp, Homo sapiens
cccacaagatcctttaatctgtcggttctactcttcacctcttggaagggagccagtgctgcaagactgtcggatctgtacagagcaggctggagccataygcttacacgaaggtgaccaaaatggctggcttcttagctttctggcttcattgatgtcagggaggttgcgtggttaaataatgaaggaggagtgacaagc

SEQ ID NO: 140540 - DNA, 201 bp, Homo sapiens
ttagcctgactaatttcttgtatttttagtagagatcggttttcaccatgttagccaggatggtctcgatctcctgacctcatgatctgcccaccttggcytcccaaagtgctgggattacgggcatgagccaccccgtgcccagccaagcacatctatttctaagcagattgcaattcttgttagtcagcgcagggccta

SEQ ID NO: 140541 - DNA, 201 bp, Homo sapiens
gtgagccgagatggcaccactgcactccacactgggcgacagagcaagactccgtctcaaaaaaaaaaaggggggcggaggggggcaaaggagaagccagkcatggtggcttacacctataatcccagcactttgagaggccgaggcaggcaggttgcctgagctcaggagttcaagaccagcctggccaacatggcaaga

SEQ ID NO: 140542 - DNA, 201 bp, Homo sapiens
ggggcacagaacacagactccagtttccaggggtttaccgttaaatggggctgaagcagcaacagtgtgtccgtctcctgtattcaatctcctcataatarctgagccactagatcaggagcagtggctcacgcctgtggtcccagcactttgggaggccgagacaggtggatcacctgaggtcaggagttcgagaccagc

SEQ ID NO: 140543 - DNA, 201 bp, Homo sapiens
cccgcaaggtgaagccttagggcagtcatacaggcccctcccctggattcatggaacaaaaaccagtccctgccatgcttttgttagcagcatcctagaawctgagaaactggaagaacaataatgctgaacacctgaacccaccttcagggtgtgtgtgcacctgtggtgtgtgtatgtgtgtgcatatgtgggtgcgag

SEQ ID NO: 140544 - DNA, 201 bp, Homo sapiens
cactctttccttcacagaaataatggctaccagaattgagggttcctgcctgatttaatttaatatgtggaaagggataattttaaaatgaactcaaaaamagaaaaagttataattgtatatggatagatgcagtaaaactgctttaaaaaagtctactttcatttttataaattgtataaacttcaattcatcctcaga

SEQ ID NO: 140545 - DNA, 201 bp, Homo sapiens
tgtagacaaggattcagagccaagtgttctgtccccaagaatgcttttgtctcttttttttaaatagtaacatcatgaggacatctcaggtcatggctggsgagtgctttgtgctctgtaagggactaggaaattgttcacatacttcttcaatattgttcctgctgtgctttttataggataacacattttaactctgtc

SEQ ID NO: 140546 - DNA, 201 bp, Homo sapiens
agtcacatacatcgtgtttaggtaggtgaggaaatgcattgaactgatttgcagagaatgagagctccagacccagacagtgagacttcagaacttcataratgtcaaagcatctttgacatctatgtcccagctctaggacacattcatgataggttcacttacttccaaacccaaagaggatattcttagacacttcct

SEQ ID NO: 140547 - DNA, 201 bp, Homo sapiens
ggttttcactggaaagtccattagtgggtgagtgcaagggacccaaagggtggaaggggcttgagtagcctgggtcccgtgaactctcaaaacccccagcyggggctcctgatatggtttggctgtgttcccacccaaatctcacattgaattgtaactccataatctccaagtgtcatgggagagacctggtggaaggtc

SEQ ID NO: 140548 - DNA, 201 bp, Homo sapiens
acggtcaccccgtctctactaaaaatacaaaaagttagccgggagtggtggtggatgcctgtagtcccagctacttgggaggctgaggcaggagaatggcrtgagcccaggatgtggagcttgcagtgagccgagatggcaccactgcactccacactgggcgacagagcaagactccgtctcaaaaaaaaaaaggggggc

SEQ ID NO: 140549 - DNA, 201 bp, Homo sapiens
atgggatgaagggtagaagcagaaactgagagtggtaggaatgattggatggtattatatggagaaaatgagggctgttcttgcccaaactggtcggaacstcaatatttttatatacttacaatttatagcctaccttattttaacattatatttgtggcagtttacatcaccatgcttttcagatacagcaatagtgct

SEQ ID NO: 140550 - DNA, 201 bp, Homo sapiens
catacctatttctagattataatcaaatattcttaaaataatctggtagtctgtgagtcctttgtctagaacttaattaaaagtggcaaaggaggccgggygctgttgctcactcctgtaatcccagtactttgggaggccgaggcaggtggatcacgaggtcaggagatcgagaccatcctgggtaacacggtcaccccg

SEQ ID NO: 140551 - DNA, 201 bp, Homo sapiens
aaaaagtttattttaggtttgggggtacatgtgcaggtttgttacataggtaaactcgtgtcatggaggtttgttgtacagcatattttatcacccaggtrttaggcctagtacacaatagttgccctttctgctcctctcccttctcccaccctccaccctcaagtagacccagtgtctgttgttcccctctttgcgttc

SEQ ID NO: 140552 - DNA, 201 bp, Homo sapiens
gcttttgtctcttttttttaaatagtaacatcatgaggacatctcaggtcatggctggggagtgctttgtgctctgtaagggactaggaaattgttcacawacttcttcaatattgttcctgctgtgctttttataggataacacattttaactctgtcctcactaccaagactttatataaaatcagctggaatgaattg

SEQ ID NO: 140553 - DNA, 201 bp, Homo sapiens
tctgggaggtgtaaagcccattattaatgtaaagtataggagtccgccctcatccatggttttgctttccagtttcagttatatgcagtcagttttggtcygaaaatattacatgggaaattccaaaaacaaacactttctggttttacattccacacagtcctgagtagcgtgatgaaatctcaccccatccagctctgt

SEQ ID NO: 140554 - DNA, 201 bp, Homo sapiens
ttttatcattagtagtagtggctaatgcttcagaaacagccctcaaatgtcatactatggtacttttaccttcattcttccctctttttctggagggatawctagagatgggatgaagggtagaagcagaaactgagagtggtaggaatgattggatggtattatatggagaaaatgagggctgttcttgcccaaactggt

SEQ ID NO: 140555 - DNA, 201 bp, Homo sapiens
ttcttaagattctgttttcttctccgcaaacacctcactctccaacaaagcaaaatgagacacaacactccagccatacggattatgtagacaggtatcayggtagcatcggggaggccctgggtttggactcagaaaacctaaattcatgtcctgcccaccccatttccagtctgtgtgacctcgcacaagacacttagt

SEQ ID NO: 140556 - DNA, 201 bp, Homo sapiens
tctccttccaatgaacatgaagatcttttgattccgtagttcctggttctgttctgattccgacaggatgctggcatcctcaattaggccagctaaggaargcattagaaaacagtgatgcactacactctgtggaacttaccgaaaccaacaggattttagagaagaaataagggggagcctgaagctgtcaggccgcaa

SEQ ID NO: 140557 - DNA, 201 bp, Homo sapiens
gagtttggagtctgcagtgagctatgatcgtagcaccattgcactcctgcctgagtgacagagcaagactctgtctataaaaacttttgaaaagccaggtrcagtggcttatgcctttaatcctagctctttgggaggctgaggcaggtggatcacctgaggtcaggagttcgagaccagcctggccaacatggtgaaacc

SEQ ID NO: 140558 - DNA, 201 bp, Homo sapiens
ggagtttggagtctgcagtgagctatgatcgtagcaccattgcactcctgcctgagtgacagagcaagactctgtctataaaaacttttgaaaagccaggygcagtggcttatgcctttaatcctagctctttgggaggctgaggcaggtggatcacctgaggtcaggagttcgagaccagcctggccaacatggtgaaac

SEQ ID NO: 140559 - DNA, 201 bp, Homo sapiens
ctgcaacctccgcctcccaggttcaaacaattcttctgcctcagccttccaagtagctgggactacaggcacgtgctaccaaaattagcctgactaatttyttgtatttttagtagagatcggttttcaccatgttagccaggatggtctcgatctcctgacctcatgatctgcccaccttggcttcccaaagtgctggga

SEQ ID NO: 140560 - DNA, 201 bp, Homo sapiens
cctgtctctacaaaaaaaaaaaaaaaattcttttttaattagccgggcatggttgcacttgcctgtagtcctagctccttgggaggctgaggcagaaggayccatgagactaggagtttggagtctgcagtgagctatgatcgtagcaccattgcactcctgcctgagtgacagagcaagactctgtctataaaaactttt

SEQ ID NO: 140561 - DNA, 201 bp, Homo sapiens
acttcaagtcactttttgggatgcttcattcctttgggataatcataataataataggccagtttttgctcagtttatccagcatctagtgttttgcaacrggggactttgagaagatctagtgtgccatgggaagtgtaagccctagaaaacatgatcacccaatgtagtgcaggcagcataaatggtttggctacttct

SEQ ID NO: 140562 - DNA, 201 bp, Homo sapiens
cactttgagaggccgaggagggaggatcacttgaagccaagggttcgagaccagcctgggcaacaaagcaagaccctgtctctacaaaaaaaaaaaaaaaattcttttttaattagccgggcatggttgcacttgcctgtagtcctagctccttgggaggctgaggcagaaggacccatgagactaggagtttggagtctg

SEQ ID NO: 140563 - DNA, 201 bp, Homo sapiens
gctaattatttgtgggcaaaaataaaatacaaactctttgaagactgtttttgtgatgcactttgttgtcaaccttctgaccattttgtttttccttcctrtttctttgatttgtattgttttgcataatttgtccccaggatacactgttcagcagaaatgtctttgagattatgtttgattgtttattttattccaaac

SEQ ID NO: 140564 - DNA, 201 bp, Homo sapiens
gagagcctgtctcaaaaaaagaaaaaaaaatctactatagaaatcatgaaaaactcctttctgtgtctccctgcactgttagggaactaataattcaagtraaataaaaaacaaaactcaaaaaaagaaagcaccattaattaaagaaaaataatcactgcctaaaattagccaaagtgccaatgcagagatttctgatgt

SEQ ID NO: 140565 - DNA, 201 bp, Homo sapiens
tcccagatcagcaggggtgggtggtggagctggtcctcttgagccctaacagctttgttgggaactttctttgttcaagaaatctcctagttaccatccawgtgcatttctgaaatgcctgactgtgctccgggctctgtaggctctggattagctggttctctgtggaccccgtctgcataaaaagcaaagatcaaagga

SEQ ID NO: 140566 - DNA, 201 bp, Homo sapiens
tagtgcttgaagtctgctgccttagccaagttcagagatccattcattatctttgaagtgcccagcttcctaaaagggtcacacatgttgttaaagagackccctgagaacatacccaaaaagcaaggatgagggaggcataaacagcagctccaaggccaatttcgggagtactgagaacattttcttcctcgtgcctct

SEQ ID NO: 140567 - DNA, 201 bp, Homo sapiens
aggtttgggggtacatgtgcaggtttgttacataggtaaactcgtgtcatggaggtttgttgtacagcatattttatcacccaggtattaggcctagtacmcaatagttgccctttctgctcctctcccttctcccaccctccaccctcaagtagacccagtgtctgttgttcccctctttgcgttcatgagttctcatca

SEQ ID NO: 140568 - DNA, 201 bp, Homo sapiens
ttctgcatattgctagccagttatcccagcaccatttattgaatagggagtcttttccccattgcttgtttttgttagctttgttgaagatcagatggttrtaggcgtgcaggcttatttctgggctctctattccattgatctagatgtttgtttttgtaccagtaccatgctgttttggttactgtagccctaatagta

SEQ ID NO: 140569 - DNA, 201 bp, Homo sapiens
gaagtttctaacaaaagagattcagaagagtcaaacccttgggtgtgaaaaagttttaggaagactttcctgaatttattttgcctatattttgtttctgwtgaatgagcaagggggttatatgatatatttgtgtctaaatacatctaaaagagctctttcattcgcataaaataaacatgctgtatgataacaaagttt

SEQ ID NO: 140570 - DNA, 201 bp, Homo sapiens
ttgagactgacagtcatatagaaccagtttcataacctcattaccatgtacacccagctcagtacctctccagactgcaaaccctttgagggttccggccyggcttttctttatatttggggaaatgttagagaaaacaacatctaaaactggaaaccttgacttaaattagccatttcttctcatcctaaattgagagag

SEQ ID NO: 140571 - DNA, 201 bp, Homo sapiens
aggtcatcggaatcccgacacctgtcctcatctggaacaaggtctgtggcacagactttaagagacatcctaggctgacaagcttctcttgcactgcacamggatggtaaaacgttaaatcctcagcctgctttgttgactgcggctcccgcaaggtgaagccttagggcagtcatacaggcccctcccctggattcatgg

SEQ ID NO: 140572 - DNA, 201 bp, Homo sapiens
caggcacgtgctaccaaaattagcctgactaatttcttgtatttttagtagagatcggttttcaccatgttagccaggatggtctcgatctcctgacctcrtgatctgcccaccttggcttcccaaagtgctgggattacgggcatgagccaccccgtgcccagccaagcacatctatttctaagcagattgcaattcttg

SEQ ID NO: 140573 - DNA, 201 bp, Homo sapiens
caagtccaactctcctgaagtagaagatcacttgggaatctcttacatcctcttccccaggggcacatctatttcttcttctttttttttttttttttttkagagagagcctcgctctgtcgccaggctggagtgccgtggtgtgatcttggtgcactgcaacctccgcctcccaggttcaaacaattcttctgcctcagc

SEQ ID NO: 140574 - DNA, 201 bp, Homo sapiens
agtctctagacatcacaaaacggctcagaaaatgaccagaggggccaagctggagaagaggaaaacactgagaaagagcagaaggagctcagttatgcgckgctggctaacgtctggggttgtctgccagggagtcacggtggctgggctgtgacaatgggagtccggggcctggagggtaaaaacatacgcaagtacaaa

SEQ ID NO: 140575 - DNA, 201 bp, Homo sapiens
gggagtcacggtggctgggctgtgacaatgggagtccggggcctggagggtaaaaacatacgcaagtacaaacgccagacgcccgccaagcagccatcacrccctgcgctctgctccacggaagtctgaagggggctattcgcacacagagatcccttttttcaacctcctccttgcccgcttaaagccaaaccgaatgtc

SEQ ID NO: 140576 - DNA, 201 bp, Homo sapiens
gaccctgtccacccccgcgtgattgaagtggtggcggtgctggtgttatcaggtgtctgtacccttcacccagaaccagtccgctggattttctcaattcyccgtgaatactggcacctcccaagtagtacttggtctctcactccccaaaaagacctacgaacataatttcttctaatctgtccccctctcctcctttct

SEQ ID NO: 140577 - DNA, 201 bp, Homo sapiens
ctattacgagaacagcacaggaaaaacctgtccccatgattcaattaccttccaccgcgtaccccccaacccatgacacatgggaattatgggagctacartttgagatttgggtggggacacagtcaaaccatatcatcctctctcccttctttcccttcaaggaatgttcaaaaagaagagaccctctaaggaatgatc

SEQ ID NO: 140578 - DNA, 201 bp, Homo sapiens
tatgtgtgtgtttggggaggactttttttcctttgtttttctgtcttagccatagcttgtgggcgagccggcacctgggaccttgaccgccttctggcgtrggccgaggccacatggggagttctccccagtacgttttgtgatgttccctaattccaggatgggctgcagttttccagatccaaggctcaggggaactgg

SEQ ID NO: 140579 - DNA, 201 bp, Homo sapiens
gaggttaaaaggaggaaaattattaaattaaaaagaaaggaggaatgatcaaaagcagcaaccactgaagatatgcagagcagatctagcatacggataayaggagtcactgaagaaggaaaccaaagcaagaaagcaagccaacactaaaaattataactccaaaaaacttcactgaaatacaagaaaaatgtagaacta

SEQ ID NO: 140580 - DNA, 201 bp, Homo sapiens
ttgtgtgtgttgcaacatggccagtgttagagatccagggttgcttaatctaaccccaagtgattaagaaccagctatgataccagactgagtgcaaactkagttgtcagcacagataaagaaaggaaatagacacatcagatgtaaaagccccaaataggcctcctactgacagatcctgctctcctaaagcatgcagac

SEQ ID NO: 140581 - DNA, 201 bp, Homo sapiens
gttttgcttatgtgtgtgtttggggaggactttttttcctttgtttttctgtcttagccatagcttgtgggcgagccggcacctgggaccttgaccgcctyctggcgtgggccgaggccacatggggagttctccccagtacgttttgtgatgttccctaattccaggatgggctgcagttttccagatccaaggctcagg

SEQ ID NO: 140582 - DNA, 201 bp, Homo sapiens
tgaaaccaaaagaaacacaatagcgaataagaacaatagagaatcccttaaaagactaggaggttaaaaggaggaaaattattaaattaaaaagaaaggargaatgatcaaaagcagcaaccactgaagatatgcagagcagatctagcatacggataataggagtcactgaagaaggaaaccaaagcaagaaagcaagcc

SEQ ID NO: 140583 - DNA, 201 bp, Homo sapiens
tggagctgccttttgggggtgtttgcctgttggcattttcagtactccacgcgtcaagagtgagtcactttctcttcttgtcatgaagttaaattcctggkatgtcatcttcattttcttcagagcccctttccaaaactcaacttttgtttgcttcacaaattgccctgctaacctccatagactgagtttatttgtctt

SEQ ID NO: 140584 - DNA, 201 bp, Homo sapiens
actcgaaaatgtggtgaagatctcagttgttatttcagaaatgaaaccaaaagaaacacaatagcgaataagaacaatagagaatcccttaaaagactagraggttaaaaggaggaaaattattaaattaaaaagaaaggaggaatgatcaaaagcagcaaccactgaagatatgcagagcagatctagcatacggataat

SEQ ID NO: 140585 - DNA, 201 bp, Homo sapiens
ttttgctgctgctgaaatggaacggtgccatcgggccgtcttctccactggagatgctccttcagctcagcaggacgctagctcggaactcagactgcacrtttttgcggattgggaggagggccgacgccgtggccggatagtctctggagctgccttttgggggtgtttgcctgttggcattttcagtactccacgcgt

SEQ ID NO: 140586 - DNA, 201 bp, Homo sapiens
tccccacatggcactgtttcttgttgagttccaaccagatttaataactcatacaaaatgcaactccaccctgagggtgcctagtgcattcaaagcagatratgctatattgttttaacacagattatgccaaatgaagtacaatttaaattcctgaagcatgacagtccttgggtgcttgtggctgtgttttagttgggt

SEQ ID NO: 140587 - DNA, 201 bp, Homo sapiens
tcaggcaaggcagaaatccctgtgtcactaggcattgtgaaggtcaccaactcctgctgtagccttttgcccacaaggtaccgggcagcacccctgctggkggtggctaggcagcagcaacgctggtggtggctgggtcaaggttttgacaggccatctaggtggcactgacagaaagataggaacttaaagaacacaact

SEQ ID NO: 140588 - DNA, 201 bp, Homo sapiens
aggtaaccaaacagttgaggaaacaaagttttagaagtagtctggctaaaaactgaagaaggactgagaaaaaatagaatggtatcagttggaaatcgccmtttaattaaggtctttagtaatagctgctaaaatcataaaaagaaaggcaaccagatactggaagtatagaataccacctataaagtattactgccaaaa

SEQ ID NO: 140589 - DNA, 201 bp, Homo sapiens
cctgctttaagtaggtttcttgcaggtgcttcttaaaagctgtggggggtttccagagcttggcagcatgcctgttcaacgagctatcaatgttgggtttrcctcgaaggctgtggatggagagcaggatggtcctgacatcatacagggcagaccacttgtccttcaggatgtccaggcagatattaccctgggtgtcca

SEQ ID NO: 140590 - DNA, 201 bp, Homo sapiens
gctggtgacctgctttaagtaggtttcttgcaggtgcttcttaaaagctgtggggggtttccagagcttggcagcatgcctgttcaacgagctatcaatgytgggtttgcctcgaaggctgtggatggagagcaggatggtcctgacatcatacagggcagaccacttgtccttcaggatgtccaggcagatattaccctg

SEQ ID NO: 140591 - DNA, 201 bp, Homo sapiens
aacaaacaattcgtatatccttttttttttaaaactcaccattatcacaaggcttaaaatatttgtactctgtaactcagctgctaaatgtatatgtatcraggagctacaagtgaatttcattcttttgtatattttccagagtttatataataaaacattttgccttttaaaatgagggcaaaaaggatactattcagt

SEQ ID NO: 140592 - DNA, 201 bp, Homo sapiens
aatcttgacatgacatacacagaaacagtcagcaagttttgtcataaaagaacaatgacagcacatgtatttgacagctgtttttttttttttttttttttgagatggagtctcactctgttgcccaggctgcagtgcagtggcgcgatctcagctcactgcaacctccgcctccaggttcaagcaattctcccaccttag

SEQ ID NO: 140593 - DNA, 201 bp, Homo sapiens
attctcgatctgccttgcccttcttggaagaaaggtagagtggaaagagttagaagttatttggtacagagtcattgagtacagtgctctcctgaggtagaacagaactgtcagggattgaattgcaggacagacctgcaattcaagatgattgttggcagtgaaattgctgatcaatggaatgtgtgggatgatagttct

SEQ ID NO: 140594 - DNA, 201 bp, Homo sapiens
aattctcgatctgccttgcccttcttggaagaaaggtagagtggaaagagttagaagttatttggtacagagtcattgagtacagtgctctcctgaggtagaacagaactgtcagggattgaattgcaggacagacctgcaattcaagatgattgttggcagtgaaattgctgatcaatggaatgtgtgggatgatagttc

SEQ ID NO: 140595 - DNA, 201 bp, Homo sapiens
agtcccagctacttgggaggctgaggcaggagaatggcgtgagcccaggatgtggagcttgcagtgagccgagatggcaccactgcactccacactgggcracagagcaagactccgtctcaaaaaaaaaaaggggggcggaggggggcaaaggagaagccaggcatggtggcttacacctataatcccagcactttgaga

SEQ ID NO: 140596 - DNA, 201 bp, Homo sapiens
catggtgaaaccccatctctactaaaaatacaaaaatcagccgggcatggtgatggctgcctgtaatcccagctactcaggaggatgaggcaggagaatcrcttgaacccacagggcagaggttgcagtgagccgagattgcacaacttcactcctgcctgagcgaaagagcgaaactctgtctcaaaaaaaaaaaaaaaa

SEQ ID NO: 140597 - DNA, 201 bp, Homo sapiens
cctctatttagtgcttcaactttagtacaattaatttctaaattatgccatagttattggtgcaaagatagacacatagaccagtggaaaagaacagagagtccagaaatagacgcacacatatacagtgggtcttacagatttccacaaaggcattattatgattcattaggaaaaagatggtcttttcaacaaatggtg

SEQ ID NO: 140598 - DNA, 201 bp, Homo sapiens
ggttcaaacaattcttctgcctcagccttccaagtagctgggactacaggcacgtgctaccaaaattagcctgactaatttcttgtatttttagtagagaycggttttcaccatgttagccaggatggtctcgatctcctgacctcatgatctgcccaccttggcttcccaaagtgctgggattacgggcatgagccaccc

SEQ ID NO: 140599 - DNA, 201 bp, Homo sapiens
ccctctatttagtgcttcaactttagtacaattaatttctaaattatgccatagttattggtgcaaagatagacacatagaccagtggaaaagaacagagagtccagaaatagacgcacacatatacagtgggtcttacagatttccacaaaggcattattatgattcattaggaaaaagatggtcttttcaacaaatggt

SEQ ID NO: 140600 - DNA, 201 bp, Homo sapiens
tacagaacagtcaagggcaggaatgaggagggcagaagagggacagggtgcaggtgggagatgactgccctattttatgaaaatggaaagcagtccagaaggagaaccgcgatgaccctgtccacccccgcgtgattgaagtggtggcggtgctggtgttatcaggtgtctgtacccttcacccagaaccagtccgctgga

SEQ ID NO: 140601 - DNA, 201 bp, Homo sapiens
atacagaacagtcaagggcaggaatgaggagggcagaagagggacagggtgcaggtgggagatgactgccctattttatgaaaatggaaagcagtccagaaggagaaccgcgatgaccctgtccacccccgcgtgattgaagtggtggcggtgctggtgttatcaggtgtctgtacccttcacccagaaccagtccgctgg

SEQ ID NO: 140602 - DNA, 201 bp, Homo sapiens
catacagaacagtcaagggcaggaatgaggagggcagaagagggacagggtgcaggtgggagatgactgccctattttatgaaaatggaaagcagtccagaaggagaaccgcgatgaccctgtccacccccgcgtgattgaagtggtggcggtgctggtgttatcaggtgtctgtacccttcacccagaaccagtccgctg

SEQ ID NO: 140603 - DNA, 201 bp, Homo sapiens
cagaattagctccacctaaaaagtggggggtggatttgataaagggatggaagacccatgccaccagaagggtggatgggaccttaaccagatactctagwgatactcagggacaaagagtgtatggagtctgagcacaaactcacagctatggtccatgctggggctggagatgggggtagggagcaaaggaacacctgg

SEQ ID NO: 140604 - DNA, 201 bp, Homo sapiens
aagactgctcattctctgacatggcttcccttcaaatgtagaggatatttcacaggtgtgtccccaccccaggcttctcttccttaagctaaacacccacrtcaccttctaagctggttttcagaccccacaagatcctttaatctgtcggttctactcttcacctcttggaagggagccagtgctgcaagactgtcggat

SEQ ID NO: 140605 - DNA, 201 bp, Homo sapiens
attccctgcatagttaatactctgcatttccacagtctccagttactctggtcattaccagtatgtggaagtgcatatgcttttgcctgttttgttcaacygtgtgtgtgtttttgaagaaacacatccagagactctaaggctttgttttggtaaattaaagcaacttaaattccaggtgttggcagtggcagttgtcta

SEQ ID NO: 140606 - DNA, 201 bp, Homo sapiens
atgtttgttgtaagggcagccacccatctgagatgtaaacgggaaaaactttgtgaaatttggaggttttgtctttaagattttttttcacagaagaaaaraaaaggtctctactattctatttgactacagtcaatggcatacctccaggttgaatctcagcagctctttaaatgcaacttccctgcataatactgagac

SEQ ID NO: 140607 - DNA, 201 bp, Homo sapiens
atcctttaatctgtcggttctactcttcacctcttggaagggagccagtgctgcaagactgtcggatctgtacagagcaggctggagccatatgcttacaygaaggtgaccaaaatggctggcttcttagctttctggcttcattgatgtcagggaggttgcgtggttaaataatgaaggaggagtgacaagcaagagcca

SEQ ID NO: 140608 - DNA, 201 bp, Homo sapiens
taacctttccctaaccacttccctgtatcatcttagtctaagagatttcaaacatggcaactccaaagacgcaggtcccagaagagctctctgagaccgcratttgggacccacactggtcaaaagaggaaaatcacagagcatcctttgtaaactcagccttctctcaggaaagtctttcttattataactgatattcct

SEQ ID NO: 140609 - DNA, 201 bp, Homo sapiens
ctcctgcccttcgttagttgggtactcaagagttggcagtgttttcccatctagaagctcatgctgcatattgacctgcaaaggtattagtccaggtaccratggcaacttttatgttatccatcaatcactttaatgagtacaagaaagcatcctatcaccctgccaaaagacagaggaattaagaatgactcatttatc

SEQ ID NO: 140610 - DNA, 201 bp, Homo sapiens
aattcactgggcatggtggcgcatacctgtaatctcagctacttgggaggctaaggcaggagaatcacttgaacccaagaggcggaggttgcagtaagccragatcacaccaatgcactccagcctgggcgacagagcaagactccatctccaaaaaaaaaaacttaaaactaaaggaaaatattatttgtttgctactgc

SEQ ID NO: 140611 - DNA, 201 bp, Homo sapiens
caggctagagtacagtggcacgatcttggctcactgcaacctccacctcccaggctcaagcgattctcccacctcggcctcccaagtatctaggactatargcatgcacatccacacagggctgttgcccaggctggtcttgaactcctggactcaagagatctgcccacctcagcctcccaaagtgctgtgactacggca

SEQ ID NO: 140612 - DNA, 201 bp, Homo sapiens
gaccataaacagcctagaaagatagaaatctcaataatgagaagtttctgtaatgtgtggctcctgcccaccttctctctgcttatttgctgtcttttttktttgtttgtttttttagagatagggccttctctgtcacccaggctggagtgcagtggtgacatcatggctcactgaagcctcaaactcctggagtcaagc

SEQ ID NO: 140613 - DNA, 201 bp, Homo sapiens
agaggaagtagaaaaagctccctcaaacataagctgaatatttatgtggtttttgtttttatttaaaccaacctctttagaaaattactttcttaataagrcattatacaatgaatttttccagtcattttgagggaaaaatatggtactctgggagaacttctagaagaaagaggaaagactcacttaagattcccagga

SEQ ID NO: 140614 - DNA, 201 bp, Homo sapiens
acccccaaacctaaaataaaagtttttttttattaaaatttaaatttaaaaaaagagataggggtctcaccatgtttcccaggctggtctcgaacttctgkcctcaagcaatctttccatctcagcctcccaatgtgctgggattacaggcatgagccactgcaccaagcctaggacatttttaataatcacctcccttac

SEQ ID NO: 140615 - DNA, 201 bp, Homo sapiens
taatacctgggtgatgaaacaatctgtacaacagacccccgtgacacaaatttacctatgtaacaaaccttcacatgtacccccaaacctaaaataaaagkttttttttattaaaatttaaatttaaaaaaagagataggggtctcaccatgtttcccaggctggtctcgaacttctggcctcaagcaatctttccatctc

SEQ ID NO: 140616 - DNA, 201 bp, Homo sapiens
acctgctttaagtaggtttcttgcaggtgcttcttaaaagctgtggggggtttccagagcttggcagcatgcctgttcaacgagctatcaatgttgggttygcctcgaaggctgtggatggagagcaggatggtcctgacatcatacagggcagaccacttgtccttcaggatgtccaggcagatattaccctgggtgtcc

SEQ ID NO: 140617 - DNA, 201 bp, Homo sapiens
agcagatcacttgaggccaggagttcaagacaagactggccaacatggcaagaccccgtctccactaaaaataccaaaattagccaggcgtggtggcacgmacctgtaatcccagctactcgggaggctgagacaggagaatcgcttgaacttgggaggtggaggttgtagtgagctgggattgctccactgcactccagc

SEQ ID NO: 140618 - DNA, 201 bp, Homo sapiens
taactttttaacaccttcagaggcaggagaaaatggtgggtggggggaatgtttttatttgggattagaggtaaattttcaggccggacgaggtggctcaygcctgtaatcccagcactttgggaggcagaggcaagcagatcacttgaggccaggagttcaagacaagactggccaacatggcaagaccccgtctccact

SEQ ID NO: 140619 - DNA, 201 bp, Homo sapiens
ttatctggactttatttttctacttgtcaaattctctttagctttttttagctgttgtgttgacctcttctatctctaaaaggcatttggttattttttttaatgtttttgcttcactgaagcttagtgtgctttttatggttttatggttaccttgcagaaatctcattagaaaagcactttaatatattacttggcaat

SEQ ID NO: 140620 - DNA, 201 bp, Homo sapiens
ccctgcctcaaaaaaaaaaaaaaaaaaaagaaaagaaaaaaaaaaaagaaaagttctaagatcatagactttaaatgttgttaccacacacacaaagaagygtatgaggtaatgcatatgttaaatagcctgatttagccattccaaaatgtctacatgcatcagaacatcatgttgtataccatatatatacaattttca

SEQ ID NO: 140621 - DNA, 201 bp, Homo sapiens
gacgccccccaaggacatctggaatgtcactggtgcccaggtgtacttgagctgtgaggtcatcggaatcccgacacctgtcctcatctggaacaaggtcwgtggcacagactttaagagacatcctaggctgacaagcttctcttgcactgcacaaggatggtaaaacgttaaatcctcagcctgctttgttgactgcgg

SEQ ID NO: 140622 - DNA, 201 bp, Homo sapiens
gcctggcgagtggtctttactttccttactggtagtaaggaaagctggctttaacaagccccatacctttcagcaaactcctagcctagaaagattcgaarggcaatattttgaaatgggaacgtgaactgaaatagccatatttgacttaacccttttaaatcaaagatgatgctcacagcgaaagcaaaacaccttccc

SEQ ID NO: 140623 - DNA, 201 bp, Homo sapiens
tctcttaaactatacagctttgagatggaatgattaagctgagcaggcatttgttaacatcctgaaatacgatttccatcctgtccctagagcctgccctyggggtccactgtagactggccttctagaagaaaccgccttataaggctctcttggatagttcagtgacagaacacccttggatggagtccaaggccagct

SEQ ID NO: 140624 - DNA, 201 bp, Homo sapiens
  misc_feature (1)...(201): n = A,T,C or G
tcccgacacctgtcctcatctggaacaaggtctgtggcacagactttaagagacatcctaggctgacaagcttctcttgcactgcacaaggatggtaaaangttaaatcctcagcctgctttgttgactgcggctcccgcaaggtgaagccttagggcagtcatacaggcccctcccctggattcatggaacaaaaaccag

SEQ ID NO: 140625 - DNA, 201 bp, Homo sapiens
tatgaatcccctggtcatcttaggaaatttatgaaataatgacctcactggaaccactgacaaaagagaagaccaccacagaggaatactagatctttttyctttcacaggtatctcctctaagtaaggaagatgctggagaatatgagtgccatgcatccaattcccaaggacaggcttcagcatcagcaaaaattacag

SEQ ID NO: 140626 - DNA, 201 bp, Homo sapiens
cacaaatgggctgtggccatggaggtggtggtggtgacagtggaattggcatctgggttggcttgtagcctggcctgtaactgtagttgtggaagcttagmgggctgtttgaagaggcccctcctagtctgacctcatgagccagagacactagtaatcttgggcagttctggggcattttgttgttatttatttatttat

SEQ ID NO: 140627 - DNA, 201 bp, Homo sapiens
aggcaggtacttcagtcatacacagatattcaggtagctccttgatgacctgtctacccaccacattcctctgccttgtgtctaccttttttttcaaatgygaaaattatctggactttatttttctacttgtcaaattctctttagctttttttagctgttgtgttgacctcttctatctctaaaaggcatttggttatt

SEQ ID NO: 140628 - DNA, 201 bp, Homo sapiens
ttgagtataacttgagtaggggccaggtaggggcagcattgtgggattcagccacaatggtgtgattcaatctgccctctggtctttggttccatttaacrtgcatttattgagcagctaacttgagtcagcactgtactaggtgctatataccagggatgtacaaaacagatttgatgttgctgattaagaaagtatctg

SEQ ID NO: 140629 - DNA, 201 bp, Homo sapiens
gaaccctaccatgctcgcaccctgatcttggacttcccattcaatacacttcagatgcttaagccaccaggtccatggtatttgttatagcagcccaggcygactgagacaagagccttggtattcgagatttttatatcgtattcctgaattctcgaaagttctgaaaataaagagatgttcatagggcccatatatagt

SEQ ID NO: 140630 - DNA, 201 bp, Homo sapiens
tgggatgtgaattttagcaatgcaaaatgccacgtatcacctgcaatttgtttttttaaaacacacacacacacaccaaaaaagggaaatcacaagacaayataaacctcgcttgaagaaacgatcgtgtttaacaagacagcaaagagaaatactctgagttgagccaagtagatgtgtgctgcttttgtagatggaata

SEQ ID NO: 140631 - DNA, 201 bp, Homo sapiens
ccatctacaagccaagaagtgggcctccccagaaccctaccatgctcgcaccctgatcttggacttcccattcaatacacttcagatgcttaagccaccargtccatggtatttgttatagcagcccaggctgactgagacaagagccttggtattcgagatttttatatcgtattcctgaattctcgaaagttctgaaaa

SEQ ID NO: 140632 - DNA, 201 bp, Homo sapiens
ctttcttctcttcaagtgtcagttcagctgatgtactggctcagaccataaccctttcccaaggactaggtaaacctggattactttctacctcttccccyttgttgacaagcagctggtgtttgtgaaaaagcattgtcttagtgcttgaagtctgctgccttagccaagttcagagatccattcattatctttgaagtg

SEQ ID NO: 140633 - DNA, 201 bp, Homo sapiens
accatccccatagcctgtgtgagcatgaagcgaggacccccgggtgggctgtgccctgggcttgtcactgatgccagtggaggctggcacctgcccctctyggcacctgagacagtgagggaaggtagctgctgccgtgaagaacaaagatgctctgagcacacacttgctggggctgagctgaggggcacacggaggcag

SEQ ID NO: 140634 - DNA, 201 bp, Homo sapiens
ggagcggcctcaggaccgggacaacatggtgctcattgacagtgacgacgagagcgactccggcatggcctcccaggccgaccagaaggaggaggagctgmtggtgcgcgtgcaggccccacggggggccagggggcgggggcgaggcctgcaggtgcctgacgggggctggcctgtgtccgcagctcttctggacgtaca

SEQ ID NO: 140635 - DNA, 201 bp, Homo sapiens
gtcctgtgctctcgctgctcacctgcctgccagggtggggtggggcaggtggctctgggagcccctttctcactggtaccaggtggcagagcccacgggcmtgagcgccctgcagccgagctgcccgtgctgaccctggccctccttaggccatgcggaccctcagttggaagcacaccctgggcctggtgaccatggacg

SEQ ID NO: 140636 - DNA, 201 bp, Homo sapiens
ttggcttgtggccgcgttgctccaggtggtctctgtcttcgtgtggccccctccccgcctgcctgtgtcttcctgtctttccttttcttagaaggaccccrgtcagttgggttaggatgcacctcagttacatctgcatcaaccctgtttgcaaatatggccacatttccaagcactgggggtcaggaggcccctgtagcc

SEQ ID NO: 140637 - DNA, 201 bp, Homo sapiens
gtgtttgccacagcccttggtgtttcttggcttgtggccgcgttgctccaggtggtctctgtcttcgtgtggccccctccccgcctgcctgtgtcttcctrtctttccttttcttagaaggaccccggtcagttgggttaggatgcacctcagttacatctgcatcaaccctgtttgcaaatatggccacatttccaagca

SEQ ID NO: 140638 - DNA, 201 bp, Homo sapiens
ctcatcagctgcaggtcccacttcgcacccaacagcagagcagcagccagccaagctctctgctgcctcctccggttcccagtagcacggtcatttccatstgagacctcactggaagcacctgttgggtcggcattgctgccgacatccagtctgtgatgctgtgtgcattctccaagacggcggcagctctcctcttcc

SEQ ID NO: 140639 - DNA, 201 bp, Homo sapiens
ggcggcgtttgtggaggtcatggccttggagccagaactaggacctagcaagccactgactccacttccattttctgtccataaagaggggtttgtttccrttagaagctgccggatcctggaaggactcaggagcccttggcccacagagcaggtgtgtcagtgccccagtgctaccagaacaaagtaccacaaaccagc

SEQ ID NO: 140640 - DNA, 201 bp, Homo sapiens
gggtccaagggggaagtggggtggggaactgcctgtgggtgagtgccaggggcctgctgggtggtggccatctgcgacccggcagggggctgtgcagattytgcacctggccattccctgtcctgtctcctcagcctgcctcacagtggccatggggtgtcggggtgaagggctgtcccagctacttgtcctctgcaggac

SEQ ID NO: 140641 - DNA, 201 bp, Homo sapiens
actgcagcctcgaacttgtaggcgcaagtgatcctcctgcctcagcctcttgagtagcagggactatagatgaacaccaccatgcctggctaacttaaaaaatatttttttggctgggcttggtggcagacacctgttaatcccagcactttgggaggctgaggtcagtggactgcttgagctgaagagtttaagacaagc

SEQ ID NO: 140642 - DNA, 201 bp, Homo sapiens
cactgcagcctcgaacttgtaggcgcaagtgatcctcctgcctcagcctcttgagtagcagggactatagatgaacaccaccatgcctggctaacttaaaaaatatttttttggctgggcttggtggcagacacctgttaatcccagcactttgggaggctgaggtcagtggactgcttgagctgaagagtttaagacaag

SEQ ID NO: 140643 - DNA, 201 bp, Homo sapiens
ccctccccaaccagctgcaccgcaagtctgtcaagaaggggtttgacttcacgctaatggtggcaggtctgggggttttggagagggaactgcggaggggwtgtccttaggaggccctggctgtcccctcccctgaccagttgggcctgttctgtccacaggggagtcaggcctagggaaatccaccctcatcaacagcct

SEQ ID NO: 140644 - DNA, 201 bp, Homo sapiens
tgctgtgaaaatgcaatcttaccgcccattaccacaatcttaactactcccttacctctggcagtgcctaacccttcgtaggaatttttgggtttttgttygttttgagacagggtctcaccctgtcgcccaggctggaatgcagtggtttgatcacggctcactgcaacctggaactcttgggctcaagggatcttcctg

SEQ ID NO: 140645 - DNA, 201 bp, Homo sapiens
atgagaacatagtgacttccctctggcccccaccccgtgtcttcagagccctttcccactgtttctgcttatatctctctcggcctctctttctctctctytttttttttagatagagtctcactctgtggcccaggctgcagtacagtggcaagatcagagctcactgcagcctcgaacttgtaggcgcaagtgatcctc

SEQ ID NO: 140646 - DNA, 201 bp, Homo sapiens
ggtctgggaaaaggcagccggggccttggacccaggacactccactcacccttgagcttctccccgaacatggtcaggaagacggtgaagttgatgggacygctggcttccttcatcatggcatccaactcctcattcttcacattgaggcggcctggagggggttgggggaagcatgggctggagcaggctcctggggcc

SEQ ID NO: 140647 - DNA, 201 bp, Homo sapiens
gtgcagtgatggctggcggagtcatggtgagtccttacacccagaaacctgggcatctcggcccccagcccccatgcctggggtccccagaccccactgaytcttcctagcccaggaactcaagtgatcctggggaccctgcctgccattgccagcagcctcatattgtccacccccatccataggacaaggagtacgtgg

SEQ ID NO: 140648 - DNA, 201 bp, Homo sapiens
aggattgtaccaacatgcctggctaattttttaatgttttgtagagatggtagaggggcacgtccctctgttgcccaggctggtctggaactccttggctyaagctgtcctccctcctccgcctcccaaagtgctgagattacaggcgagagccaccttgcccgtcctgggaactgttttctaatcagctcatcaaaacct

SEQ ID NO: 140649 - DNA, 201 bp, Homo sapiens
ccaggaactcaagtgatcctggggaccctgcctgccattgccagcagcctcatattgtccacccccatccataggacaaggagtacgtgggttttgctgcyctccccaaccagctgcaccgcaagtctgtcaagaaggggtttgacttcacgctaatggtggcaggtctgggggttttggagagggaactgcggaggggat

SEQ ID NO: 140650 - DNA, 201 bp, Homo sapiens
ctcagagcctccccggatccctgacctctcccccatcccacagctcgcttgacacagaccctggccattgagcgccggggcgtagagattgaggaaggggktgtgaaagtgaagctgacccttgtggacacacctggctttggggactcagtggactgctctgactggtgaggaagaggaaaggggacagaggctcagcct

SEQ ID NO: 140651 - DNA, 201 bp, Homo sapiens
ggagtgcagtggtgtgatcttggctcactgcaacctgcgcctcctgggttcaagtgattcttgtgcctcagcctcccaagtagctgggattacaggcacgygccaccacacccaactaatttttgtatttttagtagagacggggtttcaccatgttggccaggatggtctcgatctcctgaccttctgatctgcctgcct

SEQ ID NO: 140652 - DNA, 201 bp, Homo sapiens; identical to SEQ ID NO: 25369

SEQ ID NO: 140653 - DNA, 201 bp, Homo sapiens
ctgcagcctcgaacttgtaggcgcaagtgatcctcctgcctcagcctcttgagtagcagggactatagatgaacaccaccatgcctggctaacttaaaaaatatttttttggctgggcttggtggcagacacctgttaatcccagcactttgggaggctgaggtcagtggactgcttgagctgaagagtttaagacaagcc

SEQ ID NO: 140654 - DNA, 201 bp, Homo sapiens
ccctcccctgaccagttgggcctgttctgtccacaggggagtcaggcctagggaaatccaccctcatcaacagcctcttcctcaccaacctctatgaggaycgccaggtgccagaggccagtggtaagaccctccccaccctcttgaggcagtagcccctgtccccaggttacaccctagtcttttccatctggggactca

SEQ ID NO: 140655 - DNA, 201 bp, Homo sapiens
tgccctccccaaccagctgcaccgcaagtctgtcaagaaggggtttgacttcacgctaatggtggcaggtctgggggttttggagagggaactgcggaggrgatgtccttaggaggccctggctgtcccctcccctgaccagttgggcctgttctgtccacaggggagtcaggcctagggaaatccaccctcatcaacagc

SEQ ID NO: 140656 - DNA, 201 bp, Homo sapiens; identical to SEQ ID NO: 25379

SEQ ID NO: 140657 - DNA, 201 bp, Homo sapiens
aaaaagaatttgtgataatcatttagaaaattagcaaacgactgccaggcgcggtggctcacacctgtaatctcagcactttgagaggctaaggcgggtgkatcacctgcggtcgggagtttgagaccagcctgaccaacatggagaaaccttgtctctactaaaaatacaaaattagccaggagtggtggtgggcacctg

SEQ ID NO: 140658 - DNA, 201 bp, Homo sapiens
tttgctggacttggaaaagtgactggaagggagcagagttccgtcagccactgccaagaaaccatttaaattactaagagagcgaaggaaagcacgtgacrttctgcaatcccgttgcaagcggttttgcaagccggaggttgttgcaccttttagagtctaggaagcccgcctctcggtggcggagtcgtcattggatgt

SEQ ID NO: 140659 - DNA, 201 bp, Homo sapiens; identical to SEQ ID NO: 25380

SEQ ID NO: 140660 - DNA, 201 bp, Homo sapiens
cgcctggttcttggcgctggttttcccgccgctgacccagcgcacttacatgtcggagaacgccatgggctccaccatggtggaggagcagtttgcgggcggagaccgtgcccgggcttttgcccgggacttcgccgcccaccgcaagaagtcggggtgagcggcagagcagggcgtatggggcgagcagtggtggctaag

SEQ ID NO: 140661 - DNA, 201 bp, Homo sapiens
tcgcctggttcttggcgctggttttcccgccgctgacccagcgcacttacatgtcggagaacgccatgggctccaccatggtggaggagcagtttgcgggcggagaccgtgcccgggcttttgcccgggacttcgccgcccaccgcaagaagtcggggtgagcggcagagcagggcgtatggggcgagcagtggtggctaa

SEQ ID NO: 140662 - DNA, 201 bp, Homo sapiens
cagctgcacccacgctcccagattgatatctatgtgcaggtgagccagctgcagccgtcaatccagggagggaagggtgtgatggggttggggagggagtstgatagactgacaccctgggttccctgcaggtgctacaggcagatggtgggacctatgcagcttgtgtgaatgcagccacgctggcagtgctggatgccg

SEQ ID NO: 140663 - DNA, 201 bp, Homo sapiens; identical to SEQ ID NO: 25383

SEQ ID NO: 140664 - DNA, 201 bp, Homo sapiens
aaagttacactgaggctccccccaccgatgctgcatacagatggtgtcgggcaccaacgtgtacggcatcctgcgggccccgcgtgctgccagcaccgagkcgcttgtgctcaccgtgccctgtggctctgactctaccaacagccaggctgtggggctgctgctggcactggctgcccacttccggggtgagtctcaggg

SEQ ID NO: 140665 - DNA, 201 bp, Homo sapiens; identical to SEQ ID NO: 25384

SEQ ID NO: 140666 - DNA, 201 bp, Homo sapiens; identical to SEQ ID NO: 25386

SEQ ID NO: 140667 - DNA, 201 bp, Homo sapiens
gcctggttcttggcgctggttttcccgccgctgacccagcgcacttacatgtcggagaacgccatgggctccaccatggtggaggagcagtttgcgggcggagaccgtgcccgggcttttgcccgggacttcgccgcccaccgcaagaagtcggggtgagcggcagagcagggcgtatggggcgagcagtggtggctaagg

SEQ ID NO: 140668 - DNA, 201 bp, Homo sapiens
ctgacggctcggcctacattgagcagggcaacaccaaggcactggctgtggtctacggcccgcacgaggcgagtgggcgcgcgggatggggaatcgtgtgsccgtgggagctgcggggcagccgggctgagcgctggctcggggacttgaggggcaacggccggcgcgcctcagtctacacagccgatgctcagcaccgca

SEQ ID NO: 140669 - DNA, 201 bp, Homo sapiens; identical to SEQ ID NO: 25387

SEQ ID NO: 140670 - DNA, 201 bp, Homo sapiens; identical to SEQ ID NO: 25388

SEQ ID NO: 140671 - DNA, 201 bp, Homo sapiens
gtgtgctggagcaccacacctacggcgccctgctcttcccactgctgtccctgggcctctacccctgctggctgcttttctggaatgtgctcttctggaadtgagatctgcctgtccgggctgggacagagactccccaaggaccccattctgcctccttctggggaaataaatgagtgtctgtttcagcagctatttgag

SEQ ID NO: 140672 - DNA, 201 bp, Homo sapiens; identical to SEQ ID NO: 25381

SEQ ID NO: 140673 - DNA, 201 bp, Homo sapiens
atcctcacacagctgcacccacgctcccagattgatatctatgtgcaggtgagccagctgcagccgtcaatccagggagggaagggtgtgatggggttggrgagggagtctgatagactgacaccctgggttccctgcaggtgctacaggcagatggtgggacctatgcagcttgtgtgaatgcagccacgctggcagtgc

SEQ ID NO: 140674 - DNA, 201 bp, Homo sapiens; identical to SEQ ID NO: 25382

SEQ ID NO: 140675 - DNA, 201 bp, Homo sapiens; identical to SEQ ID NO: 25385

SEQ ID NO: 140676 - DNA, 201 bp, Homo sapiens
tgtggcaatgagctcatgttcctgggactcactgtctcccaaacccttgtcagcccaacggaatagtggcacagtctgctgaaggccctgccccactgccwgctggatgtcagccccttccagggaggggcacttctgctgggatacggcctgtgctgctgtaaggagttggcgctcgagaaacaggctcaccaggaatct

SEQ ID NO: 140677 - DNA, 201 bp, Homo sapiens
ctactgtgtggcaatgagctcatgttcctgggactcactgtctcccaaacccttgtcagcccaacggaatagtggcacagtctgctgaaggccctgccccrctgcctgctggatgtcagccccttccagggaggggcacttctgctgggatacggcctgtgctgctgtaaggagttggcgctcgagaaacaggctcaccag

SEQ ID NO: 140678 - DNA, 201 bp, Homo sapiens; identical to SEQ ID NO: 25389

SEQ ID NO: 140679 - DNA, 201 bp, Homo sapiens; identical to SEQ ID NO: 25390

SEQ ID NO: 140680 - DNA, 201 bp, Homo sapiens; identical to SEQ ID NO: 25395

SEQ ID NO: 140681 - DNA, 201 bp, Homo sapiens; identical to SEQ ID NO: 25396

SEQ ID NO: 140682 - DNA, 201 bp, Homo sapiens; identical to SEQ ID NO: 25397

SEQ ID NO: 140683 - DNA, 201 bp, Homo sapiens; identical to SEQ ID NO: 25398

SEQ ID NO: 140684 - DNA, 201 bp, Homo sapiens; identical to SEQ ID NO: 25399

SEQ ID NO: 140685 - DNA, 201 bp, Homo sapiens; identical to SEQ ID NO: 25400

SEQ ID NO: 140686 - DNA, 201 bp, Homo sapiens; identical to SEQ ID NO: 25401

SEQ ID NO: 140687 - DNA, 201 bp, Homo sapiens; identical to SEQ ID NO: 25402

SEQ ID NO: 140688 - DNA, 201 bp, Homo sapiens; identical to SEQ ID NO: 25403

SEQ ID NO: 140689 - DNA, 201 bp, Homo sapiens; identical to SEQ ID NO: 25404

SEQ ID NO: 140690 - DNA, 201 bp, Homo sapiens; identical to SEQ ID NO: 25405

SEQ ID NO: 140691 - DNA, 201 bp, Homo sapiens; identical to SEQ ID NO: 25406

SEQ ID NO: 140692 - DNA, 201 bp, Homo sapiens; identical to SEQ ID NO: 25407

SEQ ID NO: 140693 - DNA, 201 bp, Homo sapiens; identical to SEQ ID NO: 25408

SEQ ID NO: 140694 - DNA, 201 bp, Homo sapiens; identical to SEQ ID NO: 25409

SEQ ID NO: 140695 - DNA, 201 bp, Homo sapiens; identical to SEQ ID NO: 25410

SEQ ID NO: 140696 - DNA, 201 bp, Homo sapiens; identical to SEQ ID NO: 25411

SEQ ID NO: 140697 - DNA, 201 bp, Homo sapiens; identical to SEQ ID NO: 25412

SEQ ID NO: 140698 - DNA, 201 bp, Homo sapiens; identical to SEQ ID NO: 25413

SEQ ID NO: 140699 - DNA, 201 bp, Homo sapiens; identical to SEQ ID NO: 25414

SEQ ID NO: 140700 - DNA, 201 bp, Homo sapiens
tcggcgtatggagtctcgaacccgaggatttgtctgccgtcacgatggagcggtttgaacctcagattaatgctgaggaaagtgaaattcgttattctacrtggaagaaagctgtgatgaagtcaatgggttgggttacaactcaatctccagaaagtggtgaccctagtatcttctgtagtctgcccttgggctttttta

SEQ ID NO: 140701 - DNA, 201 bp, Homo sapiens
caagctcagtcaggtactggcaagacagccacatttgctatttccatcctgcaacagttggagacccaagcactaatgctggcccccaccagagaactggytccacagatccaaaaggtaattctggcacttggagactatatgggagcaacttgtcatgcctgcattggtggaacaaatgttcaaactgaaatgcaaaaa

SEQ ID NO: 140702 - DNA, 201 bp, Homo sapiens
gtatttgagtctcagaggcataaaaaaacacacagggaggatggattccaaagtccttagtggggtcctaggaagggatggaggaaagagcagggggaggkgggagaaggagggacaccacagcccttaaggctagcgcacatctcactgcgcatgctatttgggcgcccacctcagtgcacatgttcactgggcgtcttc

SEQ ID NO: 140703 - DNA, 201 bp, Homo sapiens
agtcaggtactggcaagacagccacatttgctatttccatcctgcaacagttggagacccaagcactaatgctggcccccaccagagaactggctccacakatccaaaaggtaattctggcacttggagactatatgggagcaacttgtcatgcctgcattggtggaacaaatgttcaaactgaaatgcaaaaactgcagg

SEQ ID NO: 140704 - DNA, 201 bp, Homo sapiens
gcggggagactccaacttccgcctctgtttctggggttgcatgtccccgggccaggtggggagcccagagcctcaatcccagaagctgcctggccttccgyccccagatcgggagaatgaactggccaccaccactggctccctgcagactttctcaagacccttccctccctttccaggctggaacccaggtgaacgagg

SEQ ID NO: 140705 - DNA, 201 bp, Homo sapiens
aggaggtggaggttgcagtgagatcacgccactgcactccagcctggtgctccgtttaaaaaaaaaaaaaaaaaaaaaaggatgcttctcggacccgcctmaacgcacgccttcttttctcacccagcctcctccgtctgcccgtgggtttccgtccgtcccgctgggactcagcgctgggtgactgccccgcggccagag

SEQ ID NO: 140706 - DNA, 201 bp, Homo sapiens
gttactcctctccctcccattcctcagatgatgctcagcgcccttcatcagcagcccccccgggggtcccactccacagtttccaaagccctctccatccrcctcctttaaactctctgacatcccagggaagcggattatctctgcagttcccattttacatttgggaaacccagggcttggagaggccatgtgcaccac

SEQ ID NO: 140707 - DNA, 201 bp, Homo sapiens
tccgtgcccccagctcccgcccctgcagaggatccccccgcgggcgaccggtgagcgtcggtggcgctggggtcccgggttgcgtgtgcgccgggggccgsgagggtgcgggaggactgggcagcgcgcgagcttgtgtgtgcacacgcgtgtcagcaccggctgggggagcgtgtgcacgggtgtgcgcggtgagggtgt

SEQ ID NO: 140708 - DNA, 201 bp, Homo sapiens
ctctgtctatggagtagctgtcctttcaccactgtactttcttaataaacgtgcttttcctttgcactgcagactcaacctgaattctctcttgtgcaagrtccaagaaccctctcttggggtctggatcgggacccctttcctgtaacatgccttctgtcagaggaagattatgggactcagaatgtcagataactcccc

SEQ ID NO: 140709 - DNA, 201 bp, Homo sapiens
agctgtcggggctccctcccgtcgcggctccgctataaaacccaggccggcaggatcgctgcacccgcggcggcctcctcggtgcgcgacccccggctcasaggactctttgctgtcccgcaagatgcggatgctgctggcgctcctggccctctccgcggcgcggccatcggccagtgcaggtgagctcccgggctccgg

SEQ ID NO: 140710 - DNA, 201 bp, Homo sapiens
caaaaccccttcctccttcaagacctctgcgggtggggacatgggatgattatggcaaggaactgtcatggtgcaaatgccctctgatttattatctcctyagtcaccagcactgggaatttggtggctgcacctgtcagaggcgtttgaaccagagtgactccattttgggtgagagctaggaaaatgaggccgagattt

SEQ ID NO: 140711 - DNA, 201 bp, Homo sapiens
tcagaagtccctagcccaggttcgaaggtcggtagggactgagaggttggcagcggatggggagtggctaaaccagaaaaagggggcttcctgttgatggrttgatggaggaggtccaggtccactgcctggttccccgtccctctcccgcaccccagcctgagcttcccaaactcccacagaagcccccaccccatgtgg

SEQ ID NO: 140712 - DNA, 201 bp, Homo sapiens
ccgtcccgctgggactcagcgctgggtgactgccccgcggccagagcaagggcggtgtggcagggtcctggaagccgcgcttcccacacgggttccttgcscctgagggtcgcaagctcccctggcctccctaacctccagcgctgaattgggagcctggcgggggcggggggtgggggacccggagccccaaggcctctg

SEQ ID NO: 140713 - DNA, 201 bp, Homo sapiens
cgggagctgcatctgaacctcatgttcccaggtttacagtcagggctctcctccttgcccttgggagcccaggaagagcctggatgtgccagggcccctcbccagtgctaactcaatgttccatcccacccaatgctgcctccacacctgcctagggtcagatttaatccagctaaggggactctgcttagaggtcatggc

SEQ ID NO: 140714 - DNA, 201 bp, Homo sapiens
ttcttttctcacccagcctcctccgtctgcccgtgggtttccgtccgtcccgctgggactcagcgctgggtgactgccccgcggccagagcaagggcggtstggcagggtcctggaagccgcgcttcccacacgggttccttgcgcctgagggtcgcaagctcccctggcctccctaacctccagcgctgaattgggagcc

SEQ ID NO: 140715 - DNA, 201 bp, Homo sapiens
tgtccaaaataacgggcactcaggtgggctggatggaggccccaggcaggcctgggcacccgagttccccaaggactgagaggatggggctcctcccaggwgggtgtgccagacccaggcccatctgtgctgtgaggtggctgaaaatcccatgggggaggacagcttccaggaggagagagcactctagtatgttttcgt

SEQ ID NO: 140716 - DNA, 201 bp, Homo sapiens
cctgctcagtgccagtcaagtggggtggaaactgccagaaggaccgccagtcccccatcaacatcgtcaccaccaaggcaaaggtggacaaaaaactgggrcgcttcttcttctctggctacgataagaagcaaacgtggactgtccaaaataacgggcactcaggtgggctggatggaggccccaggcaggcctgggcac

SEQ ID NO: 140717 - DNA, 201 bp, Homo sapiens; identical to SEQ ID NO: 25424

SEQ ID NO: 140718 - DNA, 201 bp, Homo sapiens; identical to SEQ ID NO: 25421

SEQ ID NO: 140719 - DNA, 201 bp, Homo sapiens
aatggagaccccggaagagtgggaaggggaggggtgatggtggcttcccaggcagatatcagttcccagcatacacacacacacacacacacacacacacwctctctctctctctcacacacacacacacacagatatacaaacacacacactcacacagaaacacacacacaacacacacacaagcacacactcaaacac

SEQ ID NO: 140720 - DNA, 201 bp, Homo sapiens
caaccctgaggctctgagcttgtgtgtgtgttggggtgggaagaggcaaggaagctagtggctccatgggcatggaggcatgctccctgctctgggcctcrgttcatccatctgcagaaggggctacccttggtccccccatctaattgggcaaggctgtcccgggctcctgctgtccccggtgacctcagaaggaaggcc

SEQ ID NO: 140721 - DNA, 201 bp, Homo sapiens
agatcacgccactgcactccagcctggtgctccgtttaaaaaaaaaaaaaaaaaaaaaaggatgcttctcggacccgcctcaacgcacgccttcttttctmacccagcctcctccgtctgcccgtgggtttccgtccgtcccgctgggactcagcgctgggtgactgccccgcggccagagcaagggcggtgtggcagggt

SEQ ID NO: 140722 - DNA, 201 bp, Homo sapiens
gcactctagtatgttttcgttacttttgtcagaccagtctgggatgtgggggcaggaaacgttccaggaagaaggacatgtgcaaaggcgcggaggcatgsaacagctcggcgtgttcagaggactgccaggagctctgtgtggaggaaggacagacagtgaagccaggcagagcccaagcaaggcccaggggcagctggg

SEQ ID NO: 140723 - DNA, 201 bp, Homo sapiens
tgcagtgagatcacgccactgcactccagcctggtgctccgtttaaaaaaaaaaaaaaaaaaaaaaggatgcttctcggacccgcctcaacgcacgccttyttttctcacccagcctcctccgtctgcccgtgggtttccgtccgtcccgctgggactcagcgctgggtgactgccccgcggccagagcaagggcggtgtg

SEQ ID NO: 140724 - DNA, 201 bp, Homo sapiens; identical to SEQ ID NO: 25483

SEQ ID NO: 140725 - DNA, 201 bp, Homo sapiens; identical to SEQ ID NO: 25484

SEQ ID NO: 140726 - DNA, 201 bp, Homo sapiens
aagtagcttggactacaggggtgtaccaccatgcccggctaattacatgtgccagattcaacccacgttccagggttccaaacaaccaaggctctatcatmctgtcttaacaaatataccttcataaagacctggaaggcaggttgaaatgtggaattcttggacttctttcagttctacgtagaagggtagcagtggaga

SEQ ID NO: 140727 - DNA, 201 bp, Homo sapiens
tgtttagtggcatcagccctaatccatctgatgctttttcattattaggcatgttggagacttgggcaatgtgactgctgacaaagatggtgtggccgatrtgtctattgaagattctgtgatctcactctcaggagaccattgcatcattggccgcacactggtggtaagttttcataaaaggatatgcataaaacttct

SEQ ID NO: 140728 - DNA, 201 bp, Homo sapiens
tatatgtgtatgttttctgaaagcctttcagaaaaatattaaatttaaggacaagatttttatatcagaggccttgggacatagctttgttagctatgccrgtaattaacaggcataactcagtaactgagagtttaccctttggtacttctgaaatcaggtgcagccccatctttcttcccagagcattagtgtgtagac

SEQ ID NO: 140729 - DNA, 201 bp, Homo sapiens
tttttacaggtccatgaaaaagcagatgacttgggcaaaggtggaaatgaagaaagtacaaagacaggaaacgctggaagtcgtttggcttgtggtgtaaytgggatcgcccaataaacattcccttggatgtagtctgaggccccttaactcatctgttatcctgctagctgtagaaatgtatcctgataaacattaaac

SEQ ID NO: 140730 - DNA, 201 bp, Homo sapiens
aaattttttacaggtccatgaaaaagcagatgacttgggcaaaggtggaaatgaagaaagtacaaagacaggaaacgctggaagtcgtttggcttgtggtrtaattgggatcgcccaataaacattcccttggatgtagtctgaggccccttaactcatctgttatcctgctagctgtagaaatgtatcctgataaacatt

SEQ ID NO: 140731 - DNA, 201 bp, Homo sapiens
ttcttaaaattttttacaggtccatgaaaaagcagatgacttgggcaaaggtggaaatgaagaaagtacaaagacaggaaacgctggaagtcgtttggctygtggtgtaattgggatcgcccaataaacattcccttggatgtagtctgaggccccttaactcatctgttatcctgctagctgtagaaatgtatcctgata

SEQ ID NO: 140732 - DNA, 201 bp, Homo sapiens
atcttcttaaaattttttacaggtccatgaaaaagcagatgacttgggcaaaggtggaaatgaagaaagtacaaagacaggaaacgctggaagtcgtttgrcttgtggtgtaattgggatcgcccaataaacattcccttggatgtagtctgaggccccttaactcatctgttatcctgctagctgtagaaatgtatcctg

SEQ ID NO: 140733 - DNA, 201 bp, Homo sapiens
ggtttgcgtcgtagtctcctgcagcgtctggggtttccgttgcagtcctcggaaccaggacctcggcgtggcctagcgagttatggcgacgaaggccgtgkgcgtgctgaagggcgacggcccagtgcagggcatcatcaatttcgagcagaaggcaagggctgggacggaggcttgtttgcgaggccgctcccacccgct

SEQ ID NO: 140734 - DNA, 201 bp, Homo sapiens
ctgatgctttttcattattaggcatgttggagacttgggcaatgtgactgctgacaaagatggtgtggccgatgtgtctattgaagattctgtgatctcastctcaggagaccattgcatcattggccgcacactggtggtaagttttcataaaaggatatgcataaaacttcttctaacatacagtcatgtatcttttca

SEQ ID NO: 140735 - DNA, 201 bp, Homo sapiens
tcagccctaatccatctgatgctttttcattattaggcatgttggagacttgggcaatgtgactgctgacaaagatggtgtggccgatgtgtctattgaarattctgtgatctcactctcaggagaccattgcatcattggccgcacactggtggtaagttttcataaaaggatatgcataaaacttcttctaacatacag

SEQ ID NO: 140736 - DNA, 201 bp, Homo sapiens
ggtttccgttgcagtcctcggaaccaggacctcggcgtggcctagcgagttatggcgacgaaggccgtgtgcgtgctgaagggcgacggcccagtgcaggscatcatcaatttcgagcagaaggcaagggctgggacggaggcttgtttgcgaggccgctcccacccgctcgtccccccgcgcacctttgctaggagcggg

SEQ ID NO: 140737 - DNA, 201 bp, Homo sapiens
cagccctaatccatctgatgctttttcattattaggcatgttggagacttgggcaatgtgactgctgacaaagatggtgtggccgatgtgtctattgaagrttctgtgatctcactctcaggagaccattgcatcattggccgcacactggtggtaagttttcataaaaggatatgcataaaacttcttctaacatacagt

SEQ ID NO: 140738 - DNA, 201 bp, Homo sapiens
gggtttccgttgcagtcctcggaaccaggacctcggcgtggcctagcgagttatggcgacgaaggccgtgtgcgtgctgaagggcgacggcccagtgcagrgcatcatcaatttcgagcagaaggcaagggctgggacggaggcttgtttgcgaggccgctcccacccgctcgtccccccgcgcacctttgctaggagcgg

SEQ ID NO: 140739 - DNA, 201 bp, Homo sapiens
atccatctgatgctttttcattattaggcatgttggagacttgggcaatgtgactgctgacaaagatggtgtggccgatgtgtctattgaagattctgtgwtctcactctcaggagaccattgcatcattggccgcacactggtggtaagttttcataaaaggatatgcataaaacttcttctaacatacagtcatgtatc

SEQ ID NO: 140740 - DNA, 201 bp, Homo sapiens
cctcggaaccaggacctcggcgtggcctagcgagttatggcgacgaaggccgtgtgcgtgctgaagggcgacggcccagtgcagggcatcatcaatttcgrgcagaaggcaagggctgggacggaggcttgtttgcgaggccgctcccacccgctcgtccccccgcgcacctttgctaggagcgggtcgcccgccaggcct

SEQ ID NO: 140741 - DNA, 201 bp, Homo sapiens
tcctcggaaccaggacctcggcgtggcctagcgagttatggcgacgaaggccgtgtgcgtgctgaagggcgacggcccagtgcagggcatcatcaatttcragcagaaggcaagggctgggacggaggcttgtttgcgaggccgctcccacccgctcgtccccccgcgcacctttgctaggagcgggtcgcccgccaggcc

SEQ ID NO: 140742 - DNA, 201 bp, Homo sapiens
aatttgtgtctactcagtcaagttttaatttagctcatgaactaccttgatgtttagtggcatcagccctaatccatctgatgctttttcattattaggcrtgttggagacttgggcaatgtgactgctgacaaagatggtgtggccgatgtgtctattgaagattctgtgatctcactctcaggagaccattgcatcatt

SEQ ID NO: 140743 - DNA, 201 bp, Homo sapiens
tctccaactttgcacttttcttaaaggaaagtaatggaccagtgaaggtgtggggaagcattaaaggactgactgaaggcctgcatggattccatgttcakgagtttggagataatacagcaggtgggtgttgtgctgtgctggtgacccatacttgttcaccctagttagataaacagtagagtagcccctaaacgttaa

SEQ ID NO: 140744 - DNA, 201 bp, Homo sapiens
tttacaagtgtcagacagtagttagaacttggtggggtttttttttttttttttttgagatggagtcttgctctgttgcccaggctggagtgcagtggtgygatctcagctcactgcaacctctgcctcccaggttcaagcgattctcctgcctcagcctactaagtagctgggactataggtgcgcaccaccacgcctag

SEQ ID NO: 140745 - DNA, 201 bp, Homo sapiens
ctacaccccaaacacaggcttcttagtgggaccaaagtatgatacaaactgaagatggaatgcagaggattattggtactttggaatatgcttaaaaaaawtttttttaaagtatttttaaaaaatcaggcaacccctgaaccagagtaggttcagagaaactgccaaattttattttcttaatttgggattggaagcaag

SEQ ID NO: 140746 - DNA, 201 bp, Homo sapiens
taaatcagctgttttctttgttcagaaactctctccaactttgcacttttcttaaaggaaagtaatggaccagtgaaggtgtggggaagcattaaaggackgactgaaggcctgcatggattccatgttcatgagtttggagataatacagcaggtgggtgttgtgctgtgctggtgacccatacttgttcaccctagtta

SEQ ID NO: 140747 - DNA, 201 bp, Homo sapiens
gtcgtagtctcctgcagcgtctggggtttccgttgcagtcctcggaaccaggacctcggcgtggcctagcgagttatggcgacgaaggccgtgtgcgtgcwgaagggcgacggcccagtgcagggcatcatcaatttcgagcagaaggcaagggctgggacggaggcttgtttgcgaggccgctcccacccgctcgtcccc

SEQ ID NO: 140748 - DNA, 201 bp, Homo sapiens
ttatcttcttaaaattttttacaggtccatgaaaaagcagatgacttgggcaaaggtggaaatgaagaaagtacaaagacaggaaacgctggaagtcgttyggcttgtggtgtaattgggatcgcccaataaacattcccttggatgtagtctgaggccccttaactcatctgttatcctgctagctgtagaaatgtatcc

SEQ ID NO: 140749 - DNA, 201 bp, Homo sapiens
ttgacagcccaaagttatcttcttaaaattttttacaggtccatgaaaaagcagatgacttgggcaaaggtggaaatgaagaaagtacaaagacaggaaahgctggaagtcgtttggcttgtggtgtaattgggatcgcccaataaacattcccttggatgtagtctgaggccccttaactcatctgttatcctgctagct

SEQ ID NO: 140750 - DNA, 201 bp, Homo sapiens
cctcctctgcctgggctcccactttggcagcacttgaggagcccttcagcccaccgctgcactgtgggagcccctttctgggctggccaaggccggagctrgctccctcagcttgcaaggaggtgtggagggagaggcatgagcgggaacaggggctgtgcgggcacttccgggccagctggagctccaggtgtgcgtggg

SEQ ID NO: 140751 - DNA, 201 bp, Homo sapiens
aggaggtagtgattacttgacagcccaaagttatcttcttaaaattttttacaggtccatgaaaaagcagatgacttgggcaaaggtggaaatgaagaaartacaaagacaggaaacgctggaagtcgtttggcttgtggtgtaattgggatcgcccaataaacattcccttggatgtagtctgaggccccttaactcatc

SEQ ID NO: 140752 - DNA, 201 bp, Homo sapiens
aaggtaaatcagctgttttctttgttcagaaactctctccaactttgcacttttcttaaaggaaagtaatggaccagtgaaggtgtggggaagcattaaargactgactgaaggcctgcatggattccatgttcatgagtttggagataatacagcaggtgggtgttgtgctgtgctggtgacccatacttgttcacccta

SEQ ID NO: 140753 - DNA, 201 bp, Homo sapiens
gtaaatcagctgttttctttgttcagaaactctctccaactttgcacttttcttaaaggaaagtaatggaccagtgaaggtgtggggaagcattaaaggastgactgaaggcctgcatggattccatgttcatgagtttggagataatacagcaggtgggtgttgtgctgtgctggtgacccatacttgttcaccctagtt

SEQ ID NO: 140754 - DNA, 201 bp, Homo sapiens
ctccaactttgcacttttcttaaaggaaagtaatggaccagtgaaggtgtggggaagcattaaaggactgactgaaggcctgcatggattccatgttcatragtttggagataatacagcaggtgggtgttgtgctgtgctggtgacccatacttgttcaccctagttagataaacagtagagtagcccctaaacgttaaa

SEQ ID NO: 140755 - DNA, 201 bp, Homo sapiens
atttgggaactttaattcataatttagcttttttttcttcttcttataaataggctgtaccagtgcaggtcctcactttaatcctctatccagaaaacacrgtgggccaaaggatgaagagaggtaacaagatgcttaactcttgtaataatggcgatagctttctggagttcatatggtatactacttgtaaatatgtgc

SEQ ID NO: 140756 - DNA, 201 bp, Homo sapiens
taattcataatttagcttttttttcttcttcttataaataggctgtaccagtgcaggtcctcactttaatcctctatccagaaaacacggtgggccaaagkatgaagagaggtaacaagatgcttaactcttgtaataatggcgatagctttctggagttcatatggtatactacttgtaaatatgtgctaagataattcc

SEQ ID NO: 140757 - DNA, 201 bp, Homo sapiens
ctgttttctttgttcagaaactctctccaactttgcacttttcttaaaggaaagtaatggaccagtgaaggtgtggggaagcattaaaggactgactgaargcctgcatggattccatgttcatgagtttggagataatacagcaggtgggtgttgtgctgtgctggtgacccatacttgttcaccctagttagataaaca

SEQ ID NO: 140758 - DNA, 201 bp, Homo sapiens
tcagtcaagttttaatttagctcatgaactaccttgatgtttagtggcatcagccctaatccatctgatgctttttcattattaggcatgttggagacttsggcaatgtgactgctgacaaagatggtgtggccgatgtgtctattgaagattctgtgatctcactctcaggagaccattgcatcattggccgcacactgg

SEQ ID NO: 140759 - DNA, 201 bp, Homo sapiens
tgagtttggaaaacagaagtagtctttagttttaaaatggccagattttcttgccaggattgggtttctcacttgttaaacagaacattttgttaagtttraaacctgggatggacttaagtattcatgttcattcatgttcattcaggactgcaggttatcatgacttgtttaacttgtgggaagctgttgtcccaagtt

SEQ ID NO: 140760 - DNA, 201 bp, Homo sapiens
catcagccctaatccatctgatgctttttcattattaggcatgttggagacttgggcaatgtgactgctgacaaagatggtgtggccgatgtgtctattgragattctgtgatctcactctcaggagaccattgcatcattggccgcacactggtggtaagttttcataaaaggatatgcataaaacttcttctaacatac

SEQ ID NO: 140761 - DNA, 201 bp, Homo sapiens
actcagtcaagttttaatttagctcatgaactaccttgatgtttagtggcatcagccctaatccatctgatgctttttcattattaggcatgttggagacktgggcaatgtgactgctgacaaagatggtgtggccgatgtgtctattgaagattctgtgatctcactctcaggagaccattgcatcattggccgcacact

SEQ ID NO: 140762 - DNA, 201 bp, Homo sapiens
cagtcaagttttaatttagctcatgaactaccttgatgtttagtggcatcagccctaatccatctgatgctttttcattattaggcatgttggagacttgsgcaatgtgactgctgacaaagatggtgtggccgatgtgtctattgaagattctgtgatctcactctcaggagaccattgcatcattggccgcacactggt

SEQ ID NO: 140763 - DNA, 201 bp, Homo sapiens
caagttttaatttagctcatgaactaccttgatgtttagtggcatcagccctaatccatctgatgctttttcattattaggcatgttggagacttgggcartgtgactgctgacaaagatggtgtggccgatgtgtctattgaagattctgtgatctcactctcaggagaccattgcatcattggccgcacactggtggta

SEQ ID NO: 140764 - DNA, 201 bp, Homo sapiens
ggcatgttggagacttgggcaatgtgactgctgacaaagatggtgtggccgatgtgtctattgaagattctgtgatctcactctcaggagaccattgcatsattggccgcacactggtggtaagttttcataaaaggatatgcataaaacttcttctaacatacagtcatgtatcttttcactttgattgttagtcgcggt

SEQ ID NO: 140765 - DNA, 201 bp, Homo sapiens
ggtgctggtttgcgtcgtagtctcctgcagcgtctggggtttccgttgcagtcctcggaaccaggacctcggcgtggcctagcgagttatggcgacgaagdccgtgtgcgtgctgaagggcgacggcccagtgcagggcatcatcaatttcgagcagaaggcaagggctgggacggaggcttgtttgcgaggccgctccca

SEQ ID NO: 140766 - DNA, 201 bp, Homo sapiens
aggcatgttggagacttgggcaatgtgactgctgacaaagatggtgtggccgatgtgtctattgaagattctgtgatctcactctcaggagaccattgcaycattggccgcacactggtggtaagttttcataaaaggatatgcataaaacttcttctaacatacagtcatgtatcttttcactttgattgttagtcgcgg

SEQ ID NO: 140767 - DNA, 201 bp, Homo sapiens; identical to SEQ ID NO: 25536

SEQ ID NO: 140768 - DNA, 201 bp, Homo sapiens
gtgctggtttgcgtcgtagtctcctgcagcgtctggggtttccgttgcagtcctcggaaccaggacctcggcgtggcctagcgagttatggcgacgaaggycgtgtgcgtgctgaagggcgacggcccagtgcagggcatcatcaatttcgagcagaaggcaagggctgggacggaggcttgtttgcgaggccgctcccac

SEQ ID NO: 140769 - DNA, 201 bp, Homo sapiens
catgttggagacttgggcaatgtgactgctgacaaagatggtgtggccgatgtgtctattgaagattctgtgatctcactctcaggagaccattgcatcaytggccgcacactggtggtaagttttcataaaaggatatgcataaaacttcttctaacatacagtcatgtatcttttcactttgattgttagtcgcggttt

SEQ ID NO: 140770 - DNA, 201 bp, Homo sapiens
tgcgtcgtagtctcctgcagcgtctggggtttccgttgcagtcctcggaaccaggacctcggcgtggcctagcgagttatggcgacgaaggccgtgtgcgwgctgaagggcgacggcccagtgcagggcatcatcaatttcgagcagaaggcaagggctgggacggaggcttgtttgcgaggccgctcccacccgctcgtc

SEQ ID NO: 140771 - DNA, 201 bp, Homo sapiens
gggatttttgagggcagtgatcttaactttgggtgcacagttagcttatttgaagatcttactaaaaatacaccagagcccaacctccgaccaattacatsaaaacctgtcctagtgcagggtgagtattgctgttttttgaaagtttccaaaagtgattttgatgtgcacctacgattgagaactgtcgtttgaggacag

SEQ ID NO: 140772 - DNA, 201 bp, Homo sapiens
tgttttctttgttcagaaactctctccaactttgcacttttcttaaaggaaagtaatggaccagtgaaggtgtggggaagcattaaaggactgactgaagrcctgcatggattccatgttcatgagtttggagataatacagcaggtgggtgttgtgctgtgctggtgacccatacttgttcaccctagttagataaacag

SEQ ID NO: 140773 - DNA, 201 bp, Homo sapiens
  misc_feature (1)...(201): n = A,T,C or G
gaactaccttgatgtttagtggcatcagccctaatccatctgatgctttttcattattaggcatgttggagacttgggcaatgtgactgctgacaaagatngtgtggccgatgtgtctattgaagattctgtgatctcactctcaggagaccattgcatcattggccgcacactggtggtaagttttcataaaaggatatg

SEQ ID NO: 140774 - DNA, 201 bp, Homo sapiens
  misc_feature (1)...(201): n = A,T,C or G
aactaccttgatgtttagtggcatcagccctaatccatctgatgctttttcattattaggcatgttggagacttgggcaatgtgactgctgacaaagatgntgtggccgatgtgtctattgaagattctgtgatctcactctcaggagaccattgcatcattggccgcacactggtggtaagttttcataaaaggatatgc

SEQ ID NO: 140775 - DNA, 201 bp, Homo sapiens
gacagcccaaagttatcttcttaaaattttttacaggtccatgaaaaagcagatgacttgggcaaaggtggaaatgaagaaagtacaaagacaggaaacgstggaagtcgtttggcttgtggtgtaattgggatcgcccaataaacattcccttggatgtagtctgaggccccttaactcatctgttatcctgctagctgt

SEQ ID NO: 140776 - DNA, 201 bp, Homo sapiens
tggagacttgggcaatgtgactgctgacaaagatggtgtggccgatgtgtctattgaagattctgtgatctcactctcaggagaccattgcatcattggcsgcacactggtggtaagttttcataaaaggatatgcataaaacttcttctaacatacagtcatgtatcttttcactttgattgttagtcgcggtttctaaa

SEQ ID NO: 140777 - DNA, 201 bp, Homo sapiens
gttcttaaacatcttttgggtattgttgggaggaggtagtgattacttgacagcccaaagttatcttcttaaaattttttacaggtccatgaaaaagcagwtgacttgggcaaaggtggaaatgaagaaagtacaaagacaggaaacgctggaagtcgtttggcttgtggtgtaattgggatcgcccaataaacattccct

SEQ ID NO: 140778 - DNA, 201 bp, Homo sapiens
tcttaaacatcttttgggtattgttgggaggaggtagtgattacttgacagcccaaagttatcttcttaaaattttttacaggtccatgaaaaagcagatsacttgggcaaaggtggaaatgaagaaagtacaaagacaggaaacgctggaagtcgtttggcttgtggtgtaattgggatcgcccaataaacattcccttg

SEQ ID NO: 140779 - DNA, 201 bp, Homo sapiens
aaacatcttttgggtattgttgggaggaggtagtgattacttgacagcccaaagttatcttcttaaaattttttacaggtccatgaaaaagcagatgacthgggcaaaggtggaaatgaagaaagtacaaagacaggaaacgctggaagtcgtttggcttgtggtgtaattgggatcgcccaataaacattcccttggatg

SEQ ID NO: 140780 - DNA, 201 bp, Homo sapiens
tttattttagtcctgagatctagttgtaacttccttgatttctgtatgtagccacggagcaccattacctgtcaccattacctgaatggctatactgcttrctttcattttggtagagtggaaaggttacctaggtttcagtgcttgaaaagatttcagaaagcagtagtacgtctggttagactagaatcagtcctctcc

SEQ ID NO: 140781 - DNA, 201 bp, Homo sapiens
caggtccatgaaaaagcagatgacttgggcaaaggtggaaatgaagaaagtacaaagacaggaaacgctggaagtcgtttggcttgtggtgtaattgggaycgcccaataaacattcccttggatgtagtctgaggccccttaactcatctgttatcctgctagctgtagaaatgtatcctgataaacattaaacactgta

SEQ ID NO: 140782 - DNA, 201 bp, Homo sapiens; identical to SEQ ID NO: 25509

SEQ ID NO: 140783 - DNA, 201 bp, Homo sapiens
ggaatatgcttaaaaaaaatttttttaaagtatttttaaaaaatcaggcaacccctgaaccagagtaggttcagagaaactgccaaattttattttcttartttgggattggaagcaagttaacagaagtttatgagttaagttgcatttagtgatcttttgccatatttgagtaataatctgatttttttgtttatagat

SEQ ID NO: 140784 - DNA, 201 bp, Homo sapiens; identical to SEQ ID NO: 25510

SEQ ID NO: 140785 - DNA, 201 bp, Homo sapiens
ttcatgttcattcaggactgcaggttatcatgacttgtttaacttgtgggaagctgttgtcccaagttatcctggggaactgcatctggttcttgcaaaayaccaagtagacaggctctcttttacctccccttgagggcattaacattcagtagtcacttccattcagttaaccctttatttttatggtttttcttgagc

SEQ ID NO: 140786 - DNA, 201 bp, Homo sapiens
taaagcagaaaaatcatttataaaggtttgttgaacaaaattcaaaatactgttgcttaaagtattaagattttttaggattataccttacttataggccygtcattcatttggcatgaaattttgagttttattcactttcactttcctttttttccaaagcaattaaaaaaactgccaaagtaagagtgactgcggaac

SEQ ID NO: 140787 - DNA, 201 bp, Homo sapiens
aaagtgagaataactacataaaatgtctattttcatcaaataagtctaatttagactccaatacagtattaacagctcaaactttgacggtgaacaatccytttccaccttaatgcagtgtaggaagaatagcacacattaaagtttgttacgaaaatagagtttattaaaaacatccctattgttttgaggagctttcac

SEQ ID NO: 140788 - DNA, 201 bp, Homo sapiens
tatcttcttaaaattttttacaggtccatgaaaaagcagatgacttgggcaaaggtggaaatgaagaaagtacaaagacaggaaacgctggaagtcgtttsgcttgtggtgtaattgggatcgcccaataaacattcccttggatgtagtctgaggccccttaactcatctgttatcctgctagctgtagaaatgtatcct

SEQ ID NO: 140789 - DNA, 201 bp, Homo sapiens
aattttttacaggtccatgaaaaagcagatgacttgggcaaaggtggaaatgaagaaagtacaaagacaggaaacgctggaagtcgtttggcttgtggtgkaattgggatcgcccaataaacattcccttggatgtagtctgaggccccttaactcatctgttatcctgctagctgtagaaatgtatcctgataaacatta

SEQ ID NO: 140790 - DNA, 201 bp, Homo sapiens
gcatcagccctaatccatctgatgctttttcattattaggcatgttggagacttgggcaatgtgactgctgacaaagatggtgtggccgatgtgtctattraagattctgtgatctcactctcaggagaccattgcatcattggccgcacactggtggtaagttttcataaaaggatatgcataaaacttcttctaacata

SEQ ID NO: 140791 - DNA, 201 bp, Homo sapiens; identical to SEQ ID NO: 25530

SEQ ID NO: 140792 - DNA, 201 bp, Homo sapiens
atcagctgttttctttgttcagaaactctctccaactttgcacttttcttaaaggaaagtaatggaccagtgaaggtgtggggaagcattaaaggactgaytgaaggcctgcatggattccatgttcatgagtttggagataatacagcaggtgggtgttgtgctgtgctggtgacccatacttgttcaccctagttagat

SEQ ID NO: 140793 - DNA, 201 bp, Homo sapiens
tgatgtttagtggcatcagccctaatccatctgatgctttttcattattaggcatgttggagacttgggcaatgtgactgctgacaaagatggtgtggccratgtgtctattgaagattctgtgatctcactctcaggagaccattgcatcattggccgcacactggtggtaagttttcataaaaggatatgcataaaact

SEQ ID NO: 140794 - DNA, 201 bp, Homo sapiens
atctttggctggggttcgctaagtcttgaggactctgtttctcttccagattggagcagacaccaatgcctatcatatttggaagcgggacagtggtgacwgtattgcagcaactggcaaatgaggtatgggaagaagtatcacatactcctaatcagctaggaacaaaagacggacagaaaagtaacctttagagtaaga

SEQ ID NO: 140795 - DNA, 201 bp, Homo sapiens
atgtgaggtctgatagtaaagtttctaggtgccacagaaaactgggtaggcaccctgggcagttgccttccctaccctctcttagccctagtaagtgggasagtaggagactggcttagagatagtctagctaggcattctgtcctaagagaaagacaattggaaagatagttcttggccaagtgtggtgactcacaccta

SEQ ID NO: 140796 - DNA, 201 bp, Homo sapiens
cgcttgaacccaggaggcagaggttgcagtaagccgagacagccccactgcagtccagcctgggtgacagagcaagactctgtcaaaaaaaaaaaaaaaaaggagagagacgttgctcaataataatgatattgctcaattattaatgctctaatattaaggcctgtgtctagttttcttttctcttggtttaatcagaga

SEQ ID NO: 140797 - DNA, 201 bp, Homo sapiens
taacatctgaccttggtccttttgttttaggtttatggagagaaatcccttaaccaatgcaataatcaggaccaccacggcactcaccatattcaaagcargggtcaaggtaacatccctggttcctccccatatagcttttccctaccgccctccactcctcccttccttgaatctatctactggctcttccttccttct

SEQ ID NO: 140798 - DNA, 201 bp, Homo sapiens
cttgaatccaggaggcagagatcgcagtgagccgagatggtgccactgcactccagcctgggcgacacagcgagattctgtctcaaaaaaaaaaaaaaaaaggtactcttggccaggcatgatggctcacacctgtaatcccaacagtttgggaggccaaggcgggcagatcacttgaggtcaggagtttgagaccagcct

SEQ ID NO: 140799 - DNA, 201 bp, Homo sapiens
cccccaggcccctctccttggcttaactgggcctgactaatcatccctcagccaccagatactgcatctctaagtgtgtatatttaagacatctctaagaygtctctctcagtcttaaagatccccaaggttcaggaaagtgggtaatgtttccgccctttccttcaccccattggttctttctaacatctgaccttggtc

SEQ ID NO: 140800 - DNA, 201 bp, Homo sapiens
gtgtatatttaagacatctctaagacgtctctctcagtcttaaagatccccaaggttcaggaaagtgggtaatgtttccgccctttccttcaccccattgrttctttctaacatctgaccttggtccttttgttttaggtttatggagagaaatcccttaaccaatgcaataatcaggaccaccacggcactcaccatatt

SEQ ID NO: 140801 - DNA, 201 bp, Homo sapiens
gctgaaagctgaagggtgagtagaagttacacagaatgtctgacatccacagtaaatgccagcttatttaaacatcaggctgagctaaaaggaattcaaawggtaaacccaatgcttcaaaaacaaaaaaaagatccaaaaagacaacccagtgactatcagatgagtaatacattccagaatataccagggttaggggca

SEQ ID NO: 140802 - DNA, 201 bp, Homo sapiens
tagagtgatacagaataaaggtcaggtgataaagaagtgctatctagattctggtttcttaaatagcaaatggccatggccttgggtatgaaatgaagatwctggccaccctgggcgtcatggggaacagcaaacagccatggccttgggtatgaaatgaagatactggccaccctgggcgtcatggggaacagcaaacgg

SEQ ID NO: 140803 - DNA, 201 bp, Homo sapiens
ctctatttgactctgacaggtgccatccagattccaacagtgacttttagctctgagaagtccaatactacagccctggctgagttcggaaaatacattcrtaaaggtcagctgcaaatcaggggcaaggggtgggtggtagaaatagcaatggagacacagttcttttacaaagtgataaagaagtttattttgcgactg

SEQ ID NO: 140804 - DNA, 201 bp, Homo sapiens
aatcaggatatttaagcccatattgtacatgtatagaaatcaataagaaatcgaaccccctttgtttctaccctggaggtcctagaactcacgaagaacaytgtggctgataacagagtccagttccatgtgttgagtgcctttgaccccctccccgtcagcccttctgatgacaaggccttgggctaccagctgctccgc

SEQ ID NO: 140805 - DNA, 201 bp, Homo sapiens
atgaagaggaacctggtgcttgttagagaatataacaaggaaccagaccccatctgggaatcaggcagggcttcctaaggcagtaatgtttaagctgaaarctgaagggtgagtagaagttacacagaatgtctgacatccacagtaaatgccagcttatttaaacatcaggctgagctaaaaggaattcaaaaggtaaac

SEQ ID NO: 140806 - DNA, 201 bp, Homo sapiens
aatgttgcaaacactacactaattcatgggtacctccagaaccagaaactggaacataaaacagagcaagaaaatggacactgagcactactggtagatartatttcatgcaagaattcactacacagctgagcgcagtggctcacgcctataatcccagcactttgggaggctgaggcaggtggatcacctgtggtcaga

SEQ ID NO: 140807 - DNA, 201 bp, Homo sapiens
attgcctccctattcctgatcctctagcagggattgagctaactgaatttagcagcactcctgactgctaagggcccctgaggcagctctaaagtagagasagactcaggtctcagagacccaggctaaactagaggtgaccctgtggtgctgaccttgttctttcccagtttcccttccctgtcaatataatcctgagca

SEQ ID NO: 140808 - DNA, 201 bp, Homo sapiens
tttcagagcaggagattattttggactccccaggagtttattccacactgttctttgtcacgagcatagatggatccctgagaaacgaccaatgtgcatcygaaatctcagatggcccctcccttgcccctctctttcctagccctggagggccagtagtttccgggttggtgagggaagtaagggaagtgctctgtgata

SEQ ID NO: 140809 - DNA, 201 bp, Homo sapiens
accattcacctagagtacaatgtgaccttgaagcactctagtaatcgggtatataagtgaatgatgcctctgaattaattcctggcataactcactggacygtccagtgtgtcagctgtagtgttcatcagaataatagcactgtgtcctgacatttgaatggtgttttcatctccccaggatactttgttactccatctg

SEQ ID NO: 140810 - DNA, 201 bp, Homo sapiens
aaagaaatcaggatatttaagcccatattgtacatgtatagaaatcaataagaaatcgaaccccctttgtttctaccctggaggtcctagaactcacgaaraacattgtggctgataacagagtccagttccatgtgttgagtgcctttgaccccctccccgtcagcccttctgatgacaaggccttgggctaccagctgc

SEQ ID NO: 140811 - DNA, 201 bp, Homo sapiens
aggctgaggcaggaggctcacttgagcccagaagtttgagaccagcctgggcaacataatgagactccatctcttcaaaaaaaaatttaaaaataaaaaamttagccacacacctggggtcccagcaactcaggagctgaggtgggaggatcactgaaacccagaaggttgaggctgcagtgagctgtgattgtaccactg

SEQ ID NO: 140812 - DNA, 201 bp, Homo sapiens
gagatatctgggtgatcagagaaagcagccttgctctgaacatctctgtgaccccctgcagcaccaagaagcaggaaggtctggcttaaagcagagacacsccttcagctctgaatataacatgtcacttagttcagagaagacaagaggcagactagaaaagctaagccttgggtccttaagtcaaatcagccaactctg

SEQ ID NO: 140813 - DNA, 201 bp, Homo sapiens
agaaagtgcacacagaaggcttctaatagcacagcatggggccaaaacagagatatctgggtgatcagagaaagcagccttgctctgaacatctctgtgaycccctgcagcaccaagaagcaggaaggtctggcttaaagcagagacaccccttcagctctgaatataacatgtcacttagttcagagaagacaagaggca

SEQ ID NO: 140814 - DNA, 201 bp, Homo sapiens
agagagctatttcagcatcttaggtagtgcatgtgaaggtctggactgaggccatgctcgtggggtggagaagagagcaaccaccagaggtgggagagagktgggttcaataggatgtggtatgtatatgggtatggagcgagagaaaagcaggatggctccaaggtttttaacctgggtagttgaccaagtagttaatgc

SEQ ID NO: 140815 - DNA, 201 bp, Homo sapiens
aataggagatgaaaactgataggaaatggagttgtagtttagggatctaggccttgtatgctatgctgaggagtttgggccctaatctgtgaaatctgtgrcaggagagaacttttagaggtcttcaaccaaatactcagatttgcttttagagaggtcatgctagcagcattgcagagggagtgctggaagagaaggaga

SEQ ID NO: 140816 - DNA, 201 bp, Homo sapiens
ctactgaactcaaagtccaacagacggccattctcagctcctccagggtagaggcgtggggccttatgggccaggctctccagcagaggggtccagaagtyccaggaggccagcaagttctctgtggtgatgaagaaattcttccggccatggaagatatgggataagaggacggagtgggcgtcccgctcccgcacaggg

SEQ ID NO: 140817 - DNA, 201 bp, Homo sapiens
ccatggctggaccacatccattgcacccctaggccctggcccactctgggcacaggagacccatgtgcttagaccctccctcccctagagaggatgacacrtgccaggctcaccgctggccccacacccgctcaggcctccacccctccagccgccttgctgaccactctctttccttattgccattcactcattcattca

SEQ ID NO: 140818 - DNA, 201 bp, Homo sapiens
aagaaattcttccggccatggaagatatgggataagaggacggagtgggcgtcccgctcccgcacagggctgtaggcgtagtaatcggacagagggctgcygaaaaggcggagcccaggtggtccctccatttccttccagctggagggcagggagggcctgaacaggttcctgctgaccagcacggcagggctgcccagg

SEQ ID NO: 140819 - DNA, 201 bp, Homo sapiens; identical to SEQ ID NO: 25549

SEQ ID NO: 140820 - DNA, 201 bp, Homo sapiens
ggcgtggggccttatgggccaggctctccagcagaggggtccagaagttccaggaggccagcaagttctctgtggtgatgaagaaattcttccggccatgraagatatgggataagaggacggagtgggcgtcccgctcccgcacagggctgtaggcgtagtaatcggacagagggctgccgaaaaggcggagcccaggtg

SEQ ID NO: 140821 - DNA, 201 bp, Homo sapiens
cagaacacatgtatgggagggtccccaaacgggggctggacaccaggtgaccctccagtgcagccctcacagacgctggctgggtcccacagtcctgcccygccatgtttctgtgaggactgtggaaccagcagccatcaccacagagaagcagggaggggacgccctgggctaccccccgggaagcagcagatcccccgc

SEQ ID NO: 140822 - DNA, 201 bp, Homo sapiens; identical to SEQ ID NO: 25551

SEQ ID NO: 140823 - DNA, 201 bp, Homo sapiens; identical to SEQ ID NO: 25552

SEQ ID NO: 140824 - DNA, 201 bp, Homo sapiens
cccagggcccacctgcgaaggtcggcgtcaggctgtggaagctgtctggcttctgcagctctctgcgcacctgctcactgtaagactggtactggcccacracggcactgcccctctgcaggccccgcagcgcctggaagacctgaagcttgtgccgcagcacagcctccgcactgctgacattgtggggcagctccatgg

SEQ ID NO: 140825 - DNA, 201 bp, Homo sapiens
gctgtagtgagacctctccagggggacagagcagccctaagctgttgggggcccccctggctgccatccctgctgcagcgtccagcagtgggcgctgaccstggctttgctctccatcagcagccagtgggagctgtcaggagcgggggtcagaccttgccctgcttctgcgtggccctatcccacggtgccaacaagcgt

SEQ ID NO: 140826 - DNA, 201 bp, Homo sapiens
ttccttccagctggagggcagggagggcctgaacaggttcctgctgaccagcacggcagggctgcccaggtcgccatggccgatgtggaagacgagctgcyggggcaggcactggctctgcgccgcggcccagtgcttttcgctctgcacacagcaggcctggttcttgaacaagatccgagcgtagcccactctctcgtc

SEQ ID NO: 140827 - DNA, 201 bp, Homo sapiens
gtgactgtgggaagagggaggctgtgtgcccgtcggcacccatgcccagcagcaccaggtcgaagctgctgttggccaccagggctgagatctccctggcrtagatctgggcgccctggtcctcctcggcgcagagccgctgctgcaggtgcacaggcatggggtggatgttgtagtaggggatccggacgtgctgcagca

SEQ ID NO: 140828 - DNA, 201 bp, Homo sapiens
ccagaagttccaggaggccagcaagttctctgtggtgatgaagaaattcttccggccatggaagatatgggataagaggacggagtgggcgtcccgctccygcacagggctgtaggcgtagtaatcggacagagggctgccgaaaaggcggagcccaggtggtccctccatttccttccagctggagggcagggagggcct

SEQ ID NO: 140829 - DNA, 201 bp, Homo sapiens
ttttttttttttttgagatagggtctcactctgttttccaggctagagagcaatagtgcaatcacaccttactgcagcctcagtctcctgggctcaggtgrtcctcccacctcagactcccgagtagctgggaccacaggagggcaccaccatacctggttttaaaactttttgtagagatggggtctcactatgttgccc

SEQ ID NO: 140830 - DNA, 201 bp, Homo sapiens
ggaacagcagagggtgactctctggcacagaccaggactctccggccagccctctcctctccttgccggctcctctgggcgtccccctgcctcagggaagsccctcgccttgccatgctcacccctcgcctggcatctcttccatgaccttctcttcccagtccatgcttgaaaaccggcctctggggctatctctatggc

SEQ ID NO: 140831 - DNA, 201 bp, Homo sapiens; identical to SEQ ID NO: 25556

SEQ ID NO: 140832 - DNA, 201 bp, Homo sapiens; identical to SEQ ID NO: 25558

SEQ ID NO: 140833 - DNA, 201 bp, Homo sapiens; identical to SEQ ID NO: 25557

SEQ ID NO: 140834 - DNA, 201 bp, Homo sapiens; identical to SEQ ID NO: 25544

SEQ ID NO: 140835 - DNA, 201 bp, Homo sapiens; identical to SEQ ID NO: 25545

SEQ ID NO: 140836 - DNA, 201 bp, Homo sapiens; identical to SEQ ID NO: 25547

SEQ ID NO: 140837 - DNA, 201 bp, Homo sapiens
tggcgcggttgatgagaggcaggctaaggctcatgcggcggtgtggctgggaggggctcgtggtcagcacgaccagctgctcgccatccaggccagtgggygactgtgggaagagggaggctgtgtgcccgtcggcacccatgcccagcagcaccaggtcgaagctgctgttggccaccagggctgagatctccctggcat

SEQ ID NO: 140838 - DNA, 201 bp, Homo sapiens
tttctgtgaggactgtggaaccagcagccatcaccacagagaagcagggaggggacgccctgggctaccccccgggaagcagcagatcccccgcgcgcctyccatctgagggacaggcagggacggtcactgcagctctggtttctggccttcgtgacatcttcccttgcaggctctgggcatgtctcacccgtctctgtc

SEQ ID NO: 140839 - DNA, 201 bp, Homo sapiens
gcttttcgctctgcacacagcaggcctggttcttgaacaagatccgagcgtagcccactctctcgtccaaggctttgccagacatcaggatgaaaggcacrccctcccagcgaaggttgtcaatgtgcactaggacggctggggtgagggaacagcagagggtgactctctggcacagaccaggactctccggccagccct

SEQ ID NO: 140840 - DNA, 201 bp, Homo sapiens
gccagcaagttctctgtggtgatgaagaaattcttccggccatggaagatatgggataagaggacggagtgggcgtcccgctcccgcacagggctgtaggygtagtaatcggacagagggctgccgaaaaggcggagcccaggtggtccctccatttccttccagctggagggcagggagggcctgaacaggttcctgctg

SEQ ID NO: 140841 - DNA, 201 bp, Homo sapiens
tctcggtacttggccctgaggacctggaagtcactgggcattggggccggccctggccctggcaccagctgctccggctgctgctgggaaaagaacaaccrgccgctactgaactcaaagtccaacagacggccattctcagctcctccagggtagaggcgtggggccttatgggccaggctctccagcagaggggtccag

SEQ ID NO: 140842 - DNA, 201 bp, Homo sapiens
ttttttttttttttttgagatagggtctcactctgttttccaggctagagagcaatagtgcaatcacaccttactgcagcctcagtctcctgggctcaggygatcctcccacctcagactcccgagtagctgggaccacaggagggcaccaccatacctggttttaaaactttttgtagagatggggtctcactatgttgc

SEQ ID NO: 140843 - DNA, 201 bp, Homo sapiens
tgggctgttgtcatcactctttcctttttttttttttttttttttgagatagggtctcactctgttttccaggctagagagcaatagtgcaatcacacctyactgcagcctcagtctcctgggctcaggtgatcctcccacctcagactcccgagtagctgggaccacaggagggcaccaccatacctggttttaaaactt

SEQ ID NO: 140844 - DNA, 201 bp, Homo sapiens
ctgggctgttgtcatcactctttcctttttttttttttttttttttgagatagggtctcactctgttttccaggctagagagcaatagtgcaatcacaccytactgcagcctcagtctcctgggctcaggtgatcctcccacctcagactcccgagtagctgggaccacaggagggcaccaccatacctggttttaaaact

SEQ ID NO: 140845 - DNA, 201 bp, Homo sapiens; identical to SEQ ID NO: 25553

SEQ ID NO: 140846 - DNA, 201 bp, Homo sapiens
caggtggaactggccaaagcgccgcacggctcgcacagcggtggcctcgatgtcattagccagcttagagatcagctcctcggaccaggcggagaccagcrggctctctcggtacttggccctgaggacctggaagtcactgggcattggggccggccctggccctggcaccagctgctccggctgctgctgggaaaagaa

SEQ ID NO: 140847 - DNA, 201 bp, Homo sapiens; identical to SEQ ID NO: 25554

SEQ ID NO: 140848 - DNA, 201 bp, Homo sapiens
ccgagatgggccacttcttgggctcatggcccacccggctcaccagcgtggtgatctcacgcttcatcctgcccatgaccaggactgccaccttcttggcrcggttgatgagaggcaggctaaggctcatgcggcggtgtggctgggaggggctcgtggtcagcacgaccagctgctcgccatccaggccagtgggtgact

SEQ ID NO: 140849 - DNA, 201 bp, Homo sapiens; identical to SEQ ID NO: 25559

SEQ ID NO: 140850 - DNA, 201 bp, Homo sapiens
gacttctacaacaacctggagaacgtgagctgggaccgtggcagatgggggactgcgagtatgccaggaaaacccaaagctctggggggcccaaggggatrgcaccccctcttctcccaggatccaggagtccaagtccccagacccctcctacctcagacccaggaatccagcccccagcaccaatttctcttgggaccc

SEQ ID NO: 140851 - DNA, 201 bp, Homo sapiens
tgcccactctgtgcagtagtggtgacagattgacctctccccgagtccttgtccctactggggattgccgattcttttcccaacactcgtggagacagtgkccctgtccctgttgcccacagttcctggcacagagtgaggagaagccacatgtggttgctcacttccatgagtggttggcaggcgttggactctgcctgt

SEQ ID NO: 140852 - DNA, 201 bp, Homo sapiens
aacagtgactcctggatcctgggaaggaggagcttgcacccttggagaccaggggcaccaggaaatgggggggctctcgggccgctgggagaggaggggtyctggtgccacagagacctggagaccatgaagatctccccaggatgttttctgaacctgggtcctggcctccacaggtatctacattcttgaccggcggtt

SEQ ID NO: 140853 - DNA, 201 bp, Homo sapiens
gactatgaggagtttgtccgtggctgtcaccttggagtcttcccctcctactatgagccttggggctacacaccgggtgagtgtagtgggcaggggacagygtggtcatggcatcctagtcagagctagcatgtcttggggcgaggcactggccttctctgagcctgttgccttctttgcaaaacaggaacaatggtaatc

SEQ ID NO: 140854 - DNA, 201 bp, Homo sapiens
caatccttctaaccggactgctgtcccctcccacccagttcaacgtggacaaggaagcaggggagaggcagatctaccaccgatactgcatggaaagggcrgcagcccactgcgctcacgtcttcactactgtgtcccagatcaccgccatcgaggcacagcacttgctcaagaggaaaccaggtaggggctgggctgaag

SEQ ID NO: 140855 - DNA, 201 bp, Homo sapiens; identical to SEQ ID NO: 25562

SEQ ID NO: 140856 - DNA, 201 bp, Homo sapiens; identical to SEQ ID NO: 25563

SEQ ID NO: 140857 - DNA, 201 bp, Homo sapiens
gagcttgcagtgagccgagattgtgccactgcattccagcctgggcgacagagcgagactccgcctcaaaaataaataataataatttaaaagaaaagaaagaaaacctttacaggttgtactagtgggaatccacaactcctggtgatcacttgggtttgttgccccacgtccggtgcatttgtggtctccttggctccc

SEQ ID NO: 140858 - DNA, 201 bp, Homo sapiens
ggagcttgcagtgagccgagattgtgccactgcattccagcctgggcgacagagcgagactccgcctcaaaaataaataataataatttaaaagaaaagaaagaaaacctttacaggttgtactagtgggaatccacaactcctggtgatcacttgggtttgttgccccacgtccggtgcatttgtggtctccttggctcc

SEQ ID NO: 140859 - DNA, 201 bp, Homo sapiens
tggagcttgcagtgagccgagattgtgccactgcattccagcctgggcgacagagcgagactccgcctcaaaaataaataataataatttaaaagaaaagaaagaaaacctttacaggttgtactagtgggaatccacaactcctggtgatcacttgggtttgttgccccacgtccggtgcatttgtggtctccttggctc

SEQ ID NO: 140860 - DNA, 201 bp, Homo sapiens; identical to SEQ ID NO: 25564

SEQ ID NO: 140861 - DNA, 201 bp, Homo sapiens
gtggagcttgcagtgagccgagattgtgccactgcattccagcctgggcgacagagcgagactccgcctcaaaaataaataataataatttaaaagaaaagaaagaaaacctttacaggttgtactagtgggaatccacaactcctggtgatcacttgggtttgttgccccacgtccggtgcatttgtggtctccttggct

SEQ ID NO: 140862 - DNA, 201 bp, Homo sapiens; identical to SEQ ID NO: 25565

SEQ ID NO: 140863 - DNA, 201 bp, Homo sapiens
agaggagggcgttgggagcctaaccatctaggtctgggggagggggcagctgggggcccagactcctgggtctgagggagggggcacctgggtattcggcytccttaattcttgagcgctggaacaatgggctcaggattaaaggaaatctccatctaaagagaagaactacaactcccaggaggccccgtgatgcctctg

SEQ ID NO: 140864 - DNA, 201 bp, Homo sapiens
ggtggagcttgcagtgagccgagattgtgccactgcattccagcctgggcgacagagcgagactccgcctcaaaaataaataataataatttaaaagaaaagaaagaaaacctttacaggttgtactagtgggaatccacaactcctggtgatcacttgggtttgttgccccacgtccggtgcatttgtggtctccttggc

SEQ ID NO: 140865 - DNA, 201 bp, Homo sapiens
caaactgtgccctgccttcagctttggtgaaagggagggcccctcatgtgtgctgtgctgtgtctgcaccgcttggtttgcagttgagaggggagggcagraggggtgtgattggagtgtgtccggagatgagatgaaaaaaatacatctatatttaagaatcccaggtgtggtcagacatgacacttggtgggcctggct

SEQ ID NO: 140866 - DNA, 201 bp, Homo sapiens
actaaaaatataaaaattagccagatgtggtggcgcacgcttgtaattgcagctactcaggaggctgaggcaggagaatttcttgaacctagaaagtggcygagattgcgccatcctgggcgacagagcaagactctgtctcaaaaaaaaaaaaaaagaaaaaagaaaagagaaaagaaaaagagacaaagaaagaaaaat

SEQ ID NO: 140867 - DNA, 201 bp, Homo sapiens; identical to SEQ ID NO: 25569

SEQ ID NO: 140868 - DNA, 201 bp, Homo sapiens
tcgaacccgggaggcagagattgcagtgagccaagatcgcgccaatgcactccagcatgggtgacagtgagactcggtctcaaaaaaaaaaaaaaaaaaaagaaagaaagaggctgggcgcggtggctcacacctgtaatcccagcactttgggaggctgaggagggcagatcacttgaggtcaggagttcgagatcagcc

SEQ ID NO: 140869 - DNA, 201 bp, Homo sapiens
ctcgaacccgggaggcagagattgcagtgagccaagatcgcgccaatgcactccagcatgggtgacagtgagactcggtctcaaaaaaaaaaaaaaaaaaaagaaagaaagaggctgggcgcggtggctcacacctgtaatcccagcactttgggaggctgaggagggcagatcacttgaggtcaggagttcgagatcagc

SEQ ID NO: 140870 - DNA, 201 bp, Homo sapiens
gctcgaacccgggaggcagagattgcagtgagccaagatcgcgccaatgcactccagcatgggtgacagtgagactcggtctcaaaaaaaaaaaaaaaaaaaagaaagaaagaggctgggcgcggtggctcacacctgtaatcccagcactttgggaggctgaggagggcagatcacttgaggtcaggagttcgagatcag

SEQ ID NO: 140871 - DNA, 201 bp, Homo sapiens
tttgtccgtggctgtcaccttggagtcttcccctcctactatgagccttggggctacacaccgggtgagtgtagtgggcaggggacagcgtggtcatggcrtcctagtcagagctagcatgtcttggggcgaggcactggccttctctgagcctgttgccttctttgcaaaacaggaacaatggtaatcacctgttctgct

SEQ ID NO: 140872 - DNA, 201 bp, Homo sapiens
cgctcgaacccgggaggcagagattgcagtgagccaagatcgcgccaatgcactccagcatgggtgacagtgagactcggtctcaaaaaaaaaaaaaaaaaaaagaaagaaagaggctgggcgcggtggctcacacctgtaatcccagcactttgggaggctgaggagggcagatcacttgaggtcaggagttcgagatca

SEQ ID NO: 140873 - DNA, 201 bp, Homo sapiens
gtgggcaggggacagcgtggtcatggcatcctagtcagagctagcatgtcttggggcgaggcactggccttctctgagcctgttgccttctttgcaaaacrggaacaatggtaatcacctgttctgctacagcgcgtgcttttgtgatacaatagctcatgtattgagaaactagaagactgggttttgaggactagtgaa

SEQ ID NO: 140874 - DNA, 201 bp, Homo sapiens
ccctcatccaagcttccaacccctactccaaactatgggctcccagtcccctcttccccctgagctagaggtctggggcctgagtgccccctacatccccrgcccaccccaccccaggccccagaactatggacctcggccggggcctgccctcacacgcttgggcccacagtgggtggcatctacacggtgctgcagacg

SEQ ID NO: 140875 - DNA, 201 bp, Homo sapiens
ggaaaagttcgggaggaagctttatgaatccttactggtgtgagtgccccaccctcagccctgtgccctcctaggccctgactaacccctctcattactcygttctcacatgcatgcccctgcttgccttgcagtgggagccttcccgacatgaacaagatgctggataaggaagacttcactatgatgaagagagccatc

SEQ ID NO: 140876 - DNA, 201 bp, Homo sapiens
agactgctagctcgctcctcaccctccatgcacccacacttacaacggttgccatgatgctcaccaactgccagagtcctagcggaaacggaaacgcgcgrggagcgagatgttctggctcctctaggctagctggttcttcaaagatctcgatggttcctcataaatatgtaaatattgtgggggcgtggcgggacttta

SEQ ID NO: 140877 - DNA, 201 bp, Homo sapiens
tgggtggcatctacacggtgctgcagacgaaggcgaaggtgacaggggacgaatggggcgacaactacttcctggtggggccgtacacggagcagggcgtsaggacccaggtggaactgctggaggcccccaccccggccctgaagaggacactggattccatgaacagcaagggctgcaaggtgggacgtggcccagccc

SEQ ID NO: 140878 - DNA, 201 bp, Homo sapiens; identical to SEQ ID NO: 25578

SEQ ID NO: 140879 - DNA, 201 bp, Homo sapiens; identical to SEQ ID NO: 25579

SEQ ID NO: 140880 - DNA, 201 bp, Homo sapiens; identical to SEQ ID NO: 25580

SEQ ID NO: 140881 - DNA, 201 bp, Homo sapiens
gatgcctgggtgggactgtgaggtcctcagctcaccctggtttgcacccacatcgccgtatgcaggcccaggggtaccgctacccacggccagcctcggtrccaccgtcgccctcgctgtcacgacactccagcccgcaccagagtgaggacgaggaggatccccggaacgggccgctggaggaagacggcgagcgctacg

SEQ ID NO: 140882 - DNA, 201 bp, Homo sapiens; identical to SEQ ID NO: 25582

SEQ ID NO: 140883 - DNA, 201 bp, Homo sapiens
tcgctcgaacccgggaggcagagattgcagtgagccaagatcgcgccaatgcactccagcatgggtgacagtgagactcggtctcaaaaaaaaaaaaaaaaaaaagaaagaaagaggctgggcgcggtggctcacacctgtaatcccagcactttgggaggctgaggagggcagatcacttgaggtcaggagttcgagatc

SEQ ID NO: 140884 - DNA, 201 bp, Homo sapiens
ctgggggtggggcctggctctcacatcctctgccccctctcctcctttcccctagtactatatgtctgcgcgccacatggcgctgtccaaggcctttccasagcacttcacctacgagcccaacgaggcggatgcggtgagtggaccctggatttctgcttagccaggagctaaagggctgggcttcggtggggtgggggt

SEQ ID NO: 140885 - DNA, 201 bp, Homo sapiens
gcctctgagtagctgggactacaggggtgtgccaccacacctggctaactttttatttttattagagacaggttttcactatattggccaggctggtcttkaactcctgacctcaggtgttccgcctgcctcagcctcccaaagtgctgggattccaggcgtgagccaccacacctagcctttttttgtatttttagtaga

SEQ ID NO: 140886 - DNA, 201 bp, Homo sapiens
gggaggtggaggttgcagtgagccaagatcatatcactgcactccagcctgggcgacagaaaaagacgctgtctcaaaaacaaaacaaaacaaaacaaaamaaaaaattacagaacagaaacccaagaagccaggaagatgggggtaggaaagcccctgagtatggtggggggccgtgaggggagtatagagacccagaaa

SEQ ID NO: 140887 - DNA, 201 bp, Homo sapiens
agccccctgctccctgtggactatgaggagtttgtccgtggctgtcaccttggagtcttcccctcctactatgagccttggggctacacaccgggtgagtrtagtgggcaggggacagcgtggtcatggcatcctagtcagagctagcatgtcttggggcgaggcactggccttctctgagcctgttgccttctttgcaaa

SEQ ID NO: 140888 - DNA, 201 bp, Homo sapiens
tctcctccacaagccccctgctccctgtggactatgaggagtttgtccgtggctgtcaccttggagtcttcccctcctactatgagccttggggctacacrccgggtgagtgtagtgggcaggggacagcgtggtcatggcatcctagtcagagctagcatgtcttggggcgaggcactggccttctctgagcctgttgcc

SEQ ID NO: 140889 - DNA, 201 bp, Homo sapiens; identical to SEQ ID NO: 25589

SEQ ID NO: 140890 - DNA, 201 bp, Homo sapiens
tatgatgaagagagccatctttgcaacgcaggtatggattggacctctgtgcagagagatagcagttcctggcagccccagaggcagcttgccaggccagstcagaccccagagattgctgggagtcctgctttctcctgcagccctttatgaagggatctattctgaggtccacagaagggcacgtgctgactcgtgcaa

SEQ ID NO: 140891 - DNA, 201 bp, Homo sapiens
ttcgggcgctggctgatcgagggaggccctctggtggtgctcctggacgtgggtgcctcagcttgggccctggagcgctggaagggagagctctgggatayctgcaacatcggagtgccgtggtacgaccgcgaggccaacgacgctgtcctctttggctttctgaccacctggttcctgggtgaggtaggccccgtctga

SEQ ID NO: 140892 - DNA, 201 bp, Homo sapiens
gcggtcagccccaattccctttttccataggccttgttttatagatagattgatagatagtactagtctgttttcacaccgctataaaaaaaaaaatccargactgggtaatttataacggaaagaggtgtaattgactcaccgttccacatgtctggagaggcctcagaaaactcagtcatggcagaaggggaagaaaga

SEQ ID NO: 140893 - DNA, 201 bp, Homo sapiens
tgactgtgccactgtacaccagcctgggggacagagccagatcccacactagccccccacccacccccaaaagaaagtcaaggcccagcttggtagctcayacctgtcagtattcccagcactttgggaggctgaggtgggaggatcgcttgagcccaggagtttgagaccagcctgggcaacatgatgaaaccctgtctc

SEQ ID NO: 140894 - DNA, 201 bp, Homo sapiens
cacacctgtaatcccggcactttgggaggccgaggcgggtggatcacctgaggtcgggagtttgagaccagcttgaccaacatggtgaaaccccgtctttmctaaaaataaaaaaaatcagcagggcgtggtgacacacatctgtagtcctagctactcgagaggctaagcaggagaatcgctcgaacccgggaggcagag

SEQ ID NO: 140895 - DNA, 201 bp, Homo sapiens
accctcagccctgtgccctcctaggccctgactaacccctctcattactccgttctcacatgcatgcccctgcttgccttgcagtgggagccttcccgacrtgaacaagatgctggataaggaagacttcactatgatgaagagagccatctttgcaacgcaggtatggattggacctctgtgcagagagatagcagttcc

SEQ ID NO: 140896 - DNA, 201 bp, Homo sapiens
ggatcccagtggtcttgacagaaaggctggctggttccaggcttcccccacatgatcctggcctccccctcctttctttctgcgcaggtgaacggcagcgrgcagacagtggttgccttcttcatcatgccagcgcggaccaacaatttcaacgtggaaaccctcaaaggccaagctgtgcgcaaacagctttggttagca

SEQ ID NO: 140897 - DNA, 201 bp, Homo sapiens
attacctaagacatcctctgcccccccacccatagcttctgggatttgtagttttgaggccagggctagcgggtgagggctttgggctttaccgtgccttstgggttctttaggcatctggacttcaacttggacaagaccttatacttctttatcgccggccgctatgagttctccaacaagggtgctgacgtcttcctg

SEQ ID NO: 140898 - DNA, 201 bp, Homo sapiens
tattacctaagacatcctctgcccccccacccatagcttctgggatttgtagttttgaggccagggctagcgggtgagggctttgggctttaccgtgcctkgtgggttctttaggcatctggacttcaacttggacaagaccttatacttctttatcgccggccgctatgagttctccaacaagggtgctgacgtcttcct

SEQ ID NO: 140899 - DNA, 201 bp, Homo sapiens
tcttcatttattcattcaaccacaacattgatctgaatgaacaaataaaacatgggaccctcacccccaatcccagatattgtgacccccaatgggctgartgtgaagaagttttctgccatgcatgagttccagaacctccatgctcagagcaaggctcgaatccaggagtttgtgcggggccatttttatgggtacgtg

SEQ ID NO: 140900 - DNA, 201 bp, Homo sapiens; identical to SEQ ID NO: 25571

SEQ ID NO: 140901 - DNA, 201 bp, Homo sapiens
gtaatcccaacacttttggaggccaaggcgggaggatcacttgagcccaggagatggagaccagcctgggcaacatggtgaaaccccatctctacaaaaartacaaaaattagccaggcatggtggctcacacgtgtagtcccagctactcgggagggtgaacggggaggatcacgcgagcccgggaggtggaggttgcag

SEQ ID NO: 140902 - DNA, 201 bp, Homo sapiens; identical to SEQ ID NO: 25573

SEQ ID NO: 140903 - DNA, 201 bp, Homo sapiens
gggctcaggattaaaggaaatctccatctaaagagaagaactacaactcccaggaggccccgtgatgcctctgtattacctaagacatcctctgccccccmacccatagcttctgggatttgtagttttgaggccagggctagcgggtgagggctttgggctttaccgtgccttgtgggttctttaggcatctggacttca

SEQ ID NO: 140904 - DNA, 201 bp, Homo sapiens; identical to SEQ ID NO: 25574

SEQ ID NO: 140905 - DNA, 201 bp, Homo sapiens
tgggggagggggcagctgggggcccagactcctgggtctgagggagggggcacctgggtattcggcctccttaattcttgagcgctggaacaatgggctcrggattaaaggaaatctccatctaaagagaagaactacaactcccaggaggccccgtgatgcctctgtattacctaagacatcctctgcccccccacccat

SEQ ID NO: 140906 - DNA, 201 bp, Homo sapiens; identical to SEQ ID NO: 25575

SEQ ID NO: 140907 - DNA, 201 bp, Homo sapiens; identical to SEQ ID NO: 25576

SEQ ID NO: 140908 - DNA, 201 bp, Homo sapiens
ttgattctattttcatcctcctctgaaaaatgagtcactgcagtcagagagggaaggccacctgtccctgaccacacagctgatgtcaggcacgtgggtcctaagccttccagggcctgccccctgggtccccatcctccagcctggaggccccagggcacggcttccctgctcacacctcagtttccttgctatcctaga

SEQ ID NO: 140909 - DNA, 201 bp, Homo sapiens
agaatcttactttcttttcgtataaaatggggcttagcattgccatctgcaggacaagtacaagtcctaataatagctgacatttctggaaggcttgccaygtgtactttttggcatgacatcattgggtcctcatcgcaaacctctgaggttgattctattttcatcctcctctgaaaaatgagtcactgcagtcagaga

SEQ ID NO: 140910 - DNA, 201 bp, Homo sapiens
actttgggaggccgaggcgggtggatcacctgaggtcgggagtttgagaccagcttgaccaacatggtgaaaccccgtctttcctaaaaataaaaaaaatyagcagggcgtggtgacacacatctgtagtcctagctactcgagaggctaagcaggagaatcgctcgaacccgggaggcagagattgcagtgagccaagat

SEQ ID NO: 140911 - DNA, 201 bp, Homo sapiens
ctgtctcaaaaaaaaaaaaaaagaaaaaagaaaagagaaaagaaaaagagacaaagaaagaaaaataaatgaggccagagctatgggaggattttaagtgraggagtgaccgtggggctgttgtgtgacactgctagctttacttgtgtgcctaagtggtcctttctcagaatcttactttcttttcgtataaaatggggc

SEQ ID NO: 140912 - DNA, 201 bp, Homo sapiens
cttgaacccgggaggtgaaggttgcagtgagccgagattgtgccactgcactacagcttgggtgacagagtgagaccctgtctcgaaagaaaaaaaaaaaagcataaaaatccatcaaaaaattataatacattccttgaactatttctcaaggttgttaaaggtattaaacaagacgtactagatgctctgtacacaggg

SEQ ID NO: 140913 - DNA, 201 bp, Homo sapiens
cagtgagccgagatcatgccacggcactccagcctgggcaacagagccagactccgtctcaagaaaaaaaaaaaattagccaggtgtgggagcgggtgccygtaatcccagctacttgggaggctgaggcaggagaattgcttgaacccgggagacagaggttgcagtgagctgagatcgcaccactgcactccagcctgg

SEQ ID NO: 140914 - DNA, 201 bp, Homo sapiens
atcctgggaaggaggagcttgcacccttggagaccaggggcaccaggaaatgggggggctctcgggccgctgggagaggaggggtcctggtgccacagagwcctggagaccatgaagatctccccaggatgttttctgaacctgggtcctggcctccacaggtatctacattcttgaccggcggttccgcagcctggatga

SEQ ID NO: 140915 - DNA, 201 bp, Homo sapiens
ccaatttctcttgggaccccagtgtctggacctccagagtcttctccccaatccttctaaccggactgctgtcccctcccacccagttcaacgtggacaargaagcaggggagaggcagatctaccaccgatactgcatggaaagggcggcagcccactgcgctcacgtcttcactactgtgtcccagatcaccgccatcg

SEQ ID NO: 140916 - DNA, 201 bp, Homo sapiens
cttgtgggttctttaggcatctggacttcaacttggacaagaccttatacttctttatcgccggccgctatgagttctccaacaagggtgctgacgtcttyctggaggcattggctcggctcaactatctgctcagagtgaggcctgggctatgaggggacagggagggcaagcaaagcagtttataactagggagaacag

SEQ ID NO: 140917 - DNA, 201 bp, Homo sapiens
ctgtgcagtagtggtgacagattgacctctccccgagtccttgtccctactggggattgccgattcttttcccaacactcgtggagacagtggccctgtcyctgttgcccacagttcctggcacagagtgaggagaagccacatgtggttgctcacttccatgagtggttggcaggcgttggactctgcctgtgtcgtgcc

SEQ ID NO: 140918 - DNA, 201 bp, Homo sapiens
gggtattcggcctccttaattcttgagcgctggaacaatgggctcaggattaaaggaaatctccatctaaagagaagaactacaactcccaggaggccccrtgatgcctctgtattacctaagacatcctctgcccccccacccatagcttctgggatttgtagttttgaggccagggctagcgggtgagggctttgggct

SEQ ID NO: 140919 - DNA, 201 bp, Homo sapiens
tgatcgagggaggccctctggtggtgctcctggacgtgggtgcctcagcttgggccctggagcgctggaagggagagctctgggatacctgcaacatcggrgtgccgtggtacgaccgcgaggccaacgacgctgtcctctttggctttctgaccacctggttcctgggtgaggtaggccccgtctgacacattccaccca

SEQ ID NO: 140920 - DNA, 201 bp, Homo sapiens
atttcgggcgctggctgatcgagggaggccctctggtggtgctcctggacgtgggtgcctcagcttgggccctggagcgctggaagggagagctctgggayacctgcaacatcggagtgccgtggtacgaccgcgaggccaacgacgctgtcctctttggctttctgaccacctggttcctgggtgaggtaggccccgtct

SEQ ID NO: 140921 - DNA, 201 bp, Homo sapiens
aaccccatcccaggtgtatttcgggcgctggctgatcgagggaggccctctggtggtgctcctggacgtgggtgcctcagcttgggccctggagcgctggragggagagctctgggatacctgcaacatcggagtgccgtggtacgaccgcgaggccaacgacgctgtcctctttggctttctgaccacctggttcctggg

SEQ ID NO: 140922 - DNA, 201 bp, Homo sapiens
gggagaaccacggatgagtgaagatatgaggctgaagcccagagcctccctatggtgcctccccaaccccatcccaggtgtatttcgggcgctggctgatsgagggaggccctctggtggtgctcctggacgtgggtgcctcagcttgggccctggagcgctggaagggagagctctgggatacctgcaacatcggagtgc

SEQ ID NO: 140923 - DNA, 201 bp, Homo sapiens
gagcagggcgtgaggacccaggtggaactgctggaggcccccaccccggccctgaagaggacactggattccatgaacagcaagggctgcaaggtgggacrtggcccagcccagggcagaagcgggtggacagcctgccatcggggtgggagccacagacggagagggtgcagggtggacagccccagccagagagcgagg

SEQ ID NO: 140924 - DNA, 201 bp, Homo sapiens
actcgtggagacagtggccctgtccctgttgcccacagttcctggcacagagtgaggagaagccacatgtggttgctcacttccatgagtggttggcaggygttggactctgcctgtgtcgtgcccggcgactgcctgtagcaaccatcttcaccacccatgccacgctgctggggcgctacctgtgtgccggtgccgtgg

SEQ ID NO: 140925 - DNA, 201 bp, Homo sapiens
cttggcaaaaccccgtcactactaaaaatacaaaaattagctaggcgtggtggcacatgcctgtaatcccagctacttgggaggctgaggcaaggagaatygcttgaacctgggaggcagaggttgcaatgagctgagatagcgccattgcactccagcctgggcaacaagagagaaactctgtctcaaaagaaaaaaaaa

SEQ ID NO: 140926 - DNA, 201 bp, Homo sapiens
gtgggtggatcacctgaggtcaggagttcgagaccagtctggccaacttggcaaaaccccgtcactactaaaaatacaaaaattagctaggcgtggtggcrcatgcctgtaatcccagctacttgggaggctgaggcaaggagaattgcttgaacctgggaggcagaggttgcaatgagctgagatagcgccattgcactc

SEQ ID NO: 140927 - DNA, 201 bp, Homo sapiens
gggggtctcaccacgttggtcaggctagtctcgaactcctgacctcaggtgatccacccacctcggcctcccaaagtattgggattacaggcgtgagccaygcacccagcctaggacttggtttttctaacttttattcctctgaatccaggttggtcatgcagcattaaactttgacaaggccactgacatcgtgacagg

SEQ ID NO: 140928 - DNA, 201 bp, Homo sapiens
gataagaggttgttgtgttggtggtatatttagtttggatttaggagaatatatattatgtggttcactgacacttctatatctagttaactgattgatarctgccttagtgtagaaatggcttccaggaaaactcctaccacccactgtgccaatttcacctggcattatgatactaaattgcaggtgtgttcagcagct

SEQ ID NO: 140929 - DNA, 201 bp, Homo sapiens
gcgccaccatgcccagctaattttgaatttttagtagagatgggggtctcaccacgttggtcaggctagtctcgaactcctgacctcaggtgatccacccmcctcggcctcccaaagtattgggattacaggcgtgagccacgcacccagcctaggacttggtttttctaacttttattcctctgaatccaggttggtcat

SEQ ID NO: 140930 - DNA, 201 bp, Homo sapiens
gcaattctcctgccttagcctcccgagtaactgggattacaggcatgcgccaccatgcccagctaattttgaatttttagtagagatgggggtctcaccaygttggtcaggctagtctcgaactcctgacctcaggtgatccacccacctcggcctcccaaagtattgggattacaggcgtgagccacgcacccagcctag

SEQ ID NO: 140931 - DNA, 201 bp, Homo sapiens
gctgtcctcgaagacagtcttagattcttaaaattaaatcttattttatttttttggagacagtgtcttgctctgttgcccaggctggagtgcagtggtgygatctcagctcactgcaacctctgctgcctcctgggttcaagcgattcttatgcctcagcatcccatgtggctggaattacaagcatgcaccaccacgcg

SEQ ID NO: 140932 - DNA, 201 bp, Homo sapiens
tcatctgcctctatttcacatctactttctctgttggttttttagattggacaagctgtcctcgaagacagtcttagattcttaaaattaaatcttatttwatttttttggagacagtgtcttgctctgttgcccaggctggagtgcagtggtgtgatctcagctcactgcaacctctgctgcctcctgggttcaagcgat

SEQ ID NO: 140933 - DNA, 201 bp, Homo sapiens
tctcccgagtgtctgggattacaggcgcccaccaccacacttggctaatttttgtatttttagcagagatggggtttcaccatgttggccaggctggtctygaactcctgatctcaagtgatccacccgccttggcttcccaaggtgctgggattacaggcgtgagccactgcgcctggccaaaaagctgcctttaaaaaa

SEQ ID NO: 140934 - DNA, 201 bp, Homo sapiens
agtgattctccttcctcagtctcccgagtgtctgggattacaggcgcccaccaccacacttggctaatttttgtatttttagcagagatggggtttcaccrtgttggccaggctggtcttgaactcctgatctcaagtgatccacccgccttggcttcccaaggtgctgggattacaggcgtgagccactgcgcctggcca

SEQ ID NO: 140935 - DNA, 201 bp, Homo sapiens
tcgagtgattctccttcctcagtctcccgagtgtctgggattacaggcgcccaccaccacacttggctaatttttgtatttttagcagagatggggtttcrccatgttggccaggctggtcttgaactcctgatctcaagtgatccacccgccttggcttcccaaggtgctgggattacaggcgtgagccactgcgcctgg

SEQ ID NO: 140936 - DNA, 201 bp, Homo sapiens
cctgtgcaggtagaagcaaactgctgctttgcaaagatctcagggatagaaaagctgctttatttatttatttattttatttattttgagacggagtctcrctctgtcacccaggctggaatgcagtggcgcgacctgggctcactgcgacctcctgggttcgagtgattctccttcctcagtctcccgagtgtctgggat

SEQ ID NO: 140937 - DNA, 201 bp, Homo sapiens
gaaagaaagaaagaaagaaagaaagagaaagagagagaaagaaagaaagaaagaaagaaagaaagaaagaaagaaagaaagaaagaaagaaagaaaggaargaaggaaggaaggaaagaaagaaaaagaaagaaagagaaagagaaggaaaatatgtgtatggtatatataccattttaatcatttcttaaagtaaacatt

SEQ ID NO: 140938 - DNA, 201 bp, Homo sapiens
tgctagctacacaaataaagaatagaccactagctacactaataaagaaaaaagagagacaatccaaaaaacacaatcagaaatggcaaagaggacattaygactgaccgcacagaaattaaaaaaaaaaaaaccctcagagactactatgaacatctctatgcacacaaactaaaaaaaaaaacaacctagaagaaatgg

SEQ ID NO: 140939 - DNA, 201 bp, Homo sapiens
tgtagagtctcctatcatttgcattgaaaagatcatttaaatgcatgttctccagaagaattcacaaaataataacattacctctggggatctggaggggyaggaggatttgctttttactattgtactgttgtactttcagattttgtaccatatacatatattacctatttagaaagtaattttctaataagatagata

SEQ ID NO: 140940 - DNA, 201 bp, Homo sapiens
tcttgttaggagctgttactgttattattcttattattactcttattgttattatcatcattattattagttcagtcctgtgctgggtcttatgaaggatrtctatggggttcctacctttaagaaacttccagtatcactggcaacaggcaattacaaggggatcttgaagagaaaaaactaatagttcttgcatgttgt

SEQ ID NO: 140941 - DNA, 201 bp, Homo sapiens
aaatcatgttttttaatatttgtaaagcaatttgaaagagaaagatgattccatgccgattattgggctcatcaagaccagttagttaaaaaatacaactrtgggtcagatgagaggacagaggcaaataacatgcaattgttcatgttgtcaaatcacaagtatttggaatttcaatctgttttcattttctgtcatctc

SEQ ID NO: 140942 - DNA, 201 bp, Homo sapiens
ggtttaatgggagctaatacatatgtacttgctatgtgccaggcatttttctaatttatttacatgttcttatttaatccttaaaacaaccctatgtggtragtactatttttatccccattttacaggtgggaaagctgaaacagagagaggttaagaaattttcccttgtcggacattgtggctcacgcctgtaatccc

SEQ ID NO: 140943 - DNA, 201 bp, Homo sapiens
aaagaaagaaagaaagaaagaaagaaagagaaagagagagaaagaaagaaagaaagaaagaaagaaagaaagaaagaaagaaagaaagaaagaaagaaaggaaggaaggaaggaaggaaagaaagaaaaagaaagaaagagaaagagaaggaaaatatgtgtatggtatatataccattttaatcatttcttaaagtaaac

SEQ ID NO: 140944 - DNA, 201 bp, Homo sapiens
agaaagaaagaaagaaagaaagaaagaaagagaaagagagagaaagaaagaaagaaagaaagaaagaaagaaagaaagaaagaaagaaagaaagaaagaaaggaaggaaggaaggaaggaaagaaagaaaaagaaagaaagagaaagagaaggaaaatatgtgtatggtatatataccattttaatcatttcttaaagtaa

SEQ ID NO: 140945 - DNA, 201 bp, Homo sapiens
aagaaagaaagaaagaaagaaagaaagaaagagaaagagagagaaagaaagaaagaaagaaagaaagaaagaaagaaagaaagaaagaaagaaagaaagaaaggaaggaaggaaggaaggaaagaaagaaaaagaaagaaagagaaagagaaggaaaatatgtgtatggtatatataccattttaatcatttcttaaagta

SEQ ID NO: 140946 - DNA, 201 bp, Homo sapiens; identical to SEQ ID NO: 25625

SEQ ID NO: 140947 - DNA, 201 bp, Homo sapiens
taaatcccatccagtcccgaaacacggtgagttgactttctagcaaagcatctgagatctggtcatgagcaggaagtgcacaggtggacattgtgtcaggstgacatttctcctttcacagacagtggagtatgtgacattcaccagcattgctggtctcactggagtgatcatgacaatagccttgattctcatggtaac

SEQ ID NO: 140948 - DNA, 201 bp, Homo sapiens
aaagaaagaaagaaagaaagaaagaaagaaagagaaagagagagaaagaaagaaagaaagaaagaaagaaagaaagaaagaaagaaagaaagaaagaaagraaggaaggaaggaaggaaggaaagaaagaaaaagaaagaaagagaaagagaaggaaaatatgtgtatggtatatataccattttaatcatttcttaaagt

SEQ ID NO: 140949 - DNA, 201 bp, Homo sapiens
aggaagaaaagaaagaaagaaagaaagaaagaaagaaagaaagagaaagagagagaaagaaagaaagaaagaaagaaagaaagaaagaaagaaagaaagaragaaagaaagaaaggaaggaaggaaggaaggaaagaaagaaaaagaaagaaagagaaagagaaggaaaatatgtgtatggtatatataccattttaatca

SEQ ID NO: 140950 - DNA, 201 bp, Homo sapiens
tgaccttgcataattctttgtcccaaaccatccttctttgtctatttcagtggaattgtccggggtcaaacagaggagagcatgaatgagagtcatcctcrcaagtgtgcagagtcttttgagatgtgggatgatcgtgactcccactgtaggcgccctaagtttgaagggcatccccctgaggtaagagccctacgggca

SEQ ID NO: 140951 - DNA, 201 bp, Homo sapiens
cttggcttcccaaagtgttgggattacaggcgtgagccaccgcacccggccttgaaacatttgttttaaaatagttggccaggagtggtggctcatgcctrtaatcccagcactttgggaggctgaggcaggtggatcattcgaggccagcagttccagaccagcctggccagcatggtgaatctccatctctactgaaaa

SEQ ID NO: 140952 - DNA, 201 bp, Homo sapiens
gagacagtctccctctgttactcaggctagagtgcagtggtgtgatcttgtctcactgcaacctctgcctcctgggttcaagtgattctcctgcctcagcytcccaagtagctgggactacaggcgcgcaccaccacgccctgctaatttttgtatatttagtagagacggggttttgccacgttgaccagactggtctcg

SEQ ID NO: 140953 - DNA, 201 bp, Homo sapiens
actctgaagccatcttggtaaatttccccaacagtgtgaagttagcattccttcagggtgatgccaggttctatttggaatttatatacaacctgcttggrtggagaagccattgtcttcagaaaccttggtgtaattgaattgatagttactgttgtgacctgaagttcaccattaaaagggactacccaagcaaaatca

SEQ ID NO: 140954 - DNA, 201 bp, Homo sapiens
tccaacaaagggttttaatgtagattttttttgcacccatgcaaaaaattgctatatgtgatagtctgatcatgacgctgaataaatgtctttttttttttaatgtgctgtgtaaagttagtctactctgaagccatcttggtaaatttccccaacagtgtgaagttagcattccttcagggtgatgccaggttctatttg

SEQ ID NO: 140955 - DNA, 201 bp, Homo sapiens
tcttaaattcatgctctgctcaccttgggaaaatacagataacaatttgattcgctatgaagtagagcagataagcagcagaggaagaagtttaaatccayagtcaattatgcattaatgacagcaggagttcaattataacaccagtgagtggagatctagagaaatgaacatacattggcatatttaaatgtgctgcaa

SEQ ID NO: 140956 - DNA, 201 bp, Homo sapiens
ttaattgggaatcaaagcttagcaggagaggagagccagagaagtgacagagaagctacaggttacaacagattcatgaactcagccaaacacagtggtgrcagggcctagctgccacaaagaagacatgttttatacaaatactcatgtttatgggcaaaaaagtcaaggactgtatttgtgactaattgtataacaggt

SEQ ID NO: 140957 - DNA, 201 bp, Homo sapiens
actcacaatctgaaaacagaaaaatgtgtgtcagggtgtaattaaaaaggcaggcccatctggaatggtttagttcttttcagttaggtattgttataggygctaaatttgttctttgtttcttcagatatccatttattcacttattgccatcttttaggtgcaacagtttgaatgctctagtccaagaaatggcaaatg

SEQ ID NO: 140958 - DNA, 201 bp, Homo sapiens
tgtccctgtcgtcattagagtttgctttctttggtctatgtgcttcattcacaggttgttatgcacccatccaaagttttggaattgcagatgaacaagcrtggcttcagcatggaagtggggcagtatatctttgttaattgcccctcaatctctctcctggaatggcatccttttactttgacctctgctccagaggaa

SEQ ID NO: 140959 - DNA, 201 bp, Homo sapiens
aacatggtgaaaccccatctctaataaaaatacaaaatttagctgggcatgctggtgcgtgcctgtagtcccagctactcaggaggctgaggcaggaaaawtgcttgaacctgggaggtggaggttgcagtgaaccgagattgtgccactgcactccagctgggggacagagcaagactccatctcaaaaaaagaaaagaa

SEQ ID NO: 140960 - DNA, 201 bp, Homo sapiens
gccaacatggtgaaaccccatctctaataaaaatacaaaatttagctgggcatgctggtgcgtgcctgtagtcccagctactcaggaggctgaggcaggaraattgcttgaacctgggaggtggaggttgcagtgaaccgagattgtgccactgcactccagctgggggacagagcaagactccatctcaaaaaaagaaaa

SEQ ID NO: 140961 - DNA, 201 bp, Homo sapiens
aaaaacacaaattatcccataacaaagtgtgcaaagtctcaaaaaaaaaaaaaagtgggcaaaggacataaagaaacacttttcaaaagaagacacacacrcagccaacaagcatatgaaaaaatgctcaacatcgccgatcattagagaaatgcaaatccaaaccacaatgacacaccatctcacgccagtcagaatggc

SEQ ID NO: 140962 - DNA, 201 bp, Homo sapiens
gaggttaagaaattttcccttgtcggacattgtggctcacgcctgtaatcccagcacttagggaggctgaggcaggcggatcacttgaggtcaggagtttkagaccagcctggccaacatggtgaaaccccatctctaataaaaatacaaaatttagctgggcatgctggtgcgtgcctgtagtcccagctactcaggagg

SEQ ID NO: 140963 - DNA, 201 bp, Homo sapiens
gcagcacatcaaaaagctaatccaccacgatcaagtaggctttatccctgggatgcaagtttggttcaacatatgcaaatcaataaatgtgattcatcacrtaaagagaactaaagacaaaaatcatatgatcatctcagtagatacacaaaaggctttcaataaaattcaacattccttcatatgaaaaactctcagcaa

SEQ ID NO: 140964 - DNA, 201 bp, Homo sapiens
ggtggctcacacctgtaatcccagcaatttgggaggctgaggtgggtggattgcttgagcccaggagtttgagaccagcctgggcaacatggcaaaaccckatctctacaaaaaatacaaaaattagttgggcatggtggtgtggagggtgaggtgaaaggattacttgagcctgggaggctgaggctgcagtgagctgta

SEQ ID NO: 140965 - DNA, 201 bp, Homo sapiens
gggccgggcacggtggctcacacctgtaatcccagcaatttgggaggctgaggtgggtggattgcttgagcccaggagtttgagaccagcctgggcaacayggcaaaaccccatctctacaaaaaatacaaaaattagttgggcatggtggtgtggagggtgaggtgaaaggattacttgagcctgggaggctgaggctgc

SEQ ID NO: 140966 - DNA, 201 bp, Homo sapiens
gcctgggcaacatggcaaaaccctgtctctaccaaaaatacaaaaattggctgggtatggtggtgcacgcctgtagtcccagctactcaggaggctgaggygggaggatggcttgagcccaggaggcagaggatgcagtgagccgatatctcgccactgcactccagcctgggcaatagtgccagaccttgtctcaaaaag

SEQ ID NO: 140967 - DNA, 201 bp, Homo sapiens
atttcagtggaattgtccggggtcaaacagaggagagcatgaatgagagtcatcctcgcaagtgtgcagagtcttttgagatgtgggatgatcgtgactcycactgtaggcgccctaagtttgaagggcatccccctgaggtaagagccctacgggcaaggacagactcttgttaggagctgttactgttattattcttat

SEQ ID NO: 140968 - DNA, 201 bp, Homo sapiens
gctcaggagttccagaccagcctgggcaacatggcaaaaccctgtctctaccaaaaatacaaaaattggctgggtatggtggtgcacgcctgtagtcccasctactcaggaggctgaggtgggaggatggcttgagcccaggaggcagaggatgcagtgagccgatatctcgccactgcactccagcctgggcaatagtgc

SEQ ID NO: 140969 - DNA, 201 bp, Homo sapiens
agtctattgccttcttgggctaagctctttacaattgataagggagcaacctatccctggagttatgagaataagtgatcacttctcttggccaggacatycacttctacagatttatcataagaacagggtcttcttttcaatttggagtttaagatcaccctgaccaaagatgttggaaggctcgttcctaaggaaaat

SEQ ID NO: 140970 - DNA, 201 bp, Homo sapiens
gcgggcgcctgtagtcccagctactcgggagactgaggcagaagaatggcgtgaacccagaaggcggagcttgcagtgagccgagatcgcgccactgcacyccagcctgggcgacagagccagactctgtctcaaaaataaatacataaataaataaatactttttttttgtagacatgaggtctccgtgttgctcaggct

SEQ ID NO: 140971 - DNA, 201 bp, Homo sapiens
tgttaattgcccctcaatctctctcctggaatggcatccttttactttgacctctgctccagaggaagatttcttctccattcatatccgagcagcagggractggacagaaaatctcataagggctttcgaacaacaatattcaccaattcccaggtaggtccttgagaccaggagagtcccagaccaggatgcagactg

SEQ ID NO: 140972 - DNA, 201 bp, Homo sapiens
gaggccgaggcgggcggatcacgaggtcaggagatcgagaccacggtgaaaccccatctctactaaaaatacaaaaaattagccaggcgtggtggcgggcscctgtagtcccagctactcgggagactgaggcagaagaatggcgtgaacccagaaggcggagcttgcagtgagccgagatcgcgccactgcactccagcc

SEQ ID NO: 140973 - DNA, 201 bp, Homo sapiens
agtagctgctgccctctttagagaggacttgtgtttgtagttcaccactgtcaccagccctccagcttcactcatttgctttatctgcctgtccctgtcgycattagagtttgctttctttggtctatgtgcttcattcacaggttgttatgcacccatccaaagttttggaattgcagatgaacaagcgtggcttcagca

SEQ ID NO: 140974 - DNA, 201 bp, Homo sapiens
tttaaaaacatttttttgccaggcgctgtggctcacgcctgtaatcccagcactttgggaggccgaggcgggcggatcacgaggtcaggagatcgagaccmcggtgaaaccccatctctactaaaaatacaaaaaattagccaggcgtggtggcgggcgcctgtagtcccagctactcgggagactgaggcagaagaatgg

SEQ ID NO: 140975 - DNA, 201 bp, Homo sapiens
cagtggcgcgacctgggctcactgcgacctcctgggttcgagtgattctccttcctcagtctcccgagtgtctgggattacaggcgcccaccaccacactyggctaatttttgtatttttagcagagatggggtttcaccatgttggccaggctggtcttgaactcctgatctcaagtgatccacccgccttggcttccca

SEQ ID NO: 140976 - DNA, 201 bp, Homo sapiens
aaatccataatttaaaaacatttttttgccaggcgctgtggctcacgcctgtaatcccagcactttgggaggccgaggcgggcggatcacgaggtcaggaratcgagaccacggtgaaaccccatctctactaaaaatacaaaaaattagccaggcgtggtggcgggcgcctgtagtcccagctactcgggagactgaggc

SEQ ID NO: 140977 - DNA, 201 bp, Homo sapiens
acccaggctggaatgcagtggcgcgacctgggctcactgcgacctcctgggttcgagtgattctccttcctcagtctcccgagtgtctgggattacaggcrcccaccaccacacttggctaatttttgtatttttagcagagatggggtttcaccatgttggccaggctggtcttgaactcctgatctcaagtgatccacc

SEQ ID NO: 140978 - DNA, 201 bp, Homo sapiens
tttagtttggatttaggagaatatatattatgtggttcactgacacttctatatctagttaactgattgatagctgccttagtgtagaaatggcttccagraaaactcctaccacccactgtgccaatttcacctggcattatgatactaaattgcaggtgtgttcagcagctaatgaaaatgttgtttttatgggttttg

SEQ ID NO: 140979 - DNA, 201 bp, Homo sapiens
agaggttaagaaattttcccttgtcggacattgtggctcacgcctgtaatcccagcacttagggaggctgaggcaggcggatcacttgaggtcaggagttygagaccagcctggccaacatggtgaaaccccatctctaataaaaatacaaaatttagctgggcatgctggtgcgtgcctgtagtcccagctactcaggag

SEQ ID NO: 140980 - DNA, 201 bp, Homo sapiens
tgaaacagagagaggttaagaaattttcccttgtcggacattgtggctcacgcctgtaatcccagcacttagggaggctgaggcaggcggatcacttgagrtcaggagtttgagaccagcctggccaacatggtgaaaccccatctctaataaaaatacaaaatttagctgggcatgctggtgcgtgcctgtagtcccagc

SEQ ID NO: 140981 - DNA, 201 bp, Homo sapiens
gccaacatggcgaaaccccatctctaataaaaaaaaaaaaattagctgagcgtggtggtgcccacctgtaattccagctacttgggaggctgaggcgggaraatcgcttgaacccgggaggcagaggttgcagtgagttgaaatagcgccactacactccagcctgggtgacagagagaggctctgtctcaaaaaaaaaag

SEQ ID NO: 140982 - DNA, 201 bp, Homo sapiens
attaaaaaaaaaaaaggtgaaaagaattagctgggcatggtggcgggcacctgtaatcccagctactagggaggctgaggcaggagaatcgcttgaacccrggaggtggaggttgcagtgaccccagatcataccattgtactccagcccgggtgacagtgcaagactctgtctcaaaaaaaaaaaaaaaaaaaaaacaca

SEQ ID NO: 140983 - DNA, 201 bp, Homo sapiens
ggctcatgcctgtaatcccagcactttgggaggccgaggtgggtggatcacgaggtcaggagatcgagaccatcctggctaacacggtgaaaccctgtctytactaaacatacaaaaaaaaattagccgggtgcggtggcgggcgcctgtagtcccagctacttgggaagctgaggcaggagagtggcgtgaacccaggag

SEQ ID NO: 140984 - DNA, 201 bp, Homo sapiens
atggtggctcgcgcctgtaatcccagcactttgggaggccaaggcagatggatcacgaggtcaggagttcaagaccagcctggccaacatagtgaaacctygtctctactaaaaatacaaaaaattaggccgggcgtggtggctcatgcctgtaatcccagcactttgggaggccgaggtgggtggatcacgaggtcagga

SEQ ID NO: 140985 - DNA, 201 bp, Homo sapiens
gggcatggtggctcgcgcctgtaatcccagcactttgggaggccaaggcagatggatcacgaggtcaggagttcaagaccagcctggccaacatagtgaamccttgtctctactaaaaatacaaaaaattaggccgggcgtggtggctcatgcctgtaatcccagcactttgggaggccgaggtgggtggatcacgaggtc

SEQ ID NO: 140986 - DNA, 201 bp, Homo sapiens
caaagtgttaaacacagtttccagctgggcatggtggctcgcgcctgtaatcccagcactttgggaggccaaggcagatggatcacgaggtcaggagttcragaccagcctggccaacatagtgaaaccttgtctctactaaaaatacaaaaaattaggccgggcgtggtggctcatgcctgtaatcccagcactttggga

SEQ ID NO: 140987 - DNA, 201 bp, Homo sapiens
ctttggcagttcctcaaagtgttaaacacagtttccagctgggcatggtggctcgcgcctgtaatcccagcactttgggaggccaaggcagatggatcacraggtcaggagttcaagaccagcctggccaacatagtgaaaccttgtctctactaaaaatacaaaaaattaggccgggcgtggtggctcatgcctgtaatc

SEQ ID NO: 140988 - DNA, 201 bp, Homo sapiens
gggaaaactctttggcagttcctcaaagtgttaaacacagtttccagctgggcatggtggctcgcgcctgtaatcccagcactttgggaggccaaggcagrtggatcacgaggtcaggagttcaagaccagcctggccaacatagtgaaaccttgtctctactaaaaatacaaaaaattaggccgggcgtggtggctcatg

SEQ ID NO: 140989 - DNA, 201 bp, Homo sapiens
atgggaaggagatgaagctgagattccctgaacaagtagggaggtgatgatcaattcaatgctacaaatattcttgattacctttttttttttttttttttgagatggagtttcgctcttgtcgcccaggctggagtgcagtggtgcgatctctgcttgctgcaatctccgaatcccgggttcaagcgattctcctgcctc

SEQ ID NO: 140990 - DNA, 201 bp, Homo sapiens
ttctcatctattacctgagttaagttatagttggtctatttggtatccttaaaacttaggggttgctttggttggtcgtgtaatactctaagagagagaayaccagttttgccacctgaatgtattgctttgtttcttccataaacatttaaaaaatactctctccatattcaccccatttaaaaattagaaaaataatat

SEQ ID NO: 140991 - DNA, 201 bp, Homo sapiens
ttttttgcacccatgcaaaaaattgctatatgtgatagtctgatcatgacgctgaataaatgtctttttttttttaatgtgctgtgtaaagttagtctacwctgaagccatcttggtaaatttccccaacagtgtgaagttagcattccttcagggtgatgccaggttctatttggaatttatatacaacctgcttgggtg

SEQ ID NO: 140992 - DNA, 201 bp, Homo sapiens
tgttctatggaaagtgtaaagcattccaacaaagggttttaatgtagattttttttgcacccatgcaaaaaattgctatatgtgatagtctgatcatgacrctgaataaatgtctttttttttttaatgtgctgtgtaaagttagtctactctgaagccatcttggtaaatttccccaacagtgtgaagttagcattcctt

SEQ ID NO: 140993 - DNA, 201 bp, Homo sapiens
gtttaaatccataatttaaaaacatttttttgccaggcgctgtggctcacgcctgtaatcccagcactttgggaggccgaggcgggcggatcacgaggtcrggagatcgagaccacggtgaaaccccatctctactaaaaatacaaaaaattagccaggcgtggtggcgggcgcctgtagtcccagctactcgggagactg

SEQ ID NO: 140994 - DNA, 201 bp, Homo sapiens
tctctttcttcctttctttattcttccttccttttctttctctttcttctctctctctttctttccttccttccttccttctttccttctctctttctctytttcttcttttcttttccttccttccttccttctttctttctttgttttcattctttttattttgagacagggtctttctctgttacccaggctggcatg

SEQ ID NO: 140995 - DNA, 201 bp, Homo sapiens
tgcttcaaagagaataaaatacctaggaatccaacttacaagggatgtgaaggacctcttcaaggagaactacaaaccgctgctcaaggaaataaaagagkatacaaacaaatggaagaacattccatactcatggataggaagaatcaatatcgtgaaaatggccatactgcccaaggtaatttacagattcaatgccat

SEQ ID NO: 140996 - DNA, 201 bp, Homo sapiens
aatcaataaatgtaatccagcatataaacagagccaaagacaaaaaccacatgattatctcaatagatgcagaaaaggcctttgacaaaattcaacaaccyttcatgctaaaaactctcaataaattaggtattgatgggacatatttcaaaataataagagctatctatgacaaacccacagccaatatcatactgaatg

SEQ ID NO: 140997 - DNA, 201 bp, Homo sapiens
cctgctcctgctcctgcccctatttcttttttttttttttttacaaggaggaactggtaccattcttctgaaactatttcaatcaatagaaaaagagggaytcctccctaactcattttatgaggccagcatcattctgataccaaagcctggcagagacacaaccaaaaaagagaattttagaccaatatccttgatgaa

SEQ ID NO: 140998 - DNA, 201 bp, Homo sapiens
caggatgcagactggcagaaaagagaaagcaattcttcgttgaatcttaagtttggtacaatagaataggattataataaatatgcagaagtcagccatgrgaacaactatatttctgggaggatgtttgaggttggaggtggaggggagtcttcagttgcccgttatcttctgtcttctgccaggattgaagtggatggt

SEQ ID NO: 140999 - DNA, 201 bp, Homo sapiens
tcattgtatcacaaaaacagccataaacaatacaaaaatgagtagcagtggctaagttccaataccactttatttatggtcactgaaatttgaatttcatrtaactttcacatgccacaaaatattcttctttcgattttctcaaccattagcaaatttgaaaatataaaatataaaaaacaattctgagcttgcaggctg

SEQ ID NO: 141000 - DNA, 201 bp, Homo sapiens; identical to SEQ ID NO: 25636

SEQ ID NO: 141001 - DNA, 201 bp, Homo sapiens; identical to SEQ ID NO: 25637

SEQ ID NO: 141002 - DNA, 201 bp, Homo sapiens; identical to SEQ ID NO: 25638

SEQ ID NO: 141003 - DNA, 201 bp, Homo sapiens; identical to SEQ ID NO: 25639

SEQ ID NO: 141004 - DNA, 201 bp, Homo sapiens; identical to SEQ ID NO: 25640

SEQ ID NO: 141005 - DNA, 201 bp, Homo sapiens; identical to SEQ ID NO: 25641

SEQ ID NO: 141006 - DNA, 201 bp, Homo sapiens; identical to SEQ ID NO: 25642

SEQ ID NO: 141007 - DNA, 201 bp, Homo sapiens; identical to SEQ ID NO: 25643

SEQ ID NO: 141008 - DNA, 201 bp, Homo sapiens; identical to SEQ ID NO: 25644

SEQ ID NO: 141009 - DNA, 201 bp, Homo sapiens; identical to SEQ ID NO: 25645

SEQ ID NO: 141010 - DNA, 201 bp, Homo sapiens; identical to SEQ ID NO: 25646

SEQ ID NO: 141011 - DNA, 201 bp, Homo sapiens; identical to SEQ ID NO: 25647

SEQ ID NO: 141012 - DNA, 201 bp, Homo sapiens; identical to SEQ ID NO: 25648

SEQ ID NO: 141013 - DNA, 201 bp, Homo sapiens; identical to SEQ ID NO: 25649

SEQ ID NO: 141014 - DNA, 201 bp, Homo sapiens
aggctatagtaaaaacaaacaaagaaaaaaaaccaaccaaactgacaacaataacaaaaaaatcctccagaatggtactggtacaaaaacagacacacagaacaatggaacagaatagagatcctggaaacaaggttacatgcctacaactatgtgatcttctacaaagctgccaaaaaacaagcaatgggtgaaaagact

SEQ ID NO: 141015 - DNA, 201 bp, Homo sapiens
aaataatataatgatacagtccgaccttagaaaatctctttttattcccaatatatatttctagaatctgtattttagcttccaggaaagaattcccaaaytggccttcctacaaatcagtgaggatctccaatgttatttggtcatcccccgaggtgtctgagagacatttgttcctccttccccaccttgtccaggagc

SEQ ID NO: 141016 - DNA, 201 bp, Homo sapiens
taaatcagagcatcatcattcccactgtgatgctgggaaatgaaatgatcgtgtcattctgctcagctggcgggctgcagggttctctgtacttaatcacrcaatgcagatcttcccttggctgtaacatttcaaatgttactaccaatttctgtctaatagggtgagcaatgggggtgatggctactctagcagccattg

SEQ ID NO: 141017 - DNA, 201 bp, Homo sapiens
ttctaaatttccttggactatttttactaaattttggcatttctagttgtattctgcaacaacaatgagatacaatgtataagaactatactgcggtactrttgttggaaggtataattcctgtggtttttggtaaaatctgtgtctttgaaaattaagttactactgtaaatacaatggtatttctaatttcttagattt

SEQ ID NO: 141018 - DNA, 201 bp, Homo sapiens
gacatttgttcctccttccccaccttgtccaggagcggcttctgctctccctgctgccggcccacatcgccatggagatgaaagcggagatcatccagagrctgcagggccccaaggcgggccagatggagaacacaaataacttccacaacctgtatgtgaagcggcatacaaacgtgaggtacgacgctatgcttgctc

SEQ ID NO: 141019 - DNA, 201 bp, Homo sapiens
ttacaggcagaaatgcaactgagactccttcatccaactgttgctagtgcagataacagctgctgccccctccacggcatagtggccaccagcacggaagwagcctggtcagtcttttcctagccttcccagcagacagatgtcctcctgcctctctctgcatggccagcctcctgccagcccagcacggcagcactgcct

SEQ ID NO: 141020 - DNA, 201 bp, Homo sapiens
cactcttgcaccaggctcacagacactgaggcatcgaaagcagaaagtagattatctatgaattgatgctgagcagtcccacctcatccatgtgtgactcycccctttgcaggtcagttaccttcatcatcgtgccccacaagtagaaataagatcaagtggagctttgggactccttgtcgtgacgaggtcacacctgga

SEQ ID NO: 141021 - DNA, 201 bp, Homo sapiens
cctctacgtgcctgtctcggtgaacaaatttccccttcttagaggataagggcccacccaattccagttctacctcctcttaactaattaaatctgcaggmgcgctattgccaaataggttcacattcacaggtatcaggactgactttaatatgtgaatttggaaggacacaattcattacccataacagaagtactcaa

SEQ ID NO: 141022 - DNA, 201 bp, Homo sapiens
gaaaattctaagaatttgattaagcaactagtagaattaatatgcaagtgtagcaaggttgaagaatacaatgtcaatgtacaaaaatcagttgtgttttrtatactggtaggaaaaaatgtaaaataaaagtaaaaatctaatttcctttacagtttttttcaaaaattataatatctaataatgaatttaagaaaagac

SEQ ID NO: 141023 - DNA, 201 bp, Homo sapiens
aacagctggagtgtccaggaacagaataatggctatacaaactatgaagtattcatacactggaatacagctgagaagtaaaaaggaacaagcaactgttwcatgcaacatagataagtcacgaaaacatatgctaaatgaaaggaagcccaatgcaaagtgtactgtgtgatttttttatatgagggtaagactggatga

SEQ ID NO: 141024 - DNA, 201 bp, Homo sapiens
tctcccaccctcatccattctcatcctcctgtcttcctttccagatctcagtgcaggcctatgtcgacaccaaactattctgtgtcaattcctgagttctracaaatgtgagggaaaggaactatgcagttaattcaacccgtaacatttgctgcaggtcttcattttcgaataggagacaaggtcatctaatgagccgct

SEQ ID NO: 141025 - DNA, 201 bp, Homo sapiens
ctggtgaaagttaattcatggtataatttccgttgcttcactctagatagaacacaagttttatttggtaactgtttgtatgttacagatatttatttaartataattgtatatgtccatagtcaaaaagcactttaaatacacagggagctaatttgaaagatgaacttaaaatgagagggttaggtactttcgaagcat

SEQ ID NO: 141026 - DNA, 201 bp, Homo sapiens
aagtggcacttgatatttatgttttgcaatatttgtgcttgtttgtgttttcgggtaggaatggatttttggcaaattgttcagatctttagcttttacaytggtgaaagttaattcatggtataatttccgttgcttcactctagatagaacacaagttttatttggtaactgtttgtatgttacagatatttatttaaa

SEQ ID NO: 141027 - DNA, 201 bp, Homo sapiens
ttaggaaagtctgggccttcttttcaggcttcccagaaaggaaaaagaaagaaaaataaggaaaaagtgggcagactacaaaacaatagctcacctgcccygttgcttccagatggtcttaaattaaactaaagtcagttgggcctgggtaatgattttgagagaagcatcaccaagaccctgcagacaagcatgacattg

SEQ ID NO: 141028 - DNA, 201 bp, Homo sapiens
tacatgtgaggttaaccacagtggcgttcactgcagtcttcggaggagcgcagttctgaaggctgctggcctttgacctggccctgtggaaggcccttccrggctctctacttaggtcaaagaaaaggcttgagcatcagttgtgcagactcaacttgtgttaggaaagtctgggccttcttttcaggcttcccagaaagg

SEQ ID NO: 141029 - DNA, 201 bp, Homo sapiens
tgcatgggtgaataattgaaccaagcgcatcctgaacctgttgtgccaaacccatgtctgccaaacccccatgcgtctagtaagtagctgcaagtgctgcygattcgtcattttgcctggcatgtcacacgaacagaaaaaaattcctgcatatctgcccgggtctgttttagtaagttactagcctatgagcagaatata

SEQ ID NO: 141030 - DNA, 201 bp, Homo sapiens
aagctgtcagaaggggagaggattactgcagctacttccaggcttttccactttcctgatgagggaaagtgcaagagtaaacaaataataggtgtctcggyggggatgacagacatgtcttgggaaggaaagcttcatgttctttcttcagttctgccttcaggcttcaatatgtagatgttttgcaaaggtcgcgtgttc

SEQ ID NO: 141031 - DNA, 201 bp, Homo sapiens
atcctcctgtcttcctttccagatctcagtgcaggcctatgtcgacaccaaactattctgtgtcaattcctgagttctgacaaatgtgagggaaaggaackatgcagttaattcaacccgtaacatttgctgcaggtcttcattttcgaataggagacaaggtcatctaatgagccgctgacaggagcccgccgtgcatct

SEQ ID NO: 141032 - DNA, 201 bp, Homo sapiens
acgtttcagtcttggctgggaacagcataactccaatgttcagatgacattctctcctctacgtgcctgtctcggtgaacaaatttccccttcttagaggwtaagggcccacccaattccagttctacctcctcttaactaattaaatctgcaggcgcgctattgccaaataggttcacattcacaggtatcaggactgac

SEQ ID NO: 141033 - DNA, 201 bp, Homo sapiens
gtgtgagtggtgggatgtagccctaggtcgtacccggaagtggctttctccagccactatccacaggatcctggatagactaaactttctgtcagctcctscttcagataagtctatttccagtacttgcatgatttatttttctcacagcttccctctttggaattcagaatgttctcatctagtggcccaacaactggc

SEQ ID NO: 141034 - DNA, 201 bp, Homo sapiens
atattttcccttcaaaaattctcattgtgcaggaacatgagatgcagtcccccgacaagaggccaggcagcgtgtgagtggtgggatgtagccctaggtcrtacccggaagtggctttctccagccactatccacaggatcctggatagactaaactttctgtcagctcctccttcagataagtctatttccagtacttgc

SEQ ID NO: 141035 - DNA, 201 bp, Homo sapiens
agtaactttaatggtttttttcttaatagcagtggatctgaaatgttttttcaggctgaagtgctctaattcctgaaatatgttgaaagtggagtcgagtygacacagtatgtccatactttaggccctgaagaatcttcttggcagcttgcctagaaccccaaagccatctgtgatttgcatacaaatgaacattgtgaa

SEQ ID NO: 141036 - DNA, 201 bp, Homo sapiens
tatagagcagactgacaacttaatcataagacaaataacaacaaaaaactagcaaaaccttcaaaaaatactttatcatggaagacagatggttggcaaayacatgaaaacatattcagtattactgatagggacaggaggcagggaaattctgggcagaagagggtggatccctggtgagggccccaccctcaagcatga

SEQ ID NO: 141037 - DNA, 201 bp, Homo sapiens
gtacaggtatatatatcataatgtaaaagccaataatttaaaactgggtgagaaaataaaatgccacatagaaatcattgtaagagtaaagatttgtagcraatttttttagaacagctggcagagtgagcatgaacctgcctgtcattgtgttgtatgtctgtgtctgcatgaacaacttctatttcagttttgcaccag

SEQ ID NO: 141038 - DNA, 201 bp, Homo sapiens
tattagaaaacctgtagaacaggtccatgccaaggattaaggaatttcaggattaaaattctgagacaaagatccctaagtccgcatgtctttgataaatsatccctggatgttgacagtgacatttgctcatcagccaccagtgcctttggcaaggaattgcctgcaggtggcggatcaggtgacgcatcatcgcggcac

SEQ ID NO: 141039 - DNA, 201 bp, Homo sapiens
  misc_feature (1)...(201): n = A,T,C or G
gcatgctgctcctcctttataaattcctcctagtttctgggaaccccatattctccctctgggatccatgcaagttaagctgaaactgctgctgcttccantgacacctgcccatttcagggctgaatctgagcggcatttgtgaaactgttttcttttctgtatagggccgaattaaacaaacatatcatgtcagttttg

SEQ ID NO: 141040 - DNA, 201 bp, Homo sapiens
ggcggatcaggtgacgcatcatcgcggcactcttgtgggctcctgagacagccatgtaaagagagcctaaggataacatgccaggcgtgtgcagcctgttygggacacttttgtgatgggagtgggtctgatccagataaaaccactgcctcttcctcagggcgtgtgctagggaatcttttgatgtcaggccagctgaac

SEQ ID NO: 141041 - DNA, 201 bp, Homo sapiens
cacttcccaggtaatcccttccctatgggcagttcagctatggtaactggaggctgggagattgaatgtactgtcagagccaccacagcttctccaggcargttgtctgcgctgggtgtgtgcagacggggattactgcagaccagacatttgaagaaatttctacttcctaatgatcattttccagaactattgacagaa

SEQ ID NO: 141042 - DNA, 201 bp, Homo sapiens
tttatatataatatacatttttgaaacaccagtattaacactaatactatgaccactgattgagtgctaagatttttttgttgctgtctccattctaaggmtgcatttcacgaaatacatagggtcggaatattgtgttttaacatcccttggaatattttcttgctgtttttgtgattctccctgatatatagttgtgtt

SEQ ID NO: 141043 - DNA, 201 bp, Homo sapiens
gtccttcagcatgcggtcggtgggttacacgccaaccgataaacagcccttttgcttcttccttctttcccacaattgcacttcccaggtaatcccttccstatgggcagttcagctatggtaactggaggctgggagattgaatgtactgtcagagccaccacagcttctccaggcaagttgtctgcgctgggtgtgtgc

SEQ ID NO: 141044 - DNA, 201 bp, Homo sapiens
aacatggtgaaaccccgtctctactaaaaatacaaaaaaattagctgggcgtgatggagggtacctgtagttccacctactcgggaggctgaggcaggagratggcatgaacccgggagtcggaggttgcagtgagccaggatagcaccactgcactccagcctgggtgacagagcgagactccgtctcaaaaaaaaaaaa

SEQ ID NO: 141045 - DNA, 201 bp, Homo sapiens
tttagatcaattagtaatatgtaaatcctaaattttattttcactctaaaatgctttaaacctgaagtgagttcagctgccagtcctaggttccccaacasttagtgagtcccttcacacatgtgaaaccgatgaaggttttattaggttggtgcaagagtaattgcaaaaaccacaattacctttgcaccaacttaatag

SEQ ID NO: 141046 - DNA, 201 bp, Homo sapiens
gattagtattgtatttcaatattttgatttactttgtttctttgaaaaaataaatcttcttatttgagttgacccttttagatcaattagtaatatgtaawtcctaaattttattttcactctaaaatgctttaaacctgaagtgagttcagctgccagtcctaggttccccaacagttagtgagtcccttcacacatgtg

SEQ ID NO: 141047 - DNA, 201 bp, Homo sapiens
tctatgttgttcttaaaacctaacctttttgtatatataattttatattttgcctatggaattttgttttgttttccttgcagatttttttttttttttttgatggagtcttgctctgtcacccaggctagagtgcagtgcagtggcacaatctcagctcactgcaacctccgcctcctgggttcaagcagttctcctgtc

SEQ ID NO: 141048 - DNA, 201 bp, Homo sapiens
tctcaggaggcggaggttgcagtgagccgagatatcacaacactgcactacagcctgggtaacagagtgagactccgtctcaaaaaaaaaaaaaaaaaaaagagaagaagaagaagaagaaaggcaactgagtttgctccattacattcattacagttactaaataatcacagctgtagtccattgtagctaatgttctag

SEQ ID NO: 141049 - DNA, 201 bp, Homo sapiens
gacagcctgatacctaagtgtttagcctgtggccaggtgtccctctcacgggaagcttgtttatcctggcacatgcccttgtggctctcatctgacctgtrtctagtttattcctaccaaggcagccactctcccagagagccctgaccaggacagaagttaggatggggtagaagaggcaactcatcagaacccatgaaa

SEQ ID NO: 141050 - DNA, 201 bp, Homo sapiens
gagaattgcttgaacccgggaggcagaggttgcagtgagccaagatcacagcactgcactccagcctgggcaacagagcaagactccatctcaaaaaaaaraaaaagaaaaaatatagacattttgctttaaaggaaaaaataaaaataaaaaagaattatagcaattaattaagcagagattcttttaatggttaaatat

SEQ ID NO: 141051 - DNA, 201 bp, Homo sapiens
aatacaaaaattagctgggtgtggtggtgggcacctggaatcccagctactctactcgggaggctaaggcaggagaattgcttgaacccgggaggcagagrttgcagtgagccaagatcacagcactgcactccagcctgggcaacagagcaagactccatctcaaaaaaaagaaaaagaaaaaatatagacattttgctt

SEQ ID NO: 141052 - DNA, 201 bp, Homo sapiens
caatatcttttgggatagaagtggtttttgttacatggatgaatgtagagtggtgaagtctgagatttcagtgcattcagcacccaagtagtacacattgyacccaatatgtagttgtttatcctgcactcctctcctacccttccccctttggagtctccatagtccattgtatcactctgtgtgcctttacatacccac

SEQ ID NO: 141053 - DNA, 201 bp, Homo sapiens
gctgatttggtgaggcctaccttcattatcaagggtagccatttttacttaaagtcaaactgattgtaagtgtcaatcacttctgcacaatacctccacarcaacacctagataattgtttgagaataattaggtagcatagccttgccaagtggacacataaaactatcacattccaccccttgtcaactggacactcag

SEQ ID NO: 141054 - DNA, 201 bp, Homo sapiens
aggacacactggtgagcatttctcccagttcttgtcccggctggggtctgcattggaagaagacaggctcctgtcagtgaaataagactgctctttatttyactaaagcattgctgactcacagtgcttctcctgctttcccaccttctattctctcatttgaatttggtccggattcagggggtgggagcaagggaagat

SEQ ID NO: 141055 - DNA, 201 bp, Homo sapiens
caaattaagcatttcccaaagtcaactcagtattttcctgctcaagtgtcctctgtctctgtagatggcaccaccatcctctgtacttcccagcctttcartggagacccacttgtcgcctcctccatcacactcacccctccatcttgttaggcaccagattctgtttattgcacattctttgctgtcctcccaagtcac

SEQ ID NO: 141056 - DNA, 201 bp, Homo sapiens
tccggcatcctcaaactttgatgttattctcttgttttcttcaagatgagtcagatccatacatggatttacatctctttctgagctcttcacatttatartattatagaaggattggagggaggatacgaaggtgattgaaacaataagaaatcggatatgcaaagagaagttcaaagatctgggatttcttgtcactgg

SEQ ID NO: 141057 - DNA, 201 bp, Homo sapiens
atacacccgccttggcctcccgaagtgaccaaagctttataacagttttatttgcagtgagtacacatagtattaaatggatgcatgattgactaaatctrgagtgtttgaataaatgcatcactctaatgcatgatcaaatgtagacaaataaaaagcctctaggtgtcttcagaatctccaaaccagggcaataatagg

SEQ ID NO: 141058 - DNA, 201 bp, Homo sapiens
gccaccacgcccagctaatttttttgtattattaatagagacggggtttcaccatgttggccaggctggtcttgaactcctgacctcaggtgatacacccrccttggcctcccgaagtgaccaaagctttataacagttttatttgcagtgagtacacatagtattaaatggatgcatgattgactaaatctagagtgttt

SEQ ID NO: 141059 - DNA, 201 bp, Homo sapiens
atcataatttaagatacttttctaagatctctagccattggctggtttatctggtttagtagaagtttagcaggtttgagtctcagcgttgttttaaggasttatgcagctcagcctgatgttctaatccctgggcattcctgctttcttttcctcttttgaattgcatctgccagaagacagacctgtttctgggcagac

SEQ ID NO: 141060 - DNA, 201 bp, Homo sapiens
cattactaagctctgtagtgtacaacatatgaagatagcttcttggtaagtatttatggtaacataggaaaataaagcaaaactacaaaaattcagagtgragaaacatatgggaatttcacccttgttgaaacaaaactatcatccatagagcaaacagagaaagtgttcttgccggacgattgcagataggtaaggcaa

SEQ ID NO: 141061 - DNA, 201 bp, Homo sapiens
cattcatattatctgccaaactaaatggattatgtttaaccagtcatgagggcaattgttaaaacaaggatgaatttttttctagcacaatttaggtaaawaacatgtgtttcattagcccaagaaaaactaagaataatgatgttttacttaagaaaaaataataaaccaaattataatgttaaatgtcttagaattatt

SEQ ID NO: 141062 - DNA, 201 bp, Homo sapiens
atctttgtcatgttcacttgctttttttctataagtttttgtttctccttttcaccagtgaagagaattgtgtgtgtgtgtgtgtgtgtgtgtgtgtgtgratatatatatatatttgagatggagtctcactctgctgcccaagctggagtgcagtggtgtgatgcaatgtctgccttctgggttcaagcgattctcctg

SEQ ID NO: 141063 - DNA, 201 bp, Homo sapiens
tctagtctcagaatttgaatagatagaattaaattattggttgactcctctttttggagctgctctctcactctgtctgccctgtagtataactttattakaaacatgagctaccttcaaagaccaaaaatgatcaagcatgaattgctttttttgcttttaagtagtttcattcatattatctgccaaactaaatggatt

SEQ ID NO: 141064 - DNA, 201 bp, Homo sapiens
tcaccatgtttgtcaggctggtctcgaactcctgacctcaggtgatctgtctgcctcagccttccgaagtgctggggttacaggcgtgagccacggcaccyggccaactgctagtgctaaaacacttccttagatgacttgcattgatcctatgctgattctactctttaaaatttttcaggattgtttacaacaaaatta

SEQ ID NO: 141065 - DNA, 201 bp, Homo sapiens
atgggtgcagcacaccaacatggcacatgtatacatatgtaacaaacctgcacgttgtacacatgtaccctaaaacttaaagtataataaaaaaaaaaaaagattgcacacaagagctgttaactcataagctgagctctgagacaggcacactggagaagccctaggaatcccaggaaaccagagatggagaaggcacaa

SEQ ID NO: 141066 - DNA, 201 bp, Homo sapiens
tcccaattttcaaaactgaccttttctttatggccccagtcagatggttatcttccctaaaaattaccagactggtggagaggttttctgtttcttgtttyttggcgggacagcccttcagggcccctgactttattcaagagttcagttctaatttcgtgttagtcaaatgcctgggagcatcaccttccttgggtagac

SEQ ID NO: 141067 - DNA, 201 bp, Homo sapiens
gaataccctttatttccttctcctgcctgattgccctggccagaacttccaacactatgttgaataggagcggtgagagagggcatccctgtcttgtgccrgttttcaaagggaatgcttccagtttttgcccattcagtatgatattggctgtgggtttgtcatagatagctcttattattttgaaatacgtcccatcaa

SEQ ID NO: 141068 - DNA, 201 bp, Homo sapiens
agtccaagagaacttgaagtccgatgtccgagggcaggaagcacgagaaaaagatgaggctggaagactaagccagtctagtctttccatgctctcctgcytgcttttattctggccgcgctggcagctgattagatggtgcccacccagatggagggtgggtctgcctttcccagcccactgactcaaatgttaatatcc

SEQ ID NO: 141069 - DNA, 201 bp, Homo sapiens
aatctggagacatggcaatggagactcccagtgggaagacgtaatgcccagcagtgcccattctttcctacctattgtactaggggaactggaaaaaaaaatggtaaaatttacaaaaaataaaaagtcttgagaatatataagaaaactataagataagtaaaatagtaaggaagaccttccttccgtgtaatgataaca

SEQ ID NO: 141070 - DNA, 201 bp, Homo sapiens
gtccttgtattatctgtaattttgtctgtacgttcatcaacagcaaggatttgggtccatggtagtcttgtatgttctgagttgtaatggcatcactatgrgatagatttcagtgtatctttgccaggtatctctgggattcaccaattcaagtcaaaatattttattaaatccttagactaaggttcctgcactaaggag

SEQ ID NO: 141071 - DNA, 201 bp, Homo sapiens
cgccacatcttcgtctatctatcccttcagatctctatttgtagatgcagtatcatctaatttatctatctgtagagatagtatttatgtctgtacatttwcacacaggtatatagatagatagatagacaaagacatagatataggtgatatagatcgtttaatcccctagtttacaggtgaacagtttgaggctcagat

SEQ ID NO: 141072 - DNA, 201 bp, Homo sapiens
ataccaaagctgtgttgaatgacattattctatggagcagatttgttaggtctgtgcttacaggaaaggctcatcattttggtttcatttcttttttttttccacaataaaatttataacaccttaacaatattttggtgatttttttttctagcttctttaaacatttatcttttaatccatgacattttgatttacttc

SEQ ID NO: 141073 - DNA, 201 bp, Homo sapiens
tcgccacatcttcgtctatctatcccttcagatctctatttgtagatgcagtatcatctaatttatctatctgtagagatagtatttatgtctgtacattktcacacaggtatatagatagatagatagacaaagacatagatataggtgatatagatcgtttaatcccctagtttacaggtgaacagtttgaggctcaga

SEQ ID NO: 141074 - DNA, 201 bp, Homo sapiens
atcgccacatcttcgtctatctatcccttcagatctctatttgtagatgcagtatcatctaatttatctatctgtagagatagtatttatgtctgtacatwttcacacaggtatatagatagatagatagacaaagacatagatataggtgatatagatcgtttaatcccctagtttacaggtgaacagtttgaggctcag

SEQ ID NO: 141075 - DNA, 201 bp, Homo sapiens
atgtcattgtggtttcagtttgcatttctaatgattagtcatattgagcatttttaaaatatgtttgttggtggcttgtaagtcttcttttgagaagtatmtgtttatgtctttttcccatttttaatgggattatttgttttttgtttgttaaattgtttaaatttcttatagattctggatactagacctttgtcagat

SEQ ID NO: 141076 - DNA, 201 bp, Homo sapiens
cctacttataagtgagaacatgcagtatttggttttctgtgttttgtgttaatttgcttaggattatggcctctagctgcatccatggtgctggaaaggartgattttattcttttttatggctgcatagtatcccatagtgtatccataccacattttctttaatcaatccaccattgatgggcttttagatagattcca

SEQ ID NO: 141077 - DNA, 201 bp, Homo sapiens
cagctgagaagtaaaaaggaacaagcaactgttacatgcaacatagataagtcacgaaaacatatgctaaatgaaaggaagcccaatgcaaagtgtactgwgtgatttttttatatgagggtaagactggatgaaaaatagcagaaaagtggttgcctctaggaaagaaggaaagggaatgactgagaatggggtgatttc

SEQ ID NO: 141078 - DNA, 201 bp, Homo sapiens
taatatctaataatgaatttaagaaaagacaaattagatctctacatttaaaattacacatttaagatgtatttaaaaagaccaaagttgacagaacagtrtactttactcatgaattggaaacctcaaacatattaggatgaaaattttctcaagattattgtacatagtgaatcaatcttaatggtaagctcaacagtc

SEQ ID NO: 141079 - DNA, 201 bp, Homo sapiens
tcacttgaacctgggaggtggagcttgcagtgagctgagattgtgccactgcattccaggctggcgacagagcaagactcagtctcaaaagaaaaaaaaaagaaaaagaaaaagaaaagaaaagaaaaagaggaacgtaaaacatgtaggatgaacataaaataactagtaaaatattagccctaaatctaaccatgtgaa

SEQ ID NO: 141080 - DNA, 201 bp, Homo sapiens
ggcaggagaatcacttgaacctgggaggtggagcttgcagtgagctgagattgtgccactgcattccaggctggcgacagagcaagactcagtctcaaaaraaaaaaaaaagaaaaagaaaaagaaaagaaaagaaaaagaggaacgtaaaacatgtaggatgaacataaaataactagtaaaatattagccctaaatcta

SEQ ID NO: 141081 - DNA, 201 bp, Homo sapiens
gatatttatttttaagaaagtagagttaaaaggaattagcaggttacatggttttaatggaaccaacatgaacttgctatgtatgaataccactccatctstatcctctgtctttgtaactgagggaaatccttaattttccacagtcctctagggtgcagcaatatagaacttcacagcaggtgagtaaaaaataaaata

SEQ ID NO: 141082 - DNA, 201 bp, Homo sapiens
ttcttgattccatcatctgtaccctgtattctgtttattctaagcaatgggtttatgtcgaatatgatactttaagttgattaaatgttggctagaggcaycactcactaatgtttcacttggcatcttggcagtgatttttctcttaatttccccaatccttgcatgtttgatccattacttacaaagataacgaggctc

SEQ ID NO: 141083 - DNA, 201 bp, Homo sapiens
ctcccacacaatgccccccacaacatcaaattagtgacaaatctagttcattcttcttcctatctcccatgtctgtccacttctatttcagcacattgtaraccttcagttgggctctccagggttccaaggatatagttctaactgacctgcctgcgtccaggttgccacagcaggagtgatctttctaaagtggcaata

SEQ ID NO: 141084 - DNA, 201 bp, Homo sapiens
acctgggtgtcctcttccctgtcccagctctgacacccacgcatgtggggctgccccgtgcctaggtgtcccctcctctgctcaggctctgtcctcctgcrgttggctttcccattctggatgcacctcacacacagctttgtcatctttggatgaatttggcctcccccatccactgctggtgcagatgcttccttacgg

SEQ ID NO: 141085 - DNA, 201 bp, Homo sapiens
tctacttaacatgcatctaagacaccaccatcaagcacagcacaaccaaagttggactactcctcttcctctacacacttgttttgatttgcacaaacctwgatttctgaactctgttgctcagccagaaacaggatcttcattttcaatgcttccctctcccacacaatgccccccacaacatcaaattagtgacaaatc

SEQ ID NO: 141086 - DNA, 201 bp, Homo sapiens
agcaatgaatctataaatggctttaggcaatatggccattttaatgatattgattcttcctatccagaagcatggaatgtttttccatttgtttgtgtcayctctgatttctttgagcagtattttgtagttctccttgtagagatctttcaccttcatagttagctgtattcctaggtattttatactttttgtggcaat

SEQ ID NO: 141087 - DNA, 201 bp, Homo sapiens
atggatacatgatagtaaaaactaaatacatttaaagaaagttcacacatgttaaggagtaaaattatttaaaatactggcttgccttcaggtttgtgagmgttttgcctatacaattatagaagaaacatttacttatctaagtgtattatgctattaatggctctttctagccttaaatgtctgaaattcagcaatgcc

SEQ ID NO: 141088 - DNA, 201 bp, Homo sapiens
gagggctctgttctgttccattggtctatatctctgttttggaccagtaccatgctgttttggttactgtagtcttgtagtatagtttgaagtcaggtagygtgatacctccaatcacatttttaaaagatatattctatacgggaaaatcttcaaattttagatactatccatcaaaaatgcatctgttcttattacaaa

SEQ ID NO: 141089 - DNA, 201 bp, Homo sapiens
tattcaaaacagcaaattgagtaaaaatagcccattgctggaaactgggtaaatgtcaagatgccattttgtaaaattaagacatagataacagccctgcrttttgtttatgatgagatccacataaggtgaatgtgtggaaagagactggatgccagttgcctctctggagagagggacgctaggtgttgctcactaact

SEQ ID NO: 141090 - DNA, 201 bp, Homo sapiens
ggtgaggcaggtgctgctggcccattcagggtgtgtgtagtgtggtacctgcagctgttccctttctgccccttgagactgaccccctataacactgaggrgccagccccactccactgccattggtgggatcaacagtcacttagcaattagcaactgtaaaagtaatggtagcaggaaagttggatgtgacaattctat

SEQ ID NO: 141091 - DNA, 201 bp, Homo sapiens
tgtgaagaatctcagtggtagtttaactggaatagcaatgaatctataaatggctttaggcaatatggccattttaatgatattgattcttcctatccagragcatggaatgtttttccatttgtttgtgtcatctctgatttctttgagcagtattttgtagttctccttgtagagatctttcaccttcatagttagctg

SEQ ID NO: 141092 - DNA, 201 bp, Homo sapiens
gtttcatagcctctcccattcacgggcagttcatccagttcctcaataaccatttagtttttaatttcaatatctacattttcatctctagaaagtttatktggctcattttaaaaaatacttgttatttttccttaacaactcactcattcatatggattataatccctcttttgttactttaatcttaatttagaagct

SEQ ID NO: 141093 - DNA, 201 bp, Homo sapiens
ccgggaggcaaggagcacctggtctggcaggtgggtgcacctccacatccatggagaatgactttccacatcccaccagggggtgaggcaggtgctgctgrcccattcagggtgtgtgtagtgtggtacctgcagctgttccctttctgccccttgagactgaccccctataacactgaggagccagccccactccactgc

SEQ ID NO: 141094 - DNA, 201 bp, Homo sapiens
catggaaacaggaggctcttagaaaccagaatatttggtgactcttattgttcttcttctctgcccgtaggtatcgttcttcctcttcatcatcttcgtgktgtacaccatgctgcccttcaacatgcgagacgccatcattgccagcgtcctcacctcctcctcccacaccatcgtgcttagcgtctgcctgtctgcaac

SEQ ID NO: 141095 - DNA, 201 bp, Homo sapiens
aaacttttctccatcacaacgattagtctgttattgtaatccagtggacttatttgcatcgactgccctattttgtctatagattatttctaaaatgagcrtgtctcatgctgttctatgcagcctttagtggcatggaaacaggaggctcttagaaaccagaatatttggtgactcttattgttcttcttctctgcccgt

SEQ ID NO: 141096 - DNA, 201 bp, Homo sapiens
tgcattccagtctgatgtgctgaaaggctttggccaagggtggttaagattccaaagcttgtctctgcctttccgcagtcgactgtaagcactttgtcctytgtgccttatacctttgcaaacttgtgtggattttgtttactgtttgatagtttagatgtttcaaattgtattgaaagctcttccaaaaatgggactgtg

SEQ ID NO: 141097 - DNA, 201 bp, Homo sapiens
tcttctgctatggaaaagcttttaagtttaattagattccatttttcaatttttgcttctgttgtgattgcttttggcatcatcatcatgaaatatttgcyagtttctatggccagaatggtattgcctaggtagtcttccagggttttcatagttttgggttttacatttaagtctttaatgcatcttgagttaattttt

SEQ ID NO: 141098 - DNA, 201 bp, Homo sapiens
acacactactactgctagcaacaacatcaggacagcgcgatagtggcctcttagaatcctcgtcctcccttcaaaagctctgaaaagtggcagtcctgacycccacgctgtccattgcattccagtctgatgtgctgaaaggctttggccaagggtggttaagattccaaagcttgtctctgcctttccgcagtcgactgt

SEQ ID NO: 141099 - DNA, 201 bp, Homo sapiens
tcatgtcctttgcccactttttaatggggtggtttgtttttttcttgtacatttgtttaggttccttatagatgctggatgttagacctctgttggatgcrtagtttgcagaaattttctcccattctatagtttgttttctccattgatagtttcttctgctatggaaaagcttttaagtttaattagattccatttttc

SEQ ID NO: 141100 - DNA, 201 bp, Homo sapiens
attgctgagatgaacaggctttctccttagctcacgttggctgcaatctgcacaatttctgagtgtggtgcatgctctgggtacaactaggctgctggacrctgtgtgcagctcttctcttggagaactgtcactcacaggttcctttctccccctcagtaccgggccacggcactgccagcgttcaagtattatgtgact

SEQ ID NO: 141101 - DNA, 201 bp, Homo sapiens
ccttgatttccatgaattcatgtcagtctcatataagtgcttttaattgttcttaacactctcctctcaagattttagaagtgcctgagaagtatgcagtraattaggtattaaaatacttggccattcaagtgcatcaccacagatgcagaggtgaatgtttataagtagaggtgacaatgagaaaccaatcgctcgcac

SEQ ID NO: 141102 - DNA, 201 bp, Homo sapiens
tagagcaatcacttgggtagtaatgcaaagaggtatagctgcaaatccaatcaattaattgaaatggggttaaaaagaataagttacagaaggaaagagaaaagtagagaaagagaaacggccaggtgcggtggctcacacctgtaatcctagcactttggggggccgaagtgggcagatcacgaggtcaagagatcaaga

SEQ ID NO: 141103 - DNA, 201 bp, Homo sapiens
ctagagcaatcacttgggtagtaatgcaaagaggtatagctgcaaatccaatcaattaattgaaatggggttaaaaagaataagttacagaaggaaagagaaaagtagagaaagagaaacggccaggtgcggtggctcacacctgtaatcctagcactttggggggccgaagtgggcagatcacgaggtcaagagatcaag

SEQ ID NO: 141104 - DNA, 201 bp, Homo sapiens
actagagcaatcacttgggtagtaatgcaaagaggtatagctgcaaatccaatcaattaattgaaatggggttaaaaagaataagttacagaaggaaagagaaaagtagagaaagagaaacggccaggtgcggtggctcacacctgtaatcctagcactttggggggccgaagtgggcagatcacgaggtcaagagatcaa

SEQ ID NO: 141105 - DNA, 201 bp, Homo sapiens
catggccagattcagcccacacaaccctcaggctcatcaggagagttctgtgcacccagatgggagccttctctgtttcggaagcctgttctccccacctstgtgtgtggcaggaacatttctgaaaagccccttcaatgggcatcaaagccagctctcatcacttggggagaagactgcattttgtcaccaaatcgaccc

SEQ ID NO: 141106 - DNA, 201 bp, Homo sapiens
cactagagcaatcacttgggtagtaatgcaaagaggtatagctgcaaatccaatcaattaattgaaatggggttaaaaagaataagttacagaaggaaagagaaaagtagagaaagagaaacggccaggtgcggtggctcacacctgtaatcctagcactttggggggccgaagtgggcagatcacgaggtcaagagatca

SEQ ID NO: 141107 - DNA, 201 bp, Homo sapiens
tcactagagcaatcacttgggtagtaatgcaaagaggtatagctgcaaatccaatcaattaattgaaatggggttaaaaagaataagttacagaaggaaagagaaaagtagagaaagagaaacggccaggtgcggtggctcacacctgtaatcctagcactttggggggccgaagtgggcagatcacgaggtcaagagatc

SEQ ID NO: 141108 - DNA, 201 bp, Homo sapiens
atttgctgcctaggtatttttaaaagagaaattattctttttagcaagtttttgtttgttgatgtattttgcattttgttgttatggtggtggtttaggtwtttttgcaataaattttctgtttgtttatctgatatctgtgaagaaataaaatattttggaatcgtgggcatcttattttaggagcttacttttacctaa

SEQ ID NO: 141109 - DNA, 201 bp, Homo sapiens
ctaaatattccacagtcctagatcctctcttgctgtgcatacctttgataaagccattcattttatatttacgcttttggaaaactgcaaaccttacatayccaattatggatcagttttttaaagtaatttaaactgtatttttatattcaaatatgtaccatcaaccaaccttaacaaaatgttctaacaccaatgcta

SEQ ID NO: 141110 - DNA, 201 bp, Homo sapiens
ttttgtttttgtttttatttattatactttaagttttagggtacatgtgcacattgtgcaggttagatacatatgtatacatgtgccatgctggtgcactrcacccactaactcgtcatctagcattaggtatatctcccaatgctatccctcccccctccccccaccccacaacagtccccagagtgtgatattcccctt

SEQ ID NO: 141111 - DNA, 201 bp, Homo sapiens
aaagttcattgtggtttgaaaatgaattttcaatggataaacattaattaattattaaaccattaataatcttgaaagtgcaagggaccttacatatctttaaaccagtatcattgattttctaaaaggaaactgattgactgaatgactagattaaggtcacacaatcactataagtgtaaccctatgacttctgcttga

SEQ ID NO: 141112 - DNA, 201 bp, Homo sapiens
tacaaagcttccacagcgtggaaggggtcccgagcgggtagcaagagttagattgtgcagttgccttttaaactcttttttttgtttgtttttgtttttgkttttgtttttatttattatactttaagttttagggtacatgtgcacattgtgcaggttagatacatatgtatacatgtgccatgctggtgcactgcaccc

SEQ ID NO: 141113 - DNA, 201 bp, Homo sapiens
attttaaaggtaattcagttttatcatgatttcatacacatcttcaaaattatagtaggcaaattttggaatgattttgtttttagcttttgaaattgctyacgtgattactggtgacgttatttaattagaatagtttatggaattatacataattcagttgatcactatctaaagcgtgcagtttacattttttaaggg

SEQ ID NO: 141114 - DNA, 201 bp, Homo sapiens
aagtttatatgtagaagtcctaacccctagtccccataataggactatatttggagattgagtctttacagaagtaattaaggttaaacaaggtctttagrgtgggctgtaatctgatataactggcatcttcatttgaagagacaattaggacacagacacacacagaaggaagaccatgtgaagacaccagaagaagac

SEQ ID NO: 141115 - DNA, 201 bp, Homo sapiens
tgttcttctatctctgctccttttgtaatgaaaatgatcgttttttattacctactaaaccattttctttttcatgccaaacatttctttgagaggtttcrtgttgattgttttgattgagctgaaattcacacaacataaattacccaatttaagttggcatttccaatgttgtgcaaccaacacctcatctggtttcag

SEQ ID NO: 141116 - DNA, 201 bp, Homo sapiens
ttctatcagaaagtttaagaaagtaatgatcacatttatgattctgcacatgaacaggacaggtgatgtgaacatacagtcgggaaacttaagttggcacytcccatccatgggctacttaccatgaatgagtcttctgaggccttttattttaatttgatcattttcaaactaggtctaatatttaatgtctcttatctg

SEQ ID NO: 141117 - DNA, 201 bp, Homo sapiens
gactccaatgagtttactaggtaattgatatcgttggtattatgttgatgatattagcaagttaagactagcgagtgtatagttttcccgataaagaacayttagctacaggagaacatttgtgaattcaagtatttattatatgatgtttttgaaataatcactttgaaagttaataaatacttctgttttacttttcag

SEQ ID NO: 141118 - DNA, 201 bp, Homo sapiens
taggctatgtctcctgaatctttcctgtgctcttttgtgtatgacaattacataaatacagctgatcagacaccaccctggaatagtgaagtggtgacagrtggttcttttcaggttgtaatacgtggtgcagattcccaggagagaagaagcctggttttctcccaggcttccctctttaaatccgtcaggagcctagct

SEQ ID NO: 141119 - DNA, 201 bp, Homo sapiens
agtgaagttttagaatgaagtaaatttgaacaaaaattctgggcttcatctgggactaggcaatggagaaaatcctactttaattatatagagcaccaaasacacccacacacaacccacgcacaaaagtacctctatattatttcagtgtaaagtgtgaaactagctcatgaacaggacatgtgacaagaaagtgaactt

SEQ ID NO: 141120 - DNA, 201 bp, Homo sapiens
aatggacacgaaggaggaagggtacacactctgtttcccttgtttgcagcagggcaaagagggaaagagtatagaactctatttcctaacaaacagaaacrccagtaaccagctcagtgaggtcaggatggagagaagcagacagacagagacaacccactggtctggaatcctaaaatgagaagaccctgtttttgagtg

SEQ ID NO: 141121 - DNA, 201 bp, Homo sapiens
aggctcaccaataacaaaaccattcctattactcaggatagcccaaggatttaatcttcttccaagaaataaaagacaaaaaccagtcatattatttactrtacaaaagaatatgcctctttgaagagcaggctttacgttaaagttatgtgtagacagaagagaactcaaggaggtaacccagagagcactgggaggaca

SEQ ID NO: 141122 - DNA, 201 bp, Homo sapiens
aagacatcccatgagtgtgggtgtgtgtttctgtaaacttgatatcagtcaggactagttgaactgtgcttaggaattccgggcttaacatcacaaaggaytgtcaccactcacatgaacacaggtttgtgtgggtcagctgagagactgtgctgctcagtctgggtctggggacccagaatggtagaagcctcaactcca

SEQ ID NO: 141123 - DNA, 201 bp, Homo sapiens
tgagattgtgccactgcattccaggctggcgacagagcaagactcagtctcaaaagaaaaaaaaaagaaaaagaaaaagaaaagaaaagaaaaagaggaaygtaaaacatgtaggatgaacataaaataactagtaaaatattagccctaaatctaaccatgtgaataattatgttgaatgtgagtggactagaaacactg

SEQ ID NO: 141124 - DNA, 201 bp, Homo sapiens
aagaaggcagccgtctgcaagccaaggagagaggcctcaatcaaacctaactacaacttggccttggactgtagccttcagaaatgtgaggaaataaatgyctgctatttaagccacccagtctgtggtattttattattattattagtagtagtagtagtcataatcatagcatactaatgcacatatttagcaaagccc

SEQ ID NO: 141125 - DNA, 201 bp, Homo sapiens
aatcaacttggtttggaggtgtcaagaaatagaaactagtaaccaagtcaaaagatgcataattattcttcctagttcactgattcattgatttagtcaaygtttatttagcgccagactttgagtagaactgcatggcagagctgaatgaatgatccttatctggttggaatattggaaactcccctgcagtggctgtca

SEQ ID NO: 141126 - DNA, 201 bp, Homo sapiens
acatggttttgaggaaaacatacaccaggagaggaaggaaggtggttggggtaaacccaagagtacactgtggggagagtgcttttgagtacctttcagcrtttgattctatcaagggaagcagtggccaggcatgctctttcctaatgaatatgattaatgaaacaaccaaagtttcgtttgtaatagaaaagtttttgt

SEQ ID NO: 141127 - DNA, 201 bp, Homo sapiens
atcaacatgttcctgagcttttatttttaattatgatcataaaaggttttattaagtagtgtaaagtgaatttccaagaatttccaattatgcttttcacygtaagaaagatggcattctacttaagatggtcaggtattgaataagaggtattatttggtgatgcaaacggacagtttggttaccttttctgaaacaaga

SEQ ID NO: 141128 - DNA, 201 bp, Homo sapiens
agggtatgttcatgtcctttgcccactttttaatggggtggtttgtttttttcttgtacatttgtttaggttccttatagatgctggatgttagacctctrttggatgcatagtttgcagaaattttctcccattctatagtttgttttctccattgatagtttcttctgctatggaaaagcttttaagtttaattagatt

SEQ ID NO: 141129 - DNA, 201 bp, Homo sapiens
ggcacatgcctgtagtcccagctacttgggaggctgaggcaggagaatcacttgaacctgggaggtggagcttgcagtgagctgagattgtgccactgcaytccaggctggcgacagagcaagactcagtctcaaaagaaaaaaaaaagaaaaagaaaaagaaaagaaaagaaaaagaggaacgtaaaacatgtaggatga

SEQ ID NO: 141130 - DNA, 201 bp, Homo sapiens
aagttatatgaaactgtgtaattcagcttgcagaaattaagttccctgcttcatgtttatacctcacgtgattactcatttcaagcatactgtctctttcygagagtaatgatgaaaacattgaagaaaccatcgatccaattacccatactgatcccagaagtataaagaaaatgttaatattcttgtatgtcttctttt

SEQ ID NO: 141131 - DNA, 201 bp, Homo sapiens
ttctttcgaaaagggtatgttcatgtcctttgcccactttttaatggggtggtttgtttttttcttgtacatttgtttaggttccttatagatgctggatrttagacctctgttggatgcatagtttgcagaaattttctcccattctatagtttgttttctccattgatagtttcttctgctatggaaaagcttttaagt

SEQ ID NO: 141132 - DNA, 201 bp, Homo sapiens
actttggggggccgaagtgggcagatcacgaggtcaagagatcaagaccatcctggccaacctggtgaatccccatctctactaaaaatacaaaaaaaaaatcgctgggtttggtggcacatgcctgtagtcccagctacttgggaggctgaggcaggagaatcacttgaacctgggaggtggagcttgcagtgagctgag

SEQ ID NO: 141133 - DNA, 201 bp, Homo sapiens
attgttggctgcatgtatatcttctttcgaaaagggtatgttcatgtcctttgcccactttttaatggggtggtttgtttttttcttgtacatttgtttargttccttatagatgctggatgttagacctctgttggatgcatagtttgcagaaattttctcccattctatagtttgttttctccattgatagtttcttct

SEQ ID NO: 141134 - DNA, 201 bp, Homo sapiens
gtgagatggtatcttattgtggttttgatttgcatttctctaatatcagtgatgttgagctttttattatatgattgttggctgcatgtatatcttctttygaaaagggtatgttcatgtcctttgcccactttttaatggggtggtttgtttttttcttgtacatttgtttaggttccttatagatgctggatgttagac

SEQ ID NO: 141135 - DNA, 201 bp, Homo sapiens
tcctgtagaagtcagcctgcacatggttggcacggccaaagtcccggtttaggggctcaatgggctgattgatgcgcttcccatagacagaagacgtcagyactccaaccggcctctcctgttcctggtgaaagttatcaaagcacatagtcagcaccactgcattcgccagcacagctcacccgtgcatccatcagcctg

SEQ ID NO: 141136 - DNA, 201 bp, Homo sapiens
ccagaaatgaggatgagatgaagaaaaaatgcagaaaaaaagaagataatacatagctatgtaagctaaggaggagtcaagggacaaaaaaaaaaaaaaaatgcttgtgtttgggagtaaaaaacagccacaaagagatgtctaaatatatttgaactccacactacagaatttcacactcccttcaagaatgtggcttct

SEQ ID NO: 141137 - DNA, 201 bp, Homo sapiens
ggtggggatggttccaaagcagaggataccgcaggacagaatctggataacagagagatctaagaatgcaggtgtgttcaggaatctcacacctgctaagsgtgggttgacctggctgttggatgtggatgagtgcttgaggcttgaaaaagacttgggccaaatcatgaaaaacacacatagttcatccaaaataatttg

SEQ ID NO: 141138 - DNA, 201 bp, Homo sapiens
acactgaattatcaaaaagcaatggatgtacaaagctgagatgcaacaaagtgctctgtcgtcctctctttctctctctctctctctctctctctctctctgtcagatgtcttctgtctttaactgccttcttgttgtgtgctcacctttttcattagagctggttctatccatttaagagaaaacaacattctgggtttt

SEQ ID NO: 141139 - DNA, 201 bp, Homo sapiens
tacactgaattatcaaaaagcaatggatgtacaaagctgagatgcaacaaagtgctctgtcgtcctctctttctctctctctctctctctctctctctctctgtcagatgtcttctgtctttaactgccttcttgttgtgtgctcacctttttcattagagctggttctatccatttaagagaaaacaacattctgggttt

SEQ ID NO: 141140 - DNA, 201 bp, Homo sapiens
cagctgagctctcaatgttcttcattaaacatggtaaacttaacaaattctaagagtctggaggatctaaacagctcttactaagctacctactagcatgyacatttctagagagaggaagagaagaatgaaagtacatattttttcttctgtttattgtatttatgtgggagaataaaagctgcagaccacagcatgcag

SEQ ID NO: 141141 - DNA, 201 bp, Homo sapiens
ggtccaatcctagcatgagcaaggaaattgatagaaccacaacagtttacccaaaccatcgtctgtttaaagagtggtatgaggtcttcaccccatgcctkcttctttatgtctgcagtgaaattcatacattcattttgaattagcaattgattgtcaaacatctgtttagtgttggattaagtagatattagagaccta

SEQ ID NO: 141142 - DNA, 201 bp, Homo sapiens
aaagttcaaaaaacaaagtcatgctcacacaattgtagtttgagctacaaataaaattgattgtaggccagtggctgccttagcacagagtccagggggcrtgtgtctatataacaatgtagaccagtatctgccaaatgtgttcacagacccaagtctttgaggacacctctacaggcaaagagcctgtgtccagatggt

SEQ ID NO: 141143 - DNA, 201 bp, Homo sapiens
ggacggaggacataggttggtgtgcacatacttgcatgaatttgcatctgtcgcaatagctagggtaagcggtgataaaaatggctcccaaatcaaagtgsctgaacaatagtggtttctcacttgtatttgtccactgtagggggactgccactttgcaccatgaatgggacccaggctcaaagtcactatctgtgacac

SEQ ID NO: 141144 - DNA, 201 bp, Homo sapiens
agttcctggggcaatttcctgggtttgaaggagcagttttaaaatactcaagactattgattaaatggctactaggttataaataagggcttctcaaactmtttgtgaaggcccttttttcatttcgctttgttttgtgtttttaatttctaatctatgacagactaatgcttttgaaaaatgtaatggtgaattaccagc

SEQ ID NO: 141145 - DNA, 201 bp, Homo sapiens
cccctcttcctatttggatgcctttatttctttctgttgcctgttagccctggccagagcttctaatgctatgttgaatagaagtggtgagagaggacatmcttttcttgtgctgattttcaaggggaatgcttctggctttctcacatatgaagaagcaagaaagaccatactgctgttgggggtgaaaatgaaaaagcc

SEQ ID NO: 141146 - DNA, 201 bp, Homo sapiens
tctccccagcgtgcctctactggcattgcccctgtcagactggatggcattgcttacctatgcatggatactctttgagaggcaagtcaaatcagacttgrctcccctgtggagcattttgctttttcactttatggtgtgtgagtgtggcggtcatgtttgcaggatgacattcccctttgggtgattttctcacactgg

SEQ ID NO: 141147 - DNA, 201 bp, Homo sapiens
gtatgcattacatcatttcatccaaaaatgaccctggtgaagtagatattattgggattctcgttttgcaagtgaagaagctaagacccagagactttagkgttgataaattactcccgataatggtggctgttaccttactgtaaaatgcaagttggtttcaatgattaggtcaaaactggtaaacattactagcaatca

SEQ ID NO: 141148 - DNA, 201 bp, Homo sapiens
gctagtgactattgcacattgattttatatcctgagactttgctgaagttatttatcagcttaagaagcttttggactgagtctgtggggtttcctagatrtacgatcatgttgtctgcaaacagggatagtttgaattcccctcttcctatttggatgcctttatttctttctgttgcctgttagccctggccagagctt

SEQ ID NO: 141149 - DNA, 201 bp, Homo sapiens
ctctttgagaggcaagtcaaatcagacttggctcccctgtggagcattttgctttttcactttatggtgtgtgagtgtggcggtcatgtttgcaggatgasattcccctttgggtgattttctcacactggtgctgatctatgcttgctcaggctttgcaggtgcaccagcctgcagggctgacttgggtgctggtgtgcc

SEQ ID NO: 141150 - DNA, 201 bp, Homo sapiens
tcattgaaaagtattgttttaaaaaatacaaaacagtattattttaatttttaaaaataatactaccaataataagtagcaagaaaaaggctggaaacacmtatacaaataatgaatagtggctaaagtggatgttggggattatcagagacccttatttttatatatatcctttcatatatttcccaatttttaacatct

SEQ ID NO: 141151 - DNA, 201 bp, Homo sapiens
acattgtcttggttgaactcatttacactctcaccaactgtgtataagcattcctttttctccacaacctcaccagcatctgttgttttgttttgttttgkttttggttttatttttttttttgagatggagtctcactctgttgcccaggctgtagtgcagtggcacaatctcggctcactgcaacccctgccacccggg

SEQ ID NO: 141152 - DNA, 201 bp, Homo sapiens
tcatttaatttcttgggaagctcacagctccatgcacagatagaagtggcttctgggccaggcggggtggctcacacctgtaatctcagcactttgggagkccgaggcaggcagatcacgaggtcaggagatcaagaccatcctgcctaacacggtgaaaccccgtctctactaaaaataaaaaaaaattagccggatgtg

SEQ ID NO: 141153 - DNA, 201 bp, Homo sapiens
aacgaggaggtataattgcacaaccatgggactggtaacatgttaaagtctgacatacctgaaatagcctcacaacatgtttgtttgttttttagcttttmttttaagttcaggggtacatgtgtaggtttgttatataggtaaacttgtgtcctggggttttgttgtacagattatttcatcacccaggtattaagccta

SEQ ID NO: 141154 - DNA, 201 bp, Homo sapiens
ttcattttttatgtttctattttttcaatgcttttaacagatatattcaaatattgtcatgaattgtttgatggcagggatgtgttctgagaaatgcatcrttaggcaatttcatcattgtgcgaacatcatagcatgtacttacgcaaacctaaatggtgtagcctgctacacacctaggctgtgtggcacagcttcttg

SEQ ID NO: 141155 - DNA, 201 bp, Homo sapiens
tcgaggctggtgattgcattttgcccataaaattaattttcattctaaacatcaaaaattcataggactgtattgactcatttaatgtttgagccaagatrgcaaagatactggggggaaaaaagcattccgaaggctccgatttgatggtagagagttgaatgtatatatggtgatattggcttcaaaggtgatatcggt

SEQ ID NO: 141156 - DNA, 201 bp, Homo sapiens
aacctccctagtaatcagaagaatgcaaattgaataacgaggaggtataattgcacaaccatgggactggtaacatgttaaagtctgacatacctgaaatrgcctcacaacatgtttgtttgttttttagcttttcttttaagttcaggggtacatgtgtaggtttgttatataggtaaacttgtgtcctggggttttgtt

SEQ ID NO: 141157 - DNA, 201 bp, Homo sapiens
atgacatcattgtcccaattgtgacaaaggatgtggaaaattaaattgggtccagagaagagctgcctaaatcattatgatgctaaaaatattttcagtgsagaaagttggggcagttttacctggagggaaggtgggcaagggattagtaactctcttgagtatttgactggctacaattagggaatgacatgagtttgt

SEQ ID NO: 141158 - DNA, 201 bp, Homo sapiens
tcccaccccagcctcccgagtaactgggaccacaggcgcacaccaccatgcctttctgtggctaatttttgtggtttttgtagagatgaggttccatcatrttacccaggctggtctcgaactcctgggctcaagcaattcttctaccttggcctcccaaagtgctaggattacaggtgtgagccaccgtgcctggcctga

SEQ ID NO: 141159 - DNA, 201 bp, Homo sapiens
ggttgcagagacagggtttaactgtgtttcctaggctgggcttgaactcctgggctcaaaagatccacctgtctgtacctctcaaagtgctgggactacakgtgtgagccaccatgcctgaccaaaaattgcagccttattattattattattttttaaagtatactactgcattcagaggaagagagggtttatttattt

SEQ ID NO: 141160 - DNA, 201 bp, Homo sapiens
aaggacagaactaataggatagatgtatatataaaggggagtttattaaggagtattgactcacacgatcacaaggtgaggtcccacaataggccatctgmaaactgaggatccaggaagcctcatcccaaagggatgtctgcatcccaaaacctcaaaagtagggaggccaactgtgcagccttcagtctgtggttgaaa

SEQ ID NO: 141161 - DNA, 201 bp, Homo sapiens
aggcagttgtattgatatggtattgatatgataaaactgttgtccttctgagttcctgtggcactccctgcggataatctgcaactcctgtgcctttgtcrgagctgtttgtctggtgcctactgcagccccagctccatgagattgagattcgctttcctttgctccccttgtatccagtgtggaatgcagagctgggca

SEQ ID NO: 141162 - DNA, 201 bp, Homo sapiens
tgtgtctctgaagtgggtaagtattctaagttcgtcaagtgatttcacagttggaatgatggtgcagggtttctgaaaacgtctttatgtgtgttttaaargatgattttcagcatcttttttttgttcgcaagtaacagctacaatttaaataaaagcttttttttaaaaaaaaaaaaaaaggtctacattttcttcctt

SEQ ID NO: 141163 - DNA, 201 bp, Homo sapiens
cgctcactccttaagtatgggcttcacagggtaacttactaccaaagagtacagtggaaagtgaggggaaaaaggataatttacagtggagaactctgacmagcattacatcagcccattaaccaaggtcaacaccaacagcaaaaactcatgttgacagtgtgtccccgtgctatgatgtgatgagaatggcactttacc

SEQ ID NO: 141164 - DNA, 201 bp, Homo sapiens
catcctgagttcatggccattgctcttgtgctcagccggggttctgagctatgtcctgggaagagtgtggctgtggggagacagcttgacttcctcagtgyctcagggcagtggctaatggcaaagagattgcaaaccattgatgtaagagaaggtcaaggagttaaaaaatgaagaaaaagaaagcagaagtaaagtaag

SEQ ID NO: 141165 - DNA, 201 bp, Homo sapiens
caggagttaacatgcacacacataaatatgtacatacacgtatttctagttgagtcttctggcacatccctgatacttggtttataaactttctgtgcgartttctccaagttatttttaacatgaattttaagggcagttaaaacaaagcttttgtgttagaaactgagagtttcagacagtgtttagggaagggcaaca

SEQ ID NO: 141166 - DNA, 201 bp, Homo sapiens
aaggagtgatctatggctgtggatgttaaagatatttacagtgatagtccccctcatttgaatcttttacatttattttaataaatatctatttttatgargataaagtaataaaatagaataaaacacgacattcttataagggaaagttctgagtttaaatccaaggtgacaatatatgtgatattattcattacgaac

SEQ ID NO: 141167 - DNA, 201 bp, Homo sapiens
accgtagtttactggagttacttgaattttaggttgtttccagtttttcactatcccagcgctgaattaaacaacattgtcctttacaacctttttttctygtggattactctcacttttctactaacttctcaggagtggaattcctgggtcaaagagcatggtgctttttttagctctgcatccttgagtcagatgggt

SEQ ID NO: 141168 - DNA, 201 bp, Homo sapiens
gtgcaaattcctacagctctttcagttttaggttacttcactcaaaggcatcaaacctgacagacgcgaccattggcaggagtctacagtgctcagtgctscttctcggggtgttcctcccatcgacactgacatctatgattaatgtttatttcatgaaaggacattcatgacaatgtataaacatcatccagaatccca

SEQ ID NO: 141169 - DNA, 201 bp, Homo sapiens
gctcatgcggacaccagtgcaaattcctacagctctttcagttttaggttacttcactcaaaggcatcaaacctgacagacgcgaccattggcaggagtckacagtgctcagtgctccttctcggggtgttcctcccatcgacactgacatctatgattaatgtttatttcatgaaaggacattcatgacaatgtataaac

SEQ ID NO: 141170 - DNA, 201 bp, Homo sapiens
ttaaaatgtataaataatttccgaatgcacatatttgcaaggtgttgaaacatggttattgtaacataatggagaatgcctgctttagctattacacaagytatatgtttggcatctaagaagatacacgtcactgtgttggggactcattctgttttaggaataaactgttcatattgttgccatgatgccattgcagct

SEQ ID NO: 141171 - DNA, 201 bp, Homo sapiens
ttatctcacctataaatcatgaagcaaaaacagtttatatatatatataaactttatagatatatataataatcacacatattatatatgtgatatatatdactcaagtgagtgtatctaaatgacaagtaaacaggggaagagatgctcaacctccctagtaatcagaagaatgcaaattgaataacgaggaggtataat

SEQ ID NO: 141172 - DNA, 201 bp, Homo sapiens
ctcagggagccagtactggacagtgcatctccgctgaggaggaagctgtcagagccagcaagttcacggccatccgacctgcagggcctggacatggttcrgctgccgggtccctcgcctgtcggtgcaatggcaggaaataagtggtcctgtcaagccagcagcctgcaagaggggctgccctccttagcccccgtttca

SEQ ID NO: 141173 - DNA, 201 bp, Homo sapiens
atgcctgctttagctattacacaagttatatgtttggcatctaagaagatacacgtcactgtgttggggactcattctgttttaggaataaactgttcatrttgttgccatgatgccattgcagctgcctttatgccttgctgtcttccctctaaccagacggaattattcagattctccaagttgccaatttggttaggt

SEQ ID NO: 141174 - DNA, 201 bp, Homo sapiens
gctaataaaagttatctcacctataaatcatgaagcaaaaacagtttatatatatatataaactttatagatatatataataatcacacatattatatatrtgatatatataactcaagtgagtgtatctaaatgacaagtaaacaggggaagagatgctcaacctccctagtaatcagaagaatgcaaattgaataacga

SEQ ID NO: 141175 - DNA, 201 bp, Homo sapiens
tccctcctggagatcgtaaatctcctagaggtcgatgtttgaaatgagtttgagctcatatgtgtctcaaagaggatattgggcttcataaagctccatgygactcagggcaggtcggccacctacaccggctccatgacctctgatccctggagggaaacaagacaggtttctgcctgtcagtagggagccatgtttgta

SEQ ID NO: 141176 - DNA, 201 bp, Homo sapiens
tatatgtttggcatctaagaagatacacgtcactgtgttggggactcattctgttttaggaataaactgttcatattgttgccatgatgccattgcagctrcctttatgccttgctgtcttccctctaaccagacggaattattcagattctccaagttgccaatttggttaggtctaagctaattttgattctctataat

SEQ ID NO: 141177 - DNA, 201 bp, Homo sapiens
atacagctaataaaagttatctcacctataaatcatgaagcaaaaacagtttatatatatatataaactttatagatatatataataatcacacatattakatatgtgatatatataactcaagtgagtgtatctaaatgacaagtaaacaggggaagagatgctcaacctccctagtaatcagaagaatgcaaattgaat

SEQ ID NO: 141178 - DNA, 201 bp, Homo sapiens
tttgagaatgttgtcacttgattcctcacagcattttgcaatttcttctgagaaatttccaagaaatttattataagtaaagcatatataaatctgtgagmcacccagacaaggagttagccatagttaactatagtctagtcaggtagacttctaattccaaccaaatgacaaacacaatgatgtcatcaggcataaaac

SEQ ID NO: 141179 - DNA, 201 bp, Homo sapiens
cagaacaagaatcgtggggcgttttggcagcctagtctaatcattttctgatggtaccaaggcttccgggactttctgcataaacatcgctagccacttcyaatgcccagggatactcctgcaatcctggacaaccccaggtcttatcttggcagggaagagaggcctgcccctaccaaggactcactttcccacctgcag

SEQ ID NO: 141180 - DNA, 201 bp, Homo sapiens
gtttggcatctaagaagatacacgtcactgtgttggggactcattctgttttaggaataaactgttcatattgttgccatgatgccattgcagctgccttyatgccttgctgtcttccctctaaccagacggaattattcagattctccaagttgccaatttggttaggtctaagctaattttgattctctataatactaa

SEQ ID NO: 141181 - DNA, 201 bp, Homo sapiens
cagcccttattaattgcctctctgtcatcgcttgccatgactctgtacctcaaaggggagagatgcattaggagtaacatgtgacggcttgaggctgcccygacctgtccctgctgttgactgggtggatgggctggttcatcccgaggctccacgtcaatttccagtcactgatatttattcccagcctgcattttaatg

SEQ ID NO: 141182 - DNA, 201 bp, Homo sapiens
tgctagggtgcaagacgaggctcttctccctggggctggagctgtggtcatcatctgtggagactgctcagttgcccagccagaacaagaatcgtggggcrttttggcagcctagtctaatcattttctgatggtaccaaggcttccgggactttctgcataaacatcgctagccacttctaatgcccagggatactcctg

SEQ ID NO: 141183 - DNA, 201 bp, Homo sapiens
aaccagacggaattattcagattctccaagttgccaatttggttaggtctaagctaattttgattctctataatactaagtcttcacactcaggaatatcrtattgcacatttagcattgtatttgcatgatgttttctgtatacatccatagactccgtagtatgtatgtaggccttatagatttcttgttaatttctga

SEQ ID NO: 141184 - DNA, 201 bp, Homo sapiens
gaaacaatcaggaccaggagaggatgttttcaatgaatacagctaataaaagttatctcacctataaatcatgaagcaaaaacagtttatatatatatataaactttatagatatatataataatcacacatattatatatgtgatatatataactcaagtgagtgtatctaaatgacaagtaaacaggggaagagatgct

SEQ ID NO: 141185 - DNA, 201 bp, Homo sapiens
aaggatctgctcacgagatcagacttggagtgagtttccaacactggctccagctgcctcccctctcatgctagggtgcaagacgaggctcttctccctgkggctggagctgtggtcatcatctgtggagactgctcagttgcccagccagaacaagaatcgtggggcgttttggcagcctagtctaatcattttctgatg

SEQ ID NO: 141186 - DNA, 201 bp, Homo sapiens
catgatgttttctgtatacatccatagactccgtagtatgtatgtaggccttatagatttcttgttaatttctgagtgttttatatagttttgttgattcyatgaatgggtttataattttctaaaattatgtttttaactaattattgttgatatatatataagaaaaactctcaattttagtatttggagcttctaaca

SEQ ID NO: 141187 - DNA, 201 bp, Homo sapiens
agaaacaatcaggaccaggagaggatgttttcaatgaatacagctaataaaagttatctcacctataaatcatgaagcaaaaacagtttatatatatatataaactttatagatatatataataatcacacatattatatatgtgatatatataactcaagtgagtgtatctaaatgacaagtaaacaggggaagagatgc

SEQ ID NO: 141188 - DNA, 201 bp, Homo sapiens
ttcttttattcagattgagtcaacacttgctacaaagtaagtaaaagtccaaccaagagaaggaagagataaaagaaaactaatgggaggtggggaggaartattccaaccaaattggccattgccaaggatctgctcacgagatcagacttggagtgagtttccaacactggctccagctgcctcccctctcatgctagg

SEQ ID NO: 141189 - DNA, 201 bp, Homo sapiens
ttttacatttaagtctttaatgcatcttgagttaatttttttgtgtggtgtaatgaaggggtctggtttcaatcttctgcatatggctagccagttatccyagcaccatttatggaatcctttccccattgcttgtttttgtcaggtttgtcaaagatcagacagttgcaggtgtgtggtcttatttcaggttttctattc

SEQ ID NO: 141190 - DNA, 201 bp, Homo sapiens
ttttaaaagtaaagaaacaatcaggaccaggagaggatgttttcaatgaatacagctaataaaagttatctcacctataaatcatgaagcaaaaacagtttatatatatatataaactttatagatatatataataatcacacatattatatatgtgatatatataactcaagtgagtgtatctaaatgacaagtaaacag

SEQ ID NO: 141191 - DNA, 201 bp, Homo sapiens
tctggaaaatgaatttctgctaaatggaaaatttatatgaaagtcaccggacttgcactatagatttatcatggtggtcctctgggcttttgataaatccytatagtgtgtgtctcagcttagccaagacatgcgaatagccttgcctcctaaaattgactgcacagactggcacagtcctttcctctttaaaagactgtc

SEQ ID NO: 141192 - DNA, 201 bp, Homo sapiens
ttacactctcaccaactgtgtataagcattcctttttctccacaacctcaccagcatctgttgttttgttttgttttggttttggttttatttttttttttgagatggagtctcactctgttgcccaggctgtagtgcagtggcacaatctcggctcactgcaacccctgccacccgggtttaagtgattcttgtgcctca

SEQ ID NO: 141193 - DNA, 201 bp, Homo sapiens
attttaaaagtaaagaaacaatcaggaccaggagaggatgttttcaatgaatacagctaataaaagttatctcacctataaatcatgaagcaaaaacagtttatatatatatataaactttatagatatatataataatcacacatattatatatgtgatatatataactcaagtgagtgtatctaaatgacaagtaaaca

SEQ ID NO: 141194 - DNA, 201 bp, Homo sapiens
ttccttgatttcactctcactcgcaagctgacattttccaggagcatttataaactatatttttttctcagtaaaggaaatactgtttttagcaagttacctgcatatattattcatagtttgataaagacaccgttctgaaagtgagtatggttaaaatttgtcttaagttgtattttctgctcattttaatgttaacca

SEQ ID NO: 141195 - DNA, 201 bp, Homo sapiens
ctctggttagcactccctcatctcatggaggccaacctttctcaagccgagttaggtgtcccctgcagaaccttctccaaatgtcccagcatggggacagrctctatgtgtcaatgatcacgtggatgagagaaggaatgtgagtcagtggccttcatcacgctgcgtcaaaatgccttgttcacatatgccatgattcct

SEQ ID NO: 141196 - DNA, 201 bp, Homo sapiens
gtgaaaccccgtctctactaaaaatacaaaaaaattagctgggcgtgatggagggtacctgtagttccacctactcgggaggctgaggcaggagaatggcrtgaacccgggagtcggaggttgcagtgagccaggatagcaccactgcactccagcctgggtgacagagcgagactccgtctcaaaaaaaaaaaaaaaaaa

SEQ ID NO: 141197 - DNA, 201 bp, Homo sapiens
agtcaagtcatgcatactgtaccagattctgcatttagaacccagaggatgccttaaagtaatattgggtctttccaatcactcaactgtgaagttgtcartaggtatttcgagtgagattatgagcagcaatggaagatttgtgcatgttccagaacagggattgacagtcattttctgggaagagtcagaaaggagaca

SEQ ID NO: 141198 - DNA, 201 bp, Homo sapiens
gtattttgaattagctcccaagaacaagtagaattagtttaaaagacttctctctggtttctgttgatccaagcacaataaacttatctgcaatggattttagcatttgcttattttttttccctaaaatgataagttaaaactgatacttcaggaatttgtgtcctttttcctttaattaccaatgaagctgacattttc

SEQ ID NO: 141199 - DNA, 201 bp, Homo sapiens
gcaagttcattgagctatccagcagacatattttaagcaactgctatattccagtacttttcaaaggactaccaaaatgcatgggattaaaaaaaaaaaaataaaacctcatgcaccttagcatctactaggaaacctgtgttcttaacctccagaaatgtggattcactacagtttgcagacagtaactgcttcctttat

SEQ ID NO: 141200 - DNA, 201 bp, Homo sapiens
atcatataaaccttaatgggaagaaatgcaacattatgtcaattagatcaacagttaaatgtccaaaactgcagaaaccattatgtagcatgaaaggcaarcagaaagagtagttcactggttttcaacacaaattttttgaatataaatttcttttttctttttttcttttctttttttttttttttttgagacagagtc

SEQ ID NO: 141201 - DNA, 201 bp, Homo sapiens
gctcccctaatcttaaagtctcttccacatctccgtgccttatatccaaacgtttgggaggacagaaaaggattaagttagctcatgggtttggtccattkgacaaaattaagccagtgctaattcttcagtccttttttggtataaggatgcaataaaaaatcacaagggagaggatgaagagagggttaggagaagact

SEQ ID NO: 141202 - DNA, 201 bp, Homo sapiens
tacatacataaatgtgagtctttggtatacagaatagagttattgttttgtaacccgaaagtcttgtttttataggtgagagagggccatttgcatttatygatgcagtcagcattcttggtctcagttctgctgtgagtgaacacacagttggatccatacccacgtgtgtgcacagtatagatacatagtcttgccatg

SEQ ID NO: 141203 - DNA, 201 bp, Homo sapiens
ctgttttatcttaattttaaaaacacatatggaagtttaagatggatatgataacatcatattgaaaaatttgtaatatttgcattgtaatacatgacagrgatagtatatagtgtatgtgtacacacatacaaacacacatatatttcatatatagagtatactgtatagtagaattggaatgaacacatagagttccag

SEQ ID NO: 141204 - DNA, 201 bp, Homo sapiens
gatgcagtcagcattcttggtctcagttctgctgtgagtgaacacacagttggatccatacccacgtgtgtgcacagtatagatacatagtcttgccatgyggtctatttgttttatttgcttattttaaaaggggagatggtttcttttggcacttagaaagaactatatttttcttttgcatttgccttctgtgaatac

SEQ ID NO: 141205 - DNA, 201 bp, Homo sapiens
caccccagaacaactgactcagaaacttaagaggaggtcccagcaatcttcatttaacaaactctacagatggtcctaatgcacaggacagtttgagaacmaagaatgttgaaattttttacagaatgtccctacttgaaatttactatactcatctgcattgaggcttcaggttttaggagatagattgaggttttggat

SEQ ID NO: 141206 - DNA, 201 bp, Homo sapiens
tcttatcagacctgagaaaacatatttcagtgagtgttgctctctggggtatgtaataggctctcaggaattaatgagagctggattcacagcaaaataakaacactgtttgctaactgcctaggcagttgaaataaatgctgtttccgtaggagtaaaagccaggtttgctatttcatagagggagaataaaccctcttt

SEQ ID NO: 141207 - DNA, 201 bp, Homo sapiens
agatatatttaactaagatataatttatatttttagagatgctcttttatttttccctccaatatgcgtttaggaaaaataaaacatgtattctgtgataytgtcagtctgctctgaacttcagctttctcgttcccaagttctaatcatttccagctggcgtatgttaatggcgtttctgtctaacattgtggctctctc

SEQ ID NO: 141208 - DNA, 201 bp, Homo sapiens
ttctgggactgatatcctgttccgtgttcctgcgggtaaactatgagctgaagatgttgatcatgatggtggccttggtgggctacaacaccatcctactscacacccacgcccacgtcctgggcgactacagccaggtcttatttgagaggtgagccacggcctcttccttctcttactatagttctttcccagcctgtg

SEQ ID NO: 141209 - DNA, 201 bp, Homo sapiens
cgatccacctgtctcagcctcccaaagtgctgggattacaggtgtgagccacggtgcccagctgtttaagaggtaatttttgaaatttttgtttgcaaagkgaatatttaatcctattatatctgctggactgtgtgccttctaaaattctacttagtagaattgataagcagggatcatttaaaaattaaacaacatttt

SEQ ID NO: 141210 - DNA, 201 bp, Homo sapiens
cggaggttaagtggcccccatgtgtcttccttagcataatgttggattttcaaagtggacatgttgattcaaacttctagggattgaaaaaaacaatttamccttcttgttttgatgttggtattactctgatgcgcagtctaggaaatgtagcccaataaactttacccacaaagagtgcaatccccagatgtggtttct

SEQ ID NO: 141211 - DNA, 201 bp, Homo sapiens
gaggcgggtggatcacgaggtcaggacatcgagaccatcctagctgacacgctgaaaccccgtctctaccaaaaaacaaaaaattagctgggcggtttggygtgcgcctgtaatcccagctactggggaggctgaggcaggagaatggcgtgaacccgggcggcggagcttgcagtgagccgagatcacgccactgcactc

SEQ ID NO: 141212 - DNA, 201 bp, Homo sapiens
aaactcctgacctcaggtgacccacctgcctcggtctcccaaagtgctgggattacaggtgtgagtcactgtgctcagcctcttgagtataaattttagcyacattgtatttttacaaatcagagtacagttttgataaatctgtctcttgttaattaagataattcattacattgatgtcaattgcaagttcattgagct

SEQ ID NO: 141213 - DNA, 201 bp, Homo sapiens
tgggactataggtccatgccaccatggataaacaggtatcttttatacagtgataaaatgctgccaacatacactaggctcttttactatagttgtttttwaaatttttttcacctgaaatataaatgtaaatgttcagtattatcaaaattaaaactcttgagttatgatctttggaagtttatacttaatgtcctagga

SEQ ID NO: 141214 - DNA, 201 bp, Homo sapiens
gtgaaataattattataagtcccttcctttgcacttgagggaactgttacccaaagaggtggtgtaatcaaattctttgctgttggggctcagatgtagamccagatcagttcaattccaaagctcagatttttctacttgaagctgtactgttgtttctcattcatcacatggatgggcttatgctgagagcacaaggtg

SEQ ID NO: 141215 - DNA, 201 bp, Homo sapiens
tcttgctcctccagggcacagagatgggctgttgggggtaaccaatgatacagcactcgggagctcacagcacttttcattatttgtgcatccagaggaarcactactaaatcccctttttcctctcccagatatattaaagccatccaatgaagtaaagcctgggttatgcaatgttaaatgggtcctttcacagctgat

SEQ ID NO: 141216 - DNA, 201 bp, Homo sapiens
catttatttatggatgcatcatcagtttatagcaagcacagctgagctctcaatgttcttcattaaacatggtaaacttaacaaattctaagagtctggargatctaaacagctcttactaagctacctactagcatgtacatttctagagagaggaagagaagaatgaaagtacatattttttcttctgtttattgtatt

SEQ ID NO: 141217 - DNA, 201 bp, Homo sapiens
gagctgatcatcagcagctggaacacatacacctgattgtacacagttccagacacccagagagaagggctgggatctgcaagtgagaagcgtgtgtgcaygtgtgtgtacatgcatgtgtgtgtgtgtgtgtgtctgtgctgaacactctatttgtctcactctcagaaagcagtggattcacgtttcacccccgttatg

SEQ ID NO: 141218 - DNA, 201 bp, Homo sapiens
tagcaaaagccattttgtatcatggtttggaaattttgcttaaactgtggttagagattatctttttaattttcatcattgaacccacacccaaatccacktaatatattttggttaatactagaatttcattcaattttaccattattacaccaagaagctatcctgaagcttgctatcataatgacaaaatgacacgcc

SEQ ID NO: 141219 - DNA, 201 bp, Homo sapiens
tccgattgtgttcaaatcctagagaaaaaaaaatccagctttctttataatattgttaaaaaataacctttaggcctggtgcagtggctcatgcctgtaaycccagcactttcggaggctgaggtgggaagatcacttgattccaggagtttgagaccagcctgggcaacatgatgagaccccatctctacaaaaaataaa

SEQ ID NO: 141220 - DNA, 201 bp, Homo sapiens
tatttttttttttcatcaacttttaagttctggggtacatgtgcaggatgtgcaggtttgttacacaggtgagcgtgtgccatggcagtttgctgcacagmtcttcccatcacctaggttttaagcccagcatccattagctgttcttcctgttgctctccctcccctaccctccaacaggtcctcgtgtgtgttgttccc

SEQ ID NO: 141221 - DNA, 201 bp, Homo sapiens
gtttgttacatgtgtatacatgtgccatgttggtgtgctgcacccattaacttgtcatttacattaggtatatctcctaatgctatccccccctctccccscaccccatgacaggctctgttgtttgatgttccccgccctgtgtccaagtgttctcattgttcagttcccacctatgagtgagaacatgcggtgtttggt

SEQ ID NO: 141222 - DNA, 201 bp, Homo sapiens
ggagccctcacctgctgtagtgggcacattcacgatccttcctgggtgcgtgcttctcgaatgcacagcggtcagctttgaccttccgccaaagcctaacsagtccgtgtctgcattcctcccagccatttcctcttggtgatcccactgccaacctaagtatagttattcaataggcatttattgagttcttcttctttg

SEQ ID NO: 141223 - DNA, 201 bp, Homo sapiens
tcttattgtaatgagggatgtattatgatatgagtaatgtacttactgagaagttcaagggattcattgtgatctaagtgcaaacaataaccatggcctaytacagggtttccggcatgctgggcacttttcttagccctctgcatatattaacccattcactcctcacaggaggcctgggaggcatggagagggtgactg

SEQ ID NO: 141224 - DNA, 201 bp, Homo sapiens
actttaagcaatgttccttgctggtgaaacttccaaaacaaccagtttataaaatatgtttcagagaactgagcgagtagtctctgtgtagctggaagccygttaaatagctggggatatgtaacatgaattattcagataataggagaaataactgcttcatactgccatcaggtatttatcgagaccaaacttatgaag

SEQ ID NO: 141225 - DNA, 201 bp, Homo sapiens
ctgagtgctttattcatgagcttctttaatctcaaatgtttttatatacacatttatatgtaaatatgtgtatataaacatttgatatgtatacatatatwtgtatatatgtatataaacatttgatatatatacatttgatatatacatatataaacatatatgtatatatacatgtatatatacacatatatacatata

SEQ ID NO: 141226 - DNA, 201 bp, Homo sapiens
aacacacatcattacataaaggtttctctaaggtttatgcaaattgcctagcagtcatgcacatgtaacagtcatcactttatttatcacttaacaaatakaaatgctgaagcaggtggatgtgaacttgctcatctccaggccactcagagcctggaataaacgcacatgggctgtaaagccctcatgccggtggcccag

SEQ ID NO: 141227 - DNA, 201 bp, Homo sapiens
agtctgtgtatttttgtgcaaacaccaaagctgtcatgatgtgtcagaagaagagagaaatttccttctgctctcatgctgttaacaggaaactcaaaackgaaagaaaatgaactgtccctgttcactatacatacagagaatctcaaagacacttaaaaggtcagacaccttggtcgttgttaaagctgtaagtaagag

SEQ ID NO: 141228 - DNA, 201 bp, Homo sapiens
tagtaactgtatggttgtccacatgttctgggattttcccagtcaaattgcaaagtagcatttggaactttccaaatatcatagtgttttggcctgggggrgaggtattaaaatggctaagaaaatagcaagtgttcattatagtttatttcaagtctgtcttgaccagtttcaagtgacttatttgtaaaatgcatttta

SEQ ID NO: 141229 - DNA, 201 bp, Homo sapiens
cctgggtgtatctgtctgtccagagctccacatggcagcctctctggtgctgcttcctgttgtccttggctcacctgcccctccaccagcccccacccttycctgagcatccctgcacccctacatttgtatctatcctattcattcatcgctgctcccagccctttagcaaatcccttgccaggagccccattcctccac

SEQ ID NO: 141230 - DNA, 201 bp, Homo sapiens
ggcatatagagagctggttatcttagattatcatgccactctttgtctagagtgttttgtttcttagagaagcccacttctgctacccaggcgacctggasggccgccgttttcctctaactctgaccagcttcatggtaccttgataatatggatccgaccatgctacatctaagttttgtggtcttgaagaaatgcact

SEQ ID NO: 141231 - DNA, 201 bp, Homo sapiens
taactgtatggttgtccacatgttctgggattttcccagtcaaattgcaaagtagcatttggaactttccaaatatcatagtgttttggcctgggggggargtattaaaatggctaagaaaatagcaagtgttcattatagtttatttcaagtctgtcttgaccagtttcaagtgacttatttgtaaaatgcattttaaaa

SEQ ID NO: 141232 - DNA, 201 bp, Homo sapiens
gaaaattcatcaagactcccatccaaatactatagccataatgagttatttcaggacaatctgagagtttgggaaattattttgtttcccttcagttgttkaaaggacactttttactaagccagaactccgtggtctgttgtcattgtctcaagtcaatatgacagagaggtttaactggcaaggcacctcttcttaact

SEQ ID NO: 141233 - DNA, 201 bp, Homo sapiens
atggaatagcagcctttgaaaacccttgagacacagttcctcaaatcactccttggcataagtaagagggaaaaatacaagagtaggcatatagagagctsgttatcttagattatcatgccactctttgtctagagtgttttgtttcttagagaagcccacttctgctacccaggcgacctggagggccgccgttttcct

SEQ ID NO: 141234 - DNA, 201 bp, Homo sapiens
tcctctgaggatgatttcattcatcctcagaatgaaatcctggttcctctgtggacccttcagtagcctcgatgtaccttcctagccttgtcttctattcwccctgccatgggagccccaacagtgccatgctcgttctcgtctccacgtatttacacatgctgtaccctctgcccagagtgcctttcctaccccttccct

SEQ ID NO: 141235 - DNA, 201 bp, Homo sapiens
gaagtataaattttttctcaatttttcagccatgaagtaatggactgggtgtgagtctaagttaatatggttgtgttgagtttagctttatttaagcagtwtggaaattcaaactctaccagtcatatttatttctgatgtttcccaattcctgtttggtcttggttttcttgggcttcactgtatagaagtacataacat

SEQ ID NO: 141236 - DNA, 201 bp, Homo sapiens
accgcagctcccctgagctccatttcctcacgtagtctgtcattcttaatcaaggctgaacagcagaataacccagggaactttccaaaacaatgcctgcrcttggagcccagcctaggggatgagggtcgtttggtcagtggggaggcccaggcacctgccctctgggaagtcccattggagattctcccgtgcagcccc

SEQ ID NO: 141237 - DNA, 201 bp, Homo sapiens
ttatcagaaaacttaaagagaagcagttttatattatccacgttaagaatatatcatttctatatgatacatctagcgtaaaaaccaaaagcccttagtaattcatgattaagtagaaaataaaaattttacttatatcataggataacatgcatttgactgtaagttccatgatagaagcaaggagtcttttttgcttac

SEQ ID NO: 141238 - DNA, 201 bp, Homo sapiens
aatggaacatgggatgtgaagtgggcagaaaatacttgagatctaaaccctggtttgcttacagcataaacctgatgttatgggttgaattgtgttctccmagaaacatatattgaagtcctaatccgcagtacttgtgaatgtgacccttatttgaaaatagggtctttgcagatgtcatcaggttaagatgaagtcata

SEQ ID NO: 141239 - DNA, 201 bp, Homo sapiens
cagcatttatttcatagccagttcatgtccacgtggtcctggcagtcctaattgatattatattaactgatttaaatatcttgggctctaatctttggcastccagcctttcagtcttgatacggtttaatcagatgcatacctcttaattaatccttagtaagatatatttaaaagaaagttgaagaagcatatggtatt

SEQ ID NO: 141240 - DNA, 201 bp, Homo sapiens
atatggtattatccttaatgatggtaaaataattagctgtttgacagcccttttttttttaaagttatttctcttgggtcatggaaattttgttgtatgartgctttgtctcacttccagaggtgttccatagtttaatggtggaatttctcactgggagtgaaaacagagtccaagatgggaggtgttgatgcatgacca

SEQ ID NO: 141241 - DNA, 201 bp, Homo sapiens
ttgatggggttgtttgatttttttcttgtaaatttgtttgagttctttgtagattctggatattagccctttgtcagatgagtagattgcaaaaattttckcccattctgtaggttgcctgttcactctgatggcagtttcttttgctgtgcagaagctctttaattagatcccatttgtcaattttggcttttgttgcca

SEQ ID NO: 141242 - DNA, 201 bp, Homo sapiens
gtgaaattttatttcattctattcaactgacaactgttctagaaaatgtcttattctttgtagccgcgtagctttccttgcatgtgaagtacatttttttycctcagtttgtcagccatgatgacatggagctgcatgagtctaagtgaacatctgtagacttcccatcttttccaattaaactgggcagtaaaacctgca

SEQ ID NO: 141243 - DNA, 201 bp, Homo sapiens
atccctgtccctgcataaggacacgatcttgttctttttatggctgcatagtattccacaatgtaccacattttctttatccagtctaccactggtgggcrtttaggttgattccatgttgttgctattgtgaatagtgctgcaatgaacatacatgtgcatctgtcctcatagtagaatgatttctattcctttgagtat

SEQ ID NO: 141244 - DNA, 201 bp, Homo sapiens
tgttctcattgttcaactcccacttatgagtgagaacatgcggtatttggttttctgttcctctgttagtttgctgagaatgatggtttccagtttcatcygtgtccctgccaagggcatgaactcatcgttttttatggctgcatagtattccatggtgtatatgtgccacattttcttaatccagtctatcgttggtgg

SEQ ID NO: 141245 - DNA, 201 bp, Homo sapiens
gcctttcaaagcacacataaatgaaacgctgggcaactcattaagacatttatcagaagtgctttcagtttcttttcaaagctagagaaatgaatgcagamttgagtagttctcattagacttatctttcttatatgctgaaataaccgcagaacttacagacacccttggttataataatttttatggcctccattttaa

SEQ ID NO: 141246 - DNA, 201 bp, Homo sapiens
tagaggcatgatctaggcattaggtgttgggtgtcactgcaccaaggtgaggcccacacacatttacatctacattatagatgtgtgtgtgtgtgtgtgtktttgtatatactaatagtcatgacttctcaaggacatttccacttccaagcaaccataggtttcactccagtttttgccctttcaattgcagctcccttg

SEQ ID NO: 141247 - DNA, 201 bp, Homo sapiens
gaaaatcttggaaaataaaaagtctattttctaccttccagatgaccccaactatatgagtcctacctctttaaaatagcttttcctccttttagcactargaatctttattatgtgccagtaatgattaaaacattttaagatgaaattctttattactgctgctatgataaattattagcaatataagacaaatgttta

SEQ ID NO: 141248 - DNA, 201 bp, Homo sapiens
aaaaacctgttttatcttaattttaaaaacacatatggaagtttaagatggatatgataacatcatattgaaaaatttgtaatatttgcattgtaatacaygacagggatagtatatagtgtatgtgtacacacatacaaacacacatatatttcatatatagagtatactgtatagtagaattggaatgaacacatagag

SEQ ID NO: 141249 - DNA, 201 bp, Homo sapiens
gctattgtgcaaacttggggtttctgcagaggatcacaggaatgagatccctggctctgcactctttagcctctggacagaggtacatctaaggggaatgkcatccatggggaatgtccccatggtaacatggaaacccaagagatagcattcgactatctggagctttttacccacacattctttacatgtgccaaatcc

SEQ ID NO: 141250 - DNA, 201 bp, Homo sapiens
gcatttaaggcacttataacaatagactcccaatttgtccctcccatttttgtgctatttttatatatcttatttttacctatgctacaaatctataataygtggctatctttctatgataaaataaattatattttagagttattttaaaaggtaaaaatatgtttatgattatatattttacatttactttatttctgg

SEQ ID NO: 141251 - DNA, 201 bp, Homo sapiens
tgtgcacagcctactgcacagcaatttcattcctcagtttatattcaacataaatgttaaaatatattcatcaaagatatgtacaagaatgttcacagcarcactgtggtagtagtttaaattagaaaactacctacatgtccactagcagaagaacaatgaaataaagtgtgctatatttacacaatgggatgctagaca

SEQ ID NO: 141252 - DNA, 201 bp, Homo sapiens
tttctctggctttcttttccttgtgctcacataagattaatttgattagcctattttgatttcactgattcgtatctaaactttcttgaattcacttgtgratctatcaaaggcgtcttaaactctattttcatatttttatctctagcattgtaatttttctgtttcttatggctcctgaaattatccatatgtttatag

SEQ ID NO: 141253 - DNA, 201 bp, Homo sapiens
ggttttacttacttacagtgtgtgtgtgtcttttagtgaagaacacgatatgaagagttgtgatactctgctttgttactgcaaagaggttaagatgagcmgggataaaatgactgccatcgaggtgctgcctgaggcactagggaattaacacgtgtgtgcagcacctgacacatgccctggacttccacgtcgctgaga

SEQ ID NO: 141254 - DNA, 201 bp, Homo sapiens
attgattatccaccagtgagttttttttttttttttttttttttttttagtcagtggttgatctgtgaatgtgtccactgggtgatgtattttgagcttaraatataaatatgtgcctatatttatatgtgtccaccaccaaagaagtggattttgcttatatttcaccatgcataaaatagctgtccttggtatttggca

SEQ ID NO: 141255 - DNA, 201 bp, Homo sapiens
tgcctgtggagtgtttctgtttaaaggtcagtctcctagtgatcagctcttgcttttctcccaagcaggagctataccaccagtcctatgactgcgtctgygtcatgtttgcctccattccggatttcaaagaattttatacagaatccgacgtgaacaaggagggcttggaatgccttcggctcctgaacgagatcatcg

SEQ ID NO: 141256 - DNA, 201 bp, Homo sapiens
gtcatgagacccaggttaccaaatgtacagaacatacagtggatgcaaaggagttgatttaattttcattacttgttctaaggtggttttacttacttacrgtgtgtgtgtgtcttttagtgaagaacacgatatgaagagttgtgatactctgctttgttactgcaaagaggttaagatgagcagggataaaatgactgc

SEQ ID NO: 141257 - DNA, 201 bp, Homo sapiens
aatgatagcagtagtacaattccatttgtgtaaacaaaagtgtctgtggcagggtgtggagactcatgcctgtaatcccagaactttgggaggctgaggcygaaggatcacttgaggccaggaatttcagaccagcctgaaaaacatagcaagattgtgtctctctataaaaaaaaatttttaaattaaaaaataaaaagg

SEQ ID NO: 141258 - DNA, 201 bp, Homo sapiens
caaagatagccagagaaaactgacagatcgaagggaaacaatatgaatgactgttgacacttcatcagaatcaatggagccacaacagagtgggataacawtgttaaaatgctaaaagaaaacaaacatcttagaccacagctctaactctaagtgaaaatatccttcaagaattaagacaaaatgaaggcattttaaatg

SEQ ID NO: 141259 - DNA, 201 bp, Homo sapiens
tccaaaatgtgggggaaaataaaaatacagattcaagaagtttagtaaatgcctggctaactaaatacaaagaacacctctaccagacatgtcatggtcarattggtgcaaaccaagagaaaatctcaaagatagccagagaaaactgacagatcgaagggaaacaatatgaatgactgttgacacttcatcagaatcaat

SEQ ID NO: 141260 - DNA, 201 bp, Homo sapiens
tcaatacttaaaggagacaaacagcacctggatgacctttctctttttatagattttggccttaggggaaaccccactcagtgccagttgggatggataamattttaaaaaggaaatctatgttttccctggattatactactggaagaaagagttcaacatcactacagtagctaaatatgagggaaaaccctaaaaaaa

SEQ ID NO: 141261 - DNA, 201 bp, Homo sapiens
ctggtttcccagtagttatagtcttatggaagccctgaatctgaggaccaggtgagcagtgacctgagctcaccctgggcattccctcagagcctcagagyttccaagagaccactctgccaaagaaagtgggtgatcagtttgtagtccaagctccccagaagcattcacggcctgcagagaatgcagggattggtcctg

SEQ ID NO: 141262 - DNA, 201 bp, Homo sapiens
cagagaatttcagaagcctagaagtttccctggtttcccagtagttatagtcttatggaagccctgaatctgaggaccaggtgagcagtgacctgagctcmccctgggcattccctcagagcctcagagcttccaagagaccactctgccaaagaaagtgggtgatcagtttgtagtccaagctccccagaagcattcacg

SEQ ID NO: 141263 - DNA, 201 bp, Homo sapiens
gtcccaagtgttcgtccaagatagggaagatctagccacactccaaaaactgaaaggggtagtggccacagaaacgcagttgctttgtgattattttttcwtgccttgagcttgttcaacagaatggttacatgtgaatgaatgttgaggagacgtctaaactcactttcaattctaaagctcagtaatacttttgggtag

SEQ ID NO: 141264 - DNA, 201 bp, Homo sapiens
gtgtgaaaatggggctggacatgtgtgaagccataaagtaagtggactgcttagtaagcattttgttatatgctttaagttctggggtacatgtgcacaaygtgcaggtttgttacataggtatacatgtactgtgttggtttcctgcacccatcaactcatcatttacattaggtatttctactaatgctatccctcccc

SEQ ID NO: 141265 - DNA, 201 bp, Homo sapiens
ataagccaaaaaaaaaaggacttgaagtcatgttttatttccctgcctgggatcagcttatacctgcatcctttctgacttaactagtgaaatacttcatrcataaacaggatgggggctgcttccctgcagaatcactgccctgaggatgaacgacttcctgggaccaaaactgacaggtcaggactctgggagagacca

SEQ ID NO: 141266 - DNA, 201 bp, Homo sapiens
gtgagtcttctggaaataatacaggaaaacaagactttggcaaaagcaagtatagctatactttaccaatattgccggtttggttccagacctctgcaatraagtgaatatcactatcaagcgagtcacaaatttttgctttcccagcacatgtgaagattgtttacactatactgtatgttttaagtattcaatagcatg

SEQ ID NO: 141267 - DNA, 201 bp, Homo sapiens
cagaaatgaggatgagatgaagaaaaaatgcagaaaaaaagaagataatacatagctatgtaagctaaggaggagtcaagggacaaaaaaaaaaaaaaaatgcttgtgtttgggagtaaaaaacagccacaaagagatgtctaaatatatttgaactccacactacagaatttcacactcccttcaagaatgtggcttcta

SEQ ID NO: 141268 - DNA, 201 bp, Homo sapiens
gcgctattgccaaataggttcacattcacaggtatcaggactgactttaatatgtgaatttggaaggacacaattcattacccataacagaagtactcaaygtgacttcctctaatcagtggaacaaaggagtatacaccctcggctgactatccagccattggtttatccatcattggtcagaggggcagtgtgccttcg

SEQ ID NO: 141269 - DNA, 201 bp, Homo sapiens
tgcctgccttcccagccccctctcagcagggtgggccaagccctggtgctgagtgctcagtgcctctgaatgcagaggccccgggggaggcttctggggcrtggggtggatgggagcaggccctcagcccctttgtgtgggttgccccggcatccaccacactaatccatttccactaaactcttggtgatactgctctgt

SEQ ID NO: 141270 - DNA, 201 bp, Homo sapiens
caataggttctccagataaacagaagcagtatatattctggatatgtgtcagaagagatttattataagaattggcgcaggcagttatggaggctgagaarttccatgatctatcatctgcaagctggagatgcaagaaagccagtggtccaatttggtccaaaggcctggaaactaggaagccaagggtgttaagtcctg

SEQ ID NO: 141271 - DNA, 201 bp, Homo sapiens
gggaagcaggcacgttttacatgtccagagaaggagaaagagagggaaggggaaggtgtcacacacttttaaacagaccttgtgagagctcactcactatsacaagaacagcaagggagaaatctacccctctggcccaatcgcctcccaggcccctcctccaacactggggattacaattcgacatgagatttgggtggg

SEQ ID NO: 141272 - DNA, 201 bp, Homo sapiens
taaaaagcactgtgggcagtgcctgccttcccagccccctctcagcagggtgggccaagccctggtgctgagtgctcagtgcctctgaatgcagaggcccsgggggaggcttctggggcatggggtggatgggagcaggccctcagcccctttgtgtgggttgccccggcatccaccacactaatccatttccactaaact

SEQ ID NO: 141273 - DNA, 201 bp, Homo sapiens
ggagatgcaagaaagccagtggtccaatttggtccaaaggcctggaaactaggaagccaagggtgttaagtcctgtttgtgtccaaaagcctgagaaggargagttctgatgtcaaacgactggagaagatggacatttcagctcaagcgaagggagaacgaatttgcccttcctccacctttctgttctgtttggaccct

SEQ ID NO: 141274 - DNA, 201 bp, Homo sapiens
tttctgtgcccctcccattcccagtaccacgtcttttgggggtttgttctttcatccactcagtatgttaatacactgctttgcattctagctgggtgtakttgtccattcttgcactgctataaaaaactaactgagactgggtaatttataaagaaaagaggtttaattgactcacagttctgcaggccttacaggaag

SEQ ID NO: 141275 - DNA, 201 bp, Homo sapiens
tgaaactgcatggcagagtgtggctgatgctgggaccaaagaagtccctgcagacaagagcagtgcttctgaaagtgaagcacctgctaaacaggctattmctggtccccacacaagccttccttgacctcctgggccctgagaggtgactgagagcaaagcatctgtcccagccctggcacctcttggctatggggcctc

SEQ ID NO: 141276 - DNA, 201 bp, Homo sapiens
cccttactgaaactgcatggcagagtgtggctgatgctgggaccaaagaagtccctgcagacaagagcagtgcttctgaaagtgaagcacctgctaaacargctattcctggtccccacacaagccttccttgacctcctgggccctgagaggtgactgagagcaaagcatctgtcccagccctggcacctcttggctatg

SEQ ID NO: 141277 - DNA, 201 bp, Homo sapiens
gaagcttaatgcctgactcttgggaaacaaaagggcaactgaagcagagcagtctctgcagccttctttaatttaccattagtgcttttcaaagggcatggcatttattgctcaaagattgatactttctgaataaatgaataagcgaatgaatgaatgaacaaatgatcaatgctcagttatgccagtacatggagaaac

SEQ ID NO: 141278 - DNA, 201 bp, Homo sapiens
catgctgtttaagagtgtagctatcatcaaggtttctgtcccctctacagtgtcaggaccaaatactgacatcctgcctgagctcttttcctccctaaggyttccccaagcagaagccctaccccttactgaaactgcatggcagagtgtggctgatgctgggaccaaagaagtccctgcagacaagagcagtgcttctga

SEQ ID NO: 141279 - DNA, 201 bp, Homo sapiens
tcccttccattttatggaatagtttgtaaaaaatggatattaattcttctttcaaagttttgggccaggcatgctagctcacacctgtaatcccagcactytgagaggcagaggcaggtggattgcttgagctcaagagtttgagatcagcctggacaacatggcaaaacccctgggcaaaggggcaaaaccccctctcta

SEQ ID NO: 141280 - DNA, 201 bp, Homo sapiens
tcctaggctcaccttcccaagcattcacagcagaaaatgtatgtgaccgcttcaggattcagtcatgtgttcaagagagaaatgcagtgcagttttttccrgaaatctccccagttgacaatattttcaaaggaagccttctgatattggctacaattttgctctgggcaccaactctcacccaggggtgcttccagcctg

SEQ ID NO: 141281 - DNA, 201 bp, Homo sapiens
ccttatggagaggacctgagcccccagattcactgtagaaattctttaacccagccgggtgcggtggctcacacctgtaatccctgcgctttgggaggccraggcaggcggatcacctgaggtcaggagttcgagaccagactggccaacatggtgaaacctcatctctactaaaaatacaaaaagttagcaggacttggt

SEQ ID NO: 141282 - DNA, 201 bp, Homo sapiens
agcttcatccctgtccctgcataaggacacgatcttgttctttttatggctgcatagtattccacaatgtaccacattttctttatccagtctaccactgrtgggcgtttaggttgattccatgttgttgctattgtgaatagtgctgcaatgaacatacatgtgcatctgtcctcatagtagaatgatttctattccttt

SEQ ID NO: 141283 - DNA, 201 bp, Homo sapiens
atacaaaaaattagctgggcgtggtggcgggcacctgtagtctcagctactcgagaggctgaggcaggagaatggcgtgaacccgggaggcagcagagctygcagtgagccgagatagcgccactgcagtccggcctgggtgaaagagtgatactctgtctcaaaaaaaaaaaaaagaaagaaaaagaaatgttggtctat

SEQ ID NO: 141284 - DNA, 201 bp, Homo sapiens
tatatataaattagccaggtgttgtggaacatgcctgtggtcccagcatctcaggaagctgaggcatgagaatcacctgagctcggaggtggaggttgcaraaagctgagattaagccactgcactccagcctgggtaacagagtgagactccgtctcaaaacaaaacaaaacaaatcaaacaaacctacaatgtgcacga

SEQ ID NO: 141285 - DNA, 201 bp, Homo sapiens
tgttcttcttctctgcccgtaggtatcgttcttcctcttcatcatcttcgtggtgtacaccatgctgcccttcaacatgcgagacgccatcattgccagcrtcctcacctcctcctcccacaccatcgtgcttagcgtctgcctgtctgcaacaccgggaggcaaggagcacctggtctggcaggtgggtgcacctccaca

SEQ ID NO: 141286 - DNA, 201 bp, Homo sapiens
agccaatcattctatacctaacaatacatatcctggacaaaatataaaacaaaaccacctgaaggcactgcaaagtggcccaaaagaaacagagctatgtwggagtcaatacttaaaggagacaaacagcacctggatgacctttctctttttatagattttggccttaggggaaaccccactcagtgccagttgggatgg

SEQ ID NO: 141287 - DNA, 201 bp, Homo sapiens
tcaagccaatcattctatacctaacaatacatatcctggacaaaatataaaacaaaaccacctgaaggcactgcaaagtggcccaaaagaaacagagctaygtaggagtcaatacttaaaggagacaaacagcacctggatgacctttctctttttatagattttggccttaggggaaaccccactcagtgccagttggga

SEQ ID NO: 141288 - DNA, 201 bp, Homo sapiens
cagtggggtaatatagtttcacttccgtcaagccaatcattctatacctaacaatacatatcctggacaaaatataaaacaaaaccacctgaaggcactgsaaagtggcccaaaagaaacagagctatgtaggagtcaatacttaaaggagacaaacagcacctggatgacctttctctttttatagattttggccttagg

SEQ ID NO: 141289 - DNA, 201 bp, Homo sapiens
caaacttgcaaaatttatatgaacataatattcattgttgaaagatacatgaaaggagaatgcttttaatgtgaatgacttggtgttttgcttcttggcaygtaatgtctgagagcactttgagaaattccagccagaggaggccttctgaaatggcagctttgcattgatgtggtgccagtggtcaaattgaaacagaag

SEQ ID NO: 141290 - DNA, 201 bp, Homo sapiens
attgctgacaagagtaaaaggaaagtcaaattctggggcccaccaacgcagcgaaatgggcagcagagaaggacaagagattttcccacctcttggcttcrtcttaaccctataactgttatagctaaggcaggagggctggtgggaacacacttacctgtgtctgtcataggcatccttagttctcagaaaagacatcac

SEQ ID NO: 141291 - DNA, 201 bp, Homo sapiens
gagtttgttacttgactcccattgaccagcgaaaagaaaaatgtttggttaaaagcacttacagtttgattgctgacaagagtaaaaggaaagtcaaattmtggggcccaccaacgcagcgaaatgggcagcagagaaggacaagagattttcccacctcttggcttcgtcttaaccctataactgttatagctaaggcag

SEQ ID NO: 141292 - DNA, 201 bp, Homo sapiens
ataagaagagccacctgcgtgcataaagcatagcaaagtcgtgcccctcccttctgtggaatgtctcctgtggccatcggaccctgctgccctaaagtagmctcctcactggacagaagaatctatttccttgacctaatgatgtaatattaaccttgcaatcccaggccaggtggggctaatattgtgtggccttgcaca

SEQ ID NO: 141293 - DNA, 201 bp, Homo sapiens
tcttcacctgagttgttacatggacttgaggtgaggcatctcaacagttatgtaccttttcataaagccaagctggacattaatagtgtgagaggaattcragccagtgagactttctcactgcagttgctgaagaattaaagcagcacattttaatataaatgtcacgcctgagctttgaggtgcagggctgggggatgc

SEQ ID NO: 141294 - DNA, 201 bp, Homo sapiens
gactacaagaccagcctgggcaacatggtgaaaccttgtctctccaaaaaaaaaaaaaaaaaaaaaaaaaaaaaatatatatatatatatatatatataaattagccaggtgttgtggaacatgcctgtggtcccagcatctcaggaagctgaggcatgagaatcacctgagctcggaggtggaggttgcagaaagctgag

SEQ ID NO: 141295 - DNA, 201 bp, Homo sapiens
aaggcaggtggatcacttgagctcaggactacaagaccagcctgggcaacatggtgaaaccttgtctctccaaaaaaaaaaaaaaaaaaaaaaaaaaaaaatatatatatatatatatatatataaattagccaggtgttgtggaacatgcctgtggtcccagcatctcaggaagctgaggcatgagaatcacctgagctc

SEQ ID NO: 141296 - DNA, 201 bp, Homo sapiens
ggataagggcccacccaattccagttctacctcctcttaactaattaaatctgcaggcgcgctattgccaaataggttcacattcacaggtatcaggactractttaatatgtgaatttggaaggacacaattcattacccataacagaagtactcaacgtgacttcctctaatcagtggaacaaaggagtatacaccctc

SEQ ID NO: 141297 - DNA, 201 bp, Homo sapiens
taatacatttcgtaggctttttgaggggaatgtgtgtctccactggacttatctcatcaataaatgtgtttctcacccctgtcagggccacctttaagcamttcattgactgggaaaaaaagcagaaaggaaggaggaccttgtccagaatcatcctcttccatattccataacaatgcacttgaataaagcaccaaagtc

SEQ ID NO: 141298 - DNA, 201 bp, Homo sapiens
aggcgcctgtcaccatgcccggctaattttttgtatttttagtagagacagggtttcaccatgttagccaggatggtctcgatctcctgacctcgtgatcygcccgccttggcctcccaaagtgctgggattacaggcgtgagccactgcgcccagcccttatttaattcttaggaaaaaaaatctttaatcactttgtct

SEQ ID NO: 141299 - DNA, 201 bp, Homo sapiens
aaccctgtatctactaaaaatacaaaaacaagttagccggacatggtggtatgtgcctgtaatcccagctagtaaggagactgaggcaggagaatcgcacsaacccaggaggcagaaattgcagcgagccgagatcgtgcctttgcactccagcatgggcaacagtacgagacaccatctcaacaacaacaacaaaaaaga

SEQ ID NO: 141300 - DNA, 201 bp, Homo sapiens
cagcttcctgagtagctgggactacaggcgcctgtcaccatgcccggctaattttttgtatttttagtagagacagggtttcaccatgttagccaggatgstctcgatctcctgacctcgtgatctgcccgccttggcctcccaaagtgctgggattacaggcgtgagccactgcgcccagcccttatttaattcttagga

SEQ ID NO: 141301 - DNA, 201 bp, Homo sapiens
cagtggtgccatctcggctcactgcaagctctgcctcccgggttcacgccattctcctgcctcagcttcctgagtagctgggactacaggcgcctgtcacyatgcccggctaattttttgtatttttagtagagacagggtttcaccatgttagccaggatggtctcgatctcctgacctcgtgatctgcccgccttggcc

SEQ ID NO: 141302 - DNA, 201 bp, Homo sapiens
cgctctctctgaagtctgctatctgagagattcctctgcacagtacaacttggtctccacagtcctttaccttaacctcaacattccttttcattgatccmaggtcttcagataaactcaaaccaattgtcaaccacaaaatgtttaaatttacctatagcctgggagccccgccccctcctcctcactttgagttgtccc

SEQ ID NO: 141303 - DNA, 201 bp, Homo sapiens
ctgcctattaaatttagcatctcttggctacagcagtcatttctctaaggaaaggggtgctttcacagagccaccttgagagactgggtgactccttggakcagttccccacttccttgctcatggtggcccctcaacaggctacagaaataactgcaatgtcttaaggatagtcatgagggacaaaggaaccctcaaact

SEQ ID NO: 141304 - DNA, 201 bp, Homo sapiens
atagaaccacaacagtttacccaaaccatcgtctgtttaaagagtggtatgaggtcttcaccccatgcctgcttctttatgtctgcagtgaaattcatacattcattttgaattagcaattgattgtcaaacatctgtttagtgttggattaagtagatattagagacctaacggagaaatccagcagtccagatcaacga

SEQ ID NO: 141305 - DNA, 201 bp, Homo sapiens
gatagaaccacaacagtttacccaaaccatcgtctgtttaaagagtggtatgaggtcttcaccccatgcctgcttctttatgtctgcagtgaaattcatacattcattttgaattagcaattgattgtcaaacatctgtttagtgttggattaagtagatattagagacctaacggagaaatccagcagtccagatcaacg

SEQ ID NO: 141306 - DNA, 201 bp, Homo sapiens
tgatagaaccacaacagtttacccaaaccatcgtctgtttaaagagtggtatgaggtcttcaccccatgcctgcttctttatgtctgcagtgaaattcatacattcattttgaattagcaattgattgtcaaacatctgtttagtgttggattaagtagatattagagacctaacggagaaatccagcagtccagatcaac

SEQ ID NO: 141307 - DNA, 201 bp, Homo sapiens
gttaaaggaaacagtggatgttacttgatcatgatcttacttcccttctctttaggaaagtgagggatgctactggagttgatatcaacatgcgcgtgggygtgcattctgggaatgtcctgtgtggcgtgattggtctgcagaagtggcaatatgatgtgtggtcacatgatgtgaccttggccaaccacatggaagctg

SEQ ID NO: 141308 - DNA, 201 bp, Homo sapiens
tagaggtggcctcatcctccgtgggcgcctcctggggataggatcctgttatctccaaggacactgggatgtaaatatggtactccagaaaggctgccacygtgaggaagtggcttctgaatctggaaataaagtgctagaaactagctgggagacgggggccagggggagagaggaacggggagagaacatttcaggctc

SEQ ID NO: 141309 - DNA, 201 bp, Homo sapiens
cccatgtttcccctgccctgtagccaggctggtggtggcccaggatacagagatgaatgggattagaggtggcctcatcctccgtgggcgcctcctggggwtaggatcctgttatctccaaggacactgggatgtaaatatggtactccagaaaggctgccactgtgaggaagtggcttctgaatctggaaataaagtgct

SEQ ID NO: 141310 - DNA, 201 bp, Homo sapiens
agctccagccatcatgggttaaacgtgagaaagcagcaacagatatcctgagcctttctcactactgtgctgtggactcgggcacctggtgactgagcagmttcaaggtgacaggaggttagcaaatcgtgtttggcctccagatggaattttctttgttatcatatatttttttgtgtgtggtcctattttctatacctt

SEQ ID NO: 141311 - DNA, 201 bp, Homo sapiens
cctctgttctcgttaacaggagtctccagcccatttttaaattcagcaaggtccccatgtttcccctgccctgtagccaggctggtggtggcccaggatayagagatgaatgggattagaggtggcctcatcctccgtgggcgcctcctggggataggatcctgttatctccaaggacactgggatgtaaatatggtactc

SEQ ID NO: 141312 - DNA, 201 bp, Homo sapiens
ctcctggtgtttactacatttggtgggttcttcagcacctgattttcctattgatcacaggtaataaaattacaatgtctattaaagggccctctgttctsgttaacaggagtctccagcccatttttaaattcagcaaggtccccatgtttcccctgccctgtagccaggctggtggtggcccaggatacagagatgaat

SEQ ID NO: 141313 - DNA, 201 bp, Homo sapiens
tctcatggcccactggctttcctatctcttctcctggtgtttactacatttggtgggttcttcagcacctgattttcctattgatcacaggtaataaaatyacaatgtctattaaagggccctctgttctcgttaacaggagtctccagcccatttttaaattcagcaaggtccccatgtttcccctgccctgtagccagg

SEQ ID NO: 141314 - DNA, 201 bp, Homo sapiens
aagttctgaatgtcttttatgaggcactaggatcccaaatatgcctccaaagaagccactgctctctccccattgtgggaggaggcctgccttaccagcaygcaatggaggctcaaaccaagaggcaacgttaaaccatgcctcccacacgccccctgtttccccacactcagcttccctgagagccttccaaggctctta

SEQ ID NO: 141315 - DNA, 201 bp, Homo sapiens
aactaatgaatgatcatcgttctttcaaatttcaaaatgtggattttaaatttttttaattcccatttgtgcatgagaggccatctgtgtgcatgtgtgtrtgttttgtgttactttgtactgtcattggtagaattaatcaactcaacaaagcaaaccaaaaacttgcagttagctcttctttgcatttatttgtcaata

SEQ ID NO: 141316 - DNA, 201 bp, Homo sapiens
gaaggtgatagatgattgatagatggatatagataaatagaaaggtaggtaggtagatagataggtagatagataaatagatttggcaaaatgtcatttcrgttcagtacagctgaaccgaaatactctgagtattccaaaatactctgattttttttagtaggagacttacaaactgcttacctgttatgcaataacaat

SEQ ID NO: 141317 - DNA, 201 bp, Homo sapiens
cctttctcttgtaaggacacccgtcttgaggtttagggccaaccctagatccaggatgatattatcctgagatctttaactgaatcacattcataaagacwttatttccaaatcaggtcacatttgcaaataacaagggttaggacttggaactatcttttggaggattattattcaatgcattccatttgattggggatt

SEQ ID NO: 141318 - DNA, 201 bp, Homo sapiens
aggggaacaacacacacgggggcctattggagggtgaagagtgggagaagggggaggatccggaaaaatgactgatgggtaataggcttaatacctgggtsatgaaataatctgtacaacaaacccccatgacacaagtttacctatataacaaacctgcacatgtacccctgaacttaaaataaaagttgaattaaaaat

SEQ ID NO: 141319 - DNA, 201 bp, Homo sapiens
tcactgcagttttgatttgcatttctccgataatgaatgatgttgagtaccttttctgttttttgttgttgctgttgttgttcttttgggacagagtctcsctctgtcacccaggctggagtgcagtggcacgatctcggctcactgcaagctccgcctcccgggttcacgccattctctcgcctcagcttcctgagcagc

SEQ ID NO: 141320 - DNA, 201 bp, Homo sapiens
accacgcctggctaattttttgtattttttagtagagacggggtttcactgtgttagtcaggatggtctcgatctcttgacctcatgatccgcttgcctcrgcctcccaaagtgctgggattacaggcgtgagccaccacgcctggcctatgttgagtaccttttcatatgcctattagccatttgtacatcttcttttga

SEQ ID NO: 141321 - DNA, 201 bp, Homo sapiens
tccgcttgcctcggcctcccaaagtgctgggattacaggcgtgagccaccacgcctggcctatgttgagtaccttttcatatgcctattagccatttgtayatcttcttttgagaaattattcaaatcatttgcccatttttcaattggattattagattctctccaatagagttgtttgttattctggttattaattcct

SEQ ID NO: 141322 - DNA, 201 bp, Homo sapiens
aatagagttgtttgttattctggttattaattccttgtcagaacagcagtctgtatatatcttctgccatccaatgagttgtctcttcaccatgctgatttgtgtgtgtgtgtgtgtgtgtgtgcagaagctttttaacttgatgtaatcctatttgtccatttttttgctttgattgcctgtgcttgtgaggtattactc

SEQ ID NO: 141323 - DNA, 201 bp, Homo sapiens
atagagttgtttgttattctggttattaattccttgtcagaacagcagtctgtatatatcttctgccatccaatgagttgtctcttcaccatgctgatttgtgtgtgtgtgtgtgtgtgtgtgcagaagctttttaacttgatgtaatcctatttgtccatttttttgctttgattgcctgtgcttgtgaggtattactca

SEQ ID NO: 141324 - DNA, 201 bp, Homo sapiens
tctctagttatgaacaaaatactttctatttattgtttagccaaatctttagtctggcaacaaaagatattcagttacaaaatatatagggtaacccaagkaataatgtctttttcttaaatccaaaaagaggcaaattatctgggtaatggccttttgcagtttagcctttatttgtaattaccttggcattttctgttt

SEQ ID NO: 141325 - DNA, 201 bp, Homo sapiens
agcactattcctaatagccatgatatggaacccacctaagtgtctatcagctgatgaatggataaagaaaatgtgatatatatatatatatatatatatayacacacacatacatatatacatatatgtataatgaaatgctattcagtcataaagataattaaatcctctcatttgcagcaacgtggatggaactggagg

SEQ ID NO: 141326 - DNA, 201 bp, Homo sapiens
cagaggccaaagcatagagaaattgaagacaagtggcaagtttatgcgttttggggattagtagccaaatgtgggtagatgatggagtagttctttatatmaagatgatgaaagctagcaatagaagcacattaacttagaacaaaccccctggttttttcaagtgggttctgagacgagagcgggatcaggccatgccct

SEQ ID NO: 141327 - DNA, 201 bp, Homo sapiens
ccaatatatatttctagaatctgtattttagcttccaggaaagaattcccaaattggccttcctacaaatcagtgaggatctccaatgttatttggtcatyccccgaggtgtctgagagacatttgttcctccttccccaccttgtccaggagcggcttctgctctccctgctgccggcccacatcgccatggagatgaaa

SEQ ID NO: 141328 - DNA, 201 bp, Homo sapiens
tgaggcaggagaatggcgtgaacccaggaggcggagcttgcagtgagccgagatcccgccacagcactccagcctgggcgacagagcgagactccgtctcaaaaaaaaaaaagagaagcacgggaaagctcttacaggtcattccgtttcttctctgcttcctggaaggactatatcagcatcttcttgttccctggttcc

SEQ ID NO: 141329 - DNA, 201 bp, Homo sapiens
cctgtactccagcccagtaactggttcttctgtctacgtagaaagatgtgaagccctccagttcctcaggttgttttcagaatcagaaaatcccagaaccrcacttgaggctgtgctagatgagagccccagcagggagggtcatggggtcccaggcatgtcctggaggattctcctgggctcttccttctgtctcactca

SEQ ID NO: 141330 - DNA, 201 bp, Homo sapiens
tcatctgaagccaagcacctctgcctcgtccacagtctgttttaagttctatgaagcgtggtgtgaaacaaacaaaaagcagtgatttatgtatttggaaygaacccatgaagaagcaatgccaattccattaaatctgcccaatatctaagaggtacactatacttatgagtttgggtctggcttccagttggcttccag

SEQ ID NO: 141331 - DNA, 201 bp, Homo sapiens
  misc_feature (1)...(201): n = A,T,C or G
cttctctaaagtgctgtattaatagtgctttgctgtgcattgtagttaatcttcttggaaacaaacgtctaagaattagaatcatcttatcactgaagatnaaactagttagtacagggtgtggatgcttcgatatagacaaaaggaaaaatatctttcgtattttccacaaaaggcaaatgttatgaatggccaaaattt

SEQ ID NO: 141332 - DNA, 201 bp, Homo sapiens
actcaggcagtgtacccaaaattttcatctctgttatgcctttgtgatacaaaatcatatgaaagagtgaataagattggatgactgcttgaaagttatakgaaactgtgtaattcagcttgcagaaattaagttccctgcttcatgtttatacctcacgtgattactcatttcaagcatactgtctctttccgagagtaa

SEQ ID NO: 141333 - DNA, 201 bp, Homo sapiens
tttttatttttcaggtcttagttacagtcctatgtaatgttcgcatgtcagcatttgaaggatgtgtgggtgctcactgcctggaatgtgatagtgaggaytgggggagcccacccagtgcagtgacatcttggcagggatgaatgactgatgtcatttattataaacttgaacctgaggtcactcaggcagtgtacccaa

SEQ ID NO: 141334 - DNA, 201 bp, Homo sapiens
atttctcccaataggttgcttgtgtgaattttctgtctgattaactgaaaacccagcgaggtcttgaattgtctaagaggatcctacctatgtctctgtcrgtgagagggacctaagctggctctgtatgtttggggcatctggtcctttagttagaaatgcaaaggggacttgcgttctgatttgttgcactaatgaagc

SEQ ID NO: 141335 - DNA, 201 bp, Homo sapiens
tgaaaatgtccttttttactccatctgaagtgtttgccttcaggttagaggctggttcactaagcaattcctccatctccctcaccagtacgttggggtgyggtgttcttttggactcctgaaacttgatgagcaaaatgattactccattaacaacctcaggcggagggccaacggcagacgcctgtgcggcacgggagc

SEQ ID NO: 141336 - DNA, 201 bp, Homo sapiens
cccatactttaccagccagccacgggccaggaggaagttactgcctcagtggctcaagtttgggagaagagtccaaagaggaaatccacaggatctgcaamaaacacagcaggagaggacaccatgaaagtagaccgagtgtgtcttagcaattccctgctgcttctcaagtcagagttagatgaagattttctgacaagg

SEQ ID NO: 141337 - DNA, 201 bp, Homo sapiens
cacaacacacttctattgaatgcccttgatacggagcgtgggaaccctggctaagctgttgatcccatactttaccagccagccacgggccaggaggaagktactgcctcagtggctcaagtttgggagaagagtccaaagaggaaatccacaggatctgcaacaaacacagcaggagaggacaccatgaaagtagaccga

SEQ ID NO: 141338 - DNA, 201 bp, Homo sapiens
ttctgttctggtcttctttctgggacccttgcttggctgtggcaggtcagtgtccttcctgtccacccaggcccctagacctgctcctcattgaccttgartgctctgacgacactgtgatggttaatgttagatgtcaacatgattggattgaaggatgtctaggtagctggtaaagtattgtttctgggtgtgtctgcg

SEQ ID NO: 141339 - DNA, 201 bp, Homo sapiens
tagaaccacaacagtttacccaaaccatcgtctgtttaaagagtggtatgaggtcttcaccccatgcctgcttctttatgtctgcagtgaaattcatacattcattttgaattagcaattgattgtcaaacatctgtttagtgttggattaagtagatattagagacctaacggagaaatccagcagtccagatcaacgaa

SEQ ID NO: 141340 - DNA, 201 bp, Homo sapiens
caattgtaaactgtgtctgagggtaagagtaataacttaggcacttaatcgtggctaaaaatagcagtggagggagagaaaaagaacatctcatttgatcyacttgttttctgccagttctggaaacacacattctttcggccacggcaacaactagccccattcggttgagttcactgtctgctgcaggaccacagaccc

SEQ ID NO: 141341 - DNA, 201 bp, Homo sapiens
tcctataactgagagcagagtctatttttttcgatttatattgctaaaatttatttttaatcaacaaattataattgtatgtattatggggtacaaggtakatgtatttatatctgtatgtatgtgtatttgtatagatgtgtatgtgtatgtatatgtgtgtgtgtataattggatacatatgtgtttaatataaaatta

SEQ ID NO: 141342 - DNA, 201 bp, Homo sapiens
ctataactgagagcagagtctatttttttcgatttatattgctaaaatttatttttaatcaacaaattataattgtatgtattatggggtacaaggtatakgtatttatatctgtatgtatgtgtatttgtatagatgtgtatgtgtatgtatatgtgtgtgtgtataattggatacatatgtgtttaatataaaattaaa

SEQ ID NO: 141343 - DNA, 201 bp, Homo sapiens
ctaattgcactgagttgaggaaacagaattctgagtttgggaagacaaaggtgctgaaattctcaggatggaataccaagaggtatgagaagagttgcacagagagagagagagagagagagagctctagtgatttgtagagggtcccaccaattcatcagcagagtactgacaggcacatgcctaagagcaatctactga

SEQ ID NO: 141344 - DNA, 201 bp, Homo sapiens
taattgcactgagttgaggaaacagaattctgagtttgggaagacaaaggtgctgaaattctcaggatggaataccaagaggtatgagaagagttgcacagagagagagagagagagagagagctctagtgatttgtagagggtcccaccaattcatcagcagagtactgacaggcacatgcctaagagcaatctactgag

SEQ ID NO: 141345 - DNA, 201 bp, Homo sapiens
aattgcactgagttgaggaaacagaattctgagtttgggaagacaaaggtgctgaaattctcaggatggaataccaagaggtatgagaagagttgcacagagagagagagagagagagagagctctagtgatttgtagagggtcccaccaattcatcagcagagtactgacaggcacatgcctaagagcaatctactgagg

SEQ ID NO: 141346 - DNA, 201 bp, Homo sapiens
attgcactgagttgaggaaacagaattctgagtttgggaagacaaaggtgctgaaattctcaggatggaataccaagaggtatgagaagagttgcacagagagagagagagagagagagagctctagtgatttgtagagggtcccaccaattcatcagcagagtactgacaggcacatgcctaagagcaatctactgaggc

SEQ ID NO: 141347 - DNA, 201 bp, Homo sapiens
caaattaaaaggaacagaaaacaacaaaattggaagcaggaaaacaataatcagtgaaatcccaactggttctttgggaaggttagtaaaattggtgaaactctagcaagactgattgggaataaagatagaagataaaatgattgatattaggaatatgaaaggggttattgttataggttctacagaccttaaaagttt

SEQ ID NO: 141348 - DNA, 201 bp, Homo sapiens
aaattaaaaggaacagaaaacaacaaaattggaagcaggaaaacaataatcagtgaaatcccaactggttctttgggaaggttagtaaaattggtgaaactctagcaagactgattgggaataaagatagaagataaaatgattgatattaggaatatgaaaggggttattgttataggttctacagaccttaaaagttta

SEQ ID NO: 141349 - DNA, 201 bp, Homo sapiens
gagctaagctggctgcaagttttgaatgtggcagagaggagaaatgggagacacaggtgggagggagtgaaggagtttaccactctacaggtgaagaattccgggggtgagaggagagttcagagctcaagagaaaggttgttttaaaagtaaacctgcgattgttccaaagctgtggaataagatgggtgagaagtacag

SEQ ID NO: 141350 - DNA, 201 bp, Homo sapiens
gaacacatctcttagtccctcttaggagtactttccttattggcaacttatggaatcgctagtgattaaacgaggcaatgactgtgagagagcctggcagktgccccgtggtacattcacagcacgggcacagctgctgtgccaggactgtgactcattcccagtaaaaggcacttatcgaagctgataaccgtccttcat

SEQ ID NO: 141351 - DNA, 201 bp, Homo sapiens
agaagacgttctaagcgttgatggtgtagacatggggtctgctcactacgacagtatcagggatgcagaggtgatgccatggtgatctggtgtgacttctstagaacaaggacttcttctttgctgacagctacctgtctgtgccatttcaggtaaatgggctactctcctggagaataagacaggaaaaatgaattgtat

SEQ ID NO: 141352 - DNA, 201 bp, Homo sapiens
tgggagggagtgaaggagtttaccactctacaggtgaagaattccgggggtgagaggagagttcagagctcaagagaaaggttgttttaaaagtaaacctrcgattgttccaaagctgtggaataagatgggtgagaagtacagagaagaggggtggacagcatccacatcacaggagaagttccagctatgtgtagtgac

SEQ ID NO: 141353 - DNA, 201 bp, Homo sapiens
tcggctcactgcaagctccgcctcccgggttcacgccattctccagcctcagcctcccgagtagctgggactacaggcgcccgccaccacgcctggttaattttttttgtatttttagtagagatggggtttcaccgtgttagccaggatggtctcaatctcctgacctggtgatcctcccgcctcggcctcccaaagtgc

SEQ ID NO: 141354 - DNA, 201 bp, Homo sapiens
cataatcacaaacttacataatttgttttaaaatatcacttattatatattataaaacatgtaggaatataatgaatataataacataaaaatgtacataytataattatgtatttgttatattacatatggtatatgtatatatactgtatatattatataacaaatatataattataatacatacattttgttatatca

SEQ ID NO: 141355 - DNA, 201 bp, Homo sapiens
tgcatttatataatatataagctatataagttattaggaaagcatagtaggaataacattttaaataaaaatttaaattttaaattttaaaattgtaaatraaaattttatctgccactttcatctttaagaaatgaggccttgagataaactattttatagtgtctgtaggaaggaaagtagtcctattatataaaaata

SEQ ID NO: 141356 - DNA, 201 bp, Homo sapiens
gctggagtgcagtggcgcgatcgcggctcactgcaagctctgcctcccgggttcacgctattcttctgcctcagcctccggagtagctgggactacaggcractgccaccacacccggctaattttttgtatttttagtagggatgaggtttcacggtgttagccaggatggtctgaatctcctgacctcgcgatccacct

SEQ ID NO: 141357 - DNA, 201 bp, Homo sapiens
aaattaaatttatgatctttactagtccattttcacattgctgataaagacatacccgagactgggtaatttttaatggacccacagttctatgtggctakggaggcctcaccatcatggtggaaggcaaaaggcatgtcttacatggcagcaggcaagagagaatgagcgccaagtgaaaggggtttccccttataaaac

SEQ ID NO: 141358 - DNA, 201 bp, Homo sapiens
tttttaatggacccacagttctatgtggctatggaggcctcaccatcatggtggaaggcaaaaggcatgtcttacatggcagcaggcaagagagaatgagmgccaagtgaaaggggtttccccttataaaaccattagatctcatgagacttactcactactatgagaacagtatgggggaaccacccccatgattcagtt

SEQ ID NO: 141359 - DNA, 201 bp, Homo sapiens
aaccattagatctcatgagacttactcactactatgagaacagtatgggggaaccacccccatgattcagttatctcccactgggtccttcccacaacacrtgggaattatgggagctacaattcaagatgagatttgggtggcgacacagccaaaccatatcattatctttccttctaaagggaatttctttcatatggt

SEQ ID NO: 141360 - DNA, 201 bp, Homo sapiens
tattacaattaatatatgtatatattatatattatatacatttgactatataattgtatattaggctatttatatatagttttaaaaactactgtatatatgtgtgtgtgtgtgtgtgtgtgtttacaaatatatacattttaatggcccagaacatgttttattttgatgaatattccttctattggtaattaaagaaag

SEQ ID NO: 141361 - DNA, 201 bp, Homo sapiens
attacaattaatatatgtatatattatatattatatacatttgactatataattgtatattaggctatttatatatagttttaaaaactactgtatatatgtgtgtgtgtgtgtgtgtgtgtttacaaatatatacattttaatggcccagaacatgttttattttgatgaatattccttctattggtaattaaagaaaga

SEQ ID NO: 141362 - DNA, 201 bp, Homo sapiens
gtgcgttcttctaaattaagtctttctcacacaaattactggttgccaccgtaaatcaagcaacatgtgttttgaattctgactgctagagaattagctaytgagtggggaaatgagatacttttgtttgcagctacactcaagtagactttttttttttggctttatctaaaaatacatgttgtagaagtattgactcac

SEQ ID NO: 141363 - DNA, 201 bp, Homo sapiens
aggcaggtggatcacttgagctcaggactacaagaccagcctgggcaacatggtgaaaccttgtctctccaaaaaaaaaaaaaaaaaaaaaaaaaaaaaawatatatatatatatatatatataaattagccaggtgttgtggaacatgcctgtggtcccagcatctcaggaagctgaggcatgagaatcacctgagctcg

SEQ ID NO: 141364 - DNA, 201 bp, Homo sapiens
tggtttagaatgcagccccgcaggaaagccaataggcaagaggtgggggacaggggaagctgagaccctgacaatacgtagtagccagaggcctcagagcrgggctgggaggcaagatcatgaagggcagcctccagggctgttgtatcctggaagctgtttccattctatttgaggcatgtctgtgaggccactggaatg

SEQ ID NO: 141365 - DNA, 201 bp, Homo sapiens
ctctgcagaaaatagggaagccaaaatcttcatggcttgtgttgttttcttctatggagccctgagtattggaaactccatgttattcccttttctctggktctaaactataatcaagtgaatcttctccccatcgatttcaagtttgcagtcactgagctgagaagtacaagtttggatttctgcatggttaattcagct

SEQ ID NO: 141366 - DNA, 201 bp, Homo sapiens
agggatgtattatgatatgagtaatgtacttactgagaagttcaagggattcattgtgatctaagtgcaaacaataaccatggcctactacagggtttccrgcatgctgggcacttttcttagccctctgcatatattaacccattcactcctcacaggaggcctgggaggcatggagagggtgactgattccttcaaggc

SEQ ID NO: 141367 - DNA, 201 bp, Homo sapiens
agaaagagaggcaccaaccccctgccaaaagttctcagagttcccacagtgagtctcagaaagggagagttttgtttgtttctgaaaacacataatgaggrtgttataagaagagccacctgcgtgcataaagcatagcaaagtcgtgcccctcccttctgtggaatgtctcctgtggccatcggaccctgctgccctaaa

SEQ ID NO: 141368 - DNA, 201 bp, Homo sapiens
tgtgcatgtgtgtgtacatgcatgtgtgtgtgtgtgtgtgtctgtgctgaacactctatttgtctcactctcagaaagcagtggattcacgtttcaccccygttatgttacattctggaaaatgaatttctgctaaatggaaaatttatatgaaagtcaccggacttgcactatagatttatcatggtggtcctctgggct

SEQ ID NO: 141369 - DNA, 201 bp, Homo sapiens
gtttccaaccaagcaatgattttcatcatccttaggtctgaaattgaatatagctgttagccccactttgtgggtattcagaagaattctctgactttgtsagttctgagccactgcttggaggggtggggagggttaaaagtcaagcacacctccatcttatgcttagctctggaatcttctttctcctcttggccactg

SEQ ID NO: 141370 - DNA, 201 bp, Homo sapiens
ggcgtgattggtctgcagaagtggcaatatgatgtgtggtcacatgatgtgaccttggccaaccacatggaagctggaggggtccctgggtaaggccaagyattggatttctttcttcaagcaggcagaactattaggaatgacagattatcagcctaatgacggagtgctcagtttttgatcacttctgttgcctctgtt

SEQ ID NO: 141371 - DNA, 201 bp, Homo sapiens
tcccaaagtgctgggattacaggcatgagccaccatgtctggctaaatataaacaaacttttaaaatatcttttttgcagttttttgaaaatgccttgctrtatgagataaacataaatgccacaccagaggaggagttttcctaatgtatgacagataatttgaatcaaacataactaatgaatgatcatcgttctttca

SEQ ID NO: 141372 - DNA, 201 bp, Homo sapiens
tatcttttggaggattattattcaatgcattccatttgattggggattttttaagtcttttttgagggggcctttcatacaagctgctaatgtgccagctrcttacatataagacagaggattctaaacagattgcattgcttgggaaggtgatagatgattgatagatggatatagataaatagaaaggtaggtaggtag

SEQ ID NO: 141373 - DNA, 201 bp, Homo sapiens
aagaagaattgaatgaaaggatgattcaagcaattgatgggattaatgcacagaagtgagtacttctttctcttaaattatctttcatcttttattatgtyccagttgtattttatcatgggctctgcaatagttaccatgacaaagccaagtttctgagaccattcattcatttcacttcagttgtccctcagaatagtt

SEQ ID NO: 141374 - DNA, 201 bp, Homo sapiens
atggggtggaagtcctatattgcagacatgggggtgcccccagtggaacacatttccaccctcagaccaatcgtgtagggcagatttggccattacagtaytggagatgatagtcgtttagacaggggtggatggatcccagccaagaacaagaggcgacttgaaactctcacctgtgcaggtggagtgcaccactcgtca

SEQ ID NO: 141375 - DNA, 201 bp, Homo sapiens
tggcgcaatcacggctcaccgcaacctccgcctctcaggtacaagtgattctcctgcctcagcctcctgagtagctgggattataggcacctgccaccacrcccagctaatttttttgtattattaatagagacggggtttcaccatgttggccaggctggtcttgaactcctgacctcaggtgatacacccgccttggcc

SEQ ID NO: 141376 - DNA, 201 bp, Homo sapiens
gctcctcttctgtcctgcaaacagcagacttctcacttctcttaggcctcccatggaggggggaaagagaagagagagagagagagagagagagagagagmgagagctggtttctcttcctaatacatatattaggctagggctgatgacaaccattctagatctttattccatccacctcaagcactcagagggcaaaag

SEQ ID NO: 141377 - DNA, 201 bp, Homo sapiens
agaagacttcagagctggagctgagcttatttgactgcttcccattttagaaagacccccactgcagaagagaaggtgagggaaaaggaggacaggaggaragaagccagttaggaggtgattctctaggtgacagaggttgctgagaactgggcagagcagtaggttgaggaaggggcaggttctgaagtgtgaatggca

SEQ ID NO: 141378 - DNA, 201 bp, Homo sapiens
cagcctaatgacggagtgctcagtttttgatcacttctgttgcctctgttggtatcatgttactcacacccaacggcctcttatgttaagcagataaagaygagctctcaagtccctgcgtcacgaccccgttgtccatagttcaaagactgtgaatatcagacagtaaattacaaacttttacttatttgcaaatgtatg

SEQ ID NO: 141379 - DNA, 201 bp, Homo sapiens
gatctctaagggaagggcactcttttgttcaaagggaccaatgaatggtcttttctccatcaagcctgggtgtggcttctgtgatctggagaccagtggtytaaaaagacttgttatcagccatctacccagccacctcatatacctaggataaccacagtaaacccttctgctctcccaaaagaaggatgaaactcattg

SEQ ID NO: 141380 - DNA, 201 bp, Homo sapiens
gaggagtcctataactgagagcagagtctatttttttcgatttatattgctaaaatttatttttaatcaacaaattataattgtatgtattatggggtacdaggtatatgtatttatatctgtatgtatgtgtatttgtatagatgtgtatgtgtatgtatatgtgtgtgtgtataattggatacatatgtgtttaatata

SEQ ID NO: 141381 - DNA, 201 bp, Homo sapiens
aaaggccatagccaggctcagtggctgtagctatttttgcccactattcctaagccaggagcattggcagggtgtgtgcctcatgcagtggaccggctcayaccccttggagagacatcgagtcctgcccctcctagagtctgaagtcctgcccaacacttctagctgcccctgtccattctatgggaatgggggtttaaa

SEQ ID NO: 141382 - DNA, 201 bp, Homo sapiens
ttctgcattctttggcttgcagttttgacaacctgcaccatatccggttctttttccctggtttctcctgcaacccatttttcttttctcacgactggccrtctttctgctctcactcatatggcaggcatgctctcccttgagtactttataatttagatgtgagagaattgcgcttccttgaataatatcacctagatg

SEQ ID NO: 141383 - DNA, 201 bp, Homo sapiens
tgaaggcagggattggagtcatgtggtggcaagctaagaaaagccaatgatggccagcaaactacctgaagtgagaccaaggcaaggaagcattccctaakggtttcagaaggacatggccctgagaacatcctactgtcagacttctagcccccacaacactgagatgatacatttgtgttattttaagtcacctagttt

SEQ ID NO: 141384 - DNA, 201 bp, Homo sapiens
caagttctttcatcatacataaagaaatctactacgtttctttgatgcttaaatcagcattttgccaaatttagtcaaatgatataacggcagaaataccrtatctcgtatctctattgactgtgagaggaatgttcccaagaatagactaagtaaatgtcttcttatctgtccaaataaattagtttaggtatttgacaa

SEQ ID NO: 141385 - DNA, 201 bp, Homo sapiens
gttatacccagtatattaagcacttaagtgtgtgtgttgctttcagataatttggcagggcacacagctacatttgcaaaatgctaaaatattaatggaaktattaacattgtcagattttacaaattgggctgaaatttatcatgtatgccataatagtgggcttttccttcagatcagaacattttaaatttaaaagaa

SEQ ID NO: 141386 - DNA, 201 bp, Homo sapiens
ataatttggcagggcacacagctacatttgcaaaatgctaaaatattaatggaagtattaacattgtcagattttacaaattgggctgaaatttatcatgkatgccataatagtgggcttttccttcagatcagaacattttaaatttaaaagaaggagtcttgcttcaccacttttgagctcaggctttttttggaaact

SEQ ID NO: 141387 - DNA, 201 bp, Homo sapiens
attccaaacttgtaactatatggctatctatatataatctcagagagatttcaggtaaatcttcctcatacctgctatttttgtcctgttctcttcaagcyccttttggtgaacagttctgctggttttggtttttatctcttttttttttttttttttttgagacggagtctcgctctgtctccccggctggagtgcagt

SEQ ID NO: 141388 - DNA, 201 bp, Homo sapiens
attgtaggtatgacccactgccgcgaagctgttttaaatgacacatctcagagccaagtctcccagccccagtacctcatccagataaccatctatccaaraaacaactctgatcacttcactctctgcctgaaattcctggtggcttcatcctctgaggatgatttcattcatcctcagaatgaaatcctggttcctctg

SEQ ID NO: 141389 - DNA, 201 bp, Homo sapiens
cctaccctcagaaaaaaattaaaacatgtagatgtttttatggggattgcattaaaattataactaaacctaaagagaagtggtgactttgtgatctcatmcaaaaacattacattttccatttatgcatgtctacatgaatcattctttcaggagtgttctaagttcctcatacaggtttaacacgtatctcatttatgt

SEQ ID NO: 141390 - DNA, 201 bp, Homo sapiens
acggtgaacttaatacatgctgtgtgtcttttgactgctccactgaccagctgttctccatctccctccctcttctcaggcctccttattcccagagacaygacaatatttaaattaggccaattaataaccctacagtagcctctaagtgttcaatgcaaggaagagttgcatgtctctcactttaaatcaaaagctaga

SEQ ID NO: 141391 - DNA, 201 bp, Homo sapiens
ctgaggtgggaagatcacttgattccaggagtttgagaccagcctgggcaacatgatgagaccccatctctacaaaaaataaattagctgagcttggcggygcacgcctgtagtcctagctactttggaggctgaggcggaaggattgattgaacccaagaggttgaggctgcagcaagccataatagtgccactgcaatc

SEQ ID NO: 141392 - DNA, 201 bp, Homo sapiens
agacatcgagtcctgcccctcctagagtctgaagtcctgcccaacacttctagctgcccctgtccattctatgggaatgggggtttaaaatgaaattaaaracaaaagtctaccttctgttttttttttttttttttttttttttgagactgaatctcactctgtcacccaggctggagtgcagtcgtgcgatctcggctc

SEQ ID NO: 141393 - DNA, 201 bp, Homo sapiens
agtgaggaaggtatgtcttaagtcatgataggccaaaagctagacctcctgcagtaaacagttagcccagttgtgaatccaaaggaaacgttcttgaaggyaattaaaaatgctactctagtgaacacgcaaatggcaagaaagcaagtcttattgctgatatagagaaagtttgagtggtctggctggaagatcaaatca

SEQ ID NO: 141394 - DNA, 201 bp, Homo sapiens
agtggtctggctggaagatcaaatcagtcacaacattcccttaagccaaagcctaatccagagaaaggccctaactctcttcaattctatgaaggctgagraaggtgaggaagctaccaaagaaaagtgggaatctagcagaggtggcttcatgagatttgaggaaagacatcatttccttaacataaacgtggaaggtga

SEQ ID NO: 141395 - DNA, 201 bp, Homo sapiens
tgaagctcagatgtcatgcctcattgagaagttccaggacaagatgtttcaggatgctacaattttgccatgatgtttatggatgcttttaaatgagaaaygaaaattaactccagaaaattgtcaataatccttaaatcaagtctgcagtattttctgagaagtcctttagttagaatggttgagatcaccacaaatttg

SEQ ID NO: 141396 - DNA, 201 bp, Homo sapiens
ttaaatctaaatgatattatatgtgaccagggtttgttaagtgagaaaataagatatgcatgcaaggaaagcacttgctgtcttataaaagggtcacctgwtttgctgaagtgcctagtgactttaatatgcacaaaacattccagtttcctaggctgtgaaaggagcaggctgactttccctctgcacacagatatgaaa

SEQ ID NO: 141397 - DNA, 201 bp, Homo sapiens
gtttagaaataccaatttactgtcatcagtgactgaaggcatactttataatttgacttgattagcactttcttctctaactgctaactgaagagtcatcrcatgtgagtgataatttcattctttccagcatcttttaacaatgtactctctaaaaatgttctggtcatctccttgaacctgcaaatccagatggatgga

SEQ ID NO: 141398 - DNA, 201 bp, Homo sapiens
cacattctcagcctttttttccatggactgcaaggcagacaagtgggggttaccagtgtgggcttcaaagtcatgaggtccctgccctgaagactcctcayaggtggaatggccttgccaaggctcaacctcctcttactctacgtgagggagaagaatcagcacttcacagaggggctttccagagcttttaccctgaag

SEQ ID NO: 141399 - DNA, 201 bp, Homo sapiens
tatacatcgtgcctgttcttcatttgctgtacttttgtaggttagtatcactgttggcataataatgagccaacctcaaggaatttccatatattcctatktatacatcatgattgcactttgtatttgaaactcacttttcttacacttttatttccttggtattcatagcacgttctgaattttcgtttcatatatctt

SEQ ID NO: 141400 - DNA, 201 bp, Homo sapiens
gccaaaattttaatcagttaatttcctgttaaatctcaaaacaaattttgtagtttttgtaagcctacaaaagtgttccttcaataactgacactatttgaaaaaaaaaaaaaaatctccccttgactagggctttcatttgcatttcagaatatgtagcacacttgtttgaactgggcctgaatacctttgctgtcattt

SEQ ID NO: 141401 - DNA, 201 bp, Homo sapiens
cagcttgtcccctgcaagcatgttcccctcccttgcccaggctctgacaccccacacatgtgtggatcccctcccctgtcccagctctgataccccttgcrtgtgtggctgcccctcacctgggtgtcctcttccctgtcccagctctgacacccacgcatgtggggctgccccgtgcctaggtgtcccctcctctgctca

SEQ ID NO: 141402 - DNA, 201 bp, Homo sapiens
tttgcctaccttttccagtagtctttaatatattaatcatagacattttaaattccctttctgatatacatatataatatatgatgcaagggaaatatgcatatatatatgcaagtagatatatatatggtttatcttttatcaattcattttcccttgcattttcatgtgtctcataatttttgtttgaatgttaggctt

SEQ ID NO: 141403 - DNA, 201 bp, Homo sapiens
tacagagaaaaaagagtgcttatacactgttagtgggtgtgtaaatgagttcaaccactgtggaagacagtgtggtgattcctcagagacctaaagacagaaataccaatctcattactgggtatatacccaaaggaatataaatcgttccattataaggacacatgtattggagtattcattgcatcactgtctgcaata

SEQ ID NO: 141404 - DNA, 201 bp, Homo sapiens
agaaaaaagagtgcttatacactgttagtgggtgtgtaaatgagttcaaccactgtggaagacagtgtggtgattcctcagagacctaaagacagaaataycaatctcattactgggtatatacccaaaggaatataaatcgttccattataaggacacatgtattggagtattcattgcatcactgtctgcaatagcaaa

SEQ ID NO: 141405 - DNA, 201 bp, Homo sapiens
aaattggactaataatcatgagtttgaaataaaaacagaataaataatgttcattttaaaagtaaaagtcagttttctagattatgaatttggtattgatktaaatgaaatgaatttacattgaagaattgtatgtctttagggattcagtgttcagtgatgatctgttggatgcacagattgaaggagactggatagaaa

SEQ ID NO: 141406 - DNA, 201 bp, Homo sapiens
tcggtaaaacagaacacagtgtgttcgtagttaccacgtcgtcctgttatcagtgaggatggcagtcaccatgtttgcaaaagtaaaataaatctcaaaayttgactaataatagcagacacaaaaaaagtagaatccagtacaaatatgccttttatttcaagcatagtttcctcacttttggccctggatttcctgtat

SEQ ID NO: 141407 - DNA, 201 bp, Homo sapiens
gacttccgtcctgtactttggagttgtcacagcagtctgcttgttcagcctcaggtttcactctctcagctgagaacgttctcctaatgctgtgcttcccrtacaatggcccgcctatagtcaaccctcctgaccagtgtgcatgatctcggcacagcgtatcagctactggagccgtttacatttgcatcaactccagtt

SEQ ID NO: 141408 - DNA, 201 bp, Homo sapiens
aggttagttaatcgctggattactcaaaatagctacatttatgtgtgtggacagctggcaggctatccaccatggctgttgagtggggtgccaggtcactyggctgtctcctctcatttagcaggctagcctgagcttctttgcatggagttcaggagcttgcaaagagcaagaggaaagggacaagccctactgcccaag

SEQ ID NO: 141409 - DNA, 201 bp, Homo sapiens
aatactggaggcaactggcaagctccgcctcaatgcacatggctcagtttgtctttagagaacattctgaatgtgtagttatagatgcccattgtgatatrcatcaaatcccaatattttaggtacattcagagtgtataataattgagtataatattctgccttctcatagcttttatttattttataagctgccttgaa

SEQ ID NO: 141410 - DNA, 201 bp, Homo sapiens
tatttccactttcaggagaataatttatcaccccacaaagtccttgactctctgctgttaaaattatgttactaaacacagttaattattgtttcaaaaayttataatatgcaacttccaaaacaactctttctcttgaaaatatactcctcgcaacatggatggagctggaggccattatccttagcaaactaatgcagg

SEQ ID NO: 141411 - DNA, 201 bp, Homo sapiens
gtaacagcaacagccaagctacaaagaaagcaatgggggatgacttaggggacaggtcctatgttctccattttggctgctgtgttttggtgcatcttatrtaacacccaagtaagtttgtattttatttggtgtccagggaagccactggagattttgaatagagaaatggcataaatcaatagttttttaggaagttca

SEQ ID NO: 141412 - DNA, 201 bp, Homo sapiens
tcataattctcctctcacctgaataacactggactctctttcctgactccatctaccctgggagctccgtgagggaaggaactttgtctttgatctcgggyacatagcagatactgcttactggtcagacataatataaaatattttttgttgactctcccagaacaaaaatacatgtttccctttttcaaagatagcatg

SEQ ID NO: 141413 - DNA, 201 bp, Homo sapiens
gctgctatgataaattattagcaatataagacaaatgtttatctatgactgctttgaatattaacttcagccatatcttatatatttttttcttagtaaartcctcaagatatgcctccaagttttctttttgttataacctcatgtggtggcctgtggaatattatttttatttttattcatatagtcccagacttgttt

SEQ ID NO: 141414 - DNA, 201 bp, Homo sapiens
cctgccaggccagctccagagcctctgtctctaatcactgtgctatcctacctcgcaatgagcatttggaagagaagtgaaaacaccacagtccccctagraagccacagactggctgctagagcccatcatttaaggaggctggtgaatttaatgagtttctcttgactgtattttcaaggtaaaaatgtaaataataga

SEQ ID NO: 141415 - DNA, 201 bp, Homo sapiens
tgatggacttggctaggccaggacattcctaaagaaaagctgcccagtaggagagaagaaaaagcattcttaaataatttgggcacatttcttatcagttygagagctaaatgatagatcaaatatattcatttgtattgccattgaaggtatgattctgtgattgttttttcagttttatggagtataattattaatttt

SEQ ID NO: 141416 - DNA, 201 bp, Homo sapiens
agagagatttcaggtaaatcttcctcatacctgctatttttgtcctgttctcttcaagccccttttggtgaacagttctgctggttttggtttttatctcttttttttttttttttttttgagacggagtctcgctctgtctccccggctggagtgcagtggcgggatctcggctcactgcaagctccgcctcccgggttc

SEQ ID NO: 141417 - DNA, 201 bp, Homo sapiens
aagctccgcctcccgggttcacgccattctccagcctcagcctcccgagtagctgggactacaggcgcccgccaccacgcctggttaattttttttgtatktttagtagagatggggtttcaccgtgttagccaggatggtctcaatctcctgacctggtgatcctcccgcctcggcctcccaaagtgctgtgattacagg

SEQ ID NO: 141418 - DNA, 201 bp, Homo sapiens
gttgttaagtctgttctatctccatctggggcatgccagcactgtcacctggccagtgcctaggtgtcacccacagaaagtctttgatagcccacgagccyatcccaggagctcacattcgagctctcagagcagtcataattctcctctcacctgaataacactggactctctttcctgactccatctaccctgggagct

SEQ ID NO: 141419 - DNA, 201 bp, Homo sapiens
gaccctgcctggccacggctattcctgcccctcagaggaaagggcttgcagcatcatcctggcagtgggcatcatcctggcagtgggaaagcaagtctctyatagggatcccttcacttcagaatctggttcagggaattgagatcctggacctcagggcctgtccagctctgtgctggtacagggtggcttccaggtctg

SEQ ID NO: 141420 - DNA, 201 bp, Homo sapiens
gactccagcttctagttagagaaaatcttttagagacatgacctctggcttttattttggaggaagaaatgcacattagtacaaagttgtccctgtactcrgtgggatcattcctgctctgtgtaattctgacaccactgaaacgaccacattctcagcctttttttccatggactgcaaggcagacaagtgggggttacc

SEQ ID NO: 141421 - DNA, 201 bp, Homo sapiens
aatttgcatgtaggataacatctgccacgaagtagaatgagtgaattatcatgactccagcttctagttagagaaaatcttttagagacatgacctctggyttttattttggaggaagaaatgcacattagtacaaagttgtccctgtactcagtgggatcattcctgctctgtgtaattctgacaccactgaaacgacca

SEQ ID NO: 141422 - DNA, 201 bp, Homo sapiens
atgcttttcagaggagcctcattgcctccctgagtttaggatggtaatgctatgctgccagcattcttaaggatgggaaccggactggctgattaatcccyattacttttgcatccaatgagaattaaaactttggagaatatagacaacaataatttgcatgtaggataacatctgccacgaagtagaatgagtgaatta

SEQ ID NO: 141423 - DNA, 201 bp, Homo sapiens
ttaagagcacactgtctgcatgcaagtagagcagttctaaaatcgcctgggaataataggagagggtgcatttccgtgcaaaagaagagacccgttttttyagtcaacaaccttgaatgctgcaaacatgagtttatagaccccctttaaggtgaaagttagcagagctatttcagggtctggtctcccctcccatggctt

SEQ ID NO: 141424 - DNA, 201 bp, Homo sapiens
ggcctctccattcctacaatgttagtaataactacttttaaaatacattatattttaatacattataaagcatgaacacaggtttttactaacaggcactrtcttaattaatatcaaaatgaacttttctctaaatgtaacgaatggcattctgtcagaacagcacaatcccaagtggaagaaaaatccatattttgcaat

SEQ ID NO: 141425 - DNA, 201 bp, Homo sapiens
acccccatgcgtctagtaagtagctgcaagtgctgccgattcgtcattttgcctggcatgtcacacgaacagaaaaaaattcctgcatatctgcccgggtstgttttagtaagttactagcctatgagcagaatataacatattcctattagattagcatatttgacaagattatcaccacgtatttttctaaatcttcaa

SEQ ID NO: 141426 - DNA, 201 bp, Homo sapiens
ttatacaatttgtgttagggaaaaactaatttacaaatgctaaaggcaaactgccataaacgaacaatacagtttttattcaaatcatcaaaaaatgcacyctctctacagaggtatttttcatgtattcatcatttatattctacaattgcctcttttcaaaaaataatttgagccctcttttagtagcataactttgca

SEQ ID NO: 141427 - DNA, 201 bp, Homo sapiens
ggcaggctatccaccatggctgttgagtggggtgccaggtcacttggctgtctcctctcatttagcaggctagcctgagcttctttgcatggagttcaggrgcttgcaaagagcaagaggaaagggacaagccctactgcccaagtctttgttcaagttattgcttgtgccatgcacctgccattagattggccaaatgga

SEQ ID NO: 141428 - DNA, 201 bp, Homo sapiens
ctttgttcaagttattgcttgtgccatgcacctgccattagattggccaaatggagccatgtggctagagccagactcagtgtaggagagaattacacatrggcatgatacagggaaggggattattggagccaatttggatttttaaaaaagctgtaacagaaaagcaaactagaatgctgagcaaccctaattactaca

SEQ ID NO: 141429 - DNA, 201 bp, Homo sapiens
attattggagccaatttggatttttaaaaaagctgtaacagaaaagcaaactagaatgctgagcaaccctaattactacagcagtccacctacctggtcayccaatatatagtttattcccatttatttatttatttagagacagggtcttgctctgtcatccaggctggagtgctgtggcacgatctcagttcactgcaa

SEQ ID NO: 141430 - DNA, 201 bp, Homo sapiens
aggccaaggcaagcggatcatgaggtcaggagttcaagaccagtctggccaacatagtgaaaccctgtatctactaaaaatacaaaaacaagttagccggrcatggtggtatgtgcctgtaatcccagctagtaaggagactgaggcaggagaatcgcacgaacccaggaggcagaaattgcagcgagccgagatcgtgcc

SEQ ID NO: 141431 - DNA, 201 bp, Homo sapiens
acatttaaactcctcatgttttcaagtcattggaaaccaaatgctaaaatgactgtttaaataaataacaccttcaaaaaatgtttgagtagttcatgtcygggaaaagttatgatgtaatttttcaacagccttgtaaattcatgccaaagctatatcactccacagtatttgattaacccatattgtccttacaaggtc

SEQ ID NO: 141432 - DNA, 201 bp, Homo sapiens
atttatttatttagagacagggtcttgctctgtcatccaggctggagtgctgtggcacgatctcagttcactgcaactttgacctccctgggctcaagttwtcctcccatctcagcctcctgagtagctgggacgcaggtgtgtgccaccgtgccctactaattttttttttttcttgtagagatggagttttgccatatt

SEQ ID NO: 141433 - DNA, 201 bp, Homo sapiens
aagcaggcagaactattaggaatgacagattatcagcctaatgacggagtgctcagtttttgatcacttctgttgcctctgttggtatcatgttactcacrcccaacggcctcttatgttaagcagataaagacgagctctcaagtccctgcgtcacgaccccgttgtccatagttcaaagactgtgaatatcagacagta

SEQ ID NO: 141434 - DNA, 201 bp, Homo sapiens
aaaaataaaatgaccaattatctaaccagccattcttaagtactattaattttttagtgttaagatgcagtagtttctgctttatacaatatgtgtgactrtatgagtacattcatttttatacatttaaaactgtgatcacaaaatttatttatactatatggttaatattctactcattatagatgataatcttaataa

SEQ ID NO: 141435 - DNA, 201 bp, Homo sapiens
ggttttgaatttcagtggcttgaaattgatgtgtttggattttatttcattttattttcacttatccaacttggttttctctgagcttcttggttgtattkacggcttgacatatttcattatctgtagaagaattctcagctattatgtcttttccttatgggattctgatcacataggttaggctgcttggtattgttg

SEQ ID NO: 141436 - DNA, 201 bp, Homo sapiens
ctgctttcttttcctcttttgaattgcatctgccagaagacagacctgtttctgggcagacgagaagcagagctaaggcagtgtggcggtgtcagtgtccstggacttaagtggccagtggtaaatcactgatcagaagataaaggttgatgtggtgggggcctccccctgttatattcctgctgtaacctgctcttggtt

SEQ ID NO: 141437 - DNA, 201 bp, Homo sapiens
cttatgaatgcttggtggaggcctgtggagaaaagcctgtaaacaggaatgtgctcttcttacatctcaattcccagggttctctcctttcaggctagccytgggtcttagcagttcattaaagttgcagctgacatcttacctgcctgcatggtggccctgtcttccgtttgttcagccacaaatgagtcagtattcatg

SEQ ID NO: 141438 - DNA, 201 bp, Homo sapiens
cataatttaagatacttttctaagatctctagccattggctggtttatctggtttagtagaagtttagcaggtttgagtctcagcgttgttttaaggactyatgcagctcagcctgatgttctaatccctgggcattcctgctttcttttcctcttttgaattgcatctgccagaagacagacctgtttctgggcagacga

SEQ ID NO: 141439 - DNA, 201 bp, Homo sapiens
agctgtgtctctgaagtgggtaagtattctaagttcgtcaagtgatttcacagttggaatgatggtgcagggtttctgaaaacgtctttatgtgtgttttmaaagatgattttcagcatcttttttttgttcgcaagtaacagctacaatttaaataaaagcttttttttaaaaaaaaaaaaaaaggtctacattttcttc

SEQ ID NO: 141440 - DNA, 201 bp, Homo sapiens
aagtgcaaagaccggaagtgcgaagaagatcagaggtaaagagaaaatcccaagtgggcagccctgaagtgaacaaggcctgaatctcctctgaggggtcrctgtatccgtggtctggagaatggagagggcggatgtgaagtcaggagcagggagaggtcctgtgctggaggacagggagaaacttgagatttttttttt

SEQ ID NO: 141441 - DNA, 201 bp, Homo sapiens
tttttttttttttagatagagtttcactcttgttgcccaggctggagtgcaatggcaccatctcggctcactgcaacctccgtcccccgggtttgagagaktctcctgactcagcctcccaagtatctgggattacaggcacgcgccaacacgtctggccaatttttgtatttttagtagagacggagtttcgccacgttg

SEQ ID NO: 141442 - DNA, 201 bp, Homo sapiens
gcagatattccttgataatgtcattttctctggagtccagcttcctgagtctcctgaatccagcaggggctcctgccagcgttcataccattgtcaactcrttgacttggctttcctacctctgggcaggcccctcactttggacaagcacatctctgctccctactgacacctgccttctaatctgtgttctcttctagt

SEQ ID NO: 141443 - DNA, 201 bp, Homo sapiens
catagccaatggagatgctgactgtggaatcttcatgctgctgagatagactgtctcctgcagatattccttgataatgtcattttctctggagtccagcytcctgagtctcctgaatccagcaggggctcctgccagcgttcataccattgtcaactcgttgacttggctttcctacctctgggcaggcccctcactttg

SEQ ID NO: 141444 - DNA, 201 bp, Homo sapiens
caccagaacttagtgagcatttattgtgtgtaaatccccatatcacatggtgctcatcagtcctagtggttcccatagccaatggagatgctgactgtggratcttcatgctgctgagatagactgtctcctgcagatattccttgataatgtcattttctctggagtccagcttcctgagtctcctgaatccagcagggg

SEQ ID NO: 141445 - DNA, 201 bp, Homo sapiens
gtcctaggctcaccttcccaagcattcacagcagaaaatgtatgtgaccgcttcaggattcagtcatgtgttcaagagagaaatgcagtgcagttttttcyagaaatctccccagttgacaatattttcaaaggaagccttctgatattggctacaattttgctctgggcaccaactctcacccaggggtgcttccagcct

SEQ ID NO: 141446 - DNA, 201 bp, Homo sapiens
taatcaataaatattttttaatgtaatatagcattttctcattagccatgacttccatttccatgctgatcttgatttctgcttcctggcagaaaacttgscttcttttcactttggcagggctgcagtttataagttattcattccctttttggctcttccacactcaattctgggccacatgtcttctgtcatggcgtg

SEQ ID NO: 141447 - DNA, 201 bp, Homo sapiens
ccatcattgttgttccaaaccactagttttggggtgatttgttttgcagcaatagatgattgaaatattaatgcttcctaaaccaagccaggcttgagctyaagtcagcgtgggtgcatagctggtgagaataacacattattttccttagaaatctctgcataagatttaatattttaccagactcagctttatacatgt

SEQ ID NO: 141448 - DNA, 201 bp, Homo sapiens
ccatgtcctgggatgtcatcccacagtgctgtgactctgcctctttcctctgaggctggagacactatagtatcccacaccacacagaggacatgcctccytggaagggtcaggagtactatatcatgtaattttattaaccaagttacttcatcacatgcttaagcaaaaccgaattttataaacttaacaatggttggg

SEQ ID NO: 141449 - DNA, 201 bp, Homo sapiens
cagagttgggtagtcatggcagagaggccatggtgctcaaggcctgaactattcacttgcagccctttacaggggtggtatgccagcccctgctctgctcygcctgaatggaggctccatgtcctgggatgtcatcccacagtgctgtgactctgcctctttcctctgaggctggagacactatagtatcccacaccacac

SEQ ID NO: 141450 - DNA, 201 bp, Homo sapiens
atatgtggtaaggaaacttctgttgctatctctggggcacttctgaattccttgctggttttccggccaataatttttaactgtcacttcatgtgacttayagctctttcttgcaagccatctttttcaagtgagaacttgaccaaatctggactcatggggtatgttagatggctgcttcttgtctcagaagaagaaaaa

SEQ ID NO: 141451 - DNA, 201 bp, Homo sapiens
atagattagctaaatgcccccaggtcctttttcaagatgttggggaaagctatacatacaaatgataaaaactctgttctcatgacacattctaattgggrgaagatgagacaatagacaaacgtgaaaaaaaaaataacatgacagagtgtcacacttctgtaagaagaaaagtaaagcaggaaacgctatacagagctg

SEQ ID NO: 141452 - DNA, 201 bp, Homo sapiens
ggaaaggaactatgcagttaattcaacccgtaacatttgctgcaggtcttcattttcgaataggagacaaggtcatctaatgagccgctgacaggagcccrccgtgcatctcgggggatgtcttcaggcagctcaccggctgtctttagcttgcccagacaggcccatgataaactcatcaagagtggctgagaaaggcct

SEQ ID NO: 141453 - DNA, 201 bp, Homo sapiens
atgggcaacagtacgagacaccatctcaacaacaacaacaaaaaagacacacagtgtctcctgtagcattcaccaccctgcgagctccatggtgtaaagcygagtagtggggcaggcagcacggcctaacaggagcccagagtggggactcgggacctggggtgagccctggttttggcactgccaagggcagcttggaaa

SEQ ID NO: 141454 - DNA, 201 bp, Homo sapiens
aagtcagacaatgtggtacaatgcatacttccatataatttttatttatttgtcaacaactgagagatacatagtacttatgcatgcgtttttatgtttgyatcaacctattctgaacggattgctaattatattagtatttttatcaattttttaaaaactcgggacaggcgcggtggctcacgcctgttatcccagcac

SEQ ID NO: 141455 - DNA, 201 bp, Homo sapiens
tcccctctaatgttcaaaacttaggagtgtttgacatctcctaagctctgatgtctctacattacaagtgacttaatttgtaaatataatcatctcttagyagccaaaggagatttgttaccagaccccccacctcacagatacccaaatctgtgttgctgaagtctctgatataaaatggtgtaatttttgcatacagcc

SEQ ID NO: 141456 - DNA, 201 bp, Homo sapiens
catctcaacaacaacaacaaaaaagacacacagtgtctcctgtagcattcaccaccctgcgagctccatggtgtaaagctgagtagtggggcaggcagcayggcctaacaggagcccagagtggggactcgggacctggggtgagccctggttttggcactgccaagggcagcttggaaactttccaggagcaaagcagga

SEQ ID NO: 141457 - DNA, 201 bp, Homo sapiens
gcttataatatcgaatacaatgtaaatgccatgtaaatagttggcatactctattgtttagggaattatgacaagaaaaagtctgtacatattaagtacasactcaacatacatcttttaagaaatatttttgatctgcagttggttgaatccacagatgtggaacccatggatatggagggctgactatagtagcaaatt

SEQ ID NO: 141458 - DNA, 201 bp, Homo sapiens
tttaaggcatccagtgcttactttgcaagttcctggcctcaattttactttctatcttaaaacgtattgctgttggttctcttcatgtcctaaggtttagrggagtaaggacacttagtaaccttgcagcaccttacccgttgtttatgttccataaatattgattgtgtgagtgcatgatcaaataggctgggtactaca

SEQ ID NO: 141459 - DNA, 201 bp, Homo sapiens
caaaaaagacacacagtgtctcctgtagcattcaccaccctgcgagctccatggtgtaaagctgagtagtggggcaggcagcacggcctaacaggagcccrgagtggggactcgggacctggggtgagccctggttttggcactgccaagggcagcttggaaactttccaggagcaaagcaggaatgggaacatttagatg

SEQ ID NO: 141460 - DNA, 201 bp, Homo sapiens
caggtatccagggagcaaaatccagaaatttctatttatcttggtcttttttttagctgtctgaagggcaaggaaacaatattaggcttttacttgctccytctttgctctgccagctgctatttctggcttatgcctgaaggcaggagaaggaatggcagcagggccagggtgaggccagggctgcggtttgggctggat

SEQ ID NO: 141461 - DNA, 201 bp, Homo sapiens
agatacatcttgacaatcatgtatccaacttactgttatatgatggccctgttgaatctgcctgtggcctacaaggatctcttccttggaaagtttcatcstacagggagttagatgcatcttgcactcagttaccgccattcattcgttcagcaaacatccattgaacgcctgctacatatttgaatgtttgctttcaag

SEQ ID NO: 141462 - DNA, 201 bp, Homo sapiens
cctggaggacttttacttcctgcttctcatatcagataacgtatgcaaattatgcccacgcagcatctgcataggcagagttgatgtcacccacagttcartggaactctgtgtactgctccacactcatacctgggagaatatggtgagaatccttggaaaggtggccctcaagatgggtgagcttatgcactgagaccc

SEQ ID NO: 141463 - DNA, 201 bp, Homo sapiens
aagtagagttaaaaggaattagcaggttacatggttttaatggaaccaacatgaacttgctatgtatgaataccactccatctgtatcctctgtctttgtractgagggaaatccttaattttccacagtcctctagggtgcagcaatatagaacttcacagcaggtgagtaaaaaataaaatatgcagaggaaactagcg

SEQ ID NO: 141464 - DNA, 201 bp, Homo sapiens
aaagctgagtagtggggcaggcagcacggcctaacaggagcccagagtggggactcgggacctggggtgagccctggttttggcactgccaagggcagctyggaaactttccaggagcaaagcaggaatgggaacatttagatgaagccagctctgggctttgtttctgtatttgtcaaataaagaaggtgaaccccttgg

SEQ ID NO: 141465 - DNA, 201 bp, Homo sapiens
gtaaactaatgtggccattaactagcatatgcaattgaagcagcatatgaggaaatgttattccatataaaaatagtgtcaccttttacattaatttctcrtatgtgtacttacacatttttgtgtatacataagtgtgtatatataaactctttataattacagaatatacttaacataccagaaactcaaatatctgtt

SEQ ID NO: 141466 - DNA, 201 bp, Homo sapiens
gtgatgtttttatttgattcattatagttgtaagcattggtgaactttgtgtgcagaattggctgtaacttgtatattaccaaatgagaaagatacataarctaagaaggccatatttgaatctgtggctagtggagtcataaataaattggtattaaatttggtgaatgatgtaatcacaccaaagatgtgtctcctggg

SEQ ID NO: 141467 - DNA, 201 bp, Homo sapiens
ttcctggcctgaaaaacaactgataccgaaagtgtgtttattttgcactgatgatgcattagaatcatccaaagggatgatagattttacattatgtattrgagtcatagtaaaacactaatccttctatatgaccacagctgcatacaggacatttagtaacagtctgtgatccagcatgaatgtgcatgcttttaagtt

SEQ ID NO: 141468 - DNA, 201 bp, Homo sapiens
aaacataatagtttccattttttttattcttagaactgattctgaatttctcacagttggataccagcaagaaaaaaaaggacctagatcctataaaaagraatcatttcccatttagaagtcacctaattaggtatttagaacatcatgcactataaataggaaacctcatgttatttcctcaagaaagacaagtctttt

SEQ ID NO: 141469 - DNA, 201 bp, Homo sapiens
ccgggaggcggagcttgcagtgagctgagattgcaccactgcactccagtcctccagccctccagcctgggcgacagagtgagactctgactcaaaaaaawatatatatacctaatgtaaatgatgagttaatgggtgcagcacaccaacatggcacatgtatacatatgtaacaaacctgcacgttgtacacatgtaccc

SEQ ID NO: 141470 - DNA, 201 bp, Homo sapiens
cagggaaccgttgaatttgctagaaggctggctggtgtattcattggacatgttgggaaactgtgccggaccatttgctctacccgtttgtccctgtgctyttcctggtcatttcccagctcctgctgctgctggtcccttcccaccacccagatcctggctcagatgtccaggtcctccctgacccctcccctccccagc

SEQ ID NO: 141471 - DNA, 201 bp, Homo sapiens
catttttatcttgattttttaattaatgttttcattttggttctcttttgttctgtatttctaacatcttaggttagatgcttaacacacatttttttctytcccatttatttacataaatattgtggctatacatttttcttcaaaaatagctctccctctatgtgtctgatgagctcattatcattattttctatatat

SEQ ID NO: 141472 - DNA, 201 bp, Homo sapiens
gtccagggagagacagagctgggctgatcctagttatctgtaaaacagaaatgattatcatggcctcttcctagggcagcaggaatgaggaaatgagggayaaatgaaaaggacttaagtgggccaggtgcatagttagtgctcagaagcatcaggtattaaaaataataactactggatggtaggccacaacattattat

SEQ ID NO: 141473 - DNA, 201 bp, Homo sapiens
gccaagttaactttatttatttgaaaacttgttcacttattttgattagtattctgaaaagataagtcttcattgactttccaatagttttatctcatgattttttttatcatcttattggtttgcctagatcttagagaacaataaatagcacaactgctagtggtgttactgtgttgtggtaatttttatggacatgcc

SEQ ID NO: 141474 - DNA, 201 bp, Homo sapiens
gctcacagcaccttcactatttggggtaccctggaacacatcccttgtacttatcctttctgctccttcaggaataaatgaagtatctgctggtgcagatrtaataggacaaaaaatatttcagaagaagaggttttaatacctgtctgtaagaatcaaacagggttaaaacaaaaaagggaaaaggaagtactgcatgaa

SEQ ID NO: 141475 - DNA, 201 bp, Homo sapiens
ggagaaacttgagatttttttttttttttagatagagtttcactcttgttgcccaggctggagtgcaatggcaccatctcggctcactgcaacctccgtcmcccgggtttgagagattctcctgactcagcctcccaagtatctgggattacaggcacgcgccaacacgtctggccaatttttgtatttttagtagagacg

SEQ ID NO: 141476 - DNA, 201 bp, Homo sapiens
agtcacccaggcaggggcttcatcttggcctctgctagacgcctgcgcatggcctcccgccatgtctctgagtcaaatcccccctcctttctcttgtaagsacacccgtcttgaggtttagggccaaccctagatccaggatgatattatcctgagatctttaactgaatcacattcataaagactttatttccaaatcag

SEQ ID NO: 141477 - DNA, 201 bp, Homo sapiens
tctatcaaaggcgtcttaaactctattttcatatttttatctctagcattgtaatttttctgtttcttatggctcctgaaattatccatatgtttatagaytttgcctaccttttccagtagtctttaatatattaatcatagacattttaaattccctttctgatatacatatataatatatgatgcaagggaaatatgc

SEQ ID NO: 141478 - DNA, 201 bp, Homo sapiens
catcatggcttactacagcctcgacctcctgggcttaaaggatcctcctgcctcagcctcccgagtagctgggattacaggtgtgagctaccacttctggytgatgttttaaaaactaaatatatgtatcttattacaagtgaaaattatatgaaattgtttatttttcacaaatcaagttttattggaacacagagccac

SEQ ID NO: 141479 - DNA, 201 bp, Homo sapiens
gttgagtgagatttgaagggtgaggcaaagtcaagagcagctcccaggctttggaggagggcagaagcctgcactcctttccgaaatgaggagactgtggygggactgagttcgagggagaaagcttcagtgatgttttggagatctaaagtctgagtggactttggaacagccaagtggagatgtcatacttctaatata

SEQ ID NO: 141480 - DNA, 201 bp, Homo sapiens
ggtttaaaacactaagatgcagtttatgtagtcttttgaaaactaaatatttcaatgtgctaatactcagattctgagatgaaagaaacgagaaatgctgytggctaaaactttacagaggtttgcttttcagcataggtatggttttccttattctgcagctgttcactctattcaatccagttccagttaaataatgtg

SEQ ID NO: 141481 - DNA, 201 bp, Homo sapiens
tatctttagtagagacagggtttcaccatgttggccaggctggtctcaaactcctgacctcaggtgacccacctgcctcggtctcccaaagtgctgggatkacaggtgtgagtcactgtgctcagcctcttgagtataaattttagctacattgtatttttacaaatcagagtacagttttgataaatctgtctcttgtta

SEQ ID NO: 141482 - DNA, 201 bp, Homo sapiens
aatgctacaacatcgtgatctctggtgacattatgctgaaagaaataagccagtcacaaaaggagaactactagatggttccacttataggaggtcttagmatagtcacagtcatggaaacaggaaggggaatggtggttgccgggggctgggaggagggaggaacggggagttgtttttccatgggtatagggtttcaat

SEQ ID NO: 141483 - DNA, 201 bp, Homo sapiens
tccgtgagggaaggaactttgtctttgatctcgggtacatagcagatactgcttactggtcagacataatataaaatattttttgttgactctcccagaayaaaaatacatgtttccctttttcaaagatagcatgatccataatagaaacagctttaattttggagccaggaagacttgagctccaatcccagttctgca

SEQ ID NO: 141484 - DNA, 201 bp, Homo sapiens
gatcacaggactcactgacaacccttcggagcagtgtgggtcacaggcacagcacctgggaagcagggttaccatagaggctgattcagtcaatttagggyggggtccaagagagtatattcctaacaagttcccaggtgtggctaggctcaggcccaagcaccatacttggtggtaacaaagatcttgagctccacaaaa

SEQ ID NO: 141485 - DNA, 201 bp, Homo sapiens
catgggtatagggtttcaatttggtaagactgaaaatcctagagatgttacacaacaatgtgaatgtggttgtcactactgaactgtacacttgaaaatgrtttaaagggcacattttatattatgtgtttctaacaccgttaaaaattgtttggagggaaaaaaggagcttctccgtgtgggagaaaacccccacaagac

SEQ ID NO: 141486 - DNA, 201 bp, Homo sapiens
atatgatactttaagttgattaaatgttggctagaggcaccactcactaatgtttcacttggcatcttggcagtgatttttctcttaatttccccaatccktgcatgtttgatccattacttacaaagataacgaggctctgctcattccaaatgtttgttttttagggagggggtagtttgtgaaagatactaattctag

SEQ ID NO: 141487 - DNA, 201 bp, Homo sapiens
tgtttaagaattctaaatttccttggactatttttactaaattttggcatttctagttgtattctgcaacaacaatgagatacaatgtataagaactataytgcggtactattgttggaaggtataattcctgtggtttttggtaaaatctgtgtctttgaaaattaagttactactgtaaatacaatggtatttctaatt

SEQ ID NO: 141488 - DNA, 201 bp, Homo sapiens
ctctgactcaaaaaaatatatatatacctaatgtaaatgatgagttaatgggtgcagcacaccaacatggcacatgtatacatatgtaacaaacctgcacrttgtacacatgtaccctaaaacttaaagtataataaaaaaaaaaaaagattgcacacaagagctgttaactcataagctgagctctgagacaggcacact

SEQ ID NO: 141489 - DNA, 201 bp, Homo sapiens
taggaagtagaacttttacaaagtgattaggtcatgagggctgtgacctcatgggtgtgattaacaccgttataaaagggagttaatccctttttttcccrttgatcttttgtgttctgccatgggagacaaagcattcctcccctgcagaggctgccgtgttcaaggctccttcctggaatgagaactgccaaccctgcc

SEQ ID NO: 141490 - DNA, 201 bp, Homo sapiens
taacacagatcatgtcatttttgctctcctacccactgcatcaatgcacaaaaggaaattaatttcccttcagaaatagggagtcaagaatgatgtaatcrctgtaacaatcaattctgaaaaggttttatttcaatgaagaagtgctcataggcctatgctcgggctcatgggcatagggctggctgtttgtgtctacac

SEQ ID NO: 141491 - DNA, 201 bp, Homo sapiens
gccgtgttcaaggctccttcctggaatgagaactgccaaccctgccatcaccttgatattggactttacagcttccagaactgtgagctgataaatttctrttttgtgtaagttacccagtctgtggtctactgcagcataaaataggccaagtcacagcaagaaggcagccgtctgcaagccaaggagagaggcctcaat

SEQ ID NO: 141492 - DNA, 201 bp, Homo sapiens
aatcaattctgaaaaggttttatttcaatgaagaagtgctcataggcctatgctcgggctcatgggcatagggctggctgtttgtgtctacactggctttkcagtgcctcttccttctcctgggcacttgtgttacttaaaacttcctgaagcttctccatcagctgttaactgtcatggccagattcagcccacacaacc

SEQ ID NO: 141493 - DNA, 201 bp, Homo sapiens
acctaactacaacttggccttggactgtagccttcagaaatgtgaggaaataaatgtctgctatttaagccacccagtctgtggtattttattattattaktagtagtagtagtagtcataatcatagcatactaatgcacatatttagcaaagcccactccttttgattgtggtctttgaatgctattgactgggaaaag

SEQ ID NO: 141494 - DNA, 201 bp, Homo sapiens
aatgctattgactgggaaaagcagctgcagtcttgtccacttgggaaaacatgagatgtcacttggtgtttggggcaaaaataatacatgttctctgacaraaatttacaagaagtcagagtatggtgccaatgagtttaaaaatttgtcttttcattcttacagaacatggttttgaggaaaacatacaccaggagagga

SEQ ID NO: 141495 - DNA, 201 bp, Homo sapiens
ctctggaggccaagttcctctcctgttttctgacagatgtgaaagtagctaaatgaagcaagaagataaaaggagacatcaagatggtatgatgttataaracaaactcaacattgtggaaataggattgtttgtcagaggttctgcttaacagtcttctggaaaataaaatgctttgatattatttttgaaaagaaaatt

SEQ ID NO: 141496 - DNA, 201 bp, Homo sapiens
atgcagcatccagaatgaatgactccaagaaggtttttccttacctgctgtggcagtgcaagtgtgccagtagaatgtggcagttggagagcattggctgsaagacaggcagcaagaagtgcaaagcctcattgctctccagggggcctcctcttgcttgggatgagcttctgttgtcaaatgtttggaaacctctcaatg

SEQ ID NO: 141497 - DNA, 201 bp, Homo sapiens
aaggtttatggtcatttccgacagtttgaaaaattctgaataataaaatactgggaaaattggccaagagttaaaggaaacagtggatgttacttgatcaygatcttacttcccttctctttaggaaagtgagggatgctactggagttgatatcaacatgcgcgtgggcgtgcattctgggaatgtcctgtgtggcgtga

SEQ ID NO: 141498 - DNA, 201 bp, Homo sapiens
gagtgggattctaggaaaacaggacaaggcagcactcacattccagaggatagagactcatattggagtgtcagtgtcggtatcaaagtaccccatttctrtgccctgcagaggaagcccagggacagatgatggcttcattcagttctgttgcttacacttggtttttattttggagaaatgtactccctaaaatgttga

SEQ ID NO: 141499 - DNA, 201 bp, Homo sapiens
aaattgctacagagtaaatatatgggagaacctcttgctctccaggccttacccttggagtggcagccctgctacccagagacacagaaatgaaccagagrtctcctttggggtccctttagtttcaagagtccatatttcacgctcctggctttgtactaaaggacgtttttcattttacttcatatggcttgtaagtta

SEQ ID NO: 141500 - DNA, 201 bp, Homo sapiens
atgattcctatttatattatggacaagtaagggaaagatttggagaaggagcaaataaaggagaacataaacacagggtcgtagaagaggatagggaaacrttgagagaatcggttgattaggggttcagctgccagaagtctgggactgctgatgtctcttcttctactttgccattaaaatgaccaggacaggccaaca

SEQ ID NO: 141501 - DNA, 201 bp, Homo sapiens
gacgtgttcacatttcttctgtcaccctggagcacttgaatggcgcttataaagtggaggagggagatggtgacattagggacccatatttaaaacagcayctggtgaaaacctactttgtgatcaaccccaaggtcagtatcattgtaaagagtctatgatgaaaagggaggaggagcaaattattgatattcataagtg

SEQ ID NO: 141502 - DNA, 201 bp, Homo sapiens
tgtgtggtaccactttcactattcaatatagcatgagcatggtcaatatagggtaaaaagagtttaaaattcatgaaagtcagagtcagaattggttttaracatctgcacccatcggtcacttcagctgtgctgttggacaccgcagtcataggctcagagaggagcaacttcatcttataaaatcaaagccagtgaaac

SEQ ID NO: 141503 - DNA, 201 bp, Homo sapiens
ggctcacagcaccttcactatttggggtaccctggaacacatcccttgtacttatcctttctgctccttcaggaataaatgaagtatctgctggtgcagaygtaataggacaaaaaatatttcagaagaagaggttttaatacctgtctgtaagaatcaaacagggttaaaacaaaaaagggaaaaggaagtactgcatga

SEQ ID NO: 141504 - DNA, 201 bp, Homo sapiens
agcattattgggcttaaagcacccttctttgaattgtctttgttctttgtatttgtgtgtctatattcaattcctttatgttccattttgcttggtgcatmtgtgttagtggtacccttttcaaagcgttttccacgcatctttacttttccttgataaatcaatcattttaatgctcctcttgccttcagctaaatcatt

SEQ ID NO: 141505 - DNA, 201 bp, Homo sapiens
caaaactccgtctcaaaaaaaaacaaaaaaaaacaaagaaatgagaaaacaatttgctcagccactgtgggaaatcccttctcacatgagcaatcagacastcaaacatgccatggctcacagcaccttcactatttggggtaccctggaacacatcccttgtacttatcctttctgctccttcaggaataaatgaagtat

SEQ ID NO: 141506 - DNA, 201 bp, Homo sapiens
ctgtgcagaaatgttccagaatcagggagggttactcagtctgatagaaaagccaccttcaggcagagaccagctgcaggaccaagtcggaaggagctatrcctaggagaaatgtgccctgtgttctgaaaccggacctgagtcgggactgggatgatgttgggctcccaacagcctgtttctattttgattttagaaaca

SEQ ID NO: 141507 - DNA, 201 bp, Homo sapiens
ggaggaaggccatatggctcctctctgcattgcctttgacacatgctaggaacctgcaccacctgagacagacagaggccagccagtaactaatccaatgrgagaatgaaggtgggtgttttatgtttattttataatatttaaatgacaaattaaggtggtatgtattcaaggtgtgcaacattacggtttgctatatgt

SEQ ID NO: 141508 - DNA, 201 bp, Homo sapiens
agatcagaagaaagagggaatcttgttatttgacaaaagttagcaaataataataataataacattaatattttaaaaactaattcctaaagttaacctcrgcatgtgttaacgcaggacacctatctttttaaattatttttgtatgcaccttttggaacgttcctaccaaacaaatcatcagagagtgccaccattgtc

SEQ ID NO: 141509 - DNA, 201 bp, Homo sapiens
aacagcctgtttctattttgattttagaaacaccataaccagcatctctgctttccaaaacacgttctccatccagatagtcagcgatggctggggtaggracatttgaaggtagaatagggctaaggtaaagctgtgttcatgtaattagagatgagttcatttcttgggctggcagggcttcgcttcagagaggtctac

SEQ ID NO: 141510 - DNA, 201 bp, Homo sapiens
actgttagagctgcgatattcctgtgttgaaggtgttttgtgtgtgatatatttcatgagaaattgtcagtgacaggagagtctgagctggatgttgggcrtactccactggtatatgggttcttcctgccacttgatattgacatcgagacaattcattgaacctgactcatttcttccttcattgagtatttagagcac

SEQ ID NO: 141511 - DNA, 201 bp, Homo sapiens
caataaaaaatcacaagggagaggatgaagagagggttaggagaagactttgtttgttcaactgtttttggcaatgttagacatagttcctttggttccckctttttgcttctgcttatacttctgtctccaggagccagatgcaagtgagagtcgggtagacacagtaagaaaaacctcaaccgaaaaaaccattgtggg

SEQ ID NO: 141512 - DNA, 201 bp, Homo sapiens
  misc_feature (1)...(201): n = A,T,C or G
tttatgattatatattttacatttactttatttctggagatcttcatttgtttgtgtagatccaagtttctgtactgtagctctgctggtgataagttctntatgttttgcttgtctgaaaaaaagtgtcattttttccatcaatttgagagacattttcttctgtgtatattctgatttgacagctttttctcttcaata

SEQ ID NO: 141513 - DNA, 201 bp, Homo sapiens
acacaaaattactaaagcgctgtaataagtattgttggttgtggggacagtgaaacttctgcttcagtgtctttgatagtagtaagattgtctagtatttytaattttatttcttgggtcagtttcaataagttgtttttctaggaatttttgcatttcatccaaattctcaaatttaactgcatgctcattttgataata

SEQ ID NO: 141514 - DNA, 201 bp, Homo sapiens
ctcccatttttgtgctatttttatatatcttatttttacctatgctacaaatctataatatgtggctatctttctatgataaaataaattatattttagarttattttaaaaggtaaaaatatgtttatgattatatattttacatttactttatttctggagatcttcatttgtttgtgtagatccaagtttctgtactg

SEQ ID NO: 141515 - DNA, 201 bp, Homo sapiens
gtggggacagtgaaacttctgcttcagtgtctttgatagtagtaagattgtctagtatttctaattttatttcttgggtcagtttcaataagttgtttttstaggaatttttgcatttcatccaaattctcaaatttaactgcatgctcattttgataatattgttctccttttgatgttttccatatgctttatttttga

SEQ ID NO: 141516 - DNA, 201 bp, Homo sapiens
tctgaagtgtattagtcagagttctccagagacacaaccaataaaatgtgtgtgtctatggaaagacatttaagtttggttcacacaattataggggctgrcaattccaaaacctgcagggtgaacttacatgctggaccgagggaagagcagatgctgcagttcaagttcaaagcccgttcactgcagtattccttcttg

SEQ ID NO: 141517 - DNA, 201 bp, Homo sapiens
tgatcagccaaagacttttactgaacatggagatcttcagttgtacccaaccaatgcactgcactgatggactgttttgaacccctgcacgctgggtggaraatatccctacctttcctcaactgaagtttctgtttccatatagttgctgtcctctccagtttttctcatgaaccggttccttgaatcccttctcctgaa

SEQ ID NO: 141518 - DNA, 201 bp, Homo sapiens
tcctgcactaagggcgaaacacacgtgagggttaatcacctaagttcgcaaatcaaggaccaaaaacatgtgcctcccctgcaatagaaatgtctcctcascatgaggtttccgggggtcacaagtgtctgttcagatatgcacaatccagacctttacttttccctctcagctgaaacttagatgccaaaattcccagca

SEQ ID NO: 141519 - DNA, 201 bp, Homo sapiens
aaggactccaaaggtgccatccacttaagtgagtttttatttccaattatttaaaataaacatttccccccaccctccaacacacacacacacacacacasacacacacacacacacacacacacacaaaatgctgaagaagctgtaatcaggcttcttgaggatgcaaatggaggctttggagtagaatcaggaatgcaa

SEQ ID NO: 141520 - DNA, 201 bp, Homo sapiens
ggactccaaaggtgccatccacttaagtgagtttttatttccaattatttaaaataaacatttccccccaccctccaacacacacacacacacacacagasacacacacacacacacacacacacaaaatgctgaagaagctgtaatcaggcttcttgaggatgcaaatggaggctttggagtagaatcaggaatgcaatg

SEQ ID NO: 141521 - DNA, 201 bp, Homo sapiens
atctcatactttgggaggccaaggcgtttggatcacctgaggtcaggagttcaagaccagcctggccaacatggagaaaccccgtctctactaaaaatacaaaaaaaaaaaaaattagctgggcatggtggcgggtgcctgtaatcccagctacttgggaggttgaggcaggagaattgcttgaacctggaggtggaggtt

SEQ ID NO: 141522 - DNA, 201 bp, Homo sapiens
tctcatactttgggaggccaaggcgtttggatcacctgaggtcaggagttcaagaccagcctggccaacatggagaaaccccgtctctactaaaaatacaaaaaaaaaaaaaattagctgggcatggtggcgggtgcctgtaatcccagctacttgggaggttgaggcaggagaattgcttgaacctggaggtggaggttg

SEQ ID NO: 141523 - DNA, 201 bp, Homo sapiens
aaaggcccacactggggaagggcacaagccacaggtacaacgagggcaagagttttgactatttctttttttttttttttttttttttgagacggagtctygctctgtcacccaggctggagtgcagtggcacgatctcggctcactgcaagctctacctcccgggttcacgccattctcctgcctcagcctcccgagaag

SEQ ID NO: 141524 - DNA, 201 bp, Homo sapiens
tcccagcactttgggaggccgaggtgggtggatctcttgagctcaggagtttgagaccaacctgggcaacatagtgaaaccccgtctttaccaaaaatacaaaaaaaaaaaatagccaggtgtggtagcatgcacttgtggtccctgttactcaagaggctgagatgggaggatggttgagcctgggaggtggaggttgca

SEQ ID NO: 141525 - DNA, 201 bp, Homo sapiens
aatagtgtgaacccgggaggcggagcttgcagtaagtcgagattccgccactgcactccagcctgggcaacagagcgagactctgtctcaaaaaaaaaaaraaaaaaaatctgtgtttttgctttcttttcaattatgttattttttaaaacaattattttatccaaatattatctaaaataaatatataattttagttac

SEQ ID NO: 141526 - DNA, 201 bp, Homo sapiens
ctttaatcttaatttagaagctatttcaggttgttgtcgtatctgcagatctcgtggtgctaattcgactacctctaatgtcttttgattcttcctcatayggtccattgccttaggtactttataatttggtttttattgtgaggttatgttcaggaggaactgccccagcccccagatgggacatccctgcacactgta

SEQ ID NO: 141527 - DNA, 201 bp, Homo sapiens
agagttgtgttcttgccctaaaaatgttctcattatgaacaataaaaatcatgactttttacaaggtagggaaaagaatgcattgcattggaattgaggcygcctttagaaacagaaggtattcacctgtctcgagttttgacttttgtcttaagtttcatatcccacagtaaaatccgcagctgtttcctgagcaccgtg

SEQ ID NO: 141528 - DNA, 201 bp, Homo sapiens
tttataatttggtttttattgtgaggttatgttcaggaggaactgccccagcccccagatgggacatccctgcacactgtagtctaaagtatcatttaccrgcagtgtcattcttgcttctgccatagccccaaggattttctctggttttgacctaattaacaacccttcaatttggaattcttattatgaatcaggtaa

SEQ ID NO: 141529 - DNA, 201 bp, Homo sapiens
aaagccagatggagtccctagtagttgtcagagaacttcagaagagaaaaaggcagccgtgttttggtatgccagttggctctgtgggctgctcgtgcctygtgattcctgagatccatttaggtctgcactttcaaatccactccccagtcctgcagggagagcctctgctggtctagcttcctccaagctccccctcca

SEQ ID NO: 141530 - DNA, 201 bp, Homo sapiens
acaaaaaattagccaggtgtggtggtgtgttcctgtagccccagctacttgggaggctgaggtggcaggatcgcttgagcctgggaggtgaaggttgcagkcagccaagattgcgccactgcactccagcctgggtgacagaataagaccccatctcaaaaaataaaaaaaataaaaagacaatggttataagatgaatct

SEQ ID NO: 141531 - DNA, 201 bp, Homo sapiens
tatttgtcacatatagaaacaaaactcaagtcttctgtgattgccatcatatttttcttcctgcaaatgtaatcacagataggccactatgccttttaatsggggggaaaggcattttgaacttactttcatggggctgacttcaaaatgttaaagttactgatcatgcatatttaatagtatattaccatgagcacagtt

SEQ ID NO: 141532 - DNA, 201 bp, Homo sapiens
ttgagaaactgcaaggaggtaggggggatggaaactgtgtcaaacatgattaggctttgcatgagtaagaccaatctaaatttaaaattgatgccaaagcwacaaaaaattataagaattcaccacaataggggaaaagccagagagaatggttcaatagaagccaagagaagaaggtataagtgggatagtggccaacat

SEQ ID NO: 141533 - DNA, 201 bp, Homo sapiens
ccccccagttacccttcccagcctctggtggtcatccttttactctctagcttcatgagttcaattgttttaatttttagttgccacaaatgggtgagaaygtgcaaagttagtgtttctgttcctggcttatttcatgtaacataataatgaccagttccttaaacaaatttactagaaaaaacaaaccaccccattaaa

SEQ ID NO: 141534 - DNA, 201 bp, Homo sapiens
gttaaaaataaaccaactgatcctctaggcaaaagaatcagcacatatcagtgcatgtcatgttataaccatattccagggaagaactgctatccagagcwtgagagtttcaaggttgggcagtttaactacaagcacaatcctcattataaatatggaaaaagcaaaaaggctaggagcttctcctccaggtaaacatca

SEQ ID NO: 141535 - DNA, 201 bp, Homo sapiens
ctacttataagtgagaacatgcagtatttggttttctgtgttttgtgttaatttgcttaggattatggcctctagctgcatccatggtgctggaaaggackgattttattcttttttatggctgcatagtatcccatagtgtatccataccacattttctttaatcaatccaccattgatgggcttttagatagattccat

SEQ ID NO: 141536 - DNA, 201 bp, Homo sapiens
attgccaggtggaatggtagttctgttttaagttcttcaggaaatttccacatggccttccacagtggctgaactaatttacatttccaccaacagtatawacattccctttcctccacagccttaccagcatgtgtgtttttttgactgttttaatactagttattctgactggtgtgaaatggtatgtcattgtggttt

SEQ ID NO: 141537 - DNA, 201 bp, Homo sapiens
tcccagggttgtttccctttttacctagtcccactttaacctgcccatcctggagcagtttctggttaaaggagtacagcttttcatgtttttctccgtatttttttttttctgaacacattttccagactgatggagccccatccccaagtagtatttctatttctcagttgttaacccagtgagactaatccaggcatc

SEQ ID NO: 141538 - DNA, 201 bp, Homo sapiens
gtacaaatgaattcccatgaggctaatagcagacttgactttttagcaggagaaattgggggcctcttttcaacattcttaaagaaagaaattccaacaargaatttcatatctcaccaaactaagtttcataatcaaaggagaaataaaatattttccagacaagcaggcactaagggaattcgttaccattagaccagc

SEQ ID NO: 141539 - DNA, 201 bp, Homo sapiens
agtagccagtgctttatatcaggatagatggatggctgaggcctaagtggtgtgttcctggattcactggaaagtttcaaaaagtgataataaaagcggarccggcatttgcaccttcaaagtccttggaaaagaaagctggcccaatccataaaggccaggatatactttttcagccaacagacaatgaagaaagagaca

SEQ ID NO: 141540 - DNA, 201 bp, Homo sapiens
cagggtctcctaatgatttaagaaaaactttgccaagtaaaatccctgcggggttagaaacactgacttactgtgagaattgaaatatataaatatgtatmcaatataccagtctcaggtcataacatccagaaaatattaactatcgataaaatgaattaaaatcattttgtatcatttaatatgattttgataagcaaa

SEQ ID NO: 141541 - DNA, 201 bp, Homo sapiens
gtgggatacgcatgagagggaagacagcagcaaagtgcgggtcttggcagctcacagtgactcctccacttcccctgtggccctgctgtgtaccagggacmttcatgccactgcacaaccctctggtgctcctgagggtgacgtgacattttcctccaagtttcctaaggagtgctgctgttgggttaaagacacacagtg

SEQ ID NO: 141542 - DNA, 201 bp, Homo sapiens
agtatttctaattttatttcttgggtcagtttcaataagttgtttttctaggaatttttgcatttcatccaaattctcaaatttaactgcatgctcatttkgataatattgttctccttttgatgttttccatatgctttatttttgatttttatttataatattgtttttatatgccttcatgtataatctcaccagatg

SEQ ID NO: 141543 - DNA, 201 bp, Homo sapiens
catgcatcggctggggtggtttgaaggctggggcttgcctccgttgaaggtttgctcacttccctgtctggtggtcatgctggcttgcaactgagattcakctggcactgctggccagaacaccttcatgtggcctctcttcatgattacttgactttctcttgatatgggatctggtttcaagaatgatcatcctaaaag

SEQ ID NO: 141544 - DNA, 201 bp, Homo sapiens
tttaaaccatcagatttgggtggggacacacagccaaaccgtatcacatgtctagtcagccaaagggtggcgaaaggtggtgcagcttggtgaaaaggtcratgggcatctgttgcttctgtgtagctgctgacactgtgcttcagcagccagtgtctgctgggcccccattcatcaatggccacaagttgggaagaagag

SEQ ID NO: 141545 - DNA, 201 bp, Homo sapiens
ctccctcacgttccatattcagcactttctgacccttttctattaacctatgatcccatcaaaacattaattgccatgcattaaaataaaagctcatcacyataaaaacagataattttgaaagaagttttttaaataaaacatttaaaatccatttgcaagatagttttctaaggccggggtttttctgctcctctgatt

SEQ ID NO: 141546 - DNA, 201 bp, Homo sapiens
gatcaacacatcttgagattcagtacaatcctaattgaagtcccagcaagctttttcatagagagtaggaagctggttctaaaatgtatatggaaatgcawaataccccttaaaatttgaaaaagcaggacatggagatcttaccctaccagatttcatgatttattataaaactacagtaatcaagatagcgtgatattg

SEQ ID NO: 141547 - DNA, 201 bp, Homo sapiens
ctgattttccctccacatggtcacaagctattgaaggggtggcttcggatacctgctgaaaaacccacattcattcattttgcaccttttgaggctctggrcctcaggtcatatcctgaggagagtgttgtctaactattggcttttttctgtagtgctgctgctatgtgggtggctgctcccagcatattcatctgacag

SEQ ID NO: 141548 - DNA, 201 bp, Homo sapiens
tgccacccagagcctgacagagtctaacacagagaaagctttccactgtgggtgaggcgactgctgatgagccatgttggatcttcttcatgtactcagcycctagataacacatttggtttgttcagtggcaaagcacttggttccccatgaagtcattattttcttcccattttcccaatgagacatttaaaatatgtt

SEQ ID NO: 141549 - DNA, 201 bp, Homo sapiens
aagccatgtcaagggacagaatactgttggtgtgcctcagttggaaagagcccagagatgagctggccagtgggttctgttggtaagtagtcatgtgaccwctgccaagccattattctctttgtgcctccatttcttgggcaaagggaggaggctggactaagtgaactcaagttagtctttatggctctaagaggacac

SEQ ID NO: 141550 - DNA, 201 bp, Homo sapiens
ccaagacctgccttctgcaagctggaggcccaggaaagccagtggtgtgacccaggccaaatctgaaggcctgaacgtccaggatgtaaaatcccagctcrcgagaaaaagactgacgttccagctgaagccaggaggctggaagccaaaacagggactaattcctccttcctccaccttttgttctcttctggccctcag

SEQ ID NO: 141551 - DNA, 201 bp, Homo sapiens
cacacacacacacaaacgcacattctcctccttgtcacacttcctttatttcactgtccctgagtgtgcaggctcagaaatgaaaactgtctagaatgatrgccaccactatgaggccattggtgtatgacagctgccattaccataaatattaatttatatcctttggtcttttggacctcatgagaagaattagattcg

SEQ ID NO: 141552 - DNA, 201 bp, Homo sapiens
agccccagctacttgggaggctgaggtggcaggatcgcttgagcctgggaggtgaaggttgcagtcagccaagattgcgccactgcactccagcctgggtracagaataagaccccatctcaaaaaataaaaaaaataaaaagacaatggttataagatgaatcttgctaactcaactctgatgtggcacaggtattaacc

SEQ ID NO: 141553 - DNA, 201 bp, Homo sapiens
gctggaacacatacacctgattgtacacagttccagacacccagagagaagggctgggatctgcaagtgagaagcgtgtgtgcatgtgtgtgtacatgcatgtgtgtgtgtgtgtgtgtctgtgctgaacactctatttgtctcactctcagaaagcagtggattcacgtttcacccccgttatgttacattctggaaaat

SEQ ID NO: 141554 - DNA, 201 bp, Homo sapiens
ctggaacacatacacctgattgtacacagttccagacacccagagagaagggctgggatctgcaagtgagaagcgtgtgtgcatgtgtgtgtacatgcatgtgtgtgtgtgtgtgtgtctgtgctgaacactctatttgtctcactctcagaaagcagtggattcacgtttcacccccgttatgttacattctggaaaatg

SEQ ID NO: 141555 - DNA, 201 bp, Homo sapiens
ccataacagcgctgcagtgtgccacaacactgctatgtgccagaacaacactgctgtgtcccataataacgctgctgtgtgccacgacaacgctgctgtgygccacgacaacgctgctgtgcgccacgacaacgctgctgtgcgccacgacaacgctgctgtgtgacatgacaacgctgctgtgtgccatgacaatgctgc

SEQ ID NO: 141556 - DNA, 201 bp, Homo sapiens
aggttcgacccccatctccacctgctttccatgacctgtgaatggatggttttgcaccaaaattcatgtaccatacacacctcagaaatagccctaaatayttgggaaaaggtagccccaaaggaagcttttggaaatgttcaatgctcgttgacacatcttaaaaattaagaaaatggcaactagaggaagatcaagaag

SEQ ID NO: 141557 - DNA, 201 bp, Homo sapiens
ccactatattttccaagcaagatttttaagatggatttcgtttttctaataataaaagtttgcttctcagccactctgatatctttataacttttctggatttttttttcattttattaagttcacttaatatgagcttctacttctcttcaagtgtctcatcttattgttaaaatggaaactaatgaaactgtaaatgaa

SEQ ID NO: 141558 - DNA, 201 bp, Homo sapiens
tcaactcttgcccctctgcctctctcctccctcctccctctagtagtcccagtgtctatcgtcccatctttatgtccatgagtacccaatgtttagctccyacttataagtgagaacatgcagtatttggttttctgtgttttgtgttaatttgcttaggattatggcctctagctgcatccatggtgctggaaaggactg

SEQ ID NO: 141559 - DNA, 201 bp, Homo sapiens
gccataagattaagcctggacatttgagctctctggacattgcatttatttatggatgcatcatcagtttatagcaagcacagctgagctctcaatgttcytcattaaacatggtaaacttaacaaattctaagagtctggaggatctaaacagctcttactaagctacctactagcatgtacatttctagagagaggaag

SEQ ID NO: 141560 - DNA, 201 bp, Homo sapiens
ttttgtcaggttaacctcattttacaccaggagcacaaagctcaaagatgttgagtgtatggctctcagtgaagtgaatgcaactgatctgacactgattytacttgattaaacacatgctaagacaacctggtgatgctgggcataggttcttcatgagtgcctggggaatgatgctcccttgccttctacaaagagacc

SEQ ID NO: 141561 - DNA, 201 bp, Homo sapiens
gagactttgaagatgtaaaaagtcatgatgataatcatccccatgcatgctgcagtgttagggaggactaaatgagtaaaaaacgtgaagacggctaacayggtgaaaccccatctctactaaaaatacaaaaaataattagccaggcgtggtggcgggcgcctgtggtcccagctactcaggaggctgggggaggagaat

SEQ ID NO: 141562 - DNA, 201 bp, Homo sapiens
gagtgtctgcttccttcatcacgcatacttttctgcgtatgcagaatgtgtagattagggcaatgtgtagattagggcaaagtcttctacaaacatgggartaaatatgtgctatgatgctgtcttccctgaacattaaagtgacatgaagtgatgatcagggttaaatatgtcacagtggctctccattcccaagccaat

SEQ ID NO: 141563 - DNA, 201 bp, Homo sapiens
caccatgaggtttccgggggtcacaagtgtctgttcagatatgcacaatccagacctttacttttccctctcagctgaaacttagatgccaaaattcccarcaattagttctcccgaaaagccataagaaccaggcagagcagacagctgtgactgaggagggaggcagctcccagctcccactgaggctgatggacggga

SEQ ID NO: 141564 - DNA, 201 bp, Homo sapiens
tacttgcagttagtcctcttatgtccatagcttgtaacaggacacttgtgggaccaggaaattgagttactaaaggataagtaatacctctgctgtgagcygacaccaccagaatgacccaacttacaagaaacagtttcattattcttgtgcaatttacatgaaagtagagattcctaggagtagttggaaaactcgact

SEQ ID NO: 141565 - DNA, 201 bp, Homo sapiens
tttcaaaagaatttgtttgtaaagccttctaataaaaacatttaatggcaaaagatgggaccaaatagcctaaaggacatagccacaaactgttcaatgtraaaaacatgtgatttttttttctctcagctgaattgaaaactcattttaaaaattttacttcaactgtaaagaactattcgtttttacaataagactctc

SEQ ID NO: 141566 - DNA, 201 bp, Homo sapiens
caatttcctatctaaggggtctggggagtcatgccctacaaaccatacattctcatcacatgggttttctgtgaccctgtatatcatgacttactttccartctgagcataacgaggaagaaaatcaaaatgttttaccccaaaatatatttccttgctataccttgaaattgccctgcaaagtctcttgtgggaaaaatc

SEQ ID NO: 141567 - DNA, 201 bp, Homo sapiens
cacaatatttaaaggctgttatctcctgggttgtatctttggaggcttttctgtgggagctggcatggagcacttaatttatcagaacaaatatgcagagrtgtggacatctgcctcagtgcgagagtgtcctaggctcaccttcccaagcattcacagcagaaaatgtatgtgaccgcttcaggattcagtcatgtgttc

SEQ ID NO: 141568 - DNA, 201 bp, Homo sapiens
cttccatataagttttttttacaatttatttctaaaaagtggcaatatacatgcttctttttatttatcatgcaaggttgagtcggaaagctttggatgattttttttttttctgaatttaacatatccaggcatttaccactggatcaaagatgagaaacaagcctctgttttcacagccaccttatatgttgaccagat

SEQ ID NO: 141569 - DNA, 201 bp, Homo sapiens
ttagggatctcacccattcttactgctttacaaccgtctacacactaataactccatagctcctatctctcccctgaaatccagactcaaagtccaactgyttagtatagtcttcatttgaattaatgaatatctcaaacaaaacatgaccaaaatagagctcttgatggcctcctaaaccaactttccccctctttaccc

SEQ ID NO: 141570 - DNA, 201 bp, Homo sapiens
aggactacccagagattggacaattttctagaagaacccacggaacttgtgacagccgttatcgctgtgattagggattgctacatggggagaatacagaygcactttggcaaagagaagagcccaggaaaaccgccagacatggagcccctgttgtcctctctctgtggagtcatggctggtgctgctctcctacaacca

SEQ ID NO: 141571 - DNA, 201 bp, Homo sapiens
ggggtcttgctatattgcccaggttggttttgaactcttggccgcaagcaatcttcctgcctcagcctcccaaagtgttgggattgcaaatgtgagccacygtgcccagcctgtttaatgattttctgacaagcacggatccacttcatctcagctgataattactgacttaggaccctcctctgagatggttttttttca

SEQ ID NO: 141572 - DNA, 201 bp, Homo sapiens
tgtactaaagctcattgaatagagttcaacagaaacttttattcctgacaaccccatttcagccttggcagggagaccatactgaagttattttacagatktgttaaattaccaccaactcgaaaggctaacatttttctctaggaaggagagcctttctttgtcctgttacctaaaaggatgtcagacattcagcatgtg

SEQ ID NO: 141573 - DNA, 201 bp, Homo sapiens
cagatgcccactgtcattggtgactagggtgtccccctcctgttgtgccctggcacatgacagattattgtgtgatgtgaaagggacatatttgtgaatcyggattgttctatttgaaccacttttgggttgatgttatttggaaaaacttcgtggggagggagcagtttctgcagagatgccaaaaatatggtactgtca

SEQ ID NO: 141574 - DNA, 201 bp, Homo sapiens
ataagaaggggaacaaaaaaagtgaactctaggattgctccagtttcctttctggagagagtccgtgggctgtgacacagggaggggacccaaacagagcscagctaattgcactgagttgaggaaacagaattctgagtttgggaagacaaaggtgctgaaattctcaggatggaataccaagaggtatgagaagagttg

SEQ ID NO: 141575 - DNA, 201 bp, Homo sapiens
ctagtgatttgtagagggtcccaccaattcatcagcagagtactgacaggcacatgcctaagagcaatctactgaggccaaagaaaaaagctccaggaaaragcaggtgaaataatttctggtactcgcacaggccctgaaagagcaggtacagtgagaaggggacattgcctactgataaaggaattagtacctcaggag

SEQ ID NO: 141576 - DNA, 201 bp, Homo sapiens
aatgcctgagccacctgctccctggggcccctggaatctgatagtggacactccatggcattctctcttgtctttgtacccttcttttctcacaatttctrttcatcattttaaaatcagcttgagagtcacttgatttaagaagcatttcttgacaactcacaaggagagctaggcctcccttcttccctccctccctcc

SEQ ID NO: 141577 - DNA, 201 bp, Homo sapiens
aagcctttcaagtattttttccctaagctactttaaaaaaaatcttttcattttgcgtttcagagttgaaacatgcatttttgcagatgaatgattaacakgacctattttatcctgaacattttgagtctaggccttttgcacgcacaagctacatggaaacagcattctctgtcccttattcagcctaattcagccctt

SEQ ID NO: 141578 - DNA, 201 bp, Homo sapiens
atgctaacatttcttatttaaatttaaaattatgagatcggaacttcagttttatgcctgaatatactcttacatttaaaatctacgtactcaacaccttwaaataattatttattcttgttttattgtggaatacaaggccgggcgtgatggctcacacctgtaatcccagcactttgggaggccgaggcgggtggatca

SEQ ID NO: 141579 - DNA, 201 bp, Homo sapiens
atattatataacaaatatataattataatacatacattttgttatatcaattattaacataattatattatgttattataatatatgatatacagtatgtrttatataaaaatatatacatatatactatatattatataacacatatattcttattattataatatatttaattataatggcatactacatatttataat

SEQ ID NO: 141580 - DNA, 201 bp, Homo sapiens
tggttcagggaattgagatcctggacctcagggcctgtccagctctgtgctggtacagggtggcttccaggtctggtcaggtaatctccacacctcccccwacctcatgtgatttctgtttttcagctttgtttgtctgcctttcttctagcagaaatgttcactcccacagcctgcagctgggcagtgagtgggaagcca

SEQ ID NO: 141581 - DNA, 201 bp, Homo sapiens
tcgttcacaaaagtagtacttggtcatcttgaaacttcaaacaccaagccaggataaacagcagagatttacaatgcttcattctccctcccaggcctgtmttcctctagtttctagtgtgattttggctgacatatttctgcgaacttgaattattttagccttattgttatagaagtgattagtctccttccagtaggg

SEQ ID NO: 141582 - DNA, 201 bp, Homo sapiens
agaacaaaatcccccaagctcttctgcaactctcgggtctctcctgtggtctcacctctaatttaggttcttgatgtctctggcctggacggccctgcacrctgaggtctaactgcctgtgaccctgcctggccacggctattcctgcccctcagaggaaagggcttgcagcatcatcctggcagtgggcatcatcctggc

SEQ ID NO: 141583 - DNA, 201 bp, Homo sapiens
cctatggcatcatgctgtgactgagagaaggtcagtgtgggtgggatacctgtgcagtctatgcagggtgtggggattagtagggtgtatccagctgtccyacagggaggtggttaccagaaggcagtatacaaggcagatgtcttgattgaccaccttgagaaactgcaaggaggtaggggggatggaaactgtgtcaaa

SEQ ID NO: 141584 - DNA, 201 bp, Homo sapiens
tccttgtgtcacttcctgctcaccctgcaccacaaaccacctttcgcttcatccacagtcactgtggcaaacagtaatgtccttcaaagttcttcattccrgaaggatatgtgttgaccagccagaaaacagtttcagtcattgtttagataaataaatagcatccaatttaatgtacacgttagcagctgcgtcagagag

SEQ ID NO: 141585 - DNA, 201 bp, Homo sapiens
tgattgtgctgcagtcggcatcgttgcttccctccacattgcctcttggggtaattctttcgatgtaactaggaacatcttcctgtatacttgttttgcartactactttaatgtattcagccagcaagaacaaataagcattgccaagcatttccattttttcttcattgaagttcatcatttttctctgttaatgagtt

SEQ ID NO: 141586 - DNA, 201 bp, Homo sapiens
taaaatcaacaagatcaactttatggacatttacttatggtagcatctgggaagccccagtttcacctttgaagacaaactttcaactagcttgatgatcsatctggagatagatgtgtggcaagcagcagggactgggagatgatggacgggggaaggctcaaaaaatacatgtacaaagaacattacgttcaggtaaag

SEQ ID NO: 141587 - DNA, 201 bp, Homo sapiens
ccattaacatatcattatttttttctaagtctcaattacatgtatgttttgctagctgaaaaaagattccctcaactcaaatagtgtgttccccagtaacrctgaaggaataaggacagaaaacacagagggcgaatagagggctgtcaggaggaatgaccctagtccaatgaggtcgatgccaaaaggatcatgtgtggc

SEQ ID NO: 141588 - DNA, 201 bp, Homo sapiens
tcctagcacttgcattttaatagcaaaggagggaccatagatagaaaaataaataaatgaacaagatcatgtgaggtgctgatgagggccatgaggaagayaaaatttagtgatggcatctggagtgaatgggatggccactgtagtaggtcagctgagggagtctcagagggagaaatgagtgaataggaagaggaggtg

SEQ ID NO: 141589 - DNA, 201 bp, Homo sapiens
tcttgttagggcttcggagaatatgtgtctacgatgagatgtgtttgtacttttctcagaccagcatgtaattaaatgggaagaagagattatcttggttwaaaaaaaaaaaaaaaccatcagtaagatataatctgatagatttaaggaaactagtaaaaactggccagtggcaatctgtgtgaccttcatagaagggag

SEQ ID NO: 141590 - DNA, 201 bp, Homo sapiens
agcggcagcatctggattgggccgcggctggggtggggcaagtggagtaggcatttgggcgatgtctgtgtgaatcctggcataaacaagccacttgcctrtggagtgtttctgtttaaaggtcagtctcctagtgatcagctcttgcttttctcccaagcaggagctataccaccagtcctatgactgcgtctgcgtcat

SEQ ID NO: 141591 - DNA, 201 bp, Homo sapiens
ccatcatcaacaagtggctggggaagtcaaataagaacagttcgtgaaaatgctcacttctggttagtgtttatgacaagcatttgcaccagcagaagtaygagcctccccctcatcgccccctcaccgtgctgtgccatcacagcacttcctacagcgcctgttgtccacataggatgaaatgttggagtcttcctcagg

SEQ ID NO: 141592 - DNA, 201 bp, Homo sapiens
cttcccagataacagccagacctttcaatccagccagggctggcctttcccattgggaactcagcagtgtaatttgtcagcaccccaaacacgcaccccaytcttgcaccaggctcacagacactgaggcatcgaaagcagaaagtagattatctatgaattgatgctgagcagtcccacctcatccatgtgtgactctcc

SEQ ID NO: 141593 - DNA, 201 bp, Homo sapiens
gtgatgttgctcaacaacttgttcagtctatactaattttggaatagcctgaaatccaccatagctccagtctttactaatttaagagtagcctggaatcyatgtctactccactattttcctgaaacataattctatattgaaatgtgcctggttctaactgcacccagtatgaggaggcacagcaggcagccatcctgg

SEQ ID NO: 141594 - DNA, 201 bp, Homo sapiens
tgtctgtgaggccactggaatgtgttctgggattcctaccccccgataaacttacgttgtcagggcacctaagcactcttagttccttacacccatgtgtscagtgggagaaaatgatccactggaagatgaaggaggaggaaaggctgttccctgggtttagccgcccgctggcaggggcctcagagggtagggtccagt

SEQ ID NO: 141595 - DNA, 201 bp, Homo sapiens
gtgtgctcaccccctggaggggagcagatctcttgccaaggaggacaaacttggggttccatccattcctcagcctggaaggcttcatttctaaccaagaraaactgttccattttattcattttttaaaacactttctgtgtttccaaccaagcaatgattttcatcatccttaggtctgaaattgaatatagctgttag

SEQ ID NO: 141596 - DNA, 201 bp, Homo sapiens
atcttatgcttagctctggaatcttctttctcctcttggccactgatttttgaagtttataatactgaaccatgaccttttttgtgtcgtggctgtagtgrtgaatttcctttgttgcattttagaaatttggtctattttggctgggcgcggtggctcacgcctgtaatcccagcactttgggaggccgaggcgggcgga

SEQ ID NO: 141597 - DNA, 201 bp, Homo sapiens
ggagactagttatcaggttgaagaaaaggagttttgcctttagatcacattctctgtattaaaggtgttttgtatttgcgctcggtttgtctttgcaatgaccttgaagctagggagactgacttgagaagcctcggcgacttgccttcacttccatcagtaaagccagcatcctcctcgggggcacgcacctgtctctca

SEQ ID NO: 141598 - DNA, 201 bp, Homo sapiens
gcgccactgcagtccggcctgggtgaaagagtgatactctgtctcaaaaaaaaaaaaaagaaagaaaaagaaatgttggtctattttgttaggtattgtayagggaagttctacccaatcgttttaatatgacactaatatttggccacccgtattcatatctttatggttatcaaaaaatggaaccataattattgatca

SEQ ID NO: 141599 - DNA, 201 bp, Homo sapiens
tgatactctgtctcaaaaaaaaaaaaaagaaagaaaaagaaatgttggtctattttgttaggtattgtatagggaagttctacccaatcgttttaatatgrcactaatatttggccacccgtattcatatctttatggttatcaaaaaatggaaccataattattgatcattattaaataagtgaaataaacatctggaag

SEQ ID NO: 141600 - DNA, 201 bp, Homo sapiens
atatgaaagtgagatccttaaaaaaaaaaaaaaaaaaaaaagctgtgtaacatgatgccttgagagtgaacatcacttaatccaaagccagaggtgcccctgagggtgggagctggctcacaggacggccgggcagcactgccttttctgattgagcccctctgtgccattgaagtcacggcattttgtcccatccgtttg

SEQ ID NO: 141601 - DNA, 201 bp, Homo sapiens
ctctgttttcacagccaccttatatgttgaccagatgagatgggcggtggtcccctgattgtaattgtttcagcatttctcagaagagatcctaagtatcygtctggtgtccttccctgtttcagtactttatctacagctgcattctgggactgatatcctgttccgtgttcctgcgggtaaactatgagctgaagatgt

SEQ ID NO: 141602 - DNA, 201 bp, Homo sapiens
aattcagtggagttgaaaagattaagaccattggcagcacatacatggcagcaacaggtctgagcgctgtgcccagccaggagcactcccaggtaagacgygttggccacttaacggcacaggtgagcctcaaccccatccacaaaccaccctgggaccaaaacagccatgaaatgccccaagaactgtatattttgtaca

SEQ ID NO: 141603 - DNA, 201 bp, Homo sapiens
tggacttcatgcaaaatttgacattttaacattgagatataacattcatagtctttatgttatgaggataatttggttcttgagcttttgaagcattatawttaagtggcatatactgtaataaagagaacttaagctaatttgaggcatattagagagcccataagacacctggagacagcacggtgcctctggccaata

SEQ ID NO: 141604 - DNA, 201 bp, Homo sapiens
ttgtacatcagcaattggttggttggttggtttttaaggaataagaatcatatataaatagtcgaatgtgatttcctgtgctgtttttcatgtgttcctgyggggaaaaggcttacttttccaggtatattgttgttgttgtttatttcttatcagcctttattgtcttaagacttaagagtgactgtctcttttattatc

SEQ ID NO: 141605 - DNA, 201 bp, Homo sapiens
agccactcccagcatctctctttccctgctttgcagacggcctgtcatggggcttcaccttgtgatctggtgagccaattctcggtaataaactcccttcwatatatatatatatacatcctattagttctagccctctggaaaaccccaactaatacatagacctccctcaagcttctggctttcacccctcggtgtgcc

SEQ ID NO: 141606 - DNA, 201 bp, Homo sapiens
cactgagtactatgtaaagcacataaccttacactaaggaactcaaaaccattgccattcactgtaactgtcatgttttctagtctcagaatagctgtttrggaagtatgggagggaagcttgatttatagaaacaaatataggatcaacaagtatgaatgcagttaatctaaatattaaaatataaatacaaaatttagc

SEQ ID NO: 141607 - DNA, 201 bp, Homo sapiens
agggactctttctctgagcgagcatcgttcatccttcctcttgcacaatggctcagcacctgtgatccctgccactataagtcagcgtggaagaaaagaartagggatgatttctaggggatcatctgaacagagtggagggtaaagctgtcccaggaaccctgattttcctgtaaccatcagaggattcccacagatcgt

SEQ ID NO: 141608 - DNA, 201 bp, Homo sapiens
tttgaccactcacgtgtacctgaccccttggccttgtcctcccacttaaagaattttcccatccctttgtctcatgacattgcattccctcagttttcttytgacaatctgttttgttcttttcttttccataaatcaagtctctcccgtaaatgagagtatgttgggggctctctcttacctcctctcggtttctctcca

SEQ ID NO: 141609 - DNA, 201 bp, Homo sapiens
ttctgttgtggatagtgggctgcagttctcacaccatcctctttcctccagatccctggcgaaggcagcactcccatctggagcattgctgggctcatggmaaatggaagggagatggcagaatcctgtgatgtccctaaagcttctgctcagaaggggctctggtcactttcactgatcatactttagccaaactttatg

SEQ ID NO: 141610 - DNA, 201 bp, Homo sapiens
ttcccatacaatggcccgcctatagtcaaccctcctgaccagtgtgcatgatctcggcacagcgtatcagctactggagccgtttacatttgcatcaactycagtttctctcttcatgaaataagcaagtgattctaagtgacttaagctcctgagtcacaatccagtttcatggggtcttaaaagaccgttgagatattt

SEQ ID NO: 141611 - DNA, 201 bp, Homo sapiens
gtactttggagttgtcacagcagtctgcttgttcagcctcaggtttcactctctcagctgagaacgttctcctaatgctgtgcttcccatacaatggcccrcctatagtcaaccctcctgaccagtgtgcatgatctcggcacagcgtatcagctactggagccgtttacatttgcatcaactccagtttctctcttcatg

SEQ ID NO: 141612 - DNA, 201 bp, Homo sapiens
cagaagttctattttaagtttttatgtagttaagtagatcaatcttatagtgtgtttggagacatatttaggaagtctgtttcccctcactcccactgctrggttataaagcagtgcactttcatgagctcagttttacacttagattactgattcatggggcatttgtccccgtgggaagtgtgacatgcatatccagtg

SEQ ID NO: 141613 - DNA, 201 bp, Homo sapiens
accatatttctacataaacaaaagataataggtgaatgtcacttatccaggctcagcaaatacagttttggtgtgagggcagtttgtatcacaataatgcygcataacaaccatgaaatctcagaggtacacaataatagactgcaggttgactagggcagctctgctccatgtgtctctcatcctgggactggtgggcta

SEQ ID NO: 141614 - DNA, 201 bp, Homo sapiens
tctttgggatagtctctaaggaacaggatttttagggcaaaggatgagcatgatattgctggctattgttcattttactcccccgggcttggactgctttkcttccccagtagtgcctaacagtgcctgggttgcagcttgccaatcaggtgagtgcattatcacacagttagagaaacgacatcccaaggcagatttgat

SEQ ID NO: 141615 - DNA, 201 bp, Homo sapiens
tcttccgctctgtcccctttcagctccccttcccaccgagagccactttcattggcaataaaatctccttcattgaccatctccgatttgtttgtgggacytctttcctcctgggcactggacaagaatgtgtgtgtgggtgcaaaaggctgtaatactgaccttccactgagctgttaatacttaagctgtccgcagatg

SEQ ID NO: 141616 - DNA, 201 bp, Homo sapiens
ctaaagagatttattatacatagagtccttataattgtacctctttgtgctggttttctcatctgggtctgccctagctcctatatgcctgtccttggccycattcctccctgtaggaaaacctcatcaggtgcaaagggcactggaagggcattcactaggatgccacacagggttcaatccagccactcgccagcttct

SEQ ID NO: 141617 - DNA, 201 bp, Homo sapiens
cttctctcatttcctgcattctttggtgcactgttcttcaaagcatatccagcaatgacaaggtctgaagaatttttagtaaagcagatggccattttgcrgaagcaaagtatggcaggacttaattgacaatgcaccattggacacggtgctgaaatcaactcctgttcagctagtggagggtcccctctaatcggaagc

SEQ ID NO: 141618 - DNA, 201 bp, Homo sapiens
gaatgacctctaaaagtctgagtctggaggtggattcattattagagattttttccccaatcatgtaaagttctgaatgtcttttatgaggcactaggatmccaaatatgcctccaaagaagccactgctctctccccattgtgggaggaggcctgccttaccagcacgcaatggaggctcaaaccaagaggcaacgttaa

SEQ ID NO: 141619 - DNA, 201 bp, Homo sapiens
gtgcttttcttgcaaattatggaatttggttgtcaaatttgatctaaataaaggaattttaaaatgcataatctaaaatcaaactgcttttcttcatttcrgttctactcccaagtgattctgatgccaggcatggttttttttctcatcagcatctttcactgcagtgattgctatagaaatccttgaggtgtgaaaact

SEQ ID NO: 141620 - DNA, 201 bp, Homo sapiens
ttcccgactgtgttgccagagcccctacagggcttctgccacccaggttgtgctggtgttcacatgtcctcactgccccacctcttactggcatctcctcsaatgccagaattgttaagaacagctgttgatgtagtaagcaataattaactcccaggttgataaatcacgtggctgcagaatttttttcccttgaaatat

SEQ ID NO: 141621 - DNA, 201 bp, Homo sapiens
attgtcagtgtttggatgattaaaacttggcaagaaccatagatttgcgatgtattattggtgatatccttggaatctaaagtagattattatatacttgrttcatgaattatagttcatgcattggtgcgtttaggggttaaaatccagcatgaggaggtctggaataaaagtataacttcttaaaaaggggcacgtttg

SEQ ID NO: 141622 - DNA, 201 bp, Homo sapiens
aaaaaaaagaaagaaaaagaaatgttggtctattttgttaggtattgtatagggaagttctacccaatcgttttaatatgacactaatatttggccacccrtattcatatctttatggttatcaaaaaatggaaccataattattgatcattattaaataagtgaaataaacatctggaagtgcaaagaatgtgtaaataa

SEQ ID NO: 141623 - DNA, 201 bp, Homo sapiens
tgaataatatgagggagactgcagtgctgggctagcagagagagggtagcaatgatgacttggatgatgtaggagaccaacatctactataaagagagggmctcaggggtgtggctgtggtttagggggacagcagggaggtgtgagtgctggagcagcaatagccagaaacactgaactctgagtttggttttactgctt

SEQ ID NO: 141624 - DNA, 201 bp, Homo sapiens
gtatagggaagttctacccaatcgttttaatatgacactaatatttggccacccgtattcatatctttatggttatcaaaaaatggaaccataattattgrtcattattaaataagtgaaataaacatctggaagtgcaaagaatgtgtaaataaaatgcattatttctgcctgcccttcccccaccaaatgatttggagg

SEQ ID NO: 141625 - DNA, 201 bp, Homo sapiens
cagttcccctggaaatctatgcatgcatatcaataatgcatattgtgataaaattgaaagagagagatgtacacacacacataatatacataacatatacmtatatatttatatacatcttccaatcagttcttctaatggagaagacacataggtgttcaacagtaaccaaaaatagaattcaaagtgtatttacttttc

SEQ ID NO: 141626 - DNA, 201 bp, Homo sapiens
tcaagaggttatgtaatttacccattgtccacttaaagagtgacagagctgaggccagaatgttctcctggcttctgtcattgaaaaatcagattatttartgagttcctcagtgaaatcttattcaaagtgtaatgaggcattcggtcacacaatcatgcattcactcctgtatccatccaacaaatgtttattgtttgt

SEQ ID NO: 141627 - DNA, 201 bp, Homo sapiens
atcttattcaaagtgtaatgaggcattcggtcacacaatcatgcattcactcctgtatccatccaacaaatgtttattgtttgtcttcctatgccaggcartggcctctgtgttctgtactgggaacaaaatattgaagaaggcacagtctgggctcactaacacctacgcttgaagcaaacaggtgactttggcagagtt

SEQ ID NO: 141628 - DNA, 201 bp, Homo sapiens
agattggtgtggggcttctgtctcccatgagctctagagagaaattatgaggaggcctcacttcaggctggagaggattgtccctcccatttctctcctgsccctgtctccgagccacagcagagcgaggcccacccagaccgtctcgatttctgtgcccctcccattcccagtaccacgtcttttgggggtttgttcttt

SEQ ID NO: 141629 - DNA, 201 bp, Homo sapiens
tattttaagatccttggcacttaagactagtaacccaccaagctaaacaatctccttttgtttgccatttattgattttttaatatttaaatcaattgaatttttggtctatcaaatctaaatctaaatctgtacccttttggagcctgatgtttgccaagcaattattccattcgtataagtttttccaaaatgttagca

SEQ ID NO: 141630 - DNA, 201 bp, Homo sapiens
ccattagcaaagtgaatgttgacagctaacacagcacacagcacctagcctagctgtgggtggggagggcatccttagggaggaggtggttgaaagtttgkctggagaattggtggggatagccttagcaaaggactgggtggaaatgacgtgatggaaccagccatccaggtcccgggggagcgtgctccagtgcgggtc

SEQ ID NO: 141631 - DNA, 201 bp, Homo sapiens
tcttctccttgtatcctcacatggcagaaagaaatagttctgcagccaattctcataagggcactaatgccattcatgaggtctccaccttcatgacccartcacctccgaaaggccccatttccctaataccatcacattggaggttaggaattcaacagatagattttgggagacagaagcattaagcccataagaact

SEQ ID NO: 141632 - DNA, 201 bp, Homo sapiens
tgagcagtctggattgtcataaaaggggttgggggtcttgctgacctctggtgggtaaagggtactaaagtctagtctatgtctcagtctattggacagaygctgctaaatatcctgcagtttgcacgtcagccccccacagcaaagagccatgtcgctcaaaatgctgatagcgctgagggtgagaaaccatggtttaga

SEQ ID NO: 141633 - DNA, 201 bp, Homo sapiens
aagtctcttcaaatattttacagagtttgactcttttcatcaacaccattgtcctttccttcccttctttggctgcatttaaaggcagcagtgatcacagstgccgcctggatgtcccagttgtccatctggatgtccaccaagatagcttcccagataacagccagacctttcaatccagccagggctggcctttcccat

SEQ ID NO: 141634 - DNA, 201 bp, Homo sapiens
ttttgtagagatgaggttccatcatgttacccaggctggtctcgaactcctgggctcaagcaattcttctaccttggcctcccaaagtgctaggattacargtgtgagccaccgtgcctggcctgaagtgattttaaagtaatgcaaagcctgttaagtgtgtagtttttattggttttcatgatagcagtgattgaatct

SEQ ID NO: 141635 - DNA, 201 bp, Homo sapiens
cttagaacaaaccccctggttttttcaagtgggttctgagacgagagcgggatcaggccatgccctttcaaaagcgctaatggtaaatcaaagaagaatgygacagggtctctggtatcatatcattcataaccaagacttcaacacacagtgcacttgctgtcagacgagactagatggacaggctggtgtttggaggaa

SEQ ID NO: 141636 - DNA, 201 bp, Homo sapiens
gcccacagtggctcttaaggcttttgttagaaggagcacatatcactgctgcttacatgtcactggtcctaccaaggtacattgcctcccaggggggcatrggagggagagtcaacacatttcagaacgatagtccagtccattgcaagtgtagcatgtacataactgcatcatgtatctgtcatctgtagcatagagttg

SEQ ID NO: 141637 - DNA, 201 bp, Homo sapiens
tgctctgaggggttgcatttgaacataaaaaaatattctgttttgctccttgggacctttcatcaaatcgataccaatgtgctaccactttttccttcttmttcttatctccttctgtcaatgatattatcagcatctccactttgtcctcctcctcagaagaaatccaaaggctggcgccaccacctggctggccttctg

SEQ ID NO: 141638 - DNA, 201 bp, Homo sapiens
gcttttctcccaagcaggagctataccaccagtcctatgactgcgtctgcgtcatgtttgcctccattccggatttcaaagaattttatacagaatccgaygtgaacaaggagggcttggaatgccttcggctcctgaacgagatcatcgctgactttgatgatgtaggtactgagagttgccctcgaagggcagcagtac

SEQ ID NO: 141639 - DNA, 201 bp, Homo sapiens
gacgtgcctccagctgtctcctctgttggaaattatcatctaactttcataatccaactctgaagagcccgcctttgcaccaccaactcctctcatgctgrctggccgggattcccattttgcgttattacttttattcttgtggatggaaagatcttcagtgagttcactgtagccctattttgttcattgtactacttc

SEQ ID NO: 141640 - DNA, 201 bp, Homo sapiens
tgaagcccagaaaagttaaccaacttcctcaaagtcacacagtgaggaagaggaccagaatttggacttggcattctgccaccatcacatggaatgtccasatgcccactgtcattggtgactagggtgtccccctcctgttgtgccctggcacatgacagattattgtgtgatgtgaaagggacatatttgtgaatctgg

SEQ ID NO: 141641 - DNA, 201 bp, Homo sapiens
tccagccatttcatctacattcaaggcaagcagaataagtagcaaagtagaagtgtcccacgaacagtatctgctcctttttattaggacattaaaagctrcttaccacagaggccgttccttcctgaggctgacttcattcacatcttgttccatcaccctttccagtcacaggagagcctgggaaagccaatgtgtgga

SEQ ID NO: 141642 - DNA, 201 bp, Homo sapiens
ccactctcattgctgatactaattgcaagctggggggtttccaggactacccagagattggacaattttctagaagaacccacggaacttgtgacagccgytatcgctgtgattagggattgctacatggggagaatacagatgcactttggcaaagagaagagcccaggaaaaccgccagacatggagcccctgttgtcc

SEQ ID NO: 141643 - DNA, 201 bp, Homo sapiens
tcattggattttgggtccactctaacctatgatgatcttatctcaaaatcataaacttagttacatttgcaaaggtacaattttttccaagtaaggtcacwttcacaggttccaagtggacataatttttggtggaagaagggagtcaccattcaaaccactacaatcaaagaatggcaattgagtaaaatctgcttcgat

SEQ ID NO: 141644 - DNA, 201 bp, Homo sapiens
atgtttgaaaacaactcaatcagaagaacatggcctcggggtgtaccttgctggcttccttcctttctccatctgctgggagctggacaggagagaggagragctgtcatcctaggtctgagagtgtctctttattccattgacttagccttaagaaaaatgcatgatgcaggcagcgaggccagggaagactgtggcctg

SEQ ID NO: 141645 - DNA, 201 bp, Homo sapiens
ggtttctgaaaacgtctttatgtgtgttttaaaagatgattttcagcatcttttttttgttcgcaagtaacagctacaatttaaataaaagcttttttttwaaaaaaaaaaaaaaggtctacattttcttccttcattggacttcctgctgaggctgttgacaagatgttttgtttagtgcttgttctattctatttttcc

SEQ ID NO: 141646 - DNA, 201 bp, Homo sapiens
attttgtgttgatggacaactagctttttaatactggaggacgttatgaaatgatttctgtttcctaagtacatgggtgaaggagccacaggtggcccaawggctgcttagggatctggtgtttgtccactctgttagctactttcttttagaaggagaaaaacttacaacatcctttctgtttatcccattgatttagca

SEQ ID NO: 141647 - DNA, 201 bp, Homo sapiens
gccaccttctcgctgtgcaaacttgccaggccacagggtatcggacatgccctgtgggccacggggatgcttcaggatggagcaatgtgcccaaagccggrttccttgaggctggggatgtcgttcttcctgtagaagtcagcctgcacatggttggcacggccaaagtcccggtttaggggctcaatgggctgattgatg

SEQ ID NO: 141648 - DNA, 201 bp, Homo sapiens
agtgaagtcccaaaattttgaaaacaaacttttctccatcacaacgattagtctgttattgtaatccagtggacttatttgcatcgactgccctattttgkctatagattatttctaaaatgagcatgtctcatgctgttctatgcagcctttagtggcatggaaacaggaggctcttagaaaccagaatatttggtgact

SEQ ID NO: 141649 - DNA, 201 bp, Homo sapiens
tgagcggggagaaaggatcatcagaatgtactcctaacccaccctcagctctctcagcagaagtttccaacagccaccaaagcgatgtgcactaggagtaracaaagagatagacacctgaccctgtgaacctggaagcaaatccgagcttcccctcctcccctaatccctcatcagcttgccaaaaaaagaaaaagagaa

SEQ ID NO: 141650 - DNA, 201 bp, Homo sapiens
tagtaagagtaagagttttaactgattgatatgaagcaaaaattctactgagggacctaagaaaaagctgaattttgtaatgggaaacagcaacagtagcmgttgttgggagaacagggtgatgaaggctgaggctggaggaggactgttattgtctgagacttggagacgtggagcctgctgcaaaggaagatgcgtgat

SEQ ID NO: 141651 - DNA, 201 bp, Homo sapiens
gaaatacttaggagtcactcagccttgaaattgccggaattcagtgtcatttatttttagagaatcctttttccatattcaaaacaataaaaccagtgatrgagcgatcagtattgaaattaattaggccacctgcccattcactgctaaactgtgggaaatttaatcatggtagatgagagatgatttcttccaagggat

SEQ ID NO: 141652 - DNA, 201 bp, Homo sapiens
aagtttatgttaaaatgagtacaatattgtttactaatatttattgtttcctggacttactgaatataaagaccaaaagtactcaaaaagctcatatgttrtcatttccttgtgttccacctgtagtttcttatggatgacattttacagaagctaacatttctgactccatttttataatagcttagaatttctaaagag

SEQ ID NO: 141653 - DNA, 201 bp, Homo sapiens
aatttgatcccttgggttctttcctctgcgtggtgctagtggttgggcacttgggtgcagcaggatgtagtcatctctaggacggtggaaagtaagttctmgaaagggcctcccatggttctttgaagagctgtgctcttacatggacatggaggccttcaactccttagcccaacagacctattgtccagatgaccaagc

SEQ ID NO: 141654 - DNA, 201 bp, Homo sapiens
ggaatttgaaaaacgtcaacaggtaatggatgtttcatcttacatccacattattttagtcattattaaaatgatgctgttactattaatgttgagtgtcrttcattcattcatgagcttcagaaaaatcagagaagaaaccctgggctctgcacctggggagtgtcttagtctgcttagtgctgctataaaggaatacct

SEQ ID NO: 141655 - DNA, 201 bp, Homo sapiens
  misc_feature (1)...(201): n = A,T,C or G
caggagtggaattcctgggtcaaagagcatggtgctttttttagctctgcatccttgagtcagatgggttgtatcaatgtatgtactaagcccgttttccngtgttcctgtgccttctaggttaccgaggagacgagcctcgtcctgcagaccctcggatacacgtgcacctgtcgaggaataatcaacgtgaaaggaaag

SEQ ID NO: 141656 - DNA, 201 bp, Homo sapiens
atgttatcatttccttgtgttccacctgtagtttcttatggatgacattttacagaagctaacatttctgactccatttttataatagcttagaatttctraagaggattaggtgcttatagaggaaacgaaatctttggaagtatatatcttatttaagaaatgtggaataggtggaatatcagctgtctttcttaagtg

SEQ ID NO: 141657 - DNA, 201 bp, Homo sapiens
aggaaagcacttgctgtcttataaaagggtcacctgatttgctgaagtgcctagtgactttaatatgcacaaaacattccagtttcctaggctgtgaaagragcaggctgactttccctctgcacacagatatgaaaacactggcctttaaagtcgctcctcagtaatctcagcccttcttcatcctcctcccacaagtca

SEQ ID NO: 141658 - DNA, 201 bp, Homo sapiens
atgacaatgctgctgtgtgacatgacaacgctgctgtgcgccataaaactgctgtgtgccataacactgctgtgtgctgtaacaacacttgttgtgtgccrtaacaacgctgctgggtgccatagcaacactgctgtgtgccataacactgctatgtggcttgtaagctgcccagccctgtcacacccacctggcacaggt

SEQ ID NO: 141659 - DNA, 201 bp, Homo sapiens
atgcctcacattctagatttgtccatttgctatctccttgggcttttagcttgtgtctgggtctttgtactgaatatgttctgtaaactgagcggtacctstaatggcttcattagatttggtttaacttttaatttttggaggcgaggacaaaaatgctaccctggtggtgtgtgttcccctggttgtgatcaggagaga

SEQ ID NO: 141660 - DNA, 201 bp, Homo sapiens
ctgtgcgccacgacaacgctgctgtgcgccacgacaacgctgctgtgcgccacgacaacgctgctgtgtgacatgacaacgctgctgtgtgccatgacaaygctgctgtgtgacatgacaacgctgctgtgcgccataaaactgctgtgtgccataacactgctgtgtgctgtaacaacacttgttgtgtgccgtaacaac

SEQ ID NO: 141661 - DNA, 201 bp, Homo sapiens
caaagaggaaatccacaggatctgcaacaaacacagcaggagaggacaccatgaaagtagaccgagtgtgtcttagcaattccctgctgcttctcaagtcrgagttagatgaagattttctgacaaggcatgggactgacttattttgccttatgcatcttaacctcagattagttttctggggtgttttatcttgtttta

SEQ ID NO: 141662 - DNA, 201 bp, Homo sapiens
ttagtatagtcttcatttgaattaatgaatatctcaaacaaaacatgaccaaaatagagctcttgatggcctcctaaaccaactttccccctctttacccytctaggtaaatgatactccatttacccactttcccaggccagaactctaggaggagccatactggactttttcctctcactcctcgtatccaagccatct

SEQ ID NO: 141663 - DNA, 201 bp, Homo sapiens
tacaggagagagaaagagaacagaaagagagagatcagtgggaaagattgatacaaattggagctatttttcttgctgaacaaaaactcagttttcaagtrtcaaccgtaaaatacttttcccattgatcttttttaaagcgtggccgtatagttaacattataacaacaatgcagagaactatccctttcatctactctt

SEQ ID NO: 141664 - DNA, 201 bp, Homo sapiens
taagtacaatttctaagacatatagtttcaaaatacttccttttctgtccctttccttttgccatgacaactctcataccctgagcaggcagtgtggactygagccggccagcctgggcgtgggtttcactcttgtgagatgtcaggcaagttgctctttgttgagactttgaagatgtaaaaagtcatgatgataatcat

SEQ ID NO: 141665 - DNA, 201 bp, Homo sapiens
gtgttcaccaggtggacgggcagggcgtgtgctttttgcatctttgcgcacccgctggcaaactctgcgctttccgccgggcaccgctgcccgcagcgctsgaataggtcttccccgactcagccctgggcttcctgggcgagtcgctgtctcctgcccggttccactggcatggccccacagttggcattttagttggga

SEQ ID NO: 141666 - DNA, 201 bp, Homo sapiens
tccttcctcctatgaatggcctcctatttcatcttttcctctccaaatctggttcaatacacaaaatgcgattcagttgtcttttactctatcaagccttrctaatctgcagttctcgctcttaagtaatattaataatttccagtattatttgcttgcatattactgggaaatttacaaacatttttatgaaaatcttat

SEQ ID NO: 141667 - DNA, 201 bp, Homo sapiens
  misc_feature (1)...(201): n = A,T,C or G
tgctggccctgtccacagtctcaggcactcccactggaatacaccatctgtgcctcctctccttcctcctatgaatggcctcctatttcatcttttcctcnccaaatctggttcaatacacaaaatgcgattcagttgtcttttactctatcaagccttgctaatctgcagttctcgctcttaagtaatattaataatttc

SEQ ID NO: 141668 - DNA, 201 bp, Homo sapiens
tgcctccttttcctttctgctctgctcatcagggtcccgaggacccacacgtggaccttgtgctaggggctgtccttccatgacattgcagaaaggtggakgattcttccatagcccgcccttgagatctgcgcatggaggattcaccctggttctgggcgtccctggatgctgtcctgggctctcatgagcacagcccct

SEQ ID NO: 141669 - DNA, 201 bp, Homo sapiens
gcaaccctgcggcttctcctaggcctggaggcatagtaaccggtgtgcatcgagatggacagcttcttcctcccggtttcccattaatcatgcggtgctgrttggcgggtggttcggcattatgaacaccagtggatagttttaaaatgccagtgacattagcaccagtaaatacctcaacagttaacccccaaagcacca

SEQ ID NO: 141670 - DNA, 201 bp, Homo sapiens
caatttttggggaaatgtcagtttctgtattgactgttaacaacaacaacaaaattctaacaatataaaggctattatatttgtgaaaacaaatgatccarcagcaaccagcatgatggcacaacagccctgagcattcagtacaggagaacctttattacttctcctggtgctaataccttaaaaaggactttgcaaacg

SEQ ID NO: 141671 - DNA, 201 bp, Homo sapiens
tgattctccctttcccccgaccctctgtctctcccaggaggggacttccctgcttgacctccatgcactgtgacatccagaggtagttcagggatagcaamgtggaagaataatattgccaacaaaagcgatgggacaaataatgaggtgaattcactcctagcatccttttcagcatatctagctgtagaatcagttgga

SEQ ID NO: 141672 - DNA, 201 bp, Homo sapiens
ggcagcaaattctatctgaatggtttttaacgctctcttacatacaaatttcaactttaaaaagaaatctgaatatttaaagccattttcttcctttgctrtgggtatgtcctgaatgtcatttaaatccaaaatatgttacatctctttcacaaatgagatgtgtttctccacttgtactattagttgtcagtgtttaat

SEQ ID NO: 141673 - DNA, 201 bp, Homo sapiens
ctcagtcaaggtcgcgtctacaaacacggcacgcacagccttgagccatcctgcgttgctgattcactgtgagacatccactaagagctgctacattattktatgggctgttgccaattaaactgggacctgccactaactataagatacacccatatttcagagatgtaaaaatattttctttaaaaaagtggatcttag

SEQ ID NO: 141674 - DNA, 201 bp, Homo sapiens
accagagtctccacagtctgggttctggagctcagctgtctggacccagatgcttcttcaccacctgtgagctgtgtcctgtaaaataagggtatttgtgrtgttaacatggaaagcagttgatacagcacctgtctcatagacacctctcctcaaacatgagctgttaggtttttttcattttctttttttttttttttt

SEQ ID NO: 141675 - DNA, 201 bp, Homo sapiens
taaggtgtttgctatattattttttctgtactcttctgccttttgaatgttttcaattttaaaaagcaattaaaaaatagtaacaaattttctagtgcaakggagaaaatgccacttaaaaatgtctttatctcatatctacctggaaataactgcctgcatttttttaatagtgttgaccctttatgcacatgtctgata

SEQ ID NO: 141676 - DNA, 201 bp, Homo sapiens
ctatattattttttctgtactcttctgccttttgaatgttttcaattttaaaaagcaattaaaaaatagtaacaaattttctagtgcaagggagaaaatgscacttaaaaatgtctttatctcatatctacctggaaataactgcctgcatttttttaatagtgttgaccctttatgcacatgtctgatattcatgtatca

SEQ ID NO: 141677 - DNA, 201 bp, Homo sapiens
ttttctgtactcttctgccttttgaatgttttcaattttaaaaagcaattaaaaaatagtaacaaattttctagtgcaagggagaaaatgccacttaaaawtgtctttatctcatatctacctggaaataactgcctgcatttttttaatagtgttgaccctttatgcacatgtctgatattcatgtatcattttgagctt

SEQ ID NO: 141678 - DNA, 201 bp, Homo sapiens
ttgcctaccttttccagtagtctttaatatattaatcatagacattttaaattccctttctgatatacatatataatatatgatgcaagggaaatatgcatatatatatgcaagtagatatatatatggtttatcttttatcaattcattttcccttgcattttcatgtgtctcataatttttgtttgaatgttaggcttt

SEQ ID NO: 141679 - DNA, 201 bp, Homo sapiens
tcagtgttggagtagaacaattacaaatgcatcccgttgcaagactggatgacagaaggaaggacacttttgaacaaattagaaaaaaaaaaaccctttgrttggacctaggctacctgcactcagtcaaggtcgcgtctacaaacacggcacgcacagccttgagccatcctgcgttgctgattcactgtgagacatcca

SEQ ID NO: 141680 - DNA, 201 bp, Homo sapiens
tctagcacctaacgtctccccttggccacacagtgcttccttgagatgggatttgattcttatagaatgtttgcagtgccttgtagcattagaatttgccwgcattcctttctgcctaaagctcaggtttgggacaaaggggaacagtttccagctgtgatgctctaacttccatctgcctgtgtgtgtttgttctcagga

SEQ ID NO: 141681 - DNA, 201 bp, Homo sapiens
cccaaggacaaggagcgggcaccccctagcggtcaggccaccagagccagagccccgcagagaaaggcaaaggccggctgtggaggggaaaggagggaagraggcgccagcccctcctcaaagccagcttcccttggtgatttctggactaatacgatacaggttccccgtggtcagccttagcccgcatgatgcgtttgg

SEQ ID NO: 141682 - DNA, 201 bp, Homo sapiens
caagcctcagtgcccaccaacagacctcaggactgtgcactgtaactgagaaactctgaagacattcatggcttctgcattagtgagcttgggaatctcaygttggaggaaatgaattaagggtgtttattccaggtcctttggaagagcctggaatggggcttacttagggcctgccactttcatgatcttgatcattga

SEQ ID NO: 141683 - DNA, 201 bp, Homo sapiens
cttcacacggccttccctttgtgggtgactgggtcctaactgcctcttcttaaaaggacaccagtcatattggattagggcccacccttataagctcattktatcttaatcacccctttaaagaccctatctccaaatatggtcatatcctgagagactggggttaggactttaacatatgaacttggagggacacaattt

SEQ ID NO: 141684 - DNA, 201 bp, Homo sapiens
tggcgggttcccagcctctgcatctgggcctggcatcctgatgttctcacttgttggatctccttagacacctctgcctcaggtgccttcctaggcccatwtagcagccccttcatctcaccattgccagctattctcaggcagagaaatatgtgccctaggggaccttctccagatggcttagcaggagggcgggttcta

SEQ ID NO: 141685 - DNA, 201 bp, Homo sapiens
ggggtggggcaagtggagtaggcatttgggcgatgtctgtgtgaatcctggcataaacaagccacttgcctgtggagtgtttctgtttaaaggtcagtctyctagtgatcagctcttgcttttctcccaagcaggagctataccaccagtcctatgactgcgtctgcgtcatgtttgcctccattccggatttcaaagaat

SEQ ID NO: 141686 - DNA, 201 bp, Homo sapiens
aaatataaatatagtaagtgctacaaattcatgttaaatataaacaggtaacaggaatgataaacagaaattaataggaaatctgcatagaaatgttcacytcttcccactgggaaatcttcaggacttctctccttcagctctgtaattccctcctcctcgtgggatgacacagccctcaaggacgagtaaatgaggaaa

SEQ ID NO: 141687 - DNA, 201 bp, Homo sapiens
ggatgctttttcctgctagaatcatctctcagattccttcacagcagcaaattttaagaaactcgtatcaaattaaattctcccaactttgttattggtcrttgagatgatacacattcagtaccactacataattatggttaagtccaatggctgacagttgatccatcaccctctaattaagataaataatcaaaagtg

SEQ ID NO: 141688 - DNA, 201 bp, Homo sapiens
tgcaagttcattgagctatccagcagacatattttaagcaactgctatattccagtacttttcaaaggactaccaaaatgcatgggattaaaaaaaaaaaaataaaacctcatgcaccttagcatctactaggaaacctgtgttcttaacctccagaaatgtggattcactacagtttgcagacagtaactgcttccttta

SEQ ID NO: 141689 - DNA, 201 bp, Homo sapiens
gcgaaacacacgtgagggttaatcacctaagttcgcaaatcaaggaccaaaaacatgtgcctcccctgcaatagaaatgtctcctcaccatgaggtttccrggggtcacaagtgtctgttcagatatgcacaatccagacctttacttttccctctcagctgaaacttagatgccaaaattcccagcaattagttctcccg

SEQ ID NO: 141690 - DNA, 201 bp, Homo sapiens
tggagccctcacctgctgtagtgggcacattcacgatccttcctgggtgcgtgcttctcgaatgcacagcggtcagctttgaccttccgccaaagcctaaygagtccgtgtctgcattcctcccagccatttcctcttggtgatcccactgccaacctaagtatagttattcaataggcatttattgagttcttcttcttt

SEQ ID NO: 141691 - DNA, 201 bp, Homo sapiens
taattctgtggatgagggaccaaggactccaaaggtgccatccacttaagtgagtttttatttccaattatttaaaataaacatttccccccaccctccaacacacacacacacacacacagacacacacacacacacacacacacacaaaatgctgaagaagctgtaatcaggcttcttgaggatgcaaatggaggcttt

SEQ ID NO: 141692 - DNA, 201 bp, Homo sapiens
gatctttgtcatgttcacttgctttttttctataagtttttgtttctccttttcaccagtgaagagaattgtgtgtgtgtgtgtgtgtgtgtgtgtgtgtrtatatatatatatatttgagatggagtctcactctgctgcccaagctggagtgcagtggtgtgatgcaatgtctgccttctgggttcaagcgattctcct

SEQ ID NO: 141693 - DNA, 201 bp, Homo sapiens
ctcctctttgtccccggacctttcttcatctctgatttagctccctttgggctccaacgctcatctcagaagtcactgcctaaggcccgcagcagccccakgttccatttctcctggtctctcagctgttttccagcgtgccttgctggttcccctccccccgacccatgtcctagcccagggcatattgccagctcaacc

SEQ ID NO: 141694 - DNA, 201 bp, Homo sapiens
aattctgtggatgagggaccaaggactccaaaggtgccatccacttaagtgagtttttatttccaattatttaaaataaacatttccccccaccctccaacacacacacacacacacacagacacacacacacacacacacacacacaaaatgctgaagaagctgtaatcaggcttcttgaggatgcaaatggaggctttg

SEQ ID NO: 141695 - DNA, 201 bp, Homo sapiens
cctaattcagagaaaagaaggatgcatgtaggcttgaacttgtcaaaagagactttgcgcccgtcgaggctaacatatgaaggttttctgcaaaccaggcrctgttccattgtggatattaattcctttaaccctgcgatcccctaccactgtggggcaagagcagattttaaaggagaagtagtaacaaaaccaaacaaa

SEQ ID NO: 141696 - DNA, 201 bp, Homo sapiens
gaggccagggatggtgttaaacacgctgtgatgtgcaggacagcccgcaaagcagagaataacccagttcaacccagttcaagtgtccatggtgccaaggytgagaaaccctgcgttactgcaatccccatgcacactccttattaaacactgtgtggagcagatgaataaccccttcttcattttcctctcccctttagc

SEQ ID NO: 141697 - DNA, 201 bp, Homo sapiens
ttctggttgtcacaatgagaggtgaaggatgcccctgccgtccagtaggcagaggccagggatggtgttaaacacgctgtgatgtgcaggacagcccgcaragcagagaataacccagttcaacccagttcaagtgtccatggtgccaaggctgagaaaccctgcgttactgcaatccccatgcacactccttattaaaca

SEQ ID NO: 141698 - DNA, 201 bp, Homo sapiens
gattaagaccattggcagcacatacatggcagcaacaggtctgagcgctgtgcccagccaggagcactcccaggtaagacgcgttggccacttaacggcayaggtgagcctcaaccccatccacaaaccaccctgggaccaaaacagccatgaaatgccccaagaactgtatattttgtacaacctaaagctcagggtcaa

SEQ ID NO: 141699 - DNA, 201 bp, Homo sapiens
taaatcattctgaccatgcaagaaagagctcactcattgaatcataattttatatttatgcctttcaaatacatagtcaggaaatttattcaagcccatcrtcatttgcatcataattcatcttggttccttcactagcaaagtttgaacgctaattcgtgttccttggaagtaaatcattatgctgtactttcctccaag

SEQ ID NO: 141700 - DNA, 201 bp, Homo sapiens
ccacttgcctgtggagtgtttctgtttaaaggtcagtctcctagtgatcagctcttgcttttctcccaagcaggagctataccaccagtcctatgactgcrtctgcgtcatgtttgcctccattccggatttcaaagaattttatacagaatccgacgtgaacaaggagggcttggaatgccttcggctcctgaacgagat

SEQ ID NO: 141701 - DNA, 201 bp, Homo sapiens
tcgaaggtgtcactgtgttgggaaaattatggaaacaccttgaaattgtgtttacaagacactgcaatttaactcatgtctgtggataaagaactatgagsttcttcctatttaaaaacaaaagaatatcatgaataaatatagtcagtgtctaatataatataaataagtagactgaggagctctattggttctttctgg

SEQ ID NO: 141702 - DNA, 201 bp, Homo sapiens
ggcaagtaatgtaacccctctgtgcctcagtttctttatttgtagatggaaaactctagtaccagcctcacagggttgtagttgtggtgagttcatgcacktaaagtgttcagagaggtgcccatcctaccatgtggtgagcgctcagtaagtgctggctattattgtgcttattcttgtcatcattatcattccccaaag

SEQ ID NO: 141703 - DNA, 201 bp, Homo sapiens
tatttcttggactggggcctctaattatggatgagaggaccttgcattacacacagtgacatgcagggccacagggtagtcccaagtgttcgtccaagatrgggaagatctagccacactccaaaaactgaaaggggtagtggccacagaaacgcagttgctttgtgattattttttcttgccttgagcttgttcaacaga

SEQ ID NO: 141704 - DNA, 201 bp, Homo sapiens
tttccttatttgtaaagtttttttttaattttctttggctacttgaaaacaaacaagggtgatttggacaggggtatatatctctaaagcttggggcatcraaactgttttgattgtgcacacctatgggtaaatatttttgaccagtcattatatatatttgcttattcataaattatatgtgctaatatttatgtagat

SEQ ID NO: 141705 - DNA, 201 bp, Homo sapiens
gcatgttcttttaaatagatcatttctcacctcatctttattttattttgaaagcaaagtctcttttgctgtgcaaggtaacatatacacaggttcttggmattcagatgtgaatgtttgaggaaagccattattctccttaccacgcatagcctcctcacttttgttaatcactgtcactcaagggataacataaaagtt

SEQ ID NO: 141706 - DNA, 201 bp, Homo sapiens
caatgtttgtgagcagtctggattgtcataaaaggggttgggggtcttgctgacctctggtgggtaaagggtactaaagtctagtctatgtctcagtctaytggacagatgctgctaaatatcctgcagtttgcacgtcagccccccacagcaaagagccatgtcgctcaaaatgctgatagcgctgagggtgagaaacca

SEQ ID NO: 141707 - DNA, 201 bp, Homo sapiens
ggacggggggaaggcagtgggaggtgaaggcacctccacagagaaactcaaagaaatagcccaaaagcccggacctgagagggtagtgaggagcaggaggratgtgcatggcctccatcatagaagactcaggtttgaggggatgtccagggatgggcgaaatggcagggagtcttccaaaaacccatgaaaacatccaca

SEQ ID NO: 141708 - DNA, 201 bp, Homo sapiens
tttggacagcaaagggtgctcagtgttgcccaaggatcaagcaagaaaaagagaattggtgtagggttattttagatccaatgttacaaagctgcctgggkgacggggggaaggcagtgggaggtgaaggcacctccacagagaaactcaaagaaatagcccaaaagcccggacctgagagggtagtgaggagcaggagga

SEQ ID NO: 141709 - DNA, 201 bp, Homo sapiens
ttttgtacttttttttactgttgtaaaatatgcataacataacatttacaattgcaatcaattttaagtgcacagttcagttggatcacggacacttacaytgttctacaaccatcaatattatccatctccagaactttttcttcatcccaaactaaagctccgaacccattaaacaacaactccacaactccccctccc

SEQ ID NO: 141710 - DNA, 201 bp, Homo sapiens
acatctggtatgaagtctggcacacagcaggccctttgatagggcacgtgtgtgtgtaacagggcgtcagagggaatttcagcctgcgacactaagagacrcttgctctcttattccaaaggaggcattaaacagtgtgcagagcttacaaacgccttccttgacctgcagggagcttatgaattggccagaagactagag

SEQ ID NO: 141711 - DNA, 201 bp, Homo sapiens
tctggtctgggaggtgggagacctgagcgccggtggcagctttgaatgttttctagaacactccaacccccatgcccacctggatggagagccccagacgyctccacacctgggcccacggcaccaactgcactttattatgttttctggattttctctgtctctccaactagacttcatgctccctaagggcagggcttg

SEQ ID NO: 141712 - DNA, 201 bp, Homo sapiens
aacatttctgaaaagccccttcaatgggcatcaaagccagctctcatcacttggggagaagactgcattttgtcaccaaatcgaccccgtgccaagtcccygggtggtagaggattgtgagccagacatcctcattcggagagagccaatgcctgatcaaaacaagccacatgagccacggatgccaccacagaaatttgg

SEQ ID NO: 141713 - DNA, 201 bp, Homo sapiens
attagacttggtcaagggagggtggcagcaaacattcactttgtgaaagatgcaatatctgtgcactgcaataaagcaagacgcaatacaacaaggtctayctataagccaaaaaaaaaaggacttgaagtcatgttttatttccctgcctgggatcagcttatacctgcatcctttctgacttaactagtgaaatacttc

SEQ ID NO: 141714 - DNA, 201 bp, Homo sapiens
ctcaacctggatgataccagaacacaaagcaacctgcagtgagaagccttggaacagtatttttctgtagcggatttgaagttggcattaagaagaaggtrccaggtggcagatgaggtgctagacatcaccactcccatcttcctggaaatattcagggcacagtgggccttccagggctacacaacaagtctcatggcc

SEQ ID NO: 141715 - DNA, 201 bp, Homo sapiens
atttggacttaacgtgagaaacatgtatctgagcatccacagtacgcaaagccctgcgctcatttctgtggtgtttcccagatgtctgagatgtgtaaacsaagaagtgtctgagacaggtctcaatcaagttagaagtttattttccaaggttgaggatggtgcccaggaaaaagaaacacaagttacactaggattcct

SEQ ID NO: 141716 - DNA, 201 bp, Homo sapiens
aggcctgccttaccagcacgcaatggaggctcaaaccaagaggcaacgttaaaccatgcctcccacacgccccctgtttccccacactcagcttccctgasagccttccaaggctcttagaatttcaaagatatcagatacacagtgagtgtgacaggatttaggagttatctacacaagagcagaccaaagacttgagtc

SEQ ID NO: 141717 - DNA, 201 bp, Homo sapiens
cgcgatctcggctcactgcaagctccgcctcccgggttcacgccattctcctgcctcagcctcctgagtagctgggactacaggcgcccgccaccacgccsggctaatttttttttatttttagtagagacggggtttcaccgtgttagccaggatggtctccatctcctgacctcgtgatctgcccgcctcggcctccca

SEQ ID NO: 141718 - DNA, 201 bp, Homo sapiens; identical to SEQ ID NO: 25695

SEQ ID NO: 141719 - DNA, 201 bp, Homo sapiens; identical to SEQ ID NO: 25696

SEQ ID NO: 141720 - DNA, 201 bp, Homo sapiens
acaaatcccaacattggggcttttgcaacaatgttatgatgttggtgagtgatgaaaagcctggaataggtggagaaccacttctggggcaaaagataaascctaaatgtagcatatatcctaaaggagatggaagtgatgtaccatcatgggtagcctttgataaacaggtaagtcacatgacactgggaggaatgcagt

SEQ ID NO: 141721 - DNA, 201 bp, Homo sapiens
caacattggggcttttgcaacaatgttatgatgttggtgagtgatgaaaagcctggaataggtggagaaccacttctggggcaaaagataaagcctaaatrtagcatatatcctaaaggagatggaagtgatgtaccatcatgggtagcctttgataaacaggtaagtcacatgacactgggaggaatgcagtcttagcat

SEQ ID NO: 141722 - DNA, 201 bp, Homo sapiens; identical to SEQ ID NO: 25697

SEQ ID NO: 141723 - DNA, 201 bp, Homo sapiens
cagcaccaagaccagctgatagtataggccggctcctggatgtcaggggctacttttctctttcttacccagtactagctagaatttttaattttcctgcrgtaggattaacgaatgatcaggtacattataatttcacttgcttaacaaagaacaatacgtaaatacagattcttgaagttttgcctaaagccagttagg

SEQ ID NO: 141724 - DNA, 201 bp, Homo sapiens
aagtcataaagagtaactttggctattttatgttgtctcttatgttcacaggtgggaaaggagaagtttcacaaatcccaacattggggcttttgcaacartgttatgatgttggtgagtgatgaaaagcctggaataggtggagaaccacttctggggcaaaagataaagcctaaatgtagcatatatcctaaaggagat

SEQ ID NO: 141725 - DNA, 201 bp, Homo sapiens; identical to SEQ ID NO: 25699

SEQ ID NO: 141726 - DNA, 201 bp, Homo sapiens; identical to SEQ ID NO: 25698

SEQ ID NO: 141727 - DNA, 201 bp, Homo sapiens
tcacttaaggtcaagagttcgagggagcggcagcggcggccaggcacggcgcgaggcgacgccacaggacagcggcggcagcaggaaatgcagcggcggcmgcagcagcagcaaaacggatcggtggagaggcgccgccgccgccgggccgggcgtcgcgcgccgaggctcggggggagtcgtcgcagccgccgccaccgc

SEQ ID NO: 141728 - DNA, 201 bp, Homo sapiens; identical to SEQ ID NO: 25700

SEQ ID NO: 141729 - DNA, 201 bp, Homo sapiens; identical to SEQ ID NO: 25702

SEQ ID NO: 141730 - DNA, 201 bp, Homo sapiens; identical to SEQ ID NO: 25703

SEQ ID NO: 141731 - DNA, 201 bp, Homo sapiens; identical to SEQ ID NO: 25704

SEQ ID NO: 141732 - DNA, 201 bp, Homo sapiens; identical to SEQ ID NO: 25715

SEQ ID NO: 141733 - DNA, 201 bp, Homo sapiens; identical to SEQ ID NO: 25719

SEQ ID NO: 141734 - DNA, 201 bp, Homo sapiens; identical to SEQ ID NO: 25720

SEQ ID NO: 141735 - DNA, 201 bp, Homo sapiens
aatgtaagcattagtttctttttataataacttgggcagtcagttctgggcactgacaaaattgagtttgtgatcttggaatactttgattatggggatamagtgatttgcctaaataattgtgacccttagagattctgaggaactgacagcccaataccttaatcaaagcctgtaactcataagaccctggtttactgc

SEQ ID NO: 141736 - DNA, 201 bp, Homo sapiens
catccagatcaccttgactgctggattaagaaaagaaagtggtttagggagagactgacccctttagcatttaccacagaaaataagtgattaaagccaakatagtggtctaaggtcaagccaaaacatttcacctggggaagtggggaggaggtatggttgctcacccgaattcgctaagattttcctgaaccacgagct

SEQ ID NO: 141737 - DNA, 201 bp, Homo sapiens
ctcaggaacagcagaaatccaaagcagacaccacctccacccctcacatcagccagacctggagagaacgatcatcttgaatgacaatgatgaacacagcrctccctattttgctaagcgctgtgctaaactatatgccttaactcatcttaatgtctacaacagcttatatgagggctttaaaccaaggcttggtaaact

SEQ ID NO: 141738 - DNA, 201 bp, Homo sapiens
accccaaaccacaccttccccagcagcaggggcctcactctctgcagcaggggaacctcacctccaacaggggcaatctcaccctctccagcaggggggawcctgaccctctccaggagagggaatttcaccctctccagcagagggaaacctgaccctctccagcagggggaatctcaccctctccagcagagggaaacc

SEQ ID NO: 141739 - DNA, 201 bp, Homo sapiens
ctctagtgatccctgaaaagttccagcatattttgcgagtactcaacaccaacatcgatgggcggcggaaaatagcctttgccatcactgccattaaggtragtgaagtagggtaaggaatagggaatgtaaatgagaattgggttgtgaagacataagcaaaaatgaagcaaggctggggagacttgagtctcatccaga

SEQ ID NO: 141740 - DNA, 201 bp, Homo sapiens
gcctcttcctcctggaagctatataatgatatcgcgtcacttccgctctctcttccacaggaggcctacacgccgccgcttgtgctgcagccatggtaagrctggaatccgtgccgtgatccagcggcatcgcagctcgggcaaggaaagccggctgtcagggttctggaaacgtcctgccctgagggcctgcgactttct

SEQ ID NO: 141741 - DNA, 201 bp, Homo sapiens; identical to SEQ ID NO: 25721

SEQ ID NO: 141742 - DNA, 201 bp, Homo sapiens; identical to SEQ ID NO: 25722

SEQ ID NO: 141743 - DNA, 201 bp, Homo sapiens; identical to SEQ ID NO: 25714

SEQ ID NO: 141744 - DNA, 201 bp, Homo sapiens
aaacagtttccggaagcacttctcctagatcgcaccgcctcttcctcctggaagctatataatgatatcgcgtcacttccgctctctcttccacaggaggyctacacgccgccgcttgtgctgcagccatggtaagactggaatccgtgccgtgatccagcggcatcgcagctcgggcaaggaaagccggctgtcagggtt

SEQ ID NO: 141745 - DNA, 201 bp, Homo sapiens; identical to SEQ ID NO: 25716

SEQ ID NO: 141746 - DNA, 201 bp, Homo sapiens; identical to SEQ ID NO: 25717

SEQ ID NO: 141747 - DNA, 201 bp, Homo sapiens; identical to SEQ ID NO: 25718

SEQ ID NO: 141748 - DNA, 201 bp, Homo sapiens
ggtgatcttggggagagactgttcccaggcaaccctggagtctggctcagcgcacaaatctgtccagggcagatggccgggcccccgtgggcttggccttygcctccttatgatgctgctgctgaaggctctgccggaccttgtcctggggaccggagacggggaggacacaggcacagagtgagaagtggcaggctgaca

SEQ ID NO: 141749 - DNA, 201 bp, Homo sapiens
tcctccatatctgaggtcccagcccgcaacaccagttcccgggccgcagccgccatggtcgcagcggcggccattccccgcagcctcacttccggcaactrtcagtcccggcgagtccgttccccggagtggagctacaagtcccaaagggtcttcctcagcgcgaaatcgttcccagatatttgagttaagttgtttgac

SEQ ID NO: 141750 - DNA, 201 bp, Homo sapiens
gcaccggaactacggaggagaaacagctccgcgctctcaccagcgggccctcttcctcctccatatctgaggtcccagcccgcaacaccagttcccgggcsgcagccgccatggtcgcagcggcggccattccccgcagcctcacttccggcaactgtcagtcccggcgagtccgttccccggagtggagctacaagtccc

SEQ ID NO: 141751 - DNA, 201 bp, Homo sapiens
ctctgtgctggacccagtgactcttcctggggaatcatcaaacctgggggccccaaagcagccgcagccacagctccacatcctctccggcaggcatcccrtctgcctcctcccgggtgcgtcccacgtgcctggggatcttgctcactcactcttgctcccatgaggatgtaactccgctggggcaggtctttgtcttat

SEQ ID NO: 141752 - DNA, 201 bp, Homo sapiens
aggcccgtccctcacccctcagggcaagaacaaacccacgccccaaccctgttggcggtggagcagggacatccctgcagtgctttaagggcacacttgtyattttctgttcagctcatggcagcatgtgtgccttggaatctagatgtttctgtatccccaagggaacccaggctcaggctttaggctggaaaacaagac

SEQ ID NO: 141753 - DNA, 201 bp, Homo sapiens
caaagcagccgcagccacagctccacatcctctccggcaggcatcccgtctgcctcctcccgggtgcgtcccacgtgcctggggatcttgctcactcactsttgctcccatgaggatgtaactccgctggggcaggtctttgtcttatttgatattttatgcgccaggcctcctaggcactcagcaaattgacggatgaac

SEQ ID NO: 141754 - DNA, 201 bp, Homo sapiens
ccatgcagcctgggatctcactgctgctctccaagtgaggaattccagtaagccgtcttaagacttctttttggtttacctggcagaaccccacctcaaastggcttaagcaaagagggagatttgccggctccgatcctaaagagtccgggctgcaaccgggtgcaggggtcgtcgactgccagggctctgagtgctccc

SEQ ID NO: 141755 - DNA, 201 bp, Homo sapiens
ctgttgggggcagggcgtgagagcttcttctctgtgccaggccctacacagtgcatcgcaaacaccacggcttggtccttccagtgtctctctctcctttygaaggtgagaaggagccacgctgcctgtatgctcagtgccattcacggttgcttcatcaggctccactgcaacccccgcggatgcttcccgtgtggggct

SEQ ID NO: 141756 - DNA, 201 bp, Homo sapiens
agctgcgcacctctgagcctcagcttcctcgcctgtgaaatggagatattaaacatccacagtagcccaggtatggtggctcacacatgtaaccccagcayttagggagactgaggtgaatagatcacctgaggtcaggagttcaagaccagcctggccaacatggcaaaaccccgtctctactaaaaatacaaaaattag

SEQ ID NO: 141757 - DNA, 201 bp, Homo sapiens
catgcagccacttcaaaatattgaaaaaccaaaaatagttcctgaacttttaattgtttgggttaatatttgtgtgaatgtattagtaattttgagaacartagttgtcatggatacagatgagttgctatgggattcatattcctcctggataatttttagatgtggctgtgggtctcactgatattttaataactgatt

SEQ ID NO: 141758 - DNA, 201 bp, Homo sapiens
atggcgcttcatggaaggcgtccctcttgcttggcagcgtcactaagatgctgcatgagagcgttgtggagttatatatattctttcatgcatttggggcmttcttacacaagaagaaaattccaactgaagtaggagcttgttgagattggacagcggttccagtgatcacagcaagcatgtcctgagcaacgccctaat

SEQ ID NO: 141759 - DNA, 201 bp, Homo sapiens
ttgctatgggattcatattcctcctggataatttttagatgtggctgtgggtctcactgatattttaataactgatttgtttcctctaagtcgtaaagtayaaactttgaaggttattttggacttttgtttgttattttacaaaataaattcccaaggcaaagggtctggtggctgaccctgagctgacacccagccctc

SEQ ID NO: 141760 - DNA, 201 bp, Homo sapiens
gggtggggacctgggcgtggccactcagaacagccctgtcactggctgcagcaattggtacaggcatgggcacgtgactcaagaccggccaatgagagccraggagtttttttctaggacgtatttaaagagattatttccatggctgtgcaaaggccagctgtgccccgcagcaggtgagggccctcctgaaaaagtgcc

SEQ ID NO: 141761 - DNA, 201 bp, Homo sapiens
gtccctcttgcttggcagcgtcactaagatgctgcatgagagcgttgtggagttatatatattctttcatgcatttggggcattcttacacaagaagaaarttccaactgaagtaggagcttgttgagattggacagcggttccagtgatcacagcaagcatgtcctgagcaacgccctaatctatcacacacagacacac

SEQ ID NO: 141762 - DNA, 201 bp, Homo sapiens
tgtaatatcagctacttgggaggctggggcaagagaataacttgaagccgggaggcagaggctgcagtgagctgagatcacgccactgcactccagcctgsacaacaagagcaaaactccatctcaaataaataaataaataaaaatacaaaaattagccaggcatggtggcgtgtgcctgtaatcccagctacttgggag

SEQ ID NO: 141763 - DNA, 201 bp, Homo sapiens
tgctgtcggagcacgggaatgcacgggccagaaaaatgaccaaccccctgctgagattctggttatgagacagacagcagacccctagcagatgttaccaygcacgttgatgggggagagaaaaaccaagagagaaaattaaaataaacaggcacacaaccatcctactatctatcatcacctttatctcccatagggctt

SEQ ID NO: 141764 - DNA, 201 bp, Homo sapiens
tctgtgaacaagtgagataatacataaaaagtctttttttattttttattttattatttttttttgagatggagtttccctcttcttgcccgggctggagygcaatggcgtgatctcgctcaccacaagctccgcctcccaggttaaagagcttctcctgcctcaccctcccaagtagctggattacaagcatgagccacc

SEQ ID NO: 141765 - DNA, 201 bp, Homo sapiens
tctattctagaagagatgatacagacatgcgtgaatttccacacagtaaacttatcatgagtgagcccatcccaagagagagaggcagaccccctgggagkctccaccctcagtcacccatcaatgcactttgatgctgctggggctggtcggctgcaaaccccctttcccccacagacacaggccgaggcagaagcgagc

SEQ ID NO: 141766 - DNA, 201 bp, Homo sapiens
ggagccgccattatcttcacctgacaaatagaaacccatcttcagggctccactgaaacgccgcttccacgggggccctcctgggcgtcccaagcaagttyagggccccaaagcccacactctcacctctcagacacacagctttttatctctaccaccgtctgcccctcctggattccacgctctgcgagggcaagtctg

SEQ ID NO: 141767 - DNA, 201 bp, Homo sapiens
accaccgtctgcccctcctggattccacgctctgcgagggcaagtctgagcccagagcctcctccctctgtcccttgtactgagcgtggtgcccggcacgygggagaaagtcagtgggtgttttcggatgaatgagggacttttcttcttttatgcttgcatggttggcaaagccctttcttatggacgtgttcttaagac

SEQ ID NO: 141768 - DNA, 201 bp, Homo sapiens
tgcccctcctggattccacgctctgcgagggcaagtctgagcccagagcctcctccctctgtcccttgtactgagcgtggtgcccggcacgtgggagaaastcagtgggtgttttcggatgaatgagggacttttcttcttttatgcttgcatggttggcaaagccctttcttatggacgtgttcttaagacatatttatc

SEQ ID NO: 141769 - DNA, 201 bp, Homo sapiens
gatccagctaggaagtccgggaaaaggtcatcggggaaataagcgacgtcaagcacagtggatgaacgcgctgccgccgctccccacgcctcttgtggtgracatcacttacgcttcctcgtggtagacgtcacttaagcttccttatgccctcccagatgaccccccttgggccactacacacggctgcacccagcaaga

SEQ ID NO: 141770 - DNA, 201 bp, Homo sapiens
ctctcactgcgtgccagggactgtgagggaggtactttgtaagcatcaccgtactcaatccttgccatgggcccctgaagtaggcatcattatccttttayaaacgtctagtctgggccacagacctataaaacaacttgcaaagccccaccgtgtgaagccaggattggagcccacatttgcctggctttcaaaccagtg

SEQ ID NO: 141771 - DNA, 201 bp, Homo sapiens
tggctttcaaaccagtgccaatatgtgatggtctcagaggctaacttccagggagcagtctaggttccatcgtcgcggagttctgtgggcaggggcttgcrgtggctgcggcccctgcctgcctggggaggtggcacacagaagccctcagccgtgtcaccctttacagcttgggaacgtgcactacctcccagagtggca

SEQ ID NO: 141772 - DNA, 201 bp, Homo sapiens
agcagtctaggttccatcgtcgcggagttctgtgggcaggggcttgcagtggctgcggcccctgcctgcctggggaggtggcacacagaagccctcagccgtgtcaccctttacagcttgggaacgtgcactacctcccagagtggcaccggaagcaggccggtcctttgcagcatcatgttatttgaaatttccagtaat

SEQ ID NO: 141773 - DNA, 201 bp, Homo sapiens
gcagtctaggttccatcgtcgcggagttctgtgggcaggggcttgcagtggctgcggcccctgcctgcctggggaggtggcacacagaagccctcagccgtgtcaccctttacagcttgggaacgtgcactacctcccagagtggcaccggaagcaggccggtcctttgcagcatcatgttatttgaaatttccagtaatt

SEQ ID NO: 141774 - DNA, 201 bp, Homo sapiens
gcctgctcatcttggtaaaagccccgaactacaaatagatggctattaacagcatctgttgtaatagcagagacaatattctctggggccagcacgtcacmgcctggagccggccccaaacgtcatctgttattatgtttggagagtctggcacgcgctgaggcaatcgttcaattatatctccatgagccggttctgacg

SEQ ID NO: 141775 - DNA, 201 bp, Homo sapiens
ccagctcctccgctgcactctggtacacaccaagccttctccatcacgacaacgacgtgagctcatggacaggatgcgtggtgcccgggacacggcagaayctggccagtgagagcctttgccccttaatcagctgtttcaccccatgaaggcttcagtggcttccagttcgttgttttttgtttgtttgtttgttttaga

SEQ ID NO: 141776 - DNA, 201 bp, Homo sapiens
attcagcctaggggttcaaggctgcagtgattgacaccactacactccagcctgggtggcacagtgagacctgatctcaaaaacgcactattccatttaawcccttttaagaactggtttagctcaggcctgtgaaggtgaggacaggagccacaggacacgccaggcctctggggtgacatccccaagcaaggggactct

SEQ ID NO: 141777 - DNA, 201 bp, Homo sapiens
gcgtggtgcccgggacacggcagaacctggccagtgagagcctttgccccttaatcagctgtttcaccccatgaaggcttcagtggcttccagttcgttgttttttgtttgtttgtttgttttagagtgcttcctttacgtcaagcgttgtgctaaggacttcgtatttcccatgtgacttaaccgtaacagcagtcctat

SEQ ID NO: 141778 - DNA, 201 bp, Homo sapiens
gggggttccctgatggggcgaaggtggccgcccgaggctgtggcttggcctccagtggagcgatgtcgcctctttcccggcagttccagccaccatcccakggctgattctcaggggcccggctttggctgctcgtctggccagcccgagggtgaccccgcctggagcaaggtgtgtttggagagtgggaggcagcactcc

SEQ ID NO: 141779 - DNA, 201 bp, Homo sapiens
tcccttttaagaactggtttagctcaggcctgtgaaggtgaggacaggagccacaggacacgccaggcctctggggtgacatccccaagcaaggggactckgtatttggaagtgctctaaggtttcaagagcaggatatcccgaggatcctgtctcttaaggaaaaataaaaataaaagatccagctttctcttcgcatga

SEQ ID NO: 141780 - DNA, 201 bp, Homo sapiens
gcagccagaggaaggcacttgtctgggcttcctgcagcgctctgagaacagcccgctcctctgctggggaaggggtgacacagtcaatggagggggtggtstctgaacctggggcttgggatgggggcagagagcagctattcagccattctccatgggctgcccatttccaggtgggcttggggacagagaaaggcccaa

SEQ ID NO: 141781 - DNA, 201 bp, Homo sapiens
gattgtaccactgcatccagcctgggtgacagagcgagactctgtctcaaaaaaaaaaaaaaccatgttgcggtttgttggcgaaggccccacttcctttygccaccaccggcgccgaccctgttgcccctgtaatcccatctcctgctgcccctgacagtgccttcgccggctggtgcttccgcctgttccgttgtggtg

SEQ ID NO: 141782 - DNA, 201 bp, Homo sapiens
ccttgcctagggaaacacttaggggacggtggcccgtgactccatgccagcccctcccaagcccagccgccagctgaggtcctgaccaccttgtggactgsccggtgctcccgccctgcgcccgcccccacgtcctccctcctgctctccgtggttccctcgtgttgctgtgccagtagctgagcccccatgcccacccac

SEQ ID NO: 141783 - DNA, 201 bp, Homo sapiens
ttgttggcgaaggccccacttcctttagccaccaccggcgccgaccctgttgcccctgtaatcccatctcctgctgcccctgacagtgccttcgccggctrgtgcttccgcctgttccgttgtggtggctgctgtcaccagggtcctttccgctggtcgtccctttctgcctggagccgccattatcttcacctgacaaat

SEQ ID NO: 141784 - DNA, 201 bp, Homo sapiens
ggattacaggtgtgagccaccgcgcctggccatttcattatgattaagtggacacataggtcagccattcagaaggggaagtgactgtcttatttcttgcygatcaatttaagttctctttccattgtgtttcagctgcatttagttcactggaattctgtgaaataccaaaattacaaggaagctgtcgtgggagagaat

SEQ ID NO: 141785 - DNA, 201 bp, Homo sapiens
tctaatgcacctgctgttgggggcagggcgtgagagcttcttctctgtgccaggccctacacagtgcatcgcaaacaccacggcttggtccttccagtgtstctctctccttttgaaggtgagaaggagccacgctgcctgtatgctcagtgccattcacggttgcttcatcaggctccactgcaacccccgcggatgctt

SEQ ID NO: 141786 - DNA, 201 bp, Homo sapiens
acagtgcatcgcaaacaccacggcttggtccttccagtgtctctctctccttttgaaggtgagaaggagccacgctgcctgtatgctcagtgccattcacrgttgcttcatcaggctccactgcaacccccgcggatgcttcccgtgtggggcttgctgagtgccagcagcagtaaccccaactccagccaacgtaagcaa

SEQ ID NO: 141787 - DNA, 201 bp, Homo sapiens
ttttttttaagatggcgtctcgctctgtggcccaggctggagtacagtggcgtgatctcagctcaccacaacctccacttcccgggttcaagcgattctcytgcctcagcttcctgagtagctgggactataggtgcatgccaccactcctggctaatttttcgtatttttagtagagacagggtttcactgtgttagcca

SEQ ID NO: 141788 - DNA, 201 bp, Homo sapiens
agcgattctcctgcctcagcttcctgagtagctgggactataggtgcatgccaccactcctggctaatttttcgtatttttagtagagacagggtttcacygtgttagccaggttggtctcgaactcctaacctcgcgatccgcctgtctcagcctcccaaagtgctgggattgcaggcatcagccacggcgcccggccct

SEQ ID NO: 141789 - DNA, 201 bp, Homo sapiens
agctgggactataggtgcatgccaccactcctggctaatttttcgtatttttagtagagacagggtttcactgtgttagccaggttggtctcgaactcctracctcgcgatccgcctgtctcagcctcccaaagtgctgggattgcaggcatcagccacggcgcccggccctcttttttctttttttgatgaagttttgct

SEQ ID NO: 141790 - DNA, 201 bp, Homo sapiens
actggtggtttggccttgagagaaaagtcaaagagttacaaaacgctcagtgataattttagaaccaggcatgggggctcacacctgtaatcccagcactrttttgggaggctgatgtgggaggacagctcaagcacaggagttcaagatcagcctgggcaacatagcaagaacccatctctaaaaaaaaaaaaaaattaa

SEQ ID NO: 141791 - DNA, 201 bp, Homo sapiens
ttttactggctatttcctgctcaggtgtgtgtgagtcttcttgcatttggctccccccgggctgaccgtggttgggctgggctccccactctgggtgggtscaggcctgctcactgcatctctcatcctcccttcgcagccacctgaggcctgttcttctcacggcggagggcaggcactcacagggcgaggccagcggtg

SEQ ID NO: 141792 - DNA, 201 bp, Homo sapiens
gcctacgtagaaccctagggtgcttgagctgggaccaggagaaacgtgtagtaactctctttacacagacgaagctgcggagcccctgaagggtgtgcgakgcgcaatcaccaccactgccatcatcagacaacactttacaaaatgcctcctgccttgtctccatttatcctgcccgcccttctcatttaacaggtagag

SEQ ID NO: 141793 - DNA, 201 bp, Homo sapiens
ttgacccataggagcagctctgtaaatatttgttgactgattgaaaaagaggataacatttgtattgcctcccattggagccctactggaattagcacagmacctacgttgctgggcaccagggtcggctgtgtggagattggaagcctattcagcatccaggtggcgtcgcctccgtgcaggtggcaatgagcccttttg

SEQ ID NO: 141794 - DNA, 201 bp, Homo sapiens
tctggtctagatgagcacctcctctgtggcatcagtggctttagggttctgtctacattcaggtctgtgtagccatgttaaatgccccttgcccggcaggkaggactggaggcagcggccgtgggagggggggtagagtgcactcaatcctgcttcccgttggatgcaagggagatttgtgaggcctcaaaggggcttttt

SEQ ID NO: 141795 - DNA, 201 bp, Homo sapiens
ctttgtcattttctccaaaacccagtttcctttttatttctctcccactcagcttcacgtgctcccggtcccctccccgtctctgcagcccatttttccargttctcggtcctctccttcacagattttctgtcctctttgttcacctggattgggaatcgggagccgctggggatggagggaatgagaacctcagatgaa

SEQ ID NO: 141796 - DNA, 201 bp, Homo sapiens
ccgaggatcctgtctcttaaggaaaaataaaaataaaagatccagctttctcttcgcatgaggttattgcacagagaacaggtggggcagacacacaccasggggtgcaatcatgggacagctgcttcttcactcataagcttttctgcatttttttttttttttttttgaggcagagtctctgtcccccaggctggagtg

SEQ ID NO: 141797 - DNA, 201 bp, Homo sapiens
cgtggtgcccgggacacggcagaacctggccagtgagagcctttgccccttaatcagctgtttcaccccatgaaggcttcagtggcttccagttcgttgttttttgtttgtttgtttgttttagagtgcttcctttacgtcaagcgttgtgctaaggacttcgtatttcccatgtgacttaaccgtaacagcagtcctatg

SEQ ID NO: 141798 - DNA, 201 bp, Homo sapiens
gtgcacatgtgtgtttgtgtgtgcacatgtgttgtgtgtgcatgtgtgcacacgtgtgtttccatctccattctgtatgtagctcctgtttcttccctcaggcctgggtgtgaatatttttggggaagttaggtagaagtcagtgtcccctctctctctacagatattttctctgctttctggtcctcaagactgaaaaat

SEQ ID NO: 141799 - DNA, 201 bp, Homo sapiens
gtggtgcccgggacacggcagaacctggccagtgagagcctttgccccttaatcagctgtttcaccccatgaaggcttcagtggcttccagttcgttgttttttgtttgtttgtttgttttagagtgcttcctttacgtcaagcgttgtgctaaggacttcgtatttcccatgtgacttaaccgtaacagcagtcctatgg

SEQ ID NO: 141800 - DNA, 201 bp, Homo sapiens
tgcccgggacacggcagaacctggccagtgagagcctttgccccttaatcagctgtttcaccccatgaaggcttcagtggcttccagttcgttgttttttgtttgtttgtttgttttagagtgcttcctttacgtcaagcgttgtgctaaggacttcgtatttcccatgtgacttaaccgtaacagcagtcctatggtggg

SEQ ID NO: 141801 - DNA, 201 bp, Homo sapiens
ttacagtgggatttaaaatttgcagtgagattctctgtttcaccttgaaagaggctcaaggtgtatgaatcccacactagactgatgctgaagaggagccygtggaatccacacccgctggcatttccagtaaaaaggcctctgtgtcttcctgaaatgcgtgcgccccgcgcgggccacgttgctcttcaccgaactgcc

SEQ ID NO: 141802 - DNA, 201 bp, Homo sapiens
tcttgaacccgggaggtggaggttgcagtgagctgagatcacgccaccgcattccagcctgggcgacagagtgaaactctgtctcaaaaagaagaaaaagmagaagaagaaggaggagaagaagaattctgggacagctcggggtcgggaaggatgaagagatgcctgtgggctccagccctgctggaaacccttgggaaa

SEQ ID NO: 141803 - DNA, 201 bp, Homo sapiens
cagcaccttaccctgcagaggctcagggctcacaagtcccttccggtcccagcagctcccgttcctggcccttgttggttggccacagtctggagggtgasttttctactaggttttgtgggtggggatccggcaggcatcggctgtcagtggacttatgcctcatgcagttggcgtcgctctctttggaaccctatttat

SEQ ID NO: 141804 - DNA, 201 bp, Homo sapiens
tacttgcccagggtcacacagcaagttagaagcagagctgagttgcaaatccaggtctttaactatttctgtgttctgtggactttcctagagatcccagrcggttccccaactgccgtgggaaaggctcgattccactgtaacacacagagctgcttaccgaccaagtgattcgatgaataaatcagtggactgactaat

SEQ ID NO: 141805 - DNA, 201 bp, Homo sapiens
ttttttttttgagactgattctcactccgtcgcccagtctggagtacagtggcacgttctcagctcactgcaacctccgcctcccaggttcgagcaattcycctgcctcagcctcccgagtagctgggattacaggcacccgccaccacacccagctaatttttgtattttcagtagagatgggttacaccacgttggcca

SEQ ID NO: 141806 - DNA, 201 bp, Homo sapiens
cagccatcccaggagcacgctgtgctgctttcagtgaaaacgtgtggaacgggtaccccatttgtagcagctgctgatggaaatctgttagtgacaaagtrcttagacacaggagaagccacccacatccgaacccctggggagctcgttaaaaggcagactcccagcactacctggacgtgggaatggcagccatgactc

SEQ ID NO: 141807 - DNA, 201 bp, Homo sapiens
caggagaagccacccacatccgaacccctggggagctcgttaaaaggcagactcccagcactacctggacgtgggaatggcagccatgactctgggggccrgagccagaggcctcagcgagcgatgcttatggctgagccccacatgtcaggagaagcaagctcctgggaggctgcacctggcactgtgccatggagaggg

SEQ ID NO: 141808 - DNA, 201 bp, Homo sapiens
tgggaggaacataaagttacctcgcaatgcccagcaggtagcaggtgcccagcgaacgccagctcctccgctgcactctggtacacaccaagccttctccrtcacgacaacgacgtgagctcatggacaggatgcgtggtgcccgggacacggcagaacctggccagtgagagcctttgccccttaatcagctgtttcacc

SEQ ID NO: 141809 - DNA, 201 bp, Homo sapiens
cctgcagggagttgaggccctcaccaccacccagtggcagcactgggaccctgccttcattccacatttactgtgaacctctgggcaggcgctgggctggstgggggcagagtgaatgggacagacagagcccacctttcacggagcccacctttggcttgtcacttcaaccatacagcaaccccttgcgagtgaactcat

SEQ ID NO: 141810 - DNA, 201 bp, Homo sapiens
tcctcggggctgcttgagtaccctcccaatatggcgaccagcttccccccagagcaagtgatcctaaagaccaaggcggaagcggcaatgccttttataayctggccctgcacacaccatcacttccaccatatttattgatcatttcgggccatcctgattcagcatgggaggggaccacataaggcctgagggacaccc

SEQ ID NO: 141811 - DNA, 201 bp, Homo sapiens
tttgagtgcccatccctgtccaatcaactgtgaccaggggtgcgatcatgttggacaaaatgtcaggcagtggagccactgttgttatcatttggatccaraagcccatttcttttttcttttcttttcttttcttttctttttttttttttttttgagacagactctcgctctgtcacccaggctggagtgcagtggagc

SEQ ID NO: 141812 - DNA, 201 bp, Homo sapiens
ccaggattggagcccacatttgcctggctttcaaaccagtgccaatatgtgatggtctcagaggctaacttccagggagcagtctaggttccatcgtcgcsgagttctgtgggcaggggcttgcagtggctgcggcccctgcctgcctggggaggtggcacacagaagccctcagccgtgtcaccctttacagcttgggaa

SEQ ID NO: 141813 - DNA, 201 bp, Homo sapiens
caactgtgaccaggggtgcgatcatgttggacaaaatgtcaggcagtggagccactgttgttatcatttggatccaaaagcccatttcttttttcttttcttttcttttcttttctttttttttttttttttgagacagactctcgctctgtcacccaggctggagtgcagtggagctgtcttggctcactgcaacctccg

SEQ ID NO: 141814 - DNA, 201 bp, Homo sapiens
gtgcgatcatgttggacaaaatgtcaggcagtggagccactgttgttatcatttggatccaaaagcccatttcttttttcttttcttttcttttcttttctttttttttttttttttgagacagactctcgctctgtcacccaggctggagtgcagtggagctgtcttggctcactgcaacctccgcctcccgggttcaca

SEQ ID NO: 141815 - DNA, 201 bp, Homo sapiens
cgctctgtcacccaggctggagtgcagtggagctgtcttggctcactgcaacctccgcctcccgggttcacaccattctcctgcctcagcctcccgagtarctgggactacaggcgcctaccaccatgcctggctaatttttgtttgtatttttagtaaagacggggtttcaccgtgttagccaggatggcctcgatctcc

SEQ ID NO: 141816 - DNA, 201 bp, Homo sapiens
gtggagctgtcttggctcactgcaacctccgcctcccgggttcacaccattctcctgcctcagcctcccgagtagctgggactacaggcgcctaccaccaygcctggctaatttttgtttgtatttttagtaaagacggggtttcaccgtgttagccaggatggcctcgatctcctgacctcgtgatcctcctgcctcggc

SEQ ID NO: 141817 - DNA, 201 bp, Homo sapiens
cattctcctgcctcagcctcccgagtagctgggactacaggcgcctaccaccatgcctggctaatttttgtttgtatttttagtaaagacggggtttcacygtgttagccaggatggcctcgatctcctgacctcgtgatcctcctgcctcggcctcccaaagtgctgggattacaggcgtgagccaccatgcccagccca

SEQ ID NO: 141818 - DNA, 201 bp, Homo sapiens
aaggggccagaaagttacactgcaagtaaaaatatcagtaactatgtttactgggtggtgatggcataaacaatagtttttcctttttttttttttttttytttttttggagacaggatcttgctctgtcgcccaggctgcagtgcagtggtgcaatcacagcccactgcagcctcgacctcctgagctcaattgatcctc

SEQ ID NO: 141819 - DNA, 201 bp, Homo sapiens
agtaactatgtttactgggtggtgatggcataaacaatagtttttcctttttttttttttttttttttttttggagacaggatcttgctctgtcgcccagsctgcagtgcagtggtgcaatcacagcccactgcagcctcgacctcctgagctcaattgatcctcccacctcagcctcctgggtagttgcatctacaggtg

SEQ ID NO: 141820 - DNA, 201 bp, Homo sapiens
ctcaccttagcctcccaagtagctgggactacaggctcactccaccacgcctggccttgtttttcctttgtaaacatcgttctacaatgctgtgggtacawcgctttttcaatataaagtttcctttggaagtttataaatccagtttgggccttggaggaaagcagtcagtgatagaaatttcgtgactctgagtgagtt

SEQ ID NO: 141821 - DNA, 201 bp, Homo sapiens
ggaatggcagccatgactctgggggccagagccagaggcctcagcgagcgatgcttatggctgagccccacatgtcaggagaagcaagctcctgggaggcygcacctggcactgtgccatggagaggggcaccccgaggcctgcaggtagagagtgctgactccaaggtgagtgtttagggtgacttaggaaggaaggagt

SEQ ID NO: 141822 - DNA, 201 bp, Homo sapiens
atgtcaacccagctagaccatgcagtgagatattacttggcaatcagaaaggacacagctctaactcatgctgcggtgtgggtgagcctcaaaagcgccgygctgagtgagagacacaagacacaaatgttccacatgttacatgactcagttcctatgaaacccacagagacagaagcagcagggcgggggtggggacca

SEQ ID NO: 141823 - DNA, 201 bp, Homo sapiens
gtacaacgctttttcaatataaagtttcctttggaagtttataaatccagtttgggccttggaggaaagcagtcagtgatagaaatttcgtgactctgagkgagtttggtggagcttcgaattgtagattgtttcccagggaccgctgcagacacaaagccctgacctctggatccccagtgataaatgcgatcaaaggcg

SEQ ID NO: 141824 - DNA, 201 bp, Homo sapiens
ggaagacacctttttttttaattaaagtctggaaatcttataggacaggcaggcatcacagaaacgttctttacggatttctgcctgcagggagttgaggycctcaccaccacccagtggcagcactgggaccctgccttcattccacatttactgtgaacctctgggcaggcgctgggctgggtgggggcagagtgaatg

SEQ ID NO: 141825 - DNA, 201 bp, Homo sapiens
ctgcagggagttgaggccctcaccaccacccagtggcagcactgggaccctgccttcattccacatttactgtgaacctctgggcaggcgctgggctgggkgggggcagagtgaatgggacagacagagcccacctttcacggagcccacctttggcttgtcacttcaaccatacagcaaccccttgcgagtgaactcata

SEQ ID NO: 141826 - DNA, 201 bp, Homo sapiens
ggcccttggaaaaccactacagactgaagcaatttcacttccactggggagcagtgaacgaggggggctcagagcacacagtggacggccacgcgtacccygcagaggtttgtagacgtggcctaacagcacatatctgcacactttccatgtctccggctctatggtggggggtgaacaagccatgcgcgccgctcagat

SEQ ID NO: 141827 - DNA, 201 bp, Homo sapiens
agtagagatggggtttcgccatgttggccaggctggtctcgaactcctgacctcaagtgatccacccacctcagcctcccaaagtgctaggataacaggcrtgagccaccgtacccggctaagatcatcttaaagcagtcttattttcaaccttccaaagtgggagtcagtagagaaaatcagtgcatatcaatgttggga

SEQ ID NO: 141828 - DNA, 201 bp, Homo sapiens
gcagggacagagactcgcttgagggaggacacacctgggggatggtgtgaaggttctcgaggggacaggagcctggtgctcactttacagatgagaatacygccggcacctgcatgcacacaggtgcacctagcaaagaaaatccccttcccgtggggctcgccttgcagcgggtgggaggaagagacaagctcattgaaa

SEQ ID NO: 141829 - DNA, 201 bp, Homo sapiens
tcagctcactgcaagctctacctcctgggttcacaccattctcctgcctcagcctcctgagtacctgggactacaggctcccgccaccacgcccagctaattttttttttttgtatttttagtagagacaggatttcagcatgttagccagcatggtctcgatctcctgacctcgtgatccacccgcctccgcctcccaaa

SEQ ID NO: 141830 - DNA, 201 bp, Homo sapiens
caccacgcccagctaattttttttttttgtatttttagtagagacaggatttcagcatgttagccagcatggtctcgatctcctgacctcgtgatccaccygcctccgcctcccaaagtgctgggattacaggtgtgagccaccgcgcctggccatttcattatgattaagtggacacataggtcagccattcagaagggg

SEQ ID NO: 141831 - DNA, 201 bp, Homo sapiens
gggagcagtctaggttccatcgtcgcggagttctgtgggcaggggcttgcagtggctgcggcccctgcctgcctggggaggtggcacacagaagccctcakccgtgtcaccctttacagcttgggaacgtgcactacctcccagagtggcaccggaagcaggccggtcctttgcagcatcatgttatttgaaatttccagt

SEQ ID NO: 141832 - DNA, 201 bp, Homo sapiens
gggagagaatggtttggctgtgataggcgtgtttttaaaggtaatcacttgctcgggtgtagatctaatgaagaaagtggtgatccatcattaggattgcttttttttttttgagacaggactcgctgtgtcacacaggctggagtgcagtggcacagtctcggctcattgcaacctgcacctcctgggttcaagtgattc

SEQ ID NO: 141833 - DNA, 201 bp, Homo sapiens
atttctattctagaagagatgatacagacatgcgtgaatttccacacagtaaacttatcatgagtgagcccatcccaagagagagaggcagaccccctggsaggctccaccctcagtcacccatcaatgcactttgatgctgctggggctggtcggctgcaaaccccctttcccccacagacacaggccgaggcagaagcg

SEQ ID NO: 141834 - DNA, 201 bp, Homo sapiens
gcagaggcctgcaaggaagttgggtccacagcagggcaggggcattgggagcctggaaatgagaccactgcaggcttcagcaggcagtgacctggccgacattttattttattttattttattttatattgagacagagtcttgctctgtcattcaggatggagtgccatggcgcaatctcagctcactgcaacctctgtc

SEQ ID NO: 141835 - DNA, 201 bp, Homo sapiens
ggccaaggacgatgagtaacagaggtggcggcaagggctctttccagggagcgtgtatggccttgaaggccaaggaggaaaggctgggggagcaaagcggkgggaggagggaagggggagaggagaggtgccagtcacaaaggaaaacagcagccagatccacgcgctgccacactgtgcctgtcccaccttgagtgcccc

SEQ ID NO: 141836 - DNA, 201 bp, Homo sapiens
tgcctagggaaacacttaggggacggtggcccgtgactccatgccagcccctcccaagcccagccgccagctgaggtcctgaccaccttgtggactgcccsgtgctcccgccctgcgcccgcccccacgtcctccctcctgctctccgtggttccctcgtgttgctgtgccagtagctgagcccccatgcccacccactgc

SEQ ID NO: 141837 - DNA, 201 bp, Homo sapiens
catggcagcatgtgtgccttggaatctagatgtttctgtatccccaagggaacccaggctcaggctttaggctggaaaacaagacaattgcagatggtaaktatcccccaggatcacaagtcaaagcctgcttttggtcaagaatctcaacctgcgtgcctgtctgtgtggcacaccctcctcaggaacagcctcgcaact

SEQ ID NO: 141838 - DNA, 201 bp, Homo sapiens
gctttcctggtttcctccagttaaggaacaagttgtcctgaattagggcaggaaagaccagagtcacgtagtccccatcatctctcctggttccaggctgrtccgggccctgctgtgggactgactcggcagagaccctccaggaatgcctgccacggtcactccctggggacccagctggcttctatgcagtgctcaggg

SEQ ID NO: 141839 - DNA, 201 bp, Homo sapiens
tgggatgtcaacccagctagaccatgcagtgagatattacttggcaatcagaaaggacacagctctaactcatgctgcggtgtgggtgagcctcaaaagcsccgtgctgagtgagagacacaagacacaaatgttccacatgttacatgactcagttcctatgaaacccacagagacagaagcagcagggcgggggtgggg

SEQ ID NO: 141840 - DNA, 201 bp, Homo sapiens
tgactctgagtgagtttggtggagcttcgaattgtagattgtttcccagggaccgctgcagacacaaagccctgacctctggatccccagtgataaatgcsatcaaaggcgagtgtggtcggacgtgcgctgcaacgcgagtcgaggtttcatcgagcctcattcggtggctcctggggcagttgtgtggatgaagagggc

SEQ ID NO: 141841 - DNA, 201 bp, Homo sapiens
ctcacccgtcaactcggtgcccggcgttttccttagctcctctgtggattaactctcgttccgaagacgggaggccgaggtttcatctcagctctgttccyggctcatggctgcgcttctctgtgcccatcccctcccctgacgaggggaatgagaaccttgcctagggaaacacttaggggacggtggcccgtgactcca

SEQ ID NO: 141842 - DNA, 201 bp, Homo sapiens
cggtgcccggcgttttccttagctcctctgtggattaactctcgttccgaagacgggaggccgaggtttcatctcagctctgttcccggctcatggctgcrcttctctgtgcccatcccctcccctgacgaggggaatgagaaccttgcctagggaaacacttaggggacggtggcccgtgactccatgccagcccctccc

SEQ ID NO: 141843 - DNA, 201 bp, Homo sapiens
gcccccacgtcctccctcctgctctccgtggttccctcgtgttgctgtgccagtagctgagcccccatgcccacccactgcaactgccccttccctccctscaggcttccccactgcgttgctcccctgcaggggccagtgagtggctctagctgtgttcagacggctctgtgcctcctcctcctcccaccccagttcctc

SEQ ID NO: 141844 - DNA, 201 bp, Homo sapiens
ccccacgtcctccctcctgctctccgtggttccctcgtgttgctgtgccagtagctgagcccccatgcccacccactgcaactgccccttccctccctccwggcttccccactgcgttgctcccctgcaggggccagtgagtggctctagctgtgttcagacggctctgtgcctcctcctcctcccaccccagttcctcag

SEQ ID NO: 141845 - DNA, 201 bp, Homo sapiens
gggaaacacttaggggacggtggcccgtgactccatgccagcccctcccaagcccagccgccagctgaggtcctgaccaccttgtggactgcccggtgctyccgccctgcgcccgcccccacgtcctccctcctgctctccgtggttccctcgtgttgctgtgccagtagctgagcccccatgcccacccactgcaactgc

SEQ ID NO: 141846 - DNA, 201 bp, Homo sapiens
cagccttggagacagacgggggtgcagcggggctgaacggcactgcaagctcgtggggctgggggtccgcatctgcacccgccgcgtggctagcacccccygagtgttttggtcaatatgccatcatcccacccctcagtgctgctggcggttgcctgacgaaaagctgcacttaatagaaatcactgtggatgcaggaga

SEQ ID NO: 141847 - DNA, 201 bp, Homo sapiens
ctgcaagctcgtggggctgggggtccgcatctgcacccgccgcgtggctagcaccccctgagtgttttggtcaatatgccatcatcccacccctcagtgcygctggcggttgcctgacgaaaagctgcacttaatagaaatcactgtggatgcaggagatggacggtgatgagctcaggaccagccagcaaccccatcagg

SEQ ID NO: 141848 - DNA, 201 bp, Homo sapiens
aggctgaggcagaattgcttgaacctaggaggcggaggctgcagtgagccaagattgtaccactgcatccagcctgggtgacagagcgagactctgtctcaaaaaaaaaaaaaaccatgttgcggtttgttggcgaaggccccacttcctttagccaccaccggcgccgaccctgttgcccctgtaatcccatctcctgct

SEQ ID NO: 141849 - DNA, 201 bp, Homo sapiens
ccactgcatccagcctgggtgacagagcgagactctgtctcaaaaaaaaaaaaaaccatgttgcggtttgttggcgaaggccccacttcctttagccaccwccggcgccgaccctgttgcccctgtaatcccatctcctgctgcccctgacagtgccttcgccggctggtgcttccgcctgttccgttgtggtggctgctg

SEQ ID NO: 141850 - DNA, 201 bp, Homo sapiens
cagaggcctgcaaggaagttgggtccacagcagggcaggggcattgggagcctggaaatgagaccactgcaggcttcagcaggcagtgacctggccgacattttattttattttattttattttatattgagacagagtcttgctctgtcattcaggatggagtgccatggcgcaatctcagctcactgcaacctctgtct

SEQ ID NO: 141851 - DNA, 201 bp, Homo sapiens
cactgcatccagcctgggtgacagagcgagactctgtctcaaaaaaaaaaaaaaccatgttgcggtttgttggcgaaggccccacttcctttagccaccaycggcgccgaccctgttgcccctgtaatcccatctcctgctgcccctgacagtgccttcgccggctggtgcttccgcctgttccgttgtggtggctgctgt

SEQ ID NO: 141852 - DNA, 201 bp, Homo sapiens
agaggcctgcaaggaagttgggtccacagcagggcaggggcattgggagcctggaaatgagaccactgcaggcttcagcaggcagtgacctggccgacattttattttattttattttattttatattgagacagagtcttgctctgtcattcaggatggagtgccatggcgcaatctcagctcactgcaacctctgtctc

SEQ ID NO: 141853 - DNA, 201 bp, Homo sapiens
gaggcctgcaaggaagttgggtccacagcagggcaggggcattgggagcctggaaatgagaccactgcaggcttcagcaggcagtgacctggccgacattttattttattttattttattttatattgagacagagtcttgctctgtcattcaggatggagtgccatggcgcaatctcagctcactgcaacctctgtctcc

SEQ ID NO: 141854 - DNA, 201 bp, Homo sapiens
aggcctgcaaggaagttgggtccacagcagggcaggggcattgggagcctggaaatgagaccactgcaggcttcagcaggcagtgacctggccgacattttattttattttattttattttatattgagacagagtcttgctctgtcattcaggatggagtgccatggcgcaatctcagctcactgcaacctctgtctcct

SEQ ID NO: 141855 - DNA, 201 bp, Homo sapiens
gggattacaggcgtgagccaccacacccagcctagaaacagcctctgctctaagagtgcaactggatgggacttaactcagtcttacaaatggcatctacsaggctgggtccagtctaatttgtccatgaagcatccatcatccctgccttctaggcatttctattctagaagagatgatacagacatgcgtgaatttcca

SEQ ID NO: 141856 - DNA, 201 bp, Homo sapiens
gtaccaaaggagaatttggagagctggctaaattatttgaagaaagaattgccaacagtggtgttcagagcctcaacaaaaccaaaggataaagggaagawaaccaaggtatcctttattagtggtaagaaatgtgattctttcagattttggttgaaatatgatgagtgtacaaaatcttgatttaagtgaatgaaaaat

SEQ ID NO: 141857 - DNA, 201 bp, Homo sapiens
ggcagctgaccagggggagcggccccacccgccctgggcccggccttacccagccgctccgccgcctgcagccccggccgcggtcaccgaccgccgcgccycgccccgtggccgccacggctgctgctattgctcctccggccgcggccgctgccgtcgcttcggcacccgccgccctcacctcccttacccctcccggtg

SEQ ID NO: 141858 - DNA, 201 bp, Homo sapiens
acagtagtaatgaggtttaaaagactcaagtcatttttttttaaccttttaagatgaagggtgcatgtgcaggtttgttatatgggtaaacttgcgtcatmggggtttgctgtacagattatttcatcacccaggtattaagcctagtacgacattagttatctttcctgatcctctccctcctcccaccttttcaccaac

SEQ ID NO: 141859 - DNA, 201 bp, Homo sapiens; identical to SEQ ID NO: 25728

SEQ ID NO: 141860 - DNA, 201 bp, Homo sapiens
tatctggcctctactataaatacaagtcccattgattaaaatacccggaaaaaatacggaaagaaaatcactaagagtttgtgtcgaaccgtcaagaaacmacaacaaaaaaaagaggccctgagcaacggaggaaatgaaggactttcccgacctgtcactggtattggggactgagggaaacgttgacagctttgaagc

SEQ ID NO: 141861 - DNA, 201 bp, Homo sapiens
aaacagaattcaaagaagctgtactgccaagaacttaaaaaggtatcttagcctaggtcagtgtctgacagtagtaatgaggtttaaaagactcaagtcatttttttttaaccttttaagatgaagggtgcatgtgcaggtttgttatatgggtaaacttgcgtcatcggggtttgctgtacagattatttcatcacccag

SEQ ID NO: 141862 - DNA, 201 bp, Homo sapiens
gcatgtcagatgaaggacagctcctttgtttggttttttttttaaggtagtactgaaatatactgtcccaggctacaggaattctctggaattttttactrtgcttgctcagagaagaggtatgcaccaaaaaggtggaatcccaaatgttgaaggtgctgccaaactgctgtggtctgagtggacagggtaagctttctt

SEQ ID NO: 141863 - DNA, 201 bp, Homo sapiens
ttatgctgtttaatgcctttcctgctatgtttacctgacggaaatagtttctttggttctaaatatttgcacaaaactggttctgcctgtaagcatgattyacaacattaaaaaaaaacgttgacatagtgttgagattgagaaaggtacattggagtaagcagtgtcaggctaaaggtctctaaagtactctgttgaaac

SEQ ID NO: 141864 - DNA, 201 bp, Homo sapiens
cgcacgcagagaggcggtgacgcactttacggcggcagcgtaagtgcgtgacgctcgtcagtggcttcagttcacacgtggcgccagcggaggcaggttgmtgtgtttgtgcttccttctacagccaatatgaaaaggcctagtaagtggggtcgggaggcgggcgtggagggacccacgtctggaagttgctgcagccac

SEQ ID NO: 141865 - DNA, 201 bp, Homo sapiens
ttgggcctgagtgcagtggcacaatcacaactcactgcaacctggaccacccaggctcaagcagtcttaccacctcagtctccaagtagctgggactacaraagcacaccatcacgcctggctaattttttttagcagacacgggctttcactatattgccaaggctggtctcaagtgatccacccaactcagcctcccga

SEQ ID NO: 141866 - DNA, 201 bp, Homo sapiens
ttctgcttaagtataaagatatttttgtaagcagacaaaatctctttattttaataggttcgagaacatcatcgaaaattaagaaaggaggctaaaaagcrgggtcacaagaagcctaggaaagacccaggagttccaaacagtgctccctttaaggaggctcttcttagggaagctgagctaaggaaacagagggtaagt

SEQ ID NO: 141867 - DNA, 201 bp, Homo sapiens
tttctttcccagccatcaagggccctcatttggccaatagcatccttttccagtcttccggtctgacaaatggaataatagaagaaaaggacatacatgargaattgccaaaacggaaagaaaggaagcaggaggagagggaggatgacaaagacagtgaccaggaaactgttgatgaagaagttgatgtaagtgtgtcct

SEQ ID NO: 141868 - DNA, 201 bp, Homo sapiens
atattatagtgacacactattttattttggttatctcaaggaaggtgattttttttttttttttttttgagacagtttcactcttgttcccaggctggagkgcaatggcgcaatctcggctcactgcaacctccacctctcaggttcaagtgattctcctgcctcagcctccagagtagctgggattacaggcatgtgccc

SEQ ID NO: 141869 - DNA, 201 bp, Homo sapiens
cctgcctttgcattacttgtgcaagaaatgaagaaactaaaattggtcttagtattgaagtgaagacactgagatccaactctgatcttgccctaaacatyagggaaatggaaaattaggcagtgaaaatttcataagtgccaacatataatgctttttatatctggatttcccatttatttgtaggtttcccaaatgtgg

SEQ ID NO: 141870 - DNA, 201 bp, Homo sapiens
agctcctttgtttggttttttttttaaggtagtactgaaatatactgtcccaggctacaggaattctctggaattttttactatgcttgctcagagaagasgtatgcaccaaaaaggtggaatcccaaatgttgaaggtgctgccaaactgctgtggtctgagtggacagggtaagctttcttttctgttggcattttggt

SEQ ID NO: 141871 - DNA, 201 bp, Homo sapiens
agcagacaagggctactaatccagcactatttttctttgtcacacaggaaaacagctcaggcatgtttgctgcagaagagacaggggaggcactgtctgargagactacagcaggtgaggcaggcaaaaggggttctaacgaagcagcatggtatagaatcacttttactttttgaaaatctctttattttcctgcaatat

SEQ ID NO: 141872 - DNA, 201 bp, Homo sapiens
tcgctgctgtcttcatcagctgacaggccagtggagctcttacctgtttacatgggcttgctttctttcccagccatcaagggccctcatttggccaatascatccttttccagtcttccggtctgacaaatggaataatagaagaaaaggacatacatgaagaattgccaaaacggaaagaaaggaagcaggaggagagg

SEQ ID NO: 141873 - DNA, 201 bp, Homo sapiens
ggcatgtgcccccacgcccggctaattttgtatttttaatagagacgggtttctccatgttggttaggctggtctcaaactcctgacttcagctgatctgmccgcctcggcctcccaaagtgctggggttacaggccaagccaccgcgcccggcctatttttattttttaaagcttttggtgaaagcagagatttaagcca

SEQ ID NO: 141874 - DNA, 201 bp, Homo sapiens; identical to SEQ ID NO: 25731

SEQ ID NO: 141875 - DNA, 201 bp, Homo sapiens; identical to SEQ ID NO: 25732

SEQ ID NO: 141876 - DNA, 201 bp, Homo sapiens
tttttaatatcagtgcctcattagcttactattgccatccccctacatcttggactcctcctccatattttaatgagagtattgtggtagacatgaaaagyggcttcaatctggaagaactggaaaagaacaatgcacagagcataagaggtgagaattgtgtgtcgctgctgtcttcatcagctgacaggccagtggagc

SEQ ID NO: 141877 - DNA, 201 bp, Homo sapiens
cagcttattgtgtagtatatttcatctaggaagtgatgacagtgtgacaaattccccacacctacacaatgtcgggtattagttcaagagtgaaataaatyggaacgtatgtgacaaaatatttaaatgaaatgcataattatgcatctgagtttgagcagcaggaaaaagaaaacccagaacagagaattacaaagcaga

SEQ ID NO: 141878 - DNA, 201 bp, Homo sapiens
tcagagaagaggtatgcaccaaaaaggtggaatcccaaatgttgaaggtgctgccaaactgctgtggtctgagtggacagggtaagctttcttttctgttsgcattttggtgaccactagaataaaccttcttttgacacatcttatttttaatatcagtgcctcattagcttactattgccatccccctacatcttggac

SEQ ID NO: 141879 - DNA, 201 bp, Homo sapiens
agtgctgggattacaggcgtgagccaccgcgcccagccagaaggtggcatatttatagcaaaggaaatagcatgtgttttggttgatgtaaatatataagytataacatgtagtgttctctttagaacagtcgggtatgctgttacagttttagataaatgtgaagcaaatgatgataaactggatctgactgactgtgct

SEQ ID NO: 141880 - DNA, 201 bp, Homo sapiens
gcgtgcccgcgcacgcagagaggcggtgacgcactttacggcggcagcgtaagtgcgtgacgctcgtcagtggcttcagttcacacgtggcgccagcggargcaggttgctgtgtttgtgcttccttctacagccaatatgaaaaggcctagtaagtggggtcgggaggcgggcgtggagggacccacgtctggaagttgc

SEQ ID NO: 141881 - DNA, 201 bp, Homo sapiens
ttgccagcagtatggaaagaaaggttggggatctccaggaaacagaaagaaggagcaaaagaatcacatttgaaaatcctggtgagcaattaaggaaaaaragaagtctcagatctctttttccaaactaaagtccacatggtgtttaaaacaaaatctaccacgatgatgttccttactctaggcttcggtttgttatac

SEQ ID NO: 141882 - DNA, 201 bp, Homo sapiens
acagtacctgacagttcttccattttaaaaccaaatgctttcatatgtttaaagatgtctcattgaggttcccctttactcacattaggaatgactgtcarttccaggaatgaggcatgcctgcccaactgccccctagtcaataagagcagagttcaatcacagagctggaatggagagtgaatacatgtgggaggctca

SEQ ID NO: 141883 - DNA, 201 bp, Homo sapiens
gcccggctaatttttgtgattttagtggagacggggtttcactgtgttggccagactagtctcaaacgcctgacctcaagtgatccacccacctcggcctyccaaagtgctgggattacaggcatgagccaccgcgcccggccagtgcggtcttttttttttgtatccacagttttgtatccttggattcaaccaaccacg

SEQ ID NO: 141884 - DNA, 201 bp, Homo sapiens
gcgccaccacgcccggctaatttttgtgattttagtggagacggggtttcactgtgttggccagactagtctcaaacgcctgacctcaagtgatccacccrcctcggccttccaaagtgctgggattacaggcatgagccaccgcgcccggccagtgcggtcttttttttttgtatccacagttttgtatccttggattca

SEQ ID NO: 141885 - DNA, 201 bp, Homo sapiens
caaagctcagagataaaaggagcttgaaaacacctatttggtccatagggtttcttttgcattattccctcattggtttggagacattatttgaaactaamatgtagtgttttatcttcatcaggtcctggctcaacagtgattccctgaaaagcatcagatacaaaattgtcaattttgaccctaaacttttggaaggaa

SEQ ID NO: 141886 - DNA, 201 bp, Homo sapiens; identical to SEQ ID NO: 25758

SEQ ID NO: 141887 - DNA, 201 bp, Homo sapiens
ttctccaacttatttttaagttttttattaatgagtaccacaaaaatttcagatcccaaattgggttcttgggaactgtgaattcaaaatgagtttctggyggaatactgtatatgcctcttgtttcttcctgaattaaaaaaaaaaaaaaagtgttagggcattttgatgtcccttctcatgtgcttactgactttgggg

SEQ ID NO: 141888 - DNA, 201 bp, Homo sapiens
aagaaagcttaccctgtccactcagaccacagcagtttggcagcaccttcaacatttgggattccacctttttggtgcatacctcttctctgagcaagcayagtaaaaaattccagagaattcctgtagcctgggacagtatatttcagtactaccttaaaaaaaaaaccaaacaaaggagctgtccttcatctgacatgc

SEQ ID NO: 141889 - DNA, 201 bp, Homo sapiens
agggattgtcctgcctcagccttctgagtagctgggattacaggcatgcgccaccacgcccggctaatttttgtgattttagtggagacggggtttcactrtgttggccagactagtctcaaacgcctgacctcaagtgatccacccacctcggccttccaaagtgctgggattacaggcatgagccaccgcgcccggcca

SEQ ID NO: 141890 - DNA, 201 bp, Homo sapiens
tgacctcaagtgatccacccacctcggccttccaaagtgctgggattacaggcatgagccaccgcgcccggccagtgcggtcttttttttttgtatccacrgttttgtatccttggattcaaccaaccacggactgaaattacagatacagagggctgactgtaatatgccattttacataagggacttgagcatccgtga

SEQ ID NO: 141891 - DNA, 201 bp, Homo sapiens
ggcggaatactgtatatgcctcttgtttcttcctgaattaaaaaaaaaaaaaaagtgttagggcattttgatgtcccttctcatgtgcttactgactttgrgggcttgtttttgttttgtagggttaaaaactaatatttatatgacagaagaaaaagatgtcattccgtaaaggtatgctctttctacaagttaagttgt

SEQ ID NO: 141892 - DNA, 201 bp, Homo sapiens
aggacacacttacatcaacttcttcatcaacagtttcctggtcactgtctttgtcatcctccctctcctcctgcttcctttctttccgttttggcaattcytcatgtatgtccttttcttctattattccatttgtcagaccggaagactggaaaaggatgctattggccaaatgagggcccttgatggctgggaaagaaa

SEQ ID NO: 141893 - DNA, 201 bp, Homo sapiens
aatccttaccttccctttttccatgtcttggactctatatcaaaagcccatgagattgtaatcacagtgccttccttgtgttttcagattcaggaattgtrgggcctcaacctatagactttgtcccaaatgctctccgacatgcagtagatgggagacaagaggagattcctgtggtcatcgctgcatctgaagacaggc

SEQ ID NO: 141894 - DNA, 201 bp, Homo sapiens
accaaaatgccaacagaaaagaaagcttaccctgtccactcagaccacagcagtttggcagcaccttcaacatttgggattccacctttttggtgcatacstcttctctgagcaagcatagtaaaaaattccagagaattcctgtagcctgggacagtatatttcagtactaccttaaaaaaaaaaccaaacaaaggagct

SEQ ID NO: 141895 - DNA, 201 bp, Homo sapiens
gatgaggtttcaccatgttggtcaggctggtctcaaattcctgacctcaagtgatccacccgcctcagcctcccaaagtgctgggattacaggcgtgaccyaccatgcccggcctctatttcagttttctattgcaatccagaaactttttctgtataaattgattgtgactcactcaattggtttcatgcctacttgtga

SEQ ID NO: 141896 - DNA, 201 bp, Homo sapiens
aaaaaaaagtgttagggcattttgatgtcccttctcatgtgcttactgactttgggggcttgtttttgttttgtagggttaaaaactaatatttatatgayagaagaaaaagatgtcattccgtaaaggtatgctctttctacaagttaagttgtttttatacctggtcaaagataaagaggtataacataggttttccct

SEQ ID NO: 141897 - DNA, 201 bp, Homo sapiens
tttagagcaggccagctgccaatccaggatctgtttttctgtggtttgtatgttgttttatacaattgaaattgtaccagtgataaactgtacaaatgacrtattttttttaggactgtattatgagcatatccccataataggagaagtgatacaaggagctcatgccaggaagtaagtcagctgtcactctgaactgtt

SEQ ID NO: 141898 - DNA, 201 bp, Homo sapiens
ctgtattatgagcatatccccataataggagaagtgatacaaggagctcatgccaggaagtaagtcagctgtcactctgaactgttaaccccacctgatgrtgttttgataataatactttctcagtgaagggagcagtaaatgttgatttacaagtcacaagttccttatttcatggacatgctcggagcagttctggtc

SEQ ID NO: 141899 - DNA, 201 bp, Homo sapiens
cggggcgcgggctgcatccgcatctcctccatcgcctgcagtaagggcggccgcggcgagcctttgaggggaacgacttgtcggagccctaaccaggggtrtctctgagcctggtgggatccccggagcgtcacatcactttccgatcacttcaaagtgtaaggggggccctactgacccttggaatttaggggggctacc

SEQ ID NO: 141900 - DNA, 201 bp, Homo sapiens
gacttagcaacaatggcaaggtagtgttgtgatgctgatcacagatcctgatccaaatcctggcccagagtgatctggggaaacttggatagtctaatccrttttgaaaatgaataagacttataaaacttactccaaatttgttggtctaacaaattaaccagttgtcaaatttctgaaacattttggtccttgtggccc

SEQ ID NO: 141901 - DNA, 201 bp, Homo sapiens
cctctcctcctgcttcctttctttccgttttggcaattcttcatgtatgtccttttcttctattattccatttgtcagaccggaagactggaaaaggatgstattggccaaatgagggcccttgatggctgggaaagaaagcaagcccatgtaaacaggtaagagctccactggcctgtcagctgatgaagacagcagcga

SEQ ID NO: 141902 - DNA, 201 bp, Homo sapiens
accataacttcctcagcttgagcagtttgttaaggaatgaggttacaggtatgcgagcacttattaataatgccttagaatctgttgcggacctggtattstctgtgtcacacatcctaagttgttcttcttccggtagtactagcagttgtttgttaagggtttgatctgacagaatattccttttcaccaaatcagagg

SEQ ID NO: 141903 - DNA, 201 bp, Homo sapiens
ctgtagacttcttcatggacttgacagcctaattgttcttgaacatctggtttattatgtcaacatctaggttcctattctaacttggaatttcaaatatytattttctaatctgaagaagtcagtttaacagctcttctctctactggctataaaattgtatctattttgtttgaagcagtaagtacatatatcctattt

SEQ ID NO: 141904 - DNA, 201 bp, Homo sapiens; identical to SEQ ID NO: 25749

SEQ ID NO: 141905 - DNA, 201 bp, Homo sapiens
ctgcacctggctaatttttttgcagtttttagtagagacgaggtttcaccatcttggccaggctggtcttgaactcctgacctcatgatccaccccactcrgcctcccaaagtgctgggattataggccagaccctgcctggctgaaacttaattcttaaatgtttcttttgcttttcatcttgtgatgtataatgtacaa

SEQ ID NO: 141906 - DNA, 201 bp, Homo sapiens
gctccactggcctgtcagctgatgaagacagcagcgacacacaattctcacctcttatgctctgtgcattgttcttttccagttcttccagattgaagccrcttttcatgtctaccacaatactctcattaaaatatggaggaggagtccaagatgtagggggatggcaatagtaagctaatgaggcactgatattaaaaa

SEQ ID NO: 141907 - DNA, 201 bp, Homo sapiens
gtccaagatgtagggggatggcaatagtaagctaatgaggcactgatattaaaaataagatgtgtcaaaagaaggtttattctagtggtcaccaaaatgcsaacagaaaagaaagcttaccctgtccactcagaccacagcagtttggcagcaccttcaacatttgggattccacctttttggtgcatacctcttctctga

SEQ ID NO: 141908 - DNA, 201 bp, Homo sapiens
tcaggtgatattcttgccctttacaatacagcactgaagccaggacatgcagctgcattttcagaagattgtgattcagcctctactaaagttgtcatccrtggagcaggaaaccaggtaaattgcttaccaaacacccctcttcctacaatattgtttaatgggaagaggttgcaaattcagggaactcttttgctgcaa

SEQ ID NO: 141909 - DNA, 201 bp, Homo sapiens
ggctggagtgcaatggcatgatctcggctcactgcaacctctgttgcccaggttcaagcgattctcctgcctcagcctcctgagcagctgggattacaggsccctgccactgcacctggctaatttttttgcagtttttagtagagacgaggtttcaccatcttggccaggctggtcttgaactcctgacctcatgatcca

SEQ ID NO: 141910 - DNA, 201 bp, Homo sapiens
tccttgctctactggaactgctcttactgatcgattactacttttccctccccatagttaccgtacacgagaagaaattcaggaagtaagaagtaagagtraccctattatgcttctcaaggacaggatggtgaacagcaatcttgccagtgtggaagaactaaaggtacagtcacttgttcatggtggtttgaaggttgg

SEQ ID NO: 141911 - DNA, 201 bp, Homo sapiens
aacaaacaaaagaatggcataaacagacacagctcacagatgatctagtctctttagccactaatttcattatattctcactataatttctttgaaaacamaggatgggtttgttttttgcccctctttgcgctgcttgccttcagatgcgggataatcctgtttcattggccaaagcatggattcattttggaggccaag

SEQ ID NO: 141912 - DNA, 201 bp, Homo sapiens
cactatgttgcccaggctagtctcaaacttctgggctcaagtggtccgcccaccttggcctcccaaggtgctaggattacaggcgtgagccactgtgcctsgctgaagccagtattttagaattaaaaagtagaatgccaaaacctgctatgaagcttaggctaaagaattcattcacacataacattgccagttttctgt

SEQ ID NO: 141913 - DNA, 201 bp, Homo sapiens
caagaacttctacgggggcaatggcatcgtgggagcgcaggtagtcaaggacgaggattgtgtgctgctttagatttggccctggactttgtcttcaaaamctttcacagccccagacaacttttcctgaagtagtacagccatgtgctgcacagtgacgctttggtcaatgtcgcatatatgatgttggacccataagat

SEQ ID NO: 141914 - DNA, 201 bp, Homo sapiens
tatttgcaatggagttagatcttagagtggtcaacagtgtttgcaatgtagtatgtggaggataataactaccttattccatttcagaaatgtgaccttcrccggctggaagaaggccctcctgtcacaacagtgctcaccagggaggatgggctcaaatactacaggatgatgcagactgtacgccgaatggagttgaaa

SEQ ID NO: 141915 - DNA, 201 bp, Homo sapiens
ctaatggttgagcctcagagtacatatttggggtgcggtttggtttgctttgtagagttggtttgttctgcacatgtgtatgttctgccatttccaggacdaaaaggaggttgtgctaaagggaaaggaggatcgatgcacatgtatgccaagaacttctacgggggcaatggcatcgtgggagcgcaggtagtcaaggac

SEQ ID NO: 141916 - DNA, 201 bp, Homo sapiens
gggtaatgtttcctgttttccatgtctaagagaaggcggaagtctggattttcatgtgaaattcccagtgttttaatgttgacatctgatgtaggcttttmttttaggtcatcatacaggagaaaggaaggaagtggcacatgtgtgggttgccagtttattgcttctggtttgggccttccactctgtattttggtggaa

SEQ ID NO: 141917 - DNA, 201 bp, Homo sapiens
gcacatgtgtatgttctgccatttccaggacgaaaaggaggttgtgctaaagggaaaggaggatcgatgcacatgtatgccaagaacttctacgggggcartggcatcgtgggagcgcaggtagtcaaggacgaggattgtgtgctgctttagatttggccctggactttgtcttcaaaaactttcacagccccagacaac

SEQ ID NO: 141918 - DNA, 201 bp, Homo sapiens
gagaataatcgctatggaatgggaacgtctgttgagagagcggcagccagcactgattactacaagagaggcgatttcattcctgggctgagagtaaggamacctgtggtggggccggggccaaggccaaggccaagggtatgtccttgtgcagacccttgacgatcttagaaacattggagagtttcattctcatacagg

SEQ ID NO: 141919 - DNA, 201 bp, Homo sapiens
gtatgttctgccatttccaggacgaaaaggaggttgtgctaaagggaaaggaggatcgatgcacatgtatgccaagaacttctacgggggcaatggcatcrtgggagcgcaggtagtcaaggacgaggattgtgtgctgctttagatttggccctggactttgtcttcaaaaactttcacagccccagacaacttttcctg

SEQ ID NO: 141920 - DNA, 201 bp, Homo sapiens
tctggccaggagtgaaaatgcagggcattaattagtatctcccctcatggatttctgtggttcctttctcggttgtccttaatgttaggtgcccctgggcsctgggattgctctagcctgtaagtataatggaaaagatgaggtctgcctgactttatatggcgatggtgctgctaaccaggtaattatgtctcttaactt

SEQ ID NO: 141921 - DNA, 201 bp, Homo sapiens
ttgtccttaatgttaggtgcccctgggcgctgggattgctctagcctgtaagtataatggaaaagatgaggtctgcctgactttatatggcgatggtgctrctaaccaggtaattatgtctcttaacttcccaaaaacagtcttattttcaaagtctttaatatttacagttgaatttctaaagaagtagcatattgctta

SEQ ID NO: 141922 - DNA, 201 bp, Homo sapiens
tttctgtgccaggcagagcagcagctgttagagatgatgaagcctggagaaagaagccaaatgaaaccccttttcgtaactacttccagggccagatattmgaagcttacaacatggcagctttgtggaaattaccttgtattttcatctgtgagaataatcgctatggaatgggaacgtctgttgagagagcggcagcca

SEQ ID NO: 141923 - DNA, 201 bp, Homo sapiens
ccaaacatcaagagaacagtgtttcagagaacatttctactggggcttcaggaggagcctgtccaagatttaggctgttcaaattataaattataaaacarctggctcaagcccattgtgtttaagtcagagagtgctaagtatcttttcttttgtcttgtctccctaaagtatttatctcatacttcaatcaatttaaaa

SEQ ID NO: 141924 - DNA, 201 bp, Homo sapiens
aactacttccagggccagatattcgaagcttacaacatggcagctttgtggaaattaccttgtattttcatctgtgagaataatcgctatggaatgggaamgtctgttgagagagcggcagccagcactgattactacaagagaggcgatttcattcctgggctgagagtaaggacacctgtggtggggccggggccaagg

SEQ ID NO: 141925 - DNA, 201 bp, Homo sapiens; identical to SEQ ID NO: 25768

SEQ ID NO: 141926 - DNA, 201 bp, Homo sapiens
tttcagaaatgtgaccttcaccggctggaagaaggccctcctgtcacaacagtgctcaccagggaggatgggctcaaatactacaggatgatgcagactgyacgccgaatggagttgaaagcagatcagctgtataaacagaaaattattcgtggtttctgtcacttgtgtgatggtcaggtgagtggtaggtttgtggtg

SEQ ID NO: 141927 - DNA, 201 bp, Homo sapiens
tgctctactggaactgctcttactgatcgattactacttttccctccccatagttaccgtacacgagaagaaattcaggaagtaagaagtaagagtgaccytattatgcttctcaaggacaggatggtgaacagcaatcttgccagtgtggaagaactaaaggtacagtcacttgttcatggtggtttgaaggttggcttt

SEQ ID NO: 141928 - DNA, 201 bp, Homo sapiens
ggaggctttctgtgctttatgaaagctttctgtgccaggcagagcagcagctgttagagatgatgaagcctggagaaagaagccaaatgaaaccccttttygtaactacttccagggccagatattcgaagcttacaacatggcagctttgtggaaattaccttgtattttcatctgtgagaataatcgctatggaatggg

SEQ ID NO: 141929 - DNA, 201 bp, Homo sapiens
tgaaagtaaaatggtttggggcagttggattcatgcttcgcccctcccctgtttattaccaggtggatggaatggatatcctgtgcgtccgagaggcaacraggtttgctgctgcctattgtagatctgggaaggtaaggctctaaagccctctgggctagtgacatttatctctggaagttcaaagactgcctcccatgt

SEQ ID NO: 141930 - DNA, 201 bp, Homo sapiens
acctaagctgctgttcattctaaaaccttttacactgttacctaatttttaggaaattgatgtggaagtgaggaaggagattgaggatgctgcccagtttsccacggccgatcctgagccacctttggaagagctgggctaccacatctactccagcgacccaccttttgaagttcgtggtgccaatcagtggatcaagtt

SEQ ID NO: 141931 - DNA, 201 bp, Homo sapiens
ccaataagaaattcgtgacaactcagaagatctgataagactacactggacgcttaataaagggcctgcgtttgaggccgtggattgccggcctgttcttycagtcatcgttcctaactaactaactgcctaccggttctgttttaggggcccatcctgatggagctgcagacttaccgttaccacggacacagtatgagt

SEQ ID NO: 141932 - DNA, 201 bp, Homo sapiens
gcatggattcattttggaggccaaggaagatgcaaacacagtgcacagggtggaagagaagcctatgaatatgttggggcttattaaatttccataacttyattctgataactgattattatactttccaaaatagctgacaattaaaaagtactgatttgtttgtatatttttgtcttttaaggcaagcagagtgctggt

SEQ ID NO: 141933 - DNA, 201 bp, Homo sapiens
cattgcacagtgaggtttatggatttaaggaacagaggcgatatgaagcattactgatgtgctcctttgcagtttttcaagttcaatattatttgcaatgragttagatcttagagtggtcaacagtgtttgcaatgtagtatgtggaggataataactaccttattccatttcagaaatgtgaccttcaccggctggaag

SEQ ID NO: 141934 - DNA, 201 bp, Homo sapiens
aagggcctgcgtttgaggccgtggattgccggcctgttcttccagtcatcgttcctaactaactaactgcctaccggttctgttttaggggcccatcctgmtggagctgcagacttaccgttaccacggacacagtatgagtgaccctggagtcaggtacgctcatgggcagtgtggtttccataggggtgggctttgaat

SEQ ID NO: 141935 - DNA, 201 bp, Homo sapiens
atgtgaaagtaaaatggtttggggcagttggattcatgcttcgcccctcccctgtttattaccaggtggatggaatggatatcctgtgcgtccgagaggcracaaggtttgctgctgcctattgtagatctgggaaggtaaggctctaaagccctctgggctagtgacatttatctctggaagttcaaagactgcctccca

SEQ ID NO: 141936 - DNA, 201 bp, Homo sapiens; identical to SEQ ID NO: 25775

SEQ ID NO: 141937 - DNA, 201 bp, Homo sapiens
tttatttagaaacatgtatcatattgcctcatagtttctccttcctctaacacaggaagcttgctgtgtgggcctggaggccggcatcaaccccacagacsatctcatcacagcctaccgggctcacggctttactttcacccggggcctttccgtccgagaaattctcgcagagcttacaggtttgctgttgatttacag

SEQ ID NO: 141938 - DNA, 201 bp, Homo sapiens
attagcaactgttcgtacttgtagttaaagagttacaccagcaacaggtcctcagcagaactctagttggtacctaagctgctgttcattctaaaaccttytacactgttacctaatttttaggaaattgatgtggaagtgaggaaggagattgaggatgctgcccagtttgccacggccgatcctgagccacctttggaa

SEQ ID NO: 141939 - DNA, 201 bp, Homo sapiens
tcacttgaacccgggaagcggaggttgcagtgagccgagatcgcaccactgcactccagcctgggtgataaaagcaaaactccgtctcaaaacaaacaaayaaaagaatggcataaacagacacagctcacagatgatctagtctctttagccactaatttcattatattctcactataatttctttgaaaacaaaggatg

SEQ ID NO: 141940 - DNA, 201 bp, Homo sapiens; identical to SEQ ID NO: 25777

SEQ ID NO: 141941 - DNA, 201 bp, Homo sapiens; identical to SEQ ID NO: 25778

SEQ ID NO: 141942 - DNA, 201 bp, Homo sapiens; identical to SEQ ID NO: 25779

SEQ ID NO: 141943 - DNA, 201 bp, Homo sapiens
attagccgggcgtggtggtgggcacctgtaatcccagctactcgggagactgagacaggagaaatcacttgaacccgggaagcggaggttgcagtgagccragatcgcaccactgcactccagcctgggtgataaaagcaaaactccgtctcaaaacaaacaaacaaaagaatggcataaacagacacagctcacagatga

SEQ ID NO: 141944 - DNA, 201 bp, Homo sapiens; identical to SEQ ID NO: 25780

SEQ ID NO: 141945 - DNA, 201 bp, Homo sapiens
cattctcatacaggagcaggtcatgtgaaagtaaaatggtttggggcagttggattcatgcttcgcccctcccctgtttattaccaggtggatggaatggmtatcctgtgcgtccgagaggcaacaaggtttgctgctgcctattgtagatctgggaaggtaaggctctaaagccctctgggctagtgacatttatctctg

SEQ ID NO: 141946 - DNA, 201 bp, Homo sapiens; identical to SEQ ID NO: 25781

SEQ ID NO: 141947 - DNA, 201 bp, Homo sapiens
ttgggacaatccaaccccatatcatgtttcatcacgccgtccttgctctactggaactgctcttactgatcgattactacttttccctccccatagttacygtacacgagaagaaattcaggaagtaagaagtaagagtgaccctattatgcttctcaaggacaggatggtgaacagcaatcttgccagtgtggaagaact

SEQ ID NO: 141948 - DNA, 201 bp, Homo sapiens
tgggacaatccaaccccatatcatgtttcatcacgccgtccttgctctactggaactgctcttactgatcgattactacttttccctccccatagttaccdtacacgagaagaaattcaggaagtaagaagtaagagtgaccctattatgcttctcaaggacaggatggtgaacagcaatcttgccagtgtggaagaacta

SEQ ID NO: 141949 - DNA, 201 bp, Homo sapiens
gatgaagcctggagaaagaagccaaatgaaaccccttttcgtaactacttccagggccagatattcgaagcttacaacatggcagctttgtggaaattacyttgtattttcatctgtgagaataatcgctatggaatgggaacgtctgttgagagagcggcagccagcactgattactacaagagaggcgatttcattcct

SEQ ID NO: 141950 - DNA, 201 bp, Homo sapiens
agaataatcgctatggaatgggaacgtctgttgagagagcggcagccagcactgattactacaagagaggcgatttcattcctgggctgagagtaaggacmcctgtggtggggccggggccaaggccaaggccaagggtatgtccttgtgcagacccttgacgatcttagaaacattggagagtttcattctcatacagga

SEQ ID NO: 141951 - DNA, 201 bp, Homo sapiens; identical to SEQ ID NO: 25784

SEQ ID NO: 141952 - DNA, 201 bp, Homo sapiens
ttccctccccatagttaccgtacacgagaagaaattcaggaagtaagaagtaagagtgaccctattatgcttctcaaggacaggatggtgaacagcaatcktgccagtgtggaagaactaaaggtacagtcacttgttcatggtggtttgaaggttggctttaaaagttgccacccctgggtggccacagagtttgtgtgg

SEQ ID NO: 141953 - DNA, 201 bp, Homo sapiens
cacgcctatagtgacataagcattggtatgcccctttgtttcagaaacacacttctgtatttcacctcattgggacaatccaaccccatatcatgtttcawcacgccgtccttgctctactggaactgctcttactgatcgattactacttttccctccccatagttaccgtacacgagaagaaattcaggaagtaagaag

SEQ ID NO: 141954 - DNA, 201 bp, Homo sapiens; identical to SEQ ID NO: 25788

SEQ ID NO: 141955 - DNA, 201 bp, Homo sapiens
ccacgcctatagtgacataagcattggtatgcccctttgtttcagaaacacacttctgtatttcacctcattgggacaatccaaccccatatcatgtttcwtcacgccgtccttgctctactggaactgctcttactgatcgattactacttttccctccccatagttaccgtacacgagaagaaattcaggaagtaagaa

SEQ ID NO: 141956 - DNA, 201 bp, Homo sapiens
tgacgatcttagaaacattggagagtttcattctcatacaggagcaggtcatgtgaaagtaaaatggtttggggcagttggattcatgcttcgcccctccmctgtttattaccaggtggatggaatggatatcctgtgcgtccgagaggcaacaaggtttgctgctgcctattgtagatctgggaaggtaaggctctaaag

SEQ ID NO: 141957 - DNA, 201 bp, Homo sapiens; identical to SEQ ID NO: 25789

SEQ ID NO: 141958 - DNA, 201 bp, Homo sapiens; identical to SEQ ID NO: 25791

SEQ ID NO: 141959 - DNA, 201 bp, Homo sapiens; identical to SEQ ID NO: 25790

SEQ ID NO: 141960 - DNA, 201 bp, Homo sapiens; identical to SEQ ID NO: 25792

SEQ ID NO: 141961 - DNA, 201 bp, Homo sapiens
tcagaaatgtgaccttcaccggctggaagaaggccctcctgtcacaacagtgctcaccagggaggatgggctcaaatactacaggatgatgcagactgtaygccgaatggagttgaaagcagatcagctgtataaacagaaaattattcgtggtttctgtcacttgtgtgatggtcaggtgagtggtaggtttgtggtgga

SEQ ID NO: 141962 - DNA, 201 bp, Homo sapiens
taactacttccagggccagatattcgaagcttacaacatggcagctttgtggaaattaccttgtattttcatctgtgagaataatcgctatggaatgggarcgtctgttgagagagcggcagccagcactgattactacaagagaggcgatttcattcctgggctgagagtaaggacacctgtggtggggccggggccaag

SEQ ID NO: 141963 - DNA, 201 bp, Homo sapiens; identical to SEQ ID NO: 25795

SEQ ID NO: 141964 - DNA, 201 bp, Homo sapiens
tcctctaacacaggaagcttgctgtgtgggcctggaggccggcatcaaccccacagaccatctcatcacagcctaccgggctcacggctttactttcaccyggggcctttccgtccgagaaattctcgcagagcttacaggtttgctgttgatttacagaaaggggaaatgagtggattaagtttttaaatatctgtcatt

SEQ ID NO: 141965 - DNA, 201 bp, Homo sapiens
atgatgaagcctggagaaagaagccaaatgaaaccccttttcgtaactacttccagggccagatattcgaagcttacaacatggcagctttgtggaaattmccttgtattttcatctgtgagaataatcgctatggaatgggaacgtctgttgagagagcggcagccagcactgattactacaagagaggcgatttcattc

SEQ ID NO: 141966 - DNA, 201 bp, Homo sapiens
gaaaaggaggttgtgctaaagggaaaggaggatcgatgcacatgtatgccaagaacttctacgggggcaatggcatcgtgggagcgcaggtagtcaaggaygaggattgtgtgctgctttagatttggccctggactttgtcttcaaaaactttcacagccccagacaacttttcctgaagtagtacagccatgtgctgca

SEQ ID NO: 141967 - DNA, 201 bp, Homo sapiens
agagtggagattaaatcatagttttatttgaagtataattttggcttgctcaaaatgaacagtatctggttatgactaagaatggcatgaaaaggccagaygcagtggctcatgcctgcaatcccagtactttgggaggccaaggcaggtggatcacctgaggtcaggagttggagaccagcctggccaacatggtgaaac

SEQ ID NO: 141968 - DNA, 201 bp, Homo sapiens
caacctactacctcagcaagcctgtttgcaggtatgatgtatcaggcatagagtccacaagcctagttctgactctctgggtttctctttctatctgagaytatgtatcactcacctctattttaattggtcttttccaaactcttttgtcatatcagcctaatccattgtgtccaaataagcatgtttaagcttatgctt

SEQ ID NO: 141969 - DNA, 201 bp, Homo sapiens
tttatgcttaataatagtttatcaacatctttccatgtcccttttttttttttttgagatggagtttcgctcttgtcacccaggctggagtgtaatggcaygatcctggctcactgcaacctccacttcccgggttcaagcagttctcctgcctcagcctcctgagtagctgggattacaggcacctgccaccatgcccat

SEQ ID NO: 141970 - DNA, 201 bp, Homo sapiens
cctcgctacacggtaggctggggcaggaagttagcttgagcctaggagcttgaggccagcttcggcaatgtagcaagaccctgactccattcatccatccrtctgtccgtccgtccgtctgtctgttttcaatttaggatattttctgcttatgtggggtttacagcctaataaacctatcaaaagtcaaggagcatctgt

SEQ ID NO: 141971 - DNA, 201 bp, Homo sapiens
catccatgtctgcttaatatggttctttcttttaaatatatgttaatacgtttattggtaaaatgcaattttttgccagctttattgaggtatacttgacaaaattttattttattattattattattattattattattattgttttggagacagagtgtcactctgtcacccaggctggagtacagtggcaccatcttg

SEQ ID NO: 141972 - DNA, 201 bp, Homo sapiens
caacaacagaaggttgtcttgtggccagcaccaatagaggctgcagagcaataggtgtaagttggcatttatatatttgccagtttaaaaatacatcatargtaaggcaatgagaagagttttaaggacaattagtgataccttttgggtcaagcatgagcatttttgggtaacatgtgcttgcttctctaacatatactg

SEQ ID NO: 141973 - DNA, 201 bp, Homo sapiens
catgtctgcttaatatggttctttcttttaaatatatgttaatacgtttattggtaaaatgcaattttttgccagctttattgaggtatacttgacaaaattttattttattattattattattattattattattattgttttggagacagagtgtcactctgtcacccaggctggagtacagtggcaccatcttggctc

SEQ ID NO: 141974 - DNA, 201 bp, Homo sapiens
atattatgttagctatggtattatgcactgtcaggtgtggctgtcaagtcttggaaagttagtgcttccagtggagtctagttctattctgatgccattayagttgccctgtttttagttgatttagtaagaaattggtcatgattttaagggtgaatcttgttgtgtctctccctggctacagatgctaggtgttcaagg

SEQ ID NO: 141975 - DNA, 201 bp, Homo sapiens; identical to SEQ ID NO: 25847

SEQ ID NO: 141976 - DNA, 201 bp, Homo sapiens
atatttatatattgctactttgtcattttctaccataggtcgaagatcaatttacaagacctccaaggagcttgcaccaagaagacagcctgaatagcccracagttctgaactggaacatgggcattgggttctaaaggactaacataaaatctgtgaattaaaaaagctcaatgcattgtcttgtggaggatgaataga

SEQ ID NO: 141977 - DNA, 201 bp, Homo sapiens
gaaaataagccgaatcctgtaactcagagggtcaagatgattatggtaatgacatggttttcttcttcttttagtatcctcagttccaatctcattatttwtaagatttctttttttctacaattttggcccattcaatgatattgcacccccttcttcctttttttcttaatgtgttcatttctttgaggctcctggtct

SEQ ID NO: 141978 - DNA, 201 bp, Homo sapiens; identical to SEQ ID NO: 25840

SEQ ID NO: 141979 - DNA, 201 bp, Homo sapiens; identical to SEQ ID NO: 25855

SEQ ID NO: 141980 - DNA, 201 bp, Homo sapiens
aattctcaagtcccaagactggtctccataagtgccccaggaacagtcccctgtatctaacaactcaattatgattctgtagctactggaatttggaattrcccccatttttctttttgaaagttttcagaacttatggtaataataatttttgggtaaataagagtattttcctagtgaaacacatcagagagcagaaca

SEQ ID NO: 141981 - DNA, 201 bp, Homo sapiens
tggaaagttagtgcttccagtggagtctagttctattctgatgccattacagttgccctgtttttagttgatttagtaagaaattggtcatgattttaagkgtgaatcttgttgtgtctctccctggctacagatgctaggtgttcaaggagcatgcaaagataatcctggggaaaatgcccggcagcttgcccgaattgt

SEQ ID NO: 141982 - DNA, 201 bp, Homo sapiens
tttgccctcagttccaactcacaggtaagtattatttataagataggaatgtgaatagtattccttttttcagtttacattaataggaaggattaatagcrtttcttcatagcacaagatttaagaattgcccaaagttttaagtttaattctcaagtcccaagactggtctccataagtgccccaggaacagtcccctgt

SEQ ID NO: 141983 - DNA, 201 bp, Homo sapiens
atattttgagcaactactatgtttagctttgaggatgccaaagaaatatagggtatacttttttgtctgcagaaaggtacacatactacaggatcatacartatggagggggaaaggttttgttctaaaaagaatttttttaaaatcatactttttcccgttaaatttatctgatcattttgttcttttccagtgaagctt

SEQ ID NO: 141984 - DNA, 201 bp, Homo sapiens
aatgtttgaattcatataatttttaagaaatggctgctttaaagttggttgccagtaagtaataaaggatttattgtttgagtgaagaagaaataacatarttctcttaattttataattattttccagaattataaggaacagtatcaaatagtcatatgtatgggacactgtgcatacaaagcagggtttatagcacac

SEQ ID NO: 141985 - DNA, 201 bp, Homo sapiens; identical to SEQ ID NO: 25837

SEQ ID NO: 141986 - DNA, 201 bp, Homo sapiens
tcaagcagttctcctgcctcagcctcctgagtagctgggattacaggcacctgccaccatgcccatttaatttgtgtatttttggtagagactgtgtttcrccatgttggtcaggctggtgtcaaactcctgacctcaagtgatccgcctgccttggcctcccaaagtgctgggattataggcgtgagccactgtgcccgg

SEQ ID NO: 141987 - DNA, 201 bp, Homo sapiens
agaccatcctggctaacatggtgaaacccgtgtctctactaaaaaatacaaaaaaattagccaggcatggtggcgggctcctgtagtcccagctactcggraggctgaggcaggagaatggcgtgaacccaggaggcagagcttgcagcgagccgagatcgcgccactgcactccagcctgtgtgacagagcgagattcca

SEQ ID NO: 141988 - DNA, 201 bp, Homo sapiens
tcgagaccatcctggctaacatggtgaaacccgtgtctctactaaaaaatacaaaaaaattagccaggcatggtggcgggctcctgtagtcccagctactsggaaggctgaggcaggagaatggcgtgaacccaggaggcagagcttgcagcgagccgagatcgcgccactgcactccagcctgtgtgacagagcgagatt

SEQ ID NO: 141989 - DNA, 201 bp, Homo sapiens
agcttggtggaggtgccagcagccgagtccttgcagatgggatgactcgtggcccagttgtgcgtcttccacgtgcttgtgactctgcagaagtgaaagcstggctcgaaacatctgaagggttcgcagtgataaaggaggcatttgacagcactagcaggtgtgtgagtggatttgtatgtacagttatatctatttgtt

SEQ ID NO: 141990 - DNA, 201 bp, Homo sapiens
aaaattgtcgggtatgtgggataaccatttcaagataagagtgtgagtatgcgtgcatgcacacactctttgtattcctttatggtctagtttctagactrtagatagccacattatggaattacatggtctacttaggttgacccatgtgaaattgccagtatttaaaattcaactaacctacaaaaatagcagtttcat

SEQ ID NO: 141991 - DNA, 201 bp, Homo sapiens
atatagattttcatttggtgcctgactttaccttttaggtgatgggagcttgttgtgagaatgttattggatatatgcccatccctgttggagtggcaggrcccctttgcttagatgaaaaagaatttcaggttccaatggcaacaacagaaggttgtcttgtggccagcaccaatagaggctgcagagcaataggtgtaa

SEQ ID NO: 141992 - DNA, 201 bp, Homo sapiens
tcctcttctagtactgttccagcttttgattagttgtgaaagtttggagcttttcacatctaatgcttttccattggtcttctagcactattgttgatgawtctgctagaagaaaagcagccaccacagcaaaattcttaaccctgttttattaatgtagaaacatctatcagaaaagactttttttctgttgacagcaat

SEQ ID NO: 141993 - DNA, 201 bp, Homo sapiens
gtgaatcttgttgtgtctctccctggctacagatgctaggtgttcaaggagcatgcaaagataatcctggggaaaatgcccggcagcttgcccgaattgtrtgtgggaccgtaatggctggggaattgtcacttatggcagcattggcagcaggacatcttgtcaaaagtcacatgattcacaacaggtaagactcaaaga

SEQ ID NO: 141994 - DNA, 201 bp, Homo sapiens
aaaaacaaaaaacaaagaaataataataataaaagaataaaacacagtctttgcatcttttatttatagatttgcacgtctacagaaacttcatacaagtrtagctggacgcaacctttatatccgtttccagtccaggtcaggggatgccatggggatgaacatgatttcaaaggtaagtgtaggcagagtatctgaaag

SEQ ID NO: 141995 - DNA, 201 bp, Homo sapiens; identical to SEQ ID NO: 25843

SEQ ID NO: 141996 - DNA, 201 bp, Homo sapiens
agttaattgaaatctactttgtgatatattaatcataacactctatgctaatgtaagtttagattgtgtcctttacatttctgaataagattttaatttgytttcttttatttagaatgatcagcatggatattgaacaagttattaccctaagtttagctctccttctggctgtcaagtacatcttctttgaacaaacag

SEQ ID NO: 141997 - DNA, 201 bp, Homo sapiens
acaattgttgtagacgtgaacctatgctggtcagaaataaccagaaatgtgattcagtagaggaagagacagggataaaccgagaaagaaaaggtaacttrttattctcttcgctttcaatccttcattgctttgtcaaaaagtagtctgttttcaaaattatgtgccgtgttgtgagatttcttttgatttcttgaacag

SEQ ID NO: 141998 - DNA, 201 bp, Homo sapiens
agttaggagaggctattgcactgttttaagtaagacataataaagccctgcaccaggcggagagcagaaggaacgcacagaagacgcaggagaggcacatktcagagagaatccagtatgcaatggatgtcgcacacaagagagagagacgcaggtgaccggagccatttacactaatgggtaaatctcgggaaagcgctg

SEQ ID NO: 141999 - DNA, 201 bp, Homo sapiens
aactaacatgatttatagcaggacactcaataagtggattcttgggtgtttaccttttgtgtaatcagaatgtagatgatgaagaagatacttaacatgcrttttatatctaggtaattagaaaatgtgaatagctgtttctcacttgtgttttctgcttgattgctcttctacttgcaaggcttaggtaataaggtcgag

SEQ ID NO: 142000 - DNA, 201 bp, Homo sapiens
atatctgacacacacttgaaaccttgctaaattcacatttatttttctttttatggtgtattagtgcaagcctgtctttgtattgtaaaatctaatgatayggtatttatattatttttgtttggcattttttgcattaaatgaattattttgcagaggtatcttttaattaaaaactacagtgatttaatttaaaaatta

SEQ ID NO: 142001 - DNA, 201 bp, Homo sapiens
atagagtccacaagcctagttctgactctctgggtttctctttctatctgagactatgtatcactcacctctattttaattggtcttttccaaactctttkgtcatatcagcctaatccattgtgtccaaataagcatgtttaagcttatgcttagataagaaagtagatgaagagagcaaatgaatgttcatctactgag

SEQ ID NO: 142002 - DNA, 201 bp, Homo sapiens
ttttcataccgagaaagaaacacattaggaatttatacctgaccaagaaagtaattgtgatggttaacaaaacagctgttacttttgtgctcagtttcttygaagtatagttattatacttagaaatatatcatagatacaaattcttctcataaggatgaaggatgaatatttcatgcagtttaatatgtgtgtgttttg

SEQ ID NO: 142003 - DNA, 201 bp, Homo sapiens
ttggtggaggtgccagcagccgagtccttgcagatgggatgactcgtggcccagttgtgcgtcttccacgtgcttgtgactctgcagaagtgaaagcctgsctcgaaacatctgaagggttcgcagtgataaaggaggcatttgacagcactagcaggtgtgtgagtggatttgtatgtacagttatatctatttgtttat

SEQ ID NO: 142004 - DNA, 201 bp, Homo sapiens
ttgatttttgcatgaggtgaaagattgggatccagtttcattcttctacatgtggcttgccagttttcccagcaccatttattaaatagggtgtcctttcyccactttatgttattgtatgctttgtcgaagatcagttggctgcaagtatttgtctttatttctaggtcatctatttggttctattggtctacatgccta

SEQ ID NO: 142005 - DNA, 201 bp, Homo sapiens
gagcttctgaaacaaaatgctagagagcctcaaatattttataccctctgttctttgctgggtatatccattgctgtttaccaacagataaaagggggccsccgcattggccagtgggacaggaaaaacatcaagaagggggagaagaacacaattgtcacctcctacaacaggaacttcacgggccgcaatgacacaaac

SEQ ID NO: 142006 - DNA, 201 bp, Homo sapiens
gacagggcgagagtccgtctcaaaaaagaaaaagaaaataccaaaaaactccaaatacgtacagtttacccatttaaagtgtacagttcagcagtgttttrcatattcagagatttgtgcaaccatcactatctaattccagagcatttttatcaccccaaaaagaaaccctgtacccattagcagtcactccccatttac

SEQ ID NO: 142007 - DNA, 201 bp, Homo sapiens
cctctcaaagtgctgggattacaggcgtgagccaccgcgcccagccttaattggctcttttaagaaaacaatttcattgagtatctgatagcaggagaagrgagaaggataattattcatgttccttatttgtaattttaaaatatttcattttgggatgaataaatttacagacaattctgccataatgtgacatatgta

SEQ ID NO: 142008 - DNA, 201 bp, Homo sapiens
gcagtaccaaaacaagtggctggtggctggtggctagctggatttggcctataggctacagtttgccaacccctgtattagaccattgatagattgcgtgygcacgtgtgtgtgtgtgtgtgtgtgtgtgtgtgtgtatgtgtgtgtgtgtttatgatctaaacttgaccttgggcagccaaaaccttaggtcacatacac

SEQ ID NO: 142009 - DNA, 201 bp, Homo sapiens
cccccttccggggcgggacggtggcaacgcggcctccgcgcccccgcgcccgcgcctgcgaagaaaccgaggcggggcgccgcgcgtcccgatgcgcgccycggctgtgcccccggttgcagggcctccggtcctgggaccgcggcgacccggcggtcccgagccgctcccggcctcccagcggtgccgcccggcctggcg

SEQ ID NO: 142010 - DNA, 201 bp, Homo sapiens
ggtttaaggattctcctgcctcagcctctcaagtagctgggaagcatgcgccacgacgcctggctaattttttgtatttttagtagagacagggtttcacygtgtgggccaggctggtctcgaactcctggcctcaagtgatctgcccgcctcagcctcccaaagtactgggattacaggcatgagccatcgcgcccagcc

SEQ ID NO: 142011 - DNA, 201 bp, Homo sapiens
actcgggaggtggaggttgcggtgagccgagatcacaccattgcactccagccagggcaacaagagcgaaactccatctcaaaaaaaaagaaatattcttygaacgtgtgtcctgggaggggggaaaaaaaggacaaaaatatattttctcatagtcctggagactggaagaccaagaccaagcactagcatttggtgtct

SEQ ID NO: 142012 - DNA, 201 bp, Homo sapiens
tatatatggctactctcttggatttttgtctttactaaacttgaaaatataatttgatattagtacttccagtctctatcaccaccttgccccccagtcarttttggaggagtggggatggctttttggtagtaagctctatatagttccatctcagcttatggaaaataattagaacggcagtcataatgtacacttttt

SEQ ID NO: 142013 - DNA, 201 bp, Homo sapiens; identical to SEQ ID NO: 25861

SEQ ID NO: 142014 - DNA, 201 bp, Homo sapiens
taatactgatggggaagatgctatattttggcaagtcagctttttaggatatgtgaatcttacgtgacttcttccaggtggcaaattccagttatggctcsgatgataatataagcgaagaaacattgtgaatgagtggcaggtggactttggctaaagaattccactctgcagtgtttaatgcagaagtctgagaggatg

SEQ ID NO: 142015 - DNA, 201 bp, Homo sapiens
taggtaattttacaaagaacataatatcagtaaatgacactaagtatgaaattaaatagtaactattatcaatccccttacagtattcattctttgacctwgtttttttccatttgtaatagtgttagcgtccaactgtcagctcatgtccaaatgtcggctcatgaattcctctttaatagctggacttcttttagcctc

SEQ ID NO: 142016 - DNA, 201 bp, Homo sapiens
agtcacatggaatctgcattcaaatgaggcaaatgcactggcccagtggaaggttagaggcaaagaatccagccaaaggggtacaggagcgagcgtcagakgtaactgggttataataacagctttgttacaatgtaattcaaatacgtacaattggccgggtgtggtgactcacacttgtaaccccagcactttgggagg

SEQ ID NO: 142017 - DNA, 201 bp, Homo sapiens
ttggctctttttttttttttttttttttttctgagacagagtttcacttttgttgcccaggctggagtgcaatggtgcgatcccagctcactgcaagctcygcctcccgggttcaagtgattctcctgcctcagcctcccgagtagctgggattacaggcatgcaccaccacacctggctaattttgtattttttagtaga

SEQ ID NO: 142018 - DNA, 201 bp, Homo sapiens
ggaataaagaatgaaataagaatccagcccccccacccccgactctactgtctagtttttccaaaactatttattaaataatccacctctattgatttgawatggcatctttcatcatatacagagttccccatttcaaatagatagctatttgccaactcctacttttaaaaaaatgcagaataaagtaaacagaataaa

SEQ ID NO: 142019 - DNA, 201 bp, Homo sapiens
agacagggtttcaccgtgtgggccaggctggtctcgaactcctggcctcaagtgatctgcccgcctcagcctcccaaagtactgggattacaggcatgagmcatcgcgcccagccggctttaactgttttgtggaactgtgttgtctaactagctagtagcagctttcctgatgttagacagatgtgttttccattttgac

SEQ ID NO: 142020 - DNA, 201 bp, Homo sapiens
cccaggctggagtacagtggcacaatcttggctcactgcaacctctgcctccggggttcaagcaattctcctgcctcagcctcccaagtagctaggattayaggtttgcgccaccacacctggctaattttagtatttttagtagagacagggttttgctatgttggccaggctggtctcgaactcctgacttcaaatgat

SEQ ID NO: 142021 - DNA, 201 bp, Homo sapiens
agggggctggggcaggagaattgcttgaacccaggaggcagaggttgtagtgcagtgagctgagatctcaccactgcactccagcctgggtgacagagcgrgactccgtctcaaaaggaaaaaaaaaaaaaaaggtagattgtgggcaagactgggaataattacttctgaggcgggtaaaggacttgtagtttggggatt

SEQ ID NO: 142022 - DNA, 201 bp, Homo sapiens
aaacttagcagataaaaaggtaagagaatgacctccagggaaaataaaaagaaaagatgtgcataaaaagaaaatacaagcattcgtttaagttaattgcrtggcagagctctgagcagcatttgcgcagttaaaaacgtacagtcaatctttaatgtgaatattgatctatattgggatgatggcgagatgggaagttta

SEQ ID NO: 142023 - DNA, 201 bp, Homo sapiens
tcatttttcctgcaagattcagttgggtatgagccaaactctgagacacagaacagaaaccaaatttgtaaacaaggtgtgaagaagaaaatcagaaagcktgaatttaggaattaccctgtggtttggatcctagaagttaagaaacactggatgccactgaggagagatgagaagggaggattctttttgctggcatct

SEQ ID NO: 142024 - DNA, 201 bp, Homo sapiens
ggaactgaatggaaatggagttcagtcctcatcttccatagtgagaagtcaatacactttgcctaaaatgaaaaatcaagacacagcaatacacacatagwagctagacttgaaggaaagtatccaaaaaccctatcaagagttgaaattggtggcctctgggcactttctctgttatacgtcttacagaatggtttgaat

SEQ ID NO: 142025 - DNA, 201 bp, Homo sapiens
aaaactaaatgtagtattttgcagaaaagagttaacattagcaggcctgagacttaggcctgttcgcaaggttggcccttggctggcctctgggagcttasattttgcaagggtacccaccatttcccagtaaggatggctcactgcataaactcttaaacaattgataaacaatgtggttcatgctgaatgcctgtgagt

SEQ ID NO: 142026 - DNA, 201 bp, Homo sapiens
tgtttaaaattaacaaaagggagtctgttataaaagcttcttttgaacaaaaaatgcaaatgttatttaatgaaagcgattatcgtttaaaaaaacaaaasaaaacaaaacaaaacaaaaccctgcaacatgacactcacttctccctttagggattctttgatattcctgtggataatttgtatgcggagcccgcagtcc

SEQ ID NO: 142027 - DNA, 201 bp, Homo sapiens
  misc_feature (1)...(201): n = A,T,C or G
gttcacctgaataatccaggataatctccccatctcaggatcctcaatgtcatcacatctgcagaaacctttccaaataaggtaacatttacaggttccanggattgggctctgatatttttggggccaccattcagctcacttcaggaggccttaaaggaagtcactgatgtgttaagagacgaatattttaaggacact

SEQ ID NO: 142028 - DNA, 201 bp, Homo sapiens
  misc_feature (1)...(201): n = A,T,C or G
caatgtcatcacatctgcagaaacctttccaaataaggtaacatttacaggttccagggattgggctctgatatttttggggccaccattcagctcacttnaggaggccttaaaggaagtcactgatgtgttaagagacgaatattttaaggacactttgagctttgagatagtacatatcatttatcatctaggccagga

SEQ ID NO: 142029 - DNA, 201 bp, Homo sapiens
gagtagaagcaggactagctttaggggaaaagttgccatggtgatgatattctctgtcctcccctggactgctagtcatatgagaactgaggttcctgagkaaaaacaggccaaagaatctaatcttgtgggataaacgtcataagaccaggagttggcaaagtttttctgcaaagggccaaatcgtaaatattttaggca

SEQ ID NO: 142030 - DNA, 201 bp, Homo sapiens
catgtatgctgcagaaattgtttctcagctttccagcttttcaatgtttaaagaactctaactaagatgtcctgcttcccttctccctttgtttttctcaytggcatttaggtcattgacatttccatgatcttggccgaagcaatccgaaggacacacaatggggaatccgtgtcctacctgttcagccatgtcccgcta

SEQ ID NO: 142031 - DNA, 201 bp, Homo sapiens
ggtagctgggactacaggtgcacaccaccacgcctggctaatattttttgctttttgtagaggcagtgtctcactatgttgcccaggctggtcttgaatasgaattctcctgggctcaagagatcctcctgccttggccttccaaagtgttaggattaaaagcattaccaccacacctggcatctctctttaaaggataca

SEQ ID NO: 142032 - DNA, 201 bp, Homo sapiens
ccaggtagctgggactacaggtgcacaccaccacgcctggctaatattttttgctttttgtagaggcagtgtctcactatgttgcccaggctggtcttgawtaggaattctcctgggctcaagagatcctcctgccttggccttccaaagtgttaggattaaaagcattaccaccacacctggcatctctctttaaaggat

SEQ ID NO: 142033 - DNA, 201 bp, Homo sapiens
atactaacaaactgaatatcaaattcttacccagtagttctatccagtggccagggtgccctgacggtcattcctagctgccccaattgcaaggtccgccrttagcacatttctccctgtggattgctaagtgcctgccccagaccatgcctgggctgatcaagagaggcctgattcttgcatcatctctcgggtgtggtt

SEQ ID NO: 142034 - DNA, 201 bp, Homo sapiens
atgcactggcccagtggaaggttagaggcaaagaatccagccaaaggggtacaggagcgagcgtcagatgtaactgggttataataacagctttgttacartgtaattcaaatacgtacaattggccgggtgtggtgactcacacttgtaaccccagcactttgggaggccaaggcaggtggatcgcttgaggtcaggagt

SEQ ID NO: 142035 - DNA, 201 bp, Homo sapiens
tgtacatgtgtatgtttgtgtatttctaagtggctccattcagctgggtacactgcagttttctgcagtctcgggataagaggttgtgcataagaaaacaygaaattcatgctatgctcaaattgttccaaataatatcaatcattggaacaaatttgccttttcaaaacatagcagagctgaccatcttcttggtttgga

SEQ ID NO: 142036 - DNA, 201 bp, Homo sapiens
ttctgacaccattatttctgacatgtctgtgtagtcagtgtgactcattatagtgaggagacaattttgttctttccccaaacttctgaaaggggaattcktaattcttaattttatctagtatttgaggtgtgcctttgctttatttttttaagacagagtctcgctctgtcacccaggctggagtacagtggcacaatc

SEQ ID NO: 142037 - DNA, 201 bp, Homo sapiens
ttgcagtgagccgagatcacgccactgcactccagcgtgggtgacagggcgagagtccgtctcaaaaaagaaaaagaaaataccaaaaaactccaaatacrtacagtttacccatttaaagtgtacagttcagcagtgttttacatattcagagatttgtgcaaccatcactatctaattccagagcatttttatcacccc

SEQ ID NO: 142038 - DNA, 201 bp, Homo sapiens
ttgcatcctgaagaatgagtgttttaagggtaggatgagtgttctaagggtaggagaaacatggacctcaatatagtaatgattccctttgcttcaaggaygttgatgtcttattctcttatctcacagtctctgtgtttaactggaaagtttggtcccttttcttttatgataattgacatagttggatttatgaccacc

SEQ ID NO: 142039 - DNA, 201 bp, Homo sapiens
ccggatggtcctggtgggcgacgtgaaggaccgtgtggccatcctcgtggatgacatggctgacacttgcggcaccatctgccatgctgcggacaagtackcagggcggtggggaaagcgttaggacttctcactaggaaagggaaacacatcagcttttagaaattgggctcttttttcctgattattgccggtcttggc

SEQ ID NO: 142040 - DNA, 201 bp, Homo sapiens; identical to SEQ ID NO: 25859

SEQ ID NO: 142041 - DNA, 201 bp, Homo sapiens
ttgttgcccaagctggagtgcagtggtgccgtctcagctcactgcaacctctgcctcccaggtttaaggattctcctgcctcagcctctcaagtagctggraagcatgcgccacgacgcctggctaattttttgtatttttagtagagacagggtttcaccgtgtgggccaggctggtctcgaactcctggcctcaagtga

SEQ ID NO: 142042 - DNA, 201 bp, Homo sapiens
gatcgcttgaggtcaggagttcgagaccaacctggccaacagggtgaaaccccgtctctgctgaaaatacaaaaattagctgggcttggtggtgcacgccygtaattccagctattcaggaagctgaggcaggagaatcacttgaacctgggaggtggaggttgcagtgagccgagatcacgccactgcactccagcgtgg

SEQ ID NO: 142043 - DNA, 201 bp, Homo sapiens
tcaacatcatttgttaggagtatgtattaggtctccatgatatacaaggaaaagaagagttacctatagctttttcaggaaatcatagcgttctaacaacscaggaagctgtttgcaggggtattttctcttatcttcttcttctgacattaccattggataccttttagtggctagggctccccactcaagtgagatgtc

SEQ ID NO: 142044 - DNA, 201 bp, Homo sapiens
ctttcccagtcccacttccatgcctaccctgctgtctgcttgtgagcaggctcgtgagaacaggcgccacctggcagagagatgaaaacaggttctgcttyaacttctccggtatagaacttccaccacaaagggcagtgcttcccagtgctgggctgtggattggtatcctgtcatgcccaaatctgcctagtcgttacc

SEQ ID NO: 142045 - DNA, 201 bp, Homo sapiens
caatcttggctcactgcaacctctgcctccggggttcaagcaattctcctgcctcagcctcccaagtagctaggattataggtttgcgccaccacacctgrctaattttagtatttttagtagagacagggttttgctatgttggccaggctggtctcgaactcctgacttcaaatgatctgctcacctcggcctcccaaa

SEQ ID NO: 142046 - DNA, 201 bp, Homo sapiens
cctgtggattgctaagtgcctgccccagaccatgcctgggctgatcaagagaggcctgattcttgcatcatctctcgggtgtggttgcctgctacattccyaaaatacaactttaaaggcgagatctctagttgactgtatgaacatgttcatttgtgcctttgccagggttacatcaattgcagacaggttgaatgtgga

SEQ ID NO: 142047 - DNA, 201 bp, Homo sapiens
ccagaataaataatgccgcctttgaggctgttgtcgtcacaaacacaattccgcaagaggacaaaatgaaacactgcaccaagattcaggtactgtctatrcaccaaaggcagccaagcagccaggcacctactttagatccttaaaaatagcatcatgtcttgtgtgtgtgtggctccttgctaaggcacatgcttggca

SEQ ID NO: 142048 - DNA, 201 bp, Homo sapiens
ctccttctggaaaggcagttttgctgagtatagactcctagcctgagagttattttctcatatcacattgaagatatgactccataacttctggcttccaytggggaagttgaggacttggccatccttactaggtgacttgtctttattctttgtctcttttaagctttcttggtcttctatagttttgttaagattgtt

SEQ ID NO: 142049 - DNA, 201 bp, Homo sapiens
caaaaagaaaccctgtacccattagcagtcactccccatttacttccccccaccttatccctggcagccaggaatctactttctatctttatggggttatcttttggagactttgtatatcaattggtagtatagaacatggcctttgtgtctggcagatacctttgtaaaccagaaaatgttattttggcagctactcag

SEQ ID NO: 142050 - DNA, 201 bp, Homo sapiens
ctcccaggctcaagtaatcctgccaccttagcctcccaagtagctggaactaaaggcgcatgccaccatgcctggctaatttttgtattttttgtagagayggggttttactatgttgcccaggctggtctccaattcctgggctcaagtgatctgcctgcctcggcctcccaaaatgctgggattataggtgtgagccac

SEQ ID NO: 142051 - DNA, 201 bp, Homo sapiens
agagcacagccacgtccattcatatatgtattgcccgtggctgctttcacgctacaatgggcaagttgagtatttgtgacagagaccctctggcttccaargtcaaatatgttaactatttggtcctctatagtttgctgacccctgagttagatgatcacagttgtgctcttaaatgacgcagtcaccgccttttcagaa

SEQ ID NO: 142052 - DNA, 201 bp, Homo sapiens
tcacttgaacccaggaggcagaggttgcagtgagccgagattgtgccattgcactccagcctggtcaacaagagtgaaactgtctcaaaaaaaaaaaaaaraaaagaaaagaaaagaaacactggttgtgttgtgaaaatcctcagaaatagggaggggagcctggagcacctaactgcccttcccactgccttctcagcc

SEQ ID NO: 142053 - DNA, 201 bp, Homo sapiens
aaatatcagctgtgctgaggttcagaaacctgctctagaccaatgtttcccacaacctggctcctatggatcaaggataaaggcatttgggagagaaagtkttcacacttaaataaaattatctgtagctgctcatttacaagtgacagctttctgaacagtctgtgactcatgatgatttttcaatgattcccattagta

SEQ ID NO: 142054 - DNA, 201 bp, Homo sapiens
gttgcctccgccacctcctccgccgccgcgcgcccctcggagttccgcgccccaccatgcccaacatcgtgctgttcagcggcagctcgcatcaggacctrtcccagcgcgtggccgaccgcctgggcctggagctgggcaaggtggtcacgaagaagttcagcaaccaggagaccaggtgggggccgcgccggcggccgg

SEQ ID NO: 142055 - DNA, 201 bp, Homo sapiens
tctgcaggactttaaaaaccttcttacgtagtcaggtttattttttcttcacattatggcttctgagtttatgtaggagtcatccttctcttaaaatttgkcttctcccatgattctgtatatttttttcttttttaatgtcccaagtttacttccatctgaaatttattttggaataaagaatgaaataagaatccagcc

SEQ ID NO: 142056 - DNA, 201 bp, Homo sapiens
aatacaatttagccttaaaaaagaaggaaatactgtcctttgctatgacatgaatgcacctggaggacattttgctaagtgaaataaaacaggcacagaargacacatactctatgatctcacatgtgaaatctaacaaagtcaaaatcatagaagcagagagtagaatggtggttgccaggggctgaggcttggggaaaa

SEQ ID NO: 142057 - DNA, 201 bp, Homo sapiens
ttaaaaatattaaaaatagaactattatatgatccagcaatcccacttcagggtatatatccaaatatatgaaatcagtatgttgaagagacatctacackcccttgatccatgcagcatcattcacaatagccaacaaataaagaaaatgtagattttaaaatgtggataaagaaaaccatatacataacatgtatatac

SEQ ID NO: 142058 - DNA, 201 bp, Homo sapiens
attgcactccagcctgggcaacagagcaagactctgtctcaaaaaaaaaaaggaagaaagaaagaaatttccaatcttaccttgtacttttcctgccccarccctggaacaagtcatttctcaataaggcctgtttccttttagaggaaaacagtatttaggaaccaaaatctgaatattattagacgtgctcaaaattca

SEQ ID NO: 142059 - DNA, 201 bp, Homo sapiens
ttgagtcaccgggtacagcggtcttgcgacataaatattatttgatgacgaaggtactcggggcccaggtgccaaggtaaaccactggcaaagatgaccgyggttaaggcagtagaaagcaggctcgacactgagacgcggttccagccctagaaggattgcattttacgattcaggcaaacttcgagtctcctcatgtga

SEQ ID NO: 142060 - DNA, 201 bp, Homo sapiens
tcaacttccttataatattcttctagtcttatttcccaactgctggcttttatattttgaattgtcaatagaaagccctgcctatcgtgatgaggttaagracacatgttttgctgagagaagtaacttccagctgagaatcttgtttagcaggagagaaaatcctctattttagagcctctcctggagcttagagtaagc

SEQ ID NO: 142061 - DNA, 201 bp, Homo sapiens
gctctgctccgagccgctcactgcatggtagagtctggtgcccccgccgccgcctgcatcgccgccaccgccgctccgccacgaccaccgccgcctcctgycctgcagccaccgccaccgcctgtgtcgccgccgcctcgggaccggctgtatgattaggccacaatcttcaatgagtaaacatattcctgtgagtagccg

SEQ ID NO: 142062 - DNA, 201 bp, Homo sapiens
ttgatgacgaaggtactcggggcccaggtgccaaggtaaaccactggcaaagatgaccgtggttaaggcagtagaaagcaggctcgacactgagacgcggytccagccctagaaggattgcattttacgattcaggcaaacttcgagtctcctcatgtgacatgtgtgcactcctggaccgttttaattatgagaaacgtg

SEQ ID NO: 142063 - DNA, 201 bp, Homo sapiens
ttcattcaatgtattttaaatcagtaaagtttaaggagtgagtataattgagtgaagtcagattacccgattagttataaataatgcctttagttacattwacctttgtctgcattgctgctagccccttttggttaatgtttcatcccaatccggtattaccatgactgtaaacaacttcagtgtatgaagggggcacac

SEQ ID NO: 142064 - DNA, 201 bp, Homo sapiens
ggctggagggttgcacgtcgcgccggctataaaggggagggcttgtgacgcaagggcgcctcggcgcgtgtattggctccttcggctgcgggccggctcgsctacgcgctctgctccgagccgctcactgcatggtagagtctggtgcccccgccgccgcctgcatcgccgccaccgccgctccgccacgaccaccgccgc

SEQ ID NO: 142065 - DNA, 201 bp, Homo sapiens
tagttaccttgcttttgagacctgccacttccaccttcaacatccctttgtccgccttctctgagttggatttcagttttgagttgtatatgtgaaatttkggttttaaaatacaaaagaacattattaaaattatgaatattttctttacagttataaatgagagttgtttcctttttagattcataagcatacattctt

SEQ ID NO: 142066 - DNA, 201 bp, Homo sapiens; identical to SEQ ID NO: 25879

SEQ ID NO: 142067 - DNA, 201 bp, Homo sapiens
aggctcttgctttgttgcagtgccacaatcacagctcactgcagctcttcctccgaggctccagggtgcctcctgcctcagcctccagagtagctaggaayacaggtgtataacatcaaacttggtttttttttttcttgcctttttctttttttttctttttttgtagagacgaggtctcactatgttgcccaggctggt

SEQ ID NO: 142068 - DNA, 201 bp, Homo sapiens
agtactgtgccctttgccaagaatgcttgggaaaataaaggattccattgtttcaacagattgacctggcaacttagtccagaaatgttttctttagactmatttagcagaagagatgaataaagtcaaacaactgttttacggtagaagcacttcaaagtagtgcttgagagctctgaagtttgaatgatctagctttga

SEQ ID NO: 142069 - DNA, 201 bp, Homo sapiens
gtaacctctgagggcttgtttgaacaaacttgtgataatgaaagttaccttttttatgggaccttttgataaatgattgttaatgctagttgtatgttttrccagaaaagtagactgggtttttgacttgatgttttctgcagtaatcatcataagaattattcttcaaaatttagcaaagttctagaaactataactagc

SEQ ID NO: 142070 - DNA, 201 bp, Homo sapiens
acaccaggcaattctctaaacctgtcactaaattttttgaatccacctatccaaaaggtcagcaaaagtaaaggcttcattgcacaagttgataccagtaytgtgccctttgccaagaatgcttgggaaaataaaggattccattgtttcaacagattgacctggcaacttagtccagaaatgttttctttagactcattt

SEQ ID NO: 142071 - DNA, 201 bp, Homo sapiens
gaaagaaggttgtgacctacacactgtgcccattcatccaattggttccccagtcaagagcccaatatttgagaaataaaccctaatctttactgaaagamctggggcaaatcatgtaatgcctcctaagtcaagtgaaacttataatgacattctcctatctgcctctagcttaatttctagcaactttctacccagctc

SEQ ID NO: 142072 - DNA, 201 bp, Homo sapiens
ggaacttcggagagttccctggaaattagaatatttaataattcaatattgttgtcacagtcattagattagatctagactaataggaaggaaaatccttraaattgctgatggccaaaaagtatctccctttctccagtgtcttcagttatccatttgtataaatggcaggaggcctgggttaccagaagtattactact

SEQ ID NO: 142073 - DNA, 201 bp, Homo sapiens
caatcacagctcactgcagctcttcctccgaggctccagggtgcctcctgcctcagcctccagagtagctaggaatacaggtgtataacatcaaacttggtttttttttttcttgcctttttctttttttttctttttttgtagagacgaggtctcactatgttgcccaggctggtctcaagctcctgggctcaagtgatc

SEQ ID NO: 142074 - DNA, 201 bp, Homo sapiens
aaatattagccaggctgtgcctgtagtcccagctactcaggaggctgaggcaggggaattgcttgaacccgggagagggaggttgcagtgagctgagatcrtaccactgcactctagcctggcaacagagtgagactctgtctcaaaaaaaaaaaaattggcaaaggatatgaataggcaatcttcagaaaaaaactcaaa

SEQ ID NO: 142075 - DNA, 201 bp, Homo sapiens; identical to SEQ ID NO: 25864

SEQ ID NO: 142076 - DNA, 201 bp, Homo sapiens; identical to SEQ ID NO: 25865

SEQ ID NO: 142077 - DNA, 201 bp, Homo sapiens
taagacactaaatattactgtagggggcttttgccttgtttcatttttttttttttttcctcccagaaagcggcgtggagcttttaacagcaagcaacttytgtatttggagaagtatcgtcctaaaatgcggctgcgtttcaaagattccaacggtcatagaaacaactgttgcattcaataaaattggggtgcctaatg

SEQ ID NO: 142078 - DNA, 201 bp, Homo sapiens
ttaaataatgaagtcagtaaaagaggactgaaaacgaacataaagaagagctttagctttgacgcaaagaattacatcagtgcttgacaaaaccgaggatycttaatttctaaaaacgctttctttaagcacttcctaacctttcattatctgagacaacatatcaagtgagcagcagtacaaaggatgcatgtgatttcg

SEQ ID NO: 142079 - DNA, 201 bp, Homo sapiens
gaggctgaggttgcagtgagcaaagattgcaccactgtgctccaacctgggcaaaagagcaagactccatctcaaataaatacataaaataaaatgcatcrtttctctcaacagcaaaagccttattttttcatcctttaaatatgttactttcatagtaggataagatggtaccttgtctgagaggctaagacccccagg

SEQ ID NO: 142080 - DNA, 201 bp, Homo sapiens
ccttcaccacattgtaattctccgcccccaaccccgtatttcatgtagaggagtttccttttctgcctatgagctggtatgccctaattctacttacaatkgtggggagtaaagactaccagacactgtgcctcagacagttgtccggagggctttaccacaaatcatcttagttttctaaacattctttgatgtaatttg

SEQ ID NO: 142081 - DNA, 201 bp, Homo sapiens
ttaatgaactttcagatttcaaccattcatttccttcaccacattgtaattctccgcccccaaccccgtatttcatgtagaggagtttccttttctgcctrtgagctggtatgccctaattctacttacaatggtggggagtaaagactaccagacactgtgcctcagacagttgtccggagggctttaccacaaatcatc

SEQ ID NO: 142082 - DNA, 201 bp, Homo sapiens; identical to SEQ ID NO: 25868

SEQ ID NO: 142083 - DNA, 201 bp, Homo sapiens
acctctctcgcttttaattctcacccctttctttccttttgtagaggaggggcttaaacttttaagaaattgctttgtttgctgtactctctcaaaagctwggtttgagcagccaaccctgtttgcataaaatgaaagttagaaaactaaaagttttgtgaaccaagggtggaggaaaaggttatgcattttatcacacag

SEQ ID NO: 142084 - DNA, 201 bp, Homo sapiens
tttcaattcaatctcaaacttttaggcaaaataattgtccagattactttgcttctctcactcctgctcctcctccttcacccctcccttgcctctcttgyctctttttctaacaacctagccttccttttctacctctctcgcttttaattctcacccctttctttccttttgtagaggaggggcttaaacttttaagaa

SEQ ID NO: 142085 - DNA, 201 bp, Homo sapiens; identical to SEQ ID NO: 25871

SEQ ID NO: 142086 - DNA, 201 bp, Homo sapiens
atcccagctactcaggaggctgaagtgggaggattacctgagcacgggggaggtcaaggctgcagtgagccaagattgcaccactgtactccagcctgggsgacagagtgagaccctgtctcaaaaaaaagcaaggtttaatatcaactttggtggcaccctccacagagtatttatactatagaatatgttttataaaaa

SEQ ID NO: 142087 - DNA, 201 bp, Homo sapiens
gagcatttagtcacatttggtagacaacagggtttaataagatttgattaaacattaaaatgagaatgcttttgaaaacatttccatgttagaaatttagrattattactacagtgtttatattaatgatctaaaatgtttaaatattcttctgacttaggattggccttttgatgatggtgcaccaccatccaaccagat

SEQ ID NO: 142088 - DNA, 201 bp, Homo sapiens
ctgcatcaggtcacagcctaattaatcaaaagataaattgccacaagagaggtgatggttgtctataagacactaaatattactgtagggggcttttgccktgtttcatttttttttttttttcctcccagaaagcggcgtggagcttttaacagcaagcaacttctgtatttggagaagtatcgtcctaaaatgcggctg

SEQ ID NO: 142089 - DNA, 201 bp, Homo sapiens
gctaatttttgtatttttagatgtagtttcaccatattggccaggctggtctcgaactcctgacctcaggtgagccaccacgcctggctgggaaatacttkaatggtactttaatttttattactatatattatatatacactaatatatactatatagtgtatataatagtatattatattagtaatatgtaattagtaa

SEQ ID NO: 142090 - DNA, 201 bp, Homo sapiens
tatgtgggcttttttactgtagttaagacttcattcaatgtattttaaatcagtaaagtttaaggagtgagtataattgagtgaagtcagattacccgatkagttataaataatgcctttagttacatttacctttgtctgcattgctgctagccccttttggttaatgtttcatcccaatccggtattaccatgactgta

SEQ ID NO: 142091 - DNA, 201 bp, Homo sapiens
tgtagcttcctggtaaagaattgattgcattatcactgattaggttgggggaattggaatttagtatctttgtgtataggagcaggaaaggtaaattatgwtttaaaattcactgaaggattgtaggagaagagaaaggaagaggaaattgtggcaggaacataaccaaactaaacaaaaccattgcccagcctgggatta

SEQ ID NO: 142092 - DNA, 201 bp, Homo sapiens
gaaaaaataaaggctagaacagagctctttaaaaaatagtttggttggagattcacagtgagtttgctcaagaaataatgcttaccaaactatagtatgcrttgtttaatcttgaatacaaagctatttaacttttgcagcagttttatggctgagggactagagcacatgattaaatttacagataatagcaaattagaa

SEQ ID NO: 142093 - DNA, 201 bp, Homo sapiens
gtcacacctgtaatcccagcactttgggaggctgaggcaggcagattgcttgaggtcaggagtttgagaccagcctgatcaacatggtgaaaccccgtctytactgaaagtacaaaaattagccgggtgtggtggtgcatgcctgtaatcccagctactcaagaggctgaggcatgagaatcgcttgaacccaggaggcgg

SEQ ID NO: 142094 - DNA, 201 bp, Homo sapiens
tctgtgtattttttttaagtaaagatgggttttcgccatgttggccaggctggtctcgaactcctgacctcaggtgatctgcccacctcagcctcccaaartgctgggattacaggtgtgagccaccgcacccagccacaaagcctaatttttgaaattaagttcaatagaaataaagttaccctgtcaaatcgctgtaaa

SEQ ID NO: 142095 - DNA, 201 bp, Homo sapiens
caccaccatgcctggctaatctctgtatttttaggagagatggggtttcaccattttggcaggctagtctagaaattctggcctcaagtgatctgcccacsttgacctatcaaagtactgggattacaggcatgagccacagtgcccagccgaacaaacatttttttaatgtggaaactgccattcatcacaaattgaaca

SEQ ID NO: 142096 - DNA, 201 bp, Homo sapiens
attcagcaccatagcataaaacaggctcaaaaccatggccttatatctctgtttggcctttgacaatttttagaggcagtgtggcattttgtgatgtaaawcttctccattttatttccatatttctaatctctccacttttctctgcctccactgtcctgatcatagtcaacaccaacattgtcttccatttgacaaggc

SEQ ID NO: 142097 - DNA, 201 bp, Homo sapiens
aagccgctttgtgaccgccgcctccgcccttggccctttggtctggcgcgacccgtccgggcatggcaggctccgcggcgtcccggggcctctttgttcgrccggaggagagtggctgcactgggagcgggagacgtggcccggggtggggcgagggctgcgcgtgtcactgcggagccggatacggggagggcgcggcgg

SEQ ID NO: 142098 - DNA, 201 bp, Homo sapiens
cagtataataatgatttaagcttctgcacagagattactctttcctcctctcccttcttgtatatgattgtgattataatgcaactgataggtgggagggaaaaaatccccattatggatagtttttcctgtgggtaggagattgggaatggaggagtgtcttgggcggaacagaaatctatcggtggccaccactgcttt

SEQ ID NO: 142099 - DNA, 201 bp, Homo sapiens; identical to SEQ ID NO: 25862

SEQ ID NO: 142100 - DNA, 201 bp, Homo sapiens
ctagaaccccgggggcggaggttgcagtgagccaagatcacgccagtgcactccagcctgggtgacagagcaagactctgtcaaaaaaaagaaaggagggkaggaagaaaggaagtaaggaaagaaggaaggaagggagggaaagaaagaaatcctcacagaatgaatagtgtgccctaaactaaggagtataattaactc

SEQ ID NO: 142101 - DNA, 201 bp, Homo sapiens
tttactgcacaactccagtggacgccgttcacataggctacaatgtgaaaaaagccccctgaatttgtgaacatggaggcccttctgtgctaaatcactakggtcatagggaataatagaaaaaaaggagaagataaaattgtattaaactatcataaagattttttcaaataaaacatatacatagaaaaatgatcagaa

SEQ ID NO: 142102 - DNA, 201 bp, Homo sapiens
ggcaggtgcctataattccagctactcaggaggctgagacaggaaaatcgcctgaaccccggaggcagaggttgcagtgagccaagatctcgccattgcamtccagcctgggcgaccttgtctcaagaaaaacaatttaagtctgaaaggaatctagcactaataaaggaatatcagattttaggactgatatttccaacc

SEQ ID NO: 142103 - DNA, 201 bp, Homo sapiens
gttaccttttttatgggaccttttgataaatgattgttaatgctagttgtatgttttaccagaaaagtagactgggtttttgacttgatgttttctgcagyaatcatcataagaattattcttcaaaatttagcaaagttctagaaactataactagcatgggactatttaaaggtgtaaaatggaaatgggagcagatcg

SEQ ID NO: 142104 - DNA, 201 bp, Homo sapiens
aattgatgtatgactttataatatttttctactgtaacatttgtgtcagtcgcgataactgtgttttatccacaaggataataaatactctaaagaatttmtttatagtatttcctacttaatagaaaataagtatcactacaagaaaaagcagtcttaatttttatttattagaaaaggttttattatattatttatgta

SEQ ID NO: 142105 - DNA, 201 bp, Homo sapiens
tggaaccttttgttaaaacactttggtaatgagagtacacatgaagtgcttgaggcagtgactatgaattactgctcttgttaacctgttattaatacttyccttagtgccctctttactcccgagtacacaagtaccttataaactatttggaagaagactgattattaacatcagtgtcttccatgtacatattttaaa

SEQ ID NO: 142106 - DNA, 201 bp, Homo sapiens
cccatcttctatagccttaagttttgcgaaggtaagtttctccccgcttgaaagcgcccccagggacaagaattcatcttgaccaagcctaaggccgtggyatgcaaggtgttgagtcaccgggtacagcggtcttgcgacataaatattatttgatgacgaaggtactcggggcccaggtgccaaggtaaaccactggca

SEQ ID NO: 142107 - DNA, 201 bp, Homo sapiens
attcatcaaccggttcacaccggcggcggccgccgcggagtgacgtccggagggggcgggcctccgcccccgcctgtcggctcctggcccgcggttccagrccgcgattggtggctggagggttgcacgtcgcgccggctataaaggggagggcttgtgacgcaagggcgcctcggcgcgtgtattggctccttcggctgc

SEQ ID NO: 142108 - DNA, 201 bp, Homo sapiens
ttgccacaagagaggtgatggttgtctataagacactaaatattactgtagggggcttttgccttgtttcatttttttttttttttcctcccagaaagcgkcgtggagcttttaacagcaagcaacttctgtatttggagaagtatcgtcctaaaatgcggctgcgtttcaaagattccaacggtcatagaaacaactgtt

SEQ ID NO: 142109 - DNA, 201 bp, Homo sapiens
aagaaaattaactttttatgattttttccatttacactgatgtgcctgttcatattcctttctgcatcaggtcacagcctaattaatcaaaagataaattkccacaagagaggtgatggttgtctataagacactaaatattactgtagggggcttttgccttgtttcatttttttttttttttcctcccagaaagcggcg

SEQ ID NO: 142110 - DNA, 201 bp, Homo sapiens
cagtttattaaaaatatgtatggtatttaatattcacttttctttttatattctagcattgtcacttaaaacaaaatttgcttttgtgttaaacataaatrgattctagcattctttaaatgatcttctgttaaccagcatacttactgatcagagatgatcagaatataaaatgttgagttatagtgatgtggttaaaca

SEQ ID NO: 142111 - DNA, 201 bp, Homo sapiens; identical to SEQ ID NO: 25869

SEQ ID NO: 142112 - DNA, 201 bp, Homo sapiens
gggtgggagtaataggaatgttcatgactgttggtggacactgatacagccatccagaagacaatctagagtttcttggtcaaatcaatatagctatgcaycatgcccctgcactttagctcctgggtatccatccctaagacattttgaacatccaaaaggagacaagtttgaggatgatgatggaatctggtgtgcatg

SEQ ID NO: 142113 - DNA, 201 bp, Homo sapiens; identical to SEQ ID NO: 25870

SEQ ID NO: 142114 - DNA, 201 bp, Homo sapiens
actcactatccttcatgtttaatcattattctttatggtttgcaaatcaacaaggaacaggaaatctaaaagaaaataggcaaaggatggccaggtgtgtkggctcactcctgtaatcccagcactttgggaggctgaggcaggcagatcacgaggtcaggagttcaagaccatcctggccaacatggtgaaaccccgtct

SEQ ID NO: 142115 - DNA, 201 bp, Homo sapiens
cctctgcagagacttgcttcaacaccaggaagaacatgaaagggtgactcataattcccagcagcagtgccagttcatgtgctgggattctgaccacaagyctaacaatcaggtcagggagtcagatttctgttggatttagaaaagcatctatgtgtttatgaaagaaacccactggatttttaatagttctgcagctct

SEQ ID NO: 142116 - DNA, 201 bp, Homo sapiens; identical to SEQ ID NO: 25872

SEQ ID NO: 142117 - DNA, 201 bp, Homo sapiens
attccatcccacttccaacctcaaccataggggtactcactatccttcatgtttaatcattattctttatggtttgcaaatcaacaaggaacaggaaatcwaaaagaaaataggcaaaggatggccaggtgtgtgggctcactcctgtaatcccagcactttgggaggctgaggcaggcagatcacgaggtcaggagttca

SEQ ID NO: 142118 - DNA, 201 bp, Homo sapiens
caaatagtaaattcaaataaatatctatttaagtcataaatagacctcaaaaagctaaaaacaaatattatattattgtgcagaatcttaatttctaaatraaggtgaaaagctaagcaaggatttgaagttgtgaaacatttttgtaaagattgagcatttagtcacatttggtagacaacagggtttaataagatttga

SEQ ID NO: 142119 - DNA, 201 bp, Homo sapiens
ttgaaattctattatcaaaaatgaagaattcttacataatctttcccagaatcagagccaatccagttcaacagagaggaagaccacgtatgataaatccrcaagcagaacaaaaatatttttttaaaaagatttttaggccaggcgcagtggctcatgcctgtaatcccagtactttgggagaccgaggcaggcggatcg

SEQ ID NO: 142120 - DNA, 201 bp, Homo sapiens
aaatagtaaattcaaataaatatctatttaagtcataaatagacctcaaaaagctaaaaacaaatattatattattgtgcagaatcttaatttctaaataraggtgaaaagctaagcaaggatttgaagttgtgaaacatttttgtaaagattgagcatttagtcacatttggtagacaacagggtttaataagatttgat

SEQ ID NO: 142121 - DNA, 201 bp, Homo sapiens
gactgatacaaatgttaatatttgagttctagtgagttgggacattaaggagacaacgtatctctaagacagtctcttccaattgtcaattgtttaaaccytctttcggtaccagtatacaaaagagtggtgccaggagtttcaaccactatattttattgccttaagaaatttctaggccaggcgcagtggctcatgcct

SEQ ID NO: 142122 - DNA, 201 bp, Homo sapiens
ctagtatggaatataaattctttcacaatcaggaacttgtttaattccctctagggattccctgtttcttttctgcccacatcccccatattccaaaaccyactactcatccacaactcagctccgaggtcataacctcttcatgaaagccttttttgaatcctaggtctcagttagatgaccctctctgatttcccttag

SEQ ID NO: 142123 - DNA, 201 bp, Homo sapiens
tagaaatttagaattattactacagtgtttatattaatgatctaaaatgtttaaatattcttctgacttaggattggccttttgatgatggtgcaccaccrtccaaccagattgttgatgactggttaagtcttgtgaaaattaagtttcgtgaagaacctggttgttgtattgctgttcattgcgttgcaggccttggga

SEQ ID NO: 142124 - DNA, 201 bp, Homo sapiens
tagtcacatttggtagacaacagggtttaataagatttgattaaacattaaaatgagaatgcttttgaaaacatttccatgttagaaatttagaattattrctacagtgtttatattaatgatctaaaatgtttaaatattcttctgacttaggattggccttttgatgatggtgcaccaccatccaaccagattgttgat

SEQ ID NO: 142125 - DNA, 201 bp, Homo sapiens
ggctgaggctagagaattgcttgagcccaagagttagcccaggcaacgtagcaagacaccatgtctctaaaaaataataataaaattgtcaccaggcacgstggctcatgcctgtaaccccagcactttgggaggctgaggcaggtggatcacctgaggtcaggagttcgagaccagcctggccaacatggtaaaatttct

SEQ ID NO: 142126 - DNA, 201 bp, Homo sapiens
gagaattgcttgagcccaagagttagcccaggcaacgtagcaagacaccatgtctctaaaaaataataataaaattgtcaccaggcacggtggctcatgcytgtaaccccagcactttgggaggctgaggcaggtggatcacctgaggtcaggagttcgagaccagcctggccaacatggtaaaatttctttactaaagaa

SEQ ID NO: 142127 - DNA, 201 bp, Homo sapiens
caatgtgtagtgtatatatataaacatcacacagtacaccataaatatatttaatttttgtcaattactctttaaaccttaataaagttgataaaacattmttttttaaaaagttttggattatagtagtgatagatggttttcacttatttcccatcaaaagtttatttgagcattctcctttcacaggcaccattttgg

SEQ ID NO: 142128 - DNA, 201 bp, Homo sapiens; identical to SEQ ID NO: 25880

SEQ ID NO: 142129 - DNA, 201 bp, Homo sapiens; identical to SEQ ID NO: 25881

SEQ ID NO: 142130 - DNA, 201 bp, Homo sapiens; identical to SEQ ID NO: 25882

SEQ ID NO: 142131 - DNA, 201 bp, Homo sapiens; identical to SEQ ID NO: 25883

SEQ ID NO: 142132 - DNA, 201 bp, Homo sapiens
cctacaaacatattgctaatgaaaatgtgaaattatggaacttttcatcagtgtgcctatacattcagcaccatagcataaaacaggctcaaaaccatggycttatatctctgtttggcctttgacaatttttagaggcagtgtggcattttgtgatgtaaaacttctccattttatttccatatttctaatctctccact

SEQ ID NO: 142133 - DNA, 201 bp, Homo sapiens
tgtgatcaaaaaaagaatatagggagcatagggcttcgtctgcatcaaaagatactctccccatcttctatagccttaagttttgcgaaggtaagtttctccccgcttgaaagcgcccccagggacaagaattcatcttgaccaagcctaaggccgtggcatgcaaggtgttgagtcaccgggtacagcggtcttgcgaca

SEQ ID NO: 142134 - DNA, 201 bp, Homo sapiens; identical to SEQ ID NO: 25863

SEQ ID NO: 142135 - DNA, 201 bp, Homo sapiens
caaagaattacatcagtgcttgacaaaaccgaggattcttaatttctaaaaacgctttctttaagcacttcctaacctttcattatctgagacaacatatyaagtgagcagcagtacaaaggatgcatgtgatttcgaaatgccacaattgagccaactgcagttgcacgcgtacgtagtatagagaggtgtgatcaaaaa

SEQ ID NO: 142136 - DNA, 201 bp, Homo sapiens
catattttaaaaatatgctgtgactattggtttaatgtttgatattggcataaaaatggtttagttcttaagggggaacttagagaaaatataaatacatycatatttgtttatatttattggttacagtagttaccttgcttttgagacctgccacttccaccttcaacatccctttgtccgccttctctgagttggatt

SEQ ID NO: 142137 - DNA, 201 bp, Homo sapiens
aaataacagaggtgcccttgtatggcacagaattgcgataagactttacttcttaggggcttaaataatgaagtcagtaaaagaggactgaaaacgaacayaaagaagagctttagctttgacgcaaagaattacatcagtgcttgacaaaaccgaggattcttaatttctaaaaacgctttctttaagcacttcctaacc

SEQ ID NO: 142138 - DNA, 201 bp, Homo sapiens
agcacttcctaacctttcattatctgagacaacatatcaagtgagcagcagtacaaaggatgcatgtgatttcgaaatgccacaattgagccaactgcagwtgcacgcgtacgtagtatagagaggtgtgatcaaaaaaagaatatagggagcatagggcttcgtctgcatcaaaagatactctccccatcttctatagcc

SEQ ID NO: 142139 - DNA, 201 bp, Homo sapiens
aatataatagtgggacttatagctaacaaaataaaaactactttggaaaaaatgagatgatatacctacaattccagttcccagaaataaatgtcaatgtyttctataggttagaggtatatttgtacattttgagaagggcatgtgcttgagttaatagttattgtacctgagtttgcttgaattggtatgtggacagta

SEQ ID NO: 142140 - DNA, 201 bp, Homo sapiens
aaaaacctgggtcacagactggctagagtggtcatgtcatgttttctttgatcttaatagtggatcagttattatttatcttctatatgaccttgacgttwctgattagtacaagccaattataccaagaatgtttctcagtttgggtttttctgatgtttcctcatgattagattcaggatacacgtttggcaggaatat

SEQ ID NO: 142141 - DNA, 201 bp, Homo sapiens
actctccccatcttctatagccttaagttttgcgaaggtaagtttctccccgcttgaaagcgcccccagggacaagaattcatcttgaccaagcctaaggscgtggcatgcaaggtgttgagtcaccgggtacagcggtcttgcgacataaatattatttgatgacgaaggtactcggggcccaggtgccaaggtaaacca

SEQ ID NO: 142142 - DNA, 201 bp, Homo sapiens
gccatttatggattttttatatatctgcttaacctaatgactaatgccataaaccagttggtttttcttgaaccccatctgatgcttagaatccaattttyaactacaaattctgttccttcctaatggtagctatgtagccaaaactctacctgcctctttttactaggagaaaggaattgaatgctgaataatatatcg

SEQ ID NO: 142143 - DNA, 201 bp, Homo sapiens
tgaacttaccatatatttcaccaagcaattagaagcaatcagaagggcaagcccctactgtctccatccaactccattaaaaaagatgcatttattaatakatttaccatctcttcctactactgtgaaatgtcactactgccttctgaaagccaacctccttacacccttaatggcttcacccctgtttctctttcacat

SEQ ID NO: 142144 - DNA, 201 bp, Homo sapiens
acaatttaaacaaaagaaggaaaacttttccagtttattaaaaatatgtatggtatttaatattcacttttctttttatattctagcattgtcacttaaamcaaaatttgcttttgtgttaaacataaatggattctagcattctttaaatgatcttctgttaaccagcatacttactgatcagagatgatcagaatataa

SEQ ID NO: 142145 - DNA, 201 bp, Homo sapiens
gtactttaatttttattactatatattatatatacactaatatatactatatagtgtatataatagtatattatattagtaatatgtaattagtaataatrcattttgaagcctgtagttttaaatggtatgtgggcttttttactgtagttaagacttcattcaatgtattttaaatcagtaaagtttaaggagtgagta

SEQ ID NO: 142146 - DNA, 201 bp, Homo sapiens
tagatagatctgaaaatccaggcacaatgggtcacacctgtaatcccagcactttgggaggctgaggcaggcagattgcttgaggtcaggagtttgagacmagcctgatcaacatggtgaaaccccgtctctactgaaagtacaaaaattagccgggtgtggtggtgcatgcctgtaatcccagctactcaagaggctgag

SEQ ID NO: 142147 - DNA, 201 bp, Homo sapiens
cgagattgcaccactgcactccagcctgggcaacaagagcgaaactccatctcaaaatatatatatgtgtgtatatatatatatgtatatatatgtgtgtrtatatatatatgtatatatatgtgtgtatatatatatatgtatatatatgtgtgtatatatatatatgtatatatatttgctaataactttacagaactt

SEQ ID NO: 142148 - DNA, 201 bp, Homo sapiens
gcttaaatttaagcatggaaactaatggaaccttttgttaaaacactttggtaatgagagtacacatgaagtgcttgaggcagtgactatgaattactgcycttgttaacctgttattaatactttccttagtgccctctttactcccgagtacacaagtaccttataaactatttggaagaagactgattattaacatca

SEQ ID NO: 142149 - DNA, 201 bp, Homo sapiens
atttttaaaaaataatacagtgacataaccctttagatccattaatggacaaacattggaaagttggataatgccaagtgttggagggtttgggggtgggrgtaataggaatgttcatgactgttggtggacactgatacagccatccagaagacaatctagagtttcttggtcaaatcaatatagctatgcaccatgccc

SEQ ID NO: 142150 - DNA, 201 bp, Homo sapiens
gggcaacaagagcgaaactccatctcaaaatatatatatgtgtgtatatatatatatgtatatatatgtgtgtgtatatatatatgtatatatatgtgtgtatatatatatatgtatatatatgtgtgtatatatatatatgtatatatatttgctaataactttacagaactttcatataatttagacaggtgtctaggt

SEQ ID NO: 142151 - DNA, 201 bp, Homo sapiens
ggcaacaagagcgaaactccatctcaaaatatatatatgtgtgtatatatatatatgtatatatatgtgtgtgtatatatatatgtatatatatgtgtgtatatatatatatgtatatatatgtgtgtatatatatatatgtatatatatttgctaataactttacagaactttcatataatttagacaggtgtctaggtt

SEQ ID NO: 142152 - DNA, 201 bp, Homo sapiens
aaaaaaaaaaatagagtacaacctttcagttaggatgactaagttctggagatctattacccagcatagtgactatagttaataataatgtgttacacacmtgaaaattttgaatagattagatcttaaattttctcatctcaaaaaaatatgtaaagtgatagatatgttaaatagctttatgtatttcgcaatgtgtag

SEQ ID NO: 142153 - DNA, 201 bp, Homo sapiens; identical to SEQ ID NO: 25874

SEQ ID NO: 142154 - DNA, 201 bp, Homo sapiens
atagaggtaagatttgatatgttttagtagcttaaattgattgcaatataatagtgggacttatagctaacaaaataaaaactactttggaaaaaatgagrtgatatacctacaattccagttcccagaaataaatgtcaatgtcttctataggttagaggtatatttgtacattttgagaagggcatgtgcttgagttaa

SEQ ID NO: 142155 - DNA, 201 bp, Homo sapiens
tgtgtttacatggcaagggggaaggagggtgactatcctaacccgtagggcacaatgaggacacctcaaccgccaagaatctggcgaaagggccacggccstagtgagagagaagttggggagaatcctaccaatggaatacaggcaggcccagacaggagtttaaaagaacagaaaagaggatgtagtgtcacagacaaa

SEQ ID NO: 142156 - DNA, 201 bp, Homo sapiens; identical to SEQ ID NO: 25876

SEQ ID NO: 142157 - DNA, 201 bp, Homo sapiens
ccatttgacaaggcaggaaatctcaagtgtttcaccctgttaaaataattctactctagggccttctccaatccattctccacagaacagaaaaacaattytcttaaaacaaatttcctgatatgtggtgtgattcactgtcagcaaaataaatccaaatcctttccatggcctacaaggtcctacgtgatccagtccctg

SEQ ID NO: 142158 - DNA, 201 bp, Homo sapiens
tgaggaaatagggaccctacagtttaatttgtgtttacatggcaagggggaaggagggtgactatcctaacccgtagggcacaatgaggacacctcaaccrccaagaatctggcgaaagggccacggccctagtgagagagaagttggggagaatcctaccaatggaatacaggcaggcccagacaggagtttaaaagaac

SEQ ID NO: 142159 - DNA, 201 bp, Homo sapiens; identical to SEQ ID NO: 25877

SEQ ID NO: 142160 - DNA, 201 bp, Homo sapiens
tctcagtttctatgcttatctcctctcagaccagtaacagttcatagattggcaccagttcacagactacacttagagtagcattagtctggggaacaacrtctcttgaagtagccatcagaatgaaaaggaagggcagattttcagtaaagtattgcataatcatattttatgattcacttttactaaactcatggaagg

SEQ ID NO: 142161 - DNA, 201 bp, Homo sapiens
ctctcagagcatcttctgaaatctgggttccagctccactggactctcctctgcgttctgaagcaccagtgccatccaggcagcttcctcacctcagaggyctggattccagcttccaccttctccaagcttgtagtttccaacaaccccaacctttcacctttccccccaggcctagtggtagcagctgctttctgcaat

SEQ ID NO: 142162 - DNA, 201 bp, Homo sapiens
catgtcaccaagccttgttctaacttgattcagggatttagcttagacagactagagcagcatttctgaaagggtgtttagaagatgtcctgcatcaaatyattcaaggctgtttcaaaggtgaagatttctaagccccactctacaactactgaatcagaactctggtacagatttcaaaattctcaattgtaaataagt

SEQ ID NO: 142163 - DNA, 201 bp, Homo sapiens
ggagtaattcagtgctgtaatttaaatttaaaaacattcagaagactgaaagcacaaatattcaaagtaacagatggtagcctcctctcagaggcaataaraagactttacaatcctcaccagaagtgtatttagttataatttagttttgcagtttctttttaagtatattccattacagtaggaattttctctattctt

SEQ ID NO: 142164 - DNA, 201 bp, Homo sapiens
aggtgttcaaggccagcctgggcaacatggtgaaacctcatctctacaaaaaatataacaaaacaaattagccagccatgaaaaactagccaggcatggcrgcatgcatggtggtgtgcgcctgtcatcccagctactcaggaggctgaagtgggaggattacctgagcacgggggaggtcaaggctgcagtgagccaaga

SEQ ID NO: 142165 - DNA, 201 bp, Homo sapiens
atcctcaccagaagtgtatttagttataatttagttttgcagtttctttttaagtatattccattacagtaggaattttctctattcttgtcaagcttctkgtctctcttaaacctcaaagtatatgaaaagcattctattcatgttcttttatcataatactgggagtatcttgtccagaacttgaccagaaattcttat

SEQ ID NO: 142166 - DNA, 201 bp, Homo sapiens
agttaaaaatcaatagctatatttaggctggccacgatggctcatgttaagtccagcacttttttattttttgagacagagtctcgctcttgtcaaccagrctgcaattctcctgcttcagcctcccgagtatctgggtttacaggcgtgcgccaccatgcacagctaatttctgtattttttgtagagacagtgtttcac

SEQ ID NO: 142167 - DNA, 201 bp, Homo sapiens
aaataccgatttgtgaggcctgtaacattttcagtctgggggttctctttaactaaaacaataaaaaatttattccaaaaatgaacatttatttggaaagaaaaaaacataacaaattataatttttaatgcaaaatgcctacatagacatcacaaaatccagaagagataatgtaatatttgtattaagttcctgaccca

SEQ ID NO: 142168 - DNA, 201 bp, Homo sapiens
agacatttcagaaaaatccttaatagtacaaaaacacaattactagtagcattgtattatatatacttctagccattttctatgaataggcatacatcttyatattaaaaagattatattatgcatactcttatatgctctacttttaaattttttgagacagggtctttctctgtcacccaggctagagtgcagacacac

SEQ ID NO: 142169 - DNA, 201 bp, Homo sapiens; identical to SEQ ID NO: 25904

SEQ ID NO: 142170 - DNA, 201 bp, Homo sapiens
gaccccagagaagctggctccagaaggttgggatcaatcctgaatttagtttatgtgttacatttattttatttttttaaaaaggtatagtatatataaawaatacaaaacaataatccttctgggatttctcgtggcagttgaaatagtcccacatgtggtcatcagaaaataagccattcctcataccaacatggaata

SEQ ID NO: 142171 - DNA, 201 bp, Homo sapiens
ttccctgaccccagagaagctggctccagaaggttgggatcaatcctgaatttagtttatgtgttacatttattttatttttttaaaaaggtatagtatawataaataatacaaaacaataatccttctgggatttctcgtggcagttgaaatagtcccacatgtggtcatcagaaaataagccattcctcataccaacat

SEQ ID NO: 142172 - DNA, 201 bp, Homo sapiens
gatatccaggtttgtgggaacaagcaccactgagctcctcctcatttgtgtcactatatctgatatgaatcatcacacttaatcatatgcttgtttactcyttagtttaatataaccactacttccagttagaaagaaatgagtggcttcaatttctacatgtaatgttacctgtctcaaactggcattttctagcaagat

SEQ ID NO: 142173 - DNA, 201 bp, Homo sapiens
tgatctactgagtaatacatttccattcccttatggaggaagagaagagaaaattggctaaatcagtacaacttgattttgctcacatttctactgccaaragtagcatggttactcaccaacaggcactagaaacacccacacactcacagacatgtactgccaggcatttgttaggctacaacctaatgagcttgccat

SEQ ID NO: 142174 - DNA, 201 bp, Homo sapiens
ttgttcattattaactgtaattaaaattttatattcacaaaaaacgtgcagtagtgccaagtattgaaaactttgctcttcacagaaagtttggcaatgaygcaaatttcttactgcacatgtgaaaacacaggttgctggagtttccacaattttcaaggatttttttttttagtatgttaaagtgtaatgttgtttttc

SEQ ID NO: 142175 - DNA, 201 bp, Homo sapiens
gggcacgggaaaagtaaataagcctctgcttgcttagagcacagccaaagctgattgtatttccctctagttgttaacacctgacaggacaaaggtccttygggttaaaggttcatggactcctaggctattatttcattaataagattatattaatagatacatctcttatctctcaatgaggtcccaaaaggttttctt

SEQ ID NO: 142176 - DNA, 201 bp, Homo sapiens
cccattagataaagccatgccactctcaaaacatggtcaaaagcagcctccaggtacatgctgaaccagaaagctctgggtacagcttggagaatcaggarcaaagggcaagactggccagaagaatgggctgtatctggatgtctggctcagaccgtgttgctccccaaaagcatatttccaggccaatctccttcaaca

SEQ ID NO: 142177 - DNA, 201 bp, Homo sapiens
ccccgaatgacgacatcagcctctacaggagctgcctccagctagcgccggcctgagcgtgggcctgagcggcctggcagccggctttgccatagacatcktgggggacgccggtgtgcgagccacggcccagcagccccgactattcatgggcatgatcctgatcctcatcttccccgaggtgctcggcctgtacggtct

SEQ ID NO: 142178 - DNA, 201 bp, Homo sapiens
tcccagccagcgagttgaagacacaggatagcacccccatccctatcaatgagttgggcacaaaatggctctcagaattattcatcacatcgctcctcttycggagttcaatcttcaggaacagtcctaggctgaagatgatgatgccagccaacacggagaaccagttcatgagccagagcccttgggccaacttgaccc

SEQ ID NO: 142179 - DNA, 201 bp, Homo sapiens
ctcagtgtccccaatatattcatagctctgaccccaggactggaagccactcactctttgacttctttggaggaaaagtccaggtagcgattgctgatccrctgaatctcaaaccagtcccgaaaaccgttgttgccgcagcatttgaactcgatctgcagcatgtcgatggtcttcttcatgaaacacctgccaggggtg

SEQ ID NO: 142180 - DNA, 201 bp, Homo sapiens
gatgatgatgccagccaacacggagaaccagttcatgagccagagcccttgggccaacttgacccgcttcttctggtcaaacttgactttcagtagcgccrtgcttgccaagtgtagtccgggttgcttcccacagcacagctcccaccccaaaccttaacgagcccagaggcggagacttagggccttgggaaaagtgca

SEQ ID NO: 142181 - DNA, 201 bp, Homo sapiens
agccaacacggagaaccagttcatgagccagagcccttgggccaacttgacccgcttcttctggtcaaacttgactttcagtagcgccatgcttgccaagkgtagtccgggttgcttcccacagcacagctcccaccccaaaccttaacgagcccagaggcggagacttagggccttgggaaaagtgcagatggcccaagc

SEQ ID NO: 142182 - DNA, 201 bp, Homo sapiens
cagtcccgaaaaccgttgttgccgcagcatttgaactcgatctgcagcatgtcgatggtcttcttcatgaaacacctgccaggggtgtctgtgtcccggtrgtacttcatgccgttcttgagcccttggcccagggtgttctccagcgagccccgaagcagaaagcagcagagagccacaaggaagaggatgatgttgaag

SEQ ID NO: 142183 - DNA, 201 bp, Homo sapiens
ccaagaaggggcagcctgaacgctgcagattaaaagtgggatccacaagacattttgctaatctctttagccaggttcatcccattagataaagccatgcyactctcaaaacatggtcaaaagcagcctccaggtacatgctgaaccagaaagctctgggtacagcttggagaatcaggagcaaagggcaagactggccag

SEQ ID NO: 142184 - DNA, 201 bp, Homo sapiens
cagtgtccccaatatattcatagctctgaccccaggactggaagccactcactctttgacttctttggaggaaaagtccaggtagcgattgctgatccacygaatctcaaaccagtcccgaaaaccgttgttgccgcagcatttgaactcgatctgcagcatgtcgatggtcttcttcatgaaacacctgccaggggtgtc

SEQ ID NO: 142185 - DNA, 201 bp, Homo sapiens
ccagtcccgaaaaccgttgttgccgcagcatttgaactcgatctgcagcatgtcgatggtcttcttcatgaaacacctgccaggggtgtctgtgtcccggyagtacttcatgccgttcttgagcccttggcccagggtgttctccagcgagccccgaagcagaaagcagcagagagccacaaggaagaggatgatgttgaa

SEQ ID NO: 142186 - DNA, 201 bp, Homo sapiens
acttcatgccgttcttgagcccttggcccagggtgttctccagcgagccccgaagcagaaagcagcagagagccacaaggaagaggatgatgttgaagagracacagatagccaggtacggcttcagccagggcttccatctggcatacttggctgggtccagggcgtcgtagcagatcttcccagccagcgagttgaaga

SEQ ID NO: 142187 - DNA, 201 bp, Homo sapiens
cagcatgtcgatggtcttcttcatgaaacacctgccaggggtgtctgtgtcccggtagtacttcatgccgttcttgagcccttggcccagggtgttctccmgcgagccccgaagcagaaagcagcagagagccacaaggaagaggatgatgttgaagagaacacagatagccaggtacggcttcagccagggcttccatct

SEQ ID NO: 142188 - DNA, 201 bp, Homo sapiens
aaccagtcccgaaaaccgttgttgccgcagcatttgaactcgatctgcagcatgtcgatggtcttcttcatgaaacacctgccaggggtgtctgtgtcccrgtagtacttcatgccgttcttgagcccttggcccagggtgttctccagcgagccccgaagcagaaagcagcagagagccacaaggaagaggatgatgttg

SEQ ID NO: 142189 - DNA, 201 bp, Homo sapiens
cacaaaatggctctcagaattattcatcacatcgctcctctttcggagttcaatcttcaggaacagtcctaggctgaagatgatgatgccagccaacacgragaaccagttcatgagccagagcccttgggccaacttgacccgcttcttctggtcaaacttgactttcagtagcgccatgcttgccaagtgtagtccggg

SEQ ID NO: 142190 - DNA, 201 bp, Homo sapiens
gtccaggtagcgattgctgatccactgaatctcaaaccagtcccgaaaaccgttgttgccgcagcatttgaactcgatctgcagcatgtcgatggtcttcytcatgaaacacctgccaggggtgtctgtgtcccggtagtacttcatgccgttcttgagcccttggcccagggtgttctccagcgagccccgaagcagaaa

SEQ ID NO: 142191 - DNA, 201 bp, Homo sapiens
ttggaggaaaagtccaggtagcgattgctgatccactgaatctcaaaccagtcccgaaaaccgttgttgccgcagcatttgaactcgatctgcagcatgtygatggtcttcttcatgaaacacctgccaggggtgtctgtgtcccggtagtacttcatgccgttcttgagcccttggcccagggtgttctccagcgagccc

SEQ ID NO: 142192 - DNA, 201 bp, Homo sapiens
cggagttcaatcttcaggaacagtcctaggctgaagatgatgatgccagccaacacggagaaccagttcatgagccagagcccttgggccaacttgacccrcttcttctggtcaaacttgactttcagtagcgccatgcttgccaagtgtagtccgggttgcttcccacagcacagctcccaccccaaaccttaacgagcc

SEQ ID NO: 142193 - DNA, 201 bp, Homo sapiens
atcaatgagttgggcacaaaatggctctcagaattattcatcacatcgctcctctttcggagttcaatcttcaggaacagtcctaggctgaagatgatgaygccagccaacacggagaaccagttcatgagccagagcccttgggccaacttgacccgcttcttctggtcaaacttgactttcagtagcgccatgcttgcc

SEQ ID NO: 142194 - DNA, 201 bp, Homo sapiens
ggaagccactcactctttgacttctttggaggaaaagtccaggtagcgattgctgatccactgaatctcaaaccagtcccgaaaaccgttgttgccgcagyatttgaactcgatctgcagcatgtcgatggtcttcttcatgaaacacctgccaggggtgtctgtgtcccggtagtacttcatgccgttcttgagcccttg

SEQ ID NO: 142195 - DNA, 201 bp, Homo sapiens
gccagcgagttgaagacacaggatagcacccccatccctatcaatgagttgggcacaaaatggctctcagaattattcatcacatcgctcctctttcggarttcaatcttcaggaacagtcctaggctgaagatgatgatgccagccaacacggagaaccagttcatgagccagagcccttgggccaacttgacccgcttc

SEQ ID NO: 142196 - DNA, 201 bp, Homo sapiens
aggactggaagccactcactctttgacttctttggaggaaaagtccaggtagcgattgctgatccactgaatctcaaaccagtcccgaaaaccgttgttgycgcagcatttgaactcgatctgcagcatgtcgatggtcttcttcatgaaacacctgccaggggtgtctgtgtcccggtagtacttcatgccgttcttgag

SEQ ID NO: 142197 - DNA, 201 bp, Homo sapiens
ccagccagcgagttgaagacacaggatagcacccccatccctatcaatgagttgggcacaaaatggctctcagaattattcatcacatcgctcctctttcrgagttcaatcttcaggaacagtcctaggctgaagatgatgatgccagccaacacggagaaccagttcatgagccagagcccttgggccaacttgacccgc

SEQ ID NO: 142198 - DNA, 201 bp, Homo sapiens
atagctctgaccccaggactggaagccactcactctttgacttctttggaggaaaagtccaggtagcgattgctgatccactgaatctcaaaccagtcccvaaaaccgttgttgccgcagcatttgaactcgatctgcagcatgtcgatggtcttcttcatgaaacacctgccaggggtgtctgtgtcccggtagtacttc

SEQ ID NO: 142199 - DNA, 201 bp, Homo sapiens
tacggcttcagccagggcttccatctggcatacttggctgggtccagggcgtcgtagcagatcttcccagccagcgagttgaagacacaggatagcacccscatccctatcaatgagttgggcacaaaatggctctcagaattattcatcacatcgctcctctttcggagttcaatcttcaggaacagtcctaggctgaag

SEQ ID NO: 142200 - DNA, 201 bp, Homo sapiens
catagctctgaccccaggactggaagccactcactctttgacttctttggaggaaaagtccaggtagcgattgctgatccactgaatctcaaaccagtccygaaaaccgttgttgccgcagcatttgaactcgatctgcagcatgtcgatggtcttcttcatgaaacacctgccaggggtgtctgtgtcccggtagtactt

SEQ ID NO: 142201 - DNA, 201 bp, Homo sapiens
ctgaccccaggactggaagccactcactctttgacttctttggaggaaaagtccaggtagcgattgctgatccactgaatctcaaaccagtcccgaaaacygttgttgccgcagcatttgaactcgatctgcagcatgtcgatggtcttcttcatgaaacacctgccaggggtgtctgtgtcccggtagtacttcatgccg

SEQ ID NO: 142202 - DNA, 201 bp, Homo sapiens
attcatagctctgaccccaggactggaagccactcactctttgacttctttggaggaaaagtccaggtagcgattgctgatccactgaatctcaaaccagwcccgaaaaccgttgttgccgcagcatttgaactcgatctgcagcatgtcgatggtcttcttcatgaaacacctgccaggggtgtctgtgtcccggtagta

SEQ ID NO: 142203 - DNA, 201 bp, Homo sapiens
acttcttcctttttaatctggattttttctttgcctaattgccgtggctagacctgccagtacagtgttgactaaaagatagcaagagcagacttacttaycttgctcctaatcttagaggggaagcttttctctctcatcaagtgcgatttaagctgtgagtgcctttatcacattgaggaagatcccttctgtttccag

SEQ ID NO: 142204 - DNA, 201 bp, Homo sapiens
ttattgctagttacagaaatgcaaatgatttttgtttattgatcttgtatcttgcaaccttgctgaactcatttgtaattctgtcaatagattccttaggwttttctctatacagtataatgtcatctgcaaatataggtttacttcttcctttttaatctggattttttctttgcctaattgccgtggctagacctgcca

SEQ ID NO: 142205 - DNA, 201 bp, Homo sapiens
taataatccagacagctcctaagtgactaaggggcaggtaacatagacagcatgtgcaggacaaagggataattcacgccctaggcaggacagagcagaayggctcaagatttcttcacactacttagaacagcatgtcatttaaatcttatgaattatttctggaattttccagttaatattttcagaccacagttgacc

SEQ ID NO: 142206 - DNA, 201 bp, Homo sapiens
agaaattatcaaccatattttaggcagtagttagaaaagtcatgtacaatataaagccaaatgttaatacaattgttagcaccaagaagcagaaaaattayctatctactagcattgtaattatcttctgagaattggaagcattacaaaattttatgtatatgtattaagtatgctcttggggttttccatagtcaaggt

SEQ ID NO: 142207 - DNA, 201 bp, Homo sapiens
tctcttcccttctgtttttttgaaagagtttgtgacagattgttagtacttcttaaatgtcttagaaaattttaatagtgaatcgattgagagaggaatayggaaattgctccaaagtggagattctaaacaaggctatgggagaaagcaaaaaactcttccattgcaacatttgatggtcatttgtactttcaggcatgt

SEQ ID NO: 142208 - DNA, 201 bp, Homo sapiens
tgaatatactttgtccctggaaaacacattgctcagttctggagcggctttctctccagatctctgtgcgctggggaacttagatttgctttctactgtcyaaatataaactttggtcattctccacctcccctatccctttccccacagctactcacttagtttaagtcccgttgtctctatcagttaacctcttgtggt

SEQ ID NO: 142209 - DNA, 201 bp, Homo sapiens; identical to SEQ ID NO: 25936

SEQ ID NO: 142210 - DNA, 201 bp, Homo sapiens
atttttagtagagacagggtttcactgtgttagccaggatggtctcgatctcctgacctcgtgatccgcccacctcggcctcccaaagtgctgggattacrggcgtgacccaccgcgcctggccaagctgtttgctttcttaccattcacattttcactggaatagcacttccaatttccttcaagagcttttcttttgta

SEQ ID NO: 142211 - DNA, 201 bp, Homo sapiens
gcctgttctttgaaactttgaaactaggcattgacttctcctttatagctatgaagtcctagatggcatcttccttgaatagcaggctattttgtctccaytgaaaatctgttcttagtgtagccaccttcatcaatgatcttagccagatcttctggataaacttgctgcagcttctacattagcacttgctgcttcacc

SEQ ID NO: 142212 - DNA, 201 bp, Homo sapiens
acagagcaagactccgtctcattcataaataaataaataaataaaatgattcagtctttctttacagtttttttctgaagtaaatattacatgagacacamgtcttaaatgtacatttgctaagttttgataaatgtatacacctgtgtaaccccagccctatcaaagatacagaatattacctatcacccccagaaagtt

SEQ ID NO: 142213 - DNA, 201 bp, Homo sapiens; identical to SEQ ID NO: 25915

SEQ ID NO: 142214 - DNA, 201 bp, Homo sapiens
tcccgatttaaaaaataaacagactaatatagtgaaatacagatgaaagagagaacttgtgagacaagaagagaataaaattagaatgtggaaggagccayaagtgatgggagccagagcagacggtcatattaataaagtaaggtggttttactttgtgtctgccgtcagctctgtacgtcattgtgcagtcgatttttc

SEQ ID NO: 142215 - DNA, 201 bp, Homo sapiens; identical to SEQ ID NO: 25920

SEQ ID NO: 142216 - DNA, 201 bp, Homo sapiens
cttacccacaagccccgcccccccagccccgatggccctgcccagtcccagacagaacctactacgtgcggcggcagctggggcgggaaggcgggcgctgsgggcgctgcggccgctgcagcgccagggtccacctggtcggctgcacctgtggaggaggaggtggatttcaggcttcccgtagactggaagaatcggctc

SEQ ID NO: 142217 - DNA, 201 bp, Homo sapiens
gtctagacagtcaagttgtggctttaaaagaacttgaggtgagaagggtgggaatggccactgatgagtacagaatgttttcttttttggtgtgatggaamtgttctaaaagtagataggagtgatgcttgctcgactctgtgaatctactaaacgtcactgaactatacactttaaaagggtaaatgttatggtgtgtga

SEQ ID NO: 142218 - DNA, 201 bp, Homo sapiens
gtttcactttgttggccaggctggtctggaactcctgacctcccgtgatccgcccatctcagcctcccaaagtgctgggattacaggcgtgagccaccacrcctggctaatctgttcttcactttcttttctatactcactacaaaaaagggcaaggaagtcttcacagctgcacttactaacaccgtcacggctctgttt

SEQ ID NO: 142219 - DNA, 201 bp, Homo sapiens
gaaattcagcagtgaaatatgtgactatattggatgcttgctatttgtcatttactgtatttctagcgcttgtgccatgtaagggctgatgaactcaaacmgtagctcagctttttgcatgctcttttttacccacctagaggtccagtgtttcctgtgatacttacctctaaactgctaaatagccacattttacggaag

SEQ ID NO: 142220 - DNA, 201 bp, Homo sapiens
tggtttaaaataattataggaaagaaattcagcagtgaaatatgtgactatattggatgcttgctatttgtcatttactgtatttctagcgcttgtgccaygtaagggctgatgaactcaaaccgtagctcagctttttgcatgctcttttttacccacctagaggtccagtgtttcctgtgatacttacctctaaactgc

SEQ ID NO: 142221 - DNA, 201 bp, Homo sapiens
gtccacacatttcttaacaaagaatacatatgctactacataccaactctcctttgtcagggaatccaatctagattggtttaaaataattataggaaagraattcagcagtgaaatatgtgactatattggatgcttgctatttgtcatttactgtatttctagcgcttgtgccatgtaagggctgatgaactcaaaccg

SEQ ID NO: 142222 - DNA, 201 bp, Homo sapiens
aaaaaggataatgtttatatggcacccgagataatcagataaggccagaagacaagagtcagagggttctgcctaatctaagccccaccatcctgatgttwaagggcccctgaatcggaggaccctgccacaggcaccaactgaagtcttttgtccatgtaacaaattgcagctcaagtttcaaagtcaaatctgttggag

SEQ ID NO: 142223 - DNA, 201 bp, Homo sapiens
ttatatctgtgaagcacagtaaaatgaggtatggcttagtagggaaccccatttttaaaggctcagtatgaagggtcttaaattgaagatgtatttttgcrttctggttaagacactattccatttcagggttttttgtttttaagtggtttcccaacactcctcagggaaattgagcaagaattccatcggcagtcctca

SEQ ID NO: 142224 - DNA, 201 bp, Homo sapiens
aaagaaaaacacctttatatctgtgaagcacagtaaaatgaggtatggcttagtagggaaccccatttttaaaggctcagtatgaagggtcttaaattgargatgtatttttgcgttctggttaagacactattccatttcagggttttttgtttttaagtggtttcccaacactcctcagggaaattgagcaagaattcc

SEQ ID NO: 142225 - DNA, 201 bp, Homo sapiens
aaaacgtattttaataatgaaaaagcctgaaatattgtggaaattaccaaaaggtaacagagatagaaagtgaacacatgctgttggaaaaacttcaccartagacctgctcagtgcagggttggcacaaaccttcaatttgtaaaaaagaaaaacacctttatatctgtgaagcacagtaaaatgaggtatggcttagta

SEQ ID NO: 142226 - DNA, 201 bp, Homo sapiens
gttcccaaggttcatttaccattattaaaaaatttttgtcttagaaattttatgtatgtcaacgcacgagcaaattatcaggcatggggcagaattggcarctgggtggaggcttcggtggaggtgagcactccgaaaggaaaacagagtaggcctttggaacagctgctggaagagataaggcctgaacaagggcagtgg

SEQ ID NO: 142227 - DNA, 201 bp, Homo sapiens
acagggtttcactgtgttagccaggatggtctcgatctcctgacctcgtgatccgcccacctcggcctcccaaagtgctgggattacaggcgtgacccacygcgcctggccaagctgtttgctttcttaccattcacattttcactggaatagcacttccaatttccttcaagagcttttcttttgtatttacaacttggc

SEQ ID NO: 142228 - DNA, 201 bp, Homo sapiens
taaaaaatttttgtcttagaaattttatgtatgtcaacgcacgagcaaattatcaggcatggggcagaattggcagctgggtggaggcttcggtggaggtkagcactccgaaaggaaaacagagtaggcctttggaacagctgctggaagagataaggcctgaacaagggcagtggagaagagagggtaaaaattttttaa

SEQ ID NO: 142229 - DNA, 201 bp, Homo sapiens
tttggaacagctgctggaagagataaggcctgaacaagggcagtggagaagagagggtaaaaattttttaaggttacatgaccctggattttggagatctsgaatttaaaggtgatgcaccagggatgaacgctcagattttcagtttgaaagctggcgtgacatgtaaaggagtggagaataatgtaccattgtaatgat

SEQ ID NO: 142230 - DNA, 201 bp, Homo sapiens
gaacattattctaagtctttaattcccacaacaaccctagaagcaggaactattgttatctctattttatagataaagtaaaccacaaggggttaacacgwtttgtcttgtgggtgacaaaatgcattcaacttgagcactttgactcagaatctttttttttttttttttttaagagggagtcttgctctgtcgcccagg

SEQ ID NO: 142231 - DNA, 201 bp, Homo sapiens
agcgagactccgtctcaaaaaaaaaaaaaaaaaaagagaaatgaaacaaaccaataatactagtaggcaccatttatagaacacttgatgtgttaggcacratgctacattcttttttggttttgggggatgggggcggagtcctgctctgtcactgaagctggagtgcagtggcgccatcttggctcactgcaacctctg

SEQ ID NO: 142232 - DNA, 201 bp, Homo sapiens
aaactcctgacttcaggtgatccacctgcctcggcctcccaaagtgctgggattacagacgtaagccactgcacccgacttataatcaactttaatgcagracttcaccaccacagtcaatctaataatccagacagctcctaagtgactaaggggcaggtaacatagacagcatgtgcaggacaaagggataattcacgc

SEQ ID NO: 142233 - DNA, 201 bp, Homo sapiens
tagtttacagtttttttcttaccatttgcatatgtagtatactagcatgatatttatccaacttgacagtggcttaccattgtgaagaaaaaagggaaacyttttatttgctttatgcactattgatgcatttaaactgagaatcagggaagctgtgtttttaatggacacataatttaattatatattttttcttacaga

SEQ ID NO: 142234 - DNA, 201 bp, Homo sapiens
ctggaagagataaggcctgaacaagggcagtggagaagagagggtaaaaattttttaaggttacatgaccctggattttggagatctcgaatttaaaggtsatgcaccagggatgaacgctcagattttcagtttgaaagctggcgtgacatgtaaaggagtggagaataatgtaccattgtaatgatgaggcgcctctag

SEQ ID NO: 142235 - DNA, 201 bp, Homo sapiens
tgattcaagcaggcgttcctgaccacctggagcatactggggtgcagcctgcatagtactgaagaagtaaccaaagattggggttcattggaggctggaakggtcagaagattcctcagtggagaagctgggtttggaaggggagctggagagaacacaggcttaagtgagagttagggaacaggaatagcagatcctaat

SEQ ID NO: 142236 - DNA, 201 bp, Homo sapiens
tcaataacctgtagtttcacataaagtcaaaacaactattttttgggacttgctaaaattaagtgatgatcccctttctggacccaaccctaaatgcaatmaaatgtgaattttaggatgggctgaaatgggtcataatcttctactctgttattcctagttaaccacaatacccaataatattttgtacttaacattcat

SEQ ID NO: 142237 - DNA, 201 bp, Homo sapiens
ccactaaatgtcaggatgtccatcatatctatgcacatagataagtcctcaatgtcatctgtgagttcttggaaactgtgactttaagtgaaacaatgtakagcaaaaccaattttaccataggctactggatgtacacaagagttaagttcctagggcatattgctggtcacaaaaacatcaccaaacttctaaatgaag

SEQ ID NO: 142238 - DNA, 201 bp, Homo sapiens
tcccgggttcacaccattcttctgcctcagcctcctgagtagctgggactacagacgcctgccaccacacctggctaattttttgtatttttagtagagayggggtttcaccgtgttagccaggatggtctcgatctcctgacctcgtgatctgcccatcttggcctccccagaatctttactatgtcatacacaattgca

SEQ ID NO: 142239 - DNA, 201 bp, Homo sapiens
tagaattaatttagttctcagcagagaactcaagtaagtaccttaacataaattcaccacaagaaaatcatgtctcatagtggagatcagtatatgataaratgaaattgtataaaaggagctattgatgaagctgcttaatatcacaaaggtgattatagaaaattaataagcagttatttatactacatgacaataact

SEQ ID NO: 142240 - DNA, 201 bp, Homo sapiens
tgactatattggatgcttgctatttgtcatttactgtatttctagcgcttgtgccatgtaagggctgatgaactcaaaccgtagctcagctttttgcatgytcttttttacccacctagaggtccagtgtttcctgtgatacttacctctaaactgctaaatagccacattttacggaagcatattcttcatacctttgct

SEQ ID NO: 142241 - DNA, 201 bp, Homo sapiens
cccctttctggacccaaccctaaatgcaataaaatgtgaattttaggatgggctgaaatgggtcataatcttctactctgttattcctagttaaccacaayacccaataatattttgtacttaacattcattacccagtgtctgaaggtaaaacatttcaaagtattgaaatggttctagagatcctggagagaagcgggt

SEQ ID NO: 142242 - DNA, 201 bp, Homo sapiens
atttgtcatttactgtatttctagcgcttgtgccatgtaagggctgatgaactcaaaccgtagctcagctttttgcatgctcttttttacccacctagagrtccagtgtttcctgtgatacttacctctaaactgctaaatagccacattttacggaagcatattcttcatacctttgctctaacttaaatctctaacttt

SEQ ID NO: 142243 - DNA, 201 bp, Homo sapiens
cctcccaagtagctgggattataggcacacaccatcgtgcccggctaatttttgtatattttgtagagtcaggattttgccatgttgcccaggccggtctygaactcctgggttcaggcaattcacctcccaatgtgctgggattacaggtgtgaaccaccacacccagcctatttatctttttaattggcaaataattgc

SEQ ID NO: 142244 - DNA, 201 bp, Homo sapiens
tttttggtgtgatggaactgttctaaaagtagataggagtgatgcttgctcgactctgtgaatctactaaacgtcactgaactatacactttaaaagggtraatgttatggtgtgtgatttatatcaataaagtggcttttaaaagtctttggaaccagccgggcacagtggctcacatctgtaatcccagcactttggga

SEQ ID NO: 142245 - DNA, 201 bp, Homo sapiens
ctcccaatgtgctgggattacaggtgtgaaccaccacacccagcctatttatctttttaattggcaaataattgcatatatatatatattatgtacaacaygttgttttgaaatgtgtatacattgtagaatggctaaatggagctaattaacatgtattacccacttattttgtgtggtaagaacacttaaagtctactc

SEQ ID NO: 142246 - DNA, 201 bp, Homo sapiens
tggtagatttcaaattcacagactatatcgccattccaagaaactctttaatgatatttttgaatactactcaagtttgtttatggctagcttaagctcamacagaaagaaatctcagtgggggagatgttcacttgagccagcatttctcctcgaatatgatgagtgtaatttttttttacgaccttcctgtgatgcatg

SEQ ID NO: 142247 - DNA, 201 bp, Homo sapiens
agtctttaattcccacaacaaccctagaagcaggaactattgttatctctattttatagataaagtaaaccacaaggggttaacacgttttgtcttgtggrtgacaaaatgcattcaacttgagcactttgactcagaatctttttttttttttttttttaagagggagtcttgctctgtcgcccaggctggagtgcagtg

SEQ ID NO: 142248 - DNA, 201 bp, Homo sapiens; identical to SEQ ID NO: 25913

SEQ ID NO: 142249 - DNA, 201 bp, Homo sapiens
gcccgccttacccacaagccccgcccccccagccccgatggccctgcccagtcccagacagaacctactacgtgcggcggcagctggggcgggaaggcggscgctgggggcgctgcggccgctgcagcgccagggtccacctggtcggctgcacctgtggaggaggaggtggatttcaggcttcccgtagactggaagaat

SEQ ID NO: 142250 - DNA, 201 bp, Homo sapiens
acccacaagccccgcccccccagccccgatggccctgcccagtcccagacagaacctactacgtgcggcggcagctggggcgggaaggcgggcgctggggscgctgcggccgctgcagcgccagggtccacctggtcggctgcacctgtggaggaggaggtggatttcaggcttcccgtagactggaagaatcggctcaaa

SEQ ID NO: 142251 - DNA, 201 bp, Homo sapiens
agccccgcccccccagccccgatggccctgcccagtcccagacagaacctactacgtgcggcggcagctggggcgggaaggcgggcgctgggggcgctgcrgccgctgcagcgccagggtccacctggtcggctgcacctgtggaggaggaggtggatttcaggcttcccgtagactggaagaatcggctcaaaaccgctt

SEQ ID NO: 142252 - DNA, 201 bp, Homo sapiens
gagccctaacatcagcctaaccagatttcaaatttcatcttttggcggtatgcatttttaacagtcacccctcaactaacacatcatcctccctcaactcmcattctactaaccccatcaatgcaactccctgcccaccttactcaacatatacaccgctgctagccccataccccgaaccaaccaaaccccaaagacacc

SEQ ID NO: 142253 - DNA, 201 bp, Homo sapiens
  misc_feature (1)...(201): n = A,T,C or G
ttaacagtcacccctcaactaacacatcatcctccctcaactcccattctactaaccccatcaatgcaactccctgcccaccttactcaacatatacaccrctgctagccccataccccgaaccaaccaaaccccaaagacaccccatatggtttatgtagcttacttcctcaannnnnnnnnnnnnnnnnnnnnnnnnnn

SEQ ID NO: 142254 - DNA, 201 bp, Homo sapiens; identical to SEQ ID NO: 25922

SEQ ID NO: 142255 - DNA, 201 bp, Homo sapiens; identical to SEQ ID NO: 25923

SEQ ID NO: 142256 - DNA, 201 bp, Homo sapiens; identical to SEQ ID NO: 25926

SEQ ID NO: 142257 - DNA, 201 bp, Homo sapiens; identical to SEQ ID NO: 25927

SEQ ID NO: 142258 - DNA, 201 bp, Homo sapiens
gtatttgcctctggaaagaacaactggcaggactgttgttttcattgtaagacttttggagccatttaattgtacttaaccattttcatctatttctttartaagaacaattccatcttaataaagagttacacttgttaataagtgctggcctcctgttgttctttgtacaccccacacaaaatttcaaagaaactttga

SEQ ID NO: 142259 - DNA, 201 bp, Homo sapiens; identical to SEQ ID NO: 25928

SEQ ID NO: 142260 - DNA, 201 bp, Homo sapiens; identical to SEQ ID NO: 25931

SEQ ID NO: 142261 - DNA, 201 bp, Homo sapiens; identical to SEQ ID NO: 25934

SEQ ID NO: 142262 - DNA, 201 bp, Homo sapiens; identical to SEQ ID NO: 25933

SEQ ID NO: 142263 - DNA, 201 bp, Homo sapiens; identical to SEQ ID NO: 25937

SEQ ID NO: 142264 - DNA, 201 bp, Homo sapiens
cctgcctacaatgagtttaaaaaatagagaaacgaggcgggcggatcacgaggtcaggagatcgagaacatcctggctaacacagtgaaaccccgtctctwctaaaaatacaaaaaattagctggatgtggtggcgggtacctgtagtcccagctactcgggaggctgaggcaggagaatggcatgaacccaggaggcgga

SEQ ID NO: 142265 - DNA, 201 bp, Homo sapiens
gtgttgtccctgcctacaatgagtttaaaaaatagagaaacgaggcgggcggatcacgaggtcaggagatcgagaacatcctggctaacacagtgaaaccmcgtctctactaaaaatacaaaaaattagctggatgtggtggcgggtacctgtagtcccagctactcgggaggctgaggcaggagaatggcatgaacccag

SEQ ID NO: 142266 - DNA, 201 bp, Homo sapiens
aagtttactgtgttgtccctgcctacaatgagtttaaaaaatagagaaacgaggcgggcggatcacgaggtcaggagatcgagaacatcctggctaacacrgtgaaaccccgtctctactaaaaatacaaaaaattagctggatgtggtggcgggtacctgtagtcccagctactcgggaggctgaggcaggagaatggca

SEQ ID NO: 142267 - DNA, 201 bp, Homo sapiens
tgatacttacctctaaactgctaaatagccacattttacggaagcatattcttcatacctttgctctaacttaaatctctaactttgcactatatttaatwtgggttttttggggggaaggggggagtggagttggttttttttgagacagagtctcgctgtctcgcccaggctggagtgcagtggcacaatctcagctca

SEQ ID NO: 142268 - DNA, 201 bp, Homo sapiens
agatacctgggcttatttaacttctctctggccaccatgtctttttccagcctgagtcaaagtatattctttgctctaacctaattcttttaagaatgacmgagtaaaataagtaaaatttatatgaggagggagagggaggaggcaatcaagagaatgaatagtccctattcttgattaatccttattataactatgagt

SEQ ID NO: 142269 - DNA, 201 bp, Homo sapiens; identical to SEQ ID NO: 25911

SEQ ID NO: 142270 - DNA, 201 bp, Homo sapiens
acactacttagaacagcatgtcatttaaatcttatgaattatttctggaattttccagttaatattttcagaccacagttgaccatagataacaaactggraagtgaaactgcagataaggggggagtctgcattccactttttaaatttttggtacagtaagaattagtagagcatctatttggttgtagcaaagataat

SEQ ID NO: 142271 - DNA, 201 bp, Homo sapiens; identical to SEQ ID NO: 25912

SEQ ID NO: 142272 - DNA, 201 bp, Homo sapiens
agaattagtagagcatctatttggttgtagcaaagataataaatgatttaatataaaatgatatattgaaaataaaaagtgaaatttgttctgtacccttmtttggaattttaaaaataaacacttggatttgttgtgtgtgtgtgtgtgtgtgtgtgtgtatttttcttttctataaactatttgagatcaagaattact

SEQ ID NO: 142273 - DNA, 201 bp, Homo sapiens; identical to SEQ ID NO: 25914

SEQ ID NO: 142274 - DNA, 201 bp, Homo sapiens
atctttttttttttaaagctcatcagctattgttaatgtttgtgtattgtatgtgtggcccaagacaattcttcttccaatgtggccaagagaagccaaartattggaccacccctgagtaaacactgaaattaattaacttcttcccttttggattttaattacataagtaataataagctcattttttaatacttcacc

SEQ ID NO: 142275 - DNA, 201 bp, Homo sapiens; identical to SEQ ID NO: 25917

SEQ ID NO: 142276 - DNA, 201 bp, Homo sapiens
tcattttttaatacttcacccattcctgtattgtttgaaacataaatcctttccccattcccaaaggtaacaacatattaacagtctgaatgtcattccargcttttctgcagtcattcaaacatatcactctttttctaatattaggaaaatcttcacacatacagaaagaactttacagtaaactcaccacctagatct

SEQ ID NO: 142277 - DNA, 201 bp, Homo sapiens
attttttgtttttgagatggagtcttgctccgttgcccaggctggagtgcagtggcacgatcttggctcattgcaacctccacctcccaggttcagcgatkctcctgcctcagcctcccaagtagctgggattacaggcacgtgccgccatgcccagctaatttttgtatttttagtagagacagggtttcatcatgttgg

SEQ ID NO: 142278 - DNA, 201 bp, Homo sapiens
ctttttctgagtctattgagatgatcatgtggtttttgtcttttatactaatattttaatgtactattaatatggtatatcacattgattttcatgttaarctaatgtttctgggataaattctacttggtaatggtatataatcctttttatatgttactgggcttaggttgctagtattttgttgaagatttttgcatt

SEQ ID NO: 142279 - DNA, 201 bp, Homo sapiens
aactgcttgttcctgggaggcagaggtcgtagtaagccaagatcacgccattgcactccagcctgggcgacagagcaagaccgtctcaaaaacaaacaaamaaaaatattaagtattttaacacctgagcatgtgatgtctttccccttgtttaggtcctatttcgttcagcgatgttttatacctttcagtgttaatttc

SEQ ID NO: 142280 - DNA, 201 bp, Homo sapiens
aaaatctcacagatcactactaaagaacttactcatgtaaccaaatacaacctgttccccaaaaacctatggaaataataaattaaaaaaaaaaaaaaaaagcttggcacagtgactcatgcctgtaatcccagcactttgggaggtcgaggcaggggcagatcacctgaggtcaggagttcaagaccagcctggccaaca

SEQ ID NO: 142281 - DNA, 201 bp, Homo sapiens; identical to SEQ ID NO: 25930

SEQ ID NO: 142282 - DNA, 201 bp, Homo sapiens
tttctccatgttggtcgggctggtctcaaactcctgacttcaggtgatccacctgcctcggcctcccaaagtgctgggattacagacgtaagccactgcasccgacttataatcaactttaatgcagaacttcaccaccacagtcaatctaataatccagacagctcctaagtgactaaggggcaggtaacatagacagca

SEQ ID NO: 142283 - DNA, 201 bp, Homo sapiens
tacaggcatgcgccaccacgcccagctaattttgtattttaagtagagacggagtttctccatgttggtcgggctggtctcaaactcctgacttcaggtgrtccacctgcctcggcctcccaaagtgctgggattacagacgtaagccactgcacccgacttataatcaactttaatgcagaacttcaccaccacagtcaa

SEQ ID NO: 142284 - DNA, 201 bp, Homo sapiens
cctcccgggttcaagtgattctcctgcctcagcctcccaagtagctgggattacaggcatgcgccaccacgcccagctaattttgtattttaagtagagayggagtttctccatgttggtcgggctggtctcaaactcctgacttcaggtgatccacctgcctcggcctcccaaagtgctgggattacagacgtaagccac

SEQ ID NO: 142285 - DNA, 201 bp, Homo sapiens
atttaccatcactccttttacagaaggtttgccttgtataatcaactttttttttctttttttttgagacggagtttcgctctttttgcccaggctggagygcaatggtgcagtcttggctcaccgcaacctccgcctcccgggttcaagtgattctcctgcctcagcctcccaagtagctgggattacaggcatgcgcca

SEQ ID NO: 142286 - DNA, 201 bp, Homo sapiens
aaggtaggaaaccctatggccctcagagcctaaaatatttaccatcactccttttacagaaggtttgccttgtataatcaactttttttttctttttttttgagacggagtttcgctctttttgcccaggctggagcgcaatggtgcagtcttggctcaccgcaacctccgcctcccgggttcaagtgattctcctgcctc

SEQ ID NO: 142287 - DNA, 201 bp, Homo sapiens
gctacttgggaggctgaggtgggaaaatcacttgaacatggggggcagaggttgcagtaagctgagatcgtgccactgcactccagcctgggtaacagagygagactctgtctcaaaaaaaaaaaaaaaaaaaaaaaactctcagtttcttgggctcctgtttctagaacctcttatgttccccatttgtaatagaagaaa

SEQ ID NO: 142288 - DNA, 201 bp, Homo sapiens
ttctgccatgtgggtggtcttgtggtaagatatatacagtgaaattattttagaaagaagaggtaggccgacgcctgtaatcccagcactttgggaggccraggcgggtggattgcttgaggtcaggatctaaaaaccagctgggccaagatggtgaaactccatctctcctaaaaatacaaaaattagttgtgtgtgggc

SEQ ID NO: 142289 - DNA, 201 bp, Homo sapiens
cctatcatcgggcggagggtccacgcctccgcccgccttacccacaagccccgcccccccagccccgatggccctgcccagtcccagacagaacctactaygtgcggcggcagctggggcgggaaggcgggcgctgggggcgctgcggccgctgcagcgccagggtccacctggtcggctgcacctgtggaggaggaggtg

SEQ ID NO: 142290 - DNA, 201 bp, Homo sapiens
ctcctgccctgtccaagttaatctttatcccacccctccagaaataactactattctgatgtttttccaccagagatatcacaagatatcacatggttttrtgattcattgtgaaccacagatgtacaaatataggttaaattattggtcagaggccatactgatgttaagtgctttttgttgaaaggattcatatttatg

SEQ ID NO: 142291 - DNA, 201 bp, Homo sapiens
gaattagtagagcatctatttggttgtagcaaagataataaatgatttaatataaaatgatatattgaaaataaaaagtgaaatttgttctgtacccttakttggaattttaaaaataaacacttggatttgttgtgtgtgtgtgtgtgtgtgtgtgtgtatttttcttttctataaactatttgagatcaagaattactg

SEQ ID NO: 142292 - DNA, 201 bp, Homo sapiens
ttatgttctaaacagcttcagattgtatttttgtcttttgcttacacaagaaatgtgataccaaatgtaagtcttgcaaaaaattcttaagaaatttcctrttagctgggtgatagagtggaaagatacaagggaaactgctgactggtttttgagagaatgaggaatccaaaggaaacaaaaaaggagaaattacacttt

SEQ ID NO: 142293 - DNA, 201 bp, Homo sapiens
tagttagaaaagtcatgtacaatataaagccaaatgttaatacaattgttagcaccaagaagcagaaaaattacctatctactagcattgtaattatcttstgagaattggaagcattacaaaattttatgtatatgtattaagtatgctcttggggttttccatagtcaaggtctcattaaattgtactatcttattcat

SEQ ID NO: 142294 - DNA, 201 bp, Homo sapiens
ggttttatgattcattgtgaaccacagatgtacaaatataggttaaattattggtcagaggccatactgatgttaagtgctttttgttgaaaggattcatrtttatgatgattttagttctatagtcactgcatcttagtcagattatttgactagtatggatggattttacaaacattttgtggaattctttttttaacc

SEQ ID NO: 142295 - DNA, 201 bp, Homo sapiens
aatataaagccaaatgttaatacaattgttagcaccaagaagcagaaaaattacctatctactagcattgtaattatcttctgagaattggaagcattacraaattttatgtatatgtattaagtatgctcttggggttttccatagtcaaggtctcattaaattgtactatcttattcatacaagtttatgtaaattttt

SEQ ID NO: 142296 - DNA, 201 bp, Homo sapiens
acatcacaacagcttgtagatatcattcaggcttatcttcctatgggccaaatcggacctcccagcctgtttttgtaaagaaagtttcagtggaacacagmcccacccattcattcagttctgtctgtggcctgcaaaggtaggaaaccctatggccctcagagcctaaaatatttaccatcactccttttacagaaggtt

SEQ ID NO: 142297 - DNA, 201 bp, Homo sapiens
aacaaatgttctgttctactttcagcttccttgccatttaaaggaagtggaagaaacaggtataactcattgtctgaacctttaaaaaattaagccatgcrtataggaagcagcacattatctgtactgtaaattatttgttgttagttgaaattatttgttgtttgatactatacaaactaaatagaaatgcaaaaataa

SEQ ID NO: 142298 - DNA, 201 bp, Homo sapiens
cagtggaacacagacccacccattcattcagttctgtctgtggcctgcaaaggtaggaaaccctatggccctcagagcctaaaatatttaccatcactccytttacagaaggtttgccttgtataatcaactttttttttctttttttttgagacggagtttcgctctttttgcccaggctggagcgcaatggtgcagtct

SEQ ID NO: 142299 - DNA, 201 bp, Homo sapiens
ttgacattttatcatgagattccagcaattccatcccatcttcaggccccactttttttttttttttttttgagacggagtcttgcctgtggcccaggctsgagtgcagtggcccgatctcagctcactgcaagctccgcctcccgggttcacaccgttctcctgcctcagcctccctagtagctgggactacaggtgccc

SEQ ID NO: 142300 - DNA, 201 bp, Homo sapiens
ggttgtagtctgtcatgcctgtgcctttgcacatgtttttatctcctttgacactcagttaaggagtcatgccctgaggagtattctccctcatcaccccrgccctgcgttcctgtatagcgtcctctgcatgtcttcgttgtatgtcctttcatacattatagtcactgctgagatatttctgactgctatcacaatctc

SEQ ID NO: 142301 - DNA, 201 bp, Homo sapiens
ctgggctacagagcgagactccgtctcaaaaaaaaaaaaaaaaaaagagaaatgaaacaaaccaataatactagtaggcaccatttatagaacacttgatrtgttaggcacaatgctacattcttttttggttttgggggatgggggcggagtcctgctctgtcactgaagctggagtgcagtggcgccatcttggctcac

SEQ ID NO: 142302 - DNA, 201 bp, Homo sapiens
aaaggacaagctggaattctccagcaggggctgaagtggtacaggtgaaatttcttcaggaaagcctcaactctactcttaaagcctttaaactgattgawtcagcccactcagattaaagtctgaccgggcacagtggctaacccctgcaatcccagcactttggaaggccaaggcaggtggatcacttgagctcaggag

SEQ ID NO: 142303 - DNA, 201 bp, Homo sapiens
tggcttacacaattatgggggctgggtacgtgagtccaaaaatctgtaaaacgggccatcagaaaggacaagctggaattctccagcaggggctgaagtgstacaggtgaaatttcttcaggaaagcctcaactctactcttaaagcctttaaactgattgattcagcccactcagattaaagtctgaccgggcacagtgg

SEQ ID NO: 142304 - DNA, 201 bp, Homo sapiens
acatttatgaggaggaagaaaaatctagtttctgccatgtgggtggtcttgtggtaagatatatacagtgaaattattttagaaagaagaggtaggccgaygcctgtaatcccagcactttgggaggccaaggcgggtggattgcttgaggtcaggatctaaaaaccagctgggccaagatggtgaaactccatctctcct

SEQ ID NO: 142305 - DNA, 201 bp, Homo sapiens
gcaattcacctcccaatgtgctgggattacaggtgtgaaccaccacacccagcctatttatctttttaattggcaaataattgcatatatatatatattawgtacaacatgttgttttgaaatgtgtatacattgtagaatggctaaatggagctaattaacatgtattacccacttattttgtgtggtaagaacacttaa

SEQ ID NO: 142306 - DNA, 201 bp, Homo sapiens
gattgagaccatcatggctaacacggtgaaaccacgtctcttctaaaaatacaaaaaattagccgggcgtggtggcaggcacctgtagtcccagctactcrggaagctaaggcaggagaatggcatgaacctgggaggcggagcttgcagtgagctgagatcgcgccactgtactccagcctgggctacagagcaagactc

SEQ ID NO: 142307 - DNA, 201 bp, Homo sapiens
aggcctcagtgtggcccaggatggctttgaatgctgcccaacacaaattagtaaatttccttaaaacatgcacagatctttttttttttaaagctcatcarctattgttaatgtttgtgtattgtatgtgtggcccaagacaattcttcttccaatgtggccaagagaagccaaagtattggaccacccctgagtaaacac

SEQ ID NO: 142308 - DNA, 201 bp, Homo sapiens
ccttgttctagattgggctttggcataaggtactgtggctggtttgatctatccagaccactcagcttcctctacatcagcaataaggctgtttgcttttytgtttttgtttttgtttgagacggagtctcgctctttcgcccaggctggagagtgcagtggcgtgatctcagctcactgcaagctccacctcctgggttc

SEQ ID NO: 142309 - DNA, 201 bp, Homo sapiens
cttgctagtttcaaacttttcttctatagctttctcacctctctcagcctttacagaattaaagagggttaaagccttgttctagattgggctttggcatraggtactgtggctggtttgatctatccagaccactcagcttcctctacatcagcaataaggctgtttgcttttttgtttttgtttttgtttgagacggag

SEQ ID NO: 142310 - DNA, 201 bp, Homo sapiens
aggctttaaatatttagtgaaccatgctataaacagacgtgctgtcatccaaacttcgttgttccatttctaatacacaggcagagtatatttagcgtaaytcttaaaggccctgggattttcagaatggtaaatgagcattggcttccactgaaagtcatcagcttgcattagctcctaacaagagaatcagcctgttct

SEQ ID NO: 142311 - DNA, 201 bp, Homo sapiens
tgaaaggaatcttccttcctgagaagtaggtctcaacaggaggctttaaatatttagtgaaccatgctataaacagacgtgctgtcatccaaacttcgttrttccatttctaatacacaggcagagtatatttagcgtaattcttaaaggccctgggattttcagaatggtaaatgagcattggcttccactgaaagtcat

SEQ ID NO: 142312 - DNA, 201 bp, Homo sapiens
caaaattactccttgatccatgggctgcagaatgagcaggaatattttgaaaggaatcttccttcctgagaagtaggtctcaacaggaggctttaaatatytagtgaaccatgctataaacagacgtgctgtcatccaaacttcgttgttccatttctaatacacaggcagagtatatttagcgtaattcttaaaggccct

SEQ ID NO: 142313 - DNA, 201 bp, Homo sapiens; identical to SEQ ID NO: 25909

SEQ ID NO: 142314 - DNA, 201 bp, Homo sapiens
gctgggattacaggcattagccaccacacccagcccaggttccacttctaattctagttctcttgccatttccaccacatctgcagttatttccacccccraagtcttaaacccctcaaagccatcatgagggttggaatcaactaactccaaactcctgttaatgttgatattttgatctcctatgaatcatgaatgttg

SEQ ID NO: 142315 - DNA, 201 bp, Homo sapiens
atggggggcagaggttgcagtaagctgagatcgtgccactgcactccagcctgggtaacagagtgagactctgtctcaaaaaaaaaaaaaaaaaaaaaaamctctcagtttcttgggctcctgtttctagaacctcttatgttccccatttgtaatagaagaaaagggacattttttcttgatatttttatccaagtatga

SEQ ID NO: 142316 - DNA, 201 bp, Homo sapiens; identical to SEQ ID NO: 25924

SEQ ID NO: 142317 - DNA, 201 bp, Homo sapiens
tgctgagatatttctgactgctatcacaatctctttgagttcagggactgcatattttatctctatccccagaatctagcataacccctagcaaagtaggrattcaaaaatcacagaatgaatagtacataggtgatttataaaaatagaaccatcccacatagtaccactttgtaacccacctctttttccctcaatata

SEQ ID NO: 142318 - DNA, 201 bp, Homo sapiens; identical to SEQ ID NO: 25932

SEQ ID NO: 142319 - DNA, 201 bp, Homo sapiens
accacgcctgctagttttctgtattttttagtagagacagggtctcactgtgttagccaggatggtctccatctcctgacctcgtgatccgtccaccttgkcctcccaaagtgctgggattacaggcattagccaccacacccagcccaggttccacttctaattctagttctcttgccatttccaccacatctgcagtta

SEQ ID NO: 142320 - DNA, 201 bp, Homo sapiens
tttacccacaacagaatttctttcaaaatgggaatcagtcctctcaaaccttgctgttgctttattaacttagtttgcatagtattctaaatctttcgtgrtcaacaatgttcacagcatcttcactgggagtagatttcatctcaagaagccagtttctttgctcatccataagaagtaattccttatccattgacattt

SEQ ID NO: 142321 - DNA, 201 bp, Homo sapiens; identical to SEQ ID NO: 25935

SEQ ID NO: 142322 - DNA, 201 bp, Homo sapiens
atgtgatgctattttataggattttacccacaacagaatttctttcaaaatgggaatcagtcctctcaaaccttgctgttgctttattaacttagtttgcrtagtattctaaatctttcgtgatcaacaatgttcacagcatcttcactgggagtagatttcatctcaagaagccagtttctttgctcatccataagaagt

SEQ ID NO: 142323 - DNA, 201 bp, Homo sapiens; identical to SEQ ID NO: 25906

SEQ ID NO: 142324 - DNA, 201 bp, Homo sapiens
cctcagagacactgcaggttcagttccagaccactgcaataaataaagcatatcacaatataggtagtcacataaattttttctcagtgcatataaaagtyatatttacactatactgatagtctaatagatgtgcaatagtatatctttaaaaaatgtatgtaccttagttaaaatatgactggaaaatgctaacaatca

SEQ ID NO: 142325 - DNA, 201 bp, Homo sapiens; identical to SEQ ID NO: 25907

SEQ ID NO: 142326 - DNA, 201 bp, Homo sapiens
gaactatacactttaaaagggtaaatgttatggtgtgtgatttatatcaataaagtggcttttaaaagtctttggaaccagccgggcacagtggctcacayctgtaatcccagcactttgggaggccgaggtgggcagatcacgaggtcaggtgttcgagaccagcctggccaacatagcaaaaccccgtctctactgaaa

SEQ ID NO: 142327 - DNA, 201 bp, Homo sapiens; identical to SEQ ID NO: 25908

SEQ ID NO: 142328 - DNA, 201 bp, Homo sapiens
tgaactatacactttaaaagggtaaatgttatggtgtgtgatttatatcaataaagtggcttttaaaagtctttggaaccagccgggcacagtggctcacrtctgtaatcccagcactttgggaggccgaggtgggcagatcacgaggtcaggtgttcgagaccagcctggccaacatagcaaaaccccgtctctactgaa

SEQ ID NO: 142329 - DNA, 201 bp, Homo sapiens
aacgtcactgaactatacactttaaaagggtaaatgttatggtgtgtgatttatatcaataaagtggcttttaaaagtctttggaaccagccgggcacagwggctcacatctgtaatcccagcactttgggaggccgaggtgggcagatcacgaggtcaggtgttcgagaccagcctggccaacatagcaaaaccccgtct

SEQ ID NO: 142330 - DNA, 201 bp, Homo sapiens
aatttttttttacgaccttcctgtgatgcatgtaattgggtttggttgcttcttctgtatttatatataacatatgttggtgtcttgtgctttttttttttaaggctgagaaaatttaaagtctttgttatcaagcatgccagggaaatagtgataccagttagtaaaaaatgttagagctcttttttgttgttgttcttc

SEQ ID NO: 142331 - DNA, 201 bp, Homo sapiens
atggggggaaccaccccccataattcatttatctccacctggtatcacccttgacatgtggggattattacaattcaaggtgagattttggcggagacacrgccaaaccatatcaggatctaaggggaaggtctgggatctggcatgttaatcattcttagtctaataatataatcaccaaaaagaatgcagtatcctagg

SEQ ID NO: 142332 - DNA, 201 bp, Homo sapiens
ggggtaatcatattaagactgcccaggaagtcaactccaatggcttgggaggttgaggggtggccagaattggacctgtgttaatccattctcatgttcttataaagaactgcccaagactgggcaatttgtacaggaaagaggtttaattgactcacagttcctcatggctggggaggccacaggaaatttaaaatcatg

SEQ ID NO: 142333 - DNA, 201 bp, Homo sapiens
gcactccagcctgggtaacagagtgagactctgtctcaaaaaaaaaaaaaaaaaaaaaaaactctcagtttcttgggctcctgtttctagaacctcttatkttccccatttgtaatagaagaaaagggacattttttcttgatatttttatccaagtatgaatttcttctaagaaaacaagttatttattttgttcagtgc

SEQ ID NO: 142334 - DNA, 201 bp, Homo sapiens; identical to SEQ ID NO: 25925

SEQ ID NO: 142335 - DNA, 201 bp, Homo sapiens
caaaaaaaaaaaaaaaacctcgttggaaccaaaaattaaataaacaagttttactgtaatgctatagtagcctggacaccatctttagaaaatccaaaatkgcctccattatgtaagatttaaatagtctcccatccacgaaagttaacttaatttcatgttataattttttacgatctcactatcagaatctccacagtg

SEQ ID NO: 142336 - DNA, 201 bp, Homo sapiens
ggagatgttctcttcccttctgtttttttgaaagagtttgtgacagattgttagtacttcttaaatgtcttagaaaattttaatagtgaatcgattgagakaggaatacggaaattgctccaaagtggagattctaaacaaggctatgggagaaagcaaaaaactcttccattgcaacatttgatggtcatttgtactttc

SEQ ID NO: 142337 - DNA, 201 bp, Homo sapiens
aggggtaatcatattaagactgcccaggaagtcaactccaatggcttgggaggttgaggggtggccagaattggacctgtgttaatccattctcatgttcytataaagaactgcccaagactgggcaatttgtacaggaaagaggtttaattgactcacagttcctcatggctggggaggccacaggaaatttaaaatcat

SEQ ID NO: 142338 - DNA, 201 bp, Homo sapiens
ttgcatttatattcagaagggatgatttatagttttttttgttttaatgccttcccctggttttgttatcaggataaaagtgacctcatagagtgagttargagatgttctcttcccttctgtttttttgaaagagtttgtgacagattgttagtacttcttaaatgtcttagaaaattttaatagtgaatcgattgagag

SEQ ID NO: 142339 - DNA, 201 bp, Homo sapiens
gaggggtaatcatattaagactgcccaggaagtcaactccaatggcttgggaggttgaggggtggccagaattggacctgtgttaatccattctcatgttsttataaagaactgcccaagactgggcaatttgtacaggaaagaggtttaattgactcacagttcctcatggctggggaggccacaggaaatttaaaatca

SEQ ID NO: 142340 - DNA, 201 bp, Homo sapiens
ctcctaatcttagaggggaagcttttctctctcatcaagtgcgatttaagctgtgagtgcctttatcacattgaggaagatcccttctgtttccagtttayttagtattttttatcatgagagtattatacattttgtgacatgctttttctgagtctattgagatgatcatgtggtttttgtcttttatactaatatttt

SEQ ID NO: 142341 - DNA, 201 bp, Homo sapiens
ttctgctcacagagaatctctgtgaataatatatatgtagttgtcacaaaatggttacaactatagagaatgaaggaatcagtatatacaaaatggtaatragcattaattaatataaagataagcattgctattaatgttccattaagcctcaagcaacagaagagcagtagttttcagcagatctcagattttaaagaa

SEQ ID NO: 142342 - DNA, 201 bp, Homo sapiens
tctctgttttcctagacattagaacagtgcctgccacacagtagacatgcaataaatatttgttgaaagaatgaataacatttttttctttgattttcttycttattgaatcctgtcataaccatgatctattaggacctgagaaaacaatcatctttaacattattcagctttgattatcttatataggatatttctgat

SEQ ID NO: 142343 - DNA, 201 bp, Homo sapiens
ttcagaataaagataaaagtccaatttcttttgcttttctctagtgaatatgctgtccttgggcaatctttcctcagaattcagtattgaaaagtacataytgtcttatttctatacaaaaatgttcatttcatttgccagtaacttaaaatacctgcatatttttttcttaatctaccatgtctttgttcatgaatattc

SEQ ID NO: 142344 - DNA, 201 bp, Homo sapiens
actgtaagtaataatgatagaagaatgatatagactagaatgatctcattccatttgtttttacccctgctgtaagttctgcatctacttttcctaaaacraagagactgggactgcttctggtaagatgactagaaatgttcagatactttcctgtattcactgattacaggttatatttattagttaaagctctcactc

SEQ ID NO: 142345 - DNA, 201 bp, Homo sapiens
ctagattcaatgctctttacttaataaattgttcattaatcaaaacataaaagtgggtgtgttggtccaagacaagttacctaaacatcagagatctgccmtggagctccaggtttggggtattgaactgaaacttcaatcagaattagattagaaattcaaagtaccattatcaacaggaggaacagagacttgtgtttc

SEQ ID NO: 142346 - DNA, 201 bp, Homo sapiens
tacccaaagaaacacacttcggcagccaggcgctgtgactcacacttgtaatcccagcactttgggaggctgaggaaggcggattaccaggtcaggagttygagaccagcctggccaacaaagtgaaacccggtctctactaaaaatacaaaaattagcagggtatcatggcacacgcctgtagtcccagctacttgtgag

SEQ ID NO: 142347 - DNA, 201 bp, Homo sapiens
tatattcagtccaggagctacacaaaactatttattgtatttttaataaggaaaatacaagtagaagaaaagcaaaagaaaacattcaggaagcagagatytgacaggaaataaatttagtgtaagagaagctctagcagtgacagtcaccaaaggagaggctgcctctttgtttttctggtgacatttctttcccaatgt

SEQ ID NO: 142348 - DNA, 201 bp, Homo sapiens
atttgtttcctagagacgctgtaacaaattaccatatactaggtggctttaaacagaaattgattatctcaccattctggaggccagaagtccaaacagarggtgccagcagggttggatccttctggaagcaccgagggagaaacccccatgcctccttcctggtcactggtggtagccagccatccttggcactccttg

SEQ ID NO: 142349 - DNA, 201 bp, Homo sapiens
ctgtaactgttaacttgttatcatttttattaatgtgtaatcaattaataagaacatatgtgttccacagacaaatcccaaagatatttaaatagagatamcagtgaatatgagagccttgccaatattctgaagacctgtttcctagtggaattcacagtttgtagtcacagttcagaaagatgctttcctaagcaaaaa

SEQ ID NO: 142350 - DNA, 201 bp, Homo sapiens
ccttatacctcattttaacctgattacatctgcaaagaccctatttccaagtaaggttacatcagaggtaccaggagttaggactccaacatatgttttckgggggcacaattaaatcctctagctgtcaaatccacttgaccaccttgagcccttattttattttctttgttcccctttgttggttaaaacttctcagag

SEQ ID NO: 142351 - DNA, 201 bp, Homo sapiens
atactctcccttgatttctgtctaaatcccattgctataactagcatatatacaggccccaatgactaatatgcaaatctctgtcttcatttcagaccttyctcctgcatcccaattttgtctccccagctgtcgtctgcatacctccaattaaatatcctcaggaaagcttacagaggcttctctagtgacagcctgagg

SEQ ID NO: 142352 - DNA, 201 bp, Homo sapiens
catgtttttatataaatatatatggttagttacataaataactaatatttccaagatttacaaatgaccaaagtagatattgttgcaaatttctgaaaagscttctggtatttcctgatgatttcctttgcaactggctgactcattcaataaatctttcatttagagataaagaaatgctttttcctacattggcacatt

SEQ ID NO: 142353 - DNA, 201 bp, Homo sapiens; identical to SEQ ID NO: 25966

SEQ ID NO: 142354 - DNA, 201 bp, Homo sapiens
tcagtaaacatgtcaatgtttcttggaagattagggaaaccaacattcttaaaaggtctcttattcattatttataagtagatgcaacacctcatttatayctccttatctcatacagaagagctaagattggcagaaatggtaagttctcaatttatgcacattggtttaacttgtttttctagattccaccttgggctt

SEQ ID NO: 142355 - DNA, 201 bp, Homo sapiens
tgattataaatgtgtattcaatttgtaccatgtggaggttggttaaaagtgaaagtaatctgctatgaccagtttcaatattttatgaaagttcatccttyccactcatggcattgatgatcttgttggttctctgaaaaaatctagaaaaggagtacataattgtgcattgtaggacaatcatcagtaaacaggctagga

SEQ ID NO: 142356 - DNA, 201 bp, Homo sapiens
caattaatatttgtctgtaaccccccccaaacttactctggttgtcaaaaaaagtcatgtgctcagctaatgattaccacagcattgtattcgtctaaaastttcgtttatgttgtctgctagcttaaggcttacacctttgctcttaataaaagaaaaaaggctacttaactaaatctcctaatcattaaaaacaattgg

SEQ ID NO: 142357 - DNA, 201 bp, Homo sapiens
atgttaaaatatgaatattattagattaaatatattactaaaataactgcacctacttcttttacacttttgatgtggcttctagaaaacttataattacmtatatatgagttgcctttgtggctcatattacacttttgttagacacaactgctctgcacacttaccaatgaatctggtttgcattttacagtatcttat

SEQ ID NO: 142358 - DNA, 201 bp, Homo sapiens
acatatatgtacagttgttaatatatatatccttgttgagatatatataataaatatttatatattgatatatataattatatatatatatatatatattkgttaattttcaggaaaaggaaagcgattgaagcaagccaaggaggaagcaatggtagaaattgaccagtacagaatgcagagagataaagagtttcgact

SEQ ID NO: 142359 - DNA, 201 bp, Homo sapiens
gatacagttcagataatgtattttaaaaatagaaaaacactctttaaaaaccagcaactgtttaaaacttttaaacactctttaaaaaacagcaaaagtgrgtttaatggtgtctttcaactctgttttccagacttataattcagaaaataaacaatagggaatatatgggaactaaatggaaactgtcataaatacatg

SEQ ID NO: 142360 - DNA, 201 bp, Homo sapiens
aacttgatattcccagcactcgttgcttccctgatctctaagttcatataaacaccagctgtctcagcatcactattggatgttgaataggcatatcaacraaattgcagtattgactccatccccaaaataaaatgttggtgccatcattgactcatatctgtctctcatgctcatgtatcaattccacctccaaaatat

SEQ ID NO: 142361 - DNA, 201 bp, Homo sapiens
catctctcaggctcaagccatacctcagcctctagagtagctgggaccacagacacacgccaccacacccggccaatttttgtatttttgtagagacggggtttcgccatgttgttcagctggtctcaaactcctgagctcaagagatccacctgcctctgcctcccaaattactgcaattacaggagtgagctactgtgc

SEQ ID NO: 142362 - DNA, 201 bp, Homo sapiens
tatctcatacagaagagctaagattggcagaaatggtaagttctcaatttatgcacattggtttaacttgtttttctagattccaccttgggctttccttrggacccagctatccagcccaataaagccagtttgaaacagctgcatttggaacttgctgttgacacaataatctgagttatatgttaatttctaaaagaa

SEQ ID NO: 142363 - DNA, 201 bp, Homo sapiens
tcttaacctctttgtgattcagttttttcataactgatagaataataatggcatctaccttacagggttgttttaaggattaaatgagctaatatatctawagcgcttggaatgggaagccattggcaagtctgaacacaagacttacatgatcctacaaagatgagtaaggcatggtccttgttctcacagagtttgcat

SEQ ID NO: 142364 - DNA, 201 bp, Homo sapiens
tacctgaggtaataactctccttatggtttaacacagtgagccttctaaatacattttacatggcatctcagtgccatgtaacatacacacatgtaatatmcaaataaaagtttcacaaaacaataccattcctactatgtgcaaggtatgctgatatttctcctttttcttccattctactattgcgcttttaaaaccat

SEQ ID NO: 142365 - DNA, 201 bp, Homo sapiens
taaatatttgttgagtgaataaatgtatgaattaatagatgggtagtatgcagaaagcttctatctctaaggagacagaaaattaatttaaacattttttwattttctgggttctactcagggcaaacactttgggtgcctaagactcatttccccttttacccttgctggatatatggatatatttgctcagaggtatat

SEQ ID NO: 142366 - DNA, 201 bp, Homo sapiens
tttctgagattatttgttcgactactctctccctttctagagtcatccccaggaggcatgagtcttatctctttcacttacttctgtgtccccatttcctaagcacagtgccaggcatacgttagataaacagtaaatatttgttgagtgaataaatgtatgaattaatagatgggtagtatgcagaaagcttctatctct

SEQ ID NO: 142367 - DNA, 201 bp, Homo sapiens
caaggttatcatcaaggacaagagtgaagtgatgctctaccagaccatcaacagtctcaaaaccaagtgagtaagatgggggtggaagcatcctgcatggrttttagaggagggaagctggtcttaagctgacactaagacatactatctcattcattcattcattcctatatatttctctgggtgtatttctgatcctaa

SEQ ID NO: 142368 - DNA, 201 bp, Homo sapiens
gagtggggtgctaggatagggaaaacagctgctttgctcctaagagctctagacctggcttctgtgggactagaaaaagccaggactcacggccaaactcmtgtacagtaaagaaagatgttcaaatgctgtaatgggtgagaagagcgaactagaacacttggagctggcaccacaccttacttgcaagctgcacagact

SEQ ID NO: 142369 - DNA, 201 bp, Homo sapiens
ctcccaatctgtctataaaccaaaaataaaattctaagccccccaaacatctgaacaaatccttcctcttggccaagggcattcaaagttaatctgaaaarttaattcaggtcatgatgggaagttgggtgtcagacatgcctcacagctgaccagcattaacatcaatacagagaccttaagactgatagaagagaattt

SEQ ID NO: 142370 - DNA, 201 bp, Homo sapiens
gttgggctttgaaatatttttccttttgtttccaggattaacttacagagaagcaggcaagatgaccttgctgcctggggcctgctctctcccaggaattytcatgtgggattccccttgccaggccggcctttggatctctcttccaagcctttcctgacttcctcttagatcatagattggacctggttttgttttcct

SEQ ID NO: 142371 - DNA, 201 bp, Homo sapiens
ggcacctgccaccatgcccagctaatttttgtatttttagtagagttggggttttatcatgttggccaggctggtctcaaactcctgacctcaaatgattygcctgcctcgacctcccaaagtgctgagattacaggtgtgagccaccgtgcctggttttgaacatacttataatagctgctttaaaggtcttgtatatta

SEQ ID NO: 142372 - DNA, 201 bp, Homo sapiens
ctgggcggcgccacctcgttcccaccctccgtggggctcccggggaggcttgacttagcgaacaccctgcagtccgcaaaagcgcatgtcctggctgaaaycaccgtcttccaggtggccccaaacgaatcccaaaaggggcagagttttcagtcctcacacctctccaacccctccacctctccctttgcaactgcttta

SEQ ID NO: 142373 - DNA, 201 bp, Homo sapiens
tttttttttttaattagcaaggtgtaaggtgcatgcctgtggttccagctactctggaggccaagctgggaagatcctttgagcccgggaggttgaggctrcagtgagccatgatggtgccactgcactccaactggggtgatacagcaagagcaagatcctgtttctaaaaaaattaagcaagccagaggtggtgtgaac

SEQ ID NO: 142374 - DNA, 201 bp, Homo sapiens
tcttgtaaatcgaacatacccacccgctaaatgtgctaagcagagagagcatcgtcaaagcagctcatgaggacaaatcaatttccttgaatgaacacaayttaccaaaagtattgatcccatttttatctttttattatctctctgcttgcttgtacaatttcccagaactacacatttttcttatccagataagggaga

SEQ ID NO: 142375 - DNA, 201 bp, Homo sapiens
agcagagagagcatcgtcaaagcagctcatgaggacaaatcaatttccttgaatgaacacaacttaccaaaagtattgatcccatttttatctttttattrtctctctgcttgcttgtacaatttcccagaactacacatttttcttatccagataagggagactttaaaactaggtcagtcacatgagtacagtaactga

SEQ ID NO: 142376 - DNA, 201 bp, Homo sapiens
aattatgtccatttcactgttgcggggctgagggaaagggaaggggtgccctgtctgggcgacacgctggaaagcagcagctgcgcaggttctaccgccgytccgctggaggccacactctgaagggcacctggccgagggtgggtgggggtggtaacgtcatcggggagacctgtgtttgtggccggtggctatctgcgg

SEQ ID NO: 142377 - DNA, 201 bp, Homo sapiens
gtctgaaaacaatcattctgtatattttatatcatattctagtttaccgtgtgagagttactcagtcgttactggaggaggccacaaatacttattaaacrtgtgaagtattttagtttccatgctggttagtaggctgtgaagatgagttagtgtgcatagaggaggtagaggatgtgaaactcagggtgggtgggtgag

SEQ ID NO: 142378 - DNA, 201 bp, Homo sapiens
gataagtgaggagtggagagaagagtaaggcaaggagaagggagagggaataaaggagacgttggtgcctgtatagataatctactttgttaattatctcrggacaaactgttcagtccttctcatggattacctagctaggaggctccagattcctgagcctaccagttcttagaccttggtaagacatttgtgttcctt

SEQ ID NO: 142379 - DNA, 201 bp, Homo sapiens
aaactgttcagtccttctcatggattacctagctaggaggctccagattcctgagcctaccagttcttagaccttggtaagacatttgtgttcctttcatsgttagaacaaaaaggaggcttgagtgtaattgacaatcctggccacttgtcttgttaagggcttcctagtttcttcccttattatggagagttttctcag

SEQ ID NO: 142380 - DNA, 201 bp, Homo sapiens
ttcagtccttctcatggattacctagctaggaggctccagattcctgagcctaccagttcttagaccttggtaagacatttgtgttcctttcatggttagracaaaaaggaggcttgagtgtaattgacaatcctggccacttgtcttgttaagggcttcctagtttcttcccttattatggagagttttctcagcctcca

SEQ ID NO: 142381 - DNA, 201 bp, Homo sapiens
gagctatgaggggaagtttgctgaatgtagtgcccaggaaagcttttgctttctgggcaaaaaaggacagactcaactggtagggtcccttttgctcctcygccatttcttctttcctgtaatactgacattatgcatggaaatactgcagcaatcttggaaccatgaagcacaaggaaaagaacaaagaagcaatctatg

SEQ ID NO: 142382 - DNA, 201 bp, Homo sapiens
ttctctaaccctttattttgttctgagagcaggaaagccaaaatcagcctcttacctcccaatctgtctataaaccaaaaataaaattctaagccccccaracatctgaacaaatccttcctcttggccaagggcattcaaagttaatctgaaaagttaattcaggtcatgatgggaagttgggtgtcagacatgcctcac

SEQ ID NO: 142383 - DNA, 201 bp, Homo sapiens
caggaccagaatccaggaaatgtctctccaagcccctatcttcaacacaagaaggagatctgatggataactcttttctattttctcccccgcccccgcctttttttttttgcttgatgagcagagatagacaacagagaacagtgagcccttagctcaatcctgaaactcagaaatcagaacatacttgttaacagactg

SEQ ID NO: 142384 - DNA, 201 bp, Homo sapiens
cccctccatgcccctcccatgtctttcaatcagcttatttgtaaagtcttccataatcatagtgccattatgccgatatcttataaaaacatgtttattayatacacctgccaaacatgggcagcaggtattttgcaataaaagtgaaaaaagcaatcaacagttgaaattgttcatcactagcccaacatctttcctatc

SEQ ID NO: 142385 - DNA, 201 bp, Homo sapiens
ccaggaaagcttttgctttctgggcaaaaaaggacagactcaactggtagggtcccttttgctcctccgccatttcttctttcctgtaatactgacattaygcatggaaatactgcagcaatcttggaaccatgaagcacaaggaaaagaacaaagaagcaatctatgaaactatggcttagcagaaagatagcaagaacc

SEQ ID NO: 142386 - DNA, 201 bp, Homo sapiens
ttgtttccaggattaacttacagagaagcaggcaagatgaccttgctgcctggggcctgctctctcccaggaattctcatgtgggattccccttgccaggmcggcctttggatctctcttccaagcctttcctgacttcctcttagatcatagattggacctggttttgttttcctgcagctgttgacttgttgccctgaa

SEQ ID NO: 142387 - DNA, 201 bp, Homo sapiens
tgtttccaggattaacttacagagaagcaggcaagatgaccttgctgcctggggcctgctctctcccaggaattctcatgtgggattccccttgccaggcyggcctttggatctctcttccaagcctttcctgacttcctcttagatcatagattggacctggttttgttttcctgcagctgttgacttgttgccctgaag

SEQ ID NO: 142388 - DNA, 201 bp, Homo sapiens
ctgtcttcattatactcatgttttcctttaaaccctcgaatgtacttttttttttttttgagatgaagtctcactgtgttgcccaggctggagtgcagtgrcgcgatcttgacttactgcaacctccgcctcccaagttcaagcaattctcctgcctcagcctcctgagtagctgggactacaggcacctgccaccatgcc

SEQ ID NO: 142389 - DNA, 201 bp, Homo sapiens
actccttgtcaccaggatacacacacacacacacacacacacacacacacacacactccctcctaatacacaactgtcctggggccagaaaggcaaaggargaagggggagaatccccaggcaagtggaggatggtatggaagatgaagagggcatatgctcctggccctacaagtgttaggcctcagttcttacagttcc

SEQ ID NO: 142390 - DNA, 201 bp, Homo sapiens
ctgaaagtttgatgagaaacagttacagtcaattctttctgaagcctgctacctgaaagcttcatctgaatggtaagacttcggtttccacaaccccttaytgtaacccagacattcctttctattaattccaggtctttagataataactatttcaaccaattgtgaatcagaaaaatttaaacctgcttataacctgga

SEQ ID NO: 142391 - DNA, 201 bp, Homo sapiens
gcaactgacaagaagcagaatatagtggtaatcagcacccgatgggatgcctgagagatgtgaggtctgagcagccatcacgttgtagagttgtagagaaygtgagaaaccatgggcaccaagttcccagggtgaatggggctgtgcaatcactgcttcattttgcttttgctttcttccccagctcttctctctctctct

SEQ ID NO: 142392 - DNA, 201 bp, Homo sapiens
aagtttcaagaataacccattactgaccctctcgtttccctttcccctgccagatctgccagttcctgaaaggagccaagatcacgcggctccaggatcarcaggttccctacgcagtcaaggggaaccagtgggtgggctatgatgatgtgaagagtatggagaccaaggtaggtgggccacaggcagatactcctttag

SEQ ID NO: 142393 - DNA, 201 bp, Homo sapiens
ttgtagagaacgtgagaaaccatgggcaccaagttcccagggtgaatggggctgtgcaatcactgcttcattttgcttttgctttcttccccagctcttctctctctctctctctctctctctctctctctctctctgtctcgtgacacaaaggaaaccaaatgcaagttgatacttattctatagggcccagatactagt

SEQ ID NO: 142394 - DNA, 201 bp, Homo sapiens
tgtagagaacgtgagaaaccatgggcaccaagttcccagggtgaatggggctgtgcaatcactgcttcattttgcttttgctttcttccccagctcttctctctctctctctctctctctctctctctctctctctgtctcgtgacacaaaggaaaccaaatgcaagttgatacttattctatagggcccagatactagtc

SEQ ID NO: 142395 - DNA, 201 bp, Homo sapiens
gtagagaacgtgagaaaccatgggcaccaagttcccagggtgaatggggctgtgcaatcactgcttcattttgcttttgctttcttccccagctcttctctctctctctctctctctctctctctctctctctctgtctcgtgacacaaaggaaaccaaatgcaagttgatacttattctatagggcccagatactagtct

SEQ ID NO: 142396 - DNA, 201 bp, Homo sapiens
tagagaacgtgagaaaccatgggcaccaagttcccagggtgaatggggctgtgcaatcactgcttcattttgcttttgctttcttccccagctcttctctctctctctctctctctctctctctctctctctctgtctcgtgacacaaaggaaaccaaatgcaagttgatacttattctatagggcccagatactagtctc

SEQ ID NO: 142397 - DNA, 201 bp, Homo sapiens
gctccgctggaggccacactctgaagggcacctggccgagggtgggtgggggtggtaacgtcatcggggagacctgtgtttgtggccggtggctatctgckgggcaggggcaggggcgctggctccgaggaactgggcaaagaccacggaggactcccagggcggcgaggtggggcggggcggcgggcacgccgggagctg

SEQ ID NO: 142398 - DNA, 201 bp, Homo sapiens
gtgaatggggctgtgcaatcactgcttcattttgcttttgctttcttccccagctcttctctctctctctctctctctctctctctctctctctctgtctygtgacacaaaggaaaccaaatgcaagttgatacttattctatagggcccagatactagtctccttcttcacaggaaatggaaagtctcagtaaatctctc

SEQ ID NO: 142399 - DNA, 201 bp, Homo sapiens
ctttatttttattttttattttttatttttttgagatagagtcttgctttgcccaggatggactgcactggtgtgatcgcagctcaccatagccccaaccyctggggctcactcaggtgatcctcccacctcagcctcccaagcagctgggattatcaacatgtgccactactcctggccaatttttccttcgcatacttc

SEQ ID NO: 142400 - DNA, 201 bp, Homo sapiens
atatacacctgccaaacatgggcagcaggtattttgcaataaaagtgaaaaaagcaatcaacagttgaaattgttcatcactagcccaacatctttcctaycacatgccccttcttctctgctaatagaacccctatttgctaggtatcggtagaaatcctttgactttaaagagaggaggcctcctaccctcaccataat

SEQ ID NO: 142401 - DNA, 201 bp, Homo sapiens
gattaggaaagctccaaatccatgctcctgccttctggatgcatttgacatcaaataccccacagaggttttcaaaggacattgagaaacagaatcttatyactgatcattccagattctaatgaaattatgcctttccctaaatcctttgggctgcgttttcagatcattttcttctgctttatcaagcaagccaagaga

SEQ ID NO: 142402 - DNA, 201 bp, Homo sapiens
ccgacactttcactttcacgcggggggaggcctaggggacaggttcggggcggcgcggcgcaccttccggactccggcccaacccccgggcgcacctgggygggcccgctctgccctcgccctgggcagggcagcgtggggtggaagagggcgctcgacgcgcgtccgggactgggcggcgccacctcgttcccaccctcc

SEQ ID NO: 142403 - DNA, 201 bp, Homo sapiens
ccaatgagctatgaggggaagtttgctgaatgtagtgcccaggaaagcttttgctttctgggcaaaaaaggacagactcaactggtagggtcccttttgcycctccgccatttcttctttcctgtaatactgacattatgcatggaaatactgcagcaatcttggaaccatgaagcacaaggaaaagaacaaagaagcaat

SEQ ID NO: 142404 - DNA, 201 bp, Homo sapiens
ggcacactgcggttgcaccacaagcttcctggatggaaggacacgtggccccggggccccacaacggcttcctgtgtcccgccgcctccccctcgccccckcaggcctggcctcgccgtccccgcccccacctgaccctcttcccctctccgcgcgctccttcccgctcacctgcccccgcgcagcctcctgagtcccctt

SEQ ID NO: 142405 - DNA, 201 bp, Homo sapiens
gtgtggagaaccagggcctaacctccctgcctaaaaaaacatgtgagtcatcaagagagaacagtagagccctgttttccagccctaagctctgcaggggrggaatcagctccagcagctgtgtcattgaaagttttctctcctttttggctgcccctttcttcacttttggacccgtaaaggtttcagagtgaacaatat

SEQ ID NO: 142406 - DNA, 201 bp, Homo sapiens
tcacctcatttgttttcacagccctgcattgcatgttgcctaatgtctgaaaacaatcattctgtatattttatatcatattctagtttaccgtgtgagarttactcagtcgttactggaggaggccacaaatacttattaaacgtgtgaagtattttagtttccatgctggttagtaggctgtgaagatgagttagtgtg

SEQ ID NO: 142407 - DNA, 201 bp, Homo sapiens
tgtggagaaccagggcctaacctccctgcctaaaaaaacatgtgagtcatcaagagagaacagtagagccctgttttccagccctaagctctgcaggggargaatcagctccagcagctgtgtcattgaaagttttctctcctttttggctgcccctttcttcacttttggacccgtaaaggtttcagagtgaacaatatc

SEQ ID NO: 142408 - DNA, 201 bp, Homo sapiens
attctccatctttcatacatttcttggcatctacacaggagaacagaacttgtaccttcctgtgtccatctatattccctatttaattctatctttaaaamaaccccatgaggtcagctgggtaggaaatgttactcccacttcacagatgatgaaacagaagcttggcagattccattgactcttcaaggtcgtgtgttg

SEQ ID NO: 142409 - DNA, 201 bp, Homo sapiens
tgtctaccccaaccaagtttcaagaataacccattactgaccctctcgtttccctttcccctgccagatctgccagttcctgaaaggagccaagatcacghggctccaggatcagcaggttccctacgcagtcaaggggaaccagtgggtgggctatgatgatgtgaagagtatggagaccaaggtaggtgggccacaggc

SEQ ID NO: 142410 - DNA, 201 bp, Homo sapiens
ggaaagggttgatcctttccatctaatgtggttctagaaacctcatagattccaggcaagaagcttagcactgtactctgggaaggggaatattgcacctygtttctttgtttttcctaggagttagcagaagcctttcagaaggacttcacaaaatccaccaaggaaaggcttctcttgactgcgggcgtatctgcaggg

SEQ ID NO: 142411 - DNA, 201 bp, Homo sapiens
tgatgatgtgaagagtatggagaccaaggtaggtgggccacaggcagatactcctttaggtggggaatggtgatatgtagtaaaatgcctgaatactctaygttcaaagagagaagcttctgaggccccagactctaggatgggatccagcagcctttatagctcaagtctagtagtgactctatgtcacacccgcgagca

SEQ ID NO: 142412 - DNA, 201 bp, Homo sapiens
caggccctgaggaatcctatccctaccttggagaacaagccgaagcagccgatgcagctgatgatgcagtacactttgggaaggcgagggccagggccggyaggctggggagggacagagaggctccttcagtgctgcagcctccccaagggcttctcccaactgggtatgaaggagcacaaggctgagggctggggaggg

SEQ ID NO: 142413 - DNA, 201 bp, Homo sapiens
agtctctaactccagaaaaccagttagtctactgctgtattttaagcttagtccctcatctgaacctgatatggtcctgggcatttaggggccacccttcraatctctgtgtatccttctgtgtctcccataggttcagttcttaaagaatttaaacctgggaggagccatgatctggtctattgacatggatgacttcac

SEQ ID NO: 142414 - DNA, 201 bp, Homo sapiens
actcccatatcccaaacactgggtactgtgaaagctagaaataagtaattatccatccttgtctctaaaggggttattgtcaaggtggaaagaatgtgaartacagacatagctagttaaacaagagttcaaaaacaagataactataacatttaataaaatcagagaggtattgtaaaacaatatgggattcaatgacca

SEQ ID NO: 142415 - DNA, 201 bp, Homo sapiens
ctgaagtatctgttcaaaactgagacagtgcaatagagaactaaaatccacatgttctaggtgggagtccaggggccgtgtcagtgaaatgaactgtgggraaaccagagagagagaaggtgtcactatactgcaagatcatgcagaccccgaggtgctaggcctctaccagcctctattccttctgcccccaggagtgaa

SEQ ID NO: 142416 - DNA, 201 bp, Homo sapiens
ccaggctggtctcaaactcctgacctcaaatgattcgcctgcctcgacctcccaaagtgctgagattacaggtgtgagccaccgtgcctggttttgaacayacttataatagctgctttaaaggtcttgtatattaatatctgtcatttctagatctgtttctattgacacatttttctcctggttataagtcacatttcc

SEQ ID NO: 142417 - DNA, 201 bp, Homo sapiens
gtcttgtatattaatatctgtcatttctagatctgtttctattgacacatttttctcctggttataagtcacatttcctgttttttggtatatctagtgattttttttttaattggatgcttgacattataaatgttatgttgctgttgaatgtttagattttgtggccaggaagtcaatttatttggagattgacaagag

SEQ ID NO: 142418 - DNA, 201 bp, Homo sapiens
aaatcatcagcctgtcttaattttctaaatcacaataaatctgactctatgtcctcaattcactggactgatgataatttccatctcactcattacctgakgctcttttcccccacccacagttgatcttacttagtctagacatttgggagctcccatggtcattattgctacgcctttacccaagcctccctattacct

SEQ ID NO: 142419 - DNA, 201 bp, Homo sapiens
caatacccttgcccagggctgagcaattacctgggatactcggtgagtgatgcccactcattcccatctgggaagcagaacaaggggatagctttgagcarccgctcctcctcctcctgctgaccccgaagcaggttctcccgctataaggcaaaggaaaagacaagtggatgtgaagctgggggcagagatagcaggaga

SEQ ID NO: 142420 - DNA, 201 bp, Homo sapiens
aggtagaagagttggaaaggacgcaaaaaagaattgagaacaagtaagtttattctgataagtgaggagtggagagaagagtaaggcaaggagaagggagrgggaataaaggagacgttggtgcctgtatagataatctactttgttaattatctcaggacaaactgttcagtccttctcatggattacctagctaggagg

SEQ ID NO: 142421 - DNA, 201 bp, Homo sapiens
caaagtgctgggattacaggcgtgagcccctgtggccagcccaattttttaaatttcaagtttgaggaaaaaaggaataatttgtttacatgtttgtctcycccactaaaaacataagtcaatagaaagctgaaatcaaattatatttggttcatatttggtttactgtataaattacatttttgcagtgactgacagagt

SEQ ID NO: 142422 - DNA, 201 bp, Homo sapiens
gctttcacacacaagccacatcatctcttccctggcttagctgctctgagcactgcctcctcctcagtcgtctcctcctcttcagttatgtcttccagcayttgggatgctgacttcttcagccaagccccctccaagccctccccatacccacattcagataaagtggaaagaggttttctatcccaagtgtatcagatc

SEQ ID NO: 142423 - DNA, 201 bp, Homo sapiens
tcagttatgtcttccagcacttgggatgctgacttcttcagccaagccccctccaagccctccccatacccacattcagataaagtggaaagaggttttcyatcccaagtgtatcagatcatttggaaagatcaagacccactagctccatcatgagccagtggatgagctttctgattgtccctgctttgactcccactt

SEQ ID NO: 142424 - DNA, 201 bp, Homo sapiens
cagacagggaaaggtcaggtcaggcaggggatgatgactccacagaagagtcaccctgataccacaggcttcagcttctcaacactttttacctcccttcttttttttttttttttttttttgagatagagtcttgctctgttgtccaggctggagtgcaattgcacagtcttggctcactgcagtctctgcctcctgagt

SEQ ID NO: 142425 - DNA, 201 bp, Homo sapiens
gttggctaggctggtcttgaactcctggcctcaagtgatccacccacttcagcctgccaaagtgctgggattacagccatgagccgctgcacatggccaayctcccttctttatcaatgtgacagaaagttgaaatgaagatgaattactgggacatgagatcagattatgtttattgagtgtacactctgagccaggtac

SEQ ID NO: 142426 - DNA, 201 bp, Homo sapiens
gtccattctcacaggttaaggcaggatcctgaacaaacatttgttgaggtttttctttttgtgtttcacataattctttatttttattttttattttttatttttttgagatagagtcttgctttgcccaggatggactgcactggtgtgatcgcagctcaccatagccccaacctctggggctcactcaggtgatcctcc

SEQ ID NO: 142427 - DNA, 201 bp, Homo sapiens
tctttccgttgaccttagtgtcaaaaaatttcaagccaatgcaactgttgtaggggaaccacctgatctttcctgaatggacaaaaatgcagcagtagccrgaaccctttgcactggcaggatgttctcagtttgtgcagaggtccttcttgtccacattagaactggagctaagacaggaaagaggccaagctttcttag

SEQ ID NO: 142428 - DNA, 201 bp, Homo sapiens
ccgggcgtagtggcgggcgcctgtagtcccagctacttgggaggctgaggcaggagaatggcgtgaacccgggaggcggagcttgcagtgagccgagatcrcaccactgcactccagcctgggcgacagagcgagactccgtctcaaaaaaaaaaaaaaaaaaaaaaaaagaaaccacagcagctgtggctggggagccca

SEQ ID NO: 142429 - DNA, 201 bp, Homo sapiens
agaccaaggtaggtgggccacaggcagatactcctttaggtggggaatggtgatatgtagtaaaatgcctgaatactctatgttcaaagagagaagcttcygaggccccagactctaggatgggatccagcagcctttatagctcaagtctagtagtgactctatgtcacacccgcgagcagctgtggtacaggtagaaga

SEQ ID NO: 142430 - DNA, 201 bp, Homo sapiens
gggcgtagtggcgggcgcctgtagtcccagctacttgggaggctgaggcaggagaatggcgtgaacccgggaggcggagcttgcagtgagccgagatcacrccactgcactccagcctgggcgacagagcgagactccgtctcaaaaaaaaaaaaaaaaaaaaaaaaagaaaccacagcagctgtggctggggagcccaga

SEQ ID NO: 142431 - DNA, 201 bp, Homo sapiens
cataggcccccctccttgtgttgcagtctgcacaaggcacagttgtgggagggctcacctcatttgttttcacagccctgcattgcatgttgcctaatgtmtgaaaacaatcattctgtatattttatatcatattctagtttaccgtgtgagagttactcagtcgttactggaggaggccacaaatacttattaaacgtg

SEQ ID NO: 142432 - DNA, 201 bp, Homo sapiens
tcagtccttctcatggattacctagctaggaggctccagattcctgagcctaccagttcttagaccttggtaagacatttgtgttcctttcatggttagarcaaaaaggaggcttgagtgtaattgacaatcctggccacttgtcttgttaagggcttcctagtttcttcccttattatggagagttttctcagcctccaa

SEQ ID NO: 142433 - DNA, 201 bp, Homo sapiens
gcccagggaaaagtcatgtgcaggctctgagagagcgcacaggctcttctggctatttgggtagaaatgctggatgtctggatcatgatttagaagaggargtatgtgagctttaggtgaatgtgctcctagcctggcagtctccttaccttgtggggaggggtgcaactggaagagggcccaagtgggaccctccaaagg

SEQ ID NO: 142434 - DNA, 201 bp, Homo sapiens
tatcaatgtgacagaaagttgaaatgaagatgaattactgggacatgagatcagattatgtttattgagtgtacactctgagccaggtactaagctaagtscttcacttgcattatcacgtttcattccctcaaacaacctcccagggaggtaatctcattatccccactttataaagccctttgcctctgtcttatgaga

SEQ ID NO: 142435 - DNA, 201 bp, Homo sapiens
ccctctgagcaaggggtggcaggacagagggccaagctcctactacaatgtggtgagtaggccaggggaaccgcaggggtactggctgtgggggtggggcyggggagagtccagcatgtctagagttacttctgtcttgaactgaggaagagctatgagcccaagagggaattgggtagccccaggagcaagtgagtgcag

SEQ ID NO: 142436 - DNA, 201 bp, Homo sapiens
tgcctaccctctccagctagggaaggtctcacccattttgctaacccacctcagtgcctgagtcggggatgaagctcttgagagtgacagtcttcccaggwgcagggaaggctgcctctcggaggccctgcatgaacgggtagatgacagccatggagatctgatgtctcttctccacttcatccaggatctgcagggaaa

SEQ ID NO: 142437 - DNA, 201 bp, Homo sapiens
tagtcccagctacttgggaggctgaggcaggagaatggcgtgaacccgggaggcggagcttgcagtgagccgagatcacaccactgcactccagcctgggmgacagagcgagactccgtctcaaaaaaaaaaaaaaaaaaaaaaaaagaaaccacagcagctgtggctggggagcccagatgaagtgtggctctatcttgt

SEQ ID NO: 142438 - DNA, 201 bp, Homo sapiens
gtttctctactgatctgtgtcatccatccatacatacatactgaatcttagtgctccatgggtgtttcatatgttggtggtatctctgtctctcaatgtatttttttttaaatttttttgagacagggtctcactgtaaggtccaggctgtagtgcagtggtgtgaccatggctcactgcagccttgacctcccaggctca

SEQ ID NO: 142439 - DNA, 201 bp, Homo sapiens
tgaacttcactttagttcaaacagccaggccctaattgtccattttctctacacttaagaactctgttctttagacaaaggcttccctggcagccagaaawtaaataatcatcttattcttctacttcaggaatcccaaactgaaaattctcttgtccattggagggtacctgtttggttccaaagggtaagactacatct

SEQ ID NO: 142440 - DNA, 201 bp, Homo sapiens
gtccagagatcttaaatttggctgagagagtcttggagtttttatagaaatctgatagtacaacttgtgcaacctgtcagaagtcagttacagccagagtrggcagagagaagaagtagtgttagaagacctatgtagatttctgcacacagaaagaaggaagaaagatcaggctacctaacttttttggttctgtgttaa

SEQ ID NO: 142441 - DNA, 201 bp, Homo sapiens
gtggagacttcctgagcagatacaggcacaaggcatccccatgtggggtggggaggaaagggttgatcctttccatctaatgtggttctagaaacctcatrgattccaggcaagaagcttagcactgtactctgggaaggggaatattgcaccttgtttctttgtttttcctaggagttagcagaagcctttcagaaggac

SEQ ID NO: 142442 - DNA, 201 bp, Homo sapiens
atggcacccatccttctaattatcaaattttctccccttcctaatacttgcttaggtgttgatgcaaataaaaatgtcttcatttattcattcattcttgcattcattcattcattcattcattcattcagtaaattcattcagtaagtaattgtttaccagtttagtggttgaaagtagaactttggagatagacgtgtt

SEQ ID NO: 142443 - DNA, 201 bp, Homo sapiens
tggcacccatccttctaattatcaaattttctccccttcctaatacttgcttaggtgttgatgcaaataaaaatgtcttcatttattcattcattcttgcattcattcattcattcattcattcattcagtaaattcattcagtaagtaattgtttaccagtttagtggttgaaagtagaactttggagatagacgtgttt

SEQ ID NO: 142444 - DNA, 201 bp, Homo sapiens
ggcacccatccttctaattatcaaattttctccccttcctaatacttgcttaggtgttgatgcaaataaaaatgtcttcatttattcattcattcttgcattcattcattcattcattcattcattcagtaaattcattcagtaagtaattgtttaccagtttagtggttgaaagtagaactttggagatagacgtgtttg

SEQ ID NO: 142445 - DNA, 201 bp, Homo sapiens
gcacccatccttctaattatcaaattttctccccttcctaatacttgcttaggtgttgatgcaaataaaaatgtcttcatttattcattcattcttgcattcattcattcattcattcattcattcagtaaattcattcagtaagtaattgtttaccagtttagtggttgaaagtagaactttggagatagacgtgtttgg

SEQ ID NO: 142446 - DNA, 201 bp, Homo sapiens
aacaggtctgtagaagaagtaatcttcctcctttcctgggacttcagtctttccgttgaccttagtgtcaaaaaatttcaagccaatgcaactgttgtagrggaaccacctgatctttcctgaatggacaaaaatgcagcagtagccagaaccctttgcactggcaggatgttctcagtttgtgcagaggtccttcttgtc

SEQ ID NO: 142447 - DNA, 201 bp, Homo sapiens
cattgagaacgggccatgatgacaatggcggttttgtggaatagaaaggggggaaaggtggggaaaagattgagaaatcggatggttgccgtgtctgtgtrgaaagaagtagacatgggagacttttcattttgttctgtactaagaaaaattcttctgccttgggatcctgttgatcggtgaccttgcccccaaccctgt

SEQ ID NO: 142448 - DNA, 201 bp, Homo sapiens
aaggataaggagacatatctttgtcttctctaaccctttattttgttctgagagcaggaaagccaaaatcagcctcttacctcccaatctgtctataaacyaaaaataaaattctaagccccccaaacatctgaacaaatccttcctcttggccaagggcattcaaagttaatctgaaaagttaattcaggtcatgatggg

SEQ ID NO: 142449 - DNA, 201 bp, Homo sapiens
tatcaaccactagatatgcacttcccatctcatggaaagtttgatttgattgttcagttcataatgactctaggtcattataactttgacaggttgatatktgcttaaatattcaactttcattttctgccctcattgtagtaagcacgaatgtagttcatccaaaaagagtaatcctaaatggattttctatgtgatgtt

SEQ ID NO: 142450 - DNA, 201 bp, Homo sapiens
ctctctctccctgagcaatcttacccctcaggaagtctctaactccagaaaaccagttagtctactgctgtattttaagcttagtccctcatctgaacctsatatggtcctgggcatttaggggccacccttcaaatctctgtgtatccttctgtgtctcccataggttcagttcttaaagaatttaaacctgggaggagc

SEQ ID NO: 142451 - DNA, 201 bp, Homo sapiens
gtcctcaggaaaataccagtatctcatctacagctttgggtttaaaatgctattggtgcccttggtgtgggcatctgagaatcaacttcatggcttcagarttctagttcagatgaagcccttgaggagctgctgatttcaagtcctgttttcatcagaaatcccgggggtggggagatctgcgttgcctatttgtggccg

SEQ ID NO: 142452 - DNA, 201 bp, Homo sapiens
ttctgatattttccccaagtccctagtggctcacctgccctgtctaccccaaccaagtttcaagaataacccattactgaccctctcgtttccctttcccytgccagatctgccagttcctgaaaggagccaagatcacgcggctccaggatcagcaggttccctacgcagtcaaggggaaccagtgggtgggctatgatg

SEQ ID NO: 142453 - DNA, 201 bp, Homo sapiens
ctgtctaccccaaccaagtttcaagaataacccattactgaccctctcgtttccctttcccctgccagatctgccagttcctgaaaggagccaagatcacrcggctccaggatcagcaggttccctacgcagtcaaggggaaccagtgggtgggctatgatgatgtgaagagtatggagaccaaggtaggtgggccacagg

SEQ ID NO: 142454 - DNA, 201 bp, Homo sapiens
gcaggaatcaaaatctcaatttaatattgagtaaaacaaaattaattcaaggctctaagaaagcctgggtgtgggaggtattgtaagaggtgaaaagtgayacaacttaaaggttatgtcctcaggaaaataccagtatctcatctacagctttgggtttaaaatgctattggtgcccttggtgtgggcatctgagaatca

SEQ ID NO: 142455 - DNA, 201 bp, Homo sapiens
catggtcattattgctacgcctttacccaagcctccctattaccttgaaggtcggtggctttgctgctgctccatccctgggcccccagttccctaggtgygttgtatatcctcctgtgcagatgaaggctgttgctgaccaaacagttatgctgtgatacattggttctagggcagagggtggagaagcagggcgctggg

SEQ ID NO: 142456 - DNA, 201 bp, Homo sapiens
gactgtgtgctgggtagtggggactcagccgtgtcagcacagtctttgccctcacagagctcacagtctgatgggcagaccaataaacaatcatctttcaktgtggtaagggctgtgatggggataagcacagatgtcaaaggggcctagagggacagcagggagttccagtcccaaggtcacctctcttgggaagtcttc

SEQ ID NO: 142457 - DNA, 201 bp, Homo sapiens
cagaagtgggggatgagagaattcgtaaatgaccaactaaccacctctcaggtcaaatctgaactccctggtgacttgagggaggttttgtgcagaaaaarcaccaggcctgccaggcctgcaatgcagtcagaaattgctgcatgtaaatcctggccctgccatttgaaagttgctcaactttttccctgtaaaatgggg

SEQ ID NO: 142458 - DNA, 201 bp, Homo sapiens
agatataaaaatgctttaaataattggattatttgagctaatattattgccatatactccaaaggtaaaacagagctcactagtgtccttgcaactgacargaagcagaatatagtggtaatcagcacccgatgggatgcctgagagatgtgaggtctgagcagccatcacgttgtagagttgtagagaacgtgagaaacc

SEQ ID NO: 142459 - DNA, 201 bp, Homo sapiens
taggagacttttttcaaaactgctttgaatatcctattatgatggaaaaccccagacgtacataccaaagaatgggaatggcaagcactgacagatactargggaagttagtccccaaggtccccttgaatgctgctccagtgctcagatcttcttactacaaggtagaaattgcttgggcacctctctggctttctaact

SEQ ID NO: 142460 - DNA, 201 bp, Homo sapiens
attaacatctgtccccaaactgatctctgctgaacagagccaatcaaacttggttcccttgttgagcttgcactcttggtattacatacggactaggggasagggccagcctcagcactgatgttacagtctcaccaatgcaccacaaagtagcagtctctcactgtgagttatcacctggagttctttttctcacaacta

SEQ ID NO: 142461 - DNA, 201 bp, Homo sapiens
tcatggtcacctggcattcctggtttgggggcccactcctgccctgctcatgtctgcgtaactacctactgtaacatcatgttttatttaaagagatagaygcacaaagtgtatatatgtgtaggtgcccacatgtctatttaactgtatgtactaaattaacatctgtccccaaactgatctctgctgaacagagccaat

SEQ ID NO: 142462 - DNA, 201 bp, Homo sapiens
tgggagcaaccaccatggaccagaagtctctctgggcaggtgagcatggggttgataattcagcaggaaagttggtgaggaaggaagaggtaacaggtctrtagaagaagtaatcttcctcctttcctgggacttcagtctttccgttgaccttagtgtcaaaaaatttcaagccaatgcaactgttgtaggggaaccacc

SEQ ID NO: 142463 - DNA, 201 bp, Homo sapiens
tgactgcgggcgtatctgcagggaggcaaatgattgataacagctatcaagttgagaaactggcaaagtgagtacatcagagcaactttccatccctctgyttccaatttggtccatgcaaatgatgcatcagcatgtttgacggatgaggggaggaggaagagagggaaggtcattgtcctaaccctgcatcattcagcc

SEQ ID NO: 142464 - DNA, 201 bp, Homo sapiens
tgctaagtgaccatggcatttaagggaagccaagaaagtgacgaaaggcttcgaaagacaactgcaggaagaaagaaagaaggtcatggtggacaggatcytggggggaagagagacatggtcaggtggagaggttgggggcggattgccatcaccctcaccatgttgcctacttgagtctcagaaacaactctcttttcc

SEQ ID NO: 142465 - DNA, 201 bp, Homo sapiens
ggattccccttgccaggccggcctttggatctctcttccaagcctttcctgacttcctcttagatcatagattggacctggttttgttttcctgcagctgwtgacttgttgccctgaagtacaataaaaaaaattcattttgctccagtaagtatggcctcatttattcagtccttgaccctgtgatatcaggttgttctg

SEQ ID NO: 142466 - DNA, 201 bp, Homo sapiens
caaactgttcagtccttctcatggattacctagctaggaggctccagattcctgagcctaccagttcttagaccttggtaagacatttgtgttcctttcakggttagaacaaaaaggaggcttgagtgtaattgacaatcctggccacttgtcttgttaagggcttcctagtttcttcccttattatggagagttttctca

SEQ ID NO: 142467 - DNA, 201 bp, Homo sapiens
ataatttccatctcactcattacctgaggctcttttcccccacccacagttgatcttacttagtctagacatttgggagctcccatggtcattattgctaygcctttacccaagcctccctattaccttgaaggtcggtggctttgctgctgctccatccctgggcccccagttccctaggtgtgttgtatatcctcctgt

SEQ ID NO: 142468 - DNA, 201 bp, Homo sapiens
atgtctagagttacttctgtcttgaactgaggaagagctatgagcccaagagggaattgggtagccccaggagcaagtgagtgcaggagaagtgctttgaycaggcaccaacaaaatgtcacctagaaaatatcagaagtgctgatagctgaagtgccctaagctctgtctctggctcagagtgtcccccatcccagtctt

SEQ ID NO: 142469 - DNA, 201 bp, Homo sapiens
tgaatactctatgttcaaagagagaagcttctgaggccccagactctaggatgggatccagcagcctttatagctcaagtctagtagtgactctatgtcayacccgcgagcagctgtggtacaggtagaagagttggaaaggacgcaaaaaagaattgagaacaagtaagtttattctgataagtgaggagtggagagaag

SEQ ID NO: 142470 - DNA, 201 bp, Homo sapiens
gcaaaactgatctgagatttgtcataagcagaggaacagcattaggtttcctggggtctttgaaggaattcttctggagcttaatacaagcccagacactsaaggcttgagagaaagtgggccatgaacaatattcagaaaattctgaattatttacatgaatgtttttcactttatggattatagaattagttttaattg

SEQ ID NO: 142471 - DNA, 201 bp, Homo sapiens
taagctctgtctctggctcagagtgtcccccatcccagtcttctctggattctccatctttcatacatttcttggcatctacacaggagaacagaacttgkaccttcctgtgtccatctatattccctatttaattctatctttaaaaaaaccccatgaggtcagctgggtaggaaatgttactcccacttcacagatgat

SEQ ID NO: 142472 - DNA, 201 bp, Homo sapiens
gtgacatgagatcagagatgggtgactggggaaggctccatggaagaggagaagtttatgctgggccttgaaggattagtagaaatttgatcaggtagagaaaaaaaaaatatcattctatatcctggtctatctttggagtcccagcctgacctctcattgtgagtgtgaacatgccatcggcccatgctgaatgacttg

SEQ ID NO: 142473 - DNA, 201 bp, Homo sapiens
aagagtatggagaccaaggtaggtgggccacaggcagatactcctttaggtggggaatggtgatatgtagtaaaatgcctgaatactctatgttcaaagakagaagcttctgaggccccagactctaggatgggatccagcagcctttatagctcaagtctagtagtgactctatgtcacacccgcgagcagctgtggtac

SEQ ID NO: 142474 - DNA, 201 bp, Homo sapiens
accatcctctacatggacttcgagagtccccagaacactgctttttatggccatttgtataatctgaaatggtgccccctccatgcccctcccatgtcttycaatcagcttatttgtaaagtcttccataatcatagtgccattatgccgatatcttataaaaacatgtttattatatacacctgccaaacatgggcagca

SEQ ID NO: 142475 - DNA, 201 bp, Homo sapiens
atattgcaccttgtttctttgtttttcctaggagttagcagaagcctttcagaaggacttcacaaaatccaccaaggaaaggcttctcttgactgcgggcrtatctgcagggaggcaaatgattgataacagctatcaagttgagaaactggcaaagtgagtacatcagagcaactttccatccctctgcttccaatttgg

SEQ ID NO: 142476 - DNA, 201 bp, Homo sapiens
ggggaatattgcaccttgtttctttgtttttcctaggagttagcagaagcctttcagaaggacttcacaaaatccaccaaggaaaggcttctcttgactgygggcgtatctgcagggaggcaaatgattgataacagctatcaagttgagaaactggcaaagtgagtacatcagagcaactttccatccctctgcttccaa

SEQ ID NO: 142477 - DNA, 201 bp, Homo sapiens
agttgagaaactggcaaagtgagtacatcagagcaactttccatccctctgcttccaatttggtccatgcaaatgatgcatcagcatgtttgacggatgargggaggaggaagagagggaaggtcattgtcctaaccctgcatcattcagccaggaacaacttctttacagagactttcaatccttctagcagcatcattc

SEQ ID NO: 142478 - DNA, 201 bp, Homo sapiens
ccgcccctgcccccaccactgttcctgctaagtgctgggaactctgcctagcagtttcaacaatgggaaaatcctgccttgagaaaatatgaagcctgccrttccctggcctccctggctggggtgtgaaagcttgtgattatacagccagttagtggctgtcaggaccagaatccaggaaatgtctctccaagcccctat

SEQ ID NO: 142479 - DNA, 201 bp, Homo sapiens
ctgggctgaacccatgtcttatgcatctctgtgtaagaacagtcgttgctcatgataaacttgtccaattgattgaatattattgtgccttaacttccccratctattttgtggtattcccaaccaaactaacttcctttctttaaaaacagatgaggaaaactgtgtacatgtgcaccaaaaagataagtacaagaatgt

SEQ ID NO: 142480 - DNA, 201 bp, Homo sapiens
gactcccagacctacagccctctttccatggcctccaggtgactctccagtcaccatgggagagccggaattgggaatccagccctagtattaactgtctrgtcttagcccagaggttctaaaagttgactttactccggccgtatgcaattttgcacttaattacagtctgtttctgttccctattctttgtgtattccc

SEQ ID NO: 142481 - DNA, 201 bp, Homo sapiens
caaatctgggcttcatttccaagaagtttcacaagtctgccaggggaagtccctggacttcttgcttctttcgtgtaggacaggctgtcgaaacctcagtrgataaaagacctagagaatgtgtatcccagaagaagctggccaaggatatgggagcaaccaccatggaccagaagtctctctgggcaggtgagcatgggg

SEQ ID NO: 142482 - DNA, 201 bp, Homo sapiens
tgaagatttatcttttttagagctcttccttatgctaacagaaagaatatagctaatgatagaaggggagccccaggacagggcatattggatatgggacrggacagaggaggagtaataagatttaagtggagatgctacaagatgaggaatagtggtgatggtcatgataatacttcactttagaagtagagcacttta

SEQ ID NO: 142483 - DNA, 201 bp, Homo sapiens
ttccaaatacgtccaggctgtaaacttcaggtatcaaccatgacattgtgggtctgctcagcccacttcctcctgggagatctgccctagttccccgctcsctctcaggacattatctgtagggctgggaagtgcagagtccatctggggttgcttggtttacaaggttttagggtccttttcaggagaggtaggcagagg

SEQ ID NO: 142484 - DNA, 201 bp, Homo sapiens
attgttcagttcataatgactctaggtcattataactttgacaggttgatatttgcttaaatattcaactttcattttctgccctcattgtagtaagcacraatgtagttcatccaaaaagagtaatcctaaatggattttctatgtgatgttgaaatgcattgtttaattgaagatttatcttttttagagctcttcctt

SEQ ID NO: 142485 - DNA, 201 bp, Homo sapiens
gaaaaagccaggactcacggccaaactcatgtacagtaaagaaagatgttcaaatgctgtaatgggtgagaagagcgaactagaacacttggagctggcamcacaccttacttgcaagctgcacagacttgttgcacaagccttaccacctgtttgaggaacaagcatcttcctgatacagatggggaaactgaggcataa

SEQ ID NO: 142486 - DNA, 201 bp, Homo sapiens
cagagggtgcttcttattcaaggtcactcaactcataaatagtgaagtcaaagctcaagcagtcaaattccagggctcatgctagaagggcctttgctacrtcgccttcttggaggctaactgctttctgctaagtccagcttgggccagtagcagagttaaaagcagcaactattgcttctaggacaggtgggagaatct

SEQ ID NO: 142487 - DNA, 201 bp, Homo sapiens
ggggataggcagaggagagtgcgagaaattgaaaaaggaagactaccccaagttcttgatttgagcagctaagtggatggcaatgccatttacagagatarggaagactggagggagaacagagtggacattggtcctgctcatgagatcagttttggacgttctgagtgtgaggagcccgtgggacatacagataacagg

SEQ ID NO: 142488 - DNA, 201 bp, Homo sapiens
aaatcaagctgtaacctgaccaccttgggcacatgtcctcaggatctcctgagagctgtgtcatgggccattcgtcactcatatttggctcagaataaatytcttcaaatattttacagagtttgactctttacgttgacatgtcccattgggtgcaaggtcattgtgaggcctcatggactaggaatctgacagccacct

SEQ ID NO: 142489 - DNA, 201 bp, Homo sapiens
acaggagggtgggcgcatggaccctacagcccattttccttggataacctccagtctgttcccttgaacccagggatgctgggcagttcaggtgagccgtycaggggctgggcccacctgagaccttccgccaggaagatgatttttctctccagcacggcagaggcaaagatctgaagtatctgttcaaaactgagacag

SEQ ID NO: 142490 - DNA, 201 bp, Homo sapiens
agcttctagttgtcctgcgtttctggagtgaaccaatgtacatcttacatgtactgactgatgtcttatgtttccctgaaatgtatgaaatcaagctgtarcctgaccaccttgggcacatgtcctcaggatctcctgagagctgtgtcatgggccattcgtcactcatatttggctcagaataaatctcttcaaatattt

SEQ ID NO: 142491 - DNA, 201 bp, Homo sapiens
actacaagtgttacttgttctttccaaaaagacactcgtattgcttctttccaggttccaccctatggtggattcttctacatcacgcttggaattcattractccataatcctgtttctgaggaaccataactttgatggactggatgtaagctggatctacccagatcagaaagaaaacactcatttcactgtgctgat

SEQ ID NO: 142492 - DNA, 201 bp, Homo sapiens
gaagagaatttctaagtctgatgagaaacatttacaatctagtctttctgaagcctgctacctggaggctttatctgcatgataaaaccttggtctctacrccacttatcataacccagacattcctttctattgactccaggcctttacataataactctttcaaccaattgccaatcaaaatatctttgaattcactta

SEQ ID NO: 142493 - DNA, 201 bp, Homo sapiens
agcagactggtctctaggcaagaagagagtttgtttctaaaaagggctgttaatcatctttgtttcaaagctaacctagagactaaattcctcccaaattsagttggcttacacccaggaatgaacaaggacagcttggaggttagaagcaagatggagtcagttaggtcagatctctttcactgtcataattttctcagt

SEQ ID NO: 142494 - DNA, 201 bp, Homo sapiens
aagagatattaaactaggctttaagaggttttcccttggccaggtggcaaaactgatctgagatttgtcataagcagaggaacagcattaggtttcctggkgtctttgaaggaattcttctggagcttaatacaagcccagacactcaaggcttgagagaaagtgggccatgaacaatattcagaaaattctgaattattt

SEQ ID NO: 142495 - DNA, 201 bp, Homo sapiens
tgcaaaatatctcaagcactgatcttaggttttgcaacagtgatgctattcccagctgcaatttggggaggcttagaatcttgcagcctttggccgcatgwctcctaaaccataacttctaatctcatggctaatttgttagttctacaaaagcagactggtctctaggcaagaagagagtttgtttctaaaaagggctgt

SEQ ID NO: 142496 - DNA, 201 bp, Homo sapiens
ccccatggctaacttgtttcccagagagagtgaccaaactgtagaaagaagcccaataagggtgatcactgggatggcacaacagcacatccagggtgtgkttgggtggcttggaaaaggatacaatttaaaaacttcatctgagttgaaaagcagagtgtagttgttcctggaaaagatgagttgtagctctagggtgaa

SEQ ID NO: 142497 - DNA, 201 bp, Homo sapiens
taagagtccatttgtataaagtttaaaacaggtgaaattaatctatggtatgagaggtcagaatggtgttacctttagggaggaaggaggaaataatgatkgggagaataccatagtgtttctaggatgctgataatgtcctgtttcttaaccaggtgatagatacatggatgtattcactatgtgatcgttctttgcagt

SEQ ID NO: 142498 - DNA, 201 bp, Homo sapiens
ccatgatggtgccactgcactccaactggggtgatacagcaagagcaagatcctgtttctaaaaaaattaagcaagccagaggtggtgtgaacacagagaraggtgggggcaagaagaaggagacagattgggatgatgaggaaggagattcagggccgagggtgataccaggaggcagagcctgagtatcacctccttcc

SEQ ID NO: 142499 - DNA, 201 bp, Homo sapiens
gaatgtgtatcccagaagaagctggccaaggatatgggagcaaccaccatggaccagaagtctctctgggcaggtgagcatggggttgataattcagcagsaaagttggtgaggaaggaagaggtaacaggtctgtagaagaagtaatcttcctcctttcctgggacttcagtctttccgttgaccttagtgtcaaaaaat

SEQ ID NO: 142500 - DNA, 201 bp, Homo sapiens
gtccaggctggagctgggagtgggcagacagctgggcagaacagggcacaggagactgggggagatcatcttcacatatttggactaatcctttctcatgstcctttggctcttctgccatgttttcttagcaattaggctggttctgcccttttcataggcttcccatagacttttaaagtaataataataatattgata

SEQ ID NO: 142501 - DNA, 201 bp, Homo sapiens
ggttttgaacatacttataatagctgctttaaaggtcttgtatattaatatctgtcatttctagatctgtttctattgacacatttttctcctggttatargtcacatttcctgttttttggtatatctagtgattttttttttaattggatgcttgacattataaatgttatgttgctgttgaatgtttagattttgtgg

SEQ ID NO: 142502 - DNA, 201 bp, Homo sapiens
cctgatacagatggggaaactgaggcataaagtaattcaaaggctattaaaattgacaggatttgttgggaatggggattaggaaagctccaaatccatgstcctgccttctggatgcatttgacatcaaataccccacagaggttttcaaaggacattgagaaacagaatcttatcactgatcattccagattctaatga

SEQ ID NO: 142503 - DNA, 201 bp, Homo sapiens
tgtgtacatgtgcaccaaaaagataagtacaagaatgttcaagggagtcttatttgaaacagactcacgctggaaataacctcaaatgtctattaatagtraagtgagtaaatcgcagtatattcacataatgaagtactacatagcagtaaaaataaataaaccactgctgcatgcaataacatggctacattgcacaaa

SEQ ID NO: 142504 - DNA, 201 bp, Homo sapiens
gtgataccaggaggcagagcctgagtatcacctccttcccttctccaggaccgggtcccttttaggtgagactagatgaaaagggctcttcagcagctgayttcacagcaactaatttctgacaggtcagagttggcattgctcaaatctgggcttcatttccaagaagtttcacaagtctgccaggggaagtccctggac

SEQ ID NO: 142505 - DNA, 201 bp, Homo sapiens
acacctttgcgtcagccttgattccacatctagtgcatgagcaagtcctgtctgctctaccatcaaaagtgtatcccagatttcaactatttagtacttcycaccacccccactgccattaacctggctgaagccaccatcatctctcactcgtaatgcagcattctcttaatgggccacttgagtctactcttttcttcc

SEQ ID NO: 142506 - DNA, 201 bp, Homo sapiens
ctcatctattcattcgccagcatcgaaaacaacaaggttatcatcaaggacaagagtgaagtgatgctctaccagaccatcaacagtctcaaaaccaagtsagtaagatgggggtggaagcatcctgcatggattttagaggagggaagctggtcttaagctgacactaagacatactatctcattcattcattcattcct

SEQ ID NO: 142507 - DNA, 201 bp, Homo sapiens
gtctcagcgtatttcttaactggggtctgggtactcaagagccagcactaaaggcccaggctgaatgaccctcagaggctctggcagaatgagcaaatgaygcaatggctgtcttggggagaaaattgtgactttctggactctaaggcaacagccctagagtctcactggctctcttcactctactccaggatctgccta

SEQ ID NO: 142508 - DNA, 201 bp, Homo sapiens
tttatttttattttttattttttatttttttgagatagagtcttgctttgcccaggatggactgcactggtgtgatcgcagctcaccatagccccaacctytggggctcactcaggtgatcctcccacctcagcctcccaagcagctgggattatcaacatgtgccactactcctggccaatttttccttcgcatacttct

SEQ ID NO: 142509 - DNA, 201 bp, Homo sapiens
tgcagcaatcttggaaccatgaagcacaaggaaaagaacaaagaagcaatctatgaaactatggcttagcagaaagatagcaagaacctgggatagttgamaactttgagtagctgaccagccttggtcttaccagttatgtgaaacggctaagccctcatttgtttatgtcactgtagctgggtttcctgttatttatac

SEQ ID NO: 142510 - DNA, 201 bp, Homo sapiens
gtgtatcccagaagaagctggccaaggatatgggagcaaccaccatggaccagaagtctctctgggcaggtgagcatggggttgataattcagcaggaaakttggtgaggaaggaagaggtaacaggtctgtagaagaagtaatcttcctcctttcctgggacttcagtctttccgttgaccttagtgtcaaaaaatttca

SEQ ID NO: 142511 - DNA, 201 bp, Homo sapiens
cattggtatgcataagaagtttagtatgaacccatactgtgttttgttatcaacaaagaaacaagaacaaaattggcaccctttcagtaagctcagctgargtattttcacactgaaggttctgcaggcttctggagcccttgagaactgagtaggtaggttcaggcagctgtaacaaaataccacagactcggtggcata

SEQ ID NO: 142512 - DNA, 201 bp, Homo sapiens
gactctccagtcaccatgggagagccggaattgggaatccagccctagtattaactgtctggtcttagcccagaggttctaaaagttgactttactccggycgtatgcaattttgcacttaattacagtctgtttctgttccctattctttgtgtattccctcacacaagtacacttcccttccccaagtaccttttctgg

SEQ ID NO: 142513 - DNA, 201 bp, Homo sapiens
agaataccatgagtgctttctttttcttttttcttttttttttttagatggagtctcgctctgtcacccaggctggaccatgagtgcttttttaaacctcrttttaaatctgaaagaagaatgaatacattggtatgcataagaagtttagtatgaacccatactgtgttttgttatcaacaaagaaacaagaacaaaatt

SEQ ID NO: 142514 - DNA, 201 bp, Homo sapiens
cagaggtcactgcagttcaaagaagggtgcactgacctcactccctgaggtccccccaactctggggcttgggctaagagaggggctcacttggcctcctrgcgtgccaatgttggaaagggcaggttgtctgggaatggcccctgctctttgctcctcagacagtaggacctctgggcaaagtatctaagggtcacggct

SEQ ID NO: 142515 - DNA, 201 bp, Homo sapiens
ctagagaggacactacaaagagggaaggagcagggtgtggcaggaggaatggcaacaggaggaagagcagatcactcagaggtcactgcagttcaaagaarggtgcactgacctcactccctgaggtccccccaactctggggcttgggctaagagaggggctcacttggcctcctggcgtgccaatgttggaaagggcag

SEQ ID NO: 142516 - DNA, 201 bp, Homo sapiens
cttctggcagtcctggaacaatacggcctgagagtttagttcatactaagtgaataagaacaggctcaaagggcatgtgactgtgaccacactagccccasagagggcatgaccagctcttaaaaaccagcagaggaagcctcctgacccagtcacatggggaaccatgtggaggccgagatataaaggaagaggaggaag

SEQ ID NO: 142517 - DNA, 201 bp, Homo sapiens
ccacggaaatgtgctggagaggccacatggaggccaaggccccagggtaccaccgagactgcctaacctgtcgggtgcttctggcagtcctggaacaatayggcctgagagtttagttcatactaagtgaataagaacaggctcaaagggcatgtgactgtgaccacactagccccacagagggcatgaccagctcttaaa

SEQ ID NO: 142518 - DNA, 201 bp, Homo sapiens
gaaaccatggggagccaagcagaggaaagaaaccactgacacagaagccacggaaatgtgctggagaggccacatggaggccaaggccccagggtaccacmgagactgcctaacctgtcgggtgcttctggcagtcctggaacaatacggcctgagagtttagttcatactaagtgaataagaacaggctcaaagggcatg

SEQ ID NO: 142519 - DNA, 201 bp, Homo sapiens
tccaccccgctggtgatctcggttcccatgacacacctacactttcattaagtcacccttgttcccacgtctgccatagagttacggagtccaactctgasacttcactaagactggtctccttgtgtgtttcctattcttctcctcctggcaatgcccagatcctccttctaatcccttctcaaagcttgctttcaggag

SEQ ID NO: 142520 - DNA, 201 bp, Homo sapiens
tggaatcatacagcatgtagccttttcatcatacaatatgaagccttgcgtcttttaattagaaatgtgtatttatctttcaaaaccctctctgaatgcaraatacattcataagcaaaagaacaaagagtaataatttttaagtgtgttttcagcactgttcaggggattgagcagccaataggtgtaaccaatttcctt

SEQ ID NO: 142521 - DNA, 201 bp, Homo sapiens
aatacctaccaaaagatgaaaagatctcagttcaaactaacaaagaataccatgagtgctttctttttcttttttcttttttttttttagatggagtctcrctctgtcacccaggctggaccatgagtgcttttttaaacctcattttaaatctgaaagaagaatgaatacattggtatgcataagaagtttagtatgaac

SEQ ID NO: 142522 - DNA, 201 bp, Homo sapiens
ccatgtcatgacctatgacctccatggctcctgggagggctacactggagagaacagccccctctacaaatacccgactgacaccggcagcaacgcctacstcaatgtggtgagtccctgtacagatgcaagagcagaccagagatgatgatgaaaatcacatagagattcaggcacaaaaggcatcataagtttagtggt

SEQ ID NO: 142523 - DNA, 201 bp, Homo sapiens
  misc_feature (1)...(201): n = A,T,C or G
ctgatggtcactgctgcagtagctgctggcatctccaacatccagtctggctatgagatcccccaactgtcacagtgagtgatgtgccttatcttcaaacncctggaggtatcactcaggcagactagacttgtctttggtctgtcttgctattcagggaccttgtttaggaggctatggaagtggtgccttgtgcccgca

SEQ ID NO: 142524 - DNA, 201 bp, Homo sapiens
ccggcagcaacgcctacctcaatgtggtgagtccctgtacagatgcaagagcagaccagagatgatgatgaaaatcacatagagattcaggcacaaaaggyatcataagtttagtggttttctcaaatgagaaattaggctgccataatcaattaaatattctcatttactaaaaaacttgcctatttattaacaccatac

SEQ ID NO: 142525 - DNA, 201 bp, Homo sapiens
ttttttcttctcaggttgcaaagctccagcccaacccattgctcccattgccgaggcaaacatcacatgcggtgtcagccacagtggtagctctgggggcygctctggcaggagctctgggggcagccccagaggtagtggattctgtgctgacagggccagtggcctgtaccctgaccccactgacaagaatgcctccta

SEQ ID NO: 142526 - DNA, 201 bp, Homo sapiens
  misc_feature (1)...(201): n = A,T,C or G
cttgtctttggtctgtcttgctattcagggaccttgtttaggaggctatggaagtggtgccttgtgcccgcacaggtatgggaaatgaccatcagaatgantttaaatcctctaccccacctcaggtacccggactacatccatgtcatgacctatgacctccatggctcctgggagggctacactggagagaacagcccc

SEQ ID NO: 142527 - DNA, 201 bp, Homo sapiens
agttgccaagggaagcttataagtccaactactggtggactcagttgagaacaatcttccacttagaagcaatccaaagctggcattgataaagcattcaktctccttggtcaggagattcactcctagggaaataattggaactgtggagacattggggtgcagcaaaccaacatggcacatgtatacctatgtaacaaa

SEQ ID NO: 142528 - DNA, 201 bp, Homo sapiens; identical to SEQ ID NO: 26017

SEQ ID NO: 142529 - DNA, 201 bp, Homo sapiens
cctcaatgtggtgagtccctgtacagatgcaagagcagaccagagatgatgatgaaaatcacatagagattcaggcacaaaaggcatcataagtttagtgkttttctcaaatgagaaattaggctgccataatcaattaaatattctcatttactaaaaaacttgcctatttattaacaccatactgataattttacctaa

SEQ ID NO: 142530 - DNA, 201 bp, Homo sapiens
gaaaatcacatagagattcaggcacaaaaggcatcataagtttagtggttttctcaaatgagaaattaggctgccataatcaattaaatattctcatttaytaaaaaacttgcctatttattaacaccatactgataattttacctaatatgaaagaagattaataacaagtgcattgttttttaataaaagaaaatgata

SEQ ID NO: 142531 - DNA, 201 bp, Homo sapiens
gggagggctacactggagagaacagccccctctacaaatacccgactgacaccggcagcaacgcctacctcaatgtggtgagtccctgtacagatgcaagrgcagaccagagatgatgatgaaaatcacatagagattcaggcacaaaaggcatcataagtttagtggttttctcaaatgagaaattaggctgccataatc

SEQ ID NO: 142532 - DNA, 201 bp, Homo sapiens
acctcaatgtggtgagtccctgtacagatgcaagagcagaccagagatgatgatgaaaatcacatagagattcaggcacaaaaggcatcataagtttagtrgttttctcaaatgagaaattaggctgccataatcaattaaatattctcatttactaaaaaacttgcctatttattaacaccatactgataattttaccta

SEQ ID NO: 142533 - DNA, 201 bp, Homo sapiens
tgtggagacattggggtgcagcaaaccaacatggcacatgtatacctatgtaacaaacctgcacattgtgcacatgtaccctggaacttaaagtatatttaaaaaaaaaactgtggagacattgaaacataccaatcatagtcacctactccaacattcataagtaggaaataaggataagaacaaagataaaccaggatg

SEQ ID NO: 142534 - DNA, 201 bp, Homo sapiens
gtctcaccctgccttctttgggtctccctcagtttcactgccatggtttccactcctgagaaccaccagactttcatcaactcagtcatcaaattcctgcrccagtatgagtttgacgggctggactttgactgggagtaccccggctctcgtgtgagccctcctcaggacaagcatctcttcactgtcctggtgcaggtg

SEQ ID NO: 142535 - DNA, 201 bp, Homo sapiens
ttttcttttttcttctcaggttgcaaagctccagcccaacccattgctcccattgccgaggcaaacatcacatgcggtgtcagccacagtggtagctctgrgggccgctctggcaggagctctgggggcagccccagaggtagtggattctgtgctgacagggccagtggcctgtaccctgaccccactgacaagaatgcc

SEQ ID NO: 142536 - DNA, 201 bp, Homo sapiens
gagccaagaacaaaatccaggtactagctctcacacatcaggtatcactggctaaaagcaaggaggttcaggatttgttttcttttttcttctcaggttgyaaagctccagcccaacccattgctcccattgccgaggcaaacatcacatgcggtgtcagccacagtggtagctctgggggccgctctggcaggagctctg

SEQ ID NO: 142537 - DNA, 201 bp, Homo sapiens
catctcttcactgtcctggtgcaggtgagctaagttccagatcattttcactggaaagcatacacccatctcatatgaaagatcactgggaccttaaaccyagtttcctagaattttatttggggtgaaggacctgaaaatcctattccagtaaggatgctgaggaatgaatggaaggatggaagaggttaatttaattca

SEQ ID NO: 142538 - DNA, 201 bp, Homo sapiens
tcaggatttgttttcttttttcttctcaggttgcaaagctccagcccaacccattgctcccattgccgaggcaaacatcacatgcggtgtcagccacagtsgtagctctgggggccgctctggcaggagctctgggggcagccccagaggtagtggattctgtgctgacagggccagtggcctgtaccctgaccccactga

SEQ ID NO: 142539 - DNA, 201 bp, Homo sapiens
ggttgattttactctaaggtgttgggaccaccaaggtctcaccctgccttctttgggtctccctcagtttcactgccatggtttccactcctgagaaccaycagactttcatcaactcagtcatcaaattcctgcgccagtatgagtttgacgggctggactttgactgggagtaccccggctctcgtgtgagccctcctc

SEQ ID NO: 142540 - DNA, 201 bp, Homo sapiens
agatctgtaccttcctgaagaatggagctactgaagtatgggaggcttctgaggatgttccctatgcctacaaaggaaatgagtggcttggatacgataayaccaagagtttccaaatcaaggtagactgtgttctatgggttgttgttgcctgtgagcatgttcccattatagccctggagccacagctcagccttggtg

SEQ ID NO: 142541 - DNA, 201 bp, Homo sapiens
gttccttggaagtcatggagctgttgcacaagtaattgtctgacattgtccattcctatctggtaacaattgattaatggtgggaagaacaaacagggctyttcaccatttcttccttccttcattcatttcacaagaaatttattgaacatctattacatatacagtgctctgtaggtaccacaggtgatctaaatgcat

SEQ ID NO: 142542 - DNA, 201 bp, Homo sapiens
ccattgacctggatgatttcacaggcactttctgcaaccaaggaaaattccctctgatcaccaccctgaaggatgctctgggcctgcagagtacaagtgakttagggagtgagaagggacactaagcctcagacttaagagaaattccaaaggttccttggaagtcatggagctgttgcacaagtaattgtctgacattgt

SEQ ID NO: 142543 - DNA, 201 bp, Homo sapiens
tgcgccagtatgagtttgacgggctggactttgactgggagtaccccggctctcgtgtgagccctcctcaggacaagcatctcttcactgtcctggtgcargtgagctaagttccagatcattttcactggaaagcatacacccatctcatatgaaagatcactgggaccttaaacctagtttcctagaattttatttggg

SEQ ID NO: 142544 - DNA, 201 bp, Homo sapiens
agaatttagttgagaattagacctatcactttaacagatatatgtcagtgatgctctaaaatatgttgcaagtactttgtacagtgggcacaaccaaatcraaaaaagtttagctaataattaatcactaggccatcagctgtgggtgagaactctagctaacccactgccattgcaggattatgtcatgaactactggaa

SEQ ID NO: 142545 - DNA, 201 bp, Homo sapiens
gtttttaaagaaatctgtgactcactagggagcttgtctctcaccttctttctctgggtaacaggctctgcctaccagctgacatgttacttcaccaactrggcccagaaccagccaggcctggggtgcttcaagcctgatgacatcgacccctgcctctgtacccacttgatctacgcctttgctggaatgcagaacaac

SEQ ID NO: 142546 - DNA, 201 bp, Homo sapiens
gctctcacacatcaggtatcactggctaaaagcaaggaggttcaggatttgttttcttttttcttctcaggttgcaaagctccagcccaacccattgctcycattgccgaggcaaacatcacatgcggtgtcagccacagtggtagctctgggggccgctctggcaggagctctgggggcagccccagaggtagtggattc

SEQ ID NO: 142547 - DNA, 201 bp, Homo sapiens
gtggagacatagaaggaggagccaagaacaaaatccaggtactagctctcacacatcaggtatcactggctaaaagcaaggaggttcaggatttgttttcytttttcttctcaggttgcaaagctccagcccaacccattgctcccattgccgaggcaaacatcacatgcggtgtcagccacagtggtagctctgggggcc

SEQ ID NO: 142548 - DNA, 201 bp, Homo sapiens
gtgaagcttttgagcaggaggccaagcacattaataagcccaggctgatggtcactgctgcagtagctgctggcatctccaacatccagtctggctatgasatcccccaactgtcacagtgagtgatgtgccttatcttcaaacccctggaggtatcactcaggcagactagacttgtctttggtctgtcttgctattcag

SEQ ID NO: 142549 - DNA, 201 bp, Homo sapiens
ctactggtggactcagttgagaacaatcttccacttagaagcaatccaaagctggcattgataaagcattcagtctccttggtcaggagattcactcctasggaaataattggaactgtggagacattggggtgcagcaaaccaacatggcacatgtatacctatgtaacaaacctgcacattgtgcacatgtaccctgga

SEQ ID NO: 142550 - DNA, 201 bp, Homo sapiens
ggtacccggactacatccatgtcatgacctatgacctccatggctcctgggagggctacactggagagaacagccccctctacaaatacccgactgacacyggcagcaacgcctacctcaatgtggtgagtccctgtacagatgcaagagcagaccagagatgatgatgaaaatcacatagagattcaggcacaaaaggca

SEQ ID NO: 142551 - DNA, 201 bp, Homo sapiens
cttagaagcaatccaaagctggcattgataaagcattcagtctccttggtcaggagattcactcctagggaaataattggaactgtggagacattggggtrcagcaaaccaacatggcacatgtatacctatgtaacaaacctgcacattgtgcacatgtaccctggaacttaaagtatatttaaaaaaaaaactgtggag

SEQ ID NO: 142552 - DNA, 201 bp, Homo sapiens
tgttcccattatagccctggagccacagctcagccttggtgtctgtacataactgacttcctttctaattaccacaggcagattggctaaagaagaacaastttggaggtgccatggtctgggccattgacctggatgatttcacaggcactttctgcaaccaaggaaaattccctctgatcaccaccctgaaggatgctc

SEQ ID NO: 142553 - DNA, 201 bp, Homo sapiens; identical to SEQ ID NO: 26019

SEQ ID NO: 142554 - DNA, 201 bp, Homo sapiens; identical to SEQ ID NO: 26020

SEQ ID NO: 142555 - DNA, 201 bp, Homo sapiens; identical to SEQ ID NO: 26021

SEQ ID NO: 142556 - DNA, 201 bp, Homo sapiens
ccactgctactgccaccaggcgtggcatttttattcaggcgacgcttaagggagtccggccgtgcccggtgcattgtgggagcggcccgcagcccgttttygggaggaggcggagggtgcaaagccagccggtggatccataaagaacccagccaacccacagagggaggggaggggctgagctgtgaggagagcggggcc

SEQ ID NO: 142557 - DNA, 201 bp, Homo sapiens; identical to SEQ ID NO: 26023

SEQ ID NO: 142558 - DNA, 201 bp, Homo sapiens
cccacagggctatgccaagccaggtgagcccccgcagcacccaggcatgggcctgggctgccactgctactgccaccaggcgtggcatttttattcaggcracgcttaagggagtccggccgtgcccggtgcattgtgggagcggcccgcagcccgtttttgggaggaggcggagggtgcaaagccagccggtggatccat

SEQ ID NO: 142559 - DNA, 201 bp, Homo sapiens
gtcactacttttataataaatcttccttctttaattttttaactctttcaaagatcactagtagttcttttaaagaccatctttgataaatcgaagttcamaatcacaattaacacatagttttaaccacctttcaagaactcaaggttatgaatatgattagagatcactaaagcttcactgagaggctgataaaacaaa

SEQ ID NO: 142560 - DNA, 201 bp, Homo sapiens
actgtatgtgactcaaaaagcctaaaatatttaccagctgacccttcacagataaaaaaaaaaagccaaactctggtccggaatgttagcagtacagtgasggacaaatgcatgagcagattatattttggaagcagaacaagaacaagtttggtgtgttctaggaacagctggtgtggcgggaacataaaaagacccaga

SEQ ID NO: 142561 - DNA, 201 bp, Homo sapiens
tatcctaagagccgatagttatggcttggaacatagtgactggaatattcctataagattggcctaagcgaaaaagaaagtggaaaaaggatcagcaatakaacaggaaagacacagggacaatatgggccccaaggagaggaagttcctctaggaatctgaggatggtgttgaatttcatggtttaaagcaggctcaaaa

SEQ ID NO: 142562 - DNA, 201 bp, Homo sapiens
tattacaagtaaaatttatattttattaaaagtaaaatatccaggctccctagagtctggagccaaattacctaggtttgaatctcagctctgaaatttawctgccatgtgatcctggtgaaaattgcttaacctatctgtgcctcagttgccttatccttaaagtagaaataatatcatctaccttaagtgtttgatata

SEQ ID NO: 142563 - DNA, 201 bp, Homo sapiens
accaccagggctctgggtttcaagcacaaaactgggcggctgttcgggcagacactgagctagctgcaggagtttcccatcctcctcccctgcccagtggygcctggaaccccagggagacagaaccattcactcccctggaaagggggctgaagccagggagccaagtggtctcactcagcgggtcccacttccgtggag

SEQ ID NO: 142564 - DNA, 201 bp, Homo sapiens
cctatagcttcaagtatgttcactaaaggcgattgaatagagtgccccggcccagtccttccgaatgggagactgacgccctagcaccgggcgaagtcccrggcgccagaggcacccaccctgcacggccggaaggagtggggcggggcctacaggctctccgctgggcccgagcgggctgggggaggggagcgtggggcc

SEQ ID NO: 142565 - DNA, 201 bp, Homo sapiens
taagggaagaatagttttttcaacaaatggtagtgggaaagctggatatccacatacagaaaaaataaaattggacccttatcttacatgaaacacaaaggtcaattaaaaatggattgaaaacttaaacagaagagtgaatctggagaggggagggacaagatggctaaacagaaggccccactaatcatcccctccaca

SEQ ID NO: 142566 - DNA, 201 bp, Homo sapiens
ctattaaccttcactattcagcatagaaatacaaagaggttccccagagaatttcctaagtgcaagcatagtcctctctgaccccactgtgggacagcaayctaatttctttggagatctggatcaatcactccagcctgtagagtagcctttcctgattcttggttcactggcataagaacttccaaatagctaatagcg

SEQ ID NO: 142567 - DNA, 201 bp, Homo sapiens
gtaacataacgctgagcatttgtgtatgtaaacacatctaaacatagaaaaggtaatgcattgtgctacattaccatgtcactaggtaataggatttttcrgctccattataatcttatgggaccaccatcatatatgtggtctgttactgacagaaatgtcattatgcagatgactgtatgtatttggaaggttaagatt

SEQ ID NO: 142568 - DNA, 201 bp, Homo sapiens
aaaataggcaaagcaaaaatttactgatgcccaataaattcacaatcataatcagagatcttaaaatatatcccttagtaactgatagaatatcagacaaraaagagaaaaccaataattatatagaagagttggacagtaatattaacaaacttgacctaattgacatatatagacaaccacatgcaacaattgcagaat

SEQ ID NO: 142569 - DNA, 201 bp, Homo sapiens
gtaaacacatctaaacatagaaaaggtaatgcattgtgctacattaccatgtcactaggtaataggatttttcggctccattataatcttatgggaccacyatcatatatgtggtctgttactgacagaaatgtcattatgcagatgactgtatgtatttggaaggttaagattagtgaattttttaaagcactgcttcag

SEQ ID NO: 142570 - DNA, 201 bp, Homo sapiens
tttcatggttgtatgaacatcctagagtgttaacaaacccagatggtatagcctactacacgtccaggctatatgatatatatagcctgttgctcctaggstacaaacctgtatagcatgtgactgtactgaatactgtaggcaattgtaacataacgctgagcatttgtgtatgtaaacacatctaaacatagaaaaggt

SEQ ID NO: 142571 - DNA, 201 bp, Homo sapiens
cagcatccactctaaagatgaaaattccaaagtctcaactaaatctcacctaaatttgatatgggtgagacttgaggtacaatttatcctgaggcaaaatktcttctcctgtgaaaccagataagtatgtgcttccaaaataggaaggtgggacaggtacaatagagacagtcccattccaaaaagagagaaataaggccg

SEQ ID NO: 142572 - DNA, 201 bp, Homo sapiens
cattttaattagcttgattgaatctttctacaatgtatacataaatcaaagcatcacattgtacctcataaatatacacaattatttgtcaattaaaattwaaaaaattgatcaaaaaagtgttttaaaaagatgcctcaaagctgtgaaatgtggaataaagttaatagctccttttattttcctgtttccttttatagt

SEQ ID NO: 142573 - DNA, 201 bp, Homo sapiens
ttcatttagaatgataatctacatatttgcattcacatttcagtggaacttattgaggaatgttaaagaacaatcttcagtaagtacccctgagcccttgracctttataacatgaacaattctaaatcatggaacagggaagagggcagaaatagaatatcctaagagccgatagttatggcttggaacatagtgactgg

SEQ ID NO: 142574 - DNA, 201 bp, Homo sapiens
ttgtcttactttttcactcagtgtaatgtttttgagattgattcatattattgtacatgtcagtagtgtgtaaagttttattcattctactactgatgaayatttgggttgtttctagtttggggctattataaatgatgctttttggatcattaatatccacgtttttgggtgaacatgcacatttgtttttgttggtta

SEQ ID NO: 142575 - DNA, 201 bp, Homo sapiens
cacacacacgcaccccacaaacatatgtattctactcttcttattatttttacttagggtttaaacctgccagaaattaaattattaaatttttataaatkgtgtaaagtattgatctaattttatctgtttccataagggtaaccaaatatcctaacaccatttattggaaagtccatcatttcatacactgatttatta

SEQ ID NO: 142576 - DNA, 201 bp, Homo sapiens
tattgtagttcactgaactttttaaagaggattattctgaattctttgtcagtcattatatagatctccatttctgtaggacccattgttggagttttatkagtttcttttggagatgtaatgattccttgattcttcttaattcttgtttctttatgttggtgtctttacatttgaggaggcaaccacctcttccaacct

SEQ ID NO: 142577 - DNA, 201 bp, Homo sapiens
tttcttttgatacacatgggggaattctttaatgttgtaatccttccagactttcatgatgttctctttattggggttctctttcatagcattgacaattstttctatagagtactgggtgtaatgagccttaaaggcccttatgaccctctgatctagggactgaattagagacattgtatttggaggcaagtagacccc

SEQ ID NO: 142578 - DNA, 201 bp, Homo sapiens
aaaatagtcatgatcattattacctattttcaattttatatgaattttagtatcagtatgtcaagttctgtaagaataatatccttaatccatatttattrttgatatcttgattaaactttcatttaatgtatggaataacttgagaataatcatttatgttcacaaatctttccctcaggaacatagtataactctacg

SEQ ID NO: 142579 - DNA, 201 bp, Homo sapiens
ttcacatggcaagcaggtcttttagaaatccaattatatgccttccaaaggtccaaggccttatttctagtcaacttgtacagaccattacaacttcagcyaacacaactgcacattgctcagctggcttttatctgcaagcaccacctactggcctggaagtaaagctgcacaacccaatacaatgcctgttgacaaaat

SEQ ID NO: 142580 - DNA, 201 bp, Homo sapiens
ccccagccatgcttcctgtacagcctgtggaaatgtgagccaattttaaacctcttttctttataagttacccagtctcaggtagttctttataacaatgygagaatggactaatatgaacacaaaggataaatgcttgagggaatggataccccattttacatgatatgattattatgcattgcatgcctatattgaaac

SEQ ID NO: 142581 - DNA, 201 bp, Homo sapiens
ttgactttagagagactgactataatgtggtggggagaaaacctttatgcattgtatttctggggatgtttgagccccatatagacatatggatgtcgaartctcttgctagacttgggaatttttcacctattatttcattaaataggattccatcattttgttctctcttcagccttgagaacactgataattcaaaga

SEQ ID NO: 142582 - DNA, 201 bp, Homo sapiens
ctgggtgagctggctcatgcctgtaatcccagcactttgggaggctgaggtgggcagatcactcgagaccaagagtttaagaccagcctggtgaaaccccrtctctactaaaaatacaaaaattagccgggtgtggtagtgtatgcctgtaatcccaggaggctgaggcatgaggatctcttgaacccaggaggtggaggc

SEQ ID NO: 142583 - DNA, 201 bp, Homo sapiens
actgtttattactggttcaatctcactacttgttattgatctgttcagcttttctatttcctcctgactcaactttgacacattgtgtatgtcaagggatktatccatttcccgtaggttttccactttgttagtgtatagatgttcataatagtctctgatgatcttttgtatttctgtttggtatcagttgtaatatct

SEQ ID NO: 142584 - DNA, 201 bp, Homo sapiens
gtaagactctgtttcaaaaaaaaaaaaaaagtgataacatcaatggtggttaggatgcagagaaactggatcactgatacattgttggtgggaatataaawtggtacattctctatggaaaacagctttgtgttttcttagaaaaataaaaatgtaattaccacatgcccctgaaactgtgctcttgagaatttatctcag

SEQ ID NO: 142585 - DNA, 201 bp, Homo sapiens
aagactctgtttcaaaaaaaaaaaaaaagtgataacatcaatggtggttaggatgcagagaaactggatcactgatacattgttggtgggaatataaattrgtacattctctatggaaaacagctttgtgttttcttagaaaaataaaaatgtaattaccacatgcccctgaaactgtgctcttgagaatttatctcagag

SEQ ID NO: 142586 - DNA, 201 bp, Homo sapiens
ttttaatgcaattcctgtcaaaatataagcaagattttttttataattataaacaagcttgctctaaaatttaaatggaaatatacaggccctaggagagscaaaacaattttgaaaatgaagaattaagtgggaagaaatcacttccagactgcagtaatcaagacaatgtggtattggtggagggacagatacatagat

SEQ ID NO: 142587 - DNA, 201 bp, Homo sapiens
tttctatgtgttggtaacatttcaagtcctctcttttagctactttggaatatataatacattgttgctaactgtagtcactctggtatagattattggarcttatttattctattcaactgtatgttggtacccactaaccaatctttctatatcacttctcccatccacacatccttctcgacctctaatatctatcat

SEQ ID NO: 142588 - DNA, 201 bp, Homo sapiens
tcttgttttggaaggattttttgaaacattttatttttctcttcaaataaaattgttacaatccacagctaacattatacttaatagtgagacttaatgcyttccctctaagacagggaacatggcaaggatgcccattcttaccactattatttaacatccactctcaccactcttatttatcatagtactgaaaattct

SEQ ID NO: 142589 - DNA, 201 bp, Homo sapiens
ctgctggctgggcttcaatatcttatggcatcactggctgagctctgaaatcaggcagagttgttggctgggctttacaatcacctctgatcaggctggawcacagggtgtattccttggctgggcattaccaccatttgatttctgtggttgggccaggggtgcaggctggtctccaagattaggcagagttgctgcttg

SEQ ID NO: 142590 - DNA, 201 bp, Homo sapiens
gatttaggaagtggaatcaacagaccttggtgattgattaaatgtgggttataaaagagatgaatcaaggtgagtttcaaatttcttttctgtattaaaaktttgataagatctaattaataagcatttgctgagtgttaattttattaactgagctaagaactgttagagaaccaaagatggaagattccctttctcaat

SEQ ID NO: 142591 - DNA, 201 bp, Homo sapiens
cggcggatcacgaggtcaggagatcgagaccatcctggctaacacggtgaaaccccgtctctactaaaaatacaaaaaattagccgggcgtggtggcaggygcctgtagtcccagctactcgggaggctgaggcaggagaatggcgtgaacccgggaggcggagcttgcagtgagccgagatcgcgccactgcactccagc

SEQ ID NO: 142592 - DNA, 201 bp, Homo sapiens
aatcagattcaatccaaataagaatactatgaccaaactattaaaaatcaaagacaaaaaaaggatcctgaaatcagcagcaagaaaaataaagcaaataytatataagggagttccaatatgcctagcagtgaacttctcagaagaaaccttgtaggccagcatagaatgggatgatatattcaaaatgctgaaaagaaa

SEQ ID NO: 142593 - DNA, 201 bp, Homo sapiens
gctctatcatattagtttggttctttcttaaaatggccatttcatctttcagctcctgtattgttttattataatccttaaattccttggattcagtttcmactttctcatggatctcaaatgatcttaattcctatccacattctgaattctatatctgccattttagccatttcagcctggttaagaatccttgctggg

SEQ ID NO: 142594 - DNA, 201 bp, Homo sapiens
tctccccaactttctagaatgttaataagtgacagaattgtcaagactagcatgttcaactgtcattttcaccttatggattaaattctggaaccaaaaawatctactgttatttgtgagtaactaaagaaggtattggaaggagttttgaaagacaagaatgaacatttcaaatagctaacaggtctttctttatttcaa

SEQ ID NO: 142595 - DNA, 201 bp, Homo sapiens
tcaacattgttttgggtattctgggttctttccatttccatataaatattaggatcatcttgtcactctttctttctttctttctttctttctttctttcwttcattctttcttttcttttcttctttcttttctttctttctttcgacagggtcttgctctgttgctcaggctggagtgcagtgacacagttgcagctca

SEQ ID NO: 142596 - DNA, 201 bp, Homo sapiens
cattaaataatttctcatccctcactcccctcctacccttccaagtctctgatatttatcattcctcactctatgtccatgtgtgcacattacttagttcscacttataagtgagaacatgtggcattttcttttctgtttctctgttgtttcacttaagataatggcattcagttacatccatgttgctgcaaaagacaa

SEQ ID NO: 142597 - DNA, 201 bp, Homo sapiens
gccagtctctgataaagcatagcaagagtgaccattactccagttcccaataagttcctcatctctatctgagaccacctcagtatggacttcacagtttkcatcgctatcagcattttggtcaaaactattcaagaagtctctaggaagttcctaaatttccctcgcctttctgtcttcttctgagccctccatactgtt

SEQ ID NO: 142598 - DNA, 201 bp, Homo sapiens
aggcggcggatcacgaggtcaggagatcgagaccatcctggctaacacggtgaaaccccgtctctactaaaaatacaaaaaattagccgggcgtggtggcrggtgcctgtagtcccagctactcgggaggctgaggcaggagaatggcgtgaacccgggaggcggagcttgcagtgagccgagatcgcgccactgcactcc

SEQ ID NO: 142599 - DNA, 201 bp, Homo sapiens
gcaagtagaccaatagtacaaaacattatagaaagaacttattttcacacataataaaaatggaagtaaaattagttactttaggattagtttaattaggwcaagttaaattaggattgcgactatgcatcatgggtaaattttcatatatgcatattacaataaaactgattttgcaagaccaaaaaaaaatcattctac

SEQ ID NO: 142600 - DNA, 201 bp, Homo sapiens
tcagggaataagagagataaccttaaactctgactgccggtgagctgggcagaacagaaccatatttctcttctttcaaaagcaaatgggagaaatatcgytgaattctttttctcagcatggaacatccctgagaaagagaatgcgcacctaggggtaggtctctgaactggcccccccggggcgtacctgtctcttatg

SEQ ID NO: 142601 - DNA, 201 bp, Homo sapiens
ccttccccagtcttagggcagcaaggacagagctgctgcaatggcagtggcagaggggctctcggttctttatttttgataaagtccaagttattttttttcttttgtcaattgtgttttttgatgttgtatctaataattctttgcccaatccaatatcatgaaggttttcctatgtttctaaaagttttatacttttac

SEQ ID NO: 142602 - DNA, 201 bp, Homo sapiens
ccatcaaaccgcatgtcagatccccaaactgctgcagctgaaggctttcagctaaatgcacctactgtggaggtactttcctgaagggagagcaaggtggyacaccacacggctgctgcacaaatgtacaaaaaattcaatatgtagaggacttgaaaaacccaattaataaacttgatctaattgacatatatagaacgc

SEQ ID NO: 142603 - DNA, 201 bp, Homo sapiens
aaaagtacttagggataaatgtaattaaggaggcaaaagtcttgtacactgaaaactagaaaacattgttgaaagaaataaaagaagacacaaataaatgkaaagacacttcatggattggaaattttaatattgttaaaatatctataccatgcaaagctatctacagattcaatgctatccccataaaaatcacaataa

SEQ ID NO: 142604 - DNA, 201 bp, Homo sapiens
ttatgcattcgtgacatacccttttcttaaatttttatatttctaggccacatggtttgtaagtttttgtagattgttgcaaatttcaaaaaatttttcawatatgttgaaaaaattctgtgtataagtggacccatgcagttcaaaccatgttgctcaagagtcagctgtactatagatttttcactttgttgttatcgt

SEQ ID NO: 142605 - DNA, 201 bp, Homo sapiens
acagtttgtgcctccagaggagacccctttcatctacttgaaaagaagagagggaaagtaaagaggatgttgtcttgcatcttgaataccagttcagccayagtaggatagtgcaccagtcagagttgtgaggccctaactcccagatgacatttctagacaaacgctgggacagaagggaacttgctgcattgaagagaa

SEQ ID NO: 142606 - DNA, 201 bp, Homo sapiens
ctgaaagtgtttgatgcatttattacattgattgtggtgatggcattatggatatttgtatatactcaaacatcaaattatacatattaaatatgtgcagytctttgtatatcaattatgttttaataaagctgttgttaaaattagaataattctggagggtttgttttcaaagtaagtatttataaatgtatggatata

SEQ ID NO: 142607 - DNA, 201 bp, Homo sapiens
tatgtactccaaacatacaaaacattttgtttattttcatggagcacacagattcataaagcatatatatatgtgtgtgtgtgtgtgtgtgtgtgtgtgtgtgtttgtgtgtgtgtataatttatatcctcttgcttgattaatttaccattatgtaatgaccttgtctttttactgtttttcacctaaagtctgttttat

SEQ ID NO: 142608 - DNA, 201 bp, Homo sapiens
atgttttaataaagctgttgttaaaattagaataattctggagggtttgttttcaaagtaagtatttataaatgtatggatatattgtagaggaaacgcamagggtaatataggacctagggataatagcagtggagtagcagttaccaagcttagtccagtagggacaaaaggaggaagcagttgtcagaacccaaaagg

SEQ ID NO: 142609 - DNA, 201 bp, Homo sapiens
tataatgtgcatccattaacatagatctataattatttgttacttttgtttttaaaatttataccatatttaaaagtgatttacacacttatattacaatwctacacaataaacctttatcagaaggtttatattttcatatggttttgtgttgctatttatcatcctttttcttcaacttgaaggatccctttagcattt

SEQ ID NO: 142610 - DNA, 201 bp, Homo sapiens
tccctgttcaaaggcattggtaatgatataaaaaaattaaagtaataagacagcattgtattggctgaaggatagacacttagatcaatggaaccaaatamaaaaaaacagaaacagaccctcacaaatttgcccaactgacttttgacaaatgtgcaaaagcaagttaaaaaaaaagtaaggatagcctttcaagcaata

SEQ ID NO: 142611 - DNA, 201 bp, Homo sapiens
gtagagcttttattagttttcctttcacttttttgtttatgcaaacaatgttaagttgttattagcttaaaaaatggattataagacagtattttcaagcytcatggtaacctcaaatacaaaaccatacaatggacacattaaaaagtgagaaattaaataataccagcagaaaaaaaaatcaccttcactaaaagaaag

SEQ ID NO: 142612 - DNA, 201 bp, Homo sapiens
atcaagatatagaacacatctggcaccctagaaagttccctctggccctttctgattctatattccattaatctcttcccaagaggtaacccctattcagmctttttcttatcatagattagatttgccttttctataaatttatataaatagaataacacggtatgtactcttttgtcttactttttcactcagtgtaat

SEQ ID NO: 142613 - DNA, 201 bp, Homo sapiens
ggctggtctcatttgcttcaactagtattgcaacttttgtcagctgtgatgttggtcgttcccagttgattggttcttctttgtggaggagtcaagtgtcwtgtgcctctagtcagccatcttgaaagactctaccaattccctttttgtaacaaatattttgtaccaatttctttattaaccagaagtgaaattcataga

SEQ ID NO: 142614 - DNA, 201 bp, Homo sapiens
gatgattagggatgttgagcatttttttcctacagctgatggcaatttgtatgtattttaaaaagaaatgtctattcatatcctttgttcactttttaacrggatttttttttttattgttgagttctttgagttccttctagattctggatattagtcccttgttggatgaataatttgcaaatattttctcccattcaa

SEQ ID NO: 142615 - DNA, 201 bp, Homo sapiens
tggggggaggggggagggatagcattaggaggaatacctaatgtaaatgacgagttaatgggtgcagcacaccaacatagcacatgtaacaaacctgcacrttgtgcacatgtaccctagaacttaaagtataataacaaaaaagaaacaataacaaaaaaacaaaaaagaaaacaaaaaaaagaaaaaaaatgggcaaaa

SEQ ID NO: 142616 - DNA, 201 bp, Homo sapiens
gtggcactgttcacaatagcaaagacttggaagcagcccaaatgcccatcaatgatagactggataaagaaaatgtggcacatacacaccatggaatactrtgcagccataaaaaaggatgagttcatgtcctttgcagggagatggatgaagctggaaaccatcattctcagcaaactaacacaaaaacaaaaaaccaaa

SEQ ID NO: 142617 - DNA, 201 bp, Homo sapiens
agtctcactctgtcacccaggctggagtgcagtggtgtgatcttggctcactgcaacctccgcctcccgggttcaagcaattctcctgccttagcctcccragagtagctggaattataggtgtccaccaccacacccagctaatttttgtatttttagtagagacagggtttctccatgttggccaggcaggtctcaaac

SEQ ID NO: 142618 - DNA, 201 bp, Homo sapiens
ttgggtactatgttcactaccagagtgacagatttagtcataccccaaacttcagcattatgtaatatacctttgtaacaaacctgcacgtgtaacctctrattctaaaacaaaagttgaaaaagaaaaataaagggtgtcttttccccattgtgtgtttttgtcacctttgtcaaagaccagttggttgtagatatgtgg

SEQ ID NO: 142619 - DNA, 201 bp, Homo sapiens
gatctttaccatgaaaactataaaacactgatgaaagaaatttaagaggacacaaaaatagaaagatattccatattcacagattggaaaaaacagtattrttaatatgttcatactacccaaagcaatctacagatttaatgcaacccctatcaaaaaaagttgagttgcttgatattttctatagattgaggtctgcag

SEQ ID NO: 142620 - DNA, 201 bp, Homo sapiens
cattttggtaagagatgtgtgaagacagatactttttaaaacttgtggtaagaaatatttgctttggcagcacatatatcaaaaattggaatgataaaatygtggtaagaaaacacatagtacaaaatttactatcttaaccattttaagtgtacaattcacattgttatgcaatgataaataccttttgtgtggtctgaa

SEQ ID NO: 142621 - DNA, 201 bp, Homo sapiens
cagaccaataacaactcaaactattccaaataatggaggaggaggaacttattctctgaggccatattaccttgatatcaaaaccagacaaagacattgaraggaggtgccagctgggcttcctgggtctagcaggggctcagaaagctatgaaactcattttctgcaacaggacttactttggtcctggatgaataatat

SEQ ID NO: 142622 - DNA, 201 bp, Homo sapiens
cagatatataaagaaaatattttagagctaaagagagagagatcccaatacaataatagctggagacttcaacacacaactttcagcattggacagatctyccagacagaaaatcaacaaagaaacattagacttaatctgcactatagaccaaatggacctaatagatttgtacagaacatttcatccaatagctgcaga

SEQ ID NO: 142623 - DNA, 201 bp, Homo sapiens
cattgtgataatcactttgtccttatttccagttaaagtacttactctcatctcttgtagttaagggctgacagttggcctctgctactcagggataccawcatactgactgatatcagggcactcatctcagtgttgtaactttccactgtcatacctggcctacgtaagacaaccatcacagaactttacaagggcact

SEQ ID NO: 142624 - DNA, 201 bp, Homo sapiens
gtccttacttatcaataataacagtaaatgtagatggactaaactctccaatcaaaagacacagagtagctgaatgaataaaaacaacacccaataatatkctgcctacaagaaacacgcttcacttacagacacacacagactaaaaataaagggatagaaaaacattccatgccaaaaaaagagcaggagtagttacac

SEQ ID NO: 142625 - DNA, 201 bp, Homo sapiens
atagcacatgtaacaaacctgcacgttgtgcacatgtaccctagaacttaaagtataataacaaaaaagaaacaataacaaaaaaacaaaaaagaaaacaraaaaaagaaaaaaaatgggcaaaagacctgaatcagtgtttctcaaaaaaagacatacaaatggtcaacaggtatgtgaaaaaatactcaacatcattac

SEQ ID NO: 142626 - DNA, 201 bp, Homo sapiens
tgggagatttttcgatgtagtgggagaagagtatttgattaagaatttaatatttgactaggagttggaaattttttttctttgaagatccagacagcacrtattgtagacttcatagactacaaagaagaaattctagtctggtcttggtctggagtcttggtgtcatactcatctttgtttttctttacaactccttaa

SEQ ID NO: 142627 - DNA, 201 bp, Homo sapiens
tgcaacaactgtgagacattgcattgaactcagtgctgccctgtcacagcagaaagcaaaactaggttgaattcagctgatgctcgcccatggagagagtdcttaaaccaggcctagctagaaaggaatcacccatcccagtagtcagaacttgagtactggaaagcctcaccagcatgggctgaagtgctctggggaaca

SEQ ID NO: 142628 - DNA, 201 bp, Homo sapiens
tggttaaagaatagaaaattacagttaaataggaggaataagttctatcgtacagtatggtgactatagttaataacaatatgttgtattcttgaaaaatwgctaagagagtggatgttgcattctcactacgaatatgataactatgtgtgataatgcacttttcttaattatgtagattttaccattccacaatgtata

SEQ ID NO: 142629 - DNA, 201 bp, Homo sapiens
aatgcattgtgctacattaccatgtcactaggtaataggatttttcggctccattataatcttatgggaccaccatcatatatgtggtctgttactgacaraaatgtcattatgcagatgactgtatgtatttggaaggttaagattagtgaattttttaaagcactgcttcagttaggtagtaggccaaaaggaagattg

SEQ ID NO: 142630 - DNA, 201 bp, Homo sapiens
gaataggagtggtgagagagggcatccttgtcttgtgccgattttcaaagggaatgcttccagctcttgcccatttagtatgatattggctgtgggtttgycataaataggtcttattattttgagatatgttccatcaatatctagtttattgagggtttttagcatgaaggggtgttgaattttattgaaggctttttc

SEQ ID NO: 142631 - DNA, 201 bp, Homo sapiens
atagaaaattacagttaaataggaggaataagttctatcgtacagtatggtgactatagttaataacaatatgttgtattcttgaaaaattgctaagagaktggatgttgcattctcactacgaatatgataactatgtgtgataatgcacttttcttaattatgtagattttaccattccacaatgtatatatccttcaa

SEQ ID NO: 142632 - DNA, 201 bp, Homo sapiens
aaaatcctttacagacaaggaaatgctgagggattctgtcaccaccaggcctgccttacaagagctctggaaggaagcactaaatatggaaaggaaaaacyggtaccagtcactgcaaaaacagcacggtagtggtataaaaatggacacataggtcaatggaagagaattgagaatccagaaataaagccacgtatccac

SEQ ID NO: 142633 - DNA, 201 bp, Homo sapiens
atagttaataacaatatgttgtattcttgaaaaattgctaagagagtggatgttgcattctcactacgaatatgataactatgtgtgataatgcacttttsttaattatgtagattttaccattccacaatgtatatatccttcaaaacatcatactatacacaataaatacatataattttatctgtcattttaacaaaa

SEQ ID NO: 142634 - DNA, 201 bp, Homo sapiens
aaaaattaactaaaaatgtatcaaagatataaatgtaagagctaaaatataaaactcttagaagaaacatagatgtaactccttatgactatagtttgggyagtagtttcttagatataacaccaaaagtacaagcaacaaaaggcgaaaatagataaattcaacaacatcaaaattaaaaactagtatgcttcaaaagac

SEQ ID NO: 142635 - DNA, 201 bp, Homo sapiens
tatactggatttactataagtgaattatatctcaacaaagttgtttaaaaacattttcacaggcaaaactgactgtgggaaacaaaaaaacccttcaacawataaataacaagaaaaaaagtaaggaaggagaggaaatatctattcaaagagatttaaaaaacataatgaccaattaagatactgactatatatttgata

SEQ ID NO: 142636 - DNA, 201 bp, Homo sapiens
ctttggcttctgtgagtttgtagtaaaagcagggcagggaacccatgtcggggtcttctgcactgctctgttggtgaagttcctttctcagatgcatagaygttgtgtaataagatacggtataaatgaagagacccttgaatacctttggctgctctggagccccagatatattgagtctcttgctcaggaagtcagtca

SEQ ID NO: 142637 - DNA, 201 bp, Homo sapiens
taaaacaaaagttaaaaacaattcagaatcacataagcagaataaactgaagataatgatagtgacagagtttgatcacaaaacttagctgttcttgcatrttcttgcactcatactgactctgtgaacaataatagttggtaaatcgggtttccagcatagaagcggcagccattggcattactggctgcagtaaagttg

SEQ ID NO: 142638 - DNA, 201 bp, Homo sapiens
atttcttctcctgtgaaaccagataagtatgtgcttccaaaataggaaggtgggacaggtacaatagagacagtcccattccaaaaagagagaaataaggscgggtgccaggtggctcatgtctgtaataccagcactttggaaggctaaggcaggcagatcacttgaggtcaggagttcaagaccagcctgaccaacaca

SEQ ID NO: 142639 - DNA, 201 bp, Homo sapiens
attccagcatccactctaaagatgaaaattccaaagtctcaactaaatctcacctaaatttgatatgggtgagacttgaggtacaatttatcctgaggcaraatttcttctcctgtgaaaccagataagtatgtgcttccaaaataggaaggtgggacaggtacaatagagacagtcccattccaaaaagagagaaataag

SEQ ID NO: 142640 - DNA, 201 bp, Homo sapiens
tgcaagcatagtcctctctgaccccactgtgggacagcaatctaatttctttggagatctggatcaatcactccagcctgtagagtagcctttcctgattyttggttcactggcataagaacttccaaatagctaatagcgggtggcagtctcaacttccaattcaatggaatcattgtgtccccgattaaagcattcctc

SEQ ID NO: 142641 - DNA, 201 bp, Homo sapiens
tggaaatcaagagaaagttgaaaagaacagaaagaaatcagaaaaataattcaggatataaatagaaatttactaaagagacagaaaatttttttaaaaamccatacagaactactggaaatgaaaaattcattggagaagttccaaaatatagttgaaagctttaacaatagactaaacaaagcagatgaaagaatttca

SEQ ID NO: 142642 - DNA, 201 bp, Homo sapiens
aaccttgaatttatgaaggctatgaaaactgggcacataatcagagtgggatgattctccaagctttcataatacaatattatacttccacagttttctcyccaactttctagaatgttaataagtgacagaattgtcaagactagcatgttcaactgtcattttcaccttatggattaaattctggaaccaaaaaaatct

SEQ ID NO: 142643 - DNA, 201 bp, Homo sapiens
aaatatgttgaaaaaattctgtgtataagtggacccatgcagttcaaaccatgttgctcaagagtcagctgtactatagatttttcactttgttgttatcrtaaggcttacataaaacatcttataataggtgaatttaagctgataagaacttaacttttatcacatatagctctacacttttattcccctgaacacaca

SEQ ID NO: 142644 - DNA, 201 bp, Homo sapiens
tagcctatccattcctgccttaaatcttgatattcacttctcttccttactaataaatgtccttcatggtatctttctttcagtatagggcacatttattwacattaaaaccttgttcatatagatagcctttctcttgggtgattttcttaatggtatctcagaaatcatctgctgcctcttagtcagtagaagctgctt

SEQ ID NO: 142645 - DNA, 201 bp, Homo sapiens
atatgttggctgtgggtttgtcatagatagctcttattattttgaggtatgttccttcagtgcctagttttttgagggtttttaatatgaatagatgctgmaatttatcaaaaggcttttctgcatctattgaaatgaacatgtgatttttgtttttagttttgtttatgtgattaataacatttattgatttgcatacat

SEQ ID NO: 142646 - DNA, 201 bp, Homo sapiens
tagagaaaaaaagattaaaaaggagcaaacaaagcctccaagaaatatgggactatgtgaaaagactaaacctctgattgattggggtccctgaaagtgaygggaagaatggaaccaagttggaaaacacccttcagtatattatccaggagaacttccccaacctagcaagataggccaacattcaaattcaggaaatac

SEQ ID NO: 142647 - DNA, 201 bp, Homo sapiens
atccaaaggtcatcaatctcaaagatcaaaggtagataaatccatgaggatgagaaaaaaaccagcgtaaaaaggctgaaaattccaaaaaccagaatgcytcttctcctccaaatgactgcaattcctctccagcaagggcacaaaactggacagagaatgagtttgacgaattgacagaagtaggcttcagaaggtcag

SEQ ID NO: 142648 - DNA, 201 bp, Homo sapiens
actaacttgttattatccaatcttctaggatgtggtaccacagattgtcccacctacacagcaggcttcaggacttgctgaagggaggagtcatatatccrgcccttccacagcccaacttcaaaagcttacttcctttagctgtccattggcaccatacagcctccaagtctctgacttgtgcttggcagcaacatgaag

SEQ ID NO: 142649 - DNA, 201 bp, Homo sapiens
tcccagtgagaccaatgcagaaggcaggtgatttctgcatttccaactgaggtacattattcatctcattggaactggttaggcagcgggtgcagcccacrgagggtgagcagaaccagggtggggcatgacctcacccagaaagtgcaaggggttggggaactccctcccctagccaagggaagccatgagggactgtga

SEQ ID NO: 142650 - DNA, 201 bp, Homo sapiens
gcccaagcaaggcagaaatggatgagatgctataagaggggggcttgtaaagcttggaacagtctgaaggcattgaatatttgagaaccagtagtcagggwggctggaagggcaccaaagaaaccttggctgattccacactttggcagcatttctgacaaacttcagccagaaatctctcccattgcaatgtcccctttt

SEQ ID NO: 142651 - DNA, 201 bp, Homo sapiens
cagcctccaagtctctgacttgtgcttggcagcaacatgaagatcattttggtaagagatgtgtgaagacagatactttttaaaacttgtggtaagaaatrtttgctttggcagcacatatatcaaaaattggaatgataaaattgtggtaagaaaacacatagtacaaaatttactatcttaaccattttaagtgtacaa

SEQ ID NO: 142652 - DNA, 201 bp, Homo sapiens
attatgaataaccttatatgcagctccacatgtgtgacactttctatacgataaatactgagaggtgcactactatttgtccaaaggaaaagaagtcattrtatcaaaaagacacctgtttgtgtatgttcatcacagcacaatttacaatggcaaagatatggaaccaatctcagtacccatcaaccaataagtggataa

SEQ ID NO: 142653 - DNA, 201 bp, Homo sapiens
gaaagaaatcatagatgacacaattaaatggaagataactcatgtgcatgaattgaaagaatcaatattgttaaaatgactatactgcccaatctacagawtcaatgtaattcctatcaagttaccaacgtcattttccacagaattagaaaaaaaaattataaagtacatatggaaccaaaaaagagcccaaatagccaa

SEQ ID NO: 142654 - DNA, 201 bp, Homo sapiens
ccaaataccaactctcaagatacccccatcccctggacattgggagaagcaataaccttcctgcagaagaaaactggttccttgcctctgagatcagaatsactcagagagagagagagagattaaaaaaatgttatcaggctaaaaggttactgtttaaatcataagtgtcttagatgaaaaccagttcagaataagtaa

SEQ ID NO: 142655 - DNA, 201 bp, Homo sapiens
aaaaaagaaagaaagaaagaaagaaagaaagaaagaaagaaagaaagaaagaaagaagaaagaaaaaaagaaccctagcaaaaggaatccaacaacacttyaaaaagataatacatcacaatcaagtgctccttattccagggatacaagggtggttcaacacatgcaaattaataaatgtgattcaccacatatatagaa

SEQ ID NO: 142656 - DNA, 201 bp, Homo sapiens
tttagctgagtataatgtttttgaggttcatctacgtttgttgctttcgagtaattattttatatgggtgagtagtattccattttatggatgtatagttwattatcaatttgcatgttttgaattatttgcagtttggagctattacaaataaaactgctgtaaaaatttgtgcagaagactgtatgagtatatatttcc

SEQ ID NO: 142657 - DNA, 201 bp, Homo sapiens
gatatcacttaaatacaaaagatcatcagagactactataaacatctctatgcatacaaactagaaaacctagaggaaatggatatatttccagaaacatrcaacctccaaagattgaactacaaggtagaaaatgtgaacagaccaacaaccagtagtgaagatgaatcagtcataaaaatctttccctcaaaaaaggct

SEQ ID NO: 142658 - DNA, 201 bp, Homo sapiens
cacgaggtctccctgtattttttggaaacttcctgtgaattgacaattatttccaaatagaaggttaaaaccaaagaaatatatgaccataatatatgtcrgcctattactggattctgagctattttattgacttatttgttatttcttactctaataccacactgttttgataagtgtagttttatagttagtcttgaa

SEQ ID NO: 142659 - DNA, 201 bp, Homo sapiens
atatagaacacatctggcaccctagaaagttccctctggccctttctgattctatattccattaatctcttcccaagaggtaacccctattcagactttttcttatcatagattagatttgccttttctataaatttatataaatagaataacacggtatgtactcttttgtcttactttttcactcagtgtaatgttttt

SEQ ID NO: 142660 - DNA, 201 bp, Homo sapiens
agaaccttgactgatacaagcccctattttatgccatgtcctatgatatgtgcttggcatttattatgtgatttaatcttaatttagagaaataattccaygtggaaactagagaaatgggcaagaagcatttctaacagtgaggacaaggttgaggagagggaggttgcagtgagaggagcattctagatggaggaagaa

SEQ ID NO: 142661 - DNA, 201 bp, Homo sapiens
cctgttgtttcctgactttttaatgatcgccattctaactggtgtgaaatggtatctcattgtggttttgatttgcatttctctgatggccagtgatgatragcattttttcatgtgtctgttggctgcatagatgtcttcttttgagaagtgtcttcatatctgttgcccaatttttgatggagttgtttgattttttct

SEQ ID NO: 142662 - DNA, 201 bp, Homo sapiens
tgatgagttcatgtcctttgtagggacatggatgaagctggaaaccatcattctcagcaaactatcgcaaggacaaaaaaccaaacactgcatgttctcaytcataggtgggaattgaacaatgagaacacatggacacaggaaggggaacatcacacactggggactgttgtggggtggggggaggggggagggatagca

SEQ ID NO: 142663 - DNA, 201 bp, Homo sapiens
ttgcatcatttgatccaaggccattcccttcccaggcatctccagccaatctctgagcacaagaggtgtactagggctgtttctgtctaacgcaggattcmtctaattagcagtctctgttggggtggttgagacttccatagagctgtactgtaatctcctctttatcttgccagccattacccacgatagatctgtaga

SEQ ID NO: 142664 - DNA, 201 bp, Homo sapiens
cattccaaaatgtatatatacttcaaaacatcatgtttacaagataacaaaacacagtatttgtcaattaaaaaaataaaacataaaagaaaaatttttckccagcaattttcagctgcttggctgcacaggaggtaggaacttgagtttaccatggttggggctttgtcagagaagtatggcacagagagaggggacaag

SEQ ID NO: 142665 - DNA, 201 bp, Homo sapiens
gagagaagagagagagagagaggagagagagagagagagagagagagagagagagagagagagagagagggagagagaccccagataaatgtgcagggaaraataggggtaaaagaatgatagagtcaatgtcactggaatccttgtttttgacgattcttgaggcctaactataccttgcctttttaaaagttttgattg

SEQ ID NO: 142666 - DNA, 201 bp, Homo sapiens
ccagcctgggcaacggagcgagactctgtctcaaaaaaaaaaaaaaaactgagtcatagccttgttgccccttcacccccaaaaacggcagtgagtactcmggaaaaacagggaagctctcctacacacccacagaagagcagttaaactctggacattttaatcaacacagtgctgttgtctgcaaatcttttcagtgtc

SEQ ID NO: 142667 - DNA, 201 bp, Homo sapiens
tcccaaagtgcaggagttacaggcgtgagccaacgcacccgacccgcaacatcatttttattgtctaagtggcggatggcaaggacatagctctgccttcrcattcaagggcatttccttggagctggaccaggactcagctctacaccttagggtgcccattggagtatttatgtataatcacatcctggagaggccagc

SEQ ID NO: 142668 - DNA, 201 bp, Homo sapiens
gacatagctctgccttcacattcaagggcatttccttggagctggaccaggactcagctctacaccttagggtgcccattggagtatttatgtataatcasatcctggagaggccagcgatgggctcagggattacggaaatgaccttcatgaacaagatagtccctgcaacaaaacaggttttttgatcctccgtgagat

SEQ ID NO: 142669 - DNA, 201 bp, Homo sapiens
ctcttttgattgtctacgtgtggtggctctgggtggaaacctttctcttaaaccgcacagtctgtaagtcgtaaagttgtaaacttttagatctcacagtstgtaaataagctgtgtgcctattctgaataggaaggacatggaaaattgggatttaactgcttctttcgctaattcatgatgaaaataagcttgcaatcc

SEQ ID NO: 142670 - DNA, 201 bp, Homo sapiens
tgggacagtgagggtcaggacacaaaacacagaccaggatcctggcagtgaaagcagcccatgcccagttatgagagtcacgggatcccttctgtaacatyctgaaaggacagttgcacggtttattctgtgggcctttgtgaagctgtgttgtcgatgtgctgagccactgacctgcagcacccctgcagtggatgtagc

SEQ ID NO: 142671 - DNA, 201 bp, Homo sapiens
gcacttcagaatcacttgagccaatttcttaaatctgtctctctctacacataccttactgttctgtgtctctggagaaccctgactaatccacaggggcygtggtggctttataaaatatggccgggcgtggtgactcacacctgtaatcccagcactttgggaggctgaggcaggtggatcacctgaggtcaaaagttc

SEQ ID NO: 142672 - DNA, 201 bp, Homo sapiens
tcacctgaggtcaaaagttcgagaccagcctgaccaatatggtgaaacctggtctctattaaaaatacaaaaattagccgggcgtggtggtggacatctgyagtcccagctattcgggaggctgagacaggagaattgcttgaaccagggagccaagactgcgccattgcactccagcctgggcaactctgcctaaataaa

SEQ ID NO: 142673 - DNA, 201 bp, Homo sapiens
ggccgggcttctgggtggcccctcgtggtgctttgaggtctgaatccattttcccacagaggtgagccctgatgttaagactagcagctatctgggaatcrggagatttacggcctgttctcccctcctggaaggaatgggttggcggggctgctctctgtttttgagagtagaaagtaagaatcgaacggaccgcaagcg

SEQ ID NO: 142674 - DNA, 201 bp, Homo sapiens
aaaaaaaaaaaaactgagtcatagccttgttgccccttcacccccaaaaacggcagtgagtactccggaaaaacagggaagctctcctacacacccacagwagagcagttaaactctggacattttaatcaacacagtgctgttgtctgcaaatcttttcagtgtcaccagctgtcctgcttaataaatacaaataaaatg

SEQ ID NO: 142675 - DNA, 201 bp, Homo sapiens; identical to SEQ ID NO: 26053

SEQ ID NO: 142676 - DNA, 201 bp, Homo sapiens
aggcctcagcctcaactgggatgtctgagagtggggcagtggggggcttcgtgcttggagaggttccaggcctggccgagttctctaggattcttcatccycccccatcctcccacgcccttcgagtagccaccacgttgatgtcttctgcctgtggccccaggctctcatggagaggctgagggctccagttttcctctc

SEQ ID NO: 142677 - DNA, 201 bp, Homo sapiens
gtgtccctgctgtcagaacagcctgggtttcagtggaacgtgcaagggattggcgaggcctcagcctcaactgggatgtctgagagtggggcagtggggggcttcgtgcttggagaggttccaggcctggccgagttctctaggattcttcatccccccccatcctcccacgcccttcgagtagccaccacgttgatgtct

SEQ ID NO: 142678 - DNA, 201 bp, Homo sapiens
gactgtggtgccgagcatgggctgggtggatgtgtttgggcagaagggggagacggtggggggccagcagggcgccaggtgcccaggaggaggctgggccrgggagaggcacaggggccggcgggggcccttgccactccgtcctgagcaacccgttttgtggccaggtggtgctggccatgccctacgacaccccagtgc

SEQ ID NO: 142679 - DNA, 201 bp, Homo sapiens
caatcttgccagcatggagtaagctggtgctgggaggggctcccgatatgctgaccactttccagggcacaagagccagtgattggcagacagcccaaagratggaaagatgatttctgaacgtggccctgcttgcagcaggcagtttcaactctgatacagtcagcagattgccttgaaataacagggctttgagggtct

SEQ ID NO: 142680 - DNA, 201 bp, Homo sapiens
attcacaaaagtttttaattttattaagtctagtttgtctatttttccttttgttgcctgtaagtttggtgtcatatagatcaattgatttttttttttttaaaggaaataggtaccaaaacaattcagtggagaacgatgtcttttcaacaaatggtattgggatatttggatatctacatgcaaataaatgaaatcgaa

SEQ ID NO: 142681 - DNA, 201 bp, Homo sapiens
aacagaacccagactctaacttttagcataagctcacaagacttacacatctttcagcctgtcattcaagggaaaatattgagtaacattaaaatgctgcstgtgtttttgtttgcagttggggttagacttggaggaactcgaggagatagaagaagatgctggccttgggaatggaggcctggggaggctggcaggtaa

SEQ ID NO: 142682 - DNA, 201 bp, Homo sapiens
tgacaggcatctgtgtgttccctggattgggcattttattttagttactagtgttccaggtgggtgtttttttgatttttttaatcctgaagttttttttktgtttgtttgttttttttttttttgagatggagtctcactccgtcggccaggctggagtgcagtgggtgatctcggctcactgcaagctccgcctcccgg

SEQ ID NO: 142683 - DNA, 201 bp, Homo sapiens; identical to SEQ ID NO: 26058

SEQ ID NO: 142684 - DNA, 201 bp, Homo sapiens; identical to SEQ ID NO: 26034

SEQ ID NO: 142685 - DNA, 201 bp, Homo sapiens
agggcagttcttcaccgttggcaaaagttgaatccggcgagggctgggaattcacctgccctccactttcagctgcctttgggttagttttagttttgtcygctgctcttcgatgaccgtgtcacctgttggcttcagtcacaccagctctgaccacatgctgggatctgggctggaacctgggccctgctgaggtctgtg

SEQ ID NO: 142686 - DNA, 201 bp, Homo sapiens
atttgtgtatcttgtttgaagaaaagcctattcaattcatttactcattttaaatcaggttgtttgttttcttgttgttgaatttttttttttttttttttgaaatggagtcttgctctgtcgcccaggctggagggcagtggcgtgatctcggctcactgcaggcttcacctcccgggttcacaccattctcttacctca

SEQ ID NO: 142687 - DNA, 201 bp, Homo sapiens
tggtggacgtggagaaggtggactgggacaaggtgagcatggaggaaaagggcagcacctccccagagcctggagcccgtgcagaccagggctacaaggarctgagctggggggcctcttccctggccttgggagagctgtgtggtcatcatgcccgggagagacgcgagctgtgggaggggtctggttccaggagacgga

SEQ ID NO: 142688 - DNA, 201 bp, Homo sapiens
gagctacgcttacaccaccgcactccagcctgggcgacagagtgagctgctgtctcaagaaacaaaaccaaacaaaacccacaagtgtgcccttcatgtayaggggccttgaacactggtgaccagacccaaggaggctcctgtgttgggcttttctggaaactgaggtgcagcttttcctctgagccccggggaatagca

SEQ ID NO: 142689 - DNA, 201 bp, Homo sapiens; identical to SEQ ID NO: 26064

SEQ ID NO: 142690 - DNA, 201 bp, Homo sapiens
aagctcttgggacataactggtaaactttttccccacagtagaaaagttctaagtagaagttaggaacttttgcagagagagcaaactacaacctaaaaayccacattttagccaggtgtggtggcatgcacctgtagtgccagctgcttgggaggctgagacgcgaggatcacttgaggccaggagtttgcagccagcct

SEQ ID NO: 142691 - DNA, 201 bp, Homo sapiens
ttttactgtgttgatagtatatattactctatatataaagatgaggtttcaccatgttggtcaggctgttctcaaactcctgacctcaagttatctgcctrccttggcctcccaaagtgctgggatttcaggcgtgtgccactgcgcctggctgatagtatcttttgattcacaaaagtttttaattttattaagtctagt

SEQ ID NO: 142692 - DNA, 201 bp, Homo sapiens
agtgccagctgcttgggaggctgagacgcgaggatcacttgaggccaggagtttgcagccagcctgggcaacatagtgagaccgtcatctcttaaaaaaawatatacatttttagttaaaggcaaagtaaaaacattctggtcatgttcctggcctgtcagctttttataaaacctcttgttaatacttgacccacagtat

SEQ ID NO: 142693 - DNA, 201 bp, Homo sapiens
ctagaataaccagtgcagagaagtccttaaatgacctgacggagctgaaaaccatggcacgagaactacatgatgcatgcacaagcttcagtagccaattygatcaactggaaaaaagggtatcagtgattgaagatcaaatgaatgacatgaagtgagaagagaagttcagagaaaacagagtaaaaagaaatgaacaaa

SEQ ID NO: 142694 - DNA, 201 bp, Homo sapiens
acttggatgtttctccaaagatgatatccacatagcacaaaaagatgctaaatgtgattagctatgagggaaatgcaaatcaaaaccacaatgagacgccrctgtattcccacaagaatggctataatcataaacacagagaacaagtgttggtgaggatatagagcagttggtgtgactgtcaaatcttgcagtcacttt

SEQ ID NO: 142695 - DNA, 201 bp, Homo sapiens
gtgccttggccccaaccaccaacctgccctgcctccccacacatcatggaaagttagtgtgtgttcatccagggactggagggtcagggaagagaaggccrtgttgaggaggggtctcctgggtgggctgcttttgggggctgcggtcagcaggctgcctgacagagcaagcccagtttttgtgcatggggttgacataaa

SEQ ID NO: 142696 - DNA, 201 bp, Homo sapiens
gttttgattggaacaagggctggatttaatgacacgtgctatagcgccttggggcccctggtactgcggtgtttgcacaggtggacattgatttgtatgcrgccagctgccactgctgtgccggcttcactcaggagtagggtgaggcttgatgtgttgatgtgtccctgctgtcagaacagcctgggtttcagtggaacg

SEQ ID NO: 142697 - DNA, 201 bp, Homo sapiens
gatgtctgagagtggggcagtggggggcttcgtgcttggagaggttccaggcctggccgagttctctaggattcttcatccccccccatcctcccacgccyttcgagtagccaccacgttgatgtcttctgcctgtggccccaggctctcatggagaggctgagggctccagttttcctctcagtgaagcctgaagtcagt

SEQ ID NO: 142698 - DNA, 201 bp, Homo sapiens
gaggttccaggcctggccgagttctctaggattcttcatccccccccatcctcccacgcccttcgagtagccaccacgttgatgtcttctgcctgtggccmcaggctctcatggagaggctgagggctccagttttcctctcagtgaagcctgaagtcagtgtgatcccctctgaatttctgccttgcgccctgtgggctg

SEQ ID NO: 142699 - DNA, 201 bp, Homo sapiens
gaagcctgaagtcagtgtgatcccctctgaatttctgccttgcgccctgtgggctgcctccgcatgggaccttggtgccgtgcctttgattctgactgatytgtgattgattttttcagcgtgtttccttgactcaatggctaccttgggcctggcagcatacggctatggaatccgctatgaatttgggatttttaacca

SEQ ID NO: 142700 - DNA, 201 bp, Homo sapiens
  misc_feature (1)...(201): n = A,T,C or G
acggctatggaatccgctatgaatttgggatttttaaccagaagattgtcaatggctggcaggtgggtgagatttcatttcttcactggtttccagctctngttcacacaataaaatggcagcacttgcagtttgtctttttatacttcccacgcccccgccaggggactgcaggccggccagggcaatgtggagcaggtc

SEQ ID NO: 142701 - DNA, 201 bp, Homo sapiens
gatgcagaagatgggtgatttctgcatttccaactgaggtactgggttcatctcactggggcttgtcggactgtgggtgtagcccaccgagcgtgagagcrtgagctaaagcagggcgaggcattgcctcacccgggaagcacaagggatgagggaattccctttcctagccaagggaagctgtgaccaatggcacctgga

SEQ ID NO: 142702 - DNA, 201 bp, Homo sapiens
cacaggtgagcctcagctttgtgagccccctcctgcccttggtggtagcggagctgatgtctctggatgcaggggaacctgggggcttgtcaaggagagarggagccaggctggggtggagggagcgcagctgggcttgtgctggggggctgggaacatggagggtagcaggcaaggcagctgcaggagcaaccttcccgc

SEQ ID NO: 142703 - DNA, 201 bp, Homo sapiens
tgtaagccgggatgactggggcagggcaggggctggcaggagaggctgcaggagaacgtgggggcatcggtgagactcagccacctgtgatggagaaggaygggcaataacaggagagcctggaggctgggtggtcactggtgtgcagagggagttgtcttgactttgtaggacacagttttaaatcaaatacatgggctt

SEQ ID NO: 142704 - DNA, 201 bp, Homo sapiens
tctcactggggcttgtcggactgtgggtgtagcccaccgagcgtgagagcgtgagctaaagcagggcgaggcattgcctcacccgggaagcacaagggatsagggaattccctttcctagccaagggaagctgtgaccaatggcacctggagaatcagatcactcccaccctaatattccacttttccaacggtcttagca

SEQ ID NO: 142705 - DNA, 201 bp, Homo sapiens
catgacccagttgtgggtgacaggttgaaagtgatcttcctggagaactaccgtgtgtccttggctgagaaaggtaaccctggaagcctgtgttggacagraaactcactcctgccggggaacgggcgttgtactggccctgggcctttcatcctcagccagttcagctctgcctggacacccagacctagccagccgggc

SEQ ID NO: 142706 - DNA, 201 bp, Homo sapiens
tgactttgtaggacacagttttaaatcaaatacatgggcttcgagtggctggggccatgccatggaggctgaaaatgccctgaaaagttgtatttaacttkcaagagcagggtaggggaccggcgctgtagatgtgtttgtggatgagcatgtcagtgtgagtggggatgctggagaaccgggacattccaggcaggctgt

SEQ ID NO: 142707 - DNA, 201 bp, Homo sapiens
aaccgtccccactgtctatcttgagaacattttcatccctccagaaagaagccctgcaccaatttgcagtcacacccagcccctgacagcctctcacccgytttctgtctctgtgcaggtgcttgttctgaacattttcctgtaaatagcctcgtgtgatgcgtggtatttttgtctgtcctctttcactgagtgtaggtt

SEQ ID NO: 142708 - DNA, 201 bp, Homo sapiens
gcagagagacaaaaggaccaccaccacgattttattcttaaataaagctcagtctaaggccaggttaggtgtacaggtaggtgaaaggggaggaagtgcaratcccgggcacttccactgtgggtgagtgggccagcccaggggaggtggggcagctgagaaaggcaagcaggtacacagggcaggaggggacgatggaac

SEQ ID NO: 142709 - DNA, 201 bp, Homo sapiens
cgcgtggagcacacccccgacggcgtgaagtggctggacacacaggtacctgggctgaaatgtctgcgggcaaggctggagccaggtgagggggctgctgyggctcatttgtagacagctcagcttcttttggcttggggggcttgctgcctccctggaggacttaaggtaaaagccgggggaggtttattctcctcactc

SEQ ID NO: 142710 - DNA, 201 bp, Homo sapiens
atcatctttccttgccccattttcctcctgcagttgtgatgctctgtgttcccctggtggtgacccggagtcctccgcttgcacaacgcttggtcctattkatgagcggcagtgagactcgcgggtcaccccctcccttcctcccgctccaccacccccacagtcagttgctgcatcgtcttttagtgttggccttcaggc

SEQ ID NO: 142711 - DNA, 201 bp, Homo sapiens
  misc_feature (1)...(201): n = A,T,C or G
aaatgcatttgtagattcataaatctggcatttttgttcagcacatcaggaactgcaagtcagtatttcctgtgtaggcaaatcccagttagacttaaganggcaaatggagatgccgttccccagcgagtgccccctgccctgaggcggcgccatgggctctccactgtctgcccaggaggcctctcccatgtgcagctc

SEQ ID NO: 142712 - DNA, 201 bp, Homo sapiens
ctgggtgggctgcttttgggggctgcggtcagcaggctgcctgacagagcaagcccagtttttgtgcatggggttgacataaatgaaatcccgagtgggggcttggcttcatgggtcgtgtcatctctgtaaccttcctaaagtgtagaatggaatgagaaatcttattctttcttctgcttcctcagcgcatttattatc

SEQ ID NO: 142713 - DNA, 201 bp, Homo sapiens
tcctgaaaggacagttgcacggtttattctgtgggcctttgtgaagctgtgttgtcgatgtgctgagccactgacctgcagcacccctgcagtggatgtarcaatcagtttttgagactcttcccataagctcctggcatgactacaacacagattaaggaaaagcagctctaccttggggcccacactgctgtcctaaat

SEQ ID NO: 142714 - DNA, 201 bp, Homo sapiens
ggcagctcagggctcttgtaaatgtatttgtgcctgtagccaaggtctgaatgaaagggcacaaactgaactttgaaatctcggaagcttcgagctggtgyggcgatgctatagagctggggagagaggggtcagagcctgaggcagtggcctggcatgggggtcccagcctgaggaacaccagcttggcagcctcccctt

SEQ ID NO: 142715 - DNA, 201 bp, Homo sapiens
gaagacagcacccagagcttcatccaccttatccccgcgcccctccgttggctgcactgagctcagagcactggccctcctgcagcccacactccattccractccaccggggttctgttactgtctttcccatcccaggatcccatcagggcactccactgtgtgtggccgtcaggtctccccagtgtcatttggtctgt

SEQ ID NO: 142716 - DNA, 201 bp, Homo sapiens
ctttgaaattgctttaggaattaagttcaagtcacagtaatttgaaattttaccctgaatcaaattactgtatgtgtcaatatcattcagttgacttagtrtatactaaatcatttgtaactttgctgttgttatttaaaacactaccactcttctcaatggatatttttttggtttcaaaaatgtcctttttttttttaa

SEQ ID NO: 142717 - DNA, 201 bp, Homo sapiens
ggtctcctgggtgggctgcttttgggggctgcggtcagcaggctgcctgacagagcaagcccagtttttgtgcatggggttgacataaatgaaatcccgagtgggggcttggcttcatgggtcgtgtcatctctgtaaccttcctaaagtgtagaatggaatgagaaatcttattctttcttctgcttcctcagcgcattt

SEQ ID NO: 142718 - DNA, 201 bp, Homo sapiens
gcctagcaattccattccacggtacaggtctcagagaaatgaaaacatatgtctacatgaaaagctgtatatgaatttcacagcagcattattcataacarccaaaagtggaaacatccaaatgtttatcaattgatagggtaggtaaacaaaatgtgggctagccatacaatggaatagtacacagcagtacaaagacgg

SEQ ID NO: 142719 - DNA, 201 bp, Homo sapiens
ggctagccatatgtagaaagctgagatacctagaaatggaattgctggatcatatggcagttccattcttaattttttttttggaaccaccaaaatgtttkccacagcagtagcaccattttacattcctaccaaaaggacacaagagttccagtttctctacatcctcaccaatgcttcttctctgttttttgacagtag

SEQ ID NO: 142720 - DNA, 201 bp, Homo sapiens
gcccctgggcacctggcaccgtgaggatggagaatgaagggtgttgggctgggggcattggctggactgggctcttggggccaggccactgtgtgctaggrtcagtgcccacccagggctgtgtgcctgcctgcaggggtgaccatttccaggtgcatggaatggacggggtctgggctgcgggcgaggcccacgtggggg

SEQ ID NO: 142721 - DNA, 201 bp, Homo sapiens
tttccctgaatgttgggaaagttctttctttttccaccagagtattaagacactaacgttaaatgaagactctagttaaaaatcccttcagaaaagggagraaaaattggtggtctccacaggcccaattctgtgaatctctgtctgtaaagaacaaaatgaggctctgccagttggtgttacactctcttttcagagtct

SEQ ID NO: 142722 - DNA, 201 bp, Homo sapiens
tctctgcggggcggcccgtcgggcgttacctgcgcccctagccggccggcggccaggcacagccgactggggagtcgcctggaagccgcagtcggcggggsccgggcgtcccctgcgcagggccgcggccacgggtccgccccactgggagcccgcgcctggcggggtccgccgtcccccgcagatgatgctgagcccggg

SEQ ID NO: 142723 - DNA, 201 bp, Homo sapiens
cctgtatccaaatgataacgtgagtagctggcctgggcactcttgctcaggccgtatcgctttctggcatagagaggtgggctggctggccgggctccccmgtggggcctgctgttggccttggcaagcagccacctggtggccctctcgccttaggtgcacacacgatgcccttggggaggagagggtgcactgtcctcc

SEQ ID NO: 142724 - DNA, 201 bp, Homo sapiens
gcagtggatgtagcaatcagtttttgagactcttcccataagctcctggcatgactacaacacagattaaggaaaagcagctctaccttggggcccacackgctgtcctaaatattcctaatgagataaacacaatgaaatacgattaatcttttggtttggctggacccaggagttaaagaagatgatctagagaagtgt

SEQ ID NO: 142725 - DNA, 201 bp, Homo sapiens
gtgagaaggaaatccacgatccacgttgagaagcctgcccactgttcatgggaagccaagtttccctggcagttaattcattaagaaagtaccgtgtgacwtcacaggctgggagcttgagagatgtgctagctaatcctcacatccttacagcagatacagtagtggattatcagattgctctgtgagcaactccccaga

SEQ ID NO: 142726 - DNA, 201 bp, Homo sapiens
aatattcctaatgagataaacacaatgaaatacgattaatcttttggtttggctggacccaggagttaaagaagatgatctagagaagtgttttgcagacscttctgctctgtgatccccacttctgggatttgttttaattagtcagttgtggtaccagcctccggaatcctaacactcccaatttttctgatgtatttc

SEQ ID NO: 142727 - DNA, 201 bp, Homo sapiens
ggaattctacatgggtcgcacgctgcagaacacgatggtgaacctgggccttcagaatgcctgcgatgaagccatctatcaggtacagagcctcatggccrggcttctgggtggcccctcgtggtgctttgaggtctgaatccattttcccacagaggtgagccctgatgttaagactagcagctatctgggaatcgggag

SEQ ID NO: 142728 - DNA, 201 bp, Homo sapiens
gatactggggttttagtcttggtggccccggtgcgccgcctgtgtggctgtcagagctgactggcagtgccacaggcacgtgtgtgccgggatgaacccargcatccctgagtgcgcctgccggggagctgggaccacaggtgagcctcagctttgtgagccccctcctgcccttggtggtagcggagctgatgtctctgg

SEQ ID NO: 142729 - DNA, 201 bp, Homo sapiens
ttttaaaaatttaatggatttttgaatttaatagattttttatgaacaagaggttttatggttggttaagtttagaccataaacttagaagttttctggtyggttatgttgtagttaaacttatttcttaactttgagccagtaatgcattattgagtaaatcctagcacccgccccccccccccatatccaaaatattgt

SEQ ID NO: 142730 - DNA, 201 bp, Homo sapiens
gggggagacggtggggggccagcagggcgccaggtgcccaggaggaggctgggccggggagaggcacaggggccggcgggggcccttgccactccgtcctsagcaacccgttttgtggccaggtggtgctggccatgccctacgacaccccagtgcccggctacaagaacaacaccgtcaacaccatgcggctgtggtccg

SEQ ID NO: 142731 - DNA, 201 bp, Homo sapiens
  misc_feature (1)...(201): n = A,T,C or G
caaggctcccaacgacttcaagctgcaggactgtacgttccgtggttcttggcacccttgtgtccatgtgggtggctggtcccagacaccctcgcccacancctttaccgcgccctgtggctcactgtcctggaggccgcgcggccctcctctagggtgtccctgcgtcccagtgaagagcgaggctggtgcagcttacct

SEQ ID NO: 142732 - DNA, 201 bp, Homo sapiens
aattttcaagtctaacagaacccagactctaacttttagcataagctcacaagacttacacatctttcagcctgtcattcaagggaaaatattgagtaacrttaaaatgctgcctgtgtttttgtttgcagttggggttagacttggaggaactcgaggagatagaagaagatgctggccttgggaatggaggcctgggga

SEQ ID NO: 142733 - DNA, 201 bp, Homo sapiens
gaggagaatggcccagcctgcaccctccagcttgctctgctgtgtgcagttctttgaggggaaggagctgcggctgaagcaggagtacttcgtggtggcckccacgctccaggacatcatccgccgcttcaagtcgtccaagttcggctgccgggaccctgtgagaacctgtttcgagacgttcccagacaaggtgcatgg

SEQ ID NO: 142734 - DNA, 201 bp, Homo sapiens
  misc_feature (1)...(201): n = A,T,C or G
tgcatggtggccctgggagggatctcagtgccaggggctgggcgccttcaggctcttgaggttgctttctcatgtcccaaaaggggctagagtggaatggnacatgccccttgtcttggggtctcgtcattctgggccaggatcccacctgggccctcccttccagaacaagggccaccggccttgttaggagtcaggtca

SEQ ID NO: 142735 - DNA, 201 bp, Homo sapiens
acagaacccctccctgttctccaggcttctcgggggtggggtgggctgggctggctccttcacttggggagcttcgtatgccaacaaccgtgggtgcccaygtgggatgaaatgactgaatggcaccccttgtgcgaccttcaggtggccatccagctgaacgacacccaccccgccctctccatccctgagctcatgcgg

SEQ ID NO: 142736 - DNA, 201 bp, Homo sapiens
gaacgacacccaccccgccctctccatccctgagctcatgcggatcctggtggacgtggagaaggtggactgggacaaggtgagcatggaggaaaagggcrgcacctccccagagcctggagcccgtgcagaccagggctacaaggagctgagctggggggcctcttccctggccttgggagagctgtgtggtcatcatgc

SEQ ID NO: 142737 - DNA, 201 bp, Homo sapiens
acctccccagagcctggagcccgtgcagaccagggctacaaggagctgagctggggggcctcttccctggccttgggagagctgtgtggtcatcatgcccrggagagacgcgagctgtgggaggggtctggttccaggagacggaggttccgggggccagagtatggggtcagggcgcgggggagatgataaggatagggc

SEQ ID NO: 142738 - DNA, 201 bp, Homo sapiens
ctgtaggtaaatttcagtgccaggcactgtgtgatctcgaccgcacggtctgctgggtccaggacagggcggtggcctgggacatctgcgctgagggtgcyctcacagctggcttctttccaggtagaggaggccgatgactggctgcgctacggcaacccctgggagaaagcgcggcctgagtatatgcttcccgtgcac

SEQ ID NO: 142739 - DNA, 201 bp, Homo sapiens
atgtctggccactttagtggaaataaatagaaaactgctcaatggtctgtccgtttaccagtgacggcagagtgtgaaggtgactccaggtagcaggcgaktgtgtcttatttgtgtgtgtgtcacgcactggaccataatgtcacacttcagtgggttgcgtcagcagagtgagggctctgggctgcgtgtcaggctttc

SEQ ID NO: 142740 - DNA, 201 bp, Homo sapiens
ctgcctaggcaactggccagagagctgcttgtttctaaacaaacacatgggaacattctctaatggcctaggcctgggaaatcacgaagaagacctgtgcrtacaccaaccacactgtgctgcctgaggccttggagcgctggcccgtgtccatgtttgagaagctgctgccgcggcacctggagataatctatgccatca

SEQ ID NO: 142741 - DNA, 201 bp, Homo sapiens
cggggaacctaagtgcagacctcagggtggcctcactcccttgtaagtggcaggttcctggtgggtgggcaggtgggtggccagtggccctgtgccactgycacccgtgtctctggggcttgaagtacatggcggagcgtgcctgtcctgcctcagggtcggcctctgatgctgctgggccccagcaggggctcgtccggc

SEQ ID NO: 142742 - DNA, 201 bp, Homo sapiens
acacgtttctggatgtggcgaggtggccaccatcgtgagtgcgcagcagagctggggccttggggccggggagcctccctagctcctctactgaccgtccygacggcaggttcctgtggctctagcctcacccccctacagaccccaggaaccaggagcgcctccaagggcctgaacaaggcattttcgtgctaaaaacct

SEQ ID NO: 142743 - DNA, 201 bp, Homo sapiens
gtgtcaggcagctgggctgggctcctctcggccttctgcctgcacctttgagccaggtcgctgacctgggcttcctgggggaggagaatggcccagcctgcaccctccagcttgctctgctgtgtgcagttctttgaggggaaggagctgcggctgaagcaggagtacttcgtggtggccgccacgctccaggacatcatc

SEQ ID NO: 142744 - DNA, 201 bp, Homo sapiens
ctgattgatgtatctgaaagtgatggggagaatggcaccaagttggaaaacactcttcaggatattatccaggagaacttccccaacctagcaaggcaggycaacactcaaatacaggaaatacagaaaacgccacaaagatactcctcgagaagagcaactccaaggcacataattgtcagattcaccaaagttgaaatg

SEQ ID NO: 142745 - DNA, 201 bp, Homo sapiens
agtgtcaggcagctgggctgggctcctctcggccttctgcctgcacctttgagccaggtcgctgacctgggcttcctgggggaggagaatggcccagcctkcaccctccagcttgctctgctgtgtgcagttctttgaggggaaggagctgcggctgaagcaggagtacttcgtggtggccgccacgctccaggacatcat

SEQ ID NO: 142746 - DNA, 201 bp, Homo sapiens
tgcagttcttacatatagtaaaaattttagggaatagtttgcctcataaacatgcaatatgtttctaatttttattcacagaaaatgaatgttaattataraaatttagaaattgcgggcaagcatgtatccttttaaactttgtatacttgatgggaggttccaagatggccgaataggaacagctccagtctacagctc

SEQ ID NO: 142747 - DNA, 201 bp, Homo sapiens
gtgtatactaaatcatttgtaactttgctgttgttatttaaaacactaccactcttctcaatggatatttttttggtttcaaaaatgtcctttttttttttaattaaactttgttgtttatgttcataaacatgtattgggtttattatttttaaatgaattcatatgtatactttaaaaaggtctgcattttaatttgta

SEQ ID NO: 142748 - DNA, 201 bp, Homo sapiens
ctgggcagttcttacctggtgctatccctatcgtcgtcctgggggccatgccctagcaggaattttcgaggctgggaccttctctccagctccttgctccytagatctagaatgcggtagctttcctggtccgtggggtccccttttcaacgaacaagtgattgtaatgtcctcctcttccagcggatggccccaaggctc

SEQ ID NO: 142749 - DNA, 201 bp, Homo sapiens
ataaacttagaagttttctggttggttatgttgtagttaaacttatttcttaactttgagccagtaatgcattattgagtaaatcctagcacccgcccccsccccccatatccaaaatattgttggtggaatgtaccctttgaaattgctttaggaattaagttcaagtcacagtaatttgaaattttaccctgaatcaaa

SEQ ID NO: 142750 - DNA, 201 bp, Homo sapiens
ctgcagcagagttttggactttgtcagctactttttgtgtcattgttgttgttgttgagacagggtcttgctctgtcacccaggctggagtgcaatgataygatcacggctcactgtagcctcaacctcccgggctcaagccatccttccgcctcagcctcccgagtagctgggactgtaggcgtgcaccaccgtacccag

SEQ ID NO: 142751 - DNA, 201 bp, Homo sapiens
gggcgtggacggagactgtggtgccgagcatgggctgggtggatgtgtttgggcagaagggggagacggtggggggccagcagggcgccaggtgcccaggrggaggctgggccggggagaggcacaggggccggcgggggcccttgccactccgtcctgagcaacccgttttgtggccaggtggtgctggccatgccctac

SEQ ID NO: 142752 - DNA, 201 bp, Homo sapiens
agaaaatctagaggaaatggataaattcctggacacatacaccctcccaagactaaaccaggaagaagttgaattcctgaatagaccaataacaggctttkaaattgaggcaataattaatagcctagcaaccaaaaaaagtccaggaccagagggattcacagctgaattctaccagaggtacaaggaggagctgctacc

SEQ ID NO: 142753 - DNA, 201 bp, Homo sapiens
gggcaccacaggggagggcgtggacggagactgtggtgccgagcatgggctgggtggatgtgtttgggcagaagggggagacggtggggggccagcagggygccaggtgcccaggaggaggctgggccggggagaggcacaggggccggcgggggcccttgccactccgtcctgagcaacccgttttgtggccaggtggtg

SEQ ID NO: 142754 - DNA, 201 bp, Homo sapiens
caagagcaaacattcaaaagctagcagaaggcaagaaatagtaactaagagcagaactgaaggagatagagacacaaaaaactcttaaaaaaatcgaagamtccaggagctggttttttgaaaagatcaacaaaattgatagaccggtagcaagactaataaagaggaaaagagagaagaatcaaatagatgcaataaaat

SEQ ID NO: 142755 - DNA, 201 bp, Homo sapiens
gggagatttacggcctgttctcccctcctggaaggaatgggttggcggggctgctctctgtttttgagagtagaaagtaagaatcgaacggaccgcaagcktggggttgaattgggatgcgaaggtgtggaggttctagaggccatcccacaccccaccccacctccggggcggatttagagcactgcaccagtggttggt

SEQ ID NO: 142756 - DNA, 201 bp, Homo sapiens
atgactttgccaggaaaagcagccaagaagcagtggctcccccagaattccctgctgttgggagagttctgatgcacagcaccatttttttttttttttttaattctgagtcttgccctgtagcgtgaagctagagtgcagtggcgcgatctcggctcagtgcaacctccgcctcccgggttcaagcaattctcctgcctt

SEQ ID NO: 142757 - DNA, 201 bp, Homo sapiens
ctcccagagcctgcagctgccgcggtcactctgttctccttagaaaacagaacagaaccactgagcttgagggctcctgggacctccttaaaaggactttraggtctgttgctcacctggtgcagggcacagcatttgtgacagttccctgttctctgtgtttgcagctttaaggatttttatgaactggagccagagaag

SEQ ID NO: 142758 - DNA, 201 bp, Homo sapiens
gtgattgggtcccatgctgtcaatggtgtggcgaggatccactcggagatcgtgaaacagtcggtgtgagtggggcgcttgcccgagcggggccagctctrtctgacacccaggcctgcgtctaggaccatccaccaaacacatggacccagctatatagcatacaacctgtgccactaggcccctgcctccataggaatg

SEQ ID NO: 142759 - DNA, 201 bp, Homo sapiens
gcacctactgtgagtactgagcaggcagcagccggcgggagcggaggctgtgcccggggctgggctgcaggctctgtgcgtggcgcccgcagcaagcttcrtgtcgggcccctccccagtagctatgaggaaaccgagcgcagcttctcaagccctgaagtcctgcggtctcggctgtcatgacttggacacctgtttccg

SEQ ID NO: 142760 - DNA, 201 bp, Homo sapiens
gggcccctccccagtagctatgaggaaaccgagcgcagcttctcaagccctgaagtcctgcggtctcggctgtcatgacttggacacctgtttccgcacgsaccgctttggagaatggccaggctctaatgcctgcaaggttgtggttgggcaaaccgcacagccagccacagatgccccggggtgcaggtgctgccttcg

SEQ ID NO: 142761 - DNA, 201 bp, Homo sapiens
tccccagtagctatgaggaaaccgagcgcagcttctcaagccctgaagtcctgcggtctcggctgtcatgacttggacacctgtttccgcacgcaccgctytggagaatggccaggctctaatgcctgcaaggttgtggttgggcaaaccgcacagccagccacagatgccccggggtgcaggtgctgccttcgtatggct

SEQ ID NO: 142762 - DNA, 201 bp, Homo sapiens
ctttaaggatttttatgaactggagccagagaagttccagaataagaccaatggcatcaccccccgccggtggctgctgctgtgcaacccggggctggccrataccatcgtggaggtgagccccgggccccacccgtgcctgtggagatgcctgggctgagaaccgcgggccatgtcatcagcccctgctgagcggttgct

SEQ ID NO: 142763 - DNA, 201 bp, Homo sapiens
  misc_feature (1)...(201): n = A,T,C or G
tggagccagagaagttccagaataagaccaatggcatcaccccccgccggtggctgctgctgtgcaacccggggctggccgataccatcgtggaggtgagncccgggccccacccgtgcctgtggagatgcctgggctgagaaccgcgggccatgtcatcagcccctgctgagcggttgctgagtaggcaggagtctgtcc

SEQ ID NO: 142764 - DNA, 201 bp, Homo sapiens
cactcccttgtaagtggcaggttcctggtgggtgggcaggtgggtggccagtggccctgtgccactgtcacccgtgtctctggggcttgaagtacatggcrgagcgtgcctgtcctgcctcagggtcggcctctgatgctgctgggccccagcaggggctcgtccggctcgcggtgccttgtgtgagtctcttccgtgtgt

SEQ ID NO: 142765 - DNA, 201 bp, Homo sapiens
acccattgggcctggcgggtcctgtgtgcgagttcagaagccgagctttagggagggctggggtgtggctgagtgcagccacggggccactgcaaaagagkcaagaggcagctgactgccagctaggctgggcacctatttcctgtttgtatgttggctcctatgcaagctccctgaggaaatgagtgctgaggtgtcagg

SEQ ID NO: 142766 - DNA, 201 bp, Homo sapiens
gccctgggcagcgagacacagcagcacagtccagcccccaggccttgtggaccaatgtgctgagcaggagggggtgtcctctgctggttggaggtcccagrggcagccgtgtcccagcaggccagtagagggagcatgggcccaaaactccctggggtggggtagggggcgcacaagggctgcggaaccgcggcaggcgtc

SEQ ID NO: 142767 - DNA, 201 bp, Homo sapiens
ctgggagggagggagggagggaggggtcctcttcgtgggttggatattccaccttgtttggagagcaaaacccgtgctttcaggacgtcttctccactgtscccatgagaccttactgggcagagccttagaccccagctgggagtttgcgatggcctctggcaatgccagggggccctgggcagcgagacacagcagcac

SEQ ID NO: 142768 - DNA, 201 bp, Homo sapiens
caaggaccagccgctgggagggtgggaccgcccacctggggctatggtcagggaagccttcccaggaaagctgaggtctgaagagggaatgaagagagagkgagcagtgctctggggcaaactggttcaatgccctgtgctgggggacgggcccctgggacctggaaagcagcgtggctcctgtgcagtctgagatgggcc

SEQ ID NO: 142769 - DNA, 201 bp, Homo sapiens
ttcacctgccctccactttcagctgcctttgggttagttttagttttgtctgctgctcttcgatgaccgtgtcacctgttggcttcagtcacaccagctcygaccacatgctgggatctgggctggaacctgggccctgctgaggtctgtgataaaggaagtgcttttaaaattgtgaactctgcatttcgtgaagtgtgc

SEQ ID NO: 142770 - DNA, 201 bp, Homo sapiens
cggtggctgctgctgtgcaacccggggctggccgataccatcgtggaggtgagccccgggccccacccgtgcctgtggagatgcctgggctgagaaccgcsggccatgtcatcagcccctgctgagcggttgctgagtaggcaggagtctgtccctcacgtgttgacctgcaggcttctggacatgagggctgagcccctg

SEQ ID NO: 142771 - DNA, 201 bp, Homo sapiens
acctttacgttctccagaaaattggggaggagttcctgactgacctgagccagctgaagaagctgctgccgctggtcagtgacgaggtgttcatcagggaygtggccaaggtcaaacaggtaggcatggccctggccccagccccgaccccagccctcccacaaccaggcaggtaggccctggccctagccctcctacagg

SEQ ID NO: 142772 - DNA, 201 bp, Homo sapiens
atccctgagctcatgcggatcctggtggacgtggagaaggtggactgggacaaggtgagcatggaggaaaagggcagcacctccccagagcctggagcccrtgcagaccagggctacaaggagctgagctggggggcctcttccctggccttgggagagctgtgtggtcatcatgcccgggagagacgcgagctgtgggag

SEQ ID NO: 142773 - DNA, 201 bp, Homo sapiens
ggcagcgagacacagcagcacagtccagcccccaggccttgtggaccaatgtgctgagcaggagggggtgtcctctgctggttggaggtcccaggggcagscgtgtcccagcaggccagtagagggagcatgggcccaaaactccctggggtggggtagggggcgcacaagggctgcggaaccgcggcaggcgtcagtgcc

SEQ ID NO: 142774 - DNA, 201 bp, Homo sapiens
tgggggctgcggtcagcaggctgcctgacagagcaagcccagtttttgtgcatggggttgacataaatgaaatcccgagtgggggcttggcttcatgggtygtgtcatctctgtaaccttcctaaagtgtagaatggaatgagaaatcttattctttcttctgcttcctcagcgcatttattatctttccctggaattcta

SEQ ID NO: 142775 - DNA, 201 bp, Homo sapiens
gccttgctggcccgagcacagaggcctgtgctccctttctgcgccctcacacagcttcttctgcccgggccccgtcctgggatgcccatgtctgcccgtcygtccctctcccacttagctctgccttgtcctgtctggtcttgcttgcgtttttccttttccatcttcgaggtcccagccaaggtgctccatttcacttcc

SEQ ID NO: 142776 - DNA, 201 bp, Homo sapiens
cttggggccaggccactgtgtgctagggtcagtgcccacccagggctgtgtgcctgcctgcaggggtgaccatttccaggtgcatggaatggacggggtcygggctgcgggcgaggcccacgtgggggtgctgggctgctcctgtctcggctctgaggctgaatctgcggagtccagaccaggggctcctcctccaggaaa

SEQ ID NO: 142777 - DNA, 201 bp, Homo sapiens
cacaaaagaactagagaagcaagagcaaacattcaaaagctagcagaaggcaagaaatagtaactaagagcagaactgaaggagatagagacacaaaaaastcttaaaaaaatcgaagaatccaggagctggttttttgaaaagatcaacaaaattgatagaccggtagcaagactaataaagaggaaaagagagaagaat

SEQ ID NO: 142778 - DNA, 201 bp, Homo sapiens
ttgtcagattcaccaaagttgaaatgaaggagaaaatgttaagggcaaccagagagaaaggttggattacccgcaaagggaagcccatcagattaacagcrgatctcttcgcagaaactgcaagccagaagagagtgggggccaatgttcagcattcttaaagaaaagaattttcaacccagaatttcatatccagccaaa

SEQ ID NO: 142779 - DNA, 201 bp, Homo sapiens
caggagaacttccccaacctagcaaggcaggccaacactcaaatacaggaaatacagaaaacgccacaaagatactcctcgagaagagcaactccaaggcwcataattgtcagattcaccaaagttgaaatgaaggagaaaatgttaagggcaaccagagagaaaggttggattacccgcaaagggaagcccatcagatta

SEQ ID NO: 142780 - DNA, 201 bp, Homo sapiens
gggcgtccgccattgctgaggcttgagtaggtaaacagagcagccgggaagcttgaactgggtggagcccaccacagctcaagtaggcctgcctgcctctstagactccacctctgggggcagggcatagctgaacaaaaggcagcagaaacttctgcagacaaatgtctctgtgtgacatctttgaagagagtagtgttt

SEQ ID NO: 142781 - DNA, 201 bp, Homo sapiens
  misc_feature (1)...(201): n = A,T,C or G
tcagcctttcagatgagggccccgaggaggacaggtcacatggcagataggtgagtgcagaccccaggccagccctgcccgtgcctcgaccctctgccacnggtcagttctgtatggaagcctctagaagccgattccagcgtggtaccctctttgcccctggagagctgtgcaggtgcacgagctgtctgcaccggcagc

SEQ ID NO: 142782 - DNA, 201 bp, Homo sapiens
gatcactcccaccctaatattccacttttccaacggtcttagcaaacggcacacgaggaaattatatcccgcaccaggctcagagggtcccacgcccacggagcctcactcattgctagcacaacagtatgagattgaactgcaaggcggcagtgaggcttggggaggggcgtccgccattgctgaggcttgagtaggtaa

SEQ ID NO: 142783 - DNA, 201 bp, Homo sapiens
gcctccgggcactgcaggcctgcaggggcctccccgcctgggatctgaggtgctctccaggtgcgagctgggctcctgagcattgcaggtgccggcccccyggggcttcaggataccgggctgctgactggaggaaaacgggaggagggcagaggtcttcatgcttccttcccacggccaggctcagtgctggtgctcagg

SEQ ID NO: 142784 - DNA, 201 bp, Homo sapiens
ctccccttttcccatgagaagacccctggtgcaatctctgcccctcagctccagcctgtatacccctgccccctccctgcggcactcttcacagggcactygaagcaggaagccgcagggtcagtggatggagtcctggtgaagtctccagccatctttccctttcaccctcccaggagaacaagctcaagttctcggcct

SEQ ID NO: 142785 - DNA, 201 bp, Homo sapiens
tattcacagaaaatgaatgttaattatagaaatttagaaattgcgggcaagcatgtatccttttaaactttgtatacttgatgggaggttccaagatggcygaataggaacagctccagtctacagctctcagcgtgagtgatgcagaagatgggtgatttctgcatttccaactgaggtactgggttcatctcactgggg

SEQ ID NO: 142786 - DNA, 201 bp, Homo sapiens
gccatctttccctttcaccctcccaggagaacaagctcaagttctcggccttcctggagaaggagtacaaggtgaagatcaacccctcctccatgttcgaygtgcatgtgaagaggatccacgagtacaagcggcagctgctcaactgcctgcacgtcgtcaccctgtacaatcgtgagtgccggcatcacctgcacgacc

SEQ ID NO: 142787 - DNA, 201 bp, Homo sapiens
agcatcttccccaggcagcggctctgtggaggaggccatactcccctagttggccactggggccaccaccctgaccaccactgtgcccctcattgttactrccttgtgagataaaaactgattaaacctttgtggctgtggttggctgacatggggtctgtgtttcactaactaactaactgcaggtggtggtatgagact

SEQ ID NO: 142788 - DNA, 201 bp, Homo sapiens
aaattcaaagcatcctaagacatgcagcaaataaccgcaggagataggagctggctttttctcacccatgcagaatggcattcttaggatacggtgaaggraagagaagtgaacacagatttagaaaggtaattggacagtaagagaagttcggttaacagtgtcttcaacagtaccttgagtaggaatgacatgtaattt

SEQ ID NO: 142789 - DNA, 201 bp, Homo sapiens
tcgacgtgcatgtgaagaggatccacgagtacaagcggcagctgctcaactgcctgcacgtcgtcaccctgtacaatcgtgagtgccggcatcacctgcaygaccgcgctgtggggcccaaggcttgcccttgcccgccagctgtgcacagaccctgggcctctgtcatggtgggggctgtgtgtgtataggcgtgtgcat

SEQ ID NO: 142790 - DNA, 201 bp, Homo sapiens
ggatgctggagtgccatgggcctccttggcctcagacctggtcgtgcaggggttggtgctgccaggttgtcctcatccccacacccaccatgcatctgggygggcggcaccaaggtggtgccctgggagtctctgcctccccaggtctgtggggtgccctcccagggattagttgcttggacaactgagctcagcaccctg

SEQ ID NO: 142791 - DNA, 201 bp, Homo sapiens
gcttgaacctgggaggagcaggttgcagtgagctgagatcacgccactgcattccagcctgggcaacggagcgagactctgtctcaaaaaaaaaaaaaaaactgagtcatagccttgttgccccttcacccccaaaaacggcagtgagtactccggaaaaacagggaagctctcctacacacccacagaagagcagttaaa

SEQ ID NO: 142792 - DNA, 201 bp, Homo sapiens
gtctcggtgctggcgtcagggccccgttctccccggcagtgttgctgtggctgactgggctgcagcctgaggtgagggtggagagcaggttgtatagtcastgtgtgcactcacagcgtgtctgggagcggtgaccagtcctgagggacaggcacagagaaagcgcagggccgtggcatctggcagctgctggcgcccagg

SEQ ID NO: 142793 - DNA, 201 bp, Homo sapiens
caaaaattaagatagtatgtgttaaatttacacatgcatcttatatgtctaaggacatttaattatgagacaaacatgaaacagagacccccaaaggtcartgtgaatatttgctaggtttaatagataatgaaaccttaaggaaaaactaggtttctaaaattttgtaatttaataaagtaggtattttaaaaaccaaag

SEQ ID NO: 142794 - DNA, 201 bp, Homo sapiens
ctactgaccgtcccgacggcaggttcctgtggctctagcctcacccccctacagaccccaggaaccaggagcgcctccaagggcctgaacaaggcattttygtgctaaaaaccttcaccctctccttccaggcagcgcccggttaccacatggccaagctgatcatcaagttggtcacctccatcggcgacgtcgtcaatc

SEQ ID NO: 142795 - DNA, 201 bp, Homo sapiens
acagaggctagaggccacccccgctgaggacccctctgccgtgtgggcaccacgggaggtgcttcccggggctgtggcttcccggctccgagatggtgcaygggaactttgcatcatctttccttgccccattttcctcctgcagttgtgatgctctgtgttcccctggtggtgacccggagtcctccgcttgcacaacgc

SEQ ID NO: 142796 - DNA, 201 bp, Homo sapiens
gtacctgtggtggacctgcgtctccttcccccactgtcagagctcacagcatcaatactttgcccttcctcctgtccccagctgtatcagtttgagtctgstggtgagtatgttcactgcttctcatggtccttctgcaaagtgctgcccagccctgctggccgctttgtgtctagttcatgactggctcatgggaacaac

SEQ ID NO: 142797 - DNA, 201 bp, Homo sapiens
gtttctggatgtggcgaggtggccaccatcgtgagtgcgcagcagagctggggccttggggccggggagcctccctagctcctctactgaccgtcccgacrgcaggttcctgtggctctagcctcacccccctacagaccccaggaaccaggagcgcctccaagggcctgaacaaggcattttcgtgctaaaaaccttcac

SEQ ID NO: 142798 - DNA, 201 bp, Homo sapiens
tcccccactgtcagagctcacagcatcaatactttgcccttcctcctgtccccagctgtatcagtttgagtctgctggtgagtatgttcactgcttctcayggtccttctgcaaagtgctgcccagccctgctggccgctttgtgtctagttcatgactggctcatgggaacaaccttcccgagttcttgcttgttcaaaa

SEQ ID NO: 142799 - DNA, 201 bp, Homo sapiens
ccttcctcctgtccccagctgtatcagtttgagtctgctggtgagtatgttcactgcttctcatggtccttctgcaaagtgctgcccagccctgctggccrctttgtgtctagttcatgactggctcatgggaacaaccttcccgagttcttgcttgttcaaaacggcctggacccttcaccatgaaggtcggtttggctg

SEQ ID NO: 142800 - DNA, 201 bp, Homo sapiens
ggggctattcggaataggcttctcagccctccaaggcagctcctctgctgggccaaggccatgcttccccagcctgtggctgcgcctctgctgtctctccrggtctcacctgggcgggaggctcctctggaggccaggacctgccttgtgagggtgcccttgtgggagaggcgcttgcccaaacctgctgttccccggggg

SEQ ID NO: 142801 - DNA, 201 bp, Homo sapiens
tctcgaccgcacggtctgctgggtccaggacagggcggtggcctgggacatctgcgctgagggtgccctcacagctggcttctttccaggtagaggaggcygatgactggctgcgctacggcaacccctgggagaaagcgcggcctgagtatatgcttcccgtgcacttctacggacgcgtggagcacacccccgacggcg

SEQ ID NO: 142802 - DNA, 201 bp, Homo sapiens
ggggggcttgctgcctccctggaggacttaaggtaaaagccgggggaggtttattctcctcactccccagtctcttacactttgatgggagcttcccaaasagtggaagcgctgagcacagcagcgagactccatgggggaagccccgctgggcaggagctgtgtgttggggctaagaatgcagctgggcgtccactcaca

SEQ ID NO: 142803 - DNA, 201 bp, Homo sapiens
agggacaggcacagagaaagcgcagggccgtggcatctggcagctgctggcgcccaggaggtcgccacccctcagccgctccagccttctggctctattcyggtctacattcctcctgaaaggatccagggagccgctggggctgatcaaggtcgcggtgatccagggaacgacattgtcagcgagccaggactggctcct

SEQ ID NO: 142804 - DNA, 201 bp, Homo sapiens
cggcttgcctccggcttggccaggaactgtggctcgtccttccctgctcctctgaccgaagcatctcctctcccccgtgctgcctgaggctcccctcctcmtatgtgttttggggccagctgactcctgctcatctttagagcaggccttcaggcacctggtctggagtctcggtgctggcgtcagggccccgttctcccc

SEQ ID NO: 142805 - DNA, 201 bp, Homo sapiens
tggagaactaccgtgtgtccttggctgagaaaggtaaccctggaagcctgtgttggacagaaaactcactcctgccggggaacgggcgttgtactggcccygggcctttcatcctcagccagttcagctctgcctggacacccagacctagccagccgggctgcaggcgagcagggaacggctttagggagtgctccccgt

SEQ ID NO: 142806 - DNA, 201 bp, Homo sapiens
gtgaactctgcatttcgtgaagtgtgcttctgactcgatagtgaacagaaatgcatttgtagattcataaatctggcatttttgttcagcacatcaggaastgcaagtcagtatttcctgtgtaggcaaatcccagttagacttaagacggcaaatggagatgccgttccccagcgagtgccccctgccctgaggcggcgc

SEQ ID NO: 142807 - DNA, 201 bp, Homo sapiens
ctggcagtgagccggccgtcatggcttgaccctccatccacttctgtgaagaactttgggggccctcacccgctgtcccagtgaggcagaggggagacacraggtctcacccagcgcccctgcaggctgatggcaccacagccacaaggctgaggttgccactttttctttgtgtcatccaaacaatgtgtttaaaacaca

SEQ ID NO: 142808 - DNA, 201 bp, Homo sapiens
ttggaattgtgtcattttatttgtcagtatttcagtatgtaaagtccatagagatacggagttcgaaaaagttttaaatgttattatgaaaattttaggcygggcacggtgtctcacgtctgtaatcccagcactttgggagccaaggcgggtggatcgcatgagcccaggagttcgagaccagcctgagcagtgtggtga

SEQ ID NO: 142809 - DNA, 201 bp, Homo sapiens
cctagttgtggtgaaatcatcacttgtgtgtttcgtttttcctgttctctgctgatttccagaagtgacaagatccagcatttaaggggcagctgcattcytcctggagcctggggctgggtggtacacatcagcccgactccctgctgcctcacccaggcccggctcgctggtgaacgcctgtccagggtggccgctcat

SEQ ID NO: 142810 - DNA, 201 bp, Homo sapiens
gtaatcccagcactttgggagccaaggcgggtggatcgcatgagcccaggagttcgagaccagcctgagcagtgtggtgaaaccccatctctacaaaaaartgcaaaaattagctgggcgtggtggttcatgtctgtagtcccagttacttgggaggctgagtaggaggatcgattgtcctgggtgattgaggctatagtg

SEQ ID NO: 142811 - DNA, 201 bp, Homo sapiens
ctgtgcagtctgagatgggcctgggtacagtgaggagaggtggccgagtgtttgcaggcagcacctgggtgaggtgctggctttgaggggaccgcctgctkcaggcagggaaggtgctggtggagggcagcgggaggatggctttgggttttgggtggtgatgggatgttcaatgtcagagaaccctgggatcggtggctg

SEQ ID NO: 142812 - DNA, 201 bp, Homo sapiens
gtgcagcgtccttaggagggtcctgctggagcagtggccctaagtgagtctggactgtgtgaggcaccccagccctccacggcaaggccggggcctggggktgctggtgcctgtgtgcagcctgaaggctgccctcttgctgccttcagcgagtgggaagctggtcagaggggtgggcactcctctgggctccgccacctc

SEQ ID NO: 142813 - DNA, 201 bp, Homo sapiens
tactgcactccagtgtgggcagcagagccagaccctgtctcagcaaaaaaaagaaaaaaaaaagaaggaaacatttgaacctggagaaaagcaggaagaaytgtagcaaaaccataaacctgtcacccagactagctgaagcatttcacagtaaactgcagacactctagctcttcactcttacatacgtcagcattcctt

SEQ ID NO: 142814 - DNA, 201 bp, Homo sapiens
gcagccacggggccactgcaaaagagtcaagaggcagctgactgccagctaggctgggcacctatttcctgtttgtatgttggctcctatgcaagctcccygaggaaatgagtgctgaggtgtcaggccctgcgctacaggcaaggaccagccgctgggagggtgggaccgcccacctggggctatggtcagggaagcctt

SEQ ID NO: 142815 - DNA, 201 bp, Homo sapiens
gagtcccaggtcacatcgtcacactcatcagccctctgcggccagtgtccccacctcctgccatgtttccctagtagcttggtctttatccagaactgtgrggctgctgtggggtgcagcgtccttaggagggtcctgctggagcagtggccctaagtgagtctggactgtgtgaggcaccccagccctccacggcaaggc

SEQ ID NO: 142816 - DNA, 201 bp, Homo sapiens
gtgagtgcgcagcagagctggggccttggggccggggagcctccctagctcctctactgaccgtcccgacggcaggttcctgtggctctagcctcaccccsctacagaccccaggaaccaggagcgcctccaagggcctgaacaaggcattttcgtgctaaaaaccttcaccctctccttccaggcagcgcccggttacca

SEQ ID NO: 142817 - DNA, 201 bp, Homo sapiens
  misc_feature (1)...(201): n = A,T,C or G
aggaactgcaagtcagtatttcctgtgtaggcaaatcccagttagacttaagacggcaaatggagatgccgttccccagcgagtgccccctgccctgaggnggcgccatgggctctccactgtctgcccaggaggcctctcccatgtgcagctctaactgccctgcgtgtggaagacacgttttaaatgccagtttattta

SEQ ID NO: 142818 - DNA, 201 bp, Homo sapiens
ccagtggggcctgctgttggccttggcaagcagccacctggtggccctctcgccttaggtgcacacacgatgcccttggggaggagagggtgcactgtccyccataaagcccaagcggctcttcgtgtgcctcttggcagctctgtggtcctctctccgaggacactctctgccaccttcccctcttatccactcccctca

SEQ ID NO: 142819 - DNA, 201 bp, Homo sapiens
aataaggtttttctaaaatattgtcccaggacataagtgttgctcacagagaagccctgtggccaaatgggcctggtgcagcctggctctgaccagctgcrtgggtgggccccttcgctccagacaggaccaggtggatggtgcctggcctcctgccctgggactctcccctcgggacagtgtgggcagggctccctgctg

SEQ ID NO: 142820 - DNA, 201 bp, Homo sapiens
ggctccctgctgccctggcccagcctcctttctcccattccaggttcaaggtgtttgcagactatgaagcctacatgcagtgccaggcacaggtggaccarctgtaccgggtgaggctcctgggtccagaggctaggggagcagctaggtgggtccatgtagacgtgttgggtcagattgtttatttcccaagctgagtag

SEQ ID NO: 142821 - DNA, 201 bp, Homo sapiens
gagcctggagcccgtgcagaccagggctacaaggagctgagctggggggcctcttccctggccttgggagagctgtgtggtcatcatgcccgggagagacrcgagctgtgggaggggtctggttccaggagacggaggttccgggggccagagtatggggtcagggcgcgggggagatgataaggatagggctgtgacact

SEQ ID NO: 142822 - DNA, 201 bp, Homo sapiens
  misc_feature (1)...(201): n = A,T,C or G
caaggtgtttgcagactatgaagcctacatgcagtgccaggcacaggtggaccagctgtaccgggtgaggctcctgggtccagaggctaggggagcagctnggtgggtccatgtagacgtgttgggtcagattgtttatttcccaagctgagtagattcttggcctgggccagaggggtttgtgattctgatctgtcatca

SEQ ID NO: 142823 - DNA, 201 bp, Homo sapiens
ctcttccctcagtcagggctggcctcgaggaaaggctggcctggtgtgacctgcagcttgtggcagctgtgaggctccctggtggaaggagactgcctggscatgtcccctggcactggatctgcctgggcagttcttacctggtgctatccctatcgtcgtcctgggggccatgccctagcaggaattttcgaggctggg

SEQ ID NO: 142824 - DNA, 201 bp, Homo sapiens
ttttggcttggggggcttgctgcctccctggaggacttaaggtaaaagccgggggaggtttattctcctcactccccagtctcttacactttgatgggagyttcccaaacagtggaagcgctgagcacagcagcgagactccatgggggaagccccgctgggcaggagctgtgtgttggggctaagaatgcagctgggcgt

SEQ ID NO: 142825 - DNA, 201 bp, Homo sapiens
ctctcgttcacacaataaaatggcagcacttgcagtttgtctttttatacttcccacgcccccgccaggggactgcaggccggccagggcaatgtggagcrggtcagggtagcatccttgctccggcttcttggtccacatggcctgggagagcctgggccctgtgtgagctttttgccagctgcctctgcctggtgacag

SEQ ID NO: 142826 - DNA, 201 bp, Homo sapiens
ccccagtgtcaggcagctgggctgggctcctctcggccttctgcctgcacctttgagccaggtcgctgacctgggcttcctgggggaggagaatggcccakcctgcaccctccagcttgctctgctgtgtgcagttctttgaggggaaggagctgcggctgaagcaggagtacttcgtggtggccgccacgctccaggaca

SEQ ID NO: 142827 - DNA, 201 bp, Homo sapiens; identical to SEQ ID NO: 26052

SEQ ID NO: 142828 - DNA, 201 bp, Homo sapiens
ccatgagactgttggcagaccccaagccccaggtacagaatgttccagaaggcctgtgcttggacagtgcagctcctgagcagcgctggcactgtacttcygacggatggacactgtgtcccggggtgtgtcccacaggcggggttaccttcctcagtgacctgagggcacacaggcaggccccagtgtcaggcagctggg

SEQ ID NO: 142829 - DNA, 201 bp, Homo sapiens; identical to SEQ ID NO: 26054

SEQ ID NO: 142830 - DNA, 201 bp, Homo sapiens; identical to SEQ ID NO: 26056

SEQ ID NO: 142831 - DNA, 201 bp, Homo sapiens
tggcccgtgtccatgtttgagaagctgctgccgcggcacctggagataatctatgccatcaaccagcggcacctggacgtgagtgtgggcccagctggccrtgtagggtggcggctacacccatgccaacggccccccacctggcctgggagaggaggtgctttgctccttgaacgaggcaccctctgttcagcagaggat

SEQ ID NO: 142832 - DNA, 201 bp, Homo sapiens
tcggtggctgagggagggtcgtgtgtttcctgtggacgtttgaactggtgggactgggccatctcgcagagccctctcagaagaggaaggaggggctgctrgggtaaccctgtggcctgagaggtgggatgcccggaggggccggacaagcagatcccaggggaaagcaggggcgtgggcaacaatgggaggagggcaggt

SEQ ID NO: 142833 - DNA, 201 bp, Homo sapiens
cccctaggggttcctatagcctcacaaagacattctaggatgccacgtgggtccccggctcagatggccatgcaaggagatcccaaccctggggcaggtgrtgtctctggggccgtgggtgggtggaacagaaatgacaccctaattagggaccaggagctggggcacaccctggccaggagggggaccagtgttctcatg

SEQ ID NO: 142834 - DNA, 201 bp, Homo sapiens
gccgcggcacctggagataatctatgccatcaaccagcggcacctggacgtgagtgtgggcccagctggccgtgtagggtggcggctacacccatgccaayggccccccacctggcctgggagaggaggtgctttgctccttgaacgaggcaccctctgttcagcagaggatgcttggggctgggggctgtcccttggcag

SEQ ID NO: 142835 - DNA, 201 bp, Homo sapiens
tgagggcccagtgagtcctcaccttggactggccgtggtgtctcagttctctgtaggttttccccacagtctgtctgttacagacatcgggttgtctgtcygccgtagcctggctctttccgaatgtgtccctccagtgtgtcccagtatgtccctagggacagttctctgtttcctgtcagtcggcagctctagaaatcc

SEQ ID NO: 142836 - DNA, 201 bp, Homo sapiens; identical to SEQ ID NO: 26045

SEQ ID NO: 142837 - DNA, 201 bp, Homo sapiens
gaaccacaatgggagtagactgaaacatcaccacacagtaccaccatccgtcacacctaaagcattggacaggagtcctccgtgtcctgaaatgttcactygggtacttcatgggtcccctgcccagttgtctttgtaaagtaacagacatttctaaaagttggtctgagtgagggcccagtgagtcctcaccttggactg

SEQ ID NO: 142838 - DNA, 201 bp, Homo sapiens
gattgggggcaaggtgagtgacttcctctgcagtcctctctgtggtgtttggtctggggatagtgggtgggcagcctgcacgcttctcatggtgccaccayatccatactcgggaaccggatgcccagcggtcaccggcccctctggtatgcctgtgggggtggggaccctgtagagagtcagaatgggatggaagcctcc

SEQ ID NO: 142839 - DNA, 201 bp, Homo sapiens
aaacatctggctaacatggagagctttgtgcttggcaagaggtggcggttggtcatgaagacatttaatggattctctgaagtggtggcaaggtggcaagragagtccaacctgaagctgcagagcctgggattgcgctgcatggagaagaaagggtgtgcgtgattccacgctccttttcatcctggcctttccattcgg

SEQ ID NO: 142840 - DNA, 201 bp, Homo sapiens
tattggcctcagttttctcatctttaaaatgaggggaatcaagctggtgatgtttccgaagtctgttgccattctgaaatgttagagttaaaatgtttctmtttcatattgaattgacattccatctctatccagagagaatttgaggatgcttatgctagatacagcacaaaaggttcacattagaaggcctcagagtga

SEQ ID NO: 142841 - DNA, 201 bp, Homo sapiens
ctttgagccagtaatgcattattgagtaaatcctagcacccgccccccccccccatatccaaaatattgttggtggaatgtaccctttgaaattgctttasgaattaagttcaagtcacagtaatttgaaattttaccctgaatcaaattactgtatgtgtcaatatcattcagttgacttagtgtatactaaatcatttg

SEQ ID NO: 142842 - DNA, 201 bp, Homo sapiens
gatcagcagtggctttttttctcccaaggagccagactgcttcaaggacatcgtgaacatgctgatgcaccatgacaggtgggaccgacttccctggttgrgtggctgggagggagggagggagggaggggtcctcttcgtgggttggatattccaccttgtttggagagcaaaacccgtgctttcaggacgtcttctcca

SEQ ID NO: 142843 - DNA, 201 bp, Homo sapiens
attggtccctccacgacccagccccgggtggatgggccggcttgtcctgcagtgagccttgcggctgaggacattggggtcctcacagtgatcccctccaygggctcccctccacagtgatcccggccgctgatctgtcgcagcagatctccactgcaggcaccgaggcctcaggcacaggcaacatgaagttcatgctca

SEQ ID NO: 142844 - DNA, 201 bp, Homo sapiens
tcagcagtggctttttttctcccaaggagccagactgcttcaaggacatcgtgaacatgctgatgcaccatgacaggtgggaccgacttccctggttgggkggctgggagggagggagggagggaggggtcctcttcgtgggttggatattccaccttgtttggagagcaaaacccgtgctttcaggacgtcttctccact

SEQ ID NO: 142845 - DNA, 201 bp, Homo sapiens
gaatgtctcacctcagtatccgtggcagctcagggctcttgtaaatgtatttgtgcctgtagccaaggtctgaatgaaagggcacaaactgaactttgaartctcggaagcttcgagctggtgcggcgatgctatagagctggggagagaggggtcagagcctgaggcagtggcctggcatgggggtcccagcctgaggaa

SEQ ID NO: 142846 - DNA, 201 bp, Homo sapiens
atgggtggtcatggagtgtcccctggtcatggggagtgctgggtctccgtggggcctcctgtgcccacccacctgcctctgtgttttggcaccagcacgtrgccgcgctgtttcccggcgatgtggaccgcctgcgcaggatgtctgtgatcgaggagggggactgcaagcggatcaacatggcccacctgtgtgtgattg

SEQ ID NO: 142847 - DNA, 201 bp, Homo sapiens
  misc_feature (1)...(201): n = A,T,C or G
gcatttttgttcagcacatcaggaactgcaagtcagtatttcctgtgtaggcaaatcccagttagacttaagacggcaaatggagatgccgttccccagcnagtgccccctgccctgaggcggcgccatgggctctccactgtctgcccaggaggcctctcccatgtgcagctctaactgccctgcgtgtggaagacacgt

SEQ ID NO: 142848 - DNA, 201 bp, Homo sapiens
ggaattcacctgccctccactttcagctgcctttgggttagttttagttttgtctgctgctcttcgatgaccgtgtcacctgttggcttcagtcacaccarctctgaccacatgctgggatctgggctggaacctgggccctgctgaggtctgtgataaaggaagtgcttttaaaattgtgaactctgcatttcgtgaagt

SEQ ID NO: 142849 - DNA, 201 bp, Homo sapiens
attctaaatgggtgtaaaatggtatgttatagtttttatttgcatgttcctgataactaatgatgctgagcatcttttcacgtgcttgtgggccatttgtrtatcttgtttgaagaaaagcctattcaattcatttactcattttaaatcaggttgtttgttttcttgttgttgaatttttttttttttttttttgaaatg

SEQ ID NO: 142850 - DNA, 201 bp, Homo sapiens
taaccgtccccactgtctatcttgagaacattttcatccctccagaaagaagccctgcaccaatttgcagtcacacccagcccctgacagcctctcaccckctttctgtctctgtgcaggtgcttgttctgaacattttcctgtaaatagcctcgtgtgatgcgtggtatttttgtctgtcctctttcactgagtgtaggt

SEQ ID NO: 142851 - DNA, 201 bp, Homo sapiens
tttttactgtgttgatagtatatattactctatatataaagatgaggtttcaccatgttggtcaggctgttctcaaactcctgacctcaagttatctgccygccttggcctcccaaagtgctgggatttcaggcgtgtgccactgcgcctggctgatagtatcttttgattcacaaaagtttttaattttattaagtctag

SEQ ID NO: 142852 - DNA, 201 bp, Homo sapiens
atgtaattttaggtataggtaagtggcatttctcggcctacaaacagttaaaatgaaagattaaagtagtgtttaaaaacgatgactggtagctcactagktataaatatagtttgacacggtccagatcacttagtgtaagttgattaggctctgtcagtgataaggagaaggctcccatcgctttctggctctggatta

SEQ ID NO: 142853 - DNA, 201 bp, Homo sapiens
aagctgagattgtgctacttcactccagcctaggtgataggtgagagagtgagactctgtctcaaaaaaaaaaaagtcttgattacataaagaggattttrttaaacgtattcacagttgtagggtgttactattgctttttgtcctcattattcatccctggagtgtttcagaactttctctagaaatattgtaatttaa

SEQ ID NO: 142854 - DNA, 201 bp, Homo sapiens
cctaccaggacagtcgaccaattgccaagaacagtattacctgttttacagctgcacttcatgtggtcccaacaagactatcactacagtgcaagatgacrtctgttggatcatccatcgggaagctaaaagagaccacacaatggcccatgtggcaggcaggaatcataaatgccaagttctcttggggaagagtagggt

SEQ ID NO: 142855 - DNA, 201 bp, Homo sapiens
ttaattagctaagtttcctcaactctacagaaacaggcttttagaaggagcagagaagctcactaactgccttgctgcaagctcccccttccccactcggkctgggtctcagaggtgagcctgccatgacctgtacctgccatggcagctgccctcactgaggtgtcattcccacagctacctcgggctcgggctgatgtc

SEQ ID NO: 142856 - DNA, 201 bp, Homo sapiens
taaggtatgtctatgtatgtgagtgttttttggatctctaaagtcgtgataaagcacgttcaatttggggactgaagccagggactcttgtgtgctccacsacacactgactgcaatctcagacagttccgtttacacacattcccagggccttggtgctgtcttagggaaacccagggctgtgaggcaggctttgtgggg

SEQ ID NO: 142857 - DNA, 201 bp, Homo sapiens
gtctcagccatgggcaaacaccttaacctagtggaatgaaattggtgtttagatctgggacacaggtacatggagatgacctgttccttggggagaggggwtggtgaacatgattataagaactcttcttcccacccttgtgcaagagcaaggctgttcctggttctgtgctctctcagtactgtgttctagttggactct

SEQ ID NO: 142858 - DNA, 201 bp, Homo sapiens
tcctttatctcacatcccaaagcagggcagtgtttggagcccagcaggcccagtgtgccccagcttcccccagtctatgcagcccccagagcccttctaarccccagcgggcttaggacagggtctccagggcagcatgggcctcaacgagcccgggcggtggattaacttgcaatggattagagaggcctgaacacactc

SEQ ID NO: 142859 - DNA, 201 bp, Homo sapiens
ggggctctcagtagttgcccaagggacggagtttaaacctttcgaaaagtaaattgcctgaatagaagtataactgaggattgaaagactgaatcagataygcgcttctgttcccatgaacagtttgggaacaccatttacatgtggcttcttttacataaatcgccatgtgtcccaagctggtgggaccctcccttagag

SEQ ID NO: 142860 - DNA, 201 bp, Homo sapiens
attcacgctgtggtgttagtggttcccacagaaaccccatttcctctccggcaggtgtctcagccatgggcaaacaccttaacctagtggaatgaaattgstgtttagatctgggacacaggtacatggagatgacctgttccttggggagaggggttggtgaacatgattataagaactcttcttcccacccttgtgcaa

SEQ ID NO: 142861 - DNA, 201 bp, Homo sapiens
gcaccctacttcctacccctgccttccctcagtccccacccgctaccttccttacagcctcatcccaccctgtctctcctttaaagaacagactgagatgrcattgttttcctcaaagagtctgtcagggagaacctgatcaacacattcacgctgtggtgttagtggttcccacagaaaccccatttcctctccggcagg

SEQ ID NO: 142862 - DNA, 201 bp, Homo sapiens
gttcatgctgtcccatcaggatccaaattaaaccacagctggtggagccattactcttgtcccttagatatatagtgtacccttaaatggagatttgtcartagctgagctacttctctgtcttttctttcccctgagggcctggctttcaccctggcttttctgctgttctcgcgatcttactaatgcccctgtgctgtt

SEQ ID NO: 142863 - DNA, 201 bp, Homo sapiens
  misc_feature (1)...(201): n = A,T,C or G
cggcatcctcctgatccctgctcccctaggagtggccactcaccaggaccgactgagagagtgagggagggacaggctgatggacgttccccaaggttggnggccctagagtcggcccacacttcttgtcctttgaagcctcaggttcccacatgctgcctcgcactggagcagccaatgaaacttgaacaaatgctttca

SEQ ID NO: 142864 - DNA, 201 bp, Homo sapiens; identical to SEQ ID NO: 26082

SEQ ID NO: 142865 - DNA, 201 bp, Homo sapiens
  misc_feature (1)...(201): n = A,T,C or G
tgctcccctaggagtggccactcaccaggaccgactgagagagtgagggagggacaggctgatggacgttccccaaggttgggggccctagagtcggcccncacttcttgtcctttgaagcctcaggttcccacatgctgcctcgcactggagcagccaatgaaacttgaacaaatgctttcattttgggtatatcgaacc

SEQ ID NO: 142866 - DNA, 201 bp, Homo sapiens
atacggcagtttcagtatctcccctgaaggttcatgctgtcccatcaggatccaaattaaaccacagctggtggagccattactcttgtcccttagatatrtagtgtacccttaaatggagatttgtcaatagctgagctacttctctgtcttttctttcccctgagggcctggctttcaccctggcttttctgctgttct

SEQ ID NO: 142867 - DNA, 201 bp, Homo sapiens
tgtcctttgaagcctcaggttcccacatgctgcctcgcactggagcagccaatgaaacttgaacaaatgctttcattttgggtatatcgaaccaaaaacartggcacccagtgaatttattttgctactctagtagaatttttgtaggctttggaagtacacagacattattttctccttggcaggaatgggctatgtgaa

SEQ ID NO: 142868 - DNA, 201 bp, Homo sapiens
agtcacctggagcgtgaagggacgtgtctcatccccagtgtgtcggaccctggagacacagccgcagagcagccccttctcatgcatggacctcacctacrtcagcctgctactccaggagttcggctttcccaggagcaaagtgctgaaggtaagggtgccctcaggtcacgccccagcccctttatggagtgaggggcc

SEQ ID NO: 142869 - DNA, 201 bp, Homo sapiens
gagctgtgatcaagccacttcactctagcctgggcaacacagtgagactctgtctccagaaaccaaaaaaacccaaaagggtggaagcagcacgtgtgacmctgtatgctgcacttgacagaccctgctttgctcttaccacgttcacagagcgctcagggaatccgggaactactggatgttgctaaacaggacattccg

SEQ ID NO: 142870 - DNA, 201 bp, Homo sapiens
aaaggaccaccgtccttgtcccaccctcatggggtcgtgaggaactgggtccctcgattccacttcctcagatgccattttactgctactagggtaacccsaagagtgatttcccctgggatgtcccagtaagttcatgattgtcacacaacccttaagaagccaaggccctacagaatggagcctgggatgtggggtgga

SEQ ID NO: 142871 - DNA, 201 bp, Homo sapiens
gaagtgatccctttatgctccccagatctgcaaatagtcatttaacggtcctgtgtgttatgctttcagcatctcaagtgattaaaataatgcctgtgacrctctcttgcaggcgtttcggcgtggatcaccatcaacttcctgacaggtgtgtgcacactgcatcacagaggctagccgatcacagacacctgcggaggg

SEQ ID NO: 142872 - DNA, 201 bp, Homo sapiens
ctacgggatcatgtttgatgcaggaagcactggcacccgagtacacgtcttccagttcacccggccccccagaggtacccgcctctcatggcagggctctygggatctcctcccctgtgctacagtgttggccgggtcccctgccacagactcacctgggagcttgtctaaatgcagtttcccagagatgctgacgctggt

SEQ ID NO: 142873 - DNA, 201 bp, Homo sapiens
ggctcttgggctggcgttccccgtgccagcctcacgtctcagtggcatcgccaacctcacagtgctcctgcagactgggtgttgtgtctcccacagatgcrgagaagggaggcagcctggtggtgggggacttcgagatcgcagccaagtacggtgagtgatgctgcaggggccatctcagcaggggcaggcgccccgtga

SEQ ID NO: 142874 - DNA, 201 bp, Homo sapiens
ggctgtgaggctgccccctaccagggacgacgagggccagctccgccgcgccgtaaggaaactggccaagggaaccccttgaatctggcgagggcccgccmtgagacgctcggggaaccagactgccgagcccccctctctgggccgacgccagcccggctgtggactggagaaaaccgcaaggccacctgcagaaagaaa

SEQ ID NO: 142875 - DNA, 201 bp, Homo sapiens
caggtggggtgtgcagaggtgctgaagcttctgtgggtagatcttgctgaaaggtgggcaaggaaataccccccgaggccagggccctggtgaaggtggcygtctgccttagagggcttccggctcctttatctcacatcccaaagcagggcagtgtttggagcccagcaggcccagtgtgccccagcttcccccagtcta

SEQ ID NO: 142876 - DNA, 201 bp, Homo sapiens
gctggcgggggcggccggggatcaccgactgtaggcgggcctcccccacgcgggcgcgctgcgctccggaggacggcctcggggtcactcgcaccccgggycccacctcctgctgccttcctgtccaggctccattagggctccctggatgtctgggctccgctgaccggtggggggcaagtccagtgttttgggccacag

SEQ ID NO: 142877 - DNA, 201 bp, Homo sapiens
agctgaagcccgtttgttccccatggcagctgctcatcctgctcctggtccgatgctcagacgtgactgtcgaagggaccctgtggcctctcccagtcccrgcacgtcagggccaatgtgtctccagctgcccagcattccgcagtgggtcctcctcaccctccgtgctgcctccactcatttacctgcaggaggagggca

SEQ ID NO: 142878 - DNA, 201 bp, Homo sapiens
tagctagctagctaaataaataaatatattcattcattcattctaaaggatgaagtaacatctctctttacatttaggtgaaagaagtatttaaagcatcrcctttccttgtaggggatgactgtgtttccatcatgaacggaacagatgaaggtaaatggctggaagcacctctgtacagtggggctgtgcagtgaggtg

SEQ ID NO: 142879 - DNA, 201 bp, Homo sapiens
gggccctgccctctttatccccatccctcaccccacagagtgccttaagtccgatacccacagaacttatttctgttacctgcctggcctagccattgaakgattttagaagttgccataaaatacacataacacaaaaattagcaacataatcctttttaaatgtacagttctgtggcattaagtacattcacaaccacc

SEQ ID NO: 142880 - DNA, 201 bp, Homo sapiens
ggccctgccctctttatccccatccctcaccccacagagtgccttaagtccgatacccacagaacttatttctgttacctgcctggcctagccattgaagkattttagaagttgccataaaatacacataacacaaaaattagcaacataatcctttttaaatgtacagttctgtggcattaagtacattcacaaccacca

SEQ ID NO: 142881 - DNA, 201 bp, Homo sapiens; identical to SEQ ID NO: 26086

SEQ ID NO: 142882 - DNA, 201 bp, Homo sapiens
cccacacatgcaaggggcatcgctcagatgaagtctctattttttttccccgagatgaggtctctctctatcacccaggctggagtgcagtggcacaatcwcagctcactgcaacctctgcctcccaggctcaaatgatcctgccacctcagcctcccaagtaaccgggaccatagatgcacaccgcaatgcccagctaat

SEQ ID NO: 142883 - DNA, 201 bp, Homo sapiens
cattttgtccctgggcctggggacgtctgactctccttggatcctagcaccctaacgtgcttttcctgcctctccccccttcccaccagcagccgcagcayggtccttggcaaacaaggatgagaaaaatatccaaccacgggagcctgcgggtggcgaaggtggcataccccctggggctgtgtgtgggcgtgttcatct

SEQ ID NO: 142884 - DNA, 201 bp, Homo sapiens
aacccacgaaaccttcaaagcactgaagccaggtctttctgcctatgctgatgatgttgaaaaggtaaggatcctctcccgtgtctccctgttcaactgcrgaatgtgttcaagccagttcttttcctttgaatgtggtaggctgtcttcacaaaggaagggggctttgacagtgctgcctgggcatttcatgccatttgg

SEQ ID NO: 142885 - DNA, 201 bp, Homo sapiens
tttgtaggctttggaagtacacagacattattttctccttggcaggaatgggctatgtgaatgaaaaaaggtatccgttatgaaacttccagaaaaacgarctacatttttcaggtttgtctggggctctcagtagttgcccaagggacggagtttaaacctttcgaaaagtaaattgcctgaatagaagtataactgagg

SEQ ID NO: 142886 - DNA, 201 bp, Homo sapiens
acaccttctggaataattatgaggctcaaatgaagcttctgattcctggggggaacacggagcagtttcaggttgaacattttgtccctgggcctggggaygtctgactctccttggatcctagcaccctaacgtgcttttcctgcctctccccccttcccaccagcagccgcagcacggtccttggcaaacaaggatgag

SEQ ID NO: 142887 - DNA, 201 bp, Homo sapiens
caatgtgtgcgaccttgagcaggctgtcctgcctttataaacctcagttcctcttctgtaggatggggatcacaccttctggaataattatgaggctcaartgaagcttctgattcctggggggaacacggagcagtttcaggttgaacattttgtccctgggcctggggacgtctgactctccttggatcctagcaccct

SEQ ID NO: 142888 - DNA, 201 bp, Homo sapiens
ttcatttcagaatcaaggaaatggtgttcctattttcagtttggagtcacttatcctattccgctgtttattgaattggcaagaattaactatgttaaaawttaacactgatgcagttgttttgtgtgtaaattatcttcagtaaagttggatttttattttttattttatttttattttttttgagacggagtctcgctc

SEQ ID NO: 142889 - DNA, 201 bp, Homo sapiens
aacactgatgcagttgttttgtgtgtaaattatcttcagtaaagttggatttttattttttattttatttttattttttttgagacggagtctcgctctgytgcccaggctggagtacagtggtgcgatcttggctcactgcaacctccgcctcctgggttcaagcgattctcctgcctcagcctcctgagtagctgggac

SEQ ID NO: 142890 - DNA, 201 bp, Homo sapiens
cactgtggcagtgcttgtcttacctctctgggcctgaggatatccagctgtggccacaggcgggacctcaggaaggaggggccaggaatggcctgctcccsgtgctttgccccgcgggccctgtccttccgttctgctgtgcccaaacagcctcaggtagcgcaggtcgctgcgggcttgctcctttgactgctactgccc

SEQ ID NO: 142891 - DNA, 201 bp, Homo sapiens
aaaaacccaaaagggtggaagcagcacgtgtgaccctgtatgctgcacttgacagaccctgctttgctcttaccacgttcacagagcgctcagggaatccrggaactactggatgttgctaaacaggacattccgttcgacttctggaaggccacccctctggtcctcaaggccacagctggcttacgcctgttacctgga

SEQ ID NO: 142892 - DNA, 201 bp, Homo sapiens
cctgtatgctgcacttgacagaccctgctttgctcttaccacgttcacagagcgctcagggaatccgggaactactggatgttgctaaacaggacattccrttcgacttctggaaggccacccctctggtcctcaaggccacagctggcttacgcctgttacctggagaaaaggcccagaagttactgcagaaggtgagcc

SEQ ID NO: 142893 - DNA, 201 bp, Homo sapiens
ccatgggccacacaggagtgttccgggccacctattgccacgtgcagtcttcagtcgattcttgttataaagcaggagcatcccagactggtgtcgagtcrgtcccactcaccacagtgtctgcagctcctggatgagctcctgccatatgataggccctcgtgtgttgaattaattagctaagtttcctcaactctacag

SEQ ID NO: 142894 - DNA, 201 bp, Homo sapiens
aaaatcattatttgatagtttgcttattcaaatttttacgctaatttagtcttgtgaattttgcataatacatttttaattttttgttgtggtttctgatygaagatagcaaacattgactgaaaaaaaaaaattagtgttggccaggcatggtggctcacacttgcaatcccagcactttgggaggctggggcaagagga

SEQ ID NO: 142895 - DNA, 201 bp, Homo sapiens
actcttgctctgtagtgtcgtttgagtcctctgtttctatattgatcttctgtctaatttttctgtccattattcaaagtgggacatttcagtctcctagyataataatattactattattgatagttgtctatttctcttcaattttatcagtgtctggttcatatatttaggggttttgatgtttactgtgtatatgtt

SEQ ID NO: 142896 - DNA, 201 bp, Homo sapiens
gtggaagtttctaatgtgcttcattttttgatacagcgtgcatggcaggcatttgcattcatgacccttccgtgtacttgaactgaaaacctgaagaaacyggccaacagattaggcagccatcaatccacatcagatggcccctgtatttccaagaggtgacctgccatccccatctagaaagccaaccaggggacaggg

SEQ ID NO: 142897 - DNA, 201 bp, Homo sapiens
ctccctatgctgcccaggctggtctcaaactcctgggctcaagatatcctctcgcctccgcctcccaaactagtagcctactgttgaagaagccttactgrtaacataaatagttgattaacacatagtttgtatgttatattactataaggtaagctaatgaacagaaaatgttattataataagaaatcataagaaaga

SEQ ID NO: 142898 - DNA, 201 bp, Homo sapiens
tgagcacattgaatccccacagtcacgaggggctctccaatgagcagccccaccttgcagatgaaactggcccccttgaggggcatgttgcccactgtcayacgtagctgcgggcagagccggtgccacttccagcccggcatcctcctgatccctgctcccctaggagtggccactcaccaggaccgactgagagagtga

SEQ ID NO: 142899 - DNA, 201 bp, Homo sapiens
catcatgagccattcttttgctgctttcaatattctgcctttgtctttacacagtttgattatattgtgtcttcatgttggtctctttgggtttatcttaygtggggtttactgagcttcttggatgtttatattcatgtctttagtcaaatttgggaggtttttagctattctttcttcacataatttctctgccccatt

SEQ ID NO: 142900 - DNA, 201 bp, Homo sapiens
ttggatgtttatattcatgtctttagtcaaatttgggaggtttttagctattctttcttcacataatttctctgccccattctctcttctctttcttagayttccataatgtgcatggtgcacgtgagggaggcccctaagtccctgaggctctgctcactttcctcattctttttgttcctctgacttgatattttcaaa

SEQ ID NO: 142901 - DNA, 201 bp, Homo sapiens
cttagtttttttggctgaatgttattgcatggatgctgcacacttacctcatggaaccagtccccttctgaaggacatttagataatgtccaatctttctytcttgacagtagaaaaaggctgcacctgacacatacttcattacccacacatgcaaggggcatcgctcagatgaagtctctattttttttccccgagatg

SEQ ID NO: 142902 - DNA, 201 bp, Homo sapiens
tgagatggagtctcgctctgtcgcccaggctggagtgcagtggtgcaatctccgctcactgcaagctccgccccccgggttcatgccattctcctgcctcwgcctcccgagtagctgggactacaggcgcccgccaccacgcccagctagtttttttgtatttttagtagagatggggtttcaccatattcgccaggatgg

SEQ ID NO: 142903 - DNA, 201 bp, Homo sapiens; identical to SEQ ID NO: 26087

SEQ ID NO: 142904 - DNA, 201 bp, Homo sapiens
agagagcgtttatgtcggcatgtgcagagcctccttagtttttttggctgaatgttattgcatggatgctgcacacttacctcatggaaccagtccccttytgaaggacatttagataatgtccaatctttctctcttgacagtagaaaaaggctgcacctgacacatacttcattacccacacatgcaaggggcatcgct

SEQ ID NO: 142905 - DNA, 201 bp, Homo sapiens
tgcctcagcctcctgagtagctgggactacagatgcccatcaccacacctggctactttttttttcttttttatttatttttatttattttttttttttttgagatggagtctcgctctgtcgcccaggctggagtgcagtggtgcaatctccgctcactgcaagctccgccccccgggttcatgccattctcctgcctct

SEQ ID NO: 142906 - DNA, 201 bp, Homo sapiens; identical to SEQ ID NO: 26088

SEQ ID NO: 142907 - DNA, 201 bp, Homo sapiens
caagcgattctcctgcctcagcctcctgagtagctgggactacagatgcccatcaccacacctggctactttttttttcttttttatttatttttatttawtttttttttttttgagatggagtctcgctctgtcgcccaggctggagtgcagtggtgcaatctccgctcactgcaagctccgccccccgggttcatgcca

SEQ ID NO: 142908 - DNA, 201 bp, Homo sapiens
atttgtcaatagctgagctacttctctgtcttttctttcccctgagggcctggctttcaccctggcttttctgctgttctcgcgatcttactaatgccccwgtgctgtttttgcttgctgtgctccaggcagcttgaaaactccaggagggagcagcgtgggcatgctggacttgggcggaggatccactcagatcgcctt

SEQ ID NO: 142909 - DNA, 201 bp, Homo sapiens
acgcacatcttttattaatctggaagtgtcttaatttctccctcatttgtgaaggacagttttgctgaatgtagaattctctgttgacagatttttttgtktgtttgttttagcagtttgggggtatcttcccactgcctctggcctctgaggtttctgctaagacattggctaacagtgttattgaggattctttgtaca

SEQ ID NO: 142910 - DNA, 201 bp, Homo sapiens
ccacttcactctagcctgggcaacacagtgagactctgtctccagaaaccaaaaaaacccaaaagggtggaagcagcacgtgtgaccctgtatgctgcacytgacagaccctgctttgctcttaccacgttcacagagcgctcagggaatccgggaactactggatgttgctaaacaggacattccgttcgacttctggaa

SEQ ID NO: 142911 - DNA, 201 bp, Homo sapiens
cttgttttttaatctattctgtcaatctgtgtctcttgattaaggagttaatccatttatatttaaagtaattactcatagggaaggacttgtttttgatrttttgttatttatatatattttatagctttttttgtccttcattactaccttattttgtatttagttgattatttgtagtttccgtttttgattcccttc

SEQ ID NO: 142912 - DNA, 201 bp, Homo sapiens
tttttattttttattttatttttattttttttgagacggagtctcgctctgttgcccaggctggagtacagtggtgcgatcttggctcactgcaacctccgcctcctgggttcaagcgattctcctgcctcagcctcctgagtagctgggactacagatgcccatcaccacacctggctactttttttttcttttttattt

SEQ ID NO: 142913 - DNA, 201 bp, Homo sapiens
gaggctgaggcaggagaattgcttaacctgggaggcagaggttgcagtaagctgagattgtgctacttcactccagcctaggtgataggtgagagagtgaractctgtctcaaaaaaaaaaaagtcttgattacataaagaggattttattaaacgtattcacagttgtagggtgttactattgctttttgtcctcattat

SEQ ID NO: 142914 - DNA, 201 bp, Homo sapiens; identical to SEQ ID NO: 26091

SEQ ID NO: 142915 - DNA, 201 bp, Homo sapiens
cagaagttactgcagaaggtgagcctggccattccccagtgccattagccagccctcaggggcaactgatgactgaaaacaactgctgtctcaccagtgcygcaccatcaggcaggacacagatgcttctgaagaaaagtttgcagcatcacttttaggtggagggatggtgggcagatgatgctttgttccttgtgacat

SEQ ID NO: 142916 - DNA, 201 bp, Homo sapiens
ttgctacttctatctaaagtccttaaagcttacagctgcactaatacaggatgcctggttttctaccaaggcactcacaaaatgggctatggagagagttktaacttccatttggttcaagcatttcttaagtcatgagctagtacattgctcttgtccacaaacgtgtcatggtctcagacaatgtagttcaagccttgc

SEQ ID NO: 142917 - DNA, 201 bp, Homo sapiens
aattagagagcgtttatgtcggcatgtgcagagcctccttagtttttttggctgaatgttattgcatggatgctgcacacttacctcatggaaccagtccycttctgaaggacatttagataatgtccaatctttctctcttgacagtagaaaaaggctgcacctgacacatacttcattacccacacatgcaaggggcat

SEQ ID NO: 142918 - DNA, 201 bp, Homo sapiens
cactctggcaggtgaagtggctcctcgttgtagttatcatggggtttagtgccaggagggaccccagaattgcctagtgccacacctttgcaatgtccagyggagctgaggcgcacctgagatcgcccgtgaggattggcacaggtctggatgtgggcttgggtcaccaggctgcagtagaacagcaggcttattctcctg

SEQ ID NO: 142919 - DNA, 201 bp, Homo sapiens
gatgcaaaacccttaaccataaattctaaaggatgaagaaagccggtctgagtgcagtggtatttacaactaattgatcacaaccagttacagattttttygttcttctccacccacactgcttcacttgactagctagctagctaaataaataaatatattcattcattcattctaaaggatgaagtaacatctctcttt

SEQ ID NO: 142920 - DNA, 201 bp, Homo sapiens
accccaaacctggcatgaatgaagcttctaaaaacattgtgtttttagttttaagaacatttggagagaatctccagttgccaccacatttagaatgttgytgcgttgttaattctaagagacatttaaggttcctcactagctcctgataggtcttcagtatgaccttgagagtgagtgtgtatggaggaggaaggggag

SEQ ID NO: 142921 - DNA, 201 bp, Homo sapiens
tgccttgctgcaagctcccccttccccactcgggctgggtctcagaggtgagcctgccatgacctgtacctgccatggcagctgccctcactgaggtgtcrttcccacagctacctcgggctcgggctgatgtcggcacgcctggcgatcctgggcggcgtggaggggcagcctggtgagtggacatgttgccccgggccc

SEQ ID NO: 142922 - DNA, 201 bp, Homo sapiens
agcaggagcctcatttctgctctttaagataacccctcagggtttggcagtgttgctgactgaccatagggtgttggggatgggtggggtcacccacctgwctcacaggtgtagatgctaggagtggggtgcttctctgcaggtctggggcatttttctcccagcacagcccctgccctgtcccctgcagaacatccacca

SEQ ID NO: 142923 - DNA, 201 bp, Homo sapiens
tcagctgctgtgtttaatgaacgaggaggaggtggtgtggcttggtgggggacaccaggaggaaatgagatcgaagggttggagcatgggtctgtggaccrtgggaaccctggaagcactcggaaggatggggcctggtggaggaggactgggaaagccgggaagctgggtcaaggtgtggggtgtagaggcgccctcaga

SEQ ID NO: 142924 - DNA, 201 bp, Homo sapiens
gtactgatatgatcgtcgtcatgtctgggccgtgtttgtcagcatgggagaggttgcctgtgggaacgaagcaccgttcttcactgggatattggctcctyattgcctgctcctgtctcgcagccagcgacctagtgaacagctcatttaattggctgcacctgaccatcccctttctttcaaatgaattcagtgggtgga

SEQ ID NO: 142925 - DNA, 201 bp, Homo sapiens
ggcaggtcccctgggtgtcccatgctcttcttggctgacctggaacctgtggggtagacaccatcctggcattgcacggttctgctggtgctggacatttmtagctgctgtctccaaagctgagtggtgtattttatttacttttgactccatctgcgttattttttaacttattacagtagtgaaatatttagatgccat

SEQ ID NO: 142926 - DNA, 201 bp, Homo sapiens
ctcaggtcacgccccagcccctttatggagtgaggggcctagaaccacttctccagttgctggggtcatgtcccccagcccatccctggcttccaaggagscacagcctcctgatgcacaaggctttcctgtctgtgtgatggtcccctctccctctctgtcttttcaagctcactcggaaaattgacaatgttgagacca

SEQ ID NO: 142927 - DNA, 201 bp, Homo sapiens
aaacagttccctcctcacccactcatcctcctgttatgggtagttttccatggaagggtgggctcataggtactgatatgatcgtcgtcatgtctgggccrtgtttgtcagcatgggagaggttgcctgtgggaacgaagcaccgttcttcactgggatattggctcctcattgcctgctcctgtctcgcagccagcgacc

SEQ ID NO: 142928 - DNA, 201 bp, Homo sapiens
cataaaatacacataacacaaaaattagcaacataatcctttttaaatgtacagttctgtggcattaagtacattcacaaccaccatcaccatccgtctccagaactttttcatgttccctgactgaaactctttacccaataagtcctcctcacccactgccctcagcacctgcccttctactctctgtctgtgtgattt

SEQ ID NO: 142929 - DNA, 201 bp, Homo sapiens
tgcagtggtatttacaactaattgatcacaaccagttacagattttttcgttcttctccacccacactgcttcacttgactagctagctagctaaataaayaaatatattcattcattcattctaaaggatgaagtaacatctctctttacatttaggtgaaagaagtatttaaagcatcgcctttccttgtaggggatga

SEQ ID NO: 142930 - DNA, 201 bp, Homo sapiens
tggtatttacaactaattgatcacaaccagttacagattttttcgttcttctccacccacactgcttcacttgactagctagctagctaaataaataaatrtattcattcattcattctaaaggatgaagtaacatctctctttacatttaggtgaaagaagtatttaaagcatcgcctttccttgtaggggatgactgtg

SEQ ID NO: 142931 - DNA, 201 bp, Homo sapiens
gccttttcctgacaattcaggtcagagtctcaagtcccctgggaggggccccaagcagctgtgaggcctgggtgctcggagcccactgaccgctagccttrtgcttgtccccagcggcaagcctgcacgagctgtgtgctgccagagtgtcagaggtccttcaaaacagagtgcacaggacggaggaagtgaagcatgtgg

SEQ ID NO: 142932 - DNA, 201 bp, Homo sapiens
agagtgcacaggacggaggaagtgaagcatgtggacttctatgctttctcctactattacgaccttgcagctggtgtgggcctcataggtaagggggcccrgatgggctgagcaggaaggtcggggcggcagggggcgggggtggagggcgtgtgctccccgaggcagagggctggtggcaggcaagcaaccctgttgtca

SEQ ID NO: 142933 - DNA, 201 bp, Homo sapiens; identical to SEQ ID NO: 26083

SEQ ID NO: 142934 - DNA, 201 bp, Homo sapiens; identical to SEQ ID NO: 26085

SEQ ID NO: 142935 - DNA, 201 bp, Homo sapiens
gcctccgcctgagatgctctggggagtggagatgggctgatcagagcagggcccagctcttcctgggagctaagccagcggcctccctcccagctgatacrgcagtttcagtatctcccctgaaggttcatgctgtcccatcaggatccaaattaaaccacagctggtggagccattactcttgtcccttagatatatagt

SEQ ID NO: 142936 - DNA, 201 bp, Homo sapiens
ttgtatgtgtgaattcacgcaatgccagaccggatctggtagaaagcaccagcacctcttcccacctgtaagctcctccccagagctggcagcagttaccwgtctggggaacaacgttccagacattttctgtgccgttgtttctgtgcccaatttctgtagcttaatcttcattaggaatacttacccactcaataagtt

SEQ ID NO: 142937 - DNA, 201 bp, Homo sapiens
ggttggccaggctggtcttaaactcctgacctcaagtgatctgcctgcctcagcctcccaaaatgctgggattacagctgtgagccactatgcccagcctyaatttgtttatttcttaaacacgagagcacacacaggacttacttatcctgggccttcatcaggaaatgtctaggaggaaaagacactttcaatattaac

SEQ ID NO: 142938 - DNA, 201 bp, Homo sapiens
acctggttcccgcagtcatgtgagctgggctttgtgtctggaagggaaagaacttcctttccagagacaagacttgggccaaaggccaagtgctgaggtcraagggaaaaccaggcgttaacaggaatgaggacagagcttctctggagtctggcctggtactttagtcctacaaggctttcttagaagctgactgcatcc

SEQ ID NO: 142939 - DNA, 201 bp, Homo sapiens
ttgccatctacatgcccgtgtccccattggctgtggcagcaatgctggcctgtgccaggatcggagctgtccacacagtcatctttgctggcttcagtgcrgagtccttggctgggaggatcaatgatggtgaggaggtgggcatggggagggaggaaccctggagttccctgatccttgttcctgggggcctggccatca

SEQ ID NO: 142940 - DNA, 201 bp, Homo sapiens
atcctcagcaagaggaggaatgcctctgttttgtttctttcttatataggggtcttatctatgtaaaagctaagctatgtctccctgcgggtaggctgacraagtgacatttattactttgttgattgaaagaaagctatccttggcattttagtgcataagtacatcaaagcatgcctataatcatcttaaaagcatata

SEQ ID NO: 142941 - DNA, 201 bp, Homo sapiens
tgtgggggtccatttggaagtctgggggtgtctactgagatcgagtgccgtcatggagggctcgaccagagaacctggggaggaaaagcttccaagaggaygaggggcaaggagtattcaggaatttgaagggctgtcattgagaaattagatttattctgggaagctttaaaggtctgaggtaggactaaggggtggagt

SEQ ID NO: 142942 - DNA, 201 bp, Homo sapiens
cacgcctgtagtcccagctactcaggaggctgaggcaggagaatcccttgaacctgggaggtggaggttgcagtgagcggagatggcacccctgcactccwgtctgggtgacagagtgagactctatctcaaaaaaaaaaaaagtcacctggaaagatggggagaaattgagatagaattagattgggataaatggaaagc

SEQ ID NO: 142943 - DNA, 201 bp, Homo sapiens
gactgttcctgaatgtgccgcccatggatctggggagtgcttggaggagagcggccattggggacctgtcccatggggcttctttccatctttcactggcsggggtggggggttggggggatccctttcatatggacatatgcgcgtctgcacatgcccagcactcaggaagtcttggctgatctctgagtttaaagtaaa

SEQ ID NO: 142944 - DNA, 201 bp, Homo sapiens
cccatgcgtgtggggactttgggcacttctcttgctaactttcccttttgaatgagaatcagcctcaggttcattcttagaataaatttatattaaaaaartgaactaactcaagaaaaatgttacatgaataattatagcattggcagatggcaaatcttttgaagtttgggagcctttgcaataggagtggttctgata

SEQ ID NO: 142945 - DNA, 201 bp, Homo sapiens
gggcttactctcctccaggtgttaatctggaatgttgtgtggactcccaggaaagcctgataaatagaaggacccccaacctgcgtccaggctctggagcrttctgtgtgaagttggctgccctgtgttgtgctgtgtctgtggcagccgaatgggctctggtagagccattcagagagacggaacagagggcatgtgggg

SEQ ID NO: 142946 - DNA, 201 bp, Homo sapiens
ctggtgagccagcaggctgaaagcccagagcaggacagtgcctgccagaggctgtaggcctagtggccccaaggctgtggggccaggcagcactctgggasggcagtggctctttctggctgtttacctgcacttctccagcaggtgcccattttattttatttttaattattgatttttgaggcaggggctcaaaaatgt

SEQ ID NO: 142947 - DNA, 201 bp, Homo sapiens
tttacttaaatgctctctttaaattgacgcattgcaagattgagaatttgtttcagtgctttacaaacagcattttcagttgccatggaaaggctatgctggtaaggctgggatgtgggagagagctggtagggacccctgcccggtgacatgtccagatgtgatcaggagggtcagagaggacggagacgaggacagttt

SEQ ID NO: 142948 - DNA, 201 bp, Homo sapiens
gcacttgaagtgtggctcatgcagccagggagctgctgatttaattgaactgaaatagctaccctggcccatggcaccatgttgcacacacacccccaaaggctggtggtgcccatttgctgtgcatctgtgcaccttctcatggaagtctcattccatcaaaccacattatgggttatttcacagatgtgtacacagaga

SEQ ID NO: 142949 - DNA, 201 bp, Homo sapiens
aggcaggtttccatgctcagtgggctcatctgtccaggaggttgcctaggcaggcctacatgctcagtaagctcacatgtctgggaggccacctaggcagstttccacactcagccagctcacctgtccaggagttcacctaggcaggcttccacgcccagccagctcacctgtccaggaggtcacctaggcaggcttctg

SEQ ID NO: 142950 - DNA, 201 bp, Homo sapiens
agtaaaccatgtcagctctcctgctgacagtgaatttcggcctttctgtaggtcggtactgggagacagtagagaggttgaagatcaatcagttctatggygccccaacggctgtccggctgttgctgaaatacggtgatgcctgggtgaagaagtatgatcgctcctccctgcggaccctggggtcaggtgagcggcctg

SEQ ID NO: 142951 - DNA, 201 bp, Homo sapiens
gcctcccacaaagatggggctgtgctgctgttcttcccacaattgtcaagtgacaatgatcttttaggagcatattactcttttccaattagcatcaaaayggacactagctgtttggttttcctggctggtggtgaggatggtgggtctctgtgttgtcatagagggagaagtgagctcagccagcttacttgtccagga

SEQ ID NO: 142952 - DNA, 201 bp, Homo sapiens
ctatggcgccccaacggctgtccggctgttgctgaaatacggtgatgcctgggtgaagaagtatgatcgctcctccctgcggaccctggggtcaggtgagyggcctgccctgcagcaggagaggttgtgcttgccctagaccctcagagccaatacgggcttcagcaggacttcagtcatgaagctgcccggctttgtatg

SEQ ID NO: 142953 - DNA, 201 bp, Homo sapiens
tatggacagctcccttgagggcagggcttgtcattttttggcacacttctcacccagagcctgccctgtctcacttgcatgtccggggtctacagggcagygtcgtggagggcagcaacgtctccggggccctgtgcatctcccaggcctggccgggcatggccaggaccatctatggcgaccaccagcgatttgtggacg

SEQ ID NO: 142954 - DNA, 201 bp, Homo sapiens
tcgggttgtggttctcaatttgggttccctagaggtgcccagggttcctctgtggtatttggtgagcttgagtcctgactgggaagataaaactcctataygacaagcatgttggaacacttactgtaacacaaatgcttgcacccacgcttttgttttgtgtcctttccacatttggaattgaacttggacaggtcagag

SEQ ID NO: 142955 - DNA, 201 bp, Homo sapiens; identical to SEQ ID NO: 26133

SEQ ID NO: 142956 - DNA, 201 bp, Homo sapiens; identical to SEQ ID NO: 26119

SEQ ID NO: 142957 - DNA, 201 bp, Homo sapiens
gaggctgtgggggaacagcctcgttgacccgtgtgtgacacagcggctgtcgtggaaggcaaactcggtgtggtctgtggggctcccatggtggggtgagkcgtggagtcccggcctagctgccccacctgagaggagggtgcccgggcagcctctgagacttgggctgggacccttggtctggaatctgcacgctacagc

SEQ ID NO: 142958 - DNA, 201 bp, Homo sapiens
tactacagaaataattaacaaacagagctgctccagggcttctggccaagggttcctccttctccagcttctaggatcctgttctatgtttgtttggcatygctgcaatacccctctgctattccacaaagaaatttttgcagagcaaacagactggctatccaacctgctcccagatatcctgtgccagggccaggtctg

SEQ ID NO: 142959 - DNA, 201 bp, Homo sapiens
catgtgagaattctcaggaccacagccagcctgtggaagctaaggacagcttcaggtccatgacactgaaatggccctggcaaagtacttattactctgtytctaaaaataaacaggggccggtcgcagtggctcatgccggtaatcccagcactttgggatggtgaggatcacttgaggacggtgggtggatcgcttgag

SEQ ID NO: 142960 - DNA, 201 bp, Homo sapiens
tgtgcattttcctgatttctaatgaatttgagtatccattctataattatgaagagctgatgaacagctcttggttggctctaaagctgcctgtgaatatygtatatttgtccccactctctctgttttgcagcagctctgaaaaagggcagcccctggaccttgtctaggacctagacccagcaagcctctggtgctgct

SEQ ID NO: 142961 - DNA, 201 bp, Homo sapiens
actccccgaagggccagtttctctccatcagtctctcaggtgtgcctggaccctggggcaggcaggttgtgtgccacgccccctcggctggacgctgcccrtgggagcactgagtgtgtgctaagtagcggttcggtctgtgagcggggctggagccctgtggagacgtgtggttaaacataaaccatgtgagaattctca

SEQ ID NO: 142962 - DNA, 201 bp, Homo sapiens
gcccctgtggacctgcaagttggggtgggagtccctggcccgagtcacttctagcacccggggccgccacattttgcccttttgttctctgttgtacacasgccgaccaccctgcagtaccagaaagtgctgtcattggctacccccacgacatcaaaggagaaggtgagtgtcctggagatgagctcctccctgattcct

SEQ ID NO: 142963 - DNA, 201 bp, Homo sapiens
gcttgggtaatggagagggagggagcagagccttctgcaaaaccaggacatttccccatcacgagccacttcttggaacaaggctggtttactgggtgctsgtggaacacgtgggggagttgggtcctcgtcccttcttgcacctttaaccttgggggcaggtcagcactgggcacatgggaactgcaggagccaagccct

SEQ ID NO: 142964 - DNA, 201 bp, Homo sapiens
gggcagggcttgtcattttttggcacacttctcacccagagcctgccctgtctcacttgcatgtccggggtctacagggcagcgtcgtggagggcagcaaygtctccggggccctgtgcatctcccaggcctggccgggcatggccaggaccatctatggcgaccaccagcgatttgtggacgcctacttcaaggcctacc

SEQ ID NO: 142965 - DNA, 201 bp, Homo sapiens
tgagctgagatcacgccagcgcactctagcctgggcaatggagtgagaccctgtctcaaaaaaaaaaaaaaaaaaaaagctcattgtgaatagtaactccstattcaaattgaatttctgtatgctgggttccactttcagttagggtgtgtgagtgtgagggatgtatttaaataagcaacaagagtacttgaaaattcg

SEQ ID NO: 142966 - DNA, 201 bp, Homo sapiens
tgactcatgtcaaagggcaaaattaggacaaatttagtttaaagaccttacttcactttattcgtgattatagaattgggaaacaccccattccataaaayagaaggaatgtttgatgagctgaacagaggaggatggttttatagacagaaggggctgaaggatgcagacatggagaacaaaaagtggactggttatttc

SEQ ID NO: 142967 - DNA, 201 bp, Homo sapiens
cagcactttgggaggccaaggcaggtggatcacctgaggtcaggagttcgagaccagcctggccaacatggtgaaaccccgtctctactaaaaatacaaamaattagccgggtgtggtggcaggcgcctgtaataccagctactcaggaggctgaagcaggagaatcgcttgaacctgggaggtggaggttgcaatgagcc

SEQ ID NO: 142968 - DNA, 201 bp, Homo sapiens
tgcttgaaactgggaggtggatgttgcagtgagccaagattgtgccactgcactccatcctgggtgacagagtcagactccatctcaaaaataaaaataawaataaaaataaattgacttcttctaaaatggtttgcagactttagccaggcttagtaccaggtgaccatttctatttactgtttgagtgaaaagtgttac

SEQ ID NO: 142969 - DNA, 201 bp, Homo sapiens
ttgaaactgggaggtggatgttgcagtgagccaagattgtgccactgcactccatcctgggtgacagagtcagactccatctcaaaaataaaaataaaaataaaaataaattgacttcttctaaaatggtttgcagactttagccaggcttagtaccaggtgaccatttctatttactgtttgagtgaaaagtgttacctg

SEQ ID NO: 142970 - DNA, 201 bp, Homo sapiens
acgctggtgccgatgcaggaagcttgcagggtgtgaggaagtctgtgtgttacaatcccaggtgacctggcaagggaaacctcccgactctggtccccacygtgaccttaggcacaggtgacgctgggtcagcacaggcagatgcagccctgggacgggtgcccatggcctttaccctgcaagtggaggatttgcaatccc

SEQ ID NO: 142971 - DNA, 201 bp, Homo sapiens
ggttttcttcttcctttctctgaggaaagcccctagacattggcactggttgtcctcctgacagacacatcactgccactgaacacagtgcttttctgccmatgggcctcgtgccacagcactcgaggtgcctaggatggttgcaggcctcctcagctggaagatcaatgtccagactagcagcctgggccctttaaagaa

SEQ ID NO: 142972 - DNA, 201 bp, Homo sapiens
gacagctcccttgagggcagggcttgtcattttttggcacacttctcacccagagcctgccctgtctcacttgcatgtccggggtctacagggcagcgtcrtggagggcagcaacgtctccggggccctgtgcatctcccaggcctggccgggcatggccaggaccatctatggcgaccaccagcgatttgtggacgccta

SEQ ID NO: 142973 - DNA, 201 bp, Homo sapiens
tcaaggaggctgcaccgcctgacgtccaaggatcctttccacttcaaggtttatgaccttggcagagaaaataggaagggagagagctctgagatttaccggatcaaatccttcatcaggagcccctcctctggactcagcagcaagagtgtgagactcaccagaccctgcttcagctcttgggcccatgttgaggcccct

SEQ ID NO: 142974 - DNA, 201 bp, Homo sapiens
cctgctgcggagggggagtgctgctctcagagaggctgagtgccctcggtgggctgtttgtttcttctccctgccaggaaatggccaaggaggaccctgtktgcgccccagagagcatgggcagtgaggacatgctcttcatgctgtacacctcagggagcaccggaatgcccaagggcatcgtccatacccaggcaggct

SEQ ID NO: 142975 - DNA, 201 bp, Homo sapiens
tcttgtgcgcctgccctgtttttattttgatagttttgtgacccatatgagcatccgtgggcactgtagcttactgttgccaattaaaatattgttttttcttttgttttgttttgttttgttttgttttgttttttcatggagtctcactctgttgtccaggttagagtgcagtggtgtgatctcagatcactgcaacct

SEQ ID NO: 142976 - DNA, 201 bp, Homo sapiens
cttgtgcgcctgccctgtttttattttgatagttttgtgacccatatgagcatccgtgggcactgtagcttactgttgccaattaaaatattgttttttcttttgttttgttttgttttgttttgttttgttttttcatggagtctcactctgttgtccaggttagagtgcagtggtgtgatctcagatcactgcaacctt

SEQ ID NO: 142977 - DNA, 201 bp, Homo sapiens
ttgtgcgcctgccctgtttttattttgatagttttgtgacccatatgagcatccgtgggcactgtagcttactgttgccaattaaaatattgttttttcttttgttttgttttgttttgttttgttttgttttttcatggagtctcactctgttgtccaggttagagtgcagtggtgtgatctcagatcactgcaaccttt

SEQ ID NO: 142978 - DNA, 201 bp, Homo sapiens
tgtgcgcctgccctgtttttattttgatagttttgtgacccatatgagcatccgtgggcactgtagcttactgttgccaattaaaatattgttttttcttttgttttgttttgttttgttttgttttgttttttcatggagtctcactctgttgtccaggttagagtgcagtggtgtgatctcagatcactgcaacctttg

SEQ ID NO: 142979 - DNA, 201 bp, Homo sapiens
gttaaacgtacaactagacggactctgcagtgtgcccacctgtcctgctgctggaggccatttgaggagccagctgcctctcacagctatggactgcagcytatgcatgcctatttcctagtgacctggtgtgaacatggtggagtggggggacaagctcctgatgctcctttcctgtctctgcagcttgtgtttgaccac

SEQ ID NO: 142980 - DNA, 201 bp, Homo sapiens
atttttaatgggatttgagtgcagcgtaacactgtggccaggaataggtgctcgcgaggccagagtttgactccgcacccctctccctttgctgtacctcsctggctttccttatcttgacagtgggagtgattccccactcggggactttcttggggctacttaggtgtgggtgtgaagtcctgcactgcagccaggccc

SEQ ID NO: 142981 - DNA, 201 bp, Homo sapiens
ggtacaggctggaaataatgtgagggtaggatttgagagcatcttttttcgttgttgggttcatgtcaaatgggcgctggcccagaagcagttctttttcyccgtcttcatgtgcaagtgggtgggctctgccctttcccacttcaagcaagggcctgacatggcgagggggcctgcacctggctgtgggatgccagagct

SEQ ID NO: 142982 - DNA, 201 bp, Homo sapiens
agcatggatgcgggggccactgctgggacaggctgtgggttgtgagtggtcctgagcaagaggcaaccaccagcacgagagtatttcagtgttttagtgayagcacgtctagcctggtgagttctggctgagtgctggcctggtgtggaaatgtcataaggtagacactgagaatcctagggtgtacacatatcttcttcc

SEQ ID NO: 142983 - DNA, 201 bp, Homo sapiens
cccgagagcgttgctttgatctgggagcgcgatgagcctggaacggaagtgaggatcacctacaggtactgtgccctcgaatgttcaaggtgcgagggagrcgcccagcccagtcctgtgtgctgagtctggctgtcagggaggggccgtctgagtctcagggagtgcattttggctttgcaagtgctctcttatccagga

SEQ ID NO: 142984 - DNA, 201 bp, Homo sapiens
ggtggccaccaagatcgccaaatatgctgtgcctgatgagatcctggtgagtgggcctcccacaaagatggggctgtgctgctgttcttcccacaattgtsaagtgacaatgatcttttaggagcatattactcttttccaattagcatcaaaacggacactagctgtttggttttcctggctggtggtgaggatggtggg

SEQ ID NO: 142985 - DNA, 201 bp, Homo sapiens
agagaggttgaagatcaatcagttctatggcgccccaacggctgtccggctgttgctgaaatacggtgatgcctgggtgaagaagtatgatcgctcctccytgcggaccctggggtcaggtgagcggcctgccctgcagcaggagaggttgtgcttgccctagaccctcagagccaatacgggcttcagcaggacttcagt

SEQ ID NO: 142986 - DNA, 201 bp, Homo sapiens
gtgctggtgactgctgttctctctcctgtccctgccacatttcatgtctgccttgacgtgtggtcacgcgtggtcagccacctgcttggtggcttttcacyggggaagcatgcagggcagtgaccatggaagagtgtcccattctgccacatacatccttgggaagggagcatgtacctcccagtgaacatgtgattccac

SEQ ID NO: 142987 - DNA, 201 bp, Homo sapiens
ttaaatgcatggcttaatgaattattataaggcaaatgccactttgatcaagaagtggaaggccaccggtttctcagaagccccttccaggcccatatggscacagccccgtccagcatgtcttgatgtgtcttgtgcgcctgccctgtttttattttgatagttttgtgacccatatgagcatccgtgggcactgtagct

SEQ ID NO: 142988 - DNA, 201 bp, Homo sapiens
ccagagcctgccctgtctcacttgcatgtccggggtctacagggcagcgtcgtggagggcagcaacgtctccggggccctgtgcatctcccaggcctggcygggcatggccaggaccatctatggcgaccaccagcgatttgtggacgcctacttcaaggcctacccaggtgagcaggctgtcagggaccctctcattcct

SEQ ID NO: 142989 - DNA, 201 bp, Homo sapiens
tctggacttgtgaggccaaggtcatggggaacattcacagttggcctgtgcacacttgcagccccactcagataagacagtggggcggacctcctggggcyaacagcaaggaccttctgaacctcgctcggtcaggatcagggtgtggtcagcaagcattcttctgtctccttttccttcacttatttcttctgataatat

SEQ ID NO: 142990 - DNA, 201 bp, Homo sapiens; identical to SEQ ID NO: 26124

SEQ ID NO: 142991 - DNA, 201 bp, Homo sapiens
aagccagaggaccaagttttagctccggcttgtcctatggccttggacccatccctctgggctttggtgtcctcatctgtaaaaggagggattcaatggcyccagtattccagccctggcaggcgtgcatgaagcacggaggagcagagctgggccccgagtctgtgaggaagcacaggcatcgtgtgccactctgggagc

SEQ ID NO: 142992 - DNA, 201 bp, Homo sapiens; identical to SEQ ID NO: 26127

SEQ ID NO: 142993 - DNA, 201 bp, Homo sapiens
caccacaccctgctaatttttttttgtatttttagtagagacagggttttgccatgttggtcaggctggtcttgaacttctgacctcaagtgatctgcccrccttggcctctccaagtgctggaattacaggtgtgagccaccgtgtccggcctaaaatattgttgatatgtgttttaagtctttttaagcctatgctccc

SEQ ID NO: 142994 - DNA, 201 bp, Homo sapiens
gcggatggatgatgtcatcaacatcagtggccaccggctggggaccgcagagattgaggacgccatcgtgagcacaggctgggcctcctccttcactcctrcacctccatgatgcccctgtggacctgcaagttggggtgggagtccctggcccgagtcacttctagcacccggggccgccacattttgcccttttgttct

SEQ ID NO: 142995 - DNA, 201 bp, Homo sapiens
actgagtggtggtcttttgttacaggcttagcaacaaagctgtgccctgggcatggggggctgtagtgtagctacagttgtgcgtttgtgaaatggcttarctttccatgttgctgagaggaacctggacatggtcccgggcatctgaatgatctgtaggggagggagttcaaataaagctttattttgttcattttctct

SEQ ID NO: 142996 - DNA, 201 bp, Homo sapiens
cactcttctttctgccccagtcctcctcccaacagccaatctatccagaaagctctccctgctgcccttccctgccacccccagtggctgtaccaccaagytgagctgctcagtgccctgcacaccttcacatgtgccgtcatttcctcatcggagctgtgctcctggaggacactctccctgtcaattcctttctcaaat

SEQ ID NO: 142997 - DNA, 201 bp, Homo sapiens
atcgcaccacggccctcggaagaaggggcggaaatcctccctgccatggcgatgaggcccttctttggcatcgtccccgtcctcatggatgagaaggtgtrtatgggcctcccccacatgggggtcatgtgcttgccctcccttgtccctgcctgcccagcccagctctctcctgtgtgcccaggtctgtacctggcagga

SEQ ID NO: 142998 - DNA, 201 bp, Homo sapiens
tctttttgctcctaagagactccccaacacccagcaaaacattgtggggttaatgctacacttggcatgaccacagtgaacagaggttagcacccccagcyccccaacacacacagagatgttgtgtaaattcaggtctgccactgatccccttcttagtttgtcttcttgtttttattttcttctattttttgggcatgt

SEQ ID NO: 142999 - DNA, 201 bp, Homo sapiens
tctagcacccggggccgccacattttgcccttttgttctctgttgtacacaggccgaccaccctgcagtaccagaaagtgctgtcattggctacccccacracatcaaaggagaaggtgagtgtcctggagatgagctcctccctgattcctgaccccacacccattatgggcacctctgtacgaggagcagactctggag

SEQ ID NO: 143000 - DNA, 201 bp, Homo sapiens
gcatgtcctggtggctcacaggacagacaacaaggtccacatgggggatctggacgtcccgctggagcaggtgggttacctcgctttgcacagtttgaggmgaggtcatatcaagttagctggctctgaggcttctcgggttgtggttctcaatttgggttccctagaggtgcccagggttcctctgtggtatttggtgag

SEQ ID NO: 143001 - DNA, 201 bp, Homo sapiens
ttgttctctgttgtacacaggccgaccaccctgcagtaccagaaagtgctgtcattggctacccccacgacatcaaaggagaaggtgagtgtcctggagaygagctcctccctgattcctgaccccacacccattatgggcacctctgtacgaggagcagactctggagagtggagtgataggggatactgtgggccaagc

SEQ ID NO: 143002 - DNA, 201 bp, Homo sapiens
gtgcgcctgccctgtttttattttgatagttttgtgacccatatgagcatccgtgggcactgtagcttactgttgccaattaaaatattgttttttcttttgttttgttttgttttgttttgttttgttttttcatggagtctcactctgttgtccaggttagagtgcagtggtgtgatctcagatcactgcaacctttgc

SEQ ID NO: 143003 - DNA, 201 bp, Homo sapiens; identical to SEQ ID NO: 26137

SEQ ID NO: 143004 - DNA, 201 bp, Homo sapiens
tgcgcctgccctgtttttattttgatagttttgtgacccatatgagcatccgtgggcactgtagcttactgttgccaattaaaatattgttttttcttttgttttgttttgttttgttttgttttgttttttcatggagtctcactctgttgtccaggttagagtgcagtggtgtgatctcagatcactgcaacctttgcc

SEQ ID NO: 143005 - DNA, 201 bp, Homo sapiens
ctggaatcagaaaccctgggatgggacctgacacctgtgtttataacgagcccttcagatgctccagaggacactcgggcttgagaaccactggcctgtaygcctcaaaccagggcagatgaaggcacttctaaaacagaattgggattagtgtcctggccttggccctattaaacaaacagcaagcaaatgatgggctgt

SEQ ID NO: 143006 - DNA, 201 bp, Homo sapiens
tctggtgtcctttggtctgggttgtgcctgttgtccctctgcctctgtgtttcctgcacgtgggcagttagatcctgagatgggatcaggctccactcagytgctgtggaagaataaaggggattcggatgtctgtcctctcatgctcctcgaagctgatgatgcttgatgccattcttggccttttttgcttttattttt

SEQ ID NO: 143007 - DNA, 201 bp, Homo sapiens
ccctggtggacaaaatggcccttggttgggaagcgctgggttagaccaaccggaacccacctctaaccctggcactcacttccattagaacactggcccaygtggaggacgtttatctcaacaaaaacaggttctgccagcatgtcagaagaggcacatgatgctggcaggcagcccacagtgtgcctcacagctcaaacc

SEQ ID NO: 143008 - DNA, 201 bp, Homo sapiens
ggccactgtggggccgcctctcatatccacagtggagggcaccagacccacatctggtttgcctcaaagatcgttgtgcccctgaggcgtttccttgcccrcaacagggacagtcccacctaccacccactctggatacacgtatccctgggtccggggccgattatgcatttctttcttgtcatacctgcagaaacaggt

SEQ ID NO: 143009 - DNA, 201 bp, Homo sapiens
ggaagtcccccgagagcgttgctttgatctgggagcgcgatgagcctggaacggaagtgaggatcacctacaggtactgtgccctcgaatgttcaaggtgygagggaggcgcccagcccagtcctgtgtgctgagtctggctgtcagggaggggccgtctgagtctcagggagtgcattttggctttgcaagtgctctctt

SEQ ID NO: 143010 - DNA, 201 bp, Homo sapiens
ttcttagtttgtcttcttgtttttattttcttctattttttgggcatgtcttctcttttatttttctgttaatagtagttcaaagaactttcctgtgtctsttactagtattagtaattttttcctggaatctgtctacatttgttacattttttgaggtgtaatttacaaacaggctacaggggtgaccctgagagacca

SEQ ID NO: 143011 - DNA, 201 bp, Homo sapiens
ttcactgggtgccttcgtgtcagtatgggctgcagtatgttgcagtaacagacaatccccaagcacatggcagagtgtggctgggtggccactgtgagctgaatagtcaggaaggcctcttggaggaggcaacattccagctgaggtcctgtgggccaagaggagcagccctgagaagacaggggcagacctggtgcaggg

SEQ ID NO: 143012 - DNA, 201 bp, Homo sapiens
ggagcgaggggacgtggaggaggagcattccgacaggcaggtccacactgggcagcctgagagcagcggtcactgccctgccactcgggtgacctgggggygaaggggcacttgtagtttcctgtttgtttcttgaactccaattttatcacagaccaaattcaccaaacctgctaaaaccgtgctcatgctgacttttgg

SEQ ID NO: 143013 - DNA, 201 bp, Homo sapiens
gcctaggatggttgcaggcctcctcagctggaagatcaatgtccagactagcagcctgggccctttaaagaaaccccgtggggctggtagaggttgggacrctggtgccgatgcaggaagcttgcagggtgtgaggaagtctgtgtgttacaatcccaggtgacctggcaagggaaacctcccgactctggtccccaccgt

SEQ ID NO: 143014 - DNA, 201 bp, Homo sapiens
ggaggccctggacaggtgcgagtcaggagtgaggtgtgcgccttgggaggtggggaaggaactgcctgctgtgtagtgtgatttcagcatgttgcatgggstggggtcattgtatcgtgagagcttctgacccccatgagctttctttgtctcccgtccccttgagaaaggttcattccttcctgctggtccatctccctt

SEQ ID NO: 143015 - DNA, 201 bp, Homo sapiens
caaacagagctgtggcgggcgacctggggaggaggaaactcggcgtggcagctggaaccagttatttcttcgctgcgggcctggggcctggggcctgtggrcgggaaggaagtaacggcggcctccccgttctcgttctcggcctcagagaactgcaccccagcgacctggggcctgctttggacccgcggggtctgacgt

SEQ ID NO: 143016 - DNA, 201 bp, Homo sapiens
cacttgtagtttcctgtttgtttcttgaactccaattttatcacagaccaaattcaccaaacctgctaaaaccgtgctcatgctgacttttggaggcagaygagtgatgctagtggatctgctgcggctcccagtgggccctgtcctgctcgttcctccccttggcccccaggagccctcaggcccatcacagctccacca

SEQ ID NO: 143017 - DNA, 201 bp, Homo sapiens
ttagaaaatattaaaaatacattttatagcccaggtttccagggacatcatccgagattagaactgtctacttggacatgacagtgctgtacctgaatacytgaaacatgttaaaatcctgtattggtatctggtaggaacttgtgccctaactaagtctatgtttttcaaactttcttgaccatgtctcacagtaggaaa

SEQ ID NO: 143018 - DNA, 201 bp, Homo sapiens
gtataacaaattttcattgcttggtgagctacaatttaattaattacatttccctaagaaattaattcccataagtatttttaaatgcagttatatatttwatatatttgaattccttaagtatctcaattttcagacaaaccttcccaaatacttaagtagttctaatatgccaaattctcttaaacattataaataact

SEQ ID NO: 143019 - DNA, 201 bp, Homo sapiens
tcaccaatagaatcacttattttcttgctacatatggttatcgcaggtatcctgaaacaccattttcactcatcattatcttacgtagttgtcagattacractagatcttgcagttttgaagtgttatagagcacatgtattatgatatcaccaattttttttaatatttttataattgcatttaaatacaattggtttc

SEQ ID NO: 143020 - DNA, 201 bp, Homo sapiens
tttcactcatcattatcttacgtagttgtcagattacaactagatcttgcagttttgaagtgttatagagcacatgtattatgatatcaccaatttttttwaatatttttataattgcatttaaatacaattggtttcttttgtaattctatgtattttcctttttgcattcaataacactcttttaagaagtctgtaagc

SEQ ID NO: 143021 - DNA, 201 bp, Homo sapiens
gactcaggccacactcttaggtacctttcagtggttttatattatgacaaatccaagcgtgtttataatcctccttgaaatagatgttatttatgaaataraagaacaaattttgatcaagaaatataattttgaggccaggcacggtagctcaagcctgtaatcctggcactttgggaggccacggtgggcagattactt

SEQ ID NO: 143022 - DNA, 201 bp, Homo sapiens
agacactacgtttggttcaagcattccagtacactgacaaacacggagaaggtacctctcccttctaaccttttgattttttagtttgaaagatagcatarttagttaggtttcttatcgtaaaagtaatcgatatttccaaagttttctgattatttacaaattattagcagatccttttaacagaccaaattataattt

SEQ ID NO: 143023 - DNA, 201 bp, Homo sapiens
caaagagatctaaaggtagccctgatttttagtgattttctaaagatgtccttctaccattccaccaactttctcagtgttacagaacatcatgtattttwttttcttagtttccaagccagcgccctactgggaaggaacagctgtgatcgatggagaatttaaggagctgaagttaactgattatcgtgggaaatactt

SEQ ID NO: 143024 - DNA, 201 bp, Homo sapiens
aaagagatctaaaggtagccctgatttttagtgattttctaaagatgtccttctaccattccaccaactttctcagtgttacagaacatcatgtattttaytttcttagtttccaagccagcgccctactgggaaggaacagctgtgatcgatggagaatttaaggagctgaagttaactgattatcgtgggaaatacttg

SEQ ID NO: 143025 - DNA, 201 bp, Homo sapiens
gaacacattatatattccttttaaaaatgtcactgagtcaggatgcattctaatgtctcttttgacaaacagtgaatcatgtcatcagtacaaagtactgmagtatacatggcaaacaagcgtactggaagtttatgtaaatttggaggaatttttgccatgcccaggcctttcagctcaccagattcccaaactttccaa

SEQ ID NO: 143026 - DNA, 201 bp, Homo sapiens
gaagataatgattctctccttgtcatgaagaaagaaaagattgaaacacgtatattctttcatttaggaggctgtataatttttttttcttttttgagacrgagtcttgctctgtcgcccagactggagtgcagtggcatgatctgggctcactgcaacctccgcctccagggttcatgcaattctcatgcctcagccccc

SEQ ID NO: 143027 - DNA, 201 bp, Homo sapiens
gtacccgggagaggcatcccgggtatcggtcgccgaccactccctgcacctaagcaaagcgaagagtaggtggtgtcccgccaaagggtgggaggggagaytccggagacacgtgtaccccggttacacccccggaatctgggcttgggcggcaccccctgggctgcctccgggccctgggcgggcctggttctcacctag

SEQ ID NO: 143028 - DNA, 201 bp, Homo sapiens
tagacataaaaaatgacaggccttctaaattcatgttgttataaaaccagaaggttaacatgtatgttaaatatatacgactaacaccctgaatttggaarttagtctaatgtagcagaaaaatatgttctgtgtttctccattgttattcataactccataatgggtaagagatagttaattggagcatgttgttagcaa

SEQ ID NO: 143029 - DNA, 201 bp, Homo sapiens
tttgtcctcttaaacatttacagttcttacttgctgaaagtaagtactttcagttaaccactttgggactttttttttttttttatttgagatgaagtctygctctgtcacccaggcacccaggctggagtgcggtcgcgcgatctcggctcactgcaacctccgccgcccgggttcaagcgattcttctgcctcagcctc

SEQ ID NO: 143030 - DNA, 201 bp, Homo sapiens
gggagggtatacttaagctcattgctataggttgtttctaggccagggattaacaaattttttctgctggatttggcctattgacctatttgccaaccccygctctaagccacaaaggaagaattctcatgaaaattattacattgagactaaagttatgagtctgcataatatataatcttttaaattataagaacttgc

SEQ ID NO: 143031 - DNA, 201 bp, Homo sapiens
ggctggagtgcggtcgcgcgatctcggctcactgcaacctccgccgcccgggttcaagcgattcttctgcctcagcctcccaggtagctgggactacaggygcgcaccaccacacccggctattttttgtatttttagtagagacggggtttcactatattggccaggctggtctggaactcctgacctcatgatccgcct

SEQ ID NO: 143032 - DNA, 201 bp, Homo sapiens
gatccctttcagaaacctccagaactaaagccagctttgagttaagattgttaaatattttgaatatcatcactgttgaagacaaacatatatatttgtayatataaatatgtgtttcataatttacccttactatgtatgatagagtctcctgttttctattcgatttcactttttaaaaatattttttagaactcagtt

SEQ ID NO: 143033 - DNA, 201 bp, Homo sapiens
ttcactatattggccaggctggtctggaactcctgacctcatgatccgcctgccttggcctcccaaagtgctgagattacaggcgtgagccacggtgcccrgcctactttgagatttttaacaaaaccagtcttaaattttaaaatcagtatttccaagtcccactggttttacttgcctgggaaagtattttaaatatgt

SEQ ID NO: 143034 - DNA, 201 bp, Homo sapiens
agctgagatcgcgccactgcactccagcctgggtgacagagtgagaccctgccacaaaaaaaaaaaaaaaggaaggctgaggctgaccattcctacccttwagaaaatattaaaaatacattttatagcccaggtttccagggacatcatccgagattagaactgtctacttggacatgacagtgctgtacctgaatacct

SEQ ID NO: 143035 - DNA, 201 bp, Homo sapiens
actcagcttttacaattttgaagaaacaatactttttaaaaatgaattttaaaaaatgtttaaaaattcattaatcataaaaagatgttttacctaaattygttataaagaattgcaaattaaaatgacgagatgccaattttccctgtctggttggccaagatttaaaagattgaaaaaatgtatccactgtggacaaaa

SEQ ID NO: 143036 - DNA, 201 bp, Homo sapiens
aaaaaaaaaaaaaggaaggctgaggctgaccattcctaccctttagaaaatattaaaaatacattttatagcccaggtttccagggacatcatccgagatyagaactgtctacttggacatgacagtgctgtacctgaatacctgaaacatgttaaaatcctgtattggtatctggtaggaacttgtgccctaactaagtc

SEQ ID NO: 143037 - DNA, 201 bp, Homo sapiens
atgttaatatgagtttttatagtgtccacagtcttgtgcagaaaactttgtgcacaataaagaccattcagaattgggctgggcacagtggctcatgcctstaatcccagcactttgggaggccgaggcaggcagatcacctgaggtcgggagttcgagaccagcctgaccaacatggagaaaccccgtctctactaaaaa

SEQ ID NO: 143038 - DNA, 201 bp, Homo sapiens
ctaactaagtctatgtttttcaaactttcttgaccatgtctcacagtaggaaatacatttttcgttgtcagccagtacacaggcacatatatatacggtarcattccatctggatgcaccagcacagccatgctccttaaaatactgaaaaaccctcatatcatgtggtaaatagccacttccctttcctcaccaactagt

SEQ ID NO: 143039 - DNA, 201 bp, Homo sapiens
ccagctagggcatctcagctcagcccagagcaaagacgtgtagggacataacgctttcctcaagcttcctttcccaggtccaaacttagaggcccagtttkgggcctagaattcactgaggtttgtggctgtttgtccaacagtcaccatggatcaccgaagccgactacggggcacaggcctgaaccgaatccctgggac

SEQ ID NO: 143040 - DNA, 201 bp, Homo sapiens
gaaaggccaggtgtggtggctcacgtctataatttcagcactttgggaggccgaggccatccgatcacctgaggtcgggagttcgagaccagactggccarcatggtgaaaccctgtgtctactaaaaatacaaaaattagccgggtgtgatggcgcatacctgtaatcccagctactgggcaggctgaggcaagagaatc

SEQ ID NO: 143041 - DNA, 201 bp, Homo sapiens
ggtggctcacgtctataatttcagcactttgggaggccgaggccatccgatcacctgaggtcgggagttcgagaccagactggccagcatggtgaaacccygtgtctactaaaaatacaaaaattagccgggtgtgatggcgcatacctgtaatcccagctactgggcaggctgaggcaagagaatcccttgaacccggga

SEQ ID NO: 143042 - DNA, 201 bp, Homo sapiens
agctttgagttaagattgttaaatattttgaatatcatcactgttgaagacaaacatatatatttgtatatataaatatgtgtttcataatttacccttastatgtatgatagagtctcctgttttctattcgatttcactttttaaaaatattttttagaactcagttaatttaaggagtccctaccacggtttgaaaaa

SEQ ID NO: 143043 - DNA, 201 bp, Homo sapiens
tgggcgtggtggtacgcgcctgtagtcccagctactcgggaggctgaggcaggagaattgcttgaaccctggaggcggaggttgcagtaagctgagatagygccactgcactccagcctggcgacagcgagactccatctcaaaaagaaaagaaaaagaaaattaagccattttctctagtgataccatgtaactgtggtt

SEQ ID NO: 143044 - DNA, 201 bp, Homo sapiens
agacaaaccttcccaaatacttaagtagttctaatatgccaaattctcttaaacattataaataacttaacatataaatatgtactgattatttcttaatrtaaaaatattaaaatagcctggcatggtggctcacgcctataatcccagcactttgggaggtcaaagcaggagaatcatttcaacccaggagttcaagac

SEQ ID NO: 143045 - DNA, 201 bp, Homo sapiens
gtggctcacgcctgtaatcccagcactttgggaggccaacatgggcggatcacctgaggtcaggagttctagaccagcctggccaacaaggtgaaaccccrtctctactgaaaatacaaacaaaattacccgggcgtggtggtgggcgtttgtagtcccagttactcagcaggctgaggcaggagaattgcttgaacccgg

SEQ ID NO: 143046 - DNA, 201 bp, Homo sapiens
gatggagtcttgccatgttgcccgggctgtgcttcatcacttctgtagtaattataaatcttccgaggattaaaatgcatatccactaaggaaaaagttayggcatcccaaataatttgggattgctttcccaaggaaatttggggatacattctcagcctgatagggttcacatcaaccagaaatttctacttgggtgtc

SEQ ID NO: 143047 - DNA, 201 bp, Homo sapiens
ctggaaaacattgcctcctctccaaaatacacatagatgcatctaattcatagggttggtataggaatattaaaaaaaaaatagtgaaatgacataaaatytgtatagatcctttgaaagctataaaatactatataaataaaaggtattattaaataaaagtaataaaatgaggggtggctattgctataagggagaagg

SEQ ID NO: 143048 - DNA, 201 bp, Homo sapiens
tgagatggaaggatgacctgagcctaggtggtcgaggctgtagtgagccaagatcataccactgcacttcagcctgggcaatagagtgagatcctgtctcaaaaaaaaaaaaaaaattaaaatataggcttaatttgcttcatcatttcctttaaaaaaagaaagacagggtcttactatgttgcccaggctggagtgcag

SEQ ID NO: 143049 - DNA, 201 bp, Homo sapiens
ccagcctgggcgacagagcaagactccgtctcagaaaaaacaaaaatgtgttgtaggctgagcacaatggctcacggctataatcccagcactttgggagkgtgaagcaggaggattgcttgaagccaggagttcgagaccagcctgggtaacaaagccacaccccatctctacaaaaaagtgtttaaaacattagcccag

SEQ ID NO: 143050 - DNA, 201 bp, Homo sapiens
ttccaagaataaatatgccccaaaaacgactgaggcagttttaaaatgtggaatcatttgaacattaaccaagtaaaattatctaacgttagctatattawttgacctgagccagtagtttctttttaaaatttttttgttaaggccgggcatggtggctcacgcctgtaatcccagcactttgggaggccgaggcaggta

SEQ ID NO: 143051 - DNA, 201 bp, Homo sapiens
gagatggaaggatgacctgagcctaggtggtcgaggctgtagtgagccaagatcataccactgcacttcagcctgggcaatagagtgagatcctgtctcaaaaaaaaaaaaaaaattaaaatataggcttaatttgcttcatcatttcctttaaaaaaagaaagacagggtcttactatgttgcccaggctggagtgcagt

SEQ ID NO: 143052 - DNA, 201 bp, Homo sapiens
tgatttgctttgtagtgccaatagtttttcttgaatgttttatgtgaaagtgtcagtattttataatcctgtgtttttttataacaactttattggaatayagttcacatataatacaatacccatttaaagaatacaattcagctgggcatggtagttcatgcctgtaatcccagctctttgggagacctaggtgggagg

SEQ ID NO: 143053 - DNA, 201 bp, Homo sapiens
tgctgcttaagccagcagcttctgattcatatttctttctataagcctcataatcaacaaatgtaaactaatgtgactgatttatactttaaggtacctartggtcaaagtacctttaatgtgtaatttcaaatcccctttgagatccatcagattaacatagagatgagtaagtttgctattgtaacattaactttgacc

SEQ ID NO: 143054 - DNA, 201 bp, Homo sapiens
atcacttgaacctgggaggcagaggttgcagtaagccaagatcgtgccattgcactccagcctgggtgacagagcaagactccatctcaaaaaaaaaaaagaaagaaagaaacaaccccatcttaagtcaaggagtatctgtgtatccatacattaaaaatgtgttataggccaggcgcggtggctcacgcctgtaatccc

SEQ ID NO: 143055 - DNA, 201 bp, Homo sapiens
gattcagaatcagtcaattacaaaagttacaataagttatttttatatatataaagatagatgtactttacctataactagcaaataacataatgtgaggycaaattatattggaaattttttttaagtctaacaggattctaaggctgtgatgctcttagagggaacacaacagtattcattaactattgacagtagtgc

SEQ ID NO: 143056 - DNA, 201 bp, Homo sapiens
agaaagaaacaaccccatcttaagtcaaggagtatctgtgtatccatacattaaaaatgtgttataggccaggcgcggtggctcacgcctgtaatcccagyactttgggaggccaagccgggtggatcacctgaggtcaggagttcgagaccagcctggccaacatggtaaatccctgactctactaaaaatgcaaaaatc

SEQ ID NO: 143057 - DNA, 201 bp, Homo sapiens
tgtgtgtgtgtataccattggagtaggtaggtagtgtggtgtttgttctgtatagcatccttttgtgtggatggtataggaattcacaatacataaatgaraagaaatgacctcatctctaccattcttctgttttacagaggtctcttcattattgatgacaaaggaatcctaagacaaattactctgaatgatcttcct

SEQ ID NO: 143058 - DNA, 201 bp, Homo sapiens
catggtaaatccctgactctactaaaaatgcaaaaatcagccaggtgtggtggcacatgcctgtaatcccagctacttgggaagctgaggcaggagaatckcttgaacctgggaggcagaggttgcagtgaaccgagatcacgctgctgcactccagcctgggcgacagagcaagactccgtctcagaaaaaacaaaaatg

SEQ ID NO: 143059 - DNA, 201 bp, Homo sapiens
gtagctcacgcctgtaatcccagcactttgggaggctgaggcgggcagatcacctgaggtcaggagtttgtgaccatcctggccaacatggggaaaccccrtctctactaaaaacacaaaaattagccaggcatggtggtggatgcctgtaatcccagctaccggggaggctgaggcaagagaatcgcttgaacccgggag

SEQ ID NO: 143060 - DNA, 201 bp, Homo sapiens
agcatgctctgttgattcacagtttacccatttggcctggtcagtatcttacacttatattcgtagaaaaaaaagaatggatttactcttaaagcatggasagataactcttgatatgatataagaatatagtcatttatcagacaattcaggaatagctttatctaagagtaatacatgtaactacacattttccaggtt

SEQ ID NO: 143061 - DNA, 201 bp, Homo sapiens; identical to SEQ ID NO: 26165

SEQ ID NO: 143062 - DNA, 201 bp, Homo sapiens
agtggacatttctccaaagatgatatacaaatggccaaagaacacataaaaagatgctcaacatcattagtcatttgagaaatgcaaatcaaaaccacaawgagatacaatctcacaccattaggatgactataaccaaaaaaaaaaaaaaaatgggcaataacaagtgttgaagaggctgtagagaaattggaaccctca

SEQ ID NO: 143063 - DNA, 201 bp, Homo sapiens
aggcggatcacgaggtcaggagatcgagaccatcctggctaacacggtgaaaccccatctctactaaaaaaaatagaaaaaattagccgggcgtggtggckggtgcctgtagtcccagctactcgggaagctgaggcaggagaatggcgtgaaccctggggggcggagtctgcagtgagccgagatcgcgccactgcactt

SEQ ID NO: 143064 - DNA, 201 bp, Homo sapiens
aattccaaattatacattagattgagggagggatgtccacaggtgtgtgtacgtgtgtgtgtgtgtgtgtgtataccattggagtaggtaggtagtgtggtgtttgttctgtatagcatccttttgtgtggatggtataggaattcacaatacataaatgagaagaaatgacctcatctctaccattcttctgttttacag

SEQ ID NO: 143065 - DNA, 201 bp, Homo sapiens
gcaactgggcaatgagagtgaaactccatctcaaaaaaaaaaaaaaaaaaagattcagaactattggttttaaaacataatattcaatttattaaagttamaaatttgaaacacaagcttttctcatttataatctgtgtgtgtataacaaattttcattgcttggtgagctacaatttaattaattacatttccctaaga

SEQ ID NO: 143066 - DNA, 201 bp, Homo sapiens
attccaaattatacattagattgagggagggatgtccacaggtgtgtgtacgtgtgtgtgtgtgtgtgtgtataccattggagtaggtaggtagtgtggtgtttgttctgtatagcatccttttgtgtggatggtataggaattcacaatacataaatgagaagaaatgacctcatctctaccattcttctgttttacaga

SEQ ID NO: 143067 - DNA, 201 bp, Homo sapiens
ttccaaattatacattagattgagggagggatgtccacaggtgtgtgtacgtgtgtgtgtgtgtgtgtgtataccattggagtaggtaggtagtgtggtgtttgttctgtatagcatccttttgtgtggatggtataggaattcacaatacataaatgagaagaaatgacctcatctctaccattcttctgttttacagag

SEQ ID NO: 143068 - DNA, 201 bp, Homo sapiens
tccaaattatacattagattgagggagggatgtccacaggtgtgtgtacgtgtgtgtgtgtgtgtgtgtataccattggagtaggtaggtagtgtggtgtttgttctgtatagcatccttttgtgtggatggtataggaattcacaatacataaatgagaagaaatgacctcatctctaccattcttctgttttacagagg

SEQ ID NO: 143069 - DNA, 201 bp, Homo sapiens
gtttcaccatgttggccaggctggtctcaaactcctgacctcaagcgatccacccacctcagcctcccaaagtgctgggattacaggcatgaggcaccgcwcctggcccaaccaacctatttatgaaagcatttattaccacaacctaaaattagaattaggatataactccaagggcagggactttggctgtgttgttca

SEQ ID NO: 143070 - DNA, 201 bp, Homo sapiens
acaggcctctggaacttctgactgactgacttcaagttggggttcccatgaccccctctttaggctcaattgttagagcagcttgcaaaactccgggaaaygcccacttacacttaccagtttcttatgaaggatattttgaaggatacgaataaacacccagatgaagaggcacatagggcgaggtctggaagggtcctg

SEQ ID NO: 143071 - DNA, 201 bp, Homo sapiens
tgtgtgtgtgtgtgtgtgtataccattggagtaggtaggtagtgtggtgtttgttctgtatagcatccttttgtgtggatggtataggaattcacaatacrtaaatgagaagaaatgacctcatctctaccattcttctgttttacagaggtctcttcattattgatgacaaaggaatcctaagacaaattactctgaatg

SEQ ID NO: 143072 - DNA, 201 bp, Homo sapiens
tttgggagacctaggtgggaggatcccttgagcccaggagtttgagactagtctgggcaacataacaagacccttgtcttctacaaaaaaaaaaaaataawttttttttgttaaattaggccattgtggtggcacattcctgtagtcccagcctactcaagaggctgagataagaggatcgctagagcctggaagttcaag

SEQ ID NO: 143073 - DNA, 201 bp, Homo sapiens
ccagctctttgggagacctaggtgggaggatcccttgagcccaggagtttgagactagtctgggcaacataacaagacccttgtcttctacaaaaaaaaawaaataatttttttttgttaaattaggccattgtggtggcacattcctgtagtcccagcctactcaagaggctgagataagaggatcgctagagcctggaa

SEQ ID NO: 143074 - DNA, 201 bp, Homo sapiens
gggagttctagctgtgaagaaaggtatggtttccactgatcagattttagaagaggtagtggttaccccaaaagccgcagctgagggaaagtgggtggccytagtcccgagtttgcatcgaggatgttgggcaaactgaaacagttcctgaaacatctcaaagtgccttcagcacatcctgtctttttcaggtactatttc

SEQ ID NO: 143075 - DNA, 201 bp, Homo sapiens
cagcaacaaactacactatcttcagcagcacttgcttgtacctttcaccaatagaatcacttattttcttgctacatatggttatcgcaggtatcctgaarcaccattttcactcatcattatcttacgtagttgtcagattacaactagatcttgcagttttgaagtgttatagagcacatgtattatgatatcaccaat

SEQ ID NO: 143076 - DNA, 201 bp, Homo sapiens
cttaggatgggttggttgggagtgataaatgagaaaaactgttttgtcctcttaaacatttacagttcttacttgctgaaagtaagtactttcagttaacyactttgggactttttttttttttttatttgagatgaagtcttgctctgtcacccaggcacccaggctggagtgcggtcgcgcgatctcggctcactgcaa

SEQ ID NO: 143077 - DNA, 201 bp, Homo sapiens
tatatatatgaggtaggatgctggctcaagataagtaatcatatgttatatattaatttttaagagaaattcatgttgtttgtctctattttggagtgacmataaatggtggctgttacagagaagtataagccttactttctaggacccttagccaaacttagaagcaagcattgacttcagtgtttgtaaggggtctga

SEQ ID NO: 143078 - DNA, 201 bp, Homo sapiens
ttttgctaaaatagaacacattatatattccttttaaaaatgtcactgagtcaggatgcattctaatgtctcttttgacaaacagtgaatcatgtcatcaktacaaagtactgaagtatacatggcaaacaagcgtactggaagtttatgtaaatttggaggaatttttgccatgcccaggcctttcagctcaccagattc

SEQ ID NO: 143079 - DNA, 201 bp, Homo sapiens
acataattggtaaaaatgaaaatagattagctgcctgcttatgagctccatgactaaaattccttggtgtcaacaggcagctaatagaagtcatgtgctcrgtggtctggaaatgttcttattagtatattctattcagtttcatatagaaacagaaaaagtcagttgctgaaggtaactgaattctgtttttaaaatgtc

SEQ ID NO: 143080 - DNA, 201 bp, Homo sapiens
atgaataatttcctttcttcgttttgttttaacagataatcccagatccagctggaaagctgaagtatttcgataaactgaattgagaaatacttcttcargttatgatgcttgaaagttctcaataaagttcacggtttcattaccacattgtgttgcagtagtaatttcttggagaatataaaaatccacatcaaagtc

SEQ ID NO: 143081 - DNA, 201 bp, Homo sapiens
cacctgtaatcccagcactttgggaggccgaggcgggtggatcacctgaggtcaggagttcaagaccagcctgaccaacatagtgaaaccctgtctctacyaaaaatacaaaaattagccaggcgtggtggcacatgcctgtaatcccagctactagggaggctgaggcaggagaatcgcttgaacccaagagccggagga

SEQ ID NO: 143082 - DNA, 201 bp, Homo sapiens
atggggtgagggaaggatggacaggtggaccgatatttgtgaaaaccatgaaatgccagtctcaaaccaggtgatttggccagagctctcttctgatactrcacagaggtttgtgaactggaagtagtaaatgacaaagctcttagcagagatacccctgtgagagaacaaattgggttcctcacgctaagggcaggctct

SEQ ID NO: 143083 - DNA, 201 bp, Homo sapiens
agcaatctcgggttataaagcaataaacagcaagccgagagaacaccagaagagggagagacttaaggaagtacacagtatgtccatgaaagtttgggagygtgcacagtgggatgctctggatggtgaaagatcctgtgaacatacacagcgagcatccaccacatcctacctggaaactggtgtttggtgctttctctg

SEQ ID NO: 143084 - DNA, 201 bp, Homo sapiens
ttcctggagaaggagagcagtctgactgagccggtaattccccttccgggccccaaggcccacctcttactgtcagcatcacttgccagtctgtacctacygggggtgccataagggggaactcaggagggctgtgacctgaccggtaacatggtttcctctctgaaggggaagcaaaacctatatacacctaggaaacag

SEQ ID NO: 143085 - DNA, 201 bp, Homo sapiens; identical to SEQ ID NO: 26169

SEQ ID NO: 143086 - DNA, 201 bp, Homo sapiens
taaagaagagcacaagatgttcctcatccgtgtcctacttccccttcacaaggtcaagtccctgagtgtctaccaccctcaggtgagctgccttcctcctkataatgtccaactcaggcagcagagaaaagagccggcaggaaagtgttccagctgggataggggaagcatagggagcaggtgggataattccttccctcc

SEQ ID NO: 143087 - DNA, 201 bp, Homo sapiens
ctttctaagacttgctggcccccactccaggggacctctgcatttcccctggcgggacctatgtcaccctggccactgccttccctggctgctgcctcacyggctgctttccctcccttgtacccccagctcctagacctatttgacagtgaggatcctcgagagcgggacttcctcaagaccattttgcatcgcatctat

SEQ ID NO: 143088 - DNA, 201 bp, Homo sapiens
tagtagagacggtgtttcaccatgttggccaggctggacttgaactcctgacctcaggtgatccacccgcctcagcctcccaaagtgctgggattacaggygtgagccactgcacccggcccttatgcggtattctaaatatctccttaataatccttatcactcagctctgtgacgatttgtccccatctgtgtctctcc

SEQ ID NO: 143089 - DNA, 201 bp, Homo sapiens
agcttagcaatctcgggttataaagcaataaacagcaagccgagagaacaccagaagagggagagacttaaggaagtacacagtatgtccatgaaagtttrggagtgtgcacagtgggatgctctggatggtgaaagatcctgtgaacatacacagcgagcatccaccacatcctacctggaaactggtgtttggtgcttt

SEQ ID NO: 143090 - DNA, 201 bp, Homo sapiens
gagccactggaacaagtaaggcgctggggtggggctgggtggtggggatccagtttgggaaactttgagggtatggaagaactaaagagccaggggtctcmcctagtcacccagcaagtggggctgatgtcccctgcatgttgataggaccttgaggggctgactggagcgaaaagatgcctgtgtgcaagatctctgtga

SEQ ID NO: 143091 - DNA, 201 bp, Homo sapiens
gtggcatgagctcagctcactgcaacgtccgcctcctgggtttgagcaattctcttgcctcagcctcccaagtagctgggactacaggcacccaccaccasgcctggctaattttttgtattttagtagagacagggtttcactgtgttgtccaggctggtctcaaactcctgaggtcaggcaatccacctgccttggcct

SEQ ID NO: 143092 - DNA, 201 bp, Homo sapiens
tgtccttggggagtgggcatgcggaggtggtttgggtagctcagtcgtagacaatgcacacagaaatcagccacaacaggggctaagggaaatggaattcrgggaaagctggtgaggtccccacccatttgtaatttttagtctgttggactagatactgtcccatccacagaaagcaatagcctactagattgtgaagaa

SEQ ID NO: 143093 - DNA, 201 bp, Homo sapiens
cagctgggttagtatacagcaggagcgtgctcaggccaaagaaggaactccttccccctactgcatggagctgctctacaccacacctttcttcctccccrcctccaagaagccttccccctactccagcccacacagagctctcttctccctgaaatccttttgcccccatagtcacaataactcgatttaacacttctc

SEQ ID NO: 143094 - DNA, 201 bp, Homo sapiens
ggggctgttttaccagttctagtgggcatcgggagttggtggaatggaagttttggggtattttgcggggaagggagttccagagaatgcgggaagggggwgccagggagcaggatggtggcagggtggggtaagggaaagcccttgaaggcaagcagggcatcgcagtgaaggactacagaggagaacctgactgctggg

SEQ ID NO: 143095 - DNA, 201 bp, Homo sapiens
tggggtggggctgggtggtggggatccagtttgggaaactttgagggtatggaagaactaaagagccaggggtctcacctagtcacccagcaagtggggckgatgtcccctgcatgttgataggaccttgaggggctgactggagcgaaaagatgcctgtgtgcaagatctctgtgataccaaacagcagggcagcggcct

SEQ ID NO: 143096 - DNA, 201 bp, Homo sapiens
aaatcagccacaacaggggctaagggaaatggaattcggggaaagctggtgaggtccccacccatttgtaatttttagtctgttggactagatactgtccyatccacagaaagcaatagcctactagattgtgaagaagacaaattgccagtgagatttgctaggaccatgggtgtaaacgtttggttgggaaagggtgtt

SEQ ID NO: 143097 - DNA, 201 bp, Homo sapiens; identical to SEQ ID NO: 26176

SEQ ID NO: 143098 - DNA, 201 bp, Homo sapiens; identical to SEQ ID NO: 26171

SEQ ID NO: 143099 - DNA, 201 bp, Homo sapiens
tgtcctgcctagtggactgtgagctctttgatggcaagggccatgtcttagtcaccttttaatctttttttatggtatagaatttgcatataaacttttamtctttaatgcttagcatgatgtttagttaataattgaaggaaggaaagaattaagcaacactagatggagctctggatgtcactactggagagaaggcct

SEQ ID NO: 143100 - DNA, 201 bp, Homo sapiens
aaacccccatctctactaaaaatacaaaaattagctgggtgtagtggtggatgcctgtagtcccagctacttgggaggctgaggcaggagaatcacttgarcctgggaggtgacggttgcagtgagccgagatcgtgccactgcactccagcctgggcaacagagtgagactccgtcttaaaaaaaaaactcagggttttg

SEQ ID NO: 143101 - DNA, 201 bp, Homo sapiens
gaggctgttcaggtgggagggcaatgtagggggatggagcagaaataatagctctggaagggagaggagacagaaacagcagagccaaagaataaggggayggaacaatagaattcactgggaattggtcaccattcctcaccttgtccctattcacacacagatgctaaaagacatcaagaaggagaaagtgctgctgcg

SEQ ID NO: 143102 - DNA, 201 bp, Homo sapiens
ataatgccctgaagttgtttatggaaatgaatcagaagctgtttgatgactgcacacaacaatacaaggcagagaagcagaagtgagtatctctctccccrggagactttcatcttctaccaccagctcactgtgtttctctcaagcccaaccccaatcctacttttgctcctcaggggccggttccgaatgaaggaaagg

SEQ ID NO: 143103 - DNA, 201 bp, Homo sapiens; identical to SEQ ID NO: 26168

SEQ ID NO: 143104 - DNA, 201 bp, Homo sapiens
gcacccggccatttaaactcatgtttattttttaagagccaaaaaaggggccaggcgcggtggttcacacctgtaatcccagcactttgggaggccgaggrggggcggatcacgaggtcaggagattgagaccatcctggctaacatggtgaaaccccgtctctactaaaaaatacaaaaaattagccgggcgtggtggcg

SEQ ID NO: 143105 - DNA, 201 bp, Homo sapiens
tggggtgtgtgcagacacctcaatgttgtgtcctgcctgcaccctgcccccggcctatttctctccaccccatgctctcagccactgataagggtcagtgyggccagctgggttagtatacagcaggagcgtgctcaggccaaagaaggaactccttccccctactgcatggagctgctctacaccacacctttcttcctc

SEQ ID NO: 143106 - DNA, 201 bp, Homo sapiens; identical to SEQ ID NO: 26172

SEQ ID NO: 143107 - DNA, 201 bp, Homo sapiens
gacctcaggtgatctgccctcctcggcctcccaaagtgctgggattacaagtgtgagccactgcgcccggcctcttctaccttttgattggagactgtcayacattcagtaaaggatcttaagtgtactgctcaataaattttaggtatgtatctgccatgcaccaccttgcaggtccagtcaagatacaggatgtttaca

SEQ ID NO: 143108 - DNA, 201 bp, Homo sapiens
tgagccgccatgccaggcccctatctctttatttatatttgaatatttgggttttatttatatatatatatatatatatatatatatatatatatatatatttttttttttttttttttttttttttttttttttgagacggagtctcactctgtcacccgggctggagtgcagtggtgtgatgctggctcactgcaacct

SEQ ID NO: 143109 - DNA, 201 bp, Homo sapiens
gctcctctcctgttctctcatccctagataggtgacaagtccacatcattgtttttataaaaaattcagaggatgcaattaataacatttctgtcttcctyccctcccccaccccagaggatttcaagttcttctattattatggtaaggagtaagagtttgggatgggagctggagaggagcgggagatggcaggtatga

SEQ ID NO: 143110 - DNA, 201 bp, Homo sapiens
cagctggacatggcctctgcctagtcctattctagactctgtttgggggcaagggctgtcctgtggtttagcttctttcctctcccaacagggggctgccyggacagtccaggagtacctgtgggcagacagccctgcaaatacctgtatttagacttctgaaaatggacttcatggggctgtaacacctgtgtctgggag

SEQ ID NO: 143111 - DNA, 201 bp, Homo sapiens
gaacaaattgggttcctcacgctaagggcaggctctggcctcctacacctcatctttcttcttggtggcaggacaatccatggactgatctataatgcccygaagttgtttatggaaatgaatcagaagctgtttgatgactgcacacaacaatacaaggcagagaagcagaagtgagtatctctctccccgggagacttt

SEQ ID NO: 143112 - DNA, 201 bp, Homo sapiens
ttcactgtgttgtccaggctggtctcaaactcctgaggtcaggcaatccacctgccttggcctcccaaagtgctgggattacaggcgtgagccaccgcacytggccttgtactatcattatttaacttagcataggaagcaattttctgtcattatgtagttttaggccttttgttttatttcaaaattttatcagtatga

SEQ ID NO: 143113 - DNA, 201 bp, Homo sapiens
gagccagggagcaagggtggtaggcctggttcctccatgcccactcacacccacacactaaggcagctggatctctcttaggctcattctttgaaagataygtctgaggcatcatgctgagtgctgtagggtgggtggaggggtacaaaaaagaataagcagcttatggtctaatagattggagatgtatgaagatgggtc

SEQ ID NO: 143114 - DNA, 201 bp, Homo sapiens; identical to SEQ ID NO: 26193

SEQ ID NO: 143115 - DNA, 201 bp, Homo sapiens; identical to SEQ ID NO: 26194

SEQ ID NO: 143116 - DNA, 201 bp, Homo sapiens
cttccctctctccttctaacctggtacccccaaagaggacaatcttgtcaccaacaatacagcagcactggcgccggcggggacatggccccttccccttmggttcaatctttttccaggtaaaggacactgaagagaaatttatatggaagttcaatacctgcctagtccaggtatcttccccacccccatccctcaccg

SEQ ID NO: 143117 - DNA, 201 bp, Homo sapiens
atagatgcgatgcaaaatggtcttgaggaagtcccgctctcgaggatcctcactgtcaaataggtctaggagctgggggtacaagggagggaaagcagccrgtgaggcagcagccagggaaggcagtggccagggtgacataggtcccgccaggggaaatgcagaggtcccctggagtgggggccagcaagtcttagaaag

SEQ ID NO: 143118 - DNA, 201 bp, Homo sapiens
cctaccgcctccctgttcttgcagcccctgcccggatggcaacagtagttctaggaggagacaccatgggccctgagcgtatcttccccaatcagactgasgaactgggacatcagggcccttcagaaggcactggggattggagcagtgaggagcctgaggaagagcaggaggaaacggggtcgggcccagctggctact

SEQ ID NO: 143119 - DNA, 201 bp, Homo sapiens
ctttaccaggattaaacttccagaggtcatggaagtgccggttcagccttgcattataaccaccaaagatgtacagctccccattgtagccaactggaagragagaggaagtgtcaggagtgtgaagagggcaggaagggaactccacagggaagtaacaaacactcacaggccgagtggctccggcgcccctcaggcagc

SEQ ID NO: 143120 - DNA, 201 bp, Homo sapiens
taatcaggtcacacctgtgctgctcactcaccctcactcaatccctcccttccaaccactcgctgtacctgatatcatgaggcaaacaggactggtctagrttatactgaatcacggccagtttgcacagagtcttcagactagggcctttaagggagaagttgtggaaaggagatggtcaaaggtgaggaaaggatccag

SEQ ID NO: 143121 - DNA, 201 bp, Homo sapiens
tgcagcccctgcccggatggcaacagtagttctaggaggagacaccatgggccctgagcgtatcttccccaatcagactgaggaactgggacatcagggcycttcagaaggcactggggattggagcagtgaggagcctgaggaagagcaggaggaaacggggtcgggcccagctggctactcctaccagcccctgaacca

SEQ ID NO: 143122 - DNA, 201 bp, Homo sapiens
aaagtctcccggggagagagatactcacttctgcttctctgccttgtattgttgtgtgcagtcatcaaacagcttctgattcatttccataaacaacttcrgggcattatagatcagtccatggattgtcctgccaccaagaagaaagatgaggtgtaggaggccagagcctgcccttagcgtgaggaacccaatttgttc

SEQ ID NO: 143123 - DNA, 201 bp, Homo sapiens; identical to SEQ ID NO: 26192

SEQ ID NO: 143124 - DNA, 201 bp, Homo sapiens
gcccagaaccagcctttgcctccaagtgtcaccctgggggccctcccacactacccctccacaggggcactagtctcagctcaggtggctggccctgcccyaagggagctgccgaggtcagggagcagcctgggcccagtgttctccaacagtgaagggtggggccacccccacctgattgccagctcagaatctgcatat

SEQ ID NO: 143125 - DNA, 201 bp, Homo sapiens; identical to SEQ ID NO: 26195

SEQ ID NO: 143126 - DNA, 201 bp, Homo sapiens; identical to SEQ ID NO: 26196

SEQ ID NO: 143127 - DNA, 201 bp, Homo sapiens
gtaaactaagattttgtagacttcagagtccaagtgaaatgctcttttgctagctttggggatgggcaggcttgccttaaagtaacaaggtggatttggtraccctagcagcccaagggctctgggttgattcggggattggggaggggagctggtcccattatttctatgcctgaatggcctctggctctgatttcagaa

SEQ ID NO: 143128 - DNA, 201 bp, Homo sapiens; identical to SEQ ID NO: 26197

SEQ ID NO: 143129 - DNA, 201 bp, Homo sapiens
tggccaggatggctctcctggcttgaggtaccacttggcttagtgggggtgaggcggtagttgagggagctgaggtcaccagtcctcatggttgctggggsctctgttacagtaagttccggctctcctactacccacactgtctggcatccttcacggagctgctccaagcagccttcggaggtaagtgccagcacagcg

SEQ ID NO: 143130 - DNA, 201 bp, Homo sapiens
gggctcccggaccagtacgcggacggggaggcggcgcgcgtgtggcagctgtatatcggagacacccgcagccgcaccgccgagtacaaggcatggctgcytgggctgctgcgccagcacggctgccagcgggtgctcgacgtagcctgtggcactgggtgagcccaggccggggccgggggcgttgcatgagatcggggt

SEQ ID NO: 143131 - DNA, 201 bp, Homo sapiens
tggtgaccctggactatacggtgcaggtgccgggggctggccaggatggctctcctggcttgaggtaccacttggcttagtgggggtgaggcggtagttgrgggagctgaggtcaccagtcctcatggttgctggggcctctgttacagtaagttccggctctcctactacccacactgtctggcatccttcacggagctg

SEQ ID NO: 143132 - DNA, 201 bp, Homo sapiens
ttctgcccgtgcctggagctcaggggaccagagtgagcaccggctggcgctgaaaaacattgcgagcatggtgcgggcagggggcctactggtcattgatmatcgcaactacgaccacatcctcagtacaggctgtgcacccccagggaagaacatctactataaggtggggccctctggggtgggggtgggggtgggggt

SEQ ID NO: 143133 - DNA, 201 bp, Homo sapiens
aggcccacatggtgaccctggactatacggtgcaggtgccgggggctggccaggatggctctcctggcttgaggtaccacttggcttagtgggggtgaggyggtagttgagggagctgaggtcaccagtcctcatggttgctggggcctctgttacagtaagttccggctctcctactacccacactgtctggcatccttc

SEQ ID NO: 143134 - DNA, 201 bp, Homo sapiens
tccctcttttctcctccccctaactgaacggggagcttgtgtgtcttaagaagaaacccaggcaggactgcacttggtggaggtggctgctactggtaccrtcgtgcctccctgattcctctttctcttcctgacccctagtcatcgaagaagccaactggatgactctggacaaagatgtgccccagtcagcagagggtg

SEQ ID NO: 143135 - DNA, 201 bp, Homo sapiens; identical to SEQ ID NO: 26199

SEQ ID NO: 143136 - DNA, 201 bp, Homo sapiens
ttctctgaaaagcaagtcttaagctccagaatgagacaccgggtgtgaagagctggttttaactgtgtttgtggcatcttgtccctcccctcaaagaaaarcccataagcacagagccctccttcccaaccagggttccttctcccttgatccctcttttctcctccccctaactgaacggggagcttgtgtgtcttaaga

SEQ ID NO: 143137 - DNA, 201 bp, Homo sapiens; identical to SEQ ID NO: 26201

SEQ ID NO: 143138 - DNA, 201 bp, Homo sapiens; identical to SEQ ID NO: 26203

SEQ ID NO: 143139 - DNA, 201 bp, Homo sapiens; identical to SEQ ID NO: 26204

SEQ ID NO: 143140 - DNA, 201 bp, Homo sapiens
gcgcttgtaccggagcagctcctgctcactgactgagggttgcagccgggcggcagcctgcagcaagtcctccatggtgagcatcagtgctgagctacctkgctccagccctggagatgacaaggtggggaggctgtggtctatgcccaggcaggggagagccctgcgaaggtggcttcctgctcagggtctcctagatgt

SEQ ID NO: 143141 - DNA, 201 bp, Homo sapiens
gctgctgcgccagcacggctgccagcgggtgctcgacgtagcctgtggcactgggtgagcccaggccggggccgggggcgttgcatgagatcggggtctgkctcagcctgtactgcgcggccgcagaaccacagggccgggcacgtcagggcggcctttgccaatcctggaacgggtgggacaccagggccaggagcaggt

SEQ ID NO: 143142 - DNA, 201 bp, Homo sapiens
ggacagactcgggcgcccggcccaaagcccggcaggggcgtgtccgcgcgctcacctgctattggccaggtggggctgtcggctgccagcagtgcttatgytttaagtgcggagcgggtggctgcggagccaggcgcggcgcaggatggtggacagcgtgtaccggacccgctccctgggggtggcggccgaagggctccc

SEQ ID NO: 143143 - DNA, 201 bp, Homo sapiens
gcttgggctgctgcgccagcacggctgccagcgggtgctcgacgtagcctgtggcactgggtgagcccaggccggggccgggggcgttgcatgagatcggrgtctgtctcagcctgtactgcgcggccgcagaaccacagggccgggcacgtcagggcggcctttgccaatcctggaacgggtgggacaccagggccagga

SEQ ID NO: 143144 - DNA, 201 bp, Homo sapiens; identical to SEQ ID NO: 26207

SEQ ID NO: 143145 - DNA, 201 bp, Homo sapiens; identical to SEQ ID NO: 26209

SEQ ID NO: 143146 - DNA, 201 bp, Homo sapiens
gcttgtaccggagcagctcctgctcactgactgagggttgcagccgggcggcagcctgcagcaagtcctccatggtgagcatcagtgctgagctacctggytccagccctggagatgacaaggtggggaggctgtggtctatgcccaggcaggggagagccctgcgaaggtggcttcctgctcagggtctcctagatgtca

SEQ ID NO: 143147 - DNA, 201 bp, Homo sapiens
ctagggctttgtggtaggggatctctatgcccttctgacccacagcagccgggcagcctgcaccaggatcaagaactcagggtaagaggacgtgggcaccrgaaaggcggaaagaggaaatggatgtagatgggtgggtggtgaggaagggagaagggaatgggacgctgatggtgaggaggcttccctgtgttcctcttt

SEQ ID NO: 143148 - DNA, 201 bp, Homo sapiens
ccctgtgggtgcctggtgtcactaataggtcttgtgggaataaatgtctttaccatttcactggctctgggccaagttgaaagtgtcacagaaaggttatytttactgagaaaattttttggagccagagtcgggataggaggtgatattctcttcctggtacccattagagggagaggttttcaggtctgctacctcagg

SEQ ID NO: 143149 - DNA, 201 bp, Homo sapiens
caccatgactcgggacacgctcttgtggtgcttttgtttgtcctctgtgattgagaaaccttgtccttgaggaggggggtttttggactctggatctgggrttcattgggcctttttcctgcaggtggcgggaaatgttttttaaagtgaagaaaacagttggggaagctccagatggaccagccagtgcctacttggccg

SEQ ID NO: 143150 - DNA, 201 bp, Homo sapiens
gctgtattgtcaggccccagtttccctccctgctctcacctaacttcaaccccccacaagccgagctttgccctcctgtgggcccctctctctcttcagtrtttgccagggccagggctgcagctccatgcattatcttctttgatgaactggactctttggccccaagccgggggcgaagtggagattctggaggagtga

SEQ ID NO: 143151 - DNA, 201 bp, Homo sapiens
accccgatctcatgcaacgcccccggccccggcctgggctcacccagtgccacaggctacgtcgagcacccgctggcagccgtgctggcgcagcagcccargcagccatgccttgtactcggcggtgcggctgcgggtgtctccgatatacagctgccacacgcgcgccgcctccccgtccgcgtactggtccgggagccc

SEQ ID NO: 143152 - DNA, 201 bp, Homo sapiens
acccccacccccacccccaccccagagggccccaccttatagtagatgttcttccctgggggtgcacagcctgtactgaggatgtggtcgtagttgcgatkatcaatgaccagtaggccccctgcccgcaccatgctcgcaatgtttttcagcgccagccggtgctcactctggtcccctgagctccaggcacgggcagaa

SEQ ID NO: 143153 - DNA, 201 bp, Homo sapiens
gagctttgccctcctgtgggcccctctctctcttcagtgtttgccagggccagggctgcagctccatgcattatcttctttgatgaactggactctttggycccaagccgggggcgaagtggagattctggaggagtgatggacaggtaggggtctgagtgggaatgaaagctgaggggtccagggtgggaaggatatgag

SEQ ID NO: 143154 - DNA, 201 bp, Homo sapiens
caccctctgctgactggggcacatctttgtccagagtcatccagttggcttcttcgatgactaggggtcaggaagagaaagaggaatcagggaggcacgayggtaccagtagcagccacctccaccaagtgcagtcctgcctgggtttcttcttaagacacacaagctccccgttcagttagggggaggagaaaagaggga

SEQ ID NO: 143155 - DNA, 201 bp, Homo sapiens
gggggcctggaagggatggtgggtggatcaggggctgcagcaggctggggagcaggaggggctgcccaagaggtcaattgtgtgtatgtgcatctgacggytctcaccttctcacatcctctcactcagcgtgaaggggccagagctcattaacatgtatgtgggccaaagtgaggagaatgtgcgggaaggtgagtgagc

SEQ ID NO: 143156 - DNA, 201 bp, Homo sapiens
ctcctgtgggcccctctctctcttcagtgtttgccagggccagggctgcagctccatgcattatcttctttgatgaactggactctttggccccaagccgrgggcgaagtggagattctggaggagtgatggacaggtaggggtctgagtgggaatgaaagctgaggggtccagggtgggaaggatatgagaaagctcaca

SEQ ID NO: 143157 - DNA, 201 bp, Homo sapiens
tgggtttcaccgtgttaaccaggatggtctcgatctcctgaccttgtgatccgcccgcctcggcctcccaaagtgctgggattacaggcgtgagccaccgyacccagccagggatttctattgtttttgagagggctaccctgtcctatcaacagagaatgagaaatagagcataaccgagccaagaacccaaaataagga

SEQ ID NO: 143158 - DNA, 201 bp, Homo sapiens
tttcagacagattgtggtaggcgcctcttggtatatcagggagaccacagaagagaaatctgaaccatgaggttaatttggacattccaaacagagacacstgtgattaaagagggctccaaaagagccaggatcctgctctgccactcatctgtctctgatccccctttctagtctctccaccatttcccctagctcatc

SEQ ID NO: 143159 - DNA, 201 bp, Homo sapiens
ccagtcataacgttgaggttttattggcagcacagcaatgccaaagggaattaattagtctttggctgttggatatgctggatgccccggccagagcaccrcaggtggtgtgggagacacagcctcactacatggggacagccctgtcctggggtcagggaggctcaaggagagaaaaacagggtatctgctttctagatc

SEQ ID NO: 143160 - DNA, 201 bp, Homo sapiens
aattttaaaaacataaaattcacacaccataaaaccatacttttaaagtatacaattcaatttttttattcataaggttgtacagccaacatcactgtttmattccagaacattttcaacatctcaaaaagaaactctgcacccattagcagtcattccctgtagcttccctcataggcaatggcaactgctgatctgctg

SEQ ID NO: 143161 - DNA, 201 bp, Homo sapiens
tcttaagacacacaagctccccgttcagttagggggaggagaaaagagggatcaagggagaaggaaccctggttgggaaggagggctctgtgcttatgggyttttctttgaggggagggacaagatgccacaaacacagttaaaaccagctcttcacacccggtgtctcattctggagcttaagacttgcttttcagagaa

SEQ ID NO: 143162 - DNA, 201 bp, Homo sapiens; identical to SEQ ID NO: 26242

SEQ ID NO: 143163 - DNA, 201 bp, Homo sapiens; identical to SEQ ID NO: 26243

SEQ ID NO: 143164 - DNA, 201 bp, Homo sapiens; identical to SEQ ID NO: 26244

SEQ ID NO: 143165 - DNA, 201 bp, Homo sapiens; identical to SEQ ID NO: 26246

SEQ ID NO: 143166 - DNA, 201 bp, Homo sapiens
acatctaggagaccctgagcaggaagccaccttcgcagggctctcccctgcctgggcatagaccacagcctccccaccttgtcatctccagggctggagcmaggtagctcagcactgatgctcaccatggaggacttgctgcaggctgccgcccggctgcaaccctcagtcagtgagcaggagctgctccggtacaagcgc

SEQ ID NO: 143167 - DNA, 201 bp, Homo sapiens; identical to SEQ ID NO: 26226

SEQ ID NO: 143168 - DNA, 201 bp, Homo sapiens; identical to SEQ ID NO: 26251

SEQ ID NO: 143169 - DNA, 201 bp, Homo sapiens
accccctcaacaggtacttatacagagctgggcctctcaaagctgggggggccggctgggcgcggtggctcacacttataatcccagcacattgggaggcygaggcaggtggatcacctgccttgatcaggagttcaagaccagcctggccaacatggtgaaaccctgtctctactaaaaatacaaaaattagctgggtgt

SEQ ID NO: 143170 - DNA, 201 bp, Homo sapiens
tgttgctcacagctgtggaccttctgggccgggaccgtgatgggctgggtgaggatgcccgtgtgatggctgtgctgcgtcacctcctcctcaatgaggamcccctcaacaggtacttatacagagctgggcctctcaaagctgggggggccggctgggcgcggtggctcacacttataatcccagcacattgggaggccg

SEQ ID NO: 143171 - DNA, 201 bp, Homo sapiens
gggagacaaacctagtcctggattccagagggaagatcattgacatctaggagaccctgagcaggaagccaccttcgcagggctctcccctgcctgggcayagaccacagcctccccaccttgtcatctccagggctggagccaggtagctcagcactgatgctcaccatggaggacttgctgcaggctgccgcccggctg

SEQ ID NO: 143172 - DNA, 201 bp, Homo sapiens
catggctgggctccctgaaacttatacctgcctatctccctaaagatttgacaagctggtgtttgtgggggcaaatgaggaccgggcctcccagctacgcrttctaagtgccatcacacgcaagtatgctctgttagaggaagactgcgaagggcttgggccttgggatgcttaggggatgcatgcaacatgcaggatgag

SEQ ID NO: 143173 - DNA, 201 bp, Homo sapiens
atggttgtggccaccacaagccgggcccaggacctgcctgctgatgtgcagacagcatttcctcatgagctcgaggtgcctgctctgtcagaggggcagcrgctcagcatcctgcgggccctcactgcccaccttcccctgggccaggaggtgaacttggcacagctagcacggcggtgtgcagtgagtatcaagggagag

SEQ ID NO: 143174 - DNA, 201 bp, Homo sapiens
cgctgtgctggcacttacctccgaaggctgcttggagcagctccgtgaaggatgccagacagtgtgggtagtaggagagccggaacttactgtaacagagsccccagcaaccatgaggactggtgacctcagctccctcaactaccgcctcacccccactaagccaagtggtacctcaagccaggagagccatcctggcca

SEQ ID NO: 143175 - DNA, 201 bp, Homo sapiens
cgcaatcttggctcactgcaagctccgcctcccgggttcatgccattctcctgcctcagcctcccaagtagctgggactacaggtgcccaccaccacgccyggctaattttttgtatttttagtagagattgggtttcaccgtgttaaccaggatggtctcgatctcctgaccttgtgatccgcccgcctcggcctcccaa

SEQ ID NO: 143176 - DNA, 201 bp, Homo sapiens
aaaaaaaaaaaaaaacaacaaacctaaggcatcaacagagggcctctgctctagctgggggacggtccctgaaggttcctgcctactgtgccctgctcatrtgtcctttcctgtggttccctagggctttgtggtaggggatctctatgcccttctgacccacagcagccgggcagcctgcaccaggatcaagaactcagg

SEQ ID NO: 143177 - DNA, 201 bp, Homo sapiens
caagtatgctctgttagaggaagactgcgaagggcttgggccttgggatgcttaggggatgcatgcaacatgcaggatgagctggtcagcactggctttcragggaggaggtgatgccaactctgtttcttcctgtatcccacaacagattcaagctagagccatctgtgagcctggtaaacgtgctagattgctgccctc

SEQ ID NO: 143178 - DNA, 201 bp, Homo sapiens
cagctccgtgaaggatgccagacagtgtgggtagtaggagagccggaacttactgtaacagaggccccagcaaccatgaggactggtgacctcagctcccycaactaccgcctcacccccactaagccaagtggtacctcaagccaggagagccatcctggccagcccccggcacctgcaccgtatagtccagggtcacca

SEQ ID NO: 143179 - DNA, 201 bp, Homo sapiens
cttgagcccaggaggcggaggttgcagtgagccaaaatcataccattgcactccagcctgggcgacaagagcaagactcagtcttaaaaaaaaaaaaaaaagggggagcgggggggccagccctcctacttttcagcctttcagtcctcccttctctcacccctcagtggcttctcagtcatctcccatccatttggctgc

SEQ ID NO: 143180 - DNA, 201 bp, Homo sapiens
catctcaaaaaataaataaataggtaaaatttaaattcttttctttttaaagaagagtttaatggcctagaccaagacgggattccttcctttccgttctyagccttcgtgttatttggaccaagacttgggccataccatccatatctcaacgtaaggatatacaggctctgatttctgccttaactacggagtgtgcac

SEQ ID NO: 143181 - DNA, 201 bp, Homo sapiens
ggaggtggagcttgcagtgagccgagatcgcaccactgcactctagcctgggcgacagagcgagactccgtctcaaaaaaaaaaaaaaaaaaaaaaaacamaaaaaacatttcagacagattgtggtaggcgcctcttggtatatcagggagaccacagaagagaaatctgaaccatgaggttaatttggacattccaaac

SEQ ID NO: 143182 - DNA, 201 bp, Homo sapiens
gaggtggagcttgcagtgagccgagatcgcaccactgcactctagcctgggcgacagagcgagactccgtctcaaaaaaaaaaaaaaaaaaaaaaaacaamaaaaacatttcagacagattgtggtaggcgcctcttggtatatcagggagaccacagaagagaaatctgaaccatgaggttaatttggacattccaaaca

SEQ ID NO: 143183 - DNA, 201 bp, Homo sapiens
aatggcgtgaacccgggaggtggagcttgcagtgagccgagatcgcaccactgcactctagcctgggcgacagagcgagactccgtctcaaaaaaaaaaamaaaaaaaaaaaacaaaaaaaacatttcagacagattgtggtaggcgcctcttggtatatcagggagaccacagaagagaaatctgaaccatgaggttaat

SEQ ID NO: 143184 - DNA, 201 bp, Homo sapiens
gaaggatgccagacagtgtgggtagtaggagagccggaacttactgtaacagaggccccagcaaccatgaggactggtgacctcagctccctcaactaccrcctcacccccactaagccaagtggtacctcaagccaggagagccatcctggccagcccccggcacctgcaccgtatagtccagggtcaccatgtgggcct

SEQ ID NO: 143185 - DNA, 201 bp, Homo sapiens
ccctcctgtgggcccctctctctcttcagtgtttgccagggccagggctgcagctccatgcattatcttctttgatgaactggactctttggccccaagcygggggcgaagtggagattctggaggagtgatggacaggtaggggtctgagtgggaatgaaagctgaggggtccagggtgggaaggatatgagaaagctca

SEQ ID NO: 143186 - DNA, 201 bp, Homo sapiens
tacgcgttctaagtgccatcacacgcaagtatgctctgttagaggaagactgcgaagggcttgggccttgggatgcttaggggatgcatgcaacatgcagratgagctggtcagcactggctttcaagggaggaggtgatgccaactctgtttcttcctgtatcccacaacagattcaagctagagccatctgtgagcctg

SEQ ID NO: 143187 - DNA, 201 bp, Homo sapiens
caagctagagccatctgtgagcctggtaaacgtgctagattgctgccctccccagctgacgggcgcggacctctactctctctgctctgatgctatgacakctgccctcaaacgcagggttcatgacctggaggaaggtgagccacttgccggtctgagaggtcaaccaaaaagctagtggggagctgggtgcacctgagt

SEQ ID NO: 143188 - DNA, 201 bp, Homo sapiens
tatctggaaaattgggttagtagctgttcctgctacccatcctattccccgttagtaggttgaataaccctaactcactatgacactcgccaactactgcrcagccctggttatgcatcagaattgctggggaagctttcaaaaaatacaggtgcctaagccccaccccagatctattggggcagaatcagggtgagactg

SEQ ID NO: 143189 - DNA, 201 bp, Homo sapiens
gcagggttcatgacctggaggaaggtgagccacttgccggtctgagaggtcaaccaaaaagctagtggggagctgggtgcacctgagtcccagctacttgwgaggctgaggtgggaggatcgcttgagcccaggagtttgaggccagcctgggcaacacagagagaccccaactctaaaaaaaatgtttaagggaaaaaaa

SEQ ID NO: 143190 - DNA, 201 bp, Homo sapiens
taaacccaacaactggggaggctgaagcaggagaatcgcttgaacctgggaggtggcagttgcagtgaacccagatcacaccactgcactccaacctgggygacagagcaagactctgtctcaaaaaaagaaaaaaatgaaagttgtgtttagggggacaaatacagtatagtgtttaattaaggacctagatatatggtt

SEQ ID NO: 143191 - DNA, 201 bp, Homo sapiens
ggggaagctccagatggaccagccagtgcctacttggccgacaccacccatacctccttgtacatggtgaggccccaaggatgggtgtagaccagcgcagrgggtagaaacgatttttagaaacgaaagctttttattacctttcacaggtgggttctaccctgagccctgttccatggctcccttcagaggaatccactc

SEQ ID NO: 143192 - DNA, 201 bp, Homo sapiens
tggggaggctgaagcaggagaatcgcttgaacctgggaggtggcagttgcagtgaacccagatcacaccactgcactccaacctgggcgacagagcaagaytctgtctcaaaaaaagaaaaaaatgaaagttgtgtttagggggacaaatacagtatagtgtttaattaaggacctagatatatggtttagatggtgctgt

SEQ ID NO: 143193 - DNA, 201 bp, Homo sapiens
ctctggaggctgaggcaggagaatcccttgaacccaggaggcggagcttgcagtgagccgagatggtgccactgcactccagcctgggtgacaagcgagastccatctcaagaaaaaaataaaacccacaaaaattagccaggcatggtggtgcacatgcctatagtcccagctactcaggaggctgaggcacaaagagaa

SEQ ID NO: 143194 - DNA, 201 bp, Homo sapiens
atgggaaagacaggatggaaatagacatgttggctgctgagagacaggttagagcctgcccccttaggagaaggttataacgtggtggttatttctctaayagaggtacttggaaggctccatcgcccctgaagacaaaggaagctgctcattgctgcctgggcctccatttgccagagagttacacatcgaaattgtgtc

SEQ ID NO: 143195 - DNA, 201 bp, Homo sapiens
atgccttagaaccaagtaccccagaggccctggttaaaagaagccacatttgcggctaggtgctgtggctcacgtctgtaatcccagcactttgggaggcygaggtgggcggatcatgaggtcaggagattgagagcatcctggctaacatggtgaaaccccgtctctactaaaaatacaaaaaaaaaattagccgagtgt

SEQ ID NO: 143196 - DNA, 201 bp, Homo sapiens
cattagcagtcattccctgtagcttccctcataggcaatggcaactgctgatctgctgaatagaatcatataatatgtgagaaatgtttagtttttaaagytacacagataattccaatgtgcagccagaatacagaaccattattcatcagatggcattattaaggactccgcctgcaatgagattttgtggattattga

SEQ ID NO: 143197 - DNA, 201 bp, Homo sapiens
atgtcctacacaaggccaccaggccactcctttctgtaagccaattcccaggctcctttcctgggataacctctgtcctccagggctggctctggaggaakaatctccagcaggggcatctgtttctgagactgcccttccccttggggaactcactggccatcctgcactttactgccctggccctgaaggacacaactc

SEQ ID NO: 143198 - DNA, 201 bp, Homo sapiens
gagatagggtttcgccatgttgaccaggctgggctcgaactcttgagctcaagtgatctgcctgccttggcctcccaaagtgctgagattacaggtgtgcrccactcacccccagcctgtgtacatttttttggagagaaaattcacctgtccttcagttcccaaacaagtgtatgactgaagaaaggttaagaaccagtc

SEQ ID NO: 143199 - DNA, 201 bp, Homo sapiens
ggctcctttcctgggataacctctgtcctccagggctggctctggaggaagaatctccagcaggggcatctgtttctgagactgcccttccccttggggarctcactggccatcctgcactttactgccctggccctgaaggacacaactcctcataccagtggcccaggtgtggacgcagatccccacctcagtgccacc

SEQ ID NO: 143200 - DNA, 201 bp, Homo sapiens
acttggctagggtgcaggtcctagaacctcgctgggacctctctgatagactgggacccggctctggaccgctgggagagcccctcgctgacggactggckcttgtccctgccactttggcttttaatcttggctgtgaccccctggaaatgggagagctcagaattcaggtaggataaaggactggggtcaggagtgctt

SEQ ID NO: 143201 - DNA, 201 bp, Homo sapiens
gggctgggtgaggatgcccgtgtgatggctgtgctgcgtcacctcctcctcaatgaggaccccctcaacaggtacttatacagagctgggcctctcaaagytgggggggccggctgggcgcggtggctcacacttataatcccagcacattgggaggccgaggcaggtggatcacctgccttgatcaggagttcaagacca

SEQ ID NO: 143202 - DNA, 201 bp, Homo sapiens
atgaaaggttggagtgagaaagagcagggttgtgggaggagtaagccctgggagagggtgggggggtgggcagcatgggagcctgatccttctgacataawcacaatgcatgcaggaactgaaaaagactatattgtttacccttccgtctgtggaacccacatccctgcaccccagctgtagtctgctctagaggctggc

SEQ ID NO: 143203 - DNA, 201 bp, Homo sapiens
tgacatctaggagaccctgagcaggaagccaccttcgcagggctctcccctgcctgggcatagaccacagcctccccaccttgtcatctccagggctggarccaggtagctcagcactgatgctcaccatggaggacttgctgcaggctgccgcccggctgcaaccctcagtcagtgagcaggagctgctccggtacaagc

SEQ ID NO: 143204 - DNA, 201 bp, Homo sapiens
tcaatacatgctcatagcaaatgcctttgttttcattttcagtatctaagcttattggccctaagtaaatcttaggttaggtagagctcagttcccagggrcattcaagattcataaagaagtgatatttttcccagctaaaatatttttcttcttaccaggttctctacttaaaagacaatgactactgatgaaggtgcc

SEQ ID NO: 143205 - DNA, 201 bp, Homo sapiens
gaaaaacaggcttgagagaaacagcctagtggagaggtttgcagagggagataaggcatggccttaactttgtgtgggttcaccttgtatttctaaagatkcactttgtagcagtgcttaccagagtacgttccttactgtgtttttgcggctcctctctcttgagcaacattgttcaagctacagcttggtcatgatgga

SEQ ID NO: 143206 - DNA, 201 bp, Homo sapiens
gtcttgctgtgttgcccaggctggtgtcaaattcctggactcaagcagtcctcccacctcagcctcccaaagtgctgggccgatcaacagggaatcttttrtgatagccttcaaaaaaaataatttatttatttgtatgtagcactctgtcatcttgtagcccatactttctagctgagtatgtagtatgaaaaactggaa

SEQ ID NO: 143207 - DNA, 201 bp, Homo sapiens
tgttggtatgttggagaattatgtgaagtgcattctctgtaatatgagactgctgcatatgcattgcgtagtactacatatatatgtagaaaacccctacrtgctatatatgtgtgtgcgtatgcatactgtgtgtatagaaaaccccctacatgctatatatgtgtgtgtgtatgcatgctgtgtgtgtgtatagaaaac

SEQ ID NO: 143208 - DNA, 201 bp, Homo sapiens
tacagatgtgagccatcccgcctggcctttttttatttttattttttgagatggagtttcactcttatcctccaggctggagtgcaatggcacaatctccrctcactgcaacctccgtctccagggttcaagcgattctcctgtctcagccacctgaatagctggaattacaggtgcccgccaccatgcccagccagtttt

SEQ ID NO: 143209 - DNA, 201 bp, Homo sapiens
gtgagccatcccgcctggcctttttttatttttattttttgagatggagtttcactcttatcctccaggctggagtgcaatggcacaatctccgctcactrcaacctccgtctccagggttcaagcgattctcctgtctcagccacctgaatagctggaattacaggtgcccgccaccatgcccagccagtttttgtattt

SEQ ID NO: 143210 - DNA, 201 bp, Homo sapiens
ccagcctgggtgacagagtgagaccctgtctcaaaataaataaataaataggctgggctcggtggctctcacctgtaatcccaacactttgggaggccgakgggggcggatcatgaggtcaggagattgagaccatcctggctaacacggtgaaaccccgtctctactaaaaatacaaaaaattagccgggcgtggtggtg

SEQ ID NO: 143211 - DNA, 201 bp, Homo sapiens
caggagttcgaggctatagcgtgctatggttacaccagtgaatagccagtgcactctagcctaggtaccatagtgagaccttgtctccttaaaaaaaaaargtaaagagttcatttaaacagaaaacaagaatagctgagtttctttcttttaaagtatatactattttcaacccatatttcatttctacgagtctggcaa

SEQ ID NO: 143212 - DNA, 201 bp, Homo sapiens
gccatggtttttgttctgttttgttttggtaggaatttttaagataacattaaaaagaataagtggagctataggagctaggctcatctgcatctgttacygcaatcagggcccctactgtggcaatcagcagtctttccgtggctccaagtggtgtgtgagttcttgtcagcagtctcgtagaacttttcacatcagtgt

SEQ ID NO: 143213 - DNA, 201 bp, Homo sapiens
ttatgttgcccaggctggtcttgagctcctgggttcaagtgatcttcccatctcagcttcctgagtagctgggattttctttttaaattaattaattaaayttttgagagagggcatctcattatgttgctcaggcaagtcttgaaatcctggcctcaagcaatcctcccacctcagccttctgagtagctgggattatag

SEQ ID NO: 143214 - DNA, 201 bp, Homo sapiens
aggctgagacaggagaattgtttgaacccaggaagtggaggctgcagtgagcagatatcacgccactgcactccagcctgggtgagacagagcaagactgygtctcaaaaaagtctaactcatcaagaaaaaatagatatctgtatgcattttttctattttgtcttaaaatatgagaaaaagcctcttattttaatatga

SEQ ID NO: 143215 - DNA, 201 bp, Homo sapiens
aaatgccctatgtgaaggaactattaagaagtctaatacctgttttttgtgttttgttttgttttaccatggccttctaccattctgattattcagaacttattgaaatgttaagatctaggtttttgtcctccctggctcttcttttctttccctatacaatatattaggagataatcagaaaagttaagttaatcaatg

SEQ ID NO: 143216 - DNA, 201 bp, Homo sapiens
atgtttattgatggttactaagtgccaaacactagagctagattctcattttgtcttcataacttcaaggttttttttaagagttgagtctcgttatgttkcccaggctggtcttgagctcctgggttcaagtgatcttcccatctcagcttcctgagtagctgggattttctttttaaattaattaattaaatttttgag

SEQ ID NO: 143217 - DNA, 201 bp, Homo sapiens
aattgtttgaacccaggaagtggaggctgcagtgagcagatatcacgccactgcactccagcctgggtgagacagagcaagactgcgtctcaaaaaagtcyaactcatcaagaaaaaatagatatctgtatgcattttttctattttgtcttaaaatatgagaaaaagcctcttattttaatatgaaattactctgggaaa

SEQ ID NO: 143218 - DNA, 201 bp, Homo sapiens
ctgttttgagaccagagctagatgggaaattaaagaattggatgatgttttatttacatgcctgatgacatcaatacatgctcatagcaaatgcctttgtwttcattttcagtatctaagcttattggccctaagtaaatcttaggttaggtagagctcagttcccaggggcattcaagattcataaagaagtgatatttt

SEQ ID NO: 143219 - DNA, 201 bp, Homo sapiens
agattagggccagattgtgaagggccttgaatgccacatggaagaacattctgtaggtattttgggcaggagatgaaaaatgaccctacagaaggcccaawaatgatgataaatggttaaatatgtttaagttaccaatctatgctaatcttttaagaaatgttatctcactgtaactatgaatagtgtactgtgtccatt

SEQ ID NO: 143220 - DNA, 201 bp, Homo sapiens
ttttaaacctaacaggcgcatagtcttatgaatctcttacagacaacaaatcgagagaagagctaaggaagtacgtaaaagggcaaaatggcctacaaatrgagggtcaaggttggtatgacagaagtaggatttgagagaggtggatgttttggaaacaagaaagggagtgaccagaagaatgactatgggaaagcactg

SEQ ID NO: 143221 - DNA, 201 bp, Homo sapiens
caatacagtaatttacataatatacatagggaattggtagatatggctttaaaatgacttctcatttgggggacctgatagtttagttatgttaactgaartttttagtacactgttgataaaatattaagtgtattctcatttttctgttatgtctcaggtgtttgctgactagcactttggagagtgtatgcttatctg

SEQ ID NO: 143222 - DNA, 201 bp, Homo sapiens
gaacaatggtatggtatggtattaaaagacaatgaggggaatagtacactaacttcagacactttctaagtgctgtagatcttttaaaatccatcatagtyttgctgacttctttagtgatggtttgagttttaattattcaattatgctgccaaaagtactgcaggttgtcaagtatcatttatccaaaatgcttgggac

SEQ ID NO: 143223 - DNA, 201 bp, Homo sapiens
ataccaaaatgtccgaagtctatctaataatacttctagaagtagaggacagagacatcaaaggaaaagaaataatgctagaaaatttttctggagattcygcaaagacttgtcttcagcagttaagggccagaatatcaaggcccctgcaggaattaaggaaagaagacaagtaccttgacatatcctttcgatgggtct

SEQ ID NO: 143224 - DNA, 201 bp, Homo sapiens
taatatgagactgctgcatatgcattgcgtagtactacatatatatgtagaaaacccctacgtgctatatatgtgtgtgcgtatgcatactgtgtgtataraaaaccccctacatgctatatatgtgtgtgtgtatgcatgctgtgtgtgtgtatagaaaacccctacatgctaagcatgttttcagtgcaggcagtgaat

SEQ ID NO: 143225 - DNA, 201 bp, Homo sapiens
atgagataccatttttacttgaaagggcaaatctgattatgcagacttgattcagtatttggcaggtgtttttctgagaatgaatggagtaagtctgtcayttcaaggaaaaacaactgacaatgttttttgccattaagttttcaagtaaaaattatagtttaggagaactcctatttgccactgtgggcttatttgcca

SEQ ID NO: 143226 - DNA, 201 bp, Homo sapiens
accaactccccccgcccgccccccgggcccctgcccgagtcagagtctcactctgtcacccagactgtaatgcagtcgtgctaacatggctcactgcagcyttgacttctctggatcaagtgatcctcccacctcagcctcctgagtagctaggacaagcacactaccacactgggctaattttttaaaattttttgtaaa

SEQ ID NO: 143227 - DNA, 201 bp, Homo sapiens
tgctcatgaacgagtttgagtcagccaagggtgactttgagaaagtgctggaagtaaacccccagaataaggctgcaagactgcagatctccatgtgccaraaaaaggccaaggagcacaacgagcgggaccgcaggatatacgccaacatgttcaagaagtttgcagagcaggatgccaaggtgtgtgcagagcctgatg

SEQ ID NO: 143228 - DNA, 201 bp, Homo sapiens
gtgggttcaccttgtatttctaaagattcactttgtagcagtgcttaccagagtacgttccttactgtgtttttgcggctcctctctcttgagcaacattrttcaagctacagcttggtcatgatggaaagtgagttcttcaaacagtatgaagaagcactggcctagcagtaaattggcactgacacacaatttcaacag

SEQ ID NO: 143229 - DNA, 201 bp, Homo sapiens
ttttcctgaaaagattatctgatgcattctgaatattaccaggatgctgagttttaatatctcttgtgccagcagtagcaagtaagaatttttgttttgtrtaactttgcttatgtgaaagccttctgtgcctggatctcttctgaatatatgtgaattgctattatgtgctaagtcaaattttggggacttgcagctata

SEQ ID NO: 143230 - DNA, 201 bp, Homo sapiens
cctgtatcacaggcatgtcctcttagacctgctctatggtttttctcttactcagactccttgggtgagggttggagtatttgtggggagagacaactcgrcagtgagatgtacgcgctgcttgggctgtggtaaatcctagtaacatggtcttaacactgttggtcaggcattgaatttaatgtcctaataggtctggct

SEQ ID NO: 143231 - DNA, 201 bp, Homo sapiens
gctgggattacaagtgtaagccaccacacccagccagcaatattttttaacaaaattttagtaaattgaatccaacaacatataaaaatgataaaatacartgaccaaatagggtttattccaggtatccaaggttggtttaacatttgaaaaccaatgtcatgtaccacattagcaagagaaagcatatgatcagctcaa

SEQ ID NO: 143232 - DNA, 201 bp, Homo sapiens
ctcggaccacaagaaaaaggaaatcctgtttaacatgagatcaatctttcagatcttttcaggcataaaagttgtcaataggttttcataaatttctaggyataaaagtttatgagttttatggaaataatttagcatatttagaaaggaacattatttttgttcaaggtgttggtatgttggagaattatgtgaagtgca

SEQ ID NO: 143233 - DNA, 201 bp, Homo sapiens
atgtcttgttttccacctcagagttttgcagattttaaaaactttttcttgtcatcccagcatcttcctggggagaggaagttgatgacttagtcctgtcrttcaacctttttgaggccaaatagggtaaaatcatattaaggggaataatcctgtattcaggttcatcctttagtatataatggtaacatttggatagtc

SEQ ID NO: 143234 - DNA, 201 bp, Homo sapiens
tatcaaagttgttgtaaaagacattatttcattccttttttatggctgagtagtattccgttgtgtgtgtatgccatgttttctttactcatttaacttayatatttttcaacaaaaacataattctttgaagaatgacagatgtctgatatcaatcaacatggataaaaggactaacttcttccatgtaataaacatgtt

SEQ ID NO: 143235 - DNA, 201 bp, Homo sapiens
tcacttgaacccgggaggcagaggttgtggtgagccaagatcacaccattgcactccagcctggacaacaagagcgaaactccgtctcaaaaaaaaaaaaataataataataataataaaagtagaggatagcaggggctgtgacaccaggaacacacactcgttatcttttgaatagagagaattttagttacccattta

SEQ ID NO: 143236 - DNA, 201 bp, Homo sapiens
cttgaacccaggaggtggaggttgccgtgagccgagatcatgccactgcactccagcctgagagacagagcaagactccgtctcagaggaaaaaaaaaaawatatatatatatatatataaaaatatatatatatataaaaatatatatataaatatatacacacacacacatacacacacatacttatattccaggcatg

SEQ ID NO: 143237 - DNA, 201 bp, Homo sapiens
cgcttgaacccaggaggtggaggttgccgtgagccgagatcatgccactgcactccagcctgagagacagagcaagactccgtctcagaggaaaaaaaaawaaatatatatatatatatataaaaatatatatatatataaaaatatatatataaatatatacacacacacacatacacacacatacttatattccaggca

SEQ ID NO: 143238 - DNA, 201 bp, Homo sapiens
ttggtgcctcccttgatacagccccacattccccacaggcagattttctcatcctcagcactgttgacactttgggcttgctaatccttggtcatagggggctgtcacgtgcattgtagaatatccagcagtattcctggcctcttcccaccagataccagtagcacccccatagttgtgacaacccataatatttctaga

SEQ ID NO: 143239 - DNA, 201 bp, Homo sapiens
actcccagattattctagtttgcaggcaaggactgaaaactactagactacggtctgactgtgactttttctcccaagctaaaaccagtaaggccaggttytaaaataaaatagaaaaataataaaataaatttaaaaataaataataaaacaaaatgtgcctcaaaagactccaagtgttaggacttcgactagggaaaa

SEQ ID NO: 143240 - DNA, 201 bp, Homo sapiens
atatatctcaaagatagtcttagctgggcacagtggctcatgcctgtaattccagcactttgggaggccgaggcaggaggatctcttgagcttaggaattygagaccagccaggacagcatagtgaggccccatctctactaaaaagcatcaagagaattagtcaagtgtggtgtcacgtccctgtagtcccagctacttg

SEQ ID NO: 143241 - DNA, 201 bp, Homo sapiens
gcagcagtcactcatattagccaggagagggggatgtttggtattttgtgaaaatgctcagtgaccttgtttttttcctctgggcttagacaaaaaaaaawttttttttcttttttgaaatggagctggggtgcagtggcgtgatctcagctcactgcaacctccagctcccaggttcaagcaattcttctgcctcagcct

SEQ ID NO: 143242 - DNA, 201 bp, Homo sapiens
agcagcagtcactcatattagccaggagagggggatgtttggtattttgtgaaaatgctcagtgaccttgtttttttcctctgggcttagacaaaaaaaaaattttttttcttttttgaaatggagctggggtgcagtggcgtgatctcagctcactgcaacctccagctcccaggttcaagcaattcttctgcctcagcc

SEQ ID NO: 143243 - DNA, 201 bp, Homo sapiens
ttttggcatgtaatgaacaatatttgcataattgtaatccagtgctctaaaatgatcatacccacccacccaccaaaatctacaaacaactgggaaccatrgttggtggctgcaaatatattggtataaattacactgtttgtgccaggtgcggtggctcatgtctgtgatcccagcactttgggaggctgaggcgggcgg

SEQ ID NO: 143244 - DNA, 201 bp, Homo sapiens
tgtgtacttaacgcaattattacagggtcctgagacgatatacatccttctcggctgacaggattaagagattaaagtaaagacaggcataggaaatcacmagggtattgattggggaagtgataagtgtccatgaaatctttacaatttatgtttagagagtgcagtaaagacaggcataagaaattacaaaaatattaa

SEQ ID NO: 143245 - DNA, 201 bp, Homo sapiens
gagcgctatgggagactggagtttatttcacctctgcaatctcgaccataagagacaggtatgccccgggggggccagttcagagacctacccctaggtgygcattctctttctcagggactttccatgctgagaaaaggaattcagtaatatttctcccatttgcttttgaaagaagagaaatatggctctgttctgccc

SEQ ID NO: 143246 - DNA, 201 bp, Homo sapiens
tgtgacattgtcaattgaccatatgcacatacatgtatacatgagatatagtatcttggggatggaacccagatgtaaacatgaaatttatttatgttcayatgtacttatacacacagcctgaaggtaatattatacaatattttttatttttattattttttttaagtcaataaatttttattcatggaattccatgtt

SEQ ID NO: 143247 - DNA, 201 bp, Homo sapiens
aacagtggtagtattggtgtaccaattttttttctgagttttttcccgaaattttgttataagtagagaaacataaaaaacattgtgttttagctcagagrttgactttggacaaatggtaattatgaaactgtttttgtctttagctgctttttgtcaattcatagcctggaaaagaaaaagaaggattaatttttatgc

SEQ ID NO: 143248 - DNA, 201 bp, Homo sapiens
ggagtgcagtggcacgatctcatctcactgcaacctccacctcccgggttcaagcaattctcctgcctcagcctcctgagtggctgggattacaggcacgygccaccatgccctgctaaattttgtatttttagtagagatgggttttcactgtgttggccaggctggtctcaaatctcgaactcctgacctcaagtgatc

SEQ ID NO: 143249 - DNA, 201 bp, Homo sapiens
ttttttgcacctaaccataagtctttgtccacaagttaaacaaaaacagtgtagtatacagtatttttaataattttgtgcattaaataaaatttgtgtaycttgaatcattagaaaacaagtattaggtgtggagtttttcacttgtggcatcatgttagaattcaaaaagtttcagagtttggagcatcttggatttcg

SEQ ID NO: 143250 - DNA, 201 bp, Homo sapiens
taacccaaaccataagttggggactgtccatagttccattgcctgatgtgatctgttgaagttaggtggaagatagtgtactatgacctctacagacccayagtgtgtattgtacagatttagatgaagaagatcagaatgttgggtttctaggtttttatctttttagaatgtttaagataaacatttatggccaggcac

SEQ ID NO: 143251 - DNA, 201 bp, Homo sapiens
tttaacaaaagaggtgacttcacatgtaccctaaaacttaaagtataataataacaaacaaaacaaaacacatgtaccctaaaacttaaagtataataatmcaaaaaaaagaagaaaaaaaacaacaaaagaggtgacttataactattccattccagttttatgatatgaaattgtagtcacacagaacatttaggggcc

SEQ ID NO: 143252 - DNA, 201 bp, Homo sapiens
acgttccttactgtgtttttgcggctcctctctcttgagcaacattgttcaagctacagcttggtcatgatggaaagtgagttcttcaaacagtatgaagmagcactggcctagcagtaaattggcactgacacacaatttcaacagccagagtgttttcagtttggagtatcttctagaattagctgctctttgttccaa

SEQ ID NO: 143253 - DNA, 201 bp, Homo sapiens
acatgttcaagaagtttgcagagcaggatgccaaggtgtgtgcagagcctgatgactgcaggtggatcaagagcctgaccatgcccctttgattttagggkacaggaacagctaaacaacccaagaggctcaagagcagggaaaacgatttccaatctaatctgaggctgctttggatccaaaggtcgagtagggcagttc

SEQ ID NO: 143254 - DNA, 201 bp, Homo sapiens
tcctttctaaaatatagaccatctattcctaggcccttggactggacagtgccaatgagaaaggcttgtataggaggggtgaagcccagctgctcatgaaygagtttgagtcagccaagggtgactttgagaaagtgctggaagtaaacccccagaataaggctgcaagactgcagatctccatgtgccagaaaaaggcca

SEQ ID NO: 143255 - DNA, 201 bp, Homo sapiens
ggggtttcaccatgttggtcaggctggtctcaaactcctgactttgtgatccacccgcctcggcctcccaaaatgctatatctgtagaatccgtagaatcygggattacaggcgtgagccaccacacccagcctagagtatggtatagactcgtgtaagacttcagtgaatcttatcactaccactttgtggtatgggata

SEQ ID NO: 143256 - DNA, 201 bp, Homo sapiens
gtgtagacaggagtgtttattttcattgtcttcccattttgttagattgtggacaagggaaaagttaaagcatattttggttaagtatttttaatagtctrggattctatccacctcctccataagggtttttactttagagaattataaagtaattttctaaagggagctgcttctcttggtgtttgaatcaaaagccaa

SEQ ID NO: 143257 - DNA, 201 bp, Homo sapiens
ggaaaagttaaagcatattttggttaagtatttttaatagtctgggattctatccacctcctccataagggtttttactttagagaattataaagtaattytctaaagggagctgcttctcttggtgtttgaatcaaaagccaagaatcgacttgaaaaaaattcttattctggtgggaaatttttattgtcatactttca

SEQ ID NO: 143258 - DNA, 201 bp, Homo sapiens
ataagaatatggaggaaggccgggcacagtggctcacacctgtaatgccagcactttgggaggccgaggcgggcggatcacctgaggttaggaattcaagmccagccctgaccaatatggtgaaaccccgtctctactaaaaaaaaaaaaaaaaaaaaaaattagctgggcatggtggcgcatgcctataatcccagctac

SEQ ID NO: 143259 - DNA, 201 bp, Homo sapiens
tgtcattgataacatcttatcaggagacagggttttgagatcaactagtctgaccaaagtttattaggcgggaatttcctcttcctaataagcctgggagygctatgggagactggagtttatttcacctctgcaatctcgaccataagagacaggtatgccccgggggggccagttcagagacctacccctaggtgcgca

SEQ ID NO: 143260 - DNA, 201 bp, Homo sapiens
tccgggggagacatcacacattggtaggatccgtgatgccccacaagccacaaaaaccagcaagtttttattagggattttcaaaaggggagggagtgtgygaatagttgtgggtgacagacatcaagtacttaacagggtaatagaatatcacaaagcaagtggaggcagggcgagatcacaggaccacaggacagaggc

SEQ ID NO: 143261 - DNA, 201 bp, Homo sapiens
tgcaagctccgcctcccgggttcacgccattcttctgcctcagcctcccgagtagctgggactacaggcgcccgccaccactcccggctagttttttttttgtatttttagtagagacagggtttcaccgtgttagacaggatggtctcgatctcctgaccttgtgatccacccacctcagcctcccaaagtgctaggatt

SEQ ID NO: 143262 - DNA, 201 bp, Homo sapiens
atgcagtattcccggctgaagatggaggaagggggccaccagccaagaaatgtgggcagcctctagaatgtggaaaaagccaggagatgagtgctctcccrgagcctccagaaggaatgcagccctgccaacaccttgattttagcccagtgagacccattctggacttgtgatctccagaactgtaagatgataaattgg

SEQ ID NO: 143263 - DNA, 201 bp, Homo sapiens
cctatacaatatattaggagataatcagaaaagttaagttaatcaatgcattagagagggaggaggagagaggatgaagaaatgaggcatgacaggggaartgcctgtccttcctatctcatctcagtgaaacaacacttttcatttccacccacacattttttgctcccaatgatagcaaaaggttttgttgttggtatt

SEQ ID NO: 143264 - DNA, 201 bp, Homo sapiens
actgttgtcaaaagtggaaataccatggctggggtgtgtttatgtattgcctctagagctgtagccactgacgaacaggaaactgaaagctaaaagttcargaaatgtattgtatttagactgtggaaaacatatatatgatactttactgaaaaccatgctcttttgaaaactgaaatatgtatgtatttaattagagat

SEQ ID NO: 143265 - DNA, 201 bp, Homo sapiens
acttattgaaatgttaagatctaggtttttgtcctccctggctcttcttttctttccctatacaatatattaggagataatcagaaaagttaagttaatcratgcattagagagggaggaggagagaggatgaagaaatgaggcatgacaggggaaatgcctgtccttcctatctcatctcagtgaaacaacacttttcat

SEQ ID NO: 143266 - DNA, 201 bp, Homo sapiens
ctaacacagtgaaaccccgtctctactaaaaatacaaaaaattagctgggtgtggtggcaggcgcctgtagtcccagctacttgggaggctgaggcaggakaatggagtgaacccgggaggcggagcttgcagtgagccgagattgcgccactgcactccagcctgggcgacagagggagaccacgtcttaaaacaaaaca

SEQ ID NO: 143267 - DNA, 201 bp, Homo sapiens
tgggctgggtgtggtggctcatgcctgtaatcccagcactttgggaggccgaggcgggcggatcacaaggtcaggagatcgagaccactctggctaacacrgtgaaaccccgtctctactaaaaatacaaaaaattagctgggtgtggtggcaggcgcctgtagtcccagctacttgggaggctgaggcaggagaatggag

SEQ ID NO: 143268 - DNA, 201 bp, Homo sapiens; identical to SEQ ID NO: 26265

SEQ ID NO: 143269 - DNA, 201 bp, Homo sapiens
aagtgttgaaaatgaggatgatcttgttatctaaaaaacatgaaatacctcagttaggaattaaccagtggtttaataatgatgagaaaaagaatcgttgrctgtcttttgtcttcatgtatatgtatttatactgcttttcactaaagactcatgacatgtttctgttagaagaaacaggatcctcaaaacgattcaagg

SEQ ID NO: 143270 - DNA, 201 bp, Homo sapiens
agatctaaaattatagttggagatttcaatacctcacctgtctctcaataattgatagaacaagtagacaaaaaataatttagaagatgtgaactacattrtcaactaacctaattgacatttacatagtattctacccaatacaagcagaatacacattcttttcagttgcacacagcacaggacatttaataagataga

SEQ ID NO: 143271 - DNA, 201 bp, Homo sapiens
gctacttgggaggctgaggtgggaggatcacttgagcctgggaggttgaggctgcagtgagcggtgattaagccattgtactccagcctggacaacagagygagaccctgccttaaaaaaaaaaaaaaagatacaattactggaaaaatgaaaatgatgtattttcaaagtgaaataatgggtttttaagtaaacagtcac

SEQ ID NO: 143272 - DNA, 201 bp, Homo sapiens
ttgggaagaaggatgttcgagggatgtagcctggccctcattcacacccaggccctccagctggaacaggtctgccccatcttcatcaccagaaaatccayaccagggcttcctttctacaggcagagctcgtttcttacatcacccacttgaagtcctgtatcacaggcatgtcctcttagacctgctctatggtttttc

SEQ ID NO: 143273 - DNA, 201 bp, Homo sapiens
tccagttgttggcgtacctcctttccctctccaaatctcactgaaatgatagatggagggaacaaagattttcaaaagaagaagaagagatcaataatagygctggaaaggagaggaatgtaagagtggatcagaaattatggagaatttctggaatatgtaaagttgatgaagttgaaccaatggaaactagtctcagca

SEQ ID NO: 143274 - DNA, 201 bp, Homo sapiens
ggcgagccgagcgccgggacgccgcgggcgcggggcggattcgcccacctggcggggctgtgaaggggatggtggcggggtggccgcgctccgggtgtggrcgggcggtccccgccttcacctgccgcctcgggacaagcgttggggaaccgcatcgccgctgtcggccgcttgtggaggagtccgcgcagcgccgtctaa

SEQ ID NO: 143275 - DNA, 201 bp, Homo sapiens
atggtgccatctcggctcactgcaacctccgcctcccgggttcaagcgattcttctgcctcagcctcccgagtagctgggattacaggcatgcgtcaccaygcctggctaatttcgtatttttagtaaagatggggtttctccatgttggtcaggctggtctcgaactcccgacctcaggtgatccgcccacctctgtctt

SEQ ID NO: 143276 - DNA, 201 bp, Homo sapiens
ctattgttacttaaaatgattttttaaaatacaatgtccaaaacataaccaggtatatggtgacatgagaatgaatcactaaaaactgataatggggcagsgagtggtggctcacacttataatcccagcactttggaaggccgaggcaagaggatcacttgaagccaggagttcgagaccagcctggtctctgcaaatag

SEQ ID NO: 143277 - DNA, 201 bp, Homo sapiens
agaacactaaaattccactactcaaaataatttgtacttcttatagtagtttgagaacctacattttatgcttaatttagtatttacttctagtctttttktttttgagtcggggtcttgctttattgcccaggctggagtgctgtggtgtcatcatggctcactgcagacttcccaggctcaagagatcctcctgcccaa

SEQ ID NO: 143278 - DNA, 201 bp, Homo sapiens
tcattcttcagtttttctcatttctcaggcctgggctaggggtaattcaattaaattattaactgcaggaattagatttgaagctggtttctggactataytgatattgagagtgatattaccaggtcatagaatcatagaattttagagcttcattgagatcatgtagttcaaaagtagaataagttagatttgaatttt

SEQ ID NO: 143279 - DNA, 201 bp, Homo sapiens
tccatctagatttgtgtaagaacattctaagatgttcccacagtgatgagaatacctgatgacacatctctcagaatgtatccccatccttaagtgaagcrtgactgtatttgaaaaagtttaaatttgaatttattttttaaatgttttccaattcagaatgaactttcaatttgctacaagttaattttatctagagca

SEQ ID NO: 143280 - DNA, 201 bp, Homo sapiens
cagttgcctacaatattcagtacaataacatgctatacagatttatagcctaggagcaatatgctataccacttagccgaggttatagtaggctgttccayctagatttgtgtaagaacattctaagatgttcccacagtgatgagaatacctgatgacacatctctcagaatgtatccccatccttaagtgaagcatgac

SEQ ID NO: 143281 - DNA, 201 bp, Homo sapiens
tgggtgtggtggcacacacctgtaatcccagctacttcggaggctgagacaggagaattgtttgaacccaggaagtggaggctgcagtgagcagatatcaygccactgcactccagcctgggtgagacagagcaagactgcgtctcaaaaaagtctaactcatcaagaaaaaatagatatctgtatgcattttttctattt

SEQ ID NO: 143282 - DNA, 201 bp, Homo sapiens
ctgggcgtcctcatgttctcggtcaccttgtggcccttgttgaggcccatggccatagggcagcacagagccatggccgctgctctccaatggtggccgtrgcagaaggaagcccacatttttatccaatccaccattgatggacacctaggttgactccgtgtctttgctattaagaatataactgtgcttaagagtaag

SEQ ID NO: 143283 - DNA, 201 bp, Homo sapiens
cagtaactccatggtgcaccgctcgtatggggtgaagccacacagctctcagatcatgtccggcacgaacttggtatatttggtcaggtgcctgcagcagyggctgtgcctgggcgtcctcatgttctcggtcaccttgtggcccttgttgaggcccatggccatagggcagcacagagccatggccgctgctctccaatg

SEQ ID NO: 143284 - DNA, 201 bp, Homo sapiens
ctgtcaagctattctttatttcggagagagggcagggcagagtgctcagtccttggcagcggcttttgtcatggtggccaggacattgctcagctcctccygcttcctcttggtgcatccccacccttgtcttgatgaacttgagggcccatttgtccttggagaccttcagtaactccatggtgcaccgctcgtatgggg

SEQ ID NO: 143285 - DNA, 201 bp, Homo sapiens
taaacaatttgtgtagaagtccacagacatctttcaaccaccttttaggctgcatatggattgccaagtcagcatatgaggaattaaagacattgtttttwaaaaaaaaaaatcatttagatgcacttttttgtgtgttctttaaataaatccaaaaaaaatgtgacttcccattgtttttggttttgcttaagtgatttt

SEQ ID NO: 143286 - DNA, 201 bp, Homo sapiens
gggaagacatcacacatcagcaggttccgtgatgccccctgagccgtaaaaccagcaagtttttattagtgattttcaataggggagggagtgtacgaatmgggtgtgggtcacagagatcacatgcttcacaaggtaataagatatcacaaggcaaatggaggcagggtgagatcacaggaccacaggactggggtgaaa

SEQ ID NO: 143287 - DNA, 201 bp, Homo sapiens
tcactctcttttcttctctgcttttcctcttcaatatttttccacttggcctctagatgtggctggctgtagctttatttcaatcttctgttcttttaacyttttgctcattccttaggctatctccttatcccttcttgacttcagctgccatatatgctaatatataatctttagatctttatcttcagcctaacaacg

SEQ ID NO: 143288 - DNA, 201 bp, Homo sapiens
gttccgtgatgccccctgagccgtaaaaccagcaagtttttattagtgattttcaataggggagggagtgtacgaatagggtgtgggtcacagagatcacrtgcttcacaaggtaataagatatcacaaggcaaatggaggcagggtgagatcacaggaccacaggactggggtgaaattaaaattgctaatgaagtttcg

SEQ ID NO: 143289 - DNA, 201 bp, Homo sapiens
ctcattccttaggctatctccttatcccttcttgacttcagctgccatatatgctaatatataatctttagatctttatcttcagcctaacaacgtatgtrtgctagagcaactaacactaagggtctcacagacaaattctcaaaccttaagaggttagcataataacaatagaagatatgattaagtagcctttctcca

SEQ ID NO: 143290 - DNA, 201 bp, Homo sapiens
ccttatcccttcttgacttcagctgccatatatgctaatatataatctttagatctttatcttcagcctaacaacgtatgtatgctagagcaactaacackaagggtctcacagacaaattctcaaaccttaagaggttagcataataacaatagaagatatgattaagtagcctttctccaactttaacttatacccctg

SEQ ID NO: 143291 - DNA, 201 bp, Homo sapiens
gtgtacgaatagggtgtgggtcacagagatcacatgcttcacaaggtaataagatatcacaaggcaaatggaggcagggtgagatcacaggaccacaggaytggggtgaaattaaaattgctaatgaagtttcgggcacgcattgtcattgataacatcttataaggagacaggttttgggagcagacaaccagtctgacc

SEQ ID NO: 143292 - DNA, 201 bp, Homo sapiens
ctctgcaggcagagaagcagcccttatcttcctctgcttattttcactttccggtgtactacacacatttttattttcctgtccttctgtctgttcctcaytagaattttttttgctcttcttaactatttgccggaaaatatcttatctcttagtaaaggtaatgtgaaattgctttctttgaaagaatttagtccagga

SEQ ID NO: 143293 - DNA, 201 bp, Homo sapiens
gcttcacaaggtaataagatatcacaaggcaaatggaggcagggtgagatcacaggaccacaggactggggtgaaattaaaattgctaatgaagtttcggrcacgcattgtcattgataacatcttataaggagacaggttttgggagcagacaaccagtctgaccaaaatttattaggcaggaatttcctcgtcctaata

SEQ ID NO: 143294 - DNA, 201 bp, Homo sapiens
tcacaaggtaataagatatcacaaggcaaatggaggcagggtgagatcacaggaccacaggactggggtgaaattaaaattgctaatgaagtttcgggcaygcattgtcattgataacatcttataaggagacaggttttgggagcagacaaccagtctgaccaaaatttattaggcaggaatttcctcgtcctaataagc

SEQ ID NO: 143295 - DNA, 201 bp, Homo sapiens
agtgacattggaggagtatggagatatgaggtaagtttgaatggtcttatgtttttatgtatatgtgacttccacaactgagaaatagaaatataagaatygcagcactaatttatccttcaattatcagaataataataaatatttttactaatgtctgcacctgtgtgttgaatctcattctcttcttttcctcaaggt

SEQ ID NO: 143296 - DNA, 201 bp, Homo sapiens
taaaagacggccatcccccaaagcggccatttcagaggcctaccctcagggacacattctctttctcagggatgttccttgatgagaaaaagaattcagcratatttctcccatttgcttttgaaagaagagaaatatggctctgttccacccagctcaccggtggtcagagtttaaggttatctctctttttccctgaac

SEQ ID NO: 143297 - DNA, 201 bp, Homo sapiens
caaagcggccatttcagaggcctaccctcagggacacattctctttctcagggatgttccttgatgagaaaaagaattcagcgatatttctcccatttgcytttgaaagaagagaaatatggctctgttccacccagctcaccggtggtcagagtttaaggttatctctctttttccctgaacattgctgttatcctattc

SEQ ID NO: 143298 - DNA, 201 bp, Homo sapiens
cttacaaagatgatggaattatgagattaaagtaaagacaggcataggaaatcacgacggtattgattggggaagtgataagtgtccatgaaatcttcacratttatgttcagagactgcagtaaagacaggcatagaaattataaaagtattaatttggggaactaataaatgtccatgaaatcttcactatccacgttc

SEQ ID NO: 143299 - DNA, 201 bp, Homo sapiens
tgaggacagaaagtgaaagagagaccagatcaagaagggcctttaaatcttatgtttggactctgactttggactctgggcctcaggagtggcatgctccygccactttggctgctctgttaagaatagctgggagaagatggtagtggtggaagctaggagactggtgtggatgctcttgcactaacccaggtgagagat

SEQ ID NO: 143300 - DNA, 201 bp, Homo sapiens
gaaggaagactcatcaatcctggacagctgtgttccatgtttaaacatgtgttccctcctcagctggaggagccaacactagctttcactggcatccttcraacagtgggagccaccatttcctcttcagaggtccagagctgttgggctgtatgtgtatttaaaggtatgtgctgactttaggaatatttagaaaaggtt

SEQ ID NO: 143301 - DNA, 201 bp, Homo sapiens
tgcaataggtaaaataatgtccactttacacattacaaatttaactactaagaggttcatgcctaggttaaaagtcacattgactccaagggcaaagggtycattttggaataaaagagaaacattttctcctggagaaaagaagacggaggaaagatagatgaaaacacactaacttctaggtgttgaggaactcaccta

SEQ ID NO: 143302 - DNA, 201 bp, Homo sapiens
acataatatggggtcttttggggtcagcagctgagacttggaacatagaagtggtttagagtccatgtttaccatcttgaaaataaacttcaactatcttrggagaatgttaatcattgttccctttatcatgcttctttaaaccattctactcacttttcttacaggaaaatatcgtgttccaggattatggtggcagct

SEQ ID NO: 143303 - DNA, 201 bp, Homo sapiens
ggagggaagcagaaatcctatgtctttgatgggattatggtgtgtagtggccttcatagccatcccgtattaccactccaggactttccaagtatgtcatrtagaatgctaaggcactgcttttatggggttctatcgttgttattgattttttttaaagttttcaactccgaaggtcaccttatttttacaataaatatt

SEQ ID NO: 143304 - DNA, 201 bp, Homo sapiens
ttaagagcttgagaatagagaaattgtaagaatggaattgttctctgaaaccatgtaaacatagaaatgtctaacaattatttcatttccaagtacaatayaaaacacaaaggccaatgtcatcttctgaagaataagttatataataatgatgggatttaaaaatactaatagaaacctggagttaaaatctcaaactat

SEQ ID NO: 143305 - DNA, 201 bp, Homo sapiens
acacactaacttctaggtgttgaggaactcacctaagaactttgttgttttcatacaaatgagaagaaaggttattttcagggaatgagaggggtgacatyggcaccaaggaaaggggaaataattgaagtagctgcagtaagataattgatagggagtctatcctatccatgggcaattgaacttgccaaacatagagtt

SEQ ID NO: 143306 - DNA, 201 bp, Homo sapiens
ttcactatgtgagaatcaaataactgtttccaagggaaagctaatgttttggagcaaattctgtagggaaacggggacacagcaaagactgaaccaccatyaggactgactaaggctgtgcagtgtcacaggaggagcaaatgaagcccatatgtgcagaccccaatattgtttaaaagatgaaatgctgcaaaatcaatc

SEQ ID NO: 143307 - DNA, 201 bp, Homo sapiens
atggtgagtgtcttcttctcttgtaggagaaggctgaaggtggcagggcaatcatctataaatgtgtcaccagcaatacttcaaaggaaatatcagcctakagtgattaccctttcccttcccatcttcccaactatttgcacaattccaaattgatggagtacctcagaatgtacatcaaacactttcatcttctgaagc

SEQ ID NO: 143308 - DNA, 201 bp, Homo sapiens
tggcagcttcacctgtcatttgacaccatcttccaactctgactccttccatacttagattctagggactcgattaacaaagtgctctagatactgtaatrttaatactataattagctgatggatgggatttatgtgtcaatttgttaatttctagtctccttgaattatttcatttttctggaatttggaacctaagtg

SEQ ID NO: 143309 - DNA, 201 bp, Homo sapiens
attctagggactcgattaacaaagtgctctagatactgtaatattaatactataattagctgatggatgggatttatgtgtcaatttgttaatttctagtmtccttgaattatttcatttttctggaatttggaacctaagtggggcatgaaagtggatgggcccactcatttaactcacatactggctacttatataata

SEQ ID NO: 143310 - DNA, 201 bp, Homo sapiens
tgggatttacgtgtcaatttgttaatttctaatcgtcttgcattatttagtttttctggaatttggaacctgagtgattgtatgatatgatgaaacactgytttgaagaaggttcaaagggctagtgggtgagatccagagggaggcctgggcagatttctggagctataagcaatgttaggtgtgtctgtatgtgtgagt

SEQ ID NO: 143311 - DNA, 201 bp, Homo sapiens
aggaaaatcaaagctacagaaaatattttgagatttagctttatttcatgtgtatgtatatgcatagcatgacaaatataaatagctatttgctggtgttwccatgcatcttaaaatagactgcaatgttattgctctgctatttggaagctcaagcaccctgaatactaggaatgatgcaggaatgatttccctgcacaa

SEQ ID NO: 143312 - DNA, 201 bp, Homo sapiens
acaggaaactgcttggagggatagaagttatcatgtgacacaaggcttctgattttttcctttttggtgtcagattgctgaaaaatcctcaagatacacayggagtgtactatgtagattacatggatgaaactgcctctgaaattggagcgaaacccaacctcctctcactcttcctgtgggatccaaagctagctatgg

SEQ ID NO: 143313 - DNA, 201 bp, Homo sapiens
atggtgtgtagtggccttcatagccatcccgtattaccactccaggactttccaagtatgtcatatagaatgctaaggcactgcttttatggggttctatygttgttattgattttttttaaagttttcaactccgaaggtcaccttatttttacaataaatattaccttttctgactgtgaaatcatgcatgctctttga

SEQ ID NO: 143314 - DNA, 201 bp, Homo sapiens
aattgttgttattggctttggaaattccagagctgatttggccattgagctcagccatgtagctgcacaggtttggcccctaaaattctctgcccctcaaygcaacctgcccacttctctgagcattgcatgaaatgtgtatagcatctaccccatcacacacacagtctttattgttaattatctcttcacacctgtttt

SEQ ID NO: 143315 - DNA, 201 bp, Homo sapiens
tgcatgctctttgaaagtccgttcaataatagataatgttttaaaattgaaaataaaaattactagtatctcatcagcatctgggctttttaataggaaartcccacattttaacacaattggaaggttgttttgtgttggtaatagtttggagtaaataggaaaatcaaagctacagaaaatattttgagatttagcttt

SEQ ID NO: 143316 - DNA, 201 bp, Homo sapiens
acaagtttaactccctgtttaaaggagaaccagagtatatattctgataatggaactacaaacatgctcatttgtgccttgtcagttgggtgagactcaascctttagtccatccttcttcgtgggctttgagggctttgaggtctgctaatcaaaatgtgaactcatcaggcatgtgacaaagttgtatgtttgcatctg

SEQ ID NO: 143317 - DNA, 201 bp, Homo sapiens
ccagagctgtccctggattcatcttccccatgcctgtgctacctcactcatgatgttctttaccaaacggacctttggggtgtctatattttcctgaaacygcatcttctcaataagaaagccatgttgaaatccagaatttctttcctaggattgaacaaactactttcagtgagtgacatgatggctgacataagaaag

SEQ ID NO: 143318 - DNA, 201 bp, Homo sapiens
agtggattaaacgctattaagagctgtctggaagagggactggagcccacctgttttgaaggaggcagtgacattggaggagtatggagatatgaggtaartttgaatggtcttatgtttttatgtatatgtgacttccacaactgagaaatagaaatataagaattgcagcactaatttatccttcaattatcagaataa

SEQ ID NO: 143319 - DNA, 201 bp, Homo sapiens
gatctgttacttcagtgtttgatggctacttatttaatcttcatgatccctgtgtgaatatgaaaaataaaaagtactctcgtaagttattaatgacaacrtattggcaagtaattctttagagcactacagggatgtatgtagcatagaaagtgagagcagcagggaaaaaaaaaaagatctcaacatgaagtagaggtg

SEQ ID NO: 143320 - DNA, 201 bp, Homo sapiens
gatgccgtcatctttgccacaggctacaccttgtctttccctttcttgaaggaagactcatcaatcctggacagctgtgttccatgtttaaacatgtgttscctcctcagctggaggagccaacactagctttcactggcatccttcgaacagtgggagccaccatttcctcttcagaggtccagagctgttgggctgtat

SEQ ID NO: 143321 - DNA, 201 bp, Homo sapiens
ggagaccatcctggtcaacatggtgaaaccccgtctctactaaaaatacgaaaattagctgggcgtggtggtgcgcacctgtagtcccagctacttgggargctgaggcaggagaatcgcttgaactcggaaggcagagcttgcagtgagccgagattgtgccactgcactccagcctggcgacagagcgactctccatct

SEQ ID NO: 143322 - DNA, 201 bp, Homo sapiens; identical to SEQ ID NO: 26277

SEQ ID NO: 143323 - DNA, 201 bp, Homo sapiens
aatgtccatgaaatcttcactatccacgttcttctgccatggcttcagctggtccctctgtttggtgtccctgacttcttgcaacattattttgtcctcawaacaatactgcgactgcaaggacaatgcaaagacttatttacagacagagaaatagattcagagaaatgattttatgtcaggttctttttcctagccaca

SEQ ID NO: 143324 - DNA, 201 bp, Homo sapiens
ctcagaatgtacatcaaacactttcatcttctgaagcacatacagtttatggtaaatgaggtagagggcacttagcacatgtggaaccatcttgggagggkggaaaaccaggccagaacaaagtacagcaaggcctccattcagtttagggggtgacagggttcaccttacatacatctctagtgaaatcagcaggagctt

SEQ ID NO: 143325 - DNA, 201 bp, Homo sapiens
cagagctgtccctggattcatcttccccatgcctgtgctacctcactcatgatgttctttaccaaacggacctttggggtgtctatattttcctgaaaccrcatcttctcaataagaaagccatgttgaaatccagaatttctttcctaggattgaacaaactactttcagtgagtgacatgatggctgacataagaaaga

SEQ ID NO: 143326 - DNA, 201 bp, Homo sapiens
aagcattttatgtgaattattttatctggggaaattcagccagatatcgggtgaaattcactcctgatatttcacataggttcttttctattttccctacrtgtcagctggtctgagaaataaagggacagagtacaaaagacagaaattttaaagctgggtgtccggggaagacatcacacatcagcaggttccgtgatg

SEQ ID NO: 143327 - DNA, 201 bp, Homo sapiens
ttcccaactatttgcacaattccaaattgatggagtacctcagaatgtacatcaaacactttcatcttctgaagcacatacagtttatggtaaatgaggtmgagggcacttagcacatgtggaaccatcttgggagggtggaaaaccaggccagaacaaagtacagcaaggcctccattcagtttagggggtgacagggtt

SEQ ID NO: 143328 - DNA, 201 bp, Homo sapiens
aaaaaacttattttttaggaaaaaataagttcttacgtcctcttagctgcagatcttgtgggtgatgttggagcgtttggccccagtaggagaacagagcratagtgctagtaggaagggtgtacttggcccaggaagcaaaggaaacagctatacaaggatgaagcttggccagggaagacaagacagaggaaactgagt

SEQ ID NO: 143329 - DNA, 201 bp, Homo sapiens
ggtgtcagattgctgaaaaatcctcaagatacacacggagtgtactatgtagattacatggatgaaactgcctctgaaattggagcgaaacccaacctccyctcactcttcctgtgggatccaaagctagctatggaagttttctttggaccatgcacaccttaccagtactgccttcagaggccagggaagtgggctgga

SEQ ID NO: 143330 - DNA, 201 bp, Homo sapiens
gggtttcaaaaatcaacataccagaaaaccatttttttaatttctttattttccattgacatgacatttgccaccatctcccaactctgattcctccatasttagattctagggacatgatcaacaaagtgctctagatactgtaatactatgattagcagatagatgggatttacgtgtcaatttgttaatttctaatcg

SEQ ID NO: 143331 - DNA, 201 bp, Homo sapiens
atctcccaactctgattcctccatacttagattctagggacatgatcaacaaagtgctctagatactgtaatactatgattagcagatagatgggatttaygtgtcaatttgttaatttctaatcgtcttgcattatttagtttttctggaatttggaacctgagtgattgtatgatatgatgaaacactgctttgaagaa

SEQ ID NO: 143332 - DNA, 201 bp, Homo sapiens
aaagctacagaaaatattttgagatttagctttatttcatgtgtatgtatatgcatagcatgacaaatataaatagctatttgctggtgttaccatgcatyttaaaatagactgcaatgttattgctctgctatttggaagctcaagcaccctgaatactaggaatgatgcaggaatgatttccctgcacaagatctctct

SEQ ID NO: 143333 - DNA, 201 bp, Homo sapiens
ggatgatagagaaaaatacatggcaatacaaatctgattttatattaagaagtttcctgatgtcagaaacaatgccaggaaaaagaattgcagtgattggygctgaagtcagtggattaaacgctattaagagctgtctggaagagggactggagcccacctgttttgaaggaggcagtgacattggaggagtatggagat

SEQ ID NO: 143334 - DNA, 201 bp, Homo sapiens
gattgtgccagaccttcttaatggaaaattattctcaaccactagggttgggatgtaatttatttctattcaacaagtatgtgttgagaatctacaatgtraatgtcacagcgtgttttctaagatcaaagggcttacatcctaagaacagtcagttatccagtaactttgatttaagaaggttagccaagagttgcattt

SEQ ID NO: 143335 - DNA, 201 bp, Homo sapiens
atggaatggcagccacagcatacagttttaaatttatgatagccttataaatgtaaggcatagaaaaatgtaatatgaattgaaagattgttttatttccyaggattcctttaaggagtttaaggagttatttcctttaaggaattgggaagataaatcaatgtgagaaatgagttggcgaatcaccatagaatccaatta

SEQ ID NO: 143336 - DNA, 201 bp, Homo sapiens
tgccgtcatctttgccacaggctacaccttgtctttccctttcttgaaggaagactcatcaatcctggacagctgtgttccatgtttaaacatgtgttccytcctcagctggaggagccaacactagctttcactggcatccttcgaacagtgggagccaccatttcctcttcagaggtccagagctgttgggctgtatgt

SEQ ID NO: 143337 - DNA, 201 bp, Homo sapiens
gttccatgtttaaacatgtgttccctcctcagctggaggagccaacactagctttcactggcatccttcgaacagtgggagccaccatttcctcttcagargtccagagctgttgggctgtatgtgtatttaaaggtatgtgctgactttaggaatatttagaaaaggttgccatcaggtggtgtgatttcagagacattg

SEQ ID NO: 143338 - DNA, 201 bp, Homo sapiens
caaaggaaatatcagcctatagtgattaccctttcccttcccatcttcccaactatttgcacaattccaaattgatggagtacctcagaatgtacatcaawcactttcatcttctgaagcacatacagtttatggtaaatgaggtagagggcacttagcacatgtggaaccatcttgggagggtggaaaaccaggccagaa

SEQ ID NO: 143339 - DNA, 201 bp, Homo sapiens
ctggctgcatgatcttgacctgctacttgaccttaatttcctcatttgtaaaaatgggaagacttatatctactttgcaggatggtaagaattaacaattragcaccttgactttaggaggcattcagtaaatattgatcgaataaatagagattagccattgttgtaatccgttattattattctttattttaccattaa

SEQ ID NO: 143340 - DNA, 201 bp, Homo sapiens
atatagaatgctaaggcactgcttttatggggttctatcgttgttattgattttttttaaagttttcaactccgaaggtcaccttatttttacaataaatrttaccttttctgactgtgaaatcatgcatgctctttgaaagtccgttcaataatagataatgttttaaaattgaaaataaaaattactagtatctcatca

SEQ ID NO: 143341 - DNA, 201 bp, Homo sapiens
atgaccaatgctttagtaattttgttctttcccacagggatcaagaggttcaaaggccaatatattcacagttgggaatacaagaggccagataaatttckggagaagaaaattgttgttattggctttggaaattccagagctgatttggccattgagctcagccatgtagctgcacaggtttggcccctaaaattctct

SEQ ID NO: 143342 - DNA, 201 bp, Homo sapiens
cctaggtgagatctcaaattatcaacttttaaatttccccttaaccaagcatagtatcatgtatggaatatttaggggtgaaatggatacagaatggtccrtcatgaaaacttcagaaatttgtttaaagttcatggaatggcagccacagcatacagttttaaatttatgatagccttataaatgtaaggcatagaaaaa

SEQ ID NO: 143343 - DNA, 201 bp, Homo sapiens
atgaaaacagtttttgtctgcatctgaagcatacaattgtgtattctgaacactgaatctaaaaaaatacataatggagctagaaaaatcttctcagaaasacaatgaaaatgatgaaggtagactgatggtctgccgcatgatgacagtagaaatctgcagatatggtggggttgaggaaagatggaatgtggaattcac

SEQ ID NO: 143344 - DNA, 201 bp, Homo sapiens
ggctgtatgtgtatttaaaggtatgtgctgactttaggaatatttagaaaaggttgccatcaggtggtgtgatttcagagacattgcaaaagtcctttgcygtaaagcatctctgaagttaaaacctttacaatatctgaaattctgccacttgagatctgttacttcagtgtttgatggctacttatttaatcttcatga

SEQ ID NO: 143345 - DNA, 201 bp, Homo sapiens
ttttatgtgaattattttatctggggaaattcagccagatatcgggtgaaattcactcctgatatttcacataggttcttttctattttccctacgtgtcrgctggtctgagaaataaagggacagagtacaaaagacagaaattttaaagctgggtgtccggggaagacatcacacatcagcaggttccgtgatgccccc

SEQ ID NO: 143346 - DNA, 201 bp, Homo sapiens
agaacttacatttacttacatttcccaagcaaagtgggtgtgccataccacgcagggccatagaggagcaccatgtttggtcaggcggaagccagagcaasgcagagaattagaggaatcaatagcaaggatggcaaaatagaaagaagaaaatttcaggaagggaatggccaaatgtcaagtgtagtaaatcaataaata

SEQ ID NO: 143347 - DNA, 201 bp, Homo sapiens
cgggggcaggagggggttttgggggcagaaaggtgggagtggtgagcagctgggcaaccatgccggtgctgggggagttgccccaggagctgcaacgtcarctagctgagcagaggagtaagtgggcaacaggtgggacagccatggctgagtccgtggtacattcagctgtgatgggcttactgctcatgaccagtgagg

SEQ ID NO: 143348 - DNA, 201 bp, Homo sapiens
gttttattggtgaacgtgatccggggccttccaagtcccgccaatccagatgtaggagaggtagggttaggcgcgtgccgcgagaacagagtggacggagmgtaggagagaccgaaaaggctgggggtgggagtagcggatttgaagcacttgttggcctacagaggtgtggcaagcagagcacctcagaactcaggcgta

SEQ ID NO: 143349 - DNA, 201 bp, Homo sapiens
ccagagggagcttcatttaatgctcttcccatttccatcaaaagctagatggatcctggccctctgaatatgcctcttcccctcccctcctgacctctcgscggcggctacaggcggtgctgcagtgtctctccctcttgtcgccaggtggtcctagtggagagcagtgagcgtctgggaggctggattcgctccgttcga

SEQ ID NO: 143350 - DNA, 201 bp, Homo sapiens
cgcaggttgtccccggtctgcctgtccatatcgccccctttcccccaggtttccgcatgggccggaccgtggtcgtgctgggcggaggcatcagcggcttsgccgccagttaccacctgagccgggccccctgcccccctaaggtgagtgctccacttgtgccagagggagcttcatttaatgctcttcccatttccatca

SEQ ID NO: 143351 - DNA, 201 bp, Homo sapiens
tagagccctttccttctgacgcatgaatgtccttctctccagggatttggacatttggtgccatcttcagaagatccaggagtcctgggaatcgtgtatgmctcagttgctttccctgagcaggacgggagcccccctggcctcagagtgactgtgaggaggaggaaactttgcctagtggcatttccagagggctcctct

SEQ ID NO: 143352 - DNA, 201 bp, Homo sapiens
tcacacctgtaatcccagcattttgggaggccgaggtgggcagataacaaggtcaggagttcgagaccagcctggccaacatggtgaaaccccatctctaygaaaaatacaaaaattagccaggtgtggtggcttgcacctgtaatctcagctactcgggaggctaaggcaggagaatcgcttgaacccaggaggtggagg

SEQ ID NO: 143353 - DNA, 201 bp, Homo sapiens
gccctcttctcttcataccccaccccctcataattcccaaaactcattattgggagtgaaggccttcatttccatccgtcacagtgggaatgtcccccaayccaaaccctatcccaccctcattccctaccaaataggggctgtggaaatcagtcagtgtagattattttttcgctccttagtcctagtctcacccttaag

SEQ ID NO: 143354 - DNA, 201 bp, Homo sapiens
tctgcctgatgaacggctcaagaaactggagctgggacggggacggacctcaggccctcgtcccagaggcccccttcgagcagatcatggggttcccctgyctggctcaccacccccaacagtggctttgcctctcccatctcggaccaacttagcccgttccaagtctgtgagcagtggggacttgcgtccaatggggat

SEQ ID NO: 143355 - DNA, 201 bp, Homo sapiens; identical to SEQ ID NO: 26322

SEQ ID NO: 143356 - DNA, 201 bp, Homo sapiens
gaggactgacaactgtaatgggaatgccttctgagtcaggcctctgcctgatctctagtgctcagtgagctgctccctgctgaggctgcccctctggctcrtgccctgagtgccatcactgcagtgtctgtagctgtggtgaatctgcagtaccaaggagcccatctgcctgtccaggtatgataaagggacggagaggct

SEQ ID NO: 143357 - DNA, 201 bp, Homo sapiens
gagtggccgggatagaactcaaaaccggcggggcttctggagcgcaggttgtccccggtctgcctgtccatatcgccccctttcccccaggtttccgcatsggccggaccgtggtcgtgctgggcggaggcatcagcggcttggccgccagttaccacctgagccgggccccctgcccccctaaggtgagtgctccacttg

SEQ ID NO: 143358 - DNA, 201 bp, Homo sapiens
tgagtggccgggatagaactcaaaaccggcggggcttctggagcgcaggttgtccccggtctgcctgtccatatcgccccctttcccccaggtttccgcaygggccggaccgtggtcgtgctgggcggaggcatcagcggcttggccgccagttaccacctgagccgggccccctgcccccctaaggtgagtgctccactt

SEQ ID NO: 143359 - DNA, 201 bp, Homo sapiens
gcttctggagcgcaggttgtccccggtctgcctgtccatatcgccccctttcccccaggtttccgcatgggccggaccgtggtcgtgctgggcggaggcaycagcggcttggccgccagttaccacctgagccgggccccctgcccccctaaggtgagtgctccacttgtgccagagggagcttcatttaatgctcttccc

SEQ ID NO: 143360 - DNA, 201 bp, Homo sapiens
tgctgggaggttcctggttacagacactggaggctagtggctgtgtcttatctcaggagctgtttcaacagcgggcccaggaagcagctgctacacaattmggactgaaggagatgccgagccactgcttggtccatctacacaaggtaagttgggataaacttccctcagctctccactgaaggccttgaagacagagac

SEQ ID NO: 143361 - DNA, 201 bp, Homo sapiens
ggtggcgtctctagccatggacagtctctgccgtggagtgtttgcaggcaacagccgtgagctcagcatcaggtcctgctttcccagtctcttccaagctkagcaaacccatcgttccatattactgggcctgctgctgggggcaggtgaggggggattgattcagagggtgaaaatattaagtactgccaaagtgaggga

SEQ ID NO: 143362 - DNA, 201 bp, Homo sapiens
ggaggctggattcgctccgttcgaggccctaatggtgctatctttgagcttggacctcggggaattaggccagcgggagccctaggggcccggaccttgcycctggtgagaggcttgtgggatgtctaggagaggttgtggagggggcttccattggggaatagagtttaggggaggaagtatgtttggtgggtcagatct

SEQ ID NO: 143363 - DNA, 201 bp, Homo sapiens
tatgtcaggagcttccccctcactatgcctttctccatgcagggggctactccgcccttcaccccccttctccaaacctctgttttgggctgggctgaggkagctgaccaagccccggggcaaagagcctgatgagactgtgcacagttttgcccagcgccgccttggacctgaggtgacacttgcccagaggccccaaac

SEQ ID NO: 143364 - DNA, 201 bp, Homo sapiens
gagcaggtttctgagcttggcttggattcagaagtgctgcctgtccggggagaccacccagctgcccagaacaggttcctctacgtgggcggtgccctgcmtgccctacccactggcctcaggtaacaccagcacctccgctccttttactgtgccctcatcctcatatgccttccatttctttcttcttttctttttttt

SEQ ID NO: 143365 - DNA, 201 bp, Homo sapiens
ttcaccccccttctccaaacctctgttttgggctgggctgagggagctgaccaagccccggggcaaagagcctgatgagactgtgcacagttttgcccagygccgccttggacctgaggtgacacttgcccagaggccccaaacctcttccctcctaaaccagctgcagagctccctgttcaaatctaccacctaggggct

SEQ ID NO: 143366 - DNA, 201 bp, Homo sapiens
cccttctccaaacctctgttttgggctgggctgagggagctgaccaagccccggggcaaagagcctgatgagactgtgcacagttttgcccagcgccgccytggacctgaggtgacacttgcccagaggccccaaacctcttccctcctaaaccagctgcagagctccctgttcaaatctaccacctaggggctcttctgt

SEQ ID NO: 143367 - DNA, 201 bp, Homo sapiens
ccaaaccctatcccaccctcattccctaccaaataggggctgtggaaatcagtcagtgtagattattttttcgctccttagtcctagtctcacccttaagrtggcgtctctagccatggacagtctctgccgtggagtgtttgcaggcaacagccgtgagctcagcatcaggtcctgctttcccagtctcttccaagctga

SEQ ID NO: 143368 - DNA, 201 bp, Homo sapiens
caaccatgccggtgctgggggagttgccccaggagctgcaacgtcagctagctgagcagaggagtaagtgggcaacaggtgggacagccatggctgagtcygtggtacattcagctgtgatgggcttactgctcatgaccagtgaggtagggagactagaatacctagtgaggggaatagggtagagtttggggatgaaac

SEQ ID NO: 143369 - DNA, 201 bp, Homo sapiens
ccctcactatgcctttctccatgcagggggctactccgcccttcaccccccttctccaaacctctgttttgggctgggctgagggagctgaccaagccccsgggcaaagagcctgatgagactgtgcacagttttgcccagcgccgccttggacctgaggtgacacttgcccagaggccccaaacctcttccctcctaaac

SEQ ID NO: 143370 - DNA, 201 bp, Homo sapiens
agctagagccctttccttctgacgcatgaatgtccttctctccagggatttggacatttggtgccatcttcagaagatccaggagtcctgggaatcgtgtrtgactcagttgctttccctgagcaggacgggagcccccctggcctcagagtgactgtgaggaggaggaaactttgcctagtggcatttccagagggctcc

SEQ ID NO: 143371 - DNA, 201 bp, Homo sapiens
tctccatgcagggggctactccgcccttcaccccccttctccaaacctctgttttgggctgggctgagggagctgaccaagccccggggcaaagagcctgwtgagactgtgcacagttttgcccagcgccgccttggacctgaggtgacacttgcccagaggccccaaacctcttccctcctaaaccagctgcagagctcc

SEQ ID NO: 143372 - DNA, 201 bp, Homo sapiens
acagtggctttgcctctcccatctcggaccaacttagcccgttccaagtctgtgagcagtggggacttgcgtccaatggggattgccttgggagggcaccrtggcaccggagagcttggggctgcactgagccgcttggccctccggcctgagccacccactttgagacgtagcacttctctccgccgcctagggggcttt

SEQ ID NO: 143373 - DNA, 201 bp, Homo sapiens
gagccctttccttctgacgcatgaatgtccttctctccagggatttggacatttggtgccatcttcagaagatccaggagtcctgggaatcgtgtatgacycagttgctttccctgagcaggacgggagcccccctggcctcagagtgactgtgaggaggaggaaactttgcctagtggcatttccagagggctcctctgt

SEQ ID NO: 143374 - DNA, 201 bp, Homo sapiens
tttttttttttttttttgagacggagtatcgctctcgcccaggatggagtgcaatggcgcgatcttggctcactgcaacttccgcctttcgggttcaagcrattctcctgcctcagcctcccgagtagctgggactacaggtgcctaccaccacgtctggctagtttttgtatttttagtagagatggggtttcaccatat

SEQ ID NO: 143375 - DNA, 201 bp, Homo sapiens
tcttttctttttttttttttttttttttttttttgagacggagtatcgctctcgcccaggatggagtgcaatggcgcgatcttggctcactgcaacttccrcctttcgggttcaagcgattctcctgcctcagcctcccgagtagctgggactacaggtgcctaccaccacgtctggctagtttttgtatttttagtagag

SEQ ID NO: 143376 - DNA, 201 bp, Homo sapiens
cgctggagccagtggtcacttcgtggaggtctagagatgttgcctcaggcccttgaaacccacctgactagtaggggggtcagtgttctcagaggccagcsggtctgtgggctcagcctccaggcagaagggcgctggaaggtaggggaacccctggagtgtaatgaacctgtcagtgtttccatctttatccaagtggct

SEQ ID NO: 143377 - DNA, 201 bp, Homo sapiens
ataccccaccccctcataattcccaaaactcattattgggagtgaaggccttcatttccatccgtcacagtgggaatgtcccccaacccaaaccctatccyaccctcattccctaccaaataggggctgtggaaatcagtcagtgtagattattttttcgctccttagtcctagtctcacccttaaggtggcgtctctagc

SEQ ID NO: 143378 - DNA, 201 bp, Homo sapiens; identical to SEQ ID NO: 26341

SEQ ID NO: 143379 - DNA, 201 bp, Homo sapiens
gattattttttcgctccttagtcctagtctcacccttaaggtggcgtctctagccatggacagtctctgccgtggagtgtttgcaggcaacagccgtgagstcagcatcaggtcctgctttcccagtctcttccaagctgagcaaacccatcgttccatattactgggcctgctgctgggggcaggtgaggggggattgat

SEQ ID NO: 143380 - DNA, 201 bp, Homo sapiens
ccaagagttcctgaagctcctcatggagcggctacaccttgaaatcaaccgccgaggccgccgggctccaccgatacttgccaatggtccagttccctctmcaccccgccgaggaggggctctgctagaagaacctgagttaaggtaagggtcgttccctctacctcctttccccgtagtttatcagcatcattcacactt

SEQ ID NO: 143381 - DNA, 201 bp, Homo sapiens
gtcagttgcccatactctttgtctggctgtagccagcaggatgcccaagagttcctgaagctcctcatggagcggctacaccttgaaatcaaccgccgagrccgccgggctccaccgatacttgccaatggtccagttccctctccaccccgccgaggaggggctctgctagaagaacctgagttaaggtaagggtcgttc

SEQ ID NO: 143382 - DNA, 201 bp, Homo sapiens
agtctctgccgtggagtgtttgcaggcaacagccgtgagctcagcatcaggtcctgctttcccagtctcttccaagctgagcaaacccatcgttccatatkactgggcctgctgctgggggcaggtgaggggggattgattcagagggtgaaaatattaagtactgccaaagtgagggagtggggacaaggggtgctattc

SEQ ID NO: 143383 - DNA, 201 bp, Homo sapiens
cggggcttctggagcgcaggttgtccccggtctgcctgtccatatcgccccctttcccccaggtttccgcatgggccggaccgtggtcgtgctgggcggargcatcagcggcttggccgccagttaccacctgagccgggccccctgcccccctaaggtgagtgctccacttgtgccagagggagcttcatttaatgctct

SEQ ID NO: 143384 - DNA, 201 bp, Homo sapiens
atgttgcctcaggcccttgaaacccacctgactagtaggggggtcagtgttctcagaggccagccggtctgtgggctcagcctccaggcagaagggcgctrgaaggtaggggaacccctggagtgtaatgaacctgtcagtgtttccatctttatccaagtggcttaactaggccagggccgataggactggagttcctca

SEQ ID NO: 143385 - DNA, 201 bp, Homo sapiens
tctcattttctgggtctctcaaatgttttcatgctctcaggtatctctaagggacagcagtctggaggctgaccacgttattagtgccattccagcttcargtaatggaatagccaccttccccttccccaacccctaccagtgagaagcaaaagctataccttcctgggtcagcaggaccacaccatgcccctgaactgg

SEQ ID NO: 143386 - DNA, 201 bp, Homo sapiens
tcatctctatgggagtctaatcccaaagaggactgacaactgtaatgggaatgccttctgagtcaggcctctgcctgatctctagtgctcagtgagctgcyccctgctgaggctgcccctctggctcgtgccctgagtgccatcactgcagtgtctgtagctgtggtgaatctgcagtaccaaggagcccatctgcctgtc

SEQ ID NO: 143387 - DNA, 201 bp, Homo sapiens
ctcttgtcgccaggtggtcctagtggagagcagtgagcgtctgggaggctggattcgctccgttcgaggccctaatggtgctatctttgagcttggacctyggggaattaggccagcgggagccctaggggcccggaccttgctcctggtgagaggcttgtgggatgtctaggagaggttgtggagggggcttccattggg

SEQ ID NO: 143388 - DNA, 201 bp, Homo sapiens
ccccacccccccaaaaaaatgggaaggagagacagcctcagctagagccctttccttctgacgcatgaatgtccttctctccagggatttggacatttggkgccatcttcagaagatccaggagtcctgggaatcgtgtatgactcagttgctttccctgagcaggacgggagcccccctggcctcagagtgactgtgagg

SEQ ID NO: 143389 - DNA, 201 bp, Homo sapiens
cctagtggcatttccagagggctcctctgtgctccattgtaggcaaggccagactgatcagtgctatattccctccttaggtgatgctgggaggttcctgrttacagacactggaggctagtggctgtgtcttatctcaggagctgtttcaacagcgggcccaggaagcagctgctacacaattaggactgaaggagatgc

SEQ ID NO: 143390 - DNA, 201 bp, Homo sapiens
gtggcatttccagagggctcctctgtgctccattgtaggcaaggccagactgatcagtgctatattccctccttaggtgatgctgggaggttcctggttayagacactggaggctagtggctgtgtcttatctcaggagctgtttcaacagcgggcccaggaagcagctgctacacaattaggactgaaggagatgccgag

SEQ ID NO: 143391 - DNA, 201 bp, Homo sapiens; identical to SEQ ID NO: 26351

SEQ ID NO: 143392 - DNA, 201 bp, Homo sapiens; identical to SEQ ID NO: 26352

SEQ ID NO: 143393 - DNA, 201 bp, Homo sapiens
attcttctttgcttcctctgcagggcggaccccacagccagactcagcactcattcgccaggccttggctgagcgctggagccagtggtcacttcgtggasgtctagagatgttgcctcaggcccttgaaacccacctgactagtaggggggtcagtgttctcagaggccagccggtctgtgggctcagcctccaggcaga

SEQ ID NO: 143394 - DNA, 201 bp, Homo sapiens; identical to SEQ ID NO: 26354

SEQ ID NO: 143395 - DNA, 201 bp, Homo sapiens
ggaaatcagtcagtgtagattattttttcgctccttagtcctagtctcacccttaaggtggcgtctctagccatggacagtctctgccgtggagtgtttgyaggcaacagccgtgagctcagcatcaggtcctgctttcccagtctcttccaagctgagcaaacccatcgttccatattactgggcctgctgctgggggca

SEQ ID NO: 143396 - DNA, 201 bp, Homo sapiens
ccttaaggtggcgtctctagccatggacagtctctgccgtggagtgtttgcaggcaacagccgtgagctcagcatcaggtcctgctttcccagtctcttcyaagctgagcaaacccatcgttccatattactgggcctgctgctgggggcaggtgaggggggattgattcagagggtgaaaatattaagtactgccaaagt

SEQ ID NO: 143397 - DNA, 201 bp, Homo sapiens; identical to SEQ ID NO: 26356

SEQ ID NO: 143398 - DNA, 201 bp, Homo sapiens; identical to SEQ ID NO: 26358

SEQ ID NO: 143399 - DNA, 201 bp, Homo sapiens
gccactgcatccagcctcaatgattcttctttgcttcctctgcagggcggaccccacagccagactcagcactcattcgccaggccttggctgagcgctgragccagtggtcacttcgtggaggtctagagatgttgcctcaggcccttgaaacccacctgactagtaggggggtcagtgttctcagaggccagccggtct

SEQ ID NO: 143400 - DNA, 201 bp, Homo sapiens; identical to SEQ ID NO: 26360

SEQ ID NO: 143401 - DNA, 201 bp, Homo sapiens
ttacaggcgtgagccaccacgcccgacctgccttccatttcttcatctccctgtcagccttcccagcaaaaggaagccaaatgagtggaaatgaccccagygcctggagctggggaggtatgtcaggagcttccccctcactatgcctttctccatgcagggggctactccgcccttcaccccccttctccaaacctctgt

SEQ ID NO: 143402 - DNA, 201 bp, Homo sapiens
ttagcccccttttctccgtgccacctacagacatagtctggttcccctccattatcttccaggctggaaatggaacatttaacagggcaaaactgttgaaygttggggtgcgagaggccctgcgtgatgaagagtgggactgcctgttcttgcacgatgtggacctcttgccagaaaatgaccacaatctgtatgtgtgtg

SEQ ID NO: 143403 - DNA, 201 bp, Homo sapiens
tccattttactctaatatctggggaaacatcatttgactttaaagaagacgctgtctttccctccaccttcaatgtttcattgttttattaactaatcgcyttttatttccaggcctgcgggatacaacgggaatacaaaaatgcgctagagcggtccgcaacgctgtagcctgcgtaaggaacaattgatactaagtggc

SEQ ID NO: 143404 - DNA, 201 bp, Homo sapiens
tgatggaaatgggaagagcattaaatgaagctccctctggcacaagtggagcactcaccttaggggggcagggggcccggctcaggtggtaactggcggcsaagccgctgatgcctccgcccagcacgaccacggtccggcccatgcggaaacctgggggaaagggggcgatatggacaggcagaccggggacaacctgcg

SEQ ID NO: 143405 - DNA, 201 bp, Homo sapiens
cttaagggtgagactaggactaaggagcgaaaaaataatctacactgactgatttccacagcccctatttggtagggaatgagggtgggatagggtttggrttgggggacattcccactgtgacggatggaaatgaaggccttcactcccaataatgagttttgggaattatgagggggtggggtatgaagagaagagggc

SEQ ID NO: 143406 - DNA, 201 bp, Homo sapiens
agaggagccctctggaaatgccactaggcaaagtttcctcctcctcacagtcactctgaggccaggggggctcccgtcctgctcagggaaagcaactgagkcatacacgattcccaggactcctggatcttctgaagatggcaccaaatgtccaaatccctggagagaaggacattcatgcgtcagaaggaaagggctcta

SEQ ID NO: 143407 - DNA, 201 bp, Homo sapiens
gttggggatcagctgttaggttctgtgcccaggacactgactgctgcctggcgcccactctctatacagtcattaacagcaactccctcataggaggctcyagccagagtcaggggcaacctgtgagcagtcaggaattgcctagctgactctggaaggaaaggatgaaaggaatgttttagctgggggtctgatgtcctt

SEQ ID NO: 143408 - DNA, 201 bp, Homo sapiens
cttccccaaaatgtgcttcttcctaagttttgtttctcattaaatggcaccacccagtggtccaaattagaaatctgggtgtcctcttggagtccaattcyctaacttggcacatccagtcaatcttcaagtcctgtttgcctcctgaaagttcccaaagttactttcttccctccagtcccacgggtattacctattctg

SEQ ID NO: 143409 - DNA, 201 bp, Homo sapiens; identical to SEQ ID NO: 26527

SEQ ID NO: 143410 - DNA, 201 bp, Homo sapiens
agcctctccgtccctttatcatacctggacaggcagatgggctccttggtactgcagattcaccacagctacagacactgcagtgatggcactcagggcaygagccagaggggcagcctcagcagggagcagctcactgagcactagagatcaggcagaggcctgactcagaaggcattcccattacagttgtcagtcctc

SEQ ID NO: 143411 - DNA, 201 bp, Homo sapiens
caagtggagcactcaccttaggggggcagggggcccggctcaggtggtaactggcggccaagccgctgatgcctccgcccagcacgaccacggtccggccsatgcggaaacctgggggaaagggggcgatatggacaggcagaccggggacaacctgcgctccagaagccccgccggttttgagttctatcccggccactc

SEQ ID NO: 143412 - DNA, 201 bp, Homo sapiens
aagtggagcactcaccttaggggggcagggggcccggctcaggtggtaactggcggccaagccgctgatgcctccgcccagcacgaccacggtccggcccrtgcggaaacctgggggaaagggggcgatatggacaggcagaccggggacaacctgcgctccagaagccccgccggttttgagttctatcccggccactca

SEQ ID NO: 143413 - DNA, 201 bp, Homo sapiens
caaaagtgctaggattgcaggtgtgagccactgcacctggcctacctttttcttaacatgggggatgtgggagagaagctggggtagctcagtcactatthtaagattctcagcaactcccagtcttctcttattcttttgacagaatggcctctctctgcgtccttcctagactgcaagggcagctcctaggagcccttt

SEQ ID NO: 143414 - DNA, 201 bp, Homo sapiens
gcctatgctggaatagctccctcttctggtcctggctcagggggctgggattttgatatattttctaataaaggactttgtctcgcatctgctcctgcttyctgcatcccaggcacactttgcctctttgctgccccgcattcttatgcctataggtgatagaacagccagaccaagccaagctccagcaatttttatttt

SEQ ID NO: 143415 - DNA, 201 bp, Homo sapiens
gggaagagcattaaatgaagctccctctggcacaagtggagcactcaccttaggggggcagggggcccggctcaggtggtaactggcggccaagccgctgrtgcctccgcccagcacgaccacggtccggcccatgcggaaacctgggggaaagggggcgatatggacaggcagaccggggacaacctgcgctccagaagc

SEQ ID NO: 143416 - DNA, 201 bp, Homo sapiens
ccctagggtgactggcactgggccctgaggatttggatacatccagcttttatattctcttcagccatttccttctttctgtttgacttctgtcctgggctttttttttcttttgcctactaagtaatagttgtttttttgtgtgtacagaaacatttaatcccttccttgcttttctctactctggatcccccatgatac

SEQ ID NO: 143417 - DNA, 201 bp, Homo sapiens
gtctctgtcttcaaggccttcagtggagagctgagggaagtttatcccaacttaccttgtgtagatggaccaagcagtggctcggcatctccttcagtcckaattgtgtagcagctgcttcctgggcccgctgttgaaacagctcctgagataagacacagccactagcctccagtgtctgtaaccaggaacctcccagca

SEQ ID NO: 143418 - DNA, 201 bp, Homo sapiens
tccctcactttggcagtacttaatattttcaccctctgaatcaatcccccctcacctgcccccagcagcaggcccagtaatatggaacgatgggtttgctmagcttggaagagactgggaaagcaggacctgatgctgagctcacggctgttgcctgcaaacactccacggcagagactgtccatggctagagacgccacc

SEQ ID NO: 143419 - DNA, 201 bp, Homo sapiens; identical to SEQ ID NO: 26526

SEQ ID NO: 143420 - DNA, 201 bp, Homo sapiens
gtgtaccaccatgcccagctaattttttgtatttttagtagagatggggttttaccgtgttagccagggtggtctcaatctcctgaccttgtgatctgccygccttggcctcccaaagtactgggattacaggcgtaagccaccgcgcccggccttcacttttattctttagcccccttttctccgtgccacctacagaca

SEQ ID NO: 143421 - DNA, 201 bp, Homo sapiens
agatctgacccaccaaacatacttcctcccctaaactctattccccaatggaagccccctccacaacctctcctagacatcccacaagcctctcaccaggrgcaaggtccgggcccctagggctcccgctggcctaattccccgaggtccaagctcaaagatagcaccattagggcctcgaacggagcgaatccagcctcc

SEQ ID NO: 143422 - DNA, 201 bp, Homo sapiens
gtttggggcctctgggcaagtgtcacctcaggtccaaggcggcgctgggcaaaactgtgcacagtctcatcaggctctttgccccggggcttggtcagctmcctcagcccagcccaaaacagaggtttggagaaggggggtgaagggcggagtagccccctgcatggagaaaggcatagtgagggggaagctcctgacata

SEQ ID NO: 143423 - DNA, 201 bp, Homo sapiens
aaaaaaaagaaaagaagaaagaaatggaaggcatatgaggatgagggcacagtaaaaggagcggaggtgctggtgttacctgaggccagtgggtagggcakgcagggcaccgcccacgtagaggaacctgttctgggcagctgggtggtctccccggacaggcagcacttctgaatccaagccaagctcagaaacctgctc

SEQ ID NO: 143424 - DNA, 201 bp, Homo sapiens
agcccctaggtggtagatttgaacagggagctctgcagctggtttaggagggaagaggtttggggcctctgggcaagtgtcacctcaggtccaaggcggcrctgggcaaaactgtgcacagtctcatcaggctctttgccccggggcttggtcagctccctcagcccagcccaaaacagaggtttggagaaggggggtgaa

SEQ ID NO: 143425 - DNA, 201 bp, Homo sapiens
acagaagagcccctaggtggtagatttgaacagggagctctgcagctggtttaggagggaagaggtttggggcctctgggcaagtgtcacctcaggtccarggcggcgctgggcaaaactgtgcacagtctcatcaggctctttgccccggggcttggtcagctccctcagcccagcccaaaacagaggtttggagaaggg

SEQ ID NO: 143426 - DNA, 201 bp, Homo sapiens
tcagcttggaagagactgggaaagcaggacctgatgctgagctcacggctgttgcctgcaaacactccacggcagagactgtccatggctagagacgccaycttaagggtgagactaggactaaggagcgaaaaaataatctacactgactgatttccacagcccctatttggtagggaatgagggtgggatagggtttgg

SEQ ID NO: 143427 - DNA, 201 bp, Homo sapiens
gcacatcattttttcttaataaatttattcacaaaaagtgatattgcagagggtctgggggctgtacatgggcaggggcttggtgagctttgtacatgggrctgggagacaagggagcctccaggtggaagggtattttttaataaaaaaaataatggagctacaaccaccccctcccccctccccgattaaaaagacaca

SEQ ID NO: 143428 - DNA, 201 bp, Homo sapiens
gtttaggagggaagaggtttggggcctctgggcaagtgtcacctcaggtccaaggcggcgctgggcaaaactgtgcacagtctcatcaggctctttgcccsggggcttggtcagctccctcagcccagcccaaaacagaggtttggagaaggggggtgaagggcggagtagccccctgcatggagaaaggcatagtgaggg

SEQ ID NO: 143429 - DNA, 201 bp, Homo sapiens
ggagccctctggaaatgccactaggcaaagtttcctcctcctcacagtcactctgaggccaggggggctcccgtcctgctcagggaaagcaactgagtcayacacgattcccaggactcctggatcttctgaagatggcaccaaatgtccaaatccctggagagaaggacattcatgcgtcagaaggaaagggctctagct

SEQ ID NO: 143430 - DNA, 201 bp, Homo sapiens
aggggcttggtgagctttgtacatggggctgggagacaagggagcctccaggtggaagggtattttttaataaaaaaaataatggagctacaaccaccccytcccccctccccgattaaaaagacacaaaaatagacgtctctgaggtaaacggggagcctggggcttaagggtgtttaaagggcttcacaggtgccagag

SEQ ID NO: 143431 - DNA, 201 bp, Homo sapiens
aatctgtatgtgtgtgacccccggggaccccgccatgttgccgttgctatgaacaagtttggatacaggtagagggcatggaagggtactgggaaacaggraagcctactatcctgtggaaggaggagagccaagcggattgtggttggggatgtgtccccagaagactcggggtatgcaaggatctttctctccctagcc

SEQ ID NO: 143432 - DNA, 201 bp, Homo sapiens
ccctccccgattaaaaagacacaaaaatagacgtctctgaggtaaacggggagcctggggcttaagggtgtttaaagggcttcacaggtgccagagcttaraggtgtcacaggcaccggggtggctcctgcatcagttggtagaacagcacgtagccctcgctggatgccacctggttttcactgacaggggagacactag

SEQ ID NO: 143433 - DNA, 201 bp, Homo sapiens
tctgaggtaaacggggagcctggggcttaagggtgtttaaagggcttcacaggtgccagagcttagaggtgtcacaggcaccggggtggctcctgcatcarttggtagaacagcacgtagccctcgctggatgccacctggttttcactgacaggggagacactaggaaaaaaggagatcgggaaagggttgtggtcattc

SEQ ID NO: 143434 - DNA, 201 bp, Homo sapiens
gccagtgtcagaggtattcccaaaccctagtttgattcttttctctttgcccctctgatccctctacttgccattccttcccaacagtgggtcctgtgtcrgtgtcctttagcccagtgccatcactggcagagattgtggagcggaatccccgggtagaaccagggggccggtaccgccctgcaggttgtgagccccgct

SEQ ID NO: 143435 - DNA, 201 bp, Homo sapiens
ggagctctgcagctggtttaggagggaagaggtttggggcctctgggcaagtgtcacctcaggtccaaggcggcgctgggcaaaactgtgcacagtctcawcaggctctttgccccggggcttggtcagctccctcagcccagcccaaaacagaggtttggagaaggggggtgaagggcggagtagccccctgcatggaga

SEQ ID NO: 143436 - DNA, 201 bp, Homo sapiens
acagaggagccctctggaaatgccactaggcaaagtttcctcctcctcacagtcactctgaggccaggggggctcccgtcctgctcagggaaagcaactgrgtcatacacgattcccaggactcctggatcttctgaagatggcaccaaatgtccaaatccctggagagaaggacattcatgcgtcagaaggaaagggctc

SEQ ID NO: 143437 - DNA, 201 bp, Homo sapiens
gagaaggctaggtaaggatcctgcaccttccagcctttgtagagctgtcccagtgataggtaatccaaggcatgcgagatttctgagtgagccctgagaaytaagccccagaaccagactgccagtgtcagaggtattcccaaaccctagtttgattcttttctctttgcccctctgatccctctacttgccattccttcc

SEQ ID NO: 143438 - DNA, 201 bp, Homo sapiens
agccacttggataaagatggaaacactgacaggttcattacactccaggggttcccctaccttccagcgcccttctgcctggaggctgagcccacagaccsgctggcctctgagaacactgacccccctactagtcaggtgggtttcaagggcctgaggcaacatctctagacctccacgaagtgaccactggctccagcg

SEQ ID NO: 143439 - DNA, 201 bp, Homo sapiens
gctagagacgccaccttaagggtgagactaggactaaggagcgaaaaaataatctacactgactgatttccacagcccctatttggtagggaatgagggtrggatagggtttgggttgggggacattcccactgtgacggatggaaatgaaggccttcactcccaataatgagttttgggaattatgagggggtggggtat

SEQ ID NO: 143440 - DNA, 201 bp, Homo sapiens
atcaatcccccctcacctgcccccagcagcaggcccagtaatatggaacgatgggtttgctcagcttggaagagactgggaaagcaggacctgatgctgasctcacggctgttgcctgcaaacactccacggcagagactgtccatggctagagacgccaccttaagggtgagactaggactaaggagcgaaaaaataatc

SEQ ID NO: 143441 - DNA, 201 bp, Homo sapiens
gaatagcaccccttgtccccactccctcactttggcagtacttaatattttcaccctctgaatcaatcccccctcacctgcccccagcagcaggcccagtmatatggaacgatgggtttgctcagcttggaagagactgggaaagcaggacctgatgctgagctcacggctgttgcctgcaaacactccacggcagagact

SEQ ID NO: 143442 - DNA, 201 bp, Homo sapiens
tgacgacattgctaccaggtcagacttcctgccacttcctccctcctgaccccagtctggatccctgtcctctaagaccacctttgaccatagcccttcarcactaacctttagctccctggtcctgcactgagcccattcctttcccttagtctttttaggatacccaggtcaggcttgcatgctactgcccattgtgtc

SEQ ID NO: 143443 - DNA, 201 bp, Homo sapiens
agagcattaaatgaagctccctctggcacaagtggagcactcaccttaggggggcagggggcccggctcaggtggtaactggcggccaagccgctgatgcytccgcccagcacgaccacggtccggcccatgcggaaacctgggggaaagggggcgatatggacaggcagaccggggacaacctgcgctccagaagccccg

SEQ ID NO: 143444 - DNA, 201 bp, Homo sapiens
tgaggaactccagtcctatcggccctggcctagttaagccacttggataaagatggaaacactgacaggttcattacactccaggggttcccctaccttcyagcgcccttctgcctggaggctgagcccacagaccggctggcctctgagaacactgacccccctactagtcaggtgggtttcaagggcctgaggcaacat

SEQ ID NO: 143445 - DNA, 201 bp, Homo sapiens
cctgtcctctaagaccacctttgaccatagcccttcaacactaacctttagctccctggtcctgcactgagcccattcctttcccttagtctttttaggayacccaggtcaggcttgcatgctactgcccattgtgtcatccttcagtctcctggttagtttgttcttgggagaggacataagatcaataggaaatagtat

SEQ ID NO: 143446 - DNA, 201 bp, Homo sapiens
ccagttcaggggcatggtgtggtcctgctgacccaggaaggtatagcttttgcttctcactggtaggggttggggaaggggaaggtggctattccattacytgaagctggaatggcactaataacgtggtcagcctccagactgctgtcccttagagatacctgagagcatgaaaacatttgagagacccagaaaatgaga

SEQ ID NO: 143447 - DNA, 201 bp, Homo sapiens
actataagatggtgaagcaccgaggagataagggcaatgaggaaaatccccacaggtaggaagaaggaaggactgcctgggaattgttactggatcctcasggttctgtacccctagccaggaaaatcctaaaggtccctagatttctggctgttcctttctgggtcttagtctccaacctctaaccctcagatttgacct

SEQ ID NO: 143448 - DNA, 201 bp, Homo sapiens
gacaggcagatgggctccttggtactgcagattcaccacagctacagacactgcagtgatggcactcagggcacgagccagaggggcagcctcagcagggrgcagctcactgagcactagagatcaggcagaggcctgactcagaaggcattcccattacagttgtcagtcctctttgggattagactcccatagagatga

SEQ ID NO: 143449 - DNA, 201 bp, Homo sapiens
cctcacagtcactctgaggccaggggggctcccgtcctgctcagggaaagcaactgagtcatacacgattcccaggactcctggatcttctgaagatggcmccaaatgtccaaatccctggagagaaggacattcatgcgtcagaaggaaagggctctagctgaggctgtctctccttcccatttttttgggggggtgggg

SEQ ID NO: 143450 - DNA, 201 bp, Homo sapiens
cccaatggaagccccctccacaacctctcctagacatcccacaagcctctcaccaggagcaaggtccgggcccctagggctcccgctggcctaattccccraggtccaagctcaaagatagcaccattagggcctcgaacggagcgaatccagcctcccagacgctcactgctctccactaggaccacctggcgacaagag

SEQ ID NO: 143451 - DNA, 201 bp, Homo sapiens
gcatctccttcagtcctaattgtgtagcagctgcttcctgggcccgctgttgaaacagctcctgagataagacacagccactagcctccagtgtctgtaaycaggaacctcccagcatcacctaaggagggaatatagcactgatcagtctggccttgcctacaatggagcacagaggagccctctggaaatgccactagg

SEQ ID NO: 143452 - DNA, 201 bp, Homo sapiens
ctcggcatctccttcagtcctaattgtgtagcagctgcttcctgggcccgctgttgaaacagctcctgagataagacacagccactagcctccagtgtctrtaaccaggaacctcccagcatcacctaaggagggaatatagcactgatcagtctggccttgcctacaatggagcacagaggagccctctggaaatgccac

SEQ ID NO: 143453 - DNA, 201 bp, Homo sapiens
gcctggcgcccactctctatacagtcattaacagcaactccctcataggaggctccagccagagtcaggggcaacctgtgagcagtcaggaattgcctagstgactctggaaggaaaggatgaaaggaatgttttagctgggggtctgatgtccttggccctcctcagcccagctgttttcccaacttacctagtttttgc

SEQ ID NO: 143454 - DNA, 201 bp, Homo sapiens
actgctgcctggcgcccactctctatacagtcattaacagcaactccctcataggaggctccagccagagtcaggggcaacctgtgagcagtcaggaattrcctagctgactctggaaggaaaggatgaaaggaatgttttagctgggggtctgatgtccttggccctcctcagcccagctgttttcccaacttacctagt

SEQ ID NO: 143455 - DNA, 201 bp, Homo sapiens
atgagagttggggatcagctgttaggttctgtgcccaggacactgactgctgcctggcgcccactctctatacagtcattaacagcaactccctcataggrggctccagccagagtcaggggcaacctgtgagcagtcaggaattgcctagctgactctggaaggaaaggatgaaaggaatgttttagctgggggtctgat

SEQ ID NO: 143456 - DNA, 201 bp, Homo sapiens
tctgcctggaggctgagcccacagaccggctggcctctgagaacactgacccccctactagtcaggtgggtttcaagggcctgaggcaacatctctagacstccacgaagtgaccactggctccagcgctcagccaaggcctggcgaatgagtgctgagtctggctgtggggtccgccctgcagaggaagcaaagaagaat

SEQ ID NO: 143457 - DNA, 201 bp, Homo sapiens
cacttaaggccagtccacggggaggcggctccataaacagctccttgatgttagcaacagaccgggcctacgggagctagggccgcccggcaacgtacccrgtgtttgtcaacagtggcactcccccatcgccgaccaaaccagtcgccccagagcctgcacgcagcctcactcaagtatgcctttcctcttttcctccca

SEQ ID NO: 143458 - DNA, 201 bp, Homo sapiens
tgcccccagcagcaggcccagtaatatggaacgatgggtttgctcagcttggaagagactgggaaagcaggacctgatgctgagctcacggctgttgcctrcaaacactccacggcagagactgtccatggctagagacgccaccttaagggtgagactaggactaaggagcgaaaaaataatctacactgactgatttcc

SEQ ID NO: 143459 - DNA, 201 bp, Homo sapiens
actttggcagtacttaatattttcaccctctgaatcaatcccccctcacctgcccccagcagcaggcccagtaatatggaacgatgggtttgctcagcttrgaagagactgggaaagcaggacctgatgctgagctcacggctgttgcctgcaaacactccacggcagagactgtccatggctagagacgccaccttaagg

SEQ ID NO: 143460 - DNA, 201 bp, Homo sapiens
attttcatgaatgagagttggggatcagctgttaggttctgtgcccaggacactgactgctgcctggcgcccactctctatacagtcattaacagcaactmcctcataggaggctccagccagagtcaggggcaacctgtgagcagtcaggaattgcctagctgactctggaaggaaaggatgaaaggaatgttttagctg

SEQ ID NO: 143461 - DNA, 201 bp, Homo sapiens
ttttcatgaatgagagttggggatcagctgttaggttctgtgcccaggacactgactgctgcctggcgcccactctctatacagtcattaacagcaactcyctcataggaggctccagccagagtcaggggcaacctgtgagcagtcaggaattgcctagctgactctggaaggaaaggatgaaaggaatgttttagctgg

SEQ ID NO: 143462 - DNA, 201 bp, Homo sapiens
agaccggctggcctctgagaacactgacccccctactagtcaggtgggtttcaagggcctgaggcaacatctctagacctccacgaagtgaccactggctycagcgctcagccaaggcctggcgaatgagtgctgagtctggctgtggggtccgccctgcagaggaagcaaagaagaatcattgaggctggatgcagtggc

SEQ ID NO: 143463 - DNA, 201 bp, Homo sapiens
gctgttaggttctgtgcccaggacactgactgctgcctggcgcccactctctatacagtcattaacagcaactccctcataggaggctccagccagagtcrggggcaacctgtgagcagtcaggaattgcctagctgactctggaaggaaaggatgaaaggaatgttttagctgggggtctgatgtccttggccctcctca

SEQ ID NO: 143464 - DNA, 201 bp, Homo sapiens
tgttgaaattaagatatgtgtgggttagagaaaaaggaggcagcaaactattataaaaattagagccaaatgtttgggcacctcagtaatcaaatgttggstctgattataaagcattcatgcattgattttttctctcctagacttactagttcactagtctctgagagctttcagactaccttagaaaatggaggcagc

SEQ ID NO: 143465 - DNA, 201 bp, Homo sapiens
tgaccaagagagctcgtaacaattatttcctccacagaaacaaggcaagaaggaaaaaaactttcacatgtagaattataaatggaaaaataaattttctrgttttcttaaagaccctggtttccggtataaagaaatgtcccagcttcttagtcacgggccaatgggttgttgttactgaaaaggatgggaaacaggaat

SEQ ID NO: 143466 - DNA, 201 bp, Homo sapiens
cagttactgctctgcctgcgccaatagcctcctccaatagagtatatcagtgctaacttagaacacatttttattcttctccaagctttttttaaaaaaawttgtggttttgtaaccctgaaagcactccatgagatataaggtcattaatttttatttcccagtagggggtaatcaagagttaatatttttcaagaattt

SEQ ID NO: 143467 - DNA, 201 bp, Homo sapiens
gatattcccatacttattgagtagatggaagatgaggtcagaaaaggaggaagccatgtcagtagagggtagccataagaaaataacacagatttgttatmtgacatcattcacaaaaatattcagtgtgatttacccctaaatcaactaacttgatgtcaaaaagtaaatgtactccagtgagtaatttttcttgtgaga

SEQ ID NO: 143468 - DNA, 201 bp, Homo sapiens
ctctatggaaaagatagtcaatgctgtggaagataacccaatagagagaacatcatgaaagtctggaaggattataccattgaagatgccctaattgttayagaaaaagccatgaaagccatcaatcctaaaacaacatatttctcctggagaaaactatgtccagatgttatatatgacttcagaggatttacaacagac

SEQ ID NO: 143469 - DNA, 201 bp, Homo sapiens
agggaattttttaattacaactgataataggtttaaaaagacacaaagaaaacatcttcataatttctgaaaatcagttcaaacaacttgccatgttccayttaggcctggaccagtttcgaggcaactacctccatagccgggattataagaatccagaagccttcaaggggaagagggtcctcgtgattggtctgggga

SEQ ID NO: 143470 - DNA, 201 bp, Homo sapiens
gaaaaataaattttctagttttcttaaagaccctggtttccggtataaagaaatgtcccagcttcttagtcacgggccaatgggttgttgttactgaaaargatgggaaacaggaatctactatttttgatgctgtaatgatttgttcaggacatcacgtataccccaatctgccaacggattcctttcctggtaagtttg

SEQ ID NO: 143471 - DNA, 201 bp, Homo sapiens
ttgctgaagcttgagccgtcacatctgccttctaggcaaaaaaaaaaaaaaaagtaaagaatgaagggcaaagggatgttctctcagctgaatcagctccycttttacaaattctcctgaaaaaactgtccaacattgcttatatctcacaggccaccctagttgcacaggaacctggaaaatgcatcccttttctgtgta

SEQ ID NO: 143472 - DNA, 201 bp, Homo sapiens
aatgggttgttgttactgaaaaggatgggaaacaggaatctactatttttgatgctgtaatgatttgttcaggacatcacgtataccccaatctgccaackgattcctttcctggtaagtttggaaaatatataataatctagggacttatatgcaaacatcaagagttagaaacatatctttctataggtattacataat

SEQ ID NO: 143473 - DNA, 201 bp, Homo sapiens
tagaggtatgattctaatcctttcaacaactacacaccagccctcaggggcagtgaaagaatcctgtctctactagtttaaattttagactttaaaaaaawttttttttattttaagttctgggatacatgtacagaacatgcataggtctgcacatgccatggtggtttgctgcacctatcaacccttcatctagatttt

SEQ ID NO: 143474 - DNA, 201 bp, Homo sapiens
gggtgaagggtttcaagatatggatcatggagaaattcaacagctaatagacaccactaatagacacttttaattccacactagaggaactaaaagatgayttgatggagatgagtccttccaaagcagtgccagatgagaacgaagacatagaaaaagccatgccagaaataaattgacattagatcatctggcagacag

SEQ ID NO: 143475 - DNA, 201 bp, Homo sapiens
ttctctctagaacttacttttgttgtctcattgagcctagaaacattaaactcaaggtttcacaggtgacggaatatgcccagagaccacgtatggcttgraaaacttattgaaattagtccagtacagaaagggtatggaaaaatctgaaatggagatgacgcaggcagataaatcaccctgacatgcatgatgcatttg

SEQ ID NO: 143476 - DNA, 201 bp, Homo sapiens
ttgatggagatgagtccttccaaagcagtgccagatgagaacgaagacatagaaaaagccatgccagaaataaattgacattagatcatctggcagacagkttccagttatttaagacttcttttgacttcttttatataacatggacccttctatgatacaggcactgaaactaaagcaaatgatagaggaaggattact

SEQ ID NO: 143477 - DNA, 201 bp, Homo sapiens
taatgaatttattctctctagaacttacttttgttgtctcattgagcctagaaacattaaactcaaggtttcacaggtgacggaatatgcccagagaccaygtatggcttggaaaacttattgaaattagtccagtacagaaagggtatggaaaaatctgaaatggagatgacgcaggcagataaatcaccctgacatgca

SEQ ID NO: 143478 - DNA, 201 bp, Homo sapiens
cttttgacttcttttatataacatggacccttctatgatacaggcactgaaactaaagcaaatgatagaggaaggattactactatatagaaaatttttaragaaataaaaaagcaaagtcagacagaaattataatatatttccataattacaccaatgggcctgcctctcctgcccccaattctacctcctccatctct

SEQ ID NO: 143479 - DNA, 201 bp, Homo sapiens; identical to SEQ ID NO: 26548

SEQ ID NO: 143480 - DNA, 201 bp, Homo sapiens
ttcatctctgactggttatatgtccagaagatgaacacgtggtttaagcatgagaactatggcctgatgcctttaaatgggtacttaaaaatggaaatttyttttattcaaaaaaggggggcactcatttaatgaatttattctctctagaacttacttttgttgtctcattgagcctagaaacattaaactcaaggtttc

SEQ ID NO: 143481 - DNA, 201 bp, Homo sapiens; identical to SEQ ID NO: 26550

SEQ ID NO: 143482 - DNA, 201 bp, Homo sapiens; identical to SEQ ID NO: 26551

SEQ ID NO: 143483 - DNA, 201 bp, Homo sapiens; identical to SEQ ID NO: 26552

SEQ ID NO: 143484 - DNA, 201 bp, Homo sapiens; identical to SEQ ID NO: 26553

SEQ ID NO: 143485 - DNA, 201 bp, Homo sapiens; identical to SEQ ID NO: 26554

SEQ ID NO: 143486 - DNA, 201 bp, Homo sapiens
taagcatgagaactatggcctgatgcctttaaatgggtacttaaaaatggaaattttttttattcaaaaaaggggggcactcatttaatgaatttattctytctagaacttacttttgttgtctcattgagcctagaaacattaaactcaaggtttcacaggtgacggaatatgcccagagaccacgtatggcttggaaaa

SEQ ID NO: 143487 - DNA, 201 bp, Homo sapiens
aatccagcagcaacgtgacattccatctctttccccccattgcacaagagtcccttccggacctcgggaagcagaagctgccagctctgaaatgtattttsaaggcagcacattgtgtgcacttttaccctaccctcacaactgagaggaaatgtttattttcaatttagcttttgactgcttctaaaaaataagccactt

SEQ ID NO: 143488 - DNA, 201 bp, Homo sapiens
actacctgatttcaaaatatattacaaagctatagtattcaaaacagtaatgtactggcaccaaaacagacacagaccaatgaaacagtatagagagccamgtaattacccacacatatacaaccaactaatctttgacaaaagtgccaaggacacacaatgagaaaaggatagtttcttcaataaatggtgttggaaaaa

SEQ ID NO: 143489 - DNA, 201 bp, Homo sapiens
ttgggcagccccccacttccccacggggacacaatcctctcaaccctttccagcactttttgtttccctcttccagaggtcatctggtgtgagagggagakacacatcttgaatccagcagcaacgtgacattccatctctttccccccattgcacaagagtcccttccggacctcgggaagcagaagctgccagctctga

SEQ ID NO: 143490 - DNA, 201 bp, Homo sapiens
agtccagcaactggtgagccaaagaataggattcatttacaacagagcagtggttctcaaagtgtggttcctaaaccagccacatcagcatcaccaggaasttgatagaaatgcaaaccaccccagactccaccccagacagattgaatccgaaattctaagaatagggcccaagaatctacggtctagggagcttccagg

SEQ ID NO: 143491 - DNA, 201 bp, Homo sapiens
cttcccttatccggatgattacccaaactatatacaccacagcaagctccaggaatatataaagacatatgctcaaaagaaggatcttttaagatacatayagtttgaggtaggggtctcataacttgtactgttgaaattaagatatgtgtgggttagagaaaaaggaggcagcaaactattataaaaattagagccaaa

SEQ ID NO: 143492 - DNA, 201 bp, Homo sapiens
ctgtgattggcttggttcagtcccttggagctgccatccccacagcagacctgcaagcctggtgggctgctaaagtatttgcaagtaggtgggccattctktctttcattcattttatcaatgaacatttactgaacacctgctatatgcaaagcactgtgctagggatacaatgagaacaagacaaacatgttccttgac

SEQ ID NO: 143493 - DNA, 201 bp, Homo sapiens
taaaactcttaatgttaacgggcagcatatttaatgtttatgagcatgggatcagaacacctggcctcaacttactattccactagttccttaccacttamcttctttgtctcaatttcctcttcttttaaaatagggacaatagcccaccatgcagggatgttatcaagattaaatagttaaaacgtgtaaagcatttat

SEQ ID NO: 143494 - DNA, 201 bp, Homo sapiens
aaaatactgaggctttgggcagccccccacttccccacggggacacaatcctctcaaccctttccagcactttttgtttccctcttccagaggtcatctgrtgtgagagggagagacacatcttgaatccagcagcaacgtgacattccatctctttccccccattgcacaagagtcccttccggacctcgggaagcagaa

SEQ ID NO: 143495 - DNA, 201 bp, Homo sapiens
tttattcaaaaaaggggggcactcatttaatgaatttattctctctagaacttacttttgttgtctcattgagcctagaaacattaaactcaaggtttcayaggtgacggaatatgcccagagaccacgtatggcttggaaaacttattgaaattagtccagtacagaaagggtatggaaaaatctgaaatggagatgacg

SEQ ID NO: 143496 - DNA, 201 bp, Homo sapiens
aaaatctgaaatggagatgacgcaggcagataaatcaccctgacatgcatgatgcatttgtggtggctacaagctatagcatagaactttgaggactgaasaaactcaaattggtttttggaagaatatcttgtccgtgcttatgggtgtatgaagacatcaataataatacttgcttctcaagatggttgtggtattcaa

SEQ ID NO: 143497 - DNA, 201 bp, Homo sapiens
ctgacttgttatctaatacatttgcttttttgtgtttgtttggagaacagtcttttcggaaaaattccaaggagctgtagtgtacatactcttctctcctkgtgttataattggctgaggtcaaggggcaaaaaagcagagattcattcaagatggaaatattccaaggccttagcatctgtttcccagaacagagtctta

SEQ ID NO: 143498 - DNA, 201 bp, Homo sapiens
taattaacaaaccattacaatcatggaatatatgtatatatattgtctaaaactttgtagataaataaatttctatttcaaatacaccatgaaagatcatyatttaaataaaccccatcatgaaatcttttgtaaaggtgctccctgcaaaatacttctattgcctttttccttcgaaaggcacaacaatgccaagagcct

SEQ ID NO: 143499 - DNA, 201 bp, Homo sapiens
ggatgaagacatttatgataaaccacttccacttaatgaatagtaaacatattttttcttcctcataattttcttaataacattttcttttctccatattrctttattgtaagaatagtatttaatacgtatgacatataaaatatgtgttaatcaactgtttgcattattggtaaggcttccagtcaacaggttattaag

SEQ ID NO: 143500 - DNA, 201 bp, Homo sapiens
ggtctgggatgatggctatccttgggatatgatgtatgttacccgctttgcatcctttctccggaatgtccttccttcattcatctctgactggttatatrtccagaagatgaacacgtggtttaagcatgagaactatggcctgatgcctttaaatgggtacttaaaaatggaaattttttttattcaaaaaaggggggc

SEQ ID NO: 143501 - DNA, 201 bp, Homo sapiens
tcatgagttcaggagatcaagaccatcctggctaacatggtgaaaccccgtctctactaaaaatacaccaaaattagccgggcgtggtggcgggtgcctgyagtcccagctactcgggacgctgaggcaggagaatggcgtgaacccaggaggcggagcttgcagtgagcccagattgtgccactgcactccagtctgggc

SEQ ID NO: 143502 - DNA, 201 bp, Homo sapiens
tagaattataaatggaaaaataaattttctagttttcttaaagaccctggtttccggtataaagaaatgtcccagcttcttagtcacgggccaatgggttrttgttactgaaaaggatgggaaacaggaatctactatttttgatgctgtaatgatttgttcaggacatcacgtataccccaatctgccaacggattcctt

SEQ ID NO: 143503 - DNA, 201 bp, Homo sapiens
agttaaactgtaaactaaatgtctcccatagttagcttggcctatgctcaggaatgaataatggcagcttggagattagaagaaagatggagtaattacattttttttttcacatttttttcactgtcacaatttttttaaaggtgatttcagaggtaacatcacaggacatgggagactaaagggaggaaagtatgtcaa

SEQ ID NO: 143504 - DNA, 201 bp, Homo sapiens
aaatatatctggccctaagacttttaaaataagagattatataactacaacaacaagatagaccttgtcaccatcaattcaatggacgagtgcctcgagcrtttagaagagggtggactacggaaatcttagtaggtcaaagaaaacctcccacagggatgacacttagccttgaaggataaccccagacaagcaaaatag

SEQ ID NO: 143505 - DNA, 201 bp, Homo sapiens
tttgatagcaaatgggcaaaaactcatttgatagccgaacctcttctgaaatcgtaaggttaaataccgtgaattggatcaacatgaagctaagtctcacyttctgttgcacggcagaaattttattgcatttgacagattgctgccccagatctcactaggagtattatggagcaaaatccaaaaatgtacacattccaa

SEQ ID NO: 143506 - DNA, 201 bp, Homo sapiens
aattacattttttttttcacatttttttcactgtcacaatttttttaaaggtgatttcagaggtaacatcacaggacatgggagactaaagggaggaaagyatgtcaaacaaaggctgtcctgttctgcagacgaaacctcacagaaagcaactctcagagtcagtagcctatgatgaaagtttctctgtcagacattcag

SEQ ID NO: 143507 - DNA, 201 bp, Homo sapiens
gccaaagaataggattcatttacaacagagcagtggttctcaaagtgtggttcctaaaccagccacatcagcatcaccaggaacttgatagaaatgcaaaycaccccagactccaccccagacagattgaatccgaaattctaagaatagggcccaagaatctacggtctagggagcttccaggcgattctcattacgcca

SEQ ID NO: 143508 - DNA, 201 bp, Homo sapiens
ctagaaacattaaactcaaggtttcacaggtgacggaatatgcccagagaccacgtatggcttggaaaacttattgaaattagtccagtacagaaagggtrtggaaaaatctgaaatggagatgacgcaggcagataaatcaccctgacatgcatgatgcatttgtggtggctacaagctatagcatagaactttgaggac

SEQ ID NO: 143509 - DNA, 201 bp, Homo sapiens
gccaggtgtggtggtgggtgcctgtaatcccagctactcaggaggctgaggcaggagaatctcttgaacccaggaggcagaggttgcagtgacctcagatyatgccactgcactccagcctgggcaatagagaaagactccattaaaaaaaaaaaaaatgcttaccaataggttagtagcattttgattgcaaaagctgaa

SEQ ID NO: 143510 - DNA, 201 bp, Homo sapiens
tgaatacatactgtgtactttatgtgtagggtactatattaagcataagctgcagataagaggccagccagcactttaaaagccgtgagaaaacaagtatyagaataactataagtgactatataattagggcaataaggataatgggaccttagtaaaactaaagatgatttggcagtagctgagagggaaggtaaagaa

SEQ ID NO: 143511 - DNA, 201 bp, Homo sapiens
atttgtaaaatgttgaagggatattagtaattacttaatccaatttgcttatcttacaggggaaggatctaaattcctgcaagaattatcccaaaatatayagccaaagagatgaatcactgagtttttaactataatattagataacagtatgaatatttttaaaatttataagaagacagaactggctttcatttaata

SEQ ID NO: 143512 - DNA, 201 bp, Homo sapiens
cacagtcctgccacatcttagttgtataattgtgccaggttaacctgctaagccccagtctttcttcagaaaaatggccacagtaatacttgccttataargtacttttgaaaacaaataacataatgtgtctaaagtgcttagtttagtgcctggcacccagtgaatgcacattctaaagtgattatttttagtggtatt

SEQ ID NO: 143513 - DNA, 201 bp, Homo sapiens; identical to SEQ ID NO: 26555

SEQ ID NO: 143514 - DNA, 201 bp, Homo sapiens; identical to SEQ ID NO: 26556

SEQ ID NO: 143515 - DNA, 201 bp, Homo sapiens
tgaggcaggagaatggcgtgaacccaggaggcggagcttgcagtgagcccagattgtgccactgcactccagtctgggcaacagagtgagactccgtctcaaaaaaaaaaaaacctcaaagatgaattgtgtagcctagaaatattttaaaaaattaagaaaaagatgccatgtataaaatatttgtagatactagtctat

SEQ ID NO: 143516 - DNA, 201 bp, Homo sapiens; identical to SEQ ID NO: 26557

SEQ ID NO: 143517 - DNA, 201 bp, Homo sapiens; identical to SEQ ID NO: 26558

SEQ ID NO: 143518 - DNA, 201 bp, Homo sapiens
accttttaagttaatgtatatgcttaaaaacagttttaggaaaatatttggtagacaaagagtttcaactttaaatgttcactatgtcatttagtgtccarctttacggataggttgactatctaaataggcatttttagtcattaaaaaaaatctagtcaccaggaggatccctataactcaaaataacttgtttgtaaa

SEQ ID NO: 143519 - DNA, 201 bp, Homo sapiens; identical to SEQ ID NO: 26559

SEQ ID NO: 143520 - DNA, 201 bp, Homo sapiens; identical to SEQ ID NO: 26560

SEQ ID NO: 143521 - DNA, 201 bp, Homo sapiens; identical to SEQ ID NO: 26561

SEQ ID NO: 143522 - DNA, 201 bp, Homo sapiens
acttacccattagtaagttcctgcatattcattataagatggcaaatcaaacttttctaggatgaagacagcttatttttaagttgtatagtcttagttgrtttagggtctcaattttaattaataaaatacttggtttttatttgcttgtccttttgaattcctgttttaataattttaaaatgagcacaaagaacgttg

SEQ ID NO: 143523 - DNA, 201 bp, Homo sapiens
  misc_feature (1)...(201): n = A,T,C or G
caccctccaatgcatgaatatgcagagaagcttgccgcacttcttcctgagcctcttaaggtacaatgctcttcctgcaggaggtgaatgttatggggganaaaaaaaggtatgatgctcccagctcaaagagacaggagtcttatgattctaggggagcgtccctaggaagcagggacatgggcagggaatttagcctgt

SEQ ID NO: 143524 - DNA, 201 bp, Homo sapiens
ctgtagatgtctattaggtccgcttggtgcagagctgagttcaattcctgggtatccttgttgactttctgtctcattgatctgtctaatgttgacagtgsggtgttaaagtctcccattattaatgtgtgggagtctaagtctctttgtaggtcactcaggacttgctttatgaatctgggtgctcctgtattgggtgca

SEQ ID NO: 143525 - DNA, 201 bp, Homo sapiens
ttctcaatggtttcaaagaacatctttatttctgccttcatttcgttatgtacccagtagtcattcaggagcaggttgttcagtttccatgtagttgagcrgttttgagtgagattcttaatcctgagttctagtttgattgcactgtggtctgagagatagtttgttataatttctgttcttttacatttgctgaggaga

SEQ ID NO: 143526 - DNA, 201 bp, Homo sapiens
ttgcttttctagttcttttaattgtgatgttagggtgtcaattttggatctttcctgctttctcttgtgggcatttagtgctataagtttccctctacacrctgctttgaatgcgtcccagagattctggtatgttttgtctttgttctcaatggtttcaaagaacatctttatttctgccttcatttcgttatgtaccca

SEQ ID NO: 143527 - DNA, 201 bp, Homo sapiens
agcgccatagcctgggtggcttatacatcatagaagttcatttctcatagttctggaggcagagaagtccaagatcaaggtgccagcaagttcagtgtctrgtgagggcgctctttctaagcggccatctttctgctgtgacctcacattgcagaaggggcaagagagctccctgggccttcatgggctttgccctcctga

SEQ ID NO: 143528 - DNA, 201 bp, Homo sapiens
atttctgtgggatcagtggtgatatcccctttatcattttttattgcatctatttgattcttctctctttttttctttattagtcttgctagtggtctatmaattttgttgatcctttcagaaaaccagctcctggattcattaattttttgaagggttttttgtgtctctatttccttcagttctgttgattttagttat

SEQ ID NO: 143529 - DNA, 201 bp, Homo sapiens
ttgccctgcacacactgcccgagaggctgcccctcacagcaacagcctctccccagggatgggctacagggtggagacttaagagagaaggtaacttctgytcctccctaatttgtcctgtcctttgttaactttctttcccattttaaacattcctcatccttcccagtttccctgctccatccctgcctctcacaactt

SEQ ID NO: 143530 - DNA, 201 bp, Homo sapiens
ttggtaagctattgattattgccacaatttcagatcctgttattggtctattcagagattcaatttcttcctggtttagtcttgggagagtgtatgtgttsaggaatttatccatttcttctagattttctagtttatttgcatagaggtggttgtagtattctctgatggtagtttgtatttctgtgggatcagtggtga

SEQ ID NO: 143531 - DNA, 201 bp, Homo sapiens
atggatgataaacatcacagtcatgcagtaaataatctatctcctgtataattaattctaacccctgtgaaagcaattctggccgttcttagctcagcccmgggctctgacttggtgaccctgctaagccttagtggcctctgtggctgggagcaacacgacagcacctgcaggcccgggtgacgcctgtcggagagatgg

SEQ ID NO: 143532 - DNA, 201 bp, Homo sapiens
gataatcatgtggtttttgtctttggttctgcttatatgctggattacatttattgatttgcatatattgaaccagccttgcatcccagggatgaagcccwcttgatcatggtggataagctttttgatgtgctgctggattcgttttgccagtattttattgaggatttttgcatcaatgttcatcaaggatattggtct

SEQ ID NO: 143533 - DNA, 201 bp, Homo sapiens
cgagtgacttcatctgagatctggttgtttaaaaatgtatggcacctccctaactccctctcttgctcctgctctccccacacgacccatctgctcaccckttgccttctgccatgattgtaaggttcctgagcccctcactagaagcgggtgctggagccatgcttgtacagcctgtagaactgtgagccaattaaacct

SEQ ID NO: 143534 - DNA, 201 bp, Homo sapiens
gttagagttcattgtagattctggatattagccctttgtcagatgagtaggttgcgaaaattttctcccgttttgtaggttgcctgttcactctgatggtwgtttcttttgctgtgcagaagctctttagtttaattagatcccatttgtcaattttggcttttgttgccattgcttttggcgttttagacatgaagtcct

SEQ ID NO: 143535 - DNA, 201 bp, Homo sapiens
ggtactctcatattctgttggtaaggaggtacagccctttggacagtaatttgtctgcagctctcaaaattttaaatatctatacattttgacctggtgayatggtttgaatgtttgtccctccaaatctcatgttgaaatgtaatccccagtgttggaggtggagccagtaggaggtatttggatcatgggggcggattc

SEQ ID NO: 143536 - DNA, 201 bp, Homo sapiens
ggccccacctcccaatattatgccatccccttgggtattaggtttcaatatatgaattttgagggacacaaacattcactctgtgtcacctaacctgtatytgttgactcaccttttatgtataaataccttattttcctaaataagtttacacttttgaggccaggaaacatacagatggtaagtgctttgtgtttctca

SEQ ID NO: 143537 - DNA, 201 bp, Homo sapiens
agtctcaccctgtcactcaggctggagtgcagtggtgcaatctcggctcactgcagcctctgccctccgagttcaagcgattctcctgtctcagcctcccragtagctgggattacaggcacctgccactgtgcccggctaattttttgtatttttagaagagacagggtttcaccatcttggccaggctggtcttgaact

SEQ ID NO: 143538 - DNA, 201 bp, Homo sapiens
aaactgcaaggctctgagaatcttgaatgcacaaaacttctatgcagtcatcactgtactcaccttctgttcccacttactgaacccacattttcagcatytgaatcagatacctaattattcttattctttcagatgcccttacccactgcacccttgagcaagctgtttccaggctaacattgaaatcagtttcctttg

SEQ ID NO: 143539 - DNA, 201 bp, Homo sapiens
caggaggtaaggagtgagtgtgcctcaggggcccagccctcatcttttcctccccttcacttctcctaccctcttccatcatcaggagaccttagtcccakgcaaagtcacaagaagtatccaaaacaaatttcagatgcaatttcaaacgtaggacaaacatacatgaaagaagtagagaaaatggaatagaaaatgagt

SEQ ID NO: 143540 - DNA, 201 bp, Homo sapiens
  misc_feature (1)...(201): n = A,T,C or G
ttggcttgacaaacgtagggatctacaagatggaactccctggtgggacaggttgccaaccagtgagtttggagatttttctcttgtttctttaaagactnctgggtatgtgaagtagttgatcaggttttcctggtataaggattagaaactaatataaagcctgtcattaatcaggggctcaatttgacctaattgaat

SEQ ID NO: 143541 - DNA, 201 bp, Homo sapiens
ttgagcactgataatagattcattaataaacccttaatggctacattagcactaaaaataatagaaaactatgcattttgcttacagttgcctcccttggrtaactgtatacagcatatttaaacagactcctgtaaagttaatgtaaaagacaggagtggcttatggtaaaagttgatggaatgaataaacagttgcatt

SEQ ID NO: 143542 - DNA, 201 bp, Homo sapiens
ctgcttatgataaggagctgtccactgatttcatagtgccagctgcacccattttttaccttttattctccttaagttcagaggatgaacatataaccctstatatttctgcttctttcagtgacttttgagcactgataatagattcattaataaacccttaatggctacattagcactaaaaataatagaaaactatgc

SEQ ID NO: 143543 - DNA, 201 bp, Homo sapiens
gctcccagctcaaagagacaggagtcttatgattctaggggagcgtccctaggaagcagggacatgggcagggaatttagcctgtgcactgaacatctgtwgtggtgatctgatagctacatctgaaagcaatcagacagaagaagggaatttatgaattgctggcgaaacaaaccaatgttcccttgtgtcacctctgag

SEQ ID NO: 143544 - DNA, 201 bp, Homo sapiens
  misc_feature (1)...(201): n = A,T,C or G
gccattaaaagcccggaatgttgcacagctgagacaatctcttagccatttttgtatgtctagcacttagcggctactggaggaagggctatggaattcanactgtggttaaatgatggaactgctgggtaacccgagctggtctgaagggaactctccttaatactcaggggctggacacctgcccttcagcaattttaa

SEQ ID NO: 143545 - DNA, 201 bp, Homo sapiens
tggccaagatttccatttagacattaaacgagttaatacatgtgaagaacctagaacaatgctcagtcccgagtgttatctattattattttaccatgttytctacattacctagaatagataaagaaacatggtagagctgcaacctcagttcagccccagatgttcacagaagagcagaagcagagagtcagcagagtc

SEQ ID NO: 143546 - DNA, 201 bp, Homo sapiens
atttaaaaccagaaggaaatgtaaagctataaatcaaactctccactttaaacatcaggaaagccagtttcacacggaggagactggagagctaagatttkaccccaggtcttctgactccaaagccagtgctcccaattcctatagccatcctcatccacactgatgtgccgtcaagataaacccaagctgaaaaagcat

SEQ ID NO: 143547 - DNA, 201 bp, Homo sapiens
  misc_feature (1)...(201): n = A,T,C or G
cttcagaaatgcatatcctcaccccagtttaccgtattctgaagtccctgattaacttaccctgtctggttgttttttttttttcctgtttttccccatgnttctaaatatcaggctcacattttcaaatgctgtggtttgttttgttttgttgtttgctttttgcagactgctgccaagctaaagatcagtatattgagc

SEQ ID NO: 143548 - DNA, 201 bp, Homo sapiens
agaagacaagatgtcacgctcatggaatttaaaaccagaaggaaatgtaaagctataaatcaaactctccactttaaacatcaggaaagccagtttcacayggaggagactggagagctaagatttgaccccaggtcttctgactccaaagccagtgctcccaattcctatagccatcctcatccacactgatgtgccgtc

SEQ ID NO: 143549 - DNA, 201 bp, Homo sapiens
ttctttacctacgcttaacaggagggagaggaggcaggaaacatcatctgttccttgctaatcaacaagccctgcctctgatttgtcatcacaaccttttkaatagccgctccttagtacttctgaaggaaataactaaatgcttcagcccagtgatttttaatggaatagtatgaatcactgggttgagaggaaaaatac

SEQ ID NO: 143550 - DNA, 201 bp, Homo sapiens
aatgaccagggtgtgtgcaggagggacgtggcacgcagtgcaggtaactctgctgtactgcttatccagaaaggtgaatgcagtggcacaaaagcagctcsgccgcctgtggcatacaagcaccatcttcttccaccctccaatgcatgaatatgcagagaagcttgccgcacttcttcctgagcctcttaaggtacaatg

SEQ ID NO: 143551 - DNA, 201 bp, Homo sapiens
gtggaccaggaacttgaccccatcctcctgttgtttcttctctgcagaggagcctaccatggatgcagtccttacacacttggcttgacaaacgtagggayctacaagatggaactccctggtgggacaggttgccaaccagtgagtttggagatttttctcttgtttctttaaagactactgggtatgtgaagtagttga

SEQ ID NO: 143552 - DNA, 201 bp, Homo sapiens
catcttggcctcccaaagtgctgggattacaggtgtgagccaccatgcctggcctattatttcctaaatacttagccacctctgaaggtgagggagttggrggcagaagcatatcccctcccctaagacttttcttctctccttacaacagatctttttgtagtccttgtggtcacactagacttgttctgcattctgttt

SEQ ID NO: 143553 - DNA, 201 bp, Homo sapiens
gtttcttagatggagaataaggtgatttataaggtgtgtaagtccctaaagatattgaacaacaggtatatcataggaaaaaatatttggcttcccaaagygactacttcgaagactggtattcattgaacatacaatttctggtatgttgttgctaaaagatgagtctcattactatggaataatagagtagggaaggtc

SEQ ID NO: 143554 - DNA, 201 bp, Homo sapiens
ttcgaactcatttgaagcttacactgatgattaggagcatttatactaaatatgactgtttcacgttcaaaagaaacaaaacctgtgtttcttagatggakaataaggtgatttataaggtgtgtaagtccctaaagatattgaacaacaggtatatcataggaaaaaatatttggcttcccaaagtgactacttcgaaga

SEQ ID NO: 143555 - DNA, 201 bp, Homo sapiens
atccttgtttaaaggtgattttgatatgggaaattgttcgaactcatttgaagcttacactgatgattaggagcatttatactaaatatgactgtttcacrttcaaaagaaacaaaacctgtgtttcttagatggagaataaggtgatttataaggtgtgtaagtccctaaagatattgaacaacaggtatatcataggaa

SEQ ID NO: 143556 - DNA, 201 bp, Homo sapiens
gctgtctggttataatttctgtgtgaattcaaaagaagattttatttaatccttatgacagcacattcaatactgcacattccatatcaaatgagcatgcwgttattacaggaataagaaatatgacaataaagaattgtgattgatgtattacctaaatgacattccagaatatgtgtgtcgaggtaagtattaagtagt

SEQ ID NO: 143557 - DNA, 201 bp, Homo sapiens
tcaatggtatttctagttctagatccctgaggaatcaccacactgacttccacaatggttgaactagtttacagtcccaccaacagtgtaaaagtgttccwatttctccacatcctctccagcacctgttgtttcctgactttttaatgatcaccattctaactggtgtgagatggtatctcattgtggttttgatttgca

SEQ ID NO: 143558 - DNA, 201 bp, Homo sapiens
cagcgtgatttatagtcctttgggtatatacccagtaatgggatggctgggtcaatggtatttctagttctagatccctgaggaatcaccacactgacttycacaatggttgaactagtttacagtcccaccaacagtgtaaaagtgttcctatttctccacatcctctccagcacctgttgtttcctgactttttaatga

SEQ ID NO: 143559 - DNA, 201 bp, Homo sapiens
ctcgtcatctagcattaggcatatgtcccaatgctatccctcccccctccccccaccccacaacagtccctagactgtgatgctccccttcctgtgtccaygtgttctcattgttcaattcccacctatgagtgagaatatgcggtgcttggttttttgttcttgcgatattttactgagaatgattatttccaatttcat

SEQ ID NO: 143560 - DNA, 201 bp, Homo sapiens
aaccctctcctccattctcaccagacagatgaaactaccgaactcctaaaattcttaagaagaggaaaccctggccatttttagctgcttaataacatccrcgttgtccaaagaactctttctttagtctcaccaatttcttttattctactgttttctaatctcagaaaataatcaatgtttgcatcttttttccagaag

SEQ ID NO: 143561 - DNA, 201 bp, Homo sapiens
aactcactaattaaaaaaaaaaatttgcagaagacaaacatttaggagccagtgattgaaatcaccaagactcttttatgctaactttccctttttgggcrtcaattactactctgccttttctagtttacagtattcttcatagaaaaatgtagaagaaaaacaatattatcagagttctgtctccctctggtacttggt

SEQ ID NO: 143562 - DNA, 201 bp, Homo sapiens
agtcctttctcatgctgctgataaagaaatacctgagactgggtaatttataaagaaaaagaggtttttcttttttcttttttctttttttttttttttttacatctgccatcaccacaattttattaaaaatgaagcaaataagacaaagaatatgtgaaacctatacaaacaaatgaataaaacaatatcggaataaaa

SEQ ID NO: 143563 - DNA, 201 bp, Homo sapiens
cccacgtattagtcctttctcatgctgctgataaagaaatacctgagactgggtaatttataaagaaaaagaggtttttcttttttcttttttcttttttyttttttttttacatctgccatcaccacaattttattaaaaatgaagcaaataagacaaagaatatgtgaaacctatacaaacaaatgaataaaacaatat

SEQ ID NO: 143564 - DNA, 201 bp, Homo sapiens
catccggctagttttgtattttttagtagagactggggtttctccgtgttggtcaggctggtctcgaactcctgacctcaggtgatctgcccaccttggcstcccaaagtgctgggtttacaggcatgagccaccgcgcctggccgaaataatgtttttaaaataataataataatccagcctctaaattagaggagtacc

SEQ ID NO: 143565 - DNA, 201 bp, Homo sapiens
caatgctcagtcccgagtgttatctattattattttaccatgttctctacattacctagaatagataaagaaacatggtagagctgcaacctcagttcagycccagatgttcacagaagagcagaagcagagagtcagcagagtcatgaacacatgccttccagtccctgagtctggagggcacagttctctttcattctc

SEQ ID NO: 143566 - DNA, 201 bp, Homo sapiens
agtctcgctctgtcatccaggctgaagtacagtggtacaatctcgactcaccgcaacctccgcctcctggggttcaagggattcttctgccacagcctccygagtagctgggaccacaggcatgtgccaccaagcctgactaatttttgtatttttagtaaagacagggtttcaccatgttggccaggctgatcttgaatt

SEQ ID NO: 143567 - DNA, 201 bp, Homo sapiens
gtgctgaatggaagtggagggactgggaggagccaccactgaaagtttcacctgcagactggccctccaaggctttgcattgtgaacgctcacttcctcargctcataatttaaaggactcttagactctaatgccctacgcacttggaagctgcaaactcagataggctctggagggatctacctcattctgggcctcaa

SEQ ID NO: 143568 - DNA, 201 bp, Homo sapiens
ccctcccctgccacaaagctggagcccccaagaggccacatcttcatccatgggtcaactagaattaaatacaccaccaagaacatattacccctcacagrccaaagggcctgcaaggattctggtgctgaatggaagtggagggactgggaggagccaccactgaaagtttcacctgcagactggccctccaaggctttg

SEQ ID NO: 143569 - DNA, 201 bp, Homo sapiens
tggccacagagattttagaaatgaacaaagtatagtccctgcccacaaaaacctcctgattaatcggagaaagtcctgttaaaaacaagcacaggaccaastgccaagggctgcgatggatggaagccacctagctctcgaacatttctctttagactgaattctaattgttctacaagcatatttactaactctaaagac

SEQ ID NO: 143570 - DNA, 201 bp, Homo sapiens
gagcctcccaagtttgtgagggactgccgtagattttttttccagactatatttgagaagaactatttttttcctccagaaaactcattattgagatactyagattttaaatccaaactaaaagctgattagcatgattttttaactaagaaataaaattatctaagcagttttatttggataactataggtgactttcac

SEQ ID NO: 143571 - DNA, 201 bp, Homo sapiens
accagggtgtgtgcaggagggacgtggcacgcagtgcaggtaactctgctgtactgcttatccagaaaggtgaatgcagtggcacaaaagcagctcggccrcctgtggcatacaagcaccatcttcttccaccctccaatgcatgaatatgcagagaagcttgccgcacttcttcctgagcctcttaaggtacaatgctct

SEQ ID NO: 143572 - DNA, 201 bp, Homo sapiens
gaaaagggtcccatgagaaaataagtttgggaaacactttaaactatatctcccttctgaagagaaacagcgtacactagtctattataggtactaaaatrtctgtagtaaagaaatctgtataatctggtatttctcaaaatatttacccactaaattgatttttttctgatgtgaaagatattaacagcaaataaaatt

SEQ ID NO: 143573 - DNA, 201 bp, Homo sapiens
aacatacatgaaagaagtagagaaaatggaatagaaaatgagttcaaacattctcactgaatcttcccagtaacattgacagtcttccctggaaatgggargccatcttttctacccctcctgtgactctcatatattttgctaaacaatgtttttgtcaaatgtctcttcttttcaaggatttactgatactccacaatt

SEQ ID NO: 143574 - DNA, 201 bp, Homo sapiens
gaataagaagagtgtgaagtcatggaagaaagagacaggagaggttcaggaagtggggtggggaattccaaagagtcaagtgcagagaaggccagagagartgagggctggaagatgaccagtggattccacacttgcaggtaactttagtagagtggttgatgaggcagaagtcagactgcaaccaattgagatgtgaat

SEQ ID NO: 143575 - DNA, 201 bp, Homo sapiens
atttacacagtgagatgaggaaatctcccaggaagtctaatgtctagatgagaagctcagtgagatgaagatagaaacctgcacaacactgacttttaacrggcaggagaggccgggcacggtggctcacgcctgtgatcccagcactttgggaggccgaagcggcagatcacttgaggttaggagtttgagaccagccta

SEQ ID NO: 143576 - DNA, 201 bp, Homo sapiens
ccttggagtcaagacagcttacaacctcctcaatgggcaactccaattttgcagatagaaaaatgagactgaagaaacgaaaggatttttgaattcttagrgacactcagaattttttttccatctcagaagcacaacgaatgcagagagacacaatgaaaagctttttaaaaggtgaaattctcagaaaactaaagctat

SEQ ID NO: 143577 - DNA, 201 bp, Homo sapiens
ctccaactcccttccccctccagcctactttcataaatcctataaccttggagtcaagacagcttacaacctcctcaatgggcaactccaattttgcagayagaaaaatgagactgaagaaacgaaaggatttttgaattcttagagacactcagaattttttttccatctcagaagcacaacgaatgcagagagacacaa

SEQ ID NO: 143578 - DNA, 201 bp, Homo sapiens
ttttaaaattattgcagctgagatagcatgtcattattttcacacattatatgagcattgggcaacagagccagacctgtctcagtaataataataattarcattttaataaatcacactgtgtccactgcatattttcaaatattttagaatctttttttcattttaaagggtgaggaagcccttaataaatactccctc

SEQ ID NO: 143579 - DNA, 201 bp, Homo sapiens
aaaaaaagaggggcattgatggctgaagggtttttcttttttcctctcttgcaaataattcctttaaccattccaacaccaaatagaaagaattttaaaamtatatttacagataagctgtcggcctcttccccgtgaagaagtaaatcagatccatgaggactgcaagcacatgggactcctcgttggcagaggcagcat

SEQ ID NO: 143580 - DNA, 201 bp, Homo sapiens
gcactgataatagattcattaataaacccttaatggctacattagcactaaaaataatagaaaactatgcattttgcttacagttgcctcccttgggtaaytgtatacagcatatttaaacagactcctgtaaagttaatgtaaaagacaggagtggcttatggtaaaagttgatggaatgaataaacagttgcattttta

SEQ ID NO: 143581 - DNA, 201 bp, Homo sapiens
cccttggcattttgcagaccatcaaataaagccattaaaagcccggaatgttgcacagctgagacaatctcttagccatttttgtatgtctagcacttagyggctactggaggaagggctatggaattcatactgtggttaaatgatggaactgctgggtaacccgagctggtctgaagggaactctccttaatactcagg

SEQ ID NO: 143582 - DNA, 201 bp, Homo sapiens
acccaacctttggatctatcagctactcaccactgcgtgcccctcagcaagtctcctcccttggcattttgcagaccatcaaataaagccattaaaagccmggaatgttgcacagctgagacaatctcttagccatttttgtatgtctagcacttagcggctactggaggaagggctatggaattcatactgtggttaaat

SEQ ID NO: 143583 - DNA, 201 bp, Homo sapiens
cagcacagtcaggctgggacaacccctggagttgcagagtcagatgtcctgtcttgttccaagcctttagaatccggtgactgggttagagttaggagccmagaaacccaacctttggatctatcagctactcaccactgcgtgcccctcagcaagtctcctcccttggcattttgcagaccatcaaataaagccattaaa

SEQ ID NO: 143584 - DNA, 201 bp, Homo sapiens
acttgttttttcaacattcacacacacagcacagtcaggctgggacaacccctggagttgcagagtcagatgtcctgtcttgttccaagcctttagaatcmggtgactgggttagagttaggagcccagaaacccaacctttggatctatcagctactcaccactgcgtgcccctcagcaagtctcctcccttggcatttt

SEQ ID NO: 143585 - DNA, 201 bp, Homo sapiens
aatacatgtgaagaacctagaacaatgctcagtcccgagtgttatctattattattttaccatgttctctacattacctagaatagataaagaaacatggwagagctgcaacctcagttcagccccagatgttcacagaagagcagaagcagagagtcagcagagtcatgaacacatgccttccagtccctgagtctggag

SEQ ID NO: 143586 - DNA, 201 bp, Homo sapiens
tggcctattatttcctaaatacttagccacctctgaaggtgagggagttggaggcagaagcatatcccctcccctaagacttttcttctctccttacaacrgatctttttgtagtccttgtggtcacactagacttgttctgcattctgtttggttaagttacaagagggccatgtcaaatgacttctccacgattctcag

SEQ ID NO: 143587 - DNA, 201 bp, Homo sapiens
ggaaaacaactaaaaaatcctggataaaatgaaatgcattcccttcaaagcatggatacaagaaagcacgaattctcagaaacgcaaatagatcattacgrcactgcagccagctttgaccctgagagaatttcttgaacctggtaaccttgagcttccatgttgatggctctgtggagtgcagggaagagatgacgaagt

SEQ ID NO: 143588 - DNA, 201 bp, Homo sapiens
gcacctgccactgtgcccggctaattttttgtatttttagaagagacagggtttcaccatcttggccaggctggtcttgaactcctgacctcatgatccayctgcttcagcctcctaaagtgctgggattacaggtgtgagccaccgcgccctgtcgaaaacagcatttcttgaagggtttccaatggttttgaacttgtt

SEQ ID NO: 143589 - DNA, 201 bp, Homo sapiens
aggatgaggagaaagaagaaagggaagagaacagagaagaaaacagcatttcttttttttttttttttttttgagatggagtctcaccctgtcactcaggmtggagtgcagtggtgcaatctcggctcactgcagcctctgccctccgagttcaagcgattctcctgtctcagcctcccgagtagctgggattacaggcac

SEQ ID NO: 143590 - DNA, 201 bp, Homo sapiens
tatttttagtagagaccgggtttcaccatgttggccaggctggtctcgaactcctgacttcaggtgatccgctcgccttggcctcccaaagtgctgggatyacatgcgtgagccaccgtgcctggccagctgttttcttaactcacctcttcaagggacaagactatttatggaatctttgaacaggattggaatacaaaa

SEQ ID NO: 143591 - DNA, 201 bp, Homo sapiens
ataatagcaatagctctggtgtcaattttaaaagacaacaagctgggcgtggtggcatgcctgtagtcccagctactcgggaggctgaggtgggaggattscttgagctgaggaagtcgaggctgcagtgattcatgattatgccactgcactccagcctgcatgaaagagcaaggcccggcggggcatggtggctgacag

SEQ ID NO: 143592 - DNA, 201 bp, Homo sapiens
tgattcaaggcattctattagctctattataatagcaatagctctggtgtcaattttaaaagacaacaagctgggcgtggtggcatgcctgtagtcccagytactcgggaggctgaggtgggaggattccttgagctgaggaagtcgaggctgcagtgattcatgattatgccactgcactccagcctgcatgaaagagca

SEQ ID NO: 143593 - DNA, 201 bp, Homo sapiens
agagtcatgaacacatgccttccagtccctgagtctggagggcacagttctctttcattctccccattcttttgtccaggctgagctgcattttttgtttmcttgctttttttttttctttttgagacggagtctcactctgtcacccaggctgcagtgcaatggcgcaatctcggctcactgcaatctctgcctcctggg

SEQ ID NO: 143594 - DNA, 201 bp, Homo sapiens
agcgtacactagtctattataggtactaaaatgtctgtagtaaagaaatctgtataatctggtatttctcaaaatatttacccactaaattgatttttttytgatgtgaaagatattaacagcaaataaaattggcctgtaacaaactgtagcaattaatgtcctttacagcaagttcagacaacttggtttgtgttttca

SEQ ID NO: 143595 - DNA, 201 bp, Homo sapiens
cgatgctgttctccaaattgaattccatctttcaatgtctcaagttgctcatgtgaattgaagtgaaaactggtgaattggatgaaaatcattagctgtcrtctggttagcctaaaaaggcactatccgattagttaaaacaataagacaaaacaaaacaaatacctattcagaaatagaccttggatatagttttattaa

SEQ ID NO: 143596 - DNA, 201 bp, Homo sapiens
gttacctaagatgctatacagaaatgagatacaattggcattttgggccaggcttagtggttcacgcctgtaatcacaacacttccagaggccaaggcagrcagatggcttgatctcacaagtttgagatcagcctgggcaatctggagaaacccgatctctactaaaaatacaaaacactagccgggtgtggtggcatgc

SEQ ID NO: 143597 - DNA, 201 bp, Homo sapiens
gatatgaagaaccagagagagtcgaggaagaagctctcatgttggtttggagtgggcaagaatgagtccagctttgagcatgctccattcaaggtgttcawaaacatctcactctatctacagatgcttcttgacttatagtggggttacctcctgataaacccctcctaaattgagaatattttaagtcaaaaatgcatt

SEQ ID NO: 143598 - DNA, 201 bp, Homo sapiens
tgcagacttagccacaataagcaagaaaaagctcctgccctctattccaggaaggagatagacataaatgaataagtaaatatgtaaaaatatatatgtgkgtgaatatgtatgtatttatgtatgtatccaatagagaaacatgccatgaataaaaccaaatctggaaagggaatagaaaaatataatgggggtgagggg

SEQ ID NO: 143599 - DNA, 201 bp, Homo sapiens
agtcttggaaaaccacaccactggccgggtgcggtggctcacacctctaatcccagcactttgtgaggctgaggcgggcggatcacgaggtcaggagatcragaccatcctggctaacacggggaaaccctgtctgtactaaaagtacaaaaaattagtcgggcatggtggcgaacgcctgtagttccagctactcaggag

SEQ ID NO: 143600 - DNA, 201 bp, Homo sapiens
atctataaatattttttaaaagatattcaagggggaaagagaagggacttctaggccaggctttctgggtagcagaatcttaaataatgagataaacaacyaaactgtgcatgaaatgtggcagagtacaaagaactaattttgcacaccacatcacaccacacagatgtggctggtgcaaaggcttgagtagtcagtgga

SEQ ID NO: 143601 - DNA, 201 bp, Homo sapiens
caccaacctaatacggtgataaataagatctggtccttccttcgtggagctggtgggagagaaaggcaaatacatagaaaattacaatataatgtagtaarctcatctataaatattttttaaaagatattcaagggggaaagagaagggacttctaggccaggctttctgggtagcagaatcttaaataatgagataaac

SEQ ID NO: 143602 - DNA, 201 bp, Homo sapiens
tgttggaggtggagccagtaggaggtatttggatcatgggggcggattcctcatcaatggcttggtgacgagtgacttcatctgagatctggttgtttaaraatgtatggcacctccctaactccctctcttgctcctgctctccccacacgacccatctgctcaccctttgccttctgccatgattgtaaggttcctgag

SEQ ID NO: 143603 - DNA, 201 bp, Homo sapiens
ctcccctctatatctacctatggaaatcctagtctttttcaagatcaagctctccatcgcatctccttaaagcttgcctttgcttctcctctatccaggaratccacccttcagagaattcctctggtactcactgtctaaggagctgctttgaaaagatcttttccactatattagtccattcaggctgctatagcaaag

SEQ ID NO: 143604 - DNA, 201 bp, Homo sapiens
acctaaatgctcaacattaggaggttgaacaacttactgcaatgaaatactaggtaacgtttaagaagactaagtccaaatatactgacatggaaagatgyccaagatataccatatattattaaaaggaaattgccaaacattattaaatgacttattttttaaaacatgcatatagatgtatttgcatgcatagaaaaa

SEQ ID NO: 143605 - DNA, 201 bp, Homo sapiens
atccacaaggaacatctttctcctgtggtgacggcatatttccagaaacccctgctgctccaccaggggcacatggagtggctctttgatgctgaaggaarcagatacctggatttcttttccgggattgttactgtcagtgttggccattgccacccgtgagtatccttaaaatctggagatttttattccaaaagaatg

SEQ ID NO: 143606 - DNA, 201 bp, Homo sapiens
gaaatatgaatttcaaaattttctgtcttgtggttttatgactttcaaacaatgtaattgaaaactatctaacacaggcaatcctcaagaaggactatcgygaggactaggtaaaaataagaatagctggaactctctgagtacctgctatgtgtcagacactgttcataacactttgcatgtgttaactcagttcatacc

SEQ ID NO: 143607 - DNA, 201 bp, Homo sapiens
cgcggctctttggggtaaagatagaggcagacagaggatggtcaaagcggacaactaacagtatggatgataaacatcacagtcatgcagtaaataatctrtctcctgtataattaattctaacccctgtgaaagcaattctggccgttcttagctcagccccgggctctgacttggtgaccctgctaagccttagtggcc

SEQ ID NO: 143608 - DNA, 201 bp, Homo sapiens
catgcacacacacacggcaactcctttattcgacatggtacttacaggttagaaattgtagaatcaataggtatttatgagggatccacaaagaagagaartacaggagagatattttataaataaagatacaaacacgactagcacttcattgtattttaattttttaaaacactaccacaacaaaaatgacttattagt

SEQ ID NO: 143609 - DNA, 201 bp, Homo sapiens
aaattcagctggcattttctctctcactttctctctctttctttctttctctctctttctttctccctctctctctctctctctctgttatgcatgcacaygtgcatgcacacacacacggcaactcctttattcgacatggtacttacaggttagaaattgtagaatcaataggtatttatgagggatccacaaagaaga

SEQ ID NO: 143610 - DNA, 201 bp, Homo sapiens
tgactcatgtggccatctgaccttcctgggtactccagcaaaaattatagttatatttttgttctcaggctaataaaaattcagctggcattttctctctyactttctctctctttctttctttctctctctttctttctccctctctctctctctctctctgttatgcatgcacatgtgcatgcacacacacacggcaac

SEQ ID NO: 143611 - DNA, 201 bp, Homo sapiens
gacacctctagtggttaaaggagtttattctcatgtgtaaataaaatctgcctcttgaaactctttgagaaaaaacagtatatttgggtccaatgaccagkgtgtgtgcaggagggacgtggcacgcagtgcaggtaactctgctgtactgcttatccagaaaggtgaatgcagtggcacaaaagcagctcggccgcctgt

SEQ ID NO: 143612 - DNA, 201 bp, Homo sapiens
ctagctccaaatatttaatgaatctggttcagcttatccctgtttcatcacagtcttatgttggcagcctttttttttttttttttttttttggcgggggraggttttgtcttctgggtctatttgcatgtatttattagtctagtatattgtctaacacctgcctctcctcattccctacaagaatagtcaacagtcatt

SEQ ID NO: 143613 - DNA, 201 bp, Homo sapiens
accatcttggccaggctggtcttgaactcctgacctcatgatccacctgcttcagcctcctaaagtgctgggattacaggtgtgagccaccgcgccctgtygaaaacagcatttcttgaagggtttccaatggttttgaacttgttttcccaggtgcagacaggatttggaaggttgggctctcacttctggggcttccaa

SEQ ID NO: 143614 - DNA, 201 bp, Homo sapiens
ttttttttttttttttgagatggagtctcaccctgtcactcaggctggagtgcagtggtgcaatctcggctcactgcagcctctgccctccgagttcaagygattctcctgtctcagcctcccgagtagctgggattacaggcacctgccactgtgcccggctaattttttgtatttttagaagagacagggtttcaccat

SEQ ID NO: 143615 - DNA, 201 bp, Homo sapiens
agtgcagtggcgcgatcttggctcactgcaacctcctcctcccggattcaagcaattctcctgcctcagcctcccgaatagctgggactacaggcgccccscaccgagccctgctaatttttgtattttttttttaaagtagagacggggtttcaccctattggccaggctggtcccgaactcctgaccttgtgatccacc

SEQ ID NO: 143616 - DNA, 201 bp, Homo sapiens
tatgacaaaaaggaaaaggggcagagccaaattgtacaagggtttgtatggagactggagggtgaatggcctggattcagcattggggatggaggaggaascaaactgagagaaacatgagaaacatcctaaacacaaggttttggatttttagtttagtgcatttcctcaaagtcatatttgattctctgatgatttgtt

SEQ ID NO: 143617 - DNA, 201 bp, Homo sapiens
tttttgagatggagtctcaccctgtcactcaggctggagtgcagtggtgcaatctcggctcactgcagcctctgccctccgagttcaagcgattctcctgyctcagcctcccgagtagctgggattacaggcacctgccactgtgcccggctaattttttgtatttttagaagagacagggtttcaccatcttggccaggc

SEQ ID NO: 143618 - DNA, 201 bp, Homo sapiens
tcagtctttcaaagtgctcggattgcaggcctaagccattgcaccaggctaggatgactattttaaaagatgtaaagcatctgcatgaattttcatcatgyctctaggaagtgagaccacgctctcaattgccaacaagtgctgtgattcacccagagtcatccaagccagggcttgaccccaggccctccccatctactc

SEQ ID NO: 143619 - DNA, 201 bp, Homo sapiens
acaggtacaggggaccattttacattccccattgtgaccaactttgccttcattttctcctcatatttccctttcaccctccttccttcctctcctcttcrctttcttacccctgaaaattgcagttttttgaaacttgacacatgcatgatgatttaaatgcattatctccttttatcttcaaccaaacttgttagtgag

SEQ ID NO: 143620 - DNA, 201 bp, Homo sapiens
cactacctagactgaatgccatcctcatcacctggccttgcaaaaacctttgggacttttatgtctactttcttacctactctacctaggtctgtgcctgyttgtgcttgctcatccaaacacacactcactaacatacatttattgagcacctgccatgtgcaatatatacattcaggcaaaatatttgagcatctatta

SEQ ID NO: 143621 - DNA, 201 bp, Homo sapiens
catcttccagtagggaaaccatctgtgatatttctttccacagagcattcatcttattcacaaatatatcccagttctcagcaaagcctgacaataacaarccttgggatttcagaatctacattttcaactgcattgagacacacctttattctttcctaaattcttttttgtttgttttttgaggcaaagtgtcgctct

SEQ ID NO: 143622 - DNA, 201 bp, Homo sapiens
gtctcactctgtcacccaggctgggagtgcagtggtgcgatcttggctcactgcaacctccaccttacaggttcaagctattctcgagcctcagcctcccrggtagctgggattacaggcacacaccaccatacctggctaatttttgtatttttagtagaaatggggttttgccatattgcccaggctggtctcaaactc

SEQ ID NO: 143623 - DNA, 201 bp, Homo sapiens
ttgattctctgatgatttgttttcttattttttggtgtctcctcagacatttcgcattgcgccctcaatgtgcatcactaaaccagaagttgattttgcaktagaagtatttcgttctgccttaacccaacacatggaaagaagagctaagtaacattgtcagaaataaataaaaccacaagtctcaagaatttgccacgt

SEQ ID NO: 143624 - DNA, 201 bp, Homo sapiens
ggtagtttctctggggaggtctcaaatgattgtttccttaagaatgacacaaaaatagccctgcttgccactaaactacctcattccagatattgtacctytaagtcattggaagcatctgaaaccctcttaatcccttaatgctagtgtataaattggtgtccatgtgtgagagatagagacacagacagaggcaaagaa

SEQ ID NO: 143625 - DNA, 201 bp, Homo sapiens; identical to SEQ ID NO: 26563

SEQ ID NO: 143626 - DNA, 201 bp, Homo sapiens
tttcctcaaagtcatatttgattctctgatgatttgttttcttattttttggtgtctcctcagacatttcgcattgcgccctcaatgtgcatcactaaacsagaagttgattttgcagtagaagtatttcgttctgccttaacccaacacatggaaagaagagctaagtaacattgtcagaaataaataaaaccacaagtc

SEQ ID NO: 143627 - DNA, 201 bp, Homo sapiens
agcacttagcggctactggaggaagggctatggaattcatactgtggttaaatgatggaactgctgggtaacccgagctggtctgaagggaactctccttratactcaggggctggacacctgcccttcagcaattttaagtgaatgggtaataaggaaataaattatgaggccacgtgtcttcctttcctctccaggtca

SEQ ID NO: 143628 - DNA, 201 bp, Homo sapiens
cctaaagtgctgggattacaggtgtgagccaccgcgccctgtcgaaaacagcatttcttgaagggtttccaatggttttgaacttgttttcccaggtgcaracaggatttggaaggttgggctctcacttctggggcttccaaacccacgatgtcctgcctgacattgtcaccatggctaaagggattgggaatggctttc

SEQ ID NO: 143629 - DNA, 201 bp, Homo sapiens
ggccttgcaaaaacctttgggacttttatgtctactttcttacctactctacctaggtctgtgcctgcttgtgcttgctcatccaaacacacactcactarcatacatttattgagcacctgccatgtgcaatatatacattcaggcaaaatatttgagcatctattatgcaccagtgctgcagacttagccacaataagc

SEQ ID NO: 143630 - DNA, 201 bp, Homo sapiens
ctctattccaggaaggagatagacataaatgaataagtaaatatgtaaaaatatatatgtgtgtgaatatgtatgtatttatgtatgtatccaatagagamacatgccatgaataaaaccaaatctggaaagggaatagaaaaatataatgggggtgaggggaggggctgtgatagggaggtcaccacgttttaagtgttg

SEQ ID NO: 143631 - DNA, 201 bp, Homo sapiens
gcccctgtgtggcttcagcaaaagggcatatactggaaggttatgaaggaatggagggaaggagggagggcagctgaaataatcaacaggaggctgaggasgtggacaggaccccacacgcaaagaagccaaggaaggccaggcaggagtagagtaacttctggtaggaaccgcctcttagcagctttgcttagcggatgc

SEQ ID NO: 143632 - DNA, 201 bp, Homo sapiens
ggctgaggaggtggacaggaccccacacgcaaagaagccaaggaaggccaggcaggagtagagtaacttctggtaggaaccgcctcttagcagctttgctyagcggatgcaggcacctggcattcactgccatcatccttgcacccagagcacgcatgggacagaggggacctccacagagaaggctgtgagagatcatgt

SEQ ID NO: 143633 - DNA, 201 bp, Homo sapiens
gcagaggagaaaaatttctctaccgaccagacactgtccctcaggcgtccaaaccccaacacagcttcagcaggcctccatgggaggcagtgtctcaaacstcaatatcagtgagggacttcaaaactgccaaggcctcgaattccatctgtcactgatgtcctctaaggtggatggaggatgaaatcttcctttcctaac

SEQ ID NO: 143634 - DNA, 201 bp, Homo sapiens
atgaaatactaggtaacgtttaagaagactaagtccaaatatactgacatggaaagatgcccaagatataccatatattattaaaaggaaattgccaaacrttattaaatgacttattttttaaaacatgcatatagatgtatttgcatgcatagaaaaagtatctgtttcacaccaaattgtcaatagaaggtgtcccta

SEQ ID NO: 143635 - DNA, 201 bp, Homo sapiens
ttttcacccacagtggaaactgttctacagactgttgttaaaattgctagtgttactgtcatgataatgatgataatgatgatctaacttttttatatacwttgaaagggctgatgctattattataggtcttcttggtctggtcttttgcagggtgtgaatggagttgtccagtacccaaaggggtttctaaaggaagcc

SEQ ID NO: 143636 - DNA, 201 bp, Homo sapiens
tttctagaagtgtgtcccaaagaaataccctcaaaactgtctaaaaatatgtatgaataggaatatttgcagcattgtttataatcatgaaaaattggaarcaacctaaatgctcaacattaggaggttgaacaacttactgcaatgaaatactaggtaacgtttaagaagactaagtccaaatatactgacatggaaaga

SEQ ID NO: 143637 - DNA, 201 bp, Homo sapiens
gggcctcagactgcttctgttcgtggtggaaggggaagaggcgctggcatatgcagaggtcactgatgagggagagagagagagagagaaagcaagagatyaggggttggtaggtgccaggctgttttcaacagccagctctagaaggaactaatggagtgacaactcatcatggagaggacagcaccaagacattcatga

SEQ ID NO: 143638 - DNA, 201 bp, Homo sapiens
tcacccccctcccagcttccccgcttctgggtctccaatgtctattgtgtacccatagcttagctctcacctataagtgagaacacttattagttgctgtkaaagacattattttcttttttatggctgagtggtattccatggcgtgtgtgtgtgtgtgtgtgtgtgtgtgtgtgtgtgtgtgtgtatacaccacatttt

SEQ ID NO: 143639 - DNA, 201 bp, Homo sapiens
gacgtggcacgcagtgcaggtaactctgctgtactgcttatccagaaaggtgaatgcagtggcacaaaagcagctcggccgcctgtggcatacaagcaccrtcttcttccaccctccaatgcatgaatatgcagagaagcttgccgcacttcttcctgagcctcttaaggtacaatgctcttcctgcaggaggtgaatgtt

SEQ ID NO: 143640 - DNA, 201 bp, Homo sapiens
aggcttgagtagtcagtggagctggtatgaagcccttcctgcttgtcaggcactgtcctaacactttgcatgaactgactcatttaatgctcccaacaagsctataaaataagtactattactatccttattttacagataaaggaaaagacacacagagaggttaagtaatgacagaaccaggatccaaactcaggtagt

SEQ ID NO: 143641 - DNA, 201 bp, Homo sapiens
actctttctttagtctcaccaatttcttttattctactgttttctaatctcagaaaataatcaatgtttgcatcttttttccagaagtcatggtatagagyaataagtcctcttttcacccacagtggaaactgttctacagactgttgttaaaattgctagtgttactgtcatgataatgatgataatgatgatctaact

SEQ ID NO: 143642 - DNA, 201 bp, Homo sapiens
ctcccaggatccttgagatgcatcctttcctgagccgtaagtggaaaccagggggacgtgggtcagtagaggatcagcgagagggtaagacttgagctccraaggctgctgcctgggattctggaatgttagacctgggtgaggtcttagagatgaggcatgtttttgacacacaggttctcaccctgagtcaatgcccat

SEQ ID NO: 143643 - DNA, 201 bp, Homo sapiens
cagtggcgcgatcttggctcactgcaacctcctcctcccggattcaagcaattctcctgcctcagcctcccgaatagctgggactacaggcgccccccacmgagccctgctaatttttgtattttttttttaaagtagagacggggtttcaccctattggccaggctggtcccgaactcctgaccttgtgatccacccatc

SEQ ID NO: 143644 - DNA, 201 bp, Homo sapiens
aattcaaaagaagattttatttaatccttatgacagcacattcaatactgcacattccatatcaaatgagcatgcagttattacaggaataagaaatatgrcaataaagaattgtgattgatgtattacctaaatgacattccagaatatgtgtgtcgaggtaagtattaagtagtcatggtactaccagggttcaacaca

SEQ ID NO: 143645 - DNA, 201 bp, Homo sapiens
gggggccaagggtcaacaagagtcattctgctgtatatacttttatacttgctgatatttatatatatacatacacatatatatttatatatgtatatatrtttatttatttcaatagcttttgggatacaagtcggttttggttacatggatgaattgtatagtggtgaagtctgagactttagtgcactgtcacccaag

SEQ ID NO: 143646 - DNA, 201 bp, Homo sapiens
tgccaaatctttggcgaaatgcctgcagcacttcaacacctttggagggaaccccatggcctgtgccattggatctgctgtgcttgaggttggttccagcrgccacattaacctcactcatttcacaaatgactctttcaaaaccacacatgcattagcagaactctatcatgctgagttgttaaaggggagagttaattc

SEQ ID NO: 143647 - DNA, 201 bp, Homo sapiens
aaagaactgtaacaaatttctggaagaatgtctaagaagtaaatgatggttttttttgtggggaggaaaactaggtggctgggggccaagggtcaacaagrgtcattctgctgtatatacttttatacttgctgatatttatatatatacatacacatatatatttatatatgtatatatatttatttatttcaatagctt

SEQ ID NO: 143648 - DNA, 201 bp, Homo sapiens
aacggagtttcaccatgttggccaggctggtctcaaactcctgacctcaggtgtttgaccttggcctcccaaagtgatgggattacaggcgtgagccactrcacccctatccgaaagccagcccattctgatctacctgtagggaagactaattctcccatgcctatgatgaaactcagggttccaccacacttttgaggt

SEQ ID NO: 143649 - DNA, 201 bp, Homo sapiens
ggcacaatcttggctcattgcaccctctgcctccgcaggtgcaagcaattctcctgcctcagcctcctgagtagctgcgattacaggtgcgcaccaccacrcccagctaatttttgtatttttagtagaaacggagtttcaccatgttggccaggctggtctcaaactcctgacctcaggtgtttgaccttggcctcccaa

SEQ ID NO: 143650 - DNA, 201 bp, Homo sapiens
aacaggtttttttagtccatttgtgttgctgtaaaggaatacctgaggctgggcaatttatcaagaaaagaggtttatttggctcatggttctgcagaccrtacaggaagcatgacaccagcatctgcatctgatgagggcctcagactgcttctgttcgtggtggaaggggaagaggcgctggcatatgcagaggtcact

SEQ ID NO: 143651 - DNA, 201 bp, Homo sapiens
tgccccagctccacttgactgacagtaactccctcttcatctatcctggggcagactcagcttctctacttttctatcctgctttcttacacagaggaaaygctcatcaaagattgttaatcataatgatccctgtcataatatttgtatgaccctcatggagcctgtgacatattgttgtatttctacttgacggatgag

SEQ ID NO: 143652 - DNA, 201 bp, Homo sapiens
atctacaggaaaacagtcaagaagttgggacctacatgttactaaagtttgctaagctgcgggatgaatttgaaattgttggagacgtccgaggcaaaggyctcatgataggcatagaaatggtgcaggataaggtaggtgctaatctgcccctctctctcagctgcttggagccagcaggagatataggaggaaacatca

SEQ ID NO: 143653 - DNA, 201 bp, Homo sapiens
aatcaggcaattctgccaccctgtcattcattccacaagtgcttactaagtgtctactttgtatcaggcactgtgctaggtgttatggatacagaatggartaagacacagtccctgccatcggacatgcccactggtgataacagtcctctatgaaagtctctatggcagccttcccagagtaccttgagagggagccta

SEQ ID NO: 143654 - DNA, 201 bp, Homo sapiens
agagagacagacagacagagagacaggcagggagactgagagccagaaagaaatcgaggagacttcaccagaaaggctctggcagaaatgtgcgtggagawgtttgtatggctttatttaatcaggcaattctgccaccctgtcattcattccacaagtgcttactaagtgtctactttgtatcaggcactgtgctaggtg

SEQ ID NO: 143655 - DNA, 201 bp, Homo sapiens
tttttttttttttttttacatctgccatcaccacaattttattaaaaatgaagcaaataagacaaagaatatgtgaaacctatacaaacaaatgaataaawcaatatcggaataaaaggcactcttttaaattgaaaatagttttgtaaagtaaactcactaattaaaaaaaaaaatttgcagaagacaaacatttaggag

SEQ ID NO: 143656 - DNA, 201 bp, Homo sapiens
  misc_feature (1)...(201): n = A,T,C or G
cgacataagcttagatgcgttcttagaaatcagaggtgaatgcgaatgatgttctatttcatcttcatagccttcctgggttttctcttttgtcctactcngtggaccaggaacttgaccccatcctcctgttgtttcttctctgcagaggagcctaccatggatgcagtccttacacacttggcttgacaaacgtaggga

SEQ ID NO: 143657 - DNA, 201 bp, Homo sapiens
ttgcaatttctgcctgggcagctgggtctctgttatgcccaggtgtattggatgtccctggtgtaccacaggcaacttgggccagcctgctcctgctgagmccatcctcccttctccaatctgcccacaaactgatcgaagtccaggctggagaaagttaatctgctactttaaaaaaatgagtatatccagtcagcttga

SEQ ID NO: 143658 - DNA, 201 bp, Homo sapiens
acttcctctgtgttccaggcagaaagcctctgctctgtgaattccaaagtttgcctacaaatgaatgaaatttgtgctagtgggctggttgatttgttagyacattcgctgatcagtttaacaagtataacagaacttaaatctccaaattgatgtctatcaaataagttgctaacagccatatgtgatgttattagaccg

SEQ ID NO: 143659 - DNA, 201 bp, Homo sapiens
ttttaaataaaatcaagtaaactgcaaggctctgagaatcttgaatgcacaaaacttctatgcagtcatcactgtactcaccttctgttcccacttactgwacccacattttcagcatctgaatcagatacctaattattcttattctttcagatgcccttacccactgcacccttgagcaagctgtttccaggctaacat

SEQ ID NO: 143660 - DNA, 201 bp, Homo sapiens
gctgagcacatctgtggccaagtcaattgctggatttttcgcagaacctattcaagtgggtatatgaaccttagacattaatggagctgaatcttcaattrtcagaaagttttaactcatatattctagagaattccaaatgaattaagtgctcactgtgtccctctctaaattcattctcttggtctccttgaaaaaaga

SEQ ID NO: 143661 - DNA, 201 bp, Homo sapiens
ctgtttagaaccaaataacaggtgtggataaaaattctgaagattcagtcatgtatggatacagttgacctgggacctttgttattccagagtagaagaayttctctctctctctctctctctctctctctctctctctcacctttcctgcttccttggtgattcccacttccaattctgacacacagatgaaggcttctg

SEQ ID NO: 143662 - DNA, 201 bp, Homo sapiens
aacattgaaatcagtttcctttgtagagggcccacatagctgatttctaagaaaaaattatctcttcaaagcagatccttcaattttcatcttaagtgggrgaagaatgagggaggaaaactaagaagccctcttgtcttgatggcagccatatgctaccctaacttggctgtcttgtgttcatgctttgccacactcctt

SEQ ID NO: 143663 - DNA, 201 bp, Homo sapiens
ctagttctcacagtttagccctaaattattttcattgtctctttccaatcagtcgtaagtggaatgcatgatagcattttgaagtcaatgagaggattctwgtccttccctctccctcaggtcctttctgatccaatagtctgaaagtttgaatatgtattttgcttatgttaaggctttaagacagaacaaaatgcacat

SEQ ID NO: 143664 - DNA, 201 bp, Homo sapiens
atgtgcctgtgcttcacgggccgtaaacaggtacaggggaccattttacattccccattgtgaccaactttgccttcattttctcctcatatttccctttyaccctccttccttcctctcctcttcgctttcttacccctgaaaattgcagttttttgaaacttgacacatgcatgatgatttaaatgcattatctccttt

SEQ ID NO: 143665 - DNA, 201 bp, Homo sapiens
  misc_feature (1)...(201): n = A,T,C or G
atgcatgaatatgcagagaagcttgccgcacttcttcctgagcctcttaaggtacaatgctcttcctgcaggaggtgaatgttatgggggagaaaaaaagntatgatgctcccagctcaaagagacaggagtcttatgattctaggggagcgtccctaggaagcagggacatgggcagggaatttagcctgtgcactgaac

SEQ ID NO: 143666 - DNA, 201 bp, Homo sapiens
cactccagcctgggcgacagagtgagactccttctcaaaaaaaaaaaaaaaaaaaaagaaaaaagaaaaagaaaaaaaccacactacctagactgaatgcyatcctcatcacctggccttgcaaaaacctttgggacttttatgtctactttcttacctactctacctaggtctgtgcctgcttgtgcttgctcatccaaa

SEQ ID NO: 143667 - DNA, 201 bp, Homo sapiens
ccctgctgctccaccaggggcacatggagtggctctttgatgctgaaggaaacagatacctggatttcttttccgggattgttactgtcagtgttggccaytgccacccgtgagtatccttaaaatctggagatttttattccaaaagaatgcatggaaaacaattatgttagtgactctgaactcttgatttgcttatct

SEQ ID NO: 143668 - DNA, 201 bp, Homo sapiens
taatccctgctactcaggaggctgaggcaggagaattgtgtgaacctgggaggcggaggttgcagtgagccgagattgtgccactgcactccagcctgagygacagagtgagactctgtctcaaataaaataaaaataataacagtaataataataaaaggcaggagaaggaaaaagctgcccaggtagaggcagaaagcg

SEQ ID NO: 143669 - DNA, 201 bp, Homo sapiens
cactctatctacagatgcttcttgacttatagtggggttacctcctgataaacccctcctaaattgagaatattttaagtcaaaaatgcatttaatacacytaaccaactgtacatcatagcttagccagcataccttaaatgtgctcagaacacttgcattagcctacagttgagcaaagtcatgtgacaaagcctattt

SEQ ID NO: 143670 - DNA, 201 bp, Homo sapiens
ataaacatctcactctatctacagatgcttcttgacttatagtggggttacctcctgataaacccctcctaaattgagaatattttaagtcaaaaatgcakttaatacacctaaccaactgtacatcatagcttagccagcataccttaaatgtgctcagaacacttgcattagcctacagttgagcaaagtcatgtgaca

SEQ ID NO: 143671 - DNA, 201 bp, Homo sapiens
agtctgatttcagaatctgtcctctgaggaagacaaatctaaggggacaagactggagacagggggtccctctgggagccaaggaggctgtttgaacctgagctgtggtagtagagatagaggagatattctgaggataatcctggaaaatgcacagactgtggatatgaagaaccagagagagtcgaggaagaagctctc

SEQ ID NO: 143672 - DNA, 201 bp, Homo sapiens
gagcacttttgctgggatgtgctctgtgattttttttctagtccaggtcataaatatttttctgtacaaaccagataacataatttaatgattatgaatcktaagacatgcaatttataaagacatgagatacttgtgtacttgcttagctcttcctttgttatttggcaaaatttgttatgtgctaagcaacaggtgtca

SEQ ID NO: 143673 - DNA, 201 bp, Homo sapiens
tttttccccaacttccccttcccctttaaacaaaacagacttaaagttctcccagcccaaacaacaaagccagaatgagcacttttgctgggatgtgctctgtgattttttttctagtccaggtcataaatatttttctgtacaaaccagataacataatttaatgattatgaatcgtaagacatgcaatttataaagaca

SEQ ID NO: 143674 - DNA, 201 bp, Homo sapiens
cagccttcccagagtaccttgagagggagcctaactaaggctcaggagaaccttcagaaaccaagtgatggcaaagtttgttttgaagcacagaagaagtyggtgagacaaagcagcaagaagagggtcttctagaaagagcgaacagcatgcacaaaaaaactaaggtcaacttttagtccaaaccacaattcctaaatt

SEQ ID NO: 143675 - DNA, 201 bp, Homo sapiens
actgtgctaggtgttatggatacagaatggagtaagacacagtccctgccatcggacatgcccactggtgataacagtcctctatgaaagtctctatggcrgccttcccagagtaccttgagagggagcctaactaaggctcaggagaaccttcagaaaccaagtgatggcaaagtttgttttgaagcacagaagaagtcg

SEQ ID NO: 143676 - DNA, 201 bp, Homo sapiens
cagacagagagacaggcagggagactgagagccagaaagaaatcgaggagacttcaccagaaaggctctggcagaaatgtgcgtggagatgtttgtatggytttatttaatcaggcaattctgccaccctgtcattcattccacaagtgcttactaagtgtctactttgtatcaggcactgtgctaggtgttatggataca

SEQ ID NO: 143677 - DNA, 201 bp, Homo sapiens
cagacagacagagagacaggcagggagactgagagccagaaagaaatcgaggagacttcaccagaaaggctctggcagaaatgtgcgtggagatgtttgtrtggctttatttaatcaggcaattctgccaccctgtcattcattccacaagtgcttactaagtgtctactttgtatcaggcactgtgctaggtgttatgga

SEQ ID NO: 143678 - DNA, 201 bp, Homo sapiens
gttcaaaaccagcccagccaacatggtgaaacaccatctgtactaaaaatacaaaaagtagctgggtgtggtagtgcatgcctgtaatcccagctgctcargacgctgacgcaggagaatgtttgaacccaggaggtggaggttgcaatgagccaagatcatgccattgcactccagcctgggcaacggagcaaaactcca

SEQ ID NO: 143679 - DNA, 201 bp, Homo sapiens
tatttctgtccagccatcattgctggaatagacttcctcaactaaaaatttcctacagctaggttgggcgcagtggctcacatctgtcatcccagcacttkgggatgctgaggcaggccggtcacttgaggtcaggagttcaaaaccagcccagccaacatggtgaaacaccatctgtactaaaaatacaaaaagtagctg

SEQ ID NO: 143680 - DNA, 201 bp, Homo sapiens
tgattggactaacaggtggttagaccagccaaggacaggtggagaacctgtaagtatgtttcacacctatttctgtccagccatcattgctggaatagacwtcctcaactaaaaatttcctacagctaggttgggcgcagtggctcacatctgtcatcccagcactttgggatgctgaggcaggccggtcacttgaggtca

SEQ ID NO: 143681 - DNA, 201 bp, Homo sapiens
tgcaaacaatcaggaagtgcagctgtgcaccaggtccgactgggcaaggggggtgccagtggagtgttggaagttggaagggacacgaataaaggcagacycatccctgagggaacaattgaatttgaaaacatggaaaagggaaaagccagaggaagcaaaactggaaagtaaccaagttattcctcattgaatcaacgc

SEQ ID NO: 143682 - DNA, 201 bp, Homo sapiens
catttgaaaatagttccccaaaaattgtaaaataggttgaattaaagcagcattaaagcattaaagcacactactcccaagggcattactttaatgggaakaaaattcgttggctatgtgagctctagcctgtgtgttttcaaaagggattaatttacttataatcacacctcatattagagtgtatcaaataaagcagtc

SEQ ID NO: 143683 - DNA, 201 bp, Homo sapiens
gtaagagaaagactggtttttacctatcgctctaggtaggagtctctctgatttcctaatgctggtcacagtttcttcacagctgtgaagatgtcctaatrctggttgcagtttttacacaactgtgccgaggtacccagccacatgtcatctagggatgaagctcgggtacaaaaaaaaaaaaggcggagacagtgcagc

SEQ ID NO: 143684 - DNA, 201 bp, Homo sapiens
gaagtaagtggcatgtaagggtgccattgagtgcagtgggaacaggagatgcacagacagaaacctcctaaacttcctctgtgttccaggcagaaagcctytgctctgtgaattccaaagtttgcctacaaatgaatgaaatttgtgctagtgggctggttgatttgttagtacattcgctgatcagtttaacaagtataa

SEQ ID NO: 143685 - DNA, 201 bp, Homo sapiens
ggtgcaatctcagctcaccacagcctctgcctcccaggttcaagtgattctcctgcctcagcctcccgagtagctgggattacaggcatccgccaccacayccggctagttttgtattttttagtagagactggggtttctccgtgttggtcaggctggtctcgaactcctgacctcaggtgatctgcccaccttggcctc

SEQ ID NO: 143686 - DNA, 201 bp, Homo sapiens
actcagataggctctggagggatctacctcattctgggcctcaaagaattctcacaaatgaaattccaaggaaaataaactgccccttgtcaaaaataaayatacaatacacaaaactccgcaatcaagaaaaagatcagcaaggatttcaaataacagaattatcagataggctataaaatgaatatgtttaatacattt

SEQ ID NO: 143687 - DNA, 201 bp, Homo sapiens
aaaaatcctggataaaatgaaatgcattcccttcaaagcatggatacaagaaagcacgaattctcagaaacgcaaatagatcattacggcactgcagccasctttgaccctgagagaatttcttgaacctggtaaccttgagcttccatgttgatggctctgtggagtgcagggaagagatgacgaagtccagggcccagc

SEQ ID NO: 143688 - DNA, 201 bp, Homo sapiens
aaaaaatcctggataaaatgaaatgcattcccttcaaagcatggatacaagaaagcacgaattctcagaaacgcaaatagatcattacggcactgcagccmgctttgaccctgagagaatttcttgaacctggtaaccttgagcttccatgttgatggctctgtggagtgcagggaagagatgacgaagtccagggcccag

SEQ ID NO: 143689 - DNA, 201 bp, Homo sapiens
ctaagcaagcactgggatggtaggtggggagccctgtcccacactgctttcactgtcactcgggttgaggctttccatcccttccacatctttctctgcaytcctttggtcatctatggatataaatttaagttcagagactgcatggtactgtttagaaccaaataacaggtgtggataaaaattctgaagattcagtca

SEQ ID NO: 143690 - DNA, 201 bp, Homo sapiens
aacgggaaatttctgtctctagaggcatagatttatttgtctactatattcttctcatcaaaacaacacaagcgatgccaaaaacatattttcagggtttsatatacttgtcatttcttcctttctcacacccttaacctccaacctccagctaaccaaagatatcaggtacctctgtcaatcaaacttttccgaatatca

SEQ ID NO: 143691 - DNA, 201 bp, Homo sapiens
aaaagtgtggagaaatatctcagtggggcattctttcctacaattagctaatgactgaaatatataacatttgcaggtggctggggtatgtgctcccatgyaccaatttcctaatatatgcctgctctcccacaaaggaaggagggcacaaaaagtcatctatttccagctgagatgtttctccattcctgccaagcctat

SEQ ID NO: 143692 - DNA, 201 bp, Homo sapiens
agctgttttctcttcctttcccaataaaaacgggaaatttctgtctctagaggcatagatttatttgtctactatattcttctcatcaaaacaacacaagygatgccaaaaacatattttcagggtttgatatacttgtcatttcttcctttctcacacccttaacctccaacctccagctaaccaaagatatcaggtacc

SEQ ID NO: 143693 - DNA, 201 bp, Homo sapiens
tgtgaagatgtcctaatgctggttgcagtttttacacaactgtgccgaggtacccagccacatgtcatctagggatgaagctcgggtacaaaaaaaaaaaaggcggagacagtgcagctctcaggccactagggggcgctgagtgaaaatggtttggttgtcgcggctctttggggtaaagatagaggcagacagaggatg

SEQ ID NO: 143694 - DNA, 201 bp, Homo sapiens
acccacgatgtcctgcctgacattgtcaccatggctaaagggattgggaatggctttcccatggcagcagtcataaccactccaggtaggacccacaggcmgtttgtgtttgcttctgggcctcgtacattgggctatggtataacacgtgtgttggaacttgtgtagattggagacaatcatggaaaccacatgatgcat

SEQ ID NO: 143695 - DNA, 201 bp, Homo sapiens
ggtcctttctgatccaatagtctgaaagtttgaatatgtattttgcttatgttaaggctttaagacagaacaaaatgcacatatctctctaggaggtcccrtcttattctgttctcagacaatgacaccttacaagaaatggaggattggggaaagagttggatctggggttggtgggaagaaggaagtggatggcaaagc

SEQ ID NO: 143696 - DNA, 201 bp, Homo sapiens
aggaggctgagacaggaggatctcttgagcccaggaattgaggctgcagtgcactatgattgtgcctgtgaatagccactgccctccagcctaggcaacayagtgagaacccatcccttaagaaagaaagaaggaggggaggaagggaggaaggggggaagggagggagggagggaagaactactgatctggcatacatgt

SEQ ID NO: 143697 - DNA, 201 bp, Homo sapiens
ttatggtgaaggtttggggtgaggaggttaaatatatattaggagttgttgttgttgagacagagtctcactctgtcacccaggctgggagtgcagtggtrcgatcttggctcactgcaacctccaccttacaggttcaagctattctcgagcctcagcctcccgggtagctgggattacaggcacacaccaccatacctg

SEQ ID NO: 143698 - DNA, 201 bp, Homo sapiens
ttattagttgctgtgaaagacattattttcttttttatggctgagtggtattccatggcgtgtgtgtgtgtgtgtgtgtgtgtgtgtgtgtgtgtgtgtgkatacaccacattttctttatccactcatcaattgatgggctcttaggttggttccatatctttgcaattgtgagttgtactacaataaacatatatgtgc

SEQ ID NO: 143699 - DNA, 201 bp, Homo sapiens
  misc_feature (1)...(201): n = A,T,C or G
aagtctcctcccttggcattttgcagaccatcaaataaagccattaaaagcccggaatgttgcacagctgagacaatctcttagccatttttgtatgtctngcacttagcggctactggaggaagggctatggaattcatactgtggttaaatgatggaactgctgggtaacccgagctggtctgaagggaactctcctta

SEQ ID NO: 143700 - DNA, 201 bp, Homo sapiens
tcaatagcttttgggatacaagtcggttttggttacatggatgaattgtatagtggtgaagtctgagactttagtgcactgtcacccaagtagtgtacatkgtacccaatatgtaattttccatccctcacccccctcccagcttccccgcttctgggtctccaatgtctattgtgtacccatagcttagctctcacctat

SEQ ID NO: 143701 - DNA, 201 bp, Homo sapiens
gctgggggccaagggtcaacaagagtcattctgctgtatatacttttatacttgctgatatttatatatatacatacacatatatatttatatatgtatayatatttatttatttcaatagcttttgggatacaagtcggttttggttacatggatgaattgtatagtggtgaagtctgagactttagtgcactgtcaccc

SEQ ID NO: 143702 - DNA, 201 bp, Homo sapiens
tggagacaatcatggaaaccacatgatgcatttcccaagcaaatgaaagagagaaacagtctgtctgcctgactgtgaaacagttggaagaaagccagccctttttttttttttttttgagacagagtcttgctctgtcacccaggcttgagtgcagtggcacaatcttggctcattgcaccctctgcctccgcaggtgca

SEQ ID NO: 143703 - DNA, 201 bp, Homo sapiens
gctggagtgcagtggcatgatcccggctcactgcaacctctgcctcccaggttcaagcgattctcctccctcaacctcccaggtagctgggactacaggckcccgccaccacactcagacaatttttgtatttttagtagagatgaggtttcatcatgttggccaggctggtctcaaactccggacctcaggtgatccacc

SEQ ID NO: 143704 - DNA, 201 bp, Homo sapiens
tcctttaagcacttctctttattggttattctagatatacattcttctaaatttttttcaaagttttcaacttctttgcctttggtttgaatgtcctctcrtagcttggagtaatttgatcgtctgaagccttcttctctcaactcgtcaaagtcattctccgtccagctttgttccgttactggtgaggaactgcgttcc

SEQ ID NO: 143705 - DNA, 201 bp, Homo sapiens
caggcgtgagccaccgcacccggcttgtttacttgttttttcaacattcacacacacagcacagtcaggctgggacaacccctggagttgcagagtcagakgtcctgtcttgttccaagcctttagaatccggtgactgggttagagttaggagcccagaaacccaacctttggatctatcagctactcaccactgcgtgc

SEQ ID NO: 143706 - DNA, 201 bp, Homo sapiens
aaaaagccattcaataaaatatttcattagcgctgggattggctgtggtgtgggtgcagcagaaaaagggtagaaatgcaagcaaaatgaggggcaagtgygagcctacttcattcaactctgcgttctgagctgggtagaaaggaaggaggagacctgagtggagcaatagacctgaaaacaatgggtgaatgaggattc

SEQ ID NO: 143707 - DNA, 201 bp, Homo sapiens
atttctttcttgttgcccaggctggagtgcagtggtgcaatctcagctcaccacagcctctgcctcccaggttcaagtgattctcctgcctcagcctcccragtagctgggattacaggcatccgccaccacatccggctagttttgtattttttagtagagactggggtttctccgtgttggtcaggctggtctcgaact

SEQ ID NO: 143708 - DNA, 201 bp, Homo sapiens
tcttctgccacagcctcccgagtagctgggaccacaggcatgtgccaccaagcctgactaatttttgtatttttagtaaagacagggtttcaccatgttgrccaggctgatcttgaattcctgacctcaagtgatccgcccgccttggcctcccaaagtactggcattagagacgtgagccaccgtgccaggcctgatagc

SEQ ID NO: 143709 - DNA, 201 bp, Homo sapiens
atgttttataggtcatcagcatttacacagtgagatgaggaaatctcccaggaagtctaatgtctagatgagaagctcagtgagatgaagatagaaacctrcacaacactgacttttaacgggcaggagaggccgggcacggtggctcacgcctgtgatcccagcactttgggaggccgaagcggcagatcacttgaggtt

SEQ ID NO: 143710 - DNA, 201 bp, Homo sapiens
catagccaaggtttttgttgtttttatttgtttggttattttgagacaaagtctcgctctgtcatccaggctgaagtacagtggtacaatctcgactcacygcaacctccgcctcctggggttcaagggattcttctgccacagcctcccgagtagctgggaccacaggcatgtgccaccaagcctgactaatttttgtat

SEQ ID NO: 143711 - DNA, 201 bp, Homo sapiens
tgatgcacttcccagaccctggtctgactgcaaaaccaccagcacagagcctagtagacggaagcactaaaaggtggtcatttccttcttttcctgctatrtgttcctctttccacatagaagagacacaagcctactataaggccttctataggactacttaaggcaatttgacaataccagaaatccatggtcatctct

SEQ ID NO: 143712 - DNA, 201 bp, Homo sapiens
ctgccaacaccatcatggcacttcatgagatgaggcacggagaacttttgtagagaaaaacagaccatagcaatgcctggtaaagccgtatttgaatattscatctgtaaggcatcaagaactaaaatcagtttgatgcacttcccagaccctggtctgactgcaaaaccaccagcacagagcctagtagacggaagcact

SEQ ID NO: 143713 - DNA, 201 bp, Homo sapiens
caatatctggctgctgccaacaccatcatggcacttcatgagatgaggcacggagaacttttgtagagaaaaacagaccatagcaatgcctggtaaagccrtatttgaatattgcatctgtaaggcatcaagaactaaaatcagtttgatgcacttcccagaccctggtctgactgcaaaaccaccagcacagagcctagt

SEQ ID NO: 143714 - DNA, 201 bp, Homo sapiens
tgggaggattccttgagctgaggaagtcgaggctgcagtgattcatgattatgccactgcactccagcctgcatgaaagagcaaggcccggcggggcatgrtggctgacagctataatcccagcactttgggaggttgaggcgggcagatcacctgaggtcgggagtttgagaccagctggccaacatggtgaaatggtgt

SEQ ID NO: 143715 - DNA, 201 bp, Homo sapiens
gaccatctgtctggccatgtaggaaaagcatctcacgctatcagagccaagctcaaaaaaacgactatcagctggtacttgattcaaggcattctattagytctattataatagcaatagctctggtgtcaattttaaaagacaacaagctgggcgtggtggcatgcctgtagtcccagctactcgggaggctgaggtggg

SEQ ID NO: 143716 - DNA, 201 bp, Homo sapiens
gcttaactctttctgtaccactagctggaataaattcttccttcgtcatcctgttgtagtatccaacagaacatcctgtctccacccccttggggttttcytcctgccaagcctctgcagaagtggcctaacctagggttacatcaatgagtcaatgcagctagtgcgaaataaagtaaaaagctcatcacagtcaatgac

SEQ ID NO: 143717 - DNA, 201 bp, Homo sapiens
  misc_feature (1)...(201): n = A,T,C or G
ccctctcctccattctcaccagacagatgaaactaccgaactcctaaaattcttaagaagaggaaaccctggccatttttagctgcttaataacatccacnttgtccaaagaactctttctttagtctcaccaatttcttttattctactgttttctaatctcagaaaataatcaatgtttgcatcttttttccagaagtc

SEQ ID NO: 143718 - DNA, 201 bp, Homo sapiens
ggctcctcactcagcttaactctttctgtaccactagctggaataaattcttccttcgtcatcctgttgtagtatccaacagaacatcctgtctccacccscttggggttttcctcctgccaagcctctgcagaagtggcctaacctagggttacatcaatgagtcaatgcagctagtgcgaaataaagtaaaaagctcat

SEQ ID NO: 143719 - DNA, 201 bp, Homo sapiens
gtcctactccatctacctcccaggattttttccccaggggttcattccaggccctgagtttcaggtgtaatccatgacgagattcactcctcatcacctaytgcccccacaatgttccaaacctcgtactgatcatgtcattcttcttcttttgaaaggcaagttttgtttttcttaaaaattgtagttctttcttggctc

SEQ ID NO: 143720 - DNA, 201 bp, Homo sapiens
tgagtctaatctagatgtttatgtggtatatttatttgtcctactccatctacctcccaggattttttccccaggggttcattccaggccctgagtttcargtgtaatccatgacgagattcactcctcatcacctactgcccccacaatgttccaaacctcgtactgatcatgtcattcttcttcttttgaaaggcaagt

SEQ ID NO: 143721 - DNA, 201 bp, Homo sapiens
gaggcaccaaccatggtagagatttttctcatctcagaaatatgtcatccctcccaacagaggcagggggccattttgtgagtctaatctagatgtttatrtggtatatttatttgtcctactccatctacctcccaggattttttccccaggggttcattccaggccctgagtttcaggtgtaatccatgacgagattca

SEQ ID NO: 143722 - DNA, 201 bp, Homo sapiens
gccaccgtgcctggccagctgttttcttaactcacctcttcaagggacaagactatttatggaatctttgaacaggattggaatacaaaagaaagaccccrgtctccttcactgcctttaggacctgggaagggtttggtctttgctgtaaaactggaatattcatatatgtttacaaaagcatccaaacatgtacagttc

SEQ ID NO: 143723 - DNA, 201 bp, Homo sapiens
cctggcatggttcagctatgagcaaaagcttcaccttttgcttcagttttctcatttgtaaaacagagacagcaatatctggctgctgccaacaccatcayggcacttcatgagatgaggcacggagaacttttgtagagaaaaacagaccatagcaatgcctggtaaagccgtatttgaatattgcatctgtaaggcatc

SEQ ID NO: 143724 - DNA, 201 bp, Homo sapiens
ttttccttcatttcaactttgatgaatctgacaattgtgtgtcttggagttgctcttctcaaggagtatctttgtggcattctctgtatttcctgaatctsaatgttggcctgccttgctagattggggaagttctcctggataatatcctgcagagtgttctccaacttggttccattctccctgtcactttcaggtaca

SEQ ID NO: 143725 - DNA, 201 bp, Homo sapiens
ttctctcttgctgcctttaacattttttccttcatttcaactttgatgaatctgacaattgtgtgtcttggagttgctcttctcaaggagtatctttgtgrcattctctgtatttcctgaatctgaatgttggcctgccttgctagattggggaagttctcctggataatatcctgcagagtgttctccaacttggttcca

SEQ ID NO: 143726 - DNA, 201 bp, Homo sapiens
gtgatccgcccgcctcaacctcccaaagtgctgggattacaggcgtgagccaccgcacccggcttgtttacttgttttttcaacattcacacacacagcayagtcaggctgggacaacccctggagttgcagagtcagatgtcctgtcttgttccaagcctttagaatccggtgactgggttagagttaggagcccagaaa

SEQ ID NO: 143727 - DNA, 201 bp, Homo sapiens
tgctcagtggctagcatcctcctagatccattttataggacattcaaaggactcatggtaagagagcacgctactatattttactttgtgtaagagacagrttgcgacaaaataaaaaataactgtcaaacaatattttttttgccagagttagctctaagtctacaaaaatagcttttccaatttagcttcttttcatta

SEQ ID NO: 143728 - DNA, 201 bp, Homo sapiens; identical to SEQ ID NO: 26573

SEQ ID NO: 143729 - DNA, 201 bp, Homo sapiens
gcacatgtaccctaaaacttaaagtataatatgaaaaaataattccagatcaatggatttttccatgtccttaatttttctcaaataaaaattttatttasatgaagtttggattaattcagtggttctcaacaatggctacacaatggaatcacccatggagcttaaaatatttaaatgcctcacctcaggccaattaag

SEQ ID NO: 143730 - DNA, 201 bp, Homo sapiens
cccatcctaaagatcataatttaatcttaacttaatcattagttagatttatgcttagacctctccatttataagaagtacaacatgcttcttttataccrcatagcttagtgattaaagctttagagccagtctgctcaggttgaaatcccagcttcaacatttactacttttgtaaccttgggcaagttgtttaacttt

SEQ ID NO: 143731 - DNA, 201 bp, Homo sapiens
tgcatacacatcactgatagtagtttaatgtttatgtccttcagtcagcactgtccatttgaactttttgtgatgatggaaatattctgtatctgtactgkctaatacagtaccactacatgtggaaattgagcacttgaaatgtggctagtgagactgaggaactgaatttatgattttatttagttttaacaaattcaa

SEQ ID NO: 143732 - DNA, 201 bp, Homo sapiens
gtgtagtggcatgaccatagctcagtgtagcctcaatctcttgggctcaagtggtcctcccatctcagcctcccatgtagctgggaccataagcacccacmcccatgcctggcgaatttgtttcattttttgtagagatgggattcttgaactcctgggctcaagcgatcctccctccttggcctctcaaagtgctgggat

SEQ ID NO: 143733 - DNA, 201 bp, Homo sapiens
attcctgataactttccttgctctgaagtcttttatgtcttatattaatatatgtacttcaacttattttgattagtgtaagcatggtatatctttctccrtccctttacttttttttttttctattgagacagtctctctctgtcacccagggtggagtgcagtagtgtgctctcagctcactgcagtctctgcctccca

SEQ ID NO: 143734 - DNA, 201 bp, Homo sapiens
gtttttcccgcactgatttcagaaaaggtaatacagatcatagtagtttgccaccttggcaggaactggaaagactcgagttttgtagcaaattaacagcrtttatcttgctttgaatggccccacttcaatcataggtggtgagttggtaacttattcagtattttttcctccaataacaggtagaaaacgtgaaattgg

SEQ ID NO: 143735 - DNA, 201 bp, Homo sapiens
ctaagccactgatgttatctgtaggttttttgtagatgttatttatcaagctgaggaaatgcccctctgttcctagtttgctgagaggtttttatcattawtggggattggattttgtcaaatgcttttcttcatctagtggtatgacactgatttttttttcctttttagcttgttgatgtaatggattacattaattga

SEQ ID NO: 143736 - DNA, 201 bp, Homo sapiens
gcaggaggttaagcccaatgtcagtggagaatgactttagagtcacatttctctttgctttggacactatcttaagttggctcatcctctccctctactcwtggaacctggcaagggtcaagaaagatttttgaccatttgtgaatataatcactcaactgacacaccttttccttacaggctgccatttgccgctgtagc

SEQ ID NO: 143737 - DNA, 201 bp, Homo sapiens
tttttggcttgtttttcttttctaacagagtctatgagaaaacacattctgtgtggcctttcttggttcagaggaaaccagacttcaggaaccctctctayaaaggcttcactatgtatggggtactcaatcctagtactgtgccctacaacattcagtaagttcttaagtttttccctcctttcttatagcaggtcccag

SEQ ID NO: 143738 - DNA, 201 bp, Homo sapiens
gggtataaaaatttggaaaatttgaagcctggctatgtggtagaaaagaaaagcacattttcagaagaagaattcaaatgggttcctgagcaaccacttgytggataaatttgcataactaaaaatgaggcaaatagtgatagccaagacaatgggaaaaagacctcaaaggcatttcagagaccttaatggcagcccctc

SEQ ID NO: 143739 - DNA, 201 bp, Homo sapiens
aggatggctctatgctggaaatgaatgccttcctagcttgtacatgaaaataagacttcttgggattggaaaacagttttaagaatgactttgcaggacagaatcctaggggcaggtgatcaaaagagatcttttttctttgaagaataactgcactgtgttgtagtaaggactcaaatgaaatatgacatgtaaagctca

SEQ ID NO: 143740 - DNA, 201 bp, Homo sapiens
gcaacctacagaatgggagaaaatttttgcaatctacccatctgacaaaaggctaatatccagaatctacaatgaactccaacaaatttacaagaaaaaaraaaaaaaaacaaccccatcgaaaagtaggcgaaggatatgcacagacacttctcaaaaaaagacatttatgcagccaaaagacacatgaaaaaatgctca

SEQ ID NO: 143741 - DNA, 201 bp, Homo sapiens
gctggtctcaaactcctgggctcaaatgattctcctgccttggcctcccaaaagtgctgggattacaagtgtgagccaccacagctggcccttccttcacttttttttttttttttttttgcttaaaacaatagaaatttattccctcaccattcaggagcccagaagtctgaaattcacatgttggcagggttgccctct

SEQ ID NO: 143742 - DNA, 201 bp, Homo sapiens
gtgtatatgtgccacattttcttaatcccgtctatcattgatggacatctgggttggttccaagcttttgctattgtgaatagtgccgcaataaacacacrtgtgcatgtgtctttatagtagcatgatttataatcctttgggtatatagccagtaatgggattgctgggtcaaatggtatttctagttctagatccttg

SEQ ID NO: 143743 - DNA, 201 bp, Homo sapiens
ctctcccccactggaaaaatgaacatatgatgatacatacagaaaatgaacctcaatttcagggggtccacagacccctggacttcacattaaaaactctkaggtgatctctaattgataattgataataattgatctctagctcagttattctgtgatatatttttgtgttgattctaaggtattaagtacaagggtggg

SEQ ID NO: 143744 - DNA, 201 bp, Homo sapiens
attaaagctattatggatgctggaattttcattacaaaggtaataatcaggacttttaaaatttgcactgactttaattatgggatatattgaagtagtaktgtgccatggtggaaagaatattgaaaagaaatctagtttctagattcagctctgccactaattcactgtgtgcccttgggcaagtctcttttcttctct

SEQ ID NO: 143745 - DNA, 201 bp, Homo sapiens
gtacatgcctacatgctagttgaaactgccactttcttctctgtagccctcaggatactatcacatgccagaccctttcaactctttgaaacaggtgagamagaagccagtctttcaggtggcacctggagaagttgggatgttaggtgtgcagtccaacttcttccattctgagatagaagctgggaatgggggtttcct

SEQ ID NO: 143746 - DNA, 201 bp, Homo sapiens
tgaaaagactgacatattttctcaagtttatcagcttttagtggttaccaaaatacgtatttccaaagagacagttatatataaatgtataaatatatatwtatatatattgtgcttattttcttttagatatgcagcacctaccctcctgaaatagtggttcctaaatctgttaccttgggaacggtggttggaagttca

SEQ ID NO: 143747 - DNA, 201 bp, Homo sapiens
aacaatgtaagttaagcagatttctctaatgataattaaacatggctctggaagacctgttttaagtttcatgctgccacttagtagctgtgtgacctcargcaagttacttaacttctctggactttcatacttctgaaggtttttgagaggatctcagtaggaataatatgtacaatgtactttgtaaattgtaaaatg

SEQ ID NO: 143748 - DNA, 201 bp, Homo sapiens
ttggcaatatatgagacataagtacttttcaaaattgacaaggtagagctcctgtgaacagtattttcattatgttagagacagagaaaaagaaataggawagtagctgtttcacaactcactcctatttcacagctgttggctgagttagtagttagcccaaccctcaggcccctttatagcatagcaagatgaagttac

SEQ ID NO: 143749 - DNA, 201 bp, Homo sapiens; identical to SEQ ID NO: 26575

SEQ ID NO: 143750 - DNA, 201 bp, Homo sapiens
accatggattcagataaggtaactcaaaaaattgtataaagaggaagaagagccaaggggtgggacagagccttggataatactgacacctgaaagtctartgaagaatgaagtccatgaagttgactgtgaaagagtgattagtgagataagaataaatctaaggataggaaagaagaaacataagagaggagaatctca

SEQ ID NO: 143751 - DNA, 201 bp, Homo sapiens
cgggttttcctctcactttcatagtttttcccgcactgatttcagaaaaggtaatacagatcatagtagtttgccaccttggcaggaactggaaagactcragttttgtagcaaattaacagcgtttatcttgctttgaatggccccacttcaatcataggtggtgagttggtaacttattcagtattttttcctccaata

SEQ ID NO: 143752 - DNA, 201 bp, Homo sapiens
ctttctcccatgctaaatgcttcctgccctcgaacatcagacttcaagtacttcagcttttggattcttggacttacactagtggtttgccaggggctctygggccttcagccacaaactgaaggctgctctgttggcttccctactttagaggttttgggactcggaatgatccactactggctttcttgctcctcaact

SEQ ID NO: 143753 - DNA, 201 bp, Homo sapiens
aatttgtttcctgctgtcctgcagactttttgtttggcccacgatttccacccctacttttaattccaactagaagactaaggcagttcatcaaagtcctyattaatgtaggacttaatgcttcctccagcatcaccctttcattccccagcccccacccctaggcaattaaccagcttcctctgattttagtctttgatt

SEQ ID NO: 143754 - DNA, 201 bp, Homo sapiens
atatcacctatcttaaatagttattatgaggattaaatgagataacatgtagagtatagcacagtgtttatcatctctctttgttcccacttttggcttgracatacttcctagattggtgttattggggtctgtggattgattggcccagccctgtcagagttatttgtctgacaatgaagtactcttttcctttaagtg

SEQ ID NO: 143755 - DNA, 201 bp, Homo sapiens
atgtattagtatatagtagatgtttaatagatattttcttctctctccttccctcctttaaagtatcaacttgtgaatgttttctcagttcaggaaggaaractgctttggaagaaaatttgtttcctgctgtcctgcagactttttgtttggcccacgatttccacccctacttttaattccaactagaagactaaggca

SEQ ID NO: 143756 - DNA, 201 bp, Homo sapiens
ggagatctggtaggctttagacctagttctgtccctgactcactgtgtggtttctaactaatcatttaacctttctgcctcagcttcctcacttacgatayggagatccactttctccccttaatgaataaactgagttgattgtgaatttcaatctctgcttccttttctaccttagtttgtgaattgaaaactccaaca

SEQ ID NO: 143757 - DNA, 201 bp, Homo sapiens
gtgtgcatatcagagcaaaaacaataactgtaaacaagtgaattaatatgaacggacacaaatatgaagcagacaggtagaggaggaggaaatatgatgtrctctttcataaactacatactaggttcctagtattcatatctggacggcctttaaaacactagtcttggggtggaggtgttgacattttaggtgtgactt

SEQ ID NO: 143758 - DNA, 201 bp, Homo sapiens
aaaggaagtgttcttaagggcatgaaaagaatagtagcttggaagcagcagaagcagcagtaggtgcaaggagaaagctaaacccacctctgctttgtttyagaattatggtatgtggaaagtggaatgatcagcattctccatttttatttgaccccaaggaaaggtggtatcgttgtgagccaggttgtaattatatca

SEQ ID NO: 143759 - DNA, 201 bp, Homo sapiens
agtgtctttgttgttctctaagtacttgctttatgaatctgggtgttcccgtattgggtgcatatatatttaagatagttcttcttgttgaatttatccckttaccattatgtaatggccttctttgtctcttttgatctttgttggtttaaagtctgttttatcagagactaggattgtaacccctgcttttttttgctt

SEQ ID NO: 143760 - DNA, 201 bp, Homo sapiens
gtatagattcgagaagctgagtgaacatcaaacaggataaaccccaaataaagttacatgaaaatacatcatagcaaaatttgtgaaaactaaaatattcttttttttttttttttttgagacacagtctcgctctgtcatccagtctggagtgcagtggcatgatctcggctcactgcaacctctgtctcccaagttcaa

SEQ ID NO: 143761 - DNA, 201 bp, Homo sapiens
gtacccaaggtaaggagaagagttaagcgaggctgacagccgcgagcttcctcttggtgctcacctgggagcccagacacacctcctcagccttctcagcyttctttgacgcgtctttcctgtggggggtcccgggttctctttctgggtccacaccccctttcaaccaaacacctcttcttaggatctgcttgcgggcgt

SEQ ID NO: 143762 - DNA, 201 bp, Homo sapiens
gtgctggtaccaaagcagatatataaaccaatggaaccgaactgagccctcagaaataacaccacacatctagaaccatctgatctttgacaaacctgccaaaaaaaaaaaaaaaaagcaatggggaaaggattccctatttaataaatggtgctgggaaaactggctagccatatgtagaaagctgaaactggatccctt

SEQ ID NO: 143763 - DNA, 201 bp, Homo sapiens
gaacgcagttcctcaccagcaatggaacaaagctggatggagaatgactttgacgagctgagagaagaaggcttcagacgatcaaattactctgagctacrggaggacattcaaaccaaaggcaaagaagttgaaaactttgaaaaaaatttagaagaatgtataactagaataaccaatacagagaagtgcttaaaggag

SEQ ID NO: 143764 - DNA, 201 bp, Homo sapiens
tttttgtagtctgatttaccaagactgggttggaaattagagccacatgcccagggtaggcaggaggttaagcccaatgtcagtggagaatgactttagartcacatttctctttgctttggacactatcttaagttggctcatcctctccctctactcatggaacctggcaagggtcaagaaagatttttgaccatttgt

SEQ ID NO: 143765 - DNA, 201 bp, Homo sapiens
tttttctctaaacttctcttctcacttcatttcattcatgtggtcttcaatcattgataccctttcttccaattgatcgaatcatctactgaagcttgtgygtacgtcacatagttcttgtgccatggttttcagctccatctggtcatttaaggacttctctgcattggttattctagttagccattcatctaatctgtt

SEQ ID NO: 143766 - DNA, 201 bp, Homo sapiens
aaggacttctctgcattggttattctagttagccattcatctaatctgttttcagtgtttttaacttctttgccatgggttcgaacttcctcctttagctsgtagtagtttgatcatctgaagccttcttctctcaactcgtcaaagtccttctccatccagctttgttccattgctgttgaggagctgcgttcctttgga

SEQ ID NO: 143767 - DNA, 201 bp, Homo sapiens
agtcacatttctctttgctttggacactatcttaagttggctcatcctctccctctactcatggaacctggcaagggtcaagaaagatttttgaccatttrtgaatataatcactcaactgacacaccttttccttacaggctgccatttgccgctgtagccagcctctctctggattttacactcgctgtgtagatgatg

SEQ ID NO: 143768 - DNA, 201 bp, Homo sapiens
tgactggcatgagatagtattgggtggttttgatttgtgtttctctaatgatcagtgaagttgagctttctttcatatgtttgttggccgcataaatatcttttttttttttttgagaagtatctgttcatgtcctttgccctctttttgatggggttgtttttttccttgtaaatttgtttaagttccttgtaaatttgt

SEQ ID NO: 143769 - DNA, 201 bp, Homo sapiens
tattggttgaattaaaatgaatgaaccaaaaagataggcttggattgcacagtgtttctgtgttccctatctctgttaccacctatccaatatcccaagcktgagaacttcagtcagccttgaactctacctcttctcctccatctggctattgccaagtcccatgtgttctgcttcaaaagtgtttctcaaatctgtcct

SEQ ID NO: 143770 - DNA, 201 bp, Homo sapiens
gttagacaaataggcaagttgtcaggtgggcaaccgttcaagtgctaaggagtatagtaatgcaattgggtgtcatattattgaagtgagttgaccccttmaaagccacatcaaagtgtaacgaatttcatgaactaatcattaccagacattcatgttaaatagttacgttgtttttgtgttaaagtggcttgaaacaaa

SEQ ID NO: 143771 - DNA, 201 bp, Homo sapiens
agtcttggggtggaggtgttgacattttaggtgtgacttactctatgaaaagactgacatattttctcaagtttatcagcttttagtggttaccaaaataygtatttccaaagagacagttatatataaatgtataaatatatatttatatatattgtgcttattttcttttagatatgcagcacctaccctcctgaaata

SEQ ID NO: 143772 - DNA, 201 bp, Homo sapiens
gaatttaatatgcatcccagctttcctggttttggctttgatgaccaatgagtagtggtgatgttaacaaagataaggaccacaagaagaggggcagatgstgtcttcaattttacacttgacttcaaggtgattaaacagatatcaagtatttgatttcaagcatttgggtttggatctcaagaaagagctctgggccaa

SEQ ID NO: 143773 - DNA, 201 bp, Homo sapiens
cctgagctgaggcttggcctcctaaaatcttccagaaatgaacccagtcaactgaacccaccttttgccacaatcaaaccccaaggtcctcaaatagaatraaatttaaaaacatccaaaggacagtgacttcaaagattgaagaaacatcagctgataaaaatgagtgcaagaactatgacagcttgaaaagccagagtg

SEQ ID NO: 143774 - DNA, 201 bp, Homo sapiens
ggctgtttgacaaacattcccttaggaaaaggaaatctagcctttatttgcattgtttgatgatttttaggtttcattcatcattttgttttccatgcctrtctctcttctccagcattacctgaagatctttatgctttttcttataatcccaaatcctcaaaagagatgagggaaagtggatggaaactgattgaccca

SEQ ID NO: 143775 - DNA, 201 bp, Homo sapiens
aaaaactggaaactctaaaacgcagagcacctctcctcctccaaaggaacgcagttcctcaccagcaatggaacaaagctggatggagaatgactttgacragctgagagaagaaggcttcagacgatcaaattactctgagctacgggaggacattcaaaccaaaggcaaagaagttgaaaactttgaaaaaaatttaga

SEQ ID NO: 143776 - DNA, 201 bp, Homo sapiens
tatccctggccaatacccctgatgaacatgaatgcaaaaatcctcaacaaaatacaagcaaacagggccttgtcatggtggctcacacctgtaatcccatyactttgggaggctaacgtggaggatcacttgatcccaggagtttgagaccagtctgggcaacatagtgagacctcgtctctacaaaaaaaaatcaaaaaa

SEQ ID NO: 143777 - DNA, 201 bp, Homo sapiens
tcaaaggactcatggtaagagagcacgctactatattttactttgtgtaagagacagattgcgacaaaataaaaaataactgtcaaacaatattttttttrccagagttagctctaagtctacaaaaatagcttttccaatttagcttcttttcattaaatttaggtgtgtactatctgtatactttcttttgtatgttca

SEQ ID NO: 143778 - DNA, 201 bp, Homo sapiens
ctgaaagattggaggaagttttttccttctcgtaatctctacttcttttgtcatactgcagtgctgacactcattaaaaagaaaacattccttgtttggamctttcccaaagttttttttttttttttttctccttccaatttgaaacatctcaggctttagtcagtggcaaaattgaagttaattgtttgctctctcttc

SEQ ID NO: 143779 - DNA, 201 bp, Homo sapiens
tctgcctgtattcagacaccagctgtgcactcatcagctgtgggaccttaggcaaattgttgaatttctctttgcctccatttcctcatccatagaatggkgataataatagtaactatcatatgggattgttgtaaggatggaaagtgttaaaatatctaaactctgttacagtgcctgccataaaagaagcactctagg

SEQ ID NO: 143780 - DNA, 201 bp, Homo sapiens
acaaaaaatttagcagttagcagcaagtagattatcgctatgtaaaataaaattcctgagtttctgtcactcgctcttacagtacctacctgcctacctgyctctgaggagaaacgctgtaattaggcaacaggaaaattgtactatctttcaaatgcatttgcaaatgcctttaaggattttatcctttagaatcataga

SEQ ID NO: 143781 - DNA, 201 bp, Homo sapiens
ctgttttacagttaacatttttttttaataagtagaaggaatacactataatgctaaaaagtatagtatagtaactacataaaccagtaactgtcacttaygatcattatcaagtgttatgtgctgtacataattatacatgctatacttttatatgactggcagcgcagtaggtttgtttacaccagcatcaccacaaac

SEQ ID NO: 143782 - DNA, 201 bp, Homo sapiens
ttattaatgctactgtaagcttaccatcttcctgaacaaaaaatttagcagttagcagcaagtagattatcgctatgtaaaataaaattcctgagtttctstcactcgctcttacagtacctacctgcctacctgcctctgaggagaaacgctgtaattaggcaacaggaaaattgtactatctttcaaatgcatttgcaa

SEQ ID NO: 143783 - DNA, 201 bp, Homo sapiens
cggaggtgaagaatcctccaaagaggagactctaggaggggcccaggtgtggcaatcttcaaaaggatgagggatgtccagaggagaggtggcgggagggygcacttaaaacacgcgaaaattggaaacgtgccttctgcagtcagttccttcggattttccggcatttagaagccagttctactccttcagcccgactgt

SEQ ID NO: 143784 - DNA, 201 bp, Homo sapiens
actcatttgccagtaataaagcatcttgctccctaaggcttcacaccatgaaatagccacagtgctgggggccgtcccaacgtgttctttcttccacagaygcaagatggctgtcctctctaaggaatatggttttgtgcttctaactggtgctgccagctttataatggtggcccacctagccatcaatgtttccaaggc

SEQ ID NO: 143785 - DNA, 201 bp, Homo sapiens
gtacgtatatacattgtgtaatgagcaagaggattgcgtttatgggccaggcacggtggctcatgcctgtaaccccagcactttgggaagccaaggtgggyggatcacctgaggtcaggagttcgagaccagtctgatcaacatggtaaaaacccatctctactaaaaatacaaaaattaaccggggcgtggtagcacaca

SEQ ID NO: 143786 - DNA, 201 bp, Homo sapiens
acccatctctactaaaaatacaaaaattaaccggggcgtggtagcacacacctgtagtcccagctacttaggaggctgaggcagaagaatcacttgaaccygggaggcagaggttgcagtgagctgagatggcaccactgcactccaccctggcaacacagtgagactccgtctcaaaaaaaaaaaaattgtttttatgtt

SEQ ID NO: 143787 - DNA, 201 bp, Homo sapiens
gtttgccccagatgtgttgaatttaaggataggctggaggttcagtcatttttatttattttcaaagaggtgttcagaattcacactctgtttttcttttrataactactgtggcttcctcctcatgctgactttctacacttgggaagagaatgtgggcaaggaagcttggagggaagccagagactccttgctctctgc

SEQ ID NO: 143788 - DNA, 201 bp, Homo sapiens
acccccagtgtagcctgcagaaccacctgagcccagccctgccagtgactgacttcacatagaacagcagctgagtcttcagtcaatctcatgctcagagrcccatttgagaaaacggcatttcccctagtcctgactttggggcagttctcttttctggcctgccctgagaccggctggcccacatgtccttctcttgct

SEQ ID NO: 143789 - DNA, 201 bp, Homo sapiens; identical to SEQ ID NO: 26594

SEQ ID NO: 143790 - DNA, 201 bp, Homo sapiens
aaatacaaaaattaaccggggcgtggtagcacacacctgtagtcccagctacttaggaggctgaggcagaagaatcacttgaacctgggaggcagaggttscagtgagctgagatggcaccactgcactccaccctggcaacacagtgagactccgtctcaaaaaaaaaaaaattgtttttatgttacttccctctaggct

SEQ ID NO: 143791 - DNA, 201 bp, Homo sapiens
gcgacaagagtgaaactccatctcaaaaaaaaaaaagcagttaggcctattttgctgtgctaagagaaacttacttttaatgaactgagctgcatgcctaycccaaattctgttttaaggaagatgctctgaccacagtgtcagtttggctctaaagtttcaagggatactgaaagggaatattggaaccaaatgaatctg

SEQ ID NO: 143792 - DNA, 201 bp, Homo sapiens
aagcttctaacttggcaaggaagatgtaaagattcatagtgctggctgggtgaggtgggctcacacctgtaatcccagcactttgggaggccgaggtgggyggatcacttgaggtcaggagttggagacaagcttggtcaacatggcaaaaccccatctctacaaaacttagccaggcatggtggcacgcacctgtaatcc

SEQ ID NO: 143793 - DNA, 201 bp, Homo sapiens
ccgaataaggattttaatgaaacattggagaatggcttcaagttaatctgtgaatgctttgtcattgtcccatccctggacacattaaaaagaaaaaaaagagcagttgagaaattgcagtacaatttgaggagagcaatatcatacacagaagtagggactacttttgtcaaagctggattttatttatttgggagcaaa

SEQ ID NO: 143794 - DNA, 201 bp, Homo sapiens
agcagggactgaagccaggcaattaccagggatggaaattttaaagctgacggcagaacacacaccagagctgctggctcgtggaagcctttgaagtgatkatttgatgggcaatctgagttcctcaggagctgcccaaagcctcataggctcaggagccatgctctgctttcagagtactcaacctgggccttcccctac

SEQ ID NO: 143795 - DNA, 201 bp, Homo sapiens
gcctttttgttgtggggtgtggggtggtcacagagaagaagcaacctaagtaaattacatcatgtgttaggaggtggtgagtgcagagaagaaaacaaagyggggaaggtggaaaggggatgtggagtgggataattttgaatagggtggtcagggaggggggctttgctgagatgatagttaagcaagtataaaaggagg

SEQ ID NO: 143796 - DNA, 201 bp, Homo sapiens
atcatgtgttaggaggtggtgagtgcagagaagaaaacaaagtggggaaggtggaaaggggatgtggagtgggataattttgaatagggtggtcagggagsggggctttgctgagatgatagttaagcaagtataaaaggaggtgagggagcaggtgctgcacgagtttccccaacctccagccagaagacaagcaaggcc

SEQ ID NO: 143797 - DNA, 201 bp, Homo sapiens
agaaaatgtatctttctggtgcctctaaagatccccattcctagcaagtgactagactagctgatctgaatagctcaggtctctagattagtcctcatttkgtgtccccactccatccccattcctatcacacatccctggatcccattccttatgggtagttctgaaaaataagagctagtttggggacaagcacctaac

SEQ ID NO: 143798 - DNA, 201 bp, Homo sapiens
ggctattacacgggaggttagtatatattgacatttgccaaggaaacaactttaaaattttaaatcctatgctggccaggcacagtggcttacacctgtartcccagcactttgggaggccaaggcaggcagattgcttgagctcaggagttggataccagcctgggcaacatggtgaaaccctgtctctacaaaaaatac

SEQ ID NO: 143799 - DNA, 201 bp, Homo sapiens
ctagattagtcctcatttggtgtccccactccatccccattcctatcacacatccctggatcccattccttatgggtagttctgaaaaataagagctagtytggggacaagcacctaacaattgttcctaggttgccagtcattaggcaacattatagtaaagaagggcctggcagagactagagctgctatatcgtgact

SEQ ID NO: 143800 - DNA, 201 bp, Homo sapiens
gggaggttagtatatattgacatttgccaaggaaacaactttaaaattttaaatcctatgctggccaggcacagtggcttacacctgtaatcccagcactytgggaggccaaggcaggcagattgcttgagctcaggagttggataccagcctgggcaacatggtgaaaccctgtctctacaaaaaatacaaaaattagcc

SEQ ID NO: 143801 - DNA, 201 bp, Homo sapiens
acctaacaattgttcctaggttgccagtcattaggcaacattatagtaaagaagggcctggcagagactagagctgctatatcgtgacttgagggactggygttattttcatttgtttcaccctcctgttgacatttaatgttacccaaaatcaactcaaacaaacaaaaaccctgatgcagtaaccttatccctaacagt

SEQ ID NO: 143802 - DNA, 201 bp, Homo sapiens
agtatatattgacatttgccaaggaaacaactttaaaattttaaatcctatgctggccaggcacagtggcttacacctgtaatcccagcactttgggaggycaaggcaggcagattgcttgagctcaggagttggataccagcctgggcaacatggtgaaaccctgtctctacaaaaaatacaaaaattagccagatgtgg

SEQ ID NO: 143803 - DNA, 201 bp, Homo sapiens; identical to SEQ ID NO: 26597

SEQ ID NO: 143804 - DNA, 201 bp, Homo sapiens
taaactaggaatcaaacccatgcagtccgactccagagcctcaccattactatacctgctatatctgagtaaggaggaggaaaagccatttttagctgtamttctttgaaacagagggaactccttccaaaggtcctagagcaaagttgctgtaattattatcccataattttctaagatccaagcaatactactgtggca

SEQ ID NO: 143805 - DNA, 201 bp, Homo sapiens
tggtgtataaagcaggacacctcacttggtaggagtgcaaggaggtatcagggagggctgttctgctgcccttctcgcaggcagcttttcaggcattgctyctgcacctatgcagacgtgtccatggctcgtgcgggggaccctcagggagaacagtcacgctgctgccccaggcacttgcactgtccctatgactgagta

SEQ ID NO: 143806 - DNA, 201 bp, Homo sapiens
aagagtggttggaatggtgggatttcgggatattcttttcaaaaaatgtcttcatggttgcattacctactacagttttgcagcatgacccatctaaaccsatgttgactctcccaggcctagggagtgaagaggttttgaatgctgtaaggaaacccactctgactcaccaggaccttccacttccatttgttagatgtg

SEQ ID NO: 143807 - DNA, 201 bp, Homo sapiens
tgaaatagccacagtgctgggggccgtcccaacgtgttctttcttccacagacgcaagatggctgtcctctctaaggaatatggttttgtgcttctaactkgtgctgccagctttataatggtggcccacctagccatcaatgtttccaaggcccgcaagaagtacaaagtggaggtaagtgggaacacaagctggtgccc

SEQ ID NO: 143808 - DNA, 201 bp, Homo sapiens
acagacgcaagatggctgtcctctctaaggaatatggttttgtgcttctaactggtgctgccagctttataatggtggcccacctagccatcaatgtttcyaaggcccgcaagaagtacaaagtggaggtaagtgggaacacaagctggtgcccttgtaggcttgtctgggggccacaggcttagccaagaacttattttc

SEQ ID NO: 143809 - DNA, 201 bp, Homo sapiens
ttttaaggttcattttaactttcaacactgaatgctcctcttgaccatctgatcagtatgtgctttgttgtgacagtatcctatcatgtacagcacggacyctgaaaatgggcacatcttcaactgcattcagcgagcccaccagaacacgtgagtgtcggccctgccgggcaccaaagacatctgcagagtgggtgtttt

SEQ ID NO: 143810 - DNA, 201 bp, Homo sapiens; identical to SEQ ID NO: 26596

SEQ ID NO: 143811 - DNA, 201 bp, Homo sapiens
cccactccctctctctccctctccatccctctccccaccatgtcctgctcctctcactccctccctccccctccctatgtaatgtatactttagcattttrccatgttaaatattttttcaataatgtgatttttgttggctatattattctacagcaacgactactgcagtggtgtagataaatctcataatgttgatca

SEQ ID NO: 143812 - DNA, 201 bp, Homo sapiens
atcacttgaacccaggaggtggaggttgcagtgagccaagatcgtgccactgcactctgccactcactctagcctgtgggacagagagagactccgtcttaaaaaaaaaaaaaaaacccacattctagaaataattaggtttctaaagtattcttaaaaggggcatctgtggaaaccagccactaataacatatttaaagg

SEQ ID NO: 143813 - DNA, 201 bp, Homo sapiens
aaggagaatcacttgaacccagggggcggaggttgcagtgagcctagatcgtgccacttcactctagcctggggggaagagcaaaactttgtctcaaaacaaaaaaagagttcccactccctgaagctgttttttgtttgcatgtttgttgtcagtctcctgtcatcattcgaaggtcagggccttgagggcaggaccctt

SEQ ID NO: 143814 - DNA, 201 bp, Homo sapiens
cagattgcatttatactttaaaagaggagctcagtagtaaatattaatttgtaattatagattctaactgtggattgtagagcagttgctttgctgtgacrggcatctatgcaagaggcacttctcttatcttgccatctacctaccctagcctcttaaaattaagaaaaatagaagtcagtgactaagccaccaaatttg

SEQ ID NO: 143815 - DNA, 201 bp, Homo sapiens
acaaaaacccagccaggtacggtggctcacacctgtaatcccagcactttcggaggccaaggagggtggatcacttgaggtcaggagttcaagaccagccyggccaacatggcgaaaccctgtctctactaaaatacaacaattagctgggcatggtggtgcatgtctgtaatctcagctacttaggaggctgaggcagga

SEQ ID NO: 143816 - DNA, 201 bp, Homo sapiens
tgttagatgtgaggtccttttactcagcatgttccaagtgacctctaatcccatgcagagcaaaggagggtggatgatagtgaccaggtcttctccctgcrgtgaatgtttatttttacccccaagcttctaacttggcaaggaagatgtaaagattcatagtgctggctgggtgaggtgggctcacacctgtaatcccag

SEQ ID NO: 143817 - DNA, 201 bp, Homo sapiens
gccaggtacggtggctcacacctgtaatcccagcactttcggaggccaaggagggtggatcacttgaggtcaggagttcaagaccagcctggccaacatgrcgaaaccctgtctctactaaaatacaacaattagctgggcatggtggtgcatgtctgtaatctcagctacttaggaggctgaggcaggagaatcacttga

SEQ ID NO: 143818 - DNA, 201 bp, Homo sapiens
ggtggctcacacctgtaatcccagcactttcggaggccaaggagggtggatcacttgaggtcaggagttcaagaccagcctggccaacatggcgaaacccygtctctactaaaatacaacaattagctgggcatggtggtgcatgtctgtaatctcagctacttaggaggctgaggcaggagaatcacttgaacccaggag

SEQ ID NO: 143819 - DNA, 201 bp, Homo sapiens
cccagcactttcggaggccaaggagggtggatcacttgaggtcaggagttcaagaccagcctggccaacatggcgaaaccctgtctctactaaaatacaamaattagctgggcatggtggtgcatgtctgtaatctcagctacttaggaggctgaggcaggagaatcacttgaacccaggaggtggaggttgcagtgagcc

SEQ ID NO: 143820 - DNA, 201 bp, Homo sapiens
aaccctgtctctactaaaatacaacaattagctgggcatggtggtgcatgtctgtaatctcagctacttaggaggctgaggcaggagaatcacttgaaccyaggaggtggaggttgcagtgagccaagatcgtgccactgcactctgccactcactctagcctgtgggacagagagagactccgtcttaaaaaaaaaaaaa

SEQ ID NO: 143821 - DNA, 201 bp, Homo sapiens
ccctgtctctactaaaatacaacaattagctgggcatggtggtgcatgtctgtaatctcagctacttaggaggctgaggcaggagaatcacttgaacccargaggtggaggttgcagtgagccaagatcgtgccactgcactctgccactcactctagcctgtgggacagagagagactccgtcttaaaaaaaaaaaaaaa

SEQ ID NO: 143822 - DNA, 201 bp, Homo sapiens
ctactaaaatacaacaattagctgggcatggtggtgcatgtctgtaatctcagctacttaggaggctgaggcaggagaatcacttgaacccaggaggtggrggttgcagtgagccaagatcgtgccactgcactctgccactcactctagcctgtgggacagagagagactccgtcttaaaaaaaaaaaaaaaacccacat

SEQ ID NO: 143823 - DNA, 201 bp, Homo sapiens
aagcctttttctgtctccaagtctctgctcttgctgttttctttacctgtgttctctctcacatatcactttatgctcttcagatcctttgtcgcaatgtyacccttatgttttatggtatggtcctgctgtgtttttgtcttccctgactgcatgctcactcgtgctctctctcaatcgtgcgctctctctctctctccc

SEQ ID NO: 143824 - DNA, 201 bp, Homo sapiens
atacaacaattagctgggcatggtggtgcatgtctgtaatctcagctacttaggaggctgaggcaggagaatcacttgaacccaggaggtggaggttgcartgagccaagatcgtgccactgcactctgccactcactctagcctgtgggacagagagagactccgtcttaaaaaaaaaaaaaaaacccacattctagaaa

SEQ ID NO: 143825 - DNA, 201 bp, Homo sapiens; identical to SEQ ID NO: 26585

SEQ ID NO: 143826 - DNA, 201 bp, Homo sapiens
tacaacaattagctgggcatggtggtgcatgtctgtaatctcagctacttaggaggctgaggcaggagaatcacttgaacccaggaggtggaggttgcagygagccaagatcgtgccactgcactctgccactcactctagcctgtgggacagagagagactccgtcttaaaaaaaaaaaaaaaacccacattctagaaat

SEQ ID NO: 143827 - DNA, 201 bp, Homo sapiens
ttagctgggtgtgggggcgcatgcctgtaatcccagctactcgggaggctgagacaggaaaatcgcttgaatccaggaggcggaggttgcagtgagccgcsaatgtgccattgcactccagcctgggcaacaagagggaaaagagagaaactccatctcaaaaaaaaaaatccagatgcccagatcaattaaatgagaatc

SEQ ID NO: 143828 - DNA, 201 bp, Homo sapiens
cacatcaaaggtctgggtcgcgaaggcagagactccatgtgccgcagaaaaaactccacggacaattgggagactcctttcaaaaaaacaaaactccggarccacgcgactccgcgctcagggggcgtgggtacggcccaccacgagggcagggctcggcgccagctctcggcaaaactaacaatatttgttaggccctaa

SEQ ID NO: 143829 - DNA, 201 bp, Homo sapiens
tatatggccaaactatggctatttaactatacagttgaatatatttggattataacatatttatctcttaaagggacagatcttccatcctcctaacatayagttagcttccactctccaaatattccaccagcaacattgatgaatattgaagactatggactgtgaggtactgtgaaagacccactctaggacctgctt

SEQ ID NO: 143830 - DNA, 201 bp, Homo sapiens
gggggatagttacttttcattacctaggtttctgttccttcttttaagtgtaatttaaatctggctgtcatgaaggtttggcgctcaaacagattttagcrtctgtttaatgtagaagtggactggaactagcattctgaaaatgtagtctgaacccaaagaaatcccatgactctccttttctgtcctatcatagaaaca

SEQ ID NO: 143831 - DNA, 201 bp, Homo sapiens
ggagacaagcttggtcaacatggcaaaaccccatctctacaaaacttagccaggcatggtggcacgcacctgtaatcccagctactcaggaagctgaggcrtgagaattacttgaacccgggaggcggaggttgcagtgagctgagatcatgccactgcattccagcctgggtgacagagacactccgtctcaaaaaaaaa

SEQ ID NO: 143832 - DNA, 201 bp, Homo sapiens
ttccccctaagatgaggaaagaggcaaggatgtcggcacttgccactggtattcaacattgcattgcccctaaccaggacaatcagtcaagaaaaaaaaawaaataaaagacatccacattggaaaggaagaagtaaaactgtctctctttgcagatggtatgatcctctatgtaaagtattccaacgatcgtggatctgt

SEQ ID NO: 143833 - DNA, 201 bp, Homo sapiens
gtgtggccactgtgaactgagctgcatccccttcctggtgcacacccgcacacacaaaagtcactctctaaggagtgggaatatctatctcttcgccttgraatcttcagaaaataatgatgtagcaaatgatagtttttttgaatgttgatttaattaagctgattctttctttgaaagagaagatttaatgatttttca

SEQ ID NO: 143834 - DNA, 201 bp, Homo sapiens
aaaagaagcactctaggcctggcgcggtggcccatgcttgtaatcccagcactttgggaggctgaggcaggtggactgcttgaggtcaggagttcgagacyagcctggccaacatggcgaaaccccatctctactaaaaatacaaaaattagctgggtgtagtgacatgtgcctgtgatcccagctactctggaggttgag

SEQ ID NO: 143835 - DNA, 201 bp, Homo sapiens
agaagcactctaggcctggcgcggtggcccatgcttgtaatcccagcactttgggaggctgaggcaggtggactgcttgaggtcaggagttcgagaccagsctggccaacatggcgaaaccccatctctactaaaaatacaaaaattagctgggtgtagtgacatgtgcctgtgatcccagctactctggaggttgaggca

SEQ ID NO: 143836 - DNA, 201 bp, Homo sapiens
aagcactctaggcctggcgcggtggcccatgcttgtaatcccagcactttgggaggctgaggcaggtggactgcttgaggtcaggagttcgagaccagcckggccaacatggcgaaaccccatctctactaaaaatacaaaaattagctgggtgtagtgacatgtgcctgtgatcccagctactctggaggttgaggcatg

SEQ ID NO: 143837 - DNA, 201 bp, Homo sapiens
ctggcgcggtggcccatgcttgtaatcccagcactttgggaggctgaggcaggtggactgcttgaggtcaggagttcgagaccagcctggccaacatggcraaaccccatctctactaaaaatacaaaaattagctgggtgtagtgacatgtgcctgtgatcccagctactctggaggttgaggcatgagaattgcttgaa

SEQ ID NO: 143838 - DNA, 201 bp, Homo sapiens
gcccatgcttgtaatcccagcactttgggaggctgaggcaggtggactgcttgaggtcaggagttcgagaccagcctggccaacatggcgaaaccccatckctactaaaaatacaaaaattagctgggtgtagtgacatgtgcctgtgatcccagctactctggaggttgaggcatgagaattgcttgaacccgggaggca

SEQ ID NO: 143839 - DNA, 201 bp, Homo sapiens
tctctatgccattgccgtgtgttttccccagaagagttcccattcttggccaggtgcctgtaatcctagcactctgggaggctgaggcaggtggatcaccygaggtcaggagttcgagaccagcctggcctacgtggtgaaaccccgtctctactaaaaatacaaaaatgagcctggtgtgatggtgggcacctataatcc

SEQ ID NO: 143840 - DNA, 201 bp, Homo sapiens
gcttaattttattgtccttacatttattgcttctgagagacacctttttttttttttaaggcaaggtcttgctctgttgccccatgctgcagtgaggtggkgcaatcatagctcactacagcctcagcctcctgggctcaggtgatcctcccacttcagcctcctgagtagacatgagagtctccctgtgtggcccaggct

SEQ ID NO: 143841 - DNA, 201 bp, Homo sapiens
tgattgttacctcaggatagatttctagtaggattaatgagccaaagaatattaatattaaaaagaatattactggccaggtgctgtggctcatgcttgtrttcccagcattttgggaggctgagatgggaggatcactagagcccaggagttcgagaccagcctaagaaacataggaagatcctatctcttaaaaaaaaa

SEQ ID NO: 143842 - DNA, 201 bp, Homo sapiens
acataggctgggcgtgatggctaacacctgtaatcccagtactttgagaggctgaggcagccgtatcagttgaggccaggagtttgagaccagcctggccmacatggcaaaacccccatctctactaaaaaataaaaaaattagccgggtgttgtggcgggcgcctgtgatcccagctatttgggaggatgaggcatgaga

SEQ ID NO: 143843 - DNA, 201 bp, Homo sapiens
cattcagcgagcccaccagaacacgtgagtgtcggccctgccgggcaccaaagacatctgcagagtgggtgttttctgtctaacacctcagcccttagtgygctgtatttgctgagtcatagtgatggtgacaatcatgggcacctcattaaaagtattcaaaaattatgtatgtgaacacattgactattaagcaaactt

SEQ ID NO: 143844 - DNA, 201 bp, Homo sapiens
ccgggtgttgtggcgggcgcctgtgatcccagctatttgggaggatgaggcatgagaattgattgaatctgggaggcagaggttgcagttagctgagattrtgccactgcagtccagcctgggcgacagagcgagactgtctcaaaataaataaaataaaataaaaaaattttaaaaatacagaaattagctgggcatgtc

SEQ ID NO: 143845 - DNA, 201 bp, Homo sapiens
ctcccttactagagcttcttttaagtttttatatttagtttcttcttttttttcccttccagtggacacttccattaagattctcacacactcaatttctrttcttctattaagggaaatcttaaaaggatgtggtatttgatgactcttaggaaggctctatttccctacagtatctttgtaatgcatctgaaatccacc

SEQ ID NO: 143846 - DNA, 201 bp, Homo sapiens
ataacaaatgcaaaatgccaataaacttctgttccttataaattacacagtctggttgggcgcggtggctcatgcctgtaatcccagcactttgggaggcbgaggcaggcagatcacttgaggccaggagtttgagaccagcctggccaacatagtgaaatcccgtctctactaaaaacacaaaaattagccaggtgtggt

SEQ ID NO: 143847 - DNA, 201 bp, Homo sapiens
taacaaatgcaaaatgccaataaacttctgttccttataaattacacagtctggttgggcgcggtggctcatgcctgtaatcccagcactttgggaggccraggcaggcagatcacttgaggccaggagtttgagaccagcctggccaacatagtgaaatcccgtctctactaaaaacacaaaaattagccaggtgtggtg

SEQ ID NO: 143848 - DNA, 201 bp, Homo sapiens
gcaaaatgccaataaacttctgttccttataaattacacagtctggttgggcgcggtggctcatgcctgtaatcccagcactttgggaggccgaggcaggsagatcacttgaggccaggagtttgagaccagcctggccaacatagtgaaatcccgtctctactaaaaacacaaaaattagccaggtgtggtggctcatgc

SEQ ID NO: 143849 - DNA, 201 bp, Homo sapiens
caaaatgccaataaacttctgttccttataaattacacagtctggttgggcgcggtggctcatgcctgtaatcccagcactttgggaggccgaggcaggcrgatcacttgaggccaggagtttgagaccagcctggccaacatagtgaaatcccgtctctactaaaaacacaaaaattagccaggtgtggtggctcatgcc

SEQ ID NO: 143850 - DNA, 201 bp, Homo sapiens
aatcacttgaacccaggaggtggaggttgcagtgagccaagatcgtgccactgcactctgccactcactctagcctgtgggacagagagagactccgtctyaaaaaaaaaaaaaaaacccacattctagaaataattaggtttctaaagtattcttaaaaggggcatctgtggaaaccagccactaataacatatttaaag

SEQ ID NO: 143851 - DNA, 201 bp, Homo sapiens
ggggacaggagatgccctggaggggaaggcgcttccggctctgcaggtatgtgctgttgggcctaggtgtggtcctgcggaattgctgcagattttagatygctggtgggtaggagctgcagcgcttctcttgggaaatctgtagatcacctggagccagcagttctgggaggcaccccaggttattggtcagagttacag

SEQ ID NO: 143852 - DNA, 201 bp, Homo sapiens
ctgcataaaaattgtttctttgttttttgttttcttttgtttttttcttgagacagagtcttgctgggtctcccagcctggagtgcagtggtgcaatctcrgctcactgcaacctccacctcccggattcaagcagttctcctgcctcagcctcccgagcagctgggattacaggcactcatcacctcgcccagctaattt

SEQ ID NO: 143853 - DNA, 201 bp, Homo sapiens
tttcatttgaagtcatgtttctaatcattcagaagttgaggtatgcctgatccatggtattagaagggatgatcccagagaggtcattctgtagcataatragcattacttttgaaggatggagaacctagaactctgactcatttgactatgggaaaatctgatctggtgagtgaccatgaccatgaagtgagatctggt

SEQ ID NO: 143854 - DNA, 201 bp, Homo sapiens
atggatttttcatctaagtttttattctctcttctcaaggacattgggaacagggagacttttccctcgaagaccatgtattctgggagaagcgctccccytctttctagtggagctacacccccagtgtagcctgcagaaccacctgagcccagccctgccagtgactgacttcacatagaacagcagctgagtcttcag

SEQ ID NO: 143855 - DNA, 201 bp, Homo sapiens
cccgttgagtcaggtcaaggacagttaaccaaacattagcatatgtaacgtaacataatatataacatttactgagtccttcctatgtgtcaggcatcatratgaatgtttatagacagtatgtccatctaatcctctcaacaaccttccaaggttatattagtatctccatttaacaagtgaggaaactgaggtgctgaa

SEQ ID NO: 143856 - DNA, 201 bp, Homo sapiens
tcttaagatttctctttctggattagtcataaaccagtctttcttaaatacattcagtttcttccctggtttcaatagatattgagggaagaaacggaaacctgaattggttagatgcatactttataccagacactgtgccagatgatagagattatttcaggtgtgtattcaggggacggggtgcgtggtggtggtcat

SEQ ID NO: 143857 - DNA, 201 bp, Homo sapiens
cgtatcagttgaggccaggagtttgagaccagcctggccaacatggcaaaacccccatctctactaaaaaataaaaaaattagccgggtgttgtggcgggygcctgtgatcccagctatttgggaggatgaggcatgagaattgattgaatctgggaggcagaggttgcagttagctgagattgtgccactgcagtccagc

SEQ ID NO: 143858 - DNA, 201 bp, Homo sapiens
ggtagaaggggaaaactgatgagaattattgtgaatcatggtggggaggaggggttttaagaagttaggcctgttaggctgggtgcggtggctcacacctrtaatcccagcactttgggaggccgaggtgggtggatcatctgagctcaggagttcaagaatagcctggccaacatggcaaaacctcgtttctactaaaaa

SEQ ID NO: 143859 - DNA, 201 bp, Homo sapiens
tctaaataaagcaagtttatcagcctctaattaattgccatttgggtcttgtcttagacagaagtgttccccttttctgaggacagattatctcctgaaaycaagttctgaccagagtggcccttcagacttctggttctaagcctttcctaaccatctggttcatcctgaatgccttgtacttttgttaaaaagctgcca

SEQ ID NO: 143860 - DNA, 201 bp, Homo sapiens
gacctcaagtgatctgcttgccctggcgtcccaaagtgctgggattacaggtgtgagccaccatgcccggccaaaaattgtttcttcatatccttattctwtaagatttttttttctatgttttaaatactttttttatttttaaagaagcaacaccattcagttcagaacacccatactgactttgagctgatggccttt

SEQ ID NO: 143861 - DNA, 201 bp, Homo sapiens
ggaaaactgatgagaattattgtgaatcatggtggggaggaggggttttaagaagttaggcctgttaggctgggtgcggtggctcacacctgtaatcccascactttgggaggccgaggtgggtggatcatctgagctcaggagttcaagaatagcctggccaacatggcaaaacctcgtttctactaaaaatacaaaaat

SEQ ID NO: 143862 - DNA, 201 bp, Homo sapiens
aataaagcaagtttatcagcctctaattaattgccatttgggtcttgtcttagacagaagtgttccccttttctgaggacagattatctcctgaaaccaarttctgaccagagtggcccttcagacttctggttctaagcctttcctaaccatctggttcatcctgaatgccttgtacttttgttaaaaagctgccagaat

SEQ ID NO: 143863 - DNA, 201 bp, Homo sapiens
tttgtaggtttctaactggaagtgaaattttttctatttttaaaactttctttttatttcatagttactttttaagctttttttgttaaaaattaagacamaaacacacaccttatcctaggcctatacagggtcaggatcatcagtatccgtcttctgcctccacatcttgccccagtggaaggtcacatggacacacct

SEQ ID NO: 143864 - DNA, 201 bp, Homo sapiens
tatgcttaattttattgtccttacatttattgcttctgagagacacctttttttttttttaaggcaaggtcttgctctgttgccccatgctgcagtgaggkggtgcaatcatagctcactacagcctcagcctcctgggctcaggtgatcctcccacttcagcctcctgagtagacatgagagtctccctgtgtggcccag

SEQ ID NO: 143865 - DNA, 201 bp, Homo sapiens
gaattattgtgaatcatggtggggaggaggggttttaagaagttaggcctgttaggctgggtgcggtggctcacacctgtaatcccagcactttgggaggycgaggtgggtggatcatctgagctcaggagttcaagaatagcctggccaacatggcaaaacctcgtttctactaaaaatacaaaaattagctgggtgtgg

SEQ ID NO: 143866 - DNA, 201 bp, Homo sapiens
atagcctggccaacatggcaaaacctcgtttctactaaaaatacaaaaattagctgggtgtggtggtgcgcatctgtaatcccagctacttgggaggctgrggcaggagaatcacttgaacccgggagatggaggttgcagtgagccgagatcgtgccactgcactccagcccgggcgacaagagtgaaactccatctcaa

SEQ ID NO: 143867 - DNA, 201 bp, Homo sapiens
tactgatttgcaaactttaacctaaagcaaatatgcttaattttattgtccttacatttattgcttctgagagacacctttttttttttttaaggcaaggkcttgctctgttgccccatgctgcagtgaggtggtgcaatcatagctcactacagcctcagcctcctgggctcaggtgatcctcccacttcagcctcctga

SEQ ID NO: 143868 - DNA, 201 bp, Homo sapiens
tatggtaacaaggccttctggaatacctcagggaggacctgcttgcacctgttttacagttaacatttttttttaataagtagaaggaatacactataatrctaaaaagtatagtatagtaactacataaaccagtaactgtcacttatgatcattatcaagtgttatgtgctgtacataattatacatgctatactttta

SEQ ID NO: 143869 - DNA, 201 bp, Homo sapiens
ctagtttggggacaagcacctaacaattgttcctaggttgccagtcattaggcaacattatagtaaagaagggcctggcagagactagagctgctatatcrtgacttgagggactggtgttattttcatttgtttcaccctcctgttgacatttaatgttacccaaaatcaactcaaacaaacaaaaaccctgatgcagta

SEQ ID NO: 143870 - DNA, 201 bp, Homo sapiens
tttctactaaaaatacaaaaattagctgggtgtggtggtgcgcatctgtaatcccagctacttgggaggctgaggcaggagaatcacttgaacccgggagrtggaggttgcagtgagccgagatcgtgccactgcactccagcccgggcgacaagagtgaaactccatctcaaaaaaaaaaaagcagttaggcctattttg

SEQ ID NO: 143871 - DNA, 201 bp, Homo sapiens
aagagtaaaagtgagctgaaaagtgctgggctgacacaaggtagccctgcacatagccagggagcccagcatcctgtccaaagattagagtctgaaagctsactctactgatttgcaaactttaacctaaagcaaatatgcttaattttattgtccttacatttattgcttctgagagacacctttttttttttttaaggc

SEQ ID NO: 143872 - DNA, 201 bp, Homo sapiens
acaaaaattagctgggtgtggtggtgcgcatctgtaatcccagctacttgggaggctgaggcaggagaatcacttgaacccgggagatggaggttgcagtkagccgagatcgtgccactgcactccagcccgggcgacaagagtgaaactccatctcaaaaaaaaaaaagcagttaggcctattttgctgtgctaagagaa

SEQ ID NO: 143873 - DNA, 201 bp, Homo sapiens
taaatattaatttgtaattatagattctaactgtggattgtagagcagttgctttgctgtgacaggcatctatgcaagaggcacttctcttatcttgccayctacctaccctagcctcttaaaattaagaaaaatagaagtcagtgactaagccaccaaatttgaatgtgttacctgggctagctggagtgttttggggga

SEQ ID NO: 143874 - DNA, 201 bp, Homo sapiens
atcagctactttgaggcagaaggattgcttgagtccagaggtcaagcctgcagtgagccctgattgtgccacttccactccagcccggatgacagaggggraccctgtctcaaaacaaaaacaaaacaaaacaaaaacccagccaggtacggtggctcacacctgtaatcccagcactttcggaggccaaggagggtggat

SEQ ID NO: 143875 - DNA, 201 bp, Homo sapiens
acccccaagcttctaacttggcaaggaagatgtaaagattcatagtgctggctgggtgaggtgggctcacacctgtaatcccagcactttgggaggccgaygtgggtggatcacttgaggtcaggagttggagacaagcttggtcaacatggcaaaaccccatctctacaaaacttagccaggcatggtggcacgcacctg

SEQ ID NO: 143876 - DNA, 201 bp, Homo sapiens
aagggacaaacccagtagtgtgttagtagcaaaaagcatggacactggcatcagtctgcctgtattcagacaccagctgtgcactcatcagctgtgggacyttaggcaaattgttgaatttctctttgcctccatttcctcatccatagaatggggataataatagtaactatcatatgggattgttgtaaggatggaaag

SEQ ID NO: 143877 - DNA, 201 bp, Homo sapiens
ctccagctgttcgaaggtgatccaggtgagtgctagcacctgcgggcagccacgagcaccgggccgccgggggcacttcagcctttgcgcagggcactccyatatttcagcctatgcgagctgaatagagacccgctgtctctaacctccccccacccttatcagtaaattagcgatctgaatttccaccctctctgctct

SEQ ID NO: 143878 - DNA, 201 bp, Homo sapiens
gtttcttcatctgcaaaatgggagtaatatcatagggatgctgtgaggatctaaatgagttaatactgatgaactaactgcttagaacaaggtttgccccktactaaatactgtgcacggtggtaataagtaataataattgatttctcctacttttcttcctctagtctatatcactacccttcagacacactggactct

SEQ ID NO: 143879 - DNA, 201 bp, Homo sapiens
tgctgctgtgtttttaaaacattatagggccaggagcagtggttcatgcctcttatcccagcactttgggaggctgagagaggcaaattgcttgagctcargagttcgagaccagcctggccaacatagcgaaaccccgtctgtactaaaaatacaaaaaattagctgggcatggtggcacacacctgtaatatcagctac

SEQ ID NO: 143880 - DNA, 201 bp, Homo sapiens; identical to SEQ ID NO: 26629

SEQ ID NO: 143881 - DNA, 201 bp, Homo sapiens
cgtgaacccaggaggcggagcttgcagtgagccgagatcgcgccaccgcactccaggctaggcgacagagtgagactccgtctaaaaaaaaaaaaaagaaaggaaagaaaagaaaggggttatgggaagggactttggatttgttagtggagattcttggccagggcagaaggactcctatttggcgagtgattctgctca

SEQ ID NO: 143882 - DNA, 201 bp, Homo sapiens
ggccaggcagagccccttccattcacacggaggtgagagccgggaaggggaagccggccccagctggactcccagcagccttggttaggctttgaagccasaggggggtgggagtgaaatcaaggtgtgaagttgagggggtgggtgggcaggcccaaggcggccatttggtgtgggggatggggccggtggaggtgaggg

SEQ ID NO: 143883 - DNA, 201 bp, Homo sapiens; identical to SEQ ID NO: 26623

SEQ ID NO: 143884 - DNA, 201 bp, Homo sapiens; identical to SEQ ID NO: 26624

SEQ ID NO: 143885 - DNA, 201 bp, Homo sapiens
cccctcattttgtgggttttccactagtgtagagcagagctgagatttaaagtcaggtcttctgaggaccagccagagttcctgttgtcacaggcacacaygcacaggcagcctctgctccagcgcagacacacacacacatacacatagcctctgctccatcacagccacacacacgcacacgaggcctctgctccatca

SEQ ID NO: 143886 - DNA, 201 bp, Homo sapiens
ggggcccagcagtggttcagtacatgggtttggagcccacatccagatagcccccaggcgcggtgtatggtagagggaaggggcccccttggagaaagtgyggggcaaagggtaccgccggtggagccgctgggtacccggagccccctgacccgtgcggcagctccagaaatgcagccgagtagggggctgagcgcccgg

SEQ ID NO: 143887 - DNA, 201 bp, Homo sapiens; identical to SEQ ID NO: 26626

SEQ ID NO: 143888 - DNA, 201 bp, Homo sapiens
cattgggcgttctttctcctctggagcttatctgcccctacatttgctgtcctggtccccgccatcccacagaccatattcaggccccatgctctggtccyacgggcctctggtggacttggggaggggccaggctgctcaccctcaaggggcagcgctggcagccagagaagcctgaggacatccctctccatccctccc

SEQ ID NO: 143889 - DNA, 201 bp, Homo sapiens
gtgaacccaggaggcggagcttgcagtgagccgagatcgcgccaccgcactccaggctaggcgacagagtgagactccgtctaaaaaaaaaaaaaagaaaggaaagaaaagaaaggggttatgggaagggactttggatttgttagtggagattcttggccagggcagaaggactcctatttggcgagtgattctgctcac

SEQ ID NO: 143890 - DNA, 201 bp, Homo sapiens
acgtgaacccaggaggcggagcttgcagtgagccgagatcgcgccaccgcactccaggctaggcgacagagtgagactccgtctaaaaaaaaaaaaaagaaaggaaagaaaagaaaggggttatgggaagggactttggatttgttagtggagattcttggccagggcagaaggactcctatttggcgagtgattctgctc

SEQ ID NO: 143891 - DNA, 201 bp, Homo sapiens
gacgtgaacccaggaggcggagcttgcagtgagccgagatcgcgccaccgcactccaggctaggcgacagagtgagactccgtctaaaaaaaaaaaaaagaaaggaaagaaaagaaaggggttatgggaagggactttggatttgttagtggagattcttggccagggcagaaggactcctatttggcgagtgattctgct

SEQ ID NO: 143892 - DNA, 201 bp, Homo sapiens; identical to SEQ ID NO: 30858

SEQ ID NO: 143893 - DNA, 201 bp, Homo sapiens
cccataggcctctgtggctgctggctctgggccccgcagtttcctcttcacacgggcgtctcgctccctggggaacagtggtggtgatgatgatgatgatggtgatggccatggtgatggtaacagtacttacccggtgccaggcatttcaccctcccagggaccctgtcaggtaggggccatcattatacccattttata

SEQ ID NO: 143894 - DNA, 201 bp, Homo sapiens; identical to SEQ ID NO: 30859

SEQ ID NO: 143895 - DNA, 201 bp, Homo sapiens
ctcactccacccctctccctgcttaggccaacagccttgcctgtcaaggaaagtacactccgagcggtcaggctggggctgctgccagcgagtccctcttygtctctaaccacgcctattaagcggaggtgttcccaggctgcccccaacactccaggccctgccccctcccactcttgaagaggaggccgcctcctcggg

SEQ ID NO: 143896 - DNA, 201 bp, Homo sapiens
gctctttcttccctcgtgacagtggtgtgtggtgtcgtctgtgaatgctaagtccatcaccctttccggcacactgccaaataaacagctatttaaggggragtcggccgtccgtgtcttgtggtgtctaatgcaggggagggcctggggaggtagcagagcccagaagaagaaagagcccctgttctctgttttttctgg

SEQ ID NO: 143897 - DNA, 201 bp, Homo sapiens
ttttggtcctaggaagtagaagtgcagccaagagtgataaagctcactaaagcagcgggtgtttggagggtagtccctggcaactcccactgcttgagttscaaccccactcttcctgttccccaggtgtgcggcgacatccatggacaattctatgacctcaaagagctgttcagagtaagagtgtggccaacactgtga

SEQ ID NO: 143898 - DNA, 201 bp, Homo sapiens; identical to SEQ ID NO: 26627

SEQ ID NO: 143899 - DNA, 201 bp, Homo sapiens; identical to SEQ ID NO: 26628

SEQ ID NO: 143900 - DNA, 201 bp, Homo sapiens
caacactccaggccctgccccctcccactcttgaagaggaggccgcctcctcggggctccaggctggcttgcccgcgctctttcttccctcgtgacagtgktgtgtggtgtcgtctgtgaatgctaagtccatcaccctttccggcacactgccaaataaacagctatttaagggggagtcggccgtccgtgtcttgtggt

SEQ ID NO: 143901 - DNA, 201 bp, Homo sapiens
cttctcactccacccctctccctgcttaggccaacagccttgcctgtcaaggaaagtacactccgagcggtcaggctggggctgctgccagcgagtccctyttcgtctctaaccacgcctattaagcggaggtgttcccaggctgcccccaacactccaggccctgccccctcccactcttgaagaggaggccgcctcctc

SEQ ID NO: 143902 - DNA, 201 bp, Homo sapiens
cctcctcggggctccaggctggcttgcccgcgctctttcttccctcgtgacagtggtgtgtggtgtcgtctgtgaatgctaagtccatcaccctttccggsacactgccaaataaacagctatttaagggggagtcggccgtccgtgtcttgtggtgtctaatgcaggggagggcctggggaggtagcagagcccagaaga

SEQ ID NO: 143903 - DNA, 201 bp, Homo sapiens; identical to SEQ ID NO: 26625

SEQ ID NO: 143904 - DNA, 201 bp, Homo sapiens
ggccaccaccccctcaagcagggtcactcacctgtgggttctggtaggctgtcacggagatgaatgtggtctcggggaagcggaaggaggccatgcccccscagtgctggctgcagagctgggctgcccgaactaggtgtatgcggggttggtacttgtgcatggagtgcaggatcagctgggagggaggaaatgggagtg

SEQ ID NO: 143905 - DNA, 201 bp, Homo sapiens
tagggaggatccctgtctcaggcctggccccatcgccatcgggactacactcacctccgctcccataggcctctgtggctgctggctctgggccccgcagyttcctcttcacacgggcgtctcgctccctggggaacagtggtggtgatgatgatgatgatggtgatggccatggtgatggtaacagtacttacccggtgc

SEQ ID NO: 143906 - DNA, 201 bp, Homo sapiens; identical to SEQ ID NO: 30867

SEQ ID NO: 143907 - DNA, 201 bp, Homo sapiens
tgcggagatgaggagtgacttgcccaatgtcacactgtgcacgcagtatgaagagtggcagctctggctggggcagtagctgacatatatggtcccagagytttgggaggccgaggtgggaggattgcttgaacccaggagttccagaccagcctaggcaacatagtgagacctcgtctctacaaaaaataaaataaatta

SEQ ID NO: 143908 - DNA, 201 bp, Homo sapiens
cagagttaactgccctggctggtggtccccacccctcgtcctttcccagcccaaacaggatttggctcacatcttcattaaaatccatgtagttagacacratgtggatgttggggtggaacactttcatctgtcggataatttcttccaggatatcaccaatgcccgcagaaaagatgaaaaggggaatgttgttatggt

SEQ ID NO: 143909 - DNA, 201 bp, Homo sapiens
tgggaggattgcttgaccccgggaggctgcagtgagccatgatcatgccactgaattccaccctgtgtgacagagcaaaacccctctttttttctttttctttttttttttgagacagcatctcactctgttgcacaggctggagtttagtggtgcgatctcggctcactgcaacctcagcctcctgggctcaagcagtcc

SEQ ID NO: 143910 - DNA, 201 bp, Homo sapiens
tgggagcatcggcctgggtgagaagggctggggcacaggccgggggtggaggagaccacgaggcagaatcagggatcctggggtgagaaaactgaagtgcrgagatgaggagtgacttgcccaatgtcacactgtgcacgcagtatgaagagtggcagctctggctggggcagtagctgacatatatggtcccagagcttt

SEQ ID NO: 143911 - DNA, 201 bp, Homo sapiens
cgagacaggtccccgggtgggggcgggctcccaccttgaacagcgcgtagtgcaggtactggtagggcaggcggctctggaagtcacgcagcagctgccgsggcgggtagggcacctggaaggcgggcagcgtccgcttgcagcgccgcaggcaggcggctcgctccaggacgcggccgaagagccgcagctcgcaggccc

SEQ ID NO: 143912 - DNA, 201 bp, Homo sapiens
cgggcgtggtgggggcgcctgtagtcccagctactcggagaggctgaggcaggaaaatgacgtgaacccgggaggcggagcttgcagtgagccgagatcgygccactgcactccagcctgggtgacagagcgagactctgtctcaaaaaaaaaaaaaaaaaaagaaggggtgctttattctgattcacacgaaggctcagt

SEQ ID NO: 143913 - DNA, 201 bp, Homo sapiens
ttcagcctcccaagtagctgtgattacaggcgcatgccaccacgcccagctaatttttgtttgtttgtttgtttttgttttttgagacacagtctcacackgttgcctgggctggagtgcaatggagcaatctcaactcactgcaacctccgcctctgcctcccaggttcacgtgattctcctgcctcagcctcccgagta

SEQ ID NO: 143914 - DNA, 201 bp, Homo sapiens
gtctcaaaaaaaaaaaaaaaaaaagaaggggtgctttattctgattcacacgaaggctcagtatgagccggtggtggccctggggaaaacccagctcaggycttactggaggagcaagaagcagggctgctgatgggcgggaaagggctctggagagtggggctagtgtcttgcatggtgcccactgggccttcctgagtc

SEQ ID NO: 143915 - DNA, 201 bp, Homo sapiens
gacgcagggagccatgagccctcgaggccacactttagggggcagaggcaagatgagaagggaaccccacgtctgcacagctgggcccctgcactctgctrcgtggcccaagtcaccagtgggagtaactccggaactgagggcttgttctgggcccacctcagagggagaggggtgtgcgctggcaggggacagggtggc

SEQ ID NO: 143916 - DNA, 201 bp, Homo sapiens
aggaaccccatcggccatggtgaggtccccgatagagtctcccagcaggatgacattggttttgccctcaagttgctggaagtaaccacagttctcacacrcagagctgttcttgttgtatgtgtgtatgagctggcccttaaatccctggagaaaaccctaaataatgaagacaagagacagatggaagggctgcaggga

SEQ ID NO: 143917 - DNA, 201 bp, Homo sapiens; identical to SEQ ID NO: 26654

SEQ ID NO: 143918 - DNA, 201 bp, Homo sapiens
agtgcacccccgacgcctgctcctccctcttggtcctcgagcgccaggggagcattcaacctcttgctgctttctgtaagtccccatctcggagcatgtcraggagatgaaattctctgcttcgcaggggaagggaaggtgaagccaacagttgggggagaactgctctttctatttcacagaggggaaactgacgcaggg

SEQ ID NO: 143919 - DNA, 201 bp, Homo sapiens
gttctgcacaccaggaaccccatcggccatggtgaggtccccgatagagtctcccagcaggatgacattggttttgccctcaagttgctggaagtaaccasagttctcacacacagagctgttcttgttgtatgtgtgtatgagctggcccttaaatccctggagaaaaccctaaataatgaagacaagagacagatggaa

SEQ ID NO: 143920 - DNA, 201 bp, Homo sapiens
actggtaggggcgttccccagccaccacctcagctcctcctccgaactgcccattgtgtctaggccaccccctcccacagtgggattccaggcaccgctcrgcccctctcatcacaaaaacatgcatgcagcttacatctggtcaccccatctgattcctgccacacagactccatcggtttcctccagggcagcgcccca

SEQ ID NO: 143921 - DNA, 201 bp, Homo sapiens
ggctgccccgcggacggaaggggacagggccgggccccgggcgggcggcgcgcccgctgggtcttagcgccgggcacgaggcggcaaggtggggcggggcmtgggtcacgacgtctcccctcttttcccagagggtccgatagtgtcgttaagtcctctccgtcggcccgggctcctgccttgggggtgtcccctaggtag

SEQ ID NO: 143922 - DNA, 201 bp, Homo sapiens
gaggggagccctgaggcactggggactgtggcatggggagcgggaatccggggcccagcctgcctctcccacctccacctcattttctgcagctacagtargggcggcacttatgacacctacgtcggctctggttggctgatcaagggcatggaccaggggctgctgggcatgtgtcctggagagagaaggaagattatc

SEQ ID NO: 143923 - DNA, 201 bp, Homo sapiens
ctagccctcctctacaagcctcctcctgaccctccaccccacctcgtagggctgggcctctaggtccgtgagggactcgtcggcgacgtccagcatccccygatagtagttgagatacttggcggtcagctcgtgcttcgggttcctctggaggaaggtgtaggccgccgccaccgccttctccagccggttagcctggtc

SEQ ID NO: 143924 - DNA, 201 bp, Homo sapiens
cgatagagtctcccagcaggatgacattggttttgccctcaagttgctggaagtaaccacagttctcacacacagagctgttcttgttgtatgtgtgtatsagctggcccttaaatccctggagaaaaccctaaataatgaagacaagagacagatggaagggctgcagggacccatgtggcaccagctctccactgtctc

SEQ ID NO: 143925 - DNA, 201 bp, Homo sapiens; identical to SEQ ID NO: 26652

SEQ ID NO: 143926 - DNA, 201 bp, Homo sapiens
cagccccaggaggggaaactggcctgtgggctgggaaacagtgaagccaggcccagaccctggcctgactaggacccctcccttctctcctgccctccctscagcccggggagtcccaggcagtgctgtgctgctgtttgaggtggagctggtgtcccgggaggatgggctgcccacaggctacctgtttgtgtggcacaa

SEQ ID NO: 143927 - DNA, 201 bp, Homo sapiens
tgtccccgggaagtgcagatgggggattttgtgcgctaccactacaacggcacttttgaagatggcaagaagtttgattcaaggtaaccccggttgggcgyccccggattcaccactccgtcccctgaacccggggtcctgtttccttgttgcctcttttaagctctgcatcccaatactctaaccctagacagcacccct

SEQ ID NO: 143928 - DNA, 201 bp, Homo sapiens
gcctcccaaagtgctgggattacaggcatgagccaccgcgcccggccgccaggagttcattttttacaaagtgcatatccagcaagtgccccagaaagcartgcccacctcccggggctggaagtcctcctcttccaggccccagcgagcccggtggaaccggtaatacaccaggttctgctgcatgacgctgtccttggg

SEQ ID NO: 143929 - DNA, 201 bp, Homo sapiens
tgctcggatggggtctcaggccaatttgtggtggttctcaaactgtgttcctagaagcatcccatgtgcccccagggccaagaggtccaggttctaccccsacccacatcccctgaatcagagcagcttttttttcattttaaaaattttgatctgtttcacacattatatttgtttgaacttcccatgtttaaaaatttt

SEQ ID NO: 143930 - DNA, 201 bp, Homo sapiens
tccccgcacccaggaagcatcgaggaagaagacgtcccccgtccggactgcccacccgccctggtgctcctgcctgcgctgagtcccacgcctcaggctcyttgtccctgctttttcctgggcacacatgcaggctgttccctacctgagaccagtcacagactatccccatgccacgcctccaccccagcccccaccagg

SEQ ID NO: 143931 - DNA, 201 bp, Homo sapiens
aggatggctccttaaacatcccatgccccactctccagcccagccccaggaggggaaactggcctgtgggctgggaaacagtgaagccaggcccagacccyggcctgactaggacccctcccttctctcctgccctccctccagcccggggagtcccaggcagtgctgtgctgctgtttgaggtggagctggtgtcccggg

SEQ ID NO: 143932 - DNA, 201 bp, Homo sapiens
cccagaaagcagtgcccacctcccggggctggaagtcctcctcttccaggccccagcgagcccggtggaaccggtaatacaccaggttctgctgcatgacrctgtccttggggtcgaagagcatgtagctggcggcgctgcgggcagcctggcgcacatcattcactgcagcaggacaggggtgaggaattgctctggcac

SEQ ID NO: 143933 - DNA, 201 bp, Homo sapiens
aacagacaaggccttcctcccggctggctcctccgcattcgcagtgctccacgtgcatgaaggggacatctgccttaccgggccctgtgggtgagaggacygcccaccgtggtctgggtggcagatacctgctatggccgggtagaagtccttgaagtccacctgctcatgggccccttcacagccggccaggcaccgggc

SEQ ID NO: 143934 - DNA, 201 bp, Homo sapiens
tagtgtcttgcatggtgcccactgggccttcctgagtcaagaaggagcctcggcttgctccccaattttatggttcaagccctatcccttccccagggacrgtgatccccccacaggcctcgctggtctttcacgtcctcctgattgacgtgcacaacccgaaggacgctgtccagctagagacgctggagctcccccccg

SEQ ID NO: 143935 - DNA, 201 bp, Homo sapiens; identical to SEQ ID NO: 26655

SEQ ID NO: 143936 - DNA, 201 bp, Homo sapiens; identical to SEQ ID NO: 26656

SEQ ID NO: 143937 - DNA, 201 bp, Homo sapiens
caaagtgctgggattataatcatgagccactgcgctcggcccgagaccgtaatctgactggcatctgtcccttttgctcctgcccactgtgggtctgatgrctggtgggaggagtcaggaatgccttcaggatggctccttaaacatcccatgccccactctccagcccagccccaggaggggaaactggcctgtgggctg

SEQ ID NO: 143938 - DNA, 201 bp, Homo sapiens; identical to SEQ ID NO: 26658

SEQ ID NO: 143939 - DNA, 201 bp, Homo sapiens
ctgaagaagctgaagcctgggctggagaaggacttcctgccgctctacttcggctggttcctgaccaagaagagctctgagaccctccgcaaagccggccrggtcttcctggaagagctggggaaccacaaggccttcaagaaggagctgcgacaatgtaggtggcagggtggggccttataagcccaccttgctgggcac

SEQ ID NO: 143940 - DNA, 201 bp, Homo sapiens
atcaaaatcacagatactccactcctctttgtgtcttccagccccataatgtcaccccattatagtccaagacccttcctgtaccaggaggcccccccatwggcctgcaaggtgtgtattaaactgatggtgacgttgtgactgcttgtccagatgggcccctgagtgaaatggggcactactgatagttccctggtggtc

SEQ ID NO: 143941 - DNA, 201 bp, Homo sapiens; identical to SEQ ID NO: 26660

SEQ ID NO: 143942 - DNA, 201 bp, Homo sapiens; identical to SEQ ID NO: 26661

SEQ ID NO: 143943 - DNA, 201 bp, Homo sapiens; identical to SEQ ID NO: 26662

SEQ ID NO: 143944 - DNA, 201 bp, Homo sapiens
tttttattgctctaaagttgccattagtttgaccaactaaccaatgaatgagctgtagtgggttgctggagaggtgatgcttagtgtccgagtgttttgcrctgggcctcggtggtcctggtggcggatgttggtatgcccctgctcccctgccctgactgcacccgttttctcccggcagtcgtccctggggatgagccc

SEQ ID NO: 143945 - DNA, 201 bp, Homo sapiens; identical to SEQ ID NO: 26663

SEQ ID NO: 143946 - DNA, 201 bp, Homo sapiens; identical to SEQ ID NO: 26664

SEQ ID NO: 143947 - DNA, 201 bp, Homo sapiens; identical to SEQ ID NO: 26665

SEQ ID NO: 143948 - DNA, 201 bp, Homo sapiens; identical to SEQ ID NO: 26666

SEQ ID NO: 143949 - DNA, 201 bp, Homo sapiens; identical to SEQ ID NO: 26667

SEQ ID NO: 143950 - DNA, 201 bp, Homo sapiens
aagagctctgagaccctccgcaaagccggccaggtcttcctggaagagctggggaaccacaaggccttcaagaaggagctgcgacaatgtaggtggcaggktggggccttataagcccaccttgctgggcacagggtgctgcgggcaaaggaccatcattgtactcaaaggatggagcacgaagcagcaggaggcagagag

SEQ ID NO: 143951 - DNA, 201 bp, Homo sapiens
tacgggtgatgaagccaaggcaccgagaggtcagccagcccgctgaggccggaagccagtgtgcagggagctgggctccctcaggaagtccggctgtcccygtgtggccctgtctgagcgccttcgtgtttctcacttgagcctggagcgcctatggaaggtgcgtgccgcagttgttagtggatgctgggcctataccga

SEQ ID NO: 143952 - DNA, 201 bp, Homo sapiens
gtgccgcagttgttagtggatgctgggcctataccgacccctgctcagctgtgctcacttctgttagacttccccttctctcctccaggagggaccctccytgggtcagctgttcctcaagagcctgccatctctagcttgggcccctctttctcactctccccaggtgttaaagaaatcttactccaaggccttcacgct

SEQ ID NO: 143953 - DNA, 201 bp, Homo sapiens; identical to SEQ ID NO: 26669

SEQ ID NO: 143954 - DNA, 201 bp, Homo sapiens
ccccagggacacatgggggaggtgggaggttgggggagaaggggctgcagcatcttctgaagataggtaccggtgccaggcagggaccaaaaaccagatgrcagctcaagaaaaatggcatctcctcctcctagctcccctgtccccaggcgtagctgcatagacctcagccgcaggttctaaggagcctgccctggcagt

SEQ ID NO: 143955 - DNA, 201 bp, Homo sapiens; identical to SEQ ID NO: 26670

SEQ ID NO: 143956 - DNA, 201 bp, Homo sapiens
tttttttttttttggagacggagtcttgctctgttgcctaggctggagtgcagtggcactatctcggctcgctgtatcctctgcctcctgggttcaagcarttctctacctcagcctcccaagtagctgggattacaggcgcccgccaccacgcctggctaatttctttgtatttttagtagagacggggtttcaccatct

SEQ ID NO: 143957 - DNA, 201 bp, Homo sapiens
tttggttcgcagcgcctgcgcgcagaggagacggcccgcccccagcccgcccgggtgcccgctccgccccccgggctatgtaaagcggccgggctcgggtygtgccaccgctggactcccgtgtccctccgcgcaggcgggcggccccggagcgctggtgccggcagaggcggcgacggtggcgcccctcctcatcatggt

SEQ ID NO: 143958 - DNA, 201 bp, Homo sapiens
tcaagcaattctcccgcctcagccacccaagtagctgggattacaggcacccgccaccatacctggctaatttataaatttttagtagagacagggtttcrccatgttggccaggctggtctcaaacgccccgcctcaatttcccaaattgccgggattacaggtgcgagccactatgcccagcctattttatttgtaaag

SEQ ID NO: 143959 - DNA, 201 bp, Homo sapiens
ttcctttctgcatctgttctgtcctcccaccaggggtttactcccttatcaatgtaaaatcccactagctcttcaatcctgcagcagtttttacccatcakcctgatcagtgcccagcaggcagacaggatcttccatcaaagcatggcaatggggtaaggggaagaggaaaagttgagagccttcagacatgaatggttt

SEQ ID NO: 143960 - DNA, 201 bp, Homo sapiens
gcactgcagactccgctcataaagccacctggggaaggtgaagtaatagcctcaaaaagagtgtttaaaactttaagattttaggtcgtgtgtggtggctyacgcctgtaatcccagcactttgggatgctgaggtgggcagatcacgaggtcagcagattgagacctgcctggtcaatatggtgaaaccctgtctctact

SEQ ID NO: 143961 - DNA, 201 bp, Homo sapiens
cttggatgggagaatgtcacagatatgagaggcaatttctctcccaacatctcctaaacatttacgacagttaataggcacaaggaagatggcaaatgaayggcttccatgtgtaaaaaagaagaaagggtagagctttgcttttaggtctaaagacaggacagaaccagctaggaagcccctctctgactcaggcaaaaa

SEQ ID NO: 143962 - DNA, 201 bp, Homo sapiens
tctgatctctggaaggtaagcagggcctggttagtacttggatgggagaatgtcacagatatgagaggcaatttctctcccaacatctcctaaacatttaygacagttaataggcacaaggaagatggcaaatgaacggcttccatgtgtaaaaaagaagaaagggtagagctttgcttttaggtctaaagacaggacaga

SEQ ID NO: 143963 - DNA, 201 bp, Homo sapiens
tttgtttttataggagacatggaaatttacactacagaaggcaagacaaattgtcaagaagtccccgattctggtaagcactaagcacgtagaacgccagycttttccttggcatgtcctctctcactggccccggctttcacatcccaaaggcaaggactactccggatataagcctgcaacatgccatagctacgtggg

SEQ ID NO: 143964 - DNA, 201 bp, Homo sapiens
cccagaatatgtacttataaaattgtgtggttggccggttgtggtggctcatgcctgtaatcccagcacttttaggaggccaaggcgggcggatcacaagrtcaagagatcacgaccatcctggccaacgtggtgaaaccccatctctactaaaaatacaaaaattaactgggcgtggtaacatgtgcctgtagtcctagc

SEQ ID NO: 143965 - DNA, 201 bp, Homo sapiens
ttttcccttactcacatttggttaaatataaaatgccttcagtgtcaggttataatcccctctccacacccgcataccacacacagagtggttcacgatgrcttcatagtttgattgatgaacacagaggtggccacataatttcaagccaatgtgagcaataaaataacagtgtcactgacaagaataggaaggatttag

SEQ ID NO: 143966 - DNA, 201 bp, Homo sapiens
ctgacttcgaacaggaaatgtcagagcctggtaagatcaagtgagaggctgaaagtcagattctggtgaagtggaaaccggtatctcaccaagggaaacakgataaatattttggttttcagtgatgggttgccttttcaactggagcaattttaaaggattaagaaggttattgggagttattttcattttatcaattct

SEQ ID NO: 143967 - DNA, 201 bp, Homo sapiens
aaataatccttgtgtttctaagtcattgacatttaaattaattcactgaatgttcgtttttttaaaagcactatttggtactcaggaagctttttaaaagkttaagaaaaaacctgaatttttcccttactcacatttggttaaatataaaatgccttcagtgtcaggttataatcccctctccacacccgcataccacac

SEQ ID NO: 143968 - DNA, 201 bp, Homo sapiens
tcatcttgcttgttctcttctttggactttggttaaaccatctgcaaaatgggagagaatctggcagacctagagaaattagaaaaggggcacaattcagrccagcatatgcaatttcatattcaggtcaggaaggctaaggagagaagaaagagaaggggaggggagaagagaaacgtgggcagagaaggggtgaagaaa

SEQ ID NO: 143969 - DNA, 201 bp, Homo sapiens
ggtcgactatgcttgaacaggctgtgcctctttctgccacttttcaaatgttgcagaataaatgataagacatgttaatttttgcaaaacatttctttacrtgggtgatttagggggaaaataatccttgtgtttctaagtcattgacatttaaattaattcactgaatgttcgtttttttaaaagcactatttggtactc

SEQ ID NO: 143970 - DNA, 201 bp, Homo sapiens
aagttagatgttctcttttttggcaaagttgcgtcgtccgaaggtgaacgaccgactaaaaatcctatttcctagattattccctcttcttaatatactarcaaaatataaaacaacccaaaacaagattgctggttcaaggtaccatcttagcttcttctgacttcgaacaggaaatgtcagagcctggtaagatcaagt

SEQ ID NO: 143971 - DNA, 201 bp, Homo sapiens
ctatacttctttaccatataagttctatattttatttgtttattcctctattgaacattcacaatttgttataagctttactttgtattttcacatctccragttacagaagaagaagaaaaatattattactattttacagaaggaaaacagtgaagaacagtcacagttatcattaagctttgttttaactggttgcct

SEQ ID NO: 143972 - DNA, 201 bp, Homo sapiens
aacataaggtgaaacccaaataaaaataaagggaaaagtgggaaaagggacaaaacgttaatcaagaactttggtgaagcaaaaaggagcacaagtagaakggagatgatgtcatctctgaagtcacggaggggatggggaggctgacatttcacctggcccgggcctttctgcatcgttgctgatttttgtttgagagac

SEQ ID NO: 143973 - DNA, 201 bp, Homo sapiens
tgggaggatagcttgagcccaggagttcaaccctgcagtgagctgtgatcataccactgccctccagcctgggtgatagagcgagaccctgtctctatttwaaaaaaaaaaaaagatttctcttcaaggggattggatgggagcccaacaatgtgattgcaactggctggcatgaagaaaagggctaaccctcttacctgg

SEQ ID NO: 143974 - DNA, 201 bp, Homo sapiens
tagctgcatgtgacaaagaggcaatcattgcatagctacacagcttcagtgagacacaggccagcatacccttcatggctacacgctgccctttttcccaygtggaactggaagaacatgcctgggtctccggtaaaatgcacttatccccaagcttccaaggctggaagttatagaagaatcttcctatggaaaggggca

SEQ ID NO: 143975 - DNA, 201 bp, Homo sapiens
atgttttaatgcaaacctaactatggtactcccttaacgtaaaattattcgaagtcttcacatcctctggaggactcctagccccatacacaaggctcatmaggaactggtttctgagggcatttccagactcaccccttgccactccatagcacactacacttcaaaccacttgtagtctccccacacaccaggaggttt

SEQ ID NO: 143976 - DNA, 201 bp, Homo sapiens
acttgaacccaggaggcagagattgcagtaagccaagatcgcaccactgcactccagcctgggcaacagagcaagactctgtctaaaaaaaaaaaaaaaaagaaagaaatgagatgtacattttaccataataaaatggaaataaagcaatatttatttaatgtgctaacatttcctgaatcaaccaagagaacatcagtg

SEQ ID NO: 143977 - DNA, 201 bp, Homo sapiens
catatggaaccaaaaaagagcccacatcaccaagtcaaacctaagccaaaagaacaaagctggaggcatcatgctacctgacttcaaactatactacaagsctacagtaaccaaaacagcatggtactggtaccaaaacagagatatagatcaatggaacagaacagagccttcagaaataacaccgcatatctacaacta

SEQ ID NO: 143978 - DNA, 201 bp, Homo sapiens
ctccaggaagaccctccctgaccaacctctctgaagaaggtcccctttcctgctctctcacaccactttatttctttgataccgtctgaacacaaggaccrtgtctttcttgctcaccatcttattcctggactggcatagtacctggcacatagtaggtgctctgtaagatttgtttagtaaaaaataggatgagaacgg

SEQ ID NO: 143979 - DNA, 201 bp, Homo sapiens
aaggagaactacaaaccactgctcaatgaaataaaagaggatacaaacaaatggaagaacattccatgctcatgggtaggaagaatcaatattgtgaaaakggccatactgcccaaggcaatttgtagattcaatgccatcgccatcaagctaccaatgactttcttcacagaattggaaaaaactactttaaagttcata

SEQ ID NO: 143980 - DNA, 201 bp, Homo sapiens
gagtagagttcacccagcacactccacctcgcctgcgtcagccccttgtgctgggccctttccctagaactcccagttccctgcatggccagcgccttgtycccctgctggtttaagtaccccctctccaggaagaccctccctgaccaacctctctgaagaaggtcccctttcctgctctctcacaccactttatttctt

SEQ ID NO: 143981 - DNA, 201 bp, Homo sapiens
ctccctaactcattttatgaggacagcatcatcctgctaccaaagccaggcagaaacacaaccaaaaaagagaattttagaccaatatccttgatgaacaytgatgcaaaaatcctcaataaaatactggcagaccgaatccagcagcacatcaaaaagcttatccaccatgatcaagtgggcttcatccctgggatgcaa

SEQ ID NO: 143982 - DNA, 201 bp, Homo sapiens
aggcctctgaaagagactgaaaataggacagtaaaccaaaggaacccagggagtgtgctctcttccagcttcctcactgcacgtcctctgggttctgcccycagaacccatcctgcagactggctttccagatactcagtccacctggcaggaaattacgacagcactatcccagctcactcgagcttctcttattctgag

SEQ ID NO: 143983 - DNA, 201 bp, Homo sapiens
gaattctaccagaggtacaaggaggaactggtaccattccttctgaaactattccaatcaatagaaaaagagggaatcctccctaactcattttatgaggmcagcatcatcctgctaccaaagccaggcagaaacacaaccaaaaaagagaattttagaccaatatccttgatgaacattgatgcaaaaatcctcaataaa

SEQ ID NO: 143984 - DNA, 201 bp, Homo sapiens
ctattgtattcttgccaaaaattgcataacctgaatgtaatcatgaggaaacataatacaaacaaaaattgaggaacattttaccaaaaaaaaaaaaaaargccagtattacttaaaagcgtcaaggtcatgaaagacaaagaaagactaagcaatcagtttagattaaaaggatactaaggagatgtgatagctgaatac

SEQ ID NO: 143985 - DNA, 201 bp, Homo sapiens
ctttcacaacaatactaaggctttccactatgtagccattggtacagatggtacaaaagcaatggtgggtagaactgttgacacgttagcgtgaatcaagygctggcaccaaactctattagtagtcactgtgttcttcacctcccagtttaaaacaagagggggacatcctcccttaaaaatgtcacatagtacaaagca

SEQ ID NO: 143986 - DNA, 201 bp, Homo sapiens
attatgccattgattgcaagaatattattttaggtattagtgagaaaagttgctgctaattaaagtgagaaacatatggagaaatataccaggctgtttcrggccaccgagtcttttttctctcttgggagtgcctcttctctcaccagctcttctcctgcctgttatggtctctccaaaatcacatcttccctagctttt

SEQ ID NO: 143987 - DNA, 201 bp, Homo sapiens
tccaccccaaatcagcagaatatacatttttttcatcaccacaccacacctattccaaaattgaccacatagttggaagtaaagctctcctcagcaaatgkaaaagaacagaaattataacaaactgtctctcagaccacagtgcaaacaaaccagaactcaggattaagaaactcactcaaaaccgctcaactacatgga

SEQ ID NO: 143988 - DNA, 201 bp, Homo sapiens
agaattaaatacctgaacccacggaatccagccctctgccagtcctctttatcaaaagtggccttcttgaaaagagatagaggcaaaaaaaaaaaaaaaaagttaaggatgaagagacaaactataaatgagtattaatccaggcttagctgaattcagttacacgtagaaggacttatttttataacacagtccccaccc

SEQ ID NO: 143989 - DNA, 201 bp, Homo sapiens
ctcatcaagtctattatgccattgattgcaagaatattattttaggtattagtgagaaaagttgctgctaattaaagtgagaaacatatggagaaatataycaggctgtttcaggccaccgagtcttttttctctcttgggagtgcctcttctctcaccagctcttctcctgcctgttatggtctctccaaaatcacatct

SEQ ID NO: 143990 - DNA, 201 bp, Homo sapiens
actcactaactttaattgttttcttaattttaattattcaggtgcatcttcccgaaacctgaagaaatttatagaaaggtaagcagaagataagaagttgyttttaatttggtttctcattttgaataaggaatgaaaactctgttattaccccataatcatttttactgagcataaatagcttgttagtcactatccaaa

SEQ ID NO: 143991 - DNA, 201 bp, Homo sapiens
atttgtaaagataatggccaaagctgattggcacttctcaaagtcctagaatcatcctggctttaatgccccagatttgtaggtagagaccaggcctggtragtttgaatgacacacaaacccaattcactacatatgcctgggtgttaaggcctggggtctgcttcccagggcccacacttggcagggacacctgtgatg

SEQ ID NO: 143992 - DNA, 201 bp, Homo sapiens
ggcacatgccctttgaatccaaatgcttatccacagaattggcggatttctctattcaactggatctccagaatgcgcttcctaccatcatgatcagcctyctgctatgggtgtcaacagcgtcctttggaaaatgtgccttgtgaaagcatcaggagaggaaatggctccttccctttcattctttgtttatgctctttg

SEQ ID NO: 143993 - DNA, 201 bp, Homo sapiens
ttttagcagcactggcaagaaaagcatattcctgctatgggcagggtgggggtggagttccatagtttacctctgatggaaaatactaaacacatcactgraattttctgattcaaggaaaaacaaagtttacttatttgttctcagaaataaatttgtaaagataatggccaaagctgattggcacttctcaaagtccta

SEQ ID NO: 143994 - DNA, 201 bp, Homo sapiens
atggcattgctggtgagatcacccttcatcactcggtgaaagggtcgtttgccaggtttcccaactgcaaagtcactattttcccccttttcctttactcwgttctttagaagtgagtctttaagtccagcctgcactcagtgaggccagggaggaccaagcccctgctcccagaacatggaatatctacacatatctttt

SEQ ID NO: 143995 - DNA, 201 bp, Homo sapiens
attccaaacataccaatttagataagctttttctaaaatttagaccacaggagagattagtcccagaagtcactcataaaaggagtaaaatgaggttgtarctcatcacatttttctttgctgattttgcacaagccatggaaatgtggttcaaatgaatcctatttttgtcaacactttgtatcaggagttcttgacaaa

SEQ ID NO: 143996 - DNA, 201 bp, Homo sapiens
tggaaagaacaccacagaggtgaagcacccttttcatcacatcctatcagggttaaatgatgccacatggcattgctggtgagatcacccttcatcactckgtgaaagggtcgtttgccaggtttcccaactgcaaagtcactattttcccccttttcctttactctgttctttagaagtgagtctttaagtccagcctgc

SEQ ID NO: 143997 - DNA, 201 bp, Homo sapiens
acacccacatttttcagatgaggaaatggaagtccagaaaggggaggcaatttctccaaggccagaagccagtgggctggtactgaatgaaatgcaggtcwctgagtatactgtgacatcagagcttcttgaccctctccacagtagcacccctaaaaaggatcccaagggagagggaatctgtatttaaacacttttatt

SEQ ID NO: 143998 - DNA, 201 bp, Homo sapiens
ctctttgtagcaattgtgaatggaagtttgctcatgatttggctgtttgtctattattgatgtattggaatgcttgtgatttttgcacattgattttgtawcctgagactttgctgaagttgcttatcagcttaaggagtttttgggctgagacgatggggttttctaaatatacaatcatgtcatctgcaaacagagata

SEQ ID NO: 143999 - DNA, 201 bp, Homo sapiens
actgtatgataagccatcttccaaaagatttatgtgtactaacccatttaatcattacaatgaccttatgaagtctgtattatcattatccttgtttggtaggcgaaaaaataaagacagaaataagtaacttgttcaaggttacatagttagttaaaacttggcttattcctcgctttaattatgattatgttattgttg

SEQ ID NO: 144000 - DNA, 201 bp, Homo sapiens
gatcagaaaaaataaagtatctaaaaggttcagaaaaggaggaaagagggcagaatcttaaaaaagcaaaacaatttgtttaattgactcttttacttgaygattaggttgcaaaatggataaaagagcaatgggaatccagcacttttccaaataagaaaataggcagcaatcataactgaagtttttaatcttttgcat

SEQ ID NO: 144001 - DNA, 201 bp, Homo sapiens
gggccccaagatgcatggcgcacattcactgtgctatatggatttcctgatggatggatgcatcaatatgctattaacatgtcagtttctcattaaatctragtacagaacccgtgtttgcccggcgggatgaactcccctaatctgatttggcagaggctctagcataaatattcgtacaagctaaggctcttttaatct

SEQ ID NO: 144002 - DNA, 201 bp, Homo sapiens
taaaaggatggaggaagatctaccaagcaaatggaaaacaaaaaaaggcaggggttgcaatcctagtctctgataaaacagactttaaaccaacaaagatmaaaagagacaaagaaggccattacataatggtaaagggatcaattcaacaagaagagctaactatcctaaatatatatgcacccaatacaggagcaccca

SEQ ID NO: 144003 - DNA, 201 bp, Homo sapiens
tctttgtctcttgctcttgctctctttctttatcttccttttctcaactagaaaaatacacgctgtccaagaggccaaatacatacatggggaaaactgcytagtctcacagaaaatgtgaccttcaaagccttttccaaaacttttcttaagagtcacagctgatgttggatgactgcaagtcatttggtccaagctttt

SEQ ID NO: 144004 - DNA, 201 bp, Homo sapiens
tcctgaaagaagcactaaacatggaaaggcacaactggtaccagctgctgcaaaatcatgccaaaatgtaaagaccattgagactaggaagaaactgcatyaactaacgagcaaaataaccagctaatatcataatgacaggatcaaattcacacataacaatattaactttaaatgtaaatggactaaatgctccaatta

SEQ ID NO: 144005 - DNA, 201 bp, Homo sapiens
caccaggcctgccctaaaagagctcctgaaagaagcactaaacatggaaaggcacaactggtaccagctgctgcaaaatcatgccaaaatgtaaagaccaytgagactaggaagaaactgcatcaactaacgagcaaaataaccagctaatatcataatgacaggatcaaattcacacataacaatattaactttaaatgt

SEQ ID NO: 144006 - DNA, 201 bp, Homo sapiens
tgaaaagaccaaatctacgtctgattggtgtacctgaaagtgacagggagaatggaaccaagttggaaaacactctacaggatattatccaggagaacttycccaatctagcaaggcaggccaacattcagattcaggaaatacagagaacaccacaaagatactcctcgagaagagcaactccaagacacataattgtca

SEQ ID NO: 144007 - DNA, 201 bp, Homo sapiens
taaaggagctgatggagctgaaagccaaggctcgagaactacgtgaagaatgcagaagcctcaggagccgatgcaatcaactggaagaaagggtatcagcratggaagatgaaatgaatgaaatgaagcaagaagggaagtttagagaaaaaagaataaaaagaaacgaacaaagcctccaagaaatatgggactatgtga

SEQ ID NO: 144008 - DNA, 201 bp, Homo sapiens
gcaccatgtgcgagccaaaacagggcgaggcattgcctcactcgggaagtgcaaggggtcaaggagttccctttcctggtcaaggaagtgggtgacagacrgcacctggaaaatcgggtcactcccaccccaatactgtgcttttccaacgggcttaggaaacagcgcaccaggagattatatcctgcacatggctcagag

SEQ ID NO: 144009 - DNA, 201 bp, Homo sapiens
ataccttttcaaacttaatcatgttattttaaaaaaggctagtccttgtcattagtgtaaaaatactaaaatacttactaatagggatagtaagaagtaayctttgagaagtaacaagtaactatatgccaagcatttactgagtgttgtatagatattctctcatttaacctccttgtgaggtagtgggtattgttctct

SEQ ID NO: 144010 - DNA, 201 bp, Homo sapiens
tagatttttttaagtaaataaaaatctgtaaggcacatacctctaaagtaaacaagactcatctgcttttgaacagaaaccaatcccaggtctgaatttgyattgcggccacccatggcctgcagaggagaagtcactgagatgcacacaggccctctttacagtttccagacaagactttcctcacttggaatataatgt

SEQ ID NO: 144011 - DNA, 201 bp, Homo sapiens
acagagccacggggctccgaggaaaaagagttcatggaagtgatcaacagtcacttcctttgggtgggtaacacatgggagactggggtcataaaaggggyatagaagaaactaggaagggaactaaccttcagggaagcgtactcatatttacatagaaataatctgccaatatagggaaagccaaggagatgtgttttc

SEQ ID NO: 144012 - DNA, 201 bp, Homo sapiens
agatatgtaaatctggtagttttatatatatatatgtaaatctggtagaaagatagacagatagatagatagatagatagatagatagatagatagatagdtttttttaagtaaataaaaatctgtaaggcacatacctctaaagtaaacaagactcatctgcttttgaacagaaaccaatcccaggtctgaatttgcatt

SEQ ID NO: 144013 - DNA, 201 bp, Homo sapiens
agatagatatgtaaatctggtagttttatatatatatatgtaaatctggtagaaagatagacagatagatagatagatagatagatagatagatagatagatagatttttttaagtaaataaaaatctgtaaggcacatacctctaaagtaaacaagactcatctgcttttgaacagaaaccaatcccaggtctgaatttg

SEQ ID NO: 144014 - DNA, 201 bp, Homo sapiens
tgaataatttatttgatgatttttattcatctgctttaaaaatatttcttaaatacttaaccacctaatcaggcacagatgttacaggtgtccatttaaargtagatagggcttgtcccatctttgtagtcaattgcaattaaggcagatgagacaagtgaacaaataatggtaatgcaaggaagatatactaatgacagg

SEQ ID NO: 144015 - DNA, 201 bp, Homo sapiens
tagatagatatgtaaatctggtagttttatatatatatatgtaaatctggtagaaagatagacagatagatagatagatagatagatagatagatagatagatagatttttttaagtaaataaaaatctgtaaggcacatacctctaaagtaaacaagactcatctgcttttgaacagaaaccaatcccaggtctgaattt

SEQ ID NO: 144016 - DNA, 201 bp, Homo sapiens
tgtgcatggggtgtgatttacccaaatctgtaaggaacaggaacgcccccaaaggacagacattaatcattttaacaagcaattattctgatgaacaaagracattgtgtgccatgaataatttatttgatgatttttattcatctgctttaaaaatatttcttaaatacttaaccacctaatcaggcacagatgttacag

SEQ ID NO: 144017 - DNA, 201 bp, Homo sapiens
tggcagaaggctggaaagcaccatgagataagccatgagaactgtgaggagggcaagtgtgcatggggtgtgatttacccaaatctgtaaggaacaggaaygcccccaaaggacagacattaatcattttaacaagcaattattctgatgaacaaaggacattgtgtgccatgaataatttatttgatgatttttattcat

SEQ ID NO: 144018 - DNA, 201 bp, Homo sapiens
tggccgcctggaacccagagagttctctctcccggtgcctcgccactgcctccatctctatccctacagaccagctggtttaatgccctccaccctttggytgactactggctcccaaaagctctgagttcatatgtggtagttcagcccgcagaagtgtgttcaccttctggttaccaattccagcttcccagcagagag

SEQ ID NO: 144019 - DNA, 201 bp, Homo sapiens
aaattatgctaaagctacaattgttttgacatgcttgtctttagacattactttattttaaattttaaaatagcattaaaggaggactcaaggttttcacrtttacccgaagggagcacggattttcaatattgagaaatacaaaggcttcttgcagccactcatggaggcttccagtcagcgaaggcaaaaagggaatat

SEQ ID NO: 144020 - DNA, 201 bp, Homo sapiens
gaacacatttgtttgttctaggaattattttgaaagtaaacatagtaaaggggttcatgtcttagccctttgaataataaaagcaacaagcatattgtccrattcaagccatgtattagtttccttggctgccatatcaaagtaccacaagctgggtggctgaaaacaacgtaaattgattgccccagaattctggaggct

SEQ ID NO: 144021 - DNA, 201 bp, Homo sapiens
agattttaggaagcctatgaaagtttagagaacataacatttaattacatttaaactaaattttgttgcattaattaaactacttacatctatattaagcraaagaaaatgaaaaatcaaagatgagacaaaaaggagccaagaaaatgagttaaaatatatataattatagcctgatactggtgtcaaatttttccgtaa

SEQ ID NO: 144022 - DNA, 201 bp, Homo sapiens
atggaacttatttccagtggtgtcagatccaatcatggagttttcttgatttgtgtttcttctttgtatttgtagagccagacgcagaagacagatcatcygatttctagagcaaagccctttctctactttgctggcacacttcagaattatttacccctcccttagtgtgccaggctacagagggtatgcctatgcctg

SEQ ID NO: 144023 - DNA, 201 bp, Homo sapiens
ggggttcaggaattcaagcagagcttggctggccaattattcctctctatatgaaattatggttactcagtgacatcacctaatggctgggctgggctggrctgggctggagaatccaagatggcttcactcacatgatgtgcctgggaagggacagctggcaaggctgagttcagttcagctacatagggccattttttt

SEQ ID NO: 144024 - DNA, 201 bp, Homo sapiens
ggtagacatataatggcaaccctgtatattaccagttcatcacctgagcacacacctgctgcattatcaggagggccattatcttcctctcaaattgtgcraacacctggggagattgtgtggcaaagggtgggagctggagggtgcagggaagggcagtctgaatgccacacacacaagcagggggttcagtggtatcag

SEQ ID NO: 144025 - DNA, 201 bp, Homo sapiens
ggtatagcctggaatagaaatccatcaggaaatgcatgcaagtccaaatccagtgtagaaatggaaggataaagagcaagatacagtgtggacgtataatrtaacttaatcagtaagattctgttttctaactgttatacatgtgaaaagttttaaagaccaagttatagacctcgaagtgtcaaataaatcataagtaat

SEQ ID NO: 144026 - DNA, 201 bp, Homo sapiens
atgtctttggtaagtaattttggcagtaatcattccagatgtgctggcctttgtttttgtttcctcttgctctctctaaatgggatgccaactccacacasgtgcaaatttccctctttagcaaaatctgccatgaaaggcatatccacagtcatttcagtcctagacaaatggcaaaaggttccttctactcacctcccc

SEQ ID NO: 144027 - DNA, 201 bp, Homo sapiens
aaatgctatgcccctcactctcaaacatgcgaaaagtggtaatgcattactgtgaaaatgctcggtgcctggaatacacactagggtatccgctcttatawctacccagtctggaggttccaaactacttgagtgcataaataatgtgaataaattgtgctgcctaggttcacagcccaggggaatcattttgctgggaga

SEQ ID NO: 144028 - DNA, 201 bp, Homo sapiens
cagcactttgggatgctgaggtgggcagatcacgaggtcagcagattgagacctgcctggtcaatatggtgaaaccctgtctctactaaaaaaaaaaaaaatgtaaatatagatatacaaaaattagcaggacacggtggggcatgcctgtagtcccagctactcagggagctgaggcagaagaatcgcttgaacccagga

SEQ ID NO: 144029 - DNA, 201 bp, Homo sapiens
tgcccttgataataccctttctctaaaactctttaaactgccaatgccagagccagcagagcaccatgaagtgcagggcagaggctcatagcttggaagcrggcactgcagactccgctcataaagccacctggggaaggtgaagtaatagcctcaaaaagagtgtttaaaactttaagattttaggtcgtgtgtggtggc

SEQ ID NO: 144030 - DNA, 201 bp, Homo sapiens
gagacaggattagaaatgtgtgtgcaggggagtttattgagaagtgctcttggcaaaaagacgagcaagagaggaaggcagtggggttggcagagagaagscgggctgtgctgcagccataaaagaagtcccactgagagctctgggactaaaatagctcttcagagttgtcctgaagtaggtgcaggtcttggaattccc

SEQ ID NO: 144031 - DNA, 201 bp, Homo sapiens
caccaccacacccagctaattttttgtatttttagtagagatggggtttccctatgttggccacactggtctcgaactcctgacctcgtgatccgccccccttggctcccaaagtgctgggattacaggcatgagccaccgcgcccagcctccaaagtcttgttttaattaagacccagattccccaagactattttccag

SEQ ID NO: 144032 - DNA, 201 bp, Homo sapiens
aagtgagtgagacccatctcatagggataccatggaaattgtgaccatgcatgtaaatctgtggcatgtgcacacagtaaggactcaaccatcttagcttycttccgtctctcagagaatccagatttggcgatcacctggagacgctgagcgttgatatggcttcttggctcatctgttaatgaagtgttttatttccaa

SEQ ID NO: 144033 - DNA, 201 bp, Homo sapiens
atagatagatatgtaaatctggtagttttatatatatatatgtaaatctggtagaaagatagacagatagatagatagatagatagatagatagatagatagatagatttttttaagtaaataaaaatctgtaaggcacatacctctaaagtaaacaagactcatctgcttttgaacagaaaccaatcccaggtctgaatt

SEQ ID NO: 144034 - DNA, 201 bp, Homo sapiens
tgccattgcactctggcctgggcagcaagagtggaaactccatctaaaaaatagatagatagatagatagatagatagatagatagatagatagatagatdtgtaaatctggtagttttatatatatatatgtaaatctggtagaaagatagacagatagatagatagatagatagatagatagatagatagatagatttt

SEQ ID NO: 144035 - DNA, 201 bp, Homo sapiens
gtcatctttaatccagggaatgattctctggtgcaggggttaggaatggcaagagtgctgccaaatcttttttgcaatcaacagaggaggggcttgcagtrgctctcagaacttcctcgataccaaaatggcctgagttgggaggcagccagcacatggaagagggaaggacccaagaactgcagagctggctggctcctc

SEQ ID NO: 144036 - DNA, 201 bp, Homo sapiens
tgtagcaaaaattctattgtagtgcatgaagggagaataaagctgaaggacaataatagtgtcaaccacagcttcatagcaaccaaaaaaaaaaaaaaaaagaaaggcaacatggtcaggttcaaaataacagagtcggtaaaggtgagcaattgctcaagaaatgtacagcagctcttggtaaaaagcatttgaaaggga

SEQ ID NO: 144037 - DNA, 201 bp, Homo sapiens
ctcctagctgcaagagaagctggaaaacgcaatcctcattctggacagacatgggtcttgctaaaaattctataaattctattgtagcaaaaattctattrtagtgcatgaagggagaataaagctgaaggacaataatagtgtcaaccacagcttcatagcaaccaaaaaaaaaaaaaaaaagaaaggcaacatggtcag

SEQ ID NO: 144038 - DNA, 201 bp, Homo sapiens
agagagactggcctggcctcccaggctacatctttctcccatgctggatgcttcctgcccttgaatatcagactccaagttcttcagttttggaacttgarctggttctccttgctcctcagcctgcctacagcctattatgggaccttgtgagagtgtgagttaatactaaaaacccccccatatatatatatattcatt

SEQ ID NO: 144039 - DNA, 201 bp, Homo sapiens
aatgattctctggtgcaggggttaggaatggcaagagtgctgccaaatcttttttgcaatcaacagaggaggggcttgcagtggctctcagaacttcctcrataccaaaatggcctgagttgggaggcagccagcacatggaagagggaaggacccaagaactgcagagctggctggctcctctggtccttctctaagatg

SEQ ID NO: 144040 - DNA, 201 bp, Homo sapiens
gaaggtggggccaggagtcagtccagtcagtagggttctgcagacaaggataagtgataaggatgaaaaacagggcagcaatcagagctttttcaaaaaaagtaaaaagctaaaattcatcataaaaagcaatgaaggccaaaagaaccaaaagcagctaccaaaattgtcacaccaagctggagaaataaaactgagatc

SEQ ID NO: 144041 - DNA, 201 bp, Homo sapiens
gctattaatagccactacttttcatttttatctaccaaatttactaaggaaaaaaaatatgccaaggcttctattagtgtgctcaaaccttttctattatytggcaaataaatgtcactcctcttaaacctgggacagttcacttggaaagggacactaggtggtctgccctaaacatgatgcttcacatagtagggctct

SEQ ID NO: 144042 - DNA, 201 bp, Homo sapiens
cctcctgggttcaagcaatccccctacctcagcctcccaagtagctgggattacaggcacatgccaccacgctcagctattttttgtatttttagtagagwcagggtttcaccatgttggccagactggtctcaaactcctgacctctggtgatccaccagcctcggcctcccaaaacgctggggttacaggcgtgtgact

SEQ ID NO: 144043 - DNA, 201 bp, Homo sapiens
aagtgtttattgtctgtgctcctctagacggtgagtcccatgaagaaggagcccacagctgcctggtatggagtccaacagagtgcccagcacagtctggwgcctgatgtttctctctctctccctccccttcccccctctccctccctcttttcctctgtgtgcctctgtgtgtataatgaatcatagggccacagggac

SEQ ID NO: 144044 - DNA, 201 bp, Homo sapiens
cctggcccctctgtgcttggttctctcttcctagccttccaggactcacacgttagataagacttccttcaagactcctttcttgaaagccccacatgtgrggcagatgtcccttctatgtgctgacacagtactctggactgcccttaatgctactaacatttattgagctcttacaagtctaaacgtcatgcatagatt

SEQ ID NO: 144045 - DNA, 201 bp, Homo sapiens
tattgtagtgcatgaagggagaataaagctgaaggacaataatagtgtcaaccacagcttcatagcaaccaaaaaaaaaaaaaaaaagaaaggcaacatgrtcaggttcaaaataacagagtcggtaaaggtgagcaattgctcaagaaatgtacagcagctcttggtaaaaagcatttgaaagggatgactctggaggtc

SEQ ID NO: 144046 - DNA, 201 bp, Homo sapiens
gtctagctgggaagataaacaaataagctcacgataattaataataataatagaaagcaaatattaccatgtgcttaccaaacaccaagtatcctatttarcattatcttatttaatacttgcaatggtctgaatgttggtgtccccccaaaattcatatgttggaactaatacccactgttaatatgaagaggtggggcc

SEQ ID NO: 144047 - DNA, 201 bp, Homo sapiens
aaataaatacattattcatctcaaaattctactacaaagcaaaaatctcacacttaaaatattgctcaggcatcttggtcttgtattaaaaaacactatcrttggttttctcagacttcaaaaaagggatactattttctatgcatcctgaatgcccaaacataatatatgcttacctttctgaagcactgagacagttgc

SEQ ID NO: 144048 - DNA, 201 bp, Homo sapiens
tttctaaaatttagaccacaggagagattagtcccagaagtcactcataaaaggagtaaaatgaggttgtaactcatcacatttttctttgctgattttgyacaagccatggaaatgtggttcaaatgaatcctatttttgtcaacactttgtatcaggagttcttgacaaattgtgcaggagttgcagggggtccgtgag

SEQ ID NO: 144049 - DNA, 201 bp, Homo sapiens
atagtgctttcttattatattttaagatgaagaaaagctattgtttagtaaaactggacaaaatcacatcttctgctcctcagccatcttgcaggctagcrgattaaagatgctaggtgatgaggagagaaacctcaatcctagttacttctcactgattctgtcagaaaaagagagttgtgttcaccgtggtgaattctg

SEQ ID NO: 144050 - DNA, 201 bp, Homo sapiens
atgcgccaccacacctggctaattttgtatttttagtagagacggggcttctccatgttggtcaggctggtctcgaactctcaccctcaggtgagctgccygcctcagcctcccaaagtgctgggattacaggcgtgagccactgcgcccggcccccttctttctagcagttattaggtactagttcttatcattctctgc

SEQ ID NO: 144051 - DNA, 201 bp, Homo sapiens
tacctaatacagatttatgttattgttgtataacaaactgccccaaactttcatggcttaaaacaatagtcgttttattatatctcacaatttggggggggcggggttcaggaattcaagcagagcttggctggccaattattcctctctatatgaaattatggttactcagtgacatcacctaatggctgggctgggctg

SEQ ID NO: 144052 - DNA, 201 bp, Homo sapiens
tgcctcaaatgcctgaagtatcttggatataatgttgcgtgaataaggcttttagtgtttaatgtgataggacttaaacattctctttttgctagggtctmtaaaacatttgctattaatagccactacttttcatttttatctaccaaatttactaaggaaaaaaaatatgccaaggcttctattagtgtgctcaaacct

SEQ ID NO: 144053 - DNA, 201 bp, Homo sapiens
atcatttttactgagcataaatagcttgttagtcactatccaaactcaaggatatcactccttgggccagtgagcatagaaagtgattaatttgcatatgycctcaaagaagggtgataaaaatgcatagagagttggtaaaacttagctctgacagacaaaaggatgatgtcatatccctgctttatgaatgagaaaaca

SEQ ID NO: 144054 - DNA, 201 bp, Homo sapiens
cattatcctggcttcaaccagagaagctccacttttatctgttgtatgtcctggacttgctcacgacatttctttattaagaagaagaagaaaaagaagtsggggagttgttctgccacttgtaaaatgttgaaagctgctcctctatggggagggatgggccatttactctcaggcaataccacatcactagagcctttc

SEQ ID NO: 144055 - DNA, 201 bp, Homo sapiens
tggcaactagtttcaacatttaaaaataagcctataacccaggatcatcaaacatctgaaggaaacctcaaacatgaaagaaaatacagaaacaaaggggraaaaaagcaacttagagaaacacagactatgtactaagggggataaaactttttagaaagtttaatagcctacatattaaaataactgaaattaatatct

SEQ ID NO: 144056 - DNA, 201 bp, Homo sapiens
tttctctttcacaacacccaggtgtgcaaagtcgacatcacttttctacccacaataaatgtagtgatctttcataaaatcataaagaccagagtaagatratccaaaaagtataactaggacacctgatagtaaatggttgtccttttgcgatctcctgtcttgacaacactcctttaaaattcagattgcaaagataaa

SEQ ID NO: 144057 - DNA, 201 bp, Homo sapiens
aggaaaaattacaatgttcccattgattgcagcattcaactcaataccaaatgcgttaaaatatacttctcagaattgggcattaaaataatattcacacygtagcagctggggaaatggaggcatggagaaaccaagactctcttcctcagccacacagatagtaagttacagaggagacacttctacccacgttgtctc

SEQ ID NO: 144058 - DNA, 201 bp, Homo sapiens
agttttggctttagtatcgttttgttttgttttgcaagaatgaaaggggaagggcctcctaaccaacccaacagatcagttccggcaagcctcgaggctcrcggggtttatgcacactaacttcactgagccagggagcacggaagttgtgccactgtgcaacttgggttttctttatcctgcagtctttacctcagcaga

SEQ ID NO: 144059 - DNA, 201 bp, Homo sapiens
taaacctgagatagaagtgatatttaatgcatacattagctgaaacatttccttcaaatccttaaaattaaattaatcataaattaatcactcagcttcasttcctagcaaagataatcattattaaggtgtgttaaattcgtcgcaataaaaatatattcaatttccctctttatattttttagaaaaactgttcttgaa

SEQ ID NO: 144060 - DNA, 201 bp, Homo sapiens
tgcacagcctagcaactgtgaattgattaattctaacccatgttttttctcattaggtctaaaatcccaccatgctaactgcccattattttctgcactgyttattttctgcacaccaaataaaaggccttgacccttcaaggaataacccaatttctccagaggaaagatattatttgaccagaatatccttttacaaca

SEQ ID NO: 144061 - DNA, 201 bp, Homo sapiens
aacagcccaggctctagtgatcctcccacctcagcctcctgtgtaactgggactacaggtgcacaccaccatgcctgcctaattgttttatttttattttygtggagacagggtctcattatgttgtccaggctggtctcaaacttctgggcccaagcaatctgtctgcctcagcctcccaaagtgctgggattataagca

SEQ ID NO: 144062 - DNA, 201 bp, Homo sapiens
accaaggacctgatcgtattgtctggcaagcacagtaaatgctgtagaaaaacaagtgggcattgtttcataatgggcccttctgccttctatgaggctarttgatacttctttgcctttgtctccctataaggcagaaaacacatctgtgcgtacatgaccccatcccagctgtattcgctgaaaaggaatccactgtca

SEQ ID NO: 144063 - DNA, 201 bp, Homo sapiens
tgatcttagtcagctactaagtctctggagtcacccttctaaccaccccttcttcacaccatcaccctcctccgccctgtttcccatcagtgcttcccaaytcgtggcaatattgccccttgctcccaccctggggacatttggcagtgtctggaggcagatttggcaatgtctggaggcagatttgtgcggcgggcatct

SEQ ID NO: 144064 - DNA, 201 bp, Homo sapiens
atgtatttatatgcaacttaacaagaaagtgggctctgaaagatgttcaactacaaaggaaaatacctggaaaagaacctctattaaccagaagatcccasttaatcagagcacccattccctagcattcatctagaatagattttattccacacacatgcttagtagggcagccgatgacctcctgagctgccaaggttg

SEQ ID NO: 144065 - DNA, 201 bp, Homo sapiens
gcacccattccctagcattcatctagaatagattttattccacacacatgcttagtagggcagccgatgacctcctgagctgccaaggttgtgtgaactgrcaggaggagggtgtctccatcctcccgtactgaggacaaatattggggtggagggtatatgataaaagtttccgctggtaaaatgaattagcttgcatcc

SEQ ID NO: 144066 - DNA, 201 bp, Homo sapiens
agattttattccacacacatgcttagtagggcagccgatgacctcctgagctgccaaggttgtgtgaactggcaggaggagggtgtctccatcctcccgtmctgaggacaaatattggggtggagggtatatgataaaagtttccgctggtaaaatgaattagcttgcatccatctgatggcataccatgcactgaattac

SEQ ID NO: 144067 - DNA, 201 bp, Homo sapiens
gggaagtgtttattgtctgtgctcctctagacggtgagtcccatgaagaaggagcccacagctgcctggtatggagtccaacagagtgcccagcacagtcwggtgcctgatgtttctctctctctccctccccttcccccctctccctccctcttttcctctgtgtgcctctgtgtgtataatgaatcatagggccacagg

SEQ ID NO: 144068 - DNA, 201 bp, Homo sapiens
actaaaaatacaaaaattagccaggcgtggtggtgcatgcctgtagtcccagctactcaggaggctgacaggagaattgcttgaacttgggaggcagaggytgcagtgagccaagatcgcgtcactgcattccagcttgggcaacagagcgagacttcatctcaaaaacaacaataacaacaaacaaaacaaaacaaaaaa

SEQ ID NO: 144069 - DNA, 201 bp, Homo sapiens
ctactaaaccacccacctacagcaggatgttaaaccgattctttttttttttttttttttttgctattatggagcattctccttaaaaaaaaaaagaaaaragaaaaaaagaaaaaaaccttccaatttttaaaaactattatctacagaatctcttcatttgtgcaaggagtcagcctaggtaagaataccaggcttagc

SEQ ID NO: 144070 - DNA, 201 bp, Homo sapiens
tagccaggcgtggtggtgcatgcctgtagtcccagctactcaggaggctgacaggagaattgcttgaacttgggaggcagaggttgcagtgagccaagatygcgtcactgcattccagcttgggcaacagagcgagacttcatctcaaaaacaacaataacaacaaacaaaacaaaacaaaaaaaagagatctacctttag

SEQ ID NO: 144071 - DNA, 201 bp, Homo sapiens
attattaaaattcctccttaatactaccacccagagagagtcaccttaacattttggagtatcaggcttgttttgaaatattctttaatattctttttttwaaaaaaaaaaaaagttataaagccaatgatagagctaattttaagaagtaaaaaataaccccaccatcttaaatttttcacagtatttttgcactctttc

SEQ ID NO: 144072 - DNA, 201 bp, Homo sapiens
atcttgagaggtggcaggagacaggatccagagtcgaccccgtttccagtcccctcgctcacacatgctcagttggccgactggacttcactcacataacmcaaattcaaaaataagattgttaagaagttcaaggtggggcagcagagcattaaacccagtgcagggccctttctaagcgaaggacctcatgggacccac

SEQ ID NO: 144073 - DNA, 201 bp, Homo sapiens
gatcctgagggacatggggagccactggatgttctcaagcaagaaagaaatagcccaacgtgtgtcctaaaaagatgcctgtagtagcggcgtggagggtratttggtagggaaccagtccagagagacggagaaaaacaaaaggaaaagttgtattttaaaaagattttttaaatgaccaaacacagagttacaggacag

SEQ ID NO: 144074 - DNA, 201 bp, Homo sapiens
tgtagagaagggatgggggttgagagacaggaataatttcctagcaggcaggaatgtgttatcatcgacattatttagaattgctggactatggtgatgayaaaaggtggacctctcccactgcccccaaccctagggtacgctcctattcccccgcaaagcttggcaagtaaatatccctcctctttctttgtgcttttt

SEQ ID NO: 144075 - DNA, 201 bp, Homo sapiens
acttctcgtgcctcccaagtagctgggattacaggcatgcaccaccacaccttggtagtgtttgtatttttagtaaagtcagaatttcaccatgttggccmggctggtctcaaactcctgacttcaagtgatctgtccacctcggcctcccaaagtgctgggattacaggcatgagccaccacagccagcccatttcatat

SEQ ID NO: 144076 - DNA, 201 bp, Homo sapiens
cagaagtccagagccaaaatggcagcagggccacgctccttctaagattctagttggatcccttctgtctctccctagcttccaatggtggccgtgaggcrttggcataccttgccttgcagctgcatcgctccagtctctgcttcatcttcatatttggccatcttccctgggtgcctgtcatttccttttacaaggaca

SEQ ID NO: 144077 - DNA, 201 bp, Homo sapiens
tctagaggaaggaggatccagaaacctcaagttcagaggggcctttagaaggtggggaaccactccttaaactaaacaactctctttttgtttttttttttctccccagaaatattctagaagtggttctgacatttgttcactcccggttttggccaagatctgccagaaaattaaattgtatgtatacaatttctacct

SEQ ID NO: 144078 - DNA, 201 bp, Homo sapiens
atgggaattctatctgagttaccttcatgtcgactccagaaatatctaagcattatagtgctttcttattatattttaagatgaagaaaagctattgtttwgtaaaactggacaaaatcacatcttctgctcctcagccatcttgcaggctagcggattaaagatgctaggtgatgaggagagaaacctcaatcctagtta

SEQ ID NO: 144079 - DNA, 201 bp, Homo sapiens
gggctcacaactctaaagtgatgcgcgtgagagggtcgtgattgattgagcaagcagggggtacgtgactgggggctgcatgcaccggtaattagattggracaaaacaggatagggattttcacagtgtttttctatataatgtctgtaatctatagataacataaccgattaggtcaggggtcaatctttaactaccag

SEQ ID NO: 144080 - DNA, 201 bp, Homo sapiens
tgggaatggccagtgtcagagggacagtggggctcagctttccctgtcggggaaggtaagtgtgcttccccctcactgtaaagacgccactaagataactrgataggggtctgcagagactgagcccaagaggactggtgttggacacccccatggggaatgtaagagcagtgaccgaggcagcaggacagaaagagcgtg

SEQ ID NO: 144081 - DNA, 201 bp, Homo sapiens
caatgttgtagtgtagcaggacaagccgcaaacaaaactcctcagacaccgagttaaagaaggaagggatttattcggccaggggcatcggcaagactccygtctcaagagccgagctccccgagtgagcaattcctgtcccttttaagggctcacaactctaaagtgatgcgcgtgagagggtcgtgattgattgagcaa

SEQ ID NO: 144082 - DNA, 201 bp, Homo sapiens
tcttcccacagggtctcagccagcctttggagactactaaagagccatccctgttaggaaacttctggtgctttttgtctctttgtaccagaccccccccmccccgcaacagctcctaatattaatagttatggtgagcatataatttattgtccaaactggacactttgagagaagagggattgctcccataattatgcc

SEQ ID NO: 144083 - DNA, 201 bp, Homo sapiens
agtctcattccgacctgtctgctccctttcttcttaaacaacctgagcttctctccgaaatatctaaacctcagtagttaggttcaaatcgaccttctcamgccacaagaaagacctcaacttagaaagatgtcaaaggaagatgaagagcaaatccaaaaacactttcatgctggttttgttttttttcttcttttcttt

SEQ ID NO: 144084 - DNA, 201 bp, Homo sapiens
ggaacagagctggaggtagtcaggtcccagtcaacctaggaaggcgtgccctagcagaggaaagagtacgtgcaaaggcttgaaagcaagagggtccagcyttctgaggaggagctcagtgcagctgaactaaagctcatccagcaccaggtgggacagtgagacaagagcctagagaggtgcatgggaggcagatctcaa

SEQ ID NO: 144085 - DNA, 201 bp, Homo sapiens
aagcacagccaggggcccagcttccaatcaaaatcaattagctttttagctggcaactagtttcaacatttaaaaataagcctataacccaggatcatcamacatctgaaggaaacctcaaacatgaaagaaaatacagaaacaaagggggaaaaaagcaacttagagaaacacagactatgtactaagggggataaaact

SEQ ID NO: 144086 - DNA, 201 bp, Homo sapiens
ttacatgtgggagctgtagaaatgcaggtgaggctaaaccagaagtattggttggaagattgctgaagagcagttagctcctcagaccccttccaactctscacaggtggtcaactgcccctcccatactctggaataagactagagctttattctctggaaacactaaagtcaagggcctctggactggaagacaccaaa

SEQ ID NO: 144087 - DNA, 201 bp, Homo sapiens
  misc_feature (1)...(201): n = A,T,C or G
cttctcataacaactgccaatattacattcacagttcagagaaaacttgtcagcagagatttgattttttgagttcattttaaccatatttttttaaaagngtgatgtaaacatggtttgtttaaacttctttatgtgagtatcctgaccttaaatatatacatatatatttgtttcagaattaaagaaaaatctatttac

SEQ ID NO: 144088 - DNA, 201 bp, Homo sapiens
gatggaatgacgtagagttaattgtgctgttgccttggagcaactgacattcttggtctctcatccctgttgaaggacagtttcattgcttttcatcattytggggctcgtaatattttttctgcagccatactccctccaaatgtggcgatgagataattttatgtaattatattcctgacatactgtatgatttttaaa

SEQ ID NO: 144089 - DNA, 201 bp, Homo sapiens
tgagaaattcagaaaacaacaactatctctcttgagaacatgcttattaattccctcagctcaagaatcgctaatgacgctaatgactgggaatggttctraaagatcctttgagttttaaggctttaatcactgctctcccagcatccactcttggccctcatcttcacttaattaatcacccccattagagctcagctc

SEQ ID NO: 144090 - DNA, 201 bp, Homo sapiens
agagctgcatcctaagctggttggagggaatgccaagaagcaacccagttcacactgcagaagccccagaagacttggggattggttacatgtgggagctstagaaatgcaggtgaggctaaaccagaagtattggttggaagattgctgaagagcagttagctcctcagaccccttccaactctccacaggtggtcaact

SEQ ID NO: 144091 - DNA, 201 bp, Homo sapiens
tatggcaagcaagttcttccaaaggctggactcccttgtagttgctgcctaatgtagagaagggatgggggttgagagacaggaataatttcctagcaggmaggaatgtgttatcatcgacattatttagaattgctggactatggtgatgataaaaggtggacctctcccactgcccccaaccctagggtacgctcctat

SEQ ID NO: 144092 - DNA, 201 bp, Homo sapiens
tctggcagtgcagtggtgatcgttaatgaggttgcctgaaatccttgtacttgtcctccctgttcctgcttctggcctcagaggctgaggaaaggagtgtyttcgtaacctggggcccacactttctccaggaggacagtggctcactctgcagtgtgctaattctccaggaaaaagaggggcccacccagtagacatttt

SEQ ID NO: 144093 - DNA, 201 bp, Homo sapiens
cttaattaatcacccccattagagctcagctcaaagtcattccctctaagaagttttccctgatgccccaagttaagccagttcttccatgattcatctcygttcttcacactccatttttccagcacttattacaattgtaattcgataattgtaaaattaatatttaatgtctgcatcttctgttagggtgtaacctcc

SEQ ID NO: 144094 - DNA, 201 bp, Homo sapiens
ctttgtttccttgtatgtaggatagaaataactaacccacgtaaagattaagtaaaacaaaacttgtaaagttgcaaagactcagtaactgttagtggccrtcccccgccaccaccatcatccgtgtgtatgaagcaactccttcactcctgatgtccaacccaccccccagctccattcacgcctgtgaagtactttgag

SEQ ID NO: 144095 - DNA, 201 bp, Homo sapiens
tgtctgtgtgcaaacaaaaaaataattggaaagttgtaggtcagcatgttacctaccactggctatctttggatggtagaattataggtaactttttttttctcacttttcttcactgaatttgtattatgtgtgtaccaaatattgtggctcaagatcttggagatttgtttgttctatttgttttaagcaaatagctaa

SEQ ID NO: 144096 - DNA, 201 bp, Homo sapiens
gcacttattacaattgtaattcgataattgtaaaattaatatttaatgtctgcatcttctgttagggtgtaacctccatgaaagcagagacagtctggctrttttattcctcaaacatagtgctagtccctgaaatttcctcagagctgaacatagttcactacatgcattaattactcaacaactatttgttgaatgaga

SEQ ID NO: 144097 - DNA, 201 bp, Homo sapiens
gggagtgagtggccaggaacccatcttgagaggtggcaggagacaggatccagagtcgaccccgtttccagtcccctcgctcacacatgctcagttggccsactggacttcactcacataacacaaattcaaaaataagattgttaagaagttcaaggtggggcagcagagcattaaacccagtgcagggccctttctaag

SEQ ID NO: 144098 - DNA, 201 bp, Homo sapiens
gttcactacatgcattaattactcaacaactatttgttgaatgagaaatatgatagacagaataatctccctccaccctccaagttcatatccaagtcccycgtaactgtgtctgttaccttggacagcaaaaggaattttgagggtgtaatgtagttaaggattttagatggggagattgtcctggattatctgggtaag

SEQ ID NO: 144099 - DNA, 201 bp, Homo sapiens
gaaagaaagcagtatcttttactatgtgaaatactttctagtgcttggtacaaggctttcatcccaaaattctagatgctatttctagtcagaaatgttawtagaactatctcctattggtaaagatttctatattcttataatgaaaggtgcaactaactgtatctataatattaatacctacactatttactcttcatg

SEQ ID NO: 144100 - DNA, 201 bp, Homo sapiens
ttcagccactacgtttacggtcattagttacagcagcaataggaaactaatacaaataattgatttgttgtgtaacatagagtaagactgatcacacaacytgaaagcaaatagaaaaaaagtaaaagactatgtaacaaaagacccttatgactgaaccatacccaccatctgattaacccaaaatttgccagaaattat

SEQ ID NO: 144101 - DNA, 201 bp, Homo sapiens
aattttctattaagctatcttctcaatttgcaggcatatcaaaatattatattgatcccactatatactcaggatttctgagcactccttgagaaatgcarttcctaaaatatataagagagattatagattcgggatggggatgaaagaaagcagtatcttttactatgtgaaatactttctagtgcttggtacaaggct

SEQ ID NO: 144102 - DNA, 201 bp, Homo sapiens
tttacccttttttttttcatccctggaagaagaaaatgaagtgaacagacttcattttttgcatataatttaaagtcataaatgcccattggagctggaamgtgtcagaacctaaaaaccaaattaggctttgatagagctacatcttgagtattggaaaattgccactgtaggatacagcagaatgcagatttaataaca

SEQ ID NO: 144103 - DNA, 201 bp, Homo sapiens
atagtttagcctcattatgcatagcatcctagtagcctcagcttgtcctatgactacaagctcaagaccctgcatatatataattttctattaagctatcytctcaatttgcaggcatatcaaaatattatattgatcccactatatactcaggatttctgagcactccttgagaaatgcagttcctaaaatatataagag

SEQ ID NO: 144104 - DNA, 201 bp, Homo sapiens
accccattctcctttgttcctccctcccctaaagctcatcacatatttgctttagttagatccagggaagactatgacagcctaaagcaactcttttcctkctgcttagaagaggggtatagaatcctgatgatgcatgaagagtgtcaatgatgtcatgagagttgaggctttctcagtcatggcccctttaagccttgc

SEQ ID NO: 144105 - DNA, 201 bp, Homo sapiens
agaatttacaactgtcttcctattccagctcagacacagaatagctgggtgacctcaagtgaattaaataaccacccagcctttgtttccttgtatgtagratagaaataactaacccacgtaaagattaagtaaaacaaaacttgtaaagttgcaaagactcagtaactgttagtggccgtcccccgccaccaccatcat

SEQ ID NO: 144106 - DNA, 201 bp, Homo sapiens
ttttttcttttttcttctcagttttggctttagtatcgttttgttttgttttgcaagaatgaaaggggaagggcctcctaaccaacccaacagatcagttycggcaagcctcgaggctcacggggtttatgcacactaacttcactgagccagggagcacggaagttgtgccactgtgcaacttgggttttctttatcctg

SEQ ID NO: 144107 - DNA, 201 bp, Homo sapiens
gccttctgtatcagttctccgtgcagaattgggcccagaaatagtggcctctccctccgggagtaaggagaagcctctaatgaatggaaaacatgtcatayattagccctgggctgaggttcaattgcatctctggtatcaaaaaacagatatgctagccctcgcctttgttgtgactatagtgtcaaagcattaaataaa

SEQ ID NO: 144108 - DNA, 201 bp, Homo sapiens
ccaaagcagtgggagggataatcccctcccagatccatctctgtgggtaaccacccgtgcctgggcagctcatcttcccagaaacccaccccatgtgggtrcgatgtgtggttatagaaagagcccagaatttacaactgtcttcctattccagctcagacacagaatagctgggtgacctcaagtgaattaaataaccac

SEQ ID NO: 144109 - DNA, 201 bp, Homo sapiens
atcttacatggagctgggccaccagtcaggattatttctcctcctagaaagctgggcaggcatctcaaaaatccttaagtacctcatttatattctgaaayggttgctgattctctcttgccagggtcaaatatcgccaatgcccataacactcctcatagccattcgaaggactcagggctggcaggaatccagtgtctc

SEQ ID NO: 144110 - DNA, 201 bp, Homo sapiens
ttgagcacttataatgtgctaacattgttctaaatgctttatgtgtattcatgcatttaatcttatggaataggtattgttgtccaccctttatagatgaygaaggtgtggcagagagacatcaagatactagtttctagtttcgtagatttcctcactaagatgcaagcacatgggggtgggcaggcctgtaccttgcct

SEQ ID NO: 144111 - DNA, 201 bp, Homo sapiens
tgctcctggctcctcttcagtgcccccagctccctagtgcctgctccgccttatcccattcttcaatccctgcttccttgctggtctcccacatcacccayaagctcctggagagcagggatcccatttcttagcaggaggagctcaatgaataaatgagggaacacatgaaggaaaagcaccactttaccaggaaaacaa

SEQ ID NO: 144112 - DNA, 201 bp, Homo sapiens
atcttcatcattccctctacccagatcacctttatcaactccatgccatccctcaagctcatgtcaatggtcaccttctctgtaaagtaattcctaactatcccaacaaaatgttaactctcctttgaataatcattgtaaaataactgtttgagcacttataatgtgctaacattgttctaaatgctttatgtgtattca

SEQ ID NO: 144113 - DNA, 201 bp, Homo sapiens
ggccatggattgggatggggatgtctctagaaaccaaatcatgatgagagcagacacctgactcctgctgcccctcccgaggagccatccttgcaatcagkgttcccattgcacatgaagtaagagctcatgtgttttgttttgttttttttttgagtgctttccatgtctaagaaatagttaatgatattgattctactt

SEQ ID NO: 144114 - DNA, 201 bp, Homo sapiens
catttgcatccctgatggaaattctgactttcctcatgtgaaggcctcactgattttcccagggcatacttatgatcctgaacatagtttgggatctccamgttgcctacacaactaagtacaaattttcacttagcttttcaggaccttccaaaagcctttccagacttgcctttccctcttaggtttgtgaatcctgtg

SEQ ID NO: 144115 - DNA, 201 bp, Homo sapiens
ctttgcctggaaagcaatttctcactctgtccttccacttggtggattattcctccccatcgttcatggctcagcttacatgtcacttcttcagggaggcrggccctattagatagccctcttatcatagctcctgtatattcctttcttgaacttgccactttacaagatatattcctgtgtgactgcctgcctgtctct

SEQ ID NO: 144116 - DNA, 201 bp, Homo sapiens
aggcctcgcgcggtatatgctcctttgtgtctggcttcttccacctgtgagtttcatcccgtgttgggtgaacagcatcatttcatgtagaattcccccartcatcttttgatgtagctcctgcactactgtcccagtgagtccaaccaaatctgctctttccttctttctaatacatttttttccacattgatgccacag

SEQ ID NO: 144117 - DNA, 201 bp, Homo sapiens
aatgggatgtgatgctattccatgaagaatgctgttgtctctccatggcacttcgtgtagcattcattcattcattcattcattcatgcatgaaactgacrtccactgagagacaagcatatgtcaaagaccaatgttaatgtttttttcttaggccgaacaactgggatgtccatcaggattcaaactgtaatggcattt

SEQ ID NO: 144118 - DNA, 201 bp, Homo sapiens
attgcttttggtgttttagtaatgaagtctttgcacatgcctatgtcttgaatggtcttgcctaggttttcttctagggtttttatggttttaggtcttaygtttaatccatcttgagttaatttttgtataaggtgtaaggaaggggttcattttcagttttctacatatggctagccagttttcccaacactatttatt

SEQ ID NO: 144119 - DNA, 201 bp, Homo sapiens
caaatgcttgtttaccataatgaaaatcctagggcccttaggaatttttctaaatctactctgcttgtactctagaaatggaacaataaaacttggataayggcaaatttgtttgtgtatggtttactgtatattttgagctcactgtggagacctactgctcagaaaaaagatttatttcaaaatattactgctcattga

SEQ ID NO: 144120 - DNA, 201 bp, Homo sapiens
cataaatacgataatataaaacatggccttttgctacaggcctctttgacttagcataatgttttcaaggttcattcatgttgtggcatgtatcaaccctrtttcttcttacagctgaataatattccattgtatggacatacttggttttgttatttattcattgttgatggacatttgagttgttttcacttcttggta

SEQ ID NO: 144121 - DNA, 201 bp, Homo sapiens
aatttttaatagtttgctattaccagtgttaaaatctagactgttgttaggagaattagaccaaggccttcagactaaactgaatattaaaagtacctcaracattcaaatgcaacctgactttggactctggatctcagatagtgtctgtatttccgaagtgctgtcaatgttgtagtgtagcaggacaagccgcaaaca

SEQ ID NO: 144122 - DNA, 201 bp, Homo sapiens
aaataatatttattcccacaaagcggcccaaagccttgaatacacgaatgcatggtgtggctttcttaaggtaggaattcattctcagttttcccaaactwttttaaacttaaaaaaaaaaagcacaccgtttaacatctatctcccagcgcagagtgaaaaatcatggactttgtgccaagtgggtctgaattggatctg

SEQ ID NO: 144123 - DNA, 201 bp, Homo sapiens
gacttaggctgaaaccattgaatgtttaggaaatgcacaatctaaataatatttattcccacaaagcggcccaaagccttgaatacacgaatgcatggtgkggctttcttaaggtaggaattcattctcagttttcccaaacttttttaaacttaaaaaaaaaaagcacaccgtttaacatctatctcccagcgcagagtg

SEQ ID NO: 144124 - DNA, 201 bp, Homo sapiens
atgataaactacctcccacagtggtttattgtgggaagtcggtgagctaatatgtaaaaaatgcttagcacaataactgatacagtttttaaagtgttaasagaaatgactgctaaatgatcattattgataacattattattcagtgatagctgttcagaggaccctgtgtgcattatatcattttgtgtagcttttaat

SEQ ID NO: 144125 - DNA, 201 bp, Homo sapiens
gtatatatttaataaagatctgttatccaaaatagacacataaaaaaactcttaaaactcaacgacaaacaacccagtttaaaaaaaaatgaacctaaaaytaacgatcttaaatgacacctcacttaaaaagacatacagataacaaataaacttatgaaaagaagctcaacattatatgttgttagaggactgcaaatt

SEQ ID NO: 144126 - DNA, 201 bp, Homo sapiens
acaatatacccaggtaacagaagtgcacctgtatcccctgaatcaaaagtaaaagttgaaattaaaataataataatgattccttgcctcactacaaaaargaaagaagatgatatagtcatttctaaaaaaaattaaacatagtattacaatacagcccagcactttcagttagatataccatacgtccaaaacacttga

SEQ ID NO: 144127 - DNA, 201 bp, Homo sapiens
ggcaagaaggagaagacaggctggggagtgagtggccaggaacccatcttgagaggtggcaggagacaggatccagagtcgaccccgtttccagtcccctygctcacacatgctcagttggccgactggacttcactcacataacacaaattcaaaaataagattgttaagaagttcaaggtggggcagcagagcattaaa

SEQ ID NO: 144128 - DNA, 201 bp, Homo sapiens
actatttgcaaagtatatatttaataaagatctgttatccaaaatagacacataaaaaaactcttaaaactcaacgacaaacaacccagtttaaaaaaaaatgaacctaaaactaacgatcttaaatgacacctcacttaaaaagacatacagataacaaataaacttatgaaaagaagctcaacattatatgttgttaga

SEQ ID NO: 144129 - DNA, 201 bp, Homo sapiens
cattgaagggttttaaactgagaaaggggcagatttgaattctagaacatttactctgatttcagtgggcaggatgaatttatttggtttagggggagagmggggatcaggcagcaagaccagctaggaaaattctagttgtaattccagtaaaagtgtgctaagctagaaaagtacagtggggaagaaacaagatgaaca

SEQ ID NO: 144130 - DNA, 201 bp, Homo sapiens
caccatgcccaaccccaatcttcctcttgcctgtgcccagattcccaaaaggaccaaaggttaacattggaacacaggcctcccccattgacaccatttarttgccactttgttggagggtgcagcagtcgcagggcaagaaggagaagacaggctggggagtgagtggccaggaacccatcttgagaggtggcaggagac

SEQ ID NO: 144131 - DNA, 201 bp, Homo sapiens
catctaagcttctaccttaagaaactagaaaatgaagagcaaagtaaatccaaagtaaacacaagataaataataaaaatctgagcagaaaacaaggaaaytgaccataggaaatcaatagaaatttaatatagaaatagaaaattaatagaaaattaaaccaaaagctagattttttgaaaatatcagtaaaattgataa

SEQ ID NO: 144132 - DNA, 201 bp, Homo sapiens
aggcccagcctctcgaatgggcacacctgtgtaggtatgcaaataaatatttttgtattttctatgtagacataacaatgggatccagtactttgcttgcrtaataaatcacatattttattaaatcaagaattgtaagattccaggtaaggcaccagtaacctcactgacacagagaaatgtggagtctaagagtagaca

SEQ ID NO: 144133 - DNA, 201 bp, Homo sapiens
actatgtgccaagccctgtgatcggatgacaatggggaaaaggatggaaagatccctggtgcccatagagcttaaaaccccatggggcaatgcggacgaasaagtagcagttctagagccattagtgctgtaatgtgcacacgctcccccgcaaactggaggaaaggctgcctgaagggagagacactgtgttcaaagcag

SEQ ID NO: 144134 - DNA, 201 bp, Homo sapiens
cagatgccagcactgccggctggggcaggtgacagctgccaccatgcccaaccccaatcttcctcttgcctgtgcccagattcccaaaaggaccaaaggtyaacattggaacacaggcctcccccattgacaccatttaattgccactttgttggagggtgcagcagtcgcagggcaagaaggagaagacaggctggggag

SEQ ID NO: 144135 - DNA, 201 bp, Homo sapiens
tttataaattaggcacagtacccttgtgccttggggctgttatcaagtaaaataagggttacttgaacataagcactgtgagatggtgacaatcaatccgrtaactgagaaggctactgagtgactgacaagtagatagtgtatacagcatgggtatgctgaacaaaggaacaattcacatcccaagtgagatggagtggg

SEQ ID NO: 144136 - DNA, 201 bp, Homo sapiens
caccatcaacccaacagccaaagccagtcatgtgaccacaatcaagatattggggaaggaggcatgactgcccagagtgggagaaggaagagagtgcataygctttattgtttttatctaattatatatgttaaatatatgattgagaaaatgtgaaaataaagaaattatttggaaattattaaaattcctccttaatac

SEQ ID NO: 144137 - DNA, 201 bp, Homo sapiens
ccagatgccagcactgccggctggggcaggtgacagctgccaccatgcccaaccccaatcttcctcttgcctgtgcccagattcccaaaaggaccaaaggktaacattggaacacaggcctcccccattgacaccatttaattgccactttgttggagggtgcagcagtcgcagggcaagaaggagaagacaggctgggga

SEQ ID NO: 144138 - DNA, 201 bp, Homo sapiens
accaagtcataggggtgtgcccacccactcttttgtgagttttacctccaagagttcaactgatttctcatagtagttattagagacacacacacacacamaaaaacctctcatgtttctgatggtaggagtgagggagcaggggagaaatgaaaaagagtagaaaacaaaaataaaaacaaagaacaacggtaacaaata

SEQ ID NO: 144139 - DNA, 201 bp, Homo sapiens
ctgtttaatttgtctacattactcttgaggcccattcttgatattactctgttttgttctaccgaaatgcagtggggggaggcattaggaagctctcagaraaagtgatttttttgtgttccctgagccaatgttgggaagagtaacagccattctgtttgagttttactcattttgaattacggtgctagaaatcaaaac

SEQ ID NO: 144140 - DNA, 201 bp, Homo sapiens
ccaggaggtggaggttgcaatgagccaaaatcatgccactgcactccagcctgggcaacagagaaagactccatttaaattaaaaaaaaaaaaaaaaaaaaggtggggggggaatataattctgttattcacaagataattacaagatttatagaaataattaaattctagtacactataaaggatgtgacctagaaacaa

SEQ ID NO: 144141 - DNA, 201 bp, Homo sapiens
ttttatttcattttaaatcaacctgtttaatttgtctacattactcttgaggcccattcttgatattactctgttttgttctaccgaaatgcagtgggggraggcattaggaagctctcagaaaaagtgatttttttgtgttccctgagccaatgttgggaagagtaacagccattctgtttgagttttactcattttgaa

SEQ ID NO: 144142 - DNA, 201 bp, Homo sapiens
ttccgttaaaggtgctaaaatataaagcacttttctttggcagtctccctcaatatgtcatggtattttcttatttgctatttaatgtcattctaaaaaaataaatttttaaattattgacacaaatgttatgttcatcgtcacattatgcaatgccagttttacatgccactgtaacagcactgaactcctatgcagatg

SEQ ID NO: 144143 - DNA, 201 bp, Homo sapiens
tggtttacctcagagatctctggcaggctacaaagcctttggaagaactccatttttgcctctctccaaataggttctgccttgagtcaacatgggaggcmatcttttatttcattttaaatcaacctgtttaatttgtctacattactcttgaggcccattcttgatattactctgttttgttctaccgaaatgcagtgg

SEQ ID NO: 144144 - DNA, 201 bp, Homo sapiens
cagaacctgcattcaaacacaacccacaggtcatctctatgcccattaaaattttgtaaatggtttgtgaagctgagatgggaggatcgctcaagtccagraggtcaagaccagcctgggcaacattgcaagaccccatctctaaaaacaaaacatctttttttattagccaggcatggtggtgcatgcttgtagtcccag

SEQ ID NO: 144145 - DNA, 201 bp, Homo sapiens
gctgtgctccacggaaggcatcaggggacagacaagcccgccatccattcccaaagagtgatgagactgtctgggagggttttttaataaaaaaaaaaaaagaagagggccacaaggcaaaattgcaaacaatgacagagaaggcaaagaaaggggagggaaaccaacatttattgactctatatcaggtgtcaggcacta

SEQ ID NO: 144146 - DNA, 201 bp, Homo sapiens
tagccaagtggaaaaaatgaaataaagagatttgctaagaagtgaatttggctaatgataagtcaaaccttgatgtgaatttttgcccagaatgatgtaaytttgcaacccagattaatcaaagtaaatgaacactctacagatttctctagtagaatcgttgtaaccaactgaacttgagattttaggccacctcaatgc

SEQ ID NO: 144147 - DNA, 201 bp, Homo sapiens
accctgaaggcagcagtggggagtcaagaaggtggagaatgcacagaaaggacaaagcccaccgggccggcttccccgtggaggtcaggatgaggcactcyggggcctgtccagcttgtttttcgtctgagcaagcaagaagctctgggcagagcaggctgctcggctcctgatggcctctgctgtgctccacggaaggca

SEQ ID NO: 144148 - DNA, 201 bp, Homo sapiens
actctttggaatatgtgtgaggatttcttaagaaaaaattattggacccaaatgtttacatttttaattttaataaggcctccaaatgggctataccaatwtatattcccacaattagtatatgagaatatttgttttcccacacccttgccaatactggatattgttcatcttcttaattttttccactataacaacaac

SEQ ID NO: 144149 - DNA, 201 bp, Homo sapiens
agtgtttcatagcatagttatttttttctcctacaggtggacatccaacttatatccagagtatcattattcttcgtaatgctgcaatgagcattttgtaytgactctttggaatatgtgtgaggatttcttaagaaaaaattattggacccaaatgtttacatttttaattttaataaggcctccaaatgggctatacca

SEQ ID NO: 144150 - DNA, 201 bp, Homo sapiens
caaaatcctaataggagtttttgtagaaattggaaaactgattctaaaatttatgtagaaattaaaagaagccagaacagccacaattttgaagaacggtrttggagaatttacactacctggtttcaaaacttactgtaagtactacagtaactgatacagtgtggtattggtgtggggacagacacagacaagtgatac

SEQ ID NO: 144151 - DNA, 201 bp, Homo sapiens
tcctgatgatcactattgatattttggtattttggtatattttctttcaaaattgtctaggtatacatttgtgggctttggatcttcttctattcttttgktatatttctaaatttgaacagttaaatagacagtcaatgaaacaattgcgaaaattttggcagtagtaagcatttgttgtcagttgaaaactttccacct

SEQ ID NO: 144152 - DNA, 201 bp, Homo sapiens
gtacgtgactagaatttaatgtgcagagctgctgtctgctgatggcttggagaaatgaaagtagagtaggatggggaagatcgatttctttgttctgcctraattgtctcactaaagccaaagtctagatttcatgaaattctccctgtttcctctctcttcagagagcagagcaactctccaacacactgaaaaaaattg

SEQ ID NO: 144153 - DNA, 201 bp, Homo sapiens
ttggataagcaaaatcaacaccacccaggagctggttataaatgcagaattccaggccctactccagacctacctaatcagaacctgcattcaaacacaayccacaggtcatctctatgcccattaaaattttgtaaatggtttgtgaagctgagatgggaggatcgctcaagtccaggaggtcaagaccagcctgggcaa

SEQ ID NO: 144154 - DNA, 201 bp, Homo sapiens
tcacatgggactttttttttttactttccagagtgatcactagctctgtcatttattatctctgggactgcaggcaattctctgaatatttttaaactccmtttccagccctggaaatggggataccatatcttcctaacaaatctctgtgatgattctatgaaataatgtgtcatcctcctaaatgttatgcctggtaca

SEQ ID NO: 144155 - DNA, 201 bp, Homo sapiens
ctgtagtagagcagccggcaagttaaataaaggcttgcctaaacttgggtctctctctctcgtcctttctctcagctgacctaacattacctactaagggygggtgaagacacaaatgcagacgtagataatgttcagccctccagaaggaattctcatgactctcctagtcaatagtccccagagtagccactattctga

SEQ ID NO: 144156 - DNA, 201 bp, Homo sapiens
tgctaagtaaaatagtaactgctataaatttttttgcatactccccccacaaaaaaatgagaaagtaaaagatgattgatttaacgtatttttataagtcrggtagtatctagttctttgcttccagtaaaatggaaggggaacttaatgaaattgtcagtttatagaccatttaaaataatgttcaatgatagttcactc

SEQ ID NO: 144157 - DNA, 201 bp, Homo sapiens
ttttccttcttgtccaatactgcatagtgtttcatagcatagttatttttttctcctacaggtggacatccaacttatatccagagtatcattattcttcrtaatgctgcaatgagcattttgtactgactctttggaatatgtgtgaggatttcttaagaaaaaattattggacccaaatgtttacatttttaattttaa

SEQ ID NO: 144158 - DNA, 201 bp, Homo sapiens
cttttctttcctttttttttttctttttgtgacagggtctcactctgtcactcaggctggagcacagtggcgtggtcatagctcaccataacctcaaacamctgggctcaagtgatcctcccaccttagcctcccaagtcctgggaccacatgcatgtaccaccacacctgactatttttattttttattttattcattta

SEQ ID NO: 144159 - DNA, 201 bp, Homo sapiens
tttgtgccacccctccccttcccccaagcctttttacatttcgaagcccttatctaggtgccgtggtgaagtcagcagactttacctatcaggccttgcarcaataaagcaaaccccaattacaaaccatccagatggcacaggggaaggtcgcacaaaaaaaagtcataaaaaacgtaaacaaactttacttacatcctt

SEQ ID NO: 144160 - DNA, 201 bp, Homo sapiens
gtggttttgaaaaccatttgttttttctttcttttctttcctttttttttttctttttgtgacagggtctcactctgtcactcaggctggagcacagtggygtggtcatagctcaccataacctcaaacaactgggctcaagtgatcctcccaccttagcctcccaagtcctgggaccacatgcatgtaccaccacacctg

SEQ ID NO: 144161 - DNA, 201 bp, Homo sapiens
ccattaatgaattcctggtgtaaacaaatgcaccaccaagtgatctttgatcatcatcaaccttgaatatagataaagttattaaaaatataataatgtctaacactcacatgggactttttttttttactttccagagtgatcactagctctgtcatttattatctctgggactgcaggcaattctctgaatatttttaa

SEQ ID NO: 144162 - DNA, 201 bp, Homo sapiens
aatcactcctacgtagcacgtatgaatgctcaggtggaattacctacctgttagggacaaactgccccaaaaaagcttcttggtactgccaacaccccccmccaaacctctttgtgccacccctccccttcccccaagcctttttacatttcgaagcccttatctaggtgccgtggtgaagtcagcagactttacctatca

SEQ ID NO: 144163 - DNA, 201 bp, Homo sapiens
tcacaaaacctggtgtgtgactgaccagatatgtcataccttgcacacagggatgggaacggtacatacctgagcttcatggggctgctgaagactgaatsagaaacacagggcttcataaatgtccagcatcagggtaccactgacacagtgtcgctaattccacctaccaactgtattattatttactcagtggttttg

SEQ ID NO: 144164 - DNA, 201 bp, Homo sapiens
gttcccaagcaggcctaggttggaggtgtcatttcgactcctttttacagtggaggaaactgagggttagagaagttatgtgacttcctgaaagtcacttyccgaggaaagaacagaactgggttcacaccccggttgttctactcagagattggttgagctctaacgtggtgtcaatgtttcagaaactcccctggggtg

SEQ ID NO: 144165 - DNA, 201 bp, Homo sapiens
aatttcatgtccttgtcttcctaccctgacccccttctcaattcctaactctgtaaaatttcgactgcctctggctgcaagggaattggaggatttcatgygggaaccgccaccttctaccccagctagcattcagtgctgctgggcagcctgtgacgattccctggacagcccccttcactttcctctgacggctgttct

SEQ ID NO: 144166 - DNA, 201 bp, Homo sapiens
aaaaacttttcatgtgttcaaatagcgtgtgactattgtatcataatatcataatattttctgtttgatattgcaaggaagaaatgggtctctgtgtagawatgcaagtgacacaggttttgtgatttccttaaataataatgtcatgtatacattacacccacagctacacatagtcgcaaaaagttcaactttaaattg

SEQ ID NO: 144167 - DNA, 201 bp, Homo sapiens
gtattaaatacatcagcctgtctccttgagcaggaagtaagagatgcaactacctgaggaacgtgtatatttcaagcttcctctgtcactgactaagtgcsaattaaatttcccctaattccacctgagaagctgcaggctccactggtacctagaagagttagttaactttaattaaaaaaaaaacttttcatgtgttca

SEQ ID NO: 144168 - DNA, 201 bp, Homo sapiens
ggaggctgcaaatgttgacacaattccctccgcacactctggatgagaggataatattgaatccagttaggccacagaatattaattttcaggagctgccygtgaaaaaaaattctttgccttctttcttgaattgtagtttttctggatataacacaataggtttctattttaattgtaatttcctttttattcatgtta

SEQ ID NO: 144169 - DNA, 201 bp, Homo sapiens
gtgatagctgttcagaggaccctgtgtgcattatatcattttgtgtagcttttaattagattgcggagaggaggctgcaaatgttgacacaattccctccscacactctggatgagaggataatattgaatccagttaggccacagaatattaattttcaggagctgcccgtgaaaaaaaattctttgccttctttcttga

SEQ ID NO: 144170 - DNA, 201 bp, Homo sapiens
cccctaagaacctgagtcatgcagggaggagctacttcagggggcagctcaatcccagccagtgacacagctgggtcccctctgtgtgtctcagaccgccrttgctctctccattcctgtagcaagcctgactctggtctctgtctggctgtgttgctttctggtatctatttatgcttctctctaaatcacaaattctta

SEQ ID NO: 144171 - DNA, 201 bp, Homo sapiens
ttccttattatttcacaccactcagttctcaataattcatggactaattgtgcagcaattacatttccttcctacaggcagagccacaagatgttaaaaamaaaaaacaaaaaaaggatacctgagaactcaggggttcccctaagaacctgagtcatgcagggaggagctacttcagggggcagctcaatcccagccagt

SEQ ID NO: 144172 - DNA, 201 bp, Homo sapiens
agagctacatttcagatgattgactaatgcaagtctcatttctttcaacttcaacaaatgaggtcatagccaacattcaggtattccctgtagaaaaaaaagaaagaaagaatgaacgaaaaggaaaacccagcattaaactgtgtttttagaataaattggttatctttaacctggacggttaggtggcattcacataaa

SEQ ID NO: 144173 - DNA, 201 bp, Homo sapiens
taaactggatcacattgctggatcatatataaactggatcatattgctggatcacatagtaactctatgttaaacagtctgaggagctggtaggctggttrcaaactggctgcacgagtttacattgccatcagcattgtacaagcttttgatttctccacatcctcaccaacacatattattctctcttttattatagca

SEQ ID NO: 144174 - DNA, 201 bp, Homo sapiens
gcaggtataacctcaagttagatgttctcttttttggcaaagttgcgtcgtccgaaggtgaacgaccgactaaaaatcctatttcctagattattccctcttcttaatatactagcaaaatataaaacaacccaaaacaagattgctggttcaaggtaccatcttagcttcttctgacttcgaacaggaaatgtcagagcc

SEQ ID NO: 144175 - DNA, 201 bp, Homo sapiens
ttattgctgcatcaaaaattacaataataaccatttgttgtattatgattttatgggtgaaaaatttgttcgaacactggctggtgattcttcttctccaygtaggagtgaccgaggttaggaggtggtattcggatggtggattgatggatctgggactgacaaaaacagcttcactcacatatttggcaccttaggggt

SEQ ID NO: 144176 - DNA, 201 bp, Homo sapiens
atttttaactaaaaatttcacatctgcaaatttcacatctgtaatttcacatctgcaaatttgccttttaaaatgatcaattatctgctcaagaatatatrtacaggaatattcatcacagaggtatttatttataagagcaaaaatgaggaaagaaactaaaaatcaaaaaataggggatgtaaaaatatactatatttg

SEQ ID NO: 144177 - DNA, 201 bp, Homo sapiens
actcacctccccagcctcagcccagctgctgccaggaaccctgaaggcagcagtggggagtcaagaaggtggagaatgcacagaaaggacaaagcccaccrggccggcttccccgtggaggtcaggatgaggcactccggggcctgtccagcttgtttttcgtctgagcaagcaagaagctctgggcagagcaggctgctc

SEQ ID NO: 144178 - DNA, 201 bp, Homo sapiens
ggcaggtataacctcaagttagatgttctcttttttggcaaagttgcgtcgtccgaaggtgaacgaccgactaaaaatcctatttcctagattattccctcttcttaatatactagcaaaatataaaacaacccaaaacaagattgctggttcaaggtaccatcttagcttcttctgacttcgaacaggaaatgtcagagc

SEQ ID NO: 144179 - DNA, 201 bp, Homo sapiens
ggaggttccaaactacttgagtgcataaataatgtgaataaattgtgctgcctaggttcacagcccaggggaatcattttgctgggagactcagctggggstcattttcacatctctcctgaatggatcacagcgtcgcagatgtctttggtaagtaattttggcagtaatcattccagatgtgctggcctttgtttttgt

SEQ ID NO: 144180 - DNA, 201 bp, Homo sapiens
ctcaccaccccacacattactgaaaatatgctcctggtgatgccaacacttgatggtaacatcactgttttatatttaggcaatgcttctctccccacttycacaatcacctcattcattcattcattcattcactcattcaacaggtattttctgaacaacaagtccaattctaaccaacggttatacttggctctgagt

SEQ ID NO: 144181 - DNA, 201 bp, Homo sapiens
attgcacattggggttcatggatatacctagctttgtggtaactgctttctgagggttttcggtcttgctattcaggtactcttatttatttatttatttrtttctggagacagagtcttgctctgtcacccaggctgaggtgcagtggcgcaatctcggctcactgcaacctctgcctcctgggttcaagcgattctcct

SEQ ID NO: 144182 - DNA, 201 bp, Homo sapiens
aagcaatttccagaaccaaaatttgggtatatttcggatttcagataaagctttgattcacttattcatccatcattcactcaagatgttttatgctgagstgggaaacacacctgcatctctacatcttagctagcagctccaatggcctggaaatctcattcagctccgaaatgctatgcccctcactctcaaacatgc

SEQ ID NO: 144183 - DNA, 201 bp, Homo sapiens
atctgcattctcctccaggttcctagagacacgtgctagtgccttggcctctgcagaccccacagggtgtgcccggagctggggcctccacccttgccctycactccacggagagctgaggacaaggacagcctctttgtctccacatcttacatggagctgggccaccagtcaggattatttctcctcctagaaagctgg

SEQ ID NO: 144184 - DNA, 201 bp, Homo sapiens
  misc_feature (1)...(201): n = A,T,C or G
ggttcggggtagtttttctaaatgcacagagctccttcttctgttgttttggggtagtgttaaaaaaaaattgtggcagcttgctttctgagatttttctntttccctatttactttcatctggactttctctatccccaaaagttactcctcagtgtgggccttgccctggaagggagctccagtgggtcccttgtgggt

SEQ ID NO: 144185 - DNA, 201 bp, Homo sapiens
cttcttggagctcttttccttcttgtccaatactgcatagtgtttcatagcatagttatttttttctcctacaggtggacatccaacttatatccagagtmtcattattcttcgtaatgctgcaatgagcattttgtactgactctttggaatatgtgtgaggatttcttaagaaaaaattattggacccaaatgtttaca

SEQ ID NO: 144186 - DNA, 201 bp, Homo sapiens
atatatattttctaattttaggaatgttttagtgtttgttcggtttccttgattttgtttttttcttctgggatttctattatccacattttgaatcttcwttgcctgtctttgctattttgcctatctcttgaatttattttaatctctttatttatttttatcttaaaatttttcctcctctctaccttctatttcact

SEQ ID NO: 144187 - DNA, 201 bp, Homo sapiens
gtgattccatccaggccctttctgtgtattttcatttgtacatgaagaaatgaacactttgttgggattttcccataaaggctatcatattgtgtttaacmtactgtaaatcagtgcttcaccttagccatacttcttggagctcttttccttcttgtccaatactgcatagtgtttcatagcatagttatttttttctcc

SEQ ID NO: 144188 - DNA, 201 bp, Homo sapiens
ctgagcatcttaaatatagtattcaaaagcctattgataatctaatttaccttgtccttacaagttatttgctgtttatactttgaagttcagaagatttyttttctataaaacttagtcatctaactagaagataatttggtgccagctgttgtgtattgatgttctcaggcatgcagtgtgctctctcaatgtgatttc

SEQ ID NO: 144189 - DNA, 201 bp, Homo sapiens
cttaatttatctgcttcaatgaagaagaaaaagtttctgtaaatattttcctctcttcaggacactcatagtccaggcttgcaccaacagtcacctactgyatgctttccagtcccatggcctctaggatatggaaagcatgagagacagctgtgccccagcccacaccacctaccctatccgctagtcactctgactttt

SEQ ID NO: 144190 - DNA, 201 bp, Homo sapiens
cattcactgtgctatatggatttcctgatggatggatgcatcaatatgctattaacatgtcagtttctcattaaatctgagtacagaacccgtgtttgccyggcgggatgaactcccctaatctgatttggcagaggctctagcataaatattcgtacaagctaaggctcttttaatctgggcctttgcttagggtaaagg

SEQ ID NO: 144191 - DNA, 201 bp, Homo sapiens
gatgatggctgtcttagggaaaagcacttgtgtaggcgagatgagagctgagttaacttttcatggaacaccatttttattgaaaaattacttgataacaratcatggtttttcagacttggatatatggcagatactttatctaaaatgaatgaaatgagcttgtagtttcaaggaaaataattgtttgaaaatcatatt

SEQ ID NO: 144192 - DNA, 201 bp, Homo sapiens
cagtcactcccagtactcacatgggcaggggctgtgatgggccctgaagcttaagattccctaacttcaagatattatgttggtgcaaaagtaattgcagwttttgtaattaacggcaaaaactgcaattattttcacacctacctaaataaattgtctaaattgcctctaaagagttgcttaatttatctgcttcaatga

SEQ ID NO: 144193 - DNA, 201 bp, Homo sapiens
ggcagagcagaaattactcagtatttacccgaccactcacaccttgaggcatttaatgctggtgtcctagtttcctatgaataatggatttgcagctcccrgggaaagaaaagggaagaaaagaggaaagccaaactaacacagcaacaggcttaagtttgtggggtgttaagcttacaagatttgagggttcctcatgaa

SEQ ID NO: 144194 - DNA, 201 bp, Homo sapiens
ctcatttatgtgctcaagttaagttggactagatgatctctgacgttctctcccacgctcattgggcatggttattgggcaacatgatcctactttatgaygctacttggtttagaagtactgagggaaattgttcaagagagatgctcctgcttctgctacccactatgtcttcccctactccttaactagcctgtacct

SEQ ID NO: 144195 - DNA, 201 bp, Homo sapiens
tactttattgttttccttagaactctttcatcaatctaccaacagcccttaccaacgagcttgactggccccaactctctggtgctacaggatttctggaytccactgttgggtaagtgtctttgtgcaccctcagacatttcaatacctctgtgtaaggaaagaacaagagatgggggttgctaccaagatgttgaaatg

SEQ ID NO: 144196 - DNA, 201 bp, Homo sapiens
tgaataaattgtgctgcctaggttcacagcccaggggaatcattttgctgggagactcagctggggctcattttcacatctctcctgaatggatcacagcrtcgcagatgtctttggtaagtaattttggcagtaatcattccagatgtgctggcctttgtttttgtttcctcttgctctctctaaatgggatgccaactc

SEQ ID NO: 144197 - DNA, 201 bp, Homo sapiens
ctgggtgacagagcgatactccaccaaaaaaaaaaaaagaactctaagggaactgaagatggcattggaatgctatgtctggatttatgctctattgttcyatcttttctccaagcatttcacatgatcttgccagagattcaaagctgtatttttgttaacacccatatttggaatcttgtataatttgtctacttaaac

SEQ ID NO: 144198 - DNA, 201 bp, Homo sapiens
aataatattttacagtgtgttatgatttcaaagacacactcagtctcacttttatctcatttaaccatcacagcagccctatgggaaacatattacctgcytctcaaggaggaaaccaggttcagaaaggccacatggtgagttcaagattactaagtcaggagttaatcctagatctttcgacttcaaatgccaggcaat

SEQ ID NO: 144199 - DNA, 201 bp, Homo sapiens
ctgaaattaacaattcaactggaaggggaggtgagcccactggagacaggcggagatggctgaatgaacaggactccagatcagagctgagcccaacctgrgtgttcatgatttcaaaccccattatggcctttcctgcagggtccttttgatcatcataactcttcactgggcaaagtgacgatagcggtaagactcacc

SEQ ID NO: 144200 - DNA, 201 bp, Homo sapiens
gctaaaggattcagaacacatctcactgcacacctgaaattaacaattcaactggaaggggaggtgagcccactggagacaggcggagatggctgaatgarcaggactccagatcagagctgagcccaacctgggtgttcatgatttcaaaccccattatggcctttcctgcagggtccttttgatcatcataactcttca

SEQ ID NO: 144201 - DNA, 201 bp, Homo sapiens
ctccatttttgctgctaaaggattcagaacacatctcactgcacacctgaaattaacaattcaactggaaggggaggtgagcccactggagacaggcggaratggctgaatgaacaggactccagatcagagctgagcccaacctgggtgttcatgatttcaaaccccattatggcctttcctgcagggtccttttgatca

SEQ ID NO: 144202 - DNA, 201 bp, Homo sapiens
tcatggatttggcagagcatcgagcatctaagagcacctgagttatggaatcatttcattctcaaatagatagagtatttttgtcatcagccccattttayagatgagaggactgagtctcgggtaggttaagttatgtgctcaccccacatagctagtaggtgagaaaccccacgtttaaatccagagctagctatctcc

SEQ ID NO: 144203 - DNA, 201 bp, Homo sapiens
cacatcaaaaggattccttggcccagtctgcagtctacctgaggtatgtggccagatgtgatccctctggcagctgtttttattcgggcccatttgcttcytttcctgtgctaccaggagtgtctgtttctattgtactcattattttcagataccaggtgagaagagattttccatatgtgagatttcagatggtgacca

SEQ ID NO: 144204 - DNA, 201 bp, Homo sapiens
acttggcaaggtacttatccactcagcctccatgtgctcatctgtaaaatgagagtaataattcgtagatctatgagttgttgtgaagtttgaatgagatrataatatatgcaaaaaacattttgaaaaccgtaaggtacactctagcaatgtgatgaattattcatgcttctactcagggtcaaaaaggaagtatagtca

SEQ ID NO: 144205 - DNA, 201 bp, Homo sapiens
ctcttcttcagcagcatctttgcaaaatgtctttctctcaatgaagagcatatctggacgactgtgcaatgctgtgtgctcccgggatcagtaacccttcygctgttcctgaaataacctttcataaagtgctttgggtgccattccaaacaagagagtatctgtgccctttacagctaattgttctaaaaggagtttcta

SEQ ID NO: 144206 - DNA, 201 bp, Homo sapiens
gcatttgttgtcagttgaaaactttccaccttagcaagtaggtttgtgtataaagacagaataatattgggcagagtgtaaaattatttctctctctctctttctctccctctctccctatctatttacctatatatccattccatccatcatctgtctatcctctttgaaaccattcatccatcaatctatccatccact

SEQ ID NO: 144207 - DNA, 201 bp, Homo sapiens
gtcctctgcttagggtctcacaaaccaaaatcaaggcatggcatccaggccatgttctcatccggggactcatctggggaagaactgctttcaaactcackcaggctgttggcagattcattcccgttgagactgcaggactgaggagccagcttcaggctggatggcaaccgggtcaccctcagctccagcccagaaagg

SEQ ID NO: 144208 - DNA, 201 bp, Homo sapiens
agcatttgttgtcagttgaaaactttccaccttagcaagtaggtttgtgtataaagacagaataatattgggcagagtgtaaaattatttctctctctctctttctctccctctctccctatctatttacctatatatccattccatccatcatctgtctatcctctttgaaaccattcatccatcaatctatccatccac

SEQ ID NO: 144209 - DNA, 201 bp, Homo sapiens
ctctcccacagctctgagcctttgcacacgccgtgtcctctaccattgcagtttccccacatcatccatctagggaactcctagaaaattcatctcagccrccaccttcttcagagagatcccaccccttcccccaccagacagaagtgacacctcttccctttccagtccctgtgggcttggtggtgtcatttggcatgt

SEQ ID NO: 144210 - DNA, 201 bp, Homo sapiens
ccttattttgttgcagccatttttttttttctgtttcataagcctagccgggcagagcagaaattactcagtatttacccgaccactcacaccttgaggcrtttaatgctggtgtcctagtttcctatgaataatggatttgcagctcccggggaaagaaaagggaagaaaagaggaaagccaaactaacacagcaacagg

SEQ ID NO: 144211 - DNA, 201 bp, Homo sapiens
aacgcctagcagacagcctgaaacacaaaatggtattctagaaattttcatatttcatgttgttccaaaatgtattaaggtagaaggcagctattaagaarcatatttaataagttatgtttgataaagtagaatttgcttttttctaattataaaagaatgcatggttttcacagagatttggatatagaagagtacttt

SEQ ID NO: 144212 - DNA, 201 bp, Homo sapiens
agtctcatttcagacccaatattttctcaatgcctgctcataaatattttattccttattagagtgacaaccaactaattgcgttcaaaccagttaccaartgctcatatctgagctctttcattttcgtttccctcttcttgccctcaccctgtctcctcccttattaacatagatagggaaataaatgccttggtacca

SEQ ID NO: 144213 - DNA, 201 bp, Homo sapiens
atgcctcctcttctggagcttacagtcaagtgggaaaaacaatcaagtgaacagattatcttattgtagacacttatccagccttctgtatcagttctccrtgcagaattgggcccagaaatagtggcctctccctccgggagtaaggagaagcctctaatgaatggaaaacatgtcatacattagccctgggctgaggtt

SEQ ID NO: 144214 - DNA, 201 bp, Homo sapiens
tacctggtttcaaaacttactgtaagtactacagtaactgatacagtgtggtattggtgtggggacagacacagacaagtgatacaaaataggaagcccaraaataaactggtacatttataggcaactgattttcaaccaagtttcccagataattcaatggcaagagggtagtcttttaacaaatggttatggaataat

SEQ ID NO: 144215 - DNA, 201 bp, Homo sapiens
agagcacgtggaggacccagggtggggagtggagaaggaagatgtcagtcactgcagctgagacacattcagaaagggagcaaatgacaaaaagtacacayacacaaacacacacacacacacacacgcacacaaaatagagggaacaaatcctcagtgggtagaagtaggaacttgggggaaaatggaagctcagtgttg

SEQ ID NO: 144216 - DNA, 201 bp, Homo sapiens
tgctctttagtgatcctagattgaatctgaattaaaaactgtggatgtcaatgccattcagacaactctgattagccttcctcgtggataacatcaaagcrggctgaacccctcctgtgtgtgctcttcaatttcagacactgcggggctatcactggcgggggagagactgtaatgacagcgacgagtcagtgtacccag

SEQ ID NO: 144217 - DNA, 201 bp, Homo sapiens
ccacttccaagacggtggtgggccgcttccaagatggcagaagccacttccaagatggtggcaagcctcatgttctctgacctggggttcttggcctcacrgattccaaggaatggaatcttgggccatgcagtgagtgttatagctctattagaaaccatgggtcacagaagagaaccgtggaacccagtgactagtgtt

SEQ ID NO: 144218 - DNA, 201 bp, Homo sapiens
cacagacacagacacacacacacacacacacagagacacagacacacacggatacacacacacacagacacatacacacacacagacacacacacacacaagacacagacacacacagatacacacaagcagacacacacaaacacacacacagagacacagacacacacagatacacacacagacacagaaacacacaaa

SEQ ID NO: 144219 - DNA, 201 bp, Homo sapiens
ttgatcttcagaggagcttatggcaaacactgggacagcccgctggctccccacaacacacacaggcacacagacacacacaaacacacacacacagacayggacacaggtacacacaagcagacacatacacacacagacacagacacacacacacacacacacagagacacagacacacacggatacacacacacacag

SEQ ID NO: 144220 - DNA, 201 bp, Homo sapiens
gagaccagcctggccaacatggtgaaaccccgtctctactaaaaatacaacaattagctgggcatggtggcgtgtgcctgtaatctcagctacatgagagrctgaggcagcagaatcacttgaacccaggagacagaggttgccatgagctgagatcgtgccactgtactccagcctgagcgacggagcaagactctatct

SEQ ID NO: 144221 - DNA, 201 bp, Homo sapiens
agggctgggtgtgatggctcacgcctgtaatccgaacactttgggaggccaaggcaggtggatcacttgagtccaggagtttaagaccactttggccaacrtagtgaaaccccgtctctactagaaatacaaaaattagccgggggtggcggtgcacctctctaatcccagctactctagaacctgaggcattagaatcac

SEQ ID NO: 144222 - DNA, 201 bp, Homo sapiens
gggggtggcggtgcacctctctaatcccagctactctagaacctgaggcattagaatcacttgaacccaggaggcgaaggttgcagtgagctgagatagcrccattgcactacagcctgggtgacagggggagactctgcctccaagaaatcaaacaaacaacaaaagaagtaagattattgggcaagcagctgcctccaa

SEQ ID NO: 144223 - DNA, 201 bp, Homo sapiens
gtggatacagagaatcacaactttccagggcaaaaattgccacaggagccagcattaaagaaagataatctgtactgtaatagacaaattgctggagctakacgtagacaagactgtgttaaaaattccaggggaaccaagtcataggggtgtgcccacccactcttttgtgagttttacctccaagagttcaactgattt

SEQ ID NO: 144224 - DNA, 201 bp, Homo sapiens
tcacagaagagaaccgtggaacccagtgactagtgttcagctcgattaggatgaatccaggcatttagccatgcaggaacaatggtgagtctttagcccartggagagcggcaatgggcgcctcactggatcaggagcacagcggacaccctgccagatctgaagagatggaagttagcggtaggtctgccacggcggcaa

SEQ ID NO: 144225 - DNA, 201 bp, Homo sapiens
tctattagaaaccatgggtcacagaagagaaccgtggaacccagtgactagtgttcagctcgattaggatgaatccaggcatttagccatgcaggaacaayggtgagtctttagcccaatggagagcggcaatgggcgcctcactggatcaggagcacagcggacaccctgccagatctgaagagatggaagttagcggta

SEQ ID NO: 144226 - DNA, 201 bp, Homo sapiens
gttggatcctagagtagaggtcagaaaactatggcccttgggtcagacactgccctccctgcttttgtaaactaagtttcattggaacacagcgatgccckttcacttacatattgtctatgacaacagcagaactgagcagtcacaacagagaccaaacggcctgcaaacctgaaatatttactgtctattcctttacag

SEQ ID NO: 144227 - DNA, 201 bp, Homo sapiens
aaggaatggaatcttgggccatgcagtgagtgttatagctctattagaaaccatgggtcacagaagagaaccgtggaacccagtgactagtgttcagctcrattaggatgaatccaggcatttagccatgcaggaacaatggtgagtctttagcccaatggagagcggcaatgggcgcctcactggatcaggagcacagcg

SEQ ID NO: 144228 - DNA, 201 bp, Homo sapiens
aatcaaaatcctaataggagtttttgtagaaattggaaaactgattctaaaatttatgtagaaattaaaagaagccagaacagccacaattttgaagaacrgtattggagaatttacactacctggtttcaaaacttactgtaagtactacagtaactgatacagtgtggtattggtgtggggacagacacagacaagtga

SEQ ID NO: 144229 - DNA, 201 bp, Homo sapiens
gaggaattgcttcttatggctaagcaaataaagatgttttttgaagtgaaatctactctgaagaagctgtgaacattgctgaaatgatgacaaaggatttrgaatgtttcataaacttagttgataaagcagcagcagggttttagaggactgactccaattttgaaaagttctactgtgggtaaatgctatcaaacagta

SEQ ID NO: 144230 - DNA, 201 bp, Homo sapiens
gagaaaataaagcttgaagaaaaatgagcagagcctcagaaacatgtagtatactatccagtatctcaacatttataaaacgggagttccgggagaggagagagcaaagggaggagcaaaaagtctttgaaaatgtaatgattaacagctttttataaatgaagaaaaggccaggtgcagtgactcacacctgtaatccca

SEQ ID NO: 144231 - DNA, 201 bp, Homo sapiens
atatgcctggcccatctaggaaaatcttgattaccccaaaataaactgattggagtccttaattacatatgcagaatccttttgtcattgccatgtaacaraatataaccgtggaagtgatatccagtcattttcacaggttctgcccttattcagaatagggaattaagtaagatgtgttcatcaggaggcagaaatatt

SEQ ID NO: 144232 - DNA, 201 bp, Homo sapiens
ggaggtcctcatttgtggaatcaggaaaatgaaaagaatgttgacccagaagcagcacttctgagaggtgtatacagctcccatgggcattttgggcacaygccctttgaatccaaatgcttatccacagaattggcggatttctctattcaactggatctccagaatgcgcttcctaccatcatgatcagccttctgcta

SEQ ID NO: 144233 - DNA, 201 bp, Homo sapiens
acgttgggggcatagcttcaccctcggcaccacttcactcccctcatctgcaaaatgagaattacacagggtgatgcgaacagcctgtcacttagaacaactgtgcttggtacatagcaaggacacaaaagggttgtgattatctattcttttggaaatcaagaaagaaatgcatagaaactgtgctccagaagttgtgaa

SEQ ID NO: 144234 - DNA, 201 bp, Homo sapiens
tccctcccagcagtagttacagctaaagtatccatataccattgtataaattatattcacagataatttgtgctaggccaatctccttattaaaggaataraaagttataaagtatataaaaatatcaaagagattagcatatgatggaggtcctcatttgtggaatcaggaaaatgaaaagaatgttgacccagaagcag

SEQ ID NO: 144235 - DNA, 201 bp, Homo sapiens
atatcagacagaaaacagttctgttgggtaaagagcagagattggcaaagttttgctggctctgtctgacaccacacaggatcttaattttctgtttagartggccctctgtggcataaactcaacagagctgtatcagaaaatgtctctctatttgttttcaccaacactgttactttttttgttagctcaccgattgtt

SEQ ID NO: 144236 - DNA, 201 bp, Homo sapiens
atggattcccccattaagcagaaacagaggcagcatgacactgcatctgtgggatcataatttgctatgtccctcccagcagtagttacagctaaagtatmcatataccattgtataaattatattcacagataatttgtgctaggccaatctccttattaaaggaataaaaagttataaagtatataaaaatatcaaaga

SEQ ID NO: 144237 - DNA, 201 bp, Homo sapiens
attacagagtttttgtgagtttaaatatcctctacttggggtatgccctatgtaaatgaagaggatgaagatgaagtaaagttacaaagtcatttacagcrtatgccctatggagaggatatttcctgttatagctgaagtgtgaatcggccttatgtttcctgcctccagaccctattttcctgcctcattgccatatga

SEQ ID NO: 144238 - DNA, 201 bp, Homo sapiens
caagtagtttaaatctttactggagtcactcaaggaatgaaagaggaatccattcaccatgcccagcaaacagataaaaacatgtttcctcatctctttcygcttacagctcgcacacaccagtagttgctctgtatttcctaaatctaaacttccccaaaacttgacccacacttagctccttctcccaaacagactctg

SEQ ID NO: 144239 - DNA, 201 bp, Homo sapiens
cagtttactgtacctttaatgaaagcttaaatttttacatattgactctataaatcccaactaccttttggccccatgaagttgccataaaagaaataccratccgatatttaaaattaatttccaagtagtttaaatctttactggagtcactcaaggaatgaaagaggaatccattcaccatgcccagcaaacagataa

SEQ ID NO: 144240 - DNA, 201 bp, Homo sapiens
cattgtgcacagcctagcaactgtgaattgattaattctaacccatgttttttctcattaggtctaaaatcccaccatgctaactgcccattattttctgyactgtttattttctgcacaccaaataaaaggccttgacccttcaaggaataacccaatttctccagaggaaagatattatttgaccagaatatcctttta

SEQ ID NO: 144241 - DNA, 201 bp, Homo sapiens
taggatgagaacggcagtcctgaacataccttaccttctcccttgtgaggatgtatctggtctcagtggactatatgagagttcaaagcattcggcttctytgagaatgtgaagcagttttcagaaataaacatagggttcatcccagggcgcctgctctggtattcctgggtagggtttgagcatctgcatttgcataac

SEQ ID NO: 144242 - DNA, 201 bp, Homo sapiens
aatgtaaatggatattctagcaggaggctatagacaaacagtgaggaagagagaagtgctgtcacacagggtgcaaggaggaacagaaaccccagcagacragggctgagctggtcctggagggaacaggagtggaggtgactccttcagggtagagtagagttcacccagcacactccacctcgcctgcgtcagcccctt

SEQ ID NO: 144243 - DNA, 201 bp, Homo sapiens
aagaatcttgcacaatatcccaactttctcagtaacaatgaaaccactgagatgttcgcttacttagtcatacctcaacaaacatttcttgaacacttacmatgtaccatccccacagccgggtaccctaataagttatctttttttaactatcccaagtctgtaggacaaatatgattctgtcattttataaataagtct

SEQ ID NO: 144244 - DNA, 201 bp, Homo sapiens
ggcagctttagttttagttttcataaaatatcataaacagcttaattttcaagaatcttgcacaatatcccaactttctcagtaacaatgaaaccactgasatgttcgcttacttagtcatacctcaacaaacatttcttgaacacttacaatgtaccatccccacagccgggtaccctaataagttatctttttttaact

SEQ ID NO: 144245 - DNA, 201 bp, Homo sapiens
cactttcaagtgaaaaaggctctattcccctaaccctgccacaggctctgttactctgccatgtggtcatccttgctcctctttagatttatgatgataaygatggtcatcatcatcgactgtaattctaccatgattctaattcaagcaatcaattagctggctatgccaaagtgttgaagccctgcccttcctgcatgc

SEQ ID NO: 144246 - DNA, 201 bp, Homo sapiens
gacgttgggggcatagcttcaccctcggcaccacttcactcccctcatctgcaaaatgagaattacacagggtgatgcgaacagcctgtcacttagaacaactgtgcttggtacatagcaaggacacaaaagggttgtgattatctattcttttggaaatcaagaaagaaatgcatagaaactgtgctccagaagttgtga

SEQ ID NO: 144247 - DNA, 201 bp, Homo sapiens
tgacgttgggggcatagcttcaccctcggcaccacttcactcccctcatctgcaaaatgagaattacacagggtgatgcgaacagcctgtcacttagaacaactgtgcttggtacatagcaaggacacaaaagggttgtgattatctattcttttggaaatcaagaaagaaatgcatagaaactgtgctccagaagttgtg

SEQ ID NO: 144248 - DNA, 201 bp, Homo sapiens
tgttatgtgtgaatttgatcctgtcattatgatattagctggttattttgctcattagttgatgcagtttcttcctagcctcgatgctctttaaaatttgkcatgtttttgcagtggctggtaccggttgttcctttccatgtttagtgcttccttcaggagctcttttagggcaggcctggtggtgacgaaatctgtcag

SEQ ID NO: 144249 - DNA, 201 bp, Homo sapiens
tgtcttttaattggatcatttagcccatttacatttaaggttaatattgttatgtgtgaatttgatcctgtcattatgatattagctggttattttgctcrttagttgatgcagtttcttcctagcctcgatgctctttaaaatttgtcatgtttttgcagtggctggtaccggttgttcctttccatgtttagtgcttcc

SEQ ID NO: 144250 - DNA, 201 bp, Homo sapiens
gatgggtttcctgaatacagcacactgatgggtcttgactgtttatccaatttgccagtctgtgtcttttaattggatcatttagcccatttacatttaargttaatattgttatgtgtgaatttgatcctgtcattatgatattagctggttattttgctcattagttgatgcagtttcttcctagcctcgatgctcttt

SEQ ID NO: 144251 - DNA, 201 bp, Homo sapiens
tctcatgaaatcttgtcatttaaatgtgtgtagcacatttgcttgttctcctgctctgctttttccatgtgacatgcctgttccccttttgccttctgccrtgattagaagcttcctgagacctccccagaaacagatgctgctatgcttcctttacaccctgcagaaccataagccaattaaaccccttttcttataaat

SEQ ID NO: 144252 - DNA, 201 bp, Homo sapiens
tccaaagaaagcctcatcttgccattaatggtggagggtgtccaggttcttggcatcttgaacaaagaattggatgaaatgcacaaagcaaggaaggaatkaagggatttatagaaaatgaaagtgcactctacagtgtagaagcaggcctgagaataggggctcaaaggccctattacagagtttttgtgagtttaaata

SEQ ID NO: 144253 - DNA, 201 bp, Homo sapiens
atcttcctccatccctttattttgagcctatgtgtttctgcatgtgagatgggtttcctgaatacagcacactgatgggtcttgactgtttatccaatttgccagtctgtgtcttttaattggatcatttagcccatttacatttaaggttaatattgttatgtgtgaatttgatcctgtcattatgatattagctggtta

SEQ ID NO: 144254 - DNA, 201 bp, Homo sapiens
aataaaaagttataaagtatataaaaatatcaaagagattagcatatgatggaggtcctcatttgtggaatcaggaaaatgaaaagaatgttgacccagargcagcacttctgagaggtgtatacagctcccatgggcattttgggcacatgccctttgaatccaaatgcttatccacagaattggcggatttctctattc

SEQ ID NO: 144255 - DNA, 201 bp, Homo sapiens
ctttacttccaactatgtggtcaattttggaataggtgtggtgtggtgctgaaaagaaagtatattctgttgatttggggtggagagttctgtagatgtcwattaggtctgcttggtgcagagctgagttcaattcctggatatccttgttaactttctgtctcgttgatctgtctaatgttgacagtggggtgttaaagt

SEQ ID NO: 144256 - DNA, 201 bp, Homo sapiens
aaatgtgtcatgattcaatagtgttaagatggctgcactctccaaattgatctatagattaaacacaattctaatcaaaatcctaataggagtttttgtakaaattggaaaactgattctaaaatttatgtagaaattaaaagaagccagaacagccacaattttgaagaacggtattggagaatttacactacctggttt

SEQ ID NO: 144257 - DNA, 201 bp, Homo sapiens
gcatccctagggggacagaagaagcaaaagggaggagttggtgttctcaggcttgggaggccacttgctgcggggttgctgggggcaaaacaagaggccaygttggccagtcctggagccatggataaggggtcacccacgggtgctgggaccctcaggagggcccactgtggctagaggtagagtcactgaagggaacat

SEQ ID NO: 144258 - DNA, 201 bp, Homo sapiens
gtaagttgtattcctaggtattttattctctttgaagcaattgtgaatgggagttcactcatgatttggctctctgtctgttattggtgtataagaatgcktgtgatttttgcacattgattttgtatcctgagactttgctgaagttgcctatcagcttaaggagattttgggcagagatgatggggttttctagatata

SEQ ID NO: 144259 - DNA, 201 bp, Homo sapiens
ggaggcaaccagcatccctagggggacagaagaagcaaaagggaggagttggtgttctcaggcttgggaggccacttgctgcggggttgctgggggcaaarcaagaggccatgttggccagtcctggagccatggataaggggtcacccacgggtgctgggaccctcaggagggcccactgtggctagaggtagagtcact

SEQ ID NO: 144260 - DNA, 201 bp, Homo sapiens
gtgcttttaaagccatttaggagagctttagtatatgtatctcataaatttaaaaccaaactgctaatcacatcgtttcttttttaaagggtgtcgatccwaaagatggagttccatatgagaagaaattctgtgaaggtatgaattgtggatgtcattgtggttataatgatagatattcttttctagtttgagtcaaat

SEQ ID NO: 144261 - DNA, 201 bp, Homo sapiens
atagttgtagatatgtggcattatttctgagggctctgttctgctccgttggtctatatctctgttttggtaccagtaccatgctgttttggttactgtarccttgtagtatagtttgaagtcaggcagcgtgatgcctccagctttgttcttttggcttaggattgacttggcaatgcgggctcttttttggttccatat

SEQ ID NO: 144262 - DNA, 201 bp, Homo sapiens
tcagcttgcagctccctcttcattaggtccactaagtggctattgactccccacactccctacttttccctaccctaaccagcactcactcatcccagggycctcctctcagtggtccagtcaggaaacagagctgtgcaaggaggatttaatataaggtaccagtttaaaaagtgctaaaaaggctgaaacagtaaaaag

SEQ ID NO: 144263 - DNA, 201 bp, Homo sapiens
attaaatagggaatcctttccccattgcttgtttttgtcaggtttgtcaaagatcagatagttgtagatatgtggcattatttctgagggctctgttctgytccgttggtctatatctctgttttggtaccagtaccatgctgttttggttactgtaaccttgtagtatagtttgaagtcaggcagcgtgatgcctccagc

SEQ ID NO: 144264 - DNA, 201 bp, Homo sapiens
gacttcttggctcctgcaggccatctagacggatatgtgcaggtcacaggggttataatggccgagcttcggctcagaggcctgacaaaactctgacctcycgcaggaaaaaaaaaaaaaaaaaagaaagaaaaaagaaatatgtttataagggaatagaatagattgtttggattgtgcctaagaaagtaaggttaggtg

SEQ ID NO: 144265 - DNA, 201 bp, Homo sapiens
acctggggttcttggcctcacggattccaaggaatggaatcttgggccatgcagtgagtgttatagctctattagaaaccatgggtcacagaagagaaccktggaacccagtgactagtgttcagctcgattaggatgaatccaggcatttagccatgcaggaacaatggtgagtctttagcccaatggagagcggcaatg

SEQ ID NO: 144266 - DNA, 201 bp, Homo sapiens
acagagaacttgatcactcaaaattgttcactgtagaaactcatgcctaaaagcactatttttctttcctttctaagtgtaccagaattcaattctttaayatcacagaaccttagaaagcccagttactgaatgtgtcctgtgcaattcaccataccttaaaaatgtctcaggacattctgttgtgtccctgaggatcct

SEQ ID NO: 144267 - DNA, 201 bp, Homo sapiens
aggtgatctgcccgcctcggcctcccaaagtgctgggattacactcctttttcttttgtagagattcaaagagatttcaaaattctgctgcctccaccacmatctttccatactcctcccttgcgaaggctttaatttgacatcaatggtctactgtatgcattgctcagcaagtttttttttcacgcaacatgattttaa

SEQ ID NO: 144268 - DNA, 201 bp, Homo sapiens
gggtttccagtccccagccccctaggaataaggcctcttagaaagacagagagaactagaagttttagacccaaactatttggaattcattctttttctayggattttctcaaaacagtgttcttgttaccaaggggtccttgctcccagagctcccaagacggtggtgggccacttccaagacggtggtgggccgcttcc

SEQ ID NO: 144269 - DNA, 201 bp, Homo sapiens
tctctaattggcctgccatgctttctgctcaacacctgtcagctatctggggattctcctgttctcagttttatctgtcatccattgcttccctctacttyctccctcacagaagttgatggcccataggtcttgcagttgcgaagtggtttattctcacctaattgcacattggggttcatggatatacctagctttgtg

SEQ ID NO: 144270 - DNA, 201 bp, Homo sapiens
cctatttactttcatctggactttctctatccccaaaagttactcctcagtgtgggccttgccctggaagggagctccagtgggtcccttgtgggtgccasatgactctagccactaattccttctagtcttgaactctttgcattcaccagctattgattgggcaaaacccctccccgtccagtggctgttctctaattg

SEQ ID NO: 144271 - DNA, 201 bp, Homo sapiens; identical to SEQ ID NO: 26697

SEQ ID NO: 144272 - DNA, 201 bp, Homo sapiens
cctgtctttgctattttgcctatctcttgaatttattttaatctctttatttatttttatcttaaaatttttcctcctctctaccttctatttcacttaakacctcatctactgttttcacttgttcttgtattcattctagtttagacttcacttctttattctttatttcatgttttattttttcctgagttcttttat

SEQ ID NO: 144273 - DNA, 201 bp, Homo sapiens
ggcaatcattgcatagctacacagcttcagtgagacacaggccagcatacccttcatggctacacgctgccctttttcccacgtggaactggaagaacatrcctgggtctccggtaaaatgcacttatccccaagcttccaaggctggaagttatagaagaatcttcctatggaaaggggcaactggatggtatttctcca

SEQ ID NO: 144274 - DNA, 201 bp, Homo sapiens
agaagattttttttctataaaacttagtcatctaactagaagataatttggtgccagctgttgtgtattgatgttctcaggcatgcagtgtgctctctcartgtgatttcaaatatatattttctaattttaggaatgttttagtgtttgttcggtttccttgattttgtttttttcttctgggatttctattatccacat

SEQ ID NO: 144275 - DNA, 201 bp, Homo sapiens
tcatcagccctttcttgtcctcacagcaataataaacacagtgaaaaagcaaaaagttgaattaagctgaactgaacattctacatcaacgtgggagaaasctcctaggcatttctccatgcttggcgattcccatcaacagttcaaggaacttcctgttttgtaatctcctgctatttgtttaaaataaatgtgaagatc

SEQ ID NO: 144276 - DNA, 201 bp, Homo sapiens
tatggttatatacccaatgggatataaatcattctgttataaagatacatgcatgtgtatgttcattgcagcactattcatgatagcaaagagatgaaatmaacccaaatacccattgatgatagactggataaagaaaatgtggtacacatacaccacagaacactatgcaaccataaaaaggaatgagatcatgttctt

SEQ ID NO: 144277 - DNA, 201 bp, Homo sapiens
ttgaaaaccgaatgcaacttattcgtgtgtatccagtggttctttaaagctctgttttttggatcagaatgttacattgcatgagcccctgcttgagccaraagcatcctggagcctccttagctttaagccactcccgtttgggtccccgaacttgagatctccaggcagacctcgtagctttgaactgactcctttcct

SEQ ID NO: 144278 - DNA, 201 bp, Homo sapiens
gaactccaggaaggcaaattctgtcttgttcaccactctatacccagtgtctaggacggtgcctcacacataccaaggaaatgtgtattgacgcaatgaaygggtaaagtgccactagcttctcatttgcatccctgatggaaattctgactttcctcatgtgaaggcctcactgattttcccagggcatacttatgatcc

SEQ ID NO: 144279 - DNA, 201 bp, Homo sapiens
attgattgcaagaatattattttaggtattagtgagaaaagttgctgctaattaaagtgagaaacatatggagaaatataccaggctgtttcaggccaccragtcttttttctctcttgggagtgcctcttctctcaccagctcttctcctgcctgttatggtctctccaaaatcacatcttccctagcttttgactggta

SEQ ID NO: 144280 - DNA, 201 bp, Homo sapiens
gaatgtgtcctgacatcttcactttcatttttagtatatttctaaatcagctaaaccagtcaccttatgtctcttaacacagcctgctcatttcttctcaygccttgcttgggctttgctcacttatcaatgccctaagcctttgttttcaccactaattgcccaaaacagtgcctctctggttgacaatgttcttggcaa

SEQ ID NO: 144281 - DNA, 201 bp, Homo sapiens
tcttcactttcatttttagtatatttctaaatcagctaaaccagtcaccttatgtctcttaacacagcctgctcatttcttctcacgccttgcttgggctytgctcacttatcaatgccctaagcctttgttttcaccactaattgcccaaaacagtgcctctctggttgacaatgttcttggcaacgttggcaattttga

SEQ ID NO: 144282 - DNA, 201 bp, Homo sapiens
ttattaaatagggaatcctttccccattgcttgtttttgtcaggtttgtcaaagatcagatagttgtagatatgtggcattatttctgagggctctgttcygctccgttggtctatatctctgttttggtaccagtaccatgctgttttggttactgtaaccttgtagtatagtttgaagtcaggcagcgtgatgcctcca

SEQ ID NO: 144283 - DNA, 201 bp, Homo sapiens
gtgtaaggaagggatctagtttcagctttctacatatggctagccagttttcccagcaccatttattaaatagggaatcctttccccattgcttgtttttstcaggtttgtcaaagatcagatagttgtagatatgtggcattatttctgagggctctgttctgctccgttggtctatatctctgttttggtaccagtacc

SEQ ID NO: 144284 - DNA, 201 bp, Homo sapiens
aagttcctcaccacaaatatagcaaccaggagcgaaactcctggggttgcaagtaacaggaattaacttaaactaggctaagcaaaaaaaaaaaaaaaaaataagaagagaaaaagaggaaatttgcttgtgagaattacaagagtgaattttagaatcaaaaggagaaaacaggcctacaaatcaagctaggaaacaaaa

SEQ ID NO: 144285 - DNA, 201 bp, Homo sapiens
tgagttgtgcattgatcaccaatatctaattccagaacatttcactgctccccccaaaaatccaattctcttagcatttactccccatttccttctctctrtagcccttggaaatcaccactctacttcctgtctctatgggcatttcacataaatacgataatataaaacatggccttttgctacaggcctctttgactt

SEQ ID NO: 144286 - DNA, 201 bp, Homo sapiens
gaggcagaggttgcagtgagccgagatcacatcaccacgctccagcctgggcgacagagcgagactccatctcaaaaaacaaaacaaaacaaaaaaaaaaactttagaattctagaaacatttctacctgaatattgctagtcaaagaaggaagcttcagttatctcaaagattctgttgcattcacctgcttgctgaaag

SEQ ID NO: 144287 - DNA, 201 bp, Homo sapiens
ccagcactttgggatgctgaggtgggcagatcacgaggtcagcagattgagacctgcctggtcaatatggtgaaaccctgtctctactaaaaaaaaaaaaaatgtaaatatagatatacaaaaattagcaggacacggtggggcatgcctgtagtcccagctactcagggagctgaggcagaagaatcgcttgaacccagg

SEQ ID NO: 144288 - DNA, 201 bp, Homo sapiens
gagtttattgagaagtgctcttggcaaaaagacgagcaagagaggaaggcagtggggttggcagagagaagccgggctgtgctgcagccataaaagaagtyccactgagagctctgggactaaaatagctcttcagagttgtcctgaagtaggtgcaggtcttggaattcccacatcaaacagtccctcgatgtgacctga

SEQ ID NO: 144289 - DNA, 201 bp, Homo sapiens
taagtggggatgccatgctgggatattaggactaattgtaaaagcagccttgtattgacccagccctgggaagtccagcccgtcttgtccaatcaaagccyctgacagaatttccgtccttcctttgggatgagaaggggagaaacaggtcacagacctatgttcttgagttttctggggaatgaagagtaaagaacggga

SEQ ID NO: 144290 - DNA, 201 bp, Homo sapiens
tatgtgaaacctttctcttctttcaatgccctgcaccttatttaaaagaaactggatgaatcagacttaaaggcctgtgtggacccttttcttctcgtcaytggagacaggtgggctctccatttggaccatcttgacaaataaataaaatgttcctattccaaggtcaaacctctttcatttctccaaactatgatcgca

SEQ ID NO: 144291 - DNA, 201 bp, Homo sapiens
gagcactaaagccccgactttctggctacaggaccaaattgcggagtccagggaaccaaaaagtactagagagatcatgggaagggaggatctttggaaascaactccgtaaaggtgtttctgaatatgcatttatggagggataaccaatgctgggattatgtgaaacctttctcttctttcaatgccctgcaccttatt

SEQ ID NO: 144292 - DNA, 201 bp, Homo sapiens
cgcctcagcacagcctctgctgcagcacttgccacatcctgttttcatagcttgtcattacctcccaacaaacattgagccccagagaaccgagcttggtwaaaatgagattggttctctcaaagggattcagccctctctctgcttcatcttatttctgtttactgtacttgctcgaggtcagtccccttgccagggaga

SEQ ID NO: 144293 - DNA, 201 bp, Homo sapiens
taactgaaaccatggagattaaaacttcagataaggggggactactgtagttgaactcaacaacactatcaatcaaccagatataattgacatttaaggaytgttttatccaacaacagcagaatacacattcttctcaagttcacatgaaacattcaccaagatacattacattctgagacataaaacacattttaattt

SEQ ID NO: 144294 - DNA, 201 bp, Homo sapiens
cacccatcccgcctcagcacagcctctgctgcagcacttgccacatcctgttttcatagcttgtcattacctcccaacaaacattgagccccagagaaccragcttggttaaaatgagattggttctctcaaagggattcagccctctctctgcttcatcttatttctgtttactgtacttgctcgaggtcagtccccttg

SEQ ID NO: 144295 - DNA, 201 bp, Homo sapiens
aagtagatagtgtatacagcatgggtatgctgaacaaaggaacaattcacatcccaagtgagatggagtgggatggtgcaagatttcatcacactactgaraacagcatgcaatttaaaatttatgagttgtttctttctggagttttttatttaatacttttggactacagttgaccacaaataactgaaaccatggaga

SEQ ID NO: 144296 - DNA, 201 bp, Homo sapiens
tctttgcttcaatttgatgttacccaaactgcatcttgcagaaatgcttctaattttctagtttgtgggtcctacccatccccaatttccagcagaaaccyagattttcctagcagttattgtgactggaatttggaagtgggtgctgagtaaatgggtgagtctggatgtccatctgggatcaggactctgttcccactc

SEQ ID NO: 144297 - DNA, 201 bp, Homo sapiens
cgagatgagagctgagttaacttttcatggaacaccatttttattgaaaaattacttgataacaaatcatggtttttcagacttggatatatggcagataytttatctaaaatgaatgaaatgagcttgtagtttcaaggaaaataattgtttgaaaatcatattttcaatgttttgtttcaaacattgtttgacagtatt

SEQ ID NO: 144298 - DNA, 201 bp, Homo sapiens
gtgacaatcaatccgataactgagaaggctactgagtgactgacaagtagatagtgtatacagcatgggtatgctgaacaaaggaacaattcacatcccargtgagatggagtgggatggtgcaagatttcatcacactactgaaaacagcatgcaatttaaaatttatgagttgtttctttctggagttttttatttaat

SEQ ID NO: 144299 - DNA, 201 bp, Homo sapiens
tttatagaaaggtaagcagaagataagaagttgtttttaatttggtttctcattttgaataaggaatgaaaactctgttattaccccataatcatttttaytgagcataaatagcttgttagtcactatccaaactcaaggatatcactccttgggccagtgagcatagaaagtgattaatttgcatatgtcctcaaagaa

SEQ ID NO: 144300 - DNA, 201 bp, Homo sapiens
gtgcacacgctcccccgcaaactggaggaaaggctgcctgaagggagagacactgtgttcaaagcaggggaacagagctggaggtagtcaggtcccagtcracctaggaaggcgtgccctagcagaggaaagagtacgtgcaaaggcttgaaagcaagagggtccagccttctgaggaggagctcagtgcagctgaactaa

SEQ ID NO: 144301 - DNA, 201 bp, Homo sapiens
tgtgtggcaaagggtgggagctggagggtgcagggaagggcagtctgaatgccacacacacaagcagggggttcagtggtatcagatgggtcacctgcagytggggcttcctgtggccataagttatcgtgaggaaatgtaacaaaacctgtgcctagggatagctacatacttggcagggctcagtgcaaaataaaagta

SEQ ID NO: 144302 - DNA, 201 bp, Homo sapiens
agtgttccagccctatctggtacatatcaagcctgaggcttgaaatcagtcatttctcttaaaagccctggtttcttttagtgagaaataatgtttcaacrccacaaaccagatgcttaggaatgttcattgttactgagttggccactctttttttttttctttttgagacagagtcttgctctgttgctcaggctggag

SEQ ID NO: 144303 - DNA, 201 bp, Homo sapiens
tcccctgccccacctccctagaaggaacccttcacatgaacttaatgggtatcattctcatcagattttatatttacacattcacttgtatggattcatgrataatgtgtaatattgttttgccagtaatgtttttggtttttctttgtaaaaacaagacaactgtagaaaaccacgcaaagcaaatgtatagcttcatcc

SEQ ID NO: 144304 - DNA, 201 bp, Homo sapiens
aattgcccaaaacagtgcctctctggttgacaatgttcttggcaacgttggcaattttgaacccactgagcattttctcataaaaaaaaaatgtttcaagyagtagttaggttaggccacagagtctaatctactcaaatgtaatgaaaacactagttgtctgcaataaaagaagattcagccctatgaaagtaaaaatgt

SEQ ID NO: 144305 - DNA, 201 bp, Homo sapiens
ttaggttaggccacagagtctaatctactcaaatgtaatgaaaacactagttgtctgcaataaaagaagattcagccctatgaaagtaaaaatgttgttgrtaatgcaacatatttttcaaagatgagcttctgtgcctttatttttcaaagagttcgtggagaagatgtgtcttccctgtggtggccttagtagacggga

SEQ ID NO: 144306 - DNA, 201 bp, Homo sapiens
tgtcttccctgtggtggccttagtagacgggagaggaactaatgtttgctaaatgcctgctccatgccaggcaccatgtgcattttatgtgtggtatcacrtaagcctcatgacacttttgccagatgtacagatagcctttgctgtattacaaaccaccccacacttacacaaccatcatttatgagcccaagatattct

SEQ ID NO: 144307 - DNA, 201 bp, Homo sapiens
aagagttttgggagtgggaaagaaaaaatgaacatggaatcagatacgttgaatctagatgtaaactaaatgttttaaaagaactgtccttataccatccycagggaaacaaacaagtcagttacattgtactttcttccataagaataagaaatatgcccagcctggtgcagtggctcatgcctataatcccagcacttt

SEQ ID NO: 144308 - DNA, 201 bp, Homo sapiens
ctgttggaggactcagttacaatctgacacactgtcccttccttcacatactggtcaaagcaagtcacaaggccagattcaaagggctgggatatagacaycatcacttcatgggaggaagtgcaaaaactatgtggctgtttccaatataccaaacaaggggcattgttattccattccatgggtgccaaaatcctacca

SEQ ID NO: 144309 - DNA, 201 bp, Homo sapiens
agctacggcatataaacacagttaccagaagcctgcgccaacgggcaaaggaaaacagtgaagtggtcatgtgagctgggaagaaacccaaagaaagtctmttctagactccatcactgtccctccgcagaatacaaaggttggtctctgggtattaccaacctgtgttgctggatttgtttgtttttgttgtcttggttt

SEQ ID NO: 144310 - DNA, 201 bp, Homo sapiens
agagacataaactagggtgtaaaagtacattattaatgccaaaaatatttacttgtattaaatgtattggatatattcataataaaagtgaaattggttawctctgtctgggtgggttgagtgatgtttattatcttttcttatactgttctgtattttgtaaaatttaaaaaataaggttgcattgtgtttatatttttt

SEQ ID NO: 144311 - DNA, 201 bp, Homo sapiens
gccgaacatttttaacaccaattccaaatgtttgaaagaatcagattggtccttcttgaaacagtagtttaatgagatctaatcaactggctgggagctayggcatataaacacagttaccagaagcctgcgccaacgggcaaaggaaaacagtgaagtggtcatgtgagctgggaagaaacccaaagaaagtctcttcta

SEQ ID NO: 144312 - DNA, 201 bp, Homo sapiens
ataaaacaaatatatatgaaaatgcaagaccataaagtgctgataagcgtcagctactaaattaattgcaatgtaatgaaatcctcgagtgccatgcattwggttagaaacacagccaatcaaccttgataattaatggtgatcaatgcatccttaagtaggtactctcagagcccaggaagaccgtggtaatccagattt

SEQ ID NO: 144313 - DNA, 201 bp, Homo sapiens
tcacctttgagagtgctaaaggcctgactgctccctctttgcttcaatttgatgttacccaaactgcatcttgcagaaatgcttctaattttctagtttgtgggtcctacccatccccaatttccagcagaaacccagattttcctagcagttattgtgactggaatttggaagtgggtgctgagtaaatgggtgagtctg

SEQ ID NO: 144314 - DNA, 201 bp, Homo sapiens
cccttccctcactccccatgtagccttcacctttgagagtgctaaaggcctgactgctccctctttgcttcaatttgatgttacccaaactgcatcttgcmgaaatgcttctaattttctagtttgtgggtcctacccatccccaatttccagcagaaacccagattttcctagcagttattgtgactggaatttggaagt

SEQ ID NO: 144315 - DNA, 201 bp, Homo sapiens
gctgcagacaaccctgggtccaagggcacgcctccacatctttgttacacctaaacttgcaccctacacacagccactctgtctgtgctggctaagccccygttgccccggcctcaagggtgctggtgggattctaccctagggtcccttccctcactccccatgtagccttcacctttgagagtgctaaaggcctgactg

SEQ ID NO: 144316 - DNA, 201 bp, Homo sapiens
gccagaaatctgaacatctgaagaggggccatggattgggatggggatgtctctagaaaccaaatcatgatgagagcagacacctgactcctgctgccccwcccgaggagccatccttgcaatcagggttcccattgcacatgaagtaagagctcatgtgttttgttttgttttttttttgagtgctttccatgtctaaga

SEQ ID NO: 144317 - DNA, 201 bp, Homo sapiens
ttactcacctttccccacctactcaaggccatgagcttcctgcaggctcttttctacctcattgcagcggcttcaagtcggccaggctggggtccttctcyagccttgggtgatgcccagggttggagccagtggtggcttctggagcttccctccactattcactttattgttgggtagagtcaattgccattttctgaa

SEQ ID NO: 144318 - DNA, 201 bp, Homo sapiens
gtgcacagctattccgagcctggaatctctgacttactcacctttccccacctactcaaggccatgagcttcctgcaggctcttttctacctcattgcagsggcttcaagtcggccaggctggggtccttctctagccttgggtgatgcccagggttggagccagtggtggcttctggagcttccctccactattcacttt

SEQ ID NO: 144319 - DNA, 201 bp, Homo sapiens; identical to SEQ ID NO: 26688

SEQ ID NO: 144320 - DNA, 201 bp, Homo sapiens
tatttttttttaactttaagttctgggatacatgtgctgaacatgcaggtttgttacataggtttacatgtgccatggtggtttgctgcacctatcaaccygtcatctgggttttaagccccacattcattaggtatttgtcctaatgctctccctcccctttcccccaccttctgacaggctctggtgtgtgatgttccc

SEQ ID NO: 144321 - DNA, 201 bp, Homo sapiens
tttcaccactaattgcccaaaacagtgcctctctggttgacaatgttcttggcaacgttggcaattttgaacccactgagcattttctcataaaaaaaaaatgtttcaagtagtagttaggttaggccacagagtctaatctactcaaatgtaatgaaaacactagttgtctgcaataaaagaagattcagccctatgaaa

SEQ ID NO: 144322 - DNA, 201 bp, Homo sapiens
aaaatatttggagatttccaaggtggcccccctttctgtgatgggcttcattaagatacattttcattaacacagggtagttctttctactggaaggtgcrcagtagaaataaatgctcaaggctcctcccagtgtttggaggtgtagcggtcacaagataatatttttagagatttttaaggatattttgatgtttagca

SEQ ID NO: 144323 - DNA, 201 bp, Homo sapiens
ctctcacattcaagttgccttacttgaagttgtgccctattagggaggaaaaagagaatgggtcttgtatatcacatgatgagttggctctgcttgtcctsgattgccacagatgggatactagccttaggttaaaaacaaagattaaccagagccctatttatcactctcgagtccactaactaccagacccccataaag

SEQ ID NO: 144324 - DNA, 201 bp, Homo sapiens
gtgctgcttctgtgcatatgggaatcaagtcaaagcccctccccacgcttctgctctagtaggtaggcaacctagtcgcaaatcgtcatagctggtttttrtcaggtaggaagatttttatttttaaaatagtgtaattttttcatgacaatggaaaacatgaaattagcatgcagttctataccctgagggtttgtaaaa

SEQ ID NO: 144325 - DNA, 201 bp, Homo sapiens
ccacttcttatgcatcttgcacattctagtggttttaaatttgtgtggatttatggggttcagcattttctctctttatccaaaggactacttgtcacttyatgtctttttgatgataaatcatcttagaggacctagagggacaccacatgtccagttcccctcttctactctccagctcagagatggccagcctcactc

SEQ ID NO: 144326 - DNA, 201 bp, Homo sapiens
ctgcatctctacatcttagctagcagctccaatggcctggaaatctcattcagctccgaaatgctatgcccctcactctcaaacatgcgaaaagtggtaaygcattactgtgaaaatgctcggtgcctggaatacacactagggtatccgctcttataactacccagtctggaggttccaaactacttgagtgcataaata

SEQ ID NO: 144327 - DNA, 201 bp, Homo sapiens
tgtgttcagcatgatgcgctttctggacagggctcgaggtgttattccagctcttagtaatagtggaaaattggaacctaatttggatccttcgtcactcyacgcaaaggctccccttgaattacagtgtggtaacctgtacttgggtgattgaacctttctcctgagccctctccgcctccctggattcccaggccacat

SEQ ID NO: 144328 - DNA, 201 bp, Homo sapiens
ccccctggaaaatccttacggtggcgcctctattcttgctcctgtctcttcagtcctcggcctctccagccaacaatgaccagtccaggcccagcctctcraatgggcacacctgtgtaggtatgcaaataaatatttttgtattttctatgtagacataacaatgggatccagtactttgcttgcgtaataaatcacata

SEQ ID NO: 144329 - DNA, 201 bp, Homo sapiens
tggggtgcatagctcggagatgcagtccccctggaaaatccttacggtggcgcctctattcttgctcctgtctcttcagtcctcggcctctccagccaacratgaccagtccaggcccagcctctcgaatgggcacacctgtgtaggtatgcaaataaatatttttgtattttctatgtagacataacaatgggatccagt

SEQ ID NO: 144330 - DNA, 201 bp, Homo sapiens
aagccgggtgatcacttggggtgcatagctcggagatgcagtccccctggaaaatccttacggtggcgcctctattcttgctcctgtctcttcagtcctcrgcctctccagccaacaatgaccagtccaggcccagcctctcgaatgggcacacctgtgtaggtatgcaaataaatatttttgtattttctatgtagacat

SEQ ID NO: 144331 - DNA, 201 bp, Homo sapiens
ctcctaggcatttctccatgcttggcgattcccatcaacagttcaaggaacttcctgttttgtaatctcctgctatttgtttaaaataaatgtgaagatcyagttttggtgcagggccttcttcatcttctcctcaggaagttagtgggcaccccactagggaaggcatgtgggcacagtgagaccactgtgggacctgcc

SEQ ID NO: 144332 - DNA, 201 bp, Homo sapiens
aaaaaagtatagtttcttatgaaacaaaatatagtctcaccatacaagccaggattcataccgctgggtatttacccaattgaactgaaaacttatgtccmcacaaaaacttgcacaaggatagtagcattattcataatcatcaaagactggaagcagccacaatgtccaatcatataaacaaattgtggtacagccacg

SEQ ID NO: 144333 - DNA, 201 bp, Homo sapiens
acagcctgcagaacagtgagccaagtaaacctcttttctttataaattgcccagcctcaagtatttttttatggcaatgcaaaacagcctaacacatgtasattcaatgcaatatcaatctgaatcccagcaaattattttatagatattgacacattgattctaaagtttatatggagaggcaaaagatcaagaatggtc

SEQ ID NO: 144334 - DNA, 201 bp, Homo sapiens
agtctactggttgagaagaaagaaataaaactaactttgttctcaggtgacatgattgtctatgtggaaaatccaaaagaatcggcaaaaaaaaaaaaaaattctagaactaataagcaattatagcaaggttgcaggacacaaagttaatatacaaagtgaaccactttcctatatatcaacaatgaacaagtggaattt

SEQ ID NO: 144335 - DNA, 201 bp, Homo sapiens
gtagtgtggcacttaggagaatataaattttaaagtaaaatagttcagaatttgaatcactggttagccactgctgatctgaaaggattaaagtacattgyttaacctttctgggcctcagatttctaaggaaatgtggaaagaagcaatcttatgagaacattgtgaagattaaatgagacagaatttgtaaaaaacgcc

SEQ ID NO: 144336 - DNA, 201 bp, Homo sapiens
gcactgtccaaaaggaaatgttgataagttgtactttatccaatttaaccactttgctctccggaaagcatcattacaaaaccaaaagattagccacagayttggaagcaatacttgcaaatcccatagatgttagtatagcaatgattgttttaattaacatgattgataattttcaatttggaaggatgctgttttaat

SEQ ID NO: 144337 - DNA, 201 bp, Homo sapiens
accttgagaggataatgacaaaaattatgtataacaaaacaatgaggacatttctgtttgcagagccttgatacagagtggtgacagcaacagatgacagrggtgacagagacagattctggtaccaatttttgagatgcttcatataaaaaggcaaatgcttatagatatactcaatgcctagagcatcaaaacctgctg

SEQ ID NO: 144338 - DNA, 201 bp, Homo sapiens
attgatgatagactggataaagaaaatgtggtacacatacaccacagaacactatgcaaccataaaaaggaatgagatcatgttctttgcagggacatggrtggagctggaaacctttatcctcagcaaactaacacaggaacagaaaaccaaacatcatatgttctcacttatgattggtagctgaacaatgagaacact

SEQ ID NO: 144339 - DNA, 201 bp, Homo sapiens
tttctcgtagatagcattctccctgtatcttcacatcatcttccctctatgtgtctttttctcttcctttgcacagtgttctgtttataaggatactaatmatactggattagcagcccaccctactccaatatgaccttatctcagcttaactattaggttggtgcaaaagtaattgcggtttttgctattgcttttaat

SEQ ID NO: 144340 - DNA, 201 bp, Homo sapiens
ggtgaaataaacacattcccagataaaccaaactgagaagactcagtgctggcagacatgccacacaagaaatggtaaaaaagaagtccttcagacagaargaaaataacaccacatggtaacttgcatccataggaaggaatgaaaagcactaggaatgtaaatatgtagataaatataaaataacagtatatatgtata

SEQ ID NO: 144341 - DNA, 201 bp, Homo sapiens
gccaaaacacacaagaagaaatagataatctgaataggcctatatctattaaagaaattggatcaatatttaataatctaccaaaacaaaaaacacgaagycctgatagattcactggtagattctaccaaatatttgggaaagaaggtataccaagtctctataatctatttcagaagatagaagctaagagaatacttc

SEQ ID NO: 144342 - DNA, 201 bp, Homo sapiens
ctctatggtccaaaatcattttaaataggaaatagcaatagagaccaatatttaaagagtttctattgaagacggatgttttgctcacatccaaatggttwaatctgaccacagtactttctttcttttccttgggctcccatgtggcttacgcctggcagagtacagatactaacagtaccactttgcccaaaatactga

SEQ ID NO: 144343 - DNA, 201 bp, Homo sapiens
aaaacaccaattattgttaatactaatgtcatgcttactaatatgcaagacactattttaagtacaatctttgtcaatcctcacaacgctattatctccaytttacagatgaagaaactaggctcagagtgcttaagtaacttgcccaaggtcctacaactagtaactaatgaagccagggtttgaaaccacaaacactct

SEQ ID NO: 144344 - DNA, 201 bp, Homo sapiens
gaacagacttcattttttgcatataatttaaagtcataaatgcccattggagctggaaagtgtcagaacctaaaaaccaaattaggctttgatagagctamatcttgagtattggaaaattgccactgtaggatacagcagaatgcagatttaataacagacctgcaaatttcactcaaaggctagacatgccactatttg

SEQ ID NO: 144345 - DNA, 201 bp, Homo sapiens
cagtaatactttcttctcagggtgattttcaggatcctcaaaaaaagcatacatttctgtaggctgatgttgcaattattatactctttccagttgtttaytggtgacattacaaaccaaaataaaaacaccaattattgttaatactaatgtcatgcttactaatatgcaagacactattttaagtacaatctttgtcaa

SEQ ID NO: 144346 - DNA, 201 bp, Homo sapiens
agctaagggtaaaatatgtatgaagaagaggcattcagtgataaaaggggatgcatttaaaagtaatggcttttttcttttacttttacccttttttttttcatccctggaagaagaaaatgaagtgaacagacttcattttttgcatataatttaaagtcataaatgcccattggagctggaaagtgtcagaacctaaaa

SEQ ID NO: 144347 - DNA, 201 bp, Homo sapiens
aggcttacttcattcttggaaaacagtgtttcagtggtgggaaaggcactagagtctagaaactagagtgctaatctcagctgtgcttgcagactggcctrggttaaattgtgtcatctctctgagcctcagttttctcatctgtaaaacaggaacagtaatactttcttctcagggtgattttcaggatcctcaaaaaaa

SEQ ID NO: 144348 - DNA, 201 bp, Homo sapiens
caaggcctggtgaaacctcatcaatcatattttcttgcttatgttaaaatttcaggcttacttcattcttggaaaacagtgtttcagtggtgggaaaggcrctagagtctagaaactagagtgctaatctcagctgtgcttgcagactggcctgggttaaattgtgtcatctctctgagcctcagttttctcatctgtaaa

SEQ ID NO: 144349 - DNA, 201 bp, Homo sapiens
tgaccttttgcattaaaccatcctcgctccatgggagccacacttgccattccccaaggcctggtgaaacctcatcaatcatattttcttgcttatgttamaatttcaggcttacttcattcttggaaaacagtgtttcagtggtgggaaaggcactagagtctagaaactagagtgctaatctcagctgtgcttgcagac

SEQ ID NO: 144350 - DNA, 201 bp, Homo sapiens
agtgatgctttaatgactcagaataatgttctttagccgtgagatatttatttaaccacaccatctgccccagcccctgcttcttttactcttcctctccygcaggagctcctattactttagcctgtgctagctcagccttgtggatggctgagaacacacagaggtgagagttaggctgcacacctggactgagaagct

SEQ ID NO: 144351 - DNA, 201 bp, Homo sapiens
tttaaagggttttatctactcatttgcctttgtgcttttaaagccatttaggagagctttagtatatgtatctcataaatttaaaaccaaactgctaatcmcatcgtttcttttttaaagggtgtcgatccaaaagatggagttccatatgagaagaaattctgtgaaggtatgaattgtggatgtcattgtggttataat

SEQ ID NO: 144352 - DNA, 201 bp, Homo sapiens
aatcttaaaaggtctttaatctatctccctggccctatgctggcctgacctccatccacattagaaagaaagttatccacccttttcttaaattttcctakcagaaaaggtccctggataaagccttaaagcctgtctagtctctaagttacccaagtttatcctaatttactcccctccctaactcttcacatcaaatat

SEQ ID NO: 144353 - DNA, 201 bp, Homo sapiens
atttccttcccccagcctaggggattcccacttacagagagaagagattttcatgttccgattgaagtaaagctcagtgaaaaaagaacggcattcattcrttcgtttgtccgagaaatgcttatcagggacctacaatttgccaagtactttgcatcgtgctgggtggtaaacaaaacagaaatatgcctcctcttctgg

SEQ ID NO: 144354 - DNA, 201 bp, Homo sapiens
gggtggaatttggctacagcccacacctgaactgttcctggacaatcttccaccttccccaaggctggttctcacttttcctgtaagtgtggatgtgtggmgtcagcaagtagaacgtttctaatttcctgctggtggctctctctctggccttgttcaacccaccccaccccaaatggaagggggaggtgaatttcctct

SEQ ID NO: 144355 - DNA, 201 bp, Homo sapiens
atattctgtatgtttatcactctctgaggctacatcttagttgttctatgatgtagtgagttaggggttacacagaactctgggatgtggctaatatcaarggactgaaaggaatcttaaaaggtctttaatctatctccctggccctatgctggcctgacctccatccacattagaaagaaagttatccacccttttctt

SEQ ID NO: 144356 - DNA, 201 bp, Homo sapiens
ggggatgtctctagaaaccaaatcatgatgagagcagacacctgactcctgctgcccctcccgaggagccatccttgcaatcagggttcccattgcacatraagtaagagctcatgtgttttgttttgttttttttttgagtgctttccatgtctaagaaatagttaatgatattgattctactttaccaatgagaaaact

SEQ ID NO: 144357 - DNA, 201 bp, Homo sapiens
caacaaaatagccctaaataactccattaaaaagtgggcaaaggacatgaatagacatttttcaaaataagacatacaaatggccaacaagcatattaaamaatgttcaacatcactaatcttcagagaaatgcaaattaaaaccacaatgagatatcatcttatgctagttagaatggctattgttaaaaagtcaaaaca

SEQ ID NO: 144358 - DNA, 201 bp, Homo sapiens
tctagatttcatgaaattctccctgtttcctctctcttcagagagcagagcaactctccaacacactgaaaaaaattgcagccagtgagaaatttacaaayttcaatcttttctacatggattttgccttccatgaaagtaagtagctttgtttgggtattgacagaagatgaaagcagcagctagtttagggcctgggca

SEQ ID NO: 144359 - DNA, 201 bp, Homo sapiens
acagcatgtgaactgtacaagagacaagcgggcataggtatggagaaagaatgggaccagcgggccgggcgcggtggctcacgcctgtaatctcagcactytgggaggccaaggcgggcggatcacgaggtcaggagatcgagagcatcctggccaacatggtgaaaccctgtctctactgaaatacaaaaaaaattagcc

SEQ ID NO: 144360 - DNA, 201 bp, Homo sapiens
aatagaaaaaatttcaatagagatataaaattataataaagatccaaatggaaatactagacttaaaaatcaataattgaaatttaaattgtaatagatgrgctcaacagaagatttcagttcaaagaagaaagaatcagtgaacctaaaaacacatcaatacatattatcccaaccaaagaatagagaaaataaagcttg

SEQ ID NO: 144361 - DNA, 201 bp, Homo sapiens
ttgaattaataaatttttttaaaaaaagtatgattacagatgagccatgactagattgctgtgaagaaagccttttaaaagtatgaaaacagtaaaaaaaagaaacccttttcgtctatttgatgaatctatttatacacctagtaggagcctagatcagggaaccagatcagcaagctgaaaagtcccagaactcaaagg

SEQ ID NO: 144362 - DNA, 201 bp, Homo sapiens
gcaaaggagaacaaaaacaagctgcagtcaaggggttgaccaagagagcagatcattcacccaacagcaaagttctagcaaggccaaggcacaggatgttygaggctcaggaggcaagacctaaatgagcattagcagaacaagagctgagaaaaattaaggtcatcgcaaaagctctgccctctctgatggtgcaaagtc

SEQ ID NO: 144363 - DNA, 201 bp, Homo sapiens
gcggtccatgaatatagtcaatgatgaaaaagacaggatttggtccggagcttccggcaaatatcccaaaccaaggttaaagcaaggaagctgaatggagscttctgatgtcacaacacacaatgggatgtgatgctattccatgaagaatgctgttgtctctccatggcacttcgtgtagcattcattcattcattcatt

SEQ ID NO: 144364 - DNA, 201 bp, Homo sapiens
taacaaaggtgggaggggatagctttggcacatgcccaaacgggacctttcctgcagctcctttttctttctcaggctgaaaatatggctgtttgggtctrcgtcatttctgtctctttctctctctctctctctgttgatctgtctgtctttgtctcttgctcttgctctctttctttatcttccttttctcaactagaa

SEQ ID NO: 144365 - DNA, 201 bp, Homo sapiens
tccagaaacctcaagttcagaggggcctttagaaggtggggaaccactccttaaactaaacaactctctttttgtttttttttttctccccagaaatattmtagaagtggttctgacatttgttcactcccggttttggccaagatctgccagaaaattaaattgtatgtatacaatttctaccttcctgagcactagcat

SEQ ID NO: 144366 - DNA, 201 bp, Homo sapiens
ttttgcattgcagactctagtagttcaattctgaacatcctttcaacaagactggtctcccttaactagatttcctgcctaggtgatacacatttctctcrtggggagagacattttgataaataacttctcattaaaatgcagagttaaagacccattaatgaattcctggtgtaaacaaatgcaccaccaagtgatctt

SEQ ID NO: 144367 - DNA, 201 bp, Homo sapiens
aaaaagataaaatgtgggactttttctgaaaaagttgggttcagcattacctctgtacttcaccatcattttagaatccctgatgcaatagagccagtgaytggttagaaagagctttgagctggcaacctacaggttaatgcactcactaacctgttcttgtcgggttaaaagccctggttacctgatggatgtgacaga

SEQ ID NO: 144368 - DNA, 201 bp, Homo sapiens
aaaacaaataattaaccagagaggtggtcctctgaagttgggtgaggctgattggagtgggatagtgtccatagcagcagttctccaagtgtggtccatgracccctgtggggtctctaagaccctctcagggggtccacaagtgaaaaactactttcacaacaatactaaggctttccactatgtagccattggtacaga

SEQ ID NO: 144369 - DNA, 201 bp, Homo sapiens
aaacccaaaagaggaaaacaggcatctaagtccttaacaaaaatagccacctgaacccaacacatctaaactgagcatttctggccgttcgtatccccttrttctgaaggtggggccaggagtcagtccagtcagtagggttctgcagacaaggataagtgataaggatgaaaaacagggcagcaatcagagctttttcaa

SEQ ID NO: 144370 - DNA, 201 bp, Homo sapiens
catttgcttcccagccatcagttagggatcactctcaattactagagtctgcccctcttcctagggagtgagtagcatagctatttctttctttcaaaacmagctagagaaaactctacatttaaagggttccctgaatatgcctggcccatctaggaaaatcttgattaccccaaaataaactgattggagtccttaatt

SEQ ID NO: 144371 - DNA, 201 bp, Homo sapiens
gtcctcttgcaagttcactggttgttggcagaatacggttccttgcagttgccggactgaactcccatttgcttcccagccatcagttagggatcactctmaattactagagtctgcccctcttcctagggagtgagtagcatagctatttctttctttcaaaaccagctagagaaaactctacatttaaagggttccctg

SEQ ID NO: 144372 - DNA, 201 bp, Homo sapiens
aggcatggggttaagacctgcagagtgtggggctctcagatttgaatcctggttctgccactctgtacaaatgtgacgttgggggcatagcttcaccctcrgcaccacttcactcccctcatctgcaaaatgagaattacacagggtgatgcgaacagcctgtcacttagaacaactgtgcttggtacatagcaaggacac

SEQ ID NO: 144373 - DNA, 201 bp, Homo sapiens
tattttcctgatagtgaggggacagtatttaatttttcaccactaaatatcatgtaagttgtcaggttttttgtagataacctttattaggttgaggacaytcccttttattcctaataaaatcatgaagcagtgttatattttgtcaaatatcttctgcctatattggataatcatatggttttttttatgttgttgata

SEQ ID NO: 144374 - DNA, 201 bp, Homo sapiens
aaaaaaatgcaaaacagaattgataacaattatggtataccttagatgtaattaatggctttgggagaggcattaaaaatacagggcagagccactgcacyctgtgactcatgcctgtaatcccagcactttgggaggctgaggcgggtggatcacttgaggtcaggagtttgagatcaacctaaccaacatggtgaaacc

SEQ ID NO: 144375 - DNA, 201 bp, Homo sapiens
agtaagatttatgccagtgtttccttgtatgaattttacggttttcactcttacatttaggtctttgacccgttttgggttaatttttgtatatagtgtgragtaagtgtccaaattcattcttttgcctgtggctgtccagttgtcccagcaccatttgttaaattcctccaatgaaatggtctttgcacttttgactaa

SEQ ID NO: 144376 - DNA, 201 bp, Homo sapiens
gggaaccactccttaaactaaacaactctctttttgtttttttttttctccccagaaatattctagaagtggttctgacatttgttcactcccggttttgrccaagatctgccagaaaattaaattgtatgtatacaatttctaccttcctgagcactagcatgtaataacgtctttgcttgtcccccttttctaatgacc

SEQ ID NO: 144377 - DNA, 201 bp, Homo sapiens
atgtgcttgtggaagcaatagtaaggcatggggttaagacctgcagagtgtggggctctcagatttgaatcctggttctgccactctgtacaaatgtgackttgggggcatagcttcaccctcggcaccacttcactcccctcatctgcaaaatgagaattacacagggtgatgcgaacagcctgtcacttagaacaactg

SEQ ID NO: 144378 - DNA, 201 bp, Homo sapiens
ttttcttcttttgcttgtgcttttggtgtcatatctaagaaaacgttgcctaacccaaagtcagtaagatttatgccagtgtttccttgtatgaattttayggttttcactcttacatttaggtctttgacccgttttgggttaatttttgtatatagtgtgaagtaagtgtccaaattcattcttttgcctgtggctgtc

SEQ ID NO: 144379 - DNA, 201 bp, Homo sapiens
ccattaagttataatgtgcccacctctctattgacagagctattttcctagacagaatgaatgccaaaatagtcatagtgattacatggctgtctctaaaygaagacattactagtgatttatatttccttctcagtaattttctgaattttccacactttctataatgtgcttgtggaagcaatagtaaggcatggggtt

SEQ ID NO: 144380 - DNA, 201 bp, Homo sapiens
cacctgtctgcctctctctttcctggattgctctgaggtggaaacctgaagagaaagaccacagggacactctgagaagggcctgtgactttggggaaagrtcacacagtgagcaataccgaaagaatccatgatgacagcatgctgtgcttcaggaacaaaggaagtaatttttttttgtaaatatattaatactggagg

SEQ ID NO: 144381 - DNA, 201 bp, Homo sapiens
ctgtattgttgtatttataacacttatagatataaaatgtatgacaaaaatagcccaaatacaaggtgaggatggagcaatattagagcaaagttgtgaartcttaccacaattaaatcagtactaacttaaaatacattatgataaggtaaagatgcacattgtaatctcagtaaccactggaaatatgaacatctaaat

SEQ ID NO: 144382 - DNA, 201 bp, Homo sapiens
agcaagtaacatgtcacaaagtcccaaaagtttgggaaatctcagatattctacttggggatggaggaaataaaaatattatctggcattattataactcktgattcacatcattcaggtcaaatatttaaacctgcataattaaccatttggctagagacttttaaattatccaatgaaattaatcatttggccaaataa

SEQ ID NO: 144383 - DNA, 201 bp, Homo sapiens
gaccataaaattattttagtatcaaactcagatccagtgtccatttcccatctgtttttccaaaatataataaaatactcaaggcagagggcataagtgaygcagtgtataaggtatccatttcaggcttttgagtaagatagcagattgaacacaagcacttacatctctcccttgaaaagccctactctaacgacagta

SEQ ID NO: 144384 - DNA, 201 bp, Homo sapiens
cccaagggtgttaaaactagtatcactaatttacactgatttgattcctaatgaacattaacatttgtctcatgttcactggccatttgtacgtgactagratttaatgtgcagagctgctgtctgctgatggcttggagaaatgaaagtagagtaggatggggaagatcgatttctttgttctgcctgaattgtctcact

SEQ ID NO: 144385 - DNA, 201 bp, Homo sapiens
ttaaaaatgtcacatagtacaaagcagaaaaaacattattaattttattaaattgatttttaaataatttaatctgatgaaatgtgaaatatgcataaagmatttgtactgcataataaattaacaaaggatgatggctgtcttagggaaaagcacttgtgtaggcgagatgagagctgagttaacttttcatggaacacc

SEQ ID NO: 144386 - DNA, 201 bp, Homo sapiens
tgcctacatagtatgagaatgcacatactcttttatgctttccaatgttcatagattgtttctccacaccataatgttgtaaccattctaaagtttatacrtgactatattatgatttatttcatcttttgttgttggacatttagattgtttccaaatttacactatgataaatagcattgtgatgagccatcgtatatc

SEQ ID NO: 144387 - DNA, 201 bp, Homo sapiens
ccaggtgtcatggtgggcacctgtagtcccagctgctcaggaggctgaggcatgagaatcacttgaacccaggaggcggaggttgccgtgagccaagatcrcgccattgcattccagcctgggcaacagagcaagaccctgtctcaaaaacaaaaatgaacaaacagacaaaagacttattgaacattttttacataaaaa

SEQ ID NO: 144388 - DNA, 201 bp, Homo sapiens
tcaagaaacagatgctggcgaggttgtggagaaataggaatgcttttacgctgttggtgggaatgtaaattagttcaaccattgtggaggacagtgtggcrcttcctcaaagatttagaaccagaaataccatttgacccagcaatcccattatggttatatacccaatgggatataaatcattctgttataaagatacat

SEQ ID NO: 144389 - DNA, 201 bp, Homo sapiens
agcgagactccatctcaaaaaacaaaacaaaacaaaaaaaaaaactttagaattctagaaacatttctacctgaatattgctagtcaaagaaggaagcttyagttatctcaaagattctgttgcattcacctgcttgctgaaagaacccaggccacagaaacttttctgagcaaaaggtgattaggcagctggatttctga

SEQ ID NO: 144390 - DNA, 201 bp, Homo sapiens
tgggggaggggctcccgccattgcccaggcttgcttaggtaaacaaagcagctgggaagctcgaactgggtggagcccaccacagctcaaggaggcctgcyggcctctgtaggctccacctctgggggcagggcacagacaaacaaaaagacagcagtaacctctgcagacttaaatgtctttgaagagagcagtggttct

SEQ ID NO: 144391 - DNA, 201 bp, Homo sapiens
tttcttttgcttttatttccatgtttactgagcacctactatgcctcaaggactgtgcgaggctctgaagattttaaactgggcctgagaatgcaaaggamtatttctgagacagagaagcaggggcacatgattgaggcagaggactaccaccttcacattttaaaatgtggggaatgagctctttgctgataaaagtag

SEQ ID NO: 144392 - DNA, 201 bp, Homo sapiens
gggtggctctccagggtcctggctctcaaaggaagtgcagcttcgacaggggcaggggtcactccactctgctgtctcctagatcctagggaagggcttcractggctgctgctggtgaaggacttcaacctgcttcactggcttggtgccaacgccttctgcaccagccactacccctacgcgggggaagtgctgcagat

SEQ ID NO: 144393 - DNA, 201 bp, Homo sapiens
aatcgtgcagttctaacagcgttcagaggtggatttttcacttgtggtagaggcagcagaggttgtagaaatgtttcttgagacagacaccacaccccaayttcatggagtgctttgggctgagccaagtctacagcaggcagaaggctctgagaagttgtcccagcctgggcaaaggacaattcagagctcgggggcatg

SEQ ID NO: 144394 - DNA, 201 bp, Homo sapiens
gaggttgtagaaatgtttcttgagacagacaccacaccccaatttcatggagtgctttgggctgagccaagtctacagcaggcagaaggctctgagaagtygtcccagcctgggcaaaggacaattcagagctcgggggcatggggtgtgctcagcagtactgggtggacaacgttttttgcaaaagtgaagagttcaggc

SEQ ID NO: 144395 - DNA, 201 bp, Homo sapiens
tttggatgggcagagcagtgatgggggagggtgtaaaagaagaaataaactgaggaaagagaagaggaaaacaggcttcaacaacaatctaggctgggcayggtggctgacgcctgtaatcccagcactttgggaggccaaggcgagtggatcacctgaggtcaggagttcaagaccagcctggccaacagatagtgaaac

SEQ ID NO: 144396 - DNA, 201 bp, Homo sapiens
caagtagggggaagtggctcatcgatatgcatgcttgctcatcctctttgaaaaggtaaccagctctgaattcttttttctttgagacggagtttggcacratcttggctcactgctacctctgcctcccaggttcaagctgttctcctgcctcagcctcccaagtagctgggattacaggcatgcgccaccacgcccatc

SEQ ID NO: 144397 - DNA, 201 bp, Homo sapiens
gataccaattcctgccaccactcgtcatttccattggcaacatttctttcattgtttgtttttcagagttggtcttgctttgttgcccaggctggagagcrgtggtgtgatctcggctcactgcaacctctacctcctgggtttaagcaattctcctgcctcagcctcttgagtaactgggactagaggcatgcaccacca

SEQ ID NO: 144398 - DNA, 201 bp, Homo sapiens
ccccatgcctggctaatattttgcctttttgtaggactgggtctcactgtgttgcctaggctgctcttgaactcctggtctcaagtgatcctcctgcctcracgtcccaaagtgctgggataccagacctgagctaccatgcccagcctggtttagtttaatttcattttacatgtatgtatgtatgacagggtctcgctc

SEQ ID NO: 144399 - DNA, 201 bp, Homo sapiens
ataaactgaggaaagagaagaggaaaacaggcttcaacaacaatctaggctgggcatggtggctgacgcctgtaatcccagcactttgggaggccaaggckagtggatcacctgaggtcaggagttcaagaccagcctggccaacagatagtgaaaccccgtctctgctaaaaatacaaaaataaaccaggagtggtggca

SEQ ID NO: 144400 - DNA, 201 bp, Homo sapiens
ctgtgcacccccatgcctggctaatattttgcctttttgtaggactgggtctcactgtgttgcctaggctgctcttgaactcctggtctcaagtgatcctyctgcctcgacgtcccaaagtgctgggataccagacctgagctaccatgcccagcctggtttagtttaatttcattttacatgtatgtatgtatgacaggg

SEQ ID NO: 144401 - DNA, 201 bp, Homo sapiens
gggaaggagaccctggcaggtggcaggctggggtgggtttgtgctgtttgagaccagcctcctgtcccagcctgatgggagtgccgtccatacccagacasttcaggggaccaaatatctacccacccaagttgtggttttctttttctttgttttgttttgttttttttttgagacgtggtctcgctgtgtctcctaggc

SEQ ID NO: 144402 - DNA, 201 bp, Homo sapiens
ttggtgccaacgccttctgcaccagccactacccctacgcgggggaagtgctgcagatgtgtgaccgctatgggattgtggtcattgatgagtgtcccgcygtgggcctggtgctggtgtgagtccccaccacgcacccgctccacctgcccagcccgcagaccgcaccatgaccctctgtcccttccctcctggcccaca

SEQ ID NO: 144403 - DNA, 201 bp, Homo sapiens
aggtttacctcacctgcctcaggccaagggagccttctccgtgctctgcccctgttgtagcctgaacctggctctccctgcgttctcaccaggcactgtcrttatttctttggctctctctttggactgtgggctcaggagagagaaggagttctatttattgttgcttcctaggtactctgcaatatctgacacagcacg

SEQ ID NO: 144404 - DNA, 201 bp, Homo sapiens
tgaacccgggaggtggaggttgcagtgagccgagatcgtgccattgcactccagcctgggctacagagtgagactctttctttcaaaaaaaaaaaaaaaaatctgtactgtgcaggcctcaggtgggtgccagaagctctgagcagggactgatccctctgttgggtttttcttccctttatccctcctggttaacttgac

SEQ ID NO: 144405 - DNA, 201 bp, Homo sapiens
taagactctgtctcaaaaaaataataaagttcgaaatactgtaagaattaccgaaatgtgacacaaagacaccaagtgagcacatgctgttagaaaaacgmcgccactaccctaactcaacacaggttgccacaatcctctcatatgttaagaaatggtccagacatggtgactcatgcctataattccagaactttggga

SEQ ID NO: 144406 - DNA, 201 bp, Homo sapiens
tcaggggaccaaatatctacccacccaagttgtggttttctttttctttgttttgttttgttttttttttgagacgtggtctcgctgtgtctcctaggctrgagatcagtgacatgatcttggctctctacaacctccgcttcccgggtttaagtgattattttgcctcaggctcctgagtacctgggattacaggcatgc

SEQ ID NO: 144407 - DNA, 201 bp, Homo sapiens
ctgtcccagcctgatgggagtgccgtccatacccagacacttcaggggaccaaatatctacccacccaagttgtggttttctttttctttgttttgttttkttttttttttgagacgtggtctcgctgtgtctcctaggctggagatcagtgacatgatcttggctctctacaacctccgcttcccgggtttaagtgatta

SEQ ID NO: 144408 - DNA, 201 bp, Homo sapiens
cacccttgcagtgatggaaatgttctgtatttgcactgtctgaaatggtagctattagctacacgtggctattgaggtcttgatatatgactaggataacygaattgatttagtttaattaaaaaagattttttttgagacagactcactctgttgtccaggctggagtgcagtggcataaccacagctcactgctcgact

SEQ ID NO: 144409 - DNA, 201 bp, Homo sapiens
gcctcctgtcccagcctgatgggagtgccgtccatacccagacacttcaggggaccaaatatctacccacccaagttgtggttttctttttctttgttttkttttgttttttttttgagacgtggtctcgctgtgtctcctaggctggagatcagtgacatgatcttggctctctacaacctccgcttcccgggtttaagt

SEQ ID NO: 144410 - DNA, 201 bp, Homo sapiens
ggctgtcactgagagccagttcttcatcaacgggaaacctttttatttccacagcatcaacaagcacgaggatgcggacctgcgtttgtgctcctgggtcstcgttggggctgcttctggtcaccttccacttttgccttccgtatgtcccacagttgagggcagctcagggcaataaggcaaatggctccaaactgcccc

SEQ ID NO: 144411 - DNA, 201 bp, Homo sapiens
ttttttttttaaacctccttttttattctgggttacatcattccctggctgtctttaccccagcatcagtgagtcctgcagtcactatagccccctgcgargacagatattttggtcaccatcaagtggatctttatttttatctaacatttacaattctgccatttctgactcttagaatctctttgccttgaataccag

SEQ ID NO: 144412 - DNA, 201 bp, Homo sapiens
tgtttttttttttaaacctccttttttattctgggttacatcattccctggctgtctttaccccagcatcagtgagtcctgcagtcactatagccccctgygaggacagatattttggtcaccatcaagtggatctttatttttatctaacatttacaattctgccatttctgactcttagaatctctttgccttgaatac

SEQ ID NO: 144413 - DNA, 201 bp, Homo sapiens
ttttttaaaaaaaacacccttgcagtgatggaaatgttctgtatttgcactgtctgaaatggtagctattagctacacgtggctattgaggtcttgatatrtgactaggataaccgaattgatttagtttaattaaaaaagattttttttgagacagactcactctgttgtccaggctggagtgcagtggcataaccacag

SEQ ID NO: 144414 - DNA, 201 bp, Homo sapiens
tcattttgtcctctttatttatgtatttatttatttttatttttgagatggagtcttgctctgtcacccaggctggagtgcaatggcgtgatctcagctcwctgcaacctctgcctcctgggctcaagcaattgtcctgcctcagcctccaaagtagctgggattacaggcacccgccaccatgcctagctaatttttgta

SEQ ID NO: 144415 - DNA, 201 bp, Homo sapiens
gagatcagtgacatgatcttggctctctacaacctccgcttcccgggtttaagtgattattttgcctcaggctcctgagtacctgggattacaggcatgcrtgagccactgcacctggcctgtttttttgattttttttgtttttttcgaaacggggtctcactttggtctcccaggctacagtgcagtggtgtgatctcg

SEQ ID NO: 144416 - DNA, 201 bp, Homo sapiens
gtctcactctgttgccaggctggagtacaggggcacgatctcgactcactgcaacctctgcctcctgagttcaagtgattctccagcctcagcttcccgartagctaggattacaggtgtgtgccaccacacccaactaacttgcatttttgtttgtttgtttgttttgagatggagtctcactctgttgccaggctggag

SEQ ID NO: 144417 - DNA, 201 bp, Homo sapiens
agggcaataaggcaaatggctccaaactgccccatggtggagccggtgcttgggctggagagggggctcatggggtggctctccagggtcctggctctcaraggaagtgcagcttcgacaggggcaggggtcactccactctgctgtctcctagatcctagggaagggcttcgactggctgctgctggtgaaggacttcaa

SEQ ID NO: 144418 - DNA, 201 bp, Homo sapiens
cctgcctcggcctcccaaagcgctgggattccaggtacctcttatttgctttgcatagattttttgagcaccttctatgcatgagcacagtactctcacaytctgtgacgacacactctggagatgtcgtcatgggatatggaaggtggtgggcccctcactcaacatacttttacttcctttgaggcctaggactgtgtc

SEQ ID NO: 144419 - DNA, 201 bp, Homo sapiens
atttgcataattctattttatttatttatttatttttttacagacagggtctgtctccgtcacccaggctggaatacagttggcacagtcatagctcactrcagcctcaaactccttggctcaagcgatcttcccacctttgcatatttctacagctttccagggacctgcttgcccattgattgggaatcctaacctatg

SEQ ID NO: 144420 - DNA, 201 bp, Homo sapiens
accaggaaactagacactttgtttctagtaaggttggacatcttttcatacatttattggtcatattctctgaaatgatctttccttccttcttcccttcsttccttcctctctctctttctctttttttttttttttctgagtcagggtctcactatgttgcccaggctggtttcgaactcctggactcaagtgatcctc

SEQ ID NO: 144421 - DNA, 201 bp, Homo sapiens
cccggccctttttaaatccatcttccatgagctaacactctctttccctttccagattgactggggcgactttggggtagaggcagtgtctgaggggactractctggcatctctgccgaggctgctggaatcgactggggcatcttcccggaatcagattcaaaggtgaggaggccttctcagtctgtctctctctgatc

SEQ ID NO: 144422 - DNA, 201 bp, Homo sapiens
gtctcatttttgcatttcgagtagtccgagggcttagattctgagttcttctctcagtttgaaccaatttatcttctttttttctttcttccttttttttwaaaaagagtttctctgtcgcccagtctggagtgcagtgcagcaatcatagctcactataacctcaaactcctgggctcaagtgatcctcccgcctcagcc

SEQ ID NO: 144423 - DNA, 201 bp, Homo sapiens
attctccccccattgctgtggttctttgctctccttccaggatcctggaggtgatgggatagactggggagacgatgctgttgctttgcagatcacagtgstggaagcaggaacccagggtaagtgcaccatcccctgcagccctggcaaaagtggggtgctcaagggcccccacgtgtctagaaacaaaaaatgcagcgc

SEQ ID NO: 144424 - DNA, 201 bp, Homo sapiens
gcagtctctcactagcggatctctcagtgggtggcaggaggatggctttaggggagggaatgtcacccacctccccacaactgtgcctctgccctgcaggktgaaggtaaatgaagtgacatttgaatccattcagatactgcaggagaatgaatgctgaatgaatgaatgaatccagggagagctggagccaaataagct

SEQ ID NO: 144425 - DNA, 201 bp, Homo sapiens
aggggaaataggcctcctctgtccatctggccatcctgttgactgctcctggaggacagaggccagtctgctctgctcacccatgtccccagcacatatcmccaggaagtccttgttaatgaatcattgactgggcctggcccttcttctaactcttccccctggacagtatctgagaaagaaaaatgaggaactggaaca

SEQ ID NO: 144426 - DNA, 201 bp, Homo sapiens
gaagaatgacgaacaatgatgaggcttaggttttatgactgtatttagctaatcgagccttgtctgtgtgggcaagtcaactttgatgatccaggaagcasctctggagttgcttaaccctgcaggtcccaaggccttctggtggcctcggcaggtagtggcaccctccagagcagtctctcactagcggatctctcagtg

SEQ ID NO: 144427 - DNA, 201 bp, Homo sapiens
gcgacagtgtgagactctgtctgaaaaacaaaacaaaacaaaacaaaacaacaaaacaaaaaaacacacataaacagaactgctttggttggttgaaacargggttccccactcccctcacacacatcaagctttgccaaaacccaggacttgaagtctgagatttgtgccagctctcaatcctgtgagtctaagtaacag

SEQ ID NO: 144428 - DNA, 201 bp, Homo sapiens
atcctcttgtcaggaagaaagatataattacccatagaagcaaaaatattatggggaattgagaatggtcaaaagtggcactttcaggaccaatttaaacyttttgttatccctgtgttgaggcaattgctctataaaaatcacactgctaatgaagtcagattgtcagagcctggtttagccccaggcatctctttgggc

SEQ ID NO: 144429 - DNA, 201 bp, Homo sapiens
aagatatctacaaccgcctgcctgtgcctcaccacagagggctgaaaggggttgggggagtgggggcaggtgcttgggacttcaaacagacccagcatttrgtgacacatggtgggccctgcagttagctcgtgcaggttcctgagctggccgagctaagggctgggcccttgccctggggccttgcaatccagggatgat

SEQ ID NO: 144430 - DNA, 201 bp, Homo sapiens
atgtatcactgatccagaccagacatacagtaggtacttatgcaagctcgaaaacacaaatgagaaacagaaacattgtttttacccaaagaaactgttawtgtagccaattgctttgtcccactctccctggggcaggtaaatgtgcaagaaaacccatttatttgccttcttgtggttccagccacagctggcttgctg

SEQ ID NO: 144431 - DNA, 201 bp, Homo sapiens
cattgaaatcaacttctatcttcatgagtggggcgctagtaaggggaagggctaggggaatgggatccctgggaatatgctgggggaagggagtgagaagytggtcagagttctagccatgctgggtgccatctggggctgatgattatcaaaggcactcctgctgtgagtgtccctgactgtcccctcctcacccgccat

SEQ ID NO: 144432 - DNA, 201 bp, Homo sapiens
tcaaagaaaaccagtttgaatatttaaacttctcctgtgtatctaataaaaagttctgcactacttaacgccccagctatccattactgtcgggagctgcyctctccctcccagcattcccctccctccctctcgcccaaaccacgcgcatggcaaagccatttgtcaaaccgctcccgccactggctgcgcttggctgtg

SEQ ID NO: 144433 - DNA, 201 bp, Homo sapiens
ctgtgtatctaataaaaagttctgcactacttaacgccccagctatccattactgtcgggagctgccctctccctcccagcattcccctccctccctctcrcccaaaccacgcgcatggcaaagccatttgtcaaaccgctcccgccactggctgcgcttggctgtgtctgaaaggacaagccgccccacaggggaaggtg

SEQ ID NO: 144434 - DNA, 201 bp, Homo sapiens
taaaaagttctgcactacttaacgccccagctatccattactgtcgggagctgccctctccctcccagcattcccctccctccctctcgcccaaaccacgmgcatggcaaagccatttgtcaaaccgctcccgccactggctgcgcttggctgtgtctgaaaggacaagccgccccacaggggaaggtgggaatgaataaa

SEQ ID NO: 144435 - DNA, 201 bp, Homo sapiens
caaagtgctggtattacaggcatgaaccaccatgcctggcctaaacttattttatttatttattttttttttgagacagagcctcactctgtcacccaggmtggagtgtagtggcgtgatcttagctcactgcaagctctgccgcccaggttcaagcgattctcctgcctcagcctcccgagtagctgagattacaggcac

SEQ ID NO: 144436 - DNA, 201 bp, Homo sapiens
tctggaaggggagacactgggaatggccctgcgctggccatacgggttacaagcacacaccctacaaggggtcaaagagccaaggcagctctcttcattcyttatccatctgtgggttttggttttggttttgaggtaagacatacatagaataaaatgtatcattttaaccttttttgagcgtacagttcagtgacattc

SEQ ID NO: 144437 - DNA, 201 bp, Homo sapiens
cttgccaattggaggagcccagtcatcatctctaaatcttttatttatttatttatttagacagtcttgctctgtcgcccaggctggagttcagtggcgcratctcggctcactgcaacctccacctcccaggttcaagcaattctcctgcctcagcctcccaagtagctaggattacatgcgtgtgccaccatgcctggc

SEQ ID NO: 144438 - DNA, 201 bp, Homo sapiens
tgctcaaccatgtctattagagaaactgaatgaggaggcaaagcatgacaagtgccacaagagacctgcacactgctctggatggtaaagcgacgcaaggwgggaagaaggtatttgcaacggcctcccagatcggcgctaggaccccgccagcagacgtctcaatctgcgtggagaggacccagcgctcgccaggggaag

SEQ ID NO: 144439 - DNA, 201 bp, Homo sapiens
ttccctagtgtactggattgaatagtgtccccgaaaattcacgtccactcagaaccccagaatgtgacctgcattggaactagggtttccagatgtggttktcagatgtagtcatcctgggttagtgtaggccctaaggttgaggagtagtgtccttacaggaagaatgtcatgtgacaatggaagccatgtgacaatgga

SEQ ID NO: 144440 - DNA, 201 bp, Homo sapiens
cctgggcaacagatcaaaattccatctcgaaaagagataaataaataaaaataaaaccctggcatgggaaatgggaggaactctgtagggcatctgggccygcagagtcagccctggatttgaatctggtatttgcttgctaccatgtggcttgagacacttctgagccttgatatgctcatctgcagagtcaacatcaca

SEQ ID NO: 144441 - DNA, 201 bp, Homo sapiens
attattattgatttattattattgggtctctgtggattttccagaagactgcttatttcaaatatgtaaagcccctgtccctacaggttccccctcttttmcatgtcacacagcatgttctgattcccagcaagaaataatatacgatcactctgacttcgttggctgatgaaaaaaaaattcattttgtccatgtaaata

SEQ ID NO: 144442 - DNA, 201 bp, Homo sapiens
aattcattttgtccatgtaaatagcacctctaaacaagggacacagctaacccagaagggagtaattggccccatataaaacaaggccaagtgaaagatasgagttctgaaaagccgaaggaggtctggcgggagctgccgacagctcttctaacctgcccaacttattactggaatcatttcaagagataatttaatggt

SEQ ID NO: 144443 - DNA, 201 bp, Homo sapiens
aattggccccatataaaacaaggccaagtgaaagatacgagttctgaaaagccgaaggaggtctggcgggagctgccgacagctcttctaacctgcccaayttattactggaatcatttcaagagataatttaatggtctccctctgtgtggccctgttcactcctgaagggaaatatataaataaataaacaaacctaac

SEQ ID NO: 144444 - DNA, 201 bp, Homo sapiens
acccatgctttatgagaacatcgcttgcttgtttttaatggcacagttattaatataactgtcccggcacctcccctacatctgatcactgctgaattatragccttgaatcctgattgtggttcccatgactgcagacgtttccacactgtcctgatgagaggagagaagcagccctccacatgcagggaggactcagag

SEQ ID NO: 144445 - DNA, 201 bp, Homo sapiens
aagaaacttgcccagctggtaagcagggacgcttgttgacagcctggatgtgcctgactgcagggcccaagcccctaactactaggctacactgccttccygggaagtaacagctgtccatcccacctggcaggatggagagagtcagatgagcctatccaagtgaaggggctccatcacctgtaagcagtatcatatgag

SEQ ID NO: 144446 - DNA, 201 bp, Homo sapiens
  misc_feature (1)...(201): n = A,T,C or G
acattcactccagaagaaagctttatttcctttgacaactgtggatagacaaggaaaggggagaatgttctcgtgttctgtgacttcctacctccatcagnggtgtagttaattctcatcttaccgggtcatcctcaggtactttgagatgagcagggctctggtctagttgagtggggtggacatggctgtttcaggcta

SEQ ID NO: 144447 - DNA, 201 bp, Homo sapiens
ggggacgggtcacagggttcttttaccacccacccctatcctccttcccctcttctggcaaaccagactcggtagatgggcagaggctatggaaaacagaygacccccacttctcattcctcctctttggcacggtgaccccagctcctagggaagaaacacggacacaaagaatgactaggacacaggagaccagatacc

SEQ ID NO: 144448 - DNA, 201 bp, Homo sapiens
taggtttgggagagagacttgggggaagaggggtgaggatgcttcttgtttcatccaagtcagaatgggaaataatttactccctgaggacatgaacaggkttgggtcaaaataggactcttcaagtttgaggggtttgtttgggtttggtttggttttgcccagcaaaggttggctgcgagaccctttggccacttattt

SEQ ID NO: 144449 - DNA, 201 bp, Homo sapiens
caatttaaactttttgttatccctgtgttgaggcaattgctctataaaaatcacactgctaatgaagtcagattgtcagagcctggtttagccccaggcayctctttgggcttgtctttattcccatcttcccatgacccccatactttaaccaatgtaaagaaaacttttagactaatttcagtgtatttcactcgaatt

SEQ ID NO: 144450 - DNA, 201 bp, Homo sapiens
cccagcaaaggttggctgcgagaccctttggccacttattttgacattggccactgtcgattgccccctgcgctcctgcctgggtgctgctgtggtgatgyctgtctcctctcctccctgcctatgacagtccagctgagttggattgtggagtgtggcatctggtggttcggggatcagggacttttgaatctggtccta

SEQ ID NO: 144451 - DNA, 201 bp, Homo sapiens
cctgcctatgacagtccagctgagttggattgtggagtgtggcatctggtggttcggggatcagggacttttgaatctggtcctagtaagctgtgtggctmtcagcaacaattaatctttctaggtctcagctgcctcatctttaaaaggtagtaatagaaaagtcttcacactttttttttttttttgagacagtcttgc

SEQ ID NO: 144452 - DNA, 201 bp, Homo sapiens
ttgggaggctgaggcaggaggattgcttgaggccaggagttcaagaccagcctgaccaacatgggggaaccccatctctactaaaaacacaaaaacacaamaaattaggcggatgttgtgtcatatgcctgtagtcccagctactcgggaggctgaggcacgagaatcccttgaacccaggaggcagaggttgcagtgagc

SEQ ID NO: 144453 - DNA, 201 bp, Homo sapiens
aatcccagcactttgggaggccaaggcgggcagatcatgaagtcaggagatcgagaccatcctggctgacacggtgaaaccccatctctactaaaaatacraaaaattagctgggcgtggtggcggacgcctgtggtcccagctacctgggaggctgaggcaggataatggcgtgaaaccaggaggtggaggctgcagtga

SEQ ID NO: 144454 - DNA, 201 bp, Homo sapiens
gggcttctgcctgtgccattaaaattcacctgttttaacaggtatttcaagttggcaaacctggggcttaactctccttggcataaagggagccacagatsacgaggaacttctcagcaaactgtagagatgggaacagcccttgtgccctgccctggggcctccaccaaggcatcaactctggtgcccttgcatcctagc

SEQ ID NO: 144455 - DNA, 201 bp, Homo sapiens
gccttcctgtctcttctgcccaggaggacatgtggggaccagtaagcaggtgtttgccccattagcaagcctgacttatggaaatctgagtttgcaaaatrgaaaaattagccgactattctttgttttacaaaataacccagctgtaggatctgtaaatagtcatcataaaagatagtgtaaaatctgatttgctttaaa

SEQ ID NO: 144456 - DNA, 201 bp, Homo sapiens
tgttttacaaaataacccagctgtaggatctgtaaatagtcatcataaaagatagtgtaaaatctgatttgctttaaaaacaagcaaacaaaaaaggtgaygtgatatccaaacttcccagtttctcaaagttgcaaagaacaagatatctacaaccgcctgcctgtgcctcaccacagagggctgaaaggggttggggga

SEQ ID NO: 144457 - DNA, 201 bp, Homo sapiens
acccacccctgccaactctccctgaacactaggctcttctctgcctgcctttgtaggcatgaggctgccttagaagggtgagattaggagtgctggctgtrctcttgggtaacaatgtcccccccatcacctgtgcgacccaagagaaacttcttttcatccctcagaacctgaattaatgatcacacctcccaccccgcc

SEQ ID NO: 144458 - DNA, 201 bp, Homo sapiens
ctataaaagcctcgtctactcagagtggatatctggttcagaagacaaaaactccttccagctcaggtgttgggaagagaccagaaggctagtgggatggrctttggtctgggggatggtaactcagagtcagttccccgttccccatccatagaaggaagggcttgccctggaggtactaattccccatgcctcggagat

SEQ ID NO: 144459 - DNA, 201 bp, Homo sapiens
ttttaaaaaataaaataaaaagtacaatttcttaccctgcctctagacatactgattattaaaaatctcccgttggggaggggtctggtgtttgggaaccwgcacactccctctcctgacctcccacagcagagggtgaaggctaccaccagctgaccagtcataagactttgtcttctttctgtttctaaaagagatttc

SEQ ID NO: 144460 - DNA, 201 bp, Homo sapiens
ggcccagccccctccccaaagagcccctgagaggggccaggagtggggggaaggccacccgtggccttgtgagactgaagcacaagctccttcctcagctkccagggaagaatttaattaccaattaaagccccctccatctgtttcgggcctgccagagagctctctctaccctttaattacatctctgacaacaattta

SEQ ID NO: 144461 - DNA, 201 bp, Homo sapiens
tgcattcgtttcctgtagctgccatgagttaccatgaactccatggcttgaaacaacagaaatggattcttctgacctatccagtaagtcagaagtcagamatgagtttaactggtcaagaccaacgagttgccagtgctgtgatccctctggaggctccagggagaacctgtccttgattcttccaagctcctggtgact

SEQ ID NO: 144462 - DNA, 201 bp, Homo sapiens
tagcttctggagatttgacatggttatctttggagggatcatttttcagccttccacgttcttcattcagacaacctctctgtattgtcagacataagtgkgcttcctacatcctttttcagggaaggacttgctgccaggtcacaggagtgtggtcagcagttggccatcagctccttcaaggtctgtctcagcgacaga

SEQ ID NO: 144463 - DNA, 201 bp, Homo sapiens
tgtgacaatggaagccatgtgacaatggaggtacctgcaagccaaggataccaaggcctgccagcagccgcagaagccaggagagaggcacagacagcatstcctctgcaaggaaccaaccatgctgacacctggatttcagacttcaagcctccagaactgcgagagtaaatttcttttctttttttttttgggacagag

SEQ ID NO: 144464 - DNA, 201 bp, Homo sapiens
agggagtggagaacagcagggaaggagaggacaaaaagcctctgaagaaagggaaatggcctgtgggtgtgcaaggctgatggggacagatgtgtccagayggagaagatgacagtgtgcatctgatagtctgctggaggaagagggggacacttactctcagtccggctggtcttgttgaagacatttttctcgaaaacc

SEQ ID NO: 144465 - DNA, 201 bp, Homo sapiens
attctcttttacttctaggactctaatccctttgcttcccttgtcttctactgggagccacttaaccgtcaggtgagtgaattttcccaggacagcctggratgggctgggttggcagggcctgagtttatggctacgtctagcgaaggtccccagactgggcaaacatcccagctgggcactctgcctctaaaatagccc

SEQ ID NO: 144466 - DNA, 201 bp, Homo sapiens
ggtaagtggactgcactctggcctcaacgctcaggagggatgctcttggcttagggaactgcctgctgctcttggtccctctccctctgggagattgcctkctagctcctgccccacctgttcagctgctggctccgttggccatctggccagcctcttgcagtagcagtcagttcactgaggcatactacccttgcccac

SEQ ID NO: 144467 - DNA, 201 bp, Homo sapiens
cagcctggttgcaccccctttgggccagtgtcttacttttcttcggtctttggatgttttcttcaatctgttggactccacctcttctcccctctctaggrcgaaaatgtccgaggagaactgctggccctggtgaaggacctgccgagtcagctggctgagattggggcagcggctcagcagtccctgggggaagccatt

SEQ ID NO: 144468 - DNA, 201 bp, Homo sapiens
gggagtagtcacaggtagagaaagtaaagggagcagcaattgaaactcgcccttgaccctgtgtccagtaaggaggtgaagtctgtctggctcactctctccattccctgccatgcccacctccctgctggccctgccattgcttcaaggagggctgttcctcctgggtgagacttttcactcttgaactagagtgccttt

SEQ ID NO: 144469 - DNA, 201 bp, Homo sapiens
gcctggttgcaccccctttgggccagtgtcttacttttcttcggtctttggatgttttcttcaatctgttggactccacctcttctcccctctctagggcraaaatgtccgaggagaactgctggccctggtgaaggacctgccgagtcagctggctgagattggggcagcggctcagcagtccctgggggaagccattga

SEQ ID NO: 144470 - DNA, 201 bp, Homo sapiens
ggcgggggtgggtgctgcagagaagggcagcctgatccgtcttgtggacaggcagggacatgatggagaccccaggtcagccaggtagtcacatggctgcrgcttgggcagaccccagccagataaaactcatctgctttcttcccccatccttcctcggctgactaatcactcttcctgtgattaaaacagaaaagaact

SEQ ID NO: 144471 - DNA, 201 bp, Homo sapiens
ctgatgtcaccaacggggcatgggggagatggaggaaagaaacaacagaagagacgaagaggaaggagggacgacggagcaaaagtgaagacatgatatayggccgaggacatagggtgagaggaaagaaaagaaaagggtggaggaaagagagaggaaggagaattcgaagcataggcttttgcctacttcccttctccc

SEQ ID NO: 144472 - DNA, 201 bp, Homo sapiens
gacgcggagctgcgcctagccgcgcgccccggaggccgcggttgccatggcgacggcggggccgcctgctgtcgccgagcacgctgtctcgcccgctcagygattacctccatctccgcagtgttcgccatacggcccggattctaatcagatcccctcccccctcccccctccctcctccgcccggcccactaccccttc

SEQ ID NO: 144473 - DNA, 201 bp, Homo sapiens
ccaacctcccatactttgggccttgacaccctggcacccaccacaggaccccagatgcgtttcacaactaggttagatgctatagcacagccctactttcrttcattgtgtcgactgtgaacttttctttttggattatcttagtcttgtggggacttcaggagaaaaacagggaggaagggtcctgtgacatatcagggc

SEQ ID NO: 144474 - DNA, 201 bp, Homo sapiens
agcagccgcagaagccaggagagaggcacagacagcatctcctctgcaaggaaccaaccatgctgacacctggatttcagacttcaagcctccagaactgygagagtaaatttcttttctttttttttttgggacagagtctctctgtcgcccaggctggagtgcagtggtgcgatctcggctcactgcaccctccacctc

SEQ ID NO: 144475 - DNA, 201 bp, Homo sapiens
tgtttgtttgttttttgtttttttgagacggagtttcgctcttgttgcccaggctggagtgcaatggtgcaatctcagctcactgaaacctccacctcccrggttcaagcaattctcctgcctcagcctcccgagtagctggaattacaggcacctgccaccatgcctggctaattttttttttttttttttttgtatttt

SEQ ID NO: 144476 - DNA, 201 bp, Homo sapiens
cccgccaatctttgcagccctgcaaagcgcccagcccggctgcggtcccgccagcggggagccatccatcaccgcctgaatgccagccaacccgagcagcyccgccttcctgccagccaatagccggaaggcagggggcgtgcggggctctaagtggtataaaaggggtccgagggccaggccgcgctacctctgcgcccc

SEQ ID NO: 144477 - DNA, 201 bp, Homo sapiens
atttttgtatttttagtagagacagggtttcaccatgttgatcaggctggtctcaaactcctgacctcgtgatccacccgcctcagcatcccaaagtgcckagattacaggcgtgagccaccgtgcccagcgtgttttttgtttttttcagagatgggatttcaccatgttgatcaggctggtctcgaattcctgacctta

SEQ ID NO: 144478 - DNA, 201 bp, Homo sapiens
tctgtctggctcactctctccattccctgccatgcccacctccctgctggccctgccattgcttcaaggagggctgttcctcctgggtgagacttttcacycttgaactagagtgcctttgtatgtggtcagggggagggtggaggaccctgggatctcccaggccttacaaaagtggcggcacataaatacaaacctaaa

SEQ ID NO: 144479 - DNA, 201 bp, Homo sapiens
tcgaactccaaaattatagacccaagtgccttctgcacactttccatctgggggtctcccagcattgccagactaggttcaaagctagaccccctcctccscaacacctgctcagcatcctgcatccctgtctcaggtggtggttcccacctaatcacctaggtgtcatccttagtgtctctctcctccacccaaacagcc

SEQ ID NO: 144480 - DNA, 201 bp, Homo sapiens
tgaagcggaagtggaggaaagatggaggtgtggggacaggagctgggtgtgctggggactggccgcggacccctaacctgtgtctccggtctccctccggragcggctcaacccagcccatcgctctggccccgttctggccctgcagggtggtggttgggacgttgaaatgagcgcgcgagtggtacgtcctctctccgc

SEQ ID NO: 144481 - DNA, 201 bp, Homo sapiens
tgatcccagctgcctaagggattcagcaggtttagggagagtggaaggaagaagagagtcagaaagaggaggagaagaaagatggtcatcagggaagctcyggatttctcttgtgaccctaagcagcttgcatatgacagcctctgggcctctgcctctacaaataggtcccttaaggccatctgccctgggataccccaa

SEQ ID NO: 144482 - DNA, 201 bp, Homo sapiens
aagggagtacagaactaaagagtcacacttttttttttttttttttttttttttttttcagttttcaagatggagtagtatcaatctcaggccctggaaaytgcccctggactagtttcctggcatgcttctccagcctttgtaaacaactgtttcatctgcagactccctgcatcctaatcctccttggggctggaggtg

SEQ ID NO: 144483 - DNA, 201 bp, Homo sapiens
tgagccaagatcacgccactgcactccagcctgggcgacagagtgagactccatctcaaaacacacacacacacacacacacacacacacacacacacacaaagaaacaaacaaaaaaattcccttttgatagacccaaatattgtagcttttctcagagagcaggcgctccttcgtgaggccttggggttatgtacaggg

SEQ ID NO: 144484 - DNA, 201 bp, Homo sapiens
gtgagccaagatcacgccactgcactccagcctgggcgacagagtgagactccatctcaaaacacacacacacacacacacacacacacacacacacacacaaagaaacaaacaaaaaaattcccttttgatagacccaaatattgtagcttttctcagagagcaggcgctccttcgtgaggccttggggttatgtacagg

SEQ ID NO: 144485 - DNA, 201 bp, Homo sapiens
gctggagaccttaggagtcagttctgggagggacctggggatacagaggggtctctcctgaccctgggatctttgggcttttgccaggattggggaaatgrtctggggggcagggagccttgaatccacagccttcatttcaataacgaccatttaatttgttccttggcagactgaagaacctggggtggggtgggggag

SEQ ID NO: 144486 - DNA, 201 bp, Homo sapiens
gagctgttacctgctctgctgcagctcctggagtcaaggtgaacctgaaacccagcccctcccggctaagtaaacagaagcagaggccggctcaagctgaygaatattcatcatgccagaaatccaatcccagcgcccctgcatccacccagaagccagggttctccagggaccgccacgcaggaggagggaatcccaagg

SEQ ID NO: 144487 - DNA, 201 bp, Homo sapiens
tctccaattggctgtctccattctcccgcccctcccgagctcagccattcggagcctggggtgggcggggcttgaggcctgagtggagcgtaaaccctgaytggctgtacggaaggcggcgacgtggccgaaggatgcccgtttgtgtctaaacggaggctcggccacaacgccactggattggtggtagggcggggcggg

SEQ ID NO: 144488 - DNA, 201 bp, Homo sapiens
gcccagaaaggctatacaatctccacccttcccgtttgtccctgcgacaccctttcaccctcctgtccctccggacctgcaattcttcacaccctctgcakcgcacagggtgctcaggacacatgtgcacggtgggggctggcgatgcttcctcgcccccaccacccgcaagcttgcagagagctgtagtgcccaggatgt

SEQ ID NO: 144489 - DNA, 201 bp, Homo sapiens
aggtgaagtctgtctggctcactctctccattccctgccatgcccacctccctgctggccctgccattgcttcaaggagggctgttcctcctgggtgagayttttcactcttgaactagagtgcctttgtatgtggtcagggggagggtggaggaccctgggatctcccaggccttacaaaagtggcggcacataaataca

SEQ ID NO: 144490 - DNA, 201 bp, Homo sapiens
ccaacacctgctcagcatcctgcatccctgtctcaggtggtggttcccacctaatcacctaggtgtcatccttagtgtctctctcctccacccaaacagcmaatcaattgccaagtcctatacattttcctcctaaatattcctcagatccagcccttccccttcctcctcatatcttgtgtcccagctcaggctataatc

SEQ ID NO: 144491 - DNA, 201 bp, Homo sapiens
gggtaaggtgacaagtgatgagtggggaaagtcagatcctatcatgggtttgagagtcccttaacaatcccagtgtgcaccctaagtggcaaggacagggrttaagagccaaactcctatttggtaccctttccaggtttcggtagagggcgcatcagaggcctgagttcccagatttttggggtgcacaagtgacccagc

SEQ ID NO: 144492 - DNA, 201 bp, Homo sapiens
tcctccacctaaaactcctcttcccacatcacccagctatcttcagctcttcgtttagactcaatgtaggtgttctctttgggacgtctcaccgactctcytccttccccttccctgccctaatcgcccaacacgttgcaggtgctcaaccatgtctattagagaaactgaatgaggaggcaaagcatgacaagtgccaca

SEQ ID NO: 144493 - DNA, 201 bp, Homo sapiens
agaatcacactacaagatgagaggaaaaaccaggaggcaaatcagtggcacaatcctcccctccgccccttctccttgccaagcctcttccctctccgaakgcatcctgcaacatctccaccttccaggtcccttcccactgatagccctcaagtcagaactctccctcagcatggagagccctcagctctgattctttga

SEQ ID NO: 144494 - DNA, 201 bp, Homo sapiens
ctttgggacgtctcaccgactctcttccttccccttccctgccctaatcgcccaacacgttgcaggtgctcaaccatgtctattagagaaactgaatgagraggcaaagcatgacaagtgccacaagagacctgcacactgctctggatggtaaagcgacgcaaggagggaagaaggtatttgcaacggcctcccagatcg

SEQ ID NO: 144495 - DNA, 201 bp, Homo sapiens
atgactcgctttaaaaacagtcaaccactgccgggcgcggtggctcatgcctgtaatcccagcactttgggaggccgaggtgggcgaatcacctgaggtcrggagttcgagaccagcctgaccaacatggagaaaccttgtctccatgtctccatgactaaaaatacaaaaaaataaaaataaaaagtagccgggcatggg

SEQ ID NO: 144496 - DNA, 201 bp, Homo sapiens
ttgaaccccggaggcagaggttgcggtgagcagagatctcactattgcactccagcctgggcaacgagagcgaaactccatctcaaaaagaagacaaaaamcagtcaaccactaagtggcacatctgaattggaacttaagtctgtctgacccactgtccatgccttttgcattatgccaggaaaaaaaaaaaaaacctca

SEQ ID NO: 144497 - DNA, 201 bp, Homo sapiens
tcattcctggttcccaaggaaactaaggggcatcgaagatacacattgtcccagaaagaacccttctggctgccctcctctaccccatggagcctaaaagraggggtccaatggtgagcctccaggtcccagcctcaagcccagattccaaataacaacatttccccatagacagacccttcttactgccccaacctcctg

SEQ ID NO: 144498 - DNA, 201 bp, Homo sapiens
tgttcagtgttttacctgcattcccttttctagtcagtgtcttattattccccattttacatgtgggaaaactgaggcacagaatagtagacttgctcaasaaacttgataacgagaacccaggaccatctgaccacaaagctcagctcttagctctcactgaggaaatatgcatggctctgaagccacaaatctgggccc

SEQ ID NO: 144499 - DNA, 201 bp, Homo sapiens
gatgctggcttcttccactatgaaatgatttagggaaaagctacacactaaagttactggcagtatattatacatgaatcagccacctgcagtgcccagartaggtgaagaagatactttagttctcgaaatcccgtctcttgctttctagacattcactactttcactgcctaagaatcctggaccttctcaaaggcaca

SEQ ID NO: 144500 - DNA, 201 bp, Homo sapiens
ctaagaatcctggaccttctcaaaggcacagaggcctccacgaagaatatttttggccgatactcttcacagcggatgaaggcaagtgtgggccaagggcyggtagtatgtggttggggacatccaatccgaggagtcatagcctctgtggtctctctgaggctccagtggggatgcctacatagaatatttcctgaactt

SEQ ID NO: 144501 - DNA, 201 bp, Homo sapiens
tgtgtctccggtctccctccgggagcggctcaacccagcccatcgctctggccccgttctggccctgcagggtggtggttgggacgttgaaatgagcgcgygagtggtacgtcctctctccgcgctcacgcccccctcctcaccgtgtttcccgccaggaccatcagcacgtgcccatcgacatccagaccagcaagctgc

SEQ ID NO: 144502 - DNA, 201 bp, Homo sapiens
tctgcctgtacctgtaatcccgactgctccaggctggaggtgagacctttcctagagaagcagttgagtgtaggagctgcctgggagggtgagactcgggmagcaagtggtgcctccgggctgctgtatcaggcaaggctcagccaggagaggtgggtaggagcagctgcacgtcaggtgcaagagaaacaggtgcaagag

SEQ ID NO: 144503 - DNA, 201 bp, Homo sapiens
agaatcaacatctaaatgaatctctctccttcagatggaggctatatagttggttttttggtaactttttattttgataaatttcaaacttataaaaaaawgtcaaaaatagtacaaagaactcccatgtgccctttacccagattcatcaattgtttacattttgctccattcatttcatccttatctatctacatgttt

SEQ ID NO: 144504 - DNA, 201 bp, Homo sapiens
tggccacccttgtcagatgcatcccagcaacttccttcaagaggccctgggatgaggggtgagggtgggagagtgacctggctagaaaactccacagagcrctgaaacctctgcttctccttataggggtggctatgtcctgtaccctcaggtgatggagttctggcaaggtcaaaccaaccgcctgcatgaccggatagt

SEQ ID NO: 144505 - DNA, 201 bp, Homo sapiens
agtgagccaagatcacgccactgcactccagcctgggcgacagagtgagactccatctcaaaacacacacacacacacacacacacacacacacacacacacaaagaaacaaacaaaaaaattcccttttgatagacccaaatattgtagcttttctcagagagcaggcgctccttcgtgaggccttggggttatgtacag

SEQ ID NO: 144506 - DNA, 201 bp, Homo sapiens
cagtgagccaagatcacgccactgcactccagcctgggcgacagagtgagactccatctcaaaacacacacacacacacacacacacacacacacacacacacaaagaaacaaacaaaaaaattcccttttgatagacccaaatattgtagcttttctcagagagcaggcgctccttcgtgaggccttggggttatgtaca

SEQ ID NO: 144507 - DNA, 201 bp, Homo sapiens
ttatcttgttgcactgttattttatggcatggggtcatgccctgcataaaagaaatgaaactccaaaaatcagcatctaccttctcccctacttcctcccytttttttttttttaaggctgggcacggtggctcatgcctgtaatcccagcactttgggaggccgaggcgggtggatcacctgaggtcaggagttccagac

SEQ ID NO: 144508 - DNA, 201 bp, Homo sapiens
cagaatcccaaaaatctcaggcctttcccagcccctagtcaccctgcctcctgaaggcctgtcacctacctgaaggcagctccactagagtgacagctccygttggccctggctggctcagggcctctggggagggtatggggggatggtgggttgggagagaacttttgtggggcctccttcagtcaatggtctacagct

SEQ ID NO: 144509 - DNA, 201 bp, Homo sapiens
caaatgcagaaactgtgctctgagagcaaatgccagtcagctatgggttagagtcagcctcagtagggagactggcacaatacccagcttttttttttttkttttttgttttttgtcctgtttttgtttttgtttttgagatggagtcttgctctgtcacccaggctggagtgcagtggcgccatctcggctcactgcaac

SEQ ID NO: 144510 - DNA, 201 bp, Homo sapiens
ctgacacggtgaaaccccatctctactaaaaatacaaaaaattagctgggcgtggtggcggacgcctgtggtcccagctacctgggaggctgaggcaggakaatggcgtgaaaccaggaggtggaggctgcagtgagctgagatcgcgccactgcaccccagcctgggcgacagagcgagactccgtctcaaaaaataaat

SEQ ID NO: 144511 - DNA, 201 bp, Homo sapiens
ggccaaggcgggcagatcatgaagtcaggagatcgagaccatcctggctgacacggtgaaaccccatctctactaaaaatacaaaaaattagctgggcgtkgtggcggacgcctgtggtcccagctacctgggaggctgaggcaggataatggcgtgaaaccaggaggtggaggctgcagtgagctgagatcgcgccactg

SEQ ID NO: 144512 - DNA, 201 bp, Homo sapiens
gaggccaaggcgggcagatcatgaagtcaggagatcgagaccatcctggctgacacggtgaaaccccatctctactaaaaatacaaaaaattagctgggcrtggtggcggacgcctgtggtcccagctacctgggaggctgaggcaggataatggcgtgaaaccaggaggtggaggctgcagtgagctgagatcgcgccac

SEQ ID NO: 144513 - DNA, 201 bp, Homo sapiens
tgagccaagattgcaccactgcactccaacctgggtgacagagcgagactccgtctcaaaaaataaataaataaataaaaataggctgggcgtggtggctyacgcctgtaatcccagcactttgggaggccaaggcgggcagatcatgaagtcaggagatcgagaccatcctggctgacacggtgaaaccccatctctact

SEQ ID NO: 144514 - DNA, 201 bp, Homo sapiens
ggtagatgggcagaggctatggaaaacagatgacccccacttctcattcctcctctttggcacggtgaccccagctcctagggaagaaacacggacacaargaatgactaggacacaggagaccagataccaggctggggcagccccagtcagccctgggagatgtcagagaaactggagggagggggcctttgtggggtg

SEQ ID NO: 144515 - DNA, 201 bp, Homo sapiens
tgcagaaggtccttccgggcccaagttctgtcatgcactgactgctccagagcccgagtcggagtgtatcacagaacctgggccgggggggacagcgggcygagcctccttcttccagctgatccctggccgggctggacctgcgctatcagcgcgcccccaggccctggcccgggtagactccagaagcatgcccatcac

SEQ ID NO: 144516 - DNA, 201 bp, Homo sapiens
gaggagtagtgtccttacaggaagaatgtcatgtgacaatggaagccatgtgacaatggaggtacctgcaagccaaggataccaaggcctgccagcagccrcagaagccaggagagaggcacagacagcatctcctctgcaaggaaccaaccatgctgacacctggatttcagacttcaagcctccagaactgcgagagta

SEQ ID NO: 144517 - DNA, 201 bp, Homo sapiens
ccgagatgcgggagcagttctaccactcctgcaagcagtatggcatcacggtgagcggcggcagcctcttcgcagccagaggacacctgggcccctgcttrtcttcctctgaccccgtctgacccctcagcctggttgcaccccctttgggccagtgtcttacttttcttcggtctttggatgttttcttcaatctgttgg

SEQ ID NO: 144518 - DNA, 201 bp, Homo sapiens
atggcatcacggtgagcggcggcagcctcttcgcagccagaggacacctgggcccctgcttgtcttcctctgaccccgtctgacccctcagcctggttgcrccccctttgggccagtgtcttacttttcttcggtctttggatgttttcttcaatctgttggactccacctcttctcccctctctagggcgaaaatgtccg

SEQ ID NO: 144519 - DNA, 201 bp, Homo sapiens
gccaatgctgcggttcgtgcagaagcggggaaactcaacggtgtacgagtggaggacagggacagagccctctgtggtggaacgaccccacctcgaggagmttcctgagcaggtggcagaagatgcggtaagatgggccttgtgatgagctgtaggagtggagtgggagctgcttgtcccctccccacccccaacagccca

SEQ ID NO: 144520 - DNA, 201 bp, Homo sapiens
aacctctgcctctcagcctcaagcgatcctcccaagtcagcctccaagatagctgggattacaggtttgcaccaccactcctagctaattttttattaacrtctttgtagggacaggattttgccatattgcccaggctggtctcaaactcctgggctcaagcaatccactatcctcggcctcccaaagtactggggttac

SEQ ID NO: 144521 - DNA, 201 bp, Homo sapiens
catcttcccggaatcagattcaaaggtgaggaggccttctcagtctgtctctctctgatcactactctaaccataagaaaagtgtcatttgtgtctgtaamggcatcacttgaagttcatagctctaagaccaggtatagtccaagggaggcagagtttcacacgtcacatgtcagagttttgttttgttttttgagacag

SEQ ID NO: 144522 - DNA, 201 bp, Homo sapiens
agataggtattatttcagcccccttttacagaagaggaaactgaggctcagagtacaagcaaatgttcccaaggtcacccagctactaaggggtagagccygagtttgaatcttaatcccaaaccaaaccactgaaactttggggtcaatcaccaaaggtctgccctactctcttagagcacctgacgggctctctgttga

SEQ ID NO: 144523 - DNA, 201 bp, Homo sapiens
ctcctgggttcaagctattctcctgcctcagcctcccgagtagctgggattacaggcatgcaccaccacgcacagctaattttatatttttttagtagagwtggggtttctccatgttggtcaggctggtctcgaactcttgacctcaggtgatccacctgcctcggcctcccaaatgctgggattataggtgtgagccac

SEQ ID NO: 144524 - DNA, 201 bp, Homo sapiens
atcaaatttaggaaagaggagagcacgacgcaggcctagactttacgatgagctgaatgcctgcatccatacccctcgtgctctggtctcctgctccccamcccctccctcagagcacacagccggtggattccttcccacctctctgtctgggaagcagctcccacattgccagctctgtccctttagctgggctcaagt

SEQ ID NO: 144525 - DNA, 201 bp, Homo sapiens
ggtgtgagtgctatttgtgtcctacagcaggagcctcacgtattagatgcctcctattcatccagttacttatcaggtacctcctaggcacctggcactaycttaggcaccagaacttgggtggtgaataagacagtcaaagtccttgacctcatggagcttatattctaatggggaatgcagactggaaagaagataaat

SEQ ID NO: 144526 - DNA, 201 bp, Homo sapiens
ggtaggggaaagaggctttgggtaaggcagcacccctgagcctgacttccatccctccagctcctggtctcccttactcatcatttgaggtccccctggcygggacgaggcacctaacaaagcctcccttgtataggtctgtttgtttcactaataaattccctgagcaacagctcctggggtggggtggcccagcagcct

SEQ ID NO: 144527 - DNA, 201 bp, Homo sapiens
agagatgtagcgtctgaaccttggtttgcctctgagtgaactgggaagctgttggaggtttcgagcaggttaggaacatgatctcatttgtgtttaaggaygatccctgtggctaaggtgttgagcagcccagcgtaaggagccagcgttcttggacctttgttgtaaggctgggaggacggggtcctgtctttgttaatc

SEQ ID NO: 144528 - DNA, 201 bp, Homo sapiens
ctgagagattttgccacttatccaaggtcacagagcttgcaactgatagaactaggattcaaagccaggtctgtttccttcaatactgcatgagatacccraggctgggcacagtagctcatgcctgtaatcccagcactttgggaggccaaggtgggcagatagcttgagcccaggagttcgagaccagactgggcaaca

SEQ ID NO: 144529 - DNA, 201 bp, Homo sapiens
ccagcctggtctcaaactcctgacctcaggtgatccacctgcctcagcctcccaaaatgctgagattacaggtgtgagccaccatgcctggcccacacttytttttaaaaagaaggaccaggctgggcaacggtggctcatgccagtaaccccagcactttgggaggctgaggttggaggatcacttgagctcaggagttc

SEQ ID NO: 144530 - DNA, 201 bp, Homo sapiens
tcttctggcaaaccagactcggtagatgggcagaggctatggaaaacagatgacccccacttctcattcctcctctttggcacggtgaccccagctcctarggaagaaacacggacacaaagaatgactaggacacaggagaccagataccaggctggggcagccccagtcagccctgggagatgtcagagaaactggagg

SEQ ID NO: 144531 - DNA, 201 bp, Homo sapiens
cagggccaggttggcgataacaggctcttgtggagcgtgacccattttccttctggaggagaagacagtcgggtgagaagctgcaggacaggtttgggggrcgggtcacagggttcttttaccacccacccctatcctccttcccctcttctggcaaaccagactcggtagatgggcagaggctatggaaaacagatgacc

SEQ ID NO: 144532 - DNA, 201 bp, Homo sapiens
caattggaggagcccagtcatcatctctaaatcttttatttatttatttatttagacagtcttgctctgtcgcccaggctggagttcagtggcgcgatctyggctcactgcaacctccacctcccaggttcaagcaattctcctgcctcagcctcccaagtagctaggattacatgcgtgtgccaccatgcctggccaatt

SEQ ID NO: 144533 - DNA, 201 bp, Homo sapiens
gagaattgctttagcctgggaggtggagggtgcagtgagtggtgtttgtaccactgctttccagcatgtagcaagagagtgagactcaactggaaggaagraaggaaggaagggagggaggggaaagaaggaaaggagtgctaatttgcggacttaggataagtagcagttagtccaaggatgtggaagggagggtggaga

SEQ ID NO: 144534 - DNA, 201 bp, Homo sapiens
acactttgcaggtgggctcccaagagtgcaggctggaacttatgaccttgccaattggaggagcccagtcatcatctctaaatcttttatttatttatttwtttagacagtcttgctctgtcgcccaggctggagttcagtggcgcgatctcggctcactgcaacctccacctcccaggttcaagcaattctcctgcctca

SEQ ID NO: 144535 - DNA, 201 bp, Homo sapiens
gccaacatgctgaaaccccatctccactaaaaatacaaaaaaaaaaaaaaagcaaagtcactggtcccttgaatttgcttccatccttcccctccccccccacacacatacacacacacacaaaaaccctgggagaatttcttagacctcaagtgccaaaacatgtcaagggtgtggctaaagtggctttagccacaaact

SEQ ID NO: 144536 - DNA, 201 bp, Homo sapiens
gaggccaaggcgggtggatcacttgaggtcaggagtttgaggccagcctggccaacatgctgaaaccccatctccactaaaaatacaaaaaaaaaaaaaaagcaaagtcactggtcccttgaatttgcttccatccttcccctccccccccacacacatacacacacacacaaaaaccctgggagaatttcttagacctca

SEQ ID NO: 144537 - DNA, 201 bp, Homo sapiens
acacacacacacacacacacttcctaggccaagagagaaggagacccttggcagaagacaaaagcaggtttattagggccctggggccaggaatgcctaaratatgagttaaggccagggccgtgagaaaaggtgactctcctgaggccaaacctttgcatctcagaagccctggctggagaccttaggagtcagttctgg

SEQ ID NO: 144538 - DNA, 201 bp, Homo sapiens
aggctgagacaggagaatcgcttgaacccaggagacggaggttgcagtgagccgagatcgcgccattgcactccagcctaggcaacaaaagtgaaactccrtctcaaacaaaaacaaaaacaaaaaaacagtgcctggcacagtaaggctcagactagctgttgtgagagggcggtggggtggaaataccctcagctgagg

SEQ ID NO: 144539 - DNA, 201 bp, Homo sapiens; identical to SEQ ID NO: 26708

SEQ ID NO: 144540 - DNA, 201 bp, Homo sapiens
taggaagacaaacatgtaatacagtgtgttggtgattagcacgttcttgagatctggactgcctgggtcaaactctgtctctgttcttactcccttgggcragttgctggacctctctgcctcatttccttcacctgtaaaatgaagacgaagaccttgggtaggaagctgtggtgagcatgcacaccacttagaacagtg

SEQ ID NO: 144541 - DNA, 201 bp, Homo sapiens
ctgttattttatggcatggggtcatgccctgcataaaagaaatgaaactccaaaaatcagcatctaccttctcccctacttcctcccttttttttttttttaaggctgggcacggtggctcatgcctgtaatcccagcactttgggaggccgaggcgggtggatcacctgaggtcaggagttccagaccagcctggccaac

SEQ ID NO: 144542 - DNA, 201 bp, Homo sapiens
atccacccacctcggcctcccaaagtgctggtattacaggcatgaaccaccatgcctggcctaaacttattttatttatttattttttttttgagacagarcctcactctgtcacccaggctggagtgtagtggcgtgatcttagctcactgcaagctctgccgcccaggttcaagcgattctcctgcctcagcctcccga

SEQ ID NO: 144543 - DNA, 201 bp, Homo sapiens; identical to SEQ ID NO: 26710

SEQ ID NO: 144544 - DNA, 201 bp, Homo sapiens
tcctgacctcaggtgatccacccacctcggcctcccaaagtgctggtattacaggcatgaaccaccatgcctggcctaaacttattttatttatttatttwttttttgagacagagcctcactctgtcacccaggctggagtgtagtggcgtgatcttagctcactgcaagctctgccgcccaggttcaagcgattctcct

SEQ ID NO: 144545 - DNA, 201 bp, Homo sapiens
agggtttaaatgagctcttacggtgggtgcatctgctgtgggcctgcgcactacagctctcctgccttttccctgcatgccggaggcctcctctccctgtyctgatggctggctgtggattctcttttacttctaggactctaatccctttgcttcccttgtcttctactgggagccacttaaccgtcaggtgagtgaatt

SEQ ID NO: 144546 - DNA, 201 bp, Homo sapiens
ttatgtgaggcccagagaggttgagtaacttgccctaggtcacccagctttaggtggtaaggtagaacacgtaccctgggatgactcccatgagcacctgygttcttatctgctctgcttattactccctaccctctttccactctaaaaattgccttgcagctgcattcattccagcatggtatgaggaaacatggggaa

SEQ ID NO: 144547 - DNA, 201 bp, Homo sapiens
tgccaagaaaaatagccatgctgtttctcggtttgttcagaggaagccttacctctcttcccttctggagtttgggaatggaaaaaatgactcaaggaatmcccagcggagctaccatgtatgtactgcattgcaaaataggggtaccatattttgctctcccctacctggcagtatgcgccacacatggggctccgtggt

SEQ ID NO: 144548 - DNA, 201 bp, Homo sapiens
agtgaactgggaagctgttggaggtttcgagcaggttaggaacatgatctcatttgtgtttaaggacgatccctgtggctaaggtgttgagcagcccagcrtaaggagccagcgttcttggacctttgttgtaaggctgggaggacggggtcctgtctttgttaatctctgtatctgctcccttcccagtagcctgctggt

SEQ ID NO: 144549 - DNA, 201 bp, Homo sapiens
tacaaatggttcagtaaggggctctgggatggctacgtgtgggcccctttccataaccaggcccaggccgcccgactcaggccagaagccctgggggagcrgtcaagcagcagccttgttggagccagcaaagctgcattttccttttaatcacagcttacctccaggcagagggaaaatgcggtttggggaggaagggtc

SEQ ID NO: 144550 - DNA, 201 bp, Homo sapiens
cagaccgggttcaggcctccaaagcttctgcccctgcgcttgcagatgagcacctgacctgctttcccagccctgcctaaggtcagcgaggggaagcagtrctcactgaggtttggctattttcccaggaagggaagtgggtttagatagagttttctcagctgattttggcccccttggtaagcagtgtggttaggccac

SEQ ID NO: 144551 - DNA, 201 bp, Homo sapiens
cttgtgtatctcagaatgccctcagaagtcgttgtagggacagaatgagttaagatatgcagagctcttagaacgctgcctggtgcggaggaggctcttgstggacatgtgtgagctcttatttttggtttggggaaccatgatgaggactctccatcctggcctaacttgtcttcttggaaaggagaggtgaggggcttt

SEQ ID NO: 144552 - DNA, 201 bp, Homo sapiens
ctgctctttgctcctagagatggaaaaccctctgctcgcatgttgctgctgaagggcttcgggaaagatggcttccgcttcttcactaacttcgagagtcraaaaggaaaagagctggtgggtgaaaagagctagtaatctttcccagggcctgcagggtttggctcttgcttcctcagtcaccttcttatgccaccccac

SEQ ID NO: 144553 - DNA, 201 bp, Homo sapiens
tggtcaggctggtgttgaactcctgacctcatgatccacccgcctcagcctcccaaagtgctgggattacaggcgtgagccaccgtgcctggcaacctaarcttattttttaatagagacagggtctcactatgttgtccaggctgatctcaaactcctagcctcaagggatcctcctgcctcagcctcccaacgtgctgg

SEQ ID NO: 144554 - DNA, 201 bp, Homo sapiens
cttgacccccgattcagatgaggcccaaatgcatctctgtggacatctccagttgtccctgcagaattagtcactccatccctcagcagcatcctgcagcsccatgcagatatccttaggaggggggagctcttatttattgtgttatatgccttcctgaagtgcctgcccactgagctgcttgcgggcaggaatggtgtc

SEQ ID NO: 144555 - DNA, 201 bp, Homo sapiens
ttgtaactgacccaccttgctaaaaaaggtcttttgggtgccagaaactgacatgacactttgcaggtgggctcccaagagtgcaggctggaacttatgamcttgccaattggaggagcccagtcatcatctctaaatcttttatttatttatttatttagacagtcttgctctgtcgcccaggctggagttcagtggcgc

SEQ ID NO: 144556 - DNA, 201 bp, Homo sapiens
atctgcctgtgtcctccagatgcccttcctccctggtgactgccagggcctctctgagtaaattggccctgagtaaactcttacttagccagcccgccacsctcctctcattccccaggcttcaaagaaaaccagtttgaatatttaaacttctcctgtgtatctaataaaaagttctgcactacttaacgccccagctat

SEQ ID NO: 144557 - DNA, 201 bp, Homo sapiens
aggccaaggcgggtagatcacttgagatcaggagtttgagactagcctggccaacatggtgaaacaccgtctctactaaaaatacaaaacttagccgggcrtggtggcgggcgcctgtaatcccagctacccgggaggctgaggcagagaattgcttgaacccgggaggtggaggttgcagtgagccgagatcgcgccact

SEQ ID NO: 144558 - DNA, 201 bp, Homo sapiens
gccacaggaaggaagcggcacctgatggtgatcttggcactctccatgttctctacaagaagctgtggtgattggccctgtggtctatcaggcgaaaaccmcagattctccttctagttagtatagcggacttaataaaagaggaaaaaactcttgcttcagtactgacagttccttatgctgcttctctgagcctgcagt

SEQ ID NO: 144559 - DNA, 201 bp, Homo sapiens
tgaggaggcagatgtcctgtctgtgagccagttccagctggctccagccatcctgcagggccagaccaaagagaagatggttaccatggtgtcagtgctgkaggatctgattggcaagcttaccagtcttcagctgcaacacctgtttatgatcctggcctcaccaaggtctggcttccccttgatgcaaggctctgccat

SEQ ID NO: 144560 - DNA, 201 bp, Homo sapiens
ttctccccaggaagtcaaggctgcagtgaaccgtattcatgccactgcactccaggctgggtgacagagcaagacccagtctcaaaaaaaaaaaaaaaaaatcagatgtctagacaaagagaaattgtggatctggtcaaatggaatcagatccctcttgctacttctttttctttcatttgaagtgtatgtgtctatttt

SEQ ID NO: 144561 - DNA, 201 bp, Homo sapiens
gagctcagccattcggagcctggggtgggcggggcttgaggcctgagtggagcgtaaaccctgattggctgtacggaaggcggcgacgtggccgaaggatkcccgtttgtgtctaaacggaggctcggccacaacgccactggattggtggtagggcggggcgggccacagtctccagcctgaagcggaagtggaggaaag

SEQ ID NO: 144562 - DNA, 201 bp, Homo sapiens
cagctacctggaggttgaggctgcagtgagccatgatcacgccactgtactccaacctaggcgacagagcaaaactctgtcccttaggaaaaaaaaaaaaaggctaggcatggcggctcaatcctgtaatcccagcactttgggaggctgaggcaggaggatcacttgagcccaggagtttgagaacagcctggacaacaa

SEQ ID NO: 144563 - DNA, 201 bp, Homo sapiens
taggaggctgaagcgggagaatcacgaggtcaggaaatcgagaccatcctggctaacacggtgagacctcgtctctactaaaaatacaaaaaaattagcckggcgtggtggcgggcgcctgtagtcccagctactggggaggctgaggcaggagaatggcgtgaacccaggaggcagagcttgcagtgagccgagatcgtg

SEQ ID NO: 144564 - DNA, 201 bp, Homo sapiens
agggctggagtgcagtggtgcgatcttggctcactgcaacttccatctcccgggttcaagcgattctcctgcctcagcctctgagtagctgggaccagagrcgcacgtcactatgcccagctaatttttgtatttttagtagagacggggtttcaccatgttggtcaggcttgtctcaaacttctgacctcgtgatctgcc

SEQ ID NO: 144565 - DNA, 201 bp, Homo sapiens
ggactgcaggcatgcaccaccacgccgggatggtttttgtttttgtttgtttgtttgttttttgttttgttttgtttttgagatggagtctcactctgtcrcccaggctggagtgcggtggcgcaatatcggctcactgcaacctccgcctcccgggttcaagcagttctcctgcctcagcttcctgagtagctgggatta

SEQ ID NO: 144566 - DNA, 201 bp, Homo sapiens
ccaacaggcctgggtttgaatcccagcctcatcaactacccactgtatgattttccttttttttttttttttgagtctttctctgtttcccaggctggagygcagtagcacaatcttggctcattgcaacctctgcctcccaggttcaagggattcttctgcctcagcctcccgagtagctgggattacaggcatgtgcca

SEQ ID NO: 144567 - DNA, 201 bp, Homo sapiens
acagagaagaagaatgcaggctgggtagcccaacaggcctgggtttgaatcccagcctcatcaactacccactgtatgattttccttttttttttttttttgagtctttctctgtttcccaggctggagcgcagtagcacaatcttggctcattgcaacctctgcctcccaggttcaagggattcttctgcctcagcctcc

SEQ ID NO: 144568 - DNA, 201 bp, Homo sapiens
tgctgactcatagtcagccatgcattttacaataatcccacaatgtctgccctggattttctttctgcctaacttcctgttcagccttcttttaaaaagcyttgcctctgtgctctctttttacttatctctttctttgaaatggatcacgtctagaatttgtgggtttcagggaaatctgccatcccaagggtccttctc

SEQ ID NO: 144569 - DNA, 201 bp, Homo sapiens
cacagagaagaagaatgcaggctgggtagcccaacaggcctgggtttgaatcccagcctcatcaactacccactgtatgattttccttttttttttttttttgagtctttctctgtttcccaggctggagcgcagtagcacaatcttggctcattgcaacctctgcctcccaggttcaagggattcttctgcctcagcctc

SEQ ID NO: 144570 - DNA, 201 bp, Homo sapiens
ggaggttgcagtgggctgagatcacaccactgcactccagcctgggtgacagagcgagattctgtctcaaaaaaaaaaaaggaaagaaagaaagaaagaaaaaagcaacacagtggttacactccgggcagcaagaggcccaaggctgctatgtttccagagcttccagcctagcaggcagatacaccacacacacacagg

SEQ ID NO: 144571 - DNA, 201 bp, Homo sapiens
ggccaacatgctgaaaccccatctccactaaaaatacaaaaaaaaaaaaaaagcaaagtcactggtcccttgaatttgcttccatccttcccctccccccmcacacacatacacacacacacaaaaaccctgggagaatttcttagacctcaagtgccaaaacatgtcaagggtgtggctaaagtggctttagccacaaac

SEQ ID NO: 144572 - DNA, 201 bp, Homo sapiens
aggaggttgcagtgggctgagatcacaccactgcactccagcctgggtgacagagcgagattctgtctcaaaaaaaaaaaaggaaagaaagaaagaaagaaaaaagcaacacagtggttacactccgggcagcaagaggcccaaggctgctatgtttccagagcttccagcctagcaggcagatacaccacacacacacag

SEQ ID NO: 144573 - DNA, 201 bp, Homo sapiens
ttcatagagttaggtttgctatcaaagctggggcctcctccctgtctgaataccaccatctgctgggctttgagcaagccgttctgccctctgagcaatcrggcccgaggagctgcgtccagggtagctgtcccgcctggcagagcctgagcccagcaggagggcatcaaggctgctgcaggcgtgtagagcccgggggca

SEQ ID NO: 144574 - DNA, 201 bp, Homo sapiens
gagagagggagagagagaaacaagtaggctataattatcctagcaaccctctcctggaatgggggcgggggtgggtgctgcagagaagggcagcctgatcygtcttgtggacaggcagggacatgatggagaccccaggtcagccaggtagtcacatggctgcggcttgggcagaccccagccagataaaactcatctgct

SEQ ID NO: 144575 - DNA, 201 bp, Homo sapiens
ttaggtaaagtggcccggcctgggagccctggtatccatggggaagcccactctcagagttctgagataccaggcttataggaggcacagtctgtgagtgrgaagagactggagtgtagatgttgcccatttgtaggtggtaaaatcaattgtttttgatggaattgattttccctgagtggagtgctgggggaaggagga

SEQ ID NO: 144576 - DNA, 201 bp, Homo sapiens
agaagctgtccccaggagatgccaggagatgtccccaggagatgtcctctctctccagcccagtgaaaacagtgaaaaggacagtgagaagggaaagtggkggtagggagaggggaaataggcctcctctgtccatctggccatcctgttgactgctcctggaggacagaggccagtctgctctgctcacccatgtcccca

SEQ ID NO: 144577 - DNA, 201 bp, Homo sapiens
ctgagtgctacttccactcccgccccaagagcagccagattggggctgtggtcagccaccagagttctgtgatccctgatcgggaggtgagtggagctccrctgtagtcctccaggtggtggaggctttggcttatccccagaagctgtccccaggagatgccaggagatgtccccaggagatgtcctctctctccagccc

SEQ ID NO: 144578 - DNA, 201 bp, Homo sapiens
cagccttgtacagaacttagtgttccagaatgggtttctggaaggaggtgggggagagcagagaaggaggaacagggcacttgcttggtctgtgggtgccygagtcactgccttgtctggaatgaggcccacagccccaccactgcccatttggggctgccaaggaacttggggaatggaaaaacagaagatccagctcct

SEQ ID NO: 144579 - DNA, 201 bp, Homo sapiens
aatgccattcacccagagccatccctgagcaggtgcgtgtggaaggccctgtgaagaaactgcctgaggaggaggctgagtgctacttccactcccgcccsaagagcagccagattggggctgtggtcagccaccagagttctgtgatccctgatcgggaggtgagtggagctccgctgtagtcctccaggtggtggaggc

SEQ ID NO: 144580 - DNA, 201 bp, Homo sapiens
gacttaggacctgttagcttggttgggcgactggcaaatccttccttccccggggtagaagtccagggtgagaaattggttccgaactcaaaggaacccartgccgggccacagccgggtcacgtggccggcggccccccatgacgtgctggctgcggggcgtcacggcgacgttcgggcgacctgccgagtggccaggct

SEQ ID NO: 144581 - DNA, 201 bp, Homo sapiens
acagtctcccatagtttgacatcaggttagtctcttgtttggcttgactttggctaacattgaaatcaacttctatcttcatgagtggggcgctagtaagrggaagggctaggggaatgggatccctgggaatatgctgggggaagggagtgagaagttggtcagagttctagccatgctgggtgccatctggggctgatg

SEQ ID NO: 144582 - DNA, 201 bp, Homo sapiens
gaggaggttgcagtgggctgagatcacaccactgcactccagcctgggtgacagagcgagattctgtctcaaaaaaaaaaaaggaaagaaagaaagaaagaaaaaagcaacacagtggttacactccgggcagcaagaggcccaaggctgctatgtttccagagcttccagcctagcaggcagatacaccacacacacaca

SEQ ID NO: 144583 - DNA, 201 bp, Homo sapiens
ggaggaggttgcagtgggctgagatcacaccactgcactccagcctgggtgacagagcgagattctgtctcaaaaaaaaaaaaggaaagaaagaaagaaagaaaaaagcaacacagtggttacactccgggcagcaagaggcccaaggctgctatgtttccagagcttccagcctagcaggcagatacaccacacacacac

SEQ ID NO: 144584 - DNA, 201 bp, Homo sapiens
aatcgcttgaacccaagaggaggaggttgcagtgggctgagatcacaccactgcactccagcctgggtgacagagcgagattctgtctcaaaaaaaaaaaaggaaagaaagaaagaaagaaaaaagcaacacagtggttacactccgggcagcaagaggcccaaggctgctatgtttccagagcttccagcctagcaggca

SEQ ID NO: 144585 - DNA, 201 bp, Homo sapiens
tgtgacgacacactctggagatgtcgtcatgggatatggaaggtggtgggcccctcactcaacatacttttacttcctttgaggcctaggactgtgtcttygtgataaggtgctcagggtgcataaagttgaactccaatggaaaagaggtgaatggatgggtggtttggtagtatccttggttttccttttcttagcaga

SEQ ID NO: 144586 - DNA, 201 bp, Homo sapiens
gtggtgcgatctcggctcactgcaccctccacctcccgggctcacgccattctcctgcctcagcctcccgagtagctgggactatagacgcccgccaccaygcccagctaattttttgtatttttagtagagacagggtttcaccgtgttagccagagtggtctcgatctcctgacctcaggtgatccacccgcctcggcc

SEQ ID NO: 144587 - DNA, 201 bp, Homo sapiens
tctgtgggtgcccgagtcactgccttgtctggaatgaggcccacagccccaccactgcccatttggggctgccaaggaacttggggaatggaaaaacagargatccagctcctgagactatcataaccaccagattttctagctccagagagaaaagggcttctgcctgtgccattaaaattcacctgttttaacaggtat

SEQ ID NO: 144588 - DNA, 201 bp, Homo sapiens
gcctcccgggttcaagcgattcttctgcctcagcctcccaagtagctgggattacaggtgcagtagagcctgggtttcacagcattggccaggctggtctygaactcctgacctcaggtgatccacccacctcggcctcccaaagtgctggtattacaggcatgaaccaccatgcctggcctaaacttattttatttattt

SEQ ID NO: 144589 - DNA, 201 bp, Homo sapiens
cttgaacccaggaggcagaggttgcagtgagctgagatcatgccactgcattccagcctgggcgacacagtgagactcttttctcaaaaaacaacaacaamaaaaaaagagaataccctttttgccaggccttcctgtctcttctgcccaggaggacatgtggggaccagtaagcaggtgtttgccccattagcaagcctg

SEQ ID NO: 144590 - DNA, 201 bp, Homo sapiens
ggagtagtcacaggtagagaaagtaaagggagcagcaattgaaactcgcccttgaccctgtgtccagtaaggaggtgaagtctgtctggctcactctctccattccctgccatgcccacctccctgctggccctgccattgcttcaaggagggctgttcctcctgggtgagacttttcactcttgaactagagtgcctttg

SEQ ID NO: 144591 - DNA, 201 bp, Homo sapiens
agaggctgccaaggggtctaactcaaacctacaaggcagggagttccattgcgttccccttccatgcaaccagcaccctgactccacccctgtgcttgccygtgtccctgctcgcgcctgccacatcagattccccaggctccctcacccccccgtgcaatttaaagcagattcatcccctgagagccccagtttccaggc

SEQ ID NO: 144592 - DNA, 201 bp, Homo sapiens
agggagtagtcacaggtagagaaagtaaagggagcagcaattgaaactcgcccttgaccctgtgtccagtaaggaggtgaagtctgtctggctcactctctccattccctgccatgcccacctccctgctggccctgccattgcttcaaggagggctgttcctcctgggtgagacttttcactcttgaactagagtgcctt

SEQ ID NO: 144593 - DNA, 201 bp, Homo sapiens
tccctctgcacacgaatcttcctccccagattcaactgttttcaggctactccctctgtctgccccctgtacacgactgtctccccagatcctgctgtttmtaggttcccccatatttccccggtatacaaattggcctccctggattcagcagtttccagaagccccttgctctctcactaggcagttccatctccccag

SEQ ID NO: 144594 - DNA, 201 bp, Homo sapiens
ccagggagtagtcacaggtagagaaagtaaagggagcagcaattgaaactcgcccttgaccctgtgtccagtaaggaggtgaagtctgtctggctcactctctccattccctgccatgcccacctccctgctggccctgccattgcttcaaggagggctgttcctcctgggtgagacttttcactcttgaactagagtgcc

SEQ ID NO: 144595 - DNA, 201 bp, Homo sapiens
aaaaaaaaagcaaaaaaaaaaaaagcaaggtgtcgtggtgtgcacctatagtccaagctacatgggaagctgaagtaggaggatcacttctccccaggaartcaaggctgcagtgaaccgtattcatgccactgcactccaggctgggtgacagagcaagacccagtctcaaaaaaaaaaaaaaaaaatcagatgtctaga

SEQ ID NO: 144596 - DNA, 201 bp, Homo sapiens
tgaatacactgagacccggaatcagttccttgatgagctcatggaggtactgtcatctctggaagatgcaggggggaggcatggcaccagcacaggtggcytcactccagatgcctgacctgacccctcctgtttgtgtgaagggtgtgagtgctatttgtgtcctacagcaggagcctcacgtattagatgcctcctatt

SEQ ID NO: 144597 - DNA, 201 bp, Homo sapiens
gacagctcttctaacctgcccaacttattactggaatcatttcaagagataatttaatggtctccctctgtgtggccctgttcactcctgaagggaaatayataaataaataaacaaacctaactaccccaaccaacccatgctttatgagaacatcgcttgcttgtttttaatggcacagttattaatataactgtcccg

SEQ ID NO: 144598 - DNA, 201 bp, Homo sapiens
gcctgccaggagctgacctggaagccgcaggaccacattgtttagtggccaccttggtctctccctgtatttctaccacgagctccagagatttggccaasatttttttagttcccagctcttatggcttgagaaagagctggacctaacctcataaagtgacagctttctctcctctttcttatttatttatttatttat

SEQ ID NO: 144599 - DNA, 201 bp, Homo sapiens; identical to SEQ ID NO: 26707

SEQ ID NO: 144600 - DNA, 201 bp, Homo sapiens; identical to SEQ ID NO: 26709

SEQ ID NO: 144601 - DNA, 201 bp, Homo sapiens
tggaagatggaaagccacaggaaggaagcggcacctgatggtgatcttggcactctccatgttctctacaagaagctgtggtgattggccctgtggtctaycaggcgaaaaccacagattctccttctagttagtatagcggacttaataaaagaggaaaaaactcttgcttcagtactgacagttccttatgctgcttct

SEQ ID NO: 144602 - DNA, 201 bp, Homo sapiens
tgcagcgctaagatgaggcttcttgcacatttaactgtttctcaaaaccttgatgaggatgtgagctgagggggaccaagagaggttttttttttttttttggagacggagtttcgctcttgttgcccaggctggagtgcaatggcatgatctcagctcgctgcaacctccacctcctgggttcaagctattctcctgcct

SEQ ID NO: 144603 - DNA, 201 bp, Homo sapiens
agatcacagtgctggaagcaggaacccagggtaagtgcaccatcccctgcagccctggcaaaagtggggtgctcaagggcccccacgtgtctagaaacaaraaatgcagcgctaagatgaggcttcttgcacatttaactgtttctcaaaaccttgatgaggatgtgagctgagggggaccaagagaggtttttttttttt

SEQ ID NO: 144604 - DNA, 201 bp, Homo sapiens
tgctgttgctttgcagatcacagtgctggaagcaggaacccagggtaagtgcaccatcccctgcagccctggcaaaagtggggtgctcaagggcccccacrtgtctagaaacaaaaaatgcagcgctaagatgaggcttcttgcacatttaactgtttctcaaaaccttgatgaggatgtgagctgagggggaccaagaga

SEQ ID NO: 144605 - DNA, 201 bp, Homo sapiens
gtcagggctgcaaatccttaatagagttggaatgtgcagccattgacctcatcaagggctttggtttattctggctccttggctcaggaaaattctccccscattgctgtggttctttgctctccttccaggatcctggaggtgatgggatagactggggagacgatgctgttgctttgcagatcacagtgctggaagcag

SEQ ID NO: 144606 - DNA, 201 bp, Homo sapiens
aggcaggtgggaacactacagagcagggatgatgggccatactgccatttttggcacctaagtcagggctgcaaatccttaatagagttggaatgtgcagycattgacctcatcaagggctttggtttattctggctccttggctcaggaaaattctccccccattgctgtggttctttgctctccttccaggatcctgga

SEQ ID NO: 144607 - DNA, 201 bp, Homo sapiens
  misc_feature (1)...(201): n = A,T,C or G
actgtggagccccaagttgaggacttttcccctttgcttctggtgataaagaggaccccacatctacaaatggttcagtaaggggctctgggatggctacntgtgggcccctttccataaccaggcccaggccgcccgactcaggccagaagccctgggggagcggtcaagcagcagccttgttggagccagcaaagctgc

SEQ ID NO: 144608 - DNA, 201 bp, Homo sapiens
ggggacagacccccaccttgcccagatttgctggcaccagaggcagcctgaggcccagggcaaccaggtggctgcttggtattctgctcaggcaccgctgygtcctgcctcctggcttctctgctagaggggcctcctcccccagcccagcctgggccatgcattatccttgcaagattgaggacctaatggaggcgatca

SEQ ID NO: 144609 - DNA, 201 bp, Homo sapiens
gggaggactcagaggctggagcggggacctgctgccctatctgagagcatgcagaatttgggggacaaggctgaaacatggagcaggaggggaagaaaggygtctgtaaggtgtgatgaggaaagctttggactgaggtcaggagacctcaattcaaaacaatcactagctctgggatctagctcaacctctcatctgcct

SEQ ID NO: 144610 - DNA, 201 bp, Homo sapiens
agtccgggaattggaaaaatattggtgttgaacatggaggtaagactccgcagactagcagggtatagaggaggtaagtggactgcactctggcctcaacrctcaggagggatgctcttggcttagggaactgcctgctgctcttggtccctctccctctgggagattgcctgctagctcctgccccacctgttcagctgc

SEQ ID NO: 144611 - DNA, 201 bp, Homo sapiens
atatgggagttgtctttctagtaaccactgacttaaaaaaaaatcattgcatttatggatccctggcacatttgcataattctattttatttatttatttwtttttttacagacagggtctgtctccgtcacccaggctggaatacagttggcacagtcatagctcactgcagcctcaaactccttggctcaagcgatctt

SEQ ID NO: 144612 - DNA, 201 bp, Homo sapiens
acagggtctgtctccgtcacccaggctggaatacagttggcacagtcatagctcactgcagcctcaaactccttggctcaagcgatcttcccacctttgcwtatttctacagctttccagggacctgcttgcccattgattgggaatcctaacctatggaattaaatttcaaccctttataatggacctgaaagttcttca

SEQ ID NO: 144613 - DNA, 201 bp, Homo sapiens
ctcttatttgctttgcatagattttttgagcaccttctatgcatgagcacagtactctcacactctgtgacgacacactctggagatgtcgtcatgggatwtggaaggtggtgggcccctcactcaacatacttttacttcctttgaggcctaggactgtgtcttcgtgataaggtgctcagggtgcataaagttgaactc

SEQ ID NO: 144614 - DNA, 201 bp, Homo sapiens
tgctctttgccataaatgaatgaatgcactttctaaccagcctcaccccatcagccatgacctgttccttcagatctcagcccacatgttacctcctcagraaggccttccttgactctcactcagactcagcccctcatgctgtttgctgccattataacttgcaactttcttttttgtcttcttcttcagtttgtaact

SEQ ID NO: 144615 - DNA, 201 bp, Homo sapiens
atttttagtagagacgggattttgccatgttggccaggctggtcttgaactcttgacctcaggtgatctgcctgcctcggcctcccaaagcgctgggattmcaggtacctcttatttgctttgcatagattttttgagcaccttctatgcatgagcacagtactctcacactctgtgacgacacactctggagatgtcgtc

SEQ ID NO: 144616 - DNA, 201 bp, Homo sapiens
gggacagacccccaccttgcccagatttgctggcaccagaggcagcctgaggcccagggcaaccaggtggctgcttggtattctgctcaggcaccgctgcrtcctgcctcctggcttctctgctagaggggcctcctcccccagcccagcctgggccatgcattatccttgcaagattgaggacctaatggaggcgatcag

SEQ ID NO: 144617 - DNA, 201 bp, Homo sapiens
ccagatctccctttggcttctagtacctaccccacatccatctggccacccagcttagaaacatatgtggactttacctagaagatggagccggggtcagyatgcaaggggcagaggggctgtggatactctcacccagaggggtaatggtgatactggaggagttggcagtacagtgccagtattatctagaaccttagg

SEQ ID NO: 144618 - DNA, 201 bp, Homo sapiens
acatttgtgttgctttcctcaaaggaaccagatcctcatccttggaaggtggtgggatggtttgaatgtttttctatggctgccattttccaaaaaagtcyccaaaacaaacaaaaaaagattctttttttttttttggtgatggagtctcgctctgtcgcctaggctggagtgcagtggcgcaatttcggctcactgcaa

SEQ ID NO: 144619 - DNA, 201 bp, Homo sapiens
gtttgagcacaaaggtccactttacttacatgaaggaacataaaggcatgagaaacagtcatctcaataaatgcaagacatgagcataaaagaggttctckgcctttccagcgttgttattacagagagaaacctacaattattttgttaaacaaaattcaaggctccaggactcatctctggagctgatatgtcttaaat

SEQ ID NO: 144620 - DNA, 201 bp, Homo sapiens
tgctttgcctgtgttccccagctcatgacccttctccagttgtcttgttcccatataacatttgaactctttacacacctgaacctgtgggggccttgcccatttgaccatgtggcccaggccaaagcccagtgttggccttacgcatggtcggcaggagagtcagttgtgtgctctgttgaagccccacagagcaggtgt

SEQ ID NO: 144621 - DNA, 201 bp, Homo sapiens
gtactggcccttcagcccatgtgcagtcttggtgtgtgagcttgttcttggtcatgaaaaggaccaataaaatgaccaccattcattgagggtttttttttgtaccaggtgctgttttaggcacttgacatgataaaaatgatcactgtcattttttgagtccttgccgtgtctcaggcacactgttcagtgttttacctg

SEQ ID NO: 144622 - DNA, 201 bp, Homo sapiens
acaaaaaacagtcaaccactaagtggcacatctgaattggaacttaagtctgtctgacccactgtccatgccttttgcattatgccaggaaaaaaaaaaamaacctcatttaaaaagcttccacctcccccttgattttaggaggaagagggacctaagacccagttgcaaatgaaaaccttttagtgtccaggccatctc

SEQ ID NO: 144623 - DNA, 201 bp, Homo sapiens
gtgggggtgagggcagggggtggagaaggatggaagcagagtcagcgccagacagtgatgtgccacgcagaatagaatctctgcacagcgtctcctggaasggggaggggggcagatgctgacagactcgtgggagccatgccaagagatgggtctgcctgggtccctgactaaaccaactaactcttcccaagctgatca

SEQ ID NO: 144624 - DNA, 201 bp, Homo sapiens
accctgtcctgttctgcccagcctgttggttcaaggaagagagatagatacaccttgagggcagggcagtgccttgctcttgagatgtcccagacagcccsgagcacatagttggggcccagttaagtgtgtgtttaatcatggaggagcctgagcaattcctacagtctgagtcaggctgactcagatgggagccaaatt

SEQ ID NO: 144625 - DNA, 201 bp, Homo sapiens
ttctgcccagcctgttggttcaaggaagagagatagatacaccttgagggcagggcagtgccttgctcttgagatgtcccagacagccccgagcacatagytggggcccagttaagtgtgtgtttaatcatggaggagcctgagcaattcctacagtctgagtcaggctgactcagatgggagccaaattcccatgaaaga

SEQ ID NO: 144626 - DNA, 201 bp, Homo sapiens
cgcccagcccatgtgagagttaaattttgatgtcctttttcttggtgtttggtacagggtgtaggggtaaaggcaggtgggaacactacagagcagggatratgggccatactgccatttttggcacctaagtcagggctgcaaatccttaatagagttggaatgtgcagccattgacctcatcaagggctttggtttatt

SEQ ID NO: 144627 - DNA, 201 bp, Homo sapiens
attttgatgtcctttttcttggtgtttggtacagggtgtaggggtaaaggcaggtgggaacactacagagcagggatgatgggccatactgccatttttgscacctaagtcagggctgcaaatccttaatagagttggaatgtgcagccattgacctcatcaagggctttggtttattctggctccttggctcaggaaaat

SEQ ID NO: 144628 - DNA, 201 bp, Homo sapiens
gctcacccatgtccccagcacatatccccaggaagtccttgttaatgaatcattgactgggcctggcccttcttctaactcttccccctggacagtatctragaaagaaaaatgaggaactggaacagctctaccaggatcaagaggtgcccaagccaaaatcctggtgagtgacatctggtagtcctctagaaagggaca

SEQ ID NO: 144629 - DNA, 201 bp, Homo sapiens
agacccagcctcttgaagctttctgcttgctctgaggaggggacactcccacccttaccccaccccctctcctgactgccagctggccggcgtgggagccrggcttccactgcccattgtttctcagctctcctcccatggtggcggggtgagcctcatcccccaggtcaggagcacagggcagcccctcccccttccctc

SEQ ID NO: 144630 - DNA, 201 bp, Homo sapiens
attaggcaggaaggagttcttaggcttcaaaaattcacccgcttaattgaggctagggcatccccatttcagacctttaaagatagagaagccaccatccycagagaagaatagtcaaggcagtatagtggatgagaatccaggctgggaagtcagagtggctggaactgaattgactatgtagggttattatgaaaatca

SEQ ID NO: 144631 - DNA, 201 bp, Homo sapiens
ggtaagacatacatagaataaaatgtatcattttaaccttttttgagcgtacagttcagtgacattcacattgctgtaccaccatcatcactatccattckgtttttgcagaatattgagccatcctaggagacctgtaatcacctctaacaaacagcaacaatggaggcagggccctgtagctagaagagttctgtgtga

SEQ ID NO: 144632 - DNA, 201 bp, Homo sapiens
aggccaaggcaggtggatcacctaaggccaggagttcaagacaggcctggccaacatggtgaaatcccggctctactaaaaatacaaaaattagctgggcrtagtggcacgcacctgtaatcccagctactcgggtggctgaggcaggaaaaccacttgaacccgggaggcagaggttgcagtgagctgagatcatgccac

SEQ ID NO: 144633 - DNA, 201 bp, Homo sapiens
atgacagtctgctagatgaaggaagatcaatgacagaacaggtagaggaacactgatgactggtgaggtcggtggtcttgttctcaggatgcctagctgccggctgtgaaagctcccaggaaggaaggcgcagccagtgtacaccagaaagctagagggtatcacctccttttaaaaactggaagtgttcactccattttt

SEQ ID NO: 144634 - DNA, 201 bp, Homo sapiens
ctgattagagctgagacacctgggacaaggtagccttcccccttggattagaacaagaagtggctttagcacagtgagtctgtccgtattaatcctccagkgcttctcacacttgagggtcttttccttctccagtcctctgatcctttatcacttctctgtctcttcctggcagctccagaaggtgttgccaggggccca

SEQ ID NO: 144635 - DNA, 201 bp, Homo sapiens
gtggctctcccttcccaagtgccaccagtcccaggtgcaggtgtgaggacctagcgcattaccagggaggggccagcctgggaagtcaggcacaacccctrgccttcagggcatttatttctgggaggagcagggctgggaggaaagtttgagataaggctgtgagctacgaatataactcctcacgtacaggccacttta

SEQ ID NO: 144636 - DNA, 201 bp, Homo sapiens
ggggccagcctgggaagtcaggcacaacccctggccttcagggcatttatttctgggaggagcagggctgggaggaaagtttgagataaggctgtgagctrcgaatataactcctcacgtacaggccactttattgctttataaaaattttcacctttggccaggcacagtggctcacacctgtaatcccagcactttggg

SEQ ID NO: 144637 - DNA, 201 bp, Homo sapiens
aaattagccagatgtggcggcatacacctgtaatcccagctacttggaaggctagggcaagtgaattgcttgaacctgggaggtggaggttgcagtgagcrgagatcacaccactgcactccagcctgggcaacagatcaaaattccatctcgaaaagagataaataaataaaaataaaaccctggcatgggaaatgggag

SEQ ID NO: 144638 - DNA, 201 bp, Homo sapiens
accagcaagctgctcggtaggagggggcgccaccgcgcagctggctgtcggggggaggcctgtgcgttgccccctgtgtccaatagccgggagctctgacscctgaaagcctgagtcgagatgctgaccactggcctcgttctatgccccatctgtggccagacctgcttccctgatagcagcgggaacgaaccatatgta

SEQ ID NO: 144639 - DNA, 201 bp, Homo sapiens
taaagcgacgcaaggagggaagaaggtatttgcaacggcctcccagatcggcgctaggaccccgccagcagacgtctcaatctgcgtggagaggacccagygctcgccaggggaagcggctgccaggctgggctctcgagcgccgcctgtcgcaatcccacggccgctgcagcgcaccccctcccgtcccctgccctgagc

SEQ ID NO: 144640 - DNA, 201 bp, Homo sapiens
tacagcctctcctctagccactcgctgcctcaaaccatctacggcatagaggttggcctgcccgcggagccgacttcatcttgaaattcttcatcattttstaacaagcagctgtgcatttccattttgcactggacctcacaaattacgttgcccgtcctgcctgcctgttgttgcttgcacccctcttgcagtttgtgg

SEQ ID NO: 144641 - DNA, 201 bp, Homo sapiens
aatcatggtccccacttatcacaactaccaccaacatcaaatgccttcctgcatatggctttccttcattacaagcatccattaagctcctgacactcaawgtcaagagtcacaccggatgctggggttatagagatgaacaagtctgctttggcttcccagcccacaggtactcgcagactaggtggggagacagactga

SEQ ID NO: 144642 - DNA, 201 bp, Homo sapiens
tcccatgacccccatactttaaccaatgtaaagaaaacttttagactaatttcagtgtatttcactcgaattagtgatggaattttggtgatgtgaatggkaatgctctaatttgggtgcttctcatgtagattggctggtggacagaaggcactgcagcctgaaatggcagagtctggtgctgacgatccgcgagaagat

SEQ ID NO: 144643 - DNA, 201 bp, Homo sapiens
agggatgaagtccaagttccttaataagtctccctttgatatggcctttccacccttacagcctctcctctagccactcgctgcctcaaaccatctacggyatagaggttggcctgcccgcggagccgacttcatcttgaaattcttcatcattttgtaacaagcagctgtgcatttccattttgcactggacctcacaaa

SEQ ID NO: 144644 - DNA, 201 bp, Homo sapiens
atcccaagcataaacatccctggctttaggagaaacgaggtaataacagaagccagaggcaagagagcacagagaggttgggagtgaggccggcagggaakaaggcagatttgggacaggaagatgagattctgggttcagattccaccttccagcctaaatcacaaggcaggaagcctgaggtggttggcgtaaaaaata

SEQ ID NO: 144645 - DNA, 201 bp, Homo sapiens
agtagtccgagggcttagattctgagttcttctctcagtttgaaccaatttatcttctttttttctttcttcctttttttttaaaaagagtttctctgtcrcccagtctggagtgcagtgcagcaatcatagctcactataacctcaaactcctgggctcaagtgatcctcccgcctcagcctcctgagtagctgggacta

SEQ ID NO: 144646 - DNA, 201 bp, Homo sapiens
aggtggatcatgaggtcagtagttcgagaccagcctggccagtacagtgacactccgtctctactaaaaatacaaaaattacctgagcgtggcgacatgcrcctgtagtcccagctactcggcaggagaatcgcttgaacccagaggcggaggttgcagtgagccaagatctcgtcactgcactccagcctgggtgacaga

SEQ ID NO: 144647 - DNA, 201 bp, Homo sapiens; identical to SEQ ID NO: 26703

SEQ ID NO: 144648 - DNA, 201 bp, Homo sapiens
tggcccaggccaaagcccagtgttggccttacgcatggtcggcaggagagtcagttgtgtgctctgttgaagccccacagagcaggtgttgccaatgctgyggttcgtgcagaagcggggaaactcaacggtgtacgagtggaggacagggacagagccctctgtggtggaacgaccccacctcgaggagcttcctgagca

SEQ ID NO: 144649 - DNA, 201 bp, Homo sapiens
gctgaggtgggagaattgcttgaaccccggaggcagaggttgcggtgagcagagatctcactattgcactccagcctgggcaacgagagcgaaactccatytcaaaaagaagacaaaaaacagtcaaccactaagtggcacatctgaattggaacttaagtctgtctgacccactgtccatgccttttgcattatgccagg

SEQ ID NO: 144650 - DNA, 201 bp, Homo sapiens
aatgactcgctttaaaaacagtcaaccactgccgggcgcggtggctcatgcctgtaatcccagcactttgggaggccgaggtgggcgaatcacctgaggtygggagttcgagaccagcctgaccaacatggagaaaccttgtctccatgtctccatgactaaaaatacaaaaaaataaaaataaaaagtagccgggcatgg

SEQ ID NO: 144651 - DNA, 201 bp, Homo sapiens
cagactgggcaaacatcccagctgggcactctgcctctaaaatagccctcagttagttggagccaagagtggtggggcagccgatcgaacagagaggaacrgggcctgtgctggtagggagggcaggtggcatttaatgccattcacccagagccatccctgagcaggtgcgtgtggaaggccctgtgaagaaactgcctg

SEQ ID NO: 144652 - DNA, 201 bp, Homo sapiens
tgtaggagctgcctgggagggtgagactcgggaagcaagtggtgcctccgggctgctgtatcaggcaaggctcagccaggagaggtgggtaggagcagctrcacgtcaggtgcaagagaaacaggtgcaagagctgttacctgctctgctgcagctcctggagtcaaggtgaacctgaaacccagcccctcccggctaagt

SEQ ID NO: 144653 - DNA, 201 bp, Homo sapiens
ctgtaatcccagctattcaggaggctgagacaggagaatcgcttgaacccaggagacggaggttgcagtgagccgagatcgcgccattgcactccagcctrggcaacaaaagtgaaactccgtctcaaacaaaaacaaaaacaaaaaaacagtgcctggcacagtaaggctcagactagctgttgtgagagggcggtgggg

SEQ ID NO: 144654 - DNA, 201 bp, Homo sapiens
agccgactattctttgttttacaaaataacccagctgtaggatctgtaaatagtcatcataaaagatagtgtaaaatctgatttgctttaaaaacaagcaracaaaaaaggtgatgtgatatccaaacttcccagtttctcaaagttgcaaagaacaagatatctacaaccgcctgcctgtgcctcaccacagagggctga

SEQ ID NO: 144655 - DNA, 201 bp, Homo sapiens
aggcaggtggatcatgaggtcagtagttcgagaccagcctggccagtacagtgacactccgtctctactaaaaatacaaaaattacctgagcgtggcgacrtgcgcctgtagtcccagctactcggcaggagaatcgcttgaacccagaggcggaggttgcagtgagccaagatctcgtcactgcactccagcctgggtga

SEQ ID NO: 144656 - DNA, 201 bp, Homo sapiens
agttcgagaccagcctggccagtacagtgacactccgtctctactaaaaatacaaaaattacctgagcgtggcgacatgcgcctgtagtcccagctactcrgcaggagaatcgcttgaacccagaggcggaggttgcagtgagccaagatctcgtcactgcactccagcctgggtgacagagcaagactttgtctcaaaag

SEQ ID NO: 144657 - DNA, 201 bp, Homo sapiens
caccgtgcctggccctgtattcaagattcttatcaagtctacactttatttttattttatttatttatttatttttgaaacagggtctcactctgcctccmaggctggagtgcagtggcaccttcccagctcccagccttgactgcctgagctcaagccatcttcctacctcagcctcccaagtagctgggaccacaggca

SEQ ID NO: 144658 - DNA, 201 bp, Homo sapiens
ggcaacgcctctcactacttggctaagactcctcacccggcttcagataaggaagcagcgagtcacctttccaaaattctctgcttgctaaatccagccayggctcagccccactcactgcctctctgcccaaacattgcctctctccctgcgtcagttctaccgtgtcctctccggtgtggttctctttatagaccacaa

SEQ ID NO: 144659 - DNA, 201 bp, Homo sapiens
atcatggaggagcctgagcaattcctacagtctgagtcaggctgactcagatgggagccaaattcccatgaaagatccctgaaaaggcccttaattcagcyctatgagccattttcagagcagtttttcaatccgttctataataataatgatcatatatgacatatatatatattttgagatggagtctcactctgttgc

SEQ ID NO: 144660 - DNA, 201 bp, Homo sapiens
agcgacgcaaggagggaagaaggtatttgcaacggcctcccagatcggcgctaggaccccgccagcagacgtctcaatctgcgtggagaggacccagcgcycgccaggggaagcggctgccaggctgggctctcgagcgccgcctgtcgcaatcccacggccgctgcagcgcaccccctcccgtcccctgccctgagcccg

SEQ ID NO: 144661 - DNA, 201 bp, Homo sapiens
ctggatggtaaagcgacgcaaggagggaagaaggtatttgcaacggcctcccagatcggcgctaggaccccgccagcagacgtctcaatctgcgtggagargacccagcgctcgccaggggaagcggctgccaggctgggctctcgagcgccgcctgtcgcaatcccacggccgctgcagcgcaccccctcccgtcccctg

SEQ ID NO: 144662 - DNA, 201 bp, Homo sapiens
aaaaaaaaaagaaaaggcatacccagcgctgtgagatcctgggggatctggcctcagcctaccctccctccttactctacccacttcttggccaatctcaractctcccttagcttcagccaccactcggaccacagattagccagcttgtgactctccaagctgtatctccagccccgacaactccctcgaactccaaaa

SEQ ID NO: 144663 - DNA, 201 bp, Homo sapiens
ctgaggcaggaggattgcttgaggccaggagttcaagaccagcctgaccaacatgggggaaccccatctctactaaaaacacaaaaacacaaaaaattagrcggatgttgtgtcatatgcctgtagtcccagctactcgggaggctgaggcacgagaatcccttgaacccaggaggcagaggttgcagtgagctgagatca

SEQ ID NO: 144664 - DNA, 201 bp, Homo sapiens
caagaattattattatagtagccctcataatagccttctttggatacttccagccacagataacttattacctcactaggtaatacctttctattttcagrctgttttaatgttttttttttgtttgtttgtttttgttttttttgagatggagtctggctctgtcacccaggctggagtgcagtggtgccatctcggctc

SEQ ID NO: 144665 - DNA, 201 bp, Homo sapiens
actgggcaaacatcccagctgggcactctgcctctaaaatagccctcagttagttggagccaagagtggtggggcagccgatcgaacagagaggaacgggrcctgtgctggtagggagggcaggtggcatttaatgccattcacccagagccatccctgagcaggtgcgtgtggaaggccctgtgaagaaactgcctgagg

SEQ ID NO: 144666 - DNA, 201 bp, Homo sapiens
ctttatgatggggacggtaggggtgaacatggagctctcattctgcatgtagtggaagggcccaccccgcaagcatgtttcgctgctatttttgccaaggktctgtgaagatttcaatattcccaagcttgctatctttcaagcctagtagaatcagctgggctgatatcttctagctggtgggaaaaaatgccagcaagc

SEQ ID NO: 144667 - DNA, 201 bp, Homo sapiens
gtcaggctggtctcgaactcctgacctcaggtgatccacccacctcggcctcccaaagtgctgggattacaggcatgagccactgtgcccagcccaatagkgcctttctttatgtaggagtagaggatgctttctcttctctagttttctgatttctggaatttccatgatgagtatagattattttaggggtgggggagc

SEQ ID NO: 144668 - DNA, 201 bp, Homo sapiens
cagggctgcggtgtagggaaagtctgagatcctctgtggaggcctcatggattgagtaattggtgagaccctagaaagttctgtgtagtgggacggggtargggaaagaggctttgggtaaggcagcacccctgagcctgacttccatccctccagctcctggtctcccttactcatcatttgaggtccccctggccggga

SEQ ID NO: 144669 - DNA, 201 bp, Homo sapiens
agtgactagaacagtgccaggtccatagtaagcactatatatgtttattaaatgaaataaatctcctttcctaggcatttgaggagactcatctgacctcycttgacccagtgaaacagtttgctgcctggtttgaggaggctgttcagtgtcctgacataggggaagccaatgccatgtgtctggctacctgcaccaggt

SEQ ID NO: 144670 - DNA, 201 bp, Homo sapiens
ttacgcatggtcggcaggagagtcagttgtgtgctctgttgaagccccacagagcaggtgttgccaatgctgcggttcgtgcagaagcggggaaactcaayggtgtacgagtggaggacagggacagagccctctgtggtggaacgaccccacctcgaggagcttcctgagcaggtggcagaagatgcggtaagatgggcc

SEQ ID NO: 144671 - DNA, 201 bp, Homo sapiens
ggtttgttctccagaacctttagcctccctttcctttaccgccgcctgcttcctgagtccagccctcctggccatgctgaaggcactgaagggatccaccyggctggttctccctggcaagagcagctctgtgtctttcaggtctgcctccagcttccctgagcttcactggttgtatttgggttcctgcttgtgtatctc

SEQ ID NO: 144672 - DNA, 201 bp, Homo sapiens
cccgctctgtgatcggatagagcccaccccaggatagcagccctctcccaagccacctacccatccccatttcccaggaagggtaggggttgggggtggcyggcaattcgattttaatttcatagcagagcagttgattcatggctctttgtcgctggcgttgactcccgtaatgactttccatcaaaatgaaaagtggag

SEQ ID NO: 144673 - DNA, 201 bp, Homo sapiens
tgggtcctccaccactcacctcttggttagcgggagtgtgctgcccccacccccacccccgcacccccattctacacaaggcagaagaggcacgggttttyctgggagcgaatatcaagtgcctgagagcaactacaggactaactgtgtttgggttgggtgtagtataaataataataatggctaatatttcctgagcat

SEQ ID NO: 144674 - DNA, 201 bp, Homo sapiens
tactcttcacagcggatgaaggcaagtgtgggccaagggccggtagtatgtggttggggacatccaatccgaggagtcatagcctctgtggtctctctgakgctccagtggggatgcctacatagaatatttcctgaactttcactctgtctctatagtttactccaaaagtggatcctatccctgagtttaattttcaaa

SEQ ID NO: 144675 - DNA, 201 bp, Homo sapiens
atgggccatactgccatttttggcacctaagtcagggctgcaaatccttaatagagttggaatgtgcagccattgacctcatcaagggctttggtttattmtggctccttggctcaggaaaattctccccccattgctgtggttctttgctctccttccaggatcctggaggtgatgggatagactggggagacgatgctg

SEQ ID NO: 144676 - DNA, 201 bp, Homo sapiens
cactattcttccctgggatcccaagtgaagcaatgggggccacgtaggaattcatcggtcaatgctagtttggtgggtgagggtggggaggttggggaggrgcaggcgcgggggtgggtgtgcttggattcgctcatgggagctgagccagccccagcagggaagaagggtcgctttggcattcattctcctgcagttacc

SEQ ID NO: 144677 - DNA, 201 bp, Homo sapiens
agaatcagctgggctgatatcttctagctggtgggaaaaaatgccagcaagcaaaagaaaaggagaggagaaacaaatgtttgtaactgaaagaaacctgrcatttaatctagtgatttctatctgccaatcatcagaattgtcattacctgggacaatttaaaaagtacaatttctaggccaggcgcggtggctcacgcc

SEQ ID NO: 144678 - DNA, 201 bp, Homo sapiens
ttttttgtatttcagtaccgttttgtagaatggggctactgaaccaggcttaaaatcgtatttcagtctggtctttatgatggggacggtaggggtgaacrtggagctctcattctgcatgtagtggaagggcccaccccgcaagcatgtttcgctgctatttttgccaaggttctgtgaagatttcaatattcccaagct

SEQ ID NO: 144679 - DNA, 201 bp, Homo sapiens
cctcccaacctactcttagcaggaagctcagggaacctggcattctgctgtccagtccatcagctgaaacaatagagagcacctcagtgagcaaaggtcaratatacacccatgcgcttatgccacagccagtagttagtgagaatctctcaggcatcaaaatagtgagtaaatactaacacttcaaatagatcctttaag

SEQ ID NO: 144680 - DNA, 201 bp, Homo sapiens; identical to SEQ ID NO: 26718

SEQ ID NO: 144681 - DNA, 201 bp, Homo sapiens; identical to SEQ ID NO: 26719

SEQ ID NO: 144682 - DNA, 201 bp, Homo sapiens
ggtgggccctaatccagtacgactggtgtgcttataggaacagtttaggaaacagacatgcacagagggtaaagcatgggaggacacaggaggaaggtggstgactcggaggaaacgaccctccccacaccttgaccttggacttgcagcctgcagaattctgagaaaaaaatgtctgtttttttgtcacccagtgtgtgg

SEQ ID NO: 144683 - DNA, 201 bp, Homo sapiens
caacatggtggaggtggaggccattatccgaagcgaactaactcagaaacaaaaaatcaaatactgcatgttctcgcttataagtgggaactaaacaataygtatacatcgacataaggatggaaataaggtgggaaataagagggtgggagggggatgagggctgaaagactgcctattggaaacaattttcagtatctg

SEQ ID NO: 144684 - DNA, 201 bp, Homo sapiens; identical to SEQ ID NO: 26720

SEQ ID NO: 144685 - DNA, 201 bp, Homo sapiens; identical to SEQ ID NO: 26721

SEQ ID NO: 144686 - DNA, 201 bp, Homo sapiens; identical to SEQ ID NO: 26722

SEQ ID NO: 144687 - DNA, 201 bp, Homo sapiens; identical to SEQ ID NO: 26723

SEQ ID NO: 144688 - DNA, 201 bp, Homo sapiens; identical to SEQ ID NO: 26724

SEQ ID NO: 144689 - DNA, 201 bp, Homo sapiens
aaacggatagccatttattttcccattgattggagatggttgcggtagcacatcctatgtgggtctggttcctgccgttattctctccctcaccatggtgytccccagaggactccctaacaaaagaaacctcctacgtgtacattttcctctccagtctgtttctaagcccctgtgaggagttcagctaatacaggtgtg

SEQ ID NO: 144690 - DNA, 201 bp, Homo sapiens; identical to SEQ ID NO: 26725

SEQ ID NO: 144691 - DNA, 201 bp, Homo sapiens; identical to SEQ ID NO: 26726

SEQ ID NO: 144692 - DNA, 201 bp, Homo sapiens
gataactttaatggaccaagtggtctctttattgtggcagggaaaggaattctttgaacaatgcgcgtctccaataatgcccttgaagatcttgttcctgyagatgtagttgtcaacaacagtcttgtggcagcctggtattccggagttaatagaacaagaaacctcatgtcatataattgtacaacagatagcactaat

SEQ ID NO: 144693 - DNA, 201 bp, Homo sapiens; identical to SEQ ID NO: 26727

SEQ ID NO: 144694 - DNA, 201 bp, Homo sapiens
aattcatcttcacaaagctgtgatgttacttgagtatttcacaagtaattcttgggtttggaatacggacaatgtcaatatgttaatgaatcaactaaacyttgaagataaaaagactttcaatattgatgtacggcagttacattaggcagaatatatagagaactactgcatgggaactgagaagtacatattgaataa

SEQ ID NO: 144695 - DNA, 201 bp, Homo sapiens
gaaatttccaggggtccctaaaccgtattttgagaactgcggatatatactgttaaagacacagtgatacacacctttaaggaagaaaaggaaatttaaaytaatttgaagacactgtgcaaatcagtactaaatcttagagtgaattatctaggctgtctttgaaacagtttttatgctgatttaaatcactgaaaagat

SEQ ID NO: 144696 - DNA, 201 bp, Homo sapiens
ttttattttattttatttttttgtagagacagcatctcaccatgttgccaaggctggtctcaaactccggcgctcaagtgatcctcctgcttcagcctacycatgtgctggcgtgagccaccgtaggcgtgagccaccgtgcctggccaaaattcttggtctattctggattctaattttttttagtaggttttttgtgtt

SEQ ID NO: 144697 - DNA, 201 bp, Homo sapiens
tcaaattgttctccaaaggaattataataatttatactaccaagcagtataggaaaattcttattgctctatattgttgacaataccgttgtaattttttkctctgtgcatgaaattattctaactttacattgattaacccttattacaagtaagattagacatttttttcacattttgattgcttgtctttttctcact

SEQ ID NO: 144698 - DNA, 201 bp, Homo sapiens
catccaagttggagtgttgtgctgtttttttctgctttgtgaggtgttttttgttttgttttgtttattattgagacagagtctcactctgtcacccaggmtagagtgcagtggtgtgatcttggctcactgcaacctctgcctccagggttcaagtgattctcatgtctcagcctcccaagtaggtgggattacaggcac

SEQ ID NO: 144699 - DNA, 201 bp, Homo sapiens
attgcttttaggactgcactaggtctaaaagaaaacaatcaaccagaaccattgcatttatttttgtcaagtgcaactcctgtacatgtaagtaatttagytttttcctaggaagggcagtggagagcagggaaatggggataaaaataagccattatttctctatctggtgaattctggtccagtatgatgatgatggtg

SEQ ID NO: 144700 - DNA, 201 bp, Homo sapiens
acccaaactatatcaagcgccatctcctgtgctccaagttttcttcccagtcaaaagcattttacgctatcttctcggggctctgcattgggacgccatgrggaagcacagaggtagatctggctcttggggagaaaggggagcatgggcaaatggtgtgccatttccaccttagaaaaagatcaaatcacagagcgtcaa

SEQ ID NO: 144701 - DNA, 201 bp, Homo sapiens
tggcctcccaaagtgctaggattttttttttttttttttttgagacggagtctggctctgtcgcccaggctggagtgcagtagcttgatgttggctcactscaagctccgcttccgggttcacaccattctcctgcctcagcctcccaagtagctggaactacaggcgcctgccacagcgcccagctaatttttttgtatt

SEQ ID NO: 144702 - DNA, 201 bp, Homo sapiens
aatcagctctgccaggtggaaagggaaactaccaggagagaaagaggtgggggaaggaacctcctagaggaaagggcagactccaccattttttttttttyttttttttttttttttgagacggagtctcgctctgtcacccaggctggagtgcaatggcaagatcttggctcactgcaacctccgcctcccaggttcaag

SEQ ID NO: 144703 - DNA, 201 bp, Homo sapiens
gttttcttgaggctctccatgtgtccctatgctggaaccttttctgccttctatgactactactttgttttgtaatgttttcccttccatgactactactktgttttgtaatgttttctctgtcccgcttttgtttcctagctcttttgcttgtactccatatctaattcaatacagcactttgcatccactgtgttgtgg

SEQ ID NO: 144704 - DNA, 201 bp, Homo sapiens
tttttttttttttgagacgggtcttgctcttgttgcccaggctggcatgcagtggcacgatctcggctcactgcaaccttcacctcccgggttcaagcgaytctcctgcctcagcttcccgagtagctgggattacaggtgcgcaccaccacgccccactgatttttgtatttttagtagagacagggtttcgccatgttg

SEQ ID NO: 144705 - DNA, 201 bp, Homo sapiens
actttagcaaaagaatcagctctgccaggtggaaagggaaactaccaggagagaaagaggtgggggaaggaacctcctagaggaaagggcagactccaccrttttttttttttcttttttttttttttttgagacggagtctcgctctgtcacccaggctggagtgcaatggcaagatcttggctcactgcaacctccgcc

SEQ ID NO: 144706 - DNA, 201 bp, Homo sapiens
tgcctcctgggttcaagtgattctcctgcctcagcctcctcagtagcaggtgcctaccaccatgcccagctaattttttgtattttttagtagaggtggartttcaccatgttggccaggcccatctcaaactctagacctcaggtgatccgcccactttagcctcccaaagtgctgggattactggtgtgagccactgca

SEQ ID NO: 144707 - DNA, 201 bp, Homo sapiens
agtcaattcacctttttccaccttccagtggattctcttcttctttttttttttttttttcagacagagttttgcttttgttgccctggagtgcagtggcrtgatctcaggctcactgcaacctctgcctcctgggttcaagtgattctcctgcctcagcctcctcagtagcaggtgcctaccaccatgcccagctaattt

SEQ ID NO: 144708 - DNA, 201 bp, Homo sapiens
aggggcttgtccaagatggcaatgctcctgcttcatcacctagaacataaggccttgaaagtaaccgtacttcagggtgtcagctcttaaagaaatgatgwcttgatgtgaatctttagttgctgttggtgttgttattgaatacaatcttgtttattttcagcctggaaagatgtaaccagtggaaatgctaaaatttac

SEQ ID NO: 144709 - DNA, 201 bp, Homo sapiens
aatccacctgtcttggcctcctgaagtgctaggattataggtgtgagccagcgtgcccagcccatgagatgttttaatacacgcatgcaatgtaatgtcayggagaatggggtatccaccctctcaaacatttatcctttgtgttacagacaatccaattatactcttctagtcattttagaatgtacaattaagttatta

SEQ ID NO: 144710 - DNA, 201 bp, Homo sapiens; identical to SEQ ID NO: 26737

SEQ ID NO: 144711 - DNA, 201 bp, Homo sapiens
tgcctcagccttccaagtagctgggattacaggctcccaccaccatgcctggctaatttttgtatttttagtagagacggggtttcgccatgttgcccagkctgaccttgaactcctgacctcaggtgatctgcccacctcggcctcccagagtactgggattacaggagtaagccactgcacccagccgactctaccctt

SEQ ID NO: 144712 - DNA, 201 bp, Homo sapiens
gggaggtagagattgcagtgagccgagattgcaccactgcactccagtctgggcaacagagtgagaccctctctcgaaatcaatcaatcaatcaatcaatcccccagcaacctcatagctcaggaggaataagtctgaggcgtatgttttacactggctccagcaacttctccagtaggagttaagcttccattacctgcc

SEQ ID NO: 144713 - DNA, 201 bp, Homo sapiens; identical to SEQ ID NO: 26729

SEQ ID NO: 144714 - DNA, 201 bp, Homo sapiens
tgggaggtagagattgcagtgagccgagattgcaccactgcactccagtctgggcaacagagtgagaccctctctcgaaatcaatcaatcaatcaatcaatcccccagcaacctcatagctcaggaggaataagtctgaggcgtatgttttacactggctccagcaacttctccagtaggagttaagcttccattacctgc

SEQ ID NO: 144715 - DNA, 201 bp, Homo sapiens
ctgggaggtagagattgcagtgagccgagattgcaccactgcactccagtctgggcaacagagtgagaccctctctcgaaatcaatcaatcaatcaatcaatcccccagcaacctcatagctcaggaggaataagtctgaggcgtatgttttacactggctccagcaacttctccagtaggagttaagcttccattacctg

SEQ ID NO: 144716 - DNA, 201 bp, Homo sapiens; identical to SEQ ID NO: 26733

SEQ ID NO: 144717 - DNA, 201 bp, Homo sapiens
cctgggaggtagagattgcagtgagccgagattgcaccactgcactccagtctgggcaacagagtgagaccctctctcgaaatcaatcaatcaatcaatcaatcccccagcaacctcatagctcaggaggaataagtctgaggcgtatgttttacactggctccagcaacttctccagtaggagttaagcttccattacct

SEQ ID NO: 144718 - DNA, 201 bp, Homo sapiens
gctcagcctcccgagtagctgggactacaggcgcccgccaccacacccagctaattttttgtatttttagtagagatggggtttcaccatgttagccaggrtggtctcagtctcctgaccttgtgatccacccgccttggcctcccaaagtgctgggattacaggtgtgagccaccgcgtccagccatccacgtgtctttt

SEQ ID NO: 144719 - DNA, 201 bp, Homo sapiens
tttttcaaatgtagaatagccccacatagtaagaaaatgtaacctactgctttgttaaaagagatcccaaaataattattgtcacctgtgcaggcaagtcstcagaatgcctataccccacccctctaaggagtttattctacaccacttactggggggctctgccaccctggcatgtctggctgggacctggatcgtccc

SEQ ID NO: 144720 - DNA, 201 bp, Homo sapiens
cccagaagaaggcaacatttcaggaggtggccaacagcaagactgtgcagtcgtcagtttggaagacaaggccccacagggagaagtctgtatcccctaasaagggcatcacttacgatgatttgttaagcaaaactgatcctcatcttatgaggaaccaaaaaggtcccctgtgccaaggtaggtaccctttctgccatc

SEQ ID NO: 144721 - DNA, 201 bp, Homo sapiens
tggacaaccaatctagagtgttgcctgtgacaaagggagtggccaagcacaaatctcacacctaagaggctgcctcagcctcactcagcaataacttgaayttgacttagggagaaagcacaacagctggaagtaaacaggaaccaagagaaaaagaaaagcagaaataggagccaggctcagtggctcaacacctgtaat

SEQ ID NO: 144722 - DNA, 201 bp, Homo sapiens
accaagccacgtgggatccgcccccttgaccaaaacacctcccaccaggccccacctccagcaggggggatgacatttacccaaactatatcaagcgccayctcctgtgctccaagttttcttcccagtcaaaagcattttacgctatcttctcggggctctgcattgggacgccatggggaagcacagaggtagatctgg

SEQ ID NO: 144723 - DNA, 201 bp, Homo sapiens
gaatacaatcttgtttattttcagcctggaaagatgtaaccagtggaaatgctaaaatttaccagcttccagggggtcacttttatcttctggatcctgcraacgagaaattaatcaagaactacataatcaagtgtctagaagtatcatcgatatccaatttttagatattttccctttcacttttaaaataatcaaagt

SEQ ID NO: 144724 - DNA, 201 bp, Homo sapiens
tacaatcttgtttattttcagcctggaaagatgtaaccagtggaaatgctaaaatttaccagcttccagggggtcacttttatcttctggatcctgcgaaygagaaattaatcaagaactacataatcaagtgtctagaagtatcatcgatatccaatttttagatattttccctttcacttttaaaataatcaaagtaat

SEQ ID NO: 144725 - DNA, 201 bp, Homo sapiens
tgttatcaaagagtgatatcatcctgatttgcttcttttataaatgacttggtaatttgtttggagggcttttcttttttttttttttttggtgacagagyctcactctgtcacccaggccccaggctggagtgcagtggcgtgatctcggctcactgcagcctctgcctcccgggttcaagtgatcctcctgcctcagcc

SEQ ID NO: 144726 - DNA, 201 bp, Homo sapiens
ctcctgacctcaggtgatccacccaccttggcctcccaaagtgctaggattttttttttttttttttttgagacggagtctggctctgtcgcccaggctgsagtgcagtagcttgatgttggctcactccaagctccgcttccgggttcacaccattctcctgcctcagcctcccaagtagctggaactacaggcgcctgc

SEQ ID NO: 144727 - DNA, 201 bp, Homo sapiens; identical to SEQ ID NO: 26736

SEQ ID NO: 144728 - DNA, 201 bp, Homo sapiens
tattgatatggttgaactgaatctaccatcttgcaattgtttccaatttgtcccatgatgtgttctattttcccttttctgcttttctttcgaattaatasagagtctaaaagactgctataaatccaggcgcagtggcgcacgcttgtaataccagcactttgggaggctgaggcaggaggattgcttgaggccaggagt

SEQ ID NO: 144729 - DNA, 201 bp, Homo sapiens
caggctggcctcgaactcctgacctcatgatctgcctgcctcggcctcccaaagtgctgggattataggcatgagccaccatgcctggccagcttttaaawtttttttttttaatttttatgggtacatagtaggtgtatatatttacgttcgatgatttttgaccaatgtcaactagtagttactgcaatgagtaaaaaa

SEQ ID NO: 144730 - DNA, 201 bp, Homo sapiens
tttggaagacaaggccccacagggagaagtctgtatcccctaagaagggcatcacttacgatgatttgttaagcaaaactgatcctcatcttatgaggaaycaaaaaggtcccctgtgccaaggtaggtaccctttctgccatctttagctcactttgcttctgaacccctgaacctcacagttcccacaaaagcctgtgc

SEQ ID NO: 144731 - DNA, 201 bp, Homo sapiens
caacctctgcctcccaggtccaagcgattctcctgcctcagcctcctgagtaactgggattacaggcatgtgcctccacgcctgcctaatttcatattttyagtagagacggggtttctccatgttggtcaggctggtctcaaactcctgacctcaggtgatccgcctgcctcggcctcccaaagtgctaggattacaggc

SEQ ID NO: 144732 - DNA, 201 bp, Homo sapiens
agactagcttcaaactcctggttgcaagtgatcctcctccttggcctcccaaattgctaggattacaggcatgagctaccatgcctagtcctaaaaatctrtgtattcaaattgtcaacacagactgtaaaaatcttttttgccctttcttattggaaaaatttgcaatcactttatatatgaacatatgtttcttataat

SEQ ID NO: 144733 - DNA, 201 bp, Homo sapiens
tgtatttttagtagagacggggtttcatcatgttggccagcctggtctcgaactcctgacctcaggtgatccaccccacctcggcctcccaaagtgctggsattacaggcatgagccaccgtgcccagtgataattttataaaatcaaaagccagttatcatgcataaaaacagtagagactgaaggtaatgttttacacc

SEQ ID NO: 144734 - DNA, 201 bp, Homo sapiens
gaagtcaaaattatatgctctataaaacttacatataacttgaaaagtggctctggagatcatgaagataccaagattgaagctgcccatgaacggtttggataaaattattctccaaattgtgaaaaaggcaatttctgaattaacatttatgtcactttaagtgtgcatataaaatgcacttactgaatgttatatata

SEQ ID NO: 144735 - DNA, 201 bp, Homo sapiens
gtgtctgattcttttgactgctttgcctcttaacaatgggttatttcttgctttcttgtgtgtctgataatcattattactattattatttgagatggagytttgctcttattgcccaggctcgagtgcaatggcgcgatctcagctcactgcaacctccgtctcctgggttcaagcaattctcctgcctcagcctcccga

SEQ ID NO: 144736 - DNA, 201 bp, Homo sapiens
ggctcactgcaacctctgcctcccaggtccaagcgattctcctgcctcagcctcctgagtaactgggattacaggcatgtgcctccacgcctgcctaattwcatatttttagtagagacggggtttctccatgttggtcaggctggtctcaaactcctgacctcaggtgatccgcctgcctcggcctcccaaagtgctagg

SEQ ID NO: 144737 - DNA, 201 bp, Homo sapiens
ctgggttcaagagattctcctgcctcagccttccaagtagctgggattacaggctcccaccaccatgcctggctaatttttgtatttttagtagagacggrgtttcgccatgttgcccagtctgaccttgaactcctgacctcaggtgatctgcccacctcggcctcccagagtactgggattacaggagtaagccactgc

SEQ ID NO: 144738 - DNA, 201 bp, Homo sapiens
gctgccagcttggctagaatataaacaggcagaaaaatgtgaaaaggctggactagcctagcctcccagactccatctttctcccatgctggatgcttccygcccttgaacatcagactccaatttcttcagttctgggactctgactggcttccttgctcctcagcctgcagatggcctattgtgagacctcacgttgtc

SEQ ID NO: 144739 - DNA, 201 bp, Homo sapiens
atccacctgcctcggcctcccaaagtgctggaattatgggcatgagccaccgtgcctgggccgggttctctattctgtcccattggtgtacttgcctcatrtgataccagaaacacagcatcttcattctagcagcagggaagtctcagggtaattgggatgtttccttgatgccttcatggaaaaaaatgagtatctgcg

SEQ ID NO: 144740 - DNA, 201 bp, Homo sapiens
tgtaccacagtgtactcatcagctgtgcatttattttgtcatgttctttctacacttaattttctttttttttattttgaagacagagtctcagtctgtcrtccaggctggagtgcagtggtatgatcttgactcactgcaacctctgcctcccaggctcaagtgattttcctgcttccacctcccaactaactgggacta

SEQ ID NO: 144741 - DNA, 201 bp, Homo sapiens
aagacagagtctcagtctgtcgtccaggctggagtgcagtggtatgatcttgactcactgcaacctctgcctcccaggctcaagtgattttcctgcttccrcctcccaactaactgggactacaggtgcatgccaccacgcccagccaatttttgtatttttagtagagatggggtttcaccctgttggccaggttggtct

SEQ ID NO: 144742 - DNA, 201 bp, Homo sapiens
atttttaataaactttcactcctgctctgaaacttgcctcagtctctcagtctgccttatgccccttggtcaaattcttccttctactctacttccttctrcaagaattgaggttgtcacagagccattacgattcgctgctgctaacaggagtttgcatgaattaaatattgattattttccagtgttttattttgttta

SEQ ID NO: 144743 - DNA, 201 bp, Homo sapiens
tactcagtcaaggattcacccgcctcaacctcccaaagtgctgggattataggcgtgagccacagtgctcaatcctcttaagcatttttttttttttttttgagatggagtctcgctctgtcacccaggctgaagttcagtggcgcaatctcagctcactgcaacctctgtctcccaggttcaagcaattctcctgcctca

SEQ ID NO: 144744 - DNA, 201 bp, Homo sapiens
ataatcccattacaccctttctctttatggggcaccctcaattctctttcccctttggtttctgtccttccaacctgccagtctcatgcttgggtcaaccsatctgttcaccatctttgtttctgagcctatcctcattgccacagaagatcaagaaagctggctgacaccagtggtgaaagatacagatttcagtcacag

SEQ ID NO: 144745 - DNA, 201 bp, Homo sapiens
acttgattcttctgatagaactgaagtcctgatactctgtaaatccttccccaataatctttcctatttttattttatttatttatttatttatttatttatttatttatttttgagatggagtctcactttgtcgcccaggctggagtgcagtggtgtgatcttggctcactgcaacctccgtcttccaggttcaagcga

SEQ ID NO: 144746 - DNA, 201 bp, Homo sapiens
ttcgccatgttggccaggctggtctcgaactcctcacctctagtgatctgcctcccttggcttcccaaagtgctgggcttacaggcatgagccactgagcycagtctataagtaaatttaaaaagcactgtttatcaaacattcagaaggaagtcaaaattatatgctctataaaacttacatataacttgaaaagtggct

SEQ ID NO: 144747 - DNA, 201 bp, Homo sapiens
tggaaaactccactgtgtattcattagagtaaaaaaggcaaataacattttagtatttatcctgaaaatagctttgacctcatggaccatccattaggatytcagaaatttccaggggtccctaaaccgtattttgagaactgcggatatatactgttaaagacacagtgatacacacctttaaggaagaaaaggaaattt

SEQ ID NO: 144748 - DNA, 201 bp, Homo sapiens
cttgctctctttttctgcctttcatatcattacctaagaaggaactatttccaggtaaagtcagtgaaatcctcatgagtcattcaggtgatttttttctragagttgatggtggctctggcccagaattactaagaaaaggctctaagaaacaaacagatgggctccccaccctctgtaaactttcttcctctatttagg

SEQ ID NO: 144749 - DNA, 201 bp, Homo sapiens
tggagtaattcaacctaattttatgaaaactttgtaatgctccataacaacttttaattgtcaacaccaaaaaaatttgtatcccagctctgactgcctayttttcttggaagaacttgctctctttttctgcctttcatatcattacctaagaaggaactatttccaggtaaagtcagtgaaatcctcatgagtcattca

SEQ ID NO: 144750 - DNA, 201 bp, Homo sapiens
aagtctccctctccatttatggcctcctcaaacactgacttaagcaagatatagtataatctctcatatttctaactttatatacttttttttttttttttggagacagagtctcactctgtccctcaggctggagtgcagtggcacaatctctgctcactgaaatctccacctcctgggttcaagcgattctcctgcctc

SEQ ID NO: 144751 - DNA, 201 bp, Homo sapiens
gtttctttcccttgccttttctcagttctctttttgattaaataaacatttttctcttccagtttggatgatttacagtctgtttctattcttctaagggmtagcctgagaaattaaggcatgcatatttatacagtctaaatttagtaaaacctcacagataatgtaaggaactttgtttgcctgtgcctggctttgaca

SEQ ID NO: 144752 - DNA, 201 bp, Homo sapiens
atatcaagtctcaaagaaaataatccattcattggaagaagagagccctgtaattcctaaaggtctttttagaaattatcagaaatacttttatatgaggkttttaatcaatagctgatggttcaatacatacaattaaaggccactactttaaacaagttttcaaatagtagatctataaaaatgtataccataaactta

SEQ ID NO: 144753 - DNA, 201 bp, Homo sapiens
atgctgtcagatttacaatatgcacttttttatttaatgttatgtgcaattgtaaatctggctgatttcaagactgtttattattattattattattattwtttttttttttgagatggagtcttgctctgtctcccaggctggagtgcggtggcatgatcttggctcactgcaacctctgcctcccaggttcaagcgatt

SEQ ID NO: 144754 - DNA, 201 bp, Homo sapiens
tttctgcttttctttcgaattaatacagagtctaaaagactgctataaatccaggcgcagtggcgcacgcttgtaataccagcactttgggaggctgaggyaggaggattgcttgaggccaggagttcaagaccagtctgggcaacacagtgagaccccatctctataataataattatttatttatttattgtttttgag

SEQ ID NO: 144755 - DNA, 201 bp, Homo sapiens
tatcccagctctgactgcctatttttcttggaagaacttgctctctttttctgcctttcatatcattacctaagaaggaactatttccaggtaaagtcagwgaaatcctcatgagtcattcaggtgatttttttctgagagttgatggtggctctggcccagaattactaagaaaaggctctaagaaacaaacagatgggc

SEQ ID NO: 144756 - DNA, 201 bp, Homo sapiens
ggtttcaccatgttagccagggtggtctcagtctcctgaccttgtgatccacccgccttggcctcccaaagtgctgggattacaggtgtgagccaccgcgyccagccatccacgtgtcttttagtcagttacttaacctctctgtgccttagctttttttaatcttcaaaataggggacataataccttaattattcttgt

SEQ ID NO: 144757 - DNA, 201 bp, Homo sapiens
atctcttaatattacaaaggcaattaaatttcaacatgagttttgaaggagacaaatgttcaaactatagcaggtagggagaaaggaaggaagaaggaggrggagggaaaagagactgatgggttaggaggaactttagcaaaagaatcagctctgccaggtggaaagggaaactaccaggagagaaagaggtgggggaag

SEQ ID NO: 144758 - DNA, 201 bp, Homo sapiens
ttatttatttatttatttatttatttatttttgagatggagtctcactttgtcgcccaggctggagtgcagtggtgtgatcttggctcactgcaacctccrtcttccaggttcaagcgattctcctgcctcagcctcccgagtagctgggattacaggcacccgccaccacacccagctacttttgcatttttagtagaga

SEQ ID NO: 144759 - DNA, 201 bp, Homo sapiens
gaaaactccactgtgtattcattagagtaaaaaaggcaaataacattttagtatttatcctgaaaatagctttgacctcatggaccatccattaggatctyagaaatttccaggggtccctaaaccgtattttgagaactgcggatatatactgttaaagacacagtgatacacacctttaaggaagaaaaggaaatttaa

SEQ ID NO: 144760 - DNA, 201 bp, Homo sapiens
gtcctgttaatggaagcacttactgctaattggatatgaatggggtgggatgggggtggtgactccttatctgaataacatcagttgtgttggttctaacscatttcttcttctcctttgtcatcaccactgtcatttttttctcttctctgtcttctccttccttttcctctgaccttctttatttttaacagggattgg

SEQ ID NO: 144761 - DNA, 201 bp, Homo sapiens
gttggccaggttggtcttgaactcctgacttcaagtgatcggcccacctcggcctgccaaagtgctgggattacaggtgtgagccactatgcctggccaayatgcttaattgtggatagtttctttttctatgtttaagttcactgatctttttcttcttggtatctagtctgctgttaatcccatctggtgtttttaaaa

SEQ ID NO: 144762 - DNA, 201 bp, Homo sapiens
gttggggtaagcatttcatcagcacatgatcatcaatggaattttcagttcctttgtttttttttttctttttcttctaggtgttccctttatcttattgkgagcagattcttagtctgctatattttatcttcttgcttttattatcagcaaattctaaaacttttaccttgctggacttaactgttatcattcatttct

SEQ ID NO: 144763 - DNA, 201 bp, Homo sapiens
atatctgttttaaaagacttcaggggagtttcttctatctgaagtttgaggttaatgttattctttgtgttttgtaagatgcatacctttgtattggttaracagcatgttaggtaattatggccatcacaacttttacaattcaccagtttgtatggtaagtatacctattttttttccttttaggcaaataaagtcaac

SEQ ID NO: 144764 - DNA, 201 bp, Homo sapiens
tttgaaataagaaattatgcaaagagtatatgtttcttaagctacgttgtataattctgaggttaagtcagagaccctggggttctggctatctcttatcrgttgtatgaccttgggaaaatttcttaggcttctgagttagttcctttttctataagggtacaataacaatagttcccatttgtgaggcttaaatgaata

SEQ ID NO: 144765 - DNA, 201 bp, Homo sapiens
atcagtactaaatcttagagtgaattatctaggctgtctttgaaacagtttttatgctgatttaaatcactgaaaagatagacttcttaatcaactcacastttcctttcatctattacatgatcattgttgtgtttatgatactgttccttttgactttcggtggatcatcacgagttttgcttaacagttcttgtcatg

SEQ ID NO: 144766 - DNA, 201 bp, Homo sapiens
cactttcctttcatctattacatgatcattgttgtgtttatgatactgttccttttgactttcggtggatcatcacgagttttgcttaacagttcttgtcrtgtttttctttgctgaatttagtatgggatcctacattgcttttaggactgcactaggtctaaaagaaaacaatcaaccagaaccattgcatttattttt

SEQ ID NO: 144767 - DNA, 201 bp, Homo sapiens
cggtggatcatcacgagttttgcttaacagttcttgtcatgtttttctttgctgaatttagtatgggatcctacattgcttttaggactgcactaggtctraaagaaaacaatcaaccagaaccattgcatttatttttgtcaagtgcaactcctgtacatgtaagtaatttagctttttcctaggaagggcagtggagag

SEQ ID NO: 144768 - DNA, 201 bp, Homo sapiens
aaaccacaattgattttgcaccaacctaatacttgctgttgaaaagtcccttaaatctctttcaatatcattctctgtttccctgaaatgcacttcagctrtttcctactggtactattcctggcgtctctgagctaatgctgaccatagtgctttttccttcattgtgggtcagctgggaacttaaccaactttgagcaa

SEQ ID NO: 144769 - DNA, 201 bp, Homo sapiens
tctttagagtccgcttagcagactgaaaccctgtgtcttactcactgcgagattctgagcaagtttctttaacggtctgtgtctcatctcatcaaagaagkgataagaatagcaccttttcaaggtgttgtgtgagaattaactgcttggtagaggggagcgtctggcacacaacaaaccatgagctatttttaaaaaaca

SEQ ID NO: 144770 - DNA, 201 bp, Homo sapiens
acacaacaaaccatgagctatttttaaaaaacaaaacacaaccaaaaaactcacaaccaatgagttttttcactccaaagaaacctccaaaacaccagaartaacacattaacataaatcattcatggggatattctactcacagaatgtagaaaatgttgacattctcaccctttctccagtgagccaaattgcagtagt

SEQ ID NO: 144771 - DNA, 201 bp, Homo sapiens
aggagaactgcttgaagtcaggaattcgagaccagcctgggcaacatagagagacccccatctccaaaaagaaatttttagaattaggcaggtgtggtggygtgcacctctagtcctagttactcgggaggctgaggtgggaagattgcttgagcctgggaagttgaagctgcagtgagctatgatagcacccctgcacgc

SEQ ID NO: 144772 - DNA, 201 bp, Homo sapiens
ggctgggtgacagagcgagactccgtatcaaaaaaaaaagtgtaagtcactagttgtaactgtggaggctgggcacatcacatcagaggcctaaccgatasctagatggcttcctagatgaaacacgacccatttcttgtgagctatccacaggcagcagagtgtctgagatgaaggaatagtataggaaatctcatattg

SEQ ID NO: 144773 - DNA, 201 bp, Homo sapiens
tctttgaaacagtttttatgctgatttaaatcactgaaaagatagacttcttaatcaactcacactttcctttcatctattacatgatcattgttgtgttyatgatactgttccttttgactttcggtggatcatcacgagttttgcttaacagttcttgtcatgtttttctttgctgaatttagtatgggatcctacatt

SEQ ID NO: 144774 - DNA, 201 bp, Homo sapiens
ctggaaaactccactgtgtattcattagagtaaaaaaggcaaataacattttagtatttatcctgaaaatagctttgacctcatggaccatccattaggawctcagaaatttccaggggtccctaaaccgtattttgagaactgcggatatatactgttaaagacacagtgatacacacctttaaggaagaaaaggaaatt

SEQ ID NO: 144775 - DNA, 201 bp, Homo sapiens
atccgtgtaagatgtgacttgcttctccttgccttccaccatgattgtgaggcctccccagctatgtggcactgtaagtctgtgaaacccttttccagtayaaattacccagtctcgggtatgtttttattagcagcatgaaaacggactaacgcagagacattgcaggggaaacagcagggacgtgttaaaactcactgg

SEQ ID NO: 144776 - DNA, 201 bp, Homo sapiens
gaggtggttgaatcagggggatgggtctttcctgtgctatttttgtgttagtgaatgagtctcatgagatctgacagttttaaaaacgggagttcccctgygcaaactctctctttgcctgctgccatccgtgtaagatgtgacttgcttctccttgccttccaccatgattgtgaggcctccccagctatgtggcactgt

SEQ ID NO: 144777 - DNA, 201 bp, Homo sapiens
agctttcttggtggacaccatttcacgtgttgtcacaacttggttcaggaggaactgagcatggcctgtgtgattccactgggacaggactcttggaaccytgagcgttgtttcctctggagctcacgctatgctccttctccttttgctcatttgctttggatcttttcactgtaatacatcatagccacaagtccagtg

SEQ ID NO: 144778 - DNA, 201 bp, Homo sapiens
ggcgcccgccaccacacccagctaattttttgtatttttagtagagatggggtttcaccatgttagccagggtggtctcagtctcctgaccttgtgatccrcccgccttggcctcccaaagtgctgggattacaggtgtgagccaccgcgtccagccatccacgtgtcttttagtcagttacttaacctctctgtgcctta

SEQ ID NO: 144779 - DNA, 201 bp, Homo sapiens
tctatacattcccccactggttttaagtgtcagttgaattgtaaattgagttttcacatgtatgtgggtctatttctgggcttttttttttttttttttttgagatggagtctcgctctggagtgcaatggcacaatctcagctcactgcagcttctgcctcctgggttcaagcgattctcttgccacagccttccgagta

SEQ ID NO: 144780 - DNA, 201 bp, Homo sapiens
attatcccattatcaccagcacgataggatactttcagttcttgtcttctttgatctcttagaggcattccacacctttttttatttttatttttatttttttttttttgagacagagttttcgctcttgtggcccaggctggagtgcaatggtgcgatcttggctcactgcaacctctgcctcccaggtccaagcgattc

SEQ ID NO: 144781 - DNA, 201 bp, Homo sapiens
ggaactcctgacctcaggcaatccacctgtcttggcctcctgaagtgctaggattataggtgtgagccagcgtgcccagcccatgagatgttttaatacasgcatgcaatgtaatgtcacggagaatggggtatccaccctctcaaacatttatcctttgtgttacagacaatccaattatactcttctagtcattttaga

SEQ ID NO: 144782 - DNA, 201 bp, Homo sapiens
attagaattatcccattatcaccagcacgataggatactttcagttcttgtcttctttgatctcttagaggcattccacacctttttttatttttatttttatttttttttttttgagacagagttttcgctcttgtggcccaggctggagtgcaatggtgcgatcttggctcactgcaacctctgcctcccaggtccaag

SEQ ID NO: 144783 - DNA, 201 bp, Homo sapiens
acacgcatgcaatgtaatgtcacggagaatggggtatccaccctctcaaacatttatcctttgtgttacagacaatccaattatactcttctagtcatttyagaatgtacaattaagttattattgactacagtcactctgttgtgctataaaatagttggacatcatacttgcttcctccctctcccacagtctccatat

SEQ ID NO: 144784 - DNA, 201 bp, Homo sapiens
gtttttgtagagatgggcttttgccatgttgtctaggctggtattgtactcagtcaaggattcacccgcctcaacctcccaaagtgctgggattataggcrtgagccacagtgctcaatcctcttaagcatttttttttttttttttgagatggagtctcgctctgtcacccaggctgaagttcagtggcgcaatctcagc

SEQ ID NO: 144785 - DNA, 201 bp, Homo sapiens
ggaaaagaggccatctgtctaaactctaacctcctctgcttcagcctcaaaatatctctgcagcatcaccccttccttccttcccttccccacttcccttycccccgtcctagatgaacaagtttcatcatgcctttttagcaataaccgctaccccgttttctactcctattcattcatttattgttcattccacatgat

SEQ ID NO: 144786 - DNA, 201 bp, Homo sapiens
tgcatttgtaggcgacttttgagatgctgaactagcaccctttctccatgattgtatctttactcattgtaagcatacggacagctgctgctggaaagagkcctgtctgtattttagctaagagtcccccagaagaaggcaacatttcaggaggtggccaacagcaagactgtgcagtcgtcagtttggaagacaaggccc

SEQ ID NO: 144787 - DNA, 201 bp, Homo sapiens
agaagattgcatttgtaggcgacttttgagatgctgaactagcaccctttctccatgattgtatctttactcattgtaagcatacggacagctgctgctgsaaagaggcctgtctgtattttagctaagagtcccccagaagaaggcaacatttcaggaggtggccaacagcaagactgtgcagtcgtcagtttggaagac

SEQ ID NO: 144788 - DNA, 201 bp, Homo sapiens
agtaaacacactgggcatgcagcccctcccaagttctggcaggccactgtgcatgcagagagcccaccccaagggaagaatcaaggtagaagggatgcaamcccccgaagcatgccaatgtataaaaccccaagtcaaaggtcaaacagggcacttgatctctcaagtcatccacttagccctcttccaagtgtacttcac

SEQ ID NO: 144789 - DNA, 201 bp, Homo sapiens
atggtcttgggagctcacggtgggttccactgtggcctatgccaaaaccagagagtatcttcaacagcccataaagaagcataagactgtacggcagatakttttcattttttcttttctttcttttttttttttttttgagacgggtcttgctcttgttgcccaggctggcatgcagtggcacgatctcggctcactgca

SEQ ID NO: 144790 - DNA, 201 bp, Homo sapiens
tgataggatttcagaaactggtcaagtggattcacacatgcgcactaagaggcaaaatggtggtgtttaactggtccttcttccagaaaaactagtaaggraaaaacactttcagtgagcatgcatacaactccagtaaacacactgggcatgcagcccctcccaagttctggcaggccactgtgcatgcagagagcccac

SEQ ID NO: 144791 - DNA, 201 bp, Homo sapiens
ttatggtcttgggagctcacggtgggttccactgtggcctatgccaaaaccagagagtatcttcaacagcccataaagaagcataagactgtacggcagayatttttcattttttcttttctttcttttttttttttttttgagacgggtcttgctcttgttgcccaggctggcatgcagtggcacgatctcggctcactg

SEQ ID NO: 144792 - DNA, 201 bp, Homo sapiens
ttctcaagcatatgataggctcttttaatatgtcattttctttcttattttatttcagggaatgttacagtaggtagttagacataaacaaggcaggagargcccctccacccccagccaggaatgtcaagtgactatcaggtgatggtcaggcagttgttaaaccatctatctaaaataataattagtcaccgccggttc

SEQ ID NO: 144793 - DNA, 201 bp, Homo sapiens
tcagctctgccaggtggaaagggaaactaccaggagagaaagaggtgggggaaggaacctcctagaggaaagggcagactccaccattttttttttttctyttttttttttttttgagacggagtctcgctctgtcacccaggctggagtgcaatggcaagatcttggctcactgcaacctccgcctcccaggttcaagca

SEQ ID NO: 144794 - DNA, 201 bp, Homo sapiens
gagccactgtgtctggccacaaatcctcaaattctaacattttaatgcaactactatgggtcaagtttctcaagcatatgataggctcttttaatatgtcrttttctttcttattttatttcagggaatgttacagtaggtagttagacataaacaaggcaggagaggcccctccacccccagccaggaatgtcaagtgac

SEQ ID NO: 144795 - DNA, 201 bp, Homo sapiens
aatcagttatggtcttgggagctcacggtgggttccactgtggcctatgccaaaaccagagagtatcttcaacagcccataaagaagcataagactgtackgcagatatttttcattttttcttttctttcttttttttttttttttgagacgggtcttgctcttgttgcccaggctggcatgcagtggcacgatctcggc

SEQ ID NO: 144796 - DNA, 201 bp, Homo sapiens
acagcaggacccacatgatgatgagagaagactgtccctttgcagggtgagctgaggctggaagtggtctatggcccagccactttgttcttgcaggtgtsctctgtgatggactaatcagttatggtcttgggagctcacggtgggttccactgtggcctatgccaaaaccagagagtatcttcaacagcccataaagaa

SEQ ID NO: 144797 - DNA, 201 bp, Homo sapiens
tttgagacagagttttgctctttttgcccaggctggagtgcaatgacgtgatctcggctcactgcaaccttcacctccccggttcaagcgattctcctgcytcagcctcccaagtagctgggattacaggcacccgccatcacgcccagctaattttttgtatttttagtagagacagggtttcactatgttagccaggct

SEQ ID NO: 144798 - DNA, 201 bp, Homo sapiens
aaagtccagtttttacaagatcaaatattgagattaatgatgtgcaagaaatgtcagggccagaagagacctgtagaaagaaatctattttctgacctatktaaaacaactatcaaatttttattggcagcaccgggtaagtaatagtagctccactaatcagttacattcattcatttatttatttattttatttattta

SEQ ID NO: 144799 - DNA, 201 bp, Homo sapiens
gggtcctatctcttaatattacaaaggcaattaaatttcaacatgagttttgaaggagacaaatgttcaaactatagcaggtagggagaaaggaaggaagraggagggggagggaaaagagactgatgggttaggaggaactttagcaaaagaatcagctctgccaggtggaaagggaaactaccaggagagaaagaggtg

SEQ ID NO: 144800 - DNA, 201 bp, Homo sapiens
ctgccctgtggaggtgtctctctagcctctcgcctcactcctaattgttctcgtcaacccctagtggaggcccatggaaaagaggctgcatggctgggcayggtggctcatgcctggaatcccagcaccttcagaggccaaggcgggcggatcacttgaggtcaggagttcgagaccagcctggccaacatggcgaaaccc

SEQ ID NO: 144801 - DNA, 201 bp, Homo sapiens
tgtgagggtgttgacaaaggagattaacagggaagtcagtgaactgggaaaggcagacccaccctcaatctgggtgagcaccatctaatcggctgccagcktggctagaatataaacaggcagaaaaatgtgaaaaggctggactagcctagcctcccagactccatctttctcccatgctggatgcttcctgcccttgaa

SEQ ID NO: 144802 - DNA, 201 bp, Homo sapiens
actgattattttattgcagtaaagacaaccctgattttagtgccacccgtgataggctggcttttgctaataggattagaacatcctcagtagaaaaattytgtgaacctgagatcaaagtccagtttttacaagatcaaatattgagattaatgatgtgcaagaaatgtcagggccagaagagacctgtagaaagaaatc

SEQ ID NO: 144803 - DNA, 201 bp, Homo sapiens
cgatatttatcatactgaaaggaaaaactaagaaattttaaagacgtttattaacttacctaaaaataacattaacaaacctattatacattgacataaayaatatattttaatgaaaaagactatattttccaaaaaaatgtgagaaggtgagaagagtggcatcatttgatacttttgcaaatctgcttaatgtctgac

SEQ ID NO: 144804 - DNA, 201 bp, Homo sapiens
actgtgtattcattagagtaaaaaaggcaaataacattttagtatttatcctgaaaatagctttgacctcatggaccatccattaggatctcagaaatttycaggggtccctaaaccgtattttgagaactgcggatatatactgttaaagacacagtgatacacacctttaaggaagaaaaggaaatttaaattaatttg

SEQ ID NO: 144805 - DNA, 201 bp, Homo sapiens
gaaagtaacagactcttctttttgcagtgctttgagtacccgaatttcatccgagtggtcatcacagtccccgaggtgatgatgctggaggcgtgcagccrgatccaggagttctgtgagcagcactaccattgtgctgaaggcagccaggaggagtgtgataaataggcctgcatccattctcctgaggatgtgtcccat

SEQ ID NO: 144806 - DNA, 201 bp, Homo sapiens
acttttactaacaatgatatttacatggaacttctaacaagatggagtggttcttcctggtcctctgcagatgacaagaagcattaggtagattttcttgrataggctcgcatggaaaggaaggagaacctatgctttgactgatgaacaattttcatcttattccttcttggtttcacatagagcatggttaagctttga

SEQ ID NO: 144807 - DNA, 201 bp, Homo sapiens
ttggttacactgatttttttctctctcccacttctcactctctatttcctttatttctgctctaatttttattgtttctctctcttgctctctctctctctttttttttttttttttgagatagggtcttgttctgttgcccaggctggagtgcagtggtgcaatcatggctcactgcatcctcgacctcccaggctcaag

SEQ ID NO: 144808 - DNA, 201 bp, Homo sapiens
tctcctttatccacaatggctgagagctgaactaaatagaatgccctctgagcaggggcagaggcagcctgaagcccatgctgggcctccagggcatagcygtcagttgagggatgaaaacttcatcttcttgccaggcacagtggctcacccctgtaatcccagcactttcaggaggctgaggtgggaggagcccctgag

SEQ ID NO: 144809 - DNA, 201 bp, Homo sapiens
tcactgcatcctcgacctcccaggctcaagtgatcctcccacttcagcctcctgagtagctgggactgcaggtgcacaccaccatcgctgctaatttaaatttttttttttttttttttttagagatggggtctcactatgttgcccaggctggtctcaaactcctgggctcaggtgatcctcctgctttagtcttccaag

SEQ ID NO: 144810 - DNA, 201 bp, Homo sapiens
cactgcatcctcgacctcccaggctcaagtgatcctcccacttcagcctcctgagtagctgggactgcaggtgcacaccaccatcgctgctaatttaaatttttttttttttttttttttagagatggggtctcactatgttgcccaggctggtctcaaactcctgggctcaggtgatcctcctgctttagtcttccaagg

SEQ ID NO: 144811 - DNA, 201 bp, Homo sapiens
actgcatcctcgacctcccaggctcaagtgatcctcccacttcagcctcctgagtagctgggactgcaggtgcacaccaccatcgctgctaatttaaatttttttttttttttttttttagagatggggtctcactatgttgcccaggctggtctcaaactcctgggctcaggtgatcctcctgctttagtcttccaaggt

SEQ ID NO: 144812 - DNA, 201 bp, Homo sapiens
gggccttttttccttttaacatgtttccatcttcagcacttagacatcgaaatccatactgatttagggcagagcaagagctaaccctgaaaggtgcctcsttttttttttttttttgaaatagagtcttgctctctccttcaggctagagtgcagtggcgcgatctccactcactgcaacctccgcctcccgggttcaag

SEQ ID NO: 144813 - DNA, 201 bp, Homo sapiens
agttacttgtattgttattattattttttttattattgagagagagtcgcctgctgtcacccaggctggagtgcagtggtgcgatctcagctcactgcaamctctgcttcccagtttcaagcgattctcctgcctcagcctcccgaatagctgggattacaggtgcctgccaccatgcccggctaatttttgtatttttag

SEQ ID NO: 144814 - DNA, 201 bp, Homo sapiens
aacgcaactgtccttctttctcattcctgtccttcagccacccagtttcttctcccctgagggaatcagttatcatttgctggtcatacttccagattatmctgtgcctatgtaagtgtgtgtgtgtgtgtgtgtgtgtgcacttttcattttttcaaataaagtattactcaactttgtaattctgcgcgctctggaggt

SEQ ID NO: 144815 - DNA, 201 bp, Homo sapiens
ttgctctctctctctctttttttttttttttttgagatagggtcttgttctgttgcccaggctggagtgcagtggtgcaatcatggctcactgcatcctcracctcccaggctcaagtgatcctcccacttcagcctcctgagtagctgggactgcaggtgcacaccaccatcgctgctaatttaaatttttttttttttt

SEQ ID NO: 144816 - DNA, 201 bp, Homo sapiens
agtgaagccttggccatgcacatagtccctctgatgagctgagattactggagttttagcagggttctctttaattatattttctctggtcccctgttaarcttctttctggtctgactttatcggtaacatatccagctgttagctaccaataactgctagctggttgctctattttttttttgtaacaatgtctggggc

SEQ ID NO: 144817 - DNA, 201 bp, Homo sapiens
atagtccctctgatgagctgagattactggagttttagcagggttctctttaattatattttctctggtcccctgttaagcttctttctggtctgactttmtcggtaacatatccagctgttagctaccaataactgctagctggttgctctattttttttttgtaacaatgtctggggcataaattgctccatcacctga

SEQ ID NO: 144818 - DNA, 201 bp, Homo sapiens
gccaggctggtctcgaactcctgacctcaggtgatccacccccgctggcctcccaaagtgctgggattacaggcatgagccaccgcacccagctcagtaaktcctttttgaaagagtctctgagctctctattcttatggccttctctccccctggacagaatctctgccactacatcagagtcggggggacaaggaatgt

SEQ ID NO: 144819 - DNA, 201 bp, Homo sapiens
ttgctctgtgtatatagctcctttgcttcatttctgcttctctatgtattgaaggcctattttcattatggtcctgagcacattgaaatgcaattgttacygtttatgactaacgggtttaaacaaacaaataaacaaacacccaagaacaacaaaaaatgggctgtcaaactgaaggatagaaggttgtttctgatagat

SEQ ID NO: 144820 - DNA, 201 bp, Homo sapiens
cgttggtgggagaagctctgtgccgggaaaaatgaaaggcagaaaggccaggtggtctgtgaggccctcagacatggccaagaaaactttcaaccccatcygagccattgtggacaacatgaaggtgaaaccaaatccaaacaaaaccatgatttccctgtccattggtgagttggggacactactgaggggctgtcattg

SEQ ID NO: 144821 - DNA, 201 bp, Homo sapiens
actctcaagatattgccatttttgttccttccttctttttcttgttttctttgccaaaagattgtaaagcaaatcctggacatcgttagttctccccataygcctcagtacacatctctaaacacataatttcttaaccacagtgccacatcacatcaaatagtaagatatttttggttgcctccaaaatgtcttcttata

SEQ ID NO: 144822 - DNA, 201 bp, Homo sapiens
cagcaaagccttctcaaccctcttagtggatttgctcagggacagtccaggtagacagaagatccagcaacaggtttctctgttcttgttcagatctgacktggcggtagcccagcaaattcatggcatcgccacaggctttctgaagtcgagaaaccttttcatagggcaaagaccagcgccaagcctgggagacattaa

SEQ ID NO: 144823 - DNA, 201 bp, Homo sapiens
tgaaagtaacagactcttctttttgcagtgctttgagtacccgaatttcatccgagtggtcatcacagtccccgaggtgatgatgctggaggcgtgcagcyggatccaggagttctgtgagcagcactaccattgtgctgaaggcagccaggaggagtgtgataaataggcctgcatccattctcctgaggatgtgtccca

SEQ ID NO: 144824 - DNA, 201 bp, Homo sapiens
tttttttgtgtgagtggaaaaaaagatataaaggagtcagactttagggagatcaactcaaatatctgtgtggcatttaaaggatttttaggtttttaaaraaaagaaaaagcatgtaagattgccagtttgtagctatctgttcatggtggaaaacagtaactttttctcatgttcatcctagtcacaaacattgtgatg

SEQ ID NO: 144825 - DNA, 201 bp, Homo sapiens
tgtcactgcactccaagtccgggtgacagagtgagacacagtctctaaaaaccaaaaaagctccactttccactcttttctttcaggcttcctatccagtygggaggagattgcttcttattaccactgtcctgaggcacccctagaagctaaggtgagccttatacaagacaccagctctgaagcaatttagggcaaact

SEQ ID NO: 144826 - DNA, 201 bp, Homo sapiens
gtaccacttcttgtggatcagggtcctgaccattttagggtggtccagtaccagactcaattgctctgaaagtaacagactcttctttttgcagtgctttkagtacccgaatttcatccgagtggtcatcacagtccccgaggtgatgatgctggaggcgtgcagccggatccaggagttctgtgagcagcactaccattg

SEQ ID NO: 144827 - DNA, 201 bp, Homo sapiens; identical to SEQ ID NO: 26775

SEQ ID NO: 144828 - DNA, 201 bp, Homo sapiens
gttaggttgagggttggggatggggagaggacactagtcgtagttacttgtattgttattattattttttttattattgagagagagtcgcctgctgtcayccaggctggagtgcagtggtgcgatctcagctcactgcaaactctgcttcccagtttcaagcgattctcctgcctcagcctcccgaatagctgggattac

SEQ ID NO: 144829 - DNA, 201 bp, Homo sapiens
acgaatatacaaaggatgagattagataaagatttcagtttcccgtatgccaccgctgccgccaattttccaaaaaagcctggctcctcttttcctgttcytccatccaagcccccaaagatctctaaccagaaataaacaggaagactcagtgatttacaaaagacattttagttttacacgtacagaaaattctaccca

SEQ ID NO: 144830 - DNA, 201 bp, Homo sapiens
tgcttcttattaccactgtcctgaggcacccctagaagctaaggtgagccttatacaagacaccagctctgaagcaatttagggcaaactatccctttttmcttgtttctgttccacaagaagtacgggtgtcagagggggaaaagctgagaacaatttccctttagcaattagaagacttctcatatagttggggtcact

SEQ ID NO: 144831 - DNA, 201 bp, Homo sapiens
atgttctacattctggatatgtttgttggcttccttgtggtgtcatttaacttgttcatttaactagagcatgcatttttcaacagagatgatattggatmtttactagaaatttaccttcttttttttgttgttgaaacaggatcttgctctgttgcccagactggagtgcaatgacatgattacaatcatagctcgctg

SEQ ID NO: 144832 - DNA, 201 bp, Homo sapiens
tttgggaggccgaggcgggcggatcacgaggtcagaagtttgagaccatcttgaccaacttggtgaaacctcggctctactaaaaatacaaaaattagccragcgtggtgacgcgcgcctgtaatcctagctacttagaaggctgaggcaggagaatcgcttgaacaccggaggcagagcttgcagtgagccgagatggcg

SEQ ID NO: 144833 - DNA, 201 bp, Homo sapiens
aagatttctttataatccatcttgttactcagccttaacatttggaagggcttggctttgtggagaggtctaaattttaaatccctgccttacatgggtckaagtcctcctccactagtgttaaactctaaacccatgattactgagatgttaccagcataagcatactcttattttccaaattttcaggcccctctttgt

SEQ ID NO: 144834 - DNA, 201 bp, Homo sapiens
tggagggctggccaagcgctggctggttcctggctggaggttgggctggatcctcattcatgaccgaagagacatttttggcaatgaggtgataatatggwgaaagagtatgtgtaatttagggtatatatttatttcatgagcacagtggggacaagggaggcttttttcttttctttctccttgtcagtcaagcagcat

SEQ ID NO: 144835 - DNA, 201 bp, Homo sapiens
ttgaactagactattttaggattattaatccctaacatgtaatttactaactgcaagctgctcaccctccaactggctcacaatctgacacctggacattwtacagccctttaatctcttcaaacatttcccaagtccattaactcccttgcattgttacacttcttttttgcctcatggtgctgtactctgcccacattc

SEQ ID NO: 144836 - DNA, 201 bp, Homo sapiens
tgaaagagtatgtgtaatttagggtatatatttatttcatgagcacagtggggacaagggaggcttttttcttttctttctccttgtcagtcaagcagcaygtgtgtggcagagctgggctacgaacccagagggtctgatctaagaatgccactagacaccatcactttccaagattaaaaacctgatagaaaggtcaga

SEQ ID NO: 144837 - DNA, 201 bp, Homo sapiens
cttaataaagaaattagggtgtactttgttttctagccttggggaacatggggacagaagcccaagggaagagcagcttgtccaagaagcagtagcaacaracacgtgcctggagggagtgtgatagcatctgccacgtggaggagagcatgagccattcttcagcactagagaagatggcattgcagccagcaggaatgt

SEQ ID NO: 144838 - DNA, 201 bp, Homo sapiens
ccttggggaacatggggacagaagcccaagggaagagcagcttgtccaagaagcagtagcaacagacacgtgcctggagggagtgtgatagcatctgccaygtggaggagagcatgagccattcttcagcactagagaagatggcattgcagccagcaggaatgtggcatcattctgaaagcaatgagaatgacactaatg

SEQ ID NO: 144839 - DNA, 201 bp, Homo sapiens
ggtcccaagttactacccttgcctatatccactaaccactcactaggtcacaaagttgatggctctggcttgacccagtgaatgagaagtgtcctagatgtttttttttttttttttttttcgcaaatcttcataggcacagttgcctgtttaattttttcttcagcccttcccttagaggagggagccttaagttacctt

SEQ ID NO: 144840 - DNA, 201 bp, Homo sapiens
ccaagttactacccttgcctatatccactaaccactcactaggtcacaaagttgatggctctggcttgacccagtgaatgagaagtgtcctagatgttttkttttttttttttttttcgcaaatcttcataggcacagttgcctgtttaattttttcttcagcccttcccttagaggagggagccttaagttacctttcaa

SEQ ID NO: 144841 - DNA, 201 bp, Homo sapiens
tactacccttgcctatatccactaaccactcactaggtcacaaagttgatggctctggcttgacccagtgaatgagaagtgtcctagatgttttttttttwttttttttttcgcaaatcttcataggcacagttgcctgtttaattttttcttcagcccttcccttagaggagggagccttaagttacctttcaaggttgg

SEQ ID NO: 144842 - DNA, 201 bp, Homo sapiens
ccagaataagaaagatttctttataatccatcttgttactcagccttaacatttggaagggcttggctttgtggagaggtctaaattttaaatccctgccktacatgggtctaagtcctcctccactagtgttaaactctaaacccatgattactgagatgttaccagcataagcatactcttattttccaaattttcagg

SEQ ID NO: 144843 - DNA, 201 bp, Homo sapiens
aggggaattgcttgaacctgagaggcggaggttgcagtgaggtgagatcacatcactgcattccagcctgggtgacagagtgagactccatctcaaaaataaataataataataataataataataataataataataataataatactaaaataaaaaaagtctccagacattgtcaagtgttccctgtgggacaaaatt

SEQ ID NO: 144844 - DNA, 201 bp, Homo sapiens
ggggaattgcttgaacctgagaggcggaggttgcagtgaggtgagatcacatcactgcattccagcctgggtgacagagtgagactccatctcaaaaataaataataataataataataataataataataataataataataatactaaaataaaaaaagtctccagacattgtcaagtgttccctgtgggacaaaattg

SEQ ID NO: 144845 - DNA, 201 bp, Homo sapiens
gggaattgcttgaacctgagaggcggaggttgcagtgaggtgagatcacatcactgcattccagcctgggtgacagagtgagactccatctcaaaaataaataataataataataataataataataataataataataataatactaaaataaaaaaagtctccagacattgtcaagtgttccctgtgggacaaaattgc

SEQ ID NO: 144846 - DNA, 201 bp, Homo sapiens
ggaattgcttgaacctgagaggcggaggttgcagtgaggtgagatcacatcactgcattccagcctgggtgacagagtgagactccatctcaaaaataaataataataataataataataataataataataataataataatactaaaataaaaaaagtctccagacattgtcaagtgttccctgtgggacaaaattgcc

SEQ ID NO: 144847 - DNA, 201 bp, Homo sapiens; identical to SEQ ID NO: 26763

SEQ ID NO: 144848 - DNA, 201 bp, Homo sapiens
gaattgcttgaacctgagaggcggaggttgcagtgaggtgagatcacatcactgcattccagcctgggtgacagagtgagactccatctcaaaaataaataataataataataataataataataataataataataataatactaaaataaaaaaagtctccagacattgtcaagtgttccctgtgggacaaaattgcct

SEQ ID NO: 144849 - DNA, 201 bp, Homo sapiens
attgcttgaacctgagaggcggaggttgcagtgaggtgagatcacatcactgcattccagcctgggtgacagagtgagactccatctcaaaaataaataataataataataataataataataataataataataataatactaaaataaaaaaagtctccagacattgtcaagtgttccctgtgggacaaaattgcctcc

SEQ ID NO: 144850 - DNA, 201 bp, Homo sapiens
agatcacatcactgcattccagcctgggtgacagagtgagactccatctcaaaaataaataataataataataataataataataataataataataatamtactaaaataaaaaaagtctccagacattgtcaagtgttccctgtgggacaaaattgcctccagttgagaaccactcatgtagagaacctagaagatcag

SEQ ID NO: 144851 - DNA, 201 bp, Homo sapiens
aatcccagctccagcctcctgaacacttcaacaagagactgtgccattgttcactgcagccttgttcaacactgggtcaggcttttaagattatatagcattttttttttttttaagacagagtcttgctctgtcacccaggctggagtgcagaggcactgtctcggctcactgcaacctctgcctcccgggttgaagcaa

SEQ ID NO: 144852 - DNA, 201 bp, Homo sapiens
aggagtttgagaccagcctggccaacatggtgaatgcctgcctctgctaaaaatacaaaaattagctggacgtgttggctggtgcctgtaatcccagctaygtgggaggctgaggtaggagaatcacttgaatcagaaaggcagagattgcagtgagccgagattgtgccattgcactctagcctgggcaacaagagcaaa

SEQ ID NO: 144853 - DNA, 201 bp, Homo sapiens
gtatcacacaaccctagggagtgccatcccatcaagaatttagatatttattttcaaaatgttttttgtaggtgatagtaaagtatcttggtccaacaaartaagtatattaaggccaggtgcagtggctcatgcctgtaatcccagcactttgggagactgagctgggcagatcacttgaggtcaggaatttgagaccag

SEQ ID NO: 144854 - DNA, 201 bp, Homo sapiens
acaggacacagctccgggcgccggcgtagaatctgagctgcaggtgagggttagttcctttattcggcctctgcgttctcttaggatgttacattttgttkcctttttcagcctgtctaccctggtcacaccctgcttcgagtttctcttcctcctttgcccccggtttgggctctgactggtggaattgttccaggaagt

SEQ ID NO: 144855 - DNA, 201 bp, Homo sapiens
tctctctgcccctggtgaaaagcttcaagtaatagagctttttctttttcactccttatgccagaacatcacacctacgttcccactcttcaatgaggggkctatttttaatgacttggcttttcttttacttaaattttgatccttgatttctccttgcctcttcttgtagtccaatgctgatctctgttatggggcgtt

SEQ ID NO: 144856 - DNA, 201 bp, Homo sapiens
taatgtccctctttcatttctgattttagtaattagtctgttttcttttgttggtcagtctagctaaaactgtctattttgttgatcttttcaaagaaccmaatttggttacactgatttttttctctctcccacttctcactctctatttcctttatttctgctctaatttttattgtttctctctcttgctctctctct

SEQ ID NO: 144857 - DNA, 201 bp, Homo sapiens
gccctggtctcctgcagtaccctcaggctttgggaaattccagcctggtaaattctagtcagaccagttctctgctcttgaaccgtgtttcctgttaagawgtttatcaagacaatgtgtgcacagtgggacatagaccctcatcagtaattctaattttgccttgccttgtgatctttattgccctttgaagcatgtgat

SEQ ID NO: 144858 - DNA, 201 bp, Homo sapiens
ttgtgtgagtggaaaaaaagatataaaggagtcagactttagggagatcaactcaaatatctgtgtggcatttaaaggatttttaggtttttaaagaaaaraaaaagcatgtaagattgccagtttgtagctatctgttcatggtggaaaacagtaactttttctcatgttcatcctagtcacaaacattgtgatgttact

SEQ ID NO: 144859 - DNA, 201 bp, Homo sapiens
agaacagggggccttttttccttttaacatgtttccatcttcagcacttagacatcgaaatccatactgatttagggcagagcaagagctaaccctgaaakgtgcctctttttttttttttttttgaaatagagtcttgctctctccttcaggctagagtgcagtggcgcgatctccactcactgcaacctccgcctcccg

SEQ ID NO: 144860 - DNA, 201 bp, Homo sapiens
tgcagccttgaactcctgggtcaagtgactctcctgcctcagcctcccaagtatctgagactacaggcatgtgccaccacgtttagctaatgtttttgcatttttttttttttttgatggagtctcgctctgtcgcccgggctggattgcagtggcatgatttcggctcactgcaagctccccctcctgggttcatgccat

SEQ ID NO: 144861 - DNA, 201 bp, Homo sapiens
cctcccgggttcaagtgattctcctgcctcagcctcccaagtagctgggactacaggcgggcgccaccacacccagctatttttagtagagatggggtttygtgatgttggccaggctggtcacaaactcctgatctcaggtgatccgcccgccttggcttcccaaagtgctcggatcacaggcgtgagccaccgtgtccg

SEQ ID NO: 144862 - DNA, 201 bp, Homo sapiens
aacaggtggccacggatgtcgtggcttaaaataacaccagtttgttgtttcatgcttctgtagggtggagtcagggctcagcctgctgggtcctttgctcrggtctcacgcggctgcagtcaggttgcctgttctcagtgggctgtgttctcatctggaggcccaactaggcagggcctgctctcagactgcctcaggtgc

SEQ ID NO: 144863 - DNA, 201 bp, Homo sapiens
ccagagcctatcggggagagactgccctctgcttacagcctcagacctttagactcactctgaagtggctcttcgataagatgagacccacccaggattayctcccttttgattaacctaagatcagctggagatggagcttcattatgtctgcctgaccctttcacctttgcctcagcctatgcatgggcgcgccgtctt

SEQ ID NO: 144864 - DNA, 201 bp, Homo sapiens
gcgcgccgtcttccccggttcataggtcccacctgcactgaggacggggattacactggatgtgaatgccggggcgtggggagccctgcgggcctgctggratcctgcattacaattttatgacaaatggttgttgactttaattgaagaacttttcagtaaacttaaaaaaaattaaccttcatttattacttctccatc

SEQ ID NO: 144865 - DNA, 201 bp, Homo sapiens
gtggttcattgcaacctcgacctcctgggctccagtgatcctcccaccccagcctctggaatagcagggactacagacttgtatcaccacacctggctagttttttttaagttttgtgcttcagctatcataaccagaagccatttcctaatcaaggtcacaaaaatttacccttattttttctttttagatttttatagt

SEQ ID NO: 144866 - DNA, 201 bp, Homo sapiens
gctgggtgtggtggtgcgtgcctgtagtcccagctactcaggaggctgaggcaggagaattgcttgaacctaggaggtggaggttacggtgagctgagatygagccactgctctccagcctggtgacagagcaagactccgtctcaaaaaaaaaaaaaaaaaaaaaaaattggctgaaacaccagacatttttcctggtgt

SEQ ID NO: 144867 - DNA, 201 bp, Homo sapiens
tgttacattcccaccagcagtgcacaagggtcccatttctccatctcatcccaacacttattattttctcttttcaattttaatgttttgtataatatccrtcgtatccatcctaatgggtgtgaaatggcatttcattatggttttcatttgcatttccttaatgattagtgataatgaacatcctttcatgtgcacgtt

SEQ ID NO: 144868 - DNA, 201 bp, Homo sapiens
cccgccggccgcgcactccatgaagggcccattagcgcggcaggtgcctcccgggctgtaaattcgccccgatttatctccccggggacgaaataaatccmgcttggatgggagtgtagttaggcaaaggttttcatgcgaaatcaggaaaaaatacgagaacgtattttattaacggaaagaatgcagatttgaggaccc

SEQ ID NO: 144869 - DNA, 201 bp, Homo sapiens
cctcagggagcttgggtgggagctggaggatgcggcctcggagcttgggtgggagctggaggatgcggcctcagggagcttgggtgggagccggaggatgyggcttcagggagcttgggtgggagctggaggatgcggcctcggagcttgggtgggagctggaggatgcggcctcagggagcttgggtgggagccggagga

SEQ ID NO: 144870 - DNA, 201 bp, Homo sapiens
gcccatgaagagtgggacggacactcagcactgacacggaggccccggcagccgccccgcgaagagtgggacagacactcagcactgacacagaggccacrgcagccacccgatgaagagtgggacggacactcagcactgacacagaggccacggcagccgccccgtgaagagtggggcactcagcactgacacggaggc

SEQ ID NO: 144871 - DNA, 201 bp, Homo sapiens
tctgcctggcgtgcgtatctgggcatctgcacctggctgccgggcacaggccgtgccaggcctgtacgagctctggggttgttctcccttctttccagggktcctccctggccctgggtggttccagcaaaacagtcgccagggcacatgagtctagttccagaaagaccttgcccctgcctctgagagatggaaaggata

SEQ ID NO: 144872 - DNA, 201 bp, Homo sapiens
cggcagccgccccgcgaagagtgggacagacactcagcactgacacagaggccacggcagccacccgatgaagagtgggacggacactcagcactgacacrgaggccacggcagccgccccgtgaagagtggggcactcagcactgacacggaggccacggcagccacccgatgaagagtgggacggacactcagcactga

SEQ ID NO: 144873 - DNA, 201 bp, Homo sapiens
tcctggaatcggcctccgtcgagatccgacgtgggttcagtttttccgccgggatgctctgccatggcgttacagctttcatcgggaggcatgtactctgytcacccctctgtctgtgtctctttgtggtattagcagctgctggtgttcactgcctcgattcactgcgtcattaagaattgtaaaatggctgtattctaa

SEQ ID NO: 144874 - DNA, 201 bp, Homo sapiens
aagagtgggacagacactcagcactgacacagaggccacggcagccacccgatgaagagtgggacggacactcagcactgacacagaggccacggcagccrccccgtgaagagtggggcactcagcactgacacggaggccacggcagccacccgatgaagagtgggacggacactcagcactgacacagaggccccggca

SEQ ID NO: 144875 - DNA, 201 bp, Homo sapiens
ggggttattggagactcaagcggcttcatacacagacttagggttccctcttcctagctcttccctccagggttgccccacaccgtccggctagcctgggyttctttctgttgctcttctggccagagagagggtggggtttcctctggatttgtagggtccacattctgctgctcccgtaagtgtggcccaggcttgggc

SEQ ID NO: 144876 - DNA, 201 bp, Homo sapiens
aagagtgggacggacactcagcactgacacggaggccacggcagccgccccacgaagagtgggacggacactcagcactgacacggaggccacggcagccrccccacgaagagtgggacggacactcagcactgacacggaggccacggcagccgccccacgaagagtgggacggacactcagcactgacacggaggccac

SEQ ID NO: 144877 - DNA, 201 bp, Homo sapiens
tgaggttttgttgcgatgttggggtgtacgtgccgtgtgaggttttgttgagatgttggggtgtgtgtgctgtgtgaggttttgttgatgttgaggtgtgygtgccgtgtgaggttttgttgagatgttggggtgtgtgtgccgtgtgaggttttgttgcgatgttggggtgtacgtgccgtgtgaggttttgttgagatg

SEQ ID NO: 144878 - DNA, 201 bp, Homo sapiens
gtgaggttttgttgatgttgaggtgtgtgtgccgtgtgaggttttgttgagatgttggggtgtgtgtgccgtgtgaggttttgttgcgatgttggggtgtrcgtgccgtgtgaggttttgttgagatgttggggtgtgcgtgccgtgggaggttttgttgagatgttggggtgtgcgtgccgtgggaggttttgttgagat

SEQ ID NO: 144879 - DNA, 201 bp, Homo sapiens
gaggttttgttgagatgttggggtgtgtgtgccgtgtgaggttttgttgcgatgttggggtgtacgtgccgtgtgaggttttgttgagatgttggggtgtrcgtgccgtgggaggttttgttgagatgttggggtgtgcgtgccgtgggaggttttgttgagatgttggggtgtgcgtgccgtgggaggttttgttgagat

SEQ ID NO: 144880 - DNA, 201 bp, Homo sapiens
tttcagtaaacttaaaaaaaattaaccttcatttattacttctccatcattcttcctttcctatgtacatccggaattttgagttgtgtcatattctcctycctgaagaactttttcaacatgacttacagggcatgtctacttttttgtgtgagaaagtttatttttctttcactttcgaaggatgattttgctgtacac

SEQ ID NO: 144881 - DNA, 201 bp, Homo sapiens
tctgtttactgatgcctcctgggcctcacacagggaggggtgaacagaggtcttagggagggtgtttttctcttttttttcttttttttttaattttgtattttattttattttattttattttattttattttattttattttttgtagagatggggtctcagtattttttttttttgagacagagtctcgctctgttgc

SEQ ID NO: 144882 - DNA, 201 bp, Homo sapiens
ttttcttcttcctaaagcctttaaaattaagagttaaaaaataggaaagtaatgcgtgatgattataggcatgttaaaaataaagaagagaaaaagaaatrcctctgcctcaaatacccactccaacctttgggcgtttttttctgtctttttcccttttcctattgagaataccattgggagtgctgacagcgctcggca

SEQ ID NO: 144883 - DNA, 201 bp, Homo sapiens
ctgtttactgatgcctcctgggcctcacacagggaggggtgaacagaggtcttagggagggtgtttttctcttttttttcttttttttttaattttgtattttattttattttattttattttattttattttattttattttttgtagagatggggtctcagtattttttttttttgagacagagtctcgctctgttgcc

SEQ ID NO: 144884 - DNA, 201 bp, Homo sapiens
ggccagctgtgcctttgcattggccacagcgaggaagggggccagggcatgcagtttctgcagggccacgtctgcaggtggccatgtgggctgctcgcgcyggtgggggcttgtgtgaggtgtgatttattttgtgttcaatccatttttttagagtataagtgtcttccatgtctatgtgctcattgtaaatctttactt

SEQ ID NO: 144885 - DNA, 201 bp, Homo sapiens
ccccagcgaggaaaaccaatgtgactttattttctgctctttcttttctttagctcttggagtttgacaaggagttgtctgtctttaaggacagactgtaygaactggacatctcgttccctcccaggtatggaacatgctgtttgctggatgaacccggccgggaaggtggcgtctccaccctcccagtctctggtgcat

SEQ ID NO: 144886 - DNA, 201 bp, Homo sapiens
cttcacccccacacacatgcttcacccacagacacacgtggcttcaccccccacacagtgtcttcacccacacacacacacacacactcacatttacccayacacacacgtggcttcacccacacacacacgtggcttcacccctgcacacacatggcttcacacacacacgcacagcttctgccccccaacacacgcgca

SEQ ID NO: 144887 - DNA, 201 bp, Homo sapiens
cagagccaagaaccgcatggcacctagcgctggcagcctccctgctgcctcctcacctccacacctgagaagccagcagggcccacgctggactggggacsctgctgcatctctgatgtggggaagcctcaaactcaagctccagaatgacctagagatgatgcgtgtttataggcctgtgtgtgaatgtatctgagtaaa

SEQ ID NO: 144888 - DNA, 201 bp, Homo sapiens
gaacttaaattgtgaatttggttttatattctagaaacttccatgtgtgtattcattccccaggtagtgctggccattctaaggtgtattgggagagaatyggcacagccgtccctttggggctgaggacggcccgagccggccggctgaccctctgccttcatgtctccccagctacccgtacagtgaggacgcccgcca

SEQ ID NO: 144889 - DNA, 201 bp, Homo sapiens
taggcgctggcttccctcccgccctggtctcatgccttgctctgtgttgaggaaaacagtggaaggagcgtggccccttactggcactttcaatgccatcygcctcccgggatgcactttttaaggcaaaacctttcaatgaagaagcatgttttgctgtcggcagagggatccgtgttggaatccggggtgcgcgggccc

SEQ ID NO: 144890 - DNA, 201 bp, Homo sapiens
ttgatgttgatgtcttcactggttgccattgcccaggagggtgtttacagcacagcgctctgatcagcagctgcggatctactcttggtgaagagcaaccrttagattaggctcaagtgtggaaattaaccgcaaaccagattctaaaagcagacctcctgccagtggtctggtctcctttggaagacagtgtgatccttg

SEQ ID NO: 144891 - DNA, 201 bp, Homo sapiens
tgtttactgatgcctcctgggcctcacacagggaggggtgaacagaggtcttagggagggtgtttttctcttttttttcttttttttttaattttgtattttattttattttattttattttattttattttattttattttttgtagagatggggtctcagtattttttttttttgagacagagtctcgctctgttgccc

SEQ ID NO: 144892 - DNA, 201 bp, Homo sapiens
cagggccctggcagtggggagtgtgtggtcccctagtgacaccgcctgctctgtggctgttttctttctttatgattgtttgcttctcacactccctgccraaggacctgcttgatgccactgacatcgcggctcttgtggactgtggagctggtggctcccctctcctcctgaaccacgagtactttctggggaaatgat

SEQ ID NO: 144893 - DNA, 201 bp, Homo sapiens
cctgctgtcttgaggcccatcttttggtggcccctgttttggtggccatcagggaggggcctgagccccccatggggtcaggtggaaagtggcagctcttrgaggtgacatagggacccttggaggtgacattgagacccttggaggtgacactgagacccaaaggaaggacaggagggcccctgaggagatggatgaggt

SEQ ID NO: 144894 - DNA, 201 bp, Homo sapiens
tgtcaggaggggctcaggccccaaacacaggagccagcccccgctgctgtcttcagaatgcttatggcccctcccacattcctgtgttaacatcctgcccmcaaggtggtggcctcaggaggcctggctctgggggccgatgagatcgcaaggagaggactccatccccatgaatgcaatcagtgccctgaaagaagaggc

SEQ ID NO: 144895 - DNA, 201 bp, Homo sapiens
ccctgttttggtggccatcagggaggggcctgagccccccatggggtcaggtggaaagtggcagctcttagaggtgacatagggacccttggaggtgacaytgagacccttggaggtgacactgagacccaaaggaaggacaggagggcccctgaggagatggatgaggtgggaaagtgcagccagcatgcctgtctcagg

SEQ ID NO: 144896 - DNA, 201 bp, Homo sapiens
gcaccagaggccatgggggagggcagtcttggggagcaggcggcaagaccccaacttgacagacctcagatccaaggctcaggccgcccagaatccccacrtacatgtcccatttctttcatttctttcccttttacctttttttcttttacttatggcttaaacagttactgtgagcgttgatagtagagttcgccagtg

SEQ ID NO: 144897 - DNA, 201 bp, Homo sapiens
cctgttttggtggccatcagggaggggcctgagccccccatggggtcaggtggaaagtggcagctcttagaggtgacatagggacccttggaggtgacatwgagacccttggaggtgacactgagacccaaaggaaggacaggagggcccctgaggagatggatgaggtgggaaagtgcagccagcatgcctgtctcaggg

SEQ ID NO: 144898 - DNA, 201 bp, Homo sapiens
ttgggctgaggcccggttcccctgctggttttgctgatctgggacagtggcgctggctggaggggcccttgccccttgcctggccgtgtgcgtggccctckgctgtgaggggctgggctgtggctggagcccatgtccgctctctaggcttcctggtttgtgttacattttggcagcaacagctgtgtgttaagctcaagc

SEQ ID NO: 144899 - DNA, 201 bp, Homo sapiens
tgttttggtggccatcagggaggggcctgagccccccatggggtcaggtggaaagtggcagctcttagaggtgacatagggacccttggaggtgacattgrgacccttggaggtgacactgagacccaaaggaaggacaggagggcccctgaggagatggatgaggtgggaaagtgcagccagcatgcctgtctcagggag

SEQ ID NO: 144900 - DNA, 201 bp, Homo sapiens
ccctgcttcgtcatccacctgcctctccgtggcgcctggttcttggtgctccccttttgcaaacctgaagctcagccaccatgccttgcctgtttaaaagttttttttttttttgtagagatggagtcttgctatcttgcctaggctggtccactcccgatactggagtggagtctgcccccgggttgtggcccaccttcc

SEQ ID NO: 144901 - DNA, 201 bp, Homo sapiens
tctgtagtctgtaagaggcaggctctcggcatggcccccaggcagtggccctggtgctcttggggtggggggccccagtacccagcggtggcccaggaatgagaggcccgctgcttcctgggagaggcccttctgctttccctcctcctcctctgtgagctcccccttccactctcgttctcctaaataagactttaggga

SEQ ID NO: 144902 - DNA, 201 bp, Homo sapiens
gggagggtgagggaggtgaggagttcatgggagaggccctgtcagaggagggtgagggaggtcaggtgggcaggggaaaggctccatcagaggagggtgcrggaggtgaggagggcaggggagaggccccgtcagaggagggtgtgggaggtgaagtgggcaggggagaggccccatcagaggagggtgtgggaggtgagg

SEQ ID NO: 144903 - DNA, 201 bp, Homo sapiens
tcattttcttttttttttgagacagagtcttgctcagttgcccaggctggagtgcagtggcgcgatctcggctcactgcaagctctgcctcctgggttcaygccattctcctgcctcagcttcccgagtagctgggactacaggtgcctgtcaccatgcccagctaatttttttgtatttttagtagagacgggggtttca

SEQ ID NO: 144904 - DNA, 201 bp, Homo sapiens
ctgtagtctgtaagaggcaggctctcggcatggcccccaggcagtggccctggtgctcttggggtggggggccccagtacccagcggtggcccaggaatgagaggcccgctgcttcctgggagaggcccttctgctttccctcctcctcctctgtgagctcccccttccactctcgttctcctaaataagactttagggag

SEQ ID NO: 144905 - DNA, 201 bp, Homo sapiens
cacatcccactgatgctcaggcacccacaggctgggccgtggcagcttctctgctctgctcctcaccatccagacagctgcatctgctgcagggtttggakctggtgtctttgctcactaactgaagaagctcttgttctccagggtttatggttgggtttgggatgaggatgtaggcagatcgcttggagaacagctgag

SEQ ID NO: 144906 - DNA, 201 bp, Homo sapiens
tcacaagttaatttttgtgtatgatgtgagatagtggttgaagtttattattattttttccatatggaattcagctgttccaccactgtttgttgataacttttttttttttttttttttaaagagacagggtcttgctctgtcacccaggctgaagtacagtggcaacacggctcactgcatccttgacctcccgggctc

SEQ ID NO: 144907 - DNA, 201 bp, Homo sapiens
agaagaatgatataaccacattagtcctttaccaggtttgccttaaaactgagtcactgtgtgcctggcctttactcagcgcttcctcccatgtcgtgactgttataatgcatcattacttcctcactatgattcatctaggaacttgggggagtaattcatagtcagggatatttatgtttaaaccgacagaaagggaga

SEQ ID NO: 144908 - DNA, 201 bp, Homo sapiens
tggtgaacgccttctcagagccttggtggcatattgagtgggatagggagggaggactggtgaacgccttctcagagccttggtggaatattgagtaggawagggagggaggactggtgaacgccttctcagagccttggtggaatattgagtaggatagggagggaggactggtgaacaccttctcagagccttggtgtg

SEQ ID NO: 144909 - DNA, 201 bp, Homo sapiens
atgtgacctgagcacagagagctgcaaaaaacccagagggcctgccagtggacgttggcgtgtggccccagccagctcgctgcagggcgcaggtgtggtgsggagacctggggctgctccagggtctgcagcctatgctggccagcgtggggaccacccagtgctgggtcggctgggcccagccatccacatcccactgat

SEQ ID NO: 144910 - DNA, 201 bp, Homo sapiens
ttgctttggtatttttgttgaaaatccaggtataagtgtgctttatttctggattcgctattctgctccatcagtccattgaattttattccaggtccacmtgcctcagttgtgttggcattagagtaagtcttacagtcagtgcacatccctaacttgattcttgcagaggctgctttggatattccaggcctgttgcat

SEQ ID NO: 144911 - DNA, 201 bp, Homo sapiens
gaagaatgatataaccacattagtcctttaccaggtttgccttaaaactgagtcactgtgtgcctggcctttactcagcgcttcctcccatgtcgtgactgttataatgcatcattacttcctcactatgattcatctaggaacttgggggagtaattcatagtcagggatatttatgtttaaaccgacagaaagggagag

SEQ ID NO: 144912 - DNA, 201 bp, Homo sapiens
ctgtcttcagggttctgtggtacctgggttctgtctgggcaccttagacagctgtcttcagggttctgtggtgcctgggttctgtctgggcaccttagacrgctgtcttgcgggttctgtggtgcctgggttctgtctgggcgccttagactgctgtcttcagggttctgtggtgcctgggttctgtctgggcacctgaga

SEQ ID NO: 144913 - DNA, 201 bp, Homo sapiens
ctttggaaggacacaaccttcttggctggcacagcccttcctgccatgcctgttgatcccatcatcagccaaggatgtgttggggccgtattctgcggctsctccagcatgggaaggtgctgacaggaagcagcaccaacacctcctggaatagccgttggcacatgagcttcctgatactgtttcatgtgccttacatgt

SEQ ID NO: 144914 - DNA, 201 bp, Homo sapiens
catatttgggttaaaaggggcccgagtgtctcgggctgcagggaggtgagtcctggaggtacttaccatagttttctgttgaatgcctctgggcctgggcrgggagggccatagcctaaagtgtgcatcttaccctgggtctctgttcagagtgtggcagccacggcttatggcgggagtgacgccaggctggacagagcc

SEQ ID NO: 144915 - DNA, 201 bp, Homo sapiens
ctcaggctgtgaaggaatctttctcgcccagtctcaccgtgttggaagccaagctcgtctgtgaccagtgctggagccggtcacagttccgaggaggaagrtgtttgaatctgaagcagatatcccggactgtggcggactctgttttccttttgtgcacaagtgataggtggtttgcttttgcttttgcagttttgaaag

SEQ ID NO: 144916 - DNA, 201 bp, Homo sapiens
caatgaagcgctacattgatttaaacaaaagctttgtttcatttattattgtttataatctaatgactgttattataactttgctttgatttattactcartctgttaaattgtttcaaaacaaggtgtcttgggacttgcctttgtgatagggttaaatgtgtgacttttgcaagtgtgttcagcttctcgggagcaccg

SEQ ID NO: 144917 - DNA, 201 bp, Homo sapiens
tcctgctttcagttcttttgggaattgtattagttcattttcatgctgctgataaagacgtacctgagactgggaagaaaaagaggcttaattggacttayagttccgcatggctggagaggcctcagaatcatggcaggaggtgaaagacacttcttaaatggctgcagcaagagaaaatgagagagaagtaaaagcgga

SEQ ID NO: 144918 - DNA, 201 bp, Homo sapiens
gcccttcagcccaccgctgcactgtgggagcccctttctgggctggccaaggccagagccgactccctcagtttgtagggaggtgtggagggagaggcgcyagcgggaaccggggctgcgcgtggcgcttgcgggccagctggatttccgggtgggcgtgggcttggcgggccccgcactccgagcagccggccggccctg

SEQ ID NO: 144919 - DNA, 201 bp, Homo sapiens
aagagtcaggcctgggttccccccggtgagaggtcagagaacagagaaggcggccctggaggtgaccgcacccctcccgcatatcaggcacccctcctgcrtatcaggtgtccctcctgcgcatcaggcgccccctcccacttaccaggcatccctgggagtgactgcgtgcctcctgcatatcagatgcccctgggagtc

SEQ ID NO: 144920 - DNA, 201 bp, Homo sapiens
gctcctccttgggggaaaaaaaactagccccattcgagtctgatattttttagggccccagtgagactgccgatgacgctctcccgccacctgccctgtcmccgtggggcctcccacggtgtcccaggccccagcagcctcgcgcccggttcccactgctgtgttagggaagcgcccgctgttggaaatgtaattcggaac

SEQ ID NO: 144921 - DNA, 201 bp, Homo sapiens
gcccaggtctgaggatgctgtgagttactaattctgctggtgcattcgaggtgctgtgaccaaggccaggagctctggcatagaagcaaaagccagcgtcrgttcctgtgcccagccctgcgccactatgcccacagcatccatcaccttgggtcctggcgccctgtgagtgaggagagtgctgacatcgcctcccactca

SEQ ID NO: 144922 - DNA, 201 bp, Homo sapiens
gcactagggaggagaggccgagaggggctgctactggggctgccacggcagtgcccgaggccatgagtgcttctctggcgtcaccaacagagaaagctttmtgggtgggcagagcacatctataacgggcagggcaggtcccactgtctgcagcagaggcaggcgaacaccagagcctgctggcaccacagagctttctgg

SEQ ID NO: 144923 - DNA, 201 bp, Homo sapiens
cctctgctgggggagccagcactagggaggagaggccgagaggggctgctactggggctgccacggcagtgcccgaggccatgagtgcttctctggcgtcmccaacagagaaagctttatgggtgggcagagcacatctataacgggcagggcaggtcccactgtctgcagcagaggcaggcgaacaccagagcctgctgg

SEQ ID NO: 144924 - DNA, 201 bp, Homo sapiens
gtgtgtgagctggcgtgtgagcaggtgtgtcagcatgtgtgagcaagcatatgcatatgagcgtgtgtgagcatgtgtgagagcaggcatatgcacatgarcgggtgtgtgcatgtgtgagcaggcgtgtacatgcatgagcaggtgtgagcaggtgtgtgcatgtgagccttcatgagcgtgtgtgtgagcgtgtatgca

SEQ ID NO: 144925 - DNA, 201 bp, Homo sapiens
gtatgcatgtgtgtgatcatatgcgtgtgtgtgatcatatgtgcatatgcatgtgagcaggcaagtgtgtgagctggcgtgtgagcaggtgtgtcagcatrtgtgagcaagcatatgcatatgagcgtgtgtgagcatgtgtgagagcaggcatatgcacatgagcgggtgtgtgcatgtgtgagcaggcgtgtacatgca

SEQ ID NO: 144926 - DNA, 201 bp, Homo sapiens
acacacaggtcccgggaaatcccagccacccagggtgtgggagtctcgacgcggcacgtctggcacccagtgcgagcagcaccttcctcagaatatggcasagctcaagggaggggtctctgtggtggggacgccgccagcctctgggaggaatacgttttccaacaccctcgggtctccttgaaagcttaaattttgtca

SEQ ID NO: 144927 - DNA, 201 bp, Homo sapiens
cccagcctgctccttcttcctggagttttccagcttccccacaacttgccttggggttgttcctattggagtgtgtgtcagcgtgtgtgcgtggatatgtktgtgagcaggcatatgcatgtgagcctgtaggagtatgcatgagtgtgcgtgcatatgcatgtgaatgggcaagtgtgtgtataagcaggcatgtgtgcg

SEQ ID NO: 144928 - DNA, 201 bp, Homo sapiens
actgcgtttcctcgcggaggccgtggtgctgtgcatagtcagccggggtttggctctccctctttgtctgtgtggacgctgagcgtatggaggatgggaaytgtcacgtccattgcctgggggctccctgtgtctgtggactccttacatagtgaagagactgcatcattcatttattaagaagaaagccacatgccacca

SEQ ID NO: 144929 - DNA, 201 bp, Homo sapiens
aattaccccctcgattctgagcagtggtccggaccctcaggcacgttcagggcaggagcggtgggagcctcttagtgaattctcctttcacagcgaaagcrttacgttggtgtagtggcgcggcatccgggagcacagatttatattcacgttcaccatgactagaagaattatttgtagcatagaaaatgtttatcccct

SEQ ID NO: 144930 - DNA, 201 bp, Homo sapiens
ctggggcgtttgtcagaacttagcgtttgaattatctctgcctgtttgcagtgacctaatagtaaacctggaactttgcgtgctggtttgtcagtaggctycatagttttctgaactgtaacggaattaccccctcgattctgagcagtggtccggaccctcaggcacgttcagggcaggagcggtgggagcctcttagtg

SEQ ID NO: 144931 - DNA, 201 bp, Homo sapiens
gaccagtaatgcttctccaggtggatatccagaggactggggcgtttgtcagaacttagcgtttgaattatctctgcctgtttgcagtgacctaatagtaracctggaactttgcgtgctggtttgtcagtaggctccatagttttctgaactgtaacggaattaccccctcgattctgagcagtggtccggaccctcagg

SEQ ID NO: 144932 - DNA, 201 bp, Homo sapiens
caccggatcgacttttcggtgccccaggggcttggctttgtccagtggaggccgcttcccggctgtgccgtggcctccgggggctggaggactcctgcccrtgtctgcagtcctcgcagaagcatcacagctaatggctgcatttcactaatgcagaattaatgagcactcttgacagtcttgtttatcaatacgtaaaaa

SEQ ID NO: 144933 - DNA, 201 bp, Homo sapiens
ggggccacctccacctgcgcctgggcccctgccccccagtgctccgggctgctccaccggtgatactgtggagatgacgggctgtcactgggaagcagggracccccattggtgggatgtgtctgatcttggggcccgtgtccctccccatctacagctgggccttttgctgaagctcaggccccacagccaggcagtctg

SEQ ID NO: 144934 - DNA, 201 bp, Homo sapiens
tgagcacgtgtgtgtgctctagtgcatgcgtgtgcacatgtgcacgtgagtgcgtatctgcctctgtggggtgggtgtgccgctgtatgtccatgagcacrtgtgtaaacaagtgcgtgtcaatgggaatgtgcggctcaggtcggtccacggagaggtggcccctgccagtgagagacagccccggctgctggacctgct

SEQ ID NO: 144935 - DNA, 201 bp, Homo sapiens
acttttggaggccaaggggggcggatagcttgagcccaggagttcaagactagcctgggcaacgtggtaaaaccccatttctacaaaaaattaaaaaaatyagccagttgcagtggtgtgtgcttgtagtctcagctactccagaggctgaggtaggaggattgcttgggcacaggaggtagaggctgcagtgaactgtga

SEQ ID NO: 144936 - DNA, 201 bp, Homo sapiens
ttcaagactagcctgggcaacgtggtaaaaccccatttctacaaaaaattaaaaaaatcagccagttgcagtggtgtgtgcttgtagtctcagctactccrgaggctgaggtaggaggattgcttgggcacaggaggtagaggctgcagtgaactgtgactgcgccacgacactccagcctgggctatagagcaagactgc

SEQ ID NO: 144937 - DNA, 201 bp, Homo sapiens
ggccaagggaggctggtgggatggtgggatggtgggatggggcccaggaggccctgggagcttccaagctggggtcagccaggcagacgcagcagcgccaygcgggccagaaagtggcccctgggcagggccccatggtcaccgtggccgtcacagtggccccgactagtgttggggtgtgtgccaaaggcaagaactgaa

SEQ ID NO: 144938 - DNA, 201 bp, Homo sapiens
gtggtaaaaccccatttctacaaaaaattaaaaaaatcagccagttgcagtggtgtgtgcttgtagtctcagctactccagaggctgaggtaggaggattscttgggcacaggaggtagaggctgcagtgaactgtgactgcgccacgacactccagcctgggctatagagcaagactgcgtctccagaacaaacaaacaa

SEQ ID NO: 144939 - DNA, 201 bp, Homo sapiens
acactggccttccccagacccagctggaaccagcccctcctgcatttctccctgggtgttgggggccacagggagcacccctggctgtggattaagggtgktgcccccaacagcctggccaggacacctctctcacccaggcttcttcctcctgttgagtcgtctgtgaacactcccagggaagcccttcctggagcagat

SEQ ID NO: 144940 - DNA, 201 bp, Homo sapiens
aggatcccagggtgcccccatctctggagagaccagggagctgaggcccagggcgcactgggagctccccagaggcaggccggtctgacctagtttggcgtttcagccacggtgccaccctgctgttggtactcctgctgccaacccaaataaagcagagtgaggctccaagtggcccagatggaggccgtggagccacgg

SEQ ID NO: 144941 - DNA, 201 bp, Homo sapiens
tctggggtgctgaccctcctgggccatcagaggtggctctctgtcaggagaagcagacttcgggccttctccacgtctcccccacctccgactctgttacygcagctgggttttgtcagcagcagaacagaagccagcaccctccaggacggggacttggcacacgtttggttttttgtgaggagagcagggggctctctg

SEQ ID NO: 144942 - DNA, 201 bp, Homo sapiens
tcgtttagttctttctctttggttttagggccttctccttttcaggaattccagtggcagctggtgtgtttggaagcgggtgtctgaagccagcattgccrgtggtgcctgcaggctgcacgggaaggcagagctttgatgaggtcctgcttgtgacgggggtgtgtcagaaccgttttctctgtagtgtgctgcaccctc

SEQ ID NO: 144943 - DNA, 201 bp, Homo sapiens
cacgtcgtagtaactgtggagccacaaacgatgtcgtttcgttcggattccgtgtttgtgctccctcgggagacggagcggctcctgtgaaattgcgcggyagtcttatctcagttgcttgagtggtgatttcattgatgacgagagcaagattctggccagcaaaatgatttgtcactgccccgttacctgaagaccttc

SEQ ID NO: 144944 - DNA, 201 bp, Homo sapiens
ggagtcggagctggagctagtttttcatcatctgtcggcttctgcagaccaatgtcatcattccccgtcccctgggtggcccctcccccgccatcgttacrctgtcatcagcaagatcactgtcactaggactgcgtgtattccagtcacagctgagccatgtagtgtgctatgacttgattttttcagttttaaaaaata

SEQ ID NO: 144945 - DNA, 201 bp, Homo sapiens
ggagcattgtcactgttccctgtaagtcagacatctgggtgcccagtgccaatggagacacagtgacggccccagtccctccccgcagctggagagttccrctggccagagcccgctgcacagagaagtcagcagggaggccccctagtactggggccctgtggctgcccagtgagacggcgtaagcgctgcctggcagcc

SEQ ID NO: 144946 - DNA, 201 bp, Homo sapiens
catcggtggttgccgtttcttggagtgtgggttgtggtcccgctttctggtgtatgtcgccatcagtggtcactgtttcttggagtgtggggtgtggtccygcgttctgtgtgtgttgtcatggtggtcactgtttcttggagtgtgagatgtggtcccacgttctggtgtgtgtcgccatcgctggtcactgtttcttgg

SEQ ID NO: 144947 - DNA, 201 bp, Homo sapiens
tgtgtgggggtgggtgtgcgcacatctgcgtgtgtgtgttcgtgtgtgcatgtgtgtggatgcttgtgtgtgcatgtgtgggtgcacgagtgcatacatatgtgtgtgcacgcgtgtgtgggtgtgtgtgggtgcatgtgtggtgtggatgtgtgtgggtacatgtctatttgggtgtgtgcacacttgcaggggtgtggg

SEQ ID NO: 144948 - DNA, 201 bp, Homo sapiens
caccgatgtgcaatgccatgccaggcctcggggagcccctcgacgagacccatggctcctgcacggatggtttcacattgtcaacacggctggaaaaggayacggtctacaagtggaggctcgaaggtggctgagagttatggcacctgggctttccagaagttggcttgaaataattggtcaaggtatgtggctggcgag

SEQ ID NO: 144949 - DNA, 201 bp, Homo sapiens
gtgtgggggtgggtgtgcgcacatctgcgtgtgtgtgttcgtgtgtgcatgtgtgtggatgcttgtgtgtgcatgtgtgggtgcacgagtgcatacatatgtgtgtgcacgcgtgtgtgggtgtgtgtgggtgcatgtgtggtgtggatgtgtgtgggtacatgtctatttgggtgtgtgcacacttgcaggggtgtgggg

SEQ ID NO: 144950 - DNA, 201 bp, Homo sapiens
tttttccttgttgcattggaagcgggccttctcttccagcaggccttccgcctggttgttgttggtgtctgtgatggctgttgttttgtctgttaatttcrggacctcctgctttcctggattctcctgttgtctgtcctttttctgcctgcttctctgcccctccaggtgtgctgtgacgccatctgcaggtgcagggag

SEQ ID NO: 144951 - DNA, 201 bp, Homo sapiens
tgtctgggcgccttagacggctgtcttgcgggttctgtggtgcgtgggttctgtctgggtgccttagacggccgtcttcagggttctgtggtacctgggakctgtctgggcgccttagacagctgtcttcagggttctgtggtacctgggttctgtctgggcgccttagacggctgtcttcagggttctgtggtacctggg

SEQ ID NO: 144952 - DNA, 201 bp, Homo sapiens
ggactacaggcgggcgccaccacacccagctatttttagtagagatggggtttcgtgatgttggccaggctggtcacaaactcctgatctcaggtgatccrcccgccttggcttcccaaagtgctcggatcacaggcgtgagccaccgtgtccggccaaaaatgtttaaaataatattaattttattttctgatacaggca

SEQ ID NO: 144953 - DNA, 201 bp, Homo sapiens
gctgtcttcagggttctgtggtgcctgggttctgtctgggcgccttagacgactgtcttgcgggttctgtggtacctgggttctgtctgggcgccttagayggctgtcttcagggttctgtggtgcctgggttctctctgggcgccttagatggctgtcttgcgggttctgtggtacctgggttctgtctgggcaccttag

SEQ ID NO: 144954 - DNA, 201 bp, Homo sapiens
tgtggtttctgttgacaagttcactctaattcttgtccttgttcctctatagctaagatgtatttttttcttgcttctttcaagattttctttatttgtgwttttctacaattgggatatgatctgcctaggtatagattttttggtatttattctgcttgatgttctctgggcttcgtggatctgtggtttggtgtctgg

SEQ ID NO: 144955 - DNA, 201 bp, Homo sapiens
caccttagacggctgtcttgcaggttctgtggtacctgggttctgtctgggcgccttagacggctgtcttcagggttctgtggtacctgggttctttctgkgtgccttagacggctgtcttgtgggttctgtggtgcctgggttctgtctgggcaccttagacgactgtcttcagggttctgtggtacctcggttctgtct

SEQ ID NO: 144956 - DNA, 201 bp, Homo sapiens
ggatgcggcttcagggagcttgggtgggagctggaggatgcggcctcggagcttgggtgggagctggaggatgcggcctcagggagcttgggtgggagccrgaggatgcggcttcagggagcttgggtgggagctggaggatgcggcctcggagcttgggtgggagctggaggatgcggcctcaggagcttggggacacag

SEQ ID NO: 144957 - DNA, 201 bp, Homo sapiens
ggttctgtggtgcctgggttctgtctgggcgccttagacggctgtcttgtgggttctgtggtacctgggttctgtctgggcgccttagacggctgtcttgygggttctgtggtacctgggttctgtccgggcaccttagatggctgtcttcagggttctgtggtacctgggttctgtctgggcaccttagacggctgtctt

SEQ ID NO: 144958 - DNA, 201 bp, Homo sapiens
gaggatgcggcttcagggagcttgggtgggagctggaggatgcggcctcggagcttgggtgggagctggaggatgcggcctcagggagcttgggtgggagmcggaggatgcggcttcagggagcttgggtgggagctggaggatgcggcctcggagcttgggtgggagctggaggatgcggcctcaggagcttggggacac

SEQ ID NO: 144959 - DNA, 201 bp, Homo sapiens
agcactgacacggaggccccggcagccgccccgtgaagagtgggacagacactcagcactgacacagaggccacagcagccacccgatgaagagtgggacrgacactcagcactgacacagaggccacagcagccacccgatgaagagtgggacggacactcagcactgacacggaggccacggcagccgccccgtgaaga

SEQ ID NO: 144960 - DNA, 201 bp, Homo sapiens
gccttagacggctgtcttgcgggttctgtggtacctgggttctgtccgggcaccttagatggctgtcttcagggttctgtggtacctgggttctgtctggrcaccttagacggctgtcttgtgggttctgtggcacctgggttctgtctgggcaccttagacggctgtcttgcgggttctgtggtgcctgggttctgtctg

SEQ ID NO: 144961 - DNA, 201 bp, Homo sapiens
catgcagacggtccgggccgccgacaccaatgaagtggtgaagctcatatttcgtgagtcggacaacgaccggaaggtgagcggggcctgtgactgggcakgtgacgcacggggcctgcgcaggactctgcagcttccttcagagccgccctgcctgcccggttcggtgggggctaggggacacgcacaaggctgggggag

SEQ ID NO: 144962 - DNA, 201 bp, Homo sapiens
gggacggacactcagcactgacacggaggccacggcagccgccccacgaagagtgggacggacactcagcactgacacggaggccacggcagccgccccgygaagagtgggacggacactcagcactgacacggaggccacggcagccacctgcagcgagccgccgctgcgcacagctccacaagtgagtttaaagccggg

SEQ ID NO: 144963 - DNA, 201 bp, Homo sapiens
ctcatgctgttgactgtttcacttgaattttgggggtacttttagaccagagctcaggctctacgttcggtggctctgctaggtggtggggatcagtgagmggcatcggtgggtgagaggcatcggtgggtgaacggcatcggtgggtgagaggcatcggtgggtggtggggatcagtgagagaccacacacactgttggg

SEQ ID NO: 144964 - DNA, 201 bp, Homo sapiens
agaagcctgtgtgaggcccgtggtgggggcgtgccgacagaaggcagcgggaaggtggtttactcatccttaccctgcacctgctacacccccagcctgtygagcctggagggcacagctgttgccctgtgggcctgtgtgctaataggtcctagtagccaccagcatacttgggggtggtggctatagtgccagccccct

SEQ ID NO: 144965 - DNA, 201 bp, Homo sapiens
gaccccagaaagcctggctcagagtgacactcctgtagagcctcagcaccgtctccagagcagcatggatggaaagatgcacacagccccatcctcctgcygccgtgggttaatgttagcgcagccccgtcctctgctgccgtgggttaatgttagcgcagccctgtcctcctactgccgtggactaatgttagtcatcgt

SEQ ID NO: 144966 - DNA, 201 bp, Homo sapiens
gtggttcaaggcaccttatcagcattggtgggcaggaccctcccgcgggcagtagaccctccatggggagagcccgcacctgctgaccctgagaggagacrgcattcctagcgcagagctccggatacagccgcacccggggcgttggtgcgtacactggcagagtgacgccaggaaatgtgtcattggcggatggttctg

SEQ ID NO: 144967 - DNA, 201 bp, Homo sapiens
ggcggccgactcctcagtctgacgatgttcctgcatcggctgcagtcggcgcagccctccaaagccctgcaccattcaggatttggcccatcccacagccrtgagcggactcgatgtggcaacatgggcacagtgtgtgtccagagggcaggtggcagggacggtcccttctaactcccacagaccccagaaagcctggct

SEQ ID NO: 144968 - DNA, 201 bp, Homo sapiens
gcagctcccatcaggcgtgacagacagggatgactgtgcagctgtcgctagccctgtgtatgggcaggcctgagctcctaaaaactgagagcatggcggcygactcctcagtctgacgatgttcctgcatcggctgcagtcggcgcagccctccaaagccctgcaccattcaggatttggcccatcccacagccatgagcg

SEQ ID NO: 144969 - DNA, 201 bp, Homo sapiens
gattaatgcagacttgctcacagagcagaactgaaaagatactggagtcagatctggcaccacggaagctgtaattacaacccaccacatgaaacacgccrgtcgtgtgccatctgagagggccgtgcgtcctcacacgagtcagtgatgcagcctgcggctccagctgctgctgggatgttcagagggtgtgtttcctgc

SEQ ID NO: 144970 - DNA, 201 bp, Homo sapiens
cgtgagtgtaatggtctttcagaaaccacggctggcctggctttggtttcactgctgagctcccacccacagcagcccatccttgccccctcggtcctggrctggtggggtcatcctcttgctctcactgccgaccgcgttcctctgcctgctcacagcgcctccttggtgccctcagtggcaggcttgctggaaagactc

SEQ ID NO: 144971 - DNA, 201 bp, Homo sapiens
atgcccgtgcagcctccagggatgcatcgctgcaggcgcacctgagatgccagctatgctctcgtgtgacgcagaagcatcacctctgggctggactgtcmtggcaggaccacacccggcagtggccaccgtcactgcccactgatctcggtgctccctgaggctgtgcgcttctccttcctcagatgaaaagtggacgag

SEQ ID NO: 144972 - DNA, 201 bp, Homo sapiens
agtgctgcgtggcacctccacgtggccatgtcgcttcctgtgggccgcagacacgtgcaggctctccggagggtcacggcctgtcttctgtttgctcatcygttgacgtggaatgtgcgtgccaggtggatccctcccgcgcagagtctcctgtctccgtgtggggagattcctgcggcagtggctcagaggaccacaggc

SEQ ID NO: 144973 - DNA, 201 bp, Homo sapiens
agacctatcatctccacagccctgatgcctgtgctgtgttgctccattgcacagatggaaagacaggggctagcgagtgagcagccagtgtgaggccctgmggtagcaggtggagggggcagggtgtgaactgagctggggctggctctggcatctgagcttgttaacgaccgactgggctagaggcagagtgggccgcac

SEQ ID NO: 144974 - DNA, 201 bp, Homo sapiens
cgacttcaacaccagctgtgtgaggctccagttgtccctcactgcccatctgtgtctgtgccagacggcaccagaccccaggcacagcaaacacctgggtrcaggtgtgccctcagcagggcggggacctctgcagccctggtccctgagatgcaccctgctggcctctgccatgtggctctgtctgccgggccgggttcc

SEQ ID NO: 144975 - DNA, 201 bp, Homo sapiens
acttcctgcgtcggtggaaacattccgtcatctacaccggccagtcctgtagcaacggcctaggtggtttttgaacgtgtgtgtgtaggtgtgcccacackcataggcatgtggtgagtgtgtggggtgcgtttgcatgcctgtgcacgggtggtgtgtggtgcatgcgtgtgtaggtgtgcccacatgcacatgcatagg

SEQ ID NO: 144976 - DNA, 201 bp, Homo sapiens
atgccatccgcctcccgggatgcactttttaaggcaaaacctttcaatgaagaagcatgttttgctgtcggcagagggatccgtgttggaatccggggtgmgcgggccctcaaggttgccccggatggcgggtgacagtgctgtggggctttgccctgtggcttccgccgtcggcacacaaggagctgctggagtgccgtc

SEQ ID NO: 144977 - DNA, 201 bp, Homo sapiens
tattatgaacttctttgttgacagagcatttttgctctttagaattacttttttaaggactgactcccagaaatagagttccacatttgaaagtaatgagttttttttttaacatttcccatattttcatagtttttgtattgttctttgagaccaagagaagaatttttgggtgtttaagagaaaaagaaggcatgtgct

SEQ ID NO: 144978 - DNA, 201 bp, Homo sapiens
agtaaatatttaactagtcctagtattgcttgtcaattaatgcctcttccctcaacagtgtgaaatgcctcaatctctcctgctgacgtctctgccttccraagctacaaaggggaagagttgggccttctgggcggctgtgggccaggctgcctctggcatcttggtctctcatgtgggtattctctattaggggctgta

SEQ ID NO: 144979 - DNA, 201 bp, Homo sapiens
actctcacttcagtggttttaaaaataactacattaaccaaacgtggctgtacctccgaggacttcttgccagagctgctcctgggaaagggttcagtctytctagtttgtgcccatcacccagtgggacagctacatggacgtggcatggcggcgtggcggcatggcccagtaaagaccagtttgggcaggatgaatggc

SEQ ID NO: 144980 - DNA, 201 bp, Homo sapiens
tgcctggctaattttttgtatttttagtagagacagggttttgtcatgttggccaggctggtcttgaactcctaacctcaggtgatccacctgcctctgcytcccaaagtgctgggattgcaggtatgagccactgcgcccggccttatttctatcaattttttggtggaatttctagggttttgtatacataagagcata

SEQ ID NO: 144981 - DNA, 201 bp, Homo sapiens
cctcagggagcttgggtgggagccggaggatgcggcttcagggagcttgggtgggagctggaggatgcggcctcggagcttgggtgggagctggaggatgyggcctcaggagcttggggacacaggctttcctgaagccagaggcagtgctgaggtctgagccttgaaagtgacggagcactttggtgtccaggggaagtt

SEQ ID NO: 144982 - DNA, 201 bp, Homo sapiens
tccaccctccttggcctcccaaagtgctgggattacaggcgtgagccaccacgcccggcccatgtgtgtgtgcatgtttgtgtacgtgtgtatgcatgcaygtgtgtttgtgtgcaggctcctgtacatgtgcgcgtttgtgtgtgtccatgtgtttgcttgtgtgcgtgtgtgcatgcgtgtgtgtgcatgtgtgtgcat

SEQ ID NO: 144983 - DNA, 201 bp, Homo sapiens
aagagtgggacggacactcagcactgacacagaggccccggcagccgccccatgaagagtgggacggacactcagcactgacacggaggccacggcagccrccccatgaagagtgggacggacactcagcactgacacggaggccccggcagccgccccacgaagagtgggacggacactcagcactgacacggaggccac

SEQ ID NO: 144984 - DNA, 201 bp, Homo sapiens
gcgtgtgtgcatgcgtgtgtgtgcatgtgtgtgcatgtgtgtgcatgcacgtgtgtttggaggctcctgtgcatgtgtgcatgtgtgcgcgcatgtgcgcrtgtgtgcacacatgtgtgcgtgtgtgcatgcgtgtgtgcatgcacgtgtgtttgtgtgcacgctcctgtacgtgtgtgcatgtgtgcatgtgtatgcatg

SEQ ID NO: 144985 - DNA, 201 bp, Homo sapiens
tgcatgcgtgtgtgtgcatgtgtgtgcatgtgtgtgcatgcacgtgtgtttggaggctcctgtgcatgtgtgcatgtgtgcgcgcatgtgcgcgtgtgtgracacatgtgtgcgtgtgtgcatgcgtgtgtgcatgcacgtgtgtttgtgtgcacgctcctgtacgtgtgtgcatgtgtgcatgtgtatgcatgcatgtgt

SEQ ID NO: 144986 - DNA, 201 bp, Homo sapiens
gctggggaggtactggcaggggccgacatccccatctctctgcccccacaaaaccctgatgttcctgccagtcagctcccaactggacccagggtgccccrcctccccacactcacctgtctgtttcccctttccagtcggagagcgaggagaaggttgtcacctatgaccacattgggcccaacgtctgcatgggagacc

SEQ ID NO: 144987 - DNA, 201 bp, Homo sapiens
agcttctggctgattgtgggtgtaccgatatctgtttaagttcctgctttcagttcttttgggaattgtattagttcattttcatgctgctgataaagacrtacctgagactgggaagaaaaagaggcttaattggacttacagttccgcatggctggagaggcctcagaatcatggcaggaggtgaaagacacttcttaa

SEQ ID NO: 144988 - DNA, 201 bp, Homo sapiens
gtacagcctccctctcggctgctttcatgggctggcattgagtgtctgcggcttttccaggcacacagtgcaagctgttggtgaatctgccattctgaggwctggaggatggtggccctcttctcacagctacactaggcattgccccaatagagactctgtgtgggggctctgaccccacattacccttctgcactgccc

SEQ ID NO: 144989 - DNA, 201 bp, Homo sapiens
ccccgccggccgcgcactccatgaagggcccattagcgcggcaggtgcctcccgggctgtaaattcgccccgatttatctccccggggacgaaataaatcyagcttggatgggagtgtagttaggcaaaggttttcatgcgaaatcaggaaaaaatacgagaacgtattttattaacggaaagaatgcagatttgaggacc

SEQ ID NO: 144990 - DNA, 201 bp, Homo sapiens
aagttccacataaggaattgtgaggtttccaatttgttcttcttttttaaggctatttttggctattcagggtcccttgagattccatatgaattttagcrtggacttttctgtttctgcaaaagaaagtcattgggattttgatataaatggaattgaatctgcaggtttctttgggtagcatcagcatcttaataacgt

SEQ ID NO: 144991 - DNA, 201 bp, Homo sapiens
agatttgccagcacagagcagttctcactgttggaagccgcaggggacttccactggcagatgtggactttgcctgtcagctgggagcaagattgggagcyggaggtgcggcctcagggagcctgggtgggagctggaggatgcggcctcagggagcttgggtgggcttgggtgggagccggaggtgcggcctcagggagc

SEQ ID NO: 144992 - DNA, 201 bp, Homo sapiens
acacagccaaaccacatcaggaatatagccagcagtggaattgcttcactgtatagtaattctgtttaatttttggaggagctgccatttttcttcatagygatggcaccatgttacattcccaccagcagtgcacaagggtcccatttctccatctcatcccaacacttattattttctcttttcaattttaatgttttg

SEQ ID NO: 144993 - DNA, 201 bp, Homo sapiens
catttgcatttccttaatgattagtgataatgaacatcctttcatgtgcacgttgaccatttcatatgtcttctttagaaaactgtttaagtcctcttccyatttttaatggggttgtatgtccttttgttgttgagttgtagaaggttaaaaatatattctgaatattaacccgttagcagacacatgacttgcagatat

SEQ ID NO: 144994 - DNA, 201 bp, Homo sapiens
agtgaactaaaattacatgcaataaaaaaactgttcagtcaccagtagcctcatttaaaggacagacgtggctagtgcaggtctagaacgtgtccatcacygcggaacgtactgagacttcctgcgtcggtggaaacattccgtcatctacaccggccagtcctgtagcaacggcctaggtggtttttgaacgtgtgtgtg

SEQ ID NO: 144995 - DNA, 201 bp, Homo sapiens
cagtggcaatgcagattcctgggagcagggaggcctccacccaccacggctcattcacacgcccggccaccctggtctctgggctctaggatgctgcccgygacagcagctgcccatgcagttaccaggccctggcttataatgccctcatgctggacagacgtgggtcttactgttctgcgctgtttgtctgccatttgc

SEQ ID NO: 144996 - DNA, 201 bp, Homo sapiens
caggcccaggaagcagtgagtcggggacagtcaccctccactgcagcagtgacccggggccacagcctgagcacctggatgctccccgaggtgggagcggygttggtcaaagcggagaccacgtgtgccacaccccagagctgcctgcacttacaggcgtttcgagctgatccgggccaggtcaccaggtggaggaacgtc

SEQ ID NO: 144997 - DNA, 201 bp, Homo sapiens
ccaggcatccctgggagtgactgcgtgcctcctgcatatcagatgcccctgggagtcactgcgtccctgccctgtatcagacgcccctggaagtgactgcrtccctcctgcgtatcagacgcccctgggagtgaccgcgtccctgccccatatcaggcggccctgggagtgaccgcatccctcctgcgtatcagacgaccc

SEQ ID NO: 144998 - DNA, 201 bp, Homo sapiens
aggcagtgtgggatgcgctcactgtgtgggtgaagggctccgccctcagggctactggcaccgccatgtggccagccccattcccagacccgcagagggcrtgggcaggcccaggaagcagtgagtcggggacagtcaccctccactgcagcagtgacccggggccacagcctgagcacctggatgctccccgaggtggga

SEQ ID NO: 144999 - DNA, 201 bp, Homo sapiens
tgcgggcctggctgacccaggtggcgtcttgaagtcccagccgcgttggcgtgtcctgctgtgagcctgaccgcaagctgcctcccctctgcccctgcagyggctgccaggacatgaggctaacaagcaccgagggcagcccaggaacccgatttttcacttcatttcattttaattcagatctgataattcagatctgat

SEQ ID NO: 145000 - DNA, 201 bp, Homo sapiens
tcctggaacctcctctgcatgccccaagtggatttctcaaaggaacagtaagcaggaacgtggcagagctcctgcgggcctggctgacccaggtggcgtcytgaagtcccagccgcgttggcgtgtcctgctgtgagcctgaccgcaagctgcctcccctctgcccctgcagcggctgccaggacatgaggctaacaagca

SEQ ID NO: 145001 - DNA, 201 bp, Homo sapiens
acaggcgtgagcccccatgcccagccccccagaccctcttggaagtctgtgccgcttccttctcccgctcggtagcttcagcattgccacagctgtaatcrtttagttctttctctttggttttagggccttctccttttcaggaattccagtggcagctggtgtgtttggaagcgggtgtctgaagccagcattgccggt

SEQ ID NO: 145002 - DNA, 201 bp, Homo sapiens
tcattattccgtgagttaacgagtcgtcacccccgcctgggaactcaggggtcccgggtgctcctgggtgtgggaactcaggggtccagggtgctcctggktgtgctttcgggctggccggggaccagcagcttgggcgccgaggtgccaccgacaggaagtgggcctctaggctcagtgcaagggccgatgtttctctgt

SEQ ID NO: 145003 - DNA, 201 bp, Homo sapiens
ctggtcacccggagagcttttgtccctggagatacgggcgaggggagcacccaggacagcctcctgctctgttgcccgggctggagtgcagtggtgatctygcctcactgcagccccatcttctgggctcaagcgattttcccccctcagcctcccaagtagctgggactacaggtgtgcaccaccacacctggctaactt

SEQ ID NO: 145004 - DNA, 201 bp, Homo sapiens
cagactgtgggacctgtgccgagggggaggacagtgagggaacccgtcccacagaagaggcctgccaagggttctggtcacccggagagcttttgtccctsgagatacgggcgaggggagcacccaggacagcctcctgctctgttgcccgggctggagtgcagtggtgatctcgcctcactgcagccccatcttctgggc

SEQ ID NO: 145005 - DNA, 201 bp, Homo sapiens
ggcacttctgtgccgcaccagtttttgtggtttatggcggtgtccaagcagagtttgagagggtgggtctcagagtgagaaaaacaaaagtaaaatggcgrtgctccgtgtggagagcatgagagcggcggctgccgaaggagagccctgcacagccctcctgccgccctgcacggggctccccgcacgactctgcccgag

SEQ ID NO: 145006 - DNA, 201 bp, Homo sapiens
gtgacgttgctgtgacgcctgtgtgtggtttatgtctttacacatgtcatcgcctgtgaccaacatgtccagcatcctgtgaacggagtctgccggacgtytccacgagctccagccacggtgctcggtcatgggactcgctgccggctgtctggagagcgtttgggtggttcccggccctttggtggcagacaggacgat

SEQ ID NO: 145007 - DNA, 201 bp, Homo sapiens
gccttcacgatcctcccgggttccccacagggctctgcacaaggagtctgggctgggctcccatccctgtgctgttattagcgggtatatggccttggctstcctctgcatctggcccttgctgagggccctgaggcgtggccccttatcccctctgaccgcccctgacctccgtctccagagtgatggagccctggtccc

SEQ ID NO: 145008 - DNA, 201 bp, Homo sapiens
ccttgaaagcttaaattttgtcattggcaacaaatagcatccgctgctgctggaagaggcaggctcgtccgcccttctggagaaaatgcctgttagccacygaggtctaagttaccacagtctgtctgtcaatctttctggcaaaatatggtgtccgtgaaaacgagcagctgctttagctgacgactcagatgcaggcac

SEQ ID NO: 145009 - DNA, 201 bp, Homo sapiens
cagacacatgacttgcagatattctcttccatcctgtggcttgtctttcatcctattgatagtggcttttgatgcacaaaagttgttaagtttgatgtccygcttgtctgtttttccttttgttgcctgtgctttggatattgcatttaagaagtcattgtcaaatccagtgtcacaaagtttctcccctatgttttcttc

SEQ ID NO: 145010 - DNA, 201 bp, Homo sapiens
gctaaaacataacaagggtcaccttcgctccagttcccaacaagttcctcatctctatctgagaccacctcagcctggattttactgtctgtattgctgtyggcattttgggcaaagccattcagcaagtctccaggaagttccaaactttcccacattttcctgtcgtcttctcatcccttcaaactgttccaacctctg

SEQ ID NO: 145011 - DNA, 201 bp, Homo sapiens
aaagtttctcccctatgttttcttctaagaatttttatagttttagatttttgatccattttgagttaatttttgtctgtggtgtaaggtaagaaaccagyttcattcttttgcatgcggttatccagttttcccagcctcatttgttgaaaggactgttcttttccccagtgaatggtcttggcaccactgtcaaaaatc

SEQ ID NO: 145012 - DNA, 201 bp, Homo sapiens
tgggacggacactcagcactgacacggaggccacggcagccgccccacgaagagtgggacggacactcagcactgacacggaggccacggcagccgccccrtgaagagtgggacggacactcagcactgacacggaggccacggcagccacctgcagcgagccgccgctgcgcacagctccacaagtgagtttaaagccgg

SEQ ID NO: 145013 - DNA, 201 bp, Homo sapiens
cattttccacatggtcttggggattaacaacaggctccttgctacttacccagatttctgcagctgacttgagtttctccccagaaaataggttttgcttytctatcacatattcaggcttcaaattttccaagcttttatgctctgcttcccttagaaaactgaatgcctttaacagtactgaagtcacttcttgaatgt

SEQ ID NO: 145014 - DNA, 201 bp, Homo sapiens
gccacgttgctgaattgctgaatttttgtgacggagtctcgttctgtcacctaggctgaagtgcagtgacacagtctcggctcactgcaacctctgcctcyggattcgggtgattctcctgcctcagctcccgagtagctgggaccacaggcatgcaccaccatgcctggctaattttttgtatttttagtagagacaggg

SEQ ID NO: 145015 - DNA, 201 bp, Homo sapiens
ggagtctcgttctgtcacctaggctgaagtgcagtgacacagtctcggctcactgcaacctctgcctctggattcgggtgattctcctgcctcagctccckagtagctgggaccacaggcatgcaccaccatgcctggctaattttttgtatttttagtagagacagggttttgtcatgttggccaggctggtcttgaact

SEQ ID NO: 145016 - DNA, 201 bp, Homo sapiens
ggctgaagtgcagtgacacagtctcggctcactgcaacctctgcctctggattcgggtgattctcctgcctcagctcccgagtagctgggaccacaggcaygcaccaccatgcctggctaattttttgtatttttagtagagacagggttttgtcatgttggccaggctggtcttgaactcctaacctcaggtgatccacc

SEQ ID NO: 145017 - DNA, 201 bp, Homo sapiens
tgtggggtggcgccagaggcctctctgaggactgggtgcatgggggaggccaggcaggcgaggagggcaacgtggccatgggcatgacggtggccaggctyggctccaggggctggtggtgaggtcagcttcaggatggggtggcctggacggtggagctgctcacatgctcagacccacgcaagggctgagcccgggact

SEQ ID NO: 145018 - DNA, 201 bp, Homo sapiens
cgtgttccggggctgtgctatgcgtagtgactctgggcctgtggtgcgtcctgcggggctgtgctacgcgtagtgaccctgggcctgtggtgcgtgttccygggctgtgctacacatagtgactctgggccttttgggcaggtctcagatttactgtctgttttaatttcaattgcagtttttgtttgatttcgcttgggc

SEQ ID NO: 145019 - DNA, 201 bp, Homo sapiens
tgaggacagagtgggccctgggtcagtggagtgtaggcactgggttggtggaggagctggttggagactgaggggctgggaggccccaggctggggcaagrgggtgtctgccgctctgggcggctgggataaacaaagctgtgcagctgagcctctcagctgagaggctgcgaccttcatggcctggtgggcctggcacct

SEQ ID NO: 145020 - DNA, 201 bp, Homo sapiens
gtcagcatgactggtgttccaccctggcagatgaaggcccggtccttcctgggctcctaattggggacactacatccaagagccgtgacagggttcagcamcccgcgtgcagaatgccggcttccacggggcacgctttataaaatgctctttaattcaggaacagaatatcattagctttgtaaagtggatgaatacaat

SEQ ID NO: 145021 - DNA, 201 bp, Homo sapiens
accctgggcctgtggtgcgtgttccggggctgtgctacgcgtagtgaccctgggcctgtggtgcgtgttccggggctgtgctatgcgcagtgactctgggyctgtggtgcgtgttccggggctgtgctatgcgtagtgactctgggcctgtggtgcgtcctgcggggctgtgctacgcgtagtgaccctgggcctgtggtg

SEQ ID NO: 145022 - DNA, 201 bp, Homo sapiens
actcagttacgctgacgtgttagaacttgagaaatataccgcgttcgtggattggaagactcagttacgctgacgtgttagaacttgagaaatataccgtcgttcgtggattggaagactcagttacgctgacgtgttagaacttgagaaatataccgtccgtgttcgtggattggaagactcagttacggtgacgtgtta

SEQ ID NO: 145023 - DNA, 201 bp, Homo sapiens
ctcagttacgctgacgtgttagaacttgagaaatataccgcgttcgtggattggaagactcagttacgctgacgtgttagaacttgagaaatataccgtcbttcgtggattggaagactcagttacgctgacgtgttagaacttgagaaatataccgtccgtgttcgtggattggaagactcagttacggtgacgtgttag

SEQ ID NO: 145024 - DNA, 201 bp, Homo sapiens
acagtgacggccccagtccctccccgcagctggagagttccgctggccagagcccgctgcacagagaagtcagcagggaggccccctagtactggggcccygtggctgcccagtgagacggcgtaagcgctgcctggcagcctggtccatcagcagactgagcacagacgtagcggagcctgcgtctcatccacatatcct

SEQ ID NO: 145025 - DNA, 201 bp, Homo sapiens
gaacagggctggcgagggcggcgcctctggaaccagagtcccacctctgccctgacactgcagagttgggcacattgctcacccctcgtggcctcagcgtscccctcaggatgctatcgtctcctctgggcaggctgagccttcaggcccaggcctgcccgacggtacccacccccaggtcagcctctccgcagccagaga

SEQ ID NO: 145026 - DNA, 201 bp, Homo sapiens
ctgggcacggctgctcaagtcttccctgtggtccagccgagggcggccgtgtgtctcgagctccctgatcagcatctgtggtgacagtggtttccctgcasctgctctcacatgggggcatggggctcacaggcggcaggctggcacgtttcttcatatcttccccccaccccaccccaggctgggcatcagcagcccctg

SEQ ID NO: 145027 - DNA, 201 bp, Homo sapiens
ttggtctgcccggctccccagacgccaaggccctcagggcaggattgtggtgtgcgcctcaacagcagccctgcagcccccaccccgtagctccccccacsccgaagttcctgatacgtgtggctcccggtacagcccaggctcaggtggcggcgatttggacaccccagtggtagcatggagctgctgcctttttgcgca

SEQ ID NO: 145028 - DNA, 201 bp, Homo sapiens
ggctggccactgctgtactgggtggcccagcagaggaacctaccatggtgggaggtgggagggcaggagggcctccatgccatctcgaggggagccctgcyacctcttaaagaacacccctctttggaatctcatgctgttgactgtttcacttgaattttgggggtacttttagaccagagctcaggctctacgttcggt

SEQ ID NO: 145029 - DNA, 201 bp, Homo sapiens
gtggcgtggaggggggtgtggcatggagaggggtgcagagtggaaggggtgcagtgtggaggggcgtggcgtggaggaggtgtggcgtggaggggcgtggygaggaggtgtggcgtggaggggagtggtgaggaggtgtggcatggaggggtgtggcatggagtggggtgtggcatggagtggggtgtggcatggagggac

SEQ ID NO: 145030 - DNA, 201 bp, Homo sapiens
gtgagcaggcgggaaggaggctggccagaccttgggctgcctctgcctctgcataaggaactctcccgggcgggaccctgagctgtaagatggtgccttcrggccaggacagcacccaggatacagcctcccgaaggcctttcatgccatgtgctatttccatcgggtgtgacgtgttaaagctctacacgtgtgcttaga

SEQ ID NO: 145031 - DNA, 201 bp, Homo sapiens
ttctaatggctgtgcttaaggggctgtttactttgtgaactggtgataaacagttctccagaaactgccactttctcctgagagtcagtaaagagcttcascaacctccaggcagctgctcgagcggctggtggagcactccagggcgagtgagcacctgtgtctgagagccgcccacaccaccataagcctcaccagctc

SEQ ID NO: 145032 - DNA, 201 bp, Homo sapiens
ttctcctggaaagacgcctgcctcccactgtcactagtagaggggcctcacccagttactgtagatttgtcaccagtcacacgtccagccttctcccatgrcagcccccatgggtgagaacccagccttgggcccagtgactgtggcctaaagccaccaagggaccataggtgcagttcttaacctgtgagcctcagtttc

SEQ ID NO: 145033 - DNA, 201 bp, Homo sapiens
agttgagttaagaggaaggaatagtttgtatctgtgttcccatccagtgtgagaaaatgaaaagccgaatgagagggttgcatgtttcagaaataagaacrggcagggacggtcctccctgccgtgaacagcatccccgtttgatggtcatgtgctgtgtgtcttcacggaaaagacttgccctgagacgctccgctgaca

SEQ ID NO: 145034 - DNA, 201 bp, Homo sapiens
agtgcagccccagccagggcccaggttagccggggtctggatctcctgtgtggcccgcaccggatcgacttttcggtgccccaggggcttggctttgtccrgtggaggccgcttcccggctgtgccgtggcctccgggggctggaggactcctgcccgtgtctgcagtcctcgcagaagcatcacagctaatggctgcatt

SEQ ID NO: 145035 - DNA, 201 bp, Homo sapiens
gccttcctgaaatctcgaaacatgttgtatcatagagattcagggaacctgccatcagcattttggtgaaagccacaggatggcagtggctcctttctgastctcagcagatctcatagatgctcctgggcaggccttagggaaatctgggctcctagtctcatagctggtgcctgcagagccaagaaccgcatggcacct

SEQ ID NO: 145036 - DNA, 201 bp, Homo sapiens
cactgcactccagcctgggtgacagagggagactctgtttcaataaataaataaataacttaaaaaccatacttgggattcttgaaaggtctgagttacaytgggaggaatgagagggtttggtggtgcaggggagatctgatcccctcctgccagtgccttcctgaaatctcgaaacatgttgtatcatagagattcagg

SEQ ID NO: 145037 - DNA, 201 bp, Homo sapiens
agctcacattggtcttggaggtcctgtggatgctgcctgggtgcagagctgaacctccccactggggctcctctgtcatggcccccctcaccacgctgccrtcttgggctctggccatctggtcactcatgtatctcacatgtctgagaacatatgtggcacagaggaaggagaaagtgccgggtgcatatttgtggaatg

SEQ ID NO: 145038 - DNA, 201 bp, Homo sapiens
caagacataaacctcaggaagcatggtgagtcctgagcaggaggaatggaagtaaatccacacacagacatgtcagagtgaaacagcggaacatcaaagaygaagagaatatttttgaagcattgtgggaaaaatgtcctattacataagaatgcaagtggcggcgggtttccagaacaaccacaaaaatacacaccagga

SEQ ID NO: 145039 - DNA, 201 bp, Homo sapiens
caactgcagacccacaggtattcacatggtgacccccaccgtcacccaggcacctgtcctgaactgtagacccacaggtattcacatggtgacccccaccrtcacccaggcacctgtcctgaactgtagacccacaggtattcacatggtgacccccaccatcacccaggcacctgtcctgaactgtagacctaggttcag

SEQ ID NO: 145040 - DNA, 201 bp, Homo sapiens
tgtgggggcggtggagggggtggtgccacgtgtggctctgtggacggctccgacgaccctgacagtgtgcttctctccctccaggtcgtgcacacacacargccgcacttcatggccttgcactgtcaggagtttggagggaagaactacgaggcctccatgtcccacgtggacaagttcgtcaagtaagtctaggggcag

SEQ ID NO: 145041 - DNA, 201 bp, Homo sapiens
acatatgcacgcatgtttaatcagcgtgtaaactgtgtgttatcctatgtggaaggcacgtgtctgccatgacccagcaatgctgtgtattatatacataygcactcatgtttaatctacgtgtacacgtgtgtgatcctatgtggaggacacatgtctgccgtgacccagtaaggccatctgtgtattatatacatatgc

SEQ ID NO: 145042 - DNA, 201 bp, Homo sapiens
cgacaggaaatgaacacagaggctccccggggcaaatggcctccccgagagaggaggcggacatgtttggaatcagagacaagtgtctggtgcagcacgcrgggagcctgccaccccgccaccccgccatagagctccctgggtcgtctgggcatggccccatgcagcagccagaccagtagcctggggatgccttggcca

SEQ ID NO: 145043 - DNA, 201 bp, Homo sapiens
acggacactcagcactgacacggaggccacggcagccacctgcagcgagccgccgctgcgcacagctccacaagtgagtttaaagccgggttgcacaggtrgagaggacgccctgggactccacagggtgctgttactgcaggcggggaatcacctcccaccgccctccccggtggaggcctctgggctgtgggccggcgc

SEQ ID NO: 145044 - DNA, 201 bp, Homo sapiens
cccatgcagcagccagaccagtagcctggggatgccttggccagcctcctggagctttggcacagcccatgttgtttggcaagcagggcagcctgagcacrgcaggggatgtgggctcagtaccagagccagctcgtggtgtgaggacggatcctcctcgacgagtagagccatagcctggcgtccaagtgcgtggccagg

SEQ ID NO: 145045 - DNA, 201 bp, Homo sapiens
cgtgcccagtggcattccagaaagatccgtggaccctgaccctcagcgttcccagggtgcccacgcacccaatggcattccagaaagatccatggaccccraccctcggcattcccagggtgcccacgtgcccattggcattccagaaagatccatggatccctgaccctcagcgttcccagggtgcccatgtgcccagtg

SEQ ID NO: 145046 - DNA, 201 bp, Homo sapiens
gcctgccgccctgcgcctctgagggagcagcagcctcctgacgccccagtgtggtgcaccttcttgcagccctgcccccaggacagccaccccagtgaccrgtcgtcagggagggagcagcagttccctgggaactgcagagcctgaagtgtgtgggacgtttagcttgggccatggaattaggtgatgttcaggcattgc

SEQ ID NO: 145047 - DNA, 201 bp, Homo sapiens
gtagcctggggatgccttggccagcctcctggagctttggcacagcccatgttgtttggcaagcagggcagcctgagcacagcaggggatgtgggctcagyaccagagccagctcgtggtgtgaggacggatcctcctcgacgagtagagccatagcctggcgtccaagtgcgtggccaggccgggaggagtgtacaggaa

SEQ ID NO: 145048 - DNA, 201 bp, Homo sapiens
cggcattcccagggtgcccacgcgcccagtggcattccagaaagatccatggatccctgaccctcagtgttcccagggtgcccacgtgcccagtggcattycagaaagatccgtggaccctgaccctcagcgttcccagggtgcccacgcacccaatggcattccagaaagatccatggaccccgaccctcggcattccca

SEQ ID NO: 145049 - DNA, 201 bp, Homo sapiens
catcaggggtccctggaggggctctctccatcctcttcctggcgtcaggtgttctcggcggcctctcggtaacagcctggcctttgcttctgtccggggcrcgtggcccaggctgagcagtgcactcggctgcctaggtggtgtgaggttctgtgagcccgggcccagctgccgtggtgaatataaccgggagggagtgcc

SEQ ID NO: 145050 - DNA, 201 bp, Homo sapiens
gagctgaactctggcctctcttgaacccgggcaaggctctcatctcagagtgaccagagaccgactcagggccctttgtgggaagcgtgggtgctggggtgggggggggctgggctgggcagggccaggcgctgccacctgatggcatgaggagagcagctgtgggtggctgggctggtccaggcagaggctgttgacccg

SEQ ID NO: 145051 - DNA, 201 bp, Homo sapiens; identical to SEQ ID NO: 26791

SEQ ID NO: 145052 - DNA, 201 bp, Homo sapiens
gagtagccaatcaagagggctgcttggaggaggctgcatttccacagagacctgaagcagcagggggtccatgtgagaagctggaaaaggggaggcagcaraggtaccctcctgacagaagggcgcagcctcctcaggcccagatggccaatggggctggagctctgtcagctgggtgtgtgagggccagaggacagctgg

SEQ ID NO: 145053 - DNA, 201 bp, Homo sapiens
gctcctgtacgtgtgtgcatgtgtgcatgtgtatgcatgcatgtgtgtgtgcaggctcctgtacgtgtgtgcgtgtgtgtatgtgtgcatgtgtttgcatrtgtgtgcatgggtatgtgcacgtgtgcatgtgtgcatgcatgtgtgtgagtgtgtgtgcgcatgtgtgcgtatgcacatgcacttgtgttttcatggccg

SEQ ID NO: 145054 - DNA, 201 bp, Homo sapiens
atccgtggggtcgttggaatctgaggacacatcttttcttgtgatggcgtttgcctacagagctgtgtgcgtcgcagccccctctcctcccctgtcactcygggagcaggggtcccctctgtttgagcaggcctggcctttgttgggctttgctgaggagctcatccatgtcacgtacacttgctgttgagagaaaccaag

SEQ ID NO: 145055 - DNA, 201 bp, Homo sapiens
gaatatttcaaatttgatttacccatttgcacgttaagcatttgggtcattttcagttggtgttttcagaggtcatatgccattgtattctcatgcctgtstcctgagagctccagcgtctctgagagaggtctgtgtgtgcattccacgtgtgtatacagacatatgtatgtctacaggtgtatgcatgtatgtgtgtgt

SEQ ID NO: 145056 - DNA, 201 bp, Homo sapiens
ctccgcccccgatggcgccaggcatatggctgctgctgggaacggaatgggcggtgccctgccctgttggctgccgttcccccgccactgcctgaagcgctttgctttgtggaccttggacttgactctgtcagcctcttcccagtgccttctgtggttttcaagggtttcccaagaggcctaggctgtgaagctaccctg

SEQ ID NO: 145057 - DNA, 201 bp, Homo sapiens
caggcttttacaattttttgtaggtatggggtctcgctatgttgcccaggctggtctcgaattcctggcctcaagtgatcctcccaccttggcctcccaargtgctgggatgacaggtgtgagccactgcgcctgggcttgtcttccctgtttcatggctgagcagtgtcccctgagtggaggcatacctcgtttctccag

SEQ ID NO: 145058 - DNA, 201 bp, Homo sapiens
ggttcacaccacgggaacttctcggcatctgtgccaggaaagttagagcttcctcatccttggaaccccagcctgcattgcacccagaagaggataccccygaatgaagctggaggctgctgtccactccacagaaccctggccctcgtcacacccagaagaggatgccccagaatgaaggtggaggctgctgtccactct

SEQ ID NO: 145059 - DNA, 201 bp, Homo sapiens
gacgaacgcaccctgcaggcagtgctcaggctgtgaaggaatctttctcgcccagtctcaccgtgttggaagccaagctcgtctgtgaccagtgctggagmcggtcacagttccgaggaggaaggtgtttgaatctgaagcagatatcccggactgtggcggactctgttttccttttgtgcacaagtgataggtggtttg

SEQ ID NO: 145060 - DNA, 201 bp, Homo sapiens
caggcatggagtagccggcccgctgggggtctgttctgggtcggacccctcatcagggcctcctctcggggggcctctctggctcccatcgggctgaagtsgggtggaaacaggttgtgctccaggctggttggatggggcacagtgatgggatagtcacctcgtccttctggtctcttccagctaagaagtatagaaagg

SEQ ID NO: 145061 - DNA, 201 bp, Homo sapiens
tgtaaaactgcagctctgtcctcgttaaacactgagtccctgtctgcccccagttcctttgtcaccaacattttactttctgtctccatgaatctgatgaytccagatatctcacatgagtgcgatcatacattctttgtctttttgtgtttggcttattttccttagcataatgttctcaaggttgttgcatagtcagaa

SEQ ID NO: 145062 - DNA, 201 bp, Homo sapiens
tgttttctggtgaggtgtccatgtggccagcgtccccgggagcaggaccatcaccccagcccaccatgcactgcacacgccctaggagcaggagctgcacrgcctccagggagcttcccatgttgtggagtcggcatcaaaccagagacggcctaacaggccccagagagctgacccaggggcccagggggctgcagacag

SEQ ID NO: 145063 - DNA, 201 bp, Homo sapiens
tgcagggctggggcggtgtcctgcctcggagagaggctgttcctcagggtgagcacagggggagtgggacagagccttccacagggctgggaaagacctgkccctcctctgcggtcctctgtcaggtggacacatgagagggtggccctggtggacgtggcagccacagagatacaggcaccaggtgtctgggaaggggca

SEQ ID NO: 145064 - DNA, 201 bp, Homo sapiens
gagtcatttgtaaagaaaaataatgaatgatggtttgctctgtgcagtgtgtcatttttcctggttgcaaaaccaaattttcttggttttcttggaaaaamctcttcagaaggaagaaatttcagtgacacttagaacagagaattctcaaaagtgagatttcagcgccaatccccactctcgatttcaatgccaatcccc

SEQ ID NO: 145065 - DNA, 201 bp, Homo sapiens
ctgggttctgtctgggggccttagacggctatcttgcggtttctgtggtgcctgggttctgtctgggcaccttagacggctgtcttcagggttctgtggtrcctgggttctgtctgggcaccttagacagctgtcttcagggttctgtggtgcctgggttctgtctgggcaccttagacagctgtcttgcgggttctgtgg

SEQ ID NO: 145066 - DNA, 201 bp, Homo sapiens
gtcctcgaggatagggtaccctctagggaaagacatccttcagaaaggcatctatgaggggatgatgtcctccaggaaaaggcgtctatgagggaaagccrtccatgaagaaaaggcgtccatgagggtaaggtgtccatgaggggaaggcgtccatgagggaaagctgtccatgaggggaagacgtccatgaggggaagg

SEQ ID NO: 145067 - DNA, 201 bp, Homo sapiens
gccgatgacgctctcccgccacctgccctgtcaccgtggggcctcccacggtgtcccaggccccagcagcctcgcgcccggttcccactgctgtgttaggraagcgcccgctgttggaaatgtaattcggaacgttcaacccgtgactctccctaagtctttaatctgcggtgtcgtgaggtcgcagttgtcctggagaca

SEQ ID NO: 145068 - DNA, 201 bp, Homo sapiens
tctcaatagccaatgtaaactgaggtggacgtcagtatctgtgtccgcttgctttactcaatagccgacgtaaactgaggtggacgtcagtgtccgcgtcygcttgctttactcaatagccgacgtaaactgaggtggacgttggcgtccgcgtctgcttgctttactccatagctgatataaactgcagctggctgcagc

SEQ ID NO: 145069 - DNA, 201 bp, Homo sapiens
ctgtgcacacctgcagttaacctgattggaagctctcacttttgcctggctaataacctgagtttattatctccaaatgcagcgtagttggatgggcagcstctgtgctgcctgcccctgccctggcagccccacctggctctgggctgtgaaattaggaaatttggcaaccagagtatttcctttttttgtctacagatc

SEQ ID NO: 145070 - DNA, 201 bp, Homo sapiens
ggactccgccctccctgcttcggactcggccctccctgctctggactccgccctccctgcttctgactccaccctttctgcttcggtatctacctccttgytttggaaggacacaaccttcttggctggcacagcccttcctgccatgcctgttgatcccatcatcagccaaggatgtgttggggccgtattctgcggctc

SEQ ID NO: 145071 - DNA, 201 bp, Homo sapiens
agctggaaaaggctgagttagtgattggttgggccccctgcctcccggcctcatcccactgggccctaccgtgcccctcatgcccctgtcaccagctccargagggcacagtgctcccagcagtgacctgcccgggctggcactccctgcctgtggacagctgtgcacacctgcagttaacctgattggaagctctcactt

SEQ ID NO: 145072 - DNA, 201 bp, Homo sapiens
tgatctggtgcggtgaggcacctgtgtcagcaacaggtgggagtggctctggtgtctgagcagaggctctggtgtctgagcagaggctgtctggatgccaytcacggtgagagaagagcctagaatcttgactgtcctttgagtatcaggtaaagaaatttgaatgtgattaggtagtcagtggggaccattacagagttc

SEQ ID NO: 145073 - DNA, 201 bp, Homo sapiens
cgtggctgatgcacacccaccgtcccctgcagaggagacctctgcacgcaggcccacagcaagggccggatcaggagaacaacccacttggcaggcggcarccttgcctggcactcaccagggcctcctccccagcactgtcccgagtcaggtctgcacggcttcatggctgcctgccctgggaggtggagcatggagaag

SEQ ID NO: 145074 - DNA, 201 bp, Homo sapiens
gagagagtgaagtctgagctccttgtgtaggagacctccgtgtggagtagccccagaggcaggaggctgcctcagccaggatggccccatgcacttgctargctgcgccgcctgctcactcaaggctcttgggctcggagcagaactatgagcctgcaaggcctgctgggcagagtggccacagcacgtggccgctggtca

SEQ ID NO: 145075 - DNA, 201 bp, Homo sapiens
cagcgccctcggtaacaagtcctctttttctttccagaatcattgatcagcgattcgagaaggtttcctactttgtatttggtgatttcaacttccggctrgattccaagtccgtcgtggaggtaggcgctggcttccctcccgccctggtctcatgccttgctctgtgttgaggaaaacagtggaaggagcgtggcccct

SEQ ID NO: 145076 - DNA, 201 bp, Homo sapiens
ccattcttcagcacacacgcttcccaattacgtctctgagatgtctgaaaccagggtgcggggcaccagggcggctgaacaggccacccagaggcagccgkgctgtgtctgaggccccgaggctgttcctccagtcaccctcacgatgagggtttccggaaaatgggacaggataaggcttgggagtgagagtgggtctca

SEQ ID NO: 145077 - DNA, 201 bp, Homo sapiens
tctcccccgtctctggggaggccctgggtcccccggcctgggtccatctcccccgtctctggggaggccctgggtcccccggcttgggtccatctcccccrtctctggggaggccctgggtcccccggcctggttccatctcccccgtctctggagaggccctgcatccttctcccccatctctggccttctgtccccagc

SEQ ID NO: 145078 - DNA, 201 bp, Homo sapiens
tagaggtatggtttaatcagttagctctgctagtatatagaaggaattcaactattaaagactaagaaaggcacaaaataaacctaaacacatccaagttrtcactgaatattgtactactgccactgtctttctctgggtggtacaggagttgaggcagtctagtgagaaaagtcacgggcctgaaggattttgaggcca

SEQ ID NO: 145079 - DNA, 201 bp, Homo sapiens
tgtttatttaaacttagtgatttgttaaaatttagtttcaaatactattaattagcaaggtcattgggttgaccaattaagatatattgaatatagggggktttttttctcccatagaggtatggtttaatcagttagctctgctagtatatagaaggaattcaactattaaagactaagaaaggcacaaaataaacctaa

SEQ ID NO: 145080 - DNA, 201 bp, Homo sapiens
tcagtggggagcagggagagcctggggagcacagatgtctgggtggaggcaggtgcccaggaggtgtcttcgtggaggcaggtgcccaggaggtgtcttcrtggaggcgagtgcccaggaggtgtctgggtggaggcaggtgcccaggaggtgtctgggtgcaggcaggtgcccaggaggtgtcttcgtggaggcgagtgc

SEQ ID NO: 145081 - DNA, 201 bp, Homo sapiens
cagccccctctcctcccctgtcactccgggagcaggggtcccctctgtttgagcaggcctggcctttgttgggctttgctgaggagctcatccatgtcacrtacacttgctgttgagagaaaccaagctgtcccgctttaaattagtgggaccgtttgtcaataactgcatgaaaatatatacgtaagacttctgacccaa

SEQ ID NO: 145082 - DNA, 201 bp, Homo sapiens
gtgcctgggcctcctgtgcccgtccctgtcacctgctgcaggagcccatggtcctttcccccactggggtcgggtcaggccttggtgtcctgtccccacayggccccatcagcctgggcaagcctaaggtttcctccgcttctctccatccaggcaggctgggtttcctcctgcgccatgtgtgggaggcaccctcccctc

SEQ ID NO: 145083 - DNA, 201 bp, Homo sapiens
gttcagcttctcgggagcaccgtgaacctgtgccttgggttgtgctttgagacctgagctgagggttctgtccagcggtcctgagctgctgctgctcagcygggcgcccagagggtgtggtgcctctctcattgcccaggagccgtggaattcctgcctgccgtgacctgggcattgtggtggaggactcagaggcgccca

SEQ ID NO: 145084 - DNA, 201 bp, Homo sapiens
aggtgcgtgagctaggccgggtgtggggcttccgtgcgtgctccacacggcctgggggtgtttgtgcgatgacttcccgtctgacgctatcgtttcctgcygtgtgtgagttctcagaaccccacgcggcctccggagcagatgacatccatgtgaagtgccctgcacgtcgtagtaactgtggagccacaaacgatgtcg

SEQ ID NO: 145085 - DNA, 201 bp, Homo sapiens
gcaaaggttttcatgcgaaatcaggaaaaaatacgagaacgtattttattaacggaaagaatgcagatttgaggacccgcccgcgcgctcggagcgccccmctcggggaagagtcccggcccgcgtcccagtcgcgactgctccgccgcccgtggctggggtgggtgtgagcggcagcggacgccggcggggaacgcgctc

SEQ ID NO: 145086 - DNA, 201 bp, Homo sapiens
ggggtgggccggggcacttgtttacacaggggtgactgtgggcttgggggagtggcaggggcactaccgcgagtctggacgtgggagctggcagagggcgycctgccggtgctggttaggagcggcctccaggctccctgccgagcccacacaccggggttgggactcccctccctcccgttgggtgccccccacccttcg

SEQ ID NO: 145087 - DNA, 201 bp, Homo sapiens
agatggctttttaaacatagcatttagggtatttgtttctcctttcaaaagagaagaatcccttcccaaagtaggcgagccggaaaggcccagcctggccrctttccgcatgagtggccacgactttgctggattgaaaggcaaagggaacaggccagctttggccccttcagcctggcctgatcactcctttacagcctg

SEQ ID NO: 145088 - DNA, 201 bp, Homo sapiens
gtaacagcctggcctttgcttctgtccggggcgcgtggcccaggctgagcagtgcactcggctgcctaggtggtgtgaggttctgtgagcccgggcccagstgccgtggtgaatataaccgggagggagtgcccgcctctgcccacctgcctggcatctggggttcccgggaggccgggcacctgcaccctcgccgtcgcc

SEQ ID NO: 145089 - DNA, 201 bp, Homo sapiens
cacccactgtccaggacgcctggctgggcacggctgctcaagtcttccctgtggtccagccgagggcggccgtgtgtctcgagctccctgatcagcatctrtggtgacagtggtttccctgcagctgctctcacatgggggcatggggctcacaggcggcaggctggcacgtttcttcatatcttccccccaccccacccc

SEQ ID NO: 145090 - DNA, 201 bp, Homo sapiens
cagccgagggcggccgtgtgtctcgagctccctgatcagcatctgtggtgacagtggtttccctgcagctgctctcacatgggggcatggggctcacaggyggcaggctggcacgtttcttcatatcttccccccaccccaccccaggctgggcatcagcagcccctgcaggcatctctgtgcgaagccccacttgaggat

SEQ ID NO: 145091 - DNA, 201 bp, Homo sapiens
gggagtgagggcgagccccttgcgtgaaccctggagggccggaccctaaccctggggctgtgggctctgcccctccctccattcattcatttgtcccgtgrgtatcaattggatgtctgcaaagtgccagaggcagtttgcttccgaatcagcactttcttcaagactggactcactcctcgtcacgtgtggggaggaaac

SEQ ID NO: 145092 - DNA, 201 bp, Homo sapiens
ggtccgggccgccgacaccaatgaagtggtgaagctcatatttcgtgagtcggacaacgaccggaaggtgagcggggcctgtgactgggcaggtgacgcayggggcctgcgcaggactctgcagcttccttcagagccgccctgcctgcccggttcggtgggggctaggggacacgcacaaggctgggggagctcaggtgc

SEQ ID NO: 145093 - DNA, 201 bp, Homo sapiens
cggacaacgaccggaaggtgagcggggcctgtgactgggcaggtgacgcacggggcctgcgcaggactctgcagcttccttcagagccgccctgcctgccyggttcggtgggggctaggggacacgcacaaggctgggggagctcaggtgctcatgggccactctgacttcacaggttatgctccagttagaaaagaaact

SEQ ID NO: 145094 - DNA, 201 bp, Homo sapiens
tgtgcacacttgcaggggtgtgggggttgcattgtgtgtgcacacgtggacacatgtgagtgcacttgtgtggctgcatgtgagtgcgggtgtatgtgtgygcgggtgtgtgggtgcatgtgtgtgtgggtatatgcatgtgtgggtgcatgtgagtgggtatatgcatgtgtgggtgcatgtgagtgggtatatgcatgt

SEQ ID NO: 145095 - DNA, 201 bp, Homo sapiens
cagtgccagacagaggggcacgcccagcccagcggacgctgccagccccgagtcccaggcccagaacctccactccaggatggcattcgctgcctccccarcggcccccagaccccacgctcctgtcttcttgggaagtcacttctgcctcctgcccctcatcaacccagagcccgaggctcccgtgacgcccacacctcc

SEQ ID NO: 145096 - DNA, 201 bp, Homo sapiens
ctcgtggggtttgggggcttatgggtgagtgcatgcaaagtgcttaggaagagctggggtctctcagtgccagacagaggggcacgcccagcccagcggaygctgccagccccgagtcccaggcccagaacctccactccaggatggcattcgctgcctccccaacggcccccagaccccacgctcctgtcttcttgggaa

SEQ ID NO: 145097 - DNA, 201 bp, Homo sapiens
gtggacatgggagacgtgcggtcgcgggagacgtgtggtcgcgggagacgtgcggtcgcgggagacgtgtggtcgcgggagacgtgtggtcgcgggagacrtgcggtcgcgggagacgtgtggtcgcggggtgtgcggtcgcgggaggcgtgcggtcctggcaggcgtgcggtcccgggaggcatgcggatgctgacgata

SEQ ID NO: 145098 - DNA, 201 bp, Homo sapiens
gggagtggccgggggagaggtgagggagcacaggcgggtagacccaggacactgcagccgcgttcacatcctagcatcctgggccagccaggtgtctgtgygtcagtttcccctcgtggggtttgggggcttatgggtgagtgcatgcaaagtgcttaggaagagctggggtctctcagtgccagacagaggggcacgccc

SEQ ID NO: 145099 - DNA, 201 bp, Homo sapiens
gcctacacactctctttacaatttttattttttattgtggtctacttttgtcccatttttaatgtatttacaaatgtttatcagcgcaaagaaccaggaaycacgcagcagctggctgggccccatatgcggcctcggccgatttctgtaaacacgcccactgtggcgattccaagccacacgtgatgccgtgtgcaacga

SEQ ID NO: 145100 - DNA, 201 bp, Homo sapiens
ttgttcggtgaggttctaggcattcttgttttcatgacttctgccaagctcggagagctcagtgcccacaaggcccctgtgtcggggccaggggctccccrtggccagtccacccaggtaggggtctccagctctcttacctttagggactgaccctcagtgaccattccctgcattgtactgaggttaagacgagaagaa

SEQ ID NO: 145101 - DNA, 201 bp, Homo sapiens
ggggtccatcagatgtttgtcctttgggagcctgcctgaagtgctgagataaagcagtttttaaacagtttcccgcagatgccttttgggagacagagccrtgaatttcctgagccgcgtcctgggatggctacaatggccgtctgcctgccaagccttctcccattcagggaaagcagcttaagccacttaagcccatta

SEQ ID NO: 145102 - DNA, 201 bp, Homo sapiens
gggtgatgggacagattcagctcccaacgtgagaccaactgcacaggtgcacattggggcgactctgcctgccatgcagctccgtgcacatccgaatgacygcgttatttccttgcacagaaaacagcctttctcctgggctgacacctgtgccctgggcctgtggacgccctgtccaggcagcatgcctccttggttatc

SEQ ID NO: 145103 - DNA, 201 bp, Homo sapiens
aggtgaataggacactgaagagtcagtgggagcgtgggggccacctccacctgcgcctgggcccctgccccccagtgctccgggctgctccaccggtgatrctgtggagatgacgggctgtcactgggaagcaggggacccccattggtgggatgtgtctgatcttggggcccgtgtccctccccatctacagctgggcct

SEQ ID NO: 145104 - DNA, 201 bp, Homo sapiens
gagggggtgatgggacagattcagctcccaacgtgagaccaactgcacaggtgcacattggggcgactctgcctgccatgcagctccgtgcacatccgaawgactgcgttatttccttgcacagaaaacagcctttctcctgggctgacacctgtgccctgggcctgtggacgccctgtccaggcagcatgcctccttggt

SEQ ID NO: 145105 - DNA, 201 bp, Homo sapiens
gtttagaactttccaaacttgtaactgacaccaaaccacagatccagaaagctcaacgaatgccaacaccaagcaggataaatgccagaaagtcaaccccmggccaccttgtattcaaactgcagaaaatcaaagaaaaaagagaagatcttgaaagaatccaggagattccttataggcgaggtgattccttatctgtaa

SEQ ID NO: 145106 - DNA, 201 bp, Homo sapiens
aagaaaagtaaattaaaccaaaagctggttgtttgaaaaaaacaataaaatggataaacctctagccagactaagaaaaaaaatgacacaaattattcatrtcagaaattatcagaataggcagagcagacttcagagctaggaaagttttcagcagtaaagagggacattacatcatgatgaaaagatcagatctccaag

SEQ ID NO: 145107 - DNA, 201 bp, Homo sapiens
tggccgcccgtgaaggatggggtgctcctgtcaccctgtggctcggcctcctcatccgtcttcccaaggccaaggacgccgtgtcagtgggccagcctccygtcctcggtcctgcttccggcaccgcccgtttgcctccctccgctccggatgtccagcagttggaaaggacatgcaagaaagctccatggtcttctccac

SEQ ID NO: 145108 - DNA, 201 bp, Homo sapiens
tcgctttctgaggcagaatatatctgtgttcactgccaggccatgaagaccttcttcctttttgccttctttagaagctatatgcttttactgtctacatytgggtttttgacttatcacaagttaatttttgtgtatgatgtgagatagtggttgaagtttattattattttttccatatggaattcagctgttccacca

SEQ ID NO: 145109 - DNA, 201 bp, Homo sapiens
cgcctgtgcctcagctgatccatggctgcgatcttcattttgttgaacatggagtcaagagccaagaaaggtggtgccgctatgcagatgcaggggcagcrcctgcacccgccacgcaccctgcacgttctccgcatgtttcctttccttaagaaacaaaccatgtgggcccgcaggtgccccgtcctccatcctgaaccc

SEQ ID NO: 145110 - DNA, 201 bp, Homo sapiens
acttcacaggttatgctccagttagaaaagaaactcttcgactacttcaaccaggaggttttccgagacaacaacggcaccgcggtgagtttgtggtccartgtggcagctcccccgtcctgggacatccacgcccccaggccttcccattacctctgcttacctgggaccaccctgccttgtccctgccacctccaggac

SEQ ID NO: 145111 - DNA, 201 bp, Homo sapiens
cacagcggtcacaccctagctaagcttgctgacgggcagcctcactggagcgcagacgttaccctcccaggaaacctgtgatgaggactggggtgcacacrtgtgctgaggacaccctccaaggccggccccggggctcagacaggcaggctggggccacatctgagcctcctggttttagtgcattcactctggcgcaga

SEQ ID NO: 145112 - DNA, 201 bp, Homo sapiens
ctgtcacacgtaagggcagtgagaatctaaggcattagcaccaagtaatcagtaagttcctgaatcctcatatccaggagaaagaaccttcgccaaaagaygtaggaaaatcattcagctcccttggcgtgcacctggggtctcccgcacgcccagctgggagagggtcaggctgactggtggtaaccaagacagtggctg

SEQ ID NO: 145113 - DNA, 201 bp, Homo sapiens
ggttctctcccacccacacctgtcttagcctggacttgtgcagagcagaataactgagtcattcccaggccaccactgtccctggggcagtcacaactgcytggggctgcacaggcagaggcagggattggcaggcactgaggtctggacccagagagggaggaggctgggcagggcctggtaccctctgagcctctggga

SEQ ID NO: 145114 - DNA, 201 bp, Homo sapiens; identical to SEQ ID NO: 26790

SEQ ID NO: 145115 - DNA, 201 bp, Homo sapiens
ggtggccttgggtatggtgggcccgggcatggtgggcttctggcgtggtggcctcgggtgtggtggccctgggtatggtgggcctgggcatggtgggcccrgccatggtggcctcgggtgtggtgggcccgggtgtggtggcccccgaggaggagtgtgtcctggagaacaggcgggtgcgtgagagctcccagctcagcc

SEQ ID NO: 145116 - DNA, 201 bp, Homo sapiens
tttggttctctttgccgagatttatcattgacaggcatcctgcgtcctttggccctttatttaaccgctgaaggcattgtttttaagaccatttcttttasaagagtttcttttcagatgttcctacgaacatctgtttgtggctgaaattcgacccagccggcctgcgcctgccccgcgccccctttgtccccggccatt

SEQ ID NO: 145117 - DNA, 201 bp, Homo sapiens
tgtcctcacgagtctcctggagaggagcctgctcccagaggccaatcagcaccgggtcctacagccctgaggggcggttgctctgtgaacttactaccagwtagagctcatgcgccatgagccacgctgcatcagatagggccgaggagagatggcgaagtgctcctcataggagcctgttctgttcctgatggatgaatc

SEQ ID NO: 145118 - DNA, 201 bp, Homo sapiens
tgatcttggggcaggtggttctgcctgcctgccacagaggacggggtcctccatcccctcgcgagctcctggaggccacgatgctcctggggacacctccyctttgggaaggtgagggctggggctgtccctgttgccaggctctggccctaggaaggaggtttgtggccccagtgactaacggattcccttgtctgcctg

SEQ ID NO: 145119 - DNA, 201 bp, Homo sapiens
gagaaggcgctcactcctgagggagagcaaaggccaggtcagagctgtgtgggacaggaggtgtcctcacgagtctcctggagaggagcctgctcccagakgccaatcagcaccgggtcctacagccctgaggggcggttgctctgtgaacttactaccagttagagctcatgcgccatgagccacgctgcatcagatagg

SEQ ID NO: 145120 - DNA, 201 bp, Homo sapiens
tagaaagtttaggcagaccctagcggcagccgctgaggcctgagggaggtcctggccacccaggagcaggtgctgaccccagaggaggctccaggggcctracacggctctgcaggtctctcttggagactgaggaagactggggagtgttcagtggtgacagtgaagccatcccctgcagtccagccatacacgtatcca

SEQ ID NO: 145121 - DNA, 201 bp, Homo sapiens
tctctacagaaaataagaaagtaaaattagccaggcattgtggggcacgcctgtagtcccagatactcaggaggttgaggcgggaggattgcttgagcccrgaggtcgaggctgcagtgagccagccatgatcacatcactgcactccatcctggccaacagaggaggaccctgtctcaaaaacctaaaaatagagataaa

SEQ ID NO: 145122 - DNA, 201 bp, Homo sapiens
agcctgggcaacatagggagtccccgtctctacagaaaataagaaagtaaaattagccaggcattgtggggcacgcctgtagtcccagatactcaggaggytgaggcgggaggattgcttgagcccggaggtcgaggctgcagtgagccagccatgatcacatcactgcactccatcctggccaacagaggaggaccctgt

SEQ ID NO: 145123 - DNA, 201 bp, Homo sapiens
tgacgtcacagtgatttcctggaggaggaggagagaaaccctaagagttcacctacaaagaaaggggaaggccagggacagtgcctcacacctgccttccmagcactgtgggaggctgaggcaggaggatcattgagcccaggaattcaagaccagcctgggcaacatagggagtccccgtctctacagaaaataagaaag

SEQ ID NO: 145124 - DNA, 201 bp, Homo sapiens
gaccctgcccctaactctggttcctagatcccatccttggccccttcctccaacaagctcctgcccctgaatcctgaatcctgaatcctggtcttaaagcmtgggccttgagcctgcagaattcccaaaccctaacccttgactcccacccctggcccctgtcctctgagcctaggccctccactctggctgtcagcccca

SEQ ID NO: 145125 - DNA, 201 bp, Homo sapiens
cctccagggagcgtagttggtggttagagaaggggaaggctgcagtggcctcttggagtggtggagtgcacatgcgcagagccaggaggcctagtgctcarcgtgggtgtgcctgagacctgggagatgccaggggcatggaaataaggtgttgtctagtttttcccccaatttagttttctctaatttgggcgcaggttc

SEQ ID NO: 145126 - DNA, 201 bp, Homo sapiens
gcttggcctgtgggctgaaatttgagcatttctttaagacctagtttgtttattttttactctcacttcagtggttttaaaaataactacattaaccaaaygtggctgtacctccgaggacttcttgccagagctgctcctgggaaagggttcagtctctctagtttgtgcccatcacccagtgggacagctacatggacg

SEQ ID NO: 145127 - DNA, 201 bp, Homo sapiens
gccgacaccaatgaagtggtgaagctcatatttcgtgagtcggacaacgaccggaaggtgagcggggcctgtgactgggcaggtgacgcacggggcctgcrcaggactctgcagcttccttcagagccgccctgcctgcccggttcggtgggggctaggggacacgcacaaggctgggggagctcaggtgctcatgggcca

SEQ ID NO: 145128 - DNA, 201 bp, Homo sapiens
acccctcatcagggcctcctctcggggggcctctctggctcccatcgggctgaagtcgggtggaaacaggttgtgctccaggctggttggatggggcacartgatgggatagtcacctcgtccttctggtctcttccagctaagaagtatagaaaggtcgctggcaaagagatctactcggataccttagagagcacgccc

SEQ ID NO: 145129 - DNA, 201 bp, Homo sapiens
ctttaatgcacttttctatattttttatgagctcatactttatttaaaaattcctctgactgcccttggtttaaaagaaacccatgggaaaggtagggcayagagcaggtctctcgtgccaaggcagggggttgctggagaccccggacactgtgtagcctcattcgtcctcctccttcacacatcgcacccggctccctt

SEQ ID NO: 145130 - DNA, 201 bp, Homo sapiens
tagattacaatggaattaaaccagaaatcagcaccagaaaagtagctggaaaatccccaaatacttgaacattaaacaacacatatctaaataacatatgmgtcaaagaagtctcaagagaaatttaaaaatattttgaaccaaatgaaaacgtaaatacagcttaacattcatgggatattagcaaaagtaatgtttaga

SEQ ID NO: 145131 - DNA, 201 bp, Homo sapiens
cagctggagagttccgctggccagagcccgctgcacagagaagtcagcagggaggccccctagtactggggccctgtggctgcccagtgagacggcgtaarcgctgcctggcagcctggtccatcagcagactgagcacagacgtagcggagcctgcgtctcatccacatatcctctggcctggcctttctgcagtgaaca

SEQ ID NO: 145132 - DNA, 201 bp, Homo sapiens
tttaaaacaaatgaagttctctattttgttgcagacttgaagattagttaccaacaatatcttatgaagtttttctttctgctcctagatttattttattwaaaaaaaaaactggaggtgaaaacgctttatctgtagaaataacaaaatgtcatgctgtctcagagtgagatgggagtcaccaaatgctgccactctttt

SEQ ID NO: 145133 - DNA, 201 bp, Homo sapiens
gcacgtgtctgccgtgacccagcaaggccatgtgttgtattatatacatatgtatgcacgtttaatccacgtgtacacgtattatcctatgtggagggcaygtgtctgccgtgacccagcaaggccatgtgttgtattatatacatatgcacacacgtttaatccacgtgcacacgtgtgtgttatcctatgtggagggca

SEQ ID NO: 145134 - DNA, 201 bp, Homo sapiens
gaaggggtgcagtgtggaggggcgtggcgtggaggaggtgtggcgtggaggggcgtggcgaggaggtgtggcgtggaggggagtggtgaggaggtgtggcrtggaggggtgtggcatggagtggggtgtggcatggagtggggtgtggcatggagggacacggggcgtggaggggcacggggcgtggagggggtgcggcat

SEQ ID NO: 145135 - DNA, 201 bp, Homo sapiens
ggcttgggtgtagtgcttgtgaggccctcgccatgccccctgccaggacccaggggcctcagcagaggcgtcttctagggtctgaggaccttgtctccacmctgtgtgtccgttggcccgtgtatgtttgatgagcactgacgttcgggggtgccgcctgtgtccaccccaacgggatgccagaggactccagaggtgagg

SEQ ID NO: 145136 - DNA, 201 bp, Homo sapiens
gagtgtgtgctgccccagccctgggcacagagggatgtggagcgctgggtctggtctggcccagccctggtgacagggccccaggggtgggggcacccagyctggggaatgctgccaggttgggccctgacctcgtgctgccatgagctgcaccccagcattgggtcacctctgagccagcacctgggctggggcagcagc

SEQ ID NO: 145137 - DNA, 201 bp, Homo sapiens
gaagctgtaattacaacccaccacatgaaacacgccagtcgtgtgccatctgagagggccgtgcgtcctcacacgagtcagtgatgcagcctgcggctccrgctgctgctgggatgttcagagggtgtgtttcctgcctcgcgcggtggcaactggcagctggggcgctcagctggccgtggtgacaaagagtgacagcag

SEQ ID NO: 145138 - DNA, 201 bp, Homo sapiens
gccgcagtggaaaaacctttaggaaactgattgtgattgattgaaaatatgaggaagaatttttcttgagtacagctgtacctggctaaaaacatacacamacgtatgcagccactgttaccctctcactttgaaacgtccgagtggagatcatatgtaaaccttcaaaacaggtctgaggggacatccctgtctgggagg

SEQ ID NO: 145139 - DNA, 201 bp, Homo sapiens
ttatatgccaatgttatgtttgtctcataataggaacttagaactttccttcttgtgctgtgatctagagctgtgctgtgtagtaatgtagcctctaaccrcgtgtgattattaaaatttaagtgaactaaaattacatgcaataaaaaaactgttcagtcaccagtagcctcatttaaaggacagacgtggctagtgcag

SEQ ID NO: 145140 - DNA, 201 bp, Homo sapiens
aagaccccgtctctacaaaaaataaagacttagcaggagtggtggcacacgcctgtaattccatctgctcgggaggctgaggcaggagaatcacttgagcscaggaggcagaggttgcagtgagccgagatcacatcactgcactccagcctgggtgacagagggagactctgtttcaataaataaataaataacttaaaa

SEQ ID NO: 145141 - DNA, 201 bp, Homo sapiens
tggtcactccatgtgtctctcacagttggtgctgtcctttgcctttcggctccctgacaccgctaagtgcctcgtagcaatatacagttgtgggagctggygtgttcaagatcgcagactgtgcaattctttctctctgttctgaagtgagattttgtgggtgtgcacaagagccctctgtcagtatccacaaggtggatt

SEQ ID NO: 145142 - DNA, 201 bp, Homo sapiens
gcagcccacccaccagcgctgcactcagccccagcagggaccgggcccgggagtgagggcagcccacccaccagcgctgcactcagccccagcagggaccrggcccgggagtgagggcgagcccacccaccagcgctgcactcagccccagcagggaccaggcctgggagtgagggcgagccccttgcgtgaaccctggag

SEQ ID NO: 145143 - DNA, 201 bp, Homo sapiens
tgccccttcccgtagctggtcaggccagtgagcatccacaggcaccagaggccgcaaccctgaccctgcagcactgctgccccagcccctctccttggtcytcctggtcggtgtgatcgctgggaccctggcgggagcctgagttgttcttgggtcctgtccacctgcctctgggcccctgcccaccccagcctgcgcccc

SEQ ID NO: 145144 - DNA, 201 bp, Homo sapiens
ctgtatgatttcccagcttctgagtcaatgcctgggctagggagggaggcagtcaataaatattcatgtcttggtttgaggtctcccaaaacacaccccargcaggattccagtgaaagcagttgagctgggaggtgcaggaaaaaccagctggggagtgggtagatgagactaggaggggaggctttgggagccccttga

SEQ ID NO: 145145 - DNA, 201 bp, Homo sapiens
aaataaaggcaaaaattattttcaatgttgtaaatcaagggatgcaagcctggtttaacattcaagaatcaatcaacagaatttaccatgtcaactgattraggaagaaaagccatatgatcatctcagtagatgcagaaaacgcatttgacacaattctgtaaccatttctgataaaaactcttagcaaactaggaatag

SEQ ID NO: 145146 - DNA, 201 bp, Homo sapiens
ttgcatccgcataatataaatacacacttggcaaaagcaaaacacaaagccaggctctttggattcttagactaaaaatgtgctgggaccgccaggcttcrtgccacgtctggttcgacctcgactccctggtgtgctctgcagaggtcatggcgtcttcgggtgccacatgcccgtctctgggtggcacgggcccctgag

SEQ ID NO: 145147 - DNA, 201 bp, Homo sapiens
ctgttggttttgaaatcgtgagtcttcccttcaagggatcagtgtaggcgagcgctgaggggcggcctacacactctctttacaatttttattttttattrtggtctacttttgtcccatttttaatgtatttacaaatgtttatcagcgcaaagaaccaggaaccacgcagcagctggctgggccccatatgcggcctcg

SEQ ID NO: 145148 - DNA, 201 bp, Homo sapiens
tcactatgttggccaggctgttcttgagaattcctgacctcgtgatccaccctccttggcctcccaaagtgctgggattacaggcgtgagccaccacgccyggcccatgtgtgtgtgcatgtttgtgtacgtgtgtatgcatgcatgtgtgtttgtgtgcaggctcctgtacatgtgcgcgtttgtgtgtgtccatgtgtt

SEQ ID NO: 145149 - DNA, 201 bp, Homo sapiens
tggctgaagataaaaatctcatcgtacatctttgaagggagttgtgttacatttgcatgcatagcggaagattggctgtggggcgacgggagacctgaacrgaaggttcttctgtgtcccctctttttctggaagtctccagtgtggctccagggttggtgctagtggctgtggaatgagtgttcacttgctgctgcgtgg

SEQ ID NO: 145150 - DNA, 201 bp, Homo sapiens
tctcagccactcccagagggggacgcagcgctctctggcctttgctgccctccttgccctgggagccgggtgagtcgcactctcgcttccaagaagctgcwcacgtgtgtgccataggaaaggagtctggagcctccgggagttaatttgagatgacgtgtgctgtttccatcaaagatcgtcaggcttgggtgtagtgct

SEQ ID NO: 145151 - DNA, 201 bp, Homo sapiens
cacatgcattccacacgtgagcatccatgaggggtgggtatccacaagggaatggcatccacgatggccaggtggcctccggggaagctgtcctccagggwaggcatccatgagggagggtccatgagtggagggtatccatgagggaggggtgtccacaagggcagggtgtcctccaggggaagctgccctccagggaaa

SEQ ID NO: 145152 - DNA, 201 bp, Homo sapiens
gctggagtgcagtggcacaatctcagctcactgtaacttccgcctcccgggttcaagcgattctcctgcctcagcctcccaagtaggtaggactacaagcrtgcgccaccaggcccagctaatttttgcatttttagtagagacggggtttgaccatgttggccaggatggtcttgatctcctgaccttgtggttgatccg

SEQ ID NO: 145153 - DNA, 201 bp, Homo sapiens
gctgttctctgtcatcttcattttaccattgagttcttctggtcatttattttagatgttgtataaatgtttttagtttttgaaatttccatttgtttctyctttatagtttctgttgaaattttctgtcttttcatttatttcaagagtatttactttgacctcatggagcatgttgtagttgttgcttgaaaaccttcc

SEQ ID NO: 145154 - DNA, 201 bp, Homo sapiens
gggcagagggacccccaggcagggccgctgcacctggagagaagctggaaggcaaagactgggtcgtggtgccctgagtgcaggtgggttgctcccccccsgcacgccgcccgtggtgcatcacgttctgttgcagtgtctgctcctgagcatttcaggacgggactctgatcatcctccaagccggcctgcatatcctag

SEQ ID NO: 145155 - DNA, 201 bp, Homo sapiens
agccctgctgttttttgtttggaaagcatctcctgtgtcctttaggtgtgtgggacccacgtgttgctcttgctcacttactctggctcatttgtgtgacstgtttatttttcagtgcaaatggtcaagaaaaggcttcatccggacgaggtggtgcattgcagactggtacgtggtgtctgtgctttgtcaatttccata

SEQ ID NO: 145156 - DNA, 201 bp, Homo sapiens
tggctcagaggaccacaggctgggtggcttacacagcagaagtttattctctcacagtcctggaacctggacatccaaaatcaaggtgtcctagcgccacrctgctcctggaggctccaggggggacccctccttgcctcacccagccacaggtggcccagatggccctggctcatggccgcatcacctccgtctgcgcct

SEQ ID NO: 145157 - DNA, 201 bp, Homo sapiens
cctcataggagcctgttctgttcctgatggatgaatccaggtgagtcccgtgtgaacacagagctcagagtcccaccccaagaacacactctgtgttcccyttgatgcagccccgacctgggccagcacgcgcagccccgccctgcaggaggaagccttcgcacagtggcaccagctctcagaggcgacaccacgccttgt

SEQ ID NO: 145158 - DNA, 201 bp, Homo sapiens
tgtgcagccgccatgttagacatgccgccacagaccacggcaccgttgtccctcccgaaagtgctgtcctgggcccggcggtgcagcccctggcagcttgygaggcccgggctgcccgcctctcccgtggcacaggcttggggacagggtgtgcccgagccagtggctggctcaggaggccacagaggtgcatttgcctct

SEQ ID NO: 145159 - DNA, 201 bp, Homo sapiens
agacatatgtccaggcacacctgtgcacacaccaaacagtgtggagtcgcctctgcctgggccccagggaggcatccccagagctgctcatagggaccccrtcattgggtggtcagatttgcagctcagaagtaaagatggcaacacactcagaatccgcctggcctggaattcctcggcccggtcaggaattgaagagaa

SEQ ID NO: 145160 - DNA, 201 bp, Homo sapiens
ttaaagggtgtcgtggtaggcagggtctaattttataaaagcttctggcacatgtacattcaaaatttcttttttgtctttgatcttggcagaagaggacrcccaagtgtgtgtgcgtgtgtgtgcatgttttgttttgttttttttttttgagatggagtctcgcactgtcacccagctggagtgcagtggcaccatctc

SEQ ID NO: 145161 - DNA, 201 bp, Homo sapiens
ccttagacggctgtcttgcgggttctgtggtacctgggttctgtctgggcgccttagacggctgtcttcagggttctgtggtacctgggttctgtctgggygccttagacagctgtcttgcgggttctttggtgcctgggttctgtctgggcaccttagacgactgtcttcagggttctgtggtacctcggttctgtctgg

SEQ ID NO: 145162 - DNA, 201 bp, Homo sapiens
gactgcgccacgacactccagcctgggctatagagcaagactgcgtctccagaacaaacaaacaaacaaacaaacatttctgcccttgctttgtgtacacrtcagtgagagctgttgacctgtaatgttgtttctttgccttgcctctgtgatgcctttgccggttttggtgttggggttatgctggcttcagagattaac

SEQ ID NO: 145163 - DNA, 201 bp, Homo sapiens
cttagacggctatcttgcggtttctgtggtgcctgggttctgtctgggcaccttagacggctgtcttcagggttctgtggtacctgggttctgtctgggcrccttagacagctgtcttcagggttctgtggtgcctgggttctgtctgggcaccttagacagctgtcttgcgggttctgtggtgcctgggttctgtctggg

SEQ ID NO: 145164 - DNA, 201 bp, Homo sapiens
ctatcttgcggtttctgtggtgcctgggttctgtctgggcaccttagacggctgtcttcagggttctgtggtacctgggttctgtctgggcaccttagacwgctgtcttcagggttctgtggtgcctgggttctgtctgggcaccttagacagctgtcttgcgggttctgtggtgcctgggttctgtctgggcgccttaga

SEQ ID NO: 145165 - DNA, 201 bp, Homo sapiens
ctgaagtggctcttcgataagatgagacccacccaggattatctcccttttgattaacctaagatcagctggagatggagcttcattatgtctgcctgacmctttcacctttgcctcagcctatgcatgggcgcgccgtcttccccggttcataggtcccacctgcactgaggacggggattacactggatgtgaatgccg

SEQ ID NO: 145166 - DNA, 201 bp, Homo sapiens
gacggctgtcttcagggttctgtggtacctgggttctgtctgggcaccttagacagctgtcttcagggttctgtggtgcctgggttctgtctgggcacctkagacagctgtcttgcgggttctgtggtgcctgggttctgtctgggcgccttagactgctgtcttcagggttctgtggtgcctgggttctgtctgggcacc

SEQ ID NO: 145167 - DNA, 201 bp, Homo sapiens
gtccccctgccagccctgcaggctgtatgaggttctccatggttctccccgtctgccatttgccctttgttattgctcttagtgacaggcagttatttaasattctggccaaagtggctttcgttgttttcttcttcctaaagcctttaaaattaagagttaaaaaataggaaagtaatgcgtgatgattataggcatgtt

SEQ ID NO: 145168 - DNA, 201 bp, Homo sapiens
actctccagaactcacggggagaccccaggacgacaggagcacacgccatattcaccacagacgggggtcactctccagaactcacggggggccccaggcyagcaggagcacacgccatattcaccgcagatgggggttactctccagaactcacagggaggcccctggaatcaaagagaaaaggccaggaaccaaagaga

SEQ ID NO: 145169 - DNA, 201 bp, Homo sapiens
gttacttgaaatgctgtttttcctctcagttcccccacagtagctggttttaaatggagtccagcagcctgggtccacctgccctgtcctcagcccctgcrgggccctccccaccacctcctggtcttccctcagcccctctgccctggaccggccaggcccctttctgggctccacggggtgcatcattgccacccatct

SEQ ID NO: 145170 - DNA, 201 bp, Homo sapiens
gaaccaaagagaacagcaggctgtgaacaggtgaaatcgggagaaaatgcaaattttgatatgtagatttaaaaatattgagggtgtgcaagttaagatgraaatgaactcctacgctccatagccaaagtgaaatacagtggtgatggttccacccgcactcagtcatgaaagtgtgacctgcacggatgctccgtcctc

SEQ ID NO: 145171 - DNA, 201 bp, Homo sapiens
ccccctcccacttaccaggcatccctgggagtgactgcgtgcctcctgcatatcagatgcccctgggagtcactgcgtccctgccctgtatcagacgcccytggaagtgactgcgtccctcctgcgtatcagacgcccctgggagtgaccgcgtccctgccccatatcaggcggccctgggagtgaccgcatccctcctgc

SEQ ID NO: 145172 - DNA, 201 bp, Homo sapiens
cccagtgggacagctacatggacgtggcatggcggcgtggcggcatggcccagtaaagaccagtttgggcaggatgaatggccctcaattaaagggtgtcrtggtaggcagggtctaattttataaaagcttctggcacatgtacattcaaaatttcttttttgtctttgatcttggcagaagaggacacccaagtgtgtg

SEQ ID NO: 145173 - DNA, 201 bp, Homo sapiens
tttaaaataccatccaagcccctcttatggaaaatcaaaatctgctagttggcatggcatggtttttaaaaaaggtttctgactgtaaaacatttcgtagaaattttgtggaaaccaaagaaaattctgcacgattttcttttgaggctgacttggaccaaggaattgagggcaggtgtttggggacccctcataccggca

SEQ ID NO: 145174 - DNA, 201 bp, Homo sapiens
tgcctgggagtgatttcccaccgaagtgtctgtgcacatctctctgccttcctagaagcatctgcattttaaaggagagggagtgtcggagtcaaaggccrgcaggagtgtcttgcagggtcctcggatggagctagcttcggggctgaatggagtgggttcagtccttgagatgggctctgcccttcctcttggcagagc

SEQ ID NO: 145175 - DNA, 201 bp, Homo sapiens
catcttaaccatgtttaagggtgcaattcagtggcatgaaatgcattcataatgttgcataaccatcactgtcatccatctccagatctcttttaatcttrtaaaactgcagctctgtcctcgttaaacactgagtccctgtctgcccccagttcctttgtcaccaacattttactttctgtctccatgaatctgatgact

SEQ ID NO: 145176 - DNA, 201 bp, Homo sapiens
gtaaactgaggtggacgtcagtatctgtgtccgcttgctttactcaatagccgacgtaaactgaggtggacgtcagtgtccgcgtccgcttgctttactcmatagccgacgtaaactgaggtggacgttggcgtccgcgtctgcttgctttactccatagctgatataaactgcagctggctgcagcacccacgaatggct

SEQ ID NO: 145177 - DNA, 201 bp, Homo sapiens
cctttctgtcaaacagcagcatgggttagagtgagaccctgtgggctccatgcaggctagtcctccccaccctctgcaaccccccgtgtggagataccacrttcagaggccacgttggtacctgcagtctggctccttgggagccggaaaaggccacacccagcctccaccctgggtttgtggggagatctgtgccctcct

SEQ ID NO: 145178 - DNA, 201 bp, Homo sapiens
caggggccggttgtattcgtcgtcgtcctccgcgtccgagccgcccaccttcagcttctcggcgtccgagtcctgcttcttcttggccgacgccatctccrccgcgtgccgcttgcgccacttggtccggcggttctggaaccagacctgggagtggacggggcggtcaggcggccgcggggcccggggctggcgctgggg

SEQ ID NO: 145179 - DNA, 201 bp, Homo sapiens
agcctcaccattcgggactcacctgggggtcatcttggctgagtctcagttttccaaagagaggagtggcccagacgtgtggccacgagcctccttggggyggcgacagaaggccacggagtgacagcctgctgcctccacacggcgagggtctgtgctctcgggccaggggacgtgagccccagataccagtggagccgt

SEQ ID NO: 145180 - DNA, 201 bp, Homo sapiens
agagccatctgtgattgatgctgtttcttctttaggtgtttaatggaatttaccagtgaaaccatctgtgcctttttttgtgggaaggtttttgatatgamtcaaatttctttaatagataaaagttttctattcattatgtgccaagttttgttttttaaggaataaatatattttaaatttattttctgaggaaaacat

SEQ ID NO: 145181 - DNA, 201 bp, Homo sapiens
ctgggttcacgccattctcctgcctcagcttcccgagtagctgggactacaggtgcctgtcaccatgcccagctaatttttttgtatttttagtagagacrggggtttcaccatgttggccaggatggtttcgatctcctgacctcatgatctgcccgtctcggcctcccaaagtgatgagattacaggtatgagccactg

SEQ ID NO: 145182 - DNA, 201 bp, Homo sapiens
gccagcaccggctgcacggctcacctgggaagggtctggtccactcaatgcctggcccgtgggacttgcgtccctgctggagccagcagcggctgcacggstcaccgcatgcctggagcttggtggagtttgggtgtttgcaggttacctctgcctgacatcctgtgcctcagtaactgtgattaaattataactggtgaa

SEQ ID NO: 145183 - DNA, 201 bp, Homo sapiens
ccatagcgattgatggggtgaaggagaggagaagcccggaagattgagcaggtttttaattcacagggccctattttcgtctgacccctgcttcgtcatcyacctgcctctccgtggcgcctggttcttggtgctccccttttgcaaacctgaagctcagccaccatgccttgcctgtttaaaagttttttttttttttgt

SEQ ID NO: 145184 - DNA, 201 bp, Homo sapiens
cgctctgcacaaaagccaccatgcagacggtccgggccgccgacaccaatgaagtggtgaagctcatatttcgtgagtcggacaacgaccggaaggtgagyggggcctgtgactgggcaggtgacgcacggggcctgcgcaggactctgcagcttccttcagagccgccctgcctgcccggttcggtgggggctaggggac

SEQ ID NO: 145185 - DNA, 201 bp, Homo sapiens
tgtgcggatggggagcgtggaggagcaccggggccgggcatgagggctggccggcttcagcgccctcggtaacaagtcctctttttctttccagaatcatygatcagcgattcgagaaggtttcctactttgtatttggtgatttcaacttccggctggattccaagtccgtcgtggaggtaggcgctggcttccctcccg

SEQ ID NO: 145186 - DNA, 201 bp, Homo sapiens
aggccaggctgcccagcagcataagcccaggcccagacctcagacattcctggcgcccaggcgtccttccttctagtgtgcactgcgtcctgggaggaggrgcagctgtcagccagtaggtaacatcgcacctggtcatggccccccacagccccacagactcctgagacccgctggctgctccggccccagccaggctcc

SEQ ID NO: 145187 - DNA, 201 bp, Homo sapiens
tgcctgagctgcacccctgggatcccagctttcccttcccgagtccgggcagcatctgtgctgggccctgctgggaccttcctcctcatgtgaggcatgtsacggctggcactggccccagcccgggcctcgggtgtggtgggcccacagtgtgtcagaccctgggtgtggtgggcctcgggcgtggtggcctcgggtgtg

SEQ ID NO: 145188 - DNA, 201 bp, Homo sapiens
cctgagctgcacccctgggatcccagctttcccttcccgagtccgggcagcatctgtgctgggccctgctgggaccttcctcctcatgtgaggcatgtcasggctggcactggccccagcccgggcctcgggtgtggtgggcccacagtgtgtcagaccctgggtgtggtgggcctcgggcgtggtggcctcgggtgtggt

SEQ ID NO: 145189 - DNA, 201 bp, Homo sapiens
gagctgcacccctgggatcccagctttcccttcccgagtccgggcagcatctgtgctgggccctgctgggaccttcctcctcatgtgaggcatgtcacggbtggcactggccccagcccgggcctcgggtgtggtgggcccacagtgtgtcagaccctgggtgtggtgggcctcgggcgtggtggcctcgggtgtggtggc

SEQ ID NO: 145190 - DNA, 201 bp, Homo sapiens
ttcacacacagccctcaaccctcatgggtcactgtcagcagtgttttttgatcaccaagatcagtcctatttcttaaagagttcctctcacacaggcagtygcagcacggcagctcctgcccaggtctagatggccctggtgccctggaccccgccagggagggtgggtgcagagcaggaactgcctcccgggcctcagtg

SEQ ID NO: 145191 - DNA, 201 bp, Homo sapiens
ttccaagtccgtcgtggaggtaggcgctggcttccctcccgccctggtctcatgccttgctctgtgttgaggaaaacagtggaaggagcgtggccccttaytggcactttcaatgccatccgcctcccgggatgcactttttaaggcaaaacctttcaatgaagaagcatgttttgctgtcggcagagggatccgtgttgg

SEQ ID NO: 145192 - DNA, 201 bp, Homo sapiens
ccgggtgtggtggcccccgaggaggagtgtgtcctggagaacaggcgggtgcgtgagagctcccagctcagccacaagagcaacacatgctgcccacccagcctcgcctaccctgcctaccctgagacgccttggcaggacctagaagccaagcctggggtagggcctcggcgttgcctgcacgtgtgcccagatggcttc

SEQ ID NO: 145193 - DNA, 201 bp, Homo sapiens
taacaagtcctctttttctttccagaatcattgatcagcgattcgagaaggtttcctactttgtatttggtgatttcaacttccggctggattccaagtcygtcgtggaggtaggcgctggcttccctcccgccctggtctcatgccttgctctgtgttgaggaaaacagtggaaggagcgtggccccttactggcacttt

SEQ ID NO: 145194 - DNA, 201 bp, Homo sapiens
cgggtgtggtggcccccgaggaggagtgtgtcctggagaacaggcgggtgcgtgagagctcccagctcagccacaagagcaacacatgctgcccacccagcctcgcctaccctgcctaccctgagacgccttggcaggacctagaagccaagcctggggtagggcctcggcgttgcctgcacgtgtgcccagatggcttct

SEQ ID NO: 145195 - DNA, 201 bp, Homo sapiens
ccacagacgggggtcactctccagaactcacggggggccccaggccagcaggagcacacgccatattcaccgcagatgggggttactctccagaactcacrgggaggcccctggaatcaaagagaaaaggccaggaaccaaagagaacagcaggctgtgaacaggtgaaatcgggagaaaatgcaaattttgatatgtaga

SEQ ID NO: 145196 - DNA, 201 bp, Homo sapiens
gggtgtggtggcccccgaggaggagtgtgtcctggagaacaggcgggtgcgtgagagctcccagctcagccacaagagcaacacatgctgcccacccagcctcgcctaccctgcctaccctgagacgccttggcaggacctagaagccaagcctggggtagggcctcggcgttgcctgcacgtgtgcccagatggcttctt

SEQ ID NO: 145197 - DNA, 201 bp, Homo sapiens
ggtgtggtggcccccgaggaggagtgtgtcctggagaacaggcgggtgcgtgagagctcccagctcagccacaagagcaacacatgctgcccacccagcctcgcctaccctgcctaccctgagacgccttggcaggacctagaagccaagcctggggtagggcctcggcgttgcctgcacgtgtgcccagatggcttcttc

SEQ ID NO: 145198 - DNA, 201 bp, Homo sapiens
agagcagagtcagagcctgcacttcctgacttcaagacttgctgttctgccttgtgggtgaatgggccaagcagactgtggcatgtcagctccacggggtrttatttggtgataaaaagaaatgagctttgaagctgcgagaagacacagaggaggctgacacacctgctaccaatgaaagaagccaacctgaaaaggcta

SEQ ID NO: 145199 - DNA, 201 bp, Homo sapiens
gtgtggtggcccccgaggaggagtgtgtcctggagaacaggcgggtgcgtgagagctcccagctcagccacaagagcaacacatgctgcccacccagcctcgcctaccctgcctaccctgagacgccttggcaggacctagaagccaagcctggggtagggcctcggcgttgcctgcacgtgtgcccagatggcttcttcg

SEQ ID NO: 145200 - DNA, 201 bp, Homo sapiens
gtggcccccgaggaggagtgtgtcctggagaacaggcgggtgcgtgagagctcccagctcagccacaagagcaacacatgctgcccacccagcctcgcctaccctgcctaccctgagacgccttggcaggacctagaagccaagcctggggtagggcctcggcgttgcctgcacgtgtgcccagatggcttcttcggagcc

SEQ ID NO: 145201 - DNA, 201 bp, Homo sapiens
agagactcaggcctgctgagtagcatgcagcacaggacgagcctgcagagccctcttgggacttacacactggggatttgacagctcatgtctggcaccgmagatagtctaggaaaaggtgactcatccaagagcctggccggaaacccacagggtattggcccaggtgtgccgagaggctggccggagggaccattgtga

SEQ ID NO: 145202 - DNA, 201 bp, Homo sapiens
gccctggcatttgggacgcagcaggctgtgctctttggattgttactgattcagcctttgagaacggccggcggtgttctctctgctcacaaactttcatyccccgtttacttcctgtttttttatcagtctctagagttgctgaggagagagtttagatcacccgggttaggggtgggggtggtgggacttctttggttt

SEQ ID NO: 145203 - DNA, 201 bp, Homo sapiens
ctgcagcctccacctccctcccaggctcaagggatcctcccaactcagccccctgagtagctgggtttacaggaatgtgccaccatgaccgcctaattttrtttattttttgtagagacggggtctcagtatgttgcccaggctggtctcgaactcctgagtgcaagcgattctctgcctcagcctcccaaagtgctggga

SEQ ID NO: 145204 - DNA, 201 bp, Homo sapiens
ggctagagtgctgtagtggtgcggtcacaactcactgcagcctcgaccgccctgactcaggtgaacctcagcatcctaagtagctgggaccacaggcacaygccaccatgcctagctaatttttgtagagaccaggtttcgccgtgttgtccgggctggtctggaactcctgggcccaagcaatccacctgcctcggcttc

SEQ ID NO: 145205 - DNA, 201 bp, Homo sapiens
atgtggtaaaaccccatctctactaaaaatacaaaaaaaaaaaaattagccatccgtggtgttgggcacccgtaatatcagccactcaggagactgagggwggagaatggcttgaacccaggaggtggaggttccagtgagccgagattgcactattgcattccagcctgggcgacaagagtgaaactctgtctcaaacaa

SEQ ID NO: 145206 - DNA, 201 bp, Homo sapiens
agcccctgcaggcatctctgtgcgaagccccacttgaggataggtgcacagctcggttctctttagtggggcggcatcagtgccggaagagccctgctgtyttttgtttggaaagcatctcctgtgtcctttaggtgtgtgggacccacgtgttgctcttgctcacttactctggctcatttgtgtgacgtgtttattttt

SEQ ID NO: 145207 - DNA, 201 bp, Homo sapiens
agcggcatgttccacacacctcattggaggctctactgattttgcatgaggacccccagctgcctgacccccacctgccactctgacccttttggttcacrgcgatgcattcggagcattgtcactgttccctgtaagtcagacatctgggtgcccagtgccaatggagacacagtgacggccccagtccctccccgcagc

SEQ ID NO: 145208 - DNA, 201 bp, Homo sapiens
tggcccccgaggaggagtgtgtcctggagaacaggcgggtgcgtgagagctcccagctcagccacaagagcaacacatgctgcccacccagcctcgcctaccctgcctaccctgagacgccttggcaggacctagaagccaagcctggggtagggcctcggcgttgcctgcacgtgtgcccagatggcttcttcggagccc

SEQ ID NO: 145209 - DNA, 201 bp, Homo sapiens
ggcccccgaggaggagtgtgtcctggagaacaggcgggtgcgtgagagctcccagctcagccacaagagcaacacatgctgcccacccagcctcgcctaccctgcctaccctgagacgccttggcaggacctagaagccaagcctggggtagggcctcggcgttgcctgcacgtgtgcccagatggcttcttcggagccct

SEQ ID NO: 145210 - DNA, 201 bp, Homo sapiens
cccccgaggaggagtgtgtcctggagaacaggcgggtgcgtgagagctcccagctcagccacaagagcaacacatgctgcccacccagcctcgcctaccctgcctaccctgagacgccttggcaggacctagaagccaagcctggggtagggcctcggcgttgcctgcacgtgtgcccagatggcttcttcggagccctga

SEQ ID NO: 145211 - DNA, 201 bp, Homo sapiens
cacggggagaccccaggacgacaggagcacacgccatattcaccacagacgggggtcactctccagaactcacggggggccccaggccagcaggagcacaygccatattcaccgcagatgggggttactctccagaactcacagggaggcccctggaatcaaagagaaaaggccaggaaccaaagagaacagcaggctgtg

SEQ ID NO: 145212 - DNA, 201 bp, Homo sapiens
tgtggcatggagaggggtgcagagtggaaggggtgcagtgtggaggggcgtggcgtggaggaggtgtggcgtggaggggcgtggcgaggaggtgtggcgtrgaggggagtggtgaggaggtgtggcatggaggggtgtggcatggagtggggtgtggcatggagtggggtgtggcatggagggacacggggcgtggagggg

SEQ ID NO: 145213 - DNA, 201 bp, Homo sapiens
cacttcatggccttgcactgtcaggagtttggagggaagaactacgaggcctccatgtcccacgtggacaagttcgtcaagtaagtctaggggcaggtgcyggtgcatgtccacttcccaggggtgtggggtgccggcgggggtcttttcatggtactatgatcaccagcctcaccattcgggactcacctgggggtcatc

SEQ ID NO: 145214 - DNA, 201 bp, Homo sapiens
gcaattgtctttcatgtggatccaaagtcctccttttctctcagcattttgacacagagcacgcccctgctgtcggtagccaccataccgtacagtgtttsctacctttagaggaaaattaatctgaatatttgagagaacttttggatttggttctgaatgaaaacacgctgtggggttgaagccacgtgaggcacccgg

SEQ ID NO: 145215 - DNA, 201 bp, Homo sapiens
gtatgcgtgtgtgtgatcgtatgcatgtgtgtgatcatatgcgtgtgtgtgatcatatgtgcatatgcatgtgagcaggcaagtgtgtgagctggcgtgtgagcaggtgtgtcagcatgtgtgagcaagcatatgcatatgagcgtgtgtgagcatgtgtgagagcaggcatatgcacatgagcgggtgtgtgcatgtgtg

SEQ ID NO: 145216 - DNA, 201 bp, Homo sapiens
gggtgacagttgtaaacagttggcatttgcagatagagccatgtgagcacctttttctccaggcttgaggccgttcctttcttttcctgcctcgttgggcwggtcaggacctttggcatcgggtgagtcggcgtggggagctgggcctttctgccatgctcttcctttcggggaaagtattgagtggttcaccagtaagga

SEQ ID NO: 145217 - DNA, 201 bp, Homo sapiens
tatgcgtgtgtgtgatcgtatgcatgtgtgtgatcatatgcgtgtgtgtgatcatatgtgcatatgcatgtgagcaggcaagtgtgtgagctggcgtgtgagcaggtgtgtcagcatgtgtgagcaagcatatgcatatgagcgtgtgtgagcatgtgtgagagcaggcatatgcacatgagcgggtgtgtgcatgtgtga

SEQ ID NO: 145218 - DNA, 201 bp, Homo sapiens
ctgagtccctgtctgcccccagttcctttgtcaccaacattttactttctgtctccatgaatctgatgactccagatatctcacatgagtgcgatcatacrttctttgtctttttgtgtttggcttattttccttagcataatgttctcaaggttgttgcatagtcagaatacccttcctttttaaggctgagttatgtgg

SEQ ID NO: 145219 - DNA, 201 bp, Homo sapiens
agtatctggagtgtttttgtcattgttcctttaaaaaaaaaaatgtcctttatcaaagggaggaggtttccttgtatttcatactctgctgagcgttttcrccgtcgaggaatgtcgaatgtgctcagatggtttttctgtatgtgctaacgtgaccccacactttctcctttatttggctaacttggtaaattacatcgc

SEQ ID NO: 145220 - DNA, 201 bp, Homo sapiens
tgcgtgtgtgtgatcgtatgcatgtgtgtgatcatatgcgtgtgtgtgatcatatgtgcatatgcatgtgagcaggcaagtgtgtgagctggcgtgtgagcaggtgtgtcagcatgtgtgagcaagcatatgcatatgagcgtgtgtgagcatgtgtgagagcaggcatatgcacatgagcgggtgtgtgcatgtgtgagc

SEQ ID NO: 145221 - DNA, 201 bp, Homo sapiens
gagagcaggtgtgagcgagtgtgtgagcaggcatatgcatatgagtgggtgtgtgcatgagagcaggtgtgagcgagtgtgtgtgagcaggcatatgcatatgagtgagtgggtgtgtgtgtgtgtgtgagcaggcgtgtgcatgcatgagcgtgagcaggtgtgtgcatgtgagtgggtgtgtgtggggggtggtttgct

SEQ ID NO: 145222 - DNA, 201 bp, Homo sapiens
agcctggttaagcttttaatttttttgtagagatgggggtttcactgtgttgtctagactggtctttcctggcctcaggcctcccaaagtgctgggatttytctgttttctgttttcttggtgacatggaacagttatttccaaggaacttgtttaatcagaccttcaggggcttctagaaggtcgcagttttaacaggac

SEQ ID NO: 145223 - DNA, 201 bp, Homo sapiens
gggggtttcactgtgttgtctagactggtctttcctggcctcaggcctcccaaagtgctgggatttttctgttttctgttttcttggtgacatggaacagytatttccaaggaacttgtttaatcagaccttcaggggcttctagaaggtcgcagttttaacaggactgcagttgattccaggttttgattaaaagtgtgc

SEQ ID NO: 145224 - DNA, 201 bp, Homo sapiens
gtttggtactagctgccgttacaggcgtccactgggggggtcttggaatgtgtcccctcagctacgggggatgcctgtgtgctggactggaagctccacartggtgagaagcattaccagggcaaagccaggagcaatgatgacaaccctggattcccaggtctcacggagcctcagataccaccatctctttcttcatcc

SEQ ID NO: 145225 - DNA, 201 bp, Homo sapiens
gtttttcatcatctgtcggcttctgcagaccaatgtcatcattccccgtcccctgggtggcccctcccccgccatcgttacgctgtcatcagcaagatcaytgtcactaggactgcgtgtattccagtcacagctgagccatgtagtgtgctatgacttgattttttcagttttaaaaaataatacaaacacatttaaaaa

SEQ ID NO: 145226 - DNA, 201 bp, Homo sapiens
ggcgggcagggggagttgggggcgggggctgctgtcgccctgggatcccccactctgcgcggccgggcagaccctgggcgggccgggaggggtgcgggtckcccgaactgaggcccaggaggcgcgcgcgggcggaacggcgggaggaagccgcgctcgggacaggctctggctcttctcacagcctggaggggcggggca

SEQ ID NO: 145227 - DNA, 201 bp, Homo sapiens
ggcctcccggcttttgtggattggaatccacatctgcgccacgtgcagggttcctgcccagtctctgaagcccactagtccttctgaccaggcgttcactstgcctgcctgctgagggagcgctggggtcgtttgacaggcggcacccacaccctgcagggccacgtgcgcatgcgggctcgaggaagctgtgggagtgcc

SEQ ID NO: 145228 - DNA, 201 bp, Homo sapiens
cgccacgtgcagggttcctgcccagtctctgaagcccactagtccttctgaccaggcgttcactgtgcctgcctgctgagggagcgctggggtcgtttgayaggcggcacccacaccctgcagggccacgtgcgcatgcgggctcgaggaagctgtgggagtgccttcccactaggcttgctgtgcgggttcttgaggcaa

SEQ ID NO: 145229 - DNA, 201 bp, Homo sapiens
gaggctcgaaggtggctgagagttatggcacctgggctttccagaagttggcttgaaataattggtcaaggtatgtggctggcgagggacgccagggatgsggcctcctgcagtggtcagatgccgtcctgtgggatggggcctcctgcagtggtcagatgccgtcctgtggggagggacagtgtggccttcatccgtggt

SEQ ID NO: 145230 - DNA, 201 bp, Homo sapiens
agagcaggtgtgagcgagtgtgtgagcaggcatatgcatatgagtgggtgtgtgcatgagagcaggtgtgagcgagtgtgtgtgagcaggcatatgcatatgagtgagtgggtgtgtgtgtgtgtgtgagcaggcgtgtgcatgcatgagcgtgagcaggtgtgtgcatgtgagtgggtgtgtgtggggggtggtttgctt

SEQ ID NO: 145231 - DNA, 201 bp, Homo sapiens
ggaaggagcgtggccccttactggcactttcaatgccatccgcctcccgggatgcactttttaaggcaaaacctttcaatgaagaagcatgttttgctgtyggcagagggatccgtgttggaatccggggtgcgcgggccctcaaggttgccccggatggcgggtgacagtgctgtggggctttgccctgtggcttccgcc

SEQ ID NO: 145232 - DNA, 201 bp, Homo sapiens
gagcaggtgtgagcgagtgtgtgagcaggcatatgcatatgagtgggtgtgtgcatgagagcaggtgtgagcgagtgtgtgtgagcaggcatatgcatatgagtgagtgggtgtgtgtgtgtgtgtgagcaggcgtgtgcatgcatgagcgtgagcaggtgtgtgcatgtgagtgggtgtgtgtggggggtggtttgcttt

SEQ ID NO: 145233 - DNA, 201 bp, Homo sapiens
gctgcccgcctctcccgtggcacaggcttggggacagggtgtgcccgagccagtggctggctcaggaggccacagaggtgcatttgcctctgctccaggcragcttgggcggttctgggagggcctggggacacagggtgacgtggtgggagggcgctatggcctgtcagcctttgatcttggggcaggtggttctgcctg

SEQ ID NO: 145234 - DNA, 201 bp, Homo sapiens
gcaggtgtgagcgagtgtgtgagcaggcatatgcatatgagtgggtgtgtgcatgagagcaggtgtgagcgagtgtgtgtgagcaggcatatgcatatgagtgagtgggtgtgtgtgtgtgtgtgagcaggcgtgtgcatgcatgagcgtgagcaggtgtgtgcatgtgagtgggtgtgtgtggggggtggtttgcttttt

SEQ ID NO: 145235 - DNA, 201 bp, Homo sapiens
aggagggaggaaggagggggagagaaagaggaagaagagggagggggaggacagagggagctgagaaggagccgcggtcccgtgcccaccccaggcagtgyaggctgcaggctgccctttgctgttggtcacagggaacagccttggcatggtgtgggggcacatggggcacgttcaccaggcagcgtcatcggggtcatt

SEQ ID NO: 145236 - DNA, 201 bp, Homo sapiens
tgtatgtgtgtatgcatgtgtgcactcgtgtgtggtgtatgcatgtgtgtgtacacgtgtgcactcgtgtgtgtgtatgtgtgcgtgtacttgtatgcacytgtgtgtgtgcgtgtgtgtatacagtcacgtcacataatgtcgtttcagtcaacagactacatatgtgactaaggtttgataatctgacgataggactga

SEQ ID NO: 145237 - DNA, 201 bp, Homo sapiens
gtgtatgcatgtgtgcactcgtgtgtggtgtatgcatgtgtgtgtacacgtgtgcactcgtgtgtgtgtatgtgtgcgtgtacttgtatgcacctgtgtgygtgcgtgtgtgtatacagtcacgtcacataatgtcgtttcagtcaacagactacatatgtgactaaggtttgataatctgacgataggactgaaagcttc

SEQ ID NO: 145238 - DNA, 201 bp, Homo sapiens
tacacgtgtgcactcgtgtgtgtgtatgtgtgcgtgtacttgtatgcacctgtgtgtgtgcgtgtgtgtatacagtcacgtcacataatgtcgtttcagtmaacagactacatatgtgactaaggtttgataatctgacgataggactgaaagcttcctctcgctgtgtgatgtaactgttgtgacatcacagcgtggcgg

SEQ ID NO: 145239 - DNA, 201 bp, Homo sapiens
ttatagaatatataaacaatattttatacagctatacaatgtgttttaagccaagtactatttgacaaaagagtgaaaaagttgaaaaatgttaaagtttrtaaagtaaaaaagttacaataagttaaggttaacttattacgagaaaatacatttcagtacattatgttactcttagcgtctcagcgttccgtatttata

SEQ ID NO: 145240 - DNA, 201 bp, Homo sapiens
ctgctttgaagcaacgcttattcaaatccatggcacattttaatttttttttttaagagacagattctcgctctgttgctcaggccggagggcagtggtgygatgatagctcactgcagcctcctcttgggctcaaggtatcctcccacctcccaagcagcagtgtctcacgtagctgggactacaggtgtgtgtcagcat

SEQ ID NO: 145241 - DNA, 201 bp, Homo sapiens
ggtcagatgccgtcctgtggggagggacagtgtggccttcatccgtggtgacgccgtcctgtgtggggactgacagtatcgtctccgtctgtgatgatgcygttctgtgtggggagggacagtgcggcctccatgatgtcccccacactgtccgcgctaggagtgcaggtggtttccagcagctgtctgccggcagggagg

SEQ ID NO: 145242 - DNA, 201 bp, Homo sapiens
acggtcgggccagtcctgcaggggtgggagggtgtgcgtggtgacactcaggaacacggtcgggtcagtcctgctgcggtgggagggtgtgcgtggtgacwctcaggaacacggccgggccagtcctgcaggggtgggagggtgtgcgtggtgacactcagaaacacgaccgggtcagtcctgctgcggtgggagggtgtg

SEQ ID NO: 145243 - DNA, 201 bp, Homo sapiens
tgcgtctgtgtgtgaacgtatgcgtctgtgtgtgtgcacatgtgcacgagtgtgtgtgcacgagtgcatctgtgtgtgcacctgtgcatctgtgtgtgcamgtgtgcatctgtgtgtgcacgtgtgtgttcttgtgtgcatagtgtttttgtgtgtgcacatgtatctgtgtgtcctgcacttgtgtgcaaactgcacctt

SEQ ID NO: 145244 - DNA, 201 bp, Homo sapiens
tgcagtgatctcaagcgtcgcgtctagaatcaccgcaccccgttgcttccagacagcctcggtagcgttgagtcccctcttcctcttcctggatgtacacrggggccacgtgccgtctttggaggtcgtgagtgtttgagtcttttcatctcggcccctgctttgctctttctggcattgccatctgaaagagtctagccc

SEQ ID NO: 145245 - DNA, 201 bp, Homo sapiens
ccatcagctctgggggcccaggctgctgtcacagggaaggtggcatcgccccactcccagcttggcgggaggaggctcctcatgtatgacgccatttgggkatcttctgtgactcctctatgggtcctttgcccgtttttccatcagttttgttttgttttgtattttcccttgacttttaagagttctttcaattgcaag

SEQ ID NO: 145246 - DNA, 201 bp, Homo sapiens
gcgccgagtcatggtccctggaaacaagagaggtcttttcatggactcaaagcttttgttcgtttccttcaggaatgtcttaaagtttttctcttacacartgttcacatatgcaaaaggtcgtttgtgaggttacctttttccttgttgcattggaagcgggccttctcttccagcaggccttccgcctggttgttgttg

SEQ ID NO: 145247 - DNA, 201 bp, Homo sapiens
gagtgcagtggcacgacctcagctcactgcagcctccgcctcccgggttcaagtgattctcctgcctcagcctcccaagtagctgggactacaggcgggcrccaccacacccagctatttttagtagagatggggtttcgtgatgttggccaggctggtcacaaactcctgatctcaggtgatccgcccgccttggcttcc

SEQ ID NO: 145248 - DNA, 201 bp, Homo sapiens
ctcgcaacttggcatggagggttttagttgttaaaaactaaacattattttattacatattccatatttgttattatttattcagagacagggtctcactmtgaggcccatgctgcagtggtgagatcatggcttattgtggccttgacttcctgggctcaagcgatccccccacctcagcctcccaaaatgctgggatta

SEQ ID NO: 145249 - DNA, 201 bp, Homo sapiens
aaggggaaagtgtctacatatgttatttggaattcttccgtgcaggagggttatctgttttcttgcatttatttactcagccatttatatcattatggacycacagatacttatattatactttaggttctaatccaatactccttattttgttctccagttgttcctgctttggccattgggagcctgttccattgtctc

SEQ ID NO: 145250 - DNA, 201 bp, Homo sapiens
gaagggaggagttatttaggcttcatctccttaaggggaaagtgtctacatatgttatttggaattcttccgtgcaggagggttatctgttttcttgcatktatttactcagccatttatatcattatggactcacagatacttatattatactttaggttctaatccaatactccttattttgttctccagttgttcctg

SEQ ID NO: 145251 - DNA, 201 bp, Homo sapiens
tggcacctcctcctttgctctctctttctccttctctggctgtttaagaatttaagatgtgactctttcctcttcaccttctgccataatcgtaagtttcytgaggcttccccagccatgcttcctgtacagcctgtggaactgtgagtcaaacctcttttctttataaattaccaagtctcaggtagctctttatagcaa

SEQ ID NO: 145252 - DNA, 201 bp, Homo sapiens
ctcaaaccctgacagctttgatttgttcatcttcgtatgttgtgccttttccagaatgtcatgtaaatgaaatgatataatatgcaacctttgaggctgayttttcacttcgacgacaactttgagatttgtttgtgtgtatgtcctttcttatcgccatcgtctggatgtactgcattgtatgtatccattcacagtgga

SEQ ID NO: 145253 - DNA, 201 bp, Homo sapiens
tgagccatcctaatagatgtgttatttttattaggtttttgagattacaaaaatttgtttttaataattctcttacaagttattggattaaattcatatasctgttttcaaaataaatattggttttctgattttttacattgaaatatggtaagtatactgaaaaagccaggatattatatagataagagtcattctcaa

SEQ ID NO: 145254 - DNA, 201 bp, Homo sapiens
gagcaaaggggccagaatgagcagctgaaccctttgcagtgaatgactcaattgtaccatttggacacaaccaaacagacttggtgagtcgacccagttcytaaaagctaccagagcagttggcttgccaagggatcctgaataactgaccaaccctaaactgacaagcccgggacctgcttagattgaccagtctatttc

SEQ ID NO: 145255 - DNA, 201 bp, Homo sapiens
tggatcggtcgatgaatagttgattacatgagaacaaactggatgtcagcagagagtaatttgtttgaatgccctttaactgtagcaaacaccattgtagygtttgtttgtttgtttagacagggtctcactatgtcacccaggctggagtgcaatggcatagtcacagctcacagcagcctcgacctcctgggctcaagt

SEQ ID NO: 145256 - DNA, 201 bp, Homo sapiens
cctagctacctcagcctctgataaccaccattctgctcctaggaggtcaggtttttcagattccatatgtgagcaggaacatgcagtatctgtctttctaygcctggcttatttcatttcacatagcatcctccagtcatgtacaggtctttatgtggatatatgagttcatttatcttgggtctattccccaaagtgaaa

SEQ ID NO: 145257 - DNA, 201 bp, Homo sapiens
aatctggccctaataaggtgctcattgctgttggattggcagttgtttttaagccatttcaacagacagagacagggaaaaccattgttcaagataaaatrtttcatgagcgcatactggtaacatccaagtctttttctggactacaacgtttttgcttaatgtcatagaacttatatccatacccctttcttccactcc

SEQ ID NO: 145258 - DNA, 201 bp, Homo sapiens
ggcatgtgccaccatatccggctaattttgtatttctagtagagactgggtttctccatgttggtcaggctggtctcaaactcccgacaggtgatccgccygcctcggcctcccaaagtgctgggattacaggtatgagccaccgtgcccagcctttgttttgcctacttttaattggattgtttttcttcttcttgaggt

SEQ ID NO: 145259 - DNA, 201 bp, Homo sapiens
gaaaccctaaagaaaagatgaggagcttcagcttctgattcggggctatgaagcctgctgagctccgacaagaacgcacacgagtgacagtaagcgcagaycaggcctgcgcggggcctgcctgcctcccgtgagctcattcagtcttgtttttagattaccttttttgaggtataatttacatacaacaaaatccacaga

SEQ ID NO: 145260 - DNA, 201 bp, Homo sapiens
agatggggtttcaccatgttggccaggctggtcttgaactcctgacctcagatgatccgccgtcctcagcctcccaaagtgctgggattacaggtgtgagscactgcccggcctatttttctaaaacaaggtctgtacagttggtttattcaagtcagaatttttaaatcccatctattgtatttggtttatgtatctctt

SEQ ID NO: 145261 - DNA, 201 bp, Homo sapiens
actctttaagttaccttttatataaattttagaattagctcatcaatttctacaaaaaaaaaacccctgggattttcattaagattgtgttgaatgtctamctcaatttggggagaattaacatttttactgtgaaaattatccatcaaaacatggtatatctctccatttatttagatactaaaattctctcatcagtgt

SEQ ID NO: 145262 - DNA, 201 bp, Homo sapiens
cacaagaaggtttccataaagtaagaaaaaccctctctaggggaaacgtgcacaacatcgcatgtgactcttactccatctccaccatgtagaatggctgygtttgctcagggctggcacagtgtggggctgctggtggtcacagaaggactagagcagcagttggtgtccttgaaaccagtgtacagccgtgatcaccat

SEQ ID NO: 145263 - DNA, 201 bp, Homo sapiens
cggaggttgcagtgagccgagatcgtgccactgcactccagcctgggtgacagagcgacactctgtctcaaaaaaaaaaaaaaaaaaaaaaaaaaaaaaaagctggtgtctttttaaaatccttttgtaaattagtttaagaagagttaaacactagccctttccttgttcggttcacctggtctgcgtatgcatgctttt

SEQ ID NO: 145264 - DNA, 201 bp, Homo sapiens
gcggaggttgcagtgagccgagatcgtgccactgcactccagcctgggtgacagagcgacactctgtctcaaaaaaaaaaaaaaaaaaaaaaaaaaaaaaaagctggtgtctttttaaaatccttttgtaaattagtttaagaagagttaaacactagccctttccttgttcggttcacctggtctgcgtatgcatgcttt

SEQ ID NO: 145265 - DNA, 201 bp, Homo sapiens
tttgttttttttttgagacagagtctcgctctgtcgcccaggctggagtgcagtggcgtgatctcggctcactgcaagctccacctcccggattcatgccmttctcctgcctcagcctcccgagtagctgggaccacaggcgcccgccaccacacccggctaattttttgtacttttagtagagatggggtttcactatgt

SEQ ID NO: 145266 - DNA, 201 bp, Homo sapiens
catacgttagaagagtgcaagattcctgtggacacactgtgtacctggcccctggcacagaggttcattttggctgttactaccttttttttttttttttttgagatggagtctcgcttcgtcacccccgctggagtgcagtggcgcgatcttggctcactgcaacctctgcttcactggtgcaagcgattcttctgcctc

SEQ ID NO: 145267 - DNA, 201 bp, Homo sapiens
caggccctatggtctctgccacaactgctcagctctgccatcgtcatgcagaagtagccaggggtgatagtaaatggataagcatggctgtgttccaatamtacttaatttccaaagcttttgtgttttaaaatccacccacaggctggacttacccgcaggctgtggtttgccgacccaagtctagagcagccttggcgg

SEQ ID NO: 145268 - DNA, 201 bp, Homo sapiens
tatatgtagtaattaattatgtatctttgttcattgtgtttcctttgtgtagctctggcccttgaaaaatctgtcctctactgttaatctttgtttttaargcttagtgtacattttatgaaagtataccatacgttagaagagtgcaagattcctgtggacacactgtgtacctggcccctggcacagaggttcattttg

SEQ ID NO: 145269 - DNA, 201 bp, Homo sapiens
aaatgtaccttggctttcatcccctgggggaacataaaggaagggtgggcaactgtccatctcaagacctgggaaatatctggtttctgtgtccagttcargccaggcaatgtccatgaagcctttgatctccatcacctctgaattccacttaattatgtgtagtactaactatatgtagtaattaattatgtatctttg

SEQ ID NO: 145270 - DNA, 201 bp, Homo sapiens
ccttgctaacctcattagttctagtaaccttttggtagattttcttaggattttctgtactgacagttatgttaactgcaaaaaagatagttttctttctktctgaagtgtatgccttttatttctttttcttcctttattagcctggctagaacctcgaggatttagaagtaggaagagtggacgtccttgccttgcatc

SEQ ID NO: 145271 - DNA, 201 bp, Homo sapiens
tcaggagatgaagaccagcctgggcaacatggtgaaaccctattctactaaaaatacaaaaattagctggacatggtggcacatgcctgtaatcccagctrctcgagaggctgaggcaggagaatcgcttgagccagggaggcggaggttgcagtgagccaagattgtgtcattgcactccagcctgggcaacagatgaga

SEQ ID NO: 145272 - DNA, 201 bp, Homo sapiens
cagggcatatcagagacattctcagcagcccctcccatcacaggcctggagacctaggagggaaaaatgcttttgtgggctaggcccagggcccacatgcrctatgcagcctcgggacatggtgcccccctgcctcccagttgctgcagctccagctgtggctaaaagggtccagtgtaaaggtcaggccattgcttcaga

SEQ ID NO: 145273 - DNA, 201 bp, Homo sapiens
ctgtcacaggctgcactcaggtgctggctgcactgtggccttctccaggcttgacttggggagacctggagctcacttccctgacagctggcatgccttgrtcctttctgactgttggtggagacctcacttcttctctacgtggcatctccatggaaatgctcatagcatggcagctggcttccttcacagtaggggatc

SEQ ID NO: 145274 - DNA, 201 bp, Homo sapiens
caatgaaaaaatattccttaacatcttttaatattttatcccaatttcctttctttttctttttatttatttatttatttatttatttatttattttatttatttttgagatggagtctcgctcttgtcacccaggatggggtgcaatggcgtgatcctggctcactgcaacctctgcctcttgggttcaagtgattctcc

SEQ ID NO: 145275 - DNA, 201 bp, Homo sapiens
ttgtacaccattttattcttgattcgcttttctgattcaaagtgaacctgagtgccttaatcctctaaggggaattaattgcttgtttcagtgcttaactytgatcctggctcagtccccatggggacaagtttcttcctgttaggatctgtgtgtgttgttcaaaacacaatcagaaaggtaatgaagtttttcttatga

SEQ ID NO: 145276 - DNA, 201 bp, Homo sapiens
gggattttcattaagattgtgttgaatgtctaactcaatttggggagaattaacatttttactgtgaaaattatccatcaaaacatggtatatctctccayttatttagatactaaaattctctcatcagtgtttggaattttcagtgcacaggtcttgcacatattttgttcaaacaattggaccctaagtatttcagat

SEQ ID NO: 145277 - DNA, 201 bp, Homo sapiens
tgagttcagtgtgacttcttcagtttcttcagggtccacttgtccacatgattggtggcaagtgtggtgtccggggccatttctggcgggtcacgagccgstgctgtttcctggatagccgcatttgttttcctgcacctgcagtcccgtctgcaaagcccatctcaacgagtcgccccacaggctgtcacctcatggcgg

SEQ ID NO: 145278 - DNA, 201 bp, Homo sapiens
cgaggtattgaatgacaaaagcaaattaatgcagcaaatgtaaagatagagataagctctttgccatgccaccttctggaccaggagtttatgattctgayactatttctccctggccagtggcagagcccctctggcaggggcctgagcttcatgctacccaagtctaaatcattttacttttttctaacaaagtcttaa

SEQ ID NO: 145279 - DNA, 201 bp, Homo sapiens
  misc_feature (1)...(201): n = A,T,C or G
cctcatggcgggggcacacagggcagcggagcgaggggccggggagagcggcccccacccctttaatgttcatttccatttttgtttgagtcactttcacncaaatcacttctgtctttatgtaacagtctgtggcccagacccaggcaagtggtaaatatttaccttcacgctggagccaagatcgctgcggggagtccc

SEQ ID NO: 145280 - DNA, 201 bp, Homo sapiens
catattttgttcaaacaattggaccctaagtatttcagattttttggtgatactataaatgataatggatttttaaatttcaagttccagttttcccctgytagaatatacaaatacaattgatttttgtatattggccttatatcctaaaaccttgctaacctcattagttctagtaaccttttggtagattttcttagg

SEQ ID NO: 145281 - DNA, 201 bp, Homo sapiens
  misc_feature (1)...(201): n = A,T,C or G
cctgagtggaactcagtgctgaaacctgggttctcactgcagctggatagcaggtggttacaaaattatatgtatttttagggttatttctaatttttctntaatagttattggcaattttcaaagtcctttaagaaacactgaaaactgctcaagaaaatggcagttctgcagggctcaggtagcagggcaggctgttgg

SEQ ID NO: 145282 - DNA, 201 bp, Homo sapiens
ggaacataaaggaagggtgggcaactgtccatctcaagacctgggaaatatctggtttctgtgtccagttcaggccaggcaatgtccatgaagcctttgawctccatcacctctgaattccacttaattatgtgtagtactaactatatgtagtaattaattatgtatctttgttcattgtgtttcctttgtgtagctctg

SEQ ID NO: 145283 - DNA, 201 bp, Homo sapiens
aaacactgaaaactgctcaagaaaatggcagttctgcagggctcaggtagcagggcaggctgttgggacaggtttgacagactgtcctaatacaaggagcrccttttcccagatcagcagctctagagggtggcggccttgcctggaacctccgcaacctccgcgcccaccacacaagggctgagaacagtaaggtatggg

SEQ ID NO: 145284 - DNA, 201 bp, Homo sapiens
gtttcactatgttagccaggatgatctcaatctcctgatctcatgatccacccgcctcggcctcccaaagtgctggaattacaggcatgagccaccgcgcycggccttgttgttttttaattaagaaagtagttttggatgagagaaatgataaaacttttatatactcctcccaaaaaagttaaatgcctcacatgtgtg

SEQ ID NO: 145285 - DNA, 201 bp, Homo sapiens
ttcaaaagccaagtatatacccaaatgtgcttttaaataatgtctagggtcctgggttccacccccaacactggggaggccaaggagttgtaaacccaaasactggcgtgtttggctgcagcctggcctggcttttgtcagcggtttctggctataatggtgcttttaaaagtggtgtgtgtgtgtgtgtgtgtgtgtgtg

SEQ ID NO: 145286 - DNA, 201 bp, Homo sapiens
taatgtgttcatttttatttttgagaagactatagctagtagatatttctagaagatgttgataaaggatggagttaagtggagacctgaggagggagcarggataaggaagggccaaggggaagagggaattcacattcatcaggtgctcacgcctgcacagtcggcagtcagtggagggtaactctttggggtaaatag

SEQ ID NO: 145287 - DNA, 201 bp, Homo sapiens
tcaaaaaacaacaaacaaaacccaaagctagcagaaggaaaggaacagtaatgattagagcagagataaacaaaaagagaattttaaacaacagagaaaaycagttaaaccaagagttggctgtttgagaagactaacaaaattgacagacctttaacttaaataaaaagagagaaaagatctaaataactaaaaccagaa

SEQ ID NO: 145288 - DNA, 201 bp, Homo sapiens
acattactgtgtgagttgtgcaattcacagcaaagtagtcaggaatcgatctcgtgaagcccgcaaggaccgaacacccccacctcgatttagaccttgckggtgctgccccacgtcccccaccaaagcccatgtaaggagctgagttcttaaagactgaagacaggctattctctggagaaaaataaaatggaaattgta

SEQ ID NO: 145289 - DNA, 201 bp, Homo sapiens
acaatgaaaaaatattccttaacatcttttaatattttatcccaatttcctttctttttctttttatttatttatttatttatttatttatttattttatttatttttgagatggagtctcgctcttgtcacccaggatggggtgcaatggcgtgatcctggctcactgcaacctctgcctcttgggttcaagtgattctc

SEQ ID NO: 145290 - DNA, 201 bp, Homo sapiens
aacaatgaaaaaatattccttaacatcttttaatattttatcccaatttcctttctttttctttttatttatttatttatttatttatttatttattttatttatttttgagatggagtctcgctcttgtcacccaggatggggtgcaatggcgtgatcctggctcactgcaacctctgcctcttgggttcaagtgattct

SEQ ID NO: 145291 - DNA, 201 bp, Homo sapiens
caacaatgaaaaaatattccttaacatcttttaatattttatcccaatttcctttctttttctttttatttatttatttatttatttatttatttattttatttatttttgagatggagtctcgctcttgtcacccaggatggggtgcaatggcgtgatcctggctcactgcaacctctgcctcttgggttcaagtgattc

SEQ ID NO: 145292 - DNA, 201 bp, Homo sapiens
ccaacaatgaaaaaatattccttaacatcttttaatattttatcccaatttcctttctttttctttttatttatttatttatttatttatttatttattttatttatttttgagatggagtctcgctcttgtcacccaggatggggtgcaatggcgtgatcctggctcactgcaacctctgcctcttgggttcaagtgatt

SEQ ID NO: 145293 - DNA, 201 bp, Homo sapiens
tccaacaatgaaaaaatattccttaacatcttttaatattttatcccaatttcctttctttttctttttatttatttatttatttatttatttatttattwtatttatttttgagatggagtctcgctcttgtcacccaggatggggtgcaatggcgtgatcctggctcactgcaacctctgcctcttgggttcaagtgat

SEQ ID NO: 145294 - DNA, 201 bp, Homo sapiens
acacatcccagttgatgaacccttcttccctccctgctgccctccctcctttccttctccccttcatccctccctactttccttctcccctttctctcttytttttcccttttcagcattttactgtgaacatttccagacatactcaaaagtacagtatagtaaccctcatgtgccacccacccgggatcagagatcact

SEQ ID NO: 145295 - DNA, 201 bp, Homo sapiens
tagagacacatcccagttgatgaacccttcttccctccctgctgccctccctcctttccttctccccttcatccctccctactttccttctcccctttctctcttttttttcccttttcagcattttactgtgaacatttccagacatactcaaaagtacagtatagtaaccctcatgtgccacccacccgggatcagaga

SEQ ID NO: 145296 - DNA, 201 bp, Homo sapiens
gctgggggggtcagcggctgctctgcttctcctgtgcacccggggttgctcttcagttctctaacttagtaagttggactggcagcctcttggttgtacaycattttattcttgattcgcttttctgattcaaagtgaacctgagtgccttaatcctctaaggggaattaattgcttgtttcagtgcttaactctgatcct

SEQ ID NO: 145297 - DNA, 201 bp, Homo sapiens
tcgcttttctgattcaaagtgaacctgagtgccttaatcctctaaggggaattaattgcttgtttcagtgcttaactctgatcctggctcagtccccatgrggacaagtttcttcctgttaggatctgtgtgtgttgttcaaaacacaatcagaaaggtaatgaagtttttcttatgacagaagccagaaatgcaggctat

SEQ ID NO: 145298 - DNA, 201 bp, Homo sapiens
gatagagacacatcccagttgatgaacccttcttccctccctgctgccctccctcctttccttctccccttcatccctccctactttccttctcccctttctctcttttttttcccttttcagcattttactgtgaacatttccagacatactcaaaagtacagtatagtaaccctcatgtgccacccacccgggatcaga

SEQ ID NO: 145299 - DNA, 201 bp, Homo sapiens
attttgtcttgcataattaattgtttttgcatgctagcctaaacactgcagggctgtgagctctgattgggtgagaaccatgccttcctcattcggagtcygccatcatgccttccacatagtgggcacccagtaagaaagaactcatttccagctagtcgagagtgtttttacagaactgatgttctgagtcaggccaga

SEQ ID NO: 145300 - DNA, 201 bp, Homo sapiens
gaatcaaagaagctcaacattaccaaaataggagctcagcattactaaaattggctttgcctgatggctgagaagacattttttctttttctttttacttktcttatttgtaggagagtatatagagctgttatttctcaaatagttcttttttgatagttaatttttgtgggtacctagtaataggtgtatatgagatac

SEQ ID NO: 145301 - DNA, 201 bp, Homo sapiens
tcccgtgaagcaccactgccctctaagaccttggaaggggaaacaccagaaggtgtgggtgctgagctccgctgcgtcagactgccaggacctgagtggarctcagtgctgaaacctgggttctcactgcagctggatagcaggtggttacaaaattatatgtatttttagggttatttctaatttttctctaatagttat

SEQ ID NO: 145302 - DNA, 201 bp, Homo sapiens
ctcatgtgcctctcttaccagtggtgtgactttgggtgagttgcctgtgctgtctgtcccagtgtcctctgagtgctgtgaaggtgggtgaagtatatttrgtgaatcacaggtactgcgtgaggtgccaggcatgatccttgctggtgccaggtttgaagaaaatggtgtttgtgcaaggaaaaatttttttttctgtgc

SEQ ID NO: 145303 - DNA, 201 bp, Homo sapiens
tgaacagcccacaagctaggaatggctttcacatgtttaaatggccgaaagtcaaaatatctcatgatgtgtgaaaactgtaggtcattctcatctgcgtyggtaagtaacgccttatctgagcacagccaggcgcattcaggtggtgcggccccagtggaggctctgtgggccgggagccacgtcccaggtgcagacaca

SEQ ID NO: 145304 - DNA, 201 bp, Homo sapiens
aagtacaacacattgctgaaagcaattaaagaggacataaataaatggaaagacatcccatgttcatggattggaagacaatattgttcagatgtcaatayttcctaaagtgatctacagattaatgcagtcctttaatgcagaaagaggaaaacccaatccaaaaatgtatatggaaatatcaaaggaccttaaatagac

SEQ ID NO: 145305 - DNA, 201 bp, Homo sapiens
aagggatggttgctgaggagcattcaggaggcctggggtggcatcagggaccaagtgtccgtttgatttcacagacccgtaagtgttcagtgtcttgagcraactgtgaagaggagaccctggcctctgatttcaaaggcgccagcgttttaccggggccggtgcagataatggaagaaaggtgttttgccagggactttt

SEQ ID NO: 145306 - DNA, 201 bp, Homo sapiens
tggaggtctcatacttcctgacttcaaaacttatcataaagttactgtaatcaaaatagcatagaacaggaattcctccttatctgtggttttgctttccrtggttattgtttaatgggtacaaagtttcagttttgcaagatgaaaaggttctggagacctttttcacaactcaaatatacttaacactactgaactgaa

SEQ ID NO: 145307 - DNA, 201 bp, Homo sapiens
tagcaggaagcccttgcctttgctgtaaagaaactagcaagcgacaaaacgaaagcatcaaagagccaacaggatgcggcccgagccctccctggcacgtygccccgagccgcgcggggaagagtgaccttagggcccgcctcgcgcacacaggccaggcacaggttgaaagttcaaggcattttgttttttcacctgttt

SEQ ID NO: 145308 - DNA, 201 bp, Homo sapiens
aaagttgtgcagcccgcaccactaattccatatcacgttatctcaaaaagaatgttccatcaaccttaatgcatatcttttctctaattccacactgtctygtttattgtaactttgtagttaagtattgaaatagaaacttcgggctgggcatggtggctaaagcctgtaatcccagcactttaggaggccaagtctggc

SEQ ID NO: 145309 - DNA, 201 bp, Homo sapiens
caggcgtggtggtgggcacctatagtcccagctactcaggaggctgaggcaggagaactgcttgaacctgggaggcggaggttgcagtgagccgagatcgygccactgcactccagcctgggtgacagagcgacactctgtctcaaaaaaaaaaaaaaaaaaaaaaaaaaaaaaaagctggtgtctttttaaaatcctttt

SEQ ID NO: 145310 - DNA, 201 bp, Homo sapiens
gatagttttctttctttctgaagtgtatgccttttatttctttttcttcctttattagcctggctagaacctcgaggatttagaagtaggaagagtggacrtccttgccttgcatccagtctcaagggaaagtacttgattattcactacaaagagaaggatgttagccataggtttttcagagacttaacctttttagta

SEQ ID NO: 145311 - DNA, 201 bp, Homo sapiens
gacacagcatcagtttggatgagttcatctgaaatgtattgccaaggcttgcctgctgggggattttgcaaaataaatctccctacttacaaaagtgtgcktctcatgtgccagttcccatgtatctgaggttatcctcctcgacactgttatcttcccttttttcccttctttcctttggattggcagagagctaggact

SEQ ID NO: 145312 - DNA, 201 bp, Homo sapiens
aagatgttgataaaggatggagttaagtggagacctgaggagggagcagggataaggaagggccaaggggaagagggaattcacattcatcaggtgctcaygcctgcacagtcggcagtcagtggagggtaactctttggggtaaataggaggaaatggaagctcaagaacttgaaatcacttgcccaaagtcccacaggt

SEQ ID NO: 145313 - DNA, 201 bp, Homo sapiens
caagggctgggctcacactgtgtctgatgcagcagggctgacttgggggcaattacttcacattaaggtagagaccaagagaaatacttgttttaatctgraaaaactcagatggcttgcctacagccgtttcttaccattactcattaaaccaagcccttacattttatctgagaccctgactctaaccctgtgccatgg

SEQ ID NO: 145314 - DNA, 201 bp, Homo sapiens
taaaagctgagtttgcaaagttaaattaatttctaattggtggatttttgtacggaaatactttgggctagttgattttactaaccaggccctaactactrctagttaggagagggtggttgtttgtggtgatctggatagtaggtagcagtaagcagaatagaagagggattttaaaatgatctgttcatttctctcttt

SEQ ID NO: 145315 - DNA, 201 bp, Homo sapiens; identical to SEQ ID NO: 26807

SEQ ID NO: 145316 - DNA, 201 bp, Homo sapiens
catcatcaacgtaaaacactgctcaagcagctggggaggaaaggggggttaacctgagtggttagaaaccagcttctgcagagatgcttttgcagaatccytttgctgtgaaagctacaaggcagcgacctcgtttcaaacacctggtgtcaccagcaccacgttttaaagttgtgaaatatcagggctgttattttttca

SEQ ID NO: 145317 - DNA, 201 bp, Homo sapiens
catccagtgccctctccagacaccagcgctgctctcagctggtgccttttgtcattttcacgtacaccccagcagccgagtcctggcaattttaggcctgrgcacttgcctcttctcttcctcagtaccgtcctaccccaggttctccttaattcacatctcaactttcctatcccagcatgccccccaggtctaatctgt

SEQ ID NO: 145318 - DNA, 201 bp, Homo sapiens
actgttggtggagacctcacttcttctctacgtggcatctccatggaaatgctcatagcatggcagctggcttccttcacagtaggggatctgagagcggmagagagctcccaggacagaagccgcagtctttttataactgaatcccatcacttcctctggattgtgtttgttggctgtcagtcactaaacccatgcttg

SEQ ID NO: 145319 - DNA, 201 bp, Homo sapiens
ttgtgggaaacagacatgactgtgttcagggataaagggcatcaggttggcaactaaccagtggtttactccctgagcagacacttcttaaatacctaccacacccagttaccagggctgagagccgaggagcatgagttgctggtgcccgggcccccagggatctggtaaaggggacctcggcagccgcaaggccagggg

SEQ ID NO: 145320 - DNA, 201 bp, Homo sapiens
tttctgtgagtccacactggtgtctccagccctaatcctttaccccgtggatcactcttgcgttttccctgctgtctctcacctcccattccaacagtgasaaacgtggctcccgttgcctgtggcacatttgcctacttgttcagtacatatgtgtgtatcacagtgttggaattgccatctcgccctatgggaaccact

SEQ ID NO: 145321 - DNA, 201 bp, Homo sapiens
gcaaactaatatttagacaaatgctcagttttattgatttaattttgacactagggaatctcacagcagaagtacaaatcatatgtacaagtatttatatyaatgaaaatttccattggtgattttttggcagaatattggtcttgactctgtggaataaatgacgacgtaaacgtagctgcacaggggtgttcctgtata

SEQ ID NO: 145322 - DNA, 201 bp, Homo sapiens
tcttttgctgttgatcttgattacctgactgaaatagtgattggcaggtttctccactgtaaagtcacactttccccctcccttcatactgtgctctgaawggaagtcacagtgagcagcctgcacttctgaagggaggagttatttaggcttcatctccttaaggggaaagtgtctacatatgttatttggaattcttcc

SEQ ID NO: 145323 - DNA, 201 bp, Homo sapiens
tcaaagctaacaatattacccttctctgaccctgcttttgtcgtcacatctgtctgatctgatccagggcaggttttccagttttaaggattcctcatttrattagattgggcccacttggataatccagattgatctctgcacctcaaggtcctcacatctgtgaagtcccttttggcataggagttaacatattcatag

SEQ ID NO: 145324 - DNA, 201 bp, Homo sapiens
ccgcctggcttctcgtcctgacactgccacttactagctgggtgattttggactttttaattaaaaatatgtgtataataacagctgtctggaggctctarggagaatctgttttcttcctttttgcagctgctagaggccacctgcattccttggcttattggccctttcctccatattcaaagctaacaatattaccct

SEQ ID NO: 145325 - DNA, 201 bp, Homo sapiens
gagaaagtgtatattcatttcttcatctgtttttctctggggttgtcttttgatttataagaattatttatacattgagaatactaatcttttgtcatacrtactataactatttccaccctattttttgtactttgtgtaatacagtctctaggctttgcaaaaaattttaattttatgtacttaaaaatatcgatctcc

SEQ ID NO: 145326 - DNA, 201 bp, Homo sapiens
ctgttaatgtttgtcatctctcactcctcccctacgatgaaactgggaaagtctctgggtacacaggtcattgctaatggaggtccttctgtaaattcaarcctcacccgttaactgctatggtataggctctcagttggtggtagtatttaaaagacacagaacgaagattcctgtcatctacttggaagaacgttagca

SEQ ID NO: 145327 - DNA, 201 bp, Homo sapiens
tgcaccacctacatcctgctaacttaaattttttgtagagatggagccttgctatgttgcctgggctgatcccatcatagtttttttaatgggctgctccrgtgtgtctgaagcagtagtcaaagtttgcatttgaatacctttttccttattaaaacatggtgagctcaaagaagaaaacaagtcgaaatttgtgaaaca

SEQ ID NO: 145328 - DNA, 201 bp, Homo sapiens
cctgcctcagcctcccaagtagctgggaccacagttgtgcaccacctacatcctgctaacttaaattttttgtagagatggagccttgctatgttgcctgrgctgatcccatcatagtttttttaatgggctgctccagtgtgtctgaagcagtagtcaaagtttgcatttgaatacctttttccttattaaaacatggtg

SEQ ID NO: 145329 - DNA, 201 bp, Homo sapiens
taagatcagctgggatataaatgaatgtactgactgtgggagcttgccagaagctcggttacctgcctctcactggttttctcgagcctctgtgtcacttyccatctgggctaactggcagatatcttacgcaaatgcgacacattctggactctcaggttgcggtgtagtggtggcataagtggatgttttcattatgta

SEQ ID NO: 145330 - DNA, 201 bp, Homo sapiens
tccacacaggcagtggacaggggcttgccgttttatagaagaataaaatttcacaacttctgtgtacttccagtaatttgagctttaggttgaagcttgcraggtaggcaaggtaagagtttctgtccctatttagaggcacctaaaccccagtgaggcaaagtgagtcacccaggagctgcctggaatctggtcctttcg

SEQ ID NO: 145331 - DNA, 201 bp, Homo sapiens
accccagtgaggcaaagtgagtcacccaggagctgcctggaatctggtcctttcgaacccactgttgggcacagcctcctccggggcatgcagactctgcygcatgacctttgagcagagttaatgatttcctatttgttttatttcattcaaaacaactgtcattgcttgaacccacccatgctgggcacttgtatactc

SEQ ID NO: 145332 - DNA, 201 bp, Homo sapiens
gagaggttcagtcatttgccaaggtcgtgagccccagccccccactgagcagcacctctgcccctccagggtcctgggttggaggtgtgaagggcatcccrggccctcccactgctgggttcttctaagtacaggaatgtctgctgcacacatcttctgaagatagcattctcttgatctgagaagggaaccagtaccact

SEQ ID NO: 145333 - DNA, 201 bp, Homo sapiens
accagaaggtgtgggtgctgagctccgctgcgtcagactgccaggacctgagtggaactcagtgctgaaacctgggttctcactgcagctggatagcaggyggttacaaaattatatgtatttttagggttatttctaatttttctctaatagttattggcaattttcaaagtcctttaagaaacactgaaaactgctcaa

SEQ ID NO: 145334 - DNA, 201 bp, Homo sapiens
tgaatgtagtcaggagccgggggaagaggcacgtgttcctgggctgtgtggatgagtggtctaggaggcgtgcttgtgatgaaatgacagcccaccagccmactatcccaggccctggaggagatgcggggtgcgcagcctgggctgtcagagatgttcacaattgcaaagattctgacccatattttgccccacacatcc

SEQ ID NO: 145335 - DNA, 201 bp, Homo sapiens
acaaacaagcagcctctatttccaacctgggtgcagaacttcccttaaagggtttctgggtgtgccagtctgcatctatattaactctagtctccaaggaygtagacccccagactccagacctgatgttgatctgtactcacagctctgtctgccttgaacctgtcaaaacactctttcctttaaatttcacctacacgc

SEQ ID NO: 145336 - DNA, 201 bp, Homo sapiens
gcagaagtacaaatcatatgtacaagtatttatatcaatgaaaatttccattggtgattttttggcagaatattggtcttgactctgtggaataaatgacracgtaaacgtagctgcacaggggtgttcctgtataatgcttgaatcaattgtgtgtgaaagcatcatgcaaatggctaattaaattgggtgatgactgaa

SEQ ID NO: 145337 - DNA, 201 bp, Homo sapiens
ttaaggtagagaccaagagaaatacttgttttaatctggaaaaactcagatggcttgcctacagccgtttcttaccattactcattaaaccaagcccttayattttatctgagaccctgactctaaccctgtgccatggaaaaacaaacaaacaaacaaaaaactagcatggtgagagggggcagggttgaagacacagta

SEQ ID NO: 145338 - DNA, 201 bp, Homo sapiens
aagacacggaaaggctgggagtgtgcacaaggtgcagggagaccccactgcttcccctcacacctggcagaggatggcgggttcctttctggagagcctgwcaagaacacctccgctggggacacaggcctagctgagtggtggtgaggtggcaccctgaaaacaagcattgggggaaagtgcagagctcccagcgccgct

SEQ ID NO: 145339 - DNA, 201 bp, Homo sapiens
agagagaaaagatctaaataactaaaaccagaaatggacgagaaaacatcacgtcctacagaacaacacatcttgcagaaataaaaaggccaagagaataytatgaacaattatgccaacaaattgtctaacctagatgaaatggacaaattcctagaaagacacaacctactgagactgaacagacctacaactagtaaa

SEQ ID NO: 145340 - DNA, 201 bp, Homo sapiens
gaaaagcccactctctctccggtccgtgcctccaagatgacaaagaaaagaaggaacaatggtcgtgccaaaaagggccgcggccacgtgcagcctattcrctgcactaactgtgcccgatgcgtgcccaaggacaacgccattaagaaattcgtcattcgaaacatagtggaggccgcagcagtcagggacatttctgaa

SEQ ID NO: 145341 - DNA, 201 bp, Homo sapiens
cggcaagtggtcgcacacctcccggctctgctgtgtcttcacatggccccctcctcggtgtctgtcttctgtccctcataaggatatttgccattggattsagggcccgtgtagattgcccaggatgatctcatctcagcttccctaattaatcacatgtgcaaagtccctttgccgtgcgaggtgccatagtcaaaagtt

SEQ ID NO: 145342 - DNA, 201 bp, Homo sapiens
gaccagcacattcccattcttgccattttggtgaacctgcattcacatttttgcctgcatctgcctgggagtggaattgccggtccttggggacacacagkctcagctttcctaaaactgccacgcagtcttccctggggattcactgcacaatattttaaaacccagatcttaccatgcacctcccaggcgtagtgccct

SEQ ID NO: 145343 - DNA, 201 bp, Homo sapiens
ccgcggccacgtgcagcctattcgctgcactaactgtgcccgatgcgtgcccaaggacaacgccattaagaaattcgtcattcgaaacatagtggaggccrcagcagtcagggacatttctgaagcgagcgtcttcgatgcctatgtgcttcccaagctgtatgtgaagctacattactgtgtgagttgtgcaattcacag

SEQ ID NO: 145344 - DNA, 201 bp, Homo sapiens
aaaatgctgatagcagcatggacaataaagtccaggctgaggtggtctcagatggaaacgaggaacttgttgggaactggagcaaaagtcactcttgttaygctttatcaaagagactggcggcattttgcccctgccctagagatctgtggaactttgaacttgagagaggtgatttagggtatctggtggtagaagttt

SEQ ID NO: 145345 - DNA, 201 bp, Homo sapiens
gaattgccggtccttggggacacacagtctcagctttcctaaaactgccacgcagtcttccctggggattcactgcacaatattttaaaacccagatcttrccatgcacctcccaggcgtagtgccctcgaacggctctcatcacacagaagccgaaatctgactccataagataccatggaaggcccttggaggcccggg

SEQ ID NO: 145346 - DNA, 201 bp, Homo sapiens
acactacattaacagaatgaaggaaaaaacacacaatcacttcaattgatacagaaaaagcatttgacaagattcaacacaacttcatgatttaaaaacastcaacaaaggaacagaaggaaattacctcaacatcataaaggcagtatatgaaaagcccacagctaacatgatactcagtgatgccagaatgaaagcttt

SEQ ID NO: 145347 - DNA, 201 bp, Homo sapiens
tcggggaggccaatcacaacattttcttacatatggaattattagatgagcaaataagtagcgatacatcatctgagcaggcatttaagcctaagattccrcgtttttgggtatccttatagcagcaccccagtctctgtggtacaaatttactgtattagtcttttctcatactgctaataaagacatacctgagactgg

SEQ ID NO: 145348 - DNA, 201 bp, Homo sapiens
acttttaaggtgcttcaactaggagtttagctaccccttagctattttgtggttactgaagcatggcccccaggagaaatccctttttccttcttttctgkgaagttcctgggagccgaggggaagtctgttaataccagttctggcaggtgggaagaggctagtggcctcctcaccttgccacgggcgctggtccctccc

SEQ ID NO: 145349 - DNA, 201 bp, Homo sapiens
accagcttcgggccagagccctcatcttagtttcttcatctgttaaatgaaggtaataccacctactttacagagttgagagcattaaataaactgagatkacacaggctacttagtgcggggcccagtacacccaggtgaacctcggtcgtcggtaagcaaggtcccagaagtcctccctgggaattagccttcttcaga

SEQ ID NO: 145350 - DNA, 201 bp, Homo sapiens
ggctgcgcctgctccgccccccaggcggggtgtcctggcgcccgcgggaacctggggcgtcgctccctgcgcggcgtccgggtcgaggccgcagcactcgrcgtccccgcgggtgagggaggaggcctggggcgccgccggccggcgaggccagccggagggaggggacggtggaccccgaaacgcgtcctccattgcccc

SEQ ID NO: 145351 - DNA, 201 bp, Homo sapiens
ctgcatggctgcgttgttccctgcatggctgcatttaggctttccttttcctgcaagtgctgcctcgtctttcctttctctcgtctcagcagcaggaagarcaagttctttctctgcctccccgctgcctggctccttcagctatcaccagccatcccctctacccagccctcactctggtgccacaattgctactttcct

SEQ ID NO: 145352 - DNA, 201 bp, Homo sapiens
tcttccatcacttgtgagccctggctgttttattctgcctaagccaaggcagcctttgctatcctgacttgacacagaagagttacttagtaactgtgttsatttgctagggcttccatagcaaattaccacaaactgggaagcttaagacaacaaaaatttattctctgctcacagaatccaaaaccagaaatcaaggtg

SEQ ID NO: 145353 - DNA, 201 bp, Homo sapiens
ggcgccgccgggggcggcctgggagcagaggcgcgggcccggccctgcatttccgccctggccctgccctccccgacagccccggctgccggcaggtgagkcgctgagcccgggcgggggtcggggctgcgcctgctccgccccccaggcggggtgtcctggcgcccgcgggaacctggggcgtcgctccctgcgcggcgt

SEQ ID NO: 145354 - DNA, 201 bp, Homo sapiens
tgtacaggtcgggcacggtggctcacgcctgtaatcccagcacattgggaggccgaggggggtagatcacctgaggtcaggagatgaagaccagcctgggmaacatggtgaaaccctattctactaaaaatacaaaaattagctggacatggtggcacatgcctgtaatcccagctactcgagaggctgaggcaggagaat

SEQ ID NO: 145355 - DNA, 201 bp, Homo sapiens; identical to SEQ ID NO: 26806

SEQ ID NO: 145356 - DNA, 201 bp, Homo sapiens
attacatctcagtatagctgttaccaaaaaaaaaaaaccaccaccaaatatacatatttctgtctatagtcccggggaactgggaacagctcggccctggygccacgaggaccactgtcccatcctctgcaagacacagcgagtacccacaacaaggcacaaggcagcttccggaaaaccctccagacacaggaatgactt

SEQ ID NO: 145357 - DNA, 201 bp, Homo sapiens; identical to SEQ ID NO: 26809

SEQ ID NO: 145358 - DNA, 201 bp, Homo sapiens
atctcaatctcctgatctcatgatccacccgcctcggcctcccaaagtgctggaattacaggcatgagccaccgcgcccggccttgttgttttttaattargaaagtagttttggatgagagaaatgataaaacttttatatactcctcccaaaaaagttaaatgcctcacatgtgtgagctgttcaattcagaaaatggc

SEQ ID NO: 145359 - DNA, 201 bp, Homo sapiens
atgtctagggtcctgggttccacccccaacactggggaggccaaggagttgtaaacccaaagactggcgtgtttggctgcagcctggcctggcttttgtcrgcggtttctggctataatggtgcttttaaaagtggtgtgtgtgtgtgtgtgtgtgtgtgtgtgtgtgtgtgtgtgtagagtataatcggctcggatttaa

SEQ ID NO: 145360 - DNA, 201 bp, Homo sapiens
gcccaggagttgacaaccagcctgggcaacatggcaaaaacccatcttaacaaaaaatacaaaaattagtcaggcgtggtggtgtgttcctgtagtcccarctaccctggaggctgagttggaaggattgcttgagcccaggaggtcaaggctgcaatgagctgtgatcacgccactgcattccaaactgggtgacagagc

SEQ ID NO: 145361 - DNA, 201 bp, Homo sapiens
tttgtatgagttgtaaagggaaacagacaatgtataggccaatatacccttcactctgcttaagaaactgatgttttaaaactatataaaagttaccataytgtttatgtgcttcattttgctcaacagtgttttgacatttatccatgttgatacatgtagcttttattcatctttttattagtaactactatataactt

SEQ ID NO: 145362 - DNA, 201 bp, Homo sapiens
tattcgaacctgacttggattttgggaaggagcagaggcaaaggggtaagggtttagacagaagtttctaatctgcttttcacaactaaatcacagagagrttaaatggttatggcctctcttgacacagccatatgtgtaaacattgtttattggaaagttgggctgaaaatagttattctgtgaacaacttaacaaatc

SEQ ID NO: 145363 - DNA, 201 bp, Homo sapiens
tttcctcaacctcatctccagtctgtgtcttagatcctttttttgctgtggtgtttttaatatctgagagcttttcctattttctgaaatttttaaagatrgttttctattcctggatgtgatgttttagttctttgaggatgttaaagatttaaaaaaataattctcatgcttcccacattagttattgttttgctcaga

SEQ ID NO: 145364 - DNA, 201 bp, Homo sapiens
attttctttgtcctttttatttattagttgacaattgggctttgtagaataaacttctacttttttaaaaactttctcctttatttttcatttttttttttggattttctggaagatttcctcaacctcatctccagtctgtgtcttagatcctttttttgctgtggtgtttttaatatctgagagcttttcctattttct

SEQ ID NO: 145365 - DNA, 201 bp, Homo sapiens
gcagacagtgtgaactcaggagacagcagagctggacatacagttttgggagtcattaaaatataggctaacataatgacagtaggtaagattcctatagagaatggacccctgaggaagagtaatagtgaacaggggatggacagaagaggaataaaatccaaatgaaaagcggtgtgattgttttgcatgtatagaagc

SEQ ID NO: 145366 - DNA, 201 bp, Homo sapiens
agagatagagagaagtagatgggttacagaaacatgtaggagatgcagttcccagggtctgataatgtcttgagtatgtggactgatggaggagggatcaragtgacacccatatttctgacttgggcattcagtcattttaaaaacgtgaagtttgagtgagtatgtaacattttcaactttttttgaggaagacattct

SEQ ID NO: 145367 - DNA, 201 bp, Homo sapiens
tttattgactgtttcattccattcgtctttggtaccagctctgtcataaaaacatcttccatgtatgtgaggctctgcttttgagttttcttttctattcrtttggtatactgactacactgtaccacactgttttattgactatagcttttaaataaattttgatatcaagtagagcataccctcccaacttgttcttca

SEQ ID NO: 145368 - DNA, 201 bp, Homo sapiens
gcagctgtactatttatcataataataatggacttggtctgtcatgttttattttgaatgtgtataacacaatttttaatcattggttacctatctcaacyaaaatattttttggtctccagatcactcctgccctcccttctaataaatcagttatagaatatgtaacatggaattctataaaataccacactcttatct

SEQ ID NO: 145369 - DNA, 201 bp, Homo sapiens
gttaaatgtgcattagtattaattcagaaataaatgctgatgataattctaagagcttcccccccaaacctctttttgtcataaataaataatatttatgyggtattgtttttaaataatatttaggatcattattgcttgctaaccagagatttatcagattaagtattttagctgaatactaatgaacatatttatcat

SEQ ID NO: 145370 - DNA, 201 bp, Homo sapiens
cactgatctcttaaataaccctgtcagttgggtagtattatctccatttataggtgaggaggaaataggcttagagaatttaagtaacctgctcaattagytcacaagagatagaattagtatttaaactaaggtgtgtttaactccaaagactatgtatgctctttccagtgcctctctagttttaatctaattgttaaa

SEQ ID NO: 145371 - DNA, 201 bp, Homo sapiens
gctttttaggtataatcatttgcatactgaacatcaaatgtattcaggtattagccatctctttgaagattgtaaagagaaaaatgaaggaagaaaactgwaaaattacatttatttgtagtgtataagtcttataaattgcacttaacatttaaaattttgtattctgtagcaaaatatgaagatctctatgcattttct

SEQ ID NO: 145372 - DNA, 201 bp, Homo sapiens
aaatgtttcctgatttaatttttctggtagtttactctaaaactagataataatatatttattttttgattttccaactttagataaaaatgttgactcttgggtatgaaaaatgtttttgcttatttgtactgtacccctgtttcttgctaccctcaatataagtgttactgttttttacaatgtggttctctattggtt

SEQ ID NO: 145373 - DNA, 201 bp, Homo sapiens
taaatgtttcctgatttaatttttctggtagtttactctaaaactagataataatatatttattttttgattttccaactttagataaaaatgttgactcttgggtatgaaaaatgtttttgcttatttgtactgtacccctgtttcttgctaccctcaatataagtgttactgttttttacaatgtggttctctattggt

SEQ ID NO: 145374 - DNA, 201 bp, Homo sapiens
gaaggggtaatggtaaggaaaaagtaaagcatttatagtagagacttacaaaaccacaggtttatattaatcttttaagtctattgatggcaagtagcacratgtattttttaagtgggtatttcacaatcaaagagaatgacttggaagttgatattacggaatgataaaaggaaggtcaaggtcctttggtggcagtgg

SEQ ID NO: 145375 - DNA, 201 bp, Homo sapiens
actttttttcgtaaggatgaataacacaaagattcccagcagtagcctcctgcacattcctggttagccctagtcccactctccacgccagcagcaacatmgtgtgtgtgtgtgtgtgtgtgtgtgtgtgtgtgtgtgtgtgtgtgtatgtgtgtgtgtgtgtgtgtgtgtgtctgtctactagtattcataaaaacatac

SEQ ID NO: 145376 - DNA, 201 bp, Homo sapiens
tagaattaatgagctagtgtttagctatctagatgattttgaagatataaacgatttaaaaaactgtctgcaacctgctggtacacataaattaacttttktttgtttgtttgtttgtctttttgagatggagtctcactctgttgcccaggctggagtgcagtggcacaatcttggctcactgcaacctccaccgtctgg

SEQ ID NO: 145377 - DNA, 201 bp, Homo sapiens
ctgagatgggaggatggcttgagcccacgaagtggaggttgcagtgagccaagattgcgccattgccctccagcctgggtgacataattggggggggggggcggaaaagaataaaaaatcagtaaaagtaaactgaatctgatcaactagagcaaatcctattcttaggtggatgataagagtgaacagacttggaaaata

SEQ ID NO: 145378 - DNA, 201 bp, Homo sapiens
cgtgttggcctcccaaagtgctgggattacaggcgtgagccaccgtgcctggcccaaattaacattttttaggttggtagtggttatttcactttttttcrtaaggatgaataacacaaagattcccagcagtagcctcctgcacattcctggttagccctagtcccactctccacgccagcagcaacatagtgtgtgtgt

SEQ ID NO: 145379 - DNA, 201 bp, Homo sapiens
gaacctttttttttttttttttttgagatggaatcttactctctcgcccagactggagtgcagtggcacaatctcagctcactgcaacctccgcctcccakgttcaagcagttccctgcctcagcttcctgagtagctgggattacaggcagccaccaccacacccggctaatttttgtatttttagtagagacggggttt

SEQ ID NO: 145380 - DNA, 201 bp, Homo sapiens; identical to SEQ ID NO: 26814

SEQ ID NO: 145381 - DNA, 201 bp, Homo sapiens
ctctttgctacaactgtcaaaacaaggtattgttcttagagaccaaagcttacatgctcaatttgagatgggttatctaagatactttatttaatgttttwttattgttattttatccttttttgctctgacagtcaggttcttttgtactctatctcccccatattggcctgaaagtaattagaaactattgatctgata

SEQ ID NO: 145382 - DNA, 201 bp, Homo sapiens
cagactcccaagtagctgggattacaggcatgtgccaccatgcctggctaatttttatatttttagtagagattgggtttcaccatttggccaggatggtytcgaactcctgacctcaggtgatccaccggcctcggcctcccaaagtgctgggattgcaggtgtgagccaccgtgcctggctttgggattctttctgttg

SEQ ID NO: 145383 - DNA, 201 bp, Homo sapiens
tggcacaatctcagctcactgcaacctccgcctcccaggttcaagcagttccctgcctcagcttcctgagtagctgggattacaggcagccaccaccacasccggctaatttttgtatttttagtagagacggggtttcaccatcttggccaggctggtcttgaactcctgaccttgtgatccaccctcctcggcctccca

SEQ ID NO: 145384 - DNA, 201 bp, Homo sapiens
tcaaattaagccagagtttatagtaaggatgattctgaagcaccccaagagttctgtgcaacagttgccatttttagtcaacagtgtcctatagggatgtrtaatgcagtttcatgttctgtatctgtctctagcttctcattataacattagtctattttacatctcatttgggaaagtgattagtaggaaatgtctatt

SEQ ID NO: 145385 - DNA, 201 bp, Homo sapiens
ttaacatgtaagtctaactattctgactgtatttattagctttacttttgttgatgacaaatccaatctcagattgatatgtgtgctttttaggtataatmatttgcatactgaacatcaaatgtattcaggtattagccatctctttgaagattgtaaagagaaaaatgaaggaagaaaactgaaaaattacatttattt

SEQ ID NO: 145386 - DNA, 201 bp, Homo sapiens
ctagtcccactctccacgccagcagcaacatagtgtgtgtgtgtgtgtgtgtgtgtgtgtgtgtgtgtgtgtgtgtgtatgtgtgtgtgtgtgtgtgtgtstgtctgtctactagtattcataaaaacatactatgtgccttatcagctcaggcagtagaggaggccaaagcagcataggacataatctatgccagggaat

SEQ ID NO: 145387 - DNA, 201 bp, Homo sapiens
agttcccagggtctgataatgtcttgagtatgtggactgatggaggagggatcagagtgacacccatatttctgacttgggcattcagtcattttaaaaaygtgaagtttgagtgagtatgtaacattttcaactttttttgaggaagacattcttaaacttatgcattctagaagagaatatttagtgctttccatgttg

SEQ ID NO: 145388 - DNA, 201 bp, Homo sapiens
ttatttgtggcttatacattccccaaaaagatatatggaatttaacagtaagtattaaataagctcttatgattttaggaggaagaaaaaattgagaatgktgcatgtaagtcctgggctaacagaaaaataatttatactacttttgaaatgagaaataatatctttttttcttttaggtcgaacaagtaaaattacttg

SEQ ID NO: 145389 - DNA, 201 bp, Homo sapiens
attgagcatatacagtgtgtttcatatcactattctagatattttggaaacaatagccaataataacaggtacaaattctatcctcatggagccaacattstagtgctgaaagatattgataacatcaccaataagtaggtagataagtaaaatacatagtgataagtgctaagcagaaaaagaagtaggaaaggtggtta

SEQ ID NO: 145390 - DNA, 201 bp, Homo sapiens
ggcatcttgtgtgctatggggccaaatttttatcattgggacaaatttcagagtcccttcttctttttattaacatagttaaacaaccagttcatataggrtcctgaaactaaaataattaaaatcctcagtggtaatagctaacgttacttttaatttttgttatagcgtcgcatgcagagctggtgggctacacaaaag

SEQ ID NO: 145391 - DNA, 201 bp, Homo sapiens; identical to SEQ ID NO: 26813

SEQ ID NO: 145392 - DNA, 201 bp, Homo sapiens
ccaaagtctttttttcttttttttcatttactttttggctgtgatgatacctataatttaaggatcctaatagtttcttagtacttcagtgttagtgaccrgaaagaattgtagttgcttcctaaacatctgacttaatacatttccaagaacagactggggaaaatctgtagcaacatctgtaaaatacttttagttcct

SEQ ID NO: 145393 - DNA, 201 bp, Homo sapiens; identical to SEQ ID NO: 26817

SEQ ID NO: 145394 - DNA, 201 bp, Homo sapiens; identical to SEQ ID NO: 26816

SEQ ID NO: 145395 - DNA, 201 bp, Homo sapiens; identical to SEQ ID NO: 26818

SEQ ID NO: 145396 - DNA, 201 bp, Homo sapiens
ccacagtgtctattgttatgtagttgtagaataagtacaactgttggtcacagaagtctgaagaaggccattggtcccttcctgtcccagaggccacttttcctcagggataaagaggtgtctgaattttctgaatgtgattctgtttgtgtgactccctgtgtttttcatttggaatcttttcttcttttttttcttttc

SEQ ID NO: 145397 - DNA, 201 bp, Homo sapiens; identical to SEQ ID NO: 26819

SEQ ID NO: 145398 - DNA, 201 bp, Homo sapiens
aaatgattctgagagtcctagatgagtgcctggctatagggaaggagtgcgacaagccagaggaacagtgatggtgcactttctgcttcagtagccacagygtctattgttatgtagttgtagaataagtacaactgttggtcacagaagtctgaagaaggccattggtcccttcctgtcccagaggccacttttcctcag

SEQ ID NO: 145399 - DNA, 201 bp, Homo sapiens
ctacttgggtggctgaggcatgataatcacttgaacccaggagatggagattgcagtgagccgagatcgtgccacggcatccagcctgggtcacagagcarcactctgtctcaaaaaaaaaaaaagaaaaaagaaaaaagaaaaaagaagagggcgagcaagcagaggaggagaagccggatgcatttggaagaggtgaag

SEQ ID NO: 145400 - DNA, 201 bp, Homo sapiens
agtgtcagcgtagcaagttgtctgtgtactgaaatgtgctgttcttgcatttaataaggtttaaaggtttttaaagtggttttgaactaagaatacaatgrttatgttttgtttgatatttacagatttgtgaaacttaccccagagaactttatgttccccggatagcaagcaaaccaataattgttggtagttccaagt

SEQ ID NO: 145401 - DNA, 201 bp, Homo sapiens
tctaccaactgatgaacttttcttcaagtaatgctctgattttgacttatctttacacagtggtctcatgctagtggtttaataaggcctttttagagactaagaaatttctgatgaattgtctattaaaactacttttcaaatatgctcctttattactttgggttgtttttctagtattggatcactactctggagtaa

SEQ ID NO: 145402 - DNA, 201 bp, Homo sapiens; identical to SEQ ID NO: 26820

SEQ ID NO: 145403 - DNA, 201 bp, Homo sapiens
tttgtattctgtagcaaaatatgaagatctctatgcattttcttataatcccaaacaaaatgattcagaacgactacaaggctggcagctcattgatctcrctgaggaatataagaggatgggagtgccaaactcacactggcagttgtctgatgccaaccgggactacaaggtaccttaacaacattttggagaaattca

SEQ ID NO: 145404 - DNA, 201 bp, Homo sapiens
gcggatcacttgaggtaaggagttcgagaccagcctggacaacctggcaaaaccccatatctactaaaaatacaaaaattagccgggcatggtggcaggcrcctgtaatcccagctactcagaggctgaggcaggagaattgcttcaaccggggaagtggagattgcagtgagccaagatggcaccagtgcactccagcct

SEQ ID NO: 145405 - DNA, 201 bp, Homo sapiens
cagatctgattttcaggtccctatggctctcagaatgatcaatgccctaggcttgttctgaagtaaactcataggttcattctgtaaaaggaaagtccccyagccagctctgctcaactgaatcatttagaaattagataggagacatttctttctttttaattttaaaatattacaaacatatggaaactgcctaaaata

SEQ ID NO: 145406 - DNA, 201 bp, Homo sapiens
gtggctgctgtattagacagtacaattctaatggttttgcaaaaaaaatgttattagatagatattcttgagtagtcagtacaataaatactaatttgtartaatgttcatttaaatattccagtcatagtatagaatttaaaaaattaaaatataagatgatttttagttagatgcttgtgctacaatgttttttaagag

SEQ ID NO: 145407 - DNA, 201 bp, Homo sapiens
gatattcttgagtagtcagtacaataaatactaatttgtagtaatgttcatttaaatattccagtcatagtatagaatttaaaaaattaaaatataagatkatttttagttagatgcttgtgctacaatgttttttaagagattggagcatttttgtaagcacgggaataatagaaaaatatatccaagaatcagttattg

SEQ ID NO: 145408 - DNA, 201 bp, Homo sapiens
ttcagtcaatggcactaaagggctttctgtcaatgatttctactccggtttggagagctcgggatggcttcgccatatcaaagctgttatggatgctgcartcttcttggccaaagtaatactttatctttcatatttggtcttggggtctataatgattgggaaggagtagatgtattctgttgggggctggtatctatt

SEQ ID NO: 145409 - DNA, 201 bp, Homo sapiens
tctgccagcttttagaacctccactttatagatgaagaagctgaagctcaggcaagtggcaattcattcattgttacacaggcagtgtagagtagtaaaakgagctcacgtagactgtgttgtcaggtagctttgggttcaaatgtcagctctgctgttcactgcttgggtgactatgtcagggtgcttttggctgtaagt

SEQ ID NO: 145410 - DNA, 201 bp, Homo sapiens; identical to SEQ ID NO: 26810

SEQ ID NO: 145411 - DNA, 201 bp, Homo sapiens; identical to SEQ ID NO: 26811

SEQ ID NO: 145412 - DNA, 201 bp, Homo sapiens; identical to SEQ ID NO: 26812

SEQ ID NO: 145413 - DNA, 201 bp, Homo sapiens
caaaaagatatatggaatttaacagtaagtattaaataagctcttatgattttaggaggaagaaaaaattgagaatggtgcatgtaagtcctgggctaacrgaaaaataatttatactacttttgaaatgagaaataatatctttttttcttttaggtcgaacaagtaaaattacttgaccgattcagtaccagcaacaag

SEQ ID NO: 145414 - DNA, 201 bp, Homo sapiens
caggtgtgcaccacgatgcccagctgattttttttttttttttttttttttttgcagagtcttgctcttgtgcccaggctggagtgcagtgatgcaatttyggctcactgcaacctccacctcctgggttcaagcgattctcctgcctcagcctcccgagtagctgggattacaggtgcctgcccagctaatttttgtatt

SEQ ID NO: 145415 - DNA, 201 bp, Homo sapiens
cttctggatgcccccttgtgatacagtgcaagaacttcagaactgtgcatttcattgttcccagagaaagagattgccatgatatttacaactctttgctwcaactgtcaaaacaaggtattgttcttagagaccaaagcttacatgctcaatttgagatgggttatctaagatactttatttaatgtttttttattgtta

SEQ ID NO: 145416 - DNA, 201 bp, Homo sapiens
ctactcagaggctgaggcaggagaattgcttcaaccggggaagtggagattgcagtgagccaagatggcaccagtgcactccagcctgggcaatagagcgrgactcagtctcaaaaaaaaaaaagaaagccgggtggggtggtatgtacctgtagtcccagctactcgggaggctgagatgggaggatggcttgagcccac

SEQ ID NO: 145417 - DNA, 201 bp, Homo sapiens
ctttcgttgcctcatcaaccggaaaaccgtcttcaaattaacattatgatgctgtgtaagcttgtccttgctcacatttcattgtcccgtgtcacagattsacagtacgagttttggaggaaccgagatcagcactccgctccacctccctttgctgtctcggtctccagtctttcgcatccggtgtttccgtgtctgtgc

SEQ ID NO: 145418 - DNA, 201 bp, Homo sapiens
caataagctttagatttaaataattttttttcctaaaatgttgcaatggaaatattcagtattttctccctcatttttatctaacaaatgtaaataatgtrataaaacaatgcacaaataagagtacttaaaattaaattctgaaggaaaccttctatttaaaacacctgcattagtaagtgtaataacatattaggcatg

SEQ ID NO: 145419 - DNA, 201 bp, Homo sapiens
taagttgacatcattggagtatttatacttgaattttctcaaacacaatttattgaaacttttttttgtcataaaggttttggaggaacatgtaccatcartttgatcgaacactgcatcctaggcagtctgtatttaatataattatgaatatgaatgagcaaaataaacaattagagaaagatattaaagacctagaat

SEQ ID NO: 145420 - DNA, 201 bp, Homo sapiens
cttcaaaatcaggtcatccctactttgattgaatacgttagttcgaatcactttctttgtattttaaaatacattaaaataccggaagtatatagcataaygtatagataaacataataactatctgtgtacccaccagctagcttttgtgggattttaacatttactatatatgcctcagatctttcttgttcttgtttt

SEQ ID NO: 145421 - DNA, 201 bp, Homo sapiens; identical to SEQ ID NO: 26823

SEQ ID NO: 145422 - DNA, 201 bp, Homo sapiens; identical to SEQ ID NO: 26824

SEQ ID NO: 145423 - DNA, 201 bp, Homo sapiens; identical to SEQ ID NO: 26825

SEQ ID NO: 145424 - DNA, 201 bp, Homo sapiens; identical to SEQ ID NO: 26826

SEQ ID NO: 145425 - DNA, 201 bp, Homo sapiens
taagagcgaaactccgtctcaaaaaaaaaaaaaagaattatctggctggacatggtggctcacacctgtaatcccagcactttggaaggctaaggtgggtrgatcacctgaggtcaggagtttgagaccagcctggccaacatggcaaaaccccgtctctactaaaaatacaaaaaattagctgggtgcgatggcaggcgc

SEQ ID NO: 145426 - DNA, 201 bp, Homo sapiens
cagcctgggtgacagagtgagactccacctcaaaaaaaaagaaaaagaaaaagaaagaaagaaagagagagagaggggaaggaaggaaggaaggaagggaaaggaaggaaggaaggaagaaagaaagaaagaaagaaaaagaaagaaaagaaaagaaaaaaaaaagaaaagaaaagaaaaaagaaaagaaaaaagaaagaa

SEQ ID NO: 145427 - DNA, 201 bp, Homo sapiens
agcctgggtgacagagtgagactccacctcaaaaaaaaagaaaaagaaaaagaaagaaagaaagagagagagaggggaaggaaggaaggaaggaagggaaaggaaggaaggaaggaagaaagaaagaaagaaagaaaaagaaagaaaagaaaagaaaaaaaaaagaaaagaaaagaaaaaagaaaagaaaaaagaaagaaa

SEQ ID NO: 145428 - DNA, 201 bp, Homo sapiens
gcctgggtgacagagtgagactccacctcaaaaaaaaagaaaaagaaaaagaaagaaagaaagagagagagaggggaaggaaggaaggaaggaagggaaaggaaggaaggaaggaagaaagaaagaaagaaagaaaaagaaagaaaagaaaagaaaaaaaaaagaaaagaaaagaaaaaagaaaagaaaaaagaaagaaag

SEQ ID NO: 145429 - DNA, 201 bp, Homo sapiens
tttagtagacacgtggtttcaccatattggccaggctggtcttgaactcctgacctcaggtgagccacctgcctcagcctcccaaagtgctgggactgcasgcacgagccattgcacccagactgcacatcttaaaaaaaaaaaagaaaaaaagaaaaaagtcatatgtggcccagtatggtggcatgtgcctctagtccc

SEQ ID NO: 145430 - DNA, 201 bp, Homo sapiens
cctgggtgacagagtgagactccacctcaaaaaaaaagaaaaagaaaaagaaagaaagaaagagagagagaggggaaggaaggaaggaaggaagggaaaggaaggaaggaaggaagaaagaaagaaagaaagaaaaagaaagaaaagaaaagaaaaaaaaaagaaaagaaaagaaaaaagaaaagaaaaaagaaagaaaga

SEQ ID NO: 145431 - DNA, 201 bp, Homo sapiens
tgtgcataatcactgcactccagcctgggcaacacagtgagaccccattgctaattttaaaaaataagaaaaaggaaaaaaagccatatgtggccattggmtaccatattagacagtacagtcctaaatggatgtcactctgctggacaggtgtctgagaaagccctctggctgggcgtgcagccaggcaaagtggcagga

SEQ ID NO: 145432 - DNA, 201 bp, Homo sapiens
agagagagaggggaaggaaggaaggaaggaagggaaaggaaggaaggaaggaagaaagaaagaaagaaagaaaaagaaagaaaagaaaagaaaaaaaaaagaaaagaaaagaaaaaagaaaagaaaaaagaaagaaagagatgggtggagaagttgctggtttggtcccagtgggaggtctatgctgattcctgggttcct

SEQ ID NO: 145433 - DNA, 201 bp, Homo sapiens
gagaggggaaggaaggaaggaaggaagggaaaggaaggaaggaaggaagaaagaaagaaagaaagaaaaagaaagaaaagaaaagaaaaaaaaaagaaaagaaaagaaaaaagaaaagaaaaaagaaagaaagagatgggtggagaagttgctggtttggtcccagtgggaggtctatgctgattcctgggttcctccacc

SEQ ID NO: 145434 - DNA, 201 bp, Homo sapiens
aagaaagaaagaaaaagaaagaaaagaaaagaaaaaaaaaagaaaagaaaagaaaaaagaaaagaaaaaagaaagaaagagatgggtggagaagttgctgrtttggtcccagtgggaggtctatgctgattcctgggttcctccaccttgttccagggcaccaaagcccagttcagctgcttcaaccccaagtgcctcctg

SEQ ID NO: 145435 - DNA, 201 bp, Homo sapiens
tcccccactcagtgagagtgtcacctggattgtgctccgggagcccatctgcatctctgaaaggcaggtgagtcctctcagaggaccagatggagggacakggcactcagggctcaccccaggcagtgtgactctccaactagcaccccacagcccgtgatcccaccttcaaggttcctccccattttttactaataaatg

SEQ ID NO: 145436 - DNA, 201 bp, Homo sapiens
ggaaggctgaggtgggcagatcacctaaggttgggagttcgaggccagcctggccaacatggtgaaactccctttctactaaaaatacaaaaaattagccrgatgtggtggcaggtgcctgtaatcccagctacttgggaggctgaggcaggagaaatgcttgaacctgggaggtagaggttgcagtgagctgagattgtg

SEQ ID NO: 145437 - DNA, 201 bp, Homo sapiens
aactgctcctcccgccagccgctgctttaagaggctgctccgcggtagcgagcggggccggagccgcagcccgaacgagcggaccgagccgaccgggcagstgcacggctgcggggacggcagcggcatgaccggccaccacggctggggctacggccaggacgacggtaggcacagacctcccccaccgcctctggctcg

SEQ ID NO: 145438 - DNA, 201 bp, Homo sapiens
ccaaagaccctgggaacctcctctggtcttccccactggcagtggcagcagccccaccccgagcgcacactgtgatggaggagactgagctccctggggcrggcagctgacactaccagagagactcaagcaataattagaggtgggcagagctgccctctcggcattacctcttctgcaggctctgccatgcacgcacct

SEQ ID NO: 145439 - DNA, 201 bp, Homo sapiens
aggccacgtgctaagatgaatcagattgggccggctggagccagtgggtggaagacagaggacgcaccaggtggagggcacaacaacgaccagggctcgtrggtgggaaaatactgggccaaggcaggcactggggttgagtgcagggtggagggtctgagctcccagggggtgtactgaaggttatggggaggtcaggag

SEQ ID NO: 145440 - DNA, 201 bp, Homo sapiens
aagcagaagaatcacttgaatcaaggaggtggaggttgcagtgagctgatatagcaccagcctgggtgacagagcaagactctgtctaaaaacaaacaagcaaacaaacaaacaaacaaacaaatcccacaaaacccccagtgtctggagtaagaaccccagctaatgaaccctttaccccctggctagatgaccttgggc

SEQ ID NO: 145441 - DNA, 201 bp, Homo sapiens
cagctactactcccagactcctagccagtgcccaggtcttgcctctttgataagaccgggcaagaaagagggacttctggactgtcctgtcctcctgcttraggaggccacagggccaaagccctaccctggtcacccatcatggaagggaccagtggaactctgagcctggggtgttatctgatccaggagctcacattc

SEQ ID NO: 145442 - DNA, 201 bp, Homo sapiens
actactcccagactcctagccagtgcccaggtcttgcctctttgataagaccgggcaagaaagagggacttctggactgtcctgtcctcctgcttaaggargccacagggccaaagccctaccctggtcacccatcatggaagggaccagtggaactctgagcctggggtgttatctgatccaggagctcacattcaagcc

SEQ ID NO: 145443 - DNA, 201 bp, Homo sapiens
aaagaaaagaaaaaaaaaagaaaagaaaagaaaaaagaaaagaaaaaagaaagaaagagatgggtggagaagttgctggtttggtcccagtgggaggtctrtgctgattcctgggttcctccaccttgttccagggcaccaaagcccagttcagctgcttcaaccccaagtgcctcctgcctgccagccggcactactgga

SEQ ID NO: 145444 - DNA, 201 bp, Homo sapiens
gaaggaaggaagaaagaaagaaagaaagaaaaagaaagaaaagaaaagaaaaaaaaaagaaaagaaaagaaaaaagaaaagaaaaaagaaagaaagagatkggtggagaagttgctggtttggtcccagtgggaggtctatgctgattcctgggttcctccaccttgttccagggcaccaaagcccagttcagctgcttca

SEQ ID NO: 145445 - DNA, 201 bp, Homo sapiens
ggaaggaaggaaggaaggaagggaaaggaaggaaggaaggaagaaagaaagaaagaaagaaaaagaaagaaaagaaaagaaaaaaaaaagaaaagaaaagaaaaaagaaaagaaaaaagaaagaaagagatgggtggagaagttgctggtttggtcccagtgggaggtctatgctgattcctgggttcctccaccttgttc

SEQ ID NO: 145446 - DNA, 201 bp, Homo sapiens
ctggacctacccgggctctctgacgactcccccactcagtgagagtgtcacctggattgtgctccgggagcccatctgcatctctgaaaggcaggtgagtyctctcagaggaccagatggagggacatggcactcagggctcaccccaggcagtgtgactctccaactagcaccccacagcccgtgatcccaccttcaagg

SEQ ID NO: 145447 - DNA, 201 bp, Homo sapiens
gaaggaaggaaggaaggaagggaaaggaaggaaggaaggaagaaagaaagaaagaaagaaaaagaaagaaaagaaaagaaaaaaaaaagaaaagaaaagaaaaaagaaaagaaaaaagaaagaaagagatgggtggagaagttgctggtttggtcccagtgggaggtctatgctgattcctgggttcctccaccttgttcc

SEQ ID NO: 145448 - DNA, 201 bp, Homo sapiens
atggcctggctgtggttggtgtttttttggaggtgagtggtggtttgctggggcctggaggggcatgggaggcctggcactgcccctagttctagaacacrgtgggctctgggctcacactgccctctccctgacagacaggagacgagcaccccagcatgaatcgtctgacagatgcgctctacatggtccggttcaagg

SEQ ID NO: 145449 - DNA, 201 bp, Homo sapiens
tgtgtgtgtgtgcatgggcatgtgttttgctgtggtcctttatgcaaacttgggtctccaacagaggggtttgtgtgtgagagagcatatgcgtgtgtcakatgtagtctgcagggctgtgtgtgtgtttgtacacatgaatgttctgggcctggctgctctgtgtgcacaatggaagatcatagaaagattaatgtgttc

SEQ ID NO: 145450 - DNA, 201 bp, Homo sapiens
cctctttgccctgggattagagtccagattctttcatgataaattcctagacaggagtgctgttcattgaagggattttcgtccttatgactgggccttaygactgggtagagtggtggaatggggcgaggaagaaacctactagagtttcttgtgtaaggaagtattaataactggttccttcctcctccttctcccctc

SEQ ID NO: 145451 - DNA, 201 bp, Homo sapiens
aggcctggctggggctccctcccccacccagaatgcccaggccggagggcgcaggaagccagtgaaaagaggaatgagatggtggggctctgccactcacycactgtgggtcactccagaggtcagacgggttgatgccagcagagtgccaaacacacattgagtgccccgtgaatggcagcacattctgtgtgtgaactg

SEQ ID NO: 145452 - DNA, 201 bp, Homo sapiens
agtgccccgtgaatggcagcacattctgtgtgtgaactgggggaggaggctaaggggtccaaggtcaaggggtgttacggagggagctccctctctaggarcccacactatagggtcccaggtgaggcatgctttggagggtggcatctgcagacctatccaattgcttagcctgcaggctcagccgctcctgcttccagg

SEQ ID NO: 145453 - DNA, 201 bp, Homo sapiens
cattcaagcctagctggggctccctccacctccagatccctttcagctggaaattctatcagtcccaggaggcctcgtgcatggccccagctcactgggtrtcaaggcaagaaagttacaaagccagcacaagtggggccctcagaagaggccatttctgggggaggcggcactggaggcacctgggcctgtccaggaagg

SEQ ID NO: 145454 - DNA, 201 bp, Homo sapiens
agttctgtccctcatgggctactatgcagactaaacaaaatagtctcttcaacctagccctggatcagggtttcagacatggtaggcctaactgtcagtgrtaatgggggtcctgggaggcagggtcccaccctccatgggaaatcgggcaggagcggggaggacagctagatagagagctgtcctctgtcagtcccagac

SEQ ID NO: 145455 - DNA, 201 bp, Homo sapiens
acctatgacttcaaggtccaaccatcttgggccagtaagaggccagtgggaattcgtggcagctccttccaaggcctctttgccctgggattagagtccarattctttcatgataaattcctagacaggagtgctgttcattgaagggattttcgtccttatgactgggccttacgactgggtagagtggtggaatggggc

SEQ ID NO: 145456 - DNA, 201 bp, Homo sapiens
ggctgcatctcaggatgttccccagggagatgctgagcctctcggctgcagatggatcctctgggaggcaggtggtgggcgcctgtgggtgtgtatgcaggtgtgtgtgtgtgtgtgtgtgtgtgtgtgcatgggcatgtgttttgctgtggtcctttatgcaaacttgggtctccaacagaggggtttgtgtgtgagaga

SEQ ID NO: 145457 - DNA, 201 bp, Homo sapiens
gctgcatctcaggatgttccccagggagatgctgagcctctcggctgcagatggatcctctgggaggcaggtggtgggcgcctgtgggtgtgtatgcaggtgtgtgtgtgtgtgtgtgtgtgtgtgtgcatgggcatgtgttttgctgtggtcctttatgcaaacttgggtctccaacagaggggtttgtgtgtgagagag

SEQ ID NO: 145458 - DNA, 201 bp, Homo sapiens
ccctctccctgacagacaggagacgagcaccccagcatgaatcgtctgacagatgcgctctacatggtccggttcaaggtaaagtccctgcccctgacccragcagcccgatggggagagaggaagaggctggctcacaagttgggcccttccagtccttcattctgggagtaaacccttgctgagaccaaggaggagggt

SEQ ID NO: 145459 - DNA, 201 bp, Homo sapiens
ctgcatctcaggatgttccccagggagatgctgagcctctcggctgcagatggatcctctgggaggcaggtggtgggcgcctgtgggtgtgtatgcaggtktgtgtgtgtgtgtgtgtgtgtgtgtgcatgggcatgtgttttgctgtggtcctttatgcaaacttgggtctccaacagaggggtttgtgtgtgagagagc

SEQ ID NO: 145460 - DNA, 201 bp, Homo sapiens; identical to SEQ ID NO: 26841

SEQ ID NO: 145461 - DNA, 201 bp, Homo sapiens; identical to SEQ ID NO: 26842

SEQ ID NO: 145462 - DNA, 201 bp, Homo sapiens; identical to SEQ ID NO: 26843

SEQ ID NO: 145463 - DNA, 201 bp, Homo sapiens
gctaaaacggtgaaaccccgtctctactaaaaatacaaaaaattagccgggcgtagtggcgggcgcctgtagtcccagctacttgggaggctgaggcaggrgaatggcgtgaacccgggaggcggagcttgcagtgagccgagatcccgccactgcactccagcctgggcgacagagcgagactccgtctcaaaaaaaaaa

SEQ ID NO: 145464 - DNA, 201 bp, Homo sapiens
cagggggtaaggggcggtgttgccccctcccgggtcccgcctttctgcccgcctctcatcctctttagccattgggcaatacctctgtccatcaagggccygcctccgcaattgagccaaccagggctggcgggagggcgcttccttctggagctgggtcctgactagggaccgcctgggtgaggtgaggacctggtggcc

SEQ ID NO: 145465 - DNA, 201 bp, Homo sapiens; identical to SEQ ID NO: 26844

SEQ ID NO: 145466 - DNA, 201 bp, Homo sapiens
ttgaggtcccgacaaatgatctcgagatcccgagggcaggattcatacatgaaaagctcattataatgggtcaaggttttgttctgtttttttttttttawtttaatttaatttaatttaatttaatttaatttattatattccaaggaaaagtaccaccagggctagtgaagggactaggaaactcgtcacccccttgag

SEQ ID NO: 145467 - DNA, 201 bp, Homo sapiens
acccctcaggcacctgatgcttaacttgcctcctgggaaataatgatctagcatttacttggaacaatgattaatcatgttctttaataattgctgacatwtgtattttaagctgtataccaatgttcgtatttgacattgattttctaaccattagagatatttaattaaaacttggaaatgaaagaaacaaaatgaaat

SEQ ID NO: 145468 - DNA, 201 bp, Homo sapiens; identical to SEQ ID NO: 26845

SEQ ID NO: 145469 - DNA, 201 bp, Homo sapiens
tacccaggaaagaattcaagggtgagccagtggtaaggtggaagaaaacaacttcattaaagaggcagtgtgacagctccgtgacttttcctgcagagtasggctgctccgcaggcagtgtgctgaaagcagctcagggcagttgtgcagtcagatctatacctacttttaattgcacgcagattaaaggacagtttctga

SEQ ID NO: 145470 - DNA, 201 bp, Homo sapiens
ggcaggagccaccgaggccggacacgtgggcgacttattgaccaagtggggaggaagcagccccgcactgctctcccgactgcggaccaccgttgggctcmtgcgcatcctaagccccaccgcctcacctccagtccccacagcgttcgcgctcccagccggggtaagcggaagaaaacaaaggcccggctccatcagggc

SEQ ID NO: 145471 - DNA, 201 bp, Homo sapiens
aatgccagccagttgtgtatgaactccaaaaggaagggggtacaatgagggctatctgatctcctgtcccgttatttgaaatgctttttccctggtgctgkaaagaaatagcacttgtaggctgggcgccgtggctcacgcctgtaatcccagtacctggggaggctgaggcgggcggatcacgaggtcaagagattgaga

SEQ ID NO: 145472 - DNA, 201 bp, Homo sapiens
taaaaaaatacctgaacctttaattaggggaaataaattggaaaaatacatttcccttcacttaacattatcttagtttctcttttttttttttttttttwttgagatggagtcttgctctgttacccaggctggagtgcagtggtggcgggacctcagctagatgcagcctccgcctcctgggttcaagcaattctcctg

SEQ ID NO: 145473 - DNA, 201 bp, Homo sapiens
ttaaaagtatagccttaatagtgagagaaactctatagcttcataatataaattgggtaactaatgagataaaatggttggcagatctgctcactagaatytaagctcttcaagggtctgagtttttttttttctttttcttttattatactttaagttctagggtacatgtgcacaacgtgcaggtttgttacataggta

SEQ ID NO: 145474 - DNA, 201 bp, Homo sapiens
tcccactcccactcccactcctgctcctcgacgtctcccaccgccgtgtgtgttgtctgcccgcaggactcgctcagcagcagcctgaaaacttgctacargtatctcaatcagaccagtcgcagtttcgcagctgttatccaggcgctggatggggaaatgcggtgagtgatggaggcagcgcctctggcttggaggaaa

SEQ ID NO: 145475 - DNA, 201 bp, Homo sapiens
tgaggcaggagaatcgcatgaacctgggaagtggaggctgcagtgagccaagattgcaccactgcactctagcctgggtgacagagcgagacaccatcttaaaaaaaaaaaaaaatctacaatataccaaaaccattacttacctgagaaactattctcagggtcattgtagtgaatgcctattttatggcttttgatggc

SEQ ID NO: 145476 - DNA, 201 bp, Homo sapiens
gaaaaattcacatttaaactactctgggggctgggcaaggtggctcacgcctgtaatctcaacactgggagaccaaggcaggaagatcactgaagccaggrtatcgagaccagcctggacaacgtagtgagaccttatctcttaaaacaaaacaaaacaaaacaaaacaaaaaaaacagtaaaaattggccgggcacagtg

SEQ ID NO: 145477 - DNA, 201 bp, Homo sapiens
agatgctgagtcttactcctaagaaaaattcacatttaaactactctgggggctgggcaaggtggctcacgcctgtaatctcaacactgggagaccaaggyaggaagatcactgaagccagggtatcgagaccagcctggacaacgtagtgagaccttatctcttaaaacaaaacaaaacaaaacaaaacaaaaaaaacag

SEQ ID NO: 145478 - DNA, 201 bp, Homo sapiens
tcagatagtgttctaggtgctggaggtacaacagtgaacaagctaggtgaagaccttgattttataaaacttactttttagtggaagagagacaatttaaraaagcgaatgtacagtttttcacgtggagaaaagcactgcagaggaagatactagcagggcaagggatctgagtgcagtcagacctcatttgggtccaga

SEQ ID NO: 145479 - DNA, 201 bp, Homo sapiens
gatacagggttcatattcctaatattaaaaaaaacttctaaaagttaagaaaaaggccaactgccccacagaaaaatgggcaaggagataagaacaagatwgttcacaggaagagacacacagatgattattaaaaatctgaaaagatgctgagtcttactcctaagaaaaattcacatttaaactactctgggggctggg

SEQ ID NO: 145480 - DNA, 201 bp, Homo sapiens
gtttcaccgtgttgccaaggctgatctcaaaactcctgacctcaggtgatctgcccgcctcagcctcccaaagtgctgggattacaggcttgagccactgygcccggccttttttttttttttttttttttaattattgagacggagccttgcgctgtcaccgaggctggagtgcactggcactgtcttggctcactgcaa

SEQ ID NO: 145481 - DNA, 201 bp, Homo sapiens
cgctcccagccggggtaagcggaagaaaacaaaggcccggctccatcagggcaccaatcccgctcgtcggcctctttctcggcctccaatgagcttctagrgtgttatcacgccagtctccttccgcgactgattggccggggtcttcctagtgtgagcggccctggccaatcagcgcccgtcagcccaccccacgaggcc

SEQ ID NO: 145482 - DNA, 201 bp, Homo sapiens
tttgtatttttagtagaggtgaggtttcagcatgttggccaggctggtcttgaactcctgaccttgtcatcctcccaccttggcctcccaaagtgctgggmttacaggcgtgagccaccacggccggctgttatgctcatcatggcacttaagagatgcttaacaaacctttcctacaatgttcctcagattttcagagct

SEQ ID NO: 145483 - DNA, 201 bp, Homo sapiens
gtgaggtttcagcatgttggccaggctggtcttgaactcctgaccttgtcatcctcccaccttggcctcccaaagtgctgggattacaggcgtgagccacsacggccggctgttatgctcatcatggcacttaagagatgcttaacaaacctttcctacaatgttcctcagattttcagagcttatttgatctagcatctg

SEQ ID NO: 145484 - DNA, 201 bp, Homo sapiens
ccacaggtccagccggccggtgagcgcctggggaccgcagaggtgagagtcgcgcccgggagtccgccgcctgcgccaggatggagttcgtgaaatgcctyggccaccccgaagagttctacaacctggtgcgcttccggatcgggggcaagcggaaggtgatgcccaagatggaccaggtgggccgagcctccctgcttg

SEQ ID NO: 145485 - DNA, 201 bp, Homo sapiens
gggaggctgaggcaggagaagcacttgaacccagaaggcagaggtggcagtgagccgagactgtgccactgcactccagcctggcaacaagagtgaaattytgtctcaaaaaaaaaaaaaaaaaaaaaaaaaaaaggcgcttgaacattaatttactaagcaggccatttttacttcctgcagaaagggtacactcgccag

SEQ ID NO: 145486 - DNA, 201 bp, Homo sapiens
gctggtcggaattggcctttcccgtcttttctcagcctcagagtttgaagaccccttagttggtgaagatacagaacgtgccaactctatgggcctgtttytgcagaaaacaaacatcatccgtgactatctggaagaccagcaaggaggaagagagttctggcctcaagaggtaacagattcagggtattttgggggaaa

SEQ ID NO: 145487 - DNA, 201 bp, Homo sapiens
ggcccggatctggggcaaggggcgcggcgagcagggccgacgcctgggtgttcccgtccccctttcctcgagccttccccctgtagggcccgggtggacgyggccgtcctggctgacctgtccctgcccccgcaagccgccctgggcatgagcgacttttgcgtggttcccggtggttgcgctccccgtttcgtcccctcc

SEQ ID NO: 145488 - DNA, 201 bp, Homo sapiens
agtagccttttattatagtagcagtacatgtgtattgtagaaatttggaaaatacaagtgaaaaataaaaacatcaaattcccgtcagccagagactgctrtgaaatgttttgagcacatccttcttgaatgttttttaaatcctggtatgtatatttgtattttaaaatcaaaatgcattcttacccattctcttttgaa

SEQ ID NO: 145489 - DNA, 201 bp, Homo sapiens
ttattgggaagaggatttcagcggagcccgagtagagtttggtctagggagactctgtcactgggaggacgagcgagccgctcggaagtgcgctgggttcycttagcggccagtgggttctggtgagaagggcaacagcgggaggaggcgccggtgcggagcgggaggccgggggcggggctgcggggctgcggggcgggc

SEQ ID NO: 145490 - DNA, 201 bp, Homo sapiens
cagaacatagcccggccctacgtgtttactttagaaagcccttccaggctctttgccatctagtagagtccctgcgggcccagcctttcagagaagagggsggagggggtgatgtttattaactttttttagtcttggcagctgaacctgcctgtgagcaggtcgtgtatttctcggcttcccttatccaactttgcattt

SEQ ID NO: 145491 - DNA, 201 bp, Homo sapiens
agtgggttatagttaaaatcctaagatttttaaagtccctcaagttcatgtggacatctgcctaggtcctactatcctagaattcgcatgtcttatcacayaaataactgattcttccatatcttataaataaaggtttgatttagcaaagtcacatgttgtgtaatagctcgaagaagccctttttgtccacagttgcca

SEQ ID NO: 145492 - DNA, 201 bp, Homo sapiens
aacagtccttatgttattgaaacaaacctaatctgtagctgagttgggagggagctaagtggacagagagtcctccacccaaacaaaagaatctttgattyttgggcataatgggagcaatatttaaaaaaaaaaaaaaaaaaaaaaaaaggaatgtttggggaagactcttgcggtgcaaaggctgtttcagattgctga

SEQ ID NO: 145493 - DNA, 201 bp, Homo sapiens
catatataattttaagctacttgagttgtaggtccctccagtctgtgattcagtttgagatgggactgtatgggaattaacagtgccttgtcttcttaagsagtgatttgtgtatgtgctgatatagctcagtatgtctttgaaaccagttgtctggggctaggcctgcaatcagcttttggctaagaggtcccaggatgg

SEQ ID NO: 145494 - DNA, 201 bp, Homo sapiens
acagggaaattacctagtacataatgtactgttatctacattttatctagatgaggaaactgaggcacagagaaattaagtactttgcctaggattacccrtgaagttaagtgacagaatcaatgaatctggaaggtctggcttcagatctcttgtgctgagtcactcgcatactttactacctctaaggtttctaatcag

SEQ ID NO: 145495 - DNA, 201 bp, Homo sapiens
aatgatacttgttacataggaagtgcttgatccatgtttgcacaaatgaatctttctcataatgaggtttctctaaacaagctgttctcccaaaaacttamacccagctttatgttgaagcatctcattatacattggaaagatgaaatgtgtagtgagactttgaatcttcttttgaatctagaaacattagcattttta

SEQ ID NO: 145496 - DNA, 201 bp, Homo sapiens
acaggagtgggacaaggttagtctcataaaacagtgtctgtgtgtgatgtattagacagagctggcagtcctcatagtgaagctcagaacaagaaaagttrtccagtattttcagcccctctggttttacaattcatctgtttaggttgaatgtctcatcataaacagtttattccagagttaattccaaaccagcagcta

SEQ ID NO: 145497 - DNA, 201 bp, Homo sapiens
ggttaggagtcttgcctatttttcataggaatggtgtttgtgagacttactcatcacttctgtggaagtaaagacattttatttatttattttaaagccartcagatttagcaggcagagacatttcagacatctaaagtgttgatgtatttcatacctttaactgtgcttaaattaggatctccgaaaagatgctgctac

SEQ ID NO: 145498 - DNA, 201 bp, Homo sapiens
tgaatagaagttttgatcagataaaattgaattaaaaaaaattttttttgagacagggtcttgctgttatccaggctggtgtgtagtggtgtgatcacggytccccgcagcctcaacctcctgggctcaggtgatcctcccacctcagcctaccgagtagctgtaactacagtgcatgacaccataccaggctcatttttg

SEQ ID NO: 145499 - DNA, 201 bp, Homo sapiens
cagacaaggcagccttgaccttctgggctcaagcaatcttccttgccctcagcctcctgagtaactgggaccacaggcacgttgccaccatgcctggctartttattttaatttttattatttttgagacagggtattgctctgtcacccaggctggagtgtagtggcatgatcaaggctcactgcagccttcacctcctg

SEQ ID NO: 145500 - DNA, 201 bp, Homo sapiens
tgtcacccaggctggagtgtagtggcatgatcaaggctcactgcagccttcacctcctgtgctcaagcagtcctctcacctcagcctccccattagctggractataggtccacaccactacaccaggctaatttttgtaattttttggtagagacagggtttcatcgtgttgcctaggctggtcttgagctcctgggctc

SEQ ID NO: 145501 - DNA, 201 bp, Homo sapiens
ccaagtggtggatatggtaacaacccatgtgcactagcttaacaaaaagttcttaggaatggctttgttcggcctggcgcagtggctcatgcctgtaatcmcaacagtttgagaggccaaggtgggcggatcacctgaggccaggagttcgagaccagcctggccaacatagtgaaaccccgtgtttactaaaaaatacaa

SEQ ID NO: 145502 - DNA, 201 bp, Homo sapiens
gacagagtgagactccctctcaaaagaagaggaagggcttggttcttctgctcagccctgaatcagttactgttgctacacagctgagttctctggcctcrcctggattacgtctacacagtacacacagaatggatttcccccaaagaaagaattctgcggcaggaaggggaaagggatggcaggtagacaaaaactcca

SEQ ID NO: 145503 - DNA, 201 bp, Homo sapiens
aatcagttactgttgctacacagctgagttctctggcctcacctggattacgtctacacagtacacacagaatggatttcccccaaagaaagaattctgcrgcaggaaggggaaagggatggcaggtagacaaaaactccaggtgtctgtaataagggacagggtcgatctttaattaaaacatggacagggaacagaaag

SEQ ID NO: 145504 - DNA, 201 bp, Homo sapiens
caggacttgatgaatgattttgaaggggtggatataaggagagaaagggcgttatcaatgacacctggattttgtgattacaaaactgagaggctgttaaygctatccacaggagaagcagatttaatggaagagagatttaaagaatgggcacgttaactaactttgcattgtttaggcaccatcgtgtcctatacgcag

SEQ ID NO: 145505 - DNA, 201 bp, Homo sapiens
agcgacttttgcgtggttcccggtggttgcgctccccgtttcgtcccctccgtgagcatcggcgcttaccggtattttaacccgagggttacacatctgasgcaatgtgggtgggttacgcgggagaggacgagtgagttttttggtaagcggaatgaactatgcagataacatcacatgaaggccgtttctggaatgaag

SEQ ID NO: 145506 - DNA, 201 bp, Homo sapiens
ctgtctctcacacacactcaaaaaaaaaaaaaaaaaaaaaagaaacaaacaaaaaaaacggtgggggaggggaacagataaaggagaggccaggaaacacyagaaaaggattcctgaagcagattccacctgagctgtaatggaggcgtggcaggtggctaggcaaggagcaggaagcctattccaggcaggtgaattgct

SEQ ID NO: 145507 - DNA, 201 bp, Homo sapiens
acatatagtatgtgggcctccatttgtcctcttatcccaggccttgcagaatttaggaataagcctcaatacagtgttctaacccagtgacttccgcctcratgtacagtagattgaacctgatcctttatactttagtgatcattagttgataccagttcaagtcaggctttctagaaatctcattgtatgttaggggtt

SEQ ID NO: 145508 - DNA, 201 bp, Homo sapiens
ccaaggtcttgggcctcttaatttttcaaacctcaaaacttgacagcagttatctttggaactgctgatttgtgcttcctaagttaacagcatacaatgaytgctagaaatcaatttctgcatttaaggtgaagttagccgggtactatggtttacctgtaatctcagcactttgggaggctgaggtgggaggatcatttg

SEQ ID NO: 145509 - DNA, 201 bp, Homo sapiens
aaaattacccaggcgtggtggttgggcgcctgtaatcccagctactcgggaggctgaggcaggagaagcacttgaacccagaaggcagaggtggcagtgarccgagactgtgccactgcactccagcctggcaacaagagtgaaattctgtctcaaaaaaaaaaaaaaaaaaaaaaaaaaaaggcgcttgaacattaattt

SEQ ID NO: 145510 - DNA, 201 bp, Homo sapiens
gtggctttagacatttcataaatatttcttaaatgcctcctaaatgctaggatttggcaatacaaggctaaacaaaatacaaagccaaatcctactgtaaygggagtatgtaaagtgtttctgttaatggaaaaagtgctgtgtgaggatgggggttaagtgactggactgtttgtgttctgagctttctaggactgatct

SEQ ID NO: 145511 - DNA, 201 bp, Homo sapiens
ctaggtattcgggaggctaaggcacaaggatcccttgagcgcaggagctcaaggttggattgagttgtaatcacaccactgcactccagcctcggtggcasaatgaaactgtctcaagaaaaaaaaaaagtgacagagggaaacaatatttgcaattcatagagcagatacagggttcatattcctaatattaaaaaaaac

SEQ ID NO: 145512 - DNA, 201 bp, Homo sapiens
ggagaccaaggcaggaagatcactgaagccagggtatcgagaccagcctggacaacgtagtgagaccttatctcttaaaacaaaacaaaacaaaacaaaamaaaaaaaacagtaaaaattggccgggcacagtgactcctgcctataatcccagcactttgggaagcccaggtgagtggatcacttgaggtcaggtgtttg

SEQ ID NO: 145513 - DNA, 201 bp, Homo sapiens
cacagtgactcctgcctataatcccagcactttgggaagcccaggtgagtggatcacttgaggtcaggtgtttgagaacagcctggccaacatggcaaaaytccgtctctactaaaattacaaaaattagccaagtgtggtggcatacgctggtagggccagctacttgggaggctgatgtgagactccatttaaaaaaaa

SEQ ID NO: 145514 - DNA, 201 bp, Homo sapiens; identical to SEQ ID NO: 26861

SEQ ID NO: 145515 - DNA, 201 bp, Homo sapiens
aaaattagctgggtatagtggcacacccctatagttctcgctccttgggaggttgaggcaggaggattgcctgagcccaggagttcaaggctgcagtgaaycatgatcacaccactgcattctagcagcctgggagacagagcaaaacccttgtctcaaaacaaacaaacaacaacaaaaaaacaaaaaacacttccctca

SEQ ID NO: 145516 - DNA, 201 bp, Homo sapiens
gtgtgcagccagggttgagaaaccactcttgtcttacccctcttttgcagacacagggctcagagaagggaaggggattgtctggggatgtatagtgaggsagtggctgccttggaagtggagtctcagtctcccggctcctaggccagcccctgaccactgttccattgtctcccagacagaacatcagccacgggcatg

SEQ ID NO: 145517 - DNA, 201 bp, Homo sapiens
gctcctccatgctggggcattgcatcactgctttattcctttttatcgcctagtattattccactgtgtggatagaccacatttatccattcatcagttgraggatatttgggttcttcccattttttttggctatggtgaatagtactgtgtacatttgcatataaggttttgtgtagatgtgtgttttcctttttcttg

SEQ ID NO: 145518 - DNA, 201 bp, Homo sapiens
tcccagatgtcatcacctacctttcgagactcagaaaccagagtgtgtttaacttctgtgctattccacaggtagggaacggggctcctctgggtggatayggggctaaagggagtggggtaggagtaagggtggattttgctgtgctatattcaaggatatgattccttaaaaagacgatgactccagtttattacgctg

SEQ ID NO: 145519 - DNA, 201 bp, Homo sapiens
tttattacgctgggagtttcatagcacccgcctttgcttccagccaccaaactcagctcagccttgaggttaagcctgctccttttcagaaccttctttcyggatttactattttctacagctatcctaaactagttaggttcttttcctcacagttaagtcaaggtctttggcttagatttatggggagtgctgggtaaa

SEQ ID NO: 145520 - DNA, 201 bp, Homo sapiens
agcctggacaacgtagtgagaccttatctcttaaaacaaaacaaaacaaaacaaaacaaaaaaaacagtaaaaattggccgggcacagtgactcctgcctrtaatcccagcactttgggaagcccaggtgagtggatcacttgaggtcaggtgtttgagaacagcctggccaacatggcaaaactccgtctctactaaaat

SEQ ID NO: 145521 - DNA, 201 bp, Homo sapiens
acacctaagtcagactgagggagctggattaggggctctctaacaaatagcaccatcacataacatgtctgtttcttcctctgcattgtaagctccttggstgtggaaccttatcttactcatctttgttttttcccatgtctcctgccacattgtagatgttcagccaatgtttgttgcatttaaagaacagataaagaa

SEQ ID NO: 145522 - DNA, 201 bp, Homo sapiens
atttggtcggctgtctgaaccccacctctggagtcgaatctcgccttctatctcattttgagttccttggactgcctgcagcagcggttgtttaagccatrgttctgttatatagtgtctggctgttatccattcgtatgttcagcttccaagtggacacctaagtcagactgagggagctggattaggggctctctaaca

SEQ ID NO: 145523 - DNA, 201 bp, Homo sapiens
acctgggccagcagccgccgtgcttgatttctcaacaggccttagctgcctccccgcggggcagggctcgggacctgcagcccgccatgcctgagcctccsccgcgccgccgccgtgggctcctgcgcggcccaagcctccccgacgagcgccaccccctgttccacggcgcccagtcccgtcgaccgcccaagagctgag

SEQ ID NO: 145524 - DNA, 201 bp, Homo sapiens
gaggcagtgtgacagctccgtgacttttcctgcagagtagggctgctccgcaggcagtgtgctgaaagcagctcagggcagttgtgcagtcagatctatayctacttttaattgcacgcagattaaaggacagtttctgaagacatctgtaggaaaagggtagtaacttctgggttgttgggtcattgccatggaaagggg

SEQ ID NO: 145525 - DNA, 201 bp, Homo sapiens
tcaagaggtaacagattcagggtattttgggggaaaataactttagacattctctgaaaaatcctttaactcttgtggttgcgggtgacagaaaaacaagycaggcctcccccaggcagcataaggggatgtggaaaataggatagattgacatgagtttgcttcaggtagactggctgactcccaggattcacaccacgt

SEQ ID NO: 145526 - DNA, 201 bp, Homo sapiens; identical to SEQ ID NO: 26855

SEQ ID NO: 145527 - DNA, 201 bp, Homo sapiens
atatttgtattttaaaatcaaaatgcattcttacccattctcttttgaacctgcttttttgtagctaatgatctctagtgtgtccatttcagtaaaaattscattattaaagtgctttaaaaatcgtctcttacagtactgccactatgttgctgggctggtcggaattggcctttcccgtcttttctcagcctcagagtt

SEQ ID NO: 145528 - DNA, 201 bp, Homo sapiens
tatatttgtattttaaaatcaaaatgcattcttacccattctcttttgaacctgcttttttgtagctaatgatctctagtgtgtccatttcagtaaaaatkccattattaaagtgctttaaaaatcgtctcttacagtactgccactatgttgctgggctggtcggaattggcctttcccgtcttttctcagcctcagagt

SEQ ID NO: 145529 - DNA, 201 bp, Homo sapiens
  misc_feature (1)...(201): n = A,T,C or G
tgccaccaatatgccagctgtcaaagccatcatatatcagtatatggaagaggtgggtttttatttaactacttggataatttgtagctacttttatgatntagtaatgtcactgtttaaccaggtttggatattagatgatcctaacaattcactatcctgtggcctaaagagacaggaattgatatcctttataaggaa

SEQ ID NO: 145530 - DNA, 201 bp, Homo sapiens
taagagcataaaagcgggctgccttaaaaaaaacggtggcaacacgctgggtttgctttacaacgcctgggaagctttgttgtttgcaataaattttaatwcttgtctgtttcggtctgcactgcctttatgagctgtaacactcacggggtaggtttgcagcttcactcctgaagccagtaagacaacgaacccactggg

SEQ ID NO: 145531 - DNA, 201 bp, Homo sapiens
atttcctaaattttctttggaaaatttcatttcaaataccaaaaccatcctataaaaagaaaacttaccttcttaggtcaaatctctaatatttgactagrttcaaaaagtttatttctggccaggcacagtagcttactcctgaaatcccagcactttgggagaccaaggtgggaggatcacttgaggccaggaattcaa

SEQ ID NO: 145532 - DNA, 201 bp, Homo sapiens
agggtgtgggtggggccagataagagcataaaagcgggctgccttaaaaaaaacggtggcaacacgctgggtttgctttacaacgcctgggaagctttgtygtttgcaataaattttaatacttgtctgtttcggtctgcactgcctttatgagctgtaacactcacggggtaggtttgcagcttcactcctgaagccagt

SEQ ID NO: 145533 - DNA, 201 bp, Homo sapiens
ttatgaaaacatacaagaccctcatcatttttcctttgcctgagctccctccccagaggttacctctgttcatggttttgtgcatccgtctagtccccctrttacgcgtttacaggaatatggtttgcaacagtgttttcatctaaatagaattatacaaaatagcgatttctgatttctcttgcatattgcacattcttc

SEQ ID NO: 145534 - DNA, 201 bp, Homo sapiens
cataatttgaacccaggtctgtctgacatcagaatccatgatgttaaccccaattctaaggggttcaactaccctttctaaatggaatcctgctatattargcactatttattcattttatataaactagaaacattttatgtagtaagtagttgagagtgttttggttttgcagtttgatcactagttttagaaaccagt

SEQ ID NO: 145535 - DNA, 201 bp, Homo sapiens
ctaaaaatacaacatttagccaggtgtggtggtgcacacttgtcatcccagctattccggagcctgagacatgagcatcgcttgaactcgggaggtggagkttgtagtgagctgagatggcaccactgcactccagcctgggcaacagggtgaaggccctttctcaaacccctcaagtatttggcttcaactttatgccgg

SEQ ID NO: 145536 - DNA, 201 bp, Homo sapiens
catgagcatcgcttgaactcgggaggtggaggttgtagtgagctgagatggcaccactgcactccagcctgggcaacagggtgaaggccctttctcaaacycctcaagtatttggcttcaactttatgccgggcatgtagatgaaaagtcggctatgacctgtccttgacaagcagatgtaactccttgattgaggctagt

SEQ ID NO: 145537 - DNA, 201 bp, Homo sapiens
gtttttaagacctgaataattgagtttgcagaaacctactgtgtgccttcaggtaaatggagagtggggtttggtctagcaacgaagcatctagaaggtcyctttggccttaccggctctgttttaggtaagtccacgtctgagtaccagtgactgcagctcttccagttgtgctgtcatgcttatatgttagaaatgatc

SEQ ID NO: 145538 - DNA, 201 bp, Homo sapiens
acgaagcatctagaaggtccctttggccttaccggctctgttttaggtaagtccacgtctgagtaccagtgactgcagctcttccagttgtgctgtcatgyttatatgttagaaatgatcatcaaaggactcaaaagttttgccactaattgtattaccggggactgtcacaaccaagatttctcttaatttattcacctt

SEQ ID NO: 145539 - DNA, 201 bp, Homo sapiens
aaacggacaaatcagctctctgtaaaacagaccaatcggctttctgtaaaatggaccaatcagcagggtgtgggtggggccagataagagcataaaagcgsgctgccttaaaaaaaacggtggcaacacgctgggtttgctttacaacgcctgggaagctttgttgtttgcaataaattttaatacttgtctgtttcggtc

SEQ ID NO: 145540 - DNA, 201 bp, Homo sapiens
aaaaaaaaaaaaaaaaaaaaaaaaaaaatacaaaagttagttgggcatggtggcaggtgcctgtaatcccagctacttgggaggctgaggcaggagaatcrcatgaacctgggaagtggaggctgcagtgagccaagattgcaccactgcactctagcctgggtgacagagcgagacaccatcttaaaaaaaaaaaaaaat

SEQ ID NO: 145541 - DNA, 201 bp, Homo sapiens
ttgcttgtacagttgctctgagaaggtaagtcttaaattttcaaaagtgaaatgtcaccgagcatggtggcttatgcctctaatctcagcactttgggagrctgaggcaggcggatcacttgaggtcaggagttcgaaaccagcctgacttatgtgatgaaaccctgtctctactaaaaaaaaaaaaaaaaaaaaaaaaaa

SEQ ID NO: 145542 - DNA, 201 bp, Homo sapiens
ctgagaggtcgaggctacagtaagctgtgtgatttcatcattgcactctagcctgggtgatagagtgagactttgtctcaaaaaaaaaaaaaaaaaaaaargtcttagagaccagaagtctctgtaatctctaataatctctaggccctagagcagtggtttgtaaatggaggtgatttgctcccctccccccagaggaca

SEQ ID NO: 145543 - DNA, 201 bp, Homo sapiens
taaattttcaaaagtgaaatgtcaccgagcatggtggcttatgcctctaatctcagcactttgggaggctgaggcaggcggatcacttgaggtcaggagtkcgaaaccagcctgacttatgtgatgaaaccctgtctctactaaaaaaaaaaaaaaaaaaaaaaaaaaaaaaatacaaaagttagttgggcatggtggcag

SEQ ID NO: 145544 - DNA, 201 bp, Homo sapiens; identical to SEQ ID NO: 26875

SEQ ID NO: 145545 - DNA, 201 bp, Homo sapiens; identical to SEQ ID NO: 26876

SEQ ID NO: 145546 - DNA, 201 bp, Homo sapiens
aggagtggtatgagactggaacagaggtgtgcagcagcatcgcatgggcgaaacaacagtagacagttgttcttttgtttttgtttgttttttgagacagsgtcttgttctgtcatccaggctggagtgcagtggcatgatctcggatcactgcaacctccacctcccaggctcaagtgatcttcccaccccagtccccaa

SEQ ID NO: 145547 - DNA, 201 bp, Homo sapiens
ctggctgaacctggagctgcagacaggttttctagaaggcataatcctgaagttgagacttgggggcctaggtaggagccagttgaagggacgtgggaggygcattccagagagaaggagtggtatgagactggaacagaggtgtgcagcagcatcgcatgggcgaaacaacagtagacagttgttcttttgtttttgttt

SEQ ID NO: 145548 - DNA, 201 bp, Homo sapiens
acctccacctcccaggctcaagtgatcttcccaccccagtccccaagtagctgggggaccacaggtgcatgccacgatgcccggctaatttttgtacattytgtagaaacagggttttactgtgttgtccaggctggtcttaaacgcctgagcttaagcagtctacatgcctcagcctcctgaagtgctgggattccaaac

SEQ ID NO: 145549 - DNA, 201 bp, Homo sapiens
gcatgccacgatgcccggctaatttttgtacattttgtagaaacagggttttactgtgttgtccaggctggtcttaaacgcctgagcttaagcagtctacrtgcctcagcctcctgaagtgctgggattccaaacatgagccactgtgcctggcccggcaactgttactagactatagagagggaggtgggcaagggctgg

SEQ ID NO: 145550 - DNA, 201 bp, Homo sapiens
taaacgcctgagcttaagcagtctacatgcctcagcctcctgaagtgctgggattccaaacatgagccactgtgcctggcccggcaactgttactagactrtagagagggaggtgggcaagggctggtgacactagacaggtgcagtaggtctggaccatgggtggccttgcgctacacattacagagctcaggctttttt

SEQ ID NO: 145551 - DNA, 201 bp, Homo sapiens
tctgagcctccctttcctcattggtaaaatgggtataaaatacctgccagtggagggttgttgtaagtagccatggaaaatgtaaagcacatagcacttaycattttttcctgtgtctttaacagatttatcatagaatccccgactcagacccatcttctagcaaaacaaggcagatcatctccaccatccggacgcaga

SEQ ID NO: 145552 - DNA, 201 bp, Homo sapiens; identical to SEQ ID NO: 26869

SEQ ID NO: 145553 - DNA, 201 bp, Homo sapiens; identical to SEQ ID NO: 26853

SEQ ID NO: 145554 - DNA, 201 bp, Homo sapiens
ggactcaaaagttttgccactaattgtattaccggggactgtcacaaccaagatttctcttaatttattcaccttacttatctcctggaagggcatattgragtgctcttggagttctctaaaagggtttttgttggttgtgtatattcacttgggtgccagcgattgattccaaataagtaaatcttttttcccaaaagg

SEQ ID NO: 145555 - DNA, 201 bp, Homo sapiens
ttgggcttggcaggtgatcaaattcgaggtcatgatgaccttcaggagagcactgtgtgcagagtgccagcagtgggaagggaccgggtgggagggaggaygtggaatgtgagggtggtctcccctgcaggaagtttggccttggaggggatgaaaatgaagggcagggaggagtcgcgagcgaacaagcaggagggtgtt

SEQ ID NO: 145556 - DNA, 201 bp, Homo sapiens
atcccatttgtctagtttggcttttgttgccattgcttttggtgttttagtcatgaagtctttgcccatgcctatgtcctgaatggtattgactgcatttycttctagggtttttacggttttaggccttatatttaagccttcagtccatcttgagttaatttttgtataagatgtaaggaagggatccagtttcagctt

SEQ ID NO: 145557 - DNA, 201 bp, Homo sapiens
ttaaagtagttttttccaattctgtgaagaaagtcattggtagcttgatggggatagcattgaatctgtaaattaccttgggcagtatagccattttcacsatactgattcttcctatccatgagcatggaatgttcttccatttgtttatggcctcttttatttcattgagcagtggtttgtagttctctttgaagaggt

SEQ ID NO: 145558 - DNA, 201 bp, Homo sapiens
tcatgatttggctccttgtttgtctgttattggtgtataggaatgcttgagattttttgcacattgattttgtatcctgagactttgctgaagttgcttakcagcttaaggagatttagggctgagacgatggggttttctaaatatacaatcatgtcatttgcaaacaggcaattttacttcctcttttcctaattgaat

SEQ ID NO: 145559 - DNA, 201 bp, Homo sapiens
attttttattacgtctttttgattcttctgtcttttcttcttgctagcggtctatcaattttgttgatcttttcaaaaaaccagctcctggattcattaatttttttttttgaagggttttttgtgtgtctatctctttcagttctgctctgatcttagttatttcttgccttttactagcttttcaatttgtttgctctt

SEQ ID NO: 145560 - DNA, 201 bp, Homo sapiens
tgtttagtctgcagtacaattataactgtttttgtatattgggttatttttttcagaagtaggccagtagctctaacaggagcctctttagcctgaattcrtccaagtagtgcagtgttgcactagttgtccctcgggacatgctccccaatacgtaactcacttccaggttgcaactggacacttactggtagtcagaaa

SEQ ID NO: 145561 - DNA, 201 bp, Homo sapiens
cttttcttcttgctagcggtctatcaattttgttgatcttttcaaaaaaccagctcctggattcattaatttttttttttgaagggttttttgtgtgtctrtctctttcagttctgctctgatcttagttatttcttgccttttactagcttttcaatttgtttgctcttgcttttctagttcttttaattgtgatgttaa

SEQ ID NO: 145562 - DNA, 201 bp, Homo sapiens
gtacatttgcatataaggttttgtgtagatgtgtgttttcctttttcttgggtctatgctgagaagtggaattgctggttcatacagcagctcgaaccttktgaggagctgccagacgcttttccaaggtcgctccaccattttacattcccgtcagcagtgtgagagtcccagtttcaccagcacttgttgttatctctt

SEQ ID NO: 145563 - DNA, 201 bp, Homo sapiens
ttgcttttctagttcttttaattgtgatgttaaggtgttgtttttagatctttcctgctttctcttgtgagcatttagtgctataaatttccctctacacwctgctttaaatgtgtcccagagattctggtatgttgtgtctttgttctcattggtttcaaagaacatctttatttctgctttcatttcgttatgtaccca

SEQ ID NO: 145564 - DNA, 201 bp, Homo sapiens
ggcctggcgcagtggctcatgcctgtaatcccaacagtttgagaggccaaggtgggcggatcacctgaggccaggagttcgagaccagcctggccaacatmgtgaaaccccgtgtttactaaaaaatacaaaaattagccgggcgtggtggcaagggcttgtaatcccagctacctgggaggctgaggcaggagaatcgct

SEQ ID NO: 145565 - DNA, 201 bp, Homo sapiens
caaaaggaagggggtacaatgagggctatctgatctcctgtcccgttatttgaaatgctttttccctggtgctgtaaagaaatagcacttgtaggctgggmgccgtggctcacgcctgtaatcccagtacctggggaggctgaggcgggcggatcacgaggtcaagagattgagaccatcctaaccaacatggtgaaaccc

SEQ ID NO: 145566 - DNA, 201 bp, Homo sapiens
aacaaaggcccggctccatcagggcaccaatcccgctcgtcggcctctttctcggcctccaatgagcttctagggtgttatcacgccagtctccttccgckactgattggccggggtcttcctagtgtgagcggccctggccaatcagcgcccgtcagcccaccccacgaggccgcagctagccccgctggcggccgaggc

SEQ ID NO: 145567 - DNA, 201 bp, Homo sapiens
ctccttccgcgactgattggccggggtcttcctagtgtgagcggccctggccaatcagcgcccgtcagcccaccccacgaggccgcagctagccccgctgscggccgaggccggttgaagtgggcggagcggcgggcggggcgtcgccgtactaggcctgccccctgtccggccagcccctcgaagcacctactccacagg

SEQ ID NO: 145568 - DNA, 201 bp, Homo sapiens
ttatgtgatgaaaccctgtctctactaaaaaaaaaaaaaaaaaaaaaaaaaaaaaaatacaaaagttagttgggcatggtggcaggtgcctgtaatcccasctacttgggaggctgaggcaggagaatcgcatgaacctgggaagtggaggctgcagtgagccaagattgcaccactgcactctagcctgggtgacagagc

SEQ ID NO: 145569 - DNA, 201 bp, Homo sapiens
ctcccaggattcacaccacgtaatcagtatattcaagccttgctgtccttgatttctttcagacggtctttctccaagtggtggatatggtaacaacccaygtgcactagcttaacaaaaagttcttaggaatggctttgttcggcctggcgcagtggctcatgcctgtaatcccaacagtttgagaggccaaggtgggcg

SEQ ID NO: 145570 - DNA, 201 bp, Homo sapiens
caggcggatcacttgaggtcaggagttcgaaaccagcctgacttatgtgatgaaaccctgtctctactaaaaaaaaaaaaaaaaaaaaaaaaaaaaaaatmcaaaagttagttgggcatggtggcaggtgcctgtaatcccagctacttgggaggctgaggcaggagaatcgcatgaacctgggaagtggaggctgcagtg

SEQ ID NO: 145571 - DNA, 201 bp, Homo sapiens
acattctctgaaaaatcctttaactcttgtggttgcgggtgacagaaaaacaagtcaggcctcccccaggcagcataaggggatgtggaaaataggataghttgacatgagtttgcttcaggtagactggctgactcccaggattcacaccacgtaatcagtatattcaagccttgctgtccttgatttctttcagacggt

SEQ ID NO: 145572 - DNA, 201 bp, Homo sapiens
taaagtcataggagccacagaattaacccaggaatgaataagtgtgtagtttggtgctgatgttatcatcctttatttgtacattgcttgtacagttgctytgagaaggtaagtcttaaattttcaaaagtgaaatgtcaccgagcatggtggcttatgcctctaatctcagcactttgggaggctgaggcaggcggatca

SEQ ID NO: 145573 - DNA, 201 bp, Homo sapiens
tcccaaaaggatgtaagatggcttatggttataagtacaacaggctaacaaagtacaagtagatgagaaagtaaaatgaagaaataaagtcataggagccmcagaattaacccaggaatgaataagtgtgtagtttggtgctgatgttatcatcctttatttgtacattgcttgtacagttgctctgagaaggtaagtctt

SEQ ID NO: 145574 - DNA, 201 bp, Homo sapiens
cccacctcagccttcaaagtgctgggattacaggtgtgagccactgcacccaaccagtttctctctgcaaactagggaaaaaatttacgcttagcagataytgagggctgattatttctatcacagaagcatttggctatagaatttcagggtttagtaaacttgatttacactgaatttttaggtgcatatcagtaaatc

SEQ ID NO: 145575 - DNA, 201 bp, Homo sapiens
attcacttgggtgccagcgattgattccaaataagtaaatcttttttcccaaaaggatgtaagatggcttatggttataagtacaacaggctaacaaagtmcaagtagatgagaaagtaaaatgaagaaataaagtcataggagccacagaattaacccaggaatgaataagtgtgtagtttggtgctgatgttatcatcc

SEQ ID NO: 145576 - DNA, 201 bp, Homo sapiens
ctttgagccccaggtgcctagctgctcaaggatggtccccagccagcagctgccaggaatcacctgggagcccattaagacatccagcccccacccaaacstatcgaatcagaatctgcctttttttcccaaatgatgtttttgctttaatggaagtttagatgttcatagacaagagttttaaatgatgatcaagctgat

SEQ ID NO: 145577 - DNA, 201 bp, Homo sapiens
aagatcaacctgctattttgggatagaaataaatgctcagccaaacggccagaaacccccattcccctctctgccaaagtgaattccttggcagggagaakcttgttcgtgtctctgcacacttcctgtgccctcctgtggttaagtcagagaatcatccggctctttgagccccaggtgcctagctgctcaaggatggtc

SEQ ID NO: 145578 - DNA, 201 bp, Homo sapiens
tgtgacggccgagttgaggagctgcaacaggcgatgacttgtaaagctgaaaatattttttggcccttgaataagaggttggctgacttctgacttagggyatcagttgttctgttatcccagtaaaactcaaggcattaggggagaaatgttaatattaatacttaagttgatttgatttagggaaatctttgaagattt

SEQ ID NO: 145579 - DNA, 201 bp, Homo sapiens
acaggaattgatatcctttataaggaaaaaagtctattcacaggagccgagcagattgctcactgctgtgtagtaccctggtgagaggagataaatggagsaaggctgtaggttggagcccctcagtagaatcatagattttgagctgcaagatgatgcaggaggccaaccaagcttcttgttgctggtgaggaatgtgag

SEQ ID NO: 145580 - DNA, 201 bp, Homo sapiens
ttctgtggctgcttttgcaatgtgacggccgagttgaggagctgcaacaggcgatgacttgtaaagctgaaaatattttttggcccttgaataagaggttkgctgacttctgacttagggcatcagttgttctgttatcccagtaaaactcaaggcattaggggagaaatgttaatattaatacttaagttgatttgattt

SEQ ID NO: 145581 - DNA, 201 bp, Homo sapiens
ggagacagtgcgcatggaatgaatcaactcagtttgggagcagggagaactttattgaggttatgaatatattctacttgaaactggaaggataagtggtyatgaatttgtggcttatggtaacctttgttaagcatctttctttttctttttttttttggtgagacacagattcactcttgtcccccaggctggagtgca

SEQ ID NO: 145582 - DNA, 201 bp, Homo sapiens
ctagaagccattaatgctacaggtactcataaagtctactcttctgcagcccatcgtggatggtggcttaatcattgaatttgagttgtttcgagctgcarcgttggatttgcattgttgtaagcacactttcttgctgtgaccactgacaccaaaattagtttgggcccagggagacttcagttaattggttcatttgag

SEQ ID NO: 145583 - DNA, 201 bp, Homo sapiens
ctgttaatggaaaaagtgctgtgtgaggatgggggttaagtgactggactgtttgtgttctgagctttctaggactgatctgattacgctgtaaacactcygccagatactgtgtaggcccagcccttgtgcttgagggggccactgtgaggtggcgaaacagacaagagattattagaatacagaaagttcaggttggga

SEQ ID NO: 145584 - DNA, 201 bp, Homo sapiens
gaggatgggggttaagtgactggactgtttgtgttctgagctttctaggactgatctgattacgctgtaaacactccgccagatactgtgtaggcccagcycttgtgcttgagggggccactgtgaggtggcgaaacagacaagagattattagaatacagaaagttcaggttgggaggaaccactgaacatggtagaagt

SEQ ID NO: 145585 - DNA, 201 bp, Homo sapiens; identical to SEQ ID NO: 26854

SEQ ID NO: 145586 - DNA, 201 bp, Homo sapiens
tgttcataattgctaacgtggttgtccggtagcctccatacatgtggagaaaggttaaataagcattctgagggcagcataatgtgagggttaaaaactcyggtagccaagactctgaagccaggctgcctgggttggaatctcaaatctcccacttactaaactgttggttacttacaaagactctctgtgcctcagttt

SEQ ID NO: 145587 - DNA, 201 bp, Homo sapiens
gcaagccccaaattgggccttagcccatgagggttcctggctttacccaggaaagaattcaagggtgagccagtggtaaggtggaagaaaacaacttcatkaaagaggcagtgtgacagctccgtgacttttcctgcagagtagggctgctccgcaggcagtgtgctgaaagcagctcagggcagttgtgcagtcagatct

SEQ ID NO: 145588 - DNA, 201 bp, Homo sapiens; identical to SEQ ID NO: 26873

SEQ ID NO: 145589 - DNA, 201 bp, Homo sapiens
ctcagctaattttggtatttttagtagagacggggtttcaccatgttagccaggctggtctcaaagtcctgacctcaagtgatccgcctgcatcggtcttyccaagtgctgggattacaggtgtgagccactgcacccagcccagtgtgtgttttagacgaataactctacctgccatatgggaaaggacaggggaagtca

SEQ ID NO: 145590 - DNA, 201 bp, Homo sapiens
gagatgggtttagaaagtggccaggcacaagttattttaaaataaaaaatctttggctgtttgttccaatatattaatagttttcccttttttacagcaaygcagtgtgcatattttatctggttctccgagctctggacacactggaagatgacatgaccatcagtgtggaaaagaaggtcccgctgttacacaactttc

SEQ ID NO: 145591 - DNA, 201 bp, Homo sapiens
tgcctgtgagcaggtcgtgtatttctcggcttcccttatccaactttgcatttctatttctagcatattgggttgattcttttgaagctgcctctgtgcasattacacccatgaacttagaccagttgcctttatgtatgatcgtatttatactgagaagttactgtgttttttgactttcttttctatttgctacatatt

SEQ ID NO: 145592 - DNA, 201 bp, Homo sapiens
aatttgccagtctgcgtcttttaactggggcatttagcccacttatatttaaggttaatattgttatgtttgaatttgatctgtcattatgatgtttgctggttattttgcccattaattgatgcagtttcttcctagcctcgatggtctttacaatttggcatgtttttgcagtggctggtaccagttgttcctttccat

SEQ ID NO: 145593 - DNA, 201 bp, Homo sapiens
tatccagaacatagcccggccctacgtgtttactttagaaagcccttccaggctctttgccatctagtagagtccctgcgggcccagcctttcagagaagrggggggagggggtgatgtttattaactttttttagtcttggcagctgaacctgcctgtgagcaggtcgtgtatttctcggcttcccttatccaactttgc

SEQ ID NO: 145594 - DNA, 201 bp, Homo sapiens
taactttgcattgtttaggcaccatcgtgtcctatacgcagctcaattcaataaatactcattgagcacccaataaatattcattgagccagtatgtgctrggcactattccagatggttgaggggacattagtgagcaaaacaaaggtgtgtcgtcactgagcttagatttctagtgttgacttaaaaaatatgatttat

SEQ ID NO: 145595 - DNA, 201 bp, Homo sapiens
ttctgtaagtattagctatttggtctattttgttggagtaaagtgggttatagttaaaatcctaagatttttaaagtccctcaagttcatgtggacatctrcctaggtcctactatcctagaattcgcatgtcttatcacacaaataactgattcttccatatcttataaataaaggtttgatttagcaaagtcacatgtt

SEQ ID NO: 145596 - DNA, 201 bp, Homo sapiens
tttgccagtctgcgtcttttaactggggcatttagcccacttatatttaaggttaatattgttatgtttgaatttgatctgtcattatgatgtttgctggwtattttgcccattaattgatgcagtttcttcctagcctcgatggtctttacaatttggcatgtttttgcagtggctggtaccagttgttcctttccattt

SEQ ID NO: 145597 - DNA, 201 bp, Homo sapiens
  misc_feature (1)...(201): n = A,T,C or G
accagtcgcagtttcgcagctgttatccaggcgctggatggggaaatgcggtgagtgatggaggcagcgcctctggcttggaggaaagcttgtccgggacntttgagtgtgttggaagctaccttttgatatagcgctcagcgttgcagcctcgttgctgtggcttatccagaacatagcccggccctacgtgtttacttt

SEQ ID NO: 145598 - DNA, 201 bp, Homo sapiens
gctaaggcaggagactcacttgaacctgggagccagaggttgcagtgaaccaagatcgcgccactgcactccagcctcacgacagagtgagactccatttaaaaaaaaaaaaaaaatgaagaagaaatagcactcgaaggctgggcgcagtggcttgcctgtaatcctagcactttgggaggccgaggagggtggatcatg

SEQ ID NO: 145599 - DNA, 201 bp, Homo sapiens
tcaatttagaaagggagaagagcctttatttcttctaaagggttacagcatgcttccagcttagaccacagacgggcactttgaaggaaaaggcgtttgasgtaggagctttatgctgactgggttggctaaacgtacatatttaacagattacaagaggagctacgaatatttatgatggcggacctgacacattgaaca

SEQ ID NO: 145600 - DNA, 201 bp, Homo sapiens
tgccgactgtatgatgcagcctacctgtaacactgctggcctcttgactacccggagcctggtagcatgggactgctgctcacgatgggcagcagcctggyatgggggcggtgtctgttggcagctagggcgagcctctgccacttcacctgtgatcctgggcaagttccttatctgctttgtgtctccgtctcctcgttt

SEQ ID NO: 145601 - DNA, 201 bp, Homo sapiens
attgaagcttgtttatgctttgtgaaattcttgtactttggttttcagctccatcaggtcatttaagctcttctctacactggttattctagttagccatwtgtccaaccttttctcaaggttttaagtttccttgcgatgggtcagaacgtgctgctttagcttggagaagtttgttattaccaaccttctgaagcctac

SEQ ID NO: 145602 - DNA, 201 bp, Homo sapiens
cagatactgaagttgggggattctggtcaaatcaatttagcaggattcttggtaaaactgggcgatgcaaagacagatgcgttgagtacaaagtccaggcyttattgggaagaggatttcagcggagcccgagtagagtttggtctagggagactctgtcactgggaggacgagcgagccgctcggaagtgcgctgggttc

SEQ ID NO: 145603 - DNA, 201 bp, Homo sapiens
agactccatttaaaaaaaaaaaaaaaatgaagaagaaatagcactcgaaggctgggcgcagtggcttgcctgtaatcctagcactttgggaggccgaggakggtggatcatgaggtcaggagttcaagaccagtctggccaacatggtgaaaccctgtctctactaaaaatcgaaaaattacccaggcgtggtggttgggc

SEQ ID NO: 145604 - DNA, 201 bp, Homo sapiens
ttcttcaagtgtaggggtgcctgacttcaccattgcctgcatggccttaggtcctgtttataattgggtatcttattgccacagagtctgttccgttagtsttatgatctctgttttaatgttaatgccagccagttgtgtatgaactccaaaaggaagggggtacaatgagggctatctgatctcctgtcccgttatttg

SEQ ID NO: 145605 - DNA, 201 bp, Homo sapiens
gttttcagctccatcaggtcatttaagctcttctctacactggttattctagttagccatttgtccaaccttttctcaaggttttaagtttccttgcgatsggtcagaacgtgctgctttagcttggagaagtttgttattaccaaccttctgaagcctacttctgtcaactcgttaaactcattgtccatccagttttgt

SEQ ID NO: 145606 - DNA, 201 bp, Homo sapiens
ggatggagggggatgtggaacctaatcggctgtctagggtgatcagatactgaagttgggggattctggtcaaatcaatttagcaggattcttggtaaaaytgggcgatgcaaagacagatgcgttgagtacaaagtccaggccttattgggaagaggatttcagcggagcccgagtagagtttggtctagggagactctg

SEQ ID NO: 145607 - DNA, 201 bp, Homo sapiens
actaagcaggccatttttacttcctgcagaaagggtacactcgccagcagttttgccatgggagtataccaaacaaaggagacagggtcatttataacctsactcgtccaccccactgcttgtgtctagtttccattggctggaacggtgcctcacgttctgtatttgtcccgattggctagcaacttagaagtttttaaa

SEQ ID NO: 145608 - DNA, 201 bp, Homo sapiens
aggtcatttaagctcttctctacactggttattctagttagccatttgtccaaccttttctcaaggttttaagtttccttgcgatgggtcagaacgtgctsctttagcttggagaagtttgttattaccaaccttctgaagcctacttctgtcaactcgttaaactcattgtccatccagttttgttcctttgctggtgag

SEQ ID NO: 145609 - DNA, 201 bp, Homo sapiens
agtagagacgcagtttcagcatgttggccaggctggtcttgaactccagacctcaggtgatccgcccgccttggcctcccaaagtgctgggattacaggcrtgagccaccgcgctcggctagacctgacaggttttaaaaggattactggttgctgtgttaaaacagactgcaggatggcttaggtagccagtaggttttt

SEQ ID NO: 145610 - DNA, 201 bp, Homo sapiens
aactcgttaaactcattgtccatccagttttgttcctttgctggtgaggagttacgttcctttggaggagaagaggcgttctgtttttggaattttcagcytttctgctgtggtgtctccccatctttgtggttttatctacctttggtctttgattttggtgacgtacagatgggttttggtgtgggtgtcctttttgtt

SEQ ID NO: 145611 - DNA, 201 bp, Homo sapiens
attgtccatccagttttgttcctttgctggtgaggagttacgttcctttggaggagaagaggcgttctgtttttggaattttcagcttttctgctgtggtktctccccatctttgtggttttatctacctttggtctttgattttggtgacgtacagatgggttttggtgtgggtgtcctttttgttgatattgatcctat

SEQ ID NO: 145612 - DNA, 201 bp, Homo sapiens
aaaaaatacctgaacctttaattaggggaaataaattggaaaaatacatttcccttcacttaacattatcttagtttctcttttttttttttttttttttwgagatggagtcttgctctgttacccaggctggagtgcagtggtggcgggacctcagctagatgcagcctccgcctcctgggttcaagcaattctcctgcc

SEQ ID NO: 145613 - DNA, 201 bp, Homo sapiens
gaactgctccactgcgaatacaaagaaaagtaggaattgatggcgggggagccggatgtcagtggatggaaaattattacgaggaaacacaggggtgtgcrttcttgctgaaggcaggccagagttatcagacatcacctgagggatggagggggatgtggaacctaatcggctgtctagggtgatcagatactgaagttg

SEQ ID NO: 145614 - DNA, 201 bp, Homo sapiens
ggagaagaggcgttctgtttttggaattttcagcttttctgctgtggtgtctccccatctttgtggttttatctacctttggtctttgattttggtgacgyacagatgggttttggtgtgggtgtcctttttgttgatattgatcctattcctttgtttgttagttttccttctaacagaggcccgtcagctgcaggtctg

SEQ ID NO: 145615 - DNA, 201 bp, Homo sapiens
tgaactcttgacctcaagtgatctgctcgccttggtctcccaaagtgctaggattacaggcgtgagccactgcacccggcctttttttttttttttttgaggggggggtctcactccatcgtccaggctagaatgctgtggcctgaacatgactcactccagttttgacttccttggctgaagccatcctcccacctcggc

SEQ ID NO: 145616 - DNA, 201 bp, Homo sapiens
tacatagtacaaacagcaactctttctgatatgcttgcatttaaaatcaggctttttctcccttttggaaaaacacagtccttgtttgctttagggaagartaaaggtcagtgcgctgcattgcattaatttcgaagggaaagatgagaagacatcttgaaaggaatggctggctttctagagaatagtagaggcttaata

SEQ ID NO: 145617 - DNA, 201 bp, Homo sapiens
tggggctcagggacccacttgaggaggcagtctgtccgttactggagttcaaatgccgagctgggagaaccactgctctcttcagagctgtcaggcagggmtgtttaaatctgcagaagccgtctgctgccttttgtttagatatgccctgcccccagagatgcaatctagagaggcagtaggccttgctgagctgcggtg

SEQ ID NO: 145618 - DNA, 201 bp, Homo sapiens
aatattttttatggcaataaaatgactttttcaggattatgtgatttaaaagattgacccttttggcaaaatacgtattcatgataggaaatatatacaawatagttcacttaaacctcccaccagagcccagggttcactgttaccattctgaagtgactggaatttcctagaagtggatatgccatatttttttaacca

SEQ ID NO: 145619 - DNA, 201 bp, Homo sapiens
cccaccttggccttccgaagtgcagggattataggcgtgcgccactgcacccggccctgttggataaatgattccagtctctcccaaaaagaactgttgtragactgtggggtgaggggagggaagggacaaataggaacccgccgtattttccactccctgtgggcctaaaactgctctaaaaaatagtccatgaaaaaa

SEQ ID NO: 145620 - DNA, 201 bp, Homo sapiens
tgtggtggtgggtgctttaattccagctactcaggaagctgaggcaggagaatcacttgaacccaagaggcagaggttgcagtgagttgagattgtgccastgcactccagcccaggggacaaagtgagacttgatctcaaaaaaaaaaaaaaaaaaaagttattgtaaagctagacacggtggtatttgcctacaatccc

SEQ ID NO: 145621 - DNA, 201 bp, Homo sapiens
cttcagtagctagactataggtgggcgccaccacagctggctttttaaaaaattttttatgaacacgaggtctcactatgttgcccaggctgccctcaaaytcctgggctcaagtgattctcccaccttggccttccgaagtgcagggattataggcgtgcgccactgcacccggccctgttggataaatgattccagtct

SEQ ID NO: 145622 - DNA, 201 bp, Homo sapiens
caggctgcctgggttggaatctcaaatctcccacttactaaactgttggttacttacaaagactctctgtgcctcagtttcttcatctgtaaaataggggtaataataacacctacctcatggtattctgaggattcaaagaattaacgtaggtaatgctcttagaatgttagctactgctgttattatcagtattggaag

SEQ ID NO: 145623 - DNA, 201 bp, Homo sapiens
taattcatagtttgagggcgagggtgggcagtctacagttggctgagccctgtttttgtgaataaatgttatcagaacacagccacacccatttgcttctwtgtcttctgtggctgcttttgcaatgtgacggccgagttgaggagctgcaacaggcgatgacttgtaaagctgaaaatattttttggcccttgaataaga

SEQ ID NO: 145624 - DNA, 201 bp, Homo sapiens
aagctgtgtgatttcatcattgcactctagcctgggtgatagagtgagactttgtctcaaaaaaaaaaaaaaaaaaaaaagtcttagagaccagaagtctytgtaatctctaataatctctaggccctagagcagtggtttgtaaatggaggtgatttgctcccctccccccagaggacattggacaatgtctggagacat

SEQ ID NO: 145625 - DNA, 201 bp, Homo sapiens
ccgctggcggccgaggccggttgaagtgggcggagcggcgggcggggcgtcgccgtactaggcctgccccctgtccggccagcccctcgaagcacctactscacaggtccagccggccggtgagcgcctggggaccgcagaggtgagagtcgcgcccgggagtccgccgcctgcgccaggatggagttcgtgaaatgcctt

SEQ ID NO: 145626 - DNA, 201 bp, Homo sapiens
gtctctaggtgatggccattgccactttggctgcctgttataataaccagcaggtgttcaaaggggcagtgaagattcggaaagggcaagcagtgaccctbatgatggatgccaccaatatgccagctgtcaaagccatcatatatcagtatatggaagaggtgggtttttatttaactacttggataatttgtagctact

SEQ ID NO: 145627 - DNA, 201 bp, Homo sapiens
ttttatctggttctccgagctctggacacactggaagatgacatgaccatcagtgtggaaaagaaggtcccgctgttacacaactttcactctttcctttmccaaccagactggcggttcatggagagcaaggagaaggatcgccaggtgctggaggacttcccaacggtgagtggggttacgcatcttgtctacggactg

SEQ ID NO: 145628 - DNA, 201 bp, Homo sapiens
aatgttggatttacttgtgtttgctttttccaaataaaatggaacttttgtggctacattatagaattgttttagactgcttaattctgtgtgttgttgaraaagggaggagtggggaaggtaaaaatcttgacatactttcttcgtgggtattttttcttgagcgattccatcttagttgattagcagttagcaattgcc

SEQ ID NO: 145629 - DNA, 201 bp, Homo sapiens
catattttatctggttctccgagctctggacacactggaagatgacatgaccatcagtgtggaaaagaaggtcccgctgttacacaactttcactctttcytttaccaaccagactggcggttcatggagagcaaggagaaggatcgccaggtgctggaggacttcccaacggtgagtggggttacgcatcttgtctacgg

SEQ ID NO: 145630 - DNA, 201 bp, Homo sapiens
aaaaattagctggccgtggtggtacatgcctgtagttccagctactcgggaggctaaggcaggagactcacttgaacctgggagccagaggttgcagtgarccaagatcgcgccactgcactccagcctcacgacagagtgagactccatttaaaaaaaaaaaaaaaatgaagaagaaatagcactcgaaggctgggcgca

SEQ ID NO: 145631 - DNA, 201 bp, Homo sapiens
aactttcatcctgttaggaactccgctttccattcctgcgtctctgtcttgctccctggagatggatggatcacggagggggccacagtcagctggggcarcaggtactccctacggcactagtctacagggggaaggacgctctgtgctggcagcggtggctcacatggcctgtctgcactgtaaccacaggctgggatg

SEQ ID NO: 145632 - DNA, 201 bp, Homo sapiens
gaggctaaggcaggagactcacttgaacctgggagccagaggttgcagtgaaccaagatcgcgccactgcactccagcctcacgacagagtgagactccayttaaaaaaaaaaaaaaaatgaagaagaaatagcactcgaaggctgggcgcagtggcttgcctgtaatcctagcactttgggaggccgaggagggtggatc

SEQ ID NO: 145633 - DNA, 201 bp, Homo sapiens
ggctaaggcaggagactcacttgaacctgggagccagaggttgcagtgaaccaagatcgcgccactgcactccagcctcacgacagagtgagactccattwaaaaaaaaaaaaaaaatgaagaagaaatagcactcgaaggctgggcgcagtggcttgcctgtaatcctagcactttgggaggccgaggagggtggatcat

SEQ ID NO: 145634 - DNA, 201 bp, Homo sapiens
cactccagcctggcaacaagagtgaaattctgtctcaaaaaaaaaaaaaaaaaaaaaaaaaaaaggcgcttgaacattaatttactaagcaggccattttyacttcctgcagaaagggtacactcgccagcagttttgccatgggagtataccaaacaaaggagacagggtcatttataacctgactcgtccaccccactg

SEQ ID NO: 145635 - DNA, 201 bp, Homo sapiens
tagggttgtatatgcattttattgcctattttctaaaacactaaaaatgctaaattctgccccaggtcttgccacagatgtttcagtggactatgggcctktgagaccttaaagggttgattgagtaaggatcacaggtgatgtccgcattgtgcttggcatggagttaagtgcttgataaatggtggttatcaatctgat

SEQ ID NO: 145636 - DNA, 201 bp, Homo sapiens
accacagttacttcatctgtaaaatagggatgtatgtatggtaacgattttttaaccacaacttcccaactctaagatggtctgaaaagaattttttgagwgtttggctcagaatcacttggcagcaaaacctgacttgaagttgaggcttcattcatcccacttagtatattcaaatgttttgctaaagaaataattatg

SEQ ID NO: 145637 - DNA, 201 bp, Homo sapiens
gaaccacagttacttcatctgtaaaatagggatgtatgtatggtaacgattttttaaccacaacttcccaactctaagatggtctgaaaagaattttttgwgtgtttggctcagaatcacttggcagcaaaacctgacttgaagttgaggcttcattcatcccacttagtatattcaaatgttttgctaaagaaataatta

SEQ ID NO: 145638 - DNA, 201 bp, Homo sapiens; identical to SEQ ID NO: 26877

SEQ ID NO: 145639 - DNA, 201 bp, Homo sapiens
tgaaccacagttacttcatctgtaaaatagggatgtatgtatggtaacgattttttaaccacaacttcccaactctaagatggtctgaaaagaattttttsagtgtttggctcagaatcacttggcagcaaaacctgacttgaagttgaggcttcattcatcccacttagtatattcaaatgttttgctaaagaaataatt

SEQ ID NO: 145640 - DNA, 201 bp, Homo sapiens
tgcggagcgggaggccgggggcggggctgcggggctgcggggcgggcccgttgtgggtcggcccagcgcgtattcgagtagagggcgagcccgtcccgccyctcgtcgggcgcttcccagatctgcttgagtctatggaggaaaaactccgcggggtccgcgattcccatggccgcagccgcctgcggcaccaaggccatg

SEQ ID NO: 145641 - DNA, 201 bp, Homo sapiens
tagttggtattgtcctagttcctgttaccagaatattccatctttcatcgttgccttctctcatagttttatgtatcaaaaagtttattgtaaagctaggscgggcacggtgtcttgggctggtaatcccagcactttgggaggccaaggctggcagatcagttgaggtcaggagttcgagaccagcgtggccaacatggt

SEQ ID NO: 145642 - DNA, 201 bp, Homo sapiens
taaatcctgttatttagactaatatcttaagtctgttattaagtccgatttctgacgctattaagttaggtgaacaaccttggtaacttaacctctgaacyacagttacttcatctgtaaaatagggatgtatgtatggtaacgattttttaaccacaacttcccaactctaagatggtctgaaaagaattttttgagtgt

SEQ ID NO: 145643 - DNA, 201 bp, Homo sapiens
aggctgcctgggttggaatctcaaatctcccacttactaaactgttggttacttacaaagactctctgtgcctcagtttcttcatctgtaaaataggggtaataataacacctacctcatggtattctgaggattcaaagaattaacgtaggtaatgctcttagaatgttagctactgctgttattatcagtattggaagt

SEQ ID NO: 145644 - DNA, 201 bp, Homo sapiens
tagtagaggtgaggtttcagcatgttggccaggctggtcttgaactcctgaccttgtcatcctcccaccttggcctcccaaagtgctgggattacaggcgygagccaccacggccggctgttatgctcatcatggcacttaagagatgcttaacaaacctttcctacaatgttcctcagattttcagagcttatttgatct

SEQ ID NO: 145645 - DNA, 201 bp, Homo sapiens
cagggtaagtattctgtaagtattagctatttggtctattttgttggagtaaagtgggttatagttaaaatcctaagatttttaaagtccctcaagttcaygtggacatctgcctaggtcctactatcctagaattcgcatgtcttatcacacaaataactgattcttccatatcttataaataaaggtttgatttagcaa

SEQ ID NO: 145646 - DNA, 201 bp, Homo sapiens
cactccatcgtccaggctagaatgctgtggcctgaacatgactcactccagttttgacttccttggctgaagccatcctcccacctcggcttcctgatccygagtagctgggactccaggcacgtgtcaccaatgcatggctaatttttaaatttttttgtagacacaatgtctcgctgcattgcccaggctggtcttgaa

SEQ ID NO: 145647 - DNA, 201 bp, Homo sapiens
ggctgcctgggttggaatctcaaatctcccacttactaaactgttggttacttacaaagactctctgtgcctcagtttcttcatctgtaaaataggggtaataataacacctacctcatggtattctgaggattcaaagaattaacgtaggtaatgctcttagaatgttagctactgctgttattatcagtattggaagtc

SEQ ID NO: 145648 - DNA, 201 bp, Homo sapiens
tttttggtatttttagtagagacggggtttcaccatgttggtgaggctggttttgaactcttgacctcaagtgatctgctcgccttggtctcccaaagtgytaggattacaggcgtgagccactgcacccggcctttttttttttttttttgaggggggggtctcactccatcgtccaggctagaatgctgtggcctgaac

SEQ ID NO: 145649 - DNA, 201 bp, Homo sapiens
cggctgattttttggtatttttagtagagacggggtttcaccatgttggtgaggctggttttgaactcttgacctcaagtgatctgctcgccttggtctcycaaagtgctaggattacaggcgtgagccactgcacccggcctttttttttttttttttgaggggggggtctcactccatcgtccaggctagaatgctgtg

SEQ ID NO: 145650 - DNA, 201 bp, Homo sapiens
cctgcctcagcctgctgagtagctgggattacaggcacctgccactacgcccggctgattttttggtatttttagtagagacggggtttcaccatgttggygaggctggttttgaactcttgacctcaagtgatctgctcgccttggtctcccaaagtgctaggattacaggcgtgagccactgcacccggcctttttttt

SEQ ID NO: 145651 - DNA, 201 bp, Homo sapiens
caggctggagtgcagtggtggcgggacctcagctagatgcagcctccgcctcctgggttcaagcaattctcctgcctcagcctgctgagtagctgggattrcaggcacctgccactacgcccggctgattttttggtatttttagtagagacggggtttcaccatgttggtgaggctggttttgaactcttgacctcaagt

SEQ ID NO: 145652 - DNA, 201 bp, Homo sapiens
atgtagccagagatgtcaataaggcttactgtcagtaggtaatatggttagtttgtagggaaaagagcgtatgagcacatgcttgtgtatttcggcctttrccccagtagatcagacaatgacattctagtcttgatgttactaagttttagcagacactagcaagtggtttgtatttaaccacacccatgaagcagacag

SEQ ID NO: 145653 - DNA, 201 bp, Homo sapiens
gagatcttgactcactgcaacctccgccccctaggttcaagcaattcttctgtctcaccctcctgagtagctgggattacaggcgcctgccaccgtacccrgctagtttttgtatttttagtagacacagggtttcaccaccttggccaggctggtcttgaactcctgacctcgtgatccaccctcctcggcctcccaaag

SEQ ID NO: 145654 - DNA, 201 bp, Homo sapiens
acctagaaatactttacctttgagcacaggaaattaatccccttctggttgttctccccctggcattggttttaaatatataatgattatgtttgttgtakgaaaaatagaaaaacaactacaatagaaaattcttcccatatattattttgaaatacatatttccgatccgataatccattgctctagcatggaaaatgt

SEQ ID NO: 145655 - DNA, 201 bp, Homo sapiens
gttgcctttaccaagtattgcagatactactgcaaataagtgaagaaagtaacagcatttaactgatttgggaacttggtttgatcttgttctaatgaccmacttcgaatggtggttgaaagtaaaatctgtatcgccgtcttatgtttccatttacctagaaatactttacctttgagcacaggaaattaatccccttct

SEQ ID NO: 145656 - DNA, 201 bp, Homo sapiens
caggaggattgcctgagcccaggagttcaaggctgcagtgaaccatgatcacaccactgcattctagcagcctgggagacagagcaaaacccttgtctcaaaacaaacaaacaacaacaaaaaaacaaaaaacacttccctcagctcagacatggccttttaagtttcctaggtgactcgtgtgcagccagggttgagaaa

SEQ ID NO: 145657 - DNA, 201 bp, Homo sapiens
aggaggattgcctgagcccaggagttcaaggctgcagtgaaccatgatcacaccactgcattctagcagcctgggagacagagcaaaacccttgtctcaaaacaaacaaacaacaacaaaaaaacaaaaaacacttccctcagctcagacatggccttttaagtttcctaggtgactcgtgtgcagccagggttgagaaac

SEQ ID NO: 145658 - DNA, 201 bp, Homo sapiens
ggaggattgcctgagcccaggagttcaaggctgcagtgaaccatgatcacaccactgcattctagcagcctgggagacagagcaaaacccttgtctcaaaacaaacaaacaacaacaaaaaaacaaaaaacacttccctcagctcagacatggccttttaagtttcctaggtgactcgtgtgcagccagggttgagaaacc

SEQ ID NO: 145659 - DNA, 201 bp, Homo sapiens
gaggattgcctgagcccaggagttcaaggctgcagtgaaccatgatcacaccactgcattctagcagcctgggagacagagcaaaacccttgtctcaaaacaaacaaacaacaacaaaaaaacaaaaaacacttccctcagctcagacatggccttttaagtttcctaggtgactcgtgtgcagccagggttgagaaacca

SEQ ID NO: 145660 - DNA, 201 bp, Homo sapiens
taaccaatgcactgcaccacatcccagatgtcatcacctacctttcgagactcagaaaccagagtgtgtttaacttctgtgctattccacaggtagggaasggggctcctctgggtggatacggggctaaagggagtggggtaggagtaagggtggattttgctgtgctatattcaaggatatgattccttaaaaagacga

SEQ ID NO: 145661 - DNA, 201 bp, Homo sapiens
attgcctgagcccaggagttcaaggctgcagtgaaccatgatcacaccactgcattctagcagcctgggagacagagcaaaacccttgtctcaaaacaaasaaacaacaacaaaaaaacaaaaaacacttccctcagctcagacatggccttttaagtttcctaggtgactcgtgtgcagccagggttgagaaaccactct

SEQ ID NO: 145662 - DNA, 201 bp, Homo sapiens
cattttaactatttttaagtctattattcagtggcattaagtacattaatgatgttatataaccatcaacactatgtttccagaactttcgctagcttcasagaatcctctaaataatatcattaaaaatcatcaagccgaatcccactgttagaattaaaggttttatttcactttcaagttatcaggatccagggaggt

SEQ ID NO: 145663 - DNA, 201 bp, Homo sapiens
tggatagaccacatttatccattcatcagttggaggatatttgggttcttcccattttttttggctatggtgaatagtactgtgtacatttgcatataagkttttgtgtagatgtgtgttttcctttttcttgggtctatgctgagaagtggaattgctggttcatacagcagctcgaaccttgtgaggagctgccagacg

SEQ ID NO: 145664 - DNA, 201 bp, Homo sapiens
gcagctcgaaccttgtgaggagctgccagacgcttttccaaggtcgctccaccattttacattcccgtcagcagtgtgagagtcccagtttcaccagcacttgttgttatctctttttaactgtatgtatatatacttaacattttatttataataaatgtacataatagagaatttgccattttaactatttttaagtct

SEQ ID NO: 145665 - DNA, 201 bp, Homo sapiens
ctgggtatagtggcacacccctatagttctcgctccttgggaggttgaggcaggaggattgcctgagcccaggagttcaaggctgcagtgaaccatgatcrcaccactgcattctagcagcctgggagacagagcaaaacccttgtctcaaaacaaacaaacaacaacaaaaaaacaaaaaacacttccctcagctcagac

SEQ ID NO: 145666 - DNA, 201 bp, Homo sapiens
cccatggccgcagccgcctgcggcaccaaggccatggccctcttcaagcgcaccttggtgctgagtcccgccgcggcgcccaggggcccgggcgcaggcascgccccgcggggctgctgcttgcctcctgccgcctggccctgcaaggactggcctcggggagagggcggcaggctgtggagccgcctgccccagtcccac

SEQ ID NO: 145667 - DNA, 201 bp, Homo sapiens
cagctcgaaccttgtgaggagctgccagacgcttttccaaggtcgctccaccattttacattcccgtcagcagtgtgagagtcccagtttcaccagcacttgttgttatctctttttaactgtatgtatatatacttaacattttatttataataaatgtacataatagagaatttgccattttaactatttttaagtcta

SEQ ID NO: 145668 - DNA, 201 bp, Homo sapiens
agctcgaaccttgtgaggagctgccagacgcttttccaaggtcgctccaccattttacattcccgtcagcagtgtgagagtcccagtttcaccagcacttgttgttatctctttttaactgtatgtatatatacttaacattttatttataataaatgtacataatagagaatttgccattttaactatttttaagtctat

SEQ ID NO: 145669 - DNA, 201 bp, Homo sapiens
aagtgtgtagtttggtgctgatgttatcatcctttatttgtacattgcttgtacagttgctctgagaaggtaagtcttaaattttcaaaagtgaaatgtcmccgagcatggtggcttatgcctctaatctcagcactttgggaggctgaggcaggcggatcacttgaggtcaggagttcgaaaccagcctgacttatgtga

SEQ ID NO: 145670 - DNA, 201 bp, Homo sapiens
ttaaaggttttatttcactttcaagttatcaggatccagggaggtgtaatacacttagaggatagactcagctcatttcccagctatgcctttcagcagcwttcttaccagagtaggaatataatgttagtcattatttagaggcctggccatcttgagaaggtttactgtttagtctgcagtacaattataactgttttt

SEQ ID NO: 145671 - DNA, 201 bp, Homo sapiens
gctggtaccagttgttcctttccatttttactgcttccttcaggagctcttttagggcaggcctggtggtgacaaaatctctgagcatttgcttgtctgtraaggattttatttctccttcacttgtgaaacttagtttggctggttatgagattctgggttgaaaattctttaagaatgctgaatattggcccccactct

SEQ ID NO: 145672 - DNA, 201 bp, Homo sapiens
aaccctgggaaggtcctggtgatttgactctcacaggacacctgatgaccagaggatgggtttcctttgatgggaaatctgtggcgattcattgatgggcytctgaattctgctgaagcagaggaagtagtaataccccatttataatggaagtgcattctcacttaaaaacaactaatattattctagctggacctagcc

SEQ ID NO: 145673 - DNA, 201 bp, Homo sapiens
tttttcttttattatactttaagttctagggtacatgtgcacaacgtgcaggtttgttacataggtatacatgtgccatgttggtttgctacacccatcarctcgtcatttacattaggtatttctcgtaatgctatccctcccttggccccccaccccacaacaggccccggtatgtgatgttcccctccttgtgtccat

SEQ ID NO: 145674 - DNA, 201 bp, Homo sapiens
gatctgagaacatagaaatctactgtgttgtgaaacagaattacctggaagcggaaaaagccctcctggctcaattcacatgtcacggcttatggtcgtayccggggaacatatgaaactgggcactgagtgcggagtcaggaaagccctgtccatcctctgggtttctggggaaaacgtggaccccttcattgtcacttt

SEQ ID NO: 145675 - DNA, 201 bp, Homo sapiens
cacccatcaactcgtcatttacattaggtatttctcgtaatgctatccctcccttggccccccaccccacaacaggccccggtatgtgatgttcccctccytgtgtccatgtgttctcattgttcaactcccacttaggagtgagaacatgtagtgtttggttttctgtcgttgtgatactttgctcagaatgatgatttc

SEQ ID NO: 145676 - DNA, 201 bp, Homo sapiens
ttgagaaaccactcttgtcttacccctcttttgcagacacagggctcagagaagggaaggggattgtctggggatgtatagtgaggcagtggctgccttgraagtggagtctcagtctcccggctcctaggccagcccctgaccactgttccattgtctcccagacagaacatcagccacgggcatgtgatgcatgagcgt

SEQ ID NO: 145677 - DNA, 201 bp, Homo sapiens
gatctcctgatctcgtgatccgcccgtctcagcttcccaaagtgctgggattacaggcatgagccatcgtgcccggctgaatgtgcagagttcttaaaacmgtgtcaagaacataaaatagttatttgttctttcatataatgatgattttgagggcctgcggatcttgacatgttatcagattggtcaaaaaaagattaa

SEQ ID NO: 145678 - DNA, 201 bp, Homo sapiens
tctctttttttttttttttttttttgagatggagtcttgctctgttacccaggctggagtgcagtggtggcgggacctcagctagatgcagcctccgcctsctgggttcaagcaattctcctgcctcagcctgctgagtagctgggattacaggcacctgccactacgcccggctgattttttggtatttttagtagagac

SEQ ID NO: 145679 - DNA, 201 bp, Homo sapiens
agaaaatggtagcattggtttcctgttgggagggaaagtgggtggtcatggtaagtgggtagagaaagacttcacagtatactgtttttgtacattttgartttttttaaaagcgagacttgagctattctagctctgataatatggtgcagtatttgttatgttagttgtagtctttctgggcagtttttacatccccat

SEQ ID NO: 145680 - DNA, 201 bp, Homo sapiens
gaatgaactatgcagataacatcacatgaaggccgtttctggaatgaagtctgactcctccagtttcaccacctcttccggagctctccccgccttgctgycttccatcgcttcatcctcggtgcttcctgagttttaaaatcgcctatctacgcttccaagttccaatgagttatctaacgtctatggattagctaggtg

SEQ ID NO: 145681 - DNA, 201 bp, Homo sapiens
agggaaatcccctgaccccttgcacttcctggatgaggtgacgtcctgccctgctttggctcaccctccatgggctgcacccactgtccaaccagtgccartgagatgaaccaggtacctcagttggaaatgcagaaatcacccatcttctgcatcgatcttgctgggagctgtagaccagagctgttcctactgggacat

SEQ ID NO: 145682 - DNA, 201 bp, Homo sapiens
ccagtgagatgaaccaggtacctcagttggaaatgcagaaatcacccatcttctgcatcgatcttgctgggagctgtagaccagagctgttcctactgggrcatcttggaagcaactctgggtctgagtttctgtttgttgccctgatgtatatccccagtgcctagaatgatacttgttacataggaagtgcttgatcca

SEQ ID NO: 145683 - DNA, 201 bp, Homo sapiens
cgtttttattctatgccagaaggcttgatttcctttaaatcaatccattgattcgaagacatttcattggaggaatttaaaatggaaggattataatcaastgtgtgtttttattttttatttttttgagacggagtctcactttgttgcccaggctgcagtgtggtgtggtgatctcggctcgtgggttcaagcgattct

SEQ ID NO: 145684 - DNA, 201 bp, Homo sapiens
taatggaggcgtggcaggtggctaggcaaggagcaggaagcctattccaggcaggtgaattgcttgggccaaggccggatgtgaagtactgtagcctgttygggggacaataagtgctgctaggactggatcagggtgtgaaagtagtacaagaatgggtggacaggaggctgaaatcccaacaaaggatgtagatgccaa

SEQ ID NO: 145685 - DNA, 201 bp, Homo sapiens
ggttcttccctctaggaagtcagactcgcagctccctcatggagcccagctggggacttggagtcaggaaggcctaagttcctttgggtcagggctctacrtaaaggcacctgagtggctgaacaagctgtccttgtgtctgtactttgaggatgtctggagccactcttggactctcacccagcagatgtgtacaaagtg

SEQ ID NO: 145686 - DNA, 201 bp, Homo sapiens
tcatggagcccagctggggacttggagtcaggaaggcctaagttcctttgggtcagggctctacgtaaaggcacctgagtggctgaacaagctgtccttgygtctgtactttgaggatgtctggagccactcttggactctcacccagcagatgtgtacaaagtgaacataacacatgagaaacaggaagttggacacatt

SEQ ID NO: 145687 - DNA, 201 bp, Homo sapiens
agatagatttggggcccatcagcagattggtggtaggtgaagctacagcagattggtgttaggtaaagccacagggaagaaggaccattccagaaaaacayacaaagtgagaagagtttgaaagaggagatggcctgggaaaaattccccactgtaagggttgggcagtttaaaaactgagacagaagaatgtttagagag

SEQ ID NO: 145688 - DNA, 201 bp, Homo sapiens
caaagcctgtcctttcagccacctgcccactctccagaagagagcaccctttgtattttaccgtatgagatctctgcaccattccctacattctacacaakggggctctgacacctacttctgatttatctgattagagaactgggggagaacagcctcggttatggtccaggccattatctgctctttgggtgcagggat

SEQ ID NO: 145689 - DNA, 201 bp, Homo sapiens
tggaaggctgtcttattagccatgtgaacactttgtgctgccttaccgactctatactcaattctgcccttcctcggctttttgttctttggtcagctgtrcctgtgatctccaggctgtggtgatcattgggcataaattccttgccccactttccccggaaaaggacttcctaattggggtctgagctgaagtggctct

SEQ ID NO: 145690 - DNA, 201 bp, Homo sapiens
agtttgaaagaggagatggcctgggaaaaattccccactgtaagggttgggcagtttaaaaactgagacagaagaatgtttagagagatagaaggaagacragggatgatagtgtcatggaagcagaagaaaaagacatttcaagaaattagggatttctgaattactggggaacaaagatgcataaaaaataggcccatg

SEQ ID NO: 145691 - DNA, 201 bp, Homo sapiens
ccctcaaacacatgtgcttattcacacgttcagtcacgccactcccaaaaggactcttcccaggaggaggtgtgactgagtttctcccgatggactatatkcattcttacttagcaaatgaacaaacatttctagaaatgctgctgaacctcaagcaccactttaacccctgggaattgctctaaaactcccattacactg

SEQ ID NO: 145692 - DNA, 201 bp, Homo sapiens
actaatattgtaattcctataaaatgcatctcatttaagatagcaatggcaattatataattctatttcctaagaaatttccaaattaattatgaaacatwattatatcataggtgttattagtactgataactgaacttagcaaatattaaaatttccacagcttgtattccacagatttgttgagcttgtcagagcaga

SEQ ID NO: 145693 - DNA, 201 bp, Homo sapiens
ctcccctcctttactcttcccttttcttctttgctgttgccttcccttcccttcccttcccttcccttcctccttagtaggaatttgaagtggcatctaaygaatatcagatttattataaggttaataaaatataagatcccttctcattctgagttcttttggataatgccctccttagaaagttctagtgtattagct

SEQ ID NO: 145694 - DNA, 201 bp, Homo sapiens
agaaagaaaagtttcctgactcaatgttatcctacccaagcctcattaactaccctcataaaactagaaactcgaaatcagctctgcccaactgaaatatratgcaagccatatatataatttaaaatttttttcataaccacattagaaaagcaaaaagaaattagggaaattaattttaataatatattttatttaaat

SEQ ID NO: 145695 - DNA, 201 bp, Homo sapiens
tgtgacacctgatgcgtaggtaaggaattgggcttattttctattaattcgcagtgagtttctttcccttagatagctaaagggtaggatgtatgattctytgagagataagccacaatctgctaagtgtgtaggaggacactaaaagctggaaaagattatgttctagcaaagtgaaatgtgaaaaatctttcttttgca

SEQ ID NO: 145696 - DNA, 201 bp, Homo sapiens
agaggctagagactatgatgaagggataaaaggcatgctatgggaactgagaagtgaagaaactctttccagagcagtctgtctggaaggcttgacaaagraggaaaaaatattccatttgacttttgaaaaatgattcagaatatgctgcgcattaaaggaggaaagggaattacacgcagaagaaacaggatacatatg

SEQ ID NO: 145697 - DNA, 201 bp, Homo sapiens
caccataatcaggttaaaactttttctttctgcagaaagctgcaaagcttcagggtattgagatcattgtggcagtgttcccagaagctccagcttgactyatctagagtccagcccccaactccccctctgatttcatgcagggctggcagggattggggtagcagaagagatatctgttgccttaagtgtatacaggta

SEQ ID NO: 145698 - DNA, 201 bp, Homo sapiens
tttataagttgttgaagtcattgggaaaaagtcaattatggcaaaatcatcatcatcacatttgtagagcactttcgtaggtcagcaattctactaagttytttatgtgcatcctcttagacatgtggcaactctaggaaatatgtatgattatcgtctccattttacagatgacaaaatcaaggtagagaggggttaaat

SEQ ID NO: 145699 - DNA, 201 bp, Homo sapiens
gtggtgctgagtttaaattccacctgtgacagtttctagccatgtgactatgggcaaatgattaaaagtcacctacattaaaataactgctttatagagtkttgagaactaagtaagataaagactgaaaactgcagcaaccaaagtcatgtctacagagaggaggttcttagccaaggttaacacccttcctttcacccc

SEQ ID NO: 145700 - DNA, 201 bp, Homo sapiens
atgtagactggaaagcttcttttctcatgttttctcatgaaatccatacccataattcattaaatgaacaaacattgcaatataatttctgcaactcctawttttaccctgaacctttctcttgctaatcagaatgacccagcaaacatagatggggctatggaaaaaggtactgcattctttaaaaaaatcgtttgaaag

SEQ ID NO: 145701 - DNA, 201 bp, Homo sapiens
tgctcatccactgacacatcctctcctgcaaaatgggtttcttttaaaaacgagagtctcacctggtgatggtgattattaacttcatttgggagctctartaaaaaagtgagataaacacctttttctcttgaggtagactctattctctgcttgtctagttctaaaaagcaattcatcaggaaagagaacatcatgagt

SEQ ID NO: 145702 - DNA, 201 bp, Homo sapiens
ccagggaggtggaagtcaagtggccaagtatagggctgtgctgatcatgaaaagaaaacggacttctctttatatcctgttctttccaggaatgaccaagrgttgctatcagcttgaattctaatcacctggctgcagctgagtggaaaaactagccaccataatcaggttaaaactttttctttctgcagaaagctgcaa

SEQ ID NO: 145703 - DNA, 201 bp, Homo sapiens
ggagtaattaggcctctgaactttcagaacttgctttttgattaggtatctcattcctttgctaaagctcttttagaaatttctaccctaccataagctagaatctgcatgcatacccttcccccaccacccactcccacagctgtccctcccactagtgtagtttttctctgcttcttttattatgtgataggtttttaa

SEQ ID NO: 145704 - DNA, 201 bp, Homo sapiens
taggtatcatatggcattgaatcttcagaactctttctatcaagtatcagtgagaaactacaagcttaacggagctgtaagtcattggtatgattgagtcwctaatttgaactaaactgacccccaaacctctgcactatttgaattataactcacaatttcttcagcatcaaatttctcccatttgacactaattatgaa

SEQ ID NO: 145705 - DNA, 201 bp, Homo sapiens
aggcttaccatgggaagtagattatcatagtaccttacaaaggcttaaggagtcacttctttaagggatatttatttgcatttcaataggaaatgtttaakgaatacaaaggtttttagatacataggagccaactctaaaaatgattattcaatctctgtttctgaccaatggagatggtatttttcaggcagggggctc

SEQ ID NO: 145706 - DNA, 201 bp, Homo sapiens
ggctttaaggcattgttggtatctttctcttgctccttcttcagatgtagcttccagtaagtacttcggaaagttaaacaaggatcatttccagtttcacygcattatcctgggacactctgcacagaatatcttctttaatcaggacatatttaatcagcagatctaccactaaccactggctattgttctctctgatag

SEQ ID NO: 145707 - DNA, 201 bp, Homo sapiens
ccagtaagtacttcggaaagttaaacaaggatcatttccagtttcactgcattatcctgggacactctgcacagaatatcttctttaatcaggacatattyaatcagcagatctaccactaaccactggctattgttctctctgataggagtatactgaagcatggaaaaacagaaatacagactttatttacctactttt

SEQ ID NO: 145708 - DNA, 201 bp, Homo sapiens
ttttattaaggcatttagcatagtacttagcatagtacttggcacactaagctctccttaactaatagctatagttattgtttagaatgacaacagagaaycagagaaagcctctaatggtcagattactatgtgcatgtttttgttcagaaactctgaacaaggtatggtgacagattaaagaaacaggcagtagtgaga

SEQ ID NO: 145709 - DNA, 201 bp, Homo sapiens
ccaggaggaagagcaagtagatttagcctctgccataggagagttaagaagttggggttccgagaggactgatgagaaactatgtagtcagtaaataggcrtcattggtgacttcccagaatacttttagcagagccagggaggtggaagtcaagtggccaagtatagggctgtgctgatcatgaaaagaaaacggacttc

SEQ ID NO: 145710 - DNA, 201 bp, Homo sapiens
tgggggacagacaggtcactgcttcttagcttcctaacacattactaaaattcctttcagtatcctcagtgaccttctttgtgttttagggacaccattcrggaccttgtcatggagaaatctgctgggccctatgacaaaggtgaatacttgacctctgtgcagaagaccctctgtgatatccaggtgctctccctgagc

SEQ ID NO: 145711 - DNA, 201 bp, Homo sapiens
acaggaaaacatggaagagtatttatgtttctaattgcaattacagaggtaagatgtggaaattaattttttgaaaacaaccctttgtcttggagaaacayttctcctgtttttttgtttttttgttttttttttttaagccatggcagaatgttaaaccactcagtgtgtctgactagacagcctgaagtactgactggt

SEQ ID NO: 145712 - DNA, 201 bp, Homo sapiens
accaagatcaaacttgttcctgctttcatagtttactgtttttgaatgaatcagacacataaagaggcaggtgcaatacaatttgataaatattctgatarggcaataacaaatattttgagagcacctaaaaggggcagctattccagacttgaagggctggggtggaccctgggagaagtggcatctgagacctgaagg

SEQ ID NO: 145713 - DNA, 201 bp, Homo sapiens
tgtagttgagaggaatgtattcatttctgtggccttcaatacggaatggaggttattcttagaccttcagattttcgagggcaagacagggcagggagtcwtggaatccagatggaagcaaaggcacaccatcctcttcacttggacttcagaggaaataggatgacagaaaacacgggcggtgatgtagtttttgtacag

SEQ ID NO: 145714 - DNA, 201 bp, Homo sapiens
aaaaaaaaactgattggttaacatcgggtttcagattacttttttagtaagagttaaagcagaggggacttccttatcgcactgactcagatagactggartctcctgttttcaggaaaaactggtctgttttggtatctatctgcttccttaaagcttcaatttgattatgtggaatttagcataagtgactccattttg

SEQ ID NO: 145715 - DNA, 201 bp, Homo sapiens
gccaaactatgaagacagtctagtgatgctcaatatgtttgttgaatggtgtatgtgtgtgtgtgtgtgtgtgtgtgtgtgtgtgtgtgtgtaggggaatkggaagtgaggtgttttgtttttggcattgcaagatactaatatcttctaaaaacatcaataacattgttttctgggggacagacaggtcactgcttctta

SEQ ID NO: 145716 - DNA, 201 bp, Homo sapiens
atggctcagcattctacaggcccccttcaggccttcctctggctgtgcctccctccactaggtgaagaatcagtggggccacagcaacatactctgcagasgcccatgcattccccagaatttcctgtccaaatagccctgagactacttcgggaacgtgggcaaatctcttctcgagatctgtcttccagagggcgaatc

SEQ ID NO: 145717 - DNA, 201 bp, Homo sapiens
gaggagggctcctgagggcccccgacacctcaggtctgcactaatcccagcatgctggggggctgcgcccacagggttcttccctctaggaagtcagactygcagctccctcatggagcccagctggggacttggagtcaggaaggcctaagttcctttgggtcagggctctacgtaaaggcacctgagtggctgaacaag

SEQ ID NO: 145718 - DNA, 201 bp, Homo sapiens
ggaagattttaaaccccgtttcaggccccctccctaggctgtaggaaaccacccactctgaagcccggcgggggaggagtgctgcagccagctgccgaggragcgctctgcggcgaggccgtttccctgagtcacggagagggcgggaggctgcgcccgtctgcccccgccacgtcctcctgtgaggggctcagtcgaaac

SEQ ID NO: 145719 - DNA, 201 bp, Homo sapiens
atagtttggctgttaagtgtacttgtgacttactagaaatttacttttctttcaggatatcttatttggtttattgaagaagctatttcaggagaagtctsctaataggaaggagcatttaaaagtggtggtaatgtcagcaactatggaattagccaagctctctgcattctttggaaattgtccaatatttgatatacc

SEQ ID NO: 145720 - DNA, 201 bp, Homo sapiens
tgacactgctgtttgaacattaggagacagcaatcaaatatatgactgatggatgtttactgaaacatattctgggagacccaaatcttaccaaattcagwgtcattattttggatgaagcccatgaaagaactctaactacagtgagtattttaatttattattatttttttattagcaagtagtttgtttgggtagctt

SEQ ID NO: 145721 - DNA, 201 bp, Homo sapiens
agtgaaattatctatgtcagatgactattgcttagtaggcatttattatataacattgattctcttgtttcctcctcaaacctttactgaaaatgaccttrtagaattttgcttctatataggtagcctagattaaaaaatgattggatatttgttattgcatatataagtaaagaaatccatttacaaattattttttaa

SEQ ID NO: 145722 - DNA, 201 bp, Homo sapiens
tatttgtccctttttctgtatagacagcatgttttgtaacttaccatcattttgtatacataagttagactatttttatgtacccttttgtttagtcagaktggtttgatcacttaatgtttgtacctcttgaggaaaaatttagttgggaaaatagtggtgaattcctgtgacactgctgtttgaacattaggagacagc

SEQ ID NO: 145723 - DNA, 201 bp, Homo sapiens
tgatattgacttcaaggtattttgaatttcagtgaaattatctatgtcagatgactattgcttagtaggcatttattatataacattgattctcttgtttyctcctcaaacctttactgaaaatgaccttgtagaattttgcttctatataggtagcctagattaaaaaatgattggatatttgttattgcatatataagt

SEQ ID NO: 145724 - DNA, 201 bp, Homo sapiens
aagatgatattgacttcaaggtattttgaatttcagtgaaattatctatgtcagatgactattgcttagtaggcatttattatataacattgattctcttstttcctcctcaaacctttactgaaaatgaccttgtagaattttgcttctatataggtagcctagattaaaaaatgattggatatttgttattgcatatat

SEQ ID NO: 145725 - DNA, 201 bp, Homo sapiens
ggaggatttaatgactttgcaactttagctgtcatctttgaacaatgcaaatcaaggtatgtaaggtagtcctttgtcctgaaaaatgtcaatttgatgtrtagttccaatacgtacttatgatgtggcttgtgacactaacgttcagtgaagatgatattgacttcaaggtattttgaatttcagtgaaattatctatgt

SEQ ID NO: 145726 - DNA, 201 bp, Homo sapiens
catttttttttctgtaagcatggattactcttataacaaaactaatttaaaaagtaaattacaaatactatttttaaaaggcaaatagattgggagaagtratgttgctattcaggtaaaatctccaaagtgatatgaaaagaaaaaaaggaattgtgggagaaatagagcttcctaagagaagttaagaagagttaatat

SEQ ID NO: 145727 - DNA, 201 bp, Homo sapiens
aagaaatagattcaatgtcgttagggacactgacctttcttcccagattcaacccatttattttctatttttactctgtacttgagttttgtttgtcattrtaatttgtaaactcactgggtaggaaataattgttgatcttctaatttagaatagccccaagcacatggttatcatggtaacatgctttaaatgtccttg

SEQ ID NO: 145728 - DNA, 201 bp, Homo sapiens
tatgttccatttatagaaaaatgaaacattatgtacatatgcttatatatacatagaaattacctggaaggacacacactaaataatgaacagtactttgycttgaggattggtttatgggtagtgtgactggggaacattgaacttttacatgatattcttttataccattacatttttttttctgtaagcatggattac

SEQ ID NO: 145729 - DNA, 201 bp, Homo sapiens
agaactggttaaattgtgttatgttccccatactcctggggaataccatatcattgtttttttctttagacaaggtttcactctgttgcccaggccaaagygcagtgatgcgatcacggctcactgtagcctcaacctcctgggcttgggccgggcacggtggcttatgcctgtaatcccagcactttgggaggccgagac

SEQ ID NO: 145730 - DNA, 201 bp, Homo sapiens
ctgcatatatggagatcatgtctaattgcccataattgggaattggataaataagaactggttaaattgtgttatgttccccatactcctggggaataccrtatcattgtttttttctttagacaaggtttcactctgttgcccaggccaaagtgcagtgatgcgatcacggctcactgtagcctcaacctcctgggcttg

SEQ ID NO: 145731 - DNA, 201 bp, Homo sapiens
tctgaaagattagccctggataaagtgctgtatggggaatttgggcaatcagagagcacatgagtcctgaatgggatcaggggaagtggtatcgaagtaaktaacagataaatctcaaaaacgtaatgttgagcaagagaaaacagacacatcaagtacatactatacgattcatttatacaaaggttaaaaatgggcaaa

SEQ ID NO: 145732 - DNA, 201 bp, Homo sapiens
gaagctacttaaagcatgggatagaagactttataccttcatcagtgttttctttaatcaaattactttcctcctagtaacaggaactgctgctttgcagwttcacatcgtattctatagtaaatgctgctccctggattcaggcaacattgtgcctctgctagatctagctgtgataggtatagggaataggaattgtga

SEQ ID NO: 145733 - DNA, 201 bp, Homo sapiens
tcaatccaagtttagttgctgtggttgcttttgttaaagtggggtggcaaatgaatgtggagagttgaggggtgctgttcttaagtgtgaggggaaaacgsgggcttattttcatattaaactgcatctgaaatatctttctgcagacaaatgtttataaaccacacagagaatcaagtacagctgctctttattttccac

SEQ ID NO: 145734 - DNA, 201 bp, Homo sapiens
tttatttttcttcattctttgcttgcaggttttatattctatactctcaataggtggttctcatacaagaatggggtcagttctattagagttacaaacaytggaagaaaatacattattttggtaccaaaatctaaatacttccatctcccaatgcagtttagtggttattagtgtgactttgaatcttggccctcttag

SEQ ID NO: 145735 - DNA, 201 bp, Homo sapiens
agaatccgcgcgtcaggttctccaacagtcagaagggcttgtgtgagggcagggaagattttaaaccccgtttcaggccccctccctaggctgtaggaaaycacccactctgaagcccggcgggggaggagtgctgcagccagctgccgagggagcgctctgcggcgaggccgtttccctgagtcacggagagggcgggag

SEQ ID NO: 145736 - DNA, 201 bp, Homo sapiens
atatattagaaaaataggaacaataattaatatcatctgcattgaattatttttccatcttaagtcttaaaagccatagtgtactaaaaatcgcaaaattwtgtttcaaaatgcttgaaacaaaaaacaaagacttcctttttaaaaagttgtataaagaataaggagaggtagagccagtgtttggggtagatggtatag

SEQ ID NO: 145737 - DNA, 201 bp, Homo sapiens
tagagtaaacattgagctttcacttggaagaggtcccattttactagtaaattaacgggaattctacacatttattaaagactatatgcatacatataaaagcacaattttcattgacaactagcagtgtctcaatctctattaagctctcaaacaatattgttgatgaatgatttaatgactatttggtgactggctttg

SEQ ID NO: 145738 - DNA, 201 bp, Homo sapiens
cctcctaaagtgctgggattacaggtgtgagccatagcacctggctgctattttttacttttggactgaacgtgagatatttctcttgttttgtgatatgsccataccatctaattattttcctctaaacccccaagttgctaatatactataagcttattaataaaatatgtaaccgtggcatgtagtccaccaatacat

SEQ ID NO: 145739 - DNA, 201 bp, Homo sapiens
aggcttgtcttgaactcctggcctcaggcgatctgcccgcctcggcctcctaaagtgctgggattacaggtgtgagccatagcacctggctgctatttttyacttttggactgaacgtgagatatttctcttgttttgtgatatggccataccatctaattattttcctctaaacccccaagttgctaatatactataagc

SEQ ID NO: 145740 - DNA, 201 bp, Homo sapiens
gcagtggcatgatctcagctcactgcaacctctgcctcctgggttcaagtgattatcatgcctcagcctcctgagtaagctgggatcaccggcgagcgccrccacggctggctaacttttgtatttttttgtagagatggggttttaccatgtcggtcaggcttgtcttgaactcctggcctcaggcgatctgcccgcctc

SEQ ID NO: 145741 - DNA, 201 bp, Homo sapiens
agtgcagtggcatgatctcagctcactgcaacctctgcctcctgggttcaagtgattatcatgcctcagcctcctgagtaagctgggatcaccggcgagcrccgccacggctggctaacttttgtatttttttgtagagatggggttttaccatgtcggtcaggcttgtcttgaactcctggcctcaggcgatctgcccgc

SEQ ID NO: 145742 - DNA, 201 bp, Homo sapiens
ggggttcaagcgattctcatgcttcagcctcctgaatagcggggattacaggcgcgcgacacatgcacagctaatttttgcatttttttagtaaagacggkgtttcaccatattggtcaggctggtttggaactcctgacctcagatgatctacctgcctcagcctcccaaagtggtgctgggattataggtgccaaccac

SEQ ID NO: 145743 - DNA, 201 bp, Homo sapiens
aaaaaaaaaaaaaagagtgtaagtcccttccttggctaaaattttcacttatggaaaaaaatggtgctagaacaattgtgtgtgtgtgtgtgtgtgtgtgkatataggtgtgtgtatgtatgtgtgtgtgtataccttgacccataccttgtgccatgtaaaaacatcaactcaactaaacatgcattgcaaatctcaatg

SEQ ID NO: 145744 - DNA, 201 bp, Homo sapiens
caggggtctttggagaaatggggctgggaaaatgcaagatgagcccagaatatcttattttgccagcaagtaaagaagtgattaacaaaggttgaggccaygtcagaagaacataggagccagcatgaagaggccccaagtaatcaaatatgagacactttaagcatcaaaataagtagtgatagtagcggattattatgc

SEQ ID NO: 145745 - DNA, 201 bp, Homo sapiens
tcagtcagagtgtagtgaggaaggcatctttatagagaaaggggtaacagtgatggtgatggagattcattaaatacagaggaattgaacacataactctrtgagtgataatggtgaagggagttagaaatagcgaaagtgagaaaataggaatgatctctgtgctgttggattgaaatttcagtgtatcatgatgaagtt

SEQ ID NO: 145746 - DNA, 201 bp, Homo sapiens
ccttccttagtttataaatgacagtttattttcttaggattctcttatttatgttttttaactgtaaggattcttgacatgtaggtttttaaaatgttttwttgtagtaaaatatatataacttaaaatcgaccattttactattttggtatacaattcagtgccattaagtatgttcacaatgggctgggctcgatggct

SEQ ID NO: 145747 - DNA, 201 bp, Homo sapiens
aattagtctcccggagcagttcaagaaatggagattaataatcatttatatcttttccttaccagggtcatttgtatgtttgtatggtctgagataaatcrtattcttttttttttttttgtctctagctgcttcattcagttgctacctaggtaacatagttggaagctacttaaagcatgggatagaagactttatacc

SEQ ID NO: 145748 - DNA, 201 bp, Homo sapiens
atacattatattataatgtatatttatatataatatatagtatatattataatatattataatgtatatttatatataatatattataaattatataatayatataatatgttatatattaatatatataatatataatatattataatatatattatatattaaatatatattagtatataatatatataatatataaat

SEQ ID NO: 145749 - DNA, 201 bp, Homo sapiens
agagggcgggaggctgcgcccgtctgcccccgccacgtcctcctgtgaggggctcagtcgaaacaggcagcggtcgcagggaaacgaagcggcacccgtcrtgcctcaaggtggcccaaaagcctcttcactcccaggagacgccgcatttccttaaaacgagctctccatttctggcagcaatcagccgacccttcccca

SEQ ID NO: 145750 - DNA, 201 bp, Homo sapiens
aggtgcttaaaatgaaatattttgggttaaaaattagtatccctggctggcgtgttggctcaagcctgtaatcccagcactctgggaggccagggcaggcrgatcacctgaggtcaggagttcaaggccaacctggccaacatggtgaaaccccatctctactaaaaaatgtaaaaattatttgggtgtggtggtgtgtgc

SEQ ID NO: 145751 - DNA, 201 bp, Homo sapiens
accaacagggaaaaaacccgtctctgctaaaatacaaaattagcccggcatggtggcacatgcctgttatcccagctactcgggaggctgaggcaggagarttgcttgaacctgggacgcagaggttgcggtgagccgagattgcgccattgcactacagcctaggcaacaagagcaaaactctgtctaaatatatataat

SEQ ID NO: 145752 - DNA, 201 bp, Homo sapiens
ttttctcctggtattgcgagccaggatggggtcgatgctggagtctagggcaatttgacttttggcatgatatcttctgggggatggcagttaggtgcttraaatgaaatattttgggttaaaaattagtatccctggctggcgtgttggctcaagcctgtaatcccagcactctgggaggccagggcaggcggatcacct

SEQ ID NO: 145753 - DNA, 201 bp, Homo sapiens
aaatttatcaaaaatgcatgcaaacacagactgcatggtgccatgattctagggattccaggaggcactgactcacaggtaggcttttctcctggtattgmgagccaggatggggtcgatgctggagtctagggcaatttgacttttggcatgatatcttctgggggatggcagttaggtgcttaaaatgaaatattttgg

SEQ ID NO: 145754 - DNA, 201 bp, Homo sapiens
ccacagagagaaaaacaggcagttaattttaaaggactccagctctttctcttcctcggggaattgggttttcttacatacaactgagtttttgcttatamagtctttaatttcttttaattcctgttccagtactagtctgttttataatttactaccataaaatatacacaaatctattataaaaagttaaaatttatc

SEQ ID NO: 145755 - DNA, 201 bp, Homo sapiens
gccagttctagttagaatccgcgcgtcaggttctccaacagtcagaagggcttgtgtgagggcagggaagattttaaaccccgtttcaggccccctccctrggctgtaggaaaccacccactctgaagcccggcgggggaggagtgctgcagccagctgccgagggagcgctctgcggcgaggccgtttccctgagtcacg

SEQ ID NO: 145756 - DNA, 201 bp, Homo sapiens
ctcaggtgatcctcctgcctcggcctcccaacatgctgggattacaggcgtgagccatgcactcggccaattttttcaataaatatattggaaaagttttyggagatttgtgacactttgaaaaaactcacagatgaactccgtagcctggaaataccaaaaaaattaagaaaaagtatgtcatgaaaacataaactatgt

SEQ ID NO: 145757 - DNA, 201 bp, Homo sapiens
ctcccaggagacgccgcatttccttaaaacgagctctccatttctggcagcaatcagccgacccttccccatcagtatcacgtgcacctggaagtacgtgsgtgggacctaaagcgcccacggaagtgacgtcggtcgccccgagtcgcatgatgtggcaaaatgaaaaaaaaaaagtggggggagaaagagaagactggc

SEQ ID NO: 145758 - DNA, 201 bp, Homo sapiens
tacttatttgtagattttttgttttttgttttttttttttgagacagaattttgctcttgttgcccaggttggagtgcagtggcacaatctcaactcaccrcaacctctacctcccaggttcaagcaattctcctgcctcagcctcccgagtagctgagattacaggcatgtgccaccatgcccagctaattttgtatttt

SEQ ID NO: 145759 - DNA, 201 bp, Homo sapiens
cctccaggaaccttcaggtttttttttgtttgttttttttttgagacggagtctcgctctgtcgcccaggttggagtgcagtggcgcgatggaaccttcgrgttttactaagcatccttaccctaattatctaaatctttgagacgtaaattatttgatgtggctaaaaatcctcctgctagaatttaggtccaatccttt

SEQ ID NO: 145760 - DNA, 201 bp, Homo sapiens
catttccttaaaacgagctctccatttctggcagcaatcagccgacccttccccatcagtatcacgtgcacctggaagtacgtgggtgggacctaaagcgyccacggaagtgacgtcggtcgccccgagtcgcatgatgtggcaaaatgaaaaaaaaaaagtggggggagaaagagaagactggcgaaagtgatgagtcta

SEQ ID NO: 145761 - DNA, 201 bp, Homo sapiens
tgggagtagtgggaactaccactgagctgctgaacccattggaacaactcttctgcaacacagagctgtggggaatagaggactgcgtaggctgtcattakctgttatgctttgatcttccctaccgagtagcatttaggagtcagggaaagggtgccgctttcaggctgccttgaaggctctcgcatagcccttccacac

SEQ ID NO: 145762 - DNA, 201 bp, Homo sapiens
ggggttggggagttaggagctgatactgtggctcactttgcatcttcctcagcacaaagccttttgagatgcaatctctggatgttcactagttgcaaacrtacaaacctggaatagctctaggaaactgggagtagtgggaactaccactgagctgctgaacccattggaacaactcttctgcaacacagagctgtgggg

SEQ ID NO: 145763 - DNA, 201 bp, Homo sapiens
tcctccaggaaccttcaggtttttttttgtttgttttttttttgagacggagtctcgctctgtcgcccaggttggagtgcagtggcgcgatggaaccttcrggttttactaagcatccttaccctaattatctaaatctttgagacgtaaattatttgatgtggctaaaaatcctcctgctagaatttaggtccaatcctt

SEQ ID NO: 145764 - DNA, 201 bp, Homo sapiens
gggtggtggtggtaatgggggcctgttcttcagtggctctcctatctgggtcctccctaaatagcagaagcttggggttggggagttaggagctgatactrtggctcactttgcatcttcctcagcacaaagccttttgagatgcaatctctggatgttcactagttgcaaacatacaaacctggaatagctctaggaaac

SEQ ID NO: 145765 - DNA, 201 bp, Homo sapiens
aggagtttgaggctgtagtgagctatgattgtgccactgcactccagcctgagtgactgagaccctgtctcaaaaaatataaataaataaataaataaatwgtcacttttgaataacaaattttcttttggttaaatccagaatctttcacatttcttcctgcttccctctgcttctgttcaaaataatgtctagctgtac

SEQ ID NO: 145766 - DNA, 201 bp, Homo sapiens
tttacctaacctctcagagcctaagtgtaaaattgttattcctgtaaaaatcagaaataataatcatttgacagcatttattggtacaagaaaagagaacygggtgtggtggctcatgcctataatcccagcattttgggaggccgaggtgggcagatcacttgaacaaagagtttgagaccagcctgggcaacatggtga

SEQ ID NO: 145767 - DNA, 201 bp, Homo sapiens
acctatttttctgtactcccattataagcatataccttagatgatttgatatttccttctaccttgcagcctcactcggtagagttagtttgtatatccartgtttatctggatgtattgtctctgactttttacctttttgtgaaaattaactatgattcaggtcccttatcttttctggatgtagtaaatagtgctatc

SEQ ID NO: 145768 - DNA, 201 bp, Homo sapiens
cacaggcgtgcagtcatagcacactacagccttgtatggagatcagccaatcctcccgcctcagtctcctgggtagctgggaccacaggcatgtgtcaccrtacttggctgttcacactttttaactacttggcaacttgaagcttcttttcaaatttaagattatgtataatgctttatgggtttcactaaataggaagc

SEQ ID NO: 145769 - DNA, 201 bp, Homo sapiens
ctattgaagcatagatatctattttagattttgtcatcttcagggaaattcttaggatcattgtttaaggttctcattgttttctcaagatttggttcacygatgcttttataatttacattgaaactgataaaaacccattatgtttggtttgttattaatcattaactaaatatgtacatagacatatattattctata

SEQ ID NO: 145770 - DNA, 201 bp, Homo sapiens
ctatattaacaaagttttggaatatatgtgtcagtaaagaacatagatgtgctattttggaaatcttttttatgatgatattagcttcttactctctattraagcatagatatctattttagattttgtcatcttcagggaaattcttaggatcattgtttaaggttctcattgttttctcaagatttggttcaccgatgc

SEQ ID NO: 145771 - DNA, 201 bp, Homo sapiens
aattgctggaacccgggaggcagagattgcagtgagctgagatcgtgctaccgcactccagcctgggtgacaaaaagagattccgtctcgaaaaaaaaaamcaatataatatcaaatagtaatcaatgattagaagaaaaataaagaagagagcatagagagtgatgagacactcttttaggtagcatcatcaggaaaggc

SEQ ID NO: 145772 - DNA, 201 bp, Homo sapiens; identical to SEQ ID NO: 26926

SEQ ID NO: 145773 - DNA, 201 bp, Homo sapiens
aaaaaaaaaaaaaaaaagataaagaaaaagaaaaagcacccagttgtaactgctggagtttttattgtttcagaaaagttcaagggaccgggcgcggtggytcaggcctgtaatcccagcactttgggaggccaaggcgggcagatcacaaagtcaagagatcgagcccatcctggccaacatggtgaaaccccatctcta

SEQ ID NO: 145774 - DNA, 201 bp, Homo sapiens
atatactcataggttgtttgtcagattcgctttgaattgagaataaataaatagagaagagaaggagaaaagtttttgcctttcttcttctttttttttttgtcacaaaaacatctaagcctgaatgtctcctaaattattctttgtggctggttagtcaatttagccaaagttgaaggtacttcctccttcttgaatgca

SEQ ID NO: 145775 - DNA, 201 bp, Homo sapiens
ccattcccaaatatattaaaatggtatatggaaggtgcatatatatatatatataaatatagatatatatatttatttatttttttgagatgagatcttaytatgtcgcccaggctgatctcaaactcctgagttcaagcaatcctcctacctcaaccttctgagtagccaggctcctgagtagctgggattacaggtgtg

SEQ ID NO: 145776 - DNA, 201 bp, Homo sapiens
tattagtaagaatggaaatgcgccatcgattttaagatgcagctccattcccaaatatattaaaatggtatatggaaggtgcatatatatatatatataaatatagatatatatatttatttatttttttgagatgagatcttactatgtcgcccaggctgatctcaaactcctgagttcaagcaatcctcctacctcaac

SEQ ID NO: 145777 - DNA, 201 bp, Homo sapiens
ctgtattagtaagaatggaaatgcgccatcgattttaagatgcagctccattcccaaatatattaaaatggtatatggaaggtgcatatatatatatatataaatatagatatatatatttatttatttttttgagatgagatcttactatgtcgcccaggctgatctcaaactcctgagttcaagcaatcctcctacctc

SEQ ID NO: 145778 - DNA, 201 bp, Homo sapiens
acagtgcccagagcataaattgctccatagtcttgatccaaataaagttgggcacctcggcaggggcaaggtattgcccgtctttgataatcctttccccwtcctttcctggaaacaatctctgtgctatggagcaggagttggagagggtggtggtggtaatgggggcctgttcttcagtggctctcctatctgggtcct

SEQ ID NO: 145779 - DNA, 201 bp, Homo sapiens
ggagttaaatttacatatatctatattacatagatctataagggtattggttggcctgtgcctcctgtttgaagaagataggaattaattgagaaggattyggactatttggttggtttaatgtggaatagggcaggttattgagttaccatcattaaaagaaatgttttgtatagcttcatgaacaggaaaccaaacttg

SEQ ID NO: 145780 - DNA, 201 bp, Homo sapiens
caaaaataggtaactacaatgatattttgagagaccacattcacatataacttttattatagtacattgttataattgtcctattttcattgttaatatcktactgtgcctaatttataagttaaactttatcataggtatatatgtatagaaaaaacatagtgtatactgtatggggttcagtattagctgtggtttcag

SEQ ID NO: 145781 - DNA, 201 bp, Homo sapiens
ggctggtctgtctctattggtgtcacagcaagctgttagtctccactgattgctagctgctggctctgttgtttttgacagtgcccagagcataaattgckccatagtcttgatccaaataaagttgggcacctcggcaggggcaaggtattgcccgtctttgataatcctttccccatcctttcctggaaacaatctctg

SEQ ID NO: 145782 - DNA, 201 bp, Homo sapiens
tcgtctttcccctcccatctcctcagatcggtggacgtgctcgcctccactcggggccaggtctatgtcccggtttcccgcagtcgcgggcagggcgccamggcggcaggaggagggtgagcggtcaagagacctccaggaagagcggctctcggctgtttgcatcgccgatagaggtgcggtccgcgggacggtacggaa

SEQ ID NO: 145783 - DNA, 201 bp, Homo sapiens
ttttactgttgaatctgtgtttctggttaggagactactttcatggttgagggagttgatgaatttgtactgtgttcagccaaggagtagaggctcagacrttccctctctatttacttctcagaaggcacagctttgggcatgagaacaatcttctagaacaccaggaagactatgctcttagcaggtctctgtttcctt

SEQ ID NO: 145784 - DNA, 201 bp, Homo sapiens
gatgttttcaccttttactgttgaatctgtgtttctggttaggagactactttcatggttgagggagttgatgaatttgtactgtgttcagccaaggagtmgaggctcagacgttccctctctatttacttctcagaaggcacagctttgggcatgagaacaatcttctagaacaccaggaagactatgctcttagcaggt

SEQ ID NO: 145785 - DNA, 201 bp, Homo sapiens
gacctcaggtgatccgcccaccttggcctcccaaagtgctgggattacaggagtgagccaccatgcccggccccttgtcttaaattaaaacaaaaaaaaamaaaaactttaattcgtggattctttcttctgccagcccagatctactgttgagcccctctatggcagtttccattttgtttcttgtccttgtcaactcca

SEQ ID NO: 145786 - DNA, 201 bp, Homo sapiens
atatgtaaccgtggcatgtagtccaccaatacatgactcagaaaaattcccaaattttttgtctagttccatttagtttagggcatgaggttttctttcaygtttacattctctctagaatgaagttcccctctctctctttcaaggtctacatgtatccaggactactagatgaaaaactggtcatagatgtttgtttct

SEQ ID NO: 145787 - DNA, 201 bp, Homo sapiens
attatacactctcctttcttgtgtctggcttctttcagtcaacataatgtatgttaaggtttattcatattgttgtatgtatgaatactttattctttttrttgttgactagtattccactttatgaacatacagttgtgcattatcctgttgatggacatttgaattgcttcttgtttagttctatttttgagtaaagtt

SEQ ID NO: 145788 - DNA, 201 bp, Homo sapiens
aacacaaaaattagggatagtaataacctaactgtatgagtttttgtgaaaaatagaggaaataatttacagttgaaacctgaacaaggtggggttaggarcacgagccttttgcactgtaaaaatctgcatataactcttttctttttttttcttggagacagagtctcgctgtcacccaggctggagtgcagtggcgcg

SEQ ID NO: 145789 - DNA, 201 bp, Homo sapiens
tttcttcccattttaggccagtttgaaatagaaaaaagttgtgagttactttttcagatggcagagtctgttgattatgattatgatgttcaagataccaycctcgatggcttgttaatattgccgtgttatggatcaatgacaactggtaatttctcattagaatagaaaatttgatttttttaaaaaactttttattga

SEQ ID NO: 145790 - DNA, 201 bp, Homo sapiens
aagcaatcctcctgctttggtctcccaaagtgctgggtttacaggtgtaagccactatgcccggcctaaagtttggaaatttaactttgatacaatattaytatctaatccagaatccatattgaaattgtccattttccctagaatctacagaaagtagtttgagaattggtaagttatagtactgtgaaaaacaaccct

SEQ ID NO: 145791 - DNA, 201 bp, Homo sapiens
tggactagcttttctcctttgttaacaatttggtgagtcttctcaaatacagggtgaaaagcttgacgatgataaatatttttattcctttagagatttargtttcttagaaactgatgtttcttctacttcgaattttattgttgaaatatggtacagcttatgtgttcatctcctttacattaaatgagagatttacaa

SEQ ID NO: 145792 - DNA, 201 bp, Homo sapiens
tttgagagagagtctcactctgttgcccaggcagttagtgcagtggtgggatcatggctcactgcagccttgacctcccgggctcaagcaattctcccacytcagcctccttagtagctgggaccacatgcatatgctaccatgcctgactaatttttaaaaattttttgtagagatgaggtctccccatgttgcccaggt

SEQ ID NO: 145793 - DNA, 201 bp, Homo sapiens
ttttgtttgagagagagtctcactctgttgcccaggcagttagtgcagtggtgggatcatggctcactgcagccttgacctcccgggctcaagcaattctyccacttcagcctccttagtagctgggaccacatgcatatgctaccatgcctgactaatttttaaaaattttttgtagagatgaggtctccccatgttgcc

SEQ ID NO: 145794 - DNA, 201 bp, Homo sapiens
cgagatattcttttggaaacattcaagcagttttgtgttgattggccaaaaacaatttagctctaataggaagacaattgctaacattgttgtgtttcttyatctctggttttgatagggttttcacaacatggtatgattggtgtaactcaaccacgaaaagtagctgctatatcagttgctcagagagtagctgaagaa

SEQ ID NO: 145795 - DNA, 201 bp, Homo sapiens
tagtacattaatcaaaattaggaaattgttttgttttgtttgagagagagtctcactctgttgcccaggcagttagtgcagtggtgggatcatggctcacygcagccttgacctcccgggctcaagcaattctcccacttcagcctccttagtagctgggaccacatgcatatgctaccatgcctgactaatttttaaaaa

SEQ ID NO: 145796 - DNA, 201 bp, Homo sapiens
aaactagtggcataacttttcaaatagcagcaccctcctaataggaattagtagtttccttgtttacctttttcctctgccttgtactaatgtcagaagtragggattgtcacaatctttgcctttttggagattacttaagtattttgaaatttaaccaaatgcaatagcacctggactagcttttctcctttgttaaca

SEQ ID NO: 145797 - DNA, 201 bp, Homo sapiens
aattggaagcattgtgctcccttaccacaaaatatttacatctgtattaggcaagaacaagggcaatctctcatttaaccatagtacattaatcaaaattmggaaattgttttgttttgtttgagagagagtctcactctgttgcccaggcagttagtgcagtggtgggatcatggctcactgcagccttgacctcccggg

SEQ ID NO: 145798 - DNA, 201 bp, Homo sapiens
aggctcattagtaaatatatgtaaaacacactgaccttttaatagaaagaaattaaatagtgaaatattgttttttgttggtctgtcttagatagaaatgwaacctgactaaacagacctgagttaattccattatttcaaaggacatttcaccaggttcttctttgggtggtggcattgtactgtgtgataacaacacat

SEQ ID NO: 145799 - DNA, 201 bp, Homo sapiens
gcagccagctgccgagggagcgctctgcggcgaggccgtttccctgagtcacggagagggcgggaggctgcgcccgtctgcccccgccacgtcctcctgtraggggctcagtcgaaacaggcagcggtcgcagggaaacgaagcggcacccgtcatgcctcaaggtggcccaaaagcctcttcactcccaggagacgccgc

SEQ ID NO: 145800 - DNA, 201 bp, Homo sapiens
tagacagtgtcatttgaaaatgtcttaaaatcctgatacttctaatggaataaaatgaaagggataaaaaccaagacatggccaggtgcagtggctcacgmctgtaatcccagcactttgggaggccaaggcaggtggatcacctgaggtcaggagttcaagaccagcctggccaacatggtcaaaccccatctctgttaa

SEQ ID NO: 145801 - DNA, 201 bp, Homo sapiens
aatgtatacactttgatgagttttgacatttgcgtaaaacaactatcaagataatggtacatatccatcatctcccagttttctcatcctcccccccaccyttttttttttttgagatggagtctcactctgtcacccaggctgaagtgcagtggcgtgatctcggctcactgcaatctccacctcccaggtttaagcaat

SEQ ID NO: 145802 - DNA, 201 bp, Homo sapiens
tgagctatgattgtgccactgcactccagcctgagtgactgagaccctgtctcaaaaaatataaataaataaataaataaatagtcacttttgaataacamattttcttttggttaaatccagaatctttcacatttcttcctgcttccctctgcttctgttcaaaataatgtctagctgtacagagggatttgtgaccta

SEQ ID NO: 145803 - DNA, 201 bp, Homo sapiens
gtgccaaaaacactggattcattggaggtgcttattttctgcatttcgtgtggaagctcaacttcgagaactaatcaggaagcttaaacaggtgattgccrtaatgttttttttcttgagtagcattttggacctatatatttcatattgaagtttcattgatgtacattagcaccctttctattctaccacccttccatt

SEQ ID NO: 145804 - DNA, 201 bp, Homo sapiens
tacctttttgtgaaaattaactatgattcaggtcccttatcttttctggatgtagtaaatagtgctatcaaatttttgggtaaatttagtaaggaaacacwaagaaattttaagtctggactgacaactaatgcaaagttctttaagactgggttatttatcatttaccgaatatattttatttctttagctaagtctgat

SEQ ID NO: 145805 - DNA, 201 bp, Homo sapiens
gaatagctctaggaaactgggagtagtgggaactaccactgagctgctgaacccattggaacaactcttctgcaacacagagctgtggggaatagaggacwgcgtaggctgtcattatctgttatgctttgatcttccctaccgagtagcatttaggagtcagggaaagggtgccgctttcaggctgccttgaaggctctc

SEQ ID NO: 145806 - DNA, 201 bp, Homo sapiens
aaaatatttcaaaacctattacagagtattgaagtaggagttaagagtgcagggttctgtccagctccactactacctaattatctgaccatggccctagyttttctagatttcatttttcatttgtaaaaccaagaagttggattaaggtgaccaactctaatagtcttttaaggctagaaaaagaaaaatgttttttcc

SEQ ID NO: 145807 - DNA, 201 bp, Homo sapiens
tcaagtgacccaccagccttggcctcttaaaatgctggtattacaggcctgagccattgcacccagcagttgcagtctgaaatgtcagaattttaattctrgtaatacccctaattgcaattttttgttctaataaaatgctgtataaaaataagtaatgttaactggttttcatgaggcagtatcagagctaaaaatacc

SEQ ID NO: 145808 - DNA, 201 bp, Homo sapiens
tggtctcaaactcctgagctcaagtgacccaccagccttggcctcttaaaatgctggtattacaggcctgagccattgcacccagcagttgcagtctgaartgtcagaattttaattctggtaatacccctaattgcaattttttgttctaataaaatgctgtataaaaataagtaatgttaactggttttcatgaggcag

SEQ ID NO: 145809 - DNA, 201 bp, Homo sapiens
tttgtatttttatagagatggggtttcactctgttgcccaggctggtctcaaactcctgagctcaagtgacccaccagccttggcctcttaaaatgctggkattacaggcctgagccattgcacccagcagttgcagtctgaaatgtcagaattttaattctggtaatacccctaattgcaattttttgttctaataaaat

SEQ ID NO: 145810 - DNA, 201 bp, Homo sapiens
ctccccagcagctgggaccacagatgcttgctactatgcctggctaattttttgtatttttatagagatggggtttcactctgttgcccaggctggtctcraactcctgagctcaagtgacccaccagccttggcctcttaaaatgctggtattacaggcctgagccattgcacccagcagttgcagtctgaaatgtcaga

SEQ ID NO: 145811 - DNA, 201 bp, Homo sapiens
ttaatttaaaaaatttttaaattttattgagacaaggtctcactgtgttgcccaggctggagtgcagtggcgtgatcttggctcattgcaacctctgcctyccaggctcaagtgatcctcccatacctcagcctccccagcagctgggaccacagatgcttgctactatgcctggctaattttttgtatttttatagagat

SEQ ID NO: 145812 - DNA, 201 bp, Homo sapiens
ggagtgcagtggcctgatctcggctcactacaagctctgcctcccagattcgtgccgttctctcgcctcagcctcccgagtagctgggactacaggcgccygccacaacgcccggctaattttttgcatttttagtagagacagggtttcactgtgttagccaggatggtctcaatctcctgaccttgtgatccacccgcc

SEQ ID NO: 145813 - DNA, 201 bp, Homo sapiens; identical to SEQ ID NO: 26931

SEQ ID NO: 145814 - DNA, 201 bp, Homo sapiens
cggccccgggcgtgtgggtgggggcgcggcggagagctgaggccgggcacccgggctggaccgacgggccctctcccaagcaccgcccgcagccaggcggmtcctcgagcgcagcaactttgggactttgttccggctttttccaaatcgaatctggtcgagggggcggggcggggggggagcacctgccctgccgggggg

SEQ ID NO: 145815 - DNA, 201 bp, Homo sapiens
tgatgaatggtcatggttttggttgggggtgtagttttggctgcagacctggcgcgggttaaacagtcctaattggctttggctcccctagctgatcccastctgaccttgccactccttccccagagtcagtgagaaacgtgggtcagtgggaaaagcgcaagcaattgctgctggccaacctgcctcaagagctgctgc

SEQ ID NO: 145816 - DNA, 201 bp, Homo sapiens
aaagctgagctgccccactcccaatccatccgcaggggacatgccatatccgtgcttgggggcctatggaacctccaaagcggccgtggcgctactcatgracacattcagctgtgaactccttccctggggggtcaaggtcagcatcatccagcctggctgcttcaagacaggtgggaatcagggctgggggtggggtgg

SEQ ID NO: 145817 - DNA, 201 bp, Homo sapiens
cccaatccatccgcaggggacatgccatatccgtgcttgggggcctatggaacctccaaagcggccgtggcgctactcatggacacattcagctgtgaackccttccctggggggtcaaggtcagcatcatccagcctggctgcttcaagacaggtgggaatcagggctgggggtggggtgggggtggggaatggggctgg

SEQ ID NO: 145818 - DNA, 201 bp, Homo sapiens; identical to SEQ ID NO: 26942

SEQ ID NO: 145819 - DNA, 201 bp, Homo sapiens
agcaaaaaggagccccctggggtgggggagggcttagggagccccttgccaaagctgagctgccccactcccaatccatccgcaggggacatgccatatcygtgcttgggggcctatggaacctccaaagcggccgtggcgctactcatggacacattcagctgtgaactccttccctggggggtcaaggtcagcatcatc

SEQ ID NO: 145820 - DNA, 201 bp, Homo sapiens; identical to SEQ ID NO: 26944

SEQ ID NO: 145821 - DNA, 201 bp, Homo sapiens
gcctcgtcaacaacgcaggccacaatgaagtagttgctgatgcggagctgtctccagtggccactttccgtagctgcatggaggtgaatttctttggcgcrctcgagctgaccaagggcctcctgcccctgctgcgcagctcaaggggccgcatcgtgactgtggggagcccagcgggtgagtgcccccccccactggagc

SEQ ID NO: 145822 - DNA, 201 bp, Homo sapiens
ctttagagaaatgcagctgaaaacagtaggagaaaacacaagagagatgctttttttttttttttttttttttttttgaaacagagtcttgctctgtcacscaggctggggtgcggtgagtagtacaatctcggctcactgcaatctccgcctcccacattcaagagattctcctgcctcagtctcatgagtagctgggac

SEQ ID NO: 145823 - DNA, 201 bp, Homo sapiens
agctgcgtacctgctgctcccctcgcctaaggctgctgcagatggacctgaccaaaccaggagacattagccgcgtgctagagttcaccaaggcccacacmaccagcaccggtcagtggcaagtgtccaccaggcaagggcgtggcaggggagtgggaaggacacggggactggaagtttgctgctgggctgacctaaggc

SEQ ID NO: 145824 - DNA, 201 bp, Homo sapiens
cagagccctggcatggatgctaggcacagggtgccagacacgggggtgggcagggtggggggccactgggccacacacaagcatggagaccttcacacacrcaggcagaaaaatccacccacactcataccacttattttaccccctgggggttcaggggagcaaggcagggaccaccctgtcctagaggctgccttcacc

SEQ ID NO: 145825 - DNA, 201 bp, Homo sapiens
ccgacgggccctctcccaagcaccgcccgcagccaggcggctcctcgagcgcagcaactttgggactttgttccggctttttccaaatcgaatctggtcgmgggggcggggcggggggggagcacctgccctgccggggggtgccgggagagaagtgaaggaaagccccgcccccgcccctcccgctccccgccctctccc

SEQ ID NO: 145826 - DNA, 201 bp, Homo sapiens
tgctgatgcggagctgtctccagtggccactttccgtagctgcatggaggtgaatttctttggcgcgctcgagctgaccaagggcctcctgcccctgctgygcagctcaaggggccgcatcgtgactgtggggagcccagcgggtgagtgcccccccccactggagcaaaaaggagccccctggggtgggggagggcttag

SEQ ID NO: 145827 - DNA, 201 bp, Homo sapiens
gcatcaagcctgcagccaggtactggcaccaactcccagtgcctggcagagccctggcatggatgctaggcacagggtgccagacacgggggtgggcaggrtggggggccactgggccacacacaagcatggagaccttcacacacgcaggcagaaaaatccacccacactcataccacttattttaccccctgggggttc

SEQ ID NO: 145828 - DNA, 201 bp, Homo sapiens
gctgatgcggagctgtctccagtggccactttccgtagctgcatggaggtgaatttctttggcgcgctcgagctgaccaagggcctcctgcccctgctgcrcagctcaaggggccgcatcgtgactgtggggagcccagcgggtgagtgcccccccccactggagcaaaaaggagccccctggggtgggggagggcttagg

SEQ ID NO: 145829 - DNA, 201 bp, Homo sapiens
gggttggggggcggggttgagggccaggggtgggagcaggagcagaacagaaagcctccctgctcactggcctttccccttccctcactggctgcccatgragccaggatcagcatgggaacaatcaaggaggcaggggcttatcagtactatggacccctacactggctctgcctggtggttcttctcttcgcataccaa

SEQ ID NO: 145830 - DNA, 201 bp, Homo sapiens
gtgtgtgtctacacacacacacacacacacacacacacacacacacacacatatgcttgcctccctctccaaggcagacttgcctgggaagtacccctccwcagcaggagctcgaagacccctgcccagtgctgttttcagtagagggagtggagctgagatggggagaccgtactgagcggtccaggagtagggaaacag

SEQ ID NO: 145831 - DNA, 201 bp, Homo sapiens
acacacacacacatatgcttgcctccctctccaaggcagacttgcctgggaagtacccctcctcagcaggagctcgaagacccctgcccagtgctgttttsagtagagggagtggagctgagatggggagaccgtactgagcggtccaggagtagggaaacagagctgctttgcagcttctgttccagaagatgggggttg

SEQ ID NO: 145832 - DNA, 201 bp, Homo sapiens
gcttgcctccctctccaaggcagacttgcctgggaagtacccctcctcagcaggagctcgaagacccctgcccagtgctgttttcagtagagggagtggasctgagatggggagaccgtactgagcggtccaggagtagggaaacagagctgctttgcagcttctgttccagaagatgggggttggggggcggggttgagg

SEQ ID NO: 145833 - DNA, 201 bp, Homo sapiens
cggcttggcggccccgggcgtgtgggtgggggcgcggcggagagctgaggccgggcacccgggctggaccgacgggccctctcccaagcaccgcccgcagycaggcggctcctcgagcgcagcaactttgggactttgttccggctttttccaaatcgaatctggtcgagggggcggggcggggggggagcacctgccctg

SEQ ID NO: 145834 - DNA, 201 bp, Homo sapiens
agttgaacagccccggtgccatcgagctgcgtacctgctgctcccctcgcctaaggctgctgcagatggacctgaccaaaccaggagacattagccgcgtkctagagttcaccaaggcccacaccaccagcaccggtcagtggcaagtgtccaccaggcaagggcgtggcaggggagtgggaaggacacggggactggaag

SEQ ID NO: 145835 - DNA, 201 bp, Homo sapiens
cctcctctgctctgtgaccccaggcctgtggggcctcgtcaacaacgcaggccacaatgaagtagttgctgatgcggagctgtctccagtggccactttcygtagctgcatggaggtgaatttctttggcgcgctcgagctgaccaagggcctcctgcccctgctgcgcagctcaaggggccgcatcgtgactgtggggag

SEQ ID NO: 145836 - DNA, 201 bp, Homo sapiens
ggctgacctaaggcttccctcctctgctctgtgaccccaggcctgtggggcctcgtcaacaacgcaggccacaatgaagtagttgctgatgcggagctgtytccagtggccactttccgtagctgcatggaggtgaatttctttggcgcgctcgagctgaccaagggcctcctgcccctgctgcgcagctcaaggggccgc

SEQ ID NO: 145837 - DNA, 201 bp, Homo sapiens
ggggtggggaatggggctgggaatggtcttatgggggcaggtcaggtttgatgaatggtcatggttttggttgggggtgtagttttggctgcagacctggsgcgggttaaacagtcctaattggctttggctcccctagctgatcccactctgaccttgccactccttccccagagtcagtgagaaacgtgggtcagtggg

SEQ ID NO: 145838 - DNA, 201 bp, Homo sapiens; identical to SEQ ID NO: 26937

SEQ ID NO: 145839 - DNA, 201 bp, Homo sapiens
ggcttagggagccccttgccaaagctgagctgccccactcccaatccatccgcaggggacatgccatatccgtgcttgggggcctatggaacctccaaagyggccgtggcgctactcatggacacattcagctgtgaactccttccctggggggtcaaggtcagcatcatccagcctggctgcttcaagacaggtgggaat

SEQ ID NO: 145840 - DNA, 201 bp, Homo sapiens
aggtcaggtttgatgaatggtcatggttttggttgggggtgtagttttggctgcagacctggcgcgggttaaacagtcctaattggctttggctcccctasctgatcccactctgaccttgccactccttccccagagtcagtgagaaacgtgggtcagtgggaaaagcgcaagcaattgctgctggccaacctgcctcaa

SEQ ID NO: 145841 - DNA, 201 bp, Homo sapiens
ggtcaggtttgatgaatggtcatggttttggttgggggtgtagttttggctgcagacctggcgcgggttaaacagtcctaattggctttggctcccctagstgatcccactctgaccttgccactccttccccagagtcagtgagaaacgtgggtcagtgggaaaagcgcaagcaattgctgctggccaacctgcctcaag

SEQ ID NO: 145842 - DNA, 201 bp, Homo sapiens; identical to SEQ ID NO: 26938

SEQ ID NO: 145843 - DNA, 201 bp, Homo sapiens
tgctgggctgacctaaggcttccctcctctgctctgtgaccccaggcctgtggggcctcgtcaacaacgcaggccacaatgaagtagttgctgatgcggarctgtctccagtggccactttccgtagctgcatggaggtgaatttctttggcgcgctcgagctgaccaagggcctcctgcccctgctgcgcagctcaaggg

SEQ ID NO: 145844 - DNA, 201 bp, Homo sapiens; identical to SEQ ID NO: 26947

SEQ ID NO: 145845 - DNA, 201 bp, Homo sapiens
ggagttgaacagccccggtgccatcgagctgcgtacctgctgctcccctcgcctaaggctgctgcagatggacctgaccaaaccaggagacattagccgcktgctagagttcaccaaggcccacaccaccagcaccggtcagtggcaagtgtccaccaggcaagggcgtggcaggggagtgggaaggacacggggactgga

SEQ ID NO: 145846 - DNA, 201 bp, Homo sapiens
catcaagcctgcagccaggtactggcaccaactcccagtgcctggcagagccctggcatggatgctaggcacagggtgccagacacgggggtgggcagggwggggggccactgggccacacacaagcatggagaccttcacacacgcaggcagaaaaatccacccacactcataccacttattttaccccctgggggttca

SEQ ID NO: 145847 - DNA, 201 bp, Homo sapiens
ctgggctgacctaaggcttccctcctctgctctgtgaccccaggcctgtggggcctcgtcaacaacgcaggccacaatgaagtagttgctgatgcggagckgtctccagtggccactttccgtagctgcatggaggtgaatttctttggcgcgctcgagctgaccaagggcctcctgcccctgctgcgcagctcaaggggc

SEQ ID NO: 145848 - DNA, 201 bp, Homo sapiens
ctccatgttggacaggctgatctggaactcctgaactcaggtgatccaccagccttggcctcccaaaatgctgggattacaggcatgaggctgcacccggycctggcaacttctagtttttaccactgaggctaatagcgcagtgaatgtcttcatgtccatggcttttgtcctctgacttagccctttggaatcaatccc

SEQ ID NO: 145849 - DNA, 201 bp, Homo sapiens
gctgccagactccaaggggcctgggcagggcttgcaggaacacgggtctccagtcagcactgaggatccttgggtcccttccaggtcccacctgactctcrttcagttctgtccctctcacctttccagcctttccagaggccacagaggaggagaagcagctaagcctcaccatgatggcccagtggacccactttgccc

SEQ ID NO: 145850 - DNA, 201 bp, Homo sapiens; identical to SEQ ID NO: 26953

SEQ ID NO: 145851 - DNA, 201 bp, Homo sapiens
gatatgggacaaagagcaacaggctgtggagatgccaaccacggctcccagacaggccagacctggggagcagagaagggtctggcatcctggtggctaawtcaaagcaaacctgcagaggctggcgaggagccaggctgaactaaccgttgccccaacactgcccccagcactggagatgagcatgcacctggcaaccag

SEQ ID NO: 145852 - DNA, 201 bp, Homo sapiens
attcattcctcccacccagggaccccaatagcaaggctctgcctccttggccccaattcaaccaggcggaacaatatctggagatcaacccagtgccacgrgccggacagaagttcagggaggcctggatgcagttctggtcagagacgctccccagcaagatacaacagtggcaccagaagcagaagaacaggaaggccc

SEQ ID NO: 145853 - DNA, 201 bp, Homo sapiens
agggctgggagtcggggtgagccggtggtcaggctccactgagagggccttggtgtccacacagggctggggtctcctggatacaatggagcagatgagcygggaggacatgctggccatctcaacacccgtcttgaccagtctggtgagacaagaggcaggagggaggaagctagggcaggagggaggaagctagtgggt

SEQ ID NO: 145854 - DNA, 201 bp, Homo sapiens
tcaccatgttggccaggctggtcttgaactcctgacttcagatgatccacccacctcggcctcccaaagtgctgggattacaggcgtgagccaccgcgccyggccagcattttcatttccaactggaaccagctctgttctgggaagtccattttggggaggaaggagagacagaaagccagaagggctctgagtcatatc

SEQ ID NO: 145855 - DNA, 201 bp, Homo sapiens
caggtgcctacaagacgtggagagcatgaacagcagcagatttgtcctcaacggaaaacagcagatcttctccgtttcagaggactgcctggtcctcaacrtctatagcccagctgaggtccccgcagggtccggtaggccggtaggcaccccagagggccctgtccacctgatccagctccactatgcctacctgtcccc

SEQ ID NO: 145856 - DNA, 201 bp, Homo sapiens
aaatgtacaatcgggttttataccgagacattccgttcccaggggcaggcaggagacagaggccttcctcttatctcaactgcaagaggccttcctctttkactaatcctcctcagcacagaccccttatgggtgtcgggctgggggacggtcaggactttctcatcccaagaggccatatttcagactatcacaggcggg

SEQ ID NO: 145857 - DNA, 201 bp, Homo sapiens
catcttgtttctgtcattcttattcttctacccatcttcacagcaatcattttcttcacttttctttttttttttttttcgtcttggcccattgcacaccytaagacaaagcaatccatttttgttgttgttgttgtttgtgtgtttgtttgttttttgagacagagcctcgatccatcatccaggctgcagtgcagcagc

SEQ ID NO: 145858 - DNA, 201 bp, Homo sapiens
tcctgggctgaagcccaggttccagcaggatatgggacaaagagcaacaggctgtggagatgccaaccacggctcccagacaggccagacctggggagcaragaagggtctggcatcctggtggctaattcaaagcaaacctgcagaggctggcgaggagccaggctgaactaaccgttgccccaacactgcccccagcac

SEQ ID NO: 145859 - DNA, 201 bp, Homo sapiens
tgctcttgttgcccagggtggagtgcaatggcgcgatcttagctcaccgcactgcaacctctgcctcccaggttcaagcgattctcctgcctcagcctccygagtagctgggattacaggcatctgccaccatgcctggctaatttttgtattttttttagtagagatggggtttctccatgttggacaggctgatctgga

SEQ ID NO: 145860 - DNA, 201 bp, Homo sapiens
cagggtggagtgcaatggcgcgatcttagctcaccgcactgcaacctctgcctcccaggttcaagcgattctcctgcctcagcctcctgagtagctgggaytacaggcatctgccaccatgcctggctaatttttgtattttttttagtagagatggggtttctccatgttggacaggctgatctggaactcctgaactca

SEQ ID NO: 145861 - DNA, 201 bp, Homo sapiens
agacagaaagccagaagggctctgagtcatatcattctcctgctcgaaagctcctggtgactccctgtctccctgaagacaagtccaagttctccacgtgycactgaagtcctgctattctcatccacttccttccaccagggaagttcatccccacaagctggtagagcttgacaagtaggccctggccgggcacggtgg

SEQ ID NO: 145862 - DNA, 201 bp, Homo sapiens
cggttctcagccccacacccagcacagccctgggagggtgtgcgggatgccagcactgcgcccccaatgtgagtagtgctggtggaggcgggcaaacaggmaggttgcaggagaatcctgctgctggggcttgtggggctgaacagctggacctcaggcccacccttggccacaggtgcctacaagacgtggagagcatga

SEQ ID NO: 145863 - DNA, 201 bp, Homo sapiens
caccctagcggtcctgagactgcctgggctggcaggtgggcagctaaggtctcaggagcttgggggtcagtgccccatggccacctctgcaggtcatggtrtgggtccatggaggcgctctgataactggcgctgccacctcctacgatggatcagctctggctgcctatggggatgtggtcgtggttacagtccagtacc

SEQ ID NO: 145864 - DNA, 201 bp, Homo sapiens
caggctccactgagagggccttggtgtccacacagggctggggtctcctggatacaatggagcagatgagccgggaggacatgctggccatctcaacaccygtcttgaccagtctggtgagacaagaggcaggagggaggaagctagggcaggagggaggaagctagtgggtatcccatccaacagcacagtctctgcccc

SEQ ID NO: 145865 - DNA, 201 bp, Homo sapiens
ccactgcactccagcctgggcgacagagcgagagtctgtctcaaaaaaataataataaaagataatgacactattcttagagggcaatgaggactcagtgsccccattcccccagataataaaattatggtataataggggacgcaagggggcccttgggaccacccaagctgacgggcagggcaggcttctcaggagtgg

SEQ ID NO: 145866 - DNA, 201 bp, Homo sapiens
ttccacctccccagagagctgcctcctatctctaggaattgtctagcctgggagaggcagtcctccagtcttagtctgtttgtgttgttgtaaaagaatayaggaagctgggtaattcacaaagaaaagaagtttagttaggccacagttctgcaggccgtacaagaaacatggtgccagctgggcatgatggctcacacc

SEQ ID NO: 145867 - DNA, 201 bp, Homo sapiens; identical to SEQ ID NO: 26970

SEQ ID NO: 145868 - DNA, 201 bp, Homo sapiens
tctggcatcctggtggctaattcaaagcaaacctgcagaggctggcgaggagccaggctgaactaaccgttgccccaacactgcccccagcactggagatragcatgcacctggcaaccagggcttcctagatgtggtagctgctttgcgctgggtgcaagaaaacatcgcccccttcgggggtgacctcaactgtgtcac

SEQ ID NO: 145869 - DNA, 201 bp, Homo sapiens
tggcctggggaggctctgccaactgactggctactgcctccttcttcctccctctcttcttacctgtgcactggctccacagtttgaagcagaccgccgcrccttcatcatcaccatcaattctttcggcacagagctgtccaaagaggaccgtgccaagctctttccacactgtgggcggctctaccctgagggcctggc

SEQ ID NO: 145870 - DNA, 201 bp, Homo sapiens
gcggcgccgcaggccttcaggcaggtagtagtggatgaagtacatgagccccaggccctggccggggtaatagcggcggcggggccgagctgccagcagcrcatctgtgatggcatctacaactggggtgaggtcggacatggccaggcgtagcgagtgcaggaactgcccatgcaagtgctcgatgtagtccttgccgta

SEQ ID NO: 145871 - DNA, 201 bp, Homo sapiens
ttggcatggtctgagcttgggtctgccccagcggtgattagatcatgttatggctagctgcctcctttataaatcaattttaggagcaaggaggcaggagaagctcaggtcagtgtacatggcccagagcattgcttctgccacttccaaggcaacagcctaggctggggacccctcaatacccagccctgtgggccttgt

SEQ ID NO: 145872 - DNA, 201 bp, Homo sapiens
gctgtgccctgctgctggcactgcctgccacgcgaggagcccagatgggcttggcccccatggagggcatcagaaggcctgaccaggccctgctcccagarctcccaggtcagtgtgagcaagggtgggactgggcggggcctgaataccctctggccacaaatagtctcccctggcataaaccctctttctcccttccca

SEQ ID NO: 145873 - DNA, 201 bp, Homo sapiens
gagcagaactagcccctggcttcccagagcccctgccgtccttggctgccctcagaggctgggccagggctgggtggccaggtctcccacaaagctctcarcaagttccaggcctctccttctgtgcttagatcctgctcccagtcacgtcccctcccagtcacatcccctcctccgcatccctcagagagagcaggaagc

SEQ ID NO: 145874 - DNA, 201 bp, Homo sapiens
accgcgagccccgctcctcacgtcgctgcgtaaggctgcatgagtcctgcctgggacagcaggtgccttgctgtgacccatgtgccacgtgctactgccgsttcttcaatgccttctgctactgccgcaagctgggtactgccatgaatccctgcagccgcacctagctggccaacgtcagggtcggggctagggtagggg

SEQ ID NO: 145875 - DNA, 201 bp, Homo sapiens
aggacagagtgtgtgtgtccttggggcctggggggatgttgctcctcagctccctccctcagccctgcccctctgagacaataaaactgccctctctaagsccaactgtctgctgtctcgtttaggccctggtacctctccatgacccctaacttccctcgtgaccccaccttgctaagcaaccctgcctaagcctccacc

SEQ ID NO: 145876 - DNA, 201 bp, Homo sapiens
tgaggatttctgggtcagcactaccctggcccaaagagattaaagagccaggggaccggagaggagaggaaagtttaaaaatttaaaaaaaaaaaaaaaaagcccgagaccagttaggttaggggtgtctgggatagactctgctctggctgcggtgaggcactgagctatagcgccaggaccccagatgggctgcagtca

SEQ ID NO: 145877 - DNA, 201 bp, Homo sapiens
atagactgggcaacccctgaggatttctgggtcagcactaccctggcccaaagagattaaagagccaggggaccggagaggagaggaaagtttaaaaattwaaaaaaaaaaaaaaaaagcccgagaccagttaggttaggggtgtctgggatagactctgctctggctgcggtgaggcactgagctatagcgccaggaccc

SEQ ID NO: 145878 - DNA, 201 bp, Homo sapiens
gaaatatgttgttaggtgaaaagttgcaaagcgttacatgtaatccctcatcttggtagactaccagatggacatatatgcatgtttttggaagcataggygccaagttgtcatgagtgacaacctctggggagagggatttatagaggctggtagggggaagatttcaatgttgactttttatgtactcttctattgttt

SEQ ID NO: 145879 - DNA, 201 bp, Homo sapiens
ctaggctggggacccctcaatacccagccctgtgggccttgtggcacgggcactctgtgccgtgtagggcatttgaacatcaggattctggcctaggccasctgcccacccctcaaaccatgtttcctccccagcggcttttttccaggactgcatttcagagcaggaccttgacgagatgaacatcgagatcatccgcaa

SEQ ID NO: 145880 - DNA, 201 bp, Homo sapiens
ctcctatcccagggacttactgcttattctctggctcccatgctgggcacaaggctgtgtggaacaggttctccatcccatagtgcctgtgacgggctcarataaaatcagcaggagtggctggtgctccaccgctggcctgttacagctggctcctggacagccgctcccccagcatccaggagggtcatggactaccac

SEQ ID NO: 145881 - DNA, 201 bp, Homo sapiens
ggcatggtctgagcttgggtctgccccagcggtgattagatcatgttatggctagctgcctcctttataaatcaattttaggagcaaggaggcaggagaagctcaggtcagtgtacatggcccagagcattgcttctgccacttccaaggcaacagcctaggctggggacccctcaatacccagccctgtgggccttgtgg

SEQ ID NO: 145882 - DNA, 201 bp, Homo sapiens
tggcatggtctgagcttgggtctgccccagcggtgattagatcatgttatggctagctgcctcctttataaatcaattttaggagcaaggaggcaggagaagctcaggtcagtgtacatggcccagagcattgcttctgccacttccaaggcaacagcctaggctggggacccctcaatacccagccctgtgggccttgtg

SEQ ID NO: 145883 - DNA, 201 bp, Homo sapiens
actgggccttggggagaggcaggacttttatgagcaggttaaagctcactatctctgttggagccacacctcactcatatgctttttttttttttttttttgagctggagtctcactctgtcgcacaggccagaatgtagtggcacgttctcggctcactgcaagctccgcatcccaggttcaagtgagtctcctgcctca

SEQ ID NO: 145884 - DNA, 201 bp, Homo sapiens
tcacctttcccaagtagctgggagtacaggcatgtgttaccatgtctggctaattttttattttttagtggagacagggtctcactatgttgcccaggctscctgctttcttaagtggcatacactgaacatagcagagtctctcctgcattaacggctgttagacttggaatgagatggaacagaaccactgtccctgag

SEQ ID NO: 145885 - DNA, 201 bp, Homo sapiens
ataacacactaatggtttttaatgtatttgttatgtttcagttgattaatcttattgatgcttaaattgtctcttggccagtggaagctttttcagttgactgccaagtcttttttatataaccctgtagccattgaaagcttccttactatctgagatgtctggttttttttttttttggaatggaatcttgttttcttg

SEQ ID NO: 145886 - DNA, 201 bp, Homo sapiens
ccaccccacccccagccctgattcccacctgtcttgaagcagccaggctggatgatgctgaccttgaccccccagggaaggagttcacagctgaatgtgtycatgagtagcgccacggccgctttggaggttccataggcccccaagcacggatatggcatgtcccctgcggatggattgggagtggggcagctcagcttt

SEQ ID NO: 145887 - DNA, 201 bp, Homo sapiens
tctctctctgcttttccgtggggcagctgccaccagcactgtcccttgggtctctgctctgggccctacttccctcacttaagtctcagttggccttctcrgatgaggtagggcttgtcgcttagtgtctcctgtctgtgtacctctacccatcctcacctccctgtgccctatcttcctgggttgggaaggagaaggcca

SEQ ID NO: 145888 - DNA, 201 bp, Homo sapiens
gggctgacgactatgaacaggtcaagaacgtggccgattactacccggtgagtgccccggctggcaggacagcggttggatgtgttgtcaccaagcacccycacccagaaccctcatgcttgtgcttccccccacccccctggccaggagtacaagctgctcttcgagggtgcaggtagcaaccctggagacaagacgctg

SEQ ID NO: 145889 - DNA, 201 bp, Homo sapiens
ccagccccattccccacccccaccccacccccagccctgattcccacctgtcttgaagcagccaggctggatgatgctgaccttgaccccccagggaaggmgttcacagctgaatgtgtccatgagtagcgccacggccgctttggaggttccataggcccccaagcacggatatggcatgtcccctgcggatggattggg

SEQ ID NO: 145890 - DNA, 201 bp, Homo sapiens
cacaggggtgtttgcttggaggcccttgctgagcccaggagtggggggcctgcagaagagagccctctgcttggctttgccccctcattcacgtgcacacrttcctggcttctctaggaatggatggtgccacaagggatgccagagggacttgtccctgagtgatgacagtccagtgacagtgctgatggtccatgcctg

SEQ ID NO: 145891 - DNA, 201 bp, Homo sapiens
ctaaactccaacccaagatgtctgtgggcccaagctgagttttgaaggcacagggcaagggagggcctctgggcagaggaatacagacggccccacccccmccccacaagggcctctttggcctggcgggcagccggccctccactccccagctgtcttcccctggagggagatgctgaccagctggaaccttattccctc

SEQ ID NO: 145892 - DNA, 201 bp, Homo sapiens
gatgatgctgaccttgaccccccagggaaggagttcacagctgaatgtgtccatgagtagcgccacggccgctttggaggttccataggcccccaagcacrgatatggcatgtcccctgcggatggattgggagtggggcagctcagctttggcaaggggctccctaagccctcccccaccccagggggctcctttttgct

SEQ ID NO: 145893 - DNA, 201 bp, Homo sapiens
gctcaccgagccactgctggggaagggccggggctcaggtttgggtcctgggctgcgtcctgtggtggggtagtgccaggctggccaggctgcagtgctcraggcagacagtgactgatgaagaaggcctgcaggaagcggcgccgcaggccttcaggcaggtagtagtggatgaagtacatgagccccaggccctggccg

SEQ ID NO: 145894 - DNA, 201 bp, Homo sapiens
gctccagtgggggggggcactcacccgctgggctccccacagtcacgatgcggccccttgagctgcgcagcaggggcaggaggcccttggtcagctcgagygcgccaaagaaattcacctccatgcagctacggaaagtggccactggagacagctccgcatcagcaactacttcattgtggcctgcgttgttgacgaggc

SEQ ID NO: 145895 - DNA, 201 bp, Homo sapiens; identical to SEQ ID NO: 26973

SEQ ID NO: 145896 - DNA, 201 bp, Homo sapiens
ggagagaagccatgtggagcaaagtgggaggctggagcagaggaagtttcatgctgcttgagagctcatgaggatcctgagtaggaggtgacagctcactyggggaagcctcccagcagcttgtgccagggcctggaagagcagtgtgtacacagatgcccgggtgaggcccagcccctgatgctttggaggggagggatc

SEQ ID NO: 145897 - DNA, 201 bp, Homo sapiens
ccctaactccctgacctgagaaccctggggcctgggggcagtttgagcctcctctcccttctgtgggtcgctcccagagccatggcccatgggaaggacaragtgtgtgtgtccttggggcctggggggatgttgctcctcagctccctccctcagccctgcccctctgagacaataaaactgccctctctaaggccaact

SEQ ID NO: 145898 - DNA, 201 bp, Homo sapiens
tcagccactgtccttggtactgtccccagggagcttctgtgtcctgtatcaggtgggataagtactgctaagaagaataacacaagggacagtgatgggcygctggagaagcctctgaagagggggcgtgtgaggaaagatctgaaggaagagggggagacagctccactttcaggccaggggacggggaagggccctgag

SEQ ID NO: 145899 - DNA, 201 bp, Homo sapiens
gccttaggtcagcccagcagcaaacttccagtccccgtgtccttcccactcccctgccacgcccttgcctggtggacacttgccactgaccggtgctggtkgtgtgggccttggtgaactctagcacgcggctaatgtctcctggtttggtcaggtccatctgcagcagccttaggcgaggggagcagcaggtacgcagct

SEQ ID NO: 145900 - DNA, 201 bp, Homo sapiens
ttcattgtctgacccttgggcacagctctgccttcatcaagctcctggagaagctgagtggaggaaaggaccttgggatctgcaggctcggggagggcacmtggactgcacggggagggcacctggactgcacagggaggtagggagggtccctttgcagggatgtcccaagagccatgagccaagtcctggtggacaaag

SEQ ID NO: 145901 - DNA, 201 bp, Homo sapiens
gaacgtctagctgcctttctcagttctgacgcaagccctcaggaactcaggtgggcaggctcccattcttatgactcttggctgccccagcttcttcattktctgacccttgggcacagctctgccttcatcaagctcctggagaagctgagtggaggaaaggaccttgggatctgcaggctcggggagggcacctggact

SEQ ID NO: 145902 - DNA, 201 bp, Homo sapiens
ctaagccctcccccaccccagggggctcctttttgctccagtgggggggggcactcacccgctgggctccccacagtcacgatgcggccccttgagctgcrcagcaggggcaggaggcccttggtcagctcgagcgcgccaaagaaattcacctccatgcagctacggaaagtggccactggagacagctccgcatcagca

SEQ ID NO: 145903 - DNA, 201 bp, Homo sapiens
gggggcagtttgagcctcctctcccttctgtgggtcgctcccagagccatggcccatgggaaggacagagtgtgtgtgtccttggggcctggggggatgtygctcctcagctccctccctcagccctgcccctctgagacaataaaactgccctctctaaggccaactgtctgctgtctcgtttaggccctggtacctctc

SEQ ID NO: 145904 - DNA, 201 bp, Homo sapiens
cctaagccctcccccaccccagggggctcctttttgctccagtgggggggggcactcacccgctgggctccccacagtcacgatgcggccccttgagctgygcagcaggggcaggaggcccttggtcagctcgagcgcgccaaagaaattcacctccatgcagctacggaaagtggccactggagacagctccgcatcagc

SEQ ID NO: 145905 - DNA, 201 bp, Homo sapiens
atgtccttgacccgaattcttggaagcacaggaaacaacatgccacataggggttgagtaagcatctctggggccacaaattaaattaagctttcagggcygcctgccttgttattgctaatggttctagccctgctcagctcctaggtccctgtcctgtggaaatttgtggaccctgggcaccctctcttgctcccaaat

SEQ ID NO: 145906 - DNA, 201 bp, Homo sapiens
aacacactaatggtttttaatgtatttgttatgtttcagttgattaatcttattgatgcttaaattgtctcttggccagtggaagctttttcagttgactkccaagtcttttttatataaccctgtagccattgaaagcttccttactatctgagatgtctggttttttttttttttggaatggaatcttgttttcttgcc

SEQ ID NO: 145907 - DNA, 201 bp, Homo sapiens
ttggtatgcgaagagaagaaccaccaggcagagccagtgtaggggtccatagtactgataagcccctgcctccttgattgttcccatgctgatcctggctycatgggcagccagtgagggaaggggaaaggccagtgagcagggaggctttctgttctgctcctgctcccacccctggccctcaaccccgccccccaaccc

SEQ ID NO: 145908 - DNA, 201 bp, Homo sapiens
aagaaatataattaacactcaagaggagtcctgtgaccttctcagcttccatgtgagctagtggtcctggaaattgttcttctcagccagagagttagatygttggaggccatgggtgaagggcccatgtttgatgtgctggctgttgtccagaacacttttatccctctctaccctgattgatttgtcttctgtccatta

SEQ ID NO: 145909 - DNA, 201 bp, Homo sapiens
tgagcacaagagtaatgagaaaccgagttcccctttcttctcagcacacagctccagagtggcgttgacttctttttttttttttttttttttttgagacsgagtctcgctctgtcgcccaggctggagtgcagtggcgggatctcggctcactgcaagctccgcctcccgggttcacgccattctcctgcctcagcctcc

SEQ ID NO: 145910 - DNA, 201 bp, Homo sapiens
ggtttctgagcacaagagtaatgagaaaccgagttcccctttcttctcagcacacagctccagagtggcgttgacttctttttttttttttttttttttttgagacggagtctcgctctgtcgcccaggctggagtgcagtggcgggatctcggctcactgcaagctccgcctcccgggttcacgccattctcctgcctca

SEQ ID NO: 145911 - DNA, 201 bp, Homo sapiens
cttccagtccccgtgtccttcccactcccctgccacgcccttgcctggtggacacttgccactgaccggtgctggtggtgtgggccttggtgaactctagmacgcggctaatgtctcctggtttggtcaggtccatctgcagcagccttaggcgaggggagcagcaggtacgcagctcgatggcaccggggctgttcaact

SEQ ID NO: 145912 - DNA, 201 bp, Homo sapiens
ctccccacagtcacgatgcggccccttgagctgcgcagcaggggcaggaggcccttggtcagctcgagcgcgccaaagaaattcacctccatgcagctacrgaaagtggccactggagacagctccgcatcagcaactacttcattgtggcctgcgttgttgacgaggccccacaggcctggggtcacagagcagaggagg

SEQ ID NO: 145913 - DNA, 201 bp, Homo sapiens
gcggccccttgagctgcgcagcaggggcaggaggcccttggtcagctcgagcgcgccaaagaaattcacctccatgcagctacggaaagtggccactggaracagctccgcatcagcaactacttcattgtggcctgcgttgttgacgaggccccacaggcctggggtcacagagcagaggagggaagccttaggtcagcc

SEQ ID NO: 145914 - DNA, 201 bp, Homo sapiens
attcccacctgtcttgaagcagccaggctggatgatgctgaccttgaccccccagggaaggagttcacagctgaatgtgtccatgagtagcgccacggccrctttggaggttccataggcccccaagcacggatatggcatgtcccctgcggatggattgggagtggggcagctcagctttggcaaggggctccctaagcc

SEQ ID NO: 145915 - DNA, 201 bp, Homo sapiens
tgactgatgaagaaggcctgcaggaagcggcgccgcaggccttcaggcaggtagtagtggatgaagtacatgagccccaggccctggccggggtaatagcrgcggcggggccgagctgccagcagcgcatctgtgatggcatctacaactggggtgaggtcggacatggccaggcgtagcgagtgcaggaactgcccatgc

SEQ ID NO: 145916 - DNA, 201 bp, Homo sapiens
cccttgagctgcgcagcaggggcaggaggcccttggtcagctcgagcgcgccaaagaaattcacctccatgcagctacggaaagtggccactggagacagytccgcatcagcaactacttcattgtggcctgcgttgttgacgaggccccacaggcctggggtcacagagcagaggagggaagccttaggtcagcccagca

SEQ ID NO: 145917 - DNA, 201 bp, Homo sapiens
gggggcgaccctgagccagaaagtgagacctgcccactgctgcttacctttgtctcccttcaacttcctcctccgattctctcctcacttcacccctcttytgctcctgtcctgttgcttttgctgggccaggcaggctacccagggcctgactgggactgtctcactttgtgaagcagtctgatctcccagagtgcagag

SEQ ID NO: 145918 - DNA, 201 bp, Homo sapiens
catctccacaaaagggcagtccttaccccagccttgtgctgatgagaccaggcatagacagtcctgacgacacagggcggaagggagcagccattagtgcyaatgaggcaggcggcctgaaagctttgtactctgcagtggctcgcccacccagggaacagttcgttctgtttccttggcttccaggaaccctaggcagaa

SEQ ID NO: 145919 - DNA, 201 bp, Homo sapiens
cagctctgccttcatcaagctcctggagaagctgagtggaggaaaggaccttgggatctgcaggctcggggagggcacctggactgcacggggagggcacytggactgcacagggaggtagggagggtccctttgcagggatgtcccaagagccatgagccaagtcctggtggacaaagaaatagtcccagcctaggtggt

SEQ ID NO: 145920 - DNA, 201 bp, Homo sapiens
cggggagggcacctggactgcacggggagggcacctggactgcacagggaggtagggagggtccctttgcagggatgtcccaagagccatgagccaagtcytggtggacaaagaaatagtcccagcctaggtggtggccccacaggggtggtgagcagaggcatgctcagcggctagcgtctaggagagtaccctgcattg

SEQ ID NO: 145921 - DNA, 201 bp, Homo sapiens
gagggcacctggactgcacagggaggtagggagggtccctttgcagggatgtcccaagagccatgagccaagtcctggtggacaaagaaatagtcccagcytaggtggtggccccacaggggtggtgagcagaggcatgctcagcggctagcgtctaggagagtaccctgcattggcagagtgtgagtgtgcagtatggtg

SEQ ID NO: 145922 - DNA, 201 bp, Homo sapiens
tgggcacttgcccagaccttgccccactttggatgctcaggcaatggttttcaggccttgacctcaacagaggctttcgtgcttggctggtggatggggcytttccctctgaggagtcatctgaaactcagcttttactgcctgcccttgtccctgtgctggtggccactcagaggctccacagccccagggtctcccctg

SEQ ID NO: 145923 - DNA, 201 bp, Homo sapiens
tccagtccccgtgtccttcccactcccctgccacgcccttgcctggtggacacttgccactgaccggtgctggtggtgtgggccttggtgaactctagcamgcggctaatgtctcctggtttggtcaggtccatctgcagcagccttaggcgaggggagcagcaggtacgcagctcgatggcaccggggctgttcaactcc

SEQ ID NO: 145924 - DNA, 201 bp, Homo sapiens
gccccttgagctgcgcagcaggggcaggaggcccttggtcagctcgagcgcgccaaagaaattcacctccatgcagctacggaaagtggccactggagacmgctccgcatcagcaactacttcattgtggcctgcgttgttgacgaggccccacaggcctggggtcacagagcagaggagggaagccttaggtcagcccag

SEQ ID NO: 145925 - DNA, 201 bp, Homo sapiens
aaacagatgcatgtggggaagacacccatccaagtctttttaggagtccccttctccagacctcctctaggtatcctcaggtttgcacctccagaaccccyggagccctggaaaggaatcagagatgctaccacctacccgcctgggtaagagtcagaggcctgtccactgggagggggcaatgggcctatgcctgcatct

SEQ ID NO: 145926 - DNA, 201 bp, Homo sapiens
ctaggtgccccttggaggctagggagccgacagaaaaacatggtttaaggcactgctctgatgtaagatacttttctgtgtgaccttggccaacttatatwacccctttgagcttcagcttccacatttgtatagttttgtaacaataacatttgccctataaggttttcagaaaaatgaggtgaggctgggcgtggtggc

SEQ ID NO: 145927 - DNA, 201 bp, Homo sapiens
tgagccaagattgggctattgcactccagcctgggcgatagagaaagaccccatctaaataaataaataaataaataaatgagggccgggcgtggtggctyacacctgtaatcccagcactttgggaggccaaggcgggcagatcacgaggtcaggagatcgagaccatcctggctagcatggtgaaacaccgcctctact

SEQ ID NO: 145928 - DNA, 201 bp, Homo sapiens
tgggcatctcacgggtgtattcctccctgttcttgcagatgatgtcacccctagcctcgggtctcttccatcgggccatttcccagagtggcaccgcgttrttcagacttttcatcactagtaacccactgaaagtggccaaggtgagtgcctctccttccccagggctcagcatggaagggcaggatggaagcaccactg

SEQ ID NO: 145929 - DNA, 201 bp, Homo sapiens
ctgtagtcccagctacttgcaagattgaggtaggagaattgcttgaacctagaggcagaggtagcagtgagccaagatcgtgccactacactccagcctgrgcaacagagcaagactctgtctcaaaaaaataagtggacaggatgtcgggaggcacagaagaggaagtgaccaggagaggagacaccacttaagctgggc

SEQ ID NO: 145930 - DNA, 201 bp, Homo sapiens
aaatgtatgctccactgcacaggccatgtgcagatttgcgtgtacaggaacgtgcctgccacagaaatgctctcgcccctgccaagggtacagcccctcayagccaaggatgtctcctctgttgagggatagcactgatgagaaaactgagccccaggaagggtagtgctgaggcttggggtaatcagtgaatccaggtgc

SEQ ID NO: 145931 - DNA, 201 bp, Homo sapiens
ggatgagaagcctaggcagaggcttttcctgcatccctcctcagtttccctattcacagatgccggcctccctgtctacctgtatgaatttgagcaccacrctcgtggaataatcgtcaaaccccgcactgatggggcagaccatggggatgagatgtacttcctctttgggggccccttcgccacaggtgcaaaggtccc

SEQ ID NO: 145932 - DNA, 201 bp, Homo sapiens
ttcctccctgttcttgcagatgatgtcacccctagcctcgggtctcttccatcgggccatttcccagagtggcaccgcgttattcagacttttcatcactmgtaacccactgaaagtggccaaggtgagtgcctctccttccccagggctcagcatggaagggcaggatggaagcaccactgagcatcctttcttctctct

SEQ ID NO: 145933 - DNA, 201 bp, Homo sapiens
ccagagacccccgcaaggtcccttccacctaggcccatcatctcagtcctctgggttcctctcccagtctgcctccgagaacctgattctcagctgccagscagattgaacccaccccttcccctaggagtgcagtgatgcagtccagggcttcaggtgctctggctccaaggccgcccatctccacatagagagtctacc

SEQ ID NO: 145934 - DNA, 201 bp, Homo sapiens
gggacagcccaagccagaatgcagaaggaagaagtggatactttgggcagagccacacatactcctggagccatacagggttttaacttctagacataaaytttattacatttatagttgtatccctttgtgtgatatagttaggatttctctattaagtaattaatcctaactatatccttgggctgatttgatttctgc

SEQ ID NO: 145935 - DNA, 201 bp, Homo sapiens
cagaggttgcagtgagtggagatcgcgccactgcactccagcctggatgacagagcaagactctgtgtcaaaacaaacaatcaagcaaaaactaaggggcyttggagcagacccggctccactagaaccctgtgtccttggtggccctctgggaccctcaggcctagctcagggagcatgatcgaatcaggaaggcctggg

SEQ ID NO: 145936 - DNA, 201 bp, Homo sapiens
ttcctcattttgtaagatgggactggagttgacatggactgaacctgcagtccatcccctcctccatctgcaaaactgtaggtatacatacagctctttgrggaagagagttagctctcatgagcttttggaaagggtccatggtgcagaaaaggtcaagcactacagccaagaggtctcttccatatccagtgatccagt

SEQ ID NO: 145937 - DNA, 201 bp, Homo sapiens
tcccatgctgtcgtctgaggaagaacagcgaagcttttcgtcctggcaccagggtgatgagcccgcagtgacgtggaagtggcttccaaaggtgccacctyggtggcgattttcccatttccctttggattctccttggcacttcttacttcagactgcagtcactccccttccccagatctcagccgctcctcccaagcc

SEQ ID NO: 145938 - DNA, 201 bp, Homo sapiens
tccacgcagaaggcacagtatgtgcaaaggcatgggggtgtgaaacaatatgatagcttgagacaatacctaagtagttaagtattctagggtataaagtrcaggagaggggtaataataaggcatcagcctggatgggatagaaaattcttatggcagaggaagtgaaactaaagcccacttgcagcagacattagaagt

SEQ ID NO: 145939 - DNA, 201 bp, Homo sapiens
ccacttctctgggcccaaacgcctcccagagtcagctctgcgcgacgacgcggaactcgagcccctcctcccggcaggaagtaggcgtaggcgactccccrgcaggaagagcgacggccgttcggccaatagctacgaaggttggctggccgcctcaccaatcacagagcggcattggaagatggggccggggcgtggcgg

SEQ ID NO: 145940 - DNA, 201 bp, Homo sapiens
catcacaggccagacctgcatgatcgccaggcacccgactcgggttatgaaggtgtctctcctaagagagtggcagaggcaaactttagccttggcagtgcgcctcaagctgctcaggggagaagtcacggccaaagccctggagtgcatgggttctttagccatggttctcctgcagcttcctctgatattatgaagcgc

SEQ ID NO: 145941 - DNA, 201 bp, Homo sapiens
taaatacaggtaaagctttgcctgtcctgctgtgtggcctggctcctaacagaccaaggaccagtatagggttggagggaagcggttggggacccctaccrtggggcatccaagggaggctcttgtggacatttctcctttgaagtaatgagtatacaggtggtagcctgtaagtggtgaatttagagctagcagaagggg

SEQ ID NO: 145942 - DNA, 201 bp, Homo sapiens
agtaatagagtagagagtgaggaggtggtgagcaaaggcctcatagagggagtaacattttttctttaatttgatgtatactttacatatagtaaagtgcmcaaatcttttctttttttttttcttttttttttttttttttttttgagacagagtcttgctctgtcgcccaggctggagtgcaatggtatgatctcggtt

SEQ ID NO: 145943 - DNA, 201 bp, Homo sapiens
ccccctcactcccctagaaagcaggccagcccagttcctggcccagaagcgacacagctccacctctaggggtagggacagagttctggcctcccttcttsctggagtgctggctccgtaccacctctgcttctcacactaccttcccctgccagtcagccttcagcctcttgggagccttgcaggccccagggcattcca

SEQ ID NO: 145944 - DNA, 201 bp, Homo sapiens
tggggtttcaccatcttggccaggctagtcttgaactcctgacctcatgatccacctgcctcagcctcccaaagtgctgggattacaggtgtgagccaccrcgcccggccagacccgcacttctttggtttcatttggctggtttccgtttgctctccacatccccctccgtcttctccaccctgcttggagctggtccta

SEQ ID NO: 145945 - DNA, 201 bp, Homo sapiens
cgaaagagggaacacgaggacacccccagaccctggctccgctcaccagtgcccacaacacgctgctgggctcccaaggctaaccaggtgccacagacccrgccgcccacccgcgcgcccagggagagcgaaacgccaagggccaggaggggagatccccatctggaacgggctccttgggcccaggagcgggcaagccgg

SEQ ID NO: 145946 - DNA, 201 bp, Homo sapiens
ggcccaatcccagcctatctgaagactggcactgcccatcccccaactgatccagccatagtccccaaaagaggaaagggggagggttcggacctgagacycgaggcactggggtgacttcttttgtatggaagcccactctcttgtgaatcacccagccccttgggcctgggatggggacagggatcagcatggcacaga

SEQ ID NO: 145947 - DNA, 201 bp, Homo sapiens
agcttgtcagagaggggagaggagagccagagagactgtggcagggaaggcagaggaaaaaggcatgctccattgtcatagctgccacccagaggttcagygataagggctgaacaatgacaaatgggtttgaccttcaaggggacagcgccaaattaggatggagcagtacaggcaggggcccagttgagtggcctgaga

SEQ ID NO: 145948 - DNA, 201 bp, Homo sapiens
  misc_feature (1)...(201): n = A,T,C or G
gtcctacctcccctctgagtcctgccccaggttctcagcccctccctacaaaggcccaggctaacacttcccccacctctgatacctttcagtacatgganagggcttccctgcttcaggtcccaaatcctgatggtcccatcttcatagcctaccacagctctcttccctgaagagaggcacagatgaagagagggcaga

SEQ ID NO: 145949 - DNA, 201 bp, Homo sapiens
gctgggattacaggcatgtgccaccacacccggctaattttttgtatttttagtagagacagggtttctccatgttggtcaggctggtctcaaactcccarcctcaggtgatctgcctgcctctgcctcccaaattgctgggattacaggcgtgagccaccgcgccctggctttttttttttttttttttttgagacagag

SEQ ID NO: 145950 - DNA, 201 bp, Homo sapiens
gagcttgtactagttgtatagtagtactcagaaggcgttatgaacattgtgattgggctctgactctgaccttaatacatattattgaccaatattaaagrgaaaggaggaagaaatcaacatttttttctgcatgtgaggtgtgccagtactttgccatgtaatgttttagtgtttgagataagtattacatccccattt

SEQ ID NO: 145951 - DNA, 201 bp, Homo sapiens
gagctgacacccaacagctaagaagctgcctccaattcagagaactggggaaggaatgttccaaggggagagagcataggcaaaggccctgaggtgggaaygagcgtggcacatttgaggaagtgtggctggtccgtggtgacaagggaaaggcatctgaggaggttgaagagacaggctgggccctattgagcaggggct

SEQ ID NO: 145952 - DNA, 201 bp, Homo sapiens
gaggaaggaactgagactgagctaggattctcacctagtctgtgactccatgctctttcccccataccaaagtgcctcccaagcagtggttacttagcttaagaggggaaaactgggagggtaccttggccaagtctcagagagggaaagcgtcagggctgcctggaaaatcctgcacaggtgctgttgcaggaatgcagg

SEQ ID NO: 145953 - DNA, 201 bp, Homo sapiens
aggaaggaactgagactgagctaggattctcacctagtctgtgactccatgctctttcccccataccaaagtgcctcccaagcagtggttacttagcttaagaggggaaaactgggagggtaccttggccaagtctcagagagggaaagcgtcagggctgcctggaaaatcctgcacaggtgctgttgcaggaatgcaggg

SEQ ID NO: 145954 - DNA, 201 bp, Homo sapiens
cagctcctctggctcaggcttggcccctccccaaaccccgtgcacatctccccacccgtagggccatcggcttcccttgtggtatcctcctcttcatcctmaccaagcgggaagtggacaaggaccgtgtgaagcagatgaaggctcggcagaacatgcggttgtccaacacgggcgagtatgagagccagaggttcaggg

SEQ ID NO: 145955 - DNA, 201 bp, Homo sapiens; identical to SEQ ID NO: 26995

SEQ ID NO: 145956 - DNA, 201 bp, Homo sapiens
ctccgggctgatggtgtgcttccggttccccaggaccagctgtgtgtcgtaagccaggaactgcaaggatagggaagccagaagtgagaactcaggcatcrgtgtccagagctcatttttggtcagcagatttgtcttgggggcctatgcgccacacagtgcttagggccacattaacgcacagcataacatatgggctct

SEQ ID NO: 145957 - DNA, 201 bp, Homo sapiens
caccctgcttggagctggtcctatggacacctcagtgggctcttggtcctccagctgcagctgagtttggcagtggagctctccaggaggagatggcagcrgaggtggagggtttgtctccttctccctccctcaaggctcaccccagactggcttatccctcaaccagtggtcacagcccctatcagttgggcctgtcca

SEQ ID NO: 145958 - DNA, 201 bp, Homo sapiens
cccctacctcacccagtaagtccctgacctaggcaagggatggcccttccatgggccctttcccccacccccagccttcagtgaagtgtttcaggggtatsagcaggtggatctttgccagtgcccttcctggcccaatcccagcctatctgaagactggcactgcccatcccccaactgatccagccatagtccccaaaa

SEQ ID NO: 145959 - DNA, 201 bp, Homo sapiens
cacaccgttctcaatatggctgactagtgttctaatagcaggcagcttgaacaagagatggcaagagtgcccacaaaaatcaatggaatctctggacagtrgtgagaggaatggcctgctatggccccattccctgcctcccaggcagtctaaattcatgcccccttccctagattcctcccctcatcccctcagctcccc

SEQ ID NO: 145960 - DNA, 201 bp, Homo sapiens
tgtggaagccccaggctgtgaaatctgacccaactgactctgcccacttttccagtgatttgtctccgtcgaccctcccccgctcactctgccctcctgcytccctctaccccttccttcctggccccaggggagggtggtgcctagcaagcactgttcagccccagggacactgagaggcagggaagaagacaggcctcc

SEQ ID NO: 145961 - DNA, 201 bp, Homo sapiens
agtccctgctgtggtctcagtttccagaaggcctgactggaagttggacatttgctaataagcagtgaggagccactgaagacttttgagcaggagcaagyctcagcaaaatgcggcgctttaggaacttctttttgccagtgctttgcagtttgggttggaggtagagagctgggggacagaggctcttgtaaggcccta

SEQ ID NO: 145962 - DNA, 201 bp, Homo sapiens
tgcagacctgaggagcgctgcgaccctcctaggctattgactgttaagtcctcaggtttggcccagattccagttcgtgcctctgaggtccaccagagggsgcatgaagcccaggctgttgccaaaccctaccctgccccacaccaaggagccagccaaaggcaaataaagttattgagtgtttagtagaaaggaaccagg

SEQ ID NO: 145963 - DNA, 201 bp, Homo sapiens
gcagtgttgtgatcgtcagctcactgcaacctccacctcctgggctcaagtgatcctcctacctcagcctcctgagtagctgggaccccaggtgagtgccmccatgcccagttactttttgtgtttttttttttttttggatttttttttacttatttatttttttttttttgagacagagtttcactcttgttgcccagg

SEQ ID NO: 145964 - DNA, 201 bp, Homo sapiens
ctcagcctcccaaagtgttgagattacaggcatgagccaccgtacccggcctctttttttgttttgttttgttttttgttttttttttgtttttttttggttttttttttgagacagagtcttgctctgttgctcaggctgaagtgcagtagtgcgatcctggctcactgcaacctccacctcctgggattgcaagcgatt

SEQ ID NO: 145965 - DNA, 201 bp, Homo sapiens
tctgccatagcttccatctaaaaccctctcatgggttttagcctcaacaggaggctgacacaagtggaagccaaactactcaggccctccacaccaccacrgggctcacagcctggccaacggccccgggagaagagggtggcccaggcttggagatacataaaggtcagagctggaaagaaactcacccaaggacggcca

SEQ ID NO: 145966 - DNA, 201 bp, Homo sapiens
ctcatgggttttagcctcaacaggaggctgacacaagtggaagccaaactactcaggccctccacaccaccacggggctcacagcctggccaacggccccrggagaagagggtggcccaggcttggagatacataaaggtcagagctggaaagaaactcacccaaggacggccaacccctcactttaccaactagacagcc

SEQ ID NO: 145967 - DNA, 201 bp, Homo sapiens
aagaggagagtatgtgtactggagggagggatggaaaggagcagctgactggtccaggcagcctgccctcctccctgccagagacggatgcccagagtggaaaaaatagctcagaatgcacatctcaggaaaccccacccagcaggcgcaggagcacagcccagatctgacgatttgttcccctcccttttcctttatctg

SEQ ID NO: 145968 - DNA, 201 bp, Homo sapiens
tcccgctcagccttgaaacaataaagagaatcaaagaaggtattcagggtgtggaggcaaaaaaaagcactgctctttactgagtccaaatgactcgactytgggcctcagtttcctcatttgttttgttttttgttttttgttttttgagacggagtctcgctctgttacccaggctggagtgcagtgttgtgatcgtca

SEQ ID NO: 145969 - DNA, 201 bp, Homo sapiens
atctgctcgcctcagcctcccagagtgctgggattacaggcgtgagccaccgcggccggcctcacctcatttctgaccaaacacaagcatgtccctgccawgatgtttaccaaacttggctccaaatgtcttttgcaaaagtcagatttcactttaaaggatgaggaaagtggttcaggttcccaaaggagttcctaagga

SEQ ID NO: 145970 - DNA, 201 bp, Homo sapiens
agcccacgtgggggaaaggagtagggacttgtttatgggagccacagtggagaaacagaatcacctagccaggcatttcccagactgttctaaagaacacrccccaggagacgttaatgaatgagtgctggaaacagatgactcttgagaaacaatccacacccccttcttggaaattcacaatggcatattctgcccctg

SEQ ID NO: 145971 - DNA, 201 bp, Homo sapiens
ttccatgacaccaaggctgccagtagttgaccaactctgtttaaagtgcttatctcatgttaatagctataggtcagcaccacaccaccactgaatgtccttttttttttttttttttttttccagacagggtctcgctctgtcacccaggctggagtgcagtggcgccatctcggctcactgcatcctcctcctggtttc

SEQ ID NO: 145972 - DNA, 201 bp, Homo sapiens
aatgatgttccatgggaaacggcgtctgaagggaaagagaagccttgattaaatgacttggggcccctcaggcgtcagaggctcctacagcagaaggaagygcttggctcctgtgcctggaggattaagccttgactccaaggagggaggttggcatggcctttggcacctgttcaggtgtggtacgcagggacaacatgg

SEQ ID NO: 145973 - DNA, 201 bp, Homo sapiens
tgaggcaggagaatggcatgaacccgggaggcggagcttgcagtgagccgagatcacgccactgcactccagcctgggcaacagagggagactccatctcmaaaaaaaaaaaaaagagagagagaaatcatactgcatttctctacctcctgtgacttctggcgccttcctcagttgaggtcatctaggtgaaaggcagtg

SEQ ID NO: 145974 - DNA, 201 bp, Homo sapiens
caccaagttggaaagaggcagccacagaggagatcagaacaggcggcccagataaggtggaggagacagccaggacatccttctgaaatgggtccccatcycttccctgggagcagtctccctcacagcatctccacaccctcctgccacccttctagacttacaaaaagggtcagcagaatgatgttccatgggaaacgg

SEQ ID NO: 145975 - DNA, 201 bp, Homo sapiens
agagaggactactttctttgttttaataaaataataattttaaaaattaaaatactaatatgttttcattatagaagatcagaaaatattttaaaagcacaaaaaaataataaacaaatggtaccccatgagtcaatcaaccaaagattatgactggaagcattttagattttttttttttttttttgagacagagtctca

SEQ ID NO: 145976 - DNA, 201 bp, Homo sapiens
cacaggaggacaggagtagtcaccctgaggcttgtctgccccacccaggccagccaggcagccctggcttcaccttctctaattgcccatggtcaccctgwgagcagggcccaccgccacccacacccccagcaggtgaccctgaacccccagggcagtaggagtgggtggcaaagcctagagacttacacaaaggtgaag

SEQ ID NO: 145977 - DNA, 201 bp, Homo sapiens
ggtggcaaagcctagagacttacacaaaggtgaagatagcaatgatggccacagtgatgagcagctgcacggagatgatggagtaaacctggacacagacrgccgggcatgggtcaccatccggcacccctggcctgccccaggaagctgccagcccccagtactttcctcccactcaagaaccctccctagctgcagcct

SEQ ID NO: 145978 - DNA, 201 bp, Homo sapiens
ctgggactcacctgggtccctggcagcaggcaaggatcaggtaggtgacaacgaagacagcactagggacaaagagatggggaagcagttcaggcccaaayctgccccgcttggcagcacacaccaggccagtgatttggggcccaaatagccgtttggaagtctgaggggaagcaactcaacaggaagcaagaacgagat

SEQ ID NO: 145979 - DNA, 201 bp, Homo sapiens
tgggccctttcccccacccccagccttcagtgaagtgtttcaggggtatcagcaggtggatctttgccagtgcccttcctggcccaatcccagcctatctraagactggcactgcccatcccccaactgatccagccatagtccccaaaagaggaaagggggagggttcggacctgagacccgaggcactggggtgacttc

SEQ ID NO: 145980 - DNA, 201 bp, Homo sapiens
atgggaatgtccacaacattctaaggacagaaacaggacacagttttgtaggtgcggatgaggagaaggggatcaggtctctagggaacatccctagtgtrccggggtccgggcctgataagaaaggggagtcggggggccagggaagggccctccatgccctcaccttggtctgaaagcagaagatggtgactgaaatgg

SEQ ID NO: 145981 - DNA, 201 bp, Homo sapiens
ggcttgctccttaattgcgatcccccatcagctgcagcacaaaggtgaagatgtagatgatgtctgtgtaaatctgcagggcgccagtgatgtagtcctcsgggctgatggtgtgcttccggttccccaggaccagctgtgtgtcgtaagccaggaactgcaaggatagggaagccagaagtgagaactcaggcatcagtg

SEQ ID NO: 145982 - DNA, 201 bp, Homo sapiens
ggtgagggactcggggtccaggaggagctgtgtgggcaggcactcagccccaacgggaacccatccatgctgaccccaggcctgcgagcacctccccaaarctctgacctctttggcccatgggccctcaagtcagaactcctgaactccaggatggggcaggggtcgggtcaggcttctctgtcttgggtccatttccca

SEQ ID NO: 145983 - DNA, 201 bp, Homo sapiens
ggctgggagctctgtgagaaggcagaggacgttggggaaggatttgtttcagaccaaaccagggttctgcagggtacagcaaaatggctcggacaggagtycatgagaaaatggtccacgagggaaagtgagctttggttggggataacagatgaggggatggactgggctaagcagaggccagattatcccagtcaccac

SEQ ID NO: 145984 - DNA, 201 bp, Homo sapiens
tggccctactcttttttgcttttattactatttttaattgacacacaataattgtacatatttatggggcacagtgtgatagtttgatacatgtatacaakgcgtaatgatcaaatcaaggtaattagcatatccatcacctcaaacattgatcatttctttgtgctgggaacattcaaagtctgctcttctagctatttg

SEQ ID NO: 145985 - DNA, 201 bp, Homo sapiens
ggttatttccacatggaggggttggcgtttgagctgacacccaacagctaagaagctgcctccaattcagagaactggggaaggaatgttccaaggggagrgagcataggcaaaggccctgaggtgggaatgagcgtggcacatttgaggaagtgtggctggtccgtggtgacaagggaaaggcatctgaggaggttgaag

SEQ ID NO: 145986 - DNA, 201 bp, Homo sapiens
cgtgatctgcccacctcagcctcccaaagtactgggattacaggcgtgagccatcgcgctcggccccgtcttgtgtattataggatgtttagcagcatacytggcctctacccactaaatgtcagtaacattcctccccacacagttgtgaccatcaaaaatgtccccagacattgccatatatcttctgggaggcgaaat

SEQ ID NO: 145987 - DNA, 201 bp, Homo sapiens
ctcgtgatctgcccacctcagcctcccaaagtactgggattacaggcgtgagccatcgcgctcggccccgtcttgtgtattataggatgtttagcagcatmcctggcctctacccactaaatgtcagtaacattcctccccacacagttgtgaccatcaaaaatgtccccagacattgccatatatcttctgggaggcgaa

SEQ ID NO: 145988 - DNA, 201 bp, Homo sapiens; identical to SEQ ID NO: 26983

SEQ ID NO: 145989 - DNA, 201 bp, Homo sapiens
atagatgaggaacctcatctgtgaaactcatgacttgcccaaggtcacagagtcaacaggggccaggctatgatgggagcccagatctttctgttgccagwgcctctgttctttccataagcccatgtagcgagaaatgaagacaggaatgggactcaggcatcggtgcaaggtggtgtctgtcagaggaaagggtgattt

SEQ ID NO: 145990 - DNA, 201 bp, Homo sapiens
tatagaagatcagaaaatattttaaaagcacaaaaaaataataaacaaatggtaccccatgagtcaatcaaccaaagattatgactggaagcattttagattttttttttttttttttgagacagagtctcactgcacatcactcagatgtgcagtggtgccatctcggctcactgtaacctctgcctctcagattcaagt

SEQ ID NO: 145991 - DNA, 201 bp, Homo sapiens
tcactgcaacctccgcctcccaggttcaagcgattctcctgcctcagcctcctaagtacctggggttacaggtgcgtgccaccacacctgcctaatttttrtatttttagtagagatggggtttcaccatgttggtcaggctggtctccaattcctgacctcaggtgatctgcccgcctcggcttccaaaagtgctgggat

SEQ ID NO: 145992 - DNA, 201 bp, Homo sapiens
ggaaactccacatcccttcattcagccagggaacacctagctgccctaggtaaggactgtggggtcccagatatgaacaggttctgatcgctgttctgcarggaaggggaaagcacaggtgaacagatataaacaagggcccaaacccgggaggaggcaggccgtggcaagctccccagaagcagcacaatatgcctgggg

SEQ ID NO: 145993 - DNA, 201 bp, Homo sapiens
agaccagccttgccaacatggtgaaatcccatccctactaaaattacaaaaattagttgggtgtgggggtgtgcacctgtagtcccagctacttgggaggstgaggcacaagaatctcttgaacccgggaagcagaagttgtagtgagcctagaacttaccactgcactccagcccgggtgacagagtgagactccacctt

SEQ ID NO: 145994 - DNA, 201 bp, Homo sapiens
tgcttttgcatcctagttttgttgcttagtagccatgtgaccttgaacaaataacttctctgtgccttagttgtttgcatctataaagtggggttggggaygcctacctcatagggctcctgtgaagatcaaatgaaaccgcatctaaaatacacagggcctggctcaaaaagagtgttcaggaaatgttagcaggtgttc

SEQ ID NO: 145995 - DNA, 201 bp, Homo sapiens
ctccagaccgcccccagcactgtcttccctcttcgagcttcccgtgcgcattcttgcttgtactggagttaggtgttcacggaccggccttcctgactgckctgtgttcctaaggggccttggggccgggcacagtggctcacacctgtaatcccagcactttgggaggccaaggcaggtggatttcttgaggccgagagt

SEQ ID NO: 145996 - DNA, 201 bp, Homo sapiens
gggactacaggtgtacaccatcatgcccggctaatttttgtatttttagtagagatctggtttcaccatattggtcaggctggtctggaactcctgacctyaggtgatccacctgcctcagcctcccaaagtactgggagtacaggcatgagccactgagcccagccttgatacaattctaataacctacctatagtcttt

SEQ ID NO: 145997 - DNA, 201 bp, Homo sapiens
gtgcaggagccagggctgggaagaccgtccctgtccgggggtgaggtcagcagatgcccgggctccgatggcaagtgccggagagaaggaatgcctcccaycgtctgacatttaaaaccgccaactcctttcgtatgtccttgtcccactccccagcatccaactcctcaccagtcaagttaggttcttctgtcccaagca

SEQ ID NO: 145998 - DNA, 201 bp, Homo sapiens
gcagctgcacggagatgatggagtaaacctggacacagacggccgggcatgggtcaccatccggcacccctggcctgccccaggaagctgccagcccccartactttcctcccactcaagaaccctccctagctgcagcctggcccagaggcgaccccagtgagatgcctggctcagaggcaatgtgcacttcttcctcag

SEQ ID NO: 145999 - DNA, 201 bp, Homo sapiens
agtccagacaggctgggagctctgtgagaaggcagaggacgttggggaaggatttgtttcagaccaaaccagggttctgcagggtacagcaaaatggctcrgacaggagtccatgagaaaatggtccacgagggaaagtgagctttggttggggataacagatgaggggatggactgggctaagcagaggccagattatcc

SEQ ID NO: 146000 - DNA, 201 bp, Homo sapiens
atgttggtcaggctggtctcaaactcccagcctcaggtgatctgcctgcctctgcctcccaaattgctgggattacaggcgtgagccaccgcgccctggctttttttttttttttttttttgagacagagtctctgtctcccaggctggagtgcagtgacatgatcacagtttactgcagcctttacctcccaggcccaag

SEQ ID NO: 146001 - DNA, 201 bp, Homo sapiens
tttattaatttattaattgaggtcattgtgttttcacatttatttaaggtctgtaatcactccttggccttttggctaagatcaagtatatttaagttcgtttttttttttctttttgagagagtctcactctgtcgcccaggctggagtgcaatggggcgatctcggcttactggaacctccacctcctgggttcaagcg

SEQ ID NO: 146002 - DNA, 201 bp, Homo sapiens
gttttttgttttttgttttttgagacggagtctcgctctgttacccaggctggagtgcagtgttgtgatcgtcagctcactgcaacctccacctcctgggstcaagtgatcctcctacctcagcctcctgagtagctgggaccccaggtgagtgccaccatgcccagttactttttgtgtttttttttttttttggatttt

SEQ ID NO: 146003 - DNA, 201 bp, Homo sapiens
acgcctgccaccatgccctgctaatttttgtatttttagcagagacttggtttcaccactttggacaggctggccttgaactcctggcctcaagtgatccacctgcttcagtctcccgaagtgctgggatgccaggcatgagccactatgcccgcctgaggttttctttctttctttctttctttctttctttctttcttt

SEQ ID NO: 146004 - DNA, 201 bp, Homo sapiens
tggccttgaactcctggcctcaagtgatccacctgcttcagtctcccgaagtgctgggatgccaggcatgagccactatgcccgcctgaggttttctttctttctttctttctttctttctttctttctttctttctttctttctttctttctttctttctttcttccttccttccttccttccttccttccttcctttct

SEQ ID NO: 146005 - DNA, 201 bp, Homo sapiens
cttgaactcctggcctcaagtgatccacctgcttcagtctcccgaagtgctgggatgccaggcatgagccactatgcccgcctgaggttttctttctttctttctttctttctttctttctttctttctttctttctttctttctttctttctttctttcttccttccttccttccttccttccttccttcctttctttct

SEQ ID NO: 146006 - DNA, 201 bp, Homo sapiens
gtggccttcggggtgcttgcccggctggaggtggtgagggggcgggtccaaaggagaggtcaatgggcggggcggggccacaacgcccccacgtccagagycggcaggcaggttccccgcggggggccggggccgggccgttgcctagcaacgccgagccccgcccggccggcgcgtgcctgcccccagcatggcttggca

SEQ ID NO: 146007 - DNA, 201 bp, Homo sapiens
aactcctggcctcaagtgatccacctgcttcagtctcccgaagtgctgggatgccaggcatgagccactatgcccgcctgaggttttctttctttctttctttctttctttctttctttctttctttctttctttctttctttctttctttctttcttccttccttccttccttccttccttccttcctttctttctctct

SEQ ID NO: 146008 - DNA, 201 bp, Homo sapiens
agcagtgccctggacggggaggcgggcggggcgaactgcgagctcctgccccttcccagggctcaggcgactgtggaccccgatcagcgcaggctcgcggyccgctgtggccccgcctcctggccgccagccgggggcggagccaggccgccccccaagccgggtggccttcggggtgcttgcccggctggaggtggtgag

SEQ ID NO: 146009 - DNA, 201 bp, Homo sapiens
gaccccgatgatctctcaggtttctgccagttgagaaagtgtagcagtgccctggacggggaggcgggcggggcgaactgcgagctcctgccccttcccarggctcaggcgactgtggaccccgatcagcgcaggctcgcggcccgctgtggccccgcctcctggccgccagccgggggcggagccaggccgccccccaag

SEQ ID NO: 146010 - DNA, 201 bp, Homo sapiens
ctgggctcaagcaatttgccctcctccacctcccaaagtgctgggattataggcgtgagccactgcacctggccaccagcttcttttctaagagcatgaaytccattccagagggttccgccttcatgacctaatcacttcctaaaggcctcaccttttaatactataacattgaggattaagtttcaacaaatgaatgga

SEQ ID NO: 146011 - DNA, 201 bp, Homo sapiens
gtctaagggaaggagagagacaagaatgaaacacttaaaaaggaaggaaggcagggtgctgggggagtggccatggtggcctctgccagagctggggaatrccaccaagttggaaagaggcagccacagaggagatcagaacaggcggcccagataaggtggaggagacagccaggacatccttctgaaatgggtccccat

SEQ ID NO: 146012 - DNA, 201 bp, Homo sapiens
ttcctcccactcaagaaccctccctagctgcagcctggcccagaggcgaccccagtgagatgcctggctcagaggcaatgtgcacttcttcctcagccccrctcccatgctccctgccatctcccctcctgtccaacaccagcctcggtgactactgacttgccctgcctggccaccatactctaccagtatggcctctgc

SEQ ID NO: 146013 - DNA, 201 bp, Homo sapiens; identical to SEQ ID NO: 26981

SEQ ID NO: 146014 - DNA, 201 bp, Homo sapiens
caaaagaatatgacctctcccaggcctctaccccagccccctcacctgcacactcaaagagcagctccccatcgctgagccgccatacgaaggctttgtcmtcttcacccccggtcactgccaaggtattggtcttggggtccaggctcacacaaaacacagatgctgtcccaagagatattccatgggtaaggggacaga

SEQ ID NO: 146015 - DNA, 201 bp, Homo sapiens; identical to SEQ ID NO: 26982

SEQ ID NO: 146016 - DNA, 201 bp, Homo sapiens
cgaaagagagaggagctgggagaggagggagagacagaagccagggcagccacagtcccatggagagcactgaagccttagttttagcacagatgttgccrtggcagttacttccatctgtgttactcagattggttttaatccttgagacttcccttggggcaccttgggaggctgaggcaggaggatcacttgaggcta

SEQ ID NO: 146017 - DNA, 201 bp, Homo sapiens
aagaatgtggtgtcatacagtaggtggcggggagaagacacatcttcagcctagtccctgccaagcccaccaagagcaacagttagtccctagctcctccrtccccaccaagtacccacacatccatagccagagaggccacctgtctccaggacagaaaggaaactgggcatgttactcaaggggaaggaaaggggccta

SEQ ID NO: 146018 - DNA, 201 bp, Homo sapiens
ggtccctcctgcctcttctcaggggacctgctcttcctctctggctgtggtgagtttccccgaaagagagaggagctgggagaggagggagagacagaagycagggcagccacagtcccatggagagcactgaagccttagttttagcacagatgttgccgtggcagttacttccatctgtgttactcagattggttttaa

SEQ ID NO: 146019 - DNA, 201 bp, Homo sapiens
tttctaaactgaactaatttctccacccaggtctgacaagatgtctcttttctctaacatttaaacagctccaaccatctcagctccttcatgattgtttygtcatcatcaccatcgtcactgtcatcatcatcatcatcaccaccagtgatttcctgaatgccaaccaagcaccagtcatcaagcgtgagccacggtgca

SEQ ID NO: 146020 - DNA, 201 bp, Homo sapiens
cccactgtcctatcaggctccacttgcaagacacaaggtcaaagataaaatcattaagaatttcagggtcgggcacggtggctcacccctgtaatcccagyactttgggaggccaaggtgggcaaatcacgaggtcaagagatcgagaccatcctggcccacatggtgaaaccccatctctattaaaaatacaaaaattag

SEQ ID NO: 146021 - DNA, 201 bp, Homo sapiens
tccacccatcagggctgaggagggactcacttgaaggctatggctattcagaggagagtgggcaaaataggggttaacaaggaaaaaagggaggggtgaaraatggatattgaccaacaggatctgccacacccatgttgtttaaaaaaaaaaaaaaaaagaaaacctgggccgggagggatggctcatgcctgtaatccc

SEQ ID NO: 146022 - DNA, 201 bp, Homo sapiens
cgcccacactcctggctcttgctgcttcaagtgcctcttgcatcctgctccccagtctccaaacctcctctctctcgcaggcttccattgaaaaggaaggrgtcaccttggtcgccattctgtgtactcacaagcactggtaaggggctcccgtcttccctggcccacccttgtcccagctgggcttgccaggactgggcc

SEQ ID NO: 146023 - DNA, 201 bp, Homo sapiens
cttgctttgagtcttgttgaactcccatgcgttgtgtgtcccccagatttgtgtgctcatgggcattgcagactctgtataggtatgataagcgaggaacrgagcacactcactgtgtgtgtctcttgctccctgcatgtcccactgtcctatcaggctccacttgcaagacacaaggtcaaagataaaatcattaagaat

SEQ ID NO: 146024 - DNA, 201 bp, Homo sapiens
taaatatttgctattactatctgatagcaagaattacattacattcctgggtctaaccaatagcttggctggcaatgtgtggcttggaccaagcaagatcyacccatcagggctgaggagggactcacttgaaggctatggctattcagaggagagtgggcaaaataggggttaacaaggaaaaaagggaggggtgaagaa

SEQ ID NO: 146025 - DNA, 201 bp, Homo sapiens
agcaggaccccttctgccttgtttctgctgtctccactgtgtccatcatgcacagtatttgccagatacagcgagtgacaaggaggggccttgtttactgyggcttcttggtgcagagtccctgcccgcacagatctgtcctttcttagggacagaacctgggaacacgtagtcagcatttagtaaggggaggcggggagc

SEQ ID NO: 146026 - DNA, 201 bp, Homo sapiens
tcctggcctcaagtgatccacctgcttcagtctcccgaagtgctgggatgccaggcatgagccactatgcccgcctgaggttttctttctttctttctttytttctttctttctttctttctttctttctttctttctttctttctttctttcttccttccttccttccttccttccttccttcctttctttctctctctc

SEQ ID NO: 146027 - DNA, 201 bp, Homo sapiens
aaactgaggttaggggagtgagttcctgcttcttgcctccagcaacagaagaagccgtatctctggtaatggcttaagaaaccaggggccataacatgggrcagtgacatcctgggaaggtgggacgggggattgaagacagaagggcacaggttccagccggacatggtggctgatgcctgtaatcccagcactttggga

SEQ ID NO: 146028 - DNA, 201 bp, Homo sapiens
ggcctacataacaatgttttaatagcgaaggaccacatgtataacaatggtcccatgagattattgctttattgctttttttttttttttttgaggtggaktctccccctgtcacccgggctggagtacagtggcgccatctcggctcactgcaacctccgcctcccaggttcaagcgattctcctgcctcagcctcctaa

SEQ ID NO: 146029 - DNA, 201 bp, Homo sapiens
ctggcctcaagtgatccacctgcttcagtctcccgaagtgctgggatgccaggcatgagccactatgcccgcctgaggttttctttctttctttctttctytctttctttctttctttctttctttctttctttctttctttctttctttcttccttccttccttccttccttccttccttcctttctttctctctctctc

SEQ ID NO: 146030 - DNA, 201 bp, Homo sapiens
ggcgggcaggtggcctgggattacacacatggagacagaactagccaaggcctcccagccagggctgagaccatggagaggccaccagctcttactgtgcytctggtcctagccaagagccctcagcagcccctccccttccgtcagtgacagatgggcgtcctctggagagggctgtgaagtctggggaagaacctgtcc

SEQ ID NO: 146031 - DNA, 201 bp, Homo sapiens
tgcagtggtgcaatcatggctcactgcaacctccgcctcccggattcaagcaattctcctgcctcagcctcccaagtagctgggattacaggcacccgccmccatgcctggctaattttttttatttttagtagagatggggtttcaccatattggccaggctggtctcgaactcctgaccttgttatccccccacctcga

SEQ ID NO: 146032 - DNA, 201 bp, Homo sapiens
aggcatgagccactatgcccgcctgaggttttctttctttctttctttctttctttctttctttctttctttctttctttctttctttctttctttctttyttccttccttccttccttccttccttccttcctttctttctctctctctctctccttccttccttccttccttcctttctttctttctttctttctttct

SEQ ID NO: 146033 - DNA, 201 bp, Homo sapiens
catttttgtttacagaggtacaatcgtatcagttattcaaaatttacccagttttgtgtcctatttttttctccactactttctttctttctttttttttyttagacgagtattgctctatcacccaggctggagtgcaatagcataatctcggctcaccgcaacctccacctcccgggttcaagcgattctcctgcctca

SEQ ID NO: 146034 - DNA, 201 bp, Homo sapiens
catgagccactatgcccgcctgaggttttctttctttctttctttctttctttctttctttctttctttctttctttctttctttctttctttctttcttycttccttccttccttccttccttccttcctttctttctctctctctctctccttccttccttccttccttcctttctttctttctttctttctttcttct

SEQ ID NO: 146035 - DNA, 201 bp, Homo sapiens
tatcatttcagtcataaaatatttacttgagcacccaccaggacagatgctgatgttgcaagaatgagatcaataatatcaaggaacatgtgtggagtacytgaaacggcccaggcaaggtgtcctttctctgggtaatcacggttaatcctccgagtagctccatgcaaattaccagtccctcgtggagagaaagagaat

SEQ ID NO: 146036 - DNA, 201 bp, Homo sapiens
agccactatgcccgcctgaggttttctttctttctttctttctttctttctttctttctttctttctttctttctttctttctttctttctttcttccttycttccttccttccttccttccttcctttctttctctctctctctctccttccttccttccttccttcctttctttctttctttctttctttcttctttct

SEQ ID NO: 146037 - DNA, 201 bp, Homo sapiens
atatttgaagaaatttattctgaaccaaatatgagcgactatggcccttgacacagccctcaggagaccctgagaacacgtggcccaaggtagtcagggcrgggggacaggggcgcagaatgtgtgtgtgtgttgaagggagcttccaggttataggtagatttaaaaattttctgattggcaattgattaaaagagttac

SEQ ID NO: 146038 - DNA, 201 bp, Homo sapiens
ctctgttgcccaggctggaatgcagtggcatgatctcggctcactgcaacctctgcctcctgggttcaagcgattctctgcctcagcctcctgagtagctrggattacaggtgcccaccaccatgcccagctaatttttgtatttttagtagagatggggtttcaccatcttggccaggctagtcttgaactcctgacctc

SEQ ID NO: 146039 - DNA, 201 bp, Homo sapiens
agatgtctcttttctctaacatttaaacagctccaaccatctcagctccttcatgattgtttcgtcatcatcaccatcgtcactgtcatcatcatcatcaycaccaccagtgatttcctgaatgccaaccaagcaccagtcatcaagcgtgagccacggtgcaaagatggaggcaggctctccattctaagggaacctctc

SEQ ID NO: 146040 - DNA, 201 bp, Homo sapiens
gtggtgagcaaaggcctcatagagggagtaacattttttctttaatttgatgtatactttacatatagtaaagtgcacaaatcttttctttttttttttcytttttttttttttttttttttgagacagagtcttgctctgtcgcccaggctggagtgcaatggtatgatctcggttcactgtaacctccgcctcctgggt

SEQ ID NO: 146041 - DNA, 201 bp, Homo sapiens
gaagtggatactttgggcagagccacacatactcctggagccatacagggttttaacttctagacataaactttattacatttatagttgtatccctttgkgtgatatagttaggatttctctattaagtaattaatcctaactatatccttgggctgatttgatttctgcccccacccgacagactgacccttgtccccc

SEQ ID NO: 146042 - DNA, 201 bp, Homo sapiens
cccaggtacacccacctcccagcgcgtatcttacctttcggataaaagtgtgtcgcactttccggtcatcccactctccaggcccgaagctatcactcacygctctctcctccccatcatagccatggcctgggcctagggacagatgacacttgactcagctggggacctgagacatgtggcgtcaatcccaaagcctcc

SEQ ID NO: 146043 - DNA, 201 bp, Homo sapiens
gcagtgcaatggcgcgatcttggctcactgcaacctccgcgtccgaggtttaaacgattctcctgcctcagtctcctgagtagctaggattacaggcaccygccaccaggcccagctaatttttgtatttttagtagagatgaggtttcaccacgttggccaggctggtctcgaactcctgacctcaggtgatccacctgc

SEQ ID NO: 146044 - DNA, 201 bp, Homo sapiens
gagcaaaggcctcatagagggagtaacattttttctttaatttgatgtatactttacatatagtaaagtgcacaaatcttttctttttttttttctttttyttttttttttttttttgagacagagtcttgctctgtcgcccaggctggagtgcaatggtatgatctcggttcactgtaacctccgcctcctgggttcaag

SEQ ID NO: 146045 - DNA, 201 bp, Homo sapiens
ggagagggtgggttacaagcgagtaggatcatttctggctccaagctgcctatagtctaaagggagaaagatgtctggggaaggcgggcgctgtggcagarcccacctaggagattctcccagactgaatgtgtcctcccaaaacatggtcaagaagagaggtgcaaaaagagggaaccctggggttagagaagccaggtg

SEQ ID NO: 146046 - DNA, 201 bp, Homo sapiens
atccctaaatcagcccacgtgggggaaaggagtagggacttgtttatgggagccacagtggagaaacagaatcacctagccaggcatttcccagactgttytaaagaacacgccccaggagacgttaatgaatgagtgctggaaacagatgactcttgagaaacaatccacacccccttcttggaaattcacaatggcata

SEQ ID NO: 146047 - DNA, 201 bp, Homo sapiens
tctcggctcactgcaacctccgcctcttaggttcaagcagttctcctgcctcagcctcctgagtagctgggattacaggcacacaccaccatacctggctratttttgtatctttagtagagacagggtttcactgtattggtcaggctggtctcaaactcctgacctcgtgatctgcccacctcagcctcccaaagtact

SEQ ID NO: 146048 - DNA, 201 bp, Homo sapiens
gaaaacaccctccactttctagaaccaccaggatggttaatatccaaggagattccatttccaaccagcaatcaccagcgactcacatctgcccgactggrggagtgggacatggggcacacgaggcaagcccacacaagccttgctgcgtgctttttctccagagccctttttctgactatagggtcaaaaataacacct

SEQ ID NO: 146049 - DNA, 201 bp, Homo sapiens
tgcaacctccgcctcttaggttcaagcagttctcctgcctcagcctcctgagtagctgggattacaggcacacaccaccatacctggctgatttttgtatytttagtagagacagggtttcactgtattggtcaggctggtctcaaactcctgacctcgtgatctgcccacctcagcctcccaaagtactgggattacagg

SEQ ID NO: 146050 - DNA, 201 bp, Homo sapiens
gcgaccctcctaggctattgactgttaagtcctcaggtttggcccagattccagttcgtgcctctgaggtccaccagagggcgcatgaagcccaggctgtwgccaaaccctaccctgccccacaccaaggagccagccaaaggcaaataaagttattgagtgtttagtagaaaggaaccaggtctgggtttgtgagtccct

SEQ ID NO: 146051 - DNA, 201 bp, Homo sapiens
ggcatctgaggaggttgaagagacaggctgggccctattgagcaggggctttgtgggatacggttaggagtctgacatttcaaagaacgtttgtgagtatktaatatgtacctggcactatgccagacactggagagttgaagatgaataaattaaatccttggccctactcttttttgcttttattactatttttaattg

SEQ ID NO: 146052 - DNA, 201 bp, Homo sapiens
gcagaggaagtgaaactaaagcccacttgcagcagacattagaagtcttccagaacagtctaagggtggggttatggctccctgggcctgcatgactcccstaaaacactcaccctcactccttttcccagtcccgccttgactccatatgtttcatcaaacatatcttggatttattatctataatcttgttaattgtct

SEQ ID NO: 146053 - DNA, 201 bp, Homo sapiens; identical to SEQ ID NO: 26988

SEQ ID NO: 146054 - DNA, 201 bp, Homo sapiens
gttagcagaaggaaagaacccagaagtcttcagtaccacagtaggcttcggtatctccctagccaggtgagggacccccaggcattctccctgcccgcacygagtctctcttcaccctggctacttcctggccacacgtatgactctgccccttactttctgctctgagctgcctgaatacaggaagcaagagttcactct

SEQ ID NO: 146055 - DNA, 201 bp, Homo sapiens
gctccaggtccactcaccttgccggtggtggcactgaccagcttggcctggcagtccacagagccagttaggatcaagctgccatcctggttggcagcaamacaggtgagtgggccctggtgaccctcagtccctagcatagagcagggaggcagctcaggcttcgtcctacctcccctctgagtcctgccccaggttctc

SEQ ID NO: 146056 - DNA, 201 bp, Homo sapiens
agcctgggtgataagagtgaaactccatctgaaaaaaaaaaaaaaaaaggaaactgttacttaagtcaggaatggattacttctctgctcaaactcctccrgcgagttcccacctctctcatgaagtccaagtccattcgaagagtggcttcagggccctctgtgacctgcccatccttaccacatcttttagcacccttc

SEQ ID NO: 146057 - DNA, 201 bp, Homo sapiens
tgcgcctggagtcagaattccagaccctgctcctcatagtctgggaaacaatcagtccagtccccagggggagatgctgctggctgctgggagggaaaggrgatatttgcaggaaactgtaggggggaaatgggcaggtgttggtgctaggggtgcctccaggaaggatggggagggagggggaacggaatgggacaggac

SEQ ID NO: 146058 - DNA, 201 bp, Homo sapiens
gcttcttcaaaatgcagtatttctacaggctttcctgtgtctggatttcaaagttgctttggaatccactcctcaaatttgcagagagaagggtgcgcctrgagtcagaattccagaccctgctcctcatagtctgggaaacaatcagtccagtccccagggggagatgctgctggctgctgggagggaaaggagatattt

SEQ ID NO: 146059 - DNA, 201 bp, Homo sapiens
gccccccacctaggaagctcctcctcatagatacttgcttttgtctaaacaactctactccccaagaaaagccaacagcgatttcctcttattcccaaccyacgatattagctgcctgagaacctctccttaccaataactgcaccccctccataatctcaatttcaggcaccccacactctgaccaccatctatttttcc

SEQ ID NO: 146060 - DNA, 201 bp, Homo sapiens
gagagagagaaatcatactgcatttctctacctcctgtgacttctggcgccttcctcagttgaggtcatctaggtgaaaggcagtgagaaaggcacatggyggatgttgatggtgactgaaactgctgtaactggaagtgggtggcaccatgaggaagccaggccacggaaccagcctggcatccaccatgctgcaggcag

SEQ ID NO: 146061 - DNA, 201 bp, Homo sapiens
ttgtttactgcccttctttttactgttttatgatgaacatttttcttctcactaaatagtcttcaaaagcacaatcttaatgccgtgaagtattccattgyatggctatgcggattaaattaatttcctactggaggccgtttgtttcccatttttacattacaaataaatcagtaattaaaatccttgataattctgtgt

SEQ ID NO: 146062 - DNA, 201 bp, Homo sapiens
tcttaggttcaagcagttctcctgcctcagcctcctgagtagctgggattacaggcacacaccaccatacctggctgatttttgtatctttagtagagacrgggtttcactgtattggtcaggctggtctcaaactcctgacctcgtgatctgcccacctcagcctcccaaagtactgggattacaggcgtgagccatcgc

SEQ ID NO: 146063 - DNA, 201 bp, Homo sapiens
ttcccaggggaggaggctgagcccaggtggctattaccccagctcatgacatgaggctctcccaacacttacaggataacccatcattacctctctgaagkgctcatttttacaagtgaggccttgaggtcatagcacagaaagacagggcccctgacactgtggtcctgcctcttccatttaagctataaactggttctc

SEQ ID NO: 146064 - DNA, 201 bp, Homo sapiens
aaaatcatagttcactgcagcatcaacctctgacctcaagcaatcgtcttgcctcagccactcaagtaactgggaccacaggtgcatgccatgtctggctwtttttttttttaattttttgtagaggtggggtctcactgtgttgcccaggctggtcttgaatttctagacaattttccgatccatcatcccgccttggcc

SEQ ID NO: 146065 - DNA, 201 bp, Homo sapiens
cagttctcctgcctcagcctcctgagtagctgggattacaggcacacaccaccatacctggctgatttttgtatctttagtagagacagggtttcactgtrttggtcaggctggtctcaaactcctgacctcgtgatctgcccacctcagcctcccaaagtactgggattacaggcgtgagccatcgcgctcggccccgtc

SEQ ID NO: 146066 - DNA, 201 bp, Homo sapiens
cattcccaggggaggaggctgagcccaggtggctattaccccagctcatgacatgaggctctcccaacacttacaggataacccatcattacctctctgawgtgctcatttttacaagtgaggccttgaggtcatagcacagaaagacagggcccctgacactgtggtcctgcctcttccatttaagctataaactggttc

SEQ ID NO: 146067 - DNA, 201 bp, Homo sapiens
ccactgacctgggttcatgaactagctgcaggaatccaggcaaatgacctcccctggcctccttttatccctaaatcagcccacgtgggggaaaggagtarggacttgtttatgggagccacagtggagaaacagaatcacctagccaggcatttcccagactgttctaaagaacacgccccaggagacgttaatgaatga

SEQ ID NO: 146068 - DNA, 201 bp, Homo sapiens
aagtctggggaagaacctgtcctgggatgggcagggcgatggcagaccctgacctggggatctcctcttttgaccacggagcagccctgtccctctcctgygcatgcggaagtccccacgcccccaggcatgctggcaacttcggggaaacccttaccctcaagggctttttagctgttttgttatcttcttcagtttcct

SEQ ID NO: 146069 - DNA, 201 bp, Homo sapiens
cagggtttcactgtattggtcaggctggtctcaaactcctgacctcgtgatctgcccacctcagcctcccaaagtactgggattacaggcgtgagccatcrcgctcggccccgtcttgtgtattataggatgtttagcagcatacctggcctctacccactaaatgtcagtaacattcctccccacacagttgtgaccatc

SEQ ID NO: 146070 - DNA, 201 bp, Homo sapiens
tgtattggtcaggctggtctcaaactcctgacctcgtgatctgcccacctcagcctcccaaagtactgggattacaggcgtgagccatcgcgctcggcccygtcttgtgtattataggatgtttagcagcatacctggcctctacccactaaatgtcagtaacattcctccccacacagttgtgaccatcaaaaatgtccc

SEQ ID NO: 146071 - DNA, 201 bp, Homo sapiens
agatagaaaggagctgagcaagctgttgttgctaccattatttctttcccctgcggaaagttgatctgaagcctgggtcctgggctaggaggtggggaccygagttcttgtcctggctttgggactcactccactgtgagagccacatctctagacccagttttaacatcagtaagacaattcccctcaaatgaaagaatg

SEQ ID NO: 146072 - DNA, 201 bp, Homo sapiens
cagccaggagaatcgcttgaacccaggaggcagaggttgcagtgagccaagattgcgctattgcactccagcctgggtgataagagtgaaactccatctgaaaaaaaaaaaaaaaaaggaaactgttacttaagtcaggaatggattacttctctgctcaaactcctccggcgagttcccacctctctcatgaagtccaag

SEQ ID NO: 146073 - DNA, 201 bp, Homo sapiens
ctcagctgccaggcagattgaacccaccccttcccctaggagtgcagtgatgcagtccagggcttcaggtgctctggctccaaggccgcccatctccacayagagagtctaccctcacccagaaggatgctgcctccacgttggtgcctttgctagccagtcgagaggttctggaggtcagagcctgccccggggaccttt

SEQ ID NO: 146074 - DNA, 201 bp, Homo sapiens
tgataactaaccccaaaaaagaactagggaaggggccaggcatggcggctcacgcctgtaatcccagcactttgggaggccaaggcgggcggatcacgagktcaggagatcgagaccatcctggctaacatggtgaaaccccatctctactaaaaaatacaaaaaattagctggatgtggtggcggacgcctgtagtccca

SEQ ID NO: 146075 - DNA, 201 bp, Homo sapiens
aggaagctgccagcccccagtactttcctcccactcaagaaccctccctagctgcagcctggcccagaggcgaccccagtgagatgcctggctcagaggcwatgtgcacttcttcctcagccccgctcccatgctccctgccatctcccctcctgtccaacaccagcctcggtgactactgacttgccctgcctggccacc

SEQ ID NO: 146076 - DNA, 201 bp, Homo sapiens
tcgattagaacattcttccttgcctcacaatgcctgttatcaaggcattcagactgtgccctatccttgcccattatagatctaagtttgctcctctctcmgggccccagtcccccattaggaaggaaccagagcccctgctttctaccacagcagcggcacaagtgggtgagctcagacagcaggacttgctgggtgtca

SEQ ID NO: 146077 - DNA, 201 bp, Homo sapiens
ttgggaggccaaggcgggtggatcacctgaagtcaggagttccagaccagcttggccaacatggtgaaaccctgtctctactaaaaatacaaaaattagcygggcgtggtggcgggcacctgtaatagcagcttctaaggatgctgaggcaggagaattgcttaaacccgggagatggaggttgcagtgagccgagatcat

SEQ ID NO: 146078 - DNA, 201 bp, Homo sapiens
ggttacagaggatcagtggaaagagcatggaattgggggtcaaataaaaccataattgaatttgggttttgtcgcctgtgatggtatgagtcattattctmtccaagccttcgtttgttcatctctaaagtggggcgactggccgggcacagtggctcatgcctgtaatcccagcactttgggaggctgaggtgggtggat

SEQ ID NO: 146079 - DNA, 201 bp, Homo sapiens
caggagtcagaggccaggggtgagcgtctcctgtcccatggcctgaggagcggcagttctcacctgggtccggcggaccgggatcaagttctaccacctcrataatctcttcatcaccatggaagcttagggtctccagtgggggggtgtcagcagcagccccgctttccgattcggactccatgcggcgcaagcggcgga

SEQ ID NO: 146080 - DNA, 201 bp, Homo sapiens
tgagccaccacccccagcccagaggtcagagtcttgtaaagaaaaggctatggctcctctgggtgtgcccccttccgcccccaccatagccaaaccattcrtttctgtttggctgtgagatgacattttttccagggtctggagttagagtagtgaccaggcagtgcaaataattgtggtaatcagaaaagccttcgaaga

SEQ ID NO: 146081 - DNA, 201 bp, Homo sapiens
ttctgggaggcgaaatcgccactgttgaaagccactggcatatgccatgtagccagcactcagctcaagatacaggttatttccacatggaggggttggcrtttgagctgacacccaacagctaagaagctgcctccaattcagagaactggggaaggaatgttccaaggggagagagcataggcaaaggccctgaggtgg

SEQ ID NO: 146082 - DNA, 201 bp, Homo sapiens
tgtgcccccttccgcccccaccatagccaaaccattcgtttctgtttggctgtgagatgacattttttccagggtctggagttagagtagtgaccaggcartgcaaataattgtggtaatcagaaaagccttcgaagaggaggttgaatttatttttagccttaaagaaactggactaaaaggaaaggcattatcagcctc

SEQ ID NO: 146083 - DNA, 201 bp, Homo sapiens
cggccccgtcttgtgtattataggatgtttagcagcatacctggcctctacccactaaatgtcagtaacattcctccccacacagttgtgaccatcaaaartgtccccagacattgccatatatcttctgggaggcgaaatcgccactgttgaaagccactggcatatgccatgtagccagcactcagctcaagatacagg

SEQ ID NO: 146084 - DNA, 201 bp, Homo sapiens
cgtaggcgactccccggcaggaagagcgacggccgttcggccaatagctacgaaggttggctggccgcctcaccaatcacagagcggcattggaagatggrgccggggcgtggcggagagaacccaaactccgccccacctgactccgcccccaactggagggaaacaagcgagcgcgcgcgcctccggggtctcctggga

SEQ ID NO: 146085 - DNA, 201 bp, Homo sapiens
ctttcccccacccccagccttcagtgaagtgtttcaggggtatcagcaggtggatctttgccagtgcccttcctggcccaatcccagcctatctgaagacyggcactgcccatcccccaactgatccagccatagtccccaaaagaggaaagggggagggttcggacctgagacccgaggcactggggtgacttcttttgt

SEQ ID NO: 146086 - DNA, 201 bp, Homo sapiens; identical to SEQ ID NO: 26984

SEQ ID NO: 146087 - DNA, 201 bp, Homo sapiens
gatggggacagggatcagcatggcacagatccaataccttctgtcccctgctcccttgttccccagtcccctgtgtcatcaagatgtggtcagcgtgggamggcttcagatccgggccctggctacacctggccacacacaaggccatctggtctacctactggatggggagccctacaagggtccctcctgcctcttctc

SEQ ID NO: 146088 - DNA, 201 bp, Homo sapiens
cataggaaagcaggaggaaggattcgctgaggagagagggaaccagggagcctgggaactccctgttgtggtttaagaaaaccttccagttttggtggctkgatggcagaaccagcgaagaagccagatgggccaggcacagcctcctggcgactcacagggccagctgggaccctctgaaagggtcagctctgcccctgc

SEQ ID NO: 146089 - DNA, 201 bp, Homo sapiens
accccagctgctgggacctgaaatgggagaggagaaaagcaatcgtgaatgcccaggcccagctcactcagcctcatgggcccacttccagccttgtccargctgcctccgtggagaggaacaccacctattttctccttagagggcagcgtgtgatttgctgtccacaggccacctccccaccaactgggctcctgtccc

SEQ ID NO: 146090 - DNA, 201 bp, Homo sapiens
gggagggttcggacctgagacccgaggcactggggtgacttcttttgtatggaagcccactctcttgtgaatcacccagccccttgggcctgggatggggrcagggatcagcatggcacagatccaataccttctgtcccctgctcccttgttccccagtcccctgtgtcatcaagatgtggtcagcgtgggacggcttca

SEQ ID NO: 146091 - DNA, 201 bp, Homo sapiens
tgcccatagcccccagggggcggagggcctgggtacagggggttgcggtcttcatatggtggtggggcgctggggttggacatggctgctcacgggctgasggggaaccccagctgctgggacctgaaatgggagaggagaaaagcaatcgtgaatgcccaggcccagctcactcagcctcatgggcccacttccagcctt

SEQ ID NO: 146092 - DNA, 201 bp, Homo sapiens
gcaggacagatggctgcccatagcccccagggggcggagggcctgggtacagggggttgcggtcttcatatggtggtggggcgctggggttggacatggcygctcacgggctgagggggaaccccagctgctgggacctgaaatgggagaggagaaaagcaatcgtgaatgcccaggcccagctcactcagcctcatgggc

SEQ ID NO: 146093 - DNA, 201 bp, Homo sapiens
tgggtagccagcagggtgaccgtagccaggctgcgggtagccagggtaggcaggataccctcctggcaggacagatggctgcccatagcccccagggggcrgagggcctgggtacagggggttgcggtcttcatatggtggtggggcgctggggttggacatggctgctcacgggctgagggggaaccccagctgctggga

SEQ ID NO: 146094 - DNA, 201 bp, Homo sapiens
cttccatctgcccttccaggactcaccgtagttcatgggcatcgggtgggtggggggcatgggctgtgggtagccagcagggtgaccgtagccaggctgcrggtagccagggtaggcaggataccctcctggcaggacagatggctgcccatagcccccagggggcggagggcctgggtacagggggttgcggtcttcata

SEQ ID NO: 146095 - DNA, 201 bp, Homo sapiens
gtaacaaagacagaaacagagggagagatctcaacagagaagatgagaaagggatttaagggaaactagaagagaaaaggggcaggaggcggtggcctcayctgctccaagtgctgtccctcccacccaccttccatctgcccttccaggactcaccgtagttcatgggcatcgggtgggtggggggcatgggctgtgggt

SEQ ID NO: 146096 - DNA, 201 bp, Homo sapiens
tcctccgagtagctccatgcaaattaccagtccctcgtggagagaaagagaatgaggtttgagtagattaagaacattgccccaaggtgcagagttcctartggagccagggttctaagctggtcattccaagtctagcacacaacccccaaacccgattccactccctccccgacagttcaccctccttacccacaaggc

SEQ ID NO: 146097 - DNA, 201 bp, Homo sapiens
tcattccaagtctagcacacaacccccaaacccgattccactccctccccgacagttcaccctccttacccacaaggcacttgaagtgttatggggcagcrccaggaattactgcacagcctaaggaccatcacagagacatgtgtgcaatgaagtgtgcaagtcattacctaggcctaagagatgccctcacccaggagc

SEQ ID NO: 146098 - DNA, 201 bp, Homo sapiens
cctagcctagcctgccttaaacatgcacaaaacaatgacattcgtttacagttgggcaaaatcatctggaaacacagatgatgccgttggccaagttggcrgacctgaaggagagggttggggtcacatgaggatgaggaggtagctttggacaaatcaagttaaagatcccgtgtggcagcagtccccagcatttttggc

SEQ ID NO: 146099 - DNA, 201 bp, Homo sapiens
aggatcaagctgccatcctggttggcagcaacacaggtgagtgggccctggtgaccctcagtccctagcatagagcagggaggcagctcaggcttcgtcckacctcccctctgagtcctgccccaggttctcagcccctccctacaaaggcccaggctaacacttcccccacctctgatacctttcagtacatggataggg

SEQ ID NO: 146100 - DNA, 201 bp, Homo sapiens
tctctgctctgtgtctcaccctcatggctgtcggtaggtcatgagtatgcagaggagaacctgggctttgcaggtgtggtggagcccgagaacctggcccrggagaggaagatgcagtgggtgcagcggcagcggctggagcgcaagggcacggtgagggactcggggtccaggaggagctgtgtgggcaggcactcagcc

SEQ ID NO: 146101 - DNA, 201 bp, Homo sapiens
tggagtgcaatggtgtgatcttcttggctcaccgcaacctccgcctcccaggttcaagtgattctcctgcctcagcctcccaagtagctgggattacaggygcccaccaccacaccctgttaatttttgtatttttagcagagatggggttttaccatgttggccaggctggtctccaattcctgacctcaagtgatctac

SEQ ID NO: 146102 - DNA, 201 bp, Homo sapiens
cttgtaagtttccattcagctgctataaaggaatccttctttccaaaatactcggcccccatcccaatccctgtcacccctctcactgtgttaagtctctrggactcacctgggtccctggcagcaggcaaggatcaggtaggtgacaacgaagacagcactagggacaaagagatggggaagcagttcaggcccaaatct

SEQ ID NO: 146103 - DNA, 201 bp, Homo sapiens
gcagagtccctgcccgcacagatctgtcctttcttagggacagaacctgggaacacgtagtcagcatttagtaaggggaggcggggagcttatcacccctyccagatgtgcatgaccctgctctagcagctgggaggacttcctggctgaatttgggaaggaaacaacagttgctaaacatcttccacttgccaggctctc

SEQ ID NO: 146104 - DNA, 201 bp, Homo sapiens
agtctaagggaaggagagagacaagaatgaaacacttaaaaaggaaggaaggcagggtgctgggggagtggccatggtggcctctgccagagctggggaaygccaccaagttggaaagaggcagccacagaggagatcagaacaggcggcccagataaggtggaggagacagccaggacatccttctgaaatgggtcccca

SEQ ID NO: 146105 - DNA, 201 bp, Homo sapiens
catccataatgttttaatcccaaagacagatcaggctcacgggcccccaaatgtgctgagggcccccaaagggcagaagcctaacagcccttttatgagaycccacaaggccaggtgacacctctcaggtgagtctagggttggccagcccttggtttcatgcaggcattattttgctttcttttttgagacagagtcttg

SEQ ID NO: 146106 - DNA, 201 bp, Homo sapiens
actgggccaccggtgcctggcgtccaacatcagagcacacaatacacttgaaaaacagttcagctggacccaggcagggttctaggtgctggggccccagytttgaactaaacagatggcagggggaacagtaaatgaacaagtaaaatacagtttcagagggtgctaattcctatgggaaaaggccagagaaggggatag

SEQ ID NO: 146107 - DNA, 201 bp, Homo sapiens
ggggaagttacttttcaaaccacagatcttcatgacactgggaggcagtcagattggagggatcagtgtggattctgcacagatctggggtaggaggcaascgtggggaacgctcagcttattgttggatctcaccacagtgaaagacaagcacttccctcattgaaagttgattttctttttgccccagttgtaactcat

SEQ ID NO: 146108 - DNA, 201 bp, Homo sapiens; identical to SEQ ID NO: 27009

SEQ ID NO: 146109 - DNA, 201 bp, Homo sapiens
gtctctcctatcccccatccctctccctagaaataccatcattctggcagccccaggccagaagagacctttatgatgcacttacccactcctgcccaccrtcgctgccccactggtccctagcctctggccctccttgctgttgctgatgcacatcatagctcgtccattcattcacaccatctgtctatttccacagct

SEQ ID NO: 146110 - DNA, 201 bp, Homo sapiens
ttacttttcaaaccacagatcttcatgacactgggaggcagtcagattggagggatcagtgtggattctgcacagatctggggtaggaggcaaccgtgggkaacgctcagcttattgttggatctcaccacagtgaaagacaagcacttccctcattgaaagttgattttctttttgccccagttgtaactcatttgacat

SEQ ID NO: 146111 - DNA, 201 bp, Homo sapiens
atgaagccctgtggagggtgctgggcacagttctctcattccatcctttaaggcaggtataatcaggcccatttcacagaagaggaaacagaggcccagaraggaaaagtgacttgcccacggtcacagagctcataagcaggggagctgggaattgcagcctggggtttgtctgattccaaatccggggctctttacctc

SEQ ID NO: 146112 - DNA, 201 bp, Homo sapiens; identical to SEQ ID NO: 27010

SEQ ID NO: 146113 - DNA, 201 bp, Homo sapiens
agaaacccagtcccctctccgacttctcttgggaactgcggtcttcgatgctgaccctcgttttctgccggctgtatcttgtgtgcatgctgctctctccyactctgctgccagagaacttccctaaacctggctcagatcatcgccgcctcccctattaaaatatctcccatggctccctattgcctaaggttcccccag

SEQ ID NO: 146114 - DNA, 201 bp, Homo sapiens
ccttcctccttgtccccaatttccctccccatcagacagacagaaaggggcagaggagcccagagcagggagaaaggaggcagtagagcagtacctctccsagtccctgtacatccagacctggaaaaccgcaattccctgggcgcccttgagcattggcctcggggcctggacgcctcagtcttcatccacatttggtgc

SEQ ID NO: 146115 - DNA, 201 bp, Homo sapiens
ttcaccacaatggattattttttaattttagagatgagatctccctgtgttgctcaggctggtctcgaattcctggcctcaagcaaatccgcctcagcctrgagtaactgggattatagacactagccatcgccctggcaggaagtgcggttttaaatagagaggtcagggacagcttcatggaaagacgtcatggaatgg

SEQ ID NO: 146116 - DNA, 201 bp, Homo sapiens
  misc_feature (1)...(201): n = A,T,C or G
gtagctgtgcaccaccacgcctggctaatttttgtattttcagtagagacggggtttcaccatgttgccaggctggtctcgaatgcctcacctcaagtgayccacccacctcagcctcccaaagtgnnnnnnnnnnnnnnnnnnnnnnnnnnnnnnnnnnnnnnnnnnnnnnnnnnnnnnnnnnnnnnnnnnnnnnnnnnn

SEQ ID NO: 146117 - DNA, 201 bp, Homo sapiens
ccaggctcaagtgattctcctgcctcagccttctgagtagttgggactacaggcacgagccaccacacccagctaatttttgtatttttagtagagatggrgttttaccatgttggccaggctagactcaagcgatccgcctgccttggcctcccaaagtgctgggatgacaggcatgagccactgcacctggttagcttc

SEQ ID NO: 146118 - DNA, 201 bp, Homo sapiens
ctgagtagttgggactacaggcacgagccaccacacccagctaatttttgtatttttagtagagatggagttttaccatgttggccaggctagactcaagygatccgcctgccttggcctcccaaagtgctgggatgacaggcatgagccactgcacctggttagcttcctctttttttttttttttttttttttttgaga

SEQ ID NO: 146119 - DNA, 201 bp, Homo sapiens
tccccagcagccatatgctgctagtagactgaattcagacctggagtgtagctggtttgaactgagatgtgctgaaagtgtaaagtccacactggattttttgttgttgttgttttgagacgaagtctcgctctatcgcccaggctggagtgtggcggcgcgatctcggctcactacaacctccatctcccaggttcaagg

SEQ ID NO: 146120 - DNA, 201 bp, Homo sapiens
ccccagcagccatatgctgctagtagactgaattcagacctggagtgtagctggtttgaactgagatgtgctgaaagtgtaaagtccacactggattttttgttgttgttgttttgagacgaagtctcgctctatcgcccaggctggagtgtggcggcgcgatctcggctcactacaacctccatctcccaggttcaaggg

SEQ ID NO: 146121 - DNA, 201 bp, Homo sapiens
ccagggctgtacacagggacccttcaggtcaacagctctttattaaacacctgctgcctgctctaggccagatcctagagacgcagggtgagcaagacccrtctctgtccctgagctcttggttggttgggaggtggcccttaaccagatcatcagcacacatggtaaggagtgtgtgacggagggaagggcagtgccctg

SEQ ID NO: 146122 - DNA, 201 bp, Homo sapiens
caccatgtgcataaaccaaagccctggatgtgggtttaaacctaaaagaaaggccttaaattggatagtgatgcaagatgaggttgggaaggctggtggaytgatggaagagggtctggaaactgcctggagttgaggtttgattttttttttttttttttttggacatcaggaaatcacaaaatttcttgagcagagaag

SEQ ID NO: 146123 - DNA, 201 bp, Homo sapiens
tagtagctgtttgacctaaggtggtttactgaacttctcagtttctccatctgtaaaatgagaattctagcaactcgtagggtatttgtgagatgttgcakgcaaagcccccagcaccatgcctgtcctagcttaagcacccaccaggtgtcgataagtaattgttcttccctggactgcctgcacatctagggcacccca

SEQ ID NO: 146124 - DNA, 201 bp, Homo sapiens
cctggccctcctggatttttggatcaggcacatctgggaaatacttggagtagagtggaaacacagtggaaggtgtgtgcaggcagacagccgcacctggyctggcactcccctgcttgtgacctgggtgcacaccgccctgcgccccgctttgctggcgggtcagatggtatggaagtcaccgccttgcaccgttatcat

SEQ ID NO: 146125 - DNA, 201 bp, Homo sapiens
tcccaaagtgctgggattacagacgtgagacaccgtgcctggctggtggccggacttcttatagaattgcggtcccagagagaagtcagaagtcatacagsccagcccatatgcaatgggaggggagtttgattccatcttttttaagaagagtgtcaaggaatttgcaaacttgttttaaaatcatcagagtaagcctgg

SEQ ID NO: 146126 - DNA, 201 bp, Homo sapiens
tggcttaattactaatcccaccctttgctgttgcatcccagccctattcctggtgcatttatgcccagagaggtggcattatttcctggggtggcattcakctcctcttgagttggtgccacagcatttgtgggctttgaagcaaaggtacaggaaatgtcaagggtgccaccccggcaaccttgagcaagtcacccctcc

SEQ ID NO: 146127 - DNA, 201 bp, Homo sapiens
ccaacggcagctgagtgaaagcaagctgactggcctgtgtgaccagagcagggcaggctgtccatgtgggaggcgaggcgaggaacgcggggctggggcastcacagctgggcgcctgggctgctggaggcctggagtggtcgttcactcttctggctcagtgtggcagtggcaggcgggctctggattcatcccactggc

SEQ ID NO: 146128 - DNA, 201 bp, Homo sapiens
cccaccctcgcaggcctcttattttagctgcacgtgctctccctgcctccgaaatgcttgcggcctttcctttccatttattgacgcccttgtgttctctstgagcagcccttccctgtgtccctagctggagttcctcactccctcctcagtgtcctgaagcttcttgttagagctgctgcagccactgcgtgtgtctga

SEQ ID NO: 146129 - DNA, 201 bp, Homo sapiens
caaggccttcagtgataaatccaggcccaccatccgtccccacaccacctttcacacaccccctgcccccaccctcgcaggcctcttattttagctgcacrtgctctccctgcctccgaaatgcttgcggcctttcctttccatttattgacgcccttgtgttctctctgagcagcccttccctgtgtccctagctggagt

SEQ ID NO: 146130 - DNA, 201 bp, Homo sapiens
aacgcagccaggtccaacagcccgctggctcccatgctgggtaccggccaggacaccagggctgagcggggcatgcgaagggagatgaaaggtgactgcastgaggatttgccctgtgtactcgcctctgcaagatccacatctcagctgcacaactggctggcttgtgtgtgagcctcagttttatcatcagtaaaatgg

SEQ ID NO: 146131 - DNA, 201 bp, Homo sapiens
caggaaaggggaaacggtaagaattagaggcagctcaggtgagacagagcaggcacagaaccatggggaaaatattggaggagtgggatgtgttctgactragacccgaggaggtgagcagaggtggaggtatgaggggttgcagcaaacatgttcctgtctgaggagcaccacggggcactggggggtcctatggggatt

SEQ ID NO: 146132 - DNA, 201 bp, Homo sapiens
catagtgttgggattataggcatgagccactgcgcctggctatgcaggaatttttcaaaggcccctcacctctccgtctcctcccagtaaggagtagtgastgtgcccagccagcagccagcaatcaagtagcccatggtggccaggaggctccggggagtcccaagtccacccaggagtgctttaggccactgatgtgag

SEQ ID NO: 146133 - DNA, 201 bp, Homo sapiens
atagtgttgggattataggcatgagccactgcgcctggctatgcaggaatttttcaaaggcccctcacctctccgtctcctcccagtaaggagtagtgagwgtgcccagccagcagccagcaatcaagtagcccatggtggccaggaggctccggggagtcccaagtccacccaggagtgctttaggccactgatgtgagt

SEQ ID NO: 146134 - DNA, 201 bp, Homo sapiens
gagatcaccgattacagaacccgggtcagcggggtcacccctcagcacatggtgggggccacaccatttgccgtggccaggctagaggtgagtgaaggccmggccagcaggggctttggaaataacccctctcccacttccctggcccctcttccctggtgcccatctgtgacctgtgaccccacttgtaagatttcccac

SEQ ID NO: 146135 - DNA, 201 bp, Homo sapiens
ccagctggggttggctgaggacacctggaggcttggtttgcccaagcgtgagaccgccccccatacccctctctccagcatctctgagggtccccaaggarcatggctgggagccgtgaggtggtggccatggactgcgagatggtgggggctggggccccaccgggagagtggcctggctcgttgcagcctcgtgaacgt

SEQ ID NO: 146136 - DNA, 201 bp, Homo sapiens
ggaggttgctgtgagctgggatcgtgccactgcactccagcctgggcgacaaagtgagacttagtctccaaaaaaaaaaaaaagaaaagaaaaaaaaaaaagagtcagaggccctagggagcagttacaagggcctgcatcatctttggcagacagagaattggagtgaagaaaacgttaggaaaggaagaaaacgtttgg

SEQ ID NO: 146137 - DNA, 201 bp, Homo sapiens
tgcttgaacccgggaggcggaggttgctgtgagctgggatcgtgccactgcactccagcctgggcgacaaagtgagacttagtctccaaaaaaaaaaaaaagaaaagaaaaaaaaaaaagagtcagaggccctagggagcagttacaagggcctgcatcatctttggcagacagagaattggagtgaagaaaacgttagga

SEQ ID NO: 146138 - DNA, 201 bp, Homo sapiens
aaagcacacacctcacctcagatatgtctcacagcaggggccggggaactgggatatttgtacaccagttcccatcagccaccagctgctgctgctcctgsgcactgattccgcagcacttctggctggtgggcaaagcaggcaggaaaaggcatacggatatggggggttgggagttcaccctgtgggaagggcagaggg

SEQ ID NO: 146139 - DNA, 201 bp, Homo sapiens
atgccactgcactgcagcctgggtaagagagaccctgtctctattaaaaaataataataattaaaatattaaaaagagccataaaatgtctcaataacttytatattgattacctgttgaaatgatagtattttggatatgttaggttaaataaaacgttaaaattaatttcacctatttactttttacgttttgaaacat

SEQ ID NO: 146140 - DNA, 201 bp, Homo sapiens
ggtgaagtattgcttgagcccaggcagtttgaggctgtactgagctatgatcatgccactgcactgcagcctgggtaagagagaccctgtctctattaaawaataataataattaaaatattaaaaagagccataaaatgtctcaataacttctatattgattacctgttgaaatgatagtattttggatatgttaggtta

SEQ ID NO: 146141 - DNA, 201 bp, Homo sapiens
ggctggggagcacggagcccgcccctagcctgctggcaagagctgtaggaatcatgtccggagtagggaacagggctgagtctgggcctgttagcctcaargcacataaggcacataagggccaggctgggcttttcctggagcccttgccgctctgtggctctcagtctggggccttaagcctgacccagggccttctcc

SEQ ID NO: 146142 - DNA, 201 bp, Homo sapiens
aggtgaagtattgcttgagcccaggcagtttgaggctgtactgagctatgatcatgccactgcactgcagcctgggtaagagagaccctgtctctattaawaaataataataattaaaatattaaaaagagccataaaatgtctcaataacttctatattgattacctgttgaaatgatagtattttggatatgttaggtt

SEQ ID NO: 146143 - DNA, 201 bp, Homo sapiens
taaggaagccatcaacttagtgattcacagcaacacagatgtcttctcttacagttctgtagtttcgaagttcagcgtgggtctcactggtctaaaatcaragtgtcagtggggctaggttccttctggatgctctggggaagaatccatttcctcgccctttctggcttctagaggctgcctgaataccttaactcacgg

SEQ ID NO: 146144 - DNA, 201 bp, Homo sapiens
cgtgtctcagcctcctgagtagctgggattacaggcatgtgccaccatgcccagctcatttttgtatttttagtagagatggggtttcatcatgttggccrtgctggtcttgaactcctggcctcaagcaatcctcctgccttggcctcccatagtgttgggattataggcatgagccactgcgcctggctatgcaggaat

SEQ ID NO: 146145 - DNA, 201 bp, Homo sapiens
gaagaatccatttcctcgccctttctggcttctagaggctgcctgaataccttaactcacggcccctccctccatcttcaaagccagcaacagcctgtttkcctcatgtggattcactctgacctccacatgtaaggaggcttgtgattatgttgggaccacatgggtaggccaggtgatctccccatttgaaggtcgact

SEQ ID NO: 146146 - DNA, 201 bp, Homo sapiens
gtgcctgttgtcatcttttaaagcctcagttttgtcgccatttcccaggtgacctctagcacactcaagtttgagaagcgctggtgtggttcaggagcagsgccccttcattctccagcacactctccccagtcctctaagtcgagcgtgagctctgtccagagaaggcctccaaccagaccatgtggaccgcggggcagg

SEQ ID NO: 146147 - DNA, 201 bp, Homo sapiens
ggatgtactaaccattgctcctacacagttcagctcctgaaggagtccaggtgggcttttggcacagaatgaaactatcaggtgtgaggagggtcctagtscaatctcttcttttcaaagatgatacatttgaagcccagggaggactgataatttgcccaaggtcacacagccagtcaaggagggattgctcccttgcca

SEQ ID NO: 146148 - DNA, 201 bp, Homo sapiens
acacaatctacgacacgtccactgacaggctgttgtggcgtgaggccaagctggaccactgcaggcgtgtctccctgcgggtgctgagtgagcgcctcctrcacaagagcatccaggtgagaacctcctcgtccttctcctcctcccccatactgcttcataaatggcagggtctttcctttcctgtgcagcccagtctac

SEQ ID NO: 146149 - DNA, 201 bp, Homo sapiens
tgagctgctactctgaggtcgtgtgcctgttgtcatcttttaaagcctcagttttgtcgccatttcccaggtgacctctagcacactcaagtttgagaagygctggtgtggttcaggagcagcgccccttcattctccagcacactctccccagtcctctaagtcgagcgtgagctctgtccagagaaggcctccaaccag

SEQ ID NO: 146150 - DNA, 201 bp, Homo sapiens
acaaaggatgttagcaagaaaagacacatgacccatggccgcccacacacccacatctctccacgccccgtgccatttctgcccgccgctgcgtgctgggyggtttcctctgcacagagtttcccttgagctgctactctgaggtcgtgtgcctgttgtcatcttttaaagcctcagttttgtcgccatttcccaggtgac

SEQ ID NO: 146151 - DNA, 201 bp, Homo sapiens
agtgcctcatgtagacccccacttcccctctccagactctcaggctcgggaagtgatgggtttcctgggaatccacaccatgatgactcgtaccttctacrtctgtgcccagctgtggctgcctctgggatggtggatgagttccttcagggctttgtgtgaactgggcctgagccaagcccctagatggggaaaacaggc

SEQ ID NO: 146152 - DNA, 201 bp, Homo sapiens
cagctcaggtgagacagagcaggcacagaaccatggggaaaatattggaggagtgggatgtgttctgactaagacccgaggaggtgagcagaggtggaggyatgaggggttgcagcaaacatgttcctgtctgaggagcaccacggggcactggggggtcctatggggattgtagaatcaaacctatgattggatctttag

SEQ ID NO: 146153 - DNA, 201 bp, Homo sapiens
cgtcatgttggcactcagaaagtttaggattctggagcatttgtatttgggatgctgtacctgtatcaacagtacagtgtgggaaccctggagatggtcamagtacatcatcttggttctggaaagactccgtgaagctggtggtatttgaaaggggtggaggagagtctatgtagggaattaagtgggccatagggagcc

SEQ ID NO: 146154 - DNA, 201 bp, Homo sapiens
caacccagcataaggaggggcatccaccctgagaagcaccgtggtcgcgggcacagatgcagacagaagggaagtcatggtagcttgtgaacagggagagrtttcagctgtagccagcctggtagcccttgcacaggtgggagtgtcctgttggggccctgccacctggcaggtccctctgggtctcagccagatgaagga

SEQ ID NO: 146155 - DNA, 201 bp, Homo sapiens
gattggatctttagggggttactttttaagtgcatgtttccataaagtaacaggaatgttacttcatttcctcctaaatcagggtaacctttatgcatttsaaaagcataaagtccccacacagtctgaattaaagcaaaagttgcttattcaggatgggaatcaaaaactctcacacctcaaatttgcatccagtgaaca

SEQ ID NO: 146156 - DNA, 201 bp, Homo sapiens
ttgtaattttagtagagacggggtttcaccatgttggtcaggctgggctcaaactcctgacctcaggtgatccacccacttcggcctcccaaagttttggrattacaggtgtgagccaccacgttgggctgcgagggtaattcttgacgatcactgcaatgcaaactgccatcttggaaggccaataatagtccttctgtc

SEQ ID NO: 146157 - DNA, 201 bp, Homo sapiens; identical to SEQ ID NO: 27033

SEQ ID NO: 146158 - DNA, 201 bp, Homo sapiens
agctgggcatggtgacgcacgcctgtaatcccagctacttggaaggctgaggcaggagaattgcttgaacccggaggtcgaggttgcagtgagccaagatsgctccactgcactccaccctgggaacagagcaagatcccatctcaaaaaaaaaaaaaagaaagaaaagaaagagagagagagagtgcgagccgagtgtgg

SEQ ID NO: 146159 - DNA, 201 bp, Homo sapiens
ctaggattacaggtgtgagccaactatgctgggaaatcagccaaccaacctggctcaggctcagggtcctctcctggtcagccaaccaacctgatttctargtttttaatcctggtttcatcacctagaatatttttcttgttgaagctactctaaacataagataatgcatgcattgtaagtatatagcttaattagttt

SEQ ID NO: 146160 - DNA, 201 bp, Homo sapiens
aaccctggttctgtccccatggggctcacaacccagtgggaggacagacccatccccagacaacccagagtgggcagggcttggggagtcaagagcactayaggagcccacagggggcatctgccccagatttggaggagtcagggagggcttcctggaggagggaacctgggccagagggtggaggagaggcatcctggg

SEQ ID NO: 146161 - DNA, 201 bp, Homo sapiens; identical to SEQ ID NO: 27027

SEQ ID NO: 146162 - DNA, 201 bp, Homo sapiens
cagagtgggcagggcttggggagtcaagagcactataggagcccacagggggcatctgccccagatttggaggagtcagggagggcttcctggaggagggracctgggccagagggtggaggagaggcatcctgggcagaggagagagcagataggagggcttgtgctttctctctgtcctccgcagattttccacacgca

SEQ ID NO: 146163 - DNA, 201 bp, Homo sapiens; identical to SEQ ID NO: 27036

SEQ ID NO: 146164 - DNA, 201 bp, Homo sapiens; identical to SEQ ID NO: 27030

SEQ ID NO: 146165 - DNA, 201 bp, Homo sapiens
aggatgtgaagttcaagcttcggcatgacctggcgcagctgcaggccgctgccagctcagcccaggacctgagccgcgagcagctggctctgctgaagctrgtgctgggccggggcctgtacccacagctggccgtccccgacgccttcaacagcagccgaaaggactcagaccaggtggggcctgttctgccccatccta

SEQ ID NO: 146166 - DNA, 201 bp, Homo sapiens
tgatgcagtgagccgagaccatgccattgtactctagcctgggcgacagagcgagactccatctcaaaaaaaaaaaaaaaaaaaagcaaaaacaaacaggygagattcattttgataaaatagctgattcaacctaatatacctaaaacatcacaattttaacataatcaatagaaacatttttgcaagattttatgttat

SEQ ID NO: 146167 - DNA, 201 bp, Homo sapiens
ttggagatgggcaagctgaggcccagagggggcagtcacccagccgacacctcctgtaccatttctggggtcccggtgttggggaccacagatgccccgawtgctctgagcatgggtcccgagttctctctggctgctagagcagtgttcaggcttcattggtccccagatgctttgagaatctaatggaaagtgtgagcc

SEQ ID NO: 146168 - DNA, 201 bp, Homo sapiens
tgcagtgagccgagaccatgccattgtactctagcctgggcgacagagcgagactccatctcaaaaaaaaaaaaaaaaaaaagcaaaaacaaacaggtgasattcattttgataaaatagctgattcaacctaatatacctaaaacatcacaattttaacataatcaatagaaacatttttgcaagattttatgttatttt

SEQ ID NO: 146169 - DNA, 201 bp, Homo sapiens; identical to SEQ ID NO: 27026

SEQ ID NO: 146170 - DNA, 201 bp, Homo sapiens
cctgactcaagactttctatttccagcagcctgaggcccaccatggcaggaccacccatgtatgtgtgttaacaccattaaagcccccatccttgcagcayagcagggcttcagtgtgggcaggaggctggatccgctggacttggagggctgcccaggctaagaagatggttcatttttgttttatttatttatttagag

SEQ ID NO: 146171 - DNA, 201 bp, Homo sapiens; identical to SEQ ID NO: 27041

SEQ ID NO: 146172 - DNA, 201 bp, Homo sapiens
cagccaaccaacctggctcaggctcagggtcctctcctggtcagccaaccaacctgatttctaggtttttaatcctggtttcatcacctagaatatttttyttgttgaagctactctaaacataagataatgcatgcattgtaagtatatagcttaattagttttcaccagttacatacatctgtgtagctagcacccagg

SEQ ID NO: 146173 - DNA, 201 bp, Homo sapiens
agacggttcctgccacttttcctctctgtggcctcccctctgtccttcctcccctttccctacctctcccagcccctgccccatctttctccatgtcttcrccttctgtcccctcttcctcttccacttccaccttgacctaaacaaaggctgcaggagaagattcatcctgtgataagcacaggagtcagtgcctgcctg

SEQ ID NO: 146174 - DNA, 201 bp, Homo sapiens
cacaggacttgtgtaactccacaaacacagggctcgggggctgtacttgtgcaaagtcgtagccacctagtggcagagccaggctgcgaacccaggtagtytggccccggagcccatgctctaaaccagaggtcggcaaactttctataaagggtcggagtagatgatgtcagtcctatcgaccatgggctctctgtctgt

SEQ ID NO: 146175 - DNA, 201 bp, Homo sapiens
tatcgaccatgggctctctgtctgtcacagctactcagccccactgttgcagcatgaaagcagccataaactgagtgggtgaggctgtgttccaaaacagtttttttttttttttgaaacagggtcttgctctgttgtccaggctggagtgcagtggcacgatcagggctcactgcagccttgacttcttgggctcaagtg

SEQ ID NO: 146176 - DNA, 201 bp, Homo sapiens; identical to SEQ ID NO: 27024

SEQ ID NO: 146177 - DNA, 201 bp, Homo sapiens
gagctgtgatcacgccactgcactccattgtaggccacagagtgggatcctgtctcaaaaaaaaaaaaaaaagttcaagatgttcaggtcgggggagcagktgtggtggctcatgcctgtaatcccagcacattgggaggccaaggcaggcggatcacctgaggtcaagagttcaagaccagcctggccgacatggtgaga

SEQ ID NO: 146178 - DNA, 201 bp, Homo sapiens
aagtgaggggggcgggacgggtgtaccgggttgtggcggcgatggctgtcggagttgggccgcttgggggtagtttggggtgcgagtccaggggcgagggmagtctcgagatgaggagaaatgtaggaggcagccgaagggccggcaaacgcggacagagatggcacctgagcgtccctgggagaacctgggcgacaggcc

SEQ ID NO: 146179 - DNA, 201 bp, Homo sapiens
cagagcagcggaagggccgggcgggccgcacgggccccggagtctgcttccgcctctatgccgaatcggactatgatgccttcgccccctaccccgtcccrgaaattcggagggtggccctggactcgttggtgctgcaggtgaggcatgggcagaaaggggactatatcctaactgctggcacagggaggaacctgggag

SEQ ID NO: 146180 - DNA, 201 bp, Homo sapiens
tccgcctctatgccgaatcggactatgatgccttcgccccctaccccgtcccagaaattcggagggtggccctggactcgttggtgctgcaggtgaggcaygggcagaaaggggactatatcctaactgctggcacagggaggaacctgggaggccttttttattttattttattttattttattttgagatagcgtcttg

SEQ ID NO: 146181 - DNA, 201 bp, Homo sapiens
tagcgtcttgctctgtcactcaggctagagtgcagtgctgtgatcatggctcactgcagcctccatattacaggctcaaatgatcctcctacctccacctsccaagtagctgggaccacaggcacacaccaccacgcttggctaacttttaaatttttatttatttatttatttttgagacggagtctccctctgtcgccc

SEQ ID NO: 146182 - DNA, 201 bp, Homo sapiens
tgctgtgatcatggctcactgcagcctccatattacaggctcaaatgatcctcctacctccacctgccaagtagctgggaccacaggcacacaccaccacrcttggctaacttttaaatttttatttatttatttatttttgagacggagtctccctctgtcgcccatgctggagtgcagtggtgcgatctcggctcactg

SEQ ID NO: 146183 - DNA, 201 bp, Homo sapiens
ttgagaatagaataaaagggttcctggtgtaatccattctgtttggttggagatgggcaagctgaggcccagagggggcagtcacccagccgacacctcckgtaccatttctggggtcccggtgttggggaccacagatgccccgattgctctgagcatgggtcccgagttctctctggctgctagagcagtgttcaggct

SEQ ID NO: 146184 - DNA, 201 bp, Homo sapiens
cagaataaaggagtaagtgagggtgttggcgagtgacaagagccaggcgcgtggccagctgcacgtggctgccacacacagactccctttcctcattgctyccatccaggaaaggtgaaggagatgagctacgatccgcaggccaagctgcaacggctgcaggagttctggattagtcaggccagcgcagagcagcggaag

SEQ ID NO: 146185 - DNA, 201 bp, Homo sapiens
ttcggcgccagttcaaggtgaggctcgggaggaggggtaaggccggccccactcaggcagacgtgtgtaagcacactccagaacactgcttccccttcccrgacagtggtcagaccagaatcccaccctgcacccacctcccccaccacccggtgaccaggtgttggggcagctgggcagagcaaagggagcagaaatcca

SEQ ID NO: 146186 - DNA, 201 bp, Homo sapiens
cataggagggggcactggggctgagacctggaagcaggagagcaggtgtccctgagggatgcccattttggggctctgggtgctcggtcagcccctccctscccgcactggccaggccctgacaccctggcgtctgctcctccacccaggtgaaatctgaacggagcagaaactctcgcaagtggtgccgccgccggggca

SEQ ID NO: 146187 - DNA, 201 bp, Homo sapiens
ccagtatatgtcccttgagtcctcaccctaaccctggccctgtagtgtagtgctgggggcccatcagtgccaaaactaccctggccctgccctcccggggytcacagcccagtgcagggagacagaccactgatgtgacagtgacaacccagagagggctggaatggggagtccagggggctgggacaacccagcggggca

SEQ ID NO: 146188 - DNA, 201 bp, Homo sapiens
tggccagctcacacctggaatcccagcaccttgggaggctgaggtgggaggattgtttgagcccaggagttcaaaggcagcctgggcaacatagggagacwctatctatctctacaaaaaattttaaaaagttagctgggcgtggtgttgtgtgcctgtaatcccagctactcgggaggctgaggcaggaggattgcttga

SEQ ID NO: 146189 - DNA, 201 bp, Homo sapiens
ctcacacctggaatcccagcaccttgggaggctgaggtgggaggattgtttgagcccaggagttcaaaggcagcctgggcaacatagggagactctatctrtctctacaaaaaattttaaaaagttagctgggcgtggtgttgtgtgcctgtaatcccagctactcgggaggctgaggcaggaggattgcttgagcctggg

SEQ ID NO: 146190 - DNA, 201 bp, Homo sapiens
ggagactctatctatctctacaaaaaattttaaaaagttagctgggcgtggtgttgtgtgcctgtaatcccagctactcgggaggctgaggcaggaggatygcttgagcctgggagattgaggctgcagtgagctgtgattgttgacactgcactccagcctgggtgacagagtgagacactgtctcaaaaaataataagc

SEQ ID NO: 146191 - DNA, 201 bp, Homo sapiens
acatttgaaaatcaatctgattcaccatattagaaacagaaaaaaaaaaaaaggttgggcatggtggttcatgcctgtaattccagcactttgggaggccsataagggtggatcagttgagtccaggagttccagactgggatggggaacatagcaagaccctgtctctattaaaaaacacaaaaattagccaggtgtggt

SEQ ID NO: 146192 - DNA, 201 bp, Homo sapiens
gctggagtgcagtggtgcaatctcagcttactgcagcctccacctcctgggctcaagtgatcctcccaaatcagtctcccaagtacctgggattacaggcrtgtgccaccatgcccagctaatttttgggtgtgaataggtttttttgtttgttttttgtagagagtttcaccatgatgcccaggttggtctggaaccatg

SEQ ID NO: 146193 - DNA, 201 bp, Homo sapiens; identical to SEQ ID NO: 27044

SEQ ID NO: 146194 - DNA, 201 bp, Homo sapiens
tgaggctgggcccaggaggctcctgagggcatggggaagcctggctttgatcggaggtgatggtaaatgcctcactcacattatctccctgagggctgggkgcaggtgcccccacttgccctgtggggaaaacgaggctcagagaactgctgctcagggtcacagtgggaactgagaggcacggatgaccctgtgctgggc

SEQ ID NO: 146195 - DNA, 201 bp, Homo sapiens
tgaagcaggagagtcgtttgaacccaggaggtggaggttgtggtgagccgagattgagccattgcactccagcctgggcaacaagagcgaaactccactcaaaaaaaaaaaaaaaaaaagatttgggtttctcctgcgcccacacagttctgcagcttgtttcatagatactgttctccatctgagtgcagacagacctgc

SEQ ID NO: 146196 - DNA, 201 bp, Homo sapiens
gcgcatcgcccatgagaacacctgcccccaggccccacaggatgggcccccaggtaagcacaggactgtggggacccggccacctctgcccagccgtctgyccatcccatgatggtctcctgtgcgtgtgagcacttgctagagcttcgaggactgacgacctccacccgctggccctggctggtgccacacacaggcctt

SEQ ID NO: 146197 - DNA, 201 bp, Homo sapiens
ccagcacccgaaggggtgcctggtacagcgggtagatggcgggtaggtggatgcctcacatagacagggctggtgggtgggcaggagcccagccgggcagrgcctgtctccaatagcgccctgcccctcccacctactccctgtcttctgccccctctctttcagtccctcctgctttttagccggtctttggacaccaat

SEQ ID NO: 146198 - DNA, 201 bp, Homo sapiens
cctcccaagtacctgggattacaggcgagtgtcaccacacccagctaattttgtatttttagtagagacgggggtttctctatgttggtcaggctggtctygaactcccgacctcaggtgatctgcccgcctcagcctcctaaaaatgttgagattacaggcatgagccaccacgctcagcctcaacagtcttttaaaatg

SEQ ID NO: 146199 - DNA, 201 bp, Homo sapiens; identical to SEQ ID NO: 27029

SEQ ID NO: 146200 - DNA, 201 bp, Homo sapiens
acatacctgtgccagcagcacccagataaaaaaataaaacaccagcagccctccacccgctgcagcccagctcctccgtctcccaggagtgtccaatattytttttttttgagatggagttttgctcttgtcgcccaggctggagtgcaacggtgcaatctcggctccctgcaacctctgcttctgggattcaagcaattc

SEQ ID NO: 146201 - DNA, 201 bp, Homo sapiens; identical to SEQ ID NO: 27073

SEQ ID NO: 146202 - DNA, 201 bp, Homo sapiens
gaatcgcttgaacctgggaggtagaggttgcagtgatgcagtgagccgagaccatgccattgtactctagcctgggcgacagagcgagactccatctcaamaaaaaaaaaaaaaaaaagcaaaaacaaacaggtgagattcattttgataaaatagctgattcaacctaatatacctaaaacatcacaattttaacataat

SEQ ID NO: 146203 - DNA, 201 bp, Homo sapiens
atcgcttgaacctgggaggtagaggttgcagtgatgcagtgagccgagaccatgccattgtactctagcctgggcgacagagcgagactccatctcaaaamaaaaaaaaaaaaaaagcaaaaacaaacaggtgagattcattttgataaaatagctgattcaacctaatatacctaaaacatcacaattttaacataatca

SEQ ID NO: 146204 - DNA, 201 bp, Homo sapiens
tacctaacaaatctttgcctaccctcaagatcatgaagttttttcttatgttttcttctagtttaatagttttagatttttaatataaaccgttaggtctrtggtccatttccagttaggcattgtgtatgatgtgagttaacgctcatggctcatttttctgcatatggatgtctaatggttccagaaccattttttgaa

SEQ ID NO: 146205 - DNA, 201 bp, Homo sapiens
tactagggagactgaagtgggaggattgcttcagcctgggaggttgaggctgcagtgagccgtgatctcatcactgcactctagcctaggtgacggagcgrgaccctgccgctaaataaataaataaataaataacatagtagtgatacctgtgtctgcggtcattactccagaacagcacttcacatatagtttctcctt

SEQ ID NO: 146206 - DNA, 201 bp, Homo sapiens
cggtgaccaggtgttggggcagctgggcagagcaaagggagcagaaatccaggagggcttcctggaggggtggaccgagtcagtggacatgcagcatcctygggaagagctcgccctccggactggggatgctgagctggctgcatgggcatggtgttggaggcagcctacggttgtggttggccggcacatctggagcca

SEQ ID NO: 146207 - DNA, 201 bp, Homo sapiens
ctaacctcctgggaatgcagcccataggtctcagccttatttcacccagctcctgttcaagatggagtcactctggttcacatgcctctgacatttccccrctcccttttataagagaacctttaatcctaagggttgtagagggaggaagatacaacttctgtgacttcttcaggctggacaggggtgacgatatacctg

SEQ ID NO: 146208 - DNA, 201 bp, Homo sapiens
cagctgggcagagcaaagggagcagaaatccaggagggcttcctggaggggtggaccgagtcagtggacatgcagcatcctcgggaagagctcgccctccrgactggggatgctgagctggctgcatgggcatggtgttggaggcagcctacggttgtggttggccggcacatctggagccagacacctcagccacagatc

SEQ ID NO: 146209 - DNA, 201 bp, Homo sapiens
gtcacaagcagatgtggtgctcctcgtccccacgctgtgtcatcaggaatagggcgttaatcttgagggatttggggccagcagaccctctgaccctgtckttcttgtgtgcaccgtcagtgtctcaggcactcacctgacgctgcagatgccaccaccagaggctgggtgtggcctgtggtgtctggcttgcaaggctgt

SEQ ID NO: 146210 - DNA, 201 bp, Homo sapiens
tccggactggggatgctgagctggctgcatgggcatggtgttggaggcagcctacggttgtggttggccggcacatctggagccagacacctcagccacaratcccagctctgccatttctgacagcgtggccccgggtgtgttactgcttgtctctgggcctcagcttcccctcgataaaaagagaggataaaaatagca

SEQ ID NO: 146211 - DNA, 201 bp, Homo sapiens; identical to SEQ ID NO: 27040

SEQ ID NO: 146212 - DNA, 201 bp, Homo sapiens
ctggccatctccaatctacaaatggggaaactgaggcccttgcccatggccacgtgaccagaaagcacagcgcgtgggtttgaatctccatctgggtcacragacccttagtgggcaagatggagggggtgggagcaggagggcaggcgggagggcaggctggggccccgaggggtgagggctgcgcctgtcctggcaccc

SEQ ID NO: 146213 - DNA, 201 bp, Homo sapiens
atttctgacagcgtggccccgggtgtgttactgcttgtctctgggcctcagcttcccctcgataaaaagagaggataaaaatagcacttgccagccgggcrtggtggctcacgcctataatcctagcactttgggagggcgaggtgggtggatcacgaggtcaggagatcgtgaccatcctggacaacatggtaaaactcc

SEQ ID NO: 146214 - DNA, 201 bp, Homo sapiens
ccaggcctccctgggtagccttgggtgactcacccctgctgggcctcaccttccgcatggtggtgatagtcaacctaagccagtgtggctgtgcccagagmgtgagcaccggtcagggggcctgtcctatggactctgtgagctcccaggtgggtcctgcagagggaggcccccctggcacccgtgtgcatggaagggtgt

SEQ ID NO: 146215 - DNA, 201 bp, Homo sapiens
tggggccacatgcctccatccccggctggctgtgtctgcctctcagtctccatgtctctccttgtgtctttctctctgtctctctcactggcagggatgcrgagtaaagacagacctgtgtatttttattaatctgggagggcttcctggaggaggcaaaactgggttctccaaaggccaggagagaacctgagccccaca

SEQ ID NO: 146216 - DNA, 201 bp, Homo sapiens
atttttattaatctgggagggcttcctggaggaggcaaaactgggttctccaaaggccaggagagaacctgagccccacaggtgcctggcatttgggtgcrggtagacctgtgcactggaacacgcccctcacagcctcctccttttcctcccttaggggctgaggaagctgccctcgaaaccctccagaagacatctgtc

SEQ ID NO: 146217 - DNA, 201 bp, Homo sapiens; identical to SEQ ID NO: 27031

SEQ ID NO: 146218 - DNA, 201 bp, Homo sapiens
ccgagggacagaggattggcgaccagccgggccgcaggaagcggaacagacctgctacctgaggcgctctctccctgcactggactgcttgttgagagaayctggccagctcacacctggaatcccagcaccttgggaggctgaggtgggaggattgtttgagcccaggagttcaaaggcagcctgggcaacatagggaga

SEQ ID NO: 146219 - DNA, 201 bp, Homo sapiens
tgggaggtggaggttgcagtgagccaagattgcgccattgcattccagcctgggcaacagagtgagactcatctcaaataaataaataaattaataataakaataataagaagaagaagatggagaaacttcacattcacataagcaggcagaacagtatatggagccctcctgtaccatccccggtccccaaaccatcca

SEQ ID NO: 146220 - DNA, 201 bp, Homo sapiens
gacactagaaacagaaaaaatggaatttagatggagaaacgagacactgaatcacgggggagaccgagagatacggaaggatggagacagttgaaataggragaaccccacaaaagctggagataatggagaacgatgctgagaaatggaaaagcgagggagtggagcccgaacccctggatttgagtggctcatgtaaca

SEQ ID NO: 146221 - DNA, 201 bp, Homo sapiens
gaggtggaggttgcagtgagccaagattgcgccattgcattccagcctgggcaacagagtgagactcatctcaaataaataaataaattaataataataakaataagaagaagaagatggagaaacttcacattcacataagcaggcagaacagtatatggagccctcctgtaccatccccggtccccaaaccatccacgc

SEQ ID NO: 146222 - DNA, 201 bp, Homo sapiens
gttcagcctggtggagcctgtgctcaccatcgcagccgcacttagcgtccagtcgcccttcacccgcagcgcccagagcagcccagagtgcgcggcagcayggcggccgctggagagcgaccagggtgaccccttcacgctcttcaacgtcttcaacgcctgggtgcaggtgaggctggtggtgggggccctctgtctgtc

SEQ ID NO: 146223 - DNA, 201 bp, Homo sapiens
gagaaacgagacactgaatcacgggggagaccgagagatacggaaggatggagacagttgaaataggaagaaccccacaaaagctggagataatggagaaygatgctgagaaatggaaaagcgagggagtggagcccgaacccctggatttgagtggctcatgtaacactcggctactcacttagcctctctattgctcag

SEQ ID NO: 146224 - DNA, 201 bp, Homo sapiens
gtggaggttgcagtgagccaagattgcgccattgcattccagcctgggcaacagagtgagactcatctcaaataaataaataaattaataataataataakaagaagaagaagatggagaaacttcacattcacataagcaggcagaacagtatatggagccctcctgtaccatccccggtccccaaaccatccacgcatg

SEQ ID NO: 146225 - DNA, 201 bp, Homo sapiens
aattatatccaacgttccacttgacatccccagttgatgtccaatgcataactcaaacaatatgctgaaaacagatcttcggattttctctctagcctctytcccacgtcttcctgatggtagtagatggtgactccatatttccaaatgctcaggccaaaaactttagagtccttcttttttttagacatagaacttttt

SEQ ID NO: 146226 - DNA, 201 bp, Homo sapiens
agcaaagaccaagccagggaagcatcagagcgctgggggagtgggttgtaaatagcaaagtggggaacttggtgacaggagtagtcagcgcttagacagtrtctcctgtgtgtccaaggaggcagggactggccatctccaatctacaaatggggaaactgaggcccttgcccatggccacgtgaccagaaagcacagcgc

SEQ ID NO: 146227 - DNA, 201 bp, Homo sapiens
ataggaagaaccccacaaaagctggagataatggagaacgatgctgagaaatggaaaagcgagggagtggagcccgaacccctggatttgagtggctcatstaacactcggctactcacttagcctctctattgctcagtaaaatagggggtgatcatagtgcctgacagtcgtgagaaaagtgtgtgtgtgtatgtacat

SEQ ID NO: 146228 - DNA, 201 bp, Homo sapiens
ttttttgttttttgttttttttagtagagacgacgtgttgctatgttgtctgcctggtcacgcatacctgagctcaagcaatcctcccgccttggcctccsaaagagctaggattacaggtgtgagccaactatgctgggaaatcagccaaccaacctggctcaggctcagggtcctctcctggtcagccaaccaacctga

SEQ ID NO: 146229 - DNA, 201 bp, Homo sapiens
ccggtccccaaaccatccacgcatggccagtcctgccctttcctctgccctggccccagccctgaggattttccccaacatcttatgagccacagcactgstaattacagcgctgacttccgtcctcacagaggagcgtgtgctcagggtctgggctctccctgcacgtcgtgtgtgtctgagtgcctgctgtccctctgc

SEQ ID NO: 146230 - DNA, 201 bp, Homo sapiens
ttcctctctgtggcctcccctctgtccttcctcccctttccctacctctcccagcccctgccccatctttctccatgtcttcgccttctgtcccctcttcstcttccacttccaccttgacctaaacaaaggctgcaggagaagattcatcctgtgataagcacaggagtcagtgcctgcctgtgccagggcagagctaga

SEQ ID NO: 146231 - DNA, 201 bp, Homo sapiens
ctctccctgtggtgcagtgaccattcttgtgcctgtatctagttatttctctaggatagattttaggaaagactctgtcatgttccagagctaccacaaasagctccaggcttatatcaaacttgcctgattatgatggataaaatgagagcttttctgtcctagcaaccgagtgtaaattccacaaaagggccctgattg

SEQ ID NO: 146232 - DNA, 201 bp, Homo sapiens
ctccaccctgttgtcacccagggatgccacacactggggttcagtgggggagatagcactggggccacatgcctccatccccggctggctgtgtctgcctstcagtctccatgtctctccttgtgtctttctctctgtctctctcactggcagggatgcggagtaaagacagacctgtgtatttttattaatctgggaggg

SEQ ID NO: 146233 - DNA, 201 bp, Homo sapiens
aaaaattagctgggtgtggtggcatgtgcctgtagtcccagctgctcgggaggctgaggcgggaggatcgcttgagtccaggaggtcgaggctgtggtgasccatgattacggcactgcactccagcctgggaaacagagtgagaccctgcctcaaaaagaaaaaaacaaaacaaaaccaaaaaaagcaatgttcccaaaa

SEQ ID NO: 146234 - DNA, 201 bp, Homo sapiens
gtgaggggggcgggacgggtgtaccgggttgtggcggcgatggctgtcggagttgggccgcttgggggtagtttggggtgcgagtccaggggcgagggaastctcgagatgaggagaaatgtaggaggcagccgaagggccggcaaacgcggacagagatggcacctgagcgtccctgggagaacctgggcgacaggccag

SEQ ID NO: 146235 - DNA, 201 bp, Homo sapiens
gtggcacaatcacagctcactgcagcctcgacctcctgggctcaagtgatcctcctgcctcagcctcccgagtagctgggaccacaggcctgcaccaccayatctggctaattgtttaaactttttgtagagacaggtctcactatgttgcccaggctagtctcgaactcctggccttaagagattctcccacctgggcct

SEQ ID NO: 146236 - DNA, 201 bp, Homo sapiens
tcttcgctggcagccccgaggtgctgcacgcacaggagctggaggccagcaactgcgacggaagccgaggtacagtgagcccaggcggaaggaacccccayccgggatgtgaggggcagggataccgtgaactcccaggcccctctggctggggctcccacaccggcccaggctggtattgacgggggcccacaggagggg

SEQ ID NO: 146237 - DNA, 201 bp, Homo sapiens; identical to SEQ ID NO: 27043

SEQ ID NO: 146238 - DNA, 201 bp, Homo sapiens
ctgcctcagccttccgagtatgtgggattacaggcacccgccaccatgcccagctaattttgcatttttagtagagacgggttttcaccatgttggccaarttggtcttgaactactgacctcaggtgatcctcccgcctcagcctcccaaagtgctgggattacaggcgtgagccactgcacccggccgtgaccaacatt

SEQ ID NO: 146239 - DNA, 201 bp, Homo sapiens
ccagatgaaacatacctgtgccagcagcacccagataaaaaaataaaacaccagcagccctccacccgctgcagcccagctcctccgtctcccaggagtgwccaatattctttttttttgagatggagttttgctcttgtcgcccaggctggagtgcaacggtgcaatctcggctccctgcaacctctgcttctgggattc

SEQ ID NO: 146240 - DNA, 201 bp, Homo sapiens
agcacttggctcccgtaactgcaaagcccgagggagggcttcaggcacagctggatccaggtgctttggcggcatctccctgagtctgtctctctccattkcctgtctctccttccttagattccttacagcctccggcggctcacagggctagaagtccagaacatgtatgtgggaccccagaccatcccagccaccccc

SEQ ID NO: 146241 - DNA, 201 bp, Homo sapiens
caccataagacccactcacaataaaaaaataaaaggccgagccgggcatggttgctcactcccgtaataaaaaaataaaagaacaggctgagccgggcatrgttgctcactcccgtaatcccagcactttgggaggctgaggcgggtggatcgcctgaggtcaggagttcgagaccagcctggccaacatagtgaaaccct

SEQ ID NO: 146242 - DNA, 201 bp, Homo sapiens; identical to SEQ ID NO: 27034

SEQ ID NO: 146243 - DNA, 201 bp, Homo sapiens
tccgcccgcctctgcctcccaaagtgctgggattacaggcgtgagccaccgcacccggcctgcttagattttcaatttgggcagggccaggggctggtacycaggctcagggtcctctcctgatcctttctttctcccaccccaggtcggctaccagatccgctttgagagcacacgttcggcggccaccaagattgtatt

SEQ ID NO: 146244 - DNA, 201 bp, Homo sapiens
atggaattctcacagcatctaggaggagaactataagggatggcattgcctgcccaaggtcagttggcactaagtggcagaggtgagattcaaacccaagstgttggactccagagtctgatgggtaggcatggtatttgcttagattttctttttgctttttcttttttttgagatggagtttcactcttgttgcccagg

SEQ ID NO: 146245 - DNA, 201 bp, Homo sapiens
tattttctattctgtttgatttcatcttttaaaaaaaaaaatactagtgctgccgggcacaatgagtgactcatgcctgttatcccagcactttgggaggstgaggcaggaggattgcttgaggccaggaagtcgagaccagcctaggcaacacggtgaggccctgactctagaaaaaatttaaaaattagcccagtgtga

SEQ ID NO: 146246 - DNA, 201 bp, Homo sapiens
gggagagaggaacctgcaggctcctagagcctcagggttttgttgacactgcgattgccaccaacaccacaaaagccagctcagctcagtcacttctgtgygtgtccacacctccctcgagcccgtctggtgggccaggcactgttagtgttcagtgttctggggccgggggtgcagctgtggtcaatgtcaaccaaactc

SEQ ID NO: 146247 - DNA, 201 bp, Homo sapiens
tgactgaaacaaccctggttctgtccccatggggctcacaacccagtgggaggacagacccatccccagacaacccagagtgggcagggcttggggagtcmagagcactataggagcccacagggggcatctgccccagatttggaggagtcagggagggcttcctggaggagggaacctgggccagagggtggaggagag

SEQ ID NO: 146248 - DNA, 201 bp, Homo sapiens
accagggggccctggacagctcagaggccctcacacccattgggtccctgctagcccagctgcctgtggacgttgtgattggtgagtacccacccccctcstgatcactcagggccccaggagcgggtatgggcacagctcactctctgagtggcctgggggcaagtctgtttcttccctgggtccagttcatttattcac

SEQ ID NO: 146249 - DNA, 201 bp, Homo sapiens
ttccatcctggccacaaccagagaggatgctgggaatgctcttcctggctccagtctcatggaaggattctgattggtccagctcaggtcacgtgcctctsctccatggtctggggcaagatgtgctaggcagacagatacagagacagcagccctccttgcctgcctctgcacagtggatcttgacattgggaattttat

SEQ ID NO: 146250 - DNA, 201 bp, Homo sapiens
tcacatagacagggctggtgggtgggcaggagcccagccgggcagggcctgtctccaatagcgccctgcccctcccacctactccctgtcttctgcccccyctctttcagtccctcctgctttttagccggtctttggacaccaatggtgactgctcccgcctggtggccgatggctggctggagctgcagctagcagaca

SEQ ID NO: 146251 - DNA, 201 bp, Homo sapiens
gtaggtcctacagatgcgaaaaggagaagagaatacgataaacaacgtgccacacagaaattcactcatttgaaatggaaaaaattattgaaagacactarctacccaaagctcattcaggaagaaatagataaccggaacaactctattaaggaaatgtaattcatagttaacaaagagaacaggctcagatgggctccc

SEQ ID NO: 146252 - DNA, 201 bp, Homo sapiens
agtgcagtggcacaatgtcggctcactgcaacctctgcctcgtgggttcaagcaattctcctgcctcagcctccagagtagctgggattacaggcgcctgycaccatgctgggctaatttttgtacttttagtagagacggggtttcaccatgttggccaggcttgtctcgaactcccgacctcaggtgatccgcccacct

SEQ ID NO: 146253 - DNA, 201 bp, Homo sapiens
ccctggagctgaccccagtcctgtccatccccctccaggtttacatcgacatcagcaatatccctaccactgaagatgagtttctcctctgttactacagmaacagtctgcgttctgtggtggggataagcagacccttccaggtaagcagtgctggtgagggaaggggaagggtgagggcttgagctcatcactggctcc

SEQ ID NO: 146254 - DNA, 201 bp, Homo sapiens
tgccagttcattggcacttgacaactgtgttttcacatctccactgacccctgcttgttgggtctgatgtgttcctcttactcctgctcagcctttcatgytgtttcccatttgtttaaagggctaaacctcccttccacctggaccccggggcccctgcctgccttcgcctttctgagggagctggagtctccaggggtt

SEQ ID NO: 146255 - DNA, 201 bp, Homo sapiens
agcctgcttcagggacagtcccatgtctctggtcccgggtcagcaacggcaaagggggctggagatcagcaggcaggggagggagacctcatggccatcaraactcaggccttgaaagtccgtgaagatggtatcaaatatctgtggcaggggaagtagcctggaggccaggggccaagcctctgagctggcatggtcagt

SEQ ID NO: 146256 - DNA, 201 bp, Homo sapiens
tgacctaggagggactgcacttcagcttcgggaaaccccagaccttctggtccccaaacggggcagaaagcttggcccagccagttactggtattaaggaygcctgccccagcctgtgaatgggtcaggtcttgtgtgagaaggtgaagtagtaggtagagagtttcatcaggatcagtgtagagatcatgagtctggtag

SEQ ID NO: 146257 - DNA, 201 bp, Homo sapiens
cagatcaacagctgcagggagactgccagtctctgcagccatccattggaaacaagagtcctggtgggagctgtaaggacagggtagggccttgggtgggragggggtgcttgaagccaggagttcaagacctgcctgggcaacatagttagaccccgtctctacgaaaatttaaaaattagctgggtgtagtggcatgtg

SEQ ID NO: 146258 - DNA, 201 bp, Homo sapiens
ctccacttggagggaattgtccagtgtggcccctagaattgagtcaccccctagataccaactgtctgaccccgaggagctctgtaagtccctgctcctcytcttccctttggggctggtgctgccactcagcaataatcctcttttctctgtgctttcttaggtccctgtcctctgtctttgaggctggttaggaagcaa

SEQ ID NO: 146259 - DNA, 201 bp, Homo sapiens; identical to SEQ ID NO: 27089

SEQ ID NO: 146260 - DNA, 201 bp, Homo sapiens
cagaccgttccccgccctctgccccacgctaacccccactaacccccacgagtgagcctgggtctgcagaccgctccccgccctctgccccacgctgaccsccacgagtgagcctgggtctgcagactgttccccgccctctgccccacgctgaccgccacgagtgagcctgggtctgcagactgttccccgccctctgcc

SEQ ID NO: 146261 - DNA, 201 bp, Homo sapiens
tgaacctgggaggcggagcttgcagtgagccgagattgcgccagtgcactccagcctgggcaacagagcgagactccgtctcaaaaaaaaaaaaaaacttyggaagcaaaaagctaatgtctgggatggtttcggcaaaggcctctccctggtgaagaaaggtgttccaggcagcaaatactgcaaaagcaaaggtccaga

SEQ ID NO: 146262 - DNA, 201 bp, Homo sapiens
actgatggcctgactccccctcacaggtggggctgcgggacgttaatgactacgtgtcctatgcctgggtcggggacagcaaggtctcctgcagcgacaayctgaaccaggtacgtcaccagcaccaggtacatcaccagcaggcaggcctgcctcagcactcctgtcttgtggaaggaacagagtgctgaataacttgtc

SEQ ID NO: 146263 - DNA, 201 bp, Homo sapiens
acgagtggggcagaggctgcggcggcggcgaagagacaacttccgccggaagacggcccctggcgcggggcacgctgggagctgcggacggcgggcgcggkctgggccgggtctagtggcggccgcacacctcgcgtcgtctggggcagtgttgcgcgtgcgctgatgacaggcccgacacgcccctcttacgtccgcgaa

SEQ ID NO: 146264 - DNA, 201 bp, Homo sapiens
tcctctgtctttgaggctggttaggaagcaagagtcctgatctttcatgctgcacaatatgagcatgcaaaaagctttttccagcagaacatgttccctcrtctccagttgccggaaaggaatttggggatcaagaacttagctcgtcctacccccatgttgagttctgccctggaaaacccaaagcaagtagtgatcata

SEQ ID NO: 146265 - DNA, 201 bp, Homo sapiens
ggctgaagcggcagccctgtgctggccccgacactcccataccgccggcgtcacacttctccttgtctctgaggggctacagcagccacatgacgtacggyatcagcgaccacaagcctgtctccggcacgttcgacttggaggtgaacttctgggctgcctgatacttgccagaggaatagctatgctggccacatcccc

SEQ ID NO: 146266 - DNA, 201 bp, Homo sapiens
tctgacttggaaagttggagaagaggcattcctactggagaaaaatgtcagtgttttcctataagctctgtgttagctattcattatatttgtgcttaaakatgttccttcattcatcaactaggggaagtccagatgcgggttatcttgaaagaaacaaactgacattctaggcagacagttgtctatgtggtctgaggg

SEQ ID NO: 146267 - DNA, 201 bp, Homo sapiens
tgcccctgcagtgagaaaaaacgcaagcctgcatggaccgatcgcatcctgtggaggctgaagcggcagccctgtgctggccccgacactcccataccgcyggcgtcacacttctccttgtctctgaggggctacagcagccacatgacgtacggcatcagcgaccacaagcctgtctccggcacgttcgacttggaggtg

SEQ ID NO: 146268 - DNA, 201 bp, Homo sapiens
ttatgccccctgcccctgcagtgagaaaaaacgcaagcctgcatggaccgatcgcatcctgtggaggctgaagcggcagccctgtgctggccccgacactsccataccgccggcgtcacacttctccttgtctctgaggggctacagcagccacatgacgtacggcatcagcgaccacaagcctgtctccggcacgttcga

SEQ ID NO: 146269 - DNA, 201 bp, Homo sapiens
ttgactcttgccccatttgtgacggcatgtgctgatcccttgaatggagtgtggtactgggccactgggtcgagactactgggagacggggactatgactktgtctgcagctcagcattgccaagaaacatgacccgctgctccgggagttccaggagggccgcctactcttcccgcccacctacaagtttgataggaact

SEQ ID NO: 146270 - DNA, 201 bp, Homo sapiens
tggagtggcattgcttgactcttgccccatttgtgacggcatgtgctgatcccttgaatggagtgtggtactgggccactgggtcgagactactgggagayggggactatgactttgtctgcagctcagcattgccaagaaacatgacccgctgctccgggagttccaggagggccgcctactcttcccgcccacctacaa

SEQ ID NO: 146271 - DNA, 201 bp, Homo sapiens
gcctgttaatgccaggctgtgatgaccagctcaaacagtgccacccttctctctacaaggacattaaacagggagtacaggttaggggtcaaaggccctctttttttttttttttttttgagacagtgtctctgtcactcagtctggagtgcagtggcatgatctcagctctctgcaacctcttcctccaggattcaagca

SEQ ID NO: 146272 - DNA, 201 bp, Homo sapiens
gggacgttaatgactacgtgtcctatgcctgggtcggggacagcaaggtctcctgcagcgacaacctgaaccaggtacgtcaccagcaccaggtacatcamcagcaggcaggcctgcctcagcactcctgtcttgtggaaggaacagagtgctgaataacttgtcactcagagctgggtggagcccagagccctggagctg

SEQ ID NO: 146273 - DNA, 201 bp, Homo sapiens; identical to SEQ ID NO: 27106

SEQ ID NO: 146274 - DNA, 201 bp, Homo sapiens
gtatagcttcccaagttcttttacagtccctgctgggactccctgacttactttggttggttcctagtgctacttgttttacaaactacactttgtagaaytgattagattaccttgtttatttaatgtgagtttgtgcctttttgtctcaatcttccaatacaggtatattgagaaaaaaagcagtctaataaaatccta

SEQ ID NO: 146275 - DNA, 201 bp, Homo sapiens
ccccgtgcactatcttatcctccttcctccatgacttccctctgcatcccttccgcagcatacacgtcgtgacttggaacgtggcttcggcagcgccccckctagatctcagtgacctgcttcagctgaacaaccggaacctcaatcttgacatatatgttattgggtaggtatctgcaggctccttcgcccatccctgac

SEQ ID NO: 146276 - DNA, 201 bp, Homo sapiens
tgtttttgtcagtttgtttgccttactcatttctaagtgcaataagggagtgtctcacaggattgcacctgtgacatcctgatggatgcttccctgtggcyctcctggggcaagggtggacagactcagacccccagcatggttagcgctgaccttcattgaggtccctttggaaccagatgtcttgttacagacaccttc

SEQ ID NO: 146277 - DNA, 201 bp, Homo sapiens
ctcagtcgactcctttttttttggagatagagtcttgctctgtcgcccaggctagagtgccgtggtatgatctcagctcactgcaacctccgcctgccagsttcaagcaattatcttgcctcagcctcccgagtagctgggattacaggcacctgccaccatgcctggctaatgtttgtacttttagtagagagtcaggat

SEQ ID NO: 146278 - DNA, 201 bp, Homo sapiens
gctggttaggaagcaagagtcctgatctttcatgctgcacaatatgagcatgcaaaaagctttttccagcagaacatgttccctcgtctccagttgccggraaggaatttggggatcaagaacttagctcgtcctacccccatgttgagttctgccctggaaaacccaaagcaagtagtgatcatagtacagaacccgacc

SEQ ID NO: 146279 - DNA, 201 bp, Homo sapiens
gcaattatcttgcctcagcctcccgagtagctgggattacaggcacctgccaccatgcctggctaatgtttgtacttttagtagagagtcaggatggtctygatctcctgacctcatgatccacccaccctggcctcccaaagtgcttggattacaggcgtgagcaccgcgcgcggcctctcagtcgactcttgagaggaa

SEQ ID NO: 146280 - DNA, 201 bp, Homo sapiens
ctcccttggggctaatgagttccattaggcttattacccaatgtgagaagtaggacttcttttatttgtcctaaatctatctggatcaagttgcaacgggygctccctccatccctgcgtccttgtatcttgctatctgaatgaccaaggtggtgttggcctccttcaggctgctgcccctcagccttcacgttttcatac

SEQ ID NO: 146281 - DNA, 201 bp, Homo sapiens
gggctgctgagtagtcactggggcagtgaggaattggagtggcattgcttgactcttgccccatttgtgacggcatgtgctgatcccttgaatggagtgtrgtactgggccactgggtcgagactactgggagacggggactatgactttgtctgcagctcagcattgccaagaaacatgacccgctgctccgggagttcc

SEQ ID NO: 146282 - DNA, 201 bp, Homo sapiens
tgcaaaagcaaaggtccagaggcttgagagagtcaccaaggtggagtgggtctggggaagtggtgtgagatgaaggatggggtggtcagactcctgagccmcttgaaagccctacttggggactttaactttattctggaggcagtgaagatgccttaaaggttctaaaatagccgggtgccctggcacatgcctgtggtc

SEQ ID NO: 146283 - DNA, 201 bp, Homo sapiens
gtttgtacttttagtagagagtcaggatggtctcgatctcctgacctcatgatccacccaccctggcctcccaaagtgcttggattacaggcgtgagcacygcgcgcggcctctcagtcgactcttgagaggaaatcataaaggccagtgtgcatggcgagctcgttttgcaccaagcactgtgctaaacattttatgtac

SEQ ID NO: 146284 - DNA, 201 bp, Homo sapiens
ggcgcggtggctcaggcctgtaatcccagcactttgggaggctgaggcgggcggatcacctgagagatcaggagttcaggaccagcctggccaacatggtkaaaccccgtctctactaaaaatacaaaagttagccagatgtggtggcacacacctgtaatcccagctacttgggaggttgaggcaggagaactgctggaa

SEQ ID NO: 146285 - DNA, 201 bp, Homo sapiens
ggcggcggggaggcacacagtacggtagccaggcccagcagggagaccatctcttccttaggacttgccttaggtcccatgtcctccctgaccactgatgrcctgactccccctcacaggtggggctgcgggacgttaatgactacgtgtcctatgcctgggtcggggacagcaaggtctcctgcagcgacaacctgaacc

SEQ ID NO: 146286 - DNA, 201 bp, Homo sapiens
ttttttctgaagcctcattatctggtttggagacatgaactttcggatcgaggactttgggttgcactttgttcgggaatccattaaaaatcggtgctacsgtggcctgtgggagaaggaccaggtatccagtgaggggagggtcccagggggtgatctgagcccacggtgggggccatgtgagctgtgcagagtgttgct

SEQ ID NO: 146287 - DNA, 201 bp, Homo sapiens
ccctccactggcaggcgaggaagttgaggcctgagagaggttagtttagtttggtggttaagagcacatgctctgtggtcatgctggctggccctgaatcstggctccaccacttagtaccttgtgactttgggaaaggtgcttcccctctaagctaagtctcagtttctccacctgtaaagagagcatgatacacccagg

SEQ ID NO: 146288 - DNA, 201 bp, Homo sapiens
tatactctggggtgtctttagacagtaggagagtccacaggaaggccctgggttgccagatcttcaccttcaccttggttctgccctgcacacctgaggawtgaaacacactcccattcacagcacctggtatacagctgcttagaaataccagaattccctctttccccttcctggatgactcttgttcttcagaatgga

SEQ ID NO: 146289 - DNA, 201 bp, Homo sapiens
ggaggaagtaggcttgaggacacacctgtagcaacctctggcccacctgaagttctgatgcctcccttacccagtgctgggtttgaggttccccctgcttygactccgctatgccagggctcgtggcctgcaggatcaagtttcataattcctggaaggccccagtacacgctccccacccggggatttcctccttggcct

SEQ ID NO: 146290 - DNA, 201 bp, Homo sapiens
agaaagaagcaaagctttgaaatggaatgtttctgagtcacaatttgatccataaaaacatgagctagacatacagagggtcctggctaagtctgacaagkgctggcatactttggattctgttaggcaccttcctgcctgctgccttgctccctccggctctggccccgggggtctgtggctgccagtagttgctggagt

SEQ ID NO: 146291 - DNA, 201 bp, Homo sapiens
ctactgggagacggggactatgactttgtctgcagctcagcattgccaagaaacatgacccgctgctccgggagttccaggagggccgcctactcttcccscccacctacaagtttgataggaactccaacgactatgacaccaggtgaggagggagtggggggccagaaggtctaggaagtcaggttacactgaccctgc

SEQ ID NO: 146292 - DNA, 201 bp, Homo sapiens
ctgaacctgagagggagagctactggctgcggcccattcccaccccaccttttgcagctgcagatagtagggatcttggcagtcctagccctttgatgttsttttacaatacaggtagccctactggttccttagcctccctaaatcttagttcctcaactacaaaacagggacggtgattccttacaggcttggcaggag

SEQ ID NO: 146293 - DNA, 201 bp, Homo sapiens; identical to SEQ ID NO: 27095

SEQ ID NO: 146294 - DNA, 201 bp, Homo sapiens
atttgtgacggcatgtgctgatcccttgaatggagtgtggtactgggccactgggtcgagactactgggagacggggactatgactttgtctgcagctcarcattgccaagaaacatgacccgctgctccgggagttccaggagggccgcctactcttcccgcccacctacaagtttgataggaactccaacgactatgac

SEQ ID NO: 146295 - DNA, 201 bp, Homo sapiens
tcagtatcgtgggcatgtgtatagcttcccaagttcttttacagtccctgctgggactccctgacttactttggttggttcctagtgctacttgttttacmaactacactttgtagaattgattagattaccttgtttatttaatgtgagtttgtgcctttttgtctcaatcttccaatacaggtatattgagaaaaaaag

SEQ ID NO: 146296 - DNA, 201 bp, Homo sapiens
tgtcacagagcccgcgtgtgcaggagcctgctcctccgagatacgtggcgtgtaggttgctgtagttacagcgcctccgtctctctccattgtgttccgayccatttctgtgtgttcccccaacctttatttccaagtgacattttcagtctttcaaatagctgccttttgtgatgtggtgatttaaatgatttaagttca

SEQ ID NO: 146297 - DNA, 201 bp, Homo sapiens; identical to SEQ ID NO: 27096

SEQ ID NO: 146298 - DNA, 201 bp, Homo sapiens; identical to SEQ ID NO: 27097

SEQ ID NO: 146299 - DNA, 201 bp, Homo sapiens
ggatgagcctgctctggatagatgtgcttcccggaggaaggaaggaaggcttgctagcttttccggggcgggggaagctgtggggagagagaagggtgccsgggggaaggcccctgcctatggggctgtcggtgccagcacacacccacgggactcagcccttcctatgccagcctctccctctggaaaggtctgtttccc

SEQ ID NO: 146300 - DNA, 201 bp, Homo sapiens
ccgctgctccgggagttccaggagggccgcctactcttcccgcccacctacaagtttgataggaactccaacgactatgacaccaggtgaggagggagtgsggggccagaaggtctaggaagtcaggttacactgaccctgctggcatgggaactgtctcagaatagaagtgttagggggggcaggaattggtctagtcat

SEQ ID NO: 146301 - DNA, 201 bp, Homo sapiens
agcggcagccctgtgctggccccgacactcccataccgccggcgtcacacttctccttgtctctgaggggctacagcagccacatgacgtacggcatcagygaccacaagcctgtctccggcacgttcgacttggaggtgaacttctgggctgcctgatacttgccagaggaatagctatgctggccacatccccaagccc

SEQ ID NO: 146302 - DNA, 201 bp, Homo sapiens
gtggtttaggagccatgagaacagttccagaggacccacgcgtgccctggcgtctcacttgcccctcaggttttctgtgccccagcagcccttgggttgarcaggctgagccacctggtgatctcccttccccgacttcatcacaaatcctcaggctgccctcctttttttctgaagcctcattatctggtttggagacat

SEQ ID NO: 146303 - DNA, 201 bp, Homo sapiens
cttgctttttacacaaaatatgccccaccccacctatgggcaggactgagaaggcaggagttccatcagcagcaggagccttccatttgtcctgctttttytgttccagatgagacaaaaggacccagtgaaaggaatgacagcagatgactaaagccgcctttcccctctgcactgtacgtaccaaatttctcactgtgc

SEQ ID NO: 146304 - DNA, 201 bp, Homo sapiens
ggcagccctgtgctggccccgacactcccataccgccggcgtcacacttctccttgtctctgaggggctacagcagccacatgacgtacggcatcagcgaycacaagcctgtctccggcacgttcgacttggaggtgaacttctgggctgcctgatacttgccagaggaatagctatgctggccacatccccaagccctcc

SEQ ID NO: 146305 - DNA, 201 bp, Homo sapiens
tgacttactttggttggttcctagtgctacttgttttacaaactacactttgtagaattgattagattaccttgtttatttaatgtgagtttgtgcctttytgtctcaatcttccaatacaggtatattgagaaaaaaagcagtctaataaaatcctagacagaactttctggagtccagtttggtgatgtccattttcca

SEQ ID NO: 146306 - DNA, 201 bp, Homo sapiens
tgtctgctccgctgatcgtcctgatgcccgaggacctgtggaccgtggaaaatgacatgatggtcagctactcttcaacctcggacttccccagcagcccrtgggactggattggactgtacaaggtgatgtggtggcaaggcaggaagtccatcagcgacagcccctggttcatccttcccgagggctcctgggagctgg

SEQ ID NO: 146307 - DNA, 201 bp, Homo sapiens
tcagctactcttcaacctcggacttccccagcagcccgtgggactggattggactgtacaaggtgatgtggtggcaaggcaggaagtccatcagcgacagyccctggttcatccttcccgagggctcctgggagctgggcagatgctgacgaactcaccctcatccaccccagcggttcttctgtagctaaaggctggcag

SEQ ID NO: 146308 - DNA, 201 bp, Homo sapiens
gctacttgggaagctgagacaggagaatcacctgaacccaggaggtggaggttgcagtgagccgagaccacgccattgcactccagcctgggcgacagagygagactccgtctcaaaaaaaaaagaatgctgaaaccaaaaaataatagctttcagataatccccacagcatctatgagatggattcctactttatcaatg

SEQ ID NO: 146309 - DNA, 201 bp, Homo sapiens
gatcttggctcactgaaacctccacctttcaggttcaagcgattctcctgcctcagccccccaagtagctgggactacagacatgtgccaccacacccggstaatttttgtatatttagtagagatggggtttcaccatgttgcccaggctggtctcgagctcctgaccttgtgatccacccacctcggcctcccaaactg

SEQ ID NO: 146310 - DNA, 201 bp, Homo sapiens
agtggcgtcaggatagcagcatctctcacttggtcaggctaggtgagctgcggctggctatatgactggcgcatctacccttttatttattccttcacacrttgaacagagatttgttaggcacctacagttcatttacaaattgagtaacccttatctgaaatgcttgggactgggaagcatttcggatttttttttttt

SEQ ID NO: 146311 - DNA, 201 bp, Homo sapiens
atgcaacacatcctccagggatgagcaggtaaaaagatccttaggcaggaaagagtgtagcagcaccaggaggaagctggtgatagtattagttctctgcrctttattttcatgaggaataagtgaatgaaatcagagtttggtcctgttcattttgtttctcacagtgccttgtgcatagtgggtattcgatacatcatt

SEQ ID NO: 146312 - DNA, 201 bp, Homo sapiens
tattctacatattctctgttctcatggatttgcatggtatttaaacttcattcttcttcctttactctttattctcactcttgcccagttgcctccaaaamgcctatacttttctttctttgtgtgaaccaaaacaacccttggcgatcagaattctgttagtgatgctaagtgagcagtccgtcggggggtgacaagtga

SEQ ID NO: 146313 - DNA, 201 bp, Homo sapiens
caaaaccccatctctactaaaaatacaaaaattaggcaggcgtggtggtgcacacctgtagtctcagccactccggaggctgaggctagagaattgcttgyacccagaaggcggaggttgcagtgagctgagatcgcaccactgcaccccaacctagatgacagagtgagactctgtctcaaaaaataaaaataaaaaata

SEQ ID NO: 146314 - DNA, 201 bp, Homo sapiens
aatacaaaaattaggcaggcgtggtggtgcacacctgtagtctcagccactccggaggctgaggctagagaattgcttgcacccagaaggcggaggttgcrgtgagctgagatcgcaccactgcaccccaacctagatgacagagtgagactctgtctcaaaaaataaaaataaaaaatactgattaaaagctatagattg

SEQ ID NO: 146315 - DNA, 201 bp, Homo sapiens
ggttgttttcagtcccatcctctcacttctctctggcttcttttttaggacgtggagaacagcttcttcttgaatgtcaattcccaagtaacaacagtgtrtcaggcacttgctaaggatcctaaattgcagcaaggctacaatgctatgggattctcccagggaggccaatttctgtacgttcctttttgttatattgta

SEQ ID NO: 146316 - DNA, 201 bp, Homo sapiens
cctctgctggtgtctgatggtaatgaccttaggtgttgctggcctttctttcagggtatcaatgagtcctacaagaaaaacctgatggccctgaagaagtytgtgatggtgaaattcctcaatgattccattgtggaccctgtagattcggaggtgagacactacttaggccacatgccaggagagtaaatggcattaaaa

SEQ ID NO: 146317 - DNA, 201 bp, Homo sapiens
gctcagtgtggagaacgttgttttcagagaaataaaaggaatagacaattctctaggcagtagccttttcttgttctaaaattggtgcttaagctttctcrcaggttgcaaatggaataagtaagttcaaaatgggaaatgatctcagtccacttctactcagtagccagtttgcttcccgttcctagttctagttccctg

SEQ ID NO: 146318 - DNA, 201 bp, Homo sapiens
taacaaatatttattgaaaacctattatatgccaggaacaagacagacaaggttcttgcattcatgaaatatatatatatacacacacacatgtgcacatrtatgcacatacatacatagacatatatatatacacatatgcacctatatacacacatacatagacatatatagacatatatatacacacatatgcactta

SEQ ID NO: 146319 - DNA, 201 bp, Homo sapiens
tattatatgccaggaacaagacagacaaggttcttgcattcatgaaatatatatatatacacacacacatgtgcacatatatgcacatacatacatagacatatatatatacacatatgcacctatatacacacatacatagacatatatagacatatatatacacacatatgcacttatatacacatatatacacacaca

SEQ ID NO: 146320 - DNA, 201 bp, Homo sapiens
gttctggttggtggggtctggcccacacaacttgttgtacctactgttcgtgtccaagtgctcactcaccatgtgtaatgctctccccctgattaatctgygcgaacagtgctgagcgggaagcagactcatctgagcctgaactggtagagactgggggaggaggggggcctggtggagggggaggaggacctgatccgg

SEQ ID NO: 146321 - DNA, 201 bp, Homo sapiens
attatatgccaggaacaagacagacaaggttcttgcattcatgaaatatatatatatacacacacacatgtgcacatatatgcacatacatacatagacatatatatatacacatatgcacctatatacacacatacatagacatatatagacatatatatacacacatatgcacttatatacacatatatacacacacac

SEQ ID NO: 146322 - DNA, 201 bp, Homo sapiens
tacagtggcagcaatgagtagttacaaccatatggcccttaaagcctaaaatattttgtatctggcctttacaaaaacgtttgctgacctctgtactcaasagtgaattgtttccgtgccttgcaagactgggagctttttggaaacagattatgtattcatccttgaatgtctagagctcagcacaggaatttttcacat

SEQ ID NO: 146323 - DNA, 201 bp, Homo sapiens
tatatatatacacatatgcacctatatacacacatacatagacatatatagacatatatatacacacatatgcacttatatacacatatatacacacacayatatatatatatacacgataaaatggaggatagctgggcacatggtggtgtacacctgtagtccctgctacttgggaggctgaggctggaggatcatttg

SEQ ID NO: 146324 - DNA, 201 bp, Homo sapiens
gcttcttttttaggacgtggagaacagcttcttcttgaatgtcaattcccaagtaacaacagtgtgtcaggcacttgctaaggatcctaaattgcagcaasgctacaatgctatgggattctcccagggaggccaatttctgtacgttcctttttgttatattgtaccacttatatggaattgatttttgtttcttttatt

SEQ ID NO: 146325 - DNA, 201 bp, Homo sapiens
tatatatacacatatgcacctatatacacacatacatagacatatatagacatatatatacacacatatgcacttatatacacatatatacacacacacayatatatatatacacgataaaatggaggatagctgggcacatggtggtgtacacctgtagtccctgctacttgggaggctgaggctggaggatcatttgaa

SEQ ID NO: 146326 - DNA, 201 bp, Homo sapiens
agatgagagattgtagaaataaagacacaagacaaagagataaaagacagctgggcccgggggaccactaccaccaagacgtggagactggtagcggcccygaatgccaggctgcgctgatatttattggatacaagacaaggggggcagggtaaggagtgtgagccatctcccatgataggtaaagtcacatgggtcacg

SEQ ID NO: 146327 - DNA, 201 bp, Homo sapiens
atattttgacctcttcccgtgaatcatgaatttttgtttgtttgtttttgagacagagtctcactctgtcacccaagttggagtgcagtggtgccattacrgcttactgcaacatagcctcaacctcccaggctcaagcaatcctcccacctcagcgtcctgagcagctgggactacaggtgtgagccactacaccccact

SEQ ID NO: 146328 - DNA, 201 bp, Homo sapiens
aacatagcctcaacctcccaggctcaagcaatcctcccacctcagcgtcctgagcagctgggactacaggtgtgagccactacaccccactaattttttamtttttttgtagagataggatctcatttatgttgcccaggctagtctcacactcctgggctccactgattttccctcctcaccctcccaaagtgcatggta

SEQ ID NO: 146329 - DNA, 201 bp, Homo sapiens
caacagtgggcttaaaatagtcagcaaaccacactgtaaacagatctgctgtcatccaggctttgtgttccatttgtagagcacaggcagagtaatttagygtagttcttaagggccctaggatttaaaaaatggtaacccagcattggcttcagcttcaagtcatcagctccatgaggcactcacaagagagtcagcctg

SEQ ID NO: 146330 - DNA, 201 bp, Homo sapiens
gaccaggtgctttttaatgagctgtaatatttgtttgttttttgagtttgtttttaaactttttttaattaaaaaaaatagtttttgagacagggttgtgytctcttgcccagactagagtgcagtggtgtgatcacagctcactgcagccttcacctcctggactcaagccatcctcccacttcagcctcctgagtagct

SEQ ID NO: 146331 - DNA, 201 bp, Homo sapiens
ctagaccactcagattttctccatagcagcaataagactgttttgcttccttattatttgtgtgttcactgaaatagcacttctaattttcctcaggaactttttttttttttgcattctataaatgttcagagttctaaacctttaaaaggtttcaaatacatgtataaacacattctagaatgtcactctgactgttgc

SEQ ID NO: 146332 - DNA, 201 bp, Homo sapiens
catgcaccgccatgctcggctacttttaaaaagaattttcttttctagaggtggggtcttgctatgttgcccaagctagtcttgaactcctggcctcaaayggtcctcctaccttggcctcccaaagtgctggcattgtaggtatgagccaccatgcccagctgcgtggtaatgttttgaaaggaatctttttttctgagc

SEQ ID NO: 146333 - DNA, 201 bp, Homo sapiens
cacttctctctggcttcttttttaggacgtggagaacagcttcttcttgaatgtcaattcccaagtaacaacagtgtgtcaggcacttgctaaggatcctwaattgcagcaaggctacaatgctatgggattctcccagggaggccaatttctgtacgttcctttttgttatattgtaccacttatatggaattgattttt

SEQ ID NO: 146334 - DNA, 201 bp, Homo sapiens
ctgattgtggatgatacatttccatctgacagtcggagctaaaactcccttttattccgtaggagggcagtggctcagagatgcccttcacctcccatgaycaatctgatctcggttgggggacaacatcaaggtaactttgcctctttgctttcttttttctgtattctaacccacatgaccacctgatttaaaaaaaaa

SEQ ID NO: 146335 - DNA, 201 bp, Homo sapiens
gcacccaaaccgggctcccatagatgtgcgttctttttcctgtttaggtcttcataaacaaatcagcagtgactgtttacccaaactgtcctgggcagacmctaggaaagagaagttctgttttttttgggaggcagggcctttgagattcagttccctttagggaggttgaaattcatttgcctttcttcccttaagttc

SEQ ID NO: 146336 - DNA, 201 bp, Homo sapiens
cttaaagcctaaaatattttgtatctggcctttacaaaaacgtttgctgacctctgtactcaagagtgaattgtttccgtgccttgcaagactgggagctytttggaaacagattatgtattcatccttgaatgtctagagctcagcacaggaatttttcacatttattgcttaataattttaggaagcagaaattctggg

SEQ ID NO: 146337 - DNA, 201 bp, Homo sapiens
tctcgcgcccgcggtcatgtgacacagcgaagatggcgtcgcccggctgcctgtggctcttggctgtggctctcctgccatggacctgcgcttctcgggcrctgcagcatctggacccgccggcgccgctgccgttggtgatctggcatgggatgggtgagtgagtgagaaatttaaaagggtttggcgattctctctctt

SEQ ID NO: 146338 - DNA, 201 bp, Homo sapiens
ctcttgatcaagccatattgtactacttgtgctttttctctcgtatgccttggttcatatatttctgtctctagaatgcccttccttggcttctccacctracaatttctattcgtctgtcaaggcaaggatgccatccccattccaagcagaatgtgatcgcttttttagaatcatcagcctctgttaaaacactcatca

SEQ ID NO: 146339 - DNA, 201 bp, Homo sapiens
gatgcgcaggttgcggtctgcaaccggcggcgccacgcccaggcgggcggagcgcggttcccggagtctcgcgcccgcggtcatgtgacacagcgaagatrgcgtcgcccggctgcctgtggctcttggctgtggctctcctgccatggacctgcgcttctcgggcgctgcagcatctggacccgccggcgccgctgccgt

SEQ ID NO: 146340 - DNA, 201 bp, Homo sapiens
agctcttccactctggctacggagcgtatgttgtagaaattttgatttctctccctgccaacctgggatagagtttgttcgaatttccccatgtgaggccktggggtaaccgtgcccattttgaggaggtgggggctggaagggaagaggaagtggagagagattggaaagaaagtataaagagtcccctttgctccagtt

SEQ ID NO: 146341 - DNA, 201 bp, Homo sapiens
ttcagaggtcatttgtctcctcttggcttggcttttcttttgcactgggtgcctcaacttgggtggtgaggtaaaaagggaagctagaatctgatttgagaaaaaaaaaaaaaaaaggcttcagaaattacagctaagaacttccttactgtgaaaactcaaaatgatgttggccacggcagaagcaccattctggcactg

SEQ ID NO: 146342 - DNA, 201 bp, Homo sapiens
tggcttggcttttcttttgcactgggtgcctcaacttgggtggtgaggtaaaaagggaagctagaatctgatttgagaaaaaaaaaaaaaaaaggcttcaraaattacagctaagaacttccttactgtgaaaactcaaaatgatgttggccacggcagaagcaccattctggcactgtcgtaactgcttatcttcccaac

SEQ ID NO: 146343 - DNA, 201 bp, Homo sapiens
ttcctttaacttcagtctcatctgctcctgggagggagagctccatctctgacgtaactggctctgttgggctttagcgccagcctgctccactgagtggsgttttcaggaccactgcctctgggcagctcttccactctggctacggagcgtatgttgtagaaattttgatttctctccctgccaacctgggatagagtt

SEQ ID NO: 146344 - DNA, 201 bp, Homo sapiens
tccttctgcaggaccgcctggggctaaaggaaatggacaatgcaggacagctagtgtttctggctacagaaggggaccatcttcagttgtctgaagaatgrttttatgcccacatcataccattccttggatgaaacccgtatagttcacaatagagctcagggagcccctaactcttccaaaccacatgggagacagttt

SEQ ID NO: 146345 - DNA, 201 bp, Homo sapiens
tttaagccagctttgccgtcccttaaaggaacaggacacaccaaacgagtctccaccacacaagccagggttgtagtttacagacggttctggttggtggsgtctggcccacacaacttgttgtacctactgttcgtgtccaagtgctcactcaccatgtgtaatgctctccccctgattaatctgcgcgaacagtgctga

SEQ ID NO: 146346 - DNA, 201 bp, Homo sapiens; identical to SEQ ID NO: 27181

SEQ ID NO: 146347 - DNA, 201 bp, Homo sapiens
ctgttgcttcctttaacttcagtctcatctgctcctgggagggagagctccatctctgacgtaactggctctgttgggctttagcgccagcctgctccacygagtggggttttcaggaccactgcctctgggcagctcttccactctggctacggagcgtatgttgtagaaattttgatttctctccctgccaacctggga

SEQ ID NO: 146348 - DNA, 201 bp, Homo sapiens
cttgccctccagttcaagtacagctggctccttctttgtggctcgtttgggggatgggctggtttggggtttaggtgcagagaatggtttggggccactgygtactggaccactctgagccttcagggcagggttcttgtgagtcttcatgtcatcagatacatgtttcagggctgtaagaacaacagctaccttgttcct

SEQ ID NO: 146349 - DNA, 201 bp, Homo sapiens
attttctgttaggagattgtctcagtctgaggctagactctctttgtcccgattcagattcttcaggaagggaccatgccccagctcaggtcaggtctccmcctctgctctcattagctgtggccagagaagtgggaccgtgcttactaaccataccccacctccctgtaaaccagtaggccgggcaggaagagtgcaaga

SEQ ID NO: 146350 - DNA, 201 bp, Homo sapiens
aatacatgtataaacacattctagaatgtcactctgactgttgcttcctttaacttcagtctcatctgctcctgggagggagagctccatctctgacgtarctggctctgttgggctttagcgccagcctgctccactgagtggggttttcaggaccactgcctctgggcagctcttccactctggctacggagcgtatgt

SEQ ID NO: 146351 - DNA, 201 bp, Homo sapiens
aattggtgcttaagctttctcacaggttgcaaatggaataagtaagttcaaaatgggaaatgatctcagtccacttctactcagtagccagtttgcttccygttcctagttctagttccctgaaatagaagaaacaagtctggggctaggacaagatgaagaggctcctgaagtgcaaatttaacggggcactcactctca

SEQ ID NO: 146352 - DNA, 201 bp, Homo sapiens
gattatgtaaaatttaaatttcagtgtccttattggaacagttttagttactttttacatactgtctgtggctgcatttgttacagtggcagcaatgagtrgttacaaccatatggcccttaaagcctaaaatattttgtatctggcctttacaaaaacgtttgctgacctctgtactcaagagtgaattgtttccgtgcc

SEQ ID NO: 146353 - DNA, 201 bp, Homo sapiens
aactaattccactcctagccatgtctatttggttccttgttttcaggtatttattagtctttggattctcaaatgtgcaacttccctattcatctccttcmgttgttttattatcttggttttgagttcttattctattgagctcattttcttgtcttttttttagagacaaggtcttgctctgttgcccaggctggagta

SEQ ID NO: 146354 - DNA, 201 bp, Homo sapiens
tgacagccatctgtaatcccagctgcttgggaagctgaggcaggagaattacttgaacccaggaggcagagcttgcagtgagccaagatcgtgccactgcrccccagcctgggtgacagagcgagactctgtctcaaaaagaacataaaatgaaattgaaatgaaatgaaaaaatacagctgcctgctggggaaaaaacct

SEQ ID NO: 146355 - DNA, 201 bp, Homo sapiens
gcggcgccacgcccaggcgggcggagcgcggttcccggagtctcgcgcccgcggtcatgtgacacagcgaagatggcgtcgcccggctgcctgtggctctwggctgtggctctcctgccatggacctgcgcttctcgggcgctgcagcatctggacccgccggcgccgctgccgttggtgatctggcatgggatgggtgag

SEQ ID NO: 146356 - DNA, 201 bp, Homo sapiens
gctacaatgctatgggattctcccagggaggccaatttctgtacgttcctttttgttatattgtaccacttatatggaattgatttttgtttcttttattyagataaatccactcctccaattcaagattgtcacctatcttggaagggaaatttcctaaaatgttcctgtgtaagaagctttatggaacttaatttcttt

SEQ ID NO: 146357 - DNA, 201 bp, Homo sapiens
aaatatggccctgcctgtcctatgggaatttttcagaggataaagtgaaataataggtaggaaaatactttttaaaagtataaggattatacaaacgcaarttggtaaaaacagctttattattcattcatttaacaaatatttattgaaaacctattatatgccaggaacaagacagacaaggttcttgcattcatgaaa

SEQ ID NO: 146358 - DNA, 201 bp, Homo sapiens
atcttcccagacgctggcattaccgctagaccaaggagccctctagtggccctgtccgggcatgacagagggctcacactattgtcttctggtcacttctsagcatgtcccttcagctcctatctctgtatggcctggcttttcctaggttatgattgtagggcaaggattattataatattggaataaagaataattgct

SEQ ID NO: 146359 - DNA, 201 bp, Homo sapiens
acatcattattgaaggagtggatatttgtcatctaccactgtaggtgtttttggactccctcgatgcccaggagagagctctcacatctgtgacttcatcygaaaaacactgaatgctggggcgtactccaaagttgttcaggaacggtatgtatggttagctgaaaagattacagacctgtcaccgtgtgaaaatatcat

SEQ ID NO: 146360 - DNA, 201 bp, Homo sapiens
gttcactgaaatagcacttctaattttcctcaggaactttttttttttttgcattctataaatgttcagagttctaaacctttaaaaggtttcaaatacaygtataaacacattctagaatgtcactctgactgttgcttcctttaacttcagtctcatctgctcctgggagggagagctccatctctgacgtaactggct

SEQ ID NO: 146361 - DNA, 201 bp, Homo sapiens
gcctgtggctcttggctgtggctctcctgccatggacctgcgcttctcgggcgctgcagcatctggacccgccggcgccgctgccgttggtgatctggcawgggatgggtgagtgagtgagaaatttaaaagggtttggcgattctctctcttcctagcctgggttcgcatctgcaaaatgcgggtgtagagggcgaggac

SEQ ID NO: 146362 - DNA, 201 bp, Homo sapiens
gttttcacatccttgataatgctctttgaggcctcagagtttttaaacaataaacaatatttggactcatgagtttccatcattgtgttttgttggctagragacagctgttgcaatcccttaagcatgggtgctattaaaaaaatggtggagaagaaaatacctggaatttacgtcttatctttagagattgggaagacc

SEQ ID NO: 146363 - DNA, 201 bp, Homo sapiens
tggagaacgttgttttcagagaaataaaaggaatagacaattctctaggcagtagccttttcttgttctaaaattggtgcttaagctttctcacaggttgmaaatggaataagtaagttcaaaatgggaaatgatctcagtccacttctactcagtagccagtttgcttcccgttcctagttctagttccctgaaatagaa

SEQ ID NO: 146364 - DNA, 201 bp, Homo sapiens
tggatttagcaatataaagatgattaatcttgacaaaagcagttttgggagagtcgtgatagtgagatctttattgggatgggttacagaaaaatattcaragtaattagagtcagcaaatacaaacacttgcaaggttctccaacaggccctggggctactacagtggggtcaaaagaggacacagggtaggagctttgt

SEQ ID NO: 146365 - DNA, 201 bp, Homo sapiens
taattaattatggcctttccttctgcaggaccgcctggggctaaaggaaatggacaatgcaggacagctagtgtttctggctacagaaggggaccatcttyagttgtctgaagaatggttttatgcccacatcataccattccttggatgaaacccgtatagttcacaatagagctcagggagcccctaactcttccaaac

SEQ ID NO: 146366 - DNA, 201 bp, Homo sapiens
aggagacagctgttgcaatcccttaagcatgggtgctattaaaaaaatggtggagaagaaaatacctggaatttacgtcttatctttagagattgggaagmccctgatggaggtaaggcgcttcacagctgttcctttgaagggttgctgactgatttcatagcatatactgttaaaatgctttgccttgtgttttcagca

SEQ ID NO: 146367 - DNA, 201 bp, Homo sapiens
gttgtggctggtttggtcttctatctagaccactcagattttctccatagcagcaataagactgttttgcttccttattatttgtgtgttcactgaaatarcacttctaattttcctcaggaactttttttttttttgcattctataaatgttcagagttctaaacctttaaaaggtttcaaatacatgtataaacacatt

SEQ ID NO: 146368 - DNA, 201 bp, Homo sapiens
atagccggtgaagtggaggggtcaggaaagcgcagtgtccttgaagccaagtgaagaaaatgtttcaggaagaagggcatgatcaactgcatcaaatgttrataggtcatgatcaactgtatcaaatgttaatgggtcaaggaagataaaggctgacaactgattattggatttagcaatataaagatgattaatcttgac

SEQ ID NO: 146369 - DNA, 201 bp, Homo sapiens
catgtgaggataccaacctaaatgagtttacctcttagagaagatgtcagtggttgttttcagtcccatcctctcacttctctctggcttcttttttaggrcgtggagaacagcttcttcttgaatgtcaattcccaagtaacaacagtgtgtcaggcacttgctaaggatcctaaattgcagcaaggctacaatgctatg

SEQ ID NO: 146370 - DNA, 201 bp, Homo sapiens
accttacaaaccaacctctgctagcttcacgctttttttctgcagcttcctcacctctctcagccttcattgaattgaagagagttaggacgttgctctgrattaggctttggcttaagggaatgttgtggctggtttggtcttctatctagaccactcagattttctccatagcagcaataagactgttttgcttcctta

SEQ ID NO: 146371 - DNA, 201 bp, Homo sapiens
aaattctttgttcttttggaacctactctccagtaggagaagcagattataaagaaattaacaagtaaaacataacatatcaaatggtgatatgtgcaacrgagaaaaatatagtagggtgtaggataaaaactggaggtgggggcttgcacttttaataaagcaaagttgggaaagaattcattgaaaaagtgacatctg

SEQ ID NO: 146372 - DNA, 201 bp, Homo sapiens
ttcttgaatgtcaattcccaagtaacaacagtgtgtcaggcacttgctaaggatcctaaattgcagcaaggctacaatgctatgggattctcccagggagrccaatttctgtacgttcctttttgttatattgtaccacttatatggaattgatttttgtttcttttattcagataaatccactcctccaattcaagattg

SEQ ID NO: 146373 - DNA, 201 bp, Homo sapiens
gcagcttctacatcagcacttgctgccccatcttgcactcctgtgttatggagatggtttctttccttgaaccttacaaaccaacctctgctagcttcacrctttttttctgcagcttcctcacctctctcagccttcattgaattgaagagagttaggacgttgctctgaattaggctttggcttaagggaatgttgtgg

SEQ ID NO: 146374 - DNA, 201 bp, Homo sapiens
ggggagtcacagaggatgactagcttaatctgtgatgctgattgtggatgatacatttccatctgacagtcggagctaaaactcccttttattccgtaggwgggcagtggctcagagatgcccttcacctcccatgatcaatctgatctcggttgggggacaacatcaaggtaactttgcctctttgctttcttttttctg

SEQ ID NO: 146375 - DNA, 201 bp, Homo sapiens
ttgtttctcacagtgccttgtgcatagtgggtattcgatacatcattattgaaggagtggatatttgtcatctaccactgtaggtgtttttggactccctygatgcccaggagagagctctcacatctgtgacttcatccgaaaaacactgaatgctggggcgtactccaaagttgttcaggaacggtatgtatggttagc

SEQ ID NO: 146376 - DNA, 201 bp, Homo sapiens
tctcacagtgccttgtgcatagtgggtattcgatacatcattattgaaggagtggatatttgtcatctaccactgtaggtgtttttggactccctcgatgmccaggagagagctctcacatctgtgacttcatccgaaaaacactgaatgctggggcgtactccaaagttgttcaggaacggtatgtatggttagctgaaa

SEQ ID NO: 146377 - DNA, 201 bp, Homo sapiens
cagttttagcttctaaccagtctcaaattattttggcagtatgtgctgtgtgtcatatctgagcttctttcctttgcttcttctgcagtggtttggatttyacagaagtggccaagccaaggaaaccattcccttacaggagacctccctgtacacacaggtaactggcagggagtctatcttgggaggttggtgtttttt

SEQ ID NO: 146378 - DNA, 201 bp, Homo sapiens
aaaaaacaacaggatactgtttgaaggacacactagtggttgtagtgcttaaaggagtgggctctggggccaaactgcctgtgtctgaatcctggcttatmccttattgtctaaccttggacaaggtatttaacctcatttttacagttttctatctgtgatatagggcaaataatgaaatctactccacagggtggttgt

SEQ ID NO: 146379 - DNA, 201 bp, Homo sapiens
tcactggaaagagagaaggggaaggaaagagagagccgcgcacggcgttgaagttttacatgctgtccttgattaatccttacagtagtggcgtcaggatvgcagcatctctcacttggtcaggctaggtgagctgcggctggctatatgactggcgcatctacccttttatttattccttcacacattgaacagagattt

SEQ ID NO: 146380 - DNA, 201 bp, Homo sapiens; identical to SEQ ID NO: 27171

SEQ ID NO: 146381 - DNA, 201 bp, Homo sapiens
cccaaactggtctcgaactcttggcctcaagcaatcctcctgcctcgtcttaccaaagcgctgggatgataggtatgagcccatgcttggcctatatggatttttttttttttttttttttgagatggagccttgttctgttgcccaggctggagtgcagtggcatgatcttggctcactgaaacctccacctttcaggtt

SEQ ID NO: 146382 - DNA, 201 bp, Homo sapiens; identical to SEQ ID NO: 27172

SEQ ID NO: 146383 - DNA, 201 bp, Homo sapiens
cttattacattcccaccagcaatgtccaaggggtcccatttttctacatcgttgacaatacttgttattttctattaaaaaattattattaaagacatccyagtctgtgtgaaatggtatctcatcgtggttttggtttgcatttcacatgcttttcacatgccagtggttagccatttgtatatcttctttggaaaaata

SEQ ID NO: 146384 - DNA, 201 bp, Homo sapiens
aaaactttcagattttgggtttcccattttcagattaggatgctcaacctatattcatttaacacagttattgagcacctactaggtgctgaggatacagkagggaactaaacagactaaattctttgttcttttggaacctactctccagtaggagaagcagattataaagaaattaacaagtaaaacataacatatcaa

SEQ ID NO: 146385 - DNA, 201 bp, Homo sapiens
ttacttccttcattgaagtcttgaatccctcagccattcatgagggttggaatcaacttcttttaaattcctgataatactgatattttgacctcttcccrtgaatcatgaatttttgtttgtttgtttttgagacagagtctcactctgtcacccaagttggagtgcagtggtgccattacagcttactgcaacatagcc

SEQ ID NO: 146386 - DNA, 201 bp, Homo sapiens
cgtttcatcagtgttcacagcatcttcaccaggagtagattccatctcaagaagccactgttttgctcatccgtaagaagcaattccttatctgttttttkagattgcaacaattcagtcacatcgtcaggttccacttctaattctagttctcctgctatttccacatctgcagttacttccttcattgaagtcttgaat

SEQ ID NO: 146387 - DNA, 201 bp, Homo sapiens
acaccggtttccagtttcttttgaggctcaataaaaagaggaatgctttgtgtagtatatcccctgtgcttgcatggtcagaccagctagttggtacagaytgggtcacaatgacagtaatagcatggacttcctagctcaggtagccacatgctcacatggcccagctccttgaaaagttcccctcatagtccttggagt

SEQ ID NO: 146388 - DNA, 201 bp, Homo sapiens
ttcaacaaatataacaggtgtagcctttattctcatagtgtttgcaatcattccattctcctcctaagcaaggttttcttgtcttggtgtggattgttccyctctttttgcacagtggctagcaggaagctctgaatctaacaagtgtcaggcaaccagattaggctatgcagtggtcaagaagctgaagagagaacaagt

SEQ ID NO: 146389 - DNA, 201 bp, Homo sapiens
atttaattttgagtgaaaaactaaaaactcattgagtgcctgccatgtttcagcactggaccatatggtgggaatacttcaacaaatataacaggtgtagyctttattctcatagtgtttgcaatcattccattctcctcctaagcaaggttttcttgtcttggtgtggattgttcctctctttttgcacagtggctagca

SEQ ID NO: 146390 - DNA, 201 bp, Homo sapiens
ggagatacctgaggggagccaccactacccatgccctccatacccaagttcatagtcagggtggtgcagtgcatgggaatggacaactggttaggagtcasgacaacttgctccagcccaggtctgcaactcagttgccagtgtcttccactctccatcaatgcacacaacctagacagttagtttctccctcctttccac

SEQ ID NO: 146391 - DNA, 201 bp, Homo sapiens
ttcaaataaagcaaacacctgtaaccaacccaaatgtctctgtacctcacttctattttctctacatcactttcctttgctgcccattaatcttccaccaygtggttgctctggagtgtcagagcctactctggctcaggaggctgcctgattcacgagttgttcattgctcaattaaactcttttaaatttaatttagct

SEQ ID NO: 146392 - DNA, 201 bp, Homo sapiens
taattagcttgatggcagtaatcatttcacagtatatacatatatcaaaacatccctctgtacacattaaatatatataatttatatttatgaattatgcytcagtaaagcttgaaaaaattaaaatgagtaaaatgtgtgcctgctgcatcactcacacaaaatctaccatctgaagtcaaactctgatatgaggggctt

SEQ ID NO: 146393 - DNA, 201 bp, Homo sapiens
aatcttagatacagatggacataaagatgggaacaacacaccctgtagaatccaaaaggagggagggaggaatgaggacaagaactgaattcctattgggkactacgttcactgtctggatgatcggatcaatagaagtcaaacccttagcatcatacagtttacccttgtagcaaacctgcacatgtacccactgaatct

SEQ ID NO: 146394 - DNA, 201 bp, Homo sapiens
ctgcaatacaggacaggcagaggctgagctcagcctggggagcaaaggaagctggaaggagtcagtgatgcctgggtggggcttggaaggcctcatggttsgtcaggcacaggacatggctagtttctttgaatgaacatttttatgactgtcagtcacaagggcacggaagatgaaaacattaagtcccactgtcacctc

SEQ ID NO: 146395 - DNA, 201 bp, Homo sapiens
ataataaggaccagaaaattctagcccccaataggtagacctaggctacatgaaggagggatgacaaggtgctctgcaatacaggacaggcagaggctgarctcagcctggggagcaaaggaagctggaaggagtcagtgatgcctgggtggggcttggaaggcctcatggttcgtcaggcacaggacatggctagtttct

SEQ ID NO: 146396 - DNA, 201 bp, Homo sapiens
ccctgcccctgctccaggaggaaggatgttgtgtctatgacattcacaaacccctgttttccaacatctagttgggttcaaccaacaaagagctatggcaraaaatttgcaggaaccaaaagagtgaggctcccttcctggggagtctccctggactggctctgctctttgagaaaaatgtttgtgagtttaatgtgaaac

SEQ ID NO: 146397 - DNA, 201 bp, Homo sapiens
agccataaaacacacattaacaaatataaaaaaatgaaaatcatacaatgtatacttgcagacaacaatggaattacagtagaaattaataacaaaaagatagcaagaagacttcgaaatacttagataataaacaacacccttataactaataggtcaaagaagaaatctcaagaaaaatttaaaaatatttctaatgaa

SEQ ID NO: 146398 - DNA, 201 bp, Homo sapiens
ccattcttctgtctctgcctctcaaagtaatgggattacaggcatgagccaccacacccagccccagaaagctctcaaatattcatattgaatttcatacragttagcatatattttcacgtgtttacgctcagagatggctgagtcctgaaggtagacatagaggagggtgagcttaagaactttactaaagcacttaca

SEQ ID NO: 146399 - DNA, 201 bp, Homo sapiens
attaacaaatataaaaaaatgaaaatcatacaatgtatacttgcagacaacaatggaattacagtagaaattaataacaaaaagatagcaagaagacttcraaatacttagataataaacaacacccttataactaataggtcaaagaagaaatctcaagaaaaatttaaaaatatttctaatgaaacaaaaagcacaact

SEQ ID NO: 146400 - DNA, 201 bp, Homo sapiens
tcccaagcagctgggacttgaggcacaagccaccaattataggtaattttatttttaattttatttttagtagagacaagaccttgctatgttgcccaggytggtctggaatacctggcctcaagccattcttctgtctctgcctctcaaagtaatgggattacaggcatgagccaccacacccagccccagaaagctctc

SEQ ID NO: 146401 - DNA, 201 bp, Homo sapiens
aatatgaagaaaaaaattaaaacataataaatattttaatagaaataaatgaaattgaaaacagaaatactataaagaaaattaccatcagctagggctgttttttttttttttgcttttttcttctaataacttattttatttattttttagtttttagttttttaccactttttttattattattattattatacttta

SEQ ID NO: 146402 - DNA, 201 bp, Homo sapiens
agaaataaatgaaattgaaaacagaaatactataaagaaaattaccatcagctagggctgttttttttttttttgcttttttcttctaataacttattttwtttattttttagtttttagttttttaccactttttttattattattattattatactttaagttctagtgtgcctgtgcacaacatgcaggtttgttaca

SEQ ID NO: 146403 - DNA, 201 bp, Homo sapiens
aaaattaccatcagctagggctgttttttttttttttgcttttttcttctaataacttattttatttattttttagtttttagttttttaccacttttttwattattattattattatactttaagttctagtgtgcctgtgcacaacatgcaggtttgttacatatgtatacatgtgccatgttggtgtgctgcacccat

SEQ ID NO: 146404 - DNA, 201 bp, Homo sapiens
attattattatactttaagttctagtgtgcctgtgcacaacatgcaggtttgttacatatgtatacatgtgccatgttggtgtgctgcacccattaactcrtcatttacattgggtatatctcctaatgctatccctccctcctccccccaccccatgacaagccccagtgtgtgatgttccccaccctgtgtccaagtgt

SEQ ID NO: 146405 - DNA, 201 bp, Homo sapiens
tatacatgtgccatgttggtgtgctgcacccattaactcatcatttacattgggtatatctcctaatgctatccctccctcctccccccaccccatgacargccccagtgtgtgatgttccccaccctgtgtccaagtgttctcattgttcaactgccacctatgagtgagaacatgaggtgcttggatttctgtccttgc

SEQ ID NO: 146406 - DNA, 201 bp, Homo sapiens
aagatctctacaaggagaaatacaaaacactgctgaaaaataatcagattgggtgtgtgtgtatgtatatacacacacctatatacatgtatatgtgtatrtacacacatgtatataggtgtgtatatgtacataggtatatatgtgtgaatgtatacatatatgcatgtatatatacatatatgtatgtgtatgtatggt

SEQ ID NO: 146407 - DNA, 201 bp, Homo sapiens
agttccctataaattctggaaattaggcctttgttagatgcataatttgaggatatcttctcccattgtgtaggctgtctgttcgctctgtttatattttyttttgctgtgcagaagctctttagtttaattaggtcccacttgtctatttttggttttgttgcaattgcttttggggacttagtcaaacaattttctgcc

SEQ ID NO: 146408 - DNA, 201 bp, Homo sapiens
atatcttctcccattgtgtaggctgtctgttcgctctgtttatattttcttttgctgtgcagaagctctttagtttaattaggtcccacttgtctattttyggttttgttgcaattgcttttggggacttagtcaaacaattttctgccaaggtcaaataaagaagagtatttcctaggtttttttccaggacttttaaaa

SEQ ID NO: 146409 - DNA, 201 bp, Homo sapiens
gacaaggaagacttcagggtgtctgcctatgcagcaggtggctggtacccttctgagagagagaacaggggagaagcaccgggtttatagggtcaggctcwtgaatttggtttgagatacccaagccaagacctcaggcaggcaggcggaaagatctttcaggacctcaggatagtggccttctctggttgtcccagctgg

SEQ ID NO: 146410 - DNA, 201 bp, Homo sapiens
ggcggaaagatctttcaggacctcaggatagtggccttctctggttgtcccagctggatacagattttttctcttttaactttgactcccatgacattctktctattttataacacttaccttaatcaataagaaaagcaatttaccttgttgtagagccatttttcttcctaacttatcttctgtcatgtcataggctct

SEQ ID NO: 146411 - DNA, 201 bp, Homo sapiens
attttttctcttttaactttgactcccatgacattctgtctattttataacacttaccttaatcaataagaaaagcaatttaccttgttgtagagccattyttcttcctaacttatcttctgtcatgtcataggctctaagcttcatagaagcattctttatctgtctttcgcactccacctgtctcagtatttcataccc

SEQ ID NO: 146412 - DNA, 201 bp, Homo sapiens
tataagtgggagccaaatcttagatacagatggacataaagatgggaacaacacaccctgtagaatccaaaaggagggagggaggaatgaggacaagaackgaattcctattgggtactacgttcactgtctggatgatcggatcaatagaagtcaaacccttagcatcatacagtttacccttgtagcaaacctgcacat

SEQ ID NO: 146413 - DNA, 201 bp, Homo sapiens
ccaaatcttagatacagatggacataaagatgggaacaacacaccctgtagaatccaaaaggagggagggaggaatgaggacaagaactgaattcctattkggtactacgttcactgtctggatgatcggatcaatagaagtcaaacccttagcatcatacagtttacccttgtagcaaacctgcacatgtacccactgaa

SEQ ID NO: 146414 - DNA, 201 bp, Homo sapiens
catagtggccaaaattcctgcataatgaagtgagacatcatatacacagaataggtagttctgtgggtccccagaaatgaccagggacaacattatgccayaacattttcttcactgggaacatcacctgcagcccccagagcctgtcctgtccttgcccttacataggtgccccgagtggcagcacatatgcttgcggct

SEQ ID NO: 146415 - DNA, 201 bp, Homo sapiens
aactaaagcatgagcaccaggtggagaagtggtcaagagctggatgtatttcagagaggagtgacagcctgacaaccaaggggatgtaaggaacatttcayaacttggatcaaccccaggacacccttgctgagctgtggagaggagtgagagcttgacaatcaagatgtaaggaacatttcacaacttggatcaactcca

SEQ ID NO: 146416 - DNA, 201 bp, Homo sapiens
ggaatcatccattttgaggacctgaactaaagcatgagcaccaggtggagaagtggtcaagagctggatgtatttcagagaggagtgacagcctgacaacyaaggggatgtaaggaacatttcacaacttggatcaaccccaggacacccttgctgagctgtggagaggagtgagagcttgacaatcaagatgtaaggaac

SEQ ID NO: 146417 - DNA, 201 bp, Homo sapiens
atgttgtgataggtgatgagtaaagaggctgctggaatcatccattttgaggacctgaactaaagcatgagcaccaggtggagaagtggtcaagagctggrtgtatttcagagaggagtgacagcctgacaaccaaggggatgtaaggaacatttcacaacttggatcaaccccaggacacccttgctgagctgtggagag

SEQ ID NO: 146418 - DNA, 201 bp, Homo sapiens
gtgtctggcttgggggtgctggggtgcactttggggaagcacatcatgacagggctgagtgtgtgataaatcagagcccgtgtgatgttgtgataggtgakgagtaaagaggctgctggaatcatccattttgaggacctgaactaaagcatgagcaccaggtggagaagtggtcaagagctggatgtatttcagagagga

SEQ ID NO: 146419 - DNA, 201 bp, Homo sapiens
cctcacagaaaagcagtggcaaaataaatactgaattcatcctcctttctcattctggtctccttgcatctctcaaactcccagttagttaaatccaatcyacagcctaaggacaagggcgacctctgatgtgcctcacgtactctagcaacagagagaaatatggaggtgagtgtgggggtaggaggctgattggaaggt

SEQ ID NO: 146420 - DNA, 201 bp, Homo sapiens
gtaggtagacgagattgaaaacctaatttaggagtatgtacctgtaacaatagctgagtctcagccaatccaagcagccatacttcaaccactcatacacygctgagtgttcaaactgtgttcaaataaagcaaacacctgtaaccaacccaaatgtctctgtacctcacttctattttctctacatcactttcctttgct

SEQ ID NO: 146421 - DNA, 201 bp, Homo sapiens
ttttgtcatctctgatttctttcagcagtgttctgtatttctccttatagcgatctttcatctacttggctagctatattcctgagcatttgtgtgtgtgkgtctggctattgtctaagtggggttgtgttcttgatttgactctcagcctggacatttttggtatatacaaattctttgtacattgatttttgtatcctg

SEQ ID NO: 146422 - DNA, 201 bp, Homo sapiens
actattatagtgaaagcgaactaaatgtggcctgagaaggactccctacttctgtatttgagtccctgtggactaaccacaacctaacttagtaggtagaygagattgaaaacctaatttaggagtatgtacctgtaacaatagctgagtctcagccaatccaagcagccatacttcaaccactcatacaccgctgagtgt

SEQ ID NO: 146423 - DNA, 201 bp, Homo sapiens
tctgaaatgctacaaatgccacctggtttcctcatagctcattcatagtggccaaaattcctgcataatgaagtgagacatcatatacacagaataggtakttctgtgggtccccagaaatgaccagggacaacattatgccacaacattttcttcactgggaacatcacctgcagcccccagagcctgtcctgtccttgc

SEQ ID NO: 146424 - DNA, 201 bp, Homo sapiens
tgtgtgtgtgtctggctattgtctaagtggggttgtgttcttgatttgactctcagcctggacatttttggtatatacaaattctttgtacattgattttygtatcctgaaactttactaaagttatttatcagttctaggagccttttggaagagtctttaggattttctaagtgcagaatgataatatcagtgaagata

SEQ ID NO: 146425 - DNA, 201 bp, Homo sapiens
taatagaactagtgcactagagaatggctctgaaatgctacaaatgccacctggtttcctcatagctcattcatagtggccaaaattcctgcataatgaastgagacatcatatacacagaataggtagttctgtgggtccccagaaatgaccagggacaacattatgccacaacattttcttcactgggaacatcacctg

SEQ ID NO: 146426 - DNA, 201 bp, Homo sapiens
cagctttggctgtatatcagagattttggaaagttgtgtcccatttttactaatttcaaagaattttatttctgccttaatttcagtgtccacccaggagytacttgaagtaagctgtttaatttccatgtatttgtgtagattggagagatcttttggtttccatttctattcttattgcactgtgattagaggttatgc

SEQ ID NO: 146427 - DNA, 201 bp, Homo sapiens
aatgtattaaaaactcacccttccagtgccctccccgctgatttgtagactatctaatagaactagtgcactagagaatggctctgaaatgctacaaatgycacctggtttcctcatagctcattcatagtggccaaaattcctgcataatgaagtgagacatcatatacacagaataggtagttctgtgggtccccagaa

SEQ ID NO: 146428 - DNA, 201 bp, Homo sapiens
atgacggtatatatgtatatacgtgcatatacatatatgtatatgactgtatatatatgtatatatgtatatacgtgcatatacatatatgtgtgtgtgtrtatatatatatatagagagagagagcatgaaatactactcagtcataaaaagaaacaaaataatgtcttttgcagcaacttagttggagctggaggccat

SEQ ID NO: 146429 - DNA, 201 bp, Homo sapiens
ggaagagtctttaggattttctaagtgcagaatgataatatcagtgaagatagacgatttgacttattcttttcttatttgggtgtcttttgtttctttcycttgcctgactgccctggcaagaacttctagtactatgttgaataggagtggtgaaagtgggcatctttgtctttttccagttctcaaagtgagtggttc

SEQ ID NO: 146430 - DNA, 201 bp, Homo sapiens
ccctaggaatgaagagtcttctgataacccgatagggccctgaaagtcaaagggcaaacgagatctcgcaggacataagcttgtgatcgtttaagggggtggggggggggtcactcacgtttctgaatggaattggaggagcgtcaaagaggtgcctgtgaagaagcgcagcagtccttcaagtggagcaaaattgagttt

SEQ ID NO: 146431 - DNA, 201 bp, Homo sapiens
ccactttaagatagttgtttggcttacttgcgtttggtccatgtaaatatctgtccacatcagtgatcttttactgattacccaaggttgtacatgagtcrtgatctatcagtggctggtctttctgctttgttcaactagacagaagcccagtgagggaagagactattcctattgtgttcatagtttcattcaatgaca

SEQ ID NO: 146432 - DNA, 201 bp, Homo sapiens
aggaagacttcagggtgtctgcctatgcagcaggtggctggtacccttctgagagagagaacaggggagaagcaccgggtttatagggtcaggctcttgartttggtttgagatacccaagccaagacctcaggcaggcaggcggaaagatctttcaggacctcaggatagtggccttctctggttgtcccagctggatac

SEQ ID NO: 146433 - DNA, 201 bp, Homo sapiens
gggaggtcccgagccttctcctgtaattatcctccacttccctctcccttttctcctctcatcctcctctcagcagtcactctgcaggtctccaggtttcrcttccttcagttcactctgtaacgtatggagcatctaacctgcaccccaccatggcctgggtgccgtgggctcaggccacgaggaatgagcaccacttcc

SEQ ID NO: 146434 - DNA, 201 bp, Homo sapiens
taactctatgtatatagagagttatatagagagttttatatttagagagagttacatatatttatacacacacacacacacacacacacacacacacacayacatatatatggtttgtagagctctgaagtctggaggctagacttcctaagagaaagccaagaatatagagcacattgcaggagttaagaatggcctttg

SEQ ID NO: 146435 - DNA, 201 bp, Homo sapiens
tctaaagagaaagtcagactgatgcttctcaaactacccttcccaggtacttctgatggacatcacagggcaggctctggggactgcaggccacctccccygtgaaagggggtgtcagtggcaggaggttgtcccacaaaagggagagtttcatggccacttacatttatgaagctctgagttaaacttgttttatttact

SEQ ID NO: 146436 - DNA, 201 bp, Homo sapiens
aaggatctcatttttgcatgcctaaatcaatagtggcactgacaatatttaaatgtggtgtggaatactgggtcagaagaccacagtaagatatcatttgyccttgcagcttaacattccaagatggacagtgctggctaagggatgggagacatggactcatctggctctcatctccacaccattgagatctagacaccg

SEQ ID NO: 146437 - DNA, 201 bp, Homo sapiens
actctatgtatatagagagttatatagagagttttatatttagagagagttacatatatttatacacacacacacacacacacacacacacacacacacayatatatatggtttgtagagctctgaagtctggaggctagacttcctaagagaaagccaagaatatagagcacattgcaggagttaagaatggcctttgga

SEQ ID NO: 146438 - DNA, 201 bp, Homo sapiens
taatgaagtgagacatcatatacacagaataggtagttctgtgggtccccagaaatgaccagggacaacattatgccacaacattttcttcactgggaacrtcacctgcagcccccagagcctgtcctgtccttgcccttacataggtgccccgagtggcagcacatatgcttgcggctcttgcatcctgcacaacacagg

SEQ ID NO: 146439 - DNA, 201 bp, Homo sapiens
cccagaaatgaccagggacaacattatgccacaacattttcttcactgggaacatcacctgcagcccccagagcctgtcctgtccttgcccttacataggkgccccgagtggcagcacatatgcttgcggctcttgcatcctgcacaacacaggcaccaggctgggttggcagctatcattccacagagccagccccgtcc

SEQ ID NO: 146440 - DNA, 201 bp, Homo sapiens
gagcgcgccccacgctccgccgccggcgccgcccactcgcgagtcggggagggttccggaagcgccccatctgccccaccctccggctcctacgtgcgtgmgcccagcgcgtgtcgccccgcagctgttcggcgcccaccagtactggggaggcagaggctgggccgcagccccgcgcgtgggcgccatctctcagcagcc

SEQ ID NO: 146441 - DNA, 201 bp, Homo sapiens
tggtcctgtcctcagggtcaccaggcaggctcccagagaaaaggcactgccctgcccatcctgaacccaaacgatctctccccaaatccaaacatgtaaamcaccactcacattttcttggataatttctgggacatggatcatgtcctttctttctctgcatagctacttgaactttagctaaactatatatatcagctt

SEQ ID NO: 146442 - DNA, 201 bp, Homo sapiens
gctctttgagaaaaatgtttgtgagtttaatgtgaaaccctgaatggttttagaaagataagtgtgctagttgaaggctggtcaggaaaaggatggtcaaytctaattagaataagaaagggacaattcaataaacggactattatagtgaaagcgaactaaatgtggcctgagaaggactccctacttctgtatttgagt

SEQ ID NO: 146443 - DNA, 201 bp, Homo sapiens
tctgcttctgaatgctgatgactaatggggaagacgtgctctgccttcaggcactgagagctcacgagttgatgaaagtgtgagccacggtttctccctcygaacctacctgtcctcctctctcagatctcaaggaacccctcccaccgaatatggaatctctgcgaatcttccctgcatcatgagcataactgctccaag

SEQ ID NO: 146444 - DNA, 201 bp, Homo sapiens
gcgagctctgattttctgcttctgaatgctgatgactaatggggaagacgtgctctgccttcaggcactgagagctcacgagttgatgaaagtgtgagccrcggtttctccctctgaacctacctgtcctcctctctcagatctcaaggaacccctcccaccgaatatggaatctctgcgaatcttccctgcatcatgagc

SEQ ID NO: 146445 - DNA, 201 bp, Homo sapiens
tcacactgagcaggggaagaatgaaaacaaagaaacacagtaagagaaagggaaagagagacagacggaaggtaaggagaaggaaggaggcacatctgtgragaaaaggcctgggtaggaaacactcctctcagggtctggcagctgatcacacacctaggagggaggcgagctctgattttctgcttctgaatgctgatg

SEQ ID NO: 146446 - DNA, 201 bp, Homo sapiens
tttatttactgtaagaatttcaaagaggaaaaagactatgaaatattttcaaatgtattaaaaactcacccttccagtgccctccccgctgatttgtagastatctaatagaactagtgcactagagaatggctctgaaatgctacaaatgccacctggtttcctcatagctcattcatagtggccaaaattcctgcataa

SEQ ID NO: 146447 - DNA, 201 bp, Homo sapiens
ccctccatttttttttttttttcccttctctgaataccaaagacaattcaggccagctgcaagtgacttgccagtgttatgttttatttttgttacagatktttaacccgtttcccatttaggaaaaaataaagtgcatcttgctgccagcacggtattcttggggcaaacagaaaataggtaaatttcctccaagatcaa

SEQ ID NO: 146448 - DNA, 201 bp, Homo sapiens
gtgactatttggggagaggtaaaatcatacatttttaagattttcttccttgggtttttccatatttgtgaacattcttatctcttttgaaaccagaaacrtttattttaaacttactctatagatgtgcaggtactgaaccattgtgacatattcttgtcttgttccttctggtgacttcttccatctctgaggactggg

SEQ ID NO: 146449 - DNA, 201 bp, Homo sapiens
ctccccaaatccaaacatgtaaaacaccactcacattttcttggataatttctgggacatggatcatgtcctttctttctctgcatagctacttgaacttyagctaaactatatatatcagctttaaaagtttgaaccttattgtgcataaatatttttaaaatccaaacttgtgtctgttctgcagactgcctgatcctt

SEQ ID NO: 146450 - DNA, 201 bp, Homo sapiens
tcctgaaactttactaaagttatttatcagttctaggagccttttggaagagtctttaggattttctaagtgcagaatgataatatcagtgaagatagacratttgacttattcttttcttatttgggtgtcttttgtttctttctcttgcctgactgccctggcaagaacttctagtactatgttgaataggagtggtga

SEQ ID NO: 146451 - DNA, 201 bp, Homo sapiens
ctaagcctttcacctctgatataaaggtcatctcattattttaatttaattttgagtgaaaaactaaaaactcattgagtgcctgccatgtttcagcactsgaccatatggtgggaatacttcaacaaatataacaggtgtagcctttattctcatagtgtttgcaatcattccattctcctcctaagcaaggttttcttg

SEQ ID NO: 146452 - DNA, 201 bp, Homo sapiens
acattttcttcactgggaacatcacctgcagcccccagagcctgtcctgtccttgcccttacataggtgccccgagtggcagcacatatgcttgcggctcytgcatcctgcacaacacaggcaccaggctgggttggcagctatcattccacagagccagccccgtccctgatgtcacggagctctgggtctcctgtgcca

SEQ ID NO: 146453 - DNA, 201 bp, Homo sapiens
ctgcagcccccagagcctgtcctgtccttgcccttacataggtgccccgagtggcagcacatatgcttgcggctcttgcatcctgcacaacacaggcaccrggctgggttggcagctatcattccacagagccagccccgtccctgatgtcacggagctctgggtctcctgtgccagccaataccgagcagcccaaggtag

SEQ ID NO: 146454 - DNA, 201 bp, Homo sapiens
cctgcacaacacaggcaccaggctgggttggcagctatcattccacagagccagccccgtccctgatgtcacggagctctgggtctcctgtgccagccaayaccgagcagcccaaggtaggacgtaggcagcacaagatgggtacaggggctcagagaaggagtcaagactgaagctaagagagggtgagagtgatggaag

SEQ ID NO: 146455 - DNA, 201 bp, Homo sapiens
ttgatcatatcacacttcagtgtgtggaaggaatgaaggaaagtgtgggagaggggccagtatctccatgtggaaattaaggggtggagaagggctgaacrggggtgatatctgaagaaaggtttgtttttatgttgagaactctgaaaatatgaaagcaaaaaactaaaacaataggtgcccttattttcactatcccaa

SEQ ID NO: 146456 - DNA, 201 bp, Homo sapiens; identical to SEQ ID NO: 27205

SEQ ID NO: 146457 - DNA, 201 bp, Homo sapiens; identical to SEQ ID NO: 27203

SEQ ID NO: 146458 - DNA, 201 bp, Homo sapiens; identical to SEQ ID NO: 27204

SEQ ID NO: 146459 - DNA, 201 bp, Homo sapiens
tgagctacgaaaggcaagtaggaataaatataggtgaaggtgggctggggtaaaaagacagtgccaagggaaggggctgcacgcatagaggcctcgtgacrcccacaagcatggcctgtttgagaagctgagcagtgttcctgggcctcaaagagcaagggagaggctgtcgcccggtgaggtcagaggagcatggtcagg

SEQ ID NO: 146460 - DNA, 201 bp, Homo sapiens
tctggtgcacactttctaaatatcacctagcagggacttagcagggcctggttaaaaaggcctgacctctttagtctgaagctggacttaggactccaggycctccacctgctgctcccccctggccaggactccctgggcccagctccccttgactactcggtcacctcctcttcccaatcctgctttctcccagtcctg

SEQ ID NO: 146461 - DNA, 201 bp, Homo sapiens
ttaaatgaacacatgcataggtttgacaccacaggctgacacaagtgctggagagaaagacaaaaacaccatgaatacatttctctatggccgggcagggycagacaaggaagacttcagggtgtctgcctatgcagcaggtggctggtacccttctgagagagagaacaggggagaagcaccgggtttatagggtcaggc

SEQ ID NO: 146462 - DNA, 201 bp, Homo sapiens
ttttctctacatcactttcctttgctgcccattaatcttccaccacgtggttgctctggagtgtcagagcctactctggctcaggaggctgcctgattcaygagttgttcattgctcaattaaactcttttaaatttaatttagctgaagtttttcttttatcactttttaacaaggagtgttcagcaagcccataagtag

SEQ ID NO: 146463 - DNA, 201 bp, Homo sapiens
cccttgcagcttaacattccaagatggacagtgctggctaagggatgggagacatggactcatctggctctcatctccacaccattgagatctagacaccrgtttccagtttcttttgaggctcaataaaaagaggaatgctttgtgtagtatatcccctgtgcttgcatggtcagaccagctagttggtacagattgggt

SEQ ID NO: 146464 - DNA, 201 bp, Homo sapiens
tgagaagttacctaacagatacaatgtccagtattcaggtgatgggtacactaaagcccagactccatcactatccaatatatgcatgtaagaaatctgcrcttctacccactaaatctttaaaaataaaaaagaaagcatgcttatatttgtcttttttacatttaaacttttagatacaaagggcaaatgtgcaagtgt

SEQ ID NO: 146465 - DNA, 201 bp, Homo sapiens
aacacctcacaagagagaacaactgttgcagagcatgtagagaaagggaagtccttgtacactgttggtgggaatgtaaactggtgcagacatatgaactracatacagaggttcctcaaaaagttaaaaatacaactcacttctgagtatgtgtctgaaggaaaggaaatcggtatcttaaagagataatctgcacttta

SEQ ID NO: 146466 - DNA, 201 bp, Homo sapiens
agctagttggtacagattgggtcacaatgacagtaatagcatggacttcctagctcaggtagccacatgctcacatggcccagctccttgaaaagttcccstcatagtccttggagttttgacaggttgtctattttgaatacaccaacattctcttgcctgcttcttccttctctcactaacggttactgcagtttcagt

SEQ ID NO: 146467 - DNA, 201 bp, Homo sapiens
cagctttttatctgaatccatcttgggggaatatcagttaaattgaaagtagatttaggaatacatatccactgaatgaaattataatatgagcagagacrctgacttaaaagaaaatccctgggacttggttcttatcttagagactgggacatggattttccatgtgtcagaaatagatcttccccacaatcagattta

SEQ ID NO: 146468 - DNA, 201 bp, Homo sapiens
caatattcttacatatgatgaaagggtatgagtgtatgagtactgctatggtttgagtgccttctccaaaactcatgttggaattcagttgtctttgtgayactattaagaggtgggactaaatggggcctttgggcagcaattaggataacataaggtcattaggctgagaccccatgatgagactggtggctttataag

SEQ ID NO: 146469 - DNA, 201 bp, Homo sapiens; identical to SEQ ID NO: 27202

SEQ ID NO: 146470 - DNA, 201 bp, Homo sapiens
ccagggtgacagagtgagaccacatctcaaaaaaaggaaagaaaagaaaagtcaagcaaggaaatccaagcagaaattcagatagagaaaaatagggtccragaaatgaagacagagaacaagccactgccaccagtccttattccaaactttgtaggcatgaatggtggagacctggaagacaacataaaaaagaaaagg

SEQ ID NO: 146471 - DNA, 201 bp, Homo sapiens
taatctctagaaataattcctttattctgtcctgaaatctaaccaatcacattaactttcaaggtggcaaaaatcaaagacatgagaaaagaaaggagcayggagaatccccctctccttgaggctaggttaccattccaataatttttaaatccatccctttctctcccaacccataggctctcctacaagccaacatca

SEQ ID NO: 146472 - DNA, 201 bp, Homo sapiens
ttggggtgctcccaaagagtgggggaggtagacactcattaaatgaacacatgcataggtttgacaccacaggctgacacaagtgctggagagaaagacaraaacaccatgaatacatttctctatggccgggcagggccagacaaggaagacttcagggtgtctgcctatgcagcaggtggctggtacccttctgagaga

SEQ ID NO: 146473 - DNA, 201 bp, Homo sapiens
tattattagatgaggctttgactcaggtttgaataaactagagatctggtctgaatactttggaaatctcctttttcttgtgatagtggactgaaggagtmctgagtcaaagcccctttatcttgtttctcctcccttccccaagcatgattcttgaatataatcgacctcatgtctgcacctccaacagtgccataggga

SEQ ID NO: 146474 - DNA, 201 bp, Homo sapiens
ccataatgttgacatcttaaattcccagggcacatctgccaaaactgagaaattaacattagcacgtcactctcccctaaactacagactttatttagatytcaccagttttttcgccagtgtcttgtttccattccaggattctatcaaggatccatgctgccatcagtgactttgctcctctgattccttccaccctga

SEQ ID NO: 146475 - DNA, 201 bp, Homo sapiens
agaaaagtaactttattattagatgaggctttgactcaggtttgaataaactagagatctggtctgaatactttggaaatctcctttttcttgtgatagtrgactgaaggagtcctgagtcaaagcccctttatcttgtttctcctcccttccccaagcatgattcttgaatataatcgacctcatgtctgcacctccaac

SEQ ID NO: 146476 - DNA, 201 bp, Homo sapiens
catctacccctcagcagctttccataatgttgacatcttaaattcccagggcacatctgccaaaactgagaaattaacattagcacgtcactctcccctawactacagactttatttagatctcaccagttttttcgccagtgtcttgtttccattccaggattctatcaaggatccatgctgccatcagtgactttgctc

SEQ ID NO: 146477 - DNA, 201 bp, Homo sapiens
ctgtaatgacccacacatgataagaatcatacatggaacttttgttactcatccatatctgagagctggagactcaatgcaatttaacaaacccgatctcyccttcctctcagggttcattgccagcgttactggggagagatttatcaggattgcaatgtaaactcaggggtgagctttctcttcagccatctatttcca

SEQ ID NO: 146478 - DNA, 201 bp, Homo sapiens
tgcacctagaagctgggggacagagggaattgcttattttctggaaaaacctggcaagttgttacatatttgggaggcatttcacactcctccttttctcstcatcctccctacatgtcccgaagctgtttgaattccttcctcacttggtgcttaaatgcttaggcctgatgagaggaggagcctgactctgggaagtgc

SEQ ID NO: 146479 - DNA, 201 bp, Homo sapiens
tttttggctttttgagtttgtttttgtttttttttcattgaacttgatgaatctaatgactatgtgccttggagatggtcatcttttatagtatgtggtgragcttctctatatttctcgaatttgcatgtcaacctctctagcaagattagggaaaatgttcatgaactataacctcaaacacattttccaagttgctta

SEQ ID NO: 146480 - DNA, 201 bp, Homo sapiens
attttggaaatccagctgttttctttttgcacctagaagctgggggacagagggaattgcttattttctggaaaaacctggcaagttgttacatatttggraggcatttcacactcctccttttctcgtcatcctccctacatgtcccgaagctgtttgaattccttcctcacttggtgcttaaatgcttaggcctgatga

SEQ ID NO: 146481 - DNA, 201 bp, Homo sapiens
acgccattatttaaactagccaagacacagaaacaacctatcagtccacagagggatgactggatacagaaaatgcggaatatatatttaatgaaatataytcagccagaggaaggcagaaaccgccacctgtgaccttgtgtctgacctggaggtcgtcatgctaagaaaaatgatcccgacagagaaaggtaaacccag

SEQ ID NO: 146482 - DNA, 201 bp, Homo sapiens
cagaggaaggcagaaaccgccacctgtgaccttgtgtctgacctggaggtcgtcatgctaagaaaaatgatcccgacagagaaaggtaaacccaggattgygtcacttaactgtggactccagggagcgcgccccacgctccgccgccggcgccgcccactcgcgagtcggggagggttccggaagcgccccatctgcccc

SEQ ID NO: 146483 - DNA, 201 bp, Homo sapiens
taacataaggtcattaggctgagaccccatgatgagactggtggctttataagaagaggaataaagtcatgagcagatgcacccatgcctgcctaccatgwgaacacctcatgctatagtatggtgcagcacagaggcccttgccaggtgctggtgccatgcttttgaacttggtgacaacaagactatgagctaaataaa

SEQ ID NO: 146484 - DNA, 201 bp, Homo sapiens
tcattaataatgctactgaatattagtttgagatagtcataattttttcttatatttgttttattgatgtagtttttcactgtatttgtccaagaaattasctctaactgctgaaataaaaaggcttttgaggctggacgcggtggctcacgcctgtaatcccagcactttgggaggccgaggagggtggatcacaaggtc

SEQ ID NO: 146485 - DNA, 201 bp, Homo sapiens
ttaaaaatatttctaatgaaacaaaaagcacaacttatcaaatgtgtgggatgcagcaaagcagtgcttagaggaaaatttatagcattgattgcatacaytaaaaataagatatacaaccaataatctaagctcccaccttaataaactagaaagggaatattaaattaaatatgaagaaaaaaattaaaacataataaa

SEQ ID NO: 146486 - DNA, 201 bp, Homo sapiens; identical to SEQ ID NO: 27207

SEQ ID NO: 146487 - DNA, 201 bp, Homo sapiens
tctcaaagtaatgggattacaggcatgagccaccacacccagccccagaaagctctcaaatattcatattgaatttcatacaagttagcatatattttcaygtgtttacgctcagagatggctgagtcctgaaggtagacatagaggagggtgagcttaagaactttactaaagcacttacatttcacttgcacacacata

SEQ ID NO: 146488 - DNA, 201 bp, Homo sapiens
tagctttggagttgtttgttcttctttcctagttcctttaagtacaaagttagcttattaatttcaaatctttctgactttttgttgaaggcattgaaggstactttcctcttaacacagctttggctgtatatcagagattttggaaagttgtgtcccatttttactaatttcaaagaattttatttctgccttaatttc

SEQ ID NO: 146489 - DNA, 201 bp, Homo sapiens
atattaacatttatatgagaaatatattaatatattaatatatttgtatatttgtatattagaaatatattaatatattaatatatttctcatatttgtayattagaaatatattaatattactattacattgtattaataataatcatattaatattcctcataaaattttatatatgaaatattttttcaatatctcaa

SEQ ID NO: 146490 - DNA, 201 bp, Homo sapiens
ggactccagggagcgcgccccacgctccgccgccggcgccgcccactcgcgagtcggggagggttccggaagcgccccatctgccccaccctccggctccwacgtgcgtgcgcccagcgcgtgtcgccccgcagctgttcggcgcccaccagtactggggaggcagaggctgggccgcagccccgcgcgtgggcgccatct

SEQ ID NO: 146491 - DNA, 201 bp, Homo sapiens
acataaaagtgaatattaacatttatatgagaaatatattaatatattaatatatttgtatatttgtatattagaaatatattaatatattaatatatttstcatatttgtacattagaaatatattaatattactattacattgtattaataataatcatattaatattcctcataaaattttatatatgaaatattttt

SEQ ID NO: 146492 - DNA, 201 bp, Homo sapiens
taaaaataagatatacaaccaataatctaagctcccaccttaataaactagaaagggaatattaaattaaatatgaagaaaaaaattaaaacataataaawattttaatagaaataaatgaaattgaaaacagaaatactataaagaaaattaccatcagctagggctgttttttttttttttgcttttttcttctaataa

SEQ ID NO: 146493 - DNA, 201 bp, Homo sapiens
agtgggagccaaatcttagatacagatggacataaagatgggaacaacacaccctgtagaatccaaaaggagggagggaggaatgaggacaagaactgaaktcctattgggtactacgttcactgtctggatgatcggatcaatagaagtcaaacccttagcatcatacagtttacccttgtagcaaacctgcacatgtac

SEQ ID NO: 146494 - DNA, 201 bp, Homo sapiens
tgaaacaaaaagcacaacttatcaaatgtgtgggatgcagcaaagcagtgcttagaggaaaatttatagcattgattgcatacattaaaaataagatatayaaccaataatctaagctcccaccttaataaactagaaagggaatattaaattaaatatgaagaaaaaaattaaaacataataaatattttaatagaaata

SEQ ID NO: 146495 - DNA, 201 bp, Homo sapiens
attaaaaataagatatacaaccaataatctaagctcccaccttaataaactagaaagggaatattaaattaaatatgaagaaaaaaattaaaacataatamatattttaatagaaataaatgaaattgaaaacagaaatactataaagaaaattaccatcagctagggctgttttttttttttttgcttttttcttctaat

SEQ ID NO: 146496 - DNA, 201 bp, Homo sapiens
cttaaattcccagggcacatctgccaaaactgagaaattaacattagcacgtcactctcccctaaactacagactttatttagatctcaccagttttttcrccagtgtcttgtttccattccaggattctatcaaggatccatgctgccatcagtgactttgctcctctgattccttccaccctgaaaatgcttttcctcc

SEQ ID NO: 146497 - DNA, 201 bp, Homo sapiens
ctgggttggcagctatcattccacagagccagccccgtccctgatgtcacggagctctgggtctcctgtgccagccaataccgagcagcccaaggtaggaygtaggcagcacaagatgggtacaggggctcagagaaggagtcaagactgaagctaagagagggtgagagtgatggaagctttggctcttctgcagctcca

SEQ ID NO: 146498 - DNA, 201 bp, Homo sapiens
ggcatttacagatggggcctttgggaggtgattaggtttagacaaagggttctttgaggcacagaaagatggccttgaggaaggttgacattagagcttcktgtcatgcaaatgtggggtcagtcctccctcccccttccagattctcctagttgtgctttggatcccaggtggctccgcccaggacacacagacccagag

SEQ ID NO: 146499 - DNA, 201 bp, Homo sapiens
ccgactgggcagcaggcactctgctgggtggcagggaaggccaagagctggcaggatgactgctgcctctgcaaagcaactgcacagtgagttgagggackaaatacacgaaagccattgccatcgccatgctgaagtggtaaatgacagtcaaaagtagacatttcagcatttctataccttttccattagaattttttg

SEQ ID NO: 146500 - DNA, 201 bp, Homo sapiens
gtgtcacagattttacagatgtaattaagttcccaaaaatcagttgatcttaagatacaagaattatcctcagtggacctgttctaaccaggcaacacttaaaaaaaaaaccaggattctccctggagatggagatgtaaagcttgggtggaatttgatgtgagggagattgtttgttcctggattggaagatgaagggga

SEQ ID NO: 146501 - DNA, 201 bp, Homo sapiens
tgccctccatacccaagttcatagtcagggtggtgcagtgcatgggaatggacaactggttaggagtcacgacaacttgctccagcccaggtctgcaactmagttgccagtgtcttccactctccatcaatgcacacaacctagacagttagtttctccctcctttccactcactaagcctttcacctctgatataaaggt

SEQ ID NO: 146502 - DNA, 201 bp, Homo sapiens
ggccaaatctggaagggatttttaaaaattacttctacttaatcgcattgcctggactaaggggaagtggaaggtatagaaaacacacggagtgttgggtrtgagcttacagtgttttctataaaagtgcccctctaacagtgatctcataaagtgcactgagaatagttgccaaagttttgttaagagctttttgggcag

SEQ ID NO: 146503 - DNA, 201 bp, Homo sapiens
aaatcttttatggtcagtcttgaacagttttttggggtccaggtctccacagatgccaacagggcacattagagtatgggaagcaattttccaagagtagygagttctgctgtggctgccagatgacccgactgggcagcaggcactctgctgggtggcagggaaggccaagagctggcaggatgactgctgcctctgcaa

SEQ ID NO: 146504 - DNA, 201 bp, Homo sapiens
aagttagttaggcgtgatggcgggtgcctgtaatcccagctgctcgggaggctgaggcagagaattgcttgaatctgggaggcagaggttgcagtgagccragatcgcaccactgcactccagcctgggcaacagagcgagactccgtctcaaaaaaaaaaaaagaaaaaaaagaaaagcttctgtaatttcagtggttta

SEQ ID NO: 146505 - DNA, 201 bp, Homo sapiens
agcctcacttatattttagtttaattgtggggaccgataatactctaggatggaagccaagttaaaacattgccctaatgagcaggcatggagcccgtttycggataatttatatattaggaagtattttcaaagtaatatctccagctctaaatcttttatggtcagtcttgaacagttttttggggtccaggtctccac

SEQ ID NO: 146506 - DNA, 201 bp, Homo sapiens
tgtagtcttgctctgttgcccaggctgaagtgcaatggcgcaatcttggttcactgcaaccaccgtctcctgggttcaagcaattctcctgactcagcttycggagtagctgggattacaggtgcaagccactgcacccggctaatttttgtatttttagtagagatggggtttcgccatgttggccagggtggtcttgaa

SEQ ID NO: 146507 - DNA, 201 bp, Homo sapiens
tgaaagcctcacttatattttagtttaattgtggggaccgataatactctaggatggaagccaagttaaaacattgccctaatgagcaggcatggagcccktttccggataatttatatattaggaagtattttcaaagtaatatctccagctctaaatcttttatggtcagtcttgaacagttttttggggtccaggtct

SEQ ID NO: 146508 - DNA, 201 bp, Homo sapiens
tacccacccagatttattttttacccttttgcattctgctatatgtccaggaagctagtttttattaatacactcacgagttcccttgccctccaactctyaattaggtgcagcccatgtacaggtctgacaaggactgggaggtgggagggaagtgagatttatatcccagctttcctgataatggcctttttttttttg

SEQ ID NO: 146509 - DNA, 201 bp, Homo sapiens
aacagtatagtattccatcacatttacccacccagatttattttttacccttttgcattctgctatatgtccaggaagctagtttttattaatacactcaygagttcccttgccctccaactcttaattaggtgcagcccatgtacaggtctgacaaggactgggaggtgggagggaagtgagatttatatcccagctttc

SEQ ID NO: 146510 - DNA, 201 bp, Homo sapiens
tcactcattcaacagaaataaactgagtgcttgctgcacacaacaagcccagggcaagcatgggggcatgtgacagtggcctgcctgtcccccggagtgcwcacacagggcaagtctctttcctcagtgtagctactttgatagaaacagcaagcaccagaataattggggggtgaaagggcttcctgccagcctcactca

SEQ ID NO: 146511 - DNA, 201 bp, Homo sapiens
tagggaaacagtatagtattccatcacatttacccacccagatttattttttacccttttgcattctgctatatgtccaggaagctagtttttattaatayactcacgagttcccttgccctccaactcttaattaggtgcagcccatgtacaggtctgacaaggactgggaggtgggagggaagtgagatttatatccca

SEQ ID NO: 146512 - DNA, 201 bp, Homo sapiens
gcatgggggcatgtgacagtggcctgcctgtcccccggagtgcacacacagggcaagtctctttcctcagtgtagctactttgatagaaacagcaagcacyagaataattggggggtgaaagggcttcctgccagcctcactcagtccgtttgtgtctctccgaggagcccttgccttgctgggtcagtgctcagactcca

SEQ ID NO: 146513 - DNA, 201 bp, Homo sapiens
atttcataatgtgtccccatttcttattagtattataaaaggaatcatattaaatctataaatgatggtgggactactgacatttttttcattcaacttcyaatttagggaaacagtatagtattccatcacatttacccacccagatttattttttacccttttgcattctgctatatgtccaggaagctagtttttatt

SEQ ID NO: 146514 - DNA, 201 bp, Homo sapiens
taattcccccattattgccagtcttttgttttattattatcatttttaacctctttatttttccagatgaacttaaggattatttcataatgtgtccccawttcttattagtattataaaaggaatcatattaaatctataaatgatggtgggactactgacatttttttcattcaacttctaatttagggaaacagtata

SEQ ID NO: 146515 - DNA, 201 bp, Homo sapiens
ttctgaaaaatgtctgtgcatgcacacatacacacacacacacacaccaccaccaagggtgtggaagaagcaggacagaaaacagaaagaaggaagccaascaagagtgtgatttcaggagaagccccagacataggcagaccccacagggagcactggagcatgagtcgacctcagagtctgtcctgagcctagcgggga

SEQ ID NO: 146516 - DNA, 201 bp, Homo sapiens
tgcatgcaaatgattgtgttggagatgaagtcattcatttgatcctattaatttacatgtatgtgtataaacttgtacaaatgacttttattattatatgyatgtatatgtaaaaataattcccccattattgccagtcttttgttttattattatcatttttaacctctttatttttccagatgaacttaaggattattt

SEQ ID NO: 146517 - DNA, 201 bp, Homo sapiens
gctgagtgactggtcactagagatgagcaggaatagaagggaccaggtgctaatcattgagaaaaaggggaaacagtcctgaaggcatttctgagatcatygatatggcccctcacaggcccagagctctaggagggcaaaatggttttgcgggtctggccaggggatccctccatgtctcactgccctgtgccacctcag

SEQ ID NO: 146518 - DNA, 201 bp, Homo sapiens
ggctgcattatgtccatgtcctaggacattatggaaggtggaacctaagagtggtgagctgggccaaaaaaaaaaaaaaaatctaagccacaaagtgttcyggatactgcatggctgttcttgaatgcttacagtgagatatgggagcaaagagatgatttcaagcagaataataattaaaatggaagccaagtataaaaa

SEQ ID NO: 146519 - DNA, 201 bp, Homo sapiens
tactgcagtttcagtaggcactgtggtctccttcccaactgcatcactaggaggctgggtccctgatgcagcccagtcttgggggtggtgtgtgaagaaayggatggattcatcttctttgtggtcctctctagccccatcttaatcctgcttgcgtgcctgtatctcacatgatcctcatggcattgacctctgtttact

SEQ ID NO: 146520 - DNA, 201 bp, Homo sapiens
gttatagcaacagaaaatggactgagacagaaaattggtactgagatgtgggattgtcactataaaaattcctgaatatttggaggtagtttggtattggrtaatgggtagaaaatggaagaatgtgaagcaacaggctcagaaaagcgtgttgcatagtggcagaagcagaggattaggggtaattcttgtgaagattca

SEQ ID NO: 146521 - DNA, 201 bp, Homo sapiens
tgtgaatgtatacatatatgcatgtatatatacatatatgtatgtgtatgtatggtcacagcgcacatatatgtatatacatacacacacacacatatatwcacacacacgcacaccatacaatagtactcagtcataaataagaatgaattcatgtcttctgcagcaacatgaatggcactggaggctatatatcccaag

SEQ ID NO: 146522 - DNA, 201 bp, Homo sapiens
catgtatataggtgtgtatatgtacataggtatatatgtgtgaatgtatacatatatgcatgtatatatacatatatgtatgtgtatgtatggtcacagcrcacatatatgtatatacatacacacacacacatatattcacacacacgcacaccatacaatagtactcagtcataaataagaatgaattcatgtcttctg

SEQ ID NO: 146523 - DNA, 201 bp, Homo sapiens
taatgggattacaggcatgagccaccacacccagccccagaaagctctcaaatattcatattgaatttcatacaagttagcatatattttcacgtgtttaygctcagagatggctgagtcctgaaggtagacatagaggagggtgagcttaagaactttactaaagcacttacatttcacttgcacacacatagtgacaat

SEQ ID NO: 146524 - DNA, 201 bp, Homo sapiens
tgtggtctccttcccaactgcatcactaggaggctgggtccctgatgcagcccagtcttgggggtggtgtgtgaagaaacggatggattcatcttctttgyggtcctctctagccccatcttaatcctgcttgcgtgcctgtatctcacatgatcctcatggcattgacctctgtttacttgtgtctctttgtcctcttgc

SEQ ID NO: 146525 - DNA, 201 bp, Homo sapiens
ttactattgcaaaagaaatctttagagatgtttctgtttattttactttgtattctgaaaaatagctggcatttctgttttgttactgccggtcaagtaatatatatcttgtgattctcattaataatgctactgaatattagtttgagatagtcataattttttcttatatttgttttattgatgtagtttttcactgta

SEQ ID NO: 146526 - DNA, 201 bp, Homo sapiens
gttttgacaggttgtctattttgaatacaccaacattctcttgcctgcttcttccttctctcactaacggttactgcagtttcagtaggcactgtggtctccttcccaactgcatcactaggaggctgggtccctgatgcagcccagtcttgggggtggtgtgtgaagaaacggatggattcatcttctttgtggtcctct

SEQ ID NO: 146527 - DNA, 201 bp, Homo sapiens
agctgagtcaaactagttgtttctgatggcttcatttaggatctcttccttcccagaaaactcttttctatttttattttttgaaaacacccaggctggartacagtggcacaatcatagcttaatacagccttgagctcctttgctcaggtgattctctcacattagcctcccaagcagctgggacttgaggcacaagcc

SEQ ID NO: 146528 - DNA, 201 bp, Homo sapiens
aaaggtcatccttgttataaagcaggaaagaacttggctgcattatgtccatgtcctaggacattatggaaggtggaacctaagagtggtgagctgggccaaaaaaaaaaaaaaaatctaagccacaaagtgttccggatactgcatggctgttcttgaatgcttacagtgagatatgggagcaaagagatgatttcaagc

SEQ ID NO: 146529 - DNA, 201 bp, Homo sapiens
aaggtcatccttgttataaagcaggaaagaacttggctgcattatgtccatgtcctaggacattatggaaggtggaacctaagagtggtgagctgggccaaaaaaaaaaaaaaaatctaagccacaaagtgttccggatactgcatggctgttcttgaatgcttacagtgagatatgggagcaaagagatgatttcaagca

SEQ ID NO: 146530 - DNA, 201 bp, Homo sapiens
gggaaacagtcctgaaggcatttctgagatcattgatatggcccctcacaggcccagagctctaggagggcaaaatggttttgcgggtctggccaggggayccctccatgtctcactgccctgtgccacctcagagctctgctcactgcattctggtgcagcactttttagccccagctgtggctcaggcagccccagttg

SEQ ID NO: 146531 - DNA, 201 bp, Homo sapiens
attactattgcaaaagaaatctttagagatgtttctgtttattttactttgtattctgaaaaatagctggcatttctgttttgttactgccggtcaagtaatatatatcttgtgattctcattaataatgctactgaatattagtttgagatagtcataattttttcttatatttgttttattgatgtagtttttcactgt

SEQ ID NO: 146532 - DNA, 201 bp, Homo sapiens
ctgagccataaaacacacattaacaaatataaaaaaatgaaaatcatacaatgtatacttgcagacaacaatggaattacagtagaaattaataacaaaaagatagcaagaagacttcgaaatacttagataataaacaacacccttataactaataggtcaaagaagaaatctcaagaaaaatttaaaaatatttctaat

SEQ ID NO: 146533 - DNA, 201 bp, Homo sapiens
tgagccataaaacacacattaacaaatataaaaaaatgaaaatcatacaatgtatacttgcagacaacaatggaattacagtagaaattaataacaaaaagatagcaagaagacttcgaaatacttagataataaacaacacccttataactaataggtcaaagaagaaatctcaagaaaaatttaaaaatatttctaatg

SEQ ID NO: 146534 - DNA, 201 bp, Homo sapiens
tgcttttcctccatttctacacactgtaactctcaatcaagggtgagttctgaaatcagtccacacgcttgtttatttgttccttcaggcatttattcagygtcacttatttggagactcctcggtgccaggaattaacccagttctgagactacactgatgagcaggaacattacatgtgtgttcttggggtgctcccaa

SEQ ID NO: 146535 - DNA, 201 bp, Homo sapiens
gagccataaaacacacattaacaaatataaaaaaatgaaaatcatacaatgtatacttgcagacaacaatggaattacagtagaaattaataacaaaaagatagcaagaagacttcgaaatacttagataataaacaacacccttataactaataggtcaaagaagaaatctcaagaaaaatttaaaaatatttctaatga

SEQ ID NO: 146536 - DNA, 201 bp, Homo sapiens
ataggtttgacaccacaggctgacacaagtgctggagagaaagacaaaaacaccatgaatacatttctctatggccgggcagggccagacaaggaagactycagggtgtctgcctatgcagcaggtggctggtacccttctgagagagagaacaggggagaagcaccgggtttatagggtcaggctcttgaatttggtttg

SEQ ID NO: 146537 - DNA, 201 bp, Homo sapiens
cagggccagacaaggaagacttcagggtgtctgcctatgcagcaggtggctggtacccttctgagagagagaacaggggagaagcaccgggtttatagggkcaggctcttgaatttggtttgagatacccaagccaagacctcaggcaggcaggcggaaagatctttcaggacctcaggatagtggccttctctggttgtc

SEQ ID NO: 146538 - DNA, 201 bp, Homo sapiens
ctagagatgagcaggaatagaagggaccaggtgctaatcattgagaaaaaggggaaacagtcctgaaggcatttctgagatcattgatatggcccctcacrggcccagagctctaggagggcaaaatggttttgcgggtctggccaggggatccctccatgtctcactgccctgtgccacctcagagctctgctcactgca

SEQ ID NO: 146539 - DNA, 201 bp, Homo sapiens
ttatttaatctctgtgtgtgcctccgtctttctcttgtaaaacagagataataacaggatctaccctagagagttattttaaggatgagatggattaatayatgtaaaatgcctagaactgtgcctggcacacagtatgtaaatatctgcaataataataactttctattttctagatgaagaaactaagactcagagaag

SEQ ID NO: 146540 - DNA, 201 bp, Homo sapiens
ttccaaattgccatcctttctgcgtgctgttagggacttcccccagctctccctgcagagtgaggagtactctgagacagacgggtctaggatgaactgtkttgatggagaaatgaacattttttggagggaaggaagatttcggggtgtggggcataagttgaaggagtatggctctgaaagtccttgggcagtttgtag

SEQ ID NO: 146541 - DNA, 201 bp, Homo sapiens
ctcaaactcttgacctcacatgatccgcccgccacagcctcccaaagtgctgggattacaggcgcaaaccaccgcccccagccctcttccctactgccttsatgtgttcatctgggcaatgtgtgttgagggggcatagggaggggagctctaaggcaaatgtgctgggattctgcattcgtcatcctcaaaacaaaattg

SEQ ID NO: 146542 - DNA, 201 bp, Homo sapiens
gcccaaagacacattgataagaacgcatctggtagtggtgttcgagtccagcgttgcagcagagagatgggtaactgtatggccgaacagctgtcctctcrtggaagaaggaggccaatgtccaggagtggcaggcatactggaacttggacttctgtaggccaacctgggttccacttggtagatgggggtcttgctgtg

SEQ ID NO: 146543 - DNA, 201 bp, Homo sapiens
ctaccttcagtcatcttgttctcaagcctgaagtgctggatccactcagctgcaacccagctcaacacctctgtggaagctttgcccatcaatcaggagamgctgagatccagagactgatgcccacgttctgtctttgcagagggaagcccaccagagccctcttctctctggggaggagctggctccctgaatctccaa

SEQ ID NO: 146544 - DNA, 201 bp, Homo sapiens
gggtttcgccatgttggccagggtgatctcaaactcttgacctcacatgatccgcccgccacagcctcccaaagtgctgggattacaggcgcaaaccaccrcccccagccctcttccctactgccttgatgtgttcatctgggcaatgtgtgttgagggggcatagggaggggagctctaaggcaaatgtgctgggattct

SEQ ID NO: 146545 - DNA, 201 bp, Homo sapiens
atgaggtctcactatattgcccactccagtctcgaacttctggcctcaaggagtcctgtctccccctcccaaagtactgggattataggcatgagcaaatkcacttggcctcagtttgatcctaatatatctttaattcctctctacacttatctcccacttttaacagaaaagatcttgagttagaagctcttagcagag

SEQ ID NO: 146546 - DNA, 201 bp, Homo sapiens
gcataatgtgcaaagccagtaagatgcctttgcctcatccccagggaacatgcctcccagccactttcatctcacctagtgcctacacagaaaggcaaccrcctccctgctgaagggaccccacgcctgtctcctgtttccacacaattaccccgggaaatgcctggcttcccatttccagttgcagccatcttgacagtt

SEQ ID NO: 146547 - DNA, 201 bp, Homo sapiens
ctctcccacctccacctctggccttctcagtggtcctatggctccctaccttcagtcatcttgttctcaagcctgaagtgctggatccactcagctgcaayccagctcaacacctctgtggaagctttgcccatcaatcaggagaagctgagatccagagactgatgcccacgttctgtctttgcagagggaagcccacca

SEQ ID NO: 146548 - DNA, 201 bp, Homo sapiens
cctacacagaaaggcaaccgcctccctgctgaagggaccccacgcctgtctcctgtttccacacaattaccccgggaaatgcctggcttcccatttccagytgcagccatcttgacagtttcagcctctccccacagcccacgtccctcacttgagcagcgagatgtgaagacagacagccgcttgagaactgcacagact

SEQ ID NO: 146549 - DNA, 201 bp, Homo sapiens
agagatgaggtctcactatattgcccactccagtctcgaacttctggcctcaaggagtcctgtctccccctcccaaagtactgggattataggcatgagcmaattcacttggcctcagtttgatcctaatatatctttaattcctctctacacttatctcccacttttaacagaaaagatcttgagttagaagctcttagc

SEQ ID NO: 146550 - DNA, 201 bp, Homo sapiens
gacatgcccaaagacacattgataagaacgcatctggtagtggtgttcgagtccagcgttgcagcagagagatgggtaactgtatggccgaacagctgtcytctcgtggaagaaggaggccaatgtccaggagtggcaggcatactggaacttggacttctgtaggccaacctgggttccacttggtagatgggggtcttg

SEQ ID NO: 146551 - DNA, 201 bp, Homo sapiens
cagctctccctgcagagtgaggagtactctgagacagacgggtctaggatgaactgtgttgatggagaaatgaacattttttggagggaaggaagatttcrgggtgtggggcataagttgaaggagtatggctctgaaagtccttgggcagtttgtagaggacagagaaggtggtaatgtcagtttctgcccctctcccac

SEQ ID NO: 146552 - DNA, 201 bp, Homo sapiens
ctcatttctgcccagagacacctggtgatctggcatacacagtgctatgaacctcagaattatttgctagcatttacaaattgtgagtactcccacatacraactgtggtagatggaataatgcctccccacaaaaatgtccacagcctaatccctggaacctgggaatatgttactttacacagcaaaggaatgttgcag

SEQ ID NO: 146553 - DNA, 201 bp, Homo sapiens
ccttaatctaagccatttaaaaggcatttgtgttccataaaacccgtttctgtaattctgtgcccctacttctttgaaagatgataaccctagggaggagrttagccagggaggagaagttcagatgtgctaatattttaatcgctcattctttcatcacattagtcacattcattaaatatgattaatttcaggctttgt

SEQ ID NO: 146554 - DNA, 201 bp, Homo sapiens
gaggaggcgcgggacgcgtgacgacagcgcgccgccggaaaggaaattctgcagtcctgcagggcggggcaaacttggagaggcgctgcgtcgggggacgrggctacaagccgtcgctgggggcggggcttgcggcccacctgtaggtcccggtgccacctcgtcagtgtcccgagagatccccagaagaacgagagggct

SEQ ID NO: 146555 - DNA, 201 bp, Homo sapiens
agatgataaccctagggaggagattagccagggaggagaagttcagatgtgctaatattttaatcgctcattctttcatcacattagtcacattcattaartatgattaatttcaggctttgttgaaaaccctatcagtttccctatcagccacacatccatctcttgccaagcaggctggtgcagtagcaccaaaagtcc

SEQ ID NO: 146556 - DNA, 201 bp, Homo sapiens
ttgtagaggacagagaaggtggtaatgtcagtttctgcccctctcccacctccacctctggccttctcagtggtcctatggctccctaccttcagtcatcytgttctcaagcctgaagtgctggatccactcagctgcaacccagctcaacacctctgtggaagctttgcccatcaatcaggagaagctgagatccagaga

SEQ ID NO: 146557 - DNA, 201 bp, Homo sapiens
cgaccttccaaccacggcgcaggcgcgaggaggcgcgggacgcgtgacgacagcgcgccgccggaaaggaaattctgcagtcctgcagggcggggcaaacytggagaggcgctgcgtcgggggacggggctacaagccgtcgctgggggcggggcttgcggcccacctgtaggtcccggtgccacctcgtcagtgtcccga

SEQ ID NO: 146558 - DNA, 201 bp, Homo sapiens
tagcaccaaaagtcccccagtgttttttacacctggattgtattatgtgccccctgaaaatgtgtggaattaattgagctcatttgtttcaaatactttgcaagagcctgggctcttgagtcaggcggcctaagtgtgatcctaagtcctcccattgctggagtcacctgggcaagtgactgacgccctctgagccctggt

SEQ ID NO: 146559 - DNA, 201 bp, Homo sapiens
gcgtgacgacagcgcgccgccggaaaggaaattctgcagtcctgcagggcggggcaaacttggagaggcgctgcgtcgggggacggggctacaagccgtcrctgggggcggggcttgcggcccacctgtaggtcccggtgccacctcgtcagtgtcccgagagatccccagaagaacgagagggctgaacaggggacccca

SEQ ID NO: 146560 - DNA, 201 bp, Homo sapiens
gagactgatgcccacgttctgtctttgcagagggaagcccaccagagccctcttctctctggggaggagctggctccctgaatctccaagacaaacccagmcagccctggggaccttgaatgtgagcaaggggagcagaaaggaggctccagcccacccagggcccctgcagggtctgcacacacaattacaggtcctcat

SEQ ID NO: 146561 - DNA, 201 bp, Homo sapiens
ttaatctaagccatttaaaaggcatttgtgttccataaaacccgtttctgtaattctgtgcccctacttctttgaaagatgataaccctagggaggagatyagccagggaggagaagttcagatgtgctaatattttaatcgctcattctttcatcacattagtcacattcattaaatatgattaatttcaggctttgttg

SEQ ID NO: 146562 - DNA, 201 bp, Homo sapiens
taagcagtgcacagaattggctctgtgctgtgcatgggctctgtgatctgggcaagttccctcacctctctgtgcctcagtttcctcacctgccaaatggrggcagtaatgatgccatgtgtgttgtaaagttactgggaggagtaaatgaactaaaacgtgtaaagcatctacaagcaggcccagcacacaggcagcacc

SEQ ID NO: 146563 - DNA, 201 bp, Homo sapiens
taataaaattgcattattttaagccactcgaggcccatgtcctcaacaaagagaaagacggtggggtgctgtcagccagggtaggtacctgcttggtggtytgggtcctttcccactgtgtccattcagttacattacctgcccatctgctgaggcctcgagtttgggacctcaggtttatataattccttgcacaagcat

SEQ ID NO: 146564 - DNA, 201 bp, Homo sapiens
tgattggagattgagatagggagagtgtattagtctgttgtcatgcggctatgaagaaatacctgagactgggtaatttacaaagaaaagaggtttaattsacttacagctcagcacggctggttgggggggcgccctcaggaaatttacaatcatggtaggaggcacctcttcacagggtggcaggagagaaaataagag

SEQ ID NO: 146565 - DNA, 201 bp, Homo sapiens
tactctcaagattggaggctgcctcctcaggggccaccctagccaggctcatcacacagctggctcagtgctctcccttggcaacaaccttaggataaaaracatttccagagaagttgtcacacagcatgcatggtttgagtgcttcacaagaaataatatcacaattccctctgagttggtaaggaaatgaaaaatgaa

SEQ ID NO: 146566 - DNA, 201 bp, Homo sapiens
tcagagaagacaaatgacatgcccaaagacacattgataagaacgcatctggtagtggtgttcgagtccagcgttgcagcagagagatgggtaactgtatrgccgaacagctgtcctctcgtggaagaaggaggccaatgtccaggagtggcaggcatactggaacttggacttctgtaggccaacctgggttccacttgg

SEQ ID NO: 146567 - DNA, 201 bp, Homo sapiens
tgatgagagagacagcagcaaacacagcagtcaaatgcgtgtggcccccaggaccttatattttagtggtggaagctagacaaccaccaaacatgtaatayaccagatggtggtacgttctatggaggaaagaaaggacgaggggcagggagtcctgggctggtgggacagggtgctatggctcagagggaactcagagat

SEQ ID NO: 146568 - DNA, 201 bp, Homo sapiens
agagatcatcaggttctgctgctggctttttaggtagtaaaatggtaaatcttatatttaatttcataagaagggggtttacattttcctgaccttctccytgaaggccaaagctgtttggcaagaaggggttgtaggatgcagtttctaaaggaaggctgagatccttttctcttctctcctgtagactacatttggtca

SEQ ID NO: 146569 - DNA, 201 bp, Homo sapiens
tgtttgtcaggtccttccttgtgggagaagctgctcgggctctgtctaaggcgtgcaccattgccatccgatacagcgctgtgaggcaccagtctgaaatsaagccagggtaaggatagggtcctagatgggctcagtaccaaaggcctagtttttaccccattcagatcccagaattcccaaatgtcaatacagaagatg

SEQ ID NO: 146570 - DNA, 201 bp, Homo sapiens
aacagccccgaaagcctaaccgaagcatataaactccgtgcagccaggtgagctctccctcaagagctagaatacgcagcagtggggctggggccctgacrgatggcaagaaggcatgagtactgttgatcatttcctcagacctccaatctatgtcttaacagattagtagaaattgctgcaaaaaaccttcaaaaagaa

SEQ ID NO: 146571 - DNA, 201 bp, Homo sapiens
agcaaggaggtagcttggaacctaacttctgttgaccttgttcgagcaagtgaggtcagtggtagttctctctttttccccttccctgccctcagcatccygcattttctggtacagaaaccctagtcactgtatattgaatctttttccaaggttctcaaactctggtgttttctttttaatcttaggcacattgccact

SEQ ID NO: 146572 - DNA, 201 bp, Homo sapiens
atctcctgacctcgtgatccacccgccttggcctcccaacgtgctgggattacaggcgtgagccaccgcgcccggctactattatttcttttaaggtggtrgtttggtttcagggtcccccagcactgcaatggcagcctatcccttctgtcctttagttcatgctctgctcattgcacaggttaggataaactggtagta

SEQ ID NO: 146573 - DNA, 201 bp, Homo sapiens
ctgctcgggctctgtctaaggcgtgcaccattgccatccgatacagcgctgtgaggcaccagtctgaaatgaagccagggtaaggatagggtcctagatgrgctcagtaccaaaggcctagtttttaccccattcagatcccagaattcccaaatgtcaatacagaagatgcattagcactgcaaaattggctagggtgat

SEQ ID NO: 146574 - DNA, 201 bp, Homo sapiens
atgtgatgtagagttaatccgtagtaatgttcattgaccattggggataaatttttacatgcccacattacttattgtaaaccctgaagacctttagcgawgtatgattctgccctggaatatgtatttactcttttggatatttgcttatattatctagggaaacatagttgaaattatttcttccttggagctcttgtt

SEQ ID NO: 146575 - DNA, 201 bp, Homo sapiens
gggaggcaaaggctgcactgagccgagatcacgccactgcactccagactgggcaacaaagagagactctgtctcaaaaaaaaaaaaaaaaaaaaaaaagmcttttttgccttaacctaaacaaacactattacatgatcctagtacaagattattttggcctatagcatttttttctcatttattcctgggcattttctc

SEQ ID NO: 146576 - DNA, 201 bp, Homo sapiens
tgttaagtatacctcttacctcttgttggtctaatgcttctgcctcatttataaagtaatatcacaaatatatatttgccctaatttttttttttttttttgagtcagagtctcatcctgtgccccaggctgaagtgcagtggagtgatctcagctcactgcaacctccacctcctgggttcaagggattctcctgcctca

SEQ ID NO: 146577 - DNA, 201 bp, Homo sapiens
accctttgacacacttccaatgtccttaggatatgacaaggagatcagtttttaagtaagagaaggggtttgtaaatgagtcctggaaattatcgcatgcyatcgagttaaagcctcggttatataatctcatcgattataactcacaccagtgttttgtgtaccactaagaaagaaagaatgctgccagttaaccgtgac

SEQ ID NO: 146578 - DNA, 201 bp, Homo sapiens
acttccgcctcccgcattcaagcgattctcctccctcggcctcctgagtagctgggattacaggcatgcgccaccacgcccggctacttttgtatttttartagagacggggtttctccatgttggtcaggctggtcttgaactcctgacctcaggtgatccgcccgcttcagcctcccaaagtgctgggattacaggcat

SEQ ID NO: 146579 - DNA, 201 bp, Homo sapiens
accattgtactccagcctgggcaacaagagtgaaactcagtctcaaaaaaaaaaaaagaaaaaaataattgtcatccgctttatagctgtatatgcatatmattatgtctatctatatacatatatatgttttatttacttattttggtctcttttaggggagcatcatgacagagcctcagattacacaagtaaaccagc

SEQ ID NO: 146580 - DNA, 201 bp, Homo sapiens
tggcaagaaggggttgtaggatgcagtttctaaaggaaggctgagatccttttctcttctctcctgtagactacatttggtcaattttgtggaacctgtgrgcctcaattactccatgtttattcctaccttgctgaatcagggcaccactgctcagaaagagaaatggctgctttcatccaaaggactccagataattgg

SEQ ID NO: 146581 - DNA, 201 bp, Homo sapiens
tcgtgaagtcgccattgcagagaaaaagaaacaaggccgggcacggtggctcacgcctgtaatcccgacactttgggaggccaaggcgggaggatcacttraggccaggcgtctgggacgaccctgggcaacatagggagacccccgtctctacaaaaaaaattttaaaatttgccgcacatggtggcgtgtgcctgtggt

SEQ ID NO: 146582 - DNA, 201 bp, Homo sapiens
ctgatgcttcttttactgcgacagtgaaatcagaaacagttgtcagggttgaaggacatattttgatttgctaaaccaatgattctcaaacttttgcatgygttagaatcacctggaaggccagttaaagcccaggttgctaggccctaccctggagtttctgattcagttggtcagggtggggactaagatgtagtattt

SEQ ID NO: 146583 - DNA, 201 bp, Homo sapiens
ggtgagggcggcgggcgagacctccctcctttcccgagaaaagctggagactccctcgatgcggagtcaggggcgctgtggggcctaggccctctggcccrgcgttaggggagccgggacccccacttcgaggaacagcctgtgtccctggtggggggatatcgccattccccaggtgtgtccgcgactctgaagcctatt

SEQ ID NO: 146584 - DNA, 201 bp, Homo sapiens
tcgggaggctaaggtgggaagatcgctggagtctgggaggcagaggctgtagtgagccaagattgtgccactgcactccagcctgagcaacagagcaggaytcagtctcaaaaaaaaaacaaaaacaaaaacaaaaaacagtatactatttaacatggcaaactctttattagtagttcttctctctcctttccccacagg

SEQ ID NO: 146585 - DNA, 201 bp, Homo sapiens
gactacaggagcccaccaccacacccggctaattttttttttgtatttttcgtagagacggggtttcaccatgttagccaggatggtctcgatctgatggyctcgatctcctgacctcgtgatccacccgccttggcctcccaacgtgctgggattacaggcgtgagccaccgcgcccggctactattatttcttttaagg

SEQ ID NO: 146586 - DNA, 201 bp, Homo sapiens
aggagaacccaggaggcggaggttgcagtgagccacgttcgtgccattgcactccagcctgggtgacaagagcaaaactctgtctcaaaaaaaaaaaaaaagtatacacacacacacacacacacaaatagaataaaatatacaaaaagagaattccgtagtgctctttggtacaccctttgtctagcagcaatgactatc

SEQ ID NO: 146587 - DNA, 201 bp, Homo sapiens
agatcacctgaggtcaggagttcgagactagcctggctaaaatggcgaaacccaatctctactaaaaatacaaaaaaagcagccaggcagtaatggtgcayggctgtagtcccagctactcgggaattctcctgcctcagcttgaacccaggagaacccaggaggcggaggttgcagtgagccacgttcgtgccattgcac

SEQ ID NO: 146588 - DNA, 201 bp, Homo sapiens
tttccattatcagcaggtgaagaggcatctgccacctcacccagctaacttttgtatttttagtagaaatggggtttcaccatgttggccaggctggtctygaactcctggccttgtgatccacccgccccttcctcccaaaatgctgggattacaggcataagccactgcgcctggctgagaaaacatttttaactgatg

SEQ ID NO: 146589 - DNA, 201 bp, Homo sapiens
cttttgcattcatagccacagtttattcctacaactgcctttcactgatactccctgatactctttttactcctaaggaataaagaaactggccaggtgtrgtagctgacacctgtaatcccagcactttgggaggctaaggcaagaagattacttgagcctaggagtttgaggccaacttgagcaacatagtgagaccct

SEQ ID NO: 146590 - DNA, 201 bp, Homo sapiens
attacatgcctttatcgtacctattcgtgaaatcgggacccataagcctttgccaggtaagaactgttcatctgatgttgagatgaaaatgaaactgagcrctttcttctgcaaaaggtagaatgcccaactgaagaggcggagcaaaagccagaaattccagagcataaacatctcgtgactgtcctttcatctgtggta

SEQ ID NO: 146591 - DNA, 201 bp, Homo sapiens
ggccaggctggtctcgaactcctggccttgtgatccacccgccccttcctcccaaaatgctgggattacaggcataagccactgcgcctggctgagaaaasatttttaactgatgttaatgagcagcttctaaacacatgattaggacgcagaagtcgttccctctggtggaatctataatgattacattaattcattttg

SEQ ID NO: 146592 - DNA, 201 bp, Homo sapiens
catgtagctagtgattactgttttggacagcactgccttaagggataacaaggaagtagtttaaattaatattcttatttttatcctaaaattttctctaygtaaatgtatgagaaataagtagaaaagaaagtaataactattagcttaagggaatttctttctgaaagctaggtgtgatgctgtcagcagaaaggcttt

SEQ ID NO: 146593 - DNA, 201 bp, Homo sapiens
aattatgtctatctatatacatatatatgttttatttacttattttggtctcttttaggggagcatcatgacagagcctcagattacacaagtaaaccagygtgtaaaggagttactcactctgattcgctcagatgctgttgctttggttgatgcatttgattttcaggatgtgacacttggctctgtgcttggccgcta

SEQ ID NO: 146594 - DNA, 201 bp, Homo sapiens
gactgatcttttccttggaaataagtcaggttggttaatttgcatcacgtgacggttttatcttatatggaatacacaaaaagtcaacgtccaggagatcrgcaatagagcagcttatatagaatgagatctaactatttaaattctgagactttggaaaatggatcaacagtgaacagtgattatctaacgcggtctcac

SEQ ID NO: 146595 - DNA, 201 bp, Homo sapiens
cacatttcaggtcatttccccaataacagttatacttttatactttttttttttttttttttgagacggagtcgtgctctgtcgcccaggctggagtgcaktggcgcgatctcagctcactgcaagctccaccttccgggttcacgccattctcctgcctcagcctcccgagtagttgggactacaggcacccaccaccat

SEQ ID NO: 146596 - DNA, 201 bp, Homo sapiens
ctgagaccttattattggacctttaggaatttttaaaagtcacatttcaggtcatttccccaataacagttatacttttatactttttttttttttttttttgagacggagtcgtgctctgtcgcccaggctggagtgcagtggcgcgatctcagctcactgcaagctccaccttccgggttcacgccattctcctgcctc

SEQ ID NO: 146597 - DNA, 201 bp, Homo sapiens; identical to SEQ ID NO: 27217

SEQ ID NO: 146598 - DNA, 201 bp, Homo sapiens
aggttcaagcgattttcctgcctcaggctcccaaatagctgggactactggctggcgccaccacgttcagctgatttttgtatttttagtagagtcagggytttgccatgttggccaggctggtctcgaactcctgacttaaggtgatctgaccgccttggcctcccaaagtgctgagattgtaggcatgatccactgcac

SEQ ID NO: 146599 - DNA, 201 bp, Homo sapiens; identical to SEQ ID NO: 27219

SEQ ID NO: 146600 - DNA, 201 bp, Homo sapiens
ctcctgacctcaggtgatccacccacctcggcctctcagagtgctgagattataggtgggagccactgcacctggccaattctctcttatttatttatttwttttttttgagacagagtctcactctgtcacccaggctggaatgcagtgggcatgatctcggctcactgcaacctccgcctcctaggttcaagcgatttt

SEQ ID NO: 146601 - DNA, 201 bp, Homo sapiens
gatttccatttttgaggcttctaaggacagccctggctttttcagcatgtctttttagcatcttcattacagtcacagtctttttttttttttagatagagtcttgctctgttgccaggctggagttcagtggcacgatctccgttcactgcagcctccgcctcccgggttcaaggattcttctaccccagcctcccgagt

SEQ ID NO: 146602 - DNA, 201 bp, Homo sapiens
attgtagagtcataggaagttacaaaaatagtaccaggaaaccctgtgaacccgtcacggagtctctaccagtggtgacaccttgtgggatttccattttygaggcttctaaggacagccctggctttttcagcatgtctttttagcatcttcattacagtcacagtctttttttttttttagatagagtcttgctctgtt

SEQ ID NO: 146603 - DNA, 201 bp, Homo sapiens
gtcagggctttgccatgttggccaggctggtctcgaactcctgacttaaggtgatctgaccgccttggcctcccaaagtgctgagattgtaggcatgatcyactgcactggcctctcaaattttctttatttcctttgatttaattcctgggcgaggatcctctgccttgcacgtgtggttttgtgctgcattggctttgg

SEQ ID NO: 146604 - DNA, 201 bp, Homo sapiens
aattctctcttatttatttatttattttttttgagacagagtctcactctgtcacccaggctggaatgcagtgggcatgatctcggctcactgcaacctcygcctcctaggttcaagcgattttcctgcctcaggctcccaaatagctgggactactggctggcgccaccacgttcagctgatttttgtatttttagtaga

SEQ ID NO: 146605 - DNA, 201 bp, Homo sapiens
atctgaccgccttggcctcccaaagtgctgagattgtaggcatgatccactgcactggcctctcaaattttctttatttcctttgatttaattcctgggckaggatcctctgccttgcacgtgtggttttgtgctgcattggctttggaatcagtaaccaatccctgtcctcgtactccttgccgactcaggaaaaatgga

SEQ ID NO: 146606 - DNA, 201 bp, Homo sapiens
tgatgaaagatgtctgtgtctgatttgttgactcccactcgggaaagttgtggattgcacataagttggttattcaacttggaagcttctaaatgtttcaragtgtgtttaatgaggtctaagcgttatgaaagcagattggtaaaaggttcccaacgtttgctttagtacagtatttttgtagagactgccacctagaac

SEQ ID NO: 146607 - DNA, 201 bp, Homo sapiens
cccggctaattttttttttgtatttttcgtagagacggggtttcaccatgttagccaggatggtctcgatctgatggtctcgatctcctgacctcgtgatscacccgccttggcctcccaacgtgctgggattacaggcgtgagccaccgcgcccggctactattatttcttttaaggtggtagtttggtttcagggtccc

SEQ ID NO: 146608 - DNA, 201 bp, Homo sapiens
tttttttttttttggagacagagtctcgctctgtcgcccaggctggagtgcagtggtgcgatctcggctcactacaagctccgcctcccgggttcacgccrttctcccgcctcagcctcctgagtagctgggactacaggagcccaccaccacacccggctaattttttttttgtatttttcgtagagacggggtttcacc

SEQ ID NO: 146609 - DNA, 201 bp, Homo sapiens
ctttctcttcctctttctttttctttctctctctttctttctctctctctctctctctctgcatttccatttatttccattatcagcaggtgaagaggcayctgccacctcacccagctaacttttgtatttttagtagaaatggggtttcaccatgttggccaggctggtctcgaactcctggccttgtgatccacccgc

SEQ ID NO: 146610 - DNA, 201 bp, Homo sapiens
tctttctctctctttctttctctctctctctctctctctgcatttccatttatttccattatcagcaggtgaagaggcatctgccacctcacccagctaayttttgtatttttagtagaaatggggtttcaccatgttggccaggctggtctcgaactcctggccttgtgatccacccgccccttcctcccaaaatgctgg

SEQ ID NO: 146611 - DNA, 201 bp, Homo sapiens
gcggagtcaggggcgctgtggggcctaggccctctggcccagcgttaggggagccgggacccccacttcgaggaacagcctgtgtccctggtggggggatrtcgccattccccaggtgtgtccgcgactctgaagcctattgtgattcagggagggtggaacggaggcccgagtgtctgtctgccttttaatgccctttaa

SEQ ID NO: 146612 - DNA, 201 bp, Homo sapiens
tctttcttttcttttctttcttttcctttctttttctttctctttctcttcctctttctttttctttctctctctttctttctctctctctctctctctcygcatttccatttatttccattatcagcaggtgaagaggcatctgccacctcacccagctaacttttgtatttttagtagaaatggggtttcaccatgttg

SEQ ID NO: 146613 - DNA, 201 bp, Homo sapiens
acctatcaccggattaacgaaggcattggtcaaggggacctgagtgaactgcctgaggtatgagtttggtctcattcactcatgggcacccttctgtttcrtggttgcctgttggatgaggtccagagataactaaatgttggtatttcctgaaaagaagtatgtattctgagaacttcttctggttgaaagtagatcaga

SEQ ID NO: 146614 - DNA, 201 bp, Homo sapiens
ggatttccatttttgaggcttctaaggacagccctggctttttcagcatgtctttttagcatcttcattacagtcacagtctttttttttttttagatagagtcttgctctgttgccaggctggagttcagtggcacgatctccgttcactgcagcctccgcctcccgggttcaaggattcttctaccccagcctcccgag

SEQ ID NO: 146615 - DNA, 201 bp, Homo sapiens
ttattttggtctcttttaggggagcatcatgacagagcctcagattacacaagtaaaccagcgtgtaaaggagttactcactctgattcgctcagatgctrttgctttggttgatgcatttgattttcaggatgtgacacttggctctgtgcttggccgctatgatgggaatgtgtatgaaaacttgtttgagtgggctaa

SEQ ID NO: 146616 - DNA, 201 bp, Homo sapiens
ccttgtgggatttccatttttgaggcttctaaggacagccctggctttttcagcatgtctttttagcatcttcattacagtcacagtctttttttttttttagatagagtcttgctctgttgccaggctggagttcagtggcacgatctccgttcactgcagcctccgcctcccgggttcaaggattcttctaccccagcc

SEQ ID NO: 146617 - DNA, 201 bp, Homo sapiens
ctgggaggcaaaggctgcactgagccgagatcacgccactgcactccagactgggcaacaaagagagactctgtctcaaaaaaaaaaaaaaaaaaaaaaargacttttttgccttaacctaaacaaacactattacatgatcctagtacaagattattttggcctatagcatttttttctcatttattcctgggcattttc

SEQ ID NO: 146618 - DNA, 201 bp, Homo sapiens; identical to SEQ ID NO: 27221

SEQ ID NO: 146619 - DNA, 201 bp, Homo sapiens
ccttctctatctggaattttaagttagttttatattgaagccttgtcttttcttgggaagctatttctttcctgttatttttatctttttttcccaccctrttaggtatttatcttttttctgggttttttttttttttttttgagacagagtctcgctctgtcgcccaggctggagtgcagtggggcgatctcggctcac

SEQ ID NO: 146620 - DNA, 201 bp, Homo sapiens
ataaaacaaagagttttgtttgtaaaaaaataaacaaaattaacaaatgtttagctaaacaaagtaagaaaaaagaaagactcaaataaatgaaatcagamatgaaaaaggagacatgacaattgataccacagaaatacaaagaatcattggagtctattacaatcaaccatgagtcaacaaattggaaagcctagtaaa

SEQ ID NO: 146621 - DNA, 201 bp, Homo sapiens
ctggagtttgttctttctgatgttcagatgtgttcggagtttcttccttctggtgggttcgtggtctcgctggctcaggagtgaagctgcagactttcgcrgtgagtgttacagctcataaaagcagtgtgaacctaaagagtgagcagcagcaagatttattgcaaagagtgaaagaacaaagcttccacagtgtggaag

SEQ ID NO: 146622 - DNA, 201 bp, Homo sapiens
acctaacaaaataaaggataggcatgaaaaatccacagccaccatcatacaaaatggggaaacactgaaagcttttcctctaagaactggaacaaaacaartatgcccaccttcaccacttttattcagcatagtgctggaagtcttggccagagaaatcaggcaagagaaagaaataaagggcaaggatgtcaaattttc

SEQ ID NO: 146623 - DNA, 201 bp, Homo sapiens
taaaatacaaaagatcaataaaacaaagagttttgtttgtaaaaaaataaacaaaattaacaaatgtttagctaaacaaagtaagaaaaaagaaagactcmaataaatgaaatcagacatgaaaaaggagacatgacaattgataccacagaaatacaaagaatcattggagtctattacaatcaaccatgagtcaacaaa

SEQ ID NO: 146624 - DNA, 201 bp, Homo sapiens
gaccacacattgggctacaaagcaagtctcaacaagtttaaaagtactgaaatcacatcaagtatactttctgacggcaaggaaataaagctagaaatcartaacagaaataactttcaaaactgtacaaatacatcaaaattaacaacatgctcttgaacaaccaatggattaataaaaaattaggaagtacatttaaaa

SEQ ID NO: 146625 - DNA, 201 bp, Homo sapiens
tagcacatggaaaaatctcctggagagaccacacattgggctacaaagcaagtctcaacaagtttaaaagtactgaaatcacatcaagtatactttctgayggcaaggaaataaagctagaaatcaataacagaaataactttcaaaactgtacaaatacatcaaaattaacaacatgctcttgaacaaccaatggattaa

SEQ ID NO: 146626 - DNA, 201 bp, Homo sapiens
aacaactagcaaacaatgaataaaatgacagaagaaggttcttacctataataactttgaatgtaaacagattaaatcccccacttaaaatatatagactrgctgaatggattttttaaatgacccaactatgtgcttcccataagaaactcactttacctatcaaaaaacatatagactgaaagtgaagggatggaaaaa

SEQ ID NO: 146627 - DNA, 201 bp, Homo sapiens; identical to SEQ ID NO: 27236

SEQ ID NO: 146628 - DNA, 201 bp, Homo sapiens
atgcaacggcctacagcattatgctgccctgggccgcgacagcgtgggcgccgcctcggtcaacctggagccctcggatgtgccgcaggacgtgtacagcrgcgtggccgcgcaggtggaggtgttccgtaggcaggacgcccagcggggcatgcgggtggcacaggtgctggaaggcttcatcacccgcaaggtggtgaa

SEQ ID NO: 146629 - DNA, 201 bp, Homo sapiens
agtgaaaagaggatcattaccatcatgacaacatgcaaaagtataaaatccactggcaaagcagatacacataagagaaaagaatcaaaccttattactayagaaaactaccaaaaccacaatcgtaaacaataagagaggaagagaggaataaaagatatacaaaacaactagcaaacaatgaataaaatgacagaagaa

SEQ ID NO: 146630 - DNA, 201 bp, Homo sapiens
ttttttgtttctttcttcttttcttctttctcttttcatttcttgtcatgtctgtctgtatttggcattaggtataatgctggcctcataaaatgaattargcaatatttcctctgcttctgtctttcaaaagacatggaagaaaattggtataattccttccttaaatgtttagtagatgcaacggcctacagcattatg

SEQ ID NO: 146631 - DNA, 201 bp, Homo sapiens
aggtttgtgagcaatattaatctgtatagtttttttgtttctttcttcttttcttctttctcttttcatttcttgtcatgtctgtctgtatttggcattargtataatgctggcctcataaaatgaattaggcaatatttcctctgcttctgtctttcaaaagacatggaagaaaattggtataattccttccttaaatgt

SEQ ID NO: 146632 - DNA, 201 bp, Homo sapiens
gagaaaattctacttcagaaataagtactgcttaggttttatattaaaaattcagaccagcatatcaaaggatgcttcttagtgaaatgatttagaattgytgcattccaaaagcaggttttctctttaatttttacaactctctctctctctcaaaatattatacttcatgaaaaagacaattgacatggatgacaacaa

SEQ ID NO: 146633 - DNA, 201 bp, Homo sapiens
attgataccacagaaatacaaagaatcattggagtctattacaatcaaccatgagtcaacaaattggaaagcctagtaaaaatgtataatttctcaggcayatacaacctatcaagattgaaccaaaaagaaatagagagtctaaacagactaattacaagtaatgaaatataaccagtaataaaaactctctcatcaaag

SEQ ID NO: 146634 - DNA, 201 bp, Homo sapiens
ctgacagaaggtgccaggctgggggtggcaggcctggggggggtcctggcctgggatggagaggggcactgcccaaggcccacgcagctcctgggtgctgscctggaggatgggtggtttccgagtaactgaaaccaagcccctggcaacctcacagtgattcaggctgggcctttctggactttaatcagtctctctctc

SEQ ID NO: 146635 - DNA, 201 bp, Homo sapiens
atcagacatgaaaaaggagacatgacaattgataccacagaaatacaaagaatcattggagtctattacaatcaaccatgagtcaacaaattggaaagccwagtaaaaatgtataatttctcaggcatatacaacctatcaagattgaaccaaaaagaaatagagagtctaaacagactaattacaagtaatgaaatataa

SEQ ID NO: 146636 - DNA, 201 bp, Homo sapiens
tcctgctggtcggggcctcctggctcctggcccatgtcctggcctggacctacgccttctatgacaactgccgccgccttcggtgtttcccacaacccccragacggaactggttttggggacaccagggcatggtgagtgtggcagcaggatgggtctaggtctcaggatggatggacttcctgaggggtacgaggctta

SEQ ID NO: 146637 - DNA, 201 bp, Homo sapiens
attttgtaaaatcaatgtcttacctttttattacaatagatcatgttttgtattcaataaagcaagaagcccttttatctgttgtttttcagggaagggaktaacatttaattctgtttgtttacatttgttttcattgttatccaatgctcattttatgttgctttataagtaagcttaggtataacagaataagtatct

SEQ ID NO: 146638 - DNA, 201 bp, Homo sapiens
gcatctaggtttgtgagcaatattaatctgtatagtttttttgtttctttcttcttttcttctttctcttttcatttcttgtcatgtctgtctgtatttgscattaggtataatgctggcctcataaaatgaattaggcaatatttcctctgcttctgtctttcaaaagacatggaagaaaattggtataattccttcctt

SEQ ID NO: 146639 - DNA, 201 bp, Homo sapiens; identical to SEQ ID NO: 27239

SEQ ID NO: 146640 - DNA, 201 bp, Homo sapiens
ttccttagcaacacagtagataagggatatgtttatgggctaaagcatttaatttctgtacttcgaagtattttagacaattgaatcatctgttgcagtattttttttttttttttgagacggagtctctgttgcccaggctggagtgcagtggcgcgatctcggctccctgcaagctctgcctcccgggttcaggccatt

SEQ ID NO: 146641 - DNA, 201 bp, Homo sapiens
aagtcaaaaccatgataagatgtcatctcacccctgttaacatatgtaattatttttatacattgttggatttgatttgatattttcttgaggattttgcrtctaggtttgtgagcaatattaatctgtatagtttttttgtttctttcttcttttcttctttctcttttcatttcttgtcatgtctgtctgtatttggca

SEQ ID NO: 146642 - DNA, 201 bp, Homo sapiens
gtcagacttcattgaaagttgaaaatctagagcaagacaatgggtggaaaagcatgtcacaggaacatttaaatggaaatgtactttcccaactggaaaaagttgtctaccatcttcccactggttgccaagagactgctgaagtgtgcatgatagatatggctgatatgttccttagcaacacagtagataagggatatg

SEQ ID NO: 146643 - DNA, 201 bp, Homo sapiens
aggggggtttattaaggaatattgactcacacaatctcaaggtgaggtcccacagtaggctgtctgcaaggtgaggagcaaggaaactagtccaagtctcraagatgaggaatttggagtttgatgttcaagggcagaaagcaaccagcgagggagaaagatgtaggctgggacgataagccagtctagtctcttcacgtt

SEQ ID NO: 146644 - DNA, 201 bp, Homo sapiens
acttgcattttgtgtttgctttcttaccataaaggatatttacctttaggccaatatgttaacctttttaatagctggcttcagagtgttgtgttttcctsagaataatctttaaaaaatcggcaccatttttttctggtacttttctaattttctgcttttctaatttttttctgctttttaaattctccagtatttcat

SEQ ID NO: 146645 - DNA, 201 bp, Homo sapiens
tggtataattccttccttaaatgtttagtagatgcaacggcctacagcattatgctgccctgggccgcgacagcgtgggcgccgcctcggtcaacctggarccctcggatgtgccgcaggacgtgtacagcagcgtggccgcgcaggtggaggtgttccgtaggcaggacgcccagcggggcatgcgggtggcacaggtgc

SEQ ID NO: 146646 - DNA, 201 bp, Homo sapiens
atggaagaaaattggtataattccttccttaaatgtttagtagatgcaacggcctacagcattatgctgccctgggccgcgacagcgtgggcgccgcctcrgtcaacctggagccctcggatgtgccgcaggacgtgtacagcagcgtggccgcgcaggtggaggtgttccgtaggcaggacgcccagcggggcatgcggg

SEQ ID NO: 146647 - DNA, 201 bp, Homo sapiens; identical to SEQ ID NO: 27241

SEQ ID NO: 146648 - DNA, 201 bp, Homo sapiens
ttaaaagatcatgtgtgttttgtaatagcaaaatttgattttaattttttatttggaattggtgtatttatcatggggacttccagtttttcttcactttkcaaatggatattggctatagttttatgttttaatgggaatgaatttcaagtcaattaataatcagaaaatttttagttttacttttttcttttacaatat

SEQ ID NO: 146649 - DNA, 201 bp, Homo sapiens
aatctgtattagtcagtggtctttagagcaacagactagtaggatagatgtacatataaaggggggtttattaaggaatattgactcacacaatctcaagktgaggtcccacagtaggctgtctgcaaggtgaggagcaaggaaactagtccaagtctcaaagatgaggaatttggagtttgatgttcaagggcagaaagc

SEQ ID NO: 146650 - DNA, 201 bp, Homo sapiens
actagacccctctctttcatcctattcaaaaatcaaatcaagatagatgtattagttagggttctctagagggacagaattagtaggatagatgtatgaaycccacttctggtaccaaaatctgtattagtcagggttctctagagggacagaactaataggatagatgtatgaaccccactcctggtgccaaaatctgta

SEQ ID NO: 146651 - DNA, 201 bp, Homo sapiens
tatcacagaagaccccaaatagccaaagctgtcctgagaaaaaagaacttagatggagatattacactgccaacttcaaattatactacaatgctatagcsaaaaccatatagtactggtataaaaagagatgcatagaccaatggaacagaacagagaacccagaaataaatccatgaatttagagccaactaatttttg

SEQ ID NO: 146652 - DNA, 201 bp, Homo sapiens
ttcgtgtggtatcacagaagaccccaaatagccaaagctgtcctgagaaaaaagaacttagatggagatattacactgccaacttcaaattatactacaawgctatagccaaaaccatatagtactggtataaaaagagatgcatagaccaatggaacagaacagagaacccagaaataaatccatgaatttagagccaac

SEQ ID NO: 146653 - DNA, 201 bp, Homo sapiens
ttgttcattcccatagctatgagacacaaaccaacattatggaagaagcttaacaaaagaagctataaaggatggagtctccggattttttcataatgggyactgcttaataaaagatgctgttgctgccattattcagaagactgagaaaattctgcagtggtttgaaaaccagaagcagcttaacttttacgcaagttc

SEQ ID NO: 146654 - DNA, 201 bp, Homo sapiens; identical to SEQ ID NO: 27252

SEQ ID NO: 146655 - DNA, 201 bp, Homo sapiens
agagcccagaggcctgagccccgctagccctggtgccttcctgcccacacccgccccaggcgcagccccttacccgggtctgattgtggccagtgccagaygtggtggaggtgaattctgagtacttgctccccccagcaactaggcaggcccacttccggtattcttcccgaacctgccggcccagacaccaagtcaggg

SEQ ID NO: 146656 - DNA, 201 bp, Homo sapiens; identical to SEQ ID NO: 27254

SEQ ID NO: 146657 - DNA, 201 bp, Homo sapiens
gcttcatgcccctcaccccggccccgcctccaagtccttccagcctctcctctcacctcgccttctttaatttcttcatgtctggattgatttcagaaaayttctgagtgagcttccagacggtagtcacgaaaatgacagcattgcactgggcagggagcagattgtgggttagagggcgagagcgatggtccagccggg

SEQ ID NO: 146658 - DNA, 201 bp, Homo sapiens
ccagggcccacccccaacaacgctcagaagcgagcgggcactcggggtgtggccaggcagctccaaagccagcgccctttaaagagacaacccgacccccmggtgggcggggccagatcccggacaggggcggggcctcatgcctccagggcccgcctacccgactgagccccgggagtgggcggggctaacccctcccag

SEQ ID NO: 146659 - DNA, 201 bp, Homo sapiens
gcctccacttgtttctcctgcaccccagcctgtcacgctatcagcagttcaaggatttccagcggcggatcctggtggccaccaatctgtttggccggggratggacatcgagcgagtcaacatcgtctttaactacgacatgcctgaggactcggacacctacctgcaccgggtgagcagcctcacgggcatgttgcttt

SEQ ID NO: 146660 - DNA, 201 bp, Homo sapiens
ggtcccaagaagctccagaggaagccctgctcaaagtccaaccagcagctaggagggaagggaggggtcccatcagtgccccaggaagccaggagcggaamggagggcggccggacattgtgtgtggcactgcctgtgagccccaggcccagcaccccgccttcctcctgccccatctcgctgcactcactatctggggcg

SEQ ID NO: 146661 - DNA, 201 bp, Homo sapiens
ctcacgggcatgttgctttcccctggcggtggggtggggccccagccctgcttttcctcaagtcctgaggtagtatctgtggcctgaccctgatcctgtcygcctgcaggtggcccgggcgggtcgctttggcaccaaaggcctagccatcacttttgtgtctgacgagaatgatgccaaaatcctcaatgacgtccagga

SEQ ID NO: 146662 - DNA, 201 bp, Homo sapiens
gggcttcatattggcgcccgtgccctcgttatctcagagcacatcctgaaggatgaaggtgctgtggagggctgtggtgtggtccagtgtctgatggcacrggtgggaagaccggggccgcccgagtgccgagattcaggaaatccttagagagccaggtcccatgtcacccaggcaggccaggtctaaccattacattat

SEQ ID NO: 146663 - DNA, 201 bp, Homo sapiens
cttgggcagggccaggggtctggggcagagggttcctcccccggcccttcagttcactgcatctcatgtcttacagtcgagcagagccggtaaccaccacrtgccagagccgcccacccggagccgcccgcatgcagcttcacctcccctttccaggcgccactgttgagaagctagagattgtatgagaataaacttgtt

SEQ ID NO: 146664 - DNA, 201 bp, Homo sapiens; identical to SEQ ID NO: 27259

SEQ ID NO: 146665 - DNA, 201 bp, Homo sapiens
gagccaggtgagcagcggatcccgggcgcggggccgcggtgtggggacgtctgaactgagagcgagaggacgaggggagacgttgggatctaaggggaggrggagaaagggtcgcgagacggtgggggcggggcggttggtgtgtcagagcgctgtgtgttggccgttgggcaccggggcgcatgcgctaggggtgggcca

SEQ ID NO: 146666 - DNA, 201 bp, Homo sapiens
gagccgaggttgcgccactgcactgcagcctgggtgacagcaagacttcatctcaataataataataataataataataataataataataataataataaaacaggtgatagcagcttggggccagcatggtagcataggtgagaactggccagagggccttggtgggattcactgcctcatggacagggaggttgagag

SEQ ID NO: 146667 - DNA, 201 bp, Homo sapiens
tgagccgaggttgcgccactgcactgcagcctgggtgacagcaagacttcatctcaataataataataataataataataataataataataataataataaaacaggtgatagcagcttggggccagcatggtagcataggtgagaactggccagagggccttggtgggattcactgcctcatggacagggaggttgaga

SEQ ID NO: 146668 - DNA, 201 bp, Homo sapiens
gtgagccgaggttgcgccactgcactgcagcctgggtgacagcaagacttcatctcaataataataataataataataataataataataataataataawaaaacaggtgatagcagcttggggccagcatggtagcataggtgagaactggccagagggccttggtgggattcactgcctcatggacagggaggttgag

SEQ ID NO: 146669 - DNA, 201 bp, Homo sapiens
ttgtctcaaagagggggaaaaaaaaaggaagggagtactgatgatgtggtagagcacactgtgctgagtgaaagaagccagacacaaaatgtcacaaattrtaagatttcatttatgtgaaatgtccacaacaacaggcaaatccatagaaacagaaagcagattagtggttgcccggggctggggtggggtgtttagggt

SEQ ID NO: 146670 - DNA, 201 bp, Homo sapiens
cgcttgattgagcccgggaggcagaggttgaagtgagctttgattgggccactgcactccagcctgggcaacagagcaagaccttgtctcaaagagggggraaaaaaaaggaagggagtactgatgatgtggtagagcacactgtgctgagtgaaagaagccagacacaaaatgtcacaaattgtaagatttcatttatgt

SEQ ID NO: 146671 - DNA, 201 bp, Homo sapiens; identical to SEQ ID NO: 27245

SEQ ID NO: 146672 - DNA, 201 bp, Homo sapiens
catatgtatacatgtgccatgttggtgtgctggacccgttaactcgtcatttgcattaggtatatctcctaatgctgtccctcccccctccccccacccamccggctacttttttaaaaattgtttttgtatagacgcggtctcgacttattgtccaggttggtctcgaactcctgggctcaagccatcctcccacgctgg

SEQ ID NO: 146673 - DNA, 201 bp, Homo sapiens
caacatggtgaaacctcgtctctactcaaaatacaaaaaaaaatcagccgagcgtggtggcgagcgcctgtggtcccagctactcgggaggctgaggcacragaatcgcttgaacccgggaggtggaggttacagtgagccgagatcgcgacactgcactccagcctgggtgacagagcgagattctgcctcaaaaaaaac

SEQ ID NO: 146674 - DNA, 201 bp, Homo sapiens
tcgagcgagtcaacatcgtctttaactacgacatgcctgaggactcggacacctacctgcaccgggtgagcagcctcacgggcatgttgctttcccctggyggtggggtggggccccagccctgcttttcctcaagtcctgaggtagtatctgtggcctgaccctgatcctgtctgcctgcaggtggcccgggcgggtcgc

SEQ ID NO: 146675 - DNA, 201 bp, Homo sapiens
gccttggtgggattcactgcctcatggacagggaggttgagagagagaaaacagccattgagacaatggaattgctgtttctgagccgggaatgagtgacmgcgaggccaaaagtggcctaggatcctcagcatccagcctcaggaagaattgtagcagctgtcaccctctgctccaccccccactggagtctggggtagg

SEQ ID NO: 146676 - DNA, 201 bp, Homo sapiens
tctctgtgaagcttttctttttttttttttttttttttaggctggagtgaagcgtgatttcagcccatcacaacctccgcctcccaggtttaagcaatttwtctgcctcagcttcccgagtagctgggattataggcgcctgccaccatgcctggctaaatttttgtatttttagtagagttggggtttcaccatgttggt

SEQ ID NO: 146677 - DNA, 201 bp, Homo sapiens
cagaggggcatgggggagagatggggtagcttgggggtggggaggtggagacagggcgaagctgcgaggtgcagcccaggtagagctgatgggctcactcrtggaaggaggcggcagagaatgccatttgaatgaagcttcatcatccttctgtgcccactcgcgggaccctgcctctctctcttctcagcatcatggcag

SEQ ID NO: 146678 - DNA, 201 bp, Homo sapiens
tgccacttcccaggtgacggtcctggtcatgtgccacacgagggagctggccttccagatcagcaaggaatatgagcgcttttccaagtacatgcccagcrtcaaggtgagtccctcgggccagactggaccaggcgccacttggtttctgcagctttgttagcctcggctctggcccagccagcatttaccaagcttggc

SEQ ID NO: 146679 - DNA, 201 bp, Homo sapiens; identical to SEQ ID NO: 27242

SEQ ID NO: 146680 - DNA, 201 bp, Homo sapiens
cgtgagccaccgcacctggcctctttcctcttttttttttttttttttttttttgagacagtctcactctgtctcccaggctggagtgcagtggcacaaayatggctcactgcagccccaacctcctgggctcaagaaggatcacatttcaacatgagatttggaggggacaaacatccaaactgtatcaaactccatgat

SEQ ID NO: 146681 - DNA, 201 bp, Homo sapiens; identical to SEQ ID NO: 27260

SEQ ID NO: 146682 - DNA, 201 bp, Homo sapiens
catttgtgttagcatattgttaacaggttaagcgtgatattaagtgatagtagcactttatggctgcttttgttgatgcaaggacctcagagttttgatartgttcctggaagtgggggccaaaagggactcttctttttctggtttgggttaggtactccttacatgtgttccttttaaagctctctgtttggctctcat

SEQ ID NO: 146683 - DNA, 201 bp, Homo sapiens
ttgagattctcacatatagcgtgtttaaggaaacttgggggggaggttttatacacagaatttgtgattgtcagggcaaagtattgtaaatgcagcctgtrtttattacagaactcctttagcaaagaaatactttaaaaaatgacttcgaagttttaactgagtagtgagaattagatacagaagtgttgaattctaatt

SEQ ID NO: 146684 - DNA, 201 bp, Homo sapiens
atagaggtgtaagaagtataagctataatttctagagccactaaaatgtattctatgtttttttcattctaagatgcctttgaattggcttttaagtaccrctaggaaagataaccctaaatatgacacaatgctaagatgccattttttgtaaaatttctgtgtcggagatgtcagagtgtggtgggggaagagtgcctc

SEQ ID NO: 146685 - DNA, 201 bp, Homo sapiens
agaaaaaaaatcaacccaattaggaaatggacaaaatgtatgaagagacactttactgaagaggatatacagatgacaaataagcacataataaaatgttygacatcatagctactggggaagtgcaagttaaaaccgcaatgagatatcactacatacccaccagaatggctaagagataatgacacaccaaatgttggc

SEQ ID NO: 146686 - DNA, 201 bp, Homo sapiens
gattggttgaccccaggagttcgaggttacagtgtgctatgattttgctactgtactccagactgggcgacaaagcaagactctatctcaaaaaaaaaaaagaaagtaaagtgttcatacagaataaatgatatgtgtgaaggcccagaagcaagagaaaggtggatgctttcagggacagaaaagttcagtgaccctgga

SEQ ID NO: 146687 - DNA, 201 bp, Homo sapiens
atatatttaaaaaattctcaaaattcaacagtcagaaaaaaaatcaacccaattaggaaatggacaaaatgtatgaagagacactttactgaagaggatayacagatgacaaataagcacataataaaatgttcgacatcatagctactggggaagtgcaagttaaaaccgcaatgagatatcactacatacccaccagaa

SEQ ID NO: 146688 - DNA, 201 bp, Homo sapiens
ggtcctggacttttctttgctggtagacttcttattatggctttgatctcattccttgttattggtctattcaggttttggatttttttatggttcattcraagtaggttgtatgtttctaggaattttttcattttttctatgttttgcaattattggcatacagttgcttatagtagtctctaatgatcctttgaatat

SEQ ID NO: 146689 - DNA, 201 bp, Homo sapiens
ttttcatcttacaaagcatggcatgtgggcatcagaagtctgattgaaaggaagtaaaattagtggagcaattaaacattaactaggtggggggcaattakgctaaagttatgtaaatagttttagattatgtataagtaattatatttttcagagtagttgacagggcaaaaattagattgcttattcgtttgagactta

SEQ ID NO: 146690 - DNA, 201 bp, Homo sapiens
tcttccccttttaaggaccttattggttatattgggcctatttggataatctaggataatcttatttttaattagtcaccaaaattttatttactctcatrtcagattaactatgctaccattgagtggtctctagttatggtggtggcaatgtttatgttttagtcaaaataataaattcagatggttttagaaaattaa

SEQ ID NO: 146691 - DNA, 201 bp, Homo sapiens
agtccttaatttattttttgattcatgtaggatctgaaccaatgatgctgggttcacccacatctccaaagccaggagttaatgcccagttcttacctggrtttttaatgggggatttgccagctccggtgactccacaacctcgatcaattagtggcccttcagtaggagtaatggaaatgagatcacctttacttgcag

SEQ ID NO: 146692 - DNA, 201 bp, Homo sapiens
ttagaagtctgtctactgtgtatgtcatgatcaaacatctagaatgtcaccctagtcttttcagccatgtaactgaggttgaatgtctaggaaaattagtkctgaacagccttaagctgatcaaactgtaacaaataggtggatgatgatgctttgttacacgcagaaatagtgattattcagttatttgagtcatgccag

SEQ ID NO: 146693 - DNA, 201 bp, Homo sapiens
gcagatgtcaaggaggcaggtctaatttggcaattagaaaaaaaaaatagttggggtcagtagttttatttcggaagagcattacacaggagccaatctgyaattaattaaaaatcaaaatagtaaagatagggaaacagataatttactaaaatctatagacacttcttttgagattttgaaaaaatgaaatgagagaga

SEQ ID NO: 146694 - DNA, 201 bp, Homo sapiens
ctgctaatgcactatgaattcaattttgagtttctaagagatggaaagaaaaagacaaaagatgagcttgcttttgaggtttgatgtacgggtaggttgtscagcaagcatctggaaaagtggcatttggctttagagatgttgggtatagattattaaaaattatttgcacagggtgacaatgataaggattccaaggga

SEQ ID NO: 146695 - DNA, 201 bp, Homo sapiens
gcgagcctgggtgacagggagacctcaaagaaaaaaaaaaaggcaaaaacacataatgttaagtaatgttttacattttagcggctctcttagttgactgraaagcatacattttaattttcctaccgttgtcaagtagaaaagcgcatgattaatgttaataaatatctttttgttaacttatttttttctaatatagta

SEQ ID NO: 146696 - DNA, 201 bp, Homo sapiens
gagtatattgccagagaaactgaaggctacaaagagagtgttcaagaactcacactgagaagttacaaaaggttagaacctaaaatgtattggatttagcytcatggtggttgtattagtctgttcttgcattgctataaacaaatacccaagactgggtaatttataagaaaagaggtttaattagctcatagttctgca

SEQ ID NO: 146697 - DNA, 201 bp, Homo sapiens
gtttgaaaagaactaacagacaagattttaagtcagtatttcaaaaatataaatttaaaaaatcttaccaaaaagaagaatcccttttttttttttttttttgtacactgtaggtgggtcaccaccacaaccagttgtaccagctcataaagataaaagtggcgctccaccagttagaagtatatatgatgacatttctag

SEQ ID NO: 146698 - DNA, 201 bp, Homo sapiens
tagtaactagcactttataaaataattacaatgtaattagagtttttcacaccttgttttagcatttgctttatccatttattgaatttgtttttttttttgtcttttatacacttgtattgttaatatctaggcctaatataatgggaaataagaggaagactaaatagttggcagctttcggatattaagaaacagatt

SEQ ID NO: 146699 - DNA, 201 bp, Homo sapiens
ataaagccttgggggacaattttattattattattactatttttatagagacagggtcttgctatgttgcccaggctggtctcgaactcctgggctcaagygatcttcctgcctcagcctcccaaaatgttagaattataggtgtgagtcactggcacctggctatgggaacaatttttagtggctaggtagaggaggatg

SEQ ID NO: 146700 - DNA, 201 bp, Homo sapiens
agccaattcttactttattttgctataatttttttttcttttagggagggggagtgaatgtagtgaatgttaccaaaaactttgcgtttaatatggtattytgaatatctgttaagaatatgcttttgtttagacttttggtttgattttagtggatcttcttacgaaatatttctacagtgccatgtaacatagtaacta

SEQ ID NO: 146701 - DNA, 201 bp, Homo sapiens
gggaaggctttcctgacttttgagtgacatttaccatcggttagaaaagataagtaggcgttgactaagtgagggagagtgggttgttgcaggtcttccaraactgagggaggagaataggtaaagacccagggttgggaaggagcatgacacattggagtgatggaaagagggctgaatggctggagcagtgaaccagaa

SEQ ID NO: 146702 - DNA, 201 bp, Homo sapiens
ggtggttggtgacagtcctgattaagagcccattgtgccctccttcctgtctggtgctttcttttttcttttccttccttcttccctctctccctccctcscttcctcttttttgacacagccatgtcacctgggctggagtgcagtcgtgcaatctcagctcactgcaacctccgcctccgggctcaagcaatcctccca

SEQ ID NO: 146703 - DNA, 201 bp, Homo sapiens
tttgggaggctgaggcaggtggatcatgaggtcaggagatcgagaccatcctggccaacatggtaaaaccctgtctgtactaaaattcaaaaaaaaaaatkagttgggtgtggtggcatgcgcctgtactcccagctactcgggagactgaggcaggggaatcagtggaggttgcagtggagtgccagagctgagatcgtg

SEQ ID NO: 146704 - DNA, 201 bp, Homo sapiens
ttgaacacgggaggcagatgttgcagtaacctgagatcgctccactgtactccagcctggatgacagagtgagactccgtctcaaaaaaaaaaaaaaaaaagaaagttttggctactggtgtgttaggcttggtgggagaaactgaaggcagggagatgtaaggagttgactgcaattgtataggaattgaagaggcagaa

SEQ ID NO: 146705 - DNA, 201 bp, Homo sapiens
tgcctttaggggttcctatggaagtctcttaaagagatgcttctaccctcccaccatgagagattctgattttttccttctttgctgtccaggtgacaatwtataatgaaggatgttactaaatgacatgtgctgcacacctgagtcttgtggaggctgaagaaaaggaggcttctgtagaaaataggaactcagtgagtg

SEQ ID NO: 146706 - DNA, 201 bp, Homo sapiens
ctgggttcaagcgattctcttgcctcagcctcccgagtagctggcattacaggtgcctgccaccacacccagctaatttttgtacttttttagtagagacrgggtttcaacatgttggccaggctggtctcgaactcctgacctccggtgatccacccgcttcggcctcccaaatttctgggattacaggcatgagccact

SEQ ID NO: 146707 - DNA, 201 bp, Homo sapiens
tagggcaaggccagatcataagataaagccttgggggacaattttattattattattactatttttatagagacagggtcttgctatgttgcccaggctgstctcgaactcctgggctcaagcgatcttcctgcctcagcctcccaaaatgttagaattataggtgtgagtcactggcacctggctatgggaacaattttt

SEQ ID NO: 146708 - DNA, 201 bp, Homo sapiens
ctttgacaaaggtgcaaaagcaattcaatgaaggaaaggtagcctttttaacaaatgatgctggagcaattggacatctgtatttccataggccaaaaaaraaaaaaaagaaagaaattctatgtaatcccataccttcaacaaaaattaaccaaaaatggagtatagacttaaaaggaaaactaaaacacttttaggaga

SEQ ID NO: 146709 - DNA, 201 bp, Homo sapiens
ggtgaattgcttaaaataattttatagacatgctagatacagggatgtccaattttttggcttccctgaaccacattggaagaagaattgacttgggccayacataaaatacagtaactctaataatagctgatgagctaaaaaaaaaaaaaaatgcaaaaaaaatcttaaaatgttttaagaaagtttaccaatttgtgt

SEQ ID NO: 146710 - DNA, 201 bp, Homo sapiens
caaggtttcgccattttgtccagactggtctcgaactgagctcgagcgatccacctgcctcggcctcccaaaatcctgggattagaggcttgcgccttctrctgtgtctgtatgtatccagatacatcagaacttttcttaagccaattcttactttattttgctataatttttttttcttttagggagggggagtgaatg

SEQ ID NO: 146711 - DNA, 201 bp, Homo sapiens
ctaattcattttagttgttgtatagtgttcttttgtttggctagatcataatttgtatagaaatttcttttttattttgtagagaagtggggtctcactawctcaaactcctggactcaagtgatcaacccctcagcctcccaaggtgctgggattgcaggtgtgagccaccacatctagcctcaatgtgtgtagaaattt

SEQ ID NO: 146712 - DNA, 201 bp, Homo sapiens
atggctctccatcttccatcttcagatatagcaatggcagatcaagtcctttgttatgcttcatatatctctaactttacttttctgccttctgctggtgrttagagctcattcgattttatcaggcccatgaggataatctgagatagttccttattctaaagtcagctgagtagtaaccctaagttcatctgccaagtt

SEQ ID NO: 146713 - DNA, 201 bp, Homo sapiens
gcccaggaattcgaggttgcaagggagctgattttgtcactgcactccagcttgggtgacagaacaagaccctatctcaagaaaaaagtaaataaaaattwaaaaaaaaaagcacgcaaaaaaactaaccaaattaacaatgatgtaaaatgtattaaacactctggttaaggcaggtattgtcagaatggataacaaaag

SEQ ID NO: 146714 - DNA, 201 bp, Homo sapiens
gaacagtgtgtctggggtgttcaaggaagaataaggggatggtgactgaaatggagtaagtgagggggagaatagtagaaaatgaggtcagagaggagagrtaatgggggcagatgtattacatggccctgtaggttattgtcacaattggtctttacccagaaaaggtggaagacaataaggatgagactgttgctgggt

SEQ ID NO: 146715 - DNA, 201 bp, Homo sapiens
agggaatagtattctagacggagggaacagtgtgtctggggtgttcaaggaagaataaggggatggtgactgaaatggagtaagtgagggggagaatagtrgaaaatgaggtcagagaggagagataatgggggcagatgtattacatggccctgtaggttattgtcacaattggtctttacccagaaaaggtggaagaca

SEQ ID NO: 146716 - DNA, 201 bp, Homo sapiens
gtcatatctccctctctcttttaaagacccttgtgaatacattgggcccttctagataatctaggataatctttgtattttaaggtcagttgattagcagsgttaattccacctgcaaccttaattccctttgccatgtaatgtaacattcacaggttccagggattaggtcatggacatcatttggggacctacccagct

SEQ ID NO: 146717 - DNA, 201 bp, Homo sapiens
gggtgtcaccgtcttggccaggctggtctcgaactcctgaccttgtgatctacccacctcggcctcccaaagtgctgggattaaaggcttgagccaccgcrcccagctggcaataatctattttcttgccttttccatttctagaggctacttaatgtttcttggcttatggttcccttcctccatcttcacagtcagcaa

SEQ ID NO: 146718 - DNA, 201 bp, Homo sapiens
atttaatcaaccgtgtggttggtaatcattgagatattgaccttaacagcaagctaggagttcgcacgatatttcccgcctttatttggggaaagtgactyttaagtattgtaggaggtatttttctctagtaagtcacgatctgaatttttttaaagattcattcccattattcattgcggagcctcgttgaaatatgtc

SEQ ID NO: 146719 - DNA, 201 bp, Homo sapiens
taaaaaagccattggaattgggatgaaaaggaatagttaagacactgaataataaaggtgttttgagagatgttaatgcatagttataaatctaaatgccrttgaatagaagcaaccactgattatatacctagtttttctttaagattaatggctttttaataatcatcattatgcttagcacagttcttcatatgtcgt

SEQ ID NO: 146720 - DNA, 201 bp, Homo sapiens
gctggtccccagaagcatccctgggaggaactgaccgcggtacacgtgggtgggcggtgccctgaagtgtgtgggtgcagtccactgcttcttgatcacckgtgcttccagttcctgttttgactcctctctcccgggctttgccaaaggaatcttgttattaatggaagcttgaatcgtgcaacatttaatcaaccgtgt

SEQ ID NO: 146721 - DNA, 201 bp, Homo sapiens
tggagggttcgtgggtgcgtataattatcttccattatttacatgtgtactttatgcgttcgttagctatatttttgtatgttttaatatgcaacaaaacrgcgtatgagttacgctttaatgtaaaattgtctacataacacaaaatttaaaagaaatggcatacggatagtagaaaacatgctttgaggaaaaagcgtc

SEQ ID NO: 146722 - DNA, 201 bp, Homo sapiens
aactaaaatggataatttaccagttttggaactttctactggtagtggtagggatatgctgtcttttattgtttagactgatttgaatctatagtgtttcrtggtttctaagtatctgttgaaaatcaaattttgtcacccttctgtttttctgtatgaacctggtcattttaaaaattaccattatctctgttatttcaa

SEQ ID NO: 146723 - DNA, 201 bp, Homo sapiens
aattagtggcccttcagtaggagtaatggaaatgagatcacctttacttgcaggtaggtgaattgcttaaaataattttatagacatgctagatacagggrtgtccaattttttggcttccctgaaccacattggaagaagaattgacttgggccacacataaaatacagtaactctaataatagctgatgagctaaaaaa

SEQ ID NO: 146724 - DNA, 201 bp, Homo sapiens
agaatacatttggaaatcttgcttcctcctctatttttcaaaatagtttgagtgggattgattttagtccttttttaaatgtttcataaaattcaggagtraagccactaggtcctggacttttctttgctggtagacttcttattatggctttgatctcattccttgttattggtctattcaggttttggatttttttat

SEQ ID NO: 146725 - DNA, 201 bp, Homo sapiens
aaaatgtacaataaattattgttgactgtagtcaccctgttgtgctatcaaatactagatcttattctatctagctatattttaatacccattagccatcrcacttcttcccctcatgcccccactgttctttccagcttctggtaaccatcattctactgtctatctccatgtgttgaactgttttaatttttggctccc

SEQ ID NO: 146726 - DNA, 201 bp, Homo sapiens
caaaatatgactgaatagaataagctttccatgtcaccttgagttactacattaagtttgagggtttaaaccataatggtaacagtctgatgtgtttttawctgtatgtagaggaaatatctaaaacaattatattgcaaatggggaaggataaaagggcataaaagtttccatattttatttgaaatagttaaaataaca

SEQ ID NO: 146727 - DNA, 201 bp, Homo sapiens
gacattataatcaacaaacttatggtttgtttcaattgatgcacacaaaaaataacttatagttagacttttctatttcaagtaaagctttgagttacttrtttttatacatattcatcatgtaccctttattgtttctaggtgttgatatactttaataaaaatgatatgtttaatattttcccattaatatatttcttt

SEQ ID NO: 146728 - DNA, 201 bp, Homo sapiens
ttccttaagcagaaggagtctctctccatggccaccacagctgggaatgtgctgtgtcattcctgaagccagcatggccctgggtttccacccaagtcccrtggtgattactgccttggtaccactgatgtttattcaaggcccaagggcttgttagtcagcaggtgataaatccttccacgactgggttcttcctttcaa

SEQ ID NO: 146729 - DNA, 201 bp, Homo sapiens
ctttagctctaataataattgtttcatgtatctgggtgctccagtgttgggtacatatacacttatgattgtaatatcctcttgttgaattgactcctttrtcattatgtggtaactttgtctctttttatatattttatcttggaatctattttgtcggatataaatatagccactactcatgctcttttttggttttga

SEQ ID NO: 146730 - DNA, 201 bp, Homo sapiens
agggctgagtgtggcatggtggcacatgcctataattccagcgctatgggaggtcaaggtgggaagaccgcttgagccggggagtttaaggctgtaggcarctatgattgcaccactgcacgcgagcctgggtgacagggagacctcaaagaaaaaaaaaaaggcaaaaacacataatgttaagtaatgttttacatttta

SEQ ID NO: 146731 - DNA, 201 bp, Homo sapiens
ctgtataatctcaggcttcaccctacaccttctgaatcagagtctgaattttaacaaggtccccaggtgactgttcagcatattaaagtttgaaaagaacyaacagacaagattttaagtcagtatttcaaaaatataaatttaaaaaatcttaccaaaaagaagaatcccttttttttttttttttttgtacactgtagg

SEQ ID NO: 146732 - DNA, 201 bp, Homo sapiens
tacttttctgccttctgctggtgattagagctcattcgattttatcaggcccatgaggataatctgagatagttccttattctaaagtcagctgagtagtraccctaagttcatctgccaagttccttcacggcagtacctggattggttgattggattaccaatcagtcaaaccaggggacagaaatcttggaggcctct

SEQ ID NO: 146733 - DNA, 201 bp, Homo sapiens
cataacaaattacgacaaacttagtggtttaaaacaatacacgtattatcttctggtttctagaggtcagatatctgggctgttggttagagctcagatgycaacagggctgtgtttctgtctggaggctttgggtatgaatctgcttccaagctccttcaagttgttggcagaatttagttctgtgtggttataggaatg

SEQ ID NO: 146734 - DNA, 201 bp, Homo sapiens
aagtgatctttgacaaaggtgcaaaagcaattcaatgaaggaaaggtagcctttttaacaaatgatgctggagcaattggacatctgtatttccataggcmaaaaaaaaaaaaaaagaaagaaattctatgtaatcccataccttcaacaaaaattaaccaaaaatggagtatagacttaaaaggaaaactaaaacacttt

SEQ ID NO: 146735 - DNA, 201 bp, Homo sapiens
aattagccaggcatggtggcacgcacatgtagtcccagctacttgggaggctgaggcaggagaatctcttgaacccagaagttggaggttgcagggagccragatcctaccactgcactccaacctgggtaacagagcaagactccatctcaaaaaataaaaatagccgggcacggtggctcacgcctgtaataccagcac

SEQ ID NO: 146736 - DNA, 201 bp, Homo sapiens
gagatgtaaggagttgactgcaattgtataggaattgaagaggcagaaagaatatctgaatgtttgatggtagagaaggtgaatgtcagaaaaaacaaagyggagcagacactgtactaagaataaccatttttcaaagtaggtattgtttctattttacaaacaatataatctagaaatcaaatacaaatccaagttata

SEQ ID NO: 146737 - DNA, 201 bp, Homo sapiens
tacaaaaattagccaggcatggtggcacgcacatgtagtcccagctacttgggaggctgaggcaggagaatctcttgaacccagaagttggaggttgcagkgagccaagatcctaccactgcactccaacctgggtaacagagcaagactccatctcaaaaaataaaaatagccgggcacggtggctcacgcctgtaatac

SEQ ID NO: 146738 - DNA, 201 bp, Homo sapiens
atcccttttcccttgattcctcccttggagtgagaggcctgttagcactttggaggtaagcatgcgcaatgtgtttactggagttgtacgcatgctcactrgaagtgttcttcccttaccagctgaatgtccttaggaggtcagataccagttaaactcctccattttgcctcttaatatgcatgcttgagcccactttcc

SEQ ID NO: 146739 - DNA, 201 bp, Homo sapiens
aggtggatcacctgaggtcaggagttcgagaccagcctggccaatatggtgaaaccccgtctctacgaaaaatacaaaaattagccaggcatggtggcacrcacatgtagtcccagctacttgggaggctgaggcaggagaatctcttgaacccagaagttggaggttgcagggagccaagatcctaccactgcactccaa

SEQ ID NO: 146740 - DNA, 201 bp, Homo sapiens
cctccctaccctagcaaattatttcaaggcaaatccttgatatagctcttcctaaaatccatagcattttttattcaaagttgtcaattttgcctgctatraacttcctcttttaaacatctgatcaaactacctgatagttcaaatagaagagcaggaaataaaattacacctgaaagttatgtaagttttaaagttagt

SEQ ID NO: 146741 - DNA, 201 bp, Homo sapiens
cttttaagtagaaaatttagtagcttcatagacacaagtgttgtttcctattattattgtgcttagtaggacatataaacaaagtttatcagttaagttgrtaagttctttatataaagatatgtctgctgtttgctttagatatatgttttatgcctttccctaaattgtatttagtgaagttgagagttcaagaatatt

SEQ ID NO: 146742 - DNA, 201 bp, Homo sapiens
ataacagtagtagagtgtgatcagttatgtatatatagtgtagtacctagagcaacaccaaatctactcaatcccttccagaaaacagaagaggaggaaaygatttccatttcgttttatgaagttagtattagcctgatacccaaaacaggcaaagaaagaatacagccaagatcactcttcaatacagatacaaaagtc

SEQ ID NO: 146743 - DNA, 201 bp, Homo sapiens
ggtcttttctctttcagcaaataagaacagctataccttgtccgccaccgcaagctgaagtatgtggctctttgatactgcagactcttttttttttttttctttttttttgagatggagtttcactctttttgcccaggctggagtgcaatgacacgatctcagctcactgcaacctctgcttctcaggttcaggtgact

SEQ ID NO: 146744 - DNA, 201 bp, Homo sapiens
actttgggaggccgaggcgggcggatcatgaggtcaggagatcaagaccatcctggctaacacggtgacaccccgtctctactaaaaatacaaaaaattasccgggcgaggtggcgggcgcctgtagtcccagctactcgggaggctgaggcgagagaatggcgtgaacccaggaggcggagcttgcagtgaaccgagatc

SEQ ID NO: 146745 - DNA, 201 bp, Homo sapiens
ttgggaggccaaggctggtggatcacctgagctcaggagctccagagcagtctgggcagcatggtgaaaccccatttctgcaaaaaaatacaaaaattagytgggcgtggtggtgcaggcctgtagacttagctactgagaggctgaggagggaggatcgcttgagcctaggaggtgaaggttgcagtgagctgagattgc

SEQ ID NO: 146746 - DNA, 201 bp, Homo sapiens
tattttgctctgaaattagaattatatagctcactcatcttcataagggaaataatatctactctatagattgtgaggatttattttgtatcaattgtgasgtttcagttctctaagttggctttatattagggggatatttaatgatgattctttaatttttttttttttttaaataaaaaagatgagatctcagtgtgt

SEQ ID NO: 146747 - DNA, 201 bp, Homo sapiens
agtaggttgtatgtttctaggaattttttcattttttctatgttttgcaattattggcatacagttgcttatagtagtctctaatgatcctttgaatatcyggggtatcacttgtaatgtctcctccatctgtgattttgtttatttagtctctctgttattctagacacactctgggtcagaagggaactctgactcaga

SEQ ID NO: 146748 - DNA, 201 bp, Homo sapiens
aactttgcgtttaatatggtattctgaatatctgttaagaatatgcttttgtttagacttttggtttgattttagtggatcttcttacgaaatatttctayagtgccatgtaacatagtaactagcactttataaaataattacaatgtaattagagtttttcacaccttgttttagcatttgctttatccatttattgaa

SEQ ID NO: 146749 - DNA, 201 bp, Homo sapiens
tctcttatttccttgagcagtggtttgtagttctccttgaagaagtccttcacatcccttgtaagttgtattcctaggtatttccattttattttattttmttttctttgtttgtcttttattggagtataggaatgcttgtgatttttgcacattgattttgtatcctgagactttactgaagttgcttatcagcttaag

SEQ ID NO: 146750 - DNA, 201 bp, Homo sapiens
ggtagagacaaggtttcgccattttgtccagactggtctcgaactgagctcgagcgatccacctgcctcggcctcccaaaatcctgggattagaggcttgmgccttctactgtgtctgtatgtatccagatacatcagaacttttcttaagccaattcttactttattttgctataatttttttttcttttagggaggggg

SEQ ID NO: 146751 - DNA, 201 bp, Homo sapiens
agcaaaactaaacaatatatttttacacacacatatgcagaatatgtgtatgtgatttacgtatgactatgccctaaagaaaagcagcaaagtgaggggasgtggacggcagggatggcacatgcagaagcacgcaagattccgcggtgtggagggttcgtgggtgcgtataattatcttccattatttacatgtgtactt

SEQ ID NO: 146752 - DNA, 201 bp, Homo sapiens
ccagttttataccattcctggtcagaaaaatacttgatatgatttcaatgcttttttgaattttttaagacttgttttgtggcctaacatatggtctgtcsttgagaatgatccatgtactgaggacaagaatgtgattctgcaactgttggctaaaatgtcctgtatatacctattaggtccatttggtctacagtgcag

SEQ ID NO: 146753 - DNA, 201 bp, Homo sapiens
actaaaaatacaaaaaaaattagctgggcgtggtggcacacgcctgtagtcccagctgcttgggaggctgaggcaggagaatcgcttgaacctgggaggcrgaggttgcagtgaactgagattgcgccactgcactccagcctgggtgacagagcgagactctgtctcaaaacacaaaagagaaaagctaaagtaagagca

SEQ ID NO: 146754 - DNA, 201 bp, Homo sapiens
tcttccctctctccctccctcccttcctcttttttgacacagccatgtcacctgggctggagtgcagtcgtgcaatctcagctcactgcaacctccgcctscgggctcaagcaatcctcccacctcagcctcccaggggctgggaccacagtgtgccgccactcccagctacttattgtatttttggtagagacaaggttt

SEQ ID NO: 146755 - DNA, 201 bp, Homo sapiens
ctttttggaggggggtgggcagggaacagggtccagctctgtggcctaggctggagttcagtaacaggatcatggctcactgcagcatggaactcctgggstcaagtgatcctcccgcctcagcctcctgagtagctgggactaaaaggtacatgccaccccaccctgggattttatttttgaagccaaggatctcagtta

SEQ ID NO: 146756 - DNA, 201 bp, Homo sapiens
tccttcttccctctctccctccctcccttcctcttttttgacacagccatgtcacctgggctggagtgcagtcgtgcaatctcagctcactgcaacctccscctccgggctcaagcaatcctcccacctcagcctcccaggggctgggaccacagtgtgccgccactcccagctacttattgtatttttggtagagacaag

SEQ ID NO: 146757 - DNA, 201 bp, Homo sapiens
tatagctcagagctaattttcaggttgagctctctgtagccctaggtactccaaaccaagtatttcaagagtcacctggagttgcgatacttggcagtttrgggggcaagaacccttgtactctttctgttcctcccctcccaactgggcagttgtatttattaagcatctgcaccatcctttgttgaagaaagggctccc

SEQ ID NO: 146758 - DNA, 201 bp, Homo sapiens
gtgctttcttttttcttttccttccttcttccctctctccctccctcccttcctcttttttgacacagccatgtcacctgggctggagtgcagtcgtgcartctcagctcactgcaacctccgcctccgggctcaagcaatcctcccacctcagcctcccaggggctgggaccacagtgtgccgccactcccagctactta

SEQ ID NO: 146759 - DNA, 201 bp, Homo sapiens
tatttttcagagtagttgacagggcaaaaattagattgcttattcgtttgagacttatttttgatttgttttatttttaaaggttgtaacggttgtcacarttcgaaccttcatttaatttcttgcttgaagattattacatgatgtagcataactaaattttatcttcttaatggtaatacttgtagactgtagaaaatt

SEQ ID NO: 146760 - DNA, 201 bp, Homo sapiens
agttgatttttctgcctgaaggatcctgaacatatttagttaccctgtagttatttaggaatttaaaccagaagactttgaagttgtatattcttgcaatrcataaaatgacattataatcaacaaacttatggtttgtttcaattgatgcacacaaaaaataacttatagttagacttttctatttcaagtaaagctttg

SEQ ID NO: 146761 - DNA, 201 bp, Homo sapiens
cacaaatcaggaagcattcccggatgaaaagcattcacagaaccatacgctggttcgccaccttcccggtggaaaaaccctttcctcggaaattctcagckcaaagactttgccctattccaaaatggctccggcgcctacaacttaagcatagcgcaggtccggaagttacgcaaccccataaggtagcacgccgttacc

SEQ ID NO: 146762 - DNA, 201 bp, Homo sapiens
tatttcatgttcattgtttataagatgtgattttaaaaacatgacgtaagtagtccatgttctttgtagaaaaaatggaaaatgcagatgaaaattaagayacttccacacttagatataagcattgttagcattttgatatatttttctagacctatatatgtatttttataaaaatagtatcatacagtttatattctt

SEQ ID NO: 146763 - DNA, 201 bp, Homo sapiens
aacttatggggaaaaaagagtgcctttgtactttgagctaattagaggcatctctagcacatgataaaaattcagttatccattgaatgaagccttttaayacttactgtatttatgttttgcatttttaccataacactttcttctgtttgtgtagccaaacatttcagtaatgcagagtcctcttgttggagttacatc

SEQ ID NO: 146764 - DNA, 201 bp, Homo sapiens
tataacaatgtgtatttgatatttcatgttcattgtttataagatgtgattttaaaaacatgacgtaagtagtccatgttctttgtagaaaaaatggaaartgcagatgaaaattaagatacttccacacttagatataagcattgttagcattttgatatatttttctagacctatatatgtatttttataaaaatagta

SEQ ID NO: 146765 - DNA, 201 bp, Homo sapiens
aatttagagtttcatctagatctagggcactcgtcagctgagaagtagtatggacttgtctttattttcttctttttttagggtccccaacagggtcctgmtcagttgcccaggctagagtgcagcggcacagtcataactctgcagccttgaactcctgggttcaaccaatcctcctgcctcaactgtcctattgggata

SEQ ID NO: 146766 - DNA, 201 bp, Homo sapiens
taagtcaccaaaaggtggaggaggcaagcggcaagcagtggatccttccttagagtctgcagcaggcatgccaccttgccaacaacataattttggacttygggcctccagaatttgtgagagaataaatttctgttttaagccatccagtttgtggtaatttgttacagcagccacaggtaactaatatatgtaaatatt

SEQ ID NO: 146767 - DNA, 201 bp, Homo sapiens
aaaggtggaggaggcaagcggcaagcagtggatccttccttagagtctgcagcaggcatgccaccttgccaacaacataattttggacttcgggcctccakaatttgtgagagaataaatttctgttttaagccatccagtttgtggtaatttgttacagcagccacaggtaactaatatatgtaaatattgttttgagac

SEQ ID NO: 146768 - DNA, 201 bp, Homo sapiens
ggccgaggcaagaggatcacgaggtcaggacttcaagagcagcctggccaatacggtgaaaccctgtctctactaaaaatacaaaaaaaattagctgggcrtggtggcacacgcctgtagtcccagctgcttgggaggctgaggcaggagaatcgcttgaacctgggaggcggaggttgcagtgaactgagattgcgccac

SEQ ID NO: 146769 - DNA, 201 bp, Homo sapiens
tgtaccatattcttgtcacatttacagtgaaaaagtgagttatttaggtaatctgaaaagttcacctaggccctgctcaccatatctaggaaagaaaataygtcccggcacatttttcagttattttggcttccactgtagtaatcatggcttggaataattatggtagaattttcatatatcattcaccaatttagggtc

SEQ ID NO: 146770 - DNA, 201 bp, Homo sapiens
acagtatttaacattttgtttgcaattttactttttcttcccttcttccctattgaaccttgattaaaatgtatgaatacaatacttggatttttttttttcagcttagactctgataatttcagtggtagtggggaaacctgaatttgtcagcatgattatttgtaactcagattgttcaaatgtatatagaaggtcccc

SEQ ID NO: 146771 - DNA, 201 bp, Homo sapiens
tacagtatttaacattttgtttgcaattttactttttcttcccttcttccctattgaaccttgattaaaatgtatgaatacaatacttggatttttttttttcagcttagactctgataatttcagtggtagtggggaaacctgaatttgtcagcatgattatttgtaactcagattgttcaaatgtatatagaaggtccc

SEQ ID NO: 146772 - DNA, 201 bp, Homo sapiens
aagagcccattgtgccctccttcctgtctggtgctttcttttttcttttccttccttcttccctctctccctccctcccttcctcttttttgacacagccrtgtcacctgggctggagtgcagtcgtgcaatctcagctcactgcaacctccgcctccgggctcaagcaatcctcccacctcagcctcccaggggctggga

SEQ ID NO: 146773 - DNA, 201 bp, Homo sapiens
agcgtttttcattgatttttttctctcatttttcacataagctgagacagaatgtatgacttttgaacactctagaatttaggcttattgatgtttttttwaaaaaagaatttaattagggaaaataacaaacatacacaaaattatagacaatagcattgagttctagcactctgaaaaaagaaaaagaaaaacaaagaa

SEQ ID NO: 146774 - DNA, 201 bp, Homo sapiens
ctgggattacaggtgcgcaccaccatgcctggctaatttttgtatttttaatagagacggggttttgccatgttggccaggatggtctcaaatgcctgacrtcaagtgatccacctgcctcagcctcccaaagtgctgggattataggcatgagccaccatgcctggaaggctaatatatatttagttttagcaataaaaa

SEQ ID NO: 146775 - DNA, 201 bp, Homo sapiens
aaattttatttactctcatgtcagattaactatgctaccattgagtggtctctagttatggtggtggcaatgtttatgttttagtcaaaataataaattcrgatggttttagaaaattaaatagaacttactgtaatcccagcaatttgggaggccaaggcgggtagatcacctgaggtcaggagttcaagatcatcctgg

SEQ ID NO: 146776 - DNA, 201 bp, Homo sapiens
ttatttttatttcttgggtccccagaagttgcccaggctggtctcaaactcctggcctcaagtgatcctcttgcctcacccttctgagtggctaggattayaggctgaggccaccatgtccagcgtttttcattgatttttttctctcatttttcacataagctgagacagaatgtatgacttttgaacactctagaattt

SEQ ID NO: 146777 - DNA, 201 bp, Homo sapiens
ctcagtgccgtgacacaatctcagctcactgcaactccacctcctgcactcaagtgattctcctgcttcagccttcctagtagctgggattacaggtgcgmaccaccatgcctggctaatttttgtatttttaatagagacggggttttgccatgttggccaggatggtctcaaatgcctgacgtcaagtgatccacctgc

SEQ ID NO: 146778 - DNA, 201 bp, Homo sapiens
ggtatttatttttaatgtattttagagatcaaaaactcttcatttccagttccaaatttttctattcaacaaaaacattttggagtgcatatttattggggttacaaatgtgagtaaaccaatccctgtatattgccttgccagaaatctgacattagccagtattaatgtttaagtccacattttgcagatattccaggt

SEQ ID NO: 146779 - DNA, 201 bp, Homo sapiens
caaattagtttatcaaaggctacatcgtatgctgaatgacagataagaccattaggctaaaattcaattgttgaatatattatatttaatatatatctatygctgggtaaataagtcaatgtattacatgaggtaggtaaaattattcacactattcagatttttaaaacagagtcttagagatgttaatgtcacatgtct

SEQ ID NO: 146780 - DNA, 201 bp, Homo sapiens
gaattagatttcagaaatatgttctaccctctcaagccttgtgttttatactggaatcctaacctcagccaatatttccctgccctgaaaactcagtgccrtgacacaatctcagctcactgcaactccacctcctgcactcaagtgattctcctgcttcagccttcctagtagctgggattacaggtgcgcaccaccatg

SEQ ID NO: 146781 - DNA, 201 bp, Homo sapiens
tacccgagacgcgatgctggttgctggattcccagctggttgctggtccccagaagcatccctgggaggaactgaccgcggtacacgtgggtgggcggtgycctgaagtgtgtgggtgcagtccactgcttcttgatcacctgtgcttccagttcctgttttgactcctctctcccgggctttgccaaaggaatcttgtta

SEQ ID NO: 146782 - DNA, 201 bp, Homo sapiens
attttttgtattttagtagagacagggtttcaccgtgttgcccaggctggtcttgaactcctgagctcaggcagaccacctgcctcagcctcccaaagtgytaggattacaggcatgagccactgcacctggccaagggagaggttttctaattcaaagcctaatattggccattctgttttcttgttaaaaaatttacag

SEQ ID NO: 146783 - DNA, 201 bp, Homo sapiens
aacctcaggggcccgcgttaggtgagtgaaatattgcttttccttgctggcactgccatccatgctctgggcctggaggcgggcaagactgaaaggcagtmgtcaggctctcgtctgctggtttcagtcgcggagagggaatccttgggtgcccccaagttcatagtcggtcccctactcgacgcgtcgcctccatactgc

SEQ ID NO: 146784 - DNA, 201 bp, Homo sapiens
agcctcctgagtagctgggattacaggcatgcaccaccatgcccagctaatttttgtatttttagtagagatggggttgtgccatgttggccaggcttgtstcaaactcctgacctcaagtgatccacccacctcagcctcccaaagtgctgggattacagacaggagccaccactcctggccaagaacatgtttccatgc

SEQ ID NO: 146785 - DNA, 201 bp, Homo sapiens
aatctttttcaacatcttcttttatttaaagaagtatcactcttttctctttctctgcatctgttcctaaataaacccgttattaaataaaaatggtgccrtatatgcatgcatgttttcaaattactttttttcattatatctatcacagaggtctttctaggttaatatttacactcatatcaaatccatctaattcat

SEQ ID NO: 146786 - DNA, 201 bp, Homo sapiens
ggaaaagattgtcaaagctgttggatactgcagatgtcaaggaggcaggtctaatttggcaattagaaaaaaaaaatagttggggtcagtagttttatttyggaagagcattacacaggagccaatctgtaattaattaaaaatcaaaatagtaaagatagggaaacagataatttactaaaatctatagacacttctttt

SEQ ID NO: 146787 - DNA, 201 bp, Homo sapiens
tctaaattctgctaatgcactatgaattcaattttgagtttctaagagatggaaagaaaaagacaaaagatgagcttgcttttgaggtttgatgtacgggkaggttgtccagcaagcatctggaaaagtggcatttggctttagagatgttgggtatagattattaaaaattatttgcacagggtgacaatgataaggatt

SEQ ID NO: 146788 - DNA, 201 bp, Homo sapiens
agtttggggggcaagaacccttgtactctttctgttcctcccctcccaactgggcagttgtatttattaagcatctgcaccatcctttgttgaagaaaggsctccccacctaagtttgataatcaatggtctacaaaaatagcactatgatgaaatctgatgtcctgggaggaaggaattcagaacagaaataggaaacag

SEQ ID NO: 146789 - DNA, 201 bp, Homo sapiens
atagctcagagctaattttcaggttgagctctctgtagccctaggtactccaaaccaagtatttcaagagtcacctggagttgcgatacttggcagtttgsggggcaagaacccttgtactctttctgttcctcccctcccaactgggcagttgtatttattaagcatctgcaccatcctttgttgaagaaagggctcccc

SEQ ID NO: 146790 - DNA, 201 bp, Homo sapiens
gaaaagattttggcagtttttaaaaaagctaaatacacaactactgtgtgacccagcaactatacccctgggcattttccccagataaatgattatatatwttaatacaaaaacgtgtacatgaatgtttatagacagtttatttgtaataggcagaactggaaacaacccagatgttcttcaatgggtgaatggctgtct

SEQ ID NO: 146791 - DNA, 201 bp, Homo sapiens
gagagtgaggtgggacatgctacacacttttaaacaaccatatctcatgagaactcactatctcaaagacagtaccaggagggatggtgctaaaccattcrtgagaaatccacccccatgatccaatcacctcccaccagaccccacctccaacactgtggattatatttcaatataagatttgggtggggacacagatcc

SEQ ID NO: 146792 - DNA, 201 bp, Homo sapiens
aatttaaaaaataaagtttgccttaatttgggccagtaaattagagtggattttagcttgggtttcctaaaaataaagcctgagatgaggatttagagctkatgcttaatttgagaggtacaatctctaggcagtgagagtggcaagaaaggaaagtgattcaaggtgggacgagaagcaatacaaagtgatgcgtttacc

SEQ ID NO: 146793 - DNA, 201 bp, Homo sapiens
aacaaaaatagctacaacaattttgaaaaagaagaataaagtaatctggtttcaagactggttatatagctacagtagacaggactgtgtagtattggcaragagacagacacttaaatcaatggaacagaacaaaaaaatccagaagtagacccatataaatatgttcaagtgatctttgacaaaggtgcaaaagcaatt

SEQ ID NO: 146794 - DNA, 201 bp, Homo sapiens
cttcccttttgttcgttcgttcgttcgttccttccttcctccctccctccctccctccctccctctctcttctcttgtcttgtcttgtcttttcttttctwatcttttcttttcttttgttttctttcttctggctgtgtcaccgaggctggagtgcagtggcataaccatagcttactgtaaccccgaattcctaggttc

SEQ ID NO: 146795 - DNA, 201 bp, Homo sapiens
ttttttttaaaagacagggtctggctctgctacccacgctggagtgcagtggtgtgatcacggagtaaacaactctgacaccaaatacttctctattcttygaatgaatttaatataaaatgtttgttggtaactgccaaaattttttattttatatttcaaacttggagattttccaaaatctataacttctttcaggaa

SEQ ID NO: 146796 - DNA, 201 bp, Homo sapiens
aaaatgtatacggaaaggcaagaaacaaaaatagctacaacaattttgaaaaagaagaataaagtaatctggtttcaagactggttatatagctacagtaracaggactgtgtagtattggcaaagagacagacacttaaatcaatggaacagaacaaaaaaatccagaagtagacccatataaatatgttcaagtgatct

SEQ ID NO: 146797 - DNA, 201 bp, Homo sapiens
tgaaaactaagattttcattaactacttactctgaatccttttattcagagtgcagtctatggatcagcagcattggcatcacctgggagcttattagaastgtataatctcaggcttcaccctacaccttctgaatcagagtctgaattttaacaaggtccccaggtgactgttcagcatattaaagtttgaaaagaact

SEQ ID NO: 146798 - DNA, 201 bp, Homo sapiens
ggctactggtgtgttaggcttggtgggagaaactgaaggcagggagatgtaaggagttgactgcaattgtataggaattgaagaggcagaaagaatatctsaatgtttgatggtagagaaggtgaatgtcagaaaaaacaaagcggagcagacactgtactaagaataaccatttttcaaagtaggtattgtttctatttt

SEQ ID NO: 146799 - DNA, 201 bp, Homo sapiens
aaagaaaaaaaaaaaggcaaaaacacataatgttaagtaatgttttacattttagcggctctcttagttgactgaaaagcatacattttaattttcctacygttgtcaagtagaaaagcgcatgattaatgttaataaatatctttttgttaacttatttttttctaatatagtaacttctgtgaggttttgtaattgtag

SEQ ID NO: 146800 - DNA, 201 bp, Homo sapiens
cttctatgtaatttaagtacccacaaatcaggaagcattcccggatgaaaagcattcacagaaccatacgctggttcgccaccttcccggtggaaaaaccytttcctcggaaattctcagcgcaaagactttgccctattccaaaatggctccggcgcctacaacttaagcatagcgcaggtccggaagttacgcaacccc

SEQ ID NO: 146801 - DNA, 201 bp, Homo sapiens
gtatgaagagacactttactgaagaggatatacagatgacaaataagcacataataaaatgttcgacatcatagctactggggaagtgcaagttaaaaccrcaatgagatatcactacatacccaccagaatggctaagagataatgacacaccaaatgttggcaaggatatagagaaatggaatcacttatatgttattg

SEQ ID NO: 146802 - DNA, 201 bp, Homo sapiens
gtaagaaactttaaatatacttttaggagacccacaatcatttacagttttatctttggcctttgaataggttcttttttctttaatgtctccgtatttgmagaactgagctctgtacgttataaatttgcttaaagattttgattttttcttcagaatatggtatacttaaaattaattaattaagacagtttctttttt

SEQ ID NO: 146803 - DNA, 201 bp, Homo sapiens
aagcgattctcttgcctcagcctcccgagtagctggcattacaggtgcctgccaccacacccagctaatttttgtacttttttagtagagacggggtttcmacatgttggccaggctggtctcgaactcctgacctccggtgatccacccgcttcggcctcccaaatttctgggattacaggcatgagccactgtgcccag

SEQ ID NO: 146804 - DNA, 201 bp, Homo sapiens
tccccagaagttgcccaggctggtctcaaactcctggcctcaagtgatcctcttgcctcacccttctgagtggctaggattacaggctgaggccaccatgyccagcgtttttcattgatttttttctctcatttttcacataagctgagacagaatgtatgacttttgaacactctagaatttaggcttattgatgttttt

SEQ ID NO: 146805 - DNA, 201 bp, Homo sapiens
gggaagaagccaaattagtttatcaaaggctacatcgtatgctgaatgacagataagaccattaggctaaaattcaattgttgaatatattatatttaatrtatatctatcgctgggtaaataagtcaatgtattacatgaggtaggtaaaattattcacactattcagatttttaaaacagagtcttagagatgttaatg

SEQ ID NO: 146806 - DNA, 201 bp, Homo sapiens
gaaagacttgtttggcagattaatgggggaagaagccaaattagtttatcaaaggctacatcgtatgctgaatgacagataagaccattaggctaaaattyaattgttgaatatattatatttaatatatatctatcgctgggtaaataagtcaatgtattacatgaggtaggtaaaattattcacactattcagattttt

SEQ ID NO: 146807 - DNA, 201 bp, Homo sapiens
taccaggagggatggtgctaaaccattcgtgagaaatccacccccatgatccaatcacctcccaccagaccccacctccaacactgtggattatatttcartataagatttgggtggggacacagatccaaaacatatcagaggtctttggtgactttggaaagacttgtttggcagattaatgggggaagaagccaaatt

SEQ ID NO: 146808 - DNA, 201 bp, Homo sapiens
ctaaaatgtatacggaaaggcaagaaacaaaaatagctacaacaattttgaaaaagaagaataaagtaatctggtttcaagactggttatatagctacagyagacaggactgtgtagtattggcaaagagacagacacttaaatcaatggaacagaacaaaaaaatccagaagtagacccatataaatatgttcaagtgat

SEQ ID NO: 146809 - DNA, 201 bp, Homo sapiens
aattaaaaaaaaaaagtgaagaaatatttaggtgtaaatttaatataacatgtacagaacttatatgccaaaagctatagaatgctaatgaagaaataaaragagatctaaataaatgtagaaaattgttaatgtattgaaaaattaagtgtagtaaaggtatcaatttacctcaaattgatacacagctttaatcaaatt

SEQ ID NO: 146810 - DNA, 201 bp, Homo sapiens
atttgtaccacacagaatgatctgggctggcgatatgaattgagagtcattgtaggcaatgtgcatggatgacaacatatgaggaaagagtgtagggcaargccagatcataagataaagccttgggggacaattttattattattattactatttttatagagacagggtcttgctatgttgcccaggctggtctcgaac

SEQ ID NO: 146811 - DNA, 201 bp, Homo sapiens
tatggattattttttaaagtacagaaatatataactcaaacagtaacctcatctagttatgagggaaggctttcctgacttttgagtgacatttaccatcrgttagaaaagataagtaggcgttgactaagtgagggagagtgggttgttgcaggtcttccaaaactgagggaggagaataggtaaagacccagggttggg

SEQ ID NO: 146812 - DNA, 201 bp, Homo sapiens
tttcttccagggcatggggtcttgctatgttgctcaggctagactcaaactccagagctcaagcaatcctcctgtctcagccttccaagaatctgggactrtaggtatataccaccaggcacatacaaaaataacacatatattgtgtatgttatatgtattccataatcttacaataaagtaagatagagaaaaaatgtt

SEQ ID NO: 146813 - DNA, 201 bp, Homo sapiens
catattcttgtcacatttacagtgaaaaagtgagttatttaggtaatctgaaaagttcacctaggccctgctcaccatatctaggaaagaaaatatgtccyggcacatttttcagttattttggcttccactgtagtaatcatggcttggaataattatggtagaattttcatatatcattcaccaatttagggtcttcat

SEQ ID NO: 146814 - DNA, 201 bp, Homo sapiens
agatgttcttcaatgggtgaatggctgtctaaagtgtgatgcatccatgccatggaataccattcagtaataaagaggaacaaactaatgatgtgtgtgcrtcaagccgaatgaatctacaaagaattatgctgagtaaaaaagtcaatccccaaaatgttacatactgtatgattccactactataacattcttgacatg

SEQ ID NO: 146815 - DNA, 201 bp, Homo sapiens
tagctactggggaagtgcaagttaaaaccgcaatgagatatcactacatacccaccagaatggctaagagataatgacacaccaaatgttggcaaggatayagagaaatggaatcacttatatgttattggtggaagtgtaaaatggtacggctactctggaaaagattttggcagtttttaaaaaagctaaatacacaac

SEQ ID NO: 146816 - DNA, 201 bp, Homo sapiens
gtatttgtcatatttacattcccctctactactgtggatagtcatgagtggactgttctgacctgtgctcctcaaagtgttgtccagtttgctaccagacytctgcaggataagaaggttgtgcctgaatataaaccaagacattgcttagttctttgagagattttggctactcccccaccccacccaaacgctgaacta

SEQ ID NO: 146817 - DNA, 201 bp, Homo sapiens
tatgattgcaccactgcacgcgagcctgggtgacagggagacctcaaagaaaaaaaaaaaggcaaaaacacataatgttaagtaatgttttacattttagyggctctcttagttgactgaaaagcatacattttaattttcctaccgttgtcaagtagaaaagcgcatgattaatgttaataaatatctttttgttaactt

SEQ ID NO: 146818 - DNA, 201 bp, Homo sapiens
agccatgtaactgaggttgaatgtctaggaaaattagtgctgaacagccttaagctgatcaaactgtaacaaataggtggatgatgatgctttgttacacrcagaaatagtgattattcagttatttgagtcatgccaggtgccactggctcatgcctgtaatcccgaggcaggtggatcacttgagtccaggagttttga

SEQ ID NO: 146819 - DNA, 201 bp, Homo sapiens
caaaagttacatgtgttttctgaaaactaagattttcattaactacttactctgaatccttttattcagagtgcagtctatggatcagcagcattggcatyacctgggagcttattagaactgtataatctcaggcttcaccctacaccttctgaatcagagtctgaattttaacaaggtccccaggtgactgttcagcat

SEQ ID NO: 146820 - DNA, 201 bp, Homo sapiens
acttttaggagacccacaatcatttacagttttatctttggcctttgaataggttcttttttctttaatgtctccgtatttgcagaactgagctctgtacrttataaatttgcttaaagattttgattttttcttcagaatatggtatacttaaaattaattaattaagacagtttcttttttcttttctttttttttttt

SEQ ID NO: 146821 - DNA, 201 bp, Homo sapiens
gttggagtgagctgagatcgagccactgcactccagcctgggtgacagagcgagactttgtctccaaaaaaaagaaatcttggaggcctttttagaagtcygtctactgtgtatgtcatgatcaaacatctagaatgtcaccctagtcttttcagccatgtaactgaggttgaatgtctaggaaaattagtgctgaacagc

SEQ ID NO: 146822 - DNA, 201 bp, Homo sapiens
tcatgggttagtaggtaagggaggtacaggttgattgattgattgattgagtttccatttgttgctggtaatgaattttatttcaataatcaaataaattraatcaaataaatcaataaaactgaatatttactttatactttcaagtagtataagaatgtgcaattgatataataacctttctcaaatgaataatgaaga

SEQ ID NO: 146823 - DNA, 201 bp, Homo sapiens
ataggttactacttgcccatagcaaaatggtgattttgaatttttgaaagaacactttcctttcagaaatgcagaacaaatgtattcacttagcaaaaagytatggaataactactatatgccaagaattgcactaaatactaggcatacaaagatggttaagacattcctcataccctcatttcacttggaaagaggcag

SEQ ID NO: 146824 - DNA, 201 bp, Homo sapiens
ggtcttgaactcctgagctcaggcagaccacctgcctcagcctcccaaagtgctaggattacaggcatgagccactgcacctggccaagggagaggttttytaattcaaagcctaatattggccattctgttttcttgttaaaaaatttacaggctctggattgtaacattccagtgtgtgagttaatagttttaaaaata

SEQ ID NO: 146825 - DNA, 201 bp, Homo sapiens
gagtctcgctcatttgctcaggctggagtgcagtggcatgatcgtggctcactgcaacctttacctcctgggttcaagtgattctcagcctttggattatyttaatggactgtctgcctggctttcttccacatggttggtggactctaggaaaaggggctcaaatacatagatgcaagaggaggaggttgctcaagtgta

SEQ ID NO: 146826 - DNA, 201 bp, Homo sapiens
tttgtagagatgaggtcttgccggattcaggtgatccttgcaccttgacctctcaaagcgctagattataaatgtgagccactgtgcctggccgacttttcttttaagtagaaaatttagtagcttcatagacacaagtgttgtttcctattattattgtgcttagtaggacatataaacaaagtttatcagttaagttga

SEQ ID NO: 146827 - DNA, 201 bp, Homo sapiens
tgcaagttggcgttattaagccatggttgctcctaggtgagtatatcgacttgccactagatcattgagtccttttagccagattacgttctcattttccycctttatgcgtaatagtctgtattatcagctatcctgccgaaaagctgaactgtttccttttttggatatggaacttccattagccagctagagccgttt

SEQ ID NO: 146828 - DNA, 201 bp, Homo sapiens
gacaacaggtatgtgccaccatatccagctaattttttgtattttgttgttgttgttgagacagggtttcaccatgttacccagtccggtctcgaactccyggactcaagtgatcagcctgcctcagcctcccaaagtggtgggattatagttgtgagctattgtgcctgtcctcaagacattattatatgaaggaaaatg

SEQ ID NO: 146829 - DNA, 201 bp, Homo sapiens
gctgggattacaggcgcctgccaccacacccagctaactttttgtatttttagtagagatggggtttcaccatgttggccaggctggtcttgaactcctgrcctcaggtgatccaccctcctcggcctcccaaagtgttgggattacgggcgtgagccctgcgcctggccctgtctgtataaaacaatttgaatgacagtg

SEQ ID NO: 146830 - DNA, 201 bp, Homo sapiens
aaagctgaactgtttccttttttggatatggaacttccattagccagctagagccgtttctgcctcacagtgtacccataagaagcatagatgctattctsgtagcacttggcactgcatatttgaattttagaaaagctttcttcccgtttctctaacttctctggagaataacacattgatgttgtgttttcttggctt

SEQ ID NO: 146831 - DNA, 201 bp, Homo sapiens
tgtttgtgtagccaaacatttcagtaatgcagagtcctcttgttggagttacatctactcctggaacaggtaagtgattctttcttttttttttttttttwaaagacagggtctggctctgctacccacgctggagtgcagtggtgtgatcacggagtaaacaactctgacaccaaatacttctctattcttcgaatgaat

SEQ ID NO: 146832 - DNA, 201 bp, Homo sapiens
tttttgaaaaacccaaacaatattcttcttagatttttggaggcaaaatttagaccagtatactaattcaaaagacaaatatttcagaggaagtggagtayagtatttaacattttgtttgcaattttactttttcttcccttcttccctattgaaccttgattaaaatgtatgaatacaatacttggatttttttttttc

SEQ ID NO: 146833 - DNA, 201 bp, Homo sapiens
tttctcacatactgcaaacttaaaagatacatacaccaaatataggtctgttttaaaggagaggaaaaatagttcaaggagtttttgcctctttgtttttmaatagattattctgccattttttaaaggaaagggaaaatgaaaacagcatgtctttttaaacattgaaaagaaatatggaggctttaaaccgcaaactga

SEQ ID NO: 146834 - DNA, 201 bp, Homo sapiens
ttaagaaagtttaccaatttgtgttgggcaacattcaaagccatcctgggcttcatgcggtgttcaagccatgggtgggacaagcttgtgctagaattttwaaaagtgtagtggtgcagcattcaccctcatcaatacattaattaaaaaaaattaagcaatgtgtctattataaagcaaagcttttaaggctcttggaat

SEQ ID NO: 146835 - DNA, 201 bp, Homo sapiens
tttttttcttttagggagggggagtgaatgtagtgaatgttaccaaaaactttgcgtttaatatggtattctgaatatctgttaagaatatgcttttgttyagacttttggtttgattttagtggatcttcttacgaaatatttctacagtgccatgtaacatagtaactagcactttataaaataattacaatgtaatta

SEQ ID NO: 146836 - DNA, 201 bp, Homo sapiens
atgcttgccatgtttggtgtaaaataagttctttttgagaatagagtaacttgaactactttagtctgtcataaaaaaactaaatgcataatgtcaataaygcagatactctgcattaaaatttatatatagatgtcgtcttggtatttatttttaatgtattttagagatcaaaaactcttcatttccagttccaaattt

SEQ ID NO: 146837 - DNA, 201 bp, Homo sapiens
ttttctttttttttttggtggggggtggtgggcacttttgtttttgttttgagatggagttttgctttgttgcccaggctggagtgtagtggcacaatctyggctcactgcaacctgcctccccaggttcaagtgattcttctgcctcagcctcccaagtagctgggactacagatgtgcaccacatgctgggctactttt

SEQ ID NO: 146838 - DNA, 201 bp, Homo sapiens
tcatttatcccaaagtcagtttcactgggctaaagtcaaggggttgataggattacctctggagattctatggacaatcagcttccttgtttttttttttwtcctcagcatctagctggattctcctttatgcctttttcctccatcttcaaagcatatcattccattccctgcttccataatcacatagccttccctgaa

SEQ ID NO: 146839 - DNA, 201 bp, Homo sapiens
tgtattgctttacttagattgtatgaaaatgctgatcagaaactgtctgttggttttctgaagttagaagaccaatagccaatgtcatatagtacttcagkcttgttattgaagtcaacattctgacaggcaaagtttctaggttggctgttatcaacaattattccttgaaatgtcatcatttttagtcagcaaataatt

SEQ ID NO: 146840 - DNA, 201 bp, Homo sapiens
ttcagatggttttagaaaattaaatagaacttactgtaatcccagcaatttgggaggccaaggcgggtagatcacctgaggtcaggagttcaagatcatcytggccaacatggtgaaaccccatctctacaaaaactacaagaaattagccaagcatggtggtggacacctgtaatcccagctactcaggaggctgaggca

SEQ ID NO: 146841 - DNA, 201 bp, Homo sapiens
gaaatttgaaagtgtggatccattacccaatctttattatttttataatgaatctctaaaaaacaattatgaaatttcccttctaacaatatttcattatytcctacaattatttggttaattgctcttttttcaatgagatgtttagtttcaacattaattcagactataaaacagagactgctctagacttgttagtgt

SEQ ID NO: 146842 - DNA, 201 bp, Homo sapiens
tggtggcaatgtttatgttttagtcaaaataataaattcagatggttttagaaaattaaatagaacttactgtaatcccagcaatttgggaggccaaggcrggtagatcacctgaggtcaggagttcaagatcatcctggccaacatggtgaaaccccatctctacaaaaactacaagaaattagccaagcatggtggtgg

SEQ ID NO: 146843 - DNA, 201 bp, Homo sapiens
ttcctttatattttttattactttttttcttgagaagttctttcacttatatattagctctcttccaaaatggtaggtcactcgttaattaactagaatcwtttgtgttagcatattgttaacaggttaagcgtgatattaagtgatagtagcactttatggctgcttttgttgatgcaaggacctcagagttttgatagt

SEQ ID NO: 146844 - DNA, 201 bp, Homo sapiens
catggccaatgataggcaagaaatagaaaaagagaattgacaggaaaattgaggggaaaacctagatttttcatttagagctatatatatatatatatatatttttttttttttttttagctcctgtatttagtgttaagtgaagtttttttggatgattagtaaatcttagctttctgagattggcaagttttataaaga

SEQ ID NO: 146845 - DNA, 201 bp, Homo sapiens
ctgggagccactgctgcttctactttgactttaaggaatttacacatagaaagtcttaatggggtataagtgacaaagaatatttttgaaaagatgacaasgtgtggagacctatcatgcatggccaatgataggcaagaaatagaaaaagagaattgacaggaaaattgaggggaaaacctagatttttcatttagagct

SEQ ID NO: 146846 - DNA, 201 bp, Homo sapiens
ggaagaccgcttgagccggggagtttaaggctgtaggcagctatgattgcaccactgcacgcgagcctgggtgacagggagacctcaaagaaaaaaaaaaaggcaaaaacacataatgttaagtaatgttttacattttagcggctctcttagttgactgaaaagcatacattttaattttcctaccgttgtcaagtagaa

SEQ ID NO: 146847 - DNA, 201 bp, Homo sapiens
tcccagctacttgggaggctgaggtgggaggatcacttgaacctgggaggcagaggttggagtgagctgagatcgagccactgcactccagcctgggtgayagagcgagactttgtctccaaaaaaaagaaatcttggaggcctttttagaagtctgtctactgtgtatgtcatgatcaaacatctagaatgtcaccctag

SEQ ID NO: 146848 - DNA, 201 bp, Homo sapiens
gttgctgccataacaaactaccacaaacataaaagtggcttaaacaatacacattcattatctttcatttctggaggtcggaagtttgaaatgggtcttgrtgggctaaaatctagacattggtagggctgtgttcatttatggaggttctagacaaaaatctatttttctttttttttttgagatggagtcttggtctgt

SEQ ID NO: 146849 - DNA, 201 bp, Homo sapiens
tctgaacatgttaggttttgggtgatgtggatcatctaggtgggtggatatgtagggtctgaagttcagaatagaggtgaatatatagatttaggaatctkcagcttttaagtagttactgaaaccattagaatagatgaagctgcctggggaaaagtgtaaagtaagagagaagagggcctatgacagaatcttatcaca

SEQ ID NO: 146850 - DNA, 201 bp, Homo sapiens
ccctgcttccataatcacatagccttccctgaagtaaaatctcctacttccctcttgtaaggatacttgtggttacatatagggcccacctggataatctycccatctgaggatctgtaatcacatctgcaagatcccttttgccacatagatagcatttgcagatttcagggattagaatgttgttatcttggagggctg

SEQ ID NO: 146851 - DNA, 201 bp, Homo sapiens
ttgatgatgaactgtacttaacagtgtagaactctagattttctctcataggtaattctcaggtgtttataggtatgccttatccacctgcccatagctcyaacctacttaatatacatgtagaatgtgactatggtttaaatcattctgattgtttaagaagtttaatatttaatatttaaaaattatgtgaaagaacaa

SEQ ID NO: 146852 - DNA, 201 bp, Homo sapiens
accactgcactccagcctgggcaacgagagcaaaactccattcaaaaaaaaaaaaaaaaaaaggaaaattaaatagaactttaatacaacaaaatgcaatratctttaaccttattatgaactagccagtccagatcttagagctattctttttggaatttactatgtccaaattagatgctatattagtttactcttgcc

SEQ ID NO: 146853 - DNA, 201 bp, Homo sapiens; identical to SEQ ID NO: 27261

SEQ ID NO: 146854 - DNA, 201 bp, Homo sapiens; identical to SEQ ID NO: 27262

SEQ ID NO: 146855 - DNA, 201 bp, Homo sapiens
ttacctgaaatgtttttcatttattgacctcatgctggtatgtgattaccttttccacttcacattgttatgagctatttgtgtcacattttactacatcrtaagtttaaatatttttaagtaactttctgccaggataaaatatgtgcaagggtagaaaattttttccttgctgattatttaaacagatttgcaagccat

SEQ ID NO: 146856 - DNA, 201 bp, Homo sapiens
tttcaaacttggagattttccaaaatctataacttctttcaggaaggaaatactttgtatattgattattttctgaatcaaatcaccctaaaggtatggtrgggtgaatattcagaatgtctttttaagaaattgtatacttaatagatgtttgaagtatctccttagttattaaaacttgtcaataaaaaagccattgga

SEQ ID NO: 146857 - DNA, 201 bp, Homo sapiens
aggaaaaacacctgggcctggctcagttactgttaacaactattaattacttattctgagaagatgtgagggatacacattgctgccctcaaggagcttgmaatctagttgaaaactataatagcacaagaacaaagacaactctatgaaatggaaataacatagcataattactatctgcctataggttactacttgccc

SEQ ID NO: 146858 - DNA, 201 bp, Homo sapiens
tcagcatattaaagtttgaaaagaactaacagacaagattttaagtcagtatttcaaaaatataaatttaaaaaatcttaccaaaaagaagaatccctttwttttttttttttttgtacactgtaggtgggtcaccaccacaaccagttgtaccagctcataaagataaaagtggcgctccaccagttagaagtatatatg

SEQ ID NO: 146859 - DNA, 201 bp, Homo sapiens
cgtcagtttcctaaggataatggcttccagctccatctgtgtccctgcaaaggacatgatctcattctttttatggctgcatagtattccatggggtataygtaccacattttcattatacagactatcattgattggcatttgagttgattccatgtctttgctattatgaatagtgcttctgcccaagttttttttttt

SEQ ID NO: 146860 - DNA, 201 bp, Homo sapiens
tcagcagccacctcgaagccaaatctaacacccagtaatacaacttttcaaccaagttgagaattagaaaatccagaactcagagtacgcctgtctatactgtggacaccatggaagaagagctccttctttgacaggcaaaagtgaaagcaggggagagcagtcagccatggaggtggtagccgaggtggagcatgctga

SEQ ID NO: 146861 - DNA, 201 bp, Homo sapiens
ttgaagtcaacattctgacaggcaaagtttctaggttggctgttatcaacaattattccttgaaatgtcatcatttttagtcagcaaataattcttacagrctttatgtaagatacgtagatgggaaagtagaagcatttacagagagaaataactcttctggaacacctaacaatgacaggattacaatcaggtttaatt

SEQ ID NO: 146862 - DNA, 201 bp, Homo sapiens
tatatatatatatttttttttttttttttagctcctgtatttagtgttaagtgaagtttttttggatgattagtaaatcttagctttctgagattggcaasttttataaagagatgtcatgggatataatggcatgactgccactttatgcttaggttgttttttgcatccaataaagaggttggtgggtttattttattt

SEQ ID NO: 146863 - DNA, 201 bp, Homo sapiens
tttacttagattgtatgaaaatgctgatcagaaactgtctgttggttttctgaagttagaagaccaatagccaatgtcatatagtacttcagtcttgttaytgaagtcaacattctgacaggcaaagtttctaggttggctgttatcaacaattattccttgaaatgtcatcatttttagtcagcaaataattcttacaga

SEQ ID NO: 146864 - DNA, 201 bp, Homo sapiens
gtgtattgctttacttagattgtatgaaaatgctgatcagaaactgtctgttggttttctgaagttagaagaccaatagccaatgtcatatagtacttcartcttgttattgaagtcaacattctgacaggcaaagtttctaggttggctgttatcaacaattattccttgaaatgtcatcatttttagtcagcaaataat

SEQ ID NO: 146865 - DNA, 201 bp, Homo sapiens
cactctaaggactaaatgtgtattgctttacttagattgtatgaaaatgctgatcagaaactgtctgttggttttctgaagttagaagaccaatagccaaygtcatatagtacttcagtcttgttattgaagtcaacattctgacaggcaaagtttctaggttggctgttatcaacaattattccttgaaatgtcatcatt

SEQ ID NO: 146866 - DNA, 201 bp, Homo sapiens
ctcctgggttcaagcgattctcctgcctcagcctcccaagtagctgggattacaggcatgtgccaccatgcccggataatttttgtattttttagtagagwtggggtttcaccatgttggccaggctggtctggaactcctgacctcgtgatccgcccgccttggcctcccaaagtgctgggattacaggcatgagccacc

SEQ ID NO: 146867 - DNA, 201 bp, Homo sapiens
acggaaaataaaccgtcttactgtcatagagacttacctgaaaagttaggttataactttctgagcttggaaaagagagcaaatgtaatatatatggtgtrgaaagagtctttagatttgaagggtatgtaatgcttgccatgtttggtgtaaaataagttctttttgagaatagagtaacttgaactactttagtctgtc

SEQ ID NO: 146868 - DNA, 201 bp, Homo sapiens
aatctgtgcttctatgtaatttaagtacccacaaatcaggaagcattcccggatgaaaagcattcacagaaccatacgctggttcgccaccttcccggtgsaaaaaccctttcctcggaaattctcagcgcaaagactttgccctattccaaaatggctccggcgcctacaacttaagcatagcgcaggtccggaagttac

SEQ ID NO: 146869 - DNA, 201 bp, Homo sapiens
tttccaggtgctactcagaaaagctgaccgatgatagagcactgggtcaactcacgctaattatgaaaccgtgagtaaaataatctgtgcttctatgtaayttaagtacccacaaatcaggaagcattcccggatgaaaagcattcacagaaccatacgctggttcgccaccttcccggtggaaaaaccctttcctcggaa

SEQ ID NO: 146870 - DNA, 201 bp, Homo sapiens
gagaccaggctggccaatatggggaaaccctgtctctagtaaaaatataaaaattagccaggcatggtggtgcacgcttgtaatcccagctacttgggagrctgaggtgggaggatcacttgaacctgggaggcagaggttggagtgagctgagatcgagccactgcactccagcctgggtgacagagcgagactttgtct

SEQ ID NO: 146871 - DNA, 201 bp, Homo sapiens
atctgccaagttccttcacggcagtacctggattggttgattggattaccaatcagtcaaaccaggggacagaaatcttggaggcctctttaggctgggcrcagtggttcatgccagtaatcccagcactttaggaggctgaggagtgcagctcacttgaggccaggagtttgagaccaggctggccaatatggggaaacc

SEQ ID NO: 146872 - DNA, 201 bp, Homo sapiens
ggcagggatggcacatgcagaagcacgcaagattccgcggtgtggagggttcgtgggtgcgtataattatcttccattatttacatgtgtactttatgcgytcgttagctatatttttgtatgttttaatatgcaacaaaacagcgtatgagttacgctttaatgtaaaattgtctacataacacaaaatttaaaagaaat

SEQ ID NO: 146873 - DNA, 201 bp, Homo sapiens
tttttttttttgagatggagtcttggtctgtcgcccaggttagagtgcagtggcaccatctcggctcactgcaacctccacctcctgggttcaagtgattstcctgcctcagcctcccgggtagctgggattacaggtgctcgccactgcgcctggctaatttttttttttttttgtatttttggtagagatggggtgtca

SEQ ID NO: 146874 - DNA, 201 bp, Homo sapiens
aattaccattatctctgttatttcaaatattgtacattagaaactaaaaacaaatagttaacatgtcaccttttacagaagatagtcttttttttttttttaacataatatgacttttcttattttaaacaaatactaagggatctagtaaattttaggttaatactgtttaacttatggggaaaaaagagtgcctttgta

SEQ ID NO: 146875 - DNA, 201 bp, Homo sapiens
ctgtgctgggctttgggcagattgcttgaacccatgagtttgagatcagcttgggctacatggcgaaactcttgtctctactgaaaatacaaaaaaaaaaaggctagatgtggtggtgtgtacctatagtcccaggtactcagaaggctgaggtgggacgattgcttgagcctgggaagctcaggctacagtgggctgtga

SEQ ID NO: 146876 - DNA, 201 bp, Homo sapiens
tagagatgaggtcttgccggattcaggtgatccttgcaccttgacctctcaaagcgctagattataaatgtgagccactgtgcctggccgacttttcttttaagtagaaaatttagtagcttcatagacacaagtgttgtttcctattattattgtgcttagtaggacatataaacaaagtttatcagttaagttgataag

SEQ ID NO: 146877 - DNA, 201 bp, Homo sapiens
gtagagatgaggtcttgccggattcaggtgatccttgcaccttgacctctcaaagcgctagattataaatgtgagccactgtgcctggccgacttttcttttaagtagaaaatttagtagcttcatagacacaagtgttgtttcctattattattgtgcttagtaggacatataaacaaagtttatcagttaagttgataa

SEQ ID NO: 146878 - DNA, 201 bp, Homo sapiens
tgtagagatgaggtcttgccggattcaggtgatccttgcaccttgacctctcaaagcgctagattataaatgtgagccactgtgcctggccgacttttcttttaagtagaaaatttagtagcttcatagacacaagtgttgtttcctattattattgtgcttagtaggacatataaacaaagtttatcagttaagttgata

SEQ ID NO: 146879 - DNA, 201 bp, Homo sapiens
ttgtagagatgaggtcttgccggattcaggtgatccttgcaccttgacctctcaaagcgctagattataaatgtgagccactgtgcctggccgacttttcttttaagtagaaaatttagtagcttcatagacacaagtgttgtttcctattattattgtgcttagtaggacatataaacaaagtttatcagttaagttgat

SEQ ID NO: 146880 - DNA, 201 bp, Homo sapiens
tttgaaaagaactaacagacaagattttaagtcagtatttcaaaaatataaatttaaaaaatcttaccaaaaagaagaatcccttttttttttttttttttgtacactgtaggtgggtcaccaccacaaccagttgtaccagctcataaagataaaagtggcgctccaccagttagaagtatatatgatgacatttctagc

SEQ ID NO: 146881 - DNA, 201 bp, Homo sapiens
acatttatttgcagaatttacatttataaacaaaacaagtaaattataacatttgttagaaggtattacattttgtggaggaaaaaattaagcagcaaagsgggggagggggtagagacttagagttttaaatagggtaatgtattagttttctgttgctgccataacaaactaccacaaacataaaagtggcttaaacaa

SEQ ID NO: 146882 - DNA, 201 bp, Homo sapiens
ctttaagtataaaatacacaccagagtttgaagacttagaaagaatgtaaggtatcttatttttttatgttgattacatattgaaatgataatgttttggrtgtgtttggctaaatattactaaatttcacctgtttgtacttttaaaatgtgcctactagaaatggtaaaattacacgtatggaatttattgttcctaat

SEQ ID NO: 146883 - DNA, 201 bp, Homo sapiens
ttaaagggtaggtaatagtatccccatctttaaaaagagaaaactgaggctaaatgcaataagtaatttgctgaagctcacttgctagtaagtgagcgagygctataaacctcaggttagtcttattccatagactgtgctctaaatagcttaagctgtacagtccaggctcagacattagtcttaccgatggcctgggct

SEQ ID NO: 146884 - DNA, 201 bp, Homo sapiens
tatatgaccttgggaatgcttaatctctcgttgcctcaggttccttattggaaaaatgacgatatagtagtgcctgcctcctagagttattgtaaggactrcgaagtttaaatgacttagtaacgtatagcaaagtagtgcccggcacttagtaagcactcttactgagccactggctgctgtggaatcttcttactctcc

SEQ ID NO: 146885 - DNA, 201 bp, Homo sapiens
taatttttattgagaacctaatgtgtacaagattgtaagttaagcagttcagatgctgcattatataaaatgcctagtgtaatacttggtgtaaacactcrataaacatgatctgctgctgcctttcttgttatcattacaatgatgataattatttgcaaacgttctggtgtttaacttttatcctgatgctttggtaag

SEQ ID NO: 146886 - DNA, 201 bp, Homo sapiens
tttgtttgtttgtttgtttgtttgtttttcttggagacagagtcttgttctgtcacccaggctggagtgcagtagtgtgatcttggctcactgcaacctcygcttcccggggttcaaacagttctctctgcctcagcttcccgagtagccgggattacaggcacctgccgccacacccggctaatatattttttttgtatt

SEQ ID NO: 146887 - DNA, 201 bp, Homo sapiens
ttgcttctgttgtccactgattaatcagcctatgtgcctgacactggtcttgcagtacaactggaagccaaaacaaggtggaagatgtcctgaattaagaygttttcaccacattgtattacagagacagccaataaatctactatttgatttcaatatggttttggaggcttattattgttccagtgtgaaggatgagga

SEQ ID NO: 146888 - DNA, 201 bp, Homo sapiens
tcttgacctcgtgatctgcccgcctcggcctcccaaagtgctgggattacaggcctgagccaccatgcctggcctatggtatctcttaatggattgaggtwtatacatattttatattatttcttcaactactttgcatgtctagagtacagacatttttatattttctttttttttttttttaaacctcagaatctagta

SEQ ID NO: 146889 - DNA, 201 bp, Homo sapiens
  misc_feature (1)...(201): n = A,T,C or G
atttgcttaagtgtaaagttattctgtagttgtttcaagattcatggtccaagatttcatttctaggttgaagaactaacatcttggaacacgtggctccngaagcaccttggtgcctgaaaacatcacttggtttgattgctctgaagaaatggttccttatattaggacttttgttatcattgccattatgttcatcag

SEQ ID NO: 146890 - DNA, 201 bp, Homo sapiens
agaagctttcaattcacagtggcattcaaatgggctgagaaagggctatgcttgattctgttctactctgacagtgtagcaaatttgagaatgggaagaakgctatgtctctgggtagtgtccttttcttaccccaagacattattaaaatgatggtattgaatttattttacaatgtttatgatttaacaaataataagg

SEQ ID NO: 146891 - DNA, 201 bp, Homo sapiens
ataaattacctttctggaagctcagccaagcatagtaaactacaagagaagacatctaactgtcactcctccctggcccccactggctctcctccctcggygcacacctaatccagatgtgaaattaagtgctttcacacaggtccatttataaaggaaattaggtgggagacttgattccagagggatcttgaccttatt

SEQ ID NO: 146892 - DNA, 201 bp, Homo sapiens
tttgaatttgactttgaatttggtatgtagaacctgaagttattgtgtgcccaaattcatagtgagaagatgtgtttatgcataggtcacacacttagtaygcattagtatacaataatggtgacatagcactttgtttaagagtgtaaacatgtagcacggaagttgaggtaacttatagttatggtttttgtctcaggt

SEQ ID NO: 146893 - DNA, 201 bp, Homo sapiens
ccctcagctgctgttataattaatgttaatcaaacccacatttctaggaaggagccgagttattatctgcctctccgataggatgcctctttgtcttcacytgccattcccgctgtttcgtgaagaatcctctgtaaagggaaatttgttcaggcgactgctgtggccaccctctgcctcctccggcctctgcccctggga

SEQ ID NO: 146894 - DNA, 201 bp, Homo sapiens
ttaggtcaacatttgtgtacaggtctttttgtggaaacattttcgtttctcttgggcaaaatgtgtaggaatggaattgctaagtcatgttcatatgaacrtaagtcaagtatatttaactttataagaaactgccaaataattctgcaaagtggctatatcattttatattttcaccattaatgtaggagagttccagtt

SEQ ID NO: 146895 - DNA, 201 bp, Homo sapiens
gagaatgcatccctgagggtaggcctctaaaatggccacttcggggggcggccatcttttgtggttgcagctgtagggatgaaataagccccagtctcccrtagtgctcccaggcttattaggatgagaaaattcccgcctaataatttttggtcagaccggttgtctgctctcaaagcctgtctcctgataagatattat

SEQ ID NO: 146896 - DNA, 201 bp, Homo sapiens
taatttggtggctttgtcaccctccccacctcttacacattcatagacttctctaccttgaataggtgtggggagtttatccaccccaaatgcccaaggcttttttttttttttattatagtacttcacacaccacgcagttatggcccacttttatatgagttcagatagattgtgaattatttgagggctgagacactg

SEQ ID NO: 146897 - DNA, 201 bp, Homo sapiens
cggcctcgccgccgcccgtctcctgtcgcgcagcttcctccgtgagtccagccagtactgtcttcctggcgcccgcgggttattggccccgccggacccarcctcctggcccaggccgcggctgggccctcagggctggacctcggcgggggcctgggagccgcttgggattccggcttcgagtcggggacccctacggtg

SEQ ID NO: 146898 - DNA, 201 bp, Homo sapiens
cttgttttgcttcaagattcaaagctatgtttagtaaatatatgttattgtctgggaatagttaacctatttgtttttcttttcctaagttgctaagattscttttgcttctcttgggcttaccagtctgctgtttctcatggatcttgtgctttttcccctcagggcacctttcacagccagcaggcattggaatatggc

SEQ ID NO: 146899 - DNA, 201 bp, Homo sapiens
ctcgcatgtctcattagcatttaaaatctccacacagggatgtggtttttactattataatgaacaaaagcctactgtgtagtcattgccttcttgcagayggtcagcaggcagcgcctccaggacttttcccagggctcccctgcttgcttgtttctggccatctgcctaacattcttacgtgtcttatggtaacattag

SEQ ID NO: 146900 - DNA, 201 bp, Homo sapiens
cattgaggagatttagagaaggaaattatatctcacttctctttgggggtgatcaggaaagacctcaaagagaaagtagcatttaatgtggaccttgaagratgattagaagttttgtcagatggtggaggtgaaacactccatcttaagcagaacaaatatgaaaagataggagagcatgaaatatcaatgaggaataac

SEQ ID NO: 146901 - DNA, 201 bp, Homo sapiens
atttctgaaaactatgattactttcagcctggagaatgtaaaattggcatcatgcctggccatattcacaaaaaaggaaggattggtgagtttgtttgttrcattcttatagattaaaacgttatttgccttaaaccctcaaaactcacaaagaatttttgactttgcaaatcaagtttaattaatttgacttgagtagaa

SEQ ID NO: 146902 - DNA, 201 bp, Homo sapiens
gaatcctcagcaatcaggctcctgtctgtcacttagaagctatatgaccttgggaatgcttaatctctcgttgcctcaggttccttattggaaaaatgacratatagtagtgcctgcctcctagagttattgtaaggactgcgaagtttaaatgacttagtaacgtatagcaaagtagtgcccggcacttagtaagcactc

SEQ ID NO: 146903 - DNA, 201 bp, Homo sapiens
tcctgacattgtgatccgcccacctcagcctcccaaagtgctgggattacaggcgtgatagacccacatttttttacattataacatttcttacattaggwtgtgtcttattactgatatatatgtttttttttgagacagagttttgctcttattgctcaggctggagtgcaatggcacaatctcagctcaccgcatcct

SEQ ID NO: 146904 - DNA, 201 bp, Homo sapiens
acccggctaatatattttttttgtatttttagtagagacggggtttcaccaagttggccaggctggtcttgaactcctgaccttgtgatccacctgcctcrgcctcccaaggtgctgggattacaggcatgaggcaccgcgctgggcctttaatgggttctttagagaacattgtaaccgaaacctctgggagaatgaggc

SEQ ID NO: 146905 - DNA, 201 bp, Homo sapiens
actgtcttcctggcgcccgcgggttattggccccgccggacccaacctcctggcccaggccgcggctgggccctcagggctggacctcggcgggggcctgrgagccgcttgggattccggcttcgagtcggggacccctacggtggaaggagctttgctggatacgtggggcggggggcatgacttaggccgctggcagat

SEQ ID NO: 146906 - DNA, 201 bp, Homo sapiens
gactacaggcacccgccaccacacctggctaatttttttgtatttttagtagagatggggtttcactgtgttagccaggatggtctcgatctcctgacatygtgatccgcccacctcagcctcccaaagtgctgggattacaggcgtgatagacccacatttttttacattataacatttcttacattaggttgtgtctta

SEQ ID NO: 146907 - DNA, 201 bp, Homo sapiens
agtagagatggggtttcactgtgttagccaggatggtctcgatctcctgacattgtgatccgcccacctcagcctcccaaagtgctgggattacaggcgtsatagacccacatttttttacattataacatttcttacattaggttgtgtcttattactgatatatatgtttttttttgagacagagttttgctcttattg

SEQ ID NO: 146908 - DNA, 201 bp, Homo sapiens
agtggtacctgagtttggcaagacaagaaaagcaagggaagagcgagcattctttgggtagagatcttaattatgtttttttggtagagtcacttgctatytgaaaattcagtaacctagagaaatttgaattgccatcaaaaccagtgtgttatttttgtttctaggtatgaatcagctattaagggaggaagtactgtg

SEQ ID NO: 146909 - DNA, 201 bp, Homo sapiens
cagcctcccaaagtgctgggattacaggcgtgatagacccacatttttttacattataacatttcttacattaggttgtgtcttattactgatatatatgtttttttttgagacagagttttgctcttattgctcaggctggagtgcaatggcacaatctcagctcaccgcatcctctgcctcctgggctcaagccattct

SEQ ID NO: 146910 - DNA, 201 bp, Homo sapiens
actcgataaacatgatctgctgctgcctttcttgttatcattacaatgatgataattatttgcaaacgttctggtgtttaacttttatcctgatgctttgrtaagttgtttttgttctttctttatgaatgagaaaactggtacaggaagattagtaacttgacaatggtaggtatacagcaaacgaactggggtgagatt

SEQ ID NO: 146911 - DNA, 201 bp, Homo sapiens
ttttgaaatgtggggagctggttgtagtaactatttagatttctcaatttctcttttaggtaggttgctgcaataacctagggtttttttttttttttttycctaacaagctttttcctgtcttgtctactttcctatttgttttattttccctgtgtcttttatacatgagttcatatcagaagagattaagtgattttg

SEQ ID NO: 146912 - DNA, 201 bp, Homo sapiens
ttgaacagatacggacattggcacagtgttgtattcctgagtttgtatggaaagttaactcaaaggagaatgcagtggtttcaatcatggtttaatatttrtgttggttttcctaagatgaatggtgggctttcccctgcccaagccatttaccatttaccagcagagtcatgaatttgaggtcccgttttgattgacttc

SEQ ID NO: 146913 - DNA, 201 bp, Homo sapiens
ggtgacattttgttttcagtccctggatttaattttaaccatttatctttgagccccagtttttttctaggaaataaaaatgataaacattgctttttttyccctcagttcaggaaaaaactacaagatcgtggttcttgataaagagaggatcctggagaatggaacaatgtcttgtctgtttttcttatttctgtggtc

SEQ ID NO: 146914 - DNA, 201 bp, Homo sapiens
tatggagttcaaggcttagatatgtggggtgtatgtgtctttgtgtatgtgggaggggtcaccatatggatgatatgtattgccatgataagggatgacaycaccaagggcatgaatttagatgaaaaagagaagtctaaggtgttgcgggaagtcaggaaccctgaacggagggaccggctgaagccacggcagaagaac

SEQ ID NO: 146915 - DNA, 201 bp, Homo sapiens
agatttttaaaataaatttatttgccatttgttatctttttcagtgaaatgcccctccttgggttttgcccatgttctaattggattgtttacatttttayggtttattttttacagttctttgtatgttctagatactaatactttgctggatatgcagtttactttttcatatttatttaaaagtatcttgtttgtatc

SEQ ID NO: 146916 - DNA, 201 bp, Homo sapiens
agtataattgctatggaagaaataagccggggaaaggaggagtgtgtgtagtcctggtggttaggatggaggagagggtgattttatatcaggtggtcagrggaagtctgatctctgaactaagatgttaaggagatgtaggagtgaaccaagtggatatcttagggaaggatattccatgcagagggcacagtgaggcca

SEQ ID NO: 146917 - DNA, 201 bp, Homo sapiens
ccgggttcaagcgattctcctgcctcagcctcccgagtagctgggactacaggcgcgagccaccatgcccagctaatttttgtatttttagtagagatggrgtttcaccatgttggccaggatggtctcgatctcttgacctcgtgatctgcccgcctcggcctcccaaagtgctgggattacaggcctgagccaccatgc

SEQ ID NO: 146918 - DNA, 201 bp, Homo sapiens
agctaatttttgtatttttagtagagatggggtttcaccatgttggccaggatggtctcgatctcttgacctcgtgatctgcccgcctcggcctcccaaartgctgggattacaggcctgagccaccatgcctggcctatggtatctcttaatggattgaggtatatacatattttatattatttcttcaactactttgca

SEQ ID NO: 146919 - DNA, 201 bp, Homo sapiens
taaaaataaaaaacggcagcctgtctgtagggaacatttactttaaccctgtccatgaatttgttcttaaatgtggtgtgtagtatggctctgatatgcakgctctgtcatcatccactctggatccagaacacgagcagtcagggtactcactgtcactcactggcacttgtgtcttaaaacttgtgggtgatttatctg

SEQ ID NO: 146920 - DNA, 201 bp, Homo sapiens
ttattgttattatactgctgtgaaaaaataaatattattcaaaacctccctctctgcttctggatttaggaaatgtaaagttgaagctctgcatctgtttygtgaaattcaggctgacacagactgattttgaaagctgttattctgtgttcaaacaccctcatcctggtacatttttcttctgtaatttgattgttcagg

SEQ ID NO: 146921 - DNA, 201 bp, Homo sapiens
tttacctggttccttattatctctggacttctgttatgaacatgatattaccattaattatgaaacttaatcatatattcatatattagtttatggtatcttttttttttttaagacagagtcttgctctgtcgccaggctggagtgcggtggcatgatctcagctcactgcaacctccgcctcccgggttcaagcgattc

SEQ ID NO: 146922 - DNA, 201 bp, Homo sapiens
ccatacctttgtacggcagatgaggaaatcccaaaagtttccagtgagtatcagaagtgatactagcacccaggtcttctgactctgcagtatcctttccrccagcatgtaccatgtgataacttaagcttttttcgaagctctgatttttttttggcagtcttagtgatgtgttgagaaggtgactatcctgctcaaagg

SEQ ID NO: 146923 - DNA, 201 bp, Homo sapiens
ttctgaaaactatgattactttcagcctggagaatgtaaaattggcatcatgcctggccatattcacaaaaaaggaaggattggtgagtttgtttgttacrttcttatagattaaaacgttatttgccttaaaccctcaaaactcacaaagaatttttgactttgcaaatcaagtttaattaatttgacttgagtagaatt

SEQ ID NO: 146924 - DNA, 201 bp, Homo sapiens
gcaagtatgaaatggtttgtttggtaaagctttctggagattcttgagagtgttgtaggcagaaggacaaaaagaattcattatacccagtaatcactcakgtcaataaagtttgagcaccaagaatgaagtatattggatatggttttaaaccagcttaatttgaatagatagtgggttagaatgtagaagatcagatgt

SEQ ID NO: 146925 - DNA, 201 bp, Homo sapiens
tgggggtggcgtctagactggccttatttggagttggggatgaagaggtccaaggtgaacttggtggggaaggtaagggtctgggttgagaggtagaggargagtgtctcagtaggaagttgggggatgaggctgtccctagtacggaaaggtcctgcacttcgaattccccctctgcaggattgtatgtcagggaaagat

SEQ ID NO: 146926 - DNA, 201 bp, Homo sapiens
catgtagctccttgcatgctgcatcttagtgggaatcagggcagtcagtcgaaccagagtagcagtcattcactgccatgtactactcacagtgcaaagaraaaaaaagccagtttcacttatgagtgtccttgatgaagcaatgcaaattattaattttattaaattatgaccctggagtcagtattttgtgataaaatg

SEQ ID NO: 146927 - DNA, 201 bp, Homo sapiens
aacatatttatataatatgtgttttgtagtatttattatatagaattatatatatttatataacgttatccagcatataatatatatacaatccatatttytataaaatagatacctaaaagtaaaattggatgttatatggtctgtgtatttacaattttaatagctactgctaaattgaactttaaaacattggaacag

SEQ ID NO: 146928 - DNA, 201 bp, Homo sapiens
acctaaaagtaaaattggatgttatatggtctgtgtatttacaattttaatagctactgctaaattgaactttaaaacattggaacagatttattcttccmccatagtagatgcacagaatttttttaaaagggaatactatcaaatcaattagagtataaccacgtgtcttaacccaaagtatccctttttttattatta

SEQ ID NO: 146929 - DNA, 201 bp, Homo sapiens
ctttaaaacattggaacagatttattcttccaccatagtagatgcacagaatttttttaaaagggaatactatcaaatcaattagagtataaccacgtgtyttaacccaaagtatccctttttttattattaaaggagatatggcaagataaaagcagtcaattttttttttttttttttttttttggtaatttaaggtta

SEQ ID NO: 146930 - DNA, 201 bp, Homo sapiens
agtctaacatagaaacacaatctaatatttttgaattctctttcgttaaggcattgtgtccagatctggcaccctgacttatgaagcagttcaccaaacarcgcaagttggattggggcagtctttgtgcgttggtgagggacttttgctaaaatcattttattggagtgtggtgtcttcattggatgagtataataataa

SEQ ID NO: 146931 - DNA, 201 bp, Homo sapiens
tcatccagcttgttgtgtatcaatggtttgtttctttttattactgaggagtattcatggtatgaatgtacttcagtttgtttaaccattcacctgttgaragacatctgggttgttttcagtttggcctattacaattacagctgctataaacatttgtatactggtttttgtgtgaacattgtcttcatttttttggaa

SEQ ID NO: 146932 - DNA, 201 bp, Homo sapiens
tttcccctcagggcacctttcacagccagcaggcattggaatatggcaccaaactcgttggaggaaccactccagggaaaggaggccagacacatctgggyttacctgtctttaatactgtgaaggaggtaattagtggtacctgagtttggcaagacaagaaaagcaagggaagagcgagcattctttgggtagagatct

SEQ ID NO: 146933 - DNA, 201 bp, Homo sapiens
gaaggtagctgctatagaatctcaagcaccattggtggtcttttactgaaccaggtggtaggagaacattgttcttaattggagaatcagtgtgtggtcargatattcaaatttcaggctggttgatcaagcctgactatgaatttattttgccaagccaagattattagataaaaattaaaacttgaaatttatccttcc

SEQ ID NO: 146934 - DNA, 201 bp, Homo sapiens
caaatcttggtcaactcttctcccttctgctctgactggattccacacatgagggactataatgaatttatttcgttaaaaacaatgcaaatgaaaaaaaygcaaatgagagactttgctccaacagattgaaactcattacttagctcagtcttgtcaagattcttggttgcagaaaagataccccctggagctgctact

SEQ ID NO: 146935 - DNA, 201 bp, Homo sapiens
tttgtttctccatagaaatgtaattgggaatattaaaaataatttaagtacagggcaacaatttcatttcatcaggggactggcataccatagacccacatttttttttttttttttttgttttgagacggagtcttgctctgtcgcccaggctggagtgcagtggcgtgatctctgctcactgcaagctccgcctcccag

SEQ ID NO: 146936 - DNA, 201 bp, Homo sapiens
tggctgacctcctggaaaacagtagtggcagtgtttatttaaagagacagcacaccctgagagatgattcagaacaggctgctggaaagagaggatgagcyagcagcagctaatgctgggggaccctctttatgagaatattgcatgattattcatgaggggggcatgagagggtatcagttgcaaccatgttttaagcag

SEQ ID NO: 146937 - DNA, 201 bp, Homo sapiens
aagatactattgattttgatggcaaatcatggaatgaattttatacctatgttagtcactcgaagtgtttggtaatttagtttaccatgttttagtctaayatagaaacacaatctaatatttttgaattctctttcgttaaggcattgtgtccagatctggcaccctgacttatgaagcagttcaccaaacaacgcaagt

SEQ ID NO: 146938 - DNA, 201 bp, Homo sapiens
aacccaggcagcctggagtgcagctcatactccatacctgggatttccgcctcgccgctctccgactgcttccagacatgcaggggccctgggtgctgctyctgctgggcctgaggctacagctctccctgggcatcatcccaggtaatgaggctcccccagctgcccctacacacacacacacacacagggcacccccca

SEQ ID NO: 146939 - DNA, 201 bp, Homo sapiens
tctccccctggccagttgaggaggagaacccggacttctggaaccgccaggcagccgaggccctgggtgccgccaagaagctgcagcctgcacagacagcygccaagaacctcatcatcttcctgggtgacggtgagtgagccaggccttccagccccgcagccctcacagccccggcgcccggaccctcagtggttccag

SEQ ID NO: 146940 - DNA, 201 bp, Homo sapiens; identical to SEQ ID NO: 27312

SEQ ID NO: 146941 - DNA, 201 bp, Homo sapiens
tgtggtcaagtgggagacccacctatatatggacccaataggtatagaaacacaccccaaacccatctggttcttgctgcgtagatagaaggcaatgagcrcctgtcgggggaacaaccacctctgtagaaaggtcacagagcccggactgcaggacattcctggcagcccagccacacccatctcctgacaatgcatctt

SEQ ID NO: 146942 - DNA, 201 bp, Homo sapiens; identical to SEQ ID NO: 27284

SEQ ID NO: 146943 - DNA, 201 bp, Homo sapiens; identical to SEQ ID NO: 27285

SEQ ID NO: 146944 - DNA, 201 bp, Homo sapiens; identical to SEQ ID NO: 27286

SEQ ID NO: 146945 - DNA, 201 bp, Homo sapiens
cacagttttccctgatttaaacccaggcagcctggagtgcagctcatactccatacctgggatttccgcctcgccgctctccgactgcttccagacatgcwggggccctgggtgctgctcctgctgggcctgaggctacagctctccctgggcatcatcccaggtaatgaggctcccccagctgcccctacacacacacac

SEQ ID NO: 146946 - DNA, 201 bp, Homo sapiens; identical to SEQ ID NO: 27289

SEQ ID NO: 146947 - DNA, 201 bp, Homo sapiens; identical to SEQ ID NO: 27270

SEQ ID NO: 146948 - DNA, 201 bp, Homo sapiens; identical to SEQ ID NO: 27274

SEQ ID NO: 146949 - DNA, 201 bp, Homo sapiens
gagccaccacgcttggccaaggccattcttttattatttttcttcctttctttttcctttttttgagatgttttctcactcagtcacccaggttggagcgyggtggtgcaatctcggttcactgcaacctctgcagcccaggcttaaaccaaccttccacctctgcctcaggagtagctggtaccacaggcacacgccaca

SEQ ID NO: 146950 - DNA, 201 bp, Homo sapiens; identical to SEQ ID NO: 27314

SEQ ID NO: 146951 - DNA, 201 bp, Homo sapiens
ctgagaccttcctggccatggaccgcttcccgtacgtggctctgtccaaggtaagtgctgggctaccttagagtcctccaagcagagaaggggaatcctgrctatggagtgtggtaggagggagggaccctaaacagctggggctccaataaggagctggaggcagttggaatcccagaggacagagatcagggtcttgtt

SEQ ID NO: 146952 - DNA, 201 bp, Homo sapiens; identical to SEQ ID NO: 27272

SEQ ID NO: 146953 - DNA, 201 bp, Homo sapiens; identical to SEQ ID NO: 27277

SEQ ID NO: 146954 - DNA, 201 bp, Homo sapiens; identical to SEQ ID NO: 27276

SEQ ID NO: 146955 - DNA, 201 bp, Homo sapiens
atggacccaataggtatagaaacacaccccaaacccatctggttcttgctgcgtagatagaaggcaatgagcacctgtcgggggaacaaccacctctgtaraaaggtcacagagcccggactgcaggacattcctggcagcccagccacacccatctcctgacaatgcatcttctgtgccacctctgggctgggccaccac

SEQ ID NO: 146956 - DNA, 201 bp, Homo sapiens; identical to SEQ ID NO: 27280

SEQ ID NO: 146957 - DNA, 201 bp, Homo sapiens
cagctgtgcccttctgctgggtgctgatgttgcatctgatgatgccctggtcccactggttctaggaacaggcctccccaccgggttagcatctgcataamtggcctttgcccccatcccaagggggtcccaagatgtctacagtgtgtgggacttactatgtgggacttgtaattgtaccctctgagctaaggcggcccc

SEQ ID NO: 146958 - DNA, 201 bp, Homo sapiens; identical to SEQ ID NO: 27279

SEQ ID NO: 146959 - DNA, 201 bp, Homo sapiens
aaggacaaactggggcctgagaccttcctggccatggaccgcttcccgtacgtggctctgtccaaggtaagtgctgggctaccttagagtcctccaagcasagaaggggaatcctggctatggagtgtggtaggagggagggaccctaaacagctggggctccaataaggagctggaggcagttggaatcccagaggacag

SEQ ID NO: 146960 - DNA, 201 bp, Homo sapiens
agggtctggaggtggggttgggggcgtagaaggcgcagcccaggctgggccattcccacagccttggggaggggagtcaggggctgtgcatgaggaggggrcacggggccagccaggcccccaaatccacctgccccatcctctgttcccaggtgatcctaggtggaggccgaaagtacatgtttcccatggggaccccag

SEQ ID NO: 146961 - DNA, 201 bp, Homo sapiens
accctgagtacccagatgactacagccaaggtgggaccaggctggacgggaagaatctggtgcaggaatggctggcgaagcaccaggtgatgggggctggygggtgtgctgggcacagcagggggagggcagaggtgtggggctcggggctgtgggctgaggcctggctctctccctccccacagggtgcccggtacgtgt

SEQ ID NO: 146962 - DNA, 201 bp, Homo sapiens
tctgacaccccagctctgggccaggcacccacatggacttgtccatctcctgcccagtcttcttgactgagagctggatgctgaagcagatgctgttcaakatgttcttgtaataggtcttcccatggaccttaaactatgaggggcatgggcagcactcagccgcagaccagggcaaggctgcagatagcgccacaaccg

SEQ ID NO: 146963 - DNA, 201 bp, Homo sapiens
accaggtgatgggggctggtgggtgtgctgggcacagcagggggagggcagaggtgtggggctcggggctgtgggctgaggcctggctctctccctccccrcagggtgcccggtacgtgtggaaccgcactgagctcctgcaggcttccctggacccgtctgtgacccatctcatgggtaatgacccccttcctgccctgg

SEQ ID NO: 146964 - DNA, 201 bp, Homo sapiens
tggcccctggcaaggcccgggacaggaaggcctacacggtcctcctatacggaaacggtccaggctatgtgctcaaggacggcgcccggccggatgttacsgagagcgagagcggtgagtgccgcggggtggccccctgagggggaccagggtgccaaggatggggggctggcgggaaggggtcacctcttgtctgcctgg

SEQ ID NO: 146965 - DNA, 201 bp, Homo sapiens
ggaaggcctacacggtcctcctatacggaaacggtccaggctatgtgctcaaggacggcgcccggccggatgttaccgagagcgagagcggtgagtgccgyggggtggccccctgagggggaccagggtgccaaggatggggggctggcgggaaggggtcacctcttgtctgcctggaactgaaacttcctactgaaactg

SEQ ID NO: 146966 - DNA, 201 bp, Homo sapiens; identical to SEQ ID NO: 27282

SEQ ID NO: 146967 - DNA, 201 bp, Homo sapiens; identical to SEQ ID NO: 27315

SEQ ID NO: 146968 - DNA, 201 bp, Homo sapiens
cctcgccagccggcgcctacgcccacacggtgaaccgcaactggtactcggatgccgacgtgcctgcctcggcccgccaggaggggtgccaggacatcgcyacgcagctcatctccaacatggacattgatgtgcgacccccgggccaagggctggggctgggcagagagtagcagggagggggcaccagctcagacccag

SEQ ID NO: 146969 - DNA, 201 bp, Homo sapiens; identical to SEQ ID NO: 27281

SEQ ID NO: 146970 - DNA, 201 bp, Homo sapiens
acacagttccagtgattggcacaggaagcctcatgatcggggaagaggagtatgctccctgcagcctctcaggactcaagggggatcccagctgtgccctyctgctgggtgctgatgttgcatctgatgatgccctggtcccactggttctaggaacaggcctccccaccgggttagcatctgcataactggcctttgccc

SEQ ID NO: 146971 - DNA, 201 bp, Homo sapiens; identical to SEQ ID NO: 27269

SEQ ID NO: 146972 - DNA, 201 bp, Homo sapiens
ggggtcaaggtggtaacaaggggaggggccaggacacagttttccctgatttaaacccaggcagcctggagtgcagctcatactccatacctgggatttcygcctcgccgctctccgactgcttccagacatgcaggggccctgggtgctgctcctgctgggcctgaggctacagctctccctgggcatcatcccaggtaa

SEQ ID NO: 146973 - DNA, 201 bp, Homo sapiens
agtgtggcaattcctcaagaatctagaaccagaactaccatttgactcagcaatcccattactgagtatatacccaaaggattataaatcattctactatraagacacatgcacatgtatgtttattgtggctctattcacaatagcaaagacttggaaccaacccaaatgcccatcaatgatagactggatcaagaaaat

SEQ ID NO: 146974 - DNA, 201 bp, Homo sapiens
atcacttactcaaccattgtggaagacagtgtggcaattcctcaagaatctagaaccagaactaccatttgactcagcaatcccattactgagtatatacmcaaaggattataaatcattctactataaagacacatgcacatgtatgtttattgtggctctattcacaatagcaaagacttggaaccaacccaaatgccc

SEQ ID NO: 146975 - DNA, 201 bp, Homo sapiens
aacatctgttgtttaagaatcacttactcaaccattgtggaagacagtgtggcaattcctcaagaatctagaaccagaactaccatttgactcagcaatcmcattactgagtatatacccaaaggattataaatcattctactataaagacacatgcacatgtatgtttattgtggctctattcacaatagcaaagacttg

SEQ ID NO: 146976 - DNA, 201 bp, Homo sapiens
cctctggaaagccaggatttcagggtagaactagcaagtcttaagttcagtcctcttctcctccacaatacctggttccaaagtcacttctacataggtarcctcactaaatattgtagcagctgcaaatgataaagcccagttttgttgtttagttgacaccacactgttgaattccacttcctttgcctccatttcttt

SEQ ID NO: 146977 - DNA, 201 bp, Homo sapiens
ccgacggccgagagctaaaaggccagtcatcctgccccccacacctccctgaagtctagtctgttaatttttattttattttattttattttattttatttcattttattttatttatttattttgtgatggggtctcgctccatcacccaggctggagtgcagtcgtgcaatctcggctcactgcaacctccaccaccca

SEQ ID NO: 146978 - DNA, 201 bp, Homo sapiens
gcaagctagtcttgaactcctcacctcaggtgatctgcctgcctcggcctcccaaagtgctgggattacaggcgtgagccactgcgcccagccaacttccyctttttataaggacagcagttatattggattaagttccacctaatgacctcattttaacttgattatctctgtaaaggccctatttccaatgaaggtcac

SEQ ID NO: 146979 - DNA, 201 bp, Homo sapiens
gccgacggccgagagctaaaaggccagtcatcctgccccccacacctccctgaagtctagtctgttaatttttattttattttattttattttattttatttcattttattttatttatttattttgtgatggggtctcgctccatcacccaggctggagtgcagtcgtgcaatctcggctcactgcaacctccaccaccc

SEQ ID NO: 146980 - DNA, 201 bp, Homo sapiens
accggaggcaattgtaacacaatggtaagcatttgtgtacctaaacatggaaaaggtacagtaaaaatatggtatagatgagccaggtgcggtggctcacrtctgtaatcccagtactttgggaggccaaggcgggcagattatgaggtcaggaaatcaggaccatcctggctaatatggtgaaaccccatctctactaaa

SEQ ID NO: 146981 - DNA, 201 bp, Homo sapiens
tgccgacggccgagagctaaaaggccagtcatcctgccccccacacctccctgaagtctagtctgttaatttttattttattttattttattttattttatttcattttattttatttatttattttgtgatggggtctcgctccatcacccaggctggagtgcagtcgtgcaatctcggctcactgcaacctccaccacc

SEQ ID NO: 146982 - DNA, 201 bp, Homo sapiens
atgccgacggccgagagctaaaaggccagtcatcctgccccccacacctccctgaagtctagtctgttaatttttattttattttattttattttattttatttcattttattttatttatttattttgtgatggggtctcgctccatcacccaggctggagtgcagtcgtgcaatctcggctcactgcaacctccaccac

SEQ ID NO: 146983 - DNA, 201 bp, Homo sapiens
catgccgacggccgagagctaaaaggccagtcatcctgccccccacacctccctgaagtctagtctgttaatttttattttattttattttattttattttatttcattttattttatttatttattttgtgatggggtctcgctccatcacccaggctggagtgcagtcgtgcaatctcggctcactgcaacctccacca

SEQ ID NO: 146984 - DNA, 201 bp, Homo sapiens
gcgacagcatgggcacaagcctgccaggagagcatgctcaaccctggaactgcacccgagaccagctagatgctctctaagcgctggggttgtagagagagtaaacaagagaggaggtactttgtgaagctggagaagcgctatcctccacagctgacagtctcatggagggtaggaggtagtcttggaggttaacatgga

SEQ ID NO: 146985 - DNA, 201 bp, Homo sapiens
ggcgacagcatgggcacaagcctgccaggagagcatgctcaaccctggaactgcacccgagaccagctagatgctctctaagcgctggggttgtagagagagtaaacaagagaggaggtactttgtgaagctggagaagcgctatcctccacagctgacagtctcatggagggtaggaggtagtcttggaggttaacatgg

SEQ ID NO: 146986 - DNA, 201 bp, Homo sapiens
atcaaatatatgcttgaaaatattatctcccactctggtagtttttcactttcttgatcatgtcctgtgaagcacaaagtttcttccttttttttttttttgtttttccttaacactaatttatttcatatggttctgaagttggggcagtctgagatcagggtgctggtctgagatcgggatctggtaggaatggaccct

SEQ ID NO: 146987 - DNA, 201 bp, Homo sapiens
ctcttgggttcaagcaatcctcctgcctcagcctcccaagtagctggaattacaggtgcctgccaccatgcccagctaattttttaattttttaaattttyttatttttttgtttttgggagagacagggtttcgccatgttggccagcttggtcttgaactcctgacctcaggtggtccacccacctcagcctcccaaag

SEQ ID NO: 146988 - DNA, 201 bp, Homo sapiens
catttttataaccttaaaaagaaatccccagccccaatactactcatttcctcctcttcccatcccataccaaccactaatctgctttctgtctttttggrtttgcctgttctggacatttcatgaaagtgaaatcatacagtatttagtcttttggactggctttttttcatatggcagaatgttgtcaaagttcatccc

SEQ ID NO: 146989 - DNA, 201 bp, Homo sapiens
tcaagccatgaaaagacatggaagaaatttaaatacatatgactaaatgaaagaagccaatttgaaaaggctacttactgttttccaactgtgacattctrgaaaaggcaaaactctggagatagtaaaaagatcagtggttgccaggggttgggaagaggaaaggatgaatcagcagagctcagactatttttagcgcag

SEQ ID NO: 146990 - DNA, 201 bp, Homo sapiens
taaaccatagcacatccaggcaatggaatattattcagcgccgaaaagaaatgagccatcaagccatgaaaagacatggaagaaatttaaatacatatgaytaaatgaaagaagccaatttgaaaaggctacttactgttttccaactgtgacattctagaaaaggcaaaactctggagatagtaaaaagatcagtggttg

SEQ ID NO: 146991 - DNA, 201 bp, Homo sapiens
aacaagaagagaacagcctaatttaaaaagtggatcaaagactttaacagatacctccccaaagaaaatatgcagatggcagataagcacatgaaaagatkctccatgtcgtatgtcatcagggaaatgcaaataaaacaacagtgacatactgctacacacttattagaatggccaaaacctggaacactggcaccacca

SEQ ID NO: 146992 - DNA, 201 bp, Homo sapiens
gggctcagaataggaagtgcatgctgattagtttgtgactatgcaaaagaggttaaagcaaagacaccacacaaaggtgggcatgatagtgtagaaaaccrattaggaaagggtagttatgtgtaaaataggtgaaggatgtggattaattaggggaaatcacaccaaacaggaaggcgggttctcaatccagttcaagaa

SEQ ID NO: 146993 - DNA, 201 bp, Homo sapiens
tatacagggtcaaaatgcagactagcagaaaatacataagaaataggacttttgtgtgttgtgtttgggtggtagaaataaaggtaatcttgtttttttttgagacagattcttgtcctgtcatccaggctggagtgcagtggcctgatcttgatgcaatctcagctcactgaaacctccacttcctgggttcaagcaatt

SEQ ID NO: 146994 - DNA, 201 bp, Homo sapiens
cataggcatgagaaccttgtcctagtctgttcagactgctgaagtaaaaataccatcaactgggtgatttttttttttttcttgtgagatggagtcttgcycttgtcacttaggctggagtgcagtggcacgatgtcaactcaccacaacctccacctccaggctcaagcagttctcctgcctcagtcccccgagtagctg

SEQ ID NO: 146995 - DNA, 201 bp, Homo sapiens
aggatgcttcttttggctttcactgttaattatagtaattagatttattttccagacaagatttggtgcaaattttcatttaaggcttgcttcattacathaaatcagttttacttctgccatatgcttgatgacatatttcaaaagatagtaaaagagtaatatagacacacttgcacactaatgccaacgctgacaatt

SEQ ID NO: 146996 - DNA, 201 bp, Homo sapiens
tcataggggtagtctcttttgaaaaatggatatggtcccttcaagaagagcagtagcatattgaataatgtgtttggaggagtttttttccatccgccccyccacccccaccccacccttctggtagatgtaagagtattctttcctttttcaatagttcttccttttccaagatacacagccttgaggcagaatcagagc

SEQ ID NO: 146997 - DNA, 201 bp, Homo sapiens
ggagcaaggcatcttcttcacaagatggcaggaaggagaagtgctgagtgaagggggaagatccccctagaaagccatcagatctggtgagaactcactcrctcactatcatgagaacagcatgggggaaaccacctccataattcagtaacctccacctggtctctcccttgacacatggggattatggggattatagga

SEQ ID NO: 146998 - DNA, 201 bp, Homo sapiens
attttatttatttatttatttattgaccagagtctcactctgtcacccaggctgcagtgccacggcatgatctcggctcactgcaatctctgcctcccagkttcaagcaattctcataccctagcctccccagtagctgggattataggaacgccaccacgcctggctaatttttgtattttttggtagagatggggtttt

SEQ ID NO: 146999 - DNA, 201 bp, Homo sapiens
cacccaccttggcctcccaaagtgctgggattacaggtgtgagccaccgcccccagccattttaactctttagactttaggttttttttttttttttttttaaatcagttaacttttgctgtgtgtcagttcaccctaaaacttaatggtctgaaacatttacttattagttcagttgtttctactgggctgacctgtacg

SEQ ID NO: 147000 - DNA, 201 bp, Homo sapiens
ggttttgccatgttggccaggctggtctcgaactcctggccttaagtgatccacctgcctcggcctcccaaagtgttaggattacaggtgtgagtcaccaygcccggccacatcttttatgatcttttatgagaaacttgggctccagcggaaggtgaacaggaagttgtaggttgggtggttcatctcccggagggtagc

SEQ ID NO: 147001 - DNA, 201 bp, Homo sapiens
tgtaatctcagcactttgggaggtcaaggtgagtggatcacttgaggtcaagagtttgagaccagcctgaccaacatggtaaaaaccagctctactaaaartacaaaaattacctggacgtagtagtgggtgcttgtaatcctagctactcagaaggctgaggcaggagaatcacttgaacctggggggcagaggttgcag

SEQ ID NO: 147002 - DNA, 201 bp, Homo sapiens
tgcagcagatctaatttgtccttcagacttacaagttcagatctctgtgtattaacccaatcttcccatagccatatagatactattttttttccaactcyacctggccaaacacctttcactaaatggtgaatatatcttttctccaaatatgtgccactggaataagtaaagaggcttagagttgacatttgtatgtga

SEQ ID NO: 147003 - DNA, 201 bp, Homo sapiens
aggacttcgaggctgtcgtgttctgtgatcatgtctgtgaataaccgctgtactctaacctggacaatatagcaagaccccatctcttaaaaaaaaaatavttggctgggcgcagtggctcatgcctgtaatcccagcactttgggaggctgaggcgggtggatcacgaggtcaggagattgagagcatcctggctaacac

SEQ ID NO: 147004 - DNA, 201 bp, Homo sapiens
cccaacattgtttatctgagtaaaacaatcagataatacatttatggcgaacaatttccactgtgtaccttcctccccaactccatattcagtgatatgayattgctagcttgaaattagccatgatgggagtgtttacaccttggcaattggcaaatgctacaaatccggccgtttttttcccccagagagctgatggtt

SEQ ID NO: 147005 - DNA, 201 bp, Homo sapiens
cccaggacttcgaggctgtcgtgttctgtgatcatgtctgtgaataaccgctgtactctaacctggacaatatagcaagaccccatctcttaaaaaaaaaatagttggctgggcgcagtggctcatgcctgtaatcccagcactttgggaggctgaggcgggtggatcacgaggtcaggagattgagagcatcctggctaa

SEQ ID NO: 147006 - DNA, 201 bp, Homo sapiens
catatttttgactggaatatattttcttaaatcagtcaccagtgacttacatcactatattctcttggtttgtaactttgtaaatgtttcttttctttctwccccccccaacattgtttatctgagtaaaacaatcagataatacatttatggcgaacaatttccactgtgtaccttcctccccaactccatattcagtga

SEQ ID NO: 147007 - DNA, 201 bp, Homo sapiens
ggatttccaggggtttttattattattattattattattattattttgaaattttttttgcagtagaagcctatacccattctcatctctttccattttttctcaccctgaaagagtaacaaattccaaggcctcgggacatgtggtggtagctgaaagaagaatgcagcctttccttgtcttgtccaagtgaagaaaagt

SEQ ID NO: 147008 - DNA, 201 bp, Homo sapiens
tttaaaaactgcttaagtctcagtaaagtctctgtcacttgcgaccttaagaagcatgctggctgacagaacccatgctaagtaaataaaatgttttcttytgacttcttttccacttactaccatcattgtttcccttcttaaattgtcagagcctccttattgacagggcctttacccccatagcctagcatagtaccc

SEQ ID NO: 147009 - DNA, 201 bp, Homo sapiens
gcaagtggcagagccaagattacaaccatctccactattacgagttgatttattccacaggttttgaagcactgttcctcatcaatctctaaatcagtacygagtttgtaagaatggataagatgggccaggtgcggtggttcacgcctgtaatcccagcactttgggaggccaaggtgggcggataacctgaggtcagga

SEQ ID NO: 147010 - DNA, 201 bp, Homo sapiens
ttcactctctgcgattcatttctgtctaaatgaaagcagacgagagagattttaaattgcccagttaggtttgggcaaaacacagatcatttataaaaacrcagaacatttataaaatcttggacgcaatggcacacacttgtaatcccagcactttcagaggccaaggtgggaggatcacttgaggccaggagtttgaga

SEQ ID NO: 147011 - DNA, 201 bp, Homo sapiens
cctgggaggtggaggttgcagtgagccaagatcgtgctgttgcactccagcctgggtgacagagcaaaacttcatctcaaaaaaataaaataaaataaatgttgctgttattggggaaggccgtgttactgcatgcatagcccctgttggctgatggctgcatgaatagttttgagatcaggaagcagtgttttaagcatt

SEQ ID NO: 147012 - DNA, 201 bp, Homo sapiens
  misc_feature (1)...(201): n = A,T,C or G
cagaaatactctcacaggcacacccagaataatgtttgaccaaatgtctgggcaccctgtagcccagtcaagtcaatttattaccatgacagattgcatcrtatatcttatggtgttataaaataaattaagagcacaaaatggctagaacaattcttgtcatataggagaccatnnnnnnnnnnnnnnnnnnnngctttg

SEQ ID NO: 147013 - DNA, 201 bp, Homo sapiens
agaaagcaaacagtgctagttgcattaattatctctgttttatttgtcttttaatatctttgtctccttgaggaggctatggacttcttgaaggacagacrgttttcatctctgtgcttcattgtctagcacagggcctggcgtgttgtcagggcatagtacctgtgtgttgaatgagcaaataaactgtgaagaaacttc

SEQ ID NO: 147014 - DNA, 201 bp, Homo sapiens
ggtgcccgccactgcgcctggctaatttttgtattttttttagtagaaatggtttcaccatgttggccaggctggtctgacctgtgatccacccgcctcarcctcccaaagtgctgggattacaggcgtgagccaccatgcttggcccgggattcttagctcagaactccaaacacacatccttcttggaccatagggtca

SEQ ID NO: 147015 - DNA, 201 bp, Homo sapiens
agtttactgacatgattggaattctcatttccttaggactgttcaagtgttctcataacatatcagctagcttttcccagggtaagcagtttaaacagagaagaagtaaaaagctacaacgacttttataacctagcctcggatgtcttataccattacttctgctgaattccattggtcatacagcccggctctgacaca

SEQ ID NO: 147016 - DNA, 201 bp, Homo sapiens
tagtttactgacatgattggaattctcatttccttaggactgttcaagtgttctcataacatatcagctagcttttcccagggtaagcagtttaaacagagaagaagtaaaaagctacaacgacttttataacctagcctcggatgtcttataccattacttctgctgaattccattggtcatacagcccggctctgacac

SEQ ID NO: 147017 - DNA, 201 bp, Homo sapiens
gagtttgttattacccagcttctgaagcctacttctgtcaattggtcaaactcattctccatccagttttgtgcccttgctggagaggagttgcgatcatytgggggagaagaggcattctggtttttgttattttcagcatttttgcagtggtttttcttcatcttcgtagatttatctacctttgatcttggatgctga

SEQ ID NO: 147018 - DNA, 201 bp, Homo sapiens
atgttagcctgtcttgctaggttggggaagttctcctggataatatcctgaagagtgttttccaacttggttccattctctcggtcactttcaggtacaccaataaaatgtaggtttgttcttttcacatagtcccatatttcttggaggctttgttcattacttttcattttttttcctttaatcttgtcttcacacttt

SEQ ID NO: 147019 - DNA, 201 bp, Homo sapiens
ttaaggacatgcctatgacacagcctcaggaagtcctgaagacatgtgccccagggtggtcaggagacagcttgcttgtatacattttacagagacgtgaygcatcagtcaatatgtataagatgtgcattggtttggtccagaaaggagggacaagtcgaagtagtaggcggagcttccaggtcataggtagataagaga

SEQ ID NO: 147020 - DNA, 201 bp, Homo sapiens
gatcctgtcatcatgatgctagctggttattttgcacattagttgatgcagtttcttcataatgtcattgatctttataatttggtatgtttttgcagtgrctggtgctagtttttcctttccatatttagtgcttccttcagaagctcttataaggcaggcctagtggtgacaaaatccttcaggaggatttgcttgtct

SEQ ID NO: 147021 - DNA, 201 bp, Homo sapiens
gcacttctttgtctcttttggtctttgttgatttaaagtctgttttatcagagactaggattgcatctcctgcctttttttttttttttttttttttttttgctttccatttgcttggtaaatattcctccatttctttattttgagcttatgtgtatctttgcacatgagatgggtctcctgaatacagcacactgatgg

SEQ ID NO: 147022 - DNA, 201 bp, Homo sapiens
taactccacagcatgtctcattaggccaggaacactccagctaatcgaggcgtgcctttgtcgtgcgctgctcgtgccaggggagttaaaaaaagaaatasgcctgatcccaagggtgtgggcagggcagagataataaacccaaatacaaagtcaggccacccaggaatgaggtggtgtgctctatcggggccggattcc

SEQ ID NO: 147023 - DNA, 201 bp, Homo sapiens
tgcacttctttgtctcttttggtctttgttgatttaaagtctgttttatcagagactaggattgcatctcctgcctttttttttttttttttttttttttttgctttccatttgcttggtaaatattcctccatttctttattttgagcttatgtgtatctttgcacatgagatgggtctcctgaatacagcacactgatg

SEQ ID NO: 147024 - DNA, 201 bp, Homo sapiens
gtctaagtctctttgtagatatctaagaacttaatgaatctgggtgctccagtattgggtgtgtatatatttaggatagttagctcttcatgttacattgwtccctttaccattatgtaatgcacttctttgtctcttttggtctttgttgatttaaagtctgttttatcagagactaggattgcatctcctgcctttttt

SEQ ID NO: 147025 - DNA, 201 bp, Homo sapiens
ccacctccatcagaaaaggaaggtctggcttttattttcttatttgcctcctgatgaattttagggacaaagaaggcatgtggattttaggcttctcttcrttactgcttagatgtcaaaaatgaccacaggtcatatcccatggtagcacaaattcttatgagataaaagagaagattacccaaatccagccaataatcc

SEQ ID NO: 147026 - DNA, 201 bp, Homo sapiens
ccctgttgagaaccacttccttaatgacccactgttactgatggaaatgtgtagggtcctttaggaatatgtagtggacttggtagttttaagtggttaawagcgactggcccaagaaatgaaatctaaaccttccacaacttctatatatatatacatacatacatatatatatatgtgtgtgtgtgtgtgtgtgtgtgt

SEQ ID NO: 147027 - DNA, 201 bp, Homo sapiens
catcacacagcagacctaccaaagccaatgtcatcagagttagaaagacctcagctgaaaccccagctctgccactcaccagctgtatgacctctccgagyctcagtttccttgtttgtaaaaacaagcataaacataccaatttcatggggctgttacaaggactcactgaaataacataacaatcaggatcccatcaag

SEQ ID NO: 147028 - DNA, 201 bp, Homo sapiens
gttcctaataattaatcgtgtagattaatttatttaatcccaaacagtcctgtgaggcaggtaacatgactgtcctcctgattgtgcagataatgaaactragcacagagaagttaagaaattaactcagggtcacatagcttggaggtgggagagctgggatttgcatacagacacactgtctctagggctttgctttta

SEQ ID NO: 147029 - DNA, 201 bp, Homo sapiens
gaaagtgaatgcttattgaacacctactacatgctggttcctaataattaatcgtgtagattaatttatttaatcccaaacagtcctgtgaggcaggtaamatgactgtcctcctgattgtgcagataatgaaactgagcacagagaagttaagaaattaactcagggtcacatagcttggaggtgggagagctgggattt

SEQ ID NO: 147030 - DNA, 201 bp, Homo sapiens
agatacctccccaaagaaaatatgcagatggcagataagcacatgaaaagatgctccatgtcgtatgtcatcagggaaatgcaaataaaacaacagtgacrtactgctacacacttattagaatggccaaaacctggaacactggcaccaccaaatgctgatgaggatgtggagcaacaggaactctcatttgttgctgtc

SEQ ID NO: 147031 - DNA, 201 bp, Homo sapiens
acagcctaatttaaaaagtggatcaaagactttaacagatacctccccaaagaaaatatgcagatggcagataagcacatgaaaagatgctccatgtcgtwtgtcatcagggaaatgcaaataaaacaacagtgacatactgctacacacttattagaatggccaaaacctggaacactggcaccaccaaatgctgatgag

SEQ ID NO: 147032 - DNA, 201 bp, Homo sapiens
ttcttctttacgatcccagcgtcgtgcagggtgccttgtgctttgtaaacattccataaatactgtttgatttcatttgcatattactggagaagacttastatctggatttcccccaacctatttgtgccaagcaccttggtggtaggggcagggaggggctgcttttgtgttcttgctgagtctcagcactctggcaag

SEQ ID NO: 147033 - DNA, 201 bp, Homo sapiens
ctttacgtaattcatgcaacacctctgtgcattaggattatgatcctcattttataggtgagccacatgggagtgaggcgaggagggatggttaggttacrgttgtaaatggcaaagctgagataagactcaaaatcagtttatcttcagaaccattttgcaagtaagggaggatcccagatctcaaagtgcctgtatcag

SEQ ID NO: 147034 - DNA, 201 bp, Homo sapiens
gagcagcacggaaagccctcctggaggattcctccggatgaaagatttagggtggggtcatggtgtctgcatttgcagcctgtgtcatggacccaatgaarctagtgaggtgccagtttttctttgtgcatattcttccagtgtgtcaaggagcttggggtgcagggacctgaatgattacaccatcctcttcagatcata

SEQ ID NO: 147035 - DNA, 201 bp, Homo sapiens
ggaatttatccatttcttctagatttcctagtttatttgtgtagagatgtttacagtattctctgatggtagtttgtatttctgtggaatcagtggtgatrtcccctttatcatcttttactgtgtctatttgttcttctcctttttcttctttattagtctagctagtggcctatatattttgttaatcttttcaaaaga

SEQ ID NO: 147036 - DNA, 201 bp, Homo sapiens
ctcctgatctgctcttgtgtggtccctttcacttggggtgtgcaggggacttgtgacttgcttctaataagaccagagcagaggcgaaggatgtcacttcygtgattacatttccttatgtaagaccccatcttcatagcaaacttgccctgaaggatttccttcttggcttgatgaagttggcatgttgggggagcccat

SEQ ID NO: 147037 - DNA, 201 bp, Homo sapiens
atggccactttcacaatattgattttcctatccatgagcatggaatgtttttccatttgtttgggtcctctcttatttccttgagcagtggtttgtagttmttgaagaggtccttcataacccttataagttgtattcctcagtattttatgttctttgtagcaattgtgaatgggagttcactcatgatttggctctctg

SEQ ID NO: 147038 - DNA, 201 bp, Homo sapiens
ttgtcaggtttgtcaaagatcagatagttgtaaatgtgtggttaatttctgcggcctctgttctgtttcattggtctatatatctgttttggtaccagtacatgctgttttggttactgtagccttgtaggagtaccatgctgctttggttactgtagccttgtagtatagtttgaagtcaggtagcataatgcctccagc

SEQ ID NO: 147039 - DNA, 201 bp, Homo sapiens
tcccagctacttgggaggctgaggcaggagaatcgtttgaacctgggaggcggaggttgcagtgagctgaggtcatgccattgcactccagcctgggcaayagagcgagactccgtctcaaaaaaacaaaacaaaacaaaaaaaggaaaccactgctttaaggagcagcacataggattgatgaattttctttatccctgt

SEQ ID NO: 147040 - DNA, 201 bp, Homo sapiens
tggcaggccaaggcgggtggatcacctgagttcaggagtttcagaccagcctggccaacatggtgaaaccctgtttctactaaaaatacaaaaaaatagcygggcgtggtggagggtgcctgaaatcccagctacttgggaggctgaggcaggagaatcgtttgaacctgggaggcggaggttgcagtgagctgaggtcat

SEQ ID NO: 147041 - DNA, 201 bp, Homo sapiens
cgggtttcaccggttagccaggataatctcaatctcctgacctcgtgatccgcccgtcttggcctcccaaagtgctgggatcacaggcgtgagccactgckcctggcctattattttttccttattactcgttctcttcctcttgctcccctccacttcctggtactccttctcccctcccttgtctttctccccaatccg

SEQ ID NO: 147042 - DNA, 201 bp, Homo sapiens
gtgtatatatttaggatagttagctcttcatgttacattgatccctttaccattatgtaatgcacttctttgtctcttttggtctttgttgatttaaagtstgttttatcagagactaggattgcatctcctgcctttttttttttttttttttttttttttgctttccatttgcttggtaaatattcctccatttcttta

SEQ ID NO: 147043 - DNA, 201 bp, Homo sapiens
atcagcagcgtgaaaattgactaatacaagtatctactctgtgtaagcctgatatgaagtaatatttgtgtgtgtacacacacacacacacacacacacactcatgcttatgctcccatgtccctcattttacataagacactgagtcacagaaaagttaagtattttgcctaagttatttattagtaagtggaagaacca

SEQ ID NO: 147044 - DNA, 201 bp, Homo sapiens
tatcagcagcgtgaaaattgactaatacaagtatctactctgtgtaagcctgatatgaagtaatatttgtgtgtgtacacacacacacacacacacacacactcatgcttatgctcccatgtccctcattttacataagacactgagtcacagaaaagttaagtattttgcctaagttatttattagtaagtggaagaacc

SEQ ID NO: 147045 - DNA, 201 bp, Homo sapiens
agcaggaagacatggttgccccaccatggtaacagcagttcaaagaccaactgcctccaactttcaaaacttagcatatttggcaaaaaaaaaaaaaaaamacacacacacacacacacaacaaaacatttgaagctttgaaatcattgaacctgaagtttcaaaagacaaaaactggtatcattgctcgttagaacacac

SEQ ID NO: 147046 - DNA, 201 bp, Homo sapiens
aagcaggaagacatggttgccccaccatggtaacagcagttcaaagaccaactgcctccaactttcaaaacttagcatatttggcaaaaaaaaaaaaaaaacacacacacacacacacacaacaaaacatttgaagctttgaaatcattgaacctgaagtttcaaaagacaaaaactggtatcattgctcgttagaacaca

SEQ ID NO: 147047 - DNA, 201 bp, Homo sapiens
ggtacaggaagcactaccctagagctgaagaaataggaggaggaggtaggaatgattaaaacctggggccaggacccagacctctaggatggcatcaccarccgattccagaggcagcatcactgggccgagaagtagggacagcgaagcgtgttctgagtgtgggaaaaactgcagaatggatgtagctgctgctaaagg

SEQ ID NO: 147048 - DNA, 201 bp, Homo sapiens
ccgggaggtgaaggttgcagcgagccgagatcgcaccactgcactccagcctgggcgacagagcaagactatgtctcaaaaaaaaaaaaaaaaaaaaaaarggccaccatgcttgtagagctatccatttggatagagatggttttagcaggaaggaatttgaaagaggaccctcgagttatgtgccagagcactgctact

SEQ ID NO: 147049 - DNA, 201 bp, Homo sapiens
ttactgtagacagacaaaatgtgaggattattgagaatgtcatcatcatgatttccattcttgaaccaaagggcagctactgaatactaactgcgtgccargcactgtggcactccaaaagaataataagtcaagttctttaccagcctggaaattcacatcccaatgctgccaggtgcaggcatgtaaataaataattac

SEQ ID NO: 147050 - DNA, 201 bp, Homo sapiens
attttccagaaagcttgtcttggatacccgctctctcaactgctgggagatcactgcctcacctctgaaatgaagaaggcttccaagcttaactctctcaygctatgaaggtgacaggccacttccaaggccacgttccctgacactaagcctgctaagaggaaaaaacaacagcatcacctcaactagaagttaaaaata

SEQ ID NO: 147051 - DNA, 201 bp, Homo sapiens
gtgctgtttgctgtggcagctgaggactccaatgaagcccccagacccttctagaaactgactttctcagcactgatctcccataaaattctgtacccaakctctgtcaagatattaatattggccaggtgcagtggctaacacctgtcacccagcattttaggaggctgaggtgggagaattgcttgaacccaggaattc

SEQ ID NO: 147052 - DNA, 201 bp, Homo sapiens
caccttggcctcccaaagtgctgggattacaggtgtgagccactgtgcctggcaggacctgagctttttaatacatggggtgggtgggcggggttagggarggatgtactgagtttctgaataaggagagaagaatggatgaagatgggtctgggatttgagacccaccagacagtgttaagagcttgtgcccaggttctg

SEQ ID NO: 147053 - DNA, 201 bp, Homo sapiens
tatgatcttggtcagtgtaaactctctcaaccaatttctttacctgcaaacgtgaaaacagcaatacctattttataggattgttacatattccatgagayaatgggttgaaaagttttataattttgtcataataaatgttagttctcttcccatcccccatgctgtgtcttgttcagagtgagagatctggtgtctgtt

SEQ ID NO: 147054 - DNA, 201 bp, Homo sapiens
ggaagccgaggcgggtagatcacaaggtcaggagatcgagatcatcctggccaacatggtgaaaccccgtctgtactaaaaatacaaaaattagctaggcrcggtggcgcacacctgtagtcccagctacttgggagactgaggcagggaaattgcttgaacccgggaggcggaagttgcagtgatccaagatcgcaccat

SEQ ID NO: 147055 - DNA, 201 bp, Homo sapiens
aaaaatcactttgggaagccgaggcgggtagatcacaaggtcaggagatcgagatcatcctggccaacatggtgaaaccccgtctgtactaaaaatacaaraattagctaggcacggtggcgcacacctgtagtcccagctacttgggagactgaggcagggaaattgcttgaacccgggaggcggaagttgcagtgatcc

SEQ ID NO: 147056 - DNA, 201 bp, Homo sapiens
tggcaagcccaggtgtgtgagtccctgggctgggttgatagacagatgtttgcactttgcacaccatcagattactaagaatggttcttggctgaagagtmctttctggttgtagaagccaccatcaaaagccagtccctcaaccacttattttaaaacagatgaaggcaacccagtgctttttctctgatggcacattct

SEQ ID NO: 147057 - DNA, 201 bp, Homo sapiens
ctgagaactcatggccaggcagtctcttccctgaagtggcaagcccaggtgtgtgagtccctgggctgggttgatagacagatgtttgcactttgcacacyatcagattactaagaatggttcttggctgaagagtcctttctggttgtagaagccaccatcaaaagccagtccctcaaccacttattttaaaacagatga

SEQ ID NO: 147058 - DNA, 201 bp, Homo sapiens
gtcaaaagtagagatggcgggttttgaccttaataagtattaacacaagattttacccaaacatctatcttgctcttggtaacatgttatctttgccaagygcccatcccaataaagcgttatttctgtcaagctgaactcctgatgaaatcttctattcccctctctccctgatcggtttcgataaaacctcattcctca

SEQ ID NO: 147059 - DNA, 201 bp, Homo sapiens
gggtcccctgcgaaagagagagagagagaaacacaaacgagtgatctgtctatggctgtaaaatggggtggcagtactgactccctcatagagctatttcragcattaaatgaatttatatatatgcaaagggcttagaaagtatctaatagacaagtgctttaaatacctctaagtggaggtgtcagtacctgcaagtct

SEQ ID NO: 147060 - DNA, 201 bp, Homo sapiens
ctattagactaggatcctatcagactaggattttgagttaaaaatatgtgatatttcaaagttgatttcatcacagccaatgcatcgatgccaattttccrttaaatttctaatgactttgcttttgatgaaccaaaaccagctcttacaacttaaagctacgctgctgtcagagaacatctccgtttgataatagccaac

SEQ ID NO: 147061 - DNA, 201 bp, Homo sapiens
tctgtgtggcttggttcattgtgagcagattaggttggcccttggctgtcatgcttccaggcaaagctatcccttttgtcacttgccacctgcagttctgrgctaaaaactaccatatgtataactcctcttggtatttattggtttgttacatccaattttgcaaagcctgatgcattgtttggttagaaggaatcctct

SEQ ID NO: 147062 - DNA, 201 bp, Homo sapiens
ctcagtatgatgaatgcaaaataaaattgaaaatctttgctaaaaaatcatcccatgtgggtcttctgatttgaacaagattttagctacaaaaaaaaaaatcaaacctcattaaaaatttttactgtaaaatatgattcttagcacgtgtgattcgcctcactcttggaacattttagtgggattttataagggctatga

SEQ ID NO: 147063 - DNA, 201 bp, Homo sapiens
tgggactacaggcgcccaccaccatgcccggctaagtttttgtatttttagtagagatgagatttcgccgtgttagccaggatggtctccatctcctgacytcatgatccgcctgcctcagcctcccaaagtgctggaattacaggtatgagccaccgcgcgcagccctgtttctgcttctttaaaatggggacaataaac

SEQ ID NO: 147064 - DNA, 201 bp, Homo sapiens
cccagtgagcctctgtttctgctttttttttcttttttcttgagacggggtcttgctctgttgcccaggctggggtgcagtggcacgatctcggctcactrcaagctccgcctcctgggttcacaccattctcctgcctcagcctcctgagtagctgggactacaggcgcccaccaccatgcccggctaagtttttgtatt

SEQ ID NO: 147065 - DNA, 201 bp, Homo sapiens
cctccctccaaccccagggagcccccctgggtctcctttgaggcatgctcctctctgaggcatatgtgaccacacacacacacacacacacacgcgcgcgyacgcacgcagctcagggacctgcagaattgccagagatcattgcagtgagtcaggattcctctgtcttgacttggatcttcattcttcagcttgagcata

SEQ ID NO: 147066 - DNA, 201 bp, Homo sapiens
ctcttgttgtctaggctggagtgcagtggcatgatctctgctccctgcaacctccgtctctcaggttcaagcaattctcctgcttcagactcccgagtagmtgggattacaggcgcccgccaccatgcctggctaatttttttgtatttttagtagagacggggtttcaccatgttggccaggctgggctcaaactcctga

SEQ ID NO: 147067 - DNA, 201 bp, Homo sapiens
ggtgaaataagccagtaataaacaagtaaagactatatgattctatttatgtgaggttcctagagttgtcaaagtcagagcaacagaaagtggaatggtgkccaccaggggcttgggggagggaagaatgggaagttggctgggtgtggtggctcacacctataatcccagcactttgggaggccgaggcaggtagatcac

SEQ ID NO: 147068 - DNA, 201 bp, Homo sapiens
cacggccttgagtcatgcaaaagagtttcgccttagtcttttgagaaactaaagctgcatggagggctgacaagatcagattggcattttgaacagctccygctgtgcagagaatagattgggaggcaagagtggattccagttaaggacatgatagtaggtgaaataagccagtaataaacaagtaaagactatatgatt

SEQ ID NO: 147069 - DNA, 201 bp, Homo sapiens
agagaacatgtaggcaacaataaagagaaaaacaggagtaagagagaagagtacccaggaaactggcgacaatggtaggaagaggtgaacaacagagaaarctcaagaagtggagcagctctgcagctcatggtcaccggcgaagagctactaaagtgtcagtcctgtgggttttgcagacaaagcatctccaccatattt

SEQ ID NO: 147070 - DNA, 201 bp, Homo sapiens
attgacctagcggggaagttgtaaggcataactaataaaaatgacaatgaagcatttgccaacagaaggtgtactactgaatgctaatatcggtgagagcytgtctgtgatgctagggcagatttattagacagctgtttagccagcatgagtttccctgcccccaacttcaccaggcagctgagtccagttcgagcagct

SEQ ID NO: 147071 - DNA, 201 bp, Homo sapiens
acattatcatatatggtcctcacaacaaccaacttaatatccctatttgacagaagtctaacctgaggctcagggagacttagatttggttaaggtcccaygctgtaaaatagctctctcagattcatgcatggtgtttctatgagactacactgccttttactcagaggaggcatttgaactgaatctaaatgaaacctt

SEQ ID NO: 147072 - DNA, 201 bp, Homo sapiens
cagcgcctctgttgctttccacccctgtagcattaaaattagagagcaacagccaagtaatgaagcctgggtcactccccatctgtctcactaaatgccayttggaaccagtgccttttcatttgacagtaaaatcaatgaatgaaatatcgcagggttgaaagtgatgctgttcagaattcattatgggcgatgctctat

SEQ ID NO: 147073 - DNA, 201 bp, Homo sapiens
ctgcaccatctcctttgaccctacagtagccctcagtagctgccatttttttctaacttcgtaacgatgaagacatcgagacttggagaagataaccaacrtcgtctgtgcttaggaagtgacagcatttgtgggtgaagctgggattctcctaatgccctctctgcctttgtcacaacatctgccagccatgaagcaatt

SEQ ID NO: 147074 - DNA, 201 bp, Homo sapiens
ttgaagatttccaataatgtattgaaaattgaactcctttgatagcatatacacacatgtatgtatacatgcacacacctttctgctgggaaaaatatggrcttcagtggtcaaagggagtcattgattggggctaaggagggtacaagtcatcattggagcagacttgcctgttacctccactctgttccccttctcggc

SEQ ID NO: 147075 - DNA, 201 bp, Homo sapiens
gggatcatgttctacttctggcttttgcttacagttcattggccaaagcaagttacatggccactgctcacttccaggcgctgaggaagatcattcctacrtgtgactggaaggatagaaaccagaggatttctgatagccttaacgacttcccctttgttctgaccagctttttacatttacatttctttcttttaattc

SEQ ID NO: 147076 - DNA, 201 bp, Homo sapiens
gacttggcacagactcaccatgtgatgttgggcagactcatttctctgtaaatttcactctcctcatctgtaaaatgctcagccctttaggactagatatratagtagttaagaacctcaggtttgggcttcagagttgacttccagtctcagcactgcaacttaccagctgtgagatacaggcaagtcacataccatctc

SEQ ID NO: 147077 - DNA, 201 bp, Homo sapiens
aggatggattaggttgtgctatttatatggacaaccccgatatctctgtgtggttgaaataacaaagatttatttcttgtgcaacacattcatctgtggtwggtgtataggtggggtgttttattcttccccaggtaacttataccctgggatgctggtgtttccactagctggagtgtcatagatcactgtggccagagg

SEQ ID NO: 147078 - DNA, 201 bp, Homo sapiens
atgcggagggcaaggacagggacaaatcatgtcgtcggacctatctgaggggtgcgtgaggctgtgttctggaagtgtggctggacctcatttccttttcsagttacaagttccatgtaaacttagataagctattgtaattattttttacttcctgatagatagcaagatggttaactgagatgaatatttattgacctc

SEQ ID NO: 147079 - DNA, 201 bp, Homo sapiens
agccttaaaggattgttctaaggatgtgatgggataataatataagtacttaccatgatggcttgaagttactgagcactcagctaatggcaataattacyattaactggtagacacttaacagggcaaatgaggaatgaaccatcactgggctgtggggtggtgctctcgggtaactgtgaagccctgtatcgagacgtg

SEQ ID NO: 147080 - DNA, 201 bp, Homo sapiens
attttaagactggtccctggagatgaccaaattcacttccctcatcttgcaaataagaaaacaaagacccaaagtgttcctgggatgagctgtagtagaayatagcattatacttggcccttgctgaccacctgtgtctgtcccttcttccccaaaactgtgcaaaaatatgttgctggacaatagctgttattatattca

SEQ ID NO: 147081 - DNA, 201 bp, Homo sapiens
cttgcttcgttttggtagaagagcctgtactggctgctcagggccacagtggatgtgccagagagattgaatgtatagttagaagcaatgtacaattgctsaagatatgaatattagtaactttgttttattttttagcactgctcagatgaatatataaaaatccgaagaaatatgttatttcccctctaagccagcaga

SEQ ID NO: 147082 - DNA, 201 bp, Homo sapiens
taaagcaccgtgtcatctaacttaaaactagaacaatagcaccaaagccacctggatatcttcaccatcccatgccccacctccctcactcccacctcctrtcagggtaaaccaccaccctgacagctgtgaccatcctttctgaaattatttgttatgtctccccaaactgcactgttatttcctcaaagcaatcatctg

SEQ ID NO: 147083 - DNA, 201 bp, Homo sapiens
actgctggaatgacaaatcatagcattttaagactggtccctggagatgaccaaattcacttccctcatcttgcaaataagaaaacaaagacccaaagtgytcctgggatgagctgtagtagaacatagcattatacttggcccttgctgaccacctgtgtctgtcccttcttccccaaaactgtgcaaaaatatgttgct

SEQ ID NO: 147084 - DNA, 201 bp, Homo sapiens
tctgatagttttagaaggggctttccctccttttggtcagcgtttctccttgctgccaccatgtgaagaaggacatgtttgcttccccttccatcatgatygtaagtttcctgaggcctccccagccaccctgaactatgagtcaattaaacctctttcctttataattacccagtctcgggtatgtctttattagcaatt

SEQ ID NO: 147085 - DNA, 201 bp, Homo sapiens
gccaataatcactgggtcccttatcagccaacaccatttcctttgaattgttctttcctgttgagaaatgtctcagcactgagcacaccgagctgagggtyacaatttgtacaaattcagatacagctatgaggtgggagagcaaagaagggtggcaaagagaagagggaatgccctcactcttggaattaacacctgcct

SEQ ID NO: 147086 - DNA, 201 bp, Homo sapiens
gaaccattatctcactgactgtagctgactctctacaattcttggtagctttataaactctcaccaccagtggtggtagttttggtcactccctgggagaycagactgaagtatgtagctgtccaagttaagagtgaagcaacaactttttttttttttttgagatggagtctcgctctgtcacccaggctggagtgcagt

SEQ ID NO: 147087 - DNA, 201 bp, Homo sapiens
tggcacctttaaacttagcatcttcagtgcagagctcatcttctcccctcctgagaattcttcctttacactgcgtctcttctggtgaatacacctttgtmcccttccgccatctcatttcttctcatctgcccaaatcttagcaatttctgtaatactctctgatatcatctcttttattctagttcttctgctccctgg

SEQ ID NO: 147088 - DNA, 201 bp, Homo sapiens
tgtagagatgatgaagttggcttgtctctgtctattcagtttccttctgggaaagctggagggcaggccagggtggtatggcttaagcacacagcattctstggttccttgctgcctttcaaacaatcctccgtcacggtaattcctctctaccaggcctttggcaagccatagatagtagattgtgcagggttcatttct

SEQ ID NO: 147089 - DNA, 201 bp, Homo sapiens
gcagtggcacttcatgccattgaccatctccttccttgtttagaagcctttctgtctgccttccttgaagaggactctctccggatgccctggattctttragaactcccatccaatcacctgtgtcagcgtctctcttcctgcccttcaaaggcaggtcacctgcaggttctgtggcttcttctcatggatcaacttact

SEQ ID NO: 147090 - DNA, 201 bp, Homo sapiens
ctcatcttttctgaactctgcagtggcacttcatgccattgaccatctccttccttgtttagaagcctttctgtctgccttccttgaagaggactctctcmggatgccctggattctttaagaactcccatccaatcacctgtgtcagcgtctctcttcctgcccttcaaaggcaggtcacctgcaggttctgtggcttct

SEQ ID NO: 147091 - DNA, 201 bp, Homo sapiens
attcctcatcttcccacagacattatcttgccaaagcacttttgcttccatctcatcctttccttggacaagtcatctataatctctcaagcaggggcctkgtctgcctcctgccttcacccttgtagggaatggtggtttcttcttaggatgactgggagctccttggctcagaatgggttaactccaacccgggctgcc

SEQ ID NO: 147092 - DNA, 201 bp, Homo sapiens
ggccaagagaacaaccaccaccaccattgtcatcatttccagtctctataagcttgcttgtatcagctttgcttgaggtgtgtttaattctcacagtaacygtaggagttagatacttgttgcatcctcatttcacccttgaggaaactgaggcagggaaatgttcaataaattgtccaaggtcacacagctgataagtag

SEQ ID NO: 147093 - DNA, 201 bp, Homo sapiens
gcttctcagcctccagaattgtgagaaattgtttataagccacccagtctatggtattcagttaaagtagcctgaatgggccaagagaacaaccaccaccrccattgtcatcatttccagtctctataagcttgcttgtatcagctttgcttgaggtgtgtttaattctcacagtaaccgtaggagttagatacttgttgc

SEQ ID NO: 147094 - DNA, 201 bp, Homo sapiens
tggtttttggctataaaaatgaattgtgtagtggttaagtctgagattttagtggacctgtcacccaagtagtgtacattgtacccagcgggtagtttttwggctctcactccctcccagctttcccgcttctgagtctccagtgtccactgtactgctctttctgcctttgcgaaccgtagtttagctctcacttgtaag

SEQ ID NO: 147095 - DNA, 201 bp, Homo sapiens
cgaatctgctgcttcctgatcttaagcttctcagcctccagaattgtgagaaattgtttataagccacccagtctatggtattcagttaaagtagcctgartgggccaagagaacaaccaccaccaccattgtcatcatttccagtctctataagcttgcttgtatcagctttgcttgaggtgtgtttaattctcacagta

SEQ ID NO: 147096 - DNA, 201 bp, Homo sapiens
ttgtacccagcgggtagttttttggctctcactccctcccagctttcccgcttctgagtctccagtgtccactgtactgctctttctgcctttgcgaaccrtagtttagctctcacttgtaagtgaaaacgtgtggtgtttggttttctgttcttgtgtcaatttgcttaggatagtggcctccagctccatcgaggttgc

SEQ ID NO: 147097 - DNA, 201 bp, Homo sapiens
aaggccgtgttactgcatgcatagcccctgttggctgatggctgcatgaatagttttgagatcaggaagcagtgttttaagcattttgcatcctaacaagwgaagttgtcatttacatacaactatctaatggtattttcttttccattttggacattgattggaaagggaagtgggcagtttgcttagcatacaataaat

SEQ ID NO: 147098 - DNA, 201 bp, Homo sapiens
tctccctttcttttcttccctgttttccacacttccctccctctttttccccaggtctctagtagaaggagcatgaggtgtgtttgaattccacctcctgytgatctttgggagagtaactcaggtcaggcttcttccagccttacctggggatgtagatacctatttctggggttgccgggagggctgaatgacaaactt

SEQ ID NO: 147099 - DNA, 201 bp, Homo sapiens
tgtgtttgaattccacctcctgttgatctttgggagagtaactcaggtcaggcttcttccagccttacctggggatgtagatacctatttctggggttgcygggagggctgaatgacaaacttttatagccgttacgttcacatagcacttactggtgcttcatgggtatacttagttagtcctgaggacagcccatgaga

SEQ ID NO: 147100 - DNA, 201 bp, Homo sapiens
taaatggcagtgagtcagtggaccctgcagcactcccagggtcaccctgagttcagggattcatgtctgaggcccatgctcctggctacttagttgagatraccccttgggttcccttcaattctgccagtcttccgttctttgaactgtatcccagatggggtgcggaggtgttcctgtgtcccctttggcccttttatt

SEQ ID NO: 147101 - DNA, 201 bp, Homo sapiens
tctgtcatttctactttttggactcctcaatatattccttcttcccagtacccatttcctttttgcctctttcttttgcattccccaaatcacttctcccstaaccctgttccttgcctgtttggtttttgccttcggtcacctctgtctgtctcatctctctgtgttttatctgtcacgatattggccaaaccaagccct

SEQ ID NO: 147102 - DNA, 201 bp, Homo sapiens
acacacacacatacacacacaggaggggggagagagagagagagagagagagagagacagtaaatttgtcagcccttgcagtagcacgcatttctaaatawgggcatagtaggaagagagatggttactgtgggaactataacttttaatttactggcctgaagcgctaaaccagggcttgatacttaatgtagtgttttt

SEQ ID NO: 147103 - DNA, 201 bp, Homo sapiens
aaaaacaggcagttttgctttcaagacccagctcctaaccattaagctaagctgcctttcaggacttgaggttgattgagtgtgtggcatacagctgggtrgggggcccagggcatacccccatttctagcttatgaggctgggtgaatgaggcacctttaacgcaggcaggaaattcaaggggaaacctgtgtaaggggc

SEQ ID NO: 147104 - DNA, 201 bp, Homo sapiens
cagagttgtcccttggtatatagaggggattggttccaggcaacccacatatccagaatctgcacatattcaagtcctgtagttagccctatgtcacctayccctgttagactgttcttgtgttgctataaagaaacaactgaggctgggtgctgtggctcatgcctgtaatcccagcactttgggaggccaaggcaggca

SEQ ID NO: 147105 - DNA, 201 bp, Homo sapiens
ataaagagacctcagagagctccctcacctcttcttctacgtgagggcacagcaagaagactgctgtctgtgaagcagcaagggtgccctcaccagacacygaatctgctgcttcctgatcttaagcttctcagcctccagaattgtgagaaattgtttataagccacccagtctatggtattcagttaaagtagcctgaa

SEQ ID NO: 147106 - DNA, 201 bp, Homo sapiens
taatcccagcactttgggaggcagaggcgggtggatcacctgaggccaggaaccgagatcgtgccactgcactccaggctaggcgacagagcgagactccrtctcaaaaaaaaaaaaaaagaaaaaagaaaaaaataatatctgctaatatgtgagcagtatcatcgtcatcaccaccattgtcgtctacattgctgtgga

SEQ ID NO: 147107 - DNA, 201 bp, Homo sapiens
atccgccattcagatgtttcagtattacattagtttcaaatctaattgaggagataatgtaataaaaggtaaacataaataaaagtcagctacctctacargctgagacatcatctgcttggtgagcacagtgctcttggggttctggagttgactgccacccctgcactggggcatcctgcagttctcccgaaggatgaa

SEQ ID NO: 147108 - DNA, 201 bp, Homo sapiens
atggacgaatgctcagctcagccttttcatgccagatgcactgtgtggaagaattgtagttctctgctccttggttctcacctcccgagcagcaggagccrggccttgagccaaaacctgcagaaggaagaagagaggagagttccctgcgtagagccatccatctgctggctggtgacaccaacaccagggccccagcag

SEQ ID NO: 147109 - DNA, 201 bp, Homo sapiens
agtcagcgaagggagatggggtggggctgttttataggatttgggtaggtagtggaaaattacaatcaaagggggttgttctctagctggcaggggtgggrgacacaaggtgctcactgggggagcttttgagccaggatgagccaggagaaggagtttcacaaggtaatgtcatcagttaaggcaggaacctgccatttt

SEQ ID NO: 147110 - DNA, 201 bp, Homo sapiens
ctcacctgggtcagctcttcttccgaggcatcctgaagatgcctcatggactcagatgatcatagtcatctatgtagctgactctcacaagggttttcacrgtttacaaatgcttttcacttaggctgcttgctttttctctgttttcaatggttacgtttgtctctcacaatccttttggtcctggtctctctccacttg

SEQ ID NO: 147111 - DNA, 201 bp, Homo sapiens
tatctctgttttgttgcatttaaatcctgacattgttacttacttgctgcgttatcttggatgagtttcatcacctctttgagccttgactttctccccaygaagatgagggcaggaataccttccatgtgaggttgtggtgggtctagggagggaataagcatatggaagttctctgtaggtatgacattgtattatgtt

SEQ ID NO: 147112 - DNA, 201 bp, Homo sapiens
tagtatgggtgtgcatttcctgcgtattcattttcctgtgttggtttacatagtttcttaccaccttcaattcggaggcattttagaggcattttctctartgatctggcccatagatcgtttcataagtaaatgggatcagcagggttttatgtctcctacagcagaaggtgcctgggctttagggttgaatgcatctgg

SEQ ID NO: 147113 - DNA, 201 bp, Homo sapiens
agcttgaggccatgcacggtggcacacgcctgtaatcctaacacttggagaggccaaggcaggaggattgcctgaagccaggagtttgagaccagcctggstaatgtggcagaaccccatctctaccaaacaaaaaaaaaaaaaaaaaggaagaggtggtcatcttggagcaggaagccaagcaaagatctgagggaagaa

SEQ ID NO: 147114 - DNA, 201 bp, Homo sapiens
gggagtggatgacatagagaagggattccagtcacacaacagtgttccttccccaaacacattccacattcaccgggtgtacaacgtgcaatgatttctgwtgttgctgacttaagagcaagcacgttcggtactaaatcttgcctcgtgtcttattaaagagcagctcactacaaaactgttagtatctcagaatggttt

SEQ ID NO: 147115 - DNA, 201 bp, Homo sapiens
tcagcctttttattctactcagatcttcaattgattggatgaagcccctccccgttagggagggcaatcttctttattcattctaccaaatcaaatgttartctcatccagaaatactctcacaggcacacccagaataatgtttgaccaaatgtctgggcaccctgtagcccagtcaagtcaatttattaccatgacaga

SEQ ID NO: 147116 - DNA, 201 bp, Homo sapiens
ttaataactttctacacaaataactaatggcccattcacatcatcccctgcaaatgttttggggtgacaacttgttaaaatttaatattcagagcaatacrgccccagctatttgacaatttcagatataaatctaccttaaagatgtacaagtacaaattatgcaatttgatttttaagtgcttttctagcaatataaat

SEQ ID NO: 147117 - DNA, 201 bp, Homo sapiens
gtggaaatagtatccctttacgtaaaataagaaccctttccacatgcataatattgtagttttacatactggatttctcatctatatgactgtcactcttmtttggtctctttttgagctctccagattctttctgaattgagtaaatacgtcccacttcttttacataaattttacaaatgcgttttttattccagttgg

SEQ ID NO: 147118 - DNA, 201 bp, Homo sapiens
atggaaatttaaaacatacactccctctcctcatttgaaacttctgcactcagcagaagagagaggtattgcaagcatgcaagcatacagatagattgtgrtatcactgcaattgagctccacagaggagaaagccatgctgccaagacagctcatgaagtcaacaaattgggcgtgttggggatttcaggggagactttc

SEQ ID NO: 147119 - DNA, 201 bp, Homo sapiens
atctcagtaattttttcacagcacccgtaggtaaaatgaaatacctattttgttattaagcatttatgtcctaacaacttagtagctgtctgaaaaaaagratacatataaattgaagggaaaaataccattatttcactcttatccacatttatttgcttatgggatgtatggacctgttgggcactgtacaatttttca

SEQ ID NO: 147120 - DNA, 201 bp, Homo sapiens
ctgcattcaggaacttggcacagggcttgtatatgtaggggctcctgaaatccttgttggtgaagatcgttggtccactgaggactcttcagagccaaaasatggaagtataaagtgcagtagatttcaccagcaatttcagaaagtttagcaaggcttgaaccaggatatcctcttggccaatcagccgcgtcatcccca

SEQ ID NO: 147121 - DNA, 201 bp, Homo sapiens
tctaagaacttaacatgtatgaagtcattccagcatgtgaagtcacagcagctgtaagagttagataccaaggcagagataggttaagcaatttttttcayggctacgcagctagaaggtggcagggctaggaaccggaaccaggcagcctgagttcagtccacactctttatctccaactatattgatgttcatggttcc

SEQ ID NO: 147122 - DNA, 201 bp, Homo sapiens
aatagacagagacccaagaataccaaccaagttctctcatgttaataaggcaacagaaaaaaaatgataggctttgcaggaactcagaaaatatacaccartaggccaggtgcagtggctcacgcctgtaatcccagcactttgggaggctgaggtgggtggatcacttgagcccaggagttcgagacccacctgggcaac

SEQ ID NO: 147123 - DNA, 201 bp, Homo sapiens
tgactgtgtgagaaataaatcaacaatgtagtttcacagctccaagctaatagagattaaactatattactctcagtattttgccaaagtgagttggtctycaaaaatagttttaaaagaatgtatgtataaaaagtttttaaagacaggaagtaaaactgcaacaggatttcttattcatttttatgaccatttttgtct

SEQ ID NO: 147124 - DNA, 201 bp, Homo sapiens
ggaggctgaggcgggtggatcacttgagcccaggagttcgagaccagcctgggcaacgtgacgaaaccttgtctgtataaaaactagaaaaattagatggkcatggtagcatgtgcctggggagtttaggctgcagtgagccgtgatcacgccactgtgctccagcctgggtgactgagcgagaccctttcccagaaaaaa

SEQ ID NO: 147125 - DNA, 201 bp, Homo sapiens
gcggatattgtagctacatccaacctagtagctgtcttgctactgcatggcatctgagtatgaagtccgtgtggatgagagcagagctgaggtggagaggraccaggccatctcctggacccagatcaaaccttgccacagggtagattcacctctggaccttacagattgtgaactattcagtcctttattttgcctgca

SEQ ID NO: 147126 - DNA, 201 bp, Homo sapiens
cccgtgtgctttaaaataatttgccactatttttggagtactcggtcccaggagatttgtgcatgagtcctgattttgtctcttagtagcagtgtgactcwgggcaagtcacatagcctgtgctgaggatctcttggctttctgactttgtatttattcaccctgcttagttttcccagggagacccacactcacacccac

SEQ ID NO: 147127 - DNA, 201 bp, Homo sapiens
ctgacccattcacaagcagggaagatagaacggaaaatcaaggacagcttcacagaagagataaagcctgggttgggttgtgaggatgaaaaggatgtctkccaggaaggctaggagtatggaaatccagggccacgtgaacaacatagacaggacccccccagaggaacaaaacagatgccctgtttggagaactgtagg

SEQ ID NO: 147128 - DNA, 201 bp, Homo sapiens
ggtgggcctctgtcctgcaaggggcttttctttttggggtcagaaattgggatcctgtactggaggcttcaccatcataggcttccccttggtcctctgcrcctgttacttcctgcactcaagcgcatcattcctctcagcttgcagaggaaaatcctgactttgccttatagtggtattgagttgagggttcttagtttt

SEQ ID NO: 147129 - DNA, 201 bp, Homo sapiens
tctccctgatcggtttcgataaaacctcattcctcattctgattttctcctaagggatggtttggatttgtcaggaaagggtgaaaaaagaggtgattttktttttcattttcctcctcttatttctttttctaatatagatacttgttggaattggaatataactttaatgtaagtcaaactgataaagggtggttggac

SEQ ID NO: 147130 - DNA, 201 bp, Homo sapiens
aattggaatataactttaatgtaagtcaaactgataaagggtggttggacactactgtgaagaaggaaaagaagataggaaaaaggaggacagtcacttayaggcaaaggaatgtccagccaggcttttgcttgttttctcttgtttttaatttacaatggagctgaggaagataacagtgatttaggtgaagtggcattt

SEQ ID NO: 147131 - DNA, 201 bp, Homo sapiens
gaaaaaggaggacagtcacttataggcaaaggaatgtccagccaggcttttgcttgttttctcttgtttttaatttacaatggagctgaggaagataacastgatttaggtgaagtggcattttacagcagggggatgccattgaaggaatcaatgacattcacaaaagtacttgcttccatttttttttttggaatgggt

SEQ ID NO: 147132 - DNA, 201 bp, Homo sapiens
acacaggaaaagaaaaccaaaaatcgcatgttctcactcataagtggaagctgaacaatgagcacatggacacaagtaggggaacaacacacactggggcytgttggggagttggcaggggagggagagcatcagtaagagtagctaatggatgctgggcttaatagctaagtgatgggttgatctgtgcagcaaaccact

SEQ ID NO: 147133 - DNA, 201 bp, Homo sapiens
atcctcaaattgttgctgctctgcaacaagatacatatggaacttgagactaagcattttagaaacatctagagcaaatggactttgtggccagcatcaaktgtatgatcaatagtcttgattaacgtagtgtagaccagtttgtttaattccagtgatgagttacacgtgggccaagctctgttttacctttgagtgtta

SEQ ID NO: 147134 - DNA, 201 bp, Homo sapiens
gggcattatctgctctgggatgtcctgcagaaacatgagaaatgaagtaaggtgtgtgtggccttctgaatcccccagttcactaataatgtgttaatacscagagcaatggacagaggtgaataaatagcctatcaaaatgggtatttctggctctcctttattggtgaagattgattgcagttaaatgagaacttgtaa

SEQ ID NO: 147135 - DNA, 201 bp, Homo sapiens
cggctaaggatgaaggcaggaagctcagcagtgcctcctcttggagtatatctcaaaggaagccaaggtctgttgactgcttgttcccccatacaacacasagaacaactctgtgttctgaaaatacagcgtgctttacaccttaaattacatcatcaactcatcttacccatgacatcaccttccctcactgagaaaggg

SEQ ID NO: 147136 - DNA, 201 bp, Homo sapiens
catcttacccatgacatcaccttccctcactgagaaagggtcacaggaactcactgatgccaagcgcctcccaataagggacaccatgctctgtattttgktattttgcttaagcctcccatcactcttactggaacattttatgttcccatttcacagaagaaaaaatcgaagctcagagcactgatgtaactcctccaa

SEQ ID NO: 147137 - DNA, 201 bp, Homo sapiens
cagtgaacacacatacactcattccccattgtttccagttctcatggtggagatgaattagggcatgcctattcataggaaggccttttgagagatgggcragactgaattcatatcccagctttagtgatttatgcagagagtacccttgatccagttgcataacttctgtgaactccaggtgtctcatcagtaaacttt

SEQ ID NO: 147138 - DNA, 201 bp, Homo sapiens
ctataatattctatacaaatggtcattaatcttctgcttttgaatacttccagagataagagatcattacctcccaaaggaccctgttccatatttagaarctctattagaaatattcgccttatgccttactgaaatcttcatctttttcattctcctcattggtccacctgagcattaatgaagatcaggtgcaagcct

SEQ ID NO: 147139 - DNA, 201 bp, Homo sapiens
tgacctgcttgtggaataaatgccttccaggttgctgacttgcttaaatgtgctccccattgtgtctccatcccatagacagagacattctctgtggttcwgcaaatcacagcacttggtctagatctgcatatgtgacatgccccaccttgagctacagttggtctgagctcagagtcttaaactcatttaaaagcagtg

SEQ ID NO: 147140 - DNA, 201 bp, Homo sapiens
tacatgctgggttcagcctatgggaggaggaagggtttcctcgaggacacaggaacagcatgtctctgatgccagatccctgctctgggggcgctcatctstggcctcaagagatgtatggcttctgtgcctagtgcagagttgggattgattgctcagtttaaatggaaaattgttccaaaagcagcagctgcctctcca

SEQ ID NO: 147141 - DNA, 201 bp, Homo sapiens
ggaaatgagattaataccagtgtggattgcatggagagactgccccaaaaggttgcatggctaatcactcccacgcacttttcctcctcctcaaacccaawgtgtgctgtccagttttggagatctaccagagggagggactttgcattttccagatttcagcttgtgattttttttttttttttttttttgaaatggagt

SEQ ID NO: 147142 - DNA, 201 bp, Homo sapiens
aaagagacactgtgtcttggttgttttgccatgggggcagtggggcagggtactgtttgggaggagtgtttggagacgggattaaaatcctggcacttgtscctcccagggaaaagggtcatcctgtttattttgtgtcaagagctcaaacagtgatcaaaatccaatccaacatcataaataccagaaaaggtcagggct

SEQ ID NO: 147143 - DNA, 201 bp, Homo sapiens
acatggtcagtagagctgggaattttatcccgggtcagaagaacttcaaagcccatattttgtcttattactacacatcttaagagattagagggccgggygcagtggctcacacctgtaatcccagcgctttgggagggcaaggcaggtggatcatttgagcctaggaatttgagaccagcctgggcaacatagcaagac

SEQ ID NO: 147144 - DNA, 201 bp, Homo sapiens
tccagagaagtcattaagaccatcacagttcatctgactgtctgtgatcctagggtgctttgagctggagctgaactgcaaagtaggagctgtgaaacacrcaggttcagaaattctccttttcagtctattcggggttgtttaaatatcgttctgtgtgcatcttctcaggaaatgttttcttattctacattgactagc

SEQ ID NO: 147145 - DNA, 201 bp, Homo sapiens
gtctgaagccaccggagtagatcccatcatctgtggataaaatagagagtaacaaaagggggccaagaaggggagttggggagcaccagcatgttaagggwggcagagagagggaagctccatggaggaggtaggggaaggatgttcagagggagtacatcagcgaagggacagatgtcgccgacgctaaaggcttcagaa

SEQ ID NO: 147146 - DNA, 201 bp, Homo sapiens
gcggaaaacgtccaaaaaaaaaaaacctgaaattaatgtcctaagaaagatgaaacagctatttcacccatcaaatatgaacaagatcctacatttttttwaaaaaaggcagctttgaaaaacaaggaagagctttaggaaattaaaagcatgagtgttgacatttttaaaaatgggtcaaaaattagaagatgaagtggg

SEQ ID NO: 147147 - DNA, 201 bp, Homo sapiens
caatcgaggcagcctgccgcaaagtttccaaggggccgtatggggagacagcatcttcattgtctagctaattgaaaaaaggaaggtgctcgaatggaacycagctgatatgaatagtctcaagtgaggactcggtctttcaggcatggacagggccacccagcagctgacgacgttaataaaattgtcaggcagctatta

SEQ ID NO: 147148 - DNA, 201 bp, Homo sapiens
agaacatttttcctcaagaagctttctgtatcacacgtagcctccaaaaatttctcaaaggtggttagaacaggtgttttaggtggggaggaaataaaacrttaaaagaaattctgaagcccaagatttctttgtacaaggaaacaaaagttgggagagattattagagttagcaagtggtgggaatgaaataagggatag

SEQ ID NO: 147149 - DNA, 201 bp, Homo sapiens
tggatcagatgtgaaggcccagagacatgtacgccctaagagattgactacaaggctaacttgcctaagttgctaagatgcagcagagactgaggccaacwtcaacgccagctctggggacagaggagcagttgttatctagacaacactcttgtattgatatgatattgacatgatgcttgttgacacaagataaatata

SEQ ID NO: 147150 - DNA, 201 bp, Homo sapiens
ttgttgacacaagataaatatatttgaaaggaagcagtgagggtgagaacaaaaaccctgtaagaaggtggacaaagagtggctcttctctttgggctctygtctcagcaaacaagggtaatccctcctccctgtcgtgagaaaccaatcccagtccattcccagaaaacgagtaaattaatgtacagtgggaaataccag

SEQ ID NO: 147151 - DNA, 201 bp, Homo sapiens
caagctttcatggaggtggagacacctatgtttctgggtggagaaaggaagtctcaggaaaaccctggtgtatacatttcgtttctgtcttccaaaatatrtaatagaaaatgtcacatagaaatatactgcagtgcctcagggatgctgcatcaagatcacggtttcctgcgtaaaacaaaagccgctggtcatcaatcc

SEQ ID NO: 147152 - DNA, 201 bp, Homo sapiens
ttgaactcctaacctcatgatccacccgtttccgcctcccaaagtgctgggattacaggcgtgagctgccgcgcccagccttgtgtctcttcttacaaggkcattaatcacattaatgaagtccctaccttcatgaccctaattacttcccaaaggccccaccttctaatactgtctcattaggaattaggattttaaagt

SEQ ID NO: 147153 - DNA, 201 bp, Homo sapiens
catggagctggatgtgcaggtgagaagaacggagcatccacctggtatggtcgacgggggagaggcctagatcctagagcttaagggatccttggagacawgaaagcagagagctaagagggaacaagatatgcttgaggaccagtggtagtactgatccttgggctcttgatcccaaaccattgctccttcctcaaccct

SEQ ID NO: 147154 - DNA, 201 bp, Homo sapiens
gcacaccaccatgcccagctaatttatgtattttttttaatagagacggggtttcactgtgttggccaggctggtctcatactcctgacctcaagtgatcygcccacctcagcctcccaaagtgctgggattacaggcgtgagccaccgtgcccagccataattataatttttttaaagaaaattaatatagtgccctggc

SEQ ID NO: 147155 - DNA, 201 bp, Homo sapiens
atcctagagcttaagggatccttggagacaagaaagcagagagctaagagggaacaagatatgcttgaggaccagtggtagtactgatccttgggctcttratcccaaaccattgctccttcctcaacccttgggtgagagttgggttcttggccaggacccaggtaaatgtgagtttcctgtgacaaaccatttcatctt

SEQ ID NO: 147156 - DNA, 201 bp, Homo sapiens
tcgtgatgcgcccgcctcggcctcccaaagtgctgggattgcatgcatgagccaccgcgcccagcccaatttgattctttattttggtagtagctaatctrtgtgatgaagccctgactcttcattgttctcgtgtcactgatgtaaaacaacaacacatttaaatgtgtgtttaaaatgtacaattcatataatgtacaa

SEQ ID NO: 147157 - DNA, 201 bp, Homo sapiens
ctgggattgcatgcatgagccaccgcgcccagcccaatttgattctttattttggtagtagctaatctatgtgatgaagccctgactcttcattgttctcrtgtcactgatgtaaaacaacaacacatttaaatgtgtgtttaaaatgtacaattcatataatgtacaatttagtggtttttagtattttcacaaggttgt

SEQ ID NO: 147158 - DNA, 201 bp, Homo sapiens
attttccccatgcagataatttacattgtattagagaactacctcctccccaagctctctttcaggcttaaattcagtgatcttgagtctgtgtgtgtgtrtatatatatatgtatatacacacacacacattgattttcttttaccatgtgctggttctttcagtctcttgctgctttctgttatccacggagctggcat

SEQ ID NO: 147159 - DNA, 201 bp, Homo sapiens
tggccgtcagtgtgaaattatagatttggaaaaacaaatcctgtgagaagagcaatttaccgtaccctgctctcttcaagtgacgtgggaaatgaaaaacrtccaaactaagacaaatttattggataccaaaaccaccaggctattgattcttaaagccagacaacaaggttatgaattgggtgataaaaatggaaagca

SEQ ID NO: 147160 - DNA, 201 bp, Homo sapiens
tgagtgagatatatctgaacaatttgattttgtattgaggccggggtgcctgagacttactctgtaactttgaaggctgcaagaacattagctaaaagttyttagctgcagcaaggaaagcaagaaattgttctaagccctaaatagttttgcactgctgcagaggagggatttatgtctcctgatgggttttggaatgga

SEQ ID NO: 147161 - DNA, 201 bp, Homo sapiens
tattgaggccggggtgcctgagacttactctgtaactttgaaggctgcaagaacattagctaaaagttcttagctgcagcaaggaaagcaagaaattgttytaagccctaaatagttttgcactgctgcagaggagggatttatgtctcctgatgggttttggaatggataagcagatgttgtgtgttagatgttagagat

SEQ ID NO: 147162 - DNA, 201 bp, Homo sapiens
aaagatcgaaatactccaaggcagggcttcataggtagtcccatggatgtgattaagggctgatttaacattcagaagaaaaacataaaaatcagccttcytgaagctgtagtctgaccctgggaagaatgtatatcctcaggaaagataaatttgcattaaagatctctttggcaatgcattgttgaaagaggttaatat

SEQ ID NO: 147163 - DNA, 201 bp, Homo sapiens
ggcagggcttcataggtagtcccatggatgtgattaagggctgatttaacattcagaagaaaaacataaaaatcagccttcctgaagctgtagtctgaccytgggaagaatgtatatcctcaggaaagataaatttgcattaaagatctctttggcaatgcattgttgaaagaggttaatattgtaagtggaaaattttga

SEQ ID NO: 147164 - DNA, 201 bp, Homo sapiens
tttacttcagcttaaacctgttttattggtcttccggaaatgcttgcagaaataagagcatgttaacgtgggtggacacaatttggagtgcttgattaacycagcaattaataaaaatggagaggtgacaattggtgttaccaagctacagttgaaagcagtgcacttggcctctctccatgcaagcagattggtggagaa

SEQ ID NO: 147165 - DNA, 201 bp, Homo sapiens
ggtctggtctgtctgtggaccacacttgatgtctgcagcaatatgtgggttgcagtaacccaggcatgctatgtgggaccactctgtattaagatgtgtayccaagctggcctggccaggcagaagctttttctaaggggcctcaggcagtgctcgcaagtgtatttataactggtagctggcataaaagactattttaga

SEQ ID NO: 147166 - DNA, 201 bp, Homo sapiens
taacattcagaagaaaaacataaaaatcagccttcctgaagctgtagtctgaccctgggaagaatgtatatcctcaggaaagataaatttgcattaaagayctctttggcaatgcattgttgaaagaggttaatattgtaagtggaaaattttgattacttctcgattctttcctcccatttgcttctgtacctgtgtcac

SEQ ID NO: 147167 - DNA, 201 bp, Homo sapiens
tttgcaggtcatcttttgtgcatgtgcttggttgaaacatccttggaacctttcagtgagggaaaggtcctctctgaagaagtgcttgccttaaaccaggktttctcagtctcagccttattgtcatttggggcataatccttctttgttgtgggactgtcctgtgccttgtaagatgtttattagcattcctgaccttga

SEQ ID NO: 147168 - DNA, 201 bp, Homo sapiens
gtaagactctgccttttaaccacacttctcttctttaaaaagggtcaagttattacccacatttgataaacccaattataattcttatttctttacctttmatttctcaaaaatcctttccaggtgatgaggtttagaccagccttcccacacagatgctcacctttcctctgagtcctccagctgctcatttggagagct

SEQ ID NO: 147169 - DNA, 201 bp, Homo sapiens
agcgagggctgtcactttctggcgcatgtggattatttagccgatgagccttagtttctgcatgggcaaaacgaggatgataatggttaatcagagcattrggatgaagtgagttatcatttaaaaactgcctaactcagcatttaaataagttccagtaattattcgtattcttcccaaggttttacctgcccttttatt

SEQ ID NO: 147170 - DNA, 201 bp, Homo sapiens
aaagtgtttgagttgctgtatgctcaataatgcactgatttcacaaggtttagcccatttagctcacagaggaatctcagccaaagtttagacttgggcascttttcttattaccttgaaattagtctcgattacccttaaattactgaagattgaccaccatgcaaagtggtttctcctttcattaatcttactaactgg

SEQ ID NO: 147171 - DNA, 201 bp, Homo sapiens
ctcagttgtaccaaacagggagacaggtttcaaaagcttgggttgaagcttgtaattggccagtcggtgacaatgcaaccctaatcaacctgtgatttcaygtcccctaccgattctgcatcggcctttgatttgtggtcccaggcagtgcaattcattgagtcatatttgttgcattgataggagaagaccaggcactta

SEQ ID NO: 147172 - DNA, 201 bp, Homo sapiens
tcaaaagcttgggttgaagcttgtaattggccagtcggtgacaatgcaaccctaatcaacctgtgatttcacgtcccctaccgattctgcatcggcctttsatttgtggtcccaggcagtgcaattcattgagtcatatttgttgcattgataggagaagaccaggcacttaggcgtttaaccctgaggtgattaagagga

SEQ ID NO: 147173 - DNA, 201 bp, Homo sapiens
tagttctaatgttctaagataaacagggcagtaagaagcagttgccagcactgtgacatcggaaacatcacctccatcctcagcacctcggttcccacatsgatgcaaacttagcagtaaggtctaaccagcccccctttctaagaatgttgtgagattagaggaggctcaggaagctgagagtgaaattcataagctttg

SEQ ID NO: 147174 - DNA, 201 bp, Homo sapiens
ccactgacttagaggctccccatggggaaaagcagagttggtgtgggaaagtctagcagttaaaagaggcagcaggtggaaaggcagagaagtgtgaggcygcatagcagctttgcccatgtggtgttcctggattagaaggtgtgatttggaccatgccagggtatgaagctggaaaggtcaggtcgacagggatccgat

SEQ ID NO: 147175 - DNA, 201 bp, Homo sapiens
aatcctcccactgttatatgcacctaggatcagtttgggatcctaagcaattctgaagggtttgagccattttgtttccccatatatgtgtgtgtttgtgwgtatgtgtgtgtatatatttttttcttagatttttattccttcttcatgtgcagtgtttctagacaatccacacatcctgaacacccatgaaaaattatt

SEQ ID NO: 147176 - DNA, 201 bp, Homo sapiens
ctctggacctcttcttccatattgagggtggaagctatgaagatagtccctagtgagtgtgtttaggctttcagttgtgactagggtacagtcccatgcasatggaggtggtggcctctcccatctccttgccttggcatgtgctctttagtcgataccattgcctttctcagtctcctctgcccagaatgctggaactgt

SEQ ID NO: 147177 - DNA, 201 bp, Homo sapiens
ctccatctcttgaccttgtgatctgcccaccttggcctccaaaagtgctgggattacaagtgtgagccactgcgcctggctgtgttgttgttattattggrtgcctgcactaaacttggtgctgagaatatggagataacagatctggagattcacaggatagcggaggagacagataggctaagaaatgatcgcggcacg

SEQ ID NO: 147178 - DNA, 201 bp, Homo sapiens
tttgaggcaacatgacagactgggtgtaggtgctgtatctatcaacatgatcctttagaatgaaccccacacttgggaccaaatcacgagctgcatttagkaggggctgggtgatgtgggcatgttaacacagtattttagctaggatgacagaggcaacagatttctgttactgagtgtcagttagtgtgcattcgggct

SEQ ID NO: 147179 - DNA, 201 bp, Homo sapiens
acctggtggtattgtcacgtgcagtgattttcagggcaccttaggtaccctccctgtatatgttagttacttattgctacatagccaggtaccctcaaaasttaacaacttaaaatgtcaagcatttattatctcatacagtttctgaaaattaggaatctgggagcagcttggttggggattatgactctcaacctttaa

SEQ ID NO: 147180 - DNA, 201 bp, Homo sapiens
taatacaaggaggggcattggctttttgttgttgttacaggaatatctattcaggacccatgattcaccaggttctttgctggatactgtggatggggatraaaagatggtttctgtcgtctgtggtctcacagtagggacaaggagccagcagtttaaatacgtatcacaatgccttgctacagatggcggatgagcttt

SEQ ID NO: 147181 - DNA, 201 bp, Homo sapiens
ggaggtcagaagtccaaaatcagtctcactggactaaagtcagggtgtccatagggctgtttcattctgcagtggtttcaggatctgagatgtcatggatyaggaagaatttgagattgtacctgcctgagggcagaaaagggccaattcacagggatttatgtgtctctgtcttttgacgaaaagaacttctaagaaggt

SEQ ID NO: 147182 - DNA, 201 bp, Homo sapiens
cggtcacagtgtcaggtacacccactcagagtgggtttatgatacagttaggaaggagcccaggccacagcactggaaaagacgaaattgtagtgttgatsaaggccaggagcctctttgctcagcgactgccgtcaatcctcttccctgagaagatcgcctgtattgttcaagatgttcggatataacctcccccaggaa

SEQ ID NO: 147183 - DNA, 201 bp, Homo sapiens
gtgcattctccagtgtcactctgtctcagatgtgaaagcctgtcaataaatgcctacaccaccagcttttcctgcccccaagccagcaatgatggctgatyctttccctcaagggaccaggacaagacattctttagcagtcaccagcttgctgcccccaagccaacaatgatgggtgatcctttccctcaagggaccagg

SEQ ID NO: 147184 - DNA, 201 bp, Homo sapiens
agccagcaatgatggctgatcctttccctcaagggaccaggacaagacattctttagcagtcaccagcttgctgcccccaagccaacaatgatgggtgatyctttccctcaagggaccaggacaagacattctttagcagtcaccagcttgctgcccccaagccaacaatgatgggtgattctttccctcaagggaccaag

SEQ ID NO: 147185 - DNA, 201 bp, Homo sapiens
cccaggaaaaatcaccaacagcctctttaaatgcacgttatcatacttgtagtttaaaatggacagttttgtgataccttcctctctatctaagttgtaartttcaggaagagagtatggtctcttgtgtgtatctctgcattcacagcccccagatcagtgtctggcacaaaatcagtgctcatcttactatctgttgaa

SEQ ID NO: 147186 - DNA, 201 bp, Homo sapiens
tggaatgagctgcccaggaggtggtgaaatacctggcatgaaagatgcagaaacacaagtccagtatcgtgggagggagctgagcgagacaggcagttacrcaaggtgacccatctgaccctgcctgacccagagatcctgaggctctgggaaagtctgagtatttatcagaacacaaaggcaatgcctccatgaagctcc

SEQ ID NO: 147187 - DNA, 201 bp, Homo sapiens
acattgcattaggtattaataagcactctagggatgatttaaagtatatgggaggatatacctatgttatatgcaaatactacactattttacatcagggracttgtgcacctgaggattttggtatccttgagggtgctggaaccaatcctccacagatagagagggtatgtatacacacacatgtttatccatgtgctt

SEQ ID NO: 147188 - DNA, 201 bp, Homo sapiens
tgatatattgagagagccctggagggggtcagctgtctcaggatctcaaatcacctcagccagaggagctggatgatctggggcacacttgctcttcatgstaggccttcgtttcttccgacgtgaaatgaagttgtcgagtgcacttagcagggtgccgacattctacctacaagcttctgattctaacgtctgatgtaa

SEQ ID NO: 147189 - DNA, 201 bp, Homo sapiens
gagagagccctggagggggtcagctgtctcaggatctcaaatcacctcagccagaggagctggatgatctggggcacacttgctcttcatgctaggccttmgtttcttccgacgtgaaatgaagttgtcgagtgcacttagcagggtgccgacattctacctacaagcttctgattctaacgtctgatgtaagtgaactga

SEQ ID NO: 147190 - DNA, 201 bp, Homo sapiens
tcacctcagccagaggagctggatgatctggggcacacttgctcttcatgctaggccttcgtttcttccgacgtgaaatgaagttgtcgagtgcacttagyagggtgccgacattctacctacaagcttctgattctaacgtctgatgtaagtgaactgaaaatgaccagaatcttccccgattaaggggaattatgacac

SEQ ID NO: 147191 - DNA, 201 bp, Homo sapiens
ccttgctttatttctttcccagtccacctttctttctctaacatctcagtcagcattcccagctctacgccgttcaggccctaaacttgggagtaatcctygtctcccttcattcactccgtgtctcggttgccacctcctgttgagtctaagctcggccttgtagctgcgtcagttgtttcccatctttcaccactgctg

SEQ ID NO: 147192 - DNA, 201 bp, Homo sapiens
acacagatgctcacctttcctctgagtcctccagctgctcatttggagagctggaggtgacttcgcctgggggatttagtgcagggacttctgggggcacyagggcccgctacaggctttgagcaagttgcttgttgagctggacagtaagccatgcagcgtgttgtgtgtgcagagcttctttttcggccccggggggct

SEQ ID NO: 147193 - DNA, 201 bp, Homo sapiens
ttgtggaagatatagaaacacaagaaggaaatgtactatttaaactataacaataatggaaactgtagcaatcgtttctatttatcgcatgttaaaccaarattggctgcatctggcttgcacttgtgttgggtttggcccgcctactgcttttaccatttttgaatttgttgctaatggttaaatattgggagattgcac

SEQ ID NO: 147194 - DNA, 201 bp, Homo sapiens
gaagagaggggaggatcccttctgacctacacagcatccaggtcttcgtgcatgtcagggaggtttgacctgtacatcttttgtgggaagccagagtcatytgttgacattgaggcagagaacttgctctgagtccatcgatgcctgaaactccttttgtgaccatggcaagttatttatctcctttctagaatctaaaat

SEQ ID NO: 147195 - DNA, 201 bp, Homo sapiens
gccagcctcatcagctagcggggcccctaatgtcagatggagacagcccccaagccagcctccaccttggctgcctttgtcaagtgggcctcgggatttckcttaccattccttttttttttttttcctcttctctggtctctttgccttctcactctgtctgccctcaccctacaaggaaaggtccttctccctttcttt

SEQ ID NO: 147196 - DNA, 201 bp, Homo sapiens
aattgactttgtctctagctcctgcattctgaaatatgtctggtactggaggaccgcgttccatctttggccataactggactaagattgtacctataacmcatgcctagctaactcttgtgctcccatgtgactaactgggtctcaagaatttggacagacaaacagggtgtaaactgttggtctggaccaggagaggct

SEQ ID NO: 147197 - DNA, 201 bp, Homo sapiens
ttacatagtatttacattgcattaggtattaataagcactctagggatgatttaaagtatatgggaggatatacctatgttatatgcaaatactacactawtttacatcagggaacttgtgcacctgaggattttggtatccttgagggtgctggaaccaatcctccacagatagagagggtatgtatacacacacatgtt

SEQ ID NO: 147198 - DNA, 201 bp, Homo sapiens
tttacatagtatttacattgcattaggtattaataagcactctagggatgatttaaagtatatgggaggatatacctatgttatatgcaaatactacactwttttacatcagggaacttgtgcacctgaggattttggtatccttgagggtgctggaaccaatcctccacagatagagagggtatgtatacacacacatgt

SEQ ID NO: 147199 - DNA, 201 bp, Homo sapiens
acttgcgtttaatagcagagtgattatctctcttcttagcactttgaacaggaatgaaatataactaaatacaccacgcatacatagtcacctatctatawctgtgggttctgtattcttgggttcaacccaccaagacttgacagtattcaggggaaaagaatagatgggttacacctgaactgaacatttatggatatt

SEQ ID NO: 147200 - DNA, 201 bp, Homo sapiens
ccattggaatatcttatttttttttgatccccacaagaaccaacttttgtgtctgttaagaatgcatgcaatagagtaaatttatggtaacagaaacaaartctttttttccacttgcgtttaatagcagagtgattatctctcttcttagcactttgaacaggaatgaaatataactaaatacaccacgcatacatagtc

SEQ ID NO: 147201 - DNA, 201 bp, Homo sapiens
aaacctctaacatgagattttaataccaaaccattggaatatcttatttttttttgatccccacaagaaccaacttttgtgtctgttaagaatgcatgcartagagtaaatttatggtaacagaaacaaagtctttttttccacttgcgtttaatagcagagtgattatctctcttcttagcactttgaacaggaatgaaa

SEQ ID NO: 147202 - DNA, 201 bp, Homo sapiens
atatccagatgaacttgacaacagagaagtgtgttttctgattcagctgccttctgattaaattcagaaaggcaagaaggaactgttggattcagcagagrctaagatcggggagcaggtttttgagatgtgtatgcgtgtgcttttgcatacttctctgttttgtggctattttagtgttgtaagatcctggagggtggt

SEQ ID NO: 147203 - DNA, 201 bp, Homo sapiens
agcgagagaaattgctccccaaatatccagatgaacttgacaacagagaagtgtgttttctgattcagctgccttctgattaaattcagaaaggcaagaargaactgttggattcagcagaggctaagatcggggagcaggtttttgagatgtgtatgcgtgtgcttttgcatacttctctgttttgtggctattttagtg

SEQ ID NO: 147204 - DNA, 201 bp, Homo sapiens
ttggtatgcattggttattatgagttgattgattgacatagggatggaggttagaattctataccttagcatttctctcccttttcctcaacaacgcagcycctcaagaatatccaagaaatggcagggtgcggtagctcatgcctataatccttgcacttttggaggcagaggcacaaggattgtttgagcccagaagtt

SEQ ID NO: 147205 - DNA, 201 bp, Homo sapiens
cttagcactcatgatgttctgggccagatagttttttgttgcgggggctgtcctgtctgaggatgttgagtggcattccttgcctctgccccctggatccrgtagcaccccagtgcccaagtcatgacaaccaaaagtgtctccaagtattgccaagggtcctttgggggcaaaattgcccttcatattagaaactgacac

SEQ ID NO: 147206 - DNA, 201 bp, Homo sapiens
caaactcatctttttttttttcctctttcaaggtctttcctacttccagataatgcaatgttttccattaggtcaaaacttagacaaaatgtgtactctcmtgtaccaggacaaagacttttcatccacatccatttttttctgagtttcagctggtacttctgagcaaggtgcctcaaccttagcactcatgatgttctg

SEQ ID NO: 147207 - DNA, 201 bp, Homo sapiens
caggcaaattacagagtctttctgtgcctctacttccccatctgtaaaatggagttaataatcatgctgccccataggcctgttgtgcgtattaaataaamtaatacaaattatgtcttgctgatcatggttattctatagtaataatgaatcatttttaatactaacaatgaatgccaccagatattaataataaattaa

SEQ ID NO: 147208 - DNA, 201 bp, Homo sapiens
taagcacatcgtggagatgcatataacttttgacttcctgaacatttgactcttgataacctactgttgaccagaagctttaacagtaacagttgattcasatgtagtttgtatgtatgttatatattatatactgtactcttacagtgaagtaaactagagaggagaaattgttattaagaacatcaaaaggaaaatata

SEQ ID NO: 147209 - DNA, 201 bp, Homo sapiens
acgctaactcatttgcttctcttgacagccttcctcaggaagcagagataaagatctttgcaactgtaggaaccaaggcttagggaaggggctagggccaygtccatcctgtgttcctgttgttgatcttcattgtccttgatagcgcctgttgtttgggaatgggctttgcaggcccttaaataagggcacccagctctt

SEQ ID NO: 147210 - DNA, 201 bp, Homo sapiens
gagggggctttgaacgttttgtttcaacctaaatttagcaaaaggacaattgtgaggcttgagaggcatgtctgcatgctcccagaccttctctttgggtycgtggtcctcccctaccctgccccttttgattaccagtgaatgcagcagtggtgacaggtaaatgaccttgttggttggtcctctagttcctgatgaacc

SEQ ID NO: 147211 - DNA, 201 bp, Homo sapiens
aaaaaagaagtttcttatctgtatatgtttacaaaaacagccatccctttttgttaaggagttagttgtagatttgtttgtccccaccacatggattatgsctttgttttctcagcagcagtgcctggtcatagcccggctccagaaatgctgcttaactgatcaaacagtgggcagtggtatgcccgtctccagatgctt

SEQ ID NO: 147212 - DNA, 201 bp, Homo sapiens
ctggagcatacagatgagggcacgaaggtgacccttatagaactgtggctgagagccagggattcccacttccacctccacccccatagcatcatcagtcyagtcaagaaagacccgtggtctttgtattatgggacttagtccttcattgtccctgtggctctgcttttcacccctgtctcatgctctcctccttcaccc

SEQ ID NO: 147213 - DNA, 201 bp, Homo sapiens
aacagcaaaaatgcattcctttgctgacacttctctacctgtggttgtcttccactctgcgtcatgtgccgtatccgcctgtcaccccggcacactgtcasccacgcagcctctcgttccctgtgtttccttgcacactcgtgctctgctggcctctgtcactctcactgggcgtcctgcctgccttcccaccccctgcac

SEQ ID NO: 147214 - DNA, 201 bp, Homo sapiens
tctttcaagctgtgcagccttcttcagctgacagttcagcatcgttccatttctgaagcagggaattggtttggtgggcactagctccaagtttgcctttrtggtatttctagcctccttcattctctttcctgttttggctgcaaccaaaggctgggctcagtgatgaatcgcaattgggtttggtggcccagccgggcc

SEQ ID NO: 147215 - DNA, 201 bp, Homo sapiens
agttcagcatcgttccatttctgaagcagggaattggtttggtgggcactagctccaagtttgcctttgtggtatttctagcctccttcattctctttccygttttggctgcaaccaaaggctgggctcagtgatgaatcgcaattgggtttggtggcccagccgggcccttctcaggttaagggtggtatagggagttgt

SEQ ID NO: 147216 - DNA, 201 bp, Homo sapiens
gcccagccgggcccttctcaggttaagggtggtatagggagttgtgtgaatgaatgaggtcccgcagagagaccatcacacatgggtagagggggaaaaarggggggctcagaatgcctgtgtggatggcagtctcctgaaatacaggagtttttctctctaaggtacaccacaaattttatcttccaacatttcttagtc

SEQ ID NO: 147217 - DNA, 201 bp, Homo sapiens
ggttgaaaagttttataattttgtcataataaatgttagttctcttcccatcccccatgctgtgtcttgttcagagtgagagatctggtgtctgttgcttkcagactactgtagttttttttctgtgctctcctgggtggtagcaacacccgcctataactacaagtgcttgaaatgtggctagtaccactgaggaactga

SEQ ID NO: 147218 - DNA, 201 bp, Homo sapiens
gtttttctgccagctcccatgtcccagttttgtttgaaaaataagagttgctgcacacagaggctacttcgaggtttctgataattcattctgatggacarcagtgggacagtgtcgggtaggggacacagctaaagcctcaaattgaaataagaagaggagacaagggggtcaggaataaggttgcaactggggtagcca

SEQ ID NO: 147219 - DNA, 201 bp, Homo sapiens
agccaagagagatgtccctgaatcagtcactggacaatcttgcttatctaaactttatattctttcatgtataagtctcattcaattctcttatatgtagkggttaaagagttgtcacttttctttctttaaggattctgaggacttcaaactcatctttttttttttcctctttcaaggtctttcctacttccagataat

SEQ ID NO: 147220 - DNA, 201 bp, Homo sapiens
tacaaatatattcaaagaaagaagaaaataagattttatataggagtctttaaaaatttttgttacttattaatgggaagtatctatgagggccaaccctycttaaattgtctattgtaagtcaacatcagaataccctttttggatattttggcaatatcaagattcttaaaaattatatacaggttctgtgaggcagaa

SEQ ID NO: 147221 - DNA, 201 bp, Homo sapiens
tgggttgaaaagttttataattttgtcataataaatgttagttctcttcccatcccccatgctgtgtcttgttcagagtgagagatctggtgtctgttgcwttcagactactgtagttttttttctgtgctctcctgggtggtagcaacacccgcctataactacaagtgcttgaaatgtggctagtaccactgaggaact

SEQ ID NO: 147222 - DNA, 201 bp, Homo sapiens
tagcctcaagactgagacaatattacttcccctgctttttgttaacaaaaatacatcatgattctagcccttattcaaggctagagaaataaactgtgcckctttagtaagcaccactgcaaaggacaaggatatctggggtggcggggagtgggggagagagaaggaattggagcaattaatgccatcatcttccatagc

SEQ ID NO: 147223 - DNA, 201 bp, Homo sapiens
ttactgtgcctcttaatgaggtttgcatgaaggcttccagtgaattaatgaagagcaatgattttgccattcacgttgaacagctggacaacaatgataakggtgcagactgtgaggtctctggcttagacgaggtgatgaggaccggaggaagttctagcttctgcccttcttcagttctcctttggtctcactactgtc

SEQ ID NO: 147224 - DNA, 201 bp, Homo sapiens
cgtgtagccagggctgagaatatggagctagtcacataaacagcaatacacgcctcccgggttcacaccattcttctgcctcagcctcccgagtagctggractgcaggcaccagccaccatgcccagctaattttttgtatttttagtagagacagagtttcatcgtgttggcctggatagtctcgatctcctgacctcg

SEQ ID NO: 147225 - DNA, 201 bp, Homo sapiens
acaaaacacttgacatgcattagctcatttgagaaaaatgcagggaattaattaactacagaaaagtataaagaagccaataaaattcatctgtgaatccmccactcagaaaatctttgttaacattggatatagaacctggatattgctaggttcagatggttcagaaatgaaggggatacagctcctgctgttaggagc

SEQ ID NO: 147226 - DNA, 201 bp, Homo sapiens
gcctttaggtgacacttaggtcatgaaggcagagccctcatgaatgagattaatgcttttatataaagagacctcagagagctccctcacctcttcttctwcgtgagggcacagcaagaagactgctgtctgtgaagcagcaagggtgccctcaccagacaccgaatctgctgcttcctgatcttaagcttctcagcctcc

SEQ ID NO: 147227 - DNA, 201 bp, Homo sapiens
actaaggaccccaaaaattacccacccaaagcaggctctctttccctgcttgaggagggcattcctgggaattgggctgctctttttccagcagccccctrgcctcagaagccttatcttttcttaggaatcatctctgccgtgacaccagatcagcagaccagccactacactcccttgcttaaaccaccagtggcttaa

SEQ ID NO: 147228 - DNA, 201 bp, Homo sapiens
cttctagggacacctcaaggagtgtttacttatggcagaaggtgaagcaggaacaggtacatcacatgcaagaggagagtgggagcaagagaaagtgtttwaaaaaagagaaactctttttttcttaaactcttaaaaactcttaaaaaaaacttcttaaaaaaagagtttctctttttttaaacaaccagatcttgagaa

SEQ ID NO: 147229 - DNA, 201 bp, Homo sapiens
tatcactatctgcattttggtcacaaccattaaaccagtctataagaagttccagactttcccatcttcttctgagccctccaaactcttagcccctgtaygttacccagctccaaagttgcctccatattttcatatatgtttatagtagtatctcactcctggtaccaatttttctgtgttaggctgttcttgccttgc

SEQ ID NO: 147230 - DNA, 201 bp, Homo sapiens
ctgtttgacccctctaggcactggttgtcatctctctgcacttgccaggtgttcggccctcccttgtctataaagcagctccctcccttcctctcctttcyaccatatctccctttctcaagtggcatctcttacttgtgcagtagataagaaggcagctctggaatgaggctgcctcatgtgaaatcccagctggactgc

SEQ ID NO: 147231 - DNA, 201 bp, Homo sapiens
ttgaagactggcagtgagagtgaaagaattgtaagttaaagctttttctttgccttattattatgggggaatcccagggcacttgtgtggtggaataggcrggatgggggtggtgcattttatccaaggagggtttgtccagacatgactgattccccagccctgtgtctgctcccccatccctcagcccctcatcccaga

SEQ ID NO: 147232 - DNA, 201 bp, Homo sapiens
agcatttggtatgcattggttattatgagttgattgattgacatagggatggaggttagaattctataccttagcatttctctcccttttcctcaacaacscagcccctcaagaatatccaagaaatggcagggtgcggtagctcatgcctataatccttgcacttttggaggcagaggcacaaggattgtttgagcccag

SEQ ID NO: 147233 - DNA, 201 bp, Homo sapiens
ccactggttgggctacttgctctaggacaagacagtttgatttgcaagagaacaggctcccccagtgctatggaatgacagtagctaattggtcacagccrcttgtctctcatagtttgggcatctctccctggaacttgtaaattctttatgtagtgcagtaagcatttggtatgcattggttattatgagttgattgat

SEQ ID NO: 147234 - DNA, 201 bp, Homo sapiens
gccaaaataaaaataaggacatccagtcagggatgtaattcttcatcaaggagccaagatgtgaggggcagagcgccatttcagagccactggttgggctrcttgctctaggacaagacagtttgatttgcaagagaacaggctcccccagtgctatggaatgacagtagctaattggtcacagccgcttgtctctcatag

SEQ ID NO: 147235 - DNA, 201 bp, Homo sapiens
tcatggtgtccagaaataacaaggagataagcagagagttcaggctgtgtactaaggagcttggaatttaaactatgggtcacagtactaaaatatttctkatctgacctattccaatgcaaacatatttttactgtggtacatgaatacactataaaacagaaaagtttcattttattatatgtttgagtaattttaagt

SEQ ID NO: 147236 - DNA, 201 bp, Homo sapiens
catgagccaccacgcctggcccttcaatctacttttcaaacagaccagacaggctcctacctttggccctctgctctgatgttcctgtacctggaatgctsctcctccagatcattccctgtcttgctaccataatcccagcccttcgagtctttgcccaaacctgagcttctcagcaaggctttccctgactgtcccatt

SEQ ID NO: 147237 - DNA, 201 bp, Homo sapiens
tttgttaaaagtcctgggcatttctttttaatctgtacggggcctttagaagttctcctgggccgggcttagtggctcgtgcccataatcccagcacttcrggaggctaaggcgggtggatcacctgaggtcaggagttgaagaccagcctggcaaacatggcgaaaccccatctctactaaaaatataaaaaattagcca

SEQ ID NO: 147238 - DNA, 201 bp, Homo sapiens
tgtagaaaagctgaacatgaagaacattgaagtattacttttgaaaagacatttgtagaaattttatgcttataatcagttgcctcgaaggagtttttaawgctctttgaagtttcttcaggtcttgtctttctttgttaccttgccgccctgcctgtctcctctgatggaattggtggagtcagaagagcttagcaaaaa

SEQ ID NO: 147239 - DNA, 201 bp, Homo sapiens
aatcacttgaaaccgggaggcagaggttgcagtatgccaagatcacaccattgcactccagcctgggcaacaagagcaagactgcgtctcaaaaaaaaggkgtaccatcaatgaagcagagagttctcaccatgcatctgatctgccggagccttgatcttggactgcccagcctctagaactgcaagcaataaatttctg

SEQ ID NO: 147240 - DNA, 201 bp, Homo sapiens
tgatgttcctattttagagatttgggagctgatgcttagggaggcatagtttacctggagtctcacatttcttaagtcatgaaaccgagatttgaacccaracagtctaactttgaatccagtcctctttactctgcaccctcctttcccttgaagaggagtaagagaaatcattgtcatgtgggtggagttaagagtgtc

SEQ ID NO: 147241 - DNA, 201 bp, Homo sapiens
agagattgtagagctgtagctaggaaatcacgtttattctcttgcagcttgcaatggctatagtgctagtggcgctctgtagccaataacaacgtgaattrtcatggttattttaaatacgctgatatcatccgtggaagggaaggcaccagagctcttgctgctcccatagctggcccaaggacttgatttggaggactc

SEQ ID NO: 147242 - DNA, 201 bp, Homo sapiens
acaatgacatcatttaggacagctgttgaaattgagtatggcacagctctctaatcttcatagaacgtgtggacgtgtccttttgtttcataaagaaagamacggaagcttagagggatgcaggcttttcccagagttgagatcagagtgcccgtgtcttggcttccatccgctgctcttttcaagttcccctatcgtgtc

SEQ ID NO: 147243 - DNA, 201 bp, Homo sapiens
ttggtttcctcatctataaaatgaagacgttgacttagtgatgcccagcccctgggcctctggttctgggatatggctctttcattcatcacacagcagayctaccaaagccaatgtcatcagagttagaaagacctcagctgaaaccccagctctgccactcaccagctgtatgacctctccgagcctcagtttccttgt

SEQ ID NO: 147244 - DNA, 201 bp, Homo sapiens
cttgtttgtaaaaacaagcataaacataccaatttcatggggctgttacaaggactcactgaaataacataacaatcaggatcccatcaagaagacatctrcccttggaagtcagcatatttgaatgaagggactgcatatgggggtgaatgggcaggattgaaggcatcagcaagggatgctggggcacccagggactag

SEQ ID NO: 147245 - DNA, 201 bp, Homo sapiens
ctgtggaaggtttccccgggaatgtggctgttgactttattcctgcaggaggagcaggagctggtcacaggcagaactgagggagaaatggctggagtgcmgggtttaaggaaggggtgtgaagatatgagctttgagggacagatagggtgagatcgttgaaggtcttttttgctccatgcgagaggctggggcttatat

SEQ ID NO: 147246 - DNA, 201 bp, Homo sapiens
gcatcaaccagttgtttgaagacctgacacatttactgagtcctctcttcttctcagtaatcactactacatttcttcaactgtacctgaaatgacagtgyatggagcctaggtgacagttgacccttaaaacatgtcttctgacctgcttgtggaataaatgccttccaggttgctgacttgcttaaatgtgctccccat

SEQ ID NO: 147247 - DNA, 201 bp, Homo sapiens
aatcccagctactaggaaggctgaggcaggagaatcgcttgaacccgggaggcagaggttgcagtgagccgagatcgtgccactgtactccaacctgggcractgagtgagactccatcttagtcaatcaaccagtcagtcagtaaaggggatgagaaacccccatacatgcatgtgtttctcattctccactcactaatg

SEQ ID NO: 147248 - DNA, 201 bp, Homo sapiens
tctcaagagctctctctaataaacctcttgtatgctgacatccatctcggggtctttttccaaagaaactcaacccacagcatatatttagagctgtaagyctccgttggataagtataaccaccatagtcaccagaacaggtcatcagagattgtagagctgtagctaggaaatcacgtttattctcttgcagcttgcaa

SEQ ID NO: 147249 - DNA, 201 bp, Homo sapiens
aacctttcagatgatggatgtcttcttctactaaagaggactaagagtggttcttgatctgtagagttgatgtgagtcttacatgagaaagaacctgcaaagctctccccactttacctgacccagtgagtgcgtgatccttgagcgtcactttaggaagtccaaaccctttgtcttactaattcagagacatgacttgct

SEQ ID NO: 147250 - DNA, 201 bp, Homo sapiens
ttttcttactctttcactaacccttcaaggtagttcctgttatctccttttttattatttatttgttttattttattattattattattattattattattttgagagagagtctcgctctgtcacccaggctagagtgcagtggcacaatgtcggctcactgcaacctccgcctcccgggttcaagcaattctctgcctc

SEQ ID NO: 147251 - DNA, 201 bp, Homo sapiens
  misc_feature (1)...(201): n = A,T,C or G
aataggggttgacttttttaaaaaggtgaggtctcctcgaatgaggtcgtgctaatgcagtgggtgaggaattacaaatatggttcaatatcaactctgcntggatttgaaaaataatagagtaaaacagaaacttgtttacatgtctttagtaaatgaagatgtttttaacagataaatatcaaatgtgtgtattttgta

SEQ ID NO: 147252 - DNA, 201 bp, Homo sapiens
tgtggactccttaccatgactctggggtcttccacaattgttttttccccaacctatactgtctgtcttcagggtataataccctgttgaactacctgagraaactatttctctgattcttaattttcactcttgcggtcttactgcccactattcagttcttttttctgtaaccctccctcccagccaacaccttcaatg

SEQ ID NO: 147253 - DNA, 201 bp, Homo sapiens
tcagatctgtgattgcaaataaaatagagtattaaaaaaatctgttgcggcacatagttgttgctcagtaaatataaagcaaaggcataatttgcacgcasttggactggattcacagccagcggggcatgatggaaaaagcacaaaatgagaactgagagtggctgagtggattgctcagggtcactcagctggtatgtg

SEQ ID NO: 147254 - DNA, 201 bp, Homo sapiens
gttttcttactctttcactaacccttcaaggtagttcctgttatctccttttttattatttatttgttttattttattattattattattattattattattttgagagagagtctcgctctgtcacccaggctagagtgcagtggcacaatgtcggctcactgcaacctccgcctcccgggttcaagcaattctctgcct

SEQ ID NO: 147255 - DNA, 201 bp, Homo sapiens
aaattagcagaaaatgacattagcgctaagaaccaaattcgattacctgaaatacatgtattattgtaagaaataaaacaacgtcatctccacctccacasccccagatcataccctcacactgaattgtattaatgccagtttccttttagttgctggctttgtgtgtgtgtgtggcaggttgtctcaaaggcacagagt

SEQ ID NO: 147256 - DNA, 201 bp, Homo sapiens
ggttttcttactctttcactaacccttcaaggtagttcctgttatctccttttttattatttatttgttttattttattattattattattattattattattttgagagagagtctcgctctgtcacccaggctagagtgcagtggcacaatgtcggctcactgcaacctccgcctcccgggttcaagcaattctctgcc

SEQ ID NO: 147257 - DNA, 201 bp, Homo sapiens
cactggtcctgtttcttcctgctcgaacatgctgagcccattgttaccccaagggccatcccctcttcttggagagctttccccccagacttttcacaacrccagatccttctcattatctgctgtaacaaaatgccacaaattatttgatatatgaacaatggaaatgtatttatcacagtgctggaggctggaagtcca

SEQ ID NO: 147258 - DNA, 201 bp, Homo sapiens
tccttttagttgctggctttgtgtgtgtgtgtggcaggttgtctcaaaggcacagagtgtataataatagtacatgtcagcacaaggcaagcttgtgcagrgtttttccccatgtaatttgccggctcttgtggctgtggtgtgtgaatgtgagttctggcagaggcttgtacactctgcctttacccagccccatctccc

SEQ ID NO: 147259 - DNA, 201 bp, Homo sapiens
cactttctgcttatcagcttcagaacaaccctttctgggctcgcctccttgttccttctttccaaggcagccaacgcccccttccccccacaaaaaaaaaacccacaaaggtatttaatttagaaagactgatggtaaaagaatgatctgttgttatgttaaaagctagattatgaaacataccaaacatccacaaactac

SEQ ID NO: 147260 - DNA, 201 bp, Homo sapiens
ttgattgacatagggatggaggttagaattctataccttagcatttctctcccttttcctcaacaacgcagcccctcaagaatatccaagaaatggcagggtgcggtagctcatgcctataatccttgcacttttggaggcagaggcacaaggattgtttgagcccagaagtttaaggttgaagtgagctatgatcgatcc

SEQ ID NO: 147261 - DNA, 201 bp, Homo sapiens
gggaacaccctgaccctctgtgtttaaatgtctcagctgtgacatcacagaaactttgcaatcccctacccccacacaaagtaatccattaagtcactgtytatgacatgccctgtttctttttgtttggtgttttttttttttgtttttttttttttgagacagagtcttgctctgtcgccaggctagagtgcagtggcg

SEQ ID NO: 147262 - DNA, 201 bp, Homo sapiens
tcgcttgaacctgggaggcagaggatgcagtgagccgaaatcatgccattgcactccagcctgggcaacaagagcaagactccgtcaaaaaaaaaaaaaaagataagaagagaaagagagagagaaagaaagaaaagaaagagctgcacaagttaatttttgcattattttaactttttcactgggaaattgataatgaca

SEQ ID NO: 147263 - DNA, 201 bp, Homo sapiens
aaccatactttttgatacttgagaagtttgggactggactcagagctctaacgacagctgcctcaaaaagaaaataacatcccttgttcatgcttgccagraaacggcagcagaagcaggcccaagggcatcctctacctcctggcattcatttttgcctctgtcatctcatgcaggtgtgtctgcttggtggaaactggg

SEQ ID NO: 147264 - DNA, 201 bp, Homo sapiens
gcttgaacccaggaggcggaggttgcagcgagccgagattgcgccattgtgctccagcctgtgcgacagagcgagactccatcttaaaaaaaaaaaaaaaaggtatgcaaagggagattgaacacataggagaaggcagtgtgaccctgagggtagagactgcagtcatgcagccacaggtcaaggaatgctggcacttat

SEQ ID NO: 147265 - DNA, 201 bp, Homo sapiens
aagatggtgaaattctatctctactaaaaatacaaaaattagccgggtgcggtggtggatgcctgtaatcccagctactcaggaggctgaggtaggagaaytgcttgaacccaggaggcggaggttgcagcgagccgagattgcgccattgtgctccagcctgtgcgacagagcgagactccatcttaaaaaaaaaaaaaa

SEQ ID NO: 147266 - DNA, 201 bp, Homo sapiens
aaaggcaatcacatgtctccttataagagggaggcaaggccgggttgatggctctcgcctgtaatctcagcatttggggaggccgaggcgggcggatcacracgtcaggagtttgagaccagcctggccaagatggtgaaattctatctctactaaaaatacaaaaattagccgggtgcggtggtggatgcctgtaatccc

SEQ ID NO: 147267 - DNA, 201 bp, Homo sapiens
gcatggtgttggtttcttcttcactgtagagctcccctaagttttatgttataatcaaatgtggtcagcatttgcttatggaatttgatttagctggacagtgtctctctgtaaattttacagatggagtgtctcctgaagacagagtggccatgggtctcaggccttgggtgtcacagtgggagcacacacggttgcttt

SEQ ID NO: 147268 - DNA, 201 bp, Homo sapiens
ctttgtgtgctaggccaagcagcttgaacgttatcctctttggaggctcaagtctgtgtatgtgtatgtgtgtgtgtgtgtgtgtgtgtgtgtgtgtgtgkacatgcatgtgtgtgtgttgtgttaggacctgaccctgtagcttccactgtttgctagtggtatgtctatgtctgagtttgcaaactgcaagttcttgtc

SEQ ID NO: 147269 - DNA, 201 bp, Homo sapiens
tcagttacttcaggccatttggatgtatacgtgcaggtcacaggggatatgatggcttagcttgggctcagaggcctgacaggtacatattttatattttmttgattatgattatttttgctccctatttgtctgaaagctctactagagaagaaattttgtccgttttggctgctgtagtatccttagcccttaaaaaga

SEQ ID NO: 147270 - DNA, 201 bp, Homo sapiens
tcttctatattgcttggttgtactacagttactattctgggattcatgcacggcccatctcccttttcgttctcagtatgttcatggtaaactgctattayctgaactggcttattgagtctctgtttcttgtgatcaggtcataatggtagttggtacttacagtgttccaggtcttggcctcacactttacatggatta

SEQ ID NO: 147271 - DNA, 201 bp, Homo sapiens
acggtggcatgcacctgtagtcacagctactcaggaggctgaggtgagaggatcatttgagcctgcgaggccaaggttgcagtgagccaagattgcatcaytgcaccccagcctaccctcctggagttagatcctgtctcaaaaacaaaacagaaaacaccaaaccagtttttagcctctgtggactttggtattttctta

SEQ ID NO: 147272 - DNA, 201 bp, Homo sapiens
cctttcttgaagatgttagggcatgcatgaaagtgtttgttgttaaaaaattcgtaatgttgcagggggagacaggacaggatatatatacatacacacaygtatatataaacacatatatgtatactatatatgtgtgtgtgtatatatcctgttcgtatccatatgtacacatatgtatgtatgtataggtgtgtgtgt

SEQ ID NO: 147273 - DNA, 201 bp, Homo sapiens
gtagcatgtgcctggggagtttaggctgcagtgagccgtgatcacgccactgtgctccagcctgggtgactgagcgagaccctttcccagaaaaaaaaaaagctgaaaaatctaagtcgaattatcctaaatcggggactgtctgtacttaccttatatctagggttgctgtaaagatgaaggagggcaatagatccaata

SEQ ID NO: 147274 - DNA, 201 bp, Homo sapiens
cctgcaggaacattgcaagggagctcccctgtcacctgtccccagtgtcccaggagtctgtgccaccgcacaggagcaaacaggttccatgtcctggggayaggctgcagcattacatgtagtgatccaggggaaagtaggtggcctgctaggtgccgtaactgagcagtctaaagagagggctggtacgtctgcctgctc

SEQ ID NO: 147275 - DNA, 201 bp, Homo sapiens
tatattgcttttcttttctatttcttggcaaggccctgaaaactaggatggctgtggaaaaatgttgttttatctaaataatgtccctactgggggctagrttctggcttttggctgggccttggagaatggtaggtgtggtggacacatgagccccaggaaaaaattaaggcgcagaggtcagtccagaagctgcagatt

SEQ ID NO: 147276 - DNA, 201 bp, Homo sapiens
gttttgttttgttttgttttgttttgttttgtttgtgctagaatgggaaatgtgagtgagagagagcaacaggtaaaatgctggagacattctcaagagtracatcccagctgccctctagatcagtagccattagcggcatgtggctactttaaatgagttgaaatgaaataaaattaaaaatacagttccttagtctca

SEQ ID NO: 147277 - DNA, 201 bp, Homo sapiens
tggtaaagcagaatgttgggatccagggaagtcaatggcactgttaaatcacgttccaccctacactaccaacctcctgactttctggatgtgagagagarataaaagtccctttggtttaagccactgttatcaggaatttattgtcacgcgctgccgagactaattgcagtggatgcactgttctgtttccagcaacct

SEQ ID NO: 147278 - DNA, 201 bp, Homo sapiens
tggaggcaacaaatctcatgctcctggagagaaggaaacaaatctatgtactcgttaaggacagtggttacattagaacctgcaatgtaagtcagtggttrcatcggaacctgcaatgtaaatcaatcttgaaaatagacaaaatagacatgggaattaaatacagagaaattagatcaatggatgaaccaatagagaagt

SEQ ID NO: 147279 - DNA, 201 bp, Homo sapiens
agggctgagagatgacaatgtaataactggcacagattattcccatttcacagatgaggaaactgaggcacagagattcagtcacttgtgtgagattaaargactacctagagcagaggcagggtttgatcccaggtgacctggcccccgagcccctacccttaaccactctgccaaaatgttgaatgagcgaatgagcag

SEQ ID NO: 147280 - DNA, 201 bp, Homo sapiens
ttgcttggaatctcactcttcagaatctgtttttcaactcagtgtcatctcctgcatctgtctacatcgtgccgtcctctgcatcatcatgagcatggagyatttcttatgaaaatcctgtgaagacgacacttaacccactttgcagctctgtggagctggcctcctcctggctctgcttctaggaatgttgctaaacac

SEQ ID NO: 147281 - DNA, 201 bp, Homo sapiens
aaaaatatcttttgttactaaaatatcactctacaacttgtactgctagtgcttttaatgcataaaaacatagaactctctttggaaccagaatttaaatragtacttaaaaaaaaaaaagaaaacctccaggctttataagaggtatggtttggtgaaaatgtcgtggattttggagacagatttttgttcacacctgag

SEQ ID NO: 147282 - DNA, 201 bp, Homo sapiens
gctgaagaaataggaggaggaggtaggaatgattaaaacctggggccaggacccagacctctaggatggcatcaccaaccgattccagaggcagcatcackgggccgagaagtagggacagcgaagcgtgttctgagtgtgggaaaaactgcagaatggatgtagctgctgctaaaggaaggaggtgccactgctgggctg

SEQ ID NO: 147283 - DNA, 201 bp, Homo sapiens
ttatttagagacaattcctttggcaggtgactcaaaattgtggtaccaggtataatagaacttccttgaaccagaagtcttcagagagaaccaatttgccrttgtcattaggtcaggcagctcatcgctggatctccttgttcaccctgtttcacccacactggccttcgttttgtcttattttgttgttttttgtttccc

SEQ ID NO: 147284 - DNA, 201 bp, Homo sapiens
tatttgaacagagaatttaatctttaaaaatagttataaggcataaagtgttcacttggtacaggaagcactaccctagagctgaagaaataggaggaggwggtaggaatgattaaaacctggggccaggacccagacctctaggatggcatcaccaaccgattccagaggcagcatcactgggccgagaagtagggacag

SEQ ID NO: 147285 - DNA, 201 bp, Homo sapiens
tggtgttttctttctcaattaaaatgtattttctttagcggttactttgtaatggaaaatgacacttctgccagttttagtcttttatgtgttctaaacckagtcctttcctcctgctgtggcttcaataatgcatcgtttcataagttcacagaatttaatgtgcttctgctgaacccctagtctcagctagatagttaa

SEQ ID NO: 147286 - DNA, 201 bp, Homo sapiens
gttctaaacctagtcctttcctcctgctgtggcttcaataatgcatcgtttcataagttcacagaatttaatgtgcttctgctgaacccctagtctcagcyagatagttaaatgaaaattaaccactgtaggttggattcaaagtcacctattcaccttctccctttttaatccccttccctcactccacgtttgcaaagc

SEQ ID NO: 147287 - DNA, 201 bp, Homo sapiens
caggcacggtggcatgcacctgtagtcacagctactcaggaggctgaggtgagaggatcatttgagcctgcgaggccaaggttgcagtgagccaagattgyatcattgcaccccagcctaccctcctggagttagatcctgtctcaaaaacaaaacagaaaacaccaaaccagtttttagcctctgtggactttggtattt

SEQ ID NO: 147288 - DNA, 201 bp, Homo sapiens
agaagttgcagtgagccgagatagtgccactgcacttcagtctgagcaacagagtgagacttcgtctcaaaaaaataaaaaaaataaaaaataaaaagaaytacccgggcatggtggtgggtgcctttaatcccagctacttgggaggctgaggcaggagagtggcttgaacctgggagccggaggttgcagtgagccaag

SEQ ID NO: 147289 - DNA, 201 bp, Homo sapiens
tcattgcactccagcctgggtgacaagattgagactctgtctcagaaaaaaaaaagaaaaagaagaaggaggaggaggaggaggaaagaaagagagagagragagaggaaggaaggaaggaaggaagaaaggaagagaaaagaaggtagggtattgtagagagaaaataaggacattctagcaagggggagagcacaggga

SEQ ID NO: 147290 - DNA, 201 bp, Homo sapiens
ccagagagattgaatgtatagttagaagcaatgtacaattgctcaagatatgaatattagtaactttgttttattttttagcactgctcagatgaatatawaaaaatccgaagaaatatgttatttcccctctaagccagcagagctactagttttattaagcagacaatggcaaatctatttttaatttaattttttatt

SEQ ID NO: 147291 - DNA, 201 bp, Homo sapiens
attttggatcttcctgcatccgctactctttccctgtctacctctgttgagacctctttaattttttatttttatttatttatttatttatttatttattwttttgagagggagtcttgctctatccctcaggctagagtgcagtggtgcaatctcgtctcactgcaaactctgtctcctggggtcgggcgattctcctgc

SEQ ID NO: 147292 - DNA, 201 bp, Homo sapiens
tttcatattgttcaaacacacatgctctacaatttgtgcagttaacgcaattatcacatggtcctgaggcgacatacatcctcctcagctgacaggattargagattaaagtaaagacaggcataagaaatcacaagggtattgattggggaagtgataagtgtccaagaaatcttcacaatttatgtttagagattgcag

SEQ ID NO: 147293 - DNA, 201 bp, Homo sapiens
ggcatgtattctctttccgagggatgttccttgctgagaaaaagaattcagtgatatttctcccatttgcttttgaaagaagagaaatatggctctgttcyacctggctcaccgttggtcagagtttaaggttatctctcttattccctgaacaattgctgttatcctgttcttttttcaaggtgcccagatttcatattg

SEQ ID NO: 147294 - DNA, 201 bp, Homo sapiens
aatttcctcttcctaataagcctgggagcgctatgggagactggagtctatttcacccctacagcctcgaccatagaagatgggcacacctagtgggggcygtttatagacctatacccccaggcatgtattctctttccgagggatgttccttgctgagaaaaagaattcagtgatatttctcccatttgcttttgaaag

SEQ ID NO: 147295 - DNA, 201 bp, Homo sapiens
agcaaccggtctgaccaaaatttattaggcaggaatttcctcttcctaataagcctgggagcgctatgggagactggagtctatttcacccctacagcctygaccatagaagatgggcacacctagtgggggccgtttatagacctatacccccaggcatgtattctctttccgagggatgttccttgctgagaaaaagaa

SEQ ID NO: 147296 - DNA, 201 bp, Homo sapiens
aggcagaacgagatcacaagaccacaggaccggggtgaaattaaaattgctaatgaagtttcgggcaccattgtcattgataacatcttatcaggagacarggttttgagagcaaccggtctgaccaaaatttattaggcaggaatttcctcttcctaataagcctgggagcgctatgggagactggagtctatttcaccc

SEQ ID NO: 147297 - DNA, 201 bp, Homo sapiens
tggctctaattgtggagagaattaaaaaacatgcagtttcaaggtgtttcacccataagccaggtgccaaatgatccctctctgtcttccaccacccaaastttagaaatgggggttgccataggaaccttgtcattatcattcagcagctatagacttgctcaggtggtgtctttttttttaagaccggttaggttactt

SEQ ID NO: 147298 - DNA, 201 bp, Homo sapiens
ggagttcgagaccagtctggccaacatggcaaaacctcatctctactaaaaatacaaaaattagctgagcctgtaatcccagctactggggagactgaggyacaagaatcacttgaatccagaaggcaagggttgcagtgaactgagatcacgccactgcattccagcctgggcaacagagcgagactctgtctcaaaaaa

SEQ ID NO: 147299 - DNA, 201 bp, Homo sapiens
tgtccttacttggtagaagaggcagggtagctctctgtgcctcttttataagggcattaatctcactaatgaggacttcgccctcatgatattatcactcmccgtgatggttaagattgagtgtcaacttgattggattgaagaatggaaagtgttgttcctgggtgtgtctatgagggtgttgccaaaggagattaacat

SEQ ID NO: 147300 - DNA, 201 bp, Homo sapiens
gactagctggatttcctaggccaactaagaatccctaagcctagctgggaaggtgaccgcatccacctttaaacagggtgcttgcatcttagctcacaccygaccaatcaggtagtaaagagagctcactaaaatgctaattaggcaaaaacaggaggtaaagaaatagccaatcaactatcacctgagagcacagcggga

SEQ ID NO: 147301 - DNA, 201 bp, Homo sapiens
ttatttctcacagttctggaggctgggaagttcaagttgctggcagactcaggttggtgtcttggtgattgcccttttcctggttcttggattacccttcytgctgtgtccttacttggtagaagaggcagggtagctctctgtgcctcttttataagggcattaatctcactaatgaggacttcgccctcatgatattat

SEQ ID NO: 147302 - DNA, 201 bp, Homo sapiens
tttcataagttcacagaatttaatgtgcttctgctgaacccctagtctcagctagatagttaaatgaaaattaaccactgtaggttggattcaaagtcacytattcaccttctccctttttaatccccttccctcactccacgtttgcaaagcagtgttgcatttttcttttttgagaaatagggcatgatgtgtgcctgc

SEQ ID NO: 147303 - DNA, 201 bp, Homo sapiens
gcagctgagacctcctgaccccttttattatcatgtgtgcatctcttccctgctcccacctcctttctgttttgtaggctacagaaggcagaataggtgcrtctctattggcagtagcaggattgcttacagctctagaaataatggcctcatgcactctctgcggtagctctcctgcttaggcagctgccagtgtccttt

SEQ ID NO: 147304 - DNA, 201 bp, Homo sapiens
atagtcctcagaccacacttagagaggcagagttcgagaatggcctaatggttgtgctggatgacctccaaagaaaacctcatggataagcttgctgtctrtcaggggctttcgggttaggataggcagtgactatcatatgtacagtgcttagagttccagcttctgttctaagaacttaacatgtatgaagtcattcca

SEQ ID NO: 147305 - DNA, 201 bp, Homo sapiens
gcctggacaacagactgagactctgtctcaaaaaaaaaaaaaaaaaaaaaaaagagaagaaaagaaaaaagaactaaagggattaatatgttgaaaactcrtagcctggtgtctagtacccagtaggttatgagtgagtactgcctgttaataatgtatcgcatccctcgtttgaaggatgtagtcctaatttgagttttt

SEQ ID NO: 147306 - DNA, 201 bp, Homo sapiens
tctgctggacctggagttgaggggacagctttcttctgaggcagcgtcttatcctggggtgactccgggaggcaaaagcattaactattgatgagactgawgacacactatcattcctagaccagaaatggtgcaagaacagagaggatttatcctgctcttctttctctacacagtccctgtgtcagagaaggtgtctgc

SEQ ID NO: 147307 - DNA, 201 bp, Homo sapiens
ctgagatcgcatcattgcactccagcctgggtgacaagattgagactctgtctcagaaaaaaaaaagaaaaagaagaaggaggaggaggaggaggaaagaragagagagagaagagaggaaggaaggaaggaaggaagaaaggaagagaaaagaaggtagggtattgtagagagaaaataaggacattctagcaaggggga

SEQ ID NO: 147308 - DNA, 201 bp, Homo sapiens
cagtgagctgagatcgcatcattgcactccagcctgggtgacaagattgagactctgtctcagaaaaaaaaaagaaaaagaagaaggaggaggaggaggargaaagaaagagagagagaagagaggaaggaaggaaggaaggaagaaaggaagagaaaagaaggtagggtattgtagagagaaaataaggacattctagca

SEQ ID NO: 147309 - DNA, 201 bp, Homo sapiens
tcagtgcactcacttattgccagggacaataacatcaccactgagaataaggtcaccagtctaactagtgccccatattctgtaaaacttgcctctccagygcttttccagaggtttaggttaaccagcaaatcagaagtctcaaagatcttttctagttcctgcttgaaattgggtagaagataataccagctgttacgt

SEQ ID NO: 147310 - DNA, 201 bp, Homo sapiens
aatttccagcccacctcctgtttcttccttccgttcttcttgtgttgatttctgtgttgacttcctggagtaacttctgatatagattgagatttttcttraaaatgtgtttttagtacacagaggtgtcatttaaaagtgaaattcatgaaggaatattttttacctgctgggtttaatttcagatgcctgtgttatcat

SEQ ID NO: 147311 - DNA, 201 bp, Homo sapiens
tctgtttggattaagtgggttttagagggttaactccagaacagagccccttaataatactatatccttgaaaggacatttgaatttttttttttttttttaagatggagtctcactctgtcgcccaggctggagtgcaatagtgcagtctcggctcacttcaagctccacctcccgggttcacaccattctcctgcctca

SEQ ID NO: 147312 - DNA, 201 bp, Homo sapiens
tttgagcaagtgacttctgagttctagatatacagcaaagataaagcaaacagtctcagttggtggagctttcaatcaattagcagaattgaaaaaaaaaatagaatactgtgaacaacattatgtgaacaaatttgagaatttttgttaaatggacaaattcctagaaatgtgttacttaccaaaaccgatttaagaaaa

SEQ ID NO: 147313 - DNA, 201 bp, Homo sapiens
ctgcctcagcctcccaaagtgttgggattacaggcataagccaccgtacccaagataaacatttaatggacaagccataatagcagagttagaactgggggaaaaaaaacagttacaggaaggaatggaaaacttaaaggagagagttatcccaggccttctcaagggtagaaagacgaagagcagaaggcaatgatgtat

SEQ ID NO: 147314 - DNA, 201 bp, Homo sapiens
ttgcccatttatctgttgctgaacatgtccttgatgaaccatacatgtcataatgggttgcttccagctcttgaccacattttgttgatttcgttaatcaytcaagaccaagaaaacatacctggatttaagccccggtctctgtttgatacctgacttctgactgctttttacttccaaggatcctccagctttaggagt

SEQ ID NO: 147315 - DNA, 201 bp, Homo sapiens
gggcatgctttctggtaaaaggatccgattttaatgtaagaggcttgcttgtgtgttttcccagctagttcacttccatggctttatttatttttttttttgagacagaattttgctcttggcacccaagctggagtgcagtggtgcaatctcggttcactgtaacctccacctcatgggttcaggcaattctcctgcctc

SEQ ID NO: 147316 - DNA, 201 bp, Homo sapiens
aaacccaaatacaaagtcaggccacccaggaatgaggtggtgtgctctatcggggccggattcccccagctccagatcatctggccaaatctgcaccctcctcccgggcctcccttttgctggggatggtttgggcagaggtgagtgggcatgctttctggtaaaaggatccgattttaatgtaagaggcttgcttgtgtg

SEQ ID NO: 147317 - DNA, 201 bp, Homo sapiens
caggaggcagaggttgcggtaggctgagatcacgccattgcattccagcctgggctcggaactccatctaaaaaaaaaaaaaggaagaagaagaagaagaaaagaaactgggactagaaatgtcactatggccaagtattgaaagcatctgaatatcatgcatcctgatgatatctctgcaaacatttaccctcactcttt

SEQ ID NO: 147318 - DNA, 201 bp, Homo sapiens
ccaggaggcagaggttgcggtaggctgagatcacgccattgcattccagcctgggctcggaactccatctaaaaaaaaaaaaaggaagaagaagaagaagaaaagaaactgggactagaaatgtcactatggccaagtattgaaagcatctgaatatcatgcatcctgatgatatctctgcaaacatttaccctcactctt

SEQ ID NO: 147319 - DNA, 201 bp, Homo sapiens
cccaggaggcagaggttgcggtaggctgagatcacgccattgcattccagcctgggctcggaactccatctaaaaaaaaaaaaaggaagaagaagaagaagaaaagaaactgggactagaaatgtcactatggccaagtattgaaagcatctgaatatcatgcatcctgatgatatctctgcaaacatttaccctcactct

SEQ ID NO: 147320 - DNA, 201 bp, Homo sapiens
ctggaacgtcagactctccatatgggagcctgtcagagaatgtcgtcgcgttttggcctagcagcctctgtggcatctttatcgaaagtaaaaaaaaaaaattaaaaaagctacttattaagtagacaaggacagtttggaggaggacagtttgtaagaatagcatttattctttgcaatcagaaggctaaaaagtacatt

SEQ ID NO: 147321 - DNA, 201 bp, Homo sapiens
gaacccgggaggcggagcttgcggtgagccgagatcgtgccactgcactccagcctgggtgacagagcgagactccgtctcaaaaaaaaaaaaaaacaaamaaaaacaaaaacaaaaaaaccccgcaaagataattgatagcatttgcgggtgtggcaaaggtgttagtacctcctctcctctgttaaagtgctattggag

SEQ ID NO: 147322 - DNA, 201 bp, Homo sapiens
gtcccagctgaggcaggagaatggtgtgaacccgggaggcggagcttgcggtgagccgagatcgtgccactgcactccagcctgggtgacagagcgagacyccgtctcaaaaaaaaaaaaaaacaaaaaaaaacaaaaacaaaaaaaccccgcaaagataattgatagcatttgcgggtgtggcaaaggtgttagtacctc

SEQ ID NO: 147323 - DNA, 201 bp, Homo sapiens
gttcccctccttgtgtccatgtgttctcattgttcaactcccatttatgagtgagaacatgcgatgtttggttttcttttcctgtgttagtttgttgaggwtgatggttttcagcttcatcaatgtccctgcaaaggacatgaactcatgcactctagtctttgtacctggtgtttgcacttcctggaacaccttttcctg

SEQ ID NO: 147324 - DNA, 201 bp, Homo sapiens
aaaaaaacggatggttgcaactgtactgaacacgtgcagacttttttgtcgttctctaaacaatacggtataactatttatgtagcattcacattgccttyggtattttttggttaagtttttaaaaaatttattattaccattttgagatggagtcttgctgtgttgcccaggctggagtgcggtggcacaatcttgctc

SEQ ID NO: 147325 - DNA, 201 bp, Homo sapiens
ggcccacatcacgctgcacatgtcctactggctaggacttggtcacatggtcacacctcactgtatagaggctaggaagtgtctcatcctgtgcccaggcyttggtgaacagctagctgtccacaaatggcccagagtataggagacgaaactgagtttcttagaaacacacaaatttccttagggttacagagatttttt

SEQ ID NO: 147326 - DNA, 201 bp, Homo sapiens
ttcccccagagagctgatggttaaacattaccagcctaccacaagagtgcgcaacagttttctgagctgtgcagggcaagtagcatttttctcatttaacrctcatagaaactgagagtcaacaaaagacagatcttgacctgagtcccatggctccaaagtgacattgctggggctctagtctatgtggttgagtggaag

SEQ ID NO: 147327 - DNA, 201 bp, Homo sapiens
gccttactaggtggctctccaggcccagcttgcctcctgctttcgttttatgctactttgggaccacaggaaggaaccccttattctgcctgaaataatartggatccctgggacttttatctttgtagaccaccaatgagagtttactgcttgcagctttttgggtgagcaaaaataaaagcggaggagtaggtatgtgg

SEQ ID NO: 147328 - DNA, 201 bp, Homo sapiens
acctgggaggcggagggtgcagtgagctgagatcgtgccactcactgcactccagcctgggcagcagagtaagactctgtctcaaaaaaaaaaaaaaaaaacacacaacaaaagcagacagagtcccctctggtttggcatgccaagagcagcttgcctatggcccagctgtggtgtctgggagccctgattcccagaagc

SEQ ID NO: 147329 - DNA, 201 bp, Homo sapiens
ctaagttaagttccttctctctagtatactgcagttgcttgataaatagtaggtattatcatcattgtcaccctgtttagcttctctttttttttttttttttggcagttgcactggcaaaaaataatgtctagctcataaaatagcattattctcactttcctctctgcacagatacctacttttctttccctgccatct

SEQ ID NO: 147330 - DNA, 201 bp, Homo sapiens
tggcaaggagccagatgtcaagctcctcataatgaggatcatgctgaccagagctggaatgagctgcccaggaggtggtgaaatacctggcatgaaagatrcagaaacacaagtccagtatcgtgggagggagctgagcgagacaggcagttacacaaggtgacccatctgaccctgcctgacccagagatcctgaggctc

SEQ ID NO: 147331 - DNA, 201 bp, Homo sapiens
tctaagttaagttccttctctctagtatactgcagttgcttgataaatagtaggtattatcatcattgtcaccctgtttagcttctctttttttttttttttttggcagttgcactggcaaaaaataatgtctagctcataaaatagcattattctcactttcctctctgcacagatacctacttttctttccctgccatc

SEQ ID NO: 147332 - DNA, 201 bp, Homo sapiens
atgggtctcaggccttgggtgtcacagtgggagcacacacggttgctttaataaatgagcagagagcatggttggcacccggcccaaaggaccttgttgaytggtgggcacatggtatgttacatctgtcattgtgagagaattcctcatcttcccacagacattatcttgccaaagcacttttgcttccatctcatcctt

SEQ ID NO: 147333 - DNA, 201 bp, Homo sapiens
atctaagttaagttccttctctctagtatactgcagttgcttgataaatagtaggtattatcatcattgtcaccctgtttagcttctctttttttttttttttttggcagttgcactggcaaaaaataatgtctagctcataaaatagcattattctcactttcctctctgcacagatacctacttttctttccctgccat

SEQ ID NO: 147334 - DNA, 201 bp, Homo sapiens
tttttttttttttttttttgaggcagagtcgctgcgtcacccaggctggagtgcagcggcgcgatctcggctcactgcaagctccgcctccggggttcacrccattctcctgcctcagcctcccaaatagctgggactacaggggcccgccaccacgcccggctaatttttttgtatttttagtagagacggggtttcacc

SEQ ID NO: 147335 - DNA, 201 bp, Homo sapiens
atttataaaggaaagaggattaactgactcacagttccacatggctggggaggcgtcaggaaacttataatcatggtgggagatgaaggggaagcaaggaycttcttcacatggcagcaggagagagaagactgagcatcaaagggggaagagccccttataaaaccatcagatctcgtgagaactcactcactgtcacga

SEQ ID NO: 147336 - DNA, 201 bp, Homo sapiens
caaatatatgcttgaaaatattatctcccactctggtagtttttcactttcttgatcatgtcctgtgaagcacaaagtttcttccttttttttttttttgkttttccttaacactaatttatttcatatggttctgaagttggggcagtctgagatcagggtgctggtctgagatcgggatctggtaggaatggacccttt

SEQ ID NO: 147337 - DNA, 201 bp, Homo sapiens
tttaatgtcttacatgtttttctcttctcttttcttctcttttccctccctccctccttccctccctcccttcctttttttttttttttttttttttttttggcagaatctcactctgttgtccaggtgcatgatctcggctcactgcaacctcccgagttcaagcaattctcctgcctcagactcctaaatagctgggat

SEQ ID NO: 147338 - DNA, 201 bp, Homo sapiens
gtaacgtgatactcacaaatttcaggaattatcaggaggtaatctttggggggcattatttagtctatcatgatgtgtctctctagtctttttttattttmttttttttttttttttcactttaggctctgggatacatgtcctaaacatgcaggtttgttgcataggtatacatgtgccacagtggtttgctgcacctgt

SEQ ID NO: 147339 - DNA, 201 bp, Homo sapiens
ttgccacgaaaattgtcagacatacacttgcaaacctgacaattaaaacggaagacaatacaatagaataagaatcttttccatttctgttgaatgaggggcttgagaaaaagctcacgaaattaaaaggagaatgaagacgcttctgaagggagctcggtaagaattttaggggcaggtggcatctgttatttattgtgc

SEQ ID NO: 147340 - DNA, 201 bp, Homo sapiens
ttgctaaagtcatgcagtaacatcgtattctcattctccttcctgcacctgtctctcctaatagaatggcatcctctcaatacagttttttttttttttttatggctagcacatagcatggtgccttgcacatagttgttgctcaaaaagatgtttttgttcaacaaaaagtgaataaatcttttaaaaaggaataatggc

SEQ ID NO: 147341 - DNA, 201 bp, Homo sapiens
atcctttaaatgttgatgaaacttttacacatgtagctagtcatgtgatcgtgtatgccagagtgcctcaatggctcactgaggactgtttcaggtacaaattatagaaacctaactcatagtgatgttaaataaccattccactttatcttcttaagtgactgaagacccgagggcagcgtcaggcagggctggatctaa

SEQ ID NO: 147342 - DNA, 201 bp, Homo sapiens
tacagtgagccctggtcacgccattgcactccagtctgggtgacagagcaagatgctgtctcaaaaaaaaaaaaaaaaaaaaaggaattaaaaaaaaaaaacttaaatacctctgtactattctgtctcagatactgaagtttggagtgggtaatttttaagttgatttctgccatagacccttatacacctgaatatttt

SEQ ID NO: 147343 - DNA, 201 bp, Homo sapiens
tgcccaggaagttgagggtacagtgagccctggtcacgccattgcactccagtctgggtgacagagcaagatgctgtctcaaaaaaaaaaaaaaaaaaaaaggaattaaaaaaaaaaaacttaaatacctctgtactattctgtctcagatactgaagtttggagtgggtaatttttaagttgatttctgccatagaccct

SEQ ID NO: 147344 - DNA, 201 bp, Homo sapiens
gtgcccaggaagttgagggtacagtgagccctggtcacgccattgcactccagtctgggtgacagagcaagatgctgtctcaaaaaaaaaaaaaaaaaaaaaggaattaaaaaaaaaaaacttaaatacctctgtactattctgtctcagatactgaagtttggagtgggtaatttttaagttgatttctgccatagaccc

SEQ ID NO: 147345 - DNA, 201 bp, Homo sapiens
gaagtcagagcttgcagtgagccgatatcatgccactgcactcctccagcctggatgacagagcgagactccgtctcaaaaacaaaaacaaaaacaaaaamaaaaaaacaaaagaagaagttggtgagttaggggctgtgggctttgggaaggcagggtgacttttcatcagggggatgtggtgtgctaaaggccctggtt

SEQ ID NO: 147346 - DNA, 201 bp, Homo sapiens
cctggaaacagtgagacttcgtctcaaaaaaaaaaaaaacatgcttgtctgctggttcttccttcactgtaacagaaatatctagggctttttttttttttcattgttgttcttcctttatctcttatgaggctttccaaaaaagattttgttctaggaatggaataaactgtagggcgtttaaggcttcagaggtaattt

SEQ ID NO: 147347 - DNA, 201 bp, Homo sapiens
tgaacccgggaggcggaggttgcagtgagctgagatcacaccactgcactccagcctggtgacacagcgagactctgtctcaaaaaaaaaaaaaaaaaaaagtccgggcgtggtgcctcacacctgtaatcccagcactttgggaggccaaggccttggtagcagatcacaaggtcaggagttcaagaccagcctgaccaa

SEQ ID NO: 147348 - DNA, 201 bp, Homo sapiens
ggaaatgaattctgccagcacaggagggagcttgcaggtggattcggccccagagctccctggggacaccttggctgtgtagccttatgagattcatgaaycatagacacagctaagccatgcccaggctcacactgagctataggaactgtgaaataatgaatgtgtgctgttttgagccatcaactttgtgacagtttg

SEQ ID NO: 147349 - DNA, 201 bp, Homo sapiens
aaagcaagacagagttaataggagccagagggtggtgtggtgggactgcccagcaagggacaccagggcattttcgagggcgatcaaattgttttataaastgactgctgtggttgttgcaaactgtatacatttattaaattgaactgtacgtttaaaagaggtgaattgtgatgatgtaagatttttttctcgaagaat

SEQ ID NO: 147350 - DNA, 201 bp, Homo sapiens
agtcacttgaactccagagacggaggttacagtgagccgagatcacagccattgcgctccagcctggaaacagtgagacttcgtctcaaaaaaaaaaaaaacatgcttgtctgctggttcttccttcactgtaacagaaatatctagggctttttttttttttcattgttgttcttcctttatctcttatgaggctttcca

SEQ ID NO: 147351 - DNA, 201 bp, Homo sapiens
agtcaaagaggatccctggcaagctaacattgattttataaattttgttatagggaggttgaatgtttttcccattcacctggatactccctgtattttamtaatggactcacagtaaaatgatgggcctgcttgtgccagggggcaggtgtggccccgggagctctccctttctcacctgacagatgcatctagtgtcag

SEQ ID NO: 147352 - DNA, 201 bp, Homo sapiens
cagtcttggttgttttgcatcagaaatatagccacaaaccccatctataggattttaggaacctaataaccacttccagctgttaacaccttgagactttytaagttacagtcaaagaggatccctggcaagctaacattgattttataaattttgttatagggaggttgaatgtttttcccattcacctggatactccct

SEQ ID NO: 147353 - DNA, 201 bp, Homo sapiens
acagacaaaaccaagtgcctccttctattgccagtgggatccatccttctggcctgggctgcagacacagtgcatttaaaagaaagtccggggccaggcgyggtggctcacgcctgtaatcccagcactttgggaggctgaggcaggcagatcacaaggtcaggagatggagaccatcctggctaacacagtgaaacccca

SEQ ID NO: 147354 - DNA, 201 bp, Homo sapiens
gagggagcatgatgcgtgtgtgcttggacagtcttggttgttttgcatcagaaatatagccacaaaccccatctataggattttaggaacctaataaccamttccagctgttaacaccttgagactttctaagttacagtcaaagaggatccctggcaagctaacattgattttataaattttgttatagggaggttgaat

SEQ ID NO: 147355 - DNA, 201 bp, Homo sapiens
agaatacagacaaaaccaagtgcctccttctattgccagtgggatccatccttctggcctgggctgcagacacagtgcatttaaaagaaagtccggggccrggcgtggtggctcacgcctgtaatcccagcactttgggaggctgaggcaggcagatcacaaggtcaggagatggagaccatcctggctaacacagtgaaa

SEQ ID NO: 147356 - DNA, 201 bp, Homo sapiens
gttatttaggagaggtaaagtgatgtagtagaaaagaaaaaaaagcaagacttggattcaaagtacacttgtgccacttcctagctgtgtaagtttgaacracttacttagcctttttgagcctcacttgactcatctacgagatggtgataacgtcagattcactgattattgtctgggttctacaaaataaggtgtaaa

SEQ ID NO: 147357 - DNA, 201 bp, Homo sapiens
tggtctctttcaactgcatctgtcccctcccgtgagctaactgaaactcaggtactataatccatgcaagtgagagggtttcacttaaagccaggtgcccrtttctccaaccatcactggctctctgttgcattcaggcctcctgataatgcattcagattatcagcaaaatattctgagtcaatattagtggccagtggc

SEQ ID NO: 147358 - DNA, 201 bp, Homo sapiens
ataattcaatggcttcaggggccggcggtctcttggggattcacaggctccaaaagaacttggagaaaggccactgggactcctgtgcacagagaacttgbggatcctagcaggtaacaggtaaagacagcatgggacaaaagagcaagggacaagcatggaggctctagcaccaggtccatgcttgacctgctgtgaggg

SEQ ID NO: 147359 - DNA, 201 bp, Homo sapiens
agggttcggtgggtggactgcctgaggtcaggagttcaagaccagcctggccaacatagtgaaaccctgtctctattaaaaatacagaaattagccgggcrtggtggtgagtgcctgtgatcacagctactcgggaggctgaggccagagaatcacttgaacccgggaggcagaggttgcagtgagctgagatcgcgtcac

SEQ ID NO: 147360 - DNA, 201 bp, Homo sapiens
tttgaaatgctgcctcttccgctgaagtacagtggagtgtagggacctgtagcaaactaatatttaacgagggtgccactgttgtaccacctttagaattyacagtggctgctagtgaaactggcatgtgtcttgacaaggctgtgaaatgtagtcagtcttctttcattcattcatttgttcatttattcagagccagat

SEQ ID NO: 147361 - DNA, 201 bp, Homo sapiens
cttgcaggctcaagcgatcctctcacctcagcctccagagtagcttggactacagctgtgcacccccaccctaggctcattttcttattttttatatagayagggtctcactttgttgctcaggctggtctcgaatcctgagctcaagcaatcctcccacctctgcttcccaaagtgctaggattacaggtgtgagccact

SEQ ID NO: 147362 - DNA, 201 bp, Homo sapiens
ttactaaaagggagagaacagtattggctttaaagaaaaagtggtttgagccagacctgccagaataagtcgatgggaaaagatattctagcacagaggayaggaagagcaaagacagggaggcctaaaatgaagggtggatttgcagttgttaagtgggaagactagatatagactgggtttgaagtctactctgccact

SEQ ID NO: 147363 - DNA, 201 bp, Homo sapiens
caccacacctggctaatttttgtatttttagtggaggtgaggtttcaccacgttgatcaggctggtcttgaactcctaacctcatgatccacccgtttccrcctcccaaagtgctgggattacaggcgtgagctgccgcgcccagccttgtgtctcttcttacaagggcattaatcacattaatgaagtccctaccttcat

SEQ ID NO: 147364 - DNA, 201 bp, Homo sapiens
ttaaatatgagtggttgtggtcgctggcagtttctgcaacagaagtatggtcctccttttacttttctgtggaaaaggccctcaagctacagaaccagatmattgcacccccaccccctaccagccatctgaccctgggctccttctttaatctctccatccctttgtatttcctcgtatggaaaattgggataacaactg

SEQ ID NO: 147365 - DNA, 201 bp, Homo sapiens
agtgagtactgcctgttaataatgtatcgcatccctcgtttgaaggatgtagtcctaatttgagtttttttcagtagactggagctcctgccctcaccctrtagcattcgtatcctctgagatacatggatactgttgaagttatggtgaagatgatggggtgctgggaggtggagtggaatgggattgattgatgaaaaa

SEQ ID NO: 147366 - DNA, 201 bp, Homo sapiens
attgattgatgaaaaaacgacattagcttgctaaggacacccaggtggttgagatgttctgcgaagtgggcctgtgtgtctgctggacctggagttgaggrgacagctttcttctgaggcagcgtcttatcctggggtgactccgggaggcaaaagcattaactattgatgagactgatgacacactatcattcctagacc

SEQ ID NO: 147367 - DNA, 201 bp, Homo sapiens
tcttatcctggggtgactccgggaggcaaaagcattaactattgatgagactgatgacacactatcattcctagaccagaaatggtgcaagaacagagagsatttatcctgctcttctttctctacacagtccctgtgtcagagaaggtgtctgctgagtggacaggccaagaactgttctctgggacggagtgcagatga

SEQ ID NO: 147368 - DNA, 201 bp, Homo sapiens
agcagctcaaaaagtcagtctaggccactgtccttaaagatgaggagaaataaatgcaaactgcctaacgggccattttcccttgggtccaaatttccctstgcctcagctggctgcccaaagaagcagtttagcaaatgcattttatctcaggagaaatctgtcttttgtttctgtgcctcccttgtcaggagccctctg

SEQ ID NO: 147369 - DNA, 201 bp, Homo sapiens
gaggctgaggcaggagaatggtgtgaacccgggaggtggagcttgcagtgagctgagatcgcgccactgcactccagcctgggtgacagagcaagactccrtctcaaaaaaaaaaaaaaagaattaaagaattaaaatggagagtaggtacctctaaacaaccacgccacctggaccaccctgaatagaggagaatgagtt

SEQ ID NO: 147370 - DNA, 201 bp, Homo sapiens
tgttgaacggcagtagcattttccaagtgggaacatagacaacagggacagtggaattatacggtgatgatgaagttttccttttttttttttttttttttctgcctagcaaaggtctgatgagagaggaaagtacatcaaagtagcattggccagctgagcgtggtggctcacgcctgtaatcccagcactttgagaggc

SEQ ID NO: 147371 - DNA, 201 bp, Homo sapiens
tgataagtgcacagatggtggtgagtctgaaagaaaccaagtcaggaacctcttctttggacttgagatcctagatgggagcaggctctgatggcagtgtmtaagtgacttaagactcctttcatccactgtattagtccattttcacgctgctgataaagacatacctgagactgggtaatttataaaggaaagaggttt

SEQ ID NO: 147372 - DNA, 201 bp, Homo sapiens
gaggaaactgaggcacagagattcagtcacttgtgtgagattaaaggactacctagagcagaggcagggtttgatcccaggtgacctggcccccgagcccytacccttaaccactctgccaaaatgttgaatgagcgaatgagcagaccctcaaataatgcttagcccagtgctgagccatggcttcctacaggtgtgagg

SEQ ID NO: 147373 - DNA, 201 bp, Homo sapiens
agattattcccatttcacagatgaggaaactgaggcacagagattcagtcacttgtgtgagattaaaggactacctagagcagaggcagggtttgatcccrggtgacctggcccccgagcccctacccttaaccactctgccaaaatgttgaatgagcgaatgagcagaccctcaaataatgcttagcccagtgctgagcc

SEQ ID NO: 147374 - DNA, 201 bp, Homo sapiens
tgtaataactggcacagattattcccatttcacagatgaggaaactgaggcacagagattcagtcacttgtgtgagattaaaggactacctagagcagagkcagggtttgatcccaggtgacctggcccccgagcccctacccttaaccactctgccaaaatgttgaatgagcgaatgagcagaccctcaaataatgctta

SEQ ID NO: 147375 - DNA, 201 bp, Homo sapiens
ttgtctaggcagagctccttgtgatttctcctttataggcaaagagctgaggctcaggagaaatccaggcaaccaacattttaattaaaaggaagttttgmgaagattctttcatcttcagaattttctctcaccttgaagtgagcgtcgagcattgtcttttaaattattgaatctgggctggatgggatagctcagttg

SEQ ID NO: 147376 - DNA, 201 bp, Homo sapiens
cctgaggaccttccagtgggacaaggtaaggaggtggaagacagtgatattgatgattctgactccgtgtaggcctaggctaaggtgtgtgtttatgtctkagtttttaacaaaaaagttttaaaagttaaaaataaataatttttaaaacagaaaaatgcgtatagaataagaatataaagtattttcatacagctgtac

SEQ ID NO: 147377 - DNA, 201 bp, Homo sapiens
gacgtttgttcttatgtggagattttcctataaggtatttaaggctgaagttgggagcatcgtagaatgcaagagtttgggaaaaactggagataccagtsaagatggagaaaaggatggagttcaagggtacctgggcttcctgtcttcactgtgaagatggatttcaccatgagatctttactaggcagaaaagatgga

SEQ ID NO: 147378 - DNA, 201 bp, Homo sapiens
gagaaaatgcagaaatatttggtaatcagcacttttgaggaccacagacctataaccatgtgtctaaaataaaatccattattctacctcgttactagcccaaacttgcatctcctcttcagtttctttctctgttattggtgtccttcattcatccatcaacccttcttgttcaccagctgtcccttgaatgcttactgt

SEQ ID NO: 147379 - DNA, 201 bp, Homo sapiens
aggctgaagttgggagcatcgtagaatgcaagagtttgggaaaaactggagataccagtcaagatggagaaaaggatggagttcaagggtacctgggcttyctgtcttcactgtgaagatggatttcaccatgagatctttactaggcagaaaagatggaacatcctgcagtagtgttttgtcatcgagcccacagccgag

SEQ ID NO: 147380 - DNA, 201 bp, Homo sapiens
gaaatagtatgcctgtcaataaatatgtgctccatgagttaggaaagaaatgcatgcatgcatgcatgcatgaatgaatgaatgaatgaatgaatgaatgdtttgggattctagctttatcagattcactaggtgacctgcagcaaatcagttaactgttctgggcctctatttcttctctataaaatggaaataataaaa

SEQ ID NO: 147381 - DNA, 201 bp, Homo sapiens
agaatttgcctttattgtgcaattagccttttcgattctttaaaagctttaggagatagtgaatatgtccctccaatctacagacccgaagaggcatctcrggaaagtgatttgcccagggggacagatcaaggacctgaccccaggtccctctctctgcctcagaggccctctgggatccattaaagggtcttgtcttga

SEQ ID NO: 147382 - DNA, 201 bp, Homo sapiens
agtgggcagtggtatgcccgtctccagatgcttagtctaacttcacgtggataggctcgcatcctacccacgggattgcaggtgtttctttggcgtgataytccaccactgagaacattttgcaaggtaccaggcatatctctggctctccatccatgcatggatcaagctgctatcagtaacttcctggagaaaaagaaa

SEQ ID NO: 147383 - DNA, 201 bp, Homo sapiens
tcctgcccatgtatgggctctatgagtacctcaggtaaggacctgcaggggcctggccatcaggccagaaggcacatagggccatgcagtgccaggaccaraaggcccttagggtcatcatctagtccaacaggtttcttttccagatggggcagcagagacccagaaaggggaagggacctgcccacagccacccagcaa

SEQ ID NO: 147384 - DNA, 201 bp, Homo sapiens
gaactgggaagtggaggttgcagtgagccaagattgtaccattgcactccagcctcagagacaagagcaaaactccctctcaaaaaaaaaaaaaaaaaaaagttcaaacaaaatagcagcagctgagtttgagacacataggaaaaaaaaacaaaaaaaggaacttcaagccagagttttggttttggctcctggctcttc

SEQ ID NO: 147385 - DNA, 201 bp, Homo sapiens
cgggagttcaagagtgacctacgcaacatagcaagaccctgtctctgcaaaaaaaataaaacaataaaaataaaaattagccaagcatagtggtgctcacktgtagtctcagctacctgagaggctgaggaaggaggactgctggagtccagaagtttgaggctgcagtgagctatgatcacaccattgcactccagcctg

SEQ ID NO: 147386 - DNA, 201 bp, Homo sapiens
acagagtgagactccatctcaaaaaaaaaaaaaaaaagttttttaacagctattaagatattcatcagtttcagttgaaatgctttttgtgttagaatgcrtgtttattatgtgtggatataaatgtgaaccttcatagtttttttagtttctcagatatgcaaggagaaaagatacatcaaaacggcgatgtaagaattt

SEQ ID NO: 147387 - DNA, 201 bp, Homo sapiens
cttccagacccttcatgtcccagtcatgctccctctgggtggcacctacaggcagcaggtggccaagcagaattagggtttgtagagtcgtggcctaagcrtcacatcttagggctgagagatgacaatgtaataactggcacagattattcccatttcacagatgaggaaactgaggcacagagattcagtcacttgtgt

SEQ ID NO: 147388 - DNA, 201 bp, Homo sapiens
ccaaccgattccagaggcagcatcactgggccgagaagtagggacagcgaagcgtgttctgagtgtgggaaaaactgcagaatggatgtagctgctgctamaggaaggaggtgccactgctgggctgaaaaaatgggactagggtgatgcccacagggacaggaagcaacaggaggagcaagcgcctttctccccttccag

SEQ ID NO: 147389 - DNA, 201 bp, Homo sapiens
ggtattatgtatttaatatcatatatatatatggatacatacatacataaaaaaccctggcctggccggatgcagatgctcaaagtgctgtaatcctagcmgtttgggaggctgaggcaggaggctcacttcagtttaggagtttgagaccagcctggacaacatagtgagacctaagctctacaaaaaataaacaaaatt

SEQ ID NO: 147390 - DNA, 201 bp, Homo sapiens
tcaggaagtctgtcatccagctcgatcttgccaacaccaagaaagcaatgattgtccccgcgttcgagacactgcgctaccggctgtccttccccaagtcraaagcggagttgctgtcaatgctggacatggggaccctcttcacattcaggtgagtggctctagctgctgtactctgggggtgctcgaaggccttctttc

SEQ ID NO: 147391 - DNA, 201 bp, Homo sapiens
taggtattatgtatttaatatcatatatatatatggatacatacatacataaaaaaccctggcctggccggatgcagatgctcaaagtgctgtaatcctarccgtttgggaggctgaggcaggaggctcacttcagtttaggagtttgagaccagcctggacaacatagtgagacctaagctctacaaaaaataaacaaaa

SEQ ID NO: 147392 - DNA, 201 bp, Homo sapiens
agagtttgtaccatgaagccttgtttattgctgaaacaacttcataatgagaccctttcaggacatcggtattgaaacctacttgaactgactctgaaatrgatctatctggtgacagatccatctttgtggcagtttgtattttagtgagatgaaagggagtttgcagaaagcactctggaatctggtgctatctatgca

SEQ ID NO: 147393 - DNA, 201 bp, Homo sapiens
tgttcacagggcttcccattgtatcagcaaggttctgagttatttatattgttttaagaactccttggtccagctgggcgcggtggctcatgcctgtaatyccagcactttgggaggctgaggcaggcagatcacgaggtcaggagatcgagaccatcctggctaacacggtgaaaacctgtctctagtaaaaatacaaaa

SEQ ID NO: 147394 - DNA, 201 bp, Homo sapiens
atgttatgttatgttatgttatgttatgttatgttacgttatgttacgttatttactttttctttgagacagggtcttgctgtcacccaggctggagtgcrgcagcaccatcctggctcactgcagcctcaacctcccaaactcaagtaatcctctcacctcagcctcctaaatagctgggaacacaggcacatgccacca

SEQ ID NO: 147395 - DNA, 201 bp, Homo sapiens
caggatgattctgctttcattattgaccactgggtactcattttgttttatgttatgttatgttatgttatgttatgttatgttatgttatgttatgttaygttatgttacgttatttactttttctttgagacagggtcttgctgtcacccaggctggagtgcagcagcaccatcctggctcactgcagcctcaacctcc

SEQ ID NO: 147396 - DNA, 201 bp, Homo sapiens
gtagccaacttggtaggagggcaggagtcagtctgcatggaccagtttccaggatgattctgctttcattattgaccactgggtactcattttgttttatrttatgttatgttatgttatgttatgttatgttatgttatgttatgttacgttatgttacgttatttactttttctttgagacagggtcttgctgtcaccc

SEQ ID NO: 147397 - DNA, 201 bp, Homo sapiens
acctgaggccaggagttcgagaccagcctggccaatatggtgaaagtccatctctattaaaaatacaaaaagtagccgagcatggtggcaggcgcctatamtcccagctactcaggaggctgagacaggagaattgcttgaatccgggaggtggaggttgcagtgagccgagatcccgccattgtgctccagcctgggtga

SEQ ID NO: 147398 - DNA, 201 bp, Homo sapiens
ctctgcctgctgggttccagcgattctcctgcctcagcctcctgggtagctgggactacgggcacccgccaccacacctggctaattttttttttttttttgtatttttagtagagatggggtttcaccatgttggccaggctggtctcaaactcctgacctcacgtgatctgcctgcctcggcctcccaagggatctcct

SEQ ID NO: 147399 - DNA, 201 bp, Homo sapiens
gaaaagattggactaaatgagtattaaggtttttttccaggtgtaatatttttaaccatattgagatccatttatttatttatttatttatttatttattwaacagaatcttgctttgttgcccaggcaggagtgcagtatcttggctcactgcagcctctgcctgctgggttccagcgattctcctgcctcagcctcctg

SEQ ID NO: 147400 - DNA, 201 bp, Homo sapiens
ccagaccgaaagactgcatggtaaatggttccattgatgtgacattcttgaaagcaagacagagttaataggagccagagggtggtgtggtgggactgccyagcaagggacaccagggcattttcgagggcgatcaaattgttttataaagtgactgctgtggttgttgcaaactgtatacatttattaaattgaactgta

SEQ ID NO: 147401 - DNA, 201 bp, Homo sapiens
ggaatgtggccaaagctgtcactggagatattttaatagcctccacttctttcattattcaaaaacaaaggtaatgataaatgaatcttgcatttcatgcrgtaattgaaatatgaacaatggtgtgtccctaaggaaagcagaagggaagtggagttcacagcagaattctgtgaagtaagaaaaataataaacagaaaa

SEQ ID NO: 147402 - DNA, 201 bp, Homo sapiens
caacactttgggaggccgaggcgggtggatcacaaggtcaggagatcaagaccatcctgcccaacatggtgaaaccccgtctctactaaaaattcaaaaaattagctgggtgtggtggtgcgtgcctgtaatcccagctactcgggaggctgaggcaggaaaatcgcttgaacctgggaggcagaggttgcagtgagccga

SEQ ID NO: 147403 - DNA, 201 bp, Homo sapiens
tatataagaagatggcaaacctctggtaaatttaataaaacaatggaggaaatattaataaacagaacaatgagtaaaggtatacaacaatataaatttgmaaaatggtaatcaaaatcaatagccaacatttacttgtcacttatcatgtatcagacatagtactaaacatttagtgttatctcattgaaatctcatgac

SEQ ID NO: 147404 - DNA, 201 bp, Homo sapiens
agtcaaagataagtgcttttattcccattatacaagtgagattaaaacacagaagttaagtttgcccaaaggtcatatgtatttaagtggcagagctatcrtgtcaactcaggtctttgtcatttccaaagaggcctcttcacagtcccatcctctctaccgcatagggcagttacaaatagattcctccattccctatac

SEQ ID NO: 147405 - DNA, 201 bp, Homo sapiens
ccttcctctctgcccacgtattgtcaccctaaggtagattgctaaatcctcaggtgtcattcacatgatttcccattgccttggtcaaaagccatgcttaygtctagcactattgaagctagtcagtttaaacagctatgagggacagctggagacaagagggcttctcgtagtctcccaaagtcacataggcacccacac

SEQ ID NO: 147406 - DNA, 201 bp, Homo sapiens
gggatcaaaacaagaaagaccagaggtgtttgacaaataatgagaaagcaatgggcagggtaaactggaaattatgatgaggttaggaaatttgcactgakcacagagtctttgtccaaatgttatgaaaggataaaaggctagagttgaggagtgagatgttagagatttggtattttcgatgaggccctttttggggtt

SEQ ID NO: 147407 - DNA, 201 bp, Homo sapiens
aagtccttgctgttgtccccacaaagctcctggaagccagtcagccaagagctcatttcctagacaactggagtagaatcgagcaaaccctattccctggyctttatgtttagggatgagacaagaggaggacagggctgtgctgaggtggcctccagagtgagcagcacaggtggctccttccttcctctctgcccacgt

SEQ ID NO: 147408 - DNA, 201 bp, Homo sapiens
tggatgccccttgtgcacaccatagcatcactggtgggagttgaggttaagggtgctgtttgctgtggcagctgaggactccaatgaagcccccagacccktctagaaactgactttctcagcactgatctcccataaaattctgtacccaagctctgtcaagatattaatattggccaggtgcagtggctaacacctgtc

SEQ ID NO: 147409 - DNA, 201 bp, Homo sapiens
gttaaaaacagtagggtcagcgacccctaggcagcatgaccctgaatcgggaatgggaggtgctgtggtacccagcaccatgagcctcaacccctgacccrccaggctgcagaaatggagcactccctccagccccagcgcctgtgccagtgcctgctgggtcttagaatccagtgtgtggagccagggtgcccccatgtg

SEQ ID NO: 147410 - DNA, 201 bp, Homo sapiens
cagcctgtgttctctctccagcttctgagtccgtgtccttccagggacatctccgggtttcctagtgttaatccctcccctggggcgggaggagtccctaycagactctgttaaaaacagtagggtcagcgacccctaggcagcatgaccctgaatcgggaatgggaggtgctgtggtacccagcaccatgagcctcaacc

SEQ ID NO: 147411 - DNA, 201 bp, Homo sapiens
atttcacacatgagaaaactaaagtcacacagtatcatggtccaatgacattttaaaaaaatcctttatttactgccattggtcagcatgaattatgccartacctagtgagtgcctgcctagatccaggtaccatgagaggtgatttgcatatatcatcccattggttctacacatcgaaccccagaggcaggtatagct

SEQ ID NO: 147412 - DNA, 201 bp, Homo sapiens
caggcatgtaaataaataattacaagaagcatgcaatgagttctctaatagagctacctgcaagagcctgtagagcactgaagaaggacctagcaattgcytagggtgttatgttaggaatgcttacaatgagaatcagaaaactcaatatgcagtggcttaaaataaagtagggggtttgaatttcttacctgagaactc

SEQ ID NO: 147413 - DNA, 201 bp, Homo sapiens
ttctgaagctctctaggggcctagtaagagtggcccccttagggccgggtgcagtggctcacgcctgtaatcccagcactttaggaggctgaggcacatgratcacctgaggccaggagttcgagaccagcctggccaatatggtgaaagtccatctctattaaaaatacaaaaagtagccgagcatggtggcaggcgcct

SEQ ID NO: 147414 - DNA, 201 bp, Homo sapiens
tacggtgcccacccccaagggcatgactgaaattcggccaagttagcaacatcccacgggactcaagccagctgctcctccacccaccttggtcaaattcstcagctaaggatcccatgccaacctctagaggtgggatctgcttccttctagcctgcctgtcctccagtcacacccccgaggaggacactgtggggaggc

SEQ ID NO: 147415 - DNA, 201 bp, Homo sapiens
acagcaggatggtcctgcccgcctgttcccttcagtggttccccctgcttgtccttcgtggagaaatccccttactctggccttgaccacaaggcccccaraccagccctcctggcttcagcctcgtctccctcgccatctgctcctccatctatttgtctcagccacattgaccttgagtccctgcagaggtgttttttc

SEQ ID NO: 147416 - DNA, 201 bp, Homo sapiens
ttctggctggtcaggcatgactgacagccccattagagtcatgggaagaaggcctgatctacttctgcaaagggcggtgatgcggggcagacaaaagagcratagtgggcctcacggaaggtgcctgctgggaaccaggaagcacagctgcctctcccagggtttccaagcagcgaatcctacggtgcccacccccaaggg

SEQ ID NO: 147417 - DNA, 201 bp, Homo sapiens
aaattagctgattgcagtgtggcgtgcctgtagttccaactacatgggaggctgaggcaggagaatcacttgaatccgggaggcagagattgcagtgaacmgagatggtgccactgaattccagcctgggtgacagagcaagactctgtctcaaaaacacaaacaaacaaaacccacaattctgaccacatcagcacctag

SEQ ID NO: 147418 - DNA, 201 bp, Homo sapiens
agtaaaggcaatgtttgctaggtttctccactataaagttactaatttttgccaggccttgggggctcacgcctgtaatcccagcactttgggaggctgargcgggtggattatgagcgcaagagatctagaccatcttggccaacatggtgaagccccatctctactaaagatacaaaaattagctgggtgtggtggcgc

SEQ ID NO: 147419 - DNA, 201 bp, Homo sapiens
gacgggtggatcacctgaggtcaggagttcaagaccagcctggccaccatggtgaaaccctgtctctactaaaaatacaaaaattagctgattgcagtgtkgcgtgcctgtagttccaactacatgggaggctgaggcaggagaatcacttgaatccgggaggcagagattgcagtgaaccgagatggtgccactgaattc

SEQ ID NO: 147420 - DNA, 201 bp, Homo sapiens
gtttaattaacaaataaaattgtatatactaaggtatataagccgatgttttgatatttgtgtacattgtggaatgaccaaatcaagctacttgacatacrcattccctccaagtattactttcacgttaccctcatcataattttctatggaggtgaaattcacatacttccatgtagttaacagttttaaagggtgcaa

SEQ ID NO: 147421 - DNA, 201 bp, Homo sapiens
ttagctttctgtttctgagtatttcacttaaaataaggcctccagtcctatccatgttttcattccttttcatggctgaatagtattcatatatatatacytacactccacattttctttctacgttaagccattgatggacacttaggctgactctgtatctttgctattgtgaatagtgctgcagtgaacacacaagta

SEQ ID NO: 147422 - DNA, 201 bp, Homo sapiens
ggcatacctttggtaaaaccactggagtttttgggcccagtgtctggcagtgtgcaaggagcgtggggcatctttggcacaacgcggcttcaggaagagcyctccttcccttcctgagtaaggcagagtttgagtcaggctggggtgggctcctggtgtggggacaggttattgtgggtgctggagggaatgactttcact

SEQ ID NO: 147423 - DNA, 201 bp, Homo sapiens
tattaatacacataacacttggatggatttcaaaagcatcatgccaagtacaagaagtcaaacaggaaaaactacgtgctataagattataattctatttwtatgaaattctagaataagctcaactgcagtgacagaacgaaaatcagtggttgcctggagcgggtgtgtggggaagtggatggacccaaaaagagcaca

SEQ ID NO: 147424 - DNA, 201 bp, Homo sapiens
gggactacaggtgcctgccaccacacctggctaattttttgttgttgttgttgtattttaagtagagatggattttcactgtgttagccagggtggtctcraactcctgacctcatgatccacccggctcggcctcccaaagtgctgtgagccactgcacccggccaggacatttgaattttaaacaacagactcagaggc

SEQ ID NO: 147425 - DNA, 201 bp, Homo sapiens
tggggctcaactttcttttgaaagtgggctggcttggccagcatattgtttccttggcaaaagactggcaattgattgctctcctcgaagcatgtgctttkagacgcatatataccaggcagcctaacccaaagttgatgagaatgattcagaaaccttggtttttcactgaggatgttaaggaagccaattgtgaatctc

SEQ ID NO: 147426 - DNA, 201 bp, Homo sapiens
ccctagggcccatgagcctggtttaaaaaccgcttatccaccacctcgttttcattctcacacactgagtcctttagacgtaagcctgttggtgaggaagrctgttgcagtggctgagatgtgctgggcgaaagattttcaactagtcttttcctaataagcacctacttgtttatattctgagctttcacagcagcattc

SEQ ID NO: 147427 - DNA, 201 bp, Homo sapiens
aaaaaaaaaaagtacaaaagcctcatcctcgatgcaagagtccccttagacatagcagactgtttataaacatgagggacgcagtcttcttgatgggcatyttcagggcactggcagccaggaatgtgggttggggctcaactttcttttgaaagtgggctggcttggccagcatattgtttccttggcaaaagactggca

SEQ ID NO: 147428 - DNA, 201 bp, Homo sapiens
acatatgctataacttggatgaactttgaggacattatgcttagtgacctaagccaaacacaaaaggacaaatactgtattatttaacttaaatgacttakgtaaagtggcatgaaacatgctacttaaaatggcatgcaatttaaaatatgaattatttctggaatcttccatttaatattttcagacagtggttgacct

SEQ ID NO: 147429 - DNA, 201 bp, Homo sapiens
aaaaaaaaaaaagtacaaaagcctcatcctcgatgcaagagtccccttagacatagcagactgtttataaacatgagggacgcagtcttcttgatgggcakcttcagggcactggcagccaggaatgtgggttggggctcaactttcttttgaaagtgggctggcttggccagcatattgtttccttggcaaaagactggc

SEQ ID NO: 147430 - DNA, 201 bp, Homo sapiens
agcaagacttctcaaaaaaaaaaaagtacaaaagcctcatcctcgatgcaagagtccccttagacatagcagactgtttataaacatgagggacgcagtcktcttgatgggcatcttcagggcactggcagccaggaatgtgggttggggctcaactttcttttgaaagtgggctggcttggccagcatattgtttccttg

SEQ ID NO: 147431 - DNA, 201 bp, Homo sapiens
tatcagtcttctggggttgaattcattgttacttctgcagtttttgtttgatgttgtggtaagttcgtgttcttggaaatttatctttgaggccaggttttaaaatacagtcctctagataggatttgtatttgcttctgccaggctacaagatggttggctttcagaccaacaagataggtatgattctggcccccaaac

SEQ ID NO: 147432 - DNA, 201 bp, Homo sapiens
agattggcttctcccaaagagagtaaacaataagagacagagagagtgtgtgtgcctgtgtgtgtgcgtgccaggcataggtcataacattttttttttttgtaatttctctttttttttcttttttctttttttttttaaattatactttaagttctagggtacatgtgcacaacatgcaggtttgttacatgtgtatac

SEQ ID NO: 147433 - DNA, 201 bp, Homo sapiens
tgagaggttacatgtaggagtgggttagagaatgtgtgtgtgtatgtgtgtgtgtatgtgtacgtgcatgtatgtgtgcatgtgtatgtgtgtgtgtgtgkatgtgtgtgcatgtgtgtgcagtgtgtgtgtagtgtgtgtgtatgtgtgcgtgggtgtgtgcatgtgtgtgtatacacagtcaactttattagtgactgc

SEQ ID NO: 147434 - DNA, 201 bp, Homo sapiens
gaggtcaggggttcgagaccagcttggccaccgtggtgctaaaaatctctgctaaaaatatatctcaactaaaaatacaagtatgagctgggcatggtagygtgtgcccttaaccccagctacttggaaggctgaggcatgagaattgcttgaacccaggtggcagaggttgccgtgagcagagatcacgccaccttactc

SEQ ID NO: 147435 - DNA, 201 bp, Homo sapiens
ctgacatcgccgtttgagtttctctgcttctgccctccttgcttatgatctggtcatgaatgtatacctttggagagcaccttttgggtgtagttaatacctagtattctttgggctggggggcggggtgcagtgggatagggaagagaaccaaaaaggaaatgttacttcatttaaaggacatatgaacccaaagtatct

SEQ ID NO: 147436 - DNA, 201 bp, Homo sapiens
caagaaagattattgcccagtcttttaaacaaatctaagtgatgatgatgcctagtgcttatggaagtgtttgctgcgcgccaggcactgttctgagtgcytgagaggtaggatctcatttcctcccccaaagtccctgccgtgggtagtattatcaccttccttttctaaatggggaactgtgggaccgagaccaggagc

SEQ ID NO: 147437 - DNA, 201 bp, Homo sapiens
ccagacaaccttcatataacccaagaaagattattgcccagtcttttaaacaaatctaagtgatgatgatgcctagtgcttatggaagtgtttgctgcgcrccaggcactgttctgagtgcttgagaggtaggatctcatttcctcccccaaagtccctgccgtgggtagtattatcaccttccttttctaaatggggaac

SEQ ID NO: 147438 - DNA, 201 bp, Homo sapiens
gcacaatgtgcaggtttgttacatatgtatacatgtgccattttggtgtgctgcacccgttaactcgtcacttacattaggtatatctcctaatgctatcwctcccacctccccccaccccacgacagaccccagtgtgtgatgttccccaccctgtgtccaagtgttcttattgttcaattcccacctatgagtgagaat

SEQ ID NO: 147439 - DNA, 201 bp, Homo sapiens
atttccttttgtttagaagcatggaaatgcatggaatcgatttcctggtaatcgtccgaataaagtgggcattctgaccaggagactgctgattacgtacytcttgctgggtaaggaaaaacaattcaagtaggcttttgctgtttcttagccatagattttatgtaccagacgcttctaacgcctttgaaagaaaatatc

SEQ ID NO: 147440 - DNA, 201 bp, Homo sapiens
caagcgattcttgtgcctcagcctcccgagtagctgggattacaggcacgcaccaccatgcttggctaattttttgtatttttagtagagatggggtttcrccatgttgcccaggctggtttctaagtcctgatctcaggtgatcctcccacctcggcctcccaaagtgctgggattacagcggtgagccactgcacccag

SEQ ID NO: 147441 - DNA, 201 bp, Homo sapiens
ccaaaaatgtatgctgccagtttcgaagatatttccatttttattttaccaatgatttaaaaaccatcttatttatcaaagttttatttaagtcacaggawctaaaaggcatttgggttaattactatatattttatatgtgtgataattcatctaagccaatcaaaataaaatttcttaggagttttttttttggccaac

SEQ ID NO: 147442 - DNA, 201 bp, Homo sapiens
tgtacgaatagggtgtgggtcacagacatgaagtacttcacaaggtaatagaatatcacaaggcaagtggaggcagaacgagatcacaagaccacaggacmggggtgaaattaaaattgctaatgaagtttcgggcaccattgtcattgataacatcttatcaggagacagggttttgagagcaaccggtctgaccaaaat

SEQ ID NO: 147443 - DNA, 201 bp, Homo sapiens
cactccagcttgggcaacagagcaagacttctcaaaaaaaaaaaagtacaaaagcctcatcctcgatgcaagagtccccttagacatagcagactgtttawaaacatgagggacgcagtcttcttgatgggcatcttcagggcactggcagccaggaatgtgggttggggctcaactttcttttgaaagtgggctggcttg

SEQ ID NO: 147444 - DNA, 201 bp, Homo sapiens
agattgtttctcataggaaatgctcttttctttttaactatccttaccaaaaatacatccttatatccataactttcttcatattactctcctacttatgkattcctgtctgtcttgtttctatttccattctaaatatacttttcgaggcaacctttaagtaacctctgaactggacaaaattattctattttctcagta

SEQ ID NO: 147445 - DNA, 201 bp, Homo sapiens
acttggtgggtgggagggagcaacatgagcactggagaccaggagccaacacaagcatgatcactcgaggacctgctgggagttgagagtcaaatgaagtyagtgtgagaactataaaaatggctgcacaggccaggtgcggtggctcacgccggtaatcccagcactttgggaggccgaggcgggcagatcacctgaggt

SEQ ID NO: 147446 - DNA, 201 bp, Homo sapiens
gaaaaccttgttgttctaacataggggatgaaaattttagttttgttttagtgtatttttaatagcaaagctcaatctttaggaaggcttataaataattsccttctaattacaggcaacttgatcacacccacaatttcttttataaatttatccttcataaactttatcgtgacttactcagaccttttacaacatgct

SEQ ID NO: 147447 - DNA, 201 bp, Homo sapiens
tcacaaaataagactaatcatttaatatttctacaagatgagagatacattctttgagactctccagagtctctggaaaatccaaaagttaatttcaggtmaataaaacttaagttagaattttgattcatggaaacctgccaaagattttaaaaggttgaaagcacttgataagaagttactgtgaagtaatagtcattc

SEQ ID NO: 147448 - DNA, 201 bp, Homo sapiens
tgtattctctttccgagggatgttccttgctgagaaaaagaattcagtgatatttctcccatttgcttttgaaagaagagaaatatggctctgttccaccwggctcaccgttggtcagagtttaaggttatctctcttattccctgaacaattgctgttatcctgttcttttttcaaggtgcccagatttcatattgttca

SEQ ID NO: 147449 - DNA, 201 bp, Homo sapiens
agtgggctgcgtctgcactggctttgctgacagagccatactctgctttaccccgtgtttatgtggagtgtgtgctgttcagcatttggaggtgttggatragaaggctcttgtgtgtgtgatggcctaaacaaagccaggatccgtccagacaccccattctagctattaatttcagcaaccttcatttccaggctgata

SEQ ID NO: 147450 - DNA, 201 bp, Homo sapiens
caaagaagatctagtatcacttattatttgacagcatttagcatgcagttcacaaaataagactaatcatttaatatttctacaagatgagagatacattytttgagactctccagagtctctggaaaatccaaaagttaatttcaggtcaataaaacttaagttagaattttgattcatggaaacctgccaaagatttta

SEQ ID NO: 147451 - DNA, 201 bp, Homo sapiens
gtccttggcttgctaagggagaattctctccgaagagggcagtggcaaaagggagatcagtgggctgcgtctgcactggctttgctgacagagccatactstgctttaccccgtgtttatgtggagtgtgtgctgttcagcatttggaggtgttggatgagaaggctcttgtgtgtgtgatggcctaaacaaagccaggat

SEQ ID NO: 147452 - DNA, 201 bp, Homo sapiens
atcagttacttaatctcatgcaatttatttttgttctgcttgagcttgattagtagtttcatgaattcatgtttcttcattggagttctcaaacatttgcrtttagtccattgatcttaaagtttttattaacctatatctaagagtacttgttagagtcgcttccataaatttgcttgcaaatgcctttaaagaagaatt

SEQ ID NO: 147453 - DNA, 201 bp, Homo sapiens
cccgcaacagaacttggatctgttcaagaccctagatctagctatgaagtcacaggaagtatacagagggcagagatgcaggttaaatgacaaacagagasgctgtcatgaaaattcagacagcggaaaactctgtagaaaaacagctctgttcttcaccaaggaaattgtaaaggggaaaatttgatggcactggtggct

SEQ ID NO: 147454 - DNA, 201 bp, Homo sapiens
aaggatatcaaaactattcaaaggcagtgtcttacatgttgggattgttggtgatttaacgccatgccaggagaagaccactagctggccattgtagctgygttgtccttggcttgctaagggagaattctctccgaagagggcagtggcaaaagggagatcagtgggctgcgtctgcactggctttgctgacagagccat

SEQ ID NO: 147455 - DNA, 201 bp, Homo sapiens
ttacatgtagaaataaaaaatgaatattgaaagtaggatgaaggaatagtagattctcaaaaaatgaatagccgtatttggattaaatagtatttttagargtgaaagatatgattattgaaattaaatggatatgttaaacagcagcttaaacacagctgaagagagaattagtgaactggaagaggtataagaaattac

SEQ ID NO: 147456 - DNA, 201 bp, Homo sapiens
cccacaagaagaaagacctcacataaaggcctcacataaagtcaggatccacaaagagtattatcctcagcggataaacagttaataaaactcagagtgtrgaagaagacagtagaggttgttgtctgtttcatccttggttttaggtagaatgagggagaaatgtttcctctgagattttattttaagcctatgcccata

SEQ ID NO: 147457 - DNA, 201 bp, Homo sapiens
gagaatcgcctgaacccaggaggtagaggttgcggtgagctgagatcgtgccattacactccagcctgggcaacaagagtgaaactctgtctcaaaaactraaaataaataagtaaataaataagatccattatacatcccatcctggaatttttcaacttgatgtgatgctacaaagatgatctagttccctaatatcat

SEQ ID NO: 147458 - DNA, 201 bp, Homo sapiens
gagctgagatcgtgccattacactccagcctgggcaacaagagtgaaactctgtctcaaaaactaaaaataaataagtaaataaataagatccattatacrtcccatcctggaatttttcaacttgatgtgatgctacaaagatgatctagttccctaatatcattccatgaacttctaggattctgggtttcccaggggc

SEQ ID NO: 147459 - DNA, 201 bp, Homo sapiens
ttccctccctacagtggaaggagtaaagaattgaccacaactattcaacagaacgaagatttcaacacaggcctgtctgacagcaagggcttttgcctctmaggttgtatcacagaggattagatacatgcatccttaaagaatttgttccatataaagtttatatccattgcaagttttaaaaaggaaaaaggattgcaa

SEQ ID NO: 147460 - DNA, 201 bp, Homo sapiens
ctctgtaggtaccaaacactgtgaatgaacctggctatagaaagaggaagaagacagggtatattagtcatctactgctatagataatgctgcataacaarctattctgatagtggcctaaatcagcaaccatttatatagttgatgagtttgtaggctggttggatggttcatttttttactggtttaacagagtatttg

SEQ ID NO: 147461 - DNA, 201 bp, Homo sapiens
cactggtggcttgtggattttagatgaagttaaggaattaatgttcttttcttagtgtggtaatgaaattgagatttaaaaataaagattttgaaaccctyaggaccaagatgatagtatatcgcggatttgcttcaaagtaatcacggggtggggagaaagggagtcatgggaatgagtaggttagagaggaaacaaggc

SEQ ID NO: 147462 - DNA, 201 bp, Homo sapiens
ggtttttttccacccttatttgggctttctggaaagcctaaagcctcctggcgtaagaaccagcttgtgtggttattattcttgccatctgctgctggctsttttggttcatgccagctccccaaatctattcattcaactcaagcaaaaacatttattgagggcctactctgtgccaggtgctatagatgtggatgtgaa

SEQ ID NO: 147463 - DNA, 201 bp, Homo sapiens
ttagtgtggtaatgaaattgagatttaaaaataaagattttgaaacccttaggaccaagatgatagtatatcgcggatttgcttcaaagtaatcacggggyggggagaaagggagtcatgggaatgagtaggttagagaggaaacaaggctgtaattatcatgacttgataattactgatattgggtcataggtacatagg

SEQ ID NO: 147464 - DNA, 201 bp, Homo sapiens
attagagcaagtgtatggcttaggggctagaggatatatcagagtgagttagagagtcagaaaaacagtgaatatattcatgagaaaaaagagtgaatatwttcatgagatgtccccaaggttggataggataatgaggctaacatttactaagtcctcacttcctgccagtccttgttgtaagtgctgcatatgttttag

SEQ ID NO: 147465 - DNA, 201 bp, Homo sapiens
tcgctctgtcacccaggctggaatgcagtggtacagtctcggctcacggcaacctccgcctcctgggttcaagcaattctcctgcctcagcctcccaagtygctaggattacaggcgtgcagcaccacaccaggctaatttttgtatttttagtagagatggggtttctccacgttggccaggctggttttgaactcctga

SEQ ID NO: 147466 - DNA, 201 bp, Homo sapiens
ctggagaagcgctatcctccacagctgacagtctcatggagggtaggaggtagtcttggaggttaacatggagatttccagtgataataaatgctaggaaraaatctgacaggacagtgggatggagagtgatgggggagatggggctgcgttggatggggtgactgtggaaggtttccccgggaatgtggctgttgactt

SEQ ID NO: 147467 - DNA, 201 bp, Homo sapiens
tttcaccatattggccaggctggtctcgaactcgtgacttcataatccacccgcctcggcctcccaaagtgctgggattacaggcgtgagccaccacgccyggcctgaaacaacaacctttcaatgtcttagctttagcactacaaacctgtctgtagagatgatgaagttggcttgtctctgtctattcagtttccttct

SEQ ID NO: 147468 - DNA, 201 bp, Homo sapiens
atgaatcaagattaggatatttattgcagcattgttcataatggcaaaaacatagtaaacaaccaaaatgtccttcaggagaggaatggataaataaattrtggtataggtataaaatggatgatgtgattacagtgactaaactagataggaaatactaacatagttaaatcttaaagacataacagtgggtgaaaaggc

SEQ ID NO: 147469 - DNA, 201 bp, Homo sapiens
atgaaaagcaaagtgcctcattaatgtagagcagtgtggggcttctttaattgcagcctatgtggctgccctttttagatggctccatgggaaggcggagstaagagtggaagaaggtatggttgtgagagcgagagaaattgctccccaaatatccagatgaacttgacaacagagaagtgtgttttctgattcagctgc

SEQ ID NO: 147470 - DNA, 201 bp, Homo sapiens
aggcgggagtacagtggggccatcttggctcaccacaacatccgcctcccaggttcaagcaattcttctgcctcagcctcctaagtaactgtgattacagscacccaccaccacatctggctaatttttgtatttttagtagagacagggttttgccgtattgaccaggctggtctcgaactcctgacctcaggtgatcca

SEQ ID NO: 147471 - DNA, 201 bp, Homo sapiens
tgggattataggttcccaccaccatgcccagctagttttttgtatttttagtagagacggagttttaatgtgttgggcagcctggtctcgaactgctgacytcaggtgatccgcccgccttggcctcttaggaaagaaaggagatgagtaaactagaagtgggaggaagggtgccgggaacagactgtgggaacagagttg

SEQ ID NO: 147472 - DNA, 201 bp, Homo sapiens
tcagggaccatatctaagaaacaattacctaacccaatgttaaaagatttgctcctgcatttttttctaagtgcctctgtacctaacttccaggtaattaygtcaagctgtgggcatttgaatctctttggtaattgcgtcaaactgagggcatttggatctttttggtaattattcatgtgttcatttattcattctttc

SEQ ID NO: 147473 - DNA, 201 bp, Homo sapiens
agtgtggggcttctttaattgcagcctatgtggctgccctttttagatggctccatgggaaggcggaggtaagagtggaagaaggtatggttgtgagagcragagaaattgctccccaaatatccagatgaacttgacaacagagaagtgtgttttctgattcagctgccttctgattaaattcagaaaggcaagaaggaa

SEQ ID NO: 147474 - DNA, 201 bp, Homo sapiens
ttttaaattatactttaagttctagggtacatgtgcacaacatgcaggtttgttacatgtgtatacatgtaccatgttggtgtgctgcacccattaactcrtcatttacattaggtatatctcctaatgctatccttcccccaccccatgacaggccccagtgtgtgatgttccctgccctgtgtccaaaggtcataacat

SEQ ID NO: 147475 - DNA, 201 bp, Homo sapiens
ctgcactacagcctgggtgacagagcgagactctgtctcaaaaaaaaaaaaaaaaaagaatcagaggtcatctaagttaagttccttctctctagtatacwgcagttgcttgataaatagtaggtattatcatcattgtcaccctgtttagcttctctttttttttttttttttggcagttgcactggcaaaaaataatgt

SEQ ID NO: 147476 - DNA, 201 bp, Homo sapiens
aagtagtcctctacatgctatgaagttacttggatggtttcagatgcagaaagaagggaatgttcctaccatgcaggagggaaagttgacataagttagckctgacacagtgtcctgagttgaatatttattggctccatccggttacccactatcactaatcttggatcaggccctaccctaggcctacagcttcctttt

SEQ ID NO: 147477 - DNA, 201 bp, Homo sapiens
attgagggttccaatatctgcaaattcttaatcactgtttgttatatatcttttttatttttgccattctagtgggtaagtggcttattgtggttttgatwtgcatttccctaatgattaatgatattgaatgtcttttcgtgtgcttgttggccatttgtatatcttctttgagaaatggttatttaaatcctttgctca

SEQ ID NO: 147478 - DNA, 201 bp, Homo sapiens
caaaggattacaaatcattctactataaagacacatgcacacgtatgtttattgcagcactatttacaatagcaaagacttggaatcaacccaaatgcccwtcaatgacagactggataaagaaaatgtggcacatatataccatggaatactatgcagccataaaaaagaatgagttcatgtcctttgcagggacatgga

SEQ ID NO: 147479 - DNA, 201 bp, Homo sapiens
ttgacctggcaatggtataagttggtgaaaaggtgtaagtcggaggcaaatactgatggagatttgggagtctgctgtggaatataggggggagattccaygagacttttggggaggcagctttgtgtgatgaaaataacaggactttgaagtcagacaaacctggatttgaatcgtggctctaccgtattctagctgtgt

SEQ ID NO: 147480 - DNA, 201 bp, Homo sapiens
ttttttatgactaatgggctggcctctcctcatcaatctggctagatgcttcacagcacacgaggatgtctcatttgcctcccaagaaggacgagacagcrtggatggccaagcatttctgaccagttgattggacattggtcacccgtctgacctcattttaacttaactacctttttaaagaccctgtttccaaattca

SEQ ID NO: 147481 - DNA, 201 bp, Homo sapiens
cttagtatcatcagtcataatattaacagttaacaatatccattgcttagatatagcaccagaattttcacaatcccatggagtatgtgctgtaagtagcyccaatttactgatgaaaactgaggtacatagaggtttaactgcttgcccagaatgactcagatagtgaatgatggagccagtattcaaacccagtcagtc

SEQ ID NO: 147482 - DNA, 201 bp, Homo sapiens
tccgcattatgaagagtcagtaaacattggaggaaaagctctaataaaaaagtcaggttagttttgacaaaatgaaaaaaaaaataaagaaatggataggraacagtcaaggcagagaagagcggaaaacgtccaaaaaaaaaaaacctgaaattaatgtcctaagaaagatgaaacagctatttcacccatcaaatatga

SEQ ID NO: 147483 - DNA, 201 bp, Homo sapiens
ccaagtagagattaaaatctagtgggcgcagcagcgattaagcaagtaatcaatcaaataattgtttaatttagaaatttgatgagtactatgaagaaaaygaccgcagcacggtgatagacaaagttggggagggggctactgaggcataggattgtctgggaagagttctctgagttgacagcattcaagatccagtct

SEQ ID NO: 147484 - DNA, 201 bp, Homo sapiens
agtgctgggattacagtcgtgaaccaccacacccggctgggcttgatttttatagaggtgtagatttaaggagattttagtgatgatggcacagttctctrttttgattgccatgatggtttcttgaacacatacgataaaatggcatagaactatacacacatattgtacccatgacagtttcttcatttggatattgta

SEQ ID NO: 147485 - DNA, 201 bp, Homo sapiens
ttagtagagacagggtttcaccgtgtcagtcaggctgatcttgaactcctgacctcatgatccgcccgcctcagcattctaaagtgctgggattacagtcrtgaaccaccacacccggctgggcttgatttttatagaggtgtagatttaaggagattttagtgatgatggcacagttctctgttttgattgccatgatgg

SEQ ID NO: 147486 - DNA, 201 bp, Homo sapiens
cagcaggatcaagacaaactgagttggcaggagtggacccttgtggtcctttcaacatagtgaactcgaaattttcaatgtttgtttgagagcatattgcrtgcggcttttaaattagagttcacatgatgaatctttaatagtgcctccaaggccaagtgccattaggaagtgccagtttgacaggccagaggatcacct

SEQ ID NO: 147487 - DNA, 201 bp, Homo sapiens
ctggaaatagtgtttatctcataggttattttgagaattacataagcagctatatgcaaaaaaatatagaaaagtgcttgacatataagtgctacttactrctagttgccttgacttattgctgtaagtaaactgtgaaaacaaaaattgtgattttaatgttgtgatacagtcagcccttcatatctgagggttccacat

SEQ ID NO: 147488 - DNA, 201 bp, Homo sapiens
atgaggggtgagacgttatgtggccccaggattgagttggacatttcttttgctcaagtaaacaaattatgcatctgatcctgtactaagaaacttattaragaagattttataagatgacaagagggtaaattagaaaatagattagaaaggtgataatattggtgagtgccaggagttagagatgtggggagcctggca

SEQ ID NO: 147489 - DNA, 201 bp, Homo sapiens
tgtgggtttatctttctttccacctatagtcagcgtgacacctatgtcaggaggtgggtagagatgaggtcttagggtccattggttttttaactcctttrtaggtttcatgattccctggtcaaataatcaggtgaaagatcatgggccatccactttgtctgcaccaacctgctccctcttccgttgacacatcacggc

SEQ ID NO: 147490 - DNA, 201 bp, Homo sapiens
cctcctatagcttattgaatatgtatatttggtcaccctgatcagcataaatttctgtttcctttttccctctggtgaagtgtctgtttctggtttctgamggagtctacagtccccagcctgttagaatagccaccatgcaggctgcgaccctttatgagaaataaatctctcctttccaaatttatgaacttcatcatt

SEQ ID NO: 147491 - DNA, 201 bp, Homo sapiens
tctagaagctagaagtctgggaccaaggtattgacaaggttggttttatcgcacccttctctccttggcttctatatagatgcttcctctccctacgtctrtaatctcacttctgcgcatgtctgcctcctaattgcttcttcacatgagggcaccagtcctattggattagcctgagacagcactgcagagcctcttcat

SEQ ID NO: 147492 - DNA, 201 bp, Homo sapiens
tggttctggccagtctatggagaatgtgcaataagagtttttgtgtcctttgcttcaccttttgacatcagaggatcaaaacctccacccttggataatgytaactctgccattttttgttcatgagacacatgaagggccatgaagctcagttgctcatgggcacgtgtctccttttataaatattcatgactcctccta

SEQ ID NO: 147493 - DNA, 201 bp, Homo sapiens
aagcaatggcttaatcatctttgcctctttgtagtaccatatttattgcatctcagcctggaacaagggagcagttaaggaaaccagagggagcagaagcrttgctcattaagagtgaagtctgcaggctctgctggagaggaagcacatacttgcttccttctttggtgtagaattgtggtctggtctgtctgtggacca

SEQ ID NO: 147494 - DNA, 201 bp, Homo sapiens
tgggtagatgctaggaccctgacccttgatttttttgctcagctgccccaggtcatcaaagtgtgcactggggaggtgactgtattcttgctgtcattccmaaattagtcagagaagcagcaaaaagtaccaaatctagcatcaagaggcttttattcaagcctgtattctgccactgcataagcttcctgacctcaggct

SEQ ID NO: 147495 - DNA, 201 bp, Homo sapiens
aaccaattaggaaagggtagttatgtgtaaaataggtgaaggatgtggattaattaggggaaatcacaccaaacaggaaggcgggttctcaatccagttcmagaatttacccaggactgtttctggcttgaaggttggatttcactggggacctgttcctttctgcctaggcatttgtctgccttttgcctctatcaattc

SEQ ID NO: 147496 - DNA, 201 bp, Homo sapiens
agacacaatcagggagacccaggagcctttgggggagtgagggagatgaacatcatctcaggaagaacttttaacctctggaactccccaccagtaggacrgactgttccagaacgcagtggtgatctactgccaaagatgttttattaggatagaaatcgctaaaggacaattatttatttatttatttattttgctggg

SEQ ID NO: 147497 - DNA, 201 bp, Homo sapiens
aggtgggtggatcgcctgagatcaggagttcgagacaagcctggccaacatgacaaaaccccgtctctactaaaaatacaaaaattagccaggcgtggtgrcaggcacttgtaatcccagctactcgggaggctgaggcaggagaatcgcttgaacccaagaggcagaggttgcagtgagccgagatcgcgccactacact

SEQ ID NO: 147498 - DNA, 201 bp, Homo sapiens
tgggcgtggtgttgcacgcctgtaatcccagctacttaggaggctgaggcaggagaacctcttgaacccaggaggcagaggttgcagtgagccgagatcgygccactgcactccagcctgggcgacagaaaaagactccgtctcaaaaaaaaaaaaaaaaagtttatcttccttaccaccctgaatgcatgcagactttac

SEQ ID NO: 147499 - DNA, 201 bp, Homo sapiens
gcagctgggagccccagccagtagcaagtctggggctgcagcttaaacagcctatgcacagtgggtacagtcagctgattccgagccctctggggttgccscatcttaatcgacccttcctgacttccatgctgttgaggcctgtattggagggtccaagccacagcttgcgtgaagcctgggggctctgggtccaggctc

SEQ ID NO: 147500 - DNA, 201 bp, Homo sapiens
tgtatgaaagttgtcaggatcaagatggaatcactaatattagaaaaccctgataaataggggaaggccacgaagacatgattctcacacttatatgcctsataatgaaacagactctacaaaaaacacagccttgcacaaacacctcacgaccttacacaaaaacatgtgtgcaaggacatctgcctctccaacctcgga

SEQ ID NO: 147501 - DNA, 201 bp, Homo sapiens
tgggctcacagccacagcattcatttttattttgtctatggctgtatgaaagttgtcaggatcaagatggaatcactaatattagaaaaccctgataaatrggggaaggccacgaagacatgattctcacacttatatgcctgataatgaaacagactctacaaaaaacacagccttgcacaaacacctcacgaccttaca

SEQ ID NO: 147502 - DNA, 201 bp, Homo sapiens
caggaaggcaaagcagagggggggtgcatgtatgcacgcacatgcaagatcagaagggactttttacgaattctttccttgacactcctttttttgtgtcrcaactttgcctgtgaacccttagaatctctgctaatgagccggtcgcagtggctcatgcctgtaatcccagcactttgggaggcagaggcgggtggatca

SEQ ID NO: 147503 - DNA, 201 bp, Homo sapiens
attcaagatccagtctagagggataaggatgcagtccagcaaagagcccaacataagcatttcaggcacagggagcacacttgcaaagaccctgaggcatrttccagaagtgaaggggtcagtgtggctggagtagagcagagagagtggccagagacaaggtcggagagatcgaggtcaagtcaggtgcttctaggtgga

SEQ ID NO: 147504 - DNA, 201 bp, Homo sapiens
ggcccttgtcaacaaacctaggattaagttggagtggccgggcgaatatactgaggaaacattggttttcttttttaacccttttcgaagtctatttaatrtctgcctactgaatatttaattattaacaacaggagttgaccccccctggccatttttgtatgtcccacgctgggtttttccattttcagatagttaagg

SEQ ID NO: 147505 - DNA, 201 bp, Homo sapiens
ctgcagtctgaaacaaaaagggccaagggaggggcgagtacttacagaaggggattatagtaacaaaccgtggcagcatctacgctgaacaagagagaatmcaaaaaaaaaaaaaagcaaaaaaatagacctggatagagagtatgataaagaagggcagtggattggggatcatgatgacagtaaagaatctatgcaatt

SEQ ID NO: 147506 - DNA, 201 bp, Homo sapiens
tatgagttggtattttagctgtacctaggttttcccctcaattataaacaataccatacatagatattctcattacccatgtttgtttgtttgtttgcttrtgcaagtattggtacacaatagctcctaagctattctggtactgctatattaaatgttatggatattttaaattctgatagatcaaaatttaaatttgcc

SEQ ID NO: 147507 - DNA, 201 bp, Homo sapiens
aatgatctgaggatgagttacacattttaatatcaacactaacttgtaatttgtacatttgcattggctatacatgcaaaaagattattagctacaatgaratggattccttaatatctatgacattctaccttgctaatgctatagaataacttgcactttaaagtacatttgcacactttgcatattatgttctatgat

SEQ ID NO: 147508 - DNA, 201 bp, Homo sapiens
gcagtgagccaagatctcgccactgcactccagtctgggcgacagagcaagactccttctaaaaataataataataataaaataaaataaaaagcccccartaatgatgcctatgtcagagtgtttcgggggagaggtagggatatcatatggcatatatataaaatatatgtaggaaaaatttgtattctggcatatagc

SEQ ID NO: 147509 - DNA, 201 bp, Homo sapiens
agtggggctagggtgaggcctgagattctgcatatctgaaaagatcagctgatgctaatggctgttggttcaaggaccaccctttgagtagaggtgggttrgtgtaaacattccttggtcttagatgctggtctcagggagaggcttaaaactaaccctggaagacctagatcctttgcccagaaggggttttagtcgaat

SEQ ID NO: 147510 - DNA, 201 bp, Homo sapiens
actccgtctcaaaaaaaaagaaagtaaaaaagaaaatgggtgtctacttgcaccaccattgcctcccccgccccccaaaaaaaacacacaaaacactagakgacccacatagagccaaaaatcagaagattaaggacagtgaaatgcaatgtggcctgcactatgatggaggagtctgtacacaattccgagagctagagt

SEQ ID NO: 147511 - DNA, 201 bp, Homo sapiens
attaattgcaatggaaaaaatcaaggggaaaattctgaataaactgaaacaaaattaaaggacaagtaataaattggaaaaattgtacttgaaacagatayagcatgtaatacataaggagctgttgcagataaataggaaatacagactcgcagaaaaatgggtaaagaataagaataagggaactcgcaaaaaaatgca

SEQ ID NO: 147512 - DNA, 201 bp, Homo sapiens
aaagtgctgggattacaggcatgagccacctgtaatacccggcctgcattaggtattataagtaatctagagatgattttgagtaaagtatataggaggayaggtgtaggttatatgcaaatactatgcccatttgtatgagggacttgagccatctgtggattttggtatctgtggggggtcctgaaccaggccctcaca

SEQ ID NO: 147513 - DNA, 201 bp, Homo sapiens
ttccgctctgttagggaagcaccatgtgggtttatctttctttccacctatagtcagcgtgacacctatgtcaggaggtgggtagagatgaggtcttaggrtccattggttttttaactcctttgtaggtttcatgattccctggtcaaataatcaggtgaaagatcatgggccatccactttgtctgcaccaacctgctc

SEQ ID NO: 147514 - DNA, 201 bp, Homo sapiens
gagccactgcgcctggctgtgttgttgttattattggatgcctgcactaaacttggtgctgagaatatggagataacagatctggagattcacaggatagyggaggagacagataggctaagaaatgatcgcggcacgttgcgatgcgcgttgtgatggaggaaggcagggtgctgtgggagaggtttgttggagctgtca

SEQ ID NO: 147515 - DNA, 201 bp, Homo sapiens
atctgaccctgcctgacccagagatcctgaggctctgggaaagtctgagtatttatcagaacacaaaggcaatgcctccatgaagctccctgctggttgcyacagacaacagtgcatttcccaaagggcccgcagagacgttattttctttgtaattaaacatcacaacaacgttgcaatccatttattgacacccttgag

SEQ ID NO: 147516 - DNA, 201 bp, Homo sapiens
tctgaccctgcctgacccagagatcctgaggctctgggaaagtctgagtatttatcagaacacaaaggcaatgcctccatgaagctccctgctggttgctrcagacaacagtgcatttcccaaagggcccgcagagacgttattttctttgtaattaaacatcacaacaacgttgcaatccatttattgacacccttgagt

SEQ ID NO: 147517 - DNA, 201 bp, Homo sapiens
agcacgttccaggtagaggaagtagctggtgcaaaggccctgaggcaggacaggttcggggtgtggaacagaaggatggccagtgtgcctaggagctagtrgggagggagggctcaggtaggcaggagccagattggtaggaggttgtatgttggatttcagattcagaattttgatttattgttgttgctgctgttttta

SEQ ID NO: 147518 - DNA, 201 bp, Homo sapiens
cacttagaggctcaacaaacactgttctttcagtttttccttcagttctctttgctcacatcagtatgtatcatcatcaagatttgagtgcccattcggcrcatttttgcaaacgttaaatggaaactgttctcctacctcgtttatttcccccctccatggagaaggctcccataaaaagccttgcaggatgaagccgtc

SEQ ID NO: 147519 - DNA, 201 bp, Homo sapiens
gacttcactgactgtcagctgaagaactggtaaacagctgtggtatgtctcagcagtgggaaggaatgaactgacggcacatacagcaatgccagtgagarggtttgatgttaagtgaaagaaagccagaccgaaagactgcatggtaaatggttccattgatgtgacattcttgaaagcaagacagagttaataggagcc

SEQ ID NO: 147520 - DNA, 201 bp, Homo sapiens
cacttttcttgtattaagtcatttcattttcattatagtcctatgagttacatgctactattattagaaaatgtttggactttataattggtcatattttwaaattctggagtcaccattttgtggttaaatataaacctcgtgtgtagagtgggggtcatgtggttccagcacaggtcctcaatgaatgtctacaggtga

SEQ ID NO: 147521 - DNA, 201 bp, Homo sapiens
cccaaagtgctgggattacaggagtgagccaccgtgcccggtccagtgagctcttttaaatgtcttaggagaaagcattgataaaagtagcttttgtttgrtaggctgcatcttctgggtaatccggggtgaattgcctccatcccagacccttttcaggtggaggaggctggggttaactgatttctaaggctatttcca

SEQ ID NO: 147522 - DNA, 201 bp, Homo sapiens
tctcatggtctgtttctcaacaacacctctatggactaggtcctgttattattcccattgtacatacaaaggaactgaggcataggggagttaactaactmcaaatcatgtaaccggtacatggcagagccaggatgaatatccagaactgtctgactccagtatctgtgccctttctcctatgtcctgtttccctctctg

SEQ ID NO: 147523 - DNA, 201 bp, Homo sapiens
ctccatgaagctccctgctggttgctacagacaacagtgcatttcccaaagggcccgcagagacgttattttctttgtaattaaacatcacaacaacgttrcaatccatttattgacacccttgagtttttggtttcgtggcaggtgaagccataaataaggggcagagttgctgcctgtattcatggaaatactattcat

SEQ ID NO: 147524 - DNA, 201 bp, Homo sapiens
catctgggaaagagatgagattcccattccttgagacaccttttgaaggcccagtgacctctggtgaaggacgctcatcaggtggtgtttttgttagtgcrttaaccccttagttcttaaacccaactccttgctttatttctttcccagtccacctttctttctctaacatctcagtcagcattcccagctctacgccgt

SEQ ID NO: 147525 - DNA, 201 bp, Homo sapiens
gaatcatttacttcatttctcatgttttacatggttctctcatggtctgtttctcaacaacacctctatggactaggtcctgttattattcccattgtacmtacaaaggaactgaggcataggggagttaactaactacaaatcatgtaaccggtacatggcagagccaggatgaatatccagaactgtctgactccagta

SEQ ID NO: 147526 - DNA, 201 bp, Homo sapiens
agtccacctttctttctctaacatctcagtcagcattcccagctctacgccgttcaggccctaaacttgggagtaatccttgtctcccttcattcactccrtgtctcggttgccacctcctgttgagtctaagctcggccttgtagctgcgtcagttgtttcccatctttcaccactgctgtcgccctggctctgccactc

SEQ ID NO: 147527 - DNA, 201 bp, Homo sapiens
atagatgtctatctcctataccgtaagctcccaaaccaggatcacgtctgtttttcaccacctttgtatcccaaaggcctgacgtgaggcttttaaagatrtttgctaaacatttttaaaagaagctttatagatgtgtgctaaaactcataaagatgcttgctaaatgactggcttataaagatgtttactaaatgactg

SEQ ID NO: 147528 - DNA, 201 bp, Homo sapiens
tcttgcaggtctgcttcgttcttcagactcctcagggctgaatcagagcaccgctctgctccttgtcagcccctctggcccatcccctaatccccaccatmctgcctcgcattatctggcatcctctacccagccacgccagattcttttaagtcctggtgtacatcgccctctgtgggctctgctcttcccacctgttct

SEQ ID NO: 147529 - DNA, 201 bp, Homo sapiens
tttgctaaagttacgtgtactcagggaaactttccctgtctttatcatttcataggggttgctttgttacatgttctcctagaatcacatacatttcttcrgtaaactcaacacagagggtattctttcatgcttttgtgtgatgagctaatagatgtctatctcctataccgtaagctcccaaaccaggatcacgtctgt

SEQ ID NO: 147530 - DNA, 201 bp, Homo sapiens
gtctgcttcgttcttcagactcctcagggctgaatcagagcaccgctctgctccttgtcagcccctctggcccatcccctaatccccaccatactgcctcscattatctggcatcctctacccagccacgccagattcttttaagtcctggtgtacatcgccctctgtgggctctgctcttcccacctgttctttcttctc

SEQ ID NO: 147531 - DNA, 201 bp, Homo sapiens
gattccttctgtgtctcttcagaccagtaacacagaatgtctttgttaaattggaccttttttttttttaaataaactggagacacttggggagaataaartgatgtactctgcttttgtaattagctgtgatgattagactatcttcttcataatgtcttatttttacttgctttggaatttatcaagtgctctcttttc

SEQ ID NO: 147532 - DNA, 201 bp, Homo sapiens
ccagctatttgacaatttcagatataaatctaccttaaagatgtacaagtacaaattatgcaatttgatttttaagtgcttttctagcaatataaataatraagtgtgttggaactggcaggtatagtacattaaattgagtgcaattaaaacactgtgatatttttaaattaacaagaaaaaaataagtggcgaaattaa

SEQ ID NO: 147533 - DNA, 201 bp, Homo sapiens
ctcatcagaaattccttgagggcctttcccagaagcacaggaccaagccccacctctgaaattctgattcctgccatcttggctggaatgtggcatttggrttctgaaacatgggtcctggggattgtaccacacagccctggtgaggcgtgatgggccctccagaccctgaggtctctcgcctgatcctttctgggttgg

SEQ ID NO: 147534 - DNA, 201 bp, Homo sapiens
tccctttggcctctcacccagatttcagtttggacacctaggctccccaccactaagcatcaggaagccacctcaccacaaagtccctcttttcacatatrtgtttccttctcctccatggcatttatagtaaaaagaaaatggaatactccatgtcagtgctgaatgatggtctagattggtctctttcaactgcatctg

SEQ ID NO: 147535 - DNA, 201 bp, Homo sapiens
gggacattgctggaactatgttttgtttctggtcttgtggcatttgactatcggagatgaacaaaagagcatacaatcctgatttatttccacaagcttckcaggactagggcttgacagtcttgcctggggaagcttgttgattcttagagtggcactaatttttttttttttttttcttgagacggagttttgctcttg

SEQ ID NO: 147536 - DNA, 201 bp, Homo sapiens
ttgaacccgggaggcggaagttgcagtgatccaagatcgcaccattgcagtccagcctgggcaacagagcaagactccatctcaaaaaaaaaaaaaagaarttcatccctcaccctgtactacaagtccatcacaggctactcatggcactgctgcatgctgtcttcactctgggatcctgatagtgaggcagtctctatc

SEQ ID NO: 147537 - DNA, 201 bp, Homo sapiens
cacaccctagcgtggctccacctcccctacacctacctagtccatgctttgtgatctttccccagcacaatggcaagtgtttttcacactagtctcttccytccactgctcacctctcctcccccatatcttttctctcagtagcaaaagtcagctttccaaaaacaagcgcagtcatgccactcttttcctctgggtaaa

SEQ ID NO: 147538 - DNA, 201 bp, Homo sapiens
cttattcttttctatatttctggtgcatagtaggtacccactaatgcttgtggatttaacaaattgctgtgattagaggaacatgtaactttgcagaaatrcactgatgctctgtctctgatcaccttgggaaggactcaacacctaagcatgaggctgactctggcaaattgcttgttccaaacctcataaagccattat

SEQ ID NO: 147539 - DNA, 201 bp, Homo sapiens
aataacatgaatgagtgtgtaagtgatatggtttggctctgtgtccccacccaaatctcttgtcaaattgtaatccccatgtgttggaggaggggcttggwgggaggtgattgaatcatgggggtggacttcccccttgctgttctcgtgataatgaatgagttctcacaagatctgattgtttaaaagtgtatagcattt

SEQ ID NO: 147540 - DNA, 201 bp, Homo sapiens
ggatacacaattcaactcataactagggtgaaatgcgagactccacatgaagtattgaacccagaacctctaacaaaacagtgccttcaacatcagcggtktctgtttttacttccccatactcctgatgacggccctttgtggggtggctttgggcagttctctgaacatctttgaatttctatttcccatcttttcacc

SEQ ID NO: 147541 - DNA, 201 bp, Homo sapiens
ggtgggagcaggaggtatatgggaaatctctctataccttcctatcttgctgtgatcctaaaaaataaagtctatttttaaaaaactaaagacctggttaygaaagtgaatgcttattgaacacctactacatgctggttcctaataattaatcgtgtagattaatttatttaatcccaaacagtcctgtgaggcaggtaa

SEQ ID NO: 147542 - DNA, 201 bp, Homo sapiens
gaatacaggcgggtggggaggaaggaagaaatgtcagggttgggaggtgagaggagaagggatgcagcctcagtgggggaggaggaagaagaggtggaggraggtgaaaccagtgacttgtacttggcttcttgtgacatggagtgaggagggcagggcaggacccaagtgggaggcagatcctaggcctggtggaaagga

SEQ ID NO: 147543 - DNA, 201 bp, Homo sapiens
gaggagaagaataaaggaggagggagggaggggaagagagacggaggagggggagagagagggagagagaatacaggcgggtggggaggaaggaagaaatrtcagggttgggaggtgagaggagaagggatgcagcctcagtgggggaggaggaagaagaggtggagggaggtgaaaccagtgacttgtacttggcttctt

SEQ ID NO: 147544 - DNA, 201 bp, Homo sapiens
ggcatgaaaaccagggggaagggatctttggagacagtcttggaggctggctaccacaccatggccaaggcaagggaccatatctctgccagccccctgtytgtgctggcctcagagtagccttctcttgttgcatattctgcttttttgtaaaacttattttagaaattgtgccactgagaatgacaacaacaaataaag

SEQ ID NO: 147545 - DNA, 201 bp, Homo sapiens
agaatagaggacaggaggagaagaataaaggaggagggagggaggggaagagagacggaggagggggagagagagggagagagaatacaggcgggtggggwggaaggaagaaatgtcagggttgggaggtgagaggagaagggatgcagcctcagtgggggaggaggaagaagaggtggagggaggtgaaaccagtgactt

SEQ ID NO: 147546 - DNA, 201 bp, Homo sapiens
cagaggcaggagaatagaggacaggaggagaagaataaaggaggagggagggaggggaagagagacggaggagggggagagagagggagagagaatacagkcgggtggggaggaaggaagaaatgtcagggttgggaggtgagaggagaagggatgcagcctcagtgggggaggaggaagaagaggtggagggaggtgaaa

SEQ ID NO: 147547 - DNA, 201 bp, Homo sapiens
atggtcacacctcactgtatagaggctaggaagtgtctcatcctgtgcccaggctttggtgaacagctagctgtccacaaatggcccagagtataggagamgaaactgagtttcttagaaacacacaaatttccttagggttacagagattttttatggagtaggcaaggttcagattcagggcagtctttcaccccatgg

SEQ ID NO: 147548 - DNA, 201 bp, Homo sapiens
attacaggcgtgagccaccatgcttggcccgggattcttagctcagaactccaaacacacatccttcttggaccatagggtcattctcaggaattgcctargttattgctgtcaggtctgtctgccattacaaactggaaccagcatccagctctctggatttccaggggtttttattattattattattattattattat

SEQ ID NO: 147549 - DNA, 201 bp, Homo sapiens
ccaatgtattgccattcttaagtgccttgaagaatcctaagaggctagagacaaaggtgagaaccatattgaaccagaccaccaaggaaactgtggttaaraagccatggggtggctgctcccttacggaccctgctgtatctgctgagatctgtataagcaggacgagaaccatactttttgatacttgagaagtttggg

SEQ ID NO: 147550 - DNA, 201 bp, Homo sapiens
ctcccaaagtgctgggattgtaggcatgagccactatgccctgccaatgtattgccattcttaagtgccttgaagaatcctaagaggctagagacaaaggkgagaaccatattgaaccagaccaccaaggaaactgtggttaagaagccatggggtggctgctcccttacggaccctgctgtatctgctgagatctgtata

SEQ ID NO: 147551 - DNA, 201 bp, Homo sapiens
tgcattataaggtccattataggccaggcgtggtggctcacacttgtaattccagcactttgggaggctgaggcgggtagatgatctgaggtcaggagttygagaccagcctgaccaacatggagaaaccccgtctctactaaaaatacaaaattagccgggcatggtgacgcatgcctgtaatctcagctactcaggagg

SEQ ID NO: 147552 - DNA, 201 bp, Homo sapiens
ggggtgtaaacccatgaagaacaatgaagcagagcgagtgaagcaggacaggctggggtggaggagaaagaatttgcctttattgtgcaattagccttttsgattctttaaaagctttaggagatagtgaatatgtccctccaatctacagacccgaagaggcatctcaggaaagtgatttgcccagggggacagatcaag

SEQ ID NO: 147553 - DNA, 201 bp, Homo sapiens
gccccagggcctttgcactggattctggttctgttctactgccctttcagatctactcattcttcttcagggcatccacaggcttcctggcccctcagctyccttttgtgaggtcttctgcagaagatcagccagaaggaaaggagggaggccagggattccccagccccgcccgctccccgaggctgcttctctgtgggc

SEQ ID NO: 147554 - DNA, 201 bp, Homo sapiens
actcacaatacaaagtgtcagtgaggatgtggaacagctgcaactctctgacatcactgatggaagtgaaaaatggtataccacttcagaaaacagcttgktagcttttttgtttgtttgtttgaggcagagtctcactctttgcccaggctggagtgcagtggccccatcttggctcactgcaacctccgcctcgcgggt

SEQ ID NO: 147555 - DNA, 201 bp, Homo sapiens
gcactcctgaaccacagctctgtagggagtttaccacctggtcttccgcagcgcgtcaagtgttatctgcagacacaaccagagggaaagggtatgatctyggatccagcccaaagcctatgctcccagctctgtgggaagaggtcattagagctgtgataagtgcacagatggtggtgagtctgaaagaaaccaagtcag

SEQ ID NO: 147556 - DNA, 201 bp, Homo sapiens
gactctaggctgccctggaggccagacttttggactgcagcttgctcacgtgtgtccctagctccatttgcttcagctacccacttctggttttggtttcrgtatctgatgctcccaacacctcacatgaagcttgcaaaactgttgccataaacttaatttctagcaaagggcagagaaagaagtcagatacaagagatc

SEQ ID NO: 147557 - DNA, 201 bp, Homo sapiens
acagtgggaaataccagaatgggaatgcttgagaaatagtatgcctgtcaataaatatgtgctccatgagttaggaaagaaatgcatgcatgcatgcatgmatgaatgaatgaatgaatgaatgaatgaatgatttgggattctagctttatcagattcactaggtgacctgcagcaaatcagttaactgttctgggcctc

SEQ ID NO: 147558 - DNA, 201 bp, Homo sapiens
aggaattctcctgcctcagcctccccagtagctgggattacagacacctgccatcatgcccagctaattttttgtatttttgcagagatagggtttcaccrtgttggccaggctggtctcaaactcctgacctcaggtgatccgcccgcctgagtctcccaaagtgctgggattacaggcgtgagccaccgtgcccgacca

SEQ ID NO: 147559 - DNA, 201 bp, Homo sapiens
gcctttaattgtcttatcccttattcaggcttgaattcattgtagaactgtctgagttgtgcataggatttgaataaaacaaagaagcaggcctgggttcyggttctgctcctaccaggcctgagctgggtgaccctaagcacgtgcctctacatcttggagctttggcttgtttctcaacctgccttagagccccgtttt

SEQ ID NO: 147560 - DNA, 201 bp, Homo sapiens
gctgacgcagtctcacttcaagcatcctctgagggagtttggcctcattttatatgaatagtgttcctttttactcttgaaattgtcccattttaaggcckggcacggtgactcacgatggtaatcccagcactttgggaggcggaggcagacggatcacctgagatcaggagttcaagatcagcctggccaatatagtga

SEQ ID NO: 147561 - DNA, 201 bp, Homo sapiens
agaaactggggaggagtccgcactctgttgtaacaagcccctccaggtgattctgatgcatactggagttggagagccacttactccatgtccttaacaarcactttaagattatgtcccccattatacagaggatgaagtcaaagaaggaggactctgaacagtgtcttgtgctgtttattcattcaggaaacattaata

SEQ ID NO: 147562 - DNA, 201 bp, Homo sapiens
tgtttgatcctgacacaacccaatcggtagctgtttttatctccgttttacggatgaggcgagtgaagctcagggacactaaataactcttccaagatcaygcggccacttagcttcgagcttgtggctccaatcgaggtctctctgctcttgttgtgggatttgcacactacgttgcccctgcctctgaccctcgctgct

SEQ ID NO: 147563 - DNA, 201 bp, Homo sapiens
caatcgaggtctctctgctcttgttgtgggatttgcacactacgttgcccctgcctctgaccctcgctgctgcctgtctgaccccggctgttcgcttctcygcagctgtcagagcatctgtcctctgggaggtcttgcctgtccccctcaaccccaccaaaagtctgcagctaccatccagaatctgtgctgagcctgtct

SEQ ID NO: 147564 - DNA, 201 bp, Homo sapiens; identical to SEQ ID NO: 27331

SEQ ID NO: 147565 - DNA, 201 bp, Homo sapiens
tgtccccctcaaccccaccaaaagtctgcagctaccatccagaatctgtgctgagcctgtctttccatagcacacctgatgcccaagttgaaatgggtttygcctctcactctctcagtctgtctgataggagatgcttaactgaatcgtgcccccaggcagaatgggctgaagggagcaccaggccctgtaggcaagaga

SEQ ID NO: 147566 - DNA, 201 bp, Homo sapiens; identical to SEQ ID NO: 27333

SEQ ID NO: 147567 - DNA, 201 bp, Homo sapiens
aatgggtttcgcctctcactctctcagtctgtctgataggagatgcttaactgaatcgtgcccccaggcagaatgggctgaagggagcaccaggccctgtrggcaagagaagcagggctggcagggtgttgaagagttctgccagggccacagcttgcctggcatcccttagtttggtgtgaatttcttttgggacaatga

SEQ ID NO: 147568 - DNA, 201 bp, Homo sapiens
aaaggccacgcacccacaaacttcgccaagtggcggaccgccaccacgccttaccgggttgagtgggaggccgattttgagccgtatgttgttgtgagacrtgactgcccggagtacgaccggaggtttgtaggctttggctggaacaaagtggctcatatcatggagctggatgtgcaggtgagaagaacggagcatcca

SEQ ID NO: 147569 - DNA, 201 bp, Homo sapiens
tcaatgttatgaatcttttctgcaggttgtaagacaaggtcatcccttgaccccagtggggtcaggaatgaacccagttcacagttctgcactaccttacytgtatcatcaagtacagcctgcaagattcaaagtgtgctgggtaccatgtctaggatgacaggaaattagtggaagccttagcattgccttagaaagagc

SEQ ID NO: 147570 - DNA, 201 bp, Homo sapiens
ctctactaaaaatacaaatattagctgggcatgatggccgcatgcctgtagtcccagctacttgagaagctgaggcaagagaatcgcttgaacctgggacrcggaggttggagagagctgagatcataccactgcattccagcctgggcgatagatcgagactcggtctcaaaacaaacaaacaaacggccagactctcca

SEQ ID NO: 147571 - DNA, 201 bp, Homo sapiens
aagtggactctaaagttgctcggaagacaaagtcacctaacgatgataggctactcagaagatatctgtgttgttaagcaaagcatgactgtaatttcagrtgtagacaggaaggcctagtgcaaggaccagtggtcactgattctgacattcagatcccaccctttggtttgtttgtttgtttgttttttggttttcggt

SEQ ID NO: 147572 - DNA, 201 bp, Homo sapiens
gcctctcaaaggctgggattacagacgtgagccatcgcacctggcccagtttccccatctttaattgagaggatgacctgagctttctttcccacacttcsccgggccaatgaccaccccgccctcatgggggaaagaccttggcctggtgtcacagggactctgtctctctgcctgtcccctcttttcaggaagtctgtc

SEQ ID NO: 147573 - DNA, 201 bp, Homo sapiens
cccaggatggacagacccaaaaccctaagacaggctaggctgctcaaggccagtctccaaaggaccctccaggaatgtgttaagctccagagagagggggwgaagggaagaggagctgtgggatcaagagactcagtggatacaagtctgggccacggtttccccttgtggcctggctgctttgatcctgttcagctgcaa

SEQ ID NO: 147574 - DNA, 201 bp, Homo sapiens
gcccagggtctcaggactgaaatctcaagggattatccagggctgggatgtcatctggggattggcatccacatccaagctcatttgggttggagcagaawtcagttccaggatggaggtcccatttccttgctggctgttgatgggtgtccccctcagctcctcgaagccacgctcagttcctagccatgcagccccctc

SEQ ID NO: 147575 - DNA, 201 bp, Homo sapiens
gggattaaaaaatatgtatactatgtaggaactcagcaattctgtgcaaacagaaaataaagttacagagctgtgctattaagttgggtcttgatcttccscagttagaattaattgattggctcacttcccaattgttgtgtacctcaggcttgattgcacctaagaatcacttggtactgttggtaacacaaaacaaca

SEQ ID NO: 147576 - DNA, 201 bp, Homo sapiens
tgtatggcatatggtcctggtcttctccaacatttgatcctgtcctacctttccatatccatctctatcattttcaactctaagctttttcattaagtgtrtcagactatagttattttacacacacacacacacacacacacacacacacacacacaattgtttatatctctgtgccttcgttgtcctatcatgcttttc

SEQ ID NO: 147577 - DNA, 201 bp, Homo sapiens
aacatcacctgatgaatggataaacaaaatgtggcctctccgtgcaatggactattaatcagctgtaaaacaggatgctaggctgggtgcggtggctcacrctggtaatcccagcactttgggaggccaaggcgggtggatcacctgaggtcgagagttcgagaccagcctggccaacatggggaaaccctatctctacta

SEQ ID NO: 147578 - DNA, 201 bp, Homo sapiens
agtagggagaggaagacagtgcatttaattagaaacaattttattatgattgccttctctaaaaggcatattagcttttatcaccataataagttgttctsttctcaactttgttcccagttcaatctggatgcgtttatttgtaactcactttccatctgttttccttaaacatgggattgtgcaaggagcctcgccatg

SEQ ID NO: 147579 - DNA, 201 bp, Homo sapiens
caaggtgagtggatcacttgaggtcaagagtttgagaccagcctgaccaacatggtaaaaaccagctctactaaaaatacaaaaattacctggacgtagtrgtgggtgcttgtaatcctagctactcagaaggctgaggcaggagaatcacttgaacctggggggcagaggttgcagtgagctgagatagtgccacttcat

SEQ ID NO: 147580 - DNA, 201 bp, Homo sapiens
tcctctttcttcttgggagcaggtataagagcagaggtggagaccgtagcacccatctgggttggggatttgcattttgaatgtgggggtagagtgcataygggagctgagagcagagtggggtgatggttcagatgagccctggtgggggccagcatggagcctaacagtcaacggcaaagggaccctccatagaggaag

SEQ ID NO: 147581 - DNA, 201 bp, Homo sapiens
ttccccaagccaagggagatgactctggaggaaaagataaagatgaccacagtgaatttgcaggtcatcttttgtgcatgtgcttggttgaaacatccttrgaacctttcagtgagggaaaggtcctctctgaagaagtgcttgccttaaaccagggtttctcagtctcagccttattgtcatttggggcataatccttct

SEQ ID NO: 147582 - DNA, 201 bp, Homo sapiens
aactgcattttgacatggctggttgggataacaaggtatctggaagcccgtgtcatgggagcaagggctctgaggagttctggaaaagaaaaggcatctcwcaggtcccctcctttaatggaagtattgaatgctggaggaaacgtcattgttctacaatatgcccaggacagaatgcaactggagtgggtgttaagaggc

SEQ ID NO: 147583 - DNA, 201 bp, Homo sapiens
tggctgacacctgtaatcccagcactttgggaggccaagggggacggatcacctgaggtcaggagttcgagaccagcctggccaacatggtgaaacccccrtctctactaaaaatacaaaaattagctgggtgtggtggcacgtgcctgtaatcccagctactcgggaggctgagtcaggagaattgcttcaacccgggag

SEQ ID NO: 147584 - DNA, 201 bp, Homo sapiens
tggaggaccttttttggtatcattggaatgtagtgtggtgggcagcatattcccctcttggcattgttccctcactccttagcaccatcctgcaagacacrtgtcatgacgcttaaatggcagtgagtcagtggaccctgcagcactcccagggtcaccctgagttcagggattcatgtctgaggcccatgctcctggcta

SEQ ID NO: 147585 - DNA, 201 bp, Homo sapiens
atagacaggttgcttcctctattctggtgtgggctgtcccacttttgggcatttctgactgtaaaaaagtcctgccttagttaaactgtttcccaacctgyggatgatctccattgactctcgtggacccccatgggaaccatcatcctaaggattggttcttcttctacctggaagtgataatgcctctggatgctcatc

SEQ ID NO: 147586 - DNA, 201 bp, Homo sapiens
catagtgctttctgtctcctctttttgctttgactttgcactccagcagctctgacctgcttgtagctcccctctgcccccatagcgtgtccggcctgttrtgtctggttatgctgctctgtctacccatttctccctccttctccatttcctcccaccctcaccttggcaaactccctcttagcctttaagactttacat

SEQ ID NO: 147587 - DNA, 201 bp, Homo sapiens
tgctctgtctacccatttctccctccttctccatttcctcccaccctcaccttggcaaactccctcttagcctttaagactttacataagcatcttttctracaggaagccaaccttctgcctgtgttggggtttctcgtctaccagcccacaataccccctgtgcttctttccatcattagatttattacattatatttt

SEQ ID NO: 147588 - DNA, 201 bp, Homo sapiens
tcagttcaccctaaaacttaatggtctgaaacatttacttattagttcagttgtttctactgggctgacctgtacggttcttctgctgggccacttacgtrcctgcagcaagctggcaagttagcaagcgtcaaattcactgcccatcctgaatggagaagtggataggagaagtaagcaatcaacaaatagataacagtt

SEQ ID NO: 147589 - DNA, 201 bp, Homo sapiens
aggttcaagtgattctcctgcctcagcctcccgagtagctgggattacagacatgcaccaccacacccggctaattttgtatttttagtagagatggcatktctccctgttgttcaggctggtctcgaactcccaacctcaggggatccgcccacctcagcctcctaaagttctgggattacaggcgtgagccactgcgcc

SEQ ID NO: 147590 - DNA, 201 bp, Homo sapiens
tcttgttactgcccctaattctgcatatacttagattaaatagtccttttattaaatcttccttagattccccaggagagtgtgctgtttccacccacacmctgcctgataggatgaagtaagtgtagcaacatggatggagctggaggccattatcctaagtgaactaactcagaagcagaaaatcaaatatcacatgtt

SEQ ID NO: 147591 - DNA, 201 bp, Homo sapiens
gccattatcctaagtgaactaactcagaagcagaaaatcaaatatcacatgttctcacttacagatggaagctaaacaacgggcatacctggatacaaagytggaaataatagacactggggtctccaaaagaggggagggtgagagctgtgtgaggggtgagaaattgcctgctggatacagtgttcaacattcaggtga

SEQ ID NO: 147592 - DNA, 201 bp, Homo sapiens
aaaatcaaatatcacatgttctcacttacagatggaagctaaacaacgggcatacctggatacaaagttggaaataatagacactggggtctccaaaagargggagggtgagagctgtgtgaggggtgagaaattgcctgctggatacagtgttcaacattcaggtgacaggtatactggaagtccagtctccaccattac

SEQ ID NO: 147593 - DNA, 201 bp, Homo sapiens
aaatcttgctgctgctcactctttgggtctgcgccacctttaagagctgtgatactcaccacaaaggtccacagcttcactcttgaagtcagcgagaccargaaccccccggaaggagccaactccgcacacagtttgatgtcttgctgctatttttttcttcctttgcatagatttgggtgaatgtgtttcatttggttt

SEQ ID NO: 147594 - DNA, 201 bp, Homo sapiens
tttaaagggttctattaaaagtgttaccctcttgaaaataagtgtgctttggctcccatggaaactccccatggcagctaggttggggcctctgcccacartgatcttcataaatgactgtgcatagatgagagctttcatcacactggtgcttttatttttatccttgcctttggacacaaaatggcacccgtgtgtgta

SEQ ID NO: 147595 - DNA, 201 bp, Homo sapiens
tatttgcaagaaaagatgctagaacctttcacaccaaattttgactgtgtgagaaataaatcaacaatgtagtttcacagctccaagctaatagagattaractatattactctcagtattttgccaaagtgagttggtcttcaaaaatagttttaaaagaatgtatgtataaaaagtttttaaagacaggaagtaaaact

SEQ ID NO: 147596 - DNA, 201 bp, Homo sapiens
tgacatatttcaaaagatagtaaaagagtaatatagacacacttgcacactaatgccaacgctgacaattgctgcgacctgttggagagaaattaatacartgtgggaagaccttgacccagtatgaccaccgtagggactctcccttaaaaagagaaccctaacaatagaaaaaccttttataaaatattgctttataat

SEQ ID NO: 147597 - DNA, 201 bp, Homo sapiens
atatatttcagtatacacacacatgcctatatgtgacatgtacacatatacagggtcaaaatgcagactagcagaaaatacataagaaataggacttttgygtgttgtgtttgggtggtagaaataaaggtaatcttgtttttttttgagacagattcttgtcctgtcatccaggctggagtgcagtggcctgatcttgat

SEQ ID NO: 147598 - DNA, 201 bp, Homo sapiens
gatgcctctaggaagtgctttgttcagcatttcaggcaggatggctgggatttcttttgtatattaataccccctggcatttgttcagcacttcatccagkgcccagggtttccaggtcaccatcacactacctctgtccaccctcttctcatctccagggcatatgccagctgccccagtcacagtcttgaagctcttgc

SEQ ID NO: 147599 - DNA, 201 bp, Homo sapiens
tatttcagtatacacacacatgcctatatgtgacatgtacacatatacagggtcaaaatgcagactagcagaaaatacataagaaataggacttttgtgtsttgtgtttgggtggtagaaataaaggtaatcttgtttttttttgagacagattcttgtcctgtcatccaggctggagtgcagtggcctgatcttgatgca

SEQ ID NO: 147600 - DNA, 201 bp, Homo sapiens
gtttacctcctgggcaggaaagtggatcagcttgtaaaaatttaatatttgtttgctagcatgatctgctttcacactctacagccttgttggcaggatgragctgggttatttgccttactttgcatatcaagtagttgtttttggttttgtttttttaaacttcacttgtgcccctgaaggacgtggtgaataaaagag

SEQ ID NO: 147601 - DNA, 201 bp, Homo sapiens
ctcacagggacctggaaacagtgtctaattcccagttctggtgggatttcccctgtgtcttactctcttggctgatgatcagtagatctatttatcacttstaggagctgcgccttaagtcttcatttcagcctcttcatatggacctcactgaggctctgagggggaagtgactgcttagacccaccacccacccaccca

SEQ ID NO: 147602 - DNA, 201 bp, Homo sapiens
cttctgtcctatgtgtgtgtcctctattgctgtcaggtgaagagtgtcgcgtgatgactaggtcctcttatttatctgagaataaagagaaggcagcagtrgtaatctattcaattacagttttaaaagaataagcataagctttaacaatactactgcccactaatctttaatgacacgtaaatggaatatgatttaaag

SEQ ID NO: 147603 - DNA, 201 bp, Homo sapiens
aattgtccaaggtcacacagctgataagtagcagagctggagttcaaaggcaggccatctggcacaagagtcggctttgaaccatttcctcctgcctctcstggaggaaatgtgtccctgacaattccttcacctgtgagctggaaggaaggaagaactcgacagcagccagctccctttgcctcggcatctgcatggtgt

SEQ ID NO: 147604 - DNA, 201 bp, Homo sapiens
cacatctcatctcaaaacctctttctctcatccatattgccttgctttctcattcctttgccatttagtaggtaatgatttctattaagatgatcatcagsatttattgagcagagaggtagatattgacactgactgggaggcatgatccgagtggggagggaattctgtccctgcaccccaattcccccagtcttgcct

SEQ ID NO: 147605 - DNA, 201 bp, Homo sapiens
gtagattgctaaatcctcaggtgtcattcacatgatttcccattgccttggtcaaaagccatgcttacgtctagcactattgaagctagtcagtttaaacrgctatgagggacagctggagacaagagggcttctcgtagtctcccaaagtcacataggcacccacacgcatgtacacacacatgtgtgcccttctttgcc

SEQ ID NO: 147606 - DNA, 201 bp, Homo sapiens
gaagtctttagagcatggtctgtcatcactgaaagtcaattctgtgctttcccagtctctatttctattcaaatttccaagagtaagaaactgatgtgctyagcctgggtcaagtgtctaatcctaaacaacctgcccttgccaggggtgcaggtagggcaggcagagagctctgagagcttgcttctatgtataggggca

SEQ ID NO: 147607 - DNA, 201 bp, Homo sapiens
tttcacaaggttgtgtgattgtcacaacgaattccagaacattttcctcactcccaaaagaaaccccatatgcattatcagtcactgccactctcctcttmttctagctcctgataaccatgttctgtctctgtggatttggactgggagagacataaaggataggggctactctccctcccgtcttaaatgcgtctcagt

SEQ ID NO: 147608 - DNA, 201 bp, Homo sapiens
ggctgtgttcatcagggtcatagtcagttgctgactgagatttcctaaagcttggcttcatgctccttctttcacaccattcagactgttgaggcctgtgrcagctgtcaagactgtgctgtccatcctccagctgcctggagtgagccccactgctcttcgacaggggctgctggggactgggtatcactgaccccgtgg

SEQ ID NO: 147609 - DNA, 201 bp, Homo sapiens
gggtcatagtcagttgctgactgagatttcctaaagcttggcttcatgctccttctttcacaccattcagactgttgaggcctgtggcagctgtcaagacygtgctgtccatcctccagctgcctggagtgagccccactgctcttcgacaggggctgctggggactgggtatcactgaccccgtggaactgaaatgcctc

SEQ ID NO: 147610 - DNA, 201 bp, Homo sapiens
cgcctcccgggttcaagtgattctgctgcctcagcctcccaagtaactgggattacagcacacgccaccacacctccacatctggcaatttttgtattttkagtagagatggggtttcgctatgttggacaggctggtctccaactcttgacctctggtgatccacccacctccgcctcccagtgtcctgagattacaggc

SEQ ID NO: 147611 - DNA, 201 bp, Homo sapiens
gattctgctgcctcagcctcccaagtaactgggattacagcacacgccaccacacctccacatctggcaatttttgtatttttagtagagatggggtttcrctatgttggacaggctggtctccaactcttgacctctggtgatccacccacctccgcctcccagtgtcctgagattacaggcatgagctaccacgcctgg

SEQ ID NO: 147612 - DNA, 201 bp, Homo sapiens
ttatttaacctaccctgagctgtggttgtctgatgtgtacaataatgggtggaataatgatagacaaatattaggagtttggggtggattaagcacccacyatagagccagacatatataatgaaataaccaccgttccttgtgtggttctagaaccttatgtgctaaattctagaaatttaggatcattaataataacaa

SEQ ID NO: 147613 - DNA, 201 bp, Homo sapiens
tactaaaaatacaaaaattagtcagatatggtggcatgcacctgtagtcccagctacttgggaggctgaggctgagaatttcttgaacacaggaggcatakgttgcagtgagctgagattgcaccattgcactcccgcctgggtgacagagtgagactgtgtctcaaaaaaaataaaaaatttaaaaaaagaatggataag

SEQ ID NO: 147614 - DNA, 201 bp, Homo sapiens
aagaggctggagaaagcagggccagatcttatagagttagctggaggcgaagctcactctcccacatggaggtcccgtgtgctgcctgggttctagccacwttcttctatattgcttggttgtactacagttactattctgggattcatgcacggcccatctcccttttcgttctcagtatgttcatggtaaactgctatt

SEQ ID NO: 147615 - DNA, 201 bp, Homo sapiens
gtctggtactggaggaccgcgttccatctttggccataactggactaagattgtacctataacacatgcctagctaactcttgtgctcccatgtgactaaytgggtctcaagaatttggacagacaaacagggtgtaaactgttggtctggaccaggagaggctgactcagggcaatggtaccactttggcaggcatcctt

SEQ ID NO: 147616 - DNA, 201 bp, Homo sapiens
aatctcctgacctcgtgatccgcccgtcttggcctcccaaagtgctgggatcacaggcgtgagccactgctcctggcctattattttttccttattactcrttctcttcctcttgctcccctccacttcctggtactccttctcccctcccttgtctttctccccaatccgcccactttgtattcataattctttattgtt

SEQ ID NO: 147617 - DNA, 201 bp, Homo sapiens
taattatgccaaagagaaaaccctgtcccccaaatgctcccaaggaatatgactgggttctataatttggatattagggatgcacatttgactacaggttkatgtcactcacattcctgtttttaggcatttgtacatgctttattagatgcctctaggaagtgctttgttcagcatttcaggcaggatggctgggatttc

SEQ ID NO: 147618 - DNA, 201 bp, Homo sapiens
atgccaaagagaaaaccctgtcccccaaatgctcccaaggaatatgactgggttctataatttggatattagggatgcacatttgactacaggttgatgtsactcacattcctgtttttaggcatttgtacatgctttattagatgcctctaggaagtgctttgttcagcatttcaggcaggatggctgggatttcttttg

SEQ ID NO: 147619 - DNA, 201 bp, Homo sapiens
acttctgatcatgcggtgttgggatcatctggaccacacagctacggagagttagagctgagaggggactcggagcacatctccagggccccgcctttcaraaggcaaaactggcttgaggaaaaggaaggggccggctcaagataatggacctttaaaacaaacaaacaaaccggaaaggacaattctgccattaattga

SEQ ID NO: 147620 - DNA, 201 bp, Homo sapiens
cagcaggcaagaaagcttgtgcaggggaatgcccttttttataaaaccatcggatctcatgaaacttattcactaccacgagcacagtatggggaaaaccraccccatgattcacttatctccacctggccctgcccatgacatgtggggattattacaattcaaggtaagatttggttgaggacacagccaacaaataat

SEQ ID NO: 147621 - DNA, 201 bp, Homo sapiens
gtccttgatgaaccatacatgtcataatgggttgcttccagctcttgaccacattttgttgatttcgttaatcactcaagaccaagaaaacatacctggayttaagccccggtctctgtttgatacctgacttctgactgctttttacttccaaggatcctccagctttaggagttgagaagaattttatacaatgtggcc

SEQ ID NO: 147622 - DNA, 201 bp, Homo sapiens
agaggatgacctgagctttctttcccacacttccccgggccaatgaccaccccgccctcatgggggaaagaccttggcctggtgtcacagggactctgtcyctctgcctgtcccctcttttcaggaagtctgtcatccagctcgatcttgccaacaccaagaaagcaatgattgtccccgcgttcgagacactgcgctacc

SEQ ID NO: 147623 - DNA, 201 bp, Homo sapiens
ctcacactccccacagacggaaccctctgcacttccaccttattgctgactccattgcggagcagatcctggccacgctcttccagacctggatggtgccygctgtgcgtgtggacttctacaatgcagacgagctcaaggtatgggcaggaggggaggcacttccgtgatctcctctagctggaagcgttattacttgtg

SEQ ID NO: 147624 - DNA, 201 bp, Homo sapiens
gtgtacaataatgggtggaataatgatagacaaatattaggagtttggggtggattaagcacccaccatagagccagacatatataatgaaataaccaccsttccttgtgtggttctagaaccttatgtgctaaattctagaaatttaggatcattaataataacaaagataaatcccatgtatgcagagcgaagagattt

SEQ ID NO: 147625 - DNA, 201 bp, Homo sapiens
agtctggtctcagaggtgtttctgctcatatcatttggccataggtagcaggcagttttcctgtacagcatcctatgtatcggtcagctgtgggcagctcrcctaacttctctccagtaaggaggtcggcctcattcctggtttccagggtatccttcagacccatggtctattcaatattttaggacacatttgaacgaa

SEQ ID NO: 147626 - DNA, 201 bp, Homo sapiens
atattaggagtttggggtggattaagcacccaccatagagccagacatatataatgaaataaccaccgttccttgtgtggttctagaaccttatgtgctarattctagaaatttaggatcattaataataacaaagataaatcccatgtatgcagagcgaagagatttaggtaaacttaagaaaaggcattcatctcaaac

SEQ ID NO: 147627 - DNA, 201 bp, Homo sapiens
actggatccttctcagcagcttggacatcgtcagcctggtcaagtgtcatcctctctaaggccctggctcgttccatcctgtgtgtgtgcacagatgtccrtatcctgggtctctgcttggcaattctgcagacacttccagagctaagcacactctggttccctagtttctctctggctttctcagatgtgcttgatatt

SEQ ID NO: 147628 - DNA, 201 bp, Homo sapiens
gtggattaagcacccaccatagagccagacatatataatgaaataaccaccgttccttgtgtggttctagaaccttatgtgctaaattctagaaatttagratcattaataataacaaagataaatcccatgtatgcagagcgaagagatttaggtaaacttaagaaaaggcattcatctcaaacaagtacttacgcgcaa

SEQ ID NO: 147629 - DNA, 201 bp, Homo sapiens
aacattgattttataaattttgttatagggaggttgaatgtttttcccattcacctggatactccctgtattttactaatggactcacagtaaaatgatgrgcctgcttgtgccagggggcaggtgtggccccgggagctctccctttctcacctgacagatgcatctagtgtcagggcagtgagagagggaagccagcat

SEQ ID NO: 147630 - DNA, 201 bp, Homo sapiens
cacctggatactccctgtattttactaatggactcacagtaaaatgatgggcctgcttgtgccagggggcaggtgtggccccgggagctctccctttctcrcctgacagatgcatctagtgtcagggcagtgagagagggaagccagcatgttttccccattccctcccacatctttagtagccatgatattattcagcta

SEQ ID NO: 147631 - DNA, 201 bp, Homo sapiens
aggccaaggcgggtggatcacctgaggtcgagagttcgagaccagcctggccaacatggggaaaccctatctctactaaaaatacaaaaatcagctgggtrtggtggcaggcgcctgtaatcccagctactggggaggctgaggcaggagaattgcttgaactcaggaggcggagggtgcagtgagccgagattgcgccac

SEQ ID NO: 147632 - DNA, 201 bp, Homo sapiens
gcttgtgccagggggcaggtgtggccccgggagctctccctttctcacctgacagatgcatctagtgtcagggcagtgagagagggaagccagcatgtttyccccattccctcccacatctttagtagccatgatattattcagctagaattggtctcgcgtgccagttctggatctactgaagatgacagaattcttact

SEQ ID NO: 147633 - DNA, 201 bp, Homo sapiens
ttcagattgatggaaatgttttagaattagataaaggagtggttgctcaacatcgtgaatgtactaaatgccatgaattgtacttgttaaagtggttaatkttatgttatgtgtattttgctgcaataaaaagaaaaagcccgtctcactacaaggatatttatgtggctcaaatcagggggtatcttgaaacaagggtta

SEQ ID NO: 147634 - DNA, 201 bp, Homo sapiens
ggaaatactgtctccaaatatagactctaaaagaaaagatggaagggggtggaacagactctgcaagaatctgttcatgacaacgctgttgaaaacagctmaaaattgaggcttcagcagtgcccagtgttgccaggtgtgtgttgtgttgtgctgtattgtgtgtgtttccaccacagagccctttgtggctgtgggacc

SEQ ID NO: 147635 - DNA, 201 bp, Homo sapiens
aggtagggaccatgtgtaggtggattatcatcttttccaggcctcactgatgagtgtcgtgccttgcaacagtagtgctcagggaatcaggctcagttgcragaggctcccggcagatgagggtactgcccagaaggatcatggagagctcaatgatggaatgttcacaaagcttctggccctaagagagcactcggtgag

SEQ ID NO: 147636 - DNA, 201 bp, Homo sapiens
gtgtccctggctcccaacttatgttcatgtttgtggtgtttgtgtctgcctgactatcctgtacactctcttgaggcccctcaagagcaggggcccatgtsctgaccatctctgcatccccattctccagccctggacctggcctagcatgtaccccagtcagtaggtgccttgtggactgtagtgaatggcaaagcgtag

SEQ ID NO: 147637 - DNA, 201 bp, Homo sapiens
tgtttgtggtgtttgtgtctgcctgactatcctgtacactctcttgaggcccctcaagagcaggggcccatgtcctgaccatctctgcatccccattctcyagccctggacctggcctagcatgtaccccagtcagtaggtgccttgtggactgtagtgaatggcaaagcgtagagaaaaggtaaagcaatagctgtcttc

SEQ ID NO: 147638 - DNA, 201 bp, Homo sapiens
tgtctaattccctctttgttggtctgctgtagattagcctaagtaaaagtgaatagacaatttcctattaacatttatattgcttttcttttctatttctyggcaaggccctgaaaactaggatggctgtggaaaaatgttgttttatctaaataatgtccctactgggggctaggttctggcttttggctgggccttgga

SEQ ID NO: 147639 - DNA, 201 bp, Homo sapiens
gcctagcatgtaccccagtcagtaggtgccttgtggactgtagtgaatggcaaagcgtagagaaaaggtaaagcaatagctgtcttccctgtatcatttgrcaccagagatatttgtatgaaatctccctaggccttggaacttggaagaacaatacactgcacgttagacaagtcaggacccttcaacactaagggatgc

SEQ ID NO: 147640 - DNA, 201 bp, Homo sapiens
gattacaggcatgcaccaccacacccggctaattttttgtatttttagtagagatggggtttcaccgtgttagccaggatggtctcgatctcctgacctcrtgatccgcctgccttggcctcccaaagtgctggaattacaggtgtgagccaccgcgcccggccagaaccgactttttagagttgagtaagttgaggcaca

SEQ ID NO: 147641 - DNA, 201 bp, Homo sapiens
aaagatcatggtgtccagaaataacaaggagataagcagagagttcaggctgtgtactaaggagcttggaatttaaactatgggtcacagtactaaaatayttctgatctgacctattccaatgcaaacatatttttactgtggtacatgaatacactataaaacagaaaagtttcattttattatatgtttgagtaattt

SEQ ID NO: 147642 - DNA, 201 bp, Homo sapiens
ctgatcaattcccacctacgagtgagaacatgcggtgtttggttttctatccttgcaattgtttgctcagaatgatggtttccagcttcatccatgtcccyacaaaggacatgaacttatccttttttatggctgcatagtgttccatggtgtatatgtgccacattttcttaatccagtctgtcactgatggacatttgg

SEQ ID NO: 147643 - DNA, 201 bp, Homo sapiens
taggctgcatcttctgggtaatccggggtgaattgcctccatcccagacccttttcaggtggaggaggctggggttaactgatttctaaggctatttccascttggatattctagggtgagatgggtgttgactctcatttatctgttttaaagggttaaatttttttttattgtttttttaaaaaatgagttaagatgag

SEQ ID NO: 147644 - DNA, 201 bp, Homo sapiens
ttaagacaaatcctcacccaaagacttggagctccatgtggtctttgccccagagctaactattgcaccaaattttggatttatcacttccatgtactttstggttataacagtcacgatcacaagcaatatgtatttcttttgcctcttttagctttatacagtggaagcattctatattaatacttctgtgacttgctt

SEQ ID NO: 147645 - DNA, 201 bp, Homo sapiens
tctggtactggaggaccgcgttccatctttggccataactggactaagattgtacctataacacatgcctagctaactcttgtgctcccatgtgactaacygggtctcaagaatttggacagacaaacagggtgtaaactgttggtctggaccaggagaggctgactcagggcaatggtaccactttggcaggcatccttg

SEQ ID NO: 147646 - DNA, 201 bp, Homo sapiens
actggactaagattgtacctataacacatgcctagctaactcttgtgctcccatgtgactaactgggtctcaagaatttggacagacaaacagggtgtaarctgttggtctggaccaggagaggctgactcagggcaatggtaccactttggcaggcatccttgttcccatgtcgactggagaggcaggcacccttgggca

SEQ ID NO: 147647 - DNA, 201 bp, Homo sapiens
aacagactgagagacacaggaccaggcagaaagagatcaaaatattactttttgttccaacagtttagagaatgtgtctcaaccagatagacttacttccycacccaaactggtcaggagcatagcaaacagtatcaagtcctctcctaggaacacatggcacatactgtctacaggcagacagaccctggaagaacagga

SEQ ID NO: 147648 - DNA, 201 bp, Homo sapiens
agtgcctgtaaaacgtaacagagaaacgtaaggaggctggctgttcactaccctgaccctctctcctgcttgtgctcccagagagtcaggagaagcctgarcaaagagatcaggagccagaaaaaggaatagtcaggaataaaagcaaaagtcaggatgaataaaacgagaatgagctgtgaatctggcaaggcagcaggg

SEQ ID NO: 147649 - DNA, 201 bp, Homo sapiens
gctgttgttccctaaagctgttgagaacacagcacctgccttcaaggaactcagaaacaaggcagagtgcattgcgtttttatctatcaccagcaaaggaytacaaaacatcagaagttttcccatgcccaccctaatttttctggaaaaatacagaggtgaaaagaaaataagtaaagctcatctcttctccatatgtcc

SEQ ID NO: 147650 - DNA, 201 bp, Homo sapiens
tccaccttcatggtatgaacagctcccaaaggccccaccttctaataataccatcacattgcgggttaggattttgacaaagcaattttgggggggacatmgatattcagaccacagcagaactcattcgatgttcacgtgctgttcttttcacttggaattctgtttccttcacttccccaccctggcctcgataacccc

SEQ ID NO: 147651 - DNA, 201 bp, Homo sapiens
aaaaataccatcaactgggtgatttttttttttttcttgtgagatggagtcttgctcttgtcacttaggctggagtgcagtggcacgatgtcaactcaccrcaacctccacctccaggctcaagcagttctcctgcctcagtcccccgagtagctgggattacaggcacccacccaccacgcctggctaatttttgtattt

SEQ ID NO: 147652 - DNA, 201 bp, Homo sapiens
ttttttttattacttttttttttcgttttttaaaaattgaccttttgatgtcatctaaaattaatataagcatcttctgggtcatgaatgtgactacttayaaccaaatactggtcctaggtgaggcattgctttggtacaaagtggtccctcttcaattgaagaaagagaatgaagtgcagaggggcctgactgtggaac

SEQ ID NO: 147653 - DNA, 201 bp, Homo sapiens
tttcttggttggaagggaaatggaagggcatttgcaaatgcagaaggaagggattttcatgaggtcattgaagatggtgacaaaatggaagggaggaaggrgtttgtttctcaaacagtgttccttcatgggctcatggatgttctgtaagacttttttttattacttttttttttcgttttttaaaaattgaccttttga

SEQ ID NO: 147654 - DNA, 201 bp, Homo sapiens
ccatgcttggctaattttttgtatttttagtagagatggggtttcaccatgttgcccaggctggtttctaagtcctgatctcaggtgatcctcccacctcrgcctcccaaagtgctgggattacagcggtgagccactgcacccagcctgtgtgaggatatattcgaaggtgctttgtaggtagttggagggctccataaa

SEQ ID NO: 147655 - DNA, 201 bp, Homo sapiens
tttttccccgatatccttgtaggtatcagcatgccaagaataggggttgacttttttaaaaaggtgaggtctcctcgaatgaggtcgtgctaatgcagtgsgtgaggaattacaaatatggttcaatatcaactctgcttggatttgaaaaataatagagtaaaacagaaacttgtttacatgtctttagtaaatgaagat

SEQ ID NO: 147656 - DNA, 201 bp, Homo sapiens
tgtggaaaaatcaccgcccatggccagcccttggaagaggctacaacacaggtaaatcctcagggtggtatgggaagagttgcagaaggtgatatgaggayccagtgctccttccgcaggagaggagattgcaaaagctcaggaggaggccacctgattgcttgaattcagtggtggatggtttgtgggcagtttgcattc

SEQ ID NO: 147657 - DNA, 201 bp, Homo sapiens
cgggcgtggtagcgggcggctgtaatcccagctactcgggaggctgaggcaggagaatggcgtgaacccgggaggcggagcttgcagtgagctgagatcaygccactgcaccatcctgggcaacagagcaagactccgcctcaaaaaaaaaaaaaagaaaaagaaaaagaaatgtttctggtcaatttggttagcaagcat

SEQ ID NO: 147658 - DNA, 201 bp, Homo sapiens
cttggaagaggctacaacacaggtaaatcctcagggtggtatgggaagagttgcagaaggtgatatgaggacccagtgctccttccgcaggagaggagatkgcaaaagctcaggaggaggccacctgattgcttgaattcagtggtggatggtttgtgggcagtttgcattccagttccttcttggtgctatacccacagg

SEQ ID NO: 147659 - DNA, 201 bp, Homo sapiens
agtgggctctgaacagcttcttcacctataaaattcagagatgaagtccaccgggactcttggatcagaatcaatcctctatttccttgaacagagcatasttctggcacccccgccagccctcatgtcatcccattttgcattttatttagtcatttacacacataccactttggattgtgaggcagcattcagccttcc

SEQ ID NO: 147660 - DNA, 201 bp, Homo sapiens
cccagtattggtccttgtgaaatgcttatgtgtatttgcttaagcagaatgaaaatgtgaggcctgcctgcttacgtcgtccgtttccagaatgaaaatcrgaagaacaaagatcgaaatactccaaggcagggcttcataggtagtcccatggatgtgattaagggctgatttaacattcagaagaaaaacataaaaatc

SEQ ID NO: 147661 - DNA, 201 bp, Homo sapiens
ccccttcttctccccaagtgtctgagttagcaggtcttgggaggcctcagaatgtgcatttctaactactgtgtaggtgatgctgctgttcccaggacaaycctttgagaaccactgtccttaaggaatacgtagatttgttgcctttcctggaggcaacaaatctcatgctcctggagagaaggaaacaaatctatgtac

SEQ ID NO: 147662 - DNA, 201 bp, Homo sapiens
cagaagaacaaagatcgaaatactccaaggcagggcttcataggtagtcccatggatgtgattaagggctgatttaacattcagaagaaaaacataaaaaycagccttcctgaagctgtagtctgaccctgggaagaatgtatatcctcaggaaagataaatttgcattaaagatctctttggcaatgcattgttgaaaga

SEQ ID NO: 147663 - DNA, 201 bp, Homo sapiens
ggctgatttaacattcagaagaaaaacataaaaatcagccttcctgaagctgtagtctgaccctgggaagaatgtatatcctcaggaaagataaatttgcrttaaagatctctttggcaatgcattgttgaaagaggttaatattgtaagtggaaaattttgattacttctcgattctttcctcccatttgcttctgtacc

SEQ ID NO: 147664 - DNA, 201 bp, Homo sapiens
aatgcctaggaagtaatgtgctgctgactatcttactgttttgaaatgcattaaaaaaccaaagatgtgttgatagatggatagaaggataaatatgataraagcaaatatggtaagagggtcttggtacatcacaggggcagctatatatatgttcattgtagaattctttcaactttactgtgtatttggaatttttca

SEQ ID NO: 147665 - DNA, 201 bp, Homo sapiens
taagtggaaaattttgattacttctcgattctttcctcccatttgcttctgtacctgtgtcaccccagagagatctctatgctagaagtaatgtccacacyacctgcctgcctgtggctcaattaaacttgagttcctgcccttttaaagtacaatccagattgtgtgcaacaatacaaagggtggaaattaagaaaactc

SEQ ID NO: 147666 - DNA, 201 bp, Homo sapiens
actatcttactgttttgaaatgcattaaaaaaccaaagatgtgttgatagatggatagaaggataaatatgataaaagcaaatatggtaagagggtcttgrtacatcacaggggcagctatatatatgttcattgtagaattctttcaactttactgtgtatttggaatttttcataataaaatattagggaaaaatctga

SEQ ID NO: 147667 - DNA, 201 bp, Homo sapiens; identical to SEQ ID NO: 27332

SEQ ID NO: 147668 - DNA, 201 bp, Homo sapiens
gttgcccagagccattctggggtttctatatttatttctttcaatgacatccatagcaaatttgcactgctctcaagccaaaggttgatttgttccatggsctgcccagtcaacctggggtccccctggagatgaggacttggggtctggtgccctgccagctctggtgtaggttccagagctaggaaataactggcaggc

SEQ ID NO: 147669 - DNA, 201 bp, Homo sapiens
ccacctcacctttttctttacatttccttcttctgagcattttgcctatctcttcttctttctgtcatttctactttttggactcctcaatatattccttmttcccagtacccatttcctttttgcctctttcttttgcattccccaaatcacttctcccctaaccctgttccttgcctgtttggtttttgccttcggtca

SEQ ID NO: 147670 - DNA, 201 bp, Homo sapiens
gcctcttactagtagtgtataatccttggccagttaattaatctctctaggccttaattttctcatccgtacagtggggactggaaatagtgtttatctcrtaggttattttgagaattacataagcagctatatgcaaaaaaatatagaaaagtgcttgacatataagtgctacttactactagttgccttgacttattg

SEQ ID NO: 147671 - DNA, 201 bp, Homo sapiens
gtcttcttttgaaacacagcacgtggttcatacgtggtacataacaggtgctaactaaatgctcctttaagtatgttagttcaggtctcgaagttaacctrtactataaattgtgcgtgtgtatgtgtgtgtgcgtgtttgtgtgtgtgtgtgagagagcgagcttacagtttttgttatttacttatttatttattgtct

SEQ ID NO: 147672 - DNA, 201 bp, Homo sapiens
ctactatatgctggatgttgcagatagaatggaaatttaaaacatacactccctctcctcatttgaaacttctgcactcagcagaagagagaggtattgcragcatgcaagcatacagatagattgtgatatcactgcaattgagctccacagaggagaaagccatgctgccaagacagctcatgaagtcaacaaattggg

SEQ ID NO: 147673 - DNA, 201 bp, Homo sapiens
ggcacagggcttgtatatgtaggggctcctgaaatccttgttggtgaagatcgttggtccactgaggactcttcagagccaaaagatggaagtataaagtrcagtagatttcaccagcaatttcagaaagtttagcaaggcttgaaccaggatatcctcttggccaatcagccgcgtcatccccatcctgacactgtctct

SEQ ID NO: 147674 - DNA, 201 bp, Homo sapiens
atgaggcagcatgcttaggaaaatccaggtgagtgacagtgcccgttcaaatctggttatgtaagaaatggtgggaagaattgaggatgtttaccttggaraagcagaggctcagggtgtacatgctcagcttcagcaaacagacaaagggctgtcccctgaaagaaagattgggattgctctggtggccccaaacctatg

SEQ ID NO: 147675 - DNA, 201 bp, Homo sapiens
aggcaatgcctccatgaagctccctgctggttgctacagacaacagtgcatttcccaaagggcccgcagagacgttattttctttgtaattaaacatcacmacaacgttgcaatccatttattgacacccttgagtttttggtttcgtggcaggtgaagccataaataaggggcagagttgctgcctgtattcatggaaat

SEQ ID NO: 147676 - DNA, 201 bp, Homo sapiens
cttggcacacagtttgggaaccatggttctaagatgttgtatatgccgtttcctctgcttgaacatgtctctcaatctagcgtcttggtgctcacctttcyaatctcaacatgtacgtgatgagtcctcgaagtttttcccttaatctttaagactgagctgggaggtgcttccaaatgctacttcagcactctgtccttc

SEQ ID NO: 147677 - DNA, 201 bp, Homo sapiens
ggaatagattagatgctgttgttccctaaagctgttgagaacacagcacctgccttcaaggaactcagaaacaaggcagagtgcattgcgtttttatctakcaccagcaaaggagtacaaaacatcagaagttttcccatgcccaccctaatttttctggaaaaatacagaggtgaaaagaaaataagtaaagctcatctc

SEQ ID NO: 147678 - DNA, 201 bp, Homo sapiens
gaggaatagattagatgctgttgttccctaaagctgttgagaacacagcacctgccttcaaggaactcagaaacaaggcagagtgcattgcgtttttatcyatcaccagcaaaggagtacaaaacatcagaagttttcccatgcccaccctaatttttctggaaaaatacagaggtgaaaagaaaataagtaaagctcatc

SEQ ID NO: 147679 - DNA, 201 bp, Homo sapiens
ctgtgaagaggaatagattagatgctgttgttccctaaagctgttgagaacacagcacctgccttcaaggaactcagaaacaaggcagagtgcattgcgtmtttatctatcaccagcaaaggagtacaaaacatcagaagttttcccatgcccaccctaatttttctggaaaaatacagaggtgaaaagaaaataagtaaa

SEQ ID NO: 147680 - DNA, 201 bp, Homo sapiens
agagacacaggaccaggcagaaagagatcaaaatattactttttgttccaacagtttagagaatgtgtctcaaccagatagacttacttcctcacccaaaytggtcaggagcatagcaaacagtatcaagtcctctcctaggaacacatggcacatactgtctacaggcagacagaccctggaagaacaggagagcagggc

SEQ ID NO: 147681 - DNA, 201 bp, Homo sapiens
tgctgaagtaattaatagtcacttttattttagaatttgttttatatttaacaaagcagcctgtcatggcttctcttcatgcccagggcaaggtcctttcytttttttttttttttttttttttttccccttaagtgcatttataattacattgatcagctctgagtttgtgatatgccaagtccttgaatgtgatactca

SEQ ID NO: 147682 - DNA, 201 bp, Homo sapiens
gcctcaggataaagttccaagttttttggtgtgcctagaaggccctctggaatctgatccacttgtctttccagcattttctttcactggtccccacttcraccagggcttgagtcctatcacagtattttatgttcactggaagctctactccctctgatctccaaccataggatctcacattttctcattttttggtgc

SEQ ID NO: 147683 - DNA, 201 bp, Homo sapiens
tttgtttcctgtccatgagcccctccgggaccccctgcaaacaccagacccagagcctgcctccccatgttggatgttcccaatcaatggtcttggcgtgmgttgattgaacagagtccctatttgagaagagcctgacttatgtctctgctagactttagaggggaccaagaataaagggtctatttaaggaaaccatta

SEQ ID NO: 147684 - DNA, 201 bp, Homo sapiens
ctgcttggcttctggggaggcctcagggtgcttacaatcagggcgaaaggcaaagtgggagcaggtgtgtcacatgaccagaggagaagcaggagagagartacggggaggtgccatacgctttttaaacaaccatatctcacaaggatcgcaccaagagaatggtgctaaaccattcatgagaaatctgcccccatgatc

SEQ ID NO: 147685 - DNA, 201 bp, Homo sapiens
gggctacagggctgggtaggggagaaactaggatttgaacaccagaattatgcgcttaaccctgaagctgtagtagctctgttcctagaatgtggcaggtrcacatgggtcgctagttcccctctatcttcagaccactgtcgttgttctctcccaggcctgaggagccagtgggccagctgggctgggagggcttggcag

SEQ ID NO: 147686 - DNA, 201 bp, Homo sapiens
aatacagttttttttttttttttatggctagcacatagcatggtgccttgcacatagttgttgctcaaaaagatgtttttgttcaacaaaaagtgaataartcttttaaaaaggaataatggcttcatccatgtccatatggaagtcatagccagtaaggaaatgaatttctggactaattcatataaaacaaaggggcaa

SEQ ID NO: 147687 - DNA, 201 bp, Homo sapiens
tcttgaccctgagccaagtgttcatctctcagggctgtggctgcagcctgttgaaacatatgcagaagctcccatccacaggcccagggcactaaagtcaycgcagtgccttcagccttgctacattctctgcagtaccctagcaaggcagccaagcgagagccccctcctatgagacttggtgggggctctaattaaact

SEQ ID NO: 147688 - DNA, 201 bp, Homo sapiens
ttcctatagcatcaccgtttgttaatatgctgtgcgtttatctgaatgtgagctgatgacggcagggtttctgtctttttgtgtcttaggcatagagaackctcaataaatatttgttgagtgaatggagtaaatggtggcctctactagtgttagtggatccagaaaggacatggaatagtttaagatttattccttggt

SEQ ID NO: 147689 - DNA, 201 bp, Homo sapiens
taatgagaatgtatcatcagattcccatacctgtttctaccaaccacatattcagcctggtttcaaagtttatttctggtttccaagttctttggattgamtctatactactgattggataagactgaggaaatgtatgtgttaatggaaatggcaatgcattcctattgcagttgttaatctttccgaagattccagact

SEQ ID NO: 147690 - DNA, 201 bp, Homo sapiens
gatagatttcctgcatcttcagtgccttcaatgcacttctactcaacatgtagtgaaaggggcggaggtgccctgtgagacttgtgacgttcagcgggccytaataataggcctgcatggactgccttttgtctttgcttagagttcatggttaaacgtggggtttgtggtgttcccatgatacctgaataccgcttgatg

SEQ ID NO: 147691 - DNA, 201 bp, Homo sapiens
gctttaactgatgctgatgtctgggatccacccctagaaatagtgattttaatggtttgtgatgcatcttggggaccaggatcaaaaactccacaggtgakctgcataggcagccaagatttagaacactgggaaggaggcctccatatggtacaggttgaacaggaagtagagaagacacagccttaggataagggcagg

SEQ ID NO: 147692 - DNA, 201 bp, Homo sapiens
gattctcattgtgttttcccaacagcctgatgaggtggctgtcatggtgcctgacttacagaggagcacactgagaccaaatgaggttcatttccttgtaygaggtcacacacatgtgtgtgaccttggaccagatatgggtccagacaaggatgagaactccaaagccctgtcctaacttgcctggggccactgccttgg

SEQ ID NO: 147693 - DNA, 201 bp, Homo sapiens
ctgtctgtaggttccgctggcttcattggcattccccctctgatttcaccttcactggctgagctgggatagatctagataagggctgcctcccttgcgtrttcccgtcatgctgccctgtcctgacttctgcctgatagccagccttactaggtggctctccaggcccagcttgcctcctgctttcgttttatgctactt

SEQ ID NO: 147694 - DNA, 201 bp, Homo sapiens
taatgaatggtcctggaaaacaacatctcagggaatgaggaggcaggagggaacatttctgcagggataggagaaggaggaactggtagaagatgtcatgragaattgcataatgggttggttttatcttaagaagaatctttttgtttgtttgtttgtttttgaaatggagttttgctctcgttgcccaggctggagtgc

SEQ ID NO: 147695 - DNA, 201 bp, Homo sapiens
tccaggcaaagctatcccttttgtcacttgccacctgcagttctgggctaaaaactaccatatgtataactcctcttggtatttattggtttgttacatcmaattttgcaaagcctgatgcattgtttggttagaaggaatcctctattctactcccaagaggccgctcaacaggctttgatgatccgttaaacccagttc

SEQ ID NO: 147696 - DNA, 201 bp, Homo sapiens
aatgcaagttaagctgttaggtcagaggctggcacttcataaaacctctcagtaagtgaatactgttgttgtgatgatttgccattaccctgtgtcttcartagtcactgatccagatggcttggcttctccttttaagatgtttgtattctctgtacctcacaggtcagcaagtcctgggcttggtggagaaccagagtg

SEQ ID NO: 147697 - DNA, 201 bp, Homo sapiens
atcgatctgaatggttttctacgtattgtgtgactctgtgtgctctgatacagctgccttattcttgccagtctaagacaacagctcaactccttagtgcyttccctttgttcattcatttgttcattcggcagactttcactgagtactgtgtataccaggagccaagttcagaaaaaggatgacagagatagacgaagg

SEQ ID NO: 147698 - DNA, 201 bp, Homo sapiens
ggtctgacagagacgagcacctcacccacggcttaatttcatgttttggataaacactcagaggtgagtggcatgaaggggcggataagcaaagatcaccragagtgagtatttacaaaattttttcattttgctctcaccagtcttcttcctaatagctcttgctgctctgatggctctctgacaaatagaaaggaggct

SEQ ID NO: 147699 - DNA, 201 bp, Homo sapiens
ccctggagatactgttgttgaaacagatccacagaagactctgctaccattgaacttgtgttcatgaggtggagacaggcaaataaaaaggaaacagatamgtttatacttgaggagagtgttgtgatttgtggagtggagaagaataaaccaggggacagagtgaaagaaacactgtggcctcaggatgggcagggatgg

SEQ ID NO: 147700 - DNA, 201 bp, Homo sapiens
ccctcggctccttcaggctttgaggcaattccttccctcggtccttagtgtgggataatagaaattaacacttggtggggctttgccgtgtgtgctgctckaaagcacttgcatttatgttcatgacacatcacccagggaggcactagcatcaccctccttttagagggaaaggcaggtgcaggatgttgagaaacttgc

SEQ ID NO: 147701 - DNA, 201 bp, Homo sapiens
caggtgagtggccaggttcgaaggtgcagctattcctgagtgtgcttggtgctgtttctcaaagaaacttaaaattaaatcgatctgaatggttttctacrtattgtgtgactctgtgtgctctgatacagctgccttattcttgccagtctaagacaacagctcaactccttagtgccttccctttgttcattcatttgt

SEQ ID NO: 147702 - DNA, 201 bp, Homo sapiens
agataagtttatacttgaggagagtgttgtgatttgtggagtggagaagaataaaccaggggacagagtgaaagaaacactgtggcctcaggatgggcagrgatggggttttaaaggttggcttacagatgctgctctgaagaatggtattatatttaagcagattcctaatgaacgagggaagaggcaacagcaagtgta

SEQ ID NO: 147703 - DNA, 201 bp, Homo sapiens
aggcaattccttccctcggtccttagtgtgggataatagaaattaacacttggtggggctttgccgtgtgtgctgctctaaagcacttgcatttatgttcrtgacacatcacccagggaggcactagcatcaccctccttttagagggaaaggcaggtgcaggatgttgagaaacttgccctaggtcccaacctgtgagtg

SEQ ID NO: 147704 - DNA, 201 bp, Homo sapiens
cgtaatcccagcactttgggaggccgaggcgggtggatcacgaggtcaggagtttgagaccagcctggccagtatagtgaaaccctgtctctactaaaaawtccaaaaaaaaattttgctgggcatggtggcatgtgcctgtagtcccggctacttgggaggctgagggaggagacttgcttgaacccaggaggtggaggt

SEQ ID NO: 147705 - DNA, 201 bp, Homo sapiens
tggggttttaaaggttggcttacagatgctgctctgaagaatggtattatatttaagcagattcctaatgaacgagggaagaggcaacagcaagtgtagargccctgagtgggagagtgcttgctatgtatcccaggagcatatgccaggccggcatggctggtgcccagggagcagaggagcattttgaggtcggaaaga

SEQ ID NO: 147706 - DNA, 201 bp, Homo sapiens
cacttgcatttatgttcatgacacatcacccagggaggcactagcatcaccctccttttagagggaaaggcaggtgcaggatgttgagaaacttgccctargtcccaacctgtgagtggcagagccacttgtgtggcctggagcccacgttctcacccaccatatatacagtgcatcttgctgcctgtctttcctccttct

SEQ ID NO: 147707 - DNA, 201 bp, Homo sapiens
aagtagctgggattataggcacatgccaccacacctggctaattttttttgtatttttcagtagagacggagttttgccgtgttggccaggctggtctcaractcctgacctcaggtgatctgcccatctctgcctctcaaagtgctgggattacaggtgtgaaccactgcgcccagcccccttcttgaggacaaataggc

SEQ ID NO: 147708 - DNA, 201 bp, Homo sapiens
tagacatgtggtctgataaccagtttttttgttgttgttgctgttgttgttgtttttttaagatggagtctcgctctgtcaccgggctggagtgcagtggygcagtcttggctcaccctccgcctcttgggttcaagcgtttcttctgccgcagcctcccgagtagctgagactataggcatgtgccaccatacctagcta

SEQ ID NO: 147709 - DNA, 201 bp, Homo sapiens
ccagtggaaaaaagacattgtacttttgtttttattataaagaaaaatctggttgaagtaaagctgaagcatctgcgtggttttattaggcagtgctctcrccatgtggtagggtagaaagtgcaggggttcttgcaccagaagacctgggccctgaatctgatgctgcgacttgctggctacatggccttggaggggtcc

SEQ ID NO: 147710 - DNA, 201 bp, Homo sapiens
atcaaaccaacattgcaatacattgctaatgacatacatgtgggacatgagggaagaaattcaggagtgagtcctagatttttggcctgtgcagtggggarcaaaagtgatgacatttgctgagaaaagaagcagaaggttttggaggtggaaatccaaggctgtggtttggatgtggggacatgaaaggactcctaagtc

SEQ ID NO: 147711 - DNA, 201 bp, Homo sapiens
ccgaacagaggctccatccatctggagggtgggcatggaacccactcacgttctcttgcacacccctcctggctctgggctttggaaaggttggatttctygcaaggtgattgcaggacagagctctttcttcccgctgccattccaggcgcttggcctgtgctttctcagtgtctctgtttctgtgcagtcgctttcacg

SEQ ID NO: 147712 - DNA, 201 bp, Homo sapiens
tgaaaagatggggcagggcctttcctcccatgttgatcttgcttacatgcagtataagggaagagaacttttgctcaggtttggcaggtgcaccatttcargggcagtggtcagataggcaaactgaccattctacctgacgcatagcctaaagaacactctctggaccaggcttatccaacctgtggacagctttgaatg

SEQ ID NO: 147713 - DNA, 201 bp, Homo sapiens
ctttaaaccatctcctgtgctttgcacttagtgggagtgcattcagtagttgaggtggtgttcctatttctgacacttaatttgcatttttaacctacccragggagcttgttattgcatgatgtatcaggtgagctattgtcaagactgtaatctaattaaatgctggggtccagaagcctcagtgcttataatgttgca

SEQ ID NO: 147714 - DNA, 201 bp, Homo sapiens
actattgcatatgtatgaaataggactcaagaaactggggaaggagaaaggatgctttctcagactcaaccattggagaccgtcactaacgctggtgatgycttcaaggctgtgtaaaagtgattgaagtttaggggctaactgggggcagaggctcttcaaagatgactggaatgtgaatttattgtgctctcacacaca

SEQ ID NO: 147715 - DNA, 201 bp, Homo sapiens
gccatttagcatacttgctataatagaagtatgtatgccggtgttcaggaatccagaaaaaggggcacctaagtatctggggacatccaagaaagctttcrtggaagaagatgcctcctgggctgaatcttgaagcatgactaggaataggccaaggagaggagtcagaagaccacgcttgagtcctgccattgttgggct

SEQ ID NO: 147716 - DNA, 201 bp, Homo sapiens
ccagagcttcacaggctgttattgaagaccactgtcaggagagggagagaaggggaaaaatactccctcaaatagaaattcccaacttcattgtcttgcgyggctgcagggtaaattagaccaggacagtaccgcagctgaaagctgtaggttttttggtttatgaaatcctattcagcccttggagaagtatgccttttt

SEQ ID NO: 147717 - DNA, 201 bp, Homo sapiens
cagccacagccatttgttatgtatttctatggccgcttttatgctacaatggcagtcaagtgcttgaagcagagatagcatagcctgcgaagtaaagcacrttgactctctggatgtttacagaaaaagtttgatgacccctgttttaggataagattaagaggcttggcttcggatgagatgtttgaaatcaaatgggaa

SEQ ID NO: 147718 - DNA, 201 bp, Homo sapiens
gagggagagaaggggaaaaatactccctcaaatagaaattcccaacttcattgtcttgcgtggctgcagggtaaattagaccaggacagtaccgcagctgraagctgtaggttttttggtttatgaaatcctattcagcccttggagaagtatgccttttttcatgctatgattctgcagttagctgtgaactgaggatgt

SEQ ID NO: 147719 - DNA, 201 bp, Homo sapiens
ataatttaagctcagctctttcttactccaaatcccatgctcttacttatctacttgatttgtttgcttttctcagttctctctccctcttccccagcatytaatattataatgagatgtctttttaaataactagtagtttatgatgtgctaggcattttatgcctttttttaacaaaaagttatagttgttagttcttc

SEQ ID NO: 147720 - DNA, 201 bp, Homo sapiens
caaatgaattaacaagagtcagaagttaaatacctcctttactctcaagattttatggcaagatactagtgtagctggattctccccaaggatgcattctkcctggcccagagttttcaactatcaccctatttttatccttattttccctgcgtacagcaagggatatcaccatggaaaggatctcattgttcataatat

SEQ ID NO: 147721 - DNA, 201 bp, Homo sapiens
acaacattgtacagattgctgtctgaatatatacatctggatgtattctttgagatgcccaaagcactgcagaagtctcacttctttgttaaatagatttwcatgttattcccatcaattggatcagaatttctgagggctgctggtcatcgatgttgctttgctcagattcattccttcatttgctgattcactgaacac

SEQ ID NO: 147722 - DNA, 201 bp, Homo sapiens
atgatcccagtaggaaaagcaacacagcaagtctgaaacactgtatcataccacacagtgcctcagctctcaaatttctctattggcttttgagccctgcrgaaaatcagctgtgtctttctacattcagggggtccttctccgcttctgtactcataccttgaggtgctctcatctcatcccccgcctccttccatgccc

SEQ ID NO: 147723 - DNA, 201 bp, Homo sapiens
ttaggggaaaaagctacaaaacaaataagccaaaaacaaccctccaaacccacacactgacatttaaaggatttgtgccttttacttgcatttacttacarcattgtacagattgctgtctgaatatatacatctggatgtattctttgagatgcccaaagcactgcagaagtctcacttctttgttaaatagatttacat

SEQ ID NO: 147724 - DNA, 201 bp, Homo sapiens
ggcttcgagtccctaggtgcagcaactgtgggaaggcaaatatcaaatacatgggaatttgttaagcagattcctccagtgccttctcctggctgagaagrgccaaagcttctttcatgatcagcctttgtccttcctggaagaaggagtgaagggacactgctacctttgtaaactgatgtcctgcttttaggcagggca

SEQ ID NO: 147725 - DNA, 201 bp, Homo sapiens
gccagtgactgctgccctgtggtacaatttgagtgtaaatcctgagatatctgttccaactcctgaatctttcatggagagtgtgggaatgtattctggtkttttggtttgttttcatgagctgtattttgatattcaacagaggttcacttggggcagaggctaagaatgttttcagactgcatttctcttttgtttctt

SEQ ID NO: 147726 - DNA, 201 bp, Homo sapiens
caaaataatgcttttgctaaagtgacatattttgggctggcagattctgatctcctacaccttccaagttccaggaacatgttttggaggacttctatggwtccttccaacttcgatattatgtgtttccaggaaacaggtgtgaggcattccatggtagccagaggtagcatggaagatgtttccttttgcctatgtctc

SEQ ID NO: 147727 - DNA, 201 bp, Homo sapiens
gggagcaccacccgggagctgagctgcatcttcttagacgtcaggactgctgtgttcctccttgtcctgacttgcaggccagtgactgctgccctgtggtrcaatttgagtgtaaatcctgagatatctgttccaactcctgaatctttcatggagagtgtgggaatgtattctggtgttttggtttgttttcatgagctg

SEQ ID NO: 147728 - DNA, 201 bp, Homo sapiens
aattaaccaggattgtgtaatgaatgacaacagagacagacctctctgatgaggtgacagtttagccgagatctgaagcgtgtcctgaagccagccacacrcttggccagagaacaagaatgtagcagccctgatgtgggctccagcttggcctgttctggaactgacaggtgggaggctggaaggaggaacttgagttga

SEQ ID NO: 147729 - DNA, 201 bp, Homo sapiens
aaggatcaaacacaagttaatgagaaagcaatctagaaatcgtatcccctgagtgatggccggatgcccgttggacattagaggctcttcattccaagcamgtgacatctaatgagcatttgggtctgacacgtgatgtggtctgtgagaattttcaattgtaagtcctttggaggtaagaatgttgtacctgagctgtgt

SEQ ID NO: 147730 - DNA, 201 bp, Homo sapiens
atacaatgacacagaatttgcattttgttctgtaacacactggcaaagacggcacttggctgagaatatccatgagcttttgaacagtagcaatcatgcartgtccttgtagggatctactgaatgcaggacgatctttctccctagaaagaaagaaagaaacaaagacaaaaataaaggacacagagcttaggacggtcc

SEQ ID NO: 147731 - DNA, 201 bp, Homo sapiens
cggtgatgcggggcagacaaaagagcaatagtgggcctcacggaaggtgcctgctgggaaccaggaagcacagctgcctctcccagggtttccaagcagcraatcctacggtgcccacccccaagggcatgactgaaattcggccaagttagcaacatcccacgggactcaagccagctgctcctccacccaccttggtca

SEQ ID NO: 147732 - DNA, 201 bp, Homo sapiens
tatctcactctgttgcccaggctggagtgcagtggtgtgatcctagctcactgcagccttgaactcctgggcttaagcgattctcccacctcagcctctcyagtagctaggactgcaggcatgtgccacctcacccaactaattaggggattgtctttatggaagacatttcacagtgtctgagagagtaggacataggat

SEQ ID NO: 147733 - DNA, 201 bp, Homo sapiens
cgggttcaagcgtgtctcctccctcagcctcccgagtagctgggattacaggcactcgccactgtgcccagctaatttttgtatttttagtagagacaagstttcgccatgttagccaggctggtcttgaacccctgaccttagaagatccaccagccttggccttccaaagtgctgggattacagacataagccactgcg

SEQ ID NO: 147734 - DNA, 201 bp, Homo sapiens
cagtgataccttctattccctgcatcagtcatttcaagactttttttgttttgttttgttttttggagatggagtctcgctctgtcaccaggctagggtgyagtggtgcgatcttggttcactgcaacctcctcctcccaggttcaagtgattctcctgcctcagcctcccaagtagctgggatcacaggcgcccaccacc

SEQ ID NO: 147735 - DNA, 201 bp, Homo sapiens
gcgtcaggcagggctggatctaagtcctcgaacagcgtcaccgactctactgccccacgcctggctctgccttcttctgtattggcttggttctcaggcakcctgtccccatgggatgccaggagccctgggtgcacatctgacttgccccaccatcgtagctgagggaaagcatctttttcccagtacatctggcaaaag

SEQ ID NO: 147736 - DNA, 201 bp, Homo sapiens
ctggttagctctgccacgctggaaaaggtgaatttactctgtgagcaacacctgaattgtttttgttacaaagagggactcagagggctggctagagaccsagatctcataagttctgtttctgtagatgagcaagcagaagtcttccctggttgtaagtagtatgttgacttctctgaatcctccttcactctcgcccat

SEQ ID NO: 147737 - DNA, 201 bp, Homo sapiens
aaggacacatggtatctcttttaatcttgacaaacttgcgaggcatgtactgttattccatttttccaataaggaaactaaggcctgagagagtaagtacstacgctgaggttacacggcttgcaaattttgtcttcgctttcttcactcttcctgtcatactctgcccactgtatctaggatgactgtataatgtcttgt

SEQ ID NO: 147738 - DNA, 201 bp, Homo sapiens
ggactcggagcacatctccagggccccgcctttcagaaggcaaaactggcttgaggaaaaggaaggggccggctcaagataatggacctttaaaacaaacmaacaaaccggaaaggacaattctgccattaattgagcacttcctccatgccagcagttgggcacagcatgaatgttgcttttttcaacattgattcctct

SEQ ID NO: 147739 - DNA, 201 bp, Homo sapiens
tgcgaggcatgtactgttattccatttttccaataaggaaactaaggcctgagagagtaagtacgtacgctgaggttacacggcttgcaaattttgtcttygctttcttcactcttcctgtcatactctgcccactgtatctaggatgactgtataatgtcttgtccaaactggaacactgttaagaatgcgggggggata

SEQ ID NO: 147740 - DNA, 201 bp, Homo sapiens
acgtctttgagagttaaatttggttaaaaccatttggggtctaaagcaggggagaaatggacacaggatgtcgatagcatttctcttaagcccacaatcaracaatcataatttacgtaaatgtttaaaatatgggactttcaggagaggggctagagaatgtgacccggcctctttggtgaagcctgcttgcttgctcct

SEQ ID NO: 147741 - DNA, 201 bp, Homo sapiens
gctttccaaatgcctgatgctagagagcctgattagtttgctttcacaatgaagaatctcaaataaccactgccccttcgcccagcaagcagccttcatayccagaccacctcctaggatctatttaactccctctactctgtgggattggcctttgttcagcctttgagcacacctgggttggggaaatggttatttttc

SEQ ID NO: 147742 - DNA, 201 bp, Homo sapiens
gaaccacctagcgtggtgcagatccatgatagacactacagaaggtgtaactcccgaggaagccagaggttcatctttacccacccctgctcaaagggtcratgttggttgagaaaacgcaattattaatagctgcctattctttttcattctcagttgtaccaaacagggagacaggtttcaaaagcttgggttgaagct

SEQ ID NO: 147743 - DNA, 201 bp, Homo sapiens
ccaggctccagatgctggaggccatctgcaagcactgggaggggcccatcagcctggccctctacctgtcagacgccgaggcccagcagttcctccgctaygcacagggctctgaggtgcttatgagccgccacaacgtgggctaccacatcgtgtacaaggagggccagttctaccccgtgaacctgctgcgcaacgtgg

SEQ ID NO: 147744 - DNA, 201 bp, Homo sapiens
atatggggagggttggggtttgttttctgggtgattaaaatgctacggaattagatagcggtgatggctgcacaactctgaataccctaaaaaccactgamatgtacacattaaaagggtgacttatttggtatatgaattatatctcaataaacgtattatttaaagaagataaatggagctgctgaaggcaaaacagga

SEQ ID NO: 147745 - DNA, 201 bp, Homo sapiens
gttgaaagcagggatttgatccacagctggttgatcaagtgtcactggaggcagagccccacaacaggcccggcggatgatgcatggatggcccaggtccygcggctcaccctccctgtctcttccaggctccagatgctggaggccatctgcaagcactgggaggggcccatcagcctggccctctacctgtcagacgcc

SEQ ID NO: 147746 - DNA, 201 bp, Homo sapiens
caaacagggagacaggtttcaaaagcttgggttgaagcttgtaattggccagtcggtgacaatgcaaccctaatcaacctgtgatttcacgtcccctaccrattctgcatcggcctttgatttgtggtcccaggcagtgcaattcattgagtcatatttgttgcattgataggagaagaccaggcacttaggcgtttaacc

SEQ ID NO: 147747 - DNA, 201 bp, Homo sapiens
tagctattccctttcctgaatttaacctcctcagatatccaagttttgccccaatatcactatctcaataagttctctcgggtcattctacttagaaatgyaggccgggctgggtgcggtggctcatgcctgtaatccgagcactttgggaggctgaggtgggcggatcacaagttcaggagatcgagaccatcgtggcta

SEQ ID NO: 147748 - DNA, 201 bp, Homo sapiens
acaggtttcaaaagcttgggttgaagcttgtaattggccagtcggtgacaatgcaaccctaatcaacctgtgatttcacgtcccctaccgattctgcatcrgcctttgatttgtggtcccaggcagtgcaattcattgagtcatatttgttgcattgataggagaagaccaggcacttaggcgtttaaccctgaggtgatt

SEQ ID NO: 147749 - DNA, 201 bp, Homo sapiens
catcgtcagttcatcatctctatgcattattttatgatgacactacataaattggtttcttttctgaaataaaagctcattccaagaatgcctttttttgyggggaggggggtgacagttaatacctttgagcttctggatctttttacaaacattatcagacaagtaaagaaagctggatattatttctttggcaaagta

SEQ ID NO: 147750 - DNA, 201 bp, Homo sapiens
tttgatctcacctctcctccctgctgatgtctttaatgctggccctgctctgctcaaatctcacctgccctaagaagcttcccctgacctttccaagcctsaggaagtccctgccttccctgactgtcgttgccttggttttctgtgttagccatttagagagaggaactagtttcaggtcccagccttatcagccagtat

SEQ ID NO: 147751 - DNA, 201 bp, Homo sapiens
gcgtgccaccatgcctggctaactttttgtattttagtagagacggggtttcactagcttggccaggatggtctcgatctcctgacctcgtgatttgcccrccttggcctcccaaaatgctgggattacaggcatgagccaccacacgcggccgtgcctcagtttttattgcagggttgtatgattgttacatggagtgtt

SEQ ID NO: 147752 - DNA, 201 bp, Homo sapiens
ctggccctgctctgctcaaatctcacctgccctaagaagcttcccctgacctttccaagcctcaggaagtccctgccttccctgactgtcgttgccttggytttctgtgttagccatttagagagaggaactagtttcaggtcccagccttatcagccagtatatttgtgatatcacgtgtatcatgtgattcttctgggt

SEQ ID NO: 147753 - DNA, 201 bp, Homo sapiens
gaacctactatgtaccagcagcatctctcccctgatttgtgactccaaaagtgtctccagacattgccaaatgtctccgcggcaggggggcaaattgcccytggctgaaaagtactggcacagagtaagcaattattaaatattgttttaaaaaaaacactgtcattatgactattctgcagttatttaatttatctgaaa

SEQ ID NO: 147754 - DNA, 201 bp, Homo sapiens
aaggtgataatattggtgagtgccaggagttagagatgtggggagcctggcaaggaaatgggcttgattttattattattattatttttttttttttgagkggagtctcactctgttgcccaggctggagtgcaatggcgcaatctcagctcactgcaacctctgcctcctgggttcaagcagttctcctgcctcagcctc

SEQ ID NO: 147755 - DNA, 201 bp, Homo sapiens
ttttcacttggaattctgtttccttcacttccccaccctggcctcgataacccctgctctgacccaggtctctgtttaattaccgctttttcaccctacchtcaccaccttgcccagaccaaaacttgccttctgtatttgtaaagccctgcgaggcacttttcccagttgactttataggcttttatgggatgttctggt

SEQ ID NO: 147756 - DNA, 201 bp, Homo sapiens
aaacatcctttaaatgttgatgaaacttttacacatgtagctagtcatgtgatcgtgtatgccagagtgcctcaatggctcactgaggactgtttcaggtmcaaattatagaaacctaactcatagtgatgttaaataaccattccactttatcttcttaagtgactgaagacccgagggcagcgtcaggcagggctggat

SEQ ID NO: 147757 - DNA, 201 bp, Homo sapiens
ttgcgagatgaatgaagccaaattcatgagcagaatggtaaatgatatgggggacattatcataggcggccatggaggcatggatagagggcacccggctscaagttggtcatcaggaagggcttgatacaggagatgacatgaacacaggaggtgctttgcctgcccacaggtgagggggtgggtggtgtttcagactca

SEQ ID NO: 147758 - DNA, 201 bp, Homo sapiens
ttgaccttcagggagccttgtttctgctgccggcattgacccatccgtgctagccatgacagactgattctccctacccggcttttccaaatctactcacwtctcatctcaaaacctctttctctcatccatattgccttgctttctcattcctttgccatttagtaggtaatgatttctattaagatgatcatcaggatt

SEQ ID NO: 147759 - DNA, 201 bp, Homo sapiens
agatagtccctagtgagtgtgtttaggctttcagttgtgactagggtacagtcccatgcacatggaggtggtggcctctcccatctccttgccttggcatrtgctctttagtcgataccattgcctttctcagtctcctctgcccagaatgctggaactgttctgccatcctgaccacgcacagggcagtcagcaccttta

SEQ ID NO: 147760 - DNA, 201 bp, Homo sapiens
ccttttatgtttaatagtattccccatttaaagagccagatgcagaatggcagtcataattgatggagaaattatcagacggtgatggggactggctaggkaggatcgaataaatttgtacaggagcttagcagcagtgcctaaagactcttctccacataaccacatgtttatgttagaatatttagtattgcctctagt

SEQ ID NO: 147761 - DNA, 201 bp, Homo sapiens
ataaagacaaaaacaaaaataaagagtacaaaacagtatgggggttgtacataaggcttttgtgttcctgcttgtaccaaggaaaaagataccactcagaycaatcaggatgcacagtccagagcttctgtgagaagttctttgtccttctatgccacttagagtttttctacgatacctttaacctgcaccatttaataa

SEQ ID NO: 147762 - DNA, 201 bp, Homo sapiens
tccccctctcaccaatgaccagaatggccattgggcattcctggggtacactgatgccttcaggaaatctggtggtgctggtgaggtagaatgcatcttaktcatcactgcagacctagaaatgtcttcacacaggccgggcacggtggcttacgcctggaatcccagcactttgggaggccgaggcgggtggatcacgag

SEQ ID NO: 147763 - DNA, 201 bp, Homo sapiens
gggtagttctttgctcgtatagctactcaaacagacatttgttgaacggcagtagcattttccaagtgggaacatagacaacagggacagtggaattatayggtgatgatgaagttttccttttttttttttttttttttctgcctagcaaaggtctgatgagagaggaaagtacatcaaagtagcattggccagctgagc

SEQ ID NO: 147764 - DNA, 201 bp, Homo sapiens
atggttgttgttgtcgttttagatttcagtgaatttgctggccaggcataatgtaaccctttctgatgaaacctcgagtgtcatactgtgctgcagtggtrgatgggttgatgtgaattagcctctcaaagtattccggaatctaaagaaaaccttccccctctcaccaatgaccagaatggccattgggcattcctgggg

SEQ ID NO: 147765 - DNA, 201 bp, Homo sapiens
acacacttttcagcattgtggggtaagccattctggataacagaatttctcaaataggataatccaatcccttacagacagcaagtctttatttttaatckttaaggaatgagggtttctctaggatgttctgtgtacttaccctcactggctcaccatcagcccctggaaaacttcagctgtcatattgggacgcacaaa

SEQ ID NO: 147766 - DNA, 201 bp, Homo sapiens
aatcatgaggtcaggagatcgagaccatcttgactaacgcggtgaaaccccgtctctactaaaaatacaaaaaattagctgggcgtggtggcgggcgcctrtagtcccagctactcgggaggctgaggcaggagaatggcgtgaacccggaagtcagagcttgcagtgagccgatatcatgccactgcactcctccagcct

SEQ ID NO: 147767 - DNA, 201 bp, Homo sapiens
agcctgaatgggccaagagaacaaccaccaccaccattgtcatcatttccagtctctataagcttgcttgtatcagctttgcttgaggtgtgtttaattckcacagtaaccgtaggagttagatacttgttgcatcctcatttcacccttgaggaaactgaggcagggaaatgttcaataaattgtccaaggtcacacagc

SEQ ID NO: 147768 - DNA, 201 bp, Homo sapiens
tgcttttcttacgagtcttctggattattttgggtgtttctctcttttttgttttccctgggaatttgagtctagcgggggctcaaaagaggttcatttckctagtggctttgcctggtgtcctcccagtcagaagtcggcgacgctggtcagtggtgcagccttctctccaaactctgtctgccttcctcttttctgata

SEQ ID NO: 147769 - DNA, 201 bp, Homo sapiens
cagcaacctcacaggtctaggcaccttcgtggcgtggtgggatcgtgttttcagggtcttggaggtctggattttaaacctggctctgctgcagatgagcrgggtggcttctgagaatcacttacttcctgtgtgtctcattttgctcagtggtataaaagtggtaatgactgtgattggctgaattgcgcccctccatgt

SEQ ID NO: 147770 - DNA, 201 bp, Homo sapiens
atggatgaataaatgaatgagccaagggagaagaagttaccatgactgttacaaagttgataaatgcatgcagagcctttgttcaccattttctgggaggratgggtctcccgtaccatagcctgtgggcatggctgggtggagtttggtctacattatatcaactcttcccttctctatctggagataattctctcctgg

SEQ ID NO: 147771 - DNA, 201 bp, Homo sapiens
cctcgccatgtagtaagggatgtctggggaacttggaggggcttgaggcatggttcatccagattaaagcttccctggtgtttcgctccccagatggaaarcccgtgtctctgtcaccgctggagtcccaggcacacagccccaggtacacggcctccagccagcgggagcgcgagagcctggaggtgcgcatgcgcgagg

SEQ ID NO: 147772 - DNA, 201 bp, Homo sapiens
ttcctcccttcctttctccctcccaggctagagggcagtggcgtgatctcggctcattgcaacctccgcctcccaggttcaagcgattctcctgcctcagmgtcccgagtagctgagattacagatgcccaccaccacgcccggctaattttttgtatttttagtagagacggggtttcaccatgttggccaggctggtct

SEQ ID NO: 147773 - DNA, 201 bp, Homo sapiens
cacactttactttagctgagacccacacaggttcaggattatcagtatcactgtcttccacctccacttatttcactgagaggtcttcaggggcatgaacrtgcattgattggagttaggatagggaaggcacctcaccataaaataactgtggatcaggatggaaagaacttagcccactggccatgtggcgagccaaaa

SEQ ID NO: 147774 - DNA, 201 bp, Homo sapiens
acacaggttcaggattatcagtatcactgtcttccacctccacttatttcactgagaggtcttcaggggcatgaacgtgcattgattggagttaggatagkgaaggcacctcaccataaaataactgtggatcaggatggaaagaacttagcccactggccatgtggcgagccaaaaagctcatgttgttttcacccaata

SEQ ID NO: 147775 - DNA, 201 bp, Homo sapiens
ggttcatccagattaaagcttccctggtgtttcgctccccagatggaaagcccgtgtctctgtcaccgctggagtcccaggcacacagccccaggtacacsgcctccagccagcgggagcgcgagagcctggaggtgcgcatgcgcgaggtggaggaggagaaccgcgccctccgcaggcagctcagcctggcccagggcc

SEQ ID NO: 147776 - DNA, 201 bp, Homo sapiens
tatcagtatcactgtcttccacctccacttatttcactgagaggtcttcaggggcatgaacgtgcattgattggagttaggatagggaaggcacctcaccrtaaaataactgtggatcaggatggaaagaacttagcccactggccatgtggcgagccaaaaagctcatgttgttttcacccaataagaacctatgtctat

SEQ ID NO: 147777 - DNA, 201 bp, Homo sapiens
gttggtttcttgagtacattcgttagtgcttgggattgttcacaaaagaagcatctgttgggtcaagagccttctcagataacttgtggcttcaagccctygattccactgtggggatttgagtgttctcaagtggatttattgatctttacgggctcctctgtggctttctggatttctccaagattataatctgacccc

SEQ ID NO: 147778 - DNA, 201 bp, Homo sapiens
ccccagatggaaagcccgtgtctctgtcaccgctggagtcccaggcacacagccccaggtacacggcctccagccagcgggagcgcgagagcctggaggtkcgcatgcgcgaggtggaggaggagaaccgcgccctccgcaggcagctcagcctggcccagggccgagccccatcccatcgccgaggcaaccactccaaga

SEQ ID NO: 147779 - DNA, 201 bp, Homo sapiens
gacctgtgttgatcatacttaagtatatggggtgagatggaaattggagtgtacattgtgcaaggaactgggacaatgtattgggagggaaacatgaattyggaattagtagttagtaatggggaattaactcaaaattaaataaacttgtggatggtttgtaactctttagagaaatttcttagtgctggtttcagaaca

SEQ ID NO: 147780 - DNA, 201 bp, Homo sapiens
cccagatggaaagcccgtgtctctgtcaccgctggagtcccaggcacacagccccaggtacacggcctccagccagcgggagcgcgagagcctggaggtgsgcatgcgcgaggtggaggaggagaaccgcgccctccgcaggcagctcagcctggcccagggccgagccccatcccatcgccgaggcaaccactccaagac

SEQ ID NO: 147781 - DNA, 201 bp, Homo sapiens
catctgctttccagtccttgccatgtgttgtttggggagctaggggaagagaatttctgaactgggaacttgtttgaaatacaaatgcttggactctattkcagaggcagatgctctgggggttagggcctggcgatcctacatttaacccagccctccagaggaccctgatgctggataaagtttaggagccactgctgt

SEQ ID NO: 147782 - DNA, 201 bp, Homo sapiens
ccagatggaaagcccgtgtctctgtcaccgctggagtcccaggcacacagccccaggtacacggcctccagccagcgggagcgcgagagcctggaggtgcscatgcgcgaggtggaggaggagaaccgcgccctccgcaggcagctcagcctggcccagggccgagccccatcccatcgccgaggcaaccactccaagacc

SEQ ID NO: 147783 - DNA, 201 bp, Homo sapiens
gttttctttctcaattaaaatgtattttctttagcggttactttgtaatggaaaatgacacttctgccagttttagtcttttatgtgttctaaacctagtyctttcctcctgctgtggcttcaataatgcatcgtttcataagttcacagaatttaatgtgcttctgctgaacccctagtctcagctagatagttaaatga

SEQ ID NO: 147784 - DNA, 201 bp, Homo sapiens
tagtgagggtaaggaacgtctccatggtacacagccagagaagccgagggttgaaccagccttatctgcctctagagctggagttttttattgccatgctyttgaatgtgaggctgttctctgaacgaggggctcctcatttttccaggccaagaccagcttttctcatttctttggaattacatgatcatgtgtgtgatg

SEQ ID NO: 147785 - DNA, 201 bp, Homo sapiens
ttcaaactccctaaagagaatgctttgcaaactgtagtattctattctagtgaatgggattattagtaatattggtgatactatccaatgagactatccartgtcactaacaaatggcttcctcagtgatgtagactaagttctttggaagttcagtggtgagggaggaggacaaggagagcccctgaggataggagcatt

SEQ ID NO: 147786 - DNA, 201 bp, Homo sapiens
gaggcctgctcatgcttttcctgtggaatcgatagatttcctgcatcttcagtgccttcaatgcacttctactcaacatgtagtgaaaggggcggaggtgycctgtgagacttgtgacgttcagcgggccttaataataggcctgcatggactgccttttgtctttgcttagagttcatggttaaacgtggggtttgtggt

SEQ ID NO: 147787 - DNA, 201 bp, Homo sapiens
tcatgaattttgagggagagtgggagacagtccattacatctactaagctattcaacccctgcaggagagagtaaggacagtagggggctactgaggaaasgtgagagctattttgtttcctctataatcccatgatcacattcaatgtagagaagtaaataataggtattatgtatttaatatcatatatatatatggat

SEQ ID NO: 147788 - DNA, 201 bp, Homo sapiens
ttccctgcctctctgacctcgctgtatttcctaggactcctctccaggttttctttgttcctagcctactaggcttcacctaaaaatgccacttgttttcmcacttgagtggccttgttacgctgctttttttgctggatccaaccccccatcctctctcttgtctctggctgaaatcgttcctgactgtaggctctgtga

SEQ ID NO: 147789 - DNA, 201 bp, Homo sapiens
gatttgttttgtgaatgaatggtcatgttttcattactggggtggaggtgatgcgggagggagaggtgggtgagtaacagtagacttaaatggtgatgagrtagacttgagctcctcaaggcgtctcctagcagcttttgttttaaaaatgtgaaggatatttcagatcagcagaatgaattctctgaaggatcattgttg

SEQ ID NO: 147790 - DNA, 201 bp, Homo sapiens
ttttttttttcattgttgttcttcctttatctcttatgaggctttccaaaaaagattttgttctaggaatggaataaactgtagggcgtttaaggcttcaraggtaattttgggcaacctggagttgcaggtaatcacaggctggggctggaattgaaaatgcagtctcacccataatttgagcctcttttgtcgcattat

SEQ ID NO: 147791 - DNA, 201 bp, Homo sapiens
gaaagccaggatttcagggtagaactagcaagtcttaagttcagtcctcttctcctccacaatacctggttccaaagtcacttctacataggtagcctcastaaatattgtagcagctgcaaatgataaagcccagttttgttgtttagttgacaccacactgttgaattccacttcctttgcctccatttctttgttttc

SEQ ID NO: 147792 - DNA, 201 bp, Homo sapiens
agcctggccaacattgtgaaaccctgtctctactaaaaaatacaaaaattagccgggcgtggtggcgcacgcctgtaatcccagctactcgggaggctgasgcaggagagtcacttgaactccagagacggaggttacagtgagccgagatcacagccattgcgctccagcctggaaacagtgagacttcgtctcaaaaaa

SEQ ID NO: 147793 - DNA, 201 bp, Homo sapiens
gtttactaccaaaggtcttctgcagctgtgtcatttgttgctttggaaatttctaagttttaactggtcttttgagaaaaaacatcatacagcatttatcktgtactctaatgcccctttttcaaagtaatgacttcccattgaaatgtgcccctggttttaaagaattttgccatttccttctctaatgtgtaggacgac

SEQ ID NO: 147794 - DNA, 201 bp, Homo sapiens
ttgcatcattctattcctctgctcagaaaaatcaaatgagtgccttgtgcccattgtgtccagtctaaatgcctctgattaaaagaaccttttgtggtccyccaggaactctctgcacctgctgctgtcatttccattctcctttcttcagccagccagggacgagttgttcctttccccttgacacacagtatggcttct

SEQ ID NO: 147795 - DNA, 201 bp, Homo sapiens
ccctgccactgacacacctcggggatacagccaccttggaaaatctgcttagtgttggtgaggtcgctctacatggagtatttgccattgagaggtgttcrgcatttctctgtcacattggcgtatggagagtagcaggcagcaacgagtgaaaggcttcgttaaatgtattttataagacttttcatcttttcgtttaac

SEQ ID NO: 147796 - DNA, 201 bp, Homo sapiens
ctggtagacggcatttgtgaccctttacccatacgtgtagtgcacatttaggtagttgaaggggagctattgttgtggtctaggaaaaatggtcagcagamagctttatttctaacattaagactttatagattgattctcttgggcacagtacagccaaggggtaagagattggaacaggaaaataccatcgcatttgcc

SEQ ID NO: 147797 - DNA, 201 bp, Homo sapiens
tttttgatgtgagccaatgcagattcctttggcttttaaaccatacctggaagggccttagaaatgaaatgaaaggattttttcatctcatcgtaggtctyggaagtgcttccatctcttgggaaggttgtgacgaaggtttcctttgtttctgggttcctgagctgcgctttaaagttgatgcacagtgcagggagggtg

SEQ ID NO: 147798 - DNA, 201 bp, Homo sapiens
aagtgtgctggggtgtggattaactttttgatgtgagccaatgcagattcctttggcttttaaaccatacctggaagggccttagaaatgaaatgaaaggwttttttcatctcatcgtaggtcttggaagtgcttccatctcttgggaaggttgtgacgaaggtttcctttgtttctgggttcctgagctgcgctttaaag

SEQ ID NO: 147799 - DNA, 201 bp, Homo sapiens
tctagtttacaatgagagaagaaagatgtttggggaattttagaagacttgagtctatcgtgtagtacatctggtggagtccttgtacaggtgagttcacrgcgtaccactgcttagaagtggactggatttaatggggctggctatttattcagcaacaacttattattcaccttctatgtataaagcactactctgaat

SEQ ID NO: 147800 - DNA, 201 bp, Homo sapiens
tggctttttctagtttacaatgagagaagaaagatgtttggggaattttagaagacttgagtctatcgtgtagtacatctggtggagtccttgtacaggtsagttcacagcgtaccactgcttagaagtggactggatttaatggggctggctatttattcagcaacaacttattattcaccttctatgtataaagcacta

SEQ ID NO: 147801 - DNA, 201 bp, Homo sapiens
gattaattataagaaaatagatatgaaatgaagcactgagctgcttcttagcacatctcagcccttcagtgatgggattttgctctcaagatggagaggtyccataaaggggcaatttttcagaacaaacacacaacagattagccacagggtaggcaatttaggtacctttaaaagtgtagctgtcgtcctcaccgttga

SEQ ID NO: 147802 - DNA, 201 bp, Homo sapiens
ctgaaatgttttaaattattctccagactatggatgtatttattagcttagtggggcgtttgcattttgctggaggcaacatgtttataaaacttgatgcktctcacctatattctgggtcctaactaaccttacagtattttaatgcactttttctattgtatcttcatggactttacataataacccagcagtgaaggc

SEQ ID NO: 147803 - DNA, 201 bp, Homo sapiens
ttttaacacaggggttagaacccttgaaagagaccaatccattctaaccttcggatctcagttcttccctgtctcctatcctgctgcagaccccctggacscttcgctccagcaggttacaaaacatgggagcctggtggccaccccttgctcttgcatagctcccttagcagggctcttctctctcctgccttgcttcac

SEQ ID NO: 147804 - DNA, 201 bp, Homo sapiens
tgggcatggtggctcatgcctgtaatcccagcaccttaggaggccgaagtggaaggattacttgagcacaggagttcaagaccagcctgggcaacatagcragaccccatctctccaaaaaaaaaatacaaaacttagctgggcatggtggagaacacctgtaatcccagctacttaggaagctgaggtgagaggatcgct

SEQ ID NO: 147805 - DNA, 201 bp, Homo sapiens
gagtttgataggtgaggtgaagggtcagagcaatctagaatgaaggcacattctaaaaacaagaaagcttgatgagtcatctagcatgaccataacatggygctacactgatcattgttgagtgattgtctggctaatgtgtgtggactttttggaccaggccagtcttccagaggcccccatgatggatcagtattgggg

SEQ ID NO: 147806 - DNA, 201 bp, Homo sapiens
agtctggtattctgttagggccgccctagcaacatagtatgaggacaatcacctgaaggtatgaaatgcctcaggcaggcatgtaatgtctgtgttatggygaggggcactcaggagggcttctggctgggctgggtatgagggtctctgtctacgcattggccaccacaacccccttccagagcgtcttttccccataga

SEQ ID NO: 147807 - DNA, 201 bp, Homo sapiens
tggctatgctctttatagcacaagaaagtcaatcctaaagcagactgggatatgcaggatagaaaatcctggatgcttcattcattcatcatccatttatrtgccttgccatggaggggacaccaagagactccttgttctcacagcaggccctggaacccatgtggtcacacctgttcctcgctgagccctgaaggcttg

SEQ ID NO: 147808 - DNA, 201 bp, Homo sapiens
gaggcatctcaggaaagtgatttgcccagggggacagatcaaggacctgaccccaggtccctctctctgcctcagaggccctctgggatccattaaagggwcttgtcttgagtaattaactgaatactggtttattcagaatgaggggtctttaattgggggataggcatacctttggtaaaaccactggagtttttgggc

SEQ ID NO: 147809 - DNA, 201 bp, Homo sapiens
acattgattttataaattttgttatagggaggttgaatgtttttcccattcacctggatactccctgtattttactaatggactcacagtaaaatgatggkcctgcttgtgccagggggcaggtgtggccccgggagctctccctttctcacctgacagatgcatctagtgtcagggcagtgagagagggaagccagcatg

SEQ ID NO: 147810 - DNA, 201 bp, Homo sapiens
gagtgaagcaggacaggctggggtggaggagaaagaatttgcctttattgtgcaattagccttttcgattctttaaaagctttaggagatagtgaatatgkccctccaatctacagacccgaagaggcatctcaggaaagtgatttgcccagggggacagatcaaggacctgaccccaggtccctctctctgcctcagagg

SEQ ID NO: 147811 - DNA, 201 bp, Homo sapiens
tcatctgtgggactcttgggtgatgtttcttttccgagctccaattctttcatctataaactgggcatgttaatggtaactcatagatttttagagttaargtaatgcaagtgccttacacaatgcctgcacgtattaaacattcagtagtaggtaggtgctattatcatcatcgaaaacattatcatgtttattgcctta

SEQ ID NO: 147812 - DNA, 201 bp, Homo sapiens
ctttatagcacaagaaagtcaatcctaaagcagactgggatatgcaggatagaaaatcctggatgcttcattcattcatcatccatttatgtgccttgccrtggaggggacaccaagagactccttgttctcacagcaggccctggaacccatgtggtcacacctgttcctcgctgagccctgaaggcttggcttacaaag

SEQ ID NO: 147813 - DNA, 201 bp, Homo sapiens
gagcccatgtggagagaggccccatcatctgagctatcctatgctagcaggtaaggccaccctatagtagccagcccagctgatccaacagctgtacttayggctgcagaggcatgagcaccgtagcccaaaccagaacagcccagctgtgtcaggccagcttgcctacttgcattttaagccactacatgtgaggattac

SEQ ID NO: 147814 - DNA, 201 bp, Homo sapiens
gtaaggacaacaccgtgtctgagaggttgaagaagagactcagagccagtgaatgagacagggtttatggagaacttacatacaggggtggaccagtgacygcaggctgaacagcagaactgctaccatttgtaaaaagcatgcagttgatatcatgttttcacttagcagtctccaccctgcaaccatcacttaaccaaa

SEQ ID NO: 147815 - DNA, 201 bp, Homo sapiens
cccatctctacaaaaaaatacaaaaattagccgagcgtggtggcgtgctcctgtactctcagctactcggcagcctgaggcaagagaatcacttgaacctyggagagagaggttgcagtgagcagagatcgcaccattgcactccagcctgggtgacagagtgagtgagactccatcttaaaaaataaaaaataagtaagg

SEQ ID NO: 147816 - DNA, 201 bp, Homo sapiens
gaacaaacccgggctagcctgttggaggatgagagcccatgtggagagaggccccatcatctgagctatcctatgctagcaggtaaggccaccctatagtwgccagcccagctgatccaacagctgtacttatggctgcagaggcatgagcaccgtagcccaaaccagaacagcccagctgtgtcaggccagcttgcctac

SEQ ID NO: 147817 - DNA, 201 bp, Homo sapiens
tgattcaaccaacagtagagatatgtctctgccctctgtcctttcagatgctctgaccactctcttacagaaaggttcactagaggcaggtgtgacactgygacagggaccattgctgtcaccctcatagttggcattaggcaaacagaatttctcctaagcagcagctggaaacagaatagctatggatcaccccttaga

SEQ ID NO: 147818 - DNA, 201 bp, Homo sapiens
acacagagctacacctctcagcttcccttgcagacattgctagtactctgcattagaatgtgagtagaaaaaacgtggtgtatgtatatgtgtttgcaaamaatggccacaagtttttcccctgcctacatcggttactttcaccaagactgtgtagctcctcccattaagaggaggcatctatgtccacttcctgaatct

SEQ ID NO: 147819 - DNA, 201 bp, Homo sapiens
ttcctaacatctcccttccttccctccctcactccctccctctttttaatttttttttttttcatttcagttgctttaaggttacagatggtttttggctrtaaaaatgaattgtgtagtggttaagtctgagattttagtggacctgtcacccaagtagtgtacattgtacccagcgggtagttttttggctctcactcc

SEQ ID NO: 147820 - DNA, 201 bp, Homo sapiens
gtcagtaatctctcctccttatctcacatggtagttaacttgtgtgaaacaccttgtaaagtgtcttgtgctggaaaagtgtaaggcctggctctaattgyggagagaattaaaaaacatgcagtttcaaggtgtttcacccataagccaggtgccaaatgatccctctctgtcttccaccacccaaactttagaaatggg

SEQ ID NO: 147821 - DNA, 201 bp, Homo sapiens
aaacattccccagtctcagctcacacgaatgtttctttaccgattatggctttagcctcattctgttcctcctgcctcttagataaaaattaggaagctaygtcatcataaaatttctgctctgttgacagcacccaattcagagcaaaactacatttccctgagcctacccctaaatcactgaacacagtccaaattgta

SEQ ID NO: 147822 - DNA, 201 bp, Homo sapiens
tgcattcgggctgccgcatttgtatttgtggactctatgctgtaaggacaatctagatgaggcagcatgcttaggaaaatccaggtgagtgacagtgcccrttcaaatctggttatgtaagaaatggtgggaagaattgaggatgtttaccttggagaagcagaggctcagggtgtacatgctcagcttcagcaaacagac

SEQ ID NO: 147823 - DNA, 201 bp, Homo sapiens
aatacaatatagagtgatggagtcactctatgttggtaatagaacaagacaaaaacaagaccactcaatcatcaacactgagcacagataaaagcaagatyactgcaaggcacaaaaacaaccaaacattccccagtctcagctcacacgaatgtttctttaccgattatggctttagcctcattctgttcctcctgcctc

SEQ ID NO: 147824 - DNA, 201 bp, Homo sapiens
tcaagcaattctcctgcctcagcctcccaagtagctgggactacaggtgtacgccgccacgcccggcttattttttgtatatatgtttttttagtagagaygggatttcactgtgttgcccaggctggtctcgaactcctgagttcaggcaatctgcctgccttggcctccaaaagtgctaggattacaagtgtgagccac

SEQ ID NO: 147825 - DNA, 201 bp, Homo sapiens
agctggggccagtgctgggggaggtcactgaaggaggttcaggagtggtggaaaaattagggaggtggagtgggcccactgggaccaatcagcgtgccctrccaatcagaagtggaagaaatagacacattatggacagcacagttggtcaggataggaggcttaatgaccagcccagcaagggaggaaggctttatgacc

SEQ ID NO: 147826 - DNA, 201 bp, Homo sapiens
agagctatgaaattatgcagctggggtttgaaaataaaccctgcctttggccatctagatgttgaacaagggacttaaatgctcacagcctcctcctcttyccctgttttgaatgaggctaaaggttggacctctcaggatcatttggtagttaacactttgcaagttggcatggatacacacaggtattgtaaacctgtg

SEQ ID NO: 147827 - DNA, 201 bp, Homo sapiens
ccattcagtgaatatttagtgcctgccccaaggcaggttttgaggatacagcagacggcacaacaggcagacatatccttgtggacgtgctctggcaccargctgtttccaactcagcacatgtgggaaaggaactggcacttttttgtatccttgctatcttcggcatatgtgggcatacttatttaagcctcacaactg

SEQ ID NO: 147828 - DNA, 201 bp, Homo sapiens
agcagccacagcttgcgagtccctctttaggacagagtggttggttggcattgctatctgtaggggggaagcccagccagcatgtccttcctgttagtcamagctgcttgtgaggagtgatcagtgtatagctatccagacattcttgtaaatgtcactgcttttgaagttttggagtgaggactccaaagtttgtgtatc

SEQ ID NO: 147829 - DNA, 201 bp, Homo sapiens
tgtgaataacttttcttgttccttcttgcagacagtcctgcgcaatttgggggcgagcagccacagcttgcgagtccctctttaggacagagtggttggtkggcattgctatctgtaggggggaagcccagccagcatgtccttcctgttagtcaaagctgcttgtgaggagtgatcagtgtatagctatccagacattct

SEQ ID NO: 147830 - DNA, 201 bp, Homo sapiens
ttgggggacccggaccctcgccgcggcatttggagccgggggcagtcccgaactctgtgcttggcaccgccgctccgagtagggcagcgcctgccgggacyctgacccggaccccctgcgcctcgtaggcggcggcgccgccgcgccaccctgttcttccgtgtctccctctgcctggcggcagtcacggccaaggtaaga

SEQ ID NO: 147831 - DNA, 201 bp, Homo sapiens
tctacaacgtttagctattattactaacagtaaacatcaggacagtggggtaattaaacaggaatgttgagcattacctgagatggtggagacagagtctstagcacagagcctcgcacatggtcaagtgctcagtaaactatggcaatcattactactttttatttgtaaaatttaccccaaaagctccttcttagcttc

SEQ ID NO: 147832 - DNA, 201 bp, Homo sapiens
gctgtacaggttgcttaatcttttaaatatcctctttgtgagaattcaatcgtcttgttatgtagctcttgaagaatgtgcaaaacattcagaaaacagtyctcaaatctttgaaagaacgtcctgtttggaatggcaaacataattgtgccgactttgagacagttaagagtatttggtaaccctcctctcaaggataca

SEQ ID NO: 147833 - DNA, 201 bp, Homo sapiens
gtgtatcatttcttctggtccatgaagcacagcagggcaggatacagagaggctgccctcaagaagcagaaggaacaagcttaatttattcaggagggaaragttaggcttttacaggctatcaacaaatactgattgggaacctccctttttctagggctcttctcagggccacagtcccccttctttctctcaggtcag

SEQ ID NO: 147834 - DNA, 201 bp, Homo sapiens
ctttttcttctaagaagggccttattagaacttggaaagccaccttccctgtcttcccagcacctgaatactgtgccctacttatgcccaaaagacaatgkacttcttgaggaatttttgtaatttagaagcatgtttttgctacctacaggattaaaaaaataaaaataataaagatgctgtcagacttggcctccaggc

SEQ ID NO: 147835 - DNA, 201 bp, Homo sapiens
gtgattctcctgcctcagcctcctgagtagctgggtctacaggcaggcgccaccacgcctggctaatttttgtattttttagtagagacggagtttcactrtattggccaggctggtctcgaactcctgacctggtgatccgcccaccttggcctcccaaagtgctgggattacaggcgtgagccactgcgcccagcctat

SEQ ID NO: 147836 - DNA, 201 bp, Homo sapiens
gtcacccaggctggagtgcagtggcacaatttcgcctcacttcaacctctgcttcccgggttccagtgattctcctgcctcagcctcctgagtagctgggwctacaggcaggcgccaccacgcctggctaatttttgtattttttagtagagacggagtttcactatattggccaggctggtctcgaactcctgacctggt

SEQ ID NO: 147837 - DNA, 201 bp, Homo sapiens
actctcagttccttcttaccaagtgttgaagggctgtaaggacacactaacagtgtattgaggcttgcctggaatgcattagaagaattgtcaagggaggrggtaactttctcactaagttcttttgaactgagagatgaagatttttaaggctgatgtaaatatttgatttttctcattctgattgagctgagtgcaaca

SEQ ID NO: 147838 - DNA, 201 bp, Homo sapiens
aggctgaggcaggagaatcacttgaacctggggggcagaggttgcagtgagctgagatagtgccacttcattccagcctaggtgacagagtgagattctgkctcaaaaaaaaaaaaaaagcaaaaacagtctgtttcagaattcaaatcccaattctctaagcctgggtttcctgatctgtgatactaaaatgataatact

SEQ ID NO: 147839 - DNA, 201 bp, Homo sapiens
tgtgtttgtggtaggtaaaatgaaaagttactgccgttgtttttggtagaatttacctggtgttcaccttgaaaggatatgtgcttgtgggccttttaaarcaaaaacaaaataaaaaaaggattgaaacttctgaagttatctaaataaatattcttggtatgtattgctgtgaaaacaaaattcaacagagcttttaga

SEQ ID NO: 147840 - DNA, 201 bp, Homo sapiens
ctacagcctttccagtgtacagcacaaagacattttaattttaatgatttatctcgctcatgagcttttctcatttacttatagaataaagttttcattcktcatttagaaggcttttctttataactagtacaagttataaaacagaccatctatcctttatattctcttaagaaatttgtgtttgtggtaggtaaaatg

SEQ ID NO: 147841 - DNA, 201 bp, Homo sapiens
gcctgaaatctggtaatatgaagcacagtgcctggaatgtcatgatttgctcactacatactagctttcatgatgcttctcattcctctcttgcatctccmctcctctttcttcttgggagcaggtataagagcagaggtggagaccgtagcacccatctgggttggggatttgcattttgaatgtgggggtagagtgcat

SEQ ID NO: 147842 - DNA, 201 bp, Homo sapiens
gctggggttttggggaagtccctgaacacagtgagaaaggggtctgttttctcctgagtaatttgaaaatcttggctaagaatgggggagagaaaggaggrtgtggatgctactaggtgagggcttgggaactcctacatttcctatggaggaagagtttcaaaacttgtgtttttttgcttctgtgctttgttttttttt

SEQ ID NO: 147843 - DNA, 201 bp, Homo sapiens
cacaccaccccctctttgtatgattatgacagagaggcaataagaggacagattcttatgaaaaaaaaaaagttggggggtgcttgccttatttgagaaarcagagatctgcagtgatgaagctacacataccacatagcttaagagaggagctggaaaaagttctatttagggagaaggatttttcctgtgttcttgcgg

SEQ ID NO: 147844 - DNA, 201 bp, Homo sapiens
tagtgtgatctgaagcaccaggaaggcctccttccgtctgtctgactgctcaccccgtcttcttttcttcccagacaatccacgttgctattgtctgcgcyggatacaatgccagccgggatgtcgtcaccctggtcaaatccgtcctgttccataggtaagaacaacttctgtgctgtgtgggctgaggtctgtcactgc

SEQ ID NO: 147845 - DNA, 201 bp, Homo sapiens
aaatcgtagggctgaaatatgctgttcttatgtgaagtaaattactataacctgttggcctaaaaaaaagaatgagagctgtgaccagtagttgccaaggwcagggaggacgatagtgagccacagtggaacaggggtcttcattagagagagtggcaggaggatccaggagagacagctggaagccagaaggacagaggc

SEQ ID NO: 147846 - DNA, 201 bp, Homo sapiens
tgatgcttcagtctctctatcagcttcccctgcctagcatttaccagatctcagttgttatacatccttgtcggtaggttgtgttatggattgagttatgyccaccacaattcttatggtgaggccctcattcctggtacctgagaatatgactgtatttggagatagggtctttaattagattaaaatggggtcattagt

SEQ ID NO: 147847 - DNA, 201 bp, Homo sapiens
ttctggaagacagaacccatgccgtcattttctgtgtccctagtatcttagcaaagtagctgacacgtattacatgctcaataaatgtttacttatttgasaagtcagtctgggggagttcattaataaagaacgtgaagatatatattcaatcagttaattaatatatccagcccagacttagttcagttccacattcat

SEQ ID NO: 147848 - DNA, 201 bp, Homo sapiens
cgtacttttaagacggcgtgaggacttgagaagaaagcaaatccttagtatgtgctacgaaaattctgcatcccatttgttatgctgagcccctgtctackccagtgggcatggcactaggttcaggaggccaaagaagaaacccagggccagcaaatgagacgttgggtttaactgggggcttacatatatggggagaga

SEQ ID NO: 147849 - DNA, 201 bp, Homo sapiens
cactctcccacatggaggtcccgtgtgctgcctgggttctagccacattcttctatattgcttggttgtactacagttactattctgggattcatgcacgrcccatctcccttttcgttctcagtatgttcatggtaaactgctattatctgaactggcttattgagtctctgtttcttgtgatcaggtcataatggtagt

SEQ ID NO: 147850 - DNA, 201 bp, Homo sapiens
atataaatggttcatcccctttaaagaaaggtctgctgatttcctataaaactgaatagataggcctgtaatcctagcactttgggaggccaaggcgggcrgattgattgaggtcaggagctcgagaccagccaggcccacgtagtgaaaccttctctactaaaaatacaaaaaattagctgggcggtggtggcaagtgcc

SEQ ID NO: 147851 - DNA, 201 bp, Homo sapiens
tttttctagatatattcagtggcagatcattaaatctcctcctttactgggctattcttattaggaattatggtgacttttggagggcagtgtgtcttgcrgaaagcagcataccatgttgagttgaagatatgagtctaaattatggccttgtcgtttaatgtctgtgtgttccttgcacatgttgtttcgctgcaggca

SEQ ID NO: 147852 - DNA, 201 bp, Homo sapiens
tcagtaagtgttttgttagtatgtgtccttgaaaacttactgcaagtgaacatgtaatttaacttggcctttttctgattgcatcgtttcttgccgttgcmtgtccagtgggagtatttattgaattcttgccctttggggcttcccagctgtctgggtatcaaaagctcccaatggatttttttctcctgcccttgaggg

SEQ ID NO: 147853 - DNA, 201 bp, Homo sapiens
cgattatcattttctatttaaaataggcattttgtttatctaggagagcattaattactaattactaacatttaccgataaacaactataagaaatatttmagtaagtgttttgttagtatgtgtccttgaaaacttactgcaagtgaacatgtaatttaacttggcctttttctgattgcatcgtttcttgccgttgcat

SEQ ID NO: 147854 - DNA, 201 bp, Homo sapiens
tcaacaaaggaatgaatgctctgatcaaagagtcacaagatcaaaacagagaccaggctgttggtgttccatgcgctcatcaacgctgttgattagcattwccccatcctaggaaacatgacaggttgcttccagatgttaccttcaagatctgcattcctttcagattgctcgtcttctgccacagctagcaagatttgc

SEQ ID NO: 147855 - DNA, 201 bp, Homo sapiens
gagattccaactcacatctgtctgattccaagtccgcagcattttcctctgatacagcaatgagtttctacctgaaaatattttccaatgaaaacatgatwtataacataatgactgtatagaactattgtatgggactgtatacagtccctcttgtgtagggctattctgcatgaactctgtttggattaagtgggtttt

SEQ ID NO: 147856 - DNA, 201 bp, Homo sapiens
attatgaataagaagagaactctagtgcttcaaagcagaagggaggaaggttgcgattctgagggtgatttttatcagcatttctgagatgagagtctgcrcgctccccagagcctcctgctgagcagctgcgctgtgtccataggatttcactggttcaaaccagcaaagcctcaaaaaccactgaaggactaaggagca

SEQ ID NO: 147857 - DNA, 201 bp, Homo sapiens
gttgttggaccctggtcagtggctgtttcccatgttctatggttgtgacatgctatcttcctgggtgggtgaagaggctggaccccaggcagacgagcacrctgagtgccacctgctccatgcttccactcgtcctgtgttgcctgcctgcatctcagcttcccggaaggccccaggagggacacggccttcagggctttc

SEQ ID NO: 147858 - DNA, 201 bp, Homo sapiens
ctccagcctgggcaacaagagcgaaactccatctcaaaaaaaaagaaagaaaaaaggcaagatgatggcaagatattgggtaggtttttgactgtaagggrgattctggtttagtgatattctgtttcttggtctgggttctagttattcaattcatgaaaattcatcaagctgtacagttatgatctatgcacttttctg

SEQ ID NO: 147859 - DNA, 201 bp, Homo sapiens
tctcccaatgacagaattatagagcataggaaaagatcagtggttgccagggactagggtggggtgtgagtataatggggtagcataatggagtttcttcrggatgatagaacagttctgtatcttgattgtgatggtggttgcacaaatctgtacatgtgataatatttcatagaactacacacaaatacaaaaaagcct

SEQ ID NO: 147860 - DNA, 201 bp, Homo sapiens
gcgcatgaaaagatgctcaacaacatcagggaaatataaattaagaccataattagctaccattacacacctattagaatgaatacgataaaatttgctgrcaatatcagatgctggtgaggttgcagagaaactgtgtctttggtgggaatgtaatatggtatgaccatctgtcaatttcttaaaaagttaaatatatac

SEQ ID NO: 147861 - DNA, 201 bp, Homo sapiens
gtacatttaatgtgatgagacaaggtttagcacatagtaaatgctcagtaaatgtaggcatagttaccttgttttttaagaggcagacggagggcctgcastatgtctggcctcttgccttattggtcaacctgggatcctatagctcatattttatttttgctattaagagactgtattgcttgtattctggagttgaac

SEQ ID NO: 147862 - DNA, 201 bp, Homo sapiens
tcagttaggaaactaggacagttgtttcattcaagcaggagatgctggtggcttagaccaagtgtagtggccaaagtgttgggatatagtccaaatccagrtgtgtctttaaggtatattcagcaggattttctgagatattggatatgagactaacagaggaagaagagtcaagggtgtgtctagttttttatttgagca

SEQ ID NO: 147863 - DNA, 201 bp, Homo sapiens
ctgatgtcaggaactaagatctcttcgtgttctgaaagaatactgtgattgggtgatttctgtctgtaataattgcatccagagaagctatatttaaatayaatttattcattcattacatgctactgaatacctataatactggcaagggtagggtagaaaactgttttgttttgttttttaaatgggtgataccaagaa

SEQ ID NO: 147864 - DNA, 201 bp, Homo sapiens
atcataaaatgtagcaaggggagaggcattagacaaagttcatagtgacagtgaacattgtttgaatggaagaaaacaattggaagagaagaaataggacrtgttaggtataatgatggttgttattttatttatttatttatttatttattcatttatttatttatttatttattttttgagacagagtcttgctctgtc

SEQ ID NO: 147865 - DNA, 201 bp, Homo sapiens
cgaacctactatgtaccagcagcatctctcccctgatttgtgactccaaaagtgtctccagacattgccaaatgtctccgcggcaggggggcaaattgccyttggctgaaaagtactggcacagagtaagcaattattaaatattgttttaaaaaaaacactgtcattatgactattctgcagttatttaatttatctgaa

SEQ ID NO: 147866 - DNA, 201 bp, Homo sapiens
ctactatgtaccagcagcatctctcccctgatttgtgactccaaaagtgtctccagacattgccaaatgtctccgcggcaggggggcaaattgcccttggmtgaaaagtactggcacagagtaagcaattattaaatattgttttaaaaaaaacactgtcattatgactattctgcagttatttaatttatctgaaaagtg

SEQ ID NO: 147867 - DNA, 201 bp, Homo sapiens
ctggctggaggggtgcccccttcttgtctttttcctctgcttgcttctgtgccaacttacatacctagccattcacgggtccatcaccctcttctgtcccygatgttctttgccaagctcccactctctttaattaacaactttggagatgcttttagaagagcccaagtctggccaggcatggtggctcacgcctgtgat

SEQ ID NO: 147868 - DNA, 201 bp, Homo sapiens
aatctcccctcctcctccacctggctctgtttctttgcattttccaaggtcttccacaagagggactttgctgttttctttctgcagtttctttaatggtrtgttggtatggtgcttttggtgggataattttacttggaaaataatgtttctgacccatgtccttctttgattgattttttaaagatttatattttgctt

SEQ ID NO: 147869 - DNA, 201 bp, Homo sapiens
gatgcttgtcatagctccatatgcctcacattcacctggaaacatgggaggcgttagttaggccagattaacagatgtgggatgccatataatgactttgycttcaagtgaaactgcagtccaatgggagcaggccccagacattggcctcctcaaaaccctgggttacttttagtgtcttccagttcaggaaccacagtt

SEQ ID NO: 147870 - DNA, 201 bp, Homo sapiens
ggcagtgattgtgaaacccagggactgtgggctaaaagtgctgtagattctgaaagtaggaagaggaaaaatgtggccacgggcctctggggaaagccctrttctgtgggctttggccacttaaatctatatgtcttctgctgctgtctcaaggcagtgatgcagccctgactatccttctgcccatctatccattcatcc

SEQ ID NO: 147871 - DNA, 201 bp, Homo sapiens
actctagcctgggtggacagagcgagacttcatctcaaaaaagaaaaaatttacatgttttatctttacatatctaatacctattacaacacataattgcrtaagatgctgtaggaactgacagaggagcttaggactcctcatgcctataagtcaataaaatctctaccatattgagttaaataatgaaggaatggattg

SEQ ID NO: 147872 - DNA, 201 bp, Homo sapiens
gttaaataatgaaggaatggattgcttcatttaactgaaaaaacagagataggacaggtgtcacgggaccctggctcacttctccaaggttctctcatccrtgtcctcgggctggctccccttttggtagtggatgatttccatctgcccctggggctgcaggcttccacttttcatttctcagagaggaagagtcctgtg

SEQ ID NO: 147873 - DNA, 201 bp, Homo sapiens
tttttccacactccttattttcctgtaagctgtggttggtttcctcttgtgaccacaaatgaatcaaaaagagaactgtttcccagttattccttattatstcaaagcagatgttcaaggtgaggctccggatgacttatcaaaactccagaggtgatttgtgtcctgataacagtgaggtctcagactcacatgtatgca

SEQ ID NO: 147874 - DNA, 201 bp, Homo sapiens
aactagacttttccccctacaagagtcagtcagtttcccccgttctctttgtttgcttttctttcccagtctgcttttccaaagcctacatggccacaaarcattagagaagatctttccaccatctcccattcatctccttccctttttactagagctgttcccaacttaattccagaagctactgagccaccgcagctt

SEQ ID NO: 147875 - DNA, 201 bp, Homo sapiens
accatagcgtgcatgggctttgttaattccttgaattatcttataaactagacttttccccctacaagagtcagtcagtttcccccgttctctttgtttgmttttctttcccagtctgcttttccaaagcctacatggccacaaaacattagagaagatctttccaccatctcccattcatctccttccctttttactaga

SEQ ID NO: 147876 - DNA, 201 bp, Homo sapiens
tgagaggggccaggttggggaaaggcagctgagggcatcagagcagtggttctcttagcaggtcaggaggtatttcactcttttcaataatgggtaaggcmgggcctctacgtatcagctgagtattagccaggcaccatgttaggtgctttatggttgtcagtctcctttgatcctcacactcatcctatgaggcaggtg

SEQ ID NO: 147877 - DNA, 201 bp, Homo sapiens
tagctgctgattattctgtttttttctcaccaatggatattaaagttctaactatcatgttgctaattaaggaattttttaagaggattggcgtgcctgaragggttaagtggtactatcaaaagcaatgcagcccaggtacaaactgaatgaagagcaatttggatattattctttgggataacgtgactttaggttaac

SEQ ID NO: 147878 - DNA, 201 bp, Homo sapiens
tatccagagtgggtaaatttatggagacagaacatatattggttattaccaggggctgggagggagggagaaagggcagaagctgcctgatgggtgtgggrttttgttttggagttcatggaaaagttttggaattagattgaggtggtggttgcacagcattgtgaatgcactaaataaatgcctctgggttgtttaaaa

SEQ ID NO: 147879 - DNA, 201 bp, Homo sapiens
cacgtgacaccatgcccagctaatttttgtatttttactagagatgggttttcaccatgttggccaggatggtctcgatctcttgacctcgtgatccgccygcctcggcctcccaaagcgctgagattacaggcatgagccatcacgcccggccaaggaagaggatttgaagtcagctctgagtcttattatcttcctccg

SEQ ID NO: 147880 - DNA, 201 bp, Homo sapiens
acccagttctccttataatcttcaggccagtcctgctcactgctgtctgactttgtagcctgatttttccagatgaagctgctcttgttgacccaggtctsccccttcttctttaaggtatattgtatctgtgggatacagacatagtgcaggactgaggccatgcattctccttcctaagagcttcttactccgggtctg

SEQ ID NO: 147881 - DNA, 201 bp, Homo sapiens
agcgattctcctgcctcagcctccagagcagctgggactacaggcacgtgacaccatgcccagctaatttttgtatttttactagagatgggttttcaccwtgttggccaggatggtctcgatctcttgacctcgtgatccgcccgcctcggcctcccaaagcgctgagattacaggcatgagccatcacgcccggccaag

SEQ ID NO: 147882 - DNA, 201 bp, Homo sapiens
ggtggttcatttctgtcctatgtgtgtgtcctctattgctgtcaggtgaagagtgtcgcgtgatgactaggtcctccttgactaggaggtgaagagtgtcrcgtgatgactaggtcctccttctgtcctatgtgtgtgtcctctattgctgtcaggtgaagagtgtcgcgtgatgactaggtcctcttatttatctgagaa

SEQ ID NO: 147883 - DNA, 201 bp, Homo sapiens
caaacaaactgcctatccagctgtctttgtggaagttgcatggtttgaaattgcaaggaagaggatttttttttttgagacggagtctcactgtgtcgccyggctggagtgcaatggtgagatctcagctcgctgcaacctccgcctaccaggttcaagcgattctcctgcctcagcctccagagcagctgggactacagg

SEQ ID NO: 147884 - DNA, 201 bp, Homo sapiens
ggttacgaaagtgaatgcttattgaacacctactacatgctggttcctaataattaatcgtgtagattaatttatttaatcccaaacagtcctgtgaggcrggtaacatgactgtcctcctgattgtgcagataatgaaactgagcacagagaagttaagaaattaactcagggtcacatagcttggaggtgggagagctg

SEQ ID NO: 147885 - DNA, 201 bp, Homo sapiens
tgtgtaattacatattcctcaaaaccaataagatatttatcaaaaatgaactgtcatgtaaacagtggactttaggcgataatgatgtatcaatgtaggcycaccagttgtaagaaacttaccactctgatggggtatgttgagattgggggaagctgtgcataggtgggagcaggaggtatatgggaaatctctctatac

SEQ ID NO: 147886 - DNA, 201 bp, Homo sapiens
tgccttagaagatcgtctttaaagacacttgctgagaatgttcacaagtgtgttgcccttttatgctcataggtgtgtgtactttcttgttctttgccttwccctatttcacccagacatttaaggtaagtgggtgaatttcgatattgtatgaattgataatagtcctctgtggttatcaagcatggcacccataagaaa

SEQ ID NO: 147887 - DNA, 201 bp, Homo sapiens
gggcccagtttcctcaactggaaaaaaaaaaaaaaaagagtagctgtgaaaataaatagtgatttataagcgctagattttgggggctggagaatccttcyttatggggggcagggaggctgtcttgtgaactgtatgacattttgcagctttccgaacctactatgtaccagcagcatctctcccctgatttgtgactcc

SEQ ID NO: 147888 - DNA, 201 bp, Homo sapiens
tggggaggggttttctgggcagtgggacacctccctcttagggggtttcatttgtccagggccagtgaaaggctgtttggtccctctgctgagtgaacagycccagcccacaggatgagtcagagcagagtccagaacagaaggcagagggcatgtgtgcaaaggccatgtttatcccaggcatttggatcttaagattcc

SEQ ID NO: 147889 - DNA, 201 bp, Homo sapiens
agtgcctggcatcttagaattctgttgaagtactagtggctgcccatttagttttgccgtgaatccgtgtaccttgcaaccccctttccatttagttttgwgcccctcaaggtcagccatggtcattgtcaagtctgtgtgctgtgcctgccatggggtagacatacagtaaatgcatgatgagttgggatttgacatgat

SEQ ID NO: 147890 - DNA, 201 bp, Homo sapiens
tcagtaggtgccttgtggactgtagtgaatggcaaagcgtagagaaaaggtaaagcaatagctgtcttccctgtatcatttggcaccagagatatttgtakgaaatctccctaggccttggaacttggaagaacaatacactgcacgttagacaagtcaggacccttcaacactaagggatgccagagtgcatttcccagt

SEQ ID NO: 147891 - DNA, 201 bp, Homo sapiens
ctctgaatatgaccttctctggtgaggcctgtctgccgagcctccggatgatgctatgtaacccttagtgctgtcactcaagtgtgaaccaaatggaaggygggccagccaagacttttgaaaagattgaaattttacaagtagaaaggaggtggaagaaaacgataatagtaaacagaacacaagacacataactacaac

SEQ ID NO: 147892 - DNA, 201 bp, Homo sapiens
ggtcaaggtcacagccagtcaagtgcagcatctgggcttgaacccacatctctctaactgcacagccctctttttctgcacttcctgctcctaagagattyacgggacttggtggttcttattctctgtgactggtggaatgtgtacgtagggtttgttttccatgctttagactgaacattccctagaggggactttttt

SEQ ID NO: 147893 - DNA, 201 bp, Homo sapiens
tgtttcatttgcacctttctgaagcaaacagcatacctgctctcgggtctctatgccattgcaaaagctggtccctatgcctgggatgttcatgtcatcarcctgctgaattccatctcattcttaaggcttcccttgactatcactgtgacaggggttggggggtgtttacttggatcacagcatgtgacaccatcatga

SEQ ID NO: 147894 - DNA, 201 bp, Homo sapiens
atgcaacaaatgactgatgtggtgggttgctaacatgattcagacgtgaatcctgtttgaaagaagctttgtagttttgtgagggtggtgagaaggccagracaagattgtgaactctcgtacgtggtagagaaggtacgaaacgtcttaagaaaggactcatggtgagagtggcttttgagaaggcatttttaggtgatg

SEQ ID NO: 147895 - DNA, 201 bp, Homo sapiens
ttctacaatgcagacgagctcaaggtatgggcaggaggggaggcacttccgtgatctcctctagctggaagcgttattacttgtggttgagcagactgtarcaatgccagaaatctcagctcctaactgaaaatgtgtagggcgtaaggaagttgtttgccagcagaatctgattttattatcgaagtattaaagtaaccc

SEQ ID NO: 147896 - DNA, 201 bp, Homo sapiens
cagctcatgaagtcaacaaattgggcgtgttggggatttcaggggagactttcctgaggttgaggaccatgggcctttatctgaaggaccaatgggagtgygtagacagagatcctggaagagtgatccatgcattgggaatggcttgcaaaggcctggcagtgggagagatggatgagacagtttgccatacctggggca

SEQ ID NO: 147897 - DNA, 201 bp, Homo sapiens
aagcatgcaagcatacagatagattgtgatatcactgcaattgagctccacagaggagaaagccatgctgccaagacagctcatgaagtcaacaaattggrcgtgttggggatttcaggggagactttcctgaggttgaggaccatgggcctttatctgaaggaccaatgggagtgtgtagacagagatcctggaagagtg

SEQ ID NO: 147898 - DNA, 201 bp, Homo sapiens
aggatagtcttaacttcacagtgattacaggttttttgtatacagcaaatatttttcaggcatgcaacacatgatattagcacctgtcacaagccaggcayggtgctcaggacaatggtaaaatgtcacagtctcaccgggaaagttgccgttaaataatttcagtttaagttgacaagtgctttaatggagttacgaact

SEQ ID NO: 147899 - DNA, 201 bp, Homo sapiens
acaggaagcactaccctagagctgaagaaataggaggaggaggtaggaatgattaaaacctggggccaggacccagacctctaggatggcatcaccaaccrattccagaggcagcatcactgggccgagaagtagggacagcgaagcgtgttctgagtgtgggaaaaactgcagaatggatgtagctgctgctaaaggaag

SEQ ID NO: 147900 - DNA, 201 bp, Homo sapiens
ctgctccctgggctaagtcttccataggacaatggctttcaaactgtgcttctcagccctgcagtatgcatcacctgggaacttgttggaaatccaaattrtccaatcccaccctcgatctctataatccgaaactctaggggaggaggtgttgaggggagggcagcaatctgtttgaacaaagctctccaggtgacagtg

SEQ ID NO: 147901 - DNA, 201 bp, Homo sapiens
gtaaagataacagcagcttcctgccgcacagacttctccggcattggcatccgagcatatctttagaaatcttctaacccattcttggttattatttgcawtccagggcccaaagtgatgagttttcccattttcaacataattcatctggctgtgtgtcatgtctcatggcctcttggatttgtggagagatgggggtga

SEQ ID NO: 147902 - DNA, 201 bp, Homo sapiens
aaagattagccttcctgttccagtgttactgatgagaggctgagtttcatctttggtgtttttcctaagctttaacaatgcccccctgctgagaggtctcytggctggcatctgcttccctcacctgcccctttatcactgctgagggtggaactgggtgtgggggggcatcttggtatgatttggatatagtctgcactg

SEQ ID NO: 147903 - DNA, 201 bp, Homo sapiens
gagaatttttgagaggtaatatagtggattcattcacttaataaatatttattgagcacctactgtgtgccaggaactgtactaagcaccggggatacagraatgagcgaagcaaagccctgtcccagtggatcttatagtaaacaaacaaataggtatgaaatacgtcaggtggcatggagtggtgagaaggggaaatat

SEQ ID NO: 147904 - DNA, 201 bp, Homo sapiens
caaaataatacatactataggattccaattataccaagttcaaaaacaggcaaaaattaatgtaggctcttaccaattcagatggtggttaactctggtarggagggtagaacagagactggggcaggccccaaggaagactttgggatgctgctaataatttaattttaatttttgtttgtttgtttttgtttttttttt

SEQ ID NO: 147905 - DNA, 201 bp, Homo sapiens
gtcgctgggggggtggcggtgttggtggtgatgatggggatggcgatgatgacactggtgatgacgatggatagcagctgctgtgtattttcttaggagcygtgttaaattctttaatggcaaagatcgtgctagtaataataataataataataataataataatagatagcatttactgcgtgtctgctctgtgccatg

SEQ ID NO: 147906 - DNA, 201 bp, Homo sapiens
aaaaaagaaataggcctgatcccaagggtgtgggcagggcagagataataaacccaaatacaaagtcaggccacccaggaatgaggtggtgtgctctatcrgggccggattcccccagctccagatcatctggccaaatctgcaccctcctcccgggcctcccttttgctggggatggtttgggcagaggtgagtgggcat

SEQ ID NO: 147907 - DNA, 201 bp, Homo sapiens
cccaggcagacgagcacgctgagtgccacctgctccatgcttccactcgtcctgtgttgcctgcctgcatctcagcttcccggaaggccccaggagggacrcggccttcagggctttcagccgggggcaggaagtgctccatctgacaccattcagaacagactagacaaataactccacagcatgtctcattaggccagg

SEQ ID NO: 147908 - DNA, 201 bp, Homo sapiens
tctatggttgtgacatgctatcttcctgggtgggtgaagaggctggaccccaggcagacgagcacgctgagtgccacctgctccatgcttccactcgtccygtgttgcctgcctgcatctcagcttcccggaaggccccaggagggacacggccttcagggctttcagccgggggcaggaagtgctccatctgacaccatt

SEQ ID NO: 147909 - DNA, 201 bp, Homo sapiens
acagggtttccttgaggtgaggcgtgcctgtggtcctggcctgctgtatccctctaacctcagcatgtcttaggtcctgtccccggattcagtcaggctgycacaaaggaccgagttagccaggaaagaagaggttttgcgttggacagaggtaggatgcaaaaagcggcctgtggaaataatgtaccattttcttattta

SEQ ID NO: 147910 - DNA, 201 bp, Homo sapiens
tttgaacccagggggacctgactccacactttccagtgatcgttgggtggaaatagtgtcttgcccaagatttattacctaaaaatgaaatatatttcaaraaagataccctcaaactctaacatttccagtaaaagcaggacaaatactctattttataatccatttaaaataataaacatagctgcagttcgttgagca

SEQ ID NO: 147911 - DNA, 201 bp, Homo sapiens
gtttcaccatgttggccaggctggtctcgaactcgtgacctcaagtgatccccccacctcagcctcccaaattgctgggattacaggtgtgagccaccgtrcccagcctgtattttaatttatagcacagctcacttcagagcagccacatttcaagtgttctgtagtattttcctgtatcatcgtattacatccttccag

SEQ ID NO: 147912 - DNA, 201 bp, Homo sapiens
ggtttcaccatgttggccaggctggtctcgaactcgtgacctcaagtgatccccccacctcagcctcccaaattgctgggattacaggtgtgagccaccgygcccagcctgtattttaatttatagcacagctcacttcagagcagccacatttcaagtgttctgtagtattttcctgtatcatcgtattacatccttcca

SEQ ID NO: 147913 - DNA, 201 bp, Homo sapiens
  misc_feature (1)...(201): n = A,T,C or G
cccaactcaagggtatgtacctgtgtgtgcatataaagagaaggagaggccagacgcagtagctcatgcccgtaatctcagcactttgggaggccgaggcnggtggatcacctgaggtcaggagttcaagaccagcctggccaacatggtgaaactctgtctctactaaaaatacaaaaattagctgggcatggtggtgcg

SEQ ID NO: 147914 - DNA, 201 bp, Homo sapiens
ggaaactgaggcagggaaatgttcaataaattgtccaaggtcacacagctgataagtagcagagctggagttcaaaggcaggccatctggcacaagagtcrgctttgaaccatttcctcctgcctctcgtggaggaaatgtgtccctgacaattccttcacctgtgagctggaaggaaggaagaactcgacagcagccagc

SEQ ID NO: 147915 - DNA, 201 bp, Homo sapiens
tacaaagagggactcagagggctggctagagaccgagatctcataagttctgtttctgtagatgagcaagcagaagtcttccctggttgtaagtagtatgytgacttctctgaatcctccttcactctcgcccattctcttgccttggatgcaccagtaggctcagctgtgacaggggaaggggacttgtttgttaatgag

SEQ ID NO: 147916 - DNA, 201 bp, Homo sapiens
cctaagttttatgttataatcaaatgtggtcagcatttgcttatggaatttgatttagctggacagtgtctctctgtaaattttacagatggagtgtctcytgaagacagagtggccatgggtctcaggccttgggtgtcacagtgggagcacacacggttgctttaataaatgagcagagagcatggttggcacccggcc

SEQ ID NO: 147917 - DNA, 201 bp, Homo sapiens
gttacaaagagggactcagagggctggctagagaccgagatctcataagttctgtttctgtagatgagcaagcagaagtcttccctggttgtaagtagtaygttgacttctctgaatcctccttcactctcgcccattctcttgccttggatgcaccagtaggctcagctgtgacaggggaaggggacttgtttgttaatg

SEQ ID NO: 147918 - DNA, 201 bp, Homo sapiens
atggaatttgatttagctggacagtgtctctctgtaaattttacagatggagtgtctcctgaagacagagtggccatgggtctcaggccttgggtgtcacrgtgggagcacacacggttgctttaataaatgagcagagagcatggttggcacccggcccaaaggaccttgttgactggtgggcacatggtatgttacatc

SEQ ID NO: 147919 - DNA, 201 bp, Homo sapiens
aagaggaggctgtggggggctttggaggataacctttatcaaattcacagtttccccactggttagctctgccacgctggaaaaggtgaatttactctgtdagcaacacctgaattgtttttgttacaaagagggactcagagggctggctagagaccgagatctcataagttctgtttctgtagatgagcaagcagaagt

SEQ ID NO: 147920 - DNA, 201 bp, Homo sapiens
gggaaaaaagatatacagaagaggaggctgtggggggctttggaggataacctttatcaaattcacagtttccccactggttagctctgccacgctggaaraggtgaatttactctgtgagcaacacctgaattgtttttgttacaaagagggactcagagggctggctagagaccgagatctcataagttctgtttctgt

SEQ ID NO: 147921 - DNA, 201 bp, Homo sapiens
ggttcttcaatcttcttggtccctcccaggagttcccattgctggctcctcttctcgttctacctgactcccattttatagatattccatgttacagatahggaaattgcagaaccaagagattaattaagtagttagccaggatgcagacccgagcagcctgcctctagaatgtgaaccactgtgactccgaggaggtga

SEQ ID NO: 147922 - DNA, 201 bp, Homo sapiens
aaaaaaaaaaaaaaaaaaaaaagaaaaagagacttcacaaagcatctctgagaaagtagcatttgatctagcactgaatgaagtgagaaagcgagcctctkagataattgaggaagaacattccagcgagagggaatagcaagtacacggaccttgattagcaaggaggctgtggtggctgagtaaagctagggaatgcta

SEQ ID NO: 147923 - DNA, 201 bp, Homo sapiens
ctagatagaagtgcacaattctttctagggatacacaggtacacatgcccaattcaccttggtgggttgagtggggagaggggcagggtgacaaataagasttacttgtcaccttacctactgtatatctaagcatattgtccatacaaagagatcagtgcaggagatgtcctgtgtccctgtcttcataaccagaacggg

SEQ ID NO: 147924 - DNA, 201 bp, Homo sapiens
agtgatgatgggactgaagccatctctgtagtgcttcccttgctgttctgagccatttgcagtgggaataagtgcttatggagtcagcagctgtgagttgsgggaggcaaattattacttttatttttggctctgcctggggtcagaatttcttttgtttctgatttaccttttatttgagaaacttggcatgatacctgt

SEQ ID NO: 147925 - DNA, 201 bp, Homo sapiens
gagcggagactgattttgtccttcctcattgaagcctggaaaagtctagtatcttttatcagatgtggggtggttggctgtttccttttctcctccagccrtgatatttttaaaattgacagccccgttgtgatccagggtgatgagagagagactgacattttaaagtttcagaacatgtttttcagctcttctttggat

SEQ ID NO: 147926 - DNA, 201 bp, Homo sapiens
gccctcttgttagcggtgagcacctgtggttcgcggagcctgccgtgtttggagagggccctgttgggcggtacgcaactacctttcgtggtgtgatgctrtgaataacttttcttgttccttcttgcagacagtcctgcgcaatttgggggcgagcagccacagcttgcgagtccctctttaggacagagtggttggttg

SEQ ID NO: 147927 - DNA, 201 bp, Homo sapiens
ccatcaaaagccagtccctcaaccacttattttaaaacagatgaaggcaacccagtgctttttctctgatggcacattctccccgcatgaggaaaggaacrtaattggaaaatgggcaatattcacagaacaattactgtgcctcttaatgaggtttgcatgaaggcttccagtgaattaatgaagagcaatgattttgcc

SEQ ID NO: 147928 - DNA, 201 bp, Homo sapiens
gagaggagattgcaaaagctcaggaggaggccacctgattgcttgaattcagtggtggatggtttgtgggcagtttgcattccagttccttcttggtgctwtacccacaggtagagtaaccgttgggctgtggcagtctgtggcatctcaccagaaagcccctctcctgacctctaatccagatcctattggatatcttta

SEQ ID NO: 147929 - DNA, 201 bp, Homo sapiens
agctatccagacattcttgtaaatgtcactgcttttgaagttttggagtgaggactccaaagtttgtgtatcctcaagttattttgttcattgccttatcstcttttaaatgttcctcttaaggaacctcagttgtacaagcctgtccttgcctgtttgaaatttattaaacctgtgagcttcccccagaacaatctgatt

SEQ ID NO: 147930 - DNA, 201 bp, Homo sapiens
gtcttatgtaagtgcccagagagagagagaggagggagtggggggagatcaggctcctgcttccttcaaggggagaaacggagggggtggcaggtgggggygtccgcctccctgacatgcagatgcctttcttctctgacacaggtgtggagacctgaagtgcttatcattccgtggaggcagtcacctcgggttaatttt

SEQ ID NO: 147931 - DNA, 201 bp, Homo sapiens
tgtcttcactgtgaagatggatttcaccatgagatctttactaggcagaaaagatggaacatcctgcagtagtgttttgtcatcgagcccacagccgaggycgaacagaagctgtatgttgttcctcaatggttgtgtccaaatgggaatgagtaagacttcaacatttctgaagatggatggtcaccattctcaattctg

SEQ ID NO: 147932 - DNA, 201 bp, Homo sapiens
cagaaagcaaacagtgctagttgcattaattatctctgttttatttgtcttttaatatctttgtctccttgaggaggctatggacttcttgaaggacagayggttttcatctctgtgcttcattgtctagcacagggcctggcgtgttgtcagggcatagtacctgtgtgttgaatgagcaaataaactgtgaagaaactt

SEQ ID NO: 147933 - DNA, 201 bp, Homo sapiens
tttaaaaataagactcatgatggagaaggctgatgtgagccgatggtgaaaggtcagcctggagctataaaaaggggtctctgagctgagaaactgaaacygatgctcccagaccaagattttttttttctgccatcaactgctgaagtaattaatagtcacttttattttagaatttgttttatatttaacaaagcagcc

SEQ ID NO: 147934 - DNA, 201 bp, Homo sapiens
tcttgactctgcaatggaaataataatactgaaacttcctggagaggctgcaaggtggtagccaagcatcaccctgcttgcaaagcagcgctccccgacastgtgggtgctggaggtgtgtgcatggccctttgcatcatatctcactggaagggtcttaagctgctgaggctgaaacgtaaagataacagcagcttcctg

SEQ ID NO: 147935 - DNA, 201 bp, Homo sapiens
ccaggtccctcccacaacacctgggaattcaagatgagatttgggtggggacacagccaaaccatatcacacactctaaagtacagaagttaaaaatccaytgtaacaatcttcctgggtctggacatatgtttccaagcttcccttcctgctttgtattttggtgttaacagctttctcagtagagcgttactggccact

SEQ ID NO: 147936 - DNA, 201 bp, Homo sapiens
taactgtttttctgggaaaaccatgagatgggtcatgcttctacttcttttttccttgttgcttttaatattttattcttggcatggagccatgcatccastcttccagcatttctcagaccttgtgacatgttaaccacaaagacaggtaagacccgcctttgcctacattgaactcccagtcttcataggcaacattta

SEQ ID NO: 147937 - DNA, 201 bp, Homo sapiens
agactttcctgaggttgaggaccatgggcctttatctgaaggaccaatgggagtgtgtagacagagatcctggaagagtgatccatgcattgggaatggcwtgcaaaggcctggcagtgggagagatggatgagacagtttgccatacctggggcactgagagtgggagtgccatgctgggaagtcactgtcggctgagca

SEQ ID NO: 147938 - DNA, 201 bp, Homo sapiens
tagacttaagataaggaaagcttctaaattaagaagggaacaagtggtggtggtttcttctcccatccctcacaaatgggtgacatgaatgaattactcastggcacgcttggtcctccctaggggtaaaaataaaagaaataaaaacgccagctttaagatttcacacatctcttagtgtacctttattgttcaagagta

SEQ ID NO: 147939 - DNA, 201 bp, Homo sapiens
gtcacattggcgtatggagagtagcaggcagcaacgagtgaaaggcttcgttaaatgtattttataagacttttcatcttttcgtttaacaaataataatmgaccatctaccctgtggcaggtgccatgctctgtgtggaggttacagagtcaggttacatttagcttctagtcttttatgggaggcagacattcagctat

SEQ ID NO: 147940 - DNA, 201 bp, Homo sapiens
tgacatgggagagcctgtaacttttttgcctgttttgattttgagtcctttatagggtattttgagagttgggcaccatcaggcgggtttgatgtcagtgyctcacaggtgggcgatgaagttctgggatcaattttgttatatggccgccttgtacagtgccacactggaagcttacattgcaagacatgttcttttcat

SEQ ID NO: 147941 - DNA, 201 bp, Homo sapiens
gtccccttctatcaaatgaagtgattgtttcacccctttataggtccgtgtttctgactcactttaataggactgaaactcgtgattgtctctcctccacrtgtagactagccgactaaaagaaggctatatgatatatatatacacgtagttgtcccttcatatccgtaggggcctggttccaggaaccccgtggatacc

SEQ ID NO: 147942 - DNA, 201 bp, Homo sapiens
cagtggctcacgcctgtaatcccagcactgtgggaggctgaggcaggcggatcacaaggtcaggagttcgagaccatcctggcccatatggtgaaaccccrtctctactaaaaatacaaaattagccgggcgggtgctaatatttgctaatattggtggcaggtgcctgtattcccagctattcgggaggctgaggcagga

SEQ ID NO: 147943 - DNA, 201 bp, Homo sapiens
gcagccagaaaatctgattgattttgttgatccccagcatttcccacatctattttatatcaacacacaggaaagactcccctttgattacagaatgcctrgtaggacaagttccttagaagcccacacttccttacataaatactaagctctattaagaagaacacaattttgagcaaaggaagcaccattgtaaggctc

SEQ ID NO: 147944 - DNA, 201 bp, Homo sapiens
aaaaacaagtattctccttactggactttattgtcctttattctgatgaaagaaatctctaaagcaacttctaacctcttttcacagagttcagtgaaacrttgtcaagcttaagaccgactttcacaagactttaaacatcatccagaaattatggtgacttcatctgcatattctgaatgctttgtttttaaatgtctt

SEQ ID NO: 147945 - DNA, 201 bp, Homo sapiens
ttctggtggaggagacacagttaataactaaactcgcagaaaacaatgatcagccagtggcaactgctacatagcaatatattagtgagcagctccactgrtttaaggatttctatgaggaggtgacgtttagtctgaaacctaaatgacatgaatgagcctcccagagaagagcaaagggagcacgttccaggtagagga

SEQ ID NO: 147946 - DNA, 201 bp, Homo sapiens
tttccaagtatcagatttcttcagaaagagcctatttttatgaacaagatcccaaacaaaaataaacagaaagcaaaaataaaatgaaaaagataaaccamtgttgaatttattatttacttcctgataggcaagagaacagatgcccatgtaaaaatttactgagtgcatcacaaagagaaaaattaggagtttttaagt

SEQ ID NO: 147947 - DNA, 201 bp, Homo sapiens
ctggggctggggctggagctggggcaaagagagagtctgtaaacattgcactcctgaaccacagctctgtagggagtttaccacctggtcttccgcagcgygtcaagtgttatctgcagacacaaccagagggaaagggtatgatcttggatccagcccaaagcctatgctcccagctctgtgggaagaggtcattagagc

SEQ ID NO: 147948 - DNA, 201 bp, Homo sapiens
ggtggggacacagccaaaccatatcatccacccagctgataattcaggtagtcgccagacacagggctagtgttctagcaggcagcattgcagattaaagytcggctcttgcagtcactgttgagtgagggttacagacaagcagaggattattaagtagtgcggttagtgccaaaatagtggtagtgctttgagagcaca

SEQ ID NO: 147949 - DNA, 201 bp, Homo sapiens
tggatatctttatcagtatgacccataggttccctggctctgttaatacagaccagatatcattcttcagtaacaaccccatttcagtttcttaacacaayggatatgtacttttgccaatcacattccacgtccacttgaggtcttcagggatctgtgttcactgtgggtactcaggattcatctccatgcatacttcca

SEQ ID NO: 147950 - DNA, 201 bp, Homo sapiens
ttttacttgctttggaatttatcaagtgctctcttttctatgaaggttacccttcaagtgagtaagggggcttgattagaacactgggggatttaccttgyactttttaaaaataagactcatgatggagaaggctgatgtgagccgatggtgaaaggtcagcctggagctataaaaaggggtctctgagctgagaaactg

SEQ ID NO: 147951 - DNA, 201 bp, Homo sapiens
ttcaagaccaaatttaaggtttatttcctccagacatctctatctgattgttgtccctcctttcttatcactcccctttaattgtccttctactggaccastgctatacgtatctcaaacaaccaagggctgaaaacacttgaaaaaaaaatagatggttgcatctatattgaacatgtacagagttttttcttgtcattc

SEQ ID NO: 147952 - DNA, 201 bp, Homo sapiens
ggttaatgtttgttagatgtattacaagagctgagtgaagccatcatcttttcagggtgaccagtgaagagattcattttggctgtcagccagaagacatytggactgccattgacaaggttttccttttactacaccaagagacttttgccttctatgtgtggtgaaagaaaacagtttttaaaccaatcagaaattaat

SEQ ID NO: 147953 - DNA, 201 bp, Homo sapiens
gatttttttaaaggggatttagagcattaggaattcctttgatcagtagccaaatccccaagtggaagtaaaggcacaatggaattaccttgtaccttgtrccgtcttctatactactttttaagggtgacatttttcccttctgcattctcatgtatgataaattctaaatctagaaaggttagacagccatcctcacaa

SEQ ID NO: 147954 - DNA, 201 bp, Homo sapiens
gatatacccaagactggacaatttacaaaagaaagagatttaactggacttaaaattccgcgtggctggggatgcctcacaatcatggtggaaggcaaggmggagcaagtcccatcttacatggatggcagcaggcaaagagagagcttgtgcaggggaactcctctttttaaaaccatcagatctcatgagacttactca

SEQ ID NO: 147955 - DNA, 201 bp, Homo sapiens
aggcgtgagccactgcgcccggccgccttgtgtctgctttacagatgcaaaacctgaaattcagagaagggaattgccacactccagcttgtattgaagayagtgctcgtgccatcattccatgttgcttccagatcaaggacgcttaaatattcccaggggattaaaaaatatgtatactatgtaggaactcagcaattc

SEQ ID NO: 147956 - DNA, 201 bp, Homo sapiens
tgcttataaaagcaaaaaacaaaagtactctgcaagtttttgttgaaagtatttgccagccaccaaaccgtttgtgtccttagttctatcacaaccttggycaaatgatttctgtccagtgagataaagaggaagagtgaagtgttgttgtctaaaagaaccacttcccacaacatgaaatccaaccacacccacctttgg

SEQ ID NO: 147957 - DNA, 201 bp, Homo sapiens
acaagcgaatgctatcatgggatacagagggacaataggccaacaggcaaaacatataattattctgttgaaatactatacacaggaccttaggcccacargaagaaagacctcacataaaggcctcacataaagtcaggatccacaaagagtattatcctcagcggataaacagttaataaaactcagagtgtagaagaa

SEQ ID NO: 147958 - DNA, 201 bp, Homo sapiens
taggtgctttccatgcttgatgttgatgctctgtttgagattcctgtgctgattagccaattgataaacttaatgagaaagcaaaagcactttgtaaactstcaagtcctgcaccagtggaaggagggataggtgatcagattctgctttccgtggctttggtctagagccccaggaacttcatgctgtcttctctgtaga

SEQ ID NO: 147959 - DNA, 201 bp, Homo sapiens
tgatctctgcatgtttttccaacctcagctcaccgccgctgtcactgcctggggagtgtgtcacctgtccagataggttcctacagtttttttttttttttaagatggggtctcactctgccatccaggctggagtgcagtggtgcaatctcggctcactgcagcctccgcctcctgggttcaagggattctcctgcctca

SEQ ID NO: 147960 - DNA, 201 bp, Homo sapiens
cctcgggaatggttttctttcccctcgaccttgtctttatttcatagtaatttagccacatcttgaattcctcgtcttttctgtttgagtttgacagtttyattttgtttcaactatgcaatactagccttcaagactgataaattcatattattccaaagcttttagtacctacccaatggtgggcacaaaaatggggct

SEQ ID NO: 147961 - DNA, 201 bp, Homo sapiens
tgggtttttcagctattctttctttctgtatcagacaaatgaatggatgtgaggattcaatgagatatgatgtgtaaaagcctggtacgaggcctagagcatagcagggactctttcattcacccagcacttgtgcttcaatttctgctgtgcaccgtaaaagcatgtggcttgggaggctgaggtgggcagatcacgagg

SEQ ID NO: 147962 - DNA, 201 bp, Homo sapiens
ttgggtttttcagctattctttctttctgtatcagacaaatgaatggatgtgaggattcaatgagatatgatgtgtaaaagcctggtacgaggcctagagcatagcagggactctttcattcacccagcacttgtgcttcaatttctgctgtgcaccgtaaaagcatgtggcttgggaggctgaggtgggcagatcacgag

SEQ ID NO: 147963 - DNA, 201 bp, Homo sapiens
agcaaacttgccctgaaggatttccttcttggcttgatgaagttggcatgttgggggagcccatgtggcaaggaactgtgggtggctttgaggagcagagrgtgacccctgcccacagccagcaagaaggcaaggacctcaggcacaaggaaatgaattctgccagcacaggagggagcttgcaggtggattcggccccag

SEQ ID NO: 147964 - DNA, 201 bp, Homo sapiens
tctgaggatgttgagtggcattccttgcctctgccccctggatccggtagcaccccagtgcccaagtcatgacaaccaaaagtgtctccaagtattgccargggtcctttgggggcaaaattgcccttcatattagaaactgacacaattggggtgaccccacgctctaggcaggtgctgactgtgaaggtgatgggatag

SEQ ID NO: 147965 - DNA, 201 bp, Homo sapiens
gacccaactgtccttatatttggaaaattgaactttcattttatagtgtacagattccattttaaaatcaatgtccctgacctattcagtgggctcagggrcagaagatggagctgaatgggataggcgttgttaaatttctttccgaggttctaattttcttatttatcgggtaacttgcaacaggttgccagctatata

SEQ ID NO: 147966 - DNA, 201 bp, Homo sapiens
tacctttttgataattgaggaaactaataaaccagatctcaaactaacatccaggactggtcaggatgcccacagcggggaaagttgggccaatttttatytctgaggtttcagtatcagtatagtcagtatgtccacattttgattaaaagaaagcaaataaatggaatgcctatatatgtgtcttggaaagtgctaagg

SEQ ID NO: 147967 - DNA, 201 bp, Homo sapiens
cccaaagaagagaatactttttcccaagcaaaactcctttacctgctttttatctgctcagcttagctataaaagttaatactcttattaaactttttctwttagaaaggaaagaaatgcacttcttttctctgcctgacacttccttctctttttcacttatgaagggcatacctttttgataattgaggaaactaataa

SEQ ID NO: 147968 - DNA, 201 bp, Homo sapiens
gagtaaagtgccttaaacaatctactaattttgtgtcaaatatcaagaagcccttcgattggcagttccaagagtggtggttattatcttgggaattttcrtgggctcctcatggtggaggggtgagaataaatccagaaatctgctgcctacaggactgtagatgggaagagggaaggcaaccttattctcatatgcact

SEQ ID NO: 147969 - DNA, 201 bp, Homo sapiens
aataagggaactcgcaaaaaaatgcaaatggtaaaaatatacaaatatattcaaagaaagaagaaaataagattttatataggagtctttaaaaatttttrttacttattaatgggaagtatctatgagggccaacccttcttaaattgtctattgtaagtcaacatcagaataccctttttggatattttggcaatatca

SEQ ID NO: 147970 - DNA, 201 bp, Homo sapiens
acacatatatgttccttgttaacttttcaaaatgttttcactgtgagggttttgaggttgtctagttcactatgttacctgaaataggaatctcccttccycatctttcttctagagctcagttagcatctcaaggaaagtgttctgggcctggcattctgttcaaatttgggttccccttctataggttatctttccacc

SEQ ID NO: 147971 - DNA, 201 bp, Homo sapiens
atacacatatgtatgtatacacatatatctatatacacatgtatgtatacacatatatgtatatacacatatgtatgtatacacatatatgtatatacacrtacacatatgtatgtatacacatgtatatacccatgtacacatgtatacacgtgtatatacatatatgtatatacacacacatataatatacagtatata

SEQ ID NO: 147972 - DNA, 201 bp, Homo sapiens
acagagtgagactctgtctcaaaaaaataaataaataaataaataaataaataaataaataaatatggtatagatggcatacctgtatagggcacttaccrtgaatggagcctgtagaactggaagtttctttctctgggtgagtcagtgagtgagtggtgtgtgaatgtgaagggctagggcattactgtgtactaccgt

SEQ ID NO: 147973 - DNA, 201 bp, Homo sapiens
atatgtatatacacatatgtatgtatacacatatatgtatatacacatatgtatgtatacacatgtatatacacatatgtatgtatacacatatatctatrtacacatgtatgtatacacatatatgtatatacacatatgtatgtatacacatatatgtatatacacatacacatatgtatgtatacacatgtatatacc

SEQ ID NO: 147974 - DNA, 201 bp, Homo sapiens
ttagtagtcatccagataaaaatcagtgtgttttctgttcctcccttctgtgtgtgggggtttgtttctaaatcacctttatactaagagtgtaggattcrggtcctaacttcatgcaaaggttctctctctgactccctcttaagccaggccatgggcctcatcttctccctcctgcaccctcacagcagtgaaagcaga

SEQ ID NO: 147975 - DNA, 201 bp, Homo sapiens
tacacatatgtatgtatacacatatatgtatatacacatatgtatgtatacacatatatgtatatacacatatgtatgtatacacatgtatatacacatatgtatgtatacacatatatctatatacacatgtatgtatacacatatatgtatatacacatatgtatgtatacacatatatgtatatacacatacacatat

SEQ ID NO: 147976 - DNA, 201 bp, Homo sapiens
atacacatatgtatgtatacacatatatgtatatacacatatgtatgtatacacatatatgtatatacacatatgtatgtatacacatgtatatacacatatgtatgtatacacatatatctatatacacatgtatgtatacacatatatgtatatacacatatgtatgtatacacatatatgtatatacacatacacata

SEQ ID NO: 147977 - DNA, 201 bp, Homo sapiens
atatatacatatgtatgtatacacatatatgtatatacacatatgtatgtatacacatatatgtatatacacatatgtatgtatacacatatatgtatatacacatatgtatgtatacacatgtatatacacatatgtatgtatacacatatatctatatacacatgtatgtatacacatatatgtatatacacatatgta

SEQ ID NO: 147978 - DNA, 201 bp, Homo sapiens
tatatatacatatgtatgtatacacatatatgtatatacacatatgtatgtatacacatatatgtatatacacatatgtatgtatacacatatatgtatatacacatatgtatgtatacacatgtatatacacatatgtatgtatacacatatatctatatacacatgtatgtatacacatatatgtatatacacatatgt

SEQ ID NO: 147979 - DNA, 201 bp, Homo sapiens
tatgtatatatacatatgtatgtatacacatatatgtatatacacatatgtatgtatacacatatatgtatatacacatatgtatgtatacacatatatgyatatacacatatgtatgtatacacatgtatatacacatatgtatgtatacacatatatctatatacacatgtatgtatacacatatatgtatatacacat

SEQ ID NO: 147980 - DNA, 201 bp, Homo sapiens
atatgtatatatacatatgtatgtatacacatatatgtatatacacatatgtatgtatacacatatatgtatatacacatatgtatgtatacacatatatgtatatacacatatgtatgtatacacatgtatatacacatatgtatgtatacacatatatctatatacacatgtatgtatacacatatatgtatatacaca

SEQ ID NO: 147981 - DNA, 201 bp, Homo sapiens
gccaagtaacctagtggctttgtgcaagtcctttaatctcacagaacctcatgtttctcatctgcaaaatgagtgtaagattagttaagctgcctacctgytagggtagttgtgaatatcagttgggaaaattggtgggaaaagagcttggaaccatttaaaatatacagatttgtgaggaatcaatgctatggatctaac

SEQ ID NO: 147982 - DNA, 201 bp, Homo sapiens
atggagactcaaaggaaagttcaaaggatgagaagcttccgccaagagaagatgctgtggaagtgttctaagcagagggaaggcagatgcaaaggagagakcctgtgatgtttgatggagagaaaggaggcctctgtgtgtccggggggtgggggtgtgggtggggaagagagtgttaggcagtggaatcatgttcacgtg

SEQ ID NO: 147983 - DNA, 201 bp, Homo sapiens
cttgggtttttcagctattctttctttctgtatcagacaaatgaatggatgtgaggattcaatgagatatgatgtgtaaaagcctggtacgaggcctagagcatagcagggactctttcattcacccagcacttgtgcttcaatttctgctgtgcaccgtaaaagcatgtggcttgggaggctgaggtgggcagatcacga

SEQ ID NO: 147984 - DNA, 201 bp, Homo sapiens
tcgtttttgagacagagtctcactctgactcaggctggagtgcagtggtgtgatctcggctcactgcaacctccgcctcccaggttcaagcaattctcctscctcagcctcccgagtagctgggattacaggcacatgccaccacgcccagctaatttttgtatttttagtagagacaggatttcaccatgtctgtcaggc

SEQ ID NO: 147985 - DNA, 201 bp, Homo sapiens
ccttgggtttttcagctattctttctttctgtatcagacaaatgaatggatgtgaggattcaatgagatatgatgtgtaaaagcctggtacgaggcctagagcatagcagggactctttcattcacccagcacttgtgcttcaatttctgctgtgcaccgtaaaagcatgtggcttgggaggctgaggtgggcagatcacg

SEQ ID NO: 147986 - DNA, 201 bp, Homo sapiens
cttcagctgtagtagccaacttggtaggagggcaggagtcagtctgcatggaccagtttccaggatgattctgctttcattattgaccactgggtactcaktttgttttatgttatgttatgttatgttatgttatgttatgttatgttatgttatgttacgttatgttacgttatttactttttctttgagacagggtct

SEQ ID NO: 147987 - DNA, 201 bp, Homo sapiens
caggctgctaacaacatagcgtaaacggaacgggtcataaacagaaatttatttctcacagttctggaggctgggaagttcaagttgctggcagactcagsttggtgtcttggtgattgcccttttcctggttcttggattacccttcttgctgtgtccttacttggtagaagaggcagggtagctctctgtgcctctttt

SEQ ID NO: 147988 - DNA, 201 bp, Homo sapiens
accttgggtttttcagctattctttctttctgtatcagacaaatgaatggatgtgaggattcaatgagatatgatgtgtaaaagcctggtacgaggcctagagcatagcagggactctttcattcacccagcacttgtgcttcaatttctgctgtgcaccgtaaaagcatgtggcttgggaggctgaggtgggcagatcac

SEQ ID NO: 147989 - DNA, 201 bp, Homo sapiens
aagttgttgaaaacgatagcgtagttcattggccggaaaagaagagtgtttctttagtcctgtcgtggtccattcaggctgctaacaacatagcgtaaacrgaacgggtcataaacagaaatttatttctcacagttctggaggctgggaagttcaagttgctggcagactcaggttggtgtcttggtgattgcccttttc

SEQ ID NO: 147990 - DNA, 201 bp, Homo sapiens
ccggaaggcggaggttgcagtgagccgagatcgcaccactgcactccaacctgggcaacagagcaagactccatctcaaacaaaaaaaaaaacaaaaaaaraaaaaaaaggggaactcctaaaccattttccaaggcaactggaccatttcttggccactgttcttcactgcatttttgagtaaagaaatcacgtctttgg

SEQ ID NO: 147991 - DNA, 201 bp, Homo sapiens
tgattctgctttcattattgaccactgggtactcattttgttttatgttatgttatgttatgttatgttatgttatgttatgttatgttatgttacgttaygttacgttatttactttttctttgagacagggtcttgctgtcacccaggctggagtgcagcagcaccatcctggctcactgcagcctcaacctcccaaac

SEQ ID NO: 147992 - DNA, 201 bp, Homo sapiens
tgcttgaacccggaaggcggaggttgcagtgagccgagatcgcaccactgcactccaacctgggcaacagagcaagactccatctcaaacaaaaaaaaaaacaaaaaaagaaaaaaaaggggaactcctaaaccattttccaaggcaactggaccatttcttggccactgttcttcactgcatttttgagtaaagaaatca

SEQ ID NO: 147993 - DNA, 201 bp, Homo sapiens
ggtgttaaaataggtattctcaccagattgttacagtttccttttctgaatggccaggtgagccccagtgtagaatccagttgggcagctctgtagtgcgyggtcctgcagggacagcagaggggatttgatgaatctaacacagggctcattggatgggggcaggatgaaatcagcaagcacaaagactgggcacggtgt

SEQ ID NO: 147994 - DNA, 201 bp, Homo sapiens
aaagaaaagtcaccagatttaaagtaggcagtaaaaaaagtagagatagagaactaagaaggctctgttatctatataatcacaaactcttaatttggggraaaaaaaaccaagaaaatagaaaaaagaagcttggggagttcaaataatctgtgttgtggctgttgatccaaaaacatgcatgaggaaagccttgtaatt

SEQ ID NO: 147995 - DNA, 201 bp, Homo sapiens
tctttttagacactgtgcagaataattatgatagctgatatttacatagcccttactctgggccagtcaccagaaggcaggcattgttatttttgtccctmgtttatagtgatgaaactgagacatggagtggtcatttcatttgcctaagaaaatagcaggctgggtttgttggctcacacctgtaatcccagcactttg

SEQ ID NO: 147996 - DNA, 201 bp, Homo sapiens
atctactctctgtctctgcagaactgcccattgtaagcacttcctgtaaaagtaataatatacaacatgtggcctttttctgtttggtgtctttgacttakcatgacattttcaaggtttgtccacatcataccatgtatggaattcctttttatgccacaataatattccatggtatggctaaaccacattttgtttatc

SEQ ID NO: 147997 - DNA, 201 bp, Homo sapiens
atgagccaccatgcctggccagcatcttctaacagttgtacattcatcaaaactgacaaaccaacatcaatatattgcttttcaagtaaacttcaagcttkcattgtatttcactcaatgtttccatttaagctttatttccttagtctccttgggtctgtcataatgtcacagtctttcctggtttttcgtgactgacct

SEQ ID NO: 147998 - DNA, 201 bp, Homo sapiens
gaaaaagttagaagtaattaataatatattgatgccttcttctagaagaagagttactgtcctttattgaacatatactggacactttgtatgttttgtcrcatcgaaaaattgacaagaatgcagccctaagcttctggcagtgatcttatgtgaatgatctctactgaagcacaagactctttttagacactgtgcaga

SEQ ID NO: 147999 - DNA, 201 bp, Homo sapiens
cagagcaagactgtctcaaaaataaacaaacaaacaaataaataaatgaaaagtaagcactctgtaactcttgctttgtacagtgtagatgaactgagatsaagtacgcaaaggctcttctaaaccactaagatgccagtaatatatgattgttatcgttagcatcagttacttatatgaactacagatatttagcagtgt

SEQ ID NO: 148000 - DNA, 201 bp, Homo sapiens
aacctggggccaggacccagacctctaggatggcatcaccaaccgattccagaggcagcatcactgggccgagaagtagggacagcgaagcgtgttctgartgtgggaaaaactgcagaatggatgtagctgctgctaaaggaaggaggtgccactgctgggctgaaaaaatgggactagggtgatgcccacagggacagg

SEQ ID NO: 148001 - DNA, 201 bp, Homo sapiens
atggggtttcaccctgttagccagggtggtctcgatctcctgacctcgtgatccgcccacctcggcctcccaaagtgctgggattacaggtgtgagccccmgcgcctggcctgttttattttttataaagaacacgccctgctatcctctgttagtacttatcttatttacatgatttggaagtgcatgggaatgttggct

SEQ ID NO: 148002 - DNA, 201 bp, Homo sapiens
aaaccatatcatccacccagctgataattcaggtagtcgccagacacagggctagtgttctagcaggcagcattgcagattaaagctcggctcttgcagtsactgttgagtgagggttacagacaagcagaggattattaagtagtgcggttagtgccaaaatagtggtagtgctttgagagcacacgggaagggcatttt

SEQ ID NO: 148003 - DNA, 201 bp, Homo sapiens
aaagtgctgggattacaggcgtgagccactgcgcctggcccaccattatttgattagttacttgcaatctacttttctgtatatttttaaagactgttgttttcctcctatatgtaattctgacttctgccttttattttcacttaatattatcgatctttgtaactgtcactttcattgactgggtaatgttccatctag

SEQ ID NO: 148004 - DNA, 201 bp, Homo sapiens
ggctgtcagccaagaaaagaaggcgaataaaatttgttcctgagcaaggcttcagagtggtgcctgtactagccagagcctttccagactccagtggccasagctgtatcacagagttattcttaactgcaaggaggctggagatacagcctagctctgtgcccaggaagagagcaaaatatggatattggtgagcacagg

SEQ ID NO: 148005 - DNA, 201 bp, Homo sapiens
taagggaagtggtgagttgatgagtttctctcctataaaagatgaggctgatgacatgaactgtctttcaggcttgttctaagaagagatgactccatacrtgcaaaatgcatagaacaatgcctggcgtatagtagacactcaataaatgttaagtactaagaaataaaaataaaatcctaagctccctaacaaatcaga

SEQ ID NO: 148006 - DNA, 201 bp, Homo sapiens
ccgatacaggttttgaattaatcattaccagctacttgagccaagtgaaaacctgatggtagcactggttcctcaatgttaaaaatccatttttaattccytaaagcctttttatttttaaaattttgcttggcccctgactcatgcccagccaccttgctttcacttgcatttttatgggcgtagctggtgaccatgtaa

SEQ ID NO: 148007 - DNA, 201 bp, Homo sapiens
aggcataagctgataggaaagatactgaggaaggacaaaagagagaataattagaggaaaaaaagtgctattccacgtgtagggagtgagataagggaagwggtgagttgatgagtttctctcctataaaagatgaggctgatgacatgaactgtctttcaggcttgttctaagaagagatgactccatacgtgcaaaatg

SEQ ID NO: 148008 - DNA, 201 bp, Homo sapiens
aaagttaatttttctagccatgagacctgggctttgtttgttttggacagttttgacagaattcttgaaaatacgttgcatattttcttttttttctttgygaatagcatgtcccagacatactcttaaccttttccagtaccttaaggaaataatgagtgcacacctgccaggtattaacacccacacccatggggctag

SEQ ID NO: 148009 - DNA, 201 bp, Homo sapiens
ttactacagttgaactctatgggaaattccatgcagatttatgaaagcctggaggtgtaatgttgtgtttgcctggaagcagatttgcatttattgcggcyagttgcctgaggccctgtcagtcctaatcactttgaattaaattctgcatttgaggtctgtcagacaccagatagcttgagtccagacaacacaccactg

SEQ ID NO: 148010 - DNA, 201 bp, Homo sapiens
atgagccgagactgtgccactacactccagcctgggtgacagagtgagactctgtctcaaaaaaataaataaataaataaataaataaataaataaataaatatggtatagatggcatacctgtatagggcacttaccatgaatggagcctgtagaactggaagtttctttctctgggtgagtcagtgagtgagtggtgtg

SEQ ID NO: 148011 - DNA, 201 bp, Homo sapiens
gatcatctaggcactcctgaggcttcaggcgcctccttgcaatccccaccttgcaggcatgcagtgtctgttgcatggaaccattggaaggaagctcaccyggcaagataatcttctcttgttccgggcagcctgagcaaaccttgcatcctaaaccattctttctaacttcctctcccttctttgagtttggtccttgag

SEQ ID NO: 148012 - DNA, 201 bp, Homo sapiens
aatgagccgagactgtgccactacactccagcctgggtgacagagtgagactctgtctcaaaaaaataaataaataaataaataaataaataaataaataaatatggtatagatggcatacctgtatagggcacttaccatgaatggagcctgtagaactggaagtttctttctctgggtgagtcagtgagtgagtggtgt

SEQ ID NO: 148013 - DNA, 201 bp, Homo sapiens
aattcggattgataggagccatggaagtcatatggcccaaaggtcccatttcacacatgagaaaactaaagtcacacagtatcatggtccaatgacatttwaaaaaaatcctttatttactgccattggtcagcatgaattatgccaatacctagtgagtgcctgcctagatccaggtaccatgagaggtgatttgcatat

SEQ ID NO: 148014 - DNA, 201 bp, Homo sapiens
acctgtagtcccagctactcaggaggctgaggcaggagaattgcttgaatctgggaggcggaggttgcaatgagccgagactgtgccactacactccagcstgggtgacagagtgagactctgtctcaaaaaaataaataaataaataaataaataaataaataaataaatatggtatagatggcatacctgtatagggca

SEQ ID NO: 148015 - DNA, 201 bp, Homo sapiens
gagatattcctctttggtccctgcatattgctgcattttttttctttttttttttcttttgtttttggagttttactctcatcacccaggttggagtacartagtgcgatctcagctcactgcttcctccacctcccgggttcaagcgattctcctgtctcagcctcccaagtagctgggattacaggcgcctgccaccac

SEQ ID NO: 148016 - DNA, 201 bp, Homo sapiens
gacaagcttattatcttggaagaataaaaatcccgcctcagcttctgtgctgtgagagtaggtgtccaaataaaatgtctgcagagttttgagcaaaatasacagagacccaagaataccaaccaagttctctcatgttaataaggcaacagaaaaaaaatgataggctttgcaggaactcagaaaatatacaccaatagg

SEQ ID NO: 148017 - DNA, 201 bp, Homo sapiens
gtcagagaacaaacgtgtgatttcaagccacgtcatttgtagtgaaatgtggtacagaaggaataggaaaactgacacacttctttaaatggcctttcacygggcgcggtggctcacgcctgtaatcccagccctttgggaggccgaggcaggcagataacctgaggtcaggagtctgagaccagcctgaccagcatggtg

SEQ ID NO: 148018 - DNA, 201 bp, Homo sapiens
gtgcctgtaatcccagctactctagaagctgaggtaagaaaatcgcctgaacccaggagttggaggttgcagtgagccgagatcgcacctttgtactccargctgggcgacaatgcgagactccgtctcaaaaaaaaagaaagtaaaaaagaaaatgggtgtctacttgcaccaccattgcctcccccgccccccaaaaaa

SEQ ID NO: 148019 - DNA, 201 bp, Homo sapiens
acatatatgtatatatacatatgtatgtatacacatatatgtatatacacatatgtatgtatacacatatatgtatatacacatatgtatgtatacacatrtatgtatatacacatatgtatgtatacacatgtatatacacatatgtatgtatacacatatatctatatacacatgtatgtatacacatatatgtatata

SEQ ID NO: 148020 - DNA, 201 bp, Homo sapiens
tgggatctgggttttctggctgctgggcctggtttatagttcagtggggaccacacttaacaatggttgaacttcaggtgctgtgacgaaatgctctcatraggctggagcagctccagtgaagctggacctgcagaagaaagagagaagacatagatatgtctcatggaagggcattatctgctctgggatgtcctgcag

SEQ ID NO: 148021 - DNA, 201 bp, Homo sapiens
catatgtatgtatacacatatatgtatatatacatatgtatgtatacacatatatgtatatacacatatgtatgtatacacatatatgtatatacacatatgtatgtatacacatatatgtatatacacatatgtatgtatacacatgtatatacacatatgtatgtatacacatatatctatatacacatgtatgtatac

SEQ ID NO: 148022 - DNA, 201 bp, Homo sapiens
tcttaggaatcatctctgccgtgacaccagatcagcagaccagccactacactcccttgcttaaaccaccagtggcttaagtcagtctacacttcttcaggcctacaaggatctgtgagatgtaggccctgtccactttgtagccagttccttctctgatatttgcttttccaatcttatgtaaccacaggccacattctc

SEQ ID NO: 148023 - DNA, 201 bp, Homo sapiens
aaccggtacatggcagagccaggatgaatatccagaactgtctgactccagtatctgtgccctttctcctatgtcctgtttccctctctgtggcttatttyagctaagttactgtcattgtgtctagacaaggactctctgagcttttgatgggggcaggttccttctctgggtgttcctgaagaaccagtatattaagca

SEQ ID NO: 148024 - DNA, 201 bp, Homo sapiens
agatagagagcatcctggccaacatggtgaaaccccatctctagtaaaaatacaaaaattagctgggcgtggtgacacacgcctgtagtcccagctactcrggaggctgaagcaggagaatcgcttgaacccgggaggcggaggttgcagtgagctgagatcacaccactgcactccagcctggtgacacagcgagactct

SEQ ID NO: 148025 - DNA, 201 bp, Homo sapiens
acatatgtatgtatacacatatatgtatatatacatatgtatgtatacacatatatgtatatacacatatgtatgtatacacatatatgtatatacacatatgtatgtatacacatatatgtatatacacatatgtatgtatacacatgtatatacacatatgtatgtatacacatatatctatatacacatgtatgtata

SEQ ID NO: 148026 - DNA, 201 bp, Homo sapiens
tgtgtcaaaggaggaacctgatgggaggcaattgcattatgggggtggttcccctatgctgtacttgtgatagtgagttctcctgagatctgaggtttttyaaggtggcgatttttcctgtgcttgcaactggacttctctcttgcctgccaccatgtaagacgtgcctgcttccctttccaccatgattgtaagtttcct

SEQ ID NO: 148027 - DNA, 201 bp, Homo sapiens
tgtgtgtgtatatatatacacatatatacgtatatatacacatatgcacatatacacatgcatatatacacatatgtatgtatacacatatatgtatatayacatatgtatgtatacacatatatgtatatacacatatgtatgtatacacatatatgtatatacacatatgtatgtatacacatatatgtatatacacat

SEQ ID NO: 148028 - DNA, 201 bp, Homo sapiens
tctgagaagacgacatttgagctaagacctgaaggatggaaaggcggcagccatgctgagagctggaatgagcatcccagatagagaggacggcacgtgcraaggccaccaagcaggcgtgtacttgggtgatcgtgtttccctctcatgatcatggccctcatcattcctggcactgcaccctctgctcttgtcaccttt

SEQ ID NO: 148029 - DNA, 201 bp, Homo sapiens
ttgtgcattgttagcctagggtaggtgattcacactagccactctggtagtaatcggttagggtattagaaagagtgctggatgtgaaacaggcaggcctrgggtgagatactgttcacccgttactcatcgagtgactttatgagttgtgtaacatctgaatacttcagttttctaattcataaaatggatggctaattt

SEQ ID NO: 148030 - DNA, 201 bp, Homo sapiens
tagagcgagactccatctcaaaacaaacaaacaaaaaacaacaacaacaacaacaaaaaacaaagattcatctggccacaaataccactagtggaaccctmacagaaaagcaagttttgagggaattggattcttctagaaaggaccgtttctttgggtagagtctctgagaagacgacatttgagctaagacctgaagga

SEQ ID NO: 148031 - DNA, 201 bp, Homo sapiens
tttcactgctgtctatggccataccaccctgaatgcacccaatctcatctgaatttcactgctttatcccccatacctggaatcatgcctggcctgtattrggcactaagtatttgttgttgaataaaataaataattttggaagataagtgtttcgaagacagtgatatagagcagcatttctcatggttgctcgtggga

SEQ ID NO: 148032 - DNA, 201 bp, Homo sapiens
gatcgggactagaggacttgaaataactttctgaggcccagcctgctggtgcgaagtagatccagtgattcaacgtggctccatcccatgacatttagctytcagggagctgcaaacctatgaaacagagctttcagattttggaaatagaaacgcaggcagcatagtgccacttgctgcctcctgggaaagccccttgtc

SEQ ID NO: 148033 - DNA, 201 bp, Homo sapiens
gttgtgcattgttagcctagggtaggtgattcacactagccactctggtagtaatcggttagggtattagaaagagtgctggatgtgaaacaggcaggccyggggtgagatactgttcacccgttactcatcgagtgactttatgagttgtgtaacatctgaatacttcagttttctaattcataaaatggatggctaatt

SEQ ID NO: 148034 - DNA, 201 bp, Homo sapiens
ctaccctgtggggctgttgtgagtagtaaacgaggtaatgttatcaagtgcctgtcttagcatgcagtatgcacttcacaaataagacacataaaaatttstttttcccttggacacaagacttagagtatttttcctaggatgatggtggtagttgtgagtagtaatatgagtagcaatggcactagtgctggcagtaat

SEQ ID NO: 148035 - DNA, 201 bp, Homo sapiens
aatactttaagttttagggtacatgtgcacaatgtgcaggtttgttacatatgtatacatgtgccattttggtgtgctgcacccgttaactcgtcacttayattaggtatatctcctaatgctatctctcccacctccccccaccccacgacagaccccagtgtgtgatgttccccaccctgtgtccaagtgttcttattg

SEQ ID NO: 148036 - DNA, 201 bp, Homo sapiens
tagcaaaggtgggatttgaacccaggtagtctctggctccacagcctatgttcttttttttttttttaatactttaagttttagggtacatgtgcacaatrtgcaggtttgttacatatgtatacatgtgccattttggtgtgctgcacccgttaactcgtcacttacattaggtatatctcctaatgctatctctcccac

SEQ ID NO: 148037 - DNA, 201 bp, Homo sapiens
cttcaacagccttatttccaaataaggtcacattctgaggtgctggggcttagtacttcaacatataaattttaggggtgggacacaattaaatccataaygctctgtaaggagcaaagtgtctggcacataggtgattgatttatacattcattgttcattgattgaatatctgagtgcttgagtcaggcactgttctag

SEQ ID NO: 148038 - DNA, 201 bp, Homo sapiens
tgcttgaaccagggaggcggaggctgcagtgagctgagatctccagcctaggagacggagcgacatcccatctcaggggaaaaaaaaaaaaaaaaaaaaaagcccaagtcttactgtgtcacctttaaggtaaaaatctcccctcctcctccacctggctctgtttctttgcattttccaaggtcttccacaagagggact

SEQ ID NO: 148039 - DNA, 201 bp, Homo sapiens
gccaaacatggtgtcccgcgcctgtaatcccagctactcaggagattgaggcaggagagtcgcttgaacctgggaggcggaggttgcagtgagccgagatygcaccattgcactctagcctgggtggacagagcgagacttcatctcaaaaaagaaaaaatttacatgttttatctttacatatctaatacctattacaac

SEQ ID NO: 148040 - DNA, 201 bp, Homo sapiens
caaagtgctgggattacaggcgtgagccactgcgcctggcccaccattatttgattagttacttgcaatctacttttctgtatatttttaaagactgttgttttcctcctatatgtaattctgacttctgccttttattttcacttaatattatcgatctttgtaactgtcactttcattgactgggtaatgttccatcta

SEQ ID NO: 148041 - DNA, 201 bp, Homo sapiens
atgtatacatggtatctttatgatataaaattacatattttagtccagtcgtggtgactcacgccttgtaatcccagcactttgggaggccgaggcaggcrgatcacctgaggtcaggagttcgagaccagcctgaccaatgtggtgaaaccccgtctctactaaaaatacaaaatgtagccaaacatggtgtcccgcgcc

SEQ ID NO: 148042 - DNA, 201 bp, Homo sapiens
gctcctaattggaaagagctggccgtgtatctcagtggggaaagtacaggctgtagagtgggatgattccaagacctgggtttgaggccccacgcttccakgcacttcgcaattcagcttctcattctcaatgggaatattatgttaggagcaaaatatgtaattcacctagtattttgcaggtgttttgtcatattatct

SEQ ID NO: 148043 - DNA, 201 bp, Homo sapiens
ccaaagtgctgggattacaggcgtgagccactgcgcctggcccaccattatttgattagttacttgcaatctacttttctgtatatttttaaagactgttgttttcctcctatatgtaattctgacttctgccttttattttcacttaatattatcgatctttgtaactgtcactttcattgactgggtaatgttccatct

SEQ ID NO: 148044 - DNA, 201 bp, Homo sapiens
caatgtatacatggtatctttatgatataaaattacatattttagtccagtcgtggtgactcacgccttgtaatcccagcactttgggaggccgaggcagrcagatcacctgaggtcaggagttcgagaccagcctgaccaatgtggtgaaaccccgtctctactaaaaatacaaaatgtagccaaacatggtgtcccgcg

SEQ ID NO: 148045 - DNA, 201 bp, Homo sapiens
cactgttctgtttccagcaacctccttttcatctgcagaagtccacattccacctttgctttatgaaaacttttggcctccaattcccattttcctttccrtctgttgccgttcttctgaaaacaccatcatggacccatccaatcatgtatcctgacagcaatgtaaaggcatcatttccaagcatcttcaggtactctc

SEQ ID NO: 148046 - DNA, 201 bp, Homo sapiens
aaaaaaaaaaaaagaaaaggaaagacataggtgttctggtcaggtgtagtacaaaagaaaaaagatttgtacatgacctactttcccagtttgcagattargtagggaatacaaaaggaagcgcagatttagagtgagagaatgaattcgtctcttctatgtctgtgatttttctttttgttgttgtggttttgatgtttc

SEQ ID NO: 148047 - DNA, 201 bp, Homo sapiens
atgtcactatactgaatactgtaggcagttgtaacaaaatggtaagtatttgtgtatctcaacatagaaaagggacagtaaaaatgcaacgtcataatctyatgggaccacaacactatactgtctgttgttgaccaaaacatcattatgtggcacatgactcgtgtgtgtgtgtgtgtgtgtgtgtgtgtgtgtgtacat

SEQ ID NO: 148048 - DNA, 201 bp, Homo sapiens
gatgctccactgtgcccttacccacgttgtaaaccaggaagctatgagaccaatttttctttaacaaattcactagaatttttatatccaaatagtctccygcgggagattccacactttaatgatgtttttcttttgctttaattgtcaacatcatggtcctcaaagagtgtttgtacctataattgaacaggtaagatt

SEQ ID NO: 148049 - DNA, 201 bp, Homo sapiens
tttgtgacccaagctgaaccaatcagaactagtaagcattacgccaaggctttttgctagtgctgttgggaaaggtactcgttgttgttgttgttgttgtkgttgttgttttgagacagggtcttgctctgtttgcccaggctggactgcagcggtgtgatctcagctcactgcaacctccacctccagggttcaagtgat

SEQ ID NO: 148050 - DNA, 201 bp, Homo sapiens
ttttgcaatttcatatgcatctattgttatttcaaaataaagttatttttaaaacctagaatgaggacaggaaatagtaacacaaatagaaaaaaaaaaaagaaatgatatgatggacaatgcagataatggcatagcattaagcaggtgtaacctctactgggctcctgacaaatggtgacatttaaaacagggcaacca

SEQ ID NO: 148051 - DNA, 201 bp, Homo sapiens
tgcagttagagtcaggcagagggatgctccactgtgcccttacccacgttgtaaaccaggaagctatgagaccaatttttctttaacaaattcactagaayttttatatccaaatagtctcctgcgggagattccacactttaatgatgtttttcttttgctttaattgtcaacatcatggtcctcaaagagtgtttgtac

SEQ ID NO: 148052 - DNA, 201 bp, Homo sapiens
ttagaaaatagattagaaaggtgataatattggtgagtgccaggagttagagatgtggggagcctggcaaggaaatgggcttgattttattattattattwtttttttttttttgaggggagtctcactctgttgcccaggctggagtgcaatggcgcaatctcagctcactgcaacctctgcctcctgggttcaagcagt

SEQ ID NO: 148053 - DNA, 201 bp, Homo sapiens
ccagataggttcctacagtttttttttttttttaagatggggtctcactctgccatccaggctggagtgcagtggtgcaatctcggctcactgcagcctcygcctcctgggttcaagggattctcctgcctcagcctcctgagtagctggaactacaggcgcctgccagcatgcccggctaattttttgtgtttttaatag

SEQ ID NO: 148054 - DNA, 201 bp, Homo sapiens
gcgatggtccttgtctctaagagttatttactgttgtgaaagagaagcacctgctcttcttgagataatcagggcgtatgtatccctgggcctcagaggtrtagcagcaaacaaaacagacaaaaatttctgcccacctggagcttatattctcccctggggaaatacataaatgtatatatagtatgtcagatggtgata

SEQ ID NO: 148055 - DNA, 201 bp, Homo sapiens
caagagggtaaattagaaaatagattagaaaggtgataatattggtgagtgccaggagttagagatgtggggagcctggcaaggaaatgggcttgattttwttattattattatttttttttttttgaggggagtctcactctgttgcccaggctggagtgcaatggcgcaatctcagctcactgcaacctctgcctcctg

SEQ ID NO: 148056 - DNA, 201 bp, Homo sapiens
tgtttttccaacctcagctcaccgccgctgtcactgcctggggagtgtgtcacctgtccagataggttcctacagtttttttttttttttaagatggggtytcactctgccatccaggctggagtgcagtggtgcaatctcggctcactgcagcctccgcctcctgggttcaagggattctcctgcctcagcctcctgagt

SEQ ID NO: 148057 - DNA, 201 bp, Homo sapiens
agacaccaaactacccaggaagctctttagaaatacgaatttgctggcccaacccagagttaggaaattagcaaattagaatcttctgagatgggtaccasgtacctatatgattttttaaaacctccccagaggatgctgatgcctgtcactgttaaagataattattataatgaagacatggtccagaagcagtggaag

SEQ ID NO: 148058 - DNA, 201 bp, Homo sapiens
gaacttcctcatcactccagaacgttctgcatcttgaaaagtgtttgggttacataggagtatgcattgtcaaaattttcccagtgatttgtgcatttcaktatatgtaacttttaccatgaaggcggggaaaaaacccataaacattattgaatcctggttaatgatatacatattaaaatgcctaggaagtaatgtgct

SEQ ID NO: 148059 - DNA, 201 bp, Homo sapiens
ggaacctgtggatatgttatgtcccatggcaaaagagactttgcagctataattatgggcttcaacatagggagtttatcttggattatctggtgggcccrttctaatcacatgagcctgtaaaagcagagaatttctggccggctgcagtggctcacgactgtaatcccagcactttgggaggccgaggcgggtggatca

SEQ ID NO: 148060 - DNA, 201 bp, Homo sapiens
ggctctcgcctgtaatcctagcactttgggaggctgaggcaggtggatcacgaggtcaggagttcgagaccatcctggccaacatggtgaaaccccccccctactaaaaataccaaaaaaattagctgggcttggtggcatgtgcccgtaatcccagctacttgggaagctgaggcaggagaatctcttgaaccagggagt

SEQ ID NO: 148061 - DNA, 201 bp, Homo sapiens
tagatattaatagcagtgagaatccctcatgaagctcagaaaggagaaataatcttccgagaacacacagccagcaaagacagagtcagttgtcaaatttrggtttgcctttgaagcccgtgtgcttcctattttaccatcctgcatcttagaacatgcagccttctcatcaaccagagatgctatctgttccagcaaacc

SEQ ID NO: 148062 - DNA, 201 bp, Homo sapiens
tggcacctatacaacattatatttggaggctggagaaaggcaggcctccactccttcttgcctgttgaacttcacctctccctgcatgcctgctccgtggytcactttctgcagacaccctcatgtcccttcttttcagagcaaataattctccctccgcctctggccctttacacctgctcttccttcgtactggaactt

SEQ ID NO: 148063 - DNA, 201 bp, Homo sapiens
acctcgcctcctgcagatcctgtcttaaatatcatcttcttggaaaagtcttcgctgaccactggttgaaaatttcaccacatctcccagctgagctttcyttatctcccctccctgctttgttcttatcatacaatagactatatgtttaacctacttacttgtttatccctcttctgttagcacataggcttcccgagg

SEQ ID NO: 148064 - DNA, 201 bp, Homo sapiens
aatggcgtgaacccgggaggcggagcttgcagtgagctgagatcacgccactgcaccatcctgggcaacagagcaagactccgcctcaaaaaaaaaaaaaagaaaaagaaaaagaaatgtttctggtcaatttggttagcaagcattataatggatgagaaatggagagcattttgcactggtgaatatcttaatcctccc

SEQ ID NO: 148065 - DNA, 201 bp, Homo sapiens
ggatacgcagaggtgggtggcacctatacaacattatatttggaggctggagaaaggcaggcctccactccttcttgcctgttgaacttcacctctccctrcatgcctgctccgtggttcactttctgcagacaccctcatgtcccttcttttcagagcaaataattctccctccgcctctggccctttacacctgctctt

SEQ ID NO: 148066 - DNA, 201 bp, Homo sapiens
ttgtgctgggaaataaggagacactactccctattactcccattaaaatgttcttttgaaatcaacttagtccttcaggatgacagttattgatgttaacrcaagtggaattttttagcccctcttctgcactaggactctgcttgttgagatccagaggaaataagttatggtctcatctctctgcaagctcactccagt

SEQ ID NO: 148067 - DNA, 201 bp, Homo sapiens
ctgacctcactccgaagtcttggtttcctcatctataaaatgaagacgttgacttagtgatgcccagcccctgggcctctggttctgggatatggctcttwcattcatcacacagcagacctaccaaagccaatgtcatcagagttagaaagacctcagctgaaaccccagctctgccactcaccagctgtatgacctctc

SEQ ID NO: 148068 - DNA, 201 bp, Homo sapiens
agactgcgccattgcactccagcctgggtgacagacaagcctccgtcttaaaaaaacaaataaacaaataaaccctgtatagcaaaagggactttacatamgcgattaagttaatggtcttgagatggagggagtatcctggactatacaggtgacccccaaatagaatgagtgttcttggaagagggaggtggaggaaga

SEQ ID NO: 148069 - DNA, 201 bp, Homo sapiens
ttttctgcctagttgttttgttttcgttttaacttaccaggaaaatataaaaacagtatcattaggagacttatctgatggctaaaaaaaaaaaaaaaaaagcctcagcaagagtctttccaataggcaatggtgtttgctagctttcagtgagttttcttaacgtttccaaattctgggccagatgttatttatataatc

SEQ ID NO: 148070 - DNA, 201 bp, Homo sapiens
tgcctggttgcccaggttggtctcgaactctcaggctcaagcgatctgctcgccttggcctcccaaagtgctgacattacaggtgtgagccaccacagccrgtccccaggcatctgatttttaccatcacctttttgaaattagattaagttgcagagggaaataaaagtggtgatcccttccatgtacgtcagacccatc

SEQ ID NO: 148071 - DNA, 201 bp, Homo sapiens
gctacttgggaggctgagggaggagacttgcttgaacccaggaggtggaggttggaatgaaccgagactgcgccattgcactccagcctgggtgacagacragcctccgtcttaaaaaaacaaataaacaaataaaccctgtatagcaaaagggactttacataagcgattaagttaatggtcttgagatggagggagtat

SEQ ID NO: 148072 - DNA, 201 bp, Homo sapiens
tgataggctggataatggcccccaaagacatcctcagcctaatccatgcactagaacctgtaaaaaagtaccctgtatagggccaggcatggtggctcacrcccgtaatcccagcactttgggaggccgaggcgggtggatcacgaggtcaggagtttgagaccagcctggccagtatagtgaaaccctgtctctactaaa

SEQ ID NO: 148073 - DNA, 201 bp, Homo sapiens
tgtttgaggcaccatgacctgtggatgtggataaagctgagagttcaccggaagcaggcctgcaaggggttgggcactctgcctcagagacataggacttrggttggaatcgcaggtcctcctctttctacctgtgataggctggataatggcccccaaagacatcctcagcctaatccatgcactagaacctgtaaaaaa

SEQ ID NO: 148074 - DNA, 201 bp, Homo sapiens
tccaatttttgtcactgtggattagctttttgctaagttgtgtcactttttaatttcagttcttcatctgtaaaacatacatcatacctgcctggtagggrttcacatgagaccgtgtctgttgggcagctgcagatttgcacatctgtgtatctgcctctgcatatctgaaatgttatcttcttagctccctgtcagcag

SEQ ID NO: 148075 - DNA, 201 bp, Homo sapiens
ttaaagatgtttgctaaacatttttaaaagaagctttatagatgtgtgctaaaactcataaagatgcttgctaaatgactggcttataaagatgtttactraatgactgatacacaatgaatttagagctgggtccctaagaataataaaaccgatggcagagtttctttatcacggtcaggcccaggaattcacgtttct

SEQ ID NO: 148076 - DNA, 201 bp, Homo sapiens
ttcatttaatatttttttccatcacttttcatatgcccagcaccttgtgtatgtagaaggtatgaaaaagtgctgggctcggtggctgacgcctgtaatcycagcactttggaaggccaaggtggtggatcacctgaggtcaggagttcgagaccagcctagccaacgtggtgaaaccccacctctactaaaaatacaaaa

SEQ ID NO: 148077 - DNA, 201 bp, Homo sapiens
ttgcaacctccgcctcccaggttcaagcgattctcctgcctcagagtcccgagtagctgagattacagatgcccaccaccacgcccggctaattttttgtrtttttagtagagacggggtttcaccatgttggccaggctggtcttgaactcctgacctcaggtgatccaaccgccttgacctcccaaactgctgggatta

SEQ ID NO: 148078 - DNA, 201 bp, Homo sapiens
agtaaggctcaacactgggctcagtaaattgatggggaaacaaaataaaaaatgtggctccattttcgtttttcattaaccttcagggaagattgcacaakgtaccttcgtaatgctattcattttttaactagcttcaattcagctcagaaatatgtatggaaatatgcctactatgtgccaggtaatgttggacacaga

SEQ ID NO: 148079 - DNA, 201 bp, Homo sapiens
ttctgaaattcagcaaacttgccagcaatcagagaggagatcagaagctcattttctagaacccatttgctggaaggggcagtgagtaatctcttgtagamggcttccttgtcctccagtggccttccccttcattgagttactttgtgtggccgtgccaagcatggtggctgccacgtggtggggggagccttacatctc

SEQ ID NO: 148080 - DNA, 201 bp, Homo sapiens
aagtgcagatgtagggccaaccatacttttcacacttttttgattgtatcctacagtcagaaatacatttttcatcacaatccaaaagacatatgtgtgtrtgtatgtttatacaggcatatatacacacatatatgcagatgagcaattaaaacaatattttcgtaaaacaatacttgaccttactatgttcagtgaatt

SEQ ID NO: 148081 - DNA, 201 bp, Homo sapiens
caccttttccaatcctgattggttgaccacctttagatagctccactttttctctttggaagtgacactctgacctgaatgatatgcagtggccattatcmaacaattgaaggttcacacctccacctgtaaacttccgctcactgttctgaatcacttaaaattcctgtttaaaatgtcaacctcagggccctgccccca

SEQ ID NO: 148082 - DNA, 201 bp, Homo sapiens
tacatacctagccattcacgggtccatcaccctcttctgtccctgatgttctttgccaagctcccactctctttaattaacaactttggagatgcttttaraagagcccaagtctggccaggcatggtggctcacgcctgtgatcctagcactttgggaggctgaggcaggcggatcacttgaggtcaggagttcaagacc

SEQ ID NO: 148083 - DNA, 201 bp, Homo sapiens
taatcactctgctgtgtgtcattgcataactgaagcgagcatccttccaaaaccttctgtccataggtaggaattctgtgagagatggcttctacaccttytccaatcctgattggttgaccacctttagatagctccactttttctctttggaagtgacactctgacctgaatgatatgcagtggccattatcaaacaat

SEQ ID NO: 148084 - DNA, 201 bp, Homo sapiens
ttcagtagagacgggttttcgccatgttggccaggctggtctcaaactcttgacctcaggtgatccacccaccgtggcctccctaagtgctaggattacargtgtaagccactgcacccggccaatgtctaggtactttaatgtgtaggtacgatagcatttattgctttacgtaattcatgcaacacctctgtgcattag

SEQ ID NO: 148085 - DNA, 201 bp, Homo sapiens
ttatatagacagggtctcactttgttgctcaggctggtctcgaatcctgagctcaagcaatcctcccacctctgcttcccaaagtgctaggattacaggtrtgagccactatgcctggacgggtttaggactttaatgtgtgaatttgggggagatatgacattcagtccattgcaggtaccatatcattgcacctgctta

SEQ ID NO: 148086 - DNA, 201 bp, Homo sapiens
ggtgcatgcctgtaatcccagctacctgggcagctgaggcaggagaatcgcttgaacccaggagggggaggttgtggtgagccaagattgcaccactgccytccagcctgtgcaacaagagcaaaacaacttctcaaaaaaaaaagaagtttcttatctgtatatgtttacaaaaacagccatccctttttgttaaggagt

SEQ ID NO: 148087 - DNA, 201 bp, Homo sapiens
gtgtgatctgggctcatggcaacctctgcctcccgggttcaaggaattctcctgcctcagcctccccagtagctgggattacagacacctgccatcatgcycagctaattttttgtatttttgcagagatagggtttcaccatgttggccaggctggtctcaaactcctgacctcaggtgatccgcccgcctgagtctccc

SEQ ID NO: 148088 - DNA, 201 bp, Homo sapiens
cctacacctacctagtccatgctttgtgatctttccccagcacaatggcaagtgtttttcacactagtctcttccttccactgctcacctctcctcccccrtatcttttctctcagtagcaaaagtcagctttccaaaaacaagcgcagtcatgccactcttttcctctgggtaaaaccttttctggtttcctactgctct

SEQ ID NO: 148089 - DNA, 201 bp, Homo sapiens
aaaagacataacaaacctagtatgtgaggattagcaattaatgttgtaacttgtttaatgagcctagcctgatccagggcacaaagtaagtacttagtaartcttggtctttctcctcttgcatttttctgccacttgctctatcagggaatgagatttaccgactggaaaaaggaggttatgtgattgactggggtttgc

SEQ ID NO: 148090 - DNA, 201 bp, Homo sapiens
aagaaaacaattggaagagaagaaataggacatgttaggtataatgatggttgttattttatttatttatttatttatttattcatttatttatttatttatttattttttgagacagagtcttgctctgtcgcccaggctggagtgcagtggtgtgatctgggctcatggcaacctctgcctcccgggttcaaggaattc

SEQ ID NO: 148091 - DNA, 201 bp, Homo sapiens
ctgtattgacggccatcctaagagacggggacattccttagctaacatttgcctgagtattagatatgccttgctctatgtaattttttttttcctgtaaygcctaccaggcaaacagaggttgtgattgaagaatgtcaaccaccagcccttcacagactccagattcccaccctggagtctcccatgctgtgttgggca

SEQ ID NO: 148092 - DNA, 201 bp, Homo sapiens
tgaatggaagaaaacaattggaagagaagaaataggacatgttaggtataatgatggttgttattttatttatttatttatttatttattcatttatttayttatttatttattttttgagacagagtcttgctctgtcgcccaggctggagtgcagtggtgtgatctgggctcatggcaacctctgcctcccgggttcaa

SEQ ID NO: 148093 - DNA, 201 bp, Homo sapiens
gggcagcctcttcctcctgaggctcaattcccatcagtgtctatctttgacatgcttctggatccttctgcctccctcctccatcttcattgccactgctrtggtatcccattctcaaaggatgcagactcctgatctttgtcagactagaatgtggaactcagggaacagtaggatgggtgagaccaagaagggctggaa

SEQ ID NO: 148094 - DNA, 201 bp, Homo sapiens
gaacattgtttgaatggaagaaaacaattggaagagaagaaataggacatgttaggtataatgatggttgttattttatttatttatttatttatttattcatttatttatttatttatttattttttgagacagagtcttgctctgtcgcccaggctggagtgcagtggtgtgatctgggctcatggcaacctctgcctc

SEQ ID NO: 148095 - DNA, 201 bp, Homo sapiens
taagcaatgaaactagggcagcctcttcctcctgaggctcaattcccatcagtgtctatctttgacatgcttctggatccttctgcctccctcctccatcytcattgccactgctatggtatcccattctcaaaggatgcagactcctgatctttgtcagactagaatgtggaactcagggaacagtaggatgggtgagac

SEQ ID NO: 148096 - DNA, 201 bp, Homo sapiens
agtgaacattgtttgaatggaagaaaacaattggaagagaagaaataggacatgttaggtataatgatggttgttattttatttatttatttatttatttattcatttatttatttatttatttattttttgagacagagtcttgctctgtcgcccaggctggagtgcagtggtgtgatctgggctcatggcaacctctgc

SEQ ID NO: 148097 - DNA, 201 bp, Homo sapiens
tgacagtgaacattgtttgaatggaagaaaacaattggaagagaagaaataggacatgttaggtataatgatggttgttattttatttatttatttatttatttattcatttatttatttatttatttattttttgagacagagtcttgctctgtcgcccaggctggagtgcagtggtgtgatctgggctcatggcaacct

SEQ ID NO: 148098 - DNA, 201 bp, Homo sapiens
gtgacagtgaacattgtttgaatggaagaaaacaattggaagagaagaaataggacatgttaggtataatgatggttgttattttatttatttatttatttatttattcatttatttatttatttatttattttttgagacagagtcttgctctgtcgcccaggctggagtgcagtggtgtgatctgggctcatggcaacc

SEQ ID NO: 148099 - DNA, 201 bp, Homo sapiens
tcatctcaaaaaaaaaaaaaagaaagaaagaaagaaaaaattactgcagctatctgatcattgctttatgggacaagggtgatttttgctgaattgaataragagtatacaaaattaaaattttaggagactgaaataactgggattggggatgcagcctggatatagtattcactaaagatgctcactaagcacttaatt

SEQ ID NO: 148100 - DNA, 201 bp, Homo sapiens
atatgcaggatacgcagaggtgggtggcacctatacaacattatatttggaggctggagaaaggcaggcctccactccttcttgcctgttgaacttcacckctccctgcatgcctgctccgtggttcactttctgcagacaccctcatgtcccttcttttcagagcaaataattctccctccgcctctggccctttacacc

SEQ ID NO: 148101 - DNA, 201 bp, Homo sapiens
ggattggggatgcagcctggatatagtattcactaaagatgctcactaagcacttaattaatttatttcttttactttgtaaagataagcccaaaggttcrttctctaatctcatccttgctcatgcccccaaagtcagtgctggcatgcaaacacgaccactagtcatcttttagataaggttcaatgcaaacatttata

SEQ ID NO: 148102 - DNA, 201 bp, Homo sapiens
atggacagggccacccagcagctgacgacgttaataaaattgtcaggcagctattagaatagcttaaaattattcaatttttataggtacctaaaaaagcygaacaacacttgtctttgctcataaaatgaacatctgttagctcccggaagactggtacccattgttagtggctggccctttgtatgtcactcagcccag

SEQ ID NO: 148103 - DNA, 201 bp, Homo sapiens
gtgcagtggcgtgttctccgctcactgcaagctccgcctcctgggttcacaccattctcctgcctcagcctcccgagtagctgggactacaggtgcccacsaccacgcccggctaattttttgtatttttagtagagacagggtttcaccgtgctggccaggatggtctcgatctcctgacctcgtgatccgcctgcctcg

SEQ ID NO: 148104 - DNA, 201 bp, Homo sapiens
cagtaaattgatggggaaacaaaataaaaaatgtggctccattttcgtttttcattaaccttcagggaagattgcacaatgtaccttcgtaatgctattcrttttttaactagcttcaattcagctcagaaatatgtatggaaatatgcctactatgtgccaggtaatgttggacacagaagacactaaagaatgcgcaag

SEQ ID NO: 148105 - DNA, 201 bp, Homo sapiens
tgtgaagtgcggatgcccatgggcatggggaatttatttaccagttcttttattaaaagagctggcaggattctgttaccaggacttgcctttttttttttcttttaatcagaaaattttgacaaagaatctatgaagtgcagatgtagggccaaccatacttttcacacttttttgattgtatcctacagtcagaaatac

SEQ ID NO: 148106 - DNA, 201 bp, Homo sapiens
cttctcgggagacaaatgtcacatgaagtaataatatgcgatgagtttttaatgcttgccaggatgagattgttctgttggggtatatattaaagttgccwatcaaccttttggatacacctgcataattctgataggatgtcatggatgtacgttgtaactttctccaggaagcaaaaagtgatttataagcatgacaaa

SEQ ID NO: 148107 - DNA, 201 bp, Homo sapiens
tttgatcttcccttttacaaattcctcttcactgagaaattggccaccgctcttattaagtagtactacttgggctcaccatcctgggcctttttttttttctttttttcttttttggcctaattaactgtgtcaccattcaagccaattaggtgtgtgccttactgggagatcaattaaaaaataaattagtgtcaaagt

SEQ ID NO: 148108 - DNA, 201 bp, Homo sapiens
attcactctgggttttttcccacacttccctgccatattttccttttgcatgcaaacaccatcgcagttggatggatgcttctcgggagacaaatgtcacrtgaagtaataatatgcgatgagtttttaatgcttgccaggatgagattgttctgttggggtatatattaaagttgccaatcaaccttttggatacacctg

SEQ ID NO: 148109 - DNA, 201 bp, Homo sapiens
cccaagctgaaccaatcagaactagtaagcattacgccaaggctttttgctagtgctgttgggaaaggtactcgttgttgttgttgttgttgtggttgttkttttgagacagggtcttgctctgtttgcccaggctggactgcagcggtgtgatctcagctcactgcaacctccacctccagggttcaagtgattctcctt

SEQ ID NO: 148110 - DNA, 201 bp, Homo sapiens
tagctcataatgaagttctatgacattaattttttacaggacttttttaagaacaaggaaaaaaatcatggctttacaaaaaacaactgtatggtcaaccyacaagtaaacagttccctttcctgggcctcaggtacaataaagagatgagacaagaagatatgctacagtcccatccacttgtaggggagttagccattg

SEQ ID NO: 148111 - DNA, 201 bp, Homo sapiens
atttgtgacccaagctgaaccaatcagaactagtaagcattacgccaaggctttttgctagtgctgttgggaaaggtactcgttgttgttgttgttgttgtggttgttgttttgagacagggtcttgctctgtttgcccaggctggactgcagcggtgtgatctcagctcactgcaacctccacctccagggttcaagtga

SEQ ID NO: 148112 - DNA, 201 bp, Homo sapiens
ccatcctcctcagcctcccaaagtgctggggttacaggcgtgagccaccatgcctggtgataacaaactcttaaggtgtgtgtgtgtagtgtgtgtgtgtrtgtgtgtgtgtgtgtgtgtgtagagagagagagggggtgaatgaggccagggctcattatctgctgccctttctacaacagaagtgttctttccttggga

SEQ ID NO: 148113 - DNA, 201 bp, Homo sapiens
ctgtgctgaagtaagctacctcgcttggctcacacagctaaaagtagacgcaccagcctagggcttggcgttgtccgcctctaagtttagggctgtaatcyggttctttcaccaaagaagacacagtggctgcctcacagggacctggaaacagtgtctaattcccagttctggtgggatttcccctgtgtcttactctct

SEQ ID NO: 148114 - DNA, 201 bp, Homo sapiens
ttggctgggcgcaggggctcatgcctgtaatcctagcactttgggaagccgaggcagacagatcacttgaggtaagaagttcgagaccagcctggccaacrtggcaaaaccccatatctgcaaaaaatacaattagccaggcatggtggtatgtgcctgtagtcccagctacttggaaggctgaggcaggagaatctcttg

SEQ ID NO: 148115 - DNA, 201 bp, Homo sapiens
ttcttgaacacaggaggcataggttgcagtgagctgagattgcaccattgcactcccgcctgggtgacagagtgagactgtgtctcaaaaaaaataaaaartttaaaaaaagaatggataagatggttcacctgccttcatggaggtcctgttctgagaattccgaagggcagtcaaagataaaggactatggtgagagaa

SEQ ID NO: 148116 - DNA, 201 bp, Homo sapiens
aacaggatatgtttgagcaagttatttaccccattgggcctatgtggaatcccactggctcctttaataaaagaacatccagtcctcagggttggtgatargatgagtgtgaagtgcggatgcccatgggcatggggaatttatttaccagttcttttattaaaagagctggcaggattctgttaccaggacttgcctttt

SEQ ID NO: 148117 - DNA, 201 bp, Homo sapiens
agagtggtccatgcacatctcagcttggggttgttatagatcttttctgttggtctctttcattagactacactttttgaatccatcctctggtctagtcytttttttttttttttttttttttttttgagatagaatctcgctctgtctccctggctggagtgcagtggcgccatctcagctcactgcaacctccgcctc

SEQ ID NO: 148118 - DNA, 201 bp, Homo sapiens
tattcatagaaagagaaggggagtagaaggcaggagctgttaatgtacaccaagctcctattttttgcaggcctccacagggtaaaagggactggcccccrtgcaccaggccactgccagtggtgcagatgaaggacctgagcccccacaggcatctgaggtcacatggtcagtagagctgggaattttatcccgggtcag

SEQ ID NO: 148119 - DNA, 201 bp, Homo sapiens
tattagttattgaataaacaaaattaggtctctggcctctgggctctttggattctacgatatatttttctcccttctgttcctttaaaggagcaaataasagggaccctgaagtcaccaaggggacttgagtcactgagtttatatccggcatgaaacactgtccaaggcaggaatggagacacagagtgaggaagaatg

SEQ ID NO: 148120 - DNA, 201 bp, Homo sapiens
tttactagctgtaggcgagtccctctacctttctgatcctaagctatctgttcagtaagtgcttcactgagtgactatagaaagcatgaatgattagtaamataaatggatttgagtaggtgggcccagtgtctctttcaggtctatggatctgatgcaaattcacactgtcaggggcaaagccagaaccatataaaagcg

SEQ ID NO: 148121 - DNA, 201 bp, Homo sapiens
tttatacataacccggatcaacaaccccaaagccatgatctgcctactccaccagcctgacagcccctctgtagtggcatcaccatctgcttagttgctgwtctggaactgagagctcatctttgtccctttctcttgccctgggtctaaccacatcacaccctagcgtggctccacctcccctacacctacctagtccat

SEQ ID NO: 148122 - DNA, 201 bp, Homo sapiens
ctttccagtcttgtacagaagcagcgggaaacagagcattttgtagctttacttacatgcacacatgtaggaaagaaggactggaagggatcttagaggtsatgagttagctcagtgccttttgttgcaaaggtcaagaaggttctaaggtctttgacttggatgatgcaatttcaagagaacttcgcttggacagaagtc

SEQ ID NO: 148123 - DNA, 201 bp, Homo sapiens
tctctctcacattcctgaatcccatgagagtgttgtcagaatccagtacaacagtatgaaagtatttataaaacgtaattttttcataatactagtaactrtggttcatgacaaagccaggatgaaaacccaggcctgtctgactccatgatctattagtctgtctatgttttagtttatacataacccggatcaacaacc

SEQ ID NO: 148124 - DNA, 201 bp, Homo sapiens
tacttcatggcttaaaaaataataatttagaaaatacaatctgatacgttcaaaagaatattgtctctagagtcctgtcctctaacccgttgtctactatygaagacttcatcaaagtttcctgacacctgctttttattcccctaccaattaaccacctgtctctctcacattcctgaatcccatgagagtgttgtcaga

SEQ ID NO: 148125 - DNA, 201 bp, Homo sapiens
tcccccagtggagtcacgcaggacatgccaattcccccaacaatacgttgtgacaacacacatgaaatgttgcccaaaagggaatctcatgagagactcascacccaggatttttattgggggctggttatgtggacattctctaggacataccaaaattctagactcccagaaggaaagcaggtgtttatggtaaaccat

SEQ ID NO: 148126 - DNA, 201 bp, Homo sapiens
aaatacttcatggcttaaaaaataataatttagaaaatacaatctgatacgttcaaaagaatattgtctctagagtcctgtcctctaacccgttgtctackatcgaagacttcatcaaagtttcctgacacctgctttttattcccctaccaattaaccacctgtctctctcacattcctgaatcccatgagagtgttgtc

SEQ ID NO: 148127 - DNA, 201 bp, Homo sapiens
gatgggtcagtgtacacgacatgacagcttcttaaaaatgcttcattccacttgtagccaaggccagaatgacttaaaatgcactcgggtggtgtggccgrttgtgaagtccatcaacagctaagaagttgaaggagtaaggtaccatggactggaattccctcctggaagccccttccatgaggtctcggatgaaagggg

SEQ ID NO: 148128 - DNA, 201 bp, Homo sapiens
ggctcatgcctgtaatcctagcactttgggaagccgaggcagacagatcacttgaggtaagaagttcgagaccagcctggccaacatggcaaaaccccatrtctgcaaaaaatacaattagccaggcatggtggtatgtgcctgtagtcccagctacttggaaggctgaggcaggagaatctcttgaacccaggaggtgga

SEQ ID NO: 148129 - DNA, 201 bp, Homo sapiens
acacctgtagtcagtctaagctgctctggaggctgagggcagggggatcacttgatcccaggagttcgagaccagcctgggaaacatagtgagatgcgtgkctctacaaaaaactagctggatgtggtgactgcacctgtagtcccagctactctggaggctgaaaaaggaagatcacttgagcccaggagttcaagactg

SEQ ID NO: 148130 - DNA, 201 bp, Homo sapiens
aaatggtttggaggaaccaaaaccgagcatccaattaggaagccatgtcaataattcatgtaaggaatgatcatggcctgaactaaggcagaggttgagcrcaacagcagaatcaaatgctattaaagggttaaaatgggtgtccagggcacctgccatggctcacgcctgtaatccaagcacgtcgggaggccaaggctg

SEQ ID NO: 148131 - DNA, 201 bp, Homo sapiens
agtgacagtgaacattgtttgaatggaagaaaacaattggaagagaagaaataggacatgttaggtataatgatggttgttattttatttatttatttatttatttattcatttatttatttatttatttattttttgagacagagtcttgctctgtcgcccaggctggagtgcagtggtgtgatctgggctcatggcaac

SEQ ID NO: 148132 - DNA, 201 bp, Homo sapiens
ctgattttattatcgaagtattaaagtaacccctttgagtgcacaaaatccactttggtctgtgagttttgaccaccaaggctttctggagacgctggagrgcattggcctggtgtataatctgaaagtggtctatggtagctgtcatctagagagttccattacccagtgaagtaaaggctgaactcagacccccatggg

SEQ ID NO: 148133 - DNA, 201 bp, Homo sapiens
tagtgacagtgaacattgtttgaatggaagaaaacaattggaagagaagaaataggacatgttaggtataatgatggttgttattttatttatttatttatttatttattcatttatttatttatttatttattttttgagacagagtcttgctctgtcgcccaggctggagtgcagtggtgtgatctgggctcatggcaa

SEQ ID NO: 148134 - DNA, 201 bp, Homo sapiens
ctcagctcctaactgaaaatgtgtagggcgtaaggaagttgtttgccagcagaatctgattttattatcgaagtattaaagtaacccctttgagtgcacaraatccactttggtctgtgagttttgaccaccaaggctttctggagacgctggagagcattggcctggtgtataatctgaaagtggtctatggtagctgtc

SEQ ID NO: 148135 - DNA, 201 bp, Homo sapiens
cctgatttatttccacaagcttctcaggactagggcttgacagtcttgcctggggaagcttgttgattcttagagtggcactaatttttttttttttttttcttgagacggagttttgctcttgttgcccaggctggagtgatggcacgatcttgtatctttactagagacgggattttgccatgttggccaggctagtct

SEQ ID NO: 148136 - DNA, 201 bp, Homo sapiens
agctggaagcgttattacttgtggttgagcagactgtagcaatgccagaaatctcagctcctaactgaaaatgtgtagggcgtaaggaagttgtttgccascagaatctgattttattatcgaagtattaaagtaacccctttgagtgcacaaaatccactttggtctgtgagttttgaccaccaaggctttctggagacg

SEQ ID NO: 148137 - DNA, 201 bp, Homo sapiens
agggtgagctatttgtaataaatgtacctgcttcttaccacttgttctttccccaccaccaaatttcttaattttccaccttttcctggggctttctttcygaatacaaactcatcccattgcctcctttacaactaattgaacacttggacttaattgattatgtattaagttggggacttggagtgacattcaggactg

SEQ ID NO: 148138 - DNA, 201 bp, Homo sapiens
ctggttttcttttggagaggaacaagcagaagacagaacttacactgtgctattggagaagtctcttgccagccgcctgcagccagtctaaaaaacttacmctacattgttgtgtttctgcgttaaggctgataagtcagatataaaggttgaccaaattgttaacacatgctctacttacggctttcagaaaaaaatgaa

SEQ ID NO: 148139 - DNA, 201 bp, Homo sapiens
ataattgcaagagaaggccttctgcatgatggagttgtctaaaggagccaggtggatcagatgtgaaggcccagagacatgtacgccctaagagattgacyacaaggctaacttgcctaagttgctaagatgcagcagagactgaggccaacttcaacgccagctctggggacagaggagcagttgttatctagacaacac

SEQ ID NO: 148140 - DNA, 201 bp, Homo sapiens
gaaattacattatgcatatgttagtatcagtcagggttctccagagaaatgacccaataggatggtgtagttgtataaacacacacacacacacacacacmtataccttgattttaaggaattagcttatgtgatcgtagggctaagtccaaagttgtgggtaggttacactggcaggctggactcttgggcagaaaatga

SEQ ID NO: 148141 - DNA, 201 bp, Homo sapiens
aatgtagatgtctatcctagctccatctttagctgtccaagtcactggtcctttgtgagcctgtttcctaggctgtgaaatggtattggtaataattgcargagaaggccttctgcatgatggagttgtctaaaggagccaggtggatcagatgtgaaggcccagagacatgtacgccctaagagattgactacaaggcta

SEQ ID NO: 148142 - DNA, 201 bp, Homo sapiens
tcccttgaaaccaggaggcagaggttgcattgagccgagattgcgccactgcactccagcctgggcaacagagtgagactctgtctcaaaaaaaaaaaaaraaagaaagaaagaaagaaagaaagaaaaatactgaatagatatctaccctctgacccttcagttgcagttgtagttatcgctggactatgaaactgttat

SEQ ID NO: 148143 - DNA, 201 bp, Homo sapiens
cagtggctcacgcttgtaatcccagcactttgggaggccgaggcaggcggatcacaaggtcaggagatcgagaccatcctggccaacacggtgaaaccccrtctctactaaaatacaaaaaattaactgggtgtggtggtgtgtgcctgtagtcccagctactcgggaggctgaggcaggggagttacttgaacccgggag

SEQ ID NO: 148144 - DNA, 201 bp, Homo sapiens
tgttctcaaaatagaatgtgggactttcaactctttcttctttgaagaacattgttgagagaaagactctgcagcgcaccgcagaagaaggaacagagatytgagttttgatcccagctctgccaataattagctgtgggactataaccattagagttcagttacagacaagaggatgcatgagcttcaacagaaagagat

SEQ ID NO: 148145 - DNA, 201 bp, Homo sapiens
gcctgaatttgaatcttggccccaaaaacattgtctgtctgtatctgtctttctgtatctatctgtctgtctgtctgtctgtctgtctgtctgtctgtctrtctatctatctatctatctatctatccatccatccatctgtgcatccgtctgtctgtatgtccacccgccctcccgcctgcctgcctgctatggtctgaa

SEQ ID NO: 148146 - DNA, 201 bp, Homo sapiens
atcatttacgtgtttttgttttttcaatttgggaataaactcccagtgtgggtggggagtgtctggagcctgagagggaacctgggtgtcttcgggagccrgtgcaggggctggtactttattttatggggacctgtggcctgagatgcgttttagaggtaacagtgcccccttctggtgcaaatgaataaagagttgagg

SEQ ID NO: 148147 - DNA, 201 bp, Homo sapiens
atttgtctgaagaagtaaacaggcaaaataaaatgtatgggatgccaccatataaaatttggcctttcagatatctgaagatgaccttacctgaaatttasatggaccccctaaattcaataaaagatccttcccaggctgggcgcagtggctcacgcttgtaatcccagcactttgggaggccgaggcaggcggatcaca

SEQ ID NO: 148148 - DNA, 201 bp, Homo sapiens
tccatggacctctgggaaggcaggagggtgtgctagaaatcaagctctttaaatgctcttgaataacaagatttgatgaacttctgggttggtgaacactrttgttgctgcagggtggtgtgcccagagaaggcatggaagctccataccccctcaccccacacccccatattttgccttatgtacctcttctctctggct

SEQ ID NO: 148149 - DNA, 201 bp, Homo sapiens
tgaaaaggatattaattttggtggccagatatgcctgaatttgaatcttggccccaaaaacattgtctgtctgtatctgtctttctgtatctatctgtctrtctgtctgtctgtctgtctgtctgtctgtctatctatctatctatctatctatctatccatccatccatctgtgcatccgtctgtctgtatgtccacccg

SEQ ID NO: 148150 - DNA, 201 bp, Homo sapiens
caaaaaattagccaggcacggtggcatgcacctgtagtcacagctactcaggaggctgaggtgagaggatcatttgagcctgcgaggccaaggttgcagtsagccaagattgcatcattgcaccccagcctaccctcctggagttagatcctgtctcaaaaacaaaacagaaaacaccaaaccagtttttagcctctgtgg

SEQ ID NO: 148151 - DNA, 201 bp, Homo sapiens
tattggtgactacagagagggtgaaatgatttatgaggacactaacacacacccgatcaggaaggttaacccactagatgtcatttatttagcagacattyattaagcacctactgtgtgttcagtactacaccttgtagtatcttgcccttggaataatgcaggaagtggttatttataaatgaggtctgtgggtgcctg

SEQ ID NO: 148152 - DNA, 201 bp, Homo sapiens
gcacccctccaccccgacttcccagggtcttagctgtaggggcagattgtggtgggtgaggtcaggttgaggagaatgacttgagtgagagaggcacttakaggaggttggcagtgcgttagactcacttttcctggagagcatcctggaatttgaaatgattgagaatgaacactgcgttgtgaaaaggatattaatttt

SEQ ID NO: 148153 - DNA, 201 bp, Homo sapiens
cttctctggagatgaagaccttgagtttaagccttatgtagagcaccccaagtgggtgctgcctccccatctttgcagttttccatacaggggagcaggtrcctgagttcccagagctgggtggaaggtctgttaatattggtgactacagagagggtgaaatgatttatgaggacactaacacacacccgatcaggaagg

SEQ ID NO: 148154 - DNA, 201 bp, Homo sapiens
gaacctccctttttctagggctcttctcagggccacagtcccccttctttctctcaggtcagttacaagctggtgcagctgctgaatgaacttcctccccycctcttttctccctcttattcttccttccttcccctgtcctatatttattcagaaaatattcattgaacacctacaatttatcaggctctggaaagacat

SEQ ID NO: 148155 - DNA, 201 bp, Homo sapiens
agaggataaagggatacaatgggagttaagtgtgctgcagttcactcgaactggtaaaatgtcagccccagttgactttgataaattatgcatatgtaatrtaatacctagagcaactgttcaaaaagctatacaaagagatgcattaaaaaccaccataggtaaattacaatggaattctaaaaaatgttcaagcaactc

SEQ ID NO: 148156 - DNA, 201 bp, Homo sapiens
catctctcatgatgaccctgggggttggaaagataagtatgattacctccacctcacttaagttaaagtgtggggttgaagagcatttgcttaagattagrctgctaacaagtgctgacgctgatatttgacttttcccttcccaaaagaaatggtatgagatagaggattgtataattcagtagacatggatgtagtgga

SEQ ID NO: 148157 - DNA, 201 bp, Homo sapiens
atacagtttaggtatcatacatacatacattagcttctttcatcttcacaaaagacctggcatataacagttcagtccacatcttagaagagaaaaaaaaatgcttaaaaaggttaaataatactaaatactaaaatcttctaactggcaagtggcagagccaagattacaaccatctccactattacgagttgatttatt

SEQ ID NO: 148158 - DNA, 201 bp, Homo sapiens
tcctgtcagatcagcgctgggattagattcccatagtagcgcaaaccctgttgtgaactgcgcatgcgagggatctaggttgcatgcaccttatgaaaatygagctaatgcctgattatctgatatctaaggtggaacagtttcatccccaaaccatcctaccctcccccccaccacccttcatggaaaattgtcttccgt

SEQ ID NO: 148159 - DNA, 201 bp, Homo sapiens
caccatgcccagctaatttttttttttaaagtagagatggggtttcaccatgttggtcaggctgatcttgaactcttgacctcatgatccacctgcctcgkcctcctaaagtgctgggattacaggcgtgagccatgagaacgtgcttttaagaagcctggtatggtctagaccaggggttcccaaaccctgggcgccaga

SEQ ID NO: 148160 - DNA, 201 bp, Homo sapiens
tgaccaacatggagaaaccctatctctcctaaaaatacaaaattagccaggtgtggtggcacatgcctgaaatcccagctactcgggaggctaaggcaggrgaatcgcctgtacccgggaggtggagattgcagtgagcagagattgagccattgcactccagcctggacaacaagagtgaaaagtccatttcaagaaaaa

SEQ ID NO: 148161 - DNA, 201 bp, Homo sapiens
agtttgagaccagcctgaccaacatggagaaaccctatctctcctaaaaatacaaaattagccaggtgtggtggcacatgcctgaaatcccagctactcgrgaggctaaggcaggggaatcgcctgtacccgggaggtggagattgcagtgagcagagattgagccattgcactccagcctggacaacaagagtgaaaagt

SEQ ID NO: 148162 - DNA, 201 bp, Homo sapiens
gatggctcgtgcctataatcccagcacattgggaggctgagacaggcggatcacctgaggttgggagtttgagaccagcctgaccaacatggagaaacccyatctctcctaaaaatacaaaattagccaggtgtggtggcacatgcctgaaatcccagctactcgggaggctaaggcaggggaatcgcctgtacccgggag

SEQ ID NO: 148163 - DNA, 201 bp, Homo sapiens
gggagcctgtattagtctgttctcacactgctgtaaagaaatacctgagccgggtatgatggctcgtgcctataatcccagcacattgggaggctgagacrggcggatcacctgaggttgggagtttgagaccagcctgaccaacatggagaaaccctatctctcctaaaaatacaaaattagccaggtgtggtggcacat

SEQ ID NO: 148164 - DNA, 201 bp, Homo sapiens
ccgggcactgaaggctgcacctcacctaccagaagtgacctggctagcagagcccatcaggtggggctgccggaggtgtcagagtgtgggacaggcaggcytctcattgtcctgtgtttcccgcttccacttcctgctgtcaagcactctcaggcactggtgagggaaacttccaattaaacgaaatcaggcggcttcctc

SEQ ID NO: 148165 - DNA, 201 bp, Homo sapiens
cccaagaaatgaaatctaaaccttccacaacttctatatatatatacatacatacatatatatatatgtgtgtgtgtgtgtgtgtgtgtgtgtgtgtgtgkatactttaagttctagggtacatgtgcacaatgtgcaggtttgttacatatgtatacatgtgctgtgttggtttgctgcacccattaactaatcatttac

SEQ ID NO: 148166 - DNA, 201 bp, Homo sapiens
ggacttggtagttttaagtggttaatagcgactggcccaagaaatgaaatctaaaccttccacaacttctatatatatatacatacatacatatatatatrtgtgtgtgtgtgtgtgtgtgtgtgtgtgtgtgtgtatactttaagttctagggtacatgtgcacaatgtgcaggtttgttacatatgtatacatgtgctg

SEQ ID NO: 148167 - DNA, 201 bp, Homo sapiens
tttcatatttcattgactaagcatgttgtgtggccatgcctccctttaaagcgtgtgggcaagtgcagtctaccatgtgcctggcaggagaaaaagcagawatatttgctaatcagcacttttgaggaccacatgtgcctggcaggagaaaatgcagaaatatttggtaatcagcacttttgaggaccacagacctataac

SEQ ID NO: 148168 - DNA, 201 bp, Homo sapiens
aaaagttaatgaaaactatgggctctagatactgcaaggcccagggtgttggctgcttcatccctaggatgatgaaactcaaggaaaattgtcaagcaccraaaggaattgtatacctgcagatcaaaaggagcctcgacaactaaggtaaaatcagtgataagttgcccacattagtgtacaccctagaaaattatttga

SEQ ID NO: 148169 - DNA, 201 bp, Homo sapiens
gctcatactgctaatctggtcaacttctctgtggaccacctggcatcagatataccctagaatcacttacaccgcctcatagatgctcccctttgggtctrcctggtaattggcagcttcttcaagaaggcagatttccctttgagagcatccccaaccccccagtttacataaaacccttaaaacctggggttgcctgtg

SEQ ID NO: 148170 - DNA, 201 bp, Homo sapiens
aattagccaggcacggtggcatgcacctgtagtcacagctactcaggaggctgaggtgagaggatcatttgagcctgcgaggccaaggttgcagtgagccragattgcatcattgcaccccagcctaccctcctggagttagatcctgtctcaaaaacaaaacagaaaacaccaaaccagtttttagcctctgtggacttt

SEQ ID NO: 148171 - DNA, 201 bp, Homo sapiens
tgctttgggagcccctaatccagcctggggctgtgggggtgggggtggctggaaggcagtgatttctaagttgagacttgaaagagggggagaatgtggayggaggtgggggaagagtgctagatatcatgccgtctctaagagggtgagctatttgtaataaatgtacctgcttcttaccacttgttctttccccaccac

SEQ ID NO: 148172 - DNA, 201 bp, Homo sapiens
ctgttgttctgtcctgaccctggattttagcaatcatgaacacttctgctcctaggtgaggaaaatatcagagaaaaatgaactcaggcctggctgactcygtagtcatgcacattcatcaaacagtttttgaataattactgtgttgttaccacagtcaaaaagacatcgtccctgcctcaaggagtttcagtcaagtgc

SEQ ID NO: 148173 - DNA, 201 bp, Homo sapiens
aaatgatggcggtcctaaggcagactaagagataaccaagtgctgaatgtggaggtgcagggtgggcaagactgtgagctccatgacagcaggggcagtgygggtatgtctgactcaccactgtgtccccagcatccagctcatcccctgacaaatagggtgtactcagtgaggatttattgaatgagcaactgcgggaca

SEQ ID NO: 148174 - DNA, 201 bp, Homo sapiens
tttcagaagacatgattttattcttttttgtggctaaatagtatttcgttgtactgtgatatgcatctgtataccacatttgcattatccattgatgggcrcgtcggttgatttcatgtctttgctattgtgagtagtgttgtgataaacatcagtgcaggtgtctttcttatataatgatttctttttcctttggttaga

SEQ ID NO: 148175 - DNA, 201 bp, Homo sapiens
gatataggcttacctttatccattctccgttaataagaatccattatggcaactgtggccttgggagacagtcgtggaaacactgagggccaaatggaccrtctgtctccctggtgactttgtcctgctgcctctgacttggccctcaggtaagccactggccagtgggcaaacacagcattgtcccttcatgccaccaag

SEQ ID NO: 148176 - DNA, 201 bp, Homo sapiens
gtacggggtttctccatgttggcactattgatattttgggctgtatatgtctttgtgtgtttttaacagttgtacaaatgtatggggtacatatacaattktattgcatgtgtagattttgtagtggtgaagtcagggcttttagggtatctattatacgaataatgcacattatacacattaatttctcatcatccaccc

SEQ ID NO: 148177 - DNA, 201 bp, Homo sapiens
gtaatcacaataagatggctgtctacatacctctaaacagttcaggatgggagaggttcttaatatcagaggagacaatacaaggccttggagtaaacacrtttccaaaaataatctctgtcaagatggggaaagaagcctgagaaatggttatgtaaaagcataggagttgggggtttgctcctaattggaaagagctgg

SEQ ID NO: 148178 - DNA, 201 bp, Homo sapiens
attcctgggctcaagcgatcctcccgcctcagcttcccaaagtgctgggattacaggcgtgagccactgtgccccgctgagtcattttattgtaatcacartaagatggctgtctacatacctctaaacagttcaggatgggagaggttcttaatatcagaggagacaatacaaggccttggagtaaacacatttccaaaa

SEQ ID NO: 148179 - DNA, 201 bp, Homo sapiens
attccttctctggagatgaagaccttgagtttaagccttatgtagagcaccccaagtgggtgctgcctccccatctttgcagttttccatacaggggagcrggtacctgagttcccagagctgggtggaaggtctgttaatattggtgactacagagagggtgaaatgatttatgaggacactaacacacacccgatcagg

SEQ ID NO: 148180 - DNA, 201 bp, Homo sapiens
agctatcccaagaagtactagacaaccacagcctcacagaggaggtctgctctataaaatttaacagcgtgaaagaacagattcgatgcaggctatctgtyggcatgctggctcctggaagaagggacagaggaagaggctaggccacatcaacttggttgcctctgaaactcacctttctcttccccatggatgtggaag

SEQ ID NO: 148181 - DNA, 201 bp, Homo sapiens
ttacccttgactaaagcagtaacggagcttccaaactccaatcagtaattctcaaactttaatgtgcatctgaattacctggggagttggtttatttcaakgcaaattactagaccccgtggccagaattcttatgcagaaatattgtggagtgagggaattaatatattatttccccatatgcaccacccccgcccctgc

SEQ ID NO: 148182 - DNA, 201 bp, Homo sapiens
tgactcggtgggaagggagacatccaacttgtctagcaggtatcacccacttacccccacagaatcaattactccctacttattattcccccatcttgctwatatcgccctgtcactgctaatatcatgctgcttcaaaattgtttatctgtctcctcttctagctgcccccagggcaagaactatgttttttttgtcttt

SEQ ID NO: 148183 - DNA, 201 bp, Homo sapiens
tgtcggcttccactgtgctctagaatgttgcccactgtgatcttttgggcaagttaatgtctcagggcccagtttcctcaactggaaaaaaaaaaaaaaaagagtagctgtgaaaataaatagtgatttataagcgctagattttgggggctggagaatccttccttatggggggcagggaggctgtcttgtgaactgtat

SEQ ID NO: 148184 - DNA, 201 bp, Homo sapiens
gctgtgtagcagctctttcaggaggtttagtaaacggtaatatgatattatatgttttcctacttacagacatcctgcactcagacacacattgaatggtrctattaaatgcttttctattttaaaatagcttattagaataaatatgaggttgggagagcactattaggttctctgctgacagtcagggcagcctctggt

SEQ ID NO: 148185 - DNA, 201 bp, Homo sapiens
acgtctgtaatcccaacactttgggaggccgaggagggcggatcatgaggtcaagagatcgagaccatcctggctaacacggtgaaaacctgtctctactraaaaatacaaaaaattagccggatgtggtgcgggcgcctgtagtcccagctactcgggaggctgaggcaggagaatggcgtgaacccgggaggcggagct

SEQ ID NO: 148186 - DNA, 201 bp, Homo sapiens
ggtgcagtggctcacgtctgtaatcccaacactttgggaggccgaggagggcggatcatgaggtcaagagatcgagaccatcctggctaacacggtgaaamcctgtctctactaaaaaatacaaaaaattagccggatgtggtgcgggcgcctgtagtcccagctactcgggaggctgaggcaggagaatggcgtgaaccc

SEQ ID NO: 148187 - DNA, 201 bp, Homo sapiens
gccacctgaaattcctggactcaagggattctcccacctcagtttccagagtagttgggactgtaggcatgtgctaccacgtctggctattttttttttttaatttttatttttgcagacacagggtctcactttgttccccaggctggtctcaaattcctgggctcaagcgatcctcccgcctcagcttcccaaagtgct

SEQ ID NO: 148188 - DNA, 201 bp, Homo sapiens
agcagcatatgtgaagccctgagatccagagagagattagagagagtgatacagacagaaactgaaataaacattaaatctacacttttttttttttttttgagatggagtctctctctctccacccactctagagtgcagtggcgtgatctccactcactgcaacctccacctcccgggctcaggcagttctcctgtctc

SEQ ID NO: 148189 - DNA, 201 bp, Homo sapiens
tactcaggaggctgaggcaatagaatcacttgaaaccgggaggcagaggttgcagtatgccaagatcacaccattgcactccagcctgggcaacaagagcragactgcgtctcaaaaaaaaggtgtaccatcaatgaagcagagagttctcaccatgcatctgatctgccggagccttgatcttggactgcccagcctcta

SEQ ID NO: 148190 - DNA, 201 bp, Homo sapiens
tggcgtgaacctgggaggcagagcttgcagtaagccgagatggcgccactgcactccagcctgggtgacagagcaagactctgtctcaaaaaaaaaaaaaagttaaataaactgggctcaagagagattaaattacttttcatgctcagagagctattacatagtgaaactgaaccccaatccatacggctttggagtctg

SEQ ID NO: 148191 - DNA, 201 bp, Homo sapiens
gagcccggcagatcacgaggtcaggagatcgaaaccatcctggctaacacggtgaaaccccatttctactaaaaatacaaaaaattagctgggcgtggtggcggacgcctgtagtcccagctactcgggaggctgaggcaggagaatggcgtgaacctgggaggcagagcttgcagtaagccgagatggcgccactgcact

SEQ ID NO: 148192 - DNA, 201 bp, Homo sapiens
cactgtggcccgtagcgggatgttagccttggagtcagagcaagggatgcagattagagatgaatggggatgtagagtgaatagcactggacggtgagttyggttttggacatgcagagatggggtaaacaggtctagatcttacaagaagggtcggggccaggggtctcttcaggtgtttgttgttgttgttgtttttaa

SEQ ID NO: 148193 - DNA, 201 bp, Homo sapiens
tttgggtctgcgccacctttaagagctgtgatactcaccacaaaggtccacagcttcactcttgaagtcagcgagaccaggaaccccccggaaggagccarctccgcacacagtttgatgtcttgctgctatttttttcttcctttgcatagatttgggtgaatgtgtttcatttggtttgattacacgtagttgttttta

SEQ ID NO: 148194 - DNA, 201 bp, Homo sapiens
aaagaccactgtggcccgtagcgggatgttagccttggagtcagagcaagggatgcagattagagatgaatggggatgtagagtgaatagcactggacggygagttcggttttggacatgcagagatggggtaaacaggtctagatcttacaagaagggtcggggccaggggtctcttcaggtgtttgttgttgttgttgt

SEQ ID NO: 148195 - DNA, 201 bp, Homo sapiens
agatcaaatgctttgtgtggggctagagcccagatttgaacttctgtcctttttccccacctccatgatgcctgggtgtagggtgacagggactcatacayagagttggggatgctttttttgaaattgatgagaggtgaagccagctggacttcctgggtcaaatggggacttggagaacttttatgtctagcgaaagga

SEQ ID NO: 148196 - DNA, 201 bp, Homo sapiens
aggtaggaggcttcagtctcagcaaaagaccactgtggcccgtagcgggatgttagccttggagtcagagcaagggatgcagattagagatgaatggggaygtagagtgaatagcactggacggtgagttcggttttggacatgcagagatggggtaaacaggtctagatcttacaagaagggtcggggccaggggtctct

SEQ ID NO: 148197 - DNA, 201 bp, Homo sapiens
atggttcatccagattaaagcttccctggtgtttcgctccccagatggaaagcccgtgtctctgtcaccgctggagtcccaggcacacagccccaggtacrcggcctccagccagcgggagcgcgagagcctggaggtgcgcatgcgcgaggtggaggaggagaaccgcgccctccgcaggcagctcagcctggcccaggg

SEQ ID NO: 148198 - DNA, 201 bp, Homo sapiens
cagaacccatgggtgtggtgggctaactcagtgtaagcaccaggaaggcagggatctttgtctgttttatgcctgatatgtcccagcacagaacagtgccygacacatagaaggtgcccgataactatttgtcaaatgaacaagtaaagcggatgtttcttggtgaagtgagtggtggggaataaggtaagagaggtataa

SEQ ID NO: 148199 - DNA, 201 bp, Homo sapiens
acggataccaaaatctgcagatgctcaagtccctgatatataaaaaattgcatttgcacatcatctgtggacatcctcctgtatgctttaaatcatctctmgattatttataattcctaatacaatgtaaatgctaagtaaatagttgttagactgtattgtttagggaatagtaagaagacaaaaaaaatctgtgtatat

SEQ ID NO: 148200 - DNA, 201 bp, Homo sapiens
agacccaggtaccaggatacagctggctccatctggttattgtgtgtgctttctagggacctcccacggataccaaaatctgcagatgctcaagtccctgrtatataaaaaattgcatttgcacatcatctgtggacatcctcctgtatgctttaaatcatctctcgattatttataattcctaatacaatgtaaatgcta

SEQ ID NO: 148201 - DNA, 201 bp, Homo sapiens
aatatctaattacttatcaagagggctgctctgcctcaccccatagggaggacagacccaggtaccaggatacagctggctccatctggttattgtgtgtkctttctagggacctcccacggataccaaaatctgcagatgctcaagtccctgatatataaaaaattgcatttgcacatcatctgtggacatcctcctgta

SEQ ID NO: 148202 - DNA, 201 bp, Homo sapiens
cagcggctcacacctgtaatcccagcactttgggaggccgtggcgggcggatcacctgaggtcaggagttcaagaccagcctgactgacatggcgaaaccrcgtctctaccaaaaatacaaaaatgagccgtgcatggtggtacgcgcctgtaatcccagctacttgggaggttgaggcaggagaatcgcttgaacctggg

SEQ ID NO: 148203 - DNA, 201 bp, Homo sapiens
aaaaagtggcccccttagaacaaaaggtgttgcccctgtcacccaggaaattccaaggggcttaagagctctgtctcagtgatcaaggagggacaaagacmaagtatttttctgagataccactttactcatccttgtcaagcttcctgctctgaggtcttaacgctcttcctcctgccttcttcctcccttcccgatttc

SEQ ID NO: 148204 - DNA, 201 bp, Homo sapiens
atttttataccactgtgtgaagtaggcatcgtctccattttaccaacttttaaaaatgagcaactactcttaaaaaaaaactaagtaaccacatttttttmtaacatcatagtctagtgatggtggcacacaggaggccaatttagggcagctatgagacaggttccccatgctgactcatgagacccattccatctctga

SEQ ID NO: 148205 - DNA, 201 bp, Homo sapiens
tcaaacccaaagtgtgctgtccagttttggagatctaccagagggagggactttgcattttccagatttcagcttgtgattttttttttttttttttttttgaaatggagtctcgctccattgccaggctggagtgcagtggcgctaccttggctcactgcaacctctccctcctgggttcaagcgattctcctgcctcag

SEQ ID NO: 148206 - DNA, 201 bp, Homo sapiens
cctttccatatccatctctatcattttcaactctaagctttttcattaagtgtatcagactatagttattttacacacacacacacacacacacacacacacacacacacaattgtttatatctctgtgccttcgttgtcctatcatgcttttctcccaatatttgagaatctcaattttcaacccatttttcaagaccaa

SEQ ID NO: 148207 - DNA, 201 bp, Homo sapiens
acctttccatatccatctctatcattttcaactctaagctttttcattaagtgtatcagactatagttattttacacacacacacacacacacacacacacacacacacacaattgtttatatctctgtgccttcgttgtcctatcatgcttttctcccaatatttgagaatctcaattttcaacccatttttcaagacca

SEQ ID NO: 148208 - DNA, 201 bp, Homo sapiens
agtagagatggcatttctccctgttgttcaggctggtctcgaactcccaacctcaggggatccgcccacctcagcctcctaaagttctgggattacaggcrtgagccactgcgcccagccagggcattgtgctttgattttgttgttgttcatttaatttgcccttgtgttaactgtatgactcggttgtgtgaggttttt

SEQ ID NO: 148209 - DNA, 201 bp, Homo sapiens
tacctttccatatccatctctatcattttcaactctaagctttttcattaagtgtatcagactatagttattttacacacacacacacacacacacacacacacacacacacaattgtttatatctctgtgccttcgttgtcctatcatgcttttctcccaatatttgagaatctcaattttcaacccatttttcaagacc

SEQ ID NO: 148210 - DNA, 201 bp, Homo sapiens
gctccaaaggccagggctttcatgaggaagatgtttataaagcacatgggagggaattcctcactgagtcctcggatcttaacggtgatggctcactctaraggaaggataatgtagtttggggaaagaacacaaaccttctcctggcaaattctgactcttagagctttgcatcttgctggctgtgggattgtagacaaa

SEQ ID NO: 148211 - DNA, 201 bp, Homo sapiens
ctacctttccatatccatctctatcattttcaactctaagctttttcattaagtgtatcagactatagttattttacacacacacacacacacacacacacacacacacacacaattgtttatatctctgtgccttcgttgtcctatcatgcttttctcccaatatttgagaatctcaattttcaacccatttttcaagac

SEQ ID NO: 148212 - DNA, 201 bp, Homo sapiens
taaatgctccagtgaccaatcccctcaagcttcgcaaagctaaatagaggatgcttcttgctgggcgatgagagaggaaggggttttgtgccaccgataggaggagggacgtgtctgtagatccacgatcacattccccttggttcacttctcctttgtcatcattctggaattatttatgtttgcagaagatggttgctt

SEQ ID NO: 148213 - DNA, 201 bp, Homo sapiens
aaataaactaactctcatttttattatcattttaattacacgaaccctttggcgtgttgatagtgatgaacaacatggtgggatattactctgccaggtgytgacttctctatggggtgctctcgggaaaatttgcctggtgccctccaggtttcctcagcctgccttcgagggtgctcttctctccattgaccccatgat

SEQ ID NO: 148214 - DNA, 201 bp, Homo sapiens
tagagatgatttaaagtatacaggaggatgtgcataggttatatgcaatagggcaccattttatatcagagacttgagcatctttggattttgatctccaraaggggtcatgtaactaataacccacagactccaaggatggctgtacttggaatttatcacagtccagttcataacattctataattacagatgtggtag

SEQ ID NO: 148215 - DNA, 201 bp, Homo sapiens
gtgaacccaggaggcggagcttgccgtgagccgagagatcgtgccactgcactccagcctgggcgacagagcaagactccgtctgaaaaaaaaaaaaaaaagaaatcttgttgttctccctgtttgggggcagcatggcgtattcacaggtgtaagggtgcagcataccatggggtttggctcacctgcatatgacttgtg

SEQ ID NO: 148216 - DNA, 201 bp, Homo sapiens
aaaaaatagatggttgcatctatattgaacatgtacagagttttttcttgtcattcccaaaacaatacagtataacaactgtttacataatttttacattktattaggtgttataagtaatctagagatgatttaaagtatacaggaggatgtgcataggttatatgcaatagggcaccattttatatcagagacttgagc

SEQ ID NO: 148217 - DNA, 201 bp, Homo sapiens
agtgagccaagatcacaccactgcactccagcctgggcaacagaacaagactccgtctcaaaaaaaaaaaaaaaaaaaaattgcaggctgggcgcagtggytcacgcctgtaatcccagcactttaggaggtggaggtgggtggatcacctgaggtcaggagttccagaccagcctgaccaacatggtgaaatcctgtctc

SEQ ID NO: 148218 - DNA, 201 bp, Homo sapiens
agtccatagagatagaaagtagattggtggttttgaaggtttgaggaaggcgggaatatggggagggttggggtttgttttctgggtgattaaaatgctayggaattagatagcggtgatggctgcacaactctgaataccctaaaaaccactgaaatgtacacattaaaagggtgacttatttggtatatgaattatatc

SEQ ID NO: 148219 - DNA, 201 bp, Homo sapiens
tttgagacggagtctcgctctgtcacccaggctggagcgcagtggcgtgatcttggcttactgcaagctccgcctcctaggttcacaccactctctggcckcagcctcccaagtagctgggactacaggctcctgccactgcacctggctaattttttatttttagtagagacggggtttcaccgtggtctccatctcctg

SEQ ID NO: 148220 - DNA, 201 bp, Homo sapiens
cactcctcataaacttagccagcctgacacacatgtgtgtacacacacacacacatacacacacaggaggggggagagagagagagagagagagagagagrcagtaaatttgtcagcccttgcagtagcacgcatttctaaatatgggcatagtaggaagagagatggttactgtgggaactataacttttaatttactgg

SEQ ID NO: 148221 - DNA, 201 bp, Homo sapiens
tagtgatcatgtgggagtgaaagctctgtaatgtgtaatgtgaaagatgtacattataagtatctacaagattagttattcatatcatttttccctccttkttttttttgagacagagtctcgccctgtcacccaggctggagtgcaatggcaccatctcagctcactgcaacctccgcctcccaggttcaagcgattctt

SEQ ID NO: 148222 - DNA, 201 bp, Homo sapiens
aatctcagctcattgcaacctccgcctcccaggttcaagcaattctcctgtctcagcctcctgagtagctgggattacaggtgcccacccccatgcccagytattttttttgtatttttagtaaagatagggtttcaccatgttggccaggctggtcttgaactcctgacctcaggtgacccgcccaccttggcctcccaa

SEQ ID NO: 148223 - DNA, 201 bp, Homo sapiens
tagtacagacggggtttcaccatgttggccagctggtcttcaactcctgatctcaagttatccactcgtctcggcctcccaaaatgctgagattacaggcrtgagccactgcgcccagcctattctagtcttcttttgaaacacagcacgtggttcatacgtggtacataacaggtgctaactaaatgctcctttaagtat

SEQ ID NO: 148224 - DNA, 201 bp, Homo sapiens
ggcgccatctcagctcactgcaacctccgcctcccaggttcaagttattctcatgcctcagcctcccatgtagctgggattgcaggcgtgccaccataccytgctaatttttgtgcttttagtacagacggggtttcaccatgttggccagctggtcttcaactcctgatctcaagttatccactcgtctcggcctcccaa

SEQ ID NO: 148225 - DNA, 201 bp, Homo sapiens
gtggcatgatcttagctcactgcaacctccgcctcccgggttcaagcaattctcctgcctcagcctcccgagtagctgggattacaggcgcccgcccccaygcccggctaatttttgtatttttagtagaggcggggtttcaccatcttcgccaggctggtctagaactcctgaccttgtgatccacctgtctcggcctcc

SEQ ID NO: 148226 - DNA, 201 bp, Homo sapiens
gtcctctctggctggtcactgccttaggagatcagcagagcttttttatacctttgtggagagagaagtgtaggactttggggctggaaggggatcttcaratcatttaatatactcaccacctggctttgaaacgaggagtccaaggcttatagtgggatacaacttcatatcacatgttcagttggaagcagggaaaga

SEQ ID NO: 148227 - DNA, 201 bp, Homo sapiens
tgccaagttgggtttgttccaggaaagacaagagtgatttagcattgaaaaatccacgtgtcattcagcatgttaatagattaaaggagaaataccaaatratcatataaacagatgaaggaaagttatttgacaaaattacgtgctcattcatgataaaaactctcataaatagtaactagtgaaaacctacagtaaact

SEQ ID NO: 148228 - DNA, 201 bp, Homo sapiens
ccgctgtgcgtgtggacttctacaatgcagacgagctcaaggtatgggcaggaggggaggcacttccgtgatctcctctagctggaagcgttattacttgkggttgagcagactgtagcaatgccagaaatctcagctcctaactgaaaatgtgtagggcgtaaggaagttgtttgccagcagaatctgattttattatcg

SEQ ID NO: 148229 - DNA, 201 bp, Homo sapiens
aaaaacagaaacattaaacaaaactagaagaaaaatatgaaaatgttggtctaagaatgaggaaggtttctgtgtgcctaaggaaaatgaaaaaaaaaaaatcttaaaggaaaactccagtagatttgattaattgcaatggaaaaaatcaaggggaaaattctgaataaactgaaacaaaattaaaggacaagtaataaa

SEQ ID NO: 148230 - DNA, 201 bp, Homo sapiens
ataaagtcaaaagtttgaaagggaccaataaaatagacaaacctatggcgagactcatcaagaaaaaagaaagtgaactcaccaagaaatgaataggggcrcctaattccagatccacttactcattctctcattgtttttgagcaagtgacttctgagttctagatatacagcaaagataaagcaaacagtctcagttgg

SEQ ID NO: 148231 - DNA, 201 bp, Homo sapiens
attatttatttgttttattttattattattattattattattattattttgagagagagtctcgctctgtcacccaggctagagtgcagtggcacaatgtyggctcactgcaacctccgcctcccgggttcaagcaattctctgcctcagcctctcgagtagctgggattacaggcacctgccaccatgccaggctaattt

SEQ ID NO: 148232 - DNA, 201 bp, Homo sapiens
gctcttccagacctggatggtgcccgctgtgcgtgtggacttctacaatgcagacgagctcaaggtatgggcaggaggggaggcacttccgtgatctcctytagctggaagcgttattacttgtggttgagcagactgtagcaatgccagaaatctcagctcctaactgaaaatgtgtagggcgtaaggaagttgtttgcc

SEQ ID NO: 148233 - DNA, 201 bp, Homo sapiens
ctaattttccaacttggacttgcttttcatttttgtatttttgctgtgatgccaacttaagttttatatgcgtgcgtgcgcacacacacacacacacacamgcacacatatatgttccttgttaacttttcaaaatgttttcactgtgagggttttgaggttgtctagttcactatgttacctgaaataggaatctccctt

SEQ ID NO: 148234 - DNA, 201 bp, Homo sapiens
ccaccatgccaggctaatttttgtatttttaatagagctggggtttcaccatcttggtcaggctggtcttgaactcctgacctcgtgatccacccacctcrgcctcccaaagtgctgggattacaggcgcgagccactgctgttatctccattttatacagaaggaaatagaagctcagagaggtgaattcatagaacacg

SEQ ID NO: 148235 - DNA, 201 bp, Homo sapiens
agaattctgtgaagtaagaaaaataataaacagaaaagtaaacaaatattaattttcattaatttaaattaatgaaaatattaatttttaattaattaatttccatatataagaagatggcaaacctctggtaaatttaataaaacaatggaggaaatattaataaacagaacaatgagtaaaggtatacaacaatataaa

SEQ ID NO: 148236 - DNA, 201 bp, Homo sapiens
cagaattctgtgaagtaagaaaaataataaacagaaaagtaaacaaatattaattttcattaatttaaattaatgaaaatattaatttttaattaattaatttccatatataagaagatggcaaacctctggtaaatttaataaaacaatggaggaaatattaataaacagaacaatgagtaaaggtatacaacaatataa

SEQ ID NO: 148237 - DNA, 201 bp, Homo sapiens
gcagaattctgtgaagtaagaaaaataataaacagaaaagtaaacaaatattaattttcattaatttaaattaatgaaaatattaatttttaattaattaatttccatatataagaagatggcaaacctctggtaaatttaataaaacaatggaggaaatattaataaacagaacaatgagtaaaggtatacaacaatata

SEQ ID NO: 148238 - DNA, 201 bp, Homo sapiens
agcagaattctgtgaagtaagaaaaataataaacagaaaagtaaacaaatattaattttcattaatttaaattaatgaaaatattaatttttaattaattaatttccatatataagaagatggcaaacctctggtaaatttaataaaacaatggaggaaatattaataaacagaacaatgagtaaaggtatacaacaatat

SEQ ID NO: 148239 - DNA, 201 bp, Homo sapiens
ggtggatcacttgagcccaggagttcgagacccacctgggcaacatggcgaaaccccgtctctaccaagaaaatccacaaattagccagtctcataacctkgtctcaaaataaataaatagacttaaaaaaattttaaaaacagaaaaaaggctgggcgctgtggctcacgcctgtaatcccagcactttgggaggccgag

SEQ ID NO: 148240 - DNA, 201 bp, Homo sapiens
gcttctgtgctgtgagagtaggtgtccaaataaaatgtctgcagagttttgagcaaaatagacagagacccaagaataccaaccaagttctctcatgttaataaggcaacagaaaaaaaatgataggctttgcaggaactcagaaaatatacaccaataggccaggtgcagtggctcacgcctgtaatcccagcactttgg

SEQ ID NO: 148241 - DNA, 201 bp, Homo sapiens
tgtggcttatttcagctaagttactgtcattgtgtctagacaaggactctctgagcttttgatgggggcaggttccttctctgggtgttcctgaagaaccrgtatattaagcatggctcctgcatggaaggcctgctgggaatggtacttcctgtaggggatgaaagggagcccttctaaggatgctgctgaggaggggga

SEQ ID NO: 148242 - DNA, 201 bp, Homo sapiens
ccatcattctcagcaaactaacacaagaacagaaaaccaagctctgtatgttctcactcataagtgggagttgaacaatgagaacacatggacacagggargggaacatcacacactggggcctgtcagggggtgggggcctgggggagggatagcattaggaaaaatacctaatgtagatgatgggttgatgggtgcagt

SEQ ID NO: 148243 - DNA, 201 bp, Homo sapiens
gtgatctgcccacctcggcctcccaaagtgctgggattacaggcatgagccacctgtaatacccggcctgcattaggtattataagtaatctagagatgawtttgagtaaagtatataggaggataggtgtaggttatatgcaaatactatgcccatttgtatgagggacttgagccatctgtggattttggtatctgtgg

SEQ ID NO: 148244 - DNA, 201 bp, Homo sapiens
ttgaatattattaatgccaaatgagttcagttcctatcctcctcccttcctttaaaagtttaaatttgtctatagctttttttttttttttttttttttgkgagatggagttttgctcttgttgcccaggctggagtgcaatggcatgatctttgctcactgcaacctctgcctcccagtttcaaacgattctcctgcctc

SEQ ID NO: 148245 - DNA, 201 bp, Homo sapiens
ttaaagagtttttttcccagtgttatttgaatattattaatgccaaatgagttcagttcctatcctcctcccttcctttaaaagtttaaatttgtctatarctttttttttttttttttttttttgtgagatggagttttgctcttgttgcccaggctggagtgcaatggcatgatctttgctcactgcaacctctgcctc

SEQ ID NO: 148246 - DNA, 201 bp, Homo sapiens
gaagacttgattctattgaggtcccagagaggaggaaagacatctaggatacagtaggcagggcgggagactgtgtgtgtgtgtgtgtgtgtgtgtgtgtgagcgcgcgcgttggattgtggcttgggtaaaggtgtgcagtaggaaaataataatgacagtaatataaataatgataataaagctaacatctttcaatgg

SEQ ID NO: 148247 - DNA, 201 bp, Homo sapiens
tgaagacttgattctattgaggtcccagagaggaggaaagacatctaggatacagtaggcagggcgggagactgtgtgtgtgtgtgtgtgtgtgtgtgtgtgagcgcgcgcgttggattgtggcttgggtaaaggtgtgcagtaggaaaataataatgacagtaatataaataatgataataaagctaacatctttcaatg

SEQ ID NO: 148248 - DNA, 201 bp, Homo sapiens
gttggccaggctggtctcgaactcctgacctcaggtgatccacccacttcagcctcccaaagtgctgggattacaggcatgagccactgagccccgccaaycccccagtcttaataatcaaaattgtcttcacattgccaaatgtcccctgggggtaaattaccccctattgagaaccactgacttagaggctccccatgg

SEQ ID NO: 148249 - DNA, 201 bp, Homo sapiens
acatggtgaaaccccatctctactaaaactacaaaaattagccatttgtgatgacgggtgcctgtactcccatctactcaggagactgaggcaggagaaayacttgaacctgggaggtggaggttgcagtgagccaagatcgtgctgttgcactccagcctgggtgacagagcaaaacttcatctcaaaaaaataaaataa

SEQ ID NO: 148250 - DNA, 201 bp, Homo sapiens
cacattggcctttgggcctccacctaaacaagccgttcttgtgctcggcctcaaggtcattagtccttccttcctccctcccttcacctgccttcccttcmcctgccttcccttcccctgccttcccttccccttctccttctccttccccttcccctccccctccccctcccccttcccctccctccctctctgttgccc

SEQ ID NO: 148251 - DNA, 201 bp, Homo sapiens
gaaagtagattggtggttttgaaggtttgaggaaggcgggaatatggggagggttggggtttgttttctgggtgattaaaatgctacggaattagatagcrgtgatggctgcacaactctgaataccctaaaaaccactgaaatgtacacattaaaagggtgacttatttggtatatgaattatatctcaataaacgtatt

SEQ ID NO: 148252 - DNA, 201 bp, Homo sapiens
aaggaaggaaggaaaaggaaggaaagagagaaagaaagagagagaaagaaagaaagaaagaaagaaagaaagaaagaaagaaagaaagaaagaaagaaagaaaagaaagagaaagaaactgctttaaatgccttacctttgctggtgtcttccttgccctgggactttttcatgcatcggcttgttgtgtcctcccagaaa

SEQ ID NO: 148253 - DNA, 201 bp, Homo sapiens
cccacccttccctgcccctgggcctcagatgccctatgacctctgccttctgccctcccctagtcagttcccccaccctcagtgatatgagtcacatagtyctgcccaggaaacagcctccttcccactaccaatcccacagagcaacagctaccttaggggtagtgactaccttgggcccggaggctggttcaggatccc

SEQ ID NO: 148254 - DNA, 201 bp, Homo sapiens
attgcactccagcatgggggacagagcaaaactccatctcaaaaaaagaaaaaaaaaaaggaaggaaggaaaaggaaggaaagagagaaagaaagagagaraaagaaagaaagaaagaaagaaagaaagaaagaaagaaagaaagaaagaaagaaagaaaagaaagagaaagaaactgctttaaatgccttacctttgctg

SEQ ID NO: 148255 - DNA, 201 bp, Homo sapiens
gctctgcgtgaggatgcccacccttccctgcccctgggcctcagatgccctatgacctctgccttctgccctcccctagtcagttcccccaccctcagtgrtatgagtcacatagtcctgcccaggaaacagcctccttcccactaccaatcccacagagcaacagctaccttaggggtagtgactaccttgggcccggag

SEQ ID NO: 148256 - DNA, 201 bp, Homo sapiens
cttgaacccgggtggtggaggttgcagtgagccgatcacgccattgcactccagcatgggggacagagcaaaactccatctcaaaaaaagaaaaaaaaaaaggaaggaaggaaaaggaaggaaagagagaaagaaagagagagaaagaaagaaagaaagaaagaaagaaagaaagaaagaaagaaagaaagaaagaaagaa

SEQ ID NO: 148257 - DNA, 201 bp, Homo sapiens; identical to SEQ ID NO: 27347

SEQ ID NO: 148258 - DNA, 201 bp, Homo sapiens
ctcctgtgtctgcctgaggatatccggacccgaggagttgaagacatcccaggctactactaccgtgatgatgggatgcagatttggggtgcagtggaacrgtgaggggccgtccctggagagccgagggctggtcggggacgtgggaagacaggaaaggagactgaggccccagggaggctcacgttgaggaggagggcc

SEQ ID NO: 148259 - DNA, 201 bp, Homo sapiens
gggccagaacaacccaggcctcccctagctctgccattttcctgccatgcagctgctgatcccgcacacccgatacaccctgcacatcaacacactcgccmgggagctgcttatcgtgccagggcaggtggtggacagggtgagagctgtgttggggagggagtaggcaggccactccttcaatgtgacgaatttgaggtc

SEQ ID NO: 148260 - DNA, 201 bp, Homo sapiens; identical to SEQ ID NO: 27371

SEQ ID NO: 148261 - DNA, 201 bp, Homo sapiens
ggccaaatgcgatgatgcggagccactctcagtagcaaggggaacgtgtaattatgcttcttggaaattccgaattgagctttcattccccgaaagcttcytgcagataagctttacatggatatctgtttaagaggagggacatggatcaggccccatcgagggctacttcaggtcccacacttgggggctagggccaga

SEQ ID NO: 148262 - DNA, 201 bp, Homo sapiens
ggctaggaaatcacaggatgccagagccggaagacacagggctcagccacatcagcacccacgtttgacaaaacaacctgaggctcagggagaggaaggarcacgcctgagctcccagaacaagctgctggtggagcccagcaggaactccagggctcagacccctgtcccaggctgcctcctctcattcttgttgcctct

SEQ ID NO: 148263 - DNA, 201 bp, Homo sapiens
cgctcagaggtgggctctggtggacggctccacattgccaggcccacaggccctggttttcctagtgccttccctgcctaggggctaggaaatcacaggaygccagagccggaagacacagggctcagccacatcagcacccacgtttgacaaaacaacctgaggctcagggagaggaaggagcacgcctgagctcccaga

SEQ ID NO: 148264 - DNA, 201 bp, Homo sapiens
agcagctgaactattctctcctgtgtctgcctgaggatatccggacccgaggagttgaagacatcccaggctactactaccgtgatgatgggatgcagatytggggtgcagtggaacggtgaggggccgtccctggagagccgagggctggtcggggacgtgggaagacaggaaaggagactgaggccccagggaggctca

SEQ ID NO: 148265 - DNA, 201 bp, Homo sapiens
gggaagacaggaaaggagactgaggccccagggaggctcacgttgaggaggagggccagacattcatgatgctaagcagaggcattcctcagagcgggtcsgggttggaggctggacctgaacctggatgcattgcagctttgtctctgaaatcatcggtatctactacccaagtgatgagtctgtccaagatgacagaga

SEQ ID NO: 148266 - DNA, 201 bp, Homo sapiens
agccccatcccagcccagctctccttgcaggtataccctcctcactggagacccgggaagccctggtgcagtatgtcaccatggtgatattcacctgctcmgccaagcatgcggctgtcagtgcagggcaggtgaggaaaggccagcgcccgaggtggcaggctggaggtgacccagctcctcagcctcattctgccctct

SEQ ID NO: 148267 - DNA, 201 bp, Homo sapiens
cggaagacacagggctcagccacatcagcacccacgtttgacaaaacaacctgaggctcagggagaggaaggagcacgcctgagctcccagaacaagctgytggtggagcccagcaggaactccagggctcagacccctgtcccaggctgcctcctctcattcttgttgcctctttccaagtgacttgcagggctggtgcc

SEQ ID NO: 148268 - DNA, 201 bp, Homo sapiens
cctaggccgtcactgtacacttttatgtgactggcagcacaaaattttacttagaccagcatcaccgcgaacatgtgagtaatgcattgtgctatgacatyatgacagctatgatgtcactaggcattaggactttttcagcttcattataattttatgggaccaccattgtacatgtggtccatcattgatcaaaatgtc

SEQ ID NO: 148269 - DNA, 201 bp, Homo sapiens
ggagaggatgggtggaccgagaggtactcaggatggagaatcaatgggatttgatatgtgaggggtactgccaagagaggtccccaggctccggctgggcrcagtggctcacacctgtaatcccagcactttggaaggccaaggtaggtagattgcatgaggtcaggagtttgagaccaggctggccaacatggcaaaatc

SEQ ID NO: 148270 - DNA, 201 bp, Homo sapiens
gcaccccagaaaggctctcgaagggagatcaggcagcatcaacagccgtcatagaagcccaaatcttaggaaggggaaggacctggggctggcaggtgccwaagtttgaacatggctttgagagaccaagttctctgcagatacttctggggtaggggagggctgggtgggaggcccccgtgctctagggtgggttctgta

SEQ ID NO: 148271 - DNA, 201 bp, Homo sapiens
atgagaatctgctatgaggctctggctgtggtcaccagaggatggtggcctcagcaaggcagtggcaatgcaatggagaggatgggtggaccgagaggtaytcaggatggagaatcaatgggatttgatatgtgaggggtactgccaagagaggtccccaggctccggctgggcgcagtggctcacacctgtaatcccagc

SEQ ID NO: 148272 - DNA, 201 bp, Homo sapiens
acctctgccttctgccctcccctagtcagttcccccaccctcagtgatatgagtcacatagtcctgcccaggaaacagcctccttcccactaccaatcccrcagagcaacagctaccttaggggtagtgactaccttgggcccggaggctggttcaggatcccaagaggcataaggctggctgacagggaagggtctccca

SEQ ID NO: 148273 - DNA, 201 bp, Homo sapiens; identical to SEQ ID NO: 27373

SEQ ID NO: 148274 - DNA, 201 bp, Homo sapiens; identical to SEQ ID NO: 27351

SEQ ID NO: 148275 - DNA, 201 bp, Homo sapiens
ctctcggccttcagtttgactcctgtgcttggatgcccaacctgccacccagcatgcagctgccaccacccacctccaaaggcctggcaacatgcgagggyttcatagccaccctcccacctgtcaatgccacatgtgatgtcatccttgctctctggttgctgagcaaggagcctggagaccaagtgagtgtggggctgg

SEQ ID NO: 148276 - DNA, 201 bp, Homo sapiens
atcccagcccagctctccttgcaggtataccctcctcactggagacccgggaagccctggtgcagtatgtcaccatggtgatattcacctgctcagccaarcatgcggctgtcagtgcagggcaggtgaggaaaggccagcgcccgaggtggcaggctggaggtgacccagctcctcagcctcattctgccctctcggcct

SEQ ID NO: 148277 - DNA, 201 bp, Homo sapiens
gtcagtggcttgacaaggtggcccagcctgtgcccatgcctctgtgcctcttctaagcagcctttcctcacatggccctatccatgcaagctgggatgcaragcccccgtccgcttcagcagcatctcctggcacaactcccctggaagcctgctatccagcaggccctaagtaacataaatgcagcaccccagaaaggct

SEQ ID NO: 148278 - DNA, 201 bp, Homo sapiens
cacaggccctggttttcctagtgccttccctgcctaggggctaggaaatcacaggatgccagagccggaagacacagggctcagccacatcagcacccacrtttgacaaaacaacctgaggctcagggagaggaaggagcacgcctgagctcccagaacaagctgctggtggagcccagcaggaactccagggctcagacc

SEQ ID NO: 148279 - DNA, 201 bp, Homo sapiens
agacatcccaggctactactaccgtgatgatgggatgcagatttggggtgcagtggaacggtgaggggccgtccctggagagccgagggctggtcggggaygtgggaagacaggaaaggagactgaggccccagggaggctcacgttgaggaggagggccagacattcatgatgctaagcagaggcattcctcagagcggg

SEQ ID NO: 148280 - DNA, 201 bp, Homo sapiens
tcaggcagcatcaacagccgtcatagaagcccaaatcttaggaaggggaaggacctggggctggcaggtgccaaagtttgaacatggctttgagagaccamgttctctgcagatacttctggggtaggggagggctgggtgggaggcccccgtgctctagggtgggttctgtaggtttcctagaccctgctagctttcaga

SEQ ID NO: 148281 - DNA, 201 bp, Homo sapiens
catctcactgtgggaaaatggcagctcccttgcagcctccttgggtagaatggaagggcagctcccaggagggccctcttggctgaaggggtctggctgtkaccaggccccccaaggggactgccactccatctgccctagcaaagagtctccctgaggcctcttgctgaccaccttccctctctaccctccaggtggaag

SEQ ID NO: 148282 - DNA, 201 bp, Homo sapiens
tgcaggacctcagcagccgcctcacccaaccttgtggtggatcctcagaggcccctgggcacctatccggatgagcacttcacagaggaggcccctcggcrgagcatcgccaccttccagagccgcctggcccagatctcgaggggcatccaggagcggaaccggggcctggtgctgccctacacctacctagaccctccc

SEQ ID NO: 148283 - DNA, 201 bp, Homo sapiens
tggctaggggtcatcaagtttgcagatacatgaatttaccatttccctggaaggtctttggctgtgttgcttgtttgagaatagaatttagagatgcctcrggcggctccccctaaactatgaaggctgaagtgcctctctatgggacacctaccaaaggcaactgaaaccttctgcgcagcccctgtcccaggatagtct

SEQ ID NO: 148284 - DNA, 201 bp, Homo sapiens; identical to SEQ ID NO: 27344

SEQ ID NO: 148285 - DNA, 201 bp, Homo sapiens
tggcacaaagccaggaactgcattcagaaacagattttcaaaagatcttgatccggccaactcatctgctatctaaagcctgggctgcaggcttttgctcytggtctgtgggatcagagcagccacaggctcatttggttcctggtgattctccatgtgtcatgaattccacccctaaggaaaccattgcaccaaatctgg

SEQ ID NO: 148286 - DNA, 201 bp, Homo sapiens
atccttctagacttctcctgggtcccagatgcgggccctactctgtgctcttctgtactagctggttctttctgactatctgcagcttctgaggcctggcrctcagaggtgggctctggtggacggctccacattgccaggcccacaggccctggttttcctagtgccttccctgcctaggggctaggaaatcacaggatg

SEQ ID NO: 148287 - DNA, 201 bp, Homo sapiens
gaaaggacagaagtggagcaggaagcagttgttggtgagagatttgtagaactatttgactctttaaatcatatgcatctacagctttgatgagaatattmgaatttaaaagaaagtaaaagagaagacaggaaagaggaaggaagggagggagggagggagggaaacaaaggcccggtgcagtggctcacgcctgtaatc

SEQ ID NO: 148288 - DNA, 201 bp, Homo sapiens
atgggggctctctctgtgctctgggctcagcattggagatcacaggggaaaactgggacttggagataacagaggagttggagataacagactagataacagctagtgaggattcccttggcacaaagccaggaactgcattcagaaacagattttcaaaagatcttgatccggccaactcatctgctatctaaagcctgg

SEQ ID NO: 148289 - DNA, 201 bp, Homo sapiens
tacttctggggtaggggagggctgggtgggaggcccccgtgctctagggtgggttctgtaggtttcctagaccctgctagctttcagacggcatggattcraggcatctcctctgtgaagggcaggatggccccctcccagggtccacccacagtcgctgctcagattctctgatccttctagacttctcctgggtcccag

SEQ ID NO: 148290 - DNA, 201 bp, Homo sapiens
cggcttgttgtgtcctcccagaaatctgagtagagccagaaacacgcccttcaagccccaggaaactcaccctccagggctagcaaggggtgagatggggsctctctctgtgctctgggctcagcattggagatcacaggggaaaactgggacttggagataacagaggagttggagataacagactagataacagctagt

SEQ ID NO: 148291 - DNA, 201 bp, Homo sapiens
agaaagaaagaaagaaagaaagaaaagaaagagaaagaaactgctttaaatgccttacctttgctggtgtcttccttgccctgggactttttcatgcatcrgcttgttgtgtcctcccagaaatctgagtagagccagaaacacgcccttcaagccccaggaaactcaccctccagggctagcaaggggtgagatgggggc

SEQ ID NO: 148292 - DNA, 201 bp, Homo sapiens
ggcagcaacagccccaagagagggaatagacattgagatctactgtgtccatggagacccagagtcagcctaggccctgccaaaacgagctgtgagatctyagaccaattttttcatctcttcaattcttattttcttctgtaaaagaaactaagaataccaatctcgtttgggttaggaggaacaaatgagaaaatggtt

SEQ ID NO: 148293 - DNA, 201 bp, Homo sapiens
gaacaagctgctggtggagcccagcaggaactccagggctcagacccctgtcccaggctgcctcctctcattcttgttgcctctttccaagtgacttgcarggctggtgcctgtgtgggggaaggtctggggccagaacaacccaggcctcccctagctctgccattttcctgccatgcagctgctgatcccgcacacccg

SEQ ID NO: 148294 - DNA, 201 bp, Homo sapiens
tccccgtgtcccccaccccctgcaaagcacgcatttgagtgaccccgttcccctgtcccccaccccctgcagagcacgcatttgagcactggcaggaggaygccttcttcgcctcccagttcctgaatggtctcaaccctgtcctgatccgccgctgtcactacctcccaaagaacttccccgtcactgatgccatggtgg

SEQ ID NO: 148295 - DNA, 201 bp, Homo sapiens
aaggggtgagatgggggctctctctgtgctctgggctcagcattggagatcacaggggaaaactgggacttggagataacagaggagttggagataacagrctagataacagctagtgaggattcccttggcacaaagccaggaactgcattcagaaacagattttcaaaagatcttgatccggccaactcatctgctatc

SEQ ID NO: 148296 - DNA, 201 bp, Homo sapiens
agggctagcaaggggtgagatgggggctctctctgtgctctgggctcagcattggagatcacaggggaaaactgggacttggagataacagaggagttggagataacagactagataacagctagtgaggattcccttggcacaaagccaggaactgcattcagaaacagattttcaaaagatcttgatccggccaactca

SEQ ID NO: 148297 - DNA, 201 bp, Homo sapiens
ggaaaaggaaggaaagagagaaagaaagagagagaaagaaagaaagaaagaaagaaagaaagaaagaaagaaagaaagaaagaaagaaagaaaagaaagagaaagaaactgctttaaatgccttacctttgctggtgtcttccttgccctgggactttttcatgcatcggcttgttgtgtcctcccagaaatctgagtaga

SEQ ID NO: 148298 - DNA, 201 bp, Homo sapiens
aaggaaaaggaaggaaagagagaaagaaagagagagaaagaaagaaagaaagaaagaaagaaagaaagaaagaaagaaagaaagaaagaaagaaaagaaagagaaagaaactgctttaaatgccttacctttgctggtgtcttccttgccctgggactttttcatgcatcggcttgttgtgtcctcccagaaatctgagta

SEQ ID NO: 148299 - DNA, 201 bp, Homo sapiens
gcctaggccctgccaaaacgagctgtgagatcttagaccaattttttcatctcttcaattcttattttcttctgtaaaagaaactaagaataccaatctcrtttgggttaggaggaacaaatgagaaaatggttaagaatgtaggtggtcagctgctaagtcttgcacaactgtgtgctcttgctgttgttcctgtctttc

SEQ ID NO: 148300 - DNA, 201 bp, Homo sapiens
ggaaggaaaaggaaggaaagagagaaagaaagagagagaaagaaagaaagaaagaaagaaagaaagaaagaaagaaagaaagaaagaaagaaagaaaagaaagagaaagaaactgctttaaatgccttacctttgctggtgtcttccttgccctgggactttttcatgcatcggcttgttgtgtcctcccagaaatctgag

SEQ ID NO: 148301 - DNA, 201 bp, Homo sapiens
aggaaggaaaaggaaggaaagagagaaagaaagagagagaaagaaagaaagaaagaaagaaagaaagaaagaaagaaagaaagaaagaaagaaagaaaagaaagagaaagaaactgctttaaatgccttacctttgctggtgtcttccttgccctgggactttttcatgcatcggcttgttgtgtcctcccagaaatctga

SEQ ID NO: 148302 - DNA, 201 bp, Homo sapiens
cagctggtgaggagcttgggccagggatcctgacctctttcctggggcatcagctcctgtggctgcccagagtctcagaaaaccaagcaccaatttgctakgtaaccctgatcaggtccttgctagaccttacttttccccacagagacaaaagagaatatggacggaggggatccctgaccttctaacgccttctaatac

SEQ ID NO: 148303 - DNA, 201 bp, Homo sapiens; identical to SEQ ID NO: 27399

SEQ ID NO: 148304 - DNA, 201 bp, Homo sapiens; identical to SEQ ID NO: 27400

SEQ ID NO: 148305 - DNA, 201 bp, Homo sapiens; identical to SEQ ID NO: 27401

SEQ ID NO: 148306 - DNA, 201 bp, Homo sapiens; identical to SEQ ID NO: 27402

SEQ ID NO: 148307 - DNA, 201 bp, Homo sapiens; identical to SEQ ID NO: 27403

SEQ ID NO: 148308 - DNA, 201 bp, Homo sapiens; identical to SEQ ID NO: 27404

SEQ ID NO: 148309 - DNA, 201 bp, Homo sapiens; identical to SEQ ID NO: 27405

SEQ ID NO: 148310 - DNA, 201 bp, Homo sapiens; identical to SEQ ID NO: 27406

SEQ ID NO: 148311 - DNA, 201 bp, Homo sapiens; identical to SEQ ID NO: 27407

SEQ ID NO: 148312 - DNA, 201 bp, Homo sapiens; identical to SEQ ID NO: 27408

SEQ ID NO: 148313 - DNA, 201 bp, Homo sapiens
catcttattcaatcttcaaaacaactctagaaggcaggttttcttctcccctgttctatagttgaagaaatggaggctcagagaggttaagtgacatgccyaaggtcacacagctagaaagggatggaaccagattccaatgcaggtctttctgaccctaccttctcccagtggcagaggcctgcttcctcatgggcaaac

SEQ ID NO: 148314 - DNA, 201 bp, Homo sapiens; identical to SEQ ID NO: 27409

SEQ ID NO: 148315 - DNA, 201 bp, Homo sapiens
agggatggaaccagattccaatgcaggtctttctgaccctaccttctcccagtggcagaggcctgcttcctcatgggcaaacgcggaaagacacacccttragcaggtctccctgttcctgcaaggctgggagccatgcaggcactcacatgattttctctctcttccccagtctgacgtaaaggcgtgcagggaggccta

SEQ ID NO: 148316 - DNA, 201 bp, Homo sapiens
ttgcctggatgtggcatgagccttgaggggtagctgcttccattcctacctcctcagatccattgtccacctgcagccagagtgatgcttgcgtgcgcgcrcacacacacacacacacacacacacacacacacctcctcccctctgtgcatatcaatgtcctccccttgctcttggaatagagtccaaactacctaacct

SEQ ID NO: 148317 - DNA, 201 bp, Homo sapiens; identical to SEQ ID NO: 27410

SEQ ID NO: 148318 - DNA, 201 bp, Homo sapiens; identical to SEQ ID NO: 27411

SEQ ID NO: 148319 - DNA, 201 bp, Homo sapiens; identical to SEQ ID NO: 27412

SEQ ID NO: 148320 - DNA, 201 bp, Homo sapiens; identical to SEQ ID NO: 27413

SEQ ID NO: 148321 - DNA, 201 bp, Homo sapiens; identical to SEQ ID NO: 27414

SEQ ID NO: 148322 - DNA, 201 bp, Homo sapiens; identical to SEQ ID NO: 27415

SEQ ID NO: 148323 - DNA, 201 bp, Homo sapiens
ttctcccctgttctatagttgaagaaatggaggctcagagaggttaagtgacatgcctaaggtcacacagctagaaagggatggaaccagattccaatgcmggtctttctgaccctaccttctcccagtggcagaggcctgcttcctcatgggcaaacgcggaaagacacacccttgagcaggtctccctgttcctgcaag

SEQ ID NO: 148324 - DNA, 201 bp, Homo sapiens; identical to SEQ ID NO: 27416

SEQ ID NO: 148325 - DNA, 201 bp, Homo sapiens; identical to SEQ ID NO: 27417

SEQ ID NO: 148326 - DNA, 201 bp, Homo sapiens; identical to SEQ ID NO: 27418

SEQ ID NO: 148327 - DNA, 201 bp, Homo sapiens; identical to SEQ ID NO: 27419

SEQ ID NO: 148328 - DNA, 201 bp, Homo sapiens
aatgacctttcaatgcaataaaagcttattgtccattcacatctgagtcccatgtgattgcttgtggggtagcttctgggtttctgcttcattcagtcttyttgattcccatctgtttcatttttctagtgccagcataatgttgcataagaacaaccaccaaatgaaacaaatatttatttagttcatgagtctgaagtc

SEQ ID NO: 148329 - DNA, 201 bp, Homo sapiens
tttagtgagtgcaggaaagcaagtagcagtggtgttcagaatatcaaggatagctttccatccttcccttggaattttggggtgactctcattgggaacayggagaggcactggcattagtggaattgtttccttatatttttttggcaataaacaacaaacccaataatccacaaactctggttctgtgctacagcagat

SEQ ID NO: 148330 - DNA, 201 bp, Homo sapiens
gagagatgcacggggcctgaacaggcaagagaggtggcaggccttccagaagggcaaggaacccaggcggttccagaccctgagtctccccctccaggtcrttccctttgaccacaaagaggaatgcacactgggctccctgctgtgttacagcccagctctttgaccctagggttgatgattaccaaacattcaggagcc

SEQ ID NO: 148331 - DNA, 201 bp, Homo sapiens; identical to SEQ ID NO: 27421

SEQ ID NO: 148332 - DNA, 201 bp, Homo sapiens
aggtgccccctcaatgcacggagaagctgagagagccagaaaaaggaaacagaaaaaggaagagcggtgggtagttcatctaccagggctttatagaaggyatcttattcaatcttcaaaacaactctagaaggcaggttttcttctcccctgttctatagttgaagaaatggaggctcagagaggttaagtgacatgcct

SEQ ID NO: 148333 - DNA, 201 bp, Homo sapiens; identical to SEQ ID NO: 27422

SEQ ID NO: 148334 - DNA, 201 bp, Homo sapiens; identical to SEQ ID NO: 27423

SEQ ID NO: 148335 - DNA, 201 bp, Homo sapiens; identical to SEQ ID NO: 27424

SEQ ID NO: 148336 - DNA, 201 bp, Homo sapiens; identical to SEQ ID NO: 27425

SEQ ID NO: 148337 - DNA, 201 bp, Homo sapiens; identical to SEQ ID NO: 27426

SEQ ID NO: 148338 - DNA, 201 bp, Homo sapiens; identical to SEQ ID NO: 27427

SEQ ID NO: 148339 - DNA, 201 bp, Homo sapiens; identical to SEQ ID NO: 27428

SEQ ID NO: 148340 - DNA, 201 bp, Homo sapiens; identical to SEQ ID NO: 27429

SEQ ID NO: 148341 - DNA, 201 bp, Homo sapiens; identical to SEQ ID NO: 27430

SEQ ID NO: 148342 - DNA, 201 bp, Homo sapiens
ggcctggcgtaaaggcgtgcagggaggcctagctctgtttcctggactcagtgacttcagacacagaagtctgtccatggctccttatcacatccgcaaayaccaggagagcgaccgcaagtaggtcgtgggcttgctctcccgggggatggccgaacacgccccagccaccttccggcgattactgaagctgcctcgaac

SEQ ID NO: 148343 - DNA, 201 bp, Homo sapiens
gatactctctgagatccaccttggtccctgtacacatataccacgagcctgagaactgtgccattcaccctgcactcagtcaccattggccagaagccgartccccacacttggcaacaaggcccttcccagctaggcttctccatgctgaggtttccctggtccacaaagcatcgattgttggcagttctttgcactcac

SEQ ID NO: 148344 - DNA, 201 bp, Homo sapiens
gtcaaaaccccacaaaaacagtgggatatagtctttcattggtacatggaagcctctaaaagacaaaatgaatgaaaacttgcctccttaaaagattcttygcaaaagcaagtgaacagcttaagtaacaggctaaggacatgatgaaagagaactgtactctgactgaactaaccccaactgattcttctctttatgcat

SEQ ID NO: 148345 - DNA, 201 bp, Homo sapiens
ggggcagatttttcccattttcttgtgatagtgaataagtctcatgagagctgagggttttataaaaggcagttcccttgcacaagctttcttgcctaccrtcatgtaagatatgcctttttcattataagttacccagtcttggatatttcttcacagtggtatgaaaatggactaatacacatgggctaaactcatgag

SEQ ID NO: 148346 - DNA, 201 bp, Homo sapiens
cggatcactgtcaggggattacatgttctaccgtgctgacttttcactgaaagcccagtctccactcaataagtaaaagtgtaataatcgaaactcccaayttgagttccacttaaaatcttctctcttcccctgccagacctctctgcaccatctaggggagcatagtcccctctgtccctgcctgacagggctctcctc

SEQ ID NO: 148347 - DNA, 201 bp, Homo sapiens
ttggaactattaaatcaaactaaaatctggcctgagaaagcctcctcactcccatacttgagtccttaaggatgaaccataacctaactttgtaggtaggmcaactgaaaacctaacttagaaggatgcttctgtagcaatagctgagcgtcagccaatcgcagcagccatgcttcagtgactcacaggcagcctattgtt

SEQ ID NO: 148348 - DNA, 201 bp, Homo sapiens
atatccagtgcctcagtgtgaagttccagtttaacttcctgttacctcgagcccactatcttgccccaataataccctcccccaattcacaaacacagacrcattccctcctacagctttgggcctcctatctgagtccttcaggaaagaagagcttgtaactcccttagcagtgagtgtagacttggtccaaggaagatg

SEQ ID NO: 148349 - DNA, 201 bp, Homo sapiens
ctctctgtctctgtctctctgtttctctgtgtctctctctctgtctctctctttgtctctctctctgtctctctctcacacacacacacacacacacacacgcacacacacacacagccagcaacattctacctctgccagagttccaggttgaataggtgtggactttgactttcagattcctctggcaagtgtcaacat

SEQ ID NO: 148350 - DNA, 201 bp, Homo sapiens
tctctctgtctctgtctctctgtttctctgtgtctctctctctgtctctctctttgtctctctctctgtctctctctcacacacacacacacacacacacacgcacacacacacacagccagcaacattctacctctgccagagttccaggttgaataggtgtggactttgactttcagattcctctggcaagtgtcaaca

SEQ ID NO: 148351 - DNA, 201 bp, Homo sapiens
cctctctctgtctccccccgccttctctctctgtctctgtctctctgtttctctgtgtctctctctctgtctctctctttgtctctctctctgtctctctctcacacacacacacacacacacacacgcacacacacacacagccagcaacattctacctctgccagagttccaggttgaataggtgtggactttgacttt

SEQ ID NO: 148352 - DNA, 201 bp, Homo sapiens
aaattacttattagccgaagaaaggtgaaaggaagtttggaattaacagtctagattttctcactgattggtccaagtcactgacctctaaaattatcttrgatcatgccctccctccttcctactttctggaaaacaatcagtctcctaccctatgcttgcccaaagagtttcccatacaaatcacaaatctgcacttgc

SEQ ID NO: 148353 - DNA, 201 bp, Homo sapiens
atggttagttgtatgttatatgtattttgccataataaaaactagggggaaaaaaaggaaggggagattgtctcaggctggctgactttccctgcatgtaygcacatcttcacatgtgcacacatgtaaaacaaaaatgaagcaaaaaaagaaattctaatttaaccagtaagcaatatgtaaaaggaaatctgaatgtca

SEQ ID NO: 148354 - DNA, 201 bp, Homo sapiens
tgaaaaacttctggaaatagattgtggtgacagttacacaccattgtgaacataattagtaccactgaactgtacacgttaaaatggttagttgtatgttwtatgtattttgccataataaaaactagggggaaaaaaaggaaggggagattgtctcaggctggctgactttccctgcatgtacgcacatcttcacatgtg

SEQ ID NO: 148355 - DNA, 201 bp, Homo sapiens; identical to SEQ ID NO: 27432

SEQ ID NO: 148356 - DNA, 201 bp, Homo sapiens
catcctgccctctcaccctggcagttcattgtctcaagctgactttcttgggtgttttcatggcttcttctgaggcctccctctggaatattggatcgtamctccagcaatgcaagcaataggttttcctccagcttctggtcctcctcctcctcctcctcctccccaaacctggtttctagcagtcactccactgagact

SEQ ID NO: 148357 - DNA, 201 bp, Homo sapiens
ttttaaagtggagtttgttgaatggcacacagaaaataaacaatccaaatgacagatcagaggtgctggaaaagaccagggagatctaatcgttaaatcasgtcatctaaatattaagaggagacatttggacatctgatagaatttggcattgaataagtgataaatacacagaaaactgaacaacggcaaaaagaaaag

SEQ ID NO: 148358 - DNA, 201 bp, Homo sapiens
accaggagtagggcaagggcccccccaagtaagagtatgagggttcgaggcagcttcagtaatcgccggaaggtggctggggcgtgttcggccatcccccsggagagcaagcccacgacctacttgcggtcgctctcctggtatttgcggatgtgataaggagccatggacagacttctgtgtctgaagtcactgagtcca

SEQ ID NO: 148359 - DNA, 201 bp, Homo sapiens
ctcagcttcttggtgcattgagagagtacctacctcaggcaggccacatgcccaaccctttggtgcttctccagggaccatacatcgcagaaatcctgtgwccaagcacaagtttcaggaaaggctccctccagctttattgtaagtttttaggttgctgaggtggcataagtgccaagcataaaaaacagcccagcctcc

SEQ ID NO: 148360 - DNA, 201 bp, Homo sapiens; identical to SEQ ID NO: 27435

SEQ ID NO: 148361 - DNA, 201 bp, Homo sapiens
cattgtccacagagagatgaaacagctgcaaccgcttctccctcaaggtgggatcatcaacgggcagagctcctactgtgcccaccaccttctcttcagaytcacccacccagaagcaggagccacactcactcaggtaggatttggtgatgtcagacatgtctgtgcgcaatgctatgtctacataccgcgtccagggtt

SEQ ID NO: 148362 - DNA, 201 bp, Homo sapiens
aatgttagaggtagggcctagtgggaggtgtttcgctcataggggtggattcctcatgaatgggttggtgctctgtccatggtaatgaatgagttctggcyctgttagttcacatgtaagctggttgtttgaaagcacctagcatctttcttgtgtgctgtctcgccgtgtgacacacctgctcccccttcagcttccacc

SEQ ID NO: 148363 - DNA, 201 bp, Homo sapiens; identical to SEQ ID NO: 27439

SEQ ID NO: 148364 - DNA, 201 bp, Homo sapiens
tccagccttggctcaaagggccccaggtgaagcgcagaccactgctttggagggtacaagccctaagccttagcagcttccatatgtttttttttttgtcttttttttttgagacagagtcttgtcctgtcaaccaggctggaatgcaacagcacgatctcagctcactgcaacctctgcctcaaaggttcaagtgattct

SEQ ID NO: 148365 - DNA, 201 bp, Homo sapiens; identical to SEQ ID NO: 27440

SEQ ID NO: 148366 - DNA, 201 bp, Homo sapiens
cagctccagccttggctcaaagggccccaggtgaagcgcagaccactgctttggagggtacaagccctaagccttagcagcttccatatgtttttttttttgtcttttttttttgagacagagtcttgtcctgtcaaccaggctggaatgcaacagcacgatctcagctcactgcaacctctgcctcaaaggttcaagtga

SEQ ID NO: 148367 - DNA, 201 bp, Homo sapiens
taaactttactattgttgaactgcctatgttgcctgaactttgactggtttaagttggtttcatttatttcataagaactcttgttaaggggtgcaccttkgtattttgatattattctcttgatagtcataataatagttccctggtgtgctgcatcctctcaagtcataaatgttttgtatgcagccatacattgagaa

SEQ ID NO: 148368 - DNA, 201 bp, Homo sapiens
aaaacatggtgtgtttacaggagcaactaacagttggtttgtaggcatcctaaatggtggatggcaagcttgggtttcccaaaggtttctagtctttataygtcttctagtaggtgcccaggttagtatggcctgtgttaccagagtaacaatgaaaatggctacgtctttaaatcaggccactttacagtgaactatggt

SEQ ID NO: 148369 - DNA, 201 bp, Homo sapiens
tgagatcaccccactacactctagcctggttaacagagcgagaccctttctcacaaaaaaataaataaataaataaataaataaataaataaataaataaaataaacgaggtagatgttacagttaatggaacatcatgcagcttcatatctcctttttactcaagctggggcctatgtttggtattgaacaaaatggaat

SEQ ID NO: 148370 - DNA, 201 bp, Homo sapiens
gtagtcccagctacttgggagactgaggcaggagaattgcttgaacccagaagacagaggttgcagtgagctgagatcaccccactacactctagcctggktaacagagcgagaccctttctcacaaaaaaataaataaataaataaataaataaataaataaataaataaaataaacgaggtagatgttacagttaatgg

SEQ ID NO: 148371 - DNA, 201 bp, Homo sapiens
tggtctcgaacctccttgcctcaagtgatccaccagcctcggtctcccaaagttctgggattacaggcgtgagccaccatgcctggccttaactgtttcarttaataacctgatcaataccaaaatatagaaaaccagtccaagtgatgcctgcaaaagatatattgtgctttcaggcatcatgcactcaagttacgggaa

SEQ ID NO: 148372 - DNA, 201 bp, Homo sapiens
acaattccgctaatgccaatgcctctccatgttgccaatgagagtcaccccaaaattccaagggaaggatagaaagctatccttgatattctgaacaccaytgctacttgttttcctgcactcactaaaagcaacactttaacttttcctttttttttttttttctgaggcagtctcactctgttgcctaggttggagtgc

SEQ ID NO: 148373 - DNA, 201 bp, Homo sapiens
cgcagaccactgctttggagggtacaagccctaagccttagcagcttccatatgtttttttttttgtcttttttttttgagacagagtcttgtcctgtcamccaggctggaatgcaacagcacgatctcagctcactgcaacctctgcctcaaaggttcaagtgattctcctgcctcagtatcccaagtatctgggattgc

SEQ ID NO: 148374 - DNA, 201 bp, Homo sapiens
gtccacagagagatgaaacagctgcaaccgcttctccctcaaggtgggatcatcaacgggcagagctcctactgtgcccaccaccttctcttcagattcasccacccagaagcaggagccacactcactcaggtaggatttggtgatgtcagacatgtctgtgcgcaatgctatgtctacataccgcgtccagggtttttt

SEQ ID NO: 148375 - DNA, 201 bp, Homo sapiens
gttcgaggcagcttcagtaatcgccggaaggtggctggggcgtgttcggccatcccccgggagagcaagcccacgacctacttgcggtcgctctcctggtrtttgcggatgtgataaggagccatggacagacttctgtgtctgaagtcactgagtccaggaaacagagctaggcctccctgcacgcctttacgccaggcc

SEQ ID NO: 148376 - DNA, 201 bp, Homo sapiens
cttggatatttcttcacagtggtatgaaaatggactaatacacatgggctaaactcatgagcaggcaactttatagaaaaacacaaatagcccataaacayaaaatgtagattgagttcattattaattagggtaatgcatgttatggatagaataaaatacctttttacattcactggattggcacaaagttttgtcttt

SEQ ID NO: 148377 - DNA, 201 bp, Homo sapiens
gctggggtggtggcaatgggggcattattttccaaacctgactaggctacattttaaggggatcatagtcacagagaacatagatgtggactattaatttyctttgcctgagcagccgtagccctatgtgctcctctccagcctttcagggagctatgatgggccaaaaaatgctcagtagcccaagccatctcctccata

SEQ ID NO: 148378 - DNA, 201 bp, Homo sapiens
aaattccttcactccctgggggcccgccctgtcttgtctatatagccagtccttaggaagtgaggccaagctgaactgttgacacagtctatgtctttacragtctgggagctgggtgattttacctctgatgctagacttatttttactggttttgaagccttgcttacagccctttcccagtttctcacgaaatactca

SEQ ID NO: 148379 - DNA, 201 bp, Homo sapiens
aattgctcaaattcattaaattccttcactccctgggggcccgccctgtcttgtctatatagccagtccttaggaagtgaggccaagctgaactgttgacmcagtctatgtctttacgagtctgggagctgggtgattttacctctgatgctagacttatttttactggttttgaagccttgcttacagccctttcccagt

SEQ ID NO: 148380 - DNA, 201 bp, Homo sapiens
tcaaccagatttgtttcccaggccctcccaccccactgcctccaaaaaaaaagcggggtttgtttgcctggtgagtaacaaaagtcgctgagaacacagaytttgatcaataggagttttattacttgtcacaagtaggaagagctctgggaatattcgtcaaagcagtgtctcctaagagaaaatgacaggaaggcttta

SEQ ID NO: 148381 - DNA, 201 bp, Homo sapiens
ccaccaccacttactgcctcaaaattgcaccaaatgaaaggtccaagcagccacttctgctttcctggtgggctggggggatggggttggcatgcctgagscccttcaccaatctccctcttggcaacttaacccactcatgcttcctcagactgctgcttcgcctgtaagcagcctataagggaggtcgagtcagggctc

SEQ ID NO: 148382 - DNA, 201 bp, Homo sapiens
ctacatcactgtattttggttccaggaattcccacccaaactgccccattctaaattaggcctcttcaaatcaataacagttcttctgtgactgctggaawatggaagcccaatattttagggattaccacagactaaggagaagggaatccagacttcacatgcattcaggccacaaagaaacacaagtattggcaaaag

SEQ ID NO: 148383 - DNA, 201 bp, Homo sapiens
cttacaaaataagtcccagttggagaattgtagtattaatgtatgtaagtaactcatgttcagaccatctctcttgattccgtagggaacactggggccayatggtattacagtaatatatcatttgctttttggtcatggatatgggtatccaaatagtttccagtgctggaggaggcactgtaacgggctctcctccag

SEQ ID NO: 148384 - DNA, 201 bp, Homo sapiens
ggttttataaagagcagtgcccctgcacaccctctcttgcctaccaccacataagatgtgcctttgctcctccttcacgttctgctgtgattggtccgcayccaaatgtcatcttgaattgtagctcccataatcctcatgtgttgtgggagggacctggtgggaggtaattgaatcatgggggcagatttttcccatttt

SEQ ID NO: 148385 - DNA, 201 bp, Homo sapiens
acagggtttcactgtgttagtcaggatgttctcgatctcctgacctcgtgatcagccctcttcggcctcccaaagtgctgggtttacaggcatgagccccygcacctggccctttgttatctttttaatgtctggacgttctaggatctgtagtgatgttccgtttttattcctgatattatttttgcctcctgtcatttt

SEQ ID NO: 148386 - DNA, 201 bp, Homo sapiens
cggtggcaccaaaccgtactagtctaataggcattgtatcctgcacagcctcccgccaggagtgtgatggaagaacaaggaagcagtgtaaatggaggtamacgggaagcacttcctttgcaccgtgaaagatgatgactgtttcaaggaaaagcacttatgccatggtttgtgtcgtgagctgaaccagctgcctttgtc

SEQ ID NO: 148387 - DNA, 201 bp, Homo sapiens
gaatgccagagaataagttaaggttgacttttttaggtgttcattagagacttgctttaatgagaatagtttcttagttggcataatgcttctgaagtaawggtactttaaaacagtttatcttacggactttaagcattcctcttgaaatcttgtttttactctttctagtcagtctttataggcaatccaaagggatgc

SEQ ID NO: 148388 - DNA, 201 bp, Homo sapiens
cctaattctttctttttccctacagaaaaatccatgggacgataatcagtggatggctttagcttgagcatatgctctagcacagaaccagagtttgtggcttattgggtttgtttttattgccaaaaaaataaggaaacaattccgctaatgccaatgcctctccatgttgccaatgagagtcaccccaaaattccaagg

SEQ ID NO: 148389 - DNA, 201 bp, Homo sapiens
tcttgtaatagtttccatgttttctggttgggtagaggccttcctgtgtaggaaagctgatgctgtgacagtagctaagaaattattagaaaatgtgtttyctttatggagcatccctggaaaaatccccagcaataggggaattcattttattaggcaggttataaagcagttaaacaaggtgttatggacacaatggca

SEQ ID NO: 148390 - DNA, 201 bp, Homo sapiens
caactcatcatggaacagaaaaatacgtccaaattgtgaaaaaatacttgtgggatgattgttccaaaattgctagaatatatatatatatatatatatatgtatatatattttgagacggagtctcactctgtcacccaggctggagtgcaagggcgcgatctcaactcactgcacactccacctccctggttcaagtga

SEQ ID NO: 148391 - DNA, 201 bp, Homo sapiens
acaactcatcatggaacagaaaaatacgtccaaattgtgaaaaaatacttgtgggatgattgttccaaaattgctagaatatatatatatatatatatatatgtatatatattttgagacggagtctcactctgtcacccaggctggagtgcaagggcgcgatctcaactcactgcacactccacctccctggttcaagtg

SEQ ID NO: 148392 - DNA, 201 bp, Homo sapiens
cacaactcatcatggaacagaaaaatacgtccaaattgtgaaaaaatacttgtgggatgattgttccaaaattgctagaatatatatatatatatatatatatgtatatatattttgagacggagtctcactctgtcacccaggctggagtgcaagggcgcgatctcaactcactgcacactccacctccctggttcaagt

SEQ ID NO: 148393 - DNA, 201 bp, Homo sapiens
ccacaactcatcatggaacagaaaaatacgtccaaattgtgaaaaaatacttgtgggatgattgttccaaaattgctagaatatatatatatatatatatatatgtatatatattttgagacggagtctcactctgtcacccaggctggagtgcaagggcgcgatctcaactcactgcacactccacctccctggttcaag

SEQ ID NO: 148394 - DNA, 201 bp, Homo sapiens
ctaaatcagctagtactgaaactgttcagatatgcaacctgaatgaacttcataagattaatccaatccaactaccttacaatgacctatttaataaacartgcaatgcacctcatttggaaaaacaaaactggtatctaaaaggatataaattcaatgttaagtgcagactcacagagggcctagatggctgcctggtct

SEQ ID NO: 148395 - DNA, 201 bp, Homo sapiens
tgctaaatcagctagtactgaaactgttcagatatgcaacctgaatgaacttcataagattaatccaatccaactaccttacaatgacctatttaataaasagtgcaatgcacctcatttggaaaaacaaaactggtatctaaaaggatataaattcaatgttaagtgcagactcacagagggcctagatggctgcctggt

SEQ ID NO: 148396 - DNA, 201 bp, Homo sapiens
atgattttggcatgatagggaaactctaagggtttctcacttctagtgggatcaccatcaaaaatggactccagttagataaactcctagtttgctgttaktgatcgaagctcatacctgcagaactgaacctgaatatcaagggaatgcttagcagatatttatgctaaatcagctagtactgaaactgttcagatatgc

SEQ ID NO: 148397 - DNA, 201 bp, Homo sapiens
catgccactgtattactgctgcctgatgatggtgaagaccacaattgcataagtgtagcatcagaaatagtggcccctcatgttaatttacaagttagtcstttggacaatcctgagttaatacttttgttgatgggtcctatgccaaaagctcagaaggaaaatatcagctaggatatgctgttaccaaaatgagttaat

SEQ ID NO: 148398 - DNA, 201 bp, Homo sapiens
tcatttctcacttatggcactgaaaaaaaaagtagcacatcatggtatgaatgactcatatgcaaaagatgaaaaacttctcattaatttgcatatcttargctcctctttattaacctaaatgtaaataaagaatattttaggccaggtgcggtggctcacgcctgtaatcccagcactttgggaggtcaaggtggataa

SEQ ID NO: 148399 - DNA, 201 bp, Homo sapiens
tacaaagtactatctaattctttcatcaagccttacctggaaactggccagttttttaattcaaagcctagtctttgctacagagtgttaggtccttagggccttaggctgctgtcctgttaccctagtctaaccctggcttgccttggtcattgctccccactcagtcttgccagctcagggtaggggcaccaagtccta

SEQ ID NO: 148400 - DNA, 201 bp, Homo sapiens
aaggcgcagagaagctggctctgtgacttggcgagctgaggtgtaggcctgagacgctcttttccagcacctccgcagttcacctgttttcacacgtgagractgagtttctcatcatctgtcaaaggctgccttactcttagccatagatggtgcatcactgtcaggatctggagacaagggcacaggagggaggatttg

SEQ ID NO: 148401 - DNA, 201 bp, Homo sapiens
acctggcaggcccaggcagagaggatggcagaaacccactgaagctgtttgtgagagcaaccctgcaggtgcagtgacgtttacttaactttagccctacrtgtagggagaagaagggtaaggcgcagagaagctggctctgtgacttggcgagctgaggtgtaggcctgagacgctcttttccagcacctccgcagttca

SEQ ID NO: 148402 - DNA, 201 bp, Homo sapiens; identical to SEQ ID NO: 27433

SEQ ID NO: 148403 - DNA, 201 bp, Homo sapiens
gaaggtcagtttctcattccagatcttgtagtagagaaactagtgaatttcaagtcccctgcaatgctgactctgtgtttccaagtgattctatgtgaccyccacctacccccagtcaccaccttgtcagattttcgaagtccagcatggcagttacacagtcatccctgcagtgaaaccaaactcaagggcaccctgtgg

SEQ ID NO: 148404 - DNA, 201 bp, Homo sapiens
ggacagtgatgtgacttcttggtcagaagaaaaacatgaagagaaaatgctctttaccagttatcctgaggacagaaagttaaaaaagaacaagaagaatkcccatgaaggtcagtttctcattccagatcttgtagtagagaaactagtgaatttcaagtcccctgcaatgctgactctgtgtttccaagtgattctatg

SEQ ID NO: 148405 - DNA, 201 bp, Homo sapiens
aatgaaattctacatagaatgaggaagctctctgtttactaacgtggaaagatctccaaggcatataactgattttaagaaaaggtacagaacagtgtatrgcatactacaatatgagtttttttaaataaaagaaataaaggagggaagagaattgcttaaatgtgcaaaatgaattctctggaaccatatggggttgtg

SEQ ID NO: 148406 - DNA, 201 bp, Homo sapiens
ttaaaatgaatttaggtattcctcaatagctgaatgattacataaattattgtatatctggataatgaatgaaattctacatagaatgaggaagctctctstttactaacgtggaaagatctccaaggcatataactgattttaagaaaaggtacagaacagtgtatagcatactacaatatgagtttttttaaataaaag

SEQ ID NO: 148407 - DNA, 201 bp, Homo sapiens; identical to SEQ ID NO: 27436

SEQ ID NO: 148408 - DNA, 201 bp, Homo sapiens
atggctcttaaacatataagatactcaacctcaatcataataaaggacatgaagttaaaactatatccaactgccaattttcatcttatcagattggcgtraattcaagtgtgatggcaagtttgtgggcaagagtgtagggaagtgtgttcccttgtatattccagtgggagtagaagttggtttactgtgaaagacaat

SEQ ID NO: 148409 - DNA, 201 bp, Homo sapiens
cctaaaaagttaaaaactattcaaaattttccttggcctgcaaccaaaagataattaaatagttttcttggacttgcaggatatgtttttagacttgcagratataaaattcctgggttctgaatttttccttaatagcctcaccatttcatgagctccctaaaaaatgctgtaccagagcctttatcttgggatgatagt

SEQ ID NO: 148410 - DNA, 201 bp, Homo sapiens
tcaagggctctcgccaattatagaagatttaattaaacagggacttataattctatgcaccagccgttgtaacactccaatcctactggttaaaaaaaaaatggatgaggttgaagatttattcaagatttatgggcagttaacaaaattgtagtagcaaggtttcctatagtcccaaatcctaatactttattatccagt

SEQ ID NO: 148411 - DNA, 201 bp, Homo sapiens
gagtaccagcaaggagtatttcctgcagggactgaaatggtattaactactctatttataaagggacttcatcctgaacttagaaatttaattagaaaacrtaaactcggatgggaagttacagccatgactgaattggtggctctagctgaacattttgagaggactgtagagcaagaaaaaacccaaaaggctaacaag

SEQ ID NO: 148412 - DNA, 201 bp, Homo sapiens
gaacttgcttagaaataatgtgaaacattctgggctcagagtaccagcaaggagtatttcctgcagggactgaaatggtattaactactctatttataaakggacttcatcctgaacttagaaatttaattagaaaacataaactcggatgggaagttacagccatgactgaattggtggctctagctgaacattttgaga

SEQ ID NO: 148413 - DNA, 201 bp, Homo sapiens
aacaagggcacacaagcaggtaattacttgaatctgaactttttcattgaaatacattgaaatggctcttaaacatataagatactcaacctcaatcatartaaaggacatgaagttaaaactatatccaactgccaattttcatcttatcagattggcgtgaattcaagtgtgatggcaagtttgtgggcaagagtgtag

SEQ ID NO: 148414 - DNA, 201 bp, Homo sapiens
gtacatcatacaatattgtaaaccaaaaaaagaatgaaccagtgtcagattacagaacttgcttagaaataatgtgaaacattctgggctcagagtaccarcaaggagtatttcctgcagggactgaaatggtattaactactctatttataaagggacttcatcctgaacttagaaatttaattagaaaacataaactcg

SEQ ID NO: 148415 - DNA, 201 bp, Homo sapiens
acccagaatatgtgcatttttagaaaaatagattaaccttactagagaaaagatggccacaatggggaagttttaatttgtataaaattgtttatttgcawggcatattagaaaaagggggtcaaaaccccacaaaaacagtgggatatagtctttcattggtacatggaagcctctaaaagacaaaatgaatgaaaactt

SEQ ID NO: 148416 - DNA, 201 bp, Homo sapiens
tttttttttttttttttttgataatgggtttgtctcaatccaaagattctgggactctaccttctgggactccatctaatttgatatgtaaaattatggayccagaatatgtgcatttttagaaaaatagattaaccttactagagaaaagatggccacaatggggaagttttaatttgtataaaattgtttatttgcatg

SEQ ID NO: 148417 - DNA, 201 bp, Homo sapiens
aaaggacatgaagttaaaactatatccaactgccaattttcatcttatcagattggcgtgaattcaagtgtgatggcaagtttgtgggcaagagtgtaggraagtgtgttcccttgtatattccagtgggagtagaagttggtttactgtgaaagacaatttgacaggtcctgtcaaaattactttcactcagcattttta

SEQ ID NO: 148418 - DNA, 201 bp, Homo sapiens
aaataaggcaaacaccatgctgtaaccaatttggctatttctgtacctcacttcggctttctgcgtgtcactttactttttctattcataaggttttttccgaccacatagcatctctggtgttgctctgaatctgctgtgattctagggactgcctgatttgtgaattgtctttttttttttcttcaaaattaaattctg

SEQ ID NO: 148419 - DNA, 201 bp, Homo sapiens
ggaactattaaatcaaactaaaatctggcctgagaaagcctcctcactcccatacttgagtccttaaggatgaaccataacctaactttgtaggtaggccractgaaaacctaacttagaaggatgcttctgtagcaatagctgagcgtcagccaatcgcagcagccatgcttcagtgactcacaggcagcctattgttca

SEQ ID NO: 148420 - DNA, 201 bp, Homo sapiens
tagggaggggaactcgttcgtcaagtcccgcagctccaaggcggcaagtcacttcccctgcactttactgaggagggaatgatggagggcagaggggagayagatcgggggcttgagccaagctcactccttcctagccagcccagcgggtttaggggtcaccaggtctgagtgctgcccctgcctgctcccacccaacta

SEQ ID NO: 148421 - DNA, 201 bp, Homo sapiens
tggagaatggcacacgggtgcaggaggagccggagctggtgttcactctgggtgactgtgacgtcatccaggtgcgggctggggcgggacagggcaggggygaggggcgtgccttgctgggtctgagtctgcctgacagctggctatccccacgcaccccaggccctggatctcagtgtcccactcatggacgtgggggag

SEQ ID NO: 148422 - DNA, 201 bp, Homo sapiens
gtgtgatctcagctcaccaccgcaacctcctcctcctgggttcaagcgattgtcctgcctcaacctcccaagtagctgggactacaggtgcgagccaccayacccagttaatttttgtatttttagtagagatgtggttagccatattggccaggctggtctcgaactcctgacctcaagtgatctgcccgcctcagtctc

SEQ ID NO: 148423 - DNA, 201 bp, Homo sapiens
ctggcagctgaggccccagaggccagtcttgacctccctccacccttctctcccctcctttttatccacagtccatcccatggaagtggctgtttggggcractgctgttgccttggggggtgtggcactctctgtggtcatcgctgccaggaactgaccacctaggtggctgccaccccctctgcacaccatggaccctg

SEQ ID NO: 148424 - DNA, 201 bp, Homo sapiens
gaccaaccattgttcactgagctggtctctagcaccagcactgtcaccctgaagtctgtcccatcctgcccagtgtcctgcacgtggggttccccactctrgtggcagagtggccattggaagtttggtttgtgccccagtgttgggccagccccctctggacagctagtgggcagagctgagggtaggagtgggggctca

SEQ ID NO: 148425 - DNA, 201 bp, Homo sapiens
gactgtgacgtcatccaggtgcgggctggggcgggacagggcaggggcgaggggcgtgccttgctgggtctgagtctgcctgacagctggctatccccacrcaccccaggccctggatctcagtgtcccactcatggacgtgggggagacggccatggtcactgctgactccaagtactgctacggcccccaaggcaggtg

SEQ ID NO: 148426 - DNA, 201 bp, Homo sapiens
cccctgcctgctcccacccaactagcaggagcccatacatccccccgcacgcggccctgtgcctggaggtgaccctgaagacggctgtggacgggcctgayctggagatgctcacggggcaggagcgcgtggccctggccaaccggaagcgggagtgcggcaacgcccactaccagcgggcggacttcgtcctggccgcca

SEQ ID NO: 148427 - DNA, 201 bp, Homo sapiens
catcttggctcactgcaacctcctgggctggatttcttgaaggacaggcccaggtatgggtccagagtgatgccacccccttccccttacaggtgctggcycagcagggggagtacagtgaggccatccccatcctgagggcagccctgaagctggaaccttccaacaaggtgagcaggacaggggtgccctgggacttgc

SEQ ID NO: 148428 - DNA, 201 bp, Homo sapiens
ctgcagacgtcgctggagaatggcacacgggtgcaggaggagccggagctggtgttcactctgggtgactgtgacgtcatccaggtgcgggctggggcggracagggcaggggcgaggggcgtgccttgctgggtctgagtctgcctgacagctggctatccccacgcaccccaggccctggatctcagtgtcccactcat

SEQ ID NO: 148429 - DNA, 201 bp, Homo sapiens; identical to SEQ ID NO: 27446

SEQ ID NO: 148430 - DNA, 201 bp, Homo sapiens
catctgcagacgtcgctggagaatggcacacgggtgcaggaggagccggagctggtgttcactctgggtgactgtgacgtcatccaggtgcgggctggggygggacagggcaggggcgaggggcgtgccttgctgggtctgagtctgcctgacagctggctatccccacgcaccccaggccctggatctcagtgtcccact

SEQ ID NO: 148431 - DNA, 201 bp, Homo sapiens
gcctcccgagtagctgggactacaggcgcccgccaccatgcccggctaatttttttgtattttttagtagagacggagtttcaccatgttagccaggatgrtcttgacgtcctgacctcttgatccgcctgccttgacctcccaaagtgctgggattacaggtgtgagccaccgcgcccagcctttttttttttttttgag

SEQ ID NO: 148432 - DNA, 201 bp, Homo sapiens
ccagacgctgggctgaacttgtgattctcccacattggcctctcaaatagatggaaactcggcaagtctcagttttcttaaaaaaaaaaaacaaaaaaacmaaaaaaccagaccaaccattgttcactgagctggtctctagcaccagcactgtcaccctgaagtctgtcccatcctgcccagtgtcctgcacgtggggtt

SEQ ID NO: 148433 - DNA, 201 bp, Homo sapiens; identical to SEQ ID NO: 27451

SEQ ID NO: 148434 - DNA, 201 bp, Homo sapiens; identical to SEQ ID NO: 27441

SEQ ID NO: 148435 - DNA, 201 bp, Homo sapiens
ctggtctcaaactcctgggtttaaacagtcctctcatttcagcctcccaaagttctgggattacaggcatgagccaccatgtgtgtcctttgcttaacttmtaaattcatcccacttggtgctgtggtggggacactgtgtcacaggggctctgctaaccaaaggtcccatgagcacctcatttcatggctgggtaaaccg

SEQ ID NO: 148436 - DNA, 201 bp, Homo sapiens
agggtgaggaggaagaggaggaggaagaggaggaagaggatgacctgagtgagctgccaccgctggaggacatgggacaacccccggcggaggaggctgarcagcctggggccctggcccgagagttccttgctgccatggagcccgagcccgccccagccccggccccagaagagtggctggacattctgggtaaggagc

SEQ ID NO: 148437 - DNA, 201 bp, Homo sapiens
gcccttcccctgcctagtccccgcctgagtgccagccccccaccccgcctgccgccccctgtccaggttccctccccgccacagtgaaataaagcatcccmccctgcagtttccacggactcctgagctttcttctcccgctgtctggggctgggccagagacagcctgtgatgcatctggagtcacacagcatggtggat

SEQ ID NO: 148438 - DNA, 201 bp, Homo sapiens
ccgctggaggacatgggacaacccccggcggaggaggctgagcagcctggggccctggcccgagagttccttgctgccatggagcccgagcccgccccagycccggccccagaagagtggctggacattctgggtaaggagcaaaggtggatcagggtgcccttggccctggccctctcgtcccctgagcctcatttcccc

SEQ ID NO: 148439 - DNA, 201 bp, Homo sapiens
tgcctgctcccacccaactagcaggagcccatacatccccccgcacgcggccctgtgcctggaggtgaccctgaagacggctgtggacgggcctgacctgsagatgctcacggggcaggagcgcgtggccctggccaaccggaagcgggagtgcggcaacgcccactaccagcgggcggacttcgtcctggccgccaactc

SEQ ID NO: 148440 - DNA, 201 bp, Homo sapiens; identical to SEQ ID NO: 27450

SEQ ID NO: 148441 - DNA, 201 bp, Homo sapiens; identical to SEQ ID NO: 27481

SEQ ID NO: 148442 - DNA, 201 bp, Homo sapiens; identical to SEQ ID NO: 27482

SEQ ID NO: 148443 - DNA, 201 bp, Homo sapiens
aacttcatctcaaaaaaaaaaaaaaaaaaaaaaagctgggcacagtgactcacgccaataatcttagcactttaggaggtcaaggtgggcggatcacttgmggtcaggggatcgagaccaacctggccaacatggtgaaaccccatctctactaaaaatacaaaaattagctgggcatggtggtgtgtgcctgtaatccca

SEQ ID NO: 148444 - DNA, 201 bp, Homo sapiens
aatagtacctgtttctaccagtcagatgggaaaaattcatattcatggggcacgaggtagaacagtctgtcaggtctcgattcagtattgggaataactamacctagactaaatgcagctctctgattctctaataaatcttaaaagcaacacaccaaaagatcaaactgtctccaagttaactgtatccctgaaaaaagc

SEQ ID NO: 148445 - DNA, 201 bp, Homo sapiens
ctgcagtgagccgagattgtgccactgcactctagcctgggtgacagagcaagactctgtctcaaaaaaaaaaagaaaaagagagaccagaacccaagatrgctgcgctgttgctgagacacgttggtcgtcattgcctccgagcccactttagccctcagctctgtatcagaaattggtctcttcccatggcgatgtcca

SEQ ID NO: 148446 - DNA, 201 bp, Homo sapiens
tgaccctctactatgaagcactgtgcggtggctgccgagccttcctgatccgggagctcttcccaacatggctgttggtcatggagatcctcaatgtcacsctggtgccctacggaaacgcacaggtgtgtgggcgctggggaaactgaggcacgtgggcaggggagcaggggacccagcctaccagcaggctctcaccct

SEQ ID NO: 148447 - DNA, 201 bp, Homo sapiens
ctagccctgaccactgctgtctgtgcagcccaggaaaacaactacccttctttattttatttatttttttattttttcttgagacagagtctcgctctgtygcccaggctggaatgcagtggcgcaatcccagctcactgcaacctccacctccagggttcaagtgattctccagcctcagcctcctgagtagctgggatt

SEQ ID NO: 148448 - DNA, 201 bp, Homo sapiens
catgttggtcaggcttgtcttgaactcctgaccttgtgatccgcctgccttggcctcccaaagtgctgggattacaggcgtgagccaccgcacccagccctttttttttttttttttttttttttttttttgagacagggttttgctctgtcgcccaggctggagtgcagtggtgcaatcttggctgactgcaaccactgt

SEQ ID NO: 148449 - DNA, 201 bp, Homo sapiens
atgttggtcaggcttgtcttgaactcctgaccttgtgatccgcctgccttggcctcccaaagtgctgggattacaggcgtgagccaccgcacccagccctttttttttttttttttttttttttttttttgagacagggttttgctctgtcgcccaggctggagtgcagtggtgcaatcttggctgactgcaaccactgtc

SEQ ID NO: 148450 - DNA, 201 bp, Homo sapiens
agccctttctgggctggaaccagggtgcatgggttggggtagctgctgggaatatgcgacccctgtcttgctttgtgcagaaacccttggaagatcagacycagctccttacccttgtctgccagttgtaccaggtaagctgggaggggagcagtgggattcaggtggtgggggtagggtctccttccaggaccccaactc

SEQ ID NO: 148451 - DNA, 201 bp, Homo sapiens
aggcccaggcaggcagatcacctaaggtcagaagtttgagaccagcctggcaaacatggcaaaaccctgtctctactaaaaaatacaaaagttggtcaggygcggtggctcacgcctgtaatctcagcactttgggaggccgaggcgggtggatcacaaggtcaggagatcaagtccatcctggctaacacggtgaaaccc

SEQ ID NO: 148452 - DNA, 201 bp, Homo sapiens
ccactgcactccagcctgggcaacaagagcaaaacttgatagctttgcatagggaaagagggcattgatgctggggttttgaaaggtgagtaggagtccakcaggcaaaaaaagtatgtattaattcgaagtattaaacatccctagccacccccattgggaaagatgtgccactgatttgcgaggcgggaggcgggggcc

SEQ ID NO: 148453 - DNA, 201 bp, Homo sapiens
taacggggaggaagctgaggcaaccccctgctccccacccacccagtgcctgcagctctacgccccagggctgtcgccagacactatcatggagtgtgcartgggggaccgcggcatgcagctcatgcacgccaacgcccagcggacagatgctctccagccaccacacgagtatgtgccctgggtcaccgtcaatggggt

SEQ ID NO: 148454 - DNA, 201 bp, Homo sapiens; identical to SEQ ID NO: 27486

SEQ ID NO: 148455 - DNA, 201 bp, Homo sapiens; identical to SEQ ID NO: 27487

SEQ ID NO: 148456 - DNA, 201 bp, Homo sapiens
ccgcagcggtggggattcccgcgtccctcccagagctctcattgaatgcctgccgcgtgccaggccttgggaaggagtccctggtggggtcatccgggacrggggagcacgcggccctggaacggggaaagcttggcggggaggccagccttccgactccccctctcgtctgcccccacagagtggacggcgacaccaagc

SEQ ID NO: 148457 - DNA, 201 bp, Homo sapiens
cagggctgtcgccagacactatcatggagtgtgcaatgggggaccgcggcatgcagctcatgcacgccaacgcccagcggacagatgctctccagccaccrcacgagtatgtgccctgggtcaccgtcaatggggtaagaatctttttagccctcagcttgacactcatagtcccatggagtcagggatggacaagacaga

SEQ ID NO: 148458 - DNA, 201 bp, Homo sapiens
ccacagacaggcaatctatacctgcgggggcccctgaagaagtccaatgcaccgcttgtcaatgtgaccctctactatgaagcactgtgcggtggctgccragccttcctgatccgggagctcttcccaacatggctgttggtcatggagatcctcaatgtcacgctggtgccctacggaaacgcacaggtgtgtgggcgc

SEQ ID NO: 148459 - DNA, 201 bp, Homo sapiens
atcgggaggcgggcccgggttaggggcgggaccgccgcctggttaaaggcgcttatttcccaggcagccgctgcagtcgccacacctttgcccctgctgckatgaccctgtcgccacttctgctgttcctgccaccgctgctgctgctgctggacgtccccacggcggcggtgcaggcgtcccctctgcaagcgttagact

SEQ ID NO: 148460 - DNA, 201 bp, Homo sapiens
tgtattgagcacctgctgtttgtgggctttgtcgcatcactgtgaagccaactgtaccctcttctcagtgacgaaacaggcttggctcagggctggtgggygggaccgttgagataacggggaggaagctgaggcaaccccctgctccccacccacccagtgcctgcagctctacgccccagggctgtcgccagacactat

SEQ ID NO: 148461 - DNA, 201 bp, Homo sapiens
ttccccgggggattgtgaagaatgactcccagagaagtgactcattggctccaatcatttattcattcatcaaacatccgggtcacccaagaggcctcacytagtgacaccctagtcctgcagggttagatcagggctgagagagtggcaaggagagggcactgaggagacactgtggaaggaggatgaagggtgttcctg

SEQ ID NO: 148462 - DNA, 201 bp, Homo sapiens
ccagatacacaaaattccaccccatgatcaagaatcctgctccactaagaatggtgctaaagtaaaactagtttaataagcccttctggatggtgtaattmatttgataagtcagccattcccccttccccaggcctggcaaaacccgctctctactaaaaatacaaaaattagccaggcgcggtggcgggcgcctgtaat

SEQ ID NO: 148463 - DNA, 201 bp, Homo sapiens
tcggcacctgctacttaccaactggaaaattttatgcatcccatgaagcccagatacacaaaattccaccccatgatcaagaatcctgctccactaagaayggtgctaaagtaaaactagtttaataagcccttctggatggtgtaattaatttgataagtcagccattcccccttccccaggcctggcaaaacccgctct

SEQ ID NO: 148464 - DNA, 201 bp, Homo sapiens; identical to SEQ ID NO: 27484

SEQ ID NO: 148465 - DNA, 201 bp, Homo sapiens
tagccttcctgaccattgtctgcatggaagagtttgaggacatggagagaagtctgccactagtgagtgacgcccctcactccacccaaggagggggacawgggtggtaaccttccctgcatccaggcagacccaaattcaagtcctagccctgaccactgctgtctgtgcagcccaggaaaacaactacccttctttatt

SEQ ID NO: 148466 - DNA, 201 bp, Homo sapiens
tgggaggcagaggttgcggttagccgaaatcacaccattgcacttgagcctgggcaacaagagcaaaactcaatctcaaaaaaaaaaaaaaatagccaggyctggtggctcacacctgtaatcctagctactcgggaggctgaggcatgagaatcacttgaacctgggaggctgcagtgagctgagatcatgccactgcac

SEQ ID NO: 148467 - DNA, 201 bp, Homo sapiens
cctgagtcgcgtaagccaccacgcgtggcctcatggcgtctttgacttggactcctgtttaccaccctccccatcacacccagaatccacacccccactgygacgtcattgtcccttcagccctccccaaccctggggcctcactgtccttgtctgttttgtacagccacctctcaaggcccaacaaggctgaacctgggg

SEQ ID NO: 148468 - DNA, 201 bp, Homo sapiens
gtcagggcaggaaggaacttcactctgctgcttccgagaacctcggccgtgacattcggggccgggcgggacccgccccacagactccaacttcccctccwaaccccgaagtgaaacccgccaccgggttacccccacaagggggccgctgcgagaagttcacccacccccgaaaaaataattaaactcgcaggccaggca

SEQ ID NO: 148469 - DNA, 201 bp, Homo sapiens
ttcgagaccattctggcctacatggagaaaccctgtctctactaaaaatacaaaaattagctgggtgtggtggcatgtgcctataatcccagctactcagraggctgaggcaggacaattgcttgaaccagggagtcgggtgttgcagtgagccgagatcgtgccgcagcacaccagcctagcgacagtgagactccatct

SEQ ID NO: 148470 - DNA, 201 bp, Homo sapiens
cagcctagcgacagtgagactccatctcaaaaaaaaaaaaaaaagtctcaaagtcaagattccacctggcaagttctggaaggcgtgcaagatgaattgcstatcacagccccctttctacaagactaccaagtggggttgagagaagtggggaactgcccagggctacacctgcctcccacgccttcctaatccacagac

SEQ ID NO: 148471 - DNA, 201 bp, Homo sapiens
cagctccttacccttgtctgccagttgtaccaggtaagctgggaggggagcagtgggattcaggtggtgggggtagggtctccttccaggaccccaactcrtggccttcacctccagggcaagaagccggatgtctgcccttcctcaaccagctccctcaggagtgtttgcttcaagtgatggccggtgagctgcggagag

SEQ ID NO: 148472 - DNA, 201 bp, Homo sapiens
cagccctttctgggctggaaccagggtgcatgggttggggtagctgctgggaatatgcgacccctgtcttgctttgtgcagaaacccttggaagatcagasccagctccttacccttgtctgccagttgtaccaggtaagctgggaggggagcagtgggattcaggtggtgggggtagggtctccttccaggaccccaact

SEQ ID NO: 148473 - DNA, 201 bp, Homo sapiens
agtacgcactcatggaggacgaggacgatctcccgcaccacgaggaacgcacttggtacgtgggcaagatcaaccgcacgcaggcagaggagatgctgagyggcaagcgggatggcaccttcctcatccgcgagagcagccagcggggctgctacgcctgctccgtggtgtgagtggaccgcagcggtggggattcccgcg

SEQ ID NO: 148474 - DNA, 201 bp, Homo sapiens
agattgtgcctctcactgcataggtgctcacaggagaaaggttgccatctttatgatcccagctatgctgagctgggggtggaagagaatatcccgtgtgrtctctaaaaacactcaaccactggctgtgtgtccttggcaaaatagccttccctctctgatcagccatttatttgttaccagctggagtcagtagcacct

SEQ ID NO: 148475 - DNA, 201 bp, Homo sapiens
agggtaccctaggccctcttcatgccctctcctgccccctctccaaaccccaggcctgcgtgttggatgaacttgacatggagctagccttcctgaccatkgtctgcatggaagagtttgaggacatggagagaagtctgccactagtgagtgacgcccctcactccacccaaggagggggacatgggtggtaaccttccc

SEQ ID NO: 148476 - DNA, 201 bp, Homo sapiens
cagcacctggcaggggtgggggtgggacactcagaggaaggagtggaggagggagagacgctggcccgggacccgaggggcgtgggcatcgggaggcgggyccgggttaggggcgggaccgccgcctggttaaaggcgcttatttcccaggcagccgctgcagtcgccacacctttgcccctgctgcgatgaccctgtcgc

SEQ ID NO: 148477 - DNA, 201 bp, Homo sapiens
tagaaggtctaggggtgcgtggagacaccaccattcctctcagcctgtgtctgtctcaaaggccccacctcacctcccctaaaggtagtcttgcgccaggrctcacgtgcctgggcagggctgattgccaaggggcccaatggcctcgtgactggggacccagcacctggcaggggtgggggtgggacactcagaggaagg

SEQ ID NO: 148478 - DNA, 201 bp, Homo sapiens
gtcacccctgttaggtcacaggcccactctgagagtgggtctcgggcctcaagtcccctagccgcccctagaaggtctaggggtgcgtggagacaccaccrttcctctcagcctgtgtctgtctcaaaggccccacctcacctcccctaaaggtagtcttgcgccagggctcacgtgcctgggcagggctgattgccaagg

SEQ ID NO: 148479 - DNA, 201 bp, Homo sapiens
ccggctgcctgcctttttttctgatccagaccctcggcacctgctacttaccaactggaaaattttatgcatcccatgaagcccagatacacaaaattccmccccatgatcaagaatcctgctccactaagaatggtgctaaagtaaaactagtttaataagcccttctggatggtgtaattaatttgataagtcagccat

SEQ ID NO: 148480 - DNA, 201 bp, Homo sapiens
ggttttcagcaaacagcatttgaaacaaaagcacagctgctctgtttgacaccaaactgtggctccagattccagtagaagccaaatgctttttcttttaacagctgggtgcctgtaatcccagttacttgggaggctgaggcaggagaattgcttgaacccaggaggcggaggttgcagtgagccgagcttgcaccattg

SEQ ID NO: 148481 - DNA, 201 bp, Homo sapiens
cagcaagaaaagggctctgtgagcttaaatggagaatcaggccaaggcacagctgagggacacaagtcatctgcccaactagagctgtgggacccctcaarggaggcctcaagtgccagacttggggacttgccatttgtcctatagggcagtgcacattagaccacctgagaagcatgctgaaaatgcagattcatgctc

SEQ ID NO: 148482 - DNA, 201 bp, Homo sapiens
gccatgcctgtcttgtacatttcagtatctccaacacctaatacagtgcctgatagagattgctttttttttttttttttttttttttgagatggagtctmacgctgtctcccaggctggagtgcagtggcacgatcttggctcactgcagcctccgcctcccgggttcaagcaattctcccgtctcagcctcctgagtag

SEQ ID NO: 148483 - DNA, 201 bp, Homo sapiens
tctctgaagacccggcacaggctattcctttctgcgacgagcccattgctatggaaaccaaagcgttaggccagcggggattgaggctgcgggatcatgaygggtctctctcccgaagaaccttgcctaaggcttccccaagcggctacttcctgagcgaacccgcccacccgcctgaaggagagaggtaaaaccctgggg

SEQ ID NO: 148484 - DNA, 201 bp, Homo sapiens
aagctaaacgttctttagatcttttgtgatttcttcaggtggtctttgcgactccctaggctccgacctggaagaaatcttttttacacttccctttcacrgagccctgcattttaacttccctatcagaagcgagaaaaatagttatcattttgagagggcttactctatgccaagccctgagaaaactctttacgtgga

SEQ ID NO: 148485 - DNA, 201 bp, Homo sapiens; identical to SEQ ID NO: 27523

SEQ ID NO: 148486 - DNA, 201 bp, Homo sapiens
gggatcccctggaattggccctctgggcacctgccctctaaacatcctctccctctctgcagttttccatggacacagcctagcagaaagacgcagccttsgtgcttcgctgactgctgaccactgacccaccgccttgatgacagcaccctcgtgtgccttcccagttcagttccggcagccctcagtcagcggcctctc

SEQ ID NO: 148487 - DNA, 201 bp, Homo sapiens
gtccgagagtctaatgaatgctctgggcacccaggccgcacctgaggagcaccgacgactgcacggtctgcggcgcgggaagcagatctgcggctgaaccyctaccccaattacttagcggcgactgagcctatcgagcaggtgaagggaaggggtctgcctctccctggggtgtgtttcacagctctgctgcaggcagca

SEQ ID NO: 148488 - DNA, 201 bp, Homo sapiens
gcatgctgaaaatgcagattcatgctcttcaccccgagagtctgactgtgggtttggagagggacctgggtatctgtactttaaatgagtttgctgggtarttctgctgtgatggtcagaggactgccttggggaatgctataagcctatccatccatttcccagggatcccctggaattggccctctgggcacctgccct

SEQ ID NO: 148489 - DNA, 201 bp, Homo sapiens
ggtctttctctttagtagcctcagaaccacccccatccccacccagcccctccctggaattctggagacacgctgccagagaactcattctttccagaaarcctctcagaaggcagagtcatagctgttgggagtcatttcttcattcaacaaatatttatcaagcacctacttgtggggacacagcgcttggcactagtt

SEQ ID NO: 148490 - DNA, 201 bp, Homo sapiens
agaaccttgcctaaggcttccccaagcggctacttcctgagcgaacccgcccacccgcctgaaggagagaggtaaaaccctgggggtcctgacactaagcrggcgaagaagcctattccaatgccagctcccctaggaaacctacccggcccacccctagaagtgatgcttcgctctcgttaactcttggactttgttcca

SEQ ID NO: 148491 - DNA, 201 bp, Homo sapiens
ggaggccggttggaagccatggtcgttgggcgccaggaggccggttgagagccgtgctcgttggacgcgcgcagacctggagttagtccctgggcggaacytggagccccgcgcggcgcgttgcctgggagacgcataagggggcggggccggggagggagtgtcgcacatgcgcacagagcccgggcggctacggaagcg

SEQ ID NO: 148492 - DNA, 201 bp, Homo sapiens
ttgaagctacagtgagcctcatgctactggcctccagcctgggcaagagtgagaccgtgtctcaaacagacgagacgggatgggacgggatgggacgggaygagacgagacacaatataaagacaatgaagacagaatggaagacatacctggtggtagtacagcccctggcttctctcccctaaaacattggcgactgtg

SEQ ID NO: 148493 - DNA, 201 bp, Homo sapiens; identical to SEQ ID NO: 27527

SEQ ID NO: 148494 - DNA, 201 bp, Homo sapiens
tggcctaagtgatcggcctgccttggcctaccccagtgttggtattacaggcataagccaccgcgcccagccctccctattcactttgctactccccttgrcttatctgcatgctgatggccaccctatctttatattccaggacaccatggatacccagggaccagtctcccagccttttcagcagcctgagaaacctgg

SEQ ID NO: 148495 - DNA, 201 bp, Homo sapiens; identical to SEQ ID NO: 27530

SEQ ID NO: 148496 - DNA, 201 bp, Homo sapiens
taatgaagaatgggcaagcagaaagaaaagacacaggtaatcactttcttattaggtttggggaatatcgtggaatagcttgattttaaagtctgagggakgccagcatggaggctcatgcctgtaatcccagcactttgggaggctgacatggtcggatcacttgaggtcaaccagcctggccaacatggcgaaaccacg

SEQ ID NO: 148497 - DNA, 201 bp, Homo sapiens
ggcaatggagggagaaaatcagggcggcaggaatcctggacccacagtgacgggatcagggaaggagtttggaggtgacctggtctccttctagtacttgrgaagccaggtacctggggggtagggaagaaaagttgggggtctatggagtaaagagttcttgaaggactcagcggagggtcagactgggcccctttttca

SEQ ID NO: 148498 - DNA, 201 bp, Homo sapiens
tgtgaaaattcgaggctcccttctaaggagccactctaaggccgcgccagggctttagtgagcctatctactcgtgggcttcccctactcaaaacaccgtgggtgtgtgtgtgtgtgtgtgtgtgtgtgtgtgtgtgtgtgtgttgaaatctaaagtacatatctttgcattcaagacatcacaggacccctactcaaaac

SEQ ID NO: 148499 - DNA, 201 bp, Homo sapiens
actccaggtgggaccttcccatgtattcattccttcgaggtggattgatactgagacagagatgagtgttattcattgtgtttatgttttcaatccacttycctggaactgggccgggcacacagtggttattccacaagtgcttgctgaatgagtagtaaatgagtgggtcagctcctgaccttgtcccaatgtgtttag

SEQ ID NO: 148500 - DNA, 201 bp, Homo sapiens; identical to SEQ ID NO: 27531

SEQ ID NO: 148501 - DNA, 201 bp, Homo sapiens
aactcctgagtctgggggaggaggggctgggagcctggactcctgggtctgagggaggaggagctgggggtctggacccctgggtcctggaggaggagggyctgggggcctgagcccctgggtctgaaggaggagggggtgggggcctggacccctgggtctgaggggggagggggtgagggcctggacccctgggtctga

SEQ ID NO: 148502 - DNA, 201 bp, Homo sapiens; identical to SEQ ID NO: 27528

SEQ ID NO: 148503 - DNA, 201 bp, Homo sapiens; identical to SEQ ID NO: 27529

SEQ ID NO: 148504 - DNA, 201 bp, Homo sapiens
actgaggaaggagagtttaatgttgtgggaaggcagcaggatgcttagggtgcgggctccagcaggggagcaccttggccctggtcttgggccagcagacscagaagcagggagtgcagagcccggcaaacaggtgtgtagcccaggcggctcagatgcaggtaatcatacatgtcatgatggctgatggtgccatctgag

SEQ ID NO: 148505 - DNA, 201 bp, Homo sapiens
tggtgtgatctcggctcactgcatcctccacttcccaggttcaagcaattctcctgccccagcctgctgagtcgctgaatatacagtcgtgagccaatgcrtgtggcctaatttttgttcttttacagggtcttgccgtctccctcaggcgggcgtgatcatggctcactgctgcctccacctcctaggcttaagtgatcc

SEQ ID NO: 148506 - DNA, 201 bp, Homo sapiens
ggctccagcaggggagcaccttggccctggtcttgggccagcagacgcagaagcagggagtgcagagcccggcaaacaggtgtgtagcccaggcggctcaratgcaggtaatcatacatgtcatgatggctgatggtgccatctgagtgcacaaagccagggtcggcatctaggaagtgggcccgagggtggccagccagt

SEQ ID NO: 148507 - DNA, 201 bp, Homo sapiens
ggggtgggggcctgggcccctgggtccttggggagcagggttgggggctggactccagattctcctagcaggtgagtcggggtagaaggtctggagtcctragggaggaggcgggattcagactgcctggatggtagtgctagagaacagtgatgccccagagctgctttctatcctttcttatctgcccatcctcccctc

SEQ ID NO: 148508 - DNA, 201 bp, Homo sapiens
gtgtgtgtgtgtgtgtgtgtgtgtgtgtgtgtgtgtgttgaaatctaaagtacatatctttgcattcaagacatcacaggacccctactcaaaacaccgtrtgtgtgtgcgcgcgcgtggcataacatataaactacatatctttgcattcaagacaccataggacctgcttggagggtagaagaaggtgcagaaagagaa

SEQ ID NO: 148509 - DNA, 201 bp, Homo sapiens
gaaaattcgaggctcccttctaaggagccactctaaggccgcgccagggctttagtgagcctatctactcgtgggcttcccctactcaaaacaccgtgggkgtgtgtgtgtgtgtgtgtgtgtgtgtgtgtgtgtgtgtgttgaaatctaaagtacatatctttgcattcaagacatcacaggacccctactcaaaacacc

SEQ ID NO: 148510 - DNA, 201 bp, Homo sapiens
ccaacccccaacttgcccagggccccccttaggcctccctaccccccacagggtgatggattgcagctggagtatgagatggtcctcaccaatggcaagtycttctggacacgacacttctccgctgatgagtttggtgagcacgtggggacctagaaaccaggctctctgtgggacaccagagctgggtgcccactgagg

SEQ ID NO: 148511 - DNA, 201 bp, Homo sapiens
ctgctaaaagaggtgaaactgctttatatcctgggaagtgttcaatatctatccagcagacaagagtacagagacctggcagggcaggtggccctggagtrcagcctcctcttccctcctcttcccaaccctggccagttgctgatcccaaagataacaggggaggaagtttcagctgagaagatggagcatgcagtggaa

SEQ ID NO: 148512 - DNA, 201 bp, Homo sapiens
tgttggtgatgataaaggagcccttgtgctgcggaggttcccacaccagccatcaatcagcaaggcctaggacatcccctccgaagcatgtctcccctccrtccccttccctctgtccccatggcctccaccatccccagacaccacaaccttcccgatagttgctggcctccccactatccattctgccccctcgggctc

SEQ ID NO: 148513 - DNA, 201 bp, Homo sapiens
ttgctgaagaagagcaggtgaccctaggcgcagcctgtcccgcagggcctggctggcttagcaatctgagccaccttccttaaaggaaatgttaaaaaaawaaaacaaaaaaacaaaaaaacaactgttctttgcctaataaagaactggaacaaccatcacagctgctgagcagcagacagttggcatatgcatagggtc

SEQ ID NO: 148514 - DNA, 201 bp, Homo sapiens
gagcaggctgggagccagcagttctgatcccagtccggttctgcaactgccttgccctgtgacctggggtgagccgccatgtccctccgggcctcagtccyctcttcttgagaaaatagagagggaggcgtttgtgtctctgggagtctcagttctctctcccctggagtcccacagcctcagaccttccctgctcctccc

SEQ ID NO: 148515 - DNA, 201 bp, Homo sapiens
ccggttctgcaactgccttgccctgtgacctggggtgagccgccatgtccctccgggcctcagtcctctcttcttgagaaaatagagagggaggcgtttgkgtctctgggagtctcagttctctctcccctggagtcccacagcctcagaccttccctgctcctcccaggtcaccaccacagcaaagaatacattgacatc

SEQ ID NO: 148516 - DNA, 201 bp, Homo sapiens
gggaaacaagaggttccagaatgcagggtcctgggcccagatcggagagggcacagggccagggactctggccagacataggcccaggtctgtggctggcyagctgcagctgtggggcctggcatgtgtctcaacatggccctggagctctacatggacctgctgtcagcaccctgccgtgccgtctacatcttctcgaag

SEQ ID NO: 148517 - DNA, 201 bp, Homo sapiens
ggttctgcaactgccttgccctgtgacctggggtgagccgccatgtccctccgggcctcagtcctctcttcttgagaaaatagagagggaggcgtttgtgkctctgggagtctcagttctctctcccctggagtcccacagcctcagaccttccctgctcctcccaggtcaccaccacagcaaagaatacattgacatcaa

SEQ ID NO: 148518 - DNA, 201 bp, Homo sapiens
agcgatgggattgcggatgggacccaggccctcagggcttcaggtgattcaaaggctgtgttttcagatccagctttgggggtgggcactggaggcctccrgcttctgggtaaaagggtcgtcctggtcctgggacacaggtaggaggcacgggagtcaccaaacctagggtggagcaggctgggagccagcagttctgat

SEQ ID NO: 148519 - DNA, 201 bp, Homo sapiens
cttctgggtaaaagggtcgtcctggtcctgggacacaggtaggaggcacgggagtcaccaaacctagggtggagcaggctgggagccagcagttctgatcscagtccggttctgcaactgccttgccctgtgacctggggtgagccgccatgtccctccgggcctcagtcctctcttcttgagaaaatagagagggaggcg

SEQ ID NO: 148520 - DNA, 201 bp, Homo sapiens
tatttctgagttgctgaagaagagcaggtgaccctaggcgcagcctgtcccgcagggcctggctggcttagcaatctgagccaccttccttaaaggaaatrttaaaaaaaaaaaacaaaaaaacaaaaaaacaactgttctttgcctaataaagaactggaacaaccatcacagctgctgagcagcagacagttggcatat

SEQ ID NO: 148521 - DNA, 201 bp, Homo sapiens
ggcacgggagtcaccaaacctagggtggagcaggctgggagccagcagttctgatcccagtccggttctgcaactgccttgccctgtgacctggggtgagmcgccatgtccctccgggcctcagtcctctcttcttgagaaaatagagagggaggcgtttgtgtctctgggagtctcagttctctctcccctggagtccca

SEQ ID NO: 148522 - DNA, 201 bp, Homo sapiens
gggtcagaggggtgggctcccactccatcccgagcacagagggactccaaaactcagcctgcaaaagcagaagcctctagaacacagaggaagagacaggraagctgtggaaatgaacgggctgcgagtggagcccccagaaatgtttccaactggaggcggctggtccaggaagagtttcagttcctgcccccacctcag

SEQ ID NO: 148523 - DNA, 201 bp, Homo sapiens; identical to SEQ ID NO: 27535

SEQ ID NO: 148524 - DNA, 201 bp, Homo sapiens
acgtatatggagtacatacgtatggaatacgtatatggagtacatacgtatggaatacgtatatggaatgagtatatatggaatatgtatatggaatgagyatatatggaatatgtatatggaatgagcatatatggaatatatatatggaatgaatatatatggaatatgtatatgtggaatactactcagtcatgaaaa

SEQ ID NO: 148525 - DNA, 201 bp, Homo sapiens
aatgatagtccccacgccacagatgaacaggctttttgaggagaagggggaatgaacagcagctgggactccctgggctcccaccaggcaccctggcttcsttgtgggattctaggaccttgtgaactcagcacctgcccaccaggttggcaaagggggcagaagtgcacagtccgtctacacccatcctccccagtgttc

SEQ ID NO: 148526 - DNA, 201 bp, Homo sapiens
acctgagttctctccctcatccacatatacacacctgggataaggggtttccctggaagaaggcaggattcatgcgaggtcgcaggctggagaagtgggargtgcctgggccaggagccctctcagcatggttcagaaggcttggagcaagaagaccagtgactgaggactctgagggattctggatcctccatccccacc

SEQ ID NO: 148527 - DNA, 201 bp, Homo sapiens
cacacacccattcttgggcttcccaaagatcttgggtgcaaaccaaactcttagtaagccagcgaaactgcagggtagactgcccgccaggtctcccatcytagcccctgagcttgatcacagtgggaggctaaacatggaggaaaaaacctgagttctctccctcatccacatatacacacctgggataaggggtttccc

SEQ ID NO: 148528 - DNA, 201 bp, Homo sapiens
ctgacttaagaagaaagataaaattttaataggcctgtaacaaataaagagattaaaatattaattatttttaaaaattccacaaagaaaagcccaggacsagatggcttccctggtgaattcaaccaaaagcttgaagaactaacacaaagccttcacaaactcttccaaaaaaataaaacaggaagaaatatttttcaa

SEQ ID NO: 148529 - DNA, 201 bp, Homo sapiens
agggttcagccatatgcttcgtccccaccccttacatttcacccacacacacccattcttgggcttcccaaagatcttgggtgcaaaccaaactcttagtragccagcgaaactgcagggtagactgcccgccaggtctcccatcctagcccctgagcttgatcacagtgggaggctaaacatggaggaaaaaacctgagt

SEQ ID NO: 148530 - DNA, 201 bp, Homo sapiens
tgtctctactttgaattctatgcctgtgacagacatcactaatcaatcacaggacttatgcctgctgagctccccaaatccttgtgaacacatggttcccrgcaacttccaccaatcagaactgctaaaagaggtgaaactgctttatatcctgggaagtgttcaatatctatccagcagacaagagtacagagacctggc

SEQ ID NO: 148531 - DNA, 201 bp, Homo sapiens
agacgatggaccaggtagcagaacatgatatgcctacttgtccctatctccttgtccacacataaggcttggaaggcagccatgttgtatatcacgtgatygccaaccaatgagctgattggcttcttcaacaagagcccaggtagagattggtgtctagaggagcccatcagtttctagagaatcaggcctttggcagtg

SEQ ID NO: 148532 - DNA, 201 bp, Homo sapiens
cagaccagcaccaggaaaaatcattctggcctgccccaagggttcagccatatgcttcgtccccaccccttacatttcacccacacacacccattcttggscttcccaaagatcttgggtgcaaaccaaactcttagtaagccagcgaaactgcagggtagactgcccgccaggtctcccatcctagcccctgagcttgat

SEQ ID NO: 148533 - DNA, 201 bp, Homo sapiens
ggcagaccagcaccaggaaaaatcattctggcctgccccaagggttcagccatatgcttcgtccccaccccttacatttcacccacacacacccattcttkggcttcccaaagatcttgggtgcaaaccaaactcttagtaagccagcgaaactgcagggtagactgcccgccaggtctcccatcctagcccctgagcttg

SEQ ID NO: 148534 - DNA, 201 bp, Homo sapiens
gcctggactcaatcggggcaacaggaagcacagaatgttatgaatcaggaaggatcacagttctccacacttgacaaagattcttcggtgtgggaggaccyggagggtgagcctgggatagagaagaacactgcatttcctgctcaatccaccagcatcccagatacctcctcctcttgctggactctccaggaaatgttc

SEQ ID NO: 148535 - DNA, 201 bp, Homo sapiens
ctctcctgccccacttctccagacagcctgcagatgctgcacagctggagcggctgttggggaggctgacgccagccctgcagcacctggatgggggggtsctggtggccaggcccttcctggcaatggagcagatctccctggaagacttggtgctgacggaggtgatgcaggtgaagctttcctacccacctgccctcg

SEQ ID NO: 148536 - DNA, 201 bp, Homo sapiens
caatggggccatcacttgaggataggctggtgaggcgggaaaggcaggcagagctgccatgggggctgcgggaaccaggcctgggggcctggactcaatcsgggcaacaggaagcacagaatgttatgaatcaggaaggatcacagttctccacacttgacaaagattcttcggtgtgggaggacccggagggtgagcctg

SEQ ID NO: 148537 - DNA, 201 bp, Homo sapiens
agcccagtctctcctgccccacttctccagacagcctgcagatgctgcacagctggagcggctgttggggaggctgacgccagccctgcagcacctggatkggggggtcctggtggccaggcccttcctggcaatggagcagatctccctggaagacttggtgctgacggaggtgatgcaggtgaagctttcctacccacc

SEQ ID NO: 148538 - DNA, 201 bp, Homo sapiens
gactcctctgtgaccaatggggccatcacttgaggataggctggtgaggcgggaaaggcaggcagagctgccatgggggctgcgggaaccaggcctggggscctggactcaatcggggcaacaggaagcacagaatgttatgaatcaggaaggatcacagttctccacacttgacaaagattcttcggtgtgggaggaccc

SEQ ID NO: 148539 - DNA, 201 bp, Homo sapiens
ggttaagttgctcctctcctcacagcccagtctctcctgccccacttctccagacagcctgcagatgctgcacagctggagcggctgttggggaggctgaygccagccctgcagcacctggatgggggggtcctggtggccaggcccttcctggcaatggagcagatctccctggaagacttggtgctgacggaggtgatg

SEQ ID NO: 148540 - DNA, 201 bp, Homo sapiens
gcagccgggaagggatggagaggaggcccaagaggcttccaagagtctgggttaagttgctcctctcctcacagcccagtctctcctgccccacttctccrgacagcctgcagatgctgcacagctggagcggctgttggggaggctgacgccagccctgcagcacctggatgggggggtcctggtggccaggcccttcct

SEQ ID NO: 148541 - DNA, 201 bp, Homo sapiens
cagagccccagaggacatcactaatgaatggcagccgggaagggatggagaggaggcccaagaggcttccaagagtctgggttaagttgctcctctcctcmcagcccagtctctcctgccccacttctccagacagcctgcagatgctgcacagctggagcggctgttggggaggctgacgccagccctgcagcacctgga

SEQ ID NO: 148542 - DNA, 201 bp, Homo sapiens
gctgatgtgactcacccaggacagcattcgaggcatttcattctgaactagagaatctcagcgtcaaaaggcccacagaaggccgggtacggtggctcacractgtaatcccagtactttgggaggccgaggcgggcggatcacttgaggtcaggagttcaagacctaccttgccaacattgtgaaacaccatctctacta

SEQ ID NO: 148543 - DNA, 201 bp, Homo sapiens
catttcattctgaactagagaatctcagcgtcaaaaggcccacagaaggccgggtacggtggctcacaactgtaatcccagtactttgggaggccgaggcrggcggatcacttgaggtcaggagttcaagacctaccttgccaacattgtgaaacaccatctctactaaaaatacaaaattattagctgggtgtggtgatg

SEQ ID NO: 148544 - DNA, 201 bp, Homo sapiens
catcctagcccctgagcttgatcacagtgggaggctaaacatggaggaaaaaacctgagttctctccctcatccacatatacacacctgggataaggggtytccctggaagaaggcaggattcatgcgaggtcgcaggctggagaagtgggaagtgcctgggccaggagccctctcagcatggttcagaaggcttggagca

SEQ ID NO: 148545 - DNA, 201 bp, Homo sapiens
gaattcccaggcataatcccttctcagacagggtgtctgtgaggtggcgccacgggacacagacacacgtgagagggggagagtagggtcacggctgccayacctttgccacgggcctctgccagcctactcctgggcctccttagaatccttgatgctgtgagaattgcaggcttcctggccttatgacaacacaaaggg

SEQ ID NO: 148546 - DNA, 201 bp, Homo sapiens
gacgatggaccaggtagcagaacatgatatgcctacttgtccctatctccttgtccacacataaggcttggaaggcagccatgttgtatatcacgtgatckccaaccaatgagctgattggcttcttcaacaagagcccaggtagagattggtgtctagaggagcccatcagtttctagagaatcaggcctttggcagtgg

SEQ ID NO: 148547 - DNA, 201 bp, Homo sapiens
cagtcctctcttcttgagaaaatagagagggaggcgtttgtgtctctgggagtctcagttctctctcccctggagtcccacagcctcagaccttccctgcycctcccaggtcaccaccacagcaaagaatacattgacatcaaccccctcaggaagctgcccagcctcaaagatgggaaatttatcttaagtgaaaggtaa

SEQ ID NO: 148548 - DNA, 201 bp, Homo sapiens
taggcgcagcctgtcccgcagggcctggctggcttagcaatctgagccaccttccttaaaggaaatgttaaaaaaaaaaaacaaaaaaacaaaaaaacaactgttctttgcctaataaagaactggaacaaccatcacagctgctgagcagcagacagttggcatatgcatagggtctgatgtgggagtgggtggtggtta

SEQ ID NO: 148549 - DNA, 201 bp, Homo sapiens
catcaaccccctcaggaagctgcccagcctcaaagatgggaaatttatcttaagtgaaaggtaagtcttccctggggcccttgcaccatctgtctctgctyctcctgggaggttcagtgcgagcatttgtctgtttgaccatggaaaatctcacacgtgcactaaaggagagtgaatactaactaatgagggacacgagga

SEQ ID NO: 148550 - DNA, 201 bp, Homo sapiens
ttctctctcccctggagtcccacagcctcagaccttccctgctcctcccaggtcaccaccacagcaaagaatacattgacatcaaccccctcaggaagctkcccagcctcaaagatgggaaatttatcttaagtgaaaggtaagtcttccctggggcccttgcaccatctgtctctgctcctcctgggaggttcagtgcga

SEQ ID NO: 148551 - DNA, 201 bp, Homo sapiens
ctaggcgcagcctgtcccgcagggcctggctggcttagcaatctgagccaccttccttaaaggaaatgttaaaaaaaaaaaacaaaaaaacaaaaaaacaactgttctttgcctaataaagaactggaacaaccatcacagctgctgagcagcagacagttggcatatgcatagggtctgatgtgggagtgggtggtggtt

SEQ ID NO: 148552 - DNA, 201 bp, Homo sapiens
ggcagaggtaggactcctctgtgaccaatggggccatcacttgaggataggctggtgaggcgggaaaggcaggcagagctgccatgggggctgcgggaacsaggcctgggggcctggactcaatcggggcaacaggaagcacagaatgttatgaatcaggaaggatcacagttctccacacttgacaaagattcttcggtg

SEQ ID NO: 148553 - DNA, 201 bp, Homo sapiens
cctaggcgcagcctgtcccgcagggcctggctggcttagcaatctgagccaccttccttaaaggaaatgttaaaaaaaaaaaacaaaaaaacaaaaaaacaactgttctttgcctaataaagaactggaacaaccatcacagctgctgagcagcagacagttggcatatgcatagggtctgatgtgggagtgggtggtggt

SEQ ID NO: 148554 - DNA, 201 bp, Homo sapiens
ctttgcataggtagatgttagggacgtgggcctgaggctgtgggagaggacccaggtggggctggtccccaggctgaccacgtctttgtcttcgtctatcyacagcccatggcagccaactataatgtcttcctcaacagctccaagctagctgagtggcgtatgcaggtggagctgaatattggctctggcctctttagg

SEQ ID NO: 148555 - DNA, 201 bp, Homo sapiens
tgggcagaggtaggactcctctgtgaccaatggggccatcacttgaggataggctggtgaggcgggaaaggcaggcagagctgccatgggggctgcgggarccaggcctgggggcctggactcaatcggggcaacaggaagcacagaatgttatgaatcaggaaggatcacagttctccacacttgacaaagattcttcgg

SEQ ID NO: 148556 - DNA, 201 bp, Homo sapiens
gggggcagaagtgcacagtccgtctacacccatcctccccagtgttcagaaaggctcagggctccactgctcccgagtgagggtcagaggggtgggctccmactccatcccgagcacagagggactccaaaactcagcctgcaaaagcagaagcctctagaacacagaggaagagacagggaagctgtggaaatgaacggg

SEQ ID NO: 148557 - DNA, 201 bp, Homo sapiens
cgggagtcaccaaacctagggtggagcaggctgggagccagcagttctgatcccagtccggttctgcaactgccttgccctgtgacctggggtgagccgcmatgtccctccgggcctcagtcctctcttcttgagaaaatagagagggaggcgtttgtgtctctgggagtctcagttctctctcccctggagtcccacagc

SEQ ID NO: 148558 - DNA, 201 bp, Homo sapiens
agcaggtgaccctaggcgcagcctgtcccgcagggcctggctggcttagcaatctgagccaccttccttaaaggaaatgttaaaaaaaaaaaacaaaaaaacaaaaaaacaactgttctttgcctaataaagaactggaacaaccatcacagctgctgagcagcagacagttggcatatgcatagggtctgatgtgggagt

SEQ ID NO: 148559 - DNA, 201 bp, Homo sapiens
cagtgagccaagattgtgccactgcactccagcctgggcgacagagtgagactccatctcaaaaaacaaaaacaaaaaagagtatggcctatagaaaattrgaagatgacaaataaccagtacatgtgtctctactttgaattctatgcctgtgacagacatcactaatcaatcacaggacttatgcctgctgagctcccc

SEQ ID NO: 148560 - DNA, 201 bp, Homo sapiens
gagcaggtgaccctaggcgcagcctgtcccgcagggcctggctggcttagcaatctgagccaccttccttaaaggaaatgttaaaaaaaaaaaacaaaaamacaaaaaaacaactgttctttgcctaataaagaactggaacaaccatcacagctgctgagcagcagacagttggcatatgcatagggtctgatgtgggag

SEQ ID NO: 148561 - DNA, 201 bp, Homo sapiens
caggagttggagttggcagtgagccaagattgtgccactgcactccagcctgggcgacagagtgagactccatctcaaaaaacaaaaacaaaaaagagtawggcctatagaaaattagaagatgacaaataaccagtacatgtgtctctactttgaattctatgcctgtgacagacatcactaatcaatcacaggacttat

SEQ ID NO: 148562 - DNA, 201 bp, Homo sapiens
gttgctgaagaagagcaggtgaccctaggcgcagcctgtcccgcagggcctggctggcttagcaatctgagccaccttccttaaaggaaatgttaaaaaamaaaaacaaaaaaacaaaaaaacaactgttctttgcctaataaagaactggaacaaccatcacagctgctgagcagcagacagttggcatatgcatagggt

SEQ ID NO: 148563 - DNA, 201 bp, Homo sapiens
agagtacagagacctggcagggcaggtggccctggagtgcagcctcctcttccctcctcttcccaaccctggccagttgctgatcccaaagataacagggraggaagtttcagctgagaagatggagcatgcagtggaagaggtgaagaacagcctgcagctctttgaggagtattttctgcaggataagatgttcatcac

SEQ ID NO: 148564 - DNA, 201 bp, Homo sapiens
aatcccagctactcaggacgctgaggcaggacaattgcttgaacccaggagttggagttggcagtgagccaagattgtgccactgcactccagcctgggcracagagtgagactccatctcaaaaaacaaaaacaaaaaagagtatggcctatagaaaattagaagatgacaaataaccagtacatgtgtctctactttga

SEQ ID NO: 148565 - DNA, 201 bp, Homo sapiens
atttctgagttgctgaagaagagcaggtgaccctaggcgcagcctgtcccgcagggcctggctggcttagcaatctgagccaccttccttaaaggaaatgytaaaaaaaaaaaacaaaaaaacaaaaaaacaactgttctttgcctaataaagaactggaacaaccatcacagctgctgagcagcagacagttggcatatg

SEQ ID NO: 148566 - DNA, 201 bp, Homo sapiens
tctactaaaaatacaaaattattagctgggtgtggtgatgggcacctgtaatcccagctactcaggacgctgaggcaggacaattgcttgaacccaggagktggagttggcagtgagccaagattgtgccactgcactccagcctgggcgacagagtgagactccatctcaaaaaacaaaaacaaaaaagagtatggccta

SEQ ID NO: 148567 - DNA, 201 bp, Homo sapiens
gccatatgcttcgtccccaccccttacatttcacccacacacacccattcttgggcttcccaaagatcttgggtgcaaaccaaactcttagtaagccagcsaaactgcagggtagactgcccgccaggtctcccatcctagcccctgagcttgatcacagtgggaggctaaacatggaggaaaaaacctgagttctctccc

SEQ ID NO: 148568 - DNA, 201 bp, Homo sapiens
agtactttgggaggccgaggcgggcggatcacttgaggtcaggagttcaagacctaccttgccaacattgtgaaacaccatctctactaaaaatacaaaaytattagctgggtgtggtgatgggcacctgtaatcccagctactcaggacgctgaggcaggacaattgcttgaacccaggagttggagttggcagtgagcc

SEQ ID NO: 148569 - DNA, 201 bp, Homo sapiens
ggacccccagctggcccagaagcaggtgcagttgctgcaggagtggctccactgagtgggtacagcccactgcactgcaccctgctgtctgcaataaacayactgcatgctcttcgcttgtctccaggcttactctgtcactggaagtgggatcagtcccatttctgagcctagacctattaaatcacaaagcatagagtg

SEQ ID NO: 148570 - DNA, 201 bp, Homo sapiens
acaggctgggcgcggtggctcatgcctgtaatcccagcactttgagaggctgacacgggaggatcgcttgaggccaggagttcacgactgcagtgaactcygattgtgccactgcactccagcctgggctaggatagagcgtagcatcactacgataccattaagatacctcataaaattaacagtaattcctggatttca

SEQ ID NO: 148571 - DNA, 201 bp, Homo sapiens
ttcattctgaactagagaatctcagcgtcaaaaggcccacagaaggccgggtacggtggctcacaactgtaatcccagtactttgggaggccgaggcgggyggatcacttgaggtcaggagttcaagacctaccttgccaacattgtgaaacaccatctctactaaaaatacaaaattattagctgggtgtggtgatgggc

SEQ ID NO: 148572 - DNA, 201 bp, Homo sapiens
accagtacatgtgtctctactttgaattctatgcctgtgacagacatcactaatcaatcacaggacttatgcctgctgagctccccaaatccttgtgaacrcatggttcccagcaacttccaccaatcagaactgctaaaagaggtgaaactgctttatatcctgggaagtgttcaatatctatccagcagacaagagtac

SEQ ID NO: 148573 - DNA, 201 bp, Homo sapiens
ctgatgtgactcacccaggacagcattcgaggcatttcattctgaactagagaatctcagcgtcaaaaggcccacagaaggccgggtacggtggctcacamctgtaatcccagtactttgggaggccgaggcgggcggatcacttgaggtcaggagttcaagacctaccttgccaacattgtgaaacaccatctctactaa

SEQ ID NO: 148574 - DNA, 201 bp, Homo sapiens; identical to SEQ ID NO: 27564

SEQ ID NO: 148575 - DNA, 201 bp, Homo sapiens; identical to SEQ ID NO: 27565

SEQ ID NO: 148576 - DNA, 201 bp, Homo sapiens; identical to SEQ ID NO: 27566

SEQ ID NO: 148577 - DNA, 201 bp, Homo sapiens; identical to SEQ ID NO: 27567

SEQ ID NO: 148578 - DNA, 201 bp, Homo sapiens; identical to SEQ ID NO: 27568

SEQ ID NO: 148579 - DNA, 201 bp, Homo sapiens; identical to SEQ ID NO: 27569

SEQ ID NO: 148580 - DNA, 201 bp, Homo sapiens; identical to SEQ ID NO: 27570

SEQ ID NO: 148581 - DNA, 201 bp, Homo sapiens; identical to SEQ ID NO: 27571

SEQ ID NO: 148582 - DNA, 201 bp, Homo sapiens; identical to SEQ ID NO: 27572

SEQ ID NO: 148583 - DNA, 201 bp, Homo sapiens; identical to SEQ ID NO: 27573

SEQ ID NO: 148584 - DNA, 201 bp, Homo sapiens
ttttctttgtaatattctcagaatgactcgcatgttttcactctgtaacagtagtacaagcacatcaaattatcaaagagtaaattttgcaggctcaggtracaaagcaagctggtgcatggaaatgatttctggggtggggatattcatgagacataatcttggggcaactctggtttaaagacacagggtcccgtattt

SEQ ID NO: 148585 - DNA, 201 bp, Homo sapiens; identical to SEQ ID NO: 27575

SEQ ID NO: 148586 - DNA, 201 bp, Homo sapiens; identical to SEQ ID NO: 27574

SEQ ID NO: 148587 - DNA, 201 bp, Homo sapiens
aaaccacaaagatggggagaaaccagagcagaaaagctgaaaattctaaaaaccagagcatctcttctcctccaaaggattgcagctcctcgccaacaacrgaacaaagcgggacagtgaatcactttgacgagttgacagaagtaggcttcagaaggtcagtaataacaaacttctccgagctaagggaggatgtttgaa

SEQ ID NO: 148588 - DNA, 201 bp, Homo sapiens; identical to SEQ ID NO: 27576

SEQ ID NO: 148589 - DNA, 201 bp, Homo sapiens; identical to SEQ ID NO: 27577

SEQ ID NO: 148590 - DNA, 201 bp, Homo sapiens; identical to SEQ ID NO: 27578

SEQ ID NO: 148591 - DNA, 201 bp, Homo sapiens; identical to SEQ ID NO: 27579

SEQ ID NO: 148592 - DNA, 201 bp, Homo sapiens
gttagaaggggagaccaatcctttgttgtcagcaacttgatcagaactgggaatgtcatctaccagtgctagattttggcttgtttatttttgtatatttygcatacgtgcttagctactgtttgttagaatttgctatccgacattacttgacctccactttccagtgccattccttccctcaatttttttaaatcggtt

SEQ ID NO: 148593 - DNA, 201 bp, Homo sapiens
tcttcacaatataaaattcagataagtgtaactggtcatggcccaactcttgtttattaattaaggctttataatatggcaccatttttggaagctgcagyttatgcaaagaagaatactaattacattctgcattttctgtaataatggggcagtgttttggacaatgcagtttatccagacaatgcatccggctcataa

SEQ ID NO: 148594 - DNA, 201 bp, Homo sapiens
ggccctataagccatattatggactttgctgaaagaattatcatgttcgcacagctctgtgtttgcagtaggcttaggactcttttcagatttgagcactrgcggtctttcatgcgatctgcttttcaacacacatcacatgttctcctcctccctttcctctcccggtcggattccttgctgccttctgattatggtctg

SEQ ID NO: 148595 - DNA, 201 bp, Homo sapiens
tgcatcaaggtggcctctgacagcctattactgattcaaatgccatccttgcggtcacggtaaagcaggtccttctgagacagataggactctgagcctgygcttggtacctggagctgatggaaagggcagtgatctaagacggcttgtttaggctgcagaaagtccctcggcttggactctctgagctcttgctcattc

SEQ ID NO: 148596 - DNA, 201 bp, Homo sapiens
tgaaaagccaccctggttcctccatctattaaatgggaaatgcatatgaacaaatagaagaattgcaccatacgatgcagctgaaatacaatgttatcatycttccactctgaacatttctcaggatggtttatgtcccagcagttaatggcttgctattgttggtgtaccaacacaatgctattagcaacacagaattct

SEQ ID NO: 148597 - DNA, 201 bp, Homo sapiens
ggaagactcaggggagaagggaggcaagaccctggaagtatgccaatatatgaaaccccaagtcaaaaggtcaaaccatgcactcgatctctcaagtcacycacttggccctcctccaagtgtactttacttcctttcattccagctctaaagctttctaataaactttcactcctgctctaaaacttgctttggtgtctc

SEQ ID NO: 148598 - DNA, 201 bp, Homo sapiens; identical to SEQ ID NO: 27581

SEQ ID NO: 148599 - DNA, 201 bp, Homo sapiens; identical to SEQ ID NO: 27580

SEQ ID NO: 148600 - DNA, 201 bp, Homo sapiens
ggtagggagaccggagggcacacgcatgcgcacgaaggaaacggtaaagcctgaagggaggtgcagagcgcatgctctctcttgcccgagatgccgaggaytttgacaaggactccgtcgtcccggatgatagtgctcaggttaatgccagtgggagggcggcgcccaatagtaacttcctttggaggttgtagtaccgcc

SEQ ID NO: 148601 - DNA, 201 bp, Homo sapiens
tctttaacaagggcttattctgattcttcaatactggccatgcgcggtggctcacgcctgtaatcccagcactttgggaggccaaggtgggtggatcgcckgaggtcaggagttcaagaccagcctcgtcaacatggcgaaacactatctctactaaaagtacaaaaagtagccgggcgtggtggcgggcgcctgtaatcc

SEQ ID NO: 148602 - DNA, 201 bp, Homo sapiens
tagataaaggactaatttccattttgtttttatatatgatctgtcaccccgttataagcagttcatgacggtgttctttctaaattattttctggaattayctaactgacatcttcactccacagccgtttccctggggagatggtaaccatactctattccataaccctcatgtgaatccacttccaactggctacgaag

SEQ ID NO: 148603 - DNA, 201 bp, Homo sapiens
taaataatgggaaggttgaactacaccagtagataaaggactaatttccattttgtttttatatatgatctgtcaccccgttataagcagttcatgacggkgttctttctaaattattttctggaattatctaactgacatcttcactccacagccgtttccctggggagatggtaaccatactctattccataaccctca

SEQ ID NO: 148604 - DNA, 201 bp, Homo sapiens
tgccaggtatgattccaaattacaccattcccagattattctgagaatgctgcagtgccaaactcttggtatcacagactttatattctagtgggggagayagacaaaataataatataacgacgaaggtgcaatgttatgtgctatgagaaaacgcagtcggaggatggcgaggaaggggaacggaattttagatagggc

SEQ ID NO: 148605 - DNA, 201 bp, Homo sapiens
ccacctcagcctcccaaagtgctaggattacaggtctgagccactgtgcctggccagagctggtttattttattttattttattttttgagacagagtttygcttttgttgcccaggctggagtgcaatggcatgatcttggctcaccacaacctccacctcccaggttcaagcaattctcctgcctcaccctcctgagta

SEQ ID NO: 148606 - DNA, 201 bp, Homo sapiens
taaaatgcactgagttccagaggcaaataatgatagaaactaaatgttacaatttattccatcttcaggattacagacattacagggcaggatgagtaaamaaggcaaatgaagcgagcaccttcagcttcccccctaccccgacatttaaccagatgcagcattttgacatttttaggatatgcaggttgacaattcact

SEQ ID NO: 148607 - DNA, 201 bp, Homo sapiens
ggcccgccccataccggcgctgaacgtttgtggcttctccgcagctcgcatgtggaagactctcaccttcttcgtcgcgctccccggggtggcagtcagcrtgctgaatgtgtacctgaagtcgcaccacggagagcacgagagacccgagttcatcgcctacccccatctccgcatcaggaccaaggtacgcccttgtac

SEQ ID NO: 148608 - DNA, 201 bp, Homo sapiens
caaggtcatacaataagtgctcttcagtttcccttttctccgattcatcctacctcctgccttctgagacagttctttttttttttttttttttttttttwacttctgagacagttctgaaacaggtgtccgttgtgtaaagcctggaggtttgggaaatccaattagagtggcaaagtctgaaggtggttcgcgtaagcg

SEQ ID NO: 148609 - DNA, 201 bp, Homo sapiens
gctgggtcggtcccgcccacagctggggcggcctatgtcgagtggcgcccatggcgaagagggctcaggtactggggccggggtcgacgggtcgagcctcmgccccactcgggcgagacagggagggactgtgaccttggcccgaggccttgcgggagggaaagtgagacccgggcccgccccataccggcgctgaacgtt

SEQ ID NO: 148610 - DNA, 201 bp, Homo sapiens
ccttaagctcaccttctttacttgtatcaaatgatgactggtatactggtctcccatccctttgcttgtggcaggagatggcttaaataaataacttaaayttagattggtcatgagctgagagttactttctttggttgtgttttttcgcagaaattagcatttgagcttcaagtcagtgtccaagttgaaaagaaattg

SEQ ID NO: 148611 - DNA, 201 bp, Homo sapiens
gggcacacgcatgcgcacgaaggaaacggtaaagcctgaagggaggtgcagagcgcatgctctctcttgcccgagatgccgaggattttgacaaggactcygtcgtcccggatgatagtgctcaggttaatgccagtgggagggcggcgcccaatagtaacttcctttggaggttgtagtaccgcccccagagccaatttt

SEQ ID NO: 148612 - DNA, 201 bp, Homo sapiens
gagtctcactctgttgcccagggtacagtgcagtggcatgatctcagttcactgcaaccttctcccaggttgaagcgattctcctgcctcagcctcccgartagctgggactacaggcacgtgccaccacgctgggctaattttttgtgtttttagtagagacaaggtttcacatgttggccaggctggtcttgaactcct

SEQ ID NO: 148613 - DNA, 201 bp, Homo sapiens
ttatatgaacataccacattttctacattcctcttataacaggttttaacactttgatacatcatatagaggtaataatatgtaaatcactcatttattcmttaggcaaatttgtctttccagagctttctctatgcaaggtactattggaggtgctaggagactttggtgaaaaaaacgaagcccctgctctcacagggc

SEQ ID NO: 148614 - DNA, 201 bp, Homo sapiens
gctgtccaccgccgctgcctgagccgactccgcgccgactgccgcgatggaggccgccgtccaattcttggtccagagccgggacgtggtctttggcctcraggccatcgaggctcagtacaagtaccagacaacgcgcgtcagaagcaagggcggcgtcctcgaggtgcacctcaagtccacgcacttcaccttccggac

SEQ ID NO: 148615 - DNA, 201 bp, Homo sapiens
tagtagagatggggtttcaccatgttagccatttcaatctcttgacctcgggatccgcctgcctcaacctcccaaagtgctgggattacaggcgtgaggcrctgcacctggccaacatagtttaattttatctcaacttgccaatattctccaaacattgttttttgtttgttttcttctgaacaccttcttcaataaacc

SEQ ID NO: 148616 - DNA, 201 bp, Homo sapiens
tttagctcatccattcatccatgtgcagtgtaattttttctttcttttctttttttctttcatttttttgagatagggtcttgctctgtctcccaggctgyagtgcagtggaacaacctgggctcactgcaatctccacctcccgggctcaagtgatcctcccatctcagcctcctgagtagctgggattacaggcatgca

SEQ ID NO: 148617 - DNA, 201 bp, Homo sapiens
atgacagtctctctctgttgcccaggctggagtggtgtgattatagctcactgcagcctcaaactcctggggtcaggcaatcctcccacctcaacctcccscatagctaggactacaagtatgcatcatcacgccggctaacttttgtattttgggtagagatggggtttcaccatgttgcccaggctggtctcaaactcc

SEQ ID NO: 148618 - DNA, 201 bp, Homo sapiens
tgggaggatcctttgaggtctggagtctgagaccagcctgcgtagcatagcaagatcccatctcttaaaaaaaaaaaaattattagccaggagtaagtagyggcatgtgtctgtagtaccagctacttgggaggctgaggtggaaggatcacctgatcccgggaatttgaggctgcaatgaactatgatcatagcgctaca

SEQ ID NO: 148619 - DNA, 201 bp, Homo sapiens; identical to SEQ ID NO: 27591

SEQ ID NO: 148620 - DNA, 201 bp, Homo sapiens
gttgagtggataggagctgtggccactcagtgggtgcccagggacagtcagctgtcatcataattatattaattatgtctgtagccactgttcagattcaytcctgttccaagaatcccgaccatcttttcctctgggtcagatttaaactttttgtttgtttgttttatttgtagaggtgggggactcactttgtcaccc

SEQ ID NO: 148621 - DNA, 201 bp, Homo sapiens
caaacagatacccagcctgtgtaggttactgtaggggaaactgaggctgaggcgggtaggggccatggcctcttaacatgctgtgttctgaaaacacaaamgtggctaggcacagtggctcatgcctataatcccagcactttgggaggctgaggtgggcggatcacttgagaccaggagttcgagaccagcttcttggga

SEQ ID NO: 148622 - DNA, 201 bp, Homo sapiens
tatcatttatagcatgtatctttgcacacagaaataatatcatgaatatttctgagctctaagtacaagacttggagaagagctctgaccagcctgaaggygtgggggtccaggaagtccccagaggaggggcccaggagacctcagttcccccatcactcctggattgtgggaagggtctgaggttgaactgcgatgcac

SEQ ID NO: 148623 - DNA, 201 bp, Homo sapiens; identical to SEQ ID NO: 27592

SEQ ID NO: 148624 - DNA, 201 bp, Homo sapiens
gcccaggagacctcagttcccccatcactcctggattgtgggaagggtctgaggttgaactgcgatgcacggcctggcttcccagcctgtttccccatctrtggagtgagcccaaagatgccctttgagactccactgggccagggctggtgttattcaggggcccctttccagtctcacataggtgccccaggcagttcc

SEQ ID NO: 148625 - DNA, 201 bp, Homo sapiens
attgtcctgtttgccacttctctgtcccctgttagtggtgtatcagcgtcctgggcacacgagtgtttctctccatcatcttggctgtgtcctcggaaccyagacccagatgtggcatacgctaggtgctcagcacttgctcagagcagtcacaactctgcaggtgataagggtggtggcagctgctattaaatctcattg

SEQ ID NO: 148626 - DNA, 201 bp, Homo sapiens
ggagagcctctgttccctcatctgtaaataagatagaggaccacttctgcctcctaagggtgcattcaggattcaaggtagggtaagcaccaagcacagcrcccggcaacaaacagatacccagcctgtgtaggttactgtaggggaaactgaggctgaggcgggtaggggccatggcctcttaacatgctgtgttctgaa

SEQ ID NO: 148627 - DNA, 201 bp, Homo sapiens
ctcctgacctcaggtgatccaccactttggcctcccaaagtgctgggatgacagctgtgagccactgcacccagcccttcaccttattttctaaacctgcmtactctcctataccccagcagccagcctctgtctaggccaccaaactcttccacctagatgttacccaatctccccccacccagcctcctgagtagctgg

SEQ ID NO: 148628 - DNA, 201 bp, Homo sapiens
tgccatgttggccaggctgatctcgaactcctgagctcaagtgattgcctcggcttcccaaagtgctgagattacaggcgtgagccaccgtgcccagcttttttttttttttttttttttttttttgagacatagtcttgctctgttgcccaggctggagtgcagtggtgtgatcttggctcactgcaacctccgcctcct

SEQ ID NO: 148629 - DNA, 201 bp, Homo sapiens
gccatgttggccaggctgatctcgaactcctgagctcaagtgattgcctcggcttcccaaagtgctgagattacaggcgtgagccaccgtgcccagcttttttttttttttttttttttttttttgagacatagtcttgctctgttgcccaggctggagtgcagtggtgtgatcttggctcactgcaacctccgcctcctg

SEQ ID NO: 148630 - DNA, 201 bp, Homo sapiens
ccatgttggccaggctgatctcgaactcctgagctcaagtgattgcctcggcttcccaaagtgctgagattacaggcgtgagccaccgtgcccagcttttttttttttttttttttttttttttgagacatagtcttgctctgttgcccaggctggagtgcagtggtgtgatcttggctcactgcaacctccgcctcctgg

SEQ ID NO: 148631 - DNA, 201 bp, Homo sapiens
gtgattgcctcggcttcccaaagtgctgagattacaggcgtgagccaccgtgcccagcttttttttttttttttttttttttttttgagacatagtcttgytctgttgcccaggctggagtgcagtggtgtgatcttggctcactgcaacctccgcctcctgggttcaagcgattttccttcctcagcctcctgagtagct

SEQ ID NO: 148632 - DNA, 201 bp, Homo sapiens
catgttggccaggctgatctcgaactcctgagctcaagtgattgcctcggcttcccaaagtgctgagattacaggcgtgagccaccgtgcccagcttttttttttttttttttttttttttttgagacatagtcttgctctgttgcccaggctggagtgcagtggtgtgatcttggctcactgcaacctccgcctcctggg

SEQ ID NO: 148633 - DNA, 201 bp, Homo sapiens
gagctcaagtgattgcctcggcttcccaaagtgctgagattacaggcgtgagccaccgtgcccagcttttttttttttttttttttttttttttgagacakagtcttgctctgttgcccaggctggagtgcagtggtgtgatcttggctcactgcaacctccgcctcctgggttcaagcgattttccttcctcagcctcct

SEQ ID NO: 148634 - DNA, 201 bp, Homo sapiens
ccatcacttcctcccactggcctgttctcaaggtgacaccaggcagggctggtgtcaggaggaagaggtgtggcccccaggtcaggcagctgggcccccayatggcctaggtgagcagttgggtgtttgctcagtccagcctggacaccctccctcactctcacccctagggtgtggcatttcctggcaggtgctctgggt

SEQ ID NO: 148635 - DNA, 201 bp, Homo sapiens
aggcggaagttgcagtgagccaagatcacaccactgcacttcagcctgggggacacagcaagcgagactctgtctccagaataaaaccaaagaaacagggmtgagggcgacagaggtgcctggagccacttgcacctggggcaagggcccagccttgactgccccctgggagtggcagaggacatggggccagggtgcagc

SEQ ID NO: 148636 - DNA, 201 bp, Homo sapiens; identical to SEQ ID NO: 27593

SEQ ID NO: 148637 - DNA, 201 bp, Homo sapiens
gccactgcaccactccagcctgggtgacagagcaagatcctgtctcaagaaaagaaaaaaaaaatctcattgttggcgcttcacatatgtgccacttggaraaaaggccactgcttggagctaccacttgaccctctagcctttcccaggactcaaatccgtatgtagtcaaacgggattcttccagaagcttctctcacc

SEQ ID NO: 148638 - DNA, 201 bp, Homo sapiens; identical to SEQ ID NO: 27590

SEQ ID NO: 148639 - DNA, 201 bp, Homo sapiens
cccagctttgcagaggaggatgctaaggtctgggtggccccagctactcggcccaggtcccatggaaggtcagtagctgggtcagaaggcccttcctcaayggctgtcgggggtccccatggctgcttcaaaggcatcagctcacagaccagtcctcccagctgcaggcaaggcagagactgagagccagcgaccgggcag

SEQ ID NO: 148640 - DNA, 201 bp, Homo sapiens
ctcatgcctgtaatcccagcactttgggaggctgaggtgggtggatcacctgagattaggagtttgaaaccagcctggccaacatggtgaaactctgtctytactaaaaatacaaaaattagccgggtgtggtggtacatgcctgtaatccctgctactcaggaggctgaggcaggagaatcacttgaacccaggagggtg

SEQ ID NO: 148641 - DNA, 201 bp, Homo sapiens
tccccaggctggagtactgtggcgagatcatggctcactgcagccttgacctcctgggctcaagcgatcctcccacctcagcctcccaagtagccaggacyacaggcgcacaccaccatgcccggctaatttttgtattttttgtagagatggggttttgccatcttgcccaaactcttgggctcaagtgatccttccttc

SEQ ID NO: 148642 - DNA, 201 bp, Homo sapiens
gcctggatgtcactgctggacactggtggcaccgtgtctggcttggggtgaagttttttcacccaccttgaacaggagtgcagggtaggcgctgtaacatrcagggaacatatgacaattgcctgttggcaccaggcatggtgactggtgcctgtggtcgcagctactcaagaggctaaggcaggaggatcacttgagccc

SEQ ID NO: 148643 - DNA, 201 bp, Homo sapiens
tggcttggggtgaagttttttcacccaccttgaacaggagtgcagggtaggcgctgtaacatgcagggaacatatgacaattgcctgttggcaccaggcayggtgactggtgcctgtggtcgcagctactcaagaggctaaggcaggaggatcacttgagcccaggagctggaggctgcagtgagctatgatcgccactgc

SEQ ID NO: 148644 - DNA, 201 bp, Homo sapiens
tgagactgggcgcagtggctcactcctgtaatcccagcactttgggaggccgaggcgggcagatcacttgaggtcaggagttcgagaccagcctggccaaygcgctgaaaccccgtctttactaaatatacaaaaattagctgggtgtggtggcgcacacttgtaatctcagctacttgggaggctgaggcaggaggatcg

SEQ ID NO: 148645 - DNA, 201 bp, Homo sapiens
cccatctcttaaaaaaaaaaaaattattagccaggagtaagtagcggcatgtgtctgtagtaccagctacttgggaggctgaggtggaaggatcacctgakcccgggaatttgaggctgcaatgaactatgatcatagcgctacactctagcctgggcaatagagcaagaccctgtctcagaaacaaacaaaattcataca

SEQ ID NO: 148646 - DNA, 201 bp, Homo sapiens
ggcgggcagatcacttgaggtcaggagttcgagaccagcctggccaacgcgctgaaaccccgtctttactaaatatacaaaaattagctgggtgtggtggygcacacttgtaatctcagctacttgggaggctgaggcaggaggatcgcttgaaaccaggaggcggaagttgcagtgagccaagatcacaccactgcactt

SEQ ID NO: 148647 - DNA, 201 bp, Homo sapiens
gaactcctaggctcaagcaaccctcttgcttcagcctcctaaagtgcaaggattataggcatgagctactgcatccagcctgagcctgggtgttaaaggatttttttttttttgagacagaatctggctatattgcccaggctggcgtgcagtggcacgatctcggctcactgcaacctccacctcctggattcaagtgat

SEQ ID NO: 148648 - DNA, 201 bp, Homo sapiens
ctcaatggctgtcgggggtccccatggctgcttcaaaggcatcagctcacagaccagtcctcccagctgcaggcaaggcagagactgagagccagcgaccrggcaggttaggggtatccaggcctgggagtccctgaagagcgatccagaagtagccctatctgggcctcagtttcctcatctggaaagtgggagtttcac

SEQ ID NO: 148649 - DNA, 201 bp, Homo sapiens
atggctgtcgggggtccccatggctgcttcaaaggcatcagctcacagaccagtcctcccagctgcaggcaaggcagagactgagagccagcgaccgggcwggttaggggtatccaggcctgggagtccctgaagagcgatccagaagtagccctatctgggcctcagtttcctcatctggaaagtgggagtttcacaggg

SEQ ID NO: 148650 - DNA, 201 bp, Homo sapiens
cacttccagggctcaagtgatcctcccacctcagcctcccgagtagctgggactaaaggcatacaccaccatactcagctaatttttttactttttttttwaatttttagcacagacaggtctcccttttttgcccaggctggtcttgaactcctaggctcaagcaaccctcttgcttcagcctcctaaagtgcaaggatt

SEQ ID NO: 148651 - DNA, 201 bp, Homo sapiens
atgttggccaggctggtctcaaactcctgacctcaggtgatctgccctccttgacctcccaaagtaccgggattacagacgtgggccacagctcccggccmtgtttaaggaggctggtgcagctggagcagatgagtgagggcagagattgtgtgggaaagatggcagcagagaggacccacatcctgcagccacacccca

SEQ ID NO: 148652 - DNA, 201 bp, Homo sapiens
gagcccaggagctggaggctgcagtgagctatgatcgccactgcactccagcctggacaacagagcaagtgagatcctatcactaaaaaaaaaaaaaaaawatttttaattagctggcaaggtggcttatgtctgtaatcccagcgctttgggaagccaaggcaagaggattgcttgaggccaggaattcaagaccagcct

SEQ ID NO: 148653 - DNA, 201 bp, Homo sapiens
agcccaggagctggaggctgcagtgagctatgatcgccactgcactccagcctggacaacagagcaagtgagatcctatcactaaaaaaaaaaaaaaaaawtttttaattagctggcaaggtggcttatgtctgtaatcccagcgctttgggaagccaaggcaagaggattgcttgaggccaggaattcaagaccagcctg

SEQ ID NO: 148654 - DNA, 201 bp, Homo sapiens
tttgccatgttggccaggctgatctcgaactcctgagctcaagtgattgcctcggcttcccaaagtgctgagattacaggcgtgagccaccgtgcccagcttttttttttttttttttttttttttttgagacatagtcttgctctgttgcccaggctggagtgcagtggtgtgatcttggctcactgcaacctccgcctc

SEQ ID NO: 148655 - DNA, 201 bp, Homo sapiens
gtttcttcacccctagaggttgcactcctctggaaaattgtcctgtttgccacttctctgtcccctgttagtggtgtatcagcgtcctgggcacacgagtrtttctctccatcatcttggctgtgtcctcggaacctagacccagatgtggcatacgctaggtgctcagcacttgctcagagcagtcacaactctgcaggt

SEQ ID NO: 148656 - DNA, 201 bp, Homo sapiens
ttgccatgttggccaggctgatctcgaactcctgagctcaagtgattgcctcggcttcccaaagtgctgagattacaggcgtgagccaccgtgcccagcttttttttttttttttttttttttttttgagacatagtcttgctctgttgcccaggctggagtgcagtggtgtgatcttggctcactgcaacctccgcctcc

SEQ ID NO: 148657 - DNA, 201 bp, Homo sapiens
ccacaggggctggcagatcagggttcaaatcccaccaacccgccctggcctcagtcggctgtgtgaccttgggcagagttgcaccctctctgcacagatcrtccacctggaccctaggctcccctctggaaggctcagtgagactcctcgggttcctccacaggccaggggctcacaccctctcctgcaagcgtccccaac

SEQ ID NO: 148658 - DNA, 201 bp, Homo sapiens
ctcctgagtagctgggattacagacacgcaccaccacacccgggtaatttttgtatttttagtagagatggggttttgccatgttggccaggctgatctcraactcctgagctcaagtgattgcctcggcttcccaaagtgctgagattacaggcgtgagccaccgtgcccagcttttttttttttttttttttttttttt

SEQ ID NO: 148659 - DNA, 201 bp, Homo sapiens
gctctgttgcccaggctggagtgcagtggtgtgatcatagctcactgcagccttgaactcctgggctcaggtggtcctcccacctcagcctcccaagtaamtgagacctcaagcacatgctaccacagcctgctaattttttgttttgttttgttttgagacagagtctttctctgtcatccaggctggagtgcaatggtg

SEQ ID NO: 148660 - DNA, 201 bp, Homo sapiens
ctactcaggaggctgaggcaggaggatcgcttgaacccatgaggtggaggctgcagtaagcggaaattacaccactgcactccagcctgggcaacagaacragagagagagagagagagagacgctgtctcaaaaaaaaaaaacaaaattaaaaaatttaaaaaattaatccccagcagggagggccagggcacctgtcag

SEQ ID NO: 148661 - DNA, 201 bp, Homo sapiens
gaattgcttgaacctgaaaggcggaggttgcagtgagccgagattgcaccactccactccagcctgggcaacaaaagcgaaaactccatctccaaaaaaawaataataataataataaaataaaaatcacacaaaggccaggagtggtggctcatgcttgtaatgtcagcattttgggaggctgaggtgggaggatccttt

SEQ ID NO: 148662 - DNA, 201 bp, Homo sapiens
aatggccccagacattattgtgctgaagcatcagatctgaagaaaactcagtcattcttgggttgaaaggtaacttgaaattgcaattagaaaaaaaggaaaaaaaaaaaaaaaaccccagaaaattgcaattaaaggctagttaggtattaaccgctatgaaatgaaattgatgagatgaggccaaagctgcattcagag

SEQ ID NO: 148663 - DNA, 201 bp, Homo sapiens
atggccccagacattattgtgctgaagcatcagatctgaagaaaactcagtcattcttgggttgaaaggtaacttgaaattgcaattagaaaaaaaggaaaaaaaaaaaaaaaaccccagaaaattgcaattaaaggctagttaggtattaaccgctatgaaatgaaattgatgagatgaggccaaagctgcattcagagg

SEQ ID NO: 148664 - DNA, 201 bp, Homo sapiens
gctactcgggaggctgaggcaggagtgaggcatgatcagtgaaccgagatcatgccattacactccaccctgggcgacagagtgagactgtcttaaagataaaaaaaaaaaaaagcaggtttttggccgggcgtggtggctcatacctgtaatctcagcactttgggaggccaaggatggtggatcacctgaggtcaggtg

SEQ ID NO: 148665 - DNA, 201 bp, Homo sapiens
cagaaattaatgagttggttaatatattttaaactttaatggtaagtagatctaaaagatagaaaagctcctgacaaggctaatcaagagaaaaaaaaatsacgtggtattatgaataaaaaaaggtactgttatgtaaagtattttaggaaaatacaaattcattacagcattaaaaataaactaaataattaaaaaggt

SEQ ID NO: 148666 - DNA, 201 bp, Homo sapiens
tctcatcttatataaggacgccagtcattggatttagggcccacactaatccactatgacttgttcttaactaattacatctgcaaagaccctatttcctyccttccttccctccttccctcccttccttcccttccttccttcctcccttcctatactttcttttcttttcctttccttttctttctttttttgagatag

SEQ ID NO: 148667 - DNA, 201 bp, Homo sapiens
taatcccagctactcaggaggctgaggcagaagaatcgcttgaaaccgggaggcggaggttgccgtgagccaagatcgtaccactgcactccagcctgggmgacagagtgagactccatctcaaaataaataaataaataaataaaaatagttacagtggatagaaaggaagggactcttgtccctgctgtttggcactag

SEQ ID NO: 148668 - DNA, 201 bp, Homo sapiens
ccgggctctatcaatccccctgcctcagcctcctcagtagctgggactacaggtgtgcaccaccaggcccagctaatttttttttttgagttggagtttcrcccttgttgcccaggctggagtgcaatggcgcgatctcagctcaccacaacctccgcctcctgggttcaagtgattctcctgcctcagcctcccaagtag

SEQ ID NO: 148669 - DNA, 201 bp, Homo sapiens
ttcacaccattctcctgcctcagcctcctgagtagctgggactacgggtgcccgccaccacgcctggttaatttttttgtatttttttagtagagacgggrtttcaccgtgttagccaggatggtctcgatctcctgacctcgtgatccgcccaccttggcctccaaagtgctgggattataggcgtgagccaccatgggc

SEQ ID NO: 148670 - DNA, 201 bp, Homo sapiens
tcacaccattctcctgcctcagcctcctgagtagctgggactacgggtgcccgccaccacgcctggttaatttttttgtatttttttagtagagacggggyttcaccgtgttagccaggatggtctcgatctcctgacctcgtgatccgcccaccttggcctccaaagtgctgggattataggcgtgagccaccatgggcc

SEQ ID NO: 148671 - DNA, 201 bp, Homo sapiens
ctgcgtggctgagactacagatatgcaccatcacgcccagctaattttttgatttgtttgcagagatgaggtcccactgtattgcccaggctggtcttgamctcctgggctgaagccatcctcctgccttggcctcccaaagtgctgggattacaggtgtgagtcaccgtgcccagtttatactggtttttcaatctcata

SEQ ID NO: 148672 - DNA, 201 bp, Homo sapiens
atggatggttgtgcctggggctgtcaccatctcctactctttgcgagagtgacaactcttcctgctccttttgccttcggagtgaaattcacccttcccasaaggctccacgtggcccctttcacctctccctctccccagcaacatcagcccctcactcagtctccctgcagcgcacccacttcctgctgttcctggagc

SEQ ID NO: 148673 - DNA, 201 bp, Homo sapiens
accacgcccagctaatttttgtatttttagtagagacagggtttcacaacattggccaggctggtctcaaactcccaacctcaagtgatccgcccccctcrgcctcccaaagtgctgggattacaggcatgaaccaccgcacccggcccagaaaagttttattggaacatagcaacacccgcttatgtatatattgtctgc

SEQ ID NO: 148674 - DNA, 201 bp, Homo sapiens
cgggcgtggtggctcatacctgtaatctcagcactttgggaggccaaggatggtggatcacctgaggtcaggtgttggagaccagcctagccaacatggcragaccccatctctactaaaaatacaaaaattagctgggtgtggtggcgtgtgcctgtaatcccggctacaggggaggctgaagcacgagaatcgcttgaa

SEQ ID NO: 148675 - DNA, 201 bp, Homo sapiens
aggatgaggtgggcaaatcacttgaggtcaggagttcgagactagcctggccaacatagtgaaatctcttctctactaaaaatacaaaaattagctgggcrcggtggctcacacctgtaatcccagcactttgggaggccgaggctggtggatcacgaggtcgggagttcgagaccatcctggctaacacagtgaaacccc

SEQ ID NO: 148676 - DNA, 201 bp, Homo sapiens
ttctgcctccatccctgggcttcctccccaaggagcgggagaagattgtggctcccatcagtgactccccgaagccaccgccacagcgtgtgaccctcacrctacctgtcctgaatgcagcacgaactgtcatctttgtggcaactggagaaggcaaggcagctgttctgaaggtaacagctgagggttctagtcctggga

SEQ ID NO: 148677 - DNA, 201 bp, Homo sapiens
tgatccaagtgcttttgagttaaatctgctgccaacgactccaccattcacaggccagggcatctactgtgcgctagccacaggtgctgggcctgggcaarcctggcccccactccctgtagtggggcaggtgcaggcgggggtggctgctcggaggaggtggcctgagggatgtatatgagtttcccaggcagccttagg

SEQ ID NO: 148678 - DNA, 201 bp, Homo sapiens
ggggccagaactgcagagctgagtggttgcaatagagactggatggtctgcagagcttaatctattgactctggtcttttgctgaaaaagggtgccaaccrcagtattaaacagttacagaccaggcacagtggctcatgcctgcactttgggaggctgaggcaggaggattgcttgagtctaggagtttgagactagtct

SEQ ID NO: 148679 - DNA, 201 bp, Homo sapiens
tctcctgacctcgtgatccgcccaccttggcctccaaagtgctgggattataggcgtgagccaccatgggccttttttttttttgagatggagtcttactstgtcactctgtcacctaggctggagtgcagtgatgcaatctcagctcactgcaacctctgcctcccgggctcaagtgattatcctacctcagcctcccaa

SEQ ID NO: 148680 - DNA, 201 bp, Homo sapiens
tactcctcaggtcagcattcagggcagtcagcccctgcgtttacttcgtggctcaccttagcattgcctcagctcactgagctagactctgcacaaacacraggcaccgagacatggacgccatctcagagcagaccagggcccctggggcgcctctcagtgggatagggctgcagctttctccttgatccaagtgctttt

SEQ ID NO: 148681 - DNA, 201 bp, Homo sapiens
ctgggacttccagagggagagccacctgccgggtggggtgtctagagccagggttcaagtcagcctccaccaacatacctgcctgctgggctcaatccttycaggtctcagttgagccccttaaaacagggaccttaaactacccaccatgggattgttagtaggatgggatggaacagtggctggaccaggcctggtgtg

SEQ ID NO: 148682 - DNA, 201 bp, Homo sapiens
gctcaccttagcattgcctcagctcactgagctagactctgcacaaacacgaggcaccgagacatggacgccatctcagagcagaccagggcccctggggsgcctctcagtgggatagggctgcagctttctccttgatccaagtgcttttgagttaaatctgctgccaacgactccaccattcacaggccagggcatcta

SEQ ID NO: 148683 - DNA, 201 bp, Homo sapiens
gcaagggcctggaagggaatccgagtggcccatgtcaaacgatgcccataactcagccccgtagcggacgggggcacgaggaatcaggtgtagagcctgartctcagggtcctgatctctaaccccagcgagttctcggggatccctgggcagctttgccgctctgatggctctgcttccaggctgttcatctttggcttt

SEQ ID NO: 148684 - DNA, 201 bp, Homo sapiens
aaatggccccagacattattgtgctgaagcatcagatctgaagaaaactcagtcattcttgggttgaaaggtaacttgaaattgcaattagaaaaaaaggaaaaaaaaaaaaaaaaccccagaaaattgcaattaaaggctagttaggtattaaccgctatgaaatgaaattgatgagatgaggccaaagctgcattcaga

SEQ ID NO: 148685 - DNA, 201 bp, Homo sapiens
tgaaagtaatgggttcaaaatacctatgtaataaatcaatgaaaaatgaattaaccaactcacagattgcctaagaattatgtgatgatgaaattgtatgsttatataaggaactggacttaatatatatttgtgatgatatctaccactttattcctttattaggaaaaattaagtgcactccaatttattcatccattc

SEQ ID NO: 148686 - DNA, 201 bp, Homo sapiens
gaatttatccatctcctctaggtttcctagtttatgcacaaaaacttgttcatagtagccttgaatgatcttttgtatttttgtggtattggttgtaattyttcccatttcatttctaattgagcttatttggatcgtccgtcttcttttcatggttaatcttgtcaatggtctatcaatattatttttcaaagaaacagc

SEQ ID NO: 148687 - DNA, 201 bp, Homo sapiens
tttatcttgtttcccattaaaatatgtggttgaaagtaatgggttcaaaatacctatgtaataaatcaatgaaaaatgaattaaccaactcacagattgcytaagaattatgtgatgatgaaattgtatgcttatataaggaactggacttaatatatatttgtgatgatatctaccactttattcctttattaggaaaaa

SEQ ID NO: 148688 - DNA, 201 bp, Homo sapiens
tgtcttgttccatttctcaggggaaggctttcaaatttccccattcagtattatgttggctgtgggtttgttgtcaatggcttttattaccttaaggtatwtcccttttatgccgattttgctgagggttttaatcagaaagcatgctagattttgtcaaatgctttttctgcatctattgacatgatcatgtgatttttg

SEQ ID NO: 148689 - DNA, 201 bp, Homo sapiens
ttgtagattattgatattagtcctttgtcagatgtatagattgccaagattttctcccactctgtgggttgtctgcttaatctgctaattatttctcttgytgtgcagaagctttttagtttaattaagtctcatctatttatcgttgtttttgttgcatttgcttttgggtttttggtcataagtctctgcctgaaccaa

SEQ ID NO: 148690 - DNA, 201 bp, Homo sapiens
tcctacttatgagtgagaaaatatgatatttggtttttcattcctgagttacttcacttagaataatggtctccaattccacccatcttgctgccagtgcmattatttagttcctttttatggctgagtagtattccatagtgtttgtgtgtgtatgtgttttatctagtcaatgatcggtgggcatttgggctgactcta

SEQ ID NO: 148691 - DNA, 201 bp, Homo sapiens
ccaatccttgccttccactaaccttccaagagagcttgtggtaatttgttacgtcagcaatagaaaattaacacacctctgttgcaaacatggccatctargatctgcgggtaggcacatctccgtctttgatctcagcctggaaaagctcatcaattttaagaagccataagattagattaggttcacctggataatcca

SEQ ID NO: 148692 - DNA, 201 bp, Homo sapiens
aaaaattattaaagagtcacaaagaccatcattttctaaaaatatttattcatgagaagttggtttatagaaagggcattagttctagtgtaaatgttccwtttgtaatcttcacaagaatgaagtatcttagaattaatacaaatcgactttattctctacttctaaaaatccttaaacatatctgtatcaaaggtcttt

SEQ ID NO: 148693 - DNA, 201 bp, Homo sapiens
cacatcttcgcactgctcatcattacctgtataattatattagagatgccaatccttgccttccactaaccttccaagagagcttgtggtaatttgttacrtcagcaatagaaaattaacacacctctgttgcaaacatggccatctaggatctgcgggtaggcacatctccgtctttgatctcagcctggaaaagctcat

SEQ ID NO: 148694 - DNA, 201 bp, Homo sapiens
acagtcacaagccttgtatttttctaagtaagttagaaaatggtgttgtcccccatagtattgcataccacttggtgaatgaatgaatgaatgaatgaatwgacacccttaagggaatataagaatgagattatttggaacaggaagagcatgttacgcaaaatgaaggcggactatgggagactaggtttaataaatatc

SEQ ID NO: 148695 - DNA, 201 bp, Homo sapiens
ctggacttaatatatatttgtgatgatatctaccactttattcctttattaggaaaaattaagtgcactccaatttattcatccattctttcattaaaaaaccgttttctgggcatttcctaaatccacagcactatcccgtgcaaaaaaggggactgaaggagcaaaagacataatctcttccctctacacactcacaat

SEQ ID NO: 148696 - DNA, 201 bp, Homo sapiens
aaaggcaatgggaaacacatctctagctatatttcacctacccagaattctctagaatcctactgaaaaagtctccagagaccaacacgtttccattgccragattttctagaaggtccagcagtgtgggtaatggggagcagcaccctgagatcaatgctctcagcagccttgccctgggacaaatgccacagatgaatg

SEQ ID NO: 148697 - DNA, 201 bp, Homo sapiens
aaatgatttaataattttgcatatgttcttaataaattccaatttttttaaacatattagtatttggccaaaagaagtaagcaattttaggccaactattrttttattaacaaaaacatgccctaaggaaagtgaagctcaaatgcattactatattttatcacagaaactggacagtacctggcacaaaactagagccca

SEQ ID NO: 148698 - DNA, 201 bp, Homo sapiens; identical to SEQ ID NO: 27596

SEQ ID NO: 148699 - DNA, 201 bp, Homo sapiens; identical to SEQ ID NO: 27597

SEQ ID NO: 148700 - DNA, 201 bp, Homo sapiens
cttctgtcagggcccagacacctagaaatgggaggagggaaaaaacataagtatggacattgttctgtgctgagttcacaaaatggaggctacatggctayggctgaatgagcatgaccttttcttaggtgacctatgcagccccttcaccaatttcctcttgcaacgtggtctctcttcctgagcaaggaatcaatgaag

SEQ ID NO: 148701 - DNA, 201 bp, Homo sapiens
aaaagaatttgttttatccctctccaggtgataaagtcatcccactcgctattcctcagtgtggaaaatgcagaatttgtaaaaacccggagagcaactaytgcttgaaaaacgagtaggtttctgatgctctccctgcgcagacattgagtttgcacattagttatggtcctgtctcatgcctttgtgtgtctttgtatt

SEQ ID NO: 148702 - DNA, 201 bp, Homo sapiens
gctgtaggaatctgtggcacagatgaccacgtggttagtggtaccatggtgaccccacttcctgtgattttaggccatgaggcagccggcatcgtggagartgttggagaaggggtgactacagtcaaaccaggtacaggattcacattcaggaaacatgatggttcaccatcctaagatttcccagcctgaatgaggaaa

SEQ ID NO: 148703 - DNA, 201 bp, Homo sapiens
aaatgactgatggaggtgtggatttttcatttgaagtcatcggtcggcttgacaccatggtatgtaccatgacatgccctgagatttctgcctctacaacytggaggatgcatttaggctgcagaatatatgttttctgtataaaggatatttttaatgatgaatggaaatttcccatcatctgtttgttacctggcttgt

SEQ ID NO: 148704 - DNA, 201 bp, Homo sapiens
agttcctacagcaaaagtataaaccaatcatattaatgaaaataataactgatgaaatagacaattgcctcccctcttgggcacaacatcaataacttagyttgttgtcagcatttcatttatgtttatacatcctgcattatattttcctcaaatgctaaatagtgacaatactaacatctatttcataaagtagttgtg

SEQ ID NO: 148705 - DNA, 201 bp, Homo sapiens
gaatcatttaaaattcatatctaaattagaaatgatacactgaaatatgatatgcaatatatgctataatatgtaatgtatactgaactacagtggaaatragctattcctaaataccttcaaaaagaatgtatagaatctgtatctatgaagtgtttatttcccacattaaagacatttgcggtaaagcgataatttatt

SEQ ID NO: 148706 - DNA, 201 bp, Homo sapiens
agtgataatagattactttgttaatttttagttaaaaactgtaagttaaagtaaacataaataatacaagttctgttctcaaattggaatgttttattttyctgccacattcttaacaaaaatgatttaataattttgcatatgttcttaataaattccaatttttttaaacatattagtatttggccaaaagaagtaagc

SEQ ID NO: 148707 - DNA, 201 bp, Homo sapiens
tgcattttctgaaaacacaggtcaccccaggctctacctgtgctgtgtttggcctgggaggggtcggcctatctgctattatgggctgtaaagcagctggrgcagccagaatcattgcggtggacatcaacaaggacaaatttgcaaaggccaaagagttgggtgccactgaatgcatcaaccctcaagactacaagaaac

SEQ ID NO: 148708 - DNA, 201 bp, Homo sapiens
attctgatttaaaagggtctagtaggacacaattcaggcaatttccagagtaatcctatggaacagtatcttccccatataaaagtcaatatggttttacrgaaaattaataatacaatttgaatcacttattagcactaggaacacagatatttggttttgccttccataaatatcttaattgttcaatgtgtttatagg

SEQ ID NO: 148709 - DNA, 201 bp, Homo sapiens
gggcttgtttttcttaactgagtgataatagattactttgttaatttttagttaaaaactgtaagttaaagtaaacataaataatacaagttctgttctcraattggaatgttttatttttctgccacattcttaacaaaaatgatttaataattttgcatatgttcttaataaattccaatttttttaaacatattagta

SEQ ID NO: 148710 - DNA, 201 bp, Homo sapiens
actttagctcttagtcccttgttcaattgcctcgtctattttaacaggtgatctaagtgagcctacccaagaacagaagatgaggatactcataacaatakattttattattaaaatatagactaatgtttcattactgtgttattcactagtgtattttttaaagcagggatatactggtcatgactactgaacataaat

SEQ ID NO: 148711 - DNA, 201 bp, Homo sapiens
aaatatatccttataaactcagatccttttggcctaagcagaaaattgagaaagaaaacagtgtattttatgtgaacagacactgactctgtcagcaaaaygaaggtgacttagaatttgatgtaccagccaataattgtgggtgaagagacattttcagcatagcattaggaaatgtcaggattaaacaactttggagaa

SEQ ID NO: 148712 - DNA, 201 bp, Homo sapiens
caatttttttaaacatattagtatttggccaaaagaagtaagcaattttaggccaactattgttttattaacaaaaacatgccctaaggaaagtgaagctsaaatgcattactatattttatcacagaaactggacagtacctggcacaaaactagagcccaatactagtaggactgaatactttgaaaagtcaacagatt

SEQ ID NO: 148713 - DNA, 201 bp, Homo sapiens
gaatactactcagccattaaacagaataaaataaaataatggcctttgcagcaacttggatggagctggagaccattattctaagtaattcagaaatggaraaccaaacatcatatgttctcatttataagagagagttaggctatgaggatgcaaaggcatgagaatgatatcatgaactttgggaactcgagggggaag

SEQ ID NO: 148714 - DNA, 201 bp, Homo sapiens
ttccaggctccacagccgctgcaagaccagcaagtatttccgctccctcgacatcttgggcttcagtaccaaaatcaaaatgaaatgctaattgagtaggrattgatggctttgaatgtggcattttcaaaaatttctctaggaacttaaaatgtattctatttattgcagtgtgctatagagtatgcatctattccattc

SEQ ID NO: 148715 - DNA, 201 bp, Homo sapiens
ttctttatgatttgacagtctgtgaataatctaatgggtgtggcttaaagacctagatcatgtgtggaactggaatcgggtgttattcaagcaaaaaaaawaaataaatacctatgcaatacacctgctttatgcacttgagcagggaagaaatccacaaggactcaccagtctcctggtctgcagagaagacagaatcaa

SEQ ID NO: 148716 - DNA, 201 bp, Homo sapiens
attgattgctggttcattgccctcttctttatgatttgacagtctgtgaataatctaatgggtgtggcttaaagacctagatcatgtgtggaactggaatygggtgttattcaagcaaaaaaaataaataaatacctatgcaatacacctgctttatgcacttgagcagggaagaaatccacaaggactcaccagtctcct

SEQ ID NO: 148717 - DNA, 201 bp, Homo sapiens
gacaaaagggaacagacccaaaaccacaggagagatgctagcatgacagggatgcagagacataaagcacaacagtgagatggagttaatatacctccacragggtgaccttgtcctgcatctcaaattttgggtaggatttgaatgggccagagggacagaaaagaagagaaagagcatgatgagcaagggcttgaatgt

SEQ ID NO: 148718 - DNA, 201 bp, Homo sapiens
ctggcacgaccacttcctgcttcacaggagggttctctgtcttgtctacctgaccacagccaatcccactgctaatctgtaaacccttaaagaggagacaycggatcttctggattatgggactgctcatagaacagtgcctgtcctaacataaatgagcataagaattcaacaatcactcattaaacacctacagtatac

SEQ ID NO: 148719 - DNA, 201 bp, Homo sapiens
tcatcggtcggcttgacaccatggtatgtaccatgacatgccctgagatttctgcctctacaacttggaggatgcatttaggctgcagaatatatgttttmtgtataaaggatatttttaatgatgaatggaaatttcccatcatctgtttgttacctggcttgtttaatttattgttatgaggaatcttttattctatca

SEQ ID NO: 148720 - DNA, 201 bp, Homo sapiens
cacgttgaactcttctcctggcacgaccacttcctgcttcacaggagggttctctgtcttgtctacctgaccacagccaatcccactgctaatctgtaaamccttaaagaggagacatcggatcttctggattatgggactgctcatagaacagtgcctgtcctaacataaatgagcataagaattcaacaatcactcatt

SEQ ID NO: 148721 - DNA, 201 bp, Homo sapiens
ggatttttcatttgaagtcatcggtcggcttgacaccatggtatgtaccatgacatgccctgagatttctgcctctacaacttggaggatgcatttaggcwgcagaatatatgttttctgtataaaggatatttttaatgatgaatggaaatttcccatcatctgtttgttacctggcttgtttaatttattgttatgagg

SEQ ID NO: 148722 - DNA, 201 bp, Homo sapiens
agtattgcataccacttggtgaatgaatgaatgaatgaatgaatagacacccttaagggaatataagaatgagattatttggaacaggaagagcatgttaygcaaaatgaaggcggactatgggagactaggtttaataaatatcccctggccaattaaaaaaatgtagatggcatcttttccaaatttctgtgactttag

SEQ ID NO: 148723 - DNA, 201 bp, Homo sapiens
aatgctgattggtttgaggtggagcaaaaatgcttagcagggtgagcacctttgctgtgattgagtatctgattctctatgaagagaaggggagtcctgarccaaacacattcctctggctcctggctgtcatctttatttgcccggcttctttgctcttcctccttcctaactgcaccgtttggattcaaagctggagct

SEQ ID NO: 148724 - DNA, 201 bp, Homo sapiens
ggtgtggatttttcatttgaagtcatcggtcggcttgacaccatggtatgtaccatgacatgccctgagatttctgcctctacaacttggaggatgcattkaggctgcagaatatatgttttctgtataaaggatatttttaatgatgaatggaaatttcccatcatctgtttgttacctggcttgtttaatttattgtta

SEQ ID NO: 148725 - DNA, 201 bp, Homo sapiens
gtgtggaaaatgcagaatttgtaaaaacccggagagcaactactgcttgaaaaacgagtaggtttctgatgctctccctgcgcagacattgagtttgcacmttagttatggtcctgtctcatgcctttgtgtgtctttgtattgcactgtccagtgtaagcaatcctcaggggaccctgcaggatggcaccagcaggttca

SEQ ID NO: 148726 - DNA, 201 bp, Homo sapiens
tggtgaacacggtcttctgtcagggcccagacacctagaaatgggaggagggaaaaaacataagtatggacattgttctgtgctgagttcacaaaatggasgctacatggctacggctgaatgagcatgaccttttcttaggtgacctatgcagccccttcaccaatttcctcttgcaacgtggtctctcttcctgagcaa

SEQ ID NO: 148727 - DNA, 201 bp, Homo sapiens
tgcagaatttgtaaaaacccggagagcaactactgcttgaaaaacgagtaggtttctgatgctctccctgcgcagacattgagtttgcacattagttatgktcctgtctcatgcctttgtgtgtctttgtattgcactgtccagtgtaagcaatcctcaggggaccctgcaggatggcaccagcaggttcacctgcaggag

SEQ ID NO: 148728 - DNA, 201 bp, Homo sapiens
ctgacaggttttccttcataggttacttgatgcttttgcctcacggctcttacgattcttccctttgtcttgactttagataacctgatgactatgtgccyaggcggtgatctttttgtgatgaatttctcaggtgttctttgagcttctgatatttggatatctaggtctctagcaaggccagggacgtttctcttgttt

SEQ ID NO: 148729 - DNA, 201 bp, Homo sapiens
aaaggaaatgactgatggaggtgtggatttttcatttgaagtcatcggtcggcttgacaccatggtatgtaccatgacatgccctgagatttctgcctctrcaacttggaggatgcatttaggctgcagaatatatgttttctgtataaaggatatttttaatgatgaatggaaatttcccatcatctgtttgttacctgg

SEQ ID NO: 148730 - DNA, 201 bp, Homo sapiens
agacttgcagtactgtattgaataaaagtggtgaaagtgggcacccttgtcttgttccatttctcaggggaaggctttcaaatttccccattcagtattaygttggctgtgggtttgttgtcaatggcttttattaccttaaggtatatcccttttatgccgattttgctgagggttttaatcagaaagcatgctagattt

SEQ ID NO: 148731 - DNA, 201 bp, Homo sapiens
tccaggaggtgctaaaggaaatgactgatggaggtgtggatttttcatttgaagtcatcggtcggcttgacaccatggtatgtaccatgacatgccctgaratttctgcctctacaacttggaggatgcatttaggctgcagaatatatgttttctgtataaaggatatttttaatgatgaatggaaatttcccatcatct

SEQ ID NO: 148732 - DNA, 201 bp, Homo sapiens
actgaatgcatcaaccctcaagactacaagaaacccatccaggaggtgctaaaggaaatgactgatggaggtgtggatttttcatttgaagtcatcggtcrgcttgacaccatggtatgtaccatgacatgccctgagatttctgcctctacaacttggaggatgcatttaggctgcagaatatatgttttctgtataaag

SEQ ID NO: 148733 - DNA, 201 bp, Homo sapiens
agtcttgcttttgctatgtggggactttttggttccatatgcattttagattgtttttactagttctgtgaagaatgacagtgctattttgatgggaattycaataaatttgcagattgcttgtggcagtatgttcattttcacaatattgattctacccattcatgagcaggagatgtgtttccatttgtttgtgtcatc

SEQ ID NO: 148734 - DNA, 201 bp, Homo sapiens
taagaagttttcattggatgcattaataacccatgttttaccttttgaaaaaataaatgaaggatttgacctgcttcactctgggaaaaggtagattttttagttagttttctgttttgcttttttttctaccataggggattgtctagcagaaaatgaaaaggtggaaggatgagaaaaattagagtgccttggttcttc

SEQ ID NO: 148735 - DNA, 201 bp, Homo sapiens
ttctgaggatgtctggtctcccaaaggtcagaatccaaaatcaaagaactaatcattacatatcttggggcaatcctaaaccattttctaactatagaacrtgttcagaaagctcactggaaaagactttctgaacggtcttttgaggttccctaataatcagggtattttaatgtaaaacctatatatatttggggagat

SEQ ID NO: 148736 - DNA, 201 bp, Homo sapiens
tatgaggaatcttttattctatcaactatgcaaacgtgtctcaagtcatatttcctctagaggaaaagcaaagggcttgtttttcttaactgagtgataayagattactttgttaatttttagttaaaaactgtaagttaaagtaaacataaataatacaagttctgttctcaaattggaatgttttatttttctgccaca

SEQ ID NO: 148737 - DNA, 201 bp, Homo sapiens
cagctcctactaatttctttagtagtaataaattaataactactgaataataactaataactactaaactactaataataactactaaataatactaatartaactaattagttagtaataagttaataacaaaatgacacccttactttttacccatgctccctccactgtaacaggaaaagtagataattcacaaatta

SEQ ID NO: 148738 - DNA, 201 bp, Homo sapiens
cagtcttggtgtgagtctcagtgcctacgtagttaaagcttactgaaatgttccctttacaattctagagagatatgtcctttatgttgacatgttcatgytgacagactgcatctgattaaacagctgcctgtgcaatgcctccaagtgtggataaaagaaaaattaaactcataatcttggacagccatgtgtagacta

SEQ ID NO: 148739 - DNA, 201 bp, Homo sapiens
ttcacaatgtgggtctccatgaactgctctgttcatccaagtagcaggtgcaagttagtcctgcctcctatcctcctccattttgcctcctgatgacccayttttcttgatacatcttaataaaatacctttctttcaaggtttcctcaccctaaaagtagaagtcatttctttaatttaatcaacaaatatctgagcact

SEQ ID NO: 148740 - DNA, 201 bp, Homo sapiens
tttttcacctatcgtatggtctaccttagagaatgttccatgtgctgatgaacagaatgtatattctgcagttgttgggtagaatgttctataaatatccrgtaagtccatttgttgtaggctgtagtttaaatccattggttctttgttgactttctgtcttgatgacctgtctagtgctgtcagtggagtattgaagtc

SEQ ID NO: 148741 - DNA, 201 bp, Homo sapiens
agagagaagtagaggaaagtgatgccctgtgatccccagagattgacagggttacctgtggacattccagatgttgctccagagggcctgctatggccctytgatactagaacactggctttcaataatgtggcaactgctcttcccacctgcccatctaaacgtttagaaggtgggacaaagagtaagcacagagtagtt

SEQ ID NO: 148742 - DNA, 201 bp, Homo sapiens
ttataaagtttttataatccatttttgcattttctgaaaacacaggtcaccccaggctctacctgtgctgtgtttggcctgggaggggtcggcctatctgytattatgggctgtaaagcagctggggcagccagaatcattgcggtggacatcaacaaggacaaatttgcaaaggccaaagagttgggtgccactgaatgc

SEQ ID NO: 148743 - DNA, 201 bp, Homo sapiens
atttgacctgcttcactctgggaaaaggtagattttttagttagttttctgttttgcttttttttctaccataggggattgtctagcagaaaatgaaaagrtggaaggatgagaaaaattagagtgccttggttcttccattaccagttcagtctttacatggagagcttgtaagagaagtttaaaacctctgtgagatgc

SEQ ID NO: 148744 - DNA, 201 bp, Homo sapiens
ttttttcacctatcgtatggtctaccttagagaatgttccatgtgctgatgaacagaatgtatattctgcagttgttgggtagaatgttctataaatatcyggtaagtccatttgttgtaggctgtagtttaaatccattggttctttgttgactttctgtcttgatgacctgtctagtgctgtcagtggagtattgaagt

SEQ ID NO: 148745 - DNA, 201 bp, Homo sapiens
aaaacttgttcatagtagccttgaatgatcttttgtatttttgtggtattggttgtaatttttcccatttcatttctaattgagcttatttggatcgtccrtcttcttttcatggttaatcttgtcaatggtctatcaatattatttttcaaagaaacagctttttaaaatttatcttttgtatttttttgtttcaatttc

SEQ ID NO: 148746 - DNA, 201 bp, Homo sapiens
atttttcatttgaagtcatcggtcggcttgacaccatggtatgtaccatgacatgccctgagatttctgcctctacaacttggaggatgcatttaggctgyagaatatatgttttctgtataaaggatatttttaatgatgaatggaaatttcccatcatctgtttgttacctggcttgtttaatttattgttatgaggaa

SEQ ID NO: 148747 - DNA, 201 bp, Homo sapiens
aaaaaaaaacataagtatggacactgttctgtgctgagttcacaaaatggaggctgcatggttatggctgaagaaacatgacctttccttaggtgacctatgcagctccttcaccgatttcctcttccaacatggtctctcttcctgagcatggaatcaatgaaactgactaggtgaaagaaaatgaaagaaacatagcag

SEQ ID NO: 148748 - DNA, 201 bp, Homo sapiens
gggagaaaaaaaaacataagtatggacactgttctgtgctgagttcacaaaatggaggctgcatggttatggctgaagaaacatgacctttccttaggtgacctatgcagctccttcaccgatttcctcttccaacatggtctctcttcctgagcatggaatcaatgaaactgactaggtgaaagaaaatgaaagaaacat

SEQ ID NO: 148749 - DNA, 201 bp, Homo sapiens
taacacagttgatggaatttttttaatccatcttgtttcccacacttgtattttctctttaggattcttcaggcacttataaacccaaactaaaaaacaakgccttggcaggcaatgacaaatgacatagttgtgactagaccctatttcttagaaacttttcagacacataattctaatctatacatgtgagcgttaagt

SEQ ID NO: 148750 - DNA, 201 bp, Homo sapiens
attatatctgcaaagcctccaggataaattagtgcactgcgtaaaattttattaacacagttgatggaatttttttaatccatcttgtttcccacacttgyattttctctttaggattcttcaggcacttataaacccaaactaaaaaacaatgccttggcaggcaatgacaaatgacatagttgtgactagaccctattt

SEQ ID NO: 148751 - DNA, 201 bp, Homo sapiens
taagtatggacactgttctgtgctgagttcacaaaatggaggctgcatggttatggctgaagaaacatgacctttccttaggtgacctatgcagctccttyaccgatttcctcttccaacatggtctctcttcctgagcatggaatcaatgaaactgactaggtgaaagaaaatgaaagaaacatagcaggagccatccac

SEQ ID NO: 148752 - DNA, 201 bp, Homo sapiens
aaaacataagtatggacactgttctgtgctgagttcacaaaatggaggctgcatggttatggctgaagaaacatgacctttccttaggtgacctatgcagctccttcaccgatttcctcttccaacatggtctctcttcctgagcatggaatcaatgaaactgactaggtgaaagaaaatgaaagaaacatagcaggagcc

SEQ ID NO: 148753 - DNA, 201 bp, Homo sapiens
aaaaacataagtatggacactgttctgtgctgagttcacaaaatggaggctgcatggttatggctgaagaaacatgacctttccttaggtgacctatgcagctccttcaccgatttcctcttccaacatggtctctcttcctgagcatggaatcaatgaaactgactaggtgaaagaaaatgaaagaaacatagcaggagc

SEQ ID NO: 148754 - DNA, 201 bp, Homo sapiens
aaaaaacataagtatggacactgttctgtgctgagttcacaaaatggaggctgcatggttatggctgaagaaacatgacctttccttaggtgacctatgcagctccttcaccgatttcctcttccaacatggtctctcttcctgagcatggaatcaatgaaactgactaggtgaaagaaaatgaaagaaacatagcaggag

SEQ ID NO: 148755 - DNA, 201 bp, Homo sapiens
agaaaaaaaaacataagtatggacactgttctgtgctgagttcacaaaatggaggctgcatggttatggctgaagaaacatgacctttccttaggtgacctatgcagctccttcaccgatttcctcttccaacatggtctctcttcctgagcatggaatcaatgaaactgactaggtgaaagaaaatgaaagaaacatagc

SEQ ID NO: 148756 - DNA, 201 bp, Homo sapiens
gagaaaaaaaaacataagtatggacactgttctgtgctgagttcacaaaatggaggctgcatggttatggctgaagaaacatgacctttccttaggtgacctatgcagctccttcaccgatttcctcttccaacatggtctctcttcctgagcatggaatcaatgaaactgactaggtgaaagaaaatgaaagaaacatag

SEQ ID NO: 148757 - DNA, 201 bp, Homo sapiens
gaggggagaaaaaaaaacataagtatggacactgttctgtgctgagttcacaaaatggaggctgcatggttatggctgaagaaacatgacctttccttaggtgacctatgcagctccttcaccgatttcctcttccaacatggtctctcttcctgagcatggaatcaatgaaactgactaggtgaaagaaaatgaaagaaa

SEQ ID NO: 148758 - DNA, 201 bp, Homo sapiens
catgacttggtcaaaatcatcaggtggtaggaaggagagccagaattcgaaggaagatcttgttattagcaaatctattcactttctattaaaccacaccrcccctcaagagtgtgtatatatatatatatatatatatatatatatatatatatatatatatatagaaaacagtattcatcaaaggttaattatcattgt

SEQ ID NO: 148759 - DNA, 201 bp, Homo sapiens
ggaggggagaaaaaaaaacataagtatggacactgttctgtgctgagttcacaaaatggaggctgcatggttatggctgaagaaacatgacctttccttaggtgacctatgcagctccttcaccgatttcctcttccaacatggtctctcttcctgagcatggaatcaatgaaactgactaggtgaaagaaaatgaaagaa

SEQ ID NO: 148760 - DNA, 201 bp, Homo sapiens
attacaggcatgagccatcatgcccagccccaagatagacttttctgatgtcactattaaccaggactttcatctccacctctttttgtacttgtgactgygtaaggcaaggaaatttctagtaggccatggaaatatataacaataaatcatatctacacaaaaatctagacaactaataaatttgctccttaaccttgg

SEQ ID NO: 148761 - DNA, 201 bp, Homo sapiens
actatatataaaattctcagtcgcaaatatcttcttttcttaaaagtgttcatcaaaagttggtttatagaaaaggcattaattctagtgtaaatgttacmtttctaatcttcacaagaatgaagtagcttagaattaatacaaatcagctttattctctacttctaagaatccttaaacatctctgtatcaaaggtctat

SEQ ID NO: 148762 - DNA, 201 bp, Homo sapiens
tgggaggggagaaaaaaaaacataagtatggacactgttctgtgctgagttcacaaaatggaggctgcatggttatggctgaagaaacatgacctttccttaggtgacctatgcagctccttcaccgatttcctcttccaacatggtctctcttcctgagcatggaatcaatgaaactgactaggtgaaagaaaatgaaag

SEQ ID NO: 148763 - DNA, 201 bp, Homo sapiens
gtatatatatacacacaccacacacacactatatataaaattctcagtcgcaaatatcttcttttcttaaaagtgttcatcaaaagttggtttatagaaarggcattaattctagtgtaaatgttacatttctaatcttcacaagaatgaagtagcttagaattaatacaaatcagctttattctctacttctaagaatcc

SEQ ID NO: 148764 - DNA, 201 bp, Homo sapiens
ctgtaagtgcccaaaaaactataaatgggaggggagaaaaaaaaacataagtatggacactgttctgtgctgagttcacaaaatggaggctgcatggttayggctgaagaaacatgacctttccttaggtgacctatgcagctccttcaccgatttcctcttccaacatggtctctcttcctgagcatggaatcaatgaaa

SEQ ID NO: 148765 - DNA, 201 bp, Homo sapiens
atctgtgtatatatatacacacaccacacacacactatatataaaattctcagtcgcaaatatcttcttttcttaaaagtgttcatcaaaagttggtttakagaaaaggcattaattctagtgtaaatgttacatttctaatcttcacaagaatgaagtagcttagaattaatacaaatcagctttattctctacttctaa

SEQ ID NO: 148766 - DNA, 201 bp, Homo sapiens
ctaagcagaaaattgagcaagaaagcagtgtattttggacagacactgactctgtcagcaaagtaaaggtgacttagaacatgtaccagccaatagttgtrggtaaacagttgtcttcaggacagtgttagaaaatatcaggattaaacatctttggagaaaaaaaaatcaaaagaataaatggtgctgggaaaactggct

SEQ ID NO: 148767 - DNA, 201 bp, Homo sapiens
ttggcctaagcagaaaattgagcaagaaagcagtgtattttggacagacactgactctgtcagcaaagtaaaggtgacttagaacatgtaccagccaatasttgtgggtaaacagttgtcttcaggacagtgttagaaaatatcaggattaaacatctttggagaaaaaaaaatcaaaagaataaatggtgctgggaaaac

SEQ ID NO: 148768 - DNA, 201 bp, Homo sapiens
tgcatgtaactcactcagcacaagccacagtgcacctgtcacatcataggcacctgacaatcagaaactcctactattagaactttatttccaagtattcygatatttattttggcatggaccacattgaaaatcctgcaaagttgaaggatttgacaaatgaataatgaaaattaattggcagaagatgaaatttcaatt

SEQ ID NO: 148769 - DNA, 201 bp, Homo sapiens
ataaatttgctccttaaccttgggcataacatctgtactataatttctctgtgagagagagaataactaaggacccttgtttatctgtgattttttttgtsaaagcactgtaaaagcatattgaagtactctatctcttattatcctcagttatagcagtctggaatgcagcactttttctaaactttcatttatttggaa

SEQ ID NO: 148770 - DNA, 201 bp, Homo sapiens
tgattttaggccatgaggcagccggcatcgtggaaagtgttggagaaggggtgactacagtcaaaccaggtacaggattcacactcagggaacatgccttrgttcaccatcacaagattagtcagcctggatgaggaaaccgaggcaatgaaagacgaaaggacttgcacaaggtcacagggaagctgggacttcaggggt

SEQ ID NO: 148771 - DNA, 201 bp, Homo sapiens
aggaatctgtcgttcagatgagcatgtggttagtggcaacctggtgaccccccttcctgtgattttaggccatgaggcagccggcatcgtggaaagtgttkgagaaggggtgactacagtcaaaccaggtacaggattcacactcagggaacatgccttggttcaccatcacaagattagtcagcctggatgaggaaaccg

SEQ ID NO: 148772 - DNA, 201 bp, Homo sapiens
atggcaacaaaagccaaaattgacaaatgggatctaattaaactcaagagcttctgcacagcaaaagaaactaccatcagagtgaaaaggcaacctacaamatgggagaaaattttcgcaacctactcatctgacaaagggctaatatccagaatctacaatgaactcaaacaaatttacaagaaaaaaacaaacaacccc

SEQ ID NO: 148773 - DNA, 201 bp, Homo sapiens
caaggacttcatgtctaaaacaccaaaagcaatggcaacaaaagccaaaattgacaaatgggatctaattaaactcaagagcttctgcacagcaaaagaarctaccatcagagtgaaaaggcaacctacaaaatgggagaaaattttcgcaacctactcatctgacaaagggctaatatccagaatctacaatgaactcaa

SEQ ID NO: 148774 - DNA, 201 bp, Homo sapiens
ttaccattcaggacataggcatgggcaaggacttcatgtctaaaacaccaaaagcaatggcaacaaaagccaaaattgacaaatgggatctaattaaactmaagagcttctgcacagcaaaagaaactaccatcagagtgaaaaggcaacctacaaaatgggagaaaattttcgcaacctactcatctgacaaagggctaa

SEQ ID NO: 148775 - DNA, 201 bp, Homo sapiens
ggagaaaaaaaaatcaaaagaataaatggtgctgggaaaactggctagccatatgtagaaagctgaaactggatcccttccttacaccttatacaaaaatyaattcaagatggattaaagacttaaacgttagacctaaaaccataaaaaccctagaagaaaacctaggcattaccattcaggacataggcatgggcaagg

SEQ ID NO: 148776 - DNA, 201 bp, Homo sapiens
ctcaaatctaagctggaaggagtctctgcacataaattagatgaacaaaacaggctgccaaagctaagtttcaaatgggtgtttgagacaagtaacacacagaagtggagagagaaaattaaaagaggacaataggcaaatagagaaagagacatcatcctaagcaggaaggtaaatgtataactgtttttatggagtcag

SEQ ID NO: 148777 - DNA, 201 bp, Homo sapiens
gctcaaatctaagctggaaggagtctctgcacataaattagatgaacaaaacaggctgccaaagctaagtttcaaatgggtgtttgagacaagtaacacacagaagtggagagagaaaattaaaagaggacaataggcaaatagagaaagagacatcatcctaagcaggaaggtaaatgtataactgtttttatggagtca

SEQ ID NO: 148778 - DNA, 201 bp, Homo sapiens
ctgtggataagcttgctagctagaaactcaaatacacagtttctccagtttttaaatacatgtgtgtggtctgaatgcacacacacacacacacacacagaaacacacatacacaacaccaactctaacctctgtaattttgggctcaaatctaagctggaaggagtctctgcacataaattagatgaacaaaacaggctg

SEQ ID NO: 148779 - DNA, 201 bp, Homo sapiens
tctgtggataagcttgctagctagaaactcaaatacacagtttctccagtttttaaatacatgtgtgtggtctgaatgcacacacacacacacacacacasaaacacacatacacaacaccaactctaacctctgtaattttgggctcaaatctaagctggaaggagtctctgcacataaattagatgaacaaaacaggct

SEQ ID NO: 148780 - DNA, 201 bp, Homo sapiens
atctgtggataagcttgctagctagaaactcaaatacacagtttctccagtttttaaatacatgtgtgtggtctgaatgcacacacacacacacacacacagaaacacacatacacaacaccaactctaacctctgtaattttgggctcaaatctaagctggaaggagtctctgcacataaattagatgaacaaaacaggc

SEQ ID NO: 148781 - DNA, 201 bp, Homo sapiens
actgcgtaaggcaaggaaatttctagtaggccatggaaatatataacaataaatcatatctacacaaaaatctagacaactaataaatttgctccttaacyttgggcataacatctgtactataatttctctgtgagagagagaataactaaggacccttgtttatctgtgattttttttgtgaaagcactgtaaaagcat

SEQ ID NO: 148782 - DNA, 201 bp, Homo sapiens; identical to SEQ ID NO: 27631

SEQ ID NO: 148783 - DNA, 201 bp, Homo sapiens
cctgtattctctaaattatgtgcatatatttttcttatctgtgtatatatatacacacaccacacacacactatatataaaattctcagtcgcaaatatcwtcttttcttaaaagtgttcatcaaaagttggtttatagaaaaggcattaattctagtgtaaatgttacatttctaatcttcacaagaatgaagtagctta

SEQ ID NO: 148784 - DNA, 201 bp, Homo sapiens
aacatacatatatgtttaagcatgtttatttactatcagtaatatcaatatttagaaacattagaaaagtccaacattaagaatatgatttaataaattcyaagcaactgttagaaatgaaaaagacttcattggcaaattcttaaaatgtaattttaaactcataaaataaatcatataaattgtatttataagatgatc

SEQ ID NO: 148785 - DNA, 201 bp, Homo sapiens
ccacttggatgaagctgaaggccattattttaagtgaagtaactcaggaatggaaaaccaaataccatatggtctcacttataagtgggagctaagctatraggatacaaaggcataagaatgatatagaggactttggttagggataaaagactacacgttggatacagtgtacactgctcgggtgacacatgcagcaaa

SEQ ID NO: 148786 - DNA, 201 bp, Homo sapiens
gttgatcctcaattatttcagatgtagtaagaccaataattcaatagtactgtcctggtagcatccgttttaggtttaaaagtaattcatattgtttacarcagcacaatttgcaattgcaaaaatatggaaacttcctaaatgcccatcaaccaacgagtggataaagagaatgtggtatatgtacaccatgagatacta

SEQ ID NO: 148787 - DNA, 201 bp, Homo sapiens
agtagagacagggtttcaccatgttggtcaggctggtctccaactcttgacttcaggtgatccgcctacctcggcctgccaaagtgctgggattaaagggrtgggcaactgcacccggcctgatctttattctctggacagccagctttgagacttcaggaaaattattcaatcactgagtcagttgatcctcaattattt

SEQ ID NO: 148788 - DNA, 201 bp, Homo sapiens
gcttggctaattttagcatttttagtagagacagggtttcaccatgttggtcaggctggtctccaactcttgacttcaggtgatccgcctacctcggcctsccaaagtgctgggattaaaggggtgggcaactgcacccggcctgatctttattctctggacagccagctttgagacttcaggaaaattattcaatcactg

SEQ ID NO: 148789 - DNA, 201 bp, Homo sapiens
cacgccaccatgcttggctaattttagcatttttagtagagacagggtttcaccatgttggtcaggctggtctccaactcttgacttcaggtgatccgccyacctcggcctgccaaagtgctgggattaaaggggtgggcaactgcacccggcctgatctttattctctggacagccagctttgagacttcaggaaaatta

SEQ ID NO: 148790 - DNA, 201 bp, Homo sapiens
ttcaatataatcaattgatattattaattgcctaatttaaaaaaatctgtgcaactatttccagccatttgttgtgctaggagtgtatcacacaataaaamacctcactatgataattcagtttaaaggttctgaggcttacctttatgctgtgcgacaaaacaggctcatgtcaataagactggttggaaatcacatgag

SEQ ID NO: 148791 - DNA, 201 bp, Homo sapiens
gcattagaatcatcaaggttaagcaagacatcacattcaaattccgtttaaagggggcccattatgacacaattcaggcaatttccacagaaatcttatgsaacagtatctcccctatataaaagtcaatatgatcttacagaaaaataataatgcaatttgaatcacttattagcactcagaacacaaatatttgttttt

SEQ ID NO: 148792 - DNA, 201 bp, Homo sapiens
catctgtggataagcttgctagctagaaactcaaatacacagtttctccagtttttaaatacatgtgtgtggtctgaatgcacacacacacacacacacacagaaacacacatacacaacaccaactctaacctctgtaattttgggctcaaatctaagctggaaggagtctctgcacataaattagatgaacaaaacagg

SEQ ID NO: 148793 - DNA, 201 bp, Homo sapiens
taaggtagttgtgagaattcagtaaattaatagtgaaaagcacttagaatagtacctggtaaataaaaataagtcaataaatattagccactgttattattgttgctttataactttttgatatttactaccacggagtacagaaaacgtgaggctacattaattttttcattcgtttttttgtttggagatggagtatct

SEQ ID NO: 148794 - DNA, 201 bp, Homo sapiens
ataaggtagttgtgagaattcagtaaattaatagtgaaaagcacttagaatagtacctggtaaataaaaataagtcaataaatattagccactgttattattgttgctttataactttttgatatttactaccacggagtacagaaaacgtgaggctacattaattttttcattcgtttttttgtttggagatggagtatc

SEQ ID NO: 148795 - DNA, 201 bp, Homo sapiens
cataaggtagttgtgagaattcagtaaattaatagtgaaaagcacttagaatagtacctggtaaataaaaataagtcaataaatattagccactgttattattgttgctttataactttttgatatttactaccacggagtacagaaaacgtgaggctacattaattttttcattcgtttttttgtttggagatggagtat

SEQ ID NO: 148796 - DNA, 201 bp, Homo sapiens
tagaaaagtctttaatcagaagctatctttatattaagaaagcataatttaaatgtgttattatttgtattcatattttttgtgaacacaagaagttaagtctgacaaaacttttatgagagggatttgagaagattttgaaatatacttttaatcttactataaaatatcttacaaaatactcattgatctcacagcatt

SEQ ID NO: 148797 - DNA, 201 bp, Homo sapiens
ttagaaaagtctttaatcagaagctatctttatattaagaaagcataatttaaatgtgttattatttgtattcatattttttgtgaacacaagaagttaagtctgacaaaacttttatgagagggatttgagaagattttgaaatatacttttaatcttactataaaatatcttacaaaatactcattgatctcacagcat

SEQ ID NO: 148798 - DNA, 201 bp, Homo sapiens
gttagaaaagtctttaatcagaagctatctttatattaagaaagcataatttaaatgtgttattatttgtattcatattttttgtgaacacaagaagttaagtctgacaaaacttttatgagagggatttgagaagattttgaaatatacttttaatcttactataaaatatcttacaaaatactcattgatctcacagca

SEQ ID NO: 148799 - DNA, 201 bp, Homo sapiens
aatttttagtttaaaatgcaaacttaaatatatataaataatacaaatcattttctcaaattaaaaagttttatttttcttttacattcttaacaaaaatmttttaacaattttatgtatgctcttaacgaattccaaactttttgacatagtattcttcggtcaaaagaaatgagcaattttagaccaactattatttta

SEQ ID NO: 148800 - DNA, 201 bp, Homo sapiens
agttagaaaagtctttaatcagaagctatctttatattaagaaagcataatttaaatgtgttattatttgtattcatattttttgtgaacacaagaagttaagtctgacaaaacttttatgagagggatttgagaagattttgaaatatacttttaatcttactataaaatatcttacaaaatactcattgatctcacagc

SEQ ID NO: 148801 - DNA, 201 bp, Homo sapiens
aagttagaaaagtctttaatcagaagctatctttatattaagaaagcataatttaaatgtgttattatttgtattcatattttttgtgaacacaagaagttaagtctgacaaaacttttatgagagggatttgagaagattttgaaatatacttttaatcttactataaaatatcttacaaaatactcattgatctcacag

SEQ ID NO: 148802 - DNA, 201 bp, Homo sapiens
aagagaaaactaagaagcagagaaggcatgacttggtcaaaatcatcaggtggtaggaaggagagccagaattcgaaggaagatcttgttattagcaaatmtattcactttctattaaaccacaccacccctcaagagtgtgtatatatatatatatatatatatatatatatatatatatatatatatatagaaaacagt

SEQ ID NO: 148803 - DNA, 201 bp, Homo sapiens
gaggtagattttaagttgtttttttgttttgctttgtattctacagtagcggcgggggggggggcgttgtctagcagagaatgaaaaggtggaaggatgaraaaaaattacagtgccttggttttccattgccagttcaatctttgcatggagcacatgtaaggtaatactgtgagaagctaaaaacagttgctttgcatt

SEQ ID NO: 148804 - DNA, 201 bp, Homo sapiens
gccttggcaggcaatgacaaatgacatagttgtgactagaccctatttcttagaaacttttcagacacataattctaatctatacatgtgagcgttaagtytttgctctattaattcctgcatagaaatttaagaagaatttgttttattcctctgcaggtgataaagtcatcccgctctttactcctcagtgtggaaaat

SEQ ID NO: 148805 - DNA, 201 bp, Homo sapiens
tatatcaagagttcacaatcaatttgcattagatattttcttggtgttaatttgcaatttctacttctttttcttttaactatgcattcttctatattatrcaagacaaaaattttaggatcaattatctcacagattattctaaattgttaaattcaagggaaaaagaggaaggttttagactggataaccttggagata

SEQ ID NO: 148806 - DNA, 201 bp, Homo sapiens
gggaatatcacactctggggactattgtggggtggggggaggggggagggatagcattgggagatatacctaatgctagatgacgagttagtgggtgcagygcaccagcatggcacatatatacatatgtaactaacctgcacaatgtgcacatgtaccctaaaacttaaagtataattaaaaaaacattcaaaaaaaata

SEQ ID NO: 148807 - DNA, 201 bp, Homo sapiens
cccaaaaactattgaaattaaaaataaataaattttaaaaataaaaataatgcatgtaactcactcagcacaagccacagtgcacctgtcacatcataggyacctgacaatcagaaactcctactattagaactttatttccaagtattctgatatttattttggcatggaccacattgaaaatcctgcaaagttgaagga

SEQ ID NO: 148808 - DNA, 201 bp, Homo sapiens
tagatcgagagatataaagatatttgcccaaaatctgacttctgcttaatatgagcactaagactaaaatatcttttacaaatctcctgctgaatgtcaamtcacaatccataattattagcacttttaaaccacagtcacaaacaagccttgtatttttctaagtaaggtagaaagtggtgttgtcccccatagtattga

SEQ ID NO: 148809 - DNA, 201 bp, Homo sapiens
aaatattactatattaattaaggatgaataactaggacatttccataccatcgttttcatatgaactttacccataaaatgttatgcaccaatcatttttyttggtcttgtgaaatagatagcataggtgattaaaaataaaatttgtctttaaagaatcactttagccaatggattcgacctgtccacttaccaagtact

SEQ ID NO: 148810 - DNA, 201 bp, Homo sapiens
gcaacctggtgaccccccttcctgtgattttaggccatgaggcagccggcatcgtggaaagtgttggagaaggggtgactacagtcaaaccaggtacaggrttcacactcagggaacatgccttggttcaccatcacaagattagtcagcctggatgaggaaaccgaggcaatgaaagacgaaaggacttgcacaaggtca

SEQ ID NO: 148811 - DNA, 201 bp, Homo sapiens
acagattttaccacccgcaaaagttaagagctacatatctcatggcattgtttatgaaacgcatgagacaatgcatgtaaaatactttgtgcaacacaacycatcatgtggttagcttccaataaatgtcagcagcccccttttttattttattttatttatttatttatttatttttttttttgagacagggtctcactc

SEQ ID NO: 148812 - DNA, 201 bp, Homo sapiens
ttaacagaaaatatgccctaaggaaagtgactgctttaatacattgctatattttatcacagcaactggacagtgcctgacacaaaactagtacccagtaytacttggactgaatgctttaaataaagtcaacagattttaccacccgcaaaagttaagagctacatatctcatggcattgtttatgaaacgcatgagaca

SEQ ID NO: 148813 - DNA, 201 bp, Homo sapiens
aatgagcaattttagaccaactattattttattaacagaaaatatgccctaaggaaagtgactgctttaatacattgctatattttatcacagcaactggrcagtgcctgacacaaaactagtacccagtattacttggactgaatgctttaaataaagtcaacagattttaccacccgcaaaagttaagagctacatatc

SEQ ID NO: 148814 - DNA, 201 bp, Homo sapiens
agaaatgagcaattttagaccaactattattttattaacagaaaatatgccctaaggaaagtgactgctttaatacattgctatattttatcacagcaacwggacagtgcctgacacaaaactagtacccagtattacttggactgaatgctttaaataaagtcaacagattttaccacccgcaaaagttaagagctacat

SEQ ID NO: 148815 - DNA, 201 bp, Homo sapiens
ctacaagaaacccattcaggaagtgctaaaggaaatgactgatggaggtgtggatttttcgtttgaagtcatcggtcggcttgacaccatggtatgatccrtgacatgccctgaaatttctgcctctgcaacctggaggatgcatttaggcagtagaatatacgtattatgtataaaggatatttttaatgatgaatggaa

SEQ ID NO: 148816 - DNA, 201 bp, Homo sapiens
gtgattttaggccatgaggcagccggcatcgtggaaagtgttggagaaggggtgactacagtcaaaccaggtacaggattcacactcagggaacatgcctkggttcaccatcacaagattagtcagcctggatgaggaaaccgaggcaatgaaagacgaaaggacttgcacaaggtcacagggaagctgggacttcagggg

SEQ ID NO: 148817 - DNA, 201 bp, Homo sapiens
tagttggaattgggtgttatatgagcaaacaaaataaatacctgtgcaacatacctgctttatgcactcaagcagagaagaaatccacaagtactcaccarcctcctggtctgcagagaagacagaatcaatatgagcacagcaggaaaagtaagcaaaaaatatattactgttgataatatattctcttcaatataacaa

SEQ ID NO: 148818 - DNA, 201 bp, Homo sapiens
gttttcaacttcaaatagtgtttctttgaaactcacaaaactatcatactagatactttatccgacaaatattcttgaggaaggaaagacactagcacccrcagagcaccagctgttctactaagtgtcttacatgcattttctcatgtgattcccaaacaacgctcagtgtcagtctcaatctcattatcttagagaaga

SEQ ID NO: 148819 - DNA, 201 bp, Homo sapiens
ttgatttctaagtagatattactagattttcctttttcttttcttttctttgcagtttagaaaaaaaaatttactaagaaaagttgttgtaaaagagaagrgtactaaaccctattttaaatatttgtcttacattttctccaagtcttagaaaaataagccaattctatttcctacctctaacacttacacttacaatca

SEQ ID NO: 148820 - DNA, 201 bp, Homo sapiens
cacctgcagagattctcatttaattggcatgggctatgacctggactgtgggatgtttttaaagctccccagatgaatctaatatgcagcagtttcagaaytactcaactaattcaaccccttgaatttaaacatgaagcatttcaagccaaaacaggtttcgataacagattggacagaagagtctgagtagttcttgat

SEQ ID NO: 148821 - DNA, 201 bp, Homo sapiens
tattcagaagtggtaaatttcaagcagaaattctttaaaggctcctcatctgagtagactgaaaatctagtagtatgttttattttatgaaacctagatckagagatataaagatatttgcccaaaatctgacttctgcttaatatgagcactaagactaaaatatcttttacaaatctcctgctgaatgtcaaatcacaa

SEQ ID NO: 148822 - DNA, 201 bp, Homo sapiens
actccttggactatcacatggaagcatgtgggttgtctaaatgttaacacaatgtctcttctttcctattgcagtatccgtaccgtcctgacgttttgaarcaatacagatgccttcccttgtagcagttttcagcctcctctaccctacatgatctggagcaacagctaggaaatatcattaattctgctcttcagagat

SEQ ID NO: 148823 - DNA, 201 bp, Homo sapiens
cctgtcatataagtaagtgtgacatctaatgattgtatattaaaattattttcaggacatcctcagcatattcattatgggagtaggtggaactacattgrgattgatttctaagtagatattactagattttcctttttcttttcttttctttgcagtttagaaaaaaaaatttactaagaaaagttgttgtaaaagaga

SEQ ID NO: 148824 - DNA, 201 bp, Homo sapiens
gtcattcagccttctttaaaagagaacactcactttggcccccatccccctccaaaaaaagtttaagcaaccagaattataacatggaatcactgacacckctgcctgtcatataagtaagtgtgacatctaatgattgtatattaaaattattttcaggacatcctcagcatattcattatgggagtaggtggaactaca

SEQ ID NO: 148825 - DNA, 201 bp, Homo sapiens
tctgcaggtgataaagtcatcccgctctttactcctcagtgtggaaaatgcagaatttgtaaaaacccagaaagcaactactgcttgaaaaatgagtaagyttctgatgctttctttgcacagactttgagtttgcacattagttatggtcctgtctcatgcctttgtgtgtctttgtattgcactgcccagtctaggcaa

SEQ ID NO: 148826 - DNA, 201 bp, Homo sapiens
gatttaagtgaaaaaaatgcatgaagcatgtgacaaatagcaaaaacttattgcatgttattatctattgttattttatattccttattataccaggaacktgggcacgccaaaatgattttttgaagatgctaatgtagatctgaagtctaaatgacaggcatactcaggaggttttgagtgagcttaagattgaagaaa

SEQ ID NO: 148827 - DNA, 201 bp, Homo sapiens
tctgggcatttgctacatccacagcattatcctatgcaaagaaagggggaatgaaggagcaaaagacatgatctcttccctctacacactcacaatccagytaagcctattacatgatattgtgcattatgagtatgaactatgccactccacgttaaggatactaaatgttcactttattccagatggcttccctgttat

SEQ ID NO: 148828 - DNA, 201 bp, Homo sapiens
aaacctccaaaaaaaacctagatcctttgttccagcaataccatttctagaaatctattctatagaaataatcaactcaaacatacatatatgtttaagcrtgtttatttactatcagtaatatcaatatttagaaacattagaaaagtccaacattaagaatatgatttaataaattctaagcaactgttagaaatgaaa

SEQ ID NO: 148829 - DNA, 201 bp, Homo sapiens
tgtaatgatgtttgcctctttattcctttattaggaagaactaagggcacacaaatttattcgtccatgctttcattcaaaaaccattttctgggcatttsctacatccacagcattatcctatgcaaagaaagggggaatgaaggagcaaaagacatgatctcttccctctacacactcacaatccagctaagcctatta

SEQ ID NO: 148830 - DNA, 201 bp, Homo sapiens
cagaagacactattgagcaacaaaagaaggcatggagcatgcctaaattcactttacaagaatgtcatatagtaatacgcatatgtaaataaaatcttatyaataagcaaagaataaaaattgtgatatcaatattggtaagagtaaggtgacttggatgctttcatatactttcatagtaattgatacatccttttggga

SEQ ID NO: 148831 - DNA, 201 bp, Homo sapiens
ccattttctaactacagaacatgttccaaaagctgactggaaaagattttctgaactgtcttttgaggttcccaaataatcagtgtaatttaatgtaaaaycaatatacatttggggaggtaaaaacaatgtttaaaacatgtccacttgagaaatggacataggaatctgttaaaaagggaggctatcaagtggacaaga

SEQ ID NO: 148832 - DNA, 201 bp, Homo sapiens
aatagagatgaccaaaaccagaagacactattgagcaacaaaagaaggcatggagcatgcctaaattcactttacaagaatgtcatatagtaatacgcatrtgtaaataaaatcttatcaataagcaaagaataaaaattgtgatatcaatattggtaagagtaaggtgacttggatgctttcatatactttcatagtaat

SEQ ID NO: 148833 - DNA, 201 bp, Homo sapiens
aataaatgaaggatttgacctgcttcgctctggaaagaggtagattttaagttgtttttttgttttgctttgtattctacagtagcggcgggggggggggsgttgtctagcagagaatgaaaaggtggaaggatgagaaaaaattacagtgccttggttttccattgccagttcaatctttgcatggagcacatgtaaggt

SEQ ID NO: 148834 - DNA, 201 bp, Homo sapiens
agggtctcactctgtcaccaggctggagtgcagtgatatgattatggctcactgcagccttaacctcctgggcttaagtgagtttcctacctcagcctccraaagtgctgagtacagacatgagcaaccatgctgagcctcagttggcattattgatatgaaatactatttccaatcttgcagtgcttatgtcatctttga

SEQ ID NO: 148835 - DNA, 201 bp, Homo sapiens
aaataaatgaaggatttgacctgcttcgctctggaaagaggtagattttaagttgtttttttgttttgctttgtattctacagtagcggcgggggggggggcgttgtctagcagagaatgaaaaggtggaaggatgagaaaaaattacagtgccttggttttccattgccagttcaatctttgcatggagcacatgtaagg

SEQ ID NO: 148836 - DNA, 201 bp, Homo sapiens
tattttcttcttttcaggctttaagagtaaagaatctgtccccaaacttgtggctgactttatggctaagaagttttcactggatgcattaataacaaatdttttaccttttgaaaaaataaatgaaggatttgacctgcttcgctctggaaagaggtagattttaagttgtttttttgttttgctttgtattctacagta

SEQ ID NO: 148837 - DNA, 201 bp, Homo sapiens
caagtactaatttagactgtgaaaagaaaataataaaataaactgtccaatttgagttttagctctatttcctttactcagaaaaaaattaatatcaaaaygactgccttatttctcacccctcctccttccaccataacagtaaaaatagataattcacaaattaccagctaaaaacacttgaaagtcaattcttatcct

SEQ ID NO: 148838 - DNA, 201 bp, Homo sapiens
ttatttggaaaatcttctcttcaattctcctacttaccctggttgaatctatcaatgatattttcttcttttcaggctttaagagtaaagaatctgtcccsaaacttgtggctgactttatggctaagaagttttcactggatgcattaataacaaatattttaccttttgaaaaaataaatgaaggatttgacctgcttc

SEQ ID NO: 148839 - DNA, 201 bp, Homo sapiens
ttatggattactaattattttatcttcaatatttattttacctaatcttattatgtattaatataaatattactatattaattaaggatgaataactaggrcatttccataccatcgttttcatatgaactttacccataaaatgttatgcaccaatcatttttcttggtcttgtgaaatagatagcataggtgattaaaa

SEQ ID NO: 148840 - DNA, 201 bp, Homo sapiens
aaaaacatgaacttcccttcacttgacttgacccaaatgcatagggatgggaatggagtggctgagaacacagagagattttcactaagtcacctcaaatrctccttggactatcacatggaagcatgtgggttgtctaaatgttaacacaatgtctcttctttcctattgcagtatccgtaccgtcctgacgttttgaaa

SEQ ID NO: 148841 - DNA, 201 bp, Homo sapiens
gaggttttgagtgagcttaagattgaagaaaacacaagagaaaaccaaaaaacatgaacttcccttcacttgacttgacccaaatgcatagggatgggaakggagtggctgagaacacagagagattttcactaagtcacctcaaatactccttggactatcacatggaagcatgtgggttgtctaaatgttaacacaatg

SEQ ID NO: 148842 - DNA, 201 bp, Homo sapiens
agaatccaaaatcaaagaactaatcattatatacctagagggatcctaaaccattttctaactacagaacatgttccaaaagctgactggaaaagattttytgaactgtcttttgaggttcccaaataatcagtgtaatttaatgtaaaaccaatatacatttggggaggtaaaaacaatgtttaaaacatgtccacttga

SEQ ID NO: 148843 - DNA, 201 bp, Homo sapiens
tttctcatgtggaactggagtgtacattatctcaagacaccaaatgtctgacagccacatgttctgaggatgtcagtctcccaaagatcagaatccaaaaycaaagaactaatcattatatacctagagggatcctaaaccattttctaactacagaacatgttccaaaagctgactggaaaagattttctgaactgtctt

SEQ ID NO: 148844 - DNA, 201 bp, Homo sapiens
actcagggaacatgccttggttcaccatcacaagattagtcagcctggatgaggaaaccgaggcaatgaaagacgaaaggacttgcacaaggtcacagggmagctgggacttcaggggtttcctccttccctctctgcttgcctgactcaagcatgtatgacttcaggcaggcatgcgtgtattctacccttcaaccatta

SEQ ID NO: 148845 - DNA, 201 bp, Homo sapiens
gaaaaagtctccagaaacaaaaaagtttccattgctgaggttttctagaaggtccagcagtgtgggtaacagggagcagcaccctgagatcaaagttcccrgcagccttgacctgggacaaatgccacagaggaataaagtatcaagagaatccaattttttccagggctatagcttttctccttatgctctttttctata

SEQ ID NO: 148846 - DNA, 201 bp, Homo sapiens
gcatgtaaaatactttgtgcaacacaactcatcatgtggttagcttccaataaatgtcagcagcccccttttttattttattttatttatttatttatttwtttttttttttgagacagggtctcactctgtcaccaggctggagtgcagtgatatgattatggctcactgcagccttaacctcctgggcttaagtgagtt

SEQ ID NO: 148847 - DNA, 201 bp, Homo sapiens
tagcaaatctattcactttctattaaaccacaccacccctcaagagtgtgtatatatatatatatatatatatatatatatatatatatatatatatataraaaacagtattcatcaaaggttaattatcattgtcattattattatcattgacatcatcatagaattgataagatgatggcaaatagagatgaccaaaac

SEQ ID NO: 148848 - DNA, 201 bp, Homo sapiens
tgagaagtcttccattcaatcagctaagcaaacctgtctcaagtcatatttcctcgagaaaagaaaaagggcttgttttttttaacacagccactacaaawatgctttattaatttttagtttaaaatgcaaacttaaatatatataaataatacaaatcattttctcaaattaaaaagttttatttttcttttacattct

SEQ ID NO: 148849 - DNA, 201 bp, Homo sapiens
gcttgtttaatttattgttatgagaagtcttccattcaatcagctaagcaaacctgtctcaagtcatatttcctcgagaaaagaaaaagggcttgtttttyttaacacagccactacaaatatgctttattaatttttagtttaaaatgcaaacttaaatatatataaataatacaaatcattttctcaaattaaaaagtt

SEQ ID NO: 148850 - DNA, 201 bp, Homo sapiens
tatttttaatgatgaatggaaatttcccgtcatctttttgttacctggcttgtttaatttattgttatgagaagtcttccattcaatcagctaagcaaacstgtctcaagtcatatttcctcgagaaaagaaaaagggcttgttttttttaacacagccactacaaatatgctttattaatttttagtttaaaatgcaaac

SEQ ID NO: 148851 - DNA, 201 bp, Homo sapiens
catatctcatggcattgtttatgaaacgcatgagacaatgcatgtaaaatactttgtgcaacacaactcatcatgtggttagcttccaataaatgtcagcwgcccccttttttattttattttatttatttatttatttatttttttttttgagacagggtctcactctgtcaccaggctggagtgcagtgatatgattat

SEQ ID NO: 148852 - DNA, 201 bp, Homo sapiens
ttttaccacccgcaaaagttaagagctacatatctcatggcattgtttatgaaacgcatgagacaatgcatgtaaaatactttgtgcaacacaactcatcrtgtggttagcttccaataaatgtcagcagcccccttttttattttattttatttatttatttatttatttttttttttgagacagggtctcactctgtca

SEQ ID NO: 148853 - DNA, 201 bp, Homo sapiens
aaaaaataaatgaaggatttgacctgcttcgctctggaaagaggtagattttaagttgtttttttgttttgctttgtattctacagtagcggcgggggggsgggcgttgtctagcagagaatgaaaaggtggaaggatgagaaaaaattacagtgccttggttttccattgccagttcaatctttgcatggagcacatgta

SEQ ID NO: 148854 - DNA, 201 bp, Homo sapiens
actgaatgcatcaaccctcaagactacaagaaacccattcaggaagtgctaaaggaaatgactgatggaggtgtggatttttcgtttgaagtcatcggtcrgcttgacaccatggtatgatccgtgacatgccctgaaatttctgcctctgcaacctggaggatgcatttaggcagtagaatatacgtattatgtataaag

SEQ ID NO: 148855 - DNA, 201 bp, Homo sapiens
taaagtggaatatttttcagtctcctggagtagccttttccacttattttattttccgaatattgccttggtgtatgtatgagatactgaagctggctatsaagggatttcagcaattgagagtccctacaagattgtaatcactgtcatctggatctcaaagatcatccagtcccctggttcccagcctgacccattgga

SEQ ID NO: 148856 - DNA, 201 bp, Homo sapiens
acccaaaacgaaggctgactatgggagactaggtttagtaaataaccgctagccaatttacacaatttagaggacatcttttccaaatttcggtgactttrgcacttactcccttgttcaattgcctcatctattttaatgggtagtctaagtgagcctacccaagaacagaagctgaggatactcataacaacagatttt

SEQ ID NO: 148857 - DNA, 201 bp, Homo sapiens
aaacctagatcgagagatataaagatatttgcccaaaatctgacttctgcttaatatgagcactaagactaaaatatcttttacaaatctcctgctgaatstcaaatcacaatccataattattagcacttttaaaccacagtcacaaacaagccttgtatttttctaagtaaggtagaaagtggtgttgtcccccatagt

SEQ ID NO: 148858 - DNA, 201 bp, Homo sapiens
aggatggcaccaggaggttcacctgcagcgggaagcccatccaccacttcgtcggcgtcagcaccttctcccagtacacagtggtggatgagaatgcagtrgccaaaattgatgcagcctcgcccctggagaaagtctgcctcattggctgtggattttcgactggttatgggtctgcagtcaaagttgccaaggtagaaa

SEQ ID NO: 148859 - DNA, 201 bp, Homo sapiens; identical to SEQ ID NO: 27635

SEQ ID NO: 148860 - DNA, 201 bp, Homo sapiens
taattcctgcatagaaatttaagaagaatttgttttattcctctgcaggtgataaagtcatcccgctctttactcctcagtgtggaaaatgcagaatttgyaaaaacccagaaagcaactactgcttgaaaaatgagtaagtttctgatgctttctttgcacagactttgagtttgcacattagttatggtcctgtctcat

SEQ ID NO: 148861 - DNA, 201 bp, Homo sapiens
ttccattgaggaggtagaggttgcacctcctaaggctcatgaagttcgcattaaggtgaaatactttttccatttgtatttaattttaagtttaaagaatkcagaaaatattaaaaatagaaacatccaaaatccactagaggtattttttatataattatccagaaaataaaattacatttgttgtcaaggaaagtataa

SEQ ID NO: 148862 - DNA, 201 bp, Homo sapiens
gtataattaaaaaaacattcaaaaaaaataaaataaaataaaaaagaataacctaaatgaatatattccattttatctaagtgccttattgtacttaactytgtttatctttccttatgttattgcttttttaaaagatactcttattctctttataaaccagaggacttcatttctatgcaacacttgttaggtgccaga

SEQ ID NO: 148863 - DNA, 201 bp, Homo sapiens
tattatgtataaaggatatttttaatgatgaatggaaatttcccgtcatctttttgttacctggcttgtttaatttattgttatgagaagtcttccattcratcagctaagcaaacctgtctcaagtcatatttcctcgagaaaagaaaaagggcttgttttttttaacacagccactacaaatatgctttattaattttt

SEQ ID NO: 148864 - DNA, 201 bp, Homo sapiens
gttattttatattccttattataccaggaacgtgggcacgccaaaatgattttttgaagatgctaatgtagatctgaagtctaaatgacaggcatactcargaggttttgagtgagcttaagattgaagaaaacacaagagaaaaccaaaaaacatgaacttcccttcacttgacttgacccaaatgcatagggatgggaa

SEQ ID NO: 148865 - DNA, 201 bp, Homo sapiens
ccctgaaatttctgcctctgcaacctggaggatgcatttaggcagtagaatatacgtattatgtataaaggatatttttaatgatgaatggaaatttcccrtcatctttttgttacctggcttgtttaatttattgttatgagaagtcttccattcaatcagctaagcaaacctgtctcaagtcatatttcctcgagaaaa

SEQ ID NO: 148866 - DNA, 201 bp, Homo sapiens
atactagatgtgcgaccagagcaaattacaaatctttctaagtctcagtttttataatctctaaatggaaataatatggaaaccaacttcctatcgtcatkgtttaggttgagatttaagtgaaaaaaatgcatgaagcatgtgacaaatagcaaaaacttattgcatgttattatctattgttattttatattccttatt

SEQ ID NO: 148867 - DNA, 201 bp, Homo sapiens
cccctggcatgaacacacatatgtattcagaagtggtaaatttcaagcagaaattctttaaaggctcctcatctgagtagactgaaaatctagtagtatgytttattttatgaaacctagatcgagagatataaagatatttgcccaaaatctgacttctgcttaatatgagcactaagactaaaatatcttttacaaatc

SEQ ID NO: 148868 - DNA, 201 bp, Homo sapiens
atacatacctcaggcaccataggttctgctaggctctgacagcaaaagtaaatgaaatgaagcgtttgcccttgaggaccatctagtctgtggatcctctmctcccagaattaggatcaacagtagagtccaaaaccttacctgatgcacctcgaaaccaaggctcacccactctgtggattcttagacggaaagtaataa

SEQ ID NO: 148869 - DNA, 201 bp, Homo sapiens
gtggatcctctcctcccagaattaggatcaacagtagagtccaaaaccttacctgatgcacctcgaaaccaaggctcacccactctgtggattcttagacrgaaagtaataaagactcagtgatgcataattcactcattatgacatttcactgctaaaactaactcccctggcatgaacacacatatgtattcagaagtg

SEQ ID NO: 148870 - DNA, 201 bp, Homo sapiens
tataatttgtgcaaatttgtatttgggtttgaatcccaacaccctatactagatgtgcgaccagagcaaattacaaatctttctaagtctcagtttttatmatctctaaatggaaataatatggaaaccaacttcctatcgtcattgtttaggttgagatttaagtgaaaaaaatgcatgaagcatgtgacaaatagcaaa

SEQ ID NO: 148871 - DNA, 201 bp, Homo sapiens
caacaattagagagcacctatacatacctcaggcaccataggttctgctaggctctgacagcaaaagtaaatgaaatgaagcgtttgcccttgaggaccakctagtctgtggatcctctcctcccagaattaggatcaacagtagagtccaaaaccttacctgatgcacctcgaaaccaaggctcacccactctgtggatt

SEQ ID NO: 148872 - DNA, 201 bp, Homo sapiens
tcttaaaagtgttcatcaaaagttggtttatagaaaaggcattaattctagtgtaaatgttacatttctaatcttcacaagaatgaagtagcttagaattratacaaatcagctttattctctacttctaagaatccttaaacatctctgtatcaaaggtctattaaacctccagcatggtcctaactttattaaattatc

SEQ ID NO: 148873 - DNA, 201 bp, Homo sapiens
aatcaacaattagagagcacctatacatacctcaggcaccataggttctgctaggctctgacagcaaaagtaaatgaaatgaagcgtttgcccttgaggascatctagtctgtggatcctctcctcccagaattaggatcaacagtagagtccaaaaccttacctgatgcacctcgaaaccaaggctcacccactctgtgg

SEQ ID NO: 148874 - DNA, 201 bp, Homo sapiens
ttttcgactggttatgggtctgcagtcaaagttgccaaggtagaaatgacaatggatgataaaaccggttacacgcagactgtcaggaaccaaaagggaakcaatttcttgcaagaatcagaaattatttttgtagatttgaagtgtcgattaagagtagaaaaatgacccagaaagaactgagagcacaggctagaaatt

SEQ ID NO: 148875 - DNA, 201 bp, Homo sapiens
gaaaaaataaatgaaggatttgacctgcttcgctctggaaagaggtagattttaagttgtttttttgttttgctttgtattctacagtagcggcggggggsggggcgttgtctagcagagaatgaaaaggtggaaggatgagaaaaaattacagtgccttggttttccattgccagttcaatctttgcatggagcacatgt

SEQ ID NO: 148876 - DNA, 201 bp, Homo sapiens
ttttgaaaaaataaatgaaggatttgacctgcttcgctctggaaagaggtagattttaagttgtttttttgttttgctttgtattctacagtagcggcggkggggggggcgttgtctagcagagaatgaaaaggtggaaggatgagaaaaaattacagtgccttggttttccattgccagttcaatctttgcatggagcac

SEQ ID NO: 148877 - DNA, 201 bp, Homo sapiens
gcaaaagtaaatgaaatgaagcgtttgcccttgaggaccatctagtctgtggatcctctcctcccagaattaggatcaacagtagagtccaaaaccttacytgatgcacctcgaaaccaaggctcacccactctgtggattcttagacggaaagtaataaagactcagtgatgcataattcactcattatgacatttcact

SEQ ID NO: 148878 - DNA, 201 bp, Homo sapiens
ttatatgtatacttacagcaaaaatatttagttaagatttaattagacaaggattacataaattatatctgcaaagcctccaggataaattagtgcactgygtaaaattttattaacacagttgatggaatttttttaatccatcttgtttcccacacttgtattttctctttaggattcttcaggcacttataaacccaa

SEQ ID NO: 148879 - DNA, 201 bp, Homo sapiens
ataaacctagtctctttgaaaagccaagacctatgttaaaaatctcatttttgttgtaaatcaaattcttacaaaataccagatcttcccaacatctactrggactaaaataggctactttcaactaaaatttatatgtatacttacagcaaaaatatttagttaagatttaattagacaaggattacataaattatatct

SEQ ID NO: 148880 - DNA, 201 bp, Homo sapiens
gaaattttcagacgaatttctgtaattcttctttgtcctatttttgttagttttcctcaaaaaagaactaagatctttttgaaaacattcattttataatwaagataaacctagtctctttgaaaagccaagacctatgttaaaaatctcatttttgttgtaaatcaaattcttacaaaataccagatcttcccaacatct

SEQ ID NO: 148881 - DNA, 201 bp, Homo sapiens
atagcataggtgattaaaaataaaatttgtctttaaagaatcactttagccaatggattcgacctgtccacttaccaagtactaatttagactgtgaaaakaaaataataaaataaactgtccaatttgagttttagctctatttcctttactcagaaaaaaattaatatcaaaacgactgccttatttctcacccctcct

SEQ ID NO: 148882 - DNA, 201 bp, Homo sapiens
attatgtattaatataaatattactatattaattaaggatgaataactaggacatttccataccatcgttttcatatgaactttacccataaaatgttatrcaccaatcatttttcttggtcttgtgaaatagatagcataggtgattaaaaataaaatttgtctttaaagaatcactttagccaatggattcgacctgtc

SEQ ID NO: 148883 - DNA, 201 bp, Homo sapiens
tatggacactgttctgtgctgagttcacaaaatggaggctgcatggttatggctgaagaaacatgacctttccttaggtgacctatgcagctccttcaccratttcctcttccaacatggtctctcttcctgagcatggaatcaatgaaactgactaggtgaaagaaaatgaaagaaacatagcaggagccatccaccatc

SEQ ID NO: 148884 - DNA, 201 bp, Homo sapiens
catgtgtgagccacaatgcctggcctaggtaacagctttaattaaaaattctgtttcattaatataaaatatgagctaattctttatgattcttaaaagcmaacaaaaaaacgcatgaagcatgtaaaaacaaggtatataataaaatagttttctcacagccatcacgaaaagtcaaggtcagtgaaattattgcaaatt

SEQ ID NO: 148885 - DNA, 201 bp, Homo sapiens
cagatgtttatcctttatatgcacttaaataaacgagatgaagacactgaaatttgaaccactgttgagaatacattaaaaactgaataaaatcataaagkcaggtcatagttcaataaaattaggaaatataaacaataatcaactggcatggaaaaaagtaaatattgaaaggtagtaagcaatttctagttcactaaa

SEQ ID NO: 148886 - DNA, 201 bp, Homo sapiens
aatacaaagttccaagcagtgattaccagacctctcaacttggccacggatagcatttctactactctatctaaatcttatatggcaaagcagaagaaatmtccacataaaagtttctttatttgcaaaatccccatgtttttctaataagcaagatgaatgcatagaaatttgcagttgcttttaataaattagactctt

SEQ ID NO: 148887 - DNA, 201 bp, Homo sapiens
cataagatctcttgagacctatttactgtcaggagaacaatacggggaagactcgcccccatgattcagttacctcacaccaggtccctcccaccacacaygggaattatgggagataagatttgggtggcagcacagccaaactgtaacatgaatggataggtgaatagagtactttatcctgacaaactacaaggatga

SEQ ID NO: 148888 - DNA, 201 bp, Homo sapiens
atgaactccattagcataagcttaagtcagtaactttaaaaccatccactgtcaaggaaaaatataagaaaagaaaaaaattctagagaagaaggggaaakaggaaagggaagaaacagagaacagattaaaacaaaataatttagatgtttttgctggtaataagagaaatacttgaatttgcagatgtacctggcaaat

SEQ ID NO: 148889 - DNA, 201 bp, Homo sapiens
acgtcttacgggagggcaggcaagagagcttgtgtaggggaactgccctttataaaaccataagatctcttgagacctatttactgtcaggagaacaatayggggaagactcgcccccatgattcagttacctcacaccaggtccctcccaccacacatgggaattatgggagataagatttgggtggcagcacagccaaa

SEQ ID NO: 148890 - DNA, 201 bp, Homo sapiens
aagaatttgttaatgttcattttatttttaatattatgggttttcaaaatttataatactttcaagtataaaatatacataaattttgttaagaaaaaaarcagttgagtttctaaaacattttcacatcatccttgctgataagttacagaaaaaaagtttacttttgaatgaaaatggctaataatattacatctaaac

SEQ ID NO: 148891 - DNA, 201 bp, Homo sapiens
gtgtttatcattcaaacatcaaaagtacacaagcatatagtaaaatgtccccagagtgcaaggactgagaatttaaaggccagtgaaattgcacaggaaakggtgtggcaggaaaaaggatatatatgcaggagtatatactttatatgaacttatataaactagatgaagagatttgggaatttgatagcattaggtttc

SEQ ID NO: 148892 - DNA, 201 bp, Homo sapiens
gaaagttattgaaatcatcaaaatagtataagttggggaaatagaaataaaataatgatgtatatttcaaagatgtctcaatcacatttccccttttattrtaactatcataatctaagtgtaaaaataagataaaaattatattttaaactgtaaaaacacattatacagaaaaatatagaaagaaataagaatttgtta

SEQ ID NO: 148893 - DNA, 201 bp, Homo sapiens
agaattcaagagtgagagattgggacattggacagtgttatgtttatataatgtatctaggtagaaatttaagttaaacccctaaatattagttgatatartgattttacttgagcttcatatggaataatttaaaatttttaaataatttaaatttttaaatgatttaaattttacttgagattccatatgaatctcaat

SEQ ID NO: 148894 - DNA, 201 bp, Homo sapiens
aatattagcatttctgctctttaggctttatctcacttttccaataactatattttgtcttatatatgttaaaatctatataaaataaaaaaattggtgayaatatttcttcttgatttaacataagcattgcactttttataatgattacttctttaaaacataaaatttcttattgtatcagtgtatataacttagaag

SEQ ID NO: 148895 - DNA, 201 bp, Homo sapiens
acatttagaaggtgtttatggtctacagatgaaacatttagatgctgtttatggtcaattactaacaaagcattataccagttttttaaagtccctagaaragagaggctgaagttctagaaaataggtggaggcaaaaaaaaaaaataataactttagaagagatatacattatctatggaatcaggaggcagataagga

SEQ ID NO: 148896 - DNA, 201 bp, Homo sapiens
cactccagcctgggtgatggagtgagactccgtctcaaaaaaaaaaagaaaaaaaaatgatagcgctacaaagtaaatatgccaccttctcttggggtcarttttactatgagactacctcatgggaaaataccagtagtattaacttacttaaataaacatgagtataatatggtgaagaatagatagacatttagggta

SEQ ID NO: 148897 - DNA, 201 bp, Homo sapiens
attctcataaggggcagacaacctagattcttcgcatatacagtttacaatagggttcacgcccctatgagagtctaaggctgccactgatctggcagaakgtggcgctcgggtgataatgcaagtgatgggagcagctgtaaacacagatgaagctttactggcccactgctcaccctctgctatgtggcctggttgcta

SEQ ID NO: 148898 - DNA, 201 bp, Homo sapiens
gataacctgggtcattccagaactgtaaatggttcaacacataaagtgcaggaataacaagatgaaacaatttataagagtaaactctcaaaaagcttgamtctgaagctaaagagaaaaattagggcagttgcttggattgggggcgggagtgggggtgagagtgacagaaaatgttatgaacatgggcatgagctaaac

SEQ ID NO: 148899 - DNA, 201 bp, Homo sapiens
agtgctacaggagttctgtagtgagtgcatttattatggatcagtgtactcacacgaggaacactttcccaagaagttgagggactgcatggattttacayggggaacaaggagagttcaagccttcataaagatgtctctcagtttttccataaagatttgttgattggagcactgagaataaacacccttaatctatta

SEQ ID NO: 148900 - DNA, 201 bp, Homo sapiens
tatagattaggctattgaaaatgtacccacagtcttctggggaagacacataaaccagttatgtaaaaatgcaaaggtattataaaaaagataaggacaayatattcttcagagatttagaggaagaaagactaccagagacaggcatgaataggaaaggcttgttattcataagattatagaattttatagtttgaagca

SEQ ID NO: 148901 - DNA, 201 bp, Homo sapiens
ttagtaataaaaatatttggaacagcaagtattgtaacagcttagcatcccaacattctgggaaagtataaataaatattaactagtgtcatcctcttccyccaaaaagcatgcttatccatattctctctgtgttggagacaacgacaactcttttcaagtcttatattaaatctgcttatttctgtgaacattttattt

SEQ ID NO: 148902 - DNA, 201 bp, Homo sapiens
cttgttgtagtaataaacccattacaaaaattgtcagatctgctgcatttccattggcaatggtatgattgaagttgctttgccatccaaatacaagtacraggatatacacttagggtaataacatgattgaatatcattaacattatacaaggaatttttaaaaagtcacattcctcagtgacagtaatggcttaggtg

SEQ ID NO: 148903 - DNA, 201 bp, Homo sapiens
taacagcttagcatcccaacattctgggaaagtataaataaatattaactagtgtcatcctcttcccccaaaaagcatgcttatccatattctctctgtgytggagacaacgacaactcttttcaagtcttatattaaatctgcttatttctgtgaacattttatttcaccagttttgcaagcagaaattagaatgccaaa

SEQ ID NO: 148904 - DNA, 201 bp, Homo sapiens
caatgcattgattcacattcttgcacaagctccttatcttctcatagacaagtactttgaaacacaatgagctagagtataggtgatgttgctgtaattaygccattcaaaaatacattggctaaataaaatgaagatgtatttctcactcatgtaactgtccagaagtaagcaggtagtcttggagctgcagacagttcc

SEQ ID NO: 148905 - DNA, 201 bp, Homo sapiens
atcttctcatagacaagtactttgaaacacaatgagctagagtataggtgatgttgctgtaattatgccattcaaaaatacattggctaaataaaatgaaratgtatttctcactcatgtaactgtccagaagtaagcaggtagtcttggagctgcagacagttccacgccacatgatcacctaggggctcagactgatac

SEQ ID NO: 148906 - DNA, 201 bp, Homo sapiens
tccagcctgggctacagatcgagactctgtctcaaaaaaaaaaaaaaaaaaaaaaaaaaagatatgtgtatctgtgtgcttacaaaatactcaaccacgtwtcatatgaaaattttcaaaaagtttataaaattgatcatgaaaatttgaattaatccacatttcattaacaacttaaaagttgttttcattaacttaata

SEQ ID NO: 148907 - DNA, 201 bp, Homo sapiens
tttcctatggacaatgaaatggcctttcacaatgctttatgaaattacaaatcatttcagttgttccctggttgagaaacttaaattaaatggaaaataawctacaatcaacagttgtttgaaactaagttagctctatcaacatcatcatcactcttacatgattacaagtaattttggagcctataggtgttttactct

SEQ ID NO: 148908 - DNA, 201 bp, Homo sapiens
tcctctgccatcgatactccaagcaccattgatttgatagatcatataacccaagtgacacagcagcttgcacagtagcctggacttactgcagagccttyttctgttctgaaccctactaaaaaatctcaaaaccagtagattttcaagtcattaagtcaatgtgctggagtaacacacatcagtgaggaatacattgat

SEQ ID NO: 148909 - DNA, 201 bp, Homo sapiens
cattctctgtggcgagataaattgtaattaatttgacaattaattggctcagattataatgagcctcctcagctaaagccactgtgttcctattatgatarccagcaaaagataccacaaaaaggtttcatatctaaagaatgactaaagagaaaaagaaataaaacaaaaatttgctattttcatgctccttatagaaat

SEQ ID NO: 148910 - DNA, 201 bp, Homo sapiens
aaaacagattgaataaagtatttgcaatattcggtgataaaccaataacaagttagtttcacatagaggaaaaatgtctcatgcactgagatagtagcctcttgtatgcctttcattggttataaggaagaaagcatgaaagctcagtaggtacaataagtcctcaaagaaagaaaattaaaggaatgcctgactcaaaag

SEQ ID NO: 148911 - DNA, 201 bp, Homo sapiens
cttaacctaatctcttcaaccctcataccatatatctgtaacaccaatgtaaagaaacccaattcagaatattttggtgagcattaaagagataaggagtrgaaagtagctaagacagagtttggccggtaagatagactcagcccatcttggtggtaaacaggatagaaagggaaaatcaggaaagtcctcgcagaagta

SEQ ID NO: 148912 - DNA, 201 bp, Homo sapiens
gacagaacaaggaacaaacccagaactatctatcttgaatgtttaaactctcttttaaacgacaagggcttggcttgagtttgaatcttaacttctgcacytactagtttaccttaacctaatctcttcaaccctcataccatatatctgtaacaccaatgtaaagaaacccaattcagaatattttggtgagcattaaag

SEQ ID NO: 148913 - DNA, 201 bp, Homo sapiens
tagcgatactaagatagttgtctaatatatggctaataagtgacagaacaaggaacaaacccagaactatctatcttgaatgtttaaactctcttttaaamgacaagggcttggcttgagtttgaatcttaacttctgcacctactagtttaccttaacctaatctcttcaaccctcataccatatatctgtaacaccaat

SEQ ID NO: 148914 - DNA, 201 bp, Homo sapiens
cacacaacagagaatgtggtagttaggagctcagtcacagcaagcctgtgcaggagagaggagccatcagcaatacttccctgaaatgatggtcttgataycctgttatagaactccctagatctcccttgtcagggagggattacatttagaacatcatgaaatcttaaggtgcccagctgtgagaattcaatgtactat

SEQ ID NO: 148915 - DNA, 201 bp, Homo sapiens
gagccagctcaagtttgcatttcaatatctatccttcccaattctcaatatgcactgttttttgttagacttgcccactatatagttttcaactatgactrtctcatgtctaccatgacctatttttcttagcttctatgcctttactaaaatacttttcctgaatctacccacattttaagttctactttttataagaat

SEQ ID NO: 148916 - DNA, 201 bp, Homo sapiens
aataaaatctattatatatatgtgcattttactcagaatgattaatctgagtatacttcattgcaagcacaacctcctaatgatacgttatctttcaaatyagctacaaaacaactgcatatgaacatgtattttcacaaattctcatgtaaatgataaattataatggaaccacataatgcgacaactttaaaatataac

SEQ ID NO: 148917 - DNA, 201 bp, Homo sapiens
catttatgacaaattcagtgatagttatcaaaggtttgttagtaccaaaaaatactttaacaaattttaatcacttatttagggaaagcaactttggaaargatttcaaaacatgaataaaaataaaatctattatatatatgtgcattttactcagaatgattaatctgagtatacttcattgcaagcacaacctcctaa

SEQ ID NO: 148918 - DNA, 201 bp, Homo sapiens
tacatgtaatcatctcgatgtttgcattccagttatatagtttgcatcttatattatagtgttatttagtactcatttatgacaaattcagtgatagttaycaaaggtttgttagtaccaaaaaatactttaacaaattttaatcacttatttagggaaagcaactttggaaaagatttcaaaacatgaataaaaataaaa

SEQ ID NO: 148919 - DNA, 201 bp, Homo sapiens
aatttcagttagagtttttatgatgcttaaagactactacattgacctctcaaaatgaaaatgcatttttcattttcacagtgtaagagaagttatagaartctacagtaaatagagttaattcctttcttagaaacttttgccaaattgagacatcagaatgtttctgctgagagttgctcaccctaaaacccataaact

SEQ ID NO: 148920 - DNA, 201 bp, Homo sapiens
tagtttaagggcaccaatagcagtggcacttgaagaactcccagatcccagtattgcccaggctggtcgtgcaatatttgctctatggctacttttcaaamtggacttttctgatatttgtgtgtgtgtttacatgcccttaaccataacttcagtagagtaatgttactaaacctaattaaggactattttttgaattac

SEQ ID NO: 148921 - DNA, 201 bp, Homo sapiens
taaattttaattttgattataagtctctcacagattatcagtaatagtttacttaatttcagttagagtttttatgatgcttaaagactactacattgacstctcaaaatgaaaatgcatttttcattttcacagtgtaagagaagttatagaaatctacagtaaatagagttaattcctttcttagaaacttttgccaaa

SEQ ID NO: 148922 - DNA, 201 bp, Homo sapiens
taccttcacttatatccagcaacttgaacatgcttcttacgtttgagaaattcgtgattatatgagtttccccctcatttacagatatcaaataattgttytccagcctccctcacagccaagtcatgggcatgcctactgaaagcagctattctgaaatacctctggctgactttgaatcagaagctagtgaatgaggga

SEQ ID NO: 148923 - DNA, 201 bp, Homo sapiens
gtaatgtcatttgtgtaatttaaacaattattttaataatttaaatatttataaatgccatgttgggactacactgaacaaagtaactttgtgtatctctstgtgtgtgtgtatttttgtgtgtgtaaatgttcatttgaaatactgctgctagaaaaaaaggtatcattattacataaactcccaaatttatacagtctt

SEQ ID NO: 148924 - DNA, 201 bp, Homo sapiens
tttcaattatttggttttgattttaatccctcaggattttattattaccgtattctatactcaagttcatttagactaactgacattttatcattttttamcttcacttatatccagcaacttgaacatgcttcttacgtttgagaaattcgtgattatatgagtttccccctcatttacagatatcaaataattgttctc

SEQ ID NO: 148925 - DNA, 201 bp, Homo sapiens
ttaagtcctttatagattccaatatcttatttcaacgtacccaaatataaattattctaaactactaattgaaagaagaaaattagctcatttcctttctrtaatgtcatttgtgtaatttaaacaattattttaataatttaaatatttataaatgccatgttgggactacactgaacaaagtaactttgtgtatctctc

SEQ ID NO: 148926 - DNA, 201 bp, Homo sapiens
tattcccttagtacttttatactattgttcttatttatttcaattatttggttttgattttaatccctcaggattttattattaccgtattctatactcamgttcatttagactaactgacattttatcattttttaccttcacttatatccagcaacttgaacatgcttcttacgtttgagaaattcgtgattatatgag

SEQ ID NO: 148927 - DNA, 201 bp, Homo sapiens
ttttttctttccagtctagaacgttcctctctaattactaccgagatcataatgtggaactatccaaactgctacacagactgggacagcctctgccatcrtggctgagacaggaactgcagaaagtgagatagcactggagacaagaactaagcctctcaagatacttttagtgttaaaaaaaaaataaatccaccttta

SEQ ID NO: 148928 - DNA, 201 bp, Homo sapiens
ttcttaatcctcactattttgccttccttttctgtttcaatgtttgctttttcctttgtgcgttcattccttctataatttttattttattctggtattckttccatgtcttcctaaaatatatgattaactaatgaagtgtcacttttttcctctcatataagcatttaatatcatttatttaaagattacaatttcaac

SEQ ID NO: 148929 - DNA, 201 bp, Homo sapiens
ccctccagtatctgtcattcccttctatgtgtccatgtgttctcatcttttagctcccacttataagtgagaacatttgttttttgcttttctgtttccawattagtttgctaaggataatggcctccagctacatccatgttcctgcagaggatatgatctcattcttgttatagtattccatggtgtatatgtactata

SEQ ID NO: 148930 - DNA, 201 bp, Homo sapiens
aaaatgtgaatatgcacatgacttattaggtacatttagggaaagggttagcctgagagtaacaacctaatatccaaatgatttaagaaatatgcataacmccttgaaattaatataaatagtatactaactcagtattattaggacactaatgttctaatggtgatgatctccaggttgaagctataaaaatcattgtta

SEQ ID NO: 148931 - DNA, 201 bp, Homo sapiens
gttctatttgacagaaattggctcacttcattttcccttttcttaatcctcactattttgccttccttttctgtttcaatgtttgctttttcctttgtgcrttcattccttctataatttttattttattctggtattctttccatgtcttcctaaaatatatgattaactaatgaagtgtcacttttttcctctcatata

SEQ ID NO: 148932 - DNA, 201 bp, Homo sapiens
ataacagatcgttatgatactttaaaactctctacccattgactatgtcacattttctttttgagtgttgttcatttttgttttctctcctgattgttctrtttgacagaaattggctcacttcattttcccttttcttaatcctcactattttgccttccttttctgtttcaatgtttgctttttcctttgtgcgttcat

SEQ ID NO: 148933 - DNA, 201 bp, Homo sapiens
catgtcagcagaggtttgtcaaattgattagctgttttaaaaaaatcagcttcttgctttatttttctctctattgtatttcttatctgaatatctgaatstgttctgctcatctttattgtttctttccttctaccatctttttattgttttattgctttttctagctttttaagatgaccgcttacattattagcttat

SEQ ID NO: 148934 - DNA, 201 bp, Homo sapiens
tcaagaacatacactggggaaaagatagattcttcagtaaccagtactggaaaaactggatagctgcatgcagaagaatgaaactagacccctatctctckccgtacacaaaataaaattaaaatggattaaagacttaaaactaagacctcaaactataaaactactaaaataaaacattggagaaactccccaagacat

SEQ ID NO: 148935 - DNA, 201 bp, Homo sapiens
ttactttgtttgcttacggtatattctttgttgttttgcttatggtatattctttctcttacaatctttatgagttatttgcagtttatattttcaaaaartatttcaattgccttgcttaaaaattctagttttgagttgttcataacagatcgttatgatactttaaaactctctacccattgactatgtcacattttc

SEQ ID NO: 148936 - DNA, 201 bp, Homo sapiens
tgtccaatacagtgaggtccctaagggagatttgtggggtctgtctttgttttgtgctgctattacagaataacaagactcggtaatttataatgaacagwaatttatttggcttgtggttgtaggaagtctagggacatagcaccagcatctgctaagggcctttgtgccgtgtcacccacggcagaaggcagaagagca

SEQ ID NO: 148937 - DNA, 201 bp, Homo sapiens
acgtcacttttttgctaccactggagaggcaacacatatcctgaatttcaagtgtatcatattcttagctttcttgttacttgtatcacataagaaagcamccctaaacaataaattgcttagtatctagatgttttaaatttgaatttatataaatatgttcctaccatacacattttcttcaaattgctttttctctta

SEQ ID NO: 148938 - DNA, 201 bp, Homo sapiens
ttgttatagtattccatggtgtatatgtactatattttctatatccatcctaccattaatagacatttagatcaattgcatatctttgctattttgaagartgctgcaatgattgtatgcatgtatgtgtctttgtaataaaatgatgtatattcctttgggtatatatacagttatgggattgctgggtcgaatggtagt

SEQ ID NO: 148939 - DNA, 201 bp, Homo sapiens
cctttccaatcacgtcacttttttgctaccactggagaggcaacacatatcctgaatttcaagtgtatcatattcttagctttcttgttacttgtatcacrtaagaaagcaaccctaaacaataaattgcttagtatctagatgttttaaatttgaatttatataaatatgttcctaccatacacattttcttcaaattgc

SEQ ID NO: 148940 - DNA, 201 bp, Homo sapiens
taaagaggtgggataaaatttgtatcaagtataagaaataacttatggattaacaaggagaaattaaaaaatgatgcagtgtacttagaactatggttaaraacctgagctttggaatctcaaactcctgtgttgtaagcctgatgcgttactctaagttatgcaatttctctgagttttaacttctttaccagttcattc

SEQ ID NO: 148941 - DNA, 201 bp, Homo sapiens
ttgtcagataaatagtttgcaaaagtttcttcccattctgtaggttgtctgtttactctgataaaaccaaatttcttatttcaatgttctttgtgagccarctcaagtttgcatttcaatatctatccttcccaattctcaatatgcactgttttttgttagacttgcccactatatagttttcaactatgactatctcat

SEQ ID NO: 148942 - DNA, 201 bp, Homo sapiens
ggactacaggtgcacaccaccacgcctggctaatttttgtatttttagtagagacaaggtttcaccatgttggccacgctggcatcaaacttctgacttcragtgattcacccacctcggtctcccaagttgctgggattacaggcatgagccaccgtgcccggccagaatacgagttttttgactgaagttaaatgctca

SEQ ID NO: 148943 - DNA, 201 bp, Homo sapiens
ctcaaaagaagacatttatgcagccaacaaacatatgaaaaaaagatcaacatcactgatcatcagagaaatgcaaatcaaaaccacaatgagaaaccatygcatgccagtcagaatggcaattattaaaaagtcaggaaacaatagacactggcaaggctttggagaaataggaatgcttttacactgttggtgggaatg

SEQ ID NO: 148944 - DNA, 201 bp, Homo sapiens
acaagtttaatttaactatcagtatctccatttcctgagatataaaatggagaattacaatagttcattttatacgggaattaagccctgaggctgaatgytttaaccaatgtaaagtacatagagtaaatatgcaataaaacctagccattttataattctcacaattgtaagtcttgatcacatctattattattactg

SEQ ID NO: 148945 - DNA, 201 bp, Homo sapiens
cttgctctatttattgcccaggctggagtatagtggcacaaactcagctcattacaacctccacctcctgggttcaagcaattctcctgcctcagcctccygagtagctgggactacaggtgcacaccaccacgcctggctaatttttgtatttttagtagagacaaggtttcaccatgttggccacgctggcatcaaact

SEQ ID NO: 148946 - DNA, 201 bp, Homo sapiens
ctttctgatgtgggcatttagtgctataaatttccctcttaacactgatgcagaaaatgcctttgataaaattcaacaccccttcatgttaaaaactctcmataaactaggtattgatggaacacatctcaaaataataagcactgtttatgacaaacccacagccaatatcatactgaatgggtaaaaggtgaacgcatt

SEQ ID NO: 148947 - DNA, 201 bp, Homo sapiens
atcagtattcttgccttttcccactggactatgagctcaataaaaacaaggacttgtcactcattgttcaacctcccactctcttctccccaaccatgtgrgcctcctagttcttcctctactacctcagacatgctttcttcccaagatattggtgttgcttgccacttctgccatatatgcctatggctcactatctcc

SEQ ID NO: 148948 - DNA, 201 bp, Homo sapiens
caatgccttaacctgtgccacaatcccatctctctctcctatgatattagtgaacagctctggctgctctatttttcaaccgctccttctctaaggcaatmttcacaccctattaacatgctcactgcttattcatcttaaaaacccttctttgacctcacatccctttctggttgcagctgttcttttcttctcctcctt

SEQ ID NO: 148949 - DNA, 201 bp, Homo sapiens
attgcttccctttataccagcaataaacaaatggaatttgaaaaaaaatactatttacattagcaccctgaaaatgaaatatttaggtataattctaatahgtgcaaaatttacgtgaggaaaactatgcaactctgataaaataagtcaaagaataactaaattaatggagaattattccatgtttgtgtataggaagac

SEQ ID NO: 148950 - DNA, 201 bp, Homo sapiens
caaggacttgtcactcattgttcaacctcccactctcttctccccaaccatgtgggcctcctagttcttcctctactacctcagacatgctttcttcccamgatattggtgttgcttgccacttctgccatatatgcctatggctcactatctccttctctttaaaactctggtaagatcccaatagcttagaaacacctg

SEQ ID NO: 148951 - DNA, 201 bp, Homo sapiens
actctttactgcctcttttgttgttatttctggttctccctcagaattatttttatttttaatttttaattgacaaaaacagtatatagttttcatgtacwacataatgttttgaaatatgtgtaaataatgaaatgtttagatacagaaaaatgacataggaattaattatcccagatacttatcattttttggtgaaaa

SEQ ID NO: 148952 - DNA, 201 bp, Homo sapiens
aacaaattgtcactcactgctactcaaaataatattcaaaagtcactgatggctatcttaagtgacataactccaaatagaatacaataatttaacaaagrcttgagcaatgtcacacatggagagagaatcagaaaggctatgtgtgtgtgtatgtatttattagtatgtgttcatatggatagaattatatcctatata

SEQ ID NO: 148953 - DNA, 201 bp, Homo sapiens
ctaaaaatatagcatttcctagtttcaggctaaagatcaatatgagttaaaaagttctttatatgtctaaatgaacttaaccagctcaaattcaactattkcactttttctcaatagaaaaacaaattgtcactcactgctactcaaaataatattcaaaagtcactgatggctatcttaagtgacataactccaaataga

SEQ ID NO: 148954 - DNA, 201 bp, Homo sapiens
aggcttaacaagaggacagttacttcaaaaggttctttgagtggttggttcctatcttcacacgctaaaaatatagcatttcctagtttcaggctaaagawcaatatgagttaaaaagttctttatatgtctaaatgaacttaaccagctcaaattcaactatttcactttttctcaatagaaaaacaaattgtcactcac

SEQ ID NO: 148955 - DNA, 201 bp, Homo sapiens
tgaaccaatgaactctgtttttaataagttcctatgaagcactgcttgactgtgacccaaatatttcattttgtgactgttaagaagagataaagtgaccrcaattgagttctatccagatttttctcattttttcttttacttttttagtatgtattatttcctttaattagtataaatgacagttttctttttattttt

SEQ ID NO: 148956 - DNA, 201 bp, Homo sapiens
  misc_feature (1)...(201): n = A,T,C or G
atatatttgttgggaaagagggaacaaggatgaatgtcaaagatgtgaaggtaagcttatttatagacaacatcgaaatttgtatttcacaatatggtacngataaaatattactaatatgatagattattaatccctaaagttttaaggtgcagtagagttgaaataagatagccatttagaaaaatattgaaccaagac

SEQ ID NO: 148957 - DNA, 201 bp, Homo sapiens
tgtaattttttttgtattttctcttattatttattactatcaacattatgttagtcttataaaataaggttgacagctattactcttatcatttctctgamaacagattgtgttaggttggaattacattattctttgaagttttgatgagatcttctgttgacatcagtgactggaggtttctttctggaaatatttttg

SEQ ID NO: 148958 - DNA, 201 bp, Homo sapiens
ataactggcttggtttatgtttgtttacaaattttacatcttatattcatgaattatgttgtttgtaattttttttgtattttctcttattatttattacwatcaacattatgttagtcttataaaataaggttgacagctattactcttatcatttctctgaaaacagattgtgttaggttggaattacattattctttg

SEQ ID NO: 148959 - DNA, 201 bp, Homo sapiens
ttatgttttattctttttatagataactggcttggtttatgtttgtttacaaattttacatcttatattcatgaattatgttgtttgtaattttttttgtrttttctcttattatttattactatcaacattatgttagtcttataaaataaggttgacagctattactcttatcatttctctgaaaacagattgtgttag

SEQ ID NO: 148960 - DNA, 201 bp, Homo sapiens
gttaatgctttaaaagccctgggggaagtccactgggatattttctggttggttttctatgctttgtcattctctgtggcgagataaattgtaattaattygacaattaattggctcagattataatgagcctcctcagctaaagccactgtgttcctattatgatagccagcaaaagataccacaaaaaggtttcatatc

SEQ ID NO: 148961 - DNA, 201 bp, Homo sapiens
aatcctatttccaaataaggtcacattctgagatactgggggttagaaaatcaacatattaattttagaggggaaataattcaacctataatggctgcttscaactttgtcattatgttttattctttttatagataactggcttggtttatgtttgtttacaaattttacatcttatattcatgaattatgttgtttgta

SEQ ID NO: 148962 - DNA, 201 bp, Homo sapiens
acagtattagataattacggagctgagagcaatttcttgaaacaccagggaagaagacaattaatgtccatgagttccatttcactagtcaagttgtagcmattgtctatgtgaggaaaagaaagtattaagaagtattttggtaaaaaaaaaaagtattaagaagtatttggtaagaagctagcaaagtctgagcaaggt

SEQ ID NO: 148963 - DNA, 201 bp, Homo sapiens
gtggtagggaaggatctgttccagatctctcttctggcttctggtagttccttggcttgtggcattctcccagtgtgcttgtctgtcacatttctcccttytataaagacagcagtcatattagactaggggcctaccctactacagcatgacctcaccttaactaattacacctgcaacaatcctatttccaaataaggt

SEQ ID NO: 148964 - DNA, 201 bp, Homo sapiens
atacaatgtcatcactattgttttcagcctggatgtgttcattaaaatgtatagaatcagacagaggtaaagatgctggaaggatgaggagtttgatttayggtctcataattttaatgggttaaggtctaatgatttaacatgggcatccatatttgtcttctgaaacaataaatgtagattttctggccccattgggtt

SEQ ID NO: 148965 - DNA, 201 bp, Homo sapiens
gtgatcatgctgtaagatttgaatgaggtgggaacatgcaaagaagggctggaattcttggtagacagctgtctctgacattgtgttgggagccttgatgwatttttaaaaattcaactaactttgcaatccacagataaagtattagtttgttagggctgccataataaagcactaaaacctgagtgccttaaacaacag

SEQ ID NO: 148966 - DNA, 201 bp, Homo sapiens
ttctagggcagtggatcagcctaagctcagacttggctgaaaatatcaggacatttttgagaatggtaagttgcctgtgttaattgaattataaggtaaawgagaaatagtgggactaaatgtgggtgctgtttgtggccagaatataaatcccctattctgttatagaacgtttgcctttattctgttgaaaataggata

SEQ ID NO: 148967 - DNA, 201 bp, Homo sapiens
attgaccatgatttctgctaagcacactgaaaggtttcaagaaaaagagagggtagggaataggatcacaaacagtattagctaggtggataaggaaagtycttggagtgctgagtgtctttggtaactgatatggccggggataaatggcataatgaaggaagttgtgaggctcctgtttgatgagttaagacctgagga

SEQ ID NO: 148968 - DNA, 201 bp, Homo sapiens
ggcagtgtattctagggcagtggatcagcctaagctcagacttggctgaaaatatcaggacatttttgagaatggtaagttgcctgtgttaattgaattayaaggtaaaagagaaatagtgggactaaatgtgggtgctgtttgtggccagaatataaatcccctattctgttatagaacgtttgcctttattctgttgaa

SEQ ID NO: 148969 - DNA, 201 bp, Homo sapiens
aatcatttcaccatgtaaggaaatactttttctgatgattgaccatgatttctgctaagcacactgaaaggtttcaagaaaaagagagggtagggaatagsatcacaaacagtattagctaggtggataaggaaagtccttggagtgctgagtgtctttggtaactgatatggccggggataaatggcataatgaaggaag

SEQ ID NO: 148970 - DNA, 201 bp, Homo sapiens
attgtataaaagtacattttaaaataagaattaaaaagttgagaaaatacataccagtaataccttttcctttgtgaatctgtctttattatagagttcayacaaatatgtaaagtattcagttcctgatttcagtagtagagacaggacatattcacagttatctgcattacaaggcagaatgcaatatatatcatgcca

SEQ ID NO: 148971 - DNA, 201 bp, Homo sapiens
gacagtgggatttagtcagttttgttttaaaaaatgtacatcatgaaataaaagagtgtaaaatgatttgagagtatataaaatagaattaatataataawtgattatggaatttaaactgggtaagggggattgtgaggccatgagagagagagtgtaaagttaaaggataaatgacttaaagattttagaggtttgaaa

SEQ ID NO: 148972 - DNA, 201 bp, Homo sapiens
ccacttaaaaaattgccaaaattgtataaaagtacattttaaaataagaattaaaaagttgagaaaatacataccagtaataccttttcctttgtgaatcwgtctttattatagagttcatacaaatatgtaaagtattcagttcctgatttcagtagtagagacaggacatattcacagttatctgcattacaaggcaga

SEQ ID NO: 148973 - DNA, 201 bp, Homo sapiens
aaatgtaatattatgtatatggtgtaatagattgttagtattacacacacaaccaagcagggtttaggaagtgtaaggagggagcttgcaattttgcaccsggaaaccggaaacaactatactgaggatattacatttgaataaaagattaaaagaaatgaggacatctgccatgtttatatctggttcacaagtattcta

SEQ ID NO: 148974 - DNA, 201 bp, Homo sapiens
gttgatcaaggagaaaaacaggcagtatcaaaggcttataataagaatggtttatattccatgtaaacaaagagtatcactgtgtcaattaaattgttttrgtaagtagaattttgcttgtttgaaaagagaagctctattttcatgtattttggcagtcagcagtgacctcagagaacctcaaacttacttgcaagagga

SEQ ID NO: 148975 - DNA, 201 bp, Homo sapiens
agcaatacttccctgaaatgatggtcttgataccctgttatagaactccctagatctcccttgtcagggagggattacatttagaacatcatgaaatcttwaggtgcccagctgtgagaattcaatgtactatttgaaagtcctcagttgatcaaggagaaaaacaggcagtatcaaaggcttataataagaatggtttat

SEQ ID NO: 148976 - DNA, 201 bp, Homo sapiens
atcttgagaaaaatggcatagacagcagtggcttactcctggaggaaatgtgggattggataattacatcacaatgtggagtttgacatagggcacacaayagagaatgtggtagttaggagctcagtcacagcaagcctgtgcaggagagaggagccatcagcaatacttccctgaaatgatggtcttgataccctgtta

SEQ ID NO: 148977 - DNA, 201 bp, Homo sapiens
cataatacaccgtcttctcaaggttgcatggaacagtaaccaagataggtcacattctggggcataaaacacaccgtacagaatttaaggaaaaaaaaaaatcatatagtgtctgatctcagactatagtggaattaaactagaaatcaataatagaaagatagctagaaaaccccaaaatgtttggagattaacaacaca

SEQ ID NO: 148978 - DNA, 201 bp, Homo sapiens
catcatattcaaactacaaaaaacaaaatttaaaaaattctgaaataagttatagggggaaacagaggagcaaagataagaattacatttgatttctcttcagaaaacatgcaagcaaggagagaacaaagtgaaatatctaaaatgttcagacaaaaagcaccaacctataattctgtactgtgagaaatatcctttaac

SEQ ID NO: 148979 - DNA, 201 bp, Homo sapiens
acatcatattcaaactacaaaaaacaaaatttaaaaaattctgaaataagttatagggggaaacagaggagcaaagataagaattacatttgatttctcttcagaaaacatgcaagcaaggagagaacaaagtgaaatatctaaaatgttcagacaaaaagcaccaacctataattctgtactgtgagaaatatcctttaa

SEQ ID NO: 148980 - DNA, 201 bp, Homo sapiens
cacatcatattcaaactacaaaaaacaaaatttaaaaaattctgaaataagttatagggggaaacagaggagcaaagataagaattacatttgatttctcttcagaaaacatgcaagcaaggagagaacaaagtgaaatatctaaaatgttcagacaaaaagcaccaacctataattctgtactgtgagaaatatccttta

SEQ ID NO: 148981 - DNA, 201 bp, Homo sapiens
cgcacatcatattcaaactacaaaaaacaaaatttaaaaaattctgaaataagttatagggggaaacagaggagcaaagataagaattacatttgatttctcttcagaaaacatgcaagcaaggagagaacaaagtgaaatatctaaaatgttcagacaaaaagcaccaacctataattctgtactgtgagaaatatcctt

SEQ ID NO: 148982 - DNA, 201 bp, Homo sapiens
gaatacataatttagggattttatagggcagtatattaactaggttgaggctacccacataccacacactgatttgttgcagaaaaaaaaaaaaaaggaakaatttttatgctgcaactaaatttttgacagggtagatgaagaaagaggattcaaacaaatcattacaggctgtcttttgtttgtttgtttgctcatctg

SEQ ID NO: 148983 - DNA, 201 bp, Homo sapiens
tatcccagtataggttgttagaagcatccaggtcactttttttgggcgggggttggtgggggcggaagagagttttgctctattgcccaggctggagtgcmgtggcacaatctcagctcactgcatcttccgcctcccgggttcaagcaattctctgtctcagcctcctgagtagttgggattacaggcacccaccaccat

SEQ ID NO: 148984 - DNA, 201 bp, Homo sapiens
ccaattagcaatgaactggtccagggaatacataatttagggattttatagggcagtatattaactaggttgaggctacccacataccacacactgatttsttgcagaaaaaaaaaaaaaaggaagaatttttatgctgcaactaaatttttgacagggtagatgaagaaagaggattcaaacaaatcattacaggctgtc

SEQ ID NO: 148985 - DNA, 201 bp, Homo sapiens
gataagccacatttggaaggatagaaggtaaaaataagaaaacaaaaatgagaacaggaaaatcaacacctacaaaagcctccctttttttcttatcaaarcctgtgcaggggtcatgaagcccacattttgtgacaggttgtcatgaaaataatgagtagatctctccttccaaatttttaacgaaagatttattagaac

SEQ ID NO: 148986 - DNA, 201 bp, Homo sapiens
ttgtgtgaagctaaatattatttgtgtaattctatccaagatggataagccacttaagctttatttccaccaattagcaatgaactggtccagggaatacwtaatttagggattttatagggcagtatattaactaggttgaggctacccacataccacacactgatttgttgcagaaaaaaaaaaaaaaggaagaatttt

SEQ ID NO: 148987 - DNA, 201 bp, Homo sapiens
gctaccagagattactagaaatttaccatgattatgtggcaaatgaactttgcaaactgtattttagagaatctctaaacacattttgaaaatgtcaaaakgcaatcttataacagatatataaaacaatagtgttaatatcatcatataatattttctaatcttgaaagagagtcaaagattctaggagatatttattcc

SEQ ID NO: 148988 - DNA, 201 bp, Homo sapiens
aattgttaagaaatccccattaacatatcacagagaggttcaatttgtgtgaagctaaatattatttgtgtaattctatccaagatggataagccacttamgctttatttccaccaattagcaatgaactggtccagggaatacataatttagggattttatagggcagtatattaactaggttgaggctacccacatacc

SEQ ID NO: 148989 - DNA, 201 bp, Homo sapiens
catcctctgaattataggcggaggttctcaaacttcaattcttgatttctgtgtgccaacaggcccaacaccacatgaaagccaccaaggcttggggcttrcaccctctgaaacaacagtcagagctatatgttggccccttttatccacagctggagtagcctgaggcacggggcaccaaatcccaagctgcacacagca

SEQ ID NO: 148990 - DNA, 201 bp, Homo sapiens
acttgtcacagatttgtgttttctcttctttttcaaatctctcttttctcctcaaaatctaaatcctctcattttttaatggctaaaacaatttacatccytctccaacccgtctcctaatgacgtcagtccatgggaatctccactctctctgaaatctcatatcgcttacagagttctcacctgctaataagcatatat

SEQ ID NO: 148991 - DNA, 201 bp, Homo sapiens
tcccagaagcataaagaggaattaacatcacaatgtcaatatttaacatacagtccttattttaaaagaatatttgtggtattcttatttttgaaaaaaaatataattttatttttttttctgtggcctgtaactccattgtcaaaaattggatatgggttgagttgtaagagctcaataatttatcaatgctcattgaaa

SEQ ID NO: 148992 - DNA, 201 bp, Homo sapiens
ataagtaaagaaagagcagagtcttggtagaatggaatgtccagtggcctagaggtacacagactccaagttctcttccccactcagcctcttattgactrtaagaaggggaaacatctatttaaacactgcgcacctcattttctttattttaaaatgacattaattataattaacttttttttttttgagacagagtct

SEQ ID NO: 148993 - DNA, 201 bp, Homo sapiens
cacagtagggactgtgggggggtggctacaaccccacatttcccttccacactgtcctagaagaggttctccatgaaggctctgcccctgcatcaaacttytgcctggacatccagacatttccatacatcctctgaattataggcggaggttctcaaacttcaattcttgatttctgtgtgccaacaggcccaacaccac

SEQ ID NO: 148994 - DNA, 201 bp, Homo sapiens
tggggaaactaatggttgtgctctccgcagcattagtctggtgggccgatcaactctaacattctgtctttgggtcactcttctgaataattacatacctrggaaagagtcttgctagcctagtttgactgtatgctgaccccttgatcaaggcaaggcaagccataagcatcccactgagacctcatgcaatgccagaaa

SEQ ID NO: 148995 - DNA, 201 bp, Homo sapiens
cagttggtattcagtgtctgtggctttttcaagtacatgatgcaagatgtggtgaatttaccattctggggtctaggggatgctggccctcttctcactargcagtgccacagtagggactgtgggggggtggctacaaccccacatttcccttccacactgtcctagaagaggttctccatgaaggctctgcccctgcat

SEQ ID NO: 148996 - DNA, 201 bp, Homo sapiens
catgagagcagcatgggggtaaccaccctcatgattcaattacctttcaccaggtcccttctatgacacgtaggaattatgagaactacaattcgagatgrgatttgggtgggaacacagagccaaaccatattattatggccctgcccctcccaaatctcatgtcctcacattttacccttccaacagtcctccaaagtc

SEQ ID NO: 148997 - DNA, 201 bp, Homo sapiens
taatatcataatattttttggcctggaagctgaaaggaattccatgggaccaaccatgtgatatcaaccatttcatagtctcaactactatttaatcaatwttggatattttccaaaaccactcagaatcataagagactgcattgatctttagctaaaacctttatgatatttataattcttttaaccagattaaataat

SEQ ID NO: 148998 - DNA, 201 bp, Homo sapiens
taagaactaagaaaatggtgaataggcactatacatatttctgcaggaaatggtgataaaagaaaccgcctgacatttactcttctatttactgagttgayttcataatcttttgaagtatgaatgtagctgatagctcagagctatgaacctagtataatattatgttacaatataatattatggtagtaatgttatcat

SEQ ID NO: 148999 - DNA, 201 bp, Homo sapiens
tggctgtcacagcaagtaacttctacctctaatcaaatatgtcaaatatacaactttattccaatctattgtctcccacactagatctgatttctttgaaragagtggttatgtcttatatcttttcatctccaggatctatctcagatctttgttctggaaagaagcttaaataatgcttgttaaattgtattgactgtt

SEQ ID NO: 149000 - DNA, 201 bp, Homo sapiens
taaaatatgtccttttgtgacttcatggtcatatttttatgctaatctacttagttgcaggaatataaagaaaagttggtgctaaactggtaaaagtcaayatagaacagattaagcacagtttcatattatcactgcttaaggtagacattttagcattactgtattaaatatgtatgtagtgtgtttcttattcttcat

SEQ ID NO: 149001 - DNA, 201 bp, Homo sapiens
agtatttttgtcgtttttcttttttttcttttgctgatccgagttcgtagacacactgtattctatcaacaggcctatgtttgagaatccctgggttgaarcttaagggatagaagaggggatgaatgtagacactggtaaatccaaagacctgagatggaaaaattgaagtgactgtgatggtctctccttcctttgaga

SEQ ID NO: 149002 - DNA, 201 bp, Homo sapiens
aaaagtctttaaatcctttttttaagttctattctgacattcctcattatcccttgatatgaccttggctgtcagagggattgtcagtctcaaaagcacayttgttctcatagcagttccaaaaatgattcaaacatattcagatatattaatagcttgatattgatatttcaaaaattgtattttttaaatacaatctat

SEQ ID NO: 149003 - DNA, 201 bp, Homo sapiens
ccatattttcatttttaagtcttcctctggactattgtaactaattattaactggtctcctacctgctggctttaatccaccctcttagttcctcaaaagrtaactttctaaaaggaaatgtttaccatgtcagtcttcacatcgaagtatttcaatagttgtccaattttaaacaaatttaaactctctagaatttgagt

SEQ ID NO: 149004 - DNA, 201 bp, Homo sapiens
gcgtgccaccatgcctggctaaattttttttttttttttttttttttttttttttagtagagactggttttcatcgtgttttccccaatctcctgaactcrtgatccgcctgcctcggcctcccaaagtgctgggattacaggcgtgagccaccgcgccctgccacaaaaagtatttttgtcgtttttcttttttttcttt

SEQ ID NO: 149005 - DNA, 201 bp, Homo sapiens
gtacaaagactttccatatttctctgtgtacaacttttcccaccaccatctcctacaatcaagaaaccagtactgacaggtcattatcaccccaagtccayagattacatcagggcacacacttggtgttttatatcctatgggtttcaacaaatgttgtattgtcattactttttaattatgtattaattttcatagtat

SEQ ID NO: 149006 - DNA, 201 bp, Homo sapiens
taaaaatagcaggtttacctgtgaaattgaatggagtatgcctcttatgataaagaataatccaatcattttgtgtgttgcgtaaaattaagaactctctraagtaaataaaaggtggaaaccataactacagggtttattaaatatatagttagaaaataatcaaaagaaaatatcagtatttcctatttgagtaagatt

SEQ ID NO: 149007 - DNA, 201 bp, Homo sapiens
ggtgaccttcaataaaaataatgactataataattataatacctgaaatacgaatactacataacagtacccatcaaaaacaagaaagctcatatcatttwgttttactcatgcatacacatttgcaaaagaggcatcccaaaacttcatatttatttttctaaaatcatgttaatttcttatttatttcaggcattacta

SEQ ID NO: 149008 - DNA, 201 bp, Homo sapiens
taagacctgggcaatggcccgggcttgcgggaatgagcatttatccaagatattcgacagtggagagagggtaccaaatctctggattcagttctatgggyagcagtcatcttgagaaaaatggcatagacagcagtggcttactcctggaggaaatgtgggattggataattacatcacaatgtggagtttgacataggg

SEQ ID NO: 149009 - DNA, 201 bp, Homo sapiens
gaagtctttatccacaccccttatagtgacacaatgtaaacacaagaaaccttcctggccaccatctgtctccttctcaaggcagtagtaatttcttccamaaaagcagtttggtaaacataataagctactttaaattactaattactaatgttaacccaggctgaaagtaaaaagatataaactatattctaagttttg

SEQ ID NO: 149010 - DNA, 201 bp, Homo sapiens
gttatgaacagaaaagaagaaacctattataaaataaaatcttaaaatttgattcctaatttgaataagggttgaatgagaaagaaaaaaaaaacctcaakattactaagtttgtgtctttagaaaataagacattatttatcctatgaacgttagtacagaagatgagaggctacactggtaaatgaaactattactttt

SEQ ID NO: 149011 - DNA, 201 bp, Homo sapiens
tagaattatttataagatgtaccattttataaagaaaataaaataatacatttcttgagtaagtgaaagtttgttttttattgtaaacatattattttackattcttttgagacagtccaagaaagataacatgtcaacattagaggaatgaataagaaaaataattttgctttccataaacttctaaattttaaagaatg

SEQ ID NO: 149012 - DNA, 201 bp, Homo sapiens
atttaagaaggactcttccattagtaatgtaaatatctgaaaaaaattccagtcaaaatatgtttaagaattatcatatcattaaacaggagacaggttgytatgaacagaaaagaagaaacctattataaaataaaatcttaaaatttgattcctaatttgaataagggttgaatgagaaagaaaaaaaaaacctcaata

SEQ ID NO: 149013 - DNA, 201 bp, Homo sapiens
aaagtttgatgacactaatacaatgctaatacaaacttagaatgcattaacagaaccatagtgtcaacatccaggaaacagttatctgtgatcctatttartacaagtctgacattatttggcctgttcatcattctcagtttcccgatgcctcatgttaatagcagtcttctatgaccttcctcttcccccatggtgaac

SEQ ID NO: 149014 - DNA, 201 bp, Homo sapiens
tactatatttaagaaggactcttccattagtaatgtaaatatctgaaaaaaattccagtcaaaatatgtttaagaattatcatatcattaaacaggagacmggttgttatgaacagaaaagaagaaacctattataaaataaaatcttaaaatttgattcctaatttgaataagggttgaatgagaaagaaaaaaaaaacc

SEQ ID NO: 149015 - DNA, 201 bp, Homo sapiens
ttactagggtgaacaaaatagctctcaggaggcttatattctcatggtagaaaactgacagtaaataaataaagaccccacggtagtgcctgtgagtgctmtaaagataagtcaaggtggcacattaaaagctgtatgtgaaagtgataggactggtcaggaaatgcctttctgataaggcagaaactcagtaaatccata

SEQ ID NO: 149016 - DNA, 201 bp, Homo sapiens
ataaggttactatatttaagaaggactcttccattagtaatgtaaatatctgaaaaaaattccagtcaaaatatgtttaagaattatcatatcattaaacmggagacaggttgttatgaacagaaaagaagaaacctattataaaataaaatcttaaaatttgattcctaatttgaataagggttgaatgagaaagaaaaa

SEQ ID NO: 149017 - DNA, 201 bp, Homo sapiens
gtgtcaggcaccatgcaagttactagggtgaacaaaatagctctcaggaggcttatattctcatggtagaaaactgacagtaaataaataaagaccccacrgtagtgcctgtgagtgctctaaagataagtcaaggtggcacattaaaagctgtatgtgaaagtgataggactggtcaggaaatgcctttctgataaggca

SEQ ID NO: 149018 - DNA, 201 bp, Homo sapiens
ataaaaaaagaaaaacaaaaaaaaaagaaaatgataaggttactatatttaagaaggactcttccattagtaatgtaaatatctgaaaaaaattccagtcmaaatatgtttaagaattatcatatcattaaacaggagacaggttgttatgaacagaaaagaagaaacctattataaaataaaatcttaaaatttgattcc

SEQ ID NO: 149019 - DNA, 201 bp, Homo sapiens
tcattactctaaagtgcaagtgaataattagaatcagaatttaaatttggtttctcaatcaatctttcactaatagttatgtcaattcaattgagattccmtgtactgtaataagtaaaataaaacacaatcaataaattatactaccaacttatctaaagtattatggttcctgataacacagtttttgaagtttctttc

SEQ ID NO: 149020 - DNA, 201 bp, Homo sapiens
cacattcaagaaatacagagatcaccactaagatactccatgagaagaccaaccctaagacacataatcatcagattctccaaggttgaaacgaagaaaamaatgttaagggcagccagagagaaaggtcaggttacctacaaagggaagtccatcagactaacagcagatctctgcagaacccctacaagccagaagaga

SEQ ID NO: 149021 - DNA, 201 bp, Homo sapiens
tataagacaaaagtagaaaacaaaatctgtattataaacttggagtccaaagctagcaggctatttggtttgattttccttcctacgtagtgttttcaatrgatatgaacctaggctggtattaaggcttgatctagatacaagtaatttactgatgtcttaacatgaacgttttcatgcctttattttactatgtatttt

SEQ ID NO: 149022 - DNA, 201 bp, Homo sapiens
ttaacattcataagcaacccaaaggccaactgccatgctagtggaagaaaaagagagaagggaaagtgatttcacacatttagatgctttggcttgattcyattcctgaatcagaaattcagttgtagactgctgatccacagaatttgtcatagttcatcagacacctcaaaagagttcttcttcttcttgatgtattga

SEQ ID NO: 149023 - DNA, 201 bp, Homo sapiens
aaggttgaaacgaagaaaaaaatgttaagggcagccagagagaaaggtcaggttacctacaaagggaagtccatcagactaacagcagatctctgcagaamccctacaagccagaagagagtgggggccaatattaaacacccttaaagaaaagaattttcaaacagaaaaaagaatttcatatttagccacactaagctt

SEQ ID NO: 149024 - DNA, 201 bp, Homo sapiens
gggtttacaggcgtgagccaccgcacccagccagaactgatttactttgtaaagaaagaataatttgaggatagttttgaacttcatcttgaagcaagtgrtttgtgtattttgcatataagacaaaagtagaaaacaaaatctgtattataaacttggagtccaaagctagcaggctatttggtttgattttccttccta

SEQ ID NO: 149025 - DNA, 201 bp, Homo sapiens
cttaacaaaaaaagcataactttaatattctatcttccagctcagggcaaattgaagccctagtagctgggccttaccattgacctttttccagtattccttttttttttttttttttttttgagatggagtctcgctccatcacccaggctggagtgcagtggcacgatcttggctcactgcaaccttggcctcctgggt

SEQ ID NO: 149026 - DNA, 201 bp, Homo sapiens; identical to SEQ ID NO: 27637

SEQ ID NO: 149027 - DNA, 201 bp, Homo sapiens
cggggtttcaccgtgttagccaggatggtctcgatctcctgatctcatgatctgccctcctcagcctcccaaagtgctgggtttacaggcgtgagccaccrcacccagccagaactgatttactttgtaaagaaagaataatttgaggatagttttgaacttcatcttgaagcaagtgatttgtgtattttgcatataaga

SEQ ID NO: 149028 - DNA, 201 bp, Homo sapiens
ggaggggtgggacaggtttccagctgcagtttatcttggcaatgacaacaggaacttgttcggtttgattctatttttattttttattttattttttttttatttatttttatttttttattatagtttaagttttagggtacatgtgcacattgtgcaggttagttacatatgtatacatgtgccatgctggtgcactgc

SEQ ID NO: 149029 - DNA, 201 bp, Homo sapiens
cagattaaactgtcttcccctacaactgcatggctattaaaaacaaaacaaaacaaaacaaaaggtctgttgggtttaatggcaccacacttggaacaggmgcatggatgctctgtgatctttggcaagaaacttcatttctcagaacttgcttgtacttctgaataacaaactagttgaattaatcctcaatgtacctca

SEQ ID NO: 149030 - DNA, 201 bp, Homo sapiens
tccacgaactttcccccagccactggcatcctactctctggatctatgagttcaactttttatttttattttttttatttttattttatttttttttttttgagaggcagtctcgctctgttgcccaggctggagtgcagtggcgcgatctccgctagctgcaagctccgcctcccgggttcacgccattctcctgcctca

SEQ ID NO: 149031 - DNA, 201 bp, Homo sapiens
atagacatctacagaactctccactccaaatcaacagaatatacattcttctccacaccacacagcatgtattctaaaattgaccacgtaatgggaagtamaacactcttcagcaaatgcaaaagaatggaaatcataacaaacagtctctcagaccacagtgcaatcaaattagaactcaggattaagaaactcactcaa

SEQ ID NO: 149032 - DNA, 201 bp, Homo sapiens
aaactttctgaatgtcagaaaccctggggcagatctaagcattcaaaaattgtttaatcctgtttaattctggtccacacattctgggcatttgattattrttttagtagtataagggtaaaattcagtgatgaaatcttagctataaatataaatacaaagttccaagcagtgattaccagacctctcaacttggccacg

SEQ ID NO: 149033 - DNA, 201 bp, Homo sapiens
tttatggtcaattactaacaaagcattataccagttttttaaagtccctagaaaagagaggctgaagttctagaaaataggtggaggcaaaaaaaaaaaawaataactttagaagagatatacattatctatggaatcaggaggcagataaggacagtgagaatttttcagtttgggaaacattagtgggagggagtcagc

SEQ ID NO: 149034 - DNA, 201 bp, Homo sapiens
gctagtatatgattcttgaaaaaaatgaaataatatagaaaatacaaaacagagacgatcaatattttgttgagcatccttccaaatcttccctgatgagkgtatacatggaaatagaaatataaaccattttatatccttcatttagaaaatgaagaaactgaagttcagactccttccatccaccacctttcccaacaa

SEQ ID NO: 149035 - DNA, 201 bp, Homo sapiens
tgttactaatctactgtgtgtctaatttagtattgggttatgcttgaaggaaaataaactaagtagcttattgtgaaaagagaagctttttatatagattrggctattgaaaatgtacccacagtcttctggggaagacacataaaccagttatgtaaaaatgcaaaggtattataaaaaagataaggacaacatattctt

SEQ ID NO: 149036 - DNA, 201 bp, Homo sapiens
aatcacttgcttttatggagcactttctgtgcaagcagaatcaatcctaagaagttactatgtagcatctcaattatttctcataaagtaggaagtagatrtgagtattagtttcattttacaaataatggaattgagaggtgaaggagaatctaaatggtcacaccactagtacacagcggaccaggatacaaatctaga

SEQ ID NO: 149037 - DNA, 201 bp, Homo sapiens
gatacgttatctttcaaatcagctacaaaacaactgcatatgaacatgtattttcacaaattctcatgtaaatgataaattataatggaaccacataatgygacaactttaaaatataactatgaacaatagaagttggtatccagaaagcctaatttacaaataaattataatgccattctaagtggaaattgtagccac

SEQ ID NO: 149038 - DNA, 201 bp, Homo sapiens
attggcaaataggtcacatcattatcctggataagcggaaaataggaggaagtgaaaaatatctaaatgactttgtccatggtagagacatttaagcaacraaatacaacattgctaggtcaggtagctgcctcataggtaccagaagtacctatttaatacaataccctgcagcaccattgatatttatgaactcatttg

SEQ ID NO: 149039 - DNA, 201 bp, Homo sapiens
ttatgtttgctttatcttgttttatcttcatgtcagcagaggtttgtcaaattgattagctgttttaaaaaaatcagcttcttgctttatttttctctctrttgtatttcttatctgaatatctgaatctgttctgctcatctttattgtttctttccttctaccatctttttattgttttattgctttttctagcttttt

SEQ ID NO: 149040 - DNA, 201 bp, Homo sapiens
taagctaatagctcatcactctttgagtctctaaatccccagaccaatgtcagatctgcacacaggattcttagtagtaaatgtagaaaacataaaaagtrgttaagatcaaggactcaggcaccagattatctgtttgaatcctcaccttccattgatggttgcttgaccttgaacaaatgacttagattctctatgtct

SEQ ID NO: 149041 - DNA, 201 bp, Homo sapiens
gtctgtcacatttctcccttttataaagacagcagtcatattagactaggggcctaccctactacagcatgacctcaccttaactaattacacctgcaacmatcctatttccaaataaggtcacattctgagatactgggggttagaaaatcaacatattaattttagaggggaaataattcaacctataatggctgcttc

SEQ ID NO: 149042 - DNA, 201 bp, Homo sapiens
aaaaattcaactaactttgcaatccacagataaagtattagtttgttagggctgccataataaagcactaaaacctgagtgccttaaacaacaggaatgtrttgtctcacagttctgggggctagaactagatcaaagtgacaacagggccatgctccctctgaaagtggtagggaaggatctgttccagatctctcttct

SEQ ID NO: 149043 - DNA, 201 bp, Homo sapiens
attcacatcgtattaggtatcataagtcatctagaattgagctagagtatacaggaggatgtgtataggctacatgcaaatactatgcgattttatacagrggtttcagtatctctggattttggtcctggagggttagggggtccaggaaccactccttatgacaagagatgactgtttcttttttaaaaaatttctcca

SEQ ID NO: 149044 - DNA, 201 bp, Homo sapiens
tatccatttcacaatctgagctaaaccatttaacatgatattacgtagaaaacttggtataagttttttgttaatgtatacattatagcaaattcctcctygagtagcagtaacagtttatcagaaagaaatgagatcaagatgagtaagaagaaaggtagagctataaaatgcaaattttaaaagcttcatattttcatc

SEQ ID NO: 149045 - DNA, 201 bp, Homo sapiens
tgcacaactaatacagatattgtccaaatagatgaatcctaaactttcaaaattagatccactttagtagtgcacacccagatgtcatttctatattcccmaaaatcctaggatcttagcatctaaaaaagaataataagcaaaaatatttgtaatgcctcagctaaaattataaataaaatatggagcctttgcaatatg

SEQ ID NO: 149046 - DNA, 201 bp, Homo sapiens
catgagtgttgagcacctacctccttgtaactgatttccatcagtttcaaacgctactagcattcatcccatacacacttattgatcactctgtgttctargtacttttaggctcatgggatgcatcatggtacaaagaaagacagaaaaaaagcaaggagatttgaggtgaagccaaatattccaagcgtgtatgtatac

SEQ ID NO: 149047 - DNA, 201 bp, Homo sapiens
caggatacaaatctagagctcctacaaggactcagaagcaagactgcttatgattaaatccacagtgcttcataacagctgttctattacctgctaattcytatggaagccaaacctataggcattcacaaaaacgcacaactaattaaatatctcagtgaagcaaataagtaaaaaatagatatatgaatccacccattc

SEQ ID NO: 149048 - DNA, 201 bp, Homo sapiens
ttcttaatgaatgaatatccaaataagaattataataaacttttaaatttatgatgataatattaatcacttgcttttatggagcactttctgtgcaagcrgaatcaatcctaagaagttactatgtagcatctcaattatttctcataaagtaggaagtagatatgagtattagtttcattttacaaataatggaattga

SEQ ID NO: 149049 - DNA, 201 bp, Homo sapiens
tgtgaatagtaaattactcttcattccaacaggtaaacatgtttgctgatataacttaatgtatttattttctttgcattgttatagtttgtctatattcrtcagtattcagaaaattcatgccatgaaataggttttaataaaataaactacacatgacaggctaaataatggttttcaggtgaccctttgaggtcattt

SEQ ID NO: 149050 - DNA, 201 bp, Homo sapiens
caattatgcaagttaacatttcaaaacacaggtttgtataacatttcaaaacacatagctaatgctatggcattagattacaacatagaataacagttgtycgtgacttttgataaaagaatcagaagtatatacttaaattacagatttggaagatattcttgaaagataataacattgacacataagattggcaaaaag

SEQ ID NO: 149051 - DNA, 201 bp, Homo sapiens
ttactcattcttttcaatattctttttgagaaagctaaataaggaaaattaaaccttatttttcttagaatttgtcctgattaataaaatactatattctwcagaattcctgtcatagtttttttaagtgattatatgttttgtttattatgataagttatactgtgagttctcatacagctttagaaagttttaagttta

SEQ ID NO: 149052 - DNA, 201 bp, Homo sapiens
aatccagtagtttaccttaattactaaaacaatgcacacaataaattcacacgcacatactctttcttttcttctaacatttatcatggtctaaaatgctrttattaacttcaggactatgtagcttactaatacttgtccgagtttcctattgctcattgttggcttttgttgagtttgtaatttttgtgtttaactggc

SEQ ID NO: 149053 - DNA, 201 bp, Homo sapiens
cacctgacctccataagcccgtactctgagtggtggaccacagaaacatttggtgtctcctggaattattgacagttcaaagtcagtctctatagtccctraaacatctgattatttccttttcttcagtacacattttccctggtcaaagactgtagatccttatggggcagattgggagaaagattaacagtgtgttat

SEQ ID NO: 149054 - DNA, 201 bp, Homo sapiens
gtccctgcataatcactgaccttaattctcagttagcatctttatgtatataagtcaactccaaaattaagaggtgacagtttttctcatacatctagttwtgcctcaaggaatgtattacacaaccttacaaatgattaaaaaatatttaattgacaattattatattgtcttttaactggtgagggcagaatcaattag

SEQ ID NO: 149055 - DNA, 201 bp, Homo sapiens
gatgctacattttgatatttaagtgcaagccctgtaaattgtggaacacaagttaaatgatttaaaaaattaaaacactttgagcaagtaattatttcctyttttctctcttgtgtattacatttcttcccagaaatgtccaaggtcatttatttcattttcccaacatgacagatgagaaaatgataaaagattacaaat

SEQ ID NO: 149056 - DNA, 201 bp, Homo sapiens
tgatcacctgacctccataagcccgtactctgagtggtggaccacagaaacatttggtgtctcctggaattattgacagttcaaagtcagtctctatagtmcctaaaacatctgattatttccttttcttcagtacacattttccctggtcaaagactgtagatccttatggggcagattgggagaaagattaacagtgtg

SEQ ID NO: 149057 - DNA, 201 bp, Homo sapiens
tctacccacattttaagttctactttttataagaatatgacacatcccctaatgactccagcagatggttatttctttttaacttgagtccctgcataatyactgaccttaattctcagttagcatctttatgtatataagtcaactccaaaattaagaggtgacagtttttctcatacatctagttttgcctcaaggaat

SEQ ID NO: 149058 - DNA, 201 bp, Homo sapiens
gttgacttgctttagaacatctcatgttcttataccacttcctcacaacttaccatctcaacatggtcccccaacacacacacacacacacacacacacayggcttaaaccaaataggagaaagagtgacagcatccagtgaattaccccagagtgacgataatttacagtgaggcactgaagctaacaggacagaaactg

SEQ ID NO: 149059 - DNA, 201 bp, Homo sapiens
tccttcccaattctcaatatgcactgttttttgttagacttgcccactatatagttttcaactatgactatctcatgtctaccatgacctatttttcttarcttctatgcctttactaaaatacttttcctgaatctacccacattttaagttctactttttataagaatatgacacatcccctaatgactccagcagatg

SEQ ID NO: 149060 - DNA, 201 bp, Homo sapiens
catgaataatattaggaagattaaatgacatggattctaaaaaggaaaactaatctgggtcttcttatccatggggaaaattgctttataatgtatctttscatcttccttttgaaatgaattgttgcttctatttgtgacatacagaactggtgcaacagtttcattgaaaatatatttgtaggggaaatgttaatttct

SEQ ID NO: 149061 - DNA, 201 bp, Homo sapiens
cccaagttgctgggattacaggcatgagccaccgtgcccggccagaatacgagttttttgactgaagttaaatgctcattatttctaatacttagatatawttggcctaagctatctacaatatatcttttttttggagaattattcatgccttatctcattttatcattctcttctccaaccaatgctactgagataaaa

SEQ ID NO: 149062 - DNA, 201 bp, Homo sapiens
catcttttatacaatattgccctctatgggaatattgtaaaatattgaatattttagcagggtgataagtatattctttcatacactcctgtgttcatcayatgatttttctttcctcttaatttaattactttgctctttcccaccctctaacaggtataaacagctgagctgacaaaaaaattcatcattgttttatta

SEQ ID NO: 149063 - DNA, 201 bp, Homo sapiens
acttgccatatagaaaggttaaaagcataactcttgttttatctatatattaccaagtggattataaagcacagggttttgaatggccacctgaaaggccrctctgcttacagagtaatgaaaaggggcattctccagggacgttcattcagacgactgtttggtatagtggaaagaccacagggctaaggattagtgagt

SEQ ID NO: 149064 - DNA, 201 bp, Homo sapiens
tttctgctttgaactccatatttactttaacaataaaatagcaaattgtttaagaatcaaagaatatgtttgctccaaggaaataggcagacctaaacagsgtaaaaaaaaaggttgaaatttactcacattttaaagagtattttaaaaaatttactatagatagaaacatttttaaatcatataacaatttctactgat

SEQ ID NO: 149065 - DNA, 201 bp, Homo sapiens
tatatgtccatagaaaaaatattctagtcacagtttttgctttttgactttattttttggacaaatataattttgtgggaaataatttcaattatgtgccmaaaagttttgacagtctcatattcttcattctcattttttttttctggtagtacaacattaacacactagtgcacaaggagaatttcatcctccttcaaa

SEQ ID NO: 149066 - DNA, 201 bp, Homo sapiens
atcattttttggtgaaaacacttaaaatctactcttttagtaattttcaagaatatgatatattgttactattagaatctactataggtttcttcaacttsttcttccaatcaaaatgaaattttgtgtactttaaccgaatctctccaacctcttcactctcaacctctgggaactaccattttactctctgcttctttg

SEQ ID NO: 149067 - DNA, 201 bp, Homo sapiens
agtataaatgacagttttctttttatttttgaaatcataggcttaacaagaggacagttacttcaaaaggttctttgagtggttggttcctatcttcacaygctaaaaatatagcatttcctagtttcaggctaaagatcaatatgagttaaaaagttctttatatgtctaaatgaacttaaccagctcaaattcaactat

SEQ ID NO: 149068 - DNA, 201 bp, Homo sapiens
aaacacaggatgagttcagggaactgctgggcctactgtgaaatggacttgagctaaaactccattgatcacctgacctccataagcccgtactctgagtrgtggaccacagaaacatttggtgtctcctggaattattgacagttcaaagtcagtctctatagtccctaaaacatctgattatttccttttcttcagtac

SEQ ID NO: 149069 - DNA, 201 bp, Homo sapiens
ataaacacaggatgagttcagggaactgctgggcctactgtgaaatggacttgagctaaaactccattgatcacctgacctccataagcccgtactctgaktggtggaccacagaaacatttggtgtctcctggaattattgacagttcaaagtcagtctctatagtccctaaaacatctgattatttccttttcttcagt

SEQ ID NO: 149070 - DNA, 201 bp, Homo sapiens
aactgcagaaataaacacaggatgagttcagggaactgctgggcctactgtgaaatggacttgagctaaaactccattgatcacctgacctccataagccygtactctgagtggtggaccacagaaacatttggtgtctcctggaattattgacagttcaaagtcagtctctatagtccctaaaacatctgattatttcct

SEQ ID NO: 149071 - DNA, 201 bp, Homo sapiens
cacctgaattttaccaggtcttgcctgcatttcacacagaaccatctgtaaacctggcatgagtcttctttctctctgtttgatgatcatagatattttcyaatgaggccataggtgcaggttgggagagaaatgtccatggtcctcatatcaattacacacaaaaactgtgtaattggtgtgacgccagtgggcatttgg

SEQ ID NO: 149072 - DNA, 201 bp, Homo sapiens
attacttaaggaaatgattccatctataaagatttttgcagaatttacataattcttatcaataaaatcgtaccgcatagatatgtaccttggaaaaatayatctttgtatttcaacccagggttactacatttgaaattacagaaactttaaattcaggcatcactttaaattatgtctctgcatattaacttctattcc

SEQ ID NO: 149073 - DNA, 201 bp, Homo sapiens
aagtttaattgacttaatacggcatatgaacatggagataggttaattctaatggaaaataattctgttatgagaatgatggcaggtaaggccagattgcmtaaatatctatatttgggaaaacaatagatatccccttgcagcaaaatataaaacactcccaaattttcactgagagcattcacgaagagtcatttccta

SEQ ID NO: 149074 - DNA, 201 bp, Homo sapiens
tagttttggagcagtaatagagtcctgcctttaggctcttagctactgtattatcctttgtggtttttctactccctgccatcacttttgtaaatcatccrtttattaaatttgcctctagttatctaattttaatgtggcatgcttcctgtgaggatcttaactaatgcaatgttcagttctcacccaatgtaatctggc

SEQ ID NO: 149075 - DNA, 201 bp, Homo sapiens
gaaaatatagatattagcaaaaacaaatcattttatagggaatgtggtattggattagcctcaggtagctttcattattatacctattatttattcattgmattatttgggaaaacacagcagtgttactggtagcacttctaggttttgatcaattgactgaataacagattcagcctgtgattgctactaaataaaaat

SEQ ID NO: 149076 - DNA, 201 bp, Homo sapiens
ttccactggtgccttcagagaatgtaattaacatgtttgaatatttttttgagccagcaggaaatgtgaacctgctactactcaagaataagcaggatccragtgtggtccccataagaaggaggatttttggctagggaccttatcctctggagcaaagtgaggagaggaacttgtggttagggcatttgaggcttttac

SEQ ID NO: 149077 - DNA, 201 bp, Homo sapiens
atttagaaaaatattgaaccaagacttaaccattctttacacacacatacacacaccagaagcttcagaatgggacagagctaaaatattaaaatatcccraagagttagtgaacttaatctctttgcctttttttttttttttttttttttctgaacagactcttgctctgtcgcccaggctggagtgcagtggcatgat

SEQ ID NO: 149078 - DNA, 201 bp, Homo sapiens
atctactatactctaggtagttaagtctagactgtaaacatcaggttgttaatattttagcatattaacactaaaattatcattgctatatatgtttcttkagcatcagcatttatatagaaataaatatttatatttctatttttatcttagttattacatctctcctctctttcagattatgcttagaggattctgcag

SEQ ID NO: 149079 - DNA, 201 bp, Homo sapiens
acatctgattcttggataaaaattgacaatgagtaagagttttaattcttattacaagagtaggcaaaattaggaaatatgctttgagactaacatgtcawtgttcttttcacctaagcgttctgtcctctgtttcattagcgagatctgagaatgcctgttcctgcaagaagaaggagcagtcctatgtatctgggctgt

SEQ ID NO: 149080 - DNA, 201 bp, Homo sapiens
cgtgagccaattaatcctttttttctttataaattttccagtctcaggtgtttttttagagcaatacaagaacaaaataatacaaatgcattctacattcwttttttttgaactaaaggaagtgatagagaaatagaacatctgattcttggataaaaattgacaatgagtaagagttttaattcttattacaagagtagg

SEQ ID NO: 149081 - DNA, 201 bp, Homo sapiens
accctcatttcatcattctttggaaccagcataatagtcaaatcagttcctcttaatgtcagatgatctagttgccatcacattttggaagtgaattgagttgagaaaatatacctcttaaacaattatgcaagttaacatttcaaaacacaggtttgtataacatttcaaaacacatagctaatgctatggcattagatt

SEQ ID NO: 149082 - DNA, 201 bp, Homo sapiens
tgcatagtattccatggtacatatgtgcaacattttctttatccagtctattaattatgggcatttgggttggttccaagtcttcgctattgtaaatagtkctgcaataaacctacatgtgcatgtgtctttatagtagaaagatttataatcctttgggtatatacctagtaatgggattcctgggtcaaatggtatttc

SEQ ID NO: 149083 - DNA, 201 bp, Homo sapiens
tttggttttctgttcctgtgttagtttgctgagaatgatggtttccagcttcatccatgtccctgaaaagaatgtaaactcattcttttttatggctgcayagtattccatggtacatatgtgcaacattttctttatccagtctattaattatgggcatttgggttggttccaagtcttcgctattgtaaatagtgctgc

SEQ ID NO: 149084 - DNA, 201 bp, Homo sapiens
ctaatgctctccctccctttgtccctgcagccccggtcaggccccagtgtatgatgttcccctccctgtatccatgtattctcattgttcaactgtaacttatgagtgagaacacatggtgtttggttttctgttcctgtgttagtttgctgagaatgatggtttccagcttcatccatgtccctgaaaagaatgtaaact

SEQ ID NO: 149085 - DNA, 201 bp, Homo sapiens
tggtgctttgctgcacccatcaacctgtcatctaggttttaagccccgcatgcattatgtatttgtcctaatgctctccctccctttgtccctgcagcccyggtcaggccccagtgtatgatgttcccctccctgtatccatgtattctcattgttcaactgtaacttatgagtgagaacacatggtgtttggttttctgt

SEQ ID NO: 149086 - DNA, 201 bp, Homo sapiens
cccgagtagctgggagtacaggtgcccgccaccgtgcctggctaatttttttatacttttagtagagatggagtttcactatattggtcaggctggcctcmaactcctgacctcatgatttgtctgcctctgcctccaaaagtactgggattacaggcgtgagccaccgctaagtactagtacccctttttttaaaaaaga

SEQ ID NO: 149087 - DNA, 201 bp, Homo sapiens
tcatcctccaaacttggataccttagcttatattaaaatttttttataatacttctgccaactcttgagacatattctaatgtatcagtaaagaccatgaytgacaaccaatattttgcatatttatcataatttcatttttatttttaaagttatatttgatgtatatattactttgagcctttaaaataaattttaaaa

SEQ ID NO: 149088 - DNA, 201 bp, Homo sapiens
acactcaaaaatatttagcaaacaatgaatagaaagagtgatgaattattcttctttgtaggcagtatagtgacaatcacataataggtatcccataaatrtttatagaattaataagaaattaaaatgtttaagaaattcaattttaataattaaattcaatgtaagcaatttaaaattaaagaatccagttcttgttaa

SEQ ID NO: 149089 - DNA, 201 bp, Homo sapiens
ccttctcctgcctaattgtcctggccagaacttccaacactatgttgaataggagtggtgagagagggcatccctgtcttgtgccattcaaagggaatgcktccagtttttgcccattcagtatgatattggctgtgggtttgtcatagatagctcttattattttgagatatgtcccgtcaatacctaatttattgagag

SEQ ID NO: 149090 - DNA, 201 bp, Homo sapiens
ccacctcccaggttcaagcaattctcttgccacagcttcctgagtagctgggaatacagacgtgtgccaccacacccagctttagtagagatggggtttcrccatgttggctgggctggtcttgaactcctgacttcaagtgatctgccctcctcagcctcccaaagtactgggattacaggcatgaagccatcctgacta

SEQ ID NO: 149091 - DNA, 201 bp, Homo sapiens
tctttacctggtgggatgacccacaccttcattctggaagggtcggagtcattagcagtcttgcctggattgggttgttgtacttttccattgataatcayagggcatggtaatactacaagatgccctaaggtatctcctgtattgcatacatattatccctttcctccattgtggagtactatccaatatcccccaata

SEQ ID NO: 149092 - DNA, 201 bp, Homo sapiens
ggaaggtatatatatggaatgtgtatagatgtggaaggtatatatatggaatgtgtatagatgtgggaggtatatatatggaatgtgtatagatgtggaasgtatatatatggaatgtgtatagatgtggaacgtgtatatatatggaatgtgtatatgtggaacgtgtgtatatatggaatgtgtatatgtggaacgtgt

SEQ ID NO: 149093 - DNA, 201 bp, Homo sapiens
gtcattagaagaggaatattttgggttgacttcacattcaatgtgtatagaatatctattatttaaactataacagcataataatcagaaatagctataartgaatattaaaatgttccaattatttcacattcagaatatggcaagaaaaattattttcagattaattaattgtctttctctgccttcaggtatatggac

SEQ ID NO: 149094 - DNA, 201 bp, Homo sapiens
ctttatcatcttaccatgcaccctgttccttagtgttcttactcaatattagggttttttttctatcctttaacttacacttcctgcaaagaatttaaatyccatttctattagtcagcaaactagtggacatttcctttttgatatttcacagacttttcaaaaatgatatattataatttactcattttctcctcacac

SEQ ID NO: 149095 - DNA, 201 bp, Homo sapiens
tacttgacttcactataccactggactgctttaacaccaccaccagtattctcttgattgacaaattcaagatcaattttgtgttgtatttcttgactcayaaatagtattcagcttttatcacaaatatttatttttatattatttacgtacagcttctactaccctcttccaccaacaccatttatttagtgttatttc

SEQ ID NO: 149096 - DNA, 201 bp, Homo sapiens
tgttatcattgatattttaataacttcttttgtgatttcttgaaattaaactttaatgttaaatattaggcaaaatcatttttctctctcctttatttacrcataagtcagctagcaaatttctacattctggtttcattcacttgtctctgtatcttatagtttttttgcctgtaagaatacaagggtcaaatgagcatt

SEQ ID NO: 149097 - DNA, 201 bp, Homo sapiens
caaagagggactcctccctaactcattttataaggccagcatcatcctgatatcaaaacctggcagagacttaacaaaaaaagcataactttaatattctrtcttccagctcagggcaaattgaagccctagtagctgggccttaccattgacctttttccagtattccttttttttttttttttttttttgagatggagt

SEQ ID NO: 149098 - DNA, 201 bp, Homo sapiens
ctgttatcattgatattttaataacttcttttgtgatttcttgaaattaaactttaatgttaaatattaggcaaaatcatttttctctctcctttatttayacataagtcagctagcaaatttctacattctggtttcattcacttgtctctgtatcttatagtttttttgcctgtaagaatacaagggtcaaatgagcat

SEQ ID NO: 149099 - DNA, 201 bp, Homo sapiens
aggtgcacccagattcatataacaagttcttaaacacctacaaagagacttagactcccacacaataatggtgggaaactttaacaccccactgtcgataytagaacaatgacagaaaattaacaaggatatccaggaattgaactcagctctggactaaatggaactaatagacatctacagaactctccactccaaatc

SEQ ID NO: 149100 - DNA, 201 bp, Homo sapiens
tctcaaatcagctaaataaatatctgtaaaaatgaattaaattaaatcagtgggcatacaaaaatacatttcctttattcaattggtgaggctgtctcackgaaaattctgcatacaatttgtaatcattatgttttatgtactgtaggtttgatccccaaaagggtttttggtgtcaattactggaaggaggaaagacaa

SEQ ID NO: 149101 - DNA, 201 bp, Homo sapiens
gtggaaggtatatatatggaatgtgtatagatgtggaaggtatatatatggaatgtgtatagatgtgggaggtatatatatggaatgtgtatagatgtggracgtatatatatggaatgtgtatagatgtggaacgtgtatatatatggaatgtgtatatgtggaacgtgtgtatatatggaatgtgtatatgtggaacgt

SEQ ID NO: 149102 - DNA, 201 bp, Homo sapiens
ttggtgctattctccctttgtgttcatgataccttttgtccatacgaatctctttagcaaatgatggatggctacacccttgtttcttctccttaacacasttttttactcttttcatggccaggctgcaaattttacaattttttacattctgcttctcttttaattaaaaattccatctttaattctttgtttctctct

SEQ ID NO: 149103 - DNA, 201 bp, Homo sapiens
gccttttctttttctcattaatttatacataattatattgtattatttatctagtaaccccaatatctgatgttcttggtggtctaaatgtttttttttttcctttttccttcctgctgacttttactcatggtgtcttgtttcctaacatgtttggtatatttggttttgaatttcatctatcaaaatacataggagtgt

SEQ ID NO: 149104 - DNA, 201 bp, Homo sapiens
tctgggcaaattctggagtatttaattccattaaaaaccaacaatcttacattctaaacagcagtgtatgtatgtgtcatggtgtgtgtgtgtgtgtgtgkaatgcttcattttcaaagcagtacttggcaaggaggcaggtataatttatgattgattatatagattcttacctgtttacatgcattaggtcactttgca

SEQ ID NO: 149105 - DNA, 201 bp, Homo sapiens
cattagattctcataaggggcagacaacctagattcttcgcatatacagtttacaatagggttcacgcccctatgagagtctaaggctgccactgatctgrcagaatgtggcgctcgggtgataatgcaagtgatgggagcagctgtaaacacagatgaagctttactggcccactgctcaccctctgctatgtggcctgg

SEQ ID NO: 149106 - DNA, 201 bp, Homo sapiens
gaaagaaaaaatccaacaaagtgaaaaaaaattacccaaaataatggtcctttttcttatcaaaatttgttattactgttgttattactaggaattactawaacatagttttcaaaattgatctctgaccgtaatcatccaaaaacatgaaggatttctttttctataatttacatttcataaaagaacatcaattggtct

SEQ ID NO: 149107 - DNA, 201 bp, Homo sapiens
accccaatgtgtgatgttcccctccctgtgtcaatgtgttttcattattcaactcccacttatgagtgagaacatgtggtgttcggttttctgttcctgtkttagtttgctgagaatgatggtttccagcttcattcattttcctgcaaaggacatgaactcattcttttttatggctgcatagtattccatggtgtatat

SEQ ID NO: 149108 - DNA, 201 bp, Homo sapiens
ttatgagttgaaaaccataggctcaaaactataaagtgaaaaagtaatatattgtacaaatttgatgatgaaaacaaagatgataagttaacagatatttwaaaaaaacagttaatagagggtcttgaaaacacagggaaataagtttcagttagttccaacagccatttgaaatcttctctttgtagggacatggatgaa

SEQ ID NO: 149109 - DNA, 201 bp, Homo sapiens
actgcaagctccacctccgggttcgtgctattcttctgcctcagcctcctgagtagctgggaatgcaggcactcaccaccacacccggctaatttttttgkatttttttttttttttttggagacggggtttcaccgtgttagccaggatggtctcgatctcctgatctcatgatctgccctcctcagcctcccaaagtgc

SEQ ID NO: 149110 - DNA, 201 bp, Homo sapiens
ctgcctcagcctcccgagtagctgggactacaggtgcacaccaccacgcctggctaatttttgtatttttagtagagacaaggtttcaccatgttggccasgctggcatcaaacttctgacttcaagtgattcacccacctcggtctcccaagttgctgggattacaggcatgagccaccgtgcccggccagaatacgagt

SEQ ID NO: 149111 - DNA, 201 bp, Homo sapiens
aattaacattgccagagacagtgatttataatcagagacaatgataagtaaggaagaaatgtgcattttacatttttaattttattaatactattaacatkataaatatctctaaaacacattcttacaatcttcttttgaacagtagctagtttcaaggtgataagttctcatacaggagacatcatgtgatttatgggc

SEQ ID NO: 149112 - DNA, 201 bp, Homo sapiens
attttctattttgaggtagagattctgaatcatactgttaaagagtaaatacttttaaggcaaagaatattaatgtattgaaaagaatacgagtttatttwtattttttatttttttattttattttcattattagtattttttgaaatggagtcttgctctatttattgcccaggctggagtatagtggcacaaactcag

SEQ ID NO: 149113 - DNA, 201 bp, Homo sapiens
agagcattaacaacaaattcagacatagccttatcctcagtaccacctccctctatcaatgtgtgtgtgtgtgtgtgtgtgtgtgtgtgtgtgtgtgtgtkaaggcatactttcatttgaaccaaattttctattttgaggtagagattctgaatcatactgttaaagagtaaatacttttaaggcaaagaatattaatgt

SEQ ID NO: 149114 - DNA, 201 bp, Homo sapiens
aagagcattaacaacaaattcagacatagccttatcctcagtaccacctccctctatcaatgtgtgtgtgtgtgtgtgtgtgtgtgtgtgtgtgtgtgtgtgaaggcatactttcatttgaaccaaattttctattttgaggtagagattctgaatcatactgttaaagagtaaatacttttaaggcaaagaatattaatg

SEQ ID NO: 149115 - DNA, 201 bp, Homo sapiens
tggccaggctggtcttaaactcctgacctcgtgatccacccgccttgaccttccaaagtgctgggattacaggcgtgagccactgcacccggcctccttgyctcttcttaagtctttcccatcccagctagaaccatttagaacaacctcccttattatagtacatgctgcagtttgtaacagtgaaaccaagatagtcat

SEQ ID NO: 149116 - DNA, 201 bp, Homo sapiens
ttcaccatcttggccaggctggtcttaaactcctgacctcgtgatccacccgccttgaccttccaaagtgctgggattacaggcgtgagccactgcacccrgcctccttgcctcttcttaagtctttcccatcccagctagaaccatttagaacaacctcccttattatagtacatgctgcagtttgtaacagtgaaacca

SEQ ID NO: 149117 - DNA, 201 bp, Homo sapiens
ctgtcttctaaacacacactctctcttttgctcctgcttccaccatgtgagatacctggcacccccttgccttctaccatgattggaagcttccttatatstccccagaagcagaagctgctatgcttcctgtacagcctgcagaaccgtgagccaattaatcctttttttctttataaattttccagtctcaggtgtttt

SEQ ID NO: 149118 - DNA, 201 bp, Homo sapiens
ggggtttcaccatgttggccaggatggtatcgatctcatgaccttgtgatctgcccaccttgtcctcccaaagtgctgggattacaggcctgagccaccgygcctgtagtaatgtagtgtataatgggaaattttttttttaatgctgtgttagttcattctcaaatgactatatagctgcaactgggtaatttatgaaga

SEQ ID NO: 149119 - DNA, 201 bp, Homo sapiens
tggtcttctgaccaactgctagagctgagaggtaggtgaagagagtatttattccgaagtctttatccacaccccttatagtgacacaatgtaaacacaaraaaccttcctggccaccatctgtctccttctcaaggcagtagtaatttcttccacaaaagcagtttggtaaacataataagctactttaaattactaatt

SEQ ID NO: 149120 - DNA, 201 bp, Homo sapiens
gcctcccaggttcaagcatttatcctgcctcagcctcttgagtagctgggactacaggcatgcaccaccacacccagctaatttttgtacttttttagtaragacggggtttcaccatgttggccaggatggtatcgatctcatgaccttgtgatctgcccaccttgtcctcccaaagtgctgggattacaggcctgagcc

SEQ ID NO: 149121 - DNA, 201 bp, Homo sapiens; identical to SEQ ID NO: 27639

SEQ ID NO: 149122 - DNA, 201 bp, Homo sapiens
gtgagcttggataaatctaagaattgatataagattaataatctccttcgacaagttccaaatatctttcactttcattattattacacacacacacacamtacacactatatatatgtatatatgtatcttttaatgagtttttatttaaaaaatttacatatgaaaattttcaagcatacataaaagtagaggatataa

SEQ ID NO: 149123 - DNA, 201 bp, Homo sapiens
tttttaaattaaatatgtgagcttggataaatctaagaattgatataagattaataatctccttcgacaagttccaaatatctttcactttcattattatyacacacacacacacactacacactatatatatgtatatatgtatcttttaatgagtttttatttaaaaaatttacatatgaaaattttcaagcatacata

SEQ ID NO: 149124 - DNA, 201 bp, Homo sapiens
atttttaaattaaatatgtgagcttggataaatctaagaattgatataagattaataatctccttcgacaagttccaaatatctttcactttcattattattacacacacacacacactacacactatatatatgtatatatgtatcttttaatgagtttttatttaaaaaatttacatatgaaaattttcaagcatacat

SEQ ID NO: 149125 - DNA, 201 bp, Homo sapiens
gtgcagtggtgcaatcatagctcactgcaaccttgaactcttgggctcaaggtaaactccctgcctcagcctcccaagtagctggaactacaggttcacamcaccgcacctgcctaatttgttttcttttttcttttgtgttgagacaagatcttgttttgttgtccaggctggtctcaaactcctggactcaagcaatcc

SEQ ID NO: 149126 - DNA, 201 bp, Homo sapiens
taggcagtgccacagtagggactgtgggggggtggctacaaccccacatttcccttccacactgtcctagaagaggttctccatgaaggctctgcccctgmatcaaacttttgcctggacatccagacatttccatacatcctctgaattataggcggaggttctcaaacttcaattcttgatttctgtgtgccaacaggc

SEQ ID NO: 149127 - DNA, 201 bp, Homo sapiens
caagtacatgatgcaagatgtggtgaatttaccattctggggtctaggggatgctggccctcttctcactaggcagtgccacagtagggactgtgggggggtggctacaaccccacatttcccttccacactgtcctagaagaggttctccatgaaggctctgcccctgcatcaaacttttgcctggacatccagacattt

SEQ ID NO: 149128 - DNA, 201 bp, Homo sapiens
aacagtctctcagaccacagtgcaatcaaattagaactcaggattaagaaactcactcaaaaccgcacaactacacggaaactgagcaacctgctcctggrtgactactgggtaaataacaaaattaaagcagaaataaagaagttctttgaaataaatgaaaataaagagacaacataccagaatcactgggacacaggt

SEQ ID NO: 149129 - DNA, 201 bp, Homo sapiens
aactcattccagcattaacccaaaagtccaagtccaaagtctcatatgagacaaggcaagtcccttctgtttatgagcctgtataatcaaaagtaagttargtacttcctagatacaatgggggtacaggcattgggtaaatataccccttccaaatgggagactttgaccaaaacatagaggctacaggccccacgaaat

SEQ ID NO: 149130 - DNA, 201 bp, Homo sapiens
tgtgcacaacagtaacaaaaagatgtatattgaaaaacagaaataaaacttcagaagcagggaaccatacaagcaatataaaaatggctgttcattacaaatgtgaagaagagaattgattaaaatgtatttggtgtgtaattgtggcaaaattagtattttaacattgagtcactgatctttcgctgatgtcaacagcac

SEQ ID NO: 149131 - DNA, 201 bp, Homo sapiens
tatactattgttcttatttatttcaattatttggttttgattttaatccctcaggattttattattaccgtattctatactcaagttcatttagactaactgacattttatcattttttaccttcacttatatccagcaacttgaacatgcttcttacgtttgagaaattcgtgattatatgagtttccccctcatttaca

SEQ ID NO: 149132 - DNA, 201 bp, Homo sapiens
ttatactattgttcttatttatttcaattatttggttttgattttaatccctcaggattttattattaccgtattctatactcaagttcatttagactaactgacattttatcattttttaccttcacttatatccagcaacttgaacatgcttcttacgtttgagaaattcgtgattatatgagtttccccctcatttac

SEQ ID NO: 149133 - DNA, 201 bp, Homo sapiens
tttatactattgttcttatttatttcaattatttggttttgattttaatccctcaggattttattattaccgtattctatactcaagttcatttagactaactgacattttatcattttttaccttcacttatatccagcaacttgaacatgcttcttacgtttgagaaattcgtgattatatgagtttccccctcattta

SEQ ID NO: 149134 - DNA, 201 bp, Homo sapiens
ttttatactattgttcttatttatttcaattatttggttttgattttaatccctcaggattttattattaccgtattctatactcaagttcatttagactaactgacattttatcattttttaccttcacttatatccagcaacttgaacatgcttcttacgtttgagaaattcgtgattatatgagtttccccctcattt

SEQ ID NO: 149135 - DNA, 201 bp, Homo sapiens
tacttggatttaaaataaacataattcaatctcaatactaacattagttcttaaacgtactaaataaatgtttccaacccagtagaacagttgtccccagkaggttaaatgttcatatgatccccttgtactttctgtttgagttgaaagggggcctttggaaataaaatccaaagatcaaactttgtgtgcatcatttac

SEQ ID NO: 149136 - DNA, 201 bp, Homo sapiens
tgttgacttgctttagaacatctcatgttcttataccacttcctcacaacttaccatctcaacatggtcccccaacacacacacacacacacacacacacatggcttaaaccaaataggagaaagagtgacagcatccagtgaattaccccagagtgacgataatttacagtgaggcactgaagctaacaggacagaaact

SEQ ID NO: 149137 - DNA, 201 bp, Homo sapiens
atgccattctcctgcctcagcctcctgagtagctgggactacaggtgcgtgccaccatgcctggctaaattttttttttttttttttttttttttttttttagtagagactggttttcatcgtgttttccccaatctcctgaactcgtgatccgcctgcctcggcctcccaaagtgctgggattacaggcgtgagccaccg

SEQ ID NO: 149138 - DNA, 201 bp, Homo sapiens
catgccattctcctgcctcagcctcctgagtagctgggactacaggtgcgtgccaccatgcctggctaaattttttttttttttttttttttttttttttttagtagagactggttttcatcgtgttttccccaatctcctgaactcgtgatccgcctgcctcggcctcccaaagtgctgggattacaggcgtgagccacc

SEQ ID NO: 149139 - DNA, 201 bp, Homo sapiens
ggatgaagtccagaagtttctgggagttacacctcgttataattactctgaagcactaacgtgagtctattgtcatgcttgatttcatttccattatttgmcatcataaattatcactggtaggtgtgtatataacatcattaatactagctagaatttatacatcctatgctacctacaagcaatcaaaggaatatcctc

SEQ ID NO: 149140 - DNA, 201 bp, Homo sapiens
ttttcagtgtggttgagagatttctcctgtctaaactttaagactctaatttagttcttaaccagttctgtctccttcattcttttaatcaagtttgtatrattcgatttcacatttgttattccttaaatctttttaaattagtaattacatatccctagggcatttattaattttgccatcttatttcgcacacagtgt

SEQ ID NO: 149141 - DNA, 201 bp, Homo sapiens
ttctccattaaaccatggctgagtgatctatttaattttgcaacccgtaccccttgattccactctatatttctgctttatttttctccatatttctaatmaccttctaatatattacacaatttacttacttcttttgtatgaccttggactcactctgctaaaatgtaagctccctgaaggcaggcatttttttttctg

SEQ ID NO: 149142 - DNA, 201 bp, Homo sapiens
aaatctcattttcaataatgcccacctgttatgagaagaacccagtgggaggtaattgaataattgaatcatggggttgggtctttcccatactattcttktgatagtgaataatctcatgagatctgatgatttaataaaggggagatcccctacacaatctctcttgcctgctaccatgtaagatgtgactttgcttct

SEQ ID NO: 149143 - DNA, 201 bp, Homo sapiens
gttggaagacattatagaagctgcctatcacatctaactagaaataagaaatacagaggatcctgtgtgatataactcacacttactattgcattaatttmaaaatatttgcgtattaactaaaacctaatatttttcttcaaggttaatgtcaattacatccttcaaagccataaatattgaattcatatattacctttc

SEQ ID NO: 149144 - DNA, 201 bp, Homo sapiens
gtaaatttaaatactatttggtgttacttccttacttcaatatggcttttctcccacctgtcttttttctgctgttattaaaaatatactgcatttacacytgttatagtcatagcaatgaaattatatgcatattgttttctatcattgctttttaaatctgatgagaagagaaaagaaatatatataccgtcttccata

SEQ ID NO: 149145 - DNA, 201 bp, Homo sapiens
tggaacacctgccaatttagtacaaatttctatgtaaattacttcagtaattgagtgcattagttaacattcagatatcttagatattgtttaataacaarttacttagactataaagacctaaaacacactttaattatttaacagtttatgaagtcaggaagttgagtatgaaataactggatcctgcagttcaggatt

SEQ ID NO: 149146 - DNA, 201 bp, Homo sapiens
tactggattatccagtttacagccttgtattatgccacaaatgcagaaaaaaactgataataacttatagggtatttaaaggtagggaatttagagaagawaaggatatttacactaaaacaaaattgtgaacaaatatgcaacaaaaattcacaatgaataaatagtgtattttggaggttcaataacaaataaaaaaat

SEQ ID NO: 149147 - DNA, 201 bp, Homo sapiens
tgaaatctatataacttttttcataattacacaatatacattaagtaaaaaatgctgacatttaaattgttctcataaaaacacaaatctattaaagagasactatggaaaatccttaagtgtcataataggctgcacactcaatcagctatgtatgtgtcatattaaaaagaaataaagtaatatgataacaaattaata

SEQ ID NO: 149148 - DNA, 201 bp, Homo sapiens
aaaacttattcccaatttaacctacagctattttccagccatagaaagaaaagtgcatataccatacactgaactgtttacctttattccacaatagactkgaaaaaaaagtttaaaaattgtattttgttgttttaagttttacatataaactcattaaagttttcaagccagtagggcttttcagttcactaatagttg

SEQ ID NO: 149149 - DNA, 201 bp, Homo sapiens
ataattttttaatctttgaattactctagcaaaaatatttgcaaacagctatttcaaaactagtaacaagaaatttgcttcctttttctgctcttcctttkcaattaataattttatatacttagaggatgatagagataattgacacatagaaatgatagatagatagagatcggtagatagatactaaaattaatatac

SEQ ID NO: 149150 - DNA, 201 bp, Homo sapiens
ctctagagccttgcgttttagggatataggttatatttcataatggttgatttcacctgtttgtgtaatttcttttttaagagccatgctgagagctctgrgaagactcagatgtaattgctttgtaatgaaatgttgaaagctatttagagtccattcagagtaattacatttgtttagtcagcgtggctagaaactaca

SEQ ID NO: 149151 - DNA, 201 bp, Homo sapiens
actgcttcatagcattataaaattaagtaaatcttttccatttcaaaaataaacttaccttgagtaagcatgctaaattctctcaggacacttaccttgaraataaaacatgtttatcacctgtcttaaacttcccccacttcattccactacactcctactctagagccttgcgttttagggatataggttatatttcat

SEQ ID NO: 149152 - DNA, 201 bp, Homo sapiens
acacagtaagcattcaatagtgttaattaaccaattatgacctttctaaatacagaggagcatgcaattacatcttgcttttaaaacacctaatttttttwaaaaaaaatatggatttacaaggggtcattttttacttaacttttaggaaatgtctcataaatgtggtactgcttcatagcattataaaattaagtaaat

SEQ ID NO: 149153 - DNA, 201 bp, Homo sapiens
cggctggcacacagtaagcattcaatagtgttaattaaccaattatgacctttctaaatacagaggagcatgcaattacatcttgcttttaaaacacctawttttttttaaaaaaaatatggatttacaaggggtcattttttacttaacttttaggaaatgtctcataaatgtggtactgcttcatagcattataaaatt

SEQ ID NO: 149154 - DNA, 201 bp, Homo sapiens
attatatttgatatattaattattctaaatttattttaactgaatatccatggtgataatatacaatgtttttcattttataaaatgttttggcatacctygactcatttgggcatcacaacaaacctataaactaaattattgttttcatttagccttagagatctctgagattcagagaagttaattgatacactaatg

SEQ ID NO: 149155 - DNA, 201 bp, Homo sapiens
taatatttattccctaaatttaagtaaaaaataaaaataaaaaatcaaacatccatctgtaaaacatattcttttgtgagagaataaaccaaataatacamcccacactataagccaggacttattctcttatttacacagttaagtagtaagagagcaagcaggaattaattcttatgttatcgattcacaacatttgta

SEQ ID NO: 149156 - DNA, 201 bp, Homo sapiens
tttgatcattccacaatgatgtatcaaaacttcacgttgtacttcataaatatatacaattattatttatcaattaaaaataaaataaaacctaaaaatarcgtaaagactacaaaagagtttcatttattaggtatcaaagttagtcattttcactctggtatacacgtatccaaaatttactggtttaaccagaaatta

SEQ ID NO: 149157 - DNA, 201 bp, Homo sapiens
tctgcctacagtactatagaaatgatgtaataatgggctggataataccattcttatttccacctgacttaacacgttgaagaattttgaatgttatcatktagtccaggttaaaggcactagtagaaacttaatacttaatacctgtaacttttctcttgcttctaaattaaatataaaaacatctctctatgtaacaca

SEQ ID NO: 149158 - DNA, 201 bp, Homo sapiens
ctaatcttccactttatttttacacttctaatttgttttttgaaaagagtaagcattttgaactgtaaaaaatgcaataatttctgaacagaaagctttawttcatgtttatattcacagaagtatacctacattacattcaacccctttaatatataccagtgaatgatttcaaataagtctgttaacatatctttgaaa

SEQ ID NO: 149159 - DNA, 201 bp, Homo sapiens; identical to SEQ ID NO: 149158

SEQ ID NO: 149160 - DNA, 201 bp, Homo sapiens
ctgaaattttatattttattataatgtcctgaaattactttcttctgcttatcatgattgtattgcactgacaagcagaaaatgggaattaacattgccasagacagtgatttataatcagagacaatgataagtaaggaagaaatgtgcattttacatttttaattttattaatactattaacattataaatatctctaa

SEQ ID NO: 149161 - DNA, 201 bp, Homo sapiens
tgaattaaattaaatcagtgggcatacaaaaatacatttcctttattcaattggtgaggctgtctcactgaaaattctgcatacaatttgtaatcattatrttttatgtactgtaggtttgatccccaaaagggtttttggtgtcaattactggaaggaggaaagacaaaatgccttggaaaaagcaaaggccgaaaatat

SEQ ID NO: 149162 - DNA, 201 bp, Homo sapiens
gatctcggctcactgcaagctccgcctcccgggttcacgccattctcctgcctcagcctcccaagtagctgggactacaggcgcccgccactacgcccggytaatttttttgtatttttagtagagacggggtttcaccgttttagcccggatggtctcgactattttttaaataatagtttaaaaaatcatttgttgcaa

SEQ ID NO: 149163 - DNA, 201 bp, Homo sapiens
aaaccaggttaagtcaagtcctctgatatatagacataaaacataaaccaagaaatagagtagtatcacagggattagagccttgccaaacactgaaagaygataacaacaggaaggacttgatgctgagtcccagccttgagataaggaaggtgtcaataactttatttaaaaaagatttggaaaccagagaacgagagt

SEQ ID NO: 149164 - DNA, 201 bp, Homo sapiens
gcatgttacaagtgctatgtaaatgtttattattaattttaaaattattttcatataagattcaaatattatcaaaaagtaaatagtagacaattcatatrgcactattttctaattttggaaccataggtagcttttaatcaatgtttatcattccacagttctttatatttagtataatattaaaaagtagtttattct

SEQ ID NO: 149165 - DNA, 201 bp, Homo sapiens
atctttgagaggaagggttttacagtgaagcaatctatttttgagttacaagaggggaaggtaaaggagtatatttaaataaggaaggtagatgagtgcawgatgattttataatagaaataaatttgagagatatagctaagtataattttgcattctccatggcccagccctattctatggttagatccttagagttat

SEQ ID NO: 149166 - DNA, 201 bp, Homo sapiens
ttacaggcatgcactaccacgcccatctaatttttgtattattagtagagaaggggtttcaccatgtgggccaggctggtcttgaacttctgacctcaaawgatccacctgcctcggcgtcccaaagtgctgggattacaggcatgagccatcatgcccagccacattttattacacatattcaaaactaaagtttccgca

SEQ ID NO: 149167 - DNA, 201 bp, Homo sapiens
gtttcaaagatttttagagcagggacaaaattcctctagtctctttgctaaaatatagcaagaatgacctttgctctagtttccaataagttccccatctscatctgagaccacctcagcctgggcttcattgtccatatcactatcagcattttggtcacaaccattcaacaagtctctaggaagttccaacctttccca

SEQ ID NO: 149168 - DNA, 201 bp, Homo sapiens
gctgtaccttgacccgttttagccatggctggagctggagtggctgggatgcagggcaccatatccctaggctgcacagagaagctgggccatgaatttgrcccaagaaaccatttttctctctcaggcctctgggcctgtgatgggaggggctgctgtgaaggtctctgaaatgctctggagacactttccccattgtct

SEQ ID NO: 149169 - DNA, 201 bp, Homo sapiens
ttctgcctatgaggctgtaaaatcaaaaacaagctagttacttccaagatacaatgcaggtaaaggcatttggtaaatgctcccattccaaatagaagaawttggccaaaaaaaaggggctacaggccctgtgcaagtctgaaacccagcagggcagtcattaaatctaaaaactccaaaataatcttctttgagttcagg

SEQ ID NO: 149170 - DNA, 201 bp, Homo sapiens
acctgaggtcatgccactgtactccagcctgggtgactccatcagccagagtgagactccatctcaataaataaataaataaataaataaataaataaataaataaatagtattagtttgttcacactgctataaagacatatccaagactcaataatgtagaaagaaagaagtttaattcactcacagttctacatggct

SEQ ID NO: 149171 - DNA, 201 bp, Homo sapiens
gacctgaggtcatgccactgtactccagcctgggtgactccatcagccagagtgagactccatctcaataaataaataaataaataaataaataaataaataaataaatagtattagtttgttcacactgctataaagacatatccaagactcaataatgtagaaagaaagaagtttaattcactcacagttctacatggc

SEQ ID NO: 149172 - DNA, 201 bp, Homo sapiens
tgacctgaggtcatgccactgtactccagcctgggtgactccatcagccagagtgagactccatctcaataaataaataaataaataaataaataaataaataaataaatagtattagtttgttcacactgctataaagacatatccaagactcaataatgtagaaagaaagaagtttaattcactcacagttctacatgg

SEQ ID NO: 149173 - DNA, 201 bp, Homo sapiens
actaacactgttagctaaaacaaaaattaagaaatcctctgctcatcttaattataggactttattactttcaaaatttctaatagtaatagaatttcttwactctgtgtagtagcattgaaggtgccaaagccctaattaaacctgaaggtccttatacctttcaaagattatgaattatgaactctattccaggaacag

SEQ ID NO: 149174 - DNA, 201 bp, Homo sapiens
cactctcaatttcaatttcaattttaaaagtgagtttaagtgttattttgagatgaaaattaaatgtgtggctttccacttaaaaagatcattgtacttcytgtgaaattccaaggtgaggtgaggtgctgcctggggcttgtactgctacttttaagcttaagcatatgatatttttgtggtcatttttatttatctttc

SEQ ID NO: 149175 - DNA, 201 bp, Homo sapiens
gtggctttgaattatatgaccagcataaaacaagagaaaagctgacaaaaattaatccatgatgcaaacaaaaggaaagtcttaaacgttactctcagctyttttgagggtgtttataaattaacataatctctaatataaaaattgctaagattttatgatcagtcatgcatctgtttctatcaatagtccacaaaattt

SEQ ID NO: 149176 - DNA, 201 bp, Homo sapiens
ataatttctccttcaatgctagaatttctagactgggcattcaaattaaatttaatttaaattaaatccatcgtgattttagaattttttaaaagaatctwttatatctggaattttttgaaacagtatttttaagtcataaaacaggataggcaaaaaaattaagtttaaaaaaaccaaataataacataaaatattact

SEQ ID NO: 149177 - DNA, 201 bp, Homo sapiens
ttacttctgaattaaaacattttttattcattggtaattaggaaatgtaaaaaaaaaattttaataagtgcaaaatgtatttttttcattaataattatcyagaccaggatctagatcagattagaagtgaaaggtttaatttgagcacagatattttaatggtctgtaacatgctaatctggtcacatataaactgcaaa

SEQ ID NO: 149178 - DNA, 201 bp, Homo sapiens
ggcgccaagaaagacaagaaaatatagccaaaatagaagaaaaaaattcaggagtgcagtggcactgattcgaagggaagggagtgctgccagatggaggsgtgacaacaattccaaaagctgctaaaaaatcaaaccattaggcaaagcgaaagatgtggagggaagtggagcccttagcaagacagtaaaaaagagcaa

SEQ ID NO: 149179 - DNA, 201 bp, Homo sapiens
cctactaaacacctaagctatatagttcagtctattgctcctatgctacaaacctacacagcatattgctgagctgaatactgtaggcaattgtaacacartggttggtatttgtgtatctaagcatatctaaacatagaaaaggtacagtaaaaatatggtattataatcacagggaccatccttgtatacatagtccat

SEQ ID NO: 149180 - DNA, 201 bp, Homo sapiens
cattaactttcaagcatgacagtaagtagagtgttacattcttaccccttctgtgattttttgttttttgcatatgttgcttttctgtgtggagtattagktaaaagacctgatattggtaacaaacttgatgttcaaatccagattctgacattttgccagcatttgaacacagtttacttaaattttctgtgcctcagt

SEQ ID NO: 149181 - DNA, 201 bp, Homo sapiens
taaaatcattaactttcaagcatgacagtaagtagagtgttacattcttaccccttctgtgattttttgttttttgcatatgttgcttttctgtgtggagwattagttaaaagacctgatattggtaacaaacttgatgttcaaatccagattctgacattttgccagcatttgaacacagtttacttaaattttctgtgc

SEQ ID NO: 149182 - DNA, 201 bp, Homo sapiens
ttcctaaagtcattcacccacaggtgccaaactgaaagaggaaggacgtagtgcaggttaaatgggaaaaaaataaaagcacggagtttagaatgaaataycttagtctggaaatatttagagcttgaatggaattgcataacaaaagcttaattgagaaatggagacattatagtattcagatgccttctttgaaagagg

SEQ ID NO: 149183 - DNA, 201 bp, Homo sapiens
ttgcaattttgaaaatagacatggttttgtaaatcttttcaaaactccctcaagaaatgatttcagaccaaagaagctctgactatgaagttataaagcaratagctttaaaggctatatctactcatgcagggggaaaaattatgggattatttggagttcacatacaaacaatactattttgtcttaaatagctgtaga

SEQ ID NO: 149184 - DNA, 201 bp, Homo sapiens
attgctctgtagtttgtaaggtaaaaacccaagctttcaatttaataattatgcctttaaaaatgatgagggaggtggcccagttaaataaaatattaaaytgcagttcaaacaaaagttctcctcctattgcttaccatgaaaacaggacttgtctgcattcaacaattctgaaaaattttcaccacataaaggaagtat

SEQ ID NO: 149185 - DNA, 201 bp, Homo sapiens
tattacacatattcaaaactaaagtttccgcacgaaatattcaggtagaaaaaagtgtatttcctgagctttactattttatttgtatcccaaattgagamactttatttctagctcattaacaagcttttccaaaataaggggttttaaaaattgaagggttttaaaagaataagttaaatttgtacttaatttattctt

SEQ ID NO: 149186 - DNA, 201 bp, Homo sapiens
gaacgtgaaataaattcaaagccattttgcattttctatgttgacttccaagtggcctttcatgattttaaaacatatatacatatacacatgcttacagwtatacatatttacatttgcctactagttttattaatctttaatattccatactttttatgagccttgcaacagtgatgtaatatcatgcacacatagtat

SEQ ID NO: 149187 - DNA, 201 bp, Homo sapiens
ttaatctttaatattccatactttttatgagccttgcaacagtgatgtaatatcatgcacacatagtatatatattattgttaagcttacattcaaaaatrgatatgatttaatctattaatttcatccattatggagataaataggaatttcatatctgaacactgccctttttggtgtgtgtgtgtgtgtgtgtctgtg

SEQ ID NO: 149188 - DNA, 201 bp, Homo sapiens
gtgacctgaggtcatgccactgtactccagcctgggtgactccatcagccagagtgagactccatctcaataaataaataaataaataaataaataaataaataaataaatagtattagtttgttcacactgctataaagacatatccaagactcaataatgtagaaagaaagaagtttaattcactcacagttctacatg

SEQ ID NO: 149189 - DNA, 201 bp, Homo sapiens
ggaggccgaggcgggtggatcacaaggtcaggagattgagaccatcctggctaacacagtgaaaccccatctctactaaaaatacaaaaaattagccaggygtggtggcgggcgcctgtagtcccagctacttgggaggctgaggcaggaggatggcatgaacccgggaggtggagcttgaagtgagccaagattgcgcca

SEQ ID NO: 149190 - DNA, 201 bp, Homo sapiens
aatctatttttgagttacaagaggggaaggtaaaggagtatatttaaataaggaaggtagatgagtgcatgatgattttataatagaaataaatttgagasatatagctaagtataattttgcattctccatggcccagccctattctatggttagatccttagagttatatttgaatcattgataagacttcgattttac

SEQ ID NO: 149191 - DNA, 201 bp, Homo sapiens
tcagcctttgaaagtggttttgggggtacacatttaaagatgtatgtaggccgggcatggtggctcacacctgtaatcccagcactttgggaggccgaggygggtggatcacaaggtcaggagattgagaccatcctggctaacacagtgaaaccccatctctactaaaaatacaaaaaattagccaggcgtggtggcggg

SEQ ID NO: 149192 - DNA, 201 bp, Homo sapiens
ggcccagccctattctatggttagatccttagagttatatttgaatcattgataagacttcgattttacaaaatttgccgcactttatatgttacctgtartttacctttactttccaggcactgaagaaggcactaccttattaatatttcaaataaactaaatggtattgtgtatatatatgtacatgtgtgtattata

SEQ ID NO: 149193 - DNA, 201 bp, Homo sapiens
atattcagcctttgaaagtggttttgggggtacacatttaaagatgtatgtaggccgggcatggtggctcacacctgtaatcccagcactttgggaggccraggcgggtggatcacaaggtcaggagattgagaccatcctggctaacacagtgaaaccccatctctactaaaaatacaaaaaattagccaggcgtggtgg

SEQ ID NO: 149194 - DNA, 201 bp, Homo sapiens
ttcacttaacataatgtcctctagttcatccatgttgtcacaaattacagaattttcttctttgtaatgtctgaatgatatttcattgtgtatatgtaccycattttctttatccgtttatccactgataagatgcttaggctgattctatatcttggctattgtaaataatgcttaaatgaacaaggaagtgcagatatt

SEQ ID NO: 149195 - DNA, 201 bp, Homo sapiens
ttagtgtctaaatttatacttctggtccaagttcaataatctataatattgataaatcagataaaatttcagacttcctgaagtgacctatcccaaaaaaagcagataatttagtcaagaatttttcttctgctgcttaagaaatttgtggagattttatgattcccttcattcagcctgtcattttctggttagttaatc

SEQ ID NO: 149196 - DNA, 201 bp, Homo sapiens
aaaatgattccattagccatactacttagaagttgtcatcagtggaggatacctagagatgactaccacaacatattatatatgcctgtgtatcatagacyacatataattttcaacatagcctgtcatttccaacaaatcctttaatcctcttcaaaaagatgcaagtttaaaacccctagaaccagggggaattatttg

SEQ ID NO: 149197 - DNA, 201 bp, Homo sapiens
tcatttcatcattctttggaaccagcataatagtcaaatcagttcctcttaatgtcagatgatctagttgccatcacattttggaagtgaattgagttgagaaaatatacctcttaaacaattatgcaagttaacatttcaaaacacaggtttgtataacatttcaaaacacatagctaatgctatggcattagattacaa

SEQ ID NO: 149198 - DNA, 201 bp, Homo sapiens
ctcatttcatcattctttggaaccagcataatagtcaaatcagttcctcttaatgtcagatgatctagttgccatcacattttggaagtgaattgagttgagaaaatatacctcttaaacaattatgcaagttaacatttcaaaacacaggtttgtataacatttcaaaacacatagctaatgctatggcattagattaca

SEQ ID NO: 149199 - DNA, 201 bp, Homo sapiens
cctcatttcatcattctttggaaccagcataatagtcaaatcagttcctcttaatgtcagatgatctagttgccatcacattttggaagtgaattgagttgagaaaatatacctcttaaacaattatgcaagttaacatttcaaaacacaggtttgtataacatttcaaaacacatagctaatgctatggcattagattac

SEQ ID NO: 149200 - DNA, 201 bp, Homo sapiens
ccctcatttcatcattctttggaaccagcataatagtcaaatcagttcctcttaatgtcagatgatctagttgccatcacattttggaagtgaattgagttgagaaaatatacctcttaaacaattatgcaagttaacatttcaaaacacaggtttgtataacatttcaaaacacatagctaatgctatggcattagatta

SEQ ID NO: 149201 - DNA, 201 bp, Homo sapiens
tcactgctactcaaaataatattcaaaagtcactgatggctatcttaagtgacataactccaaatagaatacaataatttaacaaaggcttgagcaatgtmacacatggagagagaatcagaaaggctatgtgtgtgtgtatgtatttattagtatgtgttcatatggatagaattatatcctatatattgagtaatatat

SEQ ID NO: 149202 - DNA, 201 bp, Homo sapiens
tcaggcagaaaatgcaaactcttcacatatgtgacatgatttaatattattttataaggtcaaaccaatttttaatttttttcttctctttgccagtatgwttaatcagtatcaacgtttaaacttccagtattcaaaaaatactcctaatgcaatgaaaccattatccttaccggtatatatacattttgtgtgcagtta

SEQ ID NO: 149203 - DNA, 201 bp, Homo sapiens
aggccttagagcaataagagttgaagtctcattagcagctaacaatgcagaacacagcacataaataaacctaatatggcacagcgaaatgcctcggtgcrttaaatttgagcagaatcaaatgtttactgtcaatgatgtctggggcataaagttttaatgcacttaataaagaaaagcaaattgcttcctattagccat

SEQ ID NO: 149204 - DNA, 201 bp, Homo sapiens
gttcatattatctgttttgatattattgagatttcgcttttctcttgtggctagaggtatgcattgcctgcaaatgtgaataacaactgatatttccaggmatgtcacattttagcagccaggtttttctgaatatacaatgtgtattcctatatcacatgctgtgtccacataccctttatgttattaaaaaatagttct

SEQ ID NO: 149205 - DNA, 201 bp, Homo sapiens
aaaaatggaatagaggaagcatcatacttttagcaatttccttaagatttgtcaatagacactgttgttagagaagatatggaatgtatgtgatcacttaygaatcatgaataaaaacaaaattcccaattttattttgcatcctgagttgcagtggtacaactgaaaactagaaaagcaatgtctttaaggagctaaatt

SEQ ID NO: 149206 - DNA, 201 bp, Homo sapiens
aatgctaaattatatggtataccagaaggtgttaagtcatatggaacataaaattttttagacaactttattctgttttgtttgttcagcagaaaattacrtattttaaatgtaagaacagttactttattatttttttcttgctaagatcacggagcagttctaagtggctactaagtactccagcaatacaagtttcat

SEQ ID NO: 149207 - DNA, 201 bp, Homo sapiens
taatctcttaattcaaataagaatattatcagcctgtcattgcaaatgtgtcacttacattcacattaatgtaagaatcacattaatgattctacattcayatttcccttaacagtagtaagacagttctggcttcatcccattatatcattaaatggactgtttataactgcatagctttctactcggcttaggtgaaat

SEQ ID NO: 149208 - DNA, 201 bp, Homo sapiens
acaaaattgggaattagttatgagtcataacaatataacatgacagaaaactgctgtattagttctttcttacgttgctataaagaaatactcaggtctgrgtaatttataaagaaaagggatttaattgactcacagttctgcatgatttggggggactcaggaaacttacagtcgtggtggaaggcacctcttcacagg

SEQ ID NO: 149209 - DNA, 201 bp, Homo sapiens
ttaaattattatcaatgtgaaaagatcaacataggctttattaactattatttttgccatgtttaattctgaacctgtgctaaattcaacattgtatttartcaaatggttataaatttgtagcaaaatttttaagcaataactttttattagtaagtgaccaaagtgcctagcatcttcatttttagaagtagtttagaa

SEQ ID NO: 149210 - DNA, 201 bp, Homo sapiens
accattagcccctaaacattttactgaggtagaaggcctctgaacttttgttggatttactccgtaccatcttatttgcaaatgtcttacccataagttcrttaggtctaatcaatatgatgtcattaatgtaataaactaatgtggtaagttatagaagggaagtgtgatcaaggttcctgcaaactaatttaggacata

SEQ ID NO: 149211 - DNA, 201 bp, Homo sapiens
attcactcaagtaatctaccagtaagtgataccaaattaattttctttgcctttgatgagactctgtgttatgtttttgtgtgcatcagtttatatattaragtttgaggggaagtggagctccaaatttatggtaacagcagttttctttaaagcatatcaacagagatgaattggcagagtcttcattcaccatctttt

SEQ ID NO: 149212 - DNA, 201 bp, Homo sapiens
agtaaaggcatttcatggctacgagctgtgctgtagggatgctcattgttttaatataaaatatattcccagctttggcatcatacttggacttccaacamaaacaggaagacacagtgtttcatttctgtctcatattttgtatctcctttctcctatacagagaggtgatcaaagacactgaggataacagaagagttc

SEQ ID NO: 149213 - DNA, 201 bp, Homo sapiens
tttagtaattttcaagaatatgatatattgttactattagaatctactataggtttcttcaacttcttcttccaatcaaaatgaaattttgtgtactttamccgaatctctccaacctcttcactctcaacctctgggaactaccattttactctctgcttctttgagtttaaattttttagactccataaaaagtgagat

SEQ ID NO: 149214 - DNA, 201 bp, Homo sapiens
tttatttattcatcaaaaaacaagtatgtgtgtgtatatatatgggtatgtatgaatatatatgcatatgtacatacatattcacacacaccacttacatsttagtattggttgcgtataaatgttggggttatcatgagataatggaaaatgaattatttgagctcttttattattctcagtgttgttgaaaaactctta

SEQ ID NO: 149215 - DNA, 201 bp, Homo sapiens
ttagaaaacattttccaaccagataaaaatgtatttctcttttgagaagttaggcttttgctataaaaaaacacataaaaaataatttttgtgttactacrttacctattaaaacaagtatgctttaataaacatcaaagaaagcagtctaattattcatttgaatttttatttccaaagataagtactcaaaagcttaga

SEQ ID NO: 149216 - DNA, 201 bp, Homo sapiens
agtggtgcaatctgggctcactgcaagctccacctccgggttcgtgctattcttctgcctcagcctcctgagtagctgggaatgcaggcactcaccaccayacccggctaatttttttgtatttttttttttttttttggagacggggtttcaccgtgttagccaggatggtctcgatctcctgatctcatgatctgccct

SEQ ID NO: 149217 - DNA, 201 bp, Homo sapiens
agtactatatcatatgatatatgatatatgatttgatgagtctagtactacatcatatgataatgatgagtctagtactataataactttgaaatagtagtgaccataagcaacattttgatatatctaagacactggtaatgggatataaaataactgatttttattggtggtaaaatcacaatcacagtacaataaata

SEQ ID NO: 149218 - DNA, 201 bp, Homo sapiens
tagtactatatcatatgatatatgatatatgatttgatgagtctagtactacatcatatgataatgatgagtctagtactataataactttgaaatagtagtgaccataagcaacattttgatatatctaagacactggtaatgggatataaaataactgatttttattggtggtaaaatcacaatcacagtacaataaat

SEQ ID NO: 149219 - DNA, 201 bp, Homo sapiens
ctagtactatatcatatgatatatgatatatgatttgatgagtctagtactacatcatatgataatgatgagtctagtactataataactttgaaatagtagtgaccataagcaacattttgatatatctaagacactggtaatgggatataaaataactgatttttattggtggtaaaatcacaatcacagtacaataaa

SEQ ID NO: 149220 - DNA, 201 bp, Homo sapiens
tcctgccaggtggcagaagatgatatttgaaatctgagtaggtttagagaaacaaggaatggcataaagcagtgatctggataaaatagtattctatgtarcaatgttttatgaagaaataatatctgtaatgtggcttttttatttgggtaatgtgtttggtggataaaacaaaaacaggaaatgcatatattgaataaa

SEQ ID NO: 149221 - DNA, 201 bp, Homo sapiens
acatatattggtacatttaatagtgtcccacatttctttgaggctctggtcattcatttttcctacttttttcctctttattctttagttgcataatctcrtaatcgattttcaagtgtgctaaatttttcttctgttagctcaaatttcttgttgaaccctgatatggtttggctgtgtccctacccaaatcttgtcttg

SEQ ID NO: 149222 - DNA, 201 bp, Homo sapiens
gaaattgataaagatgaaagttattgtaattggttgaatttccccaaaactaggaagcaatgaattttcccacaacgatgtaaaggttttttttttttttycatatcaaaagagtaatttattctactctattaaaagtatgccagttagctatatcccagtgtcacataggttctgtgctggtcatttgtgtgcatgagt

SEQ ID NO: 149223 - DNA, 201 bp, Homo sapiens
cggctaaaagcattttgttatagcttaaatggaggcaatgaaaaataaccagaatagaacctaaacatatgaaaagtcaaatgtaagaatatctaaacccmcaacccccaccaaaaaatatgagaaatatgagctgtatatttaactcgtaccaagttgggcaaggactttcaggcataaaataattatttaaaaactcac

SEQ ID NO: 149224 - DNA, 201 bp, Homo sapiens
agttgaaataagatagccatttagaaaaatattgaaccaagacttaaccattctttacacacacatacacacaccagaagcttcagaatgggacagagctraaatattaaaatatcccaaagagttagtgaacttaatctctttgcctttttttttttttttttttttttctgaacagactcttgctctgtcgcccaggct

SEQ ID NO: 149225 - DNA, 201 bp, Homo sapiens
tgctgttctctttcatgagtgtctcactagcttcccttcatctacagaaaatcacttggtagactagcaggtgtttattagattatgtcacctactttgtyataaatgtgcatcataattagactttaaatagggctgagtcgaggtgacaacaagatatcacaggagtttttgtttttgaaactcttaagtttttgtcag

SEQ ID NO: 149226 - DNA, 201 bp, Homo sapiens
tgagaaaaatctgtctcacacccaatgcatccacaagcttgcaatgtcttggatgctggaggattgcttatcctcaaaacactttgtgaccactcattggsgagcatggaagaaacctgagagaactaaggctgtcccagtacatgttccctagtgatatcagggtaacaactgttgcctgtcctctctggtagtttccaa

SEQ ID NO: 149227 - DNA, 201 bp, Homo sapiens
gggactttgaagcaattaatgttattgggagctctggggcttagagctgaggagaacagccaccaactgtgagaggaatggacccctgtggagtatatagrttgtggaaaattctatttccactcactgaaagacctacagtcacctttttttttttcctttatcttctttttttttttctatccttaaagatttgcagga

SEQ ID NO: 149228 - DNA, 201 bp, Homo sapiens
ttaaaaaataaataagccttaatgcctcaaatgtatataaactgactcataatttgatattcagcctttgaaagtggttttgggggtacacatttaaagaygtatgtaggccgggcatggtggctcacacctgtaatcccagcactttgggaggccgaggcgggtggatcacaaggtcaggagattgagaccatcctggct

SEQ ID NO: 149229 - DNA, 201 bp, Homo sapiens
aaaaatataattatttaataatctatatggccagttactcaagtaaatgaaatcattcatttaattctttgagtatataggtaccatttattaataggaamctacttttggtctgatgaaatttaacctgctttgcctggtagtaaaggttccacaaaattgcaaacaatcattattttaagtaagagaaggcacaggatg

SEQ ID NO: 149230 - DNA, 201 bp, Homo sapiens
ccaaattgtcttgcaaagtggctgtatcatttttcattcctaccagcaatgaatgagagcacttgttgctctatgtcctccccagcatttagtgttgtcaytgttttagattttacccattctaaaaggtgtgtactggcatctcattgatactttaattcgcaactccccagtaccatatgatgtgtaccatcttctcat

SEQ ID NO: 149231 - DNA, 201 bp, Homo sapiens
aaatttatgtccaattatttgagaattaccattaacatttaagggtaaaaaatatatgttagggtataaaatacatataagggtataacatatatgtaagrgtataaaatacccttaaattctaaattaaacaactgtctgacctggtgccagccatgcctactcaccccatcctaatcccaagtccctttgcctttgatt

SEQ ID NO: 149232 - DNA, 201 bp, Homo sapiens
ggaacagtgatattttgtggcatgtaaaaattatataaaatttacatttaaatgttcataaataaaattttgttggaagactgccacactcattcctttaygaattgcctgcagctgctttcacattgcaatggcggagttgaatggttgtgaaagagatcctatggtccacaaagcctaaaatatttttatctcaatctt

SEQ ID NO: 149233 - DNA, 201 bp, Homo sapiens
aatgactaaaagattcattccgctattttcaaagaaatcctaactagcttgagttctacgtcactattactctatgacatatttaaatactttgcctttargaaatatgagttatttttgtgattatcttataagaagcttttaaggaaataattatgccacacaaacaatgacctctgaagttaaaatatatatttatct

SEQ ID NO: 149234 - DNA, 201 bp, Homo sapiens
cgcccgccactacgcccggttaatttttttgtatttttagtagagacggggtttcaccgttttagcccggatggtctcgactattttttaaataatagttwaaaaaatcatttgttgcaagaatgaaggaagaaatgaatgagttgaatgtttggagccatgactctagaccagtggctctcatattttagtgtgatctat

SEQ ID NO: 149235 - DNA, 201 bp, Homo sapiens
taatctttaatattccatactttttatgagccttgcaacagtgatgtaatatcatgcacacatagtatatatattattgttaagcttacattcaaaaataratatgatttaatctattaatttcatccattatggagataaataggaatttcatatctgaacactgccctttttggtgtgtgtgtgtgtgtgtgtctgtgt

SEQ ID NO: 149236 - DNA, 201 bp, Homo sapiens
tatttttagtagagacggggtttcaccgttttagcccggatggtctcgactattttttaaataatagtttaaaaaatcatttgttgcaagaatgaaggaaraaatgaatgagttgaatgtttggagccatgactctagaccagtggctctcatattttagtgtgatctatttcacctagaagacttctgaaacacagactg

SEQ ID NO: 149237 - DNA, 201 bp, Homo sapiens
tctcgactattttttaaataatagtttaaaaaatcatttgttgcaagaatgaaggaagaaatgaatgagttgaatgtttggagccatgactctagaccagkggctctcatattttagtgtgatctatttcacctagaagacttctgaaacacagactgcttggtccattagcacagtttctgattcagtagatctgcagag

SEQ ID NO: 149238 - DNA, 201 bp, Homo sapiens
aagggggagtgacaaaaaataaagaaatagagttatttttgtcaataaatgggagttacatatattagcatggcaggcctctgtgatgaggtaatgtttgrcagacagctaagtaatgaggcattcattaatgtggccatataaaagaagagtgctcctgttacaaagagtagcaattggcataagctctggggtagaatt

SEQ ID NO: 149239 - DNA, 201 bp, Homo sapiens
cacttgtgaatgaatataagcaagttacatgccttctctgagcctctgtttccacattttagagcagcatccagtcctcctcacagaatgattatgagaawcatattacacgtaaatgtaaaaatacttcataaatattgatgcagacatgaggcaggaaaatactaggtagaagagggaggttcccaacaggggccacac

SEQ ID NO: 149240 - DNA, 201 bp, Homo sapiens
tgaagttaaaatatatatttatctttttacaagacaaaaaaattttataagttataatggagacttgagagcaagagcttataggaatagtatattaaaawatatatatatatatatatatatatatatatatatatatatatatgtataattggataccaggcttagaggaactaaattataaacaaaaatgccagtgcc

SEQ ID NO: 149241 - DNA, 201 bp, Homo sapiens
ctttttctcaatagaaaaacaaattgtcactcactgctactcaaaataatattcaaaagtcactgatggctatcttaagtgacataactccaaatagaatrcaataatttaacaaaggcttgagcaatgtcacacatggagagagaatcagaaaggctatgtgtgtgtgtatgtatttattagtatgtgttcatatggata

SEQ ID NO: 149242 - DNA, 201 bp, Homo sapiens
acacttctcaaaagaagacatttatgcagccaacaaacatatgaaaaaaagatcaacatcactgatcatcagagaaatgcaaatcaaaaccacaatgagawaccatcgcatgccagtcagaatggcaattattaaaaagtcaggaaacaatagacactggcaaggctttggagaaataggaatgcttttacactgttggtg

SEQ ID NO: 149243 - DNA, 201 bp, Homo sapiens
tgggaatgtaaattagttcaaccattgtggaagacagtatggcgattcctcaaggatctagaaccagaaataccatttgacccagcaatcccattactggrtatatacccaaaggaatataaatcattctatcataaggacacatgcacatgtatgtttattgcagcactatttgcaatagcaaagacatggaaccaaccc

SEQ ID NO: 149244 - DNA, 201 bp, Homo sapiens
ccagaaataccatttgacccagcaatcccattactggatatatacccaaaggaatataaatcattctatcataaggacacatgcacatgtatgtttattgmagcactatttgcaatagcaaagacatggaaccaacccaaatgcccatcaatgatatactggataaaggaaatgtgctacatatacaccatggaatactat

SEQ ID NO: 149245 - DNA, 201 bp, Homo sapiens
cgatctcctgacctcgtgatctgcctgcctcggcctcccaagagttcaacttttttagatctcacatataagtgagatcatgaagtatttgtctttctggkcctgacttattcacttagcatatgtcctcctggttcatctatgttgtcacaaatgacaagatttccttcttttttaaggatgaataatattttattttat

SEQ ID NO: 149246 - DNA, 201 bp, Homo sapiens
agagattattttatgaaaaatagcattttctataaaatcattaactttcaagcatgacagtaagtagagtgttacattcttaccccttctgtgattttttkttttttgcatatgttgcttttctgtgtggagtattagttaaaagacctgatattggtaacaaacttgatgttcaaatccagattctgacattttgccagc

SEQ ID NO: 149247 - DNA, 201 bp, Homo sapiens
cgagccgcatctcttgtccccaaagccaagatcatcaccatcctcattgacccctcagacagggcatactcttggtaccaggtatggtcagtaaaaaaatyggctaaaagcattttgttatagcttaaatggaggcaatgaaaaataaccagaatagaacctaaacatatgaaaagtcaaatgtaagaatatctaaaccca

SEQ ID NO: 149248 - DNA, 201 bp, Homo sapiens
gaaagatgataacaacaggaaggacttgatgctgagtcccagccttgagataaggaaggtgtcaataactttatttaaaaaagatttggaaaccagagaamgagagtgaggtctaactccaagttctaaggtattaggccagaatttgattccatcttttgaacaatttttagagaacagagccagacagtcattacactg

SEQ ID NO: 149249 - DNA, 201 bp, Homo sapiens
tcacaccactagtacacagcggaccaggatacaaatctagagctcctacaaggactcagaagcaagactgcttatgattaaatccacagtgcttcataacrgctgttctattacctgctaattcctatggaagccaaacctataggcattcacaaaaacgcacaactaattaaatatctcagtgaagcaaataagtaaaaa

SEQ ID NO: 149250 - DNA, 201 bp, Homo sapiens
tgagccaagattgcgccactgcactccagcctgggctacagatcgagactctgtctcaaaaaaaaaaaaaaaaaaaaaaaaaaagatatgtgtatctgtgygcttacaaaatactcaaccacgtatcatatgaaaattttcaaaaagtttataaaattgatcatgaaaatttgaattaatccacatttcattaacaactta

SEQ ID NO: 149251 - DNA, 201 bp, Homo sapiens
caaacttgttcttcctctgcctgtgaatctcattcctatgcctctacatgtttaaaagaaaaattagggatttaaattaacaacttctttttgacttctcycctatattaaatctgtatctaatacctgtctattaaactatgttgatagctttcatatttattactaccccttttttcccaagtccagtttttttaaatt

SEQ ID NO: 149252 - DNA, 201 bp, Homo sapiens
ctcgcccccatgattcagttacctcacaccaggtccctcccaccacacatgggaattatgggagataagatttgggtggcagcacagccaaactgtaacaygaatggataggtgaatagagtactttatcctgacaaactacaaggatgaaaatttgtatctacctcttttcattatgtatcttctgaaagtaaaaaagtt

SEQ ID NO: 149253 - DNA, 201 bp, Homo sapiens
atttaaaaaagaaaaagaatggagggagaaaagtcaaactatattctaaaaattcagtacaaacagtaacatttgtcaggaaacaaacataattgtttacrtattggaaaacagcacatggaaaggagataaaatatcatgctaggatatttagctcatccaaacttaaaaagcagtcaatataatgattaacttgaaagc

SEQ ID NO: 149254 - DNA, 201 bp, Homo sapiens
gggaaaattaagggaaagaaaagaacgtaaatgtggttattactacttaaatgtatacttcaaaagggtaaatgtggtaaattttgtatgtatattttacmgctataaaaaaaaacaaaataaaaaaatgtaaaatttacagatgtttatcctttatatgcacttaaataaacgagatgaagacactgaaatttgaaccac

SEQ ID NO: 149255 - DNA, 201 bp, Homo sapiens
aatttaatgcagtacaaagtctcatgtacttaaaatagtaactaataattgctcttttggtgggaaacatgcaaatgaagactgaattctttacgacctcrcaaactgtgcctgtttcctcccagttgtacctgctaagattcatgaacacaataaccaagcaagataagaatgttacaaactataattccactgtatttg

SEQ ID NO: 149256 - DNA, 201 bp, Homo sapiens
ccagagaggccacagaacaaactggctatttgtgatagctggagaatccctgagaacagggtgaggttggtaagaacatttgaattcaggaatcttcttaycaactctgaaggactttgcttttagttgttcatacatagcacctctgctaagcaatctgctgtatttaattttttcttcttgttttaattcattaaaaat

SEQ ID NO: 149257 - DNA, 201 bp, Homo sapiens
atacagctaaactcctgtgtgttcacctgaaaattaagctgtaacaaacttaattttgtggtagaaaaagctaaactattttccactttttctcctattaraaatttaggaaaaaccctgggaacttttgcccagttagtcctgaaaaggatgaaatattaagtactaaagaaacaccatacatgtcttatacaactcact

SEQ ID NO: 149258 - DNA, 201 bp, Homo sapiens
aaagacatttgaggaagttcagttctttaatggcaacaactatcacaaaggaatagactggtaagaaaaataacaaaaaataaattccattattaacacaygctcaatcactgcagagcaattacagatgtatgtgtggcatctgcataattacaggataaattcaccacagtgaattagaaattaatttataatgatgat

SEQ ID NO: 149259 - DNA, 201 bp, Homo sapiens
tcatcagaattattcataagggtatttaaaattctctttaagcgtagcattatttaactgtgcctaatttttttctcaacacataatttgtcttcgcaacmatgtttcaggcaacaaataaatcagtagtttattttataattcgtgacatgtatcttcattaaccacataaactgtaagttttgttataatgtaggctga

SEQ ID NO: 149260 - DNA, 201 bp, Homo sapiens
tcaacacataatttgtcttcgcaacaatgtttcaggcaacaaataaatcagtagtttattttataattcgtgacatgtatcttcattaaccacataaactrtaagttttgttataatgtaggctgatatttgtcatgcaaataataacaggacattttcaaaaccatatcaattctagtcacacacgtacataaaataaat

SEQ ID NO: 149261 - DNA, 201 bp, Homo sapiens
cttttgatggtatagacctatcacttaataggatgacattaaatttatgttaaacaaatgaaagttgcaagcaaatgaaattataaaatgatgagttatakttttactatgttctgcaattgaatataaagattttggaaaaattgtgttagtttgggtacactaaggaacagatgtaaagttggtattagacatgcaaga

SEQ ID NO: 149262 - DNA, 201 bp, Homo sapiens
ttgcacaacataggcagcttgattttgaacttaaaacctatataaagattggcttgattctatattttttcatgcctaaggcaaattttctctatcatttyatgccatagacaaatttcctctttccccttctatatatggaaggtttatttcctctctaccctaagactgaggatgcaaaacttgaggtcttatttttgt

SEQ ID NO: 149263 - DNA, 201 bp, Homo sapiens
aaataaaacatataaatcttaaacatataattatatgtggtcaaaatgggaaactgtcttcctcatcactatcaaaaaataaattttgtgcttttccttgytatttttctgataacattgacagcaaagtagtgccgtctcagtccattctactgaagtctctttccttttcctcctatctattcctttgtcagtctattc

SEQ ID NO: 149264 - DNA, 201 bp, Homo sapiens
ctccactaaaaattcttatatatttattgttttggtaaatcatgatacaaattttgaagccaagtaagtgttaataattaagtgttgtcaggctaaaaaarcttctaattaatttttttggttttaattggttatgaaattaagttggtacaaatgattttcagctgtttatatttttaatcattgggtattttttcctat

SEQ ID NO: 149265 - DNA, 201 bp, Homo sapiens
gtcgacacttaacattataatacttcttgattctcccttatctagtgtgtgtaaatttgaattcattttaatcagatttgaatttccgtgattattaattrgtttaaacatcttttcatgtctttatcagtcattttcatgaaacttacctggccttttctttttctcattaatttatacataattatattgtattattta

SEQ ID NO: 149266 - DNA, 201 bp, Homo sapiens
aagaataattttaaaatttggcttctgaggatttgtgtgatgtatagacagaaatgtcaagagataaaattatatctttcttagctcactttgagtttatrtacttaacttttgatctacaagttagcagtcatctgtccaattcaaaattaaattcacatatgccaactcaaagtagcaatcttctgtccaactaaaata

SEQ ID NO: 149267 - DNA, 201 bp, Homo sapiens
tggtggatcttggaccaaatggaaaacaatgaaggaggcattgttacctatgccagcaacaggaaaagtgttcgtctccaattttatcaaagagatggaamtctgccaattgggttataatataggtgatatccagaaagaaagtccaattagaaatgtcctgttttccagaaatctgtgtagatgaaagataaatataaa

SEQ ID NO: 149268 - DNA, 201 bp, Homo sapiens
gaaatattgaggagggcttaagagagatggtggatcttggaccaaatggaaaacaatgaaggaggcattgttacctatgccagcaacaggaaaagtgttcrtctccaattttatcaaagagatggaaatctgccaattgggttataatataggtgatatccagaaagaaagtccaattagaaatgtcctgttttccagaaa

SEQ ID NO: 149269 - DNA, 201 bp, Homo sapiens
caccaatgtttacagtagctttattcacaattgccaaatcttggaagaaacaagatattcttcaataggtggatagtgaaatatactgtggtaaataaagmcagtaaaatattattaagtgccaaaaagaaatgagttatcaaaccatgaaaagacatggaagaaacttaaatgtatattattaagtgaaagaagtcaatc

SEQ ID NO: 149270 - DNA, 201 bp, Homo sapiens
ccaactccattttactgaggtaggcacacaaacttgctatattggaatataaggttactaaggttagactgagttttaaggcaggcatggtcaattttggycttcttcttgtgttatctgggtggactatttaatctttccataaagcaatattttttacctggaaaatataaatataagttatctcttctgattcccata

SEQ ID NO: 149271 - DNA, 201 bp, Homo sapiens
tccaagatgaaatgtagttgtcttaaatccatttccacagtatacacaaaagttgctaagggagttttatgtggtaaaagaccatttgtgttgaaatattkaggagggcttaagagagatggtggatcttggaccaaatggaaaacaatgaaggaggcattgttacctatgccagcaacaggaaaagtgttcgtctccaat

SEQ ID NO: 149272 - DNA, 201 bp, Homo sapiens
aatcacaagcattcctttacagcaacaataggcaaacagagagcaaaatcttgaatgaactcgcattcacaattgctacaaagagaataaaatacctaggmatacagctaacaagagatgtaatgacctcttcaaagagaactacaaaacattgctcaaagaaataagagaggacacaaacaaatggaaacacattccata

SEQ ID NO: 149273 - DNA, 201 bp, Homo sapiens
cctcttatctccggtatacccatttctaactcaatgcacacacacacaaataattaatgagttagttgtgagaggcacaatgtatgtgaaatagtttgctkgtattatggtaaaaacttaagtggtagggatgtgaaataagacatctttgatggtcagaagtattggctacttaggtaaaatttgtatgtaaaagaaaga

SEQ ID NO: 149274 - DNA, 201 bp, Homo sapiens
tgacttgtcttgctttaactctgttttcttgggtcactggtctctaccaatgttcaccagactgcagattactctctcttctccatctttttttctttcasgaagaatcattaatgaccactatccttacaaaggagaaatggtcttggaatcacaacctcattgatcttagttataaaatcctgttcctcttttcatgaa

SEQ ID NO: 149275 - DNA, 201 bp, Homo sapiens
gaggaaggaggacacggcatcggctagcagggcagatgggggctgcacttgggacagagtaaacaaccagtggatgtctcaggaggaatctgtatttccaytggtgccttcagagaatgtaattaacatgtttgaatatttttttgagccagcaggaaatgtgaacctgctactactcaagaataagcaggatccgagtgt

SEQ ID NO: 149276 - DNA, 201 bp, Homo sapiens
attatggatcagtgtactcacacgaggaacactttcccaagaagttgagggactgcatggattttacatggggaacaaggagagttcaagccttcataaakatgtctctcagtttttccataaagatttgttgattggagcactgagaataaacacccttaatctattaaacttcctcatcagtgtacatggattgtatta

SEQ ID NO: 149277 - DNA, 201 bp, Homo sapiens
cacatcattagtcatcttccaactaatgaatttcattatttttgaccaaacctcaaacttctataacatcagcaacaactattacctaccaaaagctcttkcaaggacctaagctttggtcagaagacagtaataaatgtgactgtgatagataatatgtaatacaactgaggtaatttcatgaagattacaatggaaact

SEQ ID NO: 149278 - DNA, 201 bp, Homo sapiens
cctcatcagtgtacatggattgtattaggcttaaatgacattgagagacaaaacttgaaagtcaccaccctgtacaatacaacttggaaagggcattttamagacatacacagagcaagactcaataagcagaaaaaattaagaaacaacacaggccaattggaaaggaaaaatgtgttttaaaagatgccttttatagca

SEQ ID NO: 149279 - DNA, 201 bp, Homo sapiens
gctttctaattttctgacttaaaaattaaaacaatagaaacagaacaaagtaagaaagtgcaattaaatgcttagcttttttggagggaagatcctttacscttcataatcattgtcaaaaaacttcacatgcacatgtgcgcatgcacacacgcacataatttaactgcagagagaacgccagatttggattctaaatct

SEQ ID NO: 149280 - DNA, 201 bp, Homo sapiens
tttctgcacaataaacaactgggattttgacagtgatagcagtcaatctgcaactcaatttgggaaatacagctcttaccaatattaagtcttctgatacrtgaacatgggttgtcttttcatttatttgggtaggctataatttctttaaacaatattttataattttcagagtctaaattttgaacttctttgatcaaa

SEQ ID NO: 149281 - DNA, 201 bp, Homo sapiens; identical to SEQ ID NO: 27638

SEQ ID NO: 149282 - DNA, 201 bp, Homo sapiens
ccgcagtgccacactagctgcatcatcagtctgctttactttggccatgtgctaatattaaatcaggcattctgatcaatagaatcatgaagactaaaaayagaacacttagattgtggctgcatggaatgcatctagttgattttaaggaaatcactttgatactggaaatagttgattattttaatattactttttgag

SEQ ID NO: 149283 - DNA, 201 bp, Homo sapiens
ctggcctcaaactcctgacctcatgatttgtctgcctctgcctccaaaagtactgggattacaggcgtgagccaccgctaagtactagtaccccttttttwaaaaaagaatacagtctttaaatttattcttaaaaatttttgtcagtgacttcaacaagatttccaggcaaaggtgaatgcatcataaaattaggtaaag

SEQ ID NO: 149284 - DNA, 201 bp, Homo sapiens
atcataaaattaggtaaaggcgacataaaatctggagaataatagacactaggtttaggaacatggtgagagatgaccttgtaatcatgcatcagctttgrtttccatgcatttcttggagaaacaaaatatataagatcactgttatcactacaatctgtgaattcctatggccagtagtagccaaagacaatcttaaat

SEQ ID NO: 149285 - DNA, 201 bp, Homo sapiens
aatagacactaggtttaggaacatggtgagagatgaccttgtaatcatgcatcagctttgatttccatgcatttcttggagaaacaaaatatataagatcrctgttatcactacaatctgtgaattcctatggccagtagtagccaaagacaatcttaaattttgtttgattttaaacatctagaattcttttttcttctt

SEQ ID NO: 149286 - DNA, 201 bp, Homo sapiens
tgtttgtttcattcaaaactgaatctccagtccctacaacagctggactatattagctgcttaaatatttcttgaataggtaagcatggcaacatagttcwcttaaagttaaattacaccaaaatgtctttattaaagaaataatgtcaaaggtagataatgtcagtcacagaactccaaaggataccattcatacagaaa

SEQ ID NO: 149287 - DNA, 201 bp, Homo sapiens
cagaatgttccatgggacttttccttttttgttgaagaccatggcattagatgctgacacatcccaaaaagagtaggtgttggatggcagatagactcttrgcccctttcttaattctagtttataaaagggaagaaaaaaatctaaggaagctccagagtaaagattcatttttgcatataattactaggacaacttttc

SEQ ID NO: 149288 - DNA, 201 bp, Homo sapiens
tccaagtataaataatgtacatggtatgtattaccaactcttaaattccataaataaatattgagtgattataaatatcagtatgctggggaatttataargataggtaaaactcaattgtactttcaaggagcttccaattcaataggaaaaatattaggttacacctggtaaaattttctattttctacaatttttgtc

SEQ ID NO: 149289 - DNA, 201 bp, Homo sapiens
gtacatggtatgtattaccaactcttaaattccataaataaatattgagtgattataaatatcagtatgctggggaatttataaggataggtaaaactcarttgtactttcaaggagcttccaattcaataggaaaaatattaggttacacctggtaaaattttctattttctacaatttttgtcctacaaaatggcaatt

SEQ ID NO: 149290 - DNA, 201 bp, Homo sapiens
ggtatagaatttccaaaagtaaaattggaaatgtgatcacacagacaagagcatgtgtaaggtgtaaagaatgttatgtttgaaggatggcaatagaatgyttttgtatcaaagagtcaacacctggaactcaaggttaaggttagaccatgaagggcctcaaatagttttgaagcaacctcagctttaacgagaaagtac

SEQ ID NO: 149291 - DNA, 201 bp, Homo sapiens
tgatagcagtcaatctgcaactcaatttgggaaatacagctcttaccaatattaagtcttctgatacgtgaacatgggttgtcttttcatttatttgggtmggctataatttctttaaacaatattttataattttcagagtctaaattttgaacttctttgatcaaatacaatcctaagtattttaatctttttgatgct

SEQ ID NO: 149292 - DNA, 201 bp, Homo sapiens
catagtaatggatctaatactaacgttaagtgctgactttggttactttacagtattagataattacggagctgagagcaatttcttgaaacaccagggadgaagacaattaatgtccatgagttccatttcactagtcaagttgtagcaattgtctatgtgaggaaaagaaagtattaagaagtattttggtaaaaaaaa

SEQ ID NO: 149293 - DNA, 201 bp, Homo sapiens
tcaatatggcttttctcccacctgtcttttttctgctgttattaaaaatatactgcatttacacttgttatagtcatagcaatgaaattatatgcatattrttttctatcattgctttttaaatctgatgagaagagaaaagaaatatatataccgtcttccataaatacgtaattacctttaccaacattctttatttct

SEQ ID NO: 149294 - DNA, 201 bp, Homo sapiens
aacctgtcatctaggttttaagccccgcatgcattatgtatttgtcctaatgctctccctccctttgtccctgcagccccggtcaggccccagtgtatgawgttcccctccctgtatccatgtattctcattgttcaactgtaacttatgagtgagaacacatggtgtttggttttctgttcctgtgttagtttgctgaga

SEQ ID NO: 149295 - DNA, 201 bp, Homo sapiens
gtgatcactctaacaagtaaataaatgctatggtctgaatgtttgtgtcactaaaattcatatgttaaaactctcacccctaaggtgatgatattagaagktgaggtctttgagggagatgaagagtgggtcatgaggatgaaggcctcatgaatgggattagtgcatttgtaaaggtgcccaggggagttcatgcatcct

SEQ ID NO: 149296 - DNA, 201 bp, Homo sapiens
ataatagtttaaaaaatcatttgttgcaagaatgaaggaagaaatgaatgagttgaatgtttggagccatgactctagaccagtggctctcatattttagkgtgatctatttcacctagaagacttctgaaacacagactgcttggtccattagcacagtttctgattcagtagatctgcagagaggcctgacaatttgca

SEQ ID NO: 149297 - DNA, 201 bp, Homo sapiens
taaattacaccaaaatgtctttattaaagaaataatgtcaaaggtagataatgtcagtcacagaactccaaaggataccattcatacagaaaataattatwctgtttctgtctcttgttgggaaatgagagctgtactggaaaatgttaccattcatgcatttttggtattgctgttctctttcatgagtgtctcactagc

SEQ ID NO: 149298 - DNA, 201 bp, Homo sapiens
ttttgctttatttttaaattactgacaatccttttgggtccatgtgtaaatagtcctcactgcatacattgaaagggtctgaagacatcttaaaatttgtyatagctttgtgatttatcatcattagtttattcaatgagatgtttgatttcttagcagaattctaagatgtagatattctcatgaggcaaaaaataaaaa

SEQ ID NO: 149299 - DNA, 201 bp, Homo sapiens
attctcatgaggcaaaaaataaaaaaaaatgaaaggttaaattcctgaaaaatcaggtaagatgataaatgaagatactttactttcttacattgtaattkatgtcatttaactttaccctcatttcatcattctttggaaccagcataatagtcaaatcagttcctcttaatgtcagatgatctagttgccatcacattt

SEQ ID NO: 149300 - DNA, 201 bp, Homo sapiens
aatgtcagatgatctagttgccatcacattttggaagtgaattgagttgagaaaatatacctcttaaacaattatgcaagttaacatttcaaaacacaggyttgtataacatttcaaaacacatagctaatgctatggcattagattacaacatagaataacagttgttcgtgacttttgataaaagaatcagaagtatat

SEQ ID NO: 149301 - DNA, 201 bp, Homo sapiens
caaaaaagtgaaataagaaaaaaaatgagaatgactatgtgattaaaatccactacctattgtaggatcccatggtctcaaccgaagaaatgctgataccrtatttcttatggccagagtcatgggctactcattgaactgatgcaagcagtgacaaagacaacaaaattaaagaggtgggataaaatttgtatcaagtat

SEQ ID NO: 149302 - DNA, 201 bp, Homo sapiens
tatacttaaattacagatttggaagatattcttgaaagataataacattgacacataagattggcaaaaagaagattttttgataagtataggtccttcaytgatcacctccccaagggccttccagacatatcaattacaagtttactaaatacctcatcaggattctgaggtattatatacctcctaacagcctttacg

SEQ ID NO: 149303 - DNA, 201 bp, Homo sapiens
atagactgccaggcacttattaagcattaataaatgtttctcaattggttgattgcttgaataactaaatgtgacattattttcttcattgaaaactgttraactctatttgaggttgtcagtgaagcttacactgattactaatggacatgttttctcctccccatggctgaactgcccatgattattcctggggttatg

SEQ ID NO: 149304 - DNA, 201 bp, Homo sapiens
agtcacctgttccttgcttttatttgtgtgaagtttttaatttactaagtcattcaatttacttgttataagtctatttatattttctatctccatttgartcaatttcagtagtttgtgtgtgtctagacatttactaattttatctaagttatcaaatatttggcatagaatgttcatagtattacctcatggcagtta

SEQ ID NO: 149305 - DNA, 201 bp, Homo sapiens
ttatgaatttgcacttcagtgacttttatgtggcatcattgcaacatggttgaaagggagatttaatctcttaaaaagagtaatggtaaataactcagatkgaaagcagctctggttgtctcccatcatgtaaaattgggagatctttgttgaaaatcagggtattctaaaatgtaattgccatgacatctaaaatcccag

SEQ ID NO: 149306 - DNA, 201 bp, Homo sapiens
gagctcctcataccaccattgcacaactctgcatcctactattctttcttgactaatttatggcagcagcatctttattgcttttaatttccactcttggmcttttgagtccattctcagcaaagcagctacagtgatcctcttaacatgtaatttagattctgtcacattttgtctcaaagccctctaagctaacttaag

SEQ ID NO: 149307 - DNA, 201 bp, Homo sapiens
actgatcacctccccaagggccttccagacatatcaattacaagtttactaaatacctcatcaggattctgaggtattatatacctcctaacagcctttaygacaataattcctttcctcctgacttccatattttaggatacattttctggaaaacctctgtgattacctgttgcctaggaagtaagttcaaaattctca

SEQ ID NO: 149308 - DNA, 201 bp, Homo sapiens
ttcaagcccaaggtctacagggaatttatttaccagcaagagtcctttgccaaaaaggaaaaatataacataccatgaagcagtttcccagggaaatggargcaagaccaccaaatactctattgataaagtttaggggcatattaaaaaaggaaactctctaattgcaaaactatagtcagaccacaaaagctcctgtat

SEQ ID NO: 149309 - DNA, 201 bp, Homo sapiens
catttaggagaagaaaccagcactttaagttcaacaaggtactgcttaatgcattatctctttacaacaagtgcattactttatgcagtcattattttatygttttctcttcacactaatttattaaacacctatgatgtgtttctttaatatgtttatttcctttaaaattatttatcaaataccaacaatgtaccaagc

SEQ ID NO: 149310 - DNA, 201 bp, Homo sapiens
aagaaaaatgtgagtacaatgccaaagcccatcagatgagccatcagggatgtatttccctatattccatctatcttcacattttatgagaactaaaagcrtaatcaataatttaacaagctaatggacatatttttaaacacaatgaactattctgaaaaggggcacgctatcagagccacaaaggcaaaaatggaaacc

SEQ ID NO: 149311 - DNA, 201 bp, Homo sapiens
ggctgtgtccctacccaaatcttgtcttgaattgtagctcccataatccccacgtgttttgggagggtcctggtgggaggtaattgaatcatggggacaartttttcttatgctgttctccagacagtgaataagtctcatatgccctattgcctgccaccatgtaagatgtgcctttgctcctccttcaccttccatcat

SEQ ID NO: 149312 - DNA, 201 bp, Homo sapiens
atgcttgagcctgctcgcttcactcctgagatcttatcaggaagctgctgatcaccagtttcaagggttttgatatgtcaggagactgcctttccctggcmctgctgcaaccgattattattttagagagacagttaacaaccgcctgaccatcacccgatggtggccggacattcctggtgactggaaggcggtgggggg

SEQ ID NO: 149313 - DNA, 201 bp, Homo sapiens
gcgcgatctccgctagctgcaagctccgcctcccgggttcacgccattctcctgcctcagactcccaagtagctgggactacaggcgcctgccaccaccaygcccggctaattttttgtatttttagaagagacagggtttaaccgtattagccaggatggtctcgatctcctgacctcgtgatctgcctgcctcggcctc

SEQ ID NO: 149314 - DNA, 201 bp, Homo sapiens
gaagtatttgtctttctgggcctgacttattcacttagcatatgtcctcctggttcatctatgttgtcacaaatgacaagatttccttcttttttaaggawgaataatattttattttatgtgtagatacatacatatgccacattttatttattaattcatgtgtcaattgacacatagattgattccatgtttaggcta

SEQ ID NO: 149315 - DNA, 201 bp, Homo sapiens
catctgctaagggcctttgtgccgtgtcacccacggcagaaggcagaagagcaagtgaattcccaaaacagagaaaaaatagggccaaccttttatcactsccaagatttctaactcacaccgatgatgccagcattaatccattcatgagagaaaaaccctgatggcctaataatttcttaacagttctgcctcttaatt

SEQ ID NO: 149316 - DNA, 201 bp, Homo sapiens
ataagtcaaacacaaaatgttacaaaaaacaattaattgtataatttgcaattaaatactcagggggataagcagttgcctaatttatttaccaccattcyatttgtcactatgacagtgtgtttacccacagttaaggattatccataaagttcaattatatttactcaattccctattatcaagatttatacattttga

SEQ ID NO: 149317 - DNA, 201 bp, Homo sapiens
atgcctaatgaactaaatattagattatgtttgtaataacatttgaatttttgcttgctctttccataccaattaatctaatttcactttttctttgtctrtgatacacaaaagaacaacactgaaatgccatgatatttttagagttaatattggggtatgaaaagttgtaaaaggattaatgagtggggaaaagtttct

SEQ ID NO: 149318 - DNA, 201 bp, Homo sapiens
attaatatgtgaatctccagccaaaaattaaaaatcataattttatcagaggagcctattaggcccataagttaagtttgcttctggctggagatctcagwaggcacacttacttcagtttctaaaagtgaccacaatataaagctgaattgaaactagatagttttgtattatctttgtgtgcttggatgacctgaagct

SEQ ID NO: 149319 - DNA, 201 bp, Homo sapiens
gtcccctgccaagcagtcggctgagaaagtagcatcaccattaatgagaaattactgtgaaacagactttttgtcatcctctctccctctggtcaagactrtttgtttctctttattccataaatcatattacatgccactctgtctacattgtcagaaatacatccaacacatgttcattgtccatctgttatgtgtaag

SEQ ID NO: 149320 - DNA, 201 bp, Homo sapiens
attatgcatctgtttctaaatattttgaacccaatacccctcatagagcataatttggagatttaaacttaaaataaatctcaggattttaaataacataraagactatttggcttctaatatttccatgtttaccacttgtgaactaatcaaactatagtaagtcttataaatctcactttaaaaagtttatcattgcta

SEQ ID NO: 149321 - DNA, 201 bp, Homo sapiens
cagatctcgtgagaactctgtcatgagacagcactagggagatggtgctaaacctttagaaaccaccctcagaatccaatcacctcccaccaagccccacyttcaacatgtggggattacaatttgatgtgagatttgggttgggacacagagccaaaccatatcaaagactatatcaaaatgtgaatatgcacatgactt

SEQ ID NO: 149322 - DNA, 201 bp, Homo sapiens
agctggaatggtagtgcatcatctaataacccaaactcagaaaatcttgtcttattttattttttctagtttactaaatagcgaagaataagtcatctaakttccttgtgcttctgaatatgtctataaaacgggagaaataaatgttggttctcttactgttttacacaaacagtataagatgtgataaaaagcaagtga

SEQ ID NO: 149323 - DNA, 201 bp, Homo sapiens
tgagatttgggttgggacacagagccaaaccatatcaaagactatatcaaaatgtgaatatgcacatgacttattaggtacatttagggaaagggttagcytgagagtaacaacctaatatccaaatgatttaagaaatatgcataacaccttgaaattaatataaatagtatactaactcagtattattaggacactaat

SEQ ID NO: 149324 - DNA, 201 bp, Homo sapiens
atggttttaaggtgttttaatttttgtattaatagacacatttttggaaacactaagttctttgtttatcttcaacactgactgtggcagaagtttagctygaataaggaatacatagaattatggcaacctctgtgtttggtaaacatatattaatgatatgaaaacttaaagcccttactagttgttacatttttacag

SEQ ID NO: 149325 - DNA, 201 bp, Homo sapiens
tacacctacgcacatcatattcaaactacaaaaaacaaaatttaaaaaattctgaaataagttatagggggaaacagaggagcaaagataagaattacatytgatttctcttcagaaaacatgcaagcaaggagagaacaaagtgaaatatctaaaatgttcagacaaaaagcaccaacctataattctgtactgtgagaa

SEQ ID NO: 149326 - DNA, 201 bp, Homo sapiens
taacatttaaaggattttaaatgccaaattactttaagctagatagtttgggatttcatagaataattattaagtggatccttgtatggatgtctgtttgyttttgtgccagcaagcagacatcaatgcttataagttttaatcacatagcctcttctgtgtagctgcagctgaatgtcagtttatccttgttaatcaaaa

SEQ ID NO: 149327 - DNA, 201 bp, Homo sapiens
tgttccctagaagcagaatgtgagatagagattccattgcaaatgatttaagaaatgctttcaggaaaaacctataagggaaactatgaaactgaaaagaygggaaaagagctgacaaggatgtcatctctggtaaagcctagccttacctgatctgcagggagagaactagtcacaggccaattttctcaccttgaggca

SEQ ID NO: 149328 - DNA, 201 bp, Homo sapiens
ctcaatcccctagctgggggcaatagcagctggcaaagttcagaggagtggagggtttgctctagtctgaaaagaggatgcattcagtggagaaaagagcwtccaccacactctactctgtacacgctcagtttcatttgttatgttcactccaaccagacacattttttctcatgattctataaacttcctgcctgggga

SEQ ID NO: 149329 - DNA, 201 bp, Homo sapiens
acatctctcctctctttcagattatgcttagaggattctgcagcaattctcagtattggacatattcaaaatctcctcaacgtatatccttcccatctatygccttccagctttaactcagttgtgctcccttcaaacattttacatgatttgcgatggttacatgaactctggggaagtgatatttgcaacatctcatac

SEQ ID NO: 149330 - DNA, 201 bp, Homo sapiens
aataatgaaaaaggaaactgaattttttgtttgtgccttacagaaacatttgataagttcaatgtcatatatgagtgcataatactgtattagaacaactrattcataagagtttaaaaatacagttcattttattgagttggctttcttttccctgccaggatattcattaaaacacaaataataacataagggactatg

SEQ ID NO: 149331 - DNA, 201 bp, Homo sapiens
ggaaacaagcagctgctcttgccttttaaaaaaacagtgattaaaagcatggactggaaattcaggtacttcgcatctccatttccttctacctcagcttwaacataagcaaaaacaaaacttgaatttaggttaatgccatgactttttgaaatttcagggaactcttgaaaaagcagaactgattctgaaaaaaacaat

SEQ ID NO: 149332 - DNA, 201 bp, Homo sapiens
atagtagctgttctaattcttcatgtttatgtgggtcaattacccctaccaggatggtaactcatttccatgtctgccaatctactggcacaaaaagtccraagtgaccaggtaggagttttagctttgtgtttggtgagccccttcccatgtctcctggtggaatcttccctgctatgggagctagaattcctagatcca

SEQ ID NO: 149333 - DNA, 201 bp, Homo sapiens
aaacaaaacttgaatttaggttaatgccatgactttttgaaatttcagggaactcttgaaaaagcagaactgattctgaaaaaaacaatatcattaccttrctaaacaataaaatgttccccatagtctacacacagtccctagcttgtagttaatatatttatataaaatgtgtttactatttctcctcctatgggtaat

SEQ ID NO: 149334 - DNA, 201 bp, Homo sapiens
tataaaaatcattgttaaaaacagatttttgttttcattttatagtctccaattcagaatccccagaggataagcctgggagtagatactttacaagcatrctggtgattcatttcatgtgggcaacttgaaaataattgctcgacgtttattagaaccagctggagtatatgatgaagtgcacatttgtaggcattatga

SEQ ID NO: 149335 - DNA, 201 bp, Homo sapiens
aagatgtggaatactgggagatgatcagtttggagaagggcctagtaagggtacatggattgatatgctgattttgaaataaattttaggcatctaacacrttagtcatttggctagatgagtctgtagttcaagtgctacataacaatgagatgtattggcatctagatggcatataaaattacaggactgaatgatata

SEQ ID NO: 149336 - DNA, 201 bp, Homo sapiens
ggaaattctaagaaaaatcaaaaagaaatgctgaagaccaaaaacactgtaacaaaaatgaagaattctcttgatgggctcatgagtagcttggatgcagmtaaggggaaaatctctgagcttgaaaatatctcagtaaaatcttcaaaactaaaaagccaagaaaaaaagagactgaaaagaaaaatccagaatatccaa

SEQ ID NO: 149337 - DNA, 201 bp, Homo sapiens
taaagaagaaagatcacaccatattagtagacgtaaataaaagaatttggaaaaatccatctcccattcatgattaaaaaaaaaaactttcagtaaactargaatagattgagactttctcaacttaatataaaaaatctaggctgggcgtggtgtctcacgcttgtaatcccagcattttgggaggccgaggtgggtgga

SEQ ID NO: 149338 - DNA, 201 bp, Homo sapiens
gctgtaatgcagtggcatgatctcagctcactgcaaactctgcctccagcgttgaagcaattcttctgcctcagcctcctgagtagctgggaatacaggcrggagctagtcaccaggcccggctactttttgtatttgtagtagagatggggtttcacaggtttggccaggctggtctcaaactccttacttcgggtgatc

SEQ ID NO: 149339 - DNA, 201 bp, Homo sapiens
tagtcaccaggcccggctactttttgtatttgtagtagagatggggtttcacaggtttggccaggctggtctcaaactccttacttcgggtgatctgcccrcccagcctcccaaagtgctgggattacaggcgtgaaccattgcgcccggcctatttctccttctaagtgtagttcttacaggaataaatcttgaaacatc

SEQ ID NO: 149340 - DNA, 201 bp, Homo sapiens
tgcggaatttggttttctgttcctgtgttagtttgctgacaatgatggtttccagcttcatccatgtccctacaaaggacatgaactcatccttttttatrgctgcatagtattccatggtgtatatgtgccatattttctttatccagtctaaaattgatgggcattgggctggttccaagtctttgctattgtgaatag

SEQ ID NO: 149341 - DNA, 201 bp, Homo sapiens
aataaaatgtgtctctttgaaattggaagatcagagttactttttatttatagaacacatttcttagtggaaatctattattgtgttccattgtgaaaaayttggcatctatttttagtgctgcaagagaattaaaatctttccaagtgaaacaatcatttctctcttaagtacttattatcttaaagtgtctagagtcag

SEQ ID NO: 149342 - DNA, 201 bp, Homo sapiens
attgtggaaagcagtgtggcaatttctcaaagaacttaaaacagaagtaccatttgattgagcaatcctattattagttatatgccaaagaagtataaatkcttctaccataaagacgcacacacatgttcatcacagagctattcacaacagcaaagtcatggaatcaacctaaatgcctatcaacagtagattggataa

SEQ ID NO: 149343 - DNA, 201 bp, Homo sapiens
tggaaaccagagaacgagagtgaggtctaactccaagttctaaggtattaggccagaatttgattccatcttttgaacaatttttagagaacagagccagrcagtcattacactgtgaggttacttattcttccttcttgcagaatccatgtgatgataaacgacacaaagacatctggtccagagagaaaacttgtgacc

SEQ ID NO: 149344 - DNA, 201 bp, Homo sapiens
agtttatgatttaatgcgtacactatatcttcaagctggtacctcaactgtatctttcaagtggcctttccatcactctcaggcgagcaacttgtagaaastggggtatgttaataggaccagtgactttcagggccatatgcctactgccatgcttcctttaccagaaagaagtttcccttatcccaagcaatagtatgt

SEQ ID NO: 149345 - DNA, 201 bp, Homo sapiens
agcccctattactctccgatttcctttcctggaatggaatcaacactccacaattgagatgaggcaagggaaaattaaaattacagtattcttggccttcygcacttagggtacagcttcttttctatgagtggggctgcatagtggaggaaaactccaggtctcaaatttgctgttaactagaatagaacttctgcatac

SEQ ID NO: 149346 - DNA, 201 bp, Homo sapiens
tactctccgatttcctttcctggaatggaatcaacactccacaattgagatgaggcaagggaaaattaaaattacagtattcttggccttccgcacttagrgtacagcttcttttctatgagtggggctgcatagtggaggaaaactccaggtctcaaatttgctgttaactagaatagaacttctgcatacagagatgcg

SEQ ID NO: 149347 - DNA, 201 bp, Homo sapiens
gaggtcccaggaagcttctaaccttggtagaaggcaaagctggtagtgagatgtcttcacatggtgggagcagtagcaaggatgtgggaggggctacacaygttcgaacaaccagatttgcagagaattcactcactattgcaaggacagtgccaagaaggttagtgttaagccattcatgagaattgtgatctcattatc

SEQ ID NO: 149348 - DNA, 201 bp, Homo sapiens
gatggcattttatagcagtttaaaagtattcttttatatccatgtagttaatagaaatatctgttcatcattatgtctgttaattagttttgctgttgatrttaagtatgcatacatttcttatattattcagtatagaatattatattacaatgaatgagttagccatttctcacttgaaaagttcagcatttgagttat

SEQ ID NO: 149349 - DNA, 201 bp, Homo sapiens
tgtactttgtacataggaagtagactgcttagtaacagggaatttacatccttatttttactttctcgtttcaggctacagatgtcttaaatcctgggacrtcacttctaaatgtatactcaatgccaatgtttactttcttgcttactcaataaagccaaagtttgcttgtggagccaaactgtccagttaaaagaataa

SEQ ID NO: 149350 - DNA, 201 bp, Homo sapiens
cacattttatacaatgtgaatgaaaacttgctggtttttccattagtcccctttaagcagcaaagtagaccttcagcagggtcaagaatattaaaaggatrtgtctcaattgcccaaaatagctctacttaggatcggaaagttcaagactgtagaggtaatgccatttctgttctatttcttttgtcaaaagaaaaatcc

SEQ ID NO: 149351 - DNA, 201 bp, Homo sapiens
gttcctggagtgcaaacatagggtcataaaaatagagaaaataccatttgctggttcttacccctctttatattgacaccttcatccacttttcaagtttytgcccagcgatttgtgtaaaatcctggcaatgactcctgtatgtttatgagccaaatcctctgcacctccatttgtcttttttttttttttttttttttt

SEQ ID NO: 149352 - DNA, 201 bp, Homo sapiens
ttcagagggccagcttgacagcaggactttggagaagtgttcgaccatggacaaactcaataaacccgccccacattcaccacccttcaattccttcatasgacctgactcttcctcagcactggacaagaacttgggtaccaagagggcgggtgcaaaaggctgtcacctgaccttccaccgagctgttaaacaagccat

SEQ ID NO: 149353 - DNA, 201 bp, Homo sapiens
agttggctggaatgatggacctaacataatgaaatgaagatcgatgtaattcttagtatccatgggtccatctgtgaattcaactaactgaaaatgaaaartattttaaaacatagatgattgtttctgtactaaacatgtgcaggcattttttcctgtcattactctctaaataatacagtataacaattatgtacatat

SEQ ID NO: 149354 - DNA, 201 bp, Homo sapiens
gcctcgatttcctggcctcaagctatcctcctacctcagcctgacaaagtgctaggatcataggcatgagccactgcctggtctcagtgctattactaaawcttacgtagcagaggagctggctccatatctcattctcccaaattggtggcggtaagaaccaatattccaaaacatcacccagttggctggaatgatgga

SEQ ID NO: 149355 - DNA, 201 bp, Homo sapiens
aaaattaaatgtgtggctttccacttaaaaagatcattgtacttcttgtgaaattccaaggtgaggtgaggtgctgcctggggcttgtactgctacttttragcttaagcatatgatatttttgtggtcatttttatttatctttcagatcagcattttcatgacccatttatcaaactatggaaatgaccgcctagggtt

SEQ ID NO: 149356 - DNA, 201 bp, Homo sapiens
attcttttctctcttctcttcttattttaccactttttccttccttcctcccttcctttcttccttccttccttcccttttccctctttccttccttcttycttcttgctttcctaccttcctcttgtcttttttcctttcttcctccctttttccctccttcctttatttccattcatttttgccacttcagcttacatg

SEQ ID NO: 149357 - DNA, 201 bp, Homo sapiens
aactaattaataagcaaaatataattgccatttacatttatctcaatatataaatgggaagttaagcctactattgttgacatttttaaaaataagaaatygtatgacaatacattatgatgatcaatattaaacaatgtttacattgatagacatctcataataagctaattgggaagatttttagaaattgaatactaa

SEQ ID NO: 149358 - DNA, 201 bp, Homo sapiens
tataagcaattgggtgaatgctttgcattgcgtgtattgttgaaaatgagctgacttgatgctacattttgatatttaagtgcaagccctgtaaattgtgraacacaagttaaatgatttaaaaaattaaaacactttgagcaagtaattatttcctcttttctctcttgtgtattacatttcttcccagaaatgtccaag

SEQ ID NO: 149359 - DNA, 201 bp, Homo sapiens
tggtatagtggaaagaccacagggctaaggattagtgagtcctgttgctgatcccaggtttgctacttgtgtctcagtgttctaacctatacaatgcagayataataccacaataactaataataggatcattgtgaccctcaaatcaaataatctatgagaacatcttttgaaaactctgaagattttaaaaatgagttg

SEQ ID NO: 149360 - DNA, 201 bp, Homo sapiens
tcacagcgattcatgtaccaccaccaaaagaaaaggggtggggaaatatggtaaccttcttattgagaggaactacaaagtcacatgacaaaaggctgaakaattagacaaatcatgcattctgctacattttttcttctttcttctatattttgaagcaatgattattttcctcaaattatagctacacatttcacaaaa

SEQ ID NO: 149361 - DNA, 201 bp, Homo sapiens
agagaattcactcactattgcaaggacagtgccaagaaggttagtgttaagccattcatgagaattgtgatctcattatccaatcacctcctaccaggctycatctccaacgctggagattacaattcaacatgcaatttggtgagaacacagatccaaatgatatcaccatatatacacttttaagaacaaattataaaa

SEQ ID NO: 149362 - DNA, 201 bp, Homo sapiens
cgtgtcacccacggcagaaggcagaagagcaagtgaattcccaaaacagagaaaaaatagggccaaccttttatcactcccaagatttctaactcacaccratgatgccagcattaatccattcatgagagaaaaaccctgatggcctaataatttcttaacagttctgcctcttaatttcatcacaatggcaattatatt

SEQ ID NO: 149363 - DNA, 201 bp, Homo sapiens
gtcataatgagatcacattttattcaaatatactaacttgattcaaaatttcaatcaattcagtagagcatgggaaacagaaaccagaggaagagagtgcrggacgcagacatagtttgagatgatctttatgaactgaaataagatacaattgaaagagagattaggacttataagaactgaacagtatttcagcattct

SEQ ID NO: 149364 - DNA, 201 bp, Homo sapiens
acatgtggaatgaagacagagggccatttcctctaaggatgtaacctcgaacctcttttacatgattatcagaaatacctaacatatctcaatggtgactkgttatgcattaacccatcttttggtgataggcttgctcctaagctgtggagtggctttggcaaatctaaaacaagctgaaactaacaggaatgagttatg

SEQ ID NO: 149365 - DNA, 201 bp, Homo sapiens
ttttaaaaattgagatgtaaatgttaatgaaagcaagtggaaacctctctcttcattccttcccttactgagaatttaatctcgacagaggtaagagtcamttcatcatacccttttcattctggggctacattcctgacacatatctgccctagtcatctctttagggtaagtcaataattttcagaacactgaccattg

SEQ ID NO: 149366 - DNA, 201 bp, Homo sapiens
agtcacttcatcatacccttttcattctggggctacattcctgacacatatctgccctagtcatctctttagggtaagtcaataattttcagaacactgascattgcctcccctggacctcttgcccaggtgtgattgttactggtgcttattacttgaatgtttgtctatttgtcaataaagacatggattatgcatctg

SEQ ID NO: 149367 - DNA, 201 bp, Homo sapiens
ttattctaaatttattttaactgaatatccatggtgataatatacaatgtttttcattttataaaatgttttggcatacctcgactcatttgggcatcacracaaacctataaactaaattattgttttcatttagccttagagatctctgagattcagagaagttaattgatacactaatgaagagccagtgctcaagcg

SEQ ID NO: 149368 - DNA, 201 bp, Homo sapiens
aaaacgggagaaataaatgttggttctcttactgttttacacaaacagtataagatgtgataaaaagcaagtgattttattttttggacaaaaaatataawtaatttggttgcaattgttatttaaaatgtcatttttatcatcaaatgatatttgaggtgtattagaagcccatgagtgctgggtttatttacagcttga

SEQ ID NO: 149369 - DNA, 201 bp, Homo sapiens
ttttgcttctgaaactattcttgtggtatcagtttattatgctttctgagctatttttaagtgataacacttccatcattattttttattccagtgaaacraatggagtcatcgaacgcaatacttgcttggttgctctaaacaattttttttctttgattttgttctctactaaaatacctcagatgtttttggcaaacg

SEQ ID NO: 149370 - DNA, 201 bp, Homo sapiens
aaagttctcattttctctaggacaaagaatgagctactactgttatacacacagacacacatacacacaggcacacagacacctgttctctagaatgactstcataagattgaaatattatgatgttttaaggctcttttttctccttaatagagatgtacatttcctgaaatggtaattctgagaaattgaggagatgaa

SEQ ID NO: 149371 - DNA, 201 bp, Homo sapiens
acaactattcataaccctaatcctttgccatttcaagaattagtagtcaccccaatgtgtagttcattgctcatggacttgactgtggcaattctcccatwtttcttccacatcaatttttccttctacttgataagacctatcacatcctcacttgctattatattcccacctcgaactaaaaatataaaataaaataaa

SEQ ID NO: 149372 - DNA, 201 bp, Homo sapiens
ctccatctgagaccacctcagcctgggcttcattgtccatatcactatcagcattttggtcacaaccattcaacaagtctctaggaagttccaacctttcycacatcttcctgtcttcttctgaacccttcaaactgttccaacttctgcccattacccagttccaaagttgcttccacattttcaggtgtcattatagca

SEQ ID NO: 149373 - DNA, 201 bp, Homo sapiens; identical to SEQ ID NO: 27640

SEQ ID NO: 149374 - DNA, 201 bp, Homo sapiens
aaatagttgattattttaatattactttttgagcaaaaatatgctaaaataatattttgtctcttattgccatataaccttttactttctttttttgtaayaggaacaactgcactttatttatttcttcttatgcatccttcaatcatcagcaatctccctagtccaaagacatttgaggaagttcagttctttaatggc

SEQ ID NO: 149375 - DNA, 201 bp, Homo sapiens
atttacagagaagcaaatgctgagggattttgtcaccaccaggcctgccttacaagagctcctgacagaagcactaaatatggaaaggaaaaaacctgcaycaaccctgcaaaaacacatcaaaatataaagactgatgacactatgaagaaattgtattaagtaatgtacaaaataaccagctagcatcatgataacaga

SEQ ID NO: 149376 - DNA, 201 bp, Homo sapiens
ttaaatatatatgcaccaaatacaggtgcacccagattcatataacaagttcttaaacacctacaaagagacttagactcccacacaataatggtgggaamctttaacaccccactgtcgatattagaacaatgacagaaaattaacaaggatatccaggaattgaactcagctctggactaaatggaactaatagacatc

SEQ ID NO: 149377 - DNA, 201 bp, Homo sapiens
ttttgatatttaagtgcaagccctgtaaattgtggaacacaagttaaatgatttaaaaaattaaaacactttgagcaagtaattatttcctcttttctctyttgtgtattacatttcttcccagaaatgtccaaggtcatttatttcattttcccaacatgacagatgagaaaatgataaaagattacaaattcacaaata

SEQ ID NO: 149378 - DNA, 201 bp, Homo sapiens
ctaattacttccattcggaagaagctccaagacgagccgcatctcttgtccccaaagccaagatcatcaccatcctcattgacccctcagacagggcataytcttggtaccaggtatggtcagtaaaaaaatcggctaaaagcattttgttatagcttaaatggaggcaatgaaaaataaccagaatagaacctaaacata

SEQ ID NO: 149379 - DNA, 201 bp, Homo sapiens
ctgaaacaaaatcgtattttttttccagtggattttgttcattgtatcttgcaaaatttagaagtcttgggaaatattcaaattcaattgtaaagaatgarcatcattaagtgcttaagctgttagaatgtgcttttaactccagttaaagtgttcttgggatgaattttgaggctatctgcaatatatttaaatatatga

SEQ ID NO: 149380 - DNA, 201 bp, Homo sapiens
gtgggtctgattttacatttgtttaaatagatttttaaattaaatatgtgagcttggataaatctaagaattgatataagattaataatctccttcgacargttccaaatatctttcactttcattattattacacacacacacacactacacactatatatatgtatatatgtatcttttaatgagtttttatttaaaaa

SEQ ID NO: 149381 - DNA, 201 bp, Homo sapiens
atattttcatgtaccagggcaaggaatatgctaaaacccatggtattcttttggtaaatgtgtgcctgtctgtctggttttgggccttgaaaagtatttawcaacaatattgtaaaaactcaaaaattactacattaatttctatgcagttaaaataaatatattgactgttaaaacacaatgtttgacacataaaactca

SEQ ID NO: 149382 - DNA, 201 bp, Homo sapiens
ttatttgggggagttgtgtggatggggtgggtctgattttacatttgtttaaatagatttttaaattaaatatgtgagcttggataaatctaagaattgayataagattaataatctccttcgacaagttccaaatatctttcactttcattattattacacacacacacacactacacactatatatatgtatatatgta

SEQ ID NO: 149383 - DNA, 201 bp, Homo sapiens
ctggttcaaaatagatgcttaaaaagtctgcatggctatccctcattaaaacaaacaaaacaaaattaaaaaccttaaagacctatcagctaaaaagtttrtcaggtctggtgctgcttcaggcaaaaaaaaaaaaaaattataaacttcctgctgtataagaggatgtattacccagtcattaagtttgtctcttagtaa

SEQ ID NO: 149384 - DNA, 201 bp, Homo sapiens
attgcattaggaggagatagtctaaatatgcaaaactgacatattctcctttgtgtattcaaaaataaaaatcacatttttaatgtgagaagaagtaaagrttaaaccaagtattaacttgtcctacatttaatttctctccgaatctcctggttaaatttattcctaaaatactaagcaatcctccaaagcatgtaagta

SEQ ID NO: 149385 - DNA, 201 bp, Homo sapiens
tctgtttcttcctaactcaagcttttctgcacaatttttctttctaaatatgactaagtctatctttcttttcaatctttctcccttgtttttttaatatrgaattcctaaatgaggcaaaatatcagtctactgagaataatacttttcagcttcgtattttatagttaattatgttatgactcatagaaaaattgatcc

SEQ ID NO: 149386 - DNA, 201 bp, Homo sapiens
tgagcccagatcatgcccctgctctccatcctgggccaacaggtatatgaaaaagtgctcaacatcactaatcatcagagaaatgcaaatcaaaatttttrctgcacgcacaaaaattcataatgtgggtcgggcacggtggctcacgcgtgtaatcaagccttaaaaattctcgtagactgaggtggcattactaatagt

SEQ ID NO: 149387 - DNA, 201 bp, Homo sapiens
ttcttacttcaggtgtgagacataggtaaacacttatggtatatcaagttgtatggtccaggcttcctcatctccaccggccagttttgctagggaaggakaactgggagaattgaatgggaaggataactcctttagttaaaacacctacattgaaaacacatatgtcttccatggtggtaatatgtatctatcattctt

SEQ ID NO: 149388 - DNA, 201 bp, Homo sapiens
agactacagaacaatttattaaagtgtcagaaacaaacctttaaggtaaaaaacagctgatacaaaattctctgattacctaaaatgaatctttaatgaartaaatgaaaaagaacagtattccaactgtgctgtttatcattcaaaattaattggataatggttaatttgaaaatataataatctctactgaactgactg

SEQ ID NO: 149389 - DNA, 201 bp, Homo sapiens
cgggtgcagtggcactttcctgtaatcccagctactctggaggctgagacaggagaatcgcttgaaccacggaggcggaggttgccatgagcccagatcaygcccctgctctccatcctgggccaacaggtatatgaaaaagtgctcaacatcactaatcatcagagaaatgcaaatcaaaatttttgctgcacgcacaaa

SEQ ID NO: 149390 - DNA, 201 bp, Homo sapiens
cctaaacaatgtcataataccatttcttacttcaggtgtgagacataggtaaacacttatggtatatcaagttgtatggtccaggcttcctcatctccacyggccagttttgctagggaaggagaactgggagaattgaatgggaaggataactcctttagttaaaacacctacattgaaaacacatatgtcttccatggt

SEQ ID NO: 149391 - DNA, 201 bp, Homo sapiens
aagacaacaaaattaaagaggtgggataaaatttgtatcaagtataagaaataacttatggattaacaaggagaaattaaaaaatgatgcagtgtacttaraactatggttaagaacctgagctttggaatctcaaactcctgtgttgtaagcctgatgcgttactctaagttatgcaatttctctgagttttaacttctt

SEQ ID NO: 149392 - DNA, 201 bp, Homo sapiens
tatttctcatcaagccaaattttaccatgctgaaggtttatcatctctgggctgcgaaaccaaagtttcaaaatgttgttgctagaatatactgactgtamagatgaggcaacacattctgttacaagtcaagtggttctaattactgctttcaacaaaaataattgaacatcctcaatcatgcattagagagaaaacata

SEQ ID NO: 149393 - DNA, 201 bp, Homo sapiens
gttattatcctgaagtaatttttttaattttatgtgactcatttaacacgtgccttttgaaaattaatctcaattgtcttattcgacttatggtaacgacktaagattcttatgttggttgctctccctatccatactcctgcatgccttttcccccaccttttcaagggtcacacagtaggtaagagattcaaactaatc

SEQ ID NO: 149394 - DNA, 201 bp, Homo sapiens
ctttaatgatcgcccttttcccaatttgcaaaagacacgttatttctcatcaagccaaattttaccatgctgaaggtttatcatctctgggctgcgaaacmaaagtttcaaaatgttgttgctagaatatactgactgtaaagatgaggcaacacattctgttacaagtcaagtggttctaattactgctttcaacaaaaa

SEQ ID NO: 149395 - DNA, 201 bp, Homo sapiens
atccacatatttgtctgttatttctataatgaaaggtcaacatcaccatataaggggaaagtggggaaaggaaagctctcaaatgtttctgtttcttgctracttgtcccagggtcttcctgaagaagaaactaattaaggtaaaataaaaattttggtgtatcaccttagactacttaaaaataaatgccacatatttta

SEQ ID NO: 149396 - DNA, 201 bp, Homo sapiens
gagcattataaggcagtcgcaaagactagcatataagagctactttgggagtgctagcgaattgacatttttaaacttcacttgtccttttcatcagtaascaggtaaataaatgcctttaagcttgagccatgctgaatgagcaggttgaaactaaactgtttatacttctcaggtgtatcatttctccctggaatttta

SEQ ID NO: 149397 - DNA, 201 bp, Homo sapiens
aatgaaaaatattgacatgtttgaggattctgattctccagggcattgagatagtacagaccaaaactattaccattaaggatatttctgcctacacaagrataaaactttgagaattcactcaatttgtgtttttatgggaaggaaaatttaaactgtatggggattggtaggaatatataacatgaaagcaagatatta

SEQ ID NO: 149398 - DNA, 201 bp, Homo sapiens
ttttgtatttttagtagagtcagggtttcgccaagttggccaggctggtctcagactcctgacctcaagtgatcctcacaccttagcatctcaaaggtatyaatatttaaatgcaaaaattataaggcctattaggacaactaatttgataagaagaatctatctccttttatctatcattaaagacagtgaagaaaaacc

SEQ ID NO: 149399 - DNA, 201 bp, Homo sapiens
aagttttaattccccataaataccatgaatatttctgggcaaattctggagtatttaattccattaaaaaccaacaatcttacattctaaacagcagtgtrtgtatgtgtcatggtgtgtgtgtgtgtgtgtgtaatgcttcattttcaaagcagtacttggcaaggaggcaggtataatttatgattgattatatagatt

SEQ ID NO: 149400 - DNA, 201 bp, Homo sapiens
gctagaatttatacatcctatgctacctacaagcaatcaaaggaatatcctcatcaatcatgtagtgtttctcttttaaatatgagaaatactttattttrtaaagtatatgttatattattgcaaattcttctttttgtgagttttccctgttatcagtttgattaagtaaattttttatatgcctacctgtgcagaaag

SEQ ID NO: 149401 - DNA, 201 bp, Homo sapiens
taaaggcaggtcatagttcaataaaattaggaaatataaacaataatcaactggcatggaaaaaagtaaatattgaaaggtagtaagcaatttctagttcwctaaaatcttacaatttataaataattctatctggaacaattgtttaacttgaaactcttacaatgtgactaaaatgcatacaatctaaataaaattcag

SEQ ID NO: 149402 - DNA, 201 bp, Homo sapiens
ttactattattttcttcatgaagcctgctccaaattaataaccaaaaacttagttcttcacacatccaaaaaaagatttccttttaacagtcaagggtatrggatgttaaaacatcaactaggattagtgattaattataaatgcttgtggtgatgcacatcttatatgaaacctgaaagtcacatggagcaatagagctc

SEQ ID NO: 149403 - DNA, 201 bp, Homo sapiens
tgcctactaaagtaaaaccacaaagcaatgaattgatataacttagagaggataaatgtcctttgttagacttaaggcatatgaagttgccaatgcaataratgaaaccaggacagcaaaatcatgtagattcaaggttatgacaaccctatctaaaaaaaatgactttcggtattctggagggctctcctttctctgatt

SEQ ID NO: 149404 - DNA, 201 bp, Homo sapiens
gctgtgccttacaacagctgctgtggataacaaggagagaccacagcccatcctgagacctcggcattacctgagagcaaaggagatgctctcagcatgtrtataaatatgttgactttgctgccagggctgtattttaccttaatgcagttaaatattctcatcctgaggcagaaaacaatgtttaggggcactgttatg

SEQ ID NO: 149405 - DNA, 201 bp, Homo sapiens
tgctgggaggtcaggcattcaacaatagcaagaggaagatcacccttgtgagagagagtccatgcatgaaacctctgtaccagaaaacacagccagtcttytcagggatcatttctgtggaaactactagaagactcaattgaagtataagttcttctagagctctacatttacttatatcagtctaatgagcagggatgg

SEQ ID NO: 149406 - DNA, 201 bp, Homo sapiens
agcctttcctgaaaggaactctggaatgagttgcttcagtcattggcctggatggcgtctgagagtcgcaggtatatctgtgtaactaccagggcaataaygctcctgtttggcctaggttataggtgactcatcagagaaggcgacaggtgtgagctattagcagaaaaaacttccacaattggtgaataggcgtacctt

SEQ ID NO: 149407 - DNA, 201 bp, Homo sapiens
aaacatatgttttacataacctgaattttaaacttcccacttgaatgccataacctcatattttctctccaataccccaactccaacaacttttacctcamtggccctcatcatccaaattgtctcattttctgattaattcactatagatttaatccctgctctacatctttaatcattgcccttctctcacagggcaaa

SEQ ID NO: 149408 - DNA, 201 bp, Homo sapiens
gaaaatgtgctacatatacacagtgaagtattatttggccataaaaaagactgaaatcctcccatttgcagccacatggatggaactagaggctattatgytaagtgaaataagccaagcacagaaagacaaatatttcatgctttcactcatatgtggcaaattaaaaagtgggttttttgaagatagagaatagattgg

SEQ ID NO: 149409 - DNA, 201 bp, Homo sapiens
acagatttttacattcctaggaaagttgtcatatctttgagcattgttttgtatgtgactgtgtttatcattcaaacatcaaaagtacacaagcatatagyaaaatgtccccagagtgcaaggactgagaatttaaaggccagtgaaattgcacaggaaagggtgtggcaggaaaaaggatatatatgcaggagtatatac

SEQ ID NO: 149410 - DNA, 201 bp, Homo sapiens
cttagtagatacaaaactctttactaagagccaaagtgattaagatccattaggtttctaaacatatgtaatagtgtggaattactaaacaaaaaataacyctttagatttttagatacatttcttacactcagtgtaagaagaggtagtatgattgtcataactgtgttgttacaggaaggtagagaaccagtagaatgt

SEQ ID NO: 149411 - DNA, 201 bp, Homo sapiens
ttggcaccagggaccagtttcatggaaggcaatttttccacagacgagaggtaagaggatggttttgggaggattcaagtacattacatttattgtgcacytcatttctattattattacattgtaatatattatgaaataattatacacgttaccataacgtagaatcagtgggagccctaagcttgtttccctgcaact

SEQ ID NO: 149412 - DNA, 201 bp, Homo sapiens
taagttaaaaaggcccccaaatctatttggactcaataaccgatatgatcaatgacaacttgaactcaggttaaagttgctttcacttagtttgctatcaratgaataaacaacaaaatgatttatacatatcagtaacacaagtgtaaagatacaacttcctgtttattcaagggtgtgtgccaactttatatttagcaa

SEQ ID NO: 149413 - DNA, 201 bp, Homo sapiens
ccaggctggtgttgaactcctgagctcaagccctctactcgccttgacctcacgaagtgctggaattacaggtgtgagccactgcgcctggcctaatagtrtaatataatcataatgcaacttaatattaattatattatcagtaatgcccttattagtatttttcaaatttgaacattttacaagtttcttttaaaaaat

SEQ ID NO: 149414 - DNA, 201 bp, Homo sapiens
taattttggagcctataggtgttttactctttatattataagctaatactataaatgtttttgagacagggtctcaccctgttgcccagactggagtgatsatagctcagtgcatcctgggcctcccaggctcaggttgatcctcctaactcagcctcccaagtacctgggactacaggcatgagccatcatgcttggctc

SEQ ID NO: 149415 - DNA, 201 bp, Homo sapiens; identical to SEQ ID NO: 27651

SEQ ID NO: 149416 - DNA, 201 bp, Homo sapiens
gagttgggcttcaaaccagtggtgtcctggggattctaggtggcctggcgggtcgcaggcgtcttgtcacccgcagtaaagcccttggcctccgccctattcccgtctctgcccccaggcccaccccatgtcctgcaaacctcgctgcaggacgggcgggcgcggcggctgacatctgtaatcccagcagtttgggaggcc

SEQ ID NO: 149417 - DNA, 201 bp, Homo sapiens; identical to SEQ ID NO: 27658

SEQ ID NO: 149418 - DNA, 201 bp, Homo sapiens; identical to SEQ ID NO: 27659

SEQ ID NO: 149419 - DNA, 201 bp, Homo sapiens; identical to SEQ ID NO: 27660

SEQ ID NO: 149420 - DNA, 201 bp, Homo sapiens
gcacctgtatgtggcagggatggttgtaggcatctgggtacagcagtgtacaaaaccaggaaggccctgccccgcagaggcacatgaacagggcagtgcayagtgaccacgtggcatttcgggtggtggtgactgcggtggggaagacagcaggggcgctgtcgagggagacgacggctgggttgggaggggcagaggccc

SEQ ID NO: 149421 - DNA, 201 bp, Homo sapiens
cggtgggcgggggtgtgcggtctgctgctgccgcggccgcgcgggcccgggagccccgggacgcacaggcccaggagccccgggacgcacgggaagccccyatcgcggcggaaactgcggccagcggtgccggggccggtggagggacggccagagcagcggagaacgagcggagccgattctcccgcaacagtggacgcg

SEQ ID NO: 149422 - DNA, 201 bp, Homo sapiens
atttcgggtggtggtgactgcggtggggaagacagcaggggcgctgtcgagggagacgacggctgggttgggaggggcagaggcccaggcccaagggtcaragctcacctggcttccccaactgggatggggccatgtggctgcaaggcaaagccccagttcctgaagggcctggggtgtgaagggtttctccccctgctg

SEQ ID NO: 149423 - DNA, 201 bp, Homo sapiens
cgcagctgtcagtcaagcggacacgagaaacgcgaaccgccgccgcagctttacggccctgctcagacgccgtagcgccgggatgcaccaagacggtgggygggggtgtgcggtctgctgctgccgcggccgcgcgggcccgggagccccgggacgcacaggcccaggagccccgggacgcacgggaagcccccatcgcgg

SEQ ID NO: 149424 - DNA, 201 bp, Homo sapiens; identical to SEQ ID NO: 27652

SEQ ID NO: 149425 - DNA, 201 bp, Homo sapiens; identical to SEQ ID NO: 27653

SEQ ID NO: 149426 - DNA, 201 bp, Homo sapiens
cagtcactggggtgcccccccccacctcgtagacactggaggcatgatcccgctgcacacccacctccaccttgtagatgttggaggcatggtctcgctgyccacaaagagccaccaccgtcttgcagcagctgtctgggaccacacggccaccggcctcctgtgagcggatccactcactgtctcgccagtcctgtgagt

SEQ ID NO: 149427 - DNA, 201 bp, Homo sapiens; identical to SEQ ID NO: 27654

SEQ ID NO: 149428 - DNA, 201 bp, Homo sapiens
cgcaaggccctcctccaccatgggtgccaggctggggagtctgtcctcctcctggcactcagggatttctggccagggagaggccccaaacccacctgggyagccaaacgcagtgcccactactccctgccctgctggctcaaccccgcaacacctcgcccctcagaactagctctctggagtgaggtaactgtccttcca

SEQ ID NO: 149429 - DNA, 201 bp, Homo sapiens; identical to SEQ ID NO: 27655

SEQ ID NO: 149430 - DNA, 201 bp, Homo sapiens; identical to SEQ ID NO: 27656

SEQ ID NO: 149431 - DNA, 201 bp, Homo sapiens
gtctcactgcccacatccggccactggggtgaccccccacctcctggtagatattggaggcgtgtcccactgcccacagccagtcactggggtgccccccmccacctcgtagacactggaggcatgatcccgctgcacacccacctccaccttgtagatgttggaggcatggtctcgctgtccacaaagagccaccaccgt

SEQ ID NO: 149432 - DNA, 201 bp, Homo sapiens
gaggccagcaggcagtgagaggcaggttggatgtgggctccaggcctttgcagaccgtagagaactcagttggcctctgctcctcccctcgacacagggaygcgctggatgccctgggcctgaagcgctactgctgccgccggatgctgctggcccacgtggacctgatcgagaagctgctcaattatgcacccctggaga

SEQ ID NO: 149433 - DNA, 201 bp, Homo sapiens
gaccgtccactcggctaccaggggtctgcagtgtgcgggagcagcaggaggagatcacgttcaaggggtgcatggcgaacgtgacggtaacccgctgtgarggcgcctgcatttccgctgccaggtgagtccacaggtgggaggcctgccccacgtccaccaaggtgctcacaaccccaccccagagaggttcgggcaccc

SEQ ID NO: 149434 - DNA, 201 bp, Homo sapiens
cctcgcgttccagggatgtccctcccttccctcctgggtgttcctctcacagcaaccacccagggactgggtccctcgcatgcatcgacctccaccaggcracaacgccacagttgccttcgtggtctctcacgtgggtggcagctcgttgctgcaagctgagggaatcttggttcgggtccctccctgagaccgggactt

SEQ ID NO: 149435 - DNA, 201 bp, Homo sapiens
ggggaccccggtctctagccagggtttccctccctcctcgctccatgcccaccctgggcgctgctgaccgtccactcggctaccaggggtctgcagtgtgygggagcagcaggaggagatcacgttcaaggggtgcatggcgaacgtgacggtaacccgctgtgagggcgcctgcatttccgctgccaggtgagtccacag

SEQ ID NO: 149436 - DNA, 201 bp, Homo sapiens
cctacgcccacctcacccggtaagtggcatctctgtggcccttctcctggcctcacctctgtgctcatgactcccaggcagcccctgcctcagcttacccytcatggtcctgtgatcccaggaccacacgcctgttccctgccttccctacacacctgccaggcgtttccactctcctctcctgggcaccctctatgccaa

SEQ ID NO: 149437 - DNA, 201 bp, Homo sapiens
cctgaccagctccctcactgcccatggaagcacccctgcttctgccccggtatcttctctcgggacacctacgcccacctcacccggtaagtggcatctckgtggcccttctcctggcctcacctctgtgctcatgactcccaggcagcccctgcctcagcttacccctcatggtcctgtgatcccaggaccacacgcctg

SEQ ID NO: 149438 - DNA, 201 bp, Homo sapiens
caccatttcctgagggcctgacctgggcttgcaggttcggctccaagcgcagcaggcatccaatctgggtggttttcgtgtggatgattccagctcccacraaattcgcaggattaggatcaacttcttcaagaagtgcagaaccaaatccaatgatctgtccaaagaaacaggagaatgaggaccctggcgcggggtcgc

SEQ ID NO: 149439 - DNA, 201 bp, Homo sapiens
aacagcaaaggcaagtgttctcagccaggccagagaccaaaacccaccttttcaaatgagccccgtccccacccctgacccctacaggaaacaggtttctyacttgctcaactgcttccaacgttgaaagaaatcctgagaagccatttctgtcggctggaagaatttgttgagagtgatgggcagctgcacagacacgtt

SEQ ID NO: 149440 - DNA, 201 bp, Homo sapiens
ctttgtgtatggctgaggtctgagctctgtggggctccacaaggggagaccacaccttgggcaggagagtccagagacaggtggggaccccggtctctagycagggtttccctccctcctcgctccatgcccaccctgggcgctgctgaccgtccactcggctaccaggggtctgcagtgtgcgggagcagcaggaggaga

SEQ ID NO: 149441 - DNA, 201 bp, Homo sapiens
acctgttgaaggtggagctggacctggcaaccagggcacctgctccttcgtgctcatgccaattctctgggccacggctcttcccggcccatgcctgtgarcgagtccactgctccccaggccatgggatgcctggggacagagcacacctcaggccttatccatgtccacctcacctcacctcgcgttccagggatgtcc

SEQ ID NO: 149442 - DNA, 201 bp, Homo sapiens; identical to SEQ ID NO: 27663

SEQ ID NO: 149443 - DNA, 201 bp, Homo sapiens
tcctggggcagagagtgcagtctggacacctgtgtggcatgagacctctttccctcctcccctcctgctctggccattcagtccacagtgagctttgggaytcccaggtacacaaggtgaccttttcttccaggacagatattgccttgacattgatgcaggttgtagcacagcttgtcccctgatgcccagtgcaggcct

SEQ ID NO: 149444 - DNA, 201 bp, Homo sapiens
ctgggtctgtcctctgcaaagccatgtggctctacctggcggtcctcctgggcctatactaccttctgcactggtactgggagaggcaggtggtgagtcasctgagagacaagtacgtgttcatcatgagctgtgactcacgcttcaggaagctactggccagacaactgaatgcacaggcttgcgggagctgcatgtagg

SEQ ID NO: 149445 - DNA, 201 bp, Homo sapiens
gcccaggcctagggggagcctcagctgcctgcctgtgctgtggggtcctcatgaggtgaagcacagggccaggcctgtggaggaggctgggcaggtgggckcatatgggctcgtggaggccctggacaggagctgtgcctcatactgttggcagtggaacccccaaaaaagggatttgctcaggggagctctttggtctaa

SEQ ID NO: 149446 - DNA, 201 bp, Homo sapiens
ctcctgtctgaacagaggccagactctcacttcaccccagcccgtctgggtctgtcctctgcaaagccatgtggctctacctggcggtcctcctgggcctrtactaccttctgcactggtactgggagaggcaggtggtgagtcacctgagagacaagtacgtgttcatcatgagctgtgactcacgcttcaggaagctac

SEQ ID NO: 149447 - DNA, 201 bp, Homo sapiens
agcccaggcctagggggagcctcagctgcctgcctgtgctgtggggtcctcatgaggtgaagcacagggccaggcctgtggaggaggctgggcaggtgggygcatatgggctcgtggaggccctggacaggagctgtgcctcatactgttggcagtggaacccccaaaaaagggatttgctcaggggagctctttggtcta

SEQ ID NO: 149448 - DNA, 201 bp, Homo sapiens
ttaagtcctcctgtctgaacagaggccagactctcacttcaccccagcccgtctgggtctgtcctctgcaaagccatgtggctctacctggcggtcctccwgggcctatactaccttctgcactggtactgggagaggcaggtggtgagtcacctgagagacaagtacgtgttcatcatgagctgtgactcacgcttcagg

SEQ ID NO: 149449 - DNA, 201 bp, Homo sapiens
agagccagaaccattgttgccagttctcaaaggggttgtgacccagtcagccctggtggccatggcagcctcctggattggggaagctcctggagatgggrtctgagctggagattgaggatccccacctggcagccttggacagaaatgggggaatgacttttgtcttcagcccaggcctagggggagcctcagctgcct

SEQ ID NO: 149450 - DNA, 201 bp, Homo sapiens
tctgtgttcttaagtcctcctgtctgaacagaggccagactctcacttcaccccagcccgtctgggtctgtcctctgcaaagccatgtggctctacctggyggtcctcctgggcctatactaccttctgcactggtactgggagaggcaggtggtgagtcacctgagagacaagtacgtgttcatcatgagctgtgactca

SEQ ID NO: 149451 - DNA, 201 bp, Homo sapiens
ctgagagaggagcaagagagccagaaccattgttgccagttctcaaaggggttgtgacccagtcagccctggtggccatggcagcctcctggattggggargctcctggagatggggtctgagctggagattgaggatccccacctggcagccttggacagaaatgggggaatgacttttgtcttcagcccaggcctaggg

SEQ ID NO: 149452 - DNA, 201 bp, Homo sapiens
ggccggctctgagaggcatttacagaacctcaaggagctgtcggactaggccagccccgaggtcaaggagacgtatggggagaagtttctgatatcccgtragtgagctgtggacagtggggagataaagaaatccttgtctagaagtctgggtccatcattagtgcctccaacagtatgagaatctgtcctccaaactct

SEQ ID NO: 149453 - DNA, 201 bp, Homo sapiens
ggacatgaacctgttggggatgattgatgtgactctgatcctgctgccctaatgaggaaggccaggggctgcatggtcaacctctccagcatcgcaggccrggtttcactttttggtgcaggctactgcatctccaagtacagcgtggaggccttctccgactccctctggtattggcctgggacagggccctccctcatc

SEQ ID NO: 149454 - DNA, 201 bp, Homo sapiens
gcacaaacacaagagtgatgctctcatcttctggccatcccaggactctggggcctggtgaataactctggcatctgcctgccctccagctgcaatgagtrgttgatggaacaggactttgtgacctgttggtcacaaagtgaccaactttgtgatggaactggacatgaacctgttggggatgattgatgtgactctgat

SEQ ID NO: 149455 - DNA, 201 bp, Homo sapiens
catccctcaaggtcccccaccatatcccaacacaccccctcctccagtggcagggagtgaaagtcacgtctggactcatctttcttgttttccctcccttkgttgagcccctgctgtgtgctggagagaaattatcttgaattacctagtcctcatcctcagtgtcttcggtgttctgatgatgttgcaagtgtgaactca

SEQ ID NO: 149456 - DNA, 201 bp, Homo sapiens
gggggtcccataggcagaaaatgtctgaggcagactggaactgacatgtttggctccagagcccagaatgaagccactgtgacatgcagttgcagggagcytaggagacatggggtgagcatcttagtccatacaacagactttttaggcccttggatgagtgcccaataaactcagcccaggacagcaacagggttttgg

SEQ ID NO: 149457 - DNA, 201 bp, Homo sapiens
gagcatgtgctgaccgcctgccacccctgcacttgctacacagctggctgggacaccaagcttctctacctccccatgacctacatgtctaccttcctggyggatgccatgctccactaggttctccaaggctggccaagggcctgtgaagccaagactcaggtgcatgttttcatggatttggggtatgccataaggggc

SEQ ID NO: 149458 - DNA, 201 bp, Homo sapiens
cagggagcctaggagacatggggtgagcatcttagtccatacaacagactttttaggcccttggatgagtgcccaataaactcagcccaggacagcaacarggttttggccctgacctaaaagctctgacacctgagagaggagcaagagagccagaaccattgttgccagttctcaaaggggttgtgacccagtcagccc

SEQ ID NO: 149459 - DNA, 201 bp, Homo sapiens
caggacagcaccaagccatgagggatccactaccatgacccaacacctcccaccagctcctgcctccaatattggggaacgcatttcaacatgcaattttkgtggcacaaatatccaaaccatatcacaagatatgtagagacaagttctgacccttgtttgtagatcagagtggtgtgtttcatggtgtgtgtgtgtggg

SEQ ID NO: 149460 - DNA, 201 bp, Homo sapiens
tctctctcccctggagagatatttgttggaccctcattctgttttctcaagttctgtccatgcacttcacagcattggctttactgcatgctgggtgccargcactaggagcagagatgggaaggaccacccctcaccccccaataccttgaaatgggtgcaaaccttgaaactctgaagcctccccatccttgtttcctc

SEQ ID NO: 149461 - DNA, 201 bp, Homo sapiens
tgcaggcctgctctctaacttcccctagtcttaggatttaagtgtatctctcctaaacaggatgcagaaagtaattactcatgtgtttttcttattctttmctttttctttttctcttctgtcctttccccttggtttctctgtcttagcccattcctgtcttcctatttcctgtctctgtctctctcccctggagagata

SEQ ID NO: 149462 - DNA, 201 bp, Homo sapiens; identical to SEQ ID NO: 27669

SEQ ID NO: 149463 - DNA, 201 bp, Homo sapiens
ctctgacaatgtgttctttaactcaacagttacagtggtggccttttgattccccatcttactaatcatggcaaacatattcgctctcctgttgcagtttkgggaagtccattccacaactcctttcaatgattgtgtaaacactaattctctacactaagttctcctcagttcaaaatacctagagtagtttctgttttc

SEQ ID NO: 149464 - DNA, 201 bp, Homo sapiens
gaactacacagggacagcactaggattgaagcagacagaaacttctcagctggaggaaacaggcctgaggggcatcctggcctggtctggctctgcacttwtccagaatgtgactaagagttcatagttctagaccaagctttgtgtgaggaaccttctattccagatgttttctggtaattaagatgggagatgtttgtt

SEQ ID NO: 149465 - DNA, 201 bp, Homo sapiens; identical to SEQ ID NO: 27672

SEQ ID NO: 149466 - DNA, 201 bp, Homo sapiens; identical to SEQ ID NO: 27674

SEQ ID NO: 149467 - DNA, 201 bp, Homo sapiens; identical to SEQ ID NO: 27670

SEQ ID NO: 149468 - DNA, 201 bp, Homo sapiens
gaaaccccgtctctactaaaaaatacaaaaaattagccaggcatggtggcgggcacctgtagtcccagctactcgggaggctgaggcagaagaatggcgtraacccaggaggtggagcttgcagtgagctgagatcgtgccactgcactccagcctgggcgacagagcaagactccgtctcaaaaaacaacaacagcagcg

SEQ ID NO: 149469 - DNA, 201 bp, Homo sapiens
atcgcttgaacctgggaggcctaggttgcggtgagccgagatcacaccattgcactccagcctgggcaacaagagcgaaactccatctcaaaaaaaaaaaattaattaatttaaaaaaaatgaagttgaatgctttggggaaaggacattagagaagaaggaaaacagacagaaaatgtcagaacagataattccaaatcc

SEQ ID NO: 149470 - DNA, 201 bp, Homo sapiens
ggcgacagagcaagactccgtctcaaaaaacaacaacagcagcgaacatggcgctgtgagtggtgcggagcgtgcgggccctgctctgcaccctgcacgcsgtcccgtcacccgccgcgccctgcccgccaaggccctggcagctgggtgtggacgccgtccgtacgctgcgcactggacccgctctgctctgggtgcgta

SEQ ID NO: 149471 - DNA, 201 bp, Homo sapiens; identical to SEQ ID NO: 27673

SEQ ID NO: 149472 - DNA, 201 bp, Homo sapiens; identical to SEQ ID NO: 27680

SEQ ID NO: 149473 - DNA, 201 bp, Homo sapiens; identical to SEQ ID NO: 27683

SEQ ID NO: 149474 - DNA, 201 bp, Homo sapiens
aatcatctaagctcctgtatcagcactcctcatcatcactcatctgccaagctcctcaatcatagccaagatcccatctctccatatactttgggtatcarcatctgtcctcatcagtctccataccccttcagctttcctgagctgaagtgccttgtgaaccctgcaataaactgctttgcaaattcatctgaaagtgtc

SEQ ID NO: 149475 - DNA, 201 bp, Homo sapiens
tggggcagcaactgagggagaagagagctgacgttagtgcttaggagacgttgcacactttgcagacaggaagtaaaggaaatgggaccccagagtggccrcagaggggcctgtggggtaagacactacagtgtgtgtcataaccaagacccgatcagggagtagttacttctcttcttttcttacaggaaacatggttcc

SEQ ID NO: 149476 - DNA, 201 bp, Homo sapiens; identical to SEQ ID NO: 27682

SEQ ID NO: 149477 - DNA, 201 bp, Homo sapiens
ttaggctgcaagacaagttatgctaataaagaacccgggagaagtggcttgtgtctgttcaagacaaaatcatgctgaagtcacagagaattttgtttacygttggcttatactttattattcctgcttcatataaaacagtcttctcccaaagctcgtaaatatcaaagtagatcttttctaaagttctgcaggcaaatg

SEQ ID NO: 149478 - DNA, 201 bp, Homo sapiens
gactgggtaagtcaacgatccccagagctgggacagaaggggcagcaatggggcagcaactgagggagaagagagctgacgttagtgcttaggagacgttscacactttgcagacaggaagtaaaggaaatgggaccccagagtggccgcagaggggcctgtggggtaagacactacagtgtgtgtcataaccaagacccg

SEQ ID NO: 149479 - DNA, 201 bp, Homo sapiens
ccaagggatgctttatttaaacagttccaagtaggggagaccagctgcccctgaaccccagaacaaccagctggatcagttctcacaggagctacagcgckgagactgggtaagtcaacgatccccagagctgggacagaaggggcagcaatggggcagcaactgagggagaagagagctgacgttagtgcttaggagacg

SEQ ID NO: 149480 - DNA, 201 bp, Homo sapiens
gcacactttgcagacaggaagtaaaggaaatgggaccccagagtggccgcagaggggcctgtggggtaagacactacagtgtgtgtcataaccaagacccratcagggagtagttacttctcttcttttcttacaggaaacatggttccaaaactgttcacttcccaaatttgtctgcttcttctgttggggcttctggct

SEQ ID NO: 149481 - DNA, 201 bp, Homo sapiens
tcaacgatccccagagctgggacagaaggggcagcaatggggcagcaactgagggagaagagagctgacgttagtgcttaggagacgttgcacactttgcrgacaggaagtaaaggaaatgggaccccagagtggccgcagaggggcctgtggggtaagacactacagtgtgtgtcataaccaagacccgatcagggagta

SEQ ID NO: 149482 - DNA, 201 bp, Homo sapiens
tgcaagacaagttatgctaataaagaacccgggagaagtggcttgtgtctgttcaagacaaaatcatgctgaagtcacagagaattttgtttaccgttggyttatactttattattcctgcttcatataaaacagtcttctcccaaagctcgtaaatatcaaagtagatcttttctaaagttctgcaggcaaatgaaagta

SEQ ID NO: 149483 - DNA, 201 bp, Homo sapiens
gtggtatctctttccttcatagatagtactatactcttgtggggttttgtgtatacgtgtgtgtgtgtgtgtgtgtgtgtgtgtgtgtgtgtgtgtgtgtkcacgcgcatgcgcacatttgctcagaatgagaaaaaaatggtatttttccttctttccagtatatttctcccctcatagagctgtaacatgaatactaaa

SEQ ID NO: 149484 - DNA, 201 bp, Homo sapiens
gcatacggataggcttatattcaaaacatcttagtcatacgaccataaattaaaagtggagtcactaaatagtttgcagtacgtttctaatataagtgtasgtgggtatcaaaacaagacaaatgctgttcagggaaagaagttggcaagcttaaggttaaacaaaaataaaattacatgtgttttcgccttcctagctcc

SEQ ID NO: 149485 - DNA, 201 bp, Homo sapiens; identical to SEQ ID NO: 27686

SEQ ID NO: 149486 - DNA, 201 bp, Homo sapiens
ggaggtggaggttgtagtgagccaagttcacgccattgtactccagcctgggctataagagcgaaactccgtttcaaaaaaaaaaaaaagaaagaaagaaaaatactgatttagtaaatgacttgatttccaaaaaggtcattagcaataagttgttttgtttctgaccagtctggccaacatggcaaaaccccgtctcta

SEQ ID NO: 149487 - DNA, 201 bp, Homo sapiens
aggaggtggaggttgtagtgagccaagttcacgccattgtactccagcctgggctataagagcgaaactccgtttcaaaaaaaaaaaaaagaaagaaagaaaaatactgatttagtaaatgacttgatttccaaaaaggtcattagcaataagttgttttgtttctgaccagtctggccaacatggcaaaaccccgtctct

SEQ ID NO: 149488 - DNA, 201 bp, Homo sapiens
ttgaattataaaattaaaatgtacttttatttttatttttggttcttgagcatttgagcaagttaaaaaacaattgcatagtatatttgagagcttaattytacattatttcccaaatactaaccctgacaaataatattgagtagtaaaatgtaagcatgattatgaagagactgagattagaaaaattattaacattat

SEQ ID NO: 149489 - DNA, 201 bp, Homo sapiens
ttattaattacatttagaatatttaaatcttaaattattctattgggaaattttcttctcctctcactatacctgctgcttatacaagagaacaaacaccrcagtttagttttatttaatctgaattttaattcttttcctttggtcatagttaggttatagaaatagataggttactgatgtaaataggctggaaatata

SEQ ID NO: 149490 - DNA, 201 bp, Homo sapiens
actattttggtgaaaagcgttgtttgtgtccctgtccaagattttcatcttagttctaatacttatttgtggagtgacttggcatattgctagttttctckgtctcaatttcatcatctataacgtgggtataataatacccacctcgaacactttttgttagaaccgaatgaggtaatgcacgtaaaagcttaacatagt

SEQ ID NO: 149491 - DNA, 201 bp, Homo sapiens
tccaagtttggatgataaactaagtgtccaccctattgataacattttttcttttattctatattaatagtcccctgttctcatctgtatttctctagacwctgatacatttttgtcaggaaagatgaaaatttaaaacctgaattttagatcatattaaaacttaattaaaatgctatattaaaaactaatatatgcatt

SEQ ID NO: 149492 - DNA, 201 bp, Homo sapiens
agctaagctgtttccagggtgacagagtggcgacctcggtggtcgattgagcaggtctgagaattgttcccaaagggttgtgcgtcaccgagtcgttggcrctgtcatggcgggtgtgctgaagaaggtgagacgaatggaggtcactgttggaatttagactgtgggggtagactcagtccgatagccctacttcccgcg

SEQ ID NO: 149493 - DNA, 201 bp, Homo sapiens
gagtcaggaaaaaagctccaaacaagcgagactgagagaccagtagctggctttagaccagttttagccgggggattcgtggttttgtatttccttagcgkgctggatgtatggaaaccgtagtaaacagcatgaatcgtgttttgtttttgaacagaccactggccttgtgggattggctgtgtgcaatactcctcacga

SEQ ID NO: 149494 - DNA, 201 bp, Homo sapiens
agtaaacagcatgaatcgtgttttgtttttgaacagaccactggccttgtgggattggctgtgtgcaatactcctcacgaggtatgtacctttgttctttyttcgttcttgaattcccaaggaagactaaattcctgtcactttgcttattgcagggttaacgggatacagatgtttcaagcccttaattacaagccgcgt

SEQ ID NO: 149495 - DNA, 201 bp, Homo sapiens
tagatgaaaagacatacttctgatgctcaaaaaacttgtgaaatattattaagataaaaaacctcaccagctaaacttttaaacactatagcctatttcartcaaatagaagataacaaaagatatcctttcttactcctgattatgtagatgtgagaattaaggtaatttaattacttaatattcaacatttgatggtgg

SEQ ID NO: 149496 - DNA, 201 bp, Homo sapiens
cttagttttctaaattattttaatattaaaaatattcattattcattttaacctgtagtaacaacaggagatactttgaaatgcttgattttatcaagccwctaggtggcatctttgtaaaaataaaagcacatcaaaagaaatgtttattacataaataaatgctgagatgaataaaggtagatgtttcatgagaaatac

SEQ ID NO: 149497 - DNA, 201 bp, Homo sapiens
tttcatgagaaatacgaagtcgtttggtggaataaatcctgagaaaatgcatagatttatcatgaaaaggaaaatggaaaatggtattgtaaaattactcwttcacttttggaattgagaagctttttcctattggttgttttcattaagtttgaatataaatttattatgtaaccaaactacatttgtgtgtatgtgcgt

SEQ ID NO: 149498 - DNA, 201 bp, Homo sapiens
cagttcaagaaaatagaactatataccacttccttatgtttgctgtattttctgccattcagttctatgtattctgtatgtaattgccttttccaatatcwtttaagtttctatgatctaccatccctctgggtctatcttagatgccacctttttgaaatatgaatgcttctctggtctcagctgaagtgaattcttctt

SEQ ID NO: 149499 - DNA, 201 bp, Homo sapiens
atgaaagtagtaactaatagttaaatttcagttgttctgataaatatctgttgaagagtaaaatccaatgatcttttaaaaaatttgtattaacaggctgracatgaactaaatctggcaagaaaaatgagggaatggaaactatgggagccattagtggaagagcctcctgccgatcagtggaaatggccaatataatta

SEQ ID NO: 149500 - DNA, 201 bp, Homo sapiens
acaggtttttcctaagttataaagggtgtagatagggcacagacataaagaagtcagagcaaagaagagttaaattaaaaaaaaaaagcaaaaaaaaaaamcagatgtgagttttgtttgttttgtctttgagacaagtgttccattaagtctttggtaatattttaacctatggaaatttgtatggtttgtcttttcaga

SEQ ID NO: 149501 - DNA, 201 bp, Homo sapiens; identical to SEQ ID NO: 27688

SEQ ID NO: 149502 - DNA, 201 bp, Homo sapiens
caggaggtggaggttgtagtgagccaagttcacgccattgtactccagcctgggctataagagcgaaactccgtttcaaaaaaaaaaaaaagaaagaaagaaaaatactgatttagtaaatgacttgatttccaaaaaggtcattagcaataagttgttttgtttctgaccagtctggccaacatggcaaaaccccgtctc

SEQ ID NO: 149503 - DNA, 201 bp, Homo sapiens
cccttgatcagcatgtcaataaacatttagcacttttcaatattaagacagaaaagcaatgaaatagcagaggtgaaatgaattttcaccaaatatttagwaaaaagagtatgatgaaagaaaagttgtatttttaagtgtttttatataggaattttaaaatatataggatattgaaacattcagttagtatgcttcttt

SEQ ID NO: 149504 - DNA, 201 bp, Homo sapiens
ccaggaggtggaggttgtagtgagccaagttcacgccattgtactccagcctgggctataagagcgaaactccgtttcaaaaaaaaaaaaaagaaagaaagaaaaatactgatttagtaaatgacttgatttccaaaaaggtcattagcaataagttgttttgtttctgaccagtctggccaacatggcaaaaccccgtct

SEQ ID NO: 149505 - DNA, 201 bp, Homo sapiens
aggtatggtggcgggtacctgtaatcccagctacttgggaggctgaggcaggagaatcacttgaccccaggaggtggaggttgtagtgagccaagttcacrccattgtactccagcctgggctataagagcgaaactccgtttcaaaaaaaaaaaaaagaaagaaagaaaaatactgatttagtaaatgacttgatttcca

SEQ ID NO: 149506 - DNA, 201 bp, Homo sapiens
ttttttaagatttgcatcttttttctccaattgctagtaaggttaaactttaaaaatatgttcttatattttataaattatgtcattaatatttttactgkgtcatttagtctgtgttatttatacatgagtgtctttttataataaaagatattaaccttaaacttttctgacattgtctgcacatactttttctagcct

SEQ ID NO: 149507 - DNA, 201 bp, Homo sapiens
catcttttttctccaattgctagtaaggttaaactttaaaaatatgttcttatattttataaattatgtcattaatatttttactgtgtcatttagtctgkgttatttatacatgagtgtctttttataataaaagatattaaccttaaacttttctgacattgtctgcacatactttttctagcctgcttttgcctctca

SEQ ID NO: 149508 - DNA, 201 bp, Homo sapiens; identical to SEQ ID NO: 27687

SEQ ID NO: 149509 - DNA, 201 bp, Homo sapiens
gatacatttttgtcaggaaagatgaaaatttaaaacctgaattttagatcatattaaaacttaattaaaatgctatattaaaaactaatatatgcattatrtatttaaattggagaggatcaacttcttactgatttctatactgaagtttaagttcagtgtgcttcagtacatgctatgcattgactcaattctcttgct

SEQ ID NO: 149510 - DNA, 201 bp, Homo sapiens
cagcctgggcaacaagtgaaacttcgtctcaaaagaaagaaagaaagaaaaatactgatttggtaaatgattcgatttcccaaaaggtccttagcaataarttagttttgtttctacttgttatcatacctttgacttatctagaacttgttatacacagaaaatacagaatgttcccatgtttatatacaggtttttcct

SEQ ID NO: 149511 - DNA, 201 bp, Homo sapiens; identical to SEQ ID NO: 27691

SEQ ID NO: 149512 - DNA, 201 bp, Homo sapiens
aattttcaccaaatatttagtaaaaagagtatgatgaaagaaaagttgtatttttaagtgtttttatataggaattttaaaatatataggatattgaaacmttcagttagtatgcttctttaattttttttctccctgaaattataggaaccagatgttaaaaaattagaagaccaacttcaaggcggtcaattagaagag

SEQ ID NO: 149513 - DNA, 201 bp, Homo sapiens
tctaaataaagacaagtttcttactgtgaccctctggttcactattctactgatttattttgttatgtctctactagaatgtaggtttcatgaaggcaggratttgtaattgtttcactgctagaactctgtcacatagtatgtgctcagtaaatagtgttagttgaatgagtgtcttgcacttcctatgatttcataata

SEQ ID NO: 149514 - DNA, 201 bp, Homo sapiens
ctgattcacttggatctaggtagccagttggtaacagcctccgcctctggctcctccccttctccctgccgcgtccctcctccccgccccttcgcctctgsccccgccccttctccctgccgcttccctcctccacgcccgctcgcctctgactcctccccttctccctgacgcgtccctcttcctgtctcttcgcctctg

SEQ ID NO: 149515 - DNA, 201 bp, Homo sapiens
tgattcacttggatctaggtagccagttggtaacagcctccgcctctggctcctccccttctccctgccgcgtccctcctccccgccccttcgcctctggscccgccccttctccctgccgcttccctcctccacgcccgctcgcctctgactcctccccttctccctgacgcgtccctcttcctgtctcttcgcctctgg

SEQ ID NO: 149516 - DNA, 201 bp, Homo sapiens
aaagtataccaaatgtaagcatagtagtgttagaacagaagattataggtttgtttctttctactttctttcaatgttgcttatatttgaaattaaaaatrtaatttgaggctagaaaaaattggggttatagaatcctaaatatttaatttctgttcattcatctttacccaaattcttacaattagatgaaatttttat

SEQ ID NO: 149517 - DNA, 201 bp, Homo sapiens
tacacctaatacccacaaaacttaaaatataaaatgttttaaataaaaataaagaaaagatttcccacaataaaaagatttttactggaaaaaaatcactrtatttcacatacatgtgtacatatatacattatatatatatatacactatatatatgaaatatatagtaattgtgattatgtgtgtatatatatattaat

SEQ ID NO: 149518 - DNA, 201 bp, Homo sapiens
gcaattatctgactcaggtaattcagagctgatttcaaacagttcactcaatagatttttataggccatctaccttattcaaactccataaatctattctytctgttatagagggaaaaacttgagacattatatcaaggtaaactttaatacacctgtttttttttcaagaaataaaaaatgtaatgactataatgtaga

SEQ ID NO: 149519 - DNA, 201 bp, Homo sapiens
gtgaacggagattgtgccactgcagtccagcctaggcaacaagagcaaaaactccgtctaaaaaaaaaaaaattgttccctgcactccagcctgagtgacraaatgacaccctgtcactttttaaaaaattgttgctgttattttttaaatttgctgttattcaacaaactatattttgtgaaaagtcttgttgtttccct

SEQ ID NO: 149520 - DNA, 201 bp, Homo sapiens
atgatatcaagcctaatcttatatgtaacatccagcccaataatatagttgcagaaacacaattaaagtctgtgattgccttgtagatcattgctacctcyctgtgccatactgatgccactgttatcgattctaaatttgagggcctagctttcccagtgatcgttggccatgaggctgcaggtattgtggaaagtattg

SEQ ID NO: 149521 - DNA, 201 bp, Homo sapiens
gctacttctacagggatgagagagggatacaataaggcacagtaaagtaatttactccaaggcaacatagttataagtcttagagccaggtttttaacccmggcagtatggctctggagtctaaaatcttaatcatcttgtttttgctttactagactacagaaggatcctttcatccttaacactaattgaaagcagtta

SEQ ID NO: 149522 - DNA, 201 bp, Homo sapiens
tttagtaaagtgtcatatacaaaaagaatactatactttcttatggttatttgtatatgtagtaaaagcataaacaaatcactgaaataataaatgccaawttcagaataatagctacttctacagggatgagagagggatacaataaggcacagtaaagtaatttactccaaggcaacatagttataagtcttagagcca

SEQ ID NO: 149523 - DNA, 201 bp, Homo sapiens
tgagctgcatgtattaacataaaataatctcacacacataatgttaagggaaataagcaaattgctgaaggaatatttagtaaagtgtcatatacaaaaasaatactatactttcttatggttatttgtatatgtagtaaaagcataaacaaatcactgaaataataaatgccaatttcagaataatagctacttctacag

SEQ ID NO: 149524 - DNA, 201 bp, Homo sapiens
cctcatttggcaggccagatgaaccgtgccactcttttctcttttaatgagaatgctccaaagttagaggtatattagtatctttccattccaaaaaagaytgtacaaacaaattgcttcccaaaattttgtgtcaatgaaggagtctggccaatataatccctttagccccagctctgccacttactggctatgtgatct

SEQ ID NO: 149525 - DNA, 201 bp, Homo sapiens
cccacctcggcctcccaaagtgctgggattacaggcatgagccaccttgcccagacttttttttttgttcgaaacagagtctcactctgtgccaggctggwgtgctgtggcacgatcttggctcactgcaacctgcacctcccaagttcacacaaatcttgtgcctcagcctccagagtagctgggattacaggcatgagc

SEQ ID NO: 149526 - DNA, 201 bp, Homo sapiens
ttactccaaggcaacatagttataagtcttagagccaggtttttaaccccggcagtatggctctggagtctaaaatcttaatcatcttgtttttgctttamtagactacagaaggatcctttcatccttaacactaattgaaagcagttatttaagaagctaaaattgtactactcttacatctattactgtgcctcaatt

SEQ ID NO: 149527 - DNA, 201 bp, Homo sapiens
gaggtcagacaataaaaatgctttcatgccatgcaaaacaaattggacttcattccaaactggtgatttggagtgatcaagtaaatcactgtaatattaawacaaccaaatgaggactattcgaaatatagatgtcaaattaatagtgatccaattttaaaaggaaagcaataaacccttcagaatgtgtgggttttcaaa

SEQ ID NO: 149528 - DNA, 201 bp, Homo sapiens
ctttaaaataatttccaaattatgtaaaattattctttaataagaatacaggccaggcacagtgggtcatgcctgtaattccagcactttggaaggctgakgtgggcagactgcttgagcccaggagttcgagagcagcctgggcaacatggcaaaaacccacctctactaaaaatatgaaaattagtcaggtgtagtggc

SEQ ID NO: 149529 - DNA, 201 bp, Homo sapiens
taaagactcaatatacagaagactctttcataataatgtggaatttaaaaagtttctgccttcataaaatttacggtcttttaaagaaacacacatacacmcacaatcaaggcaggttataaattatataataaaagaaaagcaaaaagacaggcattgatttctgattgaaaaatcaagaaaagtttcatagacagaatg

SEQ ID NO: 149530 - DNA, 201 bp, Homo sapiens
ttcttttttatatgaaattattcttttttaataacccttttattaaaaatacatttttatatttataactttatatttctctcccctacttactttttttwatctttttaagtaaataactttaaaataatttccaaattatgtaaaattattctttaataagaatacaggccaggcacagtgggtcatgcctgtaattcc

SEQ ID NO: 149531 - DNA, 201 bp, Homo sapiens; identical to SEQ ID NO: 27742

SEQ ID NO: 149532 - DNA, 201 bp, Homo sapiens
ggaataatcttagaaagactattctaaataatccttttttaatcacagcaaatttaatcacatacaaaatttttttataaattcctcttcatgaaacttaytatgacttacacagatgatctatgacatgcttggacttctgacttatcctaattttttccttttaaataataagtcattttattttaggacaagatttta

SEQ ID NO: 149533 - DNA, 201 bp, Homo sapiens
acattttagtatcaggccataagaatagttagaactggaggaaaaaaacttataatagctgatgaaaaagctaaagaaaagagttatctctgtccaagggkagacaaagctgaaagcagggagacatagcaaaaggtgaactgacatatgattttgagaagttttcaaaagaaacaggttataaaactaaaagttaagttt

SEQ ID NO: 149534 - DNA, 201 bp, Homo sapiens
acattctcactgacagaaccttaaagaagaatataggtatacattggtaattaattcagacaatccttgatttgatattgttctctcaactgtaaaaggtrtattacctcaacttcatttcaataagccctattacctttgattttttcctctcctggaggcaataattgccaatcctatctcttttatgattttctgaca

SEQ ID NO: 149535 - DNA, 201 bp, Homo sapiens
attaagagtctgtacatgagagtgaatgggacattctcactgacagaaccttaaagaagaatataggtatacattggtaattaattcagacaatccttgayttgatattgttctctcaactgtaaaaggtatattacctcaacttcatttcaataagccctattacctttgattttttcctctcctggaggcaataattgc

SEQ ID NO: 149536 - DNA, 201 bp, Homo sapiens
tgaatttaatcagacatgggaaaagtgtgttcaggattatgagtacagcaggggaatacataattcttagtaactgcatgagaaattttctggttacattsaaaaatttaaacatatcaagaaaagccaagagtacagaatcaagttgtactggaggaaaacattcactcctagacctttaagataaaacattttagtatc

SEQ ID NO: 149537 - DNA, 201 bp, Homo sapiens
aatgtaaaatgttgtttcttaagtcagttaccagaaatggaaagaaaaactggtagtgtgactgcttctccttatgggaagcccatttcaataaacctgaygggaaaagtgcttgaatttaatcagacatgggaaaagtgtgttcaggattatgagtacagcaggggaatacataattcttagtaactgcatgagaaattt

SEQ ID NO: 149538 - DNA, 201 bp, Homo sapiens
ggaaggaggaattagcacatatggggcctcttttgggtgactgaaatgttctggccgggcatggtggctcctgcctgtaatcctagcactttgggaggccraggcaggtggatcacctgaggtcaggagttcaaggccagcctggccagcatgatgaaaccctgtctctactaaaaatacaaaaattagccaggtgtggtg

SEQ ID NO: 149539 - DNA, 201 bp, Homo sapiens; identical to SEQ ID NO: 27732

SEQ ID NO: 149540 - DNA, 201 bp, Homo sapiens
acctgcacctcccaagttcacacaaatcttgtgcctcagcctccagagtagctgggattacaggcatgagccatcacatctggctaatttttgtatttttrgtagagacagggtttcaccatgttggccaggctgctcttgaactcccaacctcaggtgatctgcctacctcagcctcccaaagcactgggattacagatg

SEQ ID NO: 149541 - DNA, 201 bp, Homo sapiens
agtacagaaaattaaagatggaaggagtttaatctatttgaagcaaaccaaatctgacctaataatttcattcattcagcaaatgctgattaaactacttygtgtcaagtgccatgtctttattttgcattttgtccacattacaggttggaaaagtgtagattctatcccaaagctggtcactgactataagaataagaa

SEQ ID NO: 149542 - DNA, 201 bp, Homo sapiens
tcagcctccagagtagctgggattacaggcatgagccatcacatctggctaatttttgtatttttagtagagacagggtttcaccatgttggccaggctgstcttgaactcccaacctcaggtgatctgcctacctcagcctcccaaagcactgggattacagatgtgagccactgcacctggtgtaaaataaaaggtttt

SEQ ID NO: 149543 - DNA, 201 bp, Homo sapiens
gcagatttcctccattggctatatcatagagtttaatagaaggctgtctttaattcatatgttcatgcccccacttcctcctgactcttaaaagaaaaaaagtgggactggctgctttagaagttactttataattttcctgcttgcaggtcacccctggttcgacttgtgctgtctttggcctaggaggtgtgggtcttt

SEQ ID NO: 149544 - DNA, 201 bp, Homo sapiens
ttagaggtagctttagtgagaaatattatatatatgtcaacgttagctgaagtgtttttttggaagtttgtaagataaagataatacctaaatgaagcacmccaatagctgaaattatttactccacattttacaacagatcctccagatactggaatatgggctatgtaatcctcatttggcaggccagatgaaccgtgc

SEQ ID NO: 149545 - DNA, 201 bp, Homo sapiens; identical to SEQ ID NO: 27733

SEQ ID NO: 149546 - DNA, 201 bp, Homo sapiens
agaggttcagctacagctttcttttttaattacttatttatttttaattgaaaaaaatttatacatttatgaagtgcaattaacgttttgatatatatatwcactgtagaataattaaatcaagctaataatgtatccatcacttcatatacttatctttttgtggagagaacattaaaaatctactatcttagcaatttt

SEQ ID NO: 149547 - DNA, 201 bp, Homo sapiens
atcctcttctactactccagtccttttaagggccatcagcactagaggttcagctacagctttcttttttaattacttatttatttttaattgaaaaaaayttatacatttatgaagtgcaattaacgttttgatatatatatacactgtagaataattaaatcaagctaataatgtatccatcacttcatatacttatct

SEQ ID NO: 149548 - DNA, 201 bp, Homo sapiens
ttttgaaagtgtttgtcaaaaatgttaaaggcctcaaaacatttgattaaaacagaaccacaggtcattgtaaaacaatagttacttatttagccaaataratcatcaaaagactttaaaggcaatacatgaggatgtatggatgtaaaaaccttaacactatttttttaagcaattaaaaacctaatgtagacaacatgg

SEQ ID NO: 149549 - DNA, 201 bp, Homo sapiens
tgttagaaaccaaactacaatcagagaagggtactagtagctgggtggagttgacagcagatgtgcacatggcagtcaaagcctattttctgctgtatggygctagagacttagggaagaagtatcactcttcaagtcttcctttgctgggctccatgcagtccatcctcttctactactccagtccttttaagggccatc

SEQ ID NO: 149550 - DNA, 201 bp, Homo sapiens
agcttctatagaaagtttctaggttccaatgacctctaaccctctaaaccaagggtcaacaccctgtagcttaccagcacaaggattgtttactaacaccwgctaaggacccttttaaggagctgaatgtagtgatactggagtctatgacctgactggaagctgtagaaagattttataaccttgcagtgattaattttt

SEQ ID NO: 149551 - DNA, 201 bp, Homo sapiens
aaaatttaaaaaattgtgttagaaaccaaactacaatcagagaagggtactagtagctgggtggagttgacagcagatgtgcacatggcagtcaaagcctrttttctgctgtatggcgctagagacttagggaagaagtatcactcttcaagtcttcctttgctgggctccatgcagtccatcctcttctactactccagt

SEQ ID NO: 149552 - DNA, 201 bp, Homo sapiens
aaaattagcatcttctattattaagctgacttattataccatgaaagtcattttcaattatggaacagaattatattagagaatccaaatggaaagagaargatttatttaatcaccaaaagatgagttacctactctcccaccaaaagtttctatagctaggaaaagcttctatagaaagtttctaggttccaatgacct

SEQ ID NO: 149553 - DNA, 201 bp, Homo sapiens
ccactgacctaaaaattagcatcttctattattaagctgacttattataccatgaaagtcattttcaattatggaacagaattatattagagaatccaaayggaaagagaaagatttatttaatcaccaaaagatgagttacctactctcccaccaaaagtttctatagctaggaaaagcttctatagaaagtttctaggt

SEQ ID NO: 149554 - DNA, 201 bp, Homo sapiens
accaatgaatgggccaaacccaggatattcttgtgtgctgggagcccactgacaacattttaaaaattaatttctcaagttgagaaccactgacctaaaarttagcatcttctattattaagctgacttattataccatgaaagtcattttcaattatggaacagaattatattagagaatccaaatggaaagagaaagat

SEQ ID NO: 149555 - DNA, 201 bp, Homo sapiens
actagctatatgttagaatttcctgaggggtttttcgttgttttgttgcttttttaataccaatgaatgggccaaacccaggatattcttgtgtgctgggrgcccactgacaacattttaaaaattaatttctcaagttgagaaccactgacctaaaaattagcatcttctattattaagctgacttattataccatgaaa

SEQ ID NO: 149556 - DNA, 201 bp, Homo sapiens
tcttggatcatattttcaatgtattctttggctgtcaaataataggggaaagtggattatgtttattatggtacttagtactttcaaatggatgacagggkggtagaactataagccacaaatcatttcccattccctcagctatactccatttccttcaatgcccatgaatgtgtccccccaaatgccagtactatcttg

SEQ ID NO: 149557 - DNA, 201 bp, Homo sapiens
cttccagaatcataggtattgacatcaacagtgagaagtttgtgaaggctaaagccctgggagccactgactgcctcaatcctagagacttacataaacckatccaggaagttatcattgaattgaccaagggaggtgtggattttgcccttgactgtgcaggtggatctgaaaccatggtatgtatattttgttcttgga

SEQ ID NO: 149558 - DNA, 201 bp, Homo sapiens
cacataggtattttgctgataaattaggtgattcagttgctgttattgacctaacaattttaaattagtcttatttgtcaaaaaaaaaaaagtcacacaaygatagatttggctgggtttacagtctcacaacctttgtcccaaaccctgacactttaaacatttagcagaggcaaatataaaacttatttacttacacac

SEQ ID NO: 149559 - DNA, 201 bp, Homo sapiens
gttgaccagatgtgtccctggaatcccatgttagaatttagaaactcttacaaagcatctgatctagaactagagagacatcaaagagggatctcacaatyggacatctcaacctgcttatctgaacctccctgacatcaatctttattcctgactcaaaaccgcaaaatgcagccagagtggtctttcaaacaacaagtc

SEQ ID NO: 149560 - DNA, 201 bp, Homo sapiens
ttggcctcccaaagtgctgggattacaggcgtgagccaccatgcctggcccttgttaactaaagtctaaacattaggtgaaaacctaagtaagaaccatamggttaaacacataggtattttgctgataaattaggtgattcagttgctgttattgacctaacaattttaaattagtcttatttgtcaaaaaaaaaaaagt

SEQ ID NO: 149561 - DNA, 201 bp, Homo sapiens
aaattgtcatcaaaaatatataatgctcaacatattttgtaggaaaatgatcagtgttccatttattataacttctctttatttgtatcactcttttttttaattttctagtaatctcaaaagtcctgctagtgatcaacaactaatggaagacaaaaccagcaggtttacctgcaaaggaaaaccagtttaccatttctt

SEQ ID NO: 149562 - DNA, 201 bp, Homo sapiens
aaaaactccgtctaaaaaaaaaaaaattgttccctgcactccagcctgagtgacaaaatgacaccctgtcactttttaaaaaattgttgctgttatttttwaaatttgctgttattcaacaaactatattttgtgaaaagtcttgttgtttccctaatttttctgtcttgtaaattgtcatcaaaaatatataatgctcaa

SEQ ID NO: 149563 - DNA, 201 bp, Homo sapiens; identical to SEQ ID NO: 27736

SEQ ID NO: 149564 - DNA, 201 bp, Homo sapiens; identical to SEQ ID NO: 27738

SEQ ID NO: 149565 - DNA, 201 bp, Homo sapiens
ataccttctgatccactattttagttatacagtgctcccatgtcagggatcccaggaactgatgcatagaaatgttccacctggaagattcttaggggtttgggggattagtaagactaggatcaatgattctaggtaaaatgttcaagcacagccttgatcaatagaaacaaaggtcaaaaacattaggaacaatgttac

SEQ ID NO: 149566 - DNA, 201 bp, Homo sapiens
tctatgacatgcttggacttctgacttatcctaattttttccttttaaataataagtcattttattttaggacaagattttaccataagattcttttttayatgaaattattcttttttaataacccttttattaaaaatacatttttatatttataactttatatttctctcccctacttacttttttttatctttttaa

SEQ ID NO: 149567 - DNA, 201 bp, Homo sapiens; identical to SEQ ID NO: 27755

SEQ ID NO: 149568 - DNA, 201 bp, Homo sapiens
atatttaaaattaataaacaatatgtgcatgtgttgttatatttaatattaacatattctcaacactagctatatgttagaatttcctgaggggtttttcrttgttttgttgcttttttaataccaatgaatgggccaaacccaggatattcttgtgtgctgggagcccactgacaacattttaaaaattaatttctcaag

SEQ ID NO: 149569 - DNA, 201 bp, Homo sapiens
tctttgtgtctacatgttggagttacccagaaataagaacatctgggttcttaaaaagtagcatcccaacacaccaactttgatgcccactccctccttcratgctcaactttgccctcagctataggagatccgagaacagtgactattccaagactaaaacctgactccctccttggtacattctaattctcctcaaca

SEQ ID NO: 149570 - DNA, 201 bp, Homo sapiens
cttattaatgttttattgttattaacagcatccgaacaatcctcatcttttgaagatgccaggagcaattcggaatactatctgattgaatgtgaacctgyctggttaatttattacctgatttgatgaaccaaggaaagccatgcgtttaaacaaatatttacatttaatatgggaacataaaagagctttaaatattat

SEQ ID NO: 149571 - DNA, 201 bp, Homo sapiens; identical to SEQ ID NO: 27735

SEQ ID NO: 149572 - DNA, 201 bp, Homo sapiens
gagaacagtgactattccaagactaaaacctgactccctccttggtacattctaattctcctcaacagcaccactgagtaacaaggacgctgcctaaggtragtaagggtcctcaattccccccaagtttactagcacatgcataaaatattattaacaccatgaatggaagaggatgacgggataaaagaaattaggctt

SEQ ID NO: 149573 - DNA, 201 bp, Homo sapiens
aggaagtggggggaaggggatgggatacaatgactgactagcctgttgaggtgtagtgatcctgccccagagtgaggaaaggacacagagattctccttcyacaggtaggggtgtcttccagtcctgggtgaagaaaacatttatgcatagcaccctgctcatagcaggggttccacagttccagcagtaatgtttgagat

SEQ ID NO: 149574 - DNA, 201 bp, Homo sapiens
aataataataataataataatacaaaattagccaggcgtggtggtgcatgcctataatcccagctactcgggaggctgaggcaggaaaatcgcttgaactyggaaggcggaggttgcggtgaacggagattgtgccactgcagtccagcctaggcaacaagagcaaaaactccgtctaaaaaaaaaaaaattgttccctgc

SEQ ID NO: 149575 - DNA, 201 bp, Homo sapiens
ttttttaagctacaccatgtaaacttagtatataagccctgcaatgtattatacaacttcaatatccccataaggaatactcctcaagttaggagatagargttgaagtggggtttgagcctcacacccttctattcatatcctcgaacacaaaccttttctcctagaattctcaattatggaatacatccataaggaatg

SEQ ID NO: 149576 - DNA, 201 bp, Homo sapiens
taaattgatacaatttccatttcacaaaccattaactcagttggggctgctccctagaaagagaggtttctgtgtagtataatgttagatccctctagtasagtgtacccctgagtttagcaccgtggtgttctgcagtttgacacagagtgcctaccccagacccttcacaatcagaatggggtgaaaaccatgcctctg

SEQ ID NO: 149577 - DNA, 201 bp, Homo sapiens
aggatgttatgtttcgtacatggtgtttggaaatgtaataaacaatagtcatgatgcagagagtcacaatgacagcaaagtcccagagttctgtatctgaygatatcaacatagatttgttgctggactgcctagcagagtaattttttaaaaaatacaatatatgcaatacgttggggaatctgcagtcttgtaaggtaa

SEQ ID NO: 149578 - DNA, 201 bp, Homo sapiens
accttccatttcaataatgcacatctgtacactgttacaatatagaatggtggcataaattgatacaatttccatttcacaaaccattaactcagttgggsctgctccctagaaagagaggtttctgtgtagtataatgttagatccctctagtacagtgtacccctgagtttagcaccgtggtgttctgcagtttgacac

SEQ ID NO: 149579 - DNA, 201 bp, Homo sapiens
atcttaatgaacactaaataattctccaaatttaagtagtaatgcatccattttcgcattggcagatttcctccattggctatatcatagagtttaatagmaggctgtctttaattcatatgttcatgcccccacttcctcctgactcttaaaagaaaaaaagtgggactggctgctttagaagttactttataattttcc

SEQ ID NO: 149580 - DNA, 201 bp, Homo sapiens
ttcagataacactgaagggaaaaagtaaaacaagggaattatttttacttgggtttgtttcttataatcttaatgaacactaaataattctccaaatttargtagtaatgcatccattttcgcattggcagatttcctccattggctatatcatagagtttaatagaaggctgtctttaattcatatgttcatgcccccac

SEQ ID NO: 149581 - DNA, 201 bp, Homo sapiens; identical to SEQ ID NO: 27743

SEQ ID NO: 149582 - DNA, 201 bp, Homo sapiens
tttcatgccatgcaaaacaaattggacttcattccaaactggtgatttggagtgatcaagtaaatcactgtaatattaatacaaccaaatgaggactattygaaatatagatgtcaaattaatagtgatccaattttaaaaggaaagcaataaacccttcagaatgtgtgggttttcaaattttgttcagataacactgaa

SEQ ID NO: 149583 - DNA, 201 bp, Homo sapiens
ctttattttgcattttgtccacattacaggttggaaaagtgtagattctatcccaaagctggtcactgactataagaataagaaattcaatctggatgcaytggtgacccataccctgccttttgacaaaatcagtgaggcatttgacctaatgaaccaaggaaaaaggtacattactaatagatgactgaatgatttaaa

SEQ ID NO: 149584 - DNA, 201 bp, Homo sapiens
ctttggttaaatttatcatgaaaattacacttattaatgttttattgttattaacagcatccgaacaatcctcatcttttgaagatgccaggagcaattcrgaatactatctgattgaatgtgaacctgcctggttaatttattacctgatttgatgaaccaaggaaagccatgcgtttaaacaaatatttacatttaata

SEQ ID NO: 149585 - DNA, 201 bp, Homo sapiens
ttgggcctcatcaggtgtgtccaccatatgggcacaggaagcacaagagagggcaggccctcctaccacccaactgcaaagaagcaaggaagtggggggawggggatgggatacaatgactgactagcctgttgaggtgtagtgatcctgccccagagtgaggaaaggacacagagattctccttccacaggtaggggtgt

SEQ ID NO: 149586 - DNA, 201 bp, Homo sapiens
gccatgtctggctacttttttgtatttttagtagagacggggtttctccatgttggccaggctggtcttgaactcctgatctcaagtgatccacctgcctyggcctcccaaagtgctgggattacaggcgtgagccaccatgcctggcccttgttaactaaagtctaaacattaggtgaaaacctaagtaagaaccataag

SEQ ID NO: 149587 - DNA, 201 bp, Homo sapiens
aaaagacaggcattgatttctgattgaaaaatcaagaaaagtttcatagacagaatgtcttggaagtcaggcctaggagtataggttatactttaattaaagaaaataaggttaaaagtacatcagtctgagggagcagcgtcaactacggcatgagaagaaagtgcaacaatctgttcgcagttcttgtactgggaatat

SEQ ID NO: 149588 - DNA, 201 bp, Homo sapiens
gcctagctttcccagtgatcgttggccatgaggctgcaggtattgtggaaagtattgggccaggagtgaccaacgtcaaaccaggtattttattttattcmgaaaaaatggaaatgtcacaatatttcagagataattattgatagagtcctggcttggcatgctataattgatctctatttacaaaaggggaccatcttt

SEQ ID NO: 149589 - DNA, 201 bp, Homo sapiens
aagaccagatcctgaaatgaaaaggcaaaacttatttgtgagctttggttaaatttatcatgaaaattacacttattaatgttttattgttattaacagcrtccgaacaatcctcatcttttgaagatgccaggagcaattcggaatactatctgattgaatgtgaacctgcctggttaatttattacctgatttgatgaa

SEQ ID NO: 149590 - DNA, 201 bp, Homo sapiens
cttttatgctccatcacagaaagcagccctggactgtacaaccgcaggctggggatcatgtactttcattggagtagctgctggtagcaaaggattgactrtttttccagaggagctaataatcggccgtactataaatggaacattctttggtggtcagttttttttttcttcatagctttaaattcttttcctagtagt

SEQ ID NO: 149591 - DNA, 201 bp, Homo sapiens
tcatttttaatagttatctagataacttttgataactgagatattatgcagaactagccattatttaaagttatttccttgttaactttttttttgagatrgagtctcactctgtcgcccggtggagtgcagtggcacgattttggctcaccgcaacctccacctcctgggctcaagcaattttccttcctcagactcctg

SEQ ID NO: 149592 - DNA, 201 bp, Homo sapiens
acagcatcttttcttaccatcttatctattatttccatttaatgcaatgaaacaaatatttattaaagactcaatatacagaagactctttcataataatrtggaatttaaaaagtttctgccttcataaaatttacggtcttttaaagaaacacacatacacacacaatcaaggcaggttataaattatataataaaaga

SEQ ID NO: 149593 - DNA, 201 bp, Homo sapiens
tagtatttttctatcgctataatagtctgtagaataacatattccagttacagcatcttttcttaccatcttatctattatttccatttaatgcaatgaawcaaatatttattaaagactcaatatacagaagactctttcataataatgtggaatttaaaaagtttctgccttcataaaatttacggtcttttaaagaaa

SEQ ID NO: 149594 - DNA, 201 bp, Homo sapiens
taaggttaaacacataggtattttgctgataaattaggtgattcagttgctgttattgacctaacaattttaaattagtcttatttgtcaaaaaaaaaaaagtcacacaatgatagatttggctgggtttacagtctcacaacctttgtcccaaaccctgacactttaaacatttagcagaggcaaatataaaacttattt

SEQ ID NO: 149595 - DNA, 201 bp, Homo sapiens
ttttctcttttccttttgtttatgttttaatcctaacagctttgcatcctcattaggaaatattaagaatttctctatgtagtatttttctatcgctatartagtctgtagaataacatattccagttacagcatcttttcttaccatcttatctattatttccatttaatgcaatgaaacaaatatttattaaagactca

SEQ ID NO: 149596 - DNA, 201 bp, Homo sapiens
tagaatgtattaatacttaccttgagcagattttctcttttccttttgtttatgttttaatcctaacagctttgcatcctcattaggaaatattaagaatytctctatgtagtatttttctatcgctataatagtctgtagaataacatattccagttacagcatcttttcttaccatcttatctattatttccatttaat

SEQ ID NO: 149597 - DNA, 201 bp, Homo sapiens
atttagaatgtattaatacttaccttgagcagattttctcttttccttttgtttatgttttaatcctaacagctttgcatcctcattaggaaatattaagwatttctctatgtagtatttttctatcgctataatagtctgtagaataacatattccagttacagcatcttttcttaccatcttatctattatttccattt

SEQ ID NO: 149598 - DNA, 201 bp, Homo sapiens
ctattgtaggaacagaaaaccaaatactgaatgttcttacttataagtaggagctaaataatgagaacacatggacacaaatggggcaatgacaggcacaytgggtcctacttaaggatgaaggatggagggaggagaggctcagaaaaataactatcgggtactatgtttagtacctgggtgacaaaattatctgtacac

SEQ ID NO: 149599 - DNA, 201 bp, Homo sapiens
aaagagaggtttctgtgtagtataatgttagatccctctagtacagtgtacccctgagtttagcaccgtggtgttctgcagtttgacacagagtgcctacyccagacccttcacaatcagaatggggtgaaaaccatgcctctgtggcagggatcagacatgtaaaggatgccccaactgtctcattctcttgctttgtca

SEQ ID NO: 149600 - DNA, 201 bp, Homo sapiens
ggacagaatatttgaaatcagaattgtctaataaaatctaggaaatgtggtcactttatttacacatagcactgagaaactgtcccatgaagcaaagttaygaggttagctctaactgaaacttccatgtttaacaaatgacaccttataaaagaacaagatcatgtcctttgcagaaatatggatgaagctgtcagccat

SEQ ID NO: 149601 - DNA, 201 bp, Homo sapiens
gcataaattgatacaatttccatttcacaaaccattaactcagttggggctgctccctagaaagagaggtttctgtgtagtataatgttagatccctctartacagtgtacccctgagtttagcaccgtggtgttctgcagtttgacacagagtgcctaccccagacccttcacaatcagaatggggtgaaaaccatgcct

SEQ ID NO: 149602 - DNA, 201 bp, Homo sapiens
agttccttgaacccaggaggcggaggttgcattgagctgagatcgcactactgcactccagcctgggcgacagagcaagactccgtctcaaaaaataataataataataataatacaaaattagccaggcgtggtggtgcatgcctataatcccagctactcgggaggctgaggcaggaaaatcgcttgaactcggaaggc

SEQ ID NO: 149603 - DNA, 201 bp, Homo sapiens
aaaacgagagacacaatttatcacagtctagcaataggacagaatatttgaaatcagaattgtctaataaaatctaggaaatgtggtcactttatttacayatagcactgagaaactgtcccatgaagcaaagttatgaggttagctctaactgaaacttccatgtttaacaaatgacaccttataaaagaacaagatcat

SEQ ID NO: 149604 - DNA, 201 bp, Homo sapiens
agagttccttgaacccaggaggcggaggttgcattgagctgagatcgcactactgcactccagcctgggcgacagagcaagactccgtctcaaaaaataataataataataataatacaaaattagccaggcgtggtggtgcatgcctataatcccagctactcgggaggctgaggcaggaaaatcgcttgaactcggaag

SEQ ID NO: 149605 - DNA, 201 bp, Homo sapiens
tgcctcagcctccagagtagctgggattacaggcatgagccatcacatctggctaatttttgtatttttagtagagacagggtttcaccatgttggccagrctgctcttgaactcccaacctcaggtgatctgcctacctcagcctcccaaagcactgggattacagatgtgagccactgcacctggtgtaaaataaaagg

SEQ ID NO: 149606 - DNA, 201 bp, Homo sapiens
caccacacccggctaattttgtattttcagtagagacggggtttcaccatgttggctaggctggtctcgaactactgacctcaggtgatccacccacctcrgcctcccaaagtgctgggattacaggcatgagccaccttgcccagacttttttttttgttcgaaacagagtctcactctgtgccaggctggagtgctgtg

SEQ ID NO: 149607 - DNA, 201 bp, Homo sapiens
caagcaattatcctgcttcagcctcccgagtagctgggattacaggcatgtgccaccacacccggctaattttgtattttcagtagagacggggtttcacyatgttggctaggctggtctcgaactactgacctcaggtgatccacccacctcggcctcccaaagtgctgggattacaggcatgagccaccttgcccagac

SEQ ID NO: 149608 - DNA, 201 bp, Homo sapiens
acaccaaacttccatgacacaagtttacttatatagcaaacctgcacatgtacccctaaatctaaaattaaaggtgttgtttttcctttttttttttttttgagatggagccttgctctgtcacccaggctggagtgcagtggcacgatctcagctcactgcaacctccgcctcctgggttcaagcaattatcctgcttca

SEQ ID NO: 149609 - DNA, 201 bp, Homo sapiens
catctaccttattcaaactccataaatctattctctctgttatagagggaaaaacttgagacattatatcaaggtaaactttaatacacctgtttttttttcaagaaataaaaaatgtaatgactataatgtagaatttaacttcttatttttctttaagatcccttgtctttaaaataatatctataagatccagctaca

SEQ ID NO: 149610 - DNA, 201 bp, Homo sapiens; identical to SEQ ID NO: 27748

SEQ ID NO: 149611 - DNA, 201 bp, Homo sapiens
ttccagtcctgggtgaagaaaacatttatgcatagcaccctgctcatagcaggggttccacagttccagcagtaatgtttgagataaggactgctctgtcsttgaggcttatccccctctttgtgtctacatgttggagttacccagaaataagaacatctgggttcttaaaaagtagcatcccaacacaccaactttgat

SEQ ID NO: 149612 - DNA, 201 bp, Homo sapiens
ggctgaggcaggaaaatcgcttgaactcggaaggcggaggttgcggtgaacggagattgtgccactgcagtccagcctaggcaacaagagcaaaaactccrtctaaaaaaaaaaaaattgttccctgcactccagcctgagtgacaaaatgacaccctgtcactttttaaaaaattgttgctgttattttttaaatttgct

SEQ ID NO: 149613 - DNA, 201 bp, Homo sapiens
aggtaggggtgtcttccagtcctgggtgaagaaaacatttatgcatagcaccctgctcatagcaggggttccacagttccagcagtaatgtttgagataargactgctctgtcgttgaggcttatccccctctttgtgtctacatgttggagttacccagaaataagaacatctgggttcttaaaaagtagcatcccaaca

SEQ ID NO: 149614 - DNA, 201 bp, Homo sapiens
tttgggaggctgaggcgggtggatagcgaagtcaggagttcgagaccagcctggccaacacgatgaaagctcatctctactaaaaatacaaaaattagccrggcctggtggtgcgtgcctgtagtcccagctactcgggaggctgaggcaggagagttccttgaacccaggaggcggaggttgcattgagctgagatcgca

SEQ ID NO: 149615 - DNA, 201 bp, Homo sapiens
cagcctgaccaacacggagaaaccccgtctctactaaaaatacaaaattagggccaggcgaggtggctcacacctataatcccagcactttgggaggctgmggcgggtggatagcgaagtcaggagttcgagaccagcctggccaacacgatgaaagctcatctctactaaaaatacaaaaattagccgggcctggtggtg

SEQ ID NO: 149616 - DNA, 201 bp, Homo sapiens
ccagcctgaccaacacggagaaaccccgtctctactaaaaatacaaaattagggccaggcgaggtggctcacacctataatcccagcactttgggaggctraggcgggtggatagcgaagtcaggagttcgagaccagcctggccaacacgatgaaagctcatctctactaaaaatacaaaaattagccgggcctggtggt

SEQ ID NO: 149617 - DNA, 201 bp, Homo sapiens
cttaaaagcatttctggtacacaaaagcattcaatgaaagtttgttccctggccgggtgcggtgggtcatgcctgtaatcccagcacattgggaggccaargctggcagatcacctgaggtcaggagttcgagaccagcctgaccaacacggagaaaccccgtctctactaaaaatacaaaattagggccaggcgaggtgg

SEQ ID NO: 149618 - DNA, 201 bp, Homo sapiens
acaaaaatgttttaagagttaatacatgtaaagcccttaaaagcatttctggtacacaaaagcattcaatgaaagtttgttccctggccgggtgcggtggstcatgcctgtaatcccagcacattgggaggccaaagctggcagatcacctgaggtcaggagttcgagaccagcctgaccaacacggagaaaccccgtctc

SEQ ID NO: 149619 - DNA, 201 bp, Homo sapiens
ctacttttatacatgttcaaattttccacaacaaaaatgttttaagagttaatacatgtaaagcccttaaaagcatttctggtacacaaaagcattcaatraaagtttgttccctggccgggtgcggtgggtcatgcctgtaatcccagcacattgggaggccaaagctggcagatcacctgaggtcaggagttcgagacc

SEQ ID NO: 149620 - DNA, 201 bp, Homo sapiens
tataggagatccgagaacagtgactattccaagactaaaacctgactccctccttggtacattctaattctcctcaacagcaccactgagtaacaaggacrctgcctaaggtaagtaagggtcctcaattccccccaagtttactagcacatgcataaaatattattaacaccatgaatggaagaggatgacgggataaaa

SEQ ID NO: 149621 - DNA, 201 bp, Homo sapiens
cctggcttggcatgctataattgatctctatttacaaaaggggaccatcttttccaaagtaaaacgagagacacaatttatcacagtctagcaataggacrgaatatttgaaatcagaattgtctaataaaatctaggaaatgtggtcactttatttacacatagcactgagaaactgtcccatgaagcaaagttatgagg

SEQ ID NO: 149622 - DNA, 201 bp, Homo sapiens
aactagccattatttaaagttatttccttgttaactttttttttgagatggagtctcactctgtcgcccggtggagtgcagtggcacgattttggctcacygcaacctccacctcctgggctcaagcaattttccttcctcagactcctgagtagctgggactacaggcacatgctgccatgtctggctacttttttgtat

SEQ ID NO: 149623 - DNA, 201 bp, Homo sapiens
tccctgtgccatactgatgccactgttatcgattctaaatttgagggcctagctttcccagtgatcgttggccatgaggctgcaggtattgtggaaagtaytgggccaggagtgaccaacgtcaaaccaggtattttattttattcagaaaaaatggaaatgtcacaatatttcagagataattattgatagagtcctggc

SEQ ID NO: 149624 - DNA, 201 bp, Homo sapiens
taagctacagccacaggcaatgtgaatgattctcacatagagtagaggggagaaaaaagacatgaaacaatacatacactatgattccattcataaaaagrctttgctagattaaactattggatagagaagcttaaataggtagtaaaccactaaatatgcaaggaagtgattatcagggttgtgaaggagaagaacagg

SEQ ID NO: 149625 - DNA, 201 bp, Homo sapiens
atcaagcctaatcttatatgtaacatccagcccaataatatagttgcagaaacacaattaaagtctgtgattgccttgtagatcattgctacctccctgtrccatactgatgccactgttatcgattctaaatttgagggcctagctttcccagtgatcgttggccatgaggctgcaggtattgtggaaagtattgggcca

SEQ ID NO: 149626 - DNA, 201 bp, Homo sapiens
tcatgatgcagagagtcacaatgacagcaaagtcccagagttctgtatctgatgatatcaacatagatttgttgctggactgcctagcagagtaatttttwaaaaaatacaatatatgcaatacgttggggaatctgcagtcttgtaaggtaatgaaatactgtagccacctatactttccactgaatataaaatgtatac

SEQ ID NO: 149627 - DNA, 201 bp, Homo sapiens
tttggaaatgtaataaacaatagtcatgatgcagagagtcacaatgacagcaaagtcccagagttctgtatctgatgatatcaacatagatttgttgctgractgcctagcagagtaattttttaaaaaatacaatatatgcaatacgttggggaatctgcagtcttgtaaggtaatgaaatactgtagccacctatactt

SEQ ID NO: 149628 - DNA, 201 bp, Homo sapiens
ttaggcttaataaagtgaatgtctataaaggaagaccagatcctgaaatgaaaaggcaaaacttatttgtgagctttggttaaatttatcatgaaaattayacttattaatgttttattgttattaacagcatccgaacaatcctcatcttttgaagatgccaggagcaattcggaatactatctgattgaatgtgaacct

SEQ ID NO: 149629 - DNA, 201 bp, Homo sapiens
acatctattctccagcaattatctgactcaggtaattcagagctgatttcaaacagttcactcaatagatttttataggccatctaccttattcaaactcmataaatctattctctctgttatagagggaaaaacttgagacattatatcaaggtaaactttaatacacctgtttttttttcaagaaataaaaaatgtaat

SEQ ID NO: 149630 - DNA, 201 bp, Homo sapiens; identical to SEQ ID NO: 27770

SEQ ID NO: 149631 - DNA, 201 bp, Homo sapiens
aagtgaactcttaccaggcagtaatttctttttcgttttacaaatttagtcatttcaacaaccattttttttcatcctgaaatggtgggtttcatagacayttcactctccttttttttcttcctcttaaagatggatatttgatgttccagcaagtgccaatggttgagattgatgggatgaagctggtgcagaccagag

SEQ ID NO: 149632 - DNA, 201 bp, Homo sapiens
gtgctttgtggattacaggccctgaaaaccagaatcagtaacctgcccacagtgaagaagtttctacagcctggcagcccaaggaagcctcccatggatgmgaaatctttagaagaatcaaggaagattttcaggttttaataaaccagccatagaggtcaagaacatgcaagaccagtattctaaagttttgcaacaatt

SEQ ID NO: 149633 - DNA, 201 bp, Homo sapiens; identical to SEQ ID NO: 27779

SEQ ID NO: 149634 - DNA, 201 bp, Homo sapiens
ctctgaaagaagcaggggtcccagcctgggtgggcatgtgttcctgatctgattcctcccattctccaggtcttaaagagccacggacaagactaccttgytggcaacaagctgagccgggctgacattcacctggtggaacttctctactacgtggaagagcttgactctagccttatttccagcttccctctgctgaag

SEQ ID NO: 149635 - DNA, 201 bp, Homo sapiens
ttgaacctgggaggcagaggttacagtgagccaagatcacaccactccactccagcctggacaacagaatgatactctgcctcaaaaaaaaaaaaaaaaaagttgtttcaagtgaactcttaccaggcagtaatttctttttcgttttacaaatttagtcatttcaacaaccattttttttcatcctgaaatggtgggttt

SEQ ID NO: 149636 - DNA, 201 bp, Homo sapiens
cttgaacctgggaggcagaggttacagtgagccaagatcacaccactccactccagcctggacaacagaatgatactctgcctcaaaaaaaaaaaaaaaaaagttgtttcaagtgaactcttaccaggcagtaatttctttttcgttttacaaatttagtcatttcaacaaccattttttttcatcctgaaatggtgggtt

SEQ ID NO: 149637 - DNA, 201 bp, Homo sapiens
ctagtaggcagtcctgtggccctgaaacatgtgggagtggctgtttttaacttgaatctattcctttcaatgggagggagctactgaaatgaacgtgtagkttatcaaccacattaggacctcaaattaagttgttgagccacgagggcgataacctttaacaaagtaagtactgatcttataaatctttctacactgcct

SEQ ID NO: 149638 - DNA, 201 bp, Homo sapiens
aaagtgatccatcagaaaacattctggcaccatatgcaggaagacaggagaccaattgcccaaccagagaatattgcagtgtttcagggatcagtattttytaaaaggagagtgactgtgggatgcagaggaagattctgtaaaatgcattttatagtaagttgcagacatcagagcagttcactcctaaacgcttcagct

SEQ ID NO: 149639 - DNA, 201 bp, Homo sapiens
ggaacaatctcccacccctgagaaagccctttctttgttttcatgcttggggtactgtgagtgagcagtggtcatcagcacaggatcccatacagccctcyccatccaagcacatgcaagaacatgcattagacaaaaggaggaggaatagatgtggccactgtcttgagttttttctttcatggggggagtgggactggg

SEQ ID NO: 149640 - DNA, 201 bp, Homo sapiens
atccttcttctgccctttagtcaacctgaggaacaagatgccaagcttgccttgatccaagagaaaacaaaaaatcgctacttccctgcctttgaaaaagkaagtgaagctgttcagtgttttggggaactgagtttagaagccagtagaaaaatagtggctgggcattcctggggcactgatcttcactttcagtgatac

SEQ ID NO: 149641 - DNA, 201 bp, Homo sapiens
agtgaacaagacagacacagtccctgccctggggcagcctacgtgtctatgaggatgcagagaaataaacacgtggttaagatgaggggaggaggcttctrgaacacacaagcattccccaatgccacaaaaccacatcagaaaccagaggttttccttaaaaataatgctagtgtgggaccctaattcctttattaaatt

SEQ ID NO: 149642 - DNA, 201 bp, Homo sapiens
gggtgtggggcatggtatttgtacatggtgcagagggagaaagtggttaaaatggaagggatgtggctccttgagcaagtctggcaactctctccaggctwaaaggaccagacctctcagagtatttgctagaggaacaatctcccacccctgagaaagccctttctttgttttcatgcttggggtactgtgagtgagcag

SEQ ID NO: 149643 - DNA, 201 bp, Homo sapiens
atgggtgtggggcatggtatttgtacatggtgcagagggagaaagtggttaaaatggaagggatgtggctccttgagcaagtctggcaactctctccaggyttaaaggaccagacctctcagagtatttgctagaggaacaatctcccacccctgagaaagccctttctttgttttcatgcttggggtactgtgagtgagc

SEQ ID NO: 149644 - DNA, 201 bp, Homo sapiens
taccatgcatatttgagaaacactaacatagaaaataagactcagtctttggtttttaatagcagtgaccctggatcccagatctatcatttactctgagmaagttactttaaaaacctcagtatcctcaaatgtaaaatgagaataacaaccacattaaccttaggtaatttttgtaggataaaacaaagagaagtttag

SEQ ID NO: 149645 - DNA, 201 bp, Homo sapiens
ggagctaaaaagcaaagagagagagaaacagagagccatcatatgacagatttgatataagtctggattcatataaaatcttattcctactagagttctayggacaaaatatagagaaccagagaaatggatacaagatagataatagatgatgaagagacagattacagagagatagatacatagaacgattgatagata

SEQ ID NO: 149646 - DNA, 201 bp, Homo sapiens
gtggcagaatatttgatggccattagcccatgtcatgcctcatgctggggacacacaaggttgtggtctgatctcacttggagacacaggctttcctaagmtatgacaacaccataactagaagaactgctcagtgccttttctccagtgatgtccctctcaaaacatgacctaatcatagacattcatatcaaggtggag

SEQ ID NO: 149647 - DNA, 201 bp, Homo sapiens
tttcttttctatttattttttaaagtaatgggatttcacaatctgctgagagattaccatgcatatttgagaaacactaacatagaaaataagactcagtmtttggtttttaatagcagtgaccctggatcccagatctatcatttactctgagaaagttactttaaaaacctcagtatcctcaaatgtaaaatgagaata

SEQ ID NO: 149648 - DNA, 201 bp, Homo sapiens
tacatagacatagtaacagtctgatctctctttcttttccccacacatccctgccctctacctatctgatttgtagcccccctccctctctgcagatatarcaacccaaaatgtctctagaccttgctcaatgtcctctggagcagaggaacaaaatccccctggttgagaaccatgggactacatgacctcatggggcta

SEQ ID NO: 149649 - DNA, 201 bp, Homo sapiens
ggaccctaattcctttattaaattgagaattttaccctattgtgtctcacgtacttcagaagagaaaattacagttgcaagtgtgaaagctgtgcaacagyggcgacctatgtcacccttagcagggttcctgagaagtggggcgatacaaattacagcagaggctccttggtggcagaatatttgatggccattagccca

SEQ ID NO: 149650 - DNA, 201 bp, Homo sapiens
tatacaaataactgaaactaacaactcatgaaacattacttacctttcaacatgtcatgctcactgatattttctattcttttcttttctatttatttttwaaagtaatgggatttcacaatctgctgagagattaccatgcatatttgagaaacactaacatagaaaataagactcagtctttggtttttaatagcagtg

SEQ ID NO: 149651 - DNA, 201 bp, Homo sapiens
tgcccagggataagcgggagacagatgccttcctcttatctcaactgcaaagaggccttcctcttttactaatcctcctcagcacagaccctttatgggtrtcgggctgggggactatcaggtctttcccttcccacgaggccatatttcagactatcacatggggagaaaccttggacaatacctggctttcctaggcag

SEQ ID NO: 149652 - DNA, 201 bp, Homo sapiens
aacctgggaagctgaggttgtagtgagccaagatcgcgccattgcactgcagcctgggcaaaaacagcaaaactctgtctcaaaaaaaaaaaaaaaaaaamaaaaaaaaaaaaaaaaaacaaataaatacattagttgttaaaggcaagtatatttttgttccacactcaacaaccacaaaactttgcaagaagaatctta

SEQ ID NO: 149653 - DNA, 201 bp, Homo sapiens
gacattccattgcccagggataagcgggagacagatgccttcctcttatctcaactgcaaagaggccttcctcttttactaatcctcctcagcacagaccstttatgggtgtcgggctgggggactatcaggtctttcccttcccacgaggccatatttcagactatcacatggggagaaaccttggacaatacctggctt

SEQ ID NO: 149654 - DNA, 201 bp, Homo sapiens
gtcagtagatggaacatacaatcgggttttacaccaagacattccattgcccagggataagcgggagacagatgccttcctcttatctcaactgcaaagargccttcctcttttactaatcctcctcagcacagaccctttatgggtgtcgggctgggggactatcaggtctttcccttcccacgaggccatatttcagac

SEQ ID NO: 149655 - DNA, 201 bp, Homo sapiens
aacctcacattgaggaagtgatatgttaattatcagctggagtgttgtgataaaatattatgtaagataaaatttcacttccttttgaaacatgatcctcratcaatggctaagagagtttattttggggattggaattatgacactgtgaactctagtacataacaattaaacaagcacaccctacgctttcatgtgaac

SEQ ID NO: 149656 - DNA, 201 bp, Homo sapiens
taaacatatctggtgcattaaagagcagtattgccgccagcatgtctcacctccagccttaaggcagttttctcctatgtcagtagatggaacatacaatygggttttacaccaagacattccattgcccagggataagcgggagacagatgccttcctcttatctcaactgcaaagaggccttcctcttttactaatcct

SEQ ID NO: 149657 - DNA, 201 bp, Homo sapiens; identical to SEQ ID NO: 27778

SEQ ID NO: 149658 - DNA, 201 bp, Homo sapiens
agggtctgtgctgaggtggattagtagaagaggaaagcctcttgcagttgagatagaggaaggccactgtctcctgcctgccccgggaactgaatgtctcrgtacaaaaccctattgtacatttgttcaattctgagataggagaaaaaccgccctatggtgggaggcaagacatgtttgcagtaatgctgctttgttatt

SEQ ID NO: 149659 - DNA, 201 bp, Homo sapiens
tagatattgactatgaatgaggagcatgtgtgtatgacccatggcaaatccttgagctctctggttctcattttctgttgacccaacaaagctcaatggtmacttatgtctcagtcttagcctgacccttggaaacctcacattgaggaagtgatatgttaattatcagctggagtgttgtgataaaatattatgtaagat

SEQ ID NO: 149660 - DNA, 201 bp, Homo sapiens
aggaaaacgtgaacaaactcatgtctctgtgtcataaacaaggttagaaaatgtgctgtgttttgatgtgcacatacataaacatatctggtgcattaaaragcagtattgccgccagcatgtctcacctccagccttaaggcagttttctcctatgtcagtagatggaacatacaatcgggttttacaccaagacattcc

SEQ ID NO: 149661 - DNA, 201 bp, Homo sapiens; identical to SEQ ID NO: 27781

SEQ ID NO: 149662 - DNA, 201 bp, Homo sapiens
atttattgatcattatctctaccatctcagagagggggatgtggcaggacaataggataatagtggggagagggtcagcaggaaaacgtgaacaaactcaygtctctgtgtcataaacaaggttagaaaatgtgctgtgttttgatgtgcacatacataaacatatctggtgcattaaagagcagtattgccgccagcatg

SEQ ID NO: 149663 - DNA, 201 bp, Homo sapiens
ctgcccctccacacctgtgggtgtttcttgttgggtgggatgagagactgagaaaagaaagagacacagagacaaagtatagagaaagaaaagtgggtccrggggaccggggctcagcatatggaggacctgcgctggcgccagtctctgagttccctcagtatttattgatcattatctctaccatctcagagaggggga

SEQ ID NO: 149664 - DNA, 201 bp, Homo sapiens
ttgttattctttactccactgagatgtttgggtggagagaaacataaatctggcttacgtgcacgtccagtcatagtaccttcccttgaacctaattatgwcacagattcttttgctcacgttttttgctgaccttctccttattatcaccctgctctcctactacattcctttttgctgaagtaatgaaaataataatca

SEQ ID NO: 149665 - DNA, 201 bp, Homo sapiens
aatgggggtgtcagcccttgacttgttgttttagtgaggctgtgctttgtggattacaggccctgaaaaccagaatcagtaacctgcccacagtgaagaaktttctacagcctggcagcccaaggaagcctcccatggatgagaaatctttagaagaatcaaggaagattttcaggttttaataaaccagccatagaggtc

SEQ ID NO: 149666 - DNA, 201 bp, Homo sapiens
caaggacccagggcccagcatctctcctcatccctttatttcactgtggtttctgttcctgagttctctgtgatgccctttatcccaatatgcccttatcytcccacaccaagtgtgtctgagcagggccctttccatctggttccttccttatgctctggctcctgctgtcagataactgagttccttgtgcacagctct

SEQ ID NO: 149667 - DNA, 201 bp, Homo sapiens
ctgtactcggtcatggagatagtgaacaagacagacacagtccctgccctggggcagcctacgtgtctatgaggatgcagagaaataaacacgtggttaaratgaggggaggaggcttctggaacacacaagcattccccaatgccacaaaaccacatcagaaaccagaggttttccttaaaaataatgctagtgtgggac

SEQ ID NO: 149668 - DNA, 201 bp, Homo sapiens
gccagcaaatacaacctctatgggaaagacataaaggagaaagccctgtacggtatattttctgttcttccatccacagagaacatagagtgatttaggtycttccttgagtgggtgggaccatggcagggtatcaagaccagcagcaggctgggccttgggcatgcacgctgaggtccagtattgcagagtcccatggag

SEQ ID NO: 149669 - DNA, 201 bp, Homo sapiens
aaaagatatttgaccatttggttgtttttgtctttcaggattgatatgtatatagaaggtatagcagatttgggtgaaatgatccttcttctgccctttastcaacctgaggaacaagatgccaagcttgccttgatccaagagaaaacaaaaaatcgctacttccctgcctttgaaaaagtaagtgaagctgttcagtgt

SEQ ID NO: 149670 - DNA, 201 bp, Homo sapiens
ctaaggcaaaagatatttgaccatttggttgtttttgtctttcaggattgatatgtatatagaaggtatagcagatttgggtgaaatgatccttcttctgycctttagtcaacctgaggaacaagatgccaagcttgccttgatccaagagaaaacaaaaaatcgctacttccctgcctttgaaaaagtaagtgaagctgt

SEQ ID NO: 149671 - DNA, 201 bp, Homo sapiens; identical to SEQ ID NO: 27777

SEQ ID NO: 149672 - DNA, 201 bp, Homo sapiens
aagtcagggtggagaggctctgaaagaagcaggggtcccagcctgggtgggcatgtgttcctgatctgattcctcccattctccaggtcttaaagagccayggacaagactaccttgttggcaacaagctgagccgggctgacattcacctggtggaacttctctactacgtggaagagcttgactctagccttatttcca

SEQ ID NO: 149673 - DNA, 201 bp, Homo sapiens
ctaactgaagcattgtgccttaaataaaaagggactgtaattaagaaaaagatgaacagatttgacctattaattcttaaaatttcttctcctctaaaagmatacatattaaaatacatttaagacactaatcacaaagtgcagaacttaagtggattagaatttaaacaaactgtaaaaaataatttatggcatttatac

SEQ ID NO: 149674 - DNA, 201 bp, Homo sapiens
gctgttttaagaaataaatgttaatatacctgtaaaactcagagcataatgactatatacctgtaaaactcagagcataatgactagactataaaaggcamtcattggaggtgaattattttgccatcacctgatactctactctcttaggtttttataaacctataaaatctaaggcaaaagatatttgaccatttggtt

SEQ ID NO: 149675 - DNA, 201 bp, Homo sapiens
ggtcatgcgtgtaacaaaatttagagagctatctaccttgataggctgttttaagaaataaatgttaatatacctgtaaaactcagagcataatgactatrtacctgtaaaactcagagcataatgactagactataaaaggcactcattggaggtgaattattttgccatcacctgatactctactctcttaggttttta

SEQ ID NO: 149676 - DNA, 201 bp, Homo sapiens
attgatatgtatatagaaggtatagcagatttgggtgaaatgatccttcttctgccctttagtcaacctgaggaacaagatgccaagcttgccttgatccmagagaaaacaaaaaatcgctacttccctgcctttgaaaaagtaagtgaagctgttcagtgttttggggaactgagtttagaagccagtagaaaaatagtg

SEQ ID NO: 149677 - DNA, 201 bp, Homo sapiens
ctcaccacgtgtgcagcatgagacaggtgctttagctctctgaaattcagtgtacccatctttaattaggataataggagccatttcccagggttgttgcrgaaggtaaacacactccctagatattgactatgaatgaggagcatgtgtgtatgacccatggcaaatccttgagctctctggttctcattttctgttgac

SEQ ID NO: 149678 - DNA, 201 bp, Homo sapiens
tggatcttctagctacagttaaacaagtctgaggcctaatttctggttttgatcaaatgcagtctcacagccaaagagctgaagagtgatttagctcccakccggtcctccctgtcagtgacatcctctggtttcatggccagttcatgggttcccagggccttcacccagctggcttccaggcatgatttcattttagtc

SEQ ID NO: 149679 - DNA, 201 bp, Homo sapiens
gttttcaaccatacatcctaaagtacatttttgattctatcatttcaattattcattcattcattcattcattcactcaggcttagagaaacctccaggasactgctaccatggcagagaagcccaagctccactactccaatatacggggcagaatggagtccatccggtggctcctggctgcagctggagtagaggtag

SEQ ID NO: 149680 - DNA, 201 bp, Homo sapiens
cctactgcatttatgaatctcataatggaaggagtcatggtttatctcattctcccttctctctgataagaaacagtgtcattgggacaacctcagagacrtaactcctttaatttactcctggaaatatgagaccttatagtcctttcaaaacaagcccattttttaattgatgtaaattaattattgatgtaaagtaat

SEQ ID NO: 149681 - DNA, 201 bp, Homo sapiens
cctgaaatggtgggtttcatagacacttcactctccttttttttcttcctcttaaagatggatatttgatgttccagcaagtgccaatggttgagattgaygggatgaagctggtgcagaccagagccattctcaactacattgccagcaaatacaacctctatgggaaagacataaaggagaaagccctgtacggtatat

SEQ ID NO: 149682 - DNA, 201 bp, Homo sapiens
tgaatgttaggaggactagattctagttgagcctctgccactaattagctcgacgacaagtcatattctgtctctggagtactaccaattcatggcaaatmtagagaatagctaagaaagaggctctgactgttgctgcgaactgtgtaattctttgaacggagatctgtcctgcccactctaggatatttctaagcatcc

SEQ ID NO: 149683 - DNA, 201 bp, Homo sapiens
ccgggaactcctccaacaccgtcatgaagaaggcaggttcttcttcagcattgtttgtggttttcaaccatacatcctaaagtacatttttgattctatcrtttcaattattcattcattcattcattcattcactcaggcttagagaaacctccaggagactgctaccatggcagagaagcccaagctccactactccaa

SEQ ID NO: 149684 - DNA, 201 bp, Homo sapiens
aggttcagagattaaacaacctactgcatttatgaatctcataatggaaggagtcatggtttatctcattctcccttctctctgataagaaacagtgtcaytgggacaacctcagagacgtaactcctttaatttactcctggaaatatgagaccttatagtcctttcaaaacaagcccattttttaattgatgtaaatta

SEQ ID NO: 149685 - DNA, 201 bp, Homo sapiens
catattgcaaaattaatgcagcaacatctcttcttccagcttataaaacaaaatgcaccccatagagttagaatacagaattccaaaagaagcaagggatwaacaatctctgtctgttgaaagaatttggatcttctagctacagttaaacaagtctgaggcctaatttctggttttgatcaaatgcagtctcacagccaa

SEQ ID NO: 149686 - DNA, 201 bp, Homo sapiens
agtttgaatgttaggaggactagattctagttgagcctctgccactaattagctcgacgacaagtcatattctgtctctggagtactaccaattcatggcmaatctagagaatagctaagaaagaggctctgactgttgctgcgaactgtgtaattctttgaacggagatctgtcctgcccactctaggatatttctaagc

SEQ ID NO: 149687 - DNA, 201 bp, Homo sapiens
atgcagcaacatctcttcttccagcttataaaacaaaatgcaccccatagagttagaatacagaattccaaaagaagcaagggattaacaatctctgtctsttgaaagaatttggatcttctagctacagttaaacaagtctgaggcctaatttctggttttgatcaaatgcagtctcacagccaaagagctgaagagtga

SEQ ID NO: 149688 - DNA, 201 bp, Homo sapiens
aaaaaattagtttgaatgttaggaggactagattctagttgagcctctgccactaattagctcgacgacaagtcatattctgtctctggagtactaccaaytcatggcaaatctagagaatagctaagaaagaggctctgactgttgctgcgaactgtgtaattctttgaacggagatctgtcctgcccactctaggatat

SEQ ID NO: 149689 - DNA, 201 bp, Homo sapiens
gggacaagagcaaacaccctgtgttcctactatgatttttttctacattaactcatttaactttctcaacaaccctcaaaagtagaaataactatctctawtctaagaagagaaaattgaggttcagagattaaacaacctactgcatttatgaatctcataatggaaggagtcatggtttatctcattctcccttctctc

SEQ ID NO: 149690 - DNA, 201 bp, Homo sapiens
aggtttattataattagaaaaaattagtttgaatgttaggaggactagattctagttgagcctctgccactaattagctcgacgacaagtcatattctgtytctggagtactaccaattcatggcaaatctagagaatagctaagaaagaggctctgactgttgctgcgaactgtgtaattctttgaacggagatctgtcc

SEQ ID NO: 149691 - DNA, 201 bp, Homo sapiens
atccatgggctactcaatgtgtccagagcctcacccatcttccaagcactgggacaagagcaaacaccctgtgttcctactatgatttttttctacattawctcatttaactttctcaacaaccctcaaaagtagaaataactatctctattctaagaagagaaaattgaggttcagagattaaacaacctactgcattta

SEQ ID NO: 149692 - DNA, 201 bp, Homo sapiens
ttactcatatcatgccatcttggtgtgtttgggtgacagttcaagaactgtttatttcttttctgttggatacatctttacagaaatgtaaaaatgaagartttagaaaaccagggcctcagcatttaaaggtatgggaaacaatgacatgaggagaaaaaagaaatggtagcattttaaacaatctgagaataatcagtg

SEQ ID NO: 149693 - DNA, 201 bp, Homo sapiens
tgatgaagagacagattacagagagatagatacatagaacgattgatagataaaataatacatacatggatgggtagacagagattataaacagatacatrtacatagattgttggttggtaaaataattggtggatagatagatcaaagaaagaagatccatgggctactcaatgtgtccagagcctcacccatcttcca

SEQ ID NO: 149694 - DNA, 201 bp, Homo sapiens
aaaaaatggagataatcatttcatgggactataaggagggttaaagatataaaatattgaaagggactagcattgaggaaggatcactaggaagttttcartaaatattagttcttgaattcttcctcttcccattaactcctatacatgtattattaccacatactctcacctcttaggctgccaagaaaattcagagtt

SEQ ID NO: 149695 - DNA, 201 bp, Homo sapiens
ccccagcctcattgcacatgtgttcctgatctgattcctctgattctccaggtgttgaagagccatgaacaagactacttcattggcaacaagctgagccrggctgacattcacctggtcaaacttctctaccacgtggaagagcctgactccagcctcatctccaacttccctgtgctaaaggtgacccatttcccagtc

SEQ ID NO: 149696 - DNA, 201 bp, Homo sapiens
aatgctgctttgttattctttactccactgagatgtttgggtggagagaaacataaatctggcttacgtgcacgtccagtcatagtaccttcccttgaacytaattatgacacagattcttttgctcacgttttttgctgaccttctccttattatcaccctgctctcctactacattcctttttgctgaagtaatgaaaa

SEQ ID NO: 149697 - DNA, 201 bp, Homo sapiens
tcatatgacagatttgatataagtctggattcatataaaatcttattcctactagagttctatggacaaaatatagagaaccagagaaatggatacaagayagataatagatgatgaagagacagattacagagagatagatacatagaacgattgatagataaaataatacatacatggatgggtagacagagattataa

SEQ ID NO: 149698 - DNA, 201 bp, Homo sapiens
tttctttttcgttttacaaatttagtcatttcaacaaccattttttttcatcctgaaatggtgggtttcatagacacttcactctccttttttttcttccycttaaagatggatatttgatgttccagcaagtgccaatggttgagattgatgggatgaagctggtgcagaccagagccattctcaactacattgccagca

SEQ ID NO: 149699 - DNA, 201 bp, Homo sapiens
gttaaccttttatctttgatttatcacgtgtcagtcactccacccctgtttgcctcactcaaacacattattattattattattattattattgcattttraagtaagctgcagacatctttgcagttcaccccaggacacagtggcatgcagattataacatagtcaaagcagtaagaaccaccattgcaagaaagagga

SEQ ID NO: 149700 - DNA, 201 bp, Homo sapiens
gttagaatggcgatcattaaaaagtcagaaacaacagatgctggagaggatgtggagaaatagcaacacttttacactgttggtgggagtgtaaattagtwcaaccattgtggaagacagtgtggcaattcctcaaggatctagaactagaaatactatttgacccagcaatcccattactgggtatatacccaaaggatt

SEQ ID NO: 149701 - DNA, 201 bp, Homo sapiens
cttacaatgtccaggttttgtcccagacaataaggactggactcaaataagaaggcggctctgctctcaggagctcaaggtctagggagaaatgtgatatwgaatacttcatgtcaaattaacgtagggaaagacgcaatagagaaaatacagtaggagctgaaagtagaatattccagtcaggacaaataccatgtgcaa

SEQ ID NO: 149702 - DNA, 201 bp, Homo sapiens
tgcaaactataaatgagaggtgtaagggagtggattgtaacaaactacctattaaagattgactacattcacagcaattatttgttgagcacttgttaatyccaggttctgtactaggtcatggagatagacagtgaacaagacagacacagtccctgccctggggcggcctacatgtctatgaggatgcagacaagtaaa

SEQ ID NO: 149703 - DNA, 201 bp, Homo sapiens
aaaattaaggttgatttataataggaataaattagtttctgaatgtcaggaaaactagaatctgattcattctttcccactaattagctagatgacaagtyacattctctagggttcaaccaactcacagcaaaccttgaaaatggctaaggaaaagtctctcatcttacccttggcactccttgggatgggtaattcttt

SEQ ID NO: 149704 - DNA, 201 bp, Homo sapiens
taactgtaatactttatagctgtgaaaattcaaaattaaggttgatttataataggaataaattagtttctgaatgtcaggaaaactagaatctgattcaktctttcccactaattagctagatgacaagtcacattctctagggttcaaccaactcacagcaaaccttgaaaatggctaaggaaaagtctctcatcttac

SEQ ID NO: 149705 - DNA, 201 bp, Homo sapiens
taggtggggtctcaggaaaggcacacatggctagagttaggcaacagcacatggagagggctgtggaaatgtgtttcatgggtgtaattggaagaactgcwaatatggggcacaggagccctgggagctgtaaaatgatgagagaggacaagaaatatggctgagatggctgtgccagggattcttttaggattacttaga

SEQ ID NO: 149706 - DNA, 201 bp, Homo sapiens
gtggagtagaaaagctatggacctgcaatcagaaggagttcaagctgacccaacactcaccaagtgtgcagcgtgggccagtcgctttagctctctgaacytcagtgtgcccatctttaattaggatattaggaatcgtttcccagggttgttgcagaaggtagacacactccctagatattgaccatgaatgaggagaat

SEQ ID NO: 149707 - DNA, 201 bp, Homo sapiens
gctggagaaccatctccagcactctgaggatcccttttcttgctttcctgcttttggcaccatgagtgagctgtggtcatcaactcaggatctcatatagmccaccccatccaaagacacgcaaggacatgttttagacaaaaggagttgaaataggtccattttgaattgtttctcttataagtttgacaaggtgatatc

SEQ ID NO: 149708 - DNA, 201 bp, Homo sapiens
aaacacagagcctgccctgcacacactgtctaatgggggtattgaagggcacacaaagagcctacatagaagcttctctcagaactgtgtttaatgtcttyaacagcatgagacttactttgagaaattcccatgttaaatggcatctggctggtgacctgttgcagtctctcccaacttcttcctaagatatcatgaaaa

SEQ ID NO: 149709 - DNA, 201 bp, Homo sapiens
gagttcaagctgacccaacactcaccaagtgtgcagcgtgggccagtcgctttagctctctgaacttcagtgtgcccatctttaattaggatattaggaaycgtttcccagggttgttgcagaaggtagacacactccctagatattgaccatgaatgaggagaatgtgtgtgtgacccatggcaaatcttcgagcctctc

SEQ ID NO: 149710 - DNA, 201 bp, Homo sapiens
tcatcaactcaggatctcatatagcccaccccatccaaagacacgcaaggacatgttttagacaaaaggagttgaaataggtccattttgaattgtttctmttataagtttgacaaggtgatatctttgcaatattgtctgcttagataatgagacagtgttgacttggttggaagtccaggtcacagggtgaggagggac

SEQ ID NO: 149711 - DNA, 201 bp, Homo sapiens
ccagggttgttgcagaaggtagacacactccctagatattgaccatgaatgaggagcatgtgtgtgtgacccatggcaaatccttgagctctcaggttctyattttgtgttgactgaacaaagctcaacggtaacctctgccccagtcttagcctgacccttggaaacctcatattgagaggcgatatgttagttatcagc

SEQ ID NO: 149712 - DNA, 201 bp, Homo sapiens
gtgggtggatcatttgaggtcaggagttcgagaccagtttggccaacatgatgagatcacgtctctactaaaaatacaaaaattagctgggtatgttggcrcatgcctgtaatcccagctactcaggaggctgaggtaggagaattgcttgaacccaggaggcagaggttacagtgagctgagatcgtcccactgcactcc

SEQ ID NO: 149713 - DNA, 201 bp, Homo sapiens
tttaaaatgcattttatagtaagttgcagacatcagtgcagtccacccctaaacacttcagcttgcaaattataacagagtgccggttaggaaccagagtygatgctgtaagaaacatgatgaattcaggttcacccaggtttacttcagaacccagggagatagagcagggaatgaggagggcagacaaggacaaatgag

SEQ ID NO: 149714 - DNA, 201 bp, Homo sapiens
ccagcttccctctgctgaaggtgacccatttcacagcccagagagacagccccacatctcttatattgggatctcatatctgggccccgggactgaccatrttttgaccccacccttctccagcccttcagtgcccccaaggtctccaaaatgagcttccaggctccaattttgaagaatgaaaacacttttgttctggaa

SEQ ID NO: 149715 - DNA, 201 bp, Homo sapiens
caatgcacggggcagtatggagtccattcggtggctcctggctgcagctggagtagaggtaggttctgagtaaggtcatcttaagttggatttaaaattgygttatcacatacttttcccacagaaactatgcaatgattacttactgaagcattgtgccttaaataaaaatggactgtaattaagaaaaagatgaataga

SEQ ID NO: 149716 - DNA, 201 bp, Homo sapiens
gcttaagaaaaagaagaactacaggaaacttttaaaaaatgttgtttgggccgggtatggtggctcacgcctgtaatcccagctcttcgagaggctgaggygggtggatcatttgaggtcaggagttcgagaccagtttggccaacatgatgagatcacgtctctactaaaaatacaaaaattagctgggtatgttggcgc

SEQ ID NO: 149717 - DNA, 201 bp, Homo sapiens
ttacaattctgaagtccagaagtctgaagtcagggtgagagtagggccacattgccttgaaagttctagggaacaatccttccctgcctcctataacttcygggggctcttggcatttctggactttcatggatcgtggccacatcactctactttctgcctagggcttccagcacctcaccctctgcgtgtctgtgtctt

SEQ ID NO: 149718 - DNA, 201 bp, Homo sapiens
tgaagtaacaggataaaaagtagaaggaagctgcttaagaaaaagaagaactacaggaaacttttaaaaaatgttgtttgggccgggtatggtggctcacrcctgtaatcccagctcttcgagaggctgaggtgggtggatcatttgaggtcaggagttcgagaccagtttggccaacatgatgagatcacgtctctacta

SEQ ID NO: 149719 - DNA, 201 bp, Homo sapiens
tagctcaaggtttgtaaacgcaccaatcagcactctgtcaaaacggaccaatcagctctctgtaaaatggaccaatcagcaggatgtgggtggggtcagasaagggaataaaagcaggctgcccagccgggaactgcaagccagctggggtttctttccatggtttgaaagcttcgtttttttagctgcttgcagtaaatg

SEQ ID NO: 149720 - DNA, 201 bp, Homo sapiens
tggccaggcagatgcctgctgcaggagtggagccctcatgtagaacttctactagggcagtggggaagggaaaagttggagcccccacacagagtctccaytggggcactgcctagtggagctatgagaagagggccattgtaccccagacccccgaatgatacatccaccaacagctcgcaaaatgcatctggaaaagct

SEQ ID NO: 149721 - DNA, 201 bp, Homo sapiens
actttttgggaatgggagtgaaagtcactcttgctatgccttagcaaagagactggtggcattgtgcctctgttctagagatctgtgagacttttaacttragaaatgatttagggtatctggtagaagaaatttctaagctgcaaagcattcaagatttagcctggctgtttctaacagcacatgttcatatgtgttcac

SEQ ID NO: 149722 - DNA, 201 bp, Homo sapiens
gatgcacccatcagcactctgtatttagctaatctggtggggacttggagaagttttatgtctagctaaaggattgtaaatgcaccaatcagcattctgtytctagctcaaggtttgtaaacgcaccaatcagcactctgtcaaaacggaccaatcagctctctgtaaaatggaccaatcagcaggatgtgggtggggtca

SEQ ID NO: 149723 - DNA, 201 bp, Homo sapiens
attgagatgataaatcctggcacagcatcagtgggtattggcagtgattccaccaatttctctcatgactgtgaccaccgatgctctttttcctgtattargtcatgtgtgtaacaaaattttgagatctatctaccttgataggttgttttaggaaataaatgttaatatacctgtaaaaatcagaacataatgactata

SEQ ID NO: 149724 - DNA, 201 bp, Homo sapiens
gccacacccatatctttatttattctgtgaaattgtagaaaattgagtctgataatcaggattggctgatccattatcttgaatctattatttaatttttstatttaattttttctatatcatttgattttctcaagtaagttcaaaagatgaaattatagaaatctctgtgactgctaaaatgtctagcattgctgtgtg

SEQ ID NO: 149725 - DNA, 201 bp, Homo sapiens
ttgttaaaggcaagtatatttttcttctaaactcaacaaccacaaaactttgcaagaagaatcttaatgtttaataacagagctgggggtttggagagaawatgcaactgttcctaagtcctggcactggaactcctgctttcaatgagtcctgtgcccttccattcacattcatgatacaattagttgcatctgtccttg

SEQ ID NO: 149726 - DNA, 201 bp, Homo sapiens
ccttctgggtctactcagtgagccacacccatatctttatttattctgtgaaattgtagaaaattgagtctgataatcaggattggctgatccattatctkgaatctattatttaatttttgtatttaattttttctatatcatttgattttctcaagtaagttcaaaagatgaaattatagaaatctctgtgactgctaa

SEQ ID NO: 149727 - DNA, 201 bp, Homo sapiens
acctctagatcctggtcctgtgtgatcatagatccacaacaaattctgttccatggagcaagccagaaacccccaaattcctgatctttcaccataaagarctccattaaagtataattagccactggaaacaccgctactatttattacttgatgtatgtgggtcaggccctgtatcatgcattttgaaacattacaaaa

SEQ ID NO: 149728 - DNA, 201 bp, Homo sapiens
aaaaaaaaaaaaagaaatacattagttgttaaaggcaagtatatttttcttctaaactcaacaaccacaaaactttgcaagaagaatcttaatgtttaatmacagagctgggggtttggagagaaaatgcaactgttcctaagtcctggcactggaactcctgctttcaatgagtcctgtgcccttccattcacattcatg

SEQ ID NO: 149729 - DNA, 201 bp, Homo sapiens
ggtgctgtgtgaggttctgatgatagacagtgaacaagacagactcagttcctgctctcgagtagcctacatacctataagaatggagacaagtaaacagrtgattaaaaccaggagcttccaggagaacacccaagcagtccccagcgttaccaggtcatccttccagtgtttgagcaggaaatgctgggaggtgtctgt

SEQ ID NO: 149730 - DNA, 201 bp, Homo sapiens
cttgaaactgggaggctaaagttgcatgagctgagattgtaccatagcactctagcctgggaaaaaaacagtaaaactccatctcaaaaaaaaaaaaaaaaaagaaatacattagttgttaaaggcaagtatatttttcttctaaactcaacaaccacaaaactttgcaagaagaatcttaatgtttaataacagagctgg

SEQ ID NO: 149731 - DNA, 201 bp, Homo sapiens; identical to SEQ ID NO: 27787

SEQ ID NO: 149732 - DNA, 201 bp, Homo sapiens
ccctgttcacaatagcaaagacttggaaccaacccaaatgcccatcaatgatagactggataaagaaaatgtgccacatatacaccatggaatactatgcwgccataaaaaaggatgagttcatgtcctttgcagggacatggatgatgctggaaaccatcattctcagtaagctatcacaagaacagaaaacaaaacacc

SEQ ID NO: 149733 - DNA, 201 bp, Homo sapiens
ttactttgccaccatctgaccctctattttcttaggtttttataaacctataaaatctaaggcaaaaggcatttgatggtttggttgtttttgtctttcargattgatatgtacacagaaggtatagtagatttgactgaaatgatccttcttctgctcatatgtcaaccagaggaaagagatgccaagactgccttggtc

SEQ ID NO: 149734 - DNA, 201 bp, Homo sapiens
ccagcacctcaccctctgcgtgtctgtgtcttctgttctctatgttgcaggtgagaggtgacaacgtgctagcagccctcgcttgctctcagtgcctcttyggcctcggcgtccactctggccacccttgaggagctcttcagcctaccgctgtactgtaggagcccctccctgggctggccaaggccggagccggctccc

SEQ ID NO: 149735 - DNA, 201 bp, Homo sapiens
ccccccatgatctccacatcctggtcctgtgcgatcatagatccacaacaaactgttccatggagcaagctagaaacccccaaattcctgaactttcaccrtaaagaactccattaaactataagtaaccactgcaaacacaactaccatttattacttgatgttgatgcacgcgggtcaggccctgtatcatgcattttg

SEQ ID NO: 149736 - DNA, 201 bp, Homo sapiens
gagaaagcttgggatttctgcacccatgcaataagacaacagaggtgggaaaagtcagggtggagaggctctgaaagaagcaggggtcccatcctgggtgkgcatgtgttcctgatctgattcctccaattctccaggtcttaaagagccacagacaagactaccttgttggcaacaagctgagctgggctgacattcacc

SEQ ID NO: 149737 - DNA, 201 bp, Homo sapiens
cctgctgctctgtgcagcctcgagacatggcatcctgtgtcccagctgcttcacctccaaccatggctataaagggccccagatacatctgaggccactgstccagaaggtgcaagctgtaagaagccttggcagcttccatgtgtgttaaccctgcatgtgcacagagagcaggagttgaggcttgggagcctttgccta

SEQ ID NO: 149738 - DNA, 201 bp, Homo sapiens
gataatgtggagaaagcttgggatttctgcacccatgcaataagacaacagaggtgggaaaagtcagggtggagaggctctgaaagaagcaggggtcccakcctgggtgggcatgtgttcctgatctgattcctccaattctccaggtcttaaagagccacagacaagactaccttgttggcaacaagctgagctgggctg

SEQ ID NO: 149739 - DNA, 201 bp, Homo sapiens
gacttgcatgaggccggcagctcttttgttttgactgacttctcccttttgaaatgagaccatttacccaatgcctgtactcctattatatcttggaagtractaacttgttcttgattttacaggcttgtaggcagaagggacttgcctagtctcagaagacactctggacttgggcttttgagttaatactggaatgag

SEQ ID NO: 149740 - DNA, 201 bp, Homo sapiens
gggtgaggagggacatgagccagggtagaagccatggggtaagaaacacagagcctgccctgcacacactgtctaatgggggtattgaagggcacacaaaragcctacatagaagcttctctcagaactgtgtttaatgtcttcaacagcatgagacttactttgagaaattcccatgttaaatggcatctggctggtgac

SEQ ID NO: 149741 - DNA, 201 bp, Homo sapiens
ggagttcaagctgacccaacactcaccaagtgtgcagcgtgggccagtcgctttagctctctgaacttcagtgtgcccatctttaattaggatattaggartcgtttcccagggttgttgcagaaggtagacacactccctagatattgaccatgaatgaggagaatgtgtgtgtgacccatggcaaatcttcgagcctct

SEQ ID NO: 149742 - DNA, 201 bp, Homo sapiens
acaccagtagaaaaatagtggctgggcattcctggggccactgaccttcactttcagtgagacttcatgaacaccaaggcagcactctgactctcaaggcmtcttatgcagatagacttggaggaacaattgtaccacttatacccaagctatgattttccagtaaaattttaatttacagaccccaacattaaattctct

SEQ ID NO: 149743 - DNA, 201 bp, Homo sapiens
ggcagggctcgggacgtgcagcccgccatttctgaacccccctcccctggccccctgcccccacgggctcccacccaccggagcctccctgatgggcaccrccccctgctccgtggctcccagtcacatcgactgcccaagggctgaggagtgcgggcatggggcgcgggactggcgggcagctctgcccatggccccagc

SEQ ID NO: 149744 - DNA, 201 bp, Homo sapiens
ttttggtttgatagattctgcctatttaagtcaactgcatcattatgtaataactgaatttcatatctgtattaaatacctgcaaccactcatagcttctrgtcagattgagacagccttgttgctggctgctatttccaccaaagtgacttgtctcaggatgaggtggaatttactccaatgtttaagttactggatgta

SEQ ID NO: 149745 - DNA, 201 bp, Homo sapiens
ggttgtttttcctagtttgttttgttatcaaagagtaagaacattctcttttttttttttttttttttttttttgagacagagtcttgctctgtcgcccaractggaagtcactggtgccacctctgctcactgcaagcgccacctcccaggttcatgccattctcctgcctcagcctcccaagtagctgggactacaggc

SEQ ID NO: 149746 - DNA, 201 bp, Homo sapiens
ggccggagccggctccctctgcttgaggggaggtgtggagggggaggcgcaggtggaaaccagggctgcacataacgctcacaggccaacccgagttctgrgtgggggcaggctcggcaggccccacactcagagtgggccgcctggccctgggcagtgaggggcacagcaccttggccagcagctgcagagggtgcgcca

SEQ ID NO: 149747 - DNA, 201 bp, Homo sapiens
tgtttgggacatacttacactaacaaatgactgatcctttgcctggaattcatatttaccttggtgccctgtattttgtgtggcaacccagtaagagaagmcttccagagtgccatcagcctgcccttcacagacatcccctgccagctatgctcccagcagagatttctcatctgccttagtccttacatccaagtcatt

SEQ ID NO: 149748 - DNA, 201 bp, Homo sapiens
cataatgactagcgtataaaaggcactaactggaggtgaattactttgccaccatctgaccctctattttcttaggtttttataaacctataaaatctaargcaaaaggcatttgatggtttggttgtttttgtctttcaggattgatatgtacacagaaggtatagtagatttgactgaaatgatccttcttctgctcat

SEQ ID NO: 149749 - DNA, 201 bp, Homo sapiens
tgactatatacctgtaaaactcagagcataatgactagcgtataaaaggcactaactggaggtgaattactttgccaccatctgaccctctattttcttargtttttataaacctataaaatctaaggcaaaaggcatttgatggtttggttgtttttgtctttcaggattgatatgtacacagaaggtatagtagatttg

SEQ ID NO: 149750 - DNA, 201 bp, Homo sapiens
caatttctctcatgactgtgaccaccgatgctctttttcctgtattaggtcatgtgtgtaacaaaattttgagatctatctaccttgataggttgttttargaaataaatgttaatatacctgtaaaaatcagaacataatgactatatacctgtaaaactcagagcataatgactagcgtataaaaggcactaactggag

SEQ ID NO: 149751 - DNA, 201 bp, Homo sapiens
actgtttctgcttccagttggaagagaaatttctagaatctgcagaagatttggacaagttaagaaatggtaagatcaatctctaagtaactctgatgagrgtttctagtagaaggtacagaggaacgttgagcagccaggaatacctatgtgtgtggggggtgatatttagtcacggtggagagggagaaagtggttaaa

SEQ ID NO: 149752 - DNA, 201 bp, Homo sapiens
gaaggtatagtagatttgactgaaatgatccttcttctgctcatatgtcaaccagaggaaagagatgccaagactgccttggtcaaagagaaaataaaaartcgctacttccctgcctttgaaaaagtaagtgaagctgttcaatgtttaggggaactgagtttagacaccagtagaaaaatagtggctgggcattcctgg

SEQ ID NO: 149753 - DNA, 201 bp, Homo sapiens
cacgagggcctgggactttagcctcaccctttctcaatcctatgaagaaataagcacacaagaaatccaaacactgccattccaggttgttttctttgtaygaatgaataccctgtcacccagacatcagctctacagctcagggatgtgttcagagcccgggtaggaagagttcagcaggagggagggaggggcaaggct

SEQ ID NO: 149754 - DNA, 201 bp, Homo sapiens
tctgttcttccatccacagagaacacagagtgatttaagtccttctttgagtgggtgggaccatggcagggcatcatgaccagcagcaggctgggtcttgrggatgcacgctgaggtccagtattgcagagtcccatggagatgagggaacagtgaacatggggagggttcaggcaagggtgattctaaaagaggatgcag

SEQ ID NO: 149755 - DNA, 201 bp, Homo sapiens
atgctggtactcatggaggggactcgcttggtctttggcatgaggggctcacattccctgggtcatcttaatgatggtggccggccttggcttcactctgmggctgtgctttgtggattacaggccctgaaaaccagaatcagcaacctgcccacggtgaagaagtttctgcagcctggcagccagagaaagcctcccatg

SEQ ID NO: 149756 - DNA, 201 bp, Homo sapiens
aaaaatagtggctgggcattcctggggccactgaccttcactttcagtgagacttcatgaacaccaaggcagcactctgactctcaaggcatcttatgcaratagacttggaggaacaattgtaccacttatacccaagctatgattttccagtaaaattttaatttacagaccccaacattaaattctctgttcaacaaa

SEQ ID NO: 149757 - DNA, 201 bp, Homo sapiens
gaggttctgatgatagacagtgaacaagacagactcagttcctgctctcgagtagcctacatacctataagaatggagacaagtaaacagatgattaaaaycaggagcttccaggagaacacccaagcagtccccagcgttaccaggtcatccttccagtgtttgagcaggaaatgctgggaggtgtctgtgggactccgt

SEQ ID NO: 149758 - DNA, 201 bp, Homo sapiens
ctcacatcccagacgatgggcggccgggcagaggcgctcctcacctcccagatggggtggccgggcagaggcactcctcacttcccagatggggcagccgrgcagaggagctccccacttcccagacgggatggccgggcagaggcgctccccacttcccagatggggcggctgggcagagatgctcgtcacttcccagat

SEQ ID NO: 149759 - DNA, 201 bp, Homo sapiens
ataacctgttaaagactgagtatattaattcgatgattattttgttgtgcacctactaagtgccaggtgctgtgtgaggttctgatgatagacagtgaacragacagactcagttcctgctctcgagtagcctacatacctataagaatggagacaagtaaacagatgattaaaaccaggagcttccaggagaacacccaa

SEQ ID NO: 149760 - DNA, 201 bp, Homo sapiens
cagtgaactaaaagattgagcagctatgtgctgtgacccatgcacttttctcaatgaattaggtctaaacttccaaatggccattaccagccccctctgtrtatcctgcgaaactcagaaatcttatattctccaaatcatgcaccagataggggccattcaacatcacaagtctataatagaattaactaagaagaaccc

SEQ ID NO: 149761 - DNA, 201 bp, Homo sapiens
taattaatggatagatagatcaaagaaagaagatccatgggctactcaatgtgtccagagactcacccatcttccaagcactgggacaagagcaaacaccsattgctgagttcctactatgaattttttgtacgttatctcatttaactttctcaacaaccctcaaaagtagaaataactacctctactctaagaagagaa

SEQ ID NO: 149762 - DNA, 201 bp, Homo sapiens
gattcctacaagctacaaactgggtggcttgaaacaacagaaatgcattttcttacaattctgaagtccagaagtctgaagtcagggtgagagtagggccrcattgccttgaaagttctagggaacaatccttccctgcctcctataacttctgggggctcttggcatttctggactttcatggatcgtggccacatcact

SEQ ID NO: 149763 - DNA, 201 bp, Homo sapiens
tatgttgaagcactacccaccaccttctgccttgatgtgacaaccaagaatgactccagatattctgaatgtcctctgggttatgggagcaaaatattttstggtttggaatctgcagactacatgacttctcaagtattaaaattcagaagctgatagaataactaaataattactgcagcatataactagctttgtttt

SEQ ID NO: 149764 - DNA, 201 bp, Homo sapiens
taccaatggttgagattgacgggatgaagctggtgcagaccagagccattcttaactacattgccagcaaatacaacctttatgggaaagacatgaaggaragagccctgtatggtatattttctgttcttccatccacagagaacacagagtgatttaagtccttctttgagtgggtgggaccatggcagggcatcatga

SEQ ID NO: 149765 - DNA, 201 bp, Homo sapiens
ttccttttgaaacatgattctcaatcaatggctaagggagcttagtgtggggattggaatcatgacactgtgaactctagtccataacaattaaacaaccrcgccccacacttttgtgtgaacttcactctccctttctttctgctgaataatgctatttgcatttcccaagttaggaaagtacaacatcaaaatatctaa

SEQ ID NO: 149766 - DNA, 201 bp, Homo sapiens
ctggcctccaaccaagcagtgagcagagttatagttcttactctctcattcattcagataatgtggagaaagcttgggatttctgcacccatgcaataagrcaacagaggtgggaaaagtcagggtggagaggctctgaaagaagcaggggtcccatcctgggtgggcatgtgttcctgatctgattcctccaattctcca

SEQ ID NO: 149767 - DNA, 201 bp, Homo sapiens
atcaccggcctccacctacctatgttgaagcactacccaccaccttctgccttgatgtgacaaccaagaatgactccagatattctgaatgtcctctgggktatgggagcaaaatattttgtggtttggaatctgcagactacatgacttctcaagtattaaaattcagaagctgatagaataactaaataattactgcag

SEQ ID NO: 149768 - DNA, 201 bp, Homo sapiens
ttatgcagccaacaaacatataaaaaaagctcatcatcactggtcattagagaaatgcaaatcaaaatcacaatgagataccatctcatgccagttagaawggcgatcattaaaaagtcagaaacaacagatgctggagaggatgtggagaaatagcaacacttttacactgttggtgggagtgtaaattagttcaaccat

SEQ ID NO: 149769 - DNA, 201 bp, Homo sapiens
atcaagccagtggcagaaatttgcaaaagtcttagttattaacatactgttccttttgcaaaagtttggaaatttgcaaaagtagctaaatgttaacagcwaagacaatggggaaaatgtctccagggcatgtccagggctttgtgacagcccctcccatcacaggcctagaggcctaggagagaaaactggttttgtgag

SEQ ID NO: 149770 - DNA, 201 bp, Homo sapiens
gcagccaacaaacatataaaaaaagctcatcatcactggtcattagagaaatgcaaatcaaaatcacaatgagataccatctcatgccagttagaatggckatcattaaaaagtcagaaacaacagatgctggagaggatgtggagaaatagcaacacttttacactgttggtgggagtgtaaattagttcaaccattgtg

SEQ ID NO: 149771 - DNA, 201 bp, Homo sapiens
tctctagggttcaaccaactcacagcaaaccttgaaaatggctaaggaaaagtctctcatcttacccttggcactccttgggatgggtaattctttgggtkcaggggctgtcctgttcatgataggatgttccaaggcatcaccggcctccacctacctatgttgaagcactacccaccaccttctgccttgatgtgacaa

SEQ ID NO: 149772 - DNA, 201 bp, Homo sapiens
aacctccacacactctacctgactgtctctattctttcattaatttctaaaaaactggactcatatccctcaaatgctttgtaaggaccttgcttggatgytgaccaaaataaacaaagtgctaagaaatttttatgggacacatgaactagaatgctgaaactttgatgaaattaagaaattatagaattttaatttgat

SEQ ID NO: 149773 - DNA, 201 bp, Homo sapiens
tttgtggtgcatgctaacccatgaagagtattttgccttttatcatggaaaggacccagtgcccagcagctcttcccatccctctatttcaatgtggtttstgttcctgagttctctgtgatgtcctttatcccacatgtgcccttgtcttcccgcattgaattggtctgagcagagccctttccatctggtttcctccct

SEQ ID NO: 149774 - DNA, 201 bp, Homo sapiens
aattagctagatgacaagtcacattctctagggttcaaccaactcacagcaaaccttgaaaatggctaaggaaaagtctctcatcttacccttggcactcsttgggatgggtaattctttgggtgcaggggctgtcctgttcatgataggatgttccaaggcatcaccggcctccacctacctatgttgaagcactaccca

SEQ ID NO: 149775 - DNA, 201 bp, Homo sapiens
gtgagcctctaataacacctgagggccactgtgtctgctcccctgtactgtgagctggtggtgtggggcttggcctgctgggtccccagtgcttcatcacyaatggacaatgacatctgcacagacccatacacagctctatgcacctccagaacctgggtatatgagactgggctttgagaactcacaaacctccacaca

SEQ ID NO: 149776 - DNA, 201 bp, Homo sapiens
gtccctcgggtggcagcagaaaaggggggtttcaggtgaggtggcgtcctgtgaagggaacttctagcgcgccccttcagcctcacagcgccgtgtggacytgagcctcggaacggtactttgtgcgttgcttcacgaaggcttgggactttagcctcaccctttctcagttctatgaagaaataagcacataagaaatcc

SEQ ID NO: 149777 - DNA, 201 bp, Homo sapiens
ctaattagctagatgacaagtcacattctctagggttcaaccaactcacagcaaaccttgaaaatggctaaggaaaagtctctcatcttacccttggcacyccttgggatgggtaattctttgggtgcaggggctgtcctgttcatgataggatgttccaaggcatcaccggcctccacctacctatgttgaagcactacc

SEQ ID NO: 149778 - DNA, 201 bp, Homo sapiens
ccagtgtgttccgagagactcatccacatcccaagaagtgggggcaggaggtcactctcattattcagttcctattataaattttatatacaatatttcaytgaactttctcaacagccctcaaagatagatataactatccctattttgaaaggagaaacttgagctcagaatttgaagagcctactgagtttatgaacc

SEQ ID NO: 149779 - DNA, 201 bp, Homo sapiens
tagtgctgtcttctcatagagttttcatgagatatagttgtttgagagtgtgtagcaccttcctgttcactctctttctcccctgccagccatgtaaataygtgcttgcttccccttcgccttccaccataaatataagtttcctaaggcctccacagaagcagacgcctgtacagcctgcagaactgtgagctgattaaa

SEQ ID NO: 149780 - DNA, 201 bp, Homo sapiens
actccttgatctccagcccaatccaccctctgagcatggtggggcctcttgccttcctgcctaggtgcatttgctagccctgcctggcaagctccttcccmgtggacacacttaacactacctcattgcttcccaggaacgccgggctgtcctctgccctccaccgggccccagtgagcctctaataacacctgagggcca

SEQ ID NO: 149781 - DNA, 201 bp, Homo sapiens
ggtgtctgtttctgcctccatgctggtactcatggaggggactcgcttggtctttggcatgaggggctcacattccctgggtcatcttaatgatggtggcyggccttggcttcactctgaggctgtgctttgtggattacaggccctgaaaaccagaatcagcaacctgcccacggtgaagaagtttctgcagcctggcag

SEQ ID NO: 149782 - DNA, 201 bp, Homo sapiens
agaccttgctcaatgtcctctggagcagaggagcaaaatctccccagttgagaaccatgggactacatgaattcatggggctaagcaaggctatgttaccratgtgccccactgcttggacattcactggaaacttcctgttaatccaggtggactgattagtgaatatcattaacctctgtacagaagctaaaaaggaaa

SEQ ID NO: 149783 - DNA, 201 bp, Homo sapiens
tccataaccatttttttcatcccaaaagggtgggtttcatagacacttcatactcctttttttttcttctttctaagatgggagtttgctgttccagcaartaccaatggttgagattgacgggatgaagctggtgcagaccagagccattcttaactacattgccagcaaatacaacctttatgggaaagacatgaagga

SEQ ID NO: 149784 - DNA, 201 bp, Homo sapiens
cactaatccatgcacagaaatgttcataggagaattattcatgctatgcaaaaggtggaaacaacccaaatgtccacccatggatgaatggaggaacaagwtgtgctgtagcagacaatggaatattcttgggctatgaaaagggatgaagtactgatgcatgctacaacatgggtgagccttgaaaacatgttccataaa

SEQ ID NO: 149785 - DNA, 201 bp, Homo sapiens
tgatctctcctggagacacgggctttactaagatatgacaacaccataactaggagaactgctcagtgccttctttccagtgatgtcccctctcaaaataygacctaatcatagacattcatcagaacagggtggcagtgaactaaaagattgagcagctatgtgctgtgacccatgcacttttctcaatgaattaggtct

SEQ ID NO: 149786 - DNA, 201 bp, Homo sapiens
acgtcttaaagagcaatggacaagactaccttgttggcaacaagctgagctgggctgacattcacttggtggaacttctctactacatggaagagcttgamtctagccttatcttcagcttccctctgctgaaggtgacccatttcacagttctcagagaggcagacccatatctcccatcttgggatcttgtatctggga

SEQ ID NO: 149787 - DNA, 201 bp, Homo sapiens
tcacttggtggaacttctctactacatggaagagcttgactctagccttatcttcagcttccctctgctgaaggtgacccatttcacagttctcagagagrcagacccatatctcccatcttgggatcttgtatctgggacctgggactgagtatgttttgaccccaatgttcaccaggccttcagtgccccaaagtctcc

SEQ ID NO: 149788 - DNA, 201 bp, Homo sapiens
cataaaacaagaaaacaccaattaatcagagccatccaaatatgaatccttctggattctacgtattgcaaaagagtaaaatcacaaatatgcaaatggaygccaaagatttctttaaaaacaaaacaaaaaaagcacacacatcactatcattcacttctatgaccttttgggaaaagtccagggaatagcatagcttca

SEQ ID NO: 149789 - DNA, 201 bp, Homo sapiens
tcacactatcacccacagaaaaacactaacagcttgaaatatttccttcctgtttttttatacacaaactttttttaatcacactatatgtggttgttttsatcctgtttttataccttattatgtcactaagattttccaatgccaccaaatcatttttgaaaacataaaaatgtaatgctcattcaatattccattaaa

SEQ ID NO: 149790 - DNA, 201 bp, Homo sapiens
tatcattatgaactcatcaatttaaaacatctttgatgtgtttcagttcacttcaggtatcattcttatttatgctcaaattgtcccacctttggccaatrggagccaatgggaatttttggtctgacctgagtgatctctgataacttccttattatctggtataagatgataatcccaattaattctgaacatctcctg

SEQ ID NO: 149791 - DNA, 201 bp, Homo sapiens
tccaactggatcaaattgtgaatattctaaacccccaggttttccccatactgtttccttcaaaagtgtttcaaagataatgtattcctttgtaatcagcrtgtaacttaagatcttttaccatacaaatactgacaacagagtgaatgtttaccaccaccatgtggtaaactaatgcatgaagtttttgttgtaagatac

SEQ ID NO: 149792 - DNA, 201 bp, Homo sapiens
tacttatgtatttggcatagatgacagataccctaacttcctcggttagacttttcccttaattatacctggtgagttcctagctccaactggatcaaatkgtgaatattctaaacccccaggttttccccatactgtttccttcaaaagtgtttcaaagataatgtattcctttgtaatcagcatgtaacttaagatctt

SEQ ID NO: 149793 - DNA, 201 bp, Homo sapiens
acctggtgagttcctagctccaactggatcaaattgtgaatattctaaacccccaggttttccccatactgtttccttcaaaagtgtttcaaagataatgkattcctttgtaatcagcatgtaacttaagatcttttaccatacaaatactgacaacagagtgaatgtttaccaccaccatgtggtaaactaatgcatgaa

SEQ ID NO: 149794 - DNA, 201 bp, Homo sapiens
gcactctacacatttttgtatgagtgaatgggtaaatatttctccttttacttggcctctaaaaatatttgattacatagttccattttgtaccacctttraagaaaacagttattattatcacagacaataaataacccaactttcctttgtgtattttaaggtggaaccctgatgtatggacaagtgcccatggtcgaa

SEQ ID NO: 149795 - DNA, 201 bp, Homo sapiens
gaaggtaagcaacaaactcctgccctgctttatgacttgaatcaagggggagaaaaacaaatgaaactaaaaatagacaaagaattttatcaataaaggtytccaaaccctttgcgaaagctcaaaattcttcccccacttgcagttagacaacaaatctgctctccttcctcacaccctggtcttctggattttttttta

SEQ ID NO: 149796 - DNA, 201 bp, Homo sapiens
cacacatataattgctcacacactttgatcctacaacttttctatctcccagatgcatcttccctaatatttcaaaggaacagcatgcctctgaaaacacytggcttcagttcctggaacaatgttccatgaaaacacctgataactaagcaggtaaaacagaggcactacttaaaatgtttctttggcccattaaatgac

SEQ ID NO: 149797 - DNA, 201 bp, Homo sapiens
ggagaggagatgaaaagaagacaagcacatgagataaagctgtttcctatgttcagaataagtcaggagggtttaagctattccattcctttcacctcacraagcccaagagaaatggggtttgcgtgagctcacacagctagtcagtggcaaagaacagattagaagccaggtctcttaacttctagaagactttctgcc

SEQ ID NO: 149798 - DNA, 201 bp, Homo sapiens
cctttgctttggttttatataaaaacttccttgctttcgtaagatccagaaaacgacagcatgggttcaacaacttacttgaaatattggtttatttggtrgttaggccttttactttctattcctttctgtgatatcaacagtaataacaataaaaatgttaatagcaacatattcttatattctttcatttttcaattt

SEQ ID NO: 149799 - DNA, 201 bp, Homo sapiens
attctaaacccccaggttttccccatactgtttccttcaaaagtgtttcaaagataatgtattcctttgtaatcagcatgtaacttaagatcttttaccayacaaatactgacaacagagtgaatgtttaccaccaccatgtggtaaactaatgcatgaagtttttgttgtaagatactatgaagtgcagacttctcataa

SEQ ID NO: 149800 - DNA, 201 bp, Homo sapiens
aaagcatgtttaggaaaaaaatgctgctttttggaaagctttgttttataccttggtaatcactgtccatattctcatatttgttaactttggaatatgaygacttccttttataataattatttacataaaattacacatttaccaagatgataatattgaagatgtagtaggcttggtgagagggcaacctagctctgg

SEQ ID NO: 149801 - DNA, 201 bp, Homo sapiens
tagtttaacatgttcccctgtctctgtatttttataaattggtagctgggtttagaggctttatcagattcaggttctagtcggttttgcaaggctacttycagtgtcgttgtgtattctttatgatatcagtagccattgatgttcagggctaacattccttctgcatctattacctgaaatgttctttttttttttttt

SEQ ID NO: 149802 - DNA, 201 bp, Homo sapiens
taattcatggccaattaaacagtttctttaattttctgattctatgtttagctctttattagttatgtattatttatttactaaagcaaagacgttagtaragtacatctaccactttcttgtgaatttgtgtttccctccacaaggtggaagtggcacacagagtaaatcaccagaacacagacccaaaattttcggagg

SEQ ID NO: 149803 - DNA, 201 bp, Homo sapiens
acaattcttggtcagacagaaagctttgtgcctaccagagtactcaacatcattttcttgcactctacacatttttgtatgagtgaatgggtaaatatttctccttttacttggcctctaaaaatatttgattacatagttccattttgtaccacctttgaagaaaacagttattattatcacagacaataaataacccaa

SEQ ID NO: 149804 - DNA, 201 bp, Homo sapiens
caaaatggtctcttagattcaaagatgaaggagcagagaattttctttaagcctgtgtccagctccactgtggtttaacatggggacagcaagtaaccccrgtgacttgatattcactaaaatgttctatacactgttttacccctgacagaaggcactaagttcatttgttctctagaaatggagatactttatatgaat

SEQ ID NO: 149805 - DNA, 201 bp, Homo sapiens
aaaaaagaaaaacaagggtcaggaatggtggttcatgcctgttatcctagcactttgggaggcagaggcaggtggatcacatgagaccaggagtttgagaycaacctggccaatatggcaaaaccctgtctctactaaaaatacaaaaattagctgggcatggtggtgctcacctgtaataccagctaatcgagaggctga

SEQ ID NO: 149806 - DNA, 201 bp, Homo sapiens
catggaatgaattaggtagaaaccagagccttcctaagatacatagctgcaaaatatgacttgtatggaaggaacatgaaggaacaagcctggtacaacartcgcttctttcttagaataaaacttaaaaaaaaagttttaagcttattagcagtcatgtgtagcataattcttgacagattaatacaaagctcttctctg

SEQ ID NO: 149807 - DNA, 201 bp, Homo sapiens
ggaggcagaagttgcagtgagctgagtttgtgccactgcactccagcctggtcaacagagcgagactctatcgcaaaaaaaaaaaaaaaaaaaaaaaaaarggaaagaaaaaacttcctttcatctactatctggttacttggacatacagttttcaagactgatgcttgattctttccctttgtttaccaattttccaaa

SEQ ID NO: 149808 - DNA, 201 bp, Homo sapiens
agccttcctaagatacatagctgcaaaatatgacttgtatggaaggaacatgaaggaacaagcctggtacaacagtcgcttctttcttagaataaaacttwaaaaaaaagttttaagcttattagcagtcatgtgtagcataattcttgacagattaatacaaagctcttctctggttaactttttattgtagcaaaatct

SEQ ID NO: 149809 - DNA, 201 bp, Homo sapiens
cagaggcactacttaaaatgtttctttggcccattaaatgacagttccctttatctgtaactcttttttgaattaacaccctttttctaggattcacatgyatgtagaaggcttgaaggacctgagtgacatgattatgttccagccactctctctgcctgaagagaagatgaatcttgcatacatccttgaaagagccac

SEQ ID NO: 149810 - DNA, 201 bp, Homo sapiens
gcacatgagataaagctgtttcctatgttcagaataagtcaggagggtttaagctattccattcctttcacctcacgaagcccaagagaaatggggtttgygtgagctcacacagctagtcagtggcaaagaacagattagaagccaggtctcttaacttctagaagactttctgccaaatcaagctgactttaaattata

SEQ ID NO: 149811 - DNA, 201 bp, Homo sapiens
tgagtgtctgcgtttcgttcaagtctacgagcacagccgtgttctaacctctcagagcaatgtcatgctgggggtccactcctccctggccatgtggtaaygtcttactcaagggctgtggaaaaggatagacatttatgtcatttaagctgtctctccccaccagacaggacttttgaacctctctaaccaacttttaaa

SEQ ID NO: 149812 - DNA, 201 bp, Homo sapiens
tctaaccaacttttaaagaccattcacctcccataccctcccatcttattagaagggctcttgtcctttaacaggttttggcctataggtcaagggttacrtttagggttacatttaactgctagagtaacccatagcaaggctgaatataattggtctccttttaagtttccttgtatgtgagttagtagccttggtcac

SEQ ID NO: 149813 - DNA, 201 bp, Homo sapiens
ccatcctcctcactccctagctggtcccagtggctctctctctcggcagatttggtctgtgtgtccatgtactggagagtcagtgggcgctcatttctcaragttatgatgtccttggcctggcctgcttttactctgcttgcttagatctgctgctctatggaaaaggtaaatcttgcgcaggtctctgctgtactcctg

SEQ ID NO: 149814 - DNA, 201 bp, Homo sapiens
catgttgtgattcaggggtgtctgcctttggggtcttttttccttccctgtatcacataccttctataccctggttcctacactgatattatatactagcrtggttaccttctctgtccacaggattgctgtgtcggccctttagtgagtgtctgcgtttcgttcaagtctacgagcacagccgtgttctaacctctcaga

SEQ ID NO: 149815 - DNA, 201 bp, Homo sapiens
caaaaccttatatttacattaattcttcttttcccatctccaggtctgtttcaacatgggacgtatcactttagccaaaaaattggctaggaaagcccttygactgctgaaaaggaatttcccttggacctggtttggtgtccttttccagacattcctggaaaagtattggcattcctgtaccctgagccaacctccaaa

SEQ ID NO: 149816 - DNA, 201 bp, Homo sapiens
gagggattcagacctcagatggggctctaggtttggaatacaggcagtcatgaacctgtccctcaggcatggcctctgcccctgacctctggctccttaamgtctgggaaccatgttgtgattcaggggtgtctgcctttggggtcttttttccttccctgtatcacataccttctataccctggttcctacactgatatt

SEQ ID NO: 149817 - DNA, 201 bp, Homo sapiens
ttctcagagttatgatgtccttggcctggcctgcttttactctgcttgcttagatctgctgctctatggaaaaggtaaatcttgcgcaggtctctgctgtwctcctgagggattcagacctcagatggggctctaggtttggaatacaggcagtcatgaacctgtccctcaggcatggcctctgcccctgacctctggctc

SEQ ID NO: 149818 - DNA, 201 bp, Homo sapiens
ttctagcatcacaattctgattgtccatgaggtcttagagccttaaagaagtgatgattttaagcaaaagtcatggtgggtaagcagcggatattgctgcragctgttactcttttcctccaggtttgcccaggaatcacagtgggacctgtttaagcactatttctccaacgcttgcagttggtgaaaagaaccaatgcc

SEQ ID NO: 149819 - DNA, 201 bp, Homo sapiens
atgaaactgtcaggttctttatgagtgtcaggagtgagagcactcgttggcttgcaaggctgcgtggctccaatgtagggaaggctgggagtgccgtcctraagggttcctaatacagctctctaatggcaggagtgagatggcctcaatcttgcgaagccctcaggctctccagctcactctagccctgatcaagcctga

SEQ ID NO: 149820 - DNA, 201 bp, Homo sapiens; identical to SEQ ID NO: 27797

SEQ ID NO: 149821 - DNA, 201 bp, Homo sapiens
tttggtatcctggtagcacctcagttgctgtccatcaatcttccaattctagatttgataggagagcactatgggatggaagattttaagagatgaattcrtcattatgaataggccttgtggataggctgtttaggagtataaattgtaaatcctctgtaaaatacaaaaggaagttaggaagggatattggcagagaca

SEQ ID NO: 149822 - DNA, 201 bp, Homo sapiens
ggcagagttgatttcttatgatggtaggactgaggctgccatttccctgttggccttcaggcaggaactcctttcagtttctagataccactcacatcccycatcacatggcccagtctgtcttcaagacagctgcagtgcattgaatccttctcatgctttgaatctctctgacttcttcagcctctagccagagaaaat

SEQ ID NO: 149823 - DNA, 201 bp, Homo sapiens
tactccagacttgagagcttaaaacaacacttatttgttatttcacagttcagtagtttagaggtccagtaggcttggctgagttgtttgcttaaggtctyacaaggccaaagtcaaggtattggctgaccaggtccttatctggagggtctgggggaagaattcacttccagactcattcaggttgttggcagagttgat

SEQ ID NO: 149824 - DNA, 201 bp, Homo sapiens; identical to SEQ ID NO: 27800

SEQ ID NO: 149825 - DNA, 201 bp, Homo sapiens; identical to SEQ ID NO: 27799

SEQ ID NO: 149826 - DNA, 201 bp, Homo sapiens
ccgaatatcaagacaatgtgtatttgttagtttctattgctacataacacattactccagacttgagagcttaaaacaacacttatttgttatttcacagytcagtagtttagaggtccagtaggcttggctgagttgtttgcttaaggtctcacaaggccaaagtcaaggtattggctgaccaggtccttatctggaggg

SEQ ID NO: 149827 - DNA, 201 bp, Homo sapiens; identical to SEQ ID NO: 27801

SEQ ID NO: 149828 - DNA, 201 bp, Homo sapiens
ccaaagcaataatagaaccgaatatcaagacaatgtgtatttgttagtttctattgctacataacacattactccagacttgagagcttaaaacaacactyatttgttatttcacagttcagtagtttagaggtccagtaggcttggctgagttgtttgcttaaggtctcacaaggccaaagtcaaggtattggctgacca

SEQ ID NO: 149829 - DNA, 201 bp, Homo sapiens
ctcacacctcacctcacgccgcggcgcaaccggactaggaccccgagcagggctgcccagggagcgcctgaaggaccctgcgagggccgcaggctatccarcgtggcgcctggtggccgggccctgtgccggaggacaaggtgaacccgcagccggacttctgctgcactggggctccgaatgacccagaatctggggtgg

SEQ ID NO: 149830 - DNA, 201 bp, Homo sapiens
agctagaagccatgaactctgacctaaggagactaagaatccattggagacttgaggcagacctaaaatgtaagaaaggacccaaagcaataatagaaccraatatcaagacaatgtgtatttgttagtttctattgctacataacacattactccagacttgagagcttaaaacaacacttatttgttatttcacagttc

SEQ ID NO: 149831 - DNA, 201 bp, Homo sapiens
ggtacgaggggtgagggctgcgcggttgcaggcctagagaagtagggggctgggtcgagagttgaggccgtgagcccggggggctggagggcgtggccacrggggtaggggcgcaggtcccggccgcgcgtgggtggaccagggctgggccgccgccctccaggaagcgagtggtggccccctcgagtgctggggtggcag

SEQ ID NO: 149832 - DNA, 201 bp, Homo sapiens; identical to SEQ ID NO: 27803

SEQ ID NO: 149833 - DNA, 201 bp, Homo sapiens
tgagagaactactgtggagaaaggaagattgccagaggttttaccgagagcatgaaggtaggatcagtagtcctctgaatggaaggtgcctcaatcccaaraggccataagagagattttacctggaacacaatggcaggctctctgacctaccaaccgtgtacagttgcagccagttttctaaaatcttggtttaaaaca

SEQ ID NO: 149834 - DNA, 201 bp, Homo sapiens; identical to SEQ ID NO: 27804

SEQ ID NO: 149835 - DNA, 201 bp, Homo sapiens
ttttatggtggtctgagtggtgggtcctgtggtcttgagctcaaggggttataggtatggaagagcagagacagcgcatcctatcccctttcacccaaggygcacactctggctgtgtgactgaaggtcttcacctcaccccacctcgtcttctcacccttcaatgggacaaaccctcaggtcctgagcaacaagtggtcc

SEQ ID NO: 149836 - DNA, 201 bp, Homo sapiens
ttgaacctgggaggtggaggttgaagtgagccaagatcgtggcactgcactctagcctgggcaacaagagtgaaacttcgtctcaaaaacaacaacaacarcaaaaaattagccaggcatggtggcgggtgcctgtaatcccaactactcgggaagctgaggcaggagaatcacttgaattcaggaagcagaggttgcagt

SEQ ID NO: 149837 - DNA, 201 bp, Homo sapiens
gatcctgatctctccataatattagaatagagatggtgtttatccagcagactttttggtatcctggtagcacctcagttgctgtccatcaatcttccaawtctagatttgataggagagcactatgggatggaagattttaagagatgaattcatcattatgaataggccttgtggataggctgtttaggagtataaatt

SEQ ID NO: 149838 - DNA, 201 bp, Homo sapiens
ctccataatattagaatagagatggtgtttatccagcagactttttggtatcctggtagcacctcagttgctgtccatcaatcttccaattctagatttgwtaggagagcactatgggatggaagattttaagagatgaattcatcattatgaataggccttgtggataggctgtttaggagtataaattgtaaatcctct

SEQ ID NO: 149839 - DNA, 201 bp, Homo sapiens; identical to SEQ ID NO: 27798

SEQ ID NO: 149840 - DNA, 201 bp, Homo sapiens
atagttgtcctatctctacaaaaaaattaaaaattatcaggcatgctggcacgtgcctgtagtcctagctacttgggaagctgaggtgggaggattgattgcttgagcccaggaggtttaggctacaatgagctatgattgtgccactgcattctagcctgggtaacagcgaggccttattaaaaaaaaatacacatacat

SEQ ID NO: 149841 - DNA, 201 bp, Homo sapiens
aatagagatggtgtttatccagcagactttttggtatcctggtagcacctcagttgctgtccatcaatcttccaattctagatttgataggagagcactaygggatggaagattttaagagatgaattcatcattatgaataggccttgtggataggctgtttaggagtataaattgtaaatcctctgtaaaatacaaaag

SEQ ID NO: 149842 - DNA, 201 bp, Homo sapiens
catagttgtcctatctctacaaaaaaattaaaaattatcaggcatgctggcacgtgcctgtagtcctagctacttgggaagctgaggtgggaggattgattgcttgagcccaggaggtttaggctacaatgagctatgattgtgccactgcattctagcctgggtaacagcgaggccttattaaaaaaaaatacacataca

SEQ ID NO: 149843 - DNA, 201 bp, Homo sapiens
ttatatccccctaaaattcatatgttgaagccctaacccccaatgtgatgatatttggaaatgggacatttgggagataattaagtttagatggccaggtrtggtggctcacgcctgtaatcccagcactttgggaggccaaggcgggcggatcacaaggtcaggagatcgagaccatcctggctaacacggtgaaacccc

SEQ ID NO: 149844 - DNA, 201 bp, Homo sapiens
acatagttgtcctatctctacaaaaaaattaaaaattatcaggcatgctggcacgtgcctgtagtcctagctacttgggaagctgaggtgggaggattgattgcttgagcccaggaggtttaggctacaatgagctatgattgtgccactgcattctagcctgggtaacagcgaggccttattaaaaaaaaatacacatac

SEQ ID NO: 149845 - DNA, 201 bp, Homo sapiens
aacatagttgtcctatctctacaaaaaaattaaaaattatcaggcatgctggcacgtgcctgtagtcctagctacttgggaagctgaggtgggaggattgattgcttgagcccaggaggtttaggctacaatgagctatgattgtgccactgcattctagcctgggtaacagcgaggccttattaaaaaaaaatacacata

SEQ ID NO: 149846 - DNA, 201 bp, Homo sapiens
atgatgaactacaatgagctattggcaccttcccctaaatcagtccttagagaatcaattggagtttgaggaaactaataattccagaagaggtggggggkgggggcagatagggagggagagagagagagtaggaagagaaagaagaaaagaagacatgaaaatggagaaagaagagggatagggaggaagaggaagtgg

SEQ ID NO: 149847 - DNA, 201 bp, Homo sapiens; identical to SEQ ID NO: 27806

SEQ ID NO: 149848 - DNA, 201 bp, Homo sapiens
aaaacctagtcaaagtatgtgtcactgcaggctggactcatggtcttaccactgagtttcaacagctggtgatactggtcactggtgtagggaggactgcrcccagtctatgccctggctttcgtagaaaaaggagcactaattgttgtgaattatttaagaggaagttggtaaagcatccttagttgctgataaggttgt

SEQ ID NO: 149849 - DNA, 201 bp, Homo sapiens
gccatccctgttttcatttattatttgcatagaacatctttttactttcagcctacatgtgtccttaaatctaaaacaagtctcttgtagacatatagttsagtcttgtttttatttttttattcattcagcaactctatctcttttgatttgggtggttaatacattgacatttaaagtaattattgataggagggactt

SEQ ID NO: 149850 - DNA, 201 bp, Homo sapiens; identical to SEQ ID NO: 27810

SEQ ID NO: 149851 - DNA, 201 bp, Homo sapiens; identical to SEQ ID NO: 27811

SEQ ID NO: 149852 - DNA, 201 bp, Homo sapiens
tgtagtttctgttatttcttacttcagatattctcttacatgttagacttttggaagattttttaaaagaatccaacttttttttttttttttttttttttgagacggagtctgactctgtcacccaggctagagtacagtggtgcaatcttggctcactgcaacctctgcctcccaggttcaagcaattctctgccccag

SEQ ID NO: 149853 - DNA, 201 bp, Homo sapiens
aaggtactggttccaggaccctctgcagatacccaaatctgcaaatgctcaaggcccttatataaaatagcatagtaaatgcatataacctacacgtatcctcctgcatactttaaatcatctctagattacttataatacctaatacaatggaaatgctatgtcaatagttgtcatactatattgtttaaatctgtataa

SEQ ID NO: 149854 - DNA, 201 bp, Homo sapiens
gcaccccaaaagactgagaatgttgggtgcatactcctttctttccctccaagagaggagtcatgggctgaagcaatctttcttgacactgaactgtgccygaggaaggaagtgatgtgagtaaagtgaaattgctcttttgcctagttcaatgtggtattttggttttatgtgaatctgagtgactgcaacttcttaagt

SEQ ID NO: 149855 - DNA, 201 bp, Homo sapiens
agagagatttttacacccatgttcacagtgacattatttacaatagccaaaaatggaagcaaggcaagtgtccacttatggataaatggataactaaaacrtgatatgtgtgtgtgtgtgtgtgtgtgagagagagagatggaatattacatatataatatatatacaaaatattctctctatataatcactattcagcct

SEQ ID NO: 149856 - DNA, 201 bp, Homo sapiens
ttcttggttgcctgctctatgcaaggcaaacaggcattgaattaacaatgaagacagtttttcccccgtccccccggataagacagtcacctaaagcagtwttaaaaattgagcctgtccaattttattccacccagtcatggcatacctcttgtgaatatttaggtttgcttttgatttgtgatgcctcgctaggagcat

SEQ ID NO: 149857 - DNA, 201 bp, Homo sapiens; identical to SEQ ID NO: 27809

SEQ ID NO: 149858 - DNA, 201 bp, Homo sapiens
  misc_feature (1)...(201): n = A,T,C or G
ccttggtcagtatgcccaggggccagtttggcattcattagtggtactttctgcacttttccttggatgggagtttagcataccacctactcaacaacccntctatctctattgacctcaaatgatgctgggactccaaagatcaccccaagaagcacctggagttccagctcttagataagcaacgtagcttatcttctc

SEQ ID NO: 149859 - DNA, 201 bp, Homo sapiens
aagaagcacctggagttccagctcttagataagcaacgtagcttatcttctctgtggagacatactagcagccctggcattctatcatgggggtagcctgycttcatccccttcctacagcctttctctgagtgtaagtaaggcagagccactggtaaagaaggctccaccggagttgagggagcagctggccaggtgtag

SEQ ID NO: 149860 - DNA, 201 bp, Homo sapiens
tgtgactatgcatgaaccaatagataatgtgtctcaaagtaagaatttagatcagtccaatttggtacacctgaggttcattttaaaaaacttttttttttcaaaaataaaataattttggaggaaagaattacacttttcaaacttttttttttaaaggtttcagacatttaaaagtttgaaaaaaagtttaaaaagttt

SEQ ID NO: 149861 - DNA, 201 bp, Homo sapiens
ctagttcaatgtggtattttggttttatgtgaatctgagtgactgcaacttcttaagtgaattttgaacttctcataaagatatttgggttcatatatcaytgttaaattggtgtttctgtggcaggatgagggctaacaattcctattctgccatcttgttgacagcactccaaacctacattgtattttaaagttagca

SEQ ID NO: 149862 - DNA, 201 bp, Homo sapiens
tccccctttattttgtaatatatattacttaggattggggctgaaggacatctgtaagcagcatgtttctgttcatatacaacaactttactggaactgcmatctgatttgcaataaaacttactttctggtatttactgacttctttagtctgaacaccaattctagtaattaggctgaaaccatgacatgattgattta

SEQ ID NO: 149863 - DNA, 201 bp, Homo sapiens
tatgtggtgcttataatagtcagattcatagaatttgatattagaattatggttcccaggggctgggaggaaaggggaatggggagttattgtttaatggstatagagtttcagttttgcagaatgaaaaaagttctgaagatggatagtagtgataattacagaacaatatgaatgtacttaataccactgaactttacg

SEQ ID NO: 149864 - DNA, 201 bp, Homo sapiens
cccaagcctagggtctcatccagccagccctgtgtgccccacagctgcagggggaagtgaagtgggcgctggagcatcaggaggcccggcagcaggcactrgtgacgcgtgtgtgagtggccatctcacctggggccccatcctggagcagagagaacccctgatcgtgggcctgctgagcctcacccccgtgtcttcagg

SEQ ID NO: 149865 - DNA, 201 bp, Homo sapiens
gacctgcagccaggtggcgctcagtaatacctccttgttggctctgaaatgagtctttggaggtgggcagagattctcgaatgcagcctcttcagctcccrtgagtcaccccattcctgagtcgagcagccccacagtctcccaaatgtgaggcagaaaagcaaactgtggccgggcatggtggctcacgcctgtaatccc

SEQ ID NO: 149866 - DNA, 201 bp, Homo sapiens
agctcagggcatcctgcgggcgggctgccgctccgttccgcgtgctcgtccgctgcgcccaggctgggcgctttcacgcacctggttccatctgcacaggktatgtgcagggggcgctgggccgcattccccagatggggaaacggaggcatggagagaggaagagctatcctccctcctcagcaaccaccggtctggccg

SEQ ID NO: 149867 - DNA, 201 bp, Homo sapiens
agccctcaagcctcctggtctgattcctgagccctgggcacaggtggcgactgcccaggatcctgcctgtgggggccctggctggagtgtgggggctcgcrtgcgtgcacgtaccttcgtctctccccttggagccaggtgggcccatttgcagctggcctgtcttggggacctgcagccaggtggcgctcagtaatacct

SEQ ID NO: 149868 - DNA, 201 bp, Homo sapiens
ttggctggggcgcaggctgtgacccctgtcccgtctgctctcccataggctgcctgaacggcgggggccagctccaggccccagacaggcccagcagagarctcctccagcacgtggagagactgtacggcatggtccgggctgaggcgcccgaggacgcgcctggggttcaggagctgtacacacactggctgcagggca

SEQ ID NO: 149869 - DNA, 201 bp, Homo sapiens
agcgccagccaccacggccctccggacattcctggaggcgactctggaggacatccgggcagcgcaccgcagccgtgagcagcagctggcccgggctgccygcagctaccacaagaggctggtggatctgagccgcaggcatgaagagctactggttgcctacaggtgggccccgctgggatgggaggtgtcaggcatctg

SEQ ID NO: 149870 - DNA, 201 bp, Homo sapiens
atggcatctgtgggtctcagcctgcctctgagtgctgcgcgcccctgagcgtgcaccgggtgaatgttcacctaccccaggtggcccgcgggcaggtgcayctgctcatgccagttgtcccacagatccttcggctggagagccgggtactggagctggagctgcgaggagatggcaccagccagggctgtgcagtcccag

SEQ ID NO: 149871 - DNA, 201 bp, Homo sapiens
ctgcggtaggcattcaggggaaggcaggctccaggctccccccatggcggggacactcaccgaagtcgctggtgcatgcggccaggagcagctcagcgtcrctgcagggcctgcaggcacctggcatgcagagggggtggtgaggagaggccctgccctctcccggcatcaccccaggccccgtcccttgtccgcacaagc

SEQ ID NO: 149872 - DNA, 201 bp, Homo sapiens
aggtggccctcatgtgggtccagctggccgaggtcacgaggagggacgcaggccccagccctgtgagggtctgggtggctcagtcgtgtggggctgcactsaggagcccccactgcagcgcaaggagggcccgcgcctgtggctgccgcggctcgcccgcctgttcgaagcgcgcccgctccttgcatagcgcctccagga

SEQ ID NO: 149873 - DNA, 201 bp, Homo sapiens; identical to SEQ ID NO: 27815

SEQ ID NO: 149874 - DNA, 201 bp, Homo sapiens
tgtggtttagccctcccccagcagccagcagaccccctgggcccgggctgtccctatacacggatggctccaaggcctggggggggcgccacaggagcacsgggggggcccatgcctccctcactcactcccaggtgtcccctcccggctctgggaacctgactcagcacggtcacgtctgtccctgtgtcaccatgccag

SEQ ID NO: 149875 - DNA, 201 bp, Homo sapiens
catcctcatcagccctgcggcaggcaggtgatctgtgtgaaagggtaagtctcttgcacgtgcagtggaagtcccagggcggcgctggaggtgaccccccyccccaggtgtccacagagggcatggcactcatcaggcatctgcatccgctaacctagagaaaggaccgtgtttgtgggccctgcacagctgtgtccctca

SEQ ID NO: 149876 - DNA, 201 bp, Homo sapiens
ggcctggacctccctctcggcgggtggagaatgtgagtcctctgggacttgccgctcctgccatggggttgaagtctgcccgttcccccaaaggccaggarggtgcaggttcctgcaccctgggcctaatttcagccaggagagggacttttacagctcagccaggcagggaggcgggactggtgactgcatgggagtggg

SEQ ID NO: 149877 - DNA, 201 bp, Homo sapiens
tgcacttcgcaatggcgtacggcttccgcaacatccagaacctggtgcagaggctcaaacgagggcgctgcccctaccactacgtggaggtcatggcctgyccctcaggtagctcctgcaagggacaggacacgaggaccccttctgggagcagagctgtgggccaccatccaccaggctgggagtgggaggaagtggggc

SEQ ID NO: 149878 - DNA, 201 bp, Homo sapiens
gcagagagctcctccagcacgtggagagactgtacggcatggtccgggctgaggcgcccgaggacgcgcctggggttcaggagctgtacacacactggctrcagggcacggactcggagtgtgcaggtcgcttgctgcatacgcagtaccacgccgtggagaaggccagcactggcctgggcatccggtggtaggggctgc

SEQ ID NO: 149879 - DNA, 201 bp, Homo sapiens
atcgtgtctaatactcagctggcctgagaaataaggccccccgggatgggggcagaactaggtccgggggcagcctggatgggtatccgcgaggaggcggsctccccagcctgcccaccctcaggaacatcataagcccatactcggtccaggccctcgccaaccgcggtcacaggctgccaggtggggagtgggaagcgc

SEQ ID NO: 149880 - DNA, 201 bp, Homo sapiens
cgtggaccagcacctgggcaggtgggcagagggagctgggtgtgaccccagggccctggtctggttggaatgaaggatgatggctgcctcaggcgctaaargcagacctgtccacagctgggcaagtcacttaagcatggttcctctgagcaggtacaagcacgaaatcctgaggctgaggaagctggcaggtgcagggga

SEQ ID NO: 149881 - DNA, 201 bp, Homo sapiens
tgggggcaccgcagtgtgggccaccagcttggaagcagaggtcccaccagatctagcgctcaataaggagcagcagctgcaggtgggtgtggggccccagsgtgctcgtgaggagggagggtgccagcagggcccacagacgccacctctcacctggccacccacagatctccaaggagctggtcgacattcagatcacaa

SEQ ID NO: 149882 - DNA, 201 bp, Homo sapiens
gagctcctgggggcaccgcagtgtgggccaccagcttggaagcagaggtcccaccagatctagcgctcaataaggagcagcagctgcaggtgggtgtgggkccccagcgtgctcgtgaggagggagggtgccagcagggcccacagacgccacctctcacctggccacccacagatctccaaggagctggtcgacattcag

SEQ ID NO: 149883 - DNA, 201 bp, Homo sapiens
ggagctcctgggggcaccgcagtgtgggccaccagcttggaagcagaggtcccaccagatctagcgctcaataaggagcagcagctgcaggtgggtgtggkgccccagcgtgctcgtgaggagggagggtgccagcagggcccacagacgccacctctcacctggccacccacagatctccaaggagctggtcgacattca

SEQ ID NO: 149884 - DNA, 201 bp, Homo sapiens
cctgcaagggacaggacacgaggaccccttctgggagcagagctgtgggccaccatccaccaggctgggagtgggaggaagtggggcacagagggggcccsgtcacctccctgctccctggtggtcaggaagcttggctggggcgcaggctgtgacccctgtcccgtctgctctcccataggctgcctgaacggcgggggc

SEQ ID NO: 149885 - DNA, 201 bp, Homo sapiens
acacagaaggtgtccagcgagtgtagctcagggcatcctgcgggcgggctgccgctccgttccgcgtgctcgtccgctgcgcccaggctgggcgctttcasgcacctggttccatctgcacagggtatgtgcagggggcgctgggccgcattccccagatggggaaacggaggcatggagagaggaagagctatcctccct

SEQ ID NO: 149886 - DNA, 201 bp, Homo sapiens
ggggctgctgcaggtggagctggccttgaacacggaggatcagggagagcacacctgagggaggtttccgctgagacctggaggacgcgaggggtgggagyagggcgcctggtgaccgggccagcccttgcctctgggcctccatgttcccagctgtacaatgggcagggctccccaaggaccatttcctggggtttaggg

SEQ ID NO: 149887 - DNA, 201 bp, Homo sapiens
cggggggtgcaggcccaggacacgtgccctgcatgggcatgcacacgcacatggcatctgtgggtctcagcctgcctctgagtgctgcgcgcccctgagcrtgcaccgggtgaatgttcacctaccccaggtggcccgcgggcaggtgcacctgctcatgccagttgtcccacagatccttcggctggagagccgggtact

SEQ ID NO: 149888 - DNA, 201 bp, Homo sapiens
atcctcatcagccctgcggcaggcaggtgatctgtgtgaaagggtaagtctcttgcacgtgcagtggaagtcccagggcggcgctggaggtgacccccctmcccaggtgtccacagagggcatggcactcatcaggcatctgcatccgctaacctagagaaaggaccgtgtttgtgggccctgcacagctgtgtccctcac

SEQ ID NO: 149889 - DNA, 201 bp, Homo sapiens
tgccctgggagtcacctgggaccaacagaggccttggcaacgcacttagcagtgccagtggcagcagcagccatggggaagccgggcgtggaggcagcacygggctcggagctggccagggttccctagcctatggagcacgcagccaccacaggccccaggcctggacctccctctcggcgggtggagaatgtgagtcct

SEQ ID NO: 149890 - DNA, 201 bp, Homo sapiens; identical to SEQ ID NO: 27817

SEQ ID NO: 149891 - DNA, 201 bp, Homo sapiens
gggcgggctgccgctccgttccgcgtgctcgtccgctgcgcccaggctgggcgctttcacgcacctggttccatctgcacagggtatgtgcagggggcgckgggccgcattccccagatggggaaacggaggcatggagagaggaagagctatcctccctcctcagcaaccaccggtctggccggcccctgtgggcggtgc

SEQ ID NO: 149892 - DNA, 201 bp, Homo sapiens
cctggcccttgagccatggctgtctctttcccaggatccgaggggttggggtgagaggaggcagctcacacagggccaggtgtcctggaacacccccaccsaggggcttttagcctcggagccttgggctgtggctgtcccaaacctcactggccctttatgcggctgaaaggccgaggaggaaggcggagacagtgacaa

SEQ ID NO: 149893 - DNA, 201 bp, Homo sapiens
ccaaggccagctccgtcaggcagaggctgaaaatgcccggctgcagctgcagctcaagaaactgaaggatgagtacgtcctacggctgcaacactgcgccyggcaggcagtggtgagccctgcaggagcaccctgaggcctagggagcccaagcctggcctgggtgtgctggatagcttcagggagaccccagggccccgg

SEQ ID NO: 149894 - DNA, 201 bp, Homo sapiens
gcgtggtccctgcgggcgggcgggcgggggccgggttaggtcgggttgggacaaggcggcgtcctcgtgcctccccgcgccccgccggcgctcaccagtgrtggtgggtggtcagcacagcggtcagagacaccccctcccggcccacgatctccagcagctgaaagggacgggagtgacggtaacacagacggtcccggt

SEQ ID NO: 149895 - DNA, 201 bp, Homo sapiens
ccctagccccaagcctagcacccaccaggcaggcccaggcctcagagcagcaaacaccctggggtgtggctggggcttcccagcggggctggcaaccccgsacctaccacgctaggggccaggaacacagacacgttgcggcagtccctcaggctcacctgccggaagagaagtcgccccggccggggagaggcctggtgg

SEQ ID NO: 149896 - DNA, 201 bp, Homo sapiens
ggacatccgggcagcgcaccgcagccgtgagcagcagctggcccgggctgcccgcagctaccacaagaggctggtggatctgagccgcaggcatgaagagytactggttgcctacaggtgggccccgctgggatgggaggtgtcaggcatctgtgggtctctaagcctctgtgcctcaaaggcttggtgtgcagcaggagt

SEQ ID NO: 149897 - DNA, 201 bp, Homo sapiens
agctgtgctgaggcccctccctccttgccaggtgcagcggtgcctctgcagaggagcccaccagccatcggggagggggctcggggggctacctggagcaygtgttccggcacgcggcccgagagctctttggaatccatgtggctgaggttacctacaaacccctgaggtcagtgggatgggccagatctctgggcagag

SEQ ID NO: 149898 - DNA, 201 bp, Homo sapiens
aggcccagcagagagctcctccagcacgtggagagactgtacggcatggtccgggctgaggcgcccgaggacgcgcctggggttcaggagctgtacacacrctggctgcagggcacggactcggagtgtgcaggtcgcttgctgcatacgcagtaccacgccgtggagaaggccagcactggcctgggcatccggtggtag

SEQ ID NO: 149899 - DNA, 201 bp, Homo sapiens
tgaacctgaggagtcgaggttgcagtgagctgagatcgtgccactgcactccagcctggacaacagagcaagacttcatttcaaaaaaaaaaaaaaaaaaaagagtcctggctgaggaggaagtcctttcagatggttggggggccttagaattttatttttggtttataatatcttgctcaatcttcctttctgggtctc

SEQ ID NO: 149900 - DNA, 201 bp, Homo sapiens
gtcaacatgccaggatgcctccagtctgggggaaaatgcttcctcatttgcttctcccagcccacctcaagcagtctccccaccccttgagtctcagcagygttaaagctgttactttcacagcttcctgggagcgagtgctttctcaagcccgtcttgcaaggtgggtccttttttgtttttggcagaagggagggacag

SEQ ID NO: 149901 - DNA, 201 bp, Homo sapiens
ccagctaatttttgtatttttagcagaggcaggcattcaccatgttggccaggctggtctcaaactcctgacctcatatgatccacccgcctcggcctccmaaagtgttgggactacaggcatgagccactgtgctcagccatgagcaacatttcaagaccttgtctctgcaaaaataaataaataaataataaaaacttt

SEQ ID NO: 149902 - DNA, 201 bp, Homo sapiens
tttgctcttgttgcccaggctagagtgcaatggcacaatctcggctcactgcaatctctgcctttctgattcaagtgattctcctacctcagcctcccacrtagctgggattacaggcaccagccaacacgtccagctaatttttgtatttttagcagaggcaggcattcaccatgttggccaggctggtctcaaactcct

SEQ ID NO: 149903 - DNA, 201 bp, Homo sapiens
taaattagtatctatctggtttttttccccctcagaatttcccattttgtctctacgaggctacatggtaccgatttgggggacatctataattcagcccwctctaatcagctgctgcttgaggtcacccatctggcaccttcgtggttcctgtgccaaacatagattctcccttctcaccaccctttggtggcgttttca

SEQ ID NO: 149904 - DNA, 201 bp, Homo sapiens
gccgggcgtggtggtgtgcgcctgtagtctcacctactcagggggctgaggcaggagaatcacttgaacccgggaggcagaggtttcagtcaaccgagatygcgccagtgtgtactgcagcctgggcaacagagcaagactctgtctcaaaaaaaaaaaaaacaaaaaaaaaaacgtagttgctatgtgcggcaagttgag

SEQ ID NO: 149905 - DNA, 201 bp, Homo sapiens
cagcttggggaggaaacgggcttcaggccagcagcagttggcaggcaaggagggtccagagtcaccaagccccgcacaggacacagaactggccccaagcrggatggagggagggagggtgtcactttgaaaggtctattctcctaatccctaggaaatgttagctttttcctaattataagccctgcttataaaattcta

SEQ ID NO: 149906 - DNA, 201 bp, Homo sapiens
ctggtctcaaattcctgacctcaagtgatctgcccagctcagtctcccaaagtgctgggattacaggcatgagccactgcacctggccttaatatacttaytttgttggaccaagatactttactatcacctacaaaaaacattttgaaaataaatatctaaattcttgatgggatggcactccctagggttgtgtgatac

SEQ ID NO: 149907 - DNA, 201 bp, Homo sapiens; identical to SEQ ID NO: 27818

SEQ ID NO: 149908 - DNA, 201 bp, Homo sapiens
gggggctcacacttgtaatccctgcatttttgggaggctgaggcaggcggatcacaaggtcaggagatcaagaccatcccagtcaacatggtgaagccccrtctctactaaaatacaaaaaattagctgagcctggtggcacgtgcctatagtcccagctactcaggaggctgaggcaggggaatcacttgaacctgggag

SEQ ID NO: 149909 - DNA, 201 bp, Homo sapiens
gaacctgaggagtcgaggttgcagtgagctgagatcgtgccactgcactccagcctggacaacagagcaagacttcatttcaaaaaaaaaaaaaaaaaaaagagtcctggctgaggaggaagtcctttcagatggttggggggccttagaattttatttttggtttataatatcttgctcaatcttcctttctgggtctca

SEQ ID NO: 149910 - DNA, 201 bp, Homo sapiens; identical to SEQ ID NO: 27820

SEQ ID NO: 149911 - DNA, 201 bp, Homo sapiens
gtctttacgggttgggagggggaaggagatgatacttgtctgagttgacagcggagcagtccccctagcgaggattcagtgttgtacctgagtgaggtggsgagaaagtaaggatgtgtgagcatgcagctctttgcccgtttgccttgggaaatgagtactggcttaccgcgtcctatgcgacagccttcgaaaaacaac

SEQ ID NO: 149912 - DNA, 201 bp, Homo sapiens
tgctgagttagcaaatttaaatccaaggcagaaaatgcaagcctaggagtttgttttaatagtattactaatatggtgataattcattgaggtgggaaaargctttaaacataacagaagacccagaagttccaaggaaaaatctgaaaaatttcagtacataaaaataaaaagcttttttatggcaaagcttaaaaaaga

SEQ ID NO: 149913 - DNA, 201 bp, Homo sapiens; identical to SEQ ID NO: 27822

SEQ ID NO: 149914 - DNA, 201 bp, Homo sapiens; identical to SEQ ID NO: 27826

SEQ ID NO: 149915 - DNA, 201 bp, Homo sapiens
ctaaagatgtaaacgtgatgttcagcccaagctgcttcagtaacccacctgctacctaattccagcctttcctacttgccactgctaacgtataccaccaycataatttgtgttaaaaactgggctctgtttgagaggattctgcatgttcatcccagaaacagtgtagtgactgctttgaatattcttacagcatgataa

SEQ ID NO: 149916 - DNA, 201 bp, Homo sapiens
gctaccttgaaaactctagtgaactctcttaatcactggagaattggactgagatctctgagttgtgatttcagtaaattctgttctcaaaattttttatraagcagcatttatatacagtcttgattacttgtgcaagtcacttccaaatcctaatgagaaactgtctctggacttttatattttcttagacctacagtt

SEQ ID NO: 149917 - DNA, 201 bp, Homo sapiens; identical to SEQ ID NO: 27821

SEQ ID NO: 149918 - DNA, 201 bp, Homo sapiens
agcgggcaggcgcgcagaggccatgggtcgagtatgtgtctttgggaactacagtttcatccctcaaagggtcgtctttacgggttgggagggggaaggakatgatacttgtctgagttgacagcggagcagtccccctagcgaggattcagtgttgtacctgagtgaggtggcgagaaagtaaggatgtgtgagcatgca

SEQ ID NO: 149919 - DNA, 201 bp, Homo sapiens; identical to SEQ ID NO: 27823

SEQ ID NO: 149920 - DNA, 201 bp, Homo sapiens; identical to SEQ ID NO: 27824

SEQ ID NO: 149921 - DNA, 201 bp, Homo sapiens; identical to SEQ ID NO: 27825

SEQ ID NO: 149922 - DNA, 201 bp, Homo sapiens
tcagggacagttaaaacattaataaagactgaagcatttgttcatttaaaaaattttatttaatatttacatttatttttaaaataaaaattagaggaaakcccatgaactcattttccatgaacataatataatagtactcacctatctcctctacccaacttgtgttttagatgagtccttttggatctttttccccat

SEQ ID NO: 149923 - DNA, 201 bp, Homo sapiens
tgactttacaaaacctttattaccctttaagccttagttgtcttgaggcttaatgttcataactgaaaatattcatatttcctaattaaaggaagaatatmataactcttagtggggaaacattcttacaaatacttcattcaaatgactttttctttctttcttttaggtgtatttgcatccagtattgttctgatcttg

SEQ ID NO: 149924 - DNA, 201 bp, Homo sapiens
aagtatcttatatttcatttcttcctttccatcttcacttacatcatcagagggagatgcatttatgcgtaaaataattttttaagtaattgtaacttggmaaattttgttgatgaggtaattctggtgatcggtcttaagtaggctagtgcttttgaagtgttgctgagggcagactgatggtgaggtctttaccaagcc

SEQ ID NO: 149925 - DNA, 201 bp, Homo sapiens
atcagggacagttaaaacattaataaagactgaagcatttgttcatttaaaaaattttatttaatatttacatttatttttaaaataaaaattagaggaawgcccatgaactcattttccatgaacataatataatagtactcacctatctcctctacccaacttgtgttttagatgagtccttttggatctttttcccca

SEQ ID NO: 149926 - DNA, 201 bp, Homo sapiens
cttgaacccaggaggcagaggttgctgtgagccaagatcacgccattgcactccagcctgggcaacaagggcgaaactcagtctcaaaaaaaaaaaaaaaatacaaaaaattagctgggtgtggtggtggcacttgcctgtagtcccagctactcaggagcctgaggcacgagaattgtttgaacccgggaggcagaggtt

SEQ ID NO: 149927 - DNA, 201 bp, Homo sapiens
accataggattctgtgaagcgagaggccaccttccaattccgttcccgaagtccttgaacctccaggtacccaggggcctctccacctccatggggccccragggtcacctccccgagtcctgggtccccatcccttacctctggacgcaccacgactcgaggtggcgtagcgcccgcttataaagccgcaacaccttttg

SEQ ID NO: 149928 - DNA, 201 bp, Homo sapiens
atcttctataagaaataaagagagcaggctggtcacggtggattgtgcctgtaatcccagcactttgggaggccaaggcaggtggatcgcctgaggtaagragttcgagaccagcctggccaacatggtgaaacccccctctctactaaaaatacaaaaatgagccgggcgtggtggcaggcacctgtagtcccagctact

SEQ ID NO: 149929 - DNA, 201 bp, Homo sapiens; identical to SEQ ID NO: 27835

SEQ ID NO: 149930 - DNA, 201 bp, Homo sapiens
ttcatgcttgctgagatattttgtaaccccccgtatccttacacaaacttacagaaggaccccctttctctccattattaaactaaaaggtctgtgttggyagggtgtgaaggtgatacagatcaaagcatcctgggaatattaattccgagtgttgggatttatgtcaataaggatatgatttgaaaagtctttgccact

SEQ ID NO: 149931 - DNA, 201 bp, Homo sapiens
atttgccatccttaagatgtacattaacactgtagcctgagctgtaactcttgttagccaaaagactcgtagtatgtctgggaaacgaatcctcttccatytgtcctccatcaataactgtaatccataaattcgatacatgtgcctcaccaaaagataaacatatcgtgtggaataataaaaccacttcagtttcactgc

SEQ ID NO: 149932 - DNA, 201 bp, Homo sapiens
cggcgctgaccttccccggccgcgcggagagccgggaaactgcacgcctgctgcgggtgactgagcggggccagccggaagggcggagttgccggcggccrcttccgcttccgctggggaggtcctccatgcgcagtcatgagtcgcttcaagtttatcggtaagaggagcgttttccacgcccttgggtctttctgactt

SEQ ID NO: 149933 - DNA, 201 bp, Homo sapiens
tatagtagccatcaatcatgaataacgtataaacagtgagagaaacaattacttttaagcacagttccacacaaaatgctgtaactgcaaacaaccatgtktttagtgcatagtgatgccaaagaacataactgagtaagacaggaagaataaacaggcaagcagagacaaacagcacaggaaaatgtctacgaaaagatg

SEQ ID NO: 149934 - DNA, 201 bp, Homo sapiens
taccaattcagacaattgggcatacttataacacattcacaaaaactaattggtactgtgtcttcatgaggggtaaaaaagaaaacaaaataggttgttgmttttaagactattcattgcatatgcaccatcttttttttcagtagtttttaacaggaaaagagtattagaagataagccagataagaacagtgaagaatt

SEQ ID NO: 149935 - DNA, 201 bp, Homo sapiens
aatttcttagcctaataatgagttctgaacaatattttgaaaaacatcatattaaatccctggaacaagcttcacatgggacaattgcatgaaaaattgamcccattttatgaaaattaccttagattttggtttaagacagctgaccattgtaattctttctacatttctctcttttctacttgcataacaagtggctgc

SEQ ID NO: 149936 - DNA, 201 bp, Homo sapiens
gcggcagaggttgcagtgagccgagatcgtgccactgcactccagcctgagcaacagagtaagacgccgtctcaaaaaagaaagaaaaaagaaaaaaaaaagaaaggaaagaaaaagaaaggaaaggaagggagggaagggaaggaagagagagacagagaaagaaagaaactgaaggatggacacctgggcttatttctc

SEQ ID NO: 149937 - DNA, 201 bp, Homo sapiens
ggccaatcactatgtttccattcatcccacgtgcacctcccggcccttcccctctgccttggcggagaggctgaccgcttctggggaccaattcactcaascattcattcgttcatatcatagttagtgagcgcctcaagtgggcctggcactggcctaggaacacagggcacaaagctcccagttgtactgtcatcacca

SEQ ID NO: 149938 - DNA, 201 bp, Homo sapiens
ggaaggtccaaatggacatccagtcctacccagcaccctgcaaagacaaacaaccttcatacataatctaacccattagaatccagacaaaatgattcagyggggtagacagtactactgtatggtggctctctccagctcttgccccaccgctatgtaaactttgcaatatctaccctcagtataacccaggtgaactcc

SEQ ID NO: 149939 - DNA, 201 bp, Homo sapiens
ctgggaggtggatgttgcagctcgccgggattttgccaacgcactccagcctgggcaacagagtgagactccatctcaaaaaaaaaaaaaaagaagaagaaagaaggaaatacagagggcagaggaacctgttaaactgcaacgcagatgaaatcagcaaaatcaagactagggcactccacagcgtgaacagcttggttt

SEQ ID NO: 149940 - DNA, 201 bp, Homo sapiens
catgtagactccattttggtgtatctaaaaatcaaatcagctaaatgtttcttttgcttcaaatctttcatttacgctcctcaggatagcctaaatgcttwcacaccatacaaagcccttctgtggtccagtcctgcccacttttctagcccatccctgggctgctctataaacacttgtgcatgctgtttgttacctctg

SEQ ID NO: 149941 - DNA, 201 bp, Homo sapiens
tgcaatccccagacaaaattacaggaaggtccaaatggacatccagtcctacccagcaccctgcaaagacaaacaaccttcatacataatctaacccattrgaatccagacaaaatgattcagtggggtagacagtactactgtatggtggctctctccagctcttgccccaccgctatgtaaactttgcaatatctaccc

SEQ ID NO: 149942 - DNA, 201 bp, Homo sapiens
cctgggaggtggatgttgcagctcgccgggattttgccaacgcactccagcctgggcaacagagtgagactccatctcaaaaaaaaaaaaaaagaagaagaaagaaggaaatacagagggcagaggaacctgttaaactgcaacgcagatgaaatcagcaaaatcaagactagggcactccacagcgtgaacagcttggtt

SEQ ID NO: 149943 - DNA, 201 bp, Homo sapiens
acactgtagcctgagctgtaactcttgttagccaaaagactcgtagtatgtctgggaaacgaatcctcttccatgtgtcctccatcaataactgtaatccrtaaattcgatacatgtgcctcaccaaaagataaacatatcgtgtggaataataaaaccacttcagtttcactgccaggacaaacactgtatttaatgtga

SEQ ID NO: 149944 - DNA, 201 bp, Homo sapiens
aataaaacctaacaaaaaatggaacagtacttacccttattgagtacaatgtacttgtcaatgtttaaaatgctcatcatgacccactaatgaacatgctrtgactcacaattgaaaaggactcttcatttccactcagttaatgctataattggtgaacataatacagatggctgctttaataatttacttgaacctggt

SEQ ID NO: 149945 - DNA, 201 bp, Homo sapiens
cagttcctccaaatcacacataacaccaccatgtctatctttccagatcttctgtaggcataccaaacaaaataagatcatactgaggctactcttttgtrctctgcttttttcaatcacagtctccacctttccatttcaggaaatgttcatcttaactagtaccaaaatcatactcaaatttttcctgttgttccaaaa

SEQ ID NO: 149946 - DNA, 201 bp, Homo sapiens
acctgggaggtggatgttgcagctcgccgggattttgccaacgcactccagcctgggcaacagagtgagactccatctcaaaaaaaaaaaaaaagaagaagaaagaaggaaatacagagggcagaggaacctgttaaactgcaacgcagatgaaatcagcaaaatcaagactagggcactccacagcgtgaacagcttggt

SEQ ID NO: 149947 - DNA, 201 bp, Homo sapiens
tactcaaatttttcctgttgttccaaaaatgtcccttggtggtcatgtccaaaatggtatcccatttagagccacacatttggttgttccttaaatttttraatcaagtgcagaggtttgcaaactttttccttaaagggccatatagtaaatattttagactttgagggccacgtgatctctattgcagctattcaactc

SEQ ID NO: 149948 - DNA, 201 bp, Homo sapiens
tttgtatttttagtagagaaggggtttcactgtgttagccaagatgggtcttgatctcctgacctcgtgatccgcctgcctcggcctcccaaagcgctggsattacaggcgtgagccaccgtgcccagccaacctcaggtgtttttgatgtggaattcatgtgtgtgttttaacgtgtttaagatacgagttgctttttat

SEQ ID NO: 149949 - DNA, 201 bp, Homo sapiens
tgggggctcctggatagcctcaggatgggggtttgcctaggaaaacccatcatgtgattagagagttggaagtttcagtccctcccacccactcccacttstggggaaggggagagaaactgaaggttgagttgttcactaatggccagtgatttaatcaatcatacctacatggtgaagcctctataaaaacccatacat

SEQ ID NO: 149950 - DNA, 201 bp, Homo sapiens
attccaccaaacttctatattgtatgtatagtattagatgatgtttatatgttaatagcccttttaaagggtaccacatcccacccatctttgttgacatgttagtgcccaaatatctttgtagttttctgcattttactttttcccctattgtttcaaatgcctggaatactctcttcactgtctcttaaattttctaaa

SEQ ID NO: 149951 - DNA, 201 bp, Homo sapiens
tttacttaaaggagttgctaaatcttgctgaaaacaataaagggaaagttgtggcaataggagaatgcggacttggtgagtgccagcctcgcctcttagartgacattgtttgaaaataagtaatttgttctgtataagttaggagtaattattcttctttatctttttaaagattttgaccgactgcagttttgtcccaa

SEQ ID NO: 149952 - DNA, 201 bp, Homo sapiens
acattactgatctatatagggtgacatgctactgaatgtatgaatccttcagttttctcccctaatgagaagtagcaattttccactttgccttgtttttsttcctatcattccctcccacccgtatctcttactttcttagcttttcaagctacttactatctttagctggatctggctagacattggttttcatacagt

SEQ ID NO: 149953 - DNA, 201 bp, Homo sapiens
tcggggttatatctaaagactagcaatatctaaaaaacaaattgtgccttatttgctgtccctttgtattcctagatcataggtgacagtgatgtgacacrattcagtgagcccaataactgaggcttcaacttaagagttgtggttttctcctggttacaaacagtgccgttttctactcttactttgttttgaaaacga

SEQ ID NO: 149954 - DNA, 201 bp, Homo sapiens
cagtcctacgattcataaatgtcttccagccatttttggcttgtaagtagatgttaaaatatgcatgtaggcacatcataaaagcccgaattttacttccygactcaaacatcatagtgtaagccccatttccaaacattacaactccaaatataaattcaataatactgcctgttgaacgaacgtagtagacataatcgt

SEQ ID NO: 149955 - DNA, 201 bp, Homo sapiens
cctgctaaggaaagaggaaatagcaccaagcacttgcattcccatgcggcctgacgttgacagttttatgcgtattctctaagttcaacctctgcctcatytatactactagtaatatgtatgcatcctgcattgctgtaatgttaatattactgtgcacttttttcctgtttgtactaactctgtaattttttcctgttt

SEQ ID NO: 149956 - DNA, 201 bp, Homo sapiens
gaggtccaaaaacttacagggatctatatttttgcctacaaagtcttattaatgtcacttagaattttaaagagtaattattataataataaacttatacstgtatgtccccaggtgcattcatttgatggtaccaaggaagcagcagctgctttgattgacttggatctttatataggatttaatggttggtacgttctt

SEQ ID NO: 149957 - DNA, 201 bp, Homo sapiens
gatgtggtgaatttgaaaagaataaccctgatctttacttaaaggagttgctaaatcttgctgaaaacaataaagggaaagttgtggcaataggagaatgyggacttggtgagtgccagcctcgcctcttagagtgacattgtttgaaaataagtaatttgttctgtataagttaggagtaattattcttctttatctttt

SEQ ID NO: 149958 - DNA, 201 bp, Homo sapiens
atcaacttgactgaccctatgttcagaggaatttataggggggttcaaaagcatcaaggtaaatatttcctttattaaggcgaatagtttcctatgaagayaaattttctgcctcaggagatcttgaaaagcataattcaagctgagtcttgtggctcacacctgtaatctcagcactttgggagtctgaggcaggaggat

SEQ ID NO: 149959 - DNA, 201 bp, Homo sapiens
gagttcaatctgcctgcctcagcctcccaaagtgctgtgattacaggcatgagccactgggcccagcccaatagatttcttataagcgatttcaataaaakgaatttgctatgcaatataatcttagcaaagctgctgtgaccttcaaaactgtgtcatcagcagcattaatcaagagttccaattctgagaagtgcatac

SEQ ID NO: 149960 - DNA, 201 bp, Homo sapiens
cacaatctcagctcactgcaacctccacctcccaggttcaagcaattctcctgcctcagcctcccgagtagctgggactacaggcgtccaccaccatgccyggctaattttttttgttttactagaaatagggtttcaccatattgcccacactggtctcgaactcttgagttcaatctgcctgcctcagcctcccaaagt

SEQ ID NO: 149961 - DNA, 201 bp, Homo sapiens
catcagcctcccaaagtgctaggattacaggcatgagccaccttgcccagccatgatttttagtctcttcgatcatggactcctttggaaacctgccttagaaaaatgctcagatatacatatattcatatgcaatttcaggagagtgactcagtgagtgactgtgtctagcaaaagaactgtaatccaggtagattaaat

SEQ ID NO: 149962 - DNA, 201 bp, Homo sapiens
aaaagctatttgttcaaattttgtcataaaaatgtgaaaacattttattctatgtacaataatgtacacaaatttaaacaggtcaccaaagagaccagaartaattaaagaggtatatttacagtagcacatcacagtaaacggaaaaccattcacagattcaacattgatactgtttttgtgcttggttacacactgaag

SEQ ID NO: 149963 - DNA, 201 bp, Homo sapiens
ccccggccgcgcggagagccgggaaactgcacgcctgctgcgggtgactgagcggggccagccggaagggcggagttgccggcggccacttccgcttccgytggggaggtcctccatgcgcagtcatgagtcgcttcaagtttatcggtaagaggagcgttttccacgcccttgggtctttctgacttgtcccgggcgtcg

SEQ ID NO: 149964 - DNA, 201 bp, Homo sapiens
accgctatgtaaactttgcaatatctaccctcagtataacccaggtgaactcctgaagctccctccaggacaatttcctctcccctagggtcccttaaccwtgtgacaacttgatttcatttagttaccaccatcccacagattaaattttgttcttctaatggttgacgatgtattctcattgaggtaggtctttcacct

SEQ ID NO: 149965 - DNA, 201 bp, Homo sapiens
tcctgcctcagcctcccaaagtgctgggattataggcgtgagccatcgcgccctgccacacatttctttttttaatgtcactgacttaccaaagcagctgkgctggttgtgcctgtgaaataaaaataaaattctaagccccctaaactggctgaacagaacccccctcgaccaagtagaccccagaaaaacatgaaaaac

SEQ ID NO: 149966 - DNA, 201 bp, Homo sapiens; identical to SEQ ID NO: 27837

SEQ ID NO: 149967 - DNA, 201 bp, Homo sapiens
caggtagagatatctgggcaattgggaatgtggtctggcaatcaagagattaggattatacatttagatctgagagttatttaagcagtatttttttttttcaaagacgttgtgctaagtcctgtggaactgtaaaatctagtggtgcagttttcagactggagacctaagacctatgtactgtacagtcaaaagcaaatg

SEQ ID NO: 149968 - DNA, 201 bp, Homo sapiens
aagacagtccataaatctgtttccagttactggcagtaagtttttctattgatattgctgaaaaacttaataactgttaagctttattatattaaaggtgygccaatattttcctttgtgtggaaaaatattatatagctttagaactaaatgtatacttggagatttaaccatttttgtttttgttttgttttagtcaaa

SEQ ID NO: 149969 - DNA, 201 bp, Homo sapiens
ttctctgtccactttcagctatatgttgtgatttggggtaacatatgtctcctagtttcatttaaaaaaatcctggttttctccttgtaagtttggttttktttttttttttttaagagaagggggtagaagatctttattttaccaacttaaaaccataattcttagttgttgttttttttttttgagacagggtctcac

SEQ ID NO: 149970 - DNA, 201 bp, Homo sapiens
tctggagtagtgtaacgtatccaattccaaatgttagctgtagaacgataagtgccatccacagcgagggaccttttcgaggaagcagctcaattccaaargctgacgtgttgtaggcaccatagaagtcaatgtgcaaagaagcataataattcaccaacactgaagttgcagctaacagaaaggctgagctgtacgtgt

SEQ ID NO: 149971 - DNA, 201 bp, Homo sapiens
caaatataaattcaataatactgcctgttgaacgaacgtagtagacataatcgtcaagcttttcccagaggacattatagtagccatcaatcatgaataaygtataaacagtgagagaaacaattacttttaagcacagttccacacaaaatgctgtaactgcaaacaaccatgtatttagtgcatagtgatgccaaagaa

SEQ ID NO: 149972 - DNA, 201 bp, Homo sapiens
gaattttgtttttctagagagcactaattgctacttaatgtcaaactaatgacatctcacccacccctcctaaaatcctactaaaataaaattatagataytgaaaaaggaaagaatctgtaatagcaaagaaaaagggccagagttttgctaagaaatgttctgtagttgggtgagctcaggagttcaagtgatggtcct

SEQ ID NO: 149973 - DNA, 201 bp, Homo sapiens
agcactaattgctacttaatgtcaaactaatgacatctcacccacccctcctaaaatcctactaaaataaaattatagatactgaaaaaggaaagaatctrtaatagcaaagaaaaagggccagagttttgctaagaaatgttctgtagttgggtgagctcaggagttcaagtgatggtcctgccacagcatcctcagtag

SEQ ID NO: 149974 - DNA, 201 bp, Homo sapiens
attaaatcagttgcaaaatagtataggagtttctgtccttcttcattgtctcatacccttaaaattattatgtttccaattgcattatttttgactaaaayctagggaaatagaatcatggaattatgtatttgctctagagttcagagtttaaatgtctaagatgctttcatatttaaattaatggtttaattaacttta

SEQ ID NO: 149975 - DNA, 201 bp, Homo sapiens
gagagttataccaaggtgacatttcagttgtttacccatgactgggagttaggccagagaaagacaaacaaacaccttaagcaaaggcagactgcagaagrgcctggctaatccagaggaacaagtgtggcagaaagtaggatgcacagtgtaagcagaagtcaagtctgggaaggtagagtgagcccagattgtgagggc

SEQ ID NO: 149976 - DNA, 201 bp, Homo sapiens
agtgagcccagattgtgagggctcttatatgccagcattttgcttagattttatcactacccaaaggattttaagcaggagagtggcaattattttttttwaagctataacttgtatcagtatggggaagggctggaaaggagatagggtaggaatcatgtagatcttgcaagactttaaaaacctttgcctggctgggca

SEQ ID NO: 149977 - DNA, 201 bp, Homo sapiens
ctgtgtaatgcaggcttctttattgttgagaaatatgttatccatagtgtattcaggctctctggactcagtagtaatgtgatgtcacttgtttaggtgamcctactttttaaaggagggctgttgttatatgttgtttttgattatataaatacatccaaactatgaaaactatgtcttgacccctatatctttgaagga

SEQ ID NO: 149978 - DNA, 201 bp, Homo sapiens
ggaggttaatccaggaaaacaaaaagtagtacaagaaaagaaatgttaagcacagtataccacatgagcaaacctatgtagataatctaatagttcgttccgtcagttgcagacccttccatgtgtttcaatttggactagttcctatttttagatcccatgtattccttgcgtgtttgttttagtggaacacattctata

SEQ ID NO: 149979 - DNA, 201 bp, Homo sapiens
agggaggttaatccaggaaaacaaaaagtagtacaagaaaagaaatgttaagcacagtataccacatgagcaaacctatgtagataatctaatagttcgttccgtcagttgcagacccttccatgtgtttcaatttggactagttcctatttttagatcccatgtattccttgcgtgtttgttttagtggaacacattcta

SEQ ID NO: 149980 - DNA, 201 bp, Homo sapiens
gagggaggttaatccaggaaaacaaaaagtagtacaagaaaagaaatgttaagcacagtataccacatgagcaaacctatgtagataatctaatagttcgttccgtcagttgcagacccttccatgtgtttcaatttggactagttcctatttttagatcccatgtattccttgcgtgtttgttttagtggaacacattct

SEQ ID NO: 149981 - DNA, 201 bp, Homo sapiens
gcagtaagtttttctattgatattgctgaaaaacttaataactgttaagctttattatattaaaggtgtgccaatattttcctttgtgtggaaaaatattrtatagctttagaactaaatgtatacttggagatttaaccatttttgtttttgttttgttttagtcaaatattggagataatgtcagcagtgagagatgag

SEQ ID NO: 149982 - DNA, 201 bp, Homo sapiens
tgagggaggttaatccaggaaaacaaaaagtagtacaagaaaagaaatgttaagcacagtataccacatgagcaaacctatgtagataatctaatagttcgttccgtcagttgcagacccttccatgtgtttcaatttggactagttcctatttttagatcccatgtattccttgcgtgtttgttttagtggaacacattc

SEQ ID NO: 149983 - DNA, 201 bp, Homo sapiens
gtaatgccagctactcaggaggctgaggcaggagaatcgcttgaacctgggaggcggaggttgcagtgagcagagaccacaccattgcactctagcctggragacaaaagtgaaaatacatctcaaaaaaaaaaaaaaaagaactgtgaaggcttcatcaatacttgttcttcagttagttgcagagcttaggaaaatcta

SEQ ID NO: 149984 - DNA, 201 bp, Homo sapiens
taatgccagctactcaggaggctgaggcaggagaatcgcttgaacctgggaggcggaggttgcagtgagcagagaccacaccattgcactctagcctgggmgacaaaagtgaaaatacatctcaaaaaaaaaaaaaaaagaactgtgaaggcttcatcaatacttgttcttcagttagttgcagagcttaggaaaatctag

SEQ ID NO: 149985 - DNA, 201 bp, Homo sapiens
aaaaaaaagaactgtgaaggcttcatcaatacttgttcttcagttagttgcagagcttaggaaaatctagcatctgcaagctgaaaagatttaaaccacayttaaaaaatacacaatcctctaatctactgctaattatgagttggcaagttaattgctacttgcaaagtcattttctcaacctccattctgttaacagtt

SEQ ID NO: 149986 - DNA, 201 bp, Homo sapiens
tggcacaatctcagctcactgcaacctccgtcacctgggttcaagcaattctcctgcctcagcctcccaagtacctgggactacaggtgcacaccaccacrtccagctaatttttgtatttttagtagagacggggtttcaccatgttggccaggatggtctcgatctcttgacctcatgatcctccccccatcagcctcc

SEQ ID NO: 149987 - DNA, 201 bp, Homo sapiens
atgtttttgcctaagaatatatctattcctaaaccccttcctggagcttctgcactaatgctagtgcagagacagcaacactgccactctaaagagagaarttctcggcagctaacgttttgcatcatgtcactggagatgatgacaggttgtaattgtgaaaaataatatgaaaataaaaattatagcgactaccacctt

SEQ ID NO: 149988 - DNA, 201 bp, Homo sapiens
atgttaagtctccaccccaaagtgaacatggggtttgtgtaacatgtatgtttgcttatcatacacgcatgaatccacctttcatgaatatacatagctcytcctataacctgttaaatatgtacgttagccagcccatttagtgtaaaactcctgttccccacttcttcctttgaaatggttgcttttgttctcagccaa

SEQ ID NO: 149989 - DNA, 201 bp, Homo sapiens
ctcttccactggataacagtcactcatcctttaagattcagttcaatgatgacttctttctggaagcctcttctgagccagccaccagactaggttgggtrttcctcttctgtgtcccatagtaccagtgtttacttctaatatttcataattgtctgataatggatctgccttaccagttctgcggtgagtttcttgaaa

SEQ ID NO: 149990 - DNA, 201 bp, Homo sapiens
attcatagtctccatcatactttctttcttaacatttaaattacttataataggactgcaagaagtcccctgttaaaaccagaattatgatggctcagtgygtagaacttacaggcaagttaattttgtagccattccttttggctcttatatctcttataccttacgggttagtgagggcctgccatctctctattcctg

SEQ ID NO: 149991 - DNA, 201 bp, Homo sapiens
agttttgtcccaaagatactcaactcaagtaaggaaatttgttggctttacaaattattgtaaaatcatgagtgatttttaaaatatcttgtatcaggtgrgagtatagttggattaagcatgaggatatttttgtttttccctttgtatatcaaaagtaagtgaaacaaattccatgcatacttgcatgtaattcataag

SEQ ID NO: 149992 - DNA, 201 bp, Homo sapiens
tgattaaaagtacgatgtttgcaaaatgtgtaattctttattaaaaaatattcaaaaccagtttcacattcagtagagatagaaatttgtttaacttatgsaaacctcactacatgcatagcgaaaaagattttgaaaactgaaaaaaaaactgtttaacttaaatgttttcatgttgttatacaattgtatttaaggttt

SEQ ID NO: 149993 - DNA, 201 bp, Homo sapiens
tgcgggtgactgagcggggccagccggaagggcggagttgccggcggccacttccgcttccgctggggaggtcctccatgcgcagtcatgagtcgcttcargtttatcggtaagaggagcgttttccacgcccttgggtctttctgacttgtcccgggcgtcggtcaccaaggtcacaggacccaggaattgcgccctccg

SEQ ID NO: 149994 - DNA, 201 bp, Homo sapiens
gcagaacccggccaaagcccactctctaggttggcccctaaagccctcttggcttgagtagggttcggggatctccgttcccagctcccaacactggacastgccacctgtgcctgcctccctcggagccctgggaccagaccctgggagtggtcaacttccccagaaaggccagccgcaagccccccagggaggagagct

SEQ ID NO: 149995 - DNA, 201 bp, Homo sapiens
ctggatactgggcgtggagggcagtggcatgagtaacaagagagaatggagggaatcggcagctgaggcctgacccctgcctggctgccctccctctcagrtctgctggcaggactgtgggagttcccgtccgtgacctgggagccctcagagcagcttcagcgcaaggccctgctgcaggaactacagcgttgggctggg

SEQ ID NO: 149996 - DNA, 201 bp, Homo sapiens
catgaaactcagcagcatatttggtgtcataaatgcctgctgggaacatctcacacaggtcagcggtgaaggttcccagactctcagggaggtgtgcataraagttctggtacaggaacaccaagtctataaggccattgtgtagcaccaggggccggcgggctcggattagctccaggaatagggtccgtactgactggc

SEQ ID NO: 149997 - DNA, 201 bp, Homo sapiens
tcaccgtcggaagctgcgggagctgaaactgcgccatcgtcactgtcggcggccatgacaccgctcgtctcccgcctgagtcgtctgtgggtacgctggayttgcggtccgtctcctggcgcggttcaggcagtcggggatggggcggggtctcgccgtcgggtcgccgatgggtcgaacttccgttcagacgtcccgggt

SEQ ID NO: 149998 - DNA, 201 bp, Homo sapiens
ctatcacccttggaaggcctcaaaatttggcctcattgtgactgactgctttggctgggtctttttgtttcaggccatcatgaggaagccacgagcagccrtgggaagtggtcacaggaagcaggcagccagccaggaagggaggcagaagcatgctaagaacaacagtcaggccaagccttctgcctgtgatggtaagga

SEQ ID NO: 149999 - DNA, 201 bp, Homo sapiens
ttagtgctcgccaggacctcatggggggcaagatcaagttttttgacctgcccagcaagtctgtcatctctctggtatttgacctggatgcaccagggccyggaactatgcccctggctgactggcaggagcccctggccccacctattcgccggtggcgttccttgcctggttcgcctgagttcttgcatcaagaggctt

SEQ ID NO: 150000 - DNA, 201 bp, Homo sapiens
tgtaacgttcctcaatgcaccttggggttgggtatgggggttgctgtggctaggagttagccttatgaaggacccaaaccacccaggtctgtgaccccccyactccacagttgagggctggcactaaagagaaaagggcttatacttactggttcagcaaactcttcctgtccccaagcccactcagctcctgtgggtagg

SEQ ID NO: 150001 - DNA, 201 bp, Homo sapiens
gcaggaacttttgatgttttatttactgaagtatgccaagtgcctaaaactgcttggcacatattagggggctctataaatatttgctcaatctttttttytctttaagagacaaggtcttgctgagcccagggtggagtgcagtggcacaatcatagctcactgcagcctcgaccttctgggctcaagctgttcttcact

SEQ ID NO: 150002 - DNA, 201 bp, Homo sapiens
ctttctgcctgcctgtggctatagaagtggcctacactgcaggacctggccagtgcttccctggaggtgagagccaccctagggtaggggaaataggaacratagagggactgacgggtgatctctttgacctctgatcctacccacaggaggtgaatcaactctgggctggcctgggctactattctcgtggccggcggc

SEQ ID NO: 150003 - DNA, 201 bp, Homo sapiens
caggcagccggaagaggtggtattgcaggcctctgtctcctcataccatctattcagagacgtagctgaagtcacagccttccgagggagcctgctaagcyggtacgaccaagagaaacgggacctaccatggagaagacgggtaggcaggcgaggagcagggacagtgggtgggaggcaggcacccagccccctccaccc

SEQ ID NO: 150004 - DNA, 201 bp, Homo sapiens
atggtggatgagagggagatagctatcacccttggaaggcctcaaaatttggcctcattgtgactgactgctttggctgggtctttttgtttcaggccatyatgaggaagccacgagcagccgtgggaagtggtcacaggaagcaggcagccagccaggaagggaggcagaagcatgctaagaacaacagtcaggccaagc

SEQ ID NO: 150005 - DNA, 201 bp, Homo sapiens
agcccaggaggtcgaggctgcagtgagccatgttcttattgcactccagcctgagtggcagagcagcaaagtgagggacacactgtctctaaaaacaaaamaaaacaaaacaaaaaaacaaaaataaaaaaactctttggatttctcctatcctaaaaaagggaaactcttttgactatcccccatcccattaattcattt

SEQ ID NO: 150006 - DNA, 201 bp, Homo sapiens
ggccccagcaggcctggccaggcagccggaagaggtggtattgcaggcctctgtctcctcataccatctattcagagacgtagctgaagtcacagccttcygagggagcctgctaagctggtacgaccaagagaaacgggacctaccatggagaagacgggtaggcaggcgaggagcagggacagtgggtgggaggcaggc

SEQ ID NO: 150007 - DNA, 201 bp, Homo sapiens
gtcgaggctgcagtgagccatgttcttattgcactccagcctgagtggcagagcagcaaagtgagggacacactgtctctaaaaacaaaacaaaacaaaamaaaaaaacaaaaataaaaaaactctttggatttctcctatcctaaaaaagggaaactcttttgactatcccccatcccattaattcatttaacaggtatc

SEQ ID NO: 150008 - DNA, 201 bp, Homo sapiens; identical to SEQ ID NO: 27860

SEQ ID NO: 150009 - DNA, 201 bp, Homo sapiens
taatgtgtaatgttttgactcaagattgtaaagtcaaattattcatccggggagaggatggtcgtgtaactgaatcagcctcccaagatgaactttccctytggcgtaagtttaggagtcctgatattttattttcctttacaacagaaagcagcaaccctgtaattaaagagaacaatgaaggaagctatctaagccatg

SEQ ID NO: 150010 - DNA, 201 bp, Homo sapiens; identical to SEQ ID NO: 27856

SEQ ID NO: 150011 - DNA, 201 bp, Homo sapiens
aggattatggggtcttaaaggctgatgaaggcatctcgttcaggtatgtcatcaggacaagtatccagttggctgaaagccttttatttggagagatctaragccctgatctgtagagactccttgtcatttcattcctttatgcaggggcctcctcactaaggccaggccagtaggagtgtggagaccagtccatttcct

SEQ ID NO: 150012 - DNA, 201 bp, Homo sapiens
cacatgtttcagggagcacagggttggggataaggttacagattaacagcatctcaaggcagaagaatttttcttagtacagaacaaaatggagtctcctmtgtctacttctttctacacagagacagtaacaatctgatctctcttttccccacagtggtagaatgggaaagatagtaggaacagaagctaccaaataag

SEQ ID NO: 150013 - DNA, 201 bp, Homo sapiens
tccacccctgaggcggttttcccctgtctcagtagatggaacatacaattgggttttacactgagacattccattgcccagggactggctggagacagatrccttcctcttgtctcaactgcaaagaggcgttccttcctcttttactaatcctccttagcacagggtgtcaggctgggggaccccggtcaggtctttccc

SEQ ID NO: 150014 - DNA, 201 bp, Homo sapiens
acactttgttcttggggcttctcccagcaaacaaggtaagttgcaccatagggaggtgacctgggcccaggggtataagcaggaggtctaggaggagctgytctctgccctccagagcttgacctgctgaggccccaaagtgcttgttaggcaaagctggaagggttgtttagatgagttagtttccagtgatactgcaaa

SEQ ID NO: 150015 - DNA, 201 bp, Homo sapiens
aagttgcagcatgccttagtttttggtttttgttttttgtcgttaaaggtgttaaggactttttaaaaaacagttaaaagtttgctaagatccatgcttamaaaatttcttttgcttgtggtattgtgaactaagaactttgggacttggaaaagctttcagaccgcggcttagtgggttaaatctctgttttttgagcta

SEQ ID NO: 150016 - DNA, 201 bp, Homo sapiens
cccatgggtcagcctccacatcttgtcgttggtagtagtaagcagccccagctacatgggctgctgtctgggccaggatcttggggcgtcggttggggtgyacctcgtagtcagcaatgatttctatctgcagctctgggaggctctggaacagtggacaaaatagagggtactgtcagcatgaggggagttatgaccttg

SEQ ID NO: 150017 - DNA, 201 bp, Homo sapiens
tttgaactgacagaggaaagaggaagacaaggctggtggccttgggtagggctttcagtagttgcacagtactgggcaattcttagccttcccttggttcyagccttgattagagatagtcttttttagtgtcattatgttgcccagagtggttctgaattccttgcctcaggtggtcctccgcctcagcctcccaaaatg

SEQ ID NO: 150018 - DNA, 201 bp, Homo sapiens
tgcaattgacacgtccttgttttatgggaggctacatactttaaaggtttccaggggagcaaataattaattatgattttgtgtatgtgtgtttgtggggsgtagtcatcaggaaatgtctgaggccttttgccttaccgtgtgggtctggctaatgtgtaatgttttgactcaagattgtaaagtcaaattattcatccg

SEQ ID NO: 150019 - DNA, 201 bp, Homo sapiens
cgcccggcctctgttgtcatagtttcatgcagacacttggcaagttctgttgaggctcctcctttctttaccttgtagttccagagcagctcgatctcctrggacagttgaggatatagattccttagaatgctaacctgaaactcaggtgtcaagtgtccttttctcagtggtgtagcattagtccctggagttagtttt

SEQ ID NO: 150020 - DNA, 201 bp, Homo sapiens
tgcctggctaatttttttttgtatttttagtagagacggggtttctccatggtggtcaggctggtctcgaactcctgacctcagatgatccgcccacctcrgcgtcccaaaatgctgggattacaggcatgagccaccacgcctggcttaatttttgtactttttgtagagctgggcgccatgttgcccaggctggtctcc

SEQ ID NO: 150021 - DNA, 201 bp, Homo sapiens
tcttggcagttagtggttattgtgtcagccatcaacttgcttctttttgtataggaaaatataaagcaaggaagtctgtgtcgaatgctaaccatgactcygattttccccccaggaaaatatgttgtgttcttcttttaccctcttgacttcacctttgtgtgccccacggagatcattgctttcagtgatagggcagaa

SEQ ID NO: 150022 - DNA, 201 bp, Homo sapiens
caggtggtcctcctacctcagcctcccaagtagctgggactgtaggggcatgctgccatgcctggctaatttttgtactttttttttttttttttttttttgagatggagttttgctcttgttgcccaggctggagtgcaatggcgtgatctcggctcaccacaacctccactgcccaggttcaagcaattctcctgcctc

SEQ ID NO: 150023 - DNA, 201 bp, Homo sapiens
agtgattacagggtatatatcctaggaccaaaccacttctggagaaaccacatgcttcattatgtctggacatactagctcaattatcttttcagtattcytcgtctattttctttctttatttttatttttgagacagggtctcattctgtcacccaggctggagtgcagtggcgcagtcatggctcactgcagcctcta

SEQ ID NO: 150024 - DNA, 201 bp, Homo sapiens
gaaaacaaaggctgagattcagagacttgtttcgttccaaaagttggaaagctcagactgtgacccttgactgctggctggagcttcttactaaaacaacatttaatgtattcagggacactggacaatgccttgattgtttacagctaagtctctttaagtaggtgaaggctgctggttatgtagaaaattaaggcttgt

SEQ ID NO: 150025 - DNA, 201 bp, Homo sapiens
tcctgcctcagcctcctgagtagctgggactacaggtgcctgccaccatacctggctaattttttgtattttcagtagagacggtgtttcaccgtgttagycaggatgttcttgatctcctgacctcgtgatctgcccacctcagcctcccaaagtgctgggattacaggtgtgagccactgcacctggctggcatgtgaa

SEQ ID NO: 150026 - DNA, 201 bp, Homo sapiens
tgaaaacaaaggctgagattcagagacttgtttcgttccaaaagttggaaagctcagactgtgacccttgactgctggctggagcttcttactaaaacaacatttaatgtattcagggacactggacaatgccttgattgtttacagctaagtctctttaagtaggtgaaggctgctggttatgtagaaaattaaggcttg

SEQ ID NO: 150027 - DNA, 201 bp, Homo sapiens
agacatctgtattgagcatcttggcagttagtggttattgtgtcagccatcaacttgcttctttttgtataggaaaatataaagcaaggaagtctgtgtcraatgctaaccatgactccgattttccccccaggaaaatatgttgtgttcttcttttaccctcttgacttcacctttgtgtgccccacggagatcattgct

SEQ ID NO: 150028 - DNA, 201 bp, Homo sapiens
atgaaaacaaaggctgagattcagagacttgtttcgttccaaaagttggaaagctcagactgtgacccttgactgctggctggagcttcttactaaaacaacatttaatgtattcagggacactggacaatgccttgattgtttacagctaagtctctttaagtaggtgaaggctgctggttatgtagaaaattaaggctt

SEQ ID NO: 150029 - DNA, 201 bp, Homo sapiens
ggctggagtgcagtggctcgatctcggctcactgcagcctccgcctcccgggttcacgccattctcctgcctcagcctcccgagtagctgggactgcaggygcgtgccaccacccccggctaattttttgtatttttgttagagacggggtttcactatgatggccaggctggtctcgaacttctgacctcaggtgatctg

SEQ ID NO: 150030 - DNA, 201 bp, Homo sapiens
gtgggttaaatctctgttttttgagctagagtctcgctctgtcggccaggctggagtgcagtggcgcggtctcggcttactgcaacccctgtctcccgaaytcaagcaattcttctgcctcagccttaggagtagctgggattacaggcttgtgccaccaagccccggctaatttttgtattttttttttttttttttttt

SEQ ID NO: 150031 - DNA, 201 bp, Homo sapiens
gggagggacagggggcacctgaagtggggtttagggatgtggccctctacgctgggcagatcccctgaaggggcccggtggcggcctgaatcccagcagcstttaccccgaattggttgggttttgtacttgggggccacttgggaaagaaggattggacgagaaggccatttgggggcaccaagttgcagcatgccttag

SEQ ID NO: 150032 - DNA, 201 bp, Homo sapiens
aaacaagttgaattagttataggttgtgtgctgtcttggacaaagctacctggagaaaagtcaaatatgcttctgatgttatgaaggcaggtggaggcacrgtgatgggaaaggtcaacgtgacttttggggagccaaacaaaagtgtttgtggcattgtgcatttggattctggtttgagagtcttcatctgcctctctc

SEQ ID NO: 150033 - DNA, 201 bp, Homo sapiens
gagggagactccatctcaaaaaaaaaaaaaaaaaaaaaaaaaaagaaaaataagagattagtccccttgcctcattttcttcaggctagcctgaggcacaytcttaggcattgtcaggaaaaggttgaaggctgtgctttctgtataaatctatgaaaaatttcaaactctgccttttgcttaccaaggggtagatggcag

SEQ ID NO: 150034 - DNA, 201 bp, Homo sapiens
gggcaattcttagccttcccttggttctagccttgattagagatagtcttttttagtgtcattatgttgcccagagtggttctgaattccttgcctcaggyggtcctccgcctcagcctcccaaaatggtgggattacaggtgagcgccacagtgcctggccaaagctcgttttgatcctcattcatatgtcattgtcctc

SEQ ID NO: 150035 - DNA, 201 bp, Homo sapiens
gggaagctttggcaatagactttcaagtattgccttctcattgaagggagtgcaaagtctgactttctcttattgctctcatgacctggcagcagagaagmagcagcttcaattgcagttgagtgtaccctagtgacctaccttaactgttctcagcattcactttattgctggaaaacggaaaaaaaacagtctttttgg

SEQ ID NO: 150036 - DNA, 201 bp, Homo sapiens; identical to SEQ ID NO: 27850

SEQ ID NO: 150037 - DNA, 201 bp, Homo sapiens
agccatgagggttactgaggatctgcgctggggttaaggctgcgaacttaagaaatatttggatagacagttctcatggcttggtgtggttagacgtggtyctccgtgggcagcagctaagacgcttactccagtttgggcattgagggcacagtgcgtagtggtcctggaagtaaagagaatcctggttttccgcagaga

SEQ ID NO: 150038 - DNA, 201 bp, Homo sapiens; identical to SEQ ID NO: 27851

SEQ ID NO: 150039 - DNA, 201 bp, Homo sapiens; identical to SEQ ID NO: 27852

SEQ ID NO: 150040 - DNA, 201 bp, Homo sapiens
gcagtgagacggaggtggagattgcgccaccgtactccagcctgggcaacagagggagactccatctcaaaaaaaaaaaaaaaaaaaaaaaaaaagaaaawtaagagattagtccccttgcctcattttcttcaggctagcctgaggcacattcttaggcattgtcaggaaaaggttgaaggctgtgctttctgtataaat

SEQ ID NO: 150041 - DNA, 201 bp, Homo sapiens
taccattccagccacttgtcttcctcagctactcccacctgcccacccctctagaaccgactacacccatgagcagcagtacagaattcccagggcctttsgtaatggccaacatactgcttactatatatgccaggtatttttccaaagtgccttacacgtgtttattcagtccctacctgaggtaggtacttttttttt

SEQ ID NO: 150042 - DNA, 201 bp, Homo sapiens; identical to SEQ ID NO: 27892

SEQ ID NO: 150043 - DNA, 201 bp, Homo sapiens
ttctcatgtctcagcctcccgagtagctgggattacgcccagctaattttttagtatttttagtagagacagtttcaccgtgttagccaggatggtctcgmtctcctgacctcatgatccacccacctcagtctcccaaagtgctgggattacaggtgtgaaccactgatcctggccaatttttattttttggggacaggg

SEQ ID NO: 150044 - DNA, 201 bp, Homo sapiens
aaacaggatatctagaaacagaagaggcgaccattggtggcctctagtgaaatcactctgaaaccctgtaaccaacaaaagtttttttgacctagaacttmtaatttcctcctcttctaggatatggccaatattagcatggggcttttgcttctctccttatatgttcataacaatcaactcctgtcctgtattttattc

SEQ ID NO: 150045 - DNA, 201 bp, Homo sapiens
gtctcagaaataaataaataaataaataaatggcaagtgaaaagtgggagtgatttcaaatttttgtttaatatatgtgatctttcttaaatagcatgatrggggaaggggcaaagactttagagtcaaagagatataggttcaaaccctgactctgccatttactgtttctctaggcccagagatgttgttgcctttagt

SEQ ID NO: 150046 - DNA, 201 bp, Homo sapiens
cttggcttctcaaagtgttggcattacaggcatgagccgccatgcctggcctggttatttttattgcaaaatagtatttttcttttaaattactttatgcrtgttatatttgaatgcatttaaatacagtatgctgtttctgaatcataatatgcctttaaaatatctgtacctaaattaataatacccatactactacac

SEQ ID NO: 150047 - DNA, 201 bp, Homo sapiens
ttttagtagagacggggtttcactatgttggccaggctggtctcgaactcctgacctcgtgatccacccaccttggcctcccaaagtgctgggattacagktgtgagccactgtgcccggcctggaatatctattgttagtgaagtcagcggtatgttgtttttttcctttgtgaatctctttattttgactcaatatttt

SEQ ID NO: 150048 - DNA, 201 bp, Homo sapiens
tcccggcggccaccgcgccgcccgcgtggcagtggccgagggccgccggcgcgcggcgtgccgggacttgtagtccgcgcccgcccgccttgggggccacmgcttgaggtcgctttgttcctgcgccccttcttttcttacattttggggaccagattcgtctctagagtgggctgggagagggatcccggaggccaacct

SEQ ID NO: 150049 - DNA, 201 bp, Homo sapiens; identical to SEQ ID NO: 27899

SEQ ID NO: 150050 - DNA, 201 bp, Homo sapiens
tctttattttgactcaatatttttttatacaggcaattataaactaaattccaaaataatgtaagttttggaggtttttttcctgtaggaaaaaaattacrtaaatccacggtaaattctccaattaatctggctgaagctaatgcagctcacagggcacctgaaattgttactttagtatgttgatttccaactcaggct

SEQ ID NO: 150051 - DNA, 201 bp, Homo sapiens
aaacctctcttttaaagattgtgaacattttgcttacataaacaaattatgactaaagcttataaccatgccaaattgctttctgtagcacccagaaaacttttttttttttttttgagagagggtctcactctgttgcccaggctgaagtacagtggtgtgacctcagctcactgcaacctccgcctcctgggttcaaga

SEQ ID NO: 150052 - DNA, 201 bp, Homo sapiens
tgatattctcattttaatgttatttacctttttataataagaaagaagtacaggccaggcgcggtggctcacacctgtaatccgtgcactttgggaggccraggtgggcggatcacgaggtcaggagatcgagaccatcctggctaacatggtgagaccctgcctgtactaaaaatacaaaaattagcctggcatgttggc

SEQ ID NO: 150053 - DNA, 201 bp, Homo sapiens
ctcctgggttcaagcgattctcctgcctcagcctcctgagtagttgggattacaggcatgcgccaccatgcccggctaattttgtatttttagtagagacrgggtttctccatgttggtcaggctggtctcggactcctgacctcaggtgatccgcccgcctcagcctcccaaagtgttgggattacaggtatgatctacc

SEQ ID NO: 150054 - DNA, 201 bp, Homo sapiens
aatacttaagaagtattttctaacaagttagtagctgtttgaagaaatgatacatagaaattaggataaaaaattaggagaaaaaaagtagcaatttaatktctttttttttttttttgagacagagtctcactctgttgcccaggctggagtgcagtggcacgatcttggctcgctgcaagctccacctcctgggttcac

SEQ ID NO: 150055 - DNA, 201 bp, Homo sapiens
gctcaagagctccaggcttctttcttctgccacagaacaagtagcaccacaggtgaaggtttccatgacttatcacttctctttctttttcataaatagcsatctctaaattgtggtttgcaagcgcaacaaaatttctagtgtctcttaaggaacctaacctccctttccccgattccctgaatcttcatcctcttatag

SEQ ID NO: 150056 - DNA, 201 bp, Homo sapiens
acttaagaagtattttctaacaagttagtagctgtttgaagaaatgatacatagaaattaggataaaaaattaggagaaaaaaagtagcaatttaatttctttttttttttttttgagacagagtctcactctgttgcccaggctggagtgcagtggcacgatcttggctcgctgcaagctccacctcctgggttcacacc

SEQ ID NO: 150057 - DNA, 201 bp, Homo sapiens
ctgaggcaggagaattgcctgaacccgggagggcagaggttgcattgagccgagatcacgccactgcactccagcctgggcgacaaagtgagactgtctcaaaaaaaaaaaaagaaaagaaaaattggaaaatacagatcccccacccttccctagctcctggtaagttctaatctactgtctctacgagtttgcctattt

SEQ ID NO: 150058 - DNA, 201 bp, Homo sapiens
agtagtatgcttatattgtctatgccatagaagtggcatttctagaatatcttgcttataattttaaactcaaatgtctggagtagagcttcattgaaatrtgtttccttttaaacttttgctgctgtaccttatggatcctctcaactgagtatgtctctaaatttccttctgtttctaggctataaaactggactgttt

SEQ ID NO: 150059 - DNA, 201 bp, Homo sapiens
aaatagcatccagagaaagttagatgagttcaacaagtcattatgtgttggacagatgtatttataaatattgatcattttgccaggcgctgtggctcackcctgtaatcccagcactttgggaggccgaggctggcggatcacgaggtcaggagttcgagaccagcctggctaacatggcgaaacgttgtctttactaaa

SEQ ID NO: 150060 - DNA, 201 bp, Homo sapiens; identical to SEQ ID NO: 27898

SEQ ID NO: 150061 - DNA, 201 bp, Homo sapiens
gtgccaagcaagatgtcttttcctatctcagtttattttcctctagtactgtcatagggtttttacttgttttgtgttttagaactttaattcacctggcstttagttttgttgtagtgtaatgcagagatctaattttattttttcccagatggatagccagttgcacaagtatcatttactaaatagaaataaataaaa

SEQ ID NO: 150062 - DNA, 201 bp, Homo sapiens
atatagtgccacgagttgggagtgggaaagagacggggtagtggtaaatggaaaggaaggtggggagggatggggggtcacagattctcattacttctttsaccagttcaagggcataattgagttcaagttaattaaatcagattagtgggatgcccattaagcaaaaagtcacctattttgtaaatggttttcagtgct

SEQ ID NO: 150063 - DNA, 201 bp, Homo sapiens
tatggaaaaattttccataagattaccacttcttaggtcattttccttgatgaagttaggctctaatcaagaaccaagaggcccatgtattctgctgtacrttatagaaatgggtacagttatttatggtcatcattaaatcccatgctgggctgtggtttgattgcgatattgtttaaaaatgtattatcactaaactga

SEQ ID NO: 150064 - DNA, 201 bp, Homo sapiens
tttctccacatcttcaccaatgtttattttttttgtttttgttgttgtttttaaaattatagccattctagtaggtgtgaagggttttttgtttttttttytcctcagaatagtgcatttaaaaaattgtctttggccgggtgtaatggcttacacctgtaatcccagcactttgggaggctaaggcaggtggatcatttg

SEQ ID NO: 150065 - DNA, 201 bp, Homo sapiens
caggatcacttgagcccaggaggtaaaggctgcagtgagctgtgattgtgccactgtattccagcctgggcagcagagcaagacactgcctcaatagatarataaagatgtatggatagtgcatacttttttaaaactaaaatttttaaagtttatatgtatatgtgtatattgtaaaaaaaattcaaacaattttggaag

SEQ ID NO: 150066 - DNA, 201 bp, Homo sapiens
atgttggccaggctggtcttgaactcctgacctcaggtgatccgcctgccttggcctcccaaagtgctgagattacaagcatgagccaccatgcccagtctttttttttttttttttgagacagagtctcactctgtcacccaggctggagtcagtgatgtgatctctgctcacttctgcctcagcctcccaagcagctgg

SEQ ID NO: 150067 - DNA, 201 bp, Homo sapiens
cttggcctcaagtgatccgcatgccttcatctcccaaagtgctgggattacaggcatgagccaccgcacctggtctgccttttttttttttttttgagacsgagtcttgccctgtcgcccaggctggagtgcagtggcacgatctcggctcactataagctccgcctcctgggttcacgccattctcctgcctcagcctcc

SEQ ID NO: 150068 - DNA, 201 bp, Homo sapiens
tcactctgtcacccaggctggagtcagtgatgtgatctctgctcacttctgcctcagcctcccaagcagctgggactacaggcatgcaccactatgcccarctaatttttgtatttttagtagagacggggttttagcatatcggccaggctggtctgaaactcctgacctcgtaatccacccgcttcagcttcccaaagt

SEQ ID NO: 150069 - DNA, 201 bp, Homo sapiens
ggccagtggatcatgaggtcaagtgatcaagaccatccaggccaatatggtgaaaccctgtctttactaaaaatacaaaacttagctgggcatggtggtgygcacctgtaatcccagctactctggaggctgagacaggagaatcacttgaacccaggaggcggaggttgcagtgagccgagatcgcgccactgcactcca

SEQ ID NO: 150070 - DNA, 201 bp, Homo sapiens
aagcaattctcccgcctcagcctcccaagtagctgggattacagacacacactgtcatgcccagctaatttttgtatttttgtggagacagggtttcgctrtgttggccaggctggtcttgaactcctgacctcaggtgatccgcctgccttggcctcccaaagtgctgagattacaagcatgagccaccatgcccagtct

SEQ ID NO: 150071 - DNA, 201 bp, Homo sapiens
gacctcgtaatccacccgcttcagcttcccaaagtgctgggattacaggtgtgagccatcatgcccggcctttttttctggggggacagagtctcgctctsttgcccaggctggagtgcagtggtgcaatcttggctcactgcaatctctgcttcccgagttcaaatgattctcatgcctcagccccgcaagtagctggga

SEQ ID NO: 150072 - DNA, 201 bp, Homo sapiens
gggaaaaacattgaggaaaatgttgtaattgtctgcaattgaatggattatatccttcctttttctcctttctaggatataagcttttaaaatactactctttttttttttttttttttgacggagttttgctcttattgcccaggctggagtgcaatggcgcgatcttggctcaccacaacctccgcctcccaggttcaa

SEQ ID NO: 150073 - DNA, 201 bp, Homo sapiens
ttcaaacaattttggaagtacacaaagtaaaaaatgaaagttctctttaatctcatcctaccctccttatgtaatcacttgtcaggtttttgcgtgcgtgyctttctggatgtatttgtactcagatataatgcacatgtgtatgcacatacacatagtgcttattgttttgtgacttgctttttttttttttttttttgc

SEQ ID NO: 150074 - DNA, 201 bp, Homo sapiens
ggaaaaacattgaggaaaatgttgtaattgtctgcaattgaatggattatatccttcctttttctcctttctaggatataagcttttaaaatactactctttttttttttttttttttgacggagttttgctcttattgcccaggctggagtgcaatggcgcgatcttggctcaccacaacctccgcctcccaggttcaag

SEQ ID NO: 150075 - DNA, 201 bp, Homo sapiens
gaatcgcttgaaccctggaggtggaggttgcagtgagccgagattgtaccactgcactccagcctgggcaacagagtgagactccacctcaaaaacaaataaacaaacaaacaaaaaacaggcacggtggctcacgcttgtaatcccaacactttggaaggccgaggctgacggatcatgagatcaggagttcaagaccag

SEQ ID NO: 150076 - DNA, 201 bp, Homo sapiens
ccatcatgcccggcctttttttctggggggacagagtctcgctctgttgcccaggctggagtgcagtggtgcaatcttggctcactgcaatctctgcttcycgagttcaaatgattctcatgcctcagccccgcaagtagctgggactacaggcatgtaccaccacacctggctaatttttgtatttttagtagagacagg

SEQ ID NO: 150077 - DNA, 201 bp, Homo sapiens
aatcgcttgaaccctggaggtggaggttgcagtgagccgagattgtaccactgcactccagcctgggcaacagagtgagactccacctcaaaaacaaataaacaaacaaacaaaaaacaggcacggtggctcacgcttgtaatcccaacactttggaaggccgaggctgacggatcatgagatcaggagttcaagaccagc

SEQ ID NO: 150078 - DNA, 201 bp, Homo sapiens
aacatttaatttatcacatatttattgtatacttggataaaatgaaaactccattgagggagtcttaagaatttgggatgatatggttgttgtaactgagygataaatatagttatcttggtgtctttaatatttgagagtaaaagcatttttaaaatcaattgtatgattcttttaataaaaaggaacttgcaagtttat

SEQ ID NO: 150079 - DNA, 201 bp, Homo sapiens
tggagtgcagtggtgcaatcttggctcactgcaatctctgcttcccgagttcaaatgattctcatgcctcagccccgcaagtagctgggactacaggcatrtaccaccacacctggctaatttttgtatttttagtagagacagggtttcactatgttggccaggctggtctcgaatttgacctcgggtgattagcccacc

SEQ ID NO: 150080 - DNA, 201 bp, Homo sapiens
atcgcttgaaccctggaggtggaggttgcagtgagccgagattgtaccactgcactccagcctgggcaacagagtgagactccacctcaaaaacaaataaacaaacaaacaaaaaacaggcacggtggctcacgcttgtaatcccaacactttggaaggccgaggctgacggatcatgagatcaggagttcaagaccagcc

SEQ ID NO: 150081 - DNA, 201 bp, Homo sapiens
ttgaaagagttgcttttgtaaaatgtgccgttgaaatactctttaaaaagggggttgggagtgtgggctgcctcaaatcttaacatcgaagctaaagatamcatttaatttatcacatatttattgtatacttggataaaatgaaaactccattgagggagtcttaagaatttgggatgatatggttgttgtaactgagtg

SEQ ID NO: 150082 - DNA, 201 bp, Homo sapiens
tcgaatttgacctcgggtgattagcccacctcagcctcccaaagtgctgggattacaggtgtgagccaccgcgcccagccagaatctctttatatgcaatrtatagtatcccatcacctttgtatagtgaaaatattttcctccaggctgttacttattatctgattatacttatgatgcctttctttgttcaaaagtttt

SEQ ID NO: 150083 - DNA, 201 bp, Homo sapiens
tcgcttgaaccctggaggtggaggttgcagtgagccgagattgtaccactgcactccagcctgggcaacagagtgagactccacctcaaaaacaaataaacaaacaaacaaaaaacaggcacggtggctcacgcttgtaatcccaacactttggaaggccgaggctgacggatcatgagatcaggagttcaagaccagcct

SEQ ID NO: 150084 - DNA, 201 bp, Homo sapiens
caggaaaaaaatatggaaaaattttccataagattaccacttcttaggtcattttccttgatgaagttaggctctaatcaagaaccaagaggcccatgtaktctgctgtacgttatagaaatgggtacagttatttatggtcatcattaaatcccatgctgggctgtggtttgattgcgatattgtttaaaaatgtattat

SEQ ID NO: 150085 - DNA, 201 bp, Homo sapiens
tctgatatttttcctatgtgtgcttctttcagaaatatggctacacacacctttctgcaggagagctgcttcgtgatgaaaggaagaacccagattcacaktatggtgaacttattgaaaagtacattaaagaaggaaagattgtaccagttgagataaccatcagtttattaaagagggtaaggagtgtgaatgccaacc

SEQ ID NO: 150086 - DNA, 201 bp, Homo sapiens
gagttcaagaccagcctggacaacatggtgaaaccccatctctgctaaaaatacaaatattagccaggtgtggtggcgggcacctatagtcccagctcctygggacgttgaggcaggagaatcgcttgaacctgggaggcagaggttgcagtgagccaggattgcgccactgcactccaggctaggtgatcgaccgagatt

SEQ ID NO: 150087 - DNA, 201 bp, Homo sapiens
cagtgagctgagatggtgccactgcactccagcccaggcgacagagcaagactccatctcaacaacaacaacaacaaaaggcagggcttggtggcttatgyctgtgatctcagcactttgtgaggccgaggcgggcggatgacctgaggtcgggagttcgagaccagcctgaccaacatggagaaaccccgtcactactaa

SEQ ID NO: 150088 - DNA, 201 bp, Homo sapiens
cacccgccaccacacctggctaattttttgtatttttagtggagatggggtttcaccgtgttagccaggatggtctcgatcttctgacctggtgatctgcstgcctcggcctcccaaacaaagtgctgagattacaggcgtgagccaccgcgcccagccctgccttctttttatgatattgattttatttgtcttacacta

SEQ ID NO: 150089 - DNA, 201 bp, Homo sapiens
atggagaatgcaacataaccttagtcttcgatgcttcatagatgtaaatctaaaggacgcctaatagttttatatatatattttttgtttgtttgttttgktttggtttggtttttttgtttgtttgtttgagacagtcttgctctgtcacccaggctggcgtgcagtggcgcaatctcagctcactgcaagctccgcctc

SEQ ID NO: 150090 - DNA, 201 bp, Homo sapiens
accactagtcccagctactcgggaggctgaggtgggagaattgcttaagcctaggaggtggaggttatagtgagctgagatcgtgccactgcactccaatytgggtgacagagtgagaccctgtctcaaaaaaaaaaaaaaaaaagtgagagaaattgaacaagatggtttgatatttgaccccataaagttgtcaacatt

SEQ ID NO: 150091 - DNA, 201 bp, Homo sapiens
gcgtggctgatttttgtgtttttagtagagacagggtttcgccatgttggtcaggctgattttcaacacctaacctcaggtgatccacctgcctcagcctmccaaagtgctggggttaaagatgtgagccactgcaccggccaatctgttgttttttatgtcaaatacaatccaagcagaaatccattcttgagggtgggg

SEQ ID NO: 150092 - DNA, 201 bp, Homo sapiens
ggccaacatggtaaaaccccatctctactgaaaatacagaaattagccaggcatggtggtgcacgcctgtaatcccagctgcttgggaggctgaggcacgygaattgcttgaacctgggaagcagaggttgcagtgagcagagatggtgctccagcctaggcgacagagcaagaccctgtctgaacaacaacaacaaaaag

SEQ ID NO: 150093 - DNA, 201 bp, Homo sapiens
aaatcagagttaggaggggtctgataatttgcaagagtgtgattttttcttgtagccgtaggaatttagaaatttgccatgtcagccaggccctgagcccyggacctgtaagcaacttttgtttccttaaccttagggtccatcttagttgataaagggatgtctattttggtctttcagatcacaagggaaaaacattga

SEQ ID NO: 150094 - DNA, 201 bp, Homo sapiens
gacttggcctcccagagtgttgggatcacaggcataaaccaccacgcccagcctggagatggagtttcactcttgttgctcaagctggagtgcagtggcaygatctcggctcactgcaacctccgcctcccgggttcaagcaattctcctgcctcagcctcctgagtagctgggattacaggcacatgccaccacgcctgg

SEQ ID NO: 150095 - DNA, 201 bp, Homo sapiens
tggagacagggtctcactatgttgtgtaggctaggctggaactcctgggctcaagtgatcctctcacctcggcctcccaaagtgctgggattacaggagaragccaccacacctagctcagagtattgaatttcttgcttgtggaaggtggttatgcttgagaatggcagaactggaaactttgctttcacctgggaagaa

SEQ ID NO: 150096 - DNA, 201 bp, Homo sapiens
tccgcctcccaggttcaagcaattttcctgtctcagcctcctgaatacctgggattacaggcatgcgccactatgcctggctaattttgtatttttagtaraaatggggtttctccatgttggtcaggctggtcttgaactcctgacctcaggtgattcgcctgccttggcctcccaaattgttgggattataggcgtgag

SEQ ID NO: 150097 - DNA, 201 bp, Homo sapiens
gacctcatgatccacccacctcagcctcccaaattgttgggattacaggtgtgagccactacgcccagccaggatatatttatctgaacattatagctatraagaataaagatatccattaagcaaactggattatgggaaatatcttaaatttttctttattatttaatatacaagcaaaacttctttattgtagaaaaa

SEQ ID NO: 150098 - DNA, 201 bp, Homo sapiens
cctccctctcctgctccctttccttttttcttttttgctttctttcttttttttttgagatagagtctcgctctgtcgccaggctggagtgtagtggcgckatctcggctcactgcaacctctgcctcccgggttcaagagattctcctgtctcagcctcccgagtagctgggactacaggcgtgcaccaccatgcccagc

SEQ ID NO: 150099 - DNA, 201 bp, Homo sapiens
catgatgcttctcagggttttatacttggtcttattcagctctcatttcatatgtttctttctggatggttttagccatacccaaagctttcactatgctmatgctgctaaagtctatagctctaaaacaaaatgtttgttttgaattccagacatatatttttaactacctaactactaggcctttatttgaatgtctca

SEQ ID NO: 150100 - DNA, 201 bp, Homo sapiens
tttagagacagagtcttgctctgtctcccaggctggagggcagtggcatgatcatagctcactacatcctgggctcaagttttcctcctgcctcaaactcytaagtagctgggactacaggtgcacatagccttgcccagcaaatgtttttattttttgtagaaacatgttcactgtgttgcgcatgctggtcttgagctt

SEQ ID NO: 150101 - DNA, 201 bp, Homo sapiens
agtagagacggggttttgccatgttggccaggctggtctcgaactcctgacctcaggtgatccacccgccttagccttccagagtgttggaattgcaggcmtgagccaccatgcctggccttttgcattgttttaaaacgtaactctcttcttccaacccccaaaaatatgttttcatttacccttcaaagttaactttag

SEQ ID NO: 150102 - DNA, 201 bp, Homo sapiens
cacccgccttagccttccagagtgttggaattgcaggcatgagccaccatgcctggccttttgcattgttttaaaacgtaactctcttcttccaacccccmaaaatatgttttcatttacccttcaaagttaactttagaatgttaccacagctttataacaaggaatgtttattcacaattaacaaaggatgctttattc

SEQ ID NO: 150103 - DNA, 201 bp, Homo sapiens
atagatgcttctaaatctgttgatgaagtaagtgttcctagcctgtctttaaaaaaatatgtcaaataaaaatgtgattatttgttttggggtaagcaggaaaaaaagaaatactatcacagattagttagtttttcaagacactggaagccagtcatggtggctcatgcctgtaatcccagcacaagtgttcaagaccag

SEQ ID NO: 150104 - DNA, 201 bp, Homo sapiens
ccaccacacctagctaatttttttctattttttgtggagacagggtctcactatgttgtgtaggctaggctggaactcctgggctcaagtgatcctctcayctcggcctcccaaagtgctgggattacaggagagagccaccacacctagctcagagtattgaatttcttgcttgtggaaggtggttatgcttgagaatgg

SEQ ID NO: 150105 - DNA, 201 bp, Homo sapiens
attgactattgctgtgtttcctttaaaaaattaaacccagggcactattgtgaatttgctgtaccacattccagtttagatgctaatgcaaaaggattgtatcactgaagacctccaaaagtcacgtaggagtacagtattttaacgggtagctttctgaattgaaatccagaggattagagaaatcaatctagtagtggg

SEQ ID NO: 150106 - DNA, 201 bp, Homo sapiens
aaacctttatcttataaggagaagtaggagaggctaggccttcatctgagtgatttgatgtatacaaagatccatgttacctttgctgtgtgcctttctcsaggtattctcttaagaactgaattaactgattcctaggcttttagaccacctgcaacaatatctaggttgtagtgatacatgagagacttcttaagatat

SEQ ID NO: 150107 - DNA, 201 bp, Homo sapiens
ttcctcctgcctcaaactcctaagtagctgggactacaggtgcacatagccttgcccagcaaatgtttttattttttgtagaaacatgttcactgtgttgygcatgctggtcttgagcttctgacctcaagcaatcctctcaccttggcttcccaaagtgctagaattacaggtgtgagccactgtacctggccgtaccca

SEQ ID NO: 150108 - DNA, 201 bp, Homo sapiens
atctggtgagggccttctcactgtatcatcccatgatgggagccaaactcatccttttacaaggaaaccactctgtgataacgtgataatggcattaatgsattctttttttttttttttcttttgagacggagtttcgctctattgccttggctgaagtgcggtggtgtgatctcagctcactgcaacctctgcctcccg

SEQ ID NO: 150109 - DNA, 201 bp, Homo sapiens
cctaacctccctttccccgattccctgaatcttcatcctcttatagtcataagataaaaaagaaaggcccaggggaagaagattcagggaatctttttttmatccattgacactttgtatagaggtgaggtaatacatgagaaaactgtgttttagaatcagaactaagaagataagccacttcagttatattttatattt

SEQ ID NO: 150110 - DNA, 201 bp, Homo sapiens
attctagattcctagaactataatcattaacaggtattttcacatagaagaacagtgagggagaaaaagaaatgcaatattgggaacaacaagaaatggcygaagcctgatggaaaagagctatgtaagcatctggttggaactaaagacattggggatgaaaagtggcttgtacacacattcttacctcttgtctcagag

SEQ ID NO: 150111 - DNA, 201 bp, Homo sapiens
aatgtgattatttgttttggggtaagcaggaaaaaaagaaatactatcacagattagttagtttttcaagacactggaagccagtcatggtggctcatgcytgtaatcccagcacaagtgttcaagaccagcctgggcaacatactgggactctgtctcttaaaaaaaaaagaagacactggggactaaatgaaaaattag

SEQ ID NO: 150112 - DNA, 201 bp, Homo sapiens
agtagctgggattacaggtgccagccaccacgcccagctaatttttgtatttttagtagagacggggtttcaccatcttggccgggctggttcttttgttscctttgttttggggcagccagtgacatttgggtttaattagcttccgttaaaaagtattttatcctacattaataattaatgctaatggtcttttatatt

SEQ ID NO: 150113 - DNA, 201 bp, Homo sapiens
tagttataaaaccttaagcactctagttcagtgttctgagtgtgtgatttcatgtaaggttcaggttcttgtgatctttgctgagttctttgtgtttctcyaaatttatttccccattagtttgataattttgcaaatgctcaaatgttatgtttgcttaatattattatttaggattctgtctcctttgtacatttttct

SEQ ID NO: 150114 - DNA, 201 bp, Homo sapiens; identical to SEQ ID NO: 27897

SEQ ID NO: 150115 - DNA, 201 bp, Homo sapiens
ttttagtggagatggggtttcaccgtgttagccaggatggtctcgatcttctgacctggtgatctgcctgcctcggcctcccaaacaaagtgctgagattrcaggcgtgagccaccgcgcccagccctgccttctttttatgatattgattttatttgtcttacactaaagtgtttttaatttcttcatataattcttaca

SEQ ID NO: 150116 - DNA, 201 bp, Homo sapiens
ttttgagatggagtctcactctgtcacccaggctggagtgcagtggcgtgatcttggctcacttcaacttcggtctcccaggttcaagcaattctcctgcytcagcctcctgagtagctgggattacaggcacccgcccccatgcctggctaatttttgtatttttagtagagatggcgtttcaccatgttgtccaggctg

SEQ ID NO: 150117 - DNA, 201 bp, Homo sapiens
tctccatctttgaccattttccattccttctaatgtagggaatgcaaattgattcaaaatggctgagatgaattaaaagaaataaaaatactggaattgaycaattacagaataaaattaaagtgtgaaaattccagtttacgtttcctatagggtccatttggcatataaatcagatgctataatcctctattatctgag

SEQ ID NO: 150118 - DNA, 201 bp, Homo sapiens
cctaagtagctgggactacaggtgcacatagccttgcccagcaaatgtttttattttttgtagaaacatgttcactgtgttgcgcatgctggtcttgagcktctgacctcaagcaatcctctcaccttggcttcccaaagtgctagaattacaggtgtgagccactgtacctggccgtacccaatagttttaattcacttc

SEQ ID NO: 150119 - DNA, 201 bp, Homo sapiens
gccaggatatatttatctgaacattatagctatgaagaataaagatatccattaagcaaactggattatgggaaatatcttaaatttttctttattatttratatacaagcaaaacttctttattgtagaaaaattagaatatagaaattaacacaaaggaaaaaaagtatagtcctaccactgggttgaatgaattctga

SEQ ID NO: 150120 - DNA, 201 bp, Homo sapiens
ataccaaatatcccatttagggacgtttagggaagggacatctaaatgtcaatttaatgagtcagggagggcttcccagaggaggtgatgtgtatgagctyaattttgaaggacagtgggaaagaagcagttgggagatggaaaaacgcttagagcagttatccttgtatagggttactgaaggattcaattctgagtaaa

SEQ ID NO: 150121 - DNA, 201 bp, Homo sapiens
gaggctgaggcaggagaatcgcttgaaccctggaggtggaggttgcagtgagccgagattgtaccactgcactccagcctgggcaacagagtgagactccrcctcaaaaacaaataaacaaacaaacaaaaaacaggcacggtggctcacgcttgtaatcccaacactttggaaggccgaggctgacggatcatgagatca

SEQ ID NO: 150122 - DNA, 201 bp, Homo sapiens
gtcatctctttaaactcttgttttctttgcaggttaaaagaatggcaaattcatatctatatttttaataactttgtatctctttttagatttgtattgarcgatgtcttgagaggggaaagagtagtggtaggagtgatgacaacagagagagcttggaaaagaggtacttggcagtttttacatacaaccacttcaatc

SEQ ID NO: 150123 - DNA, 201 bp, Homo sapiens
ggaggttatctgcaaaagctttctacttaagaaaatatttagcttcgttgagaacttccatactttaatatgtggatttgcgatgaaatatgcatggtcaratgcaatgcacacatttacaaatactgtgagagcaaactaaaaatgagattaggaatccactagcaatttaagtcagatattatactcagctttctccca

SEQ ID NO: 150124 - DNA, 201 bp, Homo sapiens
ccccgcaagtagctgggactacaggcatgtaccaccacacctggctaatttttgtatttttagtagagacagggtttcactatgttggccaggctggtctygaatttgacctcgggtgattagcccacctcagcctcccaaagtgctgggattacaggtgtgagccaccgcgcccagccagaatctctttatatgcaatat

SEQ ID NO: 150125 - DNA, 201 bp, Homo sapiens
tgctgtggctgttagtatagtatagtatgtgtagatgtcatttttggtagcatacatattatttctgttttataaataaacagatctaagaaagattaaayaaattacccactgtcacactgggttgtgacagagttataaaactttagttttagttataaaaccttaagcactctagttcagtgttctgagtgtgtgatt

SEQ ID NO: 150126 - DNA, 201 bp, Homo sapiens
ttgggccaactttcttgcttttgaaattccttaggcaaatgatattctcattttaatgttatttacctttttataataagaaagaagtacaggccaggcgyggtggctcacacctgtaatccgtgcactttgggaggccaaggtgggcggatcacgaggtcaggagatcgagaccatcctggctaacatggtgagaccctg

SEQ ID NO: 150127 - DNA, 201 bp, Homo sapiens; identical to SEQ ID NO: 27893

SEQ ID NO: 150128 - DNA, 201 bp, Homo sapiens
ctatattacatataaattttatatattatatgccataagttatgatataaattgtataatatataatatatgaaaatgtaatttatatattatacattatrtgaatttatatatgttttgttttgttttttagagacagagtcttgctctgtctcccaggctggagggcagtggcatgatcatagctcactacatcctggg

SEQ ID NO: 150129 - DNA, 201 bp, Homo sapiens
cctgggaagaaagcggacagtggcaaggattctctgctttgatttaggatcacctatagctcaacttaacatccatttatgtgcacttggtcctttcttcscaacattcagacagttattctcttccatttctgtttcatcttttttcctccctctcctgctccctttccttttttcttttttgctttctttctttttttt

SEQ ID NO: 150130 - DNA, 201 bp, Homo sapiens
ataaaaatgtgattatttgttttggggtaagcaggaaaaaaagaaatactatcacagattagttagtttttcaagacactggaagccagtcatggtggctyatgcctgtaatcccagcacaagtgttcaagaccagcctgggcaacatactgggactctgtctcttaaaaaaaaaagaagacactggggactaaatgaaaa

SEQ ID NO: 150131 - DNA, 201 bp, Homo sapiens
tttttcaagacactggaagccagtcatggtggctcatgcctgtaatcccagcacaagtgttcaagaccagcctgggcaacatactgggactctgtctcttaaaaaaaaaagaagacactggggactaaatgaaaaattagggtttttttcctttctgagtaaaacctaaaatgaggtttataacttcaaacttgttcttca

SEQ ID NO: 150132 - DNA, 201 bp, Homo sapiens
gatacagtcaccaagaatgttttgagttttttgaaagaccccaatttaagccttgcttatttttaaattatttccattcagtgatgttggatgtatatcarttatttagtaaataatctcaataaattttgtgctgtggcctttgctatttgttggtttagatttctgttctctaagcatattgaagatcaagaagtatcc

SEQ ID NO: 150133 - DNA, 201 bp, Homo sapiens
taggagaaaaaaagtagcaatttaatttctttttttttttttttgagacagagtctcactctgttgcccaggctggagtgcagtggcacgatcttggctcrctgcaagctccacctcctgggttcacaccgttctcctgcctcagcctcctaagtagctgggactacaggtgcccaccaccacgcccggctaattttttgt

SEQ ID NO: 150134 - DNA, 201 bp, Homo sapiens
tctgttgcccaactttctaatttttctttttttgagacagggtctcgctctgttgaccaggctggagtgcagtggcgcaatctcggctcactgcaatctcsgcctcccggttcaagtgattctcctgtctcagcttcctaagtagctgggattacaggcacgcgccaccacgcccagctaattttttgtatttttagtata

SEQ ID NO: 150135 - DNA, 201 bp, Homo sapiens
tcaagtgattctcctgtctcagcttcctaagtagctgggattacaggcacgcgccaccacgcccagctaattttttgtatttttagtatagatggagtttygccatgttggccaggctggtctaaaactcctgacctcaagtgatccgcccacctcggcctcccaaagtgctgggattataggcatgagccatcttgctca

SEQ ID NO: 150136 - DNA, 201 bp, Homo sapiens
actcctgggctcaagccatccttctgcatcagcctcccaaagtgctaggattacaagcatgatctaccttgcccagcctgaccatttcttctaatggaagktcctatatgacagagagacatggatgatattaggatcttgtttattctcatcaaactttatactcaattatagtcagcaaataaactatttagagttttc

SEQ ID NO: 150137 - DNA, 201 bp, Homo sapiens
ttctttgaccagttcaagggcataattgagttcaagttaattaaatcagattagtgggatgcccattaagcaaaaagtcacctattttgtaaatggttttyagtgctttttctattgtgtagtcatgacaggaaaaaaatatggaaaaattttccataagattaccacttcttaggtcattttccttgatgaagttaggct

SEQ ID NO: 150138 - DNA, 201 bp, Homo sapiens
caagtgattctcctgcctcagcctcctgagtagctgggattacaggcacctgcaaccacacctggctaattttttgtatttttagtagagacggggtttcrccatgttggccaggctggtctcaaactcctgacctcaggtgatccacccgccttggcctcccaaagtgctgggattataggtgtgagccaccgcacccag

SEQ ID NO: 150139 - DNA, 201 bp, Homo sapiens
tatttttatttgagatggagtctcactctgtcacccaggctggagtgcagtggtgtgatcttggctcactgcaacttctgctgcctgagttcaagtgattstcctgcctcagcctcctgagtagctgggattacaggcacctgcaaccacacctggctaattttttgtatttttagtagagacggggtttcgccatgttgg

SEQ ID NO: 150140 - DNA, 201 bp, Homo sapiens; identical to SEQ ID NO: 27915

SEQ ID NO: 150141 - DNA, 201 bp, Homo sapiens; identical to SEQ ID NO: 27917

SEQ ID NO: 150142 - DNA, 201 bp, Homo sapiens; identical to SEQ ID NO: 27918

SEQ ID NO: 150143 - DNA, 201 bp, Homo sapiens
gatgggcgctccttgcccaaaggtatgaagtttccccaccctctcacccaaagtctccacggggacgtgtggagggtgagaaatccatgtgtgcttcagarttctgcacatctctgggtctcccttttgttctaaaaacatcaaaaacatactttgtatttaggatgaatttgaaaagtctggccgagagcttgaacccac

SEQ ID NO: 150144 - DNA, 201 bp, Homo sapiens
  misc_feature (1)...(201): n = A,T,C or G
gtttgagggccatgacaccacagccagtgggatctcctggatcctctatgctctggccacacaccccaagcatcaggagaggtgccgggaggagatccatngcctcctgggtgatggagcctccatcacctggtgagtgagggctcaaaagatggggttccctgccttctccacaggggcccctggtctgcccaggccttg

SEQ ID NO: 150145 - DNA, 201 bp, Homo sapiens
ctggggccaccaagcctcaactcccccagttctggtcccagtcctgctataacctagttgtgtgaacacagacaagacaattggtctctctgatactcagrtatctcccctgaaaactgagagcaaaagaatgtcttccttggagcattgttgtattgagtgagttcatgtatattctccaatgacccttggagaatattt

SEQ ID NO: 150146 - DNA, 201 bp, Homo sapiens
ctgctataacctagttgtgtgaacacagacaagacaattggtctctctgatactcaggtatctcccctgaaaactgagagcaaaagaatgtcttccttggrgcattgttgtattgagtgagttcatgtatattctccaatgacccttggagaatatttgatgaatgtgaaatgtcactggacttactctaaagagtaatgc

SEQ ID NO: 150147 - DNA, 201 bp, Homo sapiens
ccccttgagaagccacctttctccctcccaaattgtcaccagtcatccctagctccttgcagcccctgcacacacacacacacacacacacacaaacacayattcatgtctctcttagggtacggcttgctcctgttgaatgggcagacatggttccagcatcgacggatgctgaccccagccttccactatgacatcctg

SEQ ID NO: 150148 - DNA, 201 bp, Homo sapiens
gcctctaagactgccttcttagtaactcctagtttcctataaagccctttcttgcctttcagacccgaaatcccatggttcctacagattcctggctccayggattggtatgtgtgcaaactaggactgcagcccactccctagtcaggtttgagttatttatttggctcacagagaacaacagattagaggccaccacta

SEQ ID NO: 150149 - DNA, 201 bp, Homo sapiens
cttcctgagcccacactgaccttcaggacagaaatagaagtggatgggagtcaagtgggaggtgacatgggtcaaactgccaactgacagacaccaagaaytgatgcagcctctaagactgccttcttagtaactcctagtttcctataaagccctttcttgcctttcagacccgaaatcccatggttcctacagattcct

SEQ ID NO: 150150 - DNA, 201 bp, Homo sapiens; identical to SEQ ID NO: 27926

SEQ ID NO: 150151 - DNA, 201 bp, Homo sapiens; identical to SEQ ID NO: 27928

SEQ ID NO: 150152 - DNA, 201 bp, Homo sapiens
tttattcatgtgattagactctgtgccttagagccctggccctgtcttgatagagggtttcaggctgctgagagcagaggtagaaggtaggagttaggagytagcccaggaagacggctctgtccaaggtttgggacagtgtgaagccaggatggggtagaagtgtccgtgggctgtaagtgtgcaggggctggacacatg

SEQ ID NO: 150153 - DNA, 201 bp, Homo sapiens
ccatgtgtgcttcagagttctgcacatctctgggtctcccttttgttctaaaaacatcaaaaacatactttgtatttaggatgaatttgaaaagtctggcygagagcttgaacccaccgaaagttcaagaaataaatgttaatctctgaatgtggccttgggtcagtaactgtaaaatcctattccttgagatgtgcaggg

SEQ ID NO: 150154 - DNA, 201 bp, Homo sapiens
cccttttgttctaaaaacatcaaaaacatactttgtatttaggatgaatttgaaaagtctggccgagagcttgaacccaccgaaagttcaagaaataaatkttaatctctgaatgtggccttgggtcagtaactgtaaaatcctattccttgagatgtgcagggctggaaagagaatcagacaagggcagagagggatgtg

SEQ ID NO: 150155 - DNA, 201 bp, Homo sapiens
agagccctggccctgtcttgatagagggtttcaggctgctgagagcagaggtagaaggtaggagttaggagttagcccaggaagacggctctgtccaaggwttgggacagtgtgaagccaggatggggtagaagtgtccgtgggctgtaagtgtgcaggggctggacacatgaggttgggcactgaatgtccagctcaggg

SEQ ID NO: 150156 - DNA, 201 bp, Homo sapiens
ccctctcacccaaagtctccacggggacgtgtggagggtgagaaatccatgtgtgcttcagagttctgcacatctctgggtctcccttttgttctaaaaamatcaaaaacatactttgtatttaggatgaatttgaaaagtctggccgagagcttgaacccaccgaaagttcaagaaataaatgttaatctctgaatgtgg

SEQ ID NO: 150157 - DNA, 201 bp, Homo sapiens
cagctcagggctggggtcaggggccaaaacctgctcagatcagaatggggcctgaggacacgtctcaattcattgtctccgcctggcccaggaactgcatygggaaacaatttgccatgaaccagctgaaggtggccagggccctgaccctgctccgctttgagctgctgcctgatcccaccaggatccccatccccatgg

SEQ ID NO: 150158 - DNA, 201 bp, Homo sapiens; identical to SEQ ID NO: 27912

SEQ ID NO: 150159 - DNA, 201 bp, Homo sapiens; identical to SEQ ID NO: 27913

SEQ ID NO: 150160 - DNA, 201 bp, Homo sapiens; identical to SEQ ID NO: 27914

SEQ ID NO: 150161 - DNA, 201 bp, Homo sapiens
gtgtttgacccttcccgttttgcaccgggttctgctcaacacagccacgctttcctgcccttctcaggaggatcaaggtgagacgtcctgtgtggtaattsgaatagagaaatgagggaagtctctggtcaaccctctgatctttgtgagcccgatgttcatatgtggcatcttcaggtgtgctcttaaatattggtattt

SEQ ID NO: 150162 - DNA, 201 bp, Homo sapiens
ccttcccgttttgcaccgggttctgctcaacacagccacgctttcctgcccttctcaggaggatcaaggtgagacgtcctgtgtggtaattggaatagagraatgagggaagtctctggtcaaccctctgatctttgtgagcccgatgttcatatgtggcatcttcaggtgtgctcttaaatattggtatttgtgggaaag

SEQ ID NO: 150163 - DNA, 201 bp, Homo sapiens
tctgcacatctctgggtctcccttttgttctaaaaacatcaaaaacatactttgtatttaggatgaatttgaaaagtctggccgagagcttgaacccaccraaagttcaagaaataaatgttaatctctgaatgtggccttgggtcagtaactgtaaaatcctattccttgagatgtgcagggctggaaagagaatcagac

SEQ ID NO: 150164 - DNA, 201 bp, Homo sapiens
acacaaacacacattcatgtctctcttagggtacggcttgctcctgttgaatgggcagacatggttccagcatcgacggatgctgaccccagccttccacwatgacatcctgaagccctatgtggggctcatggcagactctgtacgagtgatgctggtgagtccatgtctctctcctctccccacacccactcacagcac

SEQ ID NO: 150165 - DNA, 201 bp, Homo sapiens
aaatgatcggtcttctctctctttccaacctgcaccacaggtatcatggtcctcctctccatttatggccttcaccacaacccaaaagtgtggcccaaccyagaggtatgtggtccttgagaggaggaaatggggtgatctctcaagaccaataccttctcctgcttccacctctgggagtactgtaccctcatgggtggc

SEQ ID NO: 150166 - DNA, 201 bp, Homo sapiens
tggccctgtcttgatagagggtttcaggctgctgagagcagaggtagaaggtaggagttaggagttagcccaggaagacggctctgtccaaggtttgggayagtgtgaagccaggatggggtagaagtgtccgtgggctgtaagtgtgcaggggctggacacatgaggttgggcactgaatgtccagctcagggctggggt

SEQ ID NO: 150167 - DNA, 201 bp, Homo sapiens
tcctgcccttctcaggaggatcaaggtgagacgtcctgtgtggtaattggaatagagaaatgagggaagtctctggtcaaccctctgatctttgtgagccygatgttcatatgtggcatcttcaggtgtgctcttaaatattggtatttgtgggaaagtcaggcacctggtgtgggcgtctctgtgtacaaaaggaaggtg

SEQ ID NO: 150168 - DNA, 201 bp, Homo sapiens
caccacaggtatcatggtcctcctctccatttatggccttcaccacaacccaaaagtgtggcccaacctagaggtatgtggtccttgagaggaggaaatgrggtgatctctcaagaccaataccttctcctgcttccacctctgggagtactgtaccctcatgggtggcaagtaggtgctggatccttaactatcctggct

SEQ ID NO: 150169 - DNA, 201 bp, Homo sapiens
atatccacgctttgttccccaccataggaatagagattcatggtgaatgcaaggcccttctcctcccactttggaaccttcagcacaagggactggaggartatgcaatcttgctggacagtaggacttcctatgctggctggcctgggcaatggcagcttcagtggcagcatggacaggccaagatgtcacccacccagg

SEQ ID NO: 150170 - DNA, 201 bp, Homo sapiens
atgggcccacccctactgcggtctcttcttcatactctccctcaggaattctcagtcctacatccaggccattagtgacctgaacagcctggttttttgcygtatgaggaatgcctttcatgagaatgacaccatctacagcctgacctctgctggccgctggacacaccgcgcctgccagctggcccatcagcacacagg

SEQ ID NO: 150171 - DNA, 201 bp, Homo sapiens
gtggtaattggaatagagaaatgagggaagtctctggtcaaccctctgatctttgtgagcccgatgttcatatgtggcatcttcaggtgtgctcttaaatrttggtatttgtgggaaagtcaggcacctggtgtgggcgtctctgtgtacaaaaggaaggtggcattcagagcaccccatggagactttgctccctctgct

SEQ ID NO: 150172 - DNA, 201 bp, Homo sapiens
gcttttctcagttgtcaggaatagtaaactgtagatttctctccccccacacatcctcaatgcagcacactaccttccctatttaattcactagtctgtcrtagagatgaatcattgaagtctttgcatctgtttataatacagatgacctgcaagtcctacctttcaagtcatataagggagaggttaaggtagcccttt

SEQ ID NO: 150173 - DNA, 201 bp, Homo sapiens
cagtacactgtcttggagagaaaagcccaataattatcatataacgcacaacatttgaagcctcctggtatgtgaaatataaaacacacttgaaattgctrttgagctggagaggaaaactccagaatggctgcggtggagatcattgtggcatcaggaatcgtcctgtgacatacacacaggcaaaaacgatataaattc

SEQ ID NO: 150174 - DNA, 201 bp, Homo sapiens
aggccttgctggtgttcaggatggaattgtttcaggaaccacctggaccagatgccctacaccaccatgtgcattaaggaggcactgaggctctacccacyggtgccaggcattggaagagagctcagcactcccgtcaccttccctgatgggcgctccttgcccaaaggtatgaagtttccccaccctctcacccaaagt

SEQ ID NO: 150175 - DNA, 201 bp, Homo sapiens
gtcttgcccaatgaaatttttactgcattatatagtgttcacatatttacatctattttcccgtttgacaaattctgtacatgccttgagatctttatacyatagtcctgtaatccacttagcacaatattggccaaaaacataaaaatgtgaacagtacactgtcttggagagaaaagcccaataattatcatataacgc

SEQ ID NO: 150176 - DNA, 201 bp, Homo sapiens
ataggggaccaactggctaagtaagtttccccaagactcacggaatttccacaacaggtgatttaggatctgaaaacctgacaattatgggtacacatgargggggcagcctgcacaatgttctccaggtgaggagactggtgtttgagttgcacattgaacagggtgtgttgacctcctggctctcctcccacatacccg

SEQ ID NO: 150177 - DNA, 201 bp, Homo sapiens
catgaagggggcagcctgcacaatgttctccaggtgaggagactggtgtttgagttgcacattgaacagggtgtgttgacctcctggctctcctcccacayacccggactgtgagctccctggcggtgagcatgtcatccccttcctgtgccccggcaatcagcaaaatcctggcacagcttgatgatcagctcaggtgtg

SEQ ID NO: 150178 - DNA, 201 bp, Homo sapiens
tgtgccactggtgggaggggtgccctgcctcacacagtactagagcttccacccctgaccctgcacccacactcacattcatgctgagatctaccaggcamccacactggggcagttgggcagctaggcctcctgggggctgctgacggtctcagctctgcctggtaaccattgttctggtacagaccaagtgatccaact

SEQ ID NO: 150179 - DNA, 201 bp, Homo sapiens
catggggctgcatgtagctcaggatggctttgaatgtggcccaacacaaattcgtaaactttcttaaaacgttatgagattattttgcaatttttttgagytcatcagctatcattagtgttagtgtattttatgcatggctcaagacaattatttttcttccaatgtggcctaggaaagccaaaagattggacacaccag

SEQ ID NO: 150180 - DNA, 201 bp, Homo sapiens
catgagaatgacaccatctacagcctgacctctgctggccgctggacacaccgcgcctgccagctggcccatcagcacacaggttctgtctcttcctcttrtctcccagcctttcccaggcacagtgaaagtacctgccctgactcctcaggcagagaaggcccctagtaatcctgcagaagccagaacacactcagcctg

SEQ ID NO: 150181 - DNA, 201 bp, Homo sapiens
ccttattagcaaagcacttcttggagattaagaaggtccatgccccctcccaccacaggacaaatgggaagagctccttggccaggattcccctctggagktctttcagcacgtctccttgatgaccctggacaccatcatgaagagtgccttcagccatcagggcagcatccaggtggacaggtcagtgacaaccctcca

SEQ ID NO: 150182 - DNA, 201 bp, Homo sapiens
ggggcgggtaggaacagagcaggtaaacggctgcatggagagggactcaccaaggtgctatgaattgaacacacttaagtagagataggggttgcagggarctgaggcctattgtttctcagcaaaggaggcaacatagttctcagcagagcagaacaaatgtggggacctgccaaagttctaaccctatatggactggtc

SEQ ID NO: 150183 - DNA, 201 bp, Homo sapiens
tgctattgtgagaggatctgttgaatgttgtattaaaagtgtgtgagaattaggcgtcagtttaccaacactggctttacagtctcagtttctacaatgcrtctgctctgtaaagtgaggaatcccaaccaagatatctgcatgctacaggaaaaaacaggatatctgcaggtacatgaaaaagccaggccttattagcaa

SEQ ID NO: 150184 - DNA, 201 bp, Homo sapiens
acagacaccaagaattgatgcagcctctaagactgccttcttagtaactcctagtttcctataaagccctttcttgcctttcagacccgaaatcccatggwtcctacagattcctggctccatggattggtatgtgtgcaaactaggactgcagcccactccctagtcaggtttgagttatttatttggctcacagagaac

SEQ ID NO: 150185 - DNA, 201 bp, Homo sapiens
aatgcctttcatgagaatgacaccatctacagcctgacctctgctggccgctggacacaccgcgcctgccagctggcccatcagcacacaggttctgtctyttcctcttgtctcccagcctttcccaggcacagtgaaagtacctgccctgactcctcaggcagagaaggcccctagtaatcctgcagaagccagaacaca

SEQ ID NO: 150186 - DNA, 201 bp, Homo sapiens
caagaattgatgcagcctctaagactgccttcttagtaactcctagtttcctataaagccctttcttgcctttcagacccgaaatcccatggttcctacarattcctggctccatggattggtatgtgtgcaaactaggactgcagcccactccctagtcaggtttgagttatttatttggctcacagagaacaacagatt

SEQ ID NO: 150187 - DNA, 201 bp, Homo sapiens
ccttcctgaggctcagcttcttctatttcatgtctcagttctctccagacatccttggcctcacatttattttacatctgcccacaacccttttcaacttytatctcacagctgtcataatcacatgcatgtagcagctcaatcagaatattcacatgcctgaaatatacctccttttcctgcatttgcccatgacgtggc

SEQ ID NO: 150188 - DNA, 201 bp, Homo sapiens; identical to SEQ ID NO: 27937

SEQ ID NO: 150189 - DNA, 201 bp, Homo sapiens
aatgacccttggagaatatttgatgaatgtgaaatgtcactggacttactctaaagagtaatgctctgattcttttttgcttctcattcctgcataaatgrttgtctattcatcatctgaactcacatgctttgtcaagcctaacccacctgcataatggcagaatcatcctagtcaaagtgacaatttatagaaagtagg

SEQ ID NO: 150190 - DNA, 201 bp, Homo sapiens
ctccacccacctcccaaactcctgcctgccctccagactgtctgcccatacacctgtctccttcttcctgcctgcttgtctgttcctatattagtttcctrttactgctgtaataaactatcacaatctcagtgattttaaataacgacttttattctcttacagttatggaggtcaaagtcagatatatgggtttcactg

SEQ ID NO: 150191 - DNA, 201 bp, Homo sapiens
gtgagaattaggcgtcagtttaccaacactggctttacagtctcagtttctacaatgcatctgctctgtaaagtgaggaatcccaaccaagatatctgcawgctacaggaaaaaacaggatatctgcaggtacatgaaaaagccaggccttattagcaaagcacttcttggagattaagaaggtccatgccccctcccacc

SEQ ID NO: 150192 - DNA, 201 bp, Homo sapiens
tcagcacacaggttctgtctcttcctcttgtctcccagcctttcccaggcacagtgaaagtacctgccctgactcctcaggcagagaaggcccctagtaaycctgcagaagccagaacacactcagcctggggaattcccttgctcaggggctgggagctgagatgtgaggggccagattctgtgccttggtttatcaatg

SEQ ID NO: 150193 - DNA, 201 bp, Homo sapiens; identical to SEQ ID NO: 27916

SEQ ID NO: 150194 - DNA, 201 bp, Homo sapiens
gacatacacacaggcaaaaacgatataaattcttagtagaaacaaagtttgttcaaagaaataattatgtgactttttcaaacggtgagtccacttacacrgaacaggctaagaaaaagcttcctcctgaaactccttctccagcactggtctgtctatcccagcatgagaaagtccttgtaaacattgcctgcaaatcat

SEQ ID NO: 150195 - DNA, 201 bp, Homo sapiens
attcctaagctccatttctagctcagaactaatattttactctcagtgtatttcattctattttattcattttaaaacttaaataacatcattcaaatatwaaagtatttcttaagctacctctctgggtcaagtcctatgcagcatgatgagaaaacagagataaaaagtacaaaaatgtgttgtacagaaatatatcct

SEQ ID NO: 150196 - DNA, 201 bp, Homo sapiens
gtatcatggtcctcctctccatttatggccttcaccacaacccaaaagtgtggcccaacctagaggtatgtggtccttgagaggaggaaatggggtgatcyctcaagaccaataccttctcctgcttccacctctgggagtactgtaccctcatgggtggcaagtaggtgctggatccttaactatcctggctctggtgct

SEQ ID NO: 150197 - DNA, 201 bp, Homo sapiens
tccaaggtttgggacagtgtgaagccaggatggggtagaagtgtccgtgggctgtaagtgtgcaggggctggacacatgaggttgggcactgaatgtccasctcagggctggggtcaggggccaaaacctgctcagatcagaatggggcctgaggacacgtctcaattcattgtctccgcctggcccaggaactgcatcgg

SEQ ID NO: 150198 - DNA, 201 bp, Homo sapiens
ccaaaagtgtggcccaacctagaggtatgtggtccttgagaggaggaaatggggtgatctctcaagaccaataccttctcctgcttccacctctgggagtmctgtaccctcatgggtggcaagtaggtgctggatccttaactatcctggctctggtgctctctctgcaggtgtttgacccttcccgttttgcaccgggtt

SEQ ID NO: 150199 - DNA, 201 bp, Homo sapiens
agtgtggcccaacctagaggtatgtggtccttgagaggaggaaatggggtgatctctcaagaccaataccttctcctgcttccacctctgggagtactgtmccctcatgggtggcaagtaggtgctggatccttaactatcctggctctggtgctctctctgcaggtgtttgacccttcccgttttgcaccgggttctgct

SEQ ID NO: 150200 - DNA, 201 bp, Homo sapiens
ggttctgtctcttcctcttgtctcccagcctttcccaggcacagtgaaagtacctgccctgactcctcaggcagagaaggcccctagtaatcctgcagaasccagaacacactcagcctggggaattcccttgctcaggggctgggagctgagatgtgaggggccagattctgtgccttggtttatcaatgtccccacatg

SEQ ID NO: 150201 - DNA, 201 bp, Homo sapiens
gttctgtctcttcctcttgtctcccagcctttcccaggcacagtgaaagtacctgccctgactcctcaggcagagaaggcccctagtaatcctgcagaagscagaacacactcagcctggggaattcccttgctcaggggctgggagctgagatgtgaggggccagattctgtgccttggtttatcaatgtccccacatgg

SEQ ID NO: 150202 - DNA, 201 bp, Homo sapiens
aggcattggaagagagctcagcactcccgtcaccttccctgatgggcgctccttgcccaaaggtatgaagtttccccaccctctcacccaaagtctccacrgggacgtgtggagggtgagaaatccatgtgtgcttcagagttctgcacatctctgggtctcccttttgttctaaaaacatcaaaaacatactttgtattt

SEQ ID NO: 150203 - DNA, 201 bp, Homo sapiens
gctcttaaatattggtatttgtgggaaagtcaggcacctggtgtgggcgtctctgtgtacaaaaggaaggtggcattcagagcaccccatggagactttgytccctctgcttcttcaaatgggcagcctgaattcactgtcagtgcatgttccaaacttcagtatattcatgtattttcctcactttaaggatatgaattc

SEQ ID NO: 150204 - DNA, 201 bp, Homo sapiens
attctgtgccttggtttatcaatgtccccacatggagataactgaatgagaccctgtccaaacagcattcaagaggagcctccatgaactgtgccactggygggaggggtgccctgcctcacacagtactagagcttccacccctgaccctgcacccacactcacattcatgctgagatctaccaggcacccacactgggg

SEQ ID NO: 150205 - DNA, 201 bp, Homo sapiens
ctgcatttcaacctttaggtctctgatcacactatgcttgctacctggaattatcttctcacgcatatctatctgtcaaggcccagcaccaagctacctcyttcaagaaggcctcctgggtctcccagtagtgaagggctgactcttttttccatgagctatccttctcaagaggccagagcagtgttaacttgactcagt

SEQ ID NO: 150206 - DNA, 201 bp, Homo sapiens
caggatggaattgtttcaggaaccacctggaccagatgccctacaccaccatgtgcattaaggaggcactgaggctctacccaccggtgccaggcattggmagagagctcagcactcccgtcaccttccctgatgggcgctccttgcccaaaggtatgaagtttccccaccctctcacccaaagtctccacggggacgtgt

SEQ ID NO: 150207 - DNA, 201 bp, Homo sapiens; identical to SEQ ID NO: 27936

SEQ ID NO: 150208 - DNA, 201 bp, Homo sapiens
tgttgagtgtccctgtccctggtgctgtccttggcactggactgtgagtgttcatggataaatcgtgaatgctacctgggggcctgggagggagaggcccrgctggcagggagtgagaggcagctgggctgtgactttagccttgaggatgtggcaggcagaggtggagggaggacattctcagccatctccacatgaaca

SEQ ID NO: 150209 - DNA, 201 bp, Homo sapiens
gcacgtctccttgatgaccctggacaccatcatgaagagtgccttcagccatcagggcagcatccaggtggacaggtcagtgacaaccctccagctgcagrgcccttgttcttatcaagtggagtgcacatacctgaggggcaggtggggcagcgtgaaggctcaccgccacacaaaggaagagtcagtccctgaccaaac

SEQ ID NO: 150210 - DNA, 201 bp, Homo sapiens
aggcactgaggctctacccaccggtgccaggcattggaagagagctcagcactcccgtcaccttccctgatgggcgctccttgcccaaaggtatgaagttyccccaccctctcacccaaagtctccacggggacgtgtggagggtgagaaatccatgtgtgcttcagagttctgcacatctctgggtctcccttttgttct

SEQ ID NO: 150211 - DNA, 201 bp, Homo sapiens
cgagtgatgctggtgagtccatgtctctctcctctccccacacccactcacagcacacactctcaccaactccactctcaaccctgtgtcccacaggcagmcatagacatagacacatggaacaacactctcaggtcattgctgtgagagtagagggttccccagagttgtataaggtaggagaacacccaggcatcaggt

SEQ ID NO: 150212 - DNA, 201 bp, Homo sapiens
agctggcccatcagcacacaggttctgtctcttcctcttgtctcccagcctttcccaggcacagtgaaagtacctgccctgactcctcaggcagagaaggyccctagtaatcctgcagaagccagaacacactcagcctggggaattcccttgctcaggggctgggagctgagatgtgaggggccagattctgtgccttgg

SEQ ID NO: 150213 - DNA, 201 bp, Homo sapiens
  misc_feature (1)...(201): n = A,T,C or G
gccctgcactttcaccacggtcttcccagatggagaatgggagcatcttgtcagacaaggacctccgtgctgaggtggacacgttcatgtttgagggccangacaccacagccagtgggatctcctggatcctctatgctctggccacacaccccaagcatcaggagaggtgccgggaggagatccatggcctcctgggtg

SEQ ID NO: 150214 - DNA, 201 bp, Homo sapiens
tgtttgagggccatgacaccacagccagtgggatctcctggatcctctatgctctggccacacaccccaagcatcaggagaggtgccgggaggagatccayggcctcctgggtgatggagcctccatcacctggtgagtgagggctcaaaagatggggttccctgccttctccacaggggcccctggtctgcccaggcctt

SEQ ID NO: 150215 - DNA, 201 bp, Homo sapiens
acggggacgtgtggagggtgagaaatccatgtgtgcttcagagttctgcacatctctgggtctcccttttgttctaaaaacatcaaaaacatactttgtayttaggatgaatttgaaaagtctggccgagagcttgaacccaccgaaagttcaagaaataaatgttaatctctgaatgtggccttgggtcagtaactgtaa

SEQ ID NO: 150216 - DNA, 201 bp, Homo sapiens
atgaaagtgttcatctgtctacccttgttgacagctccaacaggaccaggagctacaacggattcagaaatgggtggagacattcccaagtgcctgtcctyattggctatggggaggcaaagttcgtgtccagctctatgaccctgactatatgaaggtgattctggggagatcaggtgagatcgaacccccatcccaact

SEQ ID NO: 150217 - DNA, 201 bp, Homo sapiens
gggacgtgtggagggtgagaaatccatgtgtgcttcagagttctgcacatctctgggtctcccttttgttctaaaaacatcaaaaacatactttgtatttrggatgaatttgaaaagtctggccgagagcttgaacccaccgaaagttcaagaaataaatgttaatctctgaatgtggccttgggtcagtaactgtaaaat

SEQ ID NO: 150218 - DNA, 201 bp, Homo sapiens
ccagctctatgaccctgactatatgaaggtgattctggggagatcaggtgagatcgaacccccatcccaactgcaatgtgtcttccctcttgacacatgcycctgggtctgtaaaattccagaagagagtggctgttcaaacatcaatatctgaaacctctcccacgcatccaccaagcccaccatgcccaggctatagtc

SEQ ID NO: 150219 - DNA, 201 bp, Homo sapiens; identical to SEQ ID NO: 27930

SEQ ID NO: 150220 - DNA, 201 bp, Homo sapiens; identical to SEQ ID NO: 27931

SEQ ID NO: 150221 - DNA, 201 bp, Homo sapiens
cccaccggtgccaggcattggaagagagctcagcactcccgtcaccttccctgatgggcgctccttgcccaaaggtatgaagtttccccaccctctcaccyaaagtctccacggggacgtgtggagggtgagaaatccatgtgtgcttcagagttctgcacatctctgggtctcccttttgttctaaaaacatcaaaaaca

SEQ ID NO: 150222 - DNA, 201 bp, Homo sapiens
acagacctatcaatggcctagtatgtgccatgaatctgatggtccagtaagcctcagtggagagggacatggcccaaaaaaatgggtgttccatgaaatcycctaaataattcacaatcactaaatagaacaaaacacaatgggttttgtgccactcatgggagagatccatggcaatcaactagacactggctgtaagct

SEQ ID NO: 150223 - DNA, 201 bp, Homo sapiens
gaggctgaggtgggaggatcactttagcctgggagtttgaggctgcagcaaactataatcacaccacttccctccagcctgggcaacatagtgagaccttrtctcaaaaaaattttttcattgaccatgatttgagactcacccaaaggagctaataattgatgagcctgtgaatcatacttcttaggtattagctactac

SEQ ID NO: 150224 - DNA, 201 bp, Homo sapiens
tgttttggtaccagtatcatgctgttttggttactgtagccttgtagtatagtttgaagtcaggtagtgtgatgcttccaggtttgttcttttggcttacrattgacttggcaatgagggctcttttttggttccatatgaactttaaagtagtttttttccaattctgtgaagaaagtcattggtagcttgatggggatg

SEQ ID NO: 150225 - DNA, 201 bp, Homo sapiens
ccatttgttttttgaaagtgatctttgctgtgtggatgcagcactgttatggtgttccagttgccattctaacccaaattaggtctttacctcagtcagtwagctagctggccatgtcaggattggtgaagttcaaaaattagtcttcataatgttaaaagccacaattcatcatgaacataagacagctattgataccta

SEQ ID NO: 150226 - DNA, 201 bp, Homo sapiens
agggctctgttctgttccattggtctatatctctgttttggtaccagtatcatgctgttttggttactgtagccttgtagtatagtttgaagtcaggtagygtgatgcttccaggtttgttcttttggcttacaattgacttggcaatgagggctcttttttggttccatatgaactttaaagtagtttttttccaattct

SEQ ID NO: 150227 - DNA, 201 bp, Homo sapiens
ggaatcgccacactgtcttccacaatggatgaactagtttacagtcccaccaacagtgtaaaagtgttcctatttctccacatcctctccagcacctgttstttcctgactttttaatgatcgcctttctaactggtgtgagatggtatctcattgtggttttgatttgcatttctctgatggccagtgatgatgagcatt

SEQ ID NO: 150228 - DNA, 201 bp, Homo sapiens
tcttttccttttttttattattatactttaagttctaggatacatgtgcacaacgtgcaggtttgttacatatgtatacatgtgccatattgatgtgttgyacccattaacttgtcatttaccttaggtatatctcctaatgctatcccacccccctccccccaccccacaacaggccccagtgtgtgatgttccccttcc

SEQ ID NO: 150229 - DNA, 201 bp, Homo sapiens
tctatttcctttttgccctaaggctccatggagatttaagacctcaataaagtaggaaattttcaaattatgtctttttctgacgtattcttggtttaaawatgtaattttgttagataatgtgcatgcttttttattataatgaatatgctcataaggtgtcagtgtgattctctggattaataaaacccatgccagaaa

SEQ ID NO: 150230 - DNA, 201 bp, Homo sapiens
tactatgcacagttcatcaaacaacacagcacaccactgagtattccttttgcatgggtttttggggacttaggacatagataactttgagggaccataartctacctatgacaatagccatttacaattggaatatatttctgatttatcattttatcttgataaaattggcctctttttctctaataatgcttctagtc

SEQ ID NO: 150231 - DNA, 201 bp, Homo sapiens
ataagtttttttccagggaatcttcactgacattgagttagagtcattgaggtgttttcagattttctacatggccaaaaaaaaaaaaaaagatgacaaaycaccaaaagttatgaattctatttcctttttgccctaaggctccatggagatttaagacctcaataaagtaggaaattttcaaattatgtctttttctga

SEQ ID NO: 150232 - DNA, 201 bp, Homo sapiens
ctactatgcacagttcatcaaacaacacagcacaccactgagtattccttttgcatgggtttttggggacttaggacatagataactttgagggaccataratctacctatgacaatagccatttacaattggaatatatttctgatttatcattttatcttgataaaattggcctctttttctctaataatgcttctagt

SEQ ID NO: 150233 - DNA, 201 bp, Homo sapiens
atctgcttttcataagtttttttccagggaatcttcactgacattgagttagagtcattgaggtgttttcagattttctacatggccaaaaaaaaaaaaaaagatgacaaaccaccaaaagttatgaattctatttcctttttgccctaaggctccatggagatttaagacctcaataaagtaggaaattttcaaattatg

SEQ ID NO: 150234 - DNA, 201 bp, Homo sapiens
ttctgtaggaagacagagcaggacatctgagcaagtactgaacatgagtgggtactgcctactatgcacagttcatcaaacaacacagcacaccactgagkattccttttgcatgggtttttggggacttaggacatagataactttgagggaccataaatctacctatgacaatagccatttacaattggaatatatttc

SEQ ID NO: 150235 - DNA, 201 bp, Homo sapiens
aatctgcttttcataagtttttttccagggaatcttcactgacattgagttagagtcattgaggtgttttcagattttctacatggccaaaaaaaaaaaaaaagatgacaaaccaccaaaagttatgaattctatttcctttttgccctaaggctccatggagatttaagacctcaataaagtaggaaattttcaaattat

SEQ ID NO: 150236 - DNA, 201 bp, Homo sapiens
cgcttgagtctgggcaacacaagaccccatctctacaaaaagataaaataaaataaaacagtgcatcatggccaagtaagtaggtcatattccaaaactgmaaagattgttcaatattaggaatccattaatataatttattacatttataggtttcaggagaaacccatatcatctccaccctgatcaatggatattcca

SEQ ID NO: 150237 - DNA, 201 bp, Homo sapiens; identical to SEQ ID NO: 27970

SEQ ID NO: 150238 - DNA, 201 bp, Homo sapiens; identical to SEQ ID NO: 27971

SEQ ID NO: 150239 - DNA, 201 bp, Homo sapiens
taaaataaaataaaacagtgcatcatggccaagtaagtaggtcatattccaaaactgaaaagattgttcaatattaggaatccattaatataatttattayatttataggtttcaggagaaacccatatcatctccaccctgatcaatggatattccataacatgataaaatattacttcagtgccatattggcactatat

SEQ ID NO: 150240 - DNA, 201 bp, Homo sapiens
ttttgagccttgctcagaattacctagatttgtggaacaaagaaattggagttaggaagacagatttagagagaggatgaagataaaatcagatcagttgsaggcagtcattaatctgcttttcataagtttttttccagggaatcttcactgacattgagttagagtcattgaggtgttttcagattttctacatggcca

SEQ ID NO: 150241 - DNA, 201 bp, Homo sapiens; identical to SEQ ID NO: 27972

SEQ ID NO: 150242 - DNA, 201 bp, Homo sapiens
cagtcattttttctggacaatgcagatcccttttcactaatcttattaagagatattttgagccttgctcagaattacctagatttgtggaacaaagaaaytggagttaggaagacagatttagagagaggatgaagataaaatcagatcagttgcaggcagtcattaatctgcttttcataagtttttttccagggaatc

SEQ ID NO: 150243 - DNA, 201 bp, Homo sapiens
cttttaaaagttaacttttaatttagagcctagggtacaattaaagactctttattctggcagagaaaaggggatgtccactctgctgacagattgtgacycaaatgatacacagattcctgggagagcagtcattttttctggacaatgcagatcccttttcactaatcttattaagagatattttgagccttgctcaga

SEQ ID NO: 150244 - DNA, 201 bp, Homo sapiens
aattatattttatcttttaaaagttaacttttaatttagagcctagggtacaattaaagactctttattctggcagagaaaaggggatgtccactctgctracagattgtgactcaaatgatacacagattcctgggagagcagtcattttttctggacaatgcagatcccttttcactaatcttattaagagatattttg

SEQ ID NO: 150245 - DNA, 201 bp, Homo sapiens
agaaagacttgcagagagtagagggtggctctactttttaatcccatagaaaaggtttagaaattgtggtcttaataagcttagtaaggctgagctacttyaggaaaagtgtatattaatcacctaaaagaaatagtcaatcctaaaaattatattttatcttttaaaagttaacttttaatttagagcctagggtacaat

SEQ ID NO: 150246 - DNA, 201 bp, Homo sapiens
ttctaacccaaattaggtctttacctcagtcagttagctagctggccatgtcaggattggtgaagttcaaaaattagtcttcataatgttaaaagccacarttcatcatgaacataagacagctattgatacctacctatgtatcaagttacacatctgcaattttttttttttgatggagtcttgctctgttgcccaggc

SEQ ID NO: 150247 - DNA, 201 bp, Homo sapiens
ccttgaatattttccctttctctactgtcactcatcagtaattcaaccagcattaaattcctctatacgctttctctgccctgctaatgggcccttgaatrcagctatagcacaacaaagcatgtgcaaatggatgcctcatatccgccagacccacctcttcccctgtattacccaaaaatcctgtttatttctaaaaag

SEQ ID NO: 150248 - DNA, 201 bp, Homo sapiens
agagagagattttaatgaatttatgaaattaaaaaagaaggtaggattgggctgccaaattaaacaagaagagaaattcccagttttaaaaggcaatgagrgggtggctgcagaaagacttgcagagagtagagggtggctctactttttaatcccatagaaaaggtttagaaattgtggtcttaataagcttagtaaggc

SEQ ID NO: 150249 - DNA, 201 bp, Homo sapiens
gtgattctgttgccacttgtccctcctaagatcctacttatacacatacactgaaatgcaaaaagaaataatcccataaaagtgaaaagaatggaaggaargtatttaacaaacaaaaagagagagagagattttaatgaatttatgaaattaaaaaagaaggtaggattgggctgccaaattaaacaagaagagaaattc

SEQ ID NO: 150250 - DNA, 201 bp, Homo sapiens
ttccttggttatgaaatctatgaatagatgtgaaagaatctttgctcgtattttattgaggatcacaagcattcttatacaccaataacaggcaaacagasagccaaatcatgagcgaactcccattcacaattgcttcaaggagaataaaatatctaggaatccaacttacaagggatgtgaaggacctcttcaaggaga

SEQ ID NO: 150251 - DNA, 201 bp, Homo sapiens
gctatttccttctcaacaaccttgcttccatggtctcagttattgcctttgtcaatcttcaaatgccagagtcccctaagttttatatttccatacttagstatctacaaaccaatctacttataaaagataaatcataagtctaggtaaattctaagttccaactcaagaaagccacttgggtgattctgttgccacttg

SEQ ID NO: 150252 - DNA, 201 bp, Homo sapiens
cttccttacccagacagtatccaagtcctagaatatcagctatttccttctcaacaaccttgcttccatggtctcagttattgcctttgtcaatcttcaamtgccagagtcccctaagttttatatttccatacttaggtatctacaaaccaatctacttataaaagataaatcataagtctaggtaaattctaagttcca

SEQ ID NO: 150253 - DNA, 201 bp, Homo sapiens
agcatactatgatgtgcaaaatgtccaaaagaaagcatgtcatctacctccttcccctaaacctattcctcctcctggattgctacattaatgaatggcaycactgtctgtgagtaattttaagtgagaaagatagaagtcatcctcacacctccaccatcttccttacccagacagtatccaagtcctagaatatcagct

SEQ ID NO: 150254 - DNA, 201 bp, Homo sapiens
tgtgcctgtgccatggtcccattcactcttggcaaaagacctactacattatgtgtgcccttctcttcatttgctggcccaacaagtgcatattaaacatytgctctaggcactttgctttgttctgagcatactatgatgtgcaaaatgtccaaaagaaagcatgtcatctacctccttcccctaaacctattcctcctc

SEQ ID NO: 150255 - DNA, 201 bp, Homo sapiens
cctgctttccttcctgcccctctcatacacacaggcactccacaacttcactttcttcaccccaggcttggatgcctggattcatcactccaacttccccyttggcaatgctgtcaacttccttgaatattttccctttctctactgtcactcatcagtaattcaaccagcattaaattcctctatacgctttctctgccc

SEQ ID NO: 150256 - DNA, 201 bp, Homo sapiens
atgaagggacaggaagtgcacacgcagagttgccttcacctcactttacattcctttccgccacaccttcttgccctccagagctttcaggccttcactgsacctcacgtgctcatctgtctcatttcctgttaccctgctttccttcctgcccctctcatacacacaggcactccacaacttcactttcttcaccccagg

SEQ ID NO: 150257 - DNA, 201 bp, Homo sapiens
caggtcctttctgtttcatgttcctttcactttcctgatcttgtggcttttgcagctgctgcgggtaactttctgggcttcagacaatgctgttgagatcygcatggatgttggtggaagagctggctccacccggctgactcagttttaggctacttatacgtcatctctggtctcctgcagtctctgccctttcctcca

SEQ ID NO: 150258 - DNA, 201 bp, Homo sapiens
atttttcccattcaggtcctttctgtttcatgttcctttcactttcctgatcttgtggcttttgcagctgctgcgggtaactttctgggcttcagacaatkctgttgagatccgcatggatgttggtggaagagctggctccacccggctgactcagttttaggctacttatacgtcatctctggtctcctgcagtctctg

SEQ ID NO: 150259 - DNA, 201 bp, Homo sapiens
gatacatgggccagtcttcgggtcccagcagtggctacagtaggctgagcatgcccgttcttgggcaccaaggtgatgtatactagcaccagtgttagctrctccaggcagaccaactctttccaggtggcttgcctgggttctggaaatggcagtggtgggtcaggtaggtgggtgagctcttgcgcacctaggcatcag

SEQ ID NO: 150260 - DNA, 201 bp, Homo sapiens
acatggccagagtccactatgagacatctcattgtctgagacattgactctggttatggctgcttctactatggacatatggcatggtcatcattcagaartgctaatttgtacctcttaaatgaatgtgctacataaatgctatgtagagggtattatattattgactatatatagctgtattttaatgtttggtgttag

SEQ ID NO: 150261 - DNA, 201 bp, Homo sapiens
tcaggactatccaaacaggcacaggattatcaaggtgcaaaggtacagaatcctgccatatggactgagggttgggtgagggggccttcgtgaagcatcayggctttaatgctgaaacttaaaggactagatttatatcagcaaagatgagagaggcagtactgtgggcagagagaagagcagacacaaagcagcaggcag

SEQ ID NO: 150262 - DNA, 201 bp, Homo sapiens
ataaaatatctaggaatccaacttacaagggatgtgaaggacctcttcaaggagaactacaaaccgctgctcaatgaaataaaagaggatacaaacaaatkgaagaacattccatgctcctgggtaggaagaatcaatatcgtgaaaatggccatactgcccaaggtaatttatagtttcaatgccatccctatcaagcta

SEQ ID NO: 150263 - DNA, 201 bp, Homo sapiens
tgttagctactccaggcagaccaactctttccaggtggcttgcctgggttctggaaatggcagtggtgggtcaggtaggtgggtgagctcttgcgcacctrggcatcaggcatgtcggacaacctgcttgatactaagcagtccacgctggtattggtggtggcggtgatgggctgagcaggccagtccccagcccgcagt

SEQ ID NO: 150264 - DNA, 201 bp, Homo sapiens
gcaccagtgttagctactccaggcagaccaactctttccaggtggcttgcctgggttctggaaatggcagtggtgggtcaggtaggtgggtgagctcttgmgcacctaggcatcaggcatgtcggacaacctgcttgatactaagcagtccacgctggtattggtggtggcggtgatgggctgagcaggccagtccccagc

SEQ ID NO: 150265 - DNA, 201 bp, Homo sapiens
gaagttttgttggggaatgggatacatgggccagtcttcgggtcccagcagtggctacagtaggctgagcatgcccgttcttgggcaccaaggtgatgtayactagcaccagtgttagctactccaggcagaccaactctttccaggtggcttgcctgggttctggaaatggcagtggtgggtcaggtaggtgggtgagct

SEQ ID NO: 150266 - DNA, 201 bp, Homo sapiens
tacagggaacagatgtatagcttaaaatgttgtctaacaaacagccatatagttgcaaccctggtttaaaagaaaaattgctcattaccagcactgctaawaacctcgtgcctgccttcccatcacaaaccccttctatttctccaagatgtaaatgttttcctgactttaataacattcattctttgtttttgtttatag

SEQ ID NO: 150267 - DNA, 201 bp, Homo sapiens
ttcaaattcagctctcaaggccaaatcttttctaaatttaaccaagaacttcatcagttcacaggttagtcctgggatttacatggccagagtccactatsagacatctcattgtctgagacattgactctggttatggctgcttctactatggacatatggcatggtcatcattcagaaatgctaatttgtacctcttaa

SEQ ID NO: 150268 - DNA, 201 bp, Homo sapiens
ttttgtgggatgagggtgactcatgatttgctagcaccttggcccttgcagctacagttacaggcagtggaatttgtcctcagggtgcatgaaaatgtgtrcccacccctctgctgggggtgatagggtcactggcagtggctcccaccttggcaccagcagcagcagccacagcagctgtggtggggaatgtcactgggg

SEQ ID NO: 150269 - DNA, 201 bp, Homo sapiens
ctttgtcttgctgcctgggcactccttcttaaaatgccacaccgatagaaactagcggatgcaacttggggatcctggactttgcaagcctgcaaagttgktgctaccgtctctctccttctcctgagctttttctcttcttttgggcctccccctggtccctattataaaagaccaaagtggccacattcaggaggttct

SEQ ID NO: 150270 - DNA, 201 bp, Homo sapiens
gtttatagtttgttgcctaagcttgcaactttaaatactagagtctagtttatcttctgtttgaagtacatatgaataaaatcatacattcttttgtttgrcttcttttgcacaggattcactcattttttagaggagcttcttttcggtcattttcattcctctatggaattccgttatgtataaatcatgaatcctata

SEQ ID NO: 150271 - DNA, 201 bp, Homo sapiens
aaaagatgacaaaccaccaaaagttatgaattctatttcctttttgccctaaggctccatggagatttaagacctcaataaagtaggaaattttcaaattrtgtctttttctgacgtattcttggtttaaatatgtaattttgttagataatgtgcatgcttttttattataatgaatatgctcataaggtgtcagtgtga

SEQ ID NO: 150272 - DNA, 201 bp, Homo sapiens
atgaatctgatggtccagtaagcctcagtggagagggacatggcccaaaaaaatgggtgttccatgaaatcccctaaataattcacaatcactaaatagarcaaaacacaatgggttttgtgccactcatgggagagatccatggcaatcaactagacactggctgtaagctagagcaagcagaaactcctaagaaagaca

SEQ ID NO: 150273 - DNA, 201 bp, Homo sapiens
ctccaacaaaacagctcagagtcaacttttactaccttttcccttaatcttgcatttcaataatacctaaatcctgtcaataagctctggtttttttcaayatcaataaaatgatgatttattgctgccttccaacacaagaaaattattttctctacttccattctagatcacctaagccctgtaatccacagaatctta

SEQ ID NO: 150274 - DNA, 201 bp, Homo sapiens
tacagttacatgtgaaaagtggtaagtgttaacatttagcttttcctaagacatacttgatacatctgaagtcctcctttgggtaaagaacaaaatcattytcagttacaaaaatggagaaaagctgggctttcagtgcaatgcctaagtgactactcctccttttcctttcctcctgtgcttctacccagggaacacctg

SEQ ID NO: 150275 - DNA, 201 bp, Homo sapiens
gcagcctcaaactcctgggctcaagcagtcttcctgtttcagccttccaagtagctgggattacaggcatgtgccaccatgcctggctaatttttttttttaatagagataggatctcacaatgttgtccaagctggtcttgaactcctggcctcaagccatcttactgcctcagcctctcaaagtgctgaggttacaggt

SEQ ID NO: 150276 - DNA, 201 bp, Homo sapiens
agaacacattcaaaaagtacagggaacagatgtatagcttaaaatgttgtctaacaaacagccatatagttgcaaccctggtttaaaagaaaaattgctcrttaccagcactgctaaaaacctcgtgcctgccttcccatcacaaaccccttctatttctccaagatgtaaatgttttcctgactttaataacattcattc

SEQ ID NO: 150277 - DNA, 201 bp, Homo sapiens
ttccttcttttgactatggtattaaacattcttgtacataataaacattttcttagagtttattcccttaagtaaaattaataaatcataaaatatgaacktccataggactctcaatttattctgcccagttgaattctgttgagtcatttctttctacattgcctggtgttctgttaaggtttgaaaaaagtaaaatag

SEQ ID NO: 150278 - DNA, 201 bp, Homo sapiens
tcagtggagatgggggtttcaccatgttggccaggctggtcttgaacccctgaactcaagtgatcctcccaactcggccttccaaagtgctgggattacamgcgtgagccgctgcacccagccccatatgaattttaaaagttttttctaattctatgaagaatctcaatagtagtttaatgggaacagcattgaatctat

SEQ ID NO: 150279 - DNA, 201 bp, Homo sapiens
tcatgcccagctaatttttgtattttcagtggagatgggggtttcaccatgttggccaggctggtcttgaacccctgaactcaagtgatcctcccaactcrgccttccaaagtgctgggattacaagcgtgagccgctgcacccagccccatatgaattttaaaagttttttctaattctatgaagaatctcaatagtagt

SEQ ID NO: 150280 - DNA, 201 bp, Homo sapiens
ccagctttggtttgtttgtttgtttgtttgtttgttttcttaggattgtcttggctattcaggctctttttcagttccatatgatttttttttttttttttgagactgactctctgtcacccaggctggagtgcagtggtgtgctcctggctcactgcaacctccacctcccaggttcaagtgattctcatgtctcagtct

SEQ ID NO: 150281 - DNA, 201 bp, Homo sapiens
gctttgattctgggcatgtgcagtagtgtaatcgctgtatgatttcttcaactataaacagcatcatttttgtctgtgatttactcagtggcttagcatgyggttgttagtggaagctgtggtgaagttttgttggggaatgggatacatgggccagtcttcgggtcccagcagtggctacagtaggctgagcatgcccgt

SEQ ID NO: 150282 - DNA, 201 bp, Homo sapiens
tagccaataacagacctatcaatggcctagtatgtgccatgaatctgatggtccagtaagcctcagtggagagggacatggcccaaaaaaatgggtgttcyatgaaatcccctaaataattcacaatcactaaatagaacaaaacacaatgggttttgtgccactcatgggagagatccatggcaatcaactagacactgg

SEQ ID NO: 150283 - DNA, 201 bp, Homo sapiens
caaacagccatatagttgcaaccctggtttaaaagaaaaattgctcattaccagcactgctaaaaacctcgtgcctgccttcccatcacaaaccccttctmtttctccaagatgtaaatgttttcctgactttaataacattcattctttgtttttgtttatagtttgttgcctaagcttgcaactttaaatactagagtc

SEQ ID NO: 150284 - DNA, 201 bp, Homo sapiens
atagaacacattcaaaaagtacagggaacagatgtatagcttaaaatgttgtctaacaaacagccatatagttgcaaccctggtttaaaagaaaaattgcwcattaccagcactgctaaaaacctcgtgcctgccttcccatcacaaaccccttctatttctccaagatgtaaatgttttcctgactttaataacattcat

SEQ ID NO: 150285 - DNA, 201 bp, Homo sapiens
gcaatgagagggtggctgcagaaagacttgcagagagtagagggtggctctactttttaatcccatagaaaaggtttagaaattgtggtcttaataagctyagtaaggctgagctactttaggaaaagtgtatattaatcacctaaaagaaatagtcaatcctaaaaattatattttatcttttaaaagttaacttttaat

SEQ ID NO: 150286 - DNA, 201 bp, Homo sapiens
gtatatgaaaaaacagtatatacaaagttcagtactatccatggtttcaggcatccactgggggttttggaacgtatccctcacagataagtggggactaytgtataaataatgcttttaagaacaaccatccagtcctggaattttcttttttggaagactttttgttagcgattcaatctcactactcatactggtctg

SEQ ID NO: 150287 - DNA, 201 bp, Homo sapiens
agctgctgcgggtaactttctgggcttcagacaatgctgttgagatccgcatggatgttggtggaagagctggctccacccggctgactcagttttaggckacttatacgtcatctctggtctcctgcagtctctgccctttcctccaagtgccttcaagggctgcaccttaatctccctcaagctacaatgaagggacag

SEQ ID NO: 150288 - DNA, 201 bp, Homo sapiens
aacgtatccctcacagataagtggggactactgtataaataatgcttttaagaacaaccatccagtcctggaattttcttttttggaagactttttgttascgattcaatctcactactcatactggtctgttcaggttttctatttcttcccagttcagtctgggtaggttgaacgtttccaggaatttatccatttctt

SEQ ID NO: 150289 - DNA, 201 bp, Homo sapiens
tgtcattttattaattgatttctggttgttttgtatatactttgttcttttctttctcccatcatttagcattgtggttaggttgtattctgtagtggtamcatttgagctttttctctgtcttgtttgtgtgttagttctaccagtggtttttatatcttcaagtattttcattatggcagttatcattctgttacttct

SEQ ID NO: 150290 - DNA, 201 bp, Homo sapiens
tctggagttttttgtttaatccattaaaaactcttgggctaaagcaaaattacaaaatcaaatcatgaccctgaaaactctacatatgagaattaatggtytgccactaaagcagcattcattcagaagagaagctataatagtaaatgcgaaatatttttattaataaaagaattaaattaaacattgacgtcgaaaaca

SEQ ID NO: 150291 - DNA, 201 bp, Homo sapiens
tattttattcctgtttccctagtgattagcacagtgcttggtgactgtctcatgaggtgtccacgtgatgttcatgagaaaagtgaaggacttggcaatcracagtcactcaatatatgacaactattgttgcacaccaggctagcaatcctgtaaggataaaattagattatatgtgtaaagatactgacatgtggtgag

SEQ ID NO: 150292 - DNA, 201 bp, Homo sapiens
cagttacaggcagtggaatttgtcctcagggtgcatgaaaatgtgtgcccacccctctgctgggggtgatagggtcactggcagtggctcccaccttggcmccagcagcagcagccacagcagctgtggtggggaatgtcactggggcttcagggatgtggagatgtagaggctgttgaaccccaaggcaagacacagtct

SEQ ID NO: 150293 - DNA, 201 bp, Homo sapiens
tgtttcatttgcaattaaagtttgaaaaaccccatcctagaagactaggatcatattttattcctgtttccctagtgattagcacagtgcttggtgactgkctcatgaggtgtccacgtgatgttcatgagaaaagtgaaggacttggcaatcaacagtcactcaatatatgacaactattgttgcacaccaggctagcaa

SEQ ID NO: 150294 - DNA, 201 bp, Homo sapiens
ttcgggtcccagcagtggctacagtaggctgagcatgcccgttcttgggcaccaaggtgatgtatactagcaccagtgttagctactccaggcagaccaaytctttccaggtggcttgcctgggttctggaaatggcagtggtgggtcaggtaggtgggtgagctcttgcgcacctaggcatcaggcatgtcggacaacct

SEQ ID NO: 150295 - DNA, 201 bp, Homo sapiens
aggtgtcagtgtgattctctggattaataaaacccatgccagaaaaacaaaaacaacagattccctcaatagccaataacagacctatcaatggcctagtrtgtgccatgaatctgatggtccagtaagcctcagtggagagggacatggcccaaaaaaatgggtgttccatgaaatcccctaaataattcacaatcacta

SEQ ID NO: 150296 - DNA, 201 bp, Homo sapiens
ctcccagggctttccctcatgcctccagtgtcacattttaattatctgggcacttgtctgtctttttccaagcccacaagctgctgaaaccttcttcctcracatgtggtctatagaccagcagcattggtaaaacctgggagcttgttagaaatgcagaatcttaggccctacctcagacctagtgggttagaatcttca

SEQ ID NO: 150297 - DNA, 201 bp, Homo sapiens
ctcattaccagcactgctaaaaacctcgtgcctgccttcccatcacaaaccccttctatttctccaagatgtaaatgttttcctgactttaataacattcrttctttgtttttgtttatagtttgttgcctaagcttgcaactttaaatactagagtctagtttatcttctgtttgaagtacatatgaataaaatcataca

SEQ ID NO: 150298 - DNA, 201 bp, Homo sapiens
attgaaatgtcttaacatactcatgtctttaacagttatttatccttagactctgtggaacctagggccattcttatttcccagagagggagaaagaggakagagctctcaggactatccaaacaggcacaggattatcaaggtgcaaaggtacagaatcctgccatatggactgagggttgggtgagggggccttcgtga

SEQ ID NO: 150299 - DNA, 201 bp, Homo sapiens
taaataaataagtaaaattaaaataacaaataaataaattagaaaaacttacttatatgataactgatacatattgaacttcccttgtgaagattttcctscttgtcctcccagggctttccctcatgcctccagtgtcacattttaattatctgggcacttgtctgtctttttccaagcccacaagctgctgaaaccttc

SEQ ID NO: 150300 - DNA, 201 bp, Homo sapiens
aaaataaataaataagtaaaattaaaataacaaataaataaattagaaaaacttacttatatgataactgatacatattgaacttcccttgtgaagatttkcctgcttgtcctcccagggctttccctcatgcctccagtgtcacattttaattatctgggcacttgtctgtctttttccaagcccacaagctgctgaaac

SEQ ID NO: 150301 - DNA, 201 bp, Homo sapiens
gatcccttttcactaatcttattaagagatattttgagccttgctcagaattacctagatttgtggaacaaagaaattggagttaggaagacagatttagrgagaggatgaagataaaatcagatcagttgcaggcagtcattaatctgcttttcataagtttttttccagggaatcttcactgacattgagttagagtca

SEQ ID NO: 150302 - DNA, 201 bp, Homo sapiens
gaggtggtagagcatgactctgtctcaaaaaataaataaataagtaaaattaaaataacaaataaataaattagaaaaacttacttatatgataactgatrcatattgaacttcccttgtgaagattttcctgcttgtcctcccagggctttccctcatgcctccagtgtcacattttaattatctgggcacttgtctgtc

SEQ ID NO: 150303 - DNA, 201 bp, Homo sapiens
gaaacattacaaaatagtgttctttaaatgaagacaataaaaatggaaattagcaacaaaaatttttcaaaaagtttcattcatctggagttttttgtttwatccattaaaaactcttgggctaaagcaaaattacaaaatcaaatcatgaccctgaaaactctacatatgagaattaatggtttgccactaaagcagcat

SEQ ID NO: 150304 - DNA, 201 bp, Homo sapiens
aagtacctgtaggtcagggatgggaccatttaaaaaaaaaagacagctggtggtactgtcccttaccaactcagaaacatgggggggggtgccagggggtmccgataaagcaccagcttctcagaactacatttggctttgattgactttccagtaaccttgataataacaaagatcataatttttccatctagagaaagt

SEQ ID NO: 150305 - DNA, 201 bp, Homo sapiens
agaatttctgtttccactagtcatttatcagttccaggagccttttggcagagtcttcagggttttccaggcatagaactttgtcatctacaaagagagawagtttgatttcttattttcctatttggatgctttttatttctttctcttgcctgattgctgtggctagcattcccagtactatgttaaataggagtggtg

SEQ ID NO: 150306 - DNA, 201 bp, Homo sapiens
ggcagaactttcctgttcacagaagtagcttagagcctagtttccagtagaaaaggcacaaaaaggaaacgttggaaagccacaacgtactgcagagaacyaacaatgtgtgttatggagagaatttctgtttccactagtcatttatcagttccaggagccttttggcagagtcttcagggttttccaggcatagaactt

SEQ ID NO: 150307 - DNA, 201 bp, Homo sapiens
ctgctaaaggcagaactttcctgttcacagaagtagcttagagcctagtttccagtagaaaaggcacaaaaaggaaacgttggaaagccacaacgtactgyagagaaccaacaatgtgtgttatggagagaatttctgtttccactagtcatttatcagttccaggagccttttggcagagtcttcagggttttccaggca

SEQ ID NO: 150308 - DNA, 201 bp, Homo sapiens
acgtatccctcacagataagtggggactactgtataaataatgcttttaagaacaaccatccagtcctggaattttcttttttggaagactttttgttagygattcaatctcactactcatactggtctgttcaggttttctatttcttcccagttcagtctgggtaggttgaacgtttccaggaatttatccatttcttc

SEQ ID NO: 150309 - DNA, 201 bp, Homo sapiens
gtctgttcaggttttctatttcttcccagttcagtctgggtaggttgaacgtttccaggaatttatccatttcttctaggttttctagtttgttagtgtgyagttgttcataatagtctctagtgaccttttgtacttctgtggtatcagttgaatgtcttctttttcatttctggttttatttggatcttctctcttttt

SEQ ID NO: 150310 - DNA, 201 bp, Homo sapiens
gcaccggtagtaaacatatcccggttactcgacaaacccatcacctttccagatggacgctccttacctgcaggtcttaaaacttttttttttttttttamcaatgcagctgtgctggattgaaatgtcttaacatactcatgtctttaacagttatttatccttagactctgtggaacctagggccattcttatttccca

SEQ ID NO: 150311 - DNA, 201 bp, Homo sapiens
ccacactgcagctgctgaggactcaggggtttgtgggacccagtgtgagctctctctctggagtaatgtcttcatgcaatctccagccggctccttatgtyagtctcagggcctgcaaaggttagtgggctcttccatagctagtattgtaggagtccgtggtgggaacgtggatcactggagggctctcacttattcttt

SEQ ID NO: 150312 - DNA, 201 bp, Homo sapiens
tatggaagacattttactcctaactgctaaaggcagaactttcctgttcacagaagtagcttagagcctagtttccagtagaaaaggcacaaaaaggaaamgttggaaagccacaacgtactgcagagaaccaacaatgtgtgttatggagagaatttctgtttccactagtcatttatcagttccaggagccttttggca

SEQ ID NO: 150313 - DNA, 201 bp, Homo sapiens
ctccaagctatggaaccagatgaactaagtgatgctttacccacacaaccttagcttatccaccttgtgtcattcctcttttcacttcctaaacctgtgtratctgcccggctccccaaaatatgagagactgtgtcatttttgggcaagcctcctttaatggaggcaatgtgccaaattgcctgctattatggcccatgc

SEQ ID NO: 150314 - DNA, 201 bp, Homo sapiens
atttgtttcctacaaaatcaactttactattgtaataacaaaaacaaaaactatttagtacttactagggactaagcattgttccatatgttttgcatgtrttaactcattttatccacccatcctcctgccccccagttctgctgtggaaatactagtgttatgcacattttagacaaacaggaacaaaaaggtaaaact

SEQ ID NO: 150315 - DNA, 201 bp, Homo sapiens
tctccttcctttccatatgacccagggtgaaggacaagacaggggagcatccttctggctgttttctctccctggttcttgggtcccagcaccctgttaamtatgccacctatggtcgaaggcgtggtcctccaagctatggaaccagatgaactaagtgatgctttacccacacaaccttagcttatccaccttgtgtca

SEQ ID NO: 150316 - DNA, 201 bp, Homo sapiens
taactcattttatccacccatcctcctgccccccagttctgctgtggaaatactagtgttatgcacattttagacaaacaggaacaaaaaggtaaaacttyatctctggtaaatggtggaactaggacttgaacccaagtagtgggactctagagtctgcgctcgtaactactacactaaagcaacaacttaagctttctc

SEQ ID NO: 150317 - DNA, 201 bp, Homo sapiens
  misc_feature (1)...(201): n = A,T,C or G
ccttttggtgtattataggagatatattgctcatctccaacattttctgttgcttgcagagctgcctgatttttagctgctgtgagggtctggtttaggancagcataacatccctccatggcaggtgaaatacctgagttaaattttggaaagcctctaaatacctatcagggtcattagaaaactggcctaagtctcca

SEQ ID NO: 150318 - DNA, 201 bp, Homo sapiens
cactcaaggcctccccagcctgttcgtcaagttgtcctcaagtccaagaatggaatccatgtgtttgcaaaaaaagtttgctaattttaagtcctttcgtrtaagaattaatgagacaattttcctaccaaaggaagaacaaaaggataaatataatacaaaatatatgtatatggttgtttgacaaattatataacttag

SEQ ID NO: 150319 - DNA, 201 bp, Homo sapiens
ctatttcttcactttccctatctgctttcttcccttttggtgtattataggagatatattgctcatctccaacattttctgttgcttgcagagctgcctgmtttttagctgctgtgagggtctggtttaggaacagcataacatccctccatggcaggtgaaatacctgagttaaattttggaaagcctctaaatacctat

SEQ ID NO: 150320 - DNA, 201 bp, Homo sapiens
taaactttatcataagaatttatgtatatgaaaaaacagtatatacaaagttcagtactatccatggtttcaggcatccactgggggttttggaacgtatycctcacagataagtggggactactgtataaataatgcttttaagaacaaccatccagtcctggaattttcttttttggaagactttttgttagcgattca

SEQ ID NO: 150321 - DNA, 201 bp, Homo sapiens
ttccttttccatttatcttctgagttattggggttgcaattaggggtctttaccagaattgcctctctcccaattgggaatggtgtttttgctatttcttyactttccctatctgctttcttcccttttggtgtattataggagatatattgctcatctccaacattttctgttgcttgcagagctgcctgatttttagct

SEQ ID NO: 150322 - DNA, 201 bp, Homo sapiens
ggactgagggttgggtgagggggccttcgtgaagcatcacggctttaatgctgaaacttaaaggactagatttatatcagcaaagatgagagaggcagtaytgtgggcagagagaagagcagacacaaagcagcaggcagcctgccttctcccttccctcacgcacaccggcagggcatgtcactggagcaattgctgtaa

SEQ ID NO: 150323 - DNA, 201 bp, Homo sapiens
cttgcttctgtactttccttctaatattggggttctagtacagcctctctcagcctttctgtaaaggctacggaattcttatctggcttctggtctcttayagacagtttagagtaattgagagggttggtcctggttttccataggccttctaaaatgcatattaaaaagtgcttccttttccatttatcttctgagtta

SEQ ID NO: 150324 - DNA, 201 bp, Homo sapiens
atagcttgcttctgtactttccttctaatattggggttctagtacagcctctctcagcctttctgtaaaggctacggaattcttatctggcttctggtctmttacagacagtttagagtaattgagagggttggtcctggttttccataggccttctaaaatgcatattaaaaagtgcttccttttccatttatcttctga

SEQ ID NO: 150325 - DNA, 201 bp, Homo sapiens
  misc_feature (1)...(201): n = A,T,C or G
cccctggtccctattataaaagaccaaagtggccacattcaggaggttctctaaggtgctatctggtcctatagcttgcttctgtactttccttctaatantggggttctagtacagcctctctcagcctttctgtaaaggctacggaattcttatctggcttctggtctcttacagacagtttagagtaattgagagggt

SEQ ID NO: 150326 - DNA, 201 bp, Homo sapiens
ttttttttttttttaacaatgcagctgtgctggattgaaatgtcttaacatactcatgtctttaacagttatttatccttagactctgtggaacctagggycattcttatttcccagagagggagaaagaggatagagctctcaggactatccaaacaggcacaggattatcaaggtgcaaaggtacagaatcctgccata

SEQ ID NO: 150327 - DNA, 201 bp, Homo sapiens
gcctgcaaagttggtgctaccgtctctctccttctcctgagctttttctcttcttttgggcctccccctggtccctattataaaagaccaaagtggccacmttcaggaggttctctaaggtgctatctggtcctatagcttgcttctgtactttccttctaatattggggttctagtacagcctctctcagcctttctgta

SEQ ID NO: 150328 - DNA, 201 bp, Homo sapiens
tcttcatgcaatctccagccggctccttatgttagtctcagggcctgcaaaggttagtgggctcttccatagctagtattgtaggagtccgtggtgggaaygtggatcactggagggctctcacttattcttttcccaaattaaagagcttctccagactcccagttgatccccgccaaacaggctgcctcacttccctct

SEQ ID NO: 150329 - DNA, 201 bp, Homo sapiens
ggattaatcacttaggaagaattcgttaacggtgacctggccatttgttttttgaaagtgatctttgctgtgtggatgcagcactgttatggtgttccagwtgccattctaacccaaattaggtctttacctcagtcagttagctagctggccatgtcaggattggtgaagttcaaaaattagtcttcataatgttaaaag

SEQ ID NO: 150330 - DNA, 201 bp, Homo sapiens
acctgagccagatgccttacaccacgatgtgcatcaaggaatgcctccgcctctacgcaccggtagtaaacatatcccggttactcgacaaacccatcacytttccagatggacgctccttacctgcaggtcttaaaacttttttttttttttttaacaatgcagctgtgctggattgaaatgtcttaacatactcatgtc

SEQ ID NO: 150331 - DNA, 201 bp, Homo sapiens
ctggagtcggcatttgagtctcaggacccatcagtcctgctggaccatctgtgagagtggtcctgaacccagtgacctccacctctgggggcacttccatstccagtgatctgtgccacaggctggacagggtcacgctggctttgtcttgctgcctgggcactccttcttaaaatgccacaccgatagaaactagcggat

SEQ ID NO: 150332 - DNA, 201 bp, Homo sapiens
gttcagaaggaggtccgctttccttcctttaatttccagaatcacccagggctcccgtgctgtaatagcagtttgagccactggagtcggcatttgagtcycaggacccatcagtcctgctggaccatctgtgagagtggtcctgaacccagtgacctccacctctgggggcacttccatctccagtgatctgtgccacag

SEQ ID NO: 150333 - DNA, 201 bp, Homo sapiens
taaagaagtttcctctttttaattcagtgttatttttcacatggtatttattgtaatatttattacctacataatattgcatccatacacataatattccrcccacctagttgctccaacaaaacagctcagagtcaacttttactaccttttcccttaatcttgcatttcaataatacctaaatcctgtcaataagctct

SEQ ID NO: 150334 - DNA, 201 bp, Homo sapiens
ctggagttaaaggggagaaaggagactggctctaatgttcagaaggaggtccgctttccttcctttaatttccagaatcacccagggctcccgtgctgtamtagcagtttgagccactggagtcggcatttgagtctcaggacccatcagtcctgctggaccatctgtgagagtggtcctgaacccagtgacctccacctc

SEQ ID NO: 150335 - DNA, 201 bp, Homo sapiens
ttttaaatggcagcatgagcatggagagctaagagagcatacttggagtaggtataaatgttagctacctttccttgcttaattcaagtgctcttgtaagwgctattagctccgtcaattaagtgcttgtgcctggggagagacattatttagagtgactactgcttatcctgccttatgtacttcttgctttactggctg

SEQ ID NO: 150336 - DNA, 201 bp, Homo sapiens
tgaggataataacctgctaattttgtggtgatattttataggaggtccattggcggttttccttttaaatggcagcatgagcatggagagctaagagagcrtacttggagtaggtataaatgttagctacctttccttgcttaattcaagtgctcttgtaagagctattagctccgtcaattaagtgcttgtgcctgggga

SEQ ID NO: 150337 - DNA, 201 bp, Homo sapiens
ggatagagctctcaggactatccaaacaggcacaggattatcaaggtgcaaaggtacagaatcctgccatatggactgagggttgggtgagggggccttcrtgaagcatcacggctttaatgctgaaacttaaaggactagatttatatcagcaaagatgagagaggcagtactgtgggcagagagaagagcagacacaaa

SEQ ID NO: 150338 - DNA, 201 bp, Homo sapiens
ctggcaaatagagtttgccatcctgactgtaaccatcctgagaactgaaaagtatgcccttgagaagtggcctattttatttctgcaggggaatactgggrtttaatttctcttatgacgccttcctaaattagaaggggcttgaagcatgttgatgccctgaggcttccttgcctttgatttagctgcctgatcagctaa

SEQ ID NO: 150339 - DNA, 201 bp, Homo sapiens
tgcaaatagtagcatgactataacaattcccacaagagtggcatagtaaataatttcctttgaaaagtttacataacatttccctttggggatttacaaarttacaaatgcgattctacgaataattaaaatctccctgcaaatatgcgttaaaaagaggttttagtatctggtgatgatctttgagaggaaaggttagaa

SEQ ID NO: 150340 - DNA, 201 bp, Homo sapiens
tgcacagcctctaaataatagtaagaagtagcttttccttatcatgatataaggaaggttttcaagttacgtggaccttgcagaatcaaatgttgatagarctcactaccacttatttgtaagatgggccccaaaataatagagccacagtttgcaggtcttgacattaatggactttctgatcggggcttacttaactta

SEQ ID NO: 150341 - DNA, 201 bp, Homo sapiens
tataaccttctcttcatagcttaaagtggattatattatgaaccttcagtaaaaagtcctattaaacttaatgatagtaaaattttcatacttgtttcttrtccataactattactcctgccataagcaaaacaaccttgactaaatctttcctgcaattattaatcctgttataaggataataattaggcaagatattac

SEQ ID NO: 150342 - DNA, 201 bp, Homo sapiens
cttagagccacatccctattttatatttttttacaattctaaagaggcagaaatacttattcattcatagaagaggcactctggatataaatacagtccaygtctctaccaaattttcacagatgtgtgatactggtcacaggagccctggaataagtatgtctcaggataagagccctatatctgcgggggggggagaat

SEQ ID NO: 150343 - DNA, 201 bp, Homo sapiens
attgtaagttcctaaaattagctttggaattctgttaacaatatctatggatttcgtttttgtttttgtttttgttttttgtgggggtgggctggagggaktaggactgggatcttcactctcattacaggtctttaaccccttgagattctccagggaaaattctgaaaaaatacatccctatgccttcataccattctc

SEQ ID NO: 150344 - DNA, 201 bp, Homo sapiens
tattggatgctaaaacaactttagtgttaatctcacaattcctttcctttaattattaattttttctgactttcatagaccctcttacaacatacttaaamtttctgacatgtcctaaacattcttcctttaaacaaccagtcatcttttttaggacaagtatttaccatacaaaatcctttcttttataaaatcttcttc

SEQ ID NO: 150345 - DNA, 201 bp, Homo sapiens
taatctatcactaggttatatagcctctgctttcttgggatatattttcagtggtaggcttttggggaacatcaagcaggacttgtagtctccagacattrtaagttcctaaaattagctttggaattctgttaacaatatctatggatttcgtttttgtttttgtttttgttttttgtgggggtgggctggagggattag

SEQ ID NO: 150346 - DNA, 201 bp, Homo sapiens
acaattctaaagaggcagaaatacttattcattcatagaagaggcactctggatataaatacagtccatgtctctaccaaattttcacagatgtgtgataytggtcacaggagccctggaataagtatgtctcaggataagagccctatatctgcgggggggggagaatcacttacagttacatgtgaaaagtggtaagtg

SEQ ID NO: 150347 - DNA, 201 bp, Homo sapiens
aaatatgatattggatgctaaaacaactttagtgttaatctcacaattcctttcctttaattattaattttttctgactttcatagaccctcttacaacayacttaaaatttctgacatgtcctaaacattcttcctttaaacaaccagtcatcttttttaggacaagtatttaccatacaaaatcctttcttttataaaa

SEQ ID NO: 150348 - DNA, 201 bp, Homo sapiens
gacgagttaatgggtgcagcacaccaacatggcacatgtatacatatgtaacaaaccttcatgttgtgcatatgtaccctaaaacttaaagtataattttwaaaaaaaagtaaaagagaaaaaaaaaaagacagaatcttcgctcatgcacttacctgctttttcttctgtttactcaggaataactgtgtttatcaatat

SEQ ID NO: 150349 - DNA, 201 bp, Homo sapiens
acctacctatgtatcaagttacacatctgcaattttttttttttgatggagtcttgctctgttgcccaggctggagtgcaatggtgcaatctctgctcccygcaaactctgcctcccagattcaagcaattctcctgcctccacctcccaagtagctggaactacaggcgcatgtcaccacgcctggctaattttttgtat

SEQ ID NO: 150350 - DNA, 201 bp, Homo sapiens
ccaacaatgatagactggattaagaaaatgtggctcatatacactatggaatactatgcagccataaaaaatgatgagttcatgtcctttgtagggacacrgatgaagctggaaaccatcattctcagcaaactatcgcaaggacaaaaaaccaaacgccgcatgttctcactcataggtgggaattgagcagtgagaaca

SEQ ID NO: 150351 - DNA, 201 bp, Homo sapiens
gaagtcagtgtggcgatttctcagggatctagaactagaaataccatttgacccagccatcccattactaggtatatacccaaaggattataaatcgtgcygctataaagacacatgcacacgtatgtttattgtggcactattcacaatagcaaagacttggaaccaacccaaatgtccaacaatgatagactggattaa

SEQ ID NO: 150352 - DNA, 201 bp, Homo sapiens
cagaaatgctaatttgtacctcttaaatgaatgtgctacataaatgctatgtagagggtattatattattgactatatatagctgtattttaatgtttggwgttagaactaatacaataagcaaaacatctgtctattttgcttcatttcttatggagcagcttcagatgtgaagaaaagtaaaagtgaaaggaagtacat

SEQ ID NO: 150353 - DNA, 201 bp, Homo sapiens
ggcatggtcatcattcagaaatgctaatttgtacctcttaaatgaatgtgctacataaatgctatgtagagggtattatattattgactatatatagctgyattttaatgtttggtgttagaactaatacaataagcaaaacatctgtctattttgcttcatttcttatggagcagcttcagatgtgaagaaaagtaaaag

SEQ ID NO: 150354 - DNA, 201 bp, Homo sapiens
acccatcacctttccagatggacgctccttacctgcaggtcttaaaacttttttttttttttttaacaatgcagctgtgctggattgaaatgtcttaacayactcatgtctttaacagttatttatccttagactctgtggaacctagggccattcttatttcccagagagggagaaagaggatagagctctcaggactat

SEQ ID NO: 150355 - DNA, 201 bp, Homo sapiens
aggcacaggattatcaaggtgcaaaggtacagaatcctgccatatggactgagggttgggtgagggggccttcgtgaagcatcacggctttaatgctgaamcttaaaggactagatttatatcagcaaagatgagagaggcagtactgtgggcagagagaagagcagacacaaagcagcaggcagcctgccttctcccttc

SEQ ID NO: 150356 - DNA, 201 bp, Homo sapiens
aacctgcttgatactaagcagtccacgctggtattggtggtggcggtgatgggctgagcaggccagtccccagcccgcagttgacacatgtgggtggatamcagctgtggtggtagcagcagattgagtgagcccaacctcagaccccaggagaagtgctcaggtgccaatgatagactgggcagggcagtctctagggcc

SEQ ID NO: 150357 - DNA, 201 bp, Homo sapiens
gggcaccaaggtgatgtatactagcaccagtgttagctactccaggcagaccaactctttccaggtggcttgcctgggttctggaaatggcagtggtgggycaggtaggtgggtgagctcttgcgcacctaggcatcaggcatgtcggacaacctgcttgatactaagcagtccacgctggtattggtggtggcggtgatg

SEQ ID NO: 150358 - DNA, 201 bp, Homo sapiens
tgatgtagccagatcatagagttttctgaaggccaacctttgtgttcagtctttctcaatcaagcagcagacagatttaagacgtctaagctgggtggcaygattatagttattttttagaaagattaatacattggtggaatgcaagatggattgaaaggcaacattagagacataaaggaatgagccagaatttatctt

SEQ ID NO: 150359 - DNA, 201 bp, Homo sapiens
tctaagctgggtggcatgattatagttattttttagaaagattaatacattggtggaatgcaagatggattgaaaggcaacattagagacataaaggaatragccagaatttatctttgacctatgtcgagatgtgtttctacaacttcctccaatttaaccgtctttcaaatattggatttgattgggcaatctaattaa

SEQ ID NO: 150360 - DNA, 201 bp, Homo sapiens
ccatgtctctaccaaattttcacagatgtgtgatactggtcacaggagccctggaataagtatgtctcaggataagagccctatatctgcgggggggggaraatcacttacagttacatgtgaaaagtggtaagtgttaacatttagcttttcctaagacatacttgatacatctgaagtcctcctttgggtaaagaacaa

SEQ ID NO: 150361 - DNA, 201 bp, Homo sapiens
taagttcaggcttaggccatttttataacttgcaatatgattgggagaaatatgatattggatgctaaaacaactttagtgttaatctcacaattcctttyctttaattattaattttttctgactttcatagaccctcttacaacatacttaaaatttctgacatgtcctaaacattcttcctttaaacaaccagtcatc

SEQ ID NO: 150362 - DNA, 201 bp, Homo sapiens
cagttaggtttgcttagagaataagttcaggcttaggccatttttataacttgcaatatgattgggagaaatatgatattggatgctaaaacaactttagygttaatctcacaattcctttcctttaattattaattttttctgactttcatagaccctcttacaacatacttaaaatttctgacatgtcctaaacattct

SEQ ID NO: 150363 - DNA, 201 bp, Homo sapiens
tatgtggattaatcacttaggaagaattcgttaacggtgacctggccatttgttttttgaaagtgatctttgctgtgtggatgcagcactgttatggtgtyccagttgccattctaacccaaattaggtctttacctcagtcagttagctagctggccatgtcaggattggtgaagttcaaaaattagtcttcataatgtt

SEQ ID NO: 150364 - DNA, 201 bp, Homo sapiens
gaacaagctatttttttgagaacccttagatcaacctcaggaggaggcccaactgcctttctcccacacaacgccccttttcagcaggcagtagcaagaargaattgtcgtccaatgccccttcacagcagttaggtttgcttagagaataagttcaggcttaggccatttttataacttgcaatatgattgggagaaata

SEQ ID NO: 150365 - DNA, 201 bp, Homo sapiens
taaaggaatgagccagaatttatctttgacctatgtcgagatgtgtttctacaacttcctccaatttaaccgtctttcaaatattggatttgattgggcartctaattaaatgtagcaatatttaattgctactgtgctaccatagttgcccaatagcaattaaatatttgtttcctacaaaatcaactttactattgtaa

SEQ ID NO: 150366 - DNA, 201 bp, Homo sapiens
tggtaggcttttggggaacatcaagcaggacttgtagtctccagacattgtaagttcctaaaattagctttggaattctgttaacaatatctatggatttygtttttgtttttgtttttgttttttgtgggggtgggctggagggattaggactgggatcttcactctcattacaggtctttaaccccttgagattctcca

SEQ ID NO: 150367 - DNA, 201 bp, Homo sapiens
attctctaatgacaagtcaagggggaaatgtatgcttttcttaagaaaaatgttacttttatgttaatgtttctggtaatgcacagcgacacctaatggasgcaaaccaatattgcaatccattggtgtaacaggtatcaaactctgttatggcctatagttatccccattaacagtgatactcttaatactcatattcta

SEQ ID NO: 150368 - DNA, 201 bp, Homo sapiens
aacttacaagggatgtgaaggacctcttcaaggagaactacaaaccgctgctcaatgaaataaaagaggatacaaacaaatggaagaacattccatgctcmtgggtaggaagaatcaatatcgtgaaaatggccatactgcccaaggtaatttatagtttcaatgccatccctatcaagctaccaatgactttcttcacag

SEQ ID NO: 150369 - DNA, 201 bp, Homo sapiens
cccaaagtgctaggattacaggcgtgagccactgtgctcagccaaggtttatttctcatatgcagcatttatttagattttgcttatgtagtctgaaaatmtttgtgctttggttagagcatttaaaccacttatatttaatgtaatcactagaatatttggatttcaacatgccgtgtaactatttgttttctatttaac

SEQ ID NO: 150370 - DNA, 201 bp, Homo sapiens
tcattgaaataaatgtattggctgggcaggtggctcatgcctgtaatccgaacactttgtgaggtcaaggtgggaggatcgcttgagtctgggcaacacamgaccccatctctacaaaaagataaaataaaataaaacagtgcatcatggccaagtaagtaggtcatattccaaaactgaaaagattgttcaatattagga

SEQ ID NO: 150371 - DNA, 201 bp, Homo sapiens
cctggtttagtcttgggagggtgtatgcgtccagtaatttatccatttcttctagatttactagtttatttgcttagaggcgtttatagtattctctgatrgtagtttgtatttctgtgggattggtggtgacatccctttatcatttttttttcgtctatttgattcttcaaatgtgtctatttgattctccaatttttt

SEQ ID NO: 150372 - DNA, 201 bp, Homo sapiens
aattaatggtttgccactaaagcagcattcattcagaagagaagctataatagtaaatgcgaaatatttttattaataaaagaattaaattaaacattgaygtcgaaaacaactggaaataaatcagttggggaaagaataaaagagtaaactaaaaggaaacaggtgaattaacaaaggcgaaagcaaaaggtaatggta

SEQ ID NO: 150373 - DNA, 201 bp, Homo sapiens
attcagagattcaacttcttcctggtttagtcttgggagggtgtatgcgtccagtaatttatccatttcttctagatttactagtttatttgcttagaggygtttatagtattctctgatagtagtttgtatttctgtgggattggtggtgacatccctttatcatttttttttcgtctatttgattcttcaaatgtgtct

SEQ ID NO: 150374 - DNA, 201 bp, Homo sapiens
tgagaattaatggtttgccactaaagcagcattcattcagaagagaagctataatagtaaatgcgaaatatttttattaataaaagaattaaattaaacaytgacgtcgaaaacaactggaaataaatcagttggggaaagaataaaagagtaaactaaaaggaaacaggtgaattaacaaaggcgaaagcaaaaggtaat

SEQ ID NO: 150375 - DNA, 201 bp, Homo sapiens
cctccttgtccctctggtagaatttggctgtgaatccatctggtcctgtactttttttggttggtaggctattaattattgcctcaatttcagagcctgtyattggtctattcagagattcaacttcttcctggtttagtcttgggagggtgtatgcgtccagtaatttatccatttcttctagatttactagtttatttg

SEQ ID NO: 150376 - DNA, 201 bp, Homo sapiens
gctggccatgtcaggattggtgaagttcaaaaattagtcttcataatgttaaaagccacaattcatcatgaacataagacagctattgatacctacctatrtatcaagttacacatctgcaattttttttttttgatggagtcttgctctgttgcccaggctggagtgcaatggtgcaatctctgctccctgcaaactctg

SEQ ID NO: 150377 - DNA, 201 bp, Homo sapiens
tcctcttttatttcattgagcagtagtttatagttctccttgaagaggtccttcacatcccttgtaagttggattcctaggtattttattctctttgaagsaattgtaaatgggagttcactcatgatttgctctctgtttgtctgttattggtgtataagaatgcttgtgatttttgcacattgattttgtatcctgaga

SEQ ID NO: 150378 - DNA, 201 bp, Homo sapiens
tagcaatatgtggattaatcacttaggaagaattcgttaacggtgacctggccatttgttttttgaaagtgatctttgctgtgtggatgcagcactgttayggtgttccagttgccattctaacccaaattaggtctttacctcagtcagttagctagctggccatgtcaggattggtgaagttcaaaaattagtcttcat

SEQ ID NO: 150379 - DNA, 201 bp, Homo sapiens
cagttgcaggcagtcattaatctgcttttcataagtttttttccagggaatcttcactgacattgagttagagtcattgaggtgttttcagattttctacrtggccaaaaaaaaaaaaaaagatgacaaaccaccaaaagttatgaattctatttcctttttgccctaaggctccatggagatttaagacctcaataaagt

SEQ ID NO: 150380 - DNA, 201 bp, Homo sapiens
tgtgaagaaagtcattggtagcttgatggggatggcattgaatgtataaattaccttgggcagtatggccattttcacgatattgattcttcctacccatkagcatggaatgttcttccatttgtttgtatcctcttttatttcattgagcagtagtttatagttctccttgaagaggtccttcacatcccttgtaagttg

SEQ ID NO: 150381 - DNA, 201 bp, Homo sapiens
cttccagaaaccatttaaaagagaacaaggcttctggaaccaaaaattgaaaaatgaaagaatgtgtactgccaggatataaacctaatccaaccatagargttagaccctatgattgaggcttgggagagttaaataacattgggtttttgaagctctaaacttcaaaatctctgacccatgttaagaaagcaaatttct

SEQ ID NO: 150382 - DNA, 201 bp, Homo sapiens
ataattgatgagcctgtgaatcatacttcttaggtattagctactactgaacttcaatgggcagtctgttctgatgatcttggtgagacttccagaaaccrtttaaaagagaacaaggcttctggaaccaaaaattgaaaaatgaaagaatgtgtactgccaggatataaacctaatccaaccatagaggttagaccctat

SEQ ID NO: 150383 - DNA, 201 bp, Homo sapiens
aattttttcattgaccatgatttgagactcacccaaaggagctaataattgatgagcctgtgaatcatacttcttaggtattagctactactgaacttcartgggcagtctgttctgatgatcttggtgagacttccagaaaccatttaaaagagaacaaggcttctggaaccaaaaattgaaaaatgaaagaatgtgtac

SEQ ID NO: 150384 - DNA, 201 bp, Homo sapiens
gggagtttgaggctgcagcaaactataatcacaccacttccctccagcctgggcaacatagtgagaccttgtctcaaaaaaattttttcattgaccatgakttgagactcacccaaaggagctaataattgatgagcctgtgaatcatacttcttaggtattagctactactgaacttcaatgggcagtctgttctgatga

SEQ ID NO: 150385 - DNA, 201 bp, Homo sapiens
gtatgtctcaggataagagccctatatctgcgggggggggagaatcacttacagttacatgtgaaaagtggtaagtgttaacatttagcttttcctaagayatacttgatacatctgaagtcctcctttgggtaaagaacaaaatcattctcagttacaaaaatggagaaaagctgggctttcagtgcaatgcctaagtga

SEQ ID NO: 150386 - DNA, 201 bp, Homo sapiens
cgtctggagctctttcaacatgtctccctgatgaccctggacagcatcatgaagtgtgccttcagccaccagggcagcatccagttggacaggtcagtgayaaaaggaaggtaattgtttgccaataactgtgtcacccactaacatgttgttccatcttccctattccagtaccctggactcatacctgaaagcagtgtt

SEQ ID NO: 150387 - DNA, 201 bp, Homo sapiens
acgtctggagctctttcaacatgtctccctgatgaccctggacagcatcatgaagtgtgccttcagccaccagggcagcatccagttggacaggtcagtgrcaaaaggaaggtaattgtttgccaataactgtgtcacccactaacatgttgttccatcttccctattccagtaccctggactcatacctgaaagcagtgt

SEQ ID NO: 150388 - DNA, 201 bp, Homo sapiens
aggttggcctaaagccccctctccctgcaggaggagaagaaccccaacacggagttctacttgaagaacctgatgatgagcacgttgaacctcttcattgsaggcaccgagacggtcagcaccaccctgcgctatggcttcttgctgctcatgaagcacccagaggtggagggtaaggctggagggggacggaagtggagg

SEQ ID NO: 150389 - DNA, 201 bp, Homo sapiens; identical to SEQ ID NO: 27983

SEQ ID NO: 150390 - DNA, 201 bp, Homo sapiens; identical to SEQ ID NO: 27985

SEQ ID NO: 150391 - DNA, 201 bp, Homo sapiens; identical to SEQ ID NO: 27988

SEQ ID NO: 150392 - DNA, 201 bp, Homo sapiens
ggagttcgagtccagcctgtgcaacttagcaagaccaagtcagtgtaagaaaaaaaaaactgacagctaagttgataattaaaggacagatggtcagcaasgtaaagaaggtgagaagaaagagcattttgggcaaagccagcagccagggcaagggctggaacctagagcgagtctggtagatctagggtccctctttcc

SEQ ID NO: 150393 - DNA, 201 bp, Homo sapiens
tggaggattgcttgagcccaggagttcgagtccagcctgtgcaacttagcaagaccaagtcagtgtaagaaaaaaaaaactgacagctaagttgataattraaggacagatggtcagcaacgtaaagaaggtgagaagaaagagcattttgggcaaagccagcagccagggcaagggctggaacctagagcgagtctggta

SEQ ID NO: 150394 - DNA, 201 bp, Homo sapiens
cgcgtgtgcagttccagctactcaggaggctaagggtggaggattgcttgagcccaggagttcgagtccagcctgtgcaacttagcaagaccaagtcagtrtaagaaaaaaaaaactgacagctaagttgataattaaaggacagatggtcagcaacgtaaagaaggtgagaagaaagagcattttgggcaaagccagcag

SEQ ID NO: 150395 - DNA, 201 bp, Homo sapiens
cagctctctcacctgggcacatgttcccatccccaacttaccgtaatttctaacagatgctccctacccagttcttctgaatattttaacacctggacaartgactgcgtcaacccgcctcctgcatgcctgaacacctggtgctgcaaaatccagcccatcataatcatttcacatctacacaaatgtcccagattagcc

SEQ ID NO: 150396 - DNA, 201 bp, Homo sapiens
gcctgtctccaaggacacctggatagctcaacagatgctccccaaaacagagcctgctggtaggatacataccctcagctcagctctctcacctgggcacrtgttcccatccccaacttaccgtaatttctaacagatgctccctacccagttcttctgaatattttaacacctggacaaatgactgcgtcaacccgcctc

SEQ ID NO: 150397 - DNA, 201 bp, Homo sapiens
ctccctgcaggaggagaagaaccccaacacggagttctacttgaagaacctgatgatgagcacgttgaacctcttcattgcaggcaccgagacggtcagcrccaccctgcgctatggcttcttgctgctcatgaagcacccagaggtggagggtaaggctggagggggacggaagtggagggccccagaccctcaaaattc

SEQ ID NO: 150398 - DNA, 201 bp, Homo sapiens
tcttgctgctcatgaagcacccagaggtggagggtaaggctggagggggacggaagtggagggccccagaccctcaaaattccccttcgactggtgcaatrtccctacctgtcccagatcccaggaccctgagacgtgccttgctgtccagagacagggcaacattcagctggtaggcatcagctgagtctcattagctat

SEQ ID NO: 150399 - DNA, 201 bp, Homo sapiens
caagtcagtgtaagaaaaaaaaaactgacagctaagttgataattaaaggacagatggtcagcaacgtaaagaaggtgagaagaaagagcattttgggcaragccagcagccagggcaagggctggaacctagagcgagtctggtagatctagggtccctctttccacctttggtctggaccaaagagaggtagatccaaa

SEQ ID NO: 150400 - DNA, 201 bp, Homo sapiens
tggtccgctcctgccaccgccgccccctgacctctctccacccccgccttgacctccccaggcgtggcgttcagcaacggggagcgcgccaagcagctcckgcgctttgccatcgccaccctgagggacttcggggtgggcaagcgaggcatcgaggagcgcatccaggaggagtcgggcttcctcatcgaggccatccgg

SEQ ID NO: 150401 - DNA, 201 bp, Homo sapiens
tctcccaccccactacccctctgctccacccttggggagccccttggaactggtccgctcctgccaccgccgccccctgacctctctccacccccgccttsacctccccaggcgtggcgttcagcaacggggagcgcgccaagcagctcctgcgctttgccatcgccaccctgagggacttcggggtgggcaagcgaggca

SEQ ID NO: 150402 - DNA, 201 bp, Homo sapiens
cttcggggtgggcaagcgaggcatcgaggagcgcatccaggaggagtcgggcttcctcatcgaggccatccggagcacgcacggtgagtaaggttccccgmgtgcgggggcaggagaaggaaaacacccaggacgaggaacccgcgcgcgttctgcctgcggatggggactaggtggggaaaggcgcccgcacttccagcc

SEQ ID NO: 150403 - DNA, 201 bp, Homo sapiens
ctgcaagggctggaggacttcatagccaagaaggtggagcacaaccagcgcacgctggatcccaattccccacaggacttcatcgactcctttctcatccrcatgcaggaggtacaccccagcagccagtgcggggaggtgcaaagccaggcagagggaaatcagactgggagtggggcgggcagacgacacagacccgtt

SEQ ID NO: 150404 - DNA, 201 bp, Homo sapiens
cccgatattggacaactggacagttgcaccagaagcctgtctccaaggacacctggatagctcaacagatgctccccaaaacagagcctgctggtaggatrcataccctcagctcagctctctcacctgggcacatgttcccatccccaacttaccgtaatttctaacagatgctccctacccagttcttctgaatatttt

SEQ ID NO: 150405 - DNA, 201 bp, Homo sapiens
ttcacaggaccccaactcctccatgcctgccacttccccttatctggggcaccccagttccctctccagcccctgtgtactttcaccaatcccctaacctkcctcatcacacacaacttcctcctccctaccagggcaccgaagtgttccctatgctgggctccgtgctgagagaccccagcttcttctccaaccctcagg

SEQ ID NO: 150406 - DNA, 201 bp, Homo sapiens
agtttgcacctgtcctgggcactggcactgaatccatctctctcccaccccactacccctctgctccacccttggggagccccttggaactggtccgctcmtgccaccgccgccccctgacctctctccacccccgccttgacctccccaggcgtggcgttcagcaacggggagcgcgccaagcagctcctgcgctttgcc

SEQ ID NO: 150407 - DNA, 201 bp, Homo sapiens
cttcacaggaccccaactcctccatgcctgccacttccccttatctggggcaccccagttccctctccagcccctgtgtactttcaccaatcccctaaccygcctcatcacacacaacttcctcctccctaccagggcaccgaagtgttccctatgctgggctccgtgctgagagaccccagcttcttctccaaccctcag

SEQ ID NO: 150408 - DNA, 201 bp, Homo sapiens
cctccttcacaggaccccaactcctccatgcctgccacttccccttatctggggcaccccagttccctctccagcccctgtgtactttcaccaatcccctracctgcctcatcacacacaacttcctcctccctaccagggcaccgaagtgttccctatgctgggctccgtgctgagagaccccagcttcttctccaaccc

SEQ ID NO: 150409 - DNA, 201 bp, Homo sapiens
tcctccttcacaggaccccaactcctccatgcctgccacttccccttatctggggcaccccagttccctctccagcccctgtgtactttcaccaatccccyaacctgcctcatcacacacaacttcctcctccctaccagggcaccgaagtgttccctatgctgggctccgtgctgagagaccccagcttcttctccaacc

SEQ ID NO: 150410 - DNA, 201 bp, Homo sapiens
cacagccctgggtcttcctagccccgagactttcaagtccatatgcctggagtcccccctcctgagacccttaaccctgcatcctccgcaacagaagaccyccagatgcacagccacacttccatctcaccctaataaaacccagacctttggattcctctcccttggaatgcccaaatccacaactttggggtgcattct

SEQ ID NO: 150411 - DNA, 201 bp, Homo sapiens; identical to SEQ ID NO: 28008

SEQ ID NO: 150412 - DNA, 201 bp, Homo sapiens
cttcctgtttcagagatgtgaaccttctattccccaaagctcctccttcacaggaccccaactcctccatgcctgccacttccccttatctggggcacccyagttccctctccagcccctgtgtactttcaccaatcccctaacctgcctcatcacacacaacttcctcctccctaccagggcaccgaagtgttccctatg

SEQ ID NO: 150413 - DNA, 201 bp, Homo sapiens; identical to SEQ ID NO: 27979

SEQ ID NO: 150414 - DNA, 201 bp, Homo sapiens
aacttcctgtttcagagatgtgaaccttctattccccaaagctcctccttcacaggaccccaactcctccatgcctgccacttccccttatctggggcacmccagttccctctccagcccctgtgtactttcaccaatcccctaacctgcctcatcacacacaacttcctcctccctaccagggcaccgaagtgttcccta

SEQ ID NO: 150415 - DNA, 201 bp, Homo sapiens; identical to SEQ ID NO: 27980

SEQ ID NO: 150416 - DNA, 201 bp, Homo sapiens
atgtctcccaaacttcctgtttcagagatgtgaaccttctattccccaaagctcctccttcacaggaccccaactcctccatgcctgccacttccccttayctggggcaccccagttccctctccagcccctgtgtactttcaccaatcccctaacctgcctcatcacacacaacttcctcctccctaccagggcaccgaa

SEQ ID NO: 150417 - DNA, 201 bp, Homo sapiens; identical to SEQ ID NO: 27981

SEQ ID NO: 150418 - DNA, 201 bp, Homo sapiens; identical to SEQ ID NO: 27982

SEQ ID NO: 150419 - DNA, 201 bp, Homo sapiens; identical to SEQ ID NO: 27984

SEQ ID NO: 150420 - DNA, 201 bp, Homo sapiens; identical to SEQ ID NO: 27986

SEQ ID NO: 150421 - DNA, 201 bp, Homo sapiens; identical to SEQ ID NO: 27987

SEQ ID NO: 150422 - DNA, 201 bp, Homo sapiens
gctacacactcctcctcccagaaactccacacccacagccctgggtcttcctagccccgagactttcaagtccatatgcctggagtcccccctcctgagamccttaaccctgcatcctccgcaacagaagacccccagatgcacagccacacttccatctcaccctaataaaacccagacctttggattcctctcccttgg

SEQ ID NO: 150423 - DNA, 201 bp, Homo sapiens; identical to SEQ ID NO: 27993

SEQ ID NO: 150424 - DNA, 201 bp, Homo sapiens; identical to SEQ ID NO: 27994

SEQ ID NO: 150425 - DNA, 201 bp, Homo sapiens; identical to SEQ ID NO: 27995

SEQ ID NO: 150426 - DNA, 201 bp, Homo sapiens; identical to SEQ ID NO: 27997

SEQ ID NO: 150427 - DNA, 201 bp, Homo sapiens
acaaggccctgcctcctggaattctgattctcctcagacctctgagttgactctctccccaacccccttctccctccacacccgcaggcgccaatatcgakcccaccttcttcctgagccgcacagtctccaatgtcatcagctccattgtctttggggaccgctttgactatgaggacaaagagttcctgtcactgctga

SEQ ID NO: 150428 - DNA, 201 bp, Homo sapiens
caaaatccagcccatcataatcatttcacatctacacaaatgtcccagattagcccactggaatatctggccaagcgccctctacttcacccacttaaatrcctgaaaacatggacagctgccctaaccaacaccttaaacacacaaatatctagacagattgttccctgacacacaaataagtgttccccaaccctttcc

SEQ ID NO: 150429 - DNA, 201 bp, Homo sapiens
gttcttctcacctaaattactagaccgtggccctggtacctaaccttcctgaaaacttagatataagttcctatccgaccccactgaaatacctaaacaaygagacagatgcctttaactcagttccttccttgctatgaaacaaatcccattcccatcagctcctgccccgtgacagctgtccttcccttcccatcctct

SEQ ID NO: 150430 - DNA, 201 bp, Homo sapiens
atcggcaagaaccggcagcccaagtttgaggaccggaccaagatgccctacatggaggcagtgatccacgagatccaaagatttggagacgtgatccccaygagtttggcccgcagggttaaaaaggacaccaagtttcgggattttttcctccctaaggtgctatcctccccaccccctagactacggggacttccagcc

SEQ ID NO: 150431 - DNA, 201 bp, Homo sapiens
aaacccatagaactgtataacacagagtaaaccctagtgtaaactatggactttgttagtaataatatatcaatattggttcaccattgttacatctcttrtagaaagaaactgaggctcagggaggatcagagcctcctctgaaactctctcaggccataatattccacccctcctccctgggagagccgcagctggagg

SEQ ID NO: 150432 - DNA, 201 bp, Homo sapiens
ccattgctacacctggcatggatcaccccatctatgatggatgtgtgacattatgcctttttcaaaacccatagaactgtataacacagagtaaaccctartgtaaactatggactttgttagtaataatatatcaatattggttcaccattgttacatctcttgtagaaagaaactgaggctcagggaggatcagagcct

SEQ ID NO: 150433 - DNA, 201 bp, Homo sapiens
gaaactccacacccacagccctgggtcttcctagccccgagactttcaagtccatatgcctggagtcccccctcctgagacccttaaccctgcatcctccrcaacagaagacccccagatgcacagccacacttccatctcaccctaataaaacccagacctttggattcctctcccttggaatgcccaaatccacaactt

SEQ ID NO: 150434 - DNA, 201 bp, Homo sapiens
gccaacttgtttcccatcctcgcatacacctgggggcagtcccaaagccaacacgatgcctttccctccctggccatacctgatgctgatatcagaacccrccaatgtcatcagtgtgtccactgctgatgccagtcccagcactcacctcctgctaaggctggcctgcacttgactcccagggtgatctaggccagtcaa

SEQ ID NO: 150435 - DNA, 201 bp, Homo sapiens
ggaggagaagaaccccaacacggagttctacttgaagaacctgatgatgagcacgttgaacctcttcattgcaggcaccgagacggtcagcaccaccctgygctatggcttcttgctgctcatgaagcacccagaggtggagggtaaggctggagggggacggaagtggagggccccagaccctcaaaattccccttcgac

SEQ ID NO: 150436 - DNA, 201 bp, Homo sapiens
caacggggagcgcgccaagcagctcctgcgctttgccatcgccaccctgagggacttcggggtgggcaagcgaggcatcgaggagcgcatccaggaggagbcgggcttcctcatcgaggccatccggagcacgcacggtgagtaaggttccccgagtgcgggggcaggagaaggaaaacacccaggacgaggaacccgcgc

SEQ ID NO: 150437 - DNA, 201 bp, Homo sapiens
tctgttctgttatgaatgctctacctccgtctcatagggggagccgtatcatccaccccgttttacctattcagactatcatttcctgctctgagactccyagatacctaaacacattccccctcctcccccagccaaggtccatgaggagattgacagagtgatcggcaagaaccggcagcccaagtttgaggaccggac

SEQ ID NO: 150438 - DNA, 201 bp, Homo sapiens
agcagaccccacctccaacactgggagctacaattcaacatgagatttggtggggacacagatccaaaccatatcagtgctcaacataattatcatcagasaaatgcaaatcaaaactacaatgagatgtcatctcaccctagttcaaatggtttttatccaaaagacaggcaataacaaatgctggcaagaatgtggaga

SEQ ID NO: 150439 - DNA, 201 bp, Homo sapiens
gtgcaacttagcaagaccaagtcagtgtaagaaaaaaaaaactgacagctaagttgataattaaaggacagatggtcagcaacgtaaagaaggtgagaagraagagcattttgggcaaagccagcagccagggcaagggctggaacctagagcgagtctggtagatctagggtccctctttccacctttggtctggaccaa

SEQ ID NO: 150440 - DNA, 201 bp, Homo sapiens
atgtctgttctgttatgaatgctctacctccgtctcatagggggagccgtatcatccaccccgttttacctattcagactatcatttcctgctctgagacycccagatacctaaacacattccccctcctcccccagccaaggtccatgaggagattgacagagtgatcggcaagaaccggcagcccaagtttgaggaccg

SEQ ID NO: 150441 - DNA, 201 bp, Homo sapiens
cctactccaacaatgcgaatggccgatgtctgttctgttatgaatgctctacctccgtctcatagggggagccgtatcatccaccccgttttacctattcrgactatcatttcctgctctgagactcccagatacctaaacacattccccctcctcccccagccaaggtccatgaggagattgacagagtgatcggcaaga

SEQ ID NO: 150442 - DNA, 201 bp, Homo sapiens
ccctgtgattctggcacaacctggttaacaggatcctactccaacaatgcgaatggccgatgtctgttctgttatgaatgctctacctccgtctcataggkggagccgtatcatccaccccgttttacctattcagactatcatttcctgctctgagactcccagatacctaaacacattccccctcctcccccagccaag

SEQ ID NO: 150443 - DNA, 201 bp, Homo sapiens
gcacaaccagcgcacgctggatcccaattccccacaggacttcatcgactcctttctcatccacatgcaggaggtacaccccagcagccagtgcggggagrtgcaaagccaggcagagggaaatcagactgggagtggggcgggcagacgacacagacccgttcaaattagccctcatcataataatcctcacaattggct

SEQ ID NO: 150444 - DNA, 201 bp, Homo sapiens
ctcctgccaccgccgccccctgacctctctccacccccgccttgacctccccaggcgtggcgttcagcaacggggagcgcgccaagcagctcctgcgcttygccatcgccaccctgagggacttcggggtgggcaagcgaggcatcgaggagcgcatccaggaggagtcgggcttcctcatcgaggccatccggagcacgc

SEQ ID NO: 150445 - DNA, 201 bp, Homo sapiens
tctcattagctattaaaatattgaaaatgtctgcactgattggtcagtcacttctgtcccaagcccactgagtgcccgctgccccttcccccgggtcatcycctaagttcctccctgtgcctcccctgtgattctggcacaacctggttaacaggatcctactccaacaatgcgaatggccgatgtctgttctgttatgaa

SEQ ID NO: 150446 - DNA, 201 bp, Homo sapiens
cctctgctccacccttggggagccccttggaactggtccgctcctgccaccgccgccccctgacctctctccacccccgccttgacctccccaggcgtggygttcagcaacggggagcgcgccaagcagctcctgcgctttgccatcgccaccctgagggacttcggggtgggcaagcgaggcatcgaggagcgcatccag

SEQ ID NO: 150447 - DNA, 201 bp, Homo sapiens
gtaggcatcagctgagtctcattagctattaaaatattgaaaatgtctgcactgattggtcagtcacttctgtcccaagcccactgagtgcccgctgcccsttcccccgggtcatctcctaagttcctccctgtgcctcccctgtgattctggcacaacctggttaacaggatcctactccaacaatgcgaatggccgatg

SEQ ID NO: 150448 - DNA, 201 bp, Homo sapiens
tccctgggagagccgcagctggaggtcggtactggggcgaggctgcactgagagtgggcttcacctccacccctcccgcctctcctcctcaggaaagcggwactgtttcggagaaggcctggccagaatggagctctttctcttcttcaccaccgtcatgcagaacttccgcctcaagtcctcccagtcacctaaggacat

SEQ ID NO: 150449 - DNA, 201 bp, Homo sapiens
tcaggaaagcggaactgtttcggagaaggcctggccagaatggagctctttctcttcttcaccaccgtcatgcagaacttccgcctcaagtcctcccagtmacctaaggacattgacgtgtcccccaaacacgtggtctttgccacgatcccacgaaactacaccatgagcttcctgccccgctgagcgagggctgtgccg

SEQ ID NO: 150450 - DNA, 201 bp, Homo sapiens
gaaactgaggctcagggaggatcagagcctcctctgaaactctctcaggccataatattccacccctcctccctgggagagccgcagctggaggtcggtastggggcgaggctgcactgagagtgggcttcacctccacccctcccgcctctcctcctcaggaaagcggaactgtttcggagaaggcctggccagaatgga

SEQ ID NO: 150451 - DNA, 201 bp, Homo sapiens
catccccaacttaccgtaatttctaacagatgctccctacccagttcttctgaatattttaacacctggacaaatgactgcgtcaacccgcctcctgcatrcctgaacacctggtgctgcaaaatccagcccatcataatcatttcacatctacacaaatgtcccagattagcccactggaatatctggccaagcgccctc

SEQ ID NO: 150452 - DNA, 201 bp, Homo sapiens
ggcacatgttcccatccccaacttaccgtaatttctaacagatgctccctacccagttcttctgaatattttaacacctggacaaatgactgcgtcaaccsgcctcctgcatgcctgaacacctggtgctgcaaaatccagcccatcataatcatttcacatctacacaaatgtcccagattagcccactggaatatctgg

SEQ ID NO: 150453 - DNA, 201 bp, Homo sapiens
ttcaccattgttacatctcttgtagaaagaaactgaggctcagggaggatcagagcctcctctgaaactctctcaggccataatattccacccctcctccmtgggagagccgcagctggaggtcggtactggggcgaggctgcactgagagtgggcttcacctccacccctcccgcctctcctcctcaggaaagcggaact

SEQ ID NO: 150454 - DNA, 201 bp, Homo sapiens
tgagaagaaagagcattttgggcaaagccagcagccagggcaagggctggaacctagagcgagtctggtagatctagggtccctctttccacctttggtcyggaccaaagagaggtagatccaaaggaaaagccctagaagggccctgagggcaagaggagtgaggttggcctaaagccccctctccctgcaggaggagaa

SEQ ID NO: 150455 - DNA, 201 bp, Homo sapiens
agaagaaagagcattttgggcaaagccagcagccagggcaagggctggaacctagagcgagtctggtagatctagggtccctctttccacctttggtctgraccaaagagaggtagatccaaaggaaaagccctagaagggccctgagggcaagaggagtgaggttggcctaaagccccctctccctgcaggaggagaaga

SEQ ID NO: 150456 - DNA, 201 bp, Homo sapiens
ggttggcctaaagccccctctccctgcaggaggagaagaaccccaacacggagttctacttgaagaacctgatgatgagcacgttgaacctcttcattgcrggcaccgagacggtcagcaccaccctgcgctatggcttcttgctgctcatgaagcacccagaggtggagggtaaggctggagggggacggaagtggaggg

SEQ ID NO: 150457 - DNA, 201 bp, Homo sapiens
atattggttcaccattgttacatctcttatagaaagaaattgaggctcagggaggatcagagcctcctctgaaactctctcaggccataatattccacccytcctccctgggagagccgcagctggaggtcggtactggggcgaggctgcactgagagtgggcttcacctccacccctcccgcctctcctcctcaggaaag

SEQ ID NO: 150458 - DNA, 201 bp, Homo sapiens
gcccgttccaccgggtcatcccctaagttcctccctgtgcctcccctgtgattctggcacaacctggttaacaggatcctactccaacaatgcgaatggcygatgtctgttctgttatgaatgctctacttccgtctcataggcggagccatatcatccaccccattttgcctattcggactatcatttcctgctctgaga

SEQ ID NO: 150459 - DNA, 201 bp, Homo sapiens
ttgagctcaggagttggagtccggcctgtgcaacttagcaagaccaagtcagtataagaaaaaaaaaaacaaaaaaaaactgacagctaagttgataattraaggacagatggtcagcaaggtaaagaaggtgagaaggaagagcattttgggcaaagccagcagccagggcaagggctggaacctagagcgagtctggta

SEQ ID NO: 150460 - DNA, 201 bp, Homo sapiens
agctcctgccccgtgacagctgtccttcccttcccatcctctctctgcaaccccagctctatgagatgttctcttcggtgatgaaacacctgccaggaccrcagcaacaggcctttcagttgctgcaagggctggaggacttcatagccaagaaggtggagcacaaccagcgcacgctggatcccaattccccacgggact

SEQ ID NO: 150461 - DNA, 201 bp, Homo sapiens
actgtataacacagagtaaaccctaatgtaaactatggactttgttagtaataatatatcaatattggttcaccattgttacatctcttatagaaagaaaytgaggctcagggaggatcagagcctcctctgaaactctctcaggccataatattccacccttcctccctgggagagccgcagctggaggtcggtactggg

SEQ ID NO: 150462 - DNA, 201 bp, Homo sapiens
tctcattagatattaaaatattgaaaatgtctgcactgattggtcagtcacttctgtcccaagcccactgagtgcccactgcccgttccaccgggtcatcycctaagttcctccctgtgcctcccctgtgattctggcacaacctggttaacaggatcctactccaacaatgcgaatggctgatgtctgttctgttatgaa

SEQ ID NO: 150463 - DNA, 201 bp, Homo sapiens
aacatctttccccgtagatgtatttctctagggtcacacagcagattcctcagatccctaaaaaggagatgacggcacagcagtcatatttgcaagtgtayctggcaggaaaggacatctaaacctcccattgctacacctggcatggatcaccccatctatgatggatgtgtgacattatgcctttttcaaaacccatag

SEQ ID NO: 150464 - DNA, 201 bp, Homo sapiens
catcagctgagtctcattagatattaaaatattgaaaatgtctgcactgattggtcagtcacttctgtcccaagcccactgagtgcccactgcccgttccmccgggtcatcccctaagttcctccctgtgcctcccctgtgattctggcacaacctggttaacaggatcctactccaacaatgcgaatggctgatgtctgt

SEQ ID NO: 150465 - DNA, 201 bp, Homo sapiens
ccctgtctccaaggacacctggatagctcaacagatgctccccaaaacagagcctgctggcaggatgcataccctcagctcagctctctcacctgggcacrtgttcccatccccaacttaccgtaatttctaacagatgctccctacccagttcttctgaatattttaacacctggacaagtgactgcgtcaaccggcctc

SEQ ID NO: 150466 - DNA, 201 bp, Homo sapiens
tataaaggcaaaccaccccagccgtcaccatctatcatcccactaccaccatgctggcctcagggatgcttctggtggccttgctggtctgcctgactgtratggtcttgatgtctgtttggcagcagaggaagagcaaggggaagctgcctccgggacccaccccattgcccttcattggaaactacctgcagctgaaca

SEQ ID NO: 150467 - DNA, 201 bp, Homo sapiens
tgaatgagaaggggcagtttaagaagagtgatgcttttgtgcccttttccatcggtaagagaccactgtttgctgccaggccacggctcacaccagcaggsgcctccctcaccctcctcccctctctgcggtgtagcctggtatttctccagcttggaagttcctgttagaatctacccttgagccagcagctgatacttc

SEQ ID NO: 150468 - DNA, 201 bp, Homo sapiens
tcagctggtaggcatcagctgagtctcattagatattaaaatattgaaaatgtctgcactgattggtcagtcacttctgtcccaagcccactgagtgcccrctgcccgttccaccgggtcatcccctaagttcctccctgtgcctcccctgtgattctggcacaacctggttaacaggatcctactccaacaatgcgaatg

SEQ ID NO: 150469 - DNA, 201 bp, Homo sapiens
gccccctctccctgcaggaggagaagaaccccaacacggagttctacttgaaaaacctggtgatgaccacgttgaacctcttcattgggggcaccgagacsgtcagcaccaccctgcgctatggcttcttgctgctcatgaagcacccagaggtggagggtaaggctggagggggacggaagtggagggccccagaccctc

SEQ ID NO: 150470 - DNA, 201 bp, Homo sapiens
ctccggcgcttctccatcgccaccctgcgggacttcggggtgggcaagcgaggcatcgaggagcgcatccaggaggaggcgggcttcctcatcgacgcccwccggggcactggcggtgagcaggggaccccgagtgcgggggcaggagaaggaaaacacccaggacgaggaacccgcgcgcgttctgcctggggatgggga

SEQ ID NO: 150471 - DNA, 201 bp, Homo sapiens
cttcaatccccagcacttcctgaatgagaaggggcagtttaagaagagtgatgcttttgtgcccttttccatcggtaagagaccactgtttgctgccaggycacggctcacaccagcaggggcctccctcaccctcctcccctctctgcggtgtagcctggtatttctccagcttggaagttcctgttagaatctaccctt

SEQ ID NO: 150472 - DNA, 201 bp, Homo sapiens
agaaggtggagcacaaccagcgcacgctggatcccaattccccacgggacttcattgactcctttctcatccgcatgcaggaggtacaccccagcagccastgcggggagatgcaaagccaggcagagggaaatcagtctgggagtggggcaggcagatgacacaggcccattcaaattaaccctcatcataataatcctc

SEQ ID NO: 150473 - DNA, 201 bp, Homo sapiens
tagaagggccctgagggcaagaggagtgaggttggcctaaagccccctctccctgcaggaggagaagaaccccaacacggagttctacttgaaaaacctgrtgatgaccacgttgaacctcttcattgggggcaccgagaccgtcagcaccaccctgcgctatggcttcttgctgctcatgaagcacccagaggtggaggg

SEQ ID NO: 150474 - DNA, 201 bp, Homo sapiens
aaagccctagaagggccctgagggcaagaggagtgaggttggcctaaagccccctctccctgcaggaggagaagaaccccaacacggagttctacttgaaraacctggtgatgaccacgttgaacctcttcattgggggcaccgagaccgtcagcaccaccctgcgctatggcttcttgctgctcatgaagcacccagagg

SEQ ID NO: 150475 - DNA, 201 bp, Homo sapiens
acccagaatgacacacacacagttgtataaatgaggataaacatggcagaggcatccaggagaacccactggacaaaatggcacaaaacacaaagatgcaygagcacacagggtgattgaggggaacactgacttgcagggaaggagaaagagaaagatagaaagatgggatccaagacaagcatagacagacaggtgggc

SEQ ID NO: 150476 - DNA, 201 bp, Homo sapiens
ttcctcctccctaccagggcaccgaagtgtaccctatgctgggctctgtgctgagagaccccagtttcttctccaacccccaggacttcaatccccagcayttcctgaatgagaaggggcagtttaagaagagtgatgcttttgtgcccttttccatcggtaagagaccactgtttgctgccaggccacggctcacaccag

SEQ ID NO: 150477 - DNA, 201 bp, Homo sapiens
cttcggtgatgaaacacctgccaggaccacagcaacaggcctttcagttgctgcaagggctggaggacttcatagccaagaaggtggagcacaaccagcgyacgctggatcccaattccccacgggacttcattgactcctttctcatccgcatgcaggaggtacaccccagcagccactgcggggagatgcaaagccagg

SEQ ID NO: 150478 - DNA, 201 bp, Homo sapiens
ggcacactagttccccctccagcccctgtgtactttcaccaatcccccgaccctcctcatcacacacaacttcctcctccctaccagggcaccgaagtgtwccctatgctgggctctgtgctgagagaccccagtttcttctccaacccccaggacttcaatccccagcacttcctgaatgagaaggggcagtttaagaag

SEQ ID NO: 150479 - DNA, 201 bp, Homo sapiens
taagactgggggcaggatggcggaaaggaaggggcgtggtggctagagggaagagaagaaacagaagcggctcagttcaccttgataaggtgcttccgagstgggatgagaggaaggaaacccttacattatgctatgaagagtagtaataatagcagctcttatttcctgagcacgtacccccgtgtcacctttgttcaa

SEQ ID NO: 150480 - DNA, 201 bp, Homo sapiens
caagaccaagtcagtataagaaaaaaaaaaacaaaaaaaaactgacagctaagttgataattgaaggacagatggtcagcaaggtaaagaaggtgagaagraagagcattttgggcaaagccagcagccagggcaagggctggaacctagagcgagtctggtagatctagggtccctctttccacctttggtctgaaccaa

SEQ ID NO: 150481 - DNA, 201 bp, Homo sapiens
aacaggatcctactccaacaatgcgaatggctgatgtctgttctgttatgaatgctctacttccgtctcataggcggagccatatcatccaccccattttrcctattcggactatcatttcctgctctgagacccctagatacctaaacacattccccctcctcccccagccaaggtccatgaggagattgacagagtgat

SEQ ID NO: 150482 - DNA, 201 bp, Homo sapiens
gctaagactgggggcaggatggcggaaaggaaggggcgtggtggctagagggaagagaagaaacagaagcggctcagttcaccttgataaggtgcttccgwgctgggatgagaggaaggaaacccttacattatgctatgaagagtagtaataatagcagctcttatttcctgagcacgtacccccgtgtcacctttgttc

SEQ ID NO: 150483 - DNA, 201 bp, Homo sapiens
gctcttcgggataaacgtggcttactgtggctctccaggagctgacctctgacttcacttggccaattcagacaactgcttttttttttttttttttttttctcccctcctcaagacagggtcttgctctgtttcccaggctggagtgcagtggtgtggtcatggctcactacagcctcaacctcccaggctcaagcaatc

SEQ ID NO: 150484 - DNA, 201 bp, Homo sapiens; identical to SEQ ID NO: 28051

SEQ ID NO: 150485 - DNA, 201 bp, Homo sapiens
cagcctcaacctcccaggctcaagcaatcctcctgcctcagcctcctgaataactaggactacaggcacaggctaccatgcccagctaattttttttttttagagacagggtctcgccatgtggctcaggctggtctcaaactccttgttgcctcaaacgatccacctgcttctgcctcgtaaagggctgggattataggc

SEQ ID NO: 150486 - DNA, 201 bp, Homo sapiens
ctctgcatgtgataacttggggtggcccttggagctgtgccaaagctacacctcggggtcctagtctcaactggcctgcgtactgctgtgggctcaccccrccttcctcccacagccctgggcgctgcctatggcacagccaagagcggtaccggcattgcggccatgtctgtcatgcggccggagcagatcatgaagtcc

SEQ ID NO: 150487 - DNA, 201 bp, Homo sapiens; identical to SEQ ID NO: 28052

SEQ ID NO: 150488 - DNA, 201 bp, Homo sapiens; identical to SEQ ID NO: 28053

SEQ ID NO: 150489 - DNA, 201 bp, Homo sapiens
tgaacctgggaggcagagcttgcagtgagccgagatagcaccactgcactccagcctgggtgacagagcgagactccgtctcaaaaaaataaataaataawaataaataaataaataaataaataaaataaactttaccattgaaaaggagttggtgatcatctttctccatttgacgtctctggcctacccagtgagtct

SEQ ID NO: 150490 - DNA, 201 bp, Homo sapiens
tgtgaggccaatctttattgtatttttttgatattgaacctttctttgcaatatatgagttttacttctttttttaatatattgttaagctacagatgatytaaaatttgacattgagggggtgaatatttagggcaacttgaatttatgcttctggaaaaaaattacatgaaaaaataatgataaaataaataaggctgg

SEQ ID NO: 150491 - DNA, 201 bp, Homo sapiens
cccagcactttgggaggccaaggtaggaggatcccttgagcccaggggttcaagaccagccagggaacatagggagacctcatgtctttttttttttttttaagttttgaaaaaatagagcatatttttacttttattctgtgtgattaactgttttcttataatatgtcctattacattccatttaggttagaatggctg

SEQ ID NO: 150492 - DNA, 201 bp, Homo sapiens
gaaaaaaaaaaaaaaaagagatcctcttacctcaacctctgagtagctggaactacaggcatgtgccatcatgcccaccaaattaaaaattttttttttttgtagagaggaggtctcaccatactgcccaggctcgtctcaaactcctggcctcaaaagatcctcttgccttggcggcttcccaagtagctgggactacaa

SEQ ID NO: 150493 - DNA, 201 bp, Homo sapiens
tgaggttgttaactctgtatgaccttcttgaaataagaaccagtcagggataatttccttaaagaaaatggatgtgctagtaccagaagaagggtatgtgyctgggcaagcaaatttgacagatgtccttggcagaatatgatgttttgaatgaaaattccacataaaggaaacaatgaaaaagaaatataaaatggtaag

SEQ ID NO: 150494 - DNA, 201 bp, Homo sapiens
gtttggaacgctttctggcactgaagcacacttgaatgaattctgtatatttaactctttaagaaaattagacttgcggccgggcgtggtgcctcatgagwgtaataccagcactttgggatgcctaagtgggcagatcacctgagccccaggagttcgagaccagcctgggcaacatgacgagaccccgtctctacaaaa

SEQ ID NO: 150495 - DNA, 201 bp, Homo sapiens
ctgaggcagaagaatcaggaggttgcagttagccgaaattgagccactgcactccagcctgggcaacagagggagactgtctcagaaaaaaaaaaaaaaaagagatcctcttacctcaacctctgagtagctggaactacaggcatgtgccatcatgcccaccaaattaaaaattttttttttttgtagagaggaggtctc

SEQ ID NO: 150496 - DNA, 201 bp, Homo sapiens
gtcttgtgttctagcttaagctgattcagttaaacttaccagttgttcaagaagcggaaaggatttgatgagtctaaagtctacagcccaagttatttacrttttgtagattatctgaaaatagtctagtgggatttgggtagagaagtatatatttaatcacattgcattatataattctttagattgtagtaatgggtc

SEQ ID NO: 150497 - DNA, 201 bp, Homo sapiens
ggctacctcctgttatttcaatgcaaattcttggtgaatataggaactgccccttcttttgctttaaaaatccacttgtaactactgtaatcgaagcctayagtcagggcaactactcatattaattttgcctcagcctcttcctgttaggtccacacttggaagggctgtttggaaaggggagttgaattttgcactgtg

SEQ ID NO: 150498 - DNA, 201 bp, Homo sapiens
ttatggtttctatctaagatgacctgtttcagatatagtaactttatatatatggaatgagaaaaggcatctataatacagcaaagtttctaactagatamtagagcataagccaggcatggtgacttacaactgtaaccccagcactttgggaggccaaggtaggaggatcccttgagcccaggggttcaagaccagcca

SEQ ID NO: 150499 - DNA, 201 bp, Homo sapiens
ttatgttggtttattagtgttttgttactttttttaaaacaaatccttcttctacagatgcattctgaaaatttttatgattaaaaaaaagaaacatattagttgagtttttgtggcgtaagggcagtgttagtttttctgtttttgttttttgtttttttgagacaaggtctcactctgttgcccaggctggtcttgaac

SEQ ID NO: 150500 - DNA, 201 bp, Homo sapiens
cgggtgcagcaagccgggaaagctgcagacgaggcaggcggaagaggcgggacttcgcgggtgacgtcatcggggcgccggaggcccggggcgcctgggartttgaagcaaacaggcagcgcgcgacaatggcggtcgctcgtgcagctttggggccattggtgacgggtctgtacgacgtgcaggctttcaagtttgggg

SEQ ID NO: 150501 - DNA, 201 bp, Homo sapiens
tttatgttggtttattagtgttttgttactttttttaaaacaaatccttcttctacagatgcattctgaaaatttttatgattaaaaaaaagaaacatattagttgagtttttgtggcgtaagggcagtgttagtttttctgtttttgttttttgtttttttgagacaaggtctcactctgttgcccaggctggtcttgaa

SEQ ID NO: 150502 - DNA, 201 bp, Homo sapiens
cgctaccatccacctgacccttgagcccggggaaacccacgggtgcagcaagccgggaaagctgcagacgaggcaggcggaagaggcgggacttcgcgggygacgtcatcggggcgccggaggcccggggcgcctgggaatttgaagcaaacaggcagcgcgcgacaatggcggtcgctcgtgcagctttggggccattgg

SEQ ID NO: 150503 - DNA, 201 bp, Homo sapiens
gtttatgttggtttattagtgttttgttactttttttaaaacaaatccttcttctacagatgcattctgaaaatttttatgattaaaaaaaagaaacatattagttgagtttttgtggcgtaagggcagtgttagtttttctgtttttgttttttgtttttttgagacaaggtctcactctgttgcccaggctggtcttga

SEQ ID NO: 150504 - DNA, 201 bp, Homo sapiens
tgtttatgttggtttattagtgttttgttactttttttaaaacaaatccttcttctacagatgcattctgaaaatttttatgattaaaaaaaagaaacatattagttgagtttttgtggcgtaagggcagtgttagtttttctgtttttgttttttgtttttttgagacaaggtctcactctgttgcccaggctggtcttg

SEQ ID NO: 150505 - DNA, 201 bp, Homo sapiens
ttgtttatgttggtttattagtgttttgttactttttttaaaacaaatccttcttctacagatgcattctgaaaatttttatgattaaaaaaaagaaacatattagttgagtttttgtggcgtaagggcagtgttagtttttctgtttttgttttttgtttttttgagacaaggtctcactctgttgcccaggctggtctt

SEQ ID NO: 150506 - DNA, 201 bp, Homo sapiens
ggcttttttgtttatgttggtttattagtgttttgttactttttttaaaacaaatccttcttctacagatgcattctgaaaatttttatgattaaaaaaaagaaacatattagttgagtttttgtggcgtaagggcagtgttagtttttctgtttttgttttttgtttttttgagacaaggtctcactctgttgcccaggc

SEQ ID NO: 150507 - DNA, 201 bp, Homo sapiens
cagtggtgcaatcttgactcactgcaacctccacctcctgggctcaagtgatcctcccacctcagcctcccaagtagctgggaccacaggcatgcgccacyacacctagctaatttttttgtatttttggtagagatggagttttgccatgttgcccaggctggtctcgaactcctaaactcaagcaatctgcccacctca

SEQ ID NO: 150508 - DNA, 201 bp, Homo sapiens
aataaataaaacctgaaaagcaatcttaatgatagtaaggaattaatgggcttttttgtttatgttggtttattagtgttttgttactttttttaaaacaratccttcttctacagatgcattctgaaaatttttatgattaaaaaaaagaaacatattagttgagtttttgtggcgtaagggcagtgttagtttttctgt

SEQ ID NO: 150509 - DNA, 201 bp, Homo sapiens
ggtctgctgataatcactaaagttcctgaagagttttgattctctcattaacatgttactgggagattatttcatattgtagttggttggttggacaagasgttagaggttttgtttgaaaatcagcaaatatcttttttcccccttcttcttaggaggtatctttaaaatagcttcctgggcagatctagtaaatgctca

SEQ ID NO: 150510 - DNA, 201 bp, Homo sapiens
agacttcaaccatactcccctatgcagccccgggacaattatttaaaggaattttgtccctgactagctgcctcccccattatcttaatgtacctggaatktgtgatacaaagaacaatgtatagctaatcaatcgcttgtgttattattttatttatttattttttagatgggatctctcttacgtcacccaggctggag

SEQ ID NO: 150511 - DNA, 201 bp, Homo sapiens
atgttacagaagagggaaagtggtagaggtgagatttctttagctcttgaaagcgtagctgttctttacatgacagctgcctttggatatggagtaccccrtctgtagatagtcagtaagccttgaatgtggtttcataccattataatatgttctagagtactcgcctcaaatcctttttggaagtaggtgggtcaccaa

SEQ ID NO: 150512 - DNA, 201 bp, Homo sapiens
gacctggtgggcctgagagtctcaatcgtcaggtaaggacagtcagtgggaagtggacgggccgcacaaccaaggttctcatgaggacaaccatgtcttcsggggtgcccttgtgcacagacagctccatagtcctgcctccaatgtcccaacactgcattgtctccctgcacttagcagccctgcagggtgagacttggg

SEQ ID NO: 150513 - DNA, 201 bp, Homo sapiens
tcaatgcaaattcttggtgaatataggaactgccccttcttttgctttaaaaatccacttgtaactactgtaatcgaagcctatagtcagggcaactactmatattaattttgcctcagcctcttcctgttaggtccacacttggaagggctgtttggaaaggggagttgaattttgcactgtgcggccagaagcaataat

SEQ ID NO: 150514 - DNA, 201 bp, Homo sapiens; identical to SEQ ID NO: 28062

SEQ ID NO: 150515 - DNA, 201 bp, Homo sapiens
aggctgaggcgggcggatcatgaggtcaggagatcgagaccatcctggctaacacggtgaaactccatctctactaaaaaatacaaaaaattagccaggcrtggtggcaggcgcctgtagtcccagctactcgggaggctgaggcaggagaatggcatgaacctgggaggcagagcttgcagtgagccgagatagcaccac

SEQ ID NO: 150516 - DNA, 201 bp, Homo sapiens
ctcctgtttttacgcagttgctgtacaaaaggggaacgaaagtaggggcatgtttttatttaaagctggttagatactttttcagagaagtcatgtgacasgttttctgatttttgtattatgtgaaacaacaatttttgtgtttcttgcaggagataatcttggccaacagtacaatagcccacaagaagttattggcaa

SEQ ID NO: 150517 - DNA, 201 bp, Homo sapiens
ataatactatattgcccaggctggtctcgaactccttagctcaagtgatcctcctgccttggcttcccaaagtgctaggattacaggtgtgagccactgckcccggcctgttggagttctttacatttattttataatcaatgctgttttattaaatgcggattttattttggattacaggatgtagaatgccatattttt

SEQ ID NO: 150518 - DNA, 201 bp, Homo sapiens
caggttttctgatttttgtattatgtgaaacaacaatttttgtgtttcttgcaggagataatcttggccaacagtacaatagcccacaagaagttattggyaaacgaggttccgatatcatcattgtaggtcgtggcataatctcagcagctgatcgtctggaagcagcagagatgtacagaaaagctgcttgggaagcgt

SEQ ID NO: 150519 - DNA, 201 bp, Homo sapiens
taacataaagcatgaagttaattaatctgtaacatcatactcttagaatttttccgcttctgtgcactaatgttttaccagtcatcttgagttctttaagytgttactgcttgtagaatttataattgttactataagtcaccttcctttttttagacttggggtgaaatgctttgtattgattaggaaatgaaaagtgct

SEQ ID NO: 150520 - DNA, 201 bp, Homo sapiens; identical to SEQ ID NO: 28066

SEQ ID NO: 150521 - DNA, 201 bp, Homo sapiens
agcagtgccttgtggtgattctaagatgtgtgctaaaattttcttcaattgtgaggccaatctttattgtatttttttgatattgaacctttctttgcaayatatgagttttacttctttttttaatatattgttaagctacagatgatctaaaatttgacattgagggggtgaatatttagggcaacttgaatttatgct

SEQ ID NO: 150522 - DNA, 201 bp, Homo sapiens
tcagcaaatatcttttttcccccttcttcttaggaggtatctttaaaatagcttcctgggcagatctagtaaatgctcacgtggtgccaggctcaggagtwgtgaaaggcctgcaagaagtgggcctgcctttgcatcgggggtgcctccttattgcggaaatgagctccaccggctccctggccactggggactacacta

SEQ ID NO: 150523 - DNA, 201 bp, Homo sapiens
tgtattatgtgaaacaacaatttttgtgtttcttgcaggagataatcttggccaacagtacaatagcccacaagaagttattggcaaacgaggttccgatrtcatcattgtaggtcgtggcataatctcagcagctgatcgtctggaagcagcagagatgtacagaaaagctgcttgggaagcgtatttgagtagacttgg

SEQ ID NO: 150524 - DNA, 201 bp, Homo sapiens
ccatccagaagaaaccaggagaagcacaaactggcgctaggttcgctaccatccacctgacccttgagcccggggaaacccacgggtgcagcaagccgggraagctgcagacgaggcaggcggaagaggcgggacttcgcgggtgacgtcatcggggcgccggaggcccggggcgcctgggaatttgaagcaaacaggcag

SEQ ID NO: 150525 - DNA, 201 bp, Homo sapiens
ccgggcagaggggctcctcacttcccagtaggggcggctgggcagaggcgcccctcacctcccggatggggcggctggccgggcggggggctgaccccccmacctccctcccggatggggtggctgccgggcggagacgctcctcacttcccagacggggtggctgccgggcggaggggctcctcacttctcagacggggc

SEQ ID NO: 150526 - DNA, 201 bp, Homo sapiens; identical to SEQ ID NO: 28054

SEQ ID NO: 150527 - DNA, 201 bp, Homo sapiens
taatatttattttctaaaaatattaaggctctcagttgtttcattaattctaaagggttaaaaagggctgaaatttgtttatagcactaaatgtttttaayaggaaatttactcacataaaaaatttaagcagaagtagtagaatacagattatcataaaacatattttctatgaaaggcatttcttcctcatcttcaata

SEQ ID NO: 150528 - DNA, 201 bp, Homo sapiens
ttttgtatacagagtgtgtgtacgtatatacgcacatatacatacatatttaaatttggaatcagcaaaattttttcttttctaggaactaagcgtcttgkagaaggaactattaatccaggagaaacctgtttaatcattgaagatgttgtcaccagtggatctagtgttttggaaactgttgaggttcttcagaaggag

SEQ ID NO: 150529 - DNA, 201 bp, Homo sapiens
ttagaacaaatatgaagactgaaaaaaactaaacatactcttcataatgagatcctgttcagagaacagtagtgatcaaagtgcaaactgttggaaaatayggatatatgtacatctgtacatgtatatagtgtataatatgtatgtatatgttattgctcatatgcagaaatctatccatttgcagacagcccaggtggg

SEQ ID NO: 150530 - DNA, 201 bp, Homo sapiens
agctggttagatactttttcagagaagtcatgtgacaggttttctgatttttgtattatgtgaaacaacaatttttgtgtttcttgcaggagataatcttsgccaacagtacaatagcccacaagaagttattggcaaacgaggttccgatatcatcattgtaggtcgtggcataatctcagcagctgatcgtctggaagc

SEQ ID NO: 150531 - DNA, 201 bp, Homo sapiens
tattgggaaagcaggtttttagtcaatataaggaaaatttttgtacaaattagaggtttctaatacagtgcttctcaactttgagtatatatgaattaccygggaattttgttaaaatgcagaatccatttctgtagctctgagactagacctgaggttgtgcatttctaacaaagtgccagctgaaactgcagaccacac

SEQ ID NO: 150532 - DNA, 201 bp, Homo sapiens
aatagtcatatatggccagtggctatcatattggactgcaaagatagagaacatttccatcattgcagaaagttctatcaagaagacatataagtttcctmagcccacttaagggtttatgttcactagggaccactttgtgtggttattgtaaaaagtattgaagataggttggactattaaggttgcggtactttggac

SEQ ID NO: 150533 - DNA, 201 bp, Homo sapiens
tcaagagaatagtttctcttcagtccttaaggattcagctccttacatgggctttggtgagggtcatgaggcagcacccacaggtttaaatcagattgggktatttggtccttgtgggattcacaagatggattactgactgccttgctgtgaatggcacaactcacaccttaatgtagcttcgcatacagcttgggaaga

SEQ ID NO: 150534 - DNA, 201 bp, Homo sapiens
tactcatattaattttgcctcagcctcttcctgttaggtccacacttggaagggctgtttggaaaggggagttgaattttgcactgtgcggccagaagcartaattaagactagaaggtggacatattgggaaagcaggtttttagtcaatataaggaaaatttttgtacaaattagaggtttctaatacagtgcttctca

SEQ ID NO: 150535 - DNA, 201 bp, Homo sapiens; identical to SEQ ID NO: 28059

SEQ ID NO: 150536 - DNA, 201 bp, Homo sapiens
gagactgtctcagaaaaaaaaaaaaaaaagagatcctcttacctcaacctctgagtagctggaactacaggcatgtgccatcatgcccaccaaattaaaawttttttttttttgtagagaggaggtctcaccatactgcccaggctcgtctcaaactcctggcctcaaaagatcctcttgccttggcggcttcccaagtag

SEQ ID NO: 150537 - DNA, 201 bp, Homo sapiens
atagtttttttttgtttgtttttttactctttagaagtactggtgtaaacctatgatctagttcacaaagcaactcagtgactgtttgcttttttaaaaaraaaatgaggtggtcttgggtgggaatatgtatcctaacattaaaatatgatgatttatgtggaaaaggagattataaaatagcaattcacacaatagtct

SEQ ID NO: 150538 - DNA, 201 bp, Homo sapiens
actcagcctaatgggttactgaggaaaccaggaagtcgggatcgtccttagtctttggggtcaacatcatgagcttccccagcacatctcaggttgccttyagaacagattctgagtctggttgaatagattcattcttgtgtttttagatttatatttgtgtactgggtttatggagagggtaataaaaaggcatttgtt

SEQ ID NO: 150539 - DNA, 201 bp, Homo sapiens
cactatttaaaatagttacaataggctgggcgcagtggctcacgcctgtaatcccagcactttgggaggccgaggcaggtggatcacaaggccaagagttygaggccagcctgaccaacatagtgaaaccccatctctactaaaaatacaaaaaaattagctgggtgtagtggtgcgcgcctgtaatctcagctccttggg

SEQ ID NO: 150540 - DNA, 201 bp, Homo sapiens
gaaagaaacaaaggattatggtaaaataaaagtaacataaagcatgaagttaattaatctgtaacatcatactcttagaatttttccgcttctgtgcactratgttttaccagtcatcttgagttctttaagttgttactgcttgtagaatttataattgttactataagtcaccttcctttttttagacttggggtgaaa

SEQ ID NO: 150541 - DNA, 201 bp, Homo sapiens; identical to SEQ ID NO: 28060

SEQ ID NO: 150542 - DNA, 201 bp, Homo sapiens
gaggccgaggtaggcggatcacttgaggtcaggagttcaagaccagcctgaccaacgtggtaaaactccgtctctactaaaaatacaaaaattagctgggygtggtggtatgcacctgtagtcccagctactggagaggctgaggcaggagatgcgcttgaacccaggaggtggaggttgcaatgagctgagattgcgcca

SEQ ID NO: 150543 - DNA, 201 bp, Homo sapiens
tagtaacacaagtgacagcttcctgtgactgacttcacaattaggaggtctaagattccatttgggtatttgcttaaggatcccacataattgtcccaackgtcattagtagaggggaggtaagccttcattaataataaagagaaagcccacattcaaggtggtgtttgagcaggggcagggtgagggctgtcccggtgc

SEQ ID NO: 150544 - DNA, 201 bp, Homo sapiens
gtggtgtttgagcaggggcagggtgagggctgtcccggtgctcattgcaccagcacactcacattccttctcatttggggcccacctgcaggaagtggcamaggatcagccatttccccacccttgtcagctgatggcccactgttctttaatgactcagaggaatgcctaggattttttttttttttgagacagaatctc

SEQ ID NO: 150545 - DNA, 201 bp, Homo sapiens; identical to SEQ ID NO: 28063

SEQ ID NO: 150546 - DNA, 201 bp, Homo sapiens
tccattcatagagcaggctgtcaagcgtggttggatccaggagctcaagtgatatcttcatgacttgctttctctccatctctcagctctgctttcttctytgttgacttctttctcaggtaggcatactctgcatgctcaccccaaaccaatcactctagcttgggatgtagaataccttcattaactagcctgggcaat

SEQ ID NO: 150547 - DNA, 201 bp, Homo sapiens; identical to SEQ ID NO: 28064

SEQ ID NO: 150548 - DNA, 201 bp, Homo sapiens
actgtgaggttgttaactctgtatgaccttcttgaaataagaaccagtcagggataatttccttaaagaaaatggatgtgctagtaccagaagaagggtakgtgtctgggcaagcaaatttgacagatgtccttggcagaatatgatgttttgaatgaaaattccacataaaggaaacaatgaaaaagaaatataaaatgg

SEQ ID NO: 150549 - DNA, 201 bp, Homo sapiens
gctgaggtggaagcatcatctgaacccgggaggtagaagctacagtgagctgtgattatgctacctcactctagcctgggcaacaaagtgagaccagaccytatctcaaaaaaaaaaaaaaaaaaaaaaaaaaaaaaaaaaaaaagcctcgggttgttgttaatttcatactggtatttcaggtgataatgttgttagact

SEQ ID NO: 150550 - DNA, 201 bp, Homo sapiens
aggtcaaggctgcaatgagctgtcattgcgccactgcactccagcctgggcgacaagtgagaccctgccctcaaaaaacaaacaaatagaccgggaaaacstgggtaggcagagaattcagtagctgggaaattactggtgagaaaaggaaaatagaacaaccagaactctgtgatgtatacaaaatttatcagagcccag

SEQ ID NO: 150551 - DNA, 201 bp, Homo sapiens
ctgtcacgtactagatgctatgaagttaataaaagaattgagtaaaggtccctgtctttgataacttatattctatttggagaaacatggggggtaaatcktggctaataactagcaaatataacatgttaggccaaggagtagagataattaagagaactagtcgagaaggcattggctattaaaaaatggacaggattt

SEQ ID NO: 150552 - DNA, 201 bp, Homo sapiens; identical to SEQ ID NO: 28067

SEQ ID NO: 150553 - DNA, 201 bp, Homo sapiens
tggccaccctctacagtacgtgccccgtggacgccgcccacacgcaggcctgaccagagggggctccccaagacccagggcagggcacacagcatcccccscgctgaggccagctccgtctccaccctgtcccaggccgaacccagacccccagggctgagttaaaggagaaattcaccgccttctgcaaggcccagggct

SEQ ID NO: 150554 - DNA, 201 bp, Homo sapiens; identical to SEQ ID NO: 28073

SEQ ID NO: 150555 - DNA, 201 bp, Homo sapiens
caggtgaggtggggcagcaggcagggctgtggcgtgggggccctggaggctgcacggactgctggattggcacctggggccggggcgtgaggggtgccacrctcgggggggaggtgccctgggcctggggtcagcggctctcgctcctccagccatggccctgagtgacatccgagtggccttctccgactaccagcactt

SEQ ID NO: 150556 - DNA, 201 bp, Homo sapiens
gtgtgggattaacgcactgagattgggcagagataagggtttcaggggacaaaaagaaacatttgtttgaaacatgccagagtgtctccaccccgcatcargacagactgacagagtgggctggggacaggctaccccatatcccttctggctccctgagcgccccctgccctctgacctgggcctccagatcacagcctt

SEQ ID NO: 150557 - DNA, 201 bp, Homo sapiens
gacacgaccttcaccgagggtgctgtaccggggcagttcagcaacccaggtgaggtggggcagcaggcagggctgtggcgtgggggccctggaggctgcayggactgctggattggcacctggggccggggcgtgaggggtgccacactcgggggggaggtgccctgggcctggggtcagcggctctcgctcctccagcca

SEQ ID NO: 150558 - DNA, 201 bp, Homo sapiens
tccagccgtaccccctgggtgccagctgcagacaggccggtgctgggctggtgggggccagttgctcatgtactgaggcccccctccctcagttctgcatyggggtcgagatgtgtacagcagcccctgccgtggccaggaagcagctgtgtcggggcagaatgtggtgggctcaggcccagggcacaggggcggcctccc

SEQ ID NO: 150559 - DNA, 201 bp, Homo sapiens
ggctgaagctgggatcccggccagccaggtgacccccacgctctggatgtctctgctctgttccttccccgagcccctgccccggctccccgccaaagcamccctgcccactcgggcttcatcctgcacaataaactccggaagcaagtcagtagagctggctcctggctgtctgcgctgtcatcacccgtcctgggcctg

SEQ ID NO: 150560 - DNA, 201 bp, Homo sapiens
aggggaaacccccacctcacccgctccgtctgactggagtaggggttggctggggaagactgcagcctccatcctaccttttcagttgcatcccccaacamtccccagggcccaaaatagggacaagttggttgcctgtgcctcactgtcccccacccaccccacaaagacctgtgaccttgccacagccccacccatcca

SEQ ID NO: 150561 - DNA, 201 bp, Homo sapiens
cacagtcgtgtgcccctgccccacagccccacacgtcgagccataccccctcagctgccactgccaccaggccggtgctgagctgggggtcagtgactcakctaatcccttaggcaggtgccctgcacccccaaccccaccctgtcaccccctcagcagtaaaggcctgaggctcgaggccccagaggagctttggacctg

SEQ ID NO: 150562 - DNA, 201 bp, Homo sapiens
ggcttagggctgtgcctgagctcaaggtaggggggattccaacatcccagaggggctgcagaaggccgaagaggcaggatgggtgagctgcaggccccctmgcccagaggcccgtcagaactaccctcagctgccaggcatccggccccaccccggaggaaaggcaacggatggctggggttgggtggagggagccaggcc

SEQ ID NO: 150563 - DNA, 201 bp, Homo sapiens
atcccggccagccaggtgacccccacgctctggatgtctctgctctgttccttccccgagcccctgccccggctccccgccaaagcacccctgcccactcrggcttcatcctgcacaataaactccggaagcaagtcagtagagctggctcctggctgtctgcgctgtcatcacccgtcctgggcctggccctggccaccc

SEQ ID NO: 150564 - DNA, 201 bp, Homo sapiens
tgccctccgctcctcctgcacacctccctcgctctcccacaccactggcaccaggccccggacacccgctctgctgcaggagaatggctactcatcacacrctgtggatgggactggccctgctgggggtgctgggcgacctgcaggcagcaccggaggcccaggtctccgtgcagcccaacttccagcaggacaaggtga

SEQ ID NO: 150565 - DNA, 201 bp, Homo sapiens
gcgggtggggcacagggatggcgacaaacactccgtgcgcggtgggggttgggagggacgcgcaccgcacagacagccggcgacgcgcgctctcgcccgggagctgctcggggaagcgccggagcgcgggtccccgcgccgcgcgcccctccctggcgtcgaggagaaccccagcggtccgcagagctgagccgaagaccc

SEQ ID NO: 150566 - DNA, 201 bp, Homo sapiens
tttgatcattgttttctcaggagctccccagtgtcctcctccttcatcagctggctaaacaagaaggtgcatggaccatacttccgttgttaccgcagtaygtttgtttaactcacctgtgaattactgacattcctacctgaacacttttacgcccttagtctttttattaagagggtgtggttttcctcagtcagtaag

SEQ ID NO: 150567 - DNA, 201 bp, Homo sapiens
cttaatcatgaatagctttttctttttttttggagacagagtctcgctctgtcgccaggctggagtgcagtggtgacttggctcctgcaagctctgcctcrtgggttcaagcaattccctgcctcagcctcccgagtagctgtgactacaggcgtgcaccaccactcccagttaattttttatttttagtatagatgagat

SEQ ID NO: 150568 - DNA, 201 bp, Homo sapiens
cttgagataagcagagatgggccctttctggtcccagtggaaacctgtcccacccaccttcgaatgctcgctcctgagatgaatcagatgtaatgagctcrtggggaataaaaggcaagcttctgggttctgctcggtttgttgatgtagatgtcaaacactgggcaacagtgatcgttagattaatttctccaaccctgg

SEQ ID NO: 150569 - DNA, 201 bp, Homo sapiens
caaagagaagaattatgaacctgtctcatccagtcttttcagatgacactaaccagcatctgtgcactttctgccatgttttatgcaaaccatttgttagrcttttatgtttccttttggcttgggaaaaactcccaaatcttttttaggatgtaggagttttcacctcctcctagtgttcatttcacctggaggttattt

SEQ ID NO: 150570 - DNA, 201 bp, Homo sapiens
ccatttgaagggaaaaaagtataaagcaaacctggctttgatatttacacaaataaactttgagtacattaaaataattatgtaatgtgtgagggtataargtattttgtttgattctgatttatttccatcatcatctttcagtcattcttactaatgcaaatgtatactgtcaaaatattttaaatgtaaaacttttaa

SEQ ID NO: 150571 - DNA, 201 bp, Homo sapiens
aggggagataagcaatagagaaaaatgcaaatgtataatgtgtcggatggtaacaagtgccgtggagaagaacaaagcagaataagggagtaagggatgcrttgggaatgggcttacctgtctatatagggtgttcaaggaatacctcattcatcaggtcacatttgaacagagtgaaggaactgagggagtcagccatgt

SEQ ID NO: 150572 - DNA, 201 bp, Homo sapiens
ttgaatttttagtaaagatgggattttgccctgttggccagtctggtcttcaactcctggtctcaagtgatctgcctgcctcggcctcccaaagtgctggrattacaggcatggagccaccacacctggcctaaatttatttttaatagagataaaacacaggtgcttgcaaaaagtaattctgaggggcgtccgccattg

SEQ ID NO: 150573 - DNA, 201 bp, Homo sapiens
gagttagatatttagatacaggagatccagtgatcttcatgtaaatacattgaaaaaaggacttcacatggcatattaggacttcacatggcatattataytcagaatgtttaaattcaagtgaaagaaagaatctttaaaattagcaagagcaaaagcatcaagtcatgtataaaggactaatagtggacttttcagcag

SEQ ID NO: 150574 - DNA, 201 bp, Homo sapiens
aaaagtcacacaaagaccacactacaacagcaccaaaaataaaagccaaggtgtcttacttaaccaacaacatatatacatcttcaggaaaaatattctcycctacaaaagcaatttttaaaaattggaacaacaataccagatatgcagatatcaatggaaggaaacaggaaacatgaaaaagcaagaaaatatgatacc

SEQ ID NO: 150575 - DNA, 201 bp, Homo sapiens
tgtctctgatttttttcagcagtgttttgtaatgctcacagagatcttttacttccctggttagctgtattcctaggtgttttattctttttgtggctactttttttttttttttttttgagatggagtctcactcttatcacccaggctggcatgcagtggcgtgatctcagctcactacaacctccgcctcctggattc

SEQ ID NO: 150576 - DNA, 201 bp, Homo sapiens
ctacccacaacaccaacatggacctcttgggtctcagtgggttgctccaccaccactactgccatcattcacatcataccagctgctcagggggctaacarcttgtccacacacctagcccactgctctcattactagcttctaagcaagcagttcacctgcaggcccaagaatcagccattcagaactctctaacaccac

SEQ ID NO: 150577 - DNA, 201 bp, Homo sapiens
cttgaacccaggaggcagaggttgcagtgagccaagatcacactactgcactccagcctgggtgacagagtgggactcctctgtctcaaaaaaaaaaaagraaaaaaacgttttggttaattcctaatgcacaaattatcatattctgaatttttttttgtgtgtgtgtatatatatatataaaaatatatataaatttaa

SEQ ID NO: 150578 - DNA, 201 bp, Homo sapiens
aactttacaaattattttttttctgctgtttgcagaaagttttggaaatcactatttttcttgaaaagagttaggcccttgcctctttagtttttttttttcttttttttttttttatattaaaaacacctgattttcatttgttaagccaggagagctagcaaagcctttcatagattagtgtaaagaagcttgagaaag

SEQ ID NO: 150579 - DNA, 201 bp, Homo sapiens
ctttacaaattattttttttctgctgtttgcagaaagttttggaaatcactatttttcttgaaaagagttaggcccttgcctctttagtttttttttttcttttttttttttttatattaaaaacacctgattttcatttgttaagccaggagagctagcaaagcctttcatagattagtgtaaagaagcttgagaaagat

SEQ ID NO: 150580 - DNA, 201 bp, Homo sapiens
atcgtgggtgtcactggatattagggaatggatgaagaaaagaggatgagctactctcagctaagatgatgagttcatttttggaaaggtggagtttgagrgattagtgagacatctagtttatgggcccagggtttggagtagagagagttggaaacgacagtagttattgtagctttttttgagtgctcataatcattg

SEQ ID NO: 150581 - DNA, 201 bp, Homo sapiens
agaagtggtttgaagagtaccatgtcaggtctctagaaacagctgcattttaagccaagccttttctttttttcttttttcttttcttttcttttcttttyttttttttttactttttttcggagtagtcaattcatacttatcttctttgatcattgttttctcaggagctccccagtgtcctcctccttcatcagctgg

SEQ ID NO: 150582 - DNA, 201 bp, Homo sapiens
gagaaggtcattgggttaaaaaaataattctttcaaagagaagaattatgaacctgtctcatccagtcttttcagatgacactaaccagcatctgtgcactttctgccatgttttatgcaaaccatttgttaggcttttatgtttccttttggcttgggaaaaactcccaaatcttttttaggatgtaggagttttcacct

SEQ ID NO: 150583 - DNA, 201 bp, Homo sapiens
agaaggtcattgggttaaaaaaataattctttcaaagagaagaattatgaacctgtctcatccagtcttttcagatgacactaaccagcatctgtgcactttctgccatgttttatgcaaaccatttgttaggcttttatgtttccttttggcttgggaaaaactcccaaatcttttttaggatgtaggagttttcacctc

SEQ ID NO: 150584 - DNA, 201 bp, Homo sapiens
tcagagattgaagatcaactcaatgaaataaagcaagaagacaagattagagaaagaagagtgaaaagaaatgaacaaagcctccaagaaatatgggactgtgtgaaaagaccaaatctacatttgattgctgtacctgaaagtgatggcgagaatggaaccaagttggaaaacactcttcaggatattatccgggagaac

SEQ ID NO: 150585 - DNA, 201 bp, Homo sapiens
gaaatttcatggtgacagaagtatgttttgggttattcattttattgaacgctaaaatccagactaccttctaaagaaaagtaccaatgaattcttgagtrtaaattcagaaaagggataatgacaattcggatgttgaagtgaaagcagttatttaatcaatactcctcgttgcaccatttcaatcaccaagatcaatta

SEQ ID NO: 150586 - DNA, 201 bp, Homo sapiens
actgcatcaactaaggggcaaaataaccagctagcatcaaaatggcaggatcagatttacacataacaatattaaccttaaatgtaaatgggctaaatgcyccagttaaaagacacagactggcaaattggataaagagttaagacccatcagtgtgctgtgtttgggagacccatctcatgtgcaaagacacacataggc

SEQ ID NO: 150587 - DNA, 201 bp, Homo sapiens
tttctttctttgtttttcttttgagacagagtctctctcactctgtcacccaggctggaatgcagtggcatgatcttggctcactgcaacctccatctccygggttcaagcaattcttctgcctcagcctcctgagtagctgggactacaggcgcgtgccaccacgaccagctaatttttgtatttttaagtaaagatggg

SEQ ID NO: 150588 - DNA, 201 bp, Homo sapiens
tgactttggaactgggtaacaggcagaggttggaacagtttggagagctcagaagaagacaggaagatgaatgaaagtttggaactgcctagaaacttgtwgaatagttttgaccaatgaagtccaggctgagatggtttcagatggagatgaggaacttattgggaactggagcaaaggtcactcttgctgcgttttagc

SEQ ID NO: 150589 - DNA, 201 bp, Homo sapiens
ctgttccataaccacgtttgaatcaaataatcatgatttgtgttccctttggcatctcagtatctccaggctccagcacttgcttagctgttatgactccrgcaagcctgtgtttctgggagagcgctacggctacggcctgggcactggtggctacagctacatcacgggaggaggagggtaactatgatcacagctttc

SEQ ID NO: 150590 - DNA, 201 bp, Homo sapiens
atagatttaaaacatgaggtatgtcatgttttgtttgattaaaaatcttactaatcaagaattcatgtcctttgatgtaaaaggtattttgcattccctartcttgcattttccccacccacatctactccccacagagataatttcatagcactccagcgaattaggtgcttttattttaagctcatttcagttatgtag

SEQ ID NO: 150591 - DNA, 201 bp, Homo sapiens
cttttgtgaaatcactcaggaaagacagggaaaatgagctggaggacataggtttagaacatagttctggaagatgaagacatgaattgccagaaggtctrcttttgggatgccaagtaggaactggaatttgtaagggaacagtttgtgggatgggtaaagtgtgtgttgggagtggaatgtgatctttgtagattgcag

SEQ ID NO: 150592 - DNA, 201 bp, Homo sapiens
tgccctgttggccagtctggtcttcaactcctggtctcaagtgatctgcctgcctcggcctcccaaagtgctgggattacaggcatggagccaccacaccyggcctaaatttatttttaatagagataaaacacaggtgcttgcaaaaagtaattctgaggggcgtccgccattgctgaggcttgagtaggcaattttacc

SEQ ID NO: 150593 - DNA, 201 bp, Homo sapiens
atctgcctgcctcggcctcccaaagtgctgggattacaggcatggagccaccacacctggcctaaatttatttttaatagagataaaacacaggtgcttgyaaaaagtaattctgaggggcgtccgccattgctgaggcttgagtaggcaattttaccctcacagtgtaaacaaagccaccaggaagttcaaactgggtgg

SEQ ID NO: 150594 - DNA, 201 bp, Homo sapiens; identical to SEQ ID NO: 28078

SEQ ID NO: 150595 - DNA, 201 bp, Homo sapiens
aaagccaccaggaagttcaaactgggtggagcccaccacagcgaggcaaggcctctgccgccagactgcctgtttagattccctcctctctgggcagggcrtctctgaaaaaaggcagcagccccagtcagagacttatagataaaacctccacctccctgggacagagaacctgggggaaggggcagttgtgggcgccac

SEQ ID NO: 150596 - DNA, 201 bp, Homo sapiens
atacaagctatattggcatggtatgtaaaatacagtgattttcatattggttaaggtttagtcacttgataaagagctttattatagatttttttttaagrtgttgtatttttcatctcaagctgaggtcatttgtcttggttgttacagggtattcttcttacccagtaatgatttaatatacccataggcaaagtatca

SEQ ID NO: 150597 - DNA, 201 bp, Homo sapiens
gtatccagactttgctgcaggctgggccttaagtattccacttgtaaacaagtaagaatttattggaattttttcggggggcgggaggggtgtgcatcaactttaatttcattgagtactgtaactgatggatctcaggatctcaaatgagtttttcagccagaggcagtgtgtggtaagatctggaaaaggagccagatg

SEQ ID NO: 150598 - DNA, 201 bp, Homo sapiens
tttcattgagtactgtaactgatggatctcaggatctcaaatgagtttttcagccagaggcagtgtgtggtaagatctggaaaaggagccagatgcttgarggtttctgcttcagcgctgtcatttactagacccttcagacaaatcattcaacctctctgtatttcttctcactcatccaaagataacaagttgtgagac

SEQ ID NO: 150599 - DNA, 201 bp, Homo sapiens
gccagaggcagtgtgtggtaagatctggaaaaggagccagatgcttgagggtttctgcttcagcgctgtcatttactagacccttcagacaaatcattcarcctctctgtatttcttctcactcatccaaagataacaagttgtgagactaagggagaacacagaattgctctgagaaccatgcacatgggagcatcatta

SEQ ID NO: 150600 - DNA, 201 bp, Homo sapiens
caggtgtggaacctgggccaataacatgagctaagcattgcctgccaggcttaatgggcagagcaagtctagtggcaagcccagagctgagtgaggccccrgccagaggtgcagctggccaaccgtggagatttctggctggtgaagcagcactgaaagaatcttgtgtcaacaggagaaggtcagagagagagattgttt

SEQ ID NO: 150601 - DNA, 201 bp, Homo sapiens
tgtaggttccatcaggtagatgtgttatgtacaattatttttgggaactgaattgtgtggggaaggagacaaagcatgggggaccatttgaattgagactygtagcaaaggaagagtcgtttgcagttgacagcggcttcctgatgatggcagagtctgaagctcctacgctgctgatttctgtggtacaaatctgggggt

SEQ ID NO: 150602 - DNA, 201 bp, Homo sapiens
aagagtccctctgtttgtgaggatctcctccttgcattccccaggtagcacgatcatgtataaattctgtttgataatggaatgggcattgcctcccttaytaaagtgttcctctgacatcacccaaaacagcatgggcatttcagatataaatgtaattgcccgatgtgttcttcctgcctgctgcacagataaaaccag

SEQ ID NO: 150603 - DNA, 201 bp, Homo sapiens
caaagcatgggggaccatttgaattgagactcgtagcaaaggaagagtcgtttgcagttgacagcggcttcctgatgatggcagagtctgaagctcctacrctgctgatttctgtggtacaaatctgggggttcttggaatctcagcttacagtctgtttactcagactttccagtaattccatgagccatctatatgctt

SEQ ID NO: 150604 - DNA, 201 bp, Homo sapiens
ttttatgagtaaaaaaaaaaaaaaaaaaaaaaaaaagtagcaaactgattatgttctatacagtaatttatcttattttatgttagtgtcactcataattmtttcattaatatagtacaatgcagaatcagatatgccatctctgtagttaccaattcttctaacaaggttaagtgtattactgagtctgtctgttgctgt

SEQ ID NO: 150605 - DNA, 201 bp, Homo sapiens
acactagttatatgtagaataaactgtattctatatgttaagattttaattagtaaattgttggaaataaacctgcttttctcttcaaattgcaggctttytaattaaaaacactttttaggacatacagagtggaatggtagacattggagactccaaaaggtgggagagtagaagaggggcgagggatgagaaattacc

SEQ ID NO: 150606 - DNA, 201 bp, Homo sapiens
tcctttaacaagcttccacaaataatcctaggccttttattgaaatgcctacaaaattcagtcctcattcaactgtttattgagtgtctactatgtcctargcactgtgccaggtgttgggaaatgagtcatacacacactaattcttacctttagtgtaatttctattttacctgtttcaaagtaaaagagaaagcaaaa

SEQ ID NO: 150607 - DNA, 201 bp, Homo sapiens
gcattcttttctttttttgttgttgtttaaaaattttatttattctataagtcactcaaatttcttctcttaactatttcagtttagtattacacagtatrcagagtgggatgtaagaaccataaactgttccataaccacgtttgaatcaaataatcatgatttgtgttccctttggcatctcagtatctccaggctcca

SEQ ID NO: 150608 - DNA, 201 bp, Homo sapiens; identical to SEQ ID NO: 28080

SEQ ID NO: 150609 - DNA, 201 bp, Homo sapiens; identical to SEQ ID NO: 28084

SEQ ID NO: 150610 - DNA, 201 bp, Homo sapiens
ggggacagtgtttcaaaggagatttaattttgattaagaagcttttgaatctaataaaaaaccacttagtttaaaattaaaaagaatgaaacattgttgawtatctgagatatgttaagtaatgctctttgaagtttgtagcttatagagggacagagcttataatgagccattttaaatgaaaaaaatctgttaatatat

SEQ ID NO: 150611 - DNA, 201 bp, Homo sapiens
cctgataccaaaacctggcagagacacaacaataaaaaaagaaaatttcaggccaatgtccctgatgaacatcaatgcgaagatcctcaatgctggcaaaycgaatccggcagcacatcaaaaaacttatccaccacgatcaagttggcttcatccctgggatgcaaggctggctcaacacatgcaaatcaataaatgtaa

SEQ ID NO: 150612 - DNA, 201 bp, Homo sapiens
ctgaaagcattcagtcatattcattcacagagatggtttgaaattggaacttattaaaagggaagcagagcataaaggtttggaaaatttgcagcctgacygtgaggtgaaaaagaaaaccccattttctggggagaaattcaagccagctgcagaaatttgtgtaagtaacaaggagctgaatgttcataccaagacaat

SEQ ID NO: 150613 - DNA, 201 bp, Homo sapiens
aaatgctccagttaaaagacacagactggcaaattggataaagagttaagacccatcagtgtgctgtgtttgggagacccatctcatgtgcaaagacacasataggctcaaaaagggatggaggaagatttaccaagcaaatggaaggccaaaaaaaaagcgggggttgcaatcctagtctctgataaaacagactttaaa

SEQ ID NO: 150614 - DNA, 201 bp, Homo sapiens
acccatcagtgtgctgtgtttgggagacccatctcatgtgcaaagacacacataggctcaaaaagggatggaggaagatttaccaagcaaatggaaggccaaaaaaaaagcgggggttgcaatcctagtctctgataaaacagactttaaaccaagaaagatcaaaagagacaaagaagggcattgcataatggtaaaggg

SEQ ID NO: 150615 - DNA, 201 bp, Homo sapiens
ctactccaaacaatagaaaaagagggaatcctccctaactcattttatgaggccagcatcatcctgataccaaaacctggcagagacacaacaataaaaaragaaaatttcaggccaatgtccctgatgaacatcaatgcgaagatcctcaatgctggcaaaccgaatccggcagcacatcaaaaaacttatccaccacga

SEQ ID NO: 150616 - DNA, 201 bp, Homo sapiens
gttctgctttcccttgagatattttgtcccttcttatacttgtgttgactgagttctttcatcactgcctgtctcctgtctcgtggcagattgccctctayatctgggacaaaggcggaggacctcccctgaccccagtgcctgagttttgtaccaatgacgtggacttctactgtgctaccacattccattcttttctac

SEQ ID NO: 150617 - DNA, 201 bp, Homo sapiens
agatcctcaatgctggcaaaccgaatccggcagcacatcaaaaaacttatccaccacgatcaagttggcttcatccctgggatgcaaggctggctcaacayatgcaaatcaataaatgtaatccatcacatatacagaaccacatgattatctcaatagatgcagaaaaggcctttgacaaaattcaacagcccttcatgc

SEQ ID NO: 150618 - DNA, 201 bp, Homo sapiens
gaggcaggagaatcgcttgaagccgggaggcggaggttgcagtgagctgagatggcgccactgcactcccgcccaggtgacagtgcaaagacgctgtctcaaaaaaaaaaaaaaaaagaaaaccccatcatctcaaaagctccttaagctgataagcaacttcagcaaagtctcgggatacaaaatcaagtgcagaaatca

SEQ ID NO: 150619 - DNA, 201 bp, Homo sapiens; identical to SEQ ID NO: 28096

SEQ ID NO: 150620 - DNA, 201 bp, Homo sapiens
cttacaccttatgaaaaaattaaaatggattaaagacttagatgtgagacctaaaaccataaaaacctcagaagaaaacctaggcaataccattcaggacrtaggcatgggcaaagacttcatgacgaaaacaccgaaagcaatggcaacaaaagccaaaattgacagatggcatctgattaaactaaagagcttctgcac

SEQ ID NO: 150621 - DNA, 201 bp, Homo sapiens
acctaatgtagatgacaggttgatgggtgcagcaaaccaccatggcacatgtatatctatgtaacaaaactgtgctttctgtacatgtaccccagaacttaaaaaaaaaaaagcaataattctaagatgctagtggaacactgagttattcttttaaggtttttcttgattataattgtccttttaatgaaatcattaata

SEQ ID NO: 150622 - DNA, 201 bp, Homo sapiens
acaggatggtattcatttaccctggtattgaattgccatcctcaaaccaagtagctcttggttggtcagtcaagagctgcttacagggtagtgtagaatcyagtggctcctcacatagttccagagtcagttttaggggaaaagagtccctctgtttgtgaggatctcctccttgcattccccaggtagcacgatcatgta

SEQ ID NO: 150623 - DNA, 201 bp, Homo sapiens
tcatactgttgcttatctaataggaacctaaaactcgacatgttcaaaactgaactctcaatgcctttctaaacctcttccgtcttcaatcttcctcatcsagaaatgcatcactgtaactgtctatctggttgctcatattaaaaacctaagacttgagattggttcatctttttttcttcaacttcatgttggcatgac

SEQ ID NO: 150624 - DNA, 201 bp, Homo sapiens
tgcatcactgtaactgtctatctggttgctcatattaaaaacctaagacttgagattggttcatctttttttcttcaacttcatgttggcatgaccagctrgttctacttccaaaatatatctcctgtccatcttctctccatatttaatactactacgctgtttcaggctatcatcatctcctgccttgaccattattag

SEQ ID NO: 150625 - DNA, 201 bp, Homo sapiens
aatcttttccacaaagctcaggaaattcccagcacttccccgtgactccagtatgatagaggagtgaggcaccagatagccttctgcatggtgtgtcatcygctcgtcacaacgctcaacagtgaccaacaaaccgtagaatgtgtatagttcattgatatccatggtcttctccctacctcctctccctttcctctgcca

SEQ ID NO: 150626 - DNA, 201 bp, Homo sapiens
accattggccactgatgatcaacttgactttcagctgctttcccctcccaggagattggggggtgggactgaaagtcccaactctctaatcatgcctttgyctttctggtgaccagtcccatcttgaagctgtcggtatacgttagcctacaaaaagatagcaatttggacgttccaaagattttaggattggtatgtcag

SEQ ID NO: 150627 - DNA, 201 bp, Homo sapiens
tttcaaaacttgacgacagatcttttgaaatatttcagccacacaaaaataaggaaaaaatgaaaaagaatgaaaacagccctcaagatgtctaggactayacaaaatgaccaaacttataaattatcaatatttttgagggggaagagagatcaaaaactttagaaatcctactgaaggacataattgatgaaaatgtcc

SEQ ID NO: 150628 - DNA, 201 bp, Homo sapiens
atcatgatttgtgttccctttggcatctcagtatctccaggctccagcacttgcttagctgttatgactccggcaagcctgtgtttctgggagagcgctayggctacggcctgggcactggtggctacagctacatcacgggaggaggagggtaactatgatcacagctttcttcaactactttaaacataaacttccctt

SEQ ID NO: 150629 - DNA, 201 bp, Homo sapiens
atggaaaagctcagtgtggcagtcttggagactgtgtgaaaaacagtccattttgtcaaacaatgtattaggtctgtgcgcagtctctaaacgggatgaaraatgtcaggggatttcaaggtaacagcatgccaacaaagaaaaaagactttttcttctttttcaatttatttcaaatgcttaccttggaacttgttagtt

SEQ ID NO: 150630 - DNA, 201 bp, Homo sapiens
aaaatgcacgtcttaagtgtacaactcagcagtgtcaagtggaatcatgttgtgtaacagatctccagagcttttttatcttgtgaaactaaaatctgtaygcattgaacaactccccattcctccctcccccaacccctggctaccaccattctacttgctgtttctgtgaatttgatttttctggatttctcgaagagt

SEQ ID NO: 150631 - DNA, 201 bp, Homo sapiens
ctaaagaaaagtaccaatgaattcttgagtataaattcagaaaagggataatgacaattcggatgttgaagtgaaagcagttatttaatcaatactcctcrttgcaccatttcaatcaccaagatcaattaggaaagaaaattttgtattgaaacgtgagtggtcatagccgatactgcttatggcagtattttaaattgg

SEQ ID NO: 150632 - DNA, 201 bp, Homo sapiens
taggggccgacagacacctcatacaggagagctctgactggcatctggcaggtgctcctctgggatgaagcttccagaggaaggaacaggcagcaatcttkgtggttctgcaccctccaccggggatacccaggcaaacaggatctggaacggatctccagcaaactccagcagacctgtagcaggggaccagactgttag

SEQ ID NO: 150633 - DNA, 201 bp, Homo sapiens
cttctactgtgctaccacattccattcttttctaccgctttgtgtgagtaacagaagaaaaacttctttgcatatcaaaggaaaaatttagatgctgtgcrtaatgtcatcctagcactttaaaatgaattttaaattcagggcattcatgtgcaagttggttataagggtatattgtgtgatgctaaggtttgggcttct

SEQ ID NO: 150634 - DNA, 201 bp, Homo sapiens
cagtattttaaattggaaatggaaaagctcagtgtggcagtcttggagactgtgtgaaaaacagtccattttgtcaaacaatgtattaggtctgtgcgcastctctaaacgggatgaagaatgtcaggggatttcaaggtaacagcatgccaacaaagaaaaaagactttttcttctttttcaatttatttcaaatgctta

SEQ ID NO: 150635 - DNA, 201 bp, Homo sapiens
ggcttcctgatgatggcagagtctgaagctcctacgctgctgatttctgtggtacaaatctgggggttcttggaatctcagcttacagtctgtttactcakactttccagtaattccatgagccatctatatgctttaataaatgtacgttatgctttaactagccagagtggattatttttgtttgtttccagttaagat

SEQ ID NO: 150636 - DNA, 201 bp, Homo sapiens
aatatgttctgcccttcagcagccttgggtcgtgtttcttctcaaattaaatacactttggtttgctacagcttgaggaccaggagctcccaggacattcwtttcctgcagtgtccagcagccttatgtttggggccagtttagccacctttgttgagtctggactcttaatgaatagaagctgtgacctgcactttgtag

SEQ ID NO: 150637 - DNA, 201 bp, Homo sapiens; identical to SEQ ID NO: 28082

SEQ ID NO: 150638 - DNA, 201 bp, Homo sapiens
tttcctgcagtgtccagcagccttatgtttggggccagtttagccacctttgttgagtctggactcttaatgaatagaagctgtgacctgcactttgtagrctgagccactgttccttttcccttcctcaagtattcttctcatcctcggccacaggaggcttcctctagccttcctcatttgatctctacttagttttat

SEQ ID NO: 150639 - DNA, 201 bp, Homo sapiens
cacagtccgtgcacagtgtagcaggcaggtccagggctggctgacagaaaggctatgttgtcagctgacctatgtttccatttctcccctaaaactttatsccggaaatatgtttggtatccttgacattggttaatttgaactctagagcgtgtgagatctagtgtgggtgtgaagttaacgctgactcacatatgcata

SEQ ID NO: 150640 - DNA, 201 bp, Homo sapiens; identical to SEQ ID NO: 28085

SEQ ID NO: 150641 - DNA, 201 bp, Homo sapiens
attcttgcttcctttgacttactgtctgaaccaggtgcaggttgatggaagtgatcctgtttgaacacatttttgactcctggcatccctatatagggcarttcaacctaactcttatggctgacatgctggcattaagtataacctgttctaggaaacctctgtcctctgcttcactgctcatcaagtgtagcagcaccc

SEQ ID NO: 150642 - DNA, 201 bp, Homo sapiens; identical to SEQ ID NO: 28086

SEQ ID NO: 150643 - DNA, 201 bp, Homo sapiens
aaccaggtagcttataaacgacagcagtttatttcttatagttctggaggctggaagtccaagataaggcgctggcagattcagtgtctggtgagtgccarttttctggttcctttccttcttgctgtgtcccctcatctgggagaagggacgaggggtcttttttataggggtgcagtcccattcatgagagttccctcc

SEQ ID NO: 150644 - DNA, 201 bp, Homo sapiens
gggctacatatttcctgtttgcatccaatagtagatagcctgttcccaaccatgaatggtaagtgcttgtcctcagtctggttgggccaactgcatgtgtrttctaatctccagactattaacagttgcgcaggaatttcattgattattagaattattagaattttcagttctaatccccagagtattaacagttgccag

SEQ ID NO: 150645 - DNA, 201 bp, Homo sapiens
tttgtttctgtgcaaatggatattcattgctggctctctacctgcctttccccttctgttcttctgggaagagtagtttttagagcaccttcgagcagggyagtgttcctgggacttggtttacagcagggataaggcatgtgggtacgttttggtgggaagcaatagaaattataaagtattccttcttctcctcttccc

SEQ ID NO: 150646 - DNA, 201 bp, Homo sapiens
tagttgactgcagccttcaactactaggctcaagcgatcctcccacctcagccttctgagtagctaggatacaagtgcaccatgcttgactaacttaaaawtttttttttaatttgttttaacttttatgttaaactatgttgcccaggatgggctctaactcctagcctcaagcagtcctcctgcctttgcctcccaaag

SEQ ID NO: 150647 - DNA, 201 bp, Homo sapiens
tgattctttacttttaagctagatggatgggtccagaggtagatttctaaaaaaatgcaaaaatgtcattaaaagtacctctgctcttacttgatgcttcrgttgtacgtatgccagtgtagattgaatgatcatgtccccccacccctaattcataccttgaaacctgagccccagtgaaatggtctttggaggtagacc

SEQ ID NO: 150648 - DNA, 201 bp, Homo sapiens
cttcccagcccctagaactgtgagaaataaatttgttatttagactccactcagtctatggtattttattgttggagcctgaacagactaagacgtatgcytttgttgtgtgtctgtgcttggctgtctggagcagaattgagcctattggtcccaagcaggcagcctggagccctaacactcctggttccttcacattta

SEQ ID NO: 150649 - DNA, 201 bp, Homo sapiens
cagagaagccaagtgcttgcttatggctacacagctagtagggagggaagcaagggctcccctttactccagagcctttgtgagggactgcccaccatagygctttagggttagtgtgcccagactcatttcttttgttgatgatgtaggatgcattgattagaatttctgttccatttcctggaaaggcaatttccagtg

SEQ ID NO: 150650 - DNA, 201 bp, Homo sapiens
gcctaggtggttgtgtcattagaactgtgctattgggggcatgacttaacttcttttttttttttgaaacggagtctcgctctgtcgcccaggctggagtrcagtggcgcagtctcgctcactgcaagttccacccccgggttcacgccattctcctgcctcagcctcccgagtagctgggactgcaggtgcccgccacca

SEQ ID NO: 150651 - DNA, 201 bp, Homo sapiens
tttctaaaaaaatgcaaaaatgtcattaaaagtacctctgctcttacttgatgcttcggttgtacgtatgccagtgtagattgaatgatcatgtccccccmcccctaattcataccttgaaacctgagccccagtgaaatggtctttggaggtagacctgtgggaggtgataggggcatgagagtggagccctcatcaatg

SEQ ID NO: 150652 - DNA, 201 bp, Homo sapiens
cttttttatggttgcagaaaaattatattttaatatatgaaattaatatttaactggtaatttggtaattttagcagatgtgcagaactcagttttttttaaaaaaaaagccagtgaaagagattataaaatgatgcacttctgtattttctatataagggctgtctgagctggactcagaatttgcttacttattagcta

SEQ ID NO: 150653 - DNA, 201 bp, Homo sapiens
cattctgtaaatacagtaaattaggttaggataaaaatgaaatgttttataagtgctataatttttgcctcatattagttttttcccttctctcagatacwgattggttctttcaaactaagggctttatagtacgaagtgttgcaagtttttagtagcttatatcctataattgagcacatgatagttacagcagaattt

SEQ ID NO: 150654 - DNA, 201 bp, Homo sapiens
acctcatcttcagatattctttattcatcttaagttttatccagtgttcctgccaccctttgttctttagtttttttgttccccatgcccttttatgagtaaaaaaaaaaaaaaaaaaaaaaaaaagtagcaaactgattatgttctatacagtaatttatcttattttatgttagtgtcactcataattatttcattaat

SEQ ID NO: 150655 - DNA, 201 bp, Homo sapiens
cctcatcttcagatattctttattcatcttaagttttatccagtgttcctgccaccctttgttctttagtttttttgttccccatgcccttttatgagtaaaaaaaaaaaaaaaaaaaaaaaaaagtagcaaactgattatgttctatacagtaatttatcttattttatgttagtgtcactcataattatttcattaata

SEQ ID NO: 150656 - DNA, 201 bp, Homo sapiens
gaccaaggctattacagtttgcaggacagagtaccagagaggagagagctatacagaaagggaacactggaggtaggtgaagagcccccttatgtattcartagagtattgatcagtgcatatgtgtgaggaaactacccgatgctggggaaagacccaaccagattagagggaattgtgcctgacactcacacatgcctg

SEQ ID NO: 150657 - DNA, 201 bp, Homo sapiens
aataaccaacatctaataaagtaaaattcataatatctgccatccaatcaaaagttgccaggcatataaagcagcaggaaaatacagaagtgaaaaaaaattagcttattgaaatggtttcagaatttatacaaggttagaattagaagttattaagctgttactattaaatagttattatacctctattccatatgttca

SEQ ID NO: 150658 - DNA, 201 bp, Homo sapiens
gtaatttctattttacctgtttcaaagtaaaagagaaagcaaaagtgctaactcacccttgattttgattttaattttatttaactcagttaattgagaaraaacacccgtgttctttaataaacctattagagcgaaaaaggactgaaagcctaaaggctgaggaaattgaaagcaaaatttgcacagcctgcaggaccc

SEQ ID NO: 150659 - DNA, 201 bp, Homo sapiens
aagtgttcctatttttccacatcctctccagcatctgttgtttcctgacttttaatgattgccattctaactggcgtgagatggtatctcattgtggtttygatttgcatttctgtaatgaccagtgatgagctttttttcatatgtttgttggccacataaatgtcttcttttgagaagcgtctgttcatatcctttgtc

SEQ ID NO: 150660 - DNA, 201 bp, Homo sapiens
aacatcacactaactgcttctaactgctaatatttcttacattttctggtgtgtttttcacatatgttctattacctagtttcatgttgacacttcctcgkgatatgataattattgttattcacttgttgtggaaaaagctgagtatggaatgatacacaactggctcagtttcttgtatcctattgagtagcagagcca

SEQ ID NO: 150661 - DNA, 201 bp, Homo sapiens
gtagcctgccaagccaccactgggctctgcccctcattttagaagcctagtccagccatcagttggcccaaagagttatccagtaataccagttacaaggwtaacatcacactaactgcttctaactgctaatatttcttacattttctggtgtgtttttcacatatgttctattacctagtttcatgttgacacttcctc

SEQ ID NO: 150662 - DNA, 201 bp, Homo sapiens
gcctgggctccaggactgcccccaccccatctccaccaggtgtttgaaggaatcctacctttggcagaggagaaaacatccttagcctagacttgggtcgycagtaaagaggccgtaaaaatgttttcaacattaaagtaaggccaggcccagaaaagggcaacatctcttaatttacactaaaaaatcccccctatttct

SEQ ID NO: 150663 - DNA, 201 bp, Homo sapiens
tgggtgtgtcttgttgacaaatccctctttgtgccccctttcatctgtgtgatcagcctgggctccaggactgcccccaccccatctccaccaggtgtttsaaggaatcctacctttggcagaggagaaaacatccttagcctagacttgggtcgtcagtaaagaggccgtaaaaatgttttcaacattaaagtaaggcca

SEQ ID NO: 150664 - DNA, 201 bp, Homo sapiens
tggcagacccaaggtccagccccagtatgagcctggagaccctgacactcacaaggttgttaacagcttttctcataagaaaaaatgtgttcaccaacctyagatattgtcgttattctcaagtcagtcacacacaagtctgtgtgtgccatttgaagagataaatacatagacacacacacacacgcacacacacacacc

SEQ ID NO: 150665 - DNA, 201 bp, Homo sapiens
ctctaaagttcccactggttcaatgtgtctgtgaaaattagagaaggctatttttaaaaattttgaacttttaagctgcattttggcatgtaagctcttasaacacttcaaaactaaaaagaaatgaacaaattctatatattttataagaaataatacattgtaagtttttttcttgccttttctaggtcattgtggaaa

SEQ ID NO: 150666 - DNA, 201 bp, Homo sapiens
gggagggaagcaagggctcccctttactccagagcctttgtgagggactgcccaccatagcgctttagggttagtgtgcccagactcatttcttttgttgmtgatgtaggatgcattgattagaatttctgttccatttcctggaaaggcaatttccagtgctttctgtgacacccacgccttctccacaagcccgcaccc

SEQ ID NO: 150667 - DNA, 201 bp, Homo sapiens
attgcttattgttagtaatagattacatttattcacatggaattgtcatttttttaagtttaggaagtcctgttgaatactgacaaattgatatggttcarcctactctctatggaagatgtgttctgctttcccttgagatattttgtcccttcttatacttgtgttgactgagttctttcatcactgcctgtctcctgt

SEQ ID NO: 150668 - DNA, 201 bp, Homo sapiens
  misc_feature (1)...(201): n = A,T,C or G
aaggagtcattctcatcctaaatggctttaaattctacatatattcatattcaaaaaactagatgggtactttttctggccaagatgaagtaacggggacngggtttacccttctatctgaaccaatcctcttaaggaacaaaatatataaaacaaaggtttttaacacactgaatattaggtgcaaaggaaaatgatcca

SEQ ID NO: 150669 - DNA, 201 bp, Homo sapiens
atatacaaaataatatttctaacatatatgaaaggtataaagattaatgaacaaaatacttaactagcttgcctggtttaagaaggagacaactatgagtkaccttgaggctacctatgtgcttcttgaggagaggcctccttccgtctccccacactaaactctcttgaattctctccctctcccttacttttcttcata

SEQ ID NO: 150670 - DNA, 201 bp, Homo sapiens
ttcaagatgtgaatgagagatataccaaggaaatagatatctttaatttaaaaaaccaaacagattctggaactgaaaattcattgaaggaaatacaaaayacatttgaaagctttggtaatagactagaccaagcagaaggaggaatttcaaaacttgacgacagatcttttgaaatatttcagccacacaaaaataagg

SEQ ID NO: 150671 - DNA, 201 bp, Homo sapiens
aaaaccagcaaggatttgtttccattgcttttacagtagtccttccttaaccacaggggatacattccaaaatccccccagtggatgtttgaaaccttggmtatactgaaccctacgtatactatgttttttcttatattttacatacctatgatcaagtttactttagaaagtaggcagagtaagagattaacaacaata

SEQ ID NO: 150672 - DNA, 201 bp, Homo sapiens
taacggaattgagaggatgtttctccttggttttcttccttgccagtaaactctcagagggccttgcaaagaaacgtcgtataataaatgaattccttcarctaatattcaaaactttcccaactctgttagactgtattccagtgtgtattttttgtctgtctcactgttttttccttttaaaattccttttagattttt

SEQ ID NO: 150673 - DNA, 201 bp, Homo sapiens; identical to SEQ ID NO: 28091

SEQ ID NO: 150674 - DNA, 201 bp, Homo sapiens
tctatcttcaacagttcatttttaaaggtgaaaaaccagcaaggatttgtttccattgcttttacagtagtccttccttaaccacaggggatacattccamaatccccccagtggatgtttgaaaccttggatatactgaaccctacgtatactatgttttttcttatattttacatacctatgatcaagtttactttaga

SEQ ID NO: 150675 - DNA, 201 bp, Homo sapiens; identical to SEQ ID NO: 28093

SEQ ID NO: 150676 - DNA, 201 bp, Homo sapiens
tttcagccattttgcactggtttttcctcatcttcgtggatttatccacctttggtctttgatgttggtgacctttgaatggggttttgtgtggacgtccttttttttttgatgctgatgctattcctttctgtttgttagttatccttctaacagtcaggcctctctactgtaggtctgctcgagtttgctggacgttca

SEQ ID NO: 150677 - DNA, 201 bp, Homo sapiens
accacgagacgatatcccacacctggctcagagggtcctacgcccacggaatctcgctgattgctagcacagcagtctgagatcaaactgcaaggcggcarcgaggctgggggaggggcgcccgccattgcccaggcttgcttaggtaaacaaagcagccgggaagctcgaactgggtggagcccaccacagctcaaggag

SEQ ID NO: 150678 - DNA, 201 bp, Homo sapiens
gaatgttcataccaagacaatagggaaaatgtctccagggcatgtcagagatcttcacagctgcccctttcatcacaggcccagaggcctaggagtaaaartggtttcgtgggcctggcccagggccccactgctctatgcagcctcaggacttggtgccctgtgtcccagatgctccagccatggctaaaaggggccaag

SEQ ID NO: 150679 - DNA, 201 bp, Homo sapiens
gatttctaaaaaaatgcaaaaatgtcattaaaagtacctctgctcttacttgatgcttcggttgtacgtatgccagtgtagattgaatgatcatgtccccscacccctaattcataccttgaaacctgagccccagtgaaatggtctttggaggtagacctgtgggaggtgataggggcatgagagtggagccctcatcaa

SEQ ID NO: 150680 - DNA, 201 bp, Homo sapiens
gtgcttttattttaagctcatttcagttatgtaggtgaagacagaacagtgaaaaaggttgcatcttgtgattcatgattctttacttttaagctagatgratgggtccagaggtagatttctaaaaaaatgcaaaaatgtcattaaaagtacctctgctcttacttgatgcttcggttgtacgtatgccagtgtagattg

SEQ ID NO: 150681 - DNA, 201 bp, Homo sapiens
tcttgcattttccccacccacatctactccccacagagataatttcatagcactccagcgaattaggtgcttttattttaagctcatttcagttatgtagrtgaagacagaacagtgaaaaaggttgcatcttgtgattcatgattctttacttttaagctagatggatgggtccagaggtagatttctaaaaaaatgcaa

SEQ ID NO: 150682 - DNA, 201 bp, Homo sapiens
tccctacctcctctccctttcctctgccaggaaaaaaaagcaaaataaatatgcagactctaccataatgccatatttaaaattctacttaccttagatcrtatttcctttcccccgatgccaacaagtaatcaagcaaatgatataacccatctagcatagcaactatcttgtggtcaagatatattttaaaatggcttt

SEQ ID NO: 150683 - DNA, 201 bp, Homo sapiens
cttcaagtcaccttcacagatttcaggttggctcggagtcacggaagaccctccttgtaggtcttgagctctatttgggtgtgtgggtggtgcagagtgtrgaggttgcatggattcagccaaaatacttcatttccagtagctcctggagaaaatgaggaaaaagaagtggtttgaagagtaccatgtcaggtctctaga

SEQ ID NO: 150684 - DNA, 201 bp, Homo sapiens
ctgctgaattgagcccagcatgtggaatcagtatttttgattcagggattcaagctctttgtccttttttccttcctcctagactgattcatagaatgttycctcccccaggaagaaggtctttgtaaaggcgactttgttctcacttgtttgatgcatcaaacttccattgagtgctgtgggcaaggccctatatgtggc

SEQ ID NO: 150685 - DNA, 201 bp, Homo sapiens
ggactgaggaaagttcttgacctttcctcacagcttcttccagcattatgcaatggaggatattttacccaacagtgtgaacttttagtggctgcaagctrcagggagccctttctggggtaagttctcttgcttattgtatgcaaagcaaactgccacagcagtgccaaggttaacatttttgttgtgctgaaatttgga

SEQ ID NO: 150686 - DNA, 201 bp, Homo sapiens
gatatattttaaaatggctttctagtggggattcttatttattcttcaagaaactggtattatactcaggactaaaggaaggataaagtattcattagccscatcagctgcaacattggatcttcctagttgttgttttcccaattcaaagctaatgtgctgactttatttcttcctattattattagctatatcaattag

SEQ ID NO: 150687 - DNA, 201 bp, Homo sapiens
attctgtgtacccttcattcacttcctactgatcagttttaaaccttattattaacttattttacagaagtgattactgaaacttgtttcttttggtcagyttttctgtaacatatagcagaaattcatcttggattttcttctgtgaagaagagacaagaatacagattccaaaactcttggaaaccctcagaagatatg

SEQ ID NO: 150688 - DNA, 201 bp, Homo sapiens
actccagtatgatagaggagtgaggcaccagatagccttctgcatggtgtgtcatctgctcgtcacaacgctcaacagtgaccaacaaaccgtagaatgtrtatagttcattgatatccatggtcttctccctacctcctctccctttcctctgccaggaaaaaaaagcaaaataaatatgcagactctaccataatgcca

SEQ ID NO: 150689 - DNA, 201 bp, Homo sapiens
  misc_feature (1)...(201): n = A,T,C or G
atcattgctccgtggtcccttaggtttcggtctcatttctttagggaagcgtttccaagctccctttttcaaatcttcctcccatgtgctgatacataccntgcaccatgcatgtttactcagtgtactgctggctttgttatgtactgagattcatctttttctctttcatttaaaatacaggatttggagaaaagtggt

SEQ ID NO: 150690 - DNA, 201 bp, Homo sapiens
cttatttggaaagaactcatcagcatgctaataaacaagtgttattaacggctcatattcacttagtttatgcaaataattaatgtaagactgtgtgagtwggcaaaagtataaaataattacatattaaaatttcatgctcacgtttcatcttcctataaagttagtttttcagagagcggatcaaaaaaatgaaagtct

SEQ ID NO: 150691 - DNA, 201 bp, Homo sapiens
tcttctggatggattctttgtcatccaggtagtccaggacctccgagttggcatggccccccaggtcatggacttgacccaggggagtttgccagtagccracagctaagccagtgggagggagggagagcatctgtttcaaatagcagtgtgaattcgaaggaggtgttttgacccctttggtaacttcctgcgggacaa

SEQ ID NO: 150692 - DNA, 201 bp, Homo sapiens
gtagtccaggacctccgagttggcatggccccccaggtcatggacttgacccaggggagtttgccagtagccaacagctaagccagtgggagggagggagrgcatctgtttcaaatagcagtgtgaattcgaaggaggtgttttgacccctttggtaacttcctgcgggacaaacattgtgggctcggtatttgagcactt

SEQ ID NO: 150693 - DNA, 201 bp, Homo sapiens
caagagtcaagttgatctgggatgagtcctcaatttaatcttctctagtttgcctgattaccagcctccctgggtgttgctgaggccactgctttgggccygaaagcccaagaaaagttttgtcttctacccacttaccaggcccagtttgccgctgaaagctgccatggctgtcttgctactcccctagcaaggattttt

SEQ ID NO: 150694 - DNA, 201 bp, Homo sapiens
ataaaggtactacttagagaaaatttgcaaatgttctgtttttcctcttgtagcattatgtgtgatccatctttggctttgcacagattacttcttaagarcaatatatgggagtccccataggttaatctcatcttttccatgataaaggaaaagttgtgagtttcaagggttcatcagacctattgaggaagttcttcc

SEQ ID NO: 150695 - DNA, 201 bp, Homo sapiens
ttttaaatctttcctggacttgctgcattcatttgacaaaaagttactgtgcatctattacatgttaggtgtactggagatatagcagtgaacaaaatggrcaacatccctgcccacaaggaggtgatgttcttgtttcaggggagataagcaatagagaaaaatgcaaatgtataatgtgtcggatggtaacaagtgccg

SEQ ID NO: 150696 - DNA, 201 bp, Homo sapiens
aggcagatcatttgaggtcaggagttcaggaccagcctggccaacaaggtgaaaccccatctctactaaaaatacaaaaaaattacccgcgcatggtggcrtgtgtttgtagtcccagctacttaggaggctgaggcaggacaatcgcttgaacccaggaggccgaggttgtagtgagcaaagattgcaccactgcacttc

SEQ ID NO: 150697 - DNA, 201 bp, Homo sapiens
gagccgtccttggcctcacgagccttggcttccgttctggtgcgctgtggagactctagtgctgcagccgctattgcacgcacacccctgtgctgggctcrcccctgcacccggctctcctgcctgtctgcacttgcgtatcctcaggacgctgggcaccaagttgccttccctcacacgtgctaccctcctttattctag

SEQ ID NO: 150698 - DNA, 201 bp, Homo sapiens
ttctgagctgatgccaaaagtttaggcattatctcattggttcctgccagcgccctctgaggtggagttatttggcagcttagtggttttcttgtttttastgttccgtttggtttctatgatagatgttcctgggaaagtttgggaaaacaaattaagagaattgggacaaaatcaagttaggaggtagaaggcacaatc

SEQ ID NO: 150699 - DNA, 201 bp, Homo sapiens
tacattagtaattttcagaaccagtaccaaataaagataccttccctgcactatattctacattctaagggctagggacttttgtgttcacatgcactttrttgtcatatagctgtctggcctcgcaaaaaagtgaggtaaaagcaaacactgttattagatgatgctactggacctgttacattaagaaagttatcttat

SEQ ID NO: 150700 - DNA, 201 bp, Homo sapiens
gtgagaacttgtgggttttcattttctgtttctgcattaattgggttaggctaacggcctccagctccatccatgttgctgcaaaggccatgttctcattmttttttatggctgtgtagtattccatggtgtatccataccacattttctttatccagtctactgctgatgggcatctaggttgattccatgtctttgcta

SEQ ID NO: 150701 - DNA, 201 bp, Homo sapiens
cagccatccagaactttcagaatgaattcacttgttttggcagacccaaggtccagccccagtatgagcctggagaccctgacactcacaaggttgttaamagcttttctcataagaaaaaatgtgttcaccaaccttagatattgtcgttattctcaagtcagtcacacacaagtctgtgtgtgccatttgaagagataa

SEQ ID NO: 150702 - DNA, 201 bp, Homo sapiens
gtaggaccagggaaaagctgttttttggtttatctttttagttaaaaggattggtagcatttaaaaattattggatactgcctagaagtatataggactgrcctaatattgtcctactggccactgagtctatgtaattctacaccatcctcagtttttacgctatctgtcttttcactgagctttttctccttcacttgc

SEQ ID NO: 150703 - DNA, 201 bp, Homo sapiens
tctgttatcctcataagacatacgtacctcttacagaagaaattgtaacaataaacagatgttaattttcaccataatttatttgttgttctaaaagctcwgttcagtgcctcagaatgatgtaatagttggaatttagacaaacagttgaaatggaatcagtcttaaaagttcagttttttagaacctttgcctaatgct

SEQ ID NO: 150704 - DNA, 201 bp, Homo sapiens
ggccagggtcttgcttgcccagggaatcactttggatggggagcagagaagtaagccactgtagaaggaatatttggggagaggggtaggacagtgtttaraattaaggcaggagctgagaaataggcagaaccagagatacattatggttccaggcaaggcaacctgcaaatactgcccccctctctaaaaaaaaatcag

SEQ ID NO: 150705 - DNA, 201 bp, Homo sapiens
ctctatgcagcctcaggacttggtgccctgtgtcccagatgctccagccatggctaaaaggggccaaggtacagcttggcttttgcttcagagggtgcaarccccaagctttagcagcttccatgtagtgttgggcctgcaggtacacagaagacaagagttgaggtttgggaacctctgcctagatttcagagaatgtac

SEQ ID NO: 150706 - DNA, 201 bp, Homo sapiens
gatactattaagtatcttgaatttatgttgtgatggcaaagctgtcacctgagtctttttttttttttttccttctagaacctggggtctagccaccaagsggatcccatgctgaaacaatctttcctgtagtttcaaaagcatattaacacctgtctaaaaccattgttgttctccagaggaactttacgtaagattaaa

SEQ ID NO: 150707 - DNA, 201 bp, Homo sapiens
tcatgggtattggaaaataaagggtcagaaatgtcagtggaaacataaacagccttaacagtattcaaggcaaggaactgctgggaataaggtttattgtkcttaatatttaaatgctttatatataaactgtatcaaactgtcttgcgtccctgcaaggccaggttctctgggttgctctgcttgaaacatcgtactttc

SEQ ID NO: 150708 - DNA, 201 bp, Homo sapiens
aaagccaagaggttaatcttttccacaaagctcaggaaattcccagcacttccccgtgactccagtatgatagaggagtgaggcaccagatagccttctgyatggtgtgtcatctgctcgtcacaacgctcaacagtgaccaacaaaccgtagaatgtgtatagttcattgatatccatggtcttctccctacctcctctc

SEQ ID NO: 150709 - DNA, 201 bp, Homo sapiens
ttccataaccacgtttgaatcaaataatcatgatttgtgttccctttggcatctcagtatctccaggctccagcacttgcttagctgttatgactccggcragcctgtgtttctgggagagcgctacggctacggcctgggcactggtggctacagctacatcacgggaggaggagggtaactatgatcacagctttcttc

SEQ ID NO: 150710 - DNA, 201 bp, Homo sapiens
aatttcccgctaaacactgctttagctgtgtcccagaggttctggtacattgtgtgtttgttctcattggttccaaagaacttatttctgcctaaatttcrttacttacccatagtcattcaggagcacattgttcagtttccatgcagttttgcggttttgagtgagtttcttaaatcctaagttctaatttgatttcac

SEQ ID NO: 150711 - DNA, 201 bp, Homo sapiens
tgcattcatttgacaaaaagttactgtgcatctattacatgttaggtgtactggagatatagcagtgaacaaaatggacaacatccctgcccacaaggagrtgatgttcttgtttcaggggagataagcaatagagaaaaatgcaaatgtataatgtgtcggatggtaacaagtgccgtggagaagaacaaagcagaataa

SEQ ID NO: 150712 - DNA, 201 bp, Homo sapiens
gttcagttggttaccagaaggcaaaaatctgaaaaacatctcaaaagaccaatcttaggttctacaatagtaacgttatctataggagcaattggggaagwgtcaaatcttgtgacctctgtccacatgattcttgagcagtaagggatgataaaaaatacactttagcaaagttcaagcccctcccctgatcctaatctt

SEQ ID NO: 150713 - DNA, 201 bp, Homo sapiens
atctataggagcaattggggaagagtcaaatcttgtgacctctgtccacatgattcttgagcagtaagggatgataaaaaatacactttagcaaagttcargcccctcccctgatcctaatcttgtggtctttcattagtttttggtccctgagcaaggaggagattagttttagggagagactgttagcatccttccttc

SEQ ID NO: 150714 - DNA, 201 bp, Homo sapiens
aaactgcccccatgatccagtcacctccctccaggccctacttccaacattggggattacaattccacatgagatttgggtggggacacagattgagaccrtatcacatgctatgcccctgtggctttgtatattgtagatcctgtcttcttgtcaagctcatgtatccccataaaggttttccgtgcaccatcttgagcc

SEQ ID NO: 150715 - DNA, 201 bp, Homo sapiens
ttattaaaaagtaaagttagaatccaaattttctgaatcattgaatatttctcactttactgttttatattacacagccctgtgcattatgatgtgtgtayttggcaataatgaggatcatttgtgacacatttaaagtgctacctaatcctgtggtagcactcaaagtccttgtgactttgagctctgaatgacaggcat

SEQ ID NO: 150716 - DNA, 201 bp, Homo sapiens
tcactgcctgtctcctgtctcgtggcagattgccctctacatctgggacaaaggcggaggacctcccctgaccccagtgcctgagttttgtaccaatgacrtggacttctactgtgctaccacattccattcttttctaccgctttgtgtgagtaacagaagaaaaacttctttgcatatcaaaggaaaaatttagatgct

SEQ ID NO: 150717 - DNA, 201 bp, Homo sapiens
gctaacttttgtatttttagtagcgatggggttttccgtattggccaggctggtcttgaactcctgaccttgtgatccacctgcctcgacctcccaaagtkctggggttacaggtatgagccaccgcacccggcctctgtgctcctgaattctggtgaccaccataggctggcctctgaggccctgtgcaggcccctagga

SEQ ID NO: 150718 - DNA, 201 bp, Homo sapiens
tgttggatttaattccctctggcatcattcattgagcttccagtaaggataaagcaccatgcctggtgggctctctgggggaatgcagaggggaaggagayatggtccctgttattaaggacccacatgatgtgggagaacagaacaagctgtgacattagcgcaggccgtccgggagcaggctgtccacttgctgacctg

SEQ ID NO: 150719 - DNA, 201 bp, Homo sapiens
ccacttgctgacctgcagacacctccatgcctttcaggagtcagctcaccagtcacgtctgccaaacttgtcccgagcatcctggcctggaagccgttacyccttcctttgtaaggcatcatacttctatcattgcccattccttatttgtactccttttgaaacaccctctccgccatagtttgtaagtatcttcagaaa

SEQ ID NO: 150720 - DNA, 201 bp, Homo sapiens
tctcctctgccacccagggagcccctctgctgacactccttgtacattattgttccatggtgtcacttctcccacccttttagtacatcactgccctatgkcattgccttttactcctgggagtgctaattggagaaagtgaactctgcaatgctttcctcttagctgttggggagaaatgtactgtaaaatgaagggtac

SEQ ID NO: 150721 - DNA, 201 bp, Homo sapiens
atgggagaagtctcccttcagacacagggggttggctcacctccagtttcatgatggataagcctgggttccaggaaacaagaagggaacaatatgctctycttgcttcctctccactattttccatggagacctggaaggcgagctctagataagagggaaaaggataaaggaaagtgttcctttctaggccttcccttc

SEQ ID NO: 150722 - DNA, 201 bp, Homo sapiens
gagactgcagagataccacaggctgtgggctctgtggtgatcccactgatctgctaccctctgtgtgtgtgtctgctgctttttaaaggaaactcaggaartaacctcctcctggaagctctccttgcactcgcccccgattgtctgggctccagtgccctgtgctcagttagctctggctttccacttactgctttgtgt

SEQ ID NO: 150723 - DNA, 201 bp, Homo sapiens
tggaagatgaagacatgaattgccagaaggtctgcttttgggatgccaagtaggaactggaatttgtaagggaacagtttgtgggatgggtaaagtgtgtkttgggagtggaatgtgatctttgtagattgcagtgaatggaagggagggtcggtgagagtggggatgtggctgatgactacggcttcctaaatgcagatc

SEQ ID NO: 150724 - DNA, 201 bp, Homo sapiens
tgcagagataccacaggctgtgggctctgtggtgatcccactgatctgctaccctctgtgtgtgtgtctgctgctttttaaaggaaactcaggaaataacmtcctcctggaagctctccttgcactcgcccccgattgtctgggctccagtgccctgtgctcagttagctctggctttccacttactgctttgtgttacaa

SEQ ID NO: 150725 - DNA, 201 bp, Homo sapiens
ctttgcctcccacattttatgttgtggcagaaattattaataagcttgtcttctaatctctcccaggaaagtgcttttgtagcctttctgctgaggttacygtcaaggtatcaaaggaagccttttctcagttaatagctgttgatattacattatatatatatcctataactaggaagtataatacttgtttggaagtaa

SEQ ID NO: 150726 - DNA, 201 bp, Homo sapiens
gggtgacagagtgggactcctctgtctcaaaaaaaaaaaagaaaaaaaacgttttggttaattcctaatgcacaaattatcatattctgaatttttttttktgtgtgtgtatatatatatataaaaatatatataaatttaagagaactatataattgtgtggggcaactgtagatttgtcacgaagtatgataaaagcaa

SEQ ID NO: 150727 - DNA, 201 bp, Homo sapiens
gagtctcttaatctacttttttaattggatgtcattaatttaacttttgagttgatttataatgtaatattccagaaggattatggagagaaaaatctacrcatataggtacattttaataacatttaaaataggcatgaacagaatataaagctgctctgaataatactggaggtttggagtgagggaggatctaccttg

SEQ ID NO: 150728 - DNA, 201 bp, Homo sapiens
caaagaaatgctgagagattttgtcaccaccaggcctgccctgcaagagctcctgaaggaagcagtaagcatggaaaggaacaaccagtaccagccactgscaaaacataccaaattgtaaagaccattgatgctatgaagaaactgcatcaactaaggggcaaaataaccagctagcatcaaaatggcaggatcagattt

SEQ ID NO: 150729 - DNA, 201 bp, Homo sapiens
cagagctagaatctagtttaacttagctcagttaagctttgtctggctaaaggaatggtgtgttgattacgacaagcagaatttatggaatttatttgacrtattggcaatatctttcctgtatgtaattcctactttaaacagttacatcatcaaatattagctacttactcacaaaaggtgatacattagtaattttca

SEQ ID NO: 150730 - DNA, 201 bp, Homo sapiens
cgtctcttggcttttaagccgctcccaattttgttggtaagggctcacgaccacatttcttgttgcagtctgtgaagaaaattgaaggatatttgccaccrtcccgttgtcataattatagcatatgactgttgaaagcaagaaagggcaattagggagaaaattccttcttagtctgcagagaagacaatgaaaatggca

SEQ ID NO: 150731 - DNA, 201 bp, Homo sapiens
attctgaatttttttttgtgtgtgtgtatatatatatataaaaatatatataaatttaagagaactatataattgtgtggggcaactgtagatttgtcacraagtatgataaaagcaagtagaagaaataactttctaaaggcaaggcttaaaatagagataattaatgttcaaaattttggtaacaagttctaaggcaat

SEQ ID NO: 150732 - DNA, 201 bp, Homo sapiens
cacagccaggagtgagaacttcctcgatgccttttagctaatcaaatggtgcttttcccaagcccgcctatggaccagtcagcacacactccccgatcctragcccataaaaaccccagactcagccacatattgggactacctgccttagttagggcaccctctcatacagagggctacccactttgggtcccgtcttgt

SEQ ID NO: 150733 - DNA, 201 bp, Homo sapiens
cgggaggctgaggcaggagaatcgcttgaagccgggaggcggaggttgcagtgagctgagatggcgccactgcactcccgcccaggtgacagtgcaaagaygctgtctcaaaaaaaaaaaaaaaaagaaaaccccatcatctcaaaagctccttaagctgataagcaacttcagcaaagtctcgggatacaaaatcaagtg

SEQ ID NO: 150734 - DNA, 201 bp, Homo sapiens
atctctttgcaccatctctctttcatttccatgaaaccaggatttttatggataagaattctgtaaatggttagttattttaatattggatttattagtgrtatagcatattcagtgccttcacaatatatttggttcctttttatttttatttttatttttttaagaggcagggtctctgtcacccaggctggagtgaag

SEQ ID NO: 150735 - DNA, 201 bp, Homo sapiens
agagggggctatcaaatggggaagttgtccccaccagctcttcagtttctgttctgcactatgtgggcctgggcagtcttaactggttccaattttagcawgttccattaatactgctcaaaggatttacatatcttctgttttacagtactggatagggggaacatttcccagtcagataaaatgtctcttcccataatg

SEQ ID NO: 150736 - DNA, 201 bp, Homo sapiens
tagctgggcatagtggtgggtgcccataatcccagctactcgggaggctgaggcaggagaatcgcttgaagccgggaggcggaggttgcagtgagctgagrtggcgccactgcactcccgcccaggtgacagtgcaaagacgctgtctcaaaaaaaaaaaaaaaaagaaaaccccatcatctcaaaagctccttaagctga

SEQ ID NO: 150737 - DNA, 201 bp, Homo sapiens
aattagctgggcgtggtggcgggtgcctgtagtcccagctactcgggaggctgaggcaggagaatggcgtgaacccggcaggtggagcttgcagcagttgkccgagattgtgccactgcactccagcctgggtgacagagtgagactccatctcaaaaaaaaaaaaaaaaaaaaaaaaaactagagaagcaagagcaaaca

SEQ ID NO: 150738 - DNA, 201 bp, Homo sapiens
tggacttgacccaggggagtttgccagtagccaacagctaagccagtgggagggagggagagcatctgtttcaaatagcagtgtgaattcgaaggaggtgytttgacccctttggtaacttcctgcgggacaaacattgtgggctcggtatttgagcacttccttataattggctcttttggagccaggtttttttggtgt

SEQ ID NO: 150739 - DNA, 201 bp, Homo sapiens
catcaactaaggggcaaaataaccagctagcatcaaaatggcaggatcagatttacacataacaatattaaccttaaatgtaaatgggctaaatgctccarttaaaagacacagactggcaaattggataaagagttaagacccatcagtgtgctgtgtttgggagacccatctcatgtgcaaagacacacataggctcaa

SEQ ID NO: 150740 - DNA, 201 bp, Homo sapiens
atcaacatcaacaaaaaggacgtccactcagagaccccctccgaaggtcaccgacttcaaagaccaaacgtagataaatccatgaagattggggagaaacyagcacaaaacggctgaaaatcccaaaaaccagaacacctcttctccttcaaaggatcacaactcctcaccagcaagggaacaaaactggatggagaatga

SEQ ID NO: 150741 - DNA, 201 bp, Homo sapiens
ttttgttgatgatgtaggatgcattgattagaatttctgttccatttcctggaaaggcaatttccagtgctttctgtgacacccacgccttctccacaagmccgcaccctttactctttcagcaggtggctctgcctttcatctcaatgacagccatccagaactttcagaatgaattcacttgttttggcagacccaagg

SEQ ID NO: 150742 - DNA, 201 bp, Homo sapiens
gcttctatccctgacacattatattgtagatttatttgcttgttgcctgtctccctcatgagaacatgagatccaatagggcagggactctgcctgtcttrtcacagctgtttactgtattcctagaacagtacctggtacatagtagttgctaaaaattattgcaaaattgatattgttaatagtcatcacatgcttacc

SEQ ID NO: 150743 - DNA, 201 bp, Homo sapiens
ttcctgtagtttcaaaagcatattaacacctgtctaaaaccattgttgttctccagaggaactttacgtaagattaaattggaaacaatgaaggagagaasataaagcataattgcattgctttcagtaggttctagtaaagcaagaatccaggcaccatttgaagacactaaagtaggaactttaacctcagcacaaggc

SEQ ID NO: 150744 - DNA, 201 bp, Homo sapiens
ggatcctcgccatgtaggaccagggaaaagctgttttttggtttatctttttagttaaaaggattggtagcatttaaaaattattggatactgcctagaartatataggactgacctaatattgtcctactggccactgagtctatgtaattctacaccatcctcagtttttacgctatctgtcttttcactgagcttttt

SEQ ID NO: 150745 - DNA, 201 bp, Homo sapiens
aacaagccccttgtgtctcagtttctcttctgtttccagtaatgtacagtgttcatgcattcttttctttttttgttgttgtttaaaaattttatttattytataagtcactcaaatttcttctcttaactatttcagtttagtattacacagtatacagagtgggatgtaagaaccataaactgttccataaccacgttt

SEQ ID NO: 150746 - DNA, 201 bp, Homo sapiens
tcactgcccaaattctcttccccacctgccagccaggggcccaacatgcatttgcatctcagtggctcctttttaggccatcaggaatttttttgttaaawaccaagttcatctgaaaagatgtgaggattagttcacactcacttgaaaacaggactggtagaaataagatctagagcacactggccaacttcacttcag

SEQ ID NO: 150747 - DNA, 201 bp, Homo sapiens
gcatttggaggtttaatatttaatgattgcctggccaggttttgcacttgcatggggcctgtggcccctttgttttggccattttctcacatttggaacargaatatttaccccctgtatccccattgtatcttacaagtaactaacttgcttttgattttgcaggcttataggtggaagggacgtttctaattggtgtag

SEQ ID NO: 150748 - DNA, 201 bp, Homo sapiens
tcaagcgattctcctgcctcagtctccagagcagctggagttacaggtgcctactaccacgcctggctgattttttgtatttttagttgagacagggtttyaccatgttggccaggcttctctcgaactcctgacctcaggtgacccacccgccttggcctcccaaaatgctgggattacaggtgtgagccaccatgcccc

SEQ ID NO: 150749 - DNA, 201 bp, Homo sapiens
aaccagagatacattatggttccaggcaaggcaacctgcaaatactgcccccctctctaaaaaaaaatcagaagtcaggatgcttaaaagggtttcattaytgggggcagaggtcggcgggtcagaggttggattacattttctgctttagaccaaatggagctaacctagctgcttagagacctctatactctctccacc

SEQ ID NO: 150750 - DNA, 201 bp, Homo sapiens
tttagaccaaatggagctaacctagctgcttagagacctctatactctctccacctgaactatgtagcttttgaagagaactgacacttctaattttgtarccttttgtggtgagactataaaccctttatttaaaacctggcataatctcaactttacaaattattttttttctgctgtttgcagaaagttttggaaatc

SEQ ID NO: 150751 - DNA, 201 bp, Homo sapiens
gctgttgtcatctcacatgagagaatgaggtggcagagccacaactaggataagaaactcactcgagttgcatggctcagaagaaatagagccaggattcmaaggaatttggctccaaaaatcagatccttaaatactgagctttacagccttttgtgagtgaatgaattattagttaaaatagatttatatgagctataa

SEQ ID NO: 150752 - DNA, 201 bp, Homo sapiens
ggcacatgtatatctatgtaacaaaactgtgctttctgtacatgtaccccagaacttaaaaaaaaaaaagcaataattctaagatgctagtggaacactgrgttattcttttaaggtttttcttgattataattgtccttttaatgaaatcattaataaagtcattaagaaagattggggagtggctctatgcatagattc

SEQ ID NO: 150753 - DNA, 201 bp, Homo sapiens
aattttattgcaccctttttgataattacctttaaggtgctactacatctaagtgtaatattacatctgtttgggtctctgtgtgcattcatatatatatrtgtgtatatatgtgtgtatatgtatatgacaagaataaaagctcttgggcatttttggggattagtagattaaaatttatttacaattaagatgactttg

SEQ ID NO: 150754 - DNA, 201 bp, Homo sapiens
gatgataggacttcctatagaaggatttaatcttctgggttgtagatgttgtttgggtacgtctattcatagactgcccttactccagagccattttgtcstggcagtctgaactccaaccttgatctcccggcactacagtactgctaaaggctttgctcagctttttagcctctccactgctgctttctgcttggttct

SEQ ID NO: 150755 - DNA, 201 bp, Homo sapiens
atctactgataatccatagagtttatttcaatctaggatgtgattccttgtttgcactacctaaacctttgcctcccacattttatgttgtggcagaaatyattaataagcttgtcttctaatctctcccaggaaagtgcttttgtagcctttctgctgaggttaccgtcaaggtatcaaaggaagccttttctcagttaa

SEQ ID NO: 150756 - DNA, 201 bp, Homo sapiens
tgttacatcataatagatttccctctcttttcagggcagctcctagtcaccctgatttattttcatcctagcacatttcagtcactacctgaagttatttkatttactttcttaatttccatttctccactctagggtaagctatgttcctgcctggtgtgtggtagattctcaataaaaatcatttgaatgaatgagtaa

SEQ ID NO: 150757 - DNA, 201 bp, Homo sapiens
ggagtctcgctctgtcgcccaggctggagtgcagtggcgcagtctcgctcactgcaagttccacccccgggttcacgccattctcctgcctcagcctcccragtagctgggactgcaggtgcccgccaccacacccgcctaatatttttgtgtttttagtagagacggggtttcaccgtgttagccaggatggcctcgatc

SEQ ID NO: 150758 - DNA, 201 bp, Homo sapiens
gtccctgtgagacatttgggctttgggaactggctttcatgggttggcacagacgggaggctgtattcttcgaggtctgaagtgaatcatgaatacctttkatggagctctgcttcgatttaggggaagggcaccgacacgtataaagatgtccccacttacgatgttcttggaatcttgctgaaacagaatgtgacaggc

SEQ ID NO: 150759 - DNA, 201 bp, Homo sapiens
tatagtttagtttccccacaaactagagcatatttgtttatatttttagagaaaagtcaatatagaaaatttcttttaaacccacatgcatatacagacayggttcactgcaactttggttctaaagtctggcaccagtttcagaatgagaagattgagtcaggcctccaggttaccatttgttagctgtgtggcttttag

SEQ ID NO: 150760 - DNA, 201 bp, Homo sapiens
acctgcgaagtaaccctttagcccttgttttcctaacaaaactaatataatctgggttggggggaaggatggtggggtggtggtggcagcggtggcagcarcactgtgagacatttctcagtggcctttgcatataggggcagctagtgctctacagagatatctttagagattgtttggtggggctcctggtaaagctca

SEQ ID NO: 150761 - DNA, 201 bp, Homo sapiens
cattgcctattaagtggatctgagggatggagccatggtggccatcttgtgaccatgaggtgaccttgaagatggaagccagtagtaaggatggtagaagrgaaagatagaagaagcctggatgccagatggatgtggagcatcatgtcagctctgcatttcctgtttgcagacttgtattgcatgagattatatgcagcc

SEQ ID NO: 150762 - DNA, 201 bp, Homo sapiens
aaaaaaagttggcgggtctggctatattgcccaggctggacctgaactcctggcctcaagtcatctgtctgccttagcctcccaagcaactgggactacaggaatgttccactgcacttggctgttttatgtttgtttgtttttaaggaagagagtcttgcttaacagaataaattcatttaagcatttactcaaaatgtg

SEQ ID NO: 150763 - DNA, 201 bp, Homo sapiens
caggcgtgggccactgggtccggccgcatgtctggctaattttgtagagacagggcctccctatactgcccaggctggtttcaagctcctggcttcaaggrgtcctcctgccttggcctcccgaagtgctgggattacacagatgtgagccaccacgctcagtgggagatggatttttgaatcaaagtcatgagttagttt

SEQ ID NO: 150764 - DNA, 201 bp, Homo sapiens
gcttatctaataggaacctaaaactcgacatgttcaaaactgaactctcaatgcctttctaaacctcttccgtcttcaatcttcctcatccagaaatgcaycactgtaactgtctatctggttgctcatattaaaaacctaagacttgagattggttcatctttttttcttcaacttcatgttggcatgaccagctggttc

SEQ ID NO: 150765 - DNA, 201 bp, Homo sapiens
acagtagtttaaaatatcagttgtttttgtcatattaaagctcagttgactatttttaccccacaattggtgtaaaagcatttttttaatagaatgtttcttttatcaacagggtgtttattatctgttttaactgtactatgagattcttacacaggggaaatgataatactaatttcttacgattttaagaccttttat

SEQ ID NO: 150766 - DNA, 201 bp, Homo sapiens
ctcaccaccaccatgccttctccttcctaccctgcggaacatcttgagttcactactctatctccattttctcagctccatgctcagccttctaagagtcmtaaactcccagcctcctaaactacctcaccaaggtttccagcaaccttgctgtcgctaaatcaaattaataatttccaatttttatcctgtttcactgac

SEQ ID NO: 150767 - DNA, 201 bp, Homo sapiens
ttcattgaaggaaatacaaaacacatttgaaagctttggtaatagactagaccaagcagaaggaggaatttcaaaacttgacgacagatcttttgaaatawttcagccacacaaaaataaggaaaaaatgaaaaagaatgaaaacagccctcaagatgtctaggactacacaaaatgaccaaacttataaattatcaatat

SEQ ID NO: 150768 - DNA, 201 bp, Homo sapiens; identical to SEQ ID NO: 28083

SEQ ID NO: 150769 - DNA, 201 bp, Homo sapiens; identical to SEQ ID NO: 28087

SEQ ID NO: 150770 - DNA, 201 bp, Homo sapiens; identical to SEQ ID NO: 28088

SEQ ID NO: 150771 - DNA, 201 bp, Homo sapiens; identical to SEQ ID NO: 28090

SEQ ID NO: 150772 - DNA, 201 bp, Homo sapiens
aagatgataaagtgcaataattagtagaacttatcttcatgaggagcaccctgccaggttcgagactatcctctgatatgttcctaatgctttatggtttrcagggctttaaaaatggaccctcctgagaatatcatgaaccagttaaacattcactgcatcttacacaataggaaagagcttcagctcaatcaattgact

SEQ ID NO: 150773 - DNA, 201 bp, Homo sapiens
tcgacctcccaaagtgctggggttacaggtatgagccaccgcacccggcctctgtgctcctgaattctggtgaccaccataggctggcctctgaggccctktgcaggcccctaggactactcctcaggttggagagaacattgtggtaacattcttgaagatagcatgactgcacccaaaagatgataaagtgcaataatt

SEQ ID NO: 150774 - DNA, 201 bp, Homo sapiens
agccccaactaagaagtctgtcatgatacagaagtacatcattgctccgtggtcccttaggtttcggtctcatttctttagggaagcgtttccaagctccstttttcaaatcttcctcccatgtgctgatacataccatgcaccatgcatgtttactcagtgtactgctggctttgttatgtactgagattcatctttttc

SEQ ID NO: 150775 - DNA, 201 bp, Homo sapiens
acatttccctaatgattagtgatgttgagcatttttttcatatgcttgttggctgcatgtatgtcttcttttgagaagtgtctgttcacgtcctttacccrttttttaaatggggttgttttttgcttgttgattagcttacattccttatagattctggatattagccctttgtcagatgcatagtttgcaaatattttc

SEQ ID NO: 150776 - DNA, 201 bp, Homo sapiens
attccttgtttgcactacctaaacctttgcctcccacattttatgttgtggcagaaattattaataagcttgtcttctaatctctcccaggaaagtgcttytgtagcctttctgctgaggttaccgtcaaggtatcaaaggaagccttttctcagttaatagctgttgatattacattatatatatatcctataactagga

SEQ ID NO: 150777 - DNA, 201 bp, Homo sapiens
cctaaacctttgcctcccacattttatgttgtggcagaaattattaataagcttgtcttctaatctctcccaggaaagtgcttttgtagcctttctgctgmggttaccgtcaaggtatcaaaggaagccttttctcagttaatagctgttgatattacattatatatatatcctataactaggaagtataatacttgtttg

SEQ ID NO: 150778 - DNA, 201 bp, Homo sapiens
aatattgtatcctctagtttagccaaagggttttcattttcacatgttccatatgttgtatataaaataaaaaactgcttctgtgcctctgagttatccctgactacttcccccaggctcttcccttcaagtcaccttcacagatttcaggttggctcggagtcacggaagaccctccttgtaggtcttgagctctatttg

SEQ ID NO: 150779 - DNA, 201 bp, Homo sapiens
taatttagttaagaaaattagctctttgtcatatgtatagcaaaatatgaagaaaatatgtttggttacttgcaaaacctagggaagggaaaacactgtgktagaaatgaaagaggaaagaaaagtatacaaatgctctatctcatttgaatatactggccagtagtgtgctggtgaatgtttaacaacttgctctctggt

SEQ ID NO: 150780 - DNA, 201 bp, Homo sapiens
tttcattggaaggaattgtaaaatgactacaataatcagtactatgcaggactaccttttatatttgtgcattacttttgaattttgttcaacatgatcamtattacatgttaggatcattcagatgtagtgaatgagagtttatagtggtttacttatttaaatatttgacttttaagttcctcacaatatatttttttc

SEQ ID NO: 150781 - DNA, 201 bp, Homo sapiens
ttgccaacagttccagacctgagtagatacctttttcttttacaagtaaccttttccctctgctactgaggtgacagctctgtacccctagcactcagttaagagaagaacattttgaaatttgcacttttctacatggttgtggcttctgccattaacttgtttcagtttgtctttttgatgatttggggtaaagcaaaa

SEQ ID NO: 150782 - DNA, 201 bp, Homo sapiens
tttatacatgttagcttgtgctggtagcatttactattattaatatttatgcagcaaggtgcttcagtgcatatcctcatgtgtttttatttatggacttsagtgagaatttccctgggatatatacgcaggtagaggatttctgagttatagaatatatcgttacctaatctgactacacagtattagagtgctctctag

SEQ ID NO: 150783 - DNA, 201 bp, Homo sapiens
aatatttgtgtaacaaaaacagaacgaatacgtaggttaagttcaaccagagggatggtatttactgagagtaacggggagccaggatttggaactctgargaagaattgagagggatcaggtaaaggaagtacagcccctgaaggagactgaaaagaaccagccaaagaggagaaagggacacttagaaagcacagtgtc

SEQ ID NO: 150784 - DNA, 201 bp, Homo sapiens
aggcatttgttccattcattgttgtgttctttgagctgagaattttgaaggaacttctttagaagttctgactttagtcagaaggggatagcaataacatstaacactaacgtagcattactatgtgccaagtcctattctgagacctttacatgttttactttgttgaatttttacagcaatcctgtgaggtatgtgtac

SEQ ID NO: 150785 - DNA, 201 bp, Homo sapiens
ataactagtccttcgcctatttcttcacccactttctcaccaattgaatttcagataggagagactccactctcaggtatgtctcataataaaatacctarttaaaagttttatactatcaatatttgttattagagaggttcttttaatttgtcttaatgatagagctcaaaatgatcactaaccttctaacatttagga

SEQ ID NO: 150786 - DNA, 201 bp, Homo sapiens
cattttcatgtttttatgatgtgattttttttcccttcccacctttcagaacaaaggaagtttactgttcattctcctgatgcttcatctggaacaaattytaatgggataactaatccgtgtatcagaagtccttatatagatggctgctcgccaattaaaaattggtctcctatgagacttcagatgtatagtggtggt

SEQ ID NO: 150787 - DNA, 201 bp, Homo sapiens
cctgacccggaactggagcgccttcctctctccgaggcaatcacacagcgcgtctcggcccacgccgggcaggctccgcccctcgcgctcgccgccggcgwgaggctgcgttgatttgaatttggagccacgttcctctgcgcggaacgtggagcgaggagttgccattcgaatttcctacgcggcctccgtgcgattggc

SEQ ID NO: 150788 - DNA, 201 bp, Homo sapiens
taaaagaacagtttaccttcaaaggctggaattctcaccagtttgtactgtagtgttaaatatagttactttaattagcaatatttacatcaaacactatyaaaggaaatttagcaatttccatttgtgctattgtttttgacatcacaatttcactttggtaaacaacacaactgttacagaaatgcagtttttcctggc

SEQ ID NO: 150789 - DNA, 201 bp, Homo sapiens
tttgtccagggttacagagatgataaaagtgggaaaacctgaattcaaaattctcaaatcagatgctgtattcttagccattatgaattagtggtagcacrcaatagtagatggaaatctggattgtaaaacctcctacttttataaaccagagaggtgaccttgatcaaattattctctttgtacctcagtcttttattt

SEQ ID NO: 150790 - DNA, 201 bp, Homo sapiens
atttaaaaatttttcacagatggttgcttagtgtgaaacttaatggtttgttcaaatacaatgtgtttatattttgactaacatatttgatactatttcasaatttttgtagcaatcttcttagttgtctttgttgcaaggtgtcttttggtggttctcgtgaactattactagtttataagtgtgttttgaagaccatga

SEQ ID NO: 150791 - DNA, 201 bp, Homo sapiens
ggtaaggtatttaatattctatagccccttcctcactgccttggtgttctttatcctttctaagattatagtataagaaagataatggattaaacatgagkactacagtattatataatattttttaaaaatattaataccaagtgatatgagaagagtaaatttattttaattatgacagataaggcatattttatattc

SEQ ID NO: 150792 - DNA, 201 bp, Homo sapiens; identical to SEQ ID NO: 28099

SEQ ID NO: 150793 - DNA, 201 bp, Homo sapiens
caacagttccagacctgagtagatacctttttcttttacaagtaaccttttccctctgctactgaggtgacagctctgtacccctagcactcagttaagagaagaacattttgaaatttgcacttttctacatggttgtggcttctgccattaacttgtttcagtttgtctttttgatgatttggggtaaagcaaaatgct

SEQ ID NO: 150794 - DNA, 201 bp, Homo sapiens
tcaaggttgtttcgaggatcagttgagaacatttatatgtgatactttttttgtaagctgtatcatagccccaagagtgtgaggttttgagttgttttttktgacacatttgtcgagtacattttaatagttaaaattaatatctatgggactttgtaattttaacatgcatactcttgatttctttttagttttctctct

SEQ ID NO: 150795 - DNA, 201 bp, Homo sapiens
tgctgcatcgttaatcacaacagccaagatatggagtcaacctaagtgtccatcaacagatgaatggactttttaaaatgtgatatatatatatatcacayacacacacacacacacacacacacacacacacaaaatggaatactattcagccttaaaaaagaggaaattttgtcatttgtgacaacatatatgaatcta

SEQ ID NO: 150796 - DNA, 201 bp, Homo sapiens
cacatataggcttaaaagtatatgccttaaaggcattgtttgctgcttttactctctgccttttttcactttctctctctctctctctcttctctctctcttttttatatagaggaattacaaaatacttttgttgaaatacaccttaatcatcatctaatccaactaacctttggaagccgtgggtagcatattctccca

SEQ ID NO: 150797 - DNA, 201 bp, Homo sapiens
taattataaagtgagcttaacatttgccagttttcaatgaagggagattatttatttgaaaggttattttttaaaatgttcaataagcttaagtaatagcrtggttatttttcttctttatctttgtatagaatagataaagatgtggaagacaaaagacaaaaagccattgaagaggtaacttaaactgttactgatcat

SEQ ID NO: 150798 - DNA, 201 bp, Homo sapiens
acatataggcttaaaagtatatgccttaaaggcattgtttgctgcttttactctctgccttttttcactttctctctctctctctctcttctctctctcttttttatatagaggaattacaaaatacttttgttgaaatacaccttaatcatcatctaatccaactaacctttggaagccgtgggtagcatattctcccat

SEQ ID NO: 150799 - DNA, 201 bp, Homo sapiens
ccaccccaccccgccaaggtgtagcctctgtagcctcctttgattgcaagtaatgcagtctccctttctatcccgggaggggtggaggggaggtcttggcraaaggaggatttttggaggaaaggggaccccaggcagttaatttcctagcccctgtcaatcatacttctctggctaggactcatgtgcaagaaaggcaca

SEQ ID NO: 150800 - DNA, 201 bp, Homo sapiens
cccacattttgttgttgttctatcttaggctttcagcagcctgaagccatggttgctttctgtctctagtaaataagtggaaaagagggatgaggaagggsctttactggcctaaccagaaacagaaactaagaactcatgactgtattctctcccttggacacccctgtgagctgcccagattgctttcagaaggaggga

SEQ ID NO: 150801 - DNA, 201 bp, Homo sapiens
gccctttaaaatgactagctttgccttttctcctattattaaatataggtgactattttagagctgatgaatttgcagatcaatctcctggaaacctcagytcttcatccctcagaagaaagctgtttttagatgggaacggaagcatctccgactccttaccttcggcttctcccggaagtcctcacagtggtgttcaaa

SEQ ID NO: 150802 - DNA, 201 bp, Homo sapiens
cccctccaagcccttcacagtcccatctatataaagcacccttctgtactgtcctaagaccaataatttccagctatcccagtaccttgcatagcacttgyatactgttgtaatgatcagtttagtgtttctgtcccctagacgcaatcttttttggccaatactgtacttcatcctttcattctcaggacctagcacaat

SEQ ID NO: 150803 - DNA, 201 bp, Homo sapiens
tcagtcacacaacgttgcacacatattgagatattctggtaaatacttactggcttttctcctccatcttctctttgcttggtaacatgatgaccattcamtcataaaattaatgtccacccagagtgttaataggaagggaatagaatgaggatgaagcatgaaaggattttaacttaaatttaaataatacctttgagg

SEQ ID NO: 150804 - DNA, 201 bp, Homo sapiens
ttatgacagataaggcatattttatattcacattaactgatatttgtatggagtaggaaaaggtaagagcagaaaagaaattagcctgctctagagaaatsaatcctgctagagtcaggcaggattcatcactgtttcatgtggatccagtcccccaaaacatgcaaggtctggtatagtatttgcattctaaaaataaaa

SEQ ID NO: 150805 - DNA, 201 bp, Homo sapiens
cctaaatgttactaaatgttacaagataccactagtattaattataaagtgagcttaacatttgccagttttcaatgaagggagattatttatttgaaagrttattttttaaaatgttcaataagcttaagtaatagcatggttatttttcttctttatctttgtatagaatagataaagatgtggaagacaaaagacaaa

SEQ ID NO: 150806 - DNA, 201 bp, Homo sapiens
tgaaaacaaggtattgtcttctttttcacagcaagaccacacaacacagaggtgttggatgaaaacagcaagcccttttcaatgcagcagtccatagaatrcctctgtcagaatcaaagactaagcttaagagttcctcgcatatatcgttgtgcacaggatcaacatgatggtgactgggaaaaaattacttcaagtaac

SEQ ID NO: 150807 - DNA, 201 bp, Homo sapiens
cctacgcggcctccgtgcgattggctggttcgcggatggcgggacgacacgattggctagtcgctcacaagccccgtgccctggttggcccaagacagcgyggaagcggggagttaaagagtctatgcctgtcgtggaagctggcctggcccccggagctccctggagtcggtactgggggcttcgttttgtacgcaccgg

SEQ ID NO: 150808 - DNA, 201 bp, Homo sapiens
agccccaagagtgtgaggttttgagttgttttttgtgacacatttgtcgagtacattttaatagttaaaattaatatctatgggactttgtaattttaacwtgcatactcttgatttctttttagttttctctctgtgctatgggagatgtcaaggaatcaaagatgcaaataacaccagaaactccaggaaggatccctg

SEQ ID NO: 150809 - DNA, 201 bp, Homo sapiens
ttgacgatatagctactaatacattagagaagaagctgcatcatctaatattctgttctcacttatttggcaaacattatttgagtgttgctatgtgtcaratacagtgctaagcagggattacactgtgaacaagttaggatcattaggcacaaatccttaaggaggttatactccgatgtatgggtcacaaactttctg

SEQ ID NO: 150810 - DNA, 201 bp, Homo sapiens
attccttcccttttcatccttttttttgtaaccccatcaaaaaaacctgggaaagaaatttaaaatactttgtctatgattaatcctcttagtttagtttkcaagtttcaaatttaactggttgatttgaagtattaagattcctctttatatatactttaaatttcttccatttttcctttggtcatttgtattaaaatt

SEQ ID NO: 150811 - DNA, 201 bp, Homo sapiens
ttttatccttgtattccctcaaaggtaaaaaaataatagaaacataccaaaatatatacttatatatgcagattttttttaatgttgcaaaataagtttcyactttcttaattttttactttggaaaaagtaatgctaaagcaaatgaagagtataaaacataggatttttcacttaaaatgtcttacaggcactaacata

SEQ ID NO: 150812 - DNA, 201 bp, Homo sapiens
gcaggctccgcccctcgcgctcgccgccggcgtgaggctgcgttgatttgaatttggagccacgttcctctgcgcggaacgtggagcgaggagttgccatwcgaatttcctacgcggcctccgtgcgattggctggttcgcggatggcgggacgacacgattggctagtcgctcacaagccccgtgccctggttggcccaa

SEQ ID NO: 150813 - DNA, 201 bp, Homo sapiens
gtggtccctggcctttcctcctgtctgaatggagaggtttcttttcccagctcctgacttgcctgcccgctcgcccctggtgaatgggagcagtcagggartaggtgtggaagagaggggcaccagaaagagtggccacgtagggttgggggcgacgcctccttcgcactccatccagggaagccggctgcatctcaacct

SEQ ID NO: 150814 - DNA, 201 bp, Homo sapiens
tgccaacagttccagacctgagtagatacctttttcttttacaagtaaccttttccctctgctactgaggtgacagctctgtacccctagcactcagttaagagaagaacattttgaaatttgcacttttctacatggttgtggcttctgccattaacttgtttcagtttgtctttttgatgatttggggtaaagcaaaat

SEQ ID NO: 150815 - DNA, 201 bp, Homo sapiens
gccaacagttccagacctgagtagatacctttttcttttacaagtaaccttttccctctgctactgaggtgacagctctgtacccctagcactcagttaagagaagaacattttgaaatttgcacttttctacatggttgtggcttctgccattaacttgtttcagtttgtctttttgatgatttggggtaaagcaaaatg

SEQ ID NO: 150816 - DNA, 201 bp, Homo sapiens
ccaacagttccagacctgagtagatacctttttcttttacaagtaaccttttccctctgctactgaggtgacagctctgtacccctagcactcagttaagagaagaacattttgaaatttgcacttttctacatggttgtggcttctgccattaacttgtttcagtttgtctttttgatgatttggggtaaagcaaaatgc

SEQ ID NO: 150817 - DNA, 201 bp, Homo sapiens
gctacaaagaattgtttaatagcaactgtagttggatagggtatccgaagaatgttcatagtgttgagacatgagatgatgaatttaaaaaaaattgtagytataagtcctttagttgagaagagatctgggcctgttgtaacctttagtttcctcagaggcagatctgaattcattcatatttgattgctgcgtataagc

SEQ ID NO: 150818 - DNA, 201 bp, Homo sapiens; identical to SEQ ID NO: 28117

SEQ ID NO: 150819 - DNA, 201 bp, Homo sapiens
caaagtgctgggattataggcataagccactgcgcccggcgaatatgccctttactgaaaaggtcatggcaactccagagtagatggacaagatgaaggckatcattcagaagctccgcttcacatacagaagtgacagctttgagaatcccgtgctgcagcagtaagtacttcaggaacctggaggccttggccttggat

SEQ ID NO: 150820 - DNA, 201 bp, Homo sapiens; identical to SEQ ID NO: 28119

SEQ ID NO: 150821 - DNA, 201 bp, Homo sapiens; identical to SEQ ID NO: 28120

SEQ ID NO: 150822 - DNA, 201 bp, Homo sapiens
ttccgggttcaagcaatactcctgcctcagcctcccgagtagctgggattacagatgcctgccaccatgcccagctaattttttgtatttttagtagagayggggtttcaccatgttggccagtctggtcttgaactcctgacctcaggtgatccgcccgcctctacctcccaaagtgctgggattataggcataagccac

SEQ ID NO: 150823 - DNA, 201 bp, Homo sapiens
ggggtttcaccatgttggccagtctggtcttgaactcctgacctcaggtgatccgcccgcctctacctcccaaagtgctgggattataggcataagccacygcgcccggcgaatatgccctttactgaaaaggtcatggcaactccagagtagatggacaagatgaaggctatcattcagaagctccgcttcacatacaga

SEQ ID NO: 150824 - DNA, 201 bp, Homo sapiens
gggtttcaccatgttggccagtctggtcttgaactcctgacctcaggtgatccgcccgcctctacctcccaaagtgctgggattataggcataagccactrcgcccggcgaatatgccctttactgaaaaggtcatggcaactccagagtagatggacaagatgaaggctatcattcagaagctccgcttcacatacagaa

SEQ ID NO: 150825 - DNA, 201 bp, Homo sapiens
tccaggtttccagctggtctttttaccctttgctgatgataaaatgaaggtgtcctttatgtatgtatgtatgtatgtatgtatgtatgtatgtatgtatktatttatttatttatttatttttgagacggagtttcactcttgttgcccaggctggagtacaatggtgcgatctcggctgactgcaacctctgccttccg

SEQ ID NO: 150826 - DNA, 201 bp, Homo sapiens; identical to SEQ ID NO: 28121

SEQ ID NO: 150827 - DNA, 201 bp, Homo sapiens
gtgaggtcataaacagtgagatcataagcagtgagatcataaacagatcataagcaatgagatcataagcagtgattgagatctcttggcagtggtgttcyatggtaccgagaaagacaaaaattcagtgaattttaaaaatatttacgtcttacaggagttggataatccaagtgcaaaacaaattctagagcttgacca

SEQ ID NO: 150828 - DNA, 201 bp, Homo sapiens
tccagcctgggcagcaagagtgaaactctgtccaaaaaaaaaaaagaaaagaaaaacagaaaaaacaaagacccggacatttaacacaaatacatgcagtktgcttctgcctagtgataccaagaggtctcagatctttggaagtcatcagattatactggaaaaagaggaaacagaagagctaaaatggtttaatgatcc

SEQ ID NO: 150829 - DNA, 201 bp, Homo sapiens; identical to SEQ ID NO: 28116

SEQ ID NO: 150830 - DNA, 201 bp, Homo sapiens
caaatgaaccagtgaaaaccaagaccctggccgggtgcgttggctcacgcctgtaatcccagcactttgggaggccgaggcaggcggatcacctgaggtcrggagttcaagaccagcctgaccaacatggagaaaccccgtctttactaaaaaaaaaagacaaaattagccagtcgtggtggtgcatacctgtagtcccag

SEQ ID NO: 150831 - DNA, 201 bp, Homo sapiens
cattgtctgcgtaccaaggagaagccaaagaagggcaggcctatctggtccgtgggcacagtccccagcccctttccatggagctgctgccaacgtttccrcaggcagaggccatgtttccagctcagacgcaaaggcatggggaggcggcaggcatctgagcttccttttcttactcaaaggaatgcccaccaggcagcc

SEQ ID NO: 150832 - DNA, 201 bp, Homo sapiens
gtaatctggtccaaaaggctcttaagcctcctccagtaaagctctatcaggaaacaaatgaaccagtgaaaaccaagaccctggccgggtgcgttggctcrcgcctgtaatcccagcactttgggaggccgaggcaggcggatcacctgaggtcgggagttcaagaccagcctgaccaacatggagaaaccccgtctttac

SEQ ID NO: 150833 - DNA, 201 bp, Homo sapiens; identical to SEQ ID NO: 28122

SEQ ID NO: 150834 - DNA, 201 bp, Homo sapiens; identical to SEQ ID NO: 28123

SEQ ID NO: 150835 - DNA, 201 bp, Homo sapiens
agattaccatattgaaccacaaatccactaaacagatcccaaaaaaagctctgggggggaactgaaatatttcaggaaccctagtttacaaagagcaacaraaacttctgttctcattctttcctttaggtgtgtttgtgcataaatagtattgtgcacatggaagtcttctgctttattcattctgtctccatctcattt

SEQ ID NO: 150836 - DNA, 201 bp, Homo sapiens
atattaaaaataatattaaacaatagtggaatagccagtagccttgtttgtgtctgatcttaatgagaacatctctgtttattttaccactaagtatgaaytggctagtggttgtgctttattctacttttacactgagtgtttttaaaacaaatcacttgagctgctccaaaaacatcctgtgctaggcacagaattcac

SEQ ID NO: 150837 - DNA, 201 bp, Homo sapiens
ccagcacagacccatattctttcctattttaactttttttttttttttttttttggaggcttcaattggtatgcacaatgtgggcaggaaggtagagttaraacttttagatgcagagagagactcagattaccatattgaaccacaaatccactaaacagatcccaaaaaaagctctgggggggaactgaaatatttcag

SEQ ID NO: 150838 - DNA, 201 bp, Homo sapiens
attctgctaagcttattccctcacataaataagtactgtgtgtctagtctgtggtccttataacaaagcatattggatgtgcaatttgatattcagctaartaagtcagaataaaaactctaagccaggtaaagccagatacaccaaacttgttccccaactggtaaggataaagcatcaattatggtttaatgcatatgt

SEQ ID NO: 150839 - DNA, 201 bp, Homo sapiens
atcttctccttattgcacatgctatatgaccaaaagacaggggcagggcagtttgtcttttaaaaagaaatcaagtcttctgtgctgagattgagcaggtraggtagagaggtggtaagtagaaaaaaaggaagggaagagccaggcaggactaggagaagaagggataaatagaacaagcattcctacggggaaaatgcc

SEQ ID NO: 150840 - DNA, 201 bp, Homo sapiens
tgaaacgacttgggattatgcctctgaccatggggaaaagaaacttatttctgttgacacgtaagtcactatttttattgtttatagaccaaaattttaarttatttttaaaggatagagccaataagatgaaatatttttaaaatttcttatatacagaaactgcaaaatgtgggcttgaaacccaagacacttgaatca

SEQ ID NO: 150841 - DNA, 201 bp, Homo sapiens
aaaacccaatcaaatataaaaaaataataaaaatgtctgtgaagcttctacacaccctagccattagcctttcattttcctgtgtccaaataggataacayatccccaaggatcacatagtagatgtttaataaatgtttgctgaatgaattaatggactatctattctctcatttaagttcaaacacattcactttgcac

SEQ ID NO: 150842 - DNA, 201 bp, Homo sapiens
ccctagtttacaaagagcaacagaaacttctgttctcattctttcctttaggtgtgtttgtgcataaatagtattgtgcacatggaagtcttctgctttaytcattctgtctccatctcattttgttttgatttacagaaagatgtagacaaggaattctatttgtttcctacagtatttgatgagaatgagagtttactc

SEQ ID NO: 150843 - DNA, 201 bp, Homo sapiens
ttaagaagtgaatagttaccactacacggtaaggtaagcagcctgaaagcatttgtatcatatatgtgtgtgtgtgtgtgtgtgtgtgtgtgtgtgtgtgwatatataaaataaaaaactcctctacttgtactttggcattcaatttttagaaattcagtctcaaatgccattatggtatttttcaaatgatacctttaa

SEQ ID NO: 150844 - DNA, 201 bp, Homo sapiens
ggaggtttgtaggtagtcctgattgatgaattcattctcatcacatctttctttcacacccacttgatgtggataccaaagacttattaggaatacaaaamccacattttaccatttgtattaaacacagaaacgagctcgattttttaaaaacagatttatccattttttcaatatccctgagctgaacattaacaaatg

SEQ ID NO: 150845 - DNA, 201 bp, Homo sapiens
acaaggtaagagctatccatggcaattactcttgctctgtttgaaaatgttttaatacaagtgaagaaaatattttctcagagagacttatgaaaaaaagstgcaaagagtacagccggtgcttcatatccgtggattccccacccaggattcaatcatggattgaaaatattcaggaaaaaataattccactaagttcca

SEQ ID NO: 150846 - DNA, 201 bp, Homo sapiens
gaatgtttggaaacctacaaggcctcacaatgcacgtgggagatgaagtcaactggtatctgatgggaatgggcaatgaaatagacttacacactgtacaytttcacggccatagcttccaatacaaggtaagagctatccatggcaattactcttgctctgtttgaaaatgttttaatacaagtgaagaaaatattttct

SEQ ID NO: 150847 - DNA, 201 bp, Homo sapiens
tagcaaagaagtgacatgttttcttatttaccactccagggacttttaatgttgaatgccttacaactgatcattacacaggcggcatgaagcaaaaatawactgtgaaccaatgcaggcggcagtctgaggattccaccttctacctgggagagaggacatactatatcgcagcagtggaggtggaatgggattattccc

SEQ ID NO: 150848 - DNA, 201 bp, Homo sapiens
gtagacaaggaattctatttgtttcctacagtatttgatgagaatgagagtttactcctggaagataatattagaatgtttacaactgcacctgatcaggkggataaggaagatgaagactttcaggaatctaataaaatgcactgtaagtactgcatcatccaccaatctaccaagttattttagtactgcatatgtaat

SEQ ID NO: 150849 - DNA, 201 bp, Homo sapiens
ttcttctattagttgtaaagttggcttccaggaaaatactatttctcaataacttagcagggtgtagcaagggtgctattttaggtagagaggtcaggagrgcttccttgaggaggtggcattgctgaaaacacctaaagtttgagaagtaatgaaattcaggtaattgtgcacgaattgattctaggccccgaagacagg

SEQ ID NO: 150850 - DNA, 201 bp, Homo sapiens
aaactactataattactctaataaaaactatatttttattcaaaatttaaagtttaaaacttaagttacattttcattaagacaaatactaaccttagttgtttttttttttaagtgtttcaaatgcatttttagataagggagagttttacataggctcaaagtacaagaaagttgtgtatcggcagtatactgatagca

SEQ ID NO: 150851 - DNA, 201 bp, Homo sapiens
ccactcccatccccaccccactgtgttcccatactgtcagcattcccctgaggcttggttatcctcaacccctagactaagacaccaaggcaaaatggcaytgttgctggagcacaaaaatcctaccagacaagagacaagctaagattggataaagggtagaaatgagaggggtataaatgactcctggccagatatcca

SEQ ID NO: 150852 - DNA, 201 bp, Homo sapiens; identical to SEQ ID NO: 28137

SEQ ID NO: 150853 - DNA, 201 bp, Homo sapiens
ttccaaagtgctgggattacaggcgtgaggcactacacctggccctaataaaattcttaaccaatttatccccattatcctacccattcctctcaaattayagctatttacttttaaaattaaaatataaatgattaattacaagaagaaatatacaaaaggaaattaattacaacaggaaataaaagaaaaaatgatacc

SEQ ID NO: 150854 - DNA, 201 bp, Homo sapiens
gaaattttcactagtggcagggtagaggccaggactcagatggctgcactcagatggctaggtatgctttctaccacacagacttttaaagtcttattatkcattcctacttggatagaagagtgatgatttaaaactactataattactctaataaaaactatatttttattcaaaatttaaagtttaaaacttaagtta

SEQ ID NO: 150855 - DNA, 201 bp, Homo sapiens
ttattagctcccagtgccttctccctcctgtttatttttactgtttatttatttattatttatttattttttattttttgagacagagtcttcttctgtcrcccaggctagagtgcaatggcgcgatctcggctcaccgcaagttccaccttccgggttcacgccattctcctgcctcagcctcccgagtagctgggacta

SEQ ID NO: 150856 - DNA, 201 bp, Homo sapiens
tgttacttcaattggtctctccaaaattcctgaggccctgggtgcaaagtctcagttctctgaaatcctgacctaattcacaagggttactgaagattttycttgtttccaggacctctacagtggattaattggccccctgattgtttgtcgaagaccttacttgaaagtattcaatcccagaaggaaactggaatttgc

SEQ ID NO: 150857 - DNA, 201 bp, Homo sapiens
ctggataagacatataactgccattcagctcttaactattttttttttatttttttttaattttttttgacttctgtcacccaggctggagtgcagtggcrcgacctcggatcactgcaagcaccgcatccggggttcaagccattctcctgcctcagcctcccgagtagctgggactacaggcgcccactaccatgcctg

SEQ ID NO: 150858 - DNA, 201 bp, Homo sapiens
acaaaaatttctttttagattttcttgaaatcattatatagtctttctcctgtaatgtgatcaactacaaataaatatgaccagctacattaaagactttytaatgttaaactatccttgcactctgggggagaacaacacttaagtatggtgaatttttctttaatatattggtgggctgaatttgactgtgtttgattt

SEQ ID NO: 150859 - DNA, 201 bp, Homo sapiens
ccgtgttagccaggatggtcttgatctcctgacctcctgatctgcccgcctcagcctcccaaagtgctgggattacaggcgtgagtcactgcacccggccractattttattaataggtactttgtttccatataataatggcatgtttctcttggttgtgctctttcgtggaaagtgtgaatgtgagagaatttctaggt

SEQ ID NO: 150860 - DNA, 201 bp, Homo sapiens
ccacagaaacattcacctatgaatggactgtccccaaagaagtaggacccactaatgcagatcctgtgtgtctagctaagatgtattattctgctgtggawcccactaaagatatattcactgggcttattgggccaatgaaaatatgcaagaaaggaagtttacatgcaaatgggagacaggtaagtccaactggggaaa

SEQ ID NO: 150861 - DNA, 201 bp, Homo sapiens
tatgaccaaaagacaggggcagggcagtttgtcttttaaaaagaaatcaagtcttctgtgctgagattgagcaggtaaggtagagaggtggtaagtagaaraaaaggaagggaagagccaggcaggactaggagaagaagggataaatagaacaagcattcctacggggaaaatgccaatgaaggtaatgtgaaagaaata

SEQ ID NO: 150862 - DNA, 201 bp, Homo sapiens
aataaaccacttctgcctcactttgtatgtcaggtagaatcctgttcaaaacaaaaaggggactatgttcaaaatcatttgctaatttattttccaattcyaaaatctcatttcctttgaaataatccaaaactaagattaaggcttttggtgcaaagtgcctagaaaagcaatgtgatattattgactttaaagtatcca

SEQ ID NO: 150863 - DNA, 201 bp, Homo sapiens
aacagatcccaaaaaaagctctgggggggaactgaaatatttcaggaaccctagtttacaaagagcaacagaaacttctgttctcattctttcctttaggkgtgtttgtgcataaatagtattgtgcacatggaagtcttctgctttattcattctgtctccatctcattttgttttgatttacagaaagatgtagacaag

SEQ ID NO: 150864 - DNA, 201 bp, Homo sapiens
cttagatgacaacatcaaaacatactctgatcaccccgagaaagtaaacaaagatgatgaggaattcatagaaagcaataaaatgcatggtatgtcacatkattctaaaacaatttttctacttttttatcattttctctttcaaataaaattattttggagaccattcatttgttttgtcttaaaataaaccacttctgc

SEQ ID NO: 150865 - DNA, 201 bp, Homo sapiens
aaactatccttgcactctgggggagaacaacacttaagtatggtgaatttttctttaatatattggtgggctgaatttgactgtgtttgatttagaatttytcatttaagcttataaatgaaattagtttagcttttgcttgctttttcagatattaatatccatggttatactatctttattaaataaactaggaatagt

SEQ ID NO: 150866 - DNA, 201 bp, Homo sapiens
caaagaagtgacatgttttcttatttaccactccagggacttttaatgttgaatgccttacaactgatcattacacaggcggcatgaagcaaaaatatacygtgaaccaatgcaggcggcagtctgaggattccaccttctacctgggagagaggacatactatatcgcagcagtggaggtggaatgggattattccccac

SEQ ID NO: 150867 - DNA, 201 bp, Homo sapiens
tcaactacaaataaatatgaccagctacattaaagactttctaatgttaaactatccttgcactctgggggagaacaacacttaagtatggtgaatttttytttaatatattggtgggctgaatttgactgtgtttgatttagaatttctcatttaagcttataaatgaaattagtttagcttttgcttgctttttcagat

SEQ ID NO: 150868 - DNA, 201 bp, Homo sapiens
tattttctaatgaaattctgttttttgacagagtctcactctgtcgcccaggatggtgtgtagtggtgtgatttcagctcactgcaacctgccgctcctgkgctcaagtgagtctcccaccttagcctcccaagtagctgggactacagggatgggccaccacgcctggctaatttttgtatttttagtagagatgaggtt

SEQ ID NO: 150869 - DNA, 201 bp, Homo sapiens
tatcaaattgatgcctgtagttttagtgaagttcccagaaactattttctaatgaaattctgttttttgacagagtctcactctgtcgcccaggatggtgygtagtggtgtgatttcagctcactgcaacctgccgctcctgtgctcaagtgagtctcccaccttagcctcccaagtagctgggactacagggatgggcca

SEQ ID NO: 150870 - DNA, 201 bp, Homo sapiens
gtgatattattgactttaaagtatccatttctctcatttgtagtaaaataagtcctattacatcaaaaagattctttacattaacctaataatcatatttkctttgaaatagctattggtttaaaatatcctgaaaagtaacataaaaccatatgctttccctagctattaatggaagaatgtttggaaacctacaaggcc

SEQ ID NO: 150871 - DNA, 201 bp, Homo sapiens
tgtttattaaataatatgacatagtaaaatattacttatttctcttggaaactatgtattgtcccgtatactgatgaaattatatatattttatcaaattkatgcctgtagttttagtgaagttcccagaaactattttctaatgaaattctgttttttgacagagtctcactctgtcgcccaggatggtgtgtagtggtg

SEQ ID NO: 150872 - DNA, 201 bp, Homo sapiens
agctgcatcatttacaagagcagaagtaattctccagactctgattcccaatttcagcagtaattttaggtttccttttcagagaagtaagaattacaccraattttagaaaaaaaaaaaagttgcattaaacaataacaacaacaacaacaacaacaacaaaacacttcctaggaacttgtccttattcatttccgcttc

SEQ ID NO: 150873 - DNA, 201 bp, Homo sapiens
tttatgtacacttaaaaaaccttgcctctaggccctacacctttcattcacatggaataacttactataaggaacatgagggtaagttcagctcatgtagytggaatttcctcttacttttcagtagaagtgccttttagcttctaaaattgtggacttctctcctggataagacatataactgccattcagctcttaact

SEQ ID NO: 150874 - DNA, 201 bp, Homo sapiens
tgaaccatgaggatattttggggagaaggcagaggaaacagcaagtgcaaagttcccaaggcaggcacacacttgatctgctctaagaacagcaaaaggakggatggagcagggtgagcagaaggtgtggaaagctagatcacctgaggccatgataaggacttcagcattaattctgaggaaggtggagagccccagagg

SEQ ID NO: 150875 - DNA, 201 bp, Homo sapiens
gtgtgaaccatgaggatattttggggagaaggcagaggaaacagcaagtgcaaagttcccaaggcaggcacacacttgatctgctctaagaacagcaaaasgatggatggagcagggtgagcagaaggtgtggaaagctagatcacctgaggccatgataaggacttcagcattaattctgaggaaggtggagagccccag

SEQ ID NO: 150876 - DNA, 201 bp, Homo sapiens
tctctcaggaggtgctacttaaggagagacgagaataaaatgagggtgtgaaccatgaggatattttggggagaaggcagaggaaacagcaagtgcaaagktcccaaggcaggcacacacttgatctgctctaagaacagcaaaaggatggatggagcagggtgagcagaaggtgtggaaagctagatcacctgaggccat

SEQ ID NO: 150877 - DNA, 201 bp, Homo sapiens
tgaggcaggagaattgcttgaacctgagaggtggaggttgcagtgagctgagatggcaccactgcactccagcctgggcaacagagtgagactccacctgaaaaaaaaaaaaaaaaggccaggcatggtggctcatgcctgtaatcccagcactttgggaggccgaggcgggcagatcatgaggtcaggagatcgagacca

SEQ ID NO: 150878 - DNA, 201 bp, Homo sapiens
tttacatttcttttgtggtggaatgtcatcagttaaggtggggcagggcatattcacttcttttgtgattcttcagttacttcaggccatctgggcgtatrcgtgcaagtcacaggggatgcgatggcttggcttgggctcagaggcctgacaatgacaaatacttgattcattccctatatttataagttttcaaattaa

SEQ ID NO: 150879 - DNA, 201 bp, Homo sapiens
tctgggcgtatacgtgcaagtcacaggggatgcgatggcttggcttgggctcagaggcctgacaatgacaaatacttgattcattccctatatttataagttttcaaattaatcaaaggcttctcaatttttttttacttttaagtagcattgtgcactcgtggatttaagcatatgtggtgtgttacaattcactgccat

SEQ ID NO: 150880 - DNA, 201 bp, Homo sapiens
accaggtactcacgggggcgggggtgggggtggtgcattttaacaggctgtacagcctttccacagattactctcatcatagagagtctggaccaagaaartgaaaagggaggtagttgtgaagaggggatgcaaggaggtgtctgtgtgtatgcaagtacatgcacatgcttgtactaaaaaaaaaagtccacaggagag

SEQ ID NO: 150881 - DNA, 201 bp, Homo sapiens
ttttgaagtatcaagtgggaaagaagagacaatgtcagagtataccacatacagtaaggacaagtaagggttaaagaaatttcttttctggagtgtatgcgtgtgtgtgtgtgtgtgtgtgtgtatacaggatcacaacatgaaatgtacttcttatgtggttgcaatagaaaagtttgaaaatcactgcgtaaagtgtag

SEQ ID NO: 150882 - DNA, 201 bp, Homo sapiens
aaggactttcaggccaaacctcccctagaactcttaagagataaacaaatggtctccatttttatttccagtgtattgattccaaattccctgggacgcartataaatccaagagtattataccacaaacccatgggggagagaaacaagttatctttgctgatctttgcttttattactaagttagaccttctgattgga

SEQ ID NO: 150883 - DNA, 201 bp, Homo sapiens
tttgaagtatcaagtgggaaagaagagacaatgtcagagtataccacatacagtaaggacaagtaagggttaaagaaatttcttttctggagtgtatgcgkgtgtgtgtgtgtgtgtgtgtgtatacaggatcacaacatgaaatgtacttcttatgtggttgcaatagaaaagtttgaaaatcactgcgtaaagtgtagg

SEQ ID NO: 150884 - DNA, 201 bp, Homo sapiens
agtgtatatgggaggaaggaggggaatgggaggaaaggagatgaagataagcaaacaaaagaaaatgaaatagataacttcagaaagtgagcagttctgcaaaaaaaaaaaaaaaaaaatagcgtaatgagatagtgaacagaaattctagttcagataatgtggagataatatttaatgtgatacctaaatttcaaaaag

SEQ ID NO: 150885 - DNA, 201 bp, Homo sapiens
aaattagtttagcttttgcttgctttttcagatattaatatccatggttatactatctttattaaataaactaggaatagtttaaatatttgggaaccatytgctccctagagagttgaaagaaactgccttaaaaattattttgacttttaaaaaggagtagttttgttgtttatggggttccccccctccttttttttt

SEQ ID NO: 150886 - DNA, 201 bp, Homo sapiens
ttctagtgtatatgggaggaaggaggggaatgggaggaaaggagatgaagataagcaaacaaaagaaaatgaaatagataacttcagaaagtgagcagttytgcaaaaaaaaaaaaaaaaaaatagcgtaatgagatagtgaacagaaattctagttcagataatgtggagataatatttaatgtgatacctaaatttcaa

SEQ ID NO: 150887 - DNA, 201 bp, Homo sapiens
gtgtatatgggaggaaggaggggaatgggaggaaaggagatgaagataagcaaacaaaagaaaatgaaatagataacttcagaaagtgagcagttctgcaaaaaaaaaaaaaaaaaaatagcgtaatgagatagtgaacagaaattctagttcagataatgtggagataatatttaatgtgatacctaaatttcaaaaagg

SEQ ID NO: 150888 - DNA, 201 bp, Homo sapiens
caatttcttcacattctcatcaacacttgttattttctgttttgtttttttttttaataataaccatcctaatgagcataagtgatatttcatagtggttktgatttgcattttcttaatgactagtaatgttgaggatcttttcatgtactttttggtcatttgtgtatcttcttcagataaatgtctatttaagtcctt

SEQ ID NO: 150889 - DNA, 201 bp, Homo sapiens
tacactgagtgtttttaaaacaaatcacttgagctgctccaaaaacatcctgtgctaggcacagaattcactggtaaataagacaaataagtttcctgctytgataggtttttattctagtgtatatgggaggaaggaggggaatgggaggaaaggagatgaagataagcaaacaaaagaaaatgaaatagataacttcag

SEQ ID NO: 150890 - DNA, 201 bp, Homo sapiens
tgtatatgggaggaaggaggggaatgggaggaaaggagatgaagataagcaaacaaaagaaaatgaaatagataacttcagaaagtgagcagttctgcaaaaaaaaaaaaaaaaaaatagcgtaatgagatagtgaacagaaattctagttcagataatgtggagataatatttaatgtgatacctaaatttcaaaaaggc

SEQ ID NO: 150891 - DNA, 201 bp, Homo sapiens
tcaaaagttatcaaatgcttgacaaagtcctaagaaaacactgaatactattagataaatcaattaatttgcttcccatttcagaaaacgtggcactgtaygattcagcagcattaagtacagttacactattgcatagccgtcaccactatccatttccagaactttttttttatcatcccaaatgaaaactctgaaccc

SEQ ID NO: 150892 - DNA, 201 bp, Homo sapiens
ggaaccatctgctccctagagagttgaaagaaactgccttaaaaattattttgacttttaaaaaggagtagttttgttgtttatggggttccccccctccttttttttttttttttttttttagacagagtcttcctctgtcgcccaggctggagtgcagtggtgtgatctcagctcactgcaacctccacctgctgggtt

SEQ ID NO: 150893 - DNA, 201 bp, Homo sapiens
ttgaaatcattatatagtctttctcctgtaatgtgatcaactacaaataaatatgaccagctacattaaagactttctaatgttaaactatccttgcactytgggggagaacaacacttaagtatggtgaatttttctttaatatattggtgggctgaatttgactgtgtttgatttagaatttctcatttaagcttataa

SEQ ID NO: 150894 - DNA, 201 bp, Homo sapiens
atcctaatcatgttctttacagaaaaagaaaatcccggatcatgtactgcattgttgccatgtcttttaagtctcctttactctgaataattccttaatamagggcactttgtagaatgtccttcaatttgagtttgtctaatgtttccttatgattagatttaggttatgcacttttggcaagactatcatggcatgatg

SEQ ID NO: 150895 - DNA, 201 bp, Homo sapiens
agtcagtagatcacattaattgcatataatgatttacatttttctcccctatatatgtggttatattcctttctcatttctaatgtggtatttttttggtyctctccaccttttttattagacttgccagagatttatatttctctggtcttttcacataatatatttttggatttaatcattttacctgtgttaaatttc

SEQ ID NO: 150896 - DNA, 201 bp, Homo sapiens
taatattttcttctcaaaaagataaatgctacttcatcttcttctggcatttattatacttgataattttaatgtcaacctgattttttcgtttcataactttttttttttttttttgagatagagtctcgctctgttacccaggctggagtgcagtggctcgatcttggctcactgcaagctccacctcctgggttcacg

SEQ ID NO: 150897 - DNA, 201 bp, Homo sapiens
tcccaaaaaaagctctgggggggaactgaaatatttcaggaaccctagtttacaaagagcaacagaaacttctgttctcattctttcctttaggtgtgttkgtgcataaatagtattgtgcacatggaagtcttctgctttattcattctgtctccatctcattttgttttgatttacagaaagatgtagacaaggaattc

SEQ ID NO: 150898 - DNA, 201 bp, Homo sapiens
aacttgagttttccatcattaatttatttacagctgtctgccctagtttatagtactgttgctatctgtctattccttcaatttctacttgtcatcacccragcagtgtttacagggcaataggagagagaaacattgtcttcattaatcaatgcctctttctgtttcatttcagccggtttgcaagcctttttccaggtc

SEQ ID NO: 150899 - DNA, 201 bp, Homo sapiens
ccaaaaaaagctctgggggggaactgaaatatttcaggaaccctagtttacaaagagcaacagaaacttctgttctcattctttcctttaggtgtgtttgkgcataaatagtattgtgcacatggaagtcttctgctttattcattctgtctccatctcattttgttttgatttacagaaagatgtagacaaggaattcta

SEQ ID NO: 150900 - DNA, 201 bp, Homo sapiens
gtcaagattctctcaggaggtgctacttaaggagagacgagaataaaatgagggtgtgaaccatgaggatattttggggagaaggcagaggaaacagcaartgcaaagttcccaaggcaggcacacacttgatctgctctaagaacagcaaaaggatggatggagcagggtgagcagaaggtgtggaaagctagatcacct

SEQ ID NO: 150901 - DNA, 201 bp, Homo sapiens
gggggaactgaaatatttcaggaaccctagtttacaaagagcaacagaaacttctgttctcattctttcctttaggtgtgtttgtgcataaatagtattgkgcacatggaagtcttctgctttattcattctgtctccatctcattttgttttgatttacagaaagatgtagacaaggaattctatttgtttcctacagta

SEQ ID NO: 150902 - DNA, 201 bp, Homo sapiens
tgattataagtacacaaagaaaaataaggcagaggaaggggatggtgactgagaggggaaagggtcaagattctctcaggaggtgctacttaaggagagaygagaataaaatgagggtgtgaaccatgaggatattttggggagaaggcagaggaaacagcaagtgcaaagttcccaaggcaggcacacacttgatctgct

SEQ ID NO: 150903 - DNA, 201 bp, Homo sapiens
tcattttgttttgatttacagaaagatgtagacaaggaattctatttgtttcctacagtatttgatgagaatgagagtttactcctggaagataatattaraatgtttacaactgcacctgatcaggtggataaggaagatgaagactttcaggaatctaataaaatgcactgtaagtactgcatcatccaccaatctacc

SEQ ID NO: 150904 - DNA, 201 bp, Homo sapiens
ctccaagaaggggaaaaaaatgaagattttgatacttggtatttttctgtttttatgtagtaccccagcctgggcgaaagaaaagcattattacattggawttattgaaacgacttgggattatgcctctgaccatggggaaaagaaacttatttctgttgacacgtaagtcactatttttattgtttatagaccaaaatt

SEQ ID NO: 150905 - DNA, 201 bp, Homo sapiens
taaagatagctggaaaatcagactagaaggggaatgactcccataaatattctgcacctaaacttttcatcatgtctctgtagcctagatgtagtgttggyttgttggttgcaagtgaatattctatgctagcattgtagccatgcaaattcagagacatctacagacctggctctgaacgagtaaaacaaactacaactg

SEQ ID NO: 150906 - DNA, 201 bp, Homo sapiens
gactctgattcccaatttcagcagtaattttaggtttccttttcagagaagtaagaattacaccaaattttagaaaaaaaaaaaagttgcattaaacaataacaacaacaacaacaacaacaacaaaacacttcctaggaacttgtccttattcatttccgcttctctcaatttccttaagggaaaatttccatttatctt

SEQ ID NO: 150907 - DNA, 201 bp, Homo sapiens
ctgcacctcattctcatttaaatttatagtttaattaataatgtttattgaccatttgtacttcttcagtcaatttcttggtgacggcagatattcatttycaattattaatccataaaatatctatatattaagccatataatatatatatgtgtgtgtgtgtatactacatacatattatctttgttatgtataatgca

SEQ ID NO: 150908 - DNA, 201 bp, Homo sapiens
actctgattcccaatttcagcagtaattttaggtttccttttcagagaagtaagaattacaccaaattttagaaaaaaaaaaaagttgcattaaacaataacaacaacaacaacaacaacaacaaaacacttcctaggaacttgtccttattcatttccgcttctctcaatttccttaagggaaaatttccatttatcttc

SEQ ID NO: 150909 - DNA, 201 bp, Homo sapiens
gaattttaggtaaagaatcgagtttaagctgaatgttgatcttgaaggtctgggatgatgaacaggaaaatatgcattgagagtactagtatatgcatatrcaagtactagtgcttggtcactagtacctagaatataggagacactaaataaatatttctgaataagtttaaatgagtaaataaaagatacataggaaga

SEQ ID NO: 150910 - DNA, 201 bp, Homo sapiens
agggttaaagaaatttcttttctggagtgtatgcgtgtgtgtgtgtgtgtgtgtgtgtatacaggatcacaacatgaaatgtacttcttatgtggttgcartagaaaagtttgaaaatcactgcgtaaagtgtaggagagaggctgttctctgccgttttactaatacttagttttaaatttttacaaacggcataggtca

SEQ ID NO: 150911 - DNA, 201 bp, Homo sapiens
ctctgattcccaatttcagcagtaattttaggtttccttttcagagaagtaagaattacaccaaattttagaaaaaaaaaaaagttgcattaaacaataacaacaacaacaacaacaacaacaaaacacttcctaggaacttgtccttattcatttccgcttctctcaatttccttaagggaaaatttccatttatcttct

SEQ ID NO: 150912 - DNA, 201 bp, Homo sapiens
aattatgaaaatatatggaggtaaaagaagaaaatagtctcaacacaaaaaagggatcacaattgcatatattgtttgcaatttgctttatacacttaaamatattatgattatccttctatatcattaaaaaaacttcagccttattctgaatgactgcaaagtatttcatgatctgaatgcaccataatttattcagtc

SEQ ID NO: 150913 - DNA, 201 bp, Homo sapiens
acctgtttgacagcagtagtgagtatagtttgcagtgtaaaggagtaaacttttattttgtaattggggtaaaatggttaaaaggctacagctgccattaraagtaagtgaaaactggccgggcgcggtggctcacgtctgtaatcccagcactttgggaggccgaggcgggcggatcacgaggtcaggggatggagacca

SEQ ID NO: 150914 - DNA, 201 bp, Homo sapiens
gtgaagtcaatcaatttctaaagcaagttcctgacctttataactattctttttaaaaaaatatcattttaatatgaaaatatttcatgaacactgtgaamattatgaaaatatatggaggtaaaagaagaaaatagtctcaacacaaaaaagggatcacaattgcatatattgtttgcaatttgctttatacacttaaac

SEQ ID NO: 150915 - DNA, 201 bp, Homo sapiens
gttgggacaaaagctaaatgcttatacagttttgtgaaatattgccaaatccccctctgtagttgtgccagtttgtatttccagaaggtatacatgagatyatctgtgtttccacagcgttattacaaactatattgtcaaatttggggattttcacaaatctgataggaaataaatgatacagtcgaggagcggatcata

SEQ ID NO: 150916 - DNA, 201 bp, Homo sapiens
ttctgttatgtcagcatcacccacatgacctacctactactcaccattgttccaatttaactacttcaagtgaaaagttactaaattggcagtaccacatygggcaaagtctgttacttcaattggtctctccaaaattcctgaggccctgggtgcaaagtctcagttctctgaaatcctgacctaattcacaagggttac

SEQ ID NO: 150917 - DNA, 201 bp, Homo sapiens
ttgagggatgaaaaaactgaggttccaataggcagtgactagctggaggaaattttcactagtggcagggtagaggccaggactcagatggctgcactcaratggctaggtatgctttctaccacacagacttttaaagtcttattatgcattcctacttggatagaagagtgatgatttaaaactactataattactcta

SEQ ID NO: 150918 - DNA, 201 bp, Homo sapiens
gaggttccaataggcagtgactagctggaggaaattttcactagtggcagggtagaggccaggactcagatggctgcactcagatggctaggtatgctttytaccacacagacttttaaagtcttattatgcattcctacttggatagaagagtgatgatttaaaactactataattactctaataaaaactatattttta

SEQ ID NO: 150919 - DNA, 201 bp, Homo sapiens
ctgaagatttttcttgtttccaggacctctacagtggattaattggccccctgattgtttgtcgaagaccttacttgaaagtattcaatcccagaaggaarctggaatttgcccttctgtttctagtttttgatgagaatgaatcttggtacttagatgacaacatcaaaacatactctgatcaccccgagaaagtaaaca

SEQ ID NO: 150920 - DNA, 201 bp, Homo sapiens
caggaactgggctgcacagcaggaagtgagcagcaggcaagcaagcattatctcctgagctctgcctcctgtcagatcagtggcggcaacagattctcatwcgagcgcaaatcctattgtgaactgtgcatgtgaggggtctaggttgcacgttccttatcagaatttatgcctgatgatctgaggtagaatagtttcatc

SEQ ID NO: 150921 - DNA, 201 bp, Homo sapiens
cacacacacccccatgggccacacagcaggaggtgagcctgttaggtggtctgtcaggaactgggctgcacagcaggaagtgagcagcaggcaagcaagcrttatctcctgagctctgcctcctgtcagatcagtggcggcaacagattctcatacgagcgcaaatcctattgtgaactgtgcatgtgaggggtctaggtt

SEQ ID NO: 150922 - DNA, 201 bp, Homo sapiens
aaaaatactaattatccatagttctataagcaatcgctcttatatttttatataattcttccattttcatctgtatacatataatatatattttaaatacrgttgagatcatagcaaataaatgttattttaatttcataatcggagtttgttctcttagcattacaagggttttataaacataattttaatgatataaaa

SEQ ID NO: 150923 - DNA, 201 bp, Homo sapiens; identical to SEQ ID NO: 28138

SEQ ID NO: 150924 - DNA, 201 bp, Homo sapiens
gcgagactctgctccaaaaacaaaaaataaataaataaaagctcccgagcagctggccagtgctaatacacaataaagagtagccactggggccgggcgcrgtggcttacgcctgtaatctcagtactttgcaaagccgagacgggcggatcactgaggtcaggagatcgagaccatcctggctaacacggtgaaaccccg

SEQ ID NO: 150925 - DNA, 201 bp, Homo sapiens
actccagcttgggcaagagagcgagactctgctccaaaaacaaaaaataaataaataaaagctcccgagcagctggccagtgctaatacacaataaagagkagccactggggccgggcgcagtggcttacgcctgtaatctcagtactttgcaaagccgagacgggcggatcactgaggtcaggagatcgagaccatcctg

SEQ ID NO: 150926 - DNA, 201 bp, Homo sapiens
gaacaactggccctgaaagtatagtactatatatacttactcagctttgtaaaatataccagtgttgtaacatccagaaaaattgtatgttgcactggaargcaccctgtttttcgacttatttctgtcaagtataattaactttgttctttatttgagcctggccatcccttagtttaactcgataaatccttcctttat

SEQ ID NO: 150927 - DNA, 201 bp, Homo sapiens
tgttaatatggtattgataagaatcctcaggctgaattcagttccaaaatgaaagagtgctgtgattgattagcaatgtctgacatgagtatagggggcargaataccagcatgtgtgccagatatttgccattccaaattgattctatttatatagaggtaactctcactatctcaagcattaatgactcttagtcacaa

SEQ ID NO: 150928 - DNA, 201 bp, Homo sapiens
tatgcacaatgtgggcaggaaggtagagttagaacttttagatgcagagagagactcagattaccatattgaaccacaaatccactaaacagatcccaaaraaagctctgggggggaactgaaatatttcaggaaccctagtttacaaagagcaacagaaacttctgttctcattctttcctttaggtgtgtttgtgcata

SEQ ID NO: 150929 - DNA, 201 bp, Homo sapiens
tcatccaccaatctaccaagttattttagtactgcatatgtaatgcttttaactaaacaaaatgtgaagagctttgctcattgattattttttcaataaaygattacaatagtgtcctgaaggtaatctcactggttatttgatgtgtctgtcagttatccattatttcacttaattcaagatatgtcaattacatgaatg

SEQ ID NO: 150930 - DNA, 201 bp, Homo sapiens
aggaagatgaagactttcaggaatctaataaaatgcactgtaagtactgcatcatccaccaatctaccaagttattttagtactgcatatgtaatgctttyaactaaacaaaatgtgaagagctttgctcattgattattttttcaataaacgattacaatagtgtcctgaaggtaatctcactggttatttgatgtgtct

SEQ ID NO: 150931 - DNA, 201 bp, Homo sapiens
ctcattcctcatttctttgcatagtatatattactctgatgtgtggacatgctacagtttatacaatcagtcccttatttgacaagtgtttgggttgtttmtagtctttgccttcacaaatacaaaacaatgtacagctttgttagccttgttcatgtctctttgtattttgccagcatacctttgtgataaattcctaga

SEQ ID NO: 150932 - DNA, 201 bp, Homo sapiens
ttgtttgaatctctgttcgaattcattgggaggttatttcttcatctgggatgatttcttcctcaaatctgcttccatcctgctctgccttacaggaattyttccggttttcatgaatgtgaaatcttccctgatttccagcacagacccatattctttcctattttaactttttttttttttttttttttggaggcttca

SEQ ID NO: 150933 - DNA, 201 bp, Homo sapiens
tttaacattatgtaaagttgaaatttttcaccataaaaataaatacataacagatactaatatccaattattatattatgaatttaataatatacaataargaaagtttctgacctgaagataagtggttgtaaataaaactaatacatcttgtaattatttctttttttaacctggttttaaggtggtattatcttctaa

SEQ ID NO: 150934 - DNA, 201 bp, Homo sapiens
gaatggactgtccccaaagaagtaggacccactaatgcagatcctgtgtgtctagctaagatgtattattctgctgtggatcccactaaagatatattcaytgggcttattgggccaatgaaaatatgcaagaaaggaagtttacatgcaaatgggagacaggtaagtccaactggggaaaaaaaaattgttcaatctctt

SEQ ID NO: 150935 - DNA, 201 bp, Homo sapiens
cttaagggaaagacaggcaataatctctaaagtattctctcctttaagagtcacttattctcaggggctcatttgctttgattcctttgactgccttcttytgaactactgaatcatttcatagaccagatgcacttctgctcctttttttttgttttttccactgggagaagtgggaggaggtgataatgtttgaacagc

SEQ ID NO: 150936 - DNA, 201 bp, Homo sapiens
attctctctttgttcccaggtcctgtcatttgggcagaggtgggagacaccatcagagtaaccttccataacaaaggagcatatcccctcagtattgagcygattggggtgagattcaataagaacaacgagggcacatactattccccaaattacaacccccagagcagaagtgagtatacagcactgtgtaacaaatca

SEQ ID NO: 150937 - DNA, 201 bp, Homo sapiens
gatcttaagggaaagacaggcaataatctctaaagtattctctcctttaagagtcacttattctcaggggctcatttgctttgattcctttgactgccttyttctgaactactgaatcatttcatagaccagatgcacttctgctcctttttttttgttttttccactgggagaagtgggaggaggtgataatgtttgaac

SEQ ID NO: 150938 - DNA, 201 bp, Homo sapiens
ttattacaatgtgtatatttttcaccttcaaatgctctcctctgatttatgggagctttctttagatccccttcatcatagtttcagttctctgaaggatytaaccttcaggtctttgctttagtttgatttttttcaatttgataatcaccttatcatgtatctgaaggactgatcttaagggaaagacaggcaataatc

SEQ ID NO: 150939 - DNA, 201 bp, Homo sapiens
ttcaaatatctcatttgagggatgaaaaaactgaggttccaataggcagtgactagctggaggaaattttcactagtggcagggtagaggccaggactcaratggctgcactcagatggctaggtatgctttctaccacacagacttttaaagtcttattatgcattcctacttggatagaagagtgatgatttaaaacta

SEQ ID NO: 150940 - DNA, 201 bp, Homo sapiens
aaaaaaaaaaaaaaaaagaagtaagtgaaaagggaatgcctgggaaaagatgtccatttcagttcctataaatcagaaatattggactcataaaattttaragctataaagtaatcttagagatgatctgttcaaatatctcatttgagggatgaaaaaactgaggttccaataggcagtgactagctggaggaaattttc

SEQ ID NO: 150941 - DNA, 201 bp, Homo sapiens
gagcaagactcctcaaaaaaaaaaaaaaaaaaaaaaaaaaaagaagtaagtgaaaagggaatgcctgggaaaagatgtccatttcagttcctataaatcaraaatattggactcataaaattttagagctataaagtaatcttagagatgatctgttcaaatatctcatttgagggatgaaaaaactgaggttccaatagg

SEQ ID NO: 150942 - DNA, 201 bp, Homo sapiens
cctcctatttaaatagtcctaaggctcagagaattctccccacttcctgccacatgccttttgatgagaagagtaactaccacaaaacagaacagaaatayggactgcatgaccttttttgcattacaccataaaacgttcacaagggcactggtcacagtgttactgtttaaccatttcatttcaccaccaatatgaggg

SEQ ID NO: 150943 - DNA, 201 bp, Homo sapiens
atgagaaacagagtcccttaacaacaactagaccaataagtagatattttcgtttatttgtttgtgtttaacttcttcaaaataacctgtactcagaaacygagagcacaaaaataacgatactaccaaagtagaaaaataaactagttaacaaagtacagattttgtttccaacttttacttatatctgggtggaaggtc

SEQ ID NO: 150944 - DNA, 201 bp, Homo sapiens
tactatattggtaaacataatatcatagtatttatttctaacatcatgaaaaagacaacggagctcaagagcctgaaatacaattctaacttgaacaatcsttacctgtaaagacttgtctctgtttgtggctatatgcaccagaaaatagacgcacaactttgaattccaatcttcccatttgccaaaaagcatttaata

SEQ ID NO: 150945 - DNA, 201 bp, Homo sapiens
gagccaggcaggactaggagaagaagggataaatagaacaagcattcctacggggaaaatgccaatgaaggtaatgtgaaagaaatatattctctcagggwtcagtttgctgtatctaacttccaacagtggtgctgaagagacatatgactttaccaaatgtgactaccaaaagggcactccacggtgatagatctgtag

SEQ ID NO: 150946 - DNA, 201 bp, Homo sapiens
agacaggggcagggcagtttgtcttttaaaaagaaatcaagtcttctgtgctgagattgagcaggtaaggtagagaggtggtaagtagaaaaaaaggaagrgaagagccaggcaggactaggagaagaagggataaatagaacaagcattcctacggggaaaatgccaatgaaggtaatgtgaaagaaatatattctctca

SEQ ID NO: 150947 - DNA, 201 bp, Homo sapiens
taatgtttccttatgattagatttaggttatgcacttttggcaagactatcatggcatgatgttgtgtttttcttagtacaccatatcaggaggcacaagrtattgatcagttctattactggttatgttaacttcaagctttggttaagatggtgtctgccaggtgtctccattgtaaagttattcattttccctttaca

SEQ ID NO: 150948 - DNA, 201 bp, Homo sapiens
ctgaaaacccaatcaaatataaaaaaataataaaaatgtctgtgaagcttctacacaccctagccattagcctttcattttcctgtgtccaaataggatawcacatccccaaggatcacatagtagatgtttaataaatgtttgctgaatgaattaatggactatctattctctcatttaagttcaaacacattcactttg

SEQ ID NO: 150949 - DNA, 201 bp, Homo sapiens
tattgaatcttattgatgagtatatactattttctttaacattatgtaaagttgaaatttttcaccataaaaataaatacataacagatactaatatccarttattatattatgaatttaataatatacaataaagaaagtttctgacctgaagataagtggttgtaaataaaactaatacatcttgtaattatttctttt

SEQ ID NO: 150950 - DNA, 201 bp, Homo sapiens
acctcggatcactgcaagcaccgcatccggggttcaagccattctcctgcctcagcctcccgagtagctgggactacaggcgcccactaccatgcctggcwaacttttttatttttattttttttttgcatttttagtagagacggggtttcaccgtgttagccaggatggtcttgatctcctgacctcctgatctgcccg

SEQ ID NO: 150951 - DNA, 201 bp, Homo sapiens
gaacctgtgaacaggatgagacatcactctcatgatttatgttttagtcagtgagattatctgaagagtccacacactgaagctgacttgaagatgaaagrggccacctaggagggcatacgggtgaccttaagaaactgggagaggctctcggcccatagccagcaagcaaacaaggattttaattctatgaccccactg

SEQ ID NO: 150952 - DNA, 201 bp, Homo sapiens
aatcgaaaggagagaggccctgaagaagagcatcttggcatcctgggtgagttcttgcagaatatatatggctggtttactcttcccatgggctacatcarcctcagaaagaatagtaacttcaggacctactgcatgatttctatgtgttaagtaggcgtgtggaagataaaacaataaaatgcagcagctaagtacttt

SEQ ID NO: 150953 - DNA, 201 bp, Homo sapiens
taatattcatctctaagcactggtcagaatttttctcttcaattagcaccttaagtgaatacctgctttctgttctacttcaaccccagcattaaacactwttttccccctgcagtgactcagcggtgttttttgaacaaggtaccacaagaattggaggctcttataaaaagctggtttatcgtgagtacacagatgcct

SEQ ID NO: 150954 - DNA, 201 bp, Homo sapiens
aaccccagcattaaacacttttttccccctgcagtgactcagcggtgttttttgaacaaggtaccacaagaattggaggctcttataaaaagctggtttaycgtgagtacacagatgcctccttcacaaatcgaaaggagagaggccctgaagaagagcatcttggcatcctgggtgagttcttgcagaatatatatggct

SEQ ID NO: 150955 - DNA, 201 bp, Homo sapiens
ttataaaaagctggtttatcgtgagtacacagatgcctccttcacaaatcgaaaggagagaggccctgaagaagagcatcttggcatcctgggtgagttcytgcagaatatatatggctggtttactcttcccatgggctacatcaacctcagaaagaatagtaacttcaggacctactgcatgatttctatgtgttaagt

SEQ ID NO: 150956 - DNA, 201 bp, Homo sapiens
tctttgatcctttggagtcttgctttcttttctactggagtgtcttctcacattcatgtgccctcatgttgtcatttatattcaaacttaacaaaagttartgcccaaattcagagcagaaatattactccccttagcaactgtttgttgcttatttttccttcagagttttcattgttagtctaacaatcggtcatttca

SEQ ID NO: 150957 - DNA, 201 bp, Homo sapiens
tcccaacttttacagccatgaatggattcatgtatgggaatcagccgggtctcactatgtgcaaaggagattcggtcgtgtggtacttattcagcgccggmaatgaggccgatgtacatggaatatacttttcaggaaacacatatctgtggagaggagaacggagagacacagcaaacctcttccctcaaacaagtctta

SEQ ID NO: 150958 - DNA, 201 bp, Homo sapiens
gatttttttttaagctaggtactagtcacgctacccacaatctttaaaatatttcttttgattctgcatttttgtatatttggaagcattgagaatattawtcatcaaaaataattaaatacacaagataaagaaaaaacctcctacatatgacctttcctgttattcaagatgaattagagacttttttttttaaatcta

SEQ ID NO: 150959 - DNA, 201 bp, Homo sapiens
ttgttgtttatggggttccccccctccttttttttttttttttttttttagacagagtcttcctctgtcgcccaggctggagtgcagtggtgtgatctcarctcactgcaacctccacctgctgggttcaagtgattcttgtgcctcagcctcctgagtagctgggactacaggcgcctgccaccacacctggctaatttt

SEQ ID NO: 150960 - DNA, 201 bp, Homo sapiens
catgctatagaacaaatcaggtaacagaataagatagaaaagtcacctgaggggattatatgcagggttagtgcaactgaaaacactggcagatattaaargagaaaaatgtataggttttgggggggactaaaaaaataaagtttacttctctggtattaatgccaataatatttatttctaaaagagtgaagtggaaaa

SEQ ID NO: 150961 - DNA, 201 bp, Homo sapiens
tttgttttttccactgggagaagtgggaggaggtgataatgtttgaacagctggctggagattgtttgaatctctgttcgaattcattgggaggttatttyttcatctgggatgatttcttcctcaaatctgcttccatcctgctctgccttacaggaattcttccggttttcatgaatgtgaaatcttccctgatttcca

SEQ ID NO: 150962 - DNA, 201 bp, Homo sapiens
gtcttcattaatcaatgcctctttctgtttcatttcagccggtttgcaagcctttttccaggtccaggagtgtaacaagtcttcatcaaaggataatatcygtgggaagcatgttagacactactacattgccgctgaggaaatcatctggaactatgctccctctggtatagacatcttcactaaagaaaacttaacagc

SEQ ID NO: 150963 - DNA, 201 bp, Homo sapiens
agaagtgggaggaggtgataatgtttgaacagctggctggagattgtttgaatctctgttcgaattcattgggaggttatttcttcatctgggatgatttyttcctcaaatctgcttccatcctgctctgccttacaggaattcttccggttttcatgaatgtgaaatcttccctgatttccagcacagacccatattctt

SEQ ID NO: 150964 - DNA, 201 bp, Homo sapiens
aacagctggctggagattgtttgaatctctgttcgaattcattgggaggttatttcttcatctgggatgatttcttcctcaaatctgcttccatcctgctytgccttacaggaattcttccggttttcatgaatgtgaaatcttccctgatttccagcacagacccatattctttcctattttaacttttttttttttttt

SEQ ID NO: 150965 - DNA, 201 bp, Homo sapiens
tatttacagctgtctgccctagtttatagtactgttgctatctgtctattccttcaatttctacttgtcatcacccgagcagtgtttacagggcaataggrgagagaaacattgtcttcattaatcaatgcctctttctgtttcatttcagccggtttgcaagcctttttccaggtccaggagtgtaacaagtcttcatca

SEQ ID NO: 150966 - DNA, 201 bp, Homo sapiens
tacataaaaaacaaagtatatctgttttaaacttgagttttccatcattaatttatttacagctgtctgccctagtttatagtactgttgctatctgtctrttccttcaatttctacttgtcatcacccgagcagtgtttacagggcaataggagagagaaacattgtcttcattaatcaatgcctctttctgtttcattt

SEQ ID NO: 150967 - DNA, 201 bp, Homo sapiens
cagcatgtgtgccagatatttgccattccaaattgattctatttatatagaggtaactctcactatctcaagcattaatgactcttagtcacaaactctgytcttgacttacagctgtgaatggatacacttttggaagtctcccaggactctccatgtgtgctgaagacagagtaaaatggtacctttttggtatgggta

SEQ ID NO: 150968 - DNA, 201 bp, Homo sapiens
taatttacttctatcttgttagttctttaatgctttcaaaaggtgtatgtgtatgtgtctgtataggtgtgtgtcagtcacatttgattgtttccagtagrgtgagtggcagacgaaataacttagaaattcaataatagcttctatattaatttaaaaattgtacaattgaataagtatatttaattaaaataatttgat

SEQ ID NO: 150969 - DNA, 201 bp, Homo sapiens
tccgaattcttggaattactcatggtgtctttcaaaattaaagatctgtgaaacctgaagcagatatgaatattgtaagttgttagaaaataaatctggaytgctgaaataacagagaatgctacttttcaaatttggaattttaacttaatagatttacagtcaaacgtatacatctatatgttaatatttctcatctgc

SEQ ID NO: 150970 - DNA, 201 bp, Homo sapiens
tcagtgcacaggaaactggactaataaatatgtaagaaagacatatcaagtatgtgcatgtaaattatctccctaaattgcttgtaatttgttctcttgcrtaaggaggattgttacatattaatgtcagctctatgacagatattacactaatacatcatattacattgatcagatttaagttttataacaatcctgaga

SEQ ID NO: 150971 - DNA, 201 bp, Homo sapiens
ggtgtgatctcttaggtgaggcagttccaatttggccatgggcaattctacagagaaaggagcaatagtaaacccttaaaaagcaacactagggccataaytagtattcataaatgtcctcctccactatccattctagatttctttacctctcagctagcctgcctgatgagcaatagtaaacccttaaaaagcaaccta

SEQ ID NO: 150972 - DNA, 201 bp, Homo sapiens
gcacttattgtggtcatccaaatgtggataaaataaatttattttacaggctttttcaggcaacaaagacttcttgcctaaaacctcatttaaaaaattcrttggttcaaagctgtgtccactacagatttttgataagatttgcctcaatatcttgtttatgatgtttggatatgacccaaaaaacttaaatatggtaag

SEQ ID NO: 150973 - DNA, 201 bp, Homo sapiens
atagtaaacccttaaaaagcaacactagggccataactagtattcataaatgtcctcctccactatccattctagatttctttacctctcagctagcctgmctgatgagcaatagtaaacccttaaaaagcaacctaaggccataactagtactcataaatgtcctcctccaccatctattctagctttctctacctctca

SEQ ID NO: 150974 - DNA, 201 bp, Homo sapiens
cttctattcatttgtttcctgtaactccataactgctcctcctggttcctaatactccttcctatccttgttgatccttccataattagaattagtgcctkccaattatctttaagtttctagcttttatcaatactcttggagtgggaaactattgtggtactcaaggtactattaccaaaacctttggattgattgtgt

SEQ ID NO: 150975 - DNA, 201 bp, Homo sapiens
atccgaattcttggaattactcatggtgtctttcaaaattaaagatctgtgaaacctgaagcagatatgaatattgtaagttgttagaaaataaatctggmctgctgaaataacagagaatgctacttttcaaatttggaattttaacttaatagatttacagtcaaacgtatacatctatatgttaatatttctcatctg

SEQ ID NO: 150976 - DNA, 201 bp, Homo sapiens
gcaatgcaaacatagattacagattaacattatggctttaccttgggcactatagaatttgaggcccttatggagagtgtttctttttaaaatctttcaaytttgacaggccttagactttgattttttgtttttttcaacaagctaaggtctcagaatgaaacttcacattctcctggactgacaaataaccttaaacaa

SEQ ID NO: 150977 - DNA, 201 bp, Homo sapiens
ctccttcctatccttgttgatccttccataattagaattagtgcctgccaattatctttaagtttctagcttttatcaatactcttggagtgggaaactaytgtggtactcaaggtactattaccaaaacctttggattgattgtgtataggttctcttaagaatataggcattcattctaagtgtttttcatcacattaa

SEQ ID NO: 150978 - DNA, 201 bp, Homo sapiens
gtactgttacagcaatataaatatcagttttacaaataagaaaatgttacaacagtagactagggattatttaggccatgtcccacagtcgacttgcccartgcttcaaagctattccacttttaaaatctgaccggaacacagttagttatcctaatgcctactctgaaacgctttcactagactgcactttctcctccg

SEQ ID NO: 150979 - DNA, 201 bp, Homo sapiens
tggaaaaccaaccagagaattgaaagcaagtcatgagaactgaaagcaagtcatgatgcaagaaaaaacagatgataaaaatgctcacaatgtgacttggraaatgtatcatcaaacaaccaaagttttgaccttgtccaggtgttacaattttttggtgatgatttacaaaaagaaattctaactcttatgaggggaaat

SEQ ID NO: 150980 - DNA, 201 bp, Homo sapiens
tatagattataaacaataaccatgtcaactttaaaaactattataatgtgttagaagggaatagaactatggagaaattggggtaaaagagtagggaaaargtattaggcatgctgggaagtgggttgtacttttgaatagaaaggttaggccaggcttcagtgagatggtgacatttggaacatggaaacttagggaaag

SEQ ID NO: 150981 - DNA, 201 bp, Homo sapiens
atattaaaagattatgctctctatgattcaacttatataaaaatgcttttttttttttttttacccctcagagtcgtttggatgtgtatttttcacacaasccagcaggaacatctgttcaaaatatgcttcattggagtcaggtataactgctaaagtgcatttccatacaatttaattcatgctactcatggtttacct

SEQ ID NO: 150982 - DNA, 201 bp, Homo sapiens
tgactaggaatgattgcaggggactgtgaatagtatgctgcacattctcttggttaaattactgtcttagtgcattttgtgttgctataacagaatacccragactgggttatgtataatgaacagaaatgtattggttcacacttctggaggctgggaagtccaagatcaaggcactgacatctggcaatggccttcttg

SEQ ID NO: 150983 - DNA, 201 bp, Homo sapiens
ttctttagattcccctgcccccatctccaaccccttccatttatttccctatccaaaggaaaagaagaacgaagaagcccacctgcataaataccagcagrcccagtacaatgggggtatatatgcattgcatgcttaacttgctcagctgccactgtaatgaacaaatgatatggtcttattttttgtttctctttcagc

SEQ ID NO: 150984 - DNA, 201 bp, Homo sapiens
gatttttgataagatttgcctcaatatcttgtttatgatgtttggatatgacccaaaaaacttaaatatggtaagaacaagttgtatttgaaatatatatwttttccaatatttggaaagtataataataatagtgcttgtgttataccttgtgtcattttgtgtttcatccacatacactagtagtcagattcttagcct

SEQ ID NO: 150985 - DNA, 201 bp, Homo sapiens
atatctatgttatttaagatcaaagtgagattgccactattatttgttctacaaatagaactttcacattatttttccttttaaaaatgtagcataggatwttatgagtggaaaagatgaaaaagctatgtatgtttttgcatttcggactgatcaaacttaagaaatgaacaaaaatcaggaaattctttctatatttaa

SEQ ID NO: 150986 - DNA, 201 bp, Homo sapiens
tcagaattggactgtgcaatactacaatggagacttctaagagggaatttatctacaaaatagggtagccagaaaagcatggactttgaaattaagcagtyctgaatctgaattctgactgccagttatacattttatggttttagccaagttatttaattcttcaaagcctctgttttcttacctgaaaacagtaatatt

SEQ ID NO: 150987 - DNA, 201 bp, Homo sapiens
aagaaattcagtggccaaaccatctccacaccctgcttccaagttttttcctttatttaaaattttcaaactactgtgagataatttatttggttttatasatagtgaattaccacaacatttctttagcacttattgtggtcatccaaatgtggataaaataaatttattttacaggctttttcaggcaacaaagacttc

SEQ ID NO: 150988 - DNA, 201 bp, Homo sapiens
agaacgaagaagcccacctgcataaataccagcaggcccagtacaatgggggtatatatgcattgcatgcttaacttgctcagctgccactgtaatgaacwaatgatatggtcttattttttgtttctctttcagcttttaaattctactcatttgaaagcttatgactggggcagtcctgatctgaacttggttcattat

SEQ ID NO: 150989 - DNA, 201 bp, Homo sapiens
ataataaggttaatttcattcagtttaaacatttcccattggtggttattaggagtaccacaactatatatcaaaggcttatccctctgtgttttctttgkataaaaatattaaaatttgggtaaatatttgaggctataaattgggcagtcaaaacctacatgcctggaacagtccagattatgcctattttcccaagaa

SEQ ID NO: 150990 - DNA, 201 bp, Homo sapiens
actctttgtttggattagatgtctatgatcaagtttaccatgaaatcattgatattatccaagacaatctataaagaaccatggcgctgtgtgtttaaagwtctacatcattcctaatgaaatccaattcttatttttttttacctgtgtatgttctttcatttttaaaactaaatatgtagttttttcctctatattctc

SEQ ID NO: 150991 - DNA, 201 bp, Homo sapiens
gtttgcttacatctgccagcagctggatttccaatcttcccaacaatagtctgggcttcattctggcagatgctggttatgatgtgtggatgggaaatagyagaggaaatacctggtccaggaaacacttgtacctagaaacgagttccaaagaattctgggctttcaggtacaaataaaatgaagtaacatttcatttta

SEQ ID NO: 150992 - DNA, 201 bp, Homo sapiens
ttatttggttttatagatagtgaattaccacaacatttctttagcacttattgtggtcatccaaatgtggataaaataaatttattttacaggctttttcwggcaacaaagacttcttgcctaaaacctcatttaaaaaattcgttggttcaaagctgtgtccactacagatttttgataagatttgcctcaatatcttgt

SEQ ID NO: 150993 - DNA, 201 bp, Homo sapiens
acgtttcagcaataatctttatttcttacttagtaccttactgaccaaccccatccttcctttaactactcttctactctataactcatatattttgtctrccctactctatttttcatatacaaacaccctctttataagactgccttgtgattttatttccttgagtttgagttcccacagaagtctctattcagaaga

SEQ ID NO: 150994 - DNA, 201 bp, Homo sapiens
aagcagtcctgaatctgaattctgactgccagttatacattttatggttttagccaagttatttaattcttcaaagcctctgttttcttacctgaaaacartaatatttcctacctcatagaattattggctgcagttttataaatggtattatttgctgcaattttaactgtataaacatctcccttttatatataggtc

SEQ ID NO: 150995 - DNA, 201 bp, Homo sapiens
ggtatgttctacctttattttatgtcattgataacccaaagtgataattttatgctttcaaataagagatcttgactatacgtagacaaccacaagtatgrattgaaatttttggtttcatttacactacattcttgtttttgtttctgcaaaggaatacaattttacttattataactttagaaccctactgtgagaaga

SEQ ID NO: 150996 - DNA, 201 bp, Homo sapiens
aagaggaaatattttatgtaggccattcacagggtactactattggtatgccaagaaagattattgctaatatcccttaatttcttttttaaggttgtgcrtatacttcttaaagttgtagataagcttctagacctgtaagtaaaacaaaaactgtgagacaaacatagtacagcagaatgccctggaatcttacatgct

SEQ ID NO: 150997 - DNA, 201 bp, Homo sapiens
tgtacagttaaaacagggcatagaagtaggaaaagatgactcagtggatctcctgaagagcaaatgtatttctccctttcctcgttttgtagcagcagacytacttccttatgatgatcagggtcaatgaacttcctggtcttcagtaatgaagagcccaaagtgaccaggcggtggtcatagccttgtttgttaggatgc

SEQ ID NO: 150998 - DNA, 201 bp, Homo sapiens
aaattgcctttattcagttatctcttcattattttcaaatactaacataacattagtagaaagtgctatttttattttcctctttcttttgtagttttgaygagatggcaaaatatgaccttccagcctctattgatttcactgtgaagcaaaccagacaagaggaaatattttatgtaggccattcacagggtactacta

SEQ ID NO: 150999 - DNA, 201 bp, Homo sapiens
gagtagaaaattgcctttattcagttatctcttcattattttcaaatactaacataacattagtagaaagtgctatttttattttcctctttcttttgtasttttgatgagatggcaaaatatgaccttccagcctctattgatttcactgtgaagcaaaccagacaagaggaaatattttatgtaggccattcacagggt

SEQ ID NO: 151000 - DNA, 201 bp, Homo sapiens
cctgtgcaccctgctccttgcctctggcggggcagcctgtcgtgcctgcttcctgccctgtgaacagcaggtccgtgcttcctggagccaaggaagacttyggggtttccctgtgaaaggccctgtctccccaagcctggcgtcctctgaggctttggagagcccgggagagacggcacattgtccaagcacacagagatc

SEQ ID NO: 151001 - DNA, 201 bp, Homo sapiens
tgttcatacccggtttattgtaaaaaactgctgatcattctaatttggaggtgactcttttttcttaaccacaattgaaattcttcttatagctgactctrtaatcattacaaagtagcacaatggagaaaagggaataacttcactgaaaatatgtgtttcactctggggaaaaagctcctgcctctttgatcagcccca

SEQ ID NO: 151002 - DNA, 201 bp, Homo sapiens
gcaagtatgtgtgagcctggacagctttccagctctaggggcagaggaggtttgatagcccttcatggcagggtgcatgcgaagagttttgcttgccggcrtagataaacttgactatgtctgctctactcaatttgatgtatagtttgaaaggtaatgctgtattacgaataaaataatgggtatatctacctaaaaagg

SEQ ID NO: 151003 - DNA, 201 bp, Homo sapiens
ccgaaatattggttcagaaacaatctgccagctgtccccactttagctgtgctgctctctttgccagtccctgaagtttttattttcttttatttgtctgsttaacctgggccacttgggaatcttctctgtagatgggagttggggaagagtggcagagctggatcgcttaatcactgttcaggaagagtgcagtggcat

SEQ ID NO: 151004 - DNA, 201 bp, Homo sapiens
tgattctcccgccttcctcgcactccttaccagaaactaggattggcaatgacaggatctccaagaactcaaggattgagggcacttcacggacagtgagkaggagagggaggggcctaccaaagagaaaagagcccagtttctggtatctgagatgcagaagaaaatgaacggccacttgcttgtgtccccctaaactgc

SEQ ID NO: 151005 - DNA, 201 bp, Homo sapiens
agctgtcagtcttctgtgggtagaggttaaccgaggcggatgaaattttaaagaactatctgtctatgcaagcacatcttcttcccaggatactgcagccrtcagcagacaatcaatgcaatcatctcagactgtgtcctgcgtcccaggagtaagtcatcaggctcatttcttttcttgtctcttttctgctgggggaag

SEQ ID NO: 151006 - DNA, 201 bp, Homo sapiens
ctcgttgcagcactttctctgtgttttctgatgtcatgaaactcttcttagtagaattattttcccccacttaagttccaccgtcagcctggaaattatayggacaacatgacaaagttcctctggaaaaccacactcctctgcttggctgaccttgggagaaaacatttagcaagttcttctttttcttggttattttaa

SEQ ID NO: 151007 - DNA, 201 bp, Homo sapiens
cccatggaagaggctgacagaggtgacacccagagggtgagtcagccgtcattttattgggattttactgtctgcaaggctctgctgtgaagttggtgaakaaggcagcagttgtagtctgtgctctcaagcttaaaatccaccaaacgggtggcgaaaagaagagcagagcacccagctggaaggaagggggaggcaaca

SEQ ID NO: 151008 - DNA, 201 bp, Homo sapiens
tgttttgggcctcgctggtgctctaccctttcttccagttcctggtcagcatgatcaggagcgggtcttccctgacgctggccagcttcatcctcgtcttytttgtgggtgagtggagggcaaggggctggtgggtgctgacagcaccaccctgggagaggtggcatcagggctgggacgaaggccatctgtataggcagt

SEQ ID NO: 151009 - DNA, 201 bp, Homo sapiens
tatgagtttggatggatcagaaattgtggccaaatagaataaccttctcagagacaagagccatcctgcgggggcagtgtaacacatggaccgtatggctycaggaacagatggagcctcatttgaattccaatatgtcacttgtttgtccccgattctttacaaagagcagaggagggacctatggtgtccctagtcaac

SEQ ID NO: 151010 - DNA, 201 bp, Homo sapiens
gttcctgggacatcgcagatagagctcatggtggggaaatttggatgacagccttgaaaaccagaagtaactaattaaagaacagaaaaccatttctcctsgtttttacaaatgactttcttacttctaggttctatttttaacctcaagtgctctttgaataaaaataagactgaaaaaaaaggtaaattggttcctgta

SEQ ID NO: 151011 - DNA, 201 bp, Homo sapiens
ggctttgttagaacaatcaacgtattttacagctaaatttgcaaaaaattttctagcagcttggcaaggctttcctcatagaggagtggtaatgaagcccwtttatccagctccatggctcatacagtgtcacagctgttggtgaaattgataggtgcccatggattaattcaagcccagtagagaagaaagcagccatca

SEQ ID NO: 151012 - DNA, 201 bp, Homo sapiens
gtcactctttctagatgcataattacatgccatgacaatgattacagtcctctcttcataactgcactgggtgctcattcatggcatggaggtatgatcgyatcgtttgtagcatagagcagagtacccagcactgaatatgtgttgtggcctagagaagagatgggcacaagaagtcaggtcatcagggttgcctcatcg

SEQ ID NO: 151013 - DNA, 201 bp, Homo sapiens
actcttctcaaaaccaatgtgtaacccaggattgaacttgactgagcagctgctctcaaggacacctgtggtggctgctctcagagttcccaaggcggtgrgtggatggagtcagaggctttctgttcttcagtggactttccacaaatccaccacggggtttaaaggcagattattatctgcaaagaccctgccagtgct

SEQ ID NO: 151014 - DNA, 201 bp, Homo sapiens
gtgtgctgggatctggaatcacatggatgaggaacccgataatggtgacgaccgaggtagcaggcgaaccactggccagggcaggaagtgggcagctcacrggactatggctgcaccgcgggttcataccgactaccatcctggaggtgggagcgcatgctcatctgtaaaagtccggtcccacgttggacacaccggggt

SEQ ID NO: 151015 - DNA, 201 bp, Homo sapiens
cccagagcttggggtaggtacagagaattctaggtagttccaggaacagcgttgcagttgctctgggctttagctcaggaagtgcggtggggagaagtggrggaaggagagggtggcctggagttggggcttgctggggagcctgcagtcatctggttgatcgtgcggagccagcagaggcgtctaacaggaggaagtggc

SEQ ID NO: 151016 - DNA, 201 bp, Homo sapiens
ctagttctaaggggtgtatctcctgggagacctcaggaagtgacagggaattgttataaataaagtttcggtgctgcaaaagaaatagcactcgaatatamaattttctttttaattctcagcaaggcaagttacttctatagaagggtgcacccttacagatggagcaatggtgagtgcacacttggacaagagagggga

SEQ ID NO: 151017 - DNA, 201 bp, Homo sapiens
cgggcatggtggcgggtgcctgtagtcccagctactcgggaggctgaggcaggagaatggcgtgaacctgggaggtggagcttgcagtgagcagagattgygccactgcactccagcctgggcaacagcgcaagactccgtctcaaaaaaaaaaaaattaaaaaaagttggatcatatcatatacatttttttttcttttt

SEQ ID NO: 151018 - DNA, 201 bp, Homo sapiens
atgggtcgctcaactagattagctccaagcacctgccctaagacaactctctctttcactctctctctccatagtggtttactccacgtgaaaattttagrttgtctaaatatgcttgtatctagacagatctgttgatacatctaactcatcagtaaatcctttcacgttgacctgtgaaataaatccagaattgatgaa

SEQ ID NO: 151019 - DNA, 201 bp, Homo sapiens
tgatttgcggccacgggccttctcacttgctctgtgggaaaacggccctgtagtctgttcgggctactcctaactctgctctccttgtctctgcagcctcygtgggagttcgatggatgattggtgtgacggaaattgacaagggctctgcctacggcaactctgacagcaagcagaaactgaatgactgactcagggagg

SEQ ID NO: 151020 - DNA, 201 bp, Homo sapiens
tagtcccagctactctggaggctgaggcaggagaattgcttgaacccaggaggcggaggttgcagtgagccgagattgtgccactgcactccagcctgggmaacagagggagactccatctcaaaaacaaacaaaaacaaaaacattttcatctcatagcaattaaagctacggaaagccttagagaacacttaatttcct

SEQ ID NO: 151021 - DNA, 201 bp, Homo sapiens
gccaaatcaaatgtaaaatcatagaaatctatcataggattgtataaggagaccaggtttatttagatagggacttcctatcttttaactggatctctgarctctgggcaaaacctacactgaatcctgggtcttcaaaaagggagaattattatgaggttagacgcttttacagtgcacttaaaaaaattttttttaaac

SEQ ID NO: 151022 - DNA, 201 bp, Homo sapiens
tataaagaaagttatgtctcttcttttccctttgatcatcaaaaacacctgttaccccagcactttgggaggccgaggcaggcagatcacctgaggtcagsagttagagactagcctggccaacatggtaagaccctgtgtctacaaaaaatactaaaattagccaggcatggtgatgggcacctgtaatcccagctactc

SEQ ID NO: 151023 - DNA, 201 bp, Homo sapiens
ggctcccctcattcccacctgggaatacgttggcacaaatgaacttgcaggagctctcaggcgcagcttccatcctccctgcgggtctttaaccagcggcyggacaggctggtctgtaatgcagggtaacgttgtgcagcctctgggagaggaagaggagatcaggtggagaggccaagagagcaaggccaaggaaagagc

SEQ ID NO: 151024 - DNA, 201 bp, Homo sapiens; identical to SEQ ID NO: 28166

SEQ ID NO: 151025 - DNA, 201 bp, Homo sapiens
gagcacgtctcccatgtttgaatgggaaacgtaaggcccgggaagtgggcttggcatccacctggctcccctcattcccacctgggaatacgttggcacaratgaacttgcaggagctctcaggcgcagcttccatcctccctgcgggtctttaaccagcggccggacaggctggtctgtaatgcagggtaacgttgtgca

SEQ ID NO: 151026 - DNA, 201 bp, Homo sapiens
gttttcttaaactaattaattggaactctttatatattttcagtagtgaaacattgtgtacacaacacataaatacatagacatattaggcatgccgataraagtacatcttatagattcataaaaaccttttttgttttatcctgtctcagactttcagattcttgataatctgtttcacaatcctaggcagctgtcagc

SEQ ID NO: 151027 - DNA, 201 bp, Homo sapiens
atctggatgtcttatattttacacaatgatcatgtatgttataaactggaaaaaatacaaaataaaacccaaacaccaaaaaaggacaaaataaggaacascttatggaatgagtagaaaaggaaaatataaagtgagcccattgtgaaatcaaatgtgctgaaattcatcagcaccttttattgattgatggatggattg

SEQ ID NO: 151028 - DNA, 201 bp, Homo sapiens
cccttcctcatcctcttctcccattgaggtgcattgagggtgggaagtgccaggcctctccctgcctcttgttatcctcactcaagccagtggtatgcctyggcgtttcctcttctgaaagctccacctgtgagcttttttccaccatggggtgggaagctgtgttcactcctgaggttgtccactccgcgtccatgtgct

SEQ ID NO: 151029 - DNA, 201 bp, Homo sapiens; identical to SEQ ID NO: 28173

SEQ ID NO: 151030 - DNA, 201 bp, Homo sapiens
ctccttctgcctgtggctctaagattctaacccaaaggcaaagccctgcctcctggactgagcaagcggcccacgagtttatctgttgggacaaccttttyctctttttcctctgtcacctgcgggtaccttttacttctgaagtgtgtccacgctgcacagctgaaacaagcaaacactgcctgacttcacctggagtca

SEQ ID NO: 151031 - DNA, 201 bp, Homo sapiens
gtctggagctgaccctctcttggcaatgaagaacatgacaaaatattttttaaggagggttcacacacacacaatgaagctattctctaggtgtagtggaycaagggagaagtaatggccccaatcgcccctgctcgtattttcctgcctctggtcctaaggcaggatgtgcttgtggggtggatgttctccgcagcaatg

SEQ ID NO: 151032 - DNA, 201 bp, Homo sapiens
acagtttctctgattgtggcctgttacagtgaaaattgattcttactgcacttatgcaaataactgtattgttataagttagttatcagaaacctgcattkaagaacacctgttagagttctatagctgattataaaaccaccttctaaggaggaccaaaacaagacaattgtccatggatgacaaaatgtattagggtag

SEQ ID NO: 151033 - DNA, 201 bp, Homo sapiens
taatgaagcttttggcaatccaccagatttctttcgggaacgctctttgtcagtgtcgactgtgtacaggctgcagggaccgggggagccatcagacgccrtctctgcctcccgagcctgcttcagggaggacgtgtcagctccgctgtgtggctatcagaggaagctggtttcatagcacgagtgtcatgtctgtcacgt

SEQ ID NO: 151034 - DNA, 201 bp, Homo sapiens
gctgtaattagatttggatttcactcccatccatatttcttaattccatgctctactgcctccttggctaacaggcagacatcacctctgcattttgatcrttgaaggcttaagaactttgagtccataagtgagagagtgaactgcaaaattcagaattattctgaaattctgttttttttttttcccaactagtttgac

SEQ ID NO: 151035 - DNA, 201 bp, Homo sapiens
gtacactcaatttcagaaataatgaaaatccaacactgctgggagtcctaaacggaaagaaataccatgcagatttgtatgttaggtaagtcgaactgttwcctttccagaaaagacagtgcccatttcaaagtaaacacatcacaaatgacctagagactttcttccagggatccctgggtcacactgacttctttgcag

SEQ ID NO: 151036 - DNA, 201 bp, Homo sapiens
accaaacgtccaggctttcctgggagatattttggtggactggcggccaaagttaagtagcttctgatctaaaaatgactctggctttcccatgaaaatargacagcatcgtcatcatcactgacttcttgtctgatggtgcaggcaacagtctgccctgtgactcagttctgtggcatatgaaggcaggagaatcaccca

SEQ ID NO: 151037 - DNA, 201 bp, Homo sapiens
aaagttaagtagcttctgatctaaaaatgactctggctttcccatgaaaataggacagcatcgtcatcatcactgacttcttgtctgatggtgcaggcaasagtctgccctgtgactcagttctgtggcatatgaaggcaggagaatcacccacctgcccgaaggagacctttagaccttctcctaggagtaaagtgaggt

SEQ ID NO: 151038 - DNA, 201 bp, Homo sapiens
cccagcagccctccagccctttgtcattcatgatgccttgaatcacggccctcagagccctccagtggcaaacagggtggtaggtgcgggtgggctgcccraggtgaactggctgtggaggccgggaaggcggggcatgtgccgggccgggctgggcgagctcctcctgactgcgggccaggtctccaccgagtgtcccct

SEQ ID NO: 151039 - DNA, 201 bp, Homo sapiens
gtggggaatctcaggctcctctctccagatctaggaatctgcattgtaacaagttgcaatgatgcaaatgcacattagagtctgagaagccctgctgaagragacagaggctctgtattgcaggagagttcctgggacatcgcagatagagctcatggtggggaaatttggatgacagccttgaaaaccagaagtaactaa

SEQ ID NO: 151040 - DNA, 201 bp, Homo sapiens
tatgagagccaccttgtccaggttcccgggtcaggtagacttcctggaggaggaacacttatgataagtcttaaatggcttatagtggcctttagtaagcrtctttcttactggcatcctacttggcatatcaaagttcacacatctaatgtgaacattggcatatccaagaacactggaaatgggaaaagaattacgggt

SEQ ID NO: 151041 - DNA, 201 bp, Homo sapiens
taggccttccattccctaatctgtaacaggtaatgtatccctttagaagaatctaaatggctgctccccctctctgcttttgttcctcctgcagaaactgmcctataggtagatttgtaaactatcaatgcccttatgtgtatcaagagcacgtctcccatgtttgaatgggaaacgtaaggcccgggaagtgggcttggc

SEQ ID NO: 151042 - DNA, 201 bp, Homo sapiens
aattaatggcattcttaatataatgtaataccacctatattcagatttctctaattgtttccaaactatctccctcttgttttttttttttttttaaacayttggagtatttacatagggatttaaatagggcccatacattgcatttcgtttttatgtctctgaagtttctcttaatttagaacagaccccccgctccac

SEQ ID NO: 151043 - DNA, 201 bp, Homo sapiens
accattcagctcttcactctcctcctctggcccattaacaagcagctcttccggaagatcaactgcagactgtcctattgcatctcaagccgtaagatacytaagattctatattttcgtctccattgtggatgtgtgtatcagaattatggctcttgatatggattcactaggctttcgttgtgtgccgagctgtttttt

SEQ ID NO: 151044 - DNA, 201 bp, Homo sapiens
gctcttcactctcctcctctggcccattaacaagcagctcttccggaagatcaactgcagactgtcctattgcatctcaagccgtaagatacttaagattstatattttcgtctccattgtggatgtgtgtatcagaattatggctcttgatatggattcactaggctttcgttgtgtgccgagctgtttttttgttttgt

SEQ ID NO: 151045 - DNA, 201 bp, Homo sapiens; identical to SEQ ID NO: 28162

SEQ ID NO: 151046 - DNA, 201 bp, Homo sapiens
gggctgtgatttcaagctgctgttcctggcttcatttacccacccacccagccccctcccggggctaaagcattttctctgctatagacgaagctgggcgsggggtggtggtggggggaatgttcctattacatattgctctcttttgtgtcatgcaacatgttcttccgtcgctgacgtttctatggcaaccacaaaaat

SEQ ID NO: 151047 - DNA, 201 bp, Homo sapiens
atttctccatatcgaggaattaaaaaaggaatgctttgatgtttatgtaagtcttcagtgtctggtctttttttagaaaacctaaacacttcttaagatamgatattgatcctgtggtcaagctaagggggaattaattccttacaggaggtgagatcattgaaataaagttttagagagcattggagaattcgcactgat

SEQ ID NO: 151048 - DNA, 201 bp, Homo sapiens
acccagagggtgagtcagccgtcattttattgggattttactgtctgcaaggctctgctgtgaagttggtgaagaaggcagcagttgtagtctgtgctctyaagcttaaaatccaccaaacgggtggcgaaaagaagagcagagcacccagctggaaggaagggggaggcaacagccagtcaaggagacgcaattagtatg

SEQ ID NO: 151049 - DNA, 201 bp, Homo sapiens
acgcaattagtatgagaagaatactagagagtcttcatcctgctgctgaagctttataggagaggaggcagacggttcaagggaagaaggagagggtgtcytagatagcaaaggtggatggtaagaaatggatcatggttcagggttcttaactccaagaagggagaagtcagtctttagtatagaagtagagcaggtata

SEQ ID NO: 151050 - DNA, 201 bp, Homo sapiens
aacagcacaatggcaaatataataaaaccaaatctgttttggctttatttatcaggcacagagagggtctggtgggcaccctgtaacttgacgactgaccyccaggtgagggtgttgtgagtgtgaaggcaccgtcctgtctcccaagcctccttatgatgccaggagagagacccggccctccagcaccgctacagggaa

SEQ ID NO: 151051 - DNA, 201 bp, Homo sapiens
ccctttaaataaaatgatcaaatttgaatttgaatcaagacaattcaagctatgtataattatccaaatggattaccacttatccagtcttatttgttaarcttcagaatactaacttgtaaggaagaaaagtcatagacatatctttatttatgacttttttcaccaactcagaacttgcaaataggcctgatactattt

SEQ ID NO: 151052 - DNA, 201 bp, Homo sapiens
gggactctaggggtcccataactagtcctgggtgaccctaggggttccataactgctgtgtccctcccttttatcttcccatctcgcttctcccttctcgytttcaggctctcaaaggtcaacagaagtggggtcagttattccaactccccacccaactccagaatcccctttcagcgtttcttagggagcccgtgcatt

SEQ ID NO: 151053 - DNA, 201 bp, Homo sapiens
tgtgagtttgtttagccataatggagccagcttaaaggttgtagagtgctgaaatactgaaaagattacgcttgtaaccctttccccaatggttattaaayatgaaaatactaaatgatgaaataagcttaaggaaactgccaacattttaaatttcgccataaaccttaactttaaaggctttttattatttgtttttgt

SEQ ID NO: 151054 - DNA, 201 bp, Homo sapiens
gcaaggccaaggaaagagctgggggcacacaagcttggtggagccctcctttgttctgaccagctgagtgacaggcaggtcacttaacactctagctgtcmgctttctcatctatcaaaggaatagttagagaattgacccctacagttcaattcatgtctgtttattggtattcgatgtaggagagactgcatgggaatc

SEQ ID NO: 151055 - DNA, 201 bp, Homo sapiens
agatggtgggagaagggaaagggccttgtgattaaaaccatctgagtgacaatgcagtacatacattaaattaaagatgaactcttctcaaaaccaatgtktaacccaggattgaacttgactgagcagctgctctcaaggacacctgtggtggctgctctcagagttcccaaggcggtgggtggatggagtcagaggctt

SEQ ID NO: 151056 - DNA, 201 bp, Homo sapiens
gaccagctgagtgacaggcaggtcacttaacactctagctgtcagctttctcatctatcaaaggaatagttagagaattgacccctacagttcaattcatstctgtttattggtattcgatgtaggagagactgcatgggaatcaatgaggtagagaaggatctttcaacaaatgccttggatacaactggttagctattt

SEQ ID NO: 151057 - DNA, 201 bp, Homo sapiens
ctcccactgcacatctcaccttctgcccctggtggggttgcccagcttgcagggctacgtgtccccctcctgatccatcccctctgggttgggccagcgcrgctccctaactgagctttgcctcagtcttgcctcgcaaggccgtccagctctatgctgttcatcacggagagttaacaaggctgtctccaagaacagcca

SEQ ID NO: 151058 - DNA, 201 bp, Homo sapiens
tgcttcagacctatttcagaccctggataggaccacagtcctacccctcactgacttaatcatccccaacccaggcactaggtgttatttgatgtgacttrtctgttgggtttgccctgactgcctcttttttttccttttcaaacactttcatagtttccaggacaccttttctgcagatttccctccagcccctagcct

SEQ ID NO: 151059 - DNA, 201 bp, Homo sapiens
ccttttcaaacactttcatagtttccaggacaccttttctgcagatttccctccagcccctagcctctccagttcctggctttttcttaacattgctgttmtttggtaaagtgtcaccactcagtgtctgatgccttaacttactaggtcccatttcttttctcctagaaagacagtgctcttaagatggcgaaccacacc

SEQ ID NO: 151060 - DNA, 201 bp, Homo sapiens
gtgggggaggggagttgtcaaggaaacaggcattggtaattacctctctatttacctaattttcggcctatgaatttctccatatcgaggaattaaaaaargaatgctttgatgtttatgtaagtcttcagtgtctggtctttttttagaaaacctaaacacttcttaagatacgatattgatcctgtggtcaagctaagg

SEQ ID NO: 151061 - DNA, 201 bp, Homo sapiens
agcccctagcctctccagttcctggctttttcttaacattgctgttctttggtaaagtgtcaccactcagtgtctgatgccttaacttactaggtcccatwtcttttctcctagaaagacagtgctcttaagatggcgaaccacaccattctagaaagaggtcagggttatatttctgtcttgggatggtgggtcattaag

SEQ ID NO: 151062 - DNA, 201 bp, Homo sapiens
ttttgtgcagtctcctttattctggaaaggaggtctgatggttatgggacaaagccgcattcacatttattttttttttgagatgaagtcttgctctgtcrcccaggctggagtgcaatggcgtgatctcggctcaccacaacctccccctcctggattcaagcgattctcctgcctcagcctcccgagtagctgggatca

SEQ ID NO: 151063 - DNA, 201 bp, Homo sapiens
agctccaaatcttaagttcaacaagtatgagtaacaaattaactgccgggcaggattctccgtttttcgttttcgtgcattgttcttagatggattagccmcgctattcactctcttcaaggtgagggttgctagactttttcaaaactgtggaaggattaactcatctgtgattagtcaacgactctcagttggaaaaaa

SEQ ID NO: 151064 - DNA, 201 bp, Homo sapiens
tcctcttcggagtagtcaaaggtgactgaggcatgacacagcctgatgcaaggtctctttctccttctgcagctttgatcacatgatgaagttctgcaacrtttgcttttatactacaggcatcatgggcttgctgagtgaactgttacatgaagtgtgcgctaggaagcgctttgagcttttaaagatctctggctactg

SEQ ID NO: 151065 - DNA, 201 bp, Homo sapiens
atcatctgggctctgctttcccctgtaccttcacaccttgccatggcatattccacagtctgtctcccatgcccagtgcagagcctggcacataacagatrtgtggtaaatttattttttagttttgtttaaaatgttaaaagtgagactggtctttcttttaagaggccagtctcactttgttgctcaagctggccttga

SEQ ID NO: 151066 - DNA, 201 bp, Homo sapiens
gtcctgcagtgcttgtcttctctgaataattactttttttcttttattttgggaagactgccactggaaagggaaagctggactcttaccctgaaaatagrtgccagtttcttgtcttgaattatccttcatcttggttttcggttaaatgagaaatttgcttcaaattctgaattatgtttctggtgtggttaaattaag

SEQ ID NO: 151067 - DNA, 201 bp, Homo sapiens
gtgcctttgaggagcctgctgcccagagggcaagacggaagcctcagcgaggggttcccacgcagtggataagacttgcagggcagggatgcgcgggcacrccagggggaccacctcaccacccctgcccagtctgggcttcctaaaatacttcctagagaagaacagcccccacgttaggtctggaagtggggagtattg

SEQ ID NO: 151068 - DNA, 201 bp, Homo sapiens
ccctcactatgagggtctcactcccccgtgggactgaagaataatcggacccaaaccttctgagcaaaggaagaagtggggtagagcttgcagtgggtcaraaggggagaactcagcccctaagagccccagtaagcctgtgtttttacaataagatgtggaaggaggaactctaggctggggactttgcccagggacaag

SEQ ID NO: 151069 - DNA, 201 bp, Homo sapiens
ttcttgtcttgaattatccttcatcttggttttcggttaaatgagaaatttgcttcaaattctgaattatgtttctggtgtggttaaattaagttgtattwtattcttttggagaaaagaatatatttaattttgtacttaatgttgagatccccagaaaggcctcaataaatagtattcttcacagttatatttctaaac

SEQ ID NO: 151070 - DNA, 201 bp, Homo sapiens
cgttaggtctggaagtggggagtattggtcccagtgtgcacgcttctcacggagtgccagagaccagaggagtgggccagtgggtgaggtgggacagggcrggaggctggagttttcctagaccacagaggaatgaggtgggctggcgtggcaggaagcagagagaggctgagcatcctgcagctctgggaggggaggccc

SEQ ID NO: 151071 - DNA, 201 bp, Homo sapiens
ggcaaaacctacactgaatcctgggtcttcaaaaagggagaattattatgaggttagacgcttttacagtgcacttaaaaaaattttttttaaacagagaygttcctaagtgtctaaaccatactcttccttaaaaatccaagaataacctctgttgcaactattttagtcaaaacaaaacaaaacaaaacgaaacaaagg

SEQ ID NO: 151072 - DNA, 201 bp, Homo sapiens
aaaggaatggggaccaggtttggctgacagaggagacaggagcagctcataaagcatcattataacattgccaagaagctttatcttttagattagtgtcrtgcgtccaaattacaatgagaactgcacatgtaattttaaattttctggtagccaaattaagagataggtgaaattaattttaatatatctgattaacat

SEQ ID NO: 151073 - DNA, 201 bp, Homo sapiens
aggaaaatgcagtcagaagccgaaggtccactcataaagaaagagaaaaggaataaagagggcaaaaccaggtggaggaaacccccttacaaacatgtatwcctagaaaagaggtagagctcaattactgacttgtcccatgtcaaatgtagcttacaaacactacatgattagctggatttgtggaaggtaaaatatccc

SEQ ID NO: 151074 - DNA, 201 bp, Homo sapiens
taccttcagcagaactgacttccattttcaatgatatggcagcttaggttattttgcccaactcttcttctaaaaatattggataaaatatatttttaaaycttaaaagtatcgaagagctgtcaagatagtaaggacataccaggcaaaatctaagggaagatagtgcagatagtcagggcaccacagcgttgctgagga

SEQ ID NO: 151075 - DNA, 201 bp, Homo sapiens
atatttttaaatcttaaaagtatcgaagagctgtcaagatagtaaggacataccaggcaaaatctaagggaagatagtgcagatagtcagggcaccacagygttgctgaggatatatacgaagccaagaaaatctgattgtcagcattccagtagtgtcaacacagacgtcaaagcccagagtctgccttggagtctaaca

SEQ ID NO: 151076 - DNA, 201 bp, Homo sapiens
gtcccatgtcaaatgtagcttacaaacactacatgattagctggatttgtggaaggtaaaatatccctccgttggctttgttaatgatgatgccttacccrgtctcagggtagcagctacgtccctctgacaggtcccatcatgagtcagccgtgagccgggcgtttccctggagcagtgtggtgaatgtgactgaccatt

SEQ ID NO: 151077 - DNA, 201 bp, Homo sapiens
tggactctacaacttgaatttcttatcttgctttcctgcagtttgacaagctccttgggactggtcagtgttcattccccaggctggttctttcataaacrctgtctgcaggaatgaaaggcatcgcctatggaaagggctaagaggaagaggacactcccatgtgcggtgggagtaatggcccctccgtcttcctagcag

SEQ ID NO: 151078 - DNA, 201 bp, Homo sapiens
tttgttaaagccctgtccccacatgctgttcttggcttgttatagtggcacgcagttcacttccagagactccccagccccaaacacgtatagcgccaggygaatggaagtttcctccagtgcaactcctggatgggtctgagaagggaagcaagaaccaggatgtgactcaatggtgaacttacgactcggccctggggg

SEQ ID NO: 151079 - DNA, 201 bp, Homo sapiens
tgtcagtgtcgactgtgtacaggctgcagggaccgggggagccatcagacgccgtctctgcctcccgagcctgcttcagggaggacgtgtcagctccgctrtgtggctatcagaggaagctggtttcatagcacgagtgtcatgtctgtcacgtatttcagccctggaacttctccccacatttcatgtgaacacagcaaa

SEQ ID NO: 151080 - DNA, 201 bp, Homo sapiens
caagagatctcccgccttggccttacagagtgctgggactataggcgtgagcttctgtgcctgtccaattgtattttcaaagaattctagaagaagcaaarttgctgaatcttccttttcagattttataattattttctatttattcatttataattgttcacaattttttctaattcatttataatatatttgaccctg

SEQ ID NO: 151081 - DNA, 201 bp, Homo sapiens
aagaaagttggaagaagtggggtgaagggtagaatttcattgcctttccactaagcaggatatgccatttaatctctagggaaaggtggccaagactggcttttttttttttttttacctctctgacattgtgggtttcaaaacaaaacagaaagattaggagaatctattaatgtcagggttaaaaaaaaaaaaaaaagg

SEQ ID NO: 151082 - DNA, 201 bp, Homo sapiens
aaatttcatatacacatgattttttagtatgtgtcccagatattgcatgcctcataatgtcgtttagtattgcgtgggacatacttatgctaaaaaataawgtgtaatttatctgaaattcaaatgtaatggggtaccttgtattttacctggtcatcttaatagggacagaatattacgttgttggaaacactgggaagt

SEQ ID NO: 151083 - DNA, 201 bp, Homo sapiens
tgttttacttcctgcaagtgctgtggtgggcagtaacatcctgccaaccggcctcgcctggacaccttgctctgcctgggtgaaggtggagtggctttttyctgcaggctgaaactccctgactcctttctgcagctcatttccttcatctaaacagcatgtccctctatgtgttgacatggctgtgtggactgaaggctg

SEQ ID NO: 151084 - DNA, 201 bp, Homo sapiens
gctagagaagaggcagcggtgcccaagccaggactgagaggtttcgggtgatgcctctgccgtgatgatcattgcttcctggacttattttctgtggaagrggcaacttgtttcttgaactttttaattaaaatctatgtaagagtagagagaatagcataaggattctccaaagtcaaagaatctagatttcactttaaa

SEQ ID NO: 151085 - DNA, 201 bp, Homo sapiens
ttcagttgagggggatctgttttacttcctgcaagtgctgtggtgggcagtaacatcctgccaaccggcctcgcctggacaccttgctctgcctgggtgarggtggagtggctttttcctgcaggctgaaactccctgactcctttctgcagctcatttccttcatctaaacagcatgtccctctatgtgttgacatggct

SEQ ID NO: 151086 - DNA, 201 bp, Homo sapiens
tgaaaagcccagcactgcctcgtagaacctcctgtgctctgggtgtgtgggtgctcatcgtgagggcgtttaacctactcctccctcttgacctgcctgtraactagaagttatgtatgggtgcttgatactttgagtttgacagttttcccaggaatactacacacaccacaggtacggtgtttagagaacaaaatctaa

SEQ ID NO: 151087 - DNA, 201 bp, Homo sapiens
aggagacgtgccactaggtgtaggagaggaacagaggtggaccacagagcctgggaggaagcagggacagagaggccagaggatgacaggtgggaatgggkggtccggggcagggccaggggaggccagggctacacagaacatcacgagaacctaccactaagccaaggatgactgatgtgttcaaacccaaatgccaga

SEQ ID NO: 151088 - DNA, 201 bp, Homo sapiens
tgtgactcaatggtgaacttacgactcggccctgggggtgcagcgtgcacatagataccatggagctaggtgctgacattgtaaaaagtggacccctgtcyggaagactttcattttctttcggcagttcttaactctcttccttggtcacatttgaggagttgccctgttggtaagctcaaggtgccactcagccagaga

SEQ ID NO: 151089 - DNA, 201 bp, Homo sapiens
atcacctgaggtcaggagtttgagaccagactggccaacatgggggaaccccgtttctactaaaaatacaaaaattagctgcgtgtggtggcaggcacctrtaatcccagctattcaggaggctgaggcaggagaatcgcttaaacctgggaggcagaggttgcagtgagctgagattgtgccactgcactccagcctggg

SEQ ID NO: 151090 - DNA, 201 bp, Homo sapiens
ggtctctttctccttctgcagctttgatcacatgatgaagttctgcaacatttgcttttatactacaggcatcatgggcttgctgagtgaactgttacatraagtgtgcgctaggaagcgctttgagcttttaaagatctctggctactgtacaaacttctgattctgatgaacatgaagttgctgtatttctaggtggct

SEQ ID NO: 151091 - DNA, 201 bp, Homo sapiens
tcctcactaaagaaaatgctaaagataaattttcaggaaaaggaaaaagatctcagatgacctgagatacaagaatgaaagaagagaaaaaaaggtgataygtggatagatgtaaatgaacactgtataaacaatgataaagtcttgtggagttaaattagaaggacaatattagaatattaggccagaataacataaaag

SEQ ID NO: 151092 - DNA, 201 bp, Homo sapiens
ccattggcatgattagagagtgagatttggaatattcagaagttaaggtggaatgagaatctttctactcctttgatcaatatcttaaggtctaaggatctttttttttttttttttcccttggtttcttctgggtaaagcttcccatgagctctctgctgattggccacagatagctaaaaccagttgggaggcagaggg

SEQ ID NO: 151093 - DNA, 201 bp, Homo sapiens
ttcctaagtaccacattttaactcttccatacttcttattcctaatttgcagcacagcacagtgggttagagtgtgggatgtgaagtgacacaggcctggkctgagtctgggtgtgatatctgctggctttgtgatcctgggtatttatgttaactcctctacattttggtgttctcgtctgtcaagtgtatgctaactgc

SEQ ID NO: 151094 - DNA, 201 bp, Homo sapiens
tatggaacttagtgttccattattggaacgctaagcatgtgggaattatttatatcctcctgctcaaggtcatcaccaaggtctgatttttcactcatgcaaaaattcaaaaaattatactctccagcataaatgggttaagaagataattacaattccctaccatcataggccttccattccctaatctgtaacaggtaa

SEQ ID NO: 151095 - DNA, 201 bp, Homo sapiens
aaaatgtttgtttctggaatgcagaaatgttgtttctgggaatatattgcaaagaaataacccaaaattcaggaaaaaaaaaggtttgtgcccagaattgytaaacattgcactatttattcttgaaaaaacacaaagaagcctaaatataataatgaggcaattaggtaataattatgatatgtctagtataattatgag

SEQ ID NO: 151096 - DNA, 201 bp, Homo sapiens
cccatgagctctctgctgattggccacagatagctaaaaccagttgggaggcagagggagaatcagaactataaaatagtattttatgtattttctttaaycttttttaatgggagaaatataaaaggatcaaatcactctgccttttaaaaaattaatgggctattttttaagagcacttttaagtttacagaaaatttg

SEQ ID NO: 151097 - DNA, 201 bp, Homo sapiens
ttgtgtcatggggcttcttgtacagattattttgtcaccaggtattaaagctactacctcttagttatttttcctgatcctctccctactcccaccctccrccatctgataggcctcagtgtgtattgttcccctcaatgtgtccatgtgttctcatcatttagttcccacttgtaagtgaaaacacgtggtgtttggttt

SEQ ID NO: 151098 - DNA, 201 bp, Homo sapiens
ttgactaatgcataatgtcatgtgcccatgaagacaatgtcctgcagcagagcgtcactgccataaaaatcccgtgttccttattcatccctcccttcccstgaccctggcacttcccacatacatggctgcacttcagatacagctcatctaaatgacatcagcttcctaaggtcaccctgtttcgttttaattcctgta

SEQ ID NO: 151099 - DNA, 201 bp, Homo sapiens
atggggtttcaccatgttgttcaggctggtctcgaactcctgacctcaagtgattcacctacctcagcctcccaaaatctgtgattacaggtgtaagccaycatggcctggccaggacttctaatactatgttgaataggcgtggtgagagagggcatccttgttttgtgccagttttcagggggaatgcttccggctttt

SEQ ID NO: 151100 - DNA, 201 bp, Homo sapiens
ttcataaacgctgtctgcaggaatgaaaggcatcgcctatggaaagggctaagaggaagaggacactcccatgtgcggtgggagtaatggcccctccgtcwtcctagcagttcactgaagcctgaagcagtgagaggctgctggatcccactgtgcttttgttaaagccctgtccccacatgctgttcttggcttgttata

SEQ ID NO: 151101 - DNA, 201 bp, Homo sapiens
gcacttcagatacagctcatctaaatgacatcagcttcctaaggtcaccctgtttcgttttaattcctgtatttcatagactctagtcattgaccgtaagrtgcatatttattatgcatctctaagaaaggaaaagaaatgctccaattaaactaagggatgccatcaatagtgagacacaccctgatttcagcatgttaa

SEQ ID NO: 151102 - DNA, 201 bp, Homo sapiens
tgaaactctcaacaggtgattttcccttaactaaacaacagaaagccctgctttctcacaagcatctctgttgtgcagcacctgctgatagcttctggtcrggatggattgctcaggtgcccactggtaactttctgagttaaattggaggttctaaataatatgtcctttgaaaggaggtgacactgccctttccatgga

SEQ ID NO: 151103 - DNA, 201 bp, Homo sapiens
tgacctcaagtgattcacctacctcagcctcccaaaatctgtgattacaggtgtaagccaccatggcctggccaggacttctaatactatgttgaataggygtggtgagagagggcatccttgttttgtgccagttttcagggggaatgcttccggcttttgcccattcagtatgatgtgttggctgtgggtttgtcatag

SEQ ID NO: 151104 - DNA, 201 bp, Homo sapiens
aggtggaagagggggccagagactgatggaggagcccacggatgtgcagctggcctggatctgccgtgtgcaagtgtacagcacagacagaagtccgtacygtctcagtggcctggggcaagttgctaagactttcagagcctcagcttcttcatctgtgcagaggagggatagtcctgacgggcaactaaggttgtaagt

SEQ ID NO: 151105 - DNA, 201 bp, Homo sapiens
gtttttaacatgaaggagttcaactactatatatttaaaaataaaaaaagcctctgaaatggttttatctagcaaaggggaggggaaagctttatgcattygccaaagaatagaagaaaacaaatcaaaatgttgtcaatagctgttctaggtggtaaaatgtctgcattttagaattgtatgcattttgtataatgaatt

SEQ ID NO: 151106 - DNA, 201 bp, Homo sapiens
caccaggtggctctcgggattctagggaatgatgtttacggaagccccattcgacggccgctggctgctcaacccagaggtgccctgttcagttcctcccyaagctgccctcccagaggcacggccgtgcttgttaccatggtgactgctgggttaacaaggactggaatcgccagatttaacaaataaaaattcagcaca

SEQ ID NO: 151107 - DNA, 201 bp, Homo sapiens
ttctccaagcatcttttgctctgagcttgatgactgaagtaagaagagagagaaggccctgacacatgtttgatcactgctgctgctaatgaaacttttckaggaatagccagtctgtaatgccctcaaaggcatccttcatatccaagtacttcagtattcttgtggccatttttcagagctatctagaaacaaggatac

SEQ ID NO: 151108 - DNA, 201 bp, Homo sapiens
agaaggcttccacatccatcacctcctgaagtctcccatcacccctgtggggccggcgtgtatgtcagtacgtcctgttgacaaaggaggaagctgagcayggcagaggtgacgtgaccaaagggatgaggatcaacgatcaagaatcacactcaggtcccctgactctaaatactggctacctcccctgctgcatttatt

SEQ ID NO: 151109 - DNA, 201 bp, Homo sapiens
gaaaagctggtgatggttgggggccagggagaaggggtcaagggaaggaggagaccggtcagcccgggagagaggcaggggcttcgactgagggttcttcytgcagctgttgtgctgtttctctgccttcctgtgtgtaattgttacagcacggtgggaggcagggaatttcacctccattagcagatacagacccggagg

SEQ ID NO: 151110 - DNA, 201 bp, Homo sapiens
gatcttggagtgcaccttgtcagtttcttcctaaggataaagatgctgaagctgtagtcttgaacccagcccaggcttccaggtggacagacttgtttaaktgtgtgtgtgtgtgtgtgtgtgtgtgtgtgtgtgtatacacaaagatatctgctgttagtgttttggtaaggctttcttttcttccggttttttttttag

SEQ ID NO: 151111 - DNA, 201 bp, Homo sapiens
tcactccccgacagctgggagtgctccctccctgtcctccgcagacagctctgctcattggcatcatttcctgcttctgaagaaagccctgtgctggagcytggcggggacggatgggcagctccctgccttcctctgggggcgcctgtggcttctcctttgctgcaggtggatgacactgagtggagacactcggcgaca

SEQ ID NO: 151112 - DNA, 201 bp, Homo sapiens
agacagctctgctcattggcatcatttcctgcttctgaagaaagccctgtgctggagcctggcggggacggatgggcagctccctgccttcctctgggggygcctgtggcttctcctttgctgcaggtggatgacactgagtggagacactcggcgacagagcttttcatgggtctgcgctggctccaggtgaccggtatt

SEQ ID NO: 151113 - DNA, 201 bp, Homo sapiens
agactttttcaaaactgtggaaggattaactcatctgtgattagtcaacgactctcagttggaaaaaaagtatcttgagagaagggagaatgtgtgtgtttgtgtgtgtgtgtgtgtgtgtgtgtgtgtgtttagggaaatgggaggcgggcagggagaacagggcacatcttgagttctacgttaaaaggattccatctt

SEQ ID NO: 151114 - DNA, 201 bp, Homo sapiens
gactttttcaaaactgtggaaggattaactcatctgtgattagtcaacgactctcagttggaaaaaaagtatcttgagagaagggagaatgtgtgtgtttgtgtgtgtgtgtgtgtgtgtgtgtgtgtgtttagggaaatgggaggcgggcagggagaacagggcacatcttgagttctacgttaaaaggattccatcttc

SEQ ID NO: 151115 - DNA, 201 bp, Homo sapiens
actttttcaaaactgtggaaggattaactcatctgtgattagtcaacgactctcagttggaaaaaaagtatcttgagagaagggagaatgtgtgtgtttgtgtgtgtgtgtgtgtgtgtgtgtgtgtgtttagggaaatgggaggcgggcagggagaacagggcacatcttgagttctacgttaaaaggattccatcttct

SEQ ID NO: 151116 - DNA, 201 bp, Homo sapiens
ctttttcaaaactgtggaaggattaactcatctgtgattagtcaacgactctcagttggaaaaaaagtatcttgagagaagggagaatgtgtgtgtttgtgtgtgtgtgtgtgtgtgtgtgtgtgtgtttagggaaatgggaggcgggcagggagaacagggcacatcttgagttctacgttaaaaggattccatcttctg

SEQ ID NO: 151117 - DNA, 201 bp, Homo sapiens
tttagggaaatgggaggcgggcagggagaacagggcacatcttgagttctacgttaaaaggattccatcttctgaatattctctatggggagaaaaactgwtattcagaaaaaatatgaaatgagaaaattattatctacttagtaataagcaaagttaattataattagaatcaaataacacatctcttagaaagacata

SEQ ID NO: 151118 - DNA, 201 bp, Homo sapiens
aaagcacatgttagtacacagagaaacggttggattgtgagcatctgatgtttgcaaagaattctgaaaagcagccaggctgaaattactgtttttcctgyctgaaaatggtcctcaagggcagatttgccacatgaccttccaaagcagattgacagcatgtaaatcaaagtctgcgatgtcggttctcttgagtttcca

SEQ ID NO: 151119 - DNA, 201 bp, Homo sapiens
ccttttaaggaacaagccgttgttctcagggggcaggaggcagagtccttacacagcattgatgtcaagctgctttagtctattctcacactgctatgaaragctacctgagactgggtaatttatgaagaaaaggggtttaatcaactcacggtacaggaggcatggctggggaggcctcaggaaacttgcactcatggc

SEQ ID NO: 151120 - DNA, 201 bp, Homo sapiens
aatccttaataattaaaagctgctctactgaaaaagttggttttctactagaagagagacaaaattaaatatcctaaggcgtcctaggctgagatatggamgcaatcaatgtcccatgtaaagacaatgttttttaaaaaacagtgccgggatagagtcccttccacatttctgcctgtaaaaattattttggtaattgtg

SEQ ID NO: 151121 - DNA, 201 bp, Homo sapiens
tttaaaaaacagtgccgggatagagtcccttccacatttctgcctgtaaaaattattttggtaattgtgtatattttagcatcttaatttatccatttcaraattagaaagtacatatatagcattttattatatatttgtacatattaaaactgcattttaatgtatacgtatttctctgctctgtgggtaatgaatttg

SEQ ID NO: 151122 - DNA, 201 bp, Homo sapiens
atatatttgtacatattaaaactgcattttaatgtatacgtatttctctgctctgtgggtaatgaatttggataatgaaaatcagctgaattacatttcartaagggaaaggtgagagaagacattaattagatgaaaatttagagcaggtatttatcttatgtagattttacaatttgctttaaatattcctaaacaagt

SEQ ID NO: 151123 - DNA, 201 bp, Homo sapiens
cagaatggggtggatttcattctcgtcgtaaaaaaggatgataaaacacagagaagaaaaggagatcagccataatccttctgccaacatttagccactawtaatagatagttatagatatagtaatagatttaggtatgaatgacatatatgcacacattattattttacagttaagaattatacttctttgtgaacttt

SEQ ID NO: 151124 - DNA, 201 bp, Homo sapiens
accaggctggccaacatggtgaaaccctgtctctactaaacatacaaaaaaaattagctgggtgtggtggtggacacctgtaatcccagctacttgggagrctgaggcaggagaatttgaacgcgagaggtagaggttgcggtgagctgagattgtgccactgcactccatccagcctgagcgagacagtgagaccctccc

SEQ ID NO: 151125 - DNA, 201 bp, Homo sapiens
cataatccttctgccaacatttagccactaataatagatagttatagatatagtaatagatttaggtatgaatgacatatatgcacacattattattttayagttaagaattatacttctttgtgaacttttcccactcagtgtattctaatattctctaaaggtctatactggctgacttaacccctttggtacactgtt

SEQ ID NO: 151126 - DNA, 201 bp, Homo sapiens
actccatccagcctgagcgagacagtgagaccctccctgtctctaaataaataaataaataaataaataaataaataaataaatgggcttcaggaccatascatccttaactgatttttgctgtgatttggatcctggtgaatttttccttagctacacaactgctgctgtcacccatactgttggattccaatatttgtt

SEQ ID NO: 151127 - DNA, 201 bp, Homo sapiens
taaataaataaataaataaatgggcttcaggaccataccatccttaactgatttttgctgtgatttggatcctggtgaatttttccttagctacacaactsctgctgtcacccatactgttggattccaatatttgttgagacccatggttgggcaaaccctgccttgcatgctgtgggcagcaacaacaacgaaatgaac

SEQ ID NO: 151128 - DNA, 201 bp, Homo sapiens
caggtttaagtgattcgcctgcctcagcctcccgagtagctgggattacagacacccaccaccacatccagctatttttttttttttgtatttttagtggwgatggggtttcaccaggctggtttcgaactcctgacctcaagtgatccacctacctgggcctcccaaagtgctaggattacaggtgtgagccactgctcc

SEQ ID NO: 151129 - DNA, 201 bp, Homo sapiens
ttgcatgctgtgggcagcaacaacaacgaaatgaacaagacaagaccctgctgttgaggaaagcacactctatggtagaagaatactgaacaagacaaaaygtgcctgtgaatagaaggtgagaaagaaagtatggaaggcggagcaagaggttccgggaaaaaggtgaccaccaacatcattgccactcacagttctttt

SEQ ID NO: 151130 - DNA, 201 bp, Homo sapiens
agcagcagcttcctagttctctgttgatttagaaactctgtaagtagcgctctgatatgctcagaaacagcataagttctttgtcatattcttgcctcatrtaataagccactgaagtggatttgctggaaagactctttccgtcacattctaggtacttgcaaagctaaaagggaactaggcaaagtatttttaaaatgt

SEQ ID NO: 151131 - DNA, 201 bp, Homo sapiens
ggtgcttgatactttgagtttgacagttttcccaggaatactacacacaccacaggtacggtgtttagagaacaaaatctaagggctgatggtatttatgrctaccaagctctcattgctcctaggcttgatgtagtcagatttctagtcttgccaagtgcccagatgggtggaaacctggcaggtaaactgtccctgatg

SEQ ID NO: 151132 - DNA, 201 bp, Homo sapiens
agaagtggagctgaaactcaagacccaaaacaaaccaagccttgtctgatttctctttaggctcatctgcttggggttcctctttacacttcaccaatgcyatctgagaccctggttcatgcattgctagtgagggttttacgcacggtaaaatttcaatttaccttgaaattttataaggaaaaaagaattcttaatttt

SEQ ID NO: 151133 - DNA, 201 bp, Homo sapiens
cgtgccactaggtgtaggagaggaacagaggtggaccacagagcctgggaggaagcagggacagagaggccagaggatgacaggtgggaatggggggtccrgggcagggccaggggaggccagggctacacagaacatcacgagaacctaccactaagccaaggatgactgatgtgttcaaacccaaatgccagactcctc

SEQ ID NO: 151134 - DNA, 201 bp, Homo sapiens
agatgtgatgattcagaccctgcagggcctggatttgtgccagagagtggagcttctggggcctagagaatgggatgtctcagtggagctaagatgatttyagagaaatcaggccgaaagcttcttcccatttccctcctatcagaaatgtataggaatcttgcaggaatgcagcctgccttctggatagtcccagtaagt

SEQ ID NO: 151135 - DNA, 201 bp, Homo sapiens
ggggcagggccaggggaggccagggctacacagaacatcacgagaacctaccactaagccaaggatgactgatgtgttcaaacccaaatgccagactcctccatcacctgcccctctatctccctccacacaccttcctctcccccatgctccccaacccagttaacagcaagtccttccccagctattcaggacaaaaac

SEQ ID NO: 151136 - DNA, 201 bp, Homo sapiens
ctcctatcagaaatgtataggaatcttgcaggaatgcagcctgccttctggatagtcccagtaagtgcaaacatgcctccctgtgactctccatatgcccraaaccatcctcagagccaacctgcatgacccaggagtgactgcactcaaagctgtgctgtcttctgcccttgggggaatttctgggctgctctgccaaag

SEQ ID NO: 151137 - DNA, 201 bp, Homo sapiens
gcccaagagacctcccgcctcacatctcaggagcagaacacccctgacacgtgcaggagaaagagctcggagttaaaactgagccccaagatcagttaccrattgtggcaagcttaggcaagttgcccaacctcaccattgcctcagtttcttattctgaaaagtgggatgataagaatactcgtcttgtgggattcatag

SEQ ID NO: 151138 - DNA, 201 bp, Homo sapiens
tcctcagaaccaatcagtattaatgatttcttagttatccttacagaaatagtatacatatagctcttatacttgtaaatgcatgtgcgtctttctgtgtmtatatctatatagatacatatacatacgtatttttttttaaaaaactaagtggcagtatactatattgttttcttccttgccttttttcttcagcttttt

SEQ ID NO: 151139 - DNA, 201 bp, Homo sapiens
attgcaccactgcactccagcctgggtgacagagtgagactctgtctcaaaaataaaaataaaataaaatatatctacgctgtccgagtcttcagaatggytttgcacaaccaatggggcagtctgcgtaggaaagatagaatgaaactgtccttcaaacatagagaaaggcagaagggcaataggagagggacacccgtc

SEQ ID NO: 151140 - DNA, 201 bp, Homo sapiens
gtttacctttcacacggtctaacaatcacttagaagagtcaccctggacacccagtcctgagtgtgctgtcacctctgagagccacacccagcagccctcmagccctttgtcattcatgatgccttgaatcacggccctcagagccctccagtggcaaacagggtggtaggtgcgggtgggctgcccgaggtgaactggct

SEQ ID NO: 151141 - DNA, 201 bp, Homo sapiens
cagccaagggaagtcactttttagggaagacaatggacgtagagttttcatctctgaactgccactctcagtctttgaggtctcatggaggaaaaaaagtrtcataagactggagataagtaaaattccttgtttttaaaagttgagaagtgtaaatactagaactttcattctggcacgcaggagttttttccttccaag

SEQ ID NO: 151142 - DNA, 201 bp, Homo sapiens
cagcgctggtggtgaggaacatcagcagagtgtttaatctcagcttttcaaagcagcctcacaggaaggagaacaaaatatttgatccaccgaagactttyccccaatcttaggcacaaagcctaattcttctagatggtggcggtcgctgccgtcaccatgcgtgcctggggttgatttcctcttgcctgggaaacttag

SEQ ID NO: 151143 - DNA, 201 bp, Homo sapiens
gacataaagaacatggccgtgagaaaagatcaccagggccacgcggtagaggctctataaatattcgctgaacgagttgcctctaaacgtatatatgtatrtgaatcacttaatatgttttagtatttctaattgttcatcttactttatgccctcaatagtgttatcagttaggctgatgtgaatgacaggaagaagctg

SEQ ID NO: 151144 - DNA, 201 bp, Homo sapiens
tcccagctactcgggaggctgaggcaggagaatggcgtgaacctgggaggtggagcttgcagtgagcagagattgcgccactgcactccagcctgggcaamagcgcaagactccgtctcaaaaaaaaaaaaattaaaaaaagttggatcatatcatatacatttttttttctttttttttgagttggagtctagctctgtt

SEQ ID NO: 151145 - DNA, 201 bp, Homo sapiens
cagctactcgggaggctgaggcaggagaatggcgtgaacctgggaggtggagcttgcagtgagcagagattgcgccactgcactccagcctgggcaacagygcaagactccgtctcaaaaaaaaaaaaattaaaaaaagttggatcatatcatatacatttttttttctttttttttgagttggagtctagctctgttacc

SEQ ID NO: 151146 - DNA, 201 bp, Homo sapiens
aacctctgcctcccaggtttaagtgattcgcctgcctcagcctcccgagtagctgggattacagacacccaccaccacatccagctatttttttttttttgtatttttagtggagatggggtttcaccaggctggtttcgaactcctgacctcaagtgatccacctacctgggcctcccaaagtgctaggattacaggtgt

SEQ ID NO: 151147 - DNA, 201 bp, Homo sapiens
tatatttcaaaatatgtgctttttaaaaatttgtctattaaaaacatcaactaagattatgccaagagtctaaaattattgatatatttttgataccctttaaataaaatgatcaaatttgaatttgaatcaagacaattcaagctatgtataattatccaaatggattaccacttatccagtcttatttgttaaacttca

SEQ ID NO: 151148 - DNA, 201 bp, Homo sapiens
atatttcaaaatatgtgctttttaaaaatttgtctattaaaaacatcaactaagattatgccaagagtctaaaattattgatatatttttgataccctttaaataaaatgatcaaatttgaatttgaatcaagacaattcaagctatgtataattatccaaatggattaccacttatccagtcttatttgttaaacttcag

SEQ ID NO: 151149 - DNA, 201 bp, Homo sapiens
tatttcaaaatatgtgctttttaaaaatttgtctattaaaaacatcaactaagattatgccaagagtctaaaattattgatatatttttgataccctttaaataaaatgatcaaatttgaatttgaatcaagacaattcaagctatgtataattatccaaatggattaccacttatccagtcttatttgttaaacttcaga

SEQ ID NO: 151150 - DNA, 201 bp, Homo sapiens
aaaccttagtcttctcttcttagatgttcacagcagttctgtgagtgattatcatattattccatttttacagataaaacaaagtcagcaaggttaagtartatgccgatgttattagtaaatcgtggaatgggaattcaaattcaggtctgacttcagagtctgaggctgtgtccctcgtgggggattcaggcgagttga

SEQ ID NO: 151151 - DNA, 201 bp, Homo sapiens
atttcaaaatatgtgctttttaaaaatttgtctattaaaaacatcaactaagattatgccaagagtctaaaattattgatatatttttgataccctttaaataaaatgatcaaatttgaatttgaatcaagacaattcaagctatgtataattatccaaatggattaccacttatccagtcttatttgttaaacttcagaa

SEQ ID NO: 151152 - DNA, 201 bp, Homo sapiens
gtgcaggttgtatgtccaccccagggcatgtggttctcttgccagaagaacaaggcaccaactcatcagacacagacaccagccatcacagggcattcccrgtgaatgcatacgtgttcaattggtctttgcaggcatcacatagaacatgctctacgctacaaggtgagttgggagatgaggaagagaccttgtccttca

SEQ ID NO: 151153 - DNA, 201 bp, Homo sapiens
agaggctgggatgcagggctggggtgaggggatagggtgagaggctgggatgaggtgctgggatgagggtatagggtgagaggctgggatgaggtgcgggratgaggggatagggtgagaggctgggatgcagggctggggtgaggggatagggtaagaggctgggacgaggtgctggggcgaggggctgggctgtgctga

SEQ ID NO: 151154 - DNA, 201 bp, Homo sapiens
attgtgaggtctttcctacagggtccttgcctcccctgttttagtagaaattctccatggcacttctgggatgggctgcagagaggagctgggcccacccrctggagcgaggaaggagcaggagccttggggaatggtggggaaggggagcctaagacccctctctacctgcgtcagggaagagcttgcctggaggcttga

SEQ ID NO: 151155 - DNA, 201 bp, Homo sapiens
tagacatatctttatttatgacttttttcaccaactcagaacttgcaaataggcctgatactattttggatatagtttgagtgcaagagcttccatgtctygtattacaatgctttatagaaatatgtcttgaaagtgttcataagatcctaagattgagttataattgtaaaacagcaactttagtctatttgtctctgg

SEQ ID NO: 151156 - DNA, 201 bp, Homo sapiens
atggtggggaaggggagcctaagacccctctctacctgcgtcagggaagagcttgcctggaggcttgaaatattgttggggtctccagggaggataggcayccctgggatcctgaccagaatgcagccaggtcttgtgactgactacttagagaggagtaggagctgagaataaggaggtctttggggatagcagattcag

SEQ ID NO: 151157 - DNA, 201 bp, Homo sapiens
gagagataagtttgtgtaatcaagggaaaggagacagttgactgagatttaaaagatgtttataattttaaatgtctttttaccctctagcagttggtctstatttaagcagaatttaaatttaacaaagcaatactgattacgctttttcattgaaacctgcatttatgtgacttgcatacacctatggagattccaaaa

SEQ ID NO: 151158 - DNA, 201 bp, Homo sapiens
ccaggtcttgtgactgactacttagagaggagtaggagctgagaataaggaggtctttggggatagcagattcagggctgcctagaagtggattcagggcrtgcttcttaatttctttcctgtctttctctgattttaaattgtttattttgttttggagtcaaatagccacatgtaacttttgactccctaaaacttaac

SEQ ID NO: 151159 - DNA, 201 bp, Homo sapiens
ttaaatttaacaaagcaatactgattacgctttttcattgaaacctgcatttatgtgacttgcatacacctatggagattccaaaatctgttagtttgcartgtgaaatcctgtatgtttctactgtcataacccctacccaaatttcaagtggatggttacgaattggatttctcatttggagttaagaaataagaaaca

SEQ ID NO: 151160 - DNA, 201 bp, Homo sapiens
atgtactattcataagtggaagtggatcatcatagaggtcttcatccttgttgtcttcatgttgggtaggctgaggaggccaggaagaggggttggtcttkctgtctcaggggtggcagaggcggaagaaaatctgtatataagtggaccaatgaagtctgagcccatgttgttcaaaggtcaaatgtagtagaaatcagg

SEQ ID NO: 151161 - DNA, 201 bp, Homo sapiens
acttgctaagtttatggcaggattgtggagatatttttctcaggatgcattagtgtatttgtttctggtggaaattaagatgggcaacaaattcagaaagsaaggcagatttttatccatcacaaattaattaaattatttagaacaaactccaaatgaaactcaagaattaaccatctaagacaactggcatctcaatgc

SEQ ID NO: 151162 - DNA, 201 bp, Homo sapiens
ctgcctttctgactctctgagaagtgagagaagatggagggcggcagcttcctgatgtttgtcaacttgaccaggcaacaactgggtgtgggccacccccyaccccacaaatgaaaatacaagggaagtctgtggtgttctcgataagaaagctgttgatcccccaaagagagtgtcgctgtggcttttccaacccctgca

SEQ ID NO: 151163 - DNA, 201 bp, Homo sapiens
gtcagggtgaagcaggtaatcggaatgagtcagggtggagcaggtagttggaaggagtcagggtgaagcacgtaattggaatgagtcagggtggagcaggyaatcgaaacaggttgctttacgaggaagttaagattaaaagtagaaggcaaagaattgaacatactgacatattgattctttgaaaagaaatttagaact

SEQ ID NO: 151164 - DNA, 201 bp, Homo sapiens
cggtcttagcaaatggcacaccaggagattatatcccgtgtctggctcagagggtccgacgcccacggagccttgctcattgctagcacagaagtctgatmgaactgcaaggcggcagcgaggttcggggaggggcatccgccattgctgaggcttgagtaggtaaacaaagtggctgggaagcttgaattgggtggagcc

SEQ ID NO: 151165 - DNA, 201 bp, Homo sapiens
tcactgcagcctctgcctcccaggctcagatgattctcctgcctcagcctcccgagtagctgggattacagacaggtgccaccgtgcccagctaatttttrtatttttagtagatggggtttcaccatgttgcccaggctggtcttgaactcctgacctcaagtgatcctcccacctcgacctcccaaagtgctgggatta

SEQ ID NO: 151166 - DNA, 201 bp, Homo sapiens
ttcagctgcagtcattacactcgctacatttgtcacgtgttgattatgtattaagcattgtgctaaacctttcctagccattacctcatttaataacaccrctatgtgaacaggcaattcacctgttaaatgaggcgagaggttggatgacttgcctaaggccgaacagagaggaggagagctgagattccaaaatcccct

SEQ ID NO: 151167 - DNA, 201 bp, Homo sapiens
aatatggtatctatttctctctcctctccctttttctcctttctatctctcccacccctacctttattttattgataagataggaaatgagagattatacrataaaataccttgcttttatccatggacgaggccaagaaatcctttttcccacctcttaaatccaggaactcaaaggagtaaagtgcggctggctggtga

SEQ ID NO: 151168 - DNA, 201 bp, Homo sapiens
catgtccttcctccttgcacttctcgcactgagggttcctcttagtgcaggtcatttacagcttctgggcttttctctaggaggtcataagtccttccctstttcctcttctcctgtttttattctgatttgatgcattgttttcattcccagatatactatttttcaattaactaccaaatggctccaattcttatgaag

SEQ ID NO: 151169 - DNA, 201 bp, Homo sapiens
gacatggtgcggttaagagaggcaagtatgtgtgagcctggacagctttccagctctaggggcagaggaggtttgatagcccttcatggcagggtgcatgygaagagttttgcttgccggcatagataaacttgactatgtctgctctactcaatttgatgtatagtttgaaaggtaatgctgtattacgaataaaataat

SEQ ID NO: 151170 - DNA, 201 bp, Homo sapiens
gcagggtgcatgcgaagagttttgcttgccggcatagataaacttgactatgtctgctctactcaatttgatgtatagtttgaaaggtaatgctgtattaygaataaaataatgggtatatctacctaaaaaggagaaattacaatgggttggtggctggtaggacttttagagtttgagctatcaacaggaaacttggat

SEQ ID NO: 151171 - DNA, 201 bp, Homo sapiens
aatttctggccctgtgtctcaggaatgtagtttattttgattggcatcttctacaggacctgaagatggggctttaattgctgtcagtgtttaaaatttastaggatttggtgtcatttttagacccaggactcaaaatcctgtaactcagtgtcacaagtactttaaaagtgcatgcagagagatatacagatgaaataa

SEQ ID NO: 151172 - DNA, 201 bp, Homo sapiens
cagatgaaataaccttaattaaaaaaattaatttcagttttttcctaagtaaaccaaacttaataataatatgacaacttgatcatataaacgtttttttwaaaaatctctttttatgacttacacagactgttcatgacatgcttggactttctagtttgtcctgaacgtccctctttcttaaataaccagtcattttac

SEQ ID NO: 151173 - DNA, 201 bp, Homo sapiens
gaacccaggaggtggaggttgcagtgacctgagatcacgccattgcactccaacctgaaaaacaagagtgaaactctgtctcaaaaaaaaaaaaaaaaaaraaaaagaaagaaaaagaacactctcccacaaaattccaagcacttttattgattcattattcatttaacgaacacttgttgagcatgggttacatactaa

SEQ ID NO: 151174 - DNA, 201 bp, Homo sapiens
ttccttaaaggaaagcacaccattacagtcaaagtcttggtaaaataaacagtttctctgattgtggcctgttacagtgaaaattgattcttactgcactyatgcaaataactgtattgttataagttagttatcagaaacctgcatttaagaacacctgttagagttctatagctgattataaaaccaccttctaaggag

SEQ ID NO: 151175 - DNA, 201 bp, Homo sapiens
tagttatcagaaacctgcatttaagaacacctgttagagttctatagctgattataaaaccaccttctaaggaggaccaaaacaagacaattgtccatggrtgacaaaatgtattagggtagccatagtgaaagacacaattgacaaggaaatttgttaccttgtggcacactaacaatttaacataaaaattataattat

SEQ ID NO: 151176 - DNA, 201 bp, Homo sapiens
gaacacctgttagagttctatagctgattataaaaccaccttctaaggaggaccaaaacaagacaattgtccatggatgacaaaatgtattagggtagccrtagtgaaagacacaattgacaaggaaatttgttaccttgtggcacactaacaatttaacataaaaattataattatcactgaaaatgtacattaagtcat

SEQ ID NO: 151177 - DNA, 201 bp, Homo sapiens
tgctttttctggttgtttaatatgtgttagtttggatgcctagacaagaaggtaaatatttcagggatgctatgttctgaatgtgtcccccagagttcatrtgttggaaacttttggttttttgttttttgttttttgtttttgagatggagtcttgctctgtcacccaggctggagtgcagtggtgcgatcttggctcac

SEQ ID NO: 151178 - DNA, 201 bp, Homo sapiens
tatctttgcttctcttagatttaccctcgtagggctcctggcattgtaacgctagttacaggattgcaacctgaaactctcaacaggtgattttcccttarctaaacaacagaaagccctgctttctcacaagcatctctgttgtgcagcacctgctgatagcttctggtcaggatggattgctcaggtgcccactggtaa

SEQ ID NO: 151179 - DNA, 201 bp, Homo sapiens
gagaaaggcagaagggcaataggagagggacacccgtcacaaatcaggtgggggcattgcctacccattttgcaatattcggttctgtcttactggcagcrtctttgtttggccaaaaagagggcaacaagtctttggttcctctacttgctctgcttgaggaactataaaatgaagtcatctcaccaaggccatccgttc

SEQ ID NO: 151180 - DNA, 201 bp, Homo sapiens
ggagcttgcagtccacagggcaggcggtcaggaaggggcgatggatataaactgggagagatcaagatgttggaaccaccaagcacaagcgggagcctcawgagaatgggctaaaacttgcatcagttcttttgcatctggcattgatggtgtggatgtcctgcagaagctgggatcttggtcacagagcaaaatacaacc

SEQ ID NO: 151181 - DNA, 201 bp, Homo sapiens
ttggatgttggtgtgtgtctatttaaaaatgctccagtggtttttatattgcctttagaatgaaatcataaatcataactccttactctggtaacccagargtctctgtgatgttctctctctgggtttctctccatctgcctctgtctcctccccacccttcctctccccttcagtggtcacagagcctttgtgtgtgat

SEQ ID NO: 151182 - DNA, 201 bp, Homo sapiens
aggtcaggaaccctgtgcaggggctgtgtagacaaaggtatgaggccagttttttccaaggggtttttattggcttcataagtcaagtttgattccttaarggaaagcacaccattacagtcaaagtcttggtaaaataaacagtttctctgattgtggcctgttacagtgaaaattgattcttactgcacttatgcaaat

SEQ ID NO: 151183 - DNA, 201 bp, Homo sapiens
ctcgcagagtgcttgaacgcattaggtaatcacgcggcatttgttgaaagcatccatgtgccaggctcttgctgagtcttggagtcgaggctaaggtcggrgtgaaccaaacagtacagttgctgtctcgtggcgcccgtgctctatagtaggggagagaacctcacgctgtggtcacagctgtgatagggctgtggaggg

SEQ ID NO: 151184 - DNA, 201 bp, Homo sapiens
gaaagcatccatgtgccaggctcttgctgagtcttggagtcgaggctaaggtcggggtgaaccaaacagtacagttgctgtctcgtggcgcccgtgctctrtagtaggggagagaacctcacgctgtggtcacagctgtgatagggctgtggagggtactggggaacatgtgagtggggtagggggcggtgagagtggcct

SEQ ID NO: 151185 - DNA, 201 bp, Homo sapiens
ttcctaagtaaaccaaacttaataataatatgacaacttgatcatataaacgttttttttaaaaatctctttttatgacttacacagactgttcatgacawgcttggactttctagtttgtcctgaacgtccctctttcttaaataaccagtcattttactctaggactaaatttaccatacaagatttttttctcatatg

SEQ ID NO: 151186 - DNA, 201 bp, Homo sapiens
gttgctgtctcgtggcgcccgtgctctatagtaggggagagaacctcacgctgtggtcacagctgtgatagggctgtggagggtactggggaacatgtgartggggtagggggcggtgagagtggccttaggcaggaaggagtcccacagagaggcatttggcctgtgacacaaacgaaatgtgagtctcttggaagcatc

SEQ ID NO: 151187 - DNA, 201 bp, Homo sapiens
tttttaaacagagacgttcctaagtgtctaaaccatactcttccttaaaaatccaagaataacctctgttgcaactattttagtcaaaacaaaacaaaacraaacgaaacaaaggggtcttggctatctatgtctctgtggtgtgaacataccagtgccctgtttcacctcctgatatttctgttcttcatcacatcctgc

SEQ ID NO: 151188 - DNA, 201 bp, Homo sapiens
ctcctcattatgcccaaggctgtggaacagagtatcaggatcagcaacaaagggaacagaaaagttcccttctctttctggctttgttagaacaatcaacrtattttacagctaaatttgcaaaaaattttctagcagcttggcaaggctttcctcatagaggagtggtaatgaagcccttttatccagctccatggctca

SEQ ID NO: 151189 - DNA, 201 bp, Homo sapiens
acacaaactgattcattattttgagctccagtcttttctgcattttgctataactagggacagatttcagagattccaggcccataccatcctctcttgcrcacacctttcttgccagaaggggtctgtacaacaacttactggcagagtttagtggcagaagtggaacacagaaactgaaagctttctgcttctcccttc

SEQ ID NO: 151190 - DNA, 201 bp, Homo sapiens
ccatggttttgtcagctctgtagggtggtcttgcaccctgctcactgctggcatcacctgagcctatggcagatacccagtgctgcccgccaccatgtgarttcatcagctctgcaggcacagaccttgcactaggaatgggctgggacgccaccctctgcctcttaccattcactgggtttggcaagtgtgctgggatct

SEQ ID NO: 151191 - DNA, 201 bp, Homo sapiens
ggggcaggaggcagagtccttacacagcattgatgtcaagctgctttagtctattctcacactgctatgaagagctacctgagactgggtaatttatgaaraaaaggggtttaatcaactcacggtacaggaggcatggctggggaggcctcaggaaacttgcactcatggcggaagacgtaggggaagcagacacatctt

SEQ ID NO: 151192 - DNA, 201 bp, Homo sapiens
tttcctgtaaagcactcacctcttgtgcgcttctattactgcctcctccattggacacagaattccaagaggacacagactttgcctcttgttcacagctgacttccccagtgcctggagcagttccgggcacccagtaagtgcccaaatgtttggtcagtgagcaagtcctgatgtgactttcttgaccatccagttgac

SEQ ID NO: 151193 - DNA, 201 bp, Homo sapiens
atttgaagagacaatggctcagaattttctagaactgacaaataatactaatccaaagattcaagaagcccagtgaaacccacggaaaataaaagaaaaawccagtcacacgtagatgcatcatagtgaaattgtggaacaccaaaatatacaagacattaaatgtcaccagaagagaaaagacaccttccaaagagtgac

SEQ ID NO: 151194 - DNA, 201 bp, Homo sapiens
gaggcaggagaatcgcttaaacctgggaggcagaggttgcagtgagctgagattgtgccactgcactccagcctgggcaacagagcaagtctctgtctccaaaaaaaaaaaaaaaaaaaaaaaagtataacttctaaactagtagagggaaaaaatgtttattgcaaaagaaggcgagaaggaagagagaagaaaggcacc

SEQ ID NO: 151195 - DNA, 201 bp, Homo sapiens
aggcaggagaatcgcttaaacctgggaggcagaggttgcagtgagctgagattgtgccactgcactccagcctgggcaacagagcaagtctctgtctccaaaaaaaaaaaaaaaaaaaaaaaagtataacttctaaactagtagagggaaaaaatgtttattgcaaaagaaggcgagaaggaagagagaagaaaggcacca

SEQ ID NO: 151196 - DNA, 201 bp, Homo sapiens
ttctaaactagtagagggaaaaaatgtttattgcaaaagaaggcgagaaggaagagagaagaaaggcaccatggaaacatgagacaaaaaaaaaaaaaaargaatgcacaaaataggacaatccttgtaaatccaagaacagttacacctccctacacactgcccagctctggtcctaaccaggggagaggaaggtgaatt

SEQ ID NO: 151197 - DNA, 201 bp, Homo sapiens
gagtgagatttggaatattcagaagttaaggtggaatgagaatctttctactcctttgatcaatatcttaaggtctaaggatctttttttttttttttttyccttggtttcttctgggtaaagcttcccatgagctctctgctgattggccacagatagctaaaaccagttgggaggcagagggagaatcagaactataaa

SEQ ID NO: 151198 - DNA, 201 bp, Homo sapiens
gggcaaactgaaattttaaaaatatgacaaaagtgatcaaccatggcaagatggccgaataggaacagctccagtctacagctcccagtgtgagtgatgcrgaagatgggtgatttctgcacttccaactgaggtaccaggttcatctcactggggcttgtcggacagtgggtgcagcccacgcgagtgtgagctgaagca

SEQ ID NO: 151199 - DNA, 201 bp, Homo sapiens
tagctccttcaaatgactgcatgtttggaatgagttcaggtaaatataattttaaaaaataccatgggcacagcacacggtaagccctcacacccgcaccrgtgggttcacccacccacggggatgttcccggagtcccctggagatagggcctccgatttcatggctaagttttcttggagagaatctgcatgttggatt

SEQ ID NO: 151200 - DNA, 201 bp, Homo sapiens
ccgtcggtggtgtgcacaggaacacgagttgctctaagttgaaattcttggaaacataccatgtggctgcaaatagaggagccctgggagacagcagggargtggcagggtttctcgtggactgcctgtgcctcgttccagagtctgattcccagatttgtaggctaagaaatgtgattcatcatcatgttagtcaggctc

SEQ ID NO: 151201 - DNA, 201 bp, Homo sapiens
tggggagcctcaggatgggtcgctcaactagattagctccaagcacctgccctaagacaactctctctttcactctctctctccatagtggtttactccaygtgaaaattttagattgtctaaatatgcttgtatctagacagatctgttgatacatctaactcatcagtaaatcctttcacgttgacctgtgaaataaat

SEQ ID NO: 151202 - DNA, 201 bp, Homo sapiens
agactcttgtaatagtattaaaattgtactcaagcctatagaaatgtgaagcatctagacagtctctatggggtatttaaataagtatttaaaatgtcacrtaaaaaacatagcttgtagtcctaccaaagaaaaaattgttagtatgaagctggatatggtctgattttttgaaactgcagatgggcctgttgcctttgt

SEQ ID NO: 151203 - DNA, 201 bp, Homo sapiens
aaccttttcctctttttcctctgtcacctgcgggtaccttttacttctgaagtgtgtccacgctgcacagctgaaacaagcaaacactgcctgacttcacytggagtcacacaccctgacggctccacatcacgagatccctctgcttccaccagtgatgggctagcggggttgcttccagaaactgacgaaaagcaacct

SEQ ID NO: 151204 - DNA, 201 bp, Homo sapiens
acagggatactgtgaaatatgtttacaataaaaaactggaaaatctaacaaaataaaaatcacttgtaaatgactgcccagtgctgagaccagcttggtcrggcagaccctaacccagcggtgctagaggaattaaagacacacagaaatatagagatgtgaagtgggaaatcaggggtctcacagccttcagagctgaga

SEQ ID NO: 151205 - DNA, 201 bp, Homo sapiens
acaagaagccttcaaggtgggaacaaaagggagatcttgccaaagccagaaagatgataaatgtacaagagcacattgttagggaagttccacagagggcrcatctggagagagtctctgaatactgagtagcttacttttagtaacagtgcttgtcttggtagctaacgttcatataaaaaaggagactgaaatgtaaaa

SEQ ID NO: 151206 - DNA, 201 bp, Homo sapiens
cctgcaagtgcctttgaggagcctgctgcccagagggcaagacggaagcctcagcgaggggttcccacgcagtggataagacttgcagggcagggatgcgygggcacaccagggggaccacctcaccacccctgcccagtctgggcttcctaaaatacttcctagagaagaacagcccccacgttaggtctggaagtgggg

SEQ ID NO: 151207 - DNA, 201 bp, Homo sapiens
atatcgctttctaacatactaattcatttactttttatggcggtggtttactgtcatctctctccgcctccgcaggtccccattcactggaagtggagctygttggagggatctctgtctagggctccagctatagagagcagtgctttgtaccttgcaggcactgataaatattttttgaaagcataaattccttgcact

SEQ ID NO: 151208 - DNA, 201 bp, Homo sapiens
atatccctgagagtgcttttccccagcagaagccatgattggctgcatgggacctctcaccttcccagggccaacagctgctgctttagtctgtggccccytcctggctgcagaaccaatcatcatttatagctccttcaaatgactgcatgtttggaatgagttcaggtaaatataattttaaaaaataccatgggcaca

SEQ ID NO: 151209 - DNA, 201 bp, Homo sapiens; identical to SEQ ID NO: 28172

SEQ ID NO: 151210 - DNA, 201 bp, Homo sapiens
tttgtttataattgcttattgaaagagttttatgatggccatttaaaaattcttcttaaatatcttccatgtctgtgtcatcccagggttggcatgtgtcaaattgtctttttctctttcaagttgtgattttcctggtccttggcatgtcaagtgatttttcaattgtatcttggacatttggagaattatgttattaga

SEQ ID NO: 151211 - DNA, 201 bp, Homo sapiens
gatgggtgatttctgcacttccaactgaggtaccaggttcatctcactggggcttgtcggacagtgggtgcagcccacgcgagtgtgagctgaagcagggyggggcatcgcctcacccgggaagtgcaggggtccgggaattccctttcctagccaagggaagcggtgacagacggcacctggaaaattggttcactccca

SEQ ID NO: 151212 - DNA, 201 bp, Homo sapiens
gcctggagagtggcttggcacaaggccctctggtcagtgggatgtgcatgcccactctctgtggtggggcagccaggagggagatcaggtggacgagaggyggaagatacacattttaggatcagtcgtgccagagaatcatgatgtgttttgactctgagcaaaacggcgttgctgtgcttcccaaacgtcccttccagc

SEQ ID NO: 151213 - DNA, 201 bp, Homo sapiens
actggtgatacccagataaacaggactggagtggacttccagcaaactccaacagacctgcagctgagggttccgactgttagaaggaaaactaacaaacrgaaaggacatccacactaaaactccatctgtacgtcaccatcatcaaagaccaaaggtagataaaaccacaaagatggggagaaaccagagcagaaaagc

SEQ ID NO: 151214 - DNA, 201 bp, Homo sapiens
tccttctcaggcaaagcacttcaggcgaagctgtctccttcctggagggagctagaacccagctgaatgcggctcccggccccatgctgccgccttcctcrgccttatcctcttgtctcctctcctccttctgaggcaaagggcagggggccccgaactcctccccaggcctgcatctggggccccttggtttctccagcc

SEQ ID NO: 151215 - DNA, 201 bp, Homo sapiens
ccttggtttctccagccctggctgaccccctaccaggacctctggagcaacagagttggtgaatctgtacctctgaaagtccccaggtgacccaccggctktagcggtggttgaaggccctgggtagccctccctgctggcctctgctgcctgtttaacaccctgctgcacacccgggccagcgccagccccgctcccttc

SEQ ID NO: 151216 - DNA, 201 bp, Homo sapiens
agactcctttgcccagtccccagtggtgaggctgaggctggcttccttcctggtttctgtccagtgtcttttcatcaacagcgtcatgtcgttgttcatasccggtttattgtaaaaaactgctgatcattctaatttggaggtgactcttttttcttaaccacaattgaaattcttcttatagctgactctataatcatt

SEQ ID NO: 151217 - DNA, 201 bp, Homo sapiens
aaacaggactggagtggacttccagcaaactccaacagacctgcagctgagggttccgactgttagaaggaaaactaacaaacggaaaggacatccacacyaaaactccatctgtacgtcaccatcatcaaagaccaaaggtagataaaaccacaaagatggggagaaaccagagcagaaaagctgaaaattctaaaaatc

SEQ ID NO: 151218 - DNA, 201 bp, Homo sapiens
cttgaggtcaggagttggagaccagcctggtcaacacggtgaaacccccgtctctactaaaaatacaaaaatacaaaaattagctgggcttggtggcaggygcctgtaatcccagcttcttggggggccggggcaggagaatcgcttgaacccaggaggtggaggttgcagtgacctgagatcacgccattgcactccaac

SEQ ID NO: 151219 - DNA, 201 bp, Homo sapiens
catgtacagagacacacataggctcaaaataaagggatggaggaagatctaccaagcaagtggaaaacaaataaaaaaagcaggggttgcaaatcctagtytctgataaaacagactttaaaccaacaaagatcaaaagagacaaagaaggccattacataatggtgaagggatcaattcaacaagaagagctatctaccc

SEQ ID NO: 151220 - DNA, 201 bp, Homo sapiens
caccagtgttccttgatgacctctattggcacaatgccatgtactccacacagtgtcaccttcaatccccacaacatcctggcaggcagctcttactcccrgagaggagagagaaaagcaggctctggagtctcagcagctcacttgggcctgcagaaccgagggcccaccgggccagccacctccgaggtccttcccctc

SEQ ID NO: 151221 - DNA, 201 bp, Homo sapiens
aatcaataaacataaatccatcatataaacagaaccaaagacaaaaaccacacgatcatctcaagagatgcagaaaaggcctttgacaaaattcaacagcrcttcatgctaaaaactctcaataaactaggtattgatgggacgtatctcaaaatcataagagctatttatggcagacccacagtcaatatcatactgaat

SEQ ID NO: 151222 - DNA, 201 bp, Homo sapiens
tattgattcattattcatttaacgaacacttgttgagcatgggttacatactaagcattatgctgggtgctggctttatagcaatgagtaagacacagccstaggccctagaagacttacaatccgacaacctaatgggagagagagagactataacagacaatgataatgcaggatatattccagttactaaatgctgag

SEQ ID NO: 151223 - DNA, 201 bp, Homo sapiens
ctccagaactataagaaataaatctctgttctttgtaaattgcccagtctcaactattctgttacagcagcataaaatggactaagacaaacagcaaatamcttatctttgcttctcttagatttaccctcgtagggctcctggcattgtaacgctagttacaggattgcaacctgaaactctcaacaggtgattttccct

SEQ ID NO: 151224 - DNA, 201 bp, Homo sapiens
ccgacaacctaatgggagagagagagactataacagacaatgataatgcaggatatattccagttactaaatgctgaggaacaaatgaccccatgaattayaggcttaaaataatcatttcattgtgcccatggattcgttgggtcaggattctgaacagagcccagtggtaacagctaggctgtgctccaggatgcctgg

SEQ ID NO: 151225 - DNA, 201 bp, Homo sapiens
ataagaacatccaactaaaacatcagctggtaagccattcaactaaaggcaaagctttttgagtatatgtgtatgtgtgtgtgtgtgtgtgtgtgtgtgtgcgcgcgcacgtgtgcacgcgcatgtgtataaatgcctaggggaaaaaactataagactattttccaaactgttcataatggttaaccttggagaagggag

SEQ ID NO: 151226 - DNA, 201 bp, Homo sapiens
taagaacatccaactaaaacatcagctggtaagccattcaactaaaggcaaagctttttgagtatatgtgtatgtgtgtgtgtgtgtgtgtgtgtgtgtgcgcgcgcacgtgtgcacgcgcatgtgtataaatgcctaggggaaaaaactataagactattttccaaactgttcataatggttaaccttggagaagggagg

SEQ ID NO: 151227 - DNA, 201 bp, Homo sapiens
atcctcgggcttggaaaaactcagcccagcactacaggcatcttcgtgccccatggtaacaaattgtccctctgtccctttgtcaggctgccctgccaggytgcatgttgttaccctagccccccaccccaccaccgccttcctgcccccacaaccaactcccaggatgcgtcactattccttgacttgtgcttctggttc

SEQ ID NO: 151228 - DNA, 201 bp, Homo sapiens
ccagcactacaggcatcttcgtgccccatggtaacaaattgtccctctgtccctttgtcaggctgccctgccaggctgcatgttgttaccctagccccccmccccaccaccgccttcctgcccccacaaccaactcccaggatgcgtcactattccttgacttgtgcttctggttccagcaatgctatggcctggtgggac

SEQ ID NO: 151229 - DNA, 201 bp, Homo sapiens
aagtagccattttccactgtgcatttatctcttctgttccttcactcgttccttcctatattctttcatcctttgatccaagaagcttcaactgactacartccaattccttaaggagtttctcatcagtatcttctcctaggataatttgtagctaccttctttttctaggggaaaataatgctcatagaatggttatgc

SEQ ID NO: 151230 - DNA, 201 bp, Homo sapiens
tttcccaactagtttgacctcttgcacgtagcttgcatgcctttggaactgggtctcttcagttgacttttgtcgtcttcaacacactgcagcgtgtagcrgttgagcctgtgtcacatagctgaatcagagtcatctgcggtactcaggtattccgtaggaatcacagtgtacacagtgtacattggtctggggctagga

SEQ ID NO: 151231 - DNA, 201 bp, Homo sapiens
tgtaaaattggtctttttggggaaagtaatggaattgtctttttaacaaagaggctttcaaccttttaaatgtactcaagatcccatgaggccactgctcwttgcagtgcctgtccccagaggctctggttctcctgggagccagtgcttcctggcatgtgccagggctctgaaggctttggttgatcttggagtcacacg

SEQ ID NO: 151232 - DNA, 201 bp, Homo sapiens
tttcccccacttaagttccaccgtcagcctggaaattatatggacaacatgacaaagttcctctggaaaaccacactcctctgcttggctgaccttgggaraaaacatttagcaagttcttctttttcttggttattttaaactcagatgatatcagcatgaagctgttcctaataactctggttggcacgggcatctctg

SEQ ID NO: 151233 - DNA, 201 bp, Homo sapiens
agtgggtttcaaccccctacagctttcttaatagtaacagcagtgcatccagaaactagtggtggctctagagacccaacacgaacagtgttgagacctcrttgcagcactttctctgtgttttctgatgtcatgaaactcttcttagtagaattattttcccccacttaagttccaccgtcagcctggaaattatatgga

SEQ ID NO: 151234 - DNA, 201 bp, Homo sapiens
gtaaattggggacagaagtttttcttaatcagaaaaagaaggactgttagaagactgaacagaaggcagaatccttcctaatccaatacttttttagcttyagcttaacaacgaaaggccagacttacactagactttaaacaggtatgaaactggggaagacgcaaccaggaacttacccggaatgtcatcttcataatt

SEQ ID NO: 151235 - DNA, 201 bp, Homo sapiens
ctgcaatggcctcggaacgataagaacagcttgccgggtgtgttctgcagtttgaggctttttcttcgcgaagtcagggctggcttttgtgagcccaggcrctggatttctggagctctccagccttgccaggatttgctttcttagaaaccaggaagtcctttgaagacaatgatgtgaaacccaaacacactggctttt

SEQ ID NO: 151236 - DNA, 201 bp, Homo sapiens
ttgctctgggctcagcccaagggccagaattatcctgctccctgcagtccctgcctctacaccgaccctgggccccagggccaaggatgcccccattgctygtcccccgctccacctcccaggctgctgcgctctgcactgtccagcagcgtcaagaccctgtgcactccctgatcaggagacctcactgaatcctgtttc

SEQ ID NO: 151237 - DNA, 201 bp, Homo sapiens
ctgggaagccctaggacactacagtcatggtccacacagcctgaacagctgttcctgtagatacgcatttatgctttaaaatgcctgggaaatgtgataascatccaggttctctcccagccaccctgaccaggcagctactcctcaggagggctcaggagaacagtcccgccttcagccccaaggcgggggtgagtggtc

SEQ ID NO: 151238 - DNA, 201 bp, Homo sapiens
gcagggcagcagatagtggacctgcagaccccgcatggtggtcaggcagcaggtagaagaaaacagatggtgatttattgtttttgaatcttggttccacrtattcccaaccagaccaagggcctttcctccttcctgccattctcccactccttttattaatacttgcacatatgtaaagctcccagtgaagtgtctggc

SEQ ID NO: 151239 - DNA, 201 bp, Homo sapiens
atctttggaaaatacagtctgttatagatggtaatttttaaatatgtctttgacagtcttccctgaaaaaagtgaaaccccatttccctaactcctgagtrcgggctagtaactctcttctcttcaactaagtgacataaatggtgctttgtaactttcaaggtgaggccatagcttctgcctggtttcctctctcttttc

SEQ ID NO: 151240 - DNA, 201 bp, Homo sapiens
catggacaaaattgagtataaatgaacgtcccttgaaatcacaagagccatcaacctgagaacaaataggaagggcaaaggtggcagagtgacttctcccygtgttcagtatgggctctttgcaaatgatcgagtggcaagcccttgccagcaccagtccccagagccacccaagtctctgagctctcgctggtgcacagt

SEQ ID NO: 151241 - DNA, 201 bp, Homo sapiens
caccctggaattgctacaagtggggaatctcaggctcctctctccagatctaggaatctgcattgtaacaagttgcaatgatgcaaatgcacattagagtytgagaagccctgctgaagaagacagaggctctgtattgcaggagagttcctgggacatcgcagatagagctcatggtggggaaatttggatgacagcctt

SEQ ID NO: 151242 - DNA, 201 bp, Homo sapiens
tccagaaaggacctggaggatcaatattgcagaggaacctgagttgatcaatgggacaagatttcctttgcaacaccgcacggctcatgatgacttcctcrgctgagctgtaatcgtggtggcaggctagagagcaagatgatgcatttgcaggaagctgtcgttctgcctgttgctctgatggaaaggatcacaggctgg

SEQ ID NO: 151243 - DNA, 201 bp, Homo sapiens
tctcatgggttctgtttttctctgtttctcaaaggagagaattacccagagctttgcaggatgtcctctgcagctgaataagaactttaaccctacctacwcttgggaatgtgttaggattttagtccacaagactcttaacagactctagtatgatggataagctaaatttgcctcctttagacaaatttcagtccaaaa

SEQ ID NO: 151244 - DNA, 201 bp, Homo sapiens
accgcacggctcatgatgacttcctcagctgagctgtaatcgtggtggcaggctagagagcaagatgatgcatttgcaggaagctgtcgttctgcctgttrctctgatggaaaggatcacaggctggcccagctttgcagtgaccccaggctgaaatgtgttgttttagctccagccaaaatgcaaagtgtgattgggatc

SEQ ID NO: 151245 - DNA, 201 bp, Homo sapiens
actacaggcatcttcgtgccccatggtaacaaattgtccctctgtccctttgtcaggctgccctgccaggctgcatgttgttaccctagccccccaccccmccaccgccttcctgcccccacaaccaactcccaggatgcgtcactattccttgacttgtgcttctggttccagcaatgctatggcctggtgggacaactg

SEQ ID NO: 151246 - DNA, 201 bp, Homo sapiens
atctgtgtttatgagtttggatggatcagaaattgtggccaaatagaataaccttctcagagacaagagccatcctgcgggggcagtgtaacacatggacygtatggctccaggaacagatggagcctcatttgaattccaatatgtcacttgtttgtccccgattctttacaaagagcagaggagggacctatggtgtcc

SEQ ID NO: 151247 - DNA, 201 bp, Homo sapiens
tggatcacctgaggtcaggaatttgagaccaacctggccaacatgttgaaacctcgtctgtactaaaaatacaaaaaaaaaaaaaaaaaaaaaaaaaaaaattagctgggtgtggtggcaggtgtctgtaatcccagctactccacaggctgaggtgggagaatcgcttgaaccctggaggcggaggttgcagtgagctga

SEQ ID NO: 151248 - DNA, 201 bp, Homo sapiens
atttgctcatttagtcattgtttatcaaccaaactaggtaagccaaggagttacaagacagctctagagaagctccctctgcttacaggacaataatgcattgtttgtttgttgatacaaatgaattatttgaatccacagaagtgaaaaagggaaaaaatcctggctgacttgtgggaagagcgtactgcagagcctagg

SEQ ID NO: 151249 - DNA, 201 bp, Homo sapiens
cctgataccttttttccctgatgatgcctttataccatcactgcacagagctggcatgtgggcctctttcctatgtaggttatgggcattgctctctggtmtccccttacaaatacacaaattacaaattgtatgtatggactcatttaccttgtcattagagcatgagttgtgcagattcccaggcccgaaccccagtga

SEQ ID NO: 151250 - DNA, 201 bp, Homo sapiens
agataattaggattgtactgtggttatttggagataaaatggcatgttatttaagataaaactctctgaattcagacagcgcactccatcatttactgtgyatcccttcctatagtacctggcacacaggccttaatgtgaaatattagttaacacttatcgaatgctttctacatgagtaatcaataggtaaatgttcac

SEQ ID NO: 151251 - DNA, 201 bp, Homo sapiens
tttgctcatttagtcattgtttatcaaccaaactaggtaagccaaggagttacaagacagctctagagaagctccctctgcttacaggacaataatgcattgtttgtttgttgatacaaatgaattatttgaatccacagaagtgaaaaagggaaaaaatcctggctgacttgtgggaagagcgtactgcagagcctaggg

SEQ ID NO: 151252 - DNA, 201 bp, Homo sapiens
cgcagtcctatagaaaagcttttttgtatgtttctgcaagtctgatgcacagtgttgcaatgtgctatttatgcagaaaagactgaggccaattaacgtgttttttttttttgtaattcctctataattaccaaactagaatccttttaaaacctgcattattaagcatttctgttatatccagatgttctttagaattag

SEQ ID NO: 151253 - DNA, 201 bp, Homo sapiens
ttgctcatttagtcattgtttatcaaccaaactaggtaagccaaggagttacaagacagctctagagaagctccctctgcttacaggacaataatgcattgtttgtttgttgatacaaatgaattatttgaatccacagaagtgaaaaagggaaaaaatcctggctgacttgtgggaagagcgtactgcagagcctagggc

SEQ ID NO: 151254 - DNA, 201 bp, Homo sapiens
attagtatacgtaatctgtcccaaaggcttattgcatcatgaatttcaacaagcaaatcttagggcttcaaaaaaggaatcgatatcagcagtaattctgrcatatatttgaggagtttctggagtttaaaatatagaatcgtggatcatataaacaagatatttaccccttaataagctatgtaattttgtctttactcg

SEQ ID NO: 151255 - DNA, 201 bp, Homo sapiens
cttcaactgactacaatccaattccttaaggagtttctcatcagtatcttctcctaggataatttgtagctaccttctttttctaggggaaaataatgctmatagaatggttatgctgctgtaactgagacacatccttactttcctttggaataatttttcttatcatccacacttgttcaaatttcggtgtttcttgac

SEQ ID NO: 151256 - DNA, 201 bp, Homo sapiens
tgctcatttagtcattgtttatcaaccaaactaggtaagccaaggagttacaagacagctctagagaagctccctctgcttacaggacaataatgcattgtttgtttgttgatacaaatgaattatttgaatccacagaagtgaaaaagggaaaaaatcctggctgacttgtgggaagagcgtactgcagagcctagggcc

SEQ ID NO: 151257 - DNA, 201 bp, Homo sapiens
atagaatcgtggatcatataaacaagatatttaccccttaataagctatgtaattttgtctttactcgaaacaacatatacgttccaggtcagtttccctrttaacattcatgcactccgtcagtgtaaaggaaaaaacagactgcatatagtgttcccagcactctgcggagttccttctacatgtgagcttatttaaac

SEQ ID NO: 151258 - DNA, 201 bp, Homo sapiens
tcagtatcttctcctaggataatttgtagctaccttctttttctaggggaaaataatgctcatagaatggttatgctgctgtaactgagacacatccttastttcctttggaataatttttcttatcatccacacttgttcaaatttcggtgtttcttgactgaaatgataggctgggcacattagaaagttacaaatcat

SEQ ID NO: 151259 - DNA, 201 bp, Homo sapiens
taagctatgtaattttgtctttactcgaaacaacatatacgttccaggtcagtttccctgttaacattcatgcactccgtcagtgtaaaggaaaaaacagdctgcatatagtgttcccagcactctgcggagttccttctacatgtgagcttatttaaacctaataacaaccatgacagatgaggaaaccgaggcacagca

SEQ ID NO: 151260 - DNA, 201 bp, Homo sapiens
tcaggaccctgaatacctgtgactgctcgctgctgccttcttgactcctgccgtctgcgctgagaaccagggtgcccctgccccctgctcccacactggcrgggcaagcacaacctggacctctagctgaaaggtggggagggcaccagggtccatggcctcgacagcatgtgttctgggactgtcccgaggcgtctggtg

SEQ ID NO: 151261 - DNA, 201 bp, Homo sapiens; identical to SEQ ID NO: 28170

SEQ ID NO: 151262 - DNA, 201 bp, Homo sapiens
tccagtgtggatgtggaacgccccttctttctatcacttgcattactctcttcagttccacattatttaggtgacccagataaaaacaaaaaacggcagcrccgttactggaaactgtatgttgtaggggggcatcacctcctctctgctagctgctctctgcctttgcaggaggatcccactggaagacatccctgaaga

SEQ ID NO: 151263 - DNA, 201 bp, Homo sapiens
aaaatattaaaacaacacccacaccgtgtaagggaaaaaaataagaggttggagaagaaagcacctcatctccttaaggcaggtccaggggcacccccatsccccgccatgctgaggctggccaagggtccggggcagctgcaggtgccagggcccctggtagggcgggggcaagctcaacccttctgcttcaatagcagg

SEQ ID NO: 151264 - DNA, 201 bp, Homo sapiens
gcaggtgccagggcccctggtagggcgggggcaagctcaacccttctgcttcaatagcaggcaacagcaaggcacacacacacccacgccgtcttggagargggccccttcaggatgaaggctgcagacagggccacccagctgtgtagcgagtaccaaaaaaagaagcctgagcactgcccagggtgcagtgtggacaca

SEQ ID NO: 151265 - DNA, 201 bp, Homo sapiens
tgtagcgagtaccaaaaaaagaagcctgagcactgcccagggtgcagtgtggacacagggcgtctccaggagcatctgaggggtgcagtatggacacaggragtcttcaggagcatctgaggggtgcagtgtggacacagggagtcttcaggagcatctgaggggtgcagtgtggacacagggagtcttcaggagcatctg

SEQ ID NO: 151266 - DNA, 201 bp, Homo sapiens
acacggcgtctccaggagcatctgaggagctgactgccgtgccccattactctgagcctgcgcctgactgcattcttccctgaaggactttgtgtttgtgttctttactcctcttccaaggccacacggtccacgttttactcacttctttctgctctacaataactccactctcactgttactgttacgctccatgcagg

SEQ ID NO: 151267 - DNA, 201 bp, Homo sapiens
ctaacgcttgcaccaaaagcagtgctgaaacgtgttgggcactcgatactcgagctcttgcgtcttccaggctcctggtctgttctttataaaacttcgcygaacatgccctgttaacttcctgtcccttattcacaaaagaatcctctttacctgggggtcagcagaggaagccagggatttctctgagtccctgcgaac

SEQ ID NO: 151268 - DNA, 201 bp, Homo sapiens
tatgtcacttttggactttagggaatctaatgtcttaaaggattaattaggtaagaaaaagacataatttataatttgattttggcaagtttgtcaaatawcaaaggtttaatactattgatatcataaaatagggtcattcatttaactaaagtgataactcaaggatttcaaaaaaggcaaacatcttcattctttgag

SEQ ID NO: 151269 - DNA, 201 bp, Homo sapiens
gaagagaagttagaagtttccagatatggaggggtattttcagcagatatgcccaccgccatggttttgtcagctctgtagggtggtcttgcaccctgctyactgctggcatcacctgagcctatggcagatacccagtgctgcccgccaccatgtgaattcatcagctctgcaggcacagaccttgcactaggaatgggc

SEQ ID NO: 151270 - DNA, 201 bp, Homo sapiens
cttggtttctccagccctggctgaccccctaccaggacctctggagcaacagagttggtgaatctgtacctctgaaagtccccaggtgacccaccggcttyagcggtggttgaaggccctgggtagccctccctgctggcctctgctgcctgtttaacaccctgctgcacacccgggccagcgccagccccgctcccttct

SEQ ID NO: 151271 - DNA, 201 bp, Homo sapiens
aagttggttacttggctaagaagaaattactaggttattgtctctgatgcatcgattctgtgtatattggattgtctcgtgtggaaactgaggcagtgttrtcctctttggaagaggcaaatatcaggttttgggggcctttttgtgaggtgggagggaagacggaatgaggcaggtgtcccctgttctcacagcatctgt

SEQ ID NO: 151272 - DNA, 201 bp, Homo sapiens
acgtgttgggcactcgatactcgagctcttgcgtcttccaggctcctggtctgttctttataaaacttcgctgaacatgccctgttaacttcctgtccctyattcacaaaagaatcctctttacctgggggtcagcagaggaagccagggatttctctgagtccctgcgaacggctgtgcatggcttgccaaatcattcac

SEQ ID NO: 151273 - DNA, 201 bp, Homo sapiens
gagcagccttgctttgtcttaatgtcacatggatgtccacactcaaggatgattgtaaagccggcaggatgatggcacctcaaacccgccagccagctctsagctggcgcttgtgatttgcggccacgggccttctcacttgctctgtgggaaaacggccctgtagtctgttcgggctactcctaactctgctctccttgt

SEQ ID NO: 151274 - DNA, 201 bp, Homo sapiens
gaggggaggccggatttgcggcctgtcctgtgggcagccgtcactcaagtgggacccagggctccgtggctggctcagctgctgcccagctggggagcggkgaaccctggccgagtggctccaccttccaggactcagtttcctcatctgaaatcaaagtaccaacctcagaggatattgggagaattaaaggaaggatta

SEQ ID NO: 151275 - DNA, 201 bp, Homo sapiens
aattaaaggaaggattattgttaaagggcttagactatgctcgacaggaagtaagcactacatcaatgtttgcaaaataaagataaatcaactaacgcacrtgagtttaacctcaagtgtatatttttcttttcagagcactttttttctgactctaaaagcacatcgtgtttttgctaacatttcctatttgtttgtgtt

SEQ ID NO: 151276 - DNA, 201 bp, Homo sapiens
ccgttactggaaactgtatgttgtaggggggcatcacctcctctctgctagctgctctctgcctttgcaggaggatcccactggaagacatccctgaagaygatgacgagtgctcggcctggctgcacaagctctaccaggagaaggtcagtgcactgggtgccaggggtcccttcacgttgcagctgtgggtgcgccgtg

SEQ ID NO: 151277 - DNA, 201 bp, Homo sapiens
gcaaaactcactacattcctactctccaaataaagaaatattaggcagacttgagagatctcatttccaaagcagagtagatcaaacagcaaagaagtagwggatccagagaagtgcagtgtgcgtaggaacagaaaaggtgaaagaatatttccggaggagcttatggggtaagttctaattatgtgaaaaacttacctc

SEQ ID NO: 151278 - DNA, 201 bp, Homo sapiens
atttatagctccttcaaatgactgcatgtttggaatgagttcaggtaaatataattttaaaaaataccatgggcacagcacacggtaagccctcacacccrcaccagtgggttcacccacccacggggatgttcccggagtcccctggagatagggcctccgatttcatggctaagttttcttggagagaatctgcatgtt

SEQ ID NO: 151279 - DNA, 201 bp, Homo sapiens
ttcgtatccttccagctttgcccattgcctatactcaggatccagggtaagggccagtcctacttaaggaccagtctccgagatcatttcagttgaggggratctgttttacttcctgcaagtgctgtggtgggcagtaacatcctgccaaccggcctcgcctggacaccttgctctgcctgggtgaaggtggagtggctt

SEQ ID NO: 151280 - DNA, 201 bp, Homo sapiens
gctagctgctctctgcctttgcaggaggatcccactggaagacatccctgaagacgatgacgagtgctcggcctggctgcacaagctctaccaggagaagktcagtgcactgggtgccaggggtcccttcacgttgcagctgtgggtgcgccgtgtggctgtgttgtgtggtagcaggcctttctccggtgggcgagatct

SEQ ID NO: 151281 - DNA, 201 bp, Homo sapiens
cccactggaagacatccctgaagacgatgacgagtgctcggcctggctgcacaagctctaccaggagaaggtcagtgcactgggtgccaggggtcccttcmcgttgcagctgtgggtgcgccgtgtggctgtgttgtgtggtagcaggcctttctccggtgggcgagatctcacagagccagttattagtgagtctggagc

SEQ ID NO: 151282 - DNA, 201 bp, Homo sapiens
cagaccccagttctgccgagccccggtggcacctgtgtatctctgcgattcccttggaagcagggcctcgggagggacctgccaccgagccccgtgtggcrtctgagggtcctctttcctgtcccccaggatgcctttcaggaggagtactacaggacgggcaccttcccagagacgcccatggtgcccccccggcggccc

SEQ ID NO: 151283 - DNA, 201 bp, Homo sapiens
ttgctggggcccacttaacacctgcagcaagaactcttgggctagagctgggaggcacctttctgtttattccgtgctagtagtttcactttgtgcttttrttaatttttattaataaaaaccagaccctctcacagagctgatgcccagttcctcagggtgatgactggagagggtgccatcatttccctcctccatctt

SEQ ID NO: 151284 - DNA, 201 bp, Homo sapiens
ttaagtagtataagtttcaattataaggaagctcattttccagaaaactcgactccttagagaactgggacattactaggctagttcatgggacacaaacygggcctcactgtgacccacacccatttttgtgtggcgtgcatgctatcggccacgtgcagcttttacaatagctgaggcagctgcccaccatacaacctg

SEQ ID NO: 151285 - DNA, 201 bp, Homo sapiens
taaacataccctattagagcaggtgttttctgccttaagacaagcaacccagtaaagcttcctgggatagcttgtgtctcaacatcataagtgcctgagaragaagcacagaaaaaatgaacaacgcatgtataataaagaccaaataatttctaccactcgtatctgaatcgtgccctcagtttacaataataaaagaat

SEQ ID NO: 151286 - DNA, 201 bp, Homo sapiens
catataagaaggtactggccattcattcaaagaatatttataaagagattagcacacaccacaggtacgtgtatgggacacagtttctatcccaacacacyttacattctattttgaaagatagaatatatgcaagtaataaaaactgtgtaaaaactgttatctccagagaaaaaccaatgctaaggaagcatccagtgt

SEQ ID NO: 151287 - DNA, 201 bp, Homo sapiens
agataagtagatataagtgaactacttcccatattactcaaaaaaatgaataaattaatattaaatttggtagatgaaaactcataaaatacattaaaaargcatataggtcattagtaaattgttgttgctttttcacactagaattatgactacctaaaatttttaatgcatataattattaaaattttttatcttttt

SEQ ID NO: 151288 - DNA, 201 bp, Homo sapiens
aataggcaaatctatagagacagaaattcaagtagcagttgcccaggataggacaaatgcagaaagaaggggtagggagtaaaaggctaaagcttataggstttatttttaggagataagagttctctaaaattgactcttacggtagaagcacaattctgtgaatatactatgaaacattaaattttacacaataattga

SEQ ID NO: 151289 - DNA, 201 bp, Homo sapiens
ctgggtggatgaaggcggctctggacatcaagccactgaaacaaaacactgaacgtaagttacatcaaatgtggctacaggtaactgcaattacgcacaakacctggatatcctatgtattaccttgaatagcagaacaatgactctaacatcattaacactgatgtcttaagattaaaaatcatattttaaaaaatgctt

SEQ ID NO: 151290 - DNA, 201 bp, Homo sapiens
ctctgacaaactttaagtgaagtgtaaaggattatagaataagataaatgtaggtttacgtaatcccagctgtgagtaacttttcctcagtgctcagagtsagggaagtcaaccactaatgacttcaaactaaaataattctgtagaaaacctgcctaaaataagcatatgtgatttagcgagcaacaatatagcattaaa

SEQ ID NO: 151291 - DNA, 201 bp, Homo sapiens
gaagattctgataccctctatcatgatctgagagatagtggtatcttcacttcgaaataatgtttaagatgatcttaccttattgggctgtttcacttagygtatgtacacttatgttatgtgttttatgcttaaatgtgtattttagaagacgtacaatgtattttaagattataggaatcaaataagttcaaaataagc

SEQ ID NO: 151292 - DNA, 201 bp, Homo sapiens
tcctcacatgcagttataaatagcacatcaatttaacagtgtgatttcagggaaaaattgttccacttaaacaatcacctgaaaaatataatcattcgacyatgtaactacatactgtacgattctgtattacaaatgagaatacagaattatttatagaaatttatagaaattccaaaccacaacagcagactccataat

SEQ ID NO: 151293 - DNA, 201 bp, Homo sapiens
aattaatattaaatttggtagatgaaaactcataaaatacattaaaaaagcatataggtcattagtaaattgttgttgctttttcacactagaattatgastacctaaaatttttaatgcatataattattaaaattttttatctttttaaaattaagttttattttttaacttttaatttcaagggtaaatgtggaggtt

SEQ ID NO: 151294 - DNA, 201 bp, Homo sapiens
actcggctgtacaagtggataccccagaatgatcttcttggtaagtctctgaagaacaaatactgaatatattagtaacagattattaaagtgttaatagytatcatgaaacaagcttactgaacatttgttatggaaaaacttaaaatgaaacttctttatatttattttccagtcccgggggaaaagaataaatgataa

SEQ ID NO: 151295 - DNA, 201 bp, Homo sapiens
taaattttgaatattaaatacactttagaatattttaaagtaaaaaagtaaatcataattatgcacacacttttatttcaacaattccactctcaattatwtaggaaaatatatgtataaatttgtaagcctattgctatatacaagaatgtttatgacagaattattaatagtgtccagaaattgttggcactcaaatgt

SEQ ID NO: 151296 - DNA, 201 bp, Homo sapiens
cccaaactgtgaaagtgggaaaggagatcatctgcctttgaacacacacccttaccaggaaacctaaagtttcagaccacagaagttgacctgacctggarctgagtcaattagagagcagagtgaaatacaggggtacaggaagcagcgggaaaagccctgtggattctctgggtttccagggaagccatttctgtcttg

SEQ ID NO: 151297 - DNA, 201 bp, Homo sapiens
tgcaacatataagaaggtactggccattcattcaaagaatatttataaagagattagcacacaccacaggtacgtgtatgggacacagtttctatcccaayacaccttacattctattttgaaagatagaatatatgcaagtaataaaaactgtgtaaaaactgttatctccagagaaaaaccaatgctaaggaagcatcc

SEQ ID NO: 151298 - DNA, 201 bp, Homo sapiens
aattgtggaagggccaaactagaaagagctgaccattgaggaaattttgtatgaattcaggtagcagatgatggaaaaatggactagaaagtggatagaawtacctatgcctacttttacagtaatatgactaacttcatattgtgttgtgtggaaaaaagttaatacaaataaaccacttaaaatgtctctggcatatag

SEQ ID NO: 151299 - DNA, 201 bp, Homo sapiens
cttttagttatttttcctgatcctttctctcctcccaacccccaccctccaataagccccagtgtatgttattcctctctatatgttcatgtgttctcatsttttagcttccacttataagtgagggcatgtggtatttggatttctgttcctgtgtttgtttgctagggataatggactgcagctcacttatgttcctga

SEQ ID NO: 151300 - DNA, 201 bp, Homo sapiens
aaaataaggtagtagatttaaatgtgaatatacagatacttccattaaatctaaactgacctgaaaaataagaccaaataatgagtaaggacataaaacawttgaagaacacaattaacaattgtaatgttgtaatgtaacataacacacacacacatatataactcatacatatgtattctatatatcaactggaaggca

SEQ ID NO: 151301 - DNA, 201 bp, Homo sapiens
cccctactatgtaaccacaaaaactaaaaattaaaagaaaataaaattgctcatatgttctctgcctcaaataattaactttctcacctgaccctccattkttactttaaaaatatttgtcaattatgaaattccaatttaaaagccaaactttctatgatgactcaaattaaaatacacacattctatgtcaattctatg

SEQ ID NO: 151302 - DNA, 201 bp, Homo sapiens
taaaggagtgtaactggatatttcataacacaaagataaatgcttaagcaatgggtagcctttcttcatgatgtgattatttcacactgcagcctgtatcraaacatctcatgcacctcatagaaaaatacccctactatgtaaccacaaaaactaaaaattaaaagaaaataaaattgctcatatgttctctgcctcaaa

SEQ ID NO: 151303 - DNA, 201 bp, Homo sapiens
gccttggattgcattttgattatggccagagatgttgatgttctttatatgtggttactgaccatgcatatacattctttggaaaaatgtctattttaatytttgaaacattttaaaactttgatatttgtcttattattgagttttatataagaactatttatgtattatggatacaatcccatatgagatatataattt

SEQ ID NO: 151304 - DNA, 201 bp, Homo sapiens
atcacaagtttatgaatttcatcattattaccaataaagagggatactaaagagactttgaaaatagggttggtaaattaaagctttgattatgcaacatrtaagaaggtactggccattcattcaaagaatatttataaagagattagcacacaccacaggtacgtgtatgggacacagtttctatcccaacacacctta

SEQ ID NO: 151305 - DNA, 201 bp, Homo sapiens; identical to SEQ ID NO: 28189

SEQ ID NO: 151306 - DNA, 201 bp, Homo sapiens
tatcatgatactggggtcaggtaagagctatcaccaaattctgcccctgtgatttgatccttttgtttaagaactcctgagggcgatgtacatcctacagrtgttagaaaacgttacattttaatgagtaacttcactagcacaataacaatagcaggtatttcaaaaaggctgacatgcatcatgcagtttagtgttgcc

SEQ ID NO: 151307 - DNA, 201 bp, Homo sapiens
ttaaaacggctcatgatgctgaccatgattttatacgcctgctggagaactaaaggagtgtaactggatatttcataacacaaagataaatgcttaagcartgggtagcctttcttcatgatgtgattatttcacactgcagcctgtatcaaaacatctcatgcacctcatagaaaaatacccctactatgtaaccacaaa

SEQ ID NO: 151308 - DNA, 201 bp, Homo sapiens
cttcaacagagtataagcatttctttttctatacaacatcacaagcatctgttattttttgagtttttaataatggccattctgactggtgtgagatggtwtctctttgtggatttgaccagtgatgtaaacctttttttcatatagtggtttgccacatatagttttcttttgaaaagtgtaacaactttttaaatactt

SEQ ID NO: 151309 - DNA, 201 bp, Homo sapiens
tttttaataatggccattctgactggtgtgagatggtatctctttgtggatttgaccagtgatgtaaacctttttttcatatagtggtttgccacatatakttttcttttgaaaagtgtaacaactttttaaatacttgaacttttcattgattatcttatttgtctaagctactattttgaaaaatcatgatttccttat

SEQ ID NO: 151310 - DNA, 201 bp, Homo sapiens
tgtttcattggtctacatgcctgtttttataccagtaccatgctgttttgttaactatagccttgtagtatagtttgaagtcaggtaatgtgacacttccagatgtgtgttttttttgttgttgttgtttgtttttttgcttagtcttacttgggctatgtggacatcaaagctgagaatcaaataaaaacctcaacccct

SEQ ID NO: 151311 - DNA, 201 bp, Homo sapiens
tacttcctgtacattttggaataggcctattcaagtgatattcagggtactattcagagaaaggaaggcctaggctgtcagacaactagtgtaaggatccrcagagctaggcagatttggagaaagagaaaaagcagcctgctttgctggactggacccagccaatgtctgaagtaggcagatgaaagagaaagggtggag

SEQ ID NO: 151312 - DNA, 201 bp, Homo sapiens
cgtacattggggaacacaggtcagaatgattcccagtaaattccagccaagtacatcttcactaagatttttatgtagtgtgggtgatctactcaagaggktgaccaaatctctgcagaaagttctggcagtctctcgcattctggtgcaagtgctgctgcctctgagacacagcaaaatgatgatgagaattcctcacat

SEQ ID NO: 151313 - DNA, 201 bp, Homo sapiens
gcaacagaattaaaccaacaactgctacattaaaaaaaaaagacactttgggaggctgaggcaggtggatcacgatgtcaggagttcgagacaagcctgaygaacatggtgaaaaccttgtctctgctaaaaatactaaaattagccaagcatggtggtgcgcacctgtaatcccagctactcaggaggctgaggcaggaa

SEQ ID NO: 151314 - DNA, 201 bp, Homo sapiens
ctaaaggattggaaaccatttattttaaggctaatcatcttgtcaaagtgtgaacattaagttacaactgtatagtttttttttgaaactatgtatctttmtttaaaaatatgagccaaattaaggttgaatgcaaatttctgtttcaacaagttctcaaaattttctagctgtaatttgcaaacatatttacctaaaaac

SEQ ID NO: 151315 - DNA, 201 bp, Homo sapiens
ctggaaggcatagttttctagagcatgttgagtaggtaatagttatttgaagttacatggggagggtcataaatcaagattcagtatgtatgaaaagattyaatatcataaagagtataagatccagccatagtgaatgtgagaaattataaaaatgataactaaaaaatctttaaattttgaatattaaatacactttag

SEQ ID NO: 151316 - DNA, 201 bp, Homo sapiens
tatctgttttctcactgaaaaatttatttttattatcattattgtaacagacttgataattaaatttaatttccatagcataaaaccgacctatttaagtrtaaaatccaaatatatttagtatgcttacagtcatgaagccatcaccatcatataattttagaacatttgtatcaacgtaaaagaagccataatggtata

SEQ ID NO: 151317 - DNA, 201 bp, Homo sapiens
gaacaaattcttttttttcacaggaaatggaagagtttgtccagagctctggagaaaatggtgttgtggtgttttctctggggtcgatggtcagtaacacrtcagaagaaagggccaatgtaattgcatcagcccttgccaagatcccacaaaaggtaagataaaatgttttaatggtgtaaaaaactactgaaagaggct

SEQ ID NO: 151318 - DNA, 201 bp, Homo sapiens
gcatttttgtcaatcaaaggacatcaaactctgttaaaatgacttatagataagtagatataagtgaactacttcccatattactcaaaaaaatgaataaattaatattaaatttggtagatgaaaactcataaaatacattaaaaaagcatataggtcattagtaaattgttgttgctttttcacactagaattatgact

SEQ ID NO: 151319 - DNA, 201 bp, Homo sapiens
agctcattcaccttttgattgtttccagttgtggctattaggagcattgctacatgtttttgcatgaacgtgatttcatttcttttgggtagatactagamgtggaatttctggctcttgtaggaactgtgtgtttatgaaaattgccaaactgttttccaaatgcttgttccatttgtcattaccaccagcagtacagga

SEQ ID NO: 151320 - DNA, 201 bp, Homo sapiens
ttatttttattatcattattgtaacagacttgataattaaatttaatttccatagcataaaaccgacctatttaagtataaaatccaaatatatttagtakgcttacagtcatgaagccatcaccatcatataattttagaacatttgtatcaacgtaaaagaagccataatggtatagaagtcactttgcatgacccctt

SEQ ID NO: 151321 - DNA, 201 bp, Homo sapiens
cagaaggtgtttttcattggtaattaatttggcattaatattgtgatcaggaataaatacaattaagagttgcaggtaaagttttggtattatcatgataytggggtcaggtaagagctatcaccaaattctgcccctgtgatttgatccttttgtttaagaactcctgagggcgatgtacatcctacaggtgttagaaaa

SEQ ID NO: 151322 - DNA, 201 bp, Homo sapiens; identical to SEQ ID NO: 28190

SEQ ID NO: 151323 - DNA, 201 bp, Homo sapiens
taagaagtccactgacagtatcagtactgttttgcaaatactcagcatactttggatccatttcatgcaggattgtgttgttttaactgttgttgaggaarctaataaataattaaattgtatagaaagtctcttcctcttgatattttgagatgattagtgctgcttggcttttattgtgcatcgtgcttcaacgtcatt

SEQ ID NO: 151324 - DNA, 201 bp, Homo sapiens
attgctaagtcgcccaaacagcaaagatggcagcccacacctcttgcgagccctctcccagggtgttttcaaatctctagtggcgggagaacactgattgsggtggctagaagcccctgtttggaggtcccgcccaataggaaggaacaggatctggaacctgcttaaagaagcagtctggccaagtttaggtagagtaga

SEQ ID NO: 151325 - DNA, 201 bp, Homo sapiens
tccgcagagctaggcagatttggagaaagagaaaaagcagcctgctttgctggactggacccagccaatgtctgaagtaggcagatgaaagagaaagggtrgagatggatcctgctctgagggtggaccctgtgtagtataaaatgtggccccacaaggacgctgcactatgagattaacaactcctcccaatggaggcag

SEQ ID NO: 151326 - DNA, 201 bp, Homo sapiens
gctggagaactaaaggagtgtaactggatatttcataacacaaagataaatgcttaagcaatgggtagcctttcttcatgatgtgattatttcacactgcwgcctgtatcaaaacatctcatgcacctcatagaaaaatacccctactatgtaaccacaaaaactaaaaattaaaagaaaataaaattgctcatatgttct

SEQ ID NO: 151327 - DNA, 201 bp, Homo sapiens
cgcctgctggagaactaaaggagtgtaactggatatttcataacacaaagataaatgcttaagcaatgggtagcctttcttcatgatgtgattatttcacrctgcagcctgtatcaaaacatctcatgcacctcatagaaaaatacccctactatgtaaccacaaaaactaaaaattaaaagaaaataaaattgctcatat

SEQ ID NO: 151328 - DNA, 201 bp, Homo sapiens
ggactccactgcaaacctgccaaacccctaccgaaggtaaactattactgtttgttttgtctgctttgaagtttcagtacgaatggttctatattcattcraagtgtttgacttacactggaagaaaggtggaagtgggaagagtaaagcagataccaattagaaactgacgtacatgttgatactatcacaagtttatga

SEQ ID NO: 151329 - DNA, 201 bp, Homo sapiens
aaataaggtagtagatttaaatgtgaatatacagatacttccattaaatctaaactgacctgaaaaataagaccaaataatgagtaaggacataaaacaaytgaagaacacaattaacaattgtaatgttgtaatgtaacataacacacacacacatatataactcatacatatgtattctatatatcaactggaaggcat

SEQ ID NO: 151330 - DNA, 201 bp, Homo sapiens
aacttttttgattggtaacatgaagatctaactttcttgtacctttgaagctgagtttgtataaagccataaagtcagggtagtggggtatttttgtaatraatttatcaaatgaaattgtaagatgatctaccaaactcacaagcactatagaaaatgtaaattataggatcagttaaaactctgtggccatcactcata

SEQ ID NO: 151331 - DNA, 201 bp, Homo sapiens
gctaagtcgcccaaacagcaaagatggcagcccacacctcttgcgagccctctcccagggtgttttcaaatctctagtggcgggagaacactgattggggyggctagaagcccctgtttggaggtcccgcccaataggaaggaacaggatctggaacctgcttaaagaagcagtctggccaagtttaggtagagtagattt

SEQ ID NO: 151332 - DNA, 201 bp, Homo sapiens
gcacctttttgttagttcaactggtaatcttgtattaattttttcagtctgaagttaaacacaccacatagccttcacttacatctccagcagaagtaggsgttccttcctctgaagtctcaaaaacaattttaattcagttcagtgtgttatctaggaaacaccgtcacattcagattcttccattgtgcatttctcatt

SEQ ID NO: 151333 - DNA, 201 bp, Homo sapiens
agataagagccagatactcctcaggagttgaaatatttattaagcacatttagggactactaaaaagagttaagaaaagaaaatatgggataagattatastttttaaaaaaagattccaagatgttcgatggattaaattgtggaagggccaaactagaaagagctgaccattgaggaaattttgtatgaattcaggtag

SEQ ID NO: 151334 - DNA, 201 bp, Homo sapiens
gcatttctttttctatacaacatcacaagcatctgttattttttgagtttttaataatggccattctgactggtgtgagatggtatctctttgtggatttraccagtgatgtaaacctttttttcatatagtggtttgccacatatagttttcttttgaaaagtgtaacaactttttaaatacttgaacttttcattgatt

SEQ ID NO: 151335 - DNA, 201 bp, Homo sapiens
gctccattcgtctatctgtctcttttcaaactggtaccatgctttttaaattactgtagtcttatagtttgaagttgggtagtatggtgctttcggcttarttctttactttggctattctcactttattttggttccatataaattttagaatagtttttatctaattatgtgatgattttggtagtttgacatgaatgt

SEQ ID NO: 151336 - DNA, 201 bp, Homo sapiens
tgtatggcctctttggtggaataaaatttactccgaaataaaatgttagaatgtgatctaataaacttaaacgcaagcttctaatggatgaaattacaaakatctctctaccagatcaaagcgtccaaatacttaacagaattaaaaaaaaatagcccagtatccaacaaggtaaaatcagaaaaaaaagttatgaagtag

SEQ ID NO: 151337 - DNA, 201 bp, Homo sapiens
agtttgacatgaatgtcattgaatgtgtaaattactttgggcaatttggccattttaacgatactgatttttccaactcatgagctatcttccaactcacratagtatatggaataattttatattctatttcaaataattctaatatttgaaataattatattaatatttctagtctctgttacttttgctgattttcat

SEQ ID NO: 151338 - DNA, 201 bp, Homo sapiens
tggaagttacaatttgtgtggatataatcttgagttttatatgcatatatttcttaaaataaataatttgtaaattttggtactctgtgcattgttaatarcctatcacttgtggtctgcctaaagactgagagtgactgccttatggggagactctcagtgtttgagaaattctgcaccaaaccctagattccccagtct

SEQ ID NO: 151339 - DNA, 201 bp, Homo sapiens
ttatattctatttcaaataattctaatatttgaaataattatattaatatttctagtctctgttacttttgctgattttcatacatgaagtcttgtttctyggtaaacaggagctgcctattaaccttggaatttgatctgtgggaaggctttgaggctagtgtcagtttcttccaagatgcttttctagcttgaatttta

SEQ ID NO: 151340 - DNA, 201 bp, Homo sapiens
accaattttatattcccaccaacagtgcacaagggttccctttttccatatcctcaccagcatttgttattgcctgtttttttgtctgtctgtttgtttgyttgtttgtttttgcggcggggtcagggtggtaaaagccatttgaactgggctcagatgatatctcattatagtttttacttgcatttctttgatgaatag

SEQ ID NO: 151341 - DNA, 201 bp, Homo sapiens
tgcccaagtcttatgtcaaattgtgatccccaatgttggaagtggggcctgattggagaggattggatcatgggggtagagtattcatgaaaggtttagcrccatcctcccttggtactcttcttgtgatagtgagtgagttatcacgagatctgtttttttttttaagtgtatagcacctttgccctcactctctctctt

SEQ ID NO: 151342 - DNA, 201 bp, Homo sapiens
gtttatgtatgtcttaaatgatttttatcccacagtattaggttatgtaccatcttggtattggaaccatcctacagtatagctcacacagtatcaaaatyatttttggaaaaattatgctaaacatctatatttacaactggcttactctacttttttatgtctacatttgatcatactgtgttaagcatatatttcatc

SEQ ID NO: 151343 - DNA, 201 bp, Homo sapiens
ctacagtatagctcacacagtatcaaaattatttttggaaaaattatgctaaacatctatatttacaactggcttactctacttttttatgtctacatttsatcatactgtgttaagcatatatttcatccatatcttcctttttgtaactcttaaaatcctatacaactaacaaagttcatgcaagaattatattttctc

SEQ ID NO: 151344 - DNA, 201 bp, Homo sapiens
cctgtctctactaaaaatacaaaaatttagccgggtatgatagtgggcgcctgtagtcccagctactcaggaggctgaggcaggagaatggcgtgaacccrggaggtggaggttgcagtgagccaagattgtgccactgcactccagcctgggcaaaagagcaagactcagtctcaaaaaaaaaaacaaacaaaaaaaaag

SEQ ID NO: 151345 - DNA, 201 bp, Homo sapiens
aatttattatttttaccatgagcattgcttgctgtttctaatttctttattaattctttcaactgtcatttttaacaacttgtatcatcagctcacctatstccttatcacttcctcttgctttgtaagtcaattttgatatcatattcattaccctcccgctattattgtattttgaatctcctcttctttggactatat

SEQ ID NO: 151346 - DNA, 201 bp, Homo sapiens
gccaaacatagagtcaattgatatttgacaagaatgcaaaactatacaatggagaaaaaacaatatctttaacaaataccagtggacaaactgattatcartattcaaaagaataaaattgaaccccttacctcaagtcatatataaaaatggactcaaaatagattaaaaaaaaactaaatgtaagatcaagaactataa

SEQ ID NO: 151347 - DNA, 201 bp, Homo sapiens
ccccagaaaatgtctgagggtaaatgctaaatgattaagcaattttagggtgcttcatactagagacataaggacaatgaattcaatgcaactttttttttgtaatggcagaattagaacaatgcaagattgactcatgaactttaatttttgcacatttaaaaatattttatatatcttttaaaatatgcatgtattttc

SEQ ID NO: 151348 - DNA, 201 bp, Homo sapiens
cctctccagcacctgttgtttcctgactttttaatgatcgccattctaactggtgtgagatggtatctcattgtggttttgttttgcatttctctgatggmcagtgatgataagcattttttcatgtgtcttttggctgcataaatgtcttcttttgagaagtgtctgttcatatccttcacccacttgttgatgggtttg

SEQ ID NO: 151349 - DNA, 201 bp, Homo sapiens
gggttggttccaagtctttgctattgtgaatagcgctgcaataaacatacgtgtgcatgggtctttatagcagaatgatttatgatcctttgggtatataygcagtaatgggatggctggatcaaatggtatttctaattctagatccctgagaaattgccacactgacttccacaatgattgaactagtttacagtccca

SEQ ID NO: 151350 - DNA, 201 bp, Homo sapiens
ctcatcatttaacattaggtatatttcccaacgctatccttcccccctccccccaccccacaacaggccccggtgtgtgatgttccccttcctgtgtccayatgttctcattgttcaattccctcctatgagtgagaacatgcagtgtttgtttttttgtccttgagatagtttgctgagaatgatggtttccagcttcat

SEQ ID NO: 151351 - DNA, 201 bp, Homo sapiens
tgtgccaggttggtgtgctgcatccattaactcatcatttaacattaggtatatttcccaacgctatccttcccccctccccccaccccacaacaggcccyggtgtgtgatgttccccttcctgtgtccatatgttctcattgttcaattccctcctatgagtgagaacatgcagtgtttgtttttttgtccttgagatag

SEQ ID NO: 151352 - DNA, 201 bp, Homo sapiens
acgtgcaggttagttacatacatgtgccaggttggtgtgctgcatccattaactcatcatttaacattaggtatatttcccaacgctatccttcccccctycccccaccccacaacaggccccggtgtgtgatgttccccttcctgtgtccatatgttctcattgttcaattccctcctatgagtgagaacatgcagtgtt

SEQ ID NO: 151353 - DNA, 201 bp, Homo sapiens
acgcatcattgtgattacagttggagatgcactttgttatcctgttctaaaatatgttacaattagatgccattttaaacaaattttttcttagacctatkaatcaaaggaggcatacagttgagaaaatgatcttgaatgcttaacaggaaccgataaatttattaataattttattagatataactggcatgctaacaa

SEQ ID NO: 151354 - DNA, 201 bp, Homo sapiens
ttagacctattaatcaaaggaggcatacagttgagaaaatgatcttgaatgcttaacaggaaccgataaatttattaataattttattagatataactggmatgctaacaattttaaaagcctagctcagtatcctttgttgggcttccctccaaaaactgtttttatgagtttgcaaacaaccctgttgattggttaaat

SEQ ID NO: 151355 - DNA, 201 bp, Homo sapiens
ttttagggtacatgtacacaacgtgcaggttagttacatacatgtgccaggttggtgtgctgcatccattaactcatcatttaacattaggtatatttccyaacgctatccttcccccctccccccaccccacaacaggccccggtgtgtgatgttccccttcctgtgtccatatgttctcattgttcaattccctcctat

SEQ ID NO: 151356 - DNA, 201 bp, Homo sapiens
acgctgtgtcaaaaaaaaaaaaaaatcttatatattctagatgagcctgagccagttttatatattgcagatatcttcctacagtttatgatggttttctyattatcttttaatatcagataatgaatcgtagattttaaatttaatggaagtgaatatattaatcatactctttataatttttctttatgttcctgagga

SEQ ID NO: 151357 - DNA, 201 bp, Homo sapiens
tcttgtgccagttttcaaagggaatacttccagtttttgtccattcagtatgatattggctgtgggtctgtcatagatagctcttattattttgagatacrtcccatcaatacctaatttattgagagtttttagcatgaagcgttgttgaattttttcaaggccttttctgcatctattgagataatcatgtggtttttg

SEQ ID NO: 151358 - DNA, 201 bp, Homo sapiens
ccctgttgattggttaaattaagccttgggggtaacaatttcagttagcatgagaagagttgtcccttatttagtgttcatttctgtaatggttttgcttycatgcttggacttgtaatcactgattatatatttaagttatacatttcagagacgtgtttcctcttaaggagactatttctgactgggcacagtggctca

SEQ ID NO: 151359 - DNA, 201 bp, Homo sapiens
atcatactgtgttaagcatatatttcatccatatcttcctttttgtaactcttaaaatcctatacaactaacaaagttcatgcaagaattatattttctcmacgtaactatggccttaaacttgtagagcaaaagtgtatcacatatttatcttcaatgaaaataaaaacaaaaattgtctaatttctgcctatttatttg

SEQ ID NO: 151360 - DNA, 201 bp, Homo sapiens
ccctgtcttgtgccagttttcaaagggaatacttccagtttttgtccattcagtatgatattggctgtgggtctgtcatagatagctcttattattttgaratacatcccatcaatacctaatttattgagagtttttagcatgaagcgttgttgaattttttcaaggccttttctgcatctattgagataatcatgtggt

SEQ ID NO: 151361 - DNA, 201 bp, Homo sapiens
aactgtcatttttaacaacttgtatcatcagctcacctatctccttatcacttcctcttgctttgtaagtcaattttgatatcatattcattaccctccckctattattgtattttgaatctcctcttctttggactatatgcaatacctaaatgcatttttagtttctcatttatttttcaatatgtgtaagtggttatc

SEQ ID NO: 151362 - DNA, 201 bp, Homo sapiens
ctttatttccttctcctgcctgattgcactggccagaacttccaacactatgttgaataggagtggtgagagagggcatccctgtcttgtgccagttttcraagggaatacttccagtttttgtccattcagtatgatattggctgtgggtctgtcatagatagctcttattattttgagatacatcccatcaatacctaa

SEQ ID NO: 151363 - DNA, 201 bp, Homo sapiens
agcttgaagaatagctttaatatttcattcacttttcctgaaggctgagattcaggagaggagaaggtaaactcggatggaatttagtgctttttcttaayggaagtaacctgcttaaaaacatctattcagtgacctttgccaggcattttagacacgagggctaatgtattcatttcaaaaaagaaagacactcaacag

SEQ ID NO: 151364 - DNA, 201 bp, Homo sapiens
gacattgaccttggcaataatttcttggatataacaccaaaagcaaaaacagacaagtgagattatatcaacctaaaatagcttctggccagcaaaagagmcaatcaacaaacttaaaaggcaatctgtggaatggaagtgaatattcgtaagacatatatatgataaagggtcagtatgcaaaaattaataatattttag

SEQ ID NO: 151365 - DNA, 201 bp, Homo sapiens
gttattttttttactttttaataaaagctaatctgactgacataaaatggtatctcactgtggttttgattttcatttctccaataatcagtggtatttarcttttagctttttaatatacttgatggttgcatgtatgtcttcttttgcaaactgtctgttaatgtcctttgcccactttttaatgaggttgtttctttc

SEQ ID NO: 151366 - DNA, 201 bp, Homo sapiens
atttcttggatataacaccaaaagcaaaaacagacaagtgagattatatcaacctaaaatagcttctggccagcaaaagagacaatcaacaaacttaaaakgcaatctgtggaatggaagtgaatattcgtaagacatatatatgataaagggtcagtatgcaaaaattaataatattttagtattttttatctccattct

SEQ ID NO: 151367 - DNA, 201 bp, Homo sapiens
tggaatggaagtgaatattcgtaagacatatatatgataaagggtcagtatgcaaaaattaataatattttagtattttttatctccattctcttttaacmtgtaatattgtctatgacatttataaattttctatttatccctccttccatcttgagttaatttcaatgtgatattaatattttatattttcttgttcat

SEQ ID NO: 151368 - DNA, 201 bp, Homo sapiens
tctataaacaagcccacattaaactaccagagatgaaacacacaatatctaaaattaaaaatacattggatagtattaatagattggacacagcatagaamaaaagaatttaaagatatagtaatagaaactatacaaaatgaaaaataaagagaaataatcacttctcccttccccacaaaataaacaaaacatcctaac

SEQ ID NO: 151369 - DNA, 201 bp, Homo sapiens
aacactgatttttaaaacagattatttaaagtttgtgtttaaagttttaaagggtgcataatattaattggttcataagtcaactgaaaaaaatatttgtratacataacacaggaaaaaggcttaaattacctaaaatgccctaacagttacaagtcaagaagataaatggccagatagaaaatgaaatgatttgtaccc

SEQ ID NO: 151370 - DNA, 201 bp, Homo sapiens
ttgtaatggcagaattagaacaatgcaagattgactcatgaactttaatttttgcacatttaaaaatattttatatatcttttaaaatatgcatgtatttkccacttttagaaactatatcaactttgctaatacatgagtgtaaagttttgctgccagtattagaaacatgattcttccaatggaaaccagaagcctgac

SEQ ID NO: 151371 - DNA, 201 bp, Homo sapiens
ttgtgtttaaagttttaaagggtgcataatattaattggttcataagtcaactgaaaaaaatatttgtaatacataacacaggaaaaaggcttaaattacytaaaatgccctaacagttacaagtcaagaagataaatggccagatagaaaatgaaatgatttgtaccctgccccagaaaatgtctgagggtaaatgctaa

SEQ ID NO: 151372 - DNA, 201 bp, Homo sapiens
tgactatagcatgacattctgtcaattgacaattgactgtaatttttttgtggaatgcagtgaacatttgctatgtgtctcctgttccagaagaacaattktatttacaggatataaaccatttattttcacccaataagtataggtataggtataggtataggtgtgggtataggtatagaaatatgtataggtataaat

SEQ ID NO: 151373 - DNA, 201 bp, Homo sapiens
gcagccgcctctgctgcacagaagaatccacatggggagtatgtgtagcagcaggaagtaaacctcacctggctcctacatgcttggcaaggcagttctcmcatttgcagtattccactagcatcaggtaactggattccaggcacactcctctcaaaactcaaaaatgccccaggtcataagccttccccactgatatgg

SEQ ID NO: 151374 - DNA, 201 bp, Homo sapiens
ctttgttgggcttccctccaaaaactgtttttatgagtttgcaaacaaccctgttgattggttaaattaagccttgggggtaacaatttcagttagcatgmgaagagttgtcccttatttagtgttcatttctgtaatggttttgcttccatgcttggacttgtaatcactgattatatatttaagttatacatttcagag

SEQ ID NO: 151375 - DNA, 201 bp, Homo sapiens
gtgttttctagatatacaatcatgtcaactgcaaacagggacaatttgacttcctctttcctaattgaataccctttatttccttctcctgcctgattgcmctggccagaacttccaacactatgttgaataggagtggtgagagagggcatccctgtcttgtgccagttttcaaagggaatacttccagtttttgtccat

SEQ ID NO: 151376 - DNA, 201 bp, Homo sapiens
cttaaggagattttgggctgagacgatggtgttttctagatatacaatcatgtcaactgcaaacagggacaatttgacttcctctttcctaattgaatacsctttatttccttctcctgcctgattgcactggccagaacttccaacactatgttgaataggagtggtgagagagggcatccctgtcttgtgccagttttc

SEQ ID NO: 151377 - DNA, 201 bp, Homo sapiens
acaaagttgttagttgctgacaattttgttcattttattaattatcagtgtaggtacagtctgtgattctctttaactctaatgcttaaaatgatggttamattttattattgacttgaaaactgtaaaccaaaaataaaaattctaagcttctcacccaaccatccaaatggacttcctcctcagccagaggaagttaaa

SEQ ID NO: 151378 - DNA, 201 bp, Homo sapiens
tctcttcttaaagaaatatcaatctttaaaacgctggtttaccttttggtttgtttcattgcttacccatgaaagcattattagttctactttataatttsatggatttttctcccagattttatacttcaaaataattttacagatatcgagggaactgtgtggacagagcagtaagttgagagttttgtctaagtgtga

SEQ ID NO: 151379 - DNA, 201 bp, Homo sapiens
tttgaagaccattaagattatttacactcttctctggctgccttgtttcaaaaatctaattaatttttaaggtactgccactatattcaaattgaggcttrttcttgagaggacacaaatgcaaaaattctaaaaccatcacttctctctcttgtctttcctgttctctgtcctcccagttcttttgttactcaagggcct

SEQ ID NO: 151380 - DNA, 201 bp, Homo sapiens
ccatcacttctctctcttgtctttcctgttctctgtcctcccagttcttttgttactcaagggcctgaaattacataatttaagggcaattgagtataaayttaaaatctgtcacttattttctaatcttaatttttgatttttatccttttaatcactctatttgttcttatttctctttttaatggtagcctgtaatga

SEQ ID NO: 151381 - DNA, 201 bp, Homo sapiens
cactatatccatatctgatctcactatatccaagtctagccagtcattctgtagctggcctactgatttcctaatcaatctttggacaaatttattaaacygctaacattactacgctcttactctgtaccaagaagattgaaaagtagctttacagatactattgttaatccacaaagtaatataacaaattaatgtcat

SEQ ID NO: 151382 - DNA, 201 bp, Homo sapiens
tcatgctgaaatgaacattcacatgcatgtgtctttatgatagaatgatttatattcctttcggtgtatacccaggaatgggattgctgggtttaatggtwgttctgtttttaaggctttgaggaatcaccacactgctttccacaatgggtgaactaatttacccttctaccaaccatttatagctgtttccttttctct

SEQ ID NO: 151383 - DNA, 201 bp, Homo sapiens
aacaattgtatttacaggatataaaccatttattttcacccaataagtataggtataggtataggtataggtgtgggtataggtatagaaatatgtatagstataaataatctcatctcagagacattatactagtttatactttcacgagtagggtgttatatttcccattgttctgcaaactattcaattcatttactg

SEQ ID NO: 151384 - DNA, 201 bp, Homo sapiens
cttatagctatatggagtctattgaattaatgtatcacattttatttatccattctactgctgatggaaatttaggctattttggttttgccaccttatgrtgaacactgctttgaacattcttgtacctaatattggtgaatacatgtatgccatactgttggatatattcgtgagagtggaattgacaggtcatagata

SEQ ID NO: 151385 - DNA, 201 bp, Homo sapiens
agtggtttccctatttcttgtttttgtccatattgtgaaaaatcaaatggttttgtgtggctttattaatgagttttgttttctgctccattcgtctatctgtctcttttcaaactggtaccatgctttttaaattactgtagtcttatagtttgaagttgggtagtatggtgctttcggcttagttctttactttggcta

SEQ ID NO: 151386 - DNA, 201 bp, Homo sapiens
cacgatggcatgagactataatcccagttactcaggaggctgaggtgtgagaatcacttgaaccggggaggtgaggttgcagtgagcagagatcatgccaytgcgctccagcctgggcgacagagcgagactctgccaaaaaaaaatatagaaactagatctttctacatgtcagaagacagacagttcaacagtttctct

SEQ ID NO: 151387 - DNA, 201 bp, Homo sapiens
gagtggtttccctatttcttgtttttgtccatattgtgaaaaatcaaatggttttgtgtggctttattaatgagttttgttttctgctccattcgtctatctgtctcttttcaaactggtaccatgctttttaaattactgtagtcttatagtttgaagttgggtagtatggtgctttcggcttagttctttactttggct

SEQ ID NO: 151388 - DNA, 201 bp, Homo sapiens
atacaaaaacaacaagagactgtcaaatgaaaaatccatatcagtatgatagatgtgtacgtttgtgtgtatgtgtatgtttgtgtgtgtgtgtgtgtgtkttattttaatgaattaatatctgtttggaaaataaatcaaaatggcaaagcaccaattcctgggacttcagaaatattctcctgacattaactaagccaa

SEQ ID NO: 151389 - DNA, 201 bp, Homo sapiens
ggagtggtttccctatttcttgtttttgtccatattgtgaaaaatcaaatggttttgtgtggctttattaatgagttttgttttctgctccattcgtctatctgtctcttttcaaactggtaccatgctttttaaattactgtagtcttatagtttgaagttgggtagtatggtgctttcggcttagttctttactttggc

SEQ ID NO: 151390 - DNA, 201 bp, Homo sapiens
atttcttgagagataaagatgtcttcatgaaaactgttgggtgaattccatttaacttggtgagtaagaggtcattattgaagaaagacaatgaaataagscagggctcttaggttttaatcttgagaatttattagacagttgtgccatctactgttaggaaacaattggttaaaaaaaaaactcttttgagttgacaat

SEQ ID NO: 151391 - DNA, 201 bp, Homo sapiens
tatataaacatgataagtattctagaagacctaattcagttttttcttaacagcttatcaggaaattactggtagcttttttttctcctcagcaaacatawaagctaatttcctccatccaacttgttacattttctccaggaagacccactacgttatgtgagactatggggaaagctgaaatttggttaatccgaacat

SEQ ID NO: 151392 - DNA, 201 bp, Homo sapiens
tgagaatcacttgaaccggggaggtgaggttgcagtgagcagagatcatgccactgcgctccagcctgggcgacagagcgagactctgccaaaaaaaaatrtagaaactagatctttctacatgtcagaagacagacagttcaacagtttctctgacatatatcttaattttacctacttaaatgtgtaagtaaacttatt

SEQ ID NO: 151393 - DNA, 201 bp, Homo sapiens
gtaaagtgtagctgggtgaaggcactcaggaaccataaaatgtggtcaactacaataaatgaaaatataagccaaacaaagtattcacactttcatttttytaataaggaatttaagatacatagtaaaagtttaatgcttggaagagacacaaattcacggtgataaaaatattaattagaagacacataacatgcctca

SEQ ID NO: 151394 - DNA, 201 bp, Homo sapiens
aaatcctccctccttccttcctttcccaggccccactctactccctctcttcttccctttctccttttctccatctctctctcttcctctctctctctctytctttatttctacctctttcttccctttttctcacttttccttgctttcctctctctccctccctgcttgcctgccttcctcccttcctcccttccttcc

SEQ ID NO: 151395 - DNA, 201 bp, Homo sapiens
atgggaccataagccaattaaacctctttttaaaaaaataaattactcagtttcaagtatttctttatgggaataagagaaaggcctaacacacccactgrgatggaaactgtggctttcaggccatgctcctctaaagtagggatgtccatctcttgtgcctgtggccatagcacacttcctactcattcctcaattctg

SEQ ID NO: 151396 - DNA, 201 bp, Homo sapiens
gttactggttggacttaatttaatgccccaaaaacatttttaagagaactgtaaccagacttaccaaatgtaatacattcttcccccttcaacacacacayacacacacacacacacaaacatacacacacacacacacacacacacacacatgcttactggcctatttatctgtgaaataatattttctcatagaattat

SEQ ID NO: 151397 - DNA, 201 bp, Homo sapiens
tgatgcagtttcttcctagcctcgatggtctgtacaatgtggcatgtttttgcagtggctggtactggttgttcctttctatgtttagtgcttccttcaggagctcttttagggcgggcctggtggtgacaaaatctctcagcatttgcttgtctctaaagtattttatttctccttctcctcttatgaagcttagtttgg

SEQ ID NO: 151398 - DNA, 201 bp, Homo sapiens
tccgaaataaaatgttagaatgtgatctaataaacttaaacgcaagcttctaatggatgaaattacaaatatctctctaccagatcaaagcgtccaaatayttaacagaattaaaaaaaaatagcccagtatccaacaaggtaaaatcagaaaaaaaagttatgaagtagttaacaaagcataaatatatgactgagagca

SEQ ID NO: 151399 - DNA, 201 bp, Homo sapiens
ttagcttttgatttttattataatgagaagctacagttccaactaaatggaggatttatagcttatacttttccatttcttatctccctaaatgaactatygcaaatcctagttagaagataaaattatcaattttttctggcttcatttctctcaaattaattgaatgggtaagccagtggctttacaggaaatggtaaa

SEQ ID NO: 151400 - DNA, 201 bp, Homo sapiens
ctttggctattctggtcttttgtggttccatacaaagtttagatatatatatattttttaatttgtgaagaattttattggtcttttgatagggattgcawtgaatctgtaacttgttttgggtgctatagacgttttaatgctttcgattcctctattctatgaacagaaaacattttcatttttttctgtcctgttcaa

SEQ ID NO: 151401 - DNA, 201 bp, Homo sapiens
tgccactgatatttgtatgttgattttgtgtcctggaactactgaatgggtttatcagcttaaaacagtttttggtgaggttgttaggtttttctagatayaagatcatattttttgtaaataagaataattgactttattttctttataatttgaatgccctttacttctttcactcgtctaattgctctggctaggact

SEQ ID NO: 151402 - DNA, 201 bp, Homo sapiens
ccagaacattgtcttagtgtttcctcaaagtttcgggttttaaatcagtgagatttaacttaaagattagaaagattagatttaaattagagtgatttaayttttcagggtgatttgatttttgtgtatggtgagagatagagattgatatggtttgtctcctgtgtcctcatccaaatctcatgttgaattgtaattcaa

SEQ ID NO: 151403 - DNA, 201 bp, Homo sapiens
tatatattctagatgagcctgagccagttttatatattgcagatatcttcctacagtttatgatggttttctcattatcttttaatatcagataatgaatygtagattttaaatttaatggaagtgaatatattaatcatactctttataatttttctttatgttcctgaggaaatccttttctactatgaaattaaaaaa

SEQ ID NO: 151404 - DNA, 201 bp, Homo sapiens
tgcaaaacaacctgctgctctgttgccttctgccatgattagatgcttcctgaggcctccccagaagcagaaaccactatgcttcctgtacagcctatggraccataagccaattaaacctctttttaaaaaaataaattactcagtttcaagtatttctttatgggaataagagaaaggcctaacacacccactgagatg

SEQ ID NO: 151405 - DNA, 201 bp, Homo sapiens
cagcctatgggaccataagccaattaaacctctttttaaaaaaataaattactcagtttcaagtatttctttatgggaataagagaaaggcctaacacacycactgagatggaaactgtggctttcaggccatgctcctctaaagtagggatgtccatctcttgtgcctgtggccatagcacacttcctactcattcctca

SEQ ID NO: 151406 - DNA, 201 bp, Homo sapiens
gggagtggtttccctatttcttgtttttgtccatattgtgaaaaatcaaatggttttgtgtggctttattaatgagttttgttttctgctccattcgtctatctgtctcttttcaaactggtaccatgctttttaaattactgtagtcttatagtttgaagttgggtagtatggtgctttcggcttagttctttactttgg

SEQ ID NO: 151407 - DNA, 201 bp, Homo sapiens
gtgttttgaactttacattgacaatttaaactgaagaataaaatgattaaagctgtgtgttacaaatatcagtgtgtctacaccttgatactggacttggygggacagaaaaccagatcatagaaattacgaaggatactgccctagtcttaccaagccacatagcattatgaacagtaatatttaccaaatttcttgaga

SEQ ID NO: 151408 - DNA, 201 bp, Homo sapiens
gtattcaaattcttttctcagcgtctgtttcttggggaactcaaaacagagtgttacattgtagtaatcctaggctagatagctgtagagactacattackggtagaaatggggtagtggtatcacttggcatgcagtacaatcacaattactacgattttcatttttgatgaattgtcatgaggaacagatggaagagga

SEQ ID NO: 151409 - DNA, 201 bp, Homo sapiens
taggaaaattccaattccactcttagtcattttaaaacacacaaattattattaactatagtcatcctattgtgctatcaaacactagattttttcattcyaactatatttttgtagctattaatcatgccctctttataccctccccaccccccaagacctttcccagcctctggtaaccatctctctactctatatctt

SEQ ID NO: 151410 - DNA, 201 bp, Homo sapiens
cctctttataccctccccaccccccaagacctttcccagcctctggtaaccatctctctactctatatcttctctatatcttcattcgttaattattgttyttagcttccacatgtgagtgaaaacacggcatatttgtctttccgcgcctggcttatttcatttgacttaactggaggaaactctagattcatccaagtt

SEQ ID NO: 151411 - DNA, 201 bp, Homo sapiens
gaggaaactctagattcatccaagttattgcaaatgacgggattttcacttgtccgttgattcacccattgatgcacatataggttgattccatatcttgrctattgggaacagtactgcaataaacatgggtgtacagatatttctttgatatactgattcctttatttggatatatacccagcagtgtgattgtcggat

SEQ ID NO: 151412 - DNA, 201 bp, Homo sapiens
acctgctgctctgttgccttctgccatgattagatgcttcctgaggcctccccagaagcagaaaccactatgcttcctgtacagcctatgggaccataagmcaattaaacctctttttaaaaaaataaattactcagtttcaagtatttctttatgggaataagagaaaggcctaacacacccactgagatggaaactgtg

SEQ ID NO: 151413 - DNA, 201 bp, Homo sapiens
acagacatatttaagtttaaaattttatttcaggattctaaaaattttatttcaggattttctggccagtcaagttatggctgcaggcaagctctagtgawtgtttattataggaaataatgtaccaatatctaaataaagacacagaaatattcatgacgtatccataggtcactggataatgacccatgacaccctatt

SEQ ID NO: 151414 - DNA, 201 bp, Homo sapiens
catcctcaaattaggacatcccaaaaccaaagcttttatcactcatggtggaactaatgggatctacgaagctatttaccacggagtccctatggtgggarttcccatgtttgctgatcagcctgataacattgctcacatgaaggccaaaggagcagctgtggaagtgaacctaaacacaatgacaagtgtggatttgct

SEQ ID NO: 151415 - DNA, 201 bp, Homo sapiens
acaccctattatgtttttcctcccaaacccactttttacacaaacacacacatatacacatattctcacaatttcacaaagacaaatcagccatgttttayaatagcagacattatgccattatgtattcaatcaatataaatatcgatataggctttgggaaatatgaataccaaccatgggttatattgctgatgaaat

SEQ ID NO: 151416 - DNA, 201 bp, Homo sapiens
ttatctttaagaatcataaggaaatgtgaactaacaaaccaaaggttatactgggtatgaaaaagattagctaatttaacttcctaaccagtggtgtgtarctgtagcagtgctagcaaactaatacaagaactaataataacaaaggtttattttcttacagttctgatggctagacgtccaaaatcagggtttgccagg

SEQ ID NO: 151417 - DNA, 201 bp, Homo sapiens
caccctattatgtttttcctcccaaacccactttttacacaaacacacacatatacacatattctcacaatttcacaaagacaaatcagccatgttttacratagcagacattatgccattatgtattcaatcaatataaatatcgatataggctttgggaaatatgaataccaaccatgggttatattgctgatgaaata

SEQ ID NO: 151418 - DNA, 201 bp, Homo sapiens
tctcacaatttcacaaagacaaatcagccatgttttacaatagcagacattatgccattatgtattcaatcaatataaatatcgatataggctttgggaamtatgaataccaaccatgggttatattgctgatgaaataattacgccaatcactgggtacacagaatacaaaaacaacaagagactgtcaaatgaaaaatc

SEQ ID NO: 151419 - DNA, 201 bp, Homo sapiens
caacaacatgcaatttctgacttatgttattcaattaaccttaatttttatctctacaattttgcatttctattctttttatacttctattcatgacacaycctaggactctttatatttatgtattgtttaaagcacataacactcttcatgatttttcccctccatgttgtgattgattaaactggtactgtttacgtt

SEQ ID NO: 151420 - DNA, 201 bp, Homo sapiens
tgatttttcccctccatgttgtgattgattaaactggtactgtttacgttctatttcttcacttaaaatctaacttccaaaagcttttaagtgataaataycaaaacaataatactatacttggtagactattagtacaagactttacaaaaaggtacatataaacagtcctactacgtatctcaacgtttgtaaactact

SEQ ID NO: 151421 - DNA, 201 bp, Homo sapiens
ttgtgctatatgatttctgagtcctgcctgactgttgtatctttttgctttcttttcaacttggaaaaagaaatagttactttttaaaattcagaaactcrattatggtgtattcttacaaattattttatatatttttcttcaattatactgtgtctttacaacaatgttaatctaagataaaaaattatccagtttttc

SEQ ID NO: 151422 - DNA, 201 bp, Homo sapiens
tacacattacttctttttcactaacaaaaaatcctccctccttccttcctttcccaggccccactctactccctctcttcttccctttctccttttctccrtctctctctcttcctctctctctctctttctttatttctacctctttcttccctttttctcacttttccttgctttcctctctctccctccctgcttgcc

SEQ ID NO: 151423 - DNA, 201 bp, Homo sapiens
gcatgctagcaatgcctctgatttgctgtcctggggaagaaacttatctggcatttaactgaagagagaaaatgaatgtttaatttgtcagtagttgtagytatagtttaattttggttgatttattattgtgaaattacacttacacattacttctttttcactaacaaaaaatcctccctccttccttcctttcccagg

SEQ ID NO: 151424 - DNA, 201 bp, Homo sapiens
aaggtcccttgtgatataggattaggagtgacttttctctgtccctgctggagtctgggagtgcacacaaaccatgtccagatgctgctctttctcatgtrtttcccactgctcactaaagcagctccagtactgggtagggttaaggcatttccccgtggtctggattgccaggtttcccagtgggtgtatatatcccag

SEQ ID NO: 151425 - DNA, 201 bp, Homo sapiens
gttggcctctagccaagaggtggcacttgcaaaagagctccaattgtagtggtagaagtgagttttgtgcttgccttatgttacccaggagtagtactccrgggggcggggaagggcatggagctccccaaattctctgtcctttctgttaagccaccagggcaggtgcaggagcaagaacacgaggctgggtcagtcaag

SEQ ID NO: 151426 - DNA, 201 bp, Homo sapiens; identical to SEQ ID NO: 28197

SEQ ID NO: 151427 - DNA, 201 bp, Homo sapiens
ctaatgacgtcggaaccgcaagaatgagtgaattaattcaatgaatatttcaaagtctcctgtatgtcattctaaaaacattttaatctaataagcaattsaggaccatctaaagggaaatattatgacctgattttcattttacgtaaaacacttggacagatgtggcagtagagttgagaggtgtgagactagactaat

SEQ ID NO: 151428 - DNA, 201 bp, Homo sapiens
aagacactcaacagttggtttagattcataccaagactcagccctggttgtccacttttgctccccatccacattccaattaattgacttttattaatacrtacatgttgtataagtcataattttagaaatcataattcatgagctaagtggtgggttaggagcttcagcaaggctcagtatgatctttttttgacttta

SEQ ID NO: 151429 - DNA, 201 bp, Homo sapiens
cttatagttgaactcctgctttgaaatgtatctctatttcattccaaatttatattacttatgttgtaattttactttaccaatatttatgtcatttttttctcacatttactctgtttcctatattttaagggactcagtgttcaccgttgaattagagattatttattccaaaatatttaggatttatttcttgactga

SEQ ID NO: 151430 - DNA, 201 bp, Homo sapiens
agtggaagttgactaatatcatcattttttcccttactctgggtaatttagggatatctatatgtattgagattttggagcatattttgataagcttttaygtgctattgcagctacatttgtgagtaatccctaattaattattatatttttcttacatgtaactcaatatttgaacaaatctaagtattttatagatag

SEQ ID NO: 151431 - DNA, 201 bp, Homo sapiens
gcgtgaacccgggaggtggaggttgcagtgagccaagattgtgccactgcactccagcctgggcaaaagagcaagactcagtctcaaaaaaaaaaacaaamaaaaaaaaagacttcaaatattatttcaatatttttcaaaataaagaatgctatgattatataaattctcattttttctggataatctgcttaatattat

SEQ ID NO: 151432 - DNA, 201 bp, Homo sapiens
aatggcgtgaacccgggaggtggaggttgcagtgagccaagattgtgccactgcactccagcctgggcaaaagagcaagactcagtctcaaaaaaaaaaacaaacaaaaaaaaagacttcaaatattatttcaatatttttcaaaataaagaatgctatgattatataaattctcattttttctggataatctgcttaata

SEQ ID NO: 151433 - DNA, 201 bp, Homo sapiens
  misc_feature (1)...(201): n = A,T,C or G
atgatgctacacctttgtaatagaaaatatattatgtatgcaggaaatggaagaatttatccagagctcaggtaaaaatggtgttgtggtgttttctctgngatcaatggtcaaaaaccttacagaagaaaaggccaatcttattgcctcagcccttgcccagattccacagaaggtcagtacagcctggaatcctggtac

SEQ ID NO: 151434 - DNA, 201 bp, Homo sapiens
ggtagtgtgatgcctccagctttgttcttttggcttaggattgacttggcaatgcgggctcttttttggttccatatgaactttaaagtagttttttccarttctgtgaagaaagtcattggtagtttgatggggatggcattgaatctataaatgaccttgggcagtatggccattttctcgatattgattcttcctacc

SEQ ID NO: 151435 - DNA, 201 bp, Homo sapiens
gtagtctcaacctcccaggctcaagcaattctcccacctcagttccaaagtagctggactacacgcatgcaccaccacacttggctaattttttatttttwtttttatagagatatgtctccctgtgttgctcaggctgatctcaaactcctgggctcaagcaatcctcctgtattggcttaccaaagtactgggattgta

SEQ ID NO: 151436 - DNA, 201 bp, Homo sapiens
tgtcatgaggaacagatggaagaggatggactagcttgtgccaaatcaacaattgagaagtgtggaagcaataataattgtaagaattatgtagctgttakctgtgtttattgccttcagtaacagaaggtagaaaatttcaattaattcagacatgtataactcaggacacaatataaagtagaacacacccatgacaat

SEQ ID NO: 151437 - DNA, 201 bp, Homo sapiens
ttcctttatttggatatatacccagcagtgtgattgtcggatcatatggtagttttatttttagttttttgagaaatatccacactcttctccatagtggmtgcaccaattttatattcccaccaacagtgcacaagggttccctttttccatatcctcaccagcatttgttattgcctgtttttttgtctgtctgtttgt

SEQ ID NO: 151438 - DNA, 201 bp, Homo sapiens
tatatgtctgttttatatatcattatgattttgattcacatttctctgatgattagtgataatgcacattttttcgtatgcaggttgattgtatgtcttcytttgtgaagtgtctattcatgtcttttgcctgtcttttttagtgaggttatttgttttttgcttgttgacctgtttaaatttttcatataatctggatat

SEQ ID NO: 151439 - DNA, 201 bp, Homo sapiens
tttgattcacatttctctgatgattagtgataatgcacattttttcgtatgcaggttgattgtatgtcttcttttgtgaagtgtctattcatgtcttttgyctgtcttttttagtgaggttatttgttttttgcttgttgacctgtttaaatttttcatataatctggatattagacctttattaaatgaatagtttgtaa

SEQ ID NO: 151440 - DNA, 201 bp, Homo sapiens
cttttttagtgaggttatttgttttttgcttgttgacctgtttaaatttttcatataatctggatattagacctttattaaatgaatagtttgtaaatatwttctcccattatgtaggttgtctttgtactctctggatagtttttttttttttctgcagaggttctttatttaattatgccccacatgtcaatttttgtt

SEQ ID NO: 151441 - DNA, 201 bp, Homo sapiens
aggttatttgttttttgcttgttgacctgtttaaatttttcatataatctggatattagacctttattaaatgaatagtttgtaaatattttctcccattmtgtaggttgtctttgtactctctggatagtttttttttttttctgcagaggttctttatttaattatgccccacatgtcaatttttgtttcagttgcaat

SEQ ID NO: 151442 - DNA, 201 bp, Homo sapiens
acaattcaacccattacagaagctagtatgcagaggggctgggaaggcagcatagctgcccctctatccatggggaattggttcaggagccctgacgataytttaaatcatctctggactacttataatgcctaatgcaatgtaaatgctatgtcaatagtttatattgtatttttaattttgtagcattttttattattt

SEQ ID NO: 151443 - DNA, 201 bp, Homo sapiens
cgtctgcgaaatcatatggctgtagcattcgtgctatccctgggggttgcagctttgtataaggtatgtatgttttttactttgtgccgaaggtcataaartatgtgtttttggttgaaaaatcttttaaagaaactcccccttgtaatgtgtttctttctaaccctttctgcactcacctcagtgtgacaggaactatag

SEQ ID NO: 151444 - DNA, 201 bp, Homo sapiens
caggaggaattaggcacatggaaacattgaagggtgaggagggctgaatttattgggtgaaaaggaaaaaagaaaacagactctcagcaaagcaagagggsgtcctgctaacaggcccccacctcacagattgaatactaggctaccacacaggagctgaagagactaggctcctccccactgcacaaggtgcagcttctc

SEQ ID NO: 151445 - DNA, 201 bp, Homo sapiens
tttccagtaatctgaaaaataaactctaatggatggttgctttttagtttcgtgtggctgatcaaagaaagaaggcatacgcagatttctacagaaactaygatgtcatgaaagattttgaggagatgaggaaggctggtatctttcagagtgtaaagtaatcttggaatataaaggtaatatggttatttgaagttactt

SEQ ID NO: 151446 - DNA, 201 bp, Homo sapiens
aagggaaaaaaagctcagagtagtgagagctacatgaggtatgcaggacgcagagacctgagtattggacttcagtgccgcccctcacccatgtctcaacmcaaatcttattcctgaatttgtgatataaaggacagcgtttagtcagtcaatagcttatgttattttaatgtaaatttttgataaacagtttaggaattg

SEQ ID NO: 151447 - DNA, 201 bp, Homo sapiens
aagatattttaaacttatgatggttttatcagaatgtaacctgatggtaagttaaggagcatctataatataaaatttgccatcttaaccatttttaattrtacagtttagtagtgttaagttcattcacattgttgtgcaaccagtctccagaactcgtcatcttacagaattgaaaccctatatccattaagcaaccca

SEQ ID NO: 151448 - DNA, 201 bp, Homo sapiens
tagttttagctcttatgtttagatctttgattcacttgaatttttgtgtagggtgtaaagatccaactgtattcttttacatgtggtatccagttttcccraaatcatttaagattgtcctcttccatggagtggtcttggtaccttggtgaaatcatttgactctaaatgcgagagtttatttctgggctatttctttag

SEQ ID NO: 151449 - DNA, 201 bp, Homo sapiens
catgtggtatccagttttcccgaaatcatttaagattgtcctcttccatggagtggtcttggtaccttggtgaaatcatttgactctaaatgcgagagttyatttctgggctatttctttagtctgtatgtctgtcttcggggcagtactacactgttttgattacagtagtccgttttatctaagatatgtttcaagacc

SEQ ID NO: 151450 - DNA, 201 bp, Homo sapiens
actggtcaggtaaaggattcttactgcgttactccatcaagtagcatgatttctgtgtatttctgcagagggagaccccatcttttttattttttattttwtttttattttttatttttttttattttttatttttttgagacagagtctcgctctgtcccccaggctggagtgcagtggtgagatctcggctcactgcaa

SEQ ID NO: 151451 - DNA, 201 bp, Homo sapiens
aaaaaaaaaaaaaattgggaggtggaggttgcagtgagccgagatcgtgccgctgcactccaggctgggcgatagagccagactttgtctcaaaaaaaaaagttagggagaactgggagagcaaagaggagatggaacactgagtgggagcactaagtggacctatgctttgggactctttggagagacaagcacacaaag

SEQ ID NO: 151452 - DNA, 201 bp, Homo sapiens
agaggggctgggtctggtgtctcatgcctgtaatcctggcactttgggaagctgaggtgggcggattgcttgagctcacgagttcaagaccagcctgggcratatggagaaactacgtctctactaaaatacaaaaattagctgggcctttcttctttttttttttgtttttttgagatggagtctcactctgttgcccat

SEQ ID NO: 151453 - DNA, 201 bp, Homo sapiens
tcacacaggaaagaagcagaccacgaaatgaacttcggctgtcacctgcggtgggcgcactagaggtcttttgaactccttcggctaccgtcgccgcgttytcgctgtgcactcttattctgcgcctgcgcgcggctacagcacggttcgtttttcctttagtcaggaaggacgttggtgttgaggtgagtccggtccctt

SEQ ID NO: 151454 - DNA, 201 bp, Homo sapiens
cactccagcctaggcatcagagggagatgctgtccccactcccccacaaaatttttttttgagttatgtatttctatttcattaggtcatccagtttgtttacatataattgttcatagcattctcactcctttttagatctgtaaaatcagttgtaatgttccctctgttagttggtggttctctttttttattagtctg

SEQ ID NO: 151455 - DNA, 201 bp, Homo sapiens
gcactccagcctaggcatcagagggagatgctgtccccactcccccacaaaatttttttttgagttatgtatttctatttcattaggtcatccagtttgtttacatataattgttcatagcattctcactcctttttagatctgtaaaatcagttgtaatgttccctctgttagttggtggttctctttttttattagtct

SEQ ID NO: 151456 - DNA, 201 bp, Homo sapiens
gtttctaatgcagctggtcgtgaggcgcaagggttagtgtaggcgaagcagctggcagcgtcgctcgctgtgtggcagcgttttaaattagagctggaaarctggaggagggtcaccgtacctgccgcaggaggggaaggatgggcttcctgcaacctcccttgccccacggcttcccatcctacccccggccgcgttagc

SEQ ID NO: 151457 - DNA, 201 bp, Homo sapiens
tgcactccagcctaggcatcagagggagatgctgtccccactcccccacaaaatttttttttgagttatgtatttctatttcattaggtcatccagtttgtttacatataattgttcatagcattctcactcctttttagatctgtaaaatcagttgtaatgttccctctgttagttggtggttctctttttttattagtc

SEQ ID NO: 151458 - DNA, 201 bp, Homo sapiens
gcgcaagggttagtgtaggcgaagcagctggcagcgtcgctcgctgtgtggcagcgttttaaattagagctggaaaactggaggagggtcaccgtacctgycgcaggaggggaaggatgggcttcctgcaacctcccttgccccacggcttcccatcctacccccggccgcgttagctgaaggccagcagggacgcaaaag

SEQ ID NO: 151459 - DNA, 201 bp, Homo sapiens
aaagggaaaaaaagctcagagtagtgagagctacatgaggtatgcaggacgcagagacctgagtattggacttcagtgccgcccctcacccatgtctcaasccaaatcttattcctgaatttgtgatataaaggacagcgtttagtcagtcaatagcttatgttattttaatgtaaatttttgataaacagtttaggaatt

SEQ ID NO: 151460 - DNA, 201 bp, Homo sapiens
attcagggcagctccaatcaatgcttccaggtggccattctcaagtttgtggcttaaataaactctgtacttaatcatattttctgaatctcttaaggttrgcatacgtatcaaggacagtaactaccatggctcccgaagttttgccaaaacctcggatgcgtggccttctggccaggcgtctgcgaaatcatatggctg

SEQ ID NO: 151461 - DNA, 201 bp, Homo sapiens
tccatctttaaatgaagcttgttagtttgctggaatgccgtaacaaagaaccacagactgggtgccttaaatttgctcgcagttctggaggctagaaatcygttggcagggttgatatcttctgaggcctctgttggcttgtagatggctccctttgtcttcacagggtcctctgtgggcatatatctgtagctgaacttc

SEQ ID NO: 151462 - DNA, 201 bp, Homo sapiens
gtagcctgaactgtgctttttctgtggctgagggtgagtgatcaaggtgtgaagtctactagtaggaatagacctcagttgatcctcaaagatggtgagtrttgagagagtgtttatctctaacttagcctttgtgtttctcttcacagaatttcttcaggttgaattacctagaagtttgtcactgacttgtgttcctga

SEQ ID NO: 151463 - DNA, 201 bp, Homo sapiens
ctgtatgagagaacatatttggagacaggaacaaaaatatggcttggaacagaaacagtatgtggctataagggttaatggcaggggggtgggggcggtgktgggcatagaattgagaaggaaaaaagcagaatttgttcaatgcacacaagcaatgagagtaaggtgtggtatgcccaaaatggaaaagaggctattcag

SEQ ID NO: 151464 - DNA, 201 bp, Homo sapiens
actatttggtagctgtgccaccaccacatagttgaaataggtaattcaaatgtagggtttcttactcagtattgctttattaataacaagctaacagtatktaatagaatttggatatatatctaatccagaaaaggttacttaactagaattgagtaatgtctcctaatgacaagcagagtatggtactttttcagaggt

SEQ ID NO: 151465 - DNA, 201 bp, Homo sapiens
aagtagaatcacacagtatttgttttcttgtgactggcttatttcacttagcgtagtgtactcaaggttcatccatgttacagcatgtgtcagaatttcctttctttttaaagctgaatgatctattttagttgtgtcacattgttatccattcatccatcagtagatgcttgggttgcttccactttttgattgttgtga

SEQ ID NO: 151466 - DNA, 201 bp, Homo sapiens
tgtgggtagaactaaagcggtggaaggttaaaccacaaataagggatgactgctacactgtagctttgtagtatgctttaaaatcagtaagtgtgagtccyctagctttgttctttctttcaccccacccggagggtgctctagctatttgtggttccttaagagtctgtgaattttaggatggatttttctatttctgta

SEQ ID NO: 151467 - DNA, 201 bp, Homo sapiens
gttttacttactcctttcctttttggatgttgcttattccttcttgcctcattgctctggctaggacttccagtactacaatgaatagaagtggcaagagygggcatccttgtctggttctaggtattagaggaaaagctttcacgttttccatgttcagtatactagacttgtcctttttggccattgttgggttgaagt

SEQ ID NO: 151468 - DNA, 201 bp, Homo sapiens
ctgcactccagcctaggcatcagagggagatgctgtccccactcccccacaaaatttttttttgagttatgtatttctatttcattaggtcatccagtttgtttacatataattgttcatagcattctcactcctttttagatctgtaaaatcagttgtaatgttccctctgttagttggtggttctctttttttattagt

SEQ ID NO: 151469 - DNA, 201 bp, Homo sapiens
ctgggaggtcaaggctgcagtgagcagtgattgtaccactgcactccagcctaggcatcagagggagatgctgtccccactcccccacaaaatttttttttgagttatgtatttctatttcattaggtcatccagtttgtttacatataattgttcatagcattctcactcctttttagatctgtaaaatcagttgtaatg

SEQ ID NO: 151470 - DNA, 201 bp, Homo sapiens
cagaagttagagatcagcctgtgcaacatggcaagaccccatctctaccaaaaaaaaaatatatatatatatatatacacacacacacacacacacatacmtatatacacacacacacatatatatacacacacacagatatatatatagttagctgggtgtggtggtacatgcctgtagtctcagttacttgggaggctg

SEQ ID NO: 151471 - DNA, 201 bp, Homo sapiens
atccagaagttagagatcagcctgtgcaacatggcaagaccccatctctaccaaaaaaaaaatatatatatatatatatacacacacacacacacacacayacatatatacacacacacacatatatatacacacacacagatatatatatagttagctgggtgtggtggtacatgcctgtagtctcagttacttgggagg

SEQ ID NO: 151472 - DNA, 201 bp, Homo sapiens
tgagaaaggaggatcactataatccagaagttagagatcagcctgtgcaacatggcaagaccccatctctaccaaaaaaaaaatatatatatatatatatwcacacacacacacacacacatacatatatacacacacacacatatatatacacacacacagatatatatatagttagctgggtgtggtggtacatgcctg

SEQ ID NO: 151473 - DNA, 201 bp, Homo sapiens
ccagcactttgggaggctgagaaaggaggatcactataatccagaagttagagatcagcctgtgcaacatggcaagaccccatctctaccaaaaaaaaaawatatatatatatatatacacacacacacacacacacatacatatatacacacacacacatatatatacacacacacagatatatatatagttagctgggt

SEQ ID NO: 151474 - DNA, 201 bp, Homo sapiens
tagaatcacacagtatttgttttcttgtgactggcttatttcacttagcgtagtgtactcaaggttcatccatgttacagcatgtgtcagaatttcctttctttttaaagctgaatgatctattttagttgtgtcacattgttatccattcatccatcagtagatgcttgggttgcttccactttttgattgttgtgagtg

SEQ ID NO: 151475 - DNA, 201 bp, Homo sapiens
gtagaatcacacagtatttgttttcttgtgactggcttatttcacttagcgtagtgtactcaaggttcatccatgttacagcatgtgtcagaatttcctttctttttaaagctgaatgatctattttagttgtgtcacattgttatccattcatccatcagtagatgcttgggttgcttccactttttgattgttgtgagt

SEQ ID NO: 151476 - DNA, 201 bp, Homo sapiens
aaaatttacagtgagcatgcattttataatcagaagatgttaataggctaatttaaatttgttagatttttaccatttttaagattatgtttaaaaacctrtatgagagaacatatttggagacaggaacaaaaatatggcttggaacagaaacagtatgtggctataagggttaatggcaggggggtgggggcggtggtg

SEQ ID NO: 151477 - DNA, 201 bp, Homo sapiens
agtagaatcacacagtatttgttttcttgtgactggcttatttcacttagcgtagtgtactcaaggttcatccatgttacagcatgtgtcagaatttcctttctttttaaagctgaatgatctattttagttgtgtcacattgttatccattcatccatcagtagatgcttgggttgcttccactttttgattgttgtgag

SEQ ID NO: 151478 - DNA, 201 bp, Homo sapiens
tctgggtttatgccttgtaaatgagtttgctgtgacacagagaatgtgaaactgctattttgtcaggcagtgttcctaaataagcatttcagttgcactayatatatgtgggttacattccaataaaccttatcatatgttgagaatatcgtaagtcaaaaatgcatttaagaccctggaaaacccattagaaagtcaaaa

SEQ ID NO: 151479 - DNA, 201 bp, Homo sapiens
taagtagaatcacacagtatttgttttcttgtgactggcttatttcacttagcgtagtgtactcaaggttcatccatgttacagcatgtgtcagaatttcctttctttttaaagctgaatgatctattttagttgtgtcacattgttatccattcatccatcagtagatgcttgggttgcttccactttttgattgttgtg

SEQ ID NO: 151480 - DNA, 201 bp, Homo sapiens
ggggcctggagcttcacagtctatcttgctgacatgaaactactttttatgttcaaaatcatttttataggttatgctattaattgctagattggcattaygaatgttacacttttagaagtcacttttttaaaaaaaagtatttgggacagtatagtttgttaggtgggtgtccacgagtgactagctgtctttccatag

SEQ ID NO: 151481 - DNA, 201 bp, Homo sapiens
ttacccgagaaagggaaaaaaagctcagagtagtgagagctacatgaggtatgcaggacgcagagacctgagtattggacttcagtgccgcccctcacccrtgtctcaacccaaatcttattcctgaatttgtgatataaaggacagcgtttagtcagtcaatagcttatgttattttaatgtaaatttttgataaacagt

SEQ ID NO: 151482 - DNA, 201 bp, Homo sapiens
tgtccacactctcctttagctcattgagcattttttagatagttgttcttaaggttttatagagtaagtcagcagcctctgtttctttagggttggtttgwggagatttctttctttcaatcgtccgtgtttccctatttctttatgtgccttgtgatcttttgtgaaattcaggcatttgcaaaaccagctacctgtccc

SEQ ID NO: 151483 - DNA, 201 bp, Homo sapiens
ttttgcttagttgtccacactctcctttagctcattgagcattttttagatagttgttcttaaggttttatagagtaagtcagcagcctctgtttctttarggttggtttgtggagatttctttctttcaatcgtccgtgtttccctatttctttatgtgccttgtgatcttttgtgaaattcaggcatttgcaaaaccag

SEQ ID NO: 151484 - DNA, 201 bp, Homo sapiens
tctgtgttcccctgcagctcactcatgccatggtacccatcattgctttcagctctttccaacctcctatccaaactatgccattgttcccattagcactytgattcaggcaagacagaaagcagtcccttgggcagctccacacaaaccagaacattgtaggtcagtttcattctttaccttatgtcctgagggaagagc

SEQ ID NO: 151485 - DNA, 201 bp, Homo sapiens
ttcctgtccatctcatcaaggagaaaataccttatgtcccctttgtcctcctttctagcccaaagttttcctgtcccaactctgtctttaatgagaaaaaatgttccgtgcaactttgccccaaactgactcctacttctgaaaacaaaacaaaacaattagctaggaaaattgagacgcataccacttttcttctaactg

SEQ ID NO: 151486 - DNA, 201 bp, Homo sapiens
tacacccactaccctatttactcttcctgtaaacctctgaagtaggtatattagtggcttcatcttgcaaatgaggaactcggaggcaataaccagtgttsccaagtcacataacaatcagattgcaatgctgaccttcagcctacccctgccttctcagaaggtctctcctagtcctgcagatggattagaactgtcctg

SEQ ID NO: 151487 - DNA, 201 bp, Homo sapiens
acaggcacccgccaccacgcccagctaattttttgtatttgtagtagagacggggtttaaccgtggtcttgatctcctgacctcgtgatctgcccgcttcrgcctcccaaagtgctgggattacaggcgtgagccactgcgcccagcctaatttattttttaaaaattttgtgggtacacaggtacccataaacatttatg

SEQ ID NO: 151488 - DNA, 201 bp, Homo sapiens
tttgaaaatagaagtgagtgtcttgtttcatttttgtccactggtaatttgggaaagagaaattgttgacttggctaaggtcacaataaaggcaagcccawctcctttaccttatatttatttatttatttttttgagacagagtttcattcttgttgcctaggctggagtgcaatgcgtgatctcagctcactgcaacct

SEQ ID NO: 151489 - DNA, 201 bp, Homo sapiens
gtgcctttaatttttaacatattattctgttctctagagagttcagaataaaagactaaaagaaaatgtgaatgaatactaatgaaataaattgataagtytgctgggcatttcccccaaaagctttagctattgattttctaaaaccataatttgacataattactgatttagtggctacctaatgttgaaatttagaaa

SEQ ID NO: 151490 - DNA, 201 bp, Homo sapiens
gaaaacaaattggggctcagagcttcttccacctgcccgttaacattcgaaaatgtcaaggtgggtatcgtagactaatcagtaaaagactgatgcgaaayaagccttgcatggaaccacaggaggtgtgcaagacaggtgtcaaaatactaagtggctataagcacacgcaggagagtattttgtaaaaccctgaacagc

SEQ ID NO: 151491 - DNA, 201 bp, Homo sapiens
aaaaaaaagaaaagaaaaaaaattttcttctttctccccacaacctttcctaactcttaagggtcaagtagttggggagaagcttcaggagacaacacaayatctctgatatgtcttcctttgcctttcatatattgtgaaagcttctaggtttaaagcactttaagaatgtttagagcaatacttcattatgctggagca

SEQ ID NO: 151492 - DNA, 201 bp, Homo sapiens
ttccttctggtgggtttgtggtgtcaccggctcaggagtgaagctgcagaccttcacggtgagtgttacagctcttaaggcggcacatctggagttgttcrctcctcccggtgggcttgtggcctcgctggcttcaggagtgaagctgcagaccttcgcggtgagtgttacagctcataaaggcagtgtggactcaaagat

SEQ ID NO: 151493 - DNA, 201 bp, Homo sapiens
aagaaaaaaaattttcttctttctccccacaacctttcctaactcttaagggtcaagtagttggggagaagcttcaggagacaacacaatatctctgataygtcttcctttgcctttcatatattgtgaaagcttctaggtttaaagcactttaagaatgtttagagcaatacttcattatgctggagcatagcggaggaa

SEQ ID NO: 151494 - DNA, 201 bp, Homo sapiens
gtccccagactctttacccgcgggcagtctatgaccccgacccccttcaggcctctggtggaggcagctggtggcaagggggtcggggctgtctagaagckgctttggcggagcaagtaccttgagtggagtcggagggtcgcgtccgcaagatgtcctttgcaggccgttgcgtcctgagagccaccgagtctggatctc

SEQ ID NO: 151495 - DNA, 201 bp, Homo sapiens; identical to SEQ ID NO: 28216

SEQ ID NO: 151496 - DNA, 201 bp, Homo sapiens
gcagggcctgccggccgctccgagtgcagggcctgccaagcccacgcccaccgggaactctagctggcccacaagcgccacgcagccctggttcccgcccwtgcctctccctccacacctccccgcaagccgagggagctggctccagccttggccagcctagagaagggctcccacggtgcagcggtgggctgaagggct

SEQ ID NO: 151497 - DNA, 201 bp, Homo sapiens; identical to SEQ ID NO: 28219

SEQ ID NO: 151498 - DNA, 201 bp, Homo sapiens
aacattagctatttttaaaattaattaattaagttagttttttagagacaggatcttgttctgtcacccaggctggagtgcagtgatacagatcatggctyactgaagcttcaaaatcctggactcaagtgatcctcccgccttggcctcccaaagtgctgggattgcaggcatgagccactgtgcctggacaacactagc

SEQ ID NO: 151499 - DNA, 201 bp, Homo sapiens
aacaaacctgtgagagcagaagcggtgtgttttgagaagtgcaagacatggcagggccagctaatggagctggtggaatgcatactgaggaggttgtgaaygtggttcatgctcccttcactcaatttggtaaccccctgtccccagccagtgttgaatatgcaacccctgatatggaactctggtcttttggcatctatt

SEQ ID NO: 151500 - DNA, 201 bp, Homo sapiens
tagcagttttggagaatacctagaacagaagctattatttatggagaaagcaagcagaggttggacagattctggtatagaagttttggcttggggatatraaattgggatcaacttaaaatctaatccattggtacactgctaataaaggcatacccaagactgggtaatttataaagaaaaagagatttaatggattcg

SEQ ID NO: 151501 - DNA, 201 bp, Homo sapiens
cctttcagaggctggagcaggtagtgactcatttgctttgaagaccagagctgataaagagggagattattatgtcctcaatggatcaaagatgtggatcrgcagtgctgagcacgcagggctctttctggtgatggcaaatgtagaccctaccattgtaagtttgaaaacgaaatttctttctttttccaaaccccttct

SEQ ID NO: 151502 - DNA, 201 bp, Homo sapiens
gaaaaggatatttaaaagcaaacatacagaatttgtgtcacataaaaaaaacaaacctgtgagagcagaagcggtgtgttttgagaagtgcaagacatggsagggccagctaatggagctggtggaatgcatactgaggaggttgtgaacgtggttcatgctcccttcactcaatttggtaaccccctgtccccagccagt

SEQ ID NO: 151503 - DNA, 201 bp, Homo sapiens
acgtcttacatagcagcaggcaagagagaagtgcaggggaactgccctttataaaacgatcagatcttgtgagacttattcactatcacgagaacaacacrggaacaacccgcccccatgattcagttacctcccactgggtccctcccatgacacatggggattatgggagctacaattcaagatgagatttgggtgggg

SEQ ID NO: 151504 - DNA, 201 bp, Homo sapiens
gcattgtgtgctatgccagatgtaataatgaataaaatactctacctccaagaagtttatcttttagaggaaaggttagaactatgtgcaactaaccccaygtcatgtaggtgtggaacaaatcctaaggggctacagtctgcgtgcagattcagaagatagaaatgactaggaccattggggaagtgataggctctttgg

SEQ ID NO: 151505 - DNA, 201 bp, Homo sapiens
ttgagcagcaaattgggcagcccccagaaccacagcagatttggagagactccagggatgccttgtggtcataacaaatttatagacaaatgaagggaagygacaaatcggaagtgaggtacacagtggctggattggttacagatttgcaattgtcttatttgaacacagttagaacactcagcagtccatgagtggttg

SEQ ID NO: 151506 - DNA, 201 bp, Homo sapiens
ttgtgatggcctttgtgcaatattttggtgtttgcagtctttggtgatagttttttatcaggcttacaaatatgagaacccttttttcatggccttgcctygctctatttgtcaaggtttgtttgtttgttttacattactgactccattttgattctgacaacttttacaatatgatacagcaagctttttcagatattc

SEQ ID NO: 151507 - DNA, 201 bp, Homo sapiens
accacgacactgcactccagcctgggtgataaagcaagattctgtctcaaaaaaaaagagaagaaaaaaaaaaaagaaagaaaacaatgctaacacagaastcacacttccaccctctcctcagatacaacctccatcctgaagctcatctgtatgcttcctgtttgtgtttttaaacttttactatatctttatgtcctc

SEQ ID NO: 151508 - DNA, 201 bp, Homo sapiens
taaagctatggtaaaaggaaaacttcatctgaattaaatttaaaggagtttaattgagcagcaaattgggcagcccccagaaccacagcagatttggagakactccagggatgccttgtggtcataacaaatttatagacaaatgaagggaagtgacaaatcggaagtgaggtacacagtggctggattggttacagattt

SEQ ID NO: 151509 - DNA, 201 bp, Homo sapiens
agatggattagaactgtcctgcccatttggtctaagcaacccaattagtggagaattggaccttgtagttaacctgtggttccaaagcattttaatgtagsttgatatctttttttttttttttttgagacggagtcttactctgtcgcccaggttggagtgctgtggtgcgatctcagttcactgtaacctatgccaccc

SEQ ID NO: 151510 - DNA, 201 bp, Homo sapiens
tcagtattttactgcatttgttaaaggatttgggacactacaacaggaaggcactctcatggcaagcaatgatggctggcagtttaactagatcgttactrctgctgtttctgtgatgacaacctccacttctgtgttcttagcagttgtgtagaaatagtcattacagcgtattgagctctttactatatgctcagccct

SEQ ID NO: 151511 - DNA, 201 bp, Homo sapiens
tttttttttttttttgagacggagtcttactctgtcgcccaggttggagtgctgtggtgcgatctcagttcactgtaacctatgccacccggattcgagcrattctcctgcctcagcctcccgagtaactgggattacaggcgcctgccaccttgcctggctaatttttgtagttttagtacagatggggtttcaccatct

SEQ ID NO: 151512 - DNA, 201 bp, Homo sapiens
gacgtgttggtcctcagcttgaaatgtcccttagctcgtccgttaggcccccagtaaacatttcctgaataaatgatatctctcagcatgcagattcatgygaacaatgctctaatttcttaagaaaatggggattctgtgaattaataggatgttttacagaaatggtatggagaatgggactgaagagacaatgctagt

SEQ ID NO: 151513 - DNA, 201 bp, Homo sapiens
agtgataaacttagaagcagaggtgatacatgaattccacataaaccgggcaacagattcccatcttctcaagtcacatagctctttaatggaaatacaaygtatgaaatagatacaagtaaaaccgctctcactgtgagtagggggaggggctattagcataggggcttctagaagaacattttaaaaatcactgcacgc

SEQ ID NO: 151514 - DNA, 201 bp, Homo sapiens
cagattttggtatccatgggggtcctggaaccactccgccacagatatggagggatgactgtttgtggaggaccaactgttacttagctcctaatgggttrtgtaggaagctaatcttttttcttttctttttttttttttttttaatatggagtctcgctgtatctcctaggctggagtgcagtggtgtgatctcacctc

SEQ ID NO: 151515 - DNA, 201 bp, Homo sapiens
gtagaaaagcccattttgatggataactgattatttcagtcttcgtgtcaatatagggtattatttatgtacaaattttagctgtaagggtatagtgacakcatcttatctcacagccaagagtgcagtgagtctgctgcctcatttgaatttggggtttgtggttttcttgtgcctttaatttttaacatattattctgt

SEQ ID NO: 151516 - DNA, 201 bp, Homo sapiens
ctagctgtgtattaagtcactaaggagttttacagagttgaggtttaggtcacactccttcacctactctactcccaagatttggattcagtcattaggcytgggtatcagtattgttttaaatcagattccccaaatgattctatggtacagctcggattcagaaccactgctctcttatgttctaatgccctcccattg

SEQ ID NO: 151517 - DNA, 201 bp, Homo sapiens
aatatgatacagcaagctttttcagatattcccagttttacatgtatatgtgtgtgtaggactgtgcagttctatcacatatgtttgtgtatccactgctrtagtcaagctacaagacagttccaacagcataaggatcccttgtgttgtttgtcctcttataaccactcgctacccctaacctcctgtcctggtctctaa

SEQ ID NO: 151518 - DNA, 201 bp, Homo sapiens; identical to SEQ ID NO: 28210

SEQ ID NO: 151519 - DNA, 201 bp, Homo sapiens
aaaagtattaatttatgttattgatgaattctatgagattcccttactctagattcactcatccattcaatacctgtgcaaggctctggaggatgcaatcrtgaacagcatggacttgagtccttttcctcagagagctgtggaaaaacagcgtagagggagacacagatgccggcaagttctgtgagagggctagcacac

SEQ ID NO: 151520 - DNA, 201 bp, Homo sapiens
ttgtgaaccaaatggggctgcagagaaggaagtctggtgtcagtgcactaaaggccacaagatgggggtgttgctcagtgagagcggaaacagccaggctrttaaacgtgagcagcagaagatccagatagttagtgctgatgctggagaactccctgtaggtggggcaggtggtgtcggcttttccaccactcatcacag

SEQ ID NO: 151521 - DNA, 201 bp, Homo sapiens
caaatttatagacaaatgaagggaagtgacaaatcggaagtgaggtacacagtggctggattggttacagatttgcaattgtcttatttgaacacagttagaacactcagcagtccatgagtggttgaaggatggctgctgggattgcccaagacgcagctactgttacaggcgcatactcctaagttaggctttcaatct

SEQ ID NO: 151522 - DNA, 201 bp, Homo sapiens
acaaatttatagacaaatgaagggaagtgacaaatcggaagtgaggtacacagtggctggattggttacagatttgcaattgtcttatttgaacacagttagaacactcagcagtccatgagtggttgaaggatggctgctgggattgcccaagacgcagctactgttacaggcgcatactcctaagttaggctttcaatc

SEQ ID NO: 151523 - DNA, 201 bp, Homo sapiens; identical to SEQ ID NO: 28213

SEQ ID NO: 151524 - DNA, 201 bp, Homo sapiens
aacaaatttatagacaaatgaagggaagtgacaaatcggaagtgaggtacacagtggctggattggttacagatttgcaattgtcttatttgaacacagttagaacactcagcagtccatgagtggttgaaggatggctgctgggattgcccaagacgcagctactgttacaggcgcatactcctaagttaggctttcaat

SEQ ID NO: 151525 - DNA, 201 bp, Homo sapiens
taacaaatttatagacaaatgaagggaagtgacaaatcggaagtgaggtacacagtggctggattggttacagatttgcaattgtcttatttgaacacagttagaacactcagcagtccatgagtggttgaaggatggctgctgggattgcccaagacgcagctactgttacaggcgcatactcctaagttaggctttcaa

SEQ ID NO: 151526 - DNA, 201 bp, Homo sapiens
tgccaactctgggattccaaatgggtcgctgcaccatgatagggatgtaccacagatgtttaaccattcacccactgaaggacatctggattgtttccagktttttactactgtggctaaagctgctgtggacatttgtgtgcagatctttgaacttctgttgttacttctcttgaataaatataaaagagtacaactgct

SEQ ID NO: 151527 - DNA, 201 bp, Homo sapiens
ccttttgaatgtagtcaatatgttcacacagagaatttcttttacaagattaatttttacaaaccttccacaacttgttcaaacctttagctttatcttayttaactgaaaacaatcctttaaccctctaaactaggcaaatatttacattcccatggcttcttataatcttttaccaaaaacatattttactttctttac

SEQ ID NO: 151528 - DNA, 201 bp, Homo sapiens
aaaaagaaattatgaggctctgagaaatcagaaatcaaaacataaaaataaaacataagtaaaaccatgttgaaagaaatccagaagagaaattatacaawctaaccttttcaccccaaatctgttcctcctttttcttgccactccaacattgatgaaatgtagagtaattgaaatttacttcggagatacagcaaggga

SEQ ID NO: 151529 - DNA, 201 bp, Homo sapiens
caaaaagaaaacaaaacaaatgttaaaccagatcaccctgaagaaaaagtaattaatgaaaataaaaggcttttaggccaggcacagtcgctcatgtctgyaatcactgcactttgcgggggcctagccacaaggatcgcttgaatctaggagtttgacatcagcctgggcaacatagcgagacctcgtctctgcaacaac

SEQ ID NO: 151530 - DNA, 201 bp, Homo sapiens
taaaggatatgtcataaaaaggaagagttcaccaaaaaagtccagcagtcacaaactttatgtccctaacaacataactgggaactacatagagcaaagcraatagaaatacaatgaaaaaaattgacaaagccataatcatagttgctgacttagaaatcaccaagtcaagtggaaggtaagaacagatgtagaggattt

SEQ ID NO: 151531 - DNA, 201 bp, Homo sapiens
ttgaattctgtgaggtctcaatgtttcgttgagtagcccagctcagctagaccacccatctcaaactgccataggaaaaccttcagttctgtgaggtctcsatgtttcgtgagtagcccagctcagatagaccacccatctcaaatccatggctgagcctcctctgaatgagggtgtcatgcctatggtgtcaagttcggg

SEQ ID NO: 151532 - DNA, 201 bp, Homo sapiens
gatgtcctttgcaggccgttgcgtcctgagagccaccgagtctggatctctggatctctggatgcattttgcacagatgtcacctccctgatgccctaacscacctttcccgagtgattacatttcacaccccctcccccaaaaaagatagttaaaatataggcccagtctcattctgagcaggtgtctccctgtccttcc

SEQ ID NO: 151533 - DNA, 201 bp, Homo sapiens
agggacagagttccctctgccccttatctcatgtctggagcctgggtatcttccgtggatagactcaccgccgcccaggggagccggagccggtgccggtycctcttccatgaacttaagctgaaaccagcctcttgttgtgcttaattcttatctgtgcacccacacaaactgttaacagcccctgtgttaacatcctat

SEQ ID NO: 151534 - DNA, 201 bp, Homo sapiens
tccaacttctgcttcaccatcagaacctgagcgtcatcttggcaccctgctttccctcaccccccacattgagtccagcatcatttcctatgattctaccyctaaaagattccttaaatggtgtgtttgtctccctctccactgccacctctgtacttcagtcacctcactgccctcctggtccctggtgcttcctcccat

SEQ ID NO: 151535 - DNA, 201 bp, Homo sapiens
cttggccagcctagagaagggctcccacggtgcagcggtgggctgaagggctcctcaagcgtggccagaatgggcgccgaggccgaggaggcgaggcaccsagagcaagcgagggctgccagcatgctgtcacctctaaataggggaactggcctcgtaaattattaatgctgtttttgagagaatgagttcctcattaaa

SEQ ID NO: 151536 - DNA, 201 bp, Homo sapiens
gttctttcacttaccagctttaggccttaggcaagtgacctcattctagtcttaaactgcctcatctgtaaaataaaggtaaaactacttacttaccccgktttaaatgaggtatgtgtaaagtgtttcacacactgcattggtatagcatgtgctcagtaaatggtaacacttgttatgggtcccctattcagaccagaa

SEQ ID NO: 151537 - DNA, 201 bp, Homo sapiens
actattttgcaactatttaaattttaaaaaggagtgaaaaagctctctaagtcttaatatgcaaatatctcttgaatatattgctaaatgaaaaaaaaaaaggaaggcacagaataggatacatagtatgctacatttttgaaaggacagggagaaaaataagaacgtgtattcctatttgcttatatttgttttaagaga

SEQ ID NO: 151538 - DNA, 201 bp, Homo sapiens
tttactgcatttgttaaaggatttgggacactacaacaggaaggcactctcatggcaagcaatgatggctggcagtttaactagatcgttactgctgctgyttctgtgatgacaacctccacttctgtgttcttagcagttgtgtagaaatagtcattacagcgtattgagctctttactatatgctcagcccttttatgg

SEQ ID NO: 151539 - DNA, 201 bp, Homo sapiens
cagtaaaaacacacaagactgccagaaagcaagcagaagaaaatgatatttttatacatgcatctcaagtttaagaacacaaatgagcctaattacagagratggctggcatattttgacagtcttggctattatcacattgtcacattataaacttcactgtgttccttgccataaattgtgtgctgcttttcaaccaca

SEQ ID NO: 151540 - DNA, 201 bp, Homo sapiens
aggctgaggtgggcggatcgcctgaggtcaggagttcgagaccagtctgaccaacatggtgaaaccccgtccctactaaaaatacaaaaattagctgggcrtggtggcgtgcccctgtaatcccgctagctactcgggaggctaaggcaggagaacctggaggcggaggttgcagtgagccaagattgcaccactgcattc

SEQ ID NO: 151541 - DNA, 201 bp, Homo sapiens
gcttaaggtacgatatatgaaggagcttccaacatccagttgaacaccattgcaaagcatatcgatgcagaatactgacgtctataggagtgggacccctycctggtgtcactgctgtaaaattttaaacggttgtgtcttgttgggagtaagtgccttgcgtgggaataaacttccacagcattcgaatattttaatgaa

SEQ ID NO: 151542 - DNA, 201 bp, Homo sapiens
ataacctggattaattaataaataaaaatataaaatacaaattgttggccgagcatggtggcttacgcctgtaatccaagcactttgggaggccaatgcgrgtggatcttttgagatcatgagttcgagaccagcctgggtggcgaaaccctgcctctactaagtaaaatacaaaaattagccaggcgtggtggctcgtgc

SEQ ID NO: 151543 - DNA, 201 bp, Homo sapiens
aaaatgtactttgacatattttgaaatggttgccatagtgccagcagaccaggctgaccaacatggtgaaaccccgtctctactaaaaatacaaaaattarctgggtgtgatggcacgcggctgtaatcctagctactcaggaggctgaggcaggagactcgcttgaacccgggaggcagaggttgcagtgagccaagatc

SEQ ID NO: 151544 - DNA, 201 bp, Homo sapiens
tttgcttctttctcattttctgctgctgctatgtaagaagtgccttttgcctcctgccatggttcagaggccctcccagccatatggaactgtaagtccarttaaacctctttttcttcccagtcgcaggtatgtctttatccacagtgtgaaaatggactaatacagcagccaacatggtaaccccttgttcccatacaa

SEQ ID NO: 151545 - DNA, 201 bp, Homo sapiens
agaaacgatttctaagcttgaatcatataatagatatgaaagttggttagcagtgagacagttcagctaaaattgtcaccacgtcctgtgtaaattaatgyttttactagatgctttctatccattgttctcaaccctagctgtgtattaagtcactaaggagttttacagagttgaggtttaggtcacactccttcacct

SEQ ID NO: 151546 - DNA, 201 bp, Homo sapiens
tttctatccattgttctcaaccctagctgtgtattaagtcactaaggagttttacagagttgaggtttaggtcacactccttcacctactctactcccaaratttggattcagtcattaggcctgggtatcagtattgttttaaatcagattccccaaatgattctatggtacagctcggattcagaaccactgctctctt

SEQ ID NO: 151547 - DNA, 201 bp, Homo sapiens
gatatcaaaccagaaaggactcattccccaagccaagattgaacctatgacaccattgtaaaatgatgaagccacagctactgagccactgcattggacartctccactgcccctcccagaaggagtctagagtagttaattttgagcttgcaaagacttccaactacttaagattattttagagctaactatgacatgaa

SEQ ID NO: 151548 - DNA, 201 bp, Homo sapiens
aggatacatagtatgctacatttttgaaaggacagggagaaaaataagaacgtgtattcctatttgcttatatttgttttaagagaacactagaaggataygtaagaaactaatttaaaaaaaaaagaaacaggttgcctatgggagaggttgagaagtgggctggatgaggatgtgataacagagcttttttgagccttg

SEQ ID NO: 151549 - DNA, 201 bp, Homo sapiens
gccaaggctctgaaaaacagaactaataatagtccaccaaagtattatgaaaattttaaactgaaaacatccaatcagtagccacagggaaaaacattatwtaaacttaaaccgagccttctgaaaatacaactgcctgtgtaaataaaccttgtctctactattgttaatctgtctatagttagttcagagcccctctat

SEQ ID NO: 151550 - DNA, 201 bp, Homo sapiens
aagaaatacaaatggtttgtagacatatgaaaacatgctcaaatgcataggaagagaagcacaaatataagaatgcctggcccagtgtggtggtggctcaygcctgtaatcccagcacttttggaggcagaggcgggcagatcacctgaggtcaggagttggagaccagcctggccaacgtggtgaaaccctgtctctact

SEQ ID NO: 151551 - DNA, 201 bp, Homo sapiens
gatttctaagcttgaatcatataatagatatgaaagttggttagcagtgagacagttcagctaaaattgtcaccacgtcctgtgtaaattaatgtttttamtagatgctttctatccattgttctcaaccctagctgtgtattaagtcactaaggagttttacagagttgaggtttaggtcacactccttcacctactcta

SEQ ID NO: 151552 - DNA, 201 bp, Homo sapiens
aggctgaggtgggaggatcacctgaccctgggaagttgaggttccagtgagcagtgggcgtgccactgccctcatgcctgggcgacagagtgagactgtcwtgaaaacaaaaagaaaacaaaacaaatgttaaaccagatcaccctgaagaaaaagtaattaatgaaaataaaaggcttttaggccaggcacagtcgctca

SEQ ID NO: 151553 - DNA, 201 bp, Homo sapiens
ttaaacctctttttcttcccagtcgcaggtatgtctttatccacagtgtgaaaatggactaatacagcagccaacatggtaaccccttgttcccatacaaygggtgtgtatggtcccttggcagatatcaatccagtgtccacaactagggaggatttagcaaggggattttattacttgtaacaagttaaggagaacact

SEQ ID NO: 151554 - DNA, 201 bp, Homo sapiens
ttaaaggatttgggacactacaacaggaaggcactctcatggcaagcaatgatggctggcagtttaactagatcgttactgctgctgtttctgtgatgachacctccacttctgtgttcttagcagttgtgtagaaatagtcattacagcgtattgagctctttactatatgctcagcccttttatggatggtcttactaa

SEQ ID NO: 151555 - DNA, 201 bp, Homo sapiens
tcactgcactttgcgggggcctagccacaaggatcgcttgaatctaggagtttgacatcagcctgggcaacatagcgagacctcgtctctgcaacaacaasaacaacaacaaaaaattagctgggaatggtgtgcacgtatagtcccagctacttggaaggctgaggtgggaggatcatctgagtccgggaggtcaagact

SEQ ID NO: 151556 - DNA, 201 bp, Homo sapiens
tgtatgtgtacagttaagtatagatgattttcaaagaaaagttttcagaaagaatacataataaatttaaaattagtcacctttgggtagagtggaaatgrctttcatttttcattttgtgctttctttattgcttgtgtttttgcaccatctacacatatcatttattttgtgaggtcatcaagagttacaaagggatat

SEQ ID NO: 151557 - DNA, 201 bp, Homo sapiens
cccaggctccaaagaacactggggccaaacagcactaaaggagagcatccctcgctaaccaggccccctgcttagaacagcagcacaaaagcctgggtacrtgcaattccatcccactttcccattcagcagcaaactccagattccaaacaatattgggaccaaacagtattgcaaaatttcccattgtcatctgtgaaa

SEQ ID NO: 151558 - DNA, 201 bp, Homo sapiens
tgtcttcttggaagattcctcctcatgtctcaaaatcttcccagtcagaagctctactcaatataacaaataatggaatacactttgctcccctgcaaacrtttacagatgaggaaatgatgataaagagttcaggtaagtaaatttatcagtgtcacctttttctccccagacaggatctctggagcatagtggtgcaat

SEQ ID NO: 151559 - DNA, 201 bp, Homo sapiens
aggatttagcaaggggattttattacttgtaacaagttaaggagaacactgggattattcccacaacagtgtcttccctgagcttggggctggatcaggtwttgtaagcatggggtaatgaggtgtgatctgatttgatcctgcaatgagttgatgccaggaggcatgatctgaccagatcctgccagggtgtgacccagg

SEQ ID NO: 151560 - DNA, 201 bp, Homo sapiens
ggtcatcaagagttacaaagggatatgggaaactacacctttctatgttaaaaagaaaactttataaattctattttaaaaatataagaagggtacctgtrtatattttaacttagttaaaatgtaaaattttgtcagcaaactattaatgtgactgtcactttaacatagacttatcagtaattctttttcctacagtta

SEQ ID NO: 151561 - DNA, 201 bp, Homo sapiens
atctaggcaggactttgaggttgaggtgcttgcttttttgaaatcataattctctaacttgggcctgactgttacagggcctccaacaccaagtggctcaygtggccacccagctggaagctgcaagattactaacatacaatgctgctaggcttttagaagctggaaagccattcataaaagaagcgtcaatggccaaat

SEQ ID NO: 151562 - DNA, 201 bp, Homo sapiens
atcactgcttttaaggaactcagaatctagtggcaaagacagtcgaataaaggaaatagtttcagaataacatggtaaatgtcatggaggtatttggggarcaaagcagagaacacctagactttgctaggcgtggcagaagtgggctaaggaagcagtcaggaaaggcttcccagagagtgtggagcttgagctgtacca

SEQ ID NO: 151563 - DNA, 201 bp, Homo sapiens
gattctacataatgagagtcgcgtgtgcagaaacgaaggaatactgaagcaagccacatgcactgaacccggttgccttctctaccgacttggtattacaytggtagtaaacttaagaaggtgttttcatcaaaatgatttataaatgcatctaagtcttaaaaacattaaaaaatgaaacagcggttttcagtgggggca

SEQ ID NO: 151564 - DNA, 201 bp, Homo sapiens
gtgtgcagaaacgaaggaatactgaagcaagccacatgcactgaacccggttgccttctctaccgacttggtattacattggtagtaaacttaagaaggtrttttcatcaaaatgatttataaatgcatctaagtcttaaaaacattaaaaaatgaaacagcggttttcagtgggggcaagtttgcccccagcggacattt

SEQ ID NO: 151565 - DNA, 201 bp, Homo sapiens
taattaaacttataacaaaataagaaattctgatcttatttttttgttttaacagatgctgggactggcgcaaggatgttttgactacactattccatatrttaaagaaaggatacaatttggcaaaagactatttgattttcaggtatgtaattattagggtctttctgctgtgttagacttccccagcttcctgttaat

SEQ ID NO: 151566 - DNA, 201 bp, Homo sapiens
atgctgctaggcttttagaagctggaaagccattcataaaagaagcgtcaatggccaaatactatgcatcagaggtaaaaaaaaaaaaaaaaaaaaaaggraaaagtaattcagcctttttttttttcagatatatacttattaacattttctcttgggaatgttgattgtactttggttgtttttcaagttaagataaca

SEQ ID NO: 151567 - DNA, 201 bp, Homo sapiens
ggaagcaagtgccaagaattcatcccatttatgttttataacttatgtgcttctgaccacgtatactttataagcttgagacttgtgaaccaaatggggcygcagagaaggaagtctggtgtcagtgcactaaaggccacaagatgggggtgttgctcagtgagagcggaaacagccaggctattaaacgtgagcagcaga

SEQ ID NO: 151568 - DNA, 201 bp, Homo sapiens
atagtgtgtccagaattggtgggttcttggtctcactgacttcaagaatgaagccacggaccctcgcggtgagtgctacagttcttaaaggcggtgtgtcyggagtttgttccttctgatgttcggatgtgttcggagtttcttccttctggtgggtttgtggtgtcaccggctcaggagtgaagctgcagaccttcacgg

SEQ ID NO: 151569 - DNA, 201 bp, Homo sapiens
atgttcggatgtgttcggagtttcttccttctggtgggtttgtggtgtcaccggctcaggagtgaagctgcagaccttcacggtgagtgttacagctcttraggcggcacatctggagttgttcgctcctcccggtgggcttgtggcctcgctggcttcaggagtgaagctgcagaccttcgcggtgagtgttacagctca

SEQ ID NO: 151570 - DNA, 201 bp, Homo sapiens
cttccttctggtgggtttgtggtgtcaccggctcaggagtgaagctgcagaccttcacggtgagtgttacagctcttaaggcggcacatctggagttgttygctcctcccggtgggcttgtggcctcgctggcttcaggagtgaagctgcagaccttcgcggtgagtgttacagctcataaaggcagtgtggactcaaaga

SEQ ID NO: 151571 - DNA, 201 bp, Homo sapiens
cattaaaaaatgaaacagcggttttcagtgggggcaagtttgcccccagcggacatttagcaacatttagagacatttttgattgccacaacttagaagtrggggacgctcctggcagctagtggggccgtggccgggctgctgctcaacatcctgcaatgcacaggacagccccacaacaaagactcacctgccccaaaa

SEQ ID NO: 151572 - DNA, 201 bp, Homo sapiens
ttcagggactgtaatgatagcataatgaaccctgcatttcccagtcaaaattatctgttttctttttttggttgaaatcctacttgatatttatgtacttmaaagttcttaaaaatggaattaacattttttaatttgaaatactgtatattttaaggaaaagtttggaagtaagatggtaatttatttgtatctttagac

SEQ ID NO: 151573 - DNA, 201 bp, Homo sapiens
atagcataatgaaccctgcatttcccagtcaaaattatctgttttctttttttggttgaaatcctacttgatatttatgtacttaaaagttcttaaaaatrgaattaacattttttaatttgaaatactgtatattttaaggaaaagtttggaagtaagatggtaatttatttgtatctttagaccagcggttctcaaatg

SEQ ID NO: 151574 - DNA, 201 bp, Homo sapiens
gaattaataggatgttttacagaaatggtatggagaatgggactgaagagacaatgctagtttagaagataactttagtccttccagtgccactaacagtraatccatgttgctgaaaatgttacccagaagtgtttatcatgtataagttatgtggtttcagtgtgtgatttgcacttgcttttggtagattgcaggaca

SEQ ID NO: 151575 - DNA, 201 bp, Homo sapiens
tagtggctcacagttctgtaggccagaagtccagctggagcaagtccaggcgcagggtctcagaaggtcaacatcagtgtgtcagttgggctgtgttttcktccagagctcagggtccttccaagctcccgtggttgtgtcagtacgcagttctttgctgttgcagggctgaggtcttgttgcccagctggctgtcagcca

SEQ ID NO: 151576 - DNA, 201 bp, Homo sapiens
aatcataatccaacttgcagtgctatcttaagttttataggtaagtatacataaagcatattgtgacatgtatcacatatggtaggctatcagaaaatggyggctatttttctaataattatttttgtagcaaatagaaaaaatggttataacttagattttaaaattctcaccacccctgattccgttattccccttttt

SEQ ID NO: 151577 - DNA, 201 bp, Homo sapiens
tttttttttgagatggagtctcactctgacacccaggctggagtgcagtggcgcaatctcggctcacagcaacctttgcctcctgggttcaagcaattctyctgcctcagcctcctgagtagctgggactacaggcacgtgccaccacgcctggctagtttttttgtattttgttttttagtacagacgtggtttcaccgt

SEQ ID NO: 151578 - DNA, 201 bp, Homo sapiens
gagcaggtagtgactcatttgctttgaagaccagagctgataaagagggagattattatgtcctcaatggatcaaagatgtggatcagcagtgctgagcaygcagggctctttctggtgatggcaaatgtagaccctaccattgtaagtttgaaaacgaaatttctttctttttccaaaccccttcttttctctttcttta

SEQ ID NO: 151579 - DNA, 201 bp, Homo sapiens
gcaataagccgagatcacgccattgcactccagcctgggcggagcctgggcgacagagcgagacttcatctcaaaaaaaaaaaataaaataaaaataaaatatatatatatatatatatatatatatatatatatatatatatatatatatatgttagttggtccctccccagacctattgagtcagaatctcttgggctg

SEQ ID NO: 151580 - DNA, 201 bp, Homo sapiens
ttgatcactattcactccttagccttaagaattcttcctgctgtgccatgagccccctgcaacacttggcattctctcatgacttccagtttgaaaaactrtttttacttttgttttcatcctaattatgtgcatctttttagcagcgacttaaagacactcactacttttatacttttgtaactggtgatgttactgctg

SEQ ID NO: 151581 - DNA, 201 bp, Homo sapiens
gaggttgcaataagccgagatcacgccattgcactccagcctgggcggagcctgggcgacagagcgagacttcatctcaaaaaaaaaaaataaaataaaaataaaatatatatatatatatatatatatatatatatatatatatatatatatatatatgttagttggtccctccccagacctattgagtcagaatctctt

SEQ ID NO: 151582 - DNA, 201 bp, Homo sapiens
agggcaacaaacatatgaaaaaaagctcattatcactggtcattagagaaatgcaaatcaaaaccacaataagataccatctcataccagttacaatggckatcattaaaaagtcagaaaacaacagatgatggacagggtgtggagaaatagggacacttttacactgttggtgggagtataaattagttcaaccattgt

SEQ ID NO: 151583 - DNA, 201 bp, Homo sapiens
cccgggaggcagaggttgcaataagccgagatcacgccattgcactccagcctgggcggagcctgggcgacagagcgagacttcatctcaaaaaaaaaaaataaaataaaaataaaatatatatatatatatatatatatatatatatatatatatatatatatatatatgttagttggtccctccccagacctattgagt

SEQ ID NO: 151584 - DNA, 201 bp, Homo sapiens
aaccctagaagaaaaacctaagcaataccattcaggacatagtcatgagcaaagacttcatgactaaaacaccaaaagcaacggcaatgaaagccaaaatygacaaatgggatctaattaaactagagagcttctgcacagcaaaagaaactatcatcagagtgaacaggaaacctacagaatgggagaaaatttttgcaa

SEQ ID NO: 151585 - DNA, 201 bp, Homo sapiens
ccaatatcatactgaatgggcaaaagttggaagcattccctttgaaaccagcacaagacaaggatgccctctctcaccactcctattcaatgtagtattgraagttctggccagggcagtcagacaagagaaagaaataaagggtattcaaataggaagagaggaagtcaaattgtctctgtttgcagatgacatgattgt

SEQ ID NO: 151586 - DNA, 201 bp, Homo sapiens
acccgggaggcagaggttgcaataagccgagatcacgccattgcactccagcctgggcggagcctgggcgacagagcgagacttcatctcaaaaaaaaaaaataaaataaaaataaaatatatatatatatatatatatatatatatatatatatatatatatatatatatgttagttggtccctccccagacctattgag

SEQ ID NO: 151587 - DNA, 201 bp, Homo sapiens
tgaacctgggaggcagaggttgcagtgagctgagatggcaccactgcactccagcctggtgacacagcaagactccatctaaaaaaaaaaaaaaaaaaaaagcttatccaccacaatcaagtcagcttcatccctgggatgcaaggctcgttcaacatacacatatcaataaacgtaatccatcacataaacagaaccaat

SEQ ID NO: 151588 - DNA, 201 bp, Homo sapiens
aacccgggaggcagaggttgcaataagccgagatcacgccattgcactccagcctgggcggagcctgggcgacagagcgagacttcatctcaaaaaaaaaaaataaaataaaaataaaatatatatatatatatatatatatatatatatatatatatatatatatatatatgttagttggtccctccccagacctattga

SEQ ID NO: 151589 - DNA, 201 bp, Homo sapiens
cttattctaaaattggccatataattggaagtaaaacactcctcagcaaatgcaaaagaatggaaatcataacagtctttcagaccacagtgcaatcaaastagaactcaggattaaaaaattcactcaaaaccgcacaaccacctggaaactgaacaacctgctcctgaatgaccactgggtaaataacgaaattaaggc

SEQ ID NO: 151590 - DNA, 201 bp, Homo sapiens
gaacccgggaggcagaggttgcaataagccgagatcacgccattgcactccagcctgggcggagcctgggcgacagagcgagacttcatctcaaaaaaaaaaaataaaataaaaataaaatatatatatatatatatatatatatatatatatatatatatatatatatatatgttagttggtccctccccagacctattg

SEQ ID NO: 151591 - DNA, 201 bp, Homo sapiens
attacaaactgtgtggtgcagtagcagagtagtaacaacgtatgctataattttgtgtttcttagtgatctgctatgactttcatgcttattgctatataagctgtaaatcaaccaggaaaagtagcagttgcccagtatgttacaaccgtgtaaatggacctaacccaaggcaggaaggacacttgaggaaaataagcaa

SEQ ID NO: 151592 - DNA, 201 bp, Homo sapiens
ttctcgagatcatgctcatgccatgagatacctcttaggcaccactgcacactctctctggacttcctctgtcctagggcatttggccatttgctctgagsagctctctgtgcactccaactggctttggtaggttcatcccaacacaccctcttcacacctgcgtgtgtgggcctcctgccttgggacttctctgttgat

SEQ ID NO: 151593 - DNA, 201 bp, Homo sapiens
tgcctcctgggttcaagcaattctcgtgcttcaccctcccaagtatctgggattacaggcatgtaccatcacacctggctaatttttgtatttttagtagmgatggggtttcaccatgtttgccaggctggtctcgaactcctgacctcaagtgatctgcctgccttggcctccgaaagtgctgggattacaggcgtgagc

SEQ ID NO: 151594 - DNA, 201 bp, Homo sapiens
cttacagtaactgactcatatataatgactcagacaagaccgagactcctacctcaatcgaccctcttggaaaaacacagagcatccactgttgtttctcragatcatgctcatgccatgagatacctcttaggcaccactgcacactctctctggacttcctctgtcctagggcatttggccatttgctctgagcagctc

SEQ ID NO: 151595 - DNA, 201 bp, Homo sapiens
gtactgtttttaatttttatcttccttcagagggaccaactttttattttattttattttatttttgagagggaatctcactctgtcgcccaggctggagygcagtggtaccacctcggctcactgcaacctctgcctcctgggttcaagcaattctcgtgcttcaccctcccaagtatctgggattacaggcatgtacca

SEQ ID NO: 151596 - DNA, 201 bp, Homo sapiens
atgggccagcaaaatttaataagtaaatataaggacccagttcttacagtaactgactcatatataatgactcagacaagaccgagactcctacctcaatygaccctcttggaaaaacacagagcatccactgttgtttctcgagatcatgctcatgccatgagatacctcttaggcaccactgcacactctctctggact

SEQ ID NO: 151597 - DNA, 201 bp, Homo sapiens
ctaaatatacaaaaaattagctgggcgtggtagcgggcccctgtagtcccagctactcgggaggctgaggcaggagaatggcgtgaacctgggaggcggartttgcagtgagccgagattgcgccactgcactccggcctgggcgacagagcgacgctccgtctcaaaaaaaaaaaaagaaaatcatattttacaactgta

SEQ ID NO: 151598 - DNA, 201 bp, Homo sapiens
gtttaatggttgcttaatatttcattgtgacgatgtatcataattatttttcatgaacactgaaggatttctaccatgtgtgtttttttttttttttttttgagacggagtttgctcgttgcccaggctggagtgcaatggcgtggtctcggctcactgcaatctccgtctcccaggttcaagagattctcctgcctcagc

SEQ ID NO: 151599 - DNA, 201 bp, Homo sapiens
ggcatctcttacacagtttgacttttcataaggtaaataggatataacacaataggtcaattaggaaacacaattggtggtgtgtatatatactgcttgtmattcaagcacatcaggtattagtactgaggtcctaggaaataagctattaagcataagggagcagttggcagcttcctggttccatgttcatttgttcac

SEQ ID NO: 151600 - DNA, 201 bp, Homo sapiens
ctctagtgctgacataggaggctacaaacttaaaattttttgatcataactagatgatcaagatggagccctttttgggggtaaaaattccttctactccrtatttgacactgttaagaggatataaaggaaagttaaattatttaagatttttcacaaaagatttaagaatgaaagaataaatcctgctggaaaagaata

SEQ ID NO: 151601 - DNA, 201 bp, Homo sapiens
ttgaaagtttggttacagttgtattagaagaagggataattaacttgaggggtctgaggtctttctctttttctggaaacagggtttcactttgttgccgwggctggagtgcagtggcatgagcagggatcactggagcctccacctcccaggctcaggcgatcctcctgtctcagtccccccaagtagccaggactacag

SEQ ID NO: 151602 - DNA, 201 bp, Homo sapiens
tcctaggctaacagcgggaagtatcacattgaccagacaagttgcagagtgccactgggagccacctacctggagaggactttatctatgttgttgcccaygggcatgctggccagaggcaaggggtcctgatggagagccaatgtctagatatttgatgtaatcccaccttggaaattagaagttcacattctccccttt

SEQ ID NO: 151603 - DNA, 201 bp, Homo sapiens
tcttacaacacctagtcccgaggttgccctgcgaggtcatggtggaaagactattccatctgaagtttgaagacgcagggattttactctgatgggtgctrgctgtgaatcacttcctcaacttcagtttcttaatctgtaaaaataagaacaaaacttcattctcagggttgttataaaatcaatgaaaactgcagggag

SEQ ID NO: 151604 - DNA, 201 bp, Homo sapiens; identical to SEQ ID NO: 28241

SEQ ID NO: 151605 - DNA, 201 bp, Homo sapiens
tgatggtgtaggtattacaggcaagggagtaacttggaagggcattaaggaaaaccagaattttgactttcagcttttgttttgagctggctaaaaggacvtgattcattcaagttcctcctgctagaatgaactctgcttccagggcacaggcaatcagcaggggcatttagatgtgggctcttcctgccttagattgta

SEQ ID NO: 151606 - DNA, 201 bp, Homo sapiens
agcttatttatgaaataatatcagaaataaattactcctgctcctagagctccccatgaaactagagaggtgcgaagaatcaaggacaggtgcagtcaaayccagagaatgaacaaggcttggtttcaagaagagctttcctaagaatttagcgattctctaccttgtcactattgacatgtttgacatttagggctggat

SEQ ID NO: 151607 - DNA, 201 bp, Homo sapiens
tgatgattgtatgactcacattgggatttgggctctgggctaacaacagcccctgagaccagcccctgagaccaggcctgtcctatcctatcggccttagscaacagccagaggaagccagcaagttttatttggaatgtagaactcccagtggtattgttccctgattctcactcaccagcagccactgggagtgcttat

SEQ ID NO: 151608 - DNA, 201 bp, Homo sapiens
ccaaggttattgtttaggaacaaacatggtgggagcaaaaagttgttgggtgttcctctgtttaagagccttctggaaggatgaagtctccactgggctgrcacagagcctctgcggcctctgaggcctgtcagtggagacccttcaggcggtttttcctcacttaggttccatgactcaccttgtcagttgaaatcctgc

SEQ ID NO: 151609 - DNA, 201 bp, Homo sapiens
acggatggggtggcttaagcaatagagatgtgttgtcacacagttccagaggctagaagttcaagatgcaggtgtggggagcttcctctgagggctgtgakggaaggatttgttccaggcctctctccttcgcttatagatggttggcttctccctatgtctcttcacattgttttccttttgtgtatatctgtgtctaaa

SEQ ID NO: 151610 - DNA, 201 bp, Homo sapiens
aaactgtcttccaaagtggctgtatcgttttgcattcccaacagcaacgaataagaatttctgttgctccaaaatcttgccaacatttgttgttgtctatrttctggattttggccattctaactaatatgcagtggtatctcaatgttgttttagtttgtatttccctgatgagataagcttattgttccatctatatat

SEQ ID NO: 151611 - DNA, 201 bp, Homo sapiens
ttgcagttaggaagcaatttaagaggtgatacttctcccaaatcctttcatctaatgattttagcatttgtattagtttgctcctataacaatgtactacrgatggggtggcttaagcaatagagatgtgttgtcacacagttccagaggctagaagttcaagatgcaggtgtggggagcttcctctgagggctgtgaggg

SEQ ID NO: 151612 - DNA, 201 bp, Homo sapiens
tgactctttttatagtaataaataaacactgcttagttccataaggcactgtcactgcagctagtgcacactagtgccacccactgtccccagtgtgcaamaggaagggtggaggtgcgttccagtgttactgatgctaagcttcatctcttggttaagtggtggcttccagatgcttccgttgtaagattctattttccc

SEQ ID NO: 151613 - DNA, 201 bp, Homo sapiens
aaaaaaattatcaagttttcatcgtggcttttcacgatcagcatggctaagcagaagcctgtccagctgcgtctaactctacgtgcttcctaaattacccygtaatcctcttgtcctcttccaagccttggccgatctgaatcatagtgcatttctttcagcacacacatggcaatagatacttcagagcatcgttggggt

SEQ ID NO: 151614 - DNA, 201 bp, Homo sapiens
taactctacgtgcttcctaaattaccctgtaatcctcttgtcctcttccaagccttggccgatctgaatcatagtgcatttctttcagcacacacatggcratagatacttcagagcatcgttggggtgagttttgtgtgcgtgaatgcctgtgccctggcctgggccaccaccgcacacaaccagcaggcggagtgtggc

SEQ ID NO: 151615 - DNA, 201 bp, Homo sapiens
tgcctgacccaaggttattgtttaggaacaaacatggtgggagcaaaaagttgttgggtgttcctctgtttaagagccttctggaaggatgaagtctccaytgggctgacacagagcctctgcggcctctgaggcctgtcagtggagacccttcaggcggtttttcctcacttaggttccatgactcaccttgtcagttga

SEQ ID NO: 151616 - DNA, 201 bp, Homo sapiens
agtgcattgagtttagtaagaattaaatattgtttatgaaaattgtatatcagtcatatttgtgtgtgttctagattgcaacgtgtattatattacttagygcaggtctctatttaaaaaaaaaaaaacagctgctttcttaacaagcagagtgaaaataactagtcttttaatctcagtgtccggcaaactcaagtttgc

SEQ ID NO: 151617 - DNA, 201 bp, Homo sapiens
actgtggcctcacagggggtgtagaacacttcagtttggatcgtgaccaacatttaaagcataataaaatagaaagtgtcagtgcattgagtttagtaagrattaaatattgtttatgaaaattgtatatcagtcatatttgtgtgtgttctagattgcaacgtgtattatattacttagtgcaggtctctatttaaaaaa

SEQ ID NO: 151618 - DNA, 201 bp, Homo sapiens
gtgtctccttttcttgaccaattaggacagctttgtgacagctccaggggaaaggaacaggacgaagagggctgtgtatgagatgggagcatgccaagaarcataggctttatccagtccagcgcgtctcacactgcacactgtggcctcacagggggtgtagaacacttcagtttggatcgtgaccaacatttaaagcat

SEQ ID NO: 151619 - DNA, 201 bp, Homo sapiens
aagatttaaaccattcaaacttcatattgaaagtttggttacagttgtattagaagaagggataattaacttgaggggtctgaggtctttctctttttctkgaaacagggtttcactttgttgccgaggctggagtgcagtggcatgagcagggatcactggagcctccacctcccaggctcaggcgatcctcctgtctca

SEQ ID NO: 151620 - DNA, 201 bp, Homo sapiens
actctgtctgttgtcctttcagcacaagatctacatatatgtaggctaaaacaatcaggggaacacacttgcacacatacgtgaacacacaggcacatacrcacatgtatacatgcactactatctagtgtcactgtcattcctttacaatttttgctaccaaaaaaagtagagatggctgagtgtggtggctcacacctg

SEQ ID NO: 151621 - DNA, 201 bp, Homo sapiens
ataagcctgtgctcacagcacatgtatcgcaaaacacaggagctgtgtgtaagggtgcgttcttattctgagctgtgtggccaagctgctgcgtggggtcrggggagctccctataaagtacatgatgtgagcattggtggagatgaactaagctaactgggatctccaatgtctcaaagacagcatgtgtcccacaggcg

SEQ ID NO: 151622 - DNA, 201 bp, Homo sapiens
caaaattattgagtgactaaattagttaatacatgtgaaagttaattgttgcaaacatttagctccagtctcaaaaagtttcctttttcattttgccaatycctgttccttcctctttgatcactattcactccttagccttaagaattcttcctgctgtgccatgagccccctgcaacacttggcattctctcatgactt

SEQ ID NO: 151623 - DNA, 201 bp, Homo sapiens
ctcaaggagccacccttggcttacagcagacatgtcagcaacagctgtttcactgtgcttaggcttaagttcccttataaactcctggccttcaccaacaktagcaaaatgtaggcccagagggtaatgatgatatctatcttacaaaattattgagtgactaaattagttaatacatgtgaaagttaattgttgcaaaca

SEQ ID NO: 151624 - DNA, 201 bp, Homo sapiens
cccagcagcttctgtgggctccgacacagccttctttccctctccattcaccccccgaccccgtggtgccacgactccccatctggaagaacagtcagccrcatcctgcctgtaactgcttcacaggatccaaaaggaaaatatcagctaacagcagcctgggctagctggggctgtgaagactttgccctgcaaaagagt

SEQ ID NO: 151625 - DNA, 201 bp, Homo sapiens
accatagcacgtgtatacctatgtaacaaatctgtacattctgcaatgtatcccagaacttaaagtataataataataataataaaatatataagtagtcktatcaaagctttaaaaccaggagtacttgtcttttccctacattctattaaacattttcccctattgtggacctttgatgtctacagtgttttcatttgc

SEQ ID NO: 151626 - DNA, 201 bp, Homo sapiens
aacatcacacaccctggcctgttggggggttgtggggggatgctaagggagggatagcattaggagaaatacctaatgtaggtgatgggttgatgggtgcmgcaaaccaccatagcacgtgtatacctatgtaacaaatctgtacattctgcaatgtatcccagaacttaaagtataataataataataataaaatatata

SEQ ID NO: 151627 - DNA, 201 bp, Homo sapiens
actgatgattctagaagggagtggagagagatgctggtttccatattacacctgcttagtgtgatgtgcctgtggacacccagaggaggaaggcatctcargctgtgcccttcctcctggagcctcttgtcactgagccacagggcctctacaccaacactaaatcactatactgctttccatttagatgacaatttgatt

SEQ ID NO: 151628 - DNA, 201 bp, Homo sapiens
ctgcttccagggcacaggcaatcagcaggggcatttagatgtgggctcttcctgccttagattgtaccctggctctatcactgtcaagttttcttcatctrtaagatggagatcataatggcacctaccccctacacttgtggtgagtattaaatgagttactatgtataaagtacttaaagagggcctggcacatagaaa

SEQ ID NO: 151629 - DNA, 201 bp, Homo sapiens
catggcagagtcatggagccagcctgggacagtggagccaactcaagttcacctcgagtccccaactctgctactggccagctctgtggccttgagaaacrtcagcctttctggattcagtttccttctctgaaaagagaggactcttctctaaggtccccttcagccctaacattcgaccacagcaacagagatgagtcg

SEQ ID NO: 151630 - DNA, 201 bp, Homo sapiens
gtggattttttttttttttagctaattagattgacctcaggtccaatctgtaaagtgtttcaaatacttaagttttgtttagatttctttaatcttatccrtgaccttttttgccccccagccttcctacctcattgtgccattgatagcaacttgactttggtttcttctcttttcagagtttgatccagtggttgtaaa

SEQ ID NO: 151631 - DNA, 201 bp, Homo sapiens
ctacaggagcactagagaaattaaacccttgctgaacaaacctgggtggaactctcagtcattttctttattttttatcagtacacagcacatccagaaasaaggaagagctctcaatcaagaggcagcgtgtgagatgcttcgtgaatggcatcaagggcatatattgaaagtcacccttcccggattacacattttagc

SEQ ID NO: 151632 - DNA, 201 bp, Homo sapiens
cagaaaggcaagcatgaaaatagtatccctgatttttttccagtagcacatgatataacattgaataattgctgggtatatttgacaaattgggatacagktcattagggagctggggaacttaaaaatcaggctgtcttcaggaaaatttatgaggggattacagtgtgcagccaccagaaaatggggcagcaggaacct

SEQ ID NO: 151633 - DNA, 201 bp, Homo sapiens
acatcatgcctcacattatcttcttccacagcatttcaccatccagggcacatttggaacatttggaagtcatgagaaaagagcaaatagcttggtcgtcyctaagcagtgaagacggtgatttatcaattcattaaagcattgtcattccatgcatgctgcattgtaaccccttccgttatgcggaatactccgacaaag

SEQ ID NO: 151634 - DNA, 201 bp, Homo sapiens
agcactgcatgttctccctcttaagtggaagttgagcaatgaaaccacatggacacagggaagggaacatcacacaccctggcctgttggggggttgtggrgggatgctaagggagggatagcattaggagaaatacctaatgtaggtgatgggttgatgggtgcagcaaaccaccatagcacgtgtatacctatgtaaca

SEQ ID NO: 151635 - DNA, 201 bp, Homo sapiens
atagttatttttcctaaaaatatgtaatttatttaccatgtaataggtttattattttaatgaattgatatatttaatattaattttatattaacaaataygcatatattttatatgtaatctatatataattaacatatattaacatttgatatttaatcaattaataaaacatttcccagttttaatttcccatacagt

SEQ ID NO: 151636 - DNA, 201 bp, Homo sapiens; identical to SEQ ID NO: 28247

SEQ ID NO: 151637 - DNA, 201 bp, Homo sapiens; identical to SEQ ID NO: 28238

SEQ ID NO: 151638 - DNA, 201 bp, Homo sapiens
atgctgcccaggctggtcttgaactcctggcctcaagtgatcctcctgccttgaccttggcctcccaaagtgctgagattacaggcatgagccacaatgcmtggcttcttctgggactctaattacattttattttaaagcattttatgttgtcccacagatattggatgtgcttcactcctttttatctttatgttttgg

SEQ ID NO: 151639 - DNA, 201 bp, Homo sapiens
catggaggctatgcctttgttcaacacaagaatctttgcatgaaaggaaggatggcttaggactgtgctctttccccccaaagcctctccttttacgctgrggggagcagtagagcatagtgagaaactggcagaccctggagacagactgctggaatcaaagtctctgactcctccacttactagcaaatgaatcaacca

SEQ ID NO: 151640 - DNA, 201 bp, Homo sapiens
ggaagatggtccagcccgactgagatagcaaatagtggccagtgcagtaacacactgtcctgttagctgcctcacctcccctgcctcccacactctctttycgtggacttgagctttgtttataaaataatagcacataagcttttgcctcgagtcctgccatctggggaacccaggttaagacattcctcactatcaagg

SEQ ID NO: 151641 - DNA, 201 bp, Homo sapiens
ggccctaaagaaaagcttgagtgtgaatacaaactcttttgtgtccgaggcttgaggctatcccatattgaccttcaagaattttgttaaatttttagctracttcttcttatctacttgtgtggtagccatctctttctccttgctttgacaaaagtgaagccattcatattcatgtgtactgtctctccttggatgggt

SEQ ID NO: 151642 - DNA, 201 bp, Homo sapiens
cagagggggtcctgggtctccactctaccctgtccccaaccttccttgtgagcacccagttaggggccctaaagaaaagcttgagtgtgaatacaaactcytttgtgtccgaggcttgaggctatcccatattgaccttcaagaattttgttaaatttttagctgacttcttcttatctacttgtgtggtagccatctctt

SEQ ID NO: 151643 - DNA, 201 bp, Homo sapiens
caaataaatctagaatctccttcctctgaacctgagtgccatctttttttctgcagcagagccatgaatgacctcggattggaatgatttggaggaagagktggacaaaggttagattgcactagtgtcttccctgttaacattcctttcaggtctcagcagcatcttaacagaaagtagctctgggagttatttcccaaa

SEQ ID NO: 151644 - DNA, 201 bp, Homo sapiens
ggaagaaggcaaggctttgttcttgttgccagtagcagctgatcagctcctgcatgtctatgtggcagagggggtcctgggtctccactctaccctgtccycaaccttccttgtgagcacccagttaggggccctaaagaaaagcttgagtgtgaatacaaactcttttgtgtccgaggcttgaggctatcccatattgac

SEQ ID NO: 151645 - DNA, 201 bp, Homo sapiens
tatgcctagtgttccattattggaacggtaagcatgtgggagttatttatatcctgctgctcaaggtcatcaccaaggtctgattgcaaaaattcaaaaamttgcaacctcaggcataaatgggttaagattttgctttgtaagagagggccctggggaagaaggcaaggctttgttcttgttgccagtagcagctgatca

SEQ ID NO: 151646 - DNA, 201 bp, Homo sapiens
cttcattgttctggtccagtatcagtcttaggcaacgctcctgtgcctgaaccttggggtcaagggtttcttagcattcctgcagtagccaacctctgctkttgagcagtgcaagatcctgggcacaagcaggtttcctgctcttcctcaaaggggcagaagatttttgcttctgtctctccctcagcagcaatgtttctt

SEQ ID NO: 151647 - DNA, 201 bp, Homo sapiens
tctgcgacgccaaggaagaaatccgtgccgggctcgaaagctctgagggcggcggcggcccggagaggccaggcgcgcgcgggcagcggcagaacatcgtytggaggaatgtcgtcctgatgagcttgctccacttgggggccgtgtactccctggtgctcatccccaaagccaagccactcactctgctctggggtaagt

SEQ ID NO: 151648 - DNA, 201 bp, Homo sapiens
tctaagtctcccttcagaaatcctgtttcagtgttgccacctttcctagccatgagcctaagcttcagatgcacaacttttcttctgcacatcagaaacakgtttgccttcttcctttcaagatgggtgggtgttgttggttttctcctccatgtaaacaggcagcagcagaagtggtcctgacccagatgccctgacagc

SEQ ID NO: 151649 - DNA, 201 bp, Homo sapiens; identical to SEQ ID NO: 28246

SEQ ID NO: 151650 - DNA, 201 bp, Homo sapiens
tgcacatcatgcctcacattatcttcttccacagcatttcaccatccagggcacatttggaacatttggaagtcatgagaaaagagcaaatagcttggtcrtctctaagcagtgaagacggtgatttatcaattcattaaagcattgtcattccatgcatgctgcattgtaaccccttccgttatgcggaatactccgaca

SEQ ID NO: 151651 - DNA, 201 bp, Homo sapiens
tactcagtttagctggctgaagctcagccaaaaccaacccaatctcatcctcccctccacttgcagaaggacttgggtggccctgctgatttggagtagcraaatgactgatgtgtgctacttggagcctgtccctgcatctaggagacaaagagaggcaggatgccctggaaggaggtgcagaagtgagagagaggcaga

SEQ ID NO: 151652 - DNA, 201 bp, Homo sapiens
tttagctttatagtaagtcctgaagtcaagtagtgcactcttccaactttgttcttcttcttcaatattgtgttggctattctgagtcatttgcctccacstataaaccttgcaatcagtttgtcaatatctacaaaataacttgctgggattttgattggaattgcattgaatatagatccagttgagaaaagcagacat

SEQ ID NO: 151653 - DNA, 201 bp, Homo sapiens
gccagagcctatccccagcaactcaaggcacaaggtggtacccaaccttggacaggacaccatcccaccatagggcccacacattcacacacacacagtcrttcagatctggaccgtgtagacacgccaatcaacctaatgtacaacacacatctttgggatgtgggaggaaaccagagtacccagagaaaacccatacag

SEQ ID NO: 151654 - DNA, 201 bp, Homo sapiens
actgcgtcgtttattgtcgtgtatctgtaggattattcactactttacaaatttttattttactgtaatttgtatccatttattacccaacccgcttattscacttcagggtgggaggtagccagagcctatccccagcaactcaaggcacaaggtggtacccaaccttggacaggacaccatcccaccatagggcccaca

SEQ ID NO: 151655 - DNA, 201 bp, Homo sapiens
acacaaagggtggacttctgttgtttgtgtctctgtgcatggctgtttataagagtagagggtttcttcattgttctggtccagtatcagtcttaggcaasgctcctgtgcctgaaccttggggtcaagggtttcttagcattcctgcagtagccaacctctgctgttgagcagtgcaagatcctgggcacaagcaggttt

SEQ ID NO: 151656 - DNA, 201 bp, Homo sapiens
ctgatggatggaccataacctctgatttggtgatacaactccaggagtgggacctgtatactcatagagggtgaggatgagtgtgtttctgaatgtttgaratatgtttaactccacaagggtagaccagggtacacacctttaaggagcatacatactcttagtatagtgttctatgcagatggcatcccttagtgacct

SEQ ID NO: 151657 - DNA, 201 bp, Homo sapiens
ttccacttagaaaaaagatcagttaaaattttgctgtatatttttctaaagttttttatgtatcaagctagctttttaaaaaagtatgcatatcctatatmctatgtaaaagtgattaaagtaagaaatataatttaatatttacctttattatttcatttccagcttctttatttttgtatgtgtgtatcctaatttcca

SEQ ID NO: 151658 - DNA, 201 bp, Homo sapiens
cgaggtgctgggtgctggcaaaacaacctcgccttcaggttccaggtttctggaagaggtgaatgacagaagagggaatcaagttgattatttcctccatrtctccgctctactttgggcgctacattcaaagctcaggtttttcattttaaaaataattgctaaagtccttagggggtagatgctttatgtgtgcttatc

SEQ ID NO: 151659 - DNA, 201 bp, Homo sapiens
aagaatcttcacggaggctgggactgatggatggaccataacctctgatttggtgatacaactccaggagtgggacctgtatactcatagagggtgaggaygagtgtgtttctgaatgtttgaaatatgtttaactccacaagggtagaccagggtacacacctttaaggagcatacatactcttagtatagtgttctatg

SEQ ID NO: 151660 - DNA, 201 bp, Homo sapiens
catggagcagcagctgtctctgggagacaaaaggaagaatcttcacggaggctgggactgatggatggaccataacctctgatttggtgatacaactccakgagtgggacctgtatactcatagagggtgaggatgagtgtgtttctgaatgtttgaaatatgtttaactccacaagggtagaccagggtacacaccttta

SEQ ID NO: 151661 - DNA, 201 bp, Homo sapiens
cttcagtgcagtgacatgatcatagctgctaactgtagcctcaaactcctggctcaaatgatcctcctgcctcagcctcctgagtcggactacaggcacayaccaccatgcctgattaaattaaaaatatatatatatatatatatgtgtgtgtgtgtatatatatgtgtgtgtgtgtgtgtgtgtattatacatatatat

SEQ ID NO: 151662 - DNA, 201 bp, Homo sapiens
ggagtctcgctctgtctcccaggctggagtgcagtggcgcgatccggctcactgcaagctccgcctcccgggttcacgccattctcctgcctcagcctccsgagtaggtgggactacaggcgcccgccaccacgcccggctaacattttcttaaaataaagagactttcaaggaaagtgtatggctgtagctccagggcgt

SEQ ID NO: 151663 - DNA, 201 bp, Homo sapiens
aagagaaccaaagcatggagcagcagctgtctctgggagacaaaaggaagaatcttcacggaggctgggactgatggatggaccataacctctgatttggwgatacaactccaggagtgggacctgtatactcatagagggtgaggatgagtgtgtttctgaatgtttgaaatatgtttaactccacaagggtagaccagg

SEQ ID NO: 151664 - DNA, 201 bp, Homo sapiens; identical to SEQ ID NO: 28225

SEQ ID NO: 151665 - DNA, 201 bp, Homo sapiens
cgattcctggttctctttctaggctatgtagagtaatcttttaatctacactggacattttctttctttctttctttcttttttttttgagacggagtctygctctgtctcccaggctggagtgcagtggcgcgatccggctcactgcaagctccgcctcccgggttcacgccattctcctgcctcagcctcccgagtagg

SEQ ID NO: 151666 - DNA, 201 bp, Homo sapiens; identical to SEQ ID NO: 28226

SEQ ID NO: 151667 - DNA, 201 bp, Homo sapiens; identical to SEQ ID NO: 28227

SEQ ID NO: 151668 - DNA, 201 bp, Homo sapiens
tgctgatcctgtggtccggatccagagaaagtaagtgaatgggcatgacggagagctgtccctcaggggccaggacatagaaacagcacaatgaggtggaytcataaccccatagcgttcttctcaagcatttgccctaacaattttgccatatttataagatttatctctatttattaatttccttttgctcattaaatt

SEQ ID NO: 151669 - DNA, 201 bp, Homo sapiens; identical to SEQ ID NO: 28228

SEQ ID NO: 151670 - DNA, 201 bp, Homo sapiens; identical to SEQ ID NO: 28230

SEQ ID NO: 151671 - DNA, 201 bp, Homo sapiens; identical to SEQ ID NO: 28231

SEQ ID NO: 151672 - DNA, 201 bp, Homo sapiens
tgaggttacagcatcaacaccaaaatttccctaatgtagtggttaaaatattgggtgggggaaaaatcagtgtggtacataattcaatagctttttatgasttttaaaaattttccaagtcaaaaatgtcaattttttttgcctctgtaagaggtacttttcctagtagagctttaggagaatttgcatgcgtgcgtgcgt

SEQ ID NO: 151673 - DNA, 201 bp, Homo sapiens
atgtctgcagttcacataggaaagttaatcttgtgacgatttattgctattttttctgttcatattgtttgtctagctaactaagtcaatgcctttggagkcagtaaccaagtcttttgctcctcacagaggctgacaccatgtcctgcacatggtaaaccctgaaaaaataggtgattcaaaacatctatgcagagaggt

SEQ ID NO: 151674 - DNA, 201 bp, Homo sapiens
gggactataaactagttcaaccattgtggaagacagtgtggcaattcctcaaggatctagaactagaaataccatttgacccagccatcccattactgggyatatacccaaaggattgtaaatcatgctactataaagacacatgcacacgtatgtttattgtggcactattaacaatagcaaagacttggaaccaaccca

SEQ ID NO: 151675 - DNA, 201 bp, Homo sapiens
tcgtcctggtgtcatccacattttgcttttgaggaaacaaagagacagggaggagtgatttgcccaaggtcacagagctgttaaggggccgtcagggtttrcatgaggttgttctggttcctgagccctgcctagcatccttaggcaacacagtcctgaaggttctgacttcctacagaggagtgatttgggcactccatg

SEQ ID NO: 151676 - DNA, 201 bp, Homo sapiens
tgttgttgtctatgttctggattttggccattctaactaatatgcagtggtatctcaatgttgttttagtttgtatttccctgatgagataagcttattgytccatctatatattttctttagtaagatgtttgtcaagatctttggtccatttttaaatcaggttgctttcttcttgtgaagttttcagagttcttcata

SEQ ID NO: 151677 - DNA, 201 bp, Homo sapiens
gatgggtcttttcattgttgttgtattataattaattttgtgagaataatgtttctagctatttgaaactcttcacttagagtttctacaagattgcatgrcattgaattaaacagccatgtattagttcattatcacattgccataaataactacctgagactgggtaatctataaagaaaagaggtttaattgactcac

SEQ ID NO: 151678 - DNA, 201 bp, Homo sapiens
acttgtgaggtggattggtgaggttggccacacacagaacttctgttctttctccaaacacttctatacctttctccctctcctctgcctggaaaattccyattcctttttaaaaatcgaggtcagaaatcacatcttctttgcagccctccagactccttcagagagacaaagtcaccacagcctgtagcccttcattct

SEQ ID NO: 151679 - DNA, 201 bp, Homo sapiens
caagctcactacatgggagaagcaagcttcacacccaagcagttggcccagagtgcaggctgtgggccactgtgctctgtgcatcgtaacagggcaccagrgctagcttgcctgtgctctggggagggggctgatgtgaaagagaccaaagctagagtgaagagtgaggtgtgggagtgcatgctggtggtgtgtggggcg

SEQ ID NO: 151680 - DNA, 201 bp, Homo sapiens
cgtgcccaccctacacgaccccagtcgttgatctttgaaccacttcgcagccgccctggccgcaataactggttttggcctcctttactgaagcggcagtwgccaggacaaaaggcacaggcattgatatgctgagtgagaatttgacgaggtaatccaagatgcccttccagctcccgtttccctgatctctaggggcgg

SEQ ID NO: 151681 - DNA, 201 bp, Homo sapiens
agatcctccccgtccacctgccccagtggacaaaccttgcactcccatcctttctcccctctgacttttgtgctcctagggaaggtgatcaacagcaaggygaggtgctgggtgctggcaaaacaacctcgccttcaggttccaggtttctggaagaggtgaatgacagaagagggaatcaagttgattatttcctccatg

SEQ ID NO: 151682 - DNA, 201 bp, Homo sapiens
tgagatgttagcctgatactggctccataatacccaaacccagcctgagatcctccccgtccacctgccccagtggacaaaccttgcactcccatcctttytcccctctgacttttgtgctcctagggaaggtgatcaacagcaaggcgaggtgctgggtgctggcaaaacaacctcgccttcaggttccaggtttctgga

SEQ ID NO: 151683 - DNA, 201 bp, Homo sapiens
ttcattttttaaaggtatttttaccagacataaaattctgagttgtcaggttttttctcttggtattttaaagatgtcagtaccttgtcttatgccttacrtaatttttgatttgtatcattgtgtgatatgtattatccctctgcacgtaatgtttccttttttgtcactgacttcaatatattttatcttcagttttca

SEQ ID NO: 151684 - DNA, 201 bp, Homo sapiens
caggggatagaccacacattgggaactgggagtccttggtttagagaatagggttccaggccaggcaggtgctttcattaatgaagttatcggtaagtcartatgtctgtctgagttggatgaatgataccctccaaagcttattgtgaaaatgaacttcactatagattggattcccccttggggcctggctaaagccac

SEQ ID NO: 151685 - DNA, 201 bp, Homo sapiens
aggaagagaaaagaaagattcagaagttgagaggagggaggagagaaagtagagccaactgtggcggaccttggaaaagcactgcaggggatagaccacasattgggaactgggagtccttggtttagagaatagggttccaggccaggcaggtgctttcattaatgaagttatcggtaagtcaatatgtctgtctgagtt

SEQ ID NO: 151686 - DNA, 201 bp, Homo sapiens
caaaaaacaaaaatgaaacaaaaagtctcaaggccagaaaggggagaccaagagaagctagactttcctagagtcaaggaaaccagttgtaagggatttasctatgaagtcagaacagttttgactgcctgtcaatgggggtgtccaaggagaaagaccattgcttctgaaaagactaaaagagaaccaaagcatggagca

SEQ ID NO: 151687 - DNA, 201 bp, Homo sapiens
aaaagagactccaccttagtcttagtctttcaccctcccctatagtttctaacacagaattctgcctctgtcagttctggttctagactttttctgagcasatttggggtaaaggattaggggaagaattaaaagttatctctacattggtttacattttgcttacatttggaagggtagaaggaagagaaaagaaagatt

SEQ ID NO: 151688 - DNA, 201 bp, Homo sapiens
actgtagcctcaaactcctggctcaaatgatcctcctgcctcagcctcctgagtcggactacaggcacacaccaccatgcctgattaaattaaaaatatawatatatatatatatgtgtgtgtgtgtatatatatgtgtgtgtgtgtgtgtgtgtattatacatatatatatatatatatatatatatagagagagagaga

SEQ ID NO: 151689 - DNA, 201 bp, Homo sapiens
tgctctgaaacagacatttataactttaaaacagcatatatagggaccttacctccctgactgatgtacataggatttggcttttctcagtcctaagagayttaaagatttagtgaaacataaagaacatattttaagcaatatcaatatgcaggcccaatgtaaatgtccccatgaatgtcgaatgcaagtagttagtcc

SEQ ID NO: 151690 - DNA, 201 bp, Homo sapiens
cctgccagacagctttgttcctttttttgtacccttctctgcatggagacattttgcctcatctgtcacactgtgttcttaatgccatgatgttcttcttytctcacagttttataagagaacaaaagctgtttaacctattgctcagcaagactctttttgttgttgtttttggtggggaagtgaggaattttgtcctct

SEQ ID NO: 151691 - DNA, 201 bp, Homo sapiens
tgagcatttcttctcattgatttttagttttggaagtttctattcatatttcgtcaaactcagagattctttcctcaaccatgtccagtctacttataagyctatcaaaggcatttttcacttctgttacagcattttttatctctatcatttctttgtggttctgtcttaggattttcatctctctgcttatattgcctg

SEQ ID NO: 151692 - DNA, 201 bp, Homo sapiens
tatcaattgatatggaattgatgtttgccatatcaattgatatggaattgatatttgccatgtcaattgatatggaattgatatttgccatatcaattgayatggaattgatatttgccatatcaattgatatggaattgatatttgccatatcaattgatatggaattgatatttgccatatcaattgatatggaattga

SEQ ID NO: 151693 - DNA, 201 bp, Homo sapiens
agaccattgatggtcaaagtttttattgatggaaataaattgatatttccatccaattgatatttgccatatcaattgatatggaattgatgtttgccatrtcaattgatatggaattgatatttgccatgtcaattgatatggaattgatatttgccatatcaattgacatggaattgatatttgccatatcaattgata

SEQ ID NO: 151694 - DNA, 201 bp, Homo sapiens
gatgcatttagaccattgatggtcaaagtttttattgatggaaataaattgatatttccatccaattgatatttgccatatcaattgatatggaattgatrtttgccatatcaattgatatggaattgatatttgccatgtcaattgatatggaattgatatttgccatatcaattgacatggaattgatatttgccatat

SEQ ID NO: 151695 - DNA, 201 bp, Homo sapiens
ccagaggctggggcaggggggttgttgagagatattggtcaaagggtacaaattttcagtctgactagaggaacaagttcaagaggtctactgtaaaacayggcgatagtgactacagtcaataacaatgtattgtattcttgaaaatcactgagagagtagattttaagtgttcttaccacaaaaacataagtgtgtgag

SEQ ID NO: 151696 - DNA, 201 bp, Homo sapiens
tcagaatgtgctctattttggtgaatgttctatgtgagcttgagaagaatgcatattctgctattgctggatgaagtagcctgtagatgtcaattatatcytgtggattgatggtgttgttgaatttaactatgtctttactgattttctacctgctggatctgtttgtttctgatagtgggctgttcacatctccaatta

SEQ ID NO: 151697 - DNA, 201 bp, Homo sapiens
ttatctcaacaaagctgtttatgaaaatcaaatgaactaatccttagagaaatgcaaattaaaaccacaatgagatattacctcacacttatttgaatgamtattatcagaaggataaaagataacaagtgttggtgaggatgtgaaaaaagggaacccttgcacactgttggtgagaatgtaaattagtgtagccattat

SEQ ID NO: 151698 - DNA, 201 bp, Homo sapiens
ggactttcattctcagtgtcatttcatggtgcaaactgatcactaaatctccaaccagaaggggaatcagggaggctgaagggagcacattgctgagttgrgtcggtcgcctttaaggagtcttcctagaagatacaacctatccacttgtctctcattgaccatatctgtacccagggaaacagggaaatgtattctcat

SEQ ID NO: 151699 - DNA, 201 bp, Homo sapiens
ttaaattgtatacttcaagagggtgaattgtacagtaagtgaattttatctcaacaaagctgtttatgaaaatcaaatgaactaatccttagagaaatgcraattaaaaccacaatgagatattacctcacacttatttgaatgactattatcagaaggataaaagataacaagtgttggtgaggatgtgaaaaaagggaa

SEQ ID NO: 151700 - DNA, 201 bp, Homo sapiens
agtagagaactgggattcctttatcgttctgctctaccatcctcagcaggggactttcattctcagtgtcatttcatggtgcaaactgatcactaaatctycaaccagaaggggaatcagggaggctgaagggagcacattgctgagttgagtcggtcgcctttaaggagtcttcctagaagatacaacctatccacttgt

SEQ ID NO: 151701 - DNA, 201 bp, Homo sapiens
gctcccaggtcctcagcctgtgcagggcctgtgtgctccacacagacgtcctcttcagatgatgctcccacgtcttggctgtggtcctttctggaaattgsccttggccacagagagctgcctcgcccaagcgtttgccctcccaggggctccctgaggccaatgcccagatgatgcaaggataatacctttcaatttcat

SEQ ID NO: 151702 - DNA, 201 bp, Homo sapiens
atattaaaagccattaaattgtatacttcaagagggtgaattgtacagtaagtgaattttatctcaacaaagctgtttatgaaaatcaaatgaactaatcmttagagaaatgcaaattaaaaccacaatgagatattacctcacacttatttgaatgactattatcagaaggataaaagataacaagtgttggtgaggatg

SEQ ID NO: 151703 - DNA, 201 bp, Homo sapiens; identical to SEQ ID NO: 28221

SEQ ID NO: 151704 - DNA, 201 bp, Homo sapiens
ggccaggccctggattcctagggtcctagattcctccctaaatgctctgagctctcttctagagcctatagcagtctcctcctgggatctgttctcccaayaggaaatacatagagcctaggcctgaagagtggccaaggggcagtgttagcacagggacttaagttttaaagtgtgaggtcagatatccacctaatggga

SEQ ID NO: 151705 - DNA, 201 bp, Homo sapiens
gggagtaggaggcggttgggggtgatggctaaggcatgtgggtctttttggagagtaatgaaaatgttgtaaaattgattgtggtgatggatgcataactytgtgaatatattaaaagccattaaattgtatacttcaagagggtgaattgtacagtaagtgaattttatctcaacaaagctgtttatgaaaatcaaatga

SEQ ID NO: 151706 - DNA, 201 bp, Homo sapiens
cattgtgataatttctattcatatttctaacctctttggatccatctgtgttattcctctttcctcaatgatgtctgcagcacctcctaatttagtaccartcagaaatgttattaacaaaatgtgtaagccttgttcccagacattaatgaagatacgaaatgaaacagatctaacagacacagtgaggccttctgttag

SEQ ID NO: 151707 - DNA, 201 bp, Homo sapiens
atgaagatctgatacttgatacaaaatgaatgaaccttgaaaacattttttatgtggaagaagctagtcacaaaggactacatattgtatgattttatttwtatgaagtgtctgaaataggcaaatctacacagatagaaaacaggactgggagggagtaggaggcggttgggggtgatggctaaggcatgtgggtctttt

SEQ ID NO: 151708 - DNA, 201 bp, Homo sapiens
gggtagggatggcataaatttaaaagaaaattgcagaccacagatggatccatcttgaggtactcgttatagagcgaaatcctttaaacatggtcagtggsagaactatgtgatgactagtagccacttaagaagtaagaaaagagtctgacagtttctcaaacagttaaaaatagttactatgtgatccagcaactccac

SEQ ID NO: 151709 - DNA, 201 bp, Homo sapiens
tcaaacagttaaaaatagttactatgtgatccagcaactccactcctacatttataccaaagagaaatgaaaacatatgtccacacaaaaacttgtatatsaatgttcatagcaacgttattcataatagctaaaagtggaaacaacacaaatgtccatcaactgatggatggatacgtacaatgttgtacatccatataa

SEQ ID NO: 151710 - DNA, 201 bp, Homo sapiens
aagtgccttggaaaacaggaggggcagtgccccaacccttcctatggctttcccctcctcttgccctgcatcttctgaaaggactgtaatgagggaagccrtggccagtgttgattctgtgagtagacagaaatggggacaagatggtccgtcaccatgtagggatggatgggccaggaaactcaagcagtatggccatga

SEQ ID NO: 151711 - DNA, 201 bp, Homo sapiens
tatcattttatattaaaataatctgctcatagagctctctcattagactataagcttcatgaggactatgtcctattcatctttctatttactgagccagwtgaactacctaacaacccctcccactcccatcaaaaaataattgaggactaaggagtgtgtctactacctagtttatagagagcactagacaacctacgg

SEQ ID NO: 151712 - DNA, 201 bp, Homo sapiens
taactgtagcctcaaactcctggctcaaatgatcctcctgcctcagcctcctgagtcggactacaggcacacaccaccatgcctgattaaattaaaaatawatatatatatatatatgtgtgtgtgtgtatatatatgtgtgtgtgtgtgtgtgtgtattatacatatatatatatatatatatatatatagagagagaga

SEQ ID NO: 151713 - DNA, 201 bp, Homo sapiens
agctcccaggtcctcagcctgtgcagggcctgtgtgctccacacagacgtcctcttcagatgatgctcccacgtcttggctgtggtcctttctggaaattscccttggccacagagagctgcctcgcccaagcgtttgccctcccaggggctccctgaggccaatgcccagatgatgcaaggataatacctttcaatttca

SEQ ID NO: 151714 - DNA, 201 bp, Homo sapiens
tcttatgacttaaagggccacacttctctccacaaagtgaggagatcacagggccaaaggaacatggcacctgcctaaatcttccttgacttctgggccakgccctggattcctagggtcctagattcctccctaaatgctctgagctctcttctagagcctatagcagtctcctcctgggatctgttctcccaacaggaa

SEQ ID NO: 151715 - DNA, 201 bp, Homo sapiens
ttctgatgaaaaccactccagaccacaggggattgaacttgaggttgagggactgtgggttgaagacaggaggaaagtgaaaccagcagtgaggactggtrggggaggggaggctgggaagcttcccaggaggatgctcggcggtgcggttcctctcttcactcaggctctcattctctctgcagaatgacatcttcgagt

SEQ ID NO: 151716 - DNA, 201 bp, Homo sapiens
catcctaagtgtccatcagtgatagactggataaagaaaatgtggtatgtttacaccatggaatacggtgcagccacaaaaaagatctcttttttcttgayataaatgatctaggagacttcagtcgcccccaccagagctttccttcaggtctctgcactaattcacccaacaagcctgaacttcctgcagtgggtacgt

SEQ ID NO: 151717 - DNA, 201 bp, Homo sapiens
tttctgttacactctgttagagcagtcctaaaatgatgccactggtgccttggtattttgcagagatttggggaagtagccatttgggtttttttaatctrctggcttcctgatctctgtgagtcacacatgaagaacaccaaagtgaggagagaggcagagacatctgggccaagaaccggcaccattcctactcaggac

SEQ ID NO: 151718 - DNA, 201 bp, Homo sapiens
ctgtttctgttacactctgttagagcagtcctaaaatgatgccactggtgccttggtattttgcagagatttggggaagtagccatttgggtttttttaawctgctggcttcctgatctctgtgagtcacacatgaagaacaccaaagtgaggagagaggcagagacatctgggccaagaaccggcaccattcctactcag

SEQ ID NO: 151719 - DNA, 201 bp, Homo sapiens
taatcccacctattcgggaggctgagacaggagaattgcatgaacccaggaggcggaggtttcagggaccgaagatcacaccactgtactccagcctgggygacagagcaagagtccgtctcaaaaagaaaaacaaaaaattagctgggcatggtggcatacacctgtagtcccagctacttgggagactgaggtgggagg

SEQ ID NO: 151720 - DNA, 201 bp, Homo sapiens
aaaattagctggatttgttggcgcacatttataatcccacctattcgggaggctgagacaggagaattgcatgaacccaggaggcggaggtttcagggacygaagatcacaccactgtactccagcctgggcgacagagcaagagtccgtctcaaaaagaaaaacaaaaaattagctgggcatggtggcatacacctgtag

SEQ ID NO: 151721 - DNA, 201 bp, Homo sapiens
ggaaaaaccatcccttcttttattccctgagaagataatccagaggtatattgtgacccatcaaaatccaagttcagttgccccagcagtagccactccaktaatgcatgcagtcatggccttcccccattccccatttccttgagcccatttgcccatccatgcctgtcaatggagctcacgtcccagagtaaactgccc

SEQ ID NO: 151722 - DNA, 201 bp, Homo sapiens
tttttaaaattttcgaccagcctggccaacgtggtgaaatcccatctccactaaaaatagaaaaattagctggatttgttggcgcacatttataatcccasctattcgggaggctgagacaggagaattgcatgaacccaggaggcggaggtttcagggaccgaagatcacaccactgtactccagcctgggcgacagagc

SEQ ID NO: 151723 - DNA, 201 bp, Homo sapiens
cagtaagccaggctataatttttgatatacataaaccgccatgctcctgttttctctctttatattcaaagctgaacatatgcttgtcggaactttctgcytcctttttctctcccccaaaacccaaggattaggtggatttttaaaattttcgaccagcctggccaacgtggtgaaatcccatctccactaaaaatagaa

SEQ ID NO: 151724 - DNA, 201 bp, Homo sapiens
gatttgtatgagaatagtggcagcagttcctgaagttggaaggctttggtacctttcttcctgctgctagactttgataaccagaggacacctgccaaccygtaattgattcatttgatgaaatatttatagagtacctagcattggattctgtcaaaagcatccatcatgctggtgaaatacatgcccatccctgtgaat

SEQ ID NO: 151725 - DNA, 201 bp, Homo sapiens
ttttttttttttttttttttttttttgagatggagttttgcttcttcgcctaggctggagtgcaatggcatgatcttggctcactgcaacctctgcctccyatgttcaagcaattctcctgcctcagcctccctgtagctggaattataggcatgagccaccacgcccggccttgttcaccttctgtctcagttctagggc

SEQ ID NO: 151726 - DNA, 201 bp, Homo sapiens
aatctaaaacagatggatttcctgaaatcaccactgtctccatggaaacagctcagctggctctatcagttgctataaagtgttctctccttggtgtggayggaatcttcgtgttagtggaggaagaggacccaggacagaacatattggactaagcttagaagggagaagacaagatttgggttagctattagaggctta

SEQ ID NO: 151727 - DNA, 201 bp, Homo sapiens
tcccgtccccatctctctctagggcacatctcaactccagacctatatgttgatatcctctacctggcagccccatttggatgtatattgggcatctccckcttaccgtgtccaagacagagctcttcatatgccactcctcctccattctcccctacatcggcttagggcatcttaatccttggtgtcatccttgactcc

SEQ ID NO: 151728 - DNA, 201 bp, Homo sapiens
actttttgtgaggtgtgtgaagtctgtgtctgaattcattttttcgcatgcaaatgtccagttgttccagcataatttgttaaaaagactaccttttctcyattgtattccctttgttcctttgtcaaagatcagttgactatatttatgtgggtctatttctaggctctctgttatgattcattgatcaattagtctgtt

SEQ ID NO: 151729 - DNA, 201 bp, Homo sapiens
caatctaaaacagatggatttcctgaaatcaccactgtctccatggaaacagctcagctggctctatcagttgctataaagtgttctctccttggtgtggrtggaatcttcgtgttagtggaggaagaggacccaggacagaacatattggactaagcttagaagggagaagacaagatttgggttagctattagaggctt

SEQ ID NO: 151730 - DNA, 201 bp, Homo sapiens
tgagcaacatcataaatatgctgatgagttgcaaacttctactcccgtccccatctctctctagggcacatctcaactccagacctatatgttgatatccyctacctggcagccccatttggatgtatattgggcatctccctcttaccgtgtccaagacagagctcttcatatgccactcctcctccattctcccctaca

SEQ ID NO: 151731 - DNA, 201 bp, Homo sapiens
atcctactgtgtcctgaaattctcttgtagtgaaacctctgccctgcccatcactcatggaaacgttacactagtaggtttctgtgcagagaaaatgagamcattcaacagaaggcctcaaagcactcatatgccctgatggtgtcggctgagcatacccagtcggccagcatttgcaggatgaaactgctttctataagc

SEQ ID NO: 151732 - DNA, 201 bp, Homo sapiens
gccagtctggtcttgaactcctggcctcaagtgatccacccacctcggcctcccaaagtgctgggattacaggtgtgaggcaccatgcccggccagaaagrtgcatctttatttcaggtgttatctggggatttatttattctaagaccccagcaatcctgtgcccacctctagtttcttgctgctggggtctctctgcct

SEQ ID NO: 151733 - DNA, 201 bp, Homo sapiens
catcctgtacctccatagaaagagatcttcgaatcaatgtcatgatcctcataattttgtactcttagtctcggcacgaccgactccttcaggtctcaccsagagcccatgtgttcttgatttacacacaaattgaatagtcttagttgtctggttttcaaacccttcacagataaagagaaacaagttagaaggaacaaa

SEQ ID NO: 151734 - DNA, 201 bp, Homo sapiens
ctacaaagagaatgaaatacctaggaatacaactcacaagggatgtgaaggacctcttcaaggagaactacaaaccactgttcaaggaaataagagaggayacaaacaaatggaaaaacattccatgttcatggatagaaagaatcaatattgtgaaaatggccatactgcccaaagtaatttatagattcagtgctatcc

SEQ ID NO: 151735 - DNA, 201 bp, Homo sapiens
tatttacacactgcaaaaaaataaattagtgaatttgaaaacaaagcaatagaaattatctataaaaagtacacggagggaaaaacactggaaaaagaagraaagaacagagcatcagtgagctgtgggacagcgtcagatggcttaatatgagtgtaatggagtccacagaatggtggtgggaaaggaaaaatatttgaa

SEQ ID NO: 151736 - DNA, 201 bp, Homo sapiens
aattgagcatgaaaagtagagacatggaagttgttgaaaaagacccaaattaaacttctagagatggaaaatacaatatctgagatgaaaatacattggayaggatttatttacacactgcaaaaaaataaattagtgaatttgaaaacaaagcaatagaaattatctataaaaagtacacggagggaaaaacactggaaa

SEQ ID NO: 151737 - DNA, 201 bp, Homo sapiens
caaccaccatgtttaaatacactgtaaaatctaaagacctctttcatattacagtaagccaggctataatttttgatatacataaaccgccatgctcctgytttctctctttatattcaaagctgaacatatgcttgtcggaactttctgcctcctttttctctcccccaaaacccaaggattaggtggatttttaaaatt

SEQ ID NO: 151738 - DNA, 201 bp, Homo sapiens
ctaaagcaattgggataattatattttatgtgttaagaaagtagaggagaaattgagcatgaaaagtagagacatggaagttgttgaaaaagacccaaatyaaacttctagagatggaaaatacaatatctgagatgaaaatacattggataggatttatttacacactgcaaaaaaataaattagtgaatttgaaaacaa

SEQ ID NO: 151739 - DNA, 201 bp, Homo sapiens
acacatggggattacagttacagatgagatttgggtggggacacagtgccaaaccatatcaagccaatataaccttttaacaagatgaaagaaagttttcyataaaagatccctccctgcaacatttggagagtaagggaaatattttgttgatggaaatgtgaactgagaaccaaggaaatgccatcttagttctattat

SEQ ID NO: 151740 - DNA, 201 bp, Homo sapiens
ttctgtaagtttttattttgatatagttttaaacttataaaaaagttgcaagaatagtacaaggaactctcttatacccgaaaagttcctttatctagatkaaccatctatttacagttgacccccttcctccctctcactctgtagtacctaggtataaatacatatttttaagccattcagagtaagtcagagacattg

SEQ ID NO: 151741 - DNA, 201 bp, Homo sapiens
tgcctctttttttttagtatttagaaaaaactctttctttttagtgtggtgtcttgctgtgttgcccaggctggtcttgaaatcctcagcctcctgagtarctgggattacagatgcacaccaccacacgtggctcctctgtcatttcgacatgccccatcattttttaagcacttcctttccggcacaacaaaatatact

SEQ ID NO: 151742 - DNA, 201 bp, Homo sapiens
gagaggaagtcaaattgtctctgtttgcagatgacatgattgtatatttagaaaaccccatcatcttagcccaaaatctccttaagctgataagcaacttmagcgatgtttcaggatacaaaatcaatgtgcaaaaatcacaagcattcctgtacaccaatagtagacaaacagccaaatcatgagtgaattcccatttgc

SEQ ID NO: 151743 - DNA, 201 bp, Homo sapiens
cattgaaaaagaggcacatgacatcactttgtcacattattagaggtatgaactttgatcatttggttaaggtggcatctgctaagtttctccactgtaarattgctatttttattttgtaattattgaattaatttatgcaaagattatgagcctatatgaatattttatcttcatcaaacttttacccaatagttttag

SEQ ID NO: 151744 - DNA, 201 bp, Homo sapiens
aaacctgcccatgctgtatacaaccggtgtggctgtggggaaggcccaagacatctctggacctctgcacaggtcctgcaaaagaggttataaaaactacrtcatagggccattatggaactcataaaaaaaaatgtatgtgagcaacatcataaatatgctgatgagttgcaaacttctactcccgtccccatctctctc

SEQ ID NO: 151745 - DNA, 201 bp, Homo sapiens
agtaatacacagagattgtcaaataataagcaaaagaatgatagattttggggagtatgaatggaaagaggatgttaacagtatgccgaatgtattgtggrgaggaaaattactataagtgggaggcagttagaaggttattacagcatccaagtaaattgataaaagcctgaacaagggtggtagagtagaaatggagtg

SEQ ID NO: 151746 - DNA, 201 bp, Homo sapiens
cagcagtgggtgctcagcatcagtcacttttaaatgttccccaatttattctaatgtgcagtcagggctgcgagccctgatctagcaggttaggctgcccrttaagccagctcgtgtgaatactgagagatgagaaggacaacatgctacaggaatgctgtgcagtgcacctcgcctgggggactgatgaaaacccctgag

SEQ ID NO: 151747 - DNA, 201 bp, Homo sapiens
aggaaactgctccagtgccaggagtggtgaagatccaaggattttatgcttagctcctttgccatgtagatctcagggcagagtttcaccatcagcaacakggacaacatgattatgctctgctacaagagaggtgactcaaaatgccttccaaaccagaagaatgtctgtaaaatattaggcaccagtaacaccagacac

SEQ ID NO: 151748 - DNA, 201 bp, Homo sapiens
tgtggggaaggcccaagacatctctggacctctgcacaggtcctgcaaaagaggttataaaaactacatcatagggccattatggaactcataaaaaaaaatgtatgtgagcaacatcataaatatgctgatgagttgcaaacttctactcccgtccccatctctctctagggcacatctcaactccagacctatatgttg

SEQ ID NO: 151749 - DNA, 201 bp, Homo sapiens
ctatcatgtcacatgcccactcctaaattaattatttgcaaagtgaaggatattaccaaaattgccttaaaccaatcaggaccagggccctgggtagggtytacattaccctaaaggacatggctgcaaggaggacagttagatacctgaacaaaatccagacattccagccagaaagaaaggatgggacgaggaagaata

SEQ ID NO: 151750 - DNA, 201 bp, Homo sapiens
accaagaactgcatgggcagctttcagcaggaagtaggtggtcccgagggcactgcccttgtcctcatgagtgctctggatgctcatgtcctcaggacccrtggcagtggttgcagtagagctggggcaggtccatcatggcgtcggtcagcatggccaggaagcccagagtctccacaaacaggccccaatcgatggacg

SEQ ID NO: 151751 - DNA, 201 bp, Homo sapiens
tatttgtcctttttgtctggtttattttactaatcttaatgttttcaaggcccatccatgttgcagcatatatgaaaatcttattcctcttcatggctgaytagcattctattgtatatatgtacagcattgtttgtctactcatccactgaataatgttgctaccaacatgggcatacagatatctgttcatgtccctgc

SEQ ID NO: 151752 - DNA, 201 bp, Homo sapiens
gcatgtggcattttctcagcgaagtcggcttctttctcttttctacatgtatcacttattcatttgacaactatgttttgagtacccactatatgtcaggygatgttcaagatgctgtagattgaacagtgaaaaagaaaataagattctggagagtacttgccctatctttctagagctccccagtttgggtctgggaat

SEQ ID NO: 151753 - DNA, 201 bp, Homo sapiens
cactaatgatactgtataaccatcaccactatacagaaaactttgtcatcattcccaataaaaactctgttctcatgaaataataactttctcttcacccscagctcctggtaatttctgttctcttttctgtcgctatgaattttcctgttgtaggtgcctcaagtataagcatacagtatttgtcctttttgtctggtt

SEQ ID NO: 151754 - DNA, 201 bp, Homo sapiens
gctcacagcaagtctcattgccccgaggcaggaaggctgcagagaaagttacccttggagtagggagagaggagaggaagccagtgctctcttcaagtggyctgctctgtgttcacaggcccgatgggctccccaaggctgtcctagccaggctggatctgtgccaggccttgacccagcagctgtgttccgtaccttgga

SEQ ID NO: 151755 - DNA, 201 bp, Homo sapiens
aactgttcttctgttcttctcctagctttcccaccagaagtctgggtatcatccatgatttctccatttccctagttatccctcaccaatttttaagccartcccttcagttctatcactaaattacatcttgaatctgcacacttctcatttttaccaccttttagttcaagatcaacttttttcctaggctactgcaaa

SEQ ID NO: 151756 - DNA, 201 bp, Homo sapiens
agcctgaagaggcaactttgcttctcaggcttcttcctttcatagtcacagatggctgttgccggactgggtgtcactgcaggaaagagaaatgatttctkcccctgtgctctttctattgttgaggaagatatttccttgtatttctctttctttattgtggtgaaatatacaaaagataatattaatcattgtaacctc

SEQ ID NO: 151757 - DNA, 201 bp, Homo sapiens
gaggaatgattagaacatactgtataaggtcacagcatagttagaaaatcacccagattgaagaagtaagctgacagggtatagtgtgttacaaatctggytacccatgtgacatctcttattggatgtcctaacttaggcttcgcaaactcagcatgccccaaatcaaagttgtgactctaccttctcaccgaaactgtt

SEQ ID NO: 151758 - DNA, 201 bp, Homo sapiens
acagtctcagtggagacattcgtcagcccagtggggaccaggcctggacaacgggcttctctggtcagtcaccgatgtgcagtcattaggggaggggcatkacctcaggcaaggcagctctccatcagaggcagcactgtcagctactgggagagtaagtcctttaatcctaagtggggacctgggtggcacatcacaatg

SEQ ID NO: 151759 - DNA, 201 bp, Homo sapiens
ggccacccgttgtgtaagaaaacaaagaccaggtctctacccttctccctttcataactgaaaggaacagctgtaatttcccccagtaccctaaccaactyactattctttaggcaggggtagataatggaaaatattcttactttcaaacttccatgcatgaagttagaaatgaatttctttcttaaaaaaatgaatttc

SEQ ID NO: 151760 - DNA, 201 bp, Homo sapiens
cggaattacaggtgtgagccaccggtgcctggccactcttttgctgtcttgatgagtttaggcaccttctcctatcccagagtctgagtgttcatagatasgcagagaggaagtcactcacattccaaaccaagactgaacctgttagagtggttgttaatcttaaatattgtcaacattttaccataattggaagctcag

SEQ ID NO: 151761 - DNA, 201 bp, Homo sapiens
tccaccttgctttgttcatacctgtgaacttccttaaatggaaaatttataagtagaggtatttccataatgaggggtatggaagatacaaagggaaaaaragagagtccttgcctttatatatcttgtaatttaattgggaagaaaaggcacatgcttatgaaatagtcagggactcccaaatttgtatacgaaagtgac

SEQ ID NO: 151762 - DNA, 201 bp, Homo sapiens
gtgcagtggcacaatctcggctcactgcaatctccacctcccgggttcaagcgatcctactgcctcagcctctctagtacctgggactacaggtattcacytccacacctggctagtttttgtatttttagtagagatggggtttcaccatgttggccaggctgctcttgaactcctgaccttaagtgatccttccacctt

SEQ ID NO: 151763 - DNA, 201 bp, Homo sapiens
gaggagagccactctatttcttgggtcgttcttgggttgatcccaccccttccctctagttcttcctctttcttttgcctttttttttttttcttgagacsgtctcactctgtcacccaggctggagtgcagtggcacaatctcggctcactgcaatctccacctcccgggttcaagcgatcctactgcctcagcctctct

SEQ ID NO: 151764 - DNA, 201 bp, Homo sapiens
gcatgtacaatgcctacttaaggtaagtgcttgatctacgttgctcctggtggctattgggaagtttttgaagattgccttgtttttttttttttttttttaaggcaaagtctcgctcttgtcccccaggctggagtgcaatggtgtgatctcggctcactgcaacctctgccttctgggttcaagcgattctcctgcctc

SEQ ID NO: 151765 - DNA, 201 bp, Homo sapiens
ctttggaactctttttttttttttttttttgagacagggtctcatcactcaggcttcagtgcagtgacatgatcatagctgctaactgtagcctcaaactyctggctcaaatgatcctcctgcctcagcctcctgagtcggactacaggcacacaccaccatgcctgattaaattaaaaatatatatatatatatatatgt

SEQ ID NO: 151766 - DNA, 201 bp, Homo sapiens
ctgtactctttccactgcttctaaaaggtacatgtgtggagagggggttgttcccattccccctcattctttctttagcagctgattcccacgagcccacwttccagggaagatggatctgccctccttcatatctcgctgcccatttttgcaggtgttggggctactgcagggcctgctgcttactagaaaggttggagg

SEQ ID NO: 151767 - DNA, 201 bp, Homo sapiens
tgaaggccacttcccagcactgaggacccaggcagggaggacacatgcaattgcagaatgcgggaggagggagtgaccagaaagactctattgtacccctygaagctggcatagggagcatgaagtcctgtgtcctggggtgctggccagggcctgcaggatcaggaatgaaaaacatcagtgctccccacaccatgcatt

SEQ ID NO: 151768 - DNA, 201 bp, Homo sapiens
aaggcagaaataactaagttctttgaaaccaatgagaacaaagacacaatgtaccagaagccctgggacacagctaaaccagtgtttagagggaaatctayagcactaaatgtccacaggagaaagcaggaaagatctaaaattgacatcctaatatcacaattaaaagaactagagaagcaagagcaaacaaattcaaaa

SEQ ID NO: 151769 - DNA, 201 bp, Homo sapiens
ttgttagaaggaccatgggaaaccgacagccactactgcacagtacaggcgctgctgtgaaccactgttggtgccatagggatagacagacaaccatgcargtgatccctaaattattggagattcccaaaaggacaagacaatgtctgtggtaaaggtctgactgggaaatgtggattagagtgatccttttttagccaa

SEQ ID NO: 151770 - DNA, 201 bp, Homo sapiens
agttcctcctgctagaatgaactctgcttccagggcacaggcaatcagcaggggcatttagatgtgggctcttcctgccttagattgtaccctggctctaycactgtcaagttttcttcatctgtaagatggagatcataatggcacctaccccctacacttgtggtgagtattaaatgagttactatgtataaagtactt

SEQ ID NO: 151771 - DNA, 201 bp, Homo sapiens
gcaattatactataaccttgttttgttagctgttttttcatgcgttaatgcgtcgtagacatcttttcatgtccatagatgtggatcatggatttttttttaatggcagtatcgtattccaacgtttagatgtacttaacccccctattgttgaaaatttaggttgtttttcgttgttgttgcagtgttgatgttatcagg

SEQ ID NO: 151772 - DNA, 201 bp, Homo sapiens
atggcagaggggcagttccagattccctgtgagctccctcccttctgtgtggaaggagctgacattctccgtgagttcttccagggagctttgattcccaygcctagtaaatgatctccccgacacccggaagagaagctttgtgttatttgagggaaaggaagaggcttcgaagaagagaggaagaagccacaggggaaa

SEQ ID NO: 151773 - DNA, 201 bp, Homo sapiens; identical to SEQ ID NO: 28242

SEQ ID NO: 151774 - DNA, 201 bp, Homo sapiens
ttatagggcccagtacaaaatgaaaatatagcacctgttcaatgattattaagaatttcaagatggtgatagcagtgcatttaaccacgcatgaggccctyctaaggatggggccctgtgtcaccaaccatcacacacctattaagctgtctttgaccagaaatagtataccctgtgtgtatcctcagcactctctgatgt

SEQ ID NO: 151775 - DNA, 201 bp, Homo sapiens
ccagttgccataggatctcagttctggtattttggactgtgggtaacagtttcataaagcaatttttaagaaaaatgaaaactcatatagcacttattgtragccaggcactgctctatgccctttatagatattaagtcatttaatttttagaacaacctagtagacaggtactatactttttgccattttgcaaacaaa

SEQ ID NO: 151776 - DNA, 201 bp, Homo sapiens
ggaatctatttggaaacatattttcaagctttgtgtttcatcctgtcttcttttcctaaagatctttagaagtgctgcacacagtgaacctccttaatcaygtattttctcgcaacctttctttttcttagaaccacagaaggttagagctgggatcacaggaggttagaattggggaaccttagaagccacgagtctaat

SEQ ID NO: 151777 - DNA, 201 bp, Homo sapiens
gggtacggcattttctttctgcacttacctggcaggattaattatactttctaccaacaaaaatgaacctattaaggtagaaaataaaatttccccacccstaagatgccttacttgcttatttgttggggatctaggtcagtgaaagtaggtgagatgagagaaatcatctaagaaaatgaacctcaaggggatgaaaat

SEQ ID NO: 151778 - DNA, 201 bp, Homo sapiens
gacggtgatttatcaattcattaaagcattgtcattccatgcatgctgcattgtaaccccttccgttatgcggaatactccgacaaagtggtgcaggtgggaggtggcctagcaggtgagcgagagagcaagaaagagagagagaaaggaaaccaggaaactctccagaggctgctgcgtggggtacggcattttctttct

SEQ ID NO: 151779 - DNA, 201 bp, Homo sapiens
cttgtgaggtggattggtgaggttggccacacacagaacttctgttctttctccaaacacttctatacctttctccctctcctctgcctggaaaattcccrttcctttttaaaaatcgaggtcagaaatcacatcttctttgcagccctccagactccttcagagagacaaagtcaccacagcctgtagcccttcattctc

SEQ ID NO: 151780 - DNA, 201 bp, Homo sapiens
tcgagtcctgccatctggggaacccaggttaagacattcctcactatcaaggaaggtcaagtttgtttcataaactctgattaagagggcaaaaaaaatgrgtaatgatttccatatacaatttatgtatttattttctactcctcttactatcattcccaacataaacaatttttttaaaagtccgggtaattgaacatg

SEQ ID NO: 151781 - DNA, 201 bp, Homo sapiens
tgtagggttttttggtatgtatcctgcttggagttttctgagtgtcctggatctatggtttggtgcttgtcattaattcggaaaattctcagccattattrcttaaatattttctttttcttttttatcttttttgagatggagtcccactctgttgcacatgctgtaatgcagtggtgtgatctcgactcactgcaacct

SEQ ID NO: 151782 - DNA, 201 bp, Homo sapiens
acttgtcttcacggactttgtagtttaccacaaacccttggaatgcctcttggtgacttggagtctttaattttggtgttgccatttcagcttttggaggmtcaaagaagacttcttcaacttgtgaggtggattggtgaggttggccacacacagaacttctgttctttctccaaacacttctatacctttctccctctc

SEQ ID NO: 151783 - DNA, 201 bp, Homo sapiens
gctgctcagggtagacctgaaattaagggatgggccagcaaaatttaataagtaaatataaggacccagttcttacagtaactgactcatatataatgacwcagacaagaccgagactcctacctcaatcgaccctcttggaaaaacacagagcatccactgttgtttctcgagatcatgctcatgccatgagatacctct

SEQ ID NO: 151784 - DNA, 201 bp, Homo sapiens
aatacttattgagcacctactatgtggcagacactgagaaggcacagtgagaataacaatgagcaaagagtcacaagcttcgccttcatggagcttttctstctagtaggatattagaatccccaaagtttcccagtggaaatttcagtgtttcatggacctggggttttataacaatgtcacttagacctaggtggaagg

SEQ ID NO: 151785 - DNA, 201 bp, Homo sapiens
gtaaatcacaagcagtataacaatgtcattaagttcaaatacacatagtggagtgaaaactaaatgtagtagtgtctcactactcagctatctagtaattkcatttaactggaataaaccaaggacctgtaaataaacaaagagaaccattattagacactatatgccagaatgatatacatttttgcatggaatcctcga

SEQ ID NO: 151786 - DNA, 201 bp, Homo sapiens
tctgtgataagcacactggtatgcatatagtatttgatccgcatagtagccctgtgagctagatgttacatgtgtcccattttacagatgaggagaatgargttcagtgaggttaaagaacctgcccaaatcatatgcctaaaaagcagtacattcagggctaggcaaatgcaggccagcctgactccaagtcattgctct

SEQ ID NO: 151787 - DNA, 201 bp, Homo sapiens
acacacacacacacacacccctctcaccctatttatgctggagaatcttcaagtaaatcacaagcagtataacaatgtcattaagttcaaatacacatagyggagtgaaaactaaatgtagtagtgtctcactactcagctatctagtaatttcatttaactggaataaaccaaggacctgtaaataaacaaagagaacca

SEQ ID NO: 151788 - DNA, 201 bp, Homo sapiens
tcctttggagagcgagacactctagccagcccgctggataaagaaagccccatggttatcaggaagccctggtcctgggtaaaggcagtttttttttttttccaattttatttcccctggcaatggattggtggccacaacaacaggtacctgttgtgagctgttttccctcacaaatgcccattgtttgttcattacatg

SEQ ID NO: 151789 - DNA, 201 bp, Homo sapiens
  misc_feature (1)...(201): n = A,T,C or G
tgcctctgaggatatttctggctgtcgccaactccatggctttccaggtgaggatggagggtcctctctgtgttgggagacccagtgcagatggcagtatnggaggaggggaaagatgggctgacacccctccacccctgtcctagactcagtgttcaggccccaagcacgcccagtctgtcccaagtttttatctctttg

SEQ ID NO: 151790 - DNA, 201 bp, Homo sapiens
atcacaaatacacatgggggcactcagagatgagtaactcaaagggatggttacaccttggcttatatagcatcttaaaagaatagtaaagttttagagaratgacaaagacaaaggaaaaggactttgagtttctaaggcagcaagttgtgggaaggtaaatagtgggggagctaatggaagataagtgctaattgggaa

SEQ ID NO: 151791 - DNA, 201 bp, Homo sapiens
tcagaacaaattctactgcaagtagcagtctgagacttgatgaagacctacctctgccctttggacaccctgacagccccttgcatggaagacatgataamggtagtctcctaagggcacacacagctcaccttctattcagaatccagccacagaatcctgtcagtggtggcacacaggatggagcaaggccctaggtaa

SEQ ID NO: 151792 - DNA, 201 bp, Homo sapiens
agtttattaacatgcacatcacaaatacacatgggggcactcagagatgagtaactcaaagggatggttacaccttggcttatatagcatcttaaaagaayagtaaagttttagagagatgacaaagacaaaggaaaaggactttgagtttctaaggcagcaagttgtgggaaggtaaatagtgggggagctaatggaaga

SEQ ID NO: 151793 - DNA, 201 bp, Homo sapiens
ctacaccagaatcccatgttgtcagaacaaattctactgcaagtagcagtctgagacttgatgaagacctacctctgccctttggacaccctgacagcccyttgcatggaagacatgataaaggtagtctcctaagggcacacacagctcaccttctattcagaatccagccacagaatcctgtcagtggtggcacacagg

SEQ ID NO: 151794 - DNA, 201 bp, Homo sapiens
catagaaaagatagatttggctttggaaataagggctctttctcaacgttccaaagagagatgaacacaaatcccttctgtgcttcctccctccttcatgmccttctctttcattccatcttcctcctgttttcctccaaaagatcattgttttgtagctgggatctttttgttcagctgacaactcagctggtcttgagc

SEQ ID NO: 151795 - DNA, 201 bp, Homo sapiens
atttactgcagctttctgtgatttgtgggcagattgttgtttgtgttttgcttttaacctttcaagtaaggaatgatttgtcatgttcatgaaaaccacakgtattcagggaccgtttattcttagagttaagggtaaatcttgtttttagaaccaaataaatatagattgagatcaagatcagtcaaacacttctggaag

SEQ ID NO: 151796 - DNA, 201 bp, Homo sapiens
acaagtttattaacatgcacatcacaaatacacatgggggcactcagagatgagtaactcaaagggatggttacaccttggcttatatagcatcttaaaasaatagtaaagttttagagagatgacaaagacaaaggaaaaggactttgagtttctaaggcagcaagttgtgggaaggtaaatagtgggggagctaatgga

SEQ ID NO: 151797 - DNA, 201 bp, Homo sapiens
tcctaggttcaagcgattctcctgcctcagcctcccaagtagctaggactacaggcttgtgccaccacacctggctgattttgtattttttgtagagacgrggtttcaccatgttggccaggctggtctcaaactccggacctcaggtgatctgcccacctcagcctcccagagtgctggaattacaggcgtgagccacca

SEQ ID NO: 151798 - DNA, 201 bp, Homo sapiens
caggctcccaggatcaaaagaagaatgacagagctcctaggtcagcaaccagtggctcaaggcaggtttagctcttgtgggcatcttcattgtcttcatgkctcactttcttggcctcaagatttgctattgtaatcaggttttctcagcttggtaatatgtaatctttggtaaaccccagcttaggctttgagccagaag

SEQ ID NO: 151799 - DNA, 201 bp, Homo sapiens
attccccgcacacttcaggctatttcgtgacactgtgcttttgctcatgtttctttggcttagatcctcactcctcgaagtgtagttccaggaccagcagsatcagtgttacccaggagcttgttagaaaggcggaatctcatgccccactccagaccccaggtgattcaaatgcacagtaatggttttgagaagcactga

SEQ ID NO: 151800 - DNA, 201 bp, Homo sapiens
tattcttgggactctgggcttcttagatctgcaactttttgtcattcattaattttggaaaattcttagccattatatttaatttttttaacctgtttctstttttctttggaactctttttttttttttttttttgagacagggtctcatcactcaggcttcagtgcagtgacatgatcatagctgctaactgtagcctc

SEQ ID NO: 151801 - DNA, 201 bp, Homo sapiens
ttatttcaatgccatggccacagttaccctatctcttggtacttctgttttatacctcgcttcctactaatgccattccccgcacacttcaggctatttcrtgacactgtgcttttgctcatgtttctttggcttagatcctcactcctcgaagtgtagttccaggaccagcagcatcagtgttacccaggagcttgttag

SEQ ID NO: 151802 - DNA, 201 bp, Homo sapiens
gttttcagcagtttgattgtgatgtatctagattcattttttttttaaggagagaggtattcttgggactctgggcttcttagatctgcaactttttgtcwttcattaattttggaaaattcttagccattatatttaatttttttaacctgtttctgtttttctttggaactctttttttttttttttttttgagacagg

SEQ ID NO: 151803 - DNA, 201 bp, Homo sapiens
gcttgcttaattatgagtcagagctgtctcctgcataaaaccttttaacaacttcctcttgggaaaaattgcaactgttatttcaatgccatggccacagwtaccctatctcttggtacttctgttttatacctcgcttcctactaatgccattccccgcacacttcaggctatttcgtgacactgtgcttttgctcatgt

SEQ ID NO: 151804 - DNA, 201 bp, Homo sapiens
ggctggggaagagtgtcatagacacgggacagtatgtggttcagtttaagaagaggaagaagctcattctgtctagagtgtacacagtatccacttcaaaycctgaggggacaatatttttactcaaatatatgcaacttatggggccaggtctatgttcaacactccagccgcgtttatctctgggtaagtttccctctc

SEQ ID NO: 151805 - DNA, 201 bp, Homo sapiens
ttacagatttatgttctgcttttaggtaaatagggggagggcagagagctcttttgtatctgctgctgtgtaattgccttcagctcaaaataatctttatyctaaaaaggcatattttggagtagcatgttctgctcccttcatgttcaagaagatatgtttaaaattctttctcttaaacatatctctttccccccttcc

SEQ ID NO: 151806 - DNA, 201 bp, Homo sapiens
ctaacctgcattggttccttcagttatcataggtactacctggacagaaacgcccagttatttaaaggctttctttgaggagagcttgttcttgtgaaggsgacatcaaagggtcatcagagtggcaagtttgctgaccttgtcctcccctccctggggatggtctggccagctcacaggttgaggcccactggccaggaa

SEQ ID NO: 151807 - DNA, 201 bp, Homo sapiens
tatatagtatatataactatatatataaatgtataatatattatatgtttttaaatattatatataatataatatatgtattatataaaaatatataatayatatattttcccccttattctcctaggttcctcagctggggtcctgtaaattagattgacaaaagacagattagcaagagaaacataaacaagtttatta

SEQ ID NO: 151808 - DNA, 201 bp, Homo sapiens
cgagactctgcctcaaaaaatatatatattatacatttatatatagtatatataactatatatataaatgtataatatattatatgtttttaaatattatatataatataatatatgtattatataaaaatatataatacatatattttcccccttattctcctaggttcctcagctggggtcctgtaaattagattgaca

SEQ ID NO: 151809 - DNA, 201 bp, Homo sapiens
gtgcccatcgcttgtggagccacaggtcctaccgggccaagctgcctctgaggatatttctggctgtcgccaactccatggctttccaggtgaggatggarggtcctctctgtgttgggagacccagtgcagatggcagtatgggaggaggggaaagatgggctgacacccctccacccctgtcctagactcagtgttcag

SEQ ID NO: 151810 - DNA, 201 bp, Homo sapiens
gagcgagactctgcctcaaaaaatatatatattatacatttatatatagtatatataactatatatataaatgtataatatattatatgtttttaaatattatatataatataatatatgtattatataaaaatatataatacatatattttcccccttattctcctaggttcctcagctggggtcctgtaaattagattg

SEQ ID NO: 151811 - DNA, 201 bp, Homo sapiens
ggtgacagagcgagactctgcctcaaaaaatatatatattatacatttatatatagtatatataactatatatataaatgtataatatattatatgttttwaaatattatatataatataatatatgtattatataaaaatatataatacatatattttcccccttattctcctaggttcctcagctggggtcctgtaaat

SEQ ID NO: 151812 - DNA, 201 bp, Homo sapiens
cttgtagcttcatcctcatgcacatccttaataatttcctcagaataaatttctagatgcatttccataggatgtatttctatgtgcttttttttttttttgagatggagtctcattttattgcccaggctggagtgcagtggcatgatcttggatcactgcaacctctgctgcctgggttcaagcaattcttctgcctca

SEQ ID NO: 151813 - DNA, 201 bp, Homo sapiens
cagagcctgtcctccttccccttccttcctttgacctgtactctttccactgcttctaaaaggtacatgtgtggagagggggttgttcccattccccctcrttctttctttagcagctgattcccacgagcccacattccagggaagatggatctgccctccttcatatctcgctgcccatttttgcaggtgttggggcta

SEQ ID NO: 151814 - DNA, 201 bp, Homo sapiens
ggcggatcatgatgtcaggagatcaagaccatcttggctaacacggtgaaaccccgtttctactaaaaatacaaaaaattagccaggcatagtggcatgcrcctgtaatcccagctacctgggaggctgaggcaggagaattgcttgaacccgggaagcggaggttgcagggagccaagatcgtgccactggactccagct

SEQ ID NO: 151815 - DNA, 201 bp, Homo sapiens
tttaaaaaatcaaatcagagaagccatgagagctctcatgagtacatcttttaaaaaaagtgagagagtcatgcaaatcaaaaccacaatgagataccatmtcacaccagttagaatggcgatcattaaaaagtcaggaaacaacaggtgctggagaggatgtggagaaataggaacacttttacactgttggtgggacta

SEQ ID NO: 151816 - DNA, 201 bp, Homo sapiens
agtcccagctactcgggaggctgaggcaggagaatggtgtgaacccgggaggcagagcatgcagtgagccaagatcccgccactgcactccagcctgggcracagagtgagactccttctaaaaaaaaaaaaaaaaaaagaagggaaaaaaatacatatattttcctttgggaggccaaggtgggcggatcatgatgtcag

SEQ ID NO: 151817 - DNA, 201 bp, Homo sapiens
aaatgcaactgagaggtggggaggacttaatcctcacctgcatcctgtcaacagtggccacatgacataggtgattttgctcacccacagggtgatgaggkctgatgaccaccctcatctaggacagtaatctgtcttagtctgttttgtgctgctatgtcagaatactgggtaacttcaaatgaacagaaattcattttc

SEQ ID NO: 151818 - DNA, 201 bp, Homo sapiens
gcctgtagtcccagctactcgggaggctgaggcaggagaatggtgtgaacccgggaggcagagcatgcagtgagccaagatcccgccactgcactccagcytgggcaacagagtgagactccttctaaaaaaaaaaaaaaaaaaagaagggaaaaaaatacatatattttcctttgggaggccaaggtgggcggatcatga

SEQ ID NO: 151819 - DNA, 201 bp, Homo sapiens
taaaacaaaacatatttattttcttacagtttttgtgggacaggagtccaggtacagcttagctggatcctctgccccaagatctcccacggggctgcagygtgttggtcagggctacaatcttgcctgaaggctcaactgaggaaggatctgcttccaagctcactcatgtagttgttggtaggatttggttccttgagg

SEQ ID NO: 151820 - DNA, 201 bp, Homo sapiens
ccgggcgtggtggtgggtgcctgtagtcccagctactcgggaggctgaggcaggagaatggtgtgaacccgggaggcagagcatgcagtgagccaagatcscgccactgcactccagcctgggcaacagagtgagactccttctaaaaaaaaaaaaaaaaaaagaagggaaaaaaatacatatattttcctttgggaggcc

SEQ ID NO: 151821 - DNA, 201 bp, Homo sapiens
cctcctctcctcagttctctggggaaaaacagctccccactgcacaccctgagccacagcccagcacccagatatcaaagactctgcagctgagagcctakggggcagctctcaccatcaaagggagctggtggggaggtggggcgggtggagtgtgaacaggactctgagttcacatgaaaggatgacattgtctcctga

SEQ ID NO: 151822 - DNA, 201 bp, Homo sapiens
gaggcaagcggattacgaggtcaggagaccgagaccatcttggctaacatggtgaaaccccgtctctactaaaatacaaaaaattagccgggcgtggtggygggtgcctgtagtcccagctactcgggaggctgaggcaggagaatggtgtgaacccgggaggcagagcatgcagtgagccaagatcccgccactgcactc

SEQ ID NO: 151823 - DNA, 201 bp, Homo sapiens
gccagagcccagaactgactttcaaaacacttgaactgactggaaaagcagacatcaaagtacagtgccttcttccatgttccccctcctcaacccagggrtcaccctctcccaagaagccttcaccctctgttggcttccccctcctctcctcagttctctggggaaaaacagctccccactgcacaccctgagccacag

SEQ ID NO: 151824 - DNA, 201 bp, Homo sapiens
aaatacaaaaaattagccaggcatagtggcatgcgcctgtaatcccagctacctgggaggctgaggcaggagaattgcttgaacccgggaagcggaggttkcagggagccaagatcgtgccactggactccagctgggtgacagagcgagactctgcctcaaaaaatatatatattatacatttatatatagtatatataa

SEQ ID NO: 151825 - DNA, 201 bp, Homo sapiens
tggaggacattatgctaagtgaagtaagccaggcacagaaagacaaacgctgcacgatctcacttctatgtggaatctaaaaaagttgaacgaagtagagyagaatggtggttaccagaggctggggcaggggggttgttgagagatattggtcaaagggtacaaattttcagtctgactagaggaacaagttcaagaggt

SEQ ID NO: 151826 - DNA, 201 bp, Homo sapiens
acggttctagtttaatgagaacttaaaaaaaaacagtctgttattctggcttaaagttatgtcccgaaaccatgtaaagaaaggtattacagcactgtctraattctggggctttcactcacttgtctgaatagaaactccttttgcagtagaagcaatgtgtatctaaaatgtgattttattttctggtttacaattgct

SEQ ID NO: 151827 - DNA, 201 bp, Homo sapiens
tatgtgccggtgcttactgcttgccaggcacggttccaattttgcatgcagtaccccttttaatctttacaacaaacccaggaggcaggtactattttccstactttacacatgaagaaaccaagctttagagaaattgtcacagtgataagtgatttatcagggattcaatcccagggccattttagccatgatgctgta

SEQ ID NO: 151828 - DNA, 201 bp, Homo sapiens
gagtgcctgtctgaagtgagccatgtatatactgaatgaagtcctggaacgatccaaaatcttgccttcttttttgtttgaattacaaactgtgtggtgcagtagcagagtagtaacaacgtatgctataattttgtgtttcttagtgatctgctatgactttcatgcttattgctatataagctgtaaatcaaccaggaa

SEQ ID NO: 151829 - DNA, 201 bp, Homo sapiens
tgagtaatgtatgggtaggatgagtggatatgatgcacaagggaagggccagacttaaagagagagtggcttggccatgtgcagtcatgtagcgatcatasagtacccaggctcagatgctggatggtaggtagaggtggcggagcctggggaagttctgatattcttactgaaatcagaagcaaagttatcaggtgagta

SEQ ID NO: 151830 - DNA, 201 bp, Homo sapiens
tgctagcagcagtccctccttcatgagctcatgcttcaggtgctcctgtatacctgggtctctccttcagagtccctgtcacccagtaatgatttgttcartgtttacctagagactgcccatgagtaaagggactacacctatcttgtctggacctggataagagcagttttgattgggggcagctatgaggggagaaag

SEQ ID NO: 151831 - DNA, 201 bp, Homo sapiens
ctcccttcattttacccccacagccccctgccctggagccaaaccaaaccacttgctcctgcttgaacacacacagccttcacacctccatgccttgctarcagcagtccctccttcatgagctcatgcttcaggtgctcctgtatacctgggtctctccttcagagtccctgtcacccagtaatgatttgttcaatgttt

SEQ ID NO: 151832 - DNA, 201 bp, Homo sapiens
tctactaaaatacaaaaaattagccgggcgtggtggtgggtgcctgtagtcccagctactcgggaggctgaggcaggagaatggtgtgaacccgggaggcrgagcatgcagtgagccaagatcccgccactgcactccagcctgggcaacagagtgagactccttctaaaaaaaaaaaaaaaaaaagaagggaaaaaaata

SEQ ID NO: 151833 - DNA, 201 bp, Homo sapiens
tactcagcccaacgtcttccatttccgctcattatcactcatcttccacagccttcagatctatcgttctaaatctgatcacatgatttttttttttttttcagacggagtcttgctctgtcacccaggctgcagtacagtggcatgatcttagtgcactgcaacctctgcctcctgggttcaagcaattctcgtgcctca

SEQ ID NO: 151834 - DNA, 201 bp, Homo sapiens
cagcaacagtaatcttaataaaatatagtctcacatttcctccaagtagctagacgttcttaaggctttagacacagccttcattgtatgtaatagtggcsatttttctttttgtccttgcacctgtgtaagcagggcactaaatcttgtaggtctcaccctgatttgcctctttgcagcagcaaggacacctgagtctct

SEQ ID NO: 151835 - DNA, 201 bp, Homo sapiens
aagtgagggaggccagtatgggatacaggaaagagggaaagcattgactcctttccactagtaagcatttgcctccttcatcaagccagtgccacatttcygcatccttcggcttccttcttctggtctgatccttcttgccccataagcttggcattctctgatggttatttttgctgtgttatctacctctaacagcaa

SEQ ID NO: 151836 - DNA, 201 bp, Homo sapiens
attcacagaaagcagaaaaggatgaagatatgaaaaagaacaattagacaaaaagaaaatatgtagcaaaatgatagatttaaacagccatattaataatrgcaccaaatgtaaatgatctaaatcagggctgtccaatacaacttcctgtgatgatgcaactgttctttttatctgtgttcttttctacctagtcacatg

SEQ ID NO: 151837 - DNA, 201 bp, Homo sapiens
aggctgggtctctggggggtgtgcatgtcaaggagggagacttgtgtgcgaggcagcaccctcaagtacagctcatgctgttagcagcagcatgcagtggyggttgtgtagaagagaacaaaacaccagaactttagtgcagctcaggaatccttaaccttatgtggctctctgtgggttctaagtctcccttcagaaatc

SEQ ID NO: 151838 - DNA, 201 bp, Homo sapiens
cctgggcaacagagcaagaccctgtctcagaaaaaaagaaaccccaaaagtatgttgtaaaatgaaatataatattactattaagaatgatttttttttttgaggcaaagtctcactcttgtcccccagactggagtgcaatggcgcgatctgggctcactgcaacctctgcctcctgggttcaagtgattctcctgcctc

SEQ ID NO: 151839 - DNA, 201 bp, Homo sapiens
ggctggagtgcagtggcacgatctcggctcactgcaacgtctgcctcctgggttcaagcgattttcctgcctcagtctcccgagtagctgggaccacagaygcacgccaccacacccagctaattttgtatttttagtagcgacagggtttcaccatgttggccaggatggtcagtctccgtctcttgacctcgtgatccg

SEQ ID NO: 151840 - DNA, 201 bp, Homo sapiens
tttaactggaataaaccaaggacctgtaaataaacaaagagaaccattattagacactatatgccagaatgatatacatttttgcatggaatcctcgaaaygccaaagcacatgttccatcctgtacctccatagaaagagatcttcgaatcaatgtcatgatcctcataattttgtactcttagtctcggcacgaccgac

SEQ ID NO: 151841 - DNA, 201 bp, Homo sapiens
gggtgagtggcttttagtctaagctggcaagtaagaaagaattgagaaagagaggaagtgtgctgggatgtgttcttccccaactggggatctttcttatmggcaaaaaaataaataatcaaaagccatgaaacagacagtgataactttttttttaaatggagtctcactctgttgccaggctggagtgcagtggcacga

SEQ ID NO: 151842 - DNA, 201 bp, Homo sapiens
cttggccaaatttctaaactccattttgcctcatctgtaaaatggggttggtgaagattaaatgagataagacataggcagtgctttttagggtcacagcrtatcctaagtactcaacaagtgccaactgtaataataatgggagccatttggcatctataacttggaactgctatgtagttgtatctactacagtggaga

SEQ ID NO: 151843 - DNA, 201 bp, Homo sapiens
gctgggtgatcttggccaaatttctaaactccattttgcctcatctgtaaaatggggttggtgaagattaaatgagataagacataggcagtgctttttasggtcacagcgtatcctaagtactcaacaagtgccaactgtaataataatgggagccatttggcatctataacttggaactgctatgtagttgtatctact

SEQ ID NO: 151844 - DNA, 201 bp, Homo sapiens
catcctctgagaggccatatgttgtagtgtcagtccccacctctgttattactagctgggtgatcttggccaaatttctaaactccattttgcctcatctrtaaaatggggttggtgaagattaaatgagataagacataggcagtgctttttagggtcacagcgtatcctaagtactcaacaagtgccaactgtaataat

SEQ ID NO: 151845 - DNA, 201 bp, Homo sapiens
cagtcaacccgcaactagtaggggtaagattattattttttagtgattatatttaaaaatagcacacttggggaaaaaattacagtttgctacaaatcatsaaaacatttgcccatcctctgagaggccatatgttgtagtgtcagtccccacctctgttattactagctgggtgatcttggccaaatttctaaactccat

SEQ ID NO: 151846 - DNA, 201 bp, Homo sapiens
gggatttatttattctaagaccccagcaatcctgtgcccacctctagtttcttgctgctggggtctctctgcctctccagtaggtggccctgtgagacagracccggtcagacctcacaccagctctctcttctgagtggccacgtttggtccccagggcacactctactcaggaaaacccagaaaggcagactagctcct

SEQ ID NO: 151847 - DNA, 201 bp, Homo sapiens
gaatggtgtttgggacacccttattttttttttattaatgaggaaattgaggcccagagtgatgagtaacttgtcaagggccttccagttcctaatctagsctctggatgctgaaaataacccagatagaagccagaggaagcccatcggttcagcacaggccggcctcctggggcacagagcagcatgagaagggagggt

SEQ ID NO: 151848 - DNA, 201 bp, Homo sapiens
aaatctgtggaggagagccactctatttcttgggtcgttcttgggttgatcccaccccttccctctagttcttcctctttcttttgcctttttttttttttcttgagaccgtctcactctgtcacccaggctggagtgcagtggcacaatctcggctcactgcaatctccacctcccgggttcaagcgatcctactgcctc

SEQ ID NO: 151849 - DNA, 201 bp, Homo sapiens
acctattcccacgtccctgtgcttccacctcactaagagccacagacaccattttggagtgtcaagatcttgcctgattttgcatatatatatatatatawaattttttaaaattcaaggtcaaccttgagagatattgcttgtattctgccttctgttttccctaatccttatagaactacaaattcccatacatgagca

SEQ ID NO: 151850 - DNA, 201 bp, Homo sapiens
tataagccagagttatgacccctgtcttgtcagtatgaggttctagaatatatgtgtgtattttaaagctcctcagaaaattatgatacaggtagcctggygccagaatggtgtttgggacacccttattttttttttattaatgaggaaattgaggcccagagtgatgagtaacttgtcaagggccttccagttcctaat

SEQ ID NO: 151851 - DNA, 201 bp, Homo sapiens
tgttccaattatccttgaattatagtgacagcttttggtttatgcaggccttcaaatcatcctaacctagtagaagaagtaaaatgatgcctttattgacmagaacatttcagctggctggttttaaaagactctcttcttcccacctattcccacgtccctgtgcttccacctcactaagagccacagacaccattttgg

SEQ ID NO: 151852 - DNA, 201 bp, Homo sapiens
ctgaataattaatgaaaaggaaattcagtgggtccatagcacagtaaattactcactttgttctcaattttccctaatggtgatttcgatagttgcataasatggagagagagaggttgtgatgggagttatcctgaatcagaagcaatgaatgtgtttgctcttccccatttcacctcagagaacctgagcagtctgagg

SEQ ID NO: 151853 - DNA, 201 bp, Homo sapiens
cctatagtgatataaaatgtatgcacatcttcctctaacacacacaaacttactgcccaagataaaataaaaactgaataattaatgaaaaggaaattcartgggtccatagcacagtaaattactcactttgttctcaattttccctaatggtgatttcgatagttgcataacatggagagagagaggttgtgatgggag

SEQ ID NO: 151854 - DNA, 201 bp, Homo sapiens; identical to SEQ ID NO: 28234

SEQ ID NO: 151855 - DNA, 201 bp, Homo sapiens
ttatttacctataactttttttctcagccatttgaaagtaagttgcagatgttgtggccatttacacctaaatgattccatacacatcccctaaaaataakgatattatcataacctaatctaatatcttgtccagattcagatttcatgtgtcctcagactatcttttataattgttttttgttttgagctaggagctag

SEQ ID NO: 151856 - DNA, 201 bp, Homo sapiens
caacttaaagcgatttggcaagaataaaaatgtgtgaagaaacctcttgaaactggagtttgtgaactaggtcaggctgccttaatgatgcagtccctaaytagagaactgaagggggtttcatggtatcttgaaagaatattgcattattaaatttcatcttttttttctatttaagccagaaacattgtgataacaaca

SEQ ID NO: 151857 - DNA, 201 bp, Homo sapiens
aaggaatgaatgaataattgtattttgataagtcaactcattaaaattaggttggaatttatgcataagaaccaagtgaaggtcagaaaaccaagccttgkaatatgctgcaaagaaaaaaaaaagtctgtcttggggttattcacagcaacttaaagcgatttggcaagaataaaaatgtgtgaagaaacctcttgaaac

SEQ ID NO: 151858 - DNA, 201 bp, Homo sapiens
tggggaaatgcagggtctttccaagtttttattgcagttagcatccttgtggttaaatctctgaacacaaccatgatttccttaagataaactccagaaartgaattgttagatgaaaatatatgcacaattttagggtttttgatatgtagtgctcatttgcccttcacacactttctgcccatttcacattctcaccag

SEQ ID NO: 151859 - DNA, 201 bp, Homo sapiens
ctgtatggggtaaacaggggtgtcatgtggagctgtctcagtggaaggggtatgtagttcctggaaaaagttgccatgcaagaaagagaggtggcctgacrttgccagatctttccatgtttcaggagaagccagaaaaagagattttaaaatttgaaattccctatttttaattgttggatcagttttttaaaaaatctg

SEQ ID NO: 151860 - DNA, 201 bp, Homo sapiens
attgttttctaggccctttcttccccctcaatttttaactcatggaataaaggagatctagttcaggagactagaataatggtcacatcactgaccaaaarccctccaaagcccaaattggaaagatttccagaagaccaacttatttgccaagatgactgtctatgccattttaaaagtatgtgttaaatatgtggtttt

SEQ ID NO: 151861 - DNA, 201 bp, Homo sapiens
acatattgtgggctgtgagcactgtgcctactgtgtctagtgggtaagttagccctggtaatgtcctagattgaggccaggcaggtaataaatgaagaggrttgattcagagtgcatgtactactgtatggggtaaacaggggtgtcatgtggagctgtctcagtggaaggggtatgtagttcctggaaaaagttgccatg

SEQ ID NO: 151862 - DNA, 201 bp, Homo sapiens
tttgtttttgttttaagatggggtctcactctgtcacctagaccggaatgcagtgccatggtcacagctcactggagcctcaaaatcctgggctcaagagwtcctcctacctcagcctctctgagtagctggaactacaggcatgtgccaccaccacacccagcttttttatttttaatcactttgtagagatgggggtct

SEQ ID NO: 151863 - DNA, 201 bp, Homo sapiens
gttttttgtttgtttgtttgtttgtttttgtttttgttttaagatggggtctcactctgtcacctagaccggaatgcagtgccatggtcacagctcactgsagcctcaaaatcctgggctcaagagatcctcctacctcagcctctctgagtagctggaactacaggcatgtgccaccaccacacccagcttttttatttt

SEQ ID NO: 151864 - DNA, 201 bp, Homo sapiens
tccactgactggatggcagattaaaatgtgagggtttgacaaaaagataatggagccgtgccagcctttagtgtttcaggcataaaattaaattcaacatkgtatcatgcatttgaagacttgtcatcataaggctggccagacaaatatgctttagagggtttggttttgagaatgagtaggagaaataaaatatgaaat

SEQ ID NO: 151865 - DNA, 201 bp, Homo sapiens
gacctggaatactttataggggtggagtaacttgttttcttgggggaggatgggggtggggatgggaatagatacttggattgtcccttagatgtgtggggaaaagctgttaggaagtaggaggtgaaaaaggaccctggagaaagcctcaaataagtagctttgggcacaaaccttaacctgcaccttgggagaggaaca

SEQ ID NO: 151866 - DNA, 201 bp, Homo sapiens
gaaaatcttaaattagccagagagaaaagaacagtatagttggccctctgtattcatgggttctgcatccatggattcagccaactgcagatcaaaaatayttggtggggggcatgcacagtggctcatccctgtaatcccagcactttgggaggccaaggcaggcggatcacttgaggccaggagtatgagaccagtctg

SEQ ID NO: 151867 - DNA, 201 bp, Homo sapiens
aatggggaagagagagaagcgcgaaagaactgagtggatgtgtgtgtgctcacagggcgaggattccatgcaaacaaatacataggcttctccaggtccasttttggtgaggggacaggaaaaggggcagatattgttcagctgggatttaaggtgaagatcatgctccctggaacaacccaaaggctggaagattccatc

SEQ ID NO: 151868 - DNA, 201 bp, Homo sapiens
gcttgaacctgggaggcagagattgccatgagctgagattgtacggctgcactctagcctgggcaacaagagcgaaactccatctcaaaaaaaaaaaaaaagattagctagttggcaaacttaattccacctgtgagcttaattaccttctgctctgtaatgtaatacattcacagataccagtatgtggacatctctggg

SEQ ID NO: 151869 - DNA, 201 bp, Homo sapiens
caggcgtggtggcgcatgcctgtaatcccagctacttgggagctgaggcaggagaatcgcttgaacctgggaggcagagattgccatgagctgagattgtrcggctgcactctagcctgggcaacaagagcgaaactccatctcaaaaaaaaaaaaaaagattagctagttggcaaacttaattccacctgtgagcttaat

SEQ ID NO: 151870 - DNA, 201 bp, Homo sapiens
aggagttttctaagtattcattctgtaccctcggcttttagctgtccctgcacacctgtgtcacaaagtagatctttccctatgctcttgctcctacacawagggtggacttctgttgtttgtgtctctgtgcatggctgtttataagagtagagggtttcttcattgttctggtccagtatcagtcttaggcaacgctcc

SEQ ID NO: 151871 - DNA, 201 bp, Homo sapiens
agtatgtgtgggtggaagaggttggggttgggtcaattaatcagaagttgagctgagtttagattttactgctgctattattatccttagtgcaccacagrcttcactggatggctacccttactacgtgcttagagcctgatgtgccagaggagttttctaagtattcattctgtaccctcggcttttagctgtccctgc

SEQ ID NO: 151872 - DNA, 201 bp, Homo sapiens
gcctcaacctcctgggttcaaagtgatcctcccacctcagcctcccaagtagccagggctagagatgtgtgccactgcacccagctgttttttgtttgttkgttggttttttgtagagatgggggtctcactatgttgccagggctggtcttgaactcttgggatccagcgatcctcctgccttggcctcccaaagtgctg

SEQ ID NO: 151873 - DNA, 201 bp, Homo sapiens
gaggtggagcttgcagggagccgagattgcgccactgcactccagcctaggcgacagagtgagactccgtctcaaaaaaaaaaaaaaaaatggacagaatrcaaactccaactagaggaaaaacctgcatctgaaggcttgagctcacaaaaatgcctgcttgagagtttctggccaaagggacagttagtcaatgccctg

SEQ ID NO: 151874 - DNA, 201 bp, Homo sapiens
aataatagcacataagcttttgcctcgagtcctgccatctggggaacccaggttaagacattcctcactatcaaggaaggtcaagtttgtttcataaactstgattaagagggcaaaaaaaatgagtaatgatttccatatacaatttatgtatttattttctactcctcttactatcattcccaacataaacaatttttt

SEQ ID NO: 151875 - DNA, 201 bp, Homo sapiens
aagcgccgcacgggcgctcctgattggctgtagctaagcagggctttcttccgcgctccttcggagcgctccctccagcgtcgccggccccgttccatttycacagctcctcctccccggccgcgcgcccctcccgccccgcgcgcgcctcctctttctcgcggccgagttcagcccgggcagccatatgggggatacgcc

SEQ ID NO: 151876 - DNA, 201 bp, Homo sapiens
aacatctgtgggggaataagaagcagaattggacagagagagaagctgaattgcagtgcagttacaacagaggcctcagcctatatgctacagggagctgygaaacggggcagtcctttgaggttttttgtttgtttgtttgtttgtttttgtttttgttttaagatggggtctcactctgtcacctagaccggaatgcag

SEQ ID NO: 151877 - DNA, 201 bp, Homo sapiens
gatggagtttggctcttgtcacccatgctggagtgcagtggtgcaatttcggctcactgcaacctccgcctcccgggttcaagtgattctcttgcctcagctcctcagtagctgggattagaggcacctgccaccacacctggctaatttttgcatttttagtagacacctagtgtttcaccacgttggccaggctggtct

SEQ ID NO: 151878 - DNA, 201 bp, Homo sapiens
ttttcaagtgactctcaactacaggaaattctttaccaaaaaagaaaaaaatgcatcaatatagactgaatcagtacaattgtcaagttttccccagttcratactgaaaggcaggttaaggcttacagactaccaaaattttattgatttttgtatcaatttattaaaaaaatctctaatcctctgtaaattggtgaaac

SEQ ID NO: 151879 - DNA, 201 bp, Homo sapiens
ccgggctggagtgcaatggcgcgatctcggctcaccacaacctctgcctcccaggttcaagcgattctcctgcctcagcctcctgagtagctgagattacrggcacctgccactatgcccggctagtttttgtaatttttgtatttgtagtggagacggggtttcactacgttggcgaagctggtcttgaacttctgacct

SEQ ID NO: 151880 - DNA, 201 bp, Homo sapiens
tggttataaagtgcttagcacagtgcctggtacatagtaggtgctcaatatacatatttatagtaatattgaaatgggagagttccctttccccctcgccrggagtgtgacaggagtgatggacagcaagatggatggggagccagaagcaggggatggagtgggaaggtcgtctttcttggggggcaggttgcccagact

SEQ ID NO: 151881 - DNA, 201 bp, Homo sapiens; identical to SEQ ID NO: 28220

SEQ ID NO: 151882 - DNA, 201 bp, Homo sapiens
taactgtgagactcaggcaggctttaaccttcccaagtgccagtttcctcatttgcatttctaatgaatatcatctatccctcagagtgattgtaataagyatggttataaagtgcttagcacagtgcctggtacatagtaggtgctcaatatacatatttatagtaatattgaaatgggagagttccctttccccctcgc

SEQ ID NO: 151883 - DNA, 201 bp, Homo sapiens
ataggaagccttgcaagggctggcataacaaaaatgacagctggtatctatttgatcacttactgtgtgccagccacaattttaaataccttaataaacakctcatttaatcttcacaaaatcctgtgaggaagctacggttatcacccccattttatataagagaaacgtaagtgaggtttggagaagttaagtagttaa

SEQ ID NO: 151884 - DNA, 201 bp, Homo sapiens
  misc_feature (1)...(201): n = A,T,C or G
agctggtgcccatcgcttgtggagccacaggtcctaccgggccaagctgcctctgaggatatttctggctgtcgccaactccatggctttccaggtgaggntggagggtcctctctgtgttgggagacccagtgcagatggcagtatgggaggaggggaaagatgggctgacacccctccacccctgtcctagactcagtg

SEQ ID NO: 151885 - DNA, 201 bp, Homo sapiens
tacagccgcgtaccaccatgcccggctaatttttgtatttttagtcgagatggggtttcactatgttggccaggctggtctcgaactcccgtcctcaggtsgttcgcccacctcggcctctcaaagtgctgggattacaggcatgagccaccgtgcccagcctcttttcaccttttattttattaattttttctgtagccc

SEQ ID NO: 151886 - DNA, 201 bp, Homo sapiens
gcacagctttttttttttctagatggagttttgttcttgttacccaggctggagtgcaagtgcagtggtgcgatctcagctcactgtaacctctgcctccygggttcaagcgattctcctgcctcagccttcccagtagctgggattacaggcatgcactgccatgcctggccaattttgtatttttagtagagacagggt

SEQ ID NO: 151887 - DNA, 201 bp, Homo sapiens
tctctggagacattccagagctttagaacaaacatgcagacagtcttacagctgcagttgcctgagccttaagggccttgctactcaaagtgtggtcctcrgaccgccagcatcagcatcacctgggagcttgttagagaaaacaaatctcagacctcaccgaccccacggaatcactatctgcattttaacgacatctcc

SEQ ID NO: 151888 - DNA, 201 bp, Homo sapiens
tggcctcctcccctttgcttcccctcctacccttctgactccttgtagcttattttagaacatgtcgggatcctgcttctcttgtcaacaaaaggctgttrttaaaatctttcagccggcagcagcaatgtttaattcatggactagaaaattaattttattttcatgaatagagctgaggaaaaatagcaaggagactct

SEQ ID NO: 151889 - DNA, 201 bp, Homo sapiens
tgggaatccagcttgtctatttaacagatgaactggcaacagtggggaggcctgaggggagggctgccttctacaaacttgtgtagcaaattgtattaggrtgcttttggctgcaggtatcacaaaattcagcttcaaatggcttaaaagaaaaggaaaatttctaatttcactgataaaaaatcttgagatagggcactt

SEQ ID NO: 151890 - DNA, 201 bp, Homo sapiens
taggatgcttttggctgcaggtatcacaaaattcagcttcaaatggcttaaaagaaaaggaaaatttctaatttcactgataaaaaatcttgagatagggyacttttaggatgacccagaaatgccatcaaatagcaggtttgttttctgccatggtggcttgttgcattcagttttcctcatggttacaaggtggccgcc

SEQ ID NO: 151891 - DNA, 201 bp, Homo sapiens
tttaataagtaaatataaggacccagttcttacagtaactgactcatatataatgactcagacaagaccgagactcctacctcaatcgaccctcttggaamaacacagagcatccactgttgtttctcgagatcatgctcatgccatgagatacctcttaggcaccactgcacactctctctggacttcctctgtcctagg

SEQ ID NO: 151892 - DNA, 201 bp, Homo sapiens
agtaccacaaactgggtgacttttaaatggaagaggaagaaatttatttctgagttctggaggctgggaagtccatgaacaatgcatcggtagattggcgkctggtaaggacccacttccttattcatatatggtgccttctttctgtgtcttcacatggcaaaaggggtgaagggtctcttctctctccagccttttaaa

SEQ ID NO: 151893 - DNA, 201 bp, Homo sapiens
attatttctttctttcttatacctagccaactcttattcattcttcaaaactcacctttaagaagctaaggtcagtagttctcaaaatatagtccaaagastcttggtcagtgggtccccaagaccctttcagagggtctgtaaggccctcttgtccaactaccatctgtgtgagacagactttcttcatagacttcaacc

SEQ ID NO: 151894 - DNA, 201 bp, Homo sapiens
ttttttcctttttaaatctggccttcctgagtaaaaaatctggaaatttacttttgatattctctactgcacagtggaaagtctaatgtcatcaggcatcyttgccatgtcctctttagctatttttttccccctttggattagattgaagcaaattccaggcaattgtatctgtaaattactaagtatcaagtattggca

SEQ ID NO: 151895 - DNA, 201 bp, Homo sapiens
ctcttttcggtggactcttgagattgatgacctttgctcaagtcccagataacactcaaaggctgcgcgtgggagaaaaatcacctcatggtcaatttcartttctacagtttcagtggagaccccacttaggtatgttatcaatcatggatagtgaagtaatggaggcacaaaatacagaatgggttcaagcgagggcac

SEQ ID NO: 151896 - DNA, 201 bp, Homo sapiens
tcaaatatcaatgagcttgaaaatgaaacaagacatgaatagagtttagaaatcaggtttaaatttattttcttcctatatcactacctattctatcaagrttgtcacacacttggctatttgggctgtgttggttttagcttggttctctgaagagacagtggcttacaaatgcagcctatgacctaaattggaaaggcc

SEQ ID NO: 151897 - DNA, 201 bp, Homo sapiens
attaaaaatatatatatatatatatatgtgtgtgtgtgtatatatatgtgtgtgtgtgtgtgtgtgtattatacatatatatatatatatatatatatatwgagagagagagagagagagagagagagagagagatggggtcttgctatgctgcccaggctggtcttgaactcctggcctcaagtgatcctcctgccttga

SEQ ID NO: 151898 - DNA, 201 bp, Homo sapiens
aattaaaaatatatatatatatatatatgtgtgtgtgtgtatatatatgtgtgtgtgtgtgtgtgtgtattatacatatatatatatatatatatatatatagagagagagagagagagagagagagagagagagatggggtcttgctatgctgcccaggctggtcttgaactcctggcctcaagtgatcctcctgccttg

SEQ ID NO: 151899 - DNA, 201 bp, Homo sapiens
ttagagtactgctcatttgctttattcccttgctctttcctctgtacatgcatgtgcattcttacgtgttctttttttatgaatcatttgggagtaagttrtagacatcatgcccctttattcccaaatacctcagtgtgtatttcctaataacaaagacactttcacatagacagaatacacttaccaaagtcagggatt

SEQ ID NO: 151900 - DNA, 201 bp, Homo sapiens
atgatcctcctgcctcagcctcctgagtcggactacaggcacacaccaccatgcctgattaaattaaaaatatatatatatatatatatgtgtgtgtgtgtatatatatgtgtgtgtgtgtgtgtgtgtattatacatatatatatatatatatatatatatagagagagagagagagagagagagagagagagagatggg

SEQ ID NO: 151901 - DNA, 201 bp, Homo sapiens
aatgatcctcctgcctcagcctcctgagtcggactacaggcacacaccaccatgcctgattaaattaaaaatatatatatatatatatatgtgtgtgtgtgtatatatatgtgtgtgtgtgtgtgtgtgtattatacatatatatatatatatatatatatatagagagagagagagagagagagagagagagagagatgg

SEQ ID NO: 151902 - DNA, 201 bp, Homo sapiens
atctatctatctatctatcattgactttcaaattctgcccaactagttctgccccactaagaacatggatttttgtgataatgaaaactttctcttacaakcagagggccaatatttgctataaaggactgagagagctacatttcatatgtgactgtaataaccaacattttagggggaaaatgtgatgttaagagtctt

SEQ ID NO: 151903 - DNA, 201 bp, Homo sapiens
gtgctccacacagacgtcctcttcagatgatgctcccacgtcttggctgtggtcctttctggaaattgcccttggccacagagagctgcctcgcccaagcrtttgccctcccaggggctccctgaggccaatgcccagatgatgcaaggataatacctttcaatttcatataggtcttaagatcatctggcccagaacgcc

SEQ ID NO: 151904 - DNA, 201 bp, Homo sapiens
gagcatgattcatacatatttgtgaaatgtaagtaccttttctctcttactgctgcaaactgctgacagcaatgtattatgagacccctcgtcagttgacrgttgaagtggaaatattgttgtaagtaatgaatttgttgatagctgttccattacccagaatgaatatttagattagtcatgtgcaggctgtcatgtcag

SEQ ID NO: 151905 - DNA, 201 bp, Homo sapiens
agtcccttttaaaaatcaagagcatgattcatacatatttgtgaaatgtaagtaccttttctctcttactgctgcaaactgctgacagcaatgtattatgrgacccctcgtcagttgacagttgaagtggaaatattgttgtaagtaatgaatttgttgatagctgttccattacccagaatgaatatttagattagtcat

SEQ ID NO: 151906 - DNA, 201 bp, Homo sapiens
agatgacccagttaagaatggccttgctggccaggcgcagtggctcacagctgtaatcccaacacttggggaagccaaggcaggtggatcacctgaggtcrggagttggagaccagcctggccaacatgatgaaaccccgtctctactaaaaatacaaaaattagctgggtgtggtggtgagtgcctgtaatcccagctac

SEQ ID NO: 151907 - DNA, 201 bp, Homo sapiens
tcaggttcaggctgggtggtttttgagaggaagtgggaaaagacacttgccttttccatcaccttaaaatcaccggggacccagcccttgagtgtgaaatycactgtggcaccccccagcagtggtgagccaagtgtcggcctggctgccctgagagccccacgcagccgctgatggagaacctgacacgggataccgcct

SEQ ID NO: 151908 - DNA, 201 bp, Homo sapiens
ctccatccagacctacagaattagtatctctgggggccagacccaggaatctgcattttatcaagtgttgctggtggttcttatagccagggggttggagrcattcaggccccgaagcaggtggcctgggagtgatgctgtgtccccatcaggtgaacatcacccttctcccacctcagtattgttgtgtggctctcctta

SEQ ID NO: 151909 - DNA, 201 bp, Homo sapiens
ctacagaattagtatctctgggggccagacccaggaatctgcattttatcaagtgttgctggtggttcttatagccagggggttggagacattcaggcccygaagcaggtggcctgggagtgatgctgtgtccccatcaggtgaacatcacccttctcccacctcagtattgttgtgtggctctccttagagtgactgaaa

SEQ ID NO: 151910 - DNA, 201 bp, Homo sapiens
aatagctgaagtgctaattaatctcccaagtctccctttggccagggccatttctggtggatattaattgggcttatgagacagatgaagtattttaaggwgcaaaagaagttctccaggcactgttgtgataatgctgaatgtgcaaattggtgtttttagtctctgttcagatttgagagcagtgagggagcccttttt

SEQ ID NO: 151911 - DNA, 201 bp, Homo sapiens
gagagaaaacttgacccagtgaatccatttggtggcaaaactgacctatttagtctgaatagtcatattgtgtttgatgatggactcactgtgggcattaytgtagtgcaaatgcactatacaaaaatctgaaaaattgtgaaccttgaagcacatctgaccccaaggttttgggtaaggaatgacagcctcgtcctggtg

SEQ ID NO: 151912 - DNA, 201 bp, Homo sapiens
agtgatttgcccaaggtcacagagctgttaaggggccgtcagggtttgcatgaggttgttctggttcctgagccctgcctagcatccttaggcaacacagycctgaaggttctgacttcctacagaggagtgatttgggcactccatgtgtgggcagctctgggacagcattgcccactgatgcatgcctggtggctgagc

SEQ ID NO: 151913 - DNA, 201 bp, Homo sapiens
gaactgagtggatgtgtgtgtgctcacagggcgaggattccatgcaaacaaatacataggcttctccaggtccagttttggtgaggggacaggaaaagggrcagatattgttcagctgggatttaaggtgaagatcatgctccctggaacaacccaaaggctggaagattccatctcctcagccccatctctttctggtgc

SEQ ID NO: 151914 - DNA, 201 bp, Homo sapiens
acaactttcagcaacacaaatttactatttcctgcagattagaaacctgacctaggtttcactggactaaaatcaaagtgtcgacattcaggaggccctcrtgggtaatctgtttccttgcctttttcacctggtagaggctgcatgctgtccttggctgatgggcccttcctccatcttcaaagccagcaagagcacact

SEQ ID NO: 151915 - DNA, 201 bp, Homo sapiens
tatctaggggcccatgaaagtcacctctaggataagagttgtggaatttcctatcaggaaattccaagggtttttaaacctctgtgccaagaaccaggcasaaagaccagatatattctttattatagcataatgtgtcttagacctcatctcataccaggcttgtcctagcaccatgctacctacacaatggccttttct

SEQ ID NO: 151916 - DNA, 201 bp, Homo sapiens
ctagaacacataaaccataccattgttacatagacaaaataaggcatagcctttctccatactttatggaacttcttcttcctcttgtgagactcccacargtttctagaaatgcctctggtgtcttggacatttctgctccatagagaaatgcaccagagacagatgctcgttggaagaggctggctcaccacaggtcaa

SEQ ID NO: 151917 - DNA, 201 bp, Homo sapiens
tctcactaatatttagatattatcgattcctggttctctttctaggctatgtagagtaatcttttaatctacactggacattttctttctttctttctttyttttttttttgagacggagtctcgctctgtctcccaggctggagtgcagtggcgcgatccggctcactgcaagctccgcctcccgggttcacgccattct

SEQ ID NO: 151918 - DNA, 201 bp, Homo sapiens
agcttccctttaggaaaccagctggtgcaagggcatcagaagcccatctaggtctctgcttctatccggaacatttgtgttgccctgttgggcagctgacrcccacctctctaatcacatggctggtctttctggtgatctgctcccatcctgaggctatctaggggcccatgaaagtcacctctaggataagagttgtgg

SEQ ID NO: 151919 - DNA, 201 bp, Homo sapiens
gctattttttctgttcatattgtttgtctagctaactaagtcaatgcctttggagtcagtaaccaagtcttttgctcctcacagaggctgacaccatgtcytgcacatggtaaaccctgaaaaaataggtgattcaaaacatctatgcagagaggtggtgattgaattatatcaatgcccgctttgtcttccaggtgaagg

SEQ ID NO: 151920 - DNA, 201 bp, Homo sapiens
tctcagcctcccaaactgctggaattatagacatgagccaccacacctggccacaaacttcttaatagcctggtccttgaacatgcatcaggtgcagttcwtgcagcaaataggttgcacgtggcatggcccttttgggcatgaccgtcgtttcttctttctctgtcatcttggaagtgaggacttgagccccagatgttc

SEQ ID NO: 151921 - DNA, 201 bp, Homo sapiens
caaaaatgtcaattttttttgcctctgtaagaggtacttttcctagtagagctttaggagaatttgcatgcgtgcgtgcgtgcgtgtgtgtgtgtgtgtgkataaaaatacaccaactgcattagcagtcatttttctttccccactttgaccatcccatttctatgtgcaagaaattcccctggcaagatgaggagacag

SEQ ID NO: 151922 - DNA, 201 bp, Homo sapiens
ccccagcttccctttaggaaaccagctggtgcaagggcatcagaagcccatctaggtctctgcttctatccggaacatttgtgttgccctgttgggcagcygacacccacctctctaatcacatggctggtctttctggtgatctgctcccatcctgaggctatctaggggcccatgaaagtcacctctaggataagagtt

SEQ ID NO: 151923 - DNA, 201 bp, Homo sapiens
ttaacaatagcaaagacttggaaccaacccaaatatccatcaatgatagactggattaaaaaaaatgtggcacatatacaccatggaatactatgcagccrtaaaaaaggatgagttcatgtcgtttgtggcaacatggatgaagctagaaaccatcattctgagcaaactatcacaaggacagaaaaccaaacaccgcat

SEQ ID NO: 151924 - DNA, 201 bp, Homo sapiens
ctaggccatacccaagagccattgaacaagccattgaactgagcttccatagctccagccctgctcagaatccatgcctacaagcagctcccaaccagggygtgagtgaaataaggagtgaacaggagagggaagcaactgtggtccagtgaatctgggggatatccacaaactcatcctgaccaatgcttgccacctctt

SEQ ID NO: 151925 - DNA, 201 bp, Homo sapiens
aaaattttccaagtcaaaaatgtcaattttttttgcctctgtaagaggtacttttcctagtagagctttaggagaatttgcatgcgtgcgtgcgtgcgtgygtgtgtgtgtgtgtataaaaatacaccaactgcattagcagtcatttttctttccccactttgaccatcccatttctatgtgcaagaaattcccctggca

SEQ ID NO: 151926 - DNA, 201 bp, Homo sapiens
tttgttcagcattttacttcttgttagaatgagtggcaacttctgagctcttcatgtggaaccggaaactggaaattgatactttccttttttttttttttaacgttatgtagccatgcctgtctaaaccctaagtgtatttctccattttgagcatcacatatctatccagggcagggtggttagacaaaacaatttttg

SEQ ID NO: 151927 - DNA, 201 bp, Homo sapiens
tacccaaaggattgtaaatcatgctactataaagacacatgcacacgtatgtttattgtggcactattaacaatagcaaagacttggaaccaacccaaatrtccatcaatgatagactggattaaaaaaaatgtggcacatatacaccatggaatactatgcagccataaaaaaggatgagttcatgtcgtttgtggcaac

SEQ ID NO: 151928 - DNA, 201 bp, Homo sapiens
ctttgctgatggtcaaattccaaattcctccatcagtctcaaagctcttattagtcactttaattggaatcctgggaagacagagtgggtggaagagaagygggcagggtgggagagaaacagaaccaagagactgggtctatgtaacagttttcttcaggcagtaaattcctcttacatgctgggaggagcaaagggtgg

SEQ ID NO: 151929 - DNA, 201 bp, Homo sapiens
aaaaattttccaagtcaaaaatgtcaattttttttgcctctgtaagaggtacttttcctagtagagctttaggagaatttgcatgcgtgcgtgcgtgcgtstgtgtgtgtgtgtgtataaaaatacaccaactgcattagcagtcatttttctttccccactttgaccatcccatttctatgtgcaagaaattcccctggc

SEQ ID NO: 151930 - DNA, 201 bp, Homo sapiens
ggactacaggcacacaccaccatgcctgattaaattaaaaatatatatatatatatatatgtgtgtgtgtgtatatatatgtgtgtgtgtgtgtgtgtgtrttatacatatatatatatatatatatatatatagagagagagagagagagagagagagagagagagatggggtcttgctatgctgcccaggctggtcttg

SEQ ID NO: 151931 - DNA, 201 bp, Homo sapiens
gaagccatgagagctctcatgagtacatcttttaaaaaaagtgagagagtcatgcaaatcaaaaccacaatgagataccatctcacaccagttagaatggygatcattaaaaagtcaggaaacaacaggtgctggagaggatgtggagaaataggaacacttttacactgttggtgggactataaactagttcaaccattg

SEQ ID NO: 151932 - DNA, 201 bp, Homo sapiens
tcctggctcaaatgatcctcctgcctcagcctcctgagtcggactacaggcacacaccaccatgcctgattaaattaaaaatatatatatatatatatatrtgtgtgtgtgtatatatatgtgtgtgtgtgtgtgtgtgtattatacatatatatatatatatatatatatatagagagagagagagagagagagagagag

SEQ ID NO: 151933 - DNA, 201 bp, Homo sapiens
tttatttgtcaattaaaaaataagtaaaagaaatttaaaaaatcaaatcagagaagccatgagagctctcatgagtacatcttttaaaaaaagtgagagagtcatgcaaatcaaaaccacaatgagataccatctcacaccagttagaatggcgatcattaaaaagtcaggaaacaacaggtgctggagaggatgtggaga

SEQ ID NO: 151934 - DNA, 201 bp, Homo sapiens
ctttttgttctcagtccatttgccatgaaggtccctctacctgttgctaagttaatagaacaattcctccctagatgttagtgcggttgagcacattcaargccttggttggttatctgtattttgtgaaaaactctgtagaaatcatctcaaaggagagaccctggatgatgagacatccaagcatctaaacatgtgttt

SEQ ID NO: 151935 - DNA, 201 bp, Homo sapiens
agtaaaaggactcttcccaaatggagtcctcttcagggaggtggcagggctgtgtctatacagcctctgccctcagccccctcagccttcccatgcacccaggaggacctctgtgtccgtctgggggaccccagcactcagaaccagaggctctggctggaacacccctgagcttgctctggacaatgcccagccaggctc

SEQ ID NO: 151936 - DNA, 201 bp, Homo sapiens
ttttatttgtcaattaaaaaataagtaaaagaaatttaaaaaatcaaatcagagaagccatgagagctctcatgagtacatcttttaaaaaaagtgagagagtcatgcaaatcaaaaccacaatgagataccatctcacaccagttagaatggcgatcattaaaaagtcaggaaacaacaggtgctggagaggatgtggag

SEQ ID NO: 151937 - DNA, 201 bp, Homo sapiens
gcatcacatatctatccagggcagggtggttagacaaaacaatttttgactcatctttgcttctctaccccaccttcatcttctactttagggattctcartggagtgggatgtatcatctggggatttgcaaccaacctgactccatctcccttgactgaatccgttgctctttgatcatggttttatgtagggctttgg

SEQ ID NO: 151938 - DNA, 201 bp, Homo sapiens
attttatttgtcaattaaaaaataagtaaaagaaatttaaaaaatcaaatcagagaagccatgagagctctcatgagtacatcttttaaaaaaagtgagagagtcatgcaaatcaaaaccacaatgagataccatctcacaccagttagaatggcgatcattaaaaagtcaggaaacaacaggtgctggagaggatgtgga

SEQ ID NO: 151939 - DNA, 201 bp, Homo sapiens
tatttgccatatcaattgatatggaattgatgtttgccatatcaattgatatggaattgatatttgccatgtcaattgatatggaattgatatttgccatrtcaattgacatggaattgatatttgccatatcaattgatatggaattgatatttgccatatcaattgatatggaattgatatttgccatatcaattgata

SEQ ID NO: 151940 - DNA, 201 bp, Homo sapiens
cttccacctccaactcctctcaacctgaagatgacccagttaagaatggccttgctggccaggcgcagtggctcacagctgtaatcccaacacttggggargccaaggcaggtggatcacctgaggtcaggagttggagaccagcctggccaacatgatgaaaccccgtctctactaaaaatacaaaaattagctgggtgt

SEQ ID NO: 151941 - DNA, 201 bp, Homo sapiens
gcccaaggtttagaggaactctgtgctagagagcccttggcaaacaacttcactttggccttaaacatgagattcactacctgtaaaatggacttctgagycctccctacctgtccacctagcagaccgtttcgtcagagcttcctcttctccaacagtgctttcttttaaacagacataatgaactgccttttggtttca

SEQ ID NO: 151942 - DNA, 201 bp, Homo sapiens
gcttgtcctagcaccatgctacctacacaatggccttttcttagttcctcgattgttccaagtccttccctctacctgagacaattcccctctccctcccrcacttccacctccaactcctctcaacctgaagatgacccagttaagaatggccttgctggccaggcgcagtggctcacagctgtaatcccaacacttggg

SEQ ID NO: 151943 - DNA, 201 bp, Homo sapiens
cagtagagtggggagtacatcataatgtctgtttctgaaaatagggtgaagaaacttttccataccgctctttaatccaggaaaaacactaaaaatgatgrgggggggaggtggtgtgcagggtagggatggcataaatttaaaagaaaattgcagaccacagatggatccatcttgaggtactcgttatagagcgaaatc

SEQ ID NO: 151944 - DNA, 201 bp, Homo sapiens
tgtccaatcatttggcagagcttaagaaaaaaggccttcaaacaaagacatgggaaggaatgagacttggcatttcacgggaccatgaaacagttaagagygaggcctctggagtcagcgactttggttgagtcctggttcctccacttactctctgggcaagtcactcgttcttctgcctttcgtgtccctatctgtaaa

SEQ ID NO: 151945 - DNA, 201 bp, Homo sapiens
ctaagcatccacatgatttttccttgtcccctgcaaggtgcaaaaattgtagggaaaatgaatttctggccaggctttaagtgaaataaaaatccaaacakgttaagtcaagatgccaggaacagctcatcactcatcattacagtgcatttgtggggctgtaatttctttctcacccgttgtggtgtttgcttcttttca

SEQ ID NO: 151946 - DNA, 201 bp, Homo sapiens
ttctggtgtgtttatgaacacatctcaggttcaggctgggtggtttttgagaggaagtgggaaaagacacttgccttttccatcaccttaaaatcaccggrgacccagcccttgagtgtgaaattcactgtggcaccccccagcagtggtgagccaagtgtcggcctggctgccctgagagccccacgcagccgctgatgg

SEQ ID NO: 151947 - DNA, 201 bp, Homo sapiens
tccaaagtctctgctcccaggacttgcagggtctcctgatacctggtctcctcctcgcttccccagccccagcctcaaggcttgcctgggtccccctggckcgtggatcctacttatccccagcttcagcctctccctcagggaagccagcttgtgggccaaggcagacctgagaggttggggccaggatttgaataagat

SEQ ID NO: 151948 - DNA, 201 bp, Homo sapiens
agtccaggcttttcaatcatcctgttccaattcccattaatgccagccagcgctctcgtcacgggattatctcaggaatgctgcctcaatgccttatcacrctccaaagatacaatgtctacaggagtcattgaatcagcagttttaattaatgataatatttattgagtttcagatgccaaatggaaatttctagctttg

SEQ ID NO: 151949 - DNA, 201 bp, Homo sapiens
ttcccagacattaatgaagatacgaaatgaaacagatctaacagacacagtgaggccttctgttagtggcctcttccccacccctttattagatattgaaytgtttttcatcattggtccttgtttatcaaagtccaggcttttcaatcatcctgttccaattcccattaatgccagccagcgctctcgtcacgggattat

SEQ ID NO: 151950 - DNA, 201 bp, Homo sapiens
tgaacctccttaatcatgtattttctcgcaacctttctttttcttagaaccacagaaggttagagctgggatcacaggaggttagaattggggaaccttasaagccacgagtctaattcttttctaacagctgaataaactaaggcccaaatgtctgagcttattttgtttattttcccaaaccatctccaaaaatgttta

SEQ ID NO: 151951 - DNA, 201 bp, Homo sapiens
caagctttgtgtttcatcctgtcttcttttcctaaagatctttagaagtgctgcacacagtgaacctccttaatcatgtattttctcgcaacctttctttktcttagaaccacagaaggttagagctgggatcacaggaggttagaattggggaaccttagaagccacgagtctaattcttttctaacagctgaataaact

SEQ ID NO: 151952 - DNA, 201 bp, Homo sapiens
tggtccatgtgagtgcaaggccagagtgggggatgggggccacatcagtgcaaggctctgtcaggcagagttcagatattgttctacatatcacaggaagkcactgccaggtcttaggcagggagtgacatggcctcatgcgtttccatggcttgagtaagcctcagaacacagtcaggagaccccaaagagtttgtgcct

SEQ ID NO: 151953 - DNA, 201 bp, Homo sapiens
ctgttggtgagaatgtaaattagtgtagccattatggaaaacagtatggaggttgctcaaaaaaattaaaaatagagctaccatatgatctcgcaatcctrcttctgggtatagatccaaaggaaatgaaatcaggatgttgaagagatatctatactcccatgtttaaacaggattattcacagtagccaagatgtgcaa

SEQ ID NO: 151954 - DNA, 201 bp, Homo sapiens
aaactcctgggctccagcaatcctcctgcctcagcctcccaaattgctgggattacaggtgtgagccaccatgcctggcctaaagcaaggtttagcccgtwctttctcatgctggccatctatgttctggttctaacgtttgtgtggttggtgttaatgttagacctaaaaagagaaagatgaaattcggtatttgttatc

SEQ ID NO: 151955 - DNA, 201 bp, Homo sapiens
aattttatttgtcaattaaaaaataagtaaaagaaatttaaaaaatcaaatcagagaagccatgagagctctcatgagtacatcttttaaaaaaagtgagagagtcatgcaaatcaaaaccacaatgagataccatctcacaccagttagaatggcgatcattaaaaagtcaggaaacaacaggtgctggagaggatgtgg

SEQ ID NO: 151956 - DNA, 201 bp, Homo sapiens
ttaactattccaaaatttatacatatctcagaacccggtgttgtacatgataaatatatacaaattttatttgtcaattaaaaaataagtaaaagaaattwaaaaaatcaaatcagagaagccatgagagctctcatgagtacatcttttaaaaaaagtgagagagtcatgcaaatcaaaaccacaatgagataccatctc

SEQ ID NO: 151957 - DNA, 201 bp, Homo sapiens
atatatgcacaattttagggtttttgatatgtagtgctcatttgcccttcacacactttctgcccatttcacattctcaccagtaggcagcattgaattcktaattcttcaaacttttaaatttgaagtataatgcacacattgaaaagcgtacaagtggctgggtgcagtggctcatgcctgtaatgccagcactttggg

SEQ ID NO: 151958 - DNA, 201 bp, Homo sapiens
tcctgggttcaagcaattctcctgcctcagcctcctgaggagctgggattacaggcatccaccactatccctggctaatttttgtatttttttttttttttagtagagatggggtttcaccatggtggccaggatggtctcaaactcctgaccccaagtgatctgccctccttggcctgccagaggagctttggctttagg

SEQ ID NO: 151959 - DNA, 201 bp, Homo sapiens
cagtggcacgatcttggctgactgcagcctctgcttcctgggttcaagcaattctcctgcctcagcctcctgaggagctgggattacaggcatccaccacyatccctggctaatttttgtatttttttttttttttagtagagatggggtttcaccatggtggccaggatggtctcaaactcctgaccccaagtgatctgc

SEQ ID NO: 151960 - DNA, 201 bp, Homo sapiens
ttgtcattgcatattctttattccattgctagcctgccagacactcttatgctgctgctttctaggtttcccaacccactgattatattgcattttggatkatttctcccccagctgccttcatttgcatttttctgaaatcaaatctcattgtgataatttctattcatatttctaacctctttggatccatctgtgtta

SEQ ID NO: 151961 - DNA, 201 bp, Homo sapiens
tttgctggtttggaacgtaatctctgatggacagagaacttgtttttgggtggaagattgtctacctttttaccaaggtgagttagtacagaattgtgtamctaaaattatttaagaagcattaactatttctcaaaattatttgagaaaacctgaatatcaggttgattgatgaaagaaatctctaggtgctatcttgaa

SEQ ID NO: 151962 - DNA, 201 bp, Homo sapiens
ctgatattgatcatgacggtggctaaaataactccattggctcttttcccaaatggaggctgattggctgctggtgtgtagcttattattgagttgttaaagagttttggagttaaacttgctcccttgaatggggtggaggattgtactctgtctgttgtcctttcagcacaagatctacatatatgtaggctaaaacaa

SEQ ID NO: 151963 - DNA, 201 bp, Homo sapiens
actcttatcagtcttccattttaaagaagagaaaaacaattactcagatgtcctaactatcaagagatttggagaaactatatacatatatggttcttagytgggcataatttgaaagcctatctatctatatctatctatctatctatatctatctatctatctatctatctatctatcattgactttcaaattctgccc

SEQ ID NO: 151964 - DNA, 201 bp, Homo sapiens
cctaatctgagtgagaacaacttgttttcaaaacttctgcccacattatgagtgtagatgattctgggccccgtgcattttcactcattgggaaggaatgrtgattgcgaaaagtgctctagagtccagggagacgggtgacccaggagcttccctgtggccctcagacacacagctcatgtggccacctctgccatgggc

SEQ ID NO: 151965 - DNA, 201 bp, Homo sapiens
gctgatattgatcatgacggtggctaaaataactccattggctcttttcccaaatggaggctgattggctgctggtgtgtagcttattattgagttgttaaagagttttggagttaaacttgctcccttgaatggggtggaggattgtactctgtctgttgtcctttcagcacaagatctacatatatgtaggctaaaaca

SEQ ID NO: 151966 - DNA, 201 bp, Homo sapiens
aagtcacttacttctcttcacactgcctgttttcctataaaacaataataaatctgtcacacagataaaaagatcctagtgctgagataatgtgatttgtygaaacatgctcattcactttgggaggccgaggtgggtggattacctgaggtcaggagttcaagactagcctgaccaacatggtgaaaccccgtctctaca

SEQ ID NO: 151967 - DNA, 201 bp, Homo sapiens
gaaggtggggagcacatggaccatcttggaggtggcatagtagcctgtcctgcaggaccgtccgtgagttctctaggctgctccatatattttttaattcytgcttttgtttttgtttttggcttgagctaaccagaatcaatgactcttgtttgcatccagactgccatacttgtttgttgcttataattctgtcatttt

SEQ ID NO: 151968 - DNA, 201 bp, Homo sapiens
ccagttttaatttcccatacagtaaatagcaatagctctaaccccatgaacaaaaggtctttggcattctcaataattttttttttttgacacaagttcthtgtcacccaggctggagtgcagtggcacactcatggctcactgtagcctcaacctccccaggctcgggtgatctcctgcctcagcctccagaatagctgg

SEQ ID NO: 151969 - DNA, 201 bp, Homo sapiens
acagagcgagacttcatctcaaaaaaaaaaaataaaataaaaataaaatatatatatatatatatatatatatatatatatatatatatatatatatatatgttagttggtccctccccagacctattgagtcagaatctcttgggctggggtcctgcaactgcactttactaagatcccctgccttagattgtatcctgg

SEQ ID NO: 151970 - DNA, 201 bp, Homo sapiens
cttgtcacccaggctgaagtgcaatggcacaatctcagctcactgcaacctccgcctcctaggttcaagcgattctcctgcctcagcctcccaagtagctrggactacaggcttgtgccaccacacctggctgattttgtattttttgtagagacggggtttcaccatgttggccaggctggtctcaaactccggacctca

SEQ ID NO: 151971 - DNA, 201 bp, Homo sapiens
gacagagcgagacttcatctcaaaaaaaaaaaataaaataaaaataaaatatatatatatatatatatatatatatatatatatatatatatatatatatatgttagttggtccctccccagacctattgagtcagaatctcttgggctggggtcctgcaactgcactttactaagatcccctgccttagattgtatcctg

SEQ ID NO: 151972 - DNA, 201 bp, Homo sapiens
ttgggaaaaattgcaactgttatttcaatgccatggccacagttaccctatctcttggtacttctgttttatacctcgcttcctactaatgccattcccckcacacttcaggctatttcgtgacactgtgcttttgctcatgtttctttggcttagatcctcactcctcgaagtgtagttccaggaccagcagcatcagtg

SEQ ID NO: 151973 - DNA, 201 bp, Homo sapiens
ccgagatcacgccattgcactccagcctgggcggagcctgggcgacagagcgagacttcatctcaaaaaaaaaaaataaaataaaaataaaatatatatatatatatatatatatatatatatatatatatatatatatatatatgttagttggtccctccccagacctattgagtcagaatctcttgggctggggtcctg

SEQ ID NO: 151974 - DNA, 201 bp, Homo sapiens
agccgagatcacgccattgcactccagcctgggcggagcctgggcgacagagcgagacttcatctcaaaaaaaaaaaataaaataaaaataaaatatatatatatatatatatatatatatatatatatatatatatatatatatatgttagttggtccctccccagacctattgagtcagaatctcttgggctggggtcc

SEQ ID NO: 151975 - DNA, 201 bp, Homo sapiens
caattcaaaaagtttggaagattttcggcgacactccacagagctaccccaaaatgggcctccattttcagatgtgcatccaagtgcatcacatatttcamttccctgtgggcaatgccagaggagacaaaggaagggggagagaatgttccatgcatttgcaaactgtcagggcatatcatttgtcctctaaataagtgt

SEQ ID NO: 151976 - DNA, 201 bp, Homo sapiens
tgaagtctgattccagagttcctacccttagccactatacttaacattgcctctgaaataaatataatatgtgcttggggtataaagcccagtcatttcarataaataactcccaaatcagcatgagactaaagttgacagctttaaacagcatatagttctttaatgacttctaaagcaatgatttctaatgtgttagta

SEQ ID NO: 151977 - DNA, 201 bp, Homo sapiens
taagccgagatcacgccattgcactccagcctgggcggagcctgggcgacagagcgagacttcatctcaaaaaaaaaaaataaaataaaaataaaatatatatatatatatatatatatatatatatatatatatatatatatatatatgttagttggtccctccccagacctattgagtcagaatctcttgggctggggt

SEQ ID NO: 151978 - DNA, 201 bp, Homo sapiens
ttagagcacattgttgtgcacaagggtcatatcttttacaggagaaatgaagaagctgtgttatatcagcctgttcatttttaccctcaacaagaaaaatsgtcagcccatctaatccattcagctacctcagctgatattgatcatgacggtggctaaaataactccattggctcttttcccaaatggaggctgattggc

SEQ ID NO: 151979 - DNA, 201 bp, Homo sapiens
ctcgagatcatgctcatgccatgagatacctcttaggcaccactgcacactctctctggacttcctctgtcctagggcatttggccatttgctctgagcasctctctgtgcactccaactggctttggtaggttcatcccaacacaccctcttcacacctgcgtgtgtgggcctcctgccttgggacttctctgttgatgc

SEQ ID NO: 151980 - DNA, 201 bp, Homo sapiens
ttattgtttaggaacaaacatggtgggagcaaaaagttgttgggtgttcctctgtttaagagccttctggaaggatgaagtctccactgggctgacacagmgcctctgcggcctctgaggcctgtcagtggagacccttcaggcggtttttcctcacttaggttccatgactcaccttgtcagttgaaatcctgcttccta

SEQ ID NO: 151981 - DNA, 201 bp, Homo sapiens
ggacagctttgtgacagctccaggggaaaggaacaggacgaagagggctgtgtatgagatgggagcatgccaagaagcataggctttatccagtccagcgygtctcacactgcacactgtggcctcacagggggtgtagaacacttcagtttggatcgtgaccaacatttaaagcataataaaatagaaagtgtcagtgca

SEQ ID NO: 151982 - DNA, 201 bp, Homo sapiens
cacatggcaatagatacttcagagcatcgttggggtgagttttgtgtgcgtgaatgcctgtgccctggcctgggccaccaccgcacacaaccagcaggcgragtgtggctctaccagccacgacctccctccagggcagtgcggggaggccaccggcagggggtgctgcacccacactgctggcaccagtacgtgggcatt

SEQ ID NO: 151983 - DNA, 201 bp, Homo sapiens
cctccctacctgtccacctagcagaccgtttcgtcagagcttcctcttctccaacagtgctttcttttaaacagacataatgaactgccttttggtttcaygacttttttttttttttgctacaagcagctctcttgtggctggcaaaagtaaagccatattctcgaggactcaaaagactctccatggcttccctggatc

SEQ ID NO: 151984 - DNA, 201 bp, Homo sapiens
tgtatccattttcaacactggagtaagtttatttagggggaaaaagggaaacagatgtagctgtgtgtgtgaagaatggggaagagagagaagcgcgaaakaactgagtggatgtgtgtgtgctcacagggcgaggattccatgcaaacaaatacataggcttctccaggtccagttttggtgaggggacaggaaaagggg

SEQ ID NO: 151985 - DNA, 201 bp, Homo sapiens
caatttgtatccattttcaacactggagtaagtttatttagggggaaaaagggaaacagatgtagctgtgtgtgtgaagaatggggaagagagagaagcgygaaagaactgagtggatgtgtgtgtgctcacagggcgaggattccatgcaaacaaatacataggcttctccaggtccagttttggtgaggggacaggaaa

SEQ ID NO: 151986 - DNA, 201 bp, Homo sapiens
gcctcagcatcttccagtctgttctttctcctgtattctcagtcttggttagtagcaccaccttccatctgattgctaaagccaaaaatctctgtcattcyggactcctttctttccctcaactcacacatttattcaatcactaccttctgctgaaatcgccatcaaaattttttttattatatccctggatattctttg

SEQ ID NO: 151987 - DNA, 201 bp, Homo sapiens
tatggttcttagttgggcataatttgaaagcctatctatctatatctatctatctatctatatctatctatctatctatctatctatctatcattgactttcaaattctgcccaactagttctgccccactaagaacatggatttttgtgataatgaaaactttctcttacaagcagagggccaatatttgctataaagga

SEQ ID NO: 151988 - DNA, 201 bp, Homo sapiens
gctgaagaaagttctctgcttatgcatggtactgggatgctacaaatcaataaaaaggctgcctcctctcaagttattgattcttcatgttgcagctttcycccctgacaccatttcacgtgtgtccctgttcaggagagaaaaagcatggggggtgtttgaaagctcagggaccattgttgacgttgtccctgcttgtgt

SEQ ID NO: 151989 - DNA, 201 bp, Homo sapiens
tgtcctaactatcaagagatttggagaaactatatacatatatggttcttagttgggcataatttgaaagcctatctatctatatctatctatctatctayatctatctatctatctatctatctatctatcattgactttcaaattctgcccaactagttctgccccactaagaacatggatttttgtgataatgaaaac

SEQ ID NO: 151990 - DNA, 201 bp, Homo sapiens
attgcacaggctgaatctgagttgttgcaacagtaaacgagcaagatttaaactggccttgtgtagcacttgctatttggctcctcatattttattagacrcttattcttttttgtttggtgtcattcctttgagaaatatttgagtgccttttctgttgcagacattgattagatgctgaggttgtaacaatgaagaaga

SEQ ID NO: 151991 - DNA, 201 bp, Homo sapiens
gttcgacttatgatttttgattttatgatggtttgagagcaatacatccattctgtttttcacttttcattcaacactttattttaaaatagggattgtgwgatgatattgcccacgtgtaggctaatgtaagtgttctgagcacgtttaaagtaggctaggctaagctgtggtgtttggtaggttagatatgttaaatgc

SEQ ID NO: 151992 - DNA, 201 bp, Homo sapiens
ttacattgcaggtttcatttgttggttcagtttttaaactaagccctattgtgtcaaattatgctaggtgtgagatggggagttcaagctgtgtgttgtctttttttttttttttttttttgcctcacttactaatatacaagcgcttataacctttgaggctggccctatacattaagatttttattaattccactgttc

SEQ ID NO: 151993 - DNA, 201 bp, Homo sapiens
agttgatactatcagagccttgtgatattccactgcattatgcttcactaaaaaatacctggctgggtgcggtggctcacaactgtaatcccagcactttrggaggctgaggtgggcagatcacctgaggtcaggagttcaagatcagcctggctaacatggcaaaaccccatctctactaaaaatacaaaaattagccag

SEQ ID NO: 151994 - DNA, 201 bp, Homo sapiens
catcatatgataaacagaaagagagagagagagagagagagagagagagagagagaccctgtcttatttaaaacaaaaaaagaagaagaaaaaaagaatayagatcacagctgttatttgtatatgctacgccaatccttgttgggtttcattctttataattgttatttttaaagatttttcttatgaatattctattgt

SEQ ID NO: 151995 - DNA, 201 bp, Homo sapiens
ggcaacttgagtcccaggtgcagatgaggctgggctaattggtgcactagggaaggagccgggggagagatgtgctgttagctattatcaatctgtgacarctgtcagctgctggcagttagcacccacctgagcctgggatgcaggggtgcctctcctgtcctctgtggaagcctctggacccagcagccatcttgactg

SEQ ID NO: 151996 - DNA, 201 bp, Homo sapiens
tcaggtaaatctccagttgaaaaatgggtctggcaagatgttacctttgggtgatttttctgctgacagaagacagacaccattacattcaaagtcagatwgtcttttatttatttatttatttatttatttatttgagacagggtcttgctctatcacctacagatggggtttcaccacgttgggtctggtgacccaaat

SEQ ID NO: 151997 - DNA, 201 bp, Homo sapiens
caggggtctgggctgggaagcaggaatgttcagtggccataaatgtaagggttggtcttacatttacataagggagacaatgaaaacttaactcctccacrgtagtggagtagtgccgttgggtactcacagtcagtagtgccgttgggtactcacatgtacaacatggatcaggacattgactttctgtggatacctttt

SEQ ID NO: 151998 - DNA, 201 bp, Homo sapiens
gtgggaggattgctcgagcctgggagattgaggctgcagtgagctgagatcacgtcactgctctccagcctgagcaacagagccagaacctgtcccaaaagaaaaaaaaaattgatgataaacatagtgagacagaattttgaaatctcagcctcactgttgccttccttgtcccctgcctgcctaaataataaaaggcag

SEQ ID NO: 151999 - DNA, 201 bp, Homo sapiens
tgctaactgggtatatggttagtttatttgtttcatttaaaaaatctctttctgttaagttttatttataattacacaaatactggctttgatagtcaaaytgaaaaaacaaagtgtattcaaagaagtctaccttctatccttgtcctttcctatgttttagccatagtataaaaagttatggtttatcattatatttca

SEQ ID NO: 152000 - DNA, 201 bp, Homo sapiens
aattgatgataaacatagtgagacagaattttgaaatctcagcctcactgttgccttccttgtcccctgcctgcctaaataataaaaggcagcatttcagcagtcattcatttcattactttcacttcatttcaccttcataaagcctcatgaggtaagatgggaagatacagaagttttagaaaccgctcatcaaaattg

SEQ ID NO: 152001 - DNA, 201 bp, Homo sapiens
attgatgataaacatagtgagacagaattttgaaatctcagcctcactgttgccttccttgtcccctgcctgcctaaataataaaaggcagcatttcagcagtcattcatttcattactttcacttcatttcaccttcataaagcctcatgaggtaagatgggaagatacagaagttttagaaaccgctcatcaaaattga

SEQ ID NO: 152002 - DNA, 201 bp, Homo sapiens
aagattgggcaatggacgaatggcaaattgcatttttaaaagaggagggatttaaaaaaaaacaggaaagattggggcatttgtctctaaaggactgtggrctcatttaagaagtttagtggtcattcttaccatctttgtggtttttcctgcctgcatgggatgcagattttctgtctcaggtgggattgatcaatccct

SEQ ID NO: 152003 - DNA, 201 bp, Homo sapiens
gaatccaggggaaagtgcaaacgaagcaagattgagaaaattctcaagtttttataaacagttctcacactctgccagttccttggaggtagacttttttkttaacttccaactacagtagtgaaaaaaaaaaaaaaaccctcaaatttgcaaaagcagtctgtggaattttctttacccagctttcctgactgttaactt

SEQ ID NO: 152004 - DNA, 201 bp, Homo sapiens
ttgatgataaacatagtgagacagaattttgaaatctcagcctcactgttgccttccttgtcccctgcctgcctaaataataaaaggcagcatttcagcagtcattcatttcattactttcacttcatttcaccttcataaagcctcatgaggtaagatgggaagatacagaagttttagaaaccgctcatcaaaattgaa

SEQ ID NO: 152005 - DNA, 201 bp, Homo sapiens
acattttctttatccggtctatcattgatgggcatttgggttggttccaagtctttgctattgtaaatagtgctgcaataaacatatgtgtgcatatgtcyttatagtagaatgttttataatcctttgggtatatacccagtaatgggattgctgggtcaaatggtatttctggttctagatccttgaggagtcaccaca

SEQ ID NO: 152006 - DNA, 201 bp, Homo sapiens
tgatgataaacatagtgagacagaattttgaaatctcagcctcactgttgccttccttgtcccctgcctgcctaaataataaaaggcagcatttcagcagtcattcatttcattactttcacttcatttcaccttcataaagcctcatgaggtaagatgggaagatacagaagttttagaaaccgctcatcaaaattgaat

SEQ ID NO: 152007 - DNA, 201 bp, Homo sapiens
atcacttttttttttttcttaattgctgcatagtggccgggcacagtggctcacgcctgtaatcccagcactttgggaggccaaggcaggcggcggatcaygaggtcaggagaccaataccatcctggctaacatggtgaaaccccgtctctactaaaaatacaaaaaaatttagctgggcgtcgtggcgggcgcctgtag

SEQ ID NO: 152008 - DNA, 201 bp, Homo sapiens
tgtaactctttatttgtccccttgcctccctttccaatggactattttagaagaaatggagctgtcacccacatcaagattcagaacactggtgattactrtgacctgtatggaggggagaaatttgccactttggctgagttggtccagtattacatggaacatcacgggcaattaaaagagaagaatggagatgtcatt

SEQ ID NO: 152009 - DNA, 201 bp, Homo sapiens
ctggagtataatgatgcgatcttggctcactgcaacctccgtctcccgggttcaagcgattctcctgcctcagcctcccgagtaactgggattgcaggccygcgccaccttgcccagctaattttggaattttatgagacggggttttgccatgttggtcagactagtctcgaactcctgacctcatgatccgcccgcctt

SEQ ID NO: 152010 - DNA, 201 bp, Homo sapiens
ataaaagaccacatcgttcttttttttttttttttttgggactgtatcttgctctgtcactcaggctgcagtgcagtggcactatcttggatcactgcagkctccgcctcccggattcaagcgattttcctgcctcagtgcctgagtagctgggattacaggcgtgtgccactacacctggctaatttttgtaattttagt

SEQ ID NO: 152011 - DNA, 201 bp, Homo sapiens
ggactgtatcttgctctgtcactcaggctgcagtgcagtggcactatcttggatcactgcaggctccgcctcccggattcaagcgattttcctgcctcagygcctgagtagctgggattacaggcgtgtgccactacacctggctaatttttgtaattttagtagagacaggtttcaccatgttggccaggctggtctcaa

SEQ ID NO: 152012 - DNA, 201 bp, Homo sapiens
tcccggattcaagcgattttcctgcctcagtgcctgagtagctgggattacaggcgtgtgccactacacctggctaatttttgtaattttagtagagacaggtttcaccatgttggccaggctggtctcaaactcctggcctcaagtgatccacccggcttcccaaagtgctgggattacaggcgtgagccactgcgccca

SEQ ID NO: 152013 - DNA, 201 bp, Homo sapiens
aggattaagtttcaacctcaggggagcggcattcaaactatagcattgtcctttagtgactggcttagttcacttagaatgtttgtctattcatccatctrtagacactgttttctttcaccttttggctttgcaaataatgctgctgtgaatatgagttatagaaaaataccaatttgaatccgtgttttcaattacttt

SEQ ID NO: 152014 - DNA, 201 bp, Homo sapiens
tcatctctcccatatgttgcctccccatcaattacgttttttaagtgtgacccaagtatatgatgtatgttttcatgataaattagaaacttatctgggcrtggtggctcatacctgtaatcccagcactttgggaggctgaggtgggcggatcacctgaggtcaggagttcgagaccagcctgaccaactaaaatagtag

SEQ ID NO: 152015 - DNA, 201 bp, Homo sapiens
atattcatttgtttattcatttgagactgggtcttgctctgtcacgcaggctggagtgcaacctccctgggctcagttgatcttccctcagcctcttgagyagctgggactacaggtgtgtgccaccatgcccagctagtgtttgtattttttgtggagatggtgttttgccgcattgcccagtgtggtcttgaactagtg

SEQ ID NO: 152016 - DNA, 201 bp, Homo sapiens
ttccatgttggtggttattaagcaagacttgaacatttgtttgttgcttgtttaggcttttatttcagagttcacagaattaactttctttttttctgatmtcttccagagtaaatgtgtcaaatactggcctgatgagtatgctctaaaagaatatggcgtcatgcgtgttaggaacgtcaaagaaagcgccgctcatga

SEQ ID NO: 152017 - DNA, 201 bp, Homo sapiens
tcactcctactgtgtatttaccttgagaaggtgaatcccctaacaatttggtcaatgtatcagtattctcaacccgtctatcaatttttttttctttctcyctcttttttctttttttgggcaaaataccttttttgctttttatccccttaaaataaccattgtccctcacatgtgcactcttccaaatttcagaaaagc

SEQ ID NO: 152018 - DNA, 201 bp, Homo sapiens
cccacatcaagattcagaacactggtgattactatgacctgtatggaggggagaaatttgccactttggctgagttggtccagtattacatggaacatcaygggcaattaaaagagaagaatggagatgtcattgagcttaaatatcctctgaactgtgcagatcctacctctgaaaggtcagtaacattttagtgaccac

SEQ ID NO: 152019 - DNA, 201 bp, Homo sapiens; identical to SEQ ID NO: 28258

SEQ ID NO: 152020 - DNA, 201 bp, Homo sapiens
tttttttttcttaattgctgcatagtggccgggcacagtggctcacgcctgtaatcccagcactttgggaggccaaggcaggcggcggatcatgaggtcargagaccaataccatcctggctaacatggtgaaaccccgtctctactaaaaatacaaaaaaatttagctgggcgtcgtggcgggcgcctgtagtcccagct

SEQ ID NO: 152021 - DNA, 201 bp, Homo sapiens
agccattttatttctaaaactttaattttacagatttatttgtaaaagtatgtaaaaatgattgtaaaggatatgttctgctgcattatttgtaataacaraaaaccagaggataacataaatgtcctataagaagggttagattatggatggcacattcatacaatggggtattatgtagccattgaataaaagggtact

SEQ ID NO: 152022 - DNA, 201 bp, Homo sapiens
gcgtacaactatgcccagttaagtttttcattttttatacagacggggtcttgctatgctgtccaggctggacttgcacttctggcttcaagtgattctcytgcctcagtttcccaaagtgctggcattatgggcataagccactgtgcctagcccatcagtgtctttttatcctttactcctatcaaaattcattcactc

SEQ ID NO: 152023 - DNA, 201 bp, Homo sapiens
ctgacctcaggtgatctacctgccttggccttccaaagtgctgggattacaggtgtgagccaccatgcatggctggattgtccttttttaaaaaaaaaaamaaaaacaaaaaaaaaaacccaaaccataaacccaatattctgaaagatttggtctccacacctgtgttatataataattagtttttccatttttttcctc

SEQ ID NO: 152024 - DNA, 201 bp, Homo sapiens
ggcgcgcatcacaatgcccagctgatttttgtatttttagcagagacagggtttcaccatgttggccaggctggtctcggactcctgatctcaagtaatcygcctgcctcggcctcccaaagtgctgggattacaggcatgagccactgcgcacggccaccacactgttttaaacaaccagattgcacgtgaacttagagt

SEQ ID NO: 152025 - DNA, 201 bp, Homo sapiens
agtgctcagtctcacaaagaaatgcaaactaacatggtaccattttccattaatcagatagacaaagatgaaagagtttggtaatgtatgtagtattggcrcaagtgagggaaaacaggggatttcacactctatgcccgtccaaaccagtaccttattttgagggtggtttgacaatatttgtcaaaataaaaaaattat

SEQ ID NO: 152026 - DNA, 201 bp, Homo sapiens
cgaagtaaaaccagcaaaatttcatgattggatagtggaaggaatcatggtgtttgtagtcttcaaatgtgaacccagagtgcactggacaagtagtctargctgctctgtaaccaaggcaagtgttttcattttaccctctcttcctgctcttggcctttggattttttgtaatttaaggtttatgaatgtaatcagtta

SEQ ID NO: 152027 - DNA, 201 bp, Homo sapiens
aacctccgtctcccgggttcaagcgattctcctgcctcagcctcccgagtaactgggattgcaggcctgcgccaccttgcccagctaattttggaattttrtgagacggggttttgccatgttggtcagactagtctcgaactcctgacctcatgatccgcccgccttggcctcccaaactgttgggattacaggtgtgag

SEQ ID NO: 152028 - DNA, 201 bp, Homo sapiens
tgaggcaggagaggcagcggttgcagtgtgccaagatcgcgccattgcactccacctgggccacaagagtgaaactccatctcaaaaaaaaaaaaaaaaamaaaaaaactcagtgtcagtatttcatgtcgaaattccacttcaatgggtagtgtagttaaaagctctaagtctaccttaaaatcacctaatgctttgtta

SEQ ID NO: 152029 - DNA, 201 bp, Homo sapiens
tcccaaagttctgggattacaggcgtgagccaccatgcccagcgttatttcacttctgcctctgtaattatattgctgtatggctatctcttctctccctrggaatgtcaggtcctaggcacaggaactgtgtctgtaccatatctggtgcccaaagaatgtagtatgtgttttatagatatcatgtaagcttaaacagcg

SEQ ID NO: 152030 - DNA, 201 bp, Homo sapiens
tccctgccaaggccagtggagaaggatggagatgcggtgacattcagcttgacaggtcattagcagcttttgtgccctagggactgctggtgggagggagrttgtggaagataaaccctgacaggaatgtattctcctcgagggcagggtttatttgatatttttctggagcttagaaccataagcctggtgctggggagg

SEQ ID NO: 152031 - DNA, 201 bp, Homo sapiens
ccctttccaatggactattttagaagaaatggagctgtcacccacatcaagattcagaacactggtgattactatgacctgtatggaggggagaaatttgscactttggctgagttggtccagtattacatggaacatcacgggcaattaaaagagaagaatggagatgtcattgagcttaaatatcctctgaactgtgca

SEQ ID NO: 152032 - DNA, 201 bp, Homo sapiens; identical to SEQ ID NO: 28249

SEQ ID NO: 152033 - DNA, 201 bp, Homo sapiens
tccctttccaatggactattttagaagaaatggagctgtcacccacatcaagattcagaacactggtgattactatgacctgtatggaggggagaaatttkccactttggctgagttggtccagtattacatggaacatcacgggcaattaaaagagaagaatggagatgtcattgagcttaaatatcctctgaactgtgc

SEQ ID NO: 152034 - DNA, 201 bp, Homo sapiens; identical to SEQ ID NO: 28251

SEQ ID NO: 152035 - DNA, 201 bp, Homo sapiens
tttttaaaaactttaggtggtttcatggacatctctctgggaaagaagcagagaaattattaactgaaaaaggaaaacatggtagttttcttgtacgagabagccagagccaccctggagattttgttctttctgtgcgcactggtgatgacaaaggggagagcaatgacggcaagtctaaagtgacccatgttatgattc

SEQ ID NO: 152036 - DNA, 201 bp, Homo sapiens
ctggctctgcagtttctctttattcttcatgatgtttccttcgtaggtgttgactgcgatattgacgttcccaaaaccatccagatggtgcggtctcagargtcagggatggtccagacagaagcacagtaccgatttatctatatggcggtccagcattatattgaaacactacagcgcaggattgaagaagagcaggta

SEQ ID NO: 152037 - DNA, 201 bp, Homo sapiens
attgtaccagagtattaaaagatatgtaatattttattgataaatctatcctttaaaaggaatacgttttaggatgtcatcattttgatgtgaatcatgtraatgttgataatatgctgtttattatacatttagtgtttcaagagattcacttaattgcctttttgcccacgtatattatgtagtctatttgcaactgtt

SEQ ID NO: 152038 - DNA, 201 bp, Homo sapiens
ggctctgcagtttctctttattcttcatgatgtttccttcgtaggtgttgactgcgatattgacgttcccaaaaccatccagatggtgcggtctcagaggwcagggatggtccagacagaagcacagtaccgatttatctatatggcggtccagcattatattgaaacactacagcgcaggattgaagaagagcaggtacc

SEQ ID NO: 152039 - DNA, 201 bp, Homo sapiens
gcagtttctctttattcttcatgatgtttccttcgtaggtgttgactgcgatattgacgttcccaaaaccatccagatggtgcggtctcagaggtcagggrtggtccagacagaagcacagtaccgatttatctatatggcggtccagcattatattgaaacactacagcgcaggattgaagaagagcaggtaccagcctg

SEQ ID NO: 152040 - DNA, 201 bp, Homo sapiens
tctccggacctcgcgatctgcccacctcagcctcccaaagtgctgggattaaaggcatgagccaccatgcccggccactgctttttttgtttgtttgtttktttgagatagagtctcactttgttgcccaggctggcatgcaatggtgcgatcttggcacactgcaacctctgccttccaggttcaagcgattttcctgtg

SEQ ID NO: 152041 - DNA, 201 bp, Homo sapiens
aggaatacataaaggtaggattaaatgtttcttcttaatttattatagcttctatatgtttgttaatatgtatatgtatatgcttaaaaatatactttaadtaaattaaagtaattgtgatatacttttaatagtggaacttggaaaattatttttaatagttgatctgattctaagttagaagagtaaataattgattca

SEQ ID NO: 152042 - DNA, 201 bp, Homo sapiens
aaatatacttcttttgggctcagttgttggcaggattgttgacttacaaagttgttcaagagacaggtgcttttttttttttttttttttttttttttggkcaggcgctattttttcagcttgcataagagcagattaggaaaatctcaagcagggtgggtattagacctcatcctacagctaaaaattctgaaagcttaa

SEQ ID NO: 152043 - DNA, 201 bp, Homo sapiens
ggcaggattgttgacttacaaagttgttcaagagacaggtgcttttttttttttttttttttttttttttggtcaggcgctattttttcagcttgcataaragcagattaggaaaatctcaagcagggtgggtattagacctcatcctacagctaaaaattctgaaagcttaaatttctgtcctttctctgccttgtcccc

SEQ ID NO: 152044 - DNA, 201 bp, Homo sapiens
ggataacacattgtatttagaaaatattttttaaaaattcagaaccatttgacagtaagttacagacaccatgacacttcatcttcccataggttatcacrcaactcctaagaacttggacattctcctatataatcacagtgttgttattatgcccaagaaatttaacatgatacaataatattaggtaataagcttttc

SEQ ID NO: 152045 - DNA, 201 bp, Homo sapiens; identical to SEQ ID NO: 28268

SEQ ID NO: 152046 - DNA, 201 bp, Homo sapiens
catgagaaaacttgaatggatgaggattcgcttcttacggatgagcaaaaaaagtagtttcttgagatggagtctacttctggtaaaggtgcagtgaacaytgttgaaatgacaaagattttgaatatcacataaactttagttgataaagcagtagcaggttttgagaggattcactccaaattttttttttttttttga

SEQ ID NO: 152047 - DNA, 201 bp, Homo sapiens
ttctcaagaacctcaatatatttagtcatttagtctattaaaaatttcagaattgccaatccaattctgttagcaataaataagtacagtatttggttttktttgttttgcaattctttgtgtccttagaacatatttctctaagggatatagtcagagcactatttaaatatttcctgaattcttttttgtatgtggttg

SEQ ID NO: 152048 - DNA, 201 bp, Homo sapiens
tgtccaggtcgtcagatgaatgtgttgtggctctgtgtgaccagtggttagtctcttatagcaagaaaattcccctagtcaatttgctcacctttgacttwaaaaaaaacatatcaatttgtccactcccaggtacttggattatggagaagagaattggaagaaacagacatctcagtgcttgaagaacctggaaacgta

SEQ ID NO: 152049 - DNA, 201 bp, Homo sapiens
cactttatcggatgaaattcagttttcaccgctctaaaattagtgtaatatcttttcctttccgtattttgaattcttttttgtttttatctggtcatggycaacctagttaattttatttggctcatttggtttatttatattactgttattaatgattgatcactgactctctatttcagatgtcaaaatccacaggca

SEQ ID NO: 152050 - DNA, 201 bp, Homo sapiens
gtggaagcctcttatgctgattttcattttgttttatatggcagatagatgccagatttcattatagaaaatgataaacatgactatataaataacaatastatgagacatctaaaacgaatgttaaataactgattacagatttcatttaatatttatatggaaaataataaaattgcacagaccatttcatgttaactg

SEQ ID NO: 152051 - DNA, 201 bp, Homo sapiens
ctttgtaaatgttatagcccccttcttaaaaatgtggattctatagatgaaatgtctctcaggttcctcatgcgttactttttatttttcaggcactcacytgccttgggatgagcagtggctgattgaatcactttctgactccactatttacatggcattttacacagttgcacacctattgcaggggggtaacttgca

SEQ ID NO: 152052 - DNA, 201 bp, Homo sapiens
ctcagcctcccgaatattttttattttttttgagacagaggtttgctcttgttgcccaggctggaatgcaatggtgtgatctcagctcactgcaacctccrcctcctgggttcaagcgattctcctgcctcagcctcccgagtagctgggattacaggtgtgcaccactacgcctggctaatttagtatttttagtagaga

SEQ ID NO: 152053 - DNA, 201 bp, Homo sapiens
gtgatctcagctcactgcaacctccgcctcctgggttcaagcgattctcctgcctcagcctcccgagtagctgggattacaggtgtgcaccactacgcctrgctaatttagtatttttagtagagacggggtttaaccgtgttagccaggctggtctcaaactcctgacctcaggtgatccacccgccttggcctcccaaa

SEQ ID NO: 152054 - DNA, 201 bp, Homo sapiens
accttgcctggctaattttgtttattttttgtagagacgaggtctcactttgttgcccaggctggtctcaaactcctggactcaagcgatcctcctgtctyggcctcccaaagtactcggattacaggtatgagccaccgtgcctggccctagtatttttctctattgtttacaatgcatttgtaggcaaattggtatctc

SEQ ID NO: 152055 - DNA, 201 bp, Homo sapiens
tggcatgatctcagctcattgcaacctctgcctctcaggttcaatgatcaggcgattcttgattctcatgcttaaccactagagtagctgggattaccagygcacgccatcacgcccggctagtttttagtagagacagggtttcaccatgttgcccaggctggtctcgaactcctggcctcaagcagtccaccagccttg

SEQ ID NO: 152056 - DNA, 201 bp, Homo sapiens
atttttttgagagggagtcttgctttgtcgcctaggctggagtgcagtggcgcgatcttggcttaccgcaacctccacctcccaggttcaagcaactgtcygcctcagcctccccagcagctgggatcacaggcgccagccaccacacccggctaatatttgtatttttagtagagatggggcttcaccctcctggccagg

SEQ ID NO: 152057 - DNA, 201 bp, Homo sapiens
tagctgggattaccagcgcacgccatcacgcccggctagtttttagtagagacagggtttcaccatgttgcccaggctggtctcgaactcctggcctcaarcagtccaccagccttggcctcccaaagtgttgggattacaggtgtgagccaccacgcctgacctagtatattatctttactcaagtattttagctcaaat

SEQ ID NO: 152058 - DNA, 201 bp, Homo sapiens
tttttttgagagggagtcttgctttgtcgcctaggctggagtgcagtggcgcgatcttggcttaccgcaacctccacctcccaggttcaagcaactgtctrcctcagcctccccagcagctgggatcacaggcgccagccaccacacccggctaatatttgtatttttagtagagatggggcttcaccctcctggccaggc

SEQ ID NO: 152059 - DNA, 201 bp, Homo sapiens
atttatttttgagatggagtcttgctttgtcaccaggctggagtgcagtggtgtgatctcagctcactgcaacctctgcctcctgggttcaagtgattctyctgcctcagcctcccgagtagctgggactacaggcacgcaccaccacgcccagctaatttttgtatttttagtagacacgggatttcaccatattggcca

SEQ ID NO: 152060 - DNA, 201 bp, Homo sapiens
ggtctaagtgattactaagtgattttaatgtcttttggttaccttgtgtatttatgtctgtattacagttaggtaataactgattctgttttactaaaaakaaaaatgtacagccattgtgcacttatgacatatgtaagatgccggcataaaataataaacagttgtattgtattttgatcatttttgcaaatatcttca

SEQ ID NO: 152061 - DNA, 201 bp, Homo sapiens
aagcaactgtctgcctcagcctccccagcagctgggatcacaggcgccagccaccacacccggctaatatttgtatttttagtagagatggggcttcaccmtcctggccaggctggtcttgaactcctggcctcatgatccacccgccttggcctcccaaagtgctgggattacgggcgtgagccactgcgcccagccttc

SEQ ID NO: 152062 - DNA, 201 bp, Homo sapiens
gccagccaccacacccggctaatatttgtatttttagtagagatggggcttcaccctcctggccaggctggtcttgaactcctggcctcatgatccacccrccttggcctcccaaagtgctgggattacgggcgtgagccactgcgcccagccttcacatatatttttaagatctttttatatccatacgtgtagccccac

SEQ ID NO: 152063 - DNA, 201 bp, Homo sapiens
agttttgcttttgtcgtccaggctgcagtgcaatggtgtgatcttggctaactgcaacctccttctcctgggttcaagcgattctcctgcctcaacctccygagtagctgggattacaggcacccgccaccacacctggctaatttttgtatttttagtagagacgaggtttccccgtgttggctaggctgttctggaact

SEQ ID NO: 152064 - DNA, 201 bp, Homo sapiens
gccaccacacccggctaatatttgtatttttagtagagatggggcttcaccctcctggccaggctggtcttgaactcctggcctcatgatccacccgcctyggcctcccaaagtgctgggattacgggcgtgagccactgcgcccagccttcacatatatttttaagatctttttatatccatacgtgtagccccacctaa

SEQ ID NO: 152065 - DNA, 201 bp, Homo sapiens
taaacagggtttcaccatgttgggcaggctggtctcgaactcctgaccttaggtgatccgcctgccttggcttcccacagtgctgagattacaggcttgasccactatgccctgctgtttttcactttttattttgtggagcacacattgcatgtaattatccattcttttcactgtcttttagttgtttgtcgtgatatt

SEQ ID NO: 152066 - DNA, 201 bp, Homo sapiens
cagtttacctgagatcgggagtttcagaccagcctgaccaacatggagaaaccctgtctctattaaaagtacaaaattagccgggcgtggtggcgcatgcytgtaatcccagctactcaggaggctgaggcagtagaattgcttgaatccaagaggcggaggttgcactgagccgagatcgcgccattgcattctatcttg

SEQ ID NO: 152067 - DNA, 201 bp, Homo sapiens
cagctatacattgatttgagagcttaatatgagaatgtattctatttccaaatttctaatttttgtttttatcatgtcctttgcctaaaagcattttcagraattgtctttttcgtgccctctaggaatctctatggagtgaatttcttgacaagatatttcaaattagttcatattattatgcagtaaacttcaaagatt

SEQ ID NO: 152068 - DNA, 201 bp, Homo sapiens
ggacaccaaagccaaagacggaactgtatccaaataatatagttagtctgtttcttacaagatatataagcaattatgaaaccactttatgtatatattasgattgaataaataagtaaacaggtagataattagaacctctgcctcacagagctcactatcagaaaaagaagctataaataagtaaagagaaaatgctag

SEQ ID NO: 152069 - DNA, 201 bp, Homo sapiens
ttatttttattttttttttgaaatggagtctcattctttcccaggctggagtgcagtggtgcctcccaagttcaagtgattctcccacttcagcttcctgwgtagctgggactacaggtgtgcgccaccatgcgctgctaatttttgtattttttggtatagttgtggtttcaccatgttggccagactggtcttgaacgc

SEQ ID NO: 152070 - DNA, 201 bp, Homo sapiens
accttggcctcccagagtgctgggattacaggtgtgagccaatgcacctggccatattttttattttttgagacagggactcactctatcaaccaggctgyagtgcagtagtgcaatcatagctcactgcagccagccttgatctcctgggttcaagtgatcctctggcctcagtgttcccatgtcctgctcatggtaatt

SEQ ID NO: 152071 - DNA, 201 bp, Homo sapiens
ggaagattgattgagcccagtaggtcaaggctgcggtgagctggtgcttgcaccattatgctccagcctgggtggcagagggagaccctctctctctcacrcagacacacacacataaatacagtgaaatttcatattacccatgaccgtagggtaggagatatgactaggcttcatgaggccctacatacttttgccttt

SEQ ID NO: 152072 - DNA, 201 bp, Homo sapiens
gcgattctcctgcctcagcctcccaagtagctgggattacagatgcgtgccaccttgcctagctaatttttgtatttttagtagagatggggtttcaccaygttggccaggcttgtctctaactcctgacctcaggtgatcctctcacctcggcctcccaaagtgctgggattacaggcgtgagccaccgtgtccagcctg

SEQ ID NO: 152073 - DNA, 201 bp, Homo sapiens
gagtgtttgaggtcaatgcatctaatttagagaaacagaccaggtgagtaatagtttgtgaagttctgcacattgtatttctatatatatatatatatatwtttttttttttttttttttttttttgagacggagtcttgctctgtcgcccaggctggagtgcagtggcgcaatctcggctcactgcaagctccgcctccc

SEQ ID NO: 152074 - DNA, 201 bp, Homo sapiens
agagaaacagaccaggtgagtaatagtttgtgaagttctgcacattgtatttctatatatatatatatatatatttttttttttttttttttttttttgaracggagtcttgctctgtcgcccaggctggagtgcagtggcgcaatctcggctcactgcaagctccgcctcccaggttcatgccattctcctgcctcagcc

SEQ ID NO: 152075 - DNA, 201 bp, Homo sapiens
cacattgtatttctatatatatatatatatatatttttttttttttttttttttttttgagacggagtcttgctctgtcgcccaggctggagtgcagtggygcaatctcggctcactgcaagctccgcctcccaggttcatgccattctcctgcctcagcctcccgagcagctgggactacaggcacccaccaccatgccc

SEQ ID NO: 152076 - DNA, 201 bp, Homo sapiens
ctcagcctcccgagcagctgggactacaggcacccaccaccatgcccagctaattttttgtatttttagtagagatgatgtttcactgtgttagccagggkggtctcgatcttctgacctcgtgatccacccgcctcggcctcccaaagtcctgggattacaggcgtgagccaccacgcccggccctgtgcattgtatttc

SEQ ID NO: 152077 - DNA, 201 bp, Homo sapiens
ctgcatctcaaaaaaagggaaaaaagagaaaatagttgtagctttaaacaaatggcagctgatgtaaattgcattatgtaacatcagacttagcctgtgcyctaatattgaaaggtaataaaagatgttcctttaagataatctgtggccgggtgcggtggctcacgcccgttaattgcagcactttgggatgccagggcg

SEQ ID NO: 152078 - DNA, 201 bp, Homo sapiens
tgttagccagggtggtctcgatcttctgacctcgtgatccacccgcctcggcctcccaaagtcctgggattacaggcgtgagccaccacgcccggccctgygcattgtatttctaaaaccgttggctttatagtacagaaacagcttggtggaacccataaggtagattgtatttataatgcctgaaacagggtgaaggag

SEQ ID NO: 152079 - DNA, 201 bp, Homo sapiens
ccaacttggccaggctagtcttgagctcctggcctcaagtgatctgcctgtctcggcctcccaaagtgctgggatcacagggatgagacaccggccctgcytggatgggattattatgatgttatagcacataaaaggatgtatttctgtattgaaaattgtattatattatgttaaatctacctctgttttaaatgtact

SEQ ID NO: 152080 - DNA, 201 bp, Homo sapiens
cattttggctattaggaaaatctggagaagatggggcctcgtattctggatttgcaattagaatttgatgaaaaggctgtgcttatggagaatatagtctrtctgactaattcgcttgaggtaagagggccagggattgtaataaccagttaactgtagttaaaccataatccagctcttttattttataataaacctttt

SEQ ID NO: 152081 - DNA, 201 bp, Homo sapiens
gtgccagttgtattgagggtaattatgatctgggtccgggaggaactgaactaaaactatcatttcattccacaaaggccactgagtaaactatctgatgrtaataaatttgaatcactcacaacccatgccatatgtgaactaacaacttggaagtgaaagccttcatttctcgttatcagtccctagggacttagaatc

SEQ ID NO: 152082 - DNA, 201 bp, Homo sapiens
ctgaactaaaactatcatttcattccacaaaggccactgagtaaactatctgatggtaataaatttgaatcactcacaacccatgccatatgtgaactaayaacttggaagtgaaagccttcatttctcgttatcagtccctagggacttagaatcactctcatcttttctctaagagccttaaatcttatgtagttgcag

SEQ ID NO: 152083 - DNA, 201 bp, Homo sapiens
cttccttttcttaggccaataacggaaaactgcctgacaacaaagtcattgctagtgaactaggcagtatgccagaactgaagaaatacatgaagaaagtyatgccatttgttgccatgattaaggtaagctgtggaccttatgcagctgtgaccacatgagcaatggttagatgggacaatagaaggatggggaaaagcc

SEQ ID NO: 152084 - DNA, 201 bp, Homo sapiens
acaaaaaattagccgggcgtggtggtgggcgcctgtattcccagctactcgggaggctgaggcatcagaatggcgtgaaccctggaggtggagcttgcagygagcccagatcacgccactgcactccagcctgggcaacagagcgagactctgtctcaaaaaaaaaaaaaaattatctttctgactttcctatttcctttt

SEQ ID NO: 152085 - DNA, 201 bp, Homo sapiens
tcactaatgtccttttctcttccaatgtccaatccaggatcccacattgcagttagttgtcatgtgtccttactatgtttccttaatcttttctgtctttygttttcttctatgacctttatacttttaacgaatacgggtcagataattatagataatgcctcagtttgagtttgtttgatgctttctcatcgttagatt

SEQ ID NO: 152086 - DNA, 201 bp, Homo sapiens
gactattaggtaatttgtcgttctcaagcgttagggagtatatgatactgatatgtcttattattggtgatgttaacattgatcatttggttaagatggcrtctgccaggtttttctcctgtaaagatttcatttttttttaataattaatatatattttgggagagatcttttgaggccatggaaataatactgtgtttc

SEQ ID NO: 152087 - DNA, 201 bp, Homo sapiens
tttgtatttttagtagagacggggtttcactatgttggccaggatggtctcaaactgacctcatgatccgcccacctcagcctcccagagtgctgggattrcagatgtgagccaccatgcccagctaacaccttcaattttaagaagagctgtgtgttctggagacattgctcatagccagcaaaaatggccttggaccac

SEQ ID NO: 152088 - DNA, 201 bp, Homo sapiens
agcaaaaatggccttggaccacagccttccagccatatttccttttagaagtcctgctcccagcaggcctccataggatccaagatgatgggaagagctawttttcttagtaagttgagaaaatgactcggtgctttttgttttatactgtgactggccactaaattagtagaatgatagaattttggagtctgtaagatt

SEQ ID NO: 152089 - DNA, 201 bp, Homo sapiens
tctttttaaatatttgctcattaattttagcattcatcagtggatcttgcctacaacaattattactctagtcttctaatcatgattttccattttcctckttctttttacatttattatctataattcctctgaaaagaagagctgtcctttctcccccacttacttaatctgtcctttctatgtcatatggattcatgg

SEQ ID NO: 152090 - DNA, 201 bp, Homo sapiens
aatatgggtgatttttttaaaacagactgcatagtactttatcttattaatcaatatcctcagtaggaggttatgcaaacttgacagacccctcacttgcycctatgatacttctgtgcaaattagagaagggcacccctacttgacttaaaaaaaaaagtacaaaattatttattcctcattaataaaaatggtaacaaa

SEQ ID NO: 152091 - DNA, 201 bp, Homo sapiens
agccaataccattgagctttttgttttttaagagatggagtctcactatgttgctggtcttcagctctggggctcaagctgtcttctcacctcagtctccygagtagctggaactataggcttatacctctgtgcctggctattgggttgtttttgagtgtgtgtgtgtggttgttaacaacaccgtaatttgttgtcaaa

SEQ ID NO: 152092 - DNA, 201 bp, Homo sapiens
tttttgagtgtgtgtgtgtggttgttaacaacaccgtaatttgttgtcaaattgttcttttttattagaataaagctagaataaataaattgttctagctktggccattgggagtttttttagcttggctcctgtgtccattagacattccctcatcttcctttgttcaaagcaattgctttctttatggtgtcacaagct

SEQ ID NO: 152093 - DNA, 201 bp, Homo sapiens
aattagctgggcctggttgtgggcgcctgtaatcccagctgcaggctgaggcaggagaatcgcttgaacccgagaggcagaggttacagtgatttgagaaygtgccattgcactcaggccttgcgcgacaagagtgaaactgcatctcaaaaaaagggaaaaaagagaaaatagttgtagctttaaacaaatggcagctga

SEQ ID NO: 152094 - DNA, 201 bp, Homo sapiens
ttgtattttccgtgattcaaccaaggaatcaaccacttctccaaggtttcttttattgaagaatggtgttcagaaactatggcctgaatgctgggtgtgcycattgcctgggggtatcactgcttctaggcactctcagtggacagagcaaggaaatatatttatgtctgctaagccatgcatacacatctgtttttattt

SEQ ID NO: 152095 - DNA, 201 bp, Homo sapiens
aaggtgcttgagccatacccatctaaattaaggtaggtttgccagagtaattgctttatcatttctgaaccatcagatagttgttacagagttgacatgtytttacatcaatatttgtttttttttctcagtggcctgaaaggtaaaaatattttcttggtggctgctactctcagacctgagaccatgtttgggcagaca

SEQ ID NO: 152096 - DNA, 201 bp, Homo sapiens
tcatattgatacccctggctccattttagcaccatgggtctcattctagcattttcccttggcttatttgtgacttcttactacaacagtgagaaacttgrctctcattacctatagtatatttctttatttgttccatcctagactactagtagtttcagaattgccaacctatacccctgggagaaacaattttactga

SEQ ID NO: 152097 - DNA, 201 bp, Homo sapiens
tctgtttccctttggcctgcactgtactggaatgcctattaaggtaagatcgctaataggattggtttctactctttttagttggagcaaatagtaatacscaattcaagagcttaaaaggatttttaagtattgctgcattaaagtatgaaatgagttgaatttattatagtgaaaattaatttaaaaataaacaacatg

SEQ ID NO: 152098 - DNA, 201 bp, Homo sapiens; identical to SEQ ID NO: 28261

SEQ ID NO: 152099 - DNA, 201 bp, Homo sapiens
gtacagtgtttgtgtgtaattctttttgtctttagaatctaatcacactgttttccaaaactgcctagatcagctcctttcttccctcccccttgagtggktatatcatatatttgtaatgcagttagatagatttgtcacagtctgcattcctcaggttccttcagcatcgtggttgaattttttaaaaatttacatacc

SEQ ID NO: 152100 - DNA, 201 bp, Homo sapiens; identical to SEQ ID NO: 28265

SEQ ID NO: 152101 - DNA, 201 bp, Homo sapiens
aagactagaaacttaaaaatgtgttaaaaccaagatactgcaatttttccctttatttttattttaaagaaggtgagggaaatggtaaataatttcaaatkttataggccgcaaaagataagtaccgtgaattggctgtggaagggatgcacagagaacttgtgttccggtttattgaagttcagacacttctcctcgctc

SEQ ID NO: 152102 - DNA, 201 bp, Homo sapiens
ctccttagtagctgggattacaggcatgtgccaccacgcccagctaatttttgtatttttagtagagacggggttttaccatgttggccaggatggtctcratttcctgacctcgtgatccgcccacctcagcctcccaaagtgccgggattacaggcataagccaccgtgcctagcctttttctttctttctttttttag

SEQ ID NO: 152103 - DNA, 201 bp, Homo sapiens
ccaccacacccaggtaatttttctatttttagtagaaatggggtcttgttatgttgctgaggctggtcccaactcctgggctcaagtgatctgcccacccyggcctcccaaagtgccgggattataggcatgggccactgcacccagcattgaaaaaatttcttttgtagaaatgaagtttcactgtcttgcccaggctag

SEQ ID NO: 152104 - DNA, 201 bp, Homo sapiens
ttctaatggatatatatatatatatatggatatatacatatatggatatatatatatatggatatatacatatatggatatatatatatatggatatatayatatatatatatatatatatatatggatatatatatatatatatggatatatatatatatatttgagacagagttttgctgttgttgcccaggctggagt

SEQ ID NO: 152105 - DNA, 201 bp, Homo sapiens
tccacgttaggctagtcttgaaatcccaacctcaggtgatccgcccgcctccgcctcccaaagtgctgggattagaggtgtgagccaccaggccccagcctttttttttttttttttttttttaagagaaaaagaaattgctgtaatatagtctctggtgttatacttgaagctataatttgaagcttctattttcttcta

SEQ ID NO: 152106 - DNA, 201 bp, Homo sapiens
ccacgttaggctagtcttgaaatcccaacctcaggtgatccgcccgcctccgcctcccaaagtgctgggattagaggtgtgagccaccaggccccagcctttttttttttttttttttttttaagagaaaaagaaattgctgtaatatagtctctggtgttatacttgaagctataatttgaagcttctattttcttctag

SEQ ID NO: 152107 - DNA, 201 bp, Homo sapiens
cacgttaggctagtcttgaaatcccaacctcaggtgatccgcccgcctccgcctcccaaagtgctgggattagaggtgtgagccaccaggccccagcctttttttttttttttttttttttaagagaaaaagaaattgctgtaatatagtctctggtgttatacttgaagctataatttgaagcttctattttcttctaga

SEQ ID NO: 152108 - DNA, 201 bp, Homo sapiens
gcagtggcatgatctcagctcattgcaacctctgcctctcaggttcaatgatcaggcgattcttgattctcatgcttaaccactagagtagctgggattaycagcgcacgccatcacgcccggctagtttttagtagagacagggtttcaccatgttgcccaggctggtctcgaactcctggcctcaagcagtccaccagc

SEQ ID NO: 152109 - DNA, 201 bp, Homo sapiens
tctggttttgtttggtttgctgccaggagtcatggtcgttctttgctttgtatacataagcacatttcttgcccacatagaattctgtttcatcttgagcrtaaacagtttcacttttttttttttttttttgagatagagtctcgccctgttgcctgggctggtatgcaatgacgcaatctcggctcgctgcaacctcca

SEQ ID NO: 152110 - DNA, 201 bp, Homo sapiens
aaactagagttgaaaggattcctttatataataggattaggaaatttaaatcctatttctttttattctccaacattttattttattttactttattttattttttttttgagacggagttttgcttttgtcgtccaggctgcagtgcaatggtgtgatcttggctaactgcaacctccttctcctgggttcaagcgattc

SEQ ID NO: 152111 - DNA, 201 bp, Homo sapiens
tcccatggggcccgagttacctttccccagattactctggttttgtttggtttgctgccaggagtcatggtcgttctttgctttgtatacataagcacatytcttgcccacatagaattctgtttcatcttgagcataaacagtttcacttttttttttttttttttgagatagagtctcgccctgttgcctgggctggta

SEQ ID NO: 152112 - DNA, 201 bp, Homo sapiens
ctccaagaaattcaacattgatgttatattatcgtcttcatctaatctgtagtcaaatttctgtagactcaaaatgtcctttccatctgtttttccccccttttttttttttgagacggaatcttgctctgtcactcagtctggagtgcagtggtgagatcttggcttgctgcaacatctgcctcccaagttcaagtgatt

SEQ ID NO: 152113 - DNA, 201 bp, Homo sapiens
atgagttccctctttttttttttttttttttttgcaaccctatagtgttccattgtagggatatcctacagtttaattgatggacatttaggttctttttytcaatattttagaatggaagattttggtagtactgagagatgagaattgaaaaagtaaagttttattagtgataaacttgtaagaacctagtttcaaaac

SEQ ID NO: 152114 - DNA, 201 bp, Homo sapiens
tgaagtacagtggcacagtctcggctcactgcaacctccgcctcccggttcaagtgattctcctgcctcagcctccagggtagctgggattacgggcgctygccaccatgcccggctaattttcgtatttttagtagagatggggtttcaccacattggccaggctggtctcgaagtcctgacctcgtgatctgcctgcct

SEQ ID NO: 152115 - DNA, 201 bp, Homo sapiens
ttcatttgacctgttaaatgcaggaataattctagaccattagaattggaaagaaccttctctttagagcagagcgccccaaggttccagcattagttgtrgtaacattctgactagagtctgtttcttcagagtaatccttctgtccttttccctctttacccagacatgtctacttttccctctagttcctcaagtagc

SEQ ID NO: 152116 - DNA, 201 bp, Homo sapiens
gtaaagttttattagtgataaacttgtaagaacctagtttcaaaactgagaaaaattcatatgcatttgtacacataaggcaccagtgtgtattctcatgyattaaaatgtattttgctacctctaaatgaggctgaaatgttgataagaaaaccacaatgaaatgtgtgtctttatccccagtttatcattttctatctc

SEQ ID NO: 152117 - DNA, 201 bp, Homo sapiens
cgggcgcttgccaccatgcccggctaattttcgtatttttagtagagatggggtttcaccacattggccaggctggtctcgaagtcctgacctcgtgatcygcctgcctcggcctcccaaagtgctgatattacaggtgtgagctactgtgccaggcccaaaatttcctctttgtggtgtataattctgtgagtttgaaaa

SEQ ID NO: 152118 - DNA, 201 bp, Homo sapiens
aatgatgataaaagcaacacttatgtagcacttatatattaatttacttaattctgaaaataaccccattctgaagtaggcactcttatctccaatttacrgatgaggaaatggaggcacaaagagattattaactgatttacttgagattagccagatagttagccagtgggaactggaattcaaactaggtagcctggc

SEQ ID NO: 152119 - DNA, 201 bp, Homo sapiens
cattaactcaacatgcctgagaagaaacacatattggtgcttagtggatgcaaatcaatatggatggttcgaatattttaacatcacggttagggatgctrctttttggtgattttaatttttgttgttgatccaggacagtcctttaaagcatttgttaatttatatatgggctttgcaaggtatccaactggacacata

SEQ ID NO: 152120 - DNA, 201 bp, Homo sapiens
ttttcgtatttttagtagagatggggtttcaccacattggccaggctggtctcgaagtcctgacctcgtgatctgcctgcctcggcctcccaaagtgctgrtattacaggtgtgagctactgtgccaggcccaaaatttcctctttgtggtgtataattctgtgagtttgaaaatgcctggagtcatgtttctaccagcac

SEQ ID NO: 152121 - DNA, 201 bp, Homo sapiens
ggatttggtgataaaagtatgagctcatgatttttattttgtgtatagatatgtagatataaaactaaacagctgggtgtggtggctcacacttgtaatcscagcactttgggaggctgaggtgggcagtttacctgagatcgggagtttcagaccagcctgaccaacatggagaaaccctgtctctattaaaagtacaaa

SEQ ID NO: 152122 - DNA, 201 bp, Homo sapiens
caaatcaatatggatggttcgaatattttaacatcacggttagggatgctactttttggtgattttaatttttgttgttgatccaggacagtcctttaaarcatttgttaatttatatatgggctttgcaaggtatccaactggacacataggacacagttgatactcagtaaccatatttttaatgcattgaattttttt

SEQ ID NO: 152123 - DNA, 201 bp, Homo sapiens
tttcgtatttttagtagagatggggtttcaccacattggccaggctggtctcgaagtcctgacctcgtgatctgcctgcctcggcctcccaaagtgctgakattacaggtgtgagctactgtgccaggcccaaaatttcctctttgtggtgtataattctgtgagtttgaaaatgcctggagtcatgtttctaccagcaca

SEQ ID NO: 152124 - DNA, 201 bp, Homo sapiens
tcggcctcccaaagtgctgatattacaggtgtgagctactgtgccaggcccaaaatttcctctttgtggtgtataattctgtgagtttgaaaatgcctggrgtcatgtttctaccagcacagtatcatatagagcaattctgtcatcctcaaaattttcttatgctgcctcattatagtgttacagtttaaccaaatttcc

SEQ ID NO: 152125 - DNA, 201 bp, Homo sapiens
attctttgatcgagtttatttttctccattattttcagagtaaagctgctgctaaagctggatcttctaaataccagtggggcattatgaaatcccttggyctgtctgatgaagagatagtaaaattttctgaagcagaacattggcttgattatttcccgccactggctattcaggatttaaaaagaatgggtttgaagg

SEQ ID NO: 152126 - DNA, 201 bp, Homo sapiens
tttaatatttcaaactttattattatctgttatggtgatctatattcagtgatctttgatgttattattctaattgttttgggttgccacacactgtaccyatataaggtggcaaacttaattggtaaatgtttgtgttctgactgctccactgactggcttgtttccctctttctctccttggttttccctgttttctaa

SEQ ID NO: 152127 - DNA, 201 bp, Homo sapiens
acaatgcacccaatcactcaaaagctctgatggagatatacaaggagatgaatgtttttatgcctgcaaacacaacattcattctgcagtccatgaatcamggagtcatttgacttgtaggtcttcttatttaagagatacattttataaggctataacagtcatagatggtaattcctctgatggatctgggcaaagtaa

SEQ ID NO: 152128 - DNA, 201 bp, Homo sapiens
tccgcctgccttggcctcccaaagtgctggaattacaggcatgagccaccatgcccggcccactcccagttttgaaagttctattatgagtaaaatgctaycagacagcatcgcatgctacagagaaatctttgtgaaaggaagagtcaatggatgtggcaaacttcattgttgtcttagtttaagaaattgccatagcca

SEQ ID NO: 152129 - DNA, 201 bp, Homo sapiens
caccatgcccggcccactcccagttttgaaagttctattatgagtaaaatgctatcagacagcatcgcatgctacagagaaatctttgtgaaaggaagagwcaatggatgtggcaaacttcattgttgtcttagtttaagaaattgccatagccatcacaaccttcagtagccacttctctcatcagtcagcagccgtcat

SEQ ID NO: 152130 - DNA, 201 bp, Homo sapiens
ttttaacaggtcagtagctagggattcttttcacaattgtggtaacagtttcttccaagtgtccaaaagcagacattatataaacttgtatgatagttgtrtaattttttattttaatatgactaataaaatgcttttagaaatttgaaaacaagtttttatgagaccatttagtttctgaacaggagaaatattcaacac

SEQ ID NO: 152131 - DNA, 201 bp, Homo sapiens
tgcctgtagtcccagctactcaggaggctgcagtgtgaagtagaagggtcacatgagccaggaggtcgaggttgtagtgagccatgatagtgccactgcgstccagcctgggtaacagagcaagaccctatctgtcaaaataaaaacaaaacaaaaaaaacataaaaccccaaaaaactgtcataggaagcccaaccttca

SEQ ID NO: 152132 - DNA, 201 bp, Homo sapiens
ttggcctcccaaagtgctgggagtataggcttgaaccactgcacctggccagatttgtgttctttttttttttttttttgagacggagtcttgctgtgtcscccaggctggagtggagtggctcaatcttggctcactgcgacctctgcttcctgggctcaagcagttctcctgcctcagcctcctgagtagctgggatta

SEQ ID NO: 152133 - DNA, 201 bp, Homo sapiens; identical to SEQ ID NO: 28270

SEQ ID NO: 152134 - DNA, 201 bp, Homo sapiens
aatgccatttcttagagtagtcattatttatccaaaagtatctctgagaaaagctacaattcttgcaagtttagtgtattccagggagctcaagaaagggrtaagttttagatttttcgatattctgtacaatggttaattgaagcatataaaaatgatttgagagaccatataggataatgctaaaaaatacacacaatt

SEQ ID NO: 152135 - DNA, 201 bp, Homo sapiens
tcttttgggctcagttgttggcaggattgttgacttacaaagttgttcaagagacaggtgcttttttttttttttttttttttttttttggtcaggcgctrttttttcagcttgcataagagcagattaggaaaatctcaagcagggtgggtattagacctcatcctacagctaaaaattctgaaagcttaaatttctgtc

SEQ ID NO: 152136 - DNA, 201 bp, Homo sapiens
agcactgccacatctctttagttcctaatgttggaattttgtctgagaagttcttgggaacagtattagggacatacatgttttcctattcttaatgcaasttttctccctgttaatttgagcaaattctggcgtgagggacatggatgttataaattgcaaaatagtttcaacatttaaaatggttataatatttagctg

SEQ ID NO: 152137 - DNA, 201 bp, Homo sapiens
acaaaaaaattagccgggcgtggtggctcacgcctgtaatcccagcacttggggaggccaaggcgggcggatcacgaggtcaggagatcgagaccatcctkgcaaacatggtgaaaccccatctctacaaaaaattagccgggcgtggtggtgggcgcctgtattcccagctactcgggaggctgaggcatcagaatggcg

SEQ ID NO: 152138 - DNA, 201 bp, Homo sapiens
attagccgggcgtggtggctcacgcctgtaatcccagcacttggggaggccaaggcgggcggatcacgaggtcaggagatcgagaccatcctggcaaacayggtgaaaccccatctctacaaaaaattagccgggcgtggtggtgggcgcctgtattcccagctactcgggaggctgaggcatcagaatggcgtgaaccct

SEQ ID NO: 152139 - DNA, 201 bp, Homo sapiens
aatttgtgtgacttgttttgttgtggtggtttagaaccaaacccacaatatctcccagatatgtctgtatatttgtgtgattatatgagatttggaccaaytcctaattttagaataatatatttcccctgtatgccactaaagaattagtactgttattgttagactagaacctaacattgcctatgggtctcataacaa

SEQ ID NO: 152140 - DNA, 201 bp, Homo sapiens
acagagaaatctttgtgaaaggaagagtcaatggatgtggcaaacttcattgttgtcttagtttaagaaattgccatagccatcacaaccttcagtagccrcttctctcatcagtcagcagccgtcatcgaggcaagactctccaccagcacaaagattacaactcaactgaaggctcagatgattattagcattttatag

SEQ ID NO: 152141 - DNA, 201 bp, Homo sapiens
tagaacacattattaacattattctctgaaatacttgaataaatcaagagtaagtgatttggctaaatccatggcaaagtaaaaatcaatgacaatgccakcatctgaacttatgattccctatgattgcatcattctttattaccatctttgaacatattttcaaaatcagccttcaattttgatgtaacttatctaagt

SEQ ID NO: 152142 - DNA, 201 bp, Homo sapiens
aattgtagctgccttttttttttttcatgtgaagaaagtcttggttgatattaattaaatatggatggttacacagctcatctactttattttatttttatttttttttttgtagacagttttgcccttgttgcccaggctggtgttcagtggcgcgatctcagctcactgcacctctgcctcctgagttcaaacgattct

SEQ ID NO: 152143 - DNA, 201 bp, Homo sapiens
ggcctcccaaagtcctgggattacaggcgtgagccaccacgcccggccctgtgcattgtatttctaaaaccgttggctttatagtacagaaacagcttggkggaacccataaggtagattgtatttataatgcctgaaacagggtgaaggaggtgactttcactttctgcatatgaattaggatcttttttcttatggggt

SEQ ID NO: 152144 - DNA, 201 bp, Homo sapiens
atgagtagagtaccatctcaattcttttaaattgaactattttattccttatttaatactttgattgcagtatatttacaagtcccaaaattcaaaaaacrcaaaaagatacaaaagttccccattctagaggtagttagtaatatctgtgtcttgtgtatcctggtaatatttcatgtatacacaagcgaatacacacat

SEQ ID NO: 152145 - DNA, 201 bp, Homo sapiens
tagcttgctttgctagtgtgatcaatttcctggcttctaaagataaaattttgcccttttcatgaatgtttatatgtaaccataataactttaacaaagtcctgtacaactctgttttatgtttcttgtattttcatgttagtatctatagaagaaaaacttttaaattactagcaaatgattttcatttcatgaaagatc

SEQ ID NO: 152146 - DNA, 201 bp, Homo sapiens
agagattattaactgatttacttgagattagccagatagttagccagtgggaactggaattcaaactaggtagcctggctctgggatttacatttgtgtgtgtgtgtgtgtgtgtgtgtgtgtgtgtgtgtgtgtgtgtgtgtctatctgacggagtcttgctctgtctcacaggctggagtgcggtggctcaatctcagc

SEQ ID NO: 152147 - DNA, 201 bp, Homo sapiens
gagattattaactgatttacttgagattagccagatagttagccagtgggaactggaattcaaactaggtagcctggctctgggatttacatttgtgtgtgtgtgtgtgtgtgtgtgtgtgtgtgtgtgtgtgtgtgtgtgtctatctgacggagtcttgctctgtctcacaggctggagtgcggtggctcaatctcagct

SEQ ID NO: 152148 - DNA, 201 bp, Homo sapiens
gggctgtgcacagtggctcaaggctgtaatccaaacactttgggaggctgaggtggaatacttgagcccaggggttcgagaccagcctgggcaacatagtgagaccctatttctataaaaaaattaaaaaattaactgggtgggttgacatgtgcctgtagtcccagctactcaggaggctgcagtgtgaagtagaagggt

SEQ ID NO: 152149 - DNA, 201 bp, Homo sapiens; identical to SEQ ID NO: 28269

SEQ ID NO: 152150 - DNA, 201 bp, Homo sapiens
catcacttttccataatttaaatttctcttccttggagggggtaacatttaatcgttttagtattgatctccagctcttttttttttgagatggagtttcrctcttgttacacagactggaatgcaatggcgcgatctcagctcactgcaacctccacctcctgggttcaagtgattctcctgcctcagcctcctgagtag

SEQ ID NO: 152151 - DNA, 201 bp, Homo sapiens
agtgagtcgagacggcgccaccacactccagtctgggcgacagagcgctgtctcacaacaaacaaaaaagtctaagcaactgagcattttggaagttggatgggagaagatagctaggaatgtgtaccaacatctagtatgctgactttcacttaattcccctatttttactatgatacttgtaactttgtctctagttca

SEQ ID NO: 152152 - DNA, 201 bp, Homo sapiens
gctggattttatttttaaaaattatcctagcctaaaatgtttaggatcatcatagcattaagagagatttatatttggtaagaaatcaaaaacatcgtcarttttcatgcttaaagtatttaggatcataatagcattaagaaagatttatatttggtaaaaaatcaaaaacatggtcagttttctagtggaaatttttca

SEQ ID NO: 152153 - DNA, 201 bp, Homo sapiens
gatggatagacaatagagagattgcagtaatttgttttaaggaacgcaaagatggtgttgtgttgagcagttttaaatgttctgggcattgttctcatttyactgcttaaatgagcagtatttcaaatttgtatattaaaaagcagtattttaaatttgtgtatgcagcagttttttatagctatgtataagtgcctttaa

SEQ ID NO: 152154 - DNA, 201 bp, Homo sapiens
taagctatgagcattaatataaaggagattaaatctaaaattcagctatactttccaggaaaacatttcaaaattgataaaaacaaaggcaaaattgtaaytaattgccattaatttgagagcaagcgttttctgaggttttccacaaggtgtcagtatttcctcaagtttggcatttaaagtgcttaaagtaaaaatgta

SEQ ID NO: 152155 - DNA, 201 bp, Homo sapiens
tgctttatttctcactctattgaggggaccgttaatatttgtagaaagaaatgaatttagattcatttaaagcacacttggattgtactcatcagtgatayatgatatggacatttatttttgagtagatagaaatgattctgtttttaacaggtcagtagctagggattcttttcacaattgtggtaacagtttcttcca

SEQ ID NO: 152156 - DNA, 201 bp, Homo sapiens
aaggcaaaattgtaattaattgccattaatttgagagcaagcgttttctgaggttttccacaaggtgtcagtatttcctcaagtttggcatttaaagtgcytaaagtaaaaatgtagctttacgcaatgagctgtgtaaaatatcacattgagttttatataacttggttttcagagttgtggttaaataaggataaatgg

SEQ ID NO: 152157 - DNA, 201 bp, Homo sapiens
tatggaaaataataaaattgcacagaccatttcatgttaactggagaacctagttttgttcttggtgaaatgaggtgatgattaatttgaatcacattaartgatactaataacttccattttttcccgtctgtttagctagaacacatagaagtcaagtttgcctccgaagcagaagataaaatcagggaagactgctgt

SEQ ID NO: 152158 - DNA, 201 bp, Homo sapiens
ccctgcagaagccctcacattgcaccatctatgtggcaaagaactatccaccttggcaacataccaccctgtctgttctacgtaaacactttgaggtgatkctctcagtagacttttcccccctgatggtgttgtatgctccctatgttgtttttgtttttaggatgttggcaatgtctgggagaagaaagataggcagct

SEQ ID NO: 152159 - DNA, 201 bp, Homo sapiens
agagcaagcgttttctgaggttttccacaaggtgtcagtatttcctcaagtttggcatttaaagtgcttaaagtaaaaatgtagctttacgcaatgagctrtgtaaaatatcacattgagttttatataacttggttttcagagttgtggttaaataaggataaatggctgggcatagcaatgtgttgtatttatagtctt
